United States Patent Application Publication US 2021/0170017 A1 - sequence listing, part 13

SEQ ID NO: 18253 - RNA, 1893 nt, Artificial Sequence
  mRNA product Design f-5 comprising derived and/or modified sequence from HRSV(Memphis-37)__AIY60640.1__F-del_DSCav1_mut6 (opt5)
gggagacuuucccauucuguagcagaauuugguguugccuguggucuuggucccgcggagaagcuuaccauggagcugcccauccucaagaccaacgccauuacaacgauccuggcugccgugacccuuugcuucgcgagcucccagaauauuacagaagaguuuuaccaaucuaccuguagcgcugucuccaaaggcuaucugggggcccucagaacaggaugguacaccucuguuaucacaauugaacugagcaacaucaaggagaauaaaugcaacggcaccgacgccaaggugaaacuuaucaagcaggaacuggauaaguauaaaaaugcugugacggaccuccagaugcugauguguuccaccccugccgcugggucuggaagcgccauugcguccggcaucgccgucugcaaggugcugcaccucgagggggagguuaacaaaauuaagaaugcucugcuuagcacaaacaaagccguggucucucuguccaauggagugagcguucucaccuucaaggugcuggaucuuaagaacuacaucgacaaacagcugcucccgauucugaauaagcaaucuuguuccauccccaacccugaaacagucauggaguuucagcagaaaaauaaccggcugcucgaaauuacccgcgaguucagcgugaaugcuggcgugacgacacccgucucuaccuauaugcugacaaacuccgagcuucugagccucaucaacgauaugccuaucaccaaugaccagaagaaacugauguccaacaauguucaaauugugagacagcagucuuacagcaucaugugcauuaucaaggaagaggugcuugccuaugucgugcagcugccccucuacggcguuauugauaccccuuguuggaaacugcauacauccccgcugugcacgaccaacacaaaggaagggagcaauaucugucucacccggacagaccgcggaugguacugcgauaacgcgggcucuguguccuuuuucccccaagccgagaccuguaaggucugcagcaauagaguguuuugcgacacgaugaacucucugacacuuccuagcgaaguuaaucuguguaacaucgauauuuucaaucccaaauaugacugcaagaucaugaccuccaaaaccgaugugucuagcuccgucauuacaagccucggggcuaucgugucuuguuacggaaagaccaaaugcacagccuccaacaagaauaagggcauuaucaaaacguuuagcaacgggugugacuaugucucuaauaagggaguggacaccguuuccgugggcaacacacuguacuaugucaacaaacaggagggccagagccuuuacgugaagggggagccuaucauuaauuucuaugauccccugguuuuuccguccgacgaauuugaugcuucuaucagccaagugaacgagaaaauuaaucagucccucgccuucauccggaagucugacgaacugcugcacaacgucaaugugggaaagagcaccacaaacauuaugaucaccacgauuaucaucgugauuaucguuauucuccugcuucugaucgccgucggccucuuccuguacugcaaagcucgcugaggacuaguacuggcugcaucucccuuuccucuguccuccauccuucucccaggauggugaagggggaccugguacccagugauccccaccccaggauccuaaaucaugacuuaccugcuaauaaaaacucauuggaaaagugagaagaucuaaaaaaaaaaaaaaaaaaaaaaaaaaaaaaaaaaaaaaaaaaaaaaaaaaaaaaaaaaaaaaaaugcaucccccccccccccccccccccccccccccccaaaggcucuuuucagagccaccagaauu

SEQ ID NO: 18254 - RNA, 1893 nt, Artificial Sequence
  mRNA product Design f-5 comprising derived and/or modified sequence from HRSV(Memphis-37)__AIY60640.1__F-del_DSCav1_mut6 (opt6)
gggagacuuucccauucuguagcagaauuugguguugccuguggucuuggucccgcggagaagcuuaccauggaacuaccuauacuaaaaaccaacgccauaacaacaauacuagccgcaguuacacucugcuuugcauccucacaaaacaucacagaggaauuuuaccaaucuacuugcuccgcaguaucaaaaggauaccuaggagcacuccguacaggaugguacacaucagucauaacaauugaauuaucuaacaucaaagaaaacaaauguaaugguacagacgccaaaguaaaauuaauaaaacaagaacuagacaaauacaaaaacgccguaacagaccuacaaaugcuaaugugcucaacccccgccgcaggaucuggaucagcaauugccucaggcauagcaguaugcaaaguccuacaccuagaaggagaagucaacaaaauaaaaaacgcucuccucucaaccaauaaagcaguaguaucccucucaaacggaguaucaguacuaacauucaaaguacuagaccucaaaaauuauauagacaagcaacuacucccaauauuaaauaaacaauccugcucaauacccaauccagaaacagucauggaauuucaacaaaaaaacaaccgacucuuagaaauaacaagagaauuuucagucaaugccggcgucacaaccccaguaucaacauacaugcuaacaaacucagaacuacuaucacuaaucaacgauaugcccauaaccaacgaccaaaaaaaacuaaugucaaacaauguacaaauuguaagacaacagucuuauucaauaaugugcauaauaaaagaagaagucuuagcauauguaguacaacuaccacuauacggaguaauagacacaccauguuggaaauuacacacauccccacuauguaccaccaacacaaaagaaggaucuaacauaugccuaaccagaacagaccgaggcugguauugcgacaaugcaggaucaguauccuucuuuccacaagcagaaacaugcaaagucugcucuaacagaguauucugcgauacuaugaacucacuuaccuuaccaucagaaguaaaucuauguaauaucgacauauucaaucccaaauaugauugcaaaauaaugaccucaaaaacagauguaucaucaucagucauaacaucacuaggagcaauagucagcugcuaugggaaaacaaaaugcacagcuuccaacaaaaacaaaggaaucauaaaaacauucucaaaugguugugacuacguauccaacaaaggaguagauacaguaucuguaggcaacacauuauacuauguaaauaaacaagaaggacaaagccuauacgucaaaggagaacccaucauaaauuucuaugacccauuaguuuucccaucugacgaauuugacgcuuccaucucccaaguaaaugaaaaaaucaaccaaagccucgcauucauucgcaaaucugacgaauuacuccacaacguaaacguaggaaaauccacaacaaacauuaugaucaccaccauaauaaucguaauaauagucauauuacuacuccucauagcaguaggacuauuccuauacuguaaagcuagauaaggacuaguacuggcugcaucucccuuuccucuguccuccauccuucucccaggauggugaagggggaccugguacccagugauccccaccccaggauccuaaaucaugacuuaccugcuaauaaaaacucauuggaaaagugagaagaucuaaaaaaaaaaaaaaaaaaaaaaaaaaaaaaaaaaaaaaaaaaaaaaaaaaaaaaaaaaaaaaaaugcaucccccccccccccccccccccccccccccccaaaggcucuuuucagagccaccagaauu

SEQ ID NO: 18255 - RNA, 1893 nt, Artificial Sequence
  mRNA product Design f-5 comprising derived and/or modified sequence from HRSV(Memphis-37)__AIY60640.1__F-del_DSCav1_mut6 (opt11)
gggagacuuucccauucuguagcagaauuugguguugccuguggucuuggucccgcggagaagcuuaccauggaauuaccaauccucaaaacuaacgccaucaccaccauccucgcugccgucacccucugcuucgccuccagccaaaacaucacagaagaguucuaccaaagcacaugcuccgcugucuccaaaggcuaccuuggcgcccuccgcaccggcugguacaccucaguaauuaccauugaacuaagcaacaucaaagaaaauaaaugcaacggcaccgacgccaaaguuaaacucauaaaacaggaacucgacaaauacaaaaacgccguaacagaccuccaaaugcucaugugcuccacccccgccgccggcucaggcuccgccaucgcaagcggaauagcaguuugcaaaguccuccaccuagaaggcgaggucaacaagauuaaaaacgcacuucucucaaccaacaaggccgucguaucacucucaaacggcgucuccguccucaccuucaaaguucuggaccucaaaaacuacaucgauaaacaacuacucccaauacuuaacaaacaaucaugcuccaucccaaaccccgaaaccgucauggaguuccaacagaaaaacaaccgccuacuggaaaucacacgcgaguucagcguaaacgcuggcgucacuacacccgucuccaccuacaugcucaccaauucugaacuccuaucacucauaaacgacaugcccauuaccaacgaccaaaagaaacuaaugucaaacaacguccaaaucguaagacaacaaucguauuccaucaugugcauaauuaaagaagaaguucucgccuacgugguccaacuaccccucuacggagucauagacacuccuuguuggaaacuccacaccucuccccucugcacuaccaacacaaaagaaggcuccaacaucugccucacccgaaccgacagaggcugguacugcgacaacgccggcuccgucuccuucuucccccaagccgaaaccugcaaagucugcuccaaccgcguuuucugcgacaccaugaacucccucacacuccccuccgaagucaaccuauguaacauagacauauucaacccaaaauacgacugcaaaaucaugacauccaaaaccgacgugucuuccucggucaucaccucccucggcgccaucgucucaugcuacggcaaaacuaaaugcaccgcauccaacaaaaacaaaggcauaaucaaaacauucuccaacggcugcgacuacguuucuaacaaaggcgucgauaccgucuccgucggaaacacccucuacuacguaaacaagcaagaaggccagucccuauacguaaaaggagaaccaauuaucaacuucuacgacccccuagucuuccccuccgacgaguucgacgccuccauaucccaagucaacgagaaaaucaaccaaucccuagccuucauccgcaaaucagacgaacuccuccacaacgucaacgucggaaaauccacaacuaacaucaugaucaccaccaucauuaucgucaucauaguuauacuccuccuccucauagccgucggccucuuccuauacugcaaagcucgcuaaggacuaguacuggcugcaucucccuuuccucuguccuccauccuucucccaggauggugaagggggaccugguacccagugauccccaccccaggauccuaaaucaugacuuaccugcuaauaaaaacucauuggaaaagugagaagaucuaaaaaaaaaaaaaaaaaaaaaaaaaaaaaaaaaaaaaaaaaaaaaaaaaaaaaaaaaaaaaaaaugcaucccccccccccccccccccccccccccccccaaaggcucuuuucagagccaccagaauu

SEQ ID NO: 18256 - RNA, 1889 nt, Artificial Sequence
  mRNA product Design g-1 comprising derived and/or modified sequence from HRSV(Memphis-37)__AIY60640.1__F-del_DSCav1_mut6 (opt1)
gggagacuuucccauucuguagcagaauuugguguugccuguggucuuggucccgcggagaagcuuaccauggagcugcccauccucaagaccaacgccaucaccacgauccuggccgcggugacccugugcuucgccagcucccagaacaucaccgaggaguucuaccagagcacgugcuccgccgucagcaagggcuaccucggcgcccugcgcaccgggugguacaccagcgugaucaccaucgagcuguccaacaucaaggagaacaagugcaacggcaccgacgccaaggugaagcucaucaagcaggagcuggacaaguacaagaacgcggucacggaccugcagaugcugaugugcagcaccccggccgccggcuccgggagcgcgaucgccuccggcaucgccgucugcaaggugcugcaccucgagggcgaggugaacaagaucaagaacgcccugcuguccaccaacaaggccgucgugagccucuccaacggggugagcguccugaccuucaaggugcuggaccucaagaacuacaucgacaagcagcugcugcccauccugaacaagcagagcugcuccauccccaaccccgagaccgucauggaguuccagcagaagaacaaccgccuccuggagaucacgcgggaguucagcgugaacgcgggcgugaccacccccgucuccaccuacaugcugacgaacagcgagcuccugucccugaucaacgacaugccgaucaccaacgaccagaagaagcucaugagcaacaacgugcagaucgugcgccagcaguccuacagcaucaugugcaucaucaaggaggagguccuggccuacguggugcagcugccccucuacggggucaucgacacccccugcuggaagcugcacaccagcccccugugcacgaccaacaccaaggagggcuccaacaucugccucacccggacggaccgcgggugguacugcgacaacgccggcagcguguccuucuucccgcaggccgagaccugcaaggucugcagcaaccggguguucugcgacaccaugaacucccugacccugcccagcgaggugaaccucugcaacaucgacaucuucaaccccaaguacgacugcaagaucaugacguccaagaccgacgucagcuccagcgugaucaccucccugggcgccaucgugagcugcuacgggaagaccaagugcacggcgagcaacaagaacaagggcaucaucaagaccuucuccaacgggugcgacuacgucagcaacaagggcguggacaccguguccgucggcaacacccuguacuacgugaacaagcaggagggccagagccucuacgugaagggggagcccaucaucaacuucuacgacccgcuggucuuccccuccgacgaguucgacgccagcaucucccaggugaacgagaagaucaaccagagccuggccuucauccggaaguccgacgagcuccugcacaacgugaacgucggcaagagcaccacgaacaucaugaucaccaccaucaucaucgugaucaucgugauccugcugcuccugaucgccgucgggcuguuccucuacugcaaggcccgcugaggacuaguggaagcauuuuccuggcugauuaaaagaaauuacucagcuauggucaucuguuccuguuagaaggcuaugcagcauauuauauacuaugcgcauguuaugaaaugcauaauaaaaaauuuuaaaaaaucuaaaagaucuaaaaaaaaaaaaaaaaaaaaaaaaaaaaaaaaaaaaaaaaaaaaaaaaaaaaaaaaaaaaaaaaugcaucccccccccccccccccccccccccccccccaaaggcucuuuucagagccaccagaauu

SEQ ID NO: 18257 - RNA, 1889 nt, Artificial Sequence
  mRNA product Design g-1 comprising derived and/or modified sequence from HRSV(Memphis-37)__AIY60640.1__F-del_DSCav1_mut6 (opt1)
gggagacuuucccauucuguagcagaauuugguguugccuguggucuuggucccgcggagaagcuuaccauggagcugcccauccucaagaccaacgccaucaccacgauccuggccgcggugacccugugcuucgccagcucccagaacaucaccgaggaguucuaccagagcacgugcuccgccgucagcaagggcuaccucggggcccugcgcaccggcugguacaccuccgugaucaccaucgagcugagcaacaucaaggagaacaagugcaacgggaccgacgccaaggugaagcucaucaagcaggagcuggacaaguacaagaacgcggucacggaccugcagaugcucaugugcuccaccccggccgccggcagcggguccgccaucgcgagcggcaucgccgugugcaaggugcugcaccuggagggcgaggucaacaagaucaagaacgcccuccuguccaccaacaaggccguggugagccuguccaacggggucagcgugcucaccuucaaggugcuggaccugaagaacuacaucgacaagcagcuccugcccauccugaacaagcaguccugcagcauccccaaccccgagacggucauggaguuccagcagaagaacaaccggcuccuggagaucacccgcgaguucuccgugaacgccggcgugaccaccccggucagcacguacaugcugaccaacuccgagcuccugagccugaucaacgacaugcccaucaccaacgaccagaagaagcucaugagcaacaacgugcagaucgugcggcagcaguccuacagcaucaugugcaucaucaaggaggagguccuggcguacguggugcagcugccccucuacggggucaucgacacccccugcuggaagcugcacacguccccgcugugcaccaccaacaccaaggagggcagcaacaucugccucacgcgcaccgaccgggggugguacugcgacaacgccggcuccgugagcuucuucccccaggccgagaccugcaaggugugcuccaaccgcgucuucugcgacaccaugaacagccugacgcugcccuccgaggugaaccucugcaacaucgacaucuucaaccccaaguacgacugcaagaucaugaccagcaagaccgacgucuccagcuccgugaucaccagccugggcgccaucguguccugcuacgggaagacgaagugcaccgccagcaacaagaacaagggcaucaucaagaccuucuccaacgggugcgacuacgucagcaacaagggcguggacaccguguccgucggcaacacgcuguacuacgugaacaagcaggaggggcagagccucuacgugaagggcgagccgaucaucaacuucuacgacccccuggucuuccccagcgacgaguucgacgcguccaucagccaggugaacgagaagaucaaccagucccuggccuucauccgcaagagcgacgagcuccugcacaacgugaacgucgggaaguccaccaccaacaucaugaucaccaccaucaucaucgugaucaucgugauccugcuccugcugaucgccgucggccucuuccuguacugcaaggcccggugaggacuaguggaagcauuuuccuggcugauuaaaagaaauuacucagcuauggucaucuguuccuguuagaaggcuaugcagcauauuauauacuaugcgcauguuaugaaaugcauaauaaaaaauuuuaaaaaaucuaaaagaucuaaaaaaaaaaaaaaaaaaaaaaaaaaaaaaaaaaaaaaaaaaaaaaaaaaaaaaaaaaaaaaaaugcaucccccccccccccccccccccccccccccccaaaggcucuuuucagagccaccagaauu

SEQ ID NO: 18258 - RNA, 1889 nt, Artificial Sequence
  mRNA product Design g-1 comprising derived and/or modified sequence from HRSV(Memphis-37)__AIY60640.1__F-del_DSCav1_mut6 (opt2)
gggagacuuucccauucuguagcagaauuugguguugccuguggucuuggucccgcggagaagcuuaccauggagcuccccauccucaagaccaacgccaucaccaccauccucgccgccgucacccucugcuucgccuccucccagaacaucaccgaggaguucuaccaguccaccugcuccgccgucuccaagggcuaccucggcgcccuccgcaccggcugguacaccuccgucaucaccaucgagcucuccaacaucaaggagaacaagugcaacggcaccgacgccaaggucaagcucaucaagcaggagcucgacaaguacaagaacgccgucaccgaccuccagaugcucaugugcuccacccccgccgccggcuccggcuccgccaucgccuccggcaucgccgucugcaagguccuccaccucgagggcgaggucaacaagaucaagaacgcccuccucuccaccaacaaggccgucgucucccucuccaacggcgucuccguccucaccuucaagguccucgaccucaagaacuacaucgacaagcagcuccuccccauccucaacaagcaguccugcuccauccccaaccccgagaccgucauggaguuccagcagaagaacaaccgccuccucgagaucacccgcgaguucuccgucaacgccggcgucaccacccccgucuccaccuacaugcucaccaacuccgagcuccucucccucaucaacgacaugcccaucaccaacgaccagaagaagcucauguccaacaacguccagaucguccgccagcaguccuacuccaucaugugcaucaucaaggaggagguccucgccuacgucguccagcucccccucuacggcgucaucgacacccccugcuggaagcuccacaccuccccccucugcaccaccaacaccaaggagggcuccaacaucugccucacccgcaccgaccgcggcugguacugcgacaacgccggcuccgucuccuucuucccccaggccgagaccugcaaggucugcuccaaccgcgucuucugcgacaccaugaacucccucacccuccccuccgaggucaaccucugcaacaucgacaucuucaaccccaaguacgacugcaagaucaugaccuccaagaccgacgucuccuccuccgucaucaccucccucggcgccaucgucuccugcuacggcaagaccaagugcaccgccuccaacaagaacaagggcaucaucaagaccuucuccaacggcugcgacuacgucuccaacaagggcgucgacaccgucuccgucggcaacacccucuacuacgucaacaagcaggagggccagucccucuacgucaagggcgagcccaucaucaacuucuacgacccccucgucuuccccuccgacgaguucgacgccuccaucucccaggucaacgagaagaucaaccagucccucgccuucauccgcaaguccgacgagcuccuccacaacgucaacgucggcaaguccaccaccaacaucaugaucaccaccaucaucaucgucaucaucgucauccuccuccuccucaucgccgucggccucuuccucuacugcaaggcccgcugaggacuaguggaagcauuuuccuggcugauuaaaagaaauuacucagcuauggucaucuguuccuguuagaaggcuaugcagcauauuauauacuaugcgcauguuaugaaaugcauaauaaaaaauuuuaaaaaaucuaaaagaucuaaaaaaaaaaaaaaaaaaaaaaaaaaaaaaaaaaaaaaaaaaaaaaaaaaaaaaaaaaaaaaaaugcaucccccccccccccccccccccccccccccccaaaggcucuuuucagagccaccagaauu

SEQ ID NO: 18259 - RNA, 1889 nt, Artificial Sequence
  mRNA product Design g-1 comprising derived and/or modified sequence from HRSV(Memphis-37)__AIY60640.1__F-del_DSCav1_mut6 (opt3)
gggagacuuucccauucuguagcagaauuugguguugccuguggucuuggucccgcggagaagcuuaccauggagcugcccauccucaagaccaacgccauuacaacuauacuugcugcagugacgcugugcuucgccagcucccagaauaucaccgaagaguuuuaccaaucuacauguucagcggucaguaaaggcuauuugggggcuuuaagaacuggaugguacaccagcguuauuacaaucgaacuguccaacauuaaggagaauaaaugcaacgguaccgacgccaaggugaaacuaaucaagcaggaacucgauaaguauaaaaaugcaguaacugaccugcagaugcuuauguguucuacuccugccgcuggcucggggucagcaauagccagcggaaucgcugugugcaagguccugcacuuggagggcgaggugaacaaaauuaagaaugcccuccugaguaccaacaaagcgguugugucccugucuaauggugucagcgugcucacguucaagguauuagaucugaagaacuacaucgacaaacagcuuuugccaauucugaauaagcaauccuguucaaucccgaaccccgaaacuguuauggaguuucagcagaaaaauaacaggcuacucgaaauaacccgggaguucagugugaaugcaggggucacaacuccugugagcaccuauaugcugacaaacucugagcuucuguccuugauuaacgauaugccaaucaccaaugaccagaagaaacucaugucaaacaaugugcaaauuguccgccagcagagcuacaguaucaugugcaucauuaaggaagagguucuggccuaugugguacaguuaccccuguacggagugauagauacgccuuguuggaaacuccauacuucuccacuuugcacaaccaacacuaaggaaggcuccaauaucugucugacacgaaccgaccguggcugguacugcgauaacgcugggagcgucucguuuuucccccaagccgagacguguaaggugugcucuaauagaguuuucugcgacaccaugaacuccuugacacuaccuucagaagugaaucuguguaacauugauaucuucaauccaaaauaugacugcaagauaaugacaaguaaaaccgaugucagcuccucugugauuacaagccucggagcaaucguaucauguuacgguaagacuaaaugcaccgcuaguaacaagaauaagggcaucauuaaaacauuuuccaacgggugugacuauguuagcaauaagggaguggacaccgucucugugggcaacacucuguacuaugucaacaaacaggagggucagucacuuuacgugaagggggagccgaucauuaauuucuaugauccccugguuuuuccuagugacgaauuugaugccagcauaucccaagugaacgagaaaaucaaucagucuuuggcguuuauuaggaagucggacgaacuccugcacaacguaaaugucggaaagagcacgacaaacaucaugaucaccacuauuauaaucgugauuaucguuauuuuacugcuacucaucgccgugggccuguuccuuuacugcaaagcacggugaggacuaguggaagcauuuuccuggcugauuaaaagaaauuacucagcuauggucaucuguuccuguuagaaggcuaugcagcauauuauauacuaugcgcauguuaugaaaugcauaauaaaaaauuuuaaaaaaucuaaaagaucuaaaaaaaaaaaaaaaaaaaaaaaaaaaaaaaaaaaaaaaaaaaaaaaaaaaaaaaaaaaaaaaaugcaucccccccccccccccccccccccccccccccaaaggcucuuuucagagccaccagaauu

SEQ ID NO: 18260 - RNA, 1889 nt, Artificial Sequence
  mRNA product Design g-1 comprising derived and/or modified sequence from HRSV(Memphis-37)__AIY60640.1__F-del_DSCav1_mut6 (opt4)
gggagacuuucccauucuguagcagaauuugguguugccuguggucuuggucccgcggagaagcuuaccauggagcugcccauccugaagaccaacgccaucaccaccauccuggccgccgugacccugugcuucgccagcagccagaacaucaccgaggaguucuaccagagcaccugcagcgccgugagcaagggcuaccugggcgcccugagaaccggcugguacaccagcgugaucaccaucgagcugagcaacaucaaggagaacaagugcaacggcaccgacgccaaggugaagcugaucaagcaggagcuggacaaguacaagaacgccgugaccgaccugcagaugcugaugugcagcacccccgccgccggcagcggcagcgccaucgccagcggcaucgccgugugcaaggugcugcaccuggagggcgaggugaacaagaucaagaacgcccugcugagcaccaacaaggccguggugagccugagcaacggcgugagcgugcugaccuucaaggugcuggaccugaagaacuacaucgacaagcagcugcugcccauccugaacaagcagagcugcagcauccccaaccccgagaccgugauggaguuccagcagaagaacaacagacugcuggagaucaccagagaguucagcgugaacgccggcgugaccacccccgugagcaccuacaugcugaccaacagcgagcugcugagccugaucaacgacaugcccaucaccaacgaccagaagaagcugaugagcaacaacgugcagaucgugagacagcagagcuacagcaucaugugcaucaucaaggaggaggugcuggccuacguggugcagcugccccuguacggcgugaucgacacccccugcuggaagcugcacaccagcccccugugcaccaccaacaccaaggagggcagcaacaucugccugaccagaaccgacagaggcugguacugcgacaacgccggcagcgugagcuucuucccccaggccgagaccugcaaggugugcagcaacagaguguucugcgacaccaugaacagccugacccugcccagcgaggugaaccugugcaacaucgacaucuucaaccccaaguacgacugcaagaucaugaccagcaagaccgacgugagcagcagcgugaucaccagccugggcgccaucgugagcugcuacggcaagaccaagugcaccgccagcaacaagaacaagggcaucaucaagaccuucagcaacggcugcgacuacgugagcaacaagggcguggacaccgugagcgugggcaacacccuguacuacgugaacaagcaggagggccagagccuguacgugaagggcgagcccaucaucaacuucuacgacccccugguguuccccagcgacgaguucgacgccagcaucagccaggugaacgagaagaucaaccagagccuggccuucaucagaaagagcgacgagcugcugcacaacgugaacgugggcaagagcaccaccaacaucaugaucaccaccaucaucaucgugaucaucgugauccugcugcugcugaucgccgugggccuguuccuguacugcaaggccagaugaggacuaguggaagcauuuuccuggcugauuaaaagaaauuacucagcuauggucaucuguuccuguuagaaggcuaugcagcauauuauauacuaugcgcauguuaugaaaugcauaauaaaaaauuuuaaaaaaucuaaaagaucuaaaaaaaaaaaaaaaaaaaaaaaaaaaaaaaaaaaaaaaaaaaaaaaaaaaaaaaaaaaaaaaaugcaucccccccccccccccccccccccccccccccaaaggcucuuuucagagccaccagaauu

SEQ ID NO: 18261 - RNA, 1889 nt, Artificial Sequence
  mRNA product Design g-1 comprising derived and/or modified sequence from HRSV(Memphis-37)__AIY60640.1__F-del_DSCav1_mut6 (opt5)
gggagacuuucccauucuguagcagaauuugguguugccuguggucuuggucccgcggagaagcuuaccauggagcugcccauccucaagaccaacgccauuacaacgauccuggcugccgugacccuuugcuucgcgagcucccagaauauuacagaagaguuuuaccaaucuaccuguagcgcugucuccaaaggcuaucugggggcccucagaacaggaugguacaccucuguuaucacaauugaacugagcaacaucaaggagaauaaaugcaacggcaccgacgccaaggugaaacuuaucaagcaggaacuggauaaguauaaaaaugcugugacggaccuccagaugcugauguguuccaccccugccgcugggucuggaagcgccauugcguccggcaucgccgucugcaaggugcugcaccucgagggggagguuaacaaaauuaagaaugcucugcuuagcacaaacaaagccguggucucucuguccaauggagugagcguucucaccuucaaggugcuggaucuuaagaacuacaucgacaaacagcugcucccgauucugaauaagcaaucuuguuccauccccaacccugaaacagucauggaguuucagcagaaaaauaaccggcugcucgaaauuacccgcgaguucagcgugaaugcuggcgugacgacacccgucucuaccuauaugcugacaaacuccgagcuucugagccucaucaacgauaugccuaucaccaaugaccagaagaaacugauguccaacaauguucaaauugugagacagcagucuuacagcaucaugugcauuaucaaggaagaggugcuugccuaugucgugcagcugccccucuacggcguuauugauaccccuuguuggaaacugcauacauccccgcugugcacgaccaacacaaaggaagggagcaauaucugucucacccggacagaccgcggaugguacugcgauaacgcgggcucuguguccuuuuucccccaagccgagaccuguaaggucugcagcaauagaguguuuugcgacacgaugaacucucugacacuuccuagcgaaguuaaucuguguaacaucgauauuuucaaucccaaauaugacugcaagaucaugaccuccaaaaccgaugugucuagcuccgucauuacaagccucggggcuaucgugucuuguuacggaaagaccaaaugcacagccuccaacaagaauaagggcauuaucaaaacguuuagcaacgggugugacuaugucucuaauaagggaguggacaccguuuccgugggcaacacacuguacuaugucaacaaacaggagggccagagccuuuacgugaagggggagccuaucauuaauuucuaugauccccugguuuuuccguccgacgaauuugaugcuucuaucagccaagugaacgagaaaauuaaucagucccucgccuucauccggaagucugacgaacugcugcacaacgucaaugugggaaagagcaccacaaacauuaugaucaccacgauuaucaucgugauuaucguuauucuccugcuucugaucgccgucggccucuuccuguacugcaaagcucgcugaggacuaguggaagcauuuuccuggcugauuaaaagaaauuacucagcuauggucaucuguuccuguuagaaggcuaugcagcauauuauauacuaugcgcauguuaugaaaugcauaauaaaaaauuuuaaaaaaucuaaaagaucuaaaaaaaaaaaaaaaaaaaaaaaaaaaaaaaaaaaaaaaaaaaaaaaaaaaaaaaaaaaaaaaaugcaucccccccccccccccccccccccccccccccaaaggcucuuuucagagccaccagaauu

SEQ ID NO: 18262 - RNA, 1889 nt, Artificial Sequence
  mRNA product Design g-1 comprising derived and/or modified sequence from HRSV(Memphis-37)__AIY60640.1__F-del_DSCav1_mut6 (opt6)
gggagacuuucccauucuguagcagaauuugguguugccuguggucuuggucccgcggagaagcuuaccauggaacuaccuauacuaaaaaccaacgccauaacaacaauacuagccgcaguuacacucugcuuugcauccucacaaaacaucacagaggaauuuuaccaaucuacuugcuccgcaguaucaaaaggauaccuaggagcacuccguacaggaugguacacaucagucauaacaauugaauuaucuaacaucaaagaaaacaaauguaaugguacagacgccaaaguaaaauuaauaaaacaagaacuagacaaauacaaaaacgccguaacagaccuacaaaugcuaaugugcucaacccccgccgcaggaucuggaucagcaauugccucaggcauagcaguaugcaaaguccuacaccuagaaggagaagucaacaaaauaaaaaacgcucuccucucaaccaauaaagcaguaguaucccucucaaacggaguaucaguacuaacauucaaaguacuagaccucaaaaauuauauagacaagcaacuacucccaauauuaaauaaacaauccugcucaauacccaauccagaaacagucauggaauuucaacaaaaaaacaaccgacucuuagaaauaacaagagaauuuucagucaaugccggcgucacaaccccaguaucaacauacaugcuaacaaacucagaacuacuaucacuaaucaacgauaugcccauaaccaacgaccaaaaaaaacuaaugucaaacaauguacaaauuguaagacaacagucuuauucaauaaugugcauaauaaaagaagaagucuuagcauauguaguacaacuaccacuauacggaguaauagacacaccauguuggaaauuacacacauccccacuauguaccaccaacacaaaagaaggaucuaacauaugccuaaccagaacagaccgaggcugguauugcgacaaugcaggaucaguauccuucuuuccacaagcagaaacaugcaaagucugcucuaacagaguauucugcgauacuaugaacucacuuaccuuaccaucagaaguaaaucuauguaauaucgacauauucaaucccaaauaugauugcaaaauaaugaccucaaaaacagauguaucaucaucagucauaacaucacuaggagcaauagucagcugcuaugggaaaacaaaaugcacagcuuccaacaaaaacaaaggaaucauaaaaacauucucaaaugguugugacuacguauccaacaaaggaguagauacaguaucuguaggcaacacauuauacuauguaaauaaacaagaaggacaaagccuauacgucaaaggagaacccaucauaaauuucuaugacccauuaguuuucccaucugacgaauuugacgcuuccaucucccaaguaaaugaaaaaaucaaccaaagccucgcauucauucgcaaaucugacgaauuacuccacaacguaaacguaggaaaauccacaacaaacauuaugaucaccaccauaauaaucguaauaauagucauauuacuacuccucauagcaguaggacuauuccuauacuguaaagcuagauaaggacuaguggaagcauuuuccuggcugauuaaaagaaauuacucagcuauggucaucuguuccuguuagaaggcuaugcagcauauuauauacuaugcgcauguuaugaaaugcauaauaaaaaauuuuaaaaaaucuaaaagaucuaaaaaaaaaaaaaaaaaaaaaaaaaaaaaaaaaaaaaaaaaaaaaaaaaaaaaaaaaaaaaaaaugcaucccccccccccccccccccccccccccccccaaaggcucuuuucagagccaccagaauu

SEQ ID NO: 18263 - RNA, 1889 nt, Artificial Sequence
  mRNA product Design g-1 comprising derived and/or modified sequence from HRSV(Memphis-37)__AIY60640.1__F-del_DSCav1_mut6 (opt11)
gggagacuuucccauucuguagcagaauuugguguugccuguggucuuggucccgcggagaagcuuaccauggaauuaccaauccucaaaacuaacgccaucaccaccauccucgcugccgucacccucugcuucgccuccagccaaaacaucacagaagaguucuaccaaagcacaugcuccgcugucuccaaaggcuaccuuggcgcccuccgcaccggcugguacaccucaguaauuaccauugaacuaagcaacaucaaagaaaauaaaugcaacggcaccgacgccaaaguuaaacucauaaaacaggaacucgacaaauacaaaaacgccguaacagaccuccaaaugcucaugugcuccacccccgccgccggcucaggcuccgccaucgcaagcggaauagcaguuugcaaaguccuccaccuagaaggcgaggucaacaagauuaaaaacgcacuucucucaaccaacaaggccgucguaucacucucaaacggcgucuccguccucaccuucaaaguucuggaccucaaaaacuacaucgauaaacaacuacucccaauacuuaacaaacaaucaugcuccaucccaaaccccgaaaccgucauggaguuccaacagaaaaacaaccgccuacuggaaaucacacgcgaguucagcguaaacgcuggcgucacuacacccgucuccaccuacaugcucaccaauucugaacuccuaucacucauaaacgacaugcccauuaccaacgaccaaaagaaacuaaugucaaacaacguccaaaucguaagacaacaaucguauuccaucaugugcauaauuaaagaagaaguucucgccuacgugguccaacuaccccucuacggagucauagacacuccuuguuggaaacuccacaccucuccccucugcacuaccaacacaaaagaaggcuccaacaucugccucacccgaaccgacagaggcugguacugcgacaacgccggcuccgucuccuucuucccccaagccgaaaccugcaaagucugcuccaaccgcguuuucugcgacaccaugaacucccucacacuccccuccgaagucaaccuauguaacauagacauauucaacccaaaauacgacugcaaaaucaugacauccaaaaccgacgugucuuccucggucaucaccucccucggcgccaucgucucaugcuacggcaaaacuaaaugcaccgcauccaacaaaaacaaaggcauaaucaaaacauucuccaacggcugcgacuacguuucuaacaaaggcgucgauaccgucuccgucggaaacacccucuacuacguaaacaagcaagaaggccagucccuauacguaaaaggagaaccaauuaucaacuucuacgacccccuagucuuccccuccgacgaguucgacgccuccauaucccaagucaacgagaaaaucaaccaaucccuagccuucauccgcaaaucagacgaacuccuccacaacgucaacgucggaaaauccacaacuaacaucaugaucaccaccaucauuaucgucaucauaguuauacuccuccuccucauagccgucggccucuuccuauacugcaaagcucgcuaaggacuaguggaagcauuuuccuggcugauuaaaagaaauuacucagcuauggucaucuguuccuguuagaaggcuaugcagcauauuauauacuaugcgcauguuaugaaaugcauaauaaaaaauuuuaaaaaaucuaaaagaucuaaaaaaaaaaaaaaaaaaaaaaaaaaaaaaaaaaaaaaaaaaaaaaaaaaaaaaaaaaaaaaaaugcaucccccccccccccccccccccccccccccccaaaggcucuuuucagagccaccagaauu

SEQ ID NO: 18264 - RNA, 1904 nt, Artificial Sequence
  mRNA product Design g-2 comprising derived and/or modified sequence from HRSV(Memphis-37)__AIY60640.1__F-del_DSCav1_mut6 (opt1)
gggagaguccgcucagccagguugcagaagcggcuuagcguguguccuaaucuucucucugcguguagguaggccugugccgcaaacaagcuuaccauggagcugcccauccucaagaccaacgccaucaccacgauccuggccgcggugacccugugcuucgccagcucccagaacaucaccgaggaguucuaccagagcacgugcuccgccgucagcaagggcuaccucggcgcccugcgcaccgggugguacaccagcgugaucaccaucgagcuguccaacaucaaggagaacaagugcaacggcaccgacgccaaggugaagcucaucaagcaggagcuggacaaguacaagaacgcggucacggaccugcagaugcugaugugcagcaccccggccgccggcuccgggagcgcgaucgccuccggcaucgccgucugcaaggugcugcaccucgagggcgaggugaacaagaucaagaacgcccugcuguccaccaacaaggccgucgugagccucuccaacggggugagcguccugaccuucaaggugcuggaccucaagaacuacaucgacaagcagcugcugcccauccugaacaagcagagcugcuccauccccaaccccgagaccgucauggaguuccagcagaagaacaaccgccuccuggagaucacgcgggaguucagcgugaacgcgggcgugaccacccccgucuccaccuacaugcugacgaacagcgagcuccugucccugaucaacgacaugccgaucaccaacgaccagaagaagcucaugagcaacaacgugcagaucgugcgccagcaguccuacagcaucaugugcaucaucaaggaggagguccuggccuacguggugcagcugccccucuacggggucaucgacacccccugcuggaagcugcacaccagcccccugugcacgaccaacaccaaggagggcuccaacaucugccucacccggacggaccgcgggugguacugcgacaacgccggcagcguguccuucuucccgcaggccgagaccugcaaggucugcagcaaccggguguucugcgacaccaugaacucccugacccugcccagcgaggugaaccucugcaacaucgacaucuucaaccccaaguacgacugcaagaucaugacguccaagaccgacgucagcuccagcgugaucaccucccugggcgccaucgugagcugcuacgggaagaccaagugcacggcgagcaacaagaacaagggcaucaucaagaccuucuccaacgggugcgacuacgucagcaacaagggcguggacaccguguccgucggcaacacccuguacuacgugaacaagcaggagggccagagccucuacgugaagggggagcccaucaucaacuucuacgacccgcuggucuuccccuccgacgaguucgacgccagcaucucccaggugaacgagaagaucaaccagagccuggccuucauccggaaguccgacgagcuccugcacaacgugaacgucggcaagagcaccacgaacaucaugaucaccaccaucaucaucgugaucaucgugauccugcugcuccugaucgccgucgggcuguuccucuacugcaaggcccgcugaggacuaguaauaaggaaacuguaugaaugucugugggcaggaagugaagagauccuucuguaaagguuuuuggaauuaugucugcugaauaauaaacuuuuuugaaauaauaaaucugguagaaaaaugagaucuaaaaaaaaaaaaaaaaaaaaaaaaaaaaaaaaaaaaaaaaaaaaaaaaaaaaaaaaaaaaaaaaugcaucccccccccccccccccccccccccccccccaaaggcucuuuucagagccaccagaauu

SEQ ID NO: 18265 - RNA, 1904 nt, Artificial Sequence
  mRNA product Design g-2 comprising derived and/or modified sequence from HRSV(Memphis-37)__AIY60640.1__F-del_DSCav1_mut6 (opt1)
gggagaguccgcucagccagguugcagaagcggcuuagcguguguccuaaucuucucucugcguguagguaggccugugccgcaaacaagcuuaccauggagcugcccauccucaagaccaacgccaucaccacgauccuggccgcggugacccugugcuucgccagcucccagaacaucaccgaggaguucuaccagagcacgugcuccgccgucagcaagggcuaccucggggcccugcgcaccggcugguacaccuccgugaucaccaucgagcugagcaacaucaaggagaacaagugcaacgggaccgacgccaaggugaagcucaucaagcaggagcuggacaaguacaagaacgcggucacggaccugcagaugcucaugugcuccaccccggccgccggcagcggguccgccaucgcgagcggcaucgccgugugcaaggugcugcaccuggagggcgaggucaacaagaucaagaacgcccuccuguccaccaacaaggccguggugagccuguccaacggggucagcgugcucaccuucaaggugcuggaccugaagaacuacaucgacaagcagcuccugcccauccugaacaagcaguccugcagcauccccaaccccgagacggucauggaguuccagcagaagaacaaccggcuccuggagaucacccgcgaguucuccgugaacgccggcgugaccaccccggucagcacguacaugcugaccaacuccgagcuccugagccugaucaacgacaugcccaucaccaacgaccagaagaagcucaugagcaacaacgugcagaucgugcggcagcaguccuacagcaucaugugcaucaucaaggaggagguccuggcguacguggugcagcugccccucuacggggucaucgacacccccugcuggaagcugcacacguccccgcugugcaccaccaacaccaaggagggcagcaacaucugccucacgcgcaccgaccgggggugguacugcgacaacgccggcuccgugagcuucuucccccaggccgagaccugcaaggugugcuccaaccgcgucuucugcgacaccaugaacagccugacgcugcccuccgaggugaaccucugcaacaucgacaucuucaaccccaaguacgacugcaagaucaugaccagcaagaccgacgucuccagcuccgugaucaccagccugggcgccaucguguccugcuacgggaagacgaagugcaccgccagcaacaagaacaagggcaucaucaagaccuucuccaacgggugcgacuacgucagcaacaagggcguggacaccguguccgucggcaacacgcuguacuacgugaacaagcaggaggggcagagccucuacgugaagggcgagccgaucaucaacuucuacgacccccuggucuuccccagcgacgaguucgacgcguccaucagccaggugaacgagaagaucaaccagucccuggccuucauccgcaagagcgacgagcuccugcacaacgugaacgucgggaaguccaccaccaacaucaugaucaccaccaucaucaucgugaucaucgugauccugcuccugcugaucgccgucggccucuuccuguacugcaaggcccggugaggacuaguaauaaggaaacuguaugaaugucugugggcaggaagugaagagauccuucuguaaagguuuuuggaauuaugucugcugaauaauaaacuuuuuugaaauaauaaaucugguagaaaaaugagaucuaaaaaaaaaaaaaaaaaaaaaaaaaaaaaaaaaaaaaaaaaaaaaaaaaaaaaaaaaaaaaaaaugcaucccccccccccccccccccccccccccccccaaaggcucuuuucagagccaccagaauu

SEQ ID NO: 18266 - RNA, 1904 nt, Artificial Sequence
  mRNA product Design g-2 comprising derived and/or modified sequence from HRSV(Memphis-37)__AIY60640.1__F-del_DSCav1_mut6 (opt2)
gggagaguccgcucagccagguugcagaagcggcuuagcguguguccuaaucuucucucugcguguagguaggccugugccgcaaacaagcuuaccauggagcuccccauccucaagaccaacgccaucaccaccauccucgccgccgucacccucugcuucgccuccucccagaacaucaccgaggaguucuaccaguccaccugcuccgccgucuccaagggcuaccucggcgcccuccgcaccggcugguacaccuccgucaucaccaucgagcucuccaacaucaaggagaacaagugcaacggcaccgacgccaaggucaagcucaucaagcaggagcucgacaaguacaagaacgccgucaccgaccuccagaugcucaugugcuccacccccgccgccggcuccggcuccgccaucgccuccggcaucgccgucugcaagguccuccaccucgagggcgaggucaacaagaucaagaacgcccuccucuccaccaacaaggccgucgucucccucuccaacggcgucuccguccucaccuucaagguccucgaccucaagaacuacaucgacaagcagcuccuccccauccucaacaagcaguccugcuccauccccaaccccgagaccgucauggaguuccagcagaagaacaaccgccuccucgagaucacccgcgaguucuccgucaacgccggcgucaccacccccgucuccaccuacaugcucaccaacuccgagcuccucucccucaucaacgacaugcccaucaccaacgaccagaagaagcucauguccaacaacguccagaucguccgccagcaguccuacuccaucaugugcaucaucaaggaggagguccucgccuacgucguccagcucccccucuacggcgucaucgacacccccugcuggaagcuccacaccuccccccucugcaccaccaacaccaaggagggcuccaacaucugccucacccgcaccgaccgcggcugguacugcgacaacgccggcuccgucuccuucuucccccaggccgagaccugcaaggucugcuccaaccgcgucuucugcgacaccaugaacucccucacccuccccuccgaggucaaccucugcaacaucgacaucuucaaccccaaguacgacugcaagaucaugaccuccaagaccgacgucuccuccuccgucaucaccucccucggcgccaucgucuccugcuacggcaagaccaagugcaccgccuccaacaagaacaagggcaucaucaagaccuucuccaacggcugcgacuacgucuccaacaagggcgucgacaccgucuccgucggcaacacccucuacuacgucaacaagcaggagggccagucccucuacgucaagggcgagcccaucaucaacuucuacgacccccucgucuuccccuccgacgaguucgacgccuccaucucccaggucaacgagaagaucaaccagucccucgccuucauccgcaaguccgacgagcuccuccacaacgucaacgucggcaaguccaccaccaacaucaugaucaccaccaucaucaucgucaucaucgucauccuccuccuccucaucgccgucggccucuuccucuacugcaaggcccgcugaggacuaguaauaaggaaacuguaugaaugucugugggcaggaagugaagagauccuucuguaaagguuuuuggaauuaugucugcugaauaauaaacuuuuuugaaauaauaaaucugguagaaaaaugagaucuaaaaaaaaaaaaaaaaaaaaaaaaaaaaaaaaaaaaaaaaaaaaaaaaaaaaaaaaaaaaaaaaugcaucccccccccccccccccccccccccccccccaaaggcucuuuucagagccaccagaauu

SEQ ID NO: 18267 - RNA, 1904 nt, Artificial Sequence
  mRNA product Design g-2 comprising derived and/or modified sequence from HRSV(Memphis-37)__AIY60640.1__F-del_DSCav1_mut6 (opt3)
gggagaguccgcucagccagguugcagaagcggcuuagcguguguccuaaucuucucucugcguguagguaggccugugccgcaaacaagcuuaccauggagcugcccauccucaagaccaacgccauuacaacuauacuugcugcagugacgcugugcuucgccagcucccagaauaucaccgaagaguuuuaccaaucuacauguucagcggucaguaaaggcuauuugggggcuuuaagaacuggaugguacaccagcguuauuacaaucgaacuguccaacauuaaggagaauaaaugcaacgguaccgacgccaaggugaaacuaaucaagcaggaacucgauaaguauaaaaaugcaguaacugaccugcagaugcuuauguguucuacuccugccgcuggcucggggucagcaauagccagcggaaucgcugugugcaagguccugcacuuggagggcgaggugaacaaaauuaagaaugcccuccugaguaccaacaaagcgguugugucccugucuaauggugucagcgugcucacguucaagguauuagaucugaagaacuacaucgacaaacagcuuuugccaauucugaauaagcaauccuguucaaucccgaaccccgaaacuguuauggaguuucagcagaaaaauaacaggcuacucgaaauaacccgggaguucagugugaaugcaggggucacaacuccugugagcaccuauaugcugacaaacucugagcuucuguccuugauuaacgauaugccaaucaccaaugaccagaagaaacucaugucaaacaaugugcaaauuguccgccagcagagcuacaguaucaugugcaucauuaaggaagagguucuggccuaugugguacaguuaccccuguacggagugauagauacgccuuguuggaaacuccauacuucuccacuuugcacaaccaacacuaaggaaggcuccaauaucugucugacacgaaccgaccguggcugguacugcgauaacgcugggagcgucucguuuuucccccaagccgagacguguaaggugugcucuaauagaguuuucugcgacaccaugaacuccuugacacuaccuucagaagugaaucuguguaacauugauaucuucaauccaaaauaugacugcaagauaaugacaaguaaaaccgaugucagcuccucugugauuacaagccucggagcaaucguaucauguuacgguaagacuaaaugcaccgcuaguaacaagaauaagggcaucauuaaaacauuuuccaacgggugugacuauguuagcaauaagggaguggacaccgucucugugggcaacacucuguacuaugucaacaaacaggagggucagucacuuuacgugaagggggagccgaucauuaauuucuaugauccccugguuuuuccuagugacgaauuugaugccagcauaucccaagugaacgagaaaaucaaucagucuuuggcguuuauuaggaagucggacgaacuccugcacaacguaaaugucggaaagagcacgacaaacaucaugaucaccacuauuauaaucgugauuaucguuauuuuacugcuacucaucgccgugggccuguuccuuuacugcaaagcacggugaggacuaguaauaaggaaacuguaugaaugucugugggcaggaagugaagagauccuucuguaaagguuuuuggaauuaugucugcugaauaauaaacuuuuuugaaauaauaaaucugguagaaaaaugagaucuaaaaaaaaaaaaaaaaaaaaaaaaaaaaaaaaaaaaaaaaaaaaaaaaaaaaaaaaaaaaaaaaugcaucccccccccccccccccccccccccccccccaaaggcucuuuucagagccaccagaauu

SEQ ID NO: 18268 - RNA, 1904 nt, Artificial Sequence
  mRNA product Design g-2 comprising derived and/or modified sequence from HRSV(Memphis-37)__AIY60640.1__F-del_DSCav1_mut6 (opt4)
gggagaguccgcucagccagguugcagaagcggcuuagcguguguccuaaucuucucucugcguguagguaggccugugccgcaaacaagcuuaccauggagcugcccauccugaagaccaacgccaucaccaccauccuggccgccgugacccugugcuucgccagcagccagaacaucaccgaggaguucuaccagagcaccugcagcgccgugagcaagggcuaccugggcgcccugagaaccggcugguacaccagcgugaucaccaucgagcugagcaacaucaaggagaacaagugcaacggcaccgacgccaaggugaagcugaucaagcaggagcuggacaaguacaagaacgccgugaccgaccugcagaugcugaugugcagcacccccgccgccggcagcggcagcgccaucgccagcggcaucgccgugugcaaggugcugcaccuggagggcgaggugaacaagaucaagaacgcccugcugagcaccaacaaggccguggugagccugagcaacggcgugagcgugcugaccuucaaggugcuggaccugaagaacuacaucgacaagcagcugcugcccauccugaacaagcagagcugcagcauccccaaccccgagaccgugauggaguuccagcagaagaacaacagacugcuggagaucaccagagaguucagcgugaacgccggcgugaccacccccgugagcaccuacaugcugaccaacagcgagcugcugagccugaucaacgacaugcccaucaccaacgaccagaagaagcugaugagcaacaacgugcagaucgugagacagcagagcuacagcaucaugugcaucaucaaggaggaggugcuggccuacguggugcagcugccccuguacggcgugaucgacacccccugcuggaagcugcacaccagcccccugugcaccaccaacaccaaggagggcagcaacaucugccugaccagaaccgacagaggcugguacugcgacaacgccggcagcgugagcuucuucccccaggccgagaccugcaaggugugcagcaacagaguguucugcgacaccaugaacagccugacccugcccagcgaggugaaccugugcaacaucgacaucuucaaccccaaguacgacugcaagaucaugaccagcaagaccgacgugagcagcagcgugaucaccagccugggcgccaucgugagcugcuacggcaagaccaagugcaccgccagcaacaagaacaagggcaucaucaagaccuucagcaacggcugcgacuacgugagcaacaagggcguggacaccgugagcgugggcaacacccuguacuacgugaacaagcaggagggccagagccuguacgugaagggcgagcccaucaucaacuucuacgacccccugguguuccccagcgacgaguucgacgccagcaucagccaggugaacgagaagaucaaccagagccuggccuucaucagaaagagcgacgagcugcugcacaacgugaacgugggcaagagcaccaccaacaucaugaucaccaccaucaucaucgugaucaucgugauccugcugcugcugaucgccgugggccuguuccuguacugcaaggccagaugaggacuaguaauaaggaaacuguaugaaugucugugggcaggaagugaagagauccuucuguaaagguuuuuggaauuaugucugcugaauaauaaacuuuuuugaaauaauaaaucugguagaaaaaugagaucuaaaaaaaaaaaaaaaaaaaaaaaaaaaaaaaaaaaaaaaaaaaaaaaaaaaaaaaaaaaaaaaaugcaucccccccccccccccccccccccccccccccaaaggcucuuuucagagccaccagaauu

SEQ ID NO: 18269 - RNA, 1904 nt, Artificial Sequence
  mRNA product Design g-2 comprising derived and/or modified sequence from HRSV(Memphis-37)__AIY60640.1__F-del_DSCav1_mut6 (opt5)
gggagaguccgcucagccagguugcagaagcggcuuagcguguguccuaaucuucucucugcguguagguaggccugugccgcaaacaagcuuaccauggagcugcccauccucaagaccaacgccauuacaacgauccuggcugccgugacccuuugcuucgcgagcucccagaauauuacagaagaguuuuaccaaucuaccuguagcgcugucuccaaaggcuaucugggggcccucagaacaggaugguacaccucuguuaucacaauugaacugagcaacaucaaggagaauaaaugcaacggcaccgacgccaaggugaaacuuaucaagcaggaacuggauaaguauaaaaaugcugugacggaccuccagaugcugauguguuccaccccugccgcugggucuggaagcgccauugcguccggcaucgccgucugcaaggugcugcaccucgagggggagguuaacaaaauuaagaaugcucugcuuagcacaaacaaagccguggucucucuguccaauggagugagcguucucaccuucaaggugcuggaucuuaagaacuacaucgacaaacagcugcucccgauucugaauaagcaaucuuguuccauccccaacccugaaacagucauggaguuucagcagaaaaauaaccggcugcucgaaauuacccgcgaguucagcgugaaugcuggcgugacgacacccgucucuaccuauaugcugacaaacuccgagcuucugagccucaucaacgauaugccuaucaccaaugaccagaagaaacugauguccaacaauguucaaauugugagacagcagucuuacagcaucaugugcauuaucaaggaagaggugcuugccuaugucgugcagcugccccucuacggcguuauugauaccccuuguuggaaacugcauacauccccgcugugcacgaccaacacaaaggaagggagcaauaucugucucacccggacagaccgcggaugguacugcgauaacgcgggcucuguguccuuuuucccccaagccgagaccuguaaggucugcagcaauagaguguuuugcgacacgaugaacucucugacacuuccuagcgaaguuaaucuguguaacaucgauauuuucaaucccaaauaugacugcaagaucaugaccuccaaaaccgaugugucuagcuccgucauuacaagccucggggcuaucgugucuuguuacggaaagaccaaaugcacagccuccaacaagaauaagggcauuaucaaaacguuuagcaacgggugugacuaugucucuaauaagggaguggacaccguuuccgugggcaacacacuguacuaugucaacaaacaggagggccagagccuuuacgugaagggggagccuaucauuaauuucuaugauccccugguuuuuccguccgacgaauuugaugcuucuaucagccaagugaacgagaaaauuaaucagucccucgccuucauccggaagucugacgaacugcugcacaacgucaaugugggaaagagcaccacaaacauuaugaucaccacgauuaucaucgugauuaucguuauucuccugcuucugaucgccgucggccucuuccuguacugcaaagcucgcugaggacuaguaauaaggaaacuguaugaaugucugugggcaggaagugaagagauccuucuguaaagguuuuuggaauuaugucugcugaauaauaaacuuuuuugaaauaauaaaucugguagaaaaaugagaucuaaaaaaaaaaaaaaaaaaaaaaaaaaaaaaaaaaaaaaaaaaaaaaaaaaaaaaaaaaaaaaaaugcaucccccccccccccccccccccccccccccccaaaggcucuuuucagagccaccagaauu

SEQ ID NO: 18270 - RNA, 1904 nt, Artificial Sequence
  mRNA product Design g-2 comprising derived and/or modified sequence from HRSV(Memphis-37)__AIY60640.1__F-del_DSCav1_mut6 (opt6)
gggagaguccgcucagccagguugcagaagcggcuuagcguguguccuaaucuucucucugcguguagguaggccugugccgcaaacaagcuuaccauggaacuaccuauacuaaaaaccaacgccauaacaacaauacuagccgcaguuacacucugcuuugcauccucacaaaacaucacagaggaauuuuaccaaucuacuugcuccgcaguaucaaaaggauaccuaggagcacuccguacaggaugguacacaucagucauaacaauugaauuaucuaacaucaaagaaaacaaauguaaugguacagacgccaaaguaaaauuaauaaaacaagaacuagacaaauacaaaaacgccguaacagaccuacaaaugcuaaugugcucaacccccgccgcaggaucuggaucagcaauugccucaggcauagcaguaugcaaaguccuacaccuagaaggagaagucaacaaaauaaaaaacgcucuccucucaaccaauaaagcaguaguaucccucucaaacggaguaucaguacuaacauucaaaguacuagaccucaaaaauuauauagacaagcaacuacucccaauauuaaauaaacaauccugcucaauacccaauccagaaacagucauggaauuucaacaaaaaaacaaccgacucuuagaaauaacaagagaauuuucagucaaugccggcgucacaaccccaguaucaacauacaugcuaacaaacucagaacuacuaucacuaaucaacgauaugcccauaaccaacgaccaaaaaaaacuaaugucaaacaauguacaaauuguaagacaacagucuuauucaauaaugugcauaauaaaagaagaagucuuagcauauguaguacaacuaccacuauacggaguaauagacacaccauguuggaaauuacacacauccccacuauguaccaccaacacaaaagaaggaucuaacauaugccuaaccagaacagaccgaggcugguauugcgacaaugcaggaucaguauccuucuuuccacaagcagaaacaugcaaagucugcucuaacagaguauucugcgauacuaugaacucacuuaccuuaccaucagaaguaaaucuauguaauaucgacauauucaaucccaaauaugauugcaaaauaaugaccucaaaaacagauguaucaucaucagucauaacaucacuaggagcaauagucagcugcuaugggaaaacaaaaugcacagcuuccaacaaaaacaaaggaaucauaaaaacauucucaaaugguugugacuacguauccaacaaaggaguagauacaguaucuguaggcaacacauuauacuauguaaauaaacaagaaggacaaagccuauacgucaaaggagaacccaucauaaauuucuaugacccauuaguuuucccaucugacgaauuugacgcuuccaucucccaaguaaaugaaaaaaucaaccaaagccucgcauucauucgcaaaucugacgaauuacuccacaacguaaacguaggaaaauccacaacaaacauuaugaucaccaccauaauaaucguaauaauagucauauuacuacuccucauagcaguaggacuauuccuauacuguaaagcuagauaaggacuaguaauaaggaaacuguaugaaugucugugggcaggaagugaagagauccuucuguaaagguuuuuggaauuaugucugcugaauaauaaacuuuuuugaaauaauaaaucugguagaaaaaugagaucuaaaaaaaaaaaaaaaaaaaaaaaaaaaaaaaaaaaaaaaaaaaaaaaaaaaaaaaaaaaaaaaaugcaucccccccccccccccccccccccccccccccaaaggcucuuuucagagccaccagaauu

SEQ ID NO: 18271 - RNA, 1904 nt, Artificial Sequence
  mRNA product Design g-2 comprising derived and/or modified sequence from HRSV(Memphis-37)__AIY60640.1__F-del_DSCav1_mut6 (opt11)
gggagaguccgcucagccagguugcagaagcggcuuagcguguguccuaaucuucucucugcguguagguaggccugugccgcaaacaagcuuaccauggaauuaccaauccucaaaacuaacgccaucaccaccauccucgcugccgucacccucugcuucgccuccagccaaaacaucacagaagaguucuaccaaagcacaugcuccgcugucuccaaaggcuaccuuggcgcccuccgcaccggcugguacaccucaguaauuaccauugaacuaagcaacaucaaagaaaauaaaugcaacggcaccgacgccaaaguuaaacucauaaaacaggaacucgacaaauacaaaaacgccguaacagaccuccaaaugcucaugugcuccacccccgccgccggcucaggcuccgccaucgcaagcggaauagcaguuugcaaaguccuccaccuagaaggcgaggucaacaagauuaaaaacgcacuucucucaaccaacaaggccgucguaucacucucaaacggcgucuccguccucaccuucaaaguucuggaccucaaaaacuacaucgauaaacaacuacucccaauacuuaacaaacaaucaugcuccaucccaaaccccgaaaccgucauggaguuccaacagaaaaacaaccgccuacuggaaaucacacgcgaguucagcguaaacgcuggcgucacuacacccgucuccaccuacaugcucaccaauucugaacuccuaucacucauaaacgacaugcccauuaccaacgaccaaaagaaacuaaugucaaacaacguccaaaucguaagacaacaaucguauuccaucaugugcauaauuaaagaagaaguucucgccuacgugguccaacuaccccucuacggagucauagacacuccuuguuggaaacuccacaccucuccccucugcacuaccaacacaaaagaaggcuccaacaucugccucacccgaaccgacagaggcugguacugcgacaacgccggcuccgucuccuucuucccccaagccgaaaccugcaaagucugcuccaaccgcguuuucugcgacaccaugaacucccucacacuccccuccgaagucaaccuauguaacauagacauauucaacccaaaauacgacugcaaaaucaugacauccaaaaccgacgugucuuccucggucaucaccucccucggcgccaucgucucaugcuacggcaaaacuaaaugcaccgcauccaacaaaaacaaaggcauaaucaaaacauucuccaacggcugcgacuacguuucuaacaaaggcgucgauaccgucuccgucggaaacacccucuacuacguaaacaagcaagaaggccagucccuauacguaaaaggagaaccaauuaucaacuucuacgacccccuagucuuccccuccgacgaguucgacgccuccauaucccaagucaacgagaaaaucaaccaaucccuagccuucauccgcaaaucagacgaacuccuccacaacgucaacgucggaaaauccacaacuaacaucaugaucaccaccaucauuaucgucaucauaguuauacuccuccuccucauagccgucggccucuuccuauacugcaaagcucgcuaaggacuaguaauaaggaaacuguaugaaugucugugggcaggaagugaagagauccuucuguaaagguuuuuggaauuaugucugcugaauaauaaacuuuuuugaaauaauaaaucugguagaaaaaugagaucuaaaaaaaaaaaaaaaaaaaaaaaaaaaaaaaaaaaaaaaaaaaaaaaaaaaaaaaaaaaaaaaaugcaucccccccccccccccccccccccccccccccaaaggcucuuuucagagccaccagaauu

SEQ ID NO: 18272 - RNA, 2136 nt, Artificial Sequence
  mRNA product Design g-3 comprising derived and/or modified sequence from HRSV(Memphis-37)__AIY60640.1__F-del_DSCav1_mut6 (opt1)
gggagaguccgcucagccagguugcagaagcggcuuagcguguguccuaaucuucucucugcguguagguaggccugugccgcaaacaagcuuaccauggagcugcccauccucaagaccaacgccaucaccacgauccuggccgcggugacccugugcuucgccagcucccagaacaucaccgaggaguucuaccagagcacgugcuccgccgucagcaagggcuaccucggcgcccugcgcaccgggugguacaccagcgugaucaccaucgagcuguccaacaucaaggagaacaagugcaacggcaccgacgccaaggugaagcucaucaagcaggagcuggacaaguacaagaacgcggucacggaccugcagaugcugaugugcagcaccccggccgccggcuccgggagcgcgaucgccuccggcaucgccgucugcaaggugcugcaccucgagggcgaggugaacaagaucaagaacgcccugcuguccaccaacaaggccgucgugagccucuccaacggggugagcguccugaccuucaaggugcuggaccucaagaacuacaucgacaagcagcugcugcccauccugaacaagcagagcugcuccauccccaaccccgagaccgucauggaguuccagcagaagaacaaccgccuccuggagaucacgcgggaguucagcgugaacgcgggcgugaccacccccgucuccaccuacaugcugacgaacagcgagcuccugucccugaucaacgacaugccgaucaccaacgaccagaagaagcucaugagcaacaacgugcagaucgugcgccagcaguccuacagcaucaugugcaucaucaaggaggagguccuggccuacguggugcagcugccccucuacggggucaucgacacccccugcuggaagcugcacaccagcccccugugcacgaccaacaccaaggagggcuccaacaucugccucacccggacggaccgcgggugguacugcgacaacgccggcagcguguccuucuucccgcaggccgagaccugcaaggucugcagcaaccggguguucugcgacaccaugaacucccugacccugcccagcgaggugaaccucugcaacaucgacaucuucaaccccaaguacgacugcaagaucaugacguccaagaccgacgucagcuccagcgugaucaccucccugggcgccaucgugagcugcuacgggaagaccaagugcacggcgagcaacaagaacaagggcaucaucaagaccuucuccaacgggugcgacuacgucagcaacaagggcguggacaccguguccgucggcaacacccuguacuacgugaacaagcaggagggccagagccucuacgugaagggggagcccaucaucaacuucuacgacccgcuggucuuccccuccgacgaguucgacgccagcaucucccaggugaacgagaagaucaaccagagccuggccuucauccggaaguccgacgagcuccugcacaacgugaacgucggcaagagcaccacgaacaucaugaucaccaccaucaucaucgugaucaucgugauccugcugcuccugaucgccgucgggcuguuccucuacugcaaggcccgcugaggacuagugaagggaacacccaaauuuaauucagccuuaagcacaauuaauuaagagugaaacguaauuguacaagcaguuggucacccaccauagggcaugaucaacaccgcaaccuuuccuuuuucccccagugauucugaaaaaccccucuucccuucagcuugcuuagauguuccaaauuuaguaagcuuaaggcggccuacagaagaaaaagaaaaaaaaggccacaaaaguucccucucacuuucaguaaauaaaauaaaagcagcaacagaaauaaagaaauaaaugaaauucaaaaugaaauaaauauuguguugugcagcauuaaaaaaucaauaaaaauuaaaaaugagcaagaucuaaaaaaaaaaaaaaaaaaaaaaaaaaaaaaaaaaaaaaaaaaaaaaaaaaaaaaaaaaaaaaaaugcaucccccccccccccccccccccccccccccccaaaggcucuuuucagagccaccagaauu

SEQ ID NO: 18273 - RNA, 2136 nt, Artificial Sequence
  mRNA product Design g-3 comprising derived and/or modified sequence from HRSV(Memphis-37)__AIY60640.1__F-del_DSCav1_mut6 (opt1)
gggagaguccgcucagccagguugcagaagcggcuuagcguguguccuaaucuucucucugcguguagguaggccugugccgcaaacaagcuuaccauggagcugcccauccucaagaccaacgccaucaccacgauccuggccgcggugacccugugcuucgccagcucccagaacaucaccgaggaguucuaccagagcacgugcuccgccgucagcaagggcuaccucggggcccugcgcaccggcugguacaccuccgugaucaccaucgagcugagcaacaucaaggagaacaagugcaacgggaccgacgccaaggugaagcucaucaagcaggagcuggacaaguacaagaacgcggucacggaccugcagaugcucaugugcuccaccccggccgccggcagcggguccgccaucgcgagcggcaucgccgugugcaaggugcugcaccuggagggcgaggucaacaagaucaagaacgcccuccuguccaccaacaaggccguggugagccuguccaacggggucagcgugcucaccuucaaggugcuggaccugaagaacuacaucgacaagcagcuccugcccauccugaacaagcaguccugcagcauccccaaccccgagacggucauggaguuccagcagaagaacaaccggcuccuggagaucacccgcgaguucuccgugaacgccggcgugaccaccccggucagcacguacaugcugaccaacuccgagcuccugagccugaucaacgacaugcccaucaccaacgaccagaagaagcucaugagcaacaacgugcagaucgugcggcagcaguccuacagcaucaugugcaucaucaaggaggagguccuggcguacguggugcagcugccccucuacggggucaucgacacccccugcuggaagcugcacacguccccgcugugcaccaccaacaccaaggagggcagcaacaucugccucacgcgcaccgaccgggggugguacugcgacaacgccggcuccgugagcuucuucccccaggccgagaccugcaaggugugcuccaaccgcgucuucugcgacaccaugaacagccugacgcugcccuccgaggugaaccucugcaacaucgacaucuucaaccccaaguacgacugcaagaucaugaccagcaagaccgacgucuccagcuccgugaucaccagccugggcgccaucguguccugcuacgggaagacgaagugcaccgccagcaacaagaacaagggcaucaucaagaccuucuccaacgggugcgacuacgucagcaacaagggcguggacaccguguccgucggcaacacgcuguacuacgugaacaagcaggaggggcagagccucuacgugaagggcgagccgaucaucaacuucuacgacccccuggucuuccccagcgacgaguucgacgcguccaucagccaggugaacgagaagaucaaccagucccuggccuucauccgcaagagcgacgagcuccugcacaacgugaacgucgggaaguccaccaccaacaucaugaucaccaccaucaucaucgugaucaucgugauccugcuccugcugaucgccgucggccucuuccuguacugcaaggcccggugaggacuagugaagggaacacccaaauuuaauucagccuuaagcacaauuaauuaagagugaaacguaauuguacaagcaguuggucacccaccauagggcaugaucaacaccgcaaccuuuccuuuuucccccagugauucugaaaaaccccucuucccuucagcuugcuuagauguuccaaauuuaguaagcuuaaggcggccuacagaagaaaaagaaaaaaaaggccacaaaaguucccucucacuuucaguaaauaaaauaaaagcagcaacagaaauaaagaaauaaaugaaauucaaaaugaaauaaauauuguguugugcagcauuaaaaaaucaauaaaaauuaaaaaugagcaagaucuaaaaaaaaaaaaaaaaaaaaaaaaaaaaaaaaaaaaaaaaaaaaaaaaaaaaaaaaaaaaaaaaugcaucccccccccccccccccccccccccccccccaaaggcucuuuucagagccaccagaauu

SEQ ID NO: 18274 - RNA, 2136 nt, Artificial Sequence
  mRNA product Design g-3 comprising derived and/or modified sequence from HRSV(Memphis-37)__AIY60640.1__F-del_DSCav1_mut6 (opt2)
gggagaguccgcucagccagguugcagaagcggcuuagcguguguccuaaucuucucucugcguguagguaggccugugccgcaaacaagcuuaccauggagcuccccauccucaagaccaacgccaucaccaccauccucgccgccgucacccucugcuucgccuccucccagaacaucaccgaggaguucuaccaguccaccugcuccgccgucuccaagggcuaccucggcgcccuccgcaccggcugguacaccuccgucaucaccaucgagcucuccaacaucaaggagaacaagugcaacggcaccgacgccaaggucaagcucaucaagcaggagcucgacaaguacaagaacgccgucaccgaccuccagaugcucaugugcuccacccccgccgccggcuccggcuccgccaucgccuccggcaucgccgucugcaagguccuccaccucgagggcgaggucaacaagaucaagaacgcccuccucuccaccaacaaggccgucgucucccucuccaacggcgucuccguccucaccuucaagguccucgaccucaagaacuacaucgacaagcagcuccuccccauccucaacaagcaguccugcuccauccccaaccccgagaccgucauggaguuccagcagaagaacaaccgccuccucgagaucacccgcgaguucuccgucaacgccggcgucaccacccccgucuccaccuacaugcucaccaacuccgagcuccucucccucaucaacgacaugcccaucaccaacgaccagaagaagcucauguccaacaacguccagaucguccgccagcaguccuacuccaucaugugcaucaucaaggaggagguccucgccuacgucguccagcucccccucuacggcgucaucgacacccccugcuggaagcuccacaccuccccccucugcaccaccaacaccaaggagggcuccaacaucugccucacccgcaccgaccgcggcugguacugcgacaacgccggcuccgucuccuucuucccccaggccgagaccugcaaggucugcuccaaccgcgucuucugcgacaccaugaacucccucacccuccccuccgaggucaaccucugcaacaucgacaucuucaaccccaaguacgacugcaagaucaugaccuccaagaccgacgucuccuccuccgucaucaccucccucggcgccaucgucuccugcuacggcaagaccaagugcaccgccuccaacaagaacaagggcaucaucaagaccuucuccaacggcugcgacuacgucuccaacaagggcgucgacaccgucuccgucggcaacacccucuacuacgucaacaagcaggagggccagucccucuacgucaagggcgagcccaucaucaacuucuacgacccccucgucuuccccuccgacgaguucgacgccuccaucucccaggucaacgagaagaucaaccagucccucgccuucauccgcaaguccgacgagcuccuccacaacgucaacgucggcaaguccaccaccaacaucaugaucaccaccaucaucaucgucaucaucgucauccuccuccuccucaucgccgucggccucuuccucuacugcaaggcccgcugaggacuagugaagggaacacccaaauuuaauucagccuuaagcacaauuaauuaagagugaaacguaauuguacaagcaguuggucacccaccauagggcaugaucaacaccgcaaccuuuccuuuuucccccagugauucugaaaaaccccucuucccuucagcuugcuuagauguuccaaauuuaguaagcuuaaggcggccuacagaagaaaaagaaaaaaaaggccacaaaaguucccucucacuuucaguaaauaaaauaaaagcagcaacagaaauaaagaaauaaaugaaauucaaaaugaaauaaauauuguguugugcagcauuaaaaaaucaauaaaaauuaaaaaugagcaagaucuaaaaaaaaaaaaaaaaaaaaaaaaaaaaaaaaaaaaaaaaaaaaaaaaaaaaaaaaaaaaaaaaugcaucccccccccccccccccccccccccccccccaaaggcucuuuucagagccaccagaauu

SEQ ID NO: 18275 - RNA, 2136 nt, Artificial Sequence
  mRNA product Design g-3 comprising derived and/or modified sequence from HRSV(Memphis-37)__AIY60640.1__F-del_DSCav1_mut6 (opt3)
gggagaguccgcucagccagguugcagaagcggcuuagcguguguccuaaucuucucucugcguguagguaggccugugccgcaaacaagcuuaccauggagcugcccauccucaagaccaacgccauuacaacuauacuugcugcagugacgcugugcuucgccagcucccagaauaucaccgaagaguuuuaccaaucuacauguucagcggucaguaaaggcuauuugggggcuuuaagaacuggaugguacaccagcguuauuacaaucgaacuguccaacauuaaggagaauaaaugcaacgguaccgacgccaaggugaaacuaaucaagcaggaacucgauaaguauaaaaaugcaguaacugaccugcagaugcuuauguguucuacuccugccgcuggcucggggucagcaauagccagcggaaucgcugugugcaagguccugcacuuggagggcgaggugaacaaaauuaagaaugcccuccugaguaccaacaaagcgguugugucccugucuaauggugucagcgugcucacguucaagguauuagaucugaagaacuacaucgacaaacagcuuuugccaauucugaauaagcaauccuguucaaucccgaaccccgaaacuguuauggaguuucagcagaaaaauaacaggcuacucgaaauaacccgggaguucagugugaaugcaggggucacaacuccugugagcaccuauaugcugacaaacucugagcuucuguccuugauuaacgauaugccaaucaccaaugaccagaagaaacucaugucaaacaaugugcaaauuguccgccagcagagcuacaguaucaugugcaucauuaaggaagagguucuggccuaugugguacaguuaccccuguacggagugauagauacgccuuguuggaaacuccauacuucuccacuuugcacaaccaacacuaaggaaggcuccaauaucugucugacacgaaccgaccguggcugguacugcgauaacgcugggagcgucucguuuuucccccaagccgagacguguaaggugugcucuaauagaguuuucugcgacaccaugaacuccuugacacuaccuucagaagugaaucuguguaacauugauaucuucaauccaaaauaugacugcaagauaaugacaaguaaaaccgaugucagcuccucugugauuacaagccucggagcaaucguaucauguuacgguaagacuaaaugcaccgcuaguaacaagaauaagggcaucauuaaaacauuuuccaacgggugugacuauguuagcaauaagggaguggacaccgucucugugggcaacacucuguacuaugucaacaaacaggagggucagucacuuuacgugaagggggagccgaucauuaauuucuaugauccccugguuuuuccuagugacgaauuugaugccagcauaucccaagugaacgagaaaaucaaucagucuuuggcguuuauuaggaagucggacgaacuccugcacaacguaaaugucggaaagagcacgacaaacaucaugaucaccacuauuauaaucgugauuaucguuauuuuacugcuacucaucgccgugggccuguuccuuuacugcaaagcacggugaggacuagugaagggaacacccaaauuuaauucagccuuaagcacaauuaauuaagagugaaacguaauuguacaagcaguuggucacccaccauagggcaugaucaacaccgcaaccuuuccuuuuucccccagugauucugaaaaaccccucuucccuucagcuugcuuagauguuccaaauuuaguaagcuuaaggcggccuacagaagaaaaagaaaaaaaaggccacaaaaguucccucucacuuucaguaaauaaaauaaaagcagcaacagaaauaaagaaauaaaugaaauucaaaaugaaauaaauauuguguugugcagcauuaaaaaaucaauaaaaauuaaaaaugagcaagaucuaaaaaaaaaaaaaaaaaaaaaaaaaaaaaaaaaaaaaaaaaaaaaaaaaaaaaaaaaaaaaaaaugcaucccccccccccccccccccccccccccccccaaaggcucuuuucagagccaccagaauu

SEQ ID NO: 18276 - RNA, 2136 nt, Artificial Sequence
  mRNA product Design g-3 comprising derived and/or modified sequence from HRSV(Memphis-37)__AIY60640.1__F-del_DSCav1_mut6 (opt4)
gggagaguccgcucagccagguugcagaagcggcuuagcguguguccuaaucuucucucugcguguagguaggccugugccgcaaacaagcuuaccauggagcugcccauccugaagaccaacgccaucaccaccauccuggccgccgugacccugugcuucgccagcagccagaacaucaccgaggaguucuaccagagcaccugcagcgccgugagcaagggcuaccugggcgcccugagaaccggcugguacaccagcgugaucaccaucgagcugagcaacaucaaggagaacaagugcaacggcaccgacgccaaggugaagcugaucaagcaggagcuggacaaguacaagaacgccgugaccgaccugcagaugcugaugugcagcacccccgccgccggcagcggcagcgccaucgccagcggcaucgccgugugcaaggugcugcaccuggagggcgaggugaacaagaucaagaacgcccugcugagcaccaacaaggccguggugagccugagcaacggcgugagcgugcugaccuucaaggugcuggaccugaagaacuacaucgacaagcagcugcugcccauccugaacaagcagagcugcagcauccccaaccccgagaccgugauggaguuccagcagaagaacaacagacugcuggagaucaccagagaguucagcgugaacgccggcgugaccacccccgugagcaccuacaugcugaccaacagcgagcugcugagccugaucaacgacaugcccaucaccaacgaccagaagaagcugaugagcaacaacgugcagaucgugagacagcagagcuacagcaucaugugcaucaucaaggaggaggugcuggccuacguggugcagcugccccuguacggcgugaucgacacccccugcuggaagcugcacaccagcccccugugcaccaccaacaccaaggagggcagcaacaucugccugaccagaaccgacagaggcugguacugcgacaacgccggcagcgugagcuucuucccccaggccgagaccugcaaggugugcagcaacagaguguucugcgacaccaugaacagccugacccugcccagcgaggugaaccugugcaacaucgacaucuucaaccccaaguacgacugcaagaucaugaccagcaagaccgacgugagcagcagcgugaucaccagccugggcgccaucgugagcugcuacggcaagaccaagugcaccgccagcaacaagaacaagggcaucaucaagaccuucagcaacggcugcgacuacgugagcaacaagggcguggacaccgugagcgugggcaacacccuguacuacgugaacaagcaggagggccagagccuguacgugaagggcgagcccaucaucaacuucuacgacccccugguguuccccagcgacgaguucgacgccagcaucagccaggugaacgagaagaucaaccagagccuggccuucaucagaaagagcgacgagcugcugcacaacgugaacgugggcaagagcaccaccaacaucaugaucaccaccaucaucaucgugaucaucgugauccugcugcugcugaucgccgugggccuguuccuguacugcaaggccagaugaggacuagugaagggaacacccaaauuuaauucagccuuaagcacaauuaauuaagagugaaacguaauuguacaagcaguuggucacccaccauagggcaugaucaacaccgcaaccuuuccuuuuucccccagugauucugaaaaaccccucuucccuucagcuugcuuagauguuccaaauuuaguaagcuuaaggcggccuacagaagaaaaagaaaaaaaaggccacaaaaguucccucucacuuucaguaaauaaaauaaaagcagcaacagaaauaaagaaauaaaugaaauucaaaaugaaauaaauauuguguugugcagcauuaaaaaaucaauaaaaauuaaaaaugagcaagaucuaaaaaaaaaaaaaaaaaaaaaaaaaaaaaaaaaaaaaaaaaaaaaaaaaaaaaaaaaaaaaaaaugcaucccccccccccccccccccccccccccccccaaaggcucuuuucagagccaccagaauu

SEQ ID NO: 18277 - RNA, 2136 nt, Artificial Sequence
  mRNA product Design g-3 comprising derived and/or modified sequence from HRSV(Memphis-37)__AIY60640.1__F-del_DSCav1_mut6 (opt5)
gggagaguccgcucagccagguugcagaagcggcuuagcguguguccuaaucuucucucugcguguagguaggccugugccgcaaacaagcuuaccauggagcugcccauccucaagaccaacgccauuacaacgauccuggcugccgugacccuuugcuucgcgagcucccagaauauuacagaagaguuuuaccaaucuaccuguagcgcugucuccaaaggcuaucugggggcccucagaacaggaugguacaccucuguuaucacaauugaacugagcaacaucaaggagaauaaaugcaacggcaccgacgccaaggugaaacuuaucaagcaggaacuggauaaguauaaaaaugcugugacggaccuccagaugcugauguguuccaccccugccgcugggucuggaagcgccauugcguccggcaucgccgucugcaaggugcugcaccucgagggggagguuaacaaaauuaagaaugcucugcuuagcacaaacaaagccguggucucucuguccaauggagugagcguucucaccuucaaggugcuggaucuuaagaacuacaucgacaaacagcugcucccgauucugaauaagcaaucuuguuccauccccaacccugaaacagucauggaguuucagcagaaaaauaaccggcugcucgaaauuacccgcgaguucagcgugaaugcuggcgugacgacacccgucucuaccuauaugcugacaaacuccgagcuucugagccucaucaacgauaugccuaucaccaaugaccagaagaaacugauguccaacaauguucaaauugugagacagcagucuuacagcaucaugugcauuaucaaggaagaggugcuugccuaugucgugcagcugccccucuacggcguuauugauaccccuuguuggaaacugcauacauccccgcugugcacgaccaacacaaaggaagggagcaauaucugucucacccggacagaccgcggaugguacugcgauaacgcgggcucuguguccuuuuucccccaagccgagaccuguaaggucugcagcaauagaguguuuugcgacacgaugaacucucugacacuuccuagcgaaguuaaucuguguaacaucgauauuuucaaucccaaauaugacugcaagaucaugaccuccaaaaccgaugugucuagcuccgucauuacaagccucggggcuaucgugucuuguuacggaaagaccaaaugcacagccuccaacaagaauaagggcauuaucaaaacguuuagcaacgggugugacuaugucucuaauaagggaguggacaccguuuccgugggcaacacacuguacuaugucaacaaacaggagggccagagccuuuacgugaagggggagccuaucauuaauuucuaugauccccugguuuuuccguccgacgaauuugaugcuucuaucagccaagugaacgagaaaauuaaucagucccucgccuucauccggaagucugacgaacugcugcacaacgucaaugugggaaagagcaccacaaacauuaugaucaccacgauuaucaucgugauuaucguuauucuccugcuucugaucgccgucggccucuuccuguacugcaaagcucgcugaggacuagugaagggaacacccaaauuuaauucagccuuaagcacaauuaauuaagagugaaacguaauuguacaagcaguuggucacccaccauagggcaugaucaacaccgcaaccuuuccuuuuucccccagugauucugaaaaaccccucuucccuucagcuugcuuagauguuccaaauuuaguaagcuuaaggcggccuacagaagaaaaagaaaaaaaaggccacaaaaguucccucucacuuucaguaaauaaaauaaaagcagcaacagaaauaaagaaauaaaugaaauucaaaaugaaauaaauauuguguugugcagcauuaaaaaaucaauaaaaauuaaaaaugagcaagaucuaaaaaaaaaaaaaaaaaaaaaaaaaaaaaaaaaaaaaaaaaaaaaaaaaaaaaaaaaaaaaaaaugcaucccccccccccccccccccccccccccccccaaaggcucuuuucagagccaccagaauu

SEQ ID NO: 18278 - RNA, 2136 nt, Artificial Sequence
  mRNA product Design g-3 comprising derived and/or modified sequence from HRSV(Memphis-37)__AIY60640.1__F-del_DSCav1_mut6 (opt6)
gggagaguccgcucagccagguugcagaagcggcuuagcguguguccuaaucuucucucugcguguagguaggccugugccgcaaacaagcuuaccauggaacuaccuauacuaaaaaccaacgccauaacaacaauacuagccgcaguuacacucugcuuugcauccucacaaaacaucacagaggaauuuuaccaaucuacuugcuccgcaguaucaaaaggauaccuaggagcacuccguacaggaugguacacaucagucauaacaauugaauuaucuaacaucaaagaaaacaaauguaaugguacagacgccaaaguaaaauuaauaaaacaagaacuagacaaauacaaaaacgccguaacagaccuacaaaugcuaaugugcucaacccccgccgcaggaucuggaucagcaauugccucaggcauagcaguaugcaaaguccuacaccuagaaggagaagucaacaaaauaaaaaacgcucuccucucaaccaauaaagcaguaguaucccucucaaacggaguaucaguacuaacauucaaaguacuagaccucaaaaauuauauagacaagcaacuacucccaauauuaaauaaacaauccugcucaauacccaauccagaaacagucauggaauuucaacaaaaaaacaaccgacucuuagaaauaacaagagaauuuucagucaaugccggcgucacaaccccaguaucaacauacaugcuaacaaacucagaacuacuaucacuaaucaacgauaugcccauaaccaacgaccaaaaaaaacuaaugucaaacaauguacaaauuguaagacaacagucuuauucaauaaugugcauaauaaaagaagaagucuuagcauauguaguacaacuaccacuauacggaguaauagacacaccauguuggaaauuacacacauccccacuauguaccaccaacacaaaagaaggaucuaacauaugccuaaccagaacagaccgaggcugguauugcgacaaugcaggaucaguauccuucuuuccacaagcagaaacaugcaaagucugcucuaacagaguauucugcgauacuaugaacucacuuaccuuaccaucagaaguaaaucuauguaauaucgacauauucaaucccaaauaugauugcaaaauaaugaccucaaaaacagauguaucaucaucagucauaacaucacuaggagcaauagucagcugcuaugggaaaacaaaaugcacagcuuccaacaaaaacaaaggaaucauaaaaacauucucaaaugguugugacuacguauccaacaaaggaguagauacaguaucuguaggcaacacauuauacuauguaaauaaacaagaaggacaaagccuauacgucaaaggagaacccaucauaaauuucuaugacccauuaguuuucccaucugacgaauuugacgcuuccaucucccaaguaaaugaaaaaaucaaccaaagccucgcauucauucgcaaaucugacgaauuacuccacaacguaaacguaggaaaauccacaacaaacauuaugaucaccaccauaauaaucguaauaauagucauauuacuacuccucauagcaguaggacuauuccuauacuguaaagcuagauaaggacuagugaagggaacacccaaauuuaauucagccuuaagcacaauuaauuaagagugaaacguaauuguacaagcaguuggucacccaccauagggcaugaucaacaccgcaaccuuuccuuuuucccccagugauucugaaaaaccccucuucccuucagcuugcuuagauguuccaaauuuaguaagcuuaaggcggccuacagaagaaaaagaaaaaaaaggccacaaaaguucccucucacuuucaguaaauaaaauaaaagcagcaacagaaauaaagaaauaaaugaaauucaaaaugaaauaaauauuguguugugcagcauuaaaaaaucaauaaaaauuaaaaaugagcaagaucuaaaaaaaaaaaaaaaaaaaaaaaaaaaaaaaaaaaaaaaaaaaaaaaaaaaaaaaaaaaaaaaaugcaucccccccccccccccccccccccccccccccaaaggcucuuuucagagccaccagaauu

SEQ ID NO: 18279 - RNA, 2136 nt, Artificial Sequence
  mRNA product Design g-3 comprising derived and/or modified sequence from HRSV(Memphis-37)__AIY60640.1__F-del_DSCav1_mut6 (opt11)
gggagaguccgcucagccagguugcagaagcggcuuagcguguguccuaaucuucucucugcguguagguaggccugugccgcaaacaagcuuaccauggaauuaccaauccucaaaacuaacgccaucaccaccauccucgcugccgucacccucugcuucgccuccagccaaaacaucacagaagaguucuaccaaagcacaugcuccgcugucuccaaaggcuaccuuggcgcccuccgcaccggcugguacaccucaguaauuaccauugaacuaagcaacaucaaagaaaauaaaugcaacggcaccgacgccaaaguuaaacucauaaaacaggaacucgacaaauacaaaaacgccguaacagaccuccaaaugcucaugugcuccacccccgccgccggcucaggcuccgccaucgcaagcggaauagcaguuugcaaaguccuccaccuagaaggcgaggucaacaagauuaaaaacgcacuucucucaaccaacaaggccgucguaucacucucaaacggcgucuccguccucaccuucaaaguucuggaccucaaaaacuacaucgauaaacaacuacucccaauacuuaacaaacaaucaugcuccaucccaaaccccgaaaccgucauggaguuccaacagaaaaacaaccgccuacuggaaaucacacgcgaguucagcguaaacgcuggcgucacuacacccgucuccaccuacaugcucaccaauucugaacuccuaucacucauaaacgacaugcccauuaccaacgaccaaaagaaacuaaugucaaacaacguccaaaucguaagacaacaaucguauuccaucaugugcauaauuaaagaagaaguucucgccuacgugguccaacuaccccucuacggagucauagacacuccuuguuggaaacuccacaccucuccccucugcacuaccaacacaaaagaaggcuccaacaucugccucacccgaaccgacagaggcugguacugcgacaacgccggcuccgucuccuucuucccccaagccgaaaccugcaaagucugcuccaaccgcguuuucugcgacaccaugaacucccucacacuccccuccgaagucaaccuauguaacauagacauauucaacccaaaauacgacugcaaaaucaugacauccaaaaccgacgugucuuccucggucaucaccucccucggcgccaucgucucaugcuacggcaaaacuaaaugcaccgcauccaacaaaaacaaaggcauaaucaaaacauucuccaacggcugcgacuacguuucuaacaaaggcgucgauaccgucuccgucggaaacacccucuacuacguaaacaagcaagaaggccagucccuauacguaaaaggagaaccaauuaucaacuucuacgacccccuagucuuccccuccgacgaguucgacgccuccauaucccaagucaacgagaaaaucaaccaaucccuagccuucauccgcaaaucagacgaacuccuccacaacgucaacgucggaaaauccacaacuaacaucaugaucaccaccaucauuaucgucaucauaguuauacuccuccuccucauagccgucggccucuuccuauacugcaaagcucgcuaaggacuagugaagggaacacccaaauuuaauucagccuuaagcacaauuaauuaagagugaaacguaauuguacaagcaguuggucacccaccauagggcaugaucaacaccgcaaccuuuccuuuuucccccagugauucugaaaaaccccucuucccuucagcuugcuuagauguuccaaauuuaguaagcuuaaggcggccuacagaagaaaaagaaaaaaaaggccacaaaaguucccucucacuuucaguaaauaaaauaaaagcagcaacagaaauaaagaaauaaaugaaauucaaaaugaaauaaauauuguguugugcagcauuaaaaaaucaauaaaaauuaaaaaugagcaagaucuaaaaaaaaaaaaaaaaaaaaaaaaaaaaaaaaaaaaaaaaaaaaaaaaaaaaaaaaaaaaaaaaugcaucccccccccccccccccccccccccccccccaaaggcucuuuucagagccaccagaauu

SEQ ID NO: 18280 - RNA, 1931 nt, Artificial Sequence
  mRNA product Design g-4 comprising derived and/or modified sequence from HRSV(Memphis-37)__AIY60640.1__F-del_DSCav1_mut6 (opt1)
gggagacuccugucgggcggaaguaggaggaguagaguuuaaaaacaguacucuuuuuccgguucgggacguaguugaagcaacgacaagccggauaaccgcucuugagacaggaagcuuaccauggagcugcccauccucaagaccaacgccaucaccacgauccuggccgcggugacccugugcuucgccagcucccagaacaucaccgaggaguucuaccagagcacgugcuccgccgucagcaagggcuaccucggcgcccugcgcaccgggugguacaccagcgugaucaccaucgagcuguccaacaucaaggagaacaagugcaacggcaccgacgccaaggugaagcucaucaagcaggagcuggacaaguacaagaacgcggucacggaccugcagaugcugaugugcagcaccccggccgccggcuccgggagcgcgaucgccuccggcaucgccgucugcaaggugcugcaccucgagggcgaggugaacaagaucaagaacgcccugcuguccaccaacaaggccgucgugagccucuccaacggggugagcguccugaccuucaaggugcuggaccucaagaacuacaucgacaagcagcugcugcccauccugaacaagcagagcugcuccauccccaaccccgagaccgucauggaguuccagcagaagaacaaccgccuccuggagaucacgcgggaguucagcgugaacgcgggcgugaccacccccgucuccaccuacaugcugacgaacagcgagcuccugucccugaucaacgacaugccgaucaccaacgaccagaagaagcucaugagcaacaacgugcagaucgugcgccagcaguccuacagcaucaugugcaucaucaaggaggagguccuggccuacguggugcagcugccccucuacggggucaucgacacccccugcuggaagcugcacaccagcccccugugcacgaccaacaccaaggagggcuccaacaucugccucacccggacggaccgcgggugguacugcgacaacgccggcagcguguccuucuucccgcaggccgagaccugcaaggucugcagcaaccggguguucugcgacaccaugaacucccugacccugcccagcgaggugaaccucugcaacaucgacaucuucaaccccaaguacgacugcaagaucaugacguccaagaccgacgucagcuccagcgugaucaccucccugggcgccaucgugagcugcuacgggaagaccaagugcacggcgagcaacaagaacaagggcaucaucaagaccuucuccaacgggugcgacuacgucagcaacaagggcguggacaccguguccgucggcaacacccuguacuacgugaacaagcaggagggccagagccucuacgugaagggggagcccaucaucaacuucuacgacccgcuggucuuccccuccgacgaguucgacgccagcaucucccaggugaacgagaagaucaaccagagccuggccuucauccggaaguccgacgagcuccugcacaacgugaacgucggcaagagcaccacgaacaucaugaucaccaccaucaucaucgugaucaucgugauccugcugcuccugaucgccgucgggcuguuccucuacugcaaggcccgcugaggacuaguaauaaggaaacuguaugaaugucugugggcaggaagugaagagauccuucuguaaagguuuuuggaauuaugucugcugaauaauaaacuuuuuugaaauaauaaaucugguagaaaaaugagaucuaaaaaaaaaaaaaaaaaaaaaaaaaaaaaaaaaaaaaaaaaaaaaaaaaaaaaaaaaaaaaaaaugcaucccccccccccccccccccccccccccccccaaaggcucuuuucagagccaccagaauu

SEQ ID NO: 18281 - RNA, 1931 nt, Artificial Sequence
  mRNA product Design g-4 comprising derived and/or modified sequence from HRSV(Memphis-37)__AIY60640.1__F-del_DSCav1_mut6 (opt1)
gggagacuccugucgggcggaaguaggaggaguagaguuuaaaaacaguacucuuuuuccgguucgggacguaguugaagcaacgacaagccggauaaccgcucuugagacaggaagcuuaccauggagcugcccauccucaagaccaacgccaucaccacgauccuggccgcggugacccugugcuucgccagcucccagaacaucaccgaggaguucuaccagagcacgugcuccgccgucagcaagggcuaccucggggcccugcgcaccggcugguacaccuccgugaucaccaucgagcugagcaacaucaaggagaacaagugcaacgggaccgacgccaaggugaagcucaucaagcaggagcuggacaaguacaagaacgcggucacggaccugcagaugcucaugugcuccaccccggccgccggcagcggguccgccaucgcgagcggcaucgccgugugcaaggugcugcaccuggagggcgaggucaacaagaucaagaacgcccuccuguccaccaacaaggccguggugagccuguccaacggggucagcgugcucaccuucaaggugcuggaccugaagaacuacaucgacaagcagcuccugcccauccugaacaagcaguccugcagcauccccaaccccgagacggucauggaguuccagcagaagaacaaccggcuccuggagaucacccgcgaguucuccgugaacgccggcgugaccaccccggucagcacguacaugcugaccaacuccgagcuccugagccugaucaacgacaugcccaucaccaacgaccagaagaagcucaugagcaacaacgugcagaucgugcggcagcaguccuacagcaucaugugcaucaucaaggaggagguccuggcguacguggugcagcugccccucuacggggucaucgacacccccugcuggaagcugcacacguccccgcugugcaccaccaacaccaaggagggcagcaacaucugccucacgcgcaccgaccgggggugguacugcgacaacgccggcuccgugagcuucuucccccaggccgagaccugcaaggugugcuccaaccgcgucuucugcgacaccaugaacagccugacgcugcccuccgaggugaaccucugcaacaucgacaucuucaaccccaaguacgacugcaagaucaugaccagcaagaccgacgucuccagcuccgugaucaccagccugggcgccaucguguccugcuacgggaagacgaagugcaccgccagcaacaagaacaagggcaucaucaagaccuucuccaacgggugcgacuacgucagcaacaagggcguggacaccguguccgucggcaacacgcuguacuacgugaacaagcaggaggggcagagccucuacgugaagggcgagccgaucaucaacuucuacgacccccuggucuuccccagcgacgaguucgacgcguccaucagccaggugaacgagaagaucaaccagucccuggccuucauccgcaagagcgacgagcuccugcacaacgugaacgucgggaaguccaccaccaacaucaugaucaccaccaucaucaucgugaucaucgugauccugcuccugcugaucgccgucggccucuuccuguacugcaaggcccggugaggacuaguaauaaggaaacuguaugaaugucugugggcaggaagugaagagauccuucuguaaagguuuuuggaauuaugucugcugaauaauaaacuuuuuugaaauaauaaaucugguagaaaaaugagaucuaaaaaaaaaaaaaaaaaaaaaaaaaaaaaaaaaaaaaaaaaaaaaaaaaaaaaaaaaaaaaaaaugcaucccccccccccccccccccccccccccccccaaaggcucuuuucagagccaccagaauu

SEQ ID NO: 18282 - RNA, 1931 nt, Artificial Sequence
  mRNA product Design g-4 comprising derived and/or modified sequence from HRSV(Memphis-37)__AIY60640.1__F-del_DSCav1_mut6 (opt2)
gggagacuccugucgggcggaaguaggaggaguagaguuuaaaaacaguacucuuuuuccgguucgggacguaguugaagcaacgacaagccggauaaccgcucuugagacaggaagcuuaccauggagcuccccauccucaagaccaacgccaucaccaccauccucgccgccgucacccucugcuucgccuccucccagaacaucaccgaggaguucuaccaguccaccugcuccgccgucuccaagggcuaccucggcgcccuccgcaccggcugguacaccuccgucaucaccaucgagcucuccaacaucaaggagaacaagugcaacggcaccgacgccaaggucaagcucaucaagcaggagcucgacaaguacaagaacgccgucaccgaccuccagaugcucaugugcuccacccccgccgccggcuccggcuccgccaucgccuccggcaucgccgucugcaagguccuccaccucgagggcgaggucaacaagaucaagaacgcccuccucuccaccaacaaggccgucgucucccucuccaacggcgucuccguccucaccuucaagguccucgaccucaagaacuacaucgacaagcagcuccuccccauccucaacaagcaguccugcuccauccccaaccccgagaccgucauggaguuccagcagaagaacaaccgccuccucgagaucacccgcgaguucuccgucaacgccggcgucaccacccccgucuccaccuacaugcucaccaacuccgagcuccucucccucaucaacgacaugcccaucaccaacgaccagaagaagcucauguccaacaacguccagaucguccgccagcaguccuacuccaucaugugcaucaucaaggaggagguccucgccuacgucguccagcucccccucuacggcgucaucgacacccccugcuggaagcuccacaccuccccccucugcaccaccaacaccaaggagggcuccaacaucugccucacccgcaccgaccgcggcugguacugcgacaacgccggcuccgucuccuucuucccccaggccgagaccugcaaggucugcuccaaccgcgucuucugcgacaccaugaacucccucacccuccccuccgaggucaaccucugcaacaucgacaucuucaaccccaaguacgacugcaagaucaugaccuccaagaccgacgucuccuccuccgucaucaccucccucggcgccaucgucuccugcuacggcaagaccaagugcaccgccuccaacaagaacaagggcaucaucaagaccuucuccaacggcugcgacuacgucuccaacaagggcgucgacaccgucuccgucggcaacacccucuacuacgucaacaagcaggagggccagucccucuacgucaagggcgagcccaucaucaacuucuacgacccccucgucuuccccuccgacgaguucgacgccuccaucucccaggucaacgagaagaucaaccagucccucgccuucauccgcaaguccgacgagcuccuccacaacgucaacgucggcaaguccaccaccaacaucaugaucaccaccaucaucaucgucaucaucgucauccuccuccuccucaucgccgucggccucuuccucuacugcaaggcccgcugaggacuaguaauaaggaaacuguaugaaugucugugggcaggaagugaagagauccuucuguaaagguuuuuggaauuaugucugcugaauaauaaacuuuuuugaaauaauaaaucugguagaaaaaugagaucuaaaaaaaaaaaaaaaaaaaaaaaaaaaaaaaaaaaaaaaaaaaaaaaaaaaaaaaaaaaaaaaaugcaucccccccccccccccccccccccccccccccaaaggcucuuuucagagccaccagaauu

SEQ ID NO: 18283 - RNA, 1931 nt, Artificial Sequence
  mRNA product Design g-4 comprising derived and/or modified sequence from HRSV(Memphis-37)__AIY60640.1__F-del_DSCav1_mut6 (opt3)
gggagacuccugucgggcggaaguaggaggaguagaguuuaaaaacaguacucuuuuuccgguucgggacguaguugaagcaacgacaagccggauaaccgcucuugagacaggaagcuuaccauggagcugcccauccucaagaccaacgccauuacaacuauacuugcugcagugacgcugugcuucgccagcucccagaauaucaccgaagaguuuuaccaaucuacauguucagcggucaguaaaggcuauuugggggcuuuaagaacuggaugguacaccagcguuauuacaaucgaacuguccaacauuaaggagaauaaaugcaacgguaccgacgccaaggugaaacuaaucaagcaggaacucgauaaguauaaaaaugcaguaacugaccugcagaugcuuauguguucuacuccugccgcuggcucggggucagcaauagccagcggaaucgcugugugcaagguccugcacuuggagggcgaggugaacaaaauuaagaaugcccuccugaguaccaacaaagcgguugugucccugucuaauggugucagcgugcucacguucaagguauuagaucugaagaacuacaucgacaaacagcuuuugccaauucugaauaagcaauccuguucaaucccgaaccccgaaacuguuauggaguuucagcagaaaaauaacaggcuacucgaaauaacccgggaguucagugugaaugcaggggucacaacuccugugagcaccuauaugcugacaaacucugagcuucuguccuugauuaacgauaugccaaucaccaaugaccagaagaaacucaugucaaacaaugugcaaauuguccgccagcagagcuacaguaucaugugcaucauuaaggaagagguucuggccuaugugguacaguuaccccuguacggagugauagauacgccuuguuggaaacuccauacuucuccacuuugcacaaccaacacuaaggaaggcuccaauaucugucugacacgaaccgaccguggcugguacugcgauaacgcugggagcgucucguuuuucccccaagccgagacguguaaggugugcucuaauagaguuuucugcgacaccaugaacuccuugacacuaccuucagaagugaaucuguguaacauugauaucuucaauccaaaauaugacugcaagauaaugacaaguaaaaccgaugucagcuccucugugauuacaagccucggagcaaucguaucauguuacgguaagacuaaaugcaccgcuaguaacaagaauaagggcaucauuaaaacauuuuccaacgggugugacuauguuagcaauaagggaguggacaccgucucugugggcaacacucuguacuaugucaacaaacaggagggucagucacuuuacgugaagggggagccgaucauuaauuucuaugauccccugguuuuuccuagugacgaauuugaugccagcauaucccaagugaacgagaaaaucaaucagucuuuggcguuuauuaggaagucggacgaacuccugcacaacguaaaugucggaaagagcacgacaaacaucaugaucaccacuauuauaaucgugauuaucguuauuuuacugcuacucaucgccgugggccuguuccuuuacugcaaagcacggugaggacuaguaauaaggaaacuguaugaaugucugugggcaggaagugaagagauccuucuguaaagguuuuuggaauuaugucugcugaauaauaaacuuuuuugaaauaauaaaucugguagaaaaaugagaucuaaaaaaaaaaaaaaaaaaaaaaaaaaaaaaaaaaaaaaaaaaaaaaaaaaaaaaaaaaaaaaaaugcaucccccccccccccccccccccccccccccccaaaggcucuuuucagagccaccagaauu

SEQ ID NO: 18284 - RNA, 1931 nt, Artificial Sequence
  mRNA product Design g-4 comprising derived and/or modified sequence from HRSV(Memphis-37)__AIY60640.1__F-del_DSCav1_mut6 (opt4)
gggagacuccugucgggcggaaguaggaggaguagaguuuaaaaacaguacucuuuuuccgguucgggacguaguugaagcaacgacaagccggauaaccgcucuugagacaggaagcuuaccauggagcugcccauccugaagaccaacgccaucaccaccauccuggccgccgugacccugugcuucgccagcagccagaacaucaccgaggaguucuaccagagcaccugcagcgccgugagcaagggcuaccugggcgcccugagaaccggcugguacaccagcgugaucaccaucgagcugagcaacaucaaggagaacaagugcaacggcaccgacgccaaggugaagcugaucaagcaggagcuggacaaguacaagaacgccgugaccgaccugcagaugcugaugugcagcacccccgccgccggcagcggcagcgccaucgccagcggcaucgccgugugcaaggugcugcaccuggagggcgaggugaacaagaucaagaacgcccugcugagcaccaacaaggccguggugagccugagcaacggcgugagcgugcugaccuucaaggugcuggaccugaagaacuacaucgacaagcagcugcugcccauccugaacaagcagagcugcagcauccccaaccccgagaccgugauggaguuccagcagaagaacaacagacugcuggagaucaccagagaguucagcgugaacgccggcgugaccacccccgugagcaccuacaugcugaccaacagcgagcugcugagccugaucaacgacaugcccaucaccaacgaccagaagaagcugaugagcaacaacgugcagaucgugagacagcagagcuacagcaucaugugcaucaucaaggaggaggugcuggccuacguggugcagcugccccuguacggcgugaucgacacccccugcuggaagcugcacaccagcccccugugcaccaccaacaccaaggagggcagcaacaucugccugaccagaaccgacagaggcugguacugcgacaacgccggcagcgugagcuucuucccccaggccgagaccugcaaggugugcagcaacagaguguucugcgacaccaugaacagccugacccugcccagcgaggugaaccugugcaacaucgacaucuucaaccccaaguacgacugcaagaucaugaccagcaagaccgacgugagcagcagcgugaucaccagccugggcgccaucgugagcugcuacggcaagaccaagugcaccgccagcaacaagaacaagggcaucaucaagaccuucagcaacggcugcgacuacgugagcaacaagggcguggacaccgugagcgugggcaacacccuguacuacgugaacaagcaggagggccagagccuguacgugaagggcgagcccaucaucaacuucuacgacccccugguguuccccagcgacgaguucgacgccagcaucagccaggugaacgagaagaucaaccagagccuggccuucaucagaaagagcgacgagcugcugcacaacgugaacgugggcaagagcaccaccaacaucaugaucaccaccaucaucaucgugaucaucgugauccugcugcugcugaucgccgugggccuguuccuguacugcaaggccagaugaggacuaguaauaaggaaacuguaugaaugucugugggcaggaagugaagagauccuucuguaaagguuuuuggaauuaugucugcugaauaauaaacuuuuuugaaauaauaaaucugguagaaaaaugagaucuaaaaaaaaaaaaaaaaaaaaaaaaaaaaaaaaaaaaaaaaaaaaaaaaaaaaaaaaaaaaaaaaugcaucccccccccccccccccccccccccccccccaaaggcucuuuucagagccaccagaauu

SEQ ID NO: 18285 - RNA, 1931 nt, Artificial Sequence
  mRNA product Design g-4 comprising derived and/or modified sequence from HRSV(Memphis-37)__AIY60640.1__F-del_DSCav1_mut6 (opt5)
gggagacuccugucgggcggaaguaggaggaguagaguuuaaaaacaguacucuuuuuccgguucgggacguaguugaagcaacgacaagccggauaaccgcucuugagacaggaagcuuaccauggagcugcccauccucaagaccaacgccauuacaacgauccuggcugccgugacccuuugcuucgcgagcucccagaauauuacagaagaguuuuaccaaucuaccuguagcgcugucuccaaaggcuaucugggggcccucagaacaggaugguacaccucuguuaucacaauugaacugagcaacaucaaggagaauaaaugcaacggcaccgacgccaaggugaaacuuaucaagcaggaacuggauaaguauaaaaaugcugugacggaccuccagaugcugauguguuccaccccugccgcugggucuggaagcgccauugcguccggcaucgccgucugcaaggugcugcaccucgagggggagguuaacaaaauuaagaaugcucugcuuagcacaaacaaagccguggucucucuguccaauggagugagcguucucaccuucaaggugcuggaucuuaagaacuacaucgacaaacagcugcucccgauucugaauaagcaaucuuguuccauccccaacccugaaacagucauggaguuucagcagaaaaauaaccggcugcucgaaauuacccgcgaguucagcgugaaugcuggcgugacgacacccgucucuaccuauaugcugacaaacuccgagcuucugagccucaucaacgauaugccuaucaccaaugaccagaagaaacugauguccaacaauguucaaauugugagacagcagucuuacagcaucaugugcauuaucaaggaagaggugcuugccuaugucgugcagcugccccucuacggcguuauugauaccccuuguuggaaacugcauacauccccgcugugcacgaccaacacaaaggaagggagcaauaucugucucacccggacagaccgcggaugguacugcgauaacgcgggcucuguguccuuuuucccccaagccgagaccuguaaggucugcagcaauagaguguuuugcgacacgaugaacucucugacacuuccuagcgaaguuaaucuguguaacaucgauauuuucaaucccaaauaugacugcaagaucaugaccuccaaaaccgaugugucuagcuccgucauuacaagccucggggcuaucgugucuuguuacggaaagaccaaaugcacagccuccaacaagaauaagggcauuaucaaaacguuuagcaacgggugugacuaugucucuaauaagggaguggacaccguuuccgugggcaacacacuguacuaugucaacaaacaggagggccagagccuuuacgugaagggggagccuaucauuaauuucuaugauccccugguuuuuccguccgacgaauuugaugcuucuaucagccaagugaacgagaaaauuaaucagucccucgccuucauccggaagucugacgaacugcugcacaacgucaaugugggaaagagcaccacaaacauuaugaucaccacgauuaucaucgugauuaucguuauucuccugcuucugaucgccgucggccucuuccuguacugcaaagcucgcugaggacuaguaauaaggaaacuguaugaaugucugugggcaggaagugaagagauccuucuguaaagguuuuuggaauuaugucugcugaauaauaaacuuuuuugaaauaauaaaucugguagaaaaaugagaucuaaaaaaaaaaaaaaaaaaaaaaaaaaaaaaaaaaaaaaaaaaaaaaaaaaaaaaaaaaaaaaaaugcaucccccccccccccccccccccccccccccccaaaggcucuuuucagagccaccagaauu

SEQ ID NO: 18286 - RNA, 1931 nt, Artificial Sequence
  mRNA product Design g-4 comprising derived and/or modified sequence from HRSV(Memphis-37)__AIY60640.1__F-del_DSCav1_mut6 (opt6)
gggagacuccugucgggcggaaguaggaggaguagaguuuaaaaacaguacucuuuuuccgguucgggacguaguugaagcaacgacaagccggauaaccgcucuugagacaggaagcuuaccauggaacuaccuauacuaaaaaccaacgccauaacaacaauacuagccgcaguuacacucugcuuugcauccucacaaaacaucacagaggaauuuuaccaaucuacuugcuccgcaguaucaaaaggauaccuaggagcacuccguacaggaugguacacaucagucauaacaauugaauuaucuaacaucaaagaaaacaaauguaaugguacagacgccaaaguaaaauuaauaaaacaagaacuagacaaauacaaaaacgccguaacagaccuacaaaugcuaaugugcucaacccccgccgcaggaucuggaucagcaauugccucaggcauagcaguaugcaaaguccuacaccuagaaggagaagucaacaaaauaaaaaacgcucuccucucaaccaauaaagcaguaguaucccucucaaacggaguaucaguacuaacauucaaaguacuagaccucaaaaauuauauagacaagcaacuacucccaauauuaaauaaacaauccugcucaauacccaauccagaaacagucauggaauuucaacaaaaaaacaaccgacucuuagaaauaacaagagaauuuucagucaaugccggcgucacaaccccaguaucaacauacaugcuaacaaacucagaacuacuaucacuaaucaacgauaugcccauaaccaacgaccaaaaaaaacuaaugucaaacaauguacaaauuguaagacaacagucuuauucaauaaugugcauaauaaaagaagaagucuuagcauauguaguacaacuaccacuauacggaguaauagacacaccauguuggaaauuacacacauccccacuauguaccaccaacacaaaagaaggaucuaacauaugccuaaccagaacagaccgaggcugguauugcgacaaugcaggaucaguauccuucuuuccacaagcagaaacaugcaaagucugcucuaacagaguauucugcgauacuaugaacucacuuaccuuaccaucagaaguaaaucuauguaauaucgacauauucaaucccaaauaugauugcaaaauaaugaccucaaaaacagauguaucaucaucagucauaacaucacuaggagcaauagucagcugcuaugggaaaacaaaaugcacagcuuccaacaaaaacaaaggaaucauaaaaacauucucaaaugguugugacuacguauccaacaaaggaguagauacaguaucuguaggcaacacauuauacuauguaaauaaacaagaaggacaaagccuauacgucaaaggagaacccaucauaaauuucuaugacccauuaguuuucccaucugacgaauuugacgcuuccaucucccaaguaaaugaaaaaaucaaccaaagccucgcauucauucgcaaaucugacgaauuacuccacaacguaaacguaggaaaauccacaacaaacauuaugaucaccaccauaauaaucguaauaauagucauauuacuacuccucauagcaguaggacuauuccuauacuguaaagcuagauaaggacuaguaauaaggaaacuguaugaaugucugugggcaggaagugaagagauccuucuguaaagguuuuuggaauuaugucugcugaauaauaaacuuuuuugaaauaauaaaucugguagaaaaaugagaucuaaaaaaaaaaaaaaaaaaaaaaaaaaaaaaaaaaaaaaaaaaaaaaaaaaaaaaaaaaaaaaaaugcaucccccccccccccccccccccccccccccccaaaggcucuuuucagagccaccagaauu

SEQ ID NO: 18287 - RNA, 1931 nt, Artificial Sequence
  mRNA product Design g-4 comprising derived and/or modified sequence from HRSV(Memphis-37)__AIY60640.1__F-del_DSCav1_mut6 (opt11)
gggagacuccugucgggcggaaguaggaggaguagaguuuaaaaacaguacucuuuuuccgguucgggacguaguugaagcaacgacaagccggauaaccgcucuugagacaggaagcuuaccauggaauuaccaauccucaaaacuaacgccaucaccaccauccucgcugccgucacccucugcuucgccuccagccaaaacaucacagaagaguucuaccaaagcacaugcuccgcugucuccaaaggcuaccuuggcgcccuccgcaccggcugguacaccucaguaauuaccauugaacuaagcaacaucaaagaaaauaaaugcaacggcaccgacgccaaaguuaaacucauaaaacaggaacucgacaaauacaaaaacgccguaacagaccuccaaaugcucaugugcuccacccccgccgccggcucaggcuccgccaucgcaagcggaauagcaguuugcaaaguccuccaccuagaaggcgaggucaacaagauuaaaaacgcacuucucucaaccaacaaggccgucguaucacucucaaacggcgucuccguccucaccuucaaaguucuggaccucaaaaacuacaucgauaaacaacuacucccaauacuuaacaaacaaucaugcuccaucccaaaccccgaaaccgucauggaguuccaacagaaaaacaaccgccuacuggaaaucacacgcgaguucagcguaaacgcuggcgucacuacacccgucuccaccuacaugcucaccaauucugaacuccuaucacucauaaacgacaugcccauuaccaacgaccaaaagaaacuaaugucaaacaacguccaaaucguaagacaacaaucguauuccaucaugugcauaauuaaagaagaaguucucgccuacgugguccaacuaccccucuacggagucauagacacuccuuguuggaaacuccacaccucuccccucugcacuaccaacacaaaagaaggcuccaacaucugccucacccgaaccgacagaggcugguacugcgacaacgccggcuccgucuccuucuucccccaagccgaaaccugcaaagucugcuccaaccgcguuuucugcgacaccaugaacucccucacacuccccuccgaagucaaccuauguaacauagacauauucaacccaaaauacgacugcaaaaucaugacauccaaaaccgacgugucuuccucggucaucaccucccucggcgccaucgucucaugcuacggcaaaacuaaaugcaccgcauccaacaaaaacaaaggcauaaucaaaacauucuccaacggcugcgacuacguuucuaacaaaggcgucgauaccgucuccgucggaaacacccucuacuacguaaacaagcaagaaggccagucccuauacguaaaaggagaaccaauuaucaacuucuacgacccccuagucuuccccuccgacgaguucgacgccuccauaucccaagucaacgagaaaaucaaccaaucccuagccuucauccgcaaaucagacgaacuccuccacaacgucaacgucggaaaauccacaacuaacaucaugaucaccaccaucauuaucgucaucauaguuauacuccuccuccucauagccgucggccucuuccuauacugcaaagcucgcuaaggacuaguaauaaggaaacuguaugaaugucugugggcaggaagugaagagauccuucuguaaagguuuuuggaauuaugucugcugaauaauaaacuuuuuugaaauaauaaaucugguagaaaaaugagaucuaaaaaaaaaaaaaaaaaaaaaaaaaaaaaaaaaaaaaaaaaaaaaaaaaaaaaaaaaaaaaaaaugcaucccccccccccccccccccccccccccccccaaaggcucuuuucagagccaccagaauu

SEQ ID NO: 18288 - RNA, 1907 nt, Artificial Sequence
  mRNA product Design g-5 comprising derived and/or modified sequence from HRSV(Memphis-37)__AIY60640.1__F-del_DSCav1_mut6 (opt1)
gggagacccgugacccggaaguuguacggcuacgcgacuuucccucccacaaacccucgcgcccuuccuuuccuacuugggcccggcagaaagcuuaccauggagcugcccauccucaagaccaacgccaucaccacgauccuggccgcggugacccugugcuucgccagcucccagaacaucaccgaggaguucuaccagagcacgugcuccgccgucagcaagggcuaccucggcgcccugcgcaccgggugguacaccagcgugaucaccaucgagcuguccaacaucaaggagaacaagugcaacggcaccgacgccaaggugaagcucaucaagcaggagcuggacaaguacaagaacgcggucacggaccugcagaugcugaugugcagcaccccggccgccggcuccgggagcgcgaucgccuccggcaucgccgucugcaaggugcugcaccucgagggcgaggugaacaagaucaagaacgcccugcuguccaccaacaaggccgucgugagccucuccaacggggugagcguccugaccuucaaggugcuggaccucaagaacuacaucgacaagcagcugcugcccauccugaacaagcagagcugcuccauccccaaccccgagaccgucauggaguuccagcagaagaacaaccgccuccuggagaucacgcgggaguucagcgugaacgcgggcgugaccacccccgucuccaccuacaugcugacgaacagcgagcuccugucccugaucaacgacaugccgaucaccaacgaccagaagaagcucaugagcaacaacgugcagaucgugcgccagcaguccuacagcaucaugugcaucaucaaggaggagguccuggccuacguggugcagcugccccucuacggggucaucgacacccccugcuggaagcugcacaccagcccccugugcacgaccaacaccaaggagggcuccaacaucugccucacccggacggaccgcgggugguacugcgacaacgccggcagcguguccuucuucccgcaggccgagaccugcaaggucugcagcaaccggguguucugcgacaccaugaacucccugacccugcccagcgaggugaaccucugcaacaucgacaucuucaaccccaaguacgacugcaagaucaugacguccaagaccgacgucagcuccagcgugaucaccucccugggcgccaucgugagcugcuacgggaagaccaagugcacggcgagcaacaagaacaagggcaucaucaagaccuucuccaacgggugcgacuacgucagcaacaagggcguggacaccguguccgucggcaacacccuguacuacgugaacaagcaggagggccagagccucuacgugaagggggagcccaucaucaacuucuacgacccgcuggucuuccccuccgacgaguucgacgccagcaucucccaggugaacgagaagaucaaccagagccuggccuucauccggaaguccgacgagcuccugcacaacgugaacgucggcaagagcaccacgaacaucaugaucaccaccaucaucaucgugaucaucgugauccugcugcuccugaucgccgucgggcuguuccucuacugcaaggcccgcugaggacuaguaauaaggaaacuguaugaaugucugugggcaggaagugaagagauccuucuguaaagguuuuuggaauuaugucugcugaauaauaaacuuuuuugaaauaauaaaucugguagaaaaaugagaucuaaaaaaaaaaaaaaaaaaaaaaaaaaaaaaaaaaaaaaaaaaaaaaaaaaaaaaaaaaaaaaaaugcaucccccccccccccccccccccccccccccccaaaggcucuuuucagagccaccagaauu

SEQ ID NO: 18289 - RNA, 1907 nt, Artificial Sequence
  mRNA product Design g-5 comprising derived and/or modified sequence from HRSV(Memphis-37)__AIY60640.1__F-del_DSCav1_mut6 (opt1)
gggagacccgugacccggaaguuguacggcuacgcgacuuucccucccacaaacccucgcgcccuuccuuuccuacuugggcccggcagaaagcuuaccauggagcugcccauccucaagaccaacgccaucaccacgauccuggccgcggugacccugugcuucgccagcucccagaacaucaccgaggaguucuaccagagcacgugcuccgccgucagcaagggcuaccucggggcccugcgcaccggcugguacaccuccgugaucaccaucgagcugagcaacaucaaggagaacaagugcaacgggaccgacgccaaggugaagcucaucaagcaggagcuggacaaguacaagaacgcggucacggaccugcagaugcucaugugcuccaccccggccgccggcagcggguccgccaucgcgagcggcaucgccgugugcaaggugcugcaccuggagggcgaggucaacaagaucaagaacgcccuccuguccaccaacaaggccguggugagccuguccaacggggucagcgugcucaccuucaaggugcuggaccugaagaacuacaucgacaagcagcuccugcccauccugaacaagcaguccugcagcauccccaaccccgagacggucauggaguuccagcagaagaacaaccggcuccuggagaucacccgcgaguucuccgugaacgccggcgugaccaccccggucagcacguacaugcugaccaacuccgagcuccugagccugaucaacgacaugcccaucaccaacgaccagaagaagcucaugagcaacaacgugcagaucgugcggcagcaguccuacagcaucaugugcaucaucaaggaggagguccuggcguacguggugcagcugccccucuacggggucaucgacacccccugcuggaagcugcacacguccccgcugugcaccaccaacaccaaggagggcagcaacaucugccucacgcgcaccgaccgggggugguacugcgacaacgccggcuccgugagcuucuucccccaggccgagaccugcaaggugugcuccaaccgcgucuucugcgacaccaugaacagccugacgcugcccuccgaggugaaccucugcaacaucgacaucuucaaccccaaguacgacugcaagaucaugaccagcaagaccgacgucuccagcuccgugaucaccagccugggcgccaucguguccugcuacgggaagacgaagugcaccgccagcaacaagaacaagggcaucaucaagaccuucuccaacgggugcgacuacgucagcaacaagggcguggacaccguguccgucggcaacacgcuguacuacgugaacaagcaggaggggcagagccucuacgugaagggcgagccgaucaucaacuucuacgacccccuggucuuccccagcgacgaguucgacgcguccaucagccaggugaacgagaagaucaaccagucccuggccuucauccgcaagagcgacgagcuccugcacaacgugaacgucgggaaguccaccaccaacaucaugaucaccaccaucaucaucgugaucaucgugauccugcuccugcugaucgccgucggccucuuccuguacugcaaggcccggugaggacuaguaauaaggaaacuguaugaaugucugugggcaggaagugaagagauccuucuguaaagguuuuuggaauuaugucugcugaauaauaaacuuuuuugaaauaauaaaucugguagaaaaaugagaucuaaaaaaaaaaaaaaaaaaaaaaaaaaaaaaaaaaaaaaaaaaaaaaaaaaaaaaaaaaaaaaaaugcaucccccccccccccccccccccccccccccccaaaggcucuuuucagagccaccagaauu

SEQ ID NO: 18290 - RNA, 1907 nt, Artificial Sequence
  mRNA product Design g-5 comprising derived and/or modified sequence from HRSV(Memphis-37)__AIY60640.1__F-del_DSCav1_mut6 (opt2)
gggagacccgugacccggaaguuguacggcuacgcgacuuucccucccacaaacccucgcgcccuuccuuuccuacuugggcccggcagaaagcuuaccauggagcuccccauccucaagaccaacgccaucaccaccauccucgccgccgucacccucugcuucgccuccucccagaacaucaccgaggaguucuaccaguccaccugcuccgccgucuccaagggcuaccucggcgcccuccgcaccggcugguacaccuccgucaucaccaucgagcucuccaacaucaaggagaacaagugcaacggcaccgacgccaaggucaagcucaucaagcaggagcucgacaaguacaagaacgccgucaccgaccuccagaugcucaugugcuccacccccgccgccggcuccggcuccgccaucgccuccggcaucgccgucugcaagguccuccaccucgagggcgaggucaacaagaucaagaacgcccuccucuccaccaacaaggccgucgucucccucuccaacggcgucuccguccucaccuucaagguccucgaccucaagaacuacaucgacaagcagcuccuccccauccucaacaagcaguccugcuccauccccaaccccgagaccgucauggaguuccagcagaagaacaaccgccuccucgagaucacccgcgaguucuccgucaacgccggcgucaccacccccgucuccaccuacaugcucaccaacuccgagcuccucucccucaucaacgacaugcccaucaccaacgaccagaagaagcucauguccaacaacguccagaucguccgccagcaguccuacuccaucaugugcaucaucaaggaggagguccucgccuacgucguccagcucccccucuacggcgucaucgacacccccugcuggaagcuccacaccuccccccucugcaccaccaacaccaaggagggcuccaacaucugccucacccgcaccgaccgcggcugguacugcgacaacgccggcuccgucuccuucuucccccaggccgagaccugcaaggucugcuccaaccgcgucuucugcgacaccaugaacucccucacccuccccuccgaggucaaccucugcaacaucgacaucuucaaccccaaguacgacugcaagaucaugaccuccaagaccgacgucuccuccuccgucaucaccucccucggcgccaucgucuccugcuacggcaagaccaagugcaccgccuccaacaagaacaagggcaucaucaagaccuucuccaacggcugcgacuacgucuccaacaagggcgucgacaccgucuccgucggcaacacccucuacuacgucaacaagcaggagggccagucccucuacgucaagggcgagcccaucaucaacuucuacgacccccucgucuuccccuccgacgaguucgacgccuccaucucccaggucaacgagaagaucaaccagucccucgccuucauccgcaaguccgacgagcuccuccacaacgucaacgucggcaaguccaccaccaacaucaugaucaccaccaucaucaucgucaucaucgucauccuccuccuccucaucgccgucggccucuuccucuacugcaaggcccgcugaggacuaguaauaaggaaacuguaugaaugucugugggcaggaagugaagagauccuucuguaaagguuuuuggaauuaugucugcugaauaauaaacuuuuuugaaauaauaaaucugguagaaaaaugagaucuaaaaaaaaaaaaaaaaaaaaaaaaaaaaaaaaaaaaaaaaaaaaaaaaaaaaaaaaaaaaaaaaugcaucccccccccccccccccccccccccccccccaaaggcucuuuucagagccaccagaauu

SEQ ID NO: 18291 - RNA, 1907 nt, Artificial Sequence
  mRNA product Design g-5 comprising derived and/or modified sequence from HRSV(Memphis-37)__AIY60640.1__F-del_DSCav1_mut6 (opt3)
gggagacccgugacccggaaguuguacggcuacgcgacuuucccucccacaaacccucgcgcccuuccuuuccuacuugggcccggcagaaagcuuaccauggagcugcccauccucaagaccaacgccauuacaacuauacuugcugcagugacgcugugcuucgccagcucccagaauaucaccgaagaguuuuaccaaucuacauguucagcggucaguaaaggcuauuugggggcuuuaagaacuggaugguacaccagcguuauuacaaucgaacuguccaacauuaaggagaauaaaugcaacgguaccgacgccaaggugaaacuaaucaagcaggaacucgauaaguauaaaaaugcaguaacugaccugcagaugcuuauguguucuacuccugccgcuggcucggggucagcaauagccagcggaaucgcugugugcaagguccugcacuuggagggcgaggugaacaaaauuaagaaugcccuccugaguaccaacaaagcgguugugucccugucuaauggugucagcgugcucacguucaagguauuagaucugaagaacuacaucgacaaacagcuuuugccaauucugaauaagcaauccuguucaaucccgaaccccgaaacuguuauggaguuucagcagaaaaauaacaggcuacucgaaauaacccgggaguucagugugaaugcaggggucacaacuccugugagcaccuauaugcugacaaacucugagcuucuguccuugauuaacgauaugccaaucaccaaugaccagaagaaacucaugucaaacaaugugcaaauuguccgccagcagagcuacaguaucaugugcaucauuaaggaagagguucuggccuaugugguacaguuaccccuguacggagugauagauacgccuuguuggaaacuccauacuucuccacuuugcacaaccaacacuaaggaaggcuccaauaucugucugacacgaaccgaccguggcugguacugcgauaacgcugggagcgucucguuuuucccccaagccgagacguguaaggugugcucuaauagaguuuucugcgacaccaugaacuccuugacacuaccuucagaagugaaucuguguaacauugauaucuucaauccaaaauaugacugcaagauaaugacaaguaaaaccgaugucagcuccucugugauuacaagccucggagcaaucguaucauguuacgguaagacuaaaugcaccgcuaguaacaagaauaagggcaucauuaaaacauuuuccaacgggugugacuauguuagcaauaagggaguggacaccgucucugugggcaacacucuguacuaugucaacaaacaggagggucagucacuuuacgugaagggggagccgaucauuaauuucuaugauccccugguuuuuccuagugacgaauuugaugccagcauaucccaagugaacgagaaaaucaaucagucuuuggcguuuauuaggaagucggacgaacuccugcacaacguaaaugucggaaagagcacgacaaacaucaugaucaccacuauuauaaucgugauuaucguuauuuuacugcuacucaucgccgugggccuguuccuuuacugcaaagcacggugaggacuaguaauaaggaaacuguaugaaugucugugggcaggaagugaagagauccuucuguaaagguuuuuggaauuaugucugcugaauaauaaacuuuuuugaaauaauaaaucugguagaaaaaugagaucuaaaaaaaaaaaaaaaaaaaaaaaaaaaaaaaaaaaaaaaaaaaaaaaaaaaaaaaaaaaaaaaaugcaucccccccccccccccccccccccccccccccaaaggcucuuuucagagccaccagaauu

SEQ ID NO: 18292 - RNA, 1907 nt, Artificial Sequence
  mRNA product Design g-5 comprising derived and/or modified sequence from HRSV(Memphis-37)__AIY60640.1__F-del_DSCav1_mut6 (opt4)
gggagacccgugacccggaaguuguacggcuacgcgacuuucccucccacaaacccucgcgcccuuccuuuccuacuugggcccggcagaaagcuuaccauggagcugcccauccugaagaccaacgccaucaccaccauccuggccgccgugacccugugcuucgccagcagccagaacaucaccgaggaguucuaccagagcaccugcagcgccgugagcaagggcuaccugggcgcccugagaaccggcugguacaccagcgugaucaccaucgagcugagcaacaucaaggagaacaagugcaacggcaccgacgccaaggugaagcugaucaagcaggagcuggacaaguacaagaacgccgugaccgaccugcagaugcugaugugcagcacccccgccgccggcagcggcagcgccaucgccagcggcaucgccgugugcaaggugcugcaccuggagggcgaggugaacaagaucaagaacgcccugcugagcaccaacaaggccguggugagccugagcaacggcgugagcgugcugaccuucaaggugcuggaccugaagaacuacaucgacaagcagcugcugcccauccugaacaagcagagcugcagcauccccaaccccgagaccgugauggaguuccagcagaagaacaacagacugcuggagaucaccagagaguucagcgugaacgccggcgugaccacccccgugagcaccuacaugcugaccaacagcgagcugcugagccugaucaacgacaugcccaucaccaacgaccagaagaagcugaugagcaacaacgugcagaucgugagacagcagagcuacagcaucaugugcaucaucaaggaggaggugcuggccuacguggugcagcugccccuguacggcgugaucgacacccccugcuggaagcugcacaccagcccccugugcaccaccaacaccaaggagggcagcaacaucugccugaccagaaccgacagaggcugguacugcgacaacgccggcagcgugagcuucuucccccaggccgagaccugcaaggugugcagcaacagaguguucugcgacaccaugaacagccugacccugcccagcgaggugaaccugugcaacaucgacaucuucaaccccaaguacgacugcaagaucaugaccagcaagaccgacgugagcagcagcgugaucaccagccugggcgccaucgugagcugcuacggcaagaccaagugcaccgccagcaacaagaacaagggcaucaucaagaccuucagcaacggcugcgacuacgugagcaacaagggcguggacaccgugagcgugggcaacacccuguacuacgugaacaagcaggagggccagagccuguacgugaagggcgagcccaucaucaacuucuacgacccccugguguuccccagcgacgaguucgacgccagcaucagccaggugaacgagaagaucaaccagagccuggccuucaucagaaagagcgacgagcugcugcacaacgugaacgugggcaagagcaccaccaacaucaugaucaccaccaucaucaucgugaucaucgugauccugcugcugcugaucgccgugggccuguuccuguacugcaaggccagaugaggacuaguaauaaggaaacuguaugaaugucugugggcaggaagugaagagauccuucuguaaagguuuuuggaauuaugucugcugaauaauaaacuuuuuugaaauaauaaaucugguagaaaaaugagaucuaaaaaaaaaaaaaaaaaaaaaaaaaaaaaaaaaaaaaaaaaaaaaaaaaaaaaaaaaaaaaaaaugcaucccccccccccccccccccccccccccccccaaaggcucuuuucagagccaccagaauu

SEQ ID NO: 18293 - RNA, 1907 nt, Artificial Sequence
  mRNA product Design g-5 comprising derived and/or modified sequence from HRSV(Memphis-37)__AIY60640.1__F-del_DSCav1_mut6 (opt5)
gggagacccgugacccggaaguuguacggcuacgcgacuuucccucccacaaacccucgcgcccuuccuuuccuacuugggcccggcagaaagcuuaccauggagcugcccauccucaagaccaacgccauuacaacgauccuggcugccgugacccuuugcuucgcgagcucccagaauauuacagaagaguuuuaccaaucuaccuguagcgcugucuccaaaggcuaucugggggcccucagaacaggaugguacaccucuguuaucacaauugaacugagcaacaucaaggagaauaaaugcaacggcaccgacgccaaggugaaacuuaucaagcaggaacuggauaaguauaaaaaugcugugacggaccuccagaugcugauguguuccaccccugccgcugggucuggaagcgccauugcguccggcaucgccgucugcaaggugcugcaccucgagggggagguuaacaaaauuaagaaugcucugcuuagcacaaacaaagccguggucucucuguccaauggagugagcguucucaccuucaaggugcuggaucuuaagaacuacaucgacaaacagcugcucccgauucugaauaagcaaucuuguuccauccccaacccugaaacagucauggaguuucagcagaaaaauaaccggcugcucgaaauuacccgcgaguucagcgugaaugcuggcgugacgacacccgucucuaccuauaugcugacaaacuccgagcuucugagccucaucaacgauaugccuaucaccaaugaccagaagaaacugauguccaacaauguucaaauugugagacagcagucuuacagcaucaugugcauuaucaaggaagaggugcuugccuaugucgugcagcugccccucuacggcguuauugauaccccuuguuggaaacugcauacauccccgcugugcacgaccaacacaaaggaagggagcaauaucugucucacccggacagaccgcggaugguacugcgauaacgcgggcucuguguccuuuuucccccaagccgagaccuguaaggucugcagcaauagaguguuuugcgacacgaugaacucucugacacuuccuagcgaaguuaaucuguguaacaucgauauuuucaaucccaaauaugacugcaagaucaugaccuccaaaaccgaugugucuagcuccgucauuacaagccucggggcuaucgugucuuguuacggaaagaccaaaugcacagccuccaacaagaauaagggcauuaucaaaacguuuagcaacgggugugacuaugucucuaauaagggaguggacaccguuuccgugggcaacacacuguacuaugucaacaaacaggagggccagagccuuuacgugaagggggagccuaucauuaauuucuaugauccccugguuuuuccguccgacgaauuugaugcuucuaucagccaagugaacgagaaaauuaaucagucccucgccuucauccggaagucugacgaacugcugcacaacgucaaugugggaaagagcaccacaaacauuaugaucaccacgauuaucaucgugauuaucguuauucuccugcuucugaucgccgucggccucuuccuguacugcaaagcucgcugaggacuaguaauaaggaaacuguaugaaugucugugggcaggaagugaagagauccuucuguaaagguuuuuggaauuaugucugcugaauaauaaacuuuuuugaaauaauaaaucugguagaaaaaugagaucuaaaaaaaaaaaaaaaaaaaaaaaaaaaaaaaaaaaaaaaaaaaaaaaaaaaaaaaaaaaaaaaaugcaucccccccccccccccccccccccccccccccaaaggcucuuuucagagccaccagaauu

SEQ ID NO: 18294 - RNA, 1907 nt, Artificial Sequence
  mRNA product Design g-5 comprising derived and/or modified sequence from HRSV(Memphis-37)__AIY60640.1__F-del_DSCav1_mut6 (opt6)
gggagacccgugacccggaaguuguacggcuacgcgacuuucccucccacaaacccucgcgcccuuccuuuccuacuugggcccggcagaaagcuuaccauggaacuaccuauacuaaaaaccaacgccauaacaacaauacuagccgcaguuacacucugcuuugcauccucacaaaacaucacagaggaauuuuaccaaucuacuugcuccgcaguaucaaaaggauaccuaggagcacuccguacaggaugguacacaucagucauaacaauugaauuaucuaacaucaaagaaaacaaauguaaugguacagacgccaaaguaaaauuaauaaaacaagaacuagacaaauacaaaaacgccguaacagaccuacaaaugcuaaugugcucaacccccgccgcaggaucuggaucagcaauugccucaggcauagcaguaugcaaaguccuacaccuagaaggagaagucaacaaaauaaaaaacgcucuccucucaaccaauaaagcaguaguaucccucucaaacggaguaucaguacuaacauucaaaguacuagaccucaaaaauuauauagacaagcaacuacucccaauauuaaauaaacaauccugcucaauacccaauccagaaacagucauggaauuucaacaaaaaaacaaccgacucuuagaaauaacaagagaauuuucagucaaugccggcgucacaaccccaguaucaacauacaugcuaacaaacucagaacuacuaucacuaaucaacgauaugcccauaaccaacgaccaaaaaaaacuaaugucaaacaauguacaaauuguaagacaacagucuuauucaauaaugugcauaauaaaagaagaagucuuagcauauguaguacaacuaccacuauacggaguaauagacacaccauguuggaaauuacacacauccccacuauguaccaccaacacaaaagaaggaucuaacauaugccuaaccagaacagaccgaggcugguauugcgacaaugcaggaucaguauccuucuuuccacaagcagaaacaugcaaagucugcucuaacagaguauucugcgauacuaugaacucacuuaccuuaccaucagaaguaaaucuauguaauaucgacauauucaaucccaaauaugauugcaaaauaaugaccucaaaaacagauguaucaucaucagucauaacaucacuaggagcaauagucagcugcuaugggaaaacaaaaugcacagcuuccaacaaaaacaaaggaaucauaaaaacauucucaaaugguugugacuacguauccaacaaaggaguagauacaguaucuguaggcaacacauuauacuauguaaauaaacaagaaggacaaagccuauacgucaaaggagaacccaucauaaauuucuaugacccauuaguuuucccaucugacgaauuugacgcuuccaucucccaaguaaaugaaaaaaucaaccaaagccucgcauucauucgcaaaucugacgaauuacuccacaacguaaacguaggaaaauccacaacaaacauuaugaucaccaccauaauaaucguaauaauagucauauuacuacuccucauagcaguaggacuauuccuauacuguaaagcuagauaaggacuaguaauaaggaaacuguaugaaugucugugggcaggaagugaagagauccuucuguaaagguuuuuggaauuaugucugcugaauaauaaacuuuuuugaaauaauaaaucugguagaaaaaugagaucuaaaaaaaaaaaaaaaaaaaaaaaaaaaaaaaaaaaaaaaaaaaaaaaaaaaaaaaaaaaaaaaaugcaucccccccccccccccccccccccccccccccaaaggcucuuuucagagccaccagaauu

SEQ ID NO: 18295 - RNA, 1907 nt, Artificial Sequence
  mRNA product Design g-5 comprising derived and/or modified sequence from HRSV(Memphis-37)__AIY60640.1__F-del_DSCav1_mut6 (opt11)
gggagacccgugacccggaaguuguacggcuacgcgacuuucccucccacaaacccucgcgcccuuccuuuccuacuugggcccggcagaaagcuuaccauggaauuaccaauccucaaaacuaacgccaucaccaccauccucgcugccgucacccucugcuucgccuccagccaaaacaucacagaagaguucuaccaaagcacaugcuccgcugucuccaaaggcuaccuuggcgcccuccgcaccggcugguacaccucaguaauuaccauugaacuaagcaacaucaaagaaaauaaaugcaacggcaccgacgccaaaguuaaacucauaaaacaggaacucgacaaauacaaaaacgccguaacagaccuccaaaugcucaugugcuccacccccgccgccggcucaggcuccgccaucgcaagcggaauagcaguuugcaaaguccuccaccuagaaggcgaggucaacaagauuaaaaacgcacuucucucaaccaacaaggccgucguaucacucucaaacggcgucuccguccucaccuucaaaguucuggaccucaaaaacuacaucgauaaacaacuacucccaauacuuaacaaacaaucaugcuccaucccaaaccccgaaaccgucauggaguuccaacagaaaaacaaccgccuacuggaaaucacacgcgaguucagcguaaacgcuggcgucacuacacccgucuccaccuacaugcucaccaauucugaacuccuaucacucauaaacgacaugcccauuaccaacgaccaaaagaaacuaaugucaaacaacguccaaaucguaagacaacaaucguauuccaucaugugcauaauuaaagaagaaguucucgccuacgugguccaacuaccccucuacggagucauagacacuccuuguuggaaacuccacaccucuccccucugcacuaccaacacaaaagaaggcuccaacaucugccucacccgaaccgacagaggcugguacugcgacaacgccggcuccgucuccuucuucccccaagccgaaaccugcaaagucugcuccaaccgcguuuucugcgacaccaugaacucccucacacuccccuccgaagucaaccuauguaacauagacauauucaacccaaaauacgacugcaaaaucaugacauccaaaaccgacgugucuuccucggucaucaccucccucggcgccaucgucucaugcuacggcaaaacuaaaugcaccgcauccaacaaaaacaaaggcauaaucaaaacauucuccaacggcugcgacuacguuucuaacaaaggcgucgauaccgucuccgucggaaacacccucuacuacguaaacaagcaagaaggccagucccuauacguaaaaggagaaccaauuaucaacuucuacgacccccuagucuuccccuccgacgaguucgacgccuccauaucccaagucaacgagaaaaucaaccaaucccuagccuucauccgcaaaucagacgaacuccuccacaacgucaacgucggaaaauccacaacuaacaucaugaucaccaccaucauuaucgucaucauaguuauacuccuccuccucauagccgucggccucuuccuauacugcaaagcucgcuaaggacuaguaauaaggaaacuguaugaaugucugugggcaggaagugaagagauccuucuguaaagguuuuuggaauuaugucugcugaauaauaaacuuuuuugaaauaauaaaucugguagaaaaaugagaucuaaaaaaaaaaaaaaaaaaaaaaaaaaaaaaaaaaaaaaaaaaaaaaaaaaaaaaaaaaaaaaaaugcaucccccccccccccccccccccccccccccccaaaggcucuuuucagagccaccagaauu

SEQ ID NO: 18296 - RNA, 1923 nt, Artificial Sequence
  mRNA product Design h-1 comprising derived and/or modified sequence from HRSV(Memphis-37)__AIY60640.1__F-del_DSCav1_mut6 (opt1)
gggagacccgugacccggaaguuguacggcuacgcgacuuucccucccacaaacccucgcgcccuuccuuuccuacuugggcccggcagaaagcuuaccauggagcugcccauccucaagaccaacgccaucaccacgauccuggccgcggugacccugugcuucgccagcucccagaacaucaccgaggaguucuaccagagcacgugcuccgccgucagcaagggcuaccucggcgcccugcgcaccgggugguacaccagcgugaucaccaucgagcuguccaacaucaaggagaacaagugcaacggcaccgacgccaaggugaagcucaucaagcaggagcuggacaaguacaagaacgcggucacggaccugcagaugcugaugugcagcaccccggccgccggcuccgggagcgcgaucgccuccggcaucgccgucugcaaggugcugcaccucgagggcgaggugaacaagaucaagaacgcccugcuguccaccaacaaggccgucgugagccucuccaacggggugagcguccugaccuucaaggugcuggaccucaagaacuacaucgacaagcagcugcugcccauccugaacaagcagagcugcuccauccccaaccccgagaccgucauggaguuccagcagaagaacaaccgccuccuggagaucacgcgggaguucagcgugaacgcgggcgugaccacccccgucuccaccuacaugcugacgaacagcgagcuccugucccugaucaacgacaugccgaucaccaacgaccagaagaagcucaugagcaacaacgugcagaucgugcgccagcaguccuacagcaucaugugcaucaucaaggaggagguccuggccuacguggugcagcugccccucuacggggucaucgacacccccugcuggaagcugcacaccagcccccugugcacgaccaacaccaaggagggcuccaacaucugccucacccggacggaccgcgggugguacugcgacaacgccggcagcguguccuucuucccgcaggccgagaccugcaaggucugcagcaaccggguguucugcgacaccaugaacucccugacccugcccagcgaggugaaccucugcaacaucgacaucuucaaccccaaguacgacugcaagaucaugacguccaagaccgacgucagcuccagcgugaucaccucccugggcgccaucgugagcugcuacgggaagaccaagugcacggcgagcaacaagaacaagggcaucaucaagaccuucuccaacgggugcgacuacgucagcaacaagggcguggacaccguguccgucggcaacacccuguacuacgugaacaagcaggagggccagagccucuacgugaagggggagcccaucaucaacuucuacgacccgcuggucuuccccuccgacgaguucgacgccagcaucucccaggugaacgagaagaucaaccagagccuggccuucauccggaaguccgacgagcuccugcacaacgugaacgucggcaagagcaccacgaacaucaugaucaccaccaucaucaucgugaucaucgugauccugcugcuccugaucgccgucgggcuguuccucuacugcaaggcccgcugaggacuaguacuggcugcaucucccuuuccucuguccuccauccuucucccaggauggugaagggggaccugguacccagugauccccaccccaggauccuaaaucaugacuuaccugcuaauaaaaacucauuggaaaagugagaagaucuaaaaaaaaaaaaaaaaaaaaaaaaaaaaaaaaaaaaaaaaaaaaaaaaaaaaaaaaaaaaaaaaugcaucccccccccccccccccccccccccccccccaaaggcucuuuucagagccaccagaauu

SEQ ID NO: 18297 - RNA, 1923 nt, Artificial Sequence
  mRNA product Design h-1 comprising derived and/or modified sequence from HRSV(Memphis-37)__AIY60640.1__F-del_DSCav1_mut6 (opt1)
gggagacccgugacccggaaguuguacggcuacgcgacuuucccucccacaaacccucgcgcccuuccuuuccuacuugggcccggcagaaagcuuaccauggagcugcccauccucaagaccaacgccaucaccacgauccuggccgcggugacccugugcuucgccagcucccagaacaucaccgaggaguucuaccagagcacgugcuccgccgucagcaagggcuaccucggggcccugcgcaccggcugguacaccuccgugaucaccaucgagcugagcaacaucaaggagaacaagugcaacgggaccgacgccaaggugaagcucaucaagcaggagcuggacaaguacaagaacgcggucacggaccugcagaugcucaugugcuccaccccggccgccggcagcggguccgccaucgcgagcggcaucgccgugugcaaggugcugcaccuggagggcgaggucaacaagaucaagaacgcccuccuguccaccaacaaggccguggugagccuguccaacggggucagcgugcucaccuucaaggugcuggaccugaagaacuacaucgacaagcagcuccugcccauccugaacaagcaguccugcagcauccccaaccccgagacggucauggaguuccagcagaagaacaaccggcuccuggagaucacccgcgaguucuccgugaacgccggcgugaccaccccggucagcacguacaugcugaccaacuccgagcuccugagccugaucaacgacaugcccaucaccaacgaccagaagaagcucaugagcaacaacgugcagaucgugcggcagcaguccuacagcaucaugugcaucaucaaggaggagguccuggcguacguggugcagcugccccucuacggggucaucgacacccccugcuggaagcugcacacguccccgcugugcaccaccaacaccaaggagggcagcaacaucugccucacgcgcaccgaccgggggugguacugcgacaacgccggcuccgugagcuucuucccccaggccgagaccugcaaggugugcuccaaccgcgucuucugcgacaccaugaacagccugacgcugcccuccgaggugaaccucugcaacaucgacaucuucaaccccaaguacgacugcaagaucaugaccagcaagaccgacgucuccagcuccgugaucaccagccugggcgccaucguguccugcuacgggaagacgaagugcaccgccagcaacaagaacaagggcaucaucaagaccuucuccaacgggugcgacuacgucagcaacaagggcguggacaccguguccgucggcaacacgcuguacuacgugaacaagcaggaggggcagagccucuacgugaagggcgagccgaucaucaacuucuacgacccccuggucuuccccagcgacgaguucgacgcguccaucagccaggugaacgagaagaucaaccagucccuggccuucauccgcaagagcgacgagcuccugcacaacgugaacgucgggaaguccaccaccaacaucaugaucaccaccaucaucaucgugaucaucgugauccugcuccugcugaucgccgucggccucuuccuguacugcaaggcccggugaggacuaguacuggcugcaucucccuuuccucuguccuccauccuucucccaggauggugaagggggaccugguacccagugauccccaccccaggauccuaaaucaugacuuaccugcuaauaaaaacucauuggaaaagugagaagaucuaaaaaaaaaaaaaaaaaaaaaaaaaaaaaaaaaaaaaaaaaaaaaaaaaaaaaaaaaaaaaaaaugcaucccccccccccccccccccccccccccccccaaaggcucuuuucagagccaccagaauu

SEQ ID NO: 18298 - RNA, 1923 nt, Artificial Sequence
  mRNA product Design h-1 comprising derived and/or modified sequence from HRSV(Memphis-37)__AIY60640.1__F-del_DSCav1_mut6 (opt2)
gggagacccgugacccggaaguuguacggcuacgcgacuuucccucccacaaacccucgcgcccuuccuuuccuacuugggcccggcagaaagcuuaccauggagcuccccauccucaagaccaacgccaucaccaccauccucgccgccgucacccucugcuucgccuccucccagaacaucaccgaggaguucuaccaguccaccugcuccgccgucuccaagggcuaccucggcgcccuccgcaccggcugguacaccuccgucaucaccaucgagcucuccaacaucaaggagaacaagugcaacggcaccgacgccaaggucaagcucaucaagcaggagcucgacaaguacaagaacgccgucaccgaccuccagaugcucaugugcuccacccccgccgccggcuccggcuccgccaucgccuccggcaucgccgucugcaagguccuccaccucgagggcgaggucaacaagaucaagaacgcccuccucuccaccaacaaggccgucgucucccucuccaacggcgucuccguccucaccuucaagguccucgaccucaagaacuacaucgacaagcagcuccuccccauccucaacaagcaguccugcuccauccccaaccccgagaccgucauggaguuccagcagaagaacaaccgccuccucgagaucacccgcgaguucuccgucaacgccggcgucaccacccccgucuccaccuacaugcucaccaacuccgagcuccucucccucaucaacgacaugcccaucaccaacgaccagaagaagcucauguccaacaacguccagaucguccgccagcaguccuacuccaucaugugcaucaucaaggaggagguccucgccuacgucguccagcucccccucuacggcgucaucgacacccccugcuggaagcuccacaccuccccccucugcaccaccaacaccaaggagggcuccaacaucugccucacccgcaccgaccgcggcugguacugcgacaacgccggcuccgucuccuucuucccccaggccgagaccugcaaggucugcuccaaccgcgucuucugcgacaccaugaacucccucacccuccccuccgaggucaaccucugcaacaucgacaucuucaaccccaaguacgacugcaagaucaugaccuccaagaccgacgucuccuccuccgucaucaccucccucggcgccaucgucuccugcuacggcaagaccaagugcaccgccuccaacaagaacaagggcaucaucaagaccuucuccaacggcugcgacuacgucuccaacaagggcgucgacaccgucuccgucggcaacacccucuacuacgucaacaagcaggagggccagucccucuacgucaagggcgagcccaucaucaacuucuacgacccccucgucuuccccuccgacgaguucgacgccuccaucucccaggucaacgagaagaucaaccagucccucgccuucauccgcaaguccgacgagcuccuccacaacgucaacgucggcaaguccaccaccaacaucaugaucaccaccaucaucaucgucaucaucgucauccuccuccuccucaucgccgucggccucuuccucuacugcaaggcccgcugaggacuaguacuggcugcaucucccuuuccucuguccuccauccuucucccaggauggugaagggggaccugguacccagugauccccaccccaggauccuaaaucaugacuuaccugcuaauaaaaacucauuggaaaagugagaagaucuaaaaaaaaaaaaaaaaaaaaaaaaaaaaaaaaaaaaaaaaaaaaaaaaaaaaaaaaaaaaaaaaugcaucccccccccccccccccccccccccccccccaaaggcucuuuucagagccaccagaauu

SEQ ID NO: 18299 - RNA, 1923 nt, Artificial Sequence
  mRNA product Design h-1 comprising derived and/or modified sequence from HRSV(Memphis-37)__AIY60640.1__F-del_DSCav1_mut6 (opt3)
gggagacccgugacccggaaguuguacggcuacgcgacuuucccucccacaaacccucgcgcccuuccuuuccuacuugggcccggcagaaagcuuaccauggagcugcccauccucaagaccaacgccauuacaacuauacuugcugcagugacgcugugcuucgccagcucccagaauaucaccgaagaguuuuaccaaucuacauguucagcggucaguaaaggcuauuugggggcuuuaagaacuggaugguacaccagcguuauuacaaucgaacuguccaacauuaaggagaauaaaugcaacgguaccgacgccaaggugaaacuaaucaagcaggaacucgauaaguauaaaaaugcaguaacugaccugcagaugcuuauguguucuacuccugccgcuggcucggggucagcaauagccagcggaaucgcugugugcaagguccugcacuuggagggcgaggugaacaaaauuaagaaugcccuccugaguaccaacaaagcgguugugucccugucuaauggugucagcgugcucacguucaagguauuagaucugaagaacuacaucgacaaacagcuuuugccaauucugaauaagcaauccuguucaaucccgaaccccgaaacuguuauggaguuucagcagaaaaauaacaggcuacucgaaauaacccgggaguucagugugaaugcaggggucacaacuccugugagcaccuauaugcugacaaacucugagcuucuguccuugauuaacgauaugccaaucaccaaugaccagaagaaacucaugucaaacaaugugcaaauuguccgccagcagagcuacaguaucaugugcaucauuaaggaagagguucuggccuaugugguacaguuaccccuguacggagugauagauacgccuuguuggaaacuccauacuucuccacuuugcacaaccaacacuaaggaaggcuccaauaucugucugacacgaaccgaccguggcugguacugcgauaacgcugggagcgucucguuuuucccccaagccgagacguguaaggugugcucuaauagaguuuucugcgacaccaugaacuccuugacacuaccuucagaagugaaucuguguaacauugauaucuucaauccaaaauaugacugcaagauaaugacaaguaaaaccgaugucagcuccucugugauuacaagccucggagcaaucguaucauguuacgguaagacuaaaugcaccgcuaguaacaagaauaagggcaucauuaaaacauuuuccaacgggugugacuauguuagcaauaagggaguggacaccgucucugugggcaacacucuguacuaugucaacaaacaggagggucagucacuuuacgugaagggggagccgaucauuaauuucuaugauccccugguuuuuccuagugacgaauuugaugccagcauaucccaagugaacgagaaaaucaaucagucuuuggcguuuauuaggaagucggacgaacuccugcacaacguaaaugucggaaagagcacgacaaacaucaugaucaccacuauuauaaucgugauuaucguuauuuuacugcuacucaucgccgugggccuguuccuuuacugcaaagcacggugaggacuaguacuggcugcaucucccuuuccucuguccuccauccuucucccaggauggugaagggggaccugguacccagugauccccaccccaggauccuaaaucaugacuuaccugcuaauaaaaacucauuggaaaagugagaagaucuaaaaaaaaaaaaaaaaaaaaaaaaaaaaaaaaaaaaaaaaaaaaaaaaaaaaaaaaaaaaaaaaugcaucccccccccccccccccccccccccccccccaaaggcucuuuucagagccaccagaauu

SEQ ID NO: 18300 - RNA, 1923 nt, Artificial Sequence
  mRNA product Design h-1 comprising derived and/or modified sequence from HRSV(Memphis-37)__AIY60640.1__F-del_DSCav1_mut6 (opt4)
gggagacccgugacccggaaguuguacggcuacgcgacuuucccucccacaaacccucgcgcccuuccuuuccuacuugggcccggcagaaagcuuaccauggagcugcccauccugaagaccaacgccaucaccaccauccuggccgccgugacccugugcuucgccagcagccagaacaucaccgaggaguucuaccagagcaccugcagcgccgugagcaagggcuaccugggcgcccugagaaccggcugguacaccagcgugaucaccaucgagcugagcaacaucaaggagaacaagugcaacggcaccgacgccaaggugaagcugaucaagcaggagcuggacaaguacaagaacgccgugaccgaccugcagaugcugaugugcagcacccccgccgccggcagcggcagcgccaucgccagcggcaucgccgugugcaaggugcugcaccuggagggcgaggugaacaagaucaagaacgcccugcugagcaccaacaaggccguggugagccugagcaacggcgugagcgugcugaccuucaaggugcuggaccugaagaacuacaucgacaagcagcugcugcccauccugaacaagcagagcugcagcauccccaaccccgagaccgugauggaguuccagcagaagaacaacagacugcuggagaucaccagagaguucagcgugaacgccggcgugaccacccccgugagcaccuacaugcugaccaacagcgagcugcugagccugaucaacgacaugcccaucaccaacgaccagaagaagcugaugagcaacaacgugcagaucgugagacagcagagcuacagcaucaugugcaucaucaaggaggaggugcuggccuacguggugcagcugccccuguacggcgugaucgacacccccugcuggaagcugcacaccagcccccugugcaccaccaacaccaaggagggcagcaacaucugccugaccagaaccgacagaggcugguacugcgacaacgccggcagcgugagcuucuucccccaggccgagaccugcaaggugugcagcaacagaguguucugcgacaccaugaacagccugacccugcccagcgaggugaaccugugcaacaucgacaucuucaaccccaaguacgacugcaagaucaugaccagcaagaccgacgugagcagcagcgugaucaccagccugggcgccaucgugagcugcuacggcaagaccaagugcaccgccagcaacaagaacaagggcaucaucaagaccuucagcaacggcugcgacuacgugagcaacaagggcguggacaccgugagcgugggcaacacccuguacuacgugaacaagcaggagggccagagccuguacgugaagggcgagcccaucaucaacuucuacgacccccugguguuccccagcgacgaguucgacgccagcaucagccaggugaacgagaagaucaaccagagccuggccuucaucagaaagagcgacgagcugcugcacaacgugaacgugggcaagagcaccaccaacaucaugaucaccaccaucaucaucgugaucaucgugauccugcugcugcugaucgccgugggccuguuccuguacugcaaggccagaugaggacuaguacuggcugcaucucccuuuccucuguccuccauccuucucccaggauggugaagggggaccugguacccagugauccccaccccaggauccuaaaucaugacuuaccugcuaauaaaaacucauuggaaaagugagaagaucuaaaaaaaaaaaaaaaaaaaaaaaaaaaaaaaaaaaaaaaaaaaaaaaaaaaaaaaaaaaaaaaaugcaucccccccccccccccccccccccccccccccaaaggcucuuuucagagccaccagaauu

SEQ ID NO: 18301 - RNA, 1923 nt, Artificial Sequence
  mRNA product Design h-1 comprising derived and/or modified sequence from HRSV(Memphis-37)__AIY60640.1__F-del_DSCav1_mut6 (opt5)
gggagacccgugacccggaaguuguacggcuacgcgacuuucccucccacaaacccucgcgcccuuccuuuccuacuugggcccggcagaaagcuuaccauggagcugcccauccucaagaccaacgccauuacaacgauccuggcugccgugacccuuugcuucgcgagcucccagaauauuacagaagaguuuuaccaaucuaccuguagcgcugucuccaaaggcuaucugggggcccucagaacaggaugguacaccucuguuaucacaauugaacugagcaacaucaaggagaauaaaugcaacggcaccgacgccaaggugaaacuuaucaagcaggaacuggauaaguauaaaaaugcugugacggaccuccagaugcugauguguuccaccccugccgcugggucuggaagcgccauugcguccggcaucgccgucugcaaggugcugcaccucgagggggagguuaacaaaauuaagaaugcucugcuuagcacaaacaaagccguggucucucuguccaauggagugagcguucucaccuucaaggugcuggaucuuaagaacuacaucgacaaacagcugcucccgauucugaauaagcaaucuuguuccauccccaacccugaaacagucauggaguuucagcagaaaaauaaccggcugcucgaaauuacccgcgaguucagcgugaaugcuggcgugacgacacccgucucuaccuauaugcugacaaacuccgagcuucugagccucaucaacgauaugccuaucaccaaugaccagaagaaacugauguccaacaauguucaaauugugagacagcagucuuacagcaucaugugcauuaucaaggaagaggugcuugccuaugucgugcagcugccccucuacggcguuauugauaccccuuguuggaaacugcauacauccccgcugugcacgaccaacacaaaggaagggagcaauaucugucucacccggacagaccgcggaugguacugcgauaacgcgggcucuguguccuuuuucccccaagccgagaccuguaaggucugcagcaauagaguguuuugcgacacgaugaacucucugacacuuccuagcgaaguuaaucuguguaacaucgauauuuucaaucccaaauaugacugcaagaucaugaccuccaaaaccgaugugucuagcuccgucauuacaagccucggggcuaucgugucuuguuacggaaagaccaaaugcacagccuccaacaagaauaagggcauuaucaaaacguuuagcaacgggugugacuaugucucuaauaagggaguggacaccguuuccgugggcaacacacuguacuaugucaacaaacaggagggccagagccuuuacgugaagggggagccuaucauuaauuucuaugauccccugguuuuuccguccgacgaauuugaugcuucuaucagccaagugaacgagaaaauuaaucagucccucgccuucauccggaagucugacgaacugcugcacaacgucaaugugggaaagagcaccacaaacauuaugaucaccacgauuaucaucgugauuaucguuauucuccugcuucugaucgccgucggccucuuccuguacugcaaagcucgcugaggacuaguacuggcugcaucucccuuuccucuguccuccauccuucucccaggauggugaagggggaccugguacccagugauccccaccccaggauccuaaaucaugacuuaccugcuaauaaaaacucauuggaaaagugagaagaucuaaaaaaaaaaaaaaaaaaaaaaaaaaaaaaaaaaaaaaaaaaaaaaaaaaaaaaaaaaaaaaaaugcaucccccccccccccccccccccccccccccccaaaggcucuuuucagagccaccagaauu

SEQ ID NO: 18302 - RNA, 1923 nt, Artificial Sequence
  mRNA product Design h-1 comprising derived and/or modified sequence from HRSV(Memphis-37)__AIY60640.1__F-del_DSCav1_mut6 (opt6)
gggagacccgugacccggaaguuguacggcuacgcgacuuucccucccacaaacccucgcgcccuuccuuuccuacuugggcccggcagaaagcuuaccauggaacuaccuauacuaaaaaccaacgccauaacaacaauacuagccgcaguuacacucugcuuugcauccucacaaaacaucacagaggaauuuuaccaaucuacuugcuccgcaguaucaaaaggauaccuaggagcacuccguacaggaugguacacaucagucauaacaauugaauuaucuaacaucaaagaaaacaaauguaaugguacagacgccaaaguaaaauuaauaaaacaagaacuagacaaauacaaaaacgccguaacagaccuacaaaugcuaaugugcucaacccccgccgcaggaucuggaucagcaauugccucaggcauagcaguaugcaaaguccuacaccuagaaggagaagucaacaaaauaaaaaacgcucuccucucaaccaauaaagcaguaguaucccucucaaacggaguaucaguacuaacauucaaaguacuagaccucaaaaauuauauagacaagcaacuacucccaauauuaaauaaacaauccugcucaauacccaauccagaaacagucauggaauuucaacaaaaaaacaaccgacucuuagaaauaacaagagaauuuucagucaaugccggcgucacaaccccaguaucaacauacaugcuaacaaacucagaacuacuaucacuaaucaacgauaugcccauaaccaacgaccaaaaaaaacuaaugucaaacaauguacaaauuguaagacaacagucuuauucaauaaugugcauaauaaaagaagaagucuuagcauauguaguacaacuaccacuauacggaguaauagacacaccauguuggaaauuacacacauccccacuauguaccaccaacacaaaagaaggaucuaacauaugccuaaccagaacagaccgaggcugguauugcgacaaugcaggaucaguauccuucuuuccacaagcagaaacaugcaaagucugcucuaacagaguauucugcgauacuaugaacucacuuaccuuaccaucagaaguaaaucuauguaauaucgacauauucaaucccaaauaugauugcaaaauaaugaccucaaaaacagauguaucaucaucagucauaacaucacuaggagcaauagucagcugcuaugggaaaacaaaaugcacagcuuccaacaaaaacaaaggaaucauaaaaacauucucaaaugguugugacuacguauccaacaaaggaguagauacaguaucuguaggcaacacauuauacuauguaaauaaacaagaaggacaaagccuauacgucaaaggagaacccaucauaaauuucuaugacccauuaguuuucccaucugacgaauuugacgcuuccaucucccaaguaaaugaaaaaaucaaccaaagccucgcauucauucgcaaaucugacgaauuacuccacaacguaaacguaggaaaauccacaacaaacauuaugaucaccaccauaauaaucguaauaauagucauauuacuacuccucauagcaguaggacuauuccuauacuguaaagcuagauaaggacuaguacuggcugcaucucccuuuccucuguccuccauccuucucccaggauggugaagggggaccugguacccagugauccccaccccaggauccuaaaucaugacuuaccugcuaauaaaaacucauuggaaaagugagaagaucuaaaaaaaaaaaaaaaaaaaaaaaaaaaaaaaaaaaaaaaaaaaaaaaaaaaaaaaaaaaaaaaaugcaucccccccccccccccccccccccccccccccaaaggcucuuuucagagccaccagaauu

SEQ ID NO: 18303 - RNA, 1923 nt, Artificial Sequence
  mRNA product Design h-1 comprising derived and/or modified sequence from HRSV(Memphis-37)__AIY60640.1__F-del_DSCav1_mut6 (opt11)
gggagacccgugacccggaaguuguacggcuacgcgacuuucccucccacaaacccucgcgcccuuccuuuccuacuugggcccggcagaaagcuuaccauggaauuaccaauccucaaaacuaacgccaucaccaccauccucgcugccgucacccucugcuucgccuccagccaaaacaucacagaagaguucuaccaaagcacaugcuccgcugucuccaaaggcuaccuuggcgcccuccgcaccggcugguacaccucaguaauuaccauugaacuaagcaacaucaaagaaaauaaaugcaacggcaccgacgccaaaguuaaacucauaaaacaggaacucgacaaauacaaaaacgccguaacagaccuccaaaugcucaugugcuccacccccgccgccggcucaggcuccgccaucgcaagcggaauagcaguuugcaaaguccuccaccuagaaggcgaggucaacaagauuaaaaacgcacuucucucaaccaacaaggccgucguaucacucucaaacggcgucuccguccucaccuucaaaguucuggaccucaaaaacuacaucgauaaacaacuacucccaauacuuaacaaacaaucaugcuccaucccaaaccccgaaaccgucauggaguuccaacagaaaaacaaccgccuacuggaaaucacacgcgaguucagcguaaacgcuggcgucacuacacccgucuccaccuacaugcucaccaauucugaacuccuaucacucauaaacgacaugcccauuaccaacgaccaaaagaaacuaaugucaaacaacguccaaaucguaagacaacaaucguauuccaucaugugcauaauuaaagaagaaguucucgccuacgugguccaacuaccccucuacggagucauagacacuccuuguuggaaacuccacaccucuccccucugcacuaccaacacaaaagaaggcuccaacaucugccucacccgaaccgacagaggcugguacugcgacaacgccggcuccgucuccuucuucccccaagccgaaaccugcaaagucugcuccaaccgcguuuucugcgacaccaugaacucccucacacuccccuccgaagucaaccuauguaacauagacauauucaacccaaaauacgacugcaaaaucaugacauccaaaaccgacgugucuuccucggucaucaccucccucggcgccaucgucucaugcuacggcaaaacuaaaugcaccgcauccaacaaaaacaaaggcauaaucaaaacauucuccaacggcugcgacuacguuucuaacaaaggcgucgauaccgucuccgucggaaacacccucuacuacguaaacaagcaagaaggccagucccuauacguaaaaggagaaccaauuaucaacuucuacgacccccuagucuuccccuccgacgaguucgacgccuccauaucccaagucaacgagaaaaucaaccaaucccuagccuucauccgcaaaucagacgaacuccuccacaacgucaacgucggaaaauccacaacuaacaucaugaucaccaccaucauuaucgucaucauaguuauacuccuccuccucauagccgucggccucuuccuauacugcaaagcucgcuaaggacuaguacuggcugcaucucccuuuccucuguccuccauccuucucccaggauggugaagggggaccugguacccagugauccccaccccaggauccuaaaucaugacuuaccugcuaauaaaaacucauuggaaaagugagaagaucuaaaaaaaaaaaaaaaaaaaaaaaaaaaaaaaaaaaaaaaaaaaaaaaaaaaaaaaaaaaaaaaaugcaucccccccccccccccccccccccccccccccaaaggcucuuuucagagccaccagaauu

SEQ ID NO: 18304 - RNA, 2139 nt, Artificial Sequence
  mRNA product Design h-2 comprising derived and/or modified sequence from HRSV(Memphis-37)__AIY60640.1__F-del_DSCav1_mut6 (opt1)
gggagacccgugacccggaaguuguacggcuacgcgacuuucccucccacaaacccucgcgcccuuccuuuccuacuugggcccggcagaaagcuuaccauggagcugcccauccucaagaccaacgccaucaccacgauccuggccgcggugacccugugcuucgccagcucccagaacaucaccgaggaguucuaccagagcacgugcuccgccgucagcaagggcuaccucggcgcccugcgcaccgggugguacaccagcgugaucaccaucgagcuguccaacaucaaggagaacaagugcaacggcaccgacgccaaggugaagcucaucaagcaggagcuggacaaguacaagaacgcggucacggaccugcagaugcugaugugcagcaccccggccgccggcuccgggagcgcgaucgccuccggcaucgccgucugcaaggugcugcaccucgagggcgaggugaacaagaucaagaacgcccugcuguccaccaacaaggccgucgugagccucuccaacggggugagcguccugaccuucaaggugcuggaccucaagaacuacaucgacaagcagcugcugcccauccugaacaagcagagcugcuccauccccaaccccgagaccgucauggaguuccagcagaagaacaaccgccuccuggagaucacgcgggaguucagcgugaacgcgggcgugaccacccccgucuccaccuacaugcugacgaacagcgagcuccugucccugaucaacgacaugccgaucaccaacgaccagaagaagcucaugagcaacaacgugcagaucgugcgccagcaguccuacagcaucaugugcaucaucaaggaggagguccuggccuacguggugcagcugccccucuacggggucaucgacacccccugcuggaagcugcacaccagcccccugugcacgaccaacaccaaggagggcuccaacaucugccucacccggacggaccgcgggugguacugcgacaacgccggcagcguguccuucuucccgcaggccgagaccugcaaggucugcagcaaccggguguucugcgacaccaugaacucccugacccugcccagcgaggugaaccucugcaacaucgacaucuucaaccccaaguacgacugcaagaucaugacguccaagaccgacgucagcuccagcgugaucaccucccugggcgccaucgugagcugcuacgggaagaccaagugcacggcgagcaacaagaacaagggcaucaucaagaccuucuccaacgggugcgacuacgucagcaacaagggcguggacaccguguccgucggcaacacccuguacuacgugaacaagcaggagggccagagccucuacgugaagggggagcccaucaucaacuucuacgacccgcuggucuuccccuccgacgaguucgacgccagcaucucccaggugaacgagaagaucaaccagagccuggccuucauccggaaguccgacgagcuccugcacaacgugaacgucggcaagagcaccacgaacaucaugaucaccaccaucaucaucgugaucaucgugauccugcugcuccugaucgccgucgggcuguuccucuacugcaaggcccgcugaggacuagugaagggaacacccaaauuuaauucagccuuaagcacaauuaauuaagagugaaacguaauuguacaagcaguuggucacccaccauagggcaugaucaacaccgcaaccuuuccuuuuucccccagugauucugaaaaaccccucuucccuucagcuugcuuagauguuccaaauuuaguaagcuuaaggcggccuacagaagaaaaagaaaaaaaaggccacaaaaguucccucucacuuucaguaaauaaaauaaaagcagcaacagaaauaaagaaauaaaugaaauucaaaaugaaauaaauauuguguugugcagcauuaaaaaaucaauaaaaauuaaaaaugagcaagaucuaaaaaaaaaaaaaaaaaaaaaaaaaaaaaaaaaaaaaaaaaaaaaaaaaaaaaaaaaaaaaaaaugcaucccccccccccccccccccccccccccccccaaaggcucuuuucagagccaccagaauu

SEQ ID NO: 18305 - RNA, 2139 nt, Artificial Sequence
  mRNA product Design h-2 comprising derived and/or modified sequence from HRSV(Memphis-37)__AIY60640.1__F-del_DSCav1_mut6 (opt1)
gggagacccgugacccggaaguuguacggcuacgcgacuuucccucccacaaacccucgcgcccuuccuuuccuacuugggcccggcagaaagcuuaccauggagcugcccauccucaagaccaacgccaucaccacgauccuggccgcggugacccugugcuucgccagcucccagaacaucaccgaggaguucuaccagagcacgugcuccgccgucagcaagggcuaccucggggcccugcgcaccggcugguacaccuccgugaucaccaucgagcugagcaacaucaaggagaacaagugcaacgggaccgacgccaaggugaagcucaucaagcaggagcuggacaaguacaagaacgcggucacggaccugcagaugcucaugugcuccaccccggccgccggcagcggguccgccaucgcgagcggcaucgccgugugcaaggugcugcaccuggagggcgaggucaacaagaucaagaacgcccuccuguccaccaacaaggccguggugagccuguccaacggggucagcgugcucaccuucaaggugcuggaccugaagaacuacaucgacaagcagcuccugcccauccugaacaagcaguccugcagcauccccaaccccgagacggucauggaguuccagcagaagaacaaccggcuccuggagaucacccgcgaguucuccgugaacgccggcgugaccaccccggucagcacguacaugcugaccaacuccgagcuccugagccugaucaacgacaugcccaucaccaacgaccagaagaagcucaugagcaacaacgugcagaucgugcggcagcaguccuacagcaucaugugcaucaucaaggaggagguccuggcguacguggugcagcugccccucuacggggucaucgacacccccugcuggaagcugcacacguccccgcugugcaccaccaacaccaaggagggcagcaacaucugccucacgcgcaccgaccgggggugguacugcgacaacgccggcuccgugagcuucuucccccaggccgagaccugcaaggugugcuccaaccgcgucuucugcgacaccaugaacagccugacgcugcccuccgaggugaaccucugcaacaucgacaucuucaaccccaaguacgacugcaagaucaugaccagcaagaccgacgucuccagcuccgugaucaccagccugggcgccaucguguccugcuacgggaagacgaagugcaccgccagcaacaagaacaagggcaucaucaagaccuucuccaacgggugcgacuacgucagcaacaagggcguggacaccguguccgucggcaacacgcuguacuacgugaacaagcaggaggggcagagccucuacgugaagggcgagccgaucaucaacuucuacgacccccuggucuuccccagcgacgaguucgacgcguccaucagccaggugaacgagaagaucaaccagucccuggccuucauccgcaagagcgacgagcuccugcacaacgugaacgucgggaaguccaccaccaacaucaugaucaccaccaucaucaucgugaucaucgugauccugcuccugcugaucgccgucggccucuuccuguacugcaaggcccggugaggacuagugaagggaacacccaaauuuaauucagccuuaagcacaauuaauuaagagugaaacguaauuguacaagcaguuggucacccaccauagggcaugaucaacaccgcaaccuuuccuuuuucccccagugauucugaaaaaccccucuucccuucagcuugcuuagauguuccaaauuuaguaagcuuaaggcggccuacagaagaaaaagaaaaaaaaggccacaaaaguucccucucacuuucaguaaauaaaauaaaagcagcaacagaaauaaagaaauaaaugaaauucaaaaugaaauaaauauuguguugugcagcauuaaaaaaucaauaaaaauuaaaaaugagcaagaucuaaaaaaaaaaaaaaaaaaaaaaaaaaaaaaaaaaaaaaaaaaaaaaaaaaaaaaaaaaaaaaaaugcaucccccccccccccccccccccccccccccccaaaggcucuuuucagagccaccagaauu

SEQ ID NO: 18306 - RNA, 2139 nt, Artificial Sequence
  mRNA product Design h-2 comprising derived and/or modified sequence from HRSV(Memphis-37)__AIY60640.1__F-del_DSCav1_mut6 (opt2)
gggagacccgugacccggaaguuguacggcuacgcgacuuucccucccacaaacccucgcgcccuuccuuuccuacuugggcccggcagaaagcuuaccauggagcuccccauccucaagaccaacgccaucaccaccauccucgccgccgucacccucugcuucgccuccucccagaacaucaccgaggaguucuaccaguccaccugcuccgccgucuccaagggcuaccucggcgcccuccgcaccggcugguacaccuccgucaucaccaucgagcucuccaacaucaaggagaacaagugcaacggcaccgacgccaaggucaagcucaucaagcaggagcucgacaaguacaagaacgccgucaccgaccuccagaugcucaugugcuccacccccgccgccggcuccggcuccgccaucgccuccggcaucgccgucugcaagguccuccaccucgagggcgaggucaacaagaucaagaacgcccuccucuccaccaacaaggccgucgucucccucuccaacggcgucuccguccucaccuucaagguccucgaccucaagaacuacaucgacaagcagcuccuccccauccucaacaagcaguccugcuccauccccaaccccgagaccgucauggaguuccagcagaagaacaaccgccuccucgagaucacccgcgaguucuccgucaacgccggcgucaccacccccgucuccaccuacaugcucaccaacuccgagcuccucucccucaucaacgacaugcccaucaccaacgaccagaagaagcucauguccaacaacguccagaucguccgccagcaguccuacuccaucaugugcaucaucaaggaggagguccucgccuacgucguccagcucccccucuacggcgucaucgacacccccugcuggaagcuccacaccuccccccucugcaccaccaacaccaaggagggcuccaacaucugccucacccgcaccgaccgcggcugguacugcgacaacgccggcuccgucuccuucuucccccaggccgagaccugcaaggucugcuccaaccgcgucuucugcgacaccaugaacucccucacccuccccuccgaggucaaccucugcaacaucgacaucuucaaccccaaguacgacugcaagaucaugaccuccaagaccgacgucuccuccuccgucaucaccucccucggcgccaucgucuccugcuacggcaagaccaagugcaccgccuccaacaagaacaagggcaucaucaagaccuucuccaacggcugcgacuacgucuccaacaagggcgucgacaccgucuccgucggcaacacccucuacuacgucaacaagcaggagggccagucccucuacgucaagggcgagcccaucaucaacuucuacgacccccucgucuuccccuccgacgaguucgacgccuccaucucccaggucaacgagaagaucaaccagucccucgccuucauccgcaaguccgacgagcuccuccacaacgucaacgucggcaaguccaccaccaacaucaugaucaccaccaucaucaucgucaucaucgucauccuccuccuccucaucgccgucggccucuuccucuacugcaaggcccgcugaggacuagugaagggaacacccaaauuuaauucagccuuaagcacaauuaauuaagagugaaacguaauuguacaagcaguuggucacccaccauagggcaugaucaacaccgcaaccuuuccuuuuucccccagugauucugaaaaaccccucuucccuucagcuugcuuagauguuccaaauuuaguaagcuuaaggcggccuacagaagaaaaagaaaaaaaaggccacaaaaguucccucucacuuucaguaaauaaaauaaaagcagcaacagaaauaaagaaauaaaugaaauucaaaaugaaauaaauauuguguugugcagcauuaaaaaaucaauaaaaauuaaaaaugagcaagaucuaaaaaaaaaaaaaaaaaaaaaaaaaaaaaaaaaaaaaaaaaaaaaaaaaaaaaaaaaaaaaaaaugcaucccccccccccccccccccccccccccccccaaaggcucuuuucagagccaccagaauu

SEQ ID NO: 18307 - RNA, 2139 nt, Artificial Sequence
  mRNA product Design h-2 comprising derived and/or modified sequence from HRSV(Memphis-37)__AIY60640.1__F-del_DSCav1_mut6 (opt3)
gggagacccgugacccggaaguuguacggcuacgcgacuuucccucccacaaacccucgcgcccuuccuuuccuacuugggcccggcagaaagcuuaccauggagcugcccauccucaagaccaacgccauuacaacuauacuugcugcagugacgcugugcuucgccagcucccagaauaucaccgaagaguuuuaccaaucuacauguucagcggucaguaaaggcuauuugggggcuuuaagaacuggaugguacaccagcguuauuacaaucgaacuguccaacauuaaggagaauaaaugcaacgguaccgacgccaaggugaaacuaaucaagcaggaacucgauaaguauaaaaaugcaguaacugaccugcagaugcuuauguguucuacuccugccgcuggcucggggucagcaauagccagcggaaucgcugugugcaagguccugcacuuggagggcgaggugaacaaaauuaagaaugcccuccugaguaccaacaaagcgguugugucccugucuaauggugucagcgugcucacguucaagguauuagaucugaagaacuacaucgacaaacagcuuuugccaauucugaauaagcaauccuguucaaucccgaaccccgaaacuguuauggaguuucagcagaaaaauaacaggcuacucgaaauaacccgggaguucagugugaaugcaggggucacaacuccugugagcaccuauaugcugacaaacucugagcuucuguccuugauuaacgauaugccaaucaccaaugaccagaagaaacucaugucaaacaaugugcaaauuguccgccagcagagcuacaguaucaugugcaucauuaaggaagagguucuggccuaugugguacaguuaccccuguacggagugauagauacgccuuguuggaaacuccauacuucuccacuuugcacaaccaacacuaaggaaggcuccaauaucugucugacacgaaccgaccguggcugguacugcgauaacgcugggagcgucucguuuuucccccaagccgagacguguaaggugugcucuaauagaguuuucugcgacaccaugaacuccuugacacuaccuucagaagugaaucuguguaacauugauaucuucaauccaaaauaugacugcaagauaaugacaaguaaaaccgaugucagcuccucugugauuacaagccucggagcaaucguaucauguuacgguaagacuaaaugcaccgcuaguaacaagaauaagggcaucauuaaaacauuuuccaacgggugugacuauguuagcaauaagggaguggacaccgucucugugggcaacacucuguacuaugucaacaaacaggagggucagucacuuuacgugaagggggagccgaucauuaauuucuaugauccccugguuuuuccuagugacgaauuugaugccagcauaucccaagugaacgagaaaaucaaucagucuuuggcguuuauuaggaagucggacgaacuccugcacaacguaaaugucggaaagagcacgacaaacaucaugaucaccacuauuauaaucgugauuaucguuauuuuacugcuacucaucgccgugggccuguuccuuuacugcaaagcacggugaggacuagugaagggaacacccaaauuuaauucagccuuaagcacaauuaauuaagagugaaacguaauuguacaagcaguuggucacccaccauagggcaugaucaacaccgcaaccuuuccuuuuucccccagugauucugaaaaaccccucuucccuucagcuugcuuagauguuccaaauuuaguaagcuuaaggcggccuacagaagaaaaagaaaaaaaaggccacaaaaguucccucucacuuucaguaaauaaaauaaaagcagcaacagaaauaaagaaauaaaugaaauucaaaaugaaauaaauauuguguugugcagcauuaaaaaaucaauaaaaauuaaaaaugagcaagaucuaaaaaaaaaaaaaaaaaaaaaaaaaaaaaaaaaaaaaaaaaaaaaaaaaaaaaaaaaaaaaaaaugcaucccccccccccccccccccccccccccccccaaaggcucuuuucagagccaccagaauu

SEQ ID NO: 18308 - RNA, 2139 nt, Artificial Sequence
  mRNA product Design h-2 comprising derived and/or modified sequence from HRSV(Memphis-37)__AIY60640.1__F-del_DSCav1_mut6 (opt4)
gggagacccgugacccggaaguuguacggcuacgcgacuuucccucccacaaacccucgcgcccuuccuuuccuacuugggcccggcagaaagcuuaccauggagcugcccauccugaagaccaacgccaucaccaccauccuggccgccgugacccugugcuucgccagcagccagaacaucaccgaggaguucuaccagagcaccugcagcgccgugagcaagggcuaccugggcgcccugagaaccggcugguacaccagcgugaucaccaucgagcugagcaacaucaaggagaacaagugcaacggcaccgacgccaaggugaagcugaucaagcaggagcuggacaaguacaagaacgccgugaccgaccugcagaugcugaugugcagcacccccgccgccggcagcggcagcgccaucgccagcggcaucgccgugugcaaggugcugcaccuggagggcgaggugaacaagaucaagaacgcccugcugagcaccaacaaggccguggugagccugagcaacggcgugagcgugcugaccuucaaggugcuggaccugaagaacuacaucgacaagcagcugcugcccauccugaacaagcagagcugcagcauccccaaccccgagaccgugauggaguuccagcagaagaacaacagacugcuggagaucaccagagaguucagcgugaacgccggcgugaccacccccgugagcaccuacaugcugaccaacagcgagcugcugagccugaucaacgacaugcccaucaccaacgaccagaagaagcugaugagcaacaacgugcagaucgugagacagcagagcuacagcaucaugugcaucaucaaggaggaggugcuggccuacguggugcagcugccccuguacggcgugaucgacacccccugcuggaagcugcacaccagcccccugugcaccaccaacaccaaggagggcagcaacaucugccugaccagaaccgacagaggcugguacugcgacaacgccggcagcgugagcuucuucccccaggccgagaccugcaaggugugcagcaacagaguguucugcgacaccaugaacagccugacccugcccagcgaggugaaccugugcaacaucgacaucuucaaccccaaguacgacugcaagaucaugaccagcaagaccgacgugagcagcagcgugaucaccagccugggcgccaucgugagcugcuacggcaagaccaagugcaccgccagcaacaagaacaagggcaucaucaagaccuucagcaacggcugcgacuacgugagcaacaagggcguggacaccgugagcgugggcaacacccuguacuacgugaacaagcaggagggccagagccuguacgugaagggcgagcccaucaucaacuucuacgacccccugguguuccccagcgacgaguucgacgccagcaucagccaggugaacgagaagaucaaccagagccuggccuucaucagaaagagcgacgagcugcugcacaacgugaacgugggcaagagcaccaccaacaucaugaucaccaccaucaucaucgugaucaucgugauccugcugcugcugaucgccgugggccuguuccuguacugcaaggccagaugaggacuagugaagggaacacccaaauuuaauucagccuuaagcacaauuaauuaagagugaaacguaauuguacaagcaguuggucacccaccauagggcaugaucaacaccgcaaccuuuccuuuuucccccagugauucugaaaaaccccucuucccuucagcuugcuuagauguuccaaauuuaguaagcuuaaggcggccuacagaagaaaaagaaaaaaaaggccacaaaaguucccucucacuuucaguaaauaaaauaaaagcagcaacagaaauaaagaaauaaaugaaauucaaaaugaaauaaauauuguguugugcagcauuaaaaaaucaauaaaaauuaaaaaugagcaagaucuaaaaaaaaaaaaaaaaaaaaaaaaaaaaaaaaaaaaaaaaaaaaaaaaaaaaaaaaaaaaaaaaugcaucccccccccccccccccccccccccccccccaaaggcucuuuucagagccaccagaauu

SEQ ID NO: 18309 - RNA, 2139 nt, Artificial Sequence
  mRNA product Design h-2 comprising derived and/or modified sequence from HRSV(Memphis-37)__AIY60640.1__F-del_DSCav1_mut6 (opt5)
gggagacccgugacccggaaguuguacggcuacgcgacuuucccucccacaaacccucgcgcccuuccuuuccuacuugggcccggcagaaagcuuaccauggagcugcccauccucaagaccaacgccauuacaacgauccuggcugccgugacccuuugcuucgcgagcucccagaauauuacagaagaguuuuaccaaucuaccuguagcgcugucuccaaaggcuaucugggggcccucagaacaggaugguacaccucuguuaucacaauugaacugagcaacaucaaggagaauaaaugcaacggcaccgacgccaaggugaaacuuaucaagcaggaacuggauaaguauaaaaaugcugugacggaccuccagaugcugauguguuccaccccugccgcugggucuggaagcgccauugcguccggcaucgccgucugcaaggugcugcaccucgagggggagguuaacaaaauuaagaaugcucugcuuagcacaaacaaagccguggucucucuguccaauggagugagcguucucaccuucaaggugcuggaucuuaagaacuacaucgacaaacagcugcucccgauucugaauaagcaaucuuguuccauccccaacccugaaacagucauggaguuucagcagaaaaauaaccggcugcucgaaauuacccgcgaguucagcgugaaugcuggcgugacgacacccgucucuaccuauaugcugacaaacuccgagcuucugagccucaucaacgauaugccuaucaccaaugaccagaagaaacugauguccaacaauguucaaauugugagacagcagucuuacagcaucaugugcauuaucaaggaagaggugcuugccuaugucgugcagcugccccucuacggcguuauugauaccccuuguuggaaacugcauacauccccgcugugcacgaccaacacaaaggaagggagcaauaucugucucacccggacagaccgcggaugguacugcgauaacgcgggcucuguguccuuuuucccccaagccgagaccuguaaggucugcagcaauagaguguuuugcgacacgaugaacucucugacacuuccuagcgaaguuaaucuguguaacaucgauauuuucaaucccaaauaugacugcaagaucaugaccuccaaaaccgaugugucuagcuccgucauuacaagccucggggcuaucgugucuuguuacggaaagaccaaaugcacagccuccaacaagaauaagggcauuaucaaaacguuuagcaacgggugugacuaugucucuaauaagggaguggacaccguuuccgugggcaacacacuguacuaugucaacaaacaggagggccagagccuuuacgugaagggggagccuaucauuaauuucuaugauccccugguuuuuccguccgacgaauuugaugcuucuaucagccaagugaacgagaaaauuaaucagucccucgccuucauccggaagucugacgaacugcugcacaacgucaaugugggaaagagcaccacaaacauuaugaucaccacgauuaucaucgugauuaucguuauucuccugcuucugaucgccgucggccucuuccuguacugcaaagcucgcugaggacuagugaagggaacacccaaauuuaauucagccuuaagcacaauuaauuaagagugaaacguaauuguacaagcaguuggucacccaccauagggcaugaucaacaccgcaaccuuuccuuuuucccccagugauucugaaaaaccccucuucccuucagcuugcuuagauguuccaaauuuaguaagcuuaaggcggccuacagaagaaaaagaaaaaaaaggccacaaaaguucccucucacuuucaguaaauaaaauaaaagcagcaacagaaauaaagaaauaaaugaaauucaaaaugaaauaaauauuguguugugcagcauuaaaaaaucaauaaaaauuaaaaaugagcaagaucuaaaaaaaaaaaaaaaaaaaaaaaaaaaaaaaaaaaaaaaaaaaaaaaaaaaaaaaaaaaaaaaaugcaucccccccccccccccccccccccccccccccaaaggcucuuuucagagccaccagaauu

SEQ ID NO: 18310 - RNA, 2139 nt, Artificial Sequence
  mRNA product Design h-2 comprising derived and/or modified sequence from HRSV(Memphis-37)__AIY60640.1__F-del_DSCav1_mut6 (opt6)
gggagacccgugacccggaaguuguacggcuacgcgacuuucccucccacaaacccucgcgcccuuccuuuccuacuugggcccggcagaaagcuuaccauggaacuaccuauacuaaaaaccaacgccauaacaacaauacuagccgcaguuacacucugcuuugcauccucacaaaacaucacagaggaauuuuaccaaucuacuugcuccgcaguaucaaaaggauaccuaggagcacuccguacaggaugguacacaucagucauaacaauugaauuaucuaacaucaaagaaaacaaauguaaugguacagacgccaaaguaaaauuaauaaaacaagaacuagacaaauacaaaaacgccguaacagaccuacaaaugcuaaugugcucaacccccgccgcaggaucuggaucagcaauugccucaggcauagcaguaugcaaaguccuacaccuagaaggagaagucaacaaaauaaaaaacgcucuccucucaaccaauaaagcaguaguaucccucucaaacggaguaucaguacuaacauucaaaguacuagaccucaaaaauuauauagacaagcaacuacucccaauauuaaauaaacaauccugcucaauacccaauccagaaacagucauggaauuucaacaaaaaaacaaccgacucuuagaaauaacaagagaauuuucagucaaugccggcgucacaaccccaguaucaacauacaugcuaacaaacucagaacuacuaucacuaaucaacgauaugcccauaaccaacgaccaaaaaaaacuaaugucaaacaauguacaaauuguaagacaacagucuuauucaauaaugugcauaauaaaagaagaagucuuagcauauguaguacaacuaccacuauacggaguaauagacacaccauguuggaaauuacacacauccccacuauguaccaccaacacaaaagaaggaucuaacauaugccuaaccagaacagaccgaggcugguauugcgacaaugcaggaucaguauccuucuuuccacaagcagaaacaugcaaagucugcucuaacagaguauucugcgauacuaugaacucacuuaccuuaccaucagaaguaaaucuauguaauaucgacauauucaaucccaaauaugauugcaaaauaaugaccucaaaaacagauguaucaucaucagucauaacaucacuaggagcaauagucagcugcuaugggaaaacaaaaugcacagcuuccaacaaaaacaaaggaaucauaaaaacauucucaaaugguugugacuacguauccaacaaaggaguagauacaguaucuguaggcaacacauuauacuauguaaauaaacaagaaggacaaagccuauacgucaaaggagaacccaucauaaauuucuaugacccauuaguuuucccaucugacgaauuugacgcuuccaucucccaaguaaaugaaaaaaucaaccaaagccucgcauucauucgcaaaucugacgaauuacuccacaacguaaacguaggaaaauccacaacaaacauuaugaucaccaccauaauaaucguaauaauagucauauuacuacuccucauagcaguaggacuauuccuauacuguaaagcuagauaaggacuagugaagggaacacccaaauuuaauucagccuuaagcacaauuaauuaagagugaaacguaauuguacaagcaguuggucacccaccauagggcaugaucaacaccgcaaccuuuccuuuuucccccagugauucugaaaaaccccucuucccuucagcuugcuuagauguuccaaauuuaguaagcuuaaggcggccuacagaagaaaaagaaaaaaaaggccacaaaaguucccucucacuuucaguaaauaaaauaaaagcagcaacagaaauaaagaaauaaaugaaauucaaaaugaaauaaauauuguguugugcagcauuaaaaaaucaauaaaaauuaaaaaugagcaagaucuaaaaaaaaaaaaaaaaaaaaaaaaaaaaaaaaaaaaaaaaaaaaaaaaaaaaaaaaaaaaaaaaugcaucccccccccccccccccccccccccccccccaaaggcucuuuucagagccaccagaauu

SEQ ID NO: 18311 - RNA, 2139 nt, Artificial Sequence
  mRNA product Design h-2 comprising derived and/or modified sequence from HRSV(Memphis-37)__AIY60640.1__F-del_DSCav1_mut6 (opt11)
gggagacccgugacccggaaguuguacggcuacgcgacuuucccucccacaaacccucgcgcccuuccuuuccuacuugggcccggcagaaagcuuaccauggaauuaccaauccucaaaacuaacgccaucaccaccauccucgcugccgucacccucugcuucgccuccagccaaaacaucacagaagaguucuaccaaagcacaugcuccgcugucuccaaaggcuaccuuggcgcccuccgcaccggcugguacaccucaguaauuaccauugaacuaagcaacaucaaagaaaauaaaugcaacggcaccgacgccaaaguuaaacucauaaaacaggaacucgacaaauacaaaaacgccguaacagaccuccaaaugcucaugugcuccacccccgccgccggcucaggcuccgccaucgcaagcggaauagcaguuugcaaaguccuccaccuagaaggcgaggucaacaagauuaaaaacgcacuucucucaaccaacaaggccgucguaucacucucaaacggcgucuccguccucaccuucaaaguucuggaccucaaaaacuacaucgauaaacaacuacucccaauacuuaacaaacaaucaugcuccaucccaaaccccgaaaccgucauggaguuccaacagaaaaacaaccgccuacuggaaaucacacgcgaguucagcguaaacgcuggcgucacuacacccgucuccaccuacaugcucaccaauucugaacuccuaucacucauaaacgacaugcccauuaccaacgaccaaaagaaacuaaugucaaacaacguccaaaucguaagacaacaaucguauuccaucaugugcauaauuaaagaagaaguucucgccuacgugguccaacuaccccucuacggagucauagacacuccuuguuggaaacuccacaccucuccccucugcacuaccaacacaaaagaaggcuccaacaucugccucacccgaaccgacagaggcugguacugcgacaacgccggcuccgucuccuucuucccccaagccgaaaccugcaaagucugcuccaaccgcguuuucugcgacaccaugaacucccucacacuccccuccgaagucaaccuauguaacauagacauauucaacccaaaauacgacugcaaaaucaugacauccaaaaccgacgugucuuccucggucaucaccucccucggcgccaucgucucaugcuacggcaaaacuaaaugcaccgcauccaacaaaaacaaaggcauaaucaaaacauucuccaacggcugcgacuacguuucuaacaaaggcgucgauaccgucuccgucggaaacacccucuacuacguaaacaagcaagaaggccagucccuauacguaaaaggagaaccaauuaucaacuucuacgacccccuagucuuccccuccgacgaguucgacgccuccauaucccaagucaacgagaaaaucaaccaaucccuagccuucauccgcaaaucagacgaacuccuccacaacgucaacgucggaaaauccacaacuaacaucaugaucaccaccaucauuaucgucaucauaguuauacuccuccuccucauagccgucggccucuuccuauacugcaaagcucgcuaaggacuagugaagggaacacccaaauuuaauucagccuuaagcacaauuaauuaagagugaaacguaauuguacaagcaguuggucacccaccauagggcaugaucaacaccgcaaccuuuccuuuuucccccagugauucugaaaaaccccucuucccuucagcuugcuuagauguuccaaauuuaguaagcuuaaggcggccuacagaagaaaaagaaaaaaaaggccacaaaaguucccucucacuuucaguaaauaaaauaaaagcagcaacagaaauaaagaaauaaaugaaauucaaaaugaaauaaauauuguguugugcagcauuaaaaaaucaauaaaaauuaaaaaugagcaagaucuaaaaaaaaaaaaaaaaaaaaaaaaaaaaaaaaaaaaaaaaaaaaaaaaaaaaaaaaaaaaaaaaugcaucccccccccccccccccccccccccccccccaaaggcucuuuucagagccaccagaauu

SEQ ID NO: 18312 - RNA, 1919 nt, Artificial Sequence
  mRNA product Design h-3 comprising derived and/or modified sequence from HRSV(Memphis-37)__AIY60640.1__F-del_DSCav1_mut6 (opt1)
gggagacccgugacccggaaguuguacggcuacgcgacuuucccucccacaaacccucgcgcccuuccuuuccuacuugggcccggcagaaagcuuaccauggagcugcccauccucaagaccaacgccaucaccacgauccuggccgcggugacccugugcuucgccagcucccagaacaucaccgaggaguucuaccagagcacgugcuccgccgucagcaagggcuaccucggcgcccugcgcaccgggugguacaccagcgugaucaccaucgagcuguccaacaucaaggagaacaagugcaacggcaccgacgccaaggugaagcucaucaagcaggagcuggacaaguacaagaacgcggucacggaccugcagaugcugaugugcagcaccccggccgccggcuccgggagcgcgaucgccuccggcaucgccgucugcaaggugcugcaccucgagggcgaggugaacaagaucaagaacgcccugcuguccaccaacaaggccgucgugagccucuccaacggggugagcguccugaccuucaaggugcuggaccucaagaacuacaucgacaagcagcugcugcccauccugaacaagcagagcugcuccauccccaaccccgagaccgucauggaguuccagcagaagaacaaccgccuccuggagaucacgcgggaguucagcgugaacgcgggcgugaccacccccgucuccaccuacaugcugacgaacagcgagcuccugucccugaucaacgacaugccgaucaccaacgaccagaagaagcucaugagcaacaacgugcagaucgugcgccagcaguccuacagcaucaugugcaucaucaaggaggagguccuggccuacguggugcagcugccccucuacggggucaucgacacccccugcuggaagcugcacaccagcccccugugcacgaccaacaccaaggagggcuccaacaucugccucacccggacggaccgcgggugguacugcgacaacgccggcagcguguccuucuucccgcaggccgagaccugcaaggucugcagcaaccggguguucugcgacaccaugaacucccugacccugcccagcgaggugaaccucugcaacaucgacaucuucaaccccaaguacgacugcaagaucaugacguccaagaccgacgucagcuccagcgugaucaccucccugggcgccaucgugagcugcuacgggaagaccaagugcacggcgagcaacaagaacaagggcaucaucaagaccuucuccaacgggugcgacuacgucagcaacaagggcguggacaccguguccgucggcaacacccuguacuacgugaacaagcaggagggccagagccucuacgugaagggggagcccaucaucaacuucuacgacccgcuggucuuccccuccgacgaguucgacgccagcaucucccaggugaacgagaagaucaaccagagccuggccuucauccggaaguccgacgagcuccugcacaacgugaacgucggcaagagcaccacgaacaucaugaucaccaccaucaucaucgugaucaucgugauccugcugcuccugaucgccgucgggcuguuccucuacugcaaggcccgcugaggacuaguggaagcauuuuccuggcugauuaaaagaaauuacucagcuauggucaucuguuccuguuagaaggcuaugcagcauauuauauacuaugcgcauguuaugaaaugcauaauaaaaaauuuuaaaaaaucuaaaagaucuaaaaaaaaaaaaaaaaaaaaaaaaaaaaaaaaaaaaaaaaaaaaaaaaaaaaaaaaaaaaaaaaugcaucccccccccccccccccccccccccccccccaaaggcucuuuucagagccaccagaauu

SEQ ID NO: 18313 - RNA, 1919 nt, Artificial Sequence
  mRNA product Design h-3 comprising derived and/or modified sequence from HRSV(Memphis-37)__AIY60640.1__F-del_DSCav1_mut6 (opt1)
gggagacccgugacccggaaguuguacggcuacgcgacuuucccucccacaaacccucgcgcccuuccuuuccuacuugggcccggcagaaagcuuaccauggagcugcccauccucaagaccaacgccaucaccacgauccuggccgcggugacccugugcuucgccagcucccagaacaucaccgaggaguucuaccagagcacgugcuccgccgucagcaagggcuaccucggggcccugcgcaccggcugguacaccuccgugaucaccaucgagcugagcaacaucaaggagaacaagugcaacgggaccgacgccaaggugaagcucaucaagcaggagcuggacaaguacaagaacgcggucacggaccugcagaugcucaugugcuccaccccggccgccggcagcggguccgccaucgcgagcggcaucgccgugugcaaggugcugcaccuggagggcgaggucaacaagaucaagaacgcccuccuguccaccaacaaggccguggugagccuguccaacggggucagcgugcucaccuucaaggugcuggaccugaagaacuacaucgacaagcagcuccugcccauccugaacaagcaguccugcagcauccccaaccccgagacggucauggaguuccagcagaagaacaaccggcuccuggagaucacccgcgaguucuccgugaacgccggcgugaccaccccggucagcacguacaugcugaccaacuccgagcuccugagccugaucaacgacaugcccaucaccaacgaccagaagaagcucaugagcaacaacgugcagaucgugcggcagcaguccuacagcaucaugugcaucaucaaggaggagguccuggcguacguggugcagcugccccucuacggggucaucgacacccccugcuggaagcugcacacguccccgcugugcaccaccaacaccaaggagggcagcaacaucugccucacgcgcaccgaccgggggugguacugcgacaacgccggcuccgugagcuucuucccccaggccgagaccugcaaggugugcuccaaccgcgucuucugcgacaccaugaacagccugacgcugcccuccgaggugaaccucugcaacaucgacaucuucaaccccaaguacgacugcaagaucaugaccagcaagaccgacgucuccagcuccgugaucaccagccugggcgccaucguguccugcuacgggaagacgaagugcaccgccagcaacaagaacaagggcaucaucaagaccuucuccaacgggugcgacuacgucagcaacaagggcguggacaccguguccgucggcaacacgcuguacuacgugaacaagcaggaggggcagagccucuacgugaagggcgagccgaucaucaacuucuacgacccccuggucuuccccagcgacgaguucgacgcguccaucagccaggugaacgagaagaucaaccagucccuggccuucauccgcaagagcgacgagcuccugcacaacgugaacgucgggaaguccaccaccaacaucaugaucaccaccaucaucaucgugaucaucgugauccugcuccugcugaucgccgucggccucuuccuguacugcaaggcccggugaggacuaguggaagcauuuuccuggcugauuaaaagaaauuacucagcuauggucaucuguuccuguuagaaggcuaugcagcauauuauauacuaugcgcauguuaugaaaugcauaauaaaaaauuuuaaaaaaucuaaaagaucuaaaaaaaaaaaaaaaaaaaaaaaaaaaaaaaaaaaaaaaaaaaaaaaaaaaaaaaaaaaaaaaaugcaucccccccccccccccccccccccccccccccaaaggcucuuuucagagccaccagaauu

SEQ ID NO: 18314 - RNA, 1919 nt, Artificial Sequence
  mRNA product Design h-3 comprising derived and/or modified sequence from HRSV(Memphis-37)__AIY60640.1__F-del_DSCav1_mut6 (opt2)
gggagacccgugacccggaaguuguacggcuacgcgacuuucccucccacaaacccucgcgcccuuccuuuccuacuugggcccggcagaaagcuuaccauggagcuccccauccucaagaccaacgccaucaccaccauccucgccgccgucacccucugcuucgccuccucccagaacaucaccgaggaguucuaccaguccaccugcuccgccgucuccaagggcuaccucggcgcccuccgcaccggcugguacaccuccgucaucaccaucgagcucuccaacaucaaggagaacaagugcaacggcaccgacgccaaggucaagcucaucaagcaggagcucgacaaguacaagaacgccgucaccgaccuccagaugcucaugugcuccacccccgccgccggcuccggcuccgccaucgccuccggcaucgccgucugcaagguccuccaccucgagggcgaggucaacaagaucaagaacgcccuccucuccaccaacaaggccgucgucucccucuccaacggcgucuccguccucaccuucaagguccucgaccucaagaacuacaucgacaagcagcuccuccccauccucaacaagcaguccugcuccauccccaaccccgagaccgucauggaguuccagcagaagaacaaccgccuccucgagaucacccgcgaguucuccgucaacgccggcgucaccacccccgucuccaccuacaugcucaccaacuccgagcuccucucccucaucaacgacaugcccaucaccaacgaccagaagaagcucauguccaacaacguccagaucguccgccagcaguccuacuccaucaugugcaucaucaaggaggagguccucgccuacgucguccagcucccccucuacggcgucaucgacacccccugcuggaagcuccacaccuccccccucugcaccaccaacaccaaggagggcuccaacaucugccucacccgcaccgaccgcggcugguacugcgacaacgccggcuccgucuccuucuucccccaggccgagaccugcaaggucugcuccaaccgcgucuucugcgacaccaugaacucccucacccuccccuccgaggucaaccucugcaacaucgacaucuucaaccccaaguacgacugcaagaucaugaccuccaagaccgacgucuccuccuccgucaucaccucccucggcgccaucgucuccugcuacggcaagaccaagugcaccgccuccaacaagaacaagggcaucaucaagaccuucuccaacggcugcgacuacgucuccaacaagggcgucgacaccgucuccgucggcaacacccucuacuacgucaacaagcaggagggccagucccucuacgucaagggcgagcccaucaucaacuucuacgacccccucgucuuccccuccgacgaguucgacgccuccaucucccaggucaacgagaagaucaaccagucccucgccuucauccgcaaguccgacgagcuccuccacaacgucaacgucggcaaguccaccaccaacaucaugaucaccaccaucaucaucgucaucaucgucauccuccuccuccucaucgccgucggccucuuccucuacugcaaggcccgcugaggacuaguggaagcauuuuccuggcugauuaaaagaaauuacucagcuauggucaucuguuccuguuagaaggcuaugcagcauauuauauacuaugcgcauguuaugaaaugcauaauaaaaaauuuuaaaaaaucuaaaagaucuaaaaaaaaaaaaaaaaaaaaaaaaaaaaaaaaaaaaaaaaaaaaaaaaaaaaaaaaaaaaaaaaugcaucccccccccccccccccccccccccccccccaaaggcucuuuucagagccaccagaauu

SEQ ID NO: 18315 - RNA, 1919 nt, Artificial Sequence
  mRNA product Design h-3 comprising derived and/or modified sequence from HRSV(Memphis-37)__AIY60640.1__F-del_DSCav1_mut6 (opt3)
gggagacccgugacccggaaguuguacggcuacgcgacuuucccucccacaaacccucgcgcccuuccuuuccuacuugggcccggcagaaagcuuaccauggagcugcccauccucaagaccaacgccauuacaacuauacuugcugcagugacgcugugcuucgccagcucccagaauaucaccgaagaguuuuaccaaucuacauguucagcggucaguaaaggcuauuugggggcuuuaagaacuggaugguacaccagcguuauuacaaucgaacuguccaacauuaaggagaauaaaugcaacgguaccgacgccaaggugaaacuaaucaagcaggaacucgauaaguauaaaaaugcaguaacugaccugcagaugcuuauguguucuacuccugccgcuggcucggggucagcaauagccagcggaaucgcugugugcaagguccugcacuuggagggcgaggugaacaaaauuaagaaugcccuccugaguaccaacaaagcgguugugucccugucuaauggugucagcgugcucacguucaagguauuagaucugaagaacuacaucgacaaacagcuuuugccaauucugaauaagcaauccuguucaaucccgaaccccgaaacuguuauggaguuucagcagaaaaauaacaggcuacucgaaauaacccgggaguucagugugaaugcaggggucacaacuccugugagcaccuauaugcugacaaacucugagcuucuguccuugauuaacgauaugccaaucaccaaugaccagaagaaacucaugucaaacaaugugcaaauuguccgccagcagagcuacaguaucaugugcaucauuaaggaagagguucuggccuaugugguacaguuaccccuguacggagugauagauacgccuuguuggaaacuccauacuucuccacuuugcacaaccaacacuaaggaaggcuccaauaucugucugacacgaaccgaccguggcugguacugcgauaacgcugggagcgucucguuuuucccccaagccgagacguguaaggugugcucuaauagaguuuucugcgacaccaugaacuccuugacacuaccuucagaagugaaucuguguaacauugauaucuucaauccaaaauaugacugcaagauaaugacaaguaaaaccgaugucagcuccucugugauuacaagccucggagcaaucguaucauguuacgguaagacuaaaugcaccgcuaguaacaagaauaagggcaucauuaaaacauuuuccaacgggugugacuauguuagcaauaagggaguggacaccgucucugugggcaacacucuguacuaugucaacaaacaggagggucagucacuuuacgugaagggggagccgaucauuaauuucuaugauccccugguuuuuccuagugacgaauuugaugccagcauaucccaagugaacgagaaaaucaaucagucuuuggcguuuauuaggaagucggacgaacuccugcacaacguaaaugucggaaagagcacgacaaacaucaugaucaccacuauuauaaucgugauuaucguuauuuuacugcuacucaucgccgugggccuguuccuuuacugcaaagcacggugaggacuaguggaagcauuuuccuggcugauuaaaagaaauuacucagcuauggucaucuguuccuguuagaaggcuaugcagcauauuauauacuaugcgcauguuaugaaaugcauaauaaaaaauuuuaaaaaaucuaaaagaucuaaaaaaaaaaaaaaaaaaaaaaaaaaaaaaaaaaaaaaaaaaaaaaaaaaaaaaaaaaaaaaaaugcaucccccccccccccccccccccccccccccccaaaggcucuuuucagagccaccagaauu

SEQ ID NO: 18316 - RNA, 1919 nt, Artificial Sequence
  mRNA product Design h-3 comprising derived and/or modified sequence from HRSV(Memphis-37)__AIY60640.1__F-del_DSCav1_mut6 (opt4)
gggagacccgugacccggaaguuguacggcuacgcgacuuucccucccacaaacccucgcgcccuuccuuuccuacuugggcccggcagaaagcuuaccauggagcugcccauccugaagaccaacgccaucaccaccauccuggccgccgugacccugugcuucgccagcagccagaacaucaccgaggaguucuaccagagcaccugcagcgccgugagcaagggcuaccugggcgcccugagaaccggcugguacaccagcgugaucaccaucgagcugagcaacaucaaggagaacaagugcaacggcaccgacgccaaggugaagcugaucaagcaggagcuggacaaguacaagaacgccgugaccgaccugcagaugcugaugugcagcacccccgccgccggcagcggcagcgccaucgccagcggcaucgccgugugcaaggugcugcaccuggagggcgaggugaacaagaucaagaacgcccugcugagcaccaacaaggccguggugagccugagcaacggcgugagcgugcugaccuucaaggugcuggaccugaagaacuacaucgacaagcagcugcugcccauccugaacaagcagagcugcagcauccccaaccccgagaccgugauggaguuccagcagaagaacaacagacugcuggagaucaccagagaguucagcgugaacgccggcgugaccacccccgugagcaccuacaugcugaccaacagcgagcugcugagccugaucaacgacaugcccaucaccaacgaccagaagaagcugaugagcaacaacgugcagaucgugagacagcagagcuacagcaucaugugcaucaucaaggaggaggugcuggccuacguggugcagcugccccuguacggcgugaucgacacccccugcuggaagcugcacaccagcccccugugcaccaccaacaccaaggagggcagcaacaucugccugaccagaaccgacagaggcugguacugcgacaacgccggcagcgugagcuucuucccccaggccgagaccugcaaggugugcagcaacagaguguucugcgacaccaugaacagccugacccugcccagcgaggugaaccugugcaacaucgacaucuucaaccccaaguacgacugcaagaucaugaccagcaagaccgacgugagcagcagcgugaucaccagccugggcgccaucgugagcugcuacggcaagaccaagugcaccgccagcaacaagaacaagggcaucaucaagaccuucagcaacggcugcgacuacgugagcaacaagggcguggacaccgugagcgugggcaacacccuguacuacgugaacaagcaggagggccagagccuguacgugaagggcgagcccaucaucaacuucuacgacccccugguguuccccagcgacgaguucgacgccagcaucagccaggugaacgagaagaucaaccagagccuggccuucaucagaaagagcgacgagcugcugcacaacgugaacgugggcaagagcaccaccaacaucaugaucaccaccaucaucaucgugaucaucgugauccugcugcugcugaucgccgugggccuguuccuguacugcaaggccagaugaggacuaguggaagcauuuuccuggcugauuaaaagaaauuacucagcuauggucaucuguuccuguuagaaggcuaugcagcauauuauauacuaugcgcauguuaugaaaugcauaauaaaaaauuuuaaaaaaucuaaaagaucuaaaaaaaaaaaaaaaaaaaaaaaaaaaaaaaaaaaaaaaaaaaaaaaaaaaaaaaaaaaaaaaaugcaucccccccccccccccccccccccccccccccaaaggcucuuuucagagccaccagaauu

SEQ ID NO: 18317 - RNA, 1919 nt, Artificial Sequence
  mRNA product Design h-3 comprising derived and/or modified sequence from HRSV(Memphis-37)__AIY60640.1__F-del_DSCav1_mut6 (opt5)
gggagacccgugacccggaaguuguacggcuacgcgacuuucccucccacaaacccucgcgcccuuccuuuccuacuugggcccggcagaaagcuuaccauggagcugcccauccucaagaccaacgccauuacaacgauccuggcugccgugacccuuugcuucgcgagcucccagaauauuacagaagaguuuuaccaaucuaccuguagcgcugucuccaaaggcuaucugggggcccucagaacaggaugguacaccucuguuaucacaauugaacugagcaacaucaaggagaauaaaugcaacggcaccgacgccaaggugaaacuuaucaagcaggaacuggauaaguauaaaaaugcugugacggaccuccagaugcugauguguuccaccccugccgcugggucuggaagcgccauugcguccggcaucgccgucugcaaggugcugcaccucgagggggagguuaacaaaauuaagaaugcucugcuuagcacaaacaaagccguggucucucuguccaauggagugagcguucucaccuucaaggugcuggaucuuaagaacuacaucgacaaacagcugcucccgauucugaauaagcaaucuuguuccauccccaacccugaaacagucauggaguuucagcagaaaaauaaccggcugcucgaaauuacccgcgaguucagcgugaaugcuggcgugacgacacccgucucuaccuauaugcugacaaacuccgagcuucugagccucaucaacgauaugccuaucaccaaugaccagaagaaacugauguccaacaauguucaaauugugagacagcagucuuacagcaucaugugcauuaucaaggaagaggugcuugccuaugucgugcagcugccccucuacggcguuauugauaccccuuguuggaaacugcauacauccccgcugugcacgaccaacacaaaggaagggagcaauaucugucucacccggacagaccgcggaugguacugcgauaacgcgggcucuguguccuuuuucccccaagccgagaccuguaaggucugcagcaauagaguguuuugcgacacgaugaacucucugacacuuccuagcgaaguuaaucuguguaacaucgauauuuucaaucccaaauaugacugcaagaucaugaccuccaaaaccgaugugucuagcuccgucauuacaagccucggggcuaucgugucuuguuacggaaagaccaaaugcacagccuccaacaagaauaagggcauuaucaaaacguuuagcaacgggugugacuaugucucuaauaagggaguggacaccguuuccgugggcaacacacuguacuaugucaacaaacaggagggccagagccuuuacgugaagggggagccuaucauuaauuucuaugauccccugguuuuuccguccgacgaauuugaugcuucuaucagccaagugaacgagaaaauuaaucagucccucgccuucauccggaagucugacgaacugcugcacaacgucaaugugggaaagagcaccacaaacauuaugaucaccacgauuaucaucgugauuaucguuauucuccugcuucugaucgccgucggccucuuccuguacugcaaagcucgcugaggacuaguggaagcauuuuccuggcugauuaaaagaaauuacucagcuauggucaucuguuccuguuagaaggcuaugcagcauauuauauacuaugcgcauguuaugaaaugcauaauaaaaaauuuuaaaaaaucuaaaagaucuaaaaaaaaaaaaaaaaaaaaaaaaaaaaaaaaaaaaaaaaaaaaaaaaaaaaaaaaaaaaaaaaugcaucccccccccccccccccccccccccccccccaaaggcucuuuucagagccaccagaauu

SEQ ID NO: 18318 - RNA, 1919 nt, Artificial Sequence
  mRNA product Design h-3 comprising derived and/or modified sequence from HRSV(Memphis-37)__AIY60640.1__F-del_DSCav1_mut6 (opt6)
gggagacccgugacccggaaguuguacggcuacgcgacuuucccucccacaaacccucgcgcccuuccuuuccuacuugggcccggcagaaagcuuaccauggaacuaccuauacuaaaaaccaacgccauaacaacaauacuagccgcaguuacacucugcuuugcauccucacaaaacaucacagaggaauuuuaccaaucuacuugcuccgcaguaucaaaaggauaccuaggagcacuccguacaggaugguacacaucagucauaacaauugaauuaucuaacaucaaagaaaacaaauguaaugguacagacgccaaaguaaaauuaauaaaacaagaacuagacaaauacaaaaacgccguaacagaccuacaaaugcuaaugugcucaacccccgccgcaggaucuggaucagcaauugccucaggcauagcaguaugcaaaguccuacaccuagaaggagaagucaacaaaauaaaaaacgcucuccucucaaccaauaaagcaguaguaucccucucaaacggaguaucaguacuaacauucaaaguacuagaccucaaaaauuauauagacaagcaacuacucccaauauuaaauaaacaauccugcucaauacccaauccagaaacagucauggaauuucaacaaaaaaacaaccgacucuuagaaauaacaagagaauuuucagucaaugccggcgucacaaccccaguaucaacauacaugcuaacaaacucagaacuacuaucacuaaucaacgauaugcccauaaccaacgaccaaaaaaaacuaaugucaaacaauguacaaauuguaagacaacagucuuauucaauaaugugcauaauaaaagaagaagucuuagcauauguaguacaacuaccacuauacggaguaauagacacaccauguuggaaauuacacacauccccacuauguaccaccaacacaaaagaaggaucuaacauaugccuaaccagaacagaccgaggcugguauugcgacaaugcaggaucaguauccuucuuuccacaagcagaaacaugcaaagucugcucuaacagaguauucugcgauacuaugaacucacuuaccuuaccaucagaaguaaaucuauguaauaucgacauauucaaucccaaauaugauugcaaaauaaugaccucaaaaacagauguaucaucaucagucauaacaucacuaggagcaauagucagcugcuaugggaaaacaaaaugcacagcuuccaacaaaaacaaaggaaucauaaaaacauucucaaaugguugugacuacguauccaacaaaggaguagauacaguaucuguaggcaacacauuauacuauguaaauaaacaagaaggacaaagccuauacgucaaaggagaacccaucauaaauuucuaugacccauuaguuuucccaucugacgaauuugacgcuuccaucucccaaguaaaugaaaaaaucaaccaaagccucgcauucauucgcaaaucugacgaauuacuccacaacguaaacguaggaaaauccacaacaaacauuaugaucaccaccauaauaaucguaauaauagucauauuacuacuccucauagcaguaggacuauuccuauacuguaaagcuagauaaggacuaguggaagcauuuuccuggcugauuaaaagaaauuacucagcuauggucaucuguuccuguuagaaggcuaugcagcauauuauauacuaugcgcauguuaugaaaugcauaauaaaaaauuuuaaaaaaucuaaaagaucuaaaaaaaaaaaaaaaaaaaaaaaaaaaaaaaaaaaaaaaaaaaaaaaaaaaaaaaaaaaaaaaaugcaucccccccccccccccccccccccccccccccaaaggcucuuuucagagccaccagaauu

SEQ ID NO: 18319 - RNA, 1919 nt, Artificial Sequence
  mRNA product Design h-3 comprising derived and/or modified sequence from HRSV(Memphis-37)__AIY60640.1__F-del_DSCav1_mut6 (opt11)
gggagacccgugacccggaaguuguacggcuacgcgacuuucccucccacaaacccucgcgcccuuccuuuccuacuugggcccggcagaaagcuuaccauggaauuaccaauccucaaaacuaacgccaucaccaccauccucgcugccgucacccucugcuucgccuccagccaaaacaucacagaagaguucuaccaaagcacaugcuccgcugucuccaaaggcuaccuuggcgcccuccgcaccggcugguacaccucaguaauuaccauugaacuaagcaacaucaaagaaaauaaaugcaacggcaccgacgccaaaguuaaacucauaaaacaggaacucgacaaauacaaaaacgccguaacagaccuccaaaugcucaugugcuccacccccgccgccggcucaggcuccgccaucgcaagcggaauagcaguuugcaaaguccuccaccuagaaggcgaggucaacaagauuaaaaacgcacuucucucaaccaacaaggccgucguaucacucucaaacggcgucuccguccucaccuucaaaguucuggaccucaaaaacuacaucgauaaacaacuacucccaauacuuaacaaacaaucaugcuccaucccaaaccccgaaaccgucauggaguuccaacagaaaaacaaccgccuacuggaaaucacacgcgaguucagcguaaacgcuggcgucacuacacccgucuccaccuacaugcucaccaauucugaacuccuaucacucauaaacgacaugcccauuaccaacgaccaaaagaaacuaaugucaaacaacguccaaaucguaagacaacaaucguauuccaucaugugcauaauuaaagaagaaguucucgccuacgugguccaacuaccccucuacggagucauagacacuccuuguuggaaacuccacaccucuccccucugcacuaccaacacaaaagaaggcuccaacaucugccucacccgaaccgacagaggcugguacugcgacaacgccggcuccgucuccuucuucccccaagccgaaaccugcaaagucugcuccaaccgcguuuucugcgacaccaugaacucccucacacuccccuccgaagucaaccuauguaacauagacauauucaacccaaaauacgacugcaaaaucaugacauccaaaaccgacgugucuuccucggucaucaccucccucggcgccaucgucucaugcuacggcaaaacuaaaugcaccgcauccaacaaaaacaaaggcauaaucaaaacauucuccaacggcugcgacuacguuucuaacaaaggcgucgauaccgucuccgucggaaacacccucuacuacguaaacaagcaagaaggccagucccuauacguaaaaggagaaccaauuaucaacuucuacgacccccuagucuuccccuccgacgaguucgacgccuccauaucccaagucaacgagaaaaucaaccaaucccuagccuucauccgcaaaucagacgaacuccuccacaacgucaacgucggaaaauccacaacuaacaucaugaucaccaccaucauuaucgucaucauaguuauacuccuccuccucauagccgucggccucuuccuauacugcaaagcucgcuaaggacuaguggaagcauuuuccuggcugauuaaaagaaauuacucagcuauggucaucuguuccuguuagaaggcuaugcagcauauuauauacuaugcgcauguuaugaaaugcauaauaaaaaauuuuaaaaaaucuaaaagaucuaaaaaaaaaaaaaaaaaaaaaaaaaaaaaaaaaaaaaaaaaaaaaaaaaaaaaaaaaaaaaaaaugcaucccccccccccccccccccccccccccccccaaaggcucuuuucagagccaccagaauu

SEQ ID NO: 18320 - RNA, 1982 nt, Artificial Sequence
  mRNA product Design h-4 comprising derived and/or modified sequence from HRSV(Memphis-37)__AIY60640.1__F-del_DSCav1_mut6 (opt1)
gggagagggcgcuuggcuugcaaggacccugagcugcggcauugaagcacacccaacccaacucgacugaagucagccucacugaaccggaucugagaaucuucucucucugggcuugccagggcucuccgaaccuagcuagcauccucuucaauuccaacuagaaagcuuaccauggagcugcccauccucaagaccaacgccaucaccacgauccuggccgcggugacccugugcuucgccagcucccagaacaucaccgaggaguucuaccagagcacgugcuccgccgucagcaagggcuaccucggcgcccugcgcaccgggugguacaccagcgugaucaccaucgagcuguccaacaucaaggagaacaagugcaacggcaccgacgccaaggugaagcucaucaagcaggagcuggacaaguacaagaacgcggucacggaccugcagaugcugaugugcagcaccccggccgccggcuccgggagcgcgaucgccuccggcaucgccgucugcaaggugcugcaccucgagggcgaggugaacaagaucaagaacgcccugcuguccaccaacaaggccgucgugagccucuccaacggggugagcguccugaccuucaaggugcuggaccucaagaacuacaucgacaagcagcugcugcccauccugaacaagcagagcugcuccauccccaaccccgagaccgucauggaguuccagcagaagaacaaccgccuccuggagaucacgcgggaguucagcgugaacgcgggcgugaccacccccgucuccaccuacaugcugacgaacagcgagcuccugucccugaucaacgacaugccgaucaccaacgaccagaagaagcucaugagcaacaacgugcagaucgugcgccagcaguccuacagcaucaugugcaucaucaaggaggagguccuggccuacguggugcagcugccccucuacggggucaucgacacccccugcuggaagcugcacaccagcccccugugcacgaccaacaccaaggagggcuccaacaucugccucacccggacggaccgcgggugguacugcgacaacgccggcagcguguccuucuucccgcaggccgagaccugcaaggucugcagcaaccggguguucugcgacaccaugaacucccugacccugcccagcgaggugaaccucugcaacaucgacaucuucaaccccaaguacgacugcaagaucaugacguccaagaccgacgucagcuccagcgugaucaccucccugggcgccaucgugagcugcuacgggaagaccaagugcacggcgagcaacaagaacaagggcaucaucaagaccuucuccaacgggugcgacuacgucagcaacaagggcguggacaccguguccgucggcaacacccuguacuacgugaacaagcaggagggccagagccucuacgugaagggggagcccaucaucaacuucuacgacccgcuggucuuccccuccgacgaguucgacgccagcaucucccaggugaacgagaagaucaaccagagccuggccuucauccggaaguccgacgagcuccugcacaacgugaacgucggcaagagcaccacgaacaucaugaucaccaccaucaucaucgugaucaucgugauccugcugcuccugaucgccgucgggcuguuccucuacugcaaggcccgcugaggacuaguaauaaggaaacuguaugaaugucugugggcaggaagugaagagauccuucuguaaagguuuuuggaauuaugucugcugaauaauaaacuuuuuugaaauaauaaaucugguagaaaaaugagaucuaaaaaaaaaaaaaaaaaaaaaaaaaaaaaaaaaaaaaaaaaaaaaaaaaaaaaaaaaaaaaaaaugcaucccccccccccccccccccccccccccccccaaaggcucuuuucagagccaccagaauu

SEQ ID NO: 18321 - RNA, 1982 nt, Artificial Sequence
  mRNA product Design h-4 comprising derived and/or modified sequence from HRSV(Memphis-37)__AIY60640.1__F-del_DSCav1_mut6 (opt1)
gggagagggcgcuuggcuugcaaggacccugagcugcggcauugaagcacacccaacccaacucgacugaagucagccucacugaaccggaucugagaaucuucucucucugggcuugccagggcucuccgaaccuagcuagcauccucuucaauuccaacuagaaagcuuaccauggagcugcccauccucaagaccaacgccaucaccacgauccuggccgcggugacccugugcuucgccagcucccagaacaucaccgaggaguucuaccagagcacgugcuccgccgucagcaagggcuaccucggggcccugcgcaccggcugguacaccuccgugaucaccaucgagcugagcaacaucaaggagaacaagugcaacgggaccgacgccaaggugaagcucaucaagcaggagcuggacaaguacaagaacgcggucacggaccugcagaugcucaugugcuccaccccggccgccggcagcggguccgccaucgcgagcggcaucgccgugugcaaggugcugcaccuggagggcgaggucaacaagaucaagaacgcccuccuguccaccaacaaggccguggugagccuguccaacggggucagcgugcucaccuucaaggugcuggaccugaagaacuacaucgacaagcagcuccugcccauccugaacaagcaguccugcagcauccccaaccccgagacggucauggaguuccagcagaagaacaaccggcuccuggagaucacccgcgaguucuccgugaacgccggcgugaccaccccggucagcacguacaugcugaccaacuccgagcuccugagccugaucaacgacaugcccaucaccaacgaccagaagaagcucaugagcaacaacgugcagaucgugcggcagcaguccuacagcaucaugugcaucaucaaggaggagguccuggcguacguggugcagcugccccucuacggggucaucgacacccccugcuggaagcugcacacguccccgcugugcaccaccaacaccaaggagggcagcaacaucugccucacgcgcaccgaccgggggugguacugcgacaacgccggcuccgugagcuucuucccccaggccgagaccugcaaggugugcuccaaccgcgucuucugcgacaccaugaacagccugacgcugcccuccgaggugaaccucugcaacaucgacaucuucaaccccaaguacgacugcaagaucaugaccagcaagaccgacgucuccagcuccgugaucaccagccugggcgccaucguguccugcuacgggaagacgaagugcaccgccagcaacaagaacaagggcaucaucaagaccuucuccaacgggugcgacuacgucagcaacaagggcguggacaccguguccgucggcaacacgcuguacuacgugaacaagcaggaggggcagagccucuacgugaagggcgagccgaucaucaacuucuacgacccccuggucuuccccagcgacgaguucgacgcguccaucagccaggugaacgagaagaucaaccagucccuggccuucauccgcaagagcgacgagcuccugcacaacgugaacgucgggaaguccaccaccaacaucaugaucaccaccaucaucaucgugaucaucgugauccugcuccugcugaucgccgucggccucuuccuguacugcaaggcccggugaggacuaguaauaaggaaacuguaugaaugucugugggcaggaagugaagagauccuucuguaaagguuuuuggaauuaugucugcugaauaauaaacuuuuuugaaauaauaaaucugguagaaaaaugagaucuaaaaaaaaaaaaaaaaaaaaaaaaaaaaaaaaaaaaaaaaaaaaaaaaaaaaaaaaaaaaaaaaugcaucccccccccccccccccccccccccccccccaaaggcucuuuucagagccaccagaauu

SEQ ID NO: 18322 - RNA, 1982 nt, Artificial Sequence
  mRNA product Design h-4 comprising derived and/or modified sequence from HRSV(Memphis-37)__AIY60640.1__F-del_DSCav1_mut6 (opt2)
gggagagggcgcuuggcuugcaaggacccugagcugcggcauugaagcacacccaacccaacucgacugaagucagccucacugaaccggaucugagaaucuucucucucugggcuugccagggcucuccgaaccuagcuagcauccucuucaauuccaacuagaaagcuuaccauggagcuccccauccucaagaccaacgccaucaccaccauccucgccgccgucacccucugcuucgccuccucccagaacaucaccgaggaguucuaccaguccaccugcuccgccgucuccaagggcuaccucggcgcccuccgcaccggcugguacaccuccgucaucaccaucgagcucuccaacaucaaggagaacaagugcaacggcaccgacgccaaggucaagcucaucaagcaggagcucgacaaguacaagaacgccgucaccgaccuccagaugcucaugugcuccacccccgccgccggcuccggcuccgccaucgccuccggcaucgccgucugcaagguccuccaccucgagggcgaggucaacaagaucaagaacgcccuccucuccaccaacaaggccgucgucucccucuccaacggcgucuccguccucaccuucaagguccucgaccucaagaacuacaucgacaagcagcuccuccccauccucaacaagcaguccugcuccauccccaaccccgagaccgucauggaguuccagcagaagaacaaccgccuccucgagaucacccgcgaguucuccgucaacgccggcgucaccacccccgucuccaccuacaugcucaccaacuccgagcuccucucccucaucaacgacaugcccaucaccaacgaccagaagaagcucauguccaacaacguccagaucguccgccagcaguccuacuccaucaugugcaucaucaaggaggagguccucgccuacgucguccagcucccccucuacggcgucaucgacacccccugcuggaagcuccacaccuccccccucugcaccaccaacaccaaggagggcuccaacaucugccucacccgcaccgaccgcggcugguacugcgacaacgccggcuccgucuccuucuucccccaggccgagaccugcaaggucugcuccaaccgcgucuucugcgacaccaugaacucccucacccuccccuccgaggucaaccucugcaacaucgacaucuucaaccccaaguacgacugcaagaucaugaccuccaagaccgacgucuccuccuccgucaucaccucccucggcgccaucgucuccugcuacggcaagaccaagugcaccgccuccaacaagaacaagggcaucaucaagaccuucuccaacggcugcgacuacgucuccaacaagggcgucgacaccgucuccgucggcaacacccucuacuacgucaacaagcaggagggccagucccucuacgucaagggcgagcccaucaucaacuucuacgacccccucgucuuccccuccgacgaguucgacgccuccaucucccaggucaacgagaagaucaaccagucccucgccuucauccgcaaguccgacgagcuccuccacaacgucaacgucggcaaguccaccaccaacaucaugaucaccaccaucaucaucgucaucaucgucauccuccuccuccucaucgccgucggccucuuccucuacugcaaggcccgcugaggacuaguaauaaggaaacuguaugaaugucugugggcaggaagugaagagauccuucuguaaagguuuuuggaauuaugucugcugaauaauaaacuuuuuugaaauaauaaaucugguagaaaaaugagaucuaaaaaaaaaaaaaaaaaaaaaaaaaaaaaaaaaaaaaaaaaaaaaaaaaaaaaaaaaaaaaaaaugcaucccccccccccccccccccccccccccccccaaaggcucuuuucagagccaccagaauu

SEQ ID NO: 18323 - RNA, 1982 nt, Artificial Sequence
  mRNA product Design h-4 comprising derived and/or modified sequence from HRSV(Memphis-37)__AIY60640.1__F-del_DSCav1_mut6 (opt3)
gggagagggcgcuuggcuugcaaggacccugagcugcggcauugaagcacacccaacccaacucgacugaagucagccucacugaaccggaucugagaaucuucucucucugggcuugccagggcucuccgaaccuagcuagcauccucuucaauuccaacuagaaagcuuaccauggagcugcccauccucaagaccaacgccauuacaacuauacuugcugcagugacgcugugcuucgccagcucccagaauaucaccgaagaguuuuaccaaucuacauguucagcggucaguaaaggcuauuugggggcuuuaagaacuggaugguacaccagcguuauuacaaucgaacuguccaacauuaaggagaauaaaugcaacgguaccgacgccaaggugaaacuaaucaagcaggaacucgauaaguauaaaaaugcaguaacugaccugcagaugcuuauguguucuacuccugccgcuggcucggggucagcaauagccagcggaaucgcugugugcaagguccugcacuuggagggcgaggugaacaaaauuaagaaugcccuccugaguaccaacaaagcgguugugucccugucuaauggugucagcgugcucacguucaagguauuagaucugaagaacuacaucgacaaacagcuuuugccaauucugaauaagcaauccuguucaaucccgaaccccgaaacuguuauggaguuucagcagaaaaauaacaggcuacucgaaauaacccgggaguucagugugaaugcaggggucacaacuccugugagcaccuauaugcugacaaacucugagcuucuguccuugauuaacgauaugccaaucaccaaugaccagaagaaacucaugucaaacaaugugcaaauuguccgccagcagagcuacaguaucaugugcaucauuaaggaagagguucuggccuaugugguacaguuaccccuguacggagugauagauacgccuuguuggaaacuccauacuucuccacuuugcacaaccaacacuaaggaaggcuccaauaucugucugacacgaaccgaccguggcugguacugcgauaacgcugggagcgucucguuuuucccccaagccgagacguguaaggugugcucuaauagaguuuucugcgacaccaugaacuccuugacacuaccuucagaagugaaucuguguaacauugauaucuucaauccaaaauaugacugcaagauaaugacaaguaaaaccgaugucagcuccucugugauuacaagccucggagcaaucguaucauguuacgguaagacuaaaugcaccgcuaguaacaagaauaagggcaucauuaaaacauuuuccaacgggugugacuauguuagcaauaagggaguggacaccgucucugugggcaacacucuguacuaugucaacaaacaggagggucagucacuuuacgugaagggggagccgaucauuaauuucuaugauccccugguuuuuccuagugacgaauuugaugccagcauaucccaagugaacgagaaaaucaaucagucuuuggcguuuauuaggaagucggacgaacuccugcacaacguaaaugucggaaagagcacgacaaacaucaugaucaccacuauuauaaucgugauuaucguuauuuuacugcuacucaucgccgugggccuguuccuuuacugcaaagcacggugaggacuaguaauaaggaaacuguaugaaugucugugggcaggaagugaagagauccuucuguaaagguuuuuggaauuaugucugcugaauaauaaacuuuuuugaaauaauaaaucugguagaaaaaugagaucuaaaaaaaaaaaaaaaaaaaaaaaaaaaaaaaaaaaaaaaaaaaaaaaaaaaaaaaaaaaaaaaaugcaucccccccccccccccccccccccccccccccaaaggcucuuuucagagccaccagaauu

SEQ ID NO: 18324 - RNA, 1982 nt, Artificial Sequence
  mRNA product Design h-4 comprising derived and/or modified sequence from HRSV(Memphis-37)__AIY60640.1__F-del_DSCav1_mut6 (opt4)
gggagagggcgcuuggcuugcaaggacccugagcugcggcauugaagcacacccaacccaacucgacugaagucagccucacugaaccggaucugagaaucuucucucucugggcuugccagggcucuccgaaccuagcuagcauccucuucaauuccaacuagaaagcuuaccauggagcugcccauccugaagaccaacgccaucaccaccauccuggccgccgugacccugugcuucgccagcagccagaacaucaccgaggaguucuaccagagcaccugcagcgccgugagcaagggcuaccugggcgcccugagaaccggcugguacaccagcgugaucaccaucgagcugagcaacaucaaggagaacaagugcaacggcaccgacgccaaggugaagcugaucaagcaggagcuggacaaguacaagaacgccgugaccgaccugcagaugcugaugugcagcacccccgccgccggcagcggcagcgccaucgccagcggcaucgccgugugcaaggugcugcaccuggagggcgaggugaacaagaucaagaacgcccugcugagcaccaacaaggccguggugagccugagcaacggcgugagcgugcugaccuucaaggugcuggaccugaagaacuacaucgacaagcagcugcugcccauccugaacaagcagagcugcagcauccccaaccccgagaccgugauggaguuccagcagaagaacaacagacugcuggagaucaccagagaguucagcgugaacgccggcgugaccacccccgugagcaccuacaugcugaccaacagcgagcugcugagccugaucaacgacaugcccaucaccaacgaccagaagaagcugaugagcaacaacgugcagaucgugagacagcagagcuacagcaucaugugcaucaucaaggaggaggugcuggccuacguggugcagcugccccuguacggcgugaucgacacccccugcuggaagcugcacaccagcccccugugcaccaccaacaccaaggagggcagcaacaucugccugaccagaaccgacagaggcugguacugcgacaacgccggcagcgugagcuucuucccccaggccgagaccugcaaggugugcagcaacagaguguucugcgacaccaugaacagccugacccugcccagcgaggugaaccugugcaacaucgacaucuucaaccccaaguacgacugcaagaucaugaccagcaagaccgacgugagcagcagcgugaucaccagccugggcgccaucgugagcugcuacggcaagaccaagugcaccgccagcaacaagaacaagggcaucaucaagaccuucagcaacggcugcgacuacgugagcaacaagggcguggacaccgugagcgugggcaacacccuguacuacgugaacaagcaggagggccagagccuguacgugaagggcgagcccaucaucaacuucuacgacccccugguguuccccagcgacgaguucgacgccagcaucagccaggugaacgagaagaucaaccagagccuggccuucaucagaaagagcgacgagcugcugcacaacgugaacgugggcaagagcaccaccaacaucaugaucaccaccaucaucaucgugaucaucgugauccugcugcugcugaucgccgugggccuguuccuguacugcaaggccagaugaggacuaguaauaaggaaacuguaugaaugucugugggcaggaagugaagagauccuucuguaaagguuuuuggaauuaugucugcugaauaauaaacuuuuuugaaauaauaaaucugguagaaaaaugagaucuaaaaaaaaaaaaaaaaaaaaaaaaaaaaaaaaaaaaaaaaaaaaaaaaaaaaaaaaaaaaaaaaugcaucccccccccccccccccccccccccccccccaaaggcucuuuucagagccaccagaauu

SEQ ID NO: 18325 - RNA, 1982 nt, Artificial Sequence
  mRNA product Design h-4 comprising derived and/or modified sequence from HRSV(Memphis-37)__AIY60640.1__F-del_DSCav1_mut6 (opt5)
gggagagggcgcuuggcuugcaaggacccugagcugcggcauugaagcacacccaacccaacucgacugaagucagccucacugaaccggaucugagaaucuucucucucugggcuugccagggcucuccgaaccuagcuagcauccucuucaauuccaacuagaaagcuuaccauggagcugcccauccucaagaccaacgccauuacaacgauccuggcugccgugacccuuugcuucgcgagcucccagaauauuacagaagaguuuuaccaaucuaccuguagcgcugucuccaaaggcuaucugggggcccucagaacaggaugguacaccucuguuaucacaauugaacugagcaacaucaaggagaauaaaugcaacggcaccgacgccaaggugaaacuuaucaagcaggaacuggauaaguauaaaaaugcugugacggaccuccagaugcugauguguuccaccccugccgcugggucuggaagcgccauugcguccggcaucgccgucugcaaggugcugcaccucgagggggagguuaacaaaauuaagaaugcucugcuuagcacaaacaaagccguggucucucuguccaauggagugagcguucucaccuucaaggugcuggaucuuaagaacuacaucgacaaacagcugcucccgauucugaauaagcaaucuuguuccauccccaacccugaaacagucauggaguuucagcagaaaaauaaccggcugcucgaaauuacccgcgaguucagcgugaaugcuggcgugacgacacccgucucuaccuauaugcugacaaacuccgagcuucugagccucaucaacgauaugccuaucaccaaugaccagaagaaacugauguccaacaauguucaaauugugagacagcagucuuacagcaucaugugcauuaucaaggaagaggugcuugccuaugucgugcagcugccccucuacggcguuauugauaccccuuguuggaaacugcauacauccccgcugugcacgaccaacacaaaggaagggagcaauaucugucucacccggacagaccgcggaugguacugcgauaacgcgggcucuguguccuuuuucccccaagccgagaccuguaaggucugcagcaauagaguguuuugcgacacgaugaacucucugacacuuccuagcgaaguuaaucuguguaacaucgauauuuucaaucccaaauaugacugcaagaucaugaccuccaaaaccgaugugucuagcuccgucauuacaagccucggggcuaucgugucuuguuacggaaagaccaaaugcacagccuccaacaagaauaagggcauuaucaaaacguuuagcaacgggugugacuaugucucuaauaagggaguggacaccguuuccgugggcaacacacuguacuaugucaacaaacaggagggccagagccuuuacgugaagggggagccuaucauuaauuucuaugauccccugguuuuuccguccgacgaauuugaugcuucuaucagccaagugaacgagaaaauuaaucagucccucgccuucauccggaagucugacgaacugcugcacaacgucaaugugggaaagagcaccacaaacauuaugaucaccacgauuaucaucgugauuaucguuauucuccugcuucugaucgccgucggccucuuccuguacugcaaagcucgcugaggacuaguaauaaggaaacuguaugaaugucugugggcaggaagugaagagauccuucuguaaagguuuuuggaauuaugucugcugaauaauaaacuuuuuugaaauaauaaaucugguagaaaaaugagaucuaaaaaaaaaaaaaaaaaaaaaaaaaaaaaaaaaaaaaaaaaaaaaaaaaaaaaaaaaaaaaaaaugcaucccccccccccccccccccccccccccccccaaaggcucuuuucagagccaccagaauu

SEQ ID NO: 18326 - RNA, 1982 nt, Artificial Sequence
  mRNA product Design h-4 comprising derived and/or modified sequence from HRSV(Memphis-37)__AIY60640.1__F-del_DSCav1_mut6 (opt6)
gggagagggcgcuuggcuugcaaggacccugagcugcggcauugaagcacacccaacccaacucgacugaagucagccucacugaaccggaucugagaaucuucucucucugggcuugccagggcucuccgaaccuagcuagcauccucuucaauuccaacuagaaagcuuaccauggaacuaccuauacuaaaaaccaacgccauaacaacaauacuagccgcaguuacacucugcuuugcauccucacaaaacaucacagaggaauuuuaccaaucuacuugcuccgcaguaucaaaaggauaccuaggagcacuccguacaggaugguacacaucagucauaacaauugaauuaucuaacaucaaagaaaacaaauguaaugguacagacgccaaaguaaaauuaauaaaacaagaacuagacaaauacaaaaacgccguaacagaccuacaaaugcuaaugugcucaacccccgccgcaggaucuggaucagcaauugccucaggcauagcaguaugcaaaguccuacaccuagaaggagaagucaacaaaauaaaaaacgcucuccucucaaccaauaaagcaguaguaucccucucaaacggaguaucaguacuaacauucaaaguacuagaccucaaaaauuauauagacaagcaacuacucccaauauuaaauaaacaauccugcucaauacccaauccagaaacagucauggaauuucaacaaaaaaacaaccgacucuuagaaauaacaagagaauuuucagucaaugccggcgucacaaccccaguaucaacauacaugcuaacaaacucagaacuacuaucacuaaucaacgauaugcccauaaccaacgaccaaaaaaaacuaaugucaaacaauguacaaauuguaagacaacagucuuauucaauaaugugcauaauaaaagaagaagucuuagcauauguaguacaacuaccacuauacggaguaauagacacaccauguuggaaauuacacacauccccacuauguaccaccaacacaaaagaaggaucuaacauaugccuaaccagaacagaccgaggcugguauugcgacaaugcaggaucaguauccuucuuuccacaagcagaaacaugcaaagucugcucuaacagaguauucugcgauacuaugaacucacuuaccuuaccaucagaaguaaaucuauguaauaucgacauauucaaucccaaauaugauugcaaaauaaugaccucaaaaacagauguaucaucaucagucauaacaucacuaggagcaauagucagcugcuaugggaaaacaaaaugcacagcuuccaacaaaaacaaaggaaucauaaaaacauucucaaaugguugugacuacguauccaacaaaggaguagauacaguaucuguaggcaacacauuauacuauguaaauaaacaagaaggacaaagccuauacgucaaaggagaacccaucauaaauuucuaugacccauuaguuuucccaucugacgaauuugacgcuuccaucucccaaguaaaugaaaaaaucaaccaaagccucgcauucauucgcaaaucugacgaauuacuccacaacguaaacguaggaaaauccacaacaaacauuaugaucaccaccauaauaaucguaauaauagucauauuacuacuccucauagcaguaggacuauuccuauacuguaaagcuagauaaggacuaguaauaaggaaacuguaugaaugucugugggcaggaagugaagagauccuucuguaaagguuuuuggaauuaugucugcugaauaauaaacuuuuuugaaauaauaaaucugguagaaaaaugagaucuaaaaaaaaaaaaaaaaaaaaaaaaaaaaaaaaaaaaaaaaaaaaaaaaaaaaaaaaaaaaaaaaugcaucccccccccccccccccccccccccccccccaaaggcucuuuucagagccaccagaauu

SEQ ID NO: 18327 - RNA, 1982 nt, Artificial Sequence
  mRNA product Design h-4 comprising derived and/or modified sequence from HRSV(Memphis-37)__AIY60640.1__F-del_DSCav1_mut6 (opt11)
gggagagggcgcuuggcuugcaaggacccugagcugcggcauugaagcacacccaacccaacucgacugaagucagccucacugaaccggaucugagaaucuucucucucugggcuugccagggcucuccgaaccuagcuagcauccucuucaauuccaacuagaaagcuuaccauggaauuaccaauccucaaaacuaacgccaucaccaccauccucgcugccgucacccucugcuucgccuccagccaaaacaucacagaagaguucuaccaaagcacaugcuccgcugucuccaaaggcuaccuuggcgcccuccgcaccggcugguacaccucaguaauuaccauugaacuaagcaacaucaaagaaaauaaaugcaacggcaccgacgccaaaguuaaacucauaaaacaggaacucgacaaauacaaaaacgccguaacagaccuccaaaugcucaugugcuccacccccgccgccggcucaggcuccgccaucgcaagcggaauagcaguuugcaaaguccuccaccuagaaggcgaggucaacaagauuaaaaacgcacuucucucaaccaacaaggccgucguaucacucucaaacggcgucuccguccucaccuucaaaguucuggaccucaaaaacuacaucgauaaacaacuacucccaauacuuaacaaacaaucaugcuccaucccaaaccccgaaaccgucauggaguuccaacagaaaaacaaccgccuacuggaaaucacacgcgaguucagcguaaacgcuggcgucacuacacccgucuccaccuacaugcucaccaauucugaacuccuaucacucauaaacgacaugcccauuaccaacgaccaaaagaaacuaaugucaaacaacguccaaaucguaagacaacaaucguauuccaucaugugcauaauuaaagaagaaguucucgccuacgugguccaacuaccccucuacggagucauagacacuccuuguuggaaacuccacaccucuccccucugcacuaccaacacaaaagaaggcuccaacaucugccucacccgaaccgacagaggcugguacugcgacaacgccggcuccgucuccuucuucccccaagccgaaaccugcaaagucugcuccaaccgcguuuucugcgacaccaugaacucccucacacuccccuccgaagucaaccuauguaacauagacauauucaacccaaaauacgacugcaaaaucaugacauccaaaaccgacgugucuuccucggucaucaccucccucggcgccaucgucucaugcuacggcaaaacuaaaugcaccgcauccaacaaaaacaaaggcauaaucaaaacauucuccaacggcugcgacuacguuucuaacaaaggcgucgauaccgucuccgucggaaacacccucuacuacguaaacaagcaagaaggccagucccuauacguaaaaggagaaccaauuaucaacuucuacgacccccuagucuuccccuccgacgaguucgacgccuccauaucccaagucaacgagaaaaucaaccaaucccuagccuucauccgcaaaucagacgaacuccuccacaacgucaacgucggaaaauccacaacuaacaucaugaucaccaccaucauuaucgucaucauaguuauacuccuccuccucauagccgucggccucuuccuauacugcaaagcucgcuaaggacuaguaauaaggaaacuguaugaaugucugugggcaggaagugaagagauccuucuguaaagguuuuuggaauuaugucugcugaauaauaaacuuuuuugaaauaauaaaucugguagaaaaaugagaucuaaaaaaaaaaaaaaaaaaaaaaaaaaaaaaaaaaaaaaaaaaaaaaaaaaaaaaaaaaaaaaaaugcaucccccccccccccccccccccccccccccccaaaggcucuuuucagagccaccagaauu

SEQ ID NO: 18328 - RNA, 1998 nt, Artificial Sequence
  mRNA product Design h-5 comprising derived and/or modified sequence from HRSV(Memphis-37)__AIY60640.1__F-del_DSCav1_mut6 (opt1)
gggagagggcgcuuggcuugcaaggacccugagcugcggcauugaagcacacccaacccaacucgacugaagucagccucacugaaccggaucugagaaucuucucucucugggcuugccagggcucuccgaaccuagcuagcauccucuucaauuccaacuagaaagcuuaccauggagcugcccauccucaagaccaacgccaucaccacgauccuggccgcggugacccugugcuucgccagcucccagaacaucaccgaggaguucuaccagagcacgugcuccgccgucagcaagggcuaccucggcgcccugcgcaccgggugguacaccagcgugaucaccaucgagcuguccaacaucaaggagaacaagugcaacggcaccgacgccaaggugaagcucaucaagcaggagcuggacaaguacaagaacgcggucacggaccugcagaugcugaugugcagcaccccggccgccggcuccgggagcgcgaucgccuccggcaucgccgucugcaaggugcugcaccucgagggcgaggugaacaagaucaagaacgcccugcuguccaccaacaaggccgucgugagccucuccaacggggugagcguccugaccuucaaggugcuggaccucaagaacuacaucgacaagcagcugcugcccauccugaacaagcagagcugcuccauccccaaccccgagaccgucauggaguuccagcagaagaacaaccgccuccuggagaucacgcgggaguucagcgugaacgcgggcgugaccacccccgucuccaccuacaugcugacgaacagcgagcuccugucccugaucaacgacaugccgaucaccaacgaccagaagaagcucaugagcaacaacgugcagaucgugcgccagcaguccuacagcaucaugugcaucaucaaggaggagguccuggccuacguggugcagcugccccucuacggggucaucgacacccccugcuggaagcugcacaccagcccccugugcacgaccaacaccaaggagggcuccaacaucugccucacccggacggaccgcgggugguacugcgacaacgccggcagcguguccuucuucccgcaggccgagaccugcaaggucugcagcaaccggguguucugcgacaccaugaacucccugacccugcccagcgaggugaaccucugcaacaucgacaucuucaaccccaaguacgacugcaagaucaugacguccaagaccgacgucagcuccagcgugaucaccucccugggcgccaucgugagcugcuacgggaagaccaagugcacggcgagcaacaagaacaagggcaucaucaagaccuucuccaacgggugcgacuacgucagcaacaagggcguggacaccguguccgucggcaacacccuguacuacgugaacaagcaggagggccagagccucuacgugaagggggagcccaucaucaacuucuacgacccgcuggucuuccccuccgacgaguucgacgccagcaucucccaggugaacgagaagaucaaccagagccuggccuucauccggaaguccgacgagcuccugcacaacgugaacgucggcaagagcaccacgaacaucaugaucaccaccaucaucaucgugaucaucgugauccugcugcuccugaucgccgucgggcuguuccucuacugcaaggcccgcugaggacuaguacuggcugcaucucccuuuccucuguccuccauccuucucccaggauggugaagggggaccugguacccagugauccccaccccaggauccuaaaucaugacuuaccugcuaauaaaaacucauuggaaaagugagaagaucuaaaaaaaaaaaaaaaaaaaaaaaaaaaaaaaaaaaaaaaaaaaaaaaaaaaaaaaaaaaaaaaaugcaucccccccccccccccccccccccccccccccaaaggcucuuuucagagccaccagaauu

SEQ ID NO: 18329 - RNA, 1998 nt, Artificial Sequence
  mRNA product Design h-5 comprising derived and/or modified sequence from HRSV(Memphis-37)__AIY60640.1__F-del_DSCav1_mut6 (opt1)
gggagagggcgcuuggcuugcaaggacccugagcugcggcauugaagcacacccaacccaacucgacugaagucagccucacugaaccggaucugagaaucuucucucucugggcuugccagggcucuccgaaccuagcuagcauccucuucaauuccaacuagaaagcuuaccauggagcugcccauccucaagaccaacgccaucaccacgauccuggccgcggugacccugugcuucgccagcucccagaacaucaccgaggaguucuaccagagcacgugcuccgccgucagcaagggcuaccucggggcccugcgcaccggcugguacaccuccgugaucaccaucgagcugagcaacaucaaggagaacaagugcaacgggaccgacgccaaggugaagcucaucaagcaggagcuggacaaguacaagaacgcggucacggaccugcagaugcucaugugcuccaccccggccgccggcagcggguccgccaucgcgagcggcaucgccgugugcaaggugcugcaccuggagggcgaggucaacaagaucaagaacgcccuccuguccaccaacaaggccguggugagccuguccaacggggucagcgugcucaccuucaaggugcuggaccugaagaacuacaucgacaagcagcuccugcccauccugaacaagcaguccugcagcauccccaaccccgagacggucauggaguuccagcagaagaacaaccggcuccuggagaucacccgcgaguucuccgugaacgccggcgugaccaccccggucagcacguacaugcugaccaacuccgagcuccugagccugaucaacgacaugcccaucaccaacgaccagaagaagcucaugagcaacaacgugcagaucgugcggcagcaguccuacagcaucaugugcaucaucaaggaggagguccuggcguacguggugcagcugccccucuacggggucaucgacacccccugcuggaagcugcacacguccccgcugugcaccaccaacaccaaggagggcagcaacaucugccucacgcgcaccgaccgggggugguacugcgacaacgccggcuccgugagcuucuucccccaggccgagaccugcaaggugugcuccaaccgcgucuucugcgacaccaugaacagccugacgcugcccuccgaggugaaccucugcaacaucgacaucuucaaccccaaguacgacugcaagaucaugaccagcaagaccgacgucuccagcuccgugaucaccagccugggcgccaucguguccugcuacgggaagacgaagugcaccgccagcaacaagaacaagggcaucaucaagaccuucuccaacgggugcgacuacgucagcaacaagggcguggacaccguguccgucggcaacacgcuguacuacgugaacaagcaggaggggcagagccucuacgugaagggcgagccgaucaucaacuucuacgacccccuggucuuccccagcgacgaguucgacgcguccaucagccaggugaacgagaagaucaaccagucccuggccuucauccgcaagagcgacgagcuccugcacaacgugaacgucgggaaguccaccaccaacaucaugaucaccaccaucaucaucgugaucaucgugauccugcuccugcugaucgccgucggccucuuccuguacugcaaggcccggugaggacuaguacuggcugcaucucccuuuccucuguccuccauccuucucccaggauggugaagggggaccugguacccagugauccccaccccaggauccuaaaucaugacuuaccugcuaauaaaaacucauuggaaaagugagaagaucuaaaaaaaaaaaaaaaaaaaaaaaaaaaaaaaaaaaaaaaaaaaaaaaaaaaaaaaaaaaaaaaaugcaucccccccccccccccccccccccccccccccaaaggcucuuuucagagccaccagaauu

SEQ ID NO: 18330 - RNA, 1998 nt, Artificial Sequence
  mRNA product Design h-5 comprising derived and/or modified sequence from HRSV(Memphis-37)__AIY60640.1__F-del_DSCav1_mut6 (opt2)
gggagagggcgcuuggcuugcaaggacccugagcugcggcauugaagcacacccaacccaacucgacugaagucagccucacugaaccggaucugagaaucuucucucucugggcuugccagggcucuccgaaccuagcuagcauccucuucaauuccaacuagaaagcuuaccauggagcuccccauccucaagaccaacgccaucaccaccauccucgccgccgucacccucugcuucgccuccucccagaacaucaccgaggaguucuaccaguccaccugcuccgccgucuccaagggcuaccucggcgcccuccgcaccggcugguacaccuccgucaucaccaucgagcucuccaacaucaaggagaacaagugcaacggcaccgacgccaaggucaagcucaucaagcaggagcucgacaaguacaagaacgccgucaccgaccuccagaugcucaugugcuccacccccgccgccggcuccggcuccgccaucgccuccggcaucgccgucugcaagguccuccaccucgagggcgaggucaacaagaucaagaacgcccuccucuccaccaacaaggccgucgucucccucuccaacggcgucuccguccucaccuucaagguccucgaccucaagaacuacaucgacaagcagcuccuccccauccucaacaagcaguccugcuccauccccaaccccgagaccgucauggaguuccagcagaagaacaaccgccuccucgagaucacccgcgaguucuccgucaacgccggcgucaccacccccgucuccaccuacaugcucaccaacuccgagcuccucucccucaucaacgacaugcccaucaccaacgaccagaagaagcucauguccaacaacguccagaucguccgccagcaguccuacuccaucaugugcaucaucaaggaggagguccucgccuacgucguccagcucccccucuacggcgucaucgacacccccugcuggaagcuccacaccuccccccucugcaccaccaacaccaaggagggcuccaacaucugccucacccgcaccgaccgcggcugguacugcgacaacgccggcuccgucuccuucuucccccaggccgagaccugcaaggucugcuccaaccgcgucuucugcgacaccaugaacucccucacccuccccuccgaggucaaccucugcaacaucgacaucuucaaccccaaguacgacugcaagaucaugaccuccaagaccgacgucuccuccuccgucaucaccucccucggcgccaucgucuccugcuacggcaagaccaagugcaccgccuccaacaagaacaagggcaucaucaagaccuucuccaacggcugcgacuacgucuccaacaagggcgucgacaccgucuccgucggcaacacccucuacuacgucaacaagcaggagggccagucccucuacgucaagggcgagcccaucaucaacuucuacgacccccucgucuuccccuccgacgaguucgacgccuccaucucccaggucaacgagaagaucaaccagucccucgccuucauccgcaaguccgacgagcuccuccacaacgucaacgucggcaaguccaccaccaacaucaugaucaccaccaucaucaucgucaucaucgucauccuccuccuccucaucgccgucggccucuuccucuacugcaaggcccgcugaggacuaguacuggcugcaucucccuuuccucuguccuccauccuucucccaggauggugaagggggaccugguacccagugauccccaccccaggauccuaaaucaugacuuaccugcuaauaaaaacucauuggaaaagugagaagaucuaaaaaaaaaaaaaaaaaaaaaaaaaaaaaaaaaaaaaaaaaaaaaaaaaaaaaaaaaaaaaaaaugcaucccccccccccccccccccccccccccccccaaaggcucuuuucagagccaccagaauu

SEQ ID NO: 18331 - RNA, 1998 nt, Artificial Sequence
  mRNA product Design h-5 comprising derived and/or modified sequence from HRSV(Memphis-37)__AIY60640.1__F-del_DSCav1_mut6 (opt3)
gggagagggcgcuuggcuugcaaggacccugagcugcggcauugaagcacacccaacccaacucgacugaagucagccucacugaaccggaucugagaaucuucucucucugggcuugccagggcucuccgaaccuagcuagcauccucuucaauuccaacuagaaagcuuaccauggagcugcccauccucaagaccaacgccauuacaacuauacuugcugcagugacgcugugcuucgccagcucccagaauaucaccgaagaguuuuaccaaucuacauguucagcggucaguaaaggcuauuugggggcuuuaagaacuggaugguacaccagcguuauuacaaucgaacuguccaacauuaaggagaauaaaugcaacgguaccgacgccaaggugaaacuaaucaagcaggaacucgauaaguauaaaaaugcaguaacugaccugcagaugcuuauguguucuacuccugccgcuggcucggggucagcaauagccagcggaaucgcugugugcaagguccugcacuuggagggcgaggugaacaaaauuaagaaugcccuccugaguaccaacaaagcgguugugucccugucuaauggugucagcgugcucacguucaagguauuagaucugaagaacuacaucgacaaacagcuuuugccaauucugaauaagcaauccuguucaaucccgaaccccgaaacuguuauggaguuucagcagaaaaauaacaggcuacucgaaauaacccgggaguucagugugaaugcaggggucacaacuccugugagcaccuauaugcugacaaacucugagcuucuguccuugauuaacgauaugccaaucaccaaugaccagaagaaacucaugucaaacaaugugcaaauuguccgccagcagagcuacaguaucaugugcaucauuaaggaagagguucuggccuaugugguacaguuaccccuguacggagugauagauacgccuuguuggaaacuccauacuucuccacuuugcacaaccaacacuaaggaaggcuccaauaucugucugacacgaaccgaccguggcugguacugcgauaacgcugggagcgucucguuuuucccccaagccgagacguguaaggugugcucuaauagaguuuucugcgacaccaugaacuccuugacacuaccuucagaagugaaucuguguaacauugauaucuucaauccaaaauaugacugcaagauaaugacaaguaaaaccgaugucagcuccucugugauuacaagccucggagcaaucguaucauguuacgguaagacuaaaugcaccgcuaguaacaagaauaagggcaucauuaaaacauuuuccaacgggugugacuauguuagcaauaagggaguggacaccgucucugugggcaacacucuguacuaugucaacaaacaggagggucagucacuuuacgugaagggggagccgaucauuaauuucuaugauccccugguuuuuccuagugacgaauuugaugccagcauaucccaagugaacgagaaaaucaaucagucuuuggcguuuauuaggaagucggacgaacuccugcacaacguaaaugucggaaagagcacgacaaacaucaugaucaccacuauuauaaucgugauuaucguuauuuuacugcuacucaucgccgugggccuguuccuuuacugcaaagcacggugaggacuaguacuggcugcaucucccuuuccucuguccuccauccuucucccaggauggugaagggggaccugguacccagugauccccaccccaggauccuaaaucaugacuuaccugcuaauaaaaacucauuggaaaagugagaagaucuaaaaaaaaaaaaaaaaaaaaaaaaaaaaaaaaaaaaaaaaaaaaaaaaaaaaaaaaaaaaaaaaugcaucccccccccccccccccccccccccccccccaaaggcucuuuucagagccaccagaauu

SEQ ID NO: 18332 - RNA, 1998 nt, Artificial Sequence
  mRNA product Design h-5 comprising derived and/or modified sequence from HRSV(Memphis-37)__AIY60640.1__F-del_DSCav1_mut6 (opt4)
gggagagggcgcuuggcuugcaaggacccugagcugcggcauugaagcacacccaacccaacucgacugaagucagccucacugaaccggaucugagaaucuucucucucugggcuugccagggcucuccgaaccuagcuagcauccucuucaauuccaacuagaaagcuuaccauggagcugcccauccugaagaccaacgccaucaccaccauccuggccgccgugacccugugcuucgccagcagccagaacaucaccgaggaguucuaccagagcaccugcagcgccgugagcaagggcuaccugggcgcccugagaaccggcugguacaccagcgugaucaccaucgagcugagcaacaucaaggagaacaagugcaacggcaccgacgccaaggugaagcugaucaagcaggagcuggacaaguacaagaacgccgugaccgaccugcagaugcugaugugcagcacccccgccgccggcagcggcagcgccaucgccagcggcaucgccgugugcaaggugcugcaccuggagggcgaggugaacaagaucaagaacgcccugcugagcaccaacaaggccguggugagccugagcaacggcgugagcgugcugaccuucaaggugcuggaccugaagaacuacaucgacaagcagcugcugcccauccugaacaagcagagcugcagcauccccaaccccgagaccgugauggaguuccagcagaagaacaacagacugcuggagaucaccagagaguucagcgugaacgccggcgugaccacccccgugagcaccuacaugcugaccaacagcgagcugcugagccugaucaacgacaugcccaucaccaacgaccagaagaagcugaugagcaacaacgugcagaucgugagacagcagagcuacagcaucaugugcaucaucaaggaggaggugcuggccuacguggugcagcugccccuguacggcgugaucgacacccccugcuggaagcugcacaccagcccccugugcaccaccaacaccaaggagggcagcaacaucugccugaccagaaccgacagaggcugguacugcgacaacgccggcagcgugagcuucuucccccaggccgagaccugcaaggugugcagcaacagaguguucugcgacaccaugaacagccugacccugcccagcgaggugaaccugugcaacaucgacaucuucaaccccaaguacgacugcaagaucaugaccagcaagaccgacgugagcagcagcgugaucaccagccugggcgccaucgugagcugcuacggcaagaccaagugcaccgccagcaacaagaacaagggcaucaucaagaccuucagcaacggcugcgacuacgugagcaacaagggcguggacaccgugagcgugggcaacacccuguacuacgugaacaagcaggagggccagagccuguacgugaagggcgagcccaucaucaacuucuacgacccccugguguuccccagcgacgaguucgacgccagcaucagccaggugaacgagaagaucaaccagagccuggccuucaucagaaagagcgacgagcugcugcacaacgugaacgugggcaagagcaccaccaacaucaugaucaccaccaucaucaucgugaucaucgugauccugcugcugcugaucgccgugggccuguuccuguacugcaaggccagaugaggacuaguacuggcugcaucucccuuuccucuguccuccauccuucucccaggauggugaagggggaccugguacccagugauccccaccccaggauccuaaaucaugacuuaccugcuaauaaaaacucauuggaaaagugagaagaucuaaaaaaaaaaaaaaaaaaaaaaaaaaaaaaaaaaaaaaaaaaaaaaaaaaaaaaaaaaaaaaaaugcaucccccccccccccccccccccccccccccccaaaggcucuuuucagagccaccagaauu

SEQ ID NO: 18333 - RNA, 1998 nt, Artificial Sequence
  mRNA product Design h-5 comprising derived and/or modified sequence from HRSV(Memphis-37)__AIY60640.1__F-del_DSCav1_mut6 (opt5)
gggagagggcgcuuggcuugcaaggacccugagcugcggcauugaagcacacccaacccaacucgacugaagucagccucacugaaccggaucugagaaucuucucucucugggcuugccagggcucuccgaaccuagcuagcauccucuucaauuccaacuagaaagcuuaccauggagcugcccauccucaagaccaacgccauuacaacgauccuggcugccgugacccuuugcuucgcgagcucccagaauauuacagaagaguuuuaccaaucuaccuguagcgcugucuccaaaggcuaucugggggcccucagaacaggaugguacaccucuguuaucacaauugaacugagcaacaucaaggagaauaaaugcaacggcaccgacgccaaggugaaacuuaucaagcaggaacuggauaaguauaaaaaugcugugacggaccuccagaugcugauguguuccaccccugccgcugggucuggaagcgccauugcguccggcaucgccgucugcaaggugcugcaccucgagggggagguuaacaaaauuaagaaugcucugcuuagcacaaacaaagccguggucucucuguccaauggagugagcguucucaccuucaaggugcuggaucuuaagaacuacaucgacaaacagcugcucccgauucugaauaagcaaucuuguuccauccccaacccugaaacagucauggaguuucagcagaaaaauaaccggcugcucgaaauuacccgcgaguucagcgugaaugcuggcgugacgacacccgucucuaccuauaugcugacaaacuccgagcuucugagccucaucaacgauaugccuaucaccaaugaccagaagaaacugauguccaacaauguucaaauugugagacagcagucuuacagcaucaugugcauuaucaaggaagaggugcuugccuaugucgugcagcugccccucuacggcguuauugauaccccuuguuggaaacugcauacauccccgcugugcacgaccaacacaaaggaagggagcaauaucugucucacccggacagaccgcggaugguacugcgauaacgcgggcucuguguccuuuuucccccaagccgagaccuguaaggucugcagcaauagaguguuuugcgacacgaugaacucucugacacuuccuagcgaaguuaaucuguguaacaucgauauuuucaaucccaaauaugacugcaagaucaugaccuccaaaaccgaugugucuagcuccgucauuacaagccucggggcuaucgugucuuguuacggaaagaccaaaugcacagccuccaacaagaauaagggcauuaucaaaacguuuagcaacgggugugacuaugucucuaauaagggaguggacaccguuuccgugggcaacacacuguacuaugucaacaaacaggagggccagagccuuuacgugaagggggagccuaucauuaauuucuaugauccccugguuuuuccguccgacgaauuugaugcuucuaucagccaagugaacgagaaaauuaaucagucccucgccuucauccggaagucugacgaacugcugcacaacgucaaugugggaaagagcaccacaaacauuaugaucaccacgauuaucaucgugauuaucguuauucuccugcuucugaucgccgucggccucuuccuguacugcaaagcucgcugaggacuaguacuggcugcaucucccuuuccucuguccuccauccuucucccaggauggugaagggggaccugguacccagugauccccaccccaggauccuaaaucaugacuuaccugcuaauaaaaacucauuggaaaagugagaagaucuaaaaaaaaaaaaaaaaaaaaaaaaaaaaaaaaaaaaaaaaaaaaaaaaaaaaaaaaaaaaaaaaugcaucccccccccccccccccccccccccccccccaaaggcucuuuucagagccaccagaauu

SEQ ID NO: 18334 - RNA, 1998 nt, Artificial Sequence
  mRNA product Design h-5 comprising derived and/or modified sequence from HRSV(Memphis-37)__AIY60640.1__F-del_DSCav1_mut6 (opt6)
gggagagggcgcuuggcuugcaaggacccugagcugcggcauugaagcacacccaacccaacucgacugaagucagccucacugaaccggaucugagaaucuucucucucugggcuugccagggcucuccgaaccuagcuagcauccucuucaauuccaacuagaaagcuuaccauggaacuaccuauacuaaaaaccaacgccauaacaacaauacuagccgcaguuacacucugcuuugcauccucacaaaacaucacagaggaauuuuaccaaucuacuugcuccgcaguaucaaaaggauaccuaggagcacuccguacaggaugguacacaucagucauaacaauugaauuaucuaacaucaaagaaaacaaauguaaugguacagacgccaaaguaaaauuaauaaaacaagaacuagacaaauacaaaaacgccguaacagaccuacaaaugcuaaugugcucaacccccgccgcaggaucuggaucagcaauugccucaggcauagcaguaugcaaaguccuacaccuagaaggagaagucaacaaaauaaaaaacgcucuccucucaaccaauaaagcaguaguaucccucucaaacggaguaucaguacuaacauucaaaguacuagaccucaaaaauuauauagacaagcaacuacucccaauauuaaauaaacaauccugcucaauacccaauccagaaacagucauggaauuucaacaaaaaaacaaccgacucuuagaaauaacaagagaauuuucagucaaugccggcgucacaaccccaguaucaacauacaugcuaacaaacucagaacuacuaucacuaaucaacgauaugcccauaaccaacgaccaaaaaaaacuaaugucaaacaauguacaaauuguaagacaacagucuuauucaauaaugugcauaauaaaagaagaagucuuagcauauguaguacaacuaccacuauacggaguaauagacacaccauguuggaaauuacacacauccccacuauguaccaccaacacaaaagaaggaucuaacauaugccuaaccagaacagaccgaggcugguauugcgacaaugcaggaucaguauccuucuuuccacaagcagaaacaugcaaagucugcucuaacagaguauucugcgauacuaugaacucacuuaccuuaccaucagaaguaaaucuauguaauaucgacauauucaaucccaaauaugauugcaaaauaaugaccucaaaaacagauguaucaucaucagucauaacaucacuaggagcaauagucagcugcuaugggaaaacaaaaugcacagcuuccaacaaaaacaaaggaaucauaaaaacauucucaaaugguugugacuacguauccaacaaaggaguagauacaguaucuguaggcaacacauuauacuauguaaauaaacaagaaggacaaagccuauacgucaaaggagaacccaucauaaauuucuaugacccauuaguuuucccaucugacgaauuugacgcuuccaucucccaaguaaaugaaaaaaucaaccaaagccucgcauucauucgcaaaucugacgaauuacuccacaacguaaacguaggaaaauccacaacaaacauuaugaucaccaccauaauaaucguaauaauagucauauuacuacuccucauagcaguaggacuauuccuauacuguaaagcuagauaaggacuaguacuggcugcaucucccuuuccucuguccuccauccuucucccaggauggugaagggggaccugguacccagugauccccaccccaggauccuaaaucaugacuuaccugcuaauaaaaacucauuggaaaagugagaagaucuaaaaaaaaaaaaaaaaaaaaaaaaaaaaaaaaaaaaaaaaaaaaaaaaaaaaaaaaaaaaaaaaugcaucccccccccccccccccccccccccccccccaaaggcucuuuucagagccaccagaauu

SEQ ID NO: 18335 - RNA, 1998 nt, Artificial Sequence
  mRNA product Design h-5 comprising derived and/or modified sequence from HRSV(Memphis-37)__AIY60640.1__F-del_DSCav1_mut6 (opt11)
gggagagggcgcuuggcuugcaaggacccugagcugcggcauugaagcacacccaacccaacucgacugaagucagccucacugaaccggaucugagaaucuucucucucugggcuugccagggcucuccgaaccuagcuagcauccucuucaauuccaacuagaaagcuuaccauggaauuaccaauccucaaaacuaacgccaucaccaccauccucgcugccgucacccucugcuucgccuccagccaaaacaucacagaagaguucuaccaaagcacaugcuccgcugucuccaaaggcuaccuuggcgcccuccgcaccggcugguacaccucaguaauuaccauugaacuaagcaacaucaaagaaaauaaaugcaacggcaccgacgccaaaguuaaacucauaaaacaggaacucgacaaauacaaaaacgccguaacagaccuccaaaugcucaugugcuccacccccgccgccggcucaggcuccgccaucgcaagcggaauagcaguuugcaaaguccuccaccuagaaggcgaggucaacaagauuaaaaacgcacuucucucaaccaacaaggccgucguaucacucucaaacggcgucuccguccucaccuucaaaguucuggaccucaaaaacuacaucgauaaacaacuacucccaauacuuaacaaacaaucaugcuccaucccaaaccccgaaaccgucauggaguuccaacagaaaaacaaccgccuacuggaaaucacacgcgaguucagcguaaacgcuggcgucacuacacccgucuccaccuacaugcucaccaauucugaacuccuaucacucauaaacgacaugcccauuaccaacgaccaaaagaaacuaaugucaaacaacguccaaaucguaagacaacaaucguauuccaucaugugcauaauuaaagaagaaguucucgccuacgugguccaacuaccccucuacggagucauagacacuccuuguuggaaacuccacaccucuccccucugcacuaccaacacaaaagaaggcuccaacaucugccucacccgaaccgacagaggcugguacugcgacaacgccggcuccgucuccuucuucccccaagccgaaaccugcaaagucugcuccaaccgcguuuucugcgacaccaugaacucccucacacuccccuccgaagucaaccuauguaacauagacauauucaacccaaaauacgacugcaaaaucaugacauccaaaaccgacgugucuuccucggucaucaccucccucggcgccaucgucucaugcuacggcaaaacuaaaugcaccgcauccaacaaaaacaaaggcauaaucaaaacauucuccaacggcugcgacuacguuucuaacaaaggcgucgauaccgucuccgucggaaacacccucuacuacguaaacaagcaagaaggccagucccuauacguaaaaggagaaccaauuaucaacuucuacgacccccuagucuuccccuccgacgaguucgacgccuccauaucccaagucaacgagaaaaucaaccaaucccuagccuucauccgcaaaucagacgaacuccuccacaacgucaacgucggaaaauccacaacuaacaucaugaucaccaccaucauuaucgucaucauaguuauacuccuccuccucauagccgucggccucuuccuauacugcaaagcucgcuaaggacuaguacuggcugcaucucccuuuccucuguccuccauccuucucccaggauggugaagggggaccugguacccagugauccccaccccaggauccuaaaucaugacuuaccugcuaauaaaaacucauuggaaaagugagaagaucuaaaaaaaaaaaaaaaaaaaaaaaaaaaaaaaaaaaaaaaaaaaaaaaaaaaaaaaaaaaaaaaaugcaucccccccccccccccccccccccccccccccaaaggcucuuuucagagccaccagaauu

SEQ ID NO: 18336 - RNA, 1931 nt, Artificial Sequence
  mRNA product Design i-1 comprising derived and/or modified sequence from HRSV(Memphis-37)__AIY60640.1__F-del_DSCav1_mut6 (opt1)
gggagagggcgcuuggcuugcaaggacccugagcugcggcauugaagcacacccaacccaacucgacugaagucagccucacugaaccggaucugagaaucuucucucucugggcuugccagggcucuccgaaccuagcuagcauccucuucaauuccaacuagaaagcuuaccauggagcugcccauccucaagaccaacgccaucaccacgauccuggccgcggugacccugugcuucgccagcucccagaacaucaccgaggaguucuaccagagcacgugcuccgccgucagcaagggcuaccucggcgcccugcgcaccgggugguacaccagcgugaucaccaucgagcuguccaacaucaaggagaacaagugcaacggcaccgacgccaaggugaagcucaucaagcaggagcuggacaaguacaagaacgcggucacggaccugcagaugcugaugugcagcaccccggccgccggcuccgggagcgcgaucgccuccggcaucgccgucugcaaggugcugcaccucgagggcgaggugaacaagaucaagaacgcccugcuguccaccaacaaggccgucgugagccucuccaacggggugagcguccugaccuucaaggugcuggaccucaagaacuacaucgacaagcagcugcugcccauccugaacaagcagagcugcuccauccccaaccccgagaccgucauggaguuccagcagaagaacaaccgccuccuggagaucacgcgggaguucagcgugaacgcgggcgugaccacccccgucuccaccuacaugcugacgaacagcgagcuccugucccugaucaacgacaugccgaucaccaacgaccagaagaagcucaugagcaacaacgugcagaucgugcgccagcaguccuacagcaucaugugcaucaucaaggaggagguccuggccuacguggugcagcugccccucuacggggucaucgacacccccugcuggaagcugcacaccagcccccugugcacgaccaacaccaaggagggcuccaacaucugccucacccggacggaccgcgggugguacugcgacaacgccggcagcguguccuucuucccgcaggccgagaccugcaaggucugcagcaaccggguguucugcgacaccaugaacucccugacccugcccagcgaggugaaccucugcaacaucgacaucuucaaccccaaguacgacugcaagaucaugacguccaagaccgacgucagcuccagcgugaucaccucccugggcgccaucgugagcugcuacgggaagaccaagugcacggcgagcaacaagaacaagggcaucaucaagaccuucuccaacgggugcgacuacgucagcaacaagggcguggacaccguguccgucggcaacacccuguacuacgugaacaagcaggagggccagagccucuacgugaagggggagcccaucaucaacuucuacgacccgcuggucuuccccuccgacgaguucgacgccagcaucucccaggugaacgagaagaucaaccagagccuggccuucauccggaaguccgacgagcuccugcacaacgugaacgucggcaagagcaccacgaacaucaugaucaccaccaucaucaucgugaucaucgugauccugcugcuccugaucgccgucgggcuguuccucuacugcaaggcccgcugaggacuaguguccaccugucccuccugggcugcuggauugucucguuuuccugccaaauaaacaggaucagcgcuuuacagaucuaaaaaaaaaaaaaaaaaaaaaaaaaaaaaaaaaaaaaaaaaaaaaaaaaaaaaaaaaaaaaaaaugcaucccccccccccccccccccccccccccccccaaaggcucuuuucagagccaccagaauu

SEQ ID NO: 18337 - RNA, 1931 nt, Artificial Sequence
  mRNA product Design i-1 comprising derived and/or modified sequence from HRSV(Memphis-37)__AIY60640.1__F-del_DSCav1_mut6 (opt1)
gggagagggcgcuuggcuugcaaggacccugagcugcggcauugaagcacacccaacccaacucgacugaagucagccucacugaaccggaucugagaaucuucucucucugggcuugccagggcucuccgaaccuagcuagcauccucuucaauuccaacuagaaagcuuaccauggagcugcccauccucaagaccaacgccaucaccacgauccuggccgcggugacccugugcuucgccagcucccagaacaucaccgaggaguucuaccagagcacgugcuccgccgucagcaagggcuaccucggggcccugcgcaccggcugguacaccuccgugaucaccaucgagcugagcaacaucaaggagaacaagugcaacgggaccgacgccaaggugaagcucaucaagcaggagcuggacaaguacaagaacgcggucacggaccugcagaugcucaugugcuccaccccggccgccggcagcggguccgccaucgcgagcggcaucgccgugugcaaggugcugcaccuggagggcgaggucaacaagaucaagaacgcccuccuguccaccaacaaggccguggugagccuguccaacggggucagcgugcucaccuucaaggugcuggaccugaagaacuacaucgacaagcagcuccugcccauccugaacaagcaguccugcagcauccccaaccccgagacggucauggaguuccagcagaagaacaaccggcuccuggagaucacccgcgaguucuccgugaacgccggcgugaccaccccggucagcacguacaugcugaccaacuccgagcuccugagccugaucaacgacaugcccaucaccaacgaccagaagaagcucaugagcaacaacgugcagaucgugcggcagcaguccuacagcaucaugugcaucaucaaggaggagguccuggcguacguggugcagcugccccucuacggggucaucgacacccccugcuggaagcugcacacguccccgcugugcaccaccaacaccaaggagggcagcaacaucugccucacgcgcaccgaccgggggugguacugcgacaacgccggcuccgugagcuucuucccccaggccgagaccugcaaggugugcuccaaccgcgucuucugcgacaccaugaacagccugacgcugcccuccgaggugaaccucugcaacaucgacaucuucaaccccaaguacgacugcaagaucaugaccagcaagaccgacgucuccagcuccgugaucaccagccugggcgccaucguguccugcuacgggaagacgaagugcaccgccagcaacaagaacaagggcaucaucaagaccuucuccaacgggugcgacuacgucagcaacaagggcguggacaccguguccgucggcaacacgcuguacuacgugaacaagcaggaggggcagagccucuacgugaagggcgagccgaucaucaacuucuacgacccccuggucuuccccagcgacgaguucgacgcguccaucagccaggugaacgagaagaucaaccagucccuggccuucauccgcaagagcgacgagcuccugcacaacgugaacgucgggaaguccaccaccaacaucaugaucaccaccaucaucaucgugaucaucgugauccugcuccugcugaucgccgucggccucuuccuguacugcaaggcccggugaggacuaguguccaccugucccuccugggcugcuggauugucucguuuuccugccaaauaaacaggaucagcgcuuuacagaucuaaaaaaaaaaaaaaaaaaaaaaaaaaaaaaaaaaaaaaaaaaaaaaaaaaaaaaaaaaaaaaaaugcaucccccccccccccccccccccccccccccccaaaggcucuuuucagagccaccagaauu

SEQ ID NO: 18338 - RNA, 1931 nt, Artificial Sequence
  mRNA product Design i-1 comprising derived and/or modified sequence from HRSV(Memphis-37)__AIY60640.1__F-del_DSCav1_mut6 (opt2)
gggagagggcgcuuggcuugcaaggacccugagcugcggcauugaagcacacccaacccaacucgacugaagucagccucacugaaccggaucugagaaucuucucucucugggcuugccagggcucuccgaaccuagcuagcauccucuucaauuccaacuagaaagcuuaccauggagcuccccauccucaagaccaacgccaucaccaccauccucgccgccgucacccucugcuucgccuccucccagaacaucaccgaggaguucuaccaguccaccugcuccgccgucuccaagggcuaccucggcgcccuccgcaccggcugguacaccuccgucaucaccaucgagcucuccaacaucaaggagaacaagugcaacggcaccgacgccaaggucaagcucaucaagcaggagcucgacaaguacaagaacgccgucaccgaccuccagaugcucaugugcuccacccccgccgccggcuccggcuccgccaucgccuccggcaucgccgucugcaagguccuccaccucgagggcgaggucaacaagaucaagaacgcccuccucuccaccaacaaggccgucgucucccucuccaacggcgucuccguccucaccuucaagguccucgaccucaagaacuacaucgacaagcagcuccuccccauccucaacaagcaguccugcuccauccccaaccccgagaccgucauggaguuccagcagaagaacaaccgccuccucgagaucacccgcgaguucuccgucaacgccggcgucaccacccccgucuccaccuacaugcucaccaacuccgagcuccucucccucaucaacgacaugcccaucaccaacgaccagaagaagcucauguccaacaacguccagaucguccgccagcaguccuacuccaucaugugcaucaucaaggaggagguccucgccuacgucguccagcucccccucuacggcgucaucgacacccccugcuggaagcuccacaccuccccccucugcaccaccaacaccaaggagggcuccaacaucugccucacccgcaccgaccgcggcugguacugcgacaacgccggcuccgucuccuucuucccccaggccgagaccugcaaggucugcuccaaccgcgucuucugcgacaccaugaacucccucacccuccccuccgaggucaaccucugcaacaucgacaucuucaaccccaaguacgacugcaagaucaugaccuccaagaccgacgucuccuccuccgucaucaccucccucggcgccaucgucuccugcuacggcaagaccaagugcaccgccuccaacaagaacaagggcaucaucaagaccuucuccaacggcugcgacuacgucuccaacaagggcgucgacaccgucuccgucggcaacacccucuacuacgucaacaagcaggagggccagucccucuacgucaagggcgagcccaucaucaacuucuacgacccccucgucuuccccuccgacgaguucgacgccuccaucucccaggucaacgagaagaucaaccagucccucgccuucauccgcaaguccgacgagcuccuccacaacgucaacgucggcaaguccaccaccaacaucaugaucaccaccaucaucaucgucaucaucgucauccuccuccuccucaucgccgucggccucuuccucuacugcaaggcccgcugaggacuaguguccaccugucccuccugggcugcuggauugucucguuuuccugccaaauaaacaggaucagcgcuuuacagaucuaaaaaaaaaaaaaaaaaaaaaaaaaaaaaaaaaaaaaaaaaaaaaaaaaaaaaaaaaaaaaaaaugcaucccccccccccccccccccccccccccccccaaaggcucuuuucagagccaccagaauu

SEQ ID NO: 18339 - RNA, 1931 nt, Artificial Sequence
  mRNA product Design i-1 comprising derived and/or modified sequence from HRSV(Memphis-37)__AIY60640.1__F-del_DSCav1_mut6 (opt3)
gggagagggcgcuuggcuugcaaggacccugagcugcggcauugaagcacacccaacccaacucgacugaagucagccucacugaaccggaucugagaaucuucucucucugggcuugccagggcucuccgaaccuagcuagcauccucuucaauuccaacuagaaagcuuaccauggagcugcccauccucaagaccaacgccauuacaacuauacuugcugcagugacgcugugcuucgccagcucccagaauaucaccgaagaguuuuaccaaucuacauguucagcggucaguaaaggcuauuugggggcuuuaagaacuggaugguacaccagcguuauuacaaucgaacuguccaacauuaaggagaauaaaugcaacgguaccgacgccaaggugaaacuaaucaagcaggaacucgauaaguauaaaaaugcaguaacugaccugcagaugcuuauguguucuacuccugccgcuggcucggggucagcaauagccagcggaaucgcugugugcaagguccugcacuuggagggcgaggugaacaaaauuaagaaugcccuccugaguaccaacaaagcgguugugucccugucuaauggugucagcgugcucacguucaagguauuagaucugaagaacuacaucgacaaacagcuuuugccaauucugaauaagcaauccuguucaaucccgaaccccgaaacuguuauggaguuucagcagaaaaauaacaggcuacucgaaauaacccgggaguucagugugaaugcaggggucacaacuccugugagcaccuauaugcugacaaacucugagcuucuguccuugauuaacgauaugccaaucaccaaugaccagaagaaacucaugucaaacaaugugcaaauuguccgccagcagagcuacaguaucaugugcaucauuaaggaagagguucuggccuaugugguacaguuaccccuguacggagugauagauacgccuuguuggaaacuccauacuucuccacuuugcacaaccaacacuaaggaaggcuccaauaucugucugacacgaaccgaccguggcugguacugcgauaacgcugggagcgucucguuuuucccccaagccgagacguguaaggugugcucuaauagaguuuucugcgacaccaugaacuccuugacacuaccuucagaagugaaucuguguaacauugauaucuucaauccaaaauaugacugcaagauaaugacaaguaaaaccgaugucagcuccucugugauuacaagccucggagcaaucguaucauguuacgguaagacuaaaugcaccgcuaguaacaagaauaagggcaucauuaaaacauuuuccaacgggugugacuauguuagcaauaagggaguggacaccgucucugugggcaacacucuguacuaugucaacaaacaggagggucagucacuuuacgugaagggggagccgaucauuaauuucuaugauccccugguuuuuccuagugacgaauuugaugccagcauaucccaagugaacgagaaaaucaaucagucuuuggcguuuauuaggaagucggacgaacuccugcacaacguaaaugucggaaagagcacgacaaacaucaugaucaccacuauuauaaucgugauuaucguuauuuuacugcuacucaucgccgugggccuguuccuuuacugcaaagcacggugaggacuaguguccaccugucccuccugggcugcuggauugucucguuuuccugccaaauaaacaggaucagcgcuuuacagaucuaaaaaaaaaaaaaaaaaaaaaaaaaaaaaaaaaaaaaaaaaaaaaaaaaaaaaaaaaaaaaaaaugcaucccccccccccccccccccccccccccccccaaaggcucuuuucagagccaccagaauu

SEQ ID NO: 18340 - RNA, 1931 nt, Artificial Sequence
  mRNA product Design i-1 comprising derived and/or modified sequence from HRSV(Memphis-37)__AIY60640.1__F-del_DSCav1_mut6 (opt4)
gggagagggcgcuuggcuugcaaggacccugagcugcggcauugaagcacacccaacccaacucgacugaagucagccucacugaaccggaucugagaaucuucucucucugggcuugccagggcucuccgaaccuagcuagcauccucuucaauuccaacuagaaagcuuaccauggagcugcccauccugaagaccaacgccaucaccaccauccuggccgccgugacccugugcuucgccagcagccagaacaucaccgaggaguucuaccagagcaccugcagcgccgugagcaagggcuaccugggcgcccugagaaccggcugguacaccagcgugaucaccaucgagcugagcaacaucaaggagaacaagugcaacggcaccgacgccaaggugaagcugaucaagcaggagcuggacaaguacaagaacgccgugaccgaccugcagaugcugaugugcagcacccccgccgccggcagcggcagcgccaucgccagcggcaucgccgugugcaaggugcugcaccuggagggcgaggugaacaagaucaagaacgcccugcugagcaccaacaaggccguggugagccugagcaacggcgugagcgugcugaccuucaaggugcuggaccugaagaacuacaucgacaagcagcugcugcccauccugaacaagcagagcugcagcauccccaaccccgagaccgugauggaguuccagcagaagaacaacagacugcuggagaucaccagagaguucagcgugaacgccggcgugaccacccccgugagcaccuacaugcugaccaacagcgagcugcugagccugaucaacgacaugcccaucaccaacgaccagaagaagcugaugagcaacaacgugcagaucgugagacagcagagcuacagcaucaugugcaucaucaaggaggaggugcuggccuacguggugcagcugccccuguacggcgugaucgacacccccugcuggaagcugcacaccagcccccugugcaccaccaacaccaaggagggcagcaacaucugccugaccagaaccgacagaggcugguacugcgacaacgccggcagcgugagcuucuucccccaggccgagaccugcaaggugugcagcaacagaguguucugcgacaccaugaacagccugacccugcccagcgaggugaaccugugcaacaucgacaucuucaaccccaaguacgacugcaagaucaugaccagcaagaccgacgugagcagcagcgugaucaccagccugggcgccaucgugagcugcuacggcaagaccaagugcaccgccagcaacaagaacaagggcaucaucaagaccuucagcaacggcugcgacuacgugagcaacaagggcguggacaccgugagcgugggcaacacccuguacuacgugaacaagcaggagggccagagccuguacgugaagggcgagcccaucaucaacuucuacgacccccugguguuccccagcgacgaguucgacgccagcaucagccaggugaacgagaagaucaaccagagccuggccuucaucagaaagagcgacgagcugcugcacaacgugaacgugggcaagagcaccaccaacaucaugaucaccaccaucaucaucgugaucaucgugauccugcugcugcugaucgccgugggccuguuccuguacugcaaggccagaugaggacuaguguccaccugucccuccugggcugcuggauugucucguuuuccugccaaauaaacaggaucagcgcuuuacagaucuaaaaaaaaaaaaaaaaaaaaaaaaaaaaaaaaaaaaaaaaaaaaaaaaaaaaaaaaaaaaaaaaugcaucccccccccccccccccccccccccccccccaaaggcucuuuucagagccaccagaauu

SEQ ID NO: 18341 - RNA, 1931 nt, Artificial Sequence
  mRNA product Design i-1 comprising derived and/or modified sequence from HRSV(Memphis-37)__AIY60640.1__F-del_DSCav1_mut6 (opt5)
gggagagggcgcuuggcuugcaaggacccugagcugcggcauugaagcacacccaacccaacucgacugaagucagccucacugaaccggaucugagaaucuucucucucugggcuugccagggcucuccgaaccuagcuagcauccucuucaauuccaacuagaaagcuuaccauggagcugcccauccucaagaccaacgccauuacaacgauccuggcugccgugacccuuugcuucgcgagcucccagaauauuacagaagaguuuuaccaaucuaccuguagcgcugucuccaaaggcuaucugggggcccucagaacaggaugguacaccucuguuaucacaauugaacugagcaacaucaaggagaauaaaugcaacggcaccgacgccaaggugaaacuuaucaagcaggaacuggauaaguauaaaaaugcugugacggaccuccagaugcugauguguuccaccccugccgcugggucuggaagcgccauugcguccggcaucgccgucugcaaggugcugcaccucgagggggagguuaacaaaauuaagaaugcucugcuuagcacaaacaaagccguggucucucuguccaauggagugagcguucucaccuucaaggugcuggaucuuaagaacuacaucgacaaacagcugcucccgauucugaauaagcaaucuuguuccauccccaacccugaaacagucauggaguuucagcagaaaaauaaccggcugcucgaaauuacccgcgaguucagcgugaaugcuggcgugacgacacccgucucuaccuauaugcugacaaacuccgagcuucugagccucaucaacgauaugccuaucaccaaugaccagaagaaacugauguccaacaauguucaaauugugagacagcagucuuacagcaucaugugcauuaucaaggaagaggugcuugccuaugucgugcagcugccccucuacggcguuauugauaccccuuguuggaaacugcauacauccccgcugugcacgaccaacacaaaggaagggagcaauaucugucucacccggacagaccgcggaugguacugcgauaacgcgggcucuguguccuuuuucccccaagccgagaccuguaaggucugcagcaauagaguguuuugcgacacgaugaacucucugacacuuccuagcgaaguuaaucuguguaacaucgauauuuucaaucccaaauaugacugcaagaucaugaccuccaaaaccgaugugucuagcuccgucauuacaagccucggggcuaucgugucuuguuacggaaagaccaaaugcacagccuccaacaagaauaagggcauuaucaaaacguuuagcaacgggugugacuaugucucuaauaagggaguggacaccguuuccgugggcaacacacuguacuaugucaacaaacaggagggccagagccuuuacgugaagggggagccuaucauuaauuucuaugauccccugguuuuuccguccgacgaauuugaugcuucuaucagccaagugaacgagaaaauuaaucagucccucgccuucauccggaagucugacgaacugcugcacaacgucaaugugggaaagagcaccacaaacauuaugaucaccacgauuaucaucgugauuaucguuauucuccugcuucugaucgccgucggccucuuccuguacugcaaagcucgcugaggacuaguguccaccugucccuccugggcugcuggauugucucguuuuccugccaaauaaacaggaucagcgcuuuacagaucuaaaaaaaaaaaaaaaaaaaaaaaaaaaaaaaaaaaaaaaaaaaaaaaaaaaaaaaaaaaaaaaaugcaucccccccccccccccccccccccccccccccaaaggcucuuuucagagccaccagaauu

SEQ ID NO: 18342 - RNA, 1931 nt, Artificial Sequence
  mRNA product Design i-1 comprising derived and/or modified sequence from HRSV(Memphis-37)__AIY60640.1__F-del_DSCav1_mut6 (opt6)
gggagagggcgcuuggcuugcaaggacccugagcugcggcauugaagcacacccaacccaacucgacugaagucagccucacugaaccggaucugagaaucuucucucucugggcuugccagggcucuccgaaccuagcuagcauccucuucaauuccaacuagaaagcuuaccauggaacuaccuauacuaaaaaccaacgccauaacaacaauacuagccgcaguuacacucugcuuugcauccucacaaaacaucacagaggaauuuuaccaaucuacuugcuccgcaguaucaaaaggauaccuaggagcacuccguacaggaugguacacaucagucauaacaauugaauuaucuaacaucaaagaaaacaaauguaaugguacagacgccaaaguaaaauuaauaaaacaagaacuagacaaauacaaaaacgccguaacagaccuacaaaugcuaaugugcucaacccccgccgcaggaucuggaucagcaauugccucaggcauagcaguaugcaaaguccuacaccuagaaggagaagucaacaaaauaaaaaacgcucuccucucaaccaauaaagcaguaguaucccucucaaacggaguaucaguacuaacauucaaaguacuagaccucaaaaauuauauagacaagcaacuacucccaauauuaaauaaacaauccugcucaauacccaauccagaaacagucauggaauuucaacaaaaaaacaaccgacucuuagaaauaacaagagaauuuucagucaaugccggcgucacaaccccaguaucaacauacaugcuaacaaacucagaacuacuaucacuaaucaacgauaugcccauaaccaacgaccaaaaaaaacuaaugucaaacaauguacaaauuguaagacaacagucuuauucaauaaugugcauaauaaaagaagaagucuuagcauauguaguacaacuaccacuauacggaguaauagacacaccauguuggaaauuacacacauccccacuauguaccaccaacacaaaagaaggaucuaacauaugccuaaccagaacagaccgaggcugguauugcgacaaugcaggaucaguauccuucuuuccacaagcagaaacaugcaaagucugcucuaacagaguauucugcgauacuaugaacucacuuaccuuaccaucagaaguaaaucuauguaauaucgacauauucaaucccaaauaugauugcaaaauaaugaccucaaaaacagauguaucaucaucagucauaacaucacuaggagcaauagucagcugcuaugggaaaacaaaaugcacagcuuccaacaaaaacaaaggaaucauaaaaacauucucaaaugguugugacuacguauccaacaaaggaguagauacaguaucuguaggcaacacauuauacuauguaaauaaacaagaaggacaaagccuauacgucaaaggagaacccaucauaaauuucuaugacccauuaguuuucccaucugacgaauuugacgcuuccaucucccaaguaaaugaaaaaaucaaccaaagccucgcauucauucgcaaaucugacgaauuacuccacaacguaaacguaggaaaauccacaacaaacauuaugaucaccaccauaauaaucguaauaauagucauauuacuacuccucauagcaguaggacuauuccuauacuguaaagcuagauaaggacuaguguccaccugucccuccugggcugcuggauugucucguuuuccugccaaauaaacaggaucagcgcuuuacagaucuaaaaaaaaaaaaaaaaaaaaaaaaaaaaaaaaaaaaaaaaaaaaaaaaaaaaaaaaaaaaaaaaugcaucccccccccccccccccccccccccccccccaaaggcucuuuucagagccaccagaauu

SEQ ID NO: 18343 - RNA, 1931 nt, Artificial Sequence
  mRNA product Design i-1 comprising derived and/or modified sequence from HRSV(Memphis-37)__AIY60640.1__F-del_DSCav1_mut6 (opt11)
gggagagggcgcuuggcuugcaaggacccugagcugcggcauugaagcacacccaacccaacucgacugaagucagccucacugaaccggaucugagaaucuucucucucugggcuugccagggcucuccgaaccuagcuagcauccucuucaauuccaacuagaaagcuuaccauggaauuaccaauccucaaaacuaacgccaucaccaccauccucgcugccgucacccucugcuucgccuccagccaaaacaucacagaagaguucuaccaaagcacaugcuccgcugucuccaaaggcuaccuuggcgcccuccgcaccggcugguacaccucaguaauuaccauugaacuaagcaacaucaaagaaaauaaaugcaacggcaccgacgccaaaguuaaacucauaaaacaggaacucgacaaauacaaaaacgccguaacagaccuccaaaugcucaugugcuccacccccgccgccggcucaggcuccgccaucgcaagcggaauagcaguuugcaaaguccuccaccuagaaggcgaggucaacaagauuaaaaacgcacuucucucaaccaacaaggccgucguaucacucucaaacggcgucuccguccucaccuucaaaguucuggaccucaaaaacuacaucgauaaacaacuacucccaauacuuaacaaacaaucaugcuccaucccaaaccccgaaaccgucauggaguuccaacagaaaaacaaccgccuacuggaaaucacacgcgaguucagcguaaacgcuggcgucacuacacccgucuccaccuacaugcucaccaauucugaacuccuaucacucauaaacgacaugcccauuaccaacgaccaaaagaaacuaaugucaaacaacguccaaaucguaagacaacaaucguauuccaucaugugcauaauuaaagaagaaguucucgccuacgugguccaacuaccccucuacggagucauagacacuccuuguuggaaacuccacaccucuccccucugcacuaccaacacaaaagaaggcuccaacaucugccucacccgaaccgacagaggcugguacugcgacaacgccggcuccgucuccuucuucccccaagccgaaaccugcaaagucugcuccaaccgcguuuucugcgacaccaugaacucccucacacuccccuccgaagucaaccuauguaacauagacauauucaacccaaaauacgacugcaaaaucaugacauccaaaaccgacgugucuuccucggucaucaccucccucggcgccaucgucucaugcuacggcaaaacuaaaugcaccgcauccaacaaaaacaaaggcauaaucaaaacauucuccaacggcugcgacuacguuucuaacaaaggcgucgauaccgucuccgucggaaacacccucuacuacguaaacaagcaagaaggccagucccuauacguaaaaggagaaccaauuaucaacuucuacgacccccuagucuuccccuccgacgaguucgacgccuccauaucccaagucaacgagaaaaucaaccaaucccuagccuucauccgcaaaucagacgaacuccuccacaacgucaacgucggaaaauccacaacuaacaucaugaucaccaccaucauuaucgucaucauaguuauacuccuccuccucauagccgucggccucuuccuauacugcaaagcucgcuaaggacuaguguccaccugucccuccugggcugcuggauugucucguuuuccugccaaauaaacaggaucagcgcuuuacagaucuaaaaaaaaaaaaaaaaaaaaaaaaaaaaaaaaaaaaaaaaaaaaaaaaaaaaaaaaaaaaaaaaugcaucccccccccccccccccccccccccccccccaaaggcucuuuucagagccaccagaauu

SEQ ID NO: 18344 - RNA, 1931 nt, Artificial Sequence
  mRNA product Design i-2 comprising derived and/or modified sequence from HRSV(Memphis-37)__AIY60640.1__F-del_DSCav1_mut6 (opt1)
gggagaggcgcugccuacggagguggcagccaucuccuucucggcaucaagcuuaccauggagcugcccauccucaagaccaacgccaucaccacgauccuggccgcggugacccugugcuucgccagcucccagaacaucaccgaggaguucuaccagagcacgugcuccgccgucagcaagggcuaccucggcgcccugcgcaccgggugguacaccagcgugaucaccaucgagcuguccaacaucaaggagaacaagugcaacggcaccgacgccaaggugaagcucaucaagcaggagcuggacaaguacaagaacgcggucacggaccugcagaugcugaugugcagcaccccggccgccggcuccgggagcgcgaucgccuccggcaucgccgucugcaaggugcugcaccucgagggcgaggugaacaagaucaagaacgcccugcuguccaccaacaaggccgucgugagccucuccaacggggugagcguccugaccuucaaggugcuggaccucaagaacuacaucgacaagcagcugcugcccauccugaacaagcagagcugcuccauccccaaccccgagaccgucauggaguuccagcagaagaacaaccgccuccuggagaucacgcgggaguucagcgugaacgcgggcgugaccacccccgucuccaccuacaugcugacgaacagcgagcuccugucccugaucaacgacaugccgaucaccaacgaccagaagaagcucaugagcaacaacgugcagaucgugcgccagcaguccuacagcaucaugugcaucaucaaggaggagguccuggccuacguggugcagcugccccucuacggggucaucgacacccccugcuggaagcugcacaccagcccccugugcacgaccaacaccaaggagggcuccaacaucugccucacccggacggaccgcgggugguacugcgacaacgccggcagcguguccuucuucccgcaggccgagaccugcaaggucugcagcaaccggguguucugcgacaccaugaacucccugacccugcccagcgaggugaaccucugcaacaucgacaucuucaaccccaaguacgacugcaagaucaugacguccaagaccgacgucagcuccagcgugaucaccucccugggcgccaucgugagcugcuacgggaagaccaagugcacggcgagcaacaagaacaagggcaucaucaagaccuucuccaacgggugcgacuacgucagcaacaagggcguggacaccguguccgucggcaacacccuguacuacgugaacaagcaggagggccagagccucuacgugaagggggagcccaucaucaacuucuacgacccgcuggucuuccccuccgacgaguucgacgccagcaucucccaggugaacgagaagaucaaccagagccuggccuucauccggaaguccgacgagcuccugcacaacgugaacgucggcaagagcaccacgaacaucaugaucaccaccaucaucaucgugaucaucgugauccugcugcuccugaucgccgucgggcuguuccucuacugcaaggcccgcugaggacuagugcaucacauuuaaaagcaucucagccuaccaugagaauaagagaaagaaaaugaagaucaauagcuuauucaucucuuuuucuuuuucguugguguaaagccaacacccugucuaaaaaacauaaauuucuuuaaucauuuugccucuuuucucugugcuucaauuaauaaaaaauggaaagaaccuagaucuaaaaaaaaaaaaaaaaaaaaaaaaaaaaaaaaaaaaaaaaaaaaaaaaaaaaaaaaaaaaaaaaugcaucccccccccccccccccccccccccccccccaaaggcucuuuucagagccaccagaauu

SEQ ID NO: 18345 - RNA, 1931 nt, Artificial Sequence
  mRNA product Design i-2 comprising derived and/or modified sequence from HRSV(Memphis-37)__AIY60640.1__F-del_DSCav1_mut6 (opt1)
gggagaggcgcugccuacggagguggcagccaucuccuucucggcaucaagcuuaccauggagcugcccauccucaagaccaacgccaucaccacgauccuggccgcggugacccugugcuucgccagcucccagaacaucaccgaggaguucuaccagagcacgugcuccgccgucagcaagggcuaccucggggcccugcgcaccggcugguacaccuccgugaucaccaucgagcugagcaacaucaaggagaacaagugcaacgggaccgacgccaaggugaagcucaucaagcaggagcuggacaaguacaagaacgcggucacggaccugcagaugcucaugugcuccaccccggccgccggcagcggguccgccaucgcgagcggcaucgccgugugcaaggugcugcaccuggagggcgaggucaacaagaucaagaacgcccuccuguccaccaacaaggccguggugagccuguccaacggggucagcgugcucaccuucaaggugcuggaccugaagaacuacaucgacaagcagcuccugcccauccugaacaagcaguccugcagcauccccaaccccgagacggucauggaguuccagcagaagaacaaccggcuccuggagaucacccgcgaguucuccgugaacgccggcgugaccaccccggucagcacguacaugcugaccaacuccgagcuccugagccugaucaacgacaugcccaucaccaacgaccagaagaagcucaugagcaacaacgugcagaucgugcggcagcaguccuacagcaucaugugcaucaucaaggaggagguccuggcguacguggugcagcugccccucuacggggucaucgacacccccugcuggaagcugcacacguccccgcugugcaccaccaacaccaaggagggcagcaacaucugccucacgcgcaccgaccgggggugguacugcgacaacgccggcuccgugagcuucuucccccaggccgagaccugcaaggugugcuccaaccgcgucuucugcgacaccaugaacagccugacgcugcccuccgaggugaaccucugcaacaucgacaucuucaaccccaaguacgacugcaagaucaugaccagcaagaccgacgucuccagcuccgugaucaccagccugggcgccaucguguccugcuacgggaagacgaagugcaccgccagcaacaagaacaagggcaucaucaagaccuucuccaacgggugcgacuacgucagcaacaagggcguggacaccguguccgucggcaacacgcuguacuacgugaacaagcaggaggggcagagccucuacgugaagggcgagccgaucaucaacuucuacgacccccuggucuuccccagcgacgaguucgacgcguccaucagccaggugaacgagaagaucaaccagucccuggccuucauccgcaagagcgacgagcuccugcacaacgugaacgucgggaaguccaccaccaacaucaugaucaccaccaucaucaucgugaucaucgugauccugcuccugcugaucgccgucggccucuuccuguacugcaaggcccggugaggacuagugcaucacauuuaaaagcaucucagccuaccaugagaauaagagaaagaaaaugaagaucaauagcuuauucaucucuuuuucuuuuucguugguguaaagccaacacccugucuaaaaaacauaaauuucuuuaaucauuuugccucuuuucucugugcuucaauuaauaaaaaauggaaagaaccuagaucuaaaaaaaaaaaaaaaaaaaaaaaaaaaaaaaaaaaaaaaaaaaaaaaaaaaaaaaaaaaaaaaaugcaucccccccccccccccccccccccccccccccaaaggcucuuuucagagccaccagaauu

SEQ ID NO: 18346 - RNA, 1931 nt, Artificial Sequence
  mRNA product Design i-2 comprising derived and/or modified sequence from HRSV(Memphis-37)__AIY60640.1__F-del_DSCav1_mut6 (opt2)
gggagaggcgcugccuacggagguggcagccaucuccuucucggcaucaagcuuaccauggagcuccccauccucaagaccaacgccaucaccaccauccucgccgccgucacccucugcuucgccuccucccagaacaucaccgaggaguucuaccaguccaccugcuccgccgucuccaagggcuaccucggcgcccuccgcaccggcugguacaccuccgucaucaccaucgagcucuccaacaucaaggagaacaagugcaacggcaccgacgccaaggucaagcucaucaagcaggagcucgacaaguacaagaacgccgucaccgaccuccagaugcucaugugcuccacccccgccgccggcuccggcuccgccaucgccuccggcaucgccgucugcaagguccuccaccucgagggcgaggucaacaagaucaagaacgcccuccucuccaccaacaaggccgucgucucccucuccaacggcgucuccguccucaccuucaagguccucgaccucaagaacuacaucgacaagcagcuccuccccauccucaacaagcaguccugcuccauccccaaccccgagaccgucauggaguuccagcagaagaacaaccgccuccucgagaucacccgcgaguucuccgucaacgccggcgucaccacccccgucuccaccuacaugcucaccaacuccgagcuccucucccucaucaacgacaugcccaucaccaacgaccagaagaagcucauguccaacaacguccagaucguccgccagcaguccuacuccaucaugugcaucaucaaggaggagguccucgccuacgucguccagcucccccucuacggcgucaucgacacccccugcuggaagcuccacaccuccccccucugcaccaccaacaccaaggagggcuccaacaucugccucacccgcaccgaccgcggcugguacugcgacaacgccggcuccgucuccuucuucccccaggccgagaccugcaaggucugcuccaaccgcgucuucugcgacaccaugaacucccucacccuccccuccgaggucaaccucugcaacaucgacaucuucaaccccaaguacgacugcaagaucaugaccuccaagaccgacgucuccuccuccgucaucaccucccucggcgccaucgucuccugcuacggcaagaccaagugcaccgccuccaacaagaacaagggcaucaucaagaccuucuccaacggcugcgacuacgucuccaacaagggcgucgacaccgucuccgucggcaacacccucuacuacgucaacaagcaggagggccagucccucuacgucaagggcgagcccaucaucaacuucuacgacccccucgucuuccccuccgacgaguucgacgccuccaucucccaggucaacgagaagaucaaccagucccucgccuucauccgcaaguccgacgagcuccuccacaacgucaacgucggcaaguccaccaccaacaucaugaucaccaccaucaucaucgucaucaucgucauccuccuccuccucaucgccgucggccucuuccucuacugcaaggcccgcugaggacuagugcaucacauuuaaaagcaucucagccuaccaugagaauaagagaaagaaaaugaagaucaauagcuuauucaucucuuuuucuuuuucguugguguaaagccaacacccugucuaaaaaacauaaauuucuuuaaucauuuugccucuuuucucugugcuucaauuaauaaaaaauggaaagaaccuagaucuaaaaaaaaaaaaaaaaaaaaaaaaaaaaaaaaaaaaaaaaaaaaaaaaaaaaaaaaaaaaaaaaugcaucccccccccccccccccccccccccccccccaaaggcucuuuucagagccaccagaauu

SEQ ID NO: 18347 - RNA, 1931 nt, Artificial Sequence
  mRNA product Design i-2 comprising derived and/or modified sequence from HRSV(Memphis-37)__AIY60640.1__F-del_DSCav1_mut6 (opt3)
gggagaggcgcugccuacggagguggcagccaucuccuucucggcaucaagcuuaccauggagcugcccauccucaagaccaacgccauuacaacuauacuugcugcagugacgcugugcuucgccagcucccagaauaucaccgaagaguuuuaccaaucuacauguucagcggucaguaaaggcuauuugggggcuuuaagaacuggaugguacaccagcguuauuacaaucgaacuguccaacauuaaggagaauaaaugcaacgguaccgacgccaaggugaaacuaaucaagcaggaacucgauaaguauaaaaaugcaguaacugaccugcagaugcuuauguguucuacuccugccgcuggcucggggucagcaauagccagcggaaucgcugugugcaagguccugcacuuggagggcgaggugaacaaaauuaagaaugcccuccugaguaccaacaaagcgguugugucccugucuaauggugucagcgugcucacguucaagguauuagaucugaagaacuacaucgacaaacagcuuuugccaauucugaauaagcaauccuguucaaucccgaaccccgaaacuguuauggaguuucagcagaaaaauaacaggcuacucgaaauaacccgggaguucagugugaaugcaggggucacaacuccugugagcaccuauaugcugacaaacucugagcuucuguccuugauuaacgauaugccaaucaccaaugaccagaagaaacucaugucaaacaaugugcaaauuguccgccagcagagcuacaguaucaugugcaucauuaaggaagagguucuggccuaugugguacaguuaccccuguacggagugauagauacgccuuguuggaaacuccauacuucuccacuuugcacaaccaacacuaaggaaggcuccaauaucugucugacacgaaccgaccguggcugguacugcgauaacgcugggagcgucucguuuuucccccaagccgagacguguaaggugugcucuaauagaguuuucugcgacaccaugaacuccuugacacuaccuucagaagugaaucuguguaacauugauaucuucaauccaaaauaugacugcaagauaaugacaaguaaaaccgaugucagcuccucugugauuacaagccucggagcaaucguaucauguuacgguaagacuaaaugcaccgcuaguaacaagaauaagggcaucauuaaaacauuuuccaacgggugugacuauguuagcaauaagggaguggacaccgucucugugggcaacacucuguacuaugucaacaaacaggagggucagucacuuuacgugaagggggagccgaucauuaauuucuaugauccccugguuuuuccuagugacgaauuugaugccagcauaucccaagugaacgagaaaaucaaucagucuuuggcguuuauuaggaagucggacgaacuccugcacaacguaaaugucggaaagagcacgacaaacaucaugaucaccacuauuauaaucgugauuaucguuauuuuacugcuacucaucgccgugggccuguuccuuuacugcaaagcacggugaggacuagugcaucacauuuaaaagcaucucagccuaccaugagaauaagagaaagaaaaugaagaucaauagcuuauucaucucuuuuucuuuuucguugguguaaagccaacacccugucuaaaaaacauaaauuucuuuaaucauuuugccucuuuucucugugcuucaauuaauaaaaaauggaaagaaccuagaucuaaaaaaaaaaaaaaaaaaaaaaaaaaaaaaaaaaaaaaaaaaaaaaaaaaaaaaaaaaaaaaaaugcaucccccccccccccccccccccccccccccccaaaggcucuuuucagagccaccagaauu

SEQ ID NO: 18348 - RNA, 1931 nt, Artificial Sequence
  mRNA product Design i-2 comprising derived and/or modified sequence from HRSV(Memphis-37)__AIY60640.1__F-del_DSCav1_mut6 (opt4)
gggagaggcgcugccuacggagguggcagccaucuccuucucggcaucaagcuuaccauggagcugcccauccugaagaccaacgccaucaccaccauccuggccgccgugacccugugcuucgccagcagccagaacaucaccgaggaguucuaccagagcaccugcagcgccgugagcaagggcuaccugggcgcccugagaaccggcugguacaccagcgugaucaccaucgagcugagcaacaucaaggagaacaagugcaacggcaccgacgccaaggugaagcugaucaagcaggagcuggacaaguacaagaacgccgugaccgaccugcagaugcugaugugcagcacccccgccgccggcagcggcagcgccaucgccagcggcaucgccgugugcaaggugcugcaccuggagggcgaggugaacaagaucaagaacgcccugcugagcaccaacaaggccguggugagccugagcaacggcgugagcgugcugaccuucaaggugcuggaccugaagaacuacaucgacaagcagcugcugcccauccugaacaagcagagcugcagcauccccaaccccgagaccgugauggaguuccagcagaagaacaacagacugcuggagaucaccagagaguucagcgugaacgccggcgugaccacccccgugagcaccuacaugcugaccaacagcgagcugcugagccugaucaacgacaugcccaucaccaacgaccagaagaagcugaugagcaacaacgugcagaucgugagacagcagagcuacagcaucaugugcaucaucaaggaggaggugcuggccuacguggugcagcugccccuguacggcgugaucgacacccccugcuggaagcugcacaccagcccccugugcaccaccaacaccaaggagggcagcaacaucugccugaccagaaccgacagaggcugguacugcgacaacgccggcagcgugagcuucuucccccaggccgagaccugcaaggugugcagcaacagaguguucugcgacaccaugaacagccugacccugcccagcgaggugaaccugugcaacaucgacaucuucaaccccaaguacgacugcaagaucaugaccagcaagaccgacgugagcagcagcgugaucaccagccugggcgccaucgugagcugcuacggcaagaccaagugcaccgccagcaacaagaacaagggcaucaucaagaccuucagcaacggcugcgacuacgugagcaacaagggcguggacaccgugagcgugggcaacacccuguacuacgugaacaagcaggagggccagagccuguacgugaagggcgagcccaucaucaacuucuacgacccccugguguuccccagcgacgaguucgacgccagcaucagccaggugaacgagaagaucaaccagagccuggccuucaucagaaagagcgacgagcugcugcacaacgugaacgugggcaagagcaccaccaacaucaugaucaccaccaucaucaucgugaucaucgugauccugcugcugcugaucgccgugggccuguuccuguacugcaaggccagaugaggacuagugcaucacauuuaaaagcaucucagccuaccaugagaauaagagaaagaaaaugaagaucaauagcuuauucaucucuuuuucuuuuucguugguguaaagccaacacccugucuaaaaaacauaaauuucuuuaaucauuuugccucuuuucucugugcuucaauuaauaaaaaauggaaagaaccuagaucuaaaaaaaaaaaaaaaaaaaaaaaaaaaaaaaaaaaaaaaaaaaaaaaaaaaaaaaaaaaaaaaaugcaucccccccccccccccccccccccccccccccaaaggcucuuuucagagccaccagaauu

SEQ ID NO: 18349 - RNA, 1931 nt, Artificial Sequence
  mRNA product Design i-2 comprising derived and/or modified sequence from HRSV(Memphis-37)__AIY60640.1__F-del_DSCav1_mut6 (opt5)
gggagaggcgcugccuacggagguggcagccaucuccuucucggcaucaagcuuaccauggagcugcccauccucaagaccaacgccauuacaacgauccuggcugccgugacccuuugcuucgcgagcucccagaauauuacagaagaguuuuaccaaucuaccuguagcgcugucuccaaaggcuaucugggggcccucagaacaggaugguacaccucuguuaucacaauugaacugagcaacaucaaggagaauaaaugcaacggcaccgacgccaaggugaaacuuaucaagcaggaacuggauaaguauaaaaaugcugugacggaccuccagaugcugauguguuccaccccugccgcugggucuggaagcgccauugcguccggcaucgccgucugcaaggugcugcaccucgagggggagguuaacaaaauuaagaaugcucugcuuagcacaaacaaagccguggucucucuguccaauggagugagcguucucaccuucaaggugcuggaucuuaagaacuacaucgacaaacagcugcucccgauucugaauaagcaaucuuguuccauccccaacccugaaacagucauggaguuucagcagaaaaauaaccggcugcucgaaauuacccgcgaguucagcgugaaugcuggcgugacgacacccgucucuaccuauaugcugacaaacuccgagcuucugagccucaucaacgauaugccuaucaccaaugaccagaagaaacugauguccaacaauguucaaauugugagacagcagucuuacagcaucaugugcauuaucaaggaagaggugcuugccuaugucgugcagcugccccucuacggcguuauugauaccccuuguuggaaacugcauacauccccgcugugcacgaccaacacaaaggaagggagcaauaucugucucacccggacagaccgcggaugguacugcgauaacgcgggcucuguguccuuuuucccccaagccgagaccuguaaggucugcagcaauagaguguuuugcgacacgaugaacucucugacacuuccuagcgaaguuaaucuguguaacaucgauauuuucaaucccaaauaugacugcaagaucaugaccuccaaaaccgaugugucuagcuccgucauuacaagccucggggcuaucgugucuuguuacggaaagaccaaaugcacagccuccaacaagaauaagggcauuaucaaaacguuuagcaacgggugugacuaugucucuaauaagggaguggacaccguuuccgugggcaacacacuguacuaugucaacaaacaggagggccagagccuuuacgugaagggggagccuaucauuaauuucuaugauccccugguuuuuccguccgacgaauuugaugcuucuaucagccaagugaacgagaaaauuaaucagucccucgccuucauccggaagucugacgaacugcugcacaacgucaaugugggaaagagcaccacaaacauuaugaucaccacgauuaucaucgugauuaucguuauucuccugcuucugaucgccgucggccucuuccuguacugcaaagcucgcugaggacuagugcaucacauuuaaaagcaucucagccuaccaugagaauaagagaaagaaaaugaagaucaauagcuuauucaucucuuuuucuuuuucguugguguaaagccaacacccugucuaaaaaacauaaauuucuuuaaucauuuugccucuuuucucugugcuucaauuaauaaaaaauggaaagaaccuagaucuaaaaaaaaaaaaaaaaaaaaaaaaaaaaaaaaaaaaaaaaaaaaaaaaaaaaaaaaaaaaaaaaugcaucccccccccccccccccccccccccccccccaaaggcucuuuucagagccaccagaauu

SEQ ID NO: 18350 - RNA, 1931 nt, Artificial Sequence
  mRNA product Design i-2 comprising derived and/or modified sequence from HRSV(Memphis-37)__AIY60640.1__F-del_DSCav1_mut6 (opt6)
gggagaggcgcugccuacggagguggcagccaucuccuucucggcaucaagcuuaccauggaacuaccuauacuaaaaaccaacgccauaacaacaauacuagccgcaguuacacucugcuuugcauccucacaaaacaucacagaggaauuuuaccaaucuacuugcuccgcaguaucaaaaggauaccuaggagcacuccguacaggaugguacacaucagucauaacaauugaauuaucuaacaucaaagaaaacaaauguaaugguacagacgccaaaguaaaauuaauaaaacaagaacuagacaaauacaaaaacgccguaacagaccuacaaaugcuaaugugcucaacccccgccgcaggaucuggaucagcaauugccucaggcauagcaguaugcaaaguccuacaccuagaaggagaagucaacaaaauaaaaaacgcucuccucucaaccaauaaagcaguaguaucccucucaaacggaguaucaguacuaacauucaaaguacuagaccucaaaaauuauauagacaagcaacuacucccaauauuaaauaaacaauccugcucaauacccaauccagaaacagucauggaauuucaacaaaaaaacaaccgacucuuagaaauaacaagagaauuuucagucaaugccggcgucacaaccccaguaucaacauacaugcuaacaaacucagaacuacuaucacuaaucaacgauaugcccauaaccaacgaccaaaaaaaacuaaugucaaacaauguacaaauuguaagacaacagucuuauucaauaaugugcauaauaaaagaagaagucuuagcauauguaguacaacuaccacuauacggaguaauagacacaccauguuggaaauuacacacauccccacuauguaccaccaacacaaaagaaggaucuaacauaugccuaaccagaacagaccgaggcugguauugcgacaaugcaggaucaguauccuucuuuccacaagcagaaacaugcaaagucugcucuaacagaguauucugcgauacuaugaacucacuuaccuuaccaucagaaguaaaucuauguaauaucgacauauucaaucccaaauaugauugcaaaauaaugaccucaaaaacagauguaucaucaucagucauaacaucacuaggagcaauagucagcugcuaugggaaaacaaaaugcacagcuuccaacaaaaacaaaggaaucauaaaaacauucucaaaugguugugacuacguauccaacaaaggaguagauacaguaucuguaggcaacacauuauacuauguaaauaaacaagaaggacaaagccuauacgucaaaggagaacccaucauaaauuucuaugacccauuaguuuucccaucugacgaauuugacgcuuccaucucccaaguaaaugaaaaaaucaaccaaagccucgcauucauucgcaaaucugacgaauuacuccacaacguaaacguaggaaaauccacaacaaacauuaugaucaccaccauaauaaucguaauaauagucauauuacuacuccucauagcaguaggacuauuccuauacuguaaagcuagauaaggacuagugcaucacauuuaaaagcaucucagccuaccaugagaauaagagaaagaaaaugaagaucaauagcuuauucaucucuuuuucuuuuucguugguguaaagccaacacccugucuaaaaaacauaaauuucuuuaaucauuuugccucuuuucucugugcuucaauuaauaaaaaauggaaagaaccuagaucuaaaaaaaaaaaaaaaaaaaaaaaaaaaaaaaaaaaaaaaaaaaaaaaaaaaaaaaaaaaaaaaaugcaucccccccccccccccccccccccccccccccaaaggcucuuuucagagccaccagaauu

SEQ ID NO: 18351 - RNA, 1931 nt, Artificial Sequence
  mRNA product Design i-2 comprising derived and/or modified sequence from HRSV(Memphis-37)__AIY60640.1__F-del_DSCav1_mut6 (opt11)
gggagaggcgcugccuacggagguggcagccaucuccuucucggcaucaagcuuaccauggaauuaccaauccucaaaacuaacgccaucaccaccauccucgcugccgucacccucugcuucgccuccagccaaaacaucacagaagaguucuaccaaagcacaugcuccgcugucuccaaaggcuaccuuggcgcccuccgcaccggcugguacaccucaguaauuaccauugaacuaagcaacaucaaagaaaauaaaugcaacggcaccgacgccaaaguuaaacucauaaaacaggaacucgacaaauacaaaaacgccguaacagaccuccaaaugcucaugugcuccacccccgccgccggcucaggcuccgccaucgcaagcggaauagcaguuugcaaaguccuccaccuagaaggcgaggucaacaagauuaaaaacgcacuucucucaaccaacaaggccgucguaucacucucaaacggcgucuccguccucaccuucaaaguucuggaccucaaaaacuacaucgauaaacaacuacucccaauacuuaacaaacaaucaugcuccaucccaaaccccgaaaccgucauggaguuccaacagaaaaacaaccgccuacuggaaaucacacgcgaguucagcguaaacgcuggcgucacuacacccgucuccaccuacaugcucaccaauucugaacuccuaucacucauaaacgacaugcccauuaccaacgaccaaaagaaacuaaugucaaacaacguccaaaucguaagacaacaaucguauuccaucaugugcauaauuaaagaagaaguucucgccuacgugguccaacuaccccucuacggagucauagacacuccuuguuggaaacuccacaccucuccccucugcacuaccaacacaaaagaaggcuccaacaucugccucacccgaaccgacagaggcugguacugcgacaacgccggcuccgucuccuucuucccccaagccgaaaccugcaaagucugcuccaaccgcguuuucugcgacaccaugaacucccucacacuccccuccgaagucaaccuauguaacauagacauauucaacccaaaauacgacugcaaaaucaugacauccaaaaccgacgugucuuccucggucaucaccucccucggcgccaucgucucaugcuacggcaaaacuaaaugcaccgcauccaacaaaaacaaaggcauaaucaaaacauucuccaacggcugcgacuacguuucuaacaaaggcgucgauaccgucuccgucggaaacacccucuacuacguaaacaagcaagaaggccagucccuauacguaaaaggagaaccaauuaucaacuucuacgacccccuagucuuccccuccgacgaguucgacgccuccauaucccaagucaacgagaaaaucaaccaaucccuagccuucauccgcaaaucagacgaacuccuccacaacgucaacgucggaaaauccacaacuaacaucaugaucaccaccaucauuaucgucaucauaguuauacuccuccuccucauagccgucggccucuuccuauacugcaaagcucgcuaaggacuagugcaucacauuuaaaagcaucucagccuaccaugagaauaagagaaagaaaaugaagaucaauagcuuauucaucucuuuuucuuuuucguugguguaaagccaacacccugucuaaaaaacauaaauuucuuuaaucauuuugccucuuuucucugugcuucaauuaauaaaaaauggaaagaaccuagaucuaaaaaaaaaaaaaaaaaaaaaaaaaaaaaaaaaaaaaaaaaaaaaaaaaaaaaaaaaaaaaaaaugcaucccccccccccccccccccccccccccccccaaaggcucuuuucagagccaccagaauu

SEQ ID NO: 18352 - RNA, 1927 nt, Artificial Sequence
  mRNA product Design i-2 comprising derived and/or modified sequence from HRSV(Memphis-37)__AIY60640.1__F-del_DSCav1_mut6 (opt1)
ggggcgcugccuacggagguggcagccaucuccuucucggcaucaagcuuaccauggagcugcccauccucaagaccaacgccaucaccacgauccuggccgcggugacccugugcuucgccagcucccagaacaucaccgaggaguucuaccagagcacgugcuccgccgucagcaagggcuaccucggcgcccugcgcaccgggugguacaccagcgugaucaccaucgagcuguccaacaucaaggagaacaagugcaacggcaccgacgccaaggugaagcucaucaagcaggagcuggacaaguacaagaacgcggucacggaccugcagaugcugaugugcagcaccccggccgccggcuccgggagcgcgaucgccuccggcaucgccgucugcaaggugcugcaccucgagggcgaggugaacaagaucaagaacgcccugcuguccaccaacaaggccgucgugagccucuccaacggggugagcguccugaccuucaaggugcuggaccucaagaacuacaucgacaagcagcugcugcccauccugaacaagcagagcugcuccauccccaaccccgagaccgucauggaguuccagcagaagaacaaccgccuccuggagaucacgcgggaguucagcgugaacgcgggcgugaccacccccgucuccaccuacaugcugacgaacagcgagcuccugucccugaucaacgacaugccgaucaccaacgaccagaagaagcucaugagcaacaacgugcagaucgugcgccagcaguccuacagcaucaugugcaucaucaaggaggagguccuggccuacguggugcagcugccccucuacggggucaucgacacccccugcuggaagcugcacaccagcccccugugcacgaccaacaccaaggagggcuccaacaucugccucacccggacggaccgcgggugguacugcgacaacgccggcagcguguccuucuucccgcaggccgagaccugcaaggucugcagcaaccggguguucugcgacaccaugaacucccugacccugcccagcgaggugaaccucugcaacaucgacaucuucaaccccaaguacgacugcaagaucaugacguccaagaccgacgucagcuccagcgugaucaccucccugggcgccaucgugagcugcuacgggaagaccaagugcacggcgagcaacaagaacaagggcaucaucaagaccuucuccaacgggugcgacuacgucagcaacaagggcguggacaccguguccgucggcaacacccuguacuacgugaacaagcaggagggccagagccucuacgugaagggggagcccaucaucaacuucuacgacccgcuggucuuccccuccgacgaguucgacgccagcaucucccaggugaacgagaagaucaaccagagccuggccuucauccggaaguccgacgagcuccugcacaacgugaacgucggcaagagcaccacgaacaucaugaucaccaccaucaucaucgugaucaucgugauccugcugcuccugaucgccgucgggcuguuccucuacugcaaggcccgcugaggacuagugcaucacauuuaaaagcaucucagccuaccaugagaauaagagaaagaaaaugaagaucaauagcuuauucaucucuuuuucuuuuucguugguguaaagccaacacccugucuaaaaaacauaaauuucuuuaaucauuuugccucuuuucucugugcuucaauuaauaaaaaauggaaagaaccuagaucuaaaaaaaaaaaaaaaaaaaaaaaaaaaaaaaaaaaaaaaaaaaaaaaaaaaaaaaaaaaaaaaaugcaucccccccccccccccccccccccccccccccaaaggcucuuuucagagccaccagaauu

SEQ ID NO: 18353 - RNA, 1927 nt, Artificial Sequence
  mRNA product Design i-2 comprising derived and/or modified sequence from HRSV(Memphis-37)__AIY60640.1__F-del_DSCav1_mut6 (opt1)
ggggcgcugccuacggagguggcagccaucuccuucucggcaucaagcuuaccauggagcugcccauccucaagaccaacgccaucaccacgauccuggccgcggugacccugugcuucgccagcucccagaacaucaccgaggaguucuaccagagcacgugcuccgccgucagcaagggcuaccucggggcccugcgcaccggcugguacaccuccgugaucaccaucgagcugagcaacaucaaggagaacaagugcaacgggaccgacgccaaggugaagcucaucaagcaggagcuggacaaguacaagaacgcggucacggaccugcagaugcucaugugcuccaccccggccgccggcagcggguccgccaucgcgagcggcaucgccgugugcaaggugcugcaccuggagggcgaggucaacaagaucaagaacgcccuccuguccaccaacaaggccguggugagccuguccaacggggucagcgugcucaccuucaaggugcuggaccugaagaacuacaucgacaagcagcuccugcccauccugaacaagcaguccugcagcauccccaaccccgagacggucauggaguuccagcagaagaacaaccggcuccuggagaucacccgcgaguucuccgugaacgccggcgugaccaccccggucagcacguacaugcugaccaacuccgagcuccugagccugaucaacgacaugcccaucaccaacgaccagaagaagcucaugagcaacaacgugcagaucgugcggcagcaguccuacagcaucaugugcaucaucaaggaggagguccuggcguacguggugcagcugccccucuacggggucaucgacacccccugcuggaagcugcacacguccccgcugugcaccaccaacaccaaggagggcagcaacaucugccucacgcgcaccgaccgggggugguacugcgacaacgccggcuccgugagcuucuucccccaggccgagaccugcaaggugugcuccaaccgcgucuucugcgacaccaugaacagccugacgcugcccuccgaggugaaccucugcaacaucgacaucuucaaccccaaguacgacugcaagaucaugaccagcaagaccgacgucuccagcuccgugaucaccagccugggcgccaucguguccugcuacgggaagacgaagugcaccgccagcaacaagaacaagggcaucaucaagaccuucuccaacgggugcgacuacgucagcaacaagggcguggacaccguguccgucggcaacacgcuguacuacgugaacaagcaggaggggcagagccucuacgugaagggcgagccgaucaucaacuucuacgacccccuggucuuccccagcgacgaguucgacgcguccaucagccaggugaacgagaagaucaaccagucccuggccuucauccgcaagagcgacgagcuccugcacaacgugaacgucgggaaguccaccaccaacaucaugaucaccaccaucaucaucgugaucaucgugauccugcuccugcugaucgccgucggccucuuccuguacugcaaggcccggugaggacuagugcaucacauuuaaaagcaucucagccuaccaugagaauaagagaaagaaaaugaagaucaauagcuuauucaucucuuuuucuuuuucguugguguaaagccaacacccugucuaaaaaacauaaauuucuuuaaucauuuugccucuuuucucugugcuucaauuaauaaaaaauggaaagaaccuagaucuaaaaaaaaaaaaaaaaaaaaaaaaaaaaaaaaaaaaaaaaaaaaaaaaaaaaaaaaaaaaaaaaugcaucccccccccccccccccccccccccccccccaaaggcucuuuucagagccaccagaauu

SEQ ID NO: 18354 - RNA, 1927 nt, Artificial Sequence
  mRNA product Design i-2 comprising derived and/or modified sequence from HRSV(Memphis-37)__AIY60640.1__F-del_DSCav1_mut6 (opt2)
ggggcgcugccuacggagguggcagccaucuccuucucggcaucaagcuuaccauggagcuccccauccucaagaccaacgccaucaccaccauccucgccgccgucacccucugcuucgccuccucccagaacaucaccgaggaguucuaccaguccaccugcuccgccgucuccaagggcuaccucggcgcccuccgcaccggcugguacaccuccgucaucaccaucgagcucuccaacaucaaggagaacaagugcaacggcaccgacgccaaggucaagcucaucaagcaggagcucgacaaguacaagaacgccgucaccgaccuccagaugcucaugugcuccacccccgccgccggcuccggcuccgccaucgccuccggcaucgccgucugcaagguccuccaccucgagggcgaggucaacaagaucaagaacgcccuccucuccaccaacaaggccgucgucucccucuccaacggcgucuccguccucaccuucaagguccucgaccucaagaacuacaucgacaagcagcuccuccccauccucaacaagcaguccugcuccauccccaaccccgagaccgucauggaguuccagcagaagaacaaccgccuccucgagaucacccgcgaguucuccgucaacgccggcgucaccacccccgucuccaccuacaugcucaccaacuccgagcuccucucccucaucaacgacaugcccaucaccaacgaccagaagaagcucauguccaacaacguccagaucguccgccagcaguccuacuccaucaugugcaucaucaaggaggagguccucgccuacgucguccagcucccccucuacggcgucaucgacacccccugcuggaagcuccacaccuccccccucugcaccaccaacaccaaggagggcuccaacaucugccucacccgcaccgaccgcggcugguacugcgacaacgccggcuccgucuccuucuucccccaggccgagaccugcaaggucugcuccaaccgcgucuucugcgacaccaugaacucccucacccuccccuccgaggucaaccucugcaacaucgacaucuucaaccccaaguacgacugcaagaucaugaccuccaagaccgacgucuccuccuccgucaucaccucccucggcgccaucgucuccugcuacggcaagaccaagugcaccgccuccaacaagaacaagggcaucaucaagaccuucuccaacggcugcgacuacgucuccaacaagggcgucgacaccgucuccgucggcaacacccucuacuacgucaacaagcaggagggccagucccucuacgucaagggcgagcccaucaucaacuucuacgacccccucgucuuccccuccgacgaguucgacgccuccaucucccaggucaacgagaagaucaaccagucccucgccuucauccgcaaguccgacgagcuccuccacaacgucaacgucggcaaguccaccaccaacaucaugaucaccaccaucaucaucgucaucaucgucauccuccuccuccucaucgccgucggccucuuccucuacugcaaggcccgcugaggacuagugcaucacauuuaaaagcaucucagccuaccaugagaauaagagaaagaaaaugaagaucaauagcuuauucaucucuuuuucuuuuucguugguguaaagccaacacccugucuaaaaaacauaaauuucuuuaaucauuuugccucuuuucucugugcuucaauuaauaaaaaauggaaagaaccuagaucuaaaaaaaaaaaaaaaaaaaaaaaaaaaaaaaaaaaaaaaaaaaaaaaaaaaaaaaaaaaaaaaaugcaucccccccccccccccccccccccccccccccaaaggcucuuuucagagccaccagaauu

SEQ ID NO: 18355 - RNA, 1927 nt, Artificial Sequence
  mRNA product Design i-2 comprising derived and/or modified sequence from HRSV(Memphis-37)__AIY60640.1__F-del_DSCav1_mut6 (opt3)
ggggcgcugccuacggagguggcagccaucuccuucucggcaucaagcuuaccauggagcugcccauccucaagaccaacgccauuacaacuauacuugcugcagugacgcugugcuucgccagcucccagaauaucaccgaagaguuuuaccaaucuacauguucagcggucaguaaaggcuauuugggggcuuuaagaacuggaugguacaccagcguuauuacaaucgaacuguccaacauuaaggagaauaaaugcaacgguaccgacgccaaggugaaacuaaucaagcaggaacucgauaaguauaaaaaugcaguaacugaccugcagaugcuuauguguucuacuccugccgcuggcucggggucagcaauagccagcggaaucgcugugugcaagguccugcacuuggagggcgaggugaacaaaauuaagaaugcccuccugaguaccaacaaagcgguugugucccugucuaauggugucagcgugcucacguucaagguauuagaucugaagaacuacaucgacaaacagcuuuugccaauucugaauaagcaauccuguucaaucccgaaccccgaaacuguuauggaguuucagcagaaaaauaacaggcuacucgaaauaacccgggaguucagugugaaugcaggggucacaacuccugugagcaccuauaugcugacaaacucugagcuucuguccuugauuaacgauaugccaaucaccaaugaccagaagaaacucaugucaaacaaugugcaaauuguccgccagcagagcuacaguaucaugugcaucauuaaggaagagguucuggccuaugugguacaguuaccccuguacggagugauagauacgccuuguuggaaacuccauacuucuccacuuugcacaaccaacacuaaggaaggcuccaauaucugucugacacgaaccgaccguggcugguacugcgauaacgcugggagcgucucguuuuucccccaagccgagacguguaaggugugcucuaauagaguuuucugcgacaccaugaacuccuugacacuaccuucagaagugaaucuguguaacauugauaucuucaauccaaaauaugacugcaagauaaugacaaguaaaaccgaugucagcuccucugugauuacaagccucggagcaaucguaucauguuacgguaagacuaaaugcaccgcuaguaacaagaauaagggcaucauuaaaacauuuuccaacgggugugacuauguuagcaauaagggaguggacaccgucucugugggcaacacucuguacuaugucaacaaacaggagggucagucacuuuacgugaagggggagccgaucauuaauuucuaugauccccugguuuuuccuagugacgaauuugaugccagcauaucccaagugaacgagaaaaucaaucagucuuuggcguuuauuaggaagucggacgaacuccugcacaacguaaaugucggaaagagcacgacaaacaucaugaucaccacuauuauaaucgugauuaucguuauuuuacugcuacucaucgccgugggccuguuccuuuacugcaaagcacggugaggacuagugcaucacauuuaaaagcaucucagccuaccaugagaauaagagaaagaaaaugaagaucaauagcuuauucaucucuuuuucuuuuucguugguguaaagccaacacccugucuaaaaaacauaaauuucuuuaaucauuuugccucuuuucucugugcuucaauuaauaaaaaauggaaagaaccuagaucuaaaaaaaaaaaaaaaaaaaaaaaaaaaaaaaaaaaaaaaaaaaaaaaaaaaaaaaaaaaaaaaaugcaucccccccccccccccccccccccccccccccaaaggcucuuuucagagccaccagaauu

SEQ ID NO: 18356 - RNA, 1927 nt, Artificial Sequence
  mRNA product Design i-2 comprising derived and/or modified sequence from HRSV(Memphis-37)__AIY60640.1__F-del_DSCav1_mut6 (opt4)
ggggcgcugccuacggagguggcagccaucuccuucucggcaucaagcuuaccauggagcugcccauccugaagaccaacgccaucaccaccauccuggccgccgugacccugugcuucgccagcagccagaacaucaccgaggaguucuaccagagcaccugcagcgccgugagcaagggcuaccugggcgcccugagaaccggcugguacaccagcgugaucaccaucgagcugagcaacaucaaggagaacaagugcaacggcaccgacgccaaggugaagcugaucaagcaggagcuggacaaguacaagaacgccgugaccgaccugcagaugcugaugugcagcacccccgccgccggcagcggcagcgccaucgccagcggcaucgccgugugcaaggugcugcaccuggagggcgaggugaacaagaucaagaacgcccugcugagcaccaacaaggccguggugagccugagcaacggcgugagcgugcugaccuucaaggugcuggaccugaagaacuacaucgacaagcagcugcugcccauccugaacaagcagagcugcagcauccccaaccccgagaccgugauggaguuccagcagaagaacaacagacugcuggagaucaccagagaguucagcgugaacgccggcgugaccacccccgugagcaccuacaugcugaccaacagcgagcugcugagccugaucaacgacaugcccaucaccaacgaccagaagaagcugaugagcaacaacgugcagaucgugagacagcagagcuacagcaucaugugcaucaucaaggaggaggugcuggccuacguggugcagcugccccuguacggcgugaucgacacccccugcuggaagcugcacaccagcccccugugcaccaccaacaccaaggagggcagcaacaucugccugaccagaaccgacagaggcugguacugcgacaacgccggcagcgugagcuucuucccccaggccgagaccugcaaggugugcagcaacagaguguucugcgacaccaugaacagccugacccugcccagcgaggugaaccugugcaacaucgacaucuucaaccccaaguacgacugcaagaucaugaccagcaagaccgacgugagcagcagcgugaucaccagccugggcgccaucgugagcugcuacggcaagaccaagugcaccgccagcaacaagaacaagggcaucaucaagaccuucagcaacggcugcgacuacgugagcaacaagggcguggacaccgugagcgugggcaacacccuguacuacgugaacaagcaggagggccagagccuguacgugaagggcgagcccaucaucaacuucuacgacccccugguguuccccagcgacgaguucgacgccagcaucagccaggugaacgagaagaucaaccagagccuggccuucaucagaaagagcgacgagcugcugcacaacgugaacgugggcaagagcaccaccaacaucaugaucaccaccaucaucaucgugaucaucgugauccugcugcugcugaucgccgugggccuguuccuguacugcaaggccagaugaggacuagugcaucacauuuaaaagcaucucagccuaccaugagaauaagagaaagaaaaugaagaucaauagcuuauucaucucuuuuucuuuuucguugguguaaagccaacacccugucuaaaaaacauaaauuucuuuaaucauuuugccucuuuucucugugcuucaauuaauaaaaaauggaaagaaccuagaucuaaaaaaaaaaaaaaaaaaaaaaaaaaaaaaaaaaaaaaaaaaaaaaaaaaaaaaaaaaaaaaaaugcaucccccccccccccccccccccccccccccccaaaggcucuuuucagagccaccagaauu

SEQ ID NO: 18357 - RNA, 1927 nt, Artificial Sequence
  mRNA product Design i-2 comprising derived and/or modified sequence from HRSV(Memphis-37)__AIY60640.1__F-del_DSCav1_mut6 (opt5)
ggggcgcugccuacggagguggcagccaucuccuucucggcaucaagcuuaccauggagcugcccauccucaagaccaacgccauuacaacgauccuggcugccgugacccuuugcuucgcgagcucccagaauauuacagaagaguuuuaccaaucuaccuguagcgcugucuccaaaggcuaucugggggcccucagaacaggaugguacaccucuguuaucacaauugaacugagcaacaucaaggagaauaaaugcaacggcaccgacgccaaggugaaacuuaucaagcaggaacuggauaaguauaaaaaugcugugacggaccuccagaugcugauguguuccaccccugccgcugggucuggaagcgccauugcguccggcaucgccgucugcaaggugcugcaccucgagggggagguuaacaaaauuaagaaugcucugcuuagcacaaacaaagccguggucucucuguccaauggagugagcguucucaccuucaaggugcuggaucuuaagaacuacaucgacaaacagcugcucccgauucugaauaagcaaucuuguuccauccccaacccugaaacagucauggaguuucagcagaaaaauaaccggcugcucgaaauuacccgcgaguucagcgugaaugcuggcgugacgacacccgucucuaccuauaugcugacaaacuccgagcuucugagccucaucaacgauaugccuaucaccaaugaccagaagaaacugauguccaacaauguucaaauugugagacagcagucuuacagcaucaugugcauuaucaaggaagaggugcuugccuaugucgugcagcugccccucuacggcguuauugauaccccuuguuggaaacugcauacauccccgcugugcacgaccaacacaaaggaagggagcaauaucugucucacccggacagaccgcggaugguacugcgauaacgcgggcucuguguccuuuuucccccaagccgagaccuguaaggucugcagcaauagaguguuuugcgacacgaugaacucucugacacuuccuagcgaaguuaaucuguguaacaucgauauuuucaaucccaaauaugacugcaagaucaugaccuccaaaaccgaugugucuagcuccgucauuacaagccucggggcuaucgugucuuguuacggaaagaccaaaugcacagccuccaacaagaauaagggcauuaucaaaacguuuagcaacgggugugacuaugucucuaauaagggaguggacaccguuuccgugggcaacacacuguacuaugucaacaaacaggagggccagagccuuuacgugaagggggagccuaucauuaauuucuaugauccccugguuuuuccguccgacgaauuugaugcuucuaucagccaagugaacgagaaaauuaaucagucccucgccuucauccggaagucugacgaacugcugcacaacgucaaugugggaaagagcaccacaaacauuaugaucaccacgauuaucaucgugauuaucguuauucuccugcuucugaucgccgucggccucuuccuguacugcaaagcucgcugaggacuagugcaucacauuuaaaagcaucucagccuaccaugagaauaagagaaagaaaaugaagaucaauagcuuauucaucucuuuuucuuuuucguugguguaaagccaacacccugucuaaaaaacauaaauuucuuuaaucauuuugccucuuuucucugugcuucaauuaauaaaaaauggaaagaaccuagaucuaaaaaaaaaaaaaaaaaaaaaaaaaaaaaaaaaaaaaaaaaaaaaaaaaaaaaaaaaaaaaaaaugcaucccccccccccccccccccccccccccccccaaaggcucuuuucagagccaccagaauu

SEQ ID NO: 18358 - RNA, 1927 nt, Artificial Sequence
  mRNA product Design i-2 comprising derived and/or modified sequence from HRSV(Memphis-37)__AIY60640.1__F-del_DSCav1_mut6 (opt6)
ggggcgcugccuacggagguggcagccaucuccuucucggcaucaagcuuaccauggaacuaccuauacuaaaaaccaacgccauaacaacaauacuagccgcaguuacacucugcuuugcauccucacaaaacaucacagaggaauuuuaccaaucuacuugcuccgcaguaucaaaaggauaccuaggagcacuccguacaggaugguacacaucagucauaacaauugaauuaucuaacaucaaagaaaacaaauguaaugguacagacgccaaaguaaaauuaauaaaacaagaacuagacaaauacaaaaacgccguaacagaccuacaaaugcuaaugugcucaacccccgccgcaggaucuggaucagcaauugccucaggcauagcaguaugcaaaguccuacaccuagaaggagaagucaacaaaauaaaaaacgcucuccucucaaccaauaaagcaguaguaucccucucaaacggaguaucaguacuaacauucaaaguacuagaccucaaaaauuauauagacaagcaacuacucccaauauuaaauaaacaauccugcucaauacccaauccagaaacagucauggaauuucaacaaaaaaacaaccgacucuuagaaauaacaagagaauuuucagucaaugccggcgucacaaccccaguaucaacauacaugcuaacaaacucagaacuacuaucacuaaucaacgauaugcccauaaccaacgaccaaaaaaaacuaaugucaaacaauguacaaauuguaagacaacagucuuauucaauaaugugcauaauaaaagaagaagucuuagcauauguaguacaacuaccacuauacggaguaauagacacaccauguuggaaauuacacacauccccacuauguaccaccaacacaaaagaaggaucuaacauaugccuaaccagaacagaccgaggcugguauugcgacaaugcaggaucaguauccuucuuuccacaagcagaaacaugcaaagucugcucuaacagaguauucugcgauacuaugaacucacuuaccuuaccaucagaaguaaaucuauguaauaucgacauauucaaucccaaauaugauugcaaaauaaugaccucaaaaacagauguaucaucaucagucauaacaucacuaggagcaauagucagcugcuaugggaaaacaaaaugcacagcuuccaacaaaaacaaaggaaucauaaaaacauucucaaaugguugugacuacguauccaacaaaggaguagauacaguaucuguaggcaacacauuauacuauguaaauaaacaagaaggacaaagccuauacgucaaaggagaacccaucauaaauuucuaugacccauuaguuuucccaucugacgaauuugacgcuuccaucucccaaguaaaugaaaaaaucaaccaaagccucgcauucauucgcaaaucugacgaauuacuccacaacguaaacguaggaaaauccacaacaaacauuaugaucaccaccauaauaaucguaauaauagucauauuacuacuccucauagcaguaggacuauuccuauacuguaaagcuagauaaggacuagugcaucacauuuaaaagcaucucagccuaccaugagaauaagagaaagaaaaugaagaucaauagcuuauucaucucuuuuucuuuuucguugguguaaagccaacacccugucuaaaaaacauaaauuucuuuaaucauuuugccucuuuucucugugcuucaauuaauaaaaaauggaaagaaccuagaucuaaaaaaaaaaaaaaaaaaaaaaaaaaaaaaaaaaaaaaaaaaaaaaaaaaaaaaaaaaaaaaaaugcaucccccccccccccccccccccccccccccccaaaggcucuuuucagagccaccagaauu

SEQ ID NO: 18359 - RNA, 1927 nt, Artificial Sequence
  mRNA product Design i-2 comprising derived and/or modified sequence from HRSV(Memphis-37)__AIY60640.1__F-del_DSCav1_mut6 (opt11)
ggggcgcugccuacggagguggcagccaucuccuucucggcaucaagcuuaccauggaauuaccaauccucaaaacuaacgccaucaccaccauccucgcugccgucacccucugcuucgccuccagccaaaacaucacagaagaguucuaccaaagcacaugcuccgcugucuccaaaggcuaccuuggcgcccuccgcaccggcugguacaccucaguaauuaccauugaacuaagcaacaucaaagaaaauaaaugcaacggcaccgacgccaaaguuaaacucauaaaacaggaacucgacaaauacaaaaacgccguaacagaccuccaaaugcucaugugcuccacccccgccgccggcucaggcuccgccaucgcaagcggaauagcaguuugcaaaguccuccaccuagaaggcgaggucaacaagauuaaaaacgcacuucucucaaccaacaaggccgucguaucacucucaaacggcgucuccguccucaccuucaaaguucuggaccucaaaaacuacaucgauaaacaacuacucccaauacuuaacaaacaaucaugcuccaucccaaaccccgaaaccgucauggaguuccaacagaaaaacaaccgccuacuggaaaucacacgcgaguucagcguaaacgcuggcgucacuacacccgucuccaccuacaugcucaccaauucugaacuccuaucacucauaaacgacaugcccauuaccaacgaccaaaagaaacuaaugucaaacaacguccaaaucguaagacaacaaucguauuccaucaugugcauaauuaaagaagaaguucucgccuacgugguccaacuaccccucuacggagucauagacacuccuuguuggaaacuccacaccucuccccucugcacuaccaacacaaaagaaggcuccaacaucugccucacccgaaccgacagaggcugguacugcgacaacgccggcuccgucuccuucuucccccaagccgaaaccugcaaagucugcuccaaccgcguuuucugcgacaccaugaacucccucacacuccccuccgaagucaaccuauguaacauagacauauucaacccaaaauacgacugcaaaaucaugacauccaaaaccgacgugucuuccucggucaucaccucccucggcgccaucgucucaugcuacggcaaaacuaaaugcaccgcauccaacaaaaacaaaggcauaaucaaaacauucuccaacggcugcgacuacguuucuaacaaaggcgucgauaccgucuccgucggaaacacccucuacuacguaaacaagcaagaaggccagucccuauacguaaaaggagaaccaauuaucaacuucuacgacccccuagucuuccccuccgacgaguucgacgccuccauaucccaagucaacgagaaaaucaaccaaucccuagccuucauccgcaaaucagacgaacuccuccacaacgucaacgucggaaaauccacaacuaacaucaugaucaccaccaucauuaucgucaucauaguuauacuccuccuccucauagccgucggccucuuccuauacugcaaagcucgcuaaggacuagugcaucacauuuaaaagcaucucagccuaccaugagaauaagagaaagaaaaugaagaucaauagcuuauucaucucuuuuucuuuuucguugguguaaagccaacacccugucuaaaaaacauaaauuucuuuaaucauuuugccucuuuucucugugcuucaauuaauaaaaaauggaaagaaccuagaucuaaaaaaaaaaaaaaaaaaaaaaaaaaaaaaaaaaaaaaaaaaaaaaaaaaaaaaaaaaaaaaaaugcaucccccccccccccccccccccccccccccccaaaggcucuuuucagagccaccagaauu

SEQ ID NO: 18360 - RNA, 1762 nt, Artificial Sequence
  mRNA product Design i-3 comprising derived and/or modified sequence from HRSV(Memphis-37)__AIY60640.1__F-del_DSCav1_mut6 (opt1)
gggagaaagcuuaccauggagcugcccauccucaagaccaacgccaucaccacgauccuggccgcggugacccugugcuucgccagcucccagaacaucaccgaggaguucuaccagagcacgugcuccgccgucagcaagggcuaccucggcgcccugcgcaccgggugguacaccagcgugaucaccaucgagcuguccaacaucaaggagaacaagugcaacggcaccgacgccaaggugaagcucaucaagcaggagcuggacaaguacaagaacgcggucacggaccugcagaugcugaugugcagcaccccggccgccggcuccgggagcgcgaucgccuccggcaucgccgucugcaaggugcugcaccucgagggcgaggugaacaagaucaagaacgcccugcuguccaccaacaaggccgucgugagccucuccaacggggugagcguccugaccuucaaggugcuggaccucaagaacuacaucgacaagcagcugcugcccauccugaacaagcagagcugcuccauccccaaccccgagaccgucauggaguuccagcagaagaacaaccgccuccuggagaucacgcgggaguucagcgugaacgcgggcgugaccacccccgucuccaccuacaugcugacgaacagcgagcuccugucccugaucaacgacaugccgaucaccaacgaccagaagaagcucaugagcaacaacgugcagaucgugcgccagcaguccuacagcaucaugugcaucaucaaggaggagguccuggccuacguggugcagcugccccucuacggggucaucgacacccccugcuggaagcugcacaccagcccccugugcacgaccaacaccaaggagggcuccaacaucugccucacccggacggaccgcgggugguacugcgacaacgccggcagcguguccuucuucccgcaggccgagaccugcaaggucugcagcaaccggguguucugcgacaccaugaacucccugacccugcccagcgaggugaaccucugcaacaucgacaucuucaaccccaaguacgacugcaagaucaugacguccaagaccgacgucagcuccagcgugaucaccucccugggcgccaucgugagcugcuacgggaagaccaagugcacggcgagcaacaagaacaagggcaucaucaagaccuucuccaacgggugcgacuacgucagcaacaagggcguggacaccguguccgucggcaacacccuguacuacgugaacaagcaggagggccagagccucuacgugaagggggagcccaucaucaacuucuacgacccgcuggucuuccccuccgacgaguucgacgccagcaucucccaggugaacgagaagaucaaccagagccuggccuucauccggaaguccgacgagcuccugcacaacgugaacgucggcaagagcaccacgaacaucaugaucaccaccaucaucaucgugaucaucgugauccugcugcuccugaucgccgucgggcuguuccucuacugcaaggcccgcugaggacuaguuauaagacugacuagcccgaugggccucccaacgggcccuccuccccuccuugcaccgagauuaauaaaaaaaaaaaaaaaaaaaaaaaaaaaaaaaaaaaaaaaaaaaaaaaaaaaaaaaaaaaaaaaaugcaucccccccccccccccccccccccccccccccaaaggcucuuuucagagccaccagaauu

SEQ ID NO: 18361 - RNA, 1762 nt, Artificial Sequence
  mRNA product Design i-3 comprising derived and/or modified sequence from HRSV(Memphis-37)__AIY60640.1__F-del_DSCav1_mut6 (opt1)
gggagaaagcuuaccauggagcugcccauccucaagaccaacgccaucaccacgauccuggccgcggugacccugugcuucgccagcucccagaacaucaccgaggaguucuaccagagcacgugcuccgccgucagcaagggcuaccucggggcccugcgcaccggcugguacaccuccgugaucaccaucgagcugagcaacaucaaggagaacaagugcaacgggaccgacgccaaggugaagcucaucaagcaggagcuggacaaguacaagaacgcggucacggaccugcagaugcucaugugcuccaccccggccgccggcagcggguccgccaucgcgagcggcaucgccgugugcaaggugcugcaccuggagggcgaggucaacaagaucaagaacgcccuccuguccaccaacaaggccguggugagccuguccaacggggucagcgugcucaccuucaaggugcuggaccugaagaacuacaucgacaagcagcuccugcccauccugaacaagcaguccugcagcauccccaaccccgagacggucauggaguuccagcagaagaacaaccggcuccuggagaucacccgcgaguucuccgugaacgccggcgugaccaccccggucagcacguacaugcugaccaacuccgagcuccugagccugaucaacgacaugcccaucaccaacgaccagaagaagcucaugagcaacaacgugcagaucgugcggcagcaguccuacagcaucaugugcaucaucaaggaggagguccuggcguacguggugcagcugccccucuacggggucaucgacacccccugcuggaagcugcacacguccccgcugugcaccaccaacaccaaggagggcagcaacaucugccucacgcgcaccgaccgggggugguacugcgacaacgccggcuccgugagcuucuucccccaggccgagaccugcaaggugugcuccaaccgcgucuucugcgacaccaugaacagccugacgcugcccuccgaggugaaccucugcaacaucgacaucuucaaccccaaguacgacugcaagaucaugaccagcaagaccgacgucuccagcuccgugaucaccagccugggcgccaucguguccugcuacgggaagacgaagugcaccgccagcaacaagaacaagggcaucaucaagaccuucuccaacgggugcgacuacgucagcaacaagggcguggacaccguguccgucggcaacacgcuguacuacgugaacaagcaggaggggcagagccucuacgugaagggcgagccgaucaucaacuucuacgacccccuggucuuccccagcgacgaguucgacgcguccaucagccaggugaacgagaagaucaaccagucccuggccuucauccgcaagagcgacgagcuccugcacaacgugaacgucgggaaguccaccaccaacaucaugaucaccaccaucaucaucgugaucaucgugauccugcuccugcugaucgccgucggccucuuccuguacugcaaggcccggugaggacuaguuauaagacugacuagcccgaugggccucccaacgggcccuccuccccuccuugcaccgagauuaauaaaaaaaaaaaaaaaaaaaaaaaaaaaaaaaaaaaaaaaaaaaaaaaaaaaaaaaaaaaaaaaaugcaucccccccccccccccccccccccccccccccaaaggcucuuuucagagccaccagaauu

SEQ ID NO: 18362 - RNA, 1762 nt, Artificial Sequence
  mRNA product Design i-3 comprising derived and/or modified sequence from HRSV(Memphis-37)__AIY60640.1__F-del_DSCav1_mut6 (opt2)
gggagaaagcuuaccauggagcuccccauccucaagaccaacgccaucaccaccauccucgccgccgucacccucugcuucgccuccucccagaacaucaccgaggaguucuaccaguccaccugcuccgccgucuccaagggcuaccucggcgcccuccgcaccggcugguacaccuccgucaucaccaucgagcucuccaacaucaaggagaacaagugcaacggcaccgacgccaaggucaagcucaucaagcaggagcucgacaaguacaagaacgccgucaccgaccuccagaugcucaugugcuccacccccgccgccggcuccggcuccgccaucgccuccggcaucgccgucugcaagguccuccaccucgagggcgaggucaacaagaucaagaacgcccuccucuccaccaacaaggccgucgucucccucuccaacggcgucuccguccucaccuucaagguccucgaccucaagaacuacaucgacaagcagcuccuccccauccucaacaagcaguccugcuccauccccaaccccgagaccgucauggaguuccagcagaagaacaaccgccuccucgagaucacccgcgaguucuccgucaacgccggcgucaccacccccgucuccaccuacaugcucaccaacuccgagcuccucucccucaucaacgacaugcccaucaccaacgaccagaagaagcucauguccaacaacguccagaucguccgccagcaguccuacuccaucaugugcaucaucaaggaggagguccucgccuacgucguccagcucccccucuacggcgucaucgacacccccugcuggaagcuccacaccuccccccucugcaccaccaacaccaaggagggcuccaacaucugccucacccgcaccgaccgcggcugguacugcgacaacgccggcuccgucuccuucuucccccaggccgagaccugcaaggucugcuccaaccgcgucuucugcgacaccaugaacucccucacccuccccuccgaggucaaccucugcaacaucgacaucuucaaccccaaguacgacugcaagaucaugaccuccaagaccgacgucuccuccuccgucaucaccucccucggcgccaucgucuccugcuacggcaagaccaagugcaccgccuccaacaagaacaagggcaucaucaagaccuucuccaacggcugcgacuacgucuccaacaagggcgucgacaccgucuccgucggcaacacccucuacuacgucaacaagcaggagggccagucccucuacgucaagggcgagcccaucaucaacuucuacgacccccucgucuuccccuccgacgaguucgacgccuccaucucccaggucaacgagaagaucaaccagucccucgccuucauccgcaaguccgacgagcuccuccacaacgucaacgucggcaaguccaccaccaacaucaugaucaccaccaucaucaucgucaucaucgucauccuccuccuccucaucgccgucggccucuuccucuacugcaaggcccgcugaggacuaguuauaagacugacuagcccgaugggccucccaacgggcccuccuccccuccuugcaccgagauuaauaaaaaaaaaaaaaaaaaaaaaaaaaaaaaaaaaaaaaaaaaaaaaaaaaaaaaaaaaaaaaaaaugcaucccccccccccccccccccccccccccccccaaaggcucuuuucagagccaccagaauu

SEQ ID NO: 18363 - RNA, 1762 nt, Artificial Sequence
  mRNA product Design i-3 comprising derived and/or modified sequence from HRSV(Memphis-37)__AIY60640.1__F-del_DSCav1_mut6 (opt3)
gggagaaagcuuaccauggagcugcccauccucaagaccaacgccauuacaacuauacuugcugcagugacgcugugcuucgccagcucccagaauaucaccgaagaguuuuaccaaucuacauguucagcggucaguaaaggcuauuugggggcuuuaagaacuggaugguacaccagcguuauuacaaucgaacuguccaacauuaaggagaauaaaugcaacgguaccgacgccaaggugaaacuaaucaagcaggaacucgauaaguauaaaaaugcaguaacugaccugcagaugcuuauguguucuacuccugccgcuggcucggggucagcaauagccagcggaaucgcugugugcaagguccugcacuuggagggcgaggugaacaaaauuaagaaugcccuccugaguaccaacaaagcgguugugucccugucuaauggugucagcgugcucacguucaagguauuagaucugaagaacuacaucgacaaacagcuuuugccaauucugaauaagcaauccuguucaaucccgaaccccgaaacuguuauggaguuucagcagaaaaauaacaggcuacucgaaauaacccgggaguucagugugaaugcaggggucacaacuccugugagcaccuauaugcugacaaacucugagcuucuguccuugauuaacgauaugccaaucaccaaugaccagaagaaacucaugucaaacaaugugcaaauuguccgccagcagagcuacaguaucaugugcaucauuaaggaagagguucuggccuaugugguacaguuaccccuguacggagugauagauacgccuuguuggaaacuccauacuucuccacuuugcacaaccaacacuaaggaaggcuccaauaucugucugacacgaaccgaccguggcugguacugcgauaacgcugggagcgucucguuuuucccccaagccgagacguguaaggugugcucuaauagaguuuucugcgacaccaugaacuccuugacacuaccuucagaagugaaucuguguaacauugauaucuucaauccaaaauaugacugcaagauaaugacaaguaaaaccgaugucagcuccucugugauuacaagccucggagcaaucguaucauguuacgguaagacuaaaugcaccgcuaguaacaagaauaagggcaucauuaaaacauuuuccaacgggugugacuauguuagcaauaagggaguggacaccgucucugugggcaacacucuguacuaugucaacaaacaggagggucagucacuuuacgugaagggggagccgaucauuaauuucuaugauccccugguuuuuccuagugacgaauuugaugccagcauaucccaagugaacgagaaaaucaaucagucuuuggcguuuauuaggaagucggacgaacuccugcacaacguaaaugucggaaagagcacgacaaacaucaugaucaccacuauuauaaucgugauuaucguuauuuuacugcuacucaucgccgugggccuguuccuuuacugcaaagcacggugaggacuaguuauaagacugacuagcccgaugggccucccaacgggcccuccuccccuccuugcaccgagauuaauaaaaaaaaaaaaaaaaaaaaaaaaaaaaaaaaaaaaaaaaaaaaaaaaaaaaaaaaaaaaaaaaugcaucccccccccccccccccccccccccccccccaaaggcucuuuucagagccaccagaauu

SEQ ID NO: 18364 - RNA, 1762 nt, Artificial Sequence
  mRNA product Design i-3 comprising derived and/or modified sequence from HRSV(Memphis-37)__AIY60640.1__F-del_DSCav1_mut6 (opt4)
gggagaaagcuuaccauggagcugcccauccugaagaccaacgccaucaccaccauccuggccgccgugacccugugcuucgccagcagccagaacaucaccgaggaguucuaccagagcaccugcagcgccgugagcaagggcuaccugggcgcccugagaaccggcugguacaccagcgugaucaccaucgagcugagcaacaucaaggagaacaagugcaacggcaccgacgccaaggugaagcugaucaagcaggagcuggacaaguacaagaacgccgugaccgaccugcagaugcugaugugcagcacccccgccgccggcagcggcagcgccaucgccagcggcaucgccgugugcaaggugcugcaccuggagggcgaggugaacaagaucaagaacgcccugcugagcaccaacaaggccguggugagccugagcaacggcgugagcgugcugaccuucaaggugcuggaccugaagaacuacaucgacaagcagcugcugcccauccugaacaagcagagcugcagcauccccaaccccgagaccgugauggaguuccagcagaagaacaacagacugcuggagaucaccagagaguucagcgugaacgccggcgugaccacccccgugagcaccuacaugcugaccaacagcgagcugcugagccugaucaacgacaugcccaucaccaacgaccagaagaagcugaugagcaacaacgugcagaucgugagacagcagagcuacagcaucaugugcaucaucaaggaggaggugcuggccuacguggugcagcugccccuguacggcgugaucgacacccccugcuggaagcugcacaccagcccccugugcaccaccaacaccaaggagggcagcaacaucugccugaccagaaccgacagaggcugguacugcgacaacgccggcagcgugagcuucuucccccaggccgagaccugcaaggugugcagcaacagaguguucugcgacaccaugaacagccugacccugcccagcgaggugaaccugugcaacaucgacaucuucaaccccaaguacgacugcaagaucaugaccagcaagaccgacgugagcagcagcgugaucaccagccugggcgccaucgugagcugcuacggcaagaccaagugcaccgccagcaacaagaacaagggcaucaucaagaccuucagcaacggcugcgacuacgugagcaacaagggcguggacaccgugagcgugggcaacacccuguacuacgugaacaagcaggagggccagagccuguacgugaagggcgagcccaucaucaacuucuacgacccccugguguuccccagcgacgaguucgacgccagcaucagccaggugaacgagaagaucaaccagagccuggccuucaucagaaagagcgacgagcugcugcacaacgugaacgugggcaagagcaccaccaacaucaugaucaccaccaucaucaucgugaucaucgugauccugcugcugcugaucgccgugggccuguuccuguacugcaaggccagaugaggacuaguuauaagacugacuagcccgaugggccucccaacgggcccuccuccccuccuugcaccgagauuaauaaaaaaaaaaaaaaaaaaaaaaaaaaaaaaaaaaaaaaaaaaaaaaaaaaaaaaaaaaaaaaaaugcaucccccccccccccccccccccccccccccccaaaggcucuuuucagagccaccagaauu

SEQ ID NO: 18365 - RNA, 1762 nt, Artificial Sequence
  mRNA product Design i-3 comprising derived and/or modified sequence from HRSV(Memphis-37)__AIY60640.1__F-del_DSCav1_mut6 (opt5)
gggagaaagcuuaccauggagcugcccauccucaagaccaacgccauuacaacgauccuggcugccgugacccuuugcuucgcgagcucccagaauauuacagaagaguuuuaccaaucuaccuguagcgcugucuccaaaggcuaucugggggcccucagaacaggaugguacaccucuguuaucacaauugaacugagcaacaucaaggagaauaaaugcaacggcaccgacgccaaggugaaacuuaucaagcaggaacuggauaaguauaaaaaugcugugacggaccuccagaugcugauguguuccaccccugccgcugggucuggaagcgccauugcguccggcaucgccgucugcaaggugcugcaccucgagggggagguuaacaaaauuaagaaugcucugcuuagcacaaacaaagccguggucucucuguccaauggagugagcguucucaccuucaaggugcuggaucuuaagaacuacaucgacaaacagcugcucccgauucugaauaagcaaucuuguuccauccccaacccugaaacagucauggaguuucagcagaaaaauaaccggcugcucgaaauuacccgcgaguucagcgugaaugcuggcgugacgacacccgucucuaccuauaugcugacaaacuccgagcuucugagccucaucaacgauaugccuaucaccaaugaccagaagaaacugauguccaacaauguucaaauugugagacagcagucuuacagcaucaugugcauuaucaaggaagaggugcuugccuaugucgugcagcugccccucuacggcguuauugauaccccuuguuggaaacugcauacauccccgcugugcacgaccaacacaaaggaagggagcaauaucugucucacccggacagaccgcggaugguacugcgauaacgcgggcucuguguccuuuuucccccaagccgagaccuguaaggucugcagcaauagaguguuuugcgacacgaugaacucucugacacuuccuagcgaaguuaaucuguguaacaucgauauuuucaaucccaaauaugacugcaagaucaugaccuccaaaaccgaugugucuagcuccgucauuacaagccucggggcuaucgugucuuguuacggaaagaccaaaugcacagccuccaacaagaauaagggcauuaucaaaacguuuagcaacgggugugacuaugucucuaauaagggaguggacaccguuuccgugggcaacacacuguacuaugucaacaaacaggagggccagagccuuuacgugaagggggagccuaucauuaauuucuaugauccccugguuuuuccguccgacgaauuugaugcuucuaucagccaagugaacgagaaaauuaaucagucccucgccuucauccggaagucugacgaacugcugcacaacgucaaugugggaaagagcaccacaaacauuaugaucaccacgauuaucaucgugauuaucguuauucuccugcuucugaucgccgucggccucuuccuguacugcaaagcucgcugaggacuaguuauaagacugacuagcccgaugggccucccaacgggcccuccuccccuccuugcaccgagauuaauaaaaaaaaaaaaaaaaaaaaaaaaaaaaaaaaaaaaaaaaaaaaaaaaaaaaaaaaaaaaaaaaugcaucccccccccccccccccccccccccccccccaaaggcucuuuucagagccaccagaauu

SEQ ID NO: 18366 - RNA, 1762 nt, Artificial Sequence
  mRNA product Design i-3 comprising derived and/or modified sequence from HRSV(Memphis-37)__AIY60640.1__F-del_DSCav1_mut6 (opt6)
gggagaaagcuuaccauggaacuaccuauacuaaaaaccaacgccauaacaacaauacuagccgcaguuacacucugcuuugcauccucacaaaacaucacagaggaauuuuaccaaucuacuugcuccgcaguaucaaaaggauaccuaggagcacuccguacaggaugguacacaucagucauaacaauugaauuaucuaacaucaaagaaaacaaauguaaugguacagacgccaaaguaaaauuaauaaaacaagaacuagacaaauacaaaaacgccguaacagaccuacaaaugcuaaugugcucaacccccgccgcaggaucuggaucagcaauugccucaggcauagcaguaugcaaaguccuacaccuagaaggagaagucaacaaaauaaaaaacgcucuccucucaaccaauaaagcaguaguaucccucucaaacggaguaucaguacuaacauucaaaguacuagaccucaaaaauuauauagacaagcaacuacucccaauauuaaauaaacaauccugcucaauacccaauccagaaacagucauggaauuucaacaaaaaaacaaccgacucuuagaaauaacaagagaauuuucagucaaugccggcgucacaaccccaguaucaacauacaugcuaacaaacucagaacuacuaucacuaaucaacgauaugcccauaaccaacgaccaaaaaaaacuaaugucaaacaauguacaaauuguaagacaacagucuuauucaauaaugugcauaauaaaagaagaagucuuagcauauguaguacaacuaccacuauacggaguaauagacacaccauguuggaaauuacacacauccccacuauguaccaccaacacaaaagaaggaucuaacauaugccuaaccagaacagaccgaggcugguauugcgacaaugcaggaucaguauccuucuuuccacaagcagaaacaugcaaagucugcucuaacagaguauucugcgauacuaugaacucacuuaccuuaccaucagaaguaaaucuauguaauaucgacauauucaaucccaaauaugauugcaaaauaaugaccucaaaaacagauguaucaucaucagucauaacaucacuaggagcaauagucagcugcuaugggaaaacaaaaugcacagcuuccaacaaaaacaaaggaaucauaaaaacauucucaaaugguugugacuacguauccaacaaaggaguagauacaguaucuguaggcaacacauuauacuauguaaauaaacaagaaggacaaagccuauacgucaaaggagaacccaucauaaauuucuaugacccauuaguuuucccaucugacgaauuugacgcuuccaucucccaaguaaaugaaaaaaucaaccaaagccucgcauucauucgcaaaucugacgaauuacuccacaacguaaacguaggaaaauccacaacaaacauuaugaucaccaccauaauaaucguaauaauagucauauuacuacuccucauagcaguaggacuauuccuauacuguaaagcuagauaaggacuaguuauaagacugacuagcccgaugggccucccaacgggcccuccuccccuccuugcaccgagauuaauaaaaaaaaaaaaaaaaaaaaaaaaaaaaaaaaaaaaaaaaaaaaaaaaaaaaaaaaaaaaaaaaugcaucccccccccccccccccccccccccccccccaaaggcucuuuucagagccaccagaauu

SEQ ID NO: 18367 - RNA, 1762 nt, Artificial Sequence
  mRNA product Design i-3 comprising derived and/or modified sequence from HRSV(Memphis-37)__AIY60640.1__F-del_DSCav1_mut6 (opt11)
gggagaaagcuuaccauggaauuaccaauccucaaaacuaacgccaucaccaccauccucgcugccgucacccucugcuucgccuccagccaaaacaucacagaagaguucuaccaaagcacaugcuccgcugucuccaaaggcuaccuuggcgcccuccgcaccggcugguacaccucaguaauuaccauugaacuaagcaacaucaaagaaaauaaaugcaacggcaccgacgccaaaguuaaacucauaaaacaggaacucgacaaauacaaaaacgccguaacagaccuccaaaugcucaugugcuccacccccgccgccggcucaggcuccgccaucgcaagcggaauagcaguuugcaaaguccuccaccuagaaggcgaggucaacaagauuaaaaacgcacuucucucaaccaacaaggccgucguaucacucucaaacggcgucuccguccucaccuucaaaguucuggaccucaaaaacuacaucgauaaacaacuacucccaauacuuaacaaacaaucaugcuccaucccaaaccccgaaaccgucauggaguuccaacagaaaaacaaccgccuacuggaaaucacacgcgaguucagcguaaacgcuggcgucacuacacccgucuccaccuacaugcucaccaauucugaacuccuaucacucauaaacgacaugcccauuaccaacgaccaaaagaaacuaaugucaaacaacguccaaaucguaagacaacaaucguauuccaucaugugcauaauuaaagaagaaguucucgccuacgugguccaacuaccccucuacggagucauagacacuccuuguuggaaacuccacaccucuccccucugcacuaccaacacaaaagaaggcuccaacaucugccucacccgaaccgacagaggcugguacugcgacaacgccggcuccgucuccuucuucccccaagccgaaaccugcaaagucugcuccaaccgcguuuucugcgacaccaugaacucccucacacuccccuccgaagucaaccuauguaacauagacauauucaacccaaaauacgacugcaaaaucaugacauccaaaaccgacgugucuuccucggucaucaccucccucggcgccaucgucucaugcuacggcaaaacuaaaugcaccgcauccaacaaaaacaaaggcauaaucaaaacauucuccaacggcugcgacuacguuucuaacaaaggcgucgauaccgucuccgucggaaacacccucuacuacguaaacaagcaagaaggccagucccuauacguaaaaggagaaccaauuaucaacuucuacgacccccuagucuuccccuccgacgaguucgacgccuccauaucccaagucaacgagaaaaucaaccaaucccuagccuucauccgcaaaucagacgaacuccuccacaacgucaacgucggaaaauccacaacuaacaucaugaucaccaccaucauuaucgucaucauaguuauacuccuccuccucauagccgucggccucuuccuauacugcaaagcucgcuaaggacuaguuauaagacugacuagcccgaugggccucccaacgggcccuccuccccuccuugcaccgagauuaauaaaaaaaaaaaaaaaaaaaaaaaaaaaaaaaaaaaaaaaaaaaaaaaaaaaaaaaaaaaaaaaaugcaucccccccccccccccccccccccccccccccaaaggcucuuuucagagccaccagaauu

SEQ ID NO: 18368 - protein, 535 aa, Artificial Sequence
  derived and/or modified protein sequence (artificial) from HRSV(Memphis-37)__AIY60640.1__F_DSCav1_mut7
MELPILKTNAITTILAAVTLCFASSQNITEEFYQSTCSAVSKGYLSALRTGWYTSVITIELSNIKENKCNGTDAKVKLIKQELDKYKNAVTELQMLMCSTPAAGSGSAIASGIAVCKVLHLEGEVNKIKNALLSTNKAVVSLSNGVSVLTFKVLDLKNYIDKQLLPILNKQSCSISNIETVMEFQQKNNRLLEITREFSVNAGVTTPVSTYMLTNSELLSLINDMPITNDQKKLMSNNVQIVRQQSYSIMCIIKEEVLAYVVQLPLYGVIDTPCWKLHTSPLCTTNTKEGSNICLTRTDRGWYCDNAGSVSFFPQAETCKVCSNRVFCDTMNSLTLPSEVNLCNIDIFNPKYDCKIMTSKTDVSSSVITSLGAIVSCYGKTKCTASNKNKGIIKTFSNGCDYVSNKGVDTVSVGNTLYYVNKQEGKSLYVKGEPIINFYDPLVFPSDEFDASISQVNEKINQSLAFIRKSDELLHNVNVGKSTTNIMITTIIIVIIVILLLLIAVGLFLYCKARSTPVTLSKDQLSGINNIAFSN

SEQ ID NO: 18369 - RNA, 1608 nt, Artificial Sequence
  derived and/or modified CDS sequence (opt1) from HRSV(Memphis-37)__AIY60640.1__F_DSCav1_mut7
auggagcugcccauccucaagaccaacgccaucaccacgauccuggccgcggugacccugugcuucgccagcucccagaacaucaccgaggaguucuaccagagcacgugcuccgccgucagcaagggcuaccucuccgcccugcgcaccgggugguacaccagcgugaucaccaucgagcuguccaacaucaaggagaacaagugcaacggcaccgacgccaaggugaagcucaucaagcaggagcuggacaaguacaagaacgcggucacggagcugcagaugcugaugugcagcaccccggccgccggcuccgggagcgcgaucgccuccggcaucgccgucugcaaggugcugcaccucgagggcgaggugaacaagaucaagaacgcccugcuguccaccaacaaggccgucgugagccucuccaacggggugagcguccugaccuucaaggugcuggaccucaagaacuacaucgacaagcagcugcugcccauccugaacaagcagagcugcuccaucagcaacaucgagaccgucauggaguuccagcagaagaacaaccgccuccuggagaucacgcgggaguucagcgugaacgcgggcgugaccacccccgucuccaccuacaugcugacgaacagcgagcuccugucccugaucaacgacaugccgaucaccaacgaccagaagaagcucaugagcaacaacgugcagaucgugcgccagcaguccuacagcaucaugugcaucaucaaggaggagguccuggccuacguggugcagcugccccucuacggggucaucgacacccccugcuggaagcugcacaccagcccccugugcacgaccaacaccaaggagggcuccaacaucugccucacccggacggaccgcgggugguacugcgacaacgccggcagcguguccuucuucccgcaggccgagaccugcaaggucugcagcaaccggguguucugcgacaccaugaacucccugacccugcccagcgaggugaaccucugcaacaucgacaucuucaaccccaaguacgacugcaagaucaugacguccaagaccgacgucagcuccagcgugaucaccucccugggcgccaucgugagcugcuacgggaagaccaagugcacggcgagcaacaagaacaagggcaucaucaagaccuucuccaacgggugcgacuacgucagcaacaagggcguggacaccguguccgucggcaacacccuguacuacgugaacaagcaggagggcaagagccucuacgugaagggggagcccaucaucaacuucuacgacccgcuggucuuccccuccgacgaguucgacgccagcaucucccaggugaacgagaagaucaaccagagccuggccuucauccggaaguccgacgagcuccugcacaacgugaacgucggcaagagcaccacgaacaucaugaucaccaccaucaucaucgugaucaucgugauccugcugcuccugaucgccgucgggcuguuccucuacugcaaggcccgcuccacccccgugacgcugagcaaggaccagcuguccgggaucaacaacaucgcguucagcaacuga

SEQ ID NO: 18370 - RNA, 1608 nt, Artificial Sequence
  derived and/or modified CDS sequence (opt1) from HRSV(Memphis-37)__AIY60640.1__F_DSCav1_mut7
auggagcugcccauccucaagaccaacgccaucaccacgauccuggccgcggugacccugugcuucgccagcucccagaacaucaccgaggaguucuaccagagcacgugcuccgccgucagcaagggcuaccucuccgcccugcgcaccgggugguacaccagcgugaucaccaucgagcuguccaacaucaaggagaacaagugcaacggcaccgacgccaaggugaagcucaucaagcaggagcuggacaaguacaagaacgcggucacggagcugcagaugcucaugugcagcaccccggccgccggguccggcagcgccaucgcguccgggaucgccgugugcaaggugcugcaccuggagggcgaggucaacaagaucaagaacgcccuccugagcaccaacaaggccguggugucccugagcaacggcgucuccgugcucaccuucaaggugcuggaccugaagaacuacaucgacaagcagcuccugcccauccugaacaagcagagcugcuccaucagcaacaucgagacggucauggaguuccagcagaagaacaaccggcuccuggagaucacccgcgaguucuccgugaacgccggggugaccacccccgucagcacguacaugcugaccaacagcgagcuccugucccugaucaacgacaugcccaucaccaacgaccagaagaagcucaugagcaacaacgugcagaucgugcggcagcaguccuacagcaucaugugcaucaucaaggaggagguccuggcguacguggugcagcugccgcucuacggcgucaucgacacccccugcuggaagcugcacacgagcccccugugcaccaccaacaccaaggaggggagcaacaucugccucacgcgcaccgaccggggcugguacugcgacaacgccggguccgugagcuucuucccccaggccgagaccugcaaggugugcuccaaccgcgucuucugcgacaccaugaacagccugacgcugccguccgaggugaaccucugcaacaucgacaucuucaaccccaaguacgacugcaagaucaugaccagcaagaccgacgucuccagcuccgugaucaccagccugggcgccaucguguccugcuacggcaagacgaagugcaccgccagcaacaagaacaaggggaucaucaagaccuucuccaacggcugcgacuacgucagcaacaaggggguggacaccgugagcgucggcaacacgcuguacuacgugaacaagcaggagggcaagucccucuacgugaagggggagcccaucaucaacuucuacgacccccuggucuucccgagcgacgaguucgacgcguccaucagccaggugaacgagaagaucaaccagucccuggccuucauccggaaguccgacgagcuccugcacaacgugaacgucggcaaguccaccaccaacaucaugaucaccaccaucaucaucgugaucaucgugauccugcuccugcugaucgccgucggccucuuccuguacugcaaggcccgcagcacgcccgugacccuguccaaggaccagcugagcgggaucaacaacaucgccuucuccaacuga

SEQ ID NO: 18371 - RNA, 1608 nt, Artificial Sequence
  derived and/or modified CDS sequence (opt2) from HRSV(Memphis-37)__AIY60640.1__F_DSCav1_mut7
auggagcuccccauccucaagaccaacgccaucaccaccauccucgccgccgucacccucugcuucgccuccucccagaacaucaccgaggaguucuaccaguccaccugcuccgccgucuccaagggcuaccucuccgcccuccgcaccggcugguacaccuccgucaucaccaucgagcucuccaacaucaaggagaacaagugcaacggcaccgacgccaaggucaagcucaucaagcaggagcucgacaaguacaagaacgccgucaccgagcuccagaugcucaugugcuccacccccgccgccggcuccggcuccgccaucgccuccggcaucgccgucugcaagguccuccaccucgagggcgaggucaacaagaucaagaacgcccuccucuccaccaacaaggccgucgucucccucuccaacggcgucuccguccucaccuucaagguccucgaccucaagaacuacaucgacaagcagcuccuccccauccucaacaagcaguccugcuccaucuccaacaucgagaccgucauggaguuccagcagaagaacaaccgccuccucgagaucacccgcgaguucuccgucaacgccggcgucaccacccccgucuccaccuacaugcucaccaacuccgagcuccucucccucaucaacgacaugcccaucaccaacgaccagaagaagcucauguccaacaacguccagaucguccgccagcaguccuacuccaucaugugcaucaucaaggaggagguccucgccuacgucguccagcucccccucuacggcgucaucgacacccccugcuggaagcuccacaccuccccccucugcaccaccaacaccaaggagggcuccaacaucugccucacccgcaccgaccgcggcugguacugcgacaacgccggcuccgucuccuucuucccccaggccgagaccugcaaggucugcuccaaccgcgucuucugcgacaccaugaacucccucacccuccccuccgaggucaaccucugcaacaucgacaucuucaaccccaaguacgacugcaagaucaugaccuccaagaccgacgucuccuccuccgucaucaccucccucggcgccaucgucuccugcuacggcaagaccaagugcaccgccuccaacaagaacaagggcaucaucaagaccuucuccaacggcugcgacuacgucuccaacaagggcgucgacaccgucuccgucggcaacacccucuacuacgucaacaagcaggagggcaagucccucuacgucaagggcgagcccaucaucaacuucuacgacccccucgucuuccccuccgacgaguucgacgccuccaucucccaggucaacgagaagaucaaccagucccucgccuucauccgcaaguccgacgagcuccuccacaacgucaacgucggcaaguccaccaccaacaucaugaucaccaccaucaucaucgucaucaucgucauccuccuccuccucaucgccgucggccucuuccucuacugcaaggcccgcuccacccccgucacccucuccaaggaccagcucuccggcaucaacaacaucgccuucuccaacuga

SEQ ID NO: 18372 - RNA, 1608 nt, Artificial Sequence
  derived and/or modified CDS sequence (opt3) from HRSV(Memphis-37)__AIY60640.1__F_DSCav1_mut7
auggagcugcccauccucaagaccaacgccauuacaacuauacuugcugcagugacgcugugcuucgccagcucccagaauaucaccgaagaguuuuaccaaucuacauguucagcggucaguaaaggcuauuugagcgcuuuaagaacugggugguacaccuccguuauuacaaucgaacugucuaacauuaaggagaauaaaugcaacggaaccgacgccaaggugaaacuaaucaagcaggaacucgauaaguauaaaaaugcaguaacugagcugcagaugcuuauguguucgaccccugccgcugguucaggcagcgcaauagccagugggaucgcugugugcaagguccugcacuuggagggagaagugaacaaaauuaagaaugcccuccuguccacaaacaaagcgguugugucucugagcaauggcgucuccgugcucacguucaagguauuagaccugaagaacuacaucgauaaacagcuuuugccaauucugaauaagcaaucauguaguaucagcaacauagagacuguuauggaauuucagcagaaaaauaacaggcuacucgagauuacccgggaguucucugugaaugccggugucacaacuccgguguccaccuauaugcugacaaacucagaacuucugagcuugaucaacgacaugcccauuaccaaugaucagaagaaacucaugaguaacaaugugcaaaucguccgccagcagucuuacuccaucaugugcauuauaaaggaggaaguucuggcauaugugguacaguuaccucuguacggggugaucgacacgccauguuggaaacuccauacuagcccccuuugcacaaccaacacuaaggagggaucgaauauuugucugacacgaaccgaucguggcugguacugcgacaacgcuggcucugucuccuuuuucccucaagccgaaacguguaaggugugcucaaauagaguguuuugcgauaccaugaacaguuugacacuaccaagcgagguuaaucuguguaacaucgacauauucaaucccaaauaugauugcaagauuaugacuuccaaaaccgacgucucuagcucagugaucacaagucucggggcaaucguauccuguuacggaaagacuaaaugcaccgcuagcaacaagaauaaggguauuaucaaaacauuuucuaacggcugugauuauguuucaaauaaggggguggacaccgucagugugggaaacacucuguacuaugucaacaaacaggagggcaagagccuuuacgugaaaggugaaccuauuauaaauuucuaugacccacugguuuuuccguccgaugaguucgacgccucuaucagccaggugaacgaaaagauuaaucaaucguuggcguuuaucaggaaguccgaugagcuccugcacaacguaaaugucgggaaaucaacgacaaacaucaugauuaccacuauaaucauugugaucauuguuaucuuacugcuacucauagccgugggacuguuccuuuacugcaaggcacggaguacccccgucacauugucuaaagaccagcugagcggcaucaauaacauugcuuucuccaauuga

SEQ ID NO: 18373 - RNA, 1608 nt, Artificial Sequence
  derived and/or modified CDS sequence (opt4) from HRSV(Memphis-37)__AIY60640.1__F_DSCav1_mut7
auggagcugcccauccugaagaccaacgccaucaccaccauccuggccgccgugacccugugcuucgccagcagccagaacaucaccgaggaguucuaccagagcaccugcagcgccgugagcaagggcuaccugagcgcccugagaaccggcugguacaccagcgugaucaccaucgagcugagcaacaucaaggagaacaagugcaacggcaccgacgccaaggugaagcugaucaagcaggagcuggacaaguacaagaacgccgugaccgagcugcagaugcugaugugcagcacccccgccgccggcagcggcagcgccaucgccagcggcaucgccgugugcaaggugcugcaccuggagggcgaggugaacaagaucaagaacgcccugcugagcaccaacaaggccguggugagccugagcaacggcgugagcgugcugaccuucaaggugcuggaccugaagaacuacaucgacaagcagcugcugcccauccugaacaagcagagcugcagcaucagcaacaucgagaccgugauggaguuccagcagaagaacaacagacugcuggagaucaccagagaguucagcgugaacgccggcgugaccacccccgugagcaccuacaugcugaccaacagcgagcugcugagccugaucaacgacaugcccaucaccaacgaccagaagaagcugaugagcaacaacgugcagaucgugagacagcagagcuacagcaucaugugcaucaucaaggaggaggugcuggccuacguggugcagcugccccuguacggcgugaucgacacccccugcuggaagcugcacaccagcccccugugcaccaccaacaccaaggagggcagcaacaucugccugaccagaaccgacagaggcugguacugcgacaacgccggcagcgugagcuucuucccccaggccgagaccugcaaggugugcagcaacagaguguucugcgacaccaugaacagccugacccugcccagcgaggugaaccugugcaacaucgacaucuucaaccccaaguacgacugcaagaucaugaccagcaagaccgacgugagcagcagcgugaucaccagccugggcgccaucgugagcugcuacggcaagaccaagugcaccgccagcaacaagaacaagggcaucaucaagaccuucagcaacggcugcgacuacgugagcaacaagggcguggacaccgugagcgugggcaacacccuguacuacgugaacaagcaggagggcaagagccuguacgugaagggcgagcccaucaucaacuucuacgacccccugguguuccccagcgacgaguucgacgccagcaucagccaggugaacgagaagaucaaccagagccuggccuucaucagaaagagcgacgagcugcugcacaacgugaacgugggcaagagcaccaccaacaucaugaucaccaccaucaucaucgugaucaucgugauccugcugcugcugaucgccgugggccuguuccuguacugcaaggccagaagcacccccgugacccugagcaaggaccagcugagcggcaucaacaacaucgccuucagcaacuga

SEQ ID NO: 18374 - RNA, 1608 nt, Artificial Sequence
  derived and/or modified CDS sequence (opt5) from HRSV(Memphis-37)__AIY60640.1__F_DSCav1_mut7
auggagcugcccauccucaagaccaacgccauuacaacgauccuggcugccgugacccuuugcuucgcgagcucccagaauauuacagaagaguuuuaccaaucuaccuguagcgcugucuccaaaggcuaucugucugcccucagaacagggugguacaccagcguuaucacaauugaacuguccaacaucaaggagaauaaaugcaacggaaccgacgccaaggugaaacuuaucaagcaggaacuggauaaguauaaaaaugcugugacggagcuccagaugcugauguguucuaccccugccgcuggcagcggguccgccauugcgagcggaaucgccgucugcaaggugcugcaccucgagggcgaaguuaacaaaauuaagaaugcucugcuuucuacaaacaaagccguggucucccugagcaauggggugucuguucucaccuucaaggugcuggaccuuaagaacuacaucgauaaacagcugcucccgauucugaauaagcaauccuguagcaucucuaacauugagacagucauggaauuucagcagaaaaauaaccggcugcucgagaucacccgcgaguucuccgugaaugcuggagugacgacacccgucagcaccuauaugcugacaaacuccgaacuucugucucucaucaacgacaugccuauuaccaaugaucagaagaaacugaugagcaacaauguucaaaucgugagacagcaguccuacagcauuaugugcaucauuaaggaggaagugcuugccuaugucgugcagcugccccucuacggcguuaucgacaccccuuguuggaaacugcauacaucuccccugugcacgaccaacacaaaggagggcuccaauaucugucucacccggacagaucgcgggugguacugcgacaacgcgggaagcgugagcuuuuucccucaagccgaaaccuguaaggucugcucuaauagaguguuuugcgauacgaugaacucccugacacuuccgucugagguuaaucuguguaacauugacaucuucaaucccaaauaugauugcaagauuaugaccagcaaaaccgacguguccagcucugucaucacaucccucggcgcuauugugagcuguuacgggaagaccaaaugcacagccucuaacaagaauaagggaaucaucaaaacguuuuccaacggcugugauuaugucagcaauaaggggguggacaccguuuccgugggaaacacacuguacuaugucaacaaacaggagggcaagucucuuuacgugaaaggcgaaccuauuaucaauuucuaugacccccugguuuuuccuagcgaugaguucgacgcuuccauuucucaggugaacgaaaagaucaaucaaagccucgccuuuauucggaaguccgaugagcugcugcacaacgucaauguggggaaaagcaccacaaacaucaugauuaccacgaucaucauugugaucauuguuauccuccugcuucugauugccgucggacucuuccuguacugcaaggcucgcucuacccccgugacacuguccaaagaccagcuuagcggcaucaauaacaucgcguucucuaauuga

SEQ ID NO: 18375 - RNA, 1608 nt, Artificial Sequence
  derived and/or modified CDS sequence (opt6) from HRSV(Memphis-37)__AIY60640.1__F_DSCav1_mut7
auggaacuaccaauacucaaaacaaaugcuauaaccacaauacucgcagcaguaacauuauguuucgcaucaucccaaaacauaacagaagaauuuuaucaaucaaccuguucagcaguauccaaaggauaccuaagugcauuaagaaccggaugguacacaucaguaauaaccauagaacuuucaaacauaaaagaaaacaaauguaacggcacagacgcaaaagucaaacucaucaaacaggaacuugacaaauauaaaaacgcaguaaccgaacuacaaaugcuaaugugcucaacaccagcagcaggaucaggaucagcaauugcaucuggaauagcuguaugcaaaguccuacaccuagaaggagaaguaaacaaaaucaaaaacgcauuacucuccacaaacaaagcaguaguaucacuaucaaacggaguuucaguacuaaccuucaaaguauuagaccuaaaaaacuacauagacaaacaacuacuaccuauacuaaacaaacaauccuguucaauaagcaacauugaaacuguaauggaauuucaacaaaaaaacaaccgccuauuagaaauaaccagagaauuuuccguaaaugcaggaguaaccacaccagucucuacauacauguuaaccaacucagaacuauuaucacucauaaaugacaugccuauaacaaacgaccaaaaaaaacuaaugucaaacaacguacaaauaguaagacaacaaucauauuccauaaugugcauaauaaaagaagaaguacuugcauacgugguucaacuaccccuauauggaguuauagacacaccaugcuggaaacuccacacuuccccacuuugcacaacuaacacaaaagaaggaucaaauauaugccuaaccagaacagaccguggaugguacugcgacaacgcuggaucagucuccuucuuuccacaagcagaaaccugcaaagucugcucaaauagagucuucugugacacaaugaacucacucacccuacccucagaaguaaaccuauguaauauagauauauuuaauccaaaauacgacugcaaaauuaugacaaguaaaacagacguaagcucaucagucauaaccagccuaggagcaauaguauccuguuacggcaaaacaaaaugcacagcuucaaacaaaaacaaaggcauaauaaaaacauucucaaacggaugugacuauguaucaaauaaaggaguugacacaguaucaguuggaaacacacuauacuauguaaacaaacaagaaggaaaaucacuauacguuaaaggcgaacccauaaucaauuucuacgacccccuagucuucccauccgaugaauuugacgcaucaauaucccaaguaaaugaaaaaaucaaccaaucccuagcauuuauacgaaaauccgacgaacuacuccauaaugucaacgucgguaaaucaacgacaaacaucaugaucacaacaauaauaauaguaauaauuguaauauuacucuuacucauagcaguaggccuauuucuauauugcaaagccagaucaacaccaguaaccuuauccaaagaccaacuaucuggaauaaacaacauagcauuuuccaacuga

SEQ ID NO: 18376 - RNA, 1608 nt, Artificial Sequence
  derived and/or modified CDS sequence (opt11) from HRSV(Memphis-37)__AIY60640.1__F_DSCav1_mut7
auggaacuccccauacuuaaaacaaacgccauaacaacuauacucgcagccgucacccucuguuucgcauccucucaaaacaucaccgaagaguucuaucaaucaaccugcuccgccgucucaaaaggcuaccucuccgcccuacgcacaggcugguacaccagcgucauuaccauagaacucucgaacaucaaagaaaacaaaugcaacggcaccgacgcaaaagugaaacucaucaaacaagaacucgacaaauacaaaaacgccgucaccgaacuucagaugcucaugugcuccaccccugccgccggcagcggcuccgccauagccuccggcaucgcagucugcaaaguccuccaccucgaaggagaaguaaacaaaaucaaaaaugcucuccucuccacaaacaaagccgucgucucacucuccaauggagucuccguccucaccuucaaaguccucgaccucaaaaacuacauagacaaacaacuacuccccauccucaacaagcaauccugcucuaucuccaacauagaaaccguuauggaguuccaacagaaaaauaaccgccugcuagaaauaacccgagaguucuccgucaacgcaggcgucacuacccccgucagcacauacaugcuaacaaacuccgaacugcucucccuuaucaacgacaugcccaucacaaacgaucagaaaaagcucaugucuaacaacguacaaaucguucggcaacaauccuacuccaucaugugcaucaucaaagaagaagugcucgccuacguaguccaacucccccucuacggagucaucgacacacccugcuggaaacuccacacaucaccccucugcaccaccaacacaaaagaaggguccaacaucugccucacgcgcaccgaccgaggcugguacugcgacaacgccggcuccguauccuucuucccccaagcagaaaccugcaaggucugcuccaaccgcguauucugcgacaccaugaacucgcucacccuccccucagaagucaaccuauguaacaucgacauauucaaucccaaauacgacugcaagauaaugacuuccaaaaccgacguaagcuccucggucaucaccucccucggcgccaucgucuccugcuacggcaaaaccaaaugcaccgccuccaauaagaauaaaggcauaauaaagacauucagcaacggcugcgauuacgucuccaacaaaggugucgacaccgucucagucggcaacacucuauacuacgugaacaaacaagaaggcaaaagccuauacguuaaaggcgaaccaauaaucaauuucuacgacccucuagucuuucccucugacgaguucgaugccagcauaagccaagucaacgaaaagaucaaccaaucacucgccuucauccguaaauccgacgaacugcuccacaaugucaauguaggcaaaucaacaaccaacaucaugaucaccacuauuaucaucgucaucaucguaauccuacuccuacuaaucgccgucggccuauuccucuacugcaaagcccgcucgacccccgucacucucagcaaggaucaacuauccggcaucaacaacaucgccuucuccaacuaa

SEQ ID NO: 18377 - RNA, 1884 nt, Artificial Sequence
  mRNA product Design a-1 comprising derived and/or modified sequence from HRSV(Memphis-37)__AIY60640.1__F_DSCav1_mut7 (opt1)
gggagagucccgcagucggcguccagcggcucugcuuguucgugugugugucguugcaggccuuauucaagcuuaccauggagcugcccauccucaagaccaacgccaucaccacgauccuggccgcggugacccugugcuucgccagcucccagaacaucaccgaggaguucuaccagagcacgugcuccgccgucagcaagggcuaccucuccgcccugcgcaccgggugguacaccagcgugaucaccaucgagcuguccaacaucaaggagaacaagugcaacggcaccgacgccaaggugaagcucaucaagcaggagcuggacaaguacaagaacgcggucacggagcugcagaugcugaugugcagcaccccggccgccggcuccgggagcgcgaucgccuccggcaucgccgucugcaaggugcugcaccucgagggcgaggugaacaagaucaagaacgcccugcuguccaccaacaaggccgucgugagccucuccaacggggugagcguccugaccuucaaggugcuggaccucaagaacuacaucgacaagcagcugcugcccauccugaacaagcagagcugcuccaucagcaacaucgagaccgucauggaguuccagcagaagaacaaccgccuccuggagaucacgcgggaguucagcgugaacgcgggcgugaccacccccgucuccaccuacaugcugacgaacagcgagcuccugucccugaucaacgacaugccgaucaccaacgaccagaagaagcucaugagcaacaacgugcagaucgugcgccagcaguccuacagcaucaugugcaucaucaaggaggagguccuggccuacguggugcagcugccccucuacggggucaucgacacccccugcuggaagcugcacaccagcccccugugcacgaccaacaccaaggagggcuccaacaucugccucacccggacggaccgcgggugguacugcgacaacgccggcagcguguccuucuucccgcaggccgagaccugcaaggucugcagcaaccggguguucugcgacaccaugaacucccugacccugcccagcgaggugaaccucugcaacaucgacaucuucaaccccaaguacgacugcaagaucaugacguccaagaccgacgucagcuccagcgugaucaccucccugggcgccaucgugagcugcuacgggaagaccaagugcacggcgagcaacaagaacaagggcaucaucaagaccuucuccaacgggugcgacuacgucagcaacaagggcguggacaccguguccgucggcaacacccuguacuacgugaacaagcaggagggcaagagccucuacgugaagggggagcccaucaucaacuucuacgacccgcuggucuuccccuccgacgaguucgacgccagcaucucccaggugaacgagaagaucaaccagagccuggccuucauccggaaguccgacgagcuccugcacaacgugaacgucggcaagagcaccacgaacaucaugaucaccaccaucaucaucgugaucaucgugauccugcugcuccugaucgccgucgggcuguuccucuacugcaaggcccgcuccacccccgugacgcugagcaaggaccagcuguccgggaucaacaacaucgcguucagcaacugaggacuagucccuguucccagagcccacuuuuuuuucuuuuuuugaaauaaaauagccugucuuucagaucuaaaaaaaaaaaaaaaaaaaaaaaaaaaaaaaaaaaaaaaaaaaaaaaaaaaaaaaaaaaaaaaaugcaucccccccccccccccccccccccccccccccaaaggcucuuuucagagccaccagaauu

SEQ ID NO: 18378 - RNA, 1884 nt, Artificial Sequence
  mRNA product Design a-1 comprising derived and/or modified sequence from HRSV(Memphis-37)__AIY60640.1__F_DSCav1_mut7 (opt1)
gggagagucccgcagucggcguccagcggcucugcuuguucgugugugugucguugcaggccuuauucaagcuuaccauggagcugcccauccucaagaccaacgccaucaccacgauccuggccgcggugacccugugcuucgccagcucccagaacaucaccgaggaguucuaccagagcacgugcuccgccgucagcaagggcuaccucuccgcccugcgcaccgggugguacaccagcgugaucaccaucgagcuguccaacaucaaggagaacaagugcaacggcaccgacgccaaggugaagcucaucaagcaggagcuggacaaguacaagaacgcggucacggagcugcagaugcucaugugcagcaccccggccgccggguccggcagcgccaucgcguccgggaucgccgugugcaaggugcugcaccuggagggcgaggucaacaagaucaagaacgcccuccugagcaccaacaaggccguggugucccugagcaacggcgucuccgugcucaccuucaaggugcuggaccugaagaacuacaucgacaagcagcuccugcccauccugaacaagcagagcugcuccaucagcaacaucgagacggucauggaguuccagcagaagaacaaccggcuccuggagaucacccgcgaguucuccgugaacgccggggugaccacccccgucagcacguacaugcugaccaacagcgagcuccugucccugaucaacgacaugcccaucaccaacgaccagaagaagcucaugagcaacaacgugcagaucgugcggcagcaguccuacagcaucaugugcaucaucaaggaggagguccuggcguacguggugcagcugccgcucuacggcgucaucgacacccccugcuggaagcugcacacgagcccccugugcaccaccaacaccaaggaggggagcaacaucugccucacgcgcaccgaccggggcugguacugcgacaacgccggguccgugagcuucuucccccaggccgagaccugcaaggugugcuccaaccgcgucuucugcgacaccaugaacagccugacgcugccguccgaggugaaccucugcaacaucgacaucuucaaccccaaguacgacugcaagaucaugaccagcaagaccgacgucuccagcuccgugaucaccagccugggcgccaucguguccugcuacggcaagacgaagugcaccgccagcaacaagaacaaggggaucaucaagaccuucuccaacggcugcgacuacgucagcaacaaggggguggacaccgugagcgucggcaacacgcuguacuacgugaacaagcaggagggcaagucccucuacgugaagggggagcccaucaucaacuucuacgacccccuggucuucccgagcgacgaguucgacgcguccaucagccaggugaacgagaagaucaaccagucccuggccuucauccggaaguccgacgagcuccugcacaacgugaacgucggcaaguccaccaccaacaucaugaucaccaccaucaucaucgugaucaucgugauccugcuccugcugaucgccgucggccucuuccuguacugcaaggcccgcagcacgcccgugacccuguccaaggaccagcugagcgggaucaacaacaucgccuucuccaacugaggacuagucccuguucccagagcccacuuuuuuuucuuuuuuugaaauaaaauagccugucuuucagaucuaaaaaaaaaaaaaaaaaaaaaaaaaaaaaaaaaaaaaaaaaaaaaaaaaaaaaaaaaaaaaaaaugcaucccccccccccccccccccccccccccccccaaaggcucuuuucagagccaccagaauu

SEQ ID NO: 18379 - RNA, 1884 nt, Artificial Sequence
  mRNA product Design a-1 comprising derived and/or modified sequence from HRSV(Memphis-37)__AIY60640.1__F_DSCav1_mut7 (opt2)
gggagagucccgcagucggcguccagcggcucugcuuguucgugugugugucguugcaggccuuauucaagcuuaccauggagcuccccauccucaagaccaacgccaucaccaccauccucgccgccgucacccucugcuucgccuccucccagaacaucaccgaggaguucuaccaguccaccugcuccgccgucuccaagggcuaccucuccgcccuccgcaccggcugguacaccuccgucaucaccaucgagcucuccaacaucaaggagaacaagugcaacggcaccgacgccaaggucaagcucaucaagcaggagcucgacaaguacaagaacgccgucaccgagcuccagaugcucaugugcuccacccccgccgccggcuccggcuccgccaucgccuccggcaucgccgucugcaagguccuccaccucgagggcgaggucaacaagaucaagaacgcccuccucuccaccaacaaggccgucgucucccucuccaacggcgucuccguccucaccuucaagguccucgaccucaagaacuacaucgacaagcagcuccuccccauccucaacaagcaguccugcuccaucuccaacaucgagaccgucauggaguuccagcagaagaacaaccgccuccucgagaucacccgcgaguucuccgucaacgccggcgucaccacccccgucuccaccuacaugcucaccaacuccgagcuccucucccucaucaacgacaugcccaucaccaacgaccagaagaagcucauguccaacaacguccagaucguccgccagcaguccuacuccaucaugugcaucaucaaggaggagguccucgccuacgucguccagcucccccucuacggcgucaucgacacccccugcuggaagcuccacaccuccccccucugcaccaccaacaccaaggagggcuccaacaucugccucacccgcaccgaccgcggcugguacugcgacaacgccggcuccgucuccuucuucccccaggccgagaccugcaaggucugcuccaaccgcgucuucugcgacaccaugaacucccucacccuccccuccgaggucaaccucugcaacaucgacaucuucaaccccaaguacgacugcaagaucaugaccuccaagaccgacgucuccuccuccgucaucaccucccucggcgccaucgucuccugcuacggcaagaccaagugcaccgccuccaacaagaacaagggcaucaucaagaccuucuccaacggcugcgacuacgucuccaacaagggcgucgacaccgucuccgucggcaacacccucuacuacgucaacaagcaggagggcaagucccucuacgucaagggcgagcccaucaucaacuucuacgacccccucgucuuccccuccgacgaguucgacgccuccaucucccaggucaacgagaagaucaaccagucccucgccuucauccgcaaguccgacgagcuccuccacaacgucaacgucggcaaguccaccaccaacaucaugaucaccaccaucaucaucgucaucaucgucauccuccuccuccucaucgccgucggccucuuccucuacugcaaggcccgcuccacccccgucacccucuccaaggaccagcucuccggcaucaacaacaucgccuucuccaacugaggacuagucccuguucccagagcccacuuuuuuuucuuuuuuugaaauaaaauagccugucuuucagaucuaaaaaaaaaaaaaaaaaaaaaaaaaaaaaaaaaaaaaaaaaaaaaaaaaaaaaaaaaaaaaaaaugcaucccccccccccccccccccccccccccccccaaaggcucuuuucagagccaccagaauu

SEQ ID NO: 18380 - RNA, 1884 nt, Artificial Sequence
  mRNA product Design a-1 comprising derived and/or modified sequence from HRSV(Memphis-37)__AIY60640.1__F_DSCav1_mut7 (opt3)
gggagagucccgcagucggcguccagcggcucugcuuguucgugugugugucguugcaggccuuauucaagcuuaccauggagcugcccauccucaagaccaacgccauuacaacuauacuugcugcagugacgcugugcuucgccagcucccagaauaucaccgaagaguuuuaccaaucuacauguucagcggucaguaaaggcuauuugagcgcuuuaagaacugggugguacaccuccguuauuacaaucgaacugucuaacauuaaggagaauaaaugcaacggaaccgacgccaaggugaaacuaaucaagcaggaacucgauaaguauaaaaaugcaguaacugagcugcagaugcuuauguguucgaccccugccgcugguucaggcagcgcaauagccagugggaucgcugugugcaagguccugcacuuggagggagaagugaacaaaauuaagaaugcccuccuguccacaaacaaagcgguugugucucugagcaauggcgucuccgugcucacguucaagguauuagaccugaagaacuacaucgauaaacagcuuuugccaauucugaauaagcaaucauguaguaucagcaacauagagacuguuauggaauuucagcagaaaaauaacaggcuacucgagauuacccgggaguucucugugaaugccggugucacaacuccgguguccaccuauaugcugacaaacucagaacuucugagcuugaucaacgacaugcccauuaccaaugaucagaagaaacucaugaguaacaaugugcaaaucguccgccagcagucuuacuccaucaugugcauuauaaaggaggaaguucuggcauaugugguacaguuaccucuguacggggugaucgacacgccauguuggaaacuccauacuagcccccuuugcacaaccaacacuaaggagggaucgaauauuugucugacacgaaccgaucguggcugguacugcgacaacgcuggcucugucuccuuuuucccucaagccgaaacguguaaggugugcucaaauagaguguuuugcgauaccaugaacaguuugacacuaccaagcgagguuaaucuguguaacaucgacauauucaaucccaaauaugauugcaagauuaugacuuccaaaaccgacgucucuagcucagugaucacaagucucggggcaaucguauccuguuacggaaagacuaaaugcaccgcuagcaacaagaauaaggguauuaucaaaacauuuucuaacggcugugauuauguuucaaauaaggggguggacaccgucagugugggaaacacucuguacuaugucaacaaacaggagggcaagagccuuuacgugaaaggugaaccuauuauaaauuucuaugacccacugguuuuuccguccgaugaguucgacgccucuaucagccaggugaacgaaaagauuaaucaaucguuggcguuuaucaggaaguccgaugagcuccugcacaacguaaaugucgggaaaucaacgacaaacaucaugauuaccacuauaaucauugugaucauuguuaucuuacugcuacucauagccgugggacuguuccuuuacugcaaggcacggaguacccccgucacauugucuaaagaccagcugagcggcaucaauaacauugcuuucuccaauugaggacuagucccuguucccagagcccacuuuuuuuucuuuuuuugaaauaaaauagccugucuuucagaucuaaaaaaaaaaaaaaaaaaaaaaaaaaaaaaaaaaaaaaaaaaaaaaaaaaaaaaaaaaaaaaaaugcaucccccccccccccccccccccccccccccccaaaggcucuuuucagagccaccagaauu

SEQ ID NO: 18381 - RNA, 1884 nt, Artificial Sequence
  mRNA product Design a-1 comprising derived and/or modified sequence from HRSV(Memphis-37)__AIY60640.1__F_DSCav1_mut7 (opt4)
gggagagucccgcagucggcguccagcggcucugcuuguucgugugugugucguugcaggccuuauucaagcuuaccauggagcugcccauccugaagaccaacgccaucaccaccauccuggccgccgugacccugugcuucgccagcagccagaacaucaccgaggaguucuaccagagcaccugcagcgccgugagcaagggcuaccugagcgcccugagaaccggcugguacaccagcgugaucaccaucgagcugagcaacaucaaggagaacaagugcaacggcaccgacgccaaggugaagcugaucaagcaggagcuggacaaguacaagaacgccgugaccgagcugcagaugcugaugugcagcacccccgccgccggcagcggcagcgccaucgccagcggcaucgccgugugcaaggugcugcaccuggagggcgaggugaacaagaucaagaacgcccugcugagcaccaacaaggccguggugagccugagcaacggcgugagcgugcugaccuucaaggugcuggaccugaagaacuacaucgacaagcagcugcugcccauccugaacaagcagagcugcagcaucagcaacaucgagaccgugauggaguuccagcagaagaacaacagacugcuggagaucaccagagaguucagcgugaacgccggcgugaccacccccgugagcaccuacaugcugaccaacagcgagcugcugagccugaucaacgacaugcccaucaccaacgaccagaagaagcugaugagcaacaacgugcagaucgugagacagcagagcuacagcaucaugugcaucaucaaggaggaggugcuggccuacguggugcagcugccccuguacggcgugaucgacacccccugcuggaagcugcacaccagcccccugugcaccaccaacaccaaggagggcagcaacaucugccugaccagaaccgacagaggcugguacugcgacaacgccggcagcgugagcuucuucccccaggccgagaccugcaaggugugcagcaacagaguguucugcgacaccaugaacagccugacccugcccagcgaggugaaccugugcaacaucgacaucuucaaccccaaguacgacugcaagaucaugaccagcaagaccgacgugagcagcagcgugaucaccagccugggcgccaucgugagcugcuacggcaagaccaagugcaccgccagcaacaagaacaagggcaucaucaagaccuucagcaacggcugcgacuacgugagcaacaagggcguggacaccgugagcgugggcaacacccuguacuacgugaacaagcaggagggcaagagccuguacgugaagggcgagcccaucaucaacuucuacgacccccugguguuccccagcgacgaguucgacgccagcaucagccaggugaacgagaagaucaaccagagccuggccuucaucagaaagagcgacgagcugcugcacaacgugaacgugggcaagagcaccaccaacaucaugaucaccaccaucaucaucgugaucaucgugauccugcugcugcugaucgccgugggccuguuccuguacugcaaggccagaagcacccccgugacccugagcaaggaccagcugagcggcaucaacaacaucgccuucagcaacugaggacuagucccuguucccagagcccacuuuuuuuucuuuuuuugaaauaaaauagccugucuuucagaucuaaaaaaaaaaaaaaaaaaaaaaaaaaaaaaaaaaaaaaaaaaaaaaaaaaaaaaaaaaaaaaaaugcaucccccccccccccccccccccccccccccccaaaggcucuuuucagagccaccagaauu

SEQ ID NO: 18382 - RNA, 1884 nt, Artificial Sequence
  mRNA product Design a-1 comprising derived and/or modified sequence from HRSV(Memphis-37)__AIY60640.1__F_DSCav1_mut7 (opt5)
gggagagucccgcagucggcguccagcggcucugcuuguucgugugugugucguugcaggccuuauucaagcuuaccauggagcugcccauccucaagaccaacgccauuacaacgauccuggcugccgugacccuuugcuucgcgagcucccagaauauuacagaagaguuuuaccaaucuaccuguagcgcugucuccaaaggcuaucugucugcccucagaacagggugguacaccagcguuaucacaauugaacuguccaacaucaaggagaauaaaugcaacggaaccgacgccaaggugaaacuuaucaagcaggaacuggauaaguauaaaaaugcugugacggagcuccagaugcugauguguucuaccccugccgcuggcagcggguccgccauugcgagcggaaucgccgucugcaaggugcugcaccucgagggcgaaguuaacaaaauuaagaaugcucugcuuucuacaaacaaagccguggucucccugagcaauggggugucuguucucaccuucaaggugcuggaccuuaagaacuacaucgauaaacagcugcucccgauucugaauaagcaauccuguagcaucucuaacauugagacagucauggaauuucagcagaaaaauaaccggcugcucgagaucacccgcgaguucuccgugaaugcuggagugacgacacccgucagcaccuauaugcugacaaacuccgaacuucugucucucaucaacgacaugccuauuaccaaugaucagaagaaacugaugagcaacaauguucaaaucgugagacagcaguccuacagcauuaugugcaucauuaaggaggaagugcuugccuaugucgugcagcugccccucuacggcguuaucgacaccccuuguuggaaacugcauacaucuccccugugcacgaccaacacaaaggagggcuccaauaucugucucacccggacagaucgcgggugguacugcgacaacgcgggaagcgugagcuuuuucccucaagccgaaaccuguaaggucugcucuaauagaguguuuugcgauacgaugaacucccugacacuuccgucugagguuaaucuguguaacauugacaucuucaaucccaaauaugauugcaagauuaugaccagcaaaaccgacguguccagcucugucaucacaucccucggcgcuauugugagcuguuacgggaagaccaaaugcacagccucuaacaagaauaagggaaucaucaaaacguuuuccaacggcugugauuaugucagcaauaaggggguggacaccguuuccgugggaaacacacuguacuaugucaacaaacaggagggcaagucucuuuacgugaaaggcgaaccuauuaucaauuucuaugacccccugguuuuuccuagcgaugaguucgacgcuuccauuucucaggugaacgaaaagaucaaucaaagccucgccuuuauucggaaguccgaugagcugcugcacaacgucaauguggggaaaagcaccacaaacaucaugauuaccacgaucaucauugugaucauuguuauccuccugcuucugauugccgucggacucuuccuguacugcaaggcucgcucuacccccgugacacuguccaaagaccagcuuagcggcaucaauaacaucgcguucucuaauugaggacuagucccuguucccagagcccacuuuuuuuucuuuuuuugaaauaaaauagccugucuuucagaucuaaaaaaaaaaaaaaaaaaaaaaaaaaaaaaaaaaaaaaaaaaaaaaaaaaaaaaaaaaaaaaaaugcaucccccccccccccccccccccccccccccccaaaggcucuuuucagagccaccagaauu

SEQ ID NO: 18383 - RNA, 1884 nt, Artificial Sequence
  mRNA product Design a-1 comprising derived and/or modified sequence from HRSV(Memphis-37)__AIY60640.1__F_DSCav1_mut7 (opt6)
gggagagucccgcagucggcguccagcggcucugcuuguucgugugugugucguugcaggccuuauucaagcuuaccauggaacuaccaauacucaaaacaaaugcuauaaccacaauacucgcagcaguaacauuauguuucgcaucaucccaaaacauaacagaagaauuuuaucaaucaaccuguucagcaguauccaaaggauaccuaagugcauuaagaaccggaugguacacaucaguaauaaccauagaacuuucaaacauaaaagaaaacaaauguaacggcacagacgcaaaagucaaacucaucaaacaggaacuugacaaauauaaaaacgcaguaaccgaacuacaaaugcuaaugugcucaacaccagcagcaggaucaggaucagcaauugcaucuggaauagcuguaugcaaaguccuacaccuagaaggagaaguaaacaaaaucaaaaacgcauuacucuccacaaacaaagcaguaguaucacuaucaaacggaguuucaguacuaaccuucaaaguauuagaccuaaaaaacuacauagacaaacaacuacuaccuauacuaaacaaacaauccuguucaauaagcaacauugaaacuguaauggaauuucaacaaaaaaacaaccgccuauuagaaauaaccagagaauuuuccguaaaugcaggaguaaccacaccagucucuacauacauguuaaccaacucagaacuauuaucacucauaaaugacaugccuauaacaaacgaccaaaaaaaacuaaugucaaacaacguacaaauaguaagacaacaaucauauuccauaaugugcauaauaaaagaagaaguacuugcauacgugguucaacuaccccuauauggaguuauagacacaccaugcuggaaacuccacacuuccccacuuugcacaacuaacacaaaagaaggaucaaauauaugccuaaccagaacagaccguggaugguacugcgacaacgcuggaucagucuccuucuuuccacaagcagaaaccugcaaagucugcucaaauagagucuucugugacacaaugaacucacucacccuacccucagaaguaaaccuauguaauauagauauauuuaauccaaaauacgacugcaaaauuaugacaaguaaaacagacguaagcucaucagucauaaccagccuaggagcaauaguauccuguuacggcaaaacaaaaugcacagcuucaaacaaaaacaaaggcauaauaaaaacauucucaaacggaugugacuauguaucaaauaaaggaguugacacaguaucaguuggaaacacacuauacuauguaaacaaacaagaaggaaaaucacuauacguuaaaggcgaacccauaaucaauuucuacgacccccuagucuucccauccgaugaauuugacgcaucaauaucccaaguaaaugaaaaaaucaaccaaucccuagcauuuauacgaaaauccgacgaacuacuccauaaugucaacgucgguaaaucaacgacaaacaucaugaucacaacaauaauaauaguaauaauuguaauauuacucuuacucauagcaguaggccuauuucuauauugcaaagccagaucaacaccaguaaccuuauccaaagaccaacuaucuggaauaaacaacauagcauuuuccaacugaggacuagucccuguucccagagcccacuuuuuuuucuuuuuuugaaauaaaauagccugucuuucagaucuaaaaaaaaaaaaaaaaaaaaaaaaaaaaaaaaaaaaaaaaaaaaaaaaaaaaaaaaaaaaaaaaugcaucccccccccccccccccccccccccccccccaaaggcucuuuucagagccaccagaauu

SEQ ID NO: 18384 - RNA, 1884 nt, Artificial Sequence
  mRNA product Design a-1 comprising derived and/or modified sequence from HRSV(Memphis-37)__AIY60640.1__F_DSCav1_mut7 (opt11)
gggagagucccgcagucggcguccagcggcucugcuuguucgugugugugucguugcaggccuuauucaagcuuaccauggaacuccccauacuuaaaacaaacgccauaacaacuauacucgcagccgucacccucuguuucgcauccucucaaaacaucaccgaagaguucuaucaaucaaccugcuccgccgucucaaaaggcuaccucuccgcccuacgcacaggcugguacaccagcgucauuaccauagaacucucgaacaucaaagaaaacaaaugcaacggcaccgacgcaaaagugaaacucaucaaacaagaacucgacaaauacaaaaacgccgucaccgaacuucagaugcucaugugcuccaccccugccgccggcagcggcuccgccauagccuccggcaucgcagucugcaaaguccuccaccucgaaggagaaguaaacaaaaucaaaaaugcucuccucuccacaaacaaagccgucgucucacucuccaauggagucuccguccucaccuucaaaguccucgaccucaaaaacuacauagacaaacaacuacuccccauccucaacaagcaauccugcucuaucuccaacauagaaaccguuauggaguuccaacagaaaaauaaccgccugcuagaaauaacccgagaguucuccgucaacgcaggcgucacuacccccgucagcacauacaugcuaacaaacuccgaacugcucucccuuaucaacgacaugcccaucacaaacgaucagaaaaagcucaugucuaacaacguacaaaucguucggcaacaauccuacuccaucaugugcaucaucaaagaagaagugcucgccuacguaguccaacucccccucuacggagucaucgacacacccugcuggaaacuccacacaucaccccucugcaccaccaacacaaaagaaggguccaacaucugccucacgcgcaccgaccgaggcugguacugcgacaacgccggcuccguauccuucuucccccaagcagaaaccugcaaggucugcuccaaccgcguauucugcgacaccaugaacucgcucacccuccccucagaagucaaccuauguaacaucgacauauucaaucccaaauacgacugcaagauaaugacuuccaaaaccgacguaagcuccucggucaucaccucccucggcgccaucgucuccugcuacggcaaaaccaaaugcaccgccuccaauaagaauaaaggcauaauaaagacauucagcaacggcugcgauuacgucuccaacaaaggugucgacaccgucucagucggcaacacucuauacuacgugaacaaacaagaaggcaaaagccuauacguuaaaggcgaaccaauaaucaauuucuacgacccucuagucuuucccucugacgaguucgaugccagcauaagccaagucaacgaaaagaucaaccaaucacucgccuucauccguaaauccgacgaacugcuccacaaugucaauguaggcaaaucaacaaccaacaucaugaucaccacuauuaucaucgucaucaucguaauccuacuccuacuaaucgccgucggccuauuccucuacugcaaagcccgcucgacccccgucacucucagcaaggaucaacuauccggcaucaacaacaucgccuucuccaacuaaggacuagucccuguucccagagcccacuuuuuuuucuuuuuuugaaauaaaauagccugucuuucagaucuaaaaaaaaaaaaaaaaaaaaaaaaaaaaaaaaaaaaaaaaaaaaaaaaaaaaaaaaaaaaaaaaugcaucccccccccccccccccccccccccccccccaaaggcucuuuucagagccaccagaauu

SEQ ID NO: 18385 - RNA, 1903 nt, Artificial Sequence
  mRNA product Design a-2 comprising derived and/or modified sequence from HRSV(Memphis-37)__AIY60640.1__F_DSCav1_mut7 (opt1)
gggagaguccgcucagccagguugcagaagcggcuuagcguguguccuaaucuucucucugcguguagguaggccugugccgcaaacaagcuuaccauggagcugcccauccucaagaccaacgccaucaccacgauccuggccgcggugacccugugcuucgccagcucccagaacaucaccgaggaguucuaccagagcacgugcuccgccgucagcaagggcuaccucuccgcccugcgcaccgggugguacaccagcgugaucaccaucgagcuguccaacaucaaggagaacaagugcaacggcaccgacgccaaggugaagcucaucaagcaggagcuggacaaguacaagaacgcggucacggagcugcagaugcugaugugcagcaccccggccgccggcuccgggagcgcgaucgccuccggcaucgccgucugcaaggugcugcaccucgagggcgaggugaacaagaucaagaacgcccugcuguccaccaacaaggccgucgugagccucuccaacggggugagcguccugaccuucaaggugcuggaccucaagaacuacaucgacaagcagcugcugcccauccugaacaagcagagcugcuccaucagcaacaucgagaccgucauggaguuccagcagaagaacaaccgccuccuggagaucacgcgggaguucagcgugaacgcgggcgugaccacccccgucuccaccuacaugcugacgaacagcgagcuccugucccugaucaacgacaugccgaucaccaacgaccagaagaagcucaugagcaacaacgugcagaucgugcgccagcaguccuacagcaucaugugcaucaucaaggaggagguccuggccuacguggugcagcugccccucuacggggucaucgacacccccugcuggaagcugcacaccagcccccugugcacgaccaacaccaaggagggcuccaacaucugccucacccggacggaccgcgggugguacugcgacaacgccggcagcguguccuucuucccgcaggccgagaccugcaaggucugcagcaaccggguguucugcgacaccaugaacucccugacccugcccagcgaggugaaccucugcaacaucgacaucuucaaccccaaguacgacugcaagaucaugacguccaagaccgacgucagcuccagcgugaucaccucccugggcgccaucgugagcugcuacgggaagaccaagugcacggcgagcaacaagaacaagggcaucaucaagaccuucuccaacgggugcgacuacgucagcaacaagggcguggacaccguguccgucggcaacacccuguacuacgugaacaagcaggagggcaagagccucuacgugaagggggagcccaucaucaacuucuacgacccgcuggucuuccccuccgacgaguucgacgccagcaucucccaggugaacgagaagaucaaccagagccuggccuucauccggaaguccgacgagcuccugcacaacgugaacgucggcaagagcaccacgaacaucaugaucaccaccaucaucaucgugaucaucgugauccugcugcuccugaucgccgucgggcuguuccucuacugcaaggcccgcuccacccccgugacgcugagcaaggaccagcuguccgggaucaacaacaucgcguucagcaacugaggacuagucccuguucccagagcccacuuuuuuuucuuuuuuugaaauaaaauagccugucuuucagaucuaaaaaaaaaaaaaaaaaaaaaaaaaaaaaaaaaaaaaaaaaaaaaaaaaaaaaaaaaaaaaaaaugcaucccccccccccccccccccccccccccccccaaaggcucuuuucagagccaccagaauu

SEQ ID NO: 18386 - RNA, 1903 nt, Artificial Sequence
  mRNA product Design a-2 comprising derived and/or modified sequence from HRSV(Memphis-37)__AIY60640.1__F_DSCav1_mut7 (opt1)
gggagaguccgcucagccagguugcagaagcggcuuagcguguguccuaaucuucucucugcguguagguaggccugugccgcaaacaagcuuaccauggagcugcccauccucaagaccaacgccaucaccacgauccuggccgcggugacccugugcuucgccagcucccagaacaucaccgaggaguucuaccagagcacgugcuccgccgucagcaagggcuaccucuccgcccugcgcaccgggugguacaccagcgugaucaccaucgagcuguccaacaucaaggagaacaagugcaacggcaccgacgccaaggugaagcucaucaagcaggagcuggacaaguacaagaacgcggucacggagcugcagaugcucaugugcagcaccccggccgccggguccggcagcgccaucgcguccgggaucgccgugugcaaggugcugcaccuggagggcgaggucaacaagaucaagaacgcccuccugagcaccaacaaggccguggugucccugagcaacggcgucuccgugcucaccuucaaggugcuggaccugaagaacuacaucgacaagcagcuccugcccauccugaacaagcagagcugcuccaucagcaacaucgagacggucauggaguuccagcagaagaacaaccggcuccuggagaucacccgcgaguucuccgugaacgccggggugaccacccccgucagcacguacaugcugaccaacagcgagcuccugucccugaucaacgacaugcccaucaccaacgaccagaagaagcucaugagcaacaacgugcagaucgugcggcagcaguccuacagcaucaugugcaucaucaaggaggagguccuggcguacguggugcagcugccgcucuacggcgucaucgacacccccugcuggaagcugcacacgagcccccugugcaccaccaacaccaaggaggggagcaacaucugccucacgcgcaccgaccggggcugguacugcgacaacgccggguccgugagcuucuucccccaggccgagaccugcaaggugugcuccaaccgcgucuucugcgacaccaugaacagccugacgcugccguccgaggugaaccucugcaacaucgacaucuucaaccccaaguacgacugcaagaucaugaccagcaagaccgacgucuccagcuccgugaucaccagccugggcgccaucguguccugcuacggcaagacgaagugcaccgccagcaacaagaacaaggggaucaucaagaccuucuccaacggcugcgacuacgucagcaacaaggggguggacaccgugagcgucggcaacacgcuguacuacgugaacaagcaggagggcaagucccucuacgugaagggggagcccaucaucaacuucuacgacccccuggucuucccgagcgacgaguucgacgcguccaucagccaggugaacgagaagaucaaccagucccuggccuucauccggaaguccgacgagcuccugcacaacgugaacgucggcaaguccaccaccaacaucaugaucaccaccaucaucaucgugaucaucgugauccugcuccugcugaucgccgucggccucuuccuguacugcaaggcccgcagcacgcccgugacccuguccaaggaccagcugagcgggaucaacaacaucgccuucuccaacugaggacuagucccuguucccagagcccacuuuuuuuucuuuuuuugaaauaaaauagccugucuuucagaucuaaaaaaaaaaaaaaaaaaaaaaaaaaaaaaaaaaaaaaaaaaaaaaaaaaaaaaaaaaaaaaaaugcaucccccccccccccccccccccccccccccccaaaggcucuuuucagagccaccagaauu

SEQ ID NO: 18387 - RNA, 1903 nt, Artificial Sequence
  mRNA product Design a-2 comprising derived and/or modified sequence from HRSV(Memphis-37)__AIY60640.1__F_DSCav1_mut7 (opt2)
gggagaguccgcucagccagguugcagaagcggcuuagcguguguccuaaucuucucucugcguguagguaggccugugccgcaaacaagcuuaccauggagcuccccauccucaagaccaacgccaucaccaccauccucgccgccgucacccucugcuucgccuccucccagaacaucaccgaggaguucuaccaguccaccugcuccgccgucuccaagggcuaccucuccgcccuccgcaccggcugguacaccuccgucaucaccaucgagcucuccaacaucaaggagaacaagugcaacggcaccgacgccaaggucaagcucaucaagcaggagcucgacaaguacaagaacgccgucaccgagcuccagaugcucaugugcuccacccccgccgccggcuccggcuccgccaucgccuccggcaucgccgucugcaagguccuccaccucgagggcgaggucaacaagaucaagaacgcccuccucuccaccaacaaggccgucgucucccucuccaacggcgucuccguccucaccuucaagguccucgaccucaagaacuacaucgacaagcagcuccuccccauccucaacaagcaguccugcuccaucuccaacaucgagaccgucauggaguuccagcagaagaacaaccgccuccucgagaucacccgcgaguucuccgucaacgccggcgucaccacccccgucuccaccuacaugcucaccaacuccgagcuccucucccucaucaacgacaugcccaucaccaacgaccagaagaagcucauguccaacaacguccagaucguccgccagcaguccuacuccaucaugugcaucaucaaggaggagguccucgccuacgucguccagcucccccucuacggcgucaucgacacccccugcuggaagcuccacaccuccccccucugcaccaccaacaccaaggagggcuccaacaucugccucacccgcaccgaccgcggcugguacugcgacaacgccggcuccgucuccuucuucccccaggccgagaccugcaaggucugcuccaaccgcgucuucugcgacaccaugaacucccucacccuccccuccgaggucaaccucugcaacaucgacaucuucaaccccaaguacgacugcaagaucaugaccuccaagaccgacgucuccuccuccgucaucaccucccucggcgccaucgucuccugcuacggcaagaccaagugcaccgccuccaacaagaacaagggcaucaucaagaccuucuccaacggcugcgacuacgucuccaacaagggcgucgacaccgucuccgucggcaacacccucuacuacgucaacaagcaggagggcaagucccucuacgucaagggcgagcccaucaucaacuucuacgacccccucgucuuccccuccgacgaguucgacgccuccaucucccaggucaacgagaagaucaaccagucccucgccuucauccgcaaguccgacgagcuccuccacaacgucaacgucggcaaguccaccaccaacaucaugaucaccaccaucaucaucgucaucaucgucauccuccuccuccucaucgccgucggccucuuccucuacugcaaggcccgcuccacccccgucacccucuccaaggaccagcucuccggcaucaacaacaucgccuucuccaacugaggacuagucccuguucccagagcccacuuuuuuuucuuuuuuugaaauaaaauagccugucuuucagaucuaaaaaaaaaaaaaaaaaaaaaaaaaaaaaaaaaaaaaaaaaaaaaaaaaaaaaaaaaaaaaaaaugcaucccccccccccccccccccccccccccccccaaaggcucuuuucagagccaccagaauu

SEQ ID NO: 18388 - RNA, 1903 nt, Artificial Sequence
  mRNA product Design a-2 comprising derived and/or modified sequence from HRSV(Memphis-37)__AIY60640.1__F_DSCav1_mut7 (opt3)
gggagaguccgcucagccagguugcagaagcggcuuagcguguguccuaaucuucucucugcguguagguaggccugugccgcaaacaagcuuaccauggagcugcccauccucaagaccaacgccauuacaacuauacuugcugcagugacgcugugcuucgccagcucccagaauaucaccgaagaguuuuaccaaucuacauguucagcggucaguaaaggcuauuugagcgcuuuaagaacugggugguacaccuccguuauuacaaucgaacugucuaacauuaaggagaauaaaugcaacggaaccgacgccaaggugaaacuaaucaagcaggaacucgauaaguauaaaaaugcaguaacugagcugcagaugcuuauguguucgaccccugccgcugguucaggcagcgcaauagccagugggaucgcugugugcaagguccugcacuuggagggagaagugaacaaaauuaagaaugcccuccuguccacaaacaaagcgguugugucucugagcaauggcgucuccgugcucacguucaagguauuagaccugaagaacuacaucgauaaacagcuuuugccaauucugaauaagcaaucauguaguaucagcaacauagagacuguuauggaauuucagcagaaaaauaacaggcuacucgagauuacccgggaguucucugugaaugccggugucacaacuccgguguccaccuauaugcugacaaacucagaacuucugagcuugaucaacgacaugcccauuaccaaugaucagaagaaacucaugaguaacaaugugcaaaucguccgccagcagucuuacuccaucaugugcauuauaaaggaggaaguucuggcauaugugguacaguuaccucuguacggggugaucgacacgccauguuggaaacuccauacuagcccccuuugcacaaccaacacuaaggagggaucgaauauuugucugacacgaaccgaucguggcugguacugcgacaacgcuggcucugucuccuuuuucccucaagccgaaacguguaaggugugcucaaauagaguguuuugcgauaccaugaacaguuugacacuaccaagcgagguuaaucuguguaacaucgacauauucaaucccaaauaugauugcaagauuaugacuuccaaaaccgacgucucuagcucagugaucacaagucucggggcaaucguauccuguuacggaaagacuaaaugcaccgcuagcaacaagaauaaggguauuaucaaaacauuuucuaacggcugugauuauguuucaaauaaggggguggacaccgucagugugggaaacacucuguacuaugucaacaaacaggagggcaagagccuuuacgugaaaggugaaccuauuauaaauuucuaugacccacugguuuuuccguccgaugaguucgacgccucuaucagccaggugaacgaaaagauuaaucaaucguuggcguuuaucaggaaguccgaugagcuccugcacaacguaaaugucgggaaaucaacgacaaacaucaugauuaccacuauaaucauugugaucauuguuaucuuacugcuacucauagccgugggacuguuccuuuacugcaaggcacggaguacccccgucacauugucuaaagaccagcugagcggcaucaauaacauugcuuucuccaauugaggacuagucccuguucccagagcccacuuuuuuuucuuuuuuugaaauaaaauagccugucuuucagaucuaaaaaaaaaaaaaaaaaaaaaaaaaaaaaaaaaaaaaaaaaaaaaaaaaaaaaaaaaaaaaaaaugcaucccccccccccccccccccccccccccccccaaaggcucuuuucagagccaccagaauu

SEQ ID NO: 18389 - RNA, 1903 nt, Artificial Sequence
  mRNA product Design a-2 comprising derived and/or modified sequence from HRSV(Memphis-37)__AIY60640.1__F_DSCav1_mut7 (opt4)
gggagaguccgcucagccagguugcagaagcggcuuagcguguguccuaaucuucucucugcguguagguaggccugugccgcaaacaagcuuaccauggagcugcccauccugaagaccaacgccaucaccaccauccuggccgccgugacccugugcuucgccagcagccagaacaucaccgaggaguucuaccagagcaccugcagcgccgugagcaagggcuaccugagcgcccugagaaccggcugguacaccagcgugaucaccaucgagcugagcaacaucaaggagaacaagugcaacggcaccgacgccaaggugaagcugaucaagcaggagcuggacaaguacaagaacgccgugaccgagcugcagaugcugaugugcagcacccccgccgccggcagcggcagcgccaucgccagcggcaucgccgugugcaaggugcugcaccuggagggcgaggugaacaagaucaagaacgcccugcugagcaccaacaaggccguggugagccugagcaacggcgugagcgugcugaccuucaaggugcuggaccugaagaacuacaucgacaagcagcugcugcccauccugaacaagcagagcugcagcaucagcaacaucgagaccgugauggaguuccagcagaagaacaacagacugcuggagaucaccagagaguucagcgugaacgccggcgugaccacccccgugagcaccuacaugcugaccaacagcgagcugcugagccugaucaacgacaugcccaucaccaacgaccagaagaagcugaugagcaacaacgugcagaucgugagacagcagagcuacagcaucaugugcaucaucaaggaggaggugcuggccuacguggugcagcugccccuguacggcgugaucgacacccccugcuggaagcugcacaccagcccccugugcaccaccaacaccaaggagggcagcaacaucugccugaccagaaccgacagaggcugguacugcgacaacgccggcagcgugagcuucuucccccaggccgagaccugcaaggugugcagcaacagaguguucugcgacaccaugaacagccugacccugcccagcgaggugaaccugugcaacaucgacaucuucaaccccaaguacgacugcaagaucaugaccagcaagaccgacgugagcagcagcgugaucaccagccugggcgccaucgugagcugcuacggcaagaccaagugcaccgccagcaacaagaacaagggcaucaucaagaccuucagcaacggcugcgacuacgugagcaacaagggcguggacaccgugagcgugggcaacacccuguacuacgugaacaagcaggagggcaagagccuguacgugaagggcgagcccaucaucaacuucuacgacccccugguguuccccagcgacgaguucgacgccagcaucagccaggugaacgagaagaucaaccagagccuggccuucaucagaaagagcgacgagcugcugcacaacgugaacgugggcaagagcaccaccaacaucaugaucaccaccaucaucaucgugaucaucgugauccugcugcugcugaucgccgugggccuguuccuguacugcaaggccagaagcacccccgugacccugagcaaggaccagcugagcggcaucaacaacaucgccuucagcaacugaggacuagucccuguucccagagcccacuuuuuuuucuuuuuuugaaauaaaauagccugucuuucagaucuaaaaaaaaaaaaaaaaaaaaaaaaaaaaaaaaaaaaaaaaaaaaaaaaaaaaaaaaaaaaaaaaugcaucccccccccccccccccccccccccccccccaaaggcucuuuucagagccaccagaauu

SEQ ID NO: 18390 - RNA, 1903 nt, Artificial Sequence
  mRNA product Design a-2 comprising derived and/or modified sequence from HRSV(Memphis-37)__AIY60640.1__F_DSCav1_mut7 (opt5)
gggagaguccgcucagccagguugcagaagcggcuuagcguguguccuaaucuucucucugcguguagguaggccugugccgcaaacaagcuuaccauggagcugcccauccucaagaccaacgccauuacaacgauccuggcugccgugacccuuugcuucgcgagcucccagaauauuacagaagaguuuuaccaaucuaccuguagcgcugucuccaaaggcuaucugucugcccucagaacagggugguacaccagcguuaucacaauugaacuguccaacaucaaggagaauaaaugcaacggaaccgacgccaaggugaaacuuaucaagcaggaacuggauaaguauaaaaaugcugugacggagcuccagaugcugauguguucuaccccugccgcuggcagcggguccgccauugcgagcggaaucgccgucugcaaggugcugcaccucgagggcgaaguuaacaaaauuaagaaugcucugcuuucuacaaacaaagccguggucucccugagcaauggggugucuguucucaccuucaaggugcuggaccuuaagaacuacaucgauaaacagcugcucccgauucugaauaagcaauccuguagcaucucuaacauugagacagucauggaauuucagcagaaaaauaaccggcugcucgagaucacccgcgaguucuccgugaaugcuggagugacgacacccgucagcaccuauaugcugacaaacuccgaacuucugucucucaucaacgacaugccuauuaccaaugaucagaagaaacugaugagcaacaauguucaaaucgugagacagcaguccuacagcauuaugugcaucauuaaggaggaagugcuugccuaugucgugcagcugccccucuacggcguuaucgacaccccuuguuggaaacugcauacaucuccccugugcacgaccaacacaaaggagggcuccaauaucugucucacccggacagaucgcgggugguacugcgacaacgcgggaagcgugagcuuuuucccucaagccgaaaccuguaaggucugcucuaauagaguguuuugcgauacgaugaacucccugacacuuccgucugagguuaaucuguguaacauugacaucuucaaucccaaauaugauugcaagauuaugaccagcaaaaccgacguguccagcucugucaucacaucccucggcgcuauugugagcuguuacgggaagaccaaaugcacagccucuaacaagaauaagggaaucaucaaaacguuuuccaacggcugugauuaugucagcaauaaggggguggacaccguuuccgugggaaacacacuguacuaugucaacaaacaggagggcaagucucuuuacgugaaaggcgaaccuauuaucaauuucuaugacccccugguuuuuccuagcgaugaguucgacgcuuccauuucucaggugaacgaaaagaucaaucaaagccucgccuuuauucggaaguccgaugagcugcugcacaacgucaauguggggaaaagcaccacaaacaucaugauuaccacgaucaucauugugaucauuguuauccuccugcuucugauugccgucggacucuuccuguacugcaaggcucgcucuacccccgugacacuguccaaagaccagcuuagcggcaucaauaacaucgcguucucuaauugaggacuagucccuguucccagagcccacuuuuuuuucuuuuuuugaaauaaaauagccugucuuucagaucuaaaaaaaaaaaaaaaaaaaaaaaaaaaaaaaaaaaaaaaaaaaaaaaaaaaaaaaaaaaaaaaaugcaucccccccccccccccccccccccccccccccaaaggcucuuuucagagccaccagaauu

SEQ ID NO: 18391 - RNA, 1903 nt, Artificial Sequence
  mRNA product Design a-2 comprising derived and/or modified sequence from HRSV(Memphis-37)__AIY60640.1__F_DSCav1_mut7 (opt6)
gggagaguccgcucagccagguugcagaagcggcuuagcguguguccuaaucuucucucugcguguagguaggccugugccgcaaacaagcuuaccauggaacuaccaauacucaaaacaaaugcuauaaccacaauacucgcagcaguaacauuauguuucgcaucaucccaaaacauaacagaagaauuuuaucaaucaaccuguucagcaguauccaaaggauaccuaagugcauuaagaaccggaugguacacaucaguaauaaccauagaacuuucaaacauaaaagaaaacaaauguaacggcacagacgcaaaagucaaacucaucaaacaggaacuugacaaauauaaaaacgcaguaaccgaacuacaaaugcuaaugugcucaacaccagcagcaggaucaggaucagcaauugcaucuggaauagcuguaugcaaaguccuacaccuagaaggagaaguaaacaaaaucaaaaacgcauuacucuccacaaacaaagcaguaguaucacuaucaaacggaguuucaguacuaaccuucaaaguauuagaccuaaaaaacuacauagacaaacaacuacuaccuauacuaaacaaacaauccuguucaauaagcaacauugaaacuguaauggaauuucaacaaaaaaacaaccgccuauuagaaauaaccagagaauuuuccguaaaugcaggaguaaccacaccagucucuacauacauguuaaccaacucagaacuauuaucacucauaaaugacaugccuauaacaaacgaccaaaaaaaacuaaugucaaacaacguacaaauaguaagacaacaaucauauuccauaaugugcauaauaaaagaagaaguacuugcauacgugguucaacuaccccuauauggaguuauagacacaccaugcuggaaacuccacacuuccccacuuugcacaacuaacacaaaagaaggaucaaauauaugccuaaccagaacagaccguggaugguacugcgacaacgcuggaucagucuccuucuuuccacaagcagaaaccugcaaagucugcucaaauagagucuucugugacacaaugaacucacucacccuacccucagaaguaaaccuauguaauauagauauauuuaauccaaaauacgacugcaaaauuaugacaaguaaaacagacguaagcucaucagucauaaccagccuaggagcaauaguauccuguuacggcaaaacaaaaugcacagcuucaaacaaaaacaaaggcauaauaaaaacauucucaaacggaugugacuauguaucaaauaaaggaguugacacaguaucaguuggaaacacacuauacuauguaaacaaacaagaaggaaaaucacuauacguuaaaggcgaacccauaaucaauuucuacgacccccuagucuucccauccgaugaauuugacgcaucaauaucccaaguaaaugaaaaaaucaaccaaucccuagcauuuauacgaaaauccgacgaacuacuccauaaugucaacgucgguaaaucaacgacaaacaucaugaucacaacaauaauaauaguaauaauuguaauauuacucuuacucauagcaguaggccuauuucuauauugcaaagccagaucaacaccaguaaccuuauccaaagaccaacuaucuggaauaaacaacauagcauuuuccaacugaggacuagucccuguucccagagcccacuuuuuuuucuuuuuuugaaauaaaauagccugucuuucagaucuaaaaaaaaaaaaaaaaaaaaaaaaaaaaaaaaaaaaaaaaaaaaaaaaaaaaaaaaaaaaaaaaugcaucccccccccccccccccccccccccccccccaaaggcucuuuucagagccaccagaauu

SEQ ID NO: 18392 - RNA, 1903 nt, Artificial Sequence
  mRNA product Design a-2 comprising derived and/or modified sequence from HRSV(Memphis-37)__AIY60640.1__F_DSCav1_mut7 (opt11)
gggagaguccgcucagccagguugcagaagcggcuuagcguguguccuaaucuucucucugcguguagguaggccugugccgcaaacaagcuuaccauggaacuccccauacuuaaaacaaacgccauaacaacuauacucgcagccgucacccucuguuucgcauccucucaaaacaucaccgaagaguucuaucaaucaaccugcuccgccgucucaaaaggcuaccucuccgcccuacgcacaggcugguacaccagcgucauuaccauagaacucucgaacaucaaagaaaacaaaugcaacggcaccgacgcaaaagugaaacucaucaaacaagaacucgacaaauacaaaaacgccgucaccgaacuucagaugcucaugugcuccaccccugccgccggcagcggcuccgccauagccuccggcaucgcagucugcaaaguccuccaccucgaaggagaaguaaacaaaaucaaaaaugcucuccucuccacaaacaaagccgucgucucacucuccaauggagucuccguccucaccuucaaaguccucgaccucaaaaacuacauagacaaacaacuacuccccauccucaacaagcaauccugcucuaucuccaacauagaaaccguuauggaguuccaacagaaaaauaaccgccugcuagaaauaacccgagaguucuccgucaacgcaggcgucacuacccccgucagcacauacaugcuaacaaacuccgaacugcucucccuuaucaacgacaugcccaucacaaacgaucagaaaaagcucaugucuaacaacguacaaaucguucggcaacaauccuacuccaucaugugcaucaucaaagaagaagugcucgccuacguaguccaacucccccucuacggagucaucgacacacccugcuggaaacuccacacaucaccccucugcaccaccaacacaaaagaaggguccaacaucugccucacgcgcaccgaccgaggcugguacugcgacaacgccggcuccguauccuucuucccccaagcagaaaccugcaaggucugcuccaaccgcguauucugcgacaccaugaacucgcucacccuccccucagaagucaaccuauguaacaucgacauauucaaucccaaauacgacugcaagauaaugacuuccaaaaccgacguaagcuccucggucaucaccucccucggcgccaucgucuccugcuacggcaaaaccaaaugcaccgccuccaauaagaauaaaggcauaauaaagacauucagcaacggcugcgauuacgucuccaacaaaggugucgacaccgucucagucggcaacacucuauacuacgugaacaaacaagaaggcaaaagccuauacguuaaaggcgaaccaauaaucaauuucuacgacccucuagucuuucccucugacgaguucgaugccagcauaagccaagucaacgaaaagaucaaccaaucacucgccuucauccguaaauccgacgaacugcuccacaaugucaauguaggcaaaucaacaaccaacaucaugaucaccacuauuaucaucgucaucaucguaauccuacuccuacuaaucgccgucggccuauuccucuacugcaaagcccgcucgacccccgucacucucagcaaggaucaacuauccggcaucaacaacaucgccuucuccaacuaaggacuagucccuguucccagagcccacuuuuuuuucuuuuuuugaaauaaaauagccugucuuucagaucuaaaaaaaaaaaaaaaaaaaaaaaaaaaaaaaaaaaaaaaaaaaaaaaaaaaaaaaaaaaaaaaaugcaucccccccccccccccccccccccccccccccaaaggcucuuuucagagccaccagaauu

SEQ ID NO: 18393 - RNA, 1981 nt, Artificial Sequence
  mRNA product Design a-3 comprising derived and/or modified sequence from HRSV(Memphis-37)__AIY60640.1__F_DSCav1_mut7 (opt1)
gggagagggcgcuuggcuugcaaggacccugagcugcggcauugaagcacacccaacccaacucgacugaagucagccucacugaaccggaucugagaaucuucucucucugggcuugccagggcucuccgaaccuagcuagcauccucuucaauuccaacuagaaagcuuaccauggagcugcccauccucaagaccaacgccaucaccacgauccuggccgcggugacccugugcuucgccagcucccagaacaucaccgaggaguucuaccagagcacgugcuccgccgucagcaagggcuaccucuccgcccugcgcaccgggugguacaccagcgugaucaccaucgagcuguccaacaucaaggagaacaagugcaacggcaccgacgccaaggugaagcucaucaagcaggagcuggacaaguacaagaacgcggucacggagcugcagaugcugaugugcagcaccccggccgccggcuccgggagcgcgaucgccuccggcaucgccgucugcaaggugcugcaccucgagggcgaggugaacaagaucaagaacgcccugcuguccaccaacaaggccgucgugagccucuccaacggggugagcguccugaccuucaaggugcuggaccucaagaacuacaucgacaagcagcugcugcccauccugaacaagcagagcugcuccaucagcaacaucgagaccgucauggaguuccagcagaagaacaaccgccuccuggagaucacgcgggaguucagcgugaacgcgggcgugaccacccccgucuccaccuacaugcugacgaacagcgagcuccugucccugaucaacgacaugccgaucaccaacgaccagaagaagcucaugagcaacaacgugcagaucgugcgccagcaguccuacagcaucaugugcaucaucaaggaggagguccuggccuacguggugcagcugccccucuacggggucaucgacacccccugcuggaagcugcacaccagcccccugugcacgaccaacaccaaggagggcuccaacaucugccucacccggacggaccgcgggugguacugcgacaacgccggcagcguguccuucuucccgcaggccgagaccugcaaggucugcagcaaccggguguucugcgacaccaugaacucccugacccugcccagcgaggugaaccucugcaacaucgacaucuucaaccccaaguacgacugcaagaucaugacguccaagaccgacgucagcuccagcgugaucaccucccugggcgccaucgugagcugcuacgggaagaccaagugcacggcgagcaacaagaacaagggcaucaucaagaccuucuccaacgggugcgacuacgucagcaacaagggcguggacaccguguccgucggcaacacccuguacuacgugaacaagcaggagggcaagagccucuacgugaagggggagcccaucaucaacuucuacgacccgcuggucuuccccuccgacgaguucgacgccagcaucucccaggugaacgagaagaucaaccagagccuggccuucauccggaaguccgacgagcuccugcacaacgugaacgucggcaagagcaccacgaacaucaugaucaccaccaucaucaucgugaucaucgugauccugcugcuccugaucgccgucgggcuguuccucuacugcaaggcccgcuccacccccgugacgcugagcaaggaccagcuguccgggaucaacaacaucgcguucagcaacugaggacuagucccuguucccagagcccacuuuuuuuucuuuuuuugaaauaaaauagccugucuuucagaucuaaaaaaaaaaaaaaaaaaaaaaaaaaaaaaaaaaaaaaaaaaaaaaaaaaaaaaaaaaaaaaaaugcaucccccccccccccccccccccccccccccccaaaggcucuuuucagagccaccagaauu

SEQ ID NO: 18394 - RNA, 1981 nt, Artificial Sequence
  mRNA product Design a-3 comprising derived and/or modified sequence from HRSV(Memphis-37)__AIY60640.1__F_DSCav1_mut7 (opt1)
gggagagggcgcuuggcuugcaaggacccugagcugcggcauugaagcacacccaacccaacucgacugaagucagccucacugaaccggaucugagaaucuucucucucugggcuugccagggcucuccgaaccuagcuagcauccucuucaauuccaacuagaaagcuuaccauggagcugcccauccucaagaccaacgccaucaccacgauccuggccgcggugacccugugcuucgccagcucccagaacaucaccgaggaguucuaccagagcacgugcuccgccgucagcaagggcuaccucuccgcccugcgcaccgggugguacaccagcgugaucaccaucgagcuguccaacaucaaggagaacaagugcaacggcaccgacgccaaggugaagcucaucaagcaggagcuggacaaguacaagaacgcggucacggagcugcagaugcucaugugcagcaccccggccgccggguccggcagcgccaucgcguccgggaucgccgugugcaaggugcugcaccuggagggcgaggucaacaagaucaagaacgcccuccugagcaccaacaaggccguggugucccugagcaacggcgucuccgugcucaccuucaaggugcuggaccugaagaacuacaucgacaagcagcuccugcccauccugaacaagcagagcugcuccaucagcaacaucgagacggucauggaguuccagcagaagaacaaccggcuccuggagaucacccgcgaguucuccgugaacgccggggugaccacccccgucagcacguacaugcugaccaacagcgagcuccugucccugaucaacgacaugcccaucaccaacgaccagaagaagcucaugagcaacaacgugcagaucgugcggcagcaguccuacagcaucaugugcaucaucaaggaggagguccuggcguacguggugcagcugccgcucuacggcgucaucgacacccccugcuggaagcugcacacgagcccccugugcaccaccaacaccaaggaggggagcaacaucugccucacgcgcaccgaccggggcugguacugcgacaacgccggguccgugagcuucuucccccaggccgagaccugcaaggugugcuccaaccgcgucuucugcgacaccaugaacagccugacgcugccguccgaggugaaccucugcaacaucgacaucuucaaccccaaguacgacugcaagaucaugaccagcaagaccgacgucuccagcuccgugaucaccagccugggcgccaucguguccugcuacggcaagacgaagugcaccgccagcaacaagaacaaggggaucaucaagaccuucuccaacggcugcgacuacgucagcaacaaggggguggacaccgugagcgucggcaacacgcuguacuacgugaacaagcaggagggcaagucccucuacgugaagggggagcccaucaucaacuucuacgacccccuggucuucccgagcgacgaguucgacgcguccaucagccaggugaacgagaagaucaaccagucccuggccuucauccggaaguccgacgagcuccugcacaacgugaacgucggcaaguccaccaccaacaucaugaucaccaccaucaucaucgugaucaucgugauccugcuccugcugaucgccgucggccucuuccuguacugcaaggcccgcagcacgcccgugacccuguccaaggaccagcugagcgggaucaacaacaucgccuucuccaacugaggacuagucccuguucccagagcccacuuuuuuuucuuuuuuugaaauaaaauagccugucuuucagaucuaaaaaaaaaaaaaaaaaaaaaaaaaaaaaaaaaaaaaaaaaaaaaaaaaaaaaaaaaaaaaaaaugcaucccccccccccccccccccccccccccccccaaaggcucuuuucagagccaccagaauu

SEQ ID NO: 18395 - RNA, 1981 nt, Artificial Sequence
  mRNA product Design a-3 comprising derived and/or modified sequence from HRSV(Memphis-37)__AIY60640.1__F_DSCav1_mut7 (opt2)
gggagagggcgcuuggcuugcaaggacccugagcugcggcauugaagcacacccaacccaacucgacugaagucagccucacugaaccggaucugagaaucuucucucucugggcuugccagggcucuccgaaccuagcuagcauccucuucaauuccaacuagaaagcuuaccauggagcuccccauccucaagaccaacgccaucaccaccauccucgccgccgucacccucugcuucgccuccucccagaacaucaccgaggaguucuaccaguccaccugcuccgccgucuccaagggcuaccucuccgcccuccgcaccggcugguacaccuccgucaucaccaucgagcucuccaacaucaaggagaacaagugcaacggcaccgacgccaaggucaagcucaucaagcaggagcucgacaaguacaagaacgccgucaccgagcuccagaugcucaugugcuccacccccgccgccggcuccggcuccgccaucgccuccggcaucgccgucugcaagguccuccaccucgagggcgaggucaacaagaucaagaacgcccuccucuccaccaacaaggccgucgucucccucuccaacggcgucuccguccucaccuucaagguccucgaccucaagaacuacaucgacaagcagcuccuccccauccucaacaagcaguccugcuccaucuccaacaucgagaccgucauggaguuccagcagaagaacaaccgccuccucgagaucacccgcgaguucuccgucaacgccggcgucaccacccccgucuccaccuacaugcucaccaacuccgagcuccucucccucaucaacgacaugcccaucaccaacgaccagaagaagcucauguccaacaacguccagaucguccgccagcaguccuacuccaucaugugcaucaucaaggaggagguccucgccuacgucguccagcucccccucuacggcgucaucgacacccccugcuggaagcuccacaccuccccccucugcaccaccaacaccaaggagggcuccaacaucugccucacccgcaccgaccgcggcugguacugcgacaacgccggcuccgucuccuucuucccccaggccgagaccugcaaggucugcuccaaccgcgucuucugcgacaccaugaacucccucacccuccccuccgaggucaaccucugcaacaucgacaucuucaaccccaaguacgacugcaagaucaugaccuccaagaccgacgucuccuccuccgucaucaccucccucggcgccaucgucuccugcuacggcaagaccaagugcaccgccuccaacaagaacaagggcaucaucaagaccuucuccaacggcugcgacuacgucuccaacaagggcgucgacaccgucuccgucggcaacacccucuacuacgucaacaagcaggagggcaagucccucuacgucaagggcgagcccaucaucaacuucuacgacccccucgucuuccccuccgacgaguucgacgccuccaucucccaggucaacgagaagaucaaccagucccucgccuucauccgcaaguccgacgagcuccuccacaacgucaacgucggcaaguccaccaccaacaucaugaucaccaccaucaucaucgucaucaucgucauccuccuccuccucaucgccgucggccucuuccucuacugcaaggcccgcuccacccccgucacccucuccaaggaccagcucuccggcaucaacaacaucgccuucuccaacugaggacuagucccuguucccagagcccacuuuuuuuucuuuuuuugaaauaaaauagccugucuuucagaucuaaaaaaaaaaaaaaaaaaaaaaaaaaaaaaaaaaaaaaaaaaaaaaaaaaaaaaaaaaaaaaaaugcaucccccccccccccccccccccccccccccccaaaggcucuuuucagagccaccagaauu

SEQ ID NO: 18396 - RNA, 1981 nt, Artificial Sequence
  mRNA product Design a-3 comprising derived and/or modified sequence from HRSV(Memphis-37)__AIY60640.1__F_DSCav1_mut7 (opt3)
gggagagggcgcuuggcuugcaaggacccugagcugcggcauugaagcacacccaacccaacucgacugaagucagccucacugaaccggaucugagaaucuucucucucugggcuugccagggcucuccgaaccuagcuagcauccucuucaauuccaacuagaaagcuuaccauggagcugcccauccucaagaccaacgccauuacaacuauacuugcugcagugacgcugugcuucgccagcucccagaauaucaccgaagaguuuuaccaaucuacauguucagcggucaguaaaggcuauuugagcgcuuuaagaacugggugguacaccuccguuauuacaaucgaacugucuaacauuaaggagaauaaaugcaacggaaccgacgccaaggugaaacuaaucaagcaggaacucgauaaguauaaaaaugcaguaacugagcugcagaugcuuauguguucgaccccugccgcugguucaggcagcgcaauagccagugggaucgcugugugcaagguccugcacuuggagggagaagugaacaaaauuaagaaugcccuccuguccacaaacaaagcgguugugucucugagcaauggcgucuccgugcucacguucaagguauuagaccugaagaacuacaucgauaaacagcuuuugccaauucugaauaagcaaucauguaguaucagcaacauagagacuguuauggaauuucagcagaaaaauaacaggcuacucgagauuacccgggaguucucugugaaugccggugucacaacuccgguguccaccuauaugcugacaaacucagaacuucugagcuugaucaacgacaugcccauuaccaaugaucagaagaaacucaugaguaacaaugugcaaaucguccgccagcagucuuacuccaucaugugcauuauaaaggaggaaguucuggcauaugugguacaguuaccucuguacggggugaucgacacgccauguuggaaacuccauacuagcccccuuugcacaaccaacacuaaggagggaucgaauauuugucugacacgaaccgaucguggcugguacugcgacaacgcuggcucugucuccuuuuucccucaagccgaaacguguaaggugugcucaaauagaguguuuugcgauaccaugaacaguuugacacuaccaagcgagguuaaucuguguaacaucgacauauucaaucccaaauaugauugcaagauuaugacuuccaaaaccgacgucucuagcucagugaucacaagucucggggcaaucguauccuguuacggaaagacuaaaugcaccgcuagcaacaagaauaaggguauuaucaaaacauuuucuaacggcugugauuauguuucaaauaaggggguggacaccgucagugugggaaacacucuguacuaugucaacaaacaggagggcaagagccuuuacgugaaaggugaaccuauuauaaauuucuaugacccacugguuuuuccguccgaugaguucgacgccucuaucagccaggugaacgaaaagauuaaucaaucguuggcguuuaucaggaaguccgaugagcuccugcacaacguaaaugucgggaaaucaacgacaaacaucaugauuaccacuauaaucauugugaucauuguuaucuuacugcuacucauagccgugggacuguuccuuuacugcaaggcacggaguacccccgucacauugucuaaagaccagcugagcggcaucaauaacauugcuuucuccaauugaggacuagucccuguucccagagcccacuuuuuuuucuuuuuuugaaauaaaauagccugucuuucagaucuaaaaaaaaaaaaaaaaaaaaaaaaaaaaaaaaaaaaaaaaaaaaaaaaaaaaaaaaaaaaaaaaugcaucccccccccccccccccccccccccccccccaaaggcucuuuucagagccaccagaauu

SEQ ID NO: 18397 - RNA, 1981 nt, Artificial Sequence
  mRNA product Design a-3 comprising derived and/or modified sequence from HRSV(Memphis-37)__AIY60640.1__F_DSCav1_mut7 (opt4)
gggagagggcgcuuggcuugcaaggacccugagcugcggcauugaagcacacccaacccaacucgacugaagucagccucacugaaccggaucugagaaucuucucucucugggcuugccagggcucuccgaaccuagcuagcauccucuucaauuccaacuagaaagcuuaccauggagcugcccauccugaagaccaacgccaucaccaccauccuggccgccgugacccugugcuucgccagcagccagaacaucaccgaggaguucuaccagagcaccugcagcgccgugagcaagggcuaccugagcgcccugagaaccggcugguacaccagcgugaucaccaucgagcugagcaacaucaaggagaacaagugcaacggcaccgacgccaaggugaagcugaucaagcaggagcuggacaaguacaagaacgccgugaccgagcugcagaugcugaugugcagcacccccgccgccggcagcggcagcgccaucgccagcggcaucgccgugugcaaggugcugcaccuggagggcgaggugaacaagaucaagaacgcccugcugagcaccaacaaggccguggugagccugagcaacggcgugagcgugcugaccuucaaggugcuggaccugaagaacuacaucgacaagcagcugcugcccauccugaacaagcagagcugcagcaucagcaacaucgagaccgugauggaguuccagcagaagaacaacagacugcuggagaucaccagagaguucagcgugaacgccggcgugaccacccccgugagcaccuacaugcugaccaacagcgagcugcugagccugaucaacgacaugcccaucaccaacgaccagaagaagcugaugagcaacaacgugcagaucgugagacagcagagcuacagcaucaugugcaucaucaaggaggaggugcuggccuacguggugcagcugccccuguacggcgugaucgacacccccugcuggaagcugcacaccagcccccugugcaccaccaacaccaaggagggcagcaacaucugccugaccagaaccgacagaggcugguacugcgacaacgccggcagcgugagcuucuucccccaggccgagaccugcaaggugugcagcaacagaguguucugcgacaccaugaacagccugacccugcccagcgaggugaaccugugcaacaucgacaucuucaaccccaaguacgacugcaagaucaugaccagcaagaccgacgugagcagcagcgugaucaccagccugggcgccaucgugagcugcuacggcaagaccaagugcaccgccagcaacaagaacaagggcaucaucaagaccuucagcaacggcugcgacuacgugagcaacaagggcguggacaccgugagcgugggcaacacccuguacuacgugaacaagcaggagggcaagagccuguacgugaagggcgagcccaucaucaacuucuacgacccccugguguuccccagcgacgaguucgacgccagcaucagccaggugaacgagaagaucaaccagagccuggccuucaucagaaagagcgacgagcugcugcacaacgugaacgugggcaagagcaccaccaacaucaugaucaccaccaucaucaucgugaucaucgugauccugcugcugcugaucgccgugggccuguuccuguacugcaaggccagaagcacccccgugacccugagcaaggaccagcugagcggcaucaacaacaucgccuucagcaacugaggacuagucccuguucccagagcccacuuuuuuuucuuuuuuugaaauaaaauagccugucuuucagaucuaaaaaaaaaaaaaaaaaaaaaaaaaaaaaaaaaaaaaaaaaaaaaaaaaaaaaaaaaaaaaaaaugcaucccccccccccccccccccccccccccccccaaaggcucuuuucagagccaccagaauu

SEQ ID NO: 18398 - RNA, 1981 nt, Artificial Sequence
  mRNA product Design a-3 comprising derived and/or modified sequence from HRSV(Memphis-37)__AIY60640.1__F_DSCav1_mut7 (opt5)
gggagagggcgcuuggcuugcaaggacccugagcugcggcauugaagcacacccaacccaacucgacugaagucagccucacugaaccggaucugagaaucuucucucucugggcuugccagggcucuccgaaccuagcuagcauccucuucaauuccaacuagaaagcuuaccauggagcugcccauccucaagaccaacgccauuacaacgauccuggcugccgugacccuuugcuucgcgagcucccagaauauuacagaagaguuuuaccaaucuaccuguagcgcugucuccaaaggcuaucugucugcccucagaacagggugguacaccagcguuaucacaauugaacuguccaacaucaaggagaauaaaugcaacggaaccgacgccaaggugaaacuuaucaagcaggaacuggauaaguauaaaaaugcugugacggagcuccagaugcugauguguucuaccccugccgcuggcagcggguccgccauugcgagcggaaucgccgucugcaaggugcugcaccucgagggcgaaguuaacaaaauuaagaaugcucugcuuucuacaaacaaagccguggucucccugagcaauggggugucuguucucaccuucaaggugcuggaccuuaagaacuacaucgauaaacagcugcucccgauucugaauaagcaauccuguagcaucucuaacauugagacagucauggaauuucagcagaaaaauaaccggcugcucgagaucacccgcgaguucuccgugaaugcuggagugacgacacccgucagcaccuauaugcugacaaacuccgaacuucugucucucaucaacgacaugccuauuaccaaugaucagaagaaacugaugagcaacaauguucaaaucgugagacagcaguccuacagcauuaugugcaucauuaaggaggaagugcuugccuaugucgugcagcugccccucuacggcguuaucgacaccccuuguuggaaacugcauacaucuccccugugcacgaccaacacaaaggagggcuccaauaucugucucacccggacagaucgcgggugguacugcgacaacgcgggaagcgugagcuuuuucccucaagccgaaaccuguaaggucugcucuaauagaguguuuugcgauacgaugaacucccugacacuuccgucugagguuaaucuguguaacauugacaucuucaaucccaaauaugauugcaagauuaugaccagcaaaaccgacguguccagcucugucaucacaucccucggcgcuauugugagcuguuacgggaagaccaaaugcacagccucuaacaagaauaagggaaucaucaaaacguuuuccaacggcugugauuaugucagcaauaaggggguggacaccguuuccgugggaaacacacuguacuaugucaacaaacaggagggcaagucucuuuacgugaaaggcgaaccuauuaucaauuucuaugacccccugguuuuuccuagcgaugaguucgacgcuuccauuucucaggugaacgaaaagaucaaucaaagccucgccuuuauucggaaguccgaugagcugcugcacaacgucaauguggggaaaagcaccacaaacaucaugauuaccacgaucaucauugugaucauuguuauccuccugcuucugauugccgucggacucuuccuguacugcaaggcucgcucuacccccgugacacuguccaaagaccagcuuagcggcaucaauaacaucgcguucucuaauugaggacuagucccuguucccagagcccacuuuuuuuucuuuuuuugaaauaaaauagccugucuuucagaucuaaaaaaaaaaaaaaaaaaaaaaaaaaaaaaaaaaaaaaaaaaaaaaaaaaaaaaaaaaaaaaaaugcaucccccccccccccccccccccccccccccccaaaggcucuuuucagagccaccagaauu

SEQ ID NO: 18399 - RNA, 1981 nt, Artificial Sequence
  mRNA product Design a-3 comprising derived and/or modified sequence from HRSV(Memphis-37)__AIY60640.1__F_DSCav1_mut7 (opt6)
gggagagggcgcuuggcuugcaaggacccugagcugcggcauugaagcacacccaacccaacucgacugaagucagccucacugaaccggaucugagaaucuucucucucugggcuugccagggcucuccgaaccuagcuagcauccucuucaauuccaacuagaaagcuuaccauggaacuaccaauacucaaaacaaaugcuauaaccacaauacucgcagcaguaacauuauguuucgcaucaucccaaaacauaacagaagaauuuuaucaaucaaccuguucagcaguauccaaaggauaccuaagugcauuaagaaccggaugguacacaucaguaauaaccauagaacuuucaaacauaaaagaaaacaaauguaacggcacagacgcaaaagucaaacucaucaaacaggaacuugacaaauauaaaaacgcaguaaccgaacuacaaaugcuaaugugcucaacaccagcagcaggaucaggaucagcaauugcaucuggaauagcuguaugcaaaguccuacaccuagaaggagaaguaaacaaaaucaaaaacgcauuacucuccacaaacaaagcaguaguaucacuaucaaacggaguuucaguacuaaccuucaaaguauuagaccuaaaaaacuacauagacaaacaacuacuaccuauacuaaacaaacaauccuguucaauaagcaacauugaaacuguaauggaauuucaacaaaaaaacaaccgccuauuagaaauaaccagagaauuuuccguaaaugcaggaguaaccacaccagucucuacauacauguuaaccaacucagaacuauuaucacucauaaaugacaugccuauaacaaacgaccaaaaaaaacuaaugucaaacaacguacaaauaguaagacaacaaucauauuccauaaugugcauaauaaaagaagaaguacuugcauacgugguucaacuaccccuauauggaguuauagacacaccaugcuggaaacuccacacuuccccacuuugcacaacuaacacaaaagaaggaucaaauauaugccuaaccagaacagaccguggaugguacugcgacaacgcuggaucagucuccuucuuuccacaagcagaaaccugcaaagucugcucaaauagagucuucugugacacaaugaacucacucacccuacccucagaaguaaaccuauguaauauagauauauuuaauccaaaauacgacugcaaaauuaugacaaguaaaacagacguaagcucaucagucauaaccagccuaggagcaauaguauccuguuacggcaaaacaaaaugcacagcuucaaacaaaaacaaaggcauaauaaaaacauucucaaacggaugugacuauguaucaaauaaaggaguugacacaguaucaguuggaaacacacuauacuauguaaacaaacaagaaggaaaaucacuauacguuaaaggcgaacccauaaucaauuucuacgacccccuagucuucccauccgaugaauuugacgcaucaauaucccaaguaaaugaaaaaaucaaccaaucccuagcauuuauacgaaaauccgacgaacuacuccauaaugucaacgucgguaaaucaacgacaaacaucaugaucacaacaauaauaauaguaauaauuguaauauuacucuuacucauagcaguaggccuauuucuauauugcaaagccagaucaacaccaguaaccuuauccaaagaccaacuaucuggaauaaacaacauagcauuuuccaacugaggacuagucccuguucccagagcccacuuuuuuuucuuuuuuugaaauaaaauagccugucuuucagaucuaaaaaaaaaaaaaaaaaaaaaaaaaaaaaaaaaaaaaaaaaaaaaaaaaaaaaaaaaaaaaaaaugcaucccccccccccccccccccccccccccccccaaaggcucuuuucagagccaccagaauu

SEQ ID NO: 18400 - RNA, 1981 nt, Artificial Sequence
  mRNA product Design a-3 comprising derived and/or modified sequence from HRSV(Memphis-37)__AIY60640.1__F_DSCav1_mut7 (opt11)
gggagagggcgcuuggcuugcaaggacccugagcugcggcauugaagcacacccaacccaacucgacugaagucagccucacugaaccggaucugagaaucuucucucucugggcuugccagggcucuccgaaccuagcuagcauccucuucaauuccaacuagaaagcuuaccauggaacuccccauacuuaaaacaaacgccauaacaacuauacucgcagccgucacccucuguuucgcauccucucaaaacaucaccgaagaguucuaucaaucaaccugcuccgccgucucaaaaggcuaccucuccgcccuacgcacaggcugguacaccagcgucauuaccauagaacucucgaacaucaaagaaaacaaaugcaacggcaccgacgcaaaagugaaacucaucaaacaagaacucgacaaauacaaaaacgccgucaccgaacuucagaugcucaugugcuccaccccugccgccggcagcggcuccgccauagccuccggcaucgcagucugcaaaguccuccaccucgaaggagaaguaaacaaaaucaaaaaugcucuccucuccacaaacaaagccgucgucucacucuccaauggagucuccguccucaccuucaaaguccucgaccucaaaaacuacauagacaaacaacuacuccccauccucaacaagcaauccugcucuaucuccaacauagaaaccguuauggaguuccaacagaaaaauaaccgccugcuagaaauaacccgagaguucuccgucaacgcaggcgucacuacccccgucagcacauacaugcuaacaaacuccgaacugcucucccuuaucaacgacaugcccaucacaaacgaucagaaaaagcucaugucuaacaacguacaaaucguucggcaacaauccuacuccaucaugugcaucaucaaagaagaagugcucgccuacguaguccaacucccccucuacggagucaucgacacacccugcuggaaacuccacacaucaccccucugcaccaccaacacaaaagaaggguccaacaucugccucacgcgcaccgaccgaggcugguacugcgacaacgccggcuccguauccuucuucccccaagcagaaaccugcaaggucugcuccaaccgcguauucugcgacaccaugaacucgcucacccuccccucagaagucaaccuauguaacaucgacauauucaaucccaaauacgacugcaagauaaugacuuccaaaaccgacguaagcuccucggucaucaccucccucggcgccaucgucuccugcuacggcaaaaccaaaugcaccgccuccaauaagaauaaaggcauaauaaagacauucagcaacggcugcgauuacgucuccaacaaaggugucgacaccgucucagucggcaacacucuauacuacgugaacaaacaagaaggcaaaagccuauacguuaaaggcgaaccaauaaucaauuucuacgacccucuagucuuucccucugacgaguucgaugccagcauaagccaagucaacgaaaagaucaaccaaucacucgccuucauccguaaauccgacgaacugcuccacaaugucaauguaggcaaaucaacaaccaacaucaugaucaccacuauuaucaucgucaucaucguaauccuacuccuacuaaucgccgucggccuauuccucuacugcaaagcccgcucgacccccgucacucucagcaaggaucaacuauccggcaucaacaacaucgccuucuccaacuaaggacuagucccuguucccagagcccacuuuuuuuucuuuuuuugaaauaaaauagccugucuuucagaucuaaaaaaaaaaaaaaaaaaaaaaaaaaaaaaaaaaaaaaaaaaaaaaaaaaaaaaaaaaaaaaaaugcaucccccccccccccccccccccccccccccccaaaggcucuuuucagagccaccagaauu

SEQ ID NO: 18401 - RNA, 1930 nt, Artificial Sequence
  mRNA product Design a-4 comprising derived and/or modified sequence from HRSV(Memphis-37)__AIY60640.1__F_DSCav1_mut7 (opt1)
gggagacuccugucgggcggaaguaggaggaguagaguuuaaaaacaguacucuuuuuccgguucgggacguaguugaagcaacgacaagccggauaaccgcucuugagacaggaagcuuaccauggagcugcccauccucaagaccaacgccaucaccacgauccuggccgcggugacccugugcuucgccagcucccagaacaucaccgaggaguucuaccagagcacgugcuccgccgucagcaagggcuaccucuccgcccugcgcaccgggugguacaccagcgugaucaccaucgagcuguccaacaucaaggagaacaagugcaacggcaccgacgccaaggugaagcucaucaagcaggagcuggacaaguacaagaacgcggucacggagcugcagaugcugaugugcagcaccccggccgccggcuccgggagcgcgaucgccuccggcaucgccgucugcaaggugcugcaccucgagggcgaggugaacaagaucaagaacgcccugcuguccaccaacaaggccgucgugagccucuccaacggggugagcguccugaccuucaaggugcuggaccucaagaacuacaucgacaagcagcugcugcccauccugaacaagcagagcugcuccaucagcaacaucgagaccgucauggaguuccagcagaagaacaaccgccuccuggagaucacgcgggaguucagcgugaacgcgggcgugaccacccccgucuccaccuacaugcugacgaacagcgagcuccugucccugaucaacgacaugccgaucaccaacgaccagaagaagcucaugagcaacaacgugcagaucgugcgccagcaguccuacagcaucaugugcaucaucaaggaggagguccuggccuacguggugcagcugccccucuacggggucaucgacacccccugcuggaagcugcacaccagcccccugugcacgaccaacaccaaggagggcuccaacaucugccucacccggacggaccgcgggugguacugcgacaacgccggcagcguguccuucuucccgcaggccgagaccugcaaggucugcagcaaccggguguucugcgacaccaugaacucccugacccugcccagcgaggugaaccucugcaacaucgacaucuucaaccccaaguacgacugcaagaucaugacguccaagaccgacgucagcuccagcgugaucaccucccugggcgccaucgugagcugcuacgggaagaccaagugcacggcgagcaacaagaacaagggcaucaucaagaccuucuccaacgggugcgacuacgucagcaacaagggcguggacaccguguccgucggcaacacccuguacuacgugaacaagcaggagggcaagagccucuacgugaagggggagcccaucaucaacuucuacgacccgcuggucuuccccuccgacgaguucgacgccagcaucucccaggugaacgagaagaucaaccagagccuggccuucauccggaaguccgacgagcuccugcacaacgugaacgucggcaagagcaccacgaacaucaugaucaccaccaucaucaucgugaucaucgugauccugcugcuccugaucgccgucgggcuguuccucuacugcaaggcccgcuccacccccgugacgcugagcaaggaccagcuguccgggaucaacaacaucgcguucagcaacugaggacuagucccuguucccagagcccacuuuuuuuucuuuuuuugaaauaaaauagccugucuuucagaucuaaaaaaaaaaaaaaaaaaaaaaaaaaaaaaaaaaaaaaaaaaaaaaaaaaaaaaaaaaaaaaaaugcaucccccccccccccccccccccccccccccccaaaggcucuuuucagagccaccagaauu

SEQ ID NO: 18402 - RNA, 1930 nt, Artificial Sequence
  mRNA product Design a-4 comprising derived and/or modified sequence from HRSV(Memphis-37)__AIY60640.1__F_DSCav1_mut7 (opt1)
gggagacuccugucgggcggaaguaggaggaguagaguuuaaaaacaguacucuuuuuccgguucgggacguaguugaagcaacgacaagccggauaaccgcucuugagacaggaagcuuaccauggagcugcccauccucaagaccaacgccaucaccacgauccuggccgcggugacccugugcuucgccagcucccagaacaucaccgaggaguucuaccagagcacgugcuccgccgucagcaagggcuaccucuccgcccugcgcaccgggugguacaccagcgugaucaccaucgagcuguccaacaucaaggagaacaagugcaacggcaccgacgccaaggugaagcucaucaagcaggagcuggacaaguacaagaacgcggucacggagcugcagaugcucaugugcagcaccccggccgccggguccggcagcgccaucgcguccgggaucgccgugugcaaggugcugcaccuggagggcgaggucaacaagaucaagaacgcccuccugagcaccaacaaggccguggugucccugagcaacggcgucuccgugcucaccuucaaggugcuggaccugaagaacuacaucgacaagcagcuccugcccauccugaacaagcagagcugcuccaucagcaacaucgagacggucauggaguuccagcagaagaacaaccggcuccuggagaucacccgcgaguucuccgugaacgccggggugaccacccccgucagcacguacaugcugaccaacagcgagcuccugucccugaucaacgacaugcccaucaccaacgaccagaagaagcucaugagcaacaacgugcagaucgugcggcagcaguccuacagcaucaugugcaucaucaaggaggagguccuggcguacguggugcagcugccgcucuacggcgucaucgacacccccugcuggaagcugcacacgagcccccugugcaccaccaacaccaaggaggggagcaacaucugccucacgcgcaccgaccggggcugguacugcgacaacgccggguccgugagcuucuucccccaggccgagaccugcaaggugugcuccaaccgcgucuucugcgacaccaugaacagccugacgcugccguccgaggugaaccucugcaacaucgacaucuucaaccccaaguacgacugcaagaucaugaccagcaagaccgacgucuccagcuccgugaucaccagccugggcgccaucguguccugcuacggcaagacgaagugcaccgccagcaacaagaacaaggggaucaucaagaccuucuccaacggcugcgacuacgucagcaacaaggggguggacaccgugagcgucggcaacacgcuguacuacgugaacaagcaggagggcaagucccucuacgugaagggggagcccaucaucaacuucuacgacccccuggucuucccgagcgacgaguucgacgcguccaucagccaggugaacgagaagaucaaccagucccuggccuucauccggaaguccgacgagcuccugcacaacgugaacgucggcaaguccaccaccaacaucaugaucaccaccaucaucaucgugaucaucgugauccugcuccugcugaucgccgucggccucuuccuguacugcaaggcccgcagcacgcccgugacccuguccaaggaccagcugagcgggaucaacaacaucgccuucuccaacugaggacuagucccuguucccagagcccacuuuuuuuucuuuuuuugaaauaaaauagccugucuuucagaucuaaaaaaaaaaaaaaaaaaaaaaaaaaaaaaaaaaaaaaaaaaaaaaaaaaaaaaaaaaaaaaaaugcaucccccccccccccccccccccccccccccccaaaggcucuuuucagagccaccagaauu

SEQ ID NO: 18403 - RNA, 1930 nt, Artificial Sequence
  mRNA product Design a-4 comprising derived and/or modified sequence from HRSV(Memphis-37)__AIY60640.1__F_DSCav1_mut7 (opt2)
gggagacuccugucgggcggaaguaggaggaguagaguuuaaaaacaguacucuuuuuccgguucgggacguaguugaagcaacgacaagccggauaaccgcucuugagacaggaagcuuaccauggagcuccccauccucaagaccaacgccaucaccaccauccucgccgccgucacccucugcuucgccuccucccagaacaucaccgaggaguucuaccaguccaccugcuccgccgucuccaagggcuaccucuccgcccuccgcaccggcugguacaccuccgucaucaccaucgagcucuccaacaucaaggagaacaagugcaacggcaccgacgccaaggucaagcucaucaagcaggagcucgacaaguacaagaacgccgucaccgagcuccagaugcucaugugcuccacccccgccgccggcuccggcuccgccaucgccuccggcaucgccgucugcaagguccuccaccucgagggcgaggucaacaagaucaagaacgcccuccucuccaccaacaaggccgucgucucccucuccaacggcgucuccguccucaccuucaagguccucgaccucaagaacuacaucgacaagcagcuccuccccauccucaacaagcaguccugcuccaucuccaacaucgagaccgucauggaguuccagcagaagaacaaccgccuccucgagaucacccgcgaguucuccgucaacgccggcgucaccacccccgucuccaccuacaugcucaccaacuccgagcuccucucccucaucaacgacaugcccaucaccaacgaccagaagaagcucauguccaacaacguccagaucguccgccagcaguccuacuccaucaugugcaucaucaaggaggagguccucgccuacgucguccagcucccccucuacggcgucaucgacacccccugcuggaagcuccacaccuccccccucugcaccaccaacaccaaggagggcuccaacaucugccucacccgcaccgaccgcggcugguacugcgacaacgccggcuccgucuccuucuucccccaggccgagaccugcaaggucugcuccaaccgcgucuucugcgacaccaugaacucccucacccuccccuccgaggucaaccucugcaacaucgacaucuucaaccccaaguacgacugcaagaucaugaccuccaagaccgacgucuccuccuccgucaucaccucccucggcgccaucgucuccugcuacggcaagaccaagugcaccgccuccaacaagaacaagggcaucaucaagaccuucuccaacggcugcgacuacgucuccaacaagggcgucgacaccgucuccgucggcaacacccucuacuacgucaacaagcaggagggcaagucccucuacgucaagggcgagcccaucaucaacuucuacgacccccucgucuuccccuccgacgaguucgacgccuccaucucccaggucaacgagaagaucaaccagucccucgccuucauccgcaaguccgacgagcuccuccacaacgucaacgucggcaaguccaccaccaacaucaugaucaccaccaucaucaucgucaucaucgucauccuccuccuccucaucgccgucggccucuuccucuacugcaaggcccgcuccacccccgucacccucuccaaggaccagcucuccggcaucaacaacaucgccuucuccaacugaggacuagucccuguucccagagcccacuuuuuuuucuuuuuuugaaauaaaauagccugucuuucagaucuaaaaaaaaaaaaaaaaaaaaaaaaaaaaaaaaaaaaaaaaaaaaaaaaaaaaaaaaaaaaaaaaugcaucccccccccccccccccccccccccccccccaaaggcucuuuucagagccaccagaauu

SEQ ID NO: 18404 - RNA, 1930 nt, Artificial Sequence
  mRNA product Design a-4 comprising derived and/or modified sequence from HRSV(Memphis-37)__AIY60640.1__F_DSCav1_mut7 (opt3)
gggagacuccugucgggcggaaguaggaggaguagaguuuaaaaacaguacucuuuuuccgguucgggacguaguugaagcaacgacaagccggauaaccgcucuugagacaggaagcuuaccauggagcugcccauccucaagaccaacgccauuacaacuauacuugcugcagugacgcugugcuucgccagcucccagaauaucaccgaagaguuuuaccaaucuacauguucagcggucaguaaaggcuauuugagcgcuuuaagaacugggugguacaccuccguuauuacaaucgaacugucuaacauuaaggagaauaaaugcaacggaaccgacgccaaggugaaacuaaucaagcaggaacucgauaaguauaaaaaugcaguaacugagcugcagaugcuuauguguucgaccccugccgcugguucaggcagcgcaauagccagugggaucgcugugugcaagguccugcacuuggagggagaagugaacaaaauuaagaaugcccuccuguccacaaacaaagcgguugugucucugagcaauggcgucuccgugcucacguucaagguauuagaccugaagaacuacaucgauaaacagcuuuugccaauucugaauaagcaaucauguaguaucagcaacauagagacuguuauggaauuucagcagaaaaauaacaggcuacucgagauuacccgggaguucucugugaaugccggugucacaacuccgguguccaccuauaugcugacaaacucagaacuucugagcuugaucaacgacaugcccauuaccaaugaucagaagaaacucaugaguaacaaugugcaaaucguccgccagcagucuuacuccaucaugugcauuauaaaggaggaaguucuggcauaugugguacaguuaccucuguacggggugaucgacacgccauguuggaaacuccauacuagcccccuuugcacaaccaacacuaaggagggaucgaauauuugucugacacgaaccgaucguggcugguacugcgacaacgcuggcucugucuccuuuuucccucaagccgaaacguguaaggugugcucaaauagaguguuuugcgauaccaugaacaguuugacacuaccaagcgagguuaaucuguguaacaucgacauauucaaucccaaauaugauugcaagauuaugacuuccaaaaccgacgucucuagcucagugaucacaagucucggggcaaucguauccuguuacggaaagacuaaaugcaccgcuagcaacaagaauaaggguauuaucaaaacauuuucuaacggcugugauuauguuucaaauaaggggguggacaccgucagugugggaaacacucuguacuaugucaacaaacaggagggcaagagccuuuacgugaaaggugaaccuauuauaaauuucuaugacccacugguuuuuccguccgaugaguucgacgccucuaucagccaggugaacgaaaagauuaaucaaucguuggcguuuaucaggaaguccgaugagcuccugcacaacguaaaugucgggaaaucaacgacaaacaucaugauuaccacuauaaucauugugaucauuguuaucuuacugcuacucauagccgugggacuguuccuuuacugcaaggcacggaguacccccgucacauugucuaaagaccagcugagcggcaucaauaacauugcuuucuccaauugaggacuagucccuguucccagagcccacuuuuuuuucuuuuuuugaaauaaaauagccugucuuucagaucuaaaaaaaaaaaaaaaaaaaaaaaaaaaaaaaaaaaaaaaaaaaaaaaaaaaaaaaaaaaaaaaaugcaucccccccccccccccccccccccccccccccaaaggcucuuuucagagccaccagaauu

SEQ ID NO: 18405 - RNA, 1930 nt, Artificial Sequence
  mRNA product Design a-4 comprising derived and/or modified sequence from HRSV(Memphis-37)__AIY60640.1__F_DSCav1_mut7 (opt4)
gggagacuccugucgggcggaaguaggaggaguagaguuuaaaaacaguacucuuuuuccgguucgggacguaguugaagcaacgacaagccggauaaccgcucuugagacaggaagcuuaccauggagcugcccauccugaagaccaacgccaucaccaccauccuggccgccgugacccugugcuucgccagcagccagaacaucaccgaggaguucuaccagagcaccugcagcgccgugagcaagggcuaccugagcgcccugagaaccggcugguacaccagcgugaucaccaucgagcugagcaacaucaaggagaacaagugcaacggcaccgacgccaaggugaagcugaucaagcaggagcuggacaaguacaagaacgccgugaccgagcugcagaugcugaugugcagcacccccgccgccggcagcggcagcgccaucgccagcggcaucgccgugugcaaggugcugcaccuggagggcgaggugaacaagaucaagaacgcccugcugagcaccaacaaggccguggugagccugagcaacggcgugagcgugcugaccuucaaggugcuggaccugaagaacuacaucgacaagcagcugcugcccauccugaacaagcagagcugcagcaucagcaacaucgagaccgugauggaguuccagcagaagaacaacagacugcuggagaucaccagagaguucagcgugaacgccggcgugaccacccccgugagcaccuacaugcugaccaacagcgagcugcugagccugaucaacgacaugcccaucaccaacgaccagaagaagcugaugagcaacaacgugcagaucgugagacagcagagcuacagcaucaugugcaucaucaaggaggaggugcuggccuacguggugcagcugccccuguacggcgugaucgacacccccugcuggaagcugcacaccagcccccugugcaccaccaacaccaaggagggcagcaacaucugccugaccagaaccgacagaggcugguacugcgacaacgccggcagcgugagcuucuucccccaggccgagaccugcaaggugugcagcaacagaguguucugcgacaccaugaacagccugacccugcccagcgaggugaaccugugcaacaucgacaucuucaaccccaaguacgacugcaagaucaugaccagcaagaccgacgugagcagcagcgugaucaccagccugggcgccaucgugagcugcuacggcaagaccaagugcaccgccagcaacaagaacaagggcaucaucaagaccuucagcaacggcugcgacuacgugagcaacaagggcguggacaccgugagcgugggcaacacccuguacuacgugaacaagcaggagggcaagagccuguacgugaagggcgagcccaucaucaacuucuacgacccccugguguuccccagcgacgaguucgacgccagcaucagccaggugaacgagaagaucaaccagagccuggccuucaucagaaagagcgacgagcugcugcacaacgugaacgugggcaagagcaccaccaacaucaugaucaccaccaucaucaucgugaucaucgugauccugcugcugcugaucgccgugggccuguuccuguacugcaaggccagaagcacccccgugacccugagcaaggaccagcugagcggcaucaacaacaucgccuucagcaacugaggacuagucccuguucccagagcccacuuuuuuuucuuuuuuugaaauaaaauagccugucuuucagaucuaaaaaaaaaaaaaaaaaaaaaaaaaaaaaaaaaaaaaaaaaaaaaaaaaaaaaaaaaaaaaaaaugcaucccccccccccccccccccccccccccccccaaaggcucuuuucagagccaccagaauu

SEQ ID NO: 18406 - RNA, 1930 nt, Artificial Sequence
  mRNA product Design a-4 comprising derived and/or modified sequence from HRSV(Memphis-37)__AIY60640.1__F_DSCav1_mut7 (opt5)
gggagacuccugucgggcggaaguaggaggaguagaguuuaaaaacaguacucuuuuuccgguucgggacguaguugaagcaacgacaagccggauaaccgcucuugagacaggaagcuuaccauggagcugcccauccucaagaccaacgccauuacaacgauccuggcugccgugacccuuugcuucgcgagcucccagaauauuacagaagaguuuuaccaaucuaccuguagcgcugucuccaaaggcuaucugucugcccucagaacagggugguacaccagcguuaucacaauugaacuguccaacaucaaggagaauaaaugcaacggaaccgacgccaaggugaaacuuaucaagcaggaacuggauaaguauaaaaaugcugugacggagcuccagaugcugauguguucuaccccugccgcuggcagcggguccgccauugcgagcggaaucgccgucugcaaggugcugcaccucgagggcgaaguuaacaaaauuaagaaugcucugcuuucuacaaacaaagccguggucucccugagcaauggggugucuguucucaccuucaaggugcuggaccuuaagaacuacaucgauaaacagcugcucccgauucugaauaagcaauccuguagcaucucuaacauugagacagucauggaauuucagcagaaaaauaaccggcugcucgagaucacccgcgaguucuccgugaaugcuggagugacgacacccgucagcaccuauaugcugacaaacuccgaacuucugucucucaucaacgacaugccuauuaccaaugaucagaagaaacugaugagcaacaauguucaaaucgugagacagcaguccuacagcauuaugugcaucauuaaggaggaagugcuugccuaugucgugcagcugccccucuacggcguuaucgacaccccuuguuggaaacugcauacaucuccccugugcacgaccaacacaaaggagggcuccaauaucugucucacccggacagaucgcgggugguacugcgacaacgcgggaagcgugagcuuuuucccucaagccgaaaccuguaaggucugcucuaauagaguguuuugcgauacgaugaacucccugacacuuccgucugagguuaaucuguguaacauugacaucuucaaucccaaauaugauugcaagauuaugaccagcaaaaccgacguguccagcucugucaucacaucccucggcgcuauugugagcuguuacgggaagaccaaaugcacagccucuaacaagaauaagggaaucaucaaaacguuuuccaacggcugugauuaugucagcaauaaggggguggacaccguuuccgugggaaacacacuguacuaugucaacaaacaggagggcaagucucuuuacgugaaaggcgaaccuauuaucaauuucuaugacccccugguuuuuccuagcgaugaguucgacgcuuccauuucucaggugaacgaaaagaucaaucaaagccucgccuuuauucggaaguccgaugagcugcugcacaacgucaauguggggaaaagcaccacaaacaucaugauuaccacgaucaucauugugaucauuguuauccuccugcuucugauugccgucggacucuuccuguacugcaaggcucgcucuacccccgugacacuguccaaagaccagcuuagcggcaucaauaacaucgcguucucuaauugaggacuagucccuguucccagagcccacuuuuuuuucuuuuuuugaaauaaaauagccugucuuucagaucuaaaaaaaaaaaaaaaaaaaaaaaaaaaaaaaaaaaaaaaaaaaaaaaaaaaaaaaaaaaaaaaaugcaucccccccccccccccccccccccccccccccaaaggcucuuuucagagccaccagaauu

SEQ ID NO: 18407 - RNA, 1930 nt, Artificial Sequence
  mRNA product Design a-4 comprising derived and/or modified sequence from HRSV(Memphis-37)__AIY60640.1__F_DSCav1_mut7 (opt6)
gggagacuccugucgggcggaaguaggaggaguagaguuuaaaaacaguacucuuuuuccgguucgggacguaguugaagcaacgacaagccggauaaccgcucuugagacaggaagcuuaccauggaacuaccaauacucaaaacaaaugcuauaaccacaauacucgcagcaguaacauuauguuucgcaucaucccaaaacauaacagaagaauuuuaucaaucaaccuguucagcaguauccaaaggauaccuaagugcauuaagaaccggaugguacacaucaguaauaaccauagaacuuucaaacauaaaagaaaacaaauguaacggcacagacgcaaaagucaaacucaucaaacaggaacuugacaaauauaaaaacgcaguaaccgaacuacaaaugcuaaugugcucaacaccagcagcaggaucaggaucagcaauugcaucuggaauagcuguaugcaaaguccuacaccuagaaggagaaguaaacaaaaucaaaaacgcauuacucuccacaaacaaagcaguaguaucacuaucaaacggaguuucaguacuaaccuucaaaguauuagaccuaaaaaacuacauagacaaacaacuacuaccuauacuaaacaaacaauccuguucaauaagcaacauugaaacuguaauggaauuucaacaaaaaaacaaccgccuauuagaaauaaccagagaauuuuccguaaaugcaggaguaaccacaccagucucuacauacauguuaaccaacucagaacuauuaucacucauaaaugacaugccuauaacaaacgaccaaaaaaaacuaaugucaaacaacguacaaauaguaagacaacaaucauauuccauaaugugcauaauaaaagaagaaguacuugcauacgugguucaacuaccccuauauggaguuauagacacaccaugcuggaaacuccacacuuccccacuuugcacaacuaacacaaaagaaggaucaaauauaugccuaaccagaacagaccguggaugguacugcgacaacgcuggaucagucuccuucuuuccacaagcagaaaccugcaaagucugcucaaauagagucuucugugacacaaugaacucacucacccuacccucagaaguaaaccuauguaauauagauauauuuaauccaaaauacgacugcaaaauuaugacaaguaaaacagacguaagcucaucagucauaaccagccuaggagcaauaguauccuguuacggcaaaacaaaaugcacagcuucaaacaaaaacaaaggcauaauaaaaacauucucaaacggaugugacuauguaucaaauaaaggaguugacacaguaucaguuggaaacacacuauacuauguaaacaaacaagaaggaaaaucacuauacguuaaaggcgaacccauaaucaauuucuacgacccccuagucuucccauccgaugaauuugacgcaucaauaucccaaguaaaugaaaaaaucaaccaaucccuagcauuuauacgaaaauccgacgaacuacuccauaaugucaacgucgguaaaucaacgacaaacaucaugaucacaacaauaauaauaguaauaauuguaauauuacucuuacucauagcaguaggccuauuucuauauugcaaagccagaucaacaccaguaaccuuauccaaagaccaacuaucuggaauaaacaacauagcauuuuccaacugaggacuagucccuguucccagagcccacuuuuuuuucuuuuuuugaaauaaaauagccugucuuucagaucuaaaaaaaaaaaaaaaaaaaaaaaaaaaaaaaaaaaaaaaaaaaaaaaaaaaaaaaaaaaaaaaaugcaucccccccccccccccccccccccccccccccaaaggcucuuuucagagccaccagaauu

SEQ ID NO: 18408 - RNA, 1930 nt, Artificial Sequence
  mRNA product Design a-4 comprising derived and/or modified sequence from HRSV(Memphis-37)__AIY60640.1__F_DSCav1_mut7 (opt11)
gggagacuccugucgggcggaaguaggaggaguagaguuuaaaaacaguacucuuuuuccgguucgggacguaguugaagcaacgacaagccggauaaccgcucuugagacaggaagcuuaccauggaacuccccauacuuaaaacaaacgccauaacaacuauacucgcagccgucacccucuguuucgcauccucucaaaacaucaccgaagaguucuaucaaucaaccugcuccgccgucucaaaaggcuaccucuccgcccuacgcacaggcugguacaccagcgucauuaccauagaacucucgaacaucaaagaaaacaaaugcaacggcaccgacgcaaaagugaaacucaucaaacaagaacucgacaaauacaaaaacgccgucaccgaacuucagaugcucaugugcuccaccccugccgccggcagcggcuccgccauagccuccggcaucgcagucugcaaaguccuccaccucgaaggagaaguaaacaaaaucaaaaaugcucuccucuccacaaacaaagccgucgucucacucuccaauggagucuccguccucaccuucaaaguccucgaccucaaaaacuacauagacaaacaacuacuccccauccucaacaagcaauccugcucuaucuccaacauagaaaccguuauggaguuccaacagaaaaauaaccgccugcuagaaauaacccgagaguucuccgucaacgcaggcgucacuacccccgucagcacauacaugcuaacaaacuccgaacugcucucccuuaucaacgacaugcccaucacaaacgaucagaaaaagcucaugucuaacaacguacaaaucguucggcaacaauccuacuccaucaugugcaucaucaaagaagaagugcucgccuacguaguccaacucccccucuacggagucaucgacacacccugcuggaaacuccacacaucaccccucugcaccaccaacacaaaagaaggguccaacaucugccucacgcgcaccgaccgaggcugguacugcgacaacgccggcuccguauccuucuucccccaagcagaaaccugcaaggucugcuccaaccgcguauucugcgacaccaugaacucgcucacccuccccucagaagucaaccuauguaacaucgacauauucaaucccaaauacgacugcaagauaaugacuuccaaaaccgacguaagcuccucggucaucaccucccucggcgccaucgucuccugcuacggcaaaaccaaaugcaccgccuccaauaagaauaaaggcauaauaaagacauucagcaacggcugcgauuacgucuccaacaaaggugucgacaccgucucagucggcaacacucuauacuacgugaacaaacaagaaggcaaaagccuauacguuaaaggcgaaccaauaaucaauuucuacgacccucuagucuuucccucugacgaguucgaugccagcauaagccaagucaacgaaaagaucaaccaaucacucgccuucauccguaaauccgacgaacugcuccacaaugucaauguaggcaaaucaacaaccaacaucaugaucaccacuauuaucaucgucaucaucguaauccuacuccuacuaaucgccgucggccuauuccucuacugcaaagcccgcucgacccccgucacucucagcaaggaucaacuauccggcaucaacaacaucgccuucuccaacuaaggacuagucccuguucccagagcccacuuuuuuuucuuuuuuugaaauaaaauagccugucuuucagaucuaaaaaaaaaaaaaaaaaaaaaaaaaaaaaaaaaaaaaaaaaaaaaaaaaaaaaaaaaaaaaaaaugcaucccccccccccccccccccccccccccccccaaaggcucuuuucagagccaccagaauu

SEQ ID NO: 18409 - RNA, 1876 nt, Artificial Sequence
  mRNA product Design a-5 comprising derived and/or modified sequence from HRSV(Memphis-37)__AIY60640.1__F_DSCav1_mut7 (opt1)
gggagacuuucccauucuguagcagaauuugguguugccuguggucuuggucccgcggagaagcuuaccauggagcugcccauccucaagaccaacgccaucaccacgauccuggccgcggugacccugugcuucgccagcucccagaacaucaccgaggaguucuaccagagcacgugcuccgccgucagcaagggcuaccucuccgcccugcgcaccgggugguacaccagcgugaucaccaucgagcuguccaacaucaaggagaacaagugcaacggcaccgacgccaaggugaagcucaucaagcaggagcuggacaaguacaagaacgcggucacggagcugcagaugcugaugugcagcaccccggccgccggcuccgggagcgcgaucgccuccggcaucgccgucugcaaggugcugcaccucgagggcgaggugaacaagaucaagaacgcccugcuguccaccaacaaggccgucgugagccucuccaacggggugagcguccugaccuucaaggugcuggaccucaagaacuacaucgacaagcagcugcugcccauccugaacaagcagagcugcuccaucagcaacaucgagaccgucauggaguuccagcagaagaacaaccgccuccuggagaucacgcgggaguucagcgugaacgcgggcgugaccacccccgucuccaccuacaugcugacgaacagcgagcuccugucccugaucaacgacaugccgaucaccaacgaccagaagaagcucaugagcaacaacgugcagaucgugcgccagcaguccuacagcaucaugugcaucaucaaggaggagguccuggccuacguggugcagcugccccucuacggggucaucgacacccccugcuggaagcugcacaccagcccccugugcacgaccaacaccaaggagggcuccaacaucugccucacccggacggaccgcgggugguacugcgacaacgccggcagcguguccuucuucccgcaggccgagaccugcaaggucugcagcaaccggguguucugcgacaccaugaacucccugacccugcccagcgaggugaaccucugcaacaucgacaucuucaaccccaaguacgacugcaagaucaugacguccaagaccgacgucagcuccagcgugaucaccucccugggcgccaucgugagcugcuacgggaagaccaagugcacggcgagcaacaagaacaagggcaucaucaagaccuucuccaacgggugcgacuacgucagcaacaagggcguggacaccguguccgucggcaacacccuguacuacgugaacaagcaggagggcaagagccucuacgugaagggggagcccaucaucaacuucuacgacccgcuggucuuccccuccgacgaguucgacgccagcaucucccaggugaacgagaagaucaaccagagccuggccuucauccggaaguccgacgagcuccugcacaacgugaacgucggcaagagcaccacgaacaucaugaucaccaccaucaucaucgugaucaucgugauccugcugcuccugaucgccgucgggcuguuccucuacugcaaggcccgcuccacccccgugacgcugagcaaggaccagcuguccgggaucaacaacaucgcguucagcaacugaggacuagucccuguucccagagcccacuuuuuuuucuuuuuuugaaauaaaauagccugucuuucagaucuaaaaaaaaaaaaaaaaaaaaaaaaaaaaaaaaaaaaaaaaaaaaaaaaaaaaaaaaaaaaaaaaugcaucccccccccccccccccccccccccccccccaaaggcucuuuucagagccaccagaauu

SEQ ID NO: 18410 - RNA, 1876 nt, Artificial Sequence
  mRNA product Design a-5 comprising derived and/or modified sequence from HRSV(Memphis-37)__AIY60640.1__F_DSCav1_mut7 (opt1)
gggagacuuucccauucuguagcagaauuugguguugccuguggucuuggucccgcggagaagcuuaccauggagcugcccauccucaagaccaacgccaucaccacgauccuggccgcggugacccugugcuucgccagcucccagaacaucaccgaggaguucuaccagagcacgugcuccgccgucagcaagggcuaccucuccgcccugcgcaccgggugguacaccagcgugaucaccaucgagcuguccaacaucaaggagaacaagugcaacggcaccgacgccaaggugaagcucaucaagcaggagcuggacaaguacaagaacgcggucacggagcugcagaugcucaugugcagcaccccggccgccggguccggcagcgccaucgcguccgggaucgccgugugcaaggugcugcaccuggagggcgaggucaacaagaucaagaacgcccuccugagcaccaacaaggccguggugucccugagcaacggcgucuccgugcucaccuucaaggugcuggaccugaagaacuacaucgacaagcagcuccugcccauccugaacaagcagagcugcuccaucagcaacaucgagacggucauggaguuccagcagaagaacaaccggcuccuggagaucacccgcgaguucuccgugaacgccggggugaccacccccgucagcacguacaugcugaccaacagcgagcuccugucccugaucaacgacaugcccaucaccaacgaccagaagaagcucaugagcaacaacgugcagaucgugcggcagcaguccuacagcaucaugugcaucaucaaggaggagguccuggcguacguggugcagcugccgcucuacggcgucaucgacacccccugcuggaagcugcacacgagcccccugugcaccaccaacaccaaggaggggagcaacaucugccucacgcgcaccgaccggggcugguacugcgacaacgccggguccgugagcuucuucccccaggccgagaccugcaaggugugcuccaaccgcgucuucugcgacaccaugaacagccugacgcugccguccgaggugaaccucugcaacaucgacaucuucaaccccaaguacgacugcaagaucaugaccagcaagaccgacgucuccagcuccgugaucaccagccugggcgccaucguguccugcuacggcaagacgaagugcaccgccagcaacaagaacaaggggaucaucaagaccuucuccaacggcugcgacuacgucagcaacaaggggguggacaccgugagcgucggcaacacgcuguacuacgugaacaagcaggagggcaagucccucuacgugaagggggagcccaucaucaacuucuacgacccccuggucuucccgagcgacgaguucgacgcguccaucagccaggugaacgagaagaucaaccagucccuggccuucauccggaaguccgacgagcuccugcacaacgugaacgucggcaaguccaccaccaacaucaugaucaccaccaucaucaucgugaucaucgugauccugcuccugcugaucgccgucggccucuuccuguacugcaaggcccgcagcacgcccgugacccuguccaaggaccagcugagcgggaucaacaacaucgccuucuccaacugaggacuagucccuguucccagagcccacuuuuuuuucuuuuuuugaaauaaaauagccugucuuucagaucuaaaaaaaaaaaaaaaaaaaaaaaaaaaaaaaaaaaaaaaaaaaaaaaaaaaaaaaaaaaaaaaaugcaucccccccccccccccccccccccccccccccaaaggcucuuuucagagccaccagaauu

SEQ ID NO: 18411 - RNA, 1876 nt, Artificial Sequence
  mRNA product Design a-5 comprising derived and/or modified sequence from HRSV(Memphis-37)__AIY60640.1__F_DSCav1_mut7 (opt2)
gggagacuuucccauucuguagcagaauuugguguugccuguggucuuggucccgcggagaagcuuaccauggagcuccccauccucaagaccaacgccaucaccaccauccucgccgccgucacccucugcuucgccuccucccagaacaucaccgaggaguucuaccaguccaccugcuccgccgucuccaagggcuaccucuccgcccuccgcaccggcugguacaccuccgucaucaccaucgagcucuccaacaucaaggagaacaagugcaacggcaccgacgccaaggucaagcucaucaagcaggagcucgacaaguacaagaacgccgucaccgagcuccagaugcucaugugcuccacccccgccgccggcuccggcuccgccaucgccuccggcaucgccgucugcaagguccuccaccucgagggcgaggucaacaagaucaagaacgcccuccucuccaccaacaaggccgucgucucccucuccaacggcgucuccguccucaccuucaagguccucgaccucaagaacuacaucgacaagcagcuccuccccauccucaacaagcaguccugcuccaucuccaacaucgagaccgucauggaguuccagcagaagaacaaccgccuccucgagaucacccgcgaguucuccgucaacgccggcgucaccacccccgucuccaccuacaugcucaccaacuccgagcuccucucccucaucaacgacaugcccaucaccaacgaccagaagaagcucauguccaacaacguccagaucguccgccagcaguccuacuccaucaugugcaucaucaaggaggagguccucgccuacgucguccagcucccccucuacggcgucaucgacacccccugcuggaagcuccacaccuccccccucugcaccaccaacaccaaggagggcuccaacaucugccucacccgcaccgaccgcggcugguacugcgacaacgccggcuccgucuccuucuucccccaggccgagaccugcaaggucugcuccaaccgcgucuucugcgacaccaugaacucccucacccuccccuccgaggucaaccucugcaacaucgacaucuucaaccccaaguacgacugcaagaucaugaccuccaagaccgacgucuccuccuccgucaucaccucccucggcgccaucgucuccugcuacggcaagaccaagugcaccgccuccaacaagaacaagggcaucaucaagaccuucuccaacggcugcgacuacgucuccaacaagggcgucgacaccgucuccgucggcaacacccucuacuacgucaacaagcaggagggcaagucccucuacgucaagggcgagcccaucaucaacuucuacgacccccucgucuuccccuccgacgaguucgacgccuccaucucccaggucaacgagaagaucaaccagucccucgccuucauccgcaaguccgacgagcuccuccacaacgucaacgucggcaaguccaccaccaacaucaugaucaccaccaucaucaucgucaucaucgucauccuccuccuccucaucgccgucggccucuuccucuacugcaaggcccgcuccacccccgucacccucuccaaggaccagcucuccggcaucaacaacaucgccuucuccaacugaggacuagucccuguucccagagcccacuuuuuuuucuuuuuuugaaauaaaauagccugucuuucagaucuaaaaaaaaaaaaaaaaaaaaaaaaaaaaaaaaaaaaaaaaaaaaaaaaaaaaaaaaaaaaaaaaugcaucccccccccccccccccccccccccccccccaaaggcucuuuucagagccaccagaauu

SEQ ID NO: 18412 - RNA, 1876 nt, Artificial Sequence
  mRNA product Design a-5 comprising derived and/or modified sequence from HRSV(Memphis-37)__AIY60640.1__F_DSCav1_mut7 (opt3)
gggagacuuucccauucuguagcagaauuugguguugccuguggucuuggucccgcggagaagcuuaccauggagcugcccauccucaagaccaacgccauuacaacuauacuugcugcagugacgcugugcuucgccagcucccagaauaucaccgaagaguuuuaccaaucuacauguucagcggucaguaaaggcuauuugagcgcuuuaagaacugggugguacaccuccguuauuacaaucgaacugucuaacauuaaggagaauaaaugcaacggaaccgacgccaaggugaaacuaaucaagcaggaacucgauaaguauaaaaaugcaguaacugagcugcagaugcuuauguguucgaccccugccgcugguucaggcagcgcaauagccagugggaucgcugugugcaagguccugcacuuggagggagaagugaacaaaauuaagaaugcccuccuguccacaaacaaagcgguugugucucugagcaauggcgucuccgugcucacguucaagguauuagaccugaagaacuacaucgauaaacagcuuuugccaauucugaauaagcaaucauguaguaucagcaacauagagacuguuauggaauuucagcagaaaaauaacaggcuacucgagauuacccgggaguucucugugaaugccggugucacaacuccgguguccaccuauaugcugacaaacucagaacuucugagcuugaucaacgacaugcccauuaccaaugaucagaagaaacucaugaguaacaaugugcaaaucguccgccagcagucuuacuccaucaugugcauuauaaaggaggaaguucuggcauaugugguacaguuaccucuguacggggugaucgacacgccauguuggaaacuccauacuagcccccuuugcacaaccaacacuaaggagggaucgaauauuugucugacacgaaccgaucguggcugguacugcgacaacgcuggcucugucuccuuuuucccucaagccgaaacguguaaggugugcucaaauagaguguuuugcgauaccaugaacaguuugacacuaccaagcgagguuaaucuguguaacaucgacauauucaaucccaaauaugauugcaagauuaugacuuccaaaaccgacgucucuagcucagugaucacaagucucggggcaaucguauccuguuacggaaagacuaaaugcaccgcuagcaacaagaauaaggguauuaucaaaacauuuucuaacggcugugauuauguuucaaauaaggggguggacaccgucagugugggaaacacucuguacuaugucaacaaacaggagggcaagagccuuuacgugaaaggugaaccuauuauaaauuucuaugacccacugguuuuuccguccgaugaguucgacgccucuaucagccaggugaacgaaaagauuaaucaaucguuggcguuuaucaggaaguccgaugagcuccugcacaacguaaaugucgggaaaucaacgacaaacaucaugauuaccacuauaaucauugugaucauuguuaucuuacugcuacucauagccgugggacuguuccuuuacugcaaggcacggaguacccccgucacauugucuaaagaccagcugagcggcaucaauaacauugcuuucuccaauugaggacuagucccuguucccagagcccacuuuuuuuucuuuuuuugaaauaaaauagccugucuuucagaucuaaaaaaaaaaaaaaaaaaaaaaaaaaaaaaaaaaaaaaaaaaaaaaaaaaaaaaaaaaaaaaaaugcaucccccccccccccccccccccccccccccccaaaggcucuuuucagagccaccagaauu

SEQ ID NO: 18413 - RNA, 1876 nt, Artificial Sequence
  mRNA product Design a-5 comprising derived and/or modified sequence from HRSV(Memphis-37)__AIY60640.1__F_DSCav1_mut7 (opt4)
gggagacuuucccauucuguagcagaauuugguguugccuguggucuuggucccgcggagaagcuuaccauggagcugcccauccugaagaccaacgccaucaccaccauccuggccgccgugacccugugcuucgccagcagccagaacaucaccgaggaguucuaccagagcaccugcagcgccgugagcaagggcuaccugagcgcccugagaaccggcugguacaccagcgugaucaccaucgagcugagcaacaucaaggagaacaagugcaacggcaccgacgccaaggugaagcugaucaagcaggagcuggacaaguacaagaacgccgugaccgagcugcagaugcugaugugcagcacccccgccgccggcagcggcagcgccaucgccagcggcaucgccgugugcaaggugcugcaccuggagggcgaggugaacaagaucaagaacgcccugcugagcaccaacaaggccguggugagccugagcaacggcgugagcgugcugaccuucaaggugcuggaccugaagaacuacaucgacaagcagcugcugcccauccugaacaagcagagcugcagcaucagcaacaucgagaccgugauggaguuccagcagaagaacaacagacugcuggagaucaccagagaguucagcgugaacgccggcgugaccacccccgugagcaccuacaugcugaccaacagcgagcugcugagccugaucaacgacaugcccaucaccaacgaccagaagaagcugaugagcaacaacgugcagaucgugagacagcagagcuacagcaucaugugcaucaucaaggaggaggugcuggccuacguggugcagcugccccuguacggcgugaucgacacccccugcuggaagcugcacaccagcccccugugcaccaccaacaccaaggagggcagcaacaucugccugaccagaaccgacagaggcugguacugcgacaacgccggcagcgugagcuucuucccccaggccgagaccugcaaggugugcagcaacagaguguucugcgacaccaugaacagccugacccugcccagcgaggugaaccugugcaacaucgacaucuucaaccccaaguacgacugcaagaucaugaccagcaagaccgacgugagcagcagcgugaucaccagccugggcgccaucgugagcugcuacggcaagaccaagugcaccgccagcaacaagaacaagggcaucaucaagaccuucagcaacggcugcgacuacgugagcaacaagggcguggacaccgugagcgugggcaacacccuguacuacgugaacaagcaggagggcaagagccuguacgugaagggcgagcccaucaucaacuucuacgacccccugguguuccccagcgacgaguucgacgccagcaucagccaggugaacgagaagaucaaccagagccuggccuucaucagaaagagcgacgagcugcugcacaacgugaacgugggcaagagcaccaccaacaucaugaucaccaccaucaucaucgugaucaucgugauccugcugcugcugaucgccgugggccuguuccuguacugcaaggccagaagcacccccgugacccugagcaaggaccagcugagcggcaucaacaacaucgccuucagcaacugaggacuagucccuguucccagagcccacuuuuuuuucuuuuuuugaaauaaaauagccugucuuucagaucuaaaaaaaaaaaaaaaaaaaaaaaaaaaaaaaaaaaaaaaaaaaaaaaaaaaaaaaaaaaaaaaaugcaucccccccccccccccccccccccccccccccaaaggcucuuuucagagccaccagaauu

SEQ ID NO: 18414 - RNA, 1876 nt, Artificial Sequence
  mRNA product Design a-5 comprising derived and/or modified sequence from HRSV(Memphis-37)__AIY60640.1__F_DSCav1_mut7 (opt5)
gggagacuuucccauucuguagcagaauuugguguugccuguggucuuggucccgcggagaagcuuaccauggagcugcccauccucaagaccaacgccauuacaacgauccuggcugccgugacccuuugcuucgcgagcucccagaauauuacagaagaguuuuaccaaucuaccuguagcgcugucuccaaaggcuaucugucugcccucagaacagggugguacaccagcguuaucacaauugaacuguccaacaucaaggagaauaaaugcaacggaaccgacgccaaggugaaacuuaucaagcaggaacuggauaaguauaaaaaugcugugacggagcuccagaugcugauguguucuaccccugccgcuggcagcggguccgccauugcgagcggaaucgccgucugcaaggugcugcaccucgagggcgaaguuaacaaaauuaagaaugcucugcuuucuacaaacaaagccguggucucccugagcaauggggugucuguucucaccuucaaggugcuggaccuuaagaacuacaucgauaaacagcugcucccgauucugaauaagcaauccuguagcaucucuaacauugagacagucauggaauuucagcagaaaaauaaccggcugcucgagaucacccgcgaguucuccgugaaugcuggagugacgacacccgucagcaccuauaugcugacaaacuccgaacuucugucucucaucaacgacaugccuauuaccaaugaucagaagaaacugaugagcaacaauguucaaaucgugagacagcaguccuacagcauuaugugcaucauuaaggaggaagugcuugccuaugucgugcagcugccccucuacggcguuaucgacaccccuuguuggaaacugcauacaucuccccugugcacgaccaacacaaaggagggcuccaauaucugucucacccggacagaucgcgggugguacugcgacaacgcgggaagcgugagcuuuuucccucaagccgaaaccuguaaggucugcucuaauagaguguuuugcgauacgaugaacucccugacacuuccgucugagguuaaucuguguaacauugacaucuucaaucccaaauaugauugcaagauuaugaccagcaaaaccgacguguccagcucugucaucacaucccucggcgcuauugugagcuguuacgggaagaccaaaugcacagccucuaacaagaauaagggaaucaucaaaacguuuuccaacggcugugauuaugucagcaauaaggggguggacaccguuuccgugggaaacacacuguacuaugucaacaaacaggagggcaagucucuuuacgugaaaggcgaaccuauuaucaauuucuaugacccccugguuuuuccuagcgaugaguucgacgcuuccauuucucaggugaacgaaaagaucaaucaaagccucgccuuuauucggaaguccgaugagcugcugcacaacgucaauguggggaaaagcaccacaaacaucaugauuaccacgaucaucauugugaucauuguuauccuccugcuucugauugccgucggacucuuccuguacugcaaggcucgcucuacccccgugacacuguccaaagaccagcuuagcggcaucaauaacaucgcguucucuaauugaggacuagucccuguucccagagcccacuuuuuuuucuuuuuuugaaauaaaauagccugucuuucagaucuaaaaaaaaaaaaaaaaaaaaaaaaaaaaaaaaaaaaaaaaaaaaaaaaaaaaaaaaaaaaaaaaugcaucccccccccccccccccccccccccccccccaaaggcucuuuucagagccaccagaauu

SEQ ID NO: 18415 - RNA, 1876 nt, Artificial Sequence
  mRNA product Design a-5 comprising derived and/or modified sequence from HRSV(Memphis-37)__AIY60640.1__F_DSCav1_mut7 (opt6)
gggagacuuucccauucuguagcagaauuugguguugccuguggucuuggucccgcggagaagcuuaccauggaacuaccaauacucaaaacaaaugcuauaaccacaauacucgcagcaguaacauuauguuucgcaucaucccaaaacauaacagaagaauuuuaucaaucaaccuguucagcaguauccaaaggauaccuaagugcauuaagaaccggaugguacacaucaguaauaaccauagaacuuucaaacauaaaagaaaacaaauguaacggcacagacgcaaaagucaaacucaucaaacaggaacuugacaaauauaaaaacgcaguaaccgaacuacaaaugcuaaugugcucaacaccagcagcaggaucaggaucagcaauugcaucuggaauagcuguaugcaaaguccuacaccuagaaggagaaguaaacaaaaucaaaaacgcauuacucuccacaaacaaagcaguaguaucacuaucaaacggaguuucaguacuaaccuucaaaguauuagaccuaaaaaacuacauagacaaacaacuacuaccuauacuaaacaaacaauccuguucaauaagcaacauugaaacuguaauggaauuucaacaaaaaaacaaccgccuauuagaaauaaccagagaauuuuccguaaaugcaggaguaaccacaccagucucuacauacauguuaaccaacucagaacuauuaucacucauaaaugacaugccuauaacaaacgaccaaaaaaaacuaaugucaaacaacguacaaauaguaagacaacaaucauauuccauaaugugcauaauaaaagaagaaguacuugcauacgugguucaacuaccccuauauggaguuauagacacaccaugcuggaaacuccacacuuccccacuuugcacaacuaacacaaaagaaggaucaaauauaugccuaaccagaacagaccguggaugguacugcgacaacgcuggaucagucuccuucuuuccacaagcagaaaccugcaaagucugcucaaauagagucuucugugacacaaugaacucacucacccuacccucagaaguaaaccuauguaauauagauauauuuaauccaaaauacgacugcaaaauuaugacaaguaaaacagacguaagcucaucagucauaaccagccuaggagcaauaguauccuguuacggcaaaacaaaaugcacagcuucaaacaaaaacaaaggcauaauaaaaacauucucaaacggaugugacuauguaucaaauaaaggaguugacacaguaucaguuggaaacacacuauacuauguaaacaaacaagaaggaaaaucacuauacguuaaaggcgaacccauaaucaauuucuacgacccccuagucuucccauccgaugaauuugacgcaucaauaucccaaguaaaugaaaaaaucaaccaaucccuagcauuuauacgaaaauccgacgaacuacuccauaaugucaacgucgguaaaucaacgacaaacaucaugaucacaacaauaauaauaguaauaauuguaauauuacucuuacucauagcaguaggccuauuucuauauugcaaagccagaucaacaccaguaaccuuauccaaagaccaacuaucuggaauaaacaacauagcauuuuccaacugaggacuagucccuguucccagagcccacuuuuuuuucuuuuuuugaaauaaaauagccugucuuucagaucuaaaaaaaaaaaaaaaaaaaaaaaaaaaaaaaaaaaaaaaaaaaaaaaaaaaaaaaaaaaaaaaaugcaucccccccccccccccccccccccccccccccaaaggcucuuuucagagccaccagaauu

SEQ ID NO: 18416 - RNA, 1876 nt, Artificial Sequence
  mRNA product Design a-5 comprising derived and/or modified sequence from HRSV(Memphis-37)__AIY60640.1__F_DSCav1_mut7 (opt11)
gggagacuuucccauucuguagcagaauuugguguugccuguggucuuggucccgcggagaagcuuaccauggaacuccccauacuuaaaacaaacgccauaacaacuauacucgcagccgucacccucuguuucgcauccucucaaaacaucaccgaagaguucuaucaaucaaccugcuccgccgucucaaaaggcuaccucuccgcccuacgcacaggcugguacaccagcgucauuaccauagaacucucgaacaucaaagaaaacaaaugcaacggcaccgacgcaaaagugaaacucaucaaacaagaacucgacaaauacaaaaacgccgucaccgaacuucagaugcucaugugcuccaccccugccgccggcagcggcuccgccauagccuccggcaucgcagucugcaaaguccuccaccucgaaggagaaguaaacaaaaucaaaaaugcucuccucuccacaaacaaagccgucgucucacucuccaauggagucuccguccucaccuucaaaguccucgaccucaaaaacuacauagacaaacaacuacuccccauccucaacaagcaauccugcucuaucuccaacauagaaaccguuauggaguuccaacagaaaaauaaccgccugcuagaaauaacccgagaguucuccgucaacgcaggcgucacuacccccgucagcacauacaugcuaacaaacuccgaacugcucucccuuaucaacgacaugcccaucacaaacgaucagaaaaagcucaugucuaacaacguacaaaucguucggcaacaauccuacuccaucaugugcaucaucaaagaagaagugcucgccuacguaguccaacucccccucuacggagucaucgacacacccugcuggaaacuccacacaucaccccucugcaccaccaacacaaaagaaggguccaacaucugccucacgcgcaccgaccgaggcugguacugcgacaacgccggcuccguauccuucuucccccaagcagaaaccugcaaggucugcuccaaccgcguauucugcgacaccaugaacucgcucacccuccccucagaagucaaccuauguaacaucgacauauucaaucccaaauacgacugcaagauaaugacuuccaaaaccgacguaagcuccucggucaucaccucccucggcgccaucgucuccugcuacggcaaaaccaaaugcaccgccuccaauaagaauaaaggcauaauaaagacauucagcaacggcugcgauuacgucuccaacaaaggugucgacaccgucucagucggcaacacucuauacuacgugaacaaacaagaaggcaaaagccuauacguuaaaggcgaaccaauaaucaauuucuacgacccucuagucuuucccucugacgaguucgaugccagcauaagccaagucaacgaaaagaucaaccaaucacucgccuucauccguaaauccgacgaacugcuccacaaugucaauguaggcaaaucaacaaccaacaucaugaucaccacuauuaucaucgucaucaucguaauccuacuccuacuaaucgccgucggccuauuccucuacugcaaagcccgcucgacccccgucacucucagcaaggaucaacuauccggcaucaacaacaucgccuucuccaacuaaggacuagucccuguucccagagcccacuuuuuuuucuuuuuuugaaauaaaauagccugucuuucagaucuaaaaaaaaaaaaaaaaaaaaaaaaaaaaaaaaaaaaaaaaaaaaaaaaaaaaaaaaaaaaaaaaugcaucccccccccccccccccccccccccccccccaaaggcucuuuucagagccaccagaauu

SEQ ID NO: 18417 - RNA, 2057 nt, Artificial Sequence
  mRNA product Design b-1 comprising derived and/or modified sequence from HRSV(Memphis-37)__AIY60640.1__F_DSCav1_mut7 (opt1)
gggagacggagacggccugcaggaccugcucucucagcccucagccgaggccuacgccgagccgagugcgcagccgacgaccgggaggagccgcagccuucaacucugagguacugugauccgcgcugcccgccgggccgccccaguccgcugcugcggcaccuccuucccucgcgcccucuucgcucgccagcgccuucccugugagccugcgucaccgcggccgccaagcuuaccauggagcugcccauccucaagaccaacgccaucaccacgauccuggccgcggugacccugugcuucgccagcucccagaacaucaccgaggaguucuaccagagcacgugcuccgccgucagcaagggcuaccucuccgcccugcgcaccgggugguacaccagcgugaucaccaucgagcuguccaacaucaaggagaacaagugcaacggcaccgacgccaaggugaagcucaucaagcaggagcuggacaaguacaagaacgcggucacggagcugcagaugcugaugugcagcaccccggccgccggcuccgggagcgcgaucgccuccggcaucgccgucugcaaggugcugcaccucgagggcgaggugaacaagaucaagaacgcccugcuguccaccaacaaggccgucgugagccucuccaacggggugagcguccugaccuucaaggugcuggaccucaagaacuacaucgacaagcagcugcugcccauccugaacaagcagagcugcuccaucagcaacaucgagaccgucauggaguuccagcagaagaacaaccgccuccuggagaucacgcgggaguucagcgugaacgcgggcgugaccacccccgucuccaccuacaugcugacgaacagcgagcuccugucccugaucaacgacaugccgaucaccaacgaccagaagaagcucaugagcaacaacgugcagaucgugcgccagcaguccuacagcaucaugugcaucaucaaggaggagguccuggccuacguggugcagcugccccucuacggggucaucgacacccccugcuggaagcugcacaccagcccccugugcacgaccaacaccaaggagggcuccaacaucugccucacccggacggaccgcgggugguacugcgacaacgccggcagcguguccuucuucccgcaggccgagaccugcaaggucugcagcaaccggguguucugcgacaccaugaacucccugacccugcccagcgaggugaaccucugcaacaucgacaucuucaaccccaaguacgacugcaagaucaugacguccaagaccgacgucagcuccagcgugaucaccucccugggcgccaucgugagcugcuacgggaagaccaagugcacggcgagcaacaagaacaagggcaucaucaagaccuucuccaacgggugcgacuacgucagcaacaagggcguggacaccguguccgucggcaacacccuguacuacgugaacaagcaggagggcaagagccucuacgugaagggggagcccaucaucaacuucuacgacccgcuggucuuccccuccgacgaguucgacgccagcaucucccaggugaacgagaagaucaaccagagccuggccuucauccggaaguccgacgagcuccugcacaacgugaacgucggcaagagcaccacgaacaucaugaucaccaccaucaucaucgugaucaucgugauccugcugcuccugaucgccgucgggcuguuccucuacugcaaggcccgcuccacccccgugacgcugagcaaggaccagcuguccgggaucaacaacaucgcguucagcaacugaggacuaguguccaccugucccuccugggcugcuggauugucucguuuuccugccaaauaaacaggaucagcgcuuuacagaucuaaaaaaaaaaaaaaaaaaaaaaaaaaaaaaaaaaaaaaaaaaaaaaaaaaaaaaaaaaaaaaaaugcaucccccccccccccccccccccccccccccccaaaggcucuuuucagagccaccagaauu

SEQ ID NO: 18418 - RNA, 2057 nt, Artificial Sequence
  mRNA product Design b-1 comprising derived and/or modified sequence from HRSV(Memphis-37)__AIY60640.1__F_DSCav1_mut7 (opt1)
gggagacggagacggccugcaggaccugcucucucagcccucagccgaggccuacgccgagccgagugcgcagccgacgaccgggaggagccgcagccuucaacucugagguacugugauccgcgcugcccgccgggccgccccaguccgcugcugcggcaccuccuucccucgcgcccucuucgcucgccagcgccuucccugugagccugcgucaccgcggccgccaagcuuaccauggagcugcccauccucaagaccaacgccaucaccacgauccuggccgcggugacccugugcuucgccagcucccagaacaucaccgaggaguucuaccagagcacgugcuccgccgucagcaagggcuaccucuccgcccugcgcaccgggugguacaccagcgugaucaccaucgagcuguccaacaucaaggagaacaagugcaacggcaccgacgccaaggugaagcucaucaagcaggagcuggacaaguacaagaacgcggucacggagcugcagaugcucaugugcagcaccccggccgccggguccggcagcgccaucgcguccgggaucgccgugugcaaggugcugcaccuggagggcgaggucaacaagaucaagaacgcccuccugagcaccaacaaggccguggugucccugagcaacggcgucuccgugcucaccuucaaggugcuggaccugaagaacuacaucgacaagcagcuccugcccauccugaacaagcagagcugcuccaucagcaacaucgagacggucauggaguuccagcagaagaacaaccggcuccuggagaucacccgcgaguucuccgugaacgccggggugaccacccccgucagcacguacaugcugaccaacagcgagcuccugucccugaucaacgacaugcccaucaccaacgaccagaagaagcucaugagcaacaacgugcagaucgugcggcagcaguccuacagcaucaugugcaucaucaaggaggagguccuggcguacguggugcagcugccgcucuacggcgucaucgacacccccugcuggaagcugcacacgagcccccugugcaccaccaacaccaaggaggggagcaacaucugccucacgcgcaccgaccggggcugguacugcgacaacgccggguccgugagcuucuucccccaggccgagaccugcaaggugugcuccaaccgcgucuucugcgacaccaugaacagccugacgcugccguccgaggugaaccucugcaacaucgacaucuucaaccccaaguacgacugcaagaucaugaccagcaagaccgacgucuccagcuccgugaucaccagccugggcgccaucguguccugcuacggcaagacgaagugcaccgccagcaacaagaacaaggggaucaucaagaccuucuccaacggcugcgacuacgucagcaacaaggggguggacaccgugagcgucggcaacacgcuguacuacgugaacaagcaggagggcaagucccucuacgugaagggggagcccaucaucaacuucuacgacccccuggucuucccgagcgacgaguucgacgcguccaucagccaggugaacgagaagaucaaccagucccuggccuucauccggaaguccgacgagcuccugcacaacgugaacgucggcaaguccaccaccaacaucaugaucaccaccaucaucaucgugaucaucgugauccugcuccugcugaucgccgucggccucuuccuguacugcaaggcccgcagcacgcccgugacccuguccaaggaccagcugagcgggaucaacaacaucgccuucuccaacugaggacuaguguccaccugucccuccugggcugcuggauugucucguuuuccugccaaauaaacaggaucagcgcuuuacagaucuaaaaaaaaaaaaaaaaaaaaaaaaaaaaaaaaaaaaaaaaaaaaaaaaaaaaaaaaaaaaaaaaugcaucccccccccccccccccccccccccccccccaaaggcucuuuucagagccaccagaauu

SEQ ID NO: 18419 - RNA, 2057 nt, Artificial Sequence
  mRNA product Design b-1 comprising derived and/or modified sequence from HRSV(Memphis-37)__AIY60640.1__F_DSCav1_mut7 (opt2)
gggagacggagacggccugcaggaccugcucucucagcccucagccgaggccuacgccgagccgagugcgcagccgacgaccgggaggagccgcagccuucaacucugagguacugugauccgcgcugcccgccgggccgccccaguccgcugcugcggcaccuccuucccucgcgcccucuucgcucgccagcgccuucccugugagccugcgucaccgcggccgccaagcuuaccauggagcuccccauccucaagaccaacgccaucaccaccauccucgccgccgucacccucugcuucgccuccucccagaacaucaccgaggaguucuaccaguccaccugcuccgccgucuccaagggcuaccucuccgcccuccgcaccggcugguacaccuccgucaucaccaucgagcucuccaacaucaaggagaacaagugcaacggcaccgacgccaaggucaagcucaucaagcaggagcucgacaaguacaagaacgccgucaccgagcuccagaugcucaugugcuccacccccgccgccggcuccggcuccgccaucgccuccggcaucgccgucugcaagguccuccaccucgagggcgaggucaacaagaucaagaacgcccuccucuccaccaacaaggccgucgucucccucuccaacggcgucuccguccucaccuucaagguccucgaccucaagaacuacaucgacaagcagcuccuccccauccucaacaagcaguccugcuccaucuccaacaucgagaccgucauggaguuccagcagaagaacaaccgccuccucgagaucacccgcgaguucuccgucaacgccggcgucaccacccccgucuccaccuacaugcucaccaacuccgagcuccucucccucaucaacgacaugcccaucaccaacgaccagaagaagcucauguccaacaacguccagaucguccgccagcaguccuacuccaucaugugcaucaucaaggaggagguccucgccuacgucguccagcucccccucuacggcgucaucgacacccccugcuggaagcuccacaccuccccccucugcaccaccaacaccaaggagggcuccaacaucugccucacccgcaccgaccgcggcugguacugcgacaacgccggcuccgucuccuucuucccccaggccgagaccugcaaggucugcuccaaccgcgucuucugcgacaccaugaacucccucacccuccccuccgaggucaaccucugcaacaucgacaucuucaaccccaaguacgacugcaagaucaugaccuccaagaccgacgucuccuccuccgucaucaccucccucggcgccaucgucuccugcuacggcaagaccaagugcaccgccuccaacaagaacaagggcaucaucaagaccuucuccaacggcugcgacuacgucuccaacaagggcgucgacaccgucuccgucggcaacacccucuacuacgucaacaagcaggagggcaagucccucuacgucaagggcgagcccaucaucaacuucuacgacccccucgucuuccccuccgacgaguucgacgccuccaucucccaggucaacgagaagaucaaccagucccucgccuucauccgcaaguccgacgagcuccuccacaacgucaacgucggcaaguccaccaccaacaucaugaucaccaccaucaucaucgucaucaucgucauccuccuccuccucaucgccgucggccucuuccucuacugcaaggcccgcuccacccccgucacccucuccaaggaccagcucuccggcaucaacaacaucgccuucuccaacugaggacuaguguccaccugucccuccugggcugcuggauugucucguuuuccugccaaauaaacaggaucagcgcuuuacagaucuaaaaaaaaaaaaaaaaaaaaaaaaaaaaaaaaaaaaaaaaaaaaaaaaaaaaaaaaaaaaaaaaugcaucccccccccccccccccccccccccccccccaaaggcucuuuucagagccaccagaauu

SEQ ID NO: 18420 - RNA, 2057 nt, Artificial Sequence
  mRNA product Design b-1 comprising derived and/or modified sequence from HRSV(Memphis-37)__AIY60640.1__F_DSCav1_mut7 (opt3)
gggagacggagacggccugcaggaccugcucucucagcccucagccgaggccuacgccgagccgagugcgcagccgacgaccgggaggagccgcagccuucaacucugagguacugugauccgcgcugcccgccgggccgccccaguccgcugcugcggcaccuccuucccucgcgcccucuucgcucgccagcgccuucccugugagccugcgucaccgcggccgccaagcuuaccauggagcugcccauccucaagaccaacgccauuacaacuauacuugcugcagugacgcugugcuucgccagcucccagaauaucaccgaagaguuuuaccaaucuacauguucagcggucaguaaaggcuauuugagcgcuuuaagaacugggugguacaccuccguuauuacaaucgaacugucuaacauuaaggagaauaaaugcaacggaaccgacgccaaggugaaacuaaucaagcaggaacucgauaaguauaaaaaugcaguaacugagcugcagaugcuuauguguucgaccccugccgcugguucaggcagcgcaauagccagugggaucgcugugugcaagguccugcacuuggagggagaagugaacaaaauuaagaaugcccuccuguccacaaacaaagcgguugugucucugagcaauggcgucuccgugcucacguucaagguauuagaccugaagaacuacaucgauaaacagcuuuugccaauucugaauaagcaaucauguaguaucagcaacauagagacuguuauggaauuucagcagaaaaauaacaggcuacucgagauuacccgggaguucucugugaaugccggugucacaacuccgguguccaccuauaugcugacaaacucagaacuucugagcuugaucaacgacaugcccauuaccaaugaucagaagaaacucaugaguaacaaugugcaaaucguccgccagcagucuuacuccaucaugugcauuauaaaggaggaaguucuggcauaugugguacaguuaccucuguacggggugaucgacacgccauguuggaaacuccauacuagcccccuuugcacaaccaacacuaaggagggaucgaauauuugucugacacgaaccgaucguggcugguacugcgacaacgcuggcucugucuccuuuuucccucaagccgaaacguguaaggugugcucaaauagaguguuuugcgauaccaugaacaguuugacacuaccaagcgagguuaaucuguguaacaucgacauauucaaucccaaauaugauugcaagauuaugacuuccaaaaccgacgucucuagcucagugaucacaagucucggggcaaucguauccuguuacggaaagacuaaaugcaccgcuagcaacaagaauaaggguauuaucaaaacauuuucuaacggcugugauuauguuucaaauaaggggguggacaccgucagugugggaaacacucuguacuaugucaacaaacaggagggcaagagccuuuacgugaaaggugaaccuauuauaaauuucuaugacccacugguuuuuccguccgaugaguucgacgccucuaucagccaggugaacgaaaagauuaaucaaucguuggcguuuaucaggaaguccgaugagcuccugcacaacguaaaugucgggaaaucaacgacaaacaucaugauuaccacuauaaucauugugaucauuguuaucuuacugcuacucauagccgugggacuguuccuuuacugcaaggcacggaguacccccgucacauugucuaaagaccagcugagcggcaucaauaacauugcuuucuccaauugaggacuaguguccaccugucccuccugggcugcuggauugucucguuuuccugccaaauaaacaggaucagcgcuuuacagaucuaaaaaaaaaaaaaaaaaaaaaaaaaaaaaaaaaaaaaaaaaaaaaaaaaaaaaaaaaaaaaaaaugcaucccccccccccccccccccccccccccccccaaaggcucuuuucagagccaccagaauu

SEQ ID NO: 18421 - RNA, 2057 nt, Artificial Sequence
  mRNA product Design b-1 comprising derived and/or modified sequence from HRSV(Memphis-37)__AIY60640.1__F_DSCav1_mut7 (opt4)
gggagacggagacggccugcaggaccugcucucucagcccucagccgaggccuacgccgagccgagugcgcagccgacgaccgggaggagccgcagccuucaacucugagguacugugauccgcgcugcccgccgggccgccccaguccgcugcugcggcaccuccuucccucgcgcccucuucgcucgccagcgccuucccugugagccugcgucaccgcggccgccaagcuuaccauggagcugcccauccugaagaccaacgccaucaccaccauccuggccgccgugacccugugcuucgccagcagccagaacaucaccgaggaguucuaccagagcaccugcagcgccgugagcaagggcuaccugagcgcccugagaaccggcugguacaccagcgugaucaccaucgagcugagcaacaucaaggagaacaagugcaacggcaccgacgccaaggugaagcugaucaagcaggagcuggacaaguacaagaacgccgugaccgagcugcagaugcugaugugcagcacccccgccgccggcagcggcagcgccaucgccagcggcaucgccgugugcaaggugcugcaccuggagggcgaggugaacaagaucaagaacgcccugcugagcaccaacaaggccguggugagccugagcaacggcgugagcgugcugaccuucaaggugcuggaccugaagaacuacaucgacaagcagcugcugcccauccugaacaagcagagcugcagcaucagcaacaucgagaccgugauggaguuccagcagaagaacaacagacugcuggagaucaccagagaguucagcgugaacgccggcgugaccacccccgugagcaccuacaugcugaccaacagcgagcugcugagccugaucaacgacaugcccaucaccaacgaccagaagaagcugaugagcaacaacgugcagaucgugagacagcagagcuacagcaucaugugcaucaucaaggaggaggugcuggccuacguggugcagcugccccuguacggcgugaucgacacccccugcuggaagcugcacaccagcccccugugcaccaccaacaccaaggagggcagcaacaucugccugaccagaaccgacagaggcugguacugcgacaacgccggcagcgugagcuucuucccccaggccgagaccugcaaggugugcagcaacagaguguucugcgacaccaugaacagccugacccugcccagcgaggugaaccugugcaacaucgacaucuucaaccccaaguacgacugcaagaucaugaccagcaagaccgacgugagcagcagcgugaucaccagccugggcgccaucgugagcugcuacggcaagaccaagugcaccgccagcaacaagaacaagggcaucaucaagaccuucagcaacggcugcgacuacgugagcaacaagggcguggacaccgugagcgugggcaacacccuguacuacgugaacaagcaggagggcaagagccuguacgugaagggcgagcccaucaucaacuucuacgacccccugguguuccccagcgacgaguucgacgccagcaucagccaggugaacgagaagaucaaccagagccuggccuucaucagaaagagcgacgagcugcugcacaacgugaacgugggcaagagcaccaccaacaucaugaucaccaccaucaucaucgugaucaucgugauccugcugcugcugaucgccgugggccuguuccuguacugcaaggccagaagcacccccgugacccugagcaaggaccagcugagcggcaucaacaacaucgccuucagcaacugaggacuaguguccaccugucccuccugggcugcuggauugucucguuuuccugccaaauaaacaggaucagcgcuuuacagaucuaaaaaaaaaaaaaaaaaaaaaaaaaaaaaaaaaaaaaaaaaaaaaaaaaaaaaaaaaaaaaaaaugcaucccccccccccccccccccccccccccccccaaaggcucuuuucagagccaccagaauu

SEQ ID NO: 18422 - RNA, 2057 nt, Artificial Sequence
  mRNA product Design b-1 comprising derived and/or modified sequence from HRSV(Memphis-37)__AIY60640.1__F_DSCav1_mut7 (opt5)
gggagacggagacggccugcaggaccugcucucucagcccucagccgaggccuacgccgagccgagugcgcagccgacgaccgggaggagccgcagccuucaacucugagguacugugauccgcgcugcccgccgggccgccccaguccgcugcugcggcaccuccuucccucgcgcccucuucgcucgccagcgccuucccugugagccugcgucaccgcggccgccaagcuuaccauggagcugcccauccucaagaccaacgccauuacaacgauccuggcugccgugacccuuugcuucgcgagcucccagaauauuacagaagaguuuuaccaaucuaccuguagcgcugucuccaaaggcuaucugucugcccucagaacagggugguacaccagcguuaucacaauugaacuguccaacaucaaggagaauaaaugcaacggaaccgacgccaaggugaaacuuaucaagcaggaacuggauaaguauaaaaaugcugugacggagcuccagaugcugauguguucuaccccugccgcuggcagcggguccgccauugcgagcggaaucgccgucugcaaggugcugcaccucgagggcgaaguuaacaaaauuaagaaugcucugcuuucuacaaacaaagccguggucucccugagcaauggggugucuguucucaccuucaaggugcuggaccuuaagaacuacaucgauaaacagcugcucccgauucugaauaagcaauccuguagcaucucuaacauugagacagucauggaauuucagcagaaaaauaaccggcugcucgagaucacccgcgaguucuccgugaaugcuggagugacgacacccgucagcaccuauaugcugacaaacuccgaacuucugucucucaucaacgacaugccuauuaccaaugaucagaagaaacugaugagcaacaauguucaaaucgugagacagcaguccuacagcauuaugugcaucauuaaggaggaagugcuugccuaugucgugcagcugccccucuacggcguuaucgacaccccuuguuggaaacugcauacaucuccccugugcacgaccaacacaaaggagggcuccaauaucugucucacccggacagaucgcgggugguacugcgacaacgcgggaagcgugagcuuuuucccucaagccgaaaccuguaaggucugcucuaauagaguguuuugcgauacgaugaacucccugacacuuccgucugagguuaaucuguguaacauugacaucuucaaucccaaauaugauugcaagauuaugaccagcaaaaccgacguguccagcucugucaucacaucccucggcgcuauugugagcuguuacgggaagaccaaaugcacagccucuaacaagaauaagggaaucaucaaaacguuuuccaacggcugugauuaugucagcaauaaggggguggacaccguuuccgugggaaacacacuguacuaugucaacaaacaggagggcaagucucuuuacgugaaaggcgaaccuauuaucaauuucuaugacccccugguuuuuccuagcgaugaguucgacgcuuccauuucucaggugaacgaaaagaucaaucaaagccucgccuuuauucggaaguccgaugagcugcugcacaacgucaauguggggaaaagcaccacaaacaucaugauuaccacgaucaucauugugaucauuguuauccuccugcuucugauugccgucggacucuuccuguacugcaaggcucgcucuacccccgugacacuguccaaagaccagcuuagcggcaucaauaacaucgcguucucuaauugaggacuaguguccaccugucccuccugggcugcuggauugucucguuuuccugccaaauaaacaggaucagcgcuuuacagaucuaaaaaaaaaaaaaaaaaaaaaaaaaaaaaaaaaaaaaaaaaaaaaaaaaaaaaaaaaaaaaaaaugcaucccccccccccccccccccccccccccccccaaaggcucuuuucagagccaccagaauu

SEQ ID NO: 18423 - RNA, 2057 nt, Artificial Sequence
  mRNA product Design b-1 comprising derived and/or modified sequence from HRSV(Memphis-37)__AIY60640.1__F_DSCav1_mut7 (opt6)
gggagacggagacggccugcaggaccugcucucucagcccucagccgaggccuacgccgagccgagugcgcagccgacgaccgggaggagccgcagccuucaacucugagguacugugauccgcgcugcccgccgggccgccccaguccgcugcugcggcaccuccuucccucgcgcccucuucgcucgccagcgccuucccugugagccugcgucaccgcggccgccaagcuuaccauggaacuaccaauacucaaaacaaaugcuauaaccacaauacucgcagcaguaacauuauguuucgcaucaucccaaaacauaacagaagaauuuuaucaaucaaccuguucagcaguauccaaaggauaccuaagugcauuaagaaccggaugguacacaucaguaauaaccauagaacuuucaaacauaaaagaaaacaaauguaacggcacagacgcaaaagucaaacucaucaaacaggaacuugacaaauauaaaaacgcaguaaccgaacuacaaaugcuaaugugcucaacaccagcagcaggaucaggaucagcaauugcaucuggaauagcuguaugcaaaguccuacaccuagaaggagaaguaaacaaaaucaaaaacgcauuacucuccacaaacaaagcaguaguaucacuaucaaacggaguuucaguacuaaccuucaaaguauuagaccuaaaaaacuacauagacaaacaacuacuaccuauacuaaacaaacaauccuguucaauaagcaacauugaaacuguaauggaauuucaacaaaaaaacaaccgccuauuagaaauaaccagagaauuuuccguaaaugcaggaguaaccacaccagucucuacauacauguuaaccaacucagaacuauuaucacucauaaaugacaugccuauaacaaacgaccaaaaaaaacuaaugucaaacaacguacaaauaguaagacaacaaucauauuccauaaugugcauaauaaaagaagaaguacuugcauacgugguucaacuaccccuauauggaguuauagacacaccaugcuggaaacuccacacuuccccacuuugcacaacuaacacaaaagaaggaucaaauauaugccuaaccagaacagaccguggaugguacugcgacaacgcuggaucagucuccuucuuuccacaagcagaaaccugcaaagucugcucaaauagagucuucugugacacaaugaacucacucacccuacccucagaaguaaaccuauguaauauagauauauuuaauccaaaauacgacugcaaaauuaugacaaguaaaacagacguaagcucaucagucauaaccagccuaggagcaauaguauccuguuacggcaaaacaaaaugcacagcuucaaacaaaaacaaaggcauaauaaaaacauucucaaacggaugugacuauguaucaaauaaaggaguugacacaguaucaguuggaaacacacuauacuauguaaacaaacaagaaggaaaaucacuauacguuaaaggcgaacccauaaucaauuucuacgacccccuagucuucccauccgaugaauuugacgcaucaauaucccaaguaaaugaaaaaaucaaccaaucccuagcauuuauacgaaaauccgacgaacuacuccauaaugucaacgucgguaaaucaacgacaaacaucaugaucacaacaauaauaauaguaauaauuguaauauuacucuuacucauagcaguaggccuauuucuauauugcaaagccagaucaacaccaguaaccuuauccaaagaccaacuaucuggaauaaacaacauagcauuuuccaacugaggacuaguguccaccugucccuccugggcugcuggauugucucguuuuccugccaaauaaacaggaucagcgcuuuacagaucuaaaaaaaaaaaaaaaaaaaaaaaaaaaaaaaaaaaaaaaaaaaaaaaaaaaaaaaaaaaaaaaaugcaucccccccccccccccccccccccccccccccaaaggcucuuuucagagccaccagaauu

SEQ ID NO: 18424 - RNA, 2057 nt, Artificial Sequence
  mRNA product Design b-1 comprising derived and/or modified sequence from HRSV(Memphis-37)__AIY60640.1__F_DSCav1_mut7 (opt11)
gggagacggagacggccugcaggaccugcucucucagcccucagccgaggccuacgccgagccgagugcgcagccgacgaccgggaggagccgcagccuucaacucugagguacugugauccgcgcugcccgccgggccgccccaguccgcugcugcggcaccuccuucccucgcgcccucuucgcucgccagcgccuucccugugagccugcgucaccgcggccgccaagcuuaccauggaacuccccauacuuaaaacaaacgccauaacaacuauacucgcagccgucacccucuguuucgcauccucucaaaacaucaccgaagaguucuaucaaucaaccugcuccgccgucucaaaaggcuaccucuccgcccuacgcacaggcugguacaccagcgucauuaccauagaacucucgaacaucaaagaaaacaaaugcaacggcaccgacgcaaaagugaaacucaucaaacaagaacucgacaaauacaaaaacgccgucaccgaacuucagaugcucaugugcuccaccccugccgccggcagcggcuccgccauagccuccggcaucgcagucugcaaaguccuccaccucgaaggagaaguaaacaaaaucaaaaaugcucuccucuccacaaacaaagccgucgucucacucuccaauggagucuccguccucaccuucaaaguccucgaccucaaaaacuacauagacaaacaacuacuccccauccucaacaagcaauccugcucuaucuccaacauagaaaccguuauggaguuccaacagaaaaauaaccgccugcuagaaauaacccgagaguucuccgucaacgcaggcgucacuacccccgucagcacauacaugcuaacaaacuccgaacugcucucccuuaucaacgacaugcccaucacaaacgaucagaaaaagcucaugucuaacaacguacaaaucguucggcaacaauccuacuccaucaugugcaucaucaaagaagaagugcucgccuacguaguccaacucccccucuacggagucaucgacacacccugcuggaaacuccacacaucaccccucugcaccaccaacacaaaagaaggguccaacaucugccucacgcgcaccgaccgaggcugguacugcgacaacgccggcuccguauccuucuucccccaagcagaaaccugcaaggucugcuccaaccgcguauucugcgacaccaugaacucgcucacccuccccucagaagucaaccuauguaacaucgacauauucaaucccaaauacgacugcaagauaaugacuuccaaaaccgacguaagcuccucggucaucaccucccucggcgccaucgucuccugcuacggcaaaaccaaaugcaccgccuccaauaagaauaaaggcauaauaaagacauucagcaacggcugcgauuacgucuccaacaaaggugucgacaccgucucagucggcaacacucuauacuacgugaacaaacaagaaggcaaaagccuauacguuaaaggcgaaccaauaaucaauuucuacgacccucuagucuuucccucugacgaguucgaugccagcauaagccaagucaacgaaaagaucaaccaaucacucgccuucauccguaaauccgacgaacugcuccacaaugucaauguaggcaaaucaacaaccaacaucaugaucaccacuauuaucaucgucaucaucguaauccuacuccuacuaaucgccgucggccuauuccucuacugcaaagcccgcucgacccccgucacucucagcaaggaucaacuauccggcaucaacaacaucgccuucuccaacuaaggacuaguguccaccugucccuccugggcugcuggauugucucguuuuccugccaaauaaacaggaucagcgcuuuacagaucuaaaaaaaaaaaaaaaaaaaaaaaaaaaaaaaaaaaaaaaaaaaaaaaaaaaaaaaaaaaaaaaaugcaucccccccccccccccccccccccccccccccaaaggcucuuuucagagccaccagaauu

SEQ ID NO: 18425 - RNA, 1877 nt, Artificial Sequence
  mRNA product Design b-2 comprising derived and/or modified sequence from HRSV(Memphis-37)__AIY60640.1__F_DSCav1_mut7 (opt1)
gggagagccucugcuggaguccggggaguggcguuggcugcuagagcgaagcuuaccauggagcugcccauccucaagaccaacgccaucaccacgauccuggccgcggugacccugugcuucgccagcucccagaacaucaccgaggaguucuaccagagcacgugcuccgccgucagcaagggcuaccucuccgcccugcgcaccgggugguacaccagcgugaucaccaucgagcuguccaacaucaaggagaacaagugcaacggcaccgacgccaaggugaagcucaucaagcaggagcuggacaaguacaagaacgcggucacggagcugcagaugcugaugugcagcaccccggccgccggcuccgggagcgcgaucgccuccggcaucgccgucugcaaggugcugcaccucgagggcgaggugaacaagaucaagaacgcccugcuguccaccaacaaggccgucgugagccucuccaacggggugagcguccugaccuucaaggugcuggaccucaagaacuacaucgacaagcagcugcugcccauccugaacaagcagagcugcuccaucagcaacaucgagaccgucauggaguuccagcagaagaacaaccgccuccuggagaucacgcgggaguucagcgugaacgcgggcgugaccacccccgucuccaccuacaugcugacgaacagcgagcuccugucccugaucaacgacaugccgaucaccaacgaccagaagaagcucaugagcaacaacgugcagaucgugcgccagcaguccuacagcaucaugugcaucaucaaggaggagguccuggccuacguggugcagcugccccucuacggggucaucgacacccccugcuggaagcugcacaccagcccccugugcacgaccaacaccaaggagggcuccaacaucugccucacccggacggaccgcgggugguacugcgacaacgccggcagcguguccuucuucccgcaggccgagaccugcaaggucugcagcaaccggguguucugcgacaccaugaacucccugacccugcccagcgaggugaaccucugcaacaucgacaucuucaaccccaaguacgacugcaagaucaugacguccaagaccgacgucagcuccagcgugaucaccucccugggcgccaucgugagcugcuacgggaagaccaagugcacggcgagcaacaagaacaagggcaucaucaagaccuucuccaacgggugcgacuacgucagcaacaagggcguggacaccguguccgucggcaacacccuguacuacgugaacaagcaggagggcaagagccucuacgugaagggggagcccaucaucaacuucuacgacccgcuggucuuccccuccgacgaguucgacgccagcaucucccaggugaacgagaagaucaaccagagccuggccuucauccggaaguccgacgagcuccugcacaacgugaacgucggcaagagcaccacgaacaucaugaucaccaccaucaucaucgugaucaucgugauccugcugcuccugaucgccgucgggcuguuccucuacugcaaggcccgcuccacccccgugacgcugagcaaggaccagcuguccgggaucaacaacaucgcguucagcaacugaggacuaguguccaccugucccuccugggcugcuggauugucucguuuuccugccaaauaaacaggaucagcgcuuuacagaucuaaaaaaaaaaaaaaaaaaaaaaaaaaaaaaaaaaaaaaaaaaaaaaaaaaaaaaaaaaaaaaaaugcaucccccccccccccccccccccccccccccccaaaggcucuuuucagagccaccagaauu

SEQ ID NO: 18426 - RNA, 1877 nt, Artificial Sequence
  mRNA product Design b-2 comprising derived and/or modified sequence from HRSV(Memphis-37)__AIY60640.1__F_DSCav1_mut7 (opt1)
gggagagccucugcuggaguccggggaguggcguuggcugcuagagcgaagcuuaccauggagcugcccauccucaagaccaacgccaucaccacgauccuggccgcggugacccugugcuucgccagcucccagaacaucaccgaggaguucuaccagagcacgugcuccgccgucagcaagggcuaccucuccgcccugcgcaccgggugguacaccagcgugaucaccaucgagcuguccaacaucaaggagaacaagugcaacggcaccgacgccaaggugaagcucaucaagcaggagcuggacaaguacaagaacgcggucacggagcugcagaugcucaugugcagcaccccggccgccggguccggcagcgccaucgcguccgggaucgccgugugcaaggugcugcaccuggagggcgaggucaacaagaucaagaacgcccuccugagcaccaacaaggccguggugucccugagcaacggcgucuccgugcucaccuucaaggugcuggaccugaagaacuacaucgacaagcagcuccugcccauccugaacaagcagagcugcuccaucagcaacaucgagacggucauggaguuccagcagaagaacaaccggcuccuggagaucacccgcgaguucuccgugaacgccggggugaccacccccgucagcacguacaugcugaccaacagcgagcuccugucccugaucaacgacaugcccaucaccaacgaccagaagaagcucaugagcaacaacgugcagaucgugcggcagcaguccuacagcaucaugugcaucaucaaggaggagguccuggcguacguggugcagcugccgcucuacggcgucaucgacacccccugcuggaagcugcacacgagcccccugugcaccaccaacaccaaggaggggagcaacaucugccucacgcgcaccgaccggggcugguacugcgacaacgccggguccgugagcuucuucccccaggccgagaccugcaaggugugcuccaaccgcgucuucugcgacaccaugaacagccugacgcugccguccgaggugaaccucugcaacaucgacaucuucaaccccaaguacgacugcaagaucaugaccagcaagaccgacgucuccagcuccgugaucaccagccugggcgccaucguguccugcuacggcaagacgaagugcaccgccagcaacaagaacaaggggaucaucaagaccuucuccaacggcugcgacuacgucagcaacaaggggguggacaccgugagcgucggcaacacgcuguacuacgugaacaagcaggagggcaagucccucuacgugaagggggagcccaucaucaacuucuacgacccccuggucuucccgagcgacgaguucgacgcguccaucagccaggugaacgagaagaucaaccagucccuggccuucauccggaaguccgacgagcuccugcacaacgugaacgucggcaaguccaccaccaacaucaugaucaccaccaucaucaucgugaucaucgugauccugcuccugcugaucgccgucggccucuuccuguacugcaaggcccgcagcacgcccgugacccuguccaaggaccagcugagcgggaucaacaacaucgccuucuccaacugaggacuaguguccaccugucccuccugggcugcuggauugucucguuuuccugccaaauaaacaggaucagcgcuuuacagaucuaaaaaaaaaaaaaaaaaaaaaaaaaaaaaaaaaaaaaaaaaaaaaaaaaaaaaaaaaaaaaaaaugcaucccccccccccccccccccccccccccccccaaaggcucuuuucagagccaccagaauu

SEQ ID NO: 18427 - RNA, 1877 nt, Artificial Sequence
  mRNA product Design b-2 comprising derived and/or modified sequence from HRSV(Memphis-37)__AIY60640.1__F_DSCav1_mut7 (opt2)
gggagagccucugcuggaguccggggaguggcguuggcugcuagagcgaagcuuaccauggagcuccccauccucaagaccaacgccaucaccaccauccucgccgccgucacccucugcuucgccuccucccagaacaucaccgaggaguucuaccaguccaccugcuccgccgucuccaagggcuaccucuccgcccuccgcaccggcugguacaccuccgucaucaccaucgagcucuccaacaucaaggagaacaagugcaacggcaccgacgccaaggucaagcucaucaagcaggagcucgacaaguacaagaacgccgucaccgagcuccagaugcucaugugcuccacccccgccgccggcuccggcuccgccaucgccuccggcaucgccgucugcaagguccuccaccucgagggcgaggucaacaagaucaagaacgcccuccucuccaccaacaaggccgucgucucccucuccaacggcgucuccguccucaccuucaagguccucgaccucaagaacuacaucgacaagcagcuccuccccauccucaacaagcaguccugcuccaucuccaacaucgagaccgucauggaguuccagcagaagaacaaccgccuccucgagaucacccgcgaguucuccgucaacgccggcgucaccacccccgucuccaccuacaugcucaccaacuccgagcuccucucccucaucaacgacaugcccaucaccaacgaccagaagaagcucauguccaacaacguccagaucguccgccagcaguccuacuccaucaugugcaucaucaaggaggagguccucgccuacgucguccagcucccccucuacggcgucaucgacacccccugcuggaagcuccacaccuccccccucugcaccaccaacaccaaggagggcuccaacaucugccucacccgcaccgaccgcggcugguacugcgacaacgccggcuccgucuccuucuucccccaggccgagaccugcaaggucugcuccaaccgcgucuucugcgacaccaugaacucccucacccuccccuccgaggucaaccucugcaacaucgacaucuucaaccccaaguacgacugcaagaucaugaccuccaagaccgacgucuccuccuccgucaucaccucccucggcgccaucgucuccugcuacggcaagaccaagugcaccgccuccaacaagaacaagggcaucaucaagaccuucuccaacggcugcgacuacgucuccaacaagggcgucgacaccgucuccgucggcaacacccucuacuacgucaacaagcaggagggcaagucccucuacgucaagggcgagcccaucaucaacuucuacgacccccucgucuuccccuccgacgaguucgacgccuccaucucccaggucaacgagaagaucaaccagucccucgccuucauccgcaaguccgacgagcuccuccacaacgucaacgucggcaaguccaccaccaacaucaugaucaccaccaucaucaucgucaucaucgucauccuccuccuccucaucgccgucggccucuuccucuacugcaaggcccgcuccacccccgucacccucuccaaggaccagcucuccggcaucaacaacaucgccuucuccaacugaggacuaguguccaccugucccuccugggcugcuggauugucucguuuuccugccaaauaaacaggaucagcgcuuuacagaucuaaaaaaaaaaaaaaaaaaaaaaaaaaaaaaaaaaaaaaaaaaaaaaaaaaaaaaaaaaaaaaaaugcaucccccccccccccccccccccccccccccccaaaggcucuuuucagagccaccagaauu

SEQ ID NO: 18428 - RNA, 1877 nt, Artificial Sequence
  mRNA product Design b-2 comprising derived and/or modified sequence from HRSV(Memphis-37)__AIY60640.1__F_DSCav1_mut7 (opt3)
gggagagccucugcuggaguccggggaguggcguuggcugcuagagcgaagcuuaccauggagcugcccauccucaagaccaacgccauuacaacuauacuugcugcagugacgcugugcuucgccagcucccagaauaucaccgaagaguuuuaccaaucuacauguucagcggucaguaaaggcuauuugagcgcuuuaagaacugggugguacaccuccguuauuacaaucgaacugucuaacauuaaggagaauaaaugcaacggaaccgacgccaaggugaaacuaaucaagcaggaacucgauaaguauaaaaaugcaguaacugagcugcagaugcuuauguguucgaccccugccgcugguucaggcagcgcaauagccagugggaucgcugugugcaagguccugcacuuggagggagaagugaacaaaauuaagaaugcccuccuguccacaaacaaagcgguugugucucugagcaauggcgucuccgugcucacguucaagguauuagaccugaagaacuacaucgauaaacagcuuuugccaauucugaauaagcaaucauguaguaucagcaacauagagacuguuauggaauuucagcagaaaaauaacaggcuacucgagauuacccgggaguucucugugaaugccggugucacaacuccgguguccaccuauaugcugacaaacucagaacuucugagcuugaucaacgacaugcccauuaccaaugaucagaagaaacucaugaguaacaaugugcaaaucguccgccagcagucuuacuccaucaugugcauuauaaaggaggaaguucuggcauaugugguacaguuaccucuguacggggugaucgacacgccauguuggaaacuccauacuagcccccuuugcacaaccaacacuaaggagggaucgaauauuugucugacacgaaccgaucguggcugguacugcgacaacgcuggcucugucuccuuuuucccucaagccgaaacguguaaggugugcucaaauagaguguuuugcgauaccaugaacaguuugacacuaccaagcgagguuaaucuguguaacaucgacauauucaaucccaaauaugauugcaagauuaugacuuccaaaaccgacgucucuagcucagugaucacaagucucggggcaaucguauccuguuacggaaagacuaaaugcaccgcuagcaacaagaauaaggguauuaucaaaacauuuucuaacggcugugauuauguuucaaauaaggggguggacaccgucagugugggaaacacucuguacuaugucaacaaacaggagggcaagagccuuuacgugaaaggugaaccuauuauaaauuucuaugacccacugguuuuuccguccgaugaguucgacgccucuaucagccaggugaacgaaaagauuaaucaaucguuggcguuuaucaggaaguccgaugagcuccugcacaacguaaaugucgggaaaucaacgacaaacaucaugauuaccacuauaaucauugugaucauuguuaucuuacugcuacucauagccgugggacuguuccuuuacugcaaggcacggaguacccccgucacauugucuaaagaccagcugagcggcaucaauaacauugcuuucuccaauugaggacuaguguccaccugucccuccugggcugcuggauugucucguuuuccugccaaauaaacaggaucagcgcuuuacagaucuaaaaaaaaaaaaaaaaaaaaaaaaaaaaaaaaaaaaaaaaaaaaaaaaaaaaaaaaaaaaaaaaugcaucccccccccccccccccccccccccccccccaaaggcucuuuucagagccaccagaauu

SEQ ID NO: 18429 - RNA, 1877 nt, Artificial Sequence
  mRNA product Design b-2 comprising derived and/or modified sequence from HRSV(Memphis-37)__AIY60640.1__F_DSCav1_mut7 (opt4)
gggagagccucugcuggaguccggggaguggcguuggcugcuagagcgaagcuuaccauggagcugcccauccugaagaccaacgccaucaccaccauccuggccgccgugacccugugcuucgccagcagccagaacaucaccgaggaguucuaccagagcaccugcagcgccgugagcaagggcuaccugagcgcccugagaaccggcugguacaccagcgugaucaccaucgagcugagcaacaucaaggagaacaagugcaacggcaccgacgccaaggugaagcugaucaagcaggagcuggacaaguacaagaacgccgugaccgagcugcagaugcugaugugcagcacccccgccgccggcagcggcagcgccaucgccagcggcaucgccgugugcaaggugcugcaccuggagggcgaggugaacaagaucaagaacgcccugcugagcaccaacaaggccguggugagccugagcaacggcgugagcgugcugaccuucaaggugcuggaccugaagaacuacaucgacaagcagcugcugcccauccugaacaagcagagcugcagcaucagcaacaucgagaccgugauggaguuccagcagaagaacaacagacugcuggagaucaccagagaguucagcgugaacgccggcgugaccacccccgugagcaccuacaugcugaccaacagcgagcugcugagccugaucaacgacaugcccaucaccaacgaccagaagaagcugaugagcaacaacgugcagaucgugagacagcagagcuacagcaucaugugcaucaucaaggaggaggugcuggccuacguggugcagcugccccuguacggcgugaucgacacccccugcuggaagcugcacaccagcccccugugcaccaccaacaccaaggagggcagcaacaucugccugaccagaaccgacagaggcugguacugcgacaacgccggcagcgugagcuucuucccccaggccgagaccugcaaggugugcagcaacagaguguucugcgacaccaugaacagccugacccugcccagcgaggugaaccugugcaacaucgacaucuucaaccccaaguacgacugcaagaucaugaccagcaagaccgacgugagcagcagcgugaucaccagccugggcgccaucgugagcugcuacggcaagaccaagugcaccgccagcaacaagaacaagggcaucaucaagaccuucagcaacggcugcgacuacgugagcaacaagggcguggacaccgugagcgugggcaacacccuguacuacgugaacaagcaggagggcaagagccuguacgugaagggcgagcccaucaucaacuucuacgacccccugguguuccccagcgacgaguucgacgccagcaucagccaggugaacgagaagaucaaccagagccuggccuucaucagaaagagcgacgagcugcugcacaacgugaacgugggcaagagcaccaccaacaucaugaucaccaccaucaucaucgugaucaucgugauccugcugcugcugaucgccgugggccuguuccuguacugcaaggccagaagcacccccgugacccugagcaaggaccagcugagcggcaucaacaacaucgccuucagcaacugaggacuaguguccaccugucccuccugggcugcuggauugucucguuuuccugccaaauaaacaggaucagcgcuuuacagaucuaaaaaaaaaaaaaaaaaaaaaaaaaaaaaaaaaaaaaaaaaaaaaaaaaaaaaaaaaaaaaaaaugcaucccccccccccccccccccccccccccccccaaaggcucuuuucagagccaccagaauu

SEQ ID NO: 18430 - RNA, 1877 nt, Artificial Sequence
  mRNA product Design b-2 comprising derived and/or modified sequence from HRSV(Memphis-37)__AIY60640.1__F_DSCav1_mut7 (opt5)
gggagagccucugcuggaguccggggaguggcguuggcugcuagagcgaagcuuaccauggagcugcccauccucaagaccaacgccauuacaacgauccuggcugccgugacccuuugcuucgcgagcucccagaauauuacagaagaguuuuaccaaucuaccuguagcgcugucuccaaaggcuaucugucugcccucagaacagggugguacaccagcguuaucacaauugaacuguccaacaucaaggagaauaaaugcaacggaaccgacgccaaggugaaacuuaucaagcaggaacuggauaaguauaaaaaugcugugacggagcuccagaugcugauguguucuaccccugccgcuggcagcggguccgccauugcgagcggaaucgccgucugcaaggugcugcaccucgagggcgaaguuaacaaaauuaagaaugcucugcuuucuacaaacaaagccguggucucccugagcaauggggugucuguucucaccuucaaggugcuggaccuuaagaacuacaucgauaaacagcugcucccgauucugaauaagcaauccuguagcaucucuaacauugagacagucauggaauuucagcagaaaaauaaccggcugcucgagaucacccgcgaguucuccgugaaugcuggagugacgacacccgucagcaccuauaugcugacaaacuccgaacuucugucucucaucaacgacaugccuauuaccaaugaucagaagaaacugaugagcaacaauguucaaaucgugagacagcaguccuacagcauuaugugcaucauuaaggaggaagugcuugccuaugucgugcagcugccccucuacggcguuaucgacaccccuuguuggaaacugcauacaucuccccugugcacgaccaacacaaaggagggcuccaauaucugucucacccggacagaucgcgggugguacugcgacaacgcgggaagcgugagcuuuuucccucaagccgaaaccuguaaggucugcucuaauagaguguuuugcgauacgaugaacucccugacacuuccgucugagguuaaucuguguaacauugacaucuucaaucccaaauaugauugcaagauuaugaccagcaaaaccgacguguccagcucugucaucacaucccucggcgcuauugugagcuguuacgggaagaccaaaugcacagccucuaacaagaauaagggaaucaucaaaacguuuuccaacggcugugauuaugucagcaauaaggggguggacaccguuuccgugggaaacacacuguacuaugucaacaaacaggagggcaagucucuuuacgugaaaggcgaaccuauuaucaauuucuaugacccccugguuuuuccuagcgaugaguucgacgcuuccauuucucaggugaacgaaaagaucaaucaaagccucgccuuuauucggaaguccgaugagcugcugcacaacgucaauguggggaaaagcaccacaaacaucaugauuaccacgaucaucauugugaucauuguuauccuccugcuucugauugccgucggacucuuccuguacugcaaggcucgcucuacccccgugacacuguccaaagaccagcuuagcggcaucaauaacaucgcguucucuaauugaggacuaguguccaccugucccuccugggcugcuggauugucucguuuuccugccaaauaaacaggaucagcgcuuuacagaucuaaaaaaaaaaaaaaaaaaaaaaaaaaaaaaaaaaaaaaaaaaaaaaaaaaaaaaaaaaaaaaaaugcaucccccccccccccccccccccccccccccccaaaggcucuuuucagagccaccagaauu

SEQ ID NO: 18431 - RNA, 1877 nt, Artificial Sequence
  mRNA product Design b-2 comprising derived and/or modified sequence from HRSV(Memphis-37)__AIY60640.1__F_DSCav1_mut7 (opt6)
gggagagccucugcuggaguccggggaguggcguuggcugcuagagcgaagcuuaccauggaacuaccaauacucaaaacaaaugcuauaaccacaauacucgcagcaguaacauuauguuucgcaucaucccaaaacauaacagaagaauuuuaucaaucaaccuguucagcaguauccaaaggauaccuaagugcauuaagaaccggaugguacacaucaguaauaaccauagaacuuucaaacauaaaagaaaacaaauguaacggcacagacgcaaaagucaaacucaucaaacaggaacuugacaaauauaaaaacgcaguaaccgaacuacaaaugcuaaugugcucaacaccagcagcaggaucaggaucagcaauugcaucuggaauagcuguaugcaaaguccuacaccuagaaggagaaguaaacaaaaucaaaaacgcauuacucuccacaaacaaagcaguaguaucacuaucaaacggaguuucaguacuaaccuucaaaguauuagaccuaaaaaacuacauagacaaacaacuacuaccuauacuaaacaaacaauccuguucaauaagcaacauugaaacuguaauggaauuucaacaaaaaaacaaccgccuauuagaaauaaccagagaauuuuccguaaaugcaggaguaaccacaccagucucuacauacauguuaaccaacucagaacuauuaucacucauaaaugacaugccuauaacaaacgaccaaaaaaaacuaaugucaaacaacguacaaauaguaagacaacaaucauauuccauaaugugcauaauaaaagaagaaguacuugcauacgugguucaacuaccccuauauggaguuauagacacaccaugcuggaaacuccacacuuccccacuuugcacaacuaacacaaaagaaggaucaaauauaugccuaaccagaacagaccguggaugguacugcgacaacgcuggaucagucuccuucuuuccacaagcagaaaccugcaaagucugcucaaauagagucuucugugacacaaugaacucacucacccuacccucagaaguaaaccuauguaauauagauauauuuaauccaaaauacgacugcaaaauuaugacaaguaaaacagacguaagcucaucagucauaaccagccuaggagcaauaguauccuguuacggcaaaacaaaaugcacagcuucaaacaaaaacaaaggcauaauaaaaacauucucaaacggaugugacuauguaucaaauaaaggaguugacacaguaucaguuggaaacacacuauacuauguaaacaaacaagaaggaaaaucacuauacguuaaaggcgaacccauaaucaauuucuacgacccccuagucuucccauccgaugaauuugacgcaucaauaucccaaguaaaugaaaaaaucaaccaaucccuagcauuuauacgaaaauccgacgaacuacuccauaaugucaacgucgguaaaucaacgacaaacaucaugaucacaacaauaauaauaguaauaauuguaauauuacucuuacucauagcaguaggccuauuucuauauugcaaagccagaucaacaccaguaaccuuauccaaagaccaacuaucuggaauaaacaacauagcauuuuccaacugaggacuaguguccaccugucccuccugggcugcuggauugucucguuuuccugccaaauaaacaggaucagcgcuuuacagaucuaaaaaaaaaaaaaaaaaaaaaaaaaaaaaaaaaaaaaaaaaaaaaaaaaaaaaaaaaaaaaaaaugcaucccccccccccccccccccccccccccccccaaaggcucuuuucagagccaccagaauu

SEQ ID NO: 18432 - RNA, 1877 nt, Artificial Sequence
  mRNA product Design b-2 comprising derived and/or modified sequence from HRSV(Memphis-37)__AIY60640.1__F_DSCav1_mut7 (opt11)
gggagagccucugcuggaguccggggaguggcguuggcugcuagagcgaagcuuaccauggaacuccccauacuuaaaacaaacgccauaacaacuauacucgcagccgucacccucuguuucgcauccucucaaaacaucaccgaagaguucuaucaaucaaccugcuccgccgucucaaaaggcuaccucuccgcccuacgcacaggcugguacaccagcgucauuaccauagaacucucgaacaucaaagaaaacaaaugcaacggcaccgacgcaaaagugaaacucaucaaacaagaacucgacaaauacaaaaacgccgucaccgaacuucagaugcucaugugcuccaccccugccgccggcagcggcuccgccauagccuccggcaucgcagucugcaaaguccuccaccucgaaggagaaguaaacaaaaucaaaaaugcucuccucuccacaaacaaagccgucgucucacucuccaauggagucuccguccucaccuucaaaguccucgaccucaaaaacuacauagacaaacaacuacuccccauccucaacaagcaauccugcucuaucuccaacauagaaaccguuauggaguuccaacagaaaaauaaccgccugcuagaaauaacccgagaguucuccgucaacgcaggcgucacuacccccgucagcacauacaugcuaacaaacuccgaacugcucucccuuaucaacgacaugcccaucacaaacgaucagaaaaagcucaugucuaacaacguacaaaucguucggcaacaauccuacuccaucaugugcaucaucaaagaagaagugcucgccuacguaguccaacucccccucuacggagucaucgacacacccugcuggaaacuccacacaucaccccucugcaccaccaacacaaaagaaggguccaacaucugccucacgcgcaccgaccgaggcugguacugcgacaacgccggcuccguauccuucuucccccaagcagaaaccugcaaggucugcuccaaccgcguauucugcgacaccaugaacucgcucacccuccccucagaagucaaccuauguaacaucgacauauucaaucccaaauacgacugcaagauaaugacuuccaaaaccgacguaagcuccucggucaucaccucccucggcgccaucgucuccugcuacggcaaaaccaaaugcaccgccuccaauaagaauaaaggcauaauaaagacauucagcaacggcugcgauuacgucuccaacaaaggugucgacaccgucucagucggcaacacucuauacuacgugaacaaacaagaaggcaaaagccuauacguuaaaggcgaaccaauaaucaauuucuacgacccucuagucuuucccucugacgaguucgaugccagcauaagccaagucaacgaaaagaucaaccaaucacucgccuucauccguaaauccgacgaacugcuccacaaugucaauguaggcaaaucaacaaccaacaucaugaucaccacuauuaucaucgucaucaucguaauccuacuccuacuaaucgccgucggccuauuccucuacugcaaagcccgcucgacccccgucacucucagcaaggaucaacuauccggcaucaacaacaucgccuucuccaacuaaggacuaguguccaccugucccuccugggcugcuggauugucucguuuuccugccaaauaaacaggaucagcgcuuuacagaucuaaaaaaaaaaaaaaaaaaaaaaaaaaaaaaaaaaaaaaaaaaaaaaaaaaaaaaaaaaaaaaaaugcaucccccccccccccccccccccccccccccccaaaggcucuuuucagagccaccagaauu

SEQ ID NO: 18433 - RNA, 1897 nt, Artificial Sequence
  mRNA product Design b-3 comprising derived and/or modified sequence from HRSV(Memphis-37)__AIY60640.1__F_DSCav1_mut7 (opt1)
gggagagucccgcagucggcguccagcggcucugcuuguucgugugugugucguugcaggccuuauucaagcuuaccauggagcugcccauccucaagaccaacgccaucaccacgauccuggccgcggugacccugugcuucgccagcucccagaacaucaccgaggaguucuaccagagcacgugcuccgccgucagcaagggcuaccucuccgcccugcgcaccgggugguacaccagcgugaucaccaucgagcuguccaacaucaaggagaacaagugcaacggcaccgacgccaaggugaagcucaucaagcaggagcuggacaaguacaagaacgcggucacggagcugcagaugcugaugugcagcaccccggccgccggcuccgggagcgcgaucgccuccggcaucgccgucugcaaggugcugcaccucgagggcgaggugaacaagaucaagaacgcccugcuguccaccaacaaggccgucgugagccucuccaacggggugagcguccugaccuucaaggugcuggaccucaagaacuacaucgacaagcagcugcugcccauccugaacaagcagagcugcuccaucagcaacaucgagaccgucauggaguuccagcagaagaacaaccgccuccuggagaucacgcgggaguucagcgugaacgcgggcgugaccacccccgucuccaccuacaugcugacgaacagcgagcuccugucccugaucaacgacaugccgaucaccaacgaccagaagaagcucaugagcaacaacgugcagaucgugcgccagcaguccuacagcaucaugugcaucaucaaggaggagguccuggccuacguggugcagcugccccucuacggggucaucgacacccccugcuggaagcugcacaccagcccccugugcacgaccaacaccaaggagggcuccaacaucugccucacccggacggaccgcgggugguacugcgacaacgccggcagcguguccuucuucccgcaggccgagaccugcaaggucugcagcaaccggguguucugcgacaccaugaacucccugacccugcccagcgaggugaaccucugcaacaucgacaucuucaaccccaaguacgacugcaagaucaugacguccaagaccgacgucagcuccagcgugaucaccucccugggcgccaucgugagcugcuacgggaagaccaagugcacggcgagcaacaagaacaagggcaucaucaagaccuucuccaacgggugcgacuacgucagcaacaagggcguggacaccguguccgucggcaacacccuguacuacgugaacaagcaggagggcaagagccucuacgugaagggggagcccaucaucaacuucuacgacccgcuggucuuccccuccgacgaguucgacgccagcaucucccaggugaacgagaagaucaaccagagccuggccuucauccggaaguccgacgagcuccugcacaacgugaacgucggcaagagcaccacgaacaucaugaucaccaccaucaucaucgugaucaucgugauccugcugcuccugaucgccgucgggcuguuccucuacugcaaggcccgcuccacccccgugacgcugagcaaggaccagcuguccgggaucaacaacaucgcguucagcaacugaggacuaguguccaccugucccuccugggcugcuggauugucucguuuuccugccaaauaaacaggaucagcgcuuuacagaucuaaaaaaaaaaaaaaaaaaaaaaaaaaaaaaaaaaaaaaaaaaaaaaaaaaaaaaaaaaaaaaaaugcaucccccccccccccccccccccccccccccccaaaggcucuuuucagagccaccagaauu

SEQ ID NO: 18434 - RNA, 1897 nt, Artificial Sequence
  mRNA product Design b-3 comprising derived and/or modified sequence from HRSV(Memphis-37)__AIY60640.1__F_DSCav1_mut7 (opt1)
gggagagucccgcagucggcguccagcggcucugcuuguucgugugugugucguugcaggccuuauucaagcuuaccauggagcugcccauccucaagaccaacgccaucaccacgauccuggccgcggugacccugugcuucgccagcucccagaacaucaccgaggaguucuaccagagcacgugcuccgccgucagcaagggcuaccucuccgcccugcgcaccgggugguacaccagcgugaucaccaucgagcuguccaacaucaaggagaacaagugcaacggcaccgacgccaaggugaagcucaucaagcaggagcuggacaaguacaagaacgcggucacggagcugcagaugcucaugugcagcaccccggccgccggguccggcagcgccaucgcguccgggaucgccgugugcaaggugcugcaccuggagggcgaggucaacaagaucaagaacgcccuccugagcaccaacaaggccguggugucccugagcaacggcgucuccgugcucaccuucaaggugcuggaccugaagaacuacaucgacaagcagcuccugcccauccugaacaagcagagcugcuccaucagcaacaucgagacggucauggaguuccagcagaagaacaaccggcuccuggagaucacccgcgaguucuccgugaacgccggggugaccacccccgucagcacguacaugcugaccaacagcgagcuccugucccugaucaacgacaugcccaucaccaacgaccagaagaagcucaugagcaacaacgugcagaucgugcggcagcaguccuacagcaucaugugcaucaucaaggaggagguccuggcguacguggugcagcugccgcucuacggcgucaucgacacccccugcuggaagcugcacacgagcccccugugcaccaccaacaccaaggaggggagcaacaucugccucacgcgcaccgaccggggcugguacugcgacaacgccggguccgugagcuucuucccccaggccgagaccugcaaggugugcuccaaccgcgucuucugcgacaccaugaacagccugacgcugccguccgaggugaaccucugcaacaucgacaucuucaaccccaaguacgacugcaagaucaugaccagcaagaccgacgucuccagcuccgugaucaccagccugggcgccaucguguccugcuacggcaagacgaagugcaccgccagcaacaagaacaaggggaucaucaagaccuucuccaacggcugcgacuacgucagcaacaaggggguggacaccgugagcgucggcaacacgcuguacuacgugaacaagcaggagggcaagucccucuacgugaagggggagcccaucaucaacuucuacgacccccuggucuucccgagcgacgaguucgacgcguccaucagccaggugaacgagaagaucaaccagucccuggccuucauccggaaguccgacgagcuccugcacaacgugaacgucggcaaguccaccaccaacaucaugaucaccaccaucaucaucgugaucaucgugauccugcuccugcugaucgccgucggccucuuccuguacugcaaggcccgcagcacgcccgugacccuguccaaggaccagcugagcgggaucaacaacaucgccuucuccaacugaggacuaguguccaccugucccuccugggcugcuggauugucucguuuuccugccaaauaaacaggaucagcgcuuuacagaucuaaaaaaaaaaaaaaaaaaaaaaaaaaaaaaaaaaaaaaaaaaaaaaaaaaaaaaaaaaaaaaaaugcaucccccccccccccccccccccccccccccccaaaggcucuuuucagagccaccagaauu

SEQ ID NO: 18435 - RNA, 1897 nt, Artificial Sequence
  mRNA product Design b-3 comprising derived and/or modified sequence from HRSV(Memphis-37)__AIY60640.1__F_DSCav1_mut7 (opt2)
gggagagucccgcagucggcguccagcggcucugcuuguucgugugugugucguugcaggccuuauucaagcuuaccauggagcuccccauccucaagaccaacgccaucaccaccauccucgccgccgucacccucugcuucgccuccucccagaacaucaccgaggaguucuaccaguccaccugcuccgccgucuccaagggcuaccucuccgcccuccgcaccggcugguacaccuccgucaucaccaucgagcucuccaacaucaaggagaacaagugcaacggcaccgacgccaaggucaagcucaucaagcaggagcucgacaaguacaagaacgccgucaccgagcuccagaugcucaugugcuccacccccgccgccggcuccggcuccgccaucgccuccggcaucgccgucugcaagguccuccaccucgagggcgaggucaacaagaucaagaacgcccuccucuccaccaacaaggccgucgucucccucuccaacggcgucuccguccucaccuucaagguccucgaccucaagaacuacaucgacaagcagcuccuccccauccucaacaagcaguccugcuccaucuccaacaucgagaccgucauggaguuccagcagaagaacaaccgccuccucgagaucacccgcgaguucuccgucaacgccggcgucaccacccccgucuccaccuacaugcucaccaacuccgagcuccucucccucaucaacgacaugcccaucaccaacgaccagaagaagcucauguccaacaacguccagaucguccgccagcaguccuacuccaucaugugcaucaucaaggaggagguccucgccuacgucguccagcucccccucuacggcgucaucgacacccccugcuggaagcuccacaccuccccccucugcaccaccaacaccaaggagggcuccaacaucugccucacccgcaccgaccgcggcugguacugcgacaacgccggcuccgucuccuucuucccccaggccgagaccugcaaggucugcuccaaccgcgucuucugcgacaccaugaacucccucacccuccccuccgaggucaaccucugcaacaucgacaucuucaaccccaaguacgacugcaagaucaugaccuccaagaccgacgucuccuccuccgucaucaccucccucggcgccaucgucuccugcuacggcaagaccaagugcaccgccuccaacaagaacaagggcaucaucaagaccuucuccaacggcugcgacuacgucuccaacaagggcgucgacaccgucuccgucggcaacacccucuacuacgucaacaagcaggagggcaagucccucuacgucaagggcgagcccaucaucaacuucuacgacccccucgucuuccccuccgacgaguucgacgccuccaucucccaggucaacgagaagaucaaccagucccucgccuucauccgcaaguccgacgagcuccuccacaacgucaacgucggcaaguccaccaccaacaucaugaucaccaccaucaucaucgucaucaucgucauccuccuccuccucaucgccgucggccucuuccucuacugcaaggcccgcuccacccccgucacccucuccaaggaccagcucuccggcaucaacaacaucgccuucuccaacugaggacuaguguccaccugucccuccugggcugcuggauugucucguuuuccugccaaauaaacaggaucagcgcuuuacagaucuaaaaaaaaaaaaaaaaaaaaaaaaaaaaaaaaaaaaaaaaaaaaaaaaaaaaaaaaaaaaaaaaugcaucccccccccccccccccccccccccccccccaaaggcucuuuucagagccaccagaauu

SEQ ID NO: 18436 - RNA, 1897 nt, Artificial Sequence
  mRNA product Design b-3 comprising derived and/or modified sequence from HRSV(Memphis-37)__AIY60640.1__F_DSCav1_mut7 (opt3)
gggagagucccgcagucggcguccagcggcucugcuuguucgugugugugucguugcaggccuuauucaagcuuaccauggagcugcccauccucaagaccaacgccauuacaacuauacuugcugcagugacgcugugcuucgccagcucccagaauaucaccgaagaguuuuaccaaucuacauguucagcggucaguaaaggcuauuugagcgcuuuaagaacugggugguacaccuccguuauuacaaucgaacugucuaacauuaaggagaauaaaugcaacggaaccgacgccaaggugaaacuaaucaagcaggaacucgauaaguauaaaaaugcaguaacugagcugcagaugcuuauguguucgaccccugccgcugguucaggcagcgcaauagccagugggaucgcugugugcaagguccugcacuuggagggagaagugaacaaaauuaagaaugcccuccuguccacaaacaaagcgguugugucucugagcaauggcgucuccgugcucacguucaagguauuagaccugaagaacuacaucgauaaacagcuuuugccaauucugaauaagcaaucauguaguaucagcaacauagagacuguuauggaauuucagcagaaaaauaacaggcuacucgagauuacccgggaguucucugugaaugccggugucacaacuccgguguccaccuauaugcugacaaacucagaacuucugagcuugaucaacgacaugcccauuaccaaugaucagaagaaacucaugaguaacaaugugcaaaucguccgccagcagucuuacuccaucaugugcauuauaaaggaggaaguucuggcauaugugguacaguuaccucuguacggggugaucgacacgccauguuggaaacuccauacuagcccccuuugcacaaccaacacuaaggagggaucgaauauuugucugacacgaaccgaucguggcugguacugcgacaacgcuggcucugucuccuuuuucccucaagccgaaacguguaaggugugcucaaauagaguguuuugcgauaccaugaacaguuugacacuaccaagcgagguuaaucuguguaacaucgacauauucaaucccaaauaugauugcaagauuaugacuuccaaaaccgacgucucuagcucagugaucacaagucucggggcaaucguauccuguuacggaaagacuaaaugcaccgcuagcaacaagaauaaggguauuaucaaaacauuuucuaacggcugugauuauguuucaaauaaggggguggacaccgucagugugggaaacacucuguacuaugucaacaaacaggagggcaagagccuuuacgugaaaggugaaccuauuauaaauuucuaugacccacugguuuuuccguccgaugaguucgacgccucuaucagccaggugaacgaaaagauuaaucaaucguuggcguuuaucaggaaguccgaugagcuccugcacaacguaaaugucgggaaaucaacgacaaacaucaugauuaccacuauaaucauugugaucauuguuaucuuacugcuacucauagccgugggacuguuccuuuacugcaaggcacggaguacccccgucacauugucuaaagaccagcugagcggcaucaauaacauugcuuucuccaauugaggacuaguguccaccugucccuccugggcugcuggauugucucguuuuccugccaaauaaacaggaucagcgcuuuacagaucuaaaaaaaaaaaaaaaaaaaaaaaaaaaaaaaaaaaaaaaaaaaaaaaaaaaaaaaaaaaaaaaaugcaucccccccccccccccccccccccccccccccaaaggcucuuuucagagccaccagaauu

SEQ ID NO: 18437 - RNA, 1897 nt, Artificial Sequence
  mRNA product Design b-3 comprising derived and/or modified sequence from HRSV(Memphis-37)__AIY60640.1__F_DSCav1_mut7 (opt4)
gggagagucccgcagucggcguccagcggcucugcuuguucgugugugugucguugcaggccuuauucaagcuuaccauggagcugcccauccugaagaccaacgccaucaccaccauccuggccgccgugacccugugcuucgccagcagccagaacaucaccgaggaguucuaccagagcaccugcagcgccgugagcaagggcuaccugagcgcccugagaaccggcugguacaccagcgugaucaccaucgagcugagcaacaucaaggagaacaagugcaacggcaccgacgccaaggugaagcugaucaagcaggagcuggacaaguacaagaacgccgugaccgagcugcagaugcugaugugcagcacccccgccgccggcagcggcagcgccaucgccagcggcaucgccgugugcaaggugcugcaccuggagggcgaggugaacaagaucaagaacgcccugcugagcaccaacaaggccguggugagccugagcaacggcgugagcgugcugaccuucaaggugcuggaccugaagaacuacaucgacaagcagcugcugcccauccugaacaagcagagcugcagcaucagcaacaucgagaccgugauggaguuccagcagaagaacaacagacugcuggagaucaccagagaguucagcgugaacgccggcgugaccacccccgugagcaccuacaugcugaccaacagcgagcugcugagccugaucaacgacaugcccaucaccaacgaccagaagaagcugaugagcaacaacgugcagaucgugagacagcagagcuacagcaucaugugcaucaucaaggaggaggugcuggccuacguggugcagcugccccuguacggcgugaucgacacccccugcuggaagcugcacaccagcccccugugcaccaccaacaccaaggagggcagcaacaucugccugaccagaaccgacagaggcugguacugcgacaacgccggcagcgugagcuucuucccccaggccgagaccugcaaggugugcagcaacagaguguucugcgacaccaugaacagccugacccugcccagcgaggugaaccugugcaacaucgacaucuucaaccccaaguacgacugcaagaucaugaccagcaagaccgacgugagcagcagcgugaucaccagccugggcgccaucgugagcugcuacggcaagaccaagugcaccgccagcaacaagaacaagggcaucaucaagaccuucagcaacggcugcgacuacgugagcaacaagggcguggacaccgugagcgugggcaacacccuguacuacgugaacaagcaggagggcaagagccuguacgugaagggcgagcccaucaucaacuucuacgacccccugguguuccccagcgacgaguucgacgccagcaucagccaggugaacgagaagaucaaccagagccuggccuucaucagaaagagcgacgagcugcugcacaacgugaacgugggcaagagcaccaccaacaucaugaucaccaccaucaucaucgugaucaucgugauccugcugcugcugaucgccgugggccuguuccuguacugcaaggccagaagcacccccgugacccugagcaaggaccagcugagcggcaucaacaacaucgccuucagcaacugaggacuaguguccaccugucccuccugggcugcuggauugucucguuuuccugccaaauaaacaggaucagcgcuuuacagaucuaaaaaaaaaaaaaaaaaaaaaaaaaaaaaaaaaaaaaaaaaaaaaaaaaaaaaaaaaaaaaaaaugcaucccccccccccccccccccccccccccccccaaaggcucuuuucagagccaccagaauu

SEQ ID NO: 18438 - RNA, 1897 nt, Artificial Sequence
  mRNA product Design b-3 comprising derived and/or modified sequence from HRSV(Memphis-37)__AIY60640.1__F_DSCav1_mut7 (opt5)
gggagagucccgcagucggcguccagcggcucugcuuguucgugugugugucguugcaggccuuauucaagcuuaccauggagcugcccauccucaagaccaacgccauuacaacgauccuggcugccgugacccuuugcuucgcgagcucccagaauauuacagaagaguuuuaccaaucuaccuguagcgcugucuccaaaggcuaucugucugcccucagaacagggugguacaccagcguuaucacaauugaacuguccaacaucaaggagaauaaaugcaacggaaccgacgccaaggugaaacuuaucaagcaggaacuggauaaguauaaaaaugcugugacggagcuccagaugcugauguguucuaccccugccgcuggcagcggguccgccauugcgagcggaaucgccgucugcaaggugcugcaccucgagggcgaaguuaacaaaauuaagaaugcucugcuuucuacaaacaaagccguggucucccugagcaauggggugucuguucucaccuucaaggugcuggaccuuaagaacuacaucgauaaacagcugcucccgauucugaauaagcaauccuguagcaucucuaacauugagacagucauggaauuucagcagaaaaauaaccggcugcucgagaucacccgcgaguucuccgugaaugcuggagugacgacacccgucagcaccuauaugcugacaaacuccgaacuucugucucucaucaacgacaugccuauuaccaaugaucagaagaaacugaugagcaacaauguucaaaucgugagacagcaguccuacagcauuaugugcaucauuaaggaggaagugcuugccuaugucgugcagcugccccucuacggcguuaucgacaccccuuguuggaaacugcauacaucuccccugugcacgaccaacacaaaggagggcuccaauaucugucucacccggacagaucgcgggugguacugcgacaacgcgggaagcgugagcuuuuucccucaagccgaaaccuguaaggucugcucuaauagaguguuuugcgauacgaugaacucccugacacuuccgucugagguuaaucuguguaacauugacaucuucaaucccaaauaugauugcaagauuaugaccagcaaaaccgacguguccagcucugucaucacaucccucggcgcuauugugagcuguuacgggaagaccaaaugcacagccucuaacaagaauaagggaaucaucaaaacguuuuccaacggcugugauuaugucagcaauaaggggguggacaccguuuccgugggaaacacacuguacuaugucaacaaacaggagggcaagucucuuuacgugaaaggcgaaccuauuaucaauuucuaugacccccugguuuuuccuagcgaugaguucgacgcuuccauuucucaggugaacgaaaagaucaaucaaagccucgccuuuauucggaaguccgaugagcugcugcacaacgucaauguggggaaaagcaccacaaacaucaugauuaccacgaucaucauugugaucauuguuauccuccugcuucugauugccgucggacucuuccuguacugcaaggcucgcucuacccccgugacacuguccaaagaccagcuuagcggcaucaauaacaucgcguucucuaauugaggacuaguguccaccugucccuccugggcugcuggauugucucguuuuccugccaaauaaacaggaucagcgcuuuacagaucuaaaaaaaaaaaaaaaaaaaaaaaaaaaaaaaaaaaaaaaaaaaaaaaaaaaaaaaaaaaaaaaaugcaucccccccccccccccccccccccccccccccaaaggcucuuuucagagccaccagaauu

SEQ ID NO: 18439 - RNA, 1897 nt, Artificial Sequence
  mRNA product Design b-3 comprising derived and/or modified sequence from HRSV(Memphis-37)__AIY60640.1__F_DSCav1_mut7 (opt6)
gggagagucccgcagucggcguccagcggcucugcuuguucgugugugugucguugcaggccuuauucaagcuuaccauggaacuaccaauacucaaaacaaaugcuauaaccacaauacucgcagcaguaacauuauguuucgcaucaucccaaaacauaacagaagaauuuuaucaaucaaccuguucagcaguauccaaaggauaccuaagugcauuaagaaccggaugguacacaucaguaauaaccauagaacuuucaaacauaaaagaaaacaaauguaacggcacagacgcaaaagucaaacucaucaaacaggaacuugacaaauauaaaaacgcaguaaccgaacuacaaaugcuaaugugcucaacaccagcagcaggaucaggaucagcaauugcaucuggaauagcuguaugcaaaguccuacaccuagaaggagaaguaaacaaaaucaaaaacgcauuacucuccacaaacaaagcaguaguaucacuaucaaacggaguuucaguacuaaccuucaaaguauuagaccuaaaaaacuacauagacaaacaacuacuaccuauacuaaacaaacaauccuguucaauaagcaacauugaaacuguaauggaauuucaacaaaaaaacaaccgccuauuagaaauaaccagagaauuuuccguaaaugcaggaguaaccacaccagucucuacauacauguuaaccaacucagaacuauuaucacucauaaaugacaugccuauaacaaacgaccaaaaaaaacuaaugucaaacaacguacaaauaguaagacaacaaucauauuccauaaugugcauaauaaaagaagaaguacuugcauacgugguucaacuaccccuauauggaguuauagacacaccaugcuggaaacuccacacuuccccacuuugcacaacuaacacaaaagaaggaucaaauauaugccuaaccagaacagaccguggaugguacugcgacaacgcuggaucagucuccuucuuuccacaagcagaaaccugcaaagucugcucaaauagagucuucugugacacaaugaacucacucacccuacccucagaaguaaaccuauguaauauagauauauuuaauccaaaauacgacugcaaaauuaugacaaguaaaacagacguaagcucaucagucauaaccagccuaggagcaauaguauccuguuacggcaaaacaaaaugcacagcuucaaacaaaaacaaaggcauaauaaaaacauucucaaacggaugugacuauguaucaaauaaaggaguugacacaguaucaguuggaaacacacuauacuauguaaacaaacaagaaggaaaaucacuauacguuaaaggcgaacccauaaucaauuucuacgacccccuagucuucccauccgaugaauuugacgcaucaauaucccaaguaaaugaaaaaaucaaccaaucccuagcauuuauacgaaaauccgacgaacuacuccauaaugucaacgucgguaaaucaacgacaaacaucaugaucacaacaauaauaauaguaauaauuguaauauuacucuuacucauagcaguaggccuauuucuauauugcaaagccagaucaacaccaguaaccuuauccaaagaccaacuaucuggaauaaacaacauagcauuuuccaacugaggacuaguguccaccugucccuccugggcugcuggauugucucguuuuccugccaaauaaacaggaucagcgcuuuacagaucuaaaaaaaaaaaaaaaaaaaaaaaaaaaaaaaaaaaaaaaaaaaaaaaaaaaaaaaaaaaaaaaaugcaucccccccccccccccccccccccccccccccaaaggcucuuuucagagccaccagaauu

SEQ ID NO: 18440 - RNA, 1897 nt, Artificial Sequence
  mRNA product Design b-3 comprising derived and/or modified sequence from HRSV(Memphis-37)__AIY60640.1__F_DSCav1_mut7 (opt11)
gggagagucccgcagucggcguccagcggcucugcuuguucgugugugugucguugcaggccuuauucaagcuuaccauggaacuccccauacuuaaaacaaacgccauaacaacuauacucgcagccgucacccucuguuucgcauccucucaaaacaucaccgaagaguucuaucaaucaaccugcuccgccgucucaaaaggcuaccucuccgcccuacgcacaggcugguacaccagcgucauuaccauagaacucucgaacaucaaagaaaacaaaugcaacggcaccgacgcaaaagugaaacucaucaaacaagaacucgacaaauacaaaaacgccgucaccgaacuucagaugcucaugugcuccaccccugccgccggcagcggcuccgccauagccuccggcaucgcagucugcaaaguccuccaccucgaaggagaaguaaacaaaaucaaaaaugcucuccucuccacaaacaaagccgucgucucacucuccaauggagucuccguccucaccuucaaaguccucgaccucaaaaacuacauagacaaacaacuacuccccauccucaacaagcaauccugcucuaucuccaacauagaaaccguuauggaguuccaacagaaaaauaaccgccugcuagaaauaacccgagaguucuccgucaacgcaggcgucacuacccccgucagcacauacaugcuaacaaacuccgaacugcucucccuuaucaacgacaugcccaucacaaacgaucagaaaaagcucaugucuaacaacguacaaaucguucggcaacaauccuacuccaucaugugcaucaucaaagaagaagugcucgccuacguaguccaacucccccucuacggagucaucgacacacccugcuggaaacuccacacaucaccccucugcaccaccaacacaaaagaaggguccaacaucugccucacgcgcaccgaccgaggcugguacugcgacaacgccggcuccguauccuucuucccccaagcagaaaccugcaaggucugcuccaaccgcguauucugcgacaccaugaacucgcucacccuccccucagaagucaaccuauguaacaucgacauauucaaucccaaauacgacugcaagauaaugacuuccaaaaccgacguaagcuccucggucaucaccucccucggcgccaucgucuccugcuacggcaaaaccaaaugcaccgccuccaauaagaauaaaggcauaauaaagacauucagcaacggcugcgauuacgucuccaacaaaggugucgacaccgucucagucggcaacacucuauacuacgugaacaaacaagaaggcaaaagccuauacguuaaaggcgaaccaauaaucaauuucuacgacccucuagucuuucccucugacgaguucgaugccagcauaagccaagucaacgaaaagaucaaccaaucacucgccuucauccguaaauccgacgaacugcuccacaaugucaauguaggcaaaucaacaaccaacaucaugaucaccacuauuaucaucgucaucaucguaauccuacuccuacuaaucgccgucggccuauuccucuacugcaaagcccgcucgacccccgucacucucagcaaggaucaacuauccggcaucaacaacaucgccuucuccaacuaaggacuaguguccaccugucccuccugggcugcuggauugucucguuuuccugccaaauaaacaggaucagcgcuuuacagaucuaaaaaaaaaaaaaaaaaaaaaaaaaaaaaaaaaaaaaaaaaaaaaaaaaaaaaaaaaaaaaaaaugcaucccccccccccccccccccccccccccccccaaaggcucuuuucagagccaccagaauu

SEQ ID NO: 18441 - RNA, 1948 nt, Artificial Sequence
  mRNA product Design b-4 comprising derived and/or modified sequence from HRSV(Memphis-37)__AIY60640.1__F_DSCav1_mut7 (opt1)
gggagagucccgcagucggcguccagcggcucugcuuguucgugugugugucguugcaggccuuauucaagcuuaccauggagcugcccauccucaagaccaacgccaucaccacgauccuggccgcggugacccugugcuucgccagcucccagaacaucaccgaggaguucuaccagagcacgugcuccgccgucagcaagggcuaccucuccgcccugcgcaccgggugguacaccagcgugaucaccaucgagcuguccaacaucaaggagaacaagugcaacggcaccgacgccaaggugaagcucaucaagcaggagcuggacaaguacaagaacgcggucacggagcugcagaugcugaugugcagcaccccggccgccggcuccgggagcgcgaucgccuccggcaucgccgucugcaaggugcugcaccucgagggcgaggugaacaagaucaagaacgcccugcuguccaccaacaaggccgucgugagccucuccaacggggugagcguccugaccuucaaggugcuggaccucaagaacuacaucgacaagcagcugcugcccauccugaacaagcagagcugcuccaucagcaacaucgagaccgucauggaguuccagcagaagaacaaccgccuccuggagaucacgcgggaguucagcgugaacgcgggcgugaccacccccgucuccaccuacaugcugacgaacagcgagcuccugucccugaucaacgacaugccgaucaccaacgaccagaagaagcucaugagcaacaacgugcagaucgugcgccagcaguccuacagcaucaugugcaucaucaaggaggagguccuggccuacguggugcagcugccccucuacggggucaucgacacccccugcuggaagcugcacaccagcccccugugcacgaccaacaccaaggagggcuccaacaucugccucacccggacggaccgcgggugguacugcgacaacgccggcagcguguccuucuucccgcaggccgagaccugcaaggucugcagcaaccggguguucugcgacaccaugaacucccugacccugcccagcgaggugaaccucugcaacaucgacaucuucaaccccaaguacgacugcaagaucaugacguccaagaccgacgucagcuccagcgugaucaccucccugggcgccaucgugagcugcuacgggaagaccaagugcacggcgagcaacaagaacaagggcaucaucaagaccuucuccaacgggugcgacuacgucagcaacaagggcguggacaccguguccgucggcaacacccuguacuacgugaacaagcaggagggcaagagccucuacgugaagggggagcccaucaucaacuucuacgacccgcuggucuuccccuccgacgaguucgacgccagcaucucccaggugaacgagaagaucaaccagagccuggccuucauccggaaguccgacgagcuccugcacaacgugaacgucggcaagagcaccacgaacaucaugaucaccaccaucaucaucgugaucaucgugauccugcugcuccugaucgccgucgggcuguuccucuacugcaaggcccgcuccacccccgugacgcugagcaaggaccagcuguccgggaucaacaacaucgcguucagcaacugaggacuaguaauaaggaaacuguaugaaugucugugggcaggaagugaagagauccuucuguaaagguuuuuggaauuaugucugcugaauaauaaacuuuuuugaaauaauaaaucugguagaaaaaugagaucuaaaaaaaaaaaaaaaaaaaaaaaaaaaaaaaaaaaaaaaaaaaaaaaaaaaaaaaaaaaaaaaaugcaucccccccccccccccccccccccccccccccaaaggcucuuuucagagccaccagaauu

SEQ ID NO: 18442 - RNA, 1948 nt, Artificial Sequence
  mRNA product Design b-4 comprising derived and/or modified sequence from HRSV(Memphis-37)__AIY60640.1__F_DSCav1_mut7 (opt1)
gggagagucccgcagucggcguccagcggcucugcuuguucgugugugugucguugcaggccuuauucaagcuuaccauggagcugcccauccucaagaccaacgccaucaccacgauccuggccgcggugacccugugcuucgccagcucccagaacaucaccgaggaguucuaccagagcacgugcuccgccgucagcaagggcuaccucuccgcccugcgcaccgggugguacaccagcgugaucaccaucgagcuguccaacaucaaggagaacaagugcaacggcaccgacgccaaggugaagcucaucaagcaggagcuggacaaguacaagaacgcggucacggagcugcagaugcucaugugcagcaccccggccgccggguccggcagcgccaucgcguccgggaucgccgugugcaaggugcugcaccuggagggcgaggucaacaagaucaagaacgcccuccugagcaccaacaaggccguggugucccugagcaacggcgucuccgugcucaccuucaaggugcuggaccugaagaacuacaucgacaagcagcuccugcccauccugaacaagcagagcugcuccaucagcaacaucgagacggucauggaguuccagcagaagaacaaccggcuccuggagaucacccgcgaguucuccgugaacgccggggugaccacccccgucagcacguacaugcugaccaacagcgagcuccugucccugaucaacgacaugcccaucaccaacgaccagaagaagcucaugagcaacaacgugcagaucgugcggcagcaguccuacagcaucaugugcaucaucaaggaggagguccuggcguacguggugcagcugccgcucuacggcgucaucgacacccccugcuggaagcugcacacgagcccccugugcaccaccaacaccaaggaggggagcaacaucugccucacgcgcaccgaccggggcugguacugcgacaacgccggguccgugagcuucuucccccaggccgagaccugcaaggugugcuccaaccgcgucuucugcgacaccaugaacagccugacgcugccguccgaggugaaccucugcaacaucgacaucuucaaccccaaguacgacugcaagaucaugaccagcaagaccgacgucuccagcuccgugaucaccagccugggcgccaucguguccugcuacggcaagacgaagugcaccgccagcaacaagaacaaggggaucaucaagaccuucuccaacggcugcgacuacgucagcaacaaggggguggacaccgugagcgucggcaacacgcuguacuacgugaacaagcaggagggcaagucccucuacgugaagggggagcccaucaucaacuucuacgacccccuggucuucccgagcgacgaguucgacgcguccaucagccaggugaacgagaagaucaaccagucccuggccuucauccggaaguccgacgagcuccugcacaacgugaacgucggcaaguccaccaccaacaucaugaucaccaccaucaucaucgugaucaucgugauccugcuccugcugaucgccgucggccucuuccuguacugcaaggcccgcagcacgcccgugacccuguccaaggaccagcugagcgggaucaacaacaucgccuucuccaacugaggacuaguaauaaggaaacuguaugaaugucugugggcaggaagugaagagauccuucuguaaagguuuuuggaauuaugucugcugaauaauaaacuuuuuugaaauaauaaaucugguagaaaaaugagaucuaaaaaaaaaaaaaaaaaaaaaaaaaaaaaaaaaaaaaaaaaaaaaaaaaaaaaaaaaaaaaaaaugcaucccccccccccccccccccccccccccccccaaaggcucuuuucagagccaccagaauu

SEQ ID NO: 18443 - RNA, 1948 nt, Artificial Sequence
  mRNA product Design b-4 comprising derived and/or modified sequence from HRSV(Memphis-37)__AIY60640.1__F_DSCav1_mut7 (opt2)
gggagagucccgcagucggcguccagcggcucugcuuguucgugugugugucguugcaggccuuauucaagcuuaccauggagcuccccauccucaagaccaacgccaucaccaccauccucgccgccgucacccucugcuucgccuccucccagaacaucaccgaggaguucuaccaguccaccugcuccgccgucuccaagggcuaccucuccgcccuccgcaccggcugguacaccuccgucaucaccaucgagcucuccaacaucaaggagaacaagugcaacggcaccgacgccaaggucaagcucaucaagcaggagcucgacaaguacaagaacgccgucaccgagcuccagaugcucaugugcuccacccccgccgccggcuccggcuccgccaucgccuccggcaucgccgucugcaagguccuccaccucgagggcgaggucaacaagaucaagaacgcccuccucuccaccaacaaggccgucgucucccucuccaacggcgucuccguccucaccuucaagguccucgaccucaagaacuacaucgacaagcagcuccuccccauccucaacaagcaguccugcuccaucuccaacaucgagaccgucauggaguuccagcagaagaacaaccgccuccucgagaucacccgcgaguucuccgucaacgccggcgucaccacccccgucuccaccuacaugcucaccaacuccgagcuccucucccucaucaacgacaugcccaucaccaacgaccagaagaagcucauguccaacaacguccagaucguccgccagcaguccuacuccaucaugugcaucaucaaggaggagguccucgccuacgucguccagcucccccucuacggcgucaucgacacccccugcuggaagcuccacaccuccccccucugcaccaccaacaccaaggagggcuccaacaucugccucacccgcaccgaccgcggcugguacugcgacaacgccggcuccgucuccuucuucccccaggccgagaccugcaaggucugcuccaaccgcgucuucugcgacaccaugaacucccucacccuccccuccgaggucaaccucugcaacaucgacaucuucaaccccaaguacgacugcaagaucaugaccuccaagaccgacgucuccuccuccgucaucaccucccucggcgccaucgucuccugcuacggcaagaccaagugcaccgccuccaacaagaacaagggcaucaucaagaccuucuccaacggcugcgacuacgucuccaacaagggcgucgacaccgucuccgucggcaacacccucuacuacgucaacaagcaggagggcaagucccucuacgucaagggcgagcccaucaucaacuucuacgacccccucgucuuccccuccgacgaguucgacgccuccaucucccaggucaacgagaagaucaaccagucccucgccuucauccgcaaguccgacgagcuccuccacaacgucaacgucggcaaguccaccaccaacaucaugaucaccaccaucaucaucgucaucaucgucauccuccuccuccucaucgccgucggccucuuccucuacugcaaggcccgcuccacccccgucacccucuccaaggaccagcucuccggcaucaacaacaucgccuucuccaacugaggacuaguaauaaggaaacuguaugaaugucugugggcaggaagugaagagauccuucuguaaagguuuuuggaauuaugucugcugaauaauaaacuuuuuugaaauaauaaaucugguagaaaaaugagaucuaaaaaaaaaaaaaaaaaaaaaaaaaaaaaaaaaaaaaaaaaaaaaaaaaaaaaaaaaaaaaaaaugcaucccccccccccccccccccccccccccccccaaaggcucuuuucagagccaccagaauu

SEQ ID NO: 18444 - RNA, 1948 nt, Artificial Sequence
  mRNA product Design b-4 comprising derived and/or modified sequence from HRSV(Memphis-37)__AIY60640.1__F_DSCav1_mut7 (opt3)
gggagagucccgcagucggcguccagcggcucugcuuguucgugugugugucguugcaggccuuauucaagcuuaccauggagcugcccauccucaagaccaacgccauuacaacuauacuugcugcagugacgcugugcuucgccagcucccagaauaucaccgaagaguuuuaccaaucuacauguucagcggucaguaaaggcuauuugagcgcuuuaagaacugggugguacaccuccguuauuacaaucgaacugucuaacauuaaggagaauaaaugcaacggaaccgacgccaaggugaaacuaaucaagcaggaacucgauaaguauaaaaaugcaguaacugagcugcagaugcuuauguguucgaccccugccgcugguucaggcagcgcaauagccagugggaucgcugugugcaagguccugcacuuggagggagaagugaacaaaauuaagaaugcccuccuguccacaaacaaagcgguugugucucugagcaauggcgucuccgugcucacguucaagguauuagaccugaagaacuacaucgauaaacagcuuuugccaauucugaauaagcaaucauguaguaucagcaacauagagacuguuauggaauuucagcagaaaaauaacaggcuacucgagauuacccgggaguucucugugaaugccggugucacaacuccgguguccaccuauaugcugacaaacucagaacuucugagcuugaucaacgacaugcccauuaccaaugaucagaagaaacucaugaguaacaaugugcaaaucguccgccagcagucuuacuccaucaugugcauuauaaaggaggaaguucuggcauaugugguacaguuaccucuguacggggugaucgacacgccauguuggaaacuccauacuagcccccuuugcacaaccaacacuaaggagggaucgaauauuugucugacacgaaccgaucguggcugguacugcgacaacgcuggcucugucuccuuuuucccucaagccgaaacguguaaggugugcucaaauagaguguuuugcgauaccaugaacaguuugacacuaccaagcgagguuaaucuguguaacaucgacauauucaaucccaaauaugauugcaagauuaugacuuccaaaaccgacgucucuagcucagugaucacaagucucggggcaaucguauccuguuacggaaagacuaaaugcaccgcuagcaacaagaauaaggguauuaucaaaacauuuucuaacggcugugauuauguuucaaauaaggggguggacaccgucagugugggaaacacucuguacuaugucaacaaacaggagggcaagagccuuuacgugaaaggugaaccuauuauaaauuucuaugacccacugguuuuuccguccgaugaguucgacgccucuaucagccaggugaacgaaaagauuaaucaaucguuggcguuuaucaggaaguccgaugagcuccugcacaacguaaaugucgggaaaucaacgacaaacaucaugauuaccacuauaaucauugugaucauuguuaucuuacugcuacucauagccgugggacuguuccuuuacugcaaggcacggaguacccccgucacauugucuaaagaccagcugagcggcaucaauaacauugcuuucuccaauugaggacuaguaauaaggaaacuguaugaaugucugugggcaggaagugaagagauccuucuguaaagguuuuuggaauuaugucugcugaauaauaaacuuuuuugaaauaauaaaucugguagaaaaaugagaucuaaaaaaaaaaaaaaaaaaaaaaaaaaaaaaaaaaaaaaaaaaaaaaaaaaaaaaaaaaaaaaaaugcaucccccccccccccccccccccccccccccccaaaggcucuuuucagagccaccagaauu

SEQ ID NO: 18445 - RNA, 1948 nt, Artificial Sequence
  mRNA product Design b-4 comprising derived and/or modified sequence from HRSV(Memphis-37)__AIY60640.1__F_DSCav1_mut7 (opt4)
gggagagucccgcagucggcguccagcggcucugcuuguucgugugugugucguugcaggccuuauucaagcuuaccauggagcugcccauccugaagaccaacgccaucaccaccauccuggccgccgugacccugugcuucgccagcagccagaacaucaccgaggaguucuaccagagcaccugcagcgccgugagcaagggcuaccugagcgcccugagaaccggcugguacaccagcgugaucaccaucgagcugagcaacaucaaggagaacaagugcaacggcaccgacgccaaggugaagcugaucaagcaggagcuggacaaguacaagaacgccgugaccgagcugcagaugcugaugugcagcacccccgccgccggcagcggcagcgccaucgccagcggcaucgccgugugcaaggugcugcaccuggagggcgaggugaacaagaucaagaacgcccugcugagcaccaacaaggccguggugagccugagcaacggcgugagcgugcugaccuucaaggugcuggaccugaagaacuacaucgacaagcagcugcugcccauccugaacaagcagagcugcagcaucagcaacaucgagaccgugauggaguuccagcagaagaacaacagacugcuggagaucaccagagaguucagcgugaacgccggcgugaccacccccgugagcaccuacaugcugaccaacagcgagcugcugagccugaucaacgacaugcccaucaccaacgaccagaagaagcugaugagcaacaacgugcagaucgugagacagcagagcuacagcaucaugugcaucaucaaggaggaggugcuggccuacguggugcagcugccccuguacggcgugaucgacacccccugcuggaagcugcacaccagcccccugugcaccaccaacaccaaggagggcagcaacaucugccugaccagaaccgacagaggcugguacugcgacaacgccggcagcgugagcuucuucccccaggccgagaccugcaaggugugcagcaacagaguguucugcgacaccaugaacagccugacccugcccagcgaggugaaccugugcaacaucgacaucuucaaccccaaguacgacugcaagaucaugaccagcaagaccgacgugagcagcagcgugaucaccagccugggcgccaucgugagcugcuacggcaagaccaagugcaccgccagcaacaagaacaagggcaucaucaagaccuucagcaacggcugcgacuacgugagcaacaagggcguggacaccgugagcgugggcaacacccuguacuacgugaacaagcaggagggcaagagccuguacgugaagggcgagcccaucaucaacuucuacgacccccugguguuccccagcgacgaguucgacgccagcaucagccaggugaacgagaagaucaaccagagccuggccuucaucagaaagagcgacgagcugcugcacaacgugaacgugggcaagagcaccaccaacaucaugaucaccaccaucaucaucgugaucaucgugauccugcugcugcugaucgccgugggccuguuccuguacugcaaggccagaagcacccccgugacccugagcaaggaccagcugagcggcaucaacaacaucgccuucagcaacugaggacuaguaauaaggaaacuguaugaaugucugugggcaggaagugaagagauccuucuguaaagguuuuuggaauuaugucugcugaauaauaaacuuuuuugaaauaauaaaucugguagaaaaaugagaucuaaaaaaaaaaaaaaaaaaaaaaaaaaaaaaaaaaaaaaaaaaaaaaaaaaaaaaaaaaaaaaaaugcaucccccccccccccccccccccccccccccccaaaggcucuuuucagagccaccagaauu

SEQ ID NO: 18446 - RNA, 1948 nt, Artificial Sequence
  mRNA product Design b-4 comprising derived and/or modified sequence from HRSV(Memphis-37)__AIY60640.1__F_DSCav1_mut7 (opt5)
gggagagucccgcagucggcguccagcggcucugcuuguucgugugugugucguugcaggccuuauucaagcuuaccauggagcugcccauccucaagaccaacgccauuacaacgauccuggcugccgugacccuuugcuucgcgagcucccagaauauuacagaagaguuuuaccaaucuaccuguagcgcugucuccaaaggcuaucugucugcccucagaacagggugguacaccagcguuaucacaauugaacuguccaacaucaaggagaauaaaugcaacggaaccgacgccaaggugaaacuuaucaagcaggaacuggauaaguauaaaaaugcugugacggagcuccagaugcugauguguucuaccccugccgcuggcagcggguccgccauugcgagcggaaucgccgucugcaaggugcugcaccucgagggcgaaguuaacaaaauuaagaaugcucugcuuucuacaaacaaagccguggucucccugagcaauggggugucuguucucaccuucaaggugcuggaccuuaagaacuacaucgauaaacagcugcucccgauucugaauaagcaauccuguagcaucucuaacauugagacagucauggaauuucagcagaaaaauaaccggcugcucgagaucacccgcgaguucuccgugaaugcuggagugacgacacccgucagcaccuauaugcugacaaacuccgaacuucugucucucaucaacgacaugccuauuaccaaugaucagaagaaacugaugagcaacaauguucaaaucgugagacagcaguccuacagcauuaugugcaucauuaaggaggaagugcuugccuaugucgugcagcugccccucuacggcguuaucgacaccccuuguuggaaacugcauacaucuccccugugcacgaccaacacaaaggagggcuccaauaucugucucacccggacagaucgcgggugguacugcgacaacgcgggaagcgugagcuuuuucccucaagccgaaaccuguaaggucugcucuaauagaguguuuugcgauacgaugaacucccugacacuuccgucugagguuaaucuguguaacauugacaucuucaaucccaaauaugauugcaagauuaugaccagcaaaaccgacguguccagcucugucaucacaucccucggcgcuauugugagcuguuacgggaagaccaaaugcacagccucuaacaagaauaagggaaucaucaaaacguuuuccaacggcugugauuaugucagcaauaaggggguggacaccguuuccgugggaaacacacuguacuaugucaacaaacaggagggcaagucucuuuacgugaaaggcgaaccuauuaucaauuucuaugacccccugguuuuuccuagcgaugaguucgacgcuuccauuucucaggugaacgaaaagaucaaucaaagccucgccuuuauucggaaguccgaugagcugcugcacaacgucaauguggggaaaagcaccacaaacaucaugauuaccacgaucaucauugugaucauuguuauccuccugcuucugauugccgucggacucuuccuguacugcaaggcucgcucuacccccgugacacuguccaaagaccagcuuagcggcaucaauaacaucgcguucucuaauugaggacuaguaauaaggaaacuguaugaaugucugugggcaggaagugaagagauccuucuguaaagguuuuuggaauuaugucugcugaauaauaaacuuuuuugaaauaauaaaucugguagaaaaaugagaucuaaaaaaaaaaaaaaaaaaaaaaaaaaaaaaaaaaaaaaaaaaaaaaaaaaaaaaaaaaaaaaaaugcaucccccccccccccccccccccccccccccccaaaggcucuuuucagagccaccagaauu

SEQ ID NO: 18447 - RNA, 1948 nt, Artificial Sequence
  mRNA product Design b-4 comprising derived and/or modified sequence from HRSV(Memphis-37)__AIY60640.1__F_DSCav1_mut7 (opt6)
gggagagucccgcagucggcguccagcggcucugcuuguucgugugugugucguugcaggccuuauucaagcuuaccauggaacuaccaauacucaaaacaaaugcuauaaccacaauacucgcagcaguaacauuauguuucgcaucaucccaaaacauaacagaagaauuuuaucaaucaaccuguucagcaguauccaaaggauaccuaagugcauuaagaaccggaugguacacaucaguaauaaccauagaacuuucaaacauaaaagaaaacaaauguaacggcacagacgcaaaagucaaacucaucaaacaggaacuugacaaauauaaaaacgcaguaaccgaacuacaaaugcuaaugugcucaacaccagcagcaggaucaggaucagcaauugcaucuggaauagcuguaugcaaaguccuacaccuagaaggagaaguaaacaaaaucaaaaacgcauuacucuccacaaacaaagcaguaguaucacuaucaaacggaguuucaguacuaaccuucaaaguauuagaccuaaaaaacuacauagacaaacaacuacuaccuauacuaaacaaacaauccuguucaauaagcaacauugaaacuguaauggaauuucaacaaaaaaacaaccgccuauuagaaauaaccagagaauuuuccguaaaugcaggaguaaccacaccagucucuacauacauguuaaccaacucagaacuauuaucacucauaaaugacaugccuauaacaaacgaccaaaaaaaacuaaugucaaacaacguacaaauaguaagacaacaaucauauuccauaaugugcauaauaaaagaagaaguacuugcauacgugguucaacuaccccuauauggaguuauagacacaccaugcuggaaacuccacacuuccccacuuugcacaacuaacacaaaagaaggaucaaauauaugccuaaccagaacagaccguggaugguacugcgacaacgcuggaucagucuccuucuuuccacaagcagaaaccugcaaagucugcucaaauagagucuucugugacacaaugaacucacucacccuacccucagaaguaaaccuauguaauauagauauauuuaauccaaaauacgacugcaaaauuaugacaaguaaaacagacguaagcucaucagucauaaccagccuaggagcaauaguauccuguuacggcaaaacaaaaugcacagcuucaaacaaaaacaaaggcauaauaaaaacauucucaaacggaugugacuauguaucaaauaaaggaguugacacaguaucaguuggaaacacacuauacuauguaaacaaacaagaaggaaaaucacuauacguuaaaggcgaacccauaaucaauuucuacgacccccuagucuucccauccgaugaauuugacgcaucaauaucccaaguaaaugaaaaaaucaaccaaucccuagcauuuauacgaaaauccgacgaacuacuccauaaugucaacgucgguaaaucaacgacaaacaucaugaucacaacaauaauaauaguaauaauuguaauauuacucuuacucauagcaguaggccuauuucuauauugcaaagccagaucaacaccaguaaccuuauccaaagaccaacuaucuggaauaaacaacauagcauuuuccaacugaggacuaguaauaaggaaacuguaugaaugucugugggcaggaagugaagagauccuucuguaaagguuuuuggaauuaugucugcugaauaauaaacuuuuuugaaauaauaaaucugguagaaaaaugagaucuaaaaaaaaaaaaaaaaaaaaaaaaaaaaaaaaaaaaaaaaaaaaaaaaaaaaaaaaaaaaaaaaugcaucccccccccccccccccccccccccccccccaaaggcucuuuucagagccaccagaauu

SEQ ID NO: 18448 - RNA, 1948 nt, Artificial Sequence
  mRNA product Design b-4 comprising derived and/or modified sequence from HRSV(Memphis-37)__AIY60640.1__F_DSCav1_mut7 (opt11)
gggagagucccgcagucggcguccagcggcucugcuuguucgugugugugucguugcaggccuuauucaagcuuaccauggaacuccccauacuuaaaacaaacgccauaacaacuauacucgcagccgucacccucuguuucgcauccucucaaaacaucaccgaagaguucuaucaaucaaccugcuccgccgucucaaaaggcuaccucuccgcccuacgcacaggcugguacaccagcgucauuaccauagaacucucgaacaucaaagaaaacaaaugcaacggcaccgacgcaaaagugaaacucaucaaacaagaacucgacaaauacaaaaacgccgucaccgaacuucagaugcucaugugcuccaccccugccgccggcagcggcuccgccauagccuccggcaucgcagucugcaaaguccuccaccucgaaggagaaguaaacaaaaucaaaaaugcucuccucuccacaaacaaagccgucgucucacucuccaauggagucuccguccucaccuucaaaguccucgaccucaaaaacuacauagacaaacaacuacuccccauccucaacaagcaauccugcucuaucuccaacauagaaaccguuauggaguuccaacagaaaaauaaccgccugcuagaaauaacccgagaguucuccgucaacgcaggcgucacuacccccgucagcacauacaugcuaacaaacuccgaacugcucucccuuaucaacgacaugcccaucacaaacgaucagaaaaagcucaugucuaacaacguacaaaucguucggcaacaauccuacuccaucaugugcaucaucaaagaagaagugcucgccuacguaguccaacucccccucuacggagucaucgacacacccugcuggaaacuccacacaucaccccucugcaccaccaacacaaaagaaggguccaacaucugccucacgcgcaccgaccgaggcugguacugcgacaacgccggcuccguauccuucuucccccaagcagaaaccugcaaggucugcuccaaccgcguauucugcgacaccaugaacucgcucacccuccccucagaagucaaccuauguaacaucgacauauucaaucccaaauacgacugcaagauaaugacuuccaaaaccgacguaagcuccucggucaucaccucccucggcgccaucgucuccugcuacggcaaaaccaaaugcaccgccuccaauaagaauaaaggcauaauaaagacauucagcaacggcugcgauuacgucuccaacaaaggugucgacaccgucucagucggcaacacucuauacuacgugaacaaacaagaaggcaaaagccuauacguuaaaggcgaaccaauaaucaauuucuacgacccucuagucuuucccucugacgaguucgaugccagcauaagccaagucaacgaaaagaucaaccaaucacucgccuucauccguaaauccgacgaacugcuccacaaugucaauguaggcaaaucaacaaccaacaucaugaucaccacuauuaucaucgucaucaucguaauccuacuccuacuaaucgccgucggccuauuccucuacugcaaagcccgcucgacccccgucacucucagcaaggaucaacuauccggcaucaacaacaucgccuucuccaacuaaggacuaguaauaaggaaacuguaugaaugucugugggcaggaagugaagagauccuucuguaaagguuuuuggaauuaugucugcugaauaauaaacuuuuuugaaauaauaaaucugguagaaaaaugagaucuaaaaaaaaaaaaaaaaaaaaaaaaaaaaaaaaaaaaaaaaaaaaaaaaaaaaaaaaaaaaaaaaugcaucccccccccccccccccccccccccccccccaaaggcucuuuucagagccaccagaauu

SEQ ID NO: 18449 - RNA, 2010 nt, Artificial Sequence
  mRNA product Design b-5 comprising derived and/or modified sequence from HRSV(Memphis-37)__AIY60640.1__F_DSCav1_mut7 (opt1)
gggagacuccugucgggcggaaguaggaggaguagaguuuaaaaacaguacucuuuuuccgguucgggacguaguugaagcaacgacaagccggauaaccgcucuugagacaggaagcuuaccauggagcugcccauccucaagaccaacgccaucaccacgauccuggccgcggugacccugugcuucgccagcucccagaacaucaccgaggaguucuaccagagcacgugcuccgccgucagcaagggcuaccucuccgcccugcgcaccgggugguacaccagcgugaucaccaucgagcuguccaacaucaaggagaacaagugcaacggcaccgacgccaaggugaagcucaucaagcaggagcuggacaaguacaagaacgcggucacggagcugcagaugcugaugugcagcaccccggccgccggcuccgggagcgcgaucgccuccggcaucgccgucugcaaggugcugcaccucgagggcgaggugaacaagaucaagaacgcccugcuguccaccaacaaggccgucgugagccucuccaacggggugagcguccugaccuucaaggugcuggaccucaagaacuacaucgacaagcagcugcugcccauccugaacaagcagagcugcuccaucagcaacaucgagaccgucauggaguuccagcagaagaacaaccgccuccuggagaucacgcgggaguucagcgugaacgcgggcgugaccacccccgucuccaccuacaugcugacgaacagcgagcuccugucccugaucaacgacaugccgaucaccaacgaccagaagaagcucaugagcaacaacgugcagaucgugcgccagcaguccuacagcaucaugugcaucaucaaggaggagguccuggccuacguggugcagcugccccucuacggggucaucgacacccccugcuggaagcugcacaccagcccccugugcacgaccaacaccaaggagggcuccaacaucugccucacccggacggaccgcgggugguacugcgacaacgccggcagcguguccuucuucccgcaggccgagaccugcaaggucugcagcaaccggguguucugcgacaccaugaacucccugacccugcccagcgaggugaaccucugcaacaucgacaucuucaaccccaaguacgacugcaagaucaugacguccaagaccgacgucagcuccagcgugaucaccucccugggcgccaucgugagcugcuacgggaagaccaagugcacggcgagcaacaagaacaagggcaucaucaagaccuucuccaacgggugcgacuacgucagcaacaagggcguggacaccguguccgucggcaacacccuguacuacgugaacaagcaggagggcaagagccucuacgugaagggggagcccaucaucaacuucuacgacccgcuggucuuccccuccgacgaguucgacgccagcaucucccaggugaacgagaagaucaaccagagccuggccuucauccggaaguccgacgagcuccugcacaacgugaacgucggcaagagcaccacgaacaucaugaucaccaccaucaucaucgugaucaucgugauccugcugcuccugaucgccgucgggcuguuccucuacugcaaggcccgcuccacccccgugacgcugagcaaggaccagcuguccgggaucaacaacaucgcguucagcaacugaggacuaguacuggcugcaucucccuuuccucuguccuccauccuucucccaggauggugaagggggaccugguacccagugauccccaccccaggauccuaaaucaugacuuaccugcuaauaaaaacucauuggaaaagugagaagaucuaaaaaaaaaaaaaaaaaaaaaaaaaaaaaaaaaaaaaaaaaaaaaaaaaaaaaaaaaaaaaaaaugcaucccccccccccccccccccccccccccccccaaaggcucuuuucagagccaccagaauu

SEQ ID NO: 18450 - RNA, 2010 nt, Artificial Sequence
  mRNA product Design b-5 comprising derived and/or modified sequence from HRSV(Memphis-37)__AIY60640.1__F_DSCav1_mut7 (opt1)
gggagacuccugucgggcggaaguaggaggaguagaguuuaaaaacaguacucuuuuuccgguucgggacguaguugaagcaacgacaagccggauaaccgcucuugagacaggaagcuuaccauggagcugcccauccucaagaccaacgccaucaccacgauccuggccgcggugacccugugcuucgccagcucccagaacaucaccgaggaguucuaccagagcacgugcuccgccgucagcaagggcuaccucuccgcccugcgcaccgggugguacaccagcgugaucaccaucgagcuguccaacaucaaggagaacaagugcaacggcaccgacgccaaggugaagcucaucaagcaggagcuggacaaguacaagaacgcggucacggagcugcagaugcucaugugcagcaccccggccgccggguccggcagcgccaucgcguccgggaucgccgugugcaaggugcugcaccuggagggcgaggucaacaagaucaagaacgcccuccugagcaccaacaaggccguggugucccugagcaacggcgucuccgugcucaccuucaaggugcuggaccugaagaacuacaucgacaagcagcuccugcccauccugaacaagcagagcugcuccaucagcaacaucgagacggucauggaguuccagcagaagaacaaccggcuccuggagaucacccgcgaguucuccgugaacgccggggugaccacccccgucagcacguacaugcugaccaacagcgagcuccugucccugaucaacgacaugcccaucaccaacgaccagaagaagcucaugagcaacaacgugcagaucgugcggcagcaguccuacagcaucaugugcaucaucaaggaggagguccuggcguacguggugcagcugccgcucuacggcgucaucgacacccccugcuggaagcugcacacgagcccccugugcaccaccaacaccaaggaggggagcaacaucugccucacgcgcaccgaccggggcugguacugcgacaacgccggguccgugagcuucuucccccaggccgagaccugcaaggugugcuccaaccgcgucuucugcgacaccaugaacagccugacgcugccguccgaggugaaccucugcaacaucgacaucuucaaccccaaguacgacugcaagaucaugaccagcaagaccgacgucuccagcuccgugaucaccagccugggcgccaucguguccugcuacggcaagacgaagugcaccgccagcaacaagaacaaggggaucaucaagaccuucuccaacggcugcgacuacgucagcaacaaggggguggacaccgugagcgucggcaacacgcuguacuacgugaacaagcaggagggcaagucccucuacgugaagggggagcccaucaucaacuucuacgacccccuggucuucccgagcgacgaguucgacgcguccaucagccaggugaacgagaagaucaaccagucccuggccuucauccggaaguccgacgagcuccugcacaacgugaacgucggcaaguccaccaccaacaucaugaucaccaccaucaucaucgugaucaucgugauccugcuccugcugaucgccgucggccucuuccuguacugcaaggcccgcagcacgcccgugacccuguccaaggaccagcugagcgggaucaacaacaucgccuucuccaacugaggacuaguacuggcugcaucucccuuuccucuguccuccauccuucucccaggauggugaagggggaccugguacccagugauccccaccccaggauccuaaaucaugacuuaccugcuaauaaaaacucauuggaaaagugagaagaucuaaaaaaaaaaaaaaaaaaaaaaaaaaaaaaaaaaaaaaaaaaaaaaaaaaaaaaaaaaaaaaaaugcaucccccccccccccccccccccccccccccccaaaggcucuuuucagagccaccagaauu

SEQ ID NO: 18451 - RNA, 2010 nt, Artificial Sequence
  mRNA product Design b-5 comprising derived and/or modified sequence from HRSV(Memphis-37)__AIY60640.1__F_DSCav1_mut7 (opt2)
gggagacuccugucgggcggaaguaggaggaguagaguuuaaaaacaguacucuuuuuccgguucgggacguaguugaagcaacgacaagccggauaaccgcucuugagacaggaagcuuaccauggagcuccccauccucaagaccaacgccaucaccaccauccucgccgccgucacccucugcuucgccuccucccagaacaucaccgaggaguucuaccaguccaccugcuccgccgucuccaagggcuaccucuccgcccuccgcaccggcugguacaccuccgucaucaccaucgagcucuccaacaucaaggagaacaagugcaacggcaccgacgccaaggucaagcucaucaagcaggagcucgacaaguacaagaacgccgucaccgagcuccagaugcucaugugcuccacccccgccgccggcuccggcuccgccaucgccuccggcaucgccgucugcaagguccuccaccucgagggcgaggucaacaagaucaagaacgcccuccucuccaccaacaaggccgucgucucccucuccaacggcgucuccguccucaccuucaagguccucgaccucaagaacuacaucgacaagcagcuccuccccauccucaacaagcaguccugcuccaucuccaacaucgagaccgucauggaguuccagcagaagaacaaccgccuccucgagaucacccgcgaguucuccgucaacgccggcgucaccacccccgucuccaccuacaugcucaccaacuccgagcuccucucccucaucaacgacaugcccaucaccaacgaccagaagaagcucauguccaacaacguccagaucguccgccagcaguccuacuccaucaugugcaucaucaaggaggagguccucgccuacgucguccagcucccccucuacggcgucaucgacacccccugcuggaagcuccacaccuccccccucugcaccaccaacaccaaggagggcuccaacaucugccucacccgcaccgaccgcggcugguacugcgacaacgccggcuccgucuccuucuucccccaggccgagaccugcaaggucugcuccaaccgcgucuucugcgacaccaugaacucccucacccuccccuccgaggucaaccucugcaacaucgacaucuucaaccccaaguacgacugcaagaucaugaccuccaagaccgacgucuccuccuccgucaucaccucccucggcgccaucgucuccugcuacggcaagaccaagugcaccgccuccaacaagaacaagggcaucaucaagaccuucuccaacggcugcgacuacgucuccaacaagggcgucgacaccgucuccgucggcaacacccucuacuacgucaacaagcaggagggcaagucccucuacgucaagggcgagcccaucaucaacuucuacgacccccucgucuuccccuccgacgaguucgacgccuccaucucccaggucaacgagaagaucaaccagucccucgccuucauccgcaaguccgacgagcuccuccacaacgucaacgucggcaaguccaccaccaacaucaugaucaccaccaucaucaucgucaucaucgucauccuccuccuccucaucgccgucggccucuuccucuacugcaaggcccgcuccacccccgucacccucuccaaggaccagcucuccggcaucaacaacaucgccuucuccaacugaggacuaguacuggcugcaucucccuuuccucuguccuccauccuucucccaggauggugaagggggaccugguacccagugauccccaccccaggauccuaaaucaugacuuaccugcuaauaaaaacucauuggaaaagugagaagaucuaaaaaaaaaaaaaaaaaaaaaaaaaaaaaaaaaaaaaaaaaaaaaaaaaaaaaaaaaaaaaaaaugcaucccccccccccccccccccccccccccccccaaaggcucuuuucagagccaccagaauu

SEQ ID NO: 18452 - RNA, 2010 nt, Artificial Sequence
  mRNA product Design b-5 comprising derived and/or modified sequence from HRSV(Memphis-37)__AIY60640.1__F_DSCav1_mut7 (opt3)
gggagacuccugucgggcggaaguaggaggaguagaguuuaaaaacaguacucuuuuuccgguucgggacguaguugaagcaacgacaagccggauaaccgcucuugagacaggaagcuuaccauggagcugcccauccucaagaccaacgccauuacaacuauacuugcugcagugacgcugugcuucgccagcucccagaauaucaccgaagaguuuuaccaaucuacauguucagcggucaguaaaggcuauuugagcgcuuuaagaacugggugguacaccuccguuauuacaaucgaacugucuaacauuaaggagaauaaaugcaacggaaccgacgccaaggugaaacuaaucaagcaggaacucgauaaguauaaaaaugcaguaacugagcugcagaugcuuauguguucgaccccugccgcugguucaggcagcgcaauagccagugggaucgcugugugcaagguccugcacuuggagggagaagugaacaaaauuaagaaugcccuccuguccacaaacaaagcgguugugucucugagcaauggcgucuccgugcucacguucaagguauuagaccugaagaacuacaucgauaaacagcuuuugccaauucugaauaagcaaucauguaguaucagcaacauagagacuguuauggaauuucagcagaaaaauaacaggcuacucgagauuacccgggaguucucugugaaugccggugucacaacuccgguguccaccuauaugcugacaaacucagaacuucugagcuugaucaacgacaugcccauuaccaaugaucagaagaaacucaugaguaacaaugugcaaaucguccgccagcagucuuacuccaucaugugcauuauaaaggaggaaguucuggcauaugugguacaguuaccucuguacggggugaucgacacgccauguuggaaacuccauacuagcccccuuugcacaaccaacacuaaggagggaucgaauauuugucugacacgaaccgaucguggcugguacugcgacaacgcuggcucugucuccuuuuucccucaagccgaaacguguaaggugugcucaaauagaguguuuugcgauaccaugaacaguuugacacuaccaagcgagguuaaucuguguaacaucgacauauucaaucccaaauaugauugcaagauuaugacuuccaaaaccgacgucucuagcucagugaucacaagucucggggcaaucguauccuguuacggaaagacuaaaugcaccgcuagcaacaagaauaaggguauuaucaaaacauuuucuaacggcugugauuauguuucaaauaaggggguggacaccgucagugugggaaacacucuguacuaugucaacaaacaggagggcaagagccuuuacgugaaaggugaaccuauuauaaauuucuaugacccacugguuuuuccguccgaugaguucgacgccucuaucagccaggugaacgaaaagauuaaucaaucguuggcguuuaucaggaaguccgaugagcuccugcacaacguaaaugucgggaaaucaacgacaaacaucaugauuaccacuauaaucauugugaucauuguuaucuuacugcuacucauagccgugggacuguuccuuuacugcaaggcacggaguacccccgucacauugucuaaagaccagcugagcggcaucaauaacauugcuuucuccaauugaggacuaguacuggcugcaucucccuuuccucuguccuccauccuucucccaggauggugaagggggaccugguacccagugauccccaccccaggauccuaaaucaugacuuaccugcuaauaaaaacucauuggaaaagugagaagaucuaaaaaaaaaaaaaaaaaaaaaaaaaaaaaaaaaaaaaaaaaaaaaaaaaaaaaaaaaaaaaaaaugcaucccccccccccccccccccccccccccccccaaaggcucuuuucagagccaccagaauu

SEQ ID NO: 18453 - RNA, 2010 nt, Artificial Sequence
  mRNA product Design b-5 comprising derived and/or modified sequence from HRSV(Memphis-37)__AIY60640.1__F_DSCav1_mut7 (opt4)
gggagacuccugucgggcggaaguaggaggaguagaguuuaaaaacaguacucuuuuuccgguucgggacguaguugaagcaacgacaagccggauaaccgcucuugagacaggaagcuuaccauggagcugcccauccugaagaccaacgccaucaccaccauccuggccgccgugacccugugcuucgccagcagccagaacaucaccgaggaguucuaccagagcaccugcagcgccgugagcaagggcuaccugagcgcccugagaaccggcugguacaccagcgugaucaccaucgagcugagcaacaucaaggagaacaagugcaacggcaccgacgccaaggugaagcugaucaagcaggagcuggacaaguacaagaacgccgugaccgagcugcagaugcugaugugcagcacccccgccgccggcagcggcagcgccaucgccagcggcaucgccgugugcaaggugcugcaccuggagggcgaggugaacaagaucaagaacgcccugcugagcaccaacaaggccguggugagccugagcaacggcgugagcgugcugaccuucaaggugcuggaccugaagaacuacaucgacaagcagcugcugcccauccugaacaagcagagcugcagcaucagcaacaucgagaccgugauggaguuccagcagaagaacaacagacugcuggagaucaccagagaguucagcgugaacgccggcgugaccacccccgugagcaccuacaugcugaccaacagcgagcugcugagccugaucaacgacaugcccaucaccaacgaccagaagaagcugaugagcaacaacgugcagaucgugagacagcagagcuacagcaucaugugcaucaucaaggaggaggugcuggccuacguggugcagcugccccuguacggcgugaucgacacccccugcuggaagcugcacaccagcccccugugcaccaccaacaccaaggagggcagcaacaucugccugaccagaaccgacagaggcugguacugcgacaacgccggcagcgugagcuucuucccccaggccgagaccugcaaggugugcagcaacagaguguucugcgacaccaugaacagccugacccugcccagcgaggugaaccugugcaacaucgacaucuucaaccccaaguacgacugcaagaucaugaccagcaagaccgacgugagcagcagcgugaucaccagccugggcgccaucgugagcugcuacggcaagaccaagugcaccgccagcaacaagaacaagggcaucaucaagaccuucagcaacggcugcgacuacgugagcaacaagggcguggacaccgugagcgugggcaacacccuguacuacgugaacaagcaggagggcaagagccuguacgugaagggcgagcccaucaucaacuucuacgacccccugguguuccccagcgacgaguucgacgccagcaucagccaggugaacgagaagaucaaccagagccuggccuucaucagaaagagcgacgagcugcugcacaacgugaacgugggcaagagcaccaccaacaucaugaucaccaccaucaucaucgugaucaucgugauccugcugcugcugaucgccgugggccuguuccuguacugcaaggccagaagcacccccgugacccugagcaaggaccagcugagcggcaucaacaacaucgccuucagcaacugaggacuaguacuggcugcaucucccuuuccucuguccuccauccuucucccaggauggugaagggggaccugguacccagugauccccaccccaggauccuaaaucaugacuuaccugcuaauaaaaacucauuggaaaagugagaagaucuaaaaaaaaaaaaaaaaaaaaaaaaaaaaaaaaaaaaaaaaaaaaaaaaaaaaaaaaaaaaaaaaugcaucccccccccccccccccccccccccccccccaaaggcucuuuucagagccaccagaauu

SEQ ID NO: 18454 - RNA, 2010 nt, Artificial Sequence
  mRNA product Design b-5 comprising derived and/or modified sequence from HRSV(Memphis-37)__AIY60640.1__F_DSCav1_mut7 (opt5)
gggagacuccugucgggcggaaguaggaggaguagaguuuaaaaacaguacucuuuuuccgguucgggacguaguugaagcaacgacaagccggauaaccgcucuugagacaggaagcuuaccauggagcugcccauccucaagaccaacgccauuacaacgauccuggcugccgugacccuuugcuucgcgagcucccagaauauuacagaagaguuuuaccaaucuaccuguagcgcugucuccaaaggcuaucugucugcccucagaacagggugguacaccagcguuaucacaauugaacuguccaacaucaaggagaauaaaugcaacggaaccgacgccaaggugaaacuuaucaagcaggaacuggauaaguauaaaaaugcugugacggagcuccagaugcugauguguucuaccccugccgcuggcagcggguccgccauugcgagcggaaucgccgucugcaaggugcugcaccucgagggcgaaguuaacaaaauuaagaaugcucugcuuucuacaaacaaagccguggucucccugagcaauggggugucuguucucaccuucaaggugcuggaccuuaagaacuacaucgauaaacagcugcucccgauucugaauaagcaauccuguagcaucucuaacauugagacagucauggaauuucagcagaaaaauaaccggcugcucgagaucacccgcgaguucuccgugaaugcuggagugacgacacccgucagcaccuauaugcugacaaacuccgaacuucugucucucaucaacgacaugccuauuaccaaugaucagaagaaacugaugagcaacaauguucaaaucgugagacagcaguccuacagcauuaugugcaucauuaaggaggaagugcuugccuaugucgugcagcugccccucuacggcguuaucgacaccccuuguuggaaacugcauacaucuccccugugcacgaccaacacaaaggagggcuccaauaucugucucacccggacagaucgcgggugguacugcgacaacgcgggaagcgugagcuuuuucccucaagccgaaaccuguaaggucugcucuaauagaguguuuugcgauacgaugaacucccugacacuuccgucugagguuaaucuguguaacauugacaucuucaaucccaaauaugauugcaagauuaugaccagcaaaaccgacguguccagcucugucaucacaucccucggcgcuauugugagcuguuacgggaagaccaaaugcacagccucuaacaagaauaagggaaucaucaaaacguuuuccaacggcugugauuaugucagcaauaaggggguggacaccguuuccgugggaaacacacuguacuaugucaacaaacaggagggcaagucucuuuacgugaaaggcgaaccuauuaucaauuucuaugacccccugguuuuuccuagcgaugaguucgacgcuuccauuucucaggugaacgaaaagaucaaucaaagccucgccuuuauucggaaguccgaugagcugcugcacaacgucaauguggggaaaagcaccacaaacaucaugauuaccacgaucaucauugugaucauuguuauccuccugcuucugauugccgucggacucuuccuguacugcaaggcucgcucuacccccgugacacuguccaaagaccagcuuagcggcaucaauaacaucgcguucucuaauugaggacuaguacuggcugcaucucccuuuccucuguccuccauccuucucccaggauggugaagggggaccugguacccagugauccccaccccaggauccuaaaucaugacuuaccugcuaauaaaaacucauuggaaaagugagaagaucuaaaaaaaaaaaaaaaaaaaaaaaaaaaaaaaaaaaaaaaaaaaaaaaaaaaaaaaaaaaaaaaaugcaucccccccccccccccccccccccccccccccaaaggcucuuuucagagccaccagaauu

SEQ ID NO: 18455 - RNA, 2010 nt, Artificial Sequence
  mRNA product Design b-5 comprising derived and/or modified sequence from HRSV(Memphis-37)__AIY60640.1__F_DSCav1_mut7 (opt6)
gggagacuccugucgggcggaaguaggaggaguagaguuuaaaaacaguacucuuuuuccgguucgggacguaguugaagcaacgacaagccggauaaccgcucuugagacaggaagcuuaccauggaacuaccaauacucaaaacaaaugcuauaaccacaauacucgcagcaguaacauuauguuucgcaucaucccaaaacauaacagaagaauuuuaucaaucaaccuguucagcaguauccaaaggauaccuaagugcauuaagaaccggaugguacacaucaguaauaaccauagaacuuucaaacauaaaagaaaacaaauguaacggcacagacgcaaaagucaaacucaucaaacaggaacuugacaaauauaaaaacgcaguaaccgaacuacaaaugcuaaugugcucaacaccagcagcaggaucaggaucagcaauugcaucuggaauagcuguaugcaaaguccuacaccuagaaggagaaguaaacaaaaucaaaaacgcauuacucuccacaaacaaagcaguaguaucacuaucaaacggaguuucaguacuaaccuucaaaguauuagaccuaaaaaacuacauagacaaacaacuacuaccuauacuaaacaaacaauccuguucaauaagcaacauugaaacuguaauggaauuucaacaaaaaaacaaccgccuauuagaaauaaccagagaauuuuccguaaaugcaggaguaaccacaccagucucuacauacauguuaaccaacucagaacuauuaucacucauaaaugacaugccuauaacaaacgaccaaaaaaaacuaaugucaaacaacguacaaauaguaagacaacaaucauauuccauaaugugcauaauaaaagaagaaguacuugcauacgugguucaacuaccccuauauggaguuauagacacaccaugcuggaaacuccacacuuccccacuuugcacaacuaacacaaaagaaggaucaaauauaugccuaaccagaacagaccguggaugguacugcgacaacgcuggaucagucuccuucuuuccacaagcagaaaccugcaaagucugcucaaauagagucuucugugacacaaugaacucacucacccuacccucagaaguaaaccuauguaauauagauauauuuaauccaaaauacgacugcaaaauuaugacaaguaaaacagacguaagcucaucagucauaaccagccuaggagcaauaguauccuguuacggcaaaacaaaaugcacagcuucaaacaaaaacaaaggcauaauaaaaacauucucaaacggaugugacuauguaucaaauaaaggaguugacacaguaucaguuggaaacacacuauacuauguaaacaaacaagaaggaaaaucacuauacguuaaaggcgaacccauaaucaauuucuacgacccccuagucuucccauccgaugaauuugacgcaucaauaucccaaguaaaugaaaaaaucaaccaaucccuagcauuuauacgaaaauccgacgaacuacuccauaaugucaacgucgguaaaucaacgacaaacaucaugaucacaacaauaauaauaguaauaauuguaauauuacucuuacucauagcaguaggccuauuucuauauugcaaagccagaucaacaccaguaaccuuauccaaagaccaacuaucuggaauaaacaacauagcauuuuccaacugaggacuaguacuggcugcaucucccuuuccucuguccuccauccuucucccaggauggugaagggggaccugguacccagugauccccaccccaggauccuaaaucaugacuuaccugcuaauaaaaacucauuggaaaagugagaagaucuaaaaaaaaaaaaaaaaaaaaaaaaaaaaaaaaaaaaaaaaaaaaaaaaaaaaaaaaaaaaaaaaugcaucccccccccccccccccccccccccccccccaaaggcucuuuucagagccaccagaauu

SEQ ID NO: 18456 - RNA, 2010 nt, Artificial Sequence
  mRNA product Design b-5 comprising derived and/or modified sequence from HRSV(Memphis-37)__AIY60640.1__F_DSCav1_mut7 (opt11)
gggagacuccugucgggcggaaguaggaggaguagaguuuaaaaacaguacucuuuuuccgguucgggacguaguugaagcaacgacaagccggauaaccgcucuugagacaggaagcuuaccauggaacuccccauacuuaaaacaaacgccauaacaacuauacucgcagccgucacccucuguuucgcauccucucaaaacaucaccgaagaguucuaucaaucaaccugcuccgccgucucaaaaggcuaccucuccgcccuacgcacaggcugguacaccagcgucauuaccauagaacucucgaacaucaaagaaaacaaaugcaacggcaccgacgcaaaagugaaacucaucaaacaagaacucgacaaauacaaaaacgccgucaccgaacuucagaugcucaugugcuccaccccugccgccggcagcggcuccgccauagccuccggcaucgcagucugcaaaguccuccaccucgaaggagaaguaaacaaaaucaaaaaugcucuccucuccacaaacaaagccgucgucucacucuccaauggagucuccguccucaccuucaaaguccucgaccucaaaaacuacauagacaaacaacuacuccccauccucaacaagcaauccugcucuaucuccaacauagaaaccguuauggaguuccaacagaaaaauaaccgccugcuagaaauaacccgagaguucuccgucaacgcaggcgucacuacccccgucagcacauacaugcuaacaaacuccgaacugcucucccuuaucaacgacaugcccaucacaaacgaucagaaaaagcucaugucuaacaacguacaaaucguucggcaacaauccuacuccaucaugugcaucaucaaagaagaagugcucgccuacguaguccaacucccccucuacggagucaucgacacacccugcuggaaacuccacacaucaccccucugcaccaccaacacaaaagaaggguccaacaucugccucacgcgcaccgaccgaggcugguacugcgacaacgccggcuccguauccuucuucccccaagcagaaaccugcaaggucugcuccaaccgcguauucugcgacaccaugaacucgcucacccuccccucagaagucaaccuauguaacaucgacauauucaaucccaaauacgacugcaagauaaugacuuccaaaaccgacguaagcuccucggucaucaccucccucggcgccaucgucuccugcuacggcaaaaccaaaugcaccgccuccaauaagaauaaaggcauaauaaagacauucagcaacggcugcgauuacgucuccaacaaaggugucgacaccgucucagucggcaacacucuauacuacgugaacaaacaagaaggcaaaagccuauacguuaaaggcgaaccaauaaucaauuucuacgacccucuagucuuucccucugacgaguucgaugccagcauaagccaagucaacgaaaagaucaaccaaucacucgccuucauccguaaauccgacgaacugcuccacaaugucaauguaggcaaaucaacaaccaacaucaugaucaccacuauuaucaucgucaucaucguaauccuacuccuacuaaucgccgucggccuauuccucuacugcaaagcccgcucgacccccgucacucucagcaaggaucaacuauccggcaucaacaacaucgccuucuccaacuaaggacuaguacuggcugcaucucccuuuccucuguccuccauccuucucccaggauggugaagggggaccugguacccagugauccccaccccaggauccuaaaucaugacuuaccugcuaauaaaaacucauuggaaaagugagaagaucuaaaaaaaaaaaaaaaaaaaaaaaaaaaaaaaaaaaaaaaaaaaaaaaaaaaaaaaaaaaaaaaaugcaucccccccccccccccccccccccccccccccaaaggcucuuuucagagccaccagaauu

SEQ ID NO: 18457 - RNA, 1916 nt, Artificial Sequence
  mRNA product Design c-1 comprising derived and/or modified sequence from HRSV(Memphis-37)__AIY60640.1__F_DSCav1_mut7 (opt1)
gggagaguccgcucagccagguugcagaagcggcuuagcguguguccuaaucuucucucugcguguagguaggccugugccgcaaacaagcuuaccauggagcugcccauccucaagaccaacgccaucaccacgauccuggccgcggugacccugugcuucgccagcucccagaacaucaccgaggaguucuaccagagcacgugcuccgccgucagcaagggcuaccucuccgcccugcgcaccgggugguacaccagcgugaucaccaucgagcuguccaacaucaaggagaacaagugcaacggcaccgacgccaaggugaagcucaucaagcaggagcuggacaaguacaagaacgcggucacggagcugcagaugcugaugugcagcaccccggccgccggcuccgggagcgcgaucgccuccggcaucgccgucugcaaggugcugcaccucgagggcgaggugaacaagaucaagaacgcccugcuguccaccaacaaggccgucgugagccucuccaacggggugagcguccugaccuucaaggugcuggaccucaagaacuacaucgacaagcagcugcugcccauccugaacaagcagagcugcuccaucagcaacaucgagaccgucauggaguuccagcagaagaacaaccgccuccuggagaucacgcgggaguucagcgugaacgcgggcgugaccacccccgucuccaccuacaugcugacgaacagcgagcuccugucccugaucaacgacaugccgaucaccaacgaccagaagaagcucaugagcaacaacgugcagaucgugcgccagcaguccuacagcaucaugugcaucaucaaggaggagguccuggccuacguggugcagcugccccucuacggggucaucgacacccccugcuggaagcugcacaccagcccccugugcacgaccaacaccaaggagggcuccaacaucugccucacccggacggaccgcgggugguacugcgacaacgccggcagcguguccuucuucccgcaggccgagaccugcaaggucugcagcaaccggguguucugcgacaccaugaacucccugacccugcccagcgaggugaaccucugcaacaucgacaucuucaaccccaaguacgacugcaagaucaugacguccaagaccgacgucagcuccagcgugaucaccucccugggcgccaucgugagcugcuacgggaagaccaagugcacggcgagcaacaagaacaagggcaucaucaagaccuucuccaacgggugcgacuacgucagcaacaagggcguggacaccguguccgucggcaacacccuguacuacgugaacaagcaggagggcaagagccucuacgugaagggggagcccaucaucaacuucuacgacccgcuggucuuccccuccgacgaguucgacgccagcaucucccaggugaacgagaagaucaaccagagccuggccuucauccggaaguccgacgagcuccugcacaacgugaacgucggcaagagcaccacgaacaucaugaucaccaccaucaucaucgugaucaucgugauccugcugcuccugaucgccgucgggcuguuccucuacugcaaggcccgcuccacccccgugacgcugagcaaggaccagcuguccgggaucaacaacaucgcguucagcaacugaggacuaguguccaccugucccuccugggcugcuggauugucucguuuuccugccaaauaaacaggaucagcgcuuuacagaucuaaaaaaaaaaaaaaaaaaaaaaaaaaaaaaaaaaaaaaaaaaaaaaaaaaaaaaaaaaaaaaaaugcaucccccccccccccccccccccccccccccccaaaggcucuuuucagagccaccagaauu

SEQ ID NO: 18458 - RNA, 1916 nt, Artificial Sequence
  mRNA product Design c-1 comprising derived and/or modified sequence from HRSV(Memphis-37)__AIY60640.1__F_DSCav1_mut7 (opt1)
gggagaguccgcucagccagguugcagaagcggcuuagcguguguccuaaucuucucucugcguguagguaggccugugccgcaaacaagcuuaccauggagcugcccauccucaagaccaacgccaucaccacgauccuggccgcggugacccugugcuucgccagcucccagaacaucaccgaggaguucuaccagagcacgugcuccgccgucagcaagggcuaccucuccgcccugcgcaccgggugguacaccagcgugaucaccaucgagcuguccaacaucaaggagaacaagugcaacggcaccgacgccaaggugaagcucaucaagcaggagcuggacaaguacaagaacgcggucacggagcugcagaugcucaugugcagcaccccggccgccggguccggcagcgccaucgcguccgggaucgccgugugcaaggugcugcaccuggagggcgaggucaacaagaucaagaacgcccuccugagcaccaacaaggccguggugucccugagcaacggcgucuccgugcucaccuucaaggugcuggaccugaagaacuacaucgacaagcagcuccugcccauccugaacaagcagagcugcuccaucagcaacaucgagacggucauggaguuccagcagaagaacaaccggcuccuggagaucacccgcgaguucuccgugaacgccggggugaccacccccgucagcacguacaugcugaccaacagcgagcuccugucccugaucaacgacaugcccaucaccaacgaccagaagaagcucaugagcaacaacgugcagaucgugcggcagcaguccuacagcaucaugugcaucaucaaggaggagguccuggcguacguggugcagcugccgcucuacggcgucaucgacacccccugcuggaagcugcacacgagcccccugugcaccaccaacaccaaggaggggagcaacaucugccucacgcgcaccgaccggggcugguacugcgacaacgccggguccgugagcuucuucccccaggccgagaccugcaaggugugcuccaaccgcgucuucugcgacaccaugaacagccugacgcugccguccgaggugaaccucugcaacaucgacaucuucaaccccaaguacgacugcaagaucaugaccagcaagaccgacgucuccagcuccgugaucaccagccugggcgccaucguguccugcuacggcaagacgaagugcaccgccagcaacaagaacaaggggaucaucaagaccuucuccaacggcugcgacuacgucagcaacaaggggguggacaccgugagcgucggcaacacgcuguacuacgugaacaagcaggagggcaagucccucuacgugaagggggagcccaucaucaacuucuacgacccccuggucuucccgagcgacgaguucgacgcguccaucagccaggugaacgagaagaucaaccagucccuggccuucauccggaaguccgacgagcuccugcacaacgugaacgucggcaaguccaccaccaacaucaugaucaccaccaucaucaucgugaucaucgugauccugcuccugcugaucgccgucggccucuuccuguacugcaaggcccgcagcacgcccgugacccuguccaaggaccagcugagcgggaucaacaacaucgccuucuccaacugaggacuaguguccaccugucccuccugggcugcuggauugucucguuuuccugccaaauaaacaggaucagcgcuuuacagaucuaaaaaaaaaaaaaaaaaaaaaaaaaaaaaaaaaaaaaaaaaaaaaaaaaaaaaaaaaaaaaaaaugcaucccccccccccccccccccccccccccccccaaaggcucuuuucagagccaccagaauu

SEQ ID NO: 18459 - RNA, 1916 nt, Artificial Sequence
  mRNA product Design c-1 comprising derived and/or modified sequence from HRSV(Memphis-37)__AIY60640.1__F_DSCav1_mut7 (opt2)
gggagaguccgcucagccagguugcagaagcggcuuagcguguguccuaaucuucucucugcguguagguaggccugugccgcaaacaagcuuaccauggagcuccccauccucaagaccaacgccaucaccaccauccucgccgccgucacccucugcuucgccuccucccagaacaucaccgaggaguucuaccaguccaccugcuccgccgucuccaagggcuaccucuccgcccuccgcaccggcugguacaccuccgucaucaccaucgagcucuccaacaucaaggagaacaagugcaacggcaccgacgccaaggucaagcucaucaagcaggagcucgacaaguacaagaacgccgucaccgagcuccagaugcucaugugcuccacccccgccgccggcuccggcuccgccaucgccuccggcaucgccgucugcaagguccuccaccucgagggcgaggucaacaagaucaagaacgcccuccucuccaccaacaaggccgucgucucccucuccaacggcgucuccguccucaccuucaagguccucgaccucaagaacuacaucgacaagcagcuccuccccauccucaacaagcaguccugcuccaucuccaacaucgagaccgucauggaguuccagcagaagaacaaccgccuccucgagaucacccgcgaguucuccgucaacgccggcgucaccacccccgucuccaccuacaugcucaccaacuccgagcuccucucccucaucaacgacaugcccaucaccaacgaccagaagaagcucauguccaacaacguccagaucguccgccagcaguccuacuccaucaugugcaucaucaaggaggagguccucgccuacgucguccagcucccccucuacggcgucaucgacacccccugcuggaagcuccacaccuccccccucugcaccaccaacaccaaggagggcuccaacaucugccucacccgcaccgaccgcggcugguacugcgacaacgccggcuccgucuccuucuucccccaggccgagaccugcaaggucugcuccaaccgcgucuucugcgacaccaugaacucccucacccuccccuccgaggucaaccucugcaacaucgacaucuucaaccccaaguacgacugcaagaucaugaccuccaagaccgacgucuccuccuccgucaucaccucccucggcgccaucgucuccugcuacggcaagaccaagugcaccgccuccaacaagaacaagggcaucaucaagaccuucuccaacggcugcgacuacgucuccaacaagggcgucgacaccgucuccgucggcaacacccucuacuacgucaacaagcaggagggcaagucccucuacgucaagggcgagcccaucaucaacuucuacgacccccucgucuuccccuccgacgaguucgacgccuccaucucccaggucaacgagaagaucaaccagucccucgccuucauccgcaaguccgacgagcuccuccacaacgucaacgucggcaaguccaccaccaacaucaugaucaccaccaucaucaucgucaucaucgucauccuccuccuccucaucgccgucggccucuuccucuacugcaaggcccgcuccacccccgucacccucuccaaggaccagcucuccggcaucaacaacaucgccuucuccaacugaggacuaguguccaccugucccuccugggcugcuggauugucucguuuuccugccaaauaaacaggaucagcgcuuuacagaucuaaaaaaaaaaaaaaaaaaaaaaaaaaaaaaaaaaaaaaaaaaaaaaaaaaaaaaaaaaaaaaaaugcaucccccccccccccccccccccccccccccccaaaggcucuuuucagagccaccagaauu

SEQ ID NO: 18460 - RNA, 1916 nt, Artificial Sequence
  mRNA product Design c-1 comprising derived and/or modified sequence from HRSV(Memphis-37)__AIY60640.1__F_DSCav1_mut7 (opt3)
gggagaguccgcucagccagguugcagaagcggcuuagcguguguccuaaucuucucucugcguguagguaggccugugccgcaaacaagcuuaccauggagcugcccauccucaagaccaacgccauuacaacuauacuugcugcagugacgcugugcuucgccagcucccagaauaucaccgaagaguuuuaccaaucuacauguucagcggucaguaaaggcuauuugagcgcuuuaagaacugggugguacaccuccguuauuacaaucgaacugucuaacauuaaggagaauaaaugcaacggaaccgacgccaaggugaaacuaaucaagcaggaacucgauaaguauaaaaaugcaguaacugagcugcagaugcuuauguguucgaccccugccgcugguucaggcagcgcaauagccagugggaucgcugugugcaagguccugcacuuggagggagaagugaacaaaauuaagaaugcccuccuguccacaaacaaagcgguugugucucugagcaauggcgucuccgugcucacguucaagguauuagaccugaagaacuacaucgauaaacagcuuuugccaauucugaauaagcaaucauguaguaucagcaacauagagacuguuauggaauuucagcagaaaaauaacaggcuacucgagauuacccgggaguucucugugaaugccggugucacaacuccgguguccaccuauaugcugacaaacucagaacuucugagcuugaucaacgacaugcccauuaccaaugaucagaagaaacucaugaguaacaaugugcaaaucguccgccagcagucuuacuccaucaugugcauuauaaaggaggaaguucuggcauaugugguacaguuaccucuguacggggugaucgacacgccauguuggaaacuccauacuagcccccuuugcacaaccaacacuaaggagggaucgaauauuugucugacacgaaccgaucguggcugguacugcgacaacgcuggcucugucuccuuuuucccucaagccgaaacguguaaggugugcucaaauagaguguuuugcgauaccaugaacaguuugacacuaccaagcgagguuaaucuguguaacaucgacauauucaaucccaaauaugauugcaagauuaugacuuccaaaaccgacgucucuagcucagugaucacaagucucggggcaaucguauccuguuacggaaagacuaaaugcaccgcuagcaacaagaauaaggguauuaucaaaacauuuucuaacggcugugauuauguuucaaauaaggggguggacaccgucagugugggaaacacucuguacuaugucaacaaacaggagggcaagagccuuuacgugaaaggugaaccuauuauaaauuucuaugacccacugguuuuuccguccgaugaguucgacgccucuaucagccaggugaacgaaaagauuaaucaaucguuggcguuuaucaggaaguccgaugagcuccugcacaacguaaaugucgggaaaucaacgacaaacaucaugauuaccacuauaaucauugugaucauuguuaucuuacugcuacucauagccgugggacuguuccuuuacugcaaggcacggaguacccccgucacauugucuaaagaccagcugagcggcaucaauaacauugcuuucuccaauugaggacuaguguccaccugucccuccugggcugcuggauugucucguuuuccugccaaauaaacaggaucagcgcuuuacagaucuaaaaaaaaaaaaaaaaaaaaaaaaaaaaaaaaaaaaaaaaaaaaaaaaaaaaaaaaaaaaaaaaugcaucccccccccccccccccccccccccccccccaaaggcucuuuucagagccaccagaauu

SEQ ID NO: 18461 - RNA, 1916 nt, Artificial Sequence
  mRNA product Design c-1 comprising derived and/or modified sequence from HRSV(Memphis-37)__AIY60640.1__F_DSCav1_mut7 (opt4)
gggagaguccgcucagccagguugcagaagcggcuuagcguguguccuaaucuucucucugcguguagguaggccugugccgcaaacaagcuuaccauggagcugcccauccugaagaccaacgccaucaccaccauccuggccgccgugacccugugcuucgccagcagccagaacaucaccgaggaguucuaccagagcaccugcagcgccgugagcaagggcuaccugagcgcccugagaaccggcugguacaccagcgugaucaccaucgagcugagcaacaucaaggagaacaagugcaacggcaccgacgccaaggugaagcugaucaagcaggagcuggacaaguacaagaacgccgugaccgagcugcagaugcugaugugcagcacccccgccgccggcagcggcagcgccaucgccagcggcaucgccgugugcaaggugcugcaccuggagggcgaggugaacaagaucaagaacgcccugcugagcaccaacaaggccguggugagccugagcaacggcgugagcgugcugaccuucaaggugcuggaccugaagaacuacaucgacaagcagcugcugcccauccugaacaagcagagcugcagcaucagcaacaucgagaccgugauggaguuccagcagaagaacaacagacugcuggagaucaccagagaguucagcgugaacgccggcgugaccacccccgugagcaccuacaugcugaccaacagcgagcugcugagccugaucaacgacaugcccaucaccaacgaccagaagaagcugaugagcaacaacgugcagaucgugagacagcagagcuacagcaucaugugcaucaucaaggaggaggugcuggccuacguggugcagcugccccuguacggcgugaucgacacccccugcuggaagcugcacaccagcccccugugcaccaccaacaccaaggagggcagcaacaucugccugaccagaaccgacagaggcugguacugcgacaacgccggcagcgugagcuucuucccccaggccgagaccugcaaggugugcagcaacagaguguucugcgacaccaugaacagccugacccugcccagcgaggugaaccugugcaacaucgacaucuucaaccccaaguacgacugcaagaucaugaccagcaagaccgacgugagcagcagcgugaucaccagccugggcgccaucgugagcugcuacggcaagaccaagugcaccgccagcaacaagaacaagggcaucaucaagaccuucagcaacggcugcgacuacgugagcaacaagggcguggacaccgugagcgugggcaacacccuguacuacgugaacaagcaggagggcaagagccuguacgugaagggcgagcccaucaucaacuucuacgacccccugguguuccccagcgacgaguucgacgccagcaucagccaggugaacgagaagaucaaccagagccuggccuucaucagaaagagcgacgagcugcugcacaacgugaacgugggcaagagcaccaccaacaucaugaucaccaccaucaucaucgugaucaucgugauccugcugcugcugaucgccgugggccuguuccuguacugcaaggccagaagcacccccgugacccugagcaaggaccagcugagcggcaucaacaacaucgccuucagcaacugaggacuaguguccaccugucccuccugggcugcuggauugucucguuuuccugccaaauaaacaggaucagcgcuuuacagaucuaaaaaaaaaaaaaaaaaaaaaaaaaaaaaaaaaaaaaaaaaaaaaaaaaaaaaaaaaaaaaaaaugcaucccccccccccccccccccccccccccccccaaaggcucuuuucagagccaccagaauu

SEQ ID NO: 18462 - RNA, 1916 nt, Artificial Sequence
  mRNA product Design c-1 comprising derived and/or modified sequence from HRSV(Memphis-37)__AIY60640.1__F_DSCav1_mut7 (opt5)
gggagaguccgcucagccagguugcagaagcggcuuagcguguguccuaaucuucucucugcguguagguaggccugugccgcaaacaagcuuaccauggagcugcccauccucaagaccaacgccauuacaacgauccuggcugccgugacccuuugcuucgcgagcucccagaauauuacagaagaguuuuaccaaucuaccuguagcgcugucuccaaaggcuaucugucugcccucagaacagggugguacaccagcguuaucacaauugaacuguccaacaucaaggagaauaaaugcaacggaaccgacgccaaggugaaacuuaucaagcaggaacuggauaaguauaaaaaugcugugacggagcuccagaugcugauguguucuaccccugccgcuggcagcggguccgccauugcgagcggaaucgccgucugcaaggugcugcaccucgagggcgaaguuaacaaaauuaagaaugcucugcuuucuacaaacaaagccguggucucccugagcaauggggugucuguucucaccuucaaggugcuggaccuuaagaacuacaucgauaaacagcugcucccgauucugaauaagcaauccuguagcaucucuaacauugagacagucauggaauuucagcagaaaaauaaccggcugcucgagaucacccgcgaguucuccgugaaugcuggagugacgacacccgucagcaccuauaugcugacaaacuccgaacuucugucucucaucaacgacaugccuauuaccaaugaucagaagaaacugaugagcaacaauguucaaaucgugagacagcaguccuacagcauuaugugcaucauuaaggaggaagugcuugccuaugucgugcagcugccccucuacggcguuaucgacaccccuuguuggaaacugcauacaucuccccugugcacgaccaacacaaaggagggcuccaauaucugucucacccggacagaucgcgggugguacugcgacaacgcgggaagcgugagcuuuuucccucaagccgaaaccuguaaggucugcucuaauagaguguuuugcgauacgaugaacucccugacacuuccgucugagguuaaucuguguaacauugacaucuucaaucccaaauaugauugcaagauuaugaccagcaaaaccgacguguccagcucugucaucacaucccucggcgcuauugugagcuguuacgggaagaccaaaugcacagccucuaacaagaauaagggaaucaucaaaacguuuuccaacggcugugauuaugucagcaauaaggggguggacaccguuuccgugggaaacacacuguacuaugucaacaaacaggagggcaagucucuuuacgugaaaggcgaaccuauuaucaauuucuaugacccccugguuuuuccuagcgaugaguucgacgcuuccauuucucaggugaacgaaaagaucaaucaaagccucgccuuuauucggaaguccgaugagcugcugcacaacgucaauguggggaaaagcaccacaaacaucaugauuaccacgaucaucauugugaucauuguuauccuccugcuucugauugccgucggacucuuccuguacugcaaggcucgcucuacccccgugacacuguccaaagaccagcuuagcggcaucaauaacaucgcguucucuaauugaggacuaguguccaccugucccuccugggcugcuggauugucucguuuuccugccaaauaaacaggaucagcgcuuuacagaucuaaaaaaaaaaaaaaaaaaaaaaaaaaaaaaaaaaaaaaaaaaaaaaaaaaaaaaaaaaaaaaaaugcaucccccccccccccccccccccccccccccccaaaggcucuuuucagagccaccagaauu

SEQ ID NO: 18463 - RNA, 1916 nt, Artificial Sequence
  mRNA product Design c-1 comprising derived and/or modified sequence from HRSV(Memphis-37)__AIY60640.1__F_DSCav1_mut7 (opt6)
gggagaguccgcucagccagguugcagaagcggcuuagcguguguccuaaucuucucucugcguguagguaggccugugccgcaaacaagcuuaccauggaacuaccaauacucaaaacaaaugcuauaaccacaauacucgcagcaguaacauuauguuucgcaucaucccaaaacauaacagaagaauuuuaucaaucaaccuguucagcaguauccaaaggauaccuaagugcauuaagaaccggaugguacacaucaguaauaaccauagaacuuucaaacauaaaagaaaacaaauguaacggcacagacgcaaaagucaaacucaucaaacaggaacuugacaaauauaaaaacgcaguaaccgaacuacaaaugcuaaugugcucaacaccagcagcaggaucaggaucagcaauugcaucuggaauagcuguaugcaaaguccuacaccuagaaggagaaguaaacaaaaucaaaaacgcauuacucuccacaaacaaagcaguaguaucacuaucaaacggaguuucaguacuaaccuucaaaguauuagaccuaaaaaacuacauagacaaacaacuacuaccuauacuaaacaaacaauccuguucaauaagcaacauugaaacuguaauggaauuucaacaaaaaaacaaccgccuauuagaaauaaccagagaauuuuccguaaaugcaggaguaaccacaccagucucuacauacauguuaaccaacucagaacuauuaucacucauaaaugacaugccuauaacaaacgaccaaaaaaaacuaaugucaaacaacguacaaauaguaagacaacaaucauauuccauaaugugcauaauaaaagaagaaguacuugcauacgugguucaacuaccccuauauggaguuauagacacaccaugcuggaaacuccacacuuccccacuuugcacaacuaacacaaaagaaggaucaaauauaugccuaaccagaacagaccguggaugguacugcgacaacgcuggaucagucuccuucuuuccacaagcagaaaccugcaaagucugcucaaauagagucuucugugacacaaugaacucacucacccuacccucagaaguaaaccuauguaauauagauauauuuaauccaaaauacgacugcaaaauuaugacaaguaaaacagacguaagcucaucagucauaaccagccuaggagcaauaguauccuguuacggcaaaacaaaaugcacagcuucaaacaaaaacaaaggcauaauaaaaacauucucaaacggaugugacuauguaucaaauaaaggaguugacacaguaucaguuggaaacacacuauacuauguaaacaaacaagaaggaaaaucacuauacguuaaaggcgaacccauaaucaauuucuacgacccccuagucuucccauccgaugaauuugacgcaucaauaucccaaguaaaugaaaaaaucaaccaaucccuagcauuuauacgaaaauccgacgaacuacuccauaaugucaacgucgguaaaucaacgacaaacaucaugaucacaacaauaauaauaguaauaauuguaauauuacucuuacucauagcaguaggccuauuucuauauugcaaagccagaucaacaccaguaaccuuauccaaagaccaacuaucuggaauaaacaacauagcauuuuccaacugaggacuaguguccaccugucccuccugggcugcuggauugucucguuuuccugccaaauaaacaggaucagcgcuuuacagaucuaaaaaaaaaaaaaaaaaaaaaaaaaaaaaaaaaaaaaaaaaaaaaaaaaaaaaaaaaaaaaaaaugcaucccccccccccccccccccccccccccccccaaaggcucuuuucagagccaccagaauu

SEQ ID NO: 18464 - RNA, 1916 nt, Artificial Sequence
  mRNA product Design c-1 comprising derived and/or modified sequence from HRSV(Memphis-37)__AIY60640.1__F_DSCav1_mut7 (opt11)
gggagaguccgcucagccagguugcagaagcggcuuagcguguguccuaaucuucucucugcguguagguaggccugugccgcaaacaagcuuaccauggaacuccccauacuuaaaacaaacgccauaacaacuauacucgcagccgucacccucuguuucgcauccucucaaaacaucaccgaagaguucuaucaaucaaccugcuccgccgucucaaaaggcuaccucuccgcccuacgcacaggcugguacaccagcgucauuaccauagaacucucgaacaucaaagaaaacaaaugcaacggcaccgacgcaaaagugaaacucaucaaacaagaacucgacaaauacaaaaacgccgucaccgaacuucagaugcucaugugcuccaccccugccgccggcagcggcuccgccauagccuccggcaucgcagucugcaaaguccuccaccucgaaggagaaguaaacaaaaucaaaaaugcucuccucuccacaaacaaagccgucgucucacucuccaauggagucuccguccucaccuucaaaguccucgaccucaaaaacuacauagacaaacaacuacuccccauccucaacaagcaauccugcucuaucuccaacauagaaaccguuauggaguuccaacagaaaaauaaccgccugcuagaaauaacccgagaguucuccgucaacgcaggcgucacuacccccgucagcacauacaugcuaacaaacuccgaacugcucucccuuaucaacgacaugcccaucacaaacgaucagaaaaagcucaugucuaacaacguacaaaucguucggcaacaauccuacuccaucaugugcaucaucaaagaagaagugcucgccuacguaguccaacucccccucuacggagucaucgacacacccugcuggaaacuccacacaucaccccucugcaccaccaacacaaaagaaggguccaacaucugccucacgcgcaccgaccgaggcugguacugcgacaacgccggcuccguauccuucuucccccaagcagaaaccugcaaggucugcuccaaccgcguauucugcgacaccaugaacucgcucacccuccccucagaagucaaccuauguaacaucgacauauucaaucccaaauacgacugcaagauaaugacuuccaaaaccgacguaagcuccucggucaucaccucccucggcgccaucgucuccugcuacggcaaaaccaaaugcaccgccuccaauaagaauaaaggcauaauaaagacauucagcaacggcugcgauuacgucuccaacaaaggugucgacaccgucucagucggcaacacucuauacuacgugaacaaacaagaaggcaaaagccuauacguuaaaggcgaaccaauaaucaauuucuacgacccucuagucuuucccucugacgaguucgaugccagcauaagccaagucaacgaaaagaucaaccaaucacucgccuucauccguaaauccgacgaacugcuccacaaugucaauguaggcaaaucaacaaccaacaucaugaucaccacuauuaucaucgucaucaucguaauccuacuccuacuaaucgccgucggccuauuccucuacugcaaagcccgcucgacccccgucacucucagcaaggaucaacuauccggcaucaacaacaucgccuucuccaacuaaggacuaguguccaccugucccuccugggcugcuggauugucucguuuuccugccaaauaaacaggaucagcgcuuuacagaucuaaaaaaaaaaaaaaaaaaaaaaaaaaaaaaaaaaaaaaaaaaaaaaaaaaaaaaaaaaaaaaaaugcaucccccccccccccccccccccccccccccccaaaggcucuuuucagagccaccagaauu

SEQ ID NO: 18465 - RNA, 2006 nt, Artificial Sequence
  mRNA product Design c-2 comprising derived and/or modified sequence from HRSV(Memphis-37)__AIY60640.1__F_DSCav1_mut7 (opt1)
gggagacuccugucgggcggaaguaggaggaguagaguuuaaaaacaguacucuuuuuccgguucgggacguaguugaagcaacgacaagccggauaaccgcucuugagacaggaagcuuaccauggagcugcccauccucaagaccaacgccaucaccacgauccuggccgcggugacccugugcuucgccagcucccagaacaucaccgaggaguucuaccagagcacgugcuccgccgucagcaagggcuaccucuccgcccugcgcaccgggugguacaccagcgugaucaccaucgagcuguccaacaucaaggagaacaagugcaacggcaccgacgccaaggugaagcucaucaagcaggagcuggacaaguacaagaacgcggucacggagcugcagaugcugaugugcagcaccccggccgccggcuccgggagcgcgaucgccuccggcaucgccgucugcaaggugcugcaccucgagggcgaggugaacaagaucaagaacgcccugcuguccaccaacaaggccgucgugagccucuccaacggggugagcguccugaccuucaaggugcuggaccucaagaacuacaucgacaagcagcugcugcccauccugaacaagcagagcugcuccaucagcaacaucgagaccgucauggaguuccagcagaagaacaaccgccuccuggagaucacgcgggaguucagcgugaacgcgggcgugaccacccccgucuccaccuacaugcugacgaacagcgagcuccugucccugaucaacgacaugccgaucaccaacgaccagaagaagcucaugagcaacaacgugcagaucgugcgccagcaguccuacagcaucaugugcaucaucaaggaggagguccuggccuacguggugcagcugccccucuacggggucaucgacacccccugcuggaagcugcacaccagcccccugugcacgaccaacaccaaggagggcuccaacaucugccucacccggacggaccgcgggugguacugcgacaacgccggcagcguguccuucuucccgcaggccgagaccugcaaggucugcagcaaccggguguucugcgacaccaugaacucccugacccugcccagcgaggugaaccucugcaacaucgacaucuucaaccccaaguacgacugcaagaucaugacguccaagaccgacgucagcuccagcgugaucaccucccugggcgccaucgugagcugcuacgggaagaccaagugcacggcgagcaacaagaacaagggcaucaucaagaccuucuccaacgggugcgacuacgucagcaacaagggcguggacaccguguccgucggcaacacccuguacuacgugaacaagcaggagggcaagagccucuacgugaagggggagcccaucaucaacuucuacgacccgcuggucuuccccuccgacgaguucgacgccagcaucucccaggugaacgagaagaucaaccagagccuggccuucauccggaaguccgacgagcuccugcacaacgugaacgucggcaagagcaccacgaacaucaugaucaccaccaucaucaucgugaucaucgugauccugcugcuccugaucgccgucgggcuguuccucuacugcaaggcccgcuccacccccgugacgcugagcaaggaccagcuguccgggaucaacaacaucgcguucagcaacugaggacuaguggaagcauuuuccuggcugauuaaaagaaauuacucagcuauggucaucuguuccuguuagaaggcuaugcagcauauuauauacuaugcgcauguuaugaaaugcauaauaaaaaauuuuaaaaaaucuaaaagaucuaaaaaaaaaaaaaaaaaaaaaaaaaaaaaaaaaaaaaaaaaaaaaaaaaaaaaaaaaaaaaaaaugcaucccccccccccccccccccccccccccccccaaaggcucuuuucagagccaccagaauu

SEQ ID NO: 18466 - RNA, 2006 nt, Artificial Sequence
  mRNA product Design c-2 comprising derived and/or modified sequence from HRSV(Memphis-37)__AIY60640.1__F_DSCav1_mut7 (opt1)
gggagacuccugucgggcggaaguaggaggaguagaguuuaaaaacaguacucuuuuuccgguucgggacguaguugaagcaacgacaagccggauaaccgcucuugagacaggaagcuuaccauggagcugcccauccucaagaccaacgccaucaccacgauccuggccgcggugacccugugcuucgccagcucccagaacaucaccgaggaguucuaccagagcacgugcuccgccgucagcaagggcuaccucuccgcccugcgcaccgggugguacaccagcgugaucaccaucgagcuguccaacaucaaggagaacaagugcaacggcaccgacgccaaggugaagcucaucaagcaggagcuggacaaguacaagaacgcggucacggagcugcagaugcucaugugcagcaccccggccgccggguccggcagcgccaucgcguccgggaucgccgugugcaaggugcugcaccuggagggcgaggucaacaagaucaagaacgcccuccugagcaccaacaaggccguggugucccugagcaacggcgucuccgugcucaccuucaaggugcuggaccugaagaacuacaucgacaagcagcuccugcccauccugaacaagcagagcugcuccaucagcaacaucgagacggucauggaguuccagcagaagaacaaccggcuccuggagaucacccgcgaguucuccgugaacgccggggugaccacccccgucagcacguacaugcugaccaacagcgagcuccugucccugaucaacgacaugcccaucaccaacgaccagaagaagcucaugagcaacaacgugcagaucgugcggcagcaguccuacagcaucaugugcaucaucaaggaggagguccuggcguacguggugcagcugccgcucuacggcgucaucgacacccccugcuggaagcugcacacgagcccccugugcaccaccaacaccaaggaggggagcaacaucugccucacgcgcaccgaccggggcugguacugcgacaacgccggguccgugagcuucuucccccaggccgagaccugcaaggugugcuccaaccgcgucuucugcgacaccaugaacagccugacgcugccguccgaggugaaccucugcaacaucgacaucuucaaccccaaguacgacugcaagaucaugaccagcaagaccgacgucuccagcuccgugaucaccagccugggcgccaucguguccugcuacggcaagacgaagugcaccgccagcaacaagaacaaggggaucaucaagaccuucuccaacggcugcgacuacgucagcaacaaggggguggacaccgugagcgucggcaacacgcuguacuacgugaacaagcaggagggcaagucccucuacgugaagggggagcccaucaucaacuucuacgacccccuggucuucccgagcgacgaguucgacgcguccaucagccaggugaacgagaagaucaaccagucccuggccuucauccggaaguccgacgagcuccugcacaacgugaacgucggcaaguccaccaccaacaucaugaucaccaccaucaucaucgugaucaucgugauccugcuccugcugaucgccgucggccucuuccuguacugcaaggcccgcagcacgcccgugacccuguccaaggaccagcugagcgggaucaacaacaucgccuucuccaacugaggacuaguggaagcauuuuccuggcugauuaaaagaaauuacucagcuauggucaucuguuccuguuagaaggcuaugcagcauauuauauacuaugcgcauguuaugaaaugcauaauaaaaaauuuuaaaaaaucuaaaagaucuaaaaaaaaaaaaaaaaaaaaaaaaaaaaaaaaaaaaaaaaaaaaaaaaaaaaaaaaaaaaaaaaugcaucccccccccccccccccccccccccccccccaaaggcucuuuucagagccaccagaauu

SEQ ID NO: 18467 - RNA, 2006 nt, Artificial Sequence
  mRNA product Design c-2 comprising derived and/or modified sequence from HRSV(Memphis-37)__AIY60640.1__F_DSCav1_mut7 (opt2)
gggagacuccugucgggcggaaguaggaggaguagaguuuaaaaacaguacucuuuuuccgguucgggacguaguugaagcaacgacaagccggauaaccgcucuugagacaggaagcuuaccauggagcuccccauccucaagaccaacgccaucaccaccauccucgccgccgucacccucugcuucgccuccucccagaacaucaccgaggaguucuaccaguccaccugcuccgccgucuccaagggcuaccucuccgcccuccgcaccggcugguacaccuccgucaucaccaucgagcucuccaacaucaaggagaacaagugcaacggcaccgacgccaaggucaagcucaucaagcaggagcucgacaaguacaagaacgccgucaccgagcuccagaugcucaugugcuccacccccgccgccggcuccggcuccgccaucgccuccggcaucgccgucugcaagguccuccaccucgagggcgaggucaacaagaucaagaacgcccuccucuccaccaacaaggccgucgucucccucuccaacggcgucuccguccucaccuucaagguccucgaccucaagaacuacaucgacaagcagcuccuccccauccucaacaagcaguccugcuccaucuccaacaucgagaccgucauggaguuccagcagaagaacaaccgccuccucgagaucacccgcgaguucuccgucaacgccggcgucaccacccccgucuccaccuacaugcucaccaacuccgagcuccucucccucaucaacgacaugcccaucaccaacgaccagaagaagcucauguccaacaacguccagaucguccgccagcaguccuacuccaucaugugcaucaucaaggaggagguccucgccuacgucguccagcucccccucuacggcgucaucgacacccccugcuggaagcuccacaccuccccccucugcaccaccaacaccaaggagggcuccaacaucugccucacccgcaccgaccgcggcugguacugcgacaacgccggcuccgucuccuucuucccccaggccgagaccugcaaggucugcuccaaccgcgucuucugcgacaccaugaacucccucacccuccccuccgaggucaaccucugcaacaucgacaucuucaaccccaaguacgacugcaagaucaugaccuccaagaccgacgucuccuccuccgucaucaccucccucggcgccaucgucuccugcuacggcaagaccaagugcaccgccuccaacaagaacaagggcaucaucaagaccuucuccaacggcugcgacuacgucuccaacaagggcgucgacaccgucuccgucggcaacacccucuacuacgucaacaagcaggagggcaagucccucuacgucaagggcgagcccaucaucaacuucuacgacccccucgucuuccccuccgacgaguucgacgccuccaucucccaggucaacgagaagaucaaccagucccucgccuucauccgcaaguccgacgagcuccuccacaacgucaacgucggcaaguccaccaccaacaucaugaucaccaccaucaucaucgucaucaucgucauccuccuccuccucaucgccgucggccucuuccucuacugcaaggcccgcuccacccccgucacccucuccaaggaccagcucuccggcaucaacaacaucgccuucuccaacugaggacuaguggaagcauuuuccuggcugauuaaaagaaauuacucagcuauggucaucuguuccuguuagaaggcuaugcagcauauuauauacuaugcgcauguuaugaaaugcauaauaaaaaauuuuaaaaaaucuaaaagaucuaaaaaaaaaaaaaaaaaaaaaaaaaaaaaaaaaaaaaaaaaaaaaaaaaaaaaaaaaaaaaaaaugcaucccccccccccccccccccccccccccccccaaaggcucuuuucagagccaccagaauu

SEQ ID NO: 18468 - RNA, 2006 nt, Artificial Sequence
  mRNA product Design c-2 comprising derived and/or modified sequence from HRSV(Memphis-37)__AIY60640.1__F_DSCav1_mut7 (opt3)
gggagacuccugucgggcggaaguaggaggaguagaguuuaaaaacaguacucuuuuuccgguucgggacguaguugaagcaacgacaagccggauaaccgcucuugagacaggaagcuuaccauggagcugcccauccucaagaccaacgccauuacaacuauacuugcugcagugacgcugugcuucgccagcucccagaauaucaccgaagaguuuuaccaaucuacauguucagcggucaguaaaggcuauuugagcgcuuuaagaacugggugguacaccuccguuauuacaaucgaacugucuaacauuaaggagaauaaaugcaacggaaccgacgccaaggugaaacuaaucaagcaggaacucgauaaguauaaaaaugcaguaacugagcugcagaugcuuauguguucgaccccugccgcugguucaggcagcgcaauagccagugggaucgcugugugcaagguccugcacuuggagggagaagugaacaaaauuaagaaugcccuccuguccacaaacaaagcgguugugucucugagcaauggcgucuccgugcucacguucaagguauuagaccugaagaacuacaucgauaaacagcuuuugccaauucugaauaagcaaucauguaguaucagcaacauagagacuguuauggaauuucagcagaaaaauaacaggcuacucgagauuacccgggaguucucugugaaugccggugucacaacuccgguguccaccuauaugcugacaaacucagaacuucugagcuugaucaacgacaugcccauuaccaaugaucagaagaaacucaugaguaacaaugugcaaaucguccgccagcagucuuacuccaucaugugcauuauaaaggaggaaguucuggcauaugugguacaguuaccucuguacggggugaucgacacgccauguuggaaacuccauacuagcccccuuugcacaaccaacacuaaggagggaucgaauauuugucugacacgaaccgaucguggcugguacugcgacaacgcuggcucugucuccuuuuucccucaagccgaaacguguaaggugugcucaaauagaguguuuugcgauaccaugaacaguuugacacuaccaagcgagguuaaucuguguaacaucgacauauucaaucccaaauaugauugcaagauuaugacuuccaaaaccgacgucucuagcucagugaucacaagucucggggcaaucguauccuguuacggaaagacuaaaugcaccgcuagcaacaagaauaaggguauuaucaaaacauuuucuaacggcugugauuauguuucaaauaaggggguggacaccgucagugugggaaacacucuguacuaugucaacaaacaggagggcaagagccuuuacgugaaaggugaaccuauuauaaauuucuaugacccacugguuuuuccguccgaugaguucgacgccucuaucagccaggugaacgaaaagauuaaucaaucguuggcguuuaucaggaaguccgaugagcuccugcacaacguaaaugucgggaaaucaacgacaaacaucaugauuaccacuauaaucauugugaucauuguuaucuuacugcuacucauagccgugggacuguuccuuuacugcaaggcacggaguacccccgucacauugucuaaagaccagcugagcggcaucaauaacauugcuuucuccaauugaggacuaguggaagcauuuuccuggcugauuaaaagaaauuacucagcuauggucaucuguuccuguuagaaggcuaugcagcauauuauauacuaugcgcauguuaugaaaugcauaauaaaaaauuuuaaaaaaucuaaaagaucuaaaaaaaaaaaaaaaaaaaaaaaaaaaaaaaaaaaaaaaaaaaaaaaaaaaaaaaaaaaaaaaaugcaucccccccccccccccccccccccccccccccaaaggcucuuuucagagccaccagaauu

SEQ ID NO: 18469 - RNA, 2006 nt, Artificial Sequence
  mRNA product Design c-2 comprising derived and/or modified sequence from HRSV(Memphis-37)__AIY60640.1__F_DSCav1_mut7 (opt4)
gggagacuccugucgggcggaaguaggaggaguagaguuuaaaaacaguacucuuuuuccgguucgggacguaguugaagcaacgacaagccggauaaccgcucuugagacaggaagcuuaccauggagcugcccauccugaagaccaacgccaucaccaccauccuggccgccgugacccugugcuucgccagcagccagaacaucaccgaggaguucuaccagagcaccugcagcgccgugagcaagggcuaccugagcgcccugagaaccggcugguacaccagcgugaucaccaucgagcugagcaacaucaaggagaacaagugcaacggcaccgacgccaaggugaagcugaucaagcaggagcuggacaaguacaagaacgccgugaccgagcugcagaugcugaugugcagcacccccgccgccggcagcggcagcgccaucgccagcggcaucgccgugugcaaggugcugcaccuggagggcgaggugaacaagaucaagaacgcccugcugagcaccaacaaggccguggugagccugagcaacggcgugagcgugcugaccuucaaggugcuggaccugaagaacuacaucgacaagcagcugcugcccauccugaacaagcagagcugcagcaucagcaacaucgagaccgugauggaguuccagcagaagaacaacagacugcuggagaucaccagagaguucagcgugaacgccggcgugaccacccccgugagcaccuacaugcugaccaacagcgagcugcugagccugaucaacgacaugcccaucaccaacgaccagaagaagcugaugagcaacaacgugcagaucgugagacagcagagcuacagcaucaugugcaucaucaaggaggaggugcuggccuacguggugcagcugccccuguacggcgugaucgacacccccugcuggaagcugcacaccagcccccugugcaccaccaacaccaaggagggcagcaacaucugccugaccagaaccgacagaggcugguacugcgacaacgccggcagcgugagcuucuucccccaggccgagaccugcaaggugugcagcaacagaguguucugcgacaccaugaacagccugacccugcccagcgaggugaaccugugcaacaucgacaucuucaaccccaaguacgacugcaagaucaugaccagcaagaccgacgugagcagcagcgugaucaccagccugggcgccaucgugagcugcuacggcaagaccaagugcaccgccagcaacaagaacaagggcaucaucaagaccuucagcaacggcugcgacuacgugagcaacaagggcguggacaccgugagcgugggcaacacccuguacuacgugaacaagcaggagggcaagagccuguacgugaagggcgagcccaucaucaacuucuacgacccccugguguuccccagcgacgaguucgacgccagcaucagccaggugaacgagaagaucaaccagagccuggccuucaucagaaagagcgacgagcugcugcacaacgugaacgugggcaagagcaccaccaacaucaugaucaccaccaucaucaucgugaucaucgugauccugcugcugcugaucgccgugggccuguuccuguacugcaaggccagaagcacccccgugacccugagcaaggaccagcugagcggcaucaacaacaucgccuucagcaacugaggacuaguggaagcauuuuccuggcugauuaaaagaaauuacucagcuauggucaucuguuccuguuagaaggcuaugcagcauauuauauacuaugcgcauguuaugaaaugcauaauaaaaaauuuuaaaaaaucuaaaagaucuaaaaaaaaaaaaaaaaaaaaaaaaaaaaaaaaaaaaaaaaaaaaaaaaaaaaaaaaaaaaaaaaugcaucccccccccccccccccccccccccccccccaaaggcucuuuucagagccaccagaauu

SEQ ID NO: 18470 - RNA, 2006 nt, Artificial Sequence
  mRNA product Design c-2 comprising derived and/or modified sequence from HRSV(Memphis-37)__AIY60640.1__F_DSCav1_mut7 (opt5)
gggagacuccugucgggcggaaguaggaggaguagaguuuaaaaacaguacucuuuuuccgguucgggacguaguugaagcaacgacaagccggauaaccgcucuugagacaggaagcuuaccauggagcugcccauccucaagaccaacgccauuacaacgauccuggcugccgugacccuuugcuucgcgagcucccagaauauuacagaagaguuuuaccaaucuaccuguagcgcugucuccaaaggcuaucugucugcccucagaacagggugguacaccagcguuaucacaauugaacuguccaacaucaaggagaauaaaugcaacggaaccgacgccaaggugaaacuuaucaagcaggaacuggauaaguauaaaaaugcugugacggagcuccagaugcugauguguucuaccccugccgcuggcagcggguccgccauugcgagcggaaucgccgucugcaaggugcugcaccucgagggcgaaguuaacaaaauuaagaaugcucugcuuucuacaaacaaagccguggucucccugagcaauggggugucuguucucaccuucaaggugcuggaccuuaagaacuacaucgauaaacagcugcucccgauucugaauaagcaauccuguagcaucucuaacauugagacagucauggaauuucagcagaaaaauaaccggcugcucgagaucacccgcgaguucuccgugaaugcuggagugacgacacccgucagcaccuauaugcugacaaacuccgaacuucugucucucaucaacgacaugccuauuaccaaugaucagaagaaacugaugagcaacaauguucaaaucgugagacagcaguccuacagcauuaugugcaucauuaaggaggaagugcuugccuaugucgugcagcugccccucuacggcguuaucgacaccccuuguuggaaacugcauacaucuccccugugcacgaccaacacaaaggagggcuccaauaucugucucacccggacagaucgcgggugguacugcgacaacgcgggaagcgugagcuuuuucccucaagccgaaaccuguaaggucugcucuaauagaguguuuugcgauacgaugaacucccugacacuuccgucugagguuaaucuguguaacauugacaucuucaaucccaaauaugauugcaagauuaugaccagcaaaaccgacguguccagcucugucaucacaucccucggcgcuauugugagcuguuacgggaagaccaaaugcacagccucuaacaagaauaagggaaucaucaaaacguuuuccaacggcugugauuaugucagcaauaaggggguggacaccguuuccgugggaaacacacuguacuaugucaacaaacaggagggcaagucucuuuacgugaaaggcgaaccuauuaucaauuucuaugacccccugguuuuuccuagcgaugaguucgacgcuuccauuucucaggugaacgaaaagaucaaucaaagccucgccuuuauucggaaguccgaugagcugcugcacaacgucaauguggggaaaagcaccacaaacaucaugauuaccacgaucaucauugugaucauuguuauccuccugcuucugauugccgucggacucuuccuguacugcaaggcucgcucuacccccgugacacuguccaaagaccagcuuagcggcaucaauaacaucgcguucucuaauugaggacuaguggaagcauuuuccuggcugauuaaaagaaauuacucagcuauggucaucuguuccuguuagaaggcuaugcagcauauuauauacuaugcgcauguuaugaaaugcauaauaaaaaauuuuaaaaaaucuaaaagaucuaaaaaaaaaaaaaaaaaaaaaaaaaaaaaaaaaaaaaaaaaaaaaaaaaaaaaaaaaaaaaaaaugcaucccccccccccccccccccccccccccccccaaaggcucuuuucagagccaccagaauu

SEQ ID NO: 18471 - RNA, 2006 nt, Artificial Sequence
  mRNA product Design c-2 comprising derived and/or modified sequence from HRSV(Memphis-37)__AIY60640.1__F_DSCav1_mut7 (opt6)
gggagacuccugucgggcggaaguaggaggaguagaguuuaaaaacaguacucuuuuuccgguucgggacguaguugaagcaacgacaagccggauaaccgcucuugagacaggaagcuuaccauggaacuaccaauacucaaaacaaaugcuauaaccacaauacucgcagcaguaacauuauguuucgcaucaucccaaaacauaacagaagaauuuuaucaaucaaccuguucagcaguauccaaaggauaccuaagugcauuaagaaccggaugguacacaucaguaauaaccauagaacuuucaaacauaaaagaaaacaaauguaacggcacagacgcaaaagucaaacucaucaaacaggaacuugacaaauauaaaaacgcaguaaccgaacuacaaaugcuaaugugcucaacaccagcagcaggaucaggaucagcaauugcaucuggaauagcuguaugcaaaguccuacaccuagaaggagaaguaaacaaaaucaaaaacgcauuacucuccacaaacaaagcaguaguaucacuaucaaacggaguuucaguacuaaccuucaaaguauuagaccuaaaaaacuacauagacaaacaacuacuaccuauacuaaacaaacaauccuguucaauaagcaacauugaaacuguaauggaauuucaacaaaaaaacaaccgccuauuagaaauaaccagagaauuuuccguaaaugcaggaguaaccacaccagucucuacauacauguuaaccaacucagaacuauuaucacucauaaaugacaugccuauaacaaacgaccaaaaaaaacuaaugucaaacaacguacaaauaguaagacaacaaucauauuccauaaugugcauaauaaaagaagaaguacuugcauacgugguucaacuaccccuauauggaguuauagacacaccaugcuggaaacuccacacuuccccacuuugcacaacuaacacaaaagaaggaucaaauauaugccuaaccagaacagaccguggaugguacugcgacaacgcuggaucagucuccuucuuuccacaagcagaaaccugcaaagucugcucaaauagagucuucugugacacaaugaacucacucacccuacccucagaaguaaaccuauguaauauagauauauuuaauccaaaauacgacugcaaaauuaugacaaguaaaacagacguaagcucaucagucauaaccagccuaggagcaauaguauccuguuacggcaaaacaaaaugcacagcuucaaacaaaaacaaaggcauaauaaaaacauucucaaacggaugugacuauguaucaaauaaaggaguugacacaguaucaguuggaaacacacuauacuauguaaacaaacaagaaggaaaaucacuauacguuaaaggcgaacccauaaucaauuucuacgacccccuagucuucccauccgaugaauuugacgcaucaauaucccaaguaaaugaaaaaaucaaccaaucccuagcauuuauacgaaaauccgacgaacuacuccauaaugucaacgucgguaaaucaacgacaaacaucaugaucacaacaauaauaauaguaauaauuguaauauuacucuuacucauagcaguaggccuauuucuauauugcaaagccagaucaacaccaguaaccuuauccaaagaccaacuaucuggaauaaacaacauagcauuuuccaacugaggacuaguggaagcauuuuccuggcugauuaaaagaaauuacucagcuauggucaucuguuccuguuagaaggcuaugcagcauauuauauacuaugcgcauguuaugaaaugcauaauaaaaaauuuuaaaaaaucuaaaagaucuaaaaaaaaaaaaaaaaaaaaaaaaaaaaaaaaaaaaaaaaaaaaaaaaaaaaaaaaaaaaaaaaugcaucccccccccccccccccccccccccccccccaaaggcucuuuucagagccaccagaauu

SEQ ID NO: 18472 - RNA, 2006 nt, Artificial Sequence
  mRNA product Design c-2 comprising derived and/or modified sequence from HRSV(Memphis-37)__AIY60640.1__F_DSCav1_mut7 (opt11)
gggagacuccugucgggcggaaguaggaggaguagaguuuaaaaacaguacucuuuuuccgguucgggacguaguugaagcaacgacaagccggauaaccgcucuugagacaggaagcuuaccauggaacuccccauacuuaaaacaaacgccauaacaacuauacucgcagccgucacccucuguuucgcauccucucaaaacaucaccgaagaguucuaucaaucaaccugcuccgccgucucaaaaggcuaccucuccgcccuacgcacaggcugguacaccagcgucauuaccauagaacucucgaacaucaaagaaaacaaaugcaacggcaccgacgcaaaagugaaacucaucaaacaagaacucgacaaauacaaaaacgccgucaccgaacuucagaugcucaugugcuccaccccugccgccggcagcggcuccgccauagccuccggcaucgcagucugcaaaguccuccaccucgaaggagaaguaaacaaaaucaaaaaugcucuccucuccacaaacaaagccgucgucucacucuccaauggagucuccguccucaccuucaaaguccucgaccucaaaaacuacauagacaaacaacuacuccccauccucaacaagcaauccugcucuaucuccaacauagaaaccguuauggaguuccaacagaaaaauaaccgccugcuagaaauaacccgagaguucuccgucaacgcaggcgucacuacccccgucagcacauacaugcuaacaaacuccgaacugcucucccuuaucaacgacaugcccaucacaaacgaucagaaaaagcucaugucuaacaacguacaaaucguucggcaacaauccuacuccaucaugugcaucaucaaagaagaagugcucgccuacguaguccaacucccccucuacggagucaucgacacacccugcuggaaacuccacacaucaccccucugcaccaccaacacaaaagaaggguccaacaucugccucacgcgcaccgaccgaggcugguacugcgacaacgccggcuccguauccuucuucccccaagcagaaaccugcaaggucugcuccaaccgcguauucugcgacaccaugaacucgcucacccuccccucagaagucaaccuauguaacaucgacauauucaaucccaaauacgacugcaagauaaugacuuccaaaaccgacguaagcuccucggucaucaccucccucggcgccaucgucuccugcuacggcaaaaccaaaugcaccgccuccaauaagaauaaaggcauaauaaagacauucagcaacggcugcgauuacgucuccaacaaaggugucgacaccgucucagucggcaacacucuauacuacgugaacaaacaagaaggcaaaagccuauacguuaaaggcgaaccaauaaucaauuucuacgacccucuagucuuucccucugacgaguucgaugccagcauaagccaagucaacgaaaagaucaaccaaucacucgccuucauccguaaauccgacgaacugcuccacaaugucaauguaggcaaaucaacaaccaacaucaugaucaccacuauuaucaucgucaucaucguaauccuacuccuacuaaucgccgucggccuauuccucuacugcaaagcccgcucgacccccgucacucucagcaaggaucaacuauccggcaucaacaacaucgccuucuccaacuaaggacuaguggaagcauuuuccuggcugauuaaaagaaauuacucagcuauggucaucuguuccuguuagaaggcuaugcagcauauuauauacuaugcgcauguuaugaaaugcauaauaaaaaauuuuaaaaaaucuaaaagaucuaaaaaaaaaaaaaaaaaaaaaaaaaaaaaaaaaaaaaaaaaaaaaaaaaaaaaaaaaaaaaaaaugcaucccccccccccccccccccccccccccccccaaaggcucuuuucagagccaccagaauu

SEQ ID NO: 18473 - RNA, 1983 nt, Artificial Sequence
  mRNA product Design c-3 comprising derived and/or modified sequence from HRSV(Memphis-37)__AIY60640.1__F_DSCav1_mut7 (opt1)
gggagaguccgcucagccagguugcagaagcggcuuagcguguguccuaaucuucucucugcguguagguaggccugugccgcaaacaagcuuaccauggagcugcccauccucaagaccaacgccaucaccacgauccuggccgcggugacccugugcuucgccagcucccagaacaucaccgaggaguucuaccagagcacgugcuccgccgucagcaagggcuaccucuccgcccugcgcaccgggugguacaccagcgugaucaccaucgagcuguccaacaucaaggagaacaagugcaacggcaccgacgccaaggugaagcucaucaagcaggagcuggacaaguacaagaacgcggucacggagcugcagaugcugaugugcagcaccccggccgccggcuccgggagcgcgaucgccuccggcaucgccgucugcaaggugcugcaccucgagggcgaggugaacaagaucaagaacgcccugcuguccaccaacaaggccgucgugagccucuccaacggggugagcguccugaccuucaaggugcuggaccucaagaacuacaucgacaagcagcugcugcccauccugaacaagcagagcugcuccaucagcaacaucgagaccgucauggaguuccagcagaagaacaaccgccuccuggagaucacgcgggaguucagcgugaacgcgggcgugaccacccccgucuccaccuacaugcugacgaacagcgagcuccugucccugaucaacgacaugccgaucaccaacgaccagaagaagcucaugagcaacaacgugcagaucgugcgccagcaguccuacagcaucaugugcaucaucaaggaggagguccuggccuacguggugcagcugccccucuacggggucaucgacacccccugcuggaagcugcacaccagcccccugugcacgaccaacaccaaggagggcuccaacaucugccucacccggacggaccgcgggugguacugcgacaacgccggcagcguguccuucuucccgcaggccgagaccugcaaggucugcagcaaccggguguucugcgacaccaugaacucccugacccugcccagcgaggugaaccucugcaacaucgacaucuucaaccccaaguacgacugcaagaucaugacguccaagaccgacgucagcuccagcgugaucaccucccugggcgccaucgugagcugcuacgggaagaccaagugcacggcgagcaacaagaacaagggcaucaucaagaccuucuccaacgggugcgacuacgucagcaacaagggcguggacaccguguccgucggcaacacccuguacuacgugaacaagcaggagggcaagagccucuacgugaagggggagcccaucaucaacuucuacgacccgcuggucuuccccuccgacgaguucgacgccagcaucucccaggugaacgagaagaucaaccagagccuggccuucauccggaaguccgacgagcuccugcacaacgugaacgucggcaagagcaccacgaacaucaugaucaccaccaucaucaucgugaucaucgugauccugcugcuccugaucgccgucgggcuguuccucuacugcaaggcccgcuccacccccgugacgcugagcaaggaccagcuguccgggaucaacaacaucgcguucagcaacugaggacuaguacuggcugcaucucccuuuccucuguccuccauccuucucccaggauggugaagggggaccugguacccagugauccccaccccaggauccuaaaucaugacuuaccugcuaauaaaaacucauuggaaaagugagaagaucuaaaaaaaaaaaaaaaaaaaaaaaaaaaaaaaaaaaaaaaaaaaaaaaaaaaaaaaaaaaaaaaaugcaucccccccccccccccccccccccccccccccaaaggcucuuuucagagccaccagaauu

SEQ ID NO: 18474 - RNA, 1983 nt, Artificial Sequence
  mRNA product Design c-3 comprising derived and/or modified sequence from HRSV(Memphis-37)__AIY60640.1__F_DSCav1_mut7 (opt1)
gggagaguccgcucagccagguugcagaagcggcuuagcguguguccuaaucuucucucugcguguagguaggccugugccgcaaacaagcuuaccauggagcugcccauccucaagaccaacgccaucaccacgauccuggccgcggugacccugugcuucgccagcucccagaacaucaccgaggaguucuaccagagcacgugcuccgccgucagcaagggcuaccucuccgcccugcgcaccgggugguacaccagcgugaucaccaucgagcuguccaacaucaaggagaacaagugcaacggcaccgacgccaaggugaagcucaucaagcaggagcuggacaaguacaagaacgcggucacggagcugcagaugcucaugugcagcaccccggccgccggguccggcagcgccaucgcguccgggaucgccgugugcaaggugcugcaccuggagggcgaggucaacaagaucaagaacgcccuccugagcaccaacaaggccguggugucccugagcaacggcgucuccgugcucaccuucaaggugcuggaccugaagaacuacaucgacaagcagcuccugcccauccugaacaagcagagcugcuccaucagcaacaucgagacggucauggaguuccagcagaagaacaaccggcuccuggagaucacccgcgaguucuccgugaacgccggggugaccacccccgucagcacguacaugcugaccaacagcgagcuccugucccugaucaacgacaugcccaucaccaacgaccagaagaagcucaugagcaacaacgugcagaucgugcggcagcaguccuacagcaucaugugcaucaucaaggaggagguccuggcguacguggugcagcugccgcucuacggcgucaucgacacccccugcuggaagcugcacacgagcccccugugcaccaccaacaccaaggaggggagcaacaucugccucacgcgcaccgaccggggcugguacugcgacaacgccggguccgugagcuucuucccccaggccgagaccugcaaggugugcuccaaccgcgucuucugcgacaccaugaacagccugacgcugccguccgaggugaaccucugcaacaucgacaucuucaaccccaaguacgacugcaagaucaugaccagcaagaccgacgucuccagcuccgugaucaccagccugggcgccaucguguccugcuacggcaagacgaagugcaccgccagcaacaagaacaaggggaucaucaagaccuucuccaacggcugcgacuacgucagcaacaaggggguggacaccgugagcgucggcaacacgcuguacuacgugaacaagcaggagggcaagucccucuacgugaagggggagcccaucaucaacuucuacgacccccuggucuucccgagcgacgaguucgacgcguccaucagccaggugaacgagaagaucaaccagucccuggccuucauccggaaguccgacgagcuccugcacaacgugaacgucggcaaguccaccaccaacaucaugaucaccaccaucaucaucgugaucaucgugauccugcuccugcugaucgccgucggccucuuccuguacugcaaggcccgcagcacgcccgugacccuguccaaggaccagcugagcgggaucaacaacaucgccuucuccaacugaggacuaguacuggcugcaucucccuuuccucuguccuccauccuucucccaggauggugaagggggaccugguacccagugauccccaccccaggauccuaaaucaugacuuaccugcuaauaaaaacucauuggaaaagugagaagaucuaaaaaaaaaaaaaaaaaaaaaaaaaaaaaaaaaaaaaaaaaaaaaaaaaaaaaaaaaaaaaaaaugcaucccccccccccccccccccccccccccccccaaaggcucuuuucagagccaccagaauu

SEQ ID NO: 18475 - RNA, 1983 nt, Artificial Sequence
  mRNA product Design c-3 comprising derived and/or modified sequence from HRSV(Memphis-37)__AIY60640.1__F_DSCav1_mut7 (opt2)
gggagaguccgcucagccagguugcagaagcggcuuagcguguguccuaaucuucucucugcguguagguaggccugugccgcaaacaagcuuaccauggagcuccccauccucaagaccaacgccaucaccaccauccucgccgccgucacccucugcuucgccuccucccagaacaucaccgaggaguucuaccaguccaccugcuccgccgucuccaagggcuaccucuccgcccuccgcaccggcugguacaccuccgucaucaccaucgagcucuccaacaucaaggagaacaagugcaacggcaccgacgccaaggucaagcucaucaagcaggagcucgacaaguacaagaacgccgucaccgagcuccagaugcucaugugcuccacccccgccgccggcuccggcuccgccaucgccuccggcaucgccgucugcaagguccuccaccucgagggcgaggucaacaagaucaagaacgcccuccucuccaccaacaaggccgucgucucccucuccaacggcgucuccguccucaccuucaagguccucgaccucaagaacuacaucgacaagcagcuccuccccauccucaacaagcaguccugcuccaucuccaacaucgagaccgucauggaguuccagcagaagaacaaccgccuccucgagaucacccgcgaguucuccgucaacgccggcgucaccacccccgucuccaccuacaugcucaccaacuccgagcuccucucccucaucaacgacaugcccaucaccaacgaccagaagaagcucauguccaacaacguccagaucguccgccagcaguccuacuccaucaugugcaucaucaaggaggagguccucgccuacgucguccagcucccccucuacggcgucaucgacacccccugcuggaagcuccacaccuccccccucugcaccaccaacaccaaggagggcuccaacaucugccucacccgcaccgaccgcggcugguacugcgacaacgccggcuccgucuccuucuucccccaggccgagaccugcaaggucugcuccaaccgcgucuucugcgacaccaugaacucccucacccuccccuccgaggucaaccucugcaacaucgacaucuucaaccccaaguacgacugcaagaucaugaccuccaagaccgacgucuccuccuccgucaucaccucccucggcgccaucgucuccugcuacggcaagaccaagugcaccgccuccaacaagaacaagggcaucaucaagaccuucuccaacggcugcgacuacgucuccaacaagggcgucgacaccgucuccgucggcaacacccucuacuacgucaacaagcaggagggcaagucccucuacgucaagggcgagcccaucaucaacuucuacgacccccucgucuuccccuccgacgaguucgacgccuccaucucccaggucaacgagaagaucaaccagucccucgccuucauccgcaaguccgacgagcuccuccacaacgucaacgucggcaaguccaccaccaacaucaugaucaccaccaucaucaucgucaucaucgucauccuccuccuccucaucgccgucggccucuuccucuacugcaaggcccgcuccacccccgucacccucuccaaggaccagcucuccggcaucaacaacaucgccuucuccaacugaggacuaguacuggcugcaucucccuuuccucuguccuccauccuucucccaggauggugaagggggaccugguacccagugauccccaccccaggauccuaaaucaugacuuaccugcuaauaaaaacucauuggaaaagugagaagaucuaaaaaaaaaaaaaaaaaaaaaaaaaaaaaaaaaaaaaaaaaaaaaaaaaaaaaaaaaaaaaaaaugcaucccccccccccccccccccccccccccccccaaaggcucuuuucagagccaccagaauu

SEQ ID NO: 18476 - RNA, 1983 nt, Artificial Sequence
  mRNA product Design c-3 comprising derived and/or modified sequence from HRSV(Memphis-37)__AIY60640.1__F_DSCav1_mut7 (opt3)
gggagaguccgcucagccagguugcagaagcggcuuagcguguguccuaaucuucucucugcguguagguaggccugugccgcaaacaagcuuaccauggagcugcccauccucaagaccaacgccauuacaacuauacuugcugcagugacgcugugcuucgccagcucccagaauaucaccgaagaguuuuaccaaucuacauguucagcggucaguaaaggcuauuugagcgcuuuaagaacugggugguacaccuccguuauuacaaucgaacugucuaacauuaaggagaauaaaugcaacggaaccgacgccaaggugaaacuaaucaagcaggaacucgauaaguauaaaaaugcaguaacugagcugcagaugcuuauguguucgaccccugccgcugguucaggcagcgcaauagccagugggaucgcugugugcaagguccugcacuuggagggagaagugaacaaaauuaagaaugcccuccuguccacaaacaaagcgguugugucucugagcaauggcgucuccgugcucacguucaagguauuagaccugaagaacuacaucgauaaacagcuuuugccaauucugaauaagcaaucauguaguaucagcaacauagagacuguuauggaauuucagcagaaaaauaacaggcuacucgagauuacccgggaguucucugugaaugccggugucacaacuccgguguccaccuauaugcugacaaacucagaacuucugagcuugaucaacgacaugcccauuaccaaugaucagaagaaacucaugaguaacaaugugcaaaucguccgccagcagucuuacuccaucaugugcauuauaaaggaggaaguucuggcauaugugguacaguuaccucuguacggggugaucgacacgccauguuggaaacuccauacuagcccccuuugcacaaccaacacuaaggagggaucgaauauuugucugacacgaaccgaucguggcugguacugcgacaacgcuggcucugucuccuuuuucccucaagccgaaacguguaaggugugcucaaauagaguguuuugcgauaccaugaacaguuugacacuaccaagcgagguuaaucuguguaacaucgacauauucaaucccaaauaugauugcaagauuaugacuuccaaaaccgacgucucuagcucagugaucacaagucucggggcaaucguauccuguuacggaaagacuaaaugcaccgcuagcaacaagaauaaggguauuaucaaaacauuuucuaacggcugugauuauguuucaaauaaggggguggacaccgucagugugggaaacacucuguacuaugucaacaaacaggagggcaagagccuuuacgugaaaggugaaccuauuauaaauuucuaugacccacugguuuuuccguccgaugaguucgacgccucuaucagccaggugaacgaaaagauuaaucaaucguuggcguuuaucaggaaguccgaugagcuccugcacaacguaaaugucgggaaaucaacgacaaacaucaugauuaccacuauaaucauugugaucauuguuaucuuacugcuacucauagccgugggacuguuccuuuacugcaaggcacggaguacccccgucacauugucuaaagaccagcugagcggcaucaauaacauugcuuucuccaauugaggacuaguacuggcugcaucucccuuuccucuguccuccauccuucucccaggauggugaagggggaccugguacccagugauccccaccccaggauccuaaaucaugacuuaccugcuaauaaaaacucauuggaaaagugagaagaucuaaaaaaaaaaaaaaaaaaaaaaaaaaaaaaaaaaaaaaaaaaaaaaaaaaaaaaaaaaaaaaaaugcaucccccccccccccccccccccccccccccccaaaggcucuuuucagagccaccagaauu

SEQ ID NO: 18477 - RNA, 1983 nt, Artificial Sequence
  mRNA product Design c-3 comprising derived and/or modified sequence from HRSV(Memphis-37)__AIY60640.1__F_DSCav1_mut7 (opt4)
gggagaguccgcucagccagguugcagaagcggcuuagcguguguccuaaucuucucucugcguguagguaggccugugccgcaaacaagcuuaccauggagcugcccauccugaagaccaacgccaucaccaccauccuggccgccgugacccugugcuucgccagcagccagaacaucaccgaggaguucuaccagagcaccugcagcgccgugagcaagggcuaccugagcgcccugagaaccggcugguacaccagcgugaucaccaucgagcugagcaacaucaaggagaacaagugcaacggcaccgacgccaaggugaagcugaucaagcaggagcuggacaaguacaagaacgccgugaccgagcugcagaugcugaugugcagcacccccgccgccggcagcggcagcgccaucgccagcggcaucgccgugugcaaggugcugcaccuggagggcgaggugaacaagaucaagaacgcccugcugagcaccaacaaggccguggugagccugagcaacggcgugagcgugcugaccuucaaggugcuggaccugaagaacuacaucgacaagcagcugcugcccauccugaacaagcagagcugcagcaucagcaacaucgagaccgugauggaguuccagcagaagaacaacagacugcuggagaucaccagagaguucagcgugaacgccggcgugaccacccccgugagcaccuacaugcugaccaacagcgagcugcugagccugaucaacgacaugcccaucaccaacgaccagaagaagcugaugagcaacaacgugcagaucgugagacagcagagcuacagcaucaugugcaucaucaaggaggaggugcuggccuacguggugcagcugccccuguacggcgugaucgacacccccugcuggaagcugcacaccagcccccugugcaccaccaacaccaaggagggcagcaacaucugccugaccagaaccgacagaggcugguacugcgacaacgccggcagcgugagcuucuucccccaggccgagaccugcaaggugugcagcaacagaguguucugcgacaccaugaacagccugacccugcccagcgaggugaaccugugcaacaucgacaucuucaaccccaaguacgacugcaagaucaugaccagcaagaccgacgugagcagcagcgugaucaccagccugggcgccaucgugagcugcuacggcaagaccaagugcaccgccagcaacaagaacaagggcaucaucaagaccuucagcaacggcugcgacuacgugagcaacaagggcguggacaccgugagcgugggcaacacccuguacuacgugaacaagcaggagggcaagagccuguacgugaagggcgagcccaucaucaacuucuacgacccccugguguuccccagcgacgaguucgacgccagcaucagccaggugaacgagaagaucaaccagagccuggccuucaucagaaagagcgacgagcugcugcacaacgugaacgugggcaagagcaccaccaacaucaugaucaccaccaucaucaucgugaucaucgugauccugcugcugcugaucgccgugggccuguuccuguacugcaaggccagaagcacccccgugacccugagcaaggaccagcugagcggcaucaacaacaucgccuucagcaacugaggacuaguacuggcugcaucucccuuuccucuguccuccauccuucucccaggauggugaagggggaccugguacccagugauccccaccccaggauccuaaaucaugacuuaccugcuaauaaaaacucauuggaaaagugagaagaucuaaaaaaaaaaaaaaaaaaaaaaaaaaaaaaaaaaaaaaaaaaaaaaaaaaaaaaaaaaaaaaaaugcaucccccccccccccccccccccccccccccccaaaggcucuuuucagagccaccagaauu

SEQ ID NO: 18478 - RNA, 1983 nt, Artificial Sequence
  mRNA product Design c-3 comprising derived and/or modified sequence from HRSV(Memphis-37)__AIY60640.1__F_DSCav1_mut7 (opt5)
gggagaguccgcucagccagguugcagaagcggcuuagcguguguccuaaucuucucucugcguguagguaggccugugccgcaaacaagcuuaccauggagcugcccauccucaagaccaacgccauuacaacgauccuggcugccgugacccuuugcuucgcgagcucccagaauauuacagaagaguuuuaccaaucuaccuguagcgcugucuccaaaggcuaucugucugcccucagaacagggugguacaccagcguuaucacaauugaacuguccaacaucaaggagaauaaaugcaacggaaccgacgccaaggugaaacuuaucaagcaggaacuggauaaguauaaaaaugcugugacggagcuccagaugcugauguguucuaccccugccgcuggcagcggguccgccauugcgagcggaaucgccgucugcaaggugcugcaccucgagggcgaaguuaacaaaauuaagaaugcucugcuuucuacaaacaaagccguggucucccugagcaauggggugucuguucucaccuucaaggugcuggaccuuaagaacuacaucgauaaacagcugcucccgauucugaauaagcaauccuguagcaucucuaacauugagacagucauggaauuucagcagaaaaauaaccggcugcucgagaucacccgcgaguucuccgugaaugcuggagugacgacacccgucagcaccuauaugcugacaaacuccgaacuucugucucucaucaacgacaugccuauuaccaaugaucagaagaaacugaugagcaacaauguucaaaucgugagacagcaguccuacagcauuaugugcaucauuaaggaggaagugcuugccuaugucgugcagcugccccucuacggcguuaucgacaccccuuguuggaaacugcauacaucuccccugugcacgaccaacacaaaggagggcuccaauaucugucucacccggacagaucgcgggugguacugcgacaacgcgggaagcgugagcuuuuucccucaagccgaaaccuguaaggucugcucuaauagaguguuuugcgauacgaugaacucccugacacuuccgucugagguuaaucuguguaacauugacaucuucaaucccaaauaugauugcaagauuaugaccagcaaaaccgacguguccagcucugucaucacaucccucggcgcuauugugagcuguuacgggaagaccaaaugcacagccucuaacaagaauaagggaaucaucaaaacguuuuccaacggcugugauuaugucagcaauaaggggguggacaccguuuccgugggaaacacacuguacuaugucaacaaacaggagggcaagucucuuuacgugaaaggcgaaccuauuaucaauuucuaugacccccugguuuuuccuagcgaugaguucgacgcuuccauuucucaggugaacgaaaagaucaaucaaagccucgccuuuauucggaaguccgaugagcugcugcacaacgucaauguggggaaaagcaccacaaacaucaugauuaccacgaucaucauugugaucauuguuauccuccugcuucugauugccgucggacucuuccuguacugcaaggcucgcucuacccccgugacacuguccaaagaccagcuuagcggcaucaauaacaucgcguucucuaauugaggacuaguacuggcugcaucucccuuuccucuguccuccauccuucucccaggauggugaagggggaccugguacccagugauccccaccccaggauccuaaaucaugacuuaccugcuaauaaaaacucauuggaaaagugagaagaucuaaaaaaaaaaaaaaaaaaaaaaaaaaaaaaaaaaaaaaaaaaaaaaaaaaaaaaaaaaaaaaaaugcaucccccccccccccccccccccccccccccccaaaggcucuuuucagagccaccagaauu

SEQ ID NO: 18479 - RNA, 1983 nt, Artificial Sequence
  mRNA product Design c-3 comprising derived and/or modified sequence from HRSV(Memphis-37)__AIY60640.1__F_DSCav1_mut7 (opt6)
gggagaguccgcucagccagguugcagaagcggcuuagcguguguccuaaucuucucucugcguguagguaggccugugccgcaaacaagcuuaccauggaacuaccaauacucaaaacaaaugcuauaaccacaauacucgcagcaguaacauuauguuucgcaucaucccaaaacauaacagaagaauuuuaucaaucaaccuguucagcaguauccaaaggauaccuaagugcauuaagaaccggaugguacacaucaguaauaaccauagaacuuucaaacauaaaagaaaacaaauguaacggcacagacgcaaaagucaaacucaucaaacaggaacuugacaaauauaaaaacgcaguaaccgaacuacaaaugcuaaugugcucaacaccagcagcaggaucaggaucagcaauugcaucuggaauagcuguaugcaaaguccuacaccuagaaggagaaguaaacaaaaucaaaaacgcauuacucuccacaaacaaagcaguaguaucacuaucaaacggaguuucaguacuaaccuucaaaguauuagaccuaaaaaacuacauagacaaacaacuacuaccuauacuaaacaaacaauccuguucaauaagcaacauugaaacuguaauggaauuucaacaaaaaaacaaccgccuauuagaaauaaccagagaauuuuccguaaaugcaggaguaaccacaccagucucuacauacauguuaaccaacucagaacuauuaucacucauaaaugacaugccuauaacaaacgaccaaaaaaaacuaaugucaaacaacguacaaauaguaagacaacaaucauauuccauaaugugcauaauaaaagaagaaguacuugcauacgugguucaacuaccccuauauggaguuauagacacaccaugcuggaaacuccacacuuccccacuuugcacaacuaacacaaaagaaggaucaaauauaugccuaaccagaacagaccguggaugguacugcgacaacgcuggaucagucuccuucuuuccacaagcagaaaccugcaaagucugcucaaauagagucuucugugacacaaugaacucacucacccuacccucagaaguaaaccuauguaauauagauauauuuaauccaaaauacgacugcaaaauuaugacaaguaaaacagacguaagcucaucagucauaaccagccuaggagcaauaguauccuguuacggcaaaacaaaaugcacagcuucaaacaaaaacaaaggcauaauaaaaacauucucaaacggaugugacuauguaucaaauaaaggaguugacacaguaucaguuggaaacacacuauacuauguaaacaaacaagaaggaaaaucacuauacguuaaaggcgaacccauaaucaauuucuacgacccccuagucuucccauccgaugaauuugacgcaucaauaucccaaguaaaugaaaaaaucaaccaaucccuagcauuuauacgaaaauccgacgaacuacuccauaaugucaacgucgguaaaucaacgacaaacaucaugaucacaacaauaauaauaguaauaauuguaauauuacucuuacucauagcaguaggccuauuucuauauugcaaagccagaucaacaccaguaaccuuauccaaagaccaacuaucuggaauaaacaacauagcauuuuccaacugaggacuaguacuggcugcaucucccuuuccucuguccuccauccuucucccaggauggugaagggggaccugguacccagugauccccaccccaggauccuaaaucaugacuuaccugcuaauaaaaacucauuggaaaagugagaagaucuaaaaaaaaaaaaaaaaaaaaaaaaaaaaaaaaaaaaaaaaaaaaaaaaaaaaaaaaaaaaaaaaugcaucccccccccccccccccccccccccccccccaaaggcucuuuucagagccaccagaauu

SEQ ID NO: 18480 - RNA, 1983 nt, Artificial Sequence
  mRNA product Design c-3 comprising derived and/or modified sequence from HRSV(Memphis-37)__AIY60640.1__F_DSCav1_mut7 (opt11)
gggagaguccgcucagccagguugcagaagcggcuuagcguguguccuaaucuucucucugcguguagguaggccugugccgcaaacaagcuuaccauggaacuccccauacuuaaaacaaacgccauaacaacuauacucgcagccgucacccucuguuucgcauccucucaaaacaucaccgaagaguucuaucaaucaaccugcuccgccgucucaaaaggcuaccucuccgcccuacgcacaggcugguacaccagcgucauuaccauagaacucucgaacaucaaagaaaacaaaugcaacggcaccgacgcaaaagugaaacucaucaaacaagaacucgacaaauacaaaaacgccgucaccgaacuucagaugcucaugugcuccaccccugccgccggcagcggcuccgccauagccuccggcaucgcagucugcaaaguccuccaccucgaaggagaaguaaacaaaaucaaaaaugcucuccucuccacaaacaaagccgucgucucacucuccaauggagucuccguccucaccuucaaaguccucgaccucaaaaacuacauagacaaacaacuacuccccauccucaacaagcaauccugcucuaucuccaacauagaaaccguuauggaguuccaacagaaaaauaaccgccugcuagaaauaacccgagaguucuccgucaacgcaggcgucacuacccccgucagcacauacaugcuaacaaacuccgaacugcucucccuuaucaacgacaugcccaucacaaacgaucagaaaaagcucaugucuaacaacguacaaaucguucggcaacaauccuacuccaucaugugcaucaucaaagaagaagugcucgccuacguaguccaacucccccucuacggagucaucgacacacccugcuggaaacuccacacaucaccccucugcaccaccaacacaaaagaaggguccaacaucugccucacgcgcaccgaccgaggcugguacugcgacaacgccggcuccguauccuucuucccccaagcagaaaccugcaaggucugcuccaaccgcguauucugcgacaccaugaacucgcucacccuccccucagaagucaaccuauguaacaucgacauauucaaucccaaauacgacugcaagauaaugacuuccaaaaccgacguaagcuccucggucaucaccucccucggcgccaucgucuccugcuacggcaaaaccaaaugcaccgccuccaauaagaauaaaggcauaauaaagacauucagcaacggcugcgauuacgucuccaacaaaggugucgacaccgucucagucggcaacacucuauacuacgugaacaaacaagaaggcaaaagccuauacguuaaaggcgaaccaauaaucaauuucuacgacccucuagucuuucccucugacgaguucgaugccagcauaagccaagucaacgaaaagaucaaccaaucacucgccuucauccguaaauccgacgaacugcuccacaaugucaauguaggcaaaucaacaaccaacaucaugaucaccacuauuaucaucgucaucaucguaauccuacuccuacuaaucgccgucggccuauuccucuacugcaaagcccgcucgacccccgucacucucagcaaggaucaacuauccggcaucaacaacaucgccuucuccaacuaaggacuaguacuggcugcaucucccuuuccucuguccuccauccuucucccaggauggugaagggggaccugguacccagugauccccaccccaggauccuaaaucaugacuuaccugcuaauaaaaacucauuggaaaagugagaagaucuaaaaaaaaaaaaaaaaaaaaaaaaaaaaaaaaaaaaaaaaaaaaaaaaaaaaaaaaaaaaaaaaugcaucccccccccccccccccccccccccccccccaaaggcucuuuucagagccaccagaauu

SEQ ID NO: 18481 - RNA, 1979 nt, Artificial Sequence
  mRNA product Design c-4 comprising derived and/or modified sequence from HRSV(Memphis-37)__AIY60640.1__F_DSCav1_mut7 (opt1)
gggagaguccgcucagccagguugcagaagcggcuuagcguguguccuaaucuucucucugcguguagguaggccugugccgcaaacaagcuuaccauggagcugcccauccucaagaccaacgccaucaccacgauccuggccgcggugacccugugcuucgccagcucccagaacaucaccgaggaguucuaccagagcacgugcuccgccgucagcaagggcuaccucuccgcccugcgcaccgggugguacaccagcgugaucaccaucgagcuguccaacaucaaggagaacaagugcaacggcaccgacgccaaggugaagcucaucaagcaggagcuggacaaguacaagaacgcggucacggagcugcagaugcugaugugcagcaccccggccgccggcuccgggagcgcgaucgccuccggcaucgccgucugcaaggugcugcaccucgagggcgaggugaacaagaucaagaacgcccugcuguccaccaacaaggccgucgugagccucuccaacggggugagcguccugaccuucaaggugcuggaccucaagaacuacaucgacaagcagcugcugcccauccugaacaagcagagcugcuccaucagcaacaucgagaccgucauggaguuccagcagaagaacaaccgccuccuggagaucacgcgggaguucagcgugaacgcgggcgugaccacccccgucuccaccuacaugcugacgaacagcgagcuccugucccugaucaacgacaugccgaucaccaacgaccagaagaagcucaugagcaacaacgugcagaucgugcgccagcaguccuacagcaucaugugcaucaucaaggaggagguccuggccuacguggugcagcugccccucuacggggucaucgacacccccugcuggaagcugcacaccagcccccugugcacgaccaacaccaaggagggcuccaacaucugccucacccggacggaccgcgggugguacugcgacaacgccggcagcguguccuucuucccgcaggccgagaccugcaaggucugcagcaaccggguguucugcgacaccaugaacucccugacccugcccagcgaggugaaccucugcaacaucgacaucuucaaccccaaguacgacugcaagaucaugacguccaagaccgacgucagcuccagcgugaucaccucccugggcgccaucgugagcugcuacgggaagaccaagugcacggcgagcaacaagaacaagggcaucaucaagaccuucuccaacgggugcgacuacgucagcaacaagggcguggacaccguguccgucggcaacacccuguacuacgugaacaagcaggagggcaagagccucuacgugaagggggagcccaucaucaacuucuacgacccgcuggucuuccccuccgacgaguucgacgccagcaucucccaggugaacgagaagaucaaccagagccuggccuucauccggaaguccgacgagcuccugcacaacgugaacgucggcaagagcaccacgaacaucaugaucaccaccaucaucaucgugaucaucgugauccugcugcuccugaucgccgucgggcuguuccucuacugcaaggcccgcuccacccccgugacgcugagcaaggaccagcuguccgggaucaacaacaucgcguucagcaacugaggacuaguggaagcauuuuccuggcugauuaaaagaaauuacucagcuauggucaucuguuccuguuagaaggcuaugcagcauauuauauacuaugcgcauguuaugaaaugcauaauaaaaaauuuuaaaaaaucuaaaagaucuaaaaaaaaaaaaaaaaaaaaaaaaaaaaaaaaaaaaaaaaaaaaaaaaaaaaaaaaaaaaaaaaugcaucccccccccccccccccccccccccccccccaaaggcucuuuucagagccaccagaauu

SEQ ID NO: 18482 - RNA, 1979 nt, Artificial Sequence
  mRNA product Design c-4 comprising derived and/or modified sequence from HRSV(Memphis-37)__AIY60640.1__F_DSCav1_mut7 (opt1)
gggagaguccgcucagccagguugcagaagcggcuuagcguguguccuaaucuucucucugcguguagguaggccugugccgcaaacaagcuuaccauggagcugcccauccucaagaccaacgccaucaccacgauccuggccgcggugacccugugcuucgccagcucccagaacaucaccgaggaguucuaccagagcacgugcuccgccgucagcaagggcuaccucuccgcccugcgcaccgggugguacaccagcgugaucaccaucgagcuguccaacaucaaggagaacaagugcaacggcaccgacgccaaggugaagcucaucaagcaggagcuggacaaguacaagaacgcggucacggagcugcagaugcucaugugcagcaccccggccgccggguccggcagcgccaucgcguccgggaucgccgugugcaaggugcugcaccuggagggcgaggucaacaagaucaagaacgcccuccugagcaccaacaaggccguggugucccugagcaacggcgucuccgugcucaccuucaaggugcuggaccugaagaacuacaucgacaagcagcuccugcccauccugaacaagcagagcugcuccaucagcaacaucgagacggucauggaguuccagcagaagaacaaccggcuccuggagaucacccgcgaguucuccgugaacgccggggugaccacccccgucagcacguacaugcugaccaacagcgagcuccugucccugaucaacgacaugcccaucaccaacgaccagaagaagcucaugagcaacaacgugcagaucgugcggcagcaguccuacagcaucaugugcaucaucaaggaggagguccuggcguacguggugcagcugccgcucuacggcgucaucgacacccccugcuggaagcugcacacgagcccccugugcaccaccaacaccaaggaggggagcaacaucugccucacgcgcaccgaccggggcugguacugcgacaacgccggguccgugagcuucuucccccaggccgagaccugcaaggugugcuccaaccgcgucuucugcgacaccaugaacagccugacgcugccguccgaggugaaccucugcaacaucgacaucuucaaccccaaguacgacugcaagaucaugaccagcaagaccgacgucuccagcuccgugaucaccagccugggcgccaucguguccugcuacggcaagacgaagugcaccgccagcaacaagaacaaggggaucaucaagaccuucuccaacggcugcgacuacgucagcaacaaggggguggacaccgugagcgucggcaacacgcuguacuacgugaacaagcaggagggcaagucccucuacgugaagggggagcccaucaucaacuucuacgacccccuggucuucccgagcgacgaguucgacgcguccaucagccaggugaacgagaagaucaaccagucccuggccuucauccggaaguccgacgagcuccugcacaacgugaacgucggcaaguccaccaccaacaucaugaucaccaccaucaucaucgugaucaucgugauccugcuccugcugaucgccgucggccucuuccuguacugcaaggcccgcagcacgcccgugacccuguccaaggaccagcugagcgggaucaacaacaucgccuucuccaacugaggacuaguggaagcauuuuccuggcugauuaaaagaaauuacucagcuauggucaucuguuccuguuagaaggcuaugcagcauauuauauacuaugcgcauguuaugaaaugcauaauaaaaaauuuuaaaaaaucuaaaagaucuaaaaaaaaaaaaaaaaaaaaaaaaaaaaaaaaaaaaaaaaaaaaaaaaaaaaaaaaaaaaaaaaugcaucccccccccccccccccccccccccccccccaaaggcucuuuucagagccaccagaauu

SEQ ID NO: 18483 - RNA, 1979 nt, Artificial Sequence
  mRNA product Design c-4 comprising derived and/or modified sequence from HRSV(Memphis-37)__AIY60640.1__F_DSCav1_mut7 (opt2)
gggagaguccgcucagccagguugcagaagcggcuuagcguguguccuaaucuucucucugcguguagguaggccugugccgcaaacaagcuuaccauggagcuccccauccucaagaccaacgccaucaccaccauccucgccgccgucacccucugcuucgccuccucccagaacaucaccgaggaguucuaccaguccaccugcuccgccgucuccaagggcuaccucuccgcccuccgcaccggcugguacaccuccgucaucaccaucgagcucuccaacaucaaggagaacaagugcaacggcaccgacgccaaggucaagcucaucaagcaggagcucgacaaguacaagaacgccgucaccgagcuccagaugcucaugugcuccacccccgccgccggcuccggcuccgccaucgccuccggcaucgccgucugcaagguccuccaccucgagggcgaggucaacaagaucaagaacgcccuccucuccaccaacaaggccgucgucucccucuccaacggcgucuccguccucaccuucaagguccucgaccucaagaacuacaucgacaagcagcuccuccccauccucaacaagcaguccugcuccaucuccaacaucgagaccgucauggaguuccagcagaagaacaaccgccuccucgagaucacccgcgaguucuccgucaacgccggcgucaccacccccgucuccaccuacaugcucaccaacuccgagcuccucucccucaucaacgacaugcccaucaccaacgaccagaagaagcucauguccaacaacguccagaucguccgccagcaguccuacuccaucaugugcaucaucaaggaggagguccucgccuacgucguccagcucccccucuacggcgucaucgacacccccugcuggaagcuccacaccuccccccucugcaccaccaacaccaaggagggcuccaacaucugccucacccgcaccgaccgcggcugguacugcgacaacgccggcuccgucuccuucuucccccaggccgagaccugcaaggucugcuccaaccgcgucuucugcgacaccaugaacucccucacccuccccuccgaggucaaccucugcaacaucgacaucuucaaccccaaguacgacugcaagaucaugaccuccaagaccgacgucuccuccuccgucaucaccucccucggcgccaucgucuccugcuacggcaagaccaagugcaccgccuccaacaagaacaagggcaucaucaagaccuucuccaacggcugcgacuacgucuccaacaagggcgucgacaccgucuccgucggcaacacccucuacuacgucaacaagcaggagggcaagucccucuacgucaagggcgagcccaucaucaacuucuacgacccccucgucuuccccuccgacgaguucgacgccuccaucucccaggucaacgagaagaucaaccagucccucgccuucauccgcaaguccgacgagcuccuccacaacgucaacgucggcaaguccaccaccaacaucaugaucaccaccaucaucaucgucaucaucgucauccuccuccuccucaucgccgucggccucuuccucuacugcaaggcccgcuccacccccgucacccucuccaaggaccagcucuccggcaucaacaacaucgccuucuccaacugaggacuaguggaagcauuuuccuggcugauuaaaagaaauuacucagcuauggucaucuguuccuguuagaaggcuaugcagcauauuauauacuaugcgcauguuaugaaaugcauaauaaaaaauuuuaaaaaaucuaaaagaucuaaaaaaaaaaaaaaaaaaaaaaaaaaaaaaaaaaaaaaaaaaaaaaaaaaaaaaaaaaaaaaaaugcaucccccccccccccccccccccccccccccccaaaggcucuuuucagagccaccagaauu

SEQ ID NO: 18484 - RNA, 1979 nt, Artificial Sequence
  mRNA product Design c-4 comprising derived and/or modified sequence from HRSV(Memphis-37)__AIY60640.1__F_DSCav1_mut7 (opt3)
gggagaguccgcucagccagguugcagaagcggcuuagcguguguccuaaucuucucucugcguguagguaggccugugccgcaaacaagcuuaccauggagcugcccauccucaagaccaacgccauuacaacuauacuugcugcagugacgcugugcuucgccagcucccagaauaucaccgaagaguuuuaccaaucuacauguucagcggucaguaaaggcuauuugagcgcuuuaagaacugggugguacaccuccguuauuacaaucgaacugucuaacauuaaggagaauaaaugcaacggaaccgacgccaaggugaaacuaaucaagcaggaacucgauaaguauaaaaaugcaguaacugagcugcagaugcuuauguguucgaccccugccgcugguucaggcagcgcaauagccagugggaucgcugugugcaagguccugcacuuggagggagaagugaacaaaauuaagaaugcccuccuguccacaaacaaagcgguugugucucugagcaauggcgucuccgugcucacguucaagguauuagaccugaagaacuacaucgauaaacagcuuuugccaauucugaauaagcaaucauguaguaucagcaacauagagacuguuauggaauuucagcagaaaaauaacaggcuacucgagauuacccgggaguucucugugaaugccggugucacaacuccgguguccaccuauaugcugacaaacucagaacuucugagcuugaucaacgacaugcccauuaccaaugaucagaagaaacucaugaguaacaaugugcaaaucguccgccagcagucuuacuccaucaugugcauuauaaaggaggaaguucuggcauaugugguacaguuaccucuguacggggugaucgacacgccauguuggaaacuccauacuagcccccuuugcacaaccaacacuaaggagggaucgaauauuugucugacacgaaccgaucguggcugguacugcgacaacgcuggcucugucuccuuuuucccucaagccgaaacguguaaggugugcucaaauagaguguuuugcgauaccaugaacaguuugacacuaccaagcgagguuaaucuguguaacaucgacauauucaaucccaaauaugauugcaagauuaugacuuccaaaaccgacgucucuagcucagugaucacaagucucggggcaaucguauccuguuacggaaagacuaaaugcaccgcuagcaacaagaauaaggguauuaucaaaacauuuucuaacggcugugauuauguuucaaauaaggggguggacaccgucagugugggaaacacucuguacuaugucaacaaacaggagggcaagagccuuuacgugaaaggugaaccuauuauaaauuucuaugacccacugguuuuuccguccgaugaguucgacgccucuaucagccaggugaacgaaaagauuaaucaaucguuggcguuuaucaggaaguccgaugagcuccugcacaacguaaaugucgggaaaucaacgacaaacaucaugauuaccacuauaaucauugugaucauuguuaucuuacugcuacucauagccgugggacuguuccuuuacugcaaggcacggaguacccccgucacauugucuaaagaccagcugagcggcaucaauaacauugcuuucuccaauugaggacuaguggaagcauuuuccuggcugauuaaaagaaauuacucagcuauggucaucuguuccuguuagaaggcuaugcagcauauuauauacuaugcgcauguuaugaaaugcauaauaaaaaauuuuaaaaaaucuaaaagaucuaaaaaaaaaaaaaaaaaaaaaaaaaaaaaaaaaaaaaaaaaaaaaaaaaaaaaaaaaaaaaaaaugcaucccccccccccccccccccccccccccccccaaaggcucuuuucagagccaccagaauu

SEQ ID NO: 18485 - RNA, 1979 nt, Artificial Sequence
  mRNA product Design c-4 comprising derived and/or modified sequence from HRSV(Memphis-37)__AIY60640.1__F_DSCav1_mut7 (opt4)
gggagaguccgcucagccagguugcagaagcggcuuagcguguguccuaaucuucucucugcguguagguaggccugugccgcaaacaagcuuaccauggagcugcccauccugaagaccaacgccaucaccaccauccuggccgccgugacccugugcuucgccagcagccagaacaucaccgaggaguucuaccagagcaccugcagcgccgugagcaagggcuaccugagcgcccugagaaccggcugguacaccagcgugaucaccaucgagcugagcaacaucaaggagaacaagugcaacggcaccgacgccaaggugaagcugaucaagcaggagcuggacaaguacaagaacgccgugaccgagcugcagaugcugaugugcagcacccccgccgccggcagcggcagcgccaucgccagcggcaucgccgugugcaaggugcugcaccuggagggcgaggugaacaagaucaagaacgcccugcugagcaccaacaaggccguggugagccugagcaacggcgugagcgugcugaccuucaaggugcuggaccugaagaacuacaucgacaagcagcugcugcccauccugaacaagcagagcugcagcaucagcaacaucgagaccgugauggaguuccagcagaagaacaacagacugcuggagaucaccagagaguucagcgugaacgccggcgugaccacccccgugagcaccuacaugcugaccaacagcgagcugcugagccugaucaacgacaugcccaucaccaacgaccagaagaagcugaugagcaacaacgugcagaucgugagacagcagagcuacagcaucaugugcaucaucaaggaggaggugcuggccuacguggugcagcugccccuguacggcgugaucgacacccccugcuggaagcugcacaccagcccccugugcaccaccaacaccaaggagggcagcaacaucugccugaccagaaccgacagaggcugguacugcgacaacgccggcagcgugagcuucuucccccaggccgagaccugcaaggugugcagcaacagaguguucugcgacaccaugaacagccugacccugcccagcgaggugaaccugugcaacaucgacaucuucaaccccaaguacgacugcaagaucaugaccagcaagaccgacgugagcagcagcgugaucaccagccugggcgccaucgugagcugcuacggcaagaccaagugcaccgccagcaacaagaacaagggcaucaucaagaccuucagcaacggcugcgacuacgugagcaacaagggcguggacaccgugagcgugggcaacacccuguacuacgugaacaagcaggagggcaagagccuguacgugaagggcgagcccaucaucaacuucuacgacccccugguguuccccagcgacgaguucgacgccagcaucagccaggugaacgagaagaucaaccagagccuggccuucaucagaaagagcgacgagcugcugcacaacgugaacgugggcaagagcaccaccaacaucaugaucaccaccaucaucaucgugaucaucgugauccugcugcugcugaucgccgugggccuguuccuguacugcaaggccagaagcacccccgugacccugagcaaggaccagcugagcggcaucaacaacaucgccuucagcaacugaggacuaguggaagcauuuuccuggcugauuaaaagaaauuacucagcuauggucaucuguuccuguuagaaggcuaugcagcauauuauauacuaugcgcauguuaugaaaugcauaauaaaaaauuuuaaaaaaucuaaaagaucuaaaaaaaaaaaaaaaaaaaaaaaaaaaaaaaaaaaaaaaaaaaaaaaaaaaaaaaaaaaaaaaaugcaucccccccccccccccccccccccccccccccaaaggcucuuuucagagccaccagaauu

SEQ ID NO: 18486 - RNA, 1979 nt, Artificial Sequence
  mRNA product Design c-4 comprising derived and/or modified sequence from HRSV(Memphis-37)__AIY60640.1__F_DSCav1_mut7 (opt5)
gggagaguccgcucagccagguugcagaagcggcuuagcguguguccuaaucuucucucugcguguagguaggccugugccgcaaacaagcuuaccauggagcugcccauccucaagaccaacgccauuacaacgauccuggcugccgugacccuuugcuucgcgagcucccagaauauuacagaagaguuuuaccaaucuaccuguagcgcugucuccaaaggcuaucugucugcccucagaacagggugguacaccagcguuaucacaauugaacuguccaacaucaaggagaauaaaugcaacggaaccgacgccaaggugaaacuuaucaagcaggaacuggauaaguauaaaaaugcugugacggagcuccagaugcugauguguucuaccccugccgcuggcagcggguccgccauugcgagcggaaucgccgucugcaaggugcugcaccucgagggcgaaguuaacaaaauuaagaaugcucugcuuucuacaaacaaagccguggucucccugagcaauggggugucuguucucaccuucaaggugcuggaccuuaagaacuacaucgauaaacagcugcucccgauucugaauaagcaauccuguagcaucucuaacauugagacagucauggaauuucagcagaaaaauaaccggcugcucgagaucacccgcgaguucuccgugaaugcuggagugacgacacccgucagcaccuauaugcugacaaacuccgaacuucugucucucaucaacgacaugccuauuaccaaugaucagaagaaacugaugagcaacaauguucaaaucgugagacagcaguccuacagcauuaugugcaucauuaaggaggaagugcuugccuaugucgugcagcugccccucuacggcguuaucgacaccccuuguuggaaacugcauacaucuccccugugcacgaccaacacaaaggagggcuccaauaucugucucacccggacagaucgcgggugguacugcgacaacgcgggaagcgugagcuuuuucccucaagccgaaaccuguaaggucugcucuaauagaguguuuugcgauacgaugaacucccugacacuuccgucugagguuaaucuguguaacauugacaucuucaaucccaaauaugauugcaagauuaugaccagcaaaaccgacguguccagcucugucaucacaucccucggcgcuauugugagcuguuacgggaagaccaaaugcacagccucuaacaagaauaagggaaucaucaaaacguuuuccaacggcugugauuaugucagcaauaaggggguggacaccguuuccgugggaaacacacuguacuaugucaacaaacaggagggcaagucucuuuacgugaaaggcgaaccuauuaucaauuucuaugacccccugguuuuuccuagcgaugaguucgacgcuuccauuucucaggugaacgaaaagaucaaucaaagccucgccuuuauucggaaguccgaugagcugcugcacaacgucaauguggggaaaagcaccacaaacaucaugauuaccacgaucaucauugugaucauuguuauccuccugcuucugauugccgucggacucuuccuguacugcaaggcucgcucuacccccgugacacuguccaaagaccagcuuagcggcaucaauaacaucgcguucucuaauugaggacuaguggaagcauuuuccuggcugauuaaaagaaauuacucagcuauggucaucuguuccuguuagaaggcuaugcagcauauuauauacuaugcgcauguuaugaaaugcauaauaaaaaauuuuaaaaaaucuaaaagaucuaaaaaaaaaaaaaaaaaaaaaaaaaaaaaaaaaaaaaaaaaaaaaaaaaaaaaaaaaaaaaaaaugcaucccccccccccccccccccccccccccccccaaaggcucuuuucagagccaccagaauu

SEQ ID NO: 18487 - RNA, 1979 nt, Artificial Sequence
  mRNA product Design c-4 comprising derived and/or modified sequence from HRSV(Memphis-37)__AIY60640.1__F_DSCav1_mut7 (opt6)
gggagaguccgcucagccagguugcagaagcggcuuagcguguguccuaaucuucucucugcguguagguaggccugugccgcaaacaagcuuaccauggaacuaccaauacucaaaacaaaugcuauaaccacaauacucgcagcaguaacauuauguuucgcaucaucccaaaacauaacagaagaauuuuaucaaucaaccuguucagcaguauccaaaggauaccuaagugcauuaagaaccggaugguacacaucaguaauaaccauagaacuuucaaacauaaaagaaaacaaauguaacggcacagacgcaaaagucaaacucaucaaacaggaacuugacaaauauaaaaacgcaguaaccgaacuacaaaugcuaaugugcucaacaccagcagcaggaucaggaucagcaauugcaucuggaauagcuguaugcaaaguccuacaccuagaaggagaaguaaacaaaaucaaaaacgcauuacucuccacaaacaaagcaguaguaucacuaucaaacggaguuucaguacuaaccuucaaaguauuagaccuaaaaaacuacauagacaaacaacuacuaccuauacuaaacaaacaauccuguucaauaagcaacauugaaacuguaauggaauuucaacaaaaaaacaaccgccuauuagaaauaaccagagaauuuuccguaaaugcaggaguaaccacaccagucucuacauacauguuaaccaacucagaacuauuaucacucauaaaugacaugccuauaacaaacgaccaaaaaaaacuaaugucaaacaacguacaaauaguaagacaacaaucauauuccauaaugugcauaauaaaagaagaaguacuugcauacgugguucaacuaccccuauauggaguuauagacacaccaugcuggaaacuccacacuuccccacuuugcacaacuaacacaaaagaaggaucaaauauaugccuaaccagaacagaccguggaugguacugcgacaacgcuggaucagucuccuucuuuccacaagcagaaaccugcaaagucugcucaaauagagucuucugugacacaaugaacucacucacccuacccucagaaguaaaccuauguaauauagauauauuuaauccaaaauacgacugcaaaauuaugacaaguaaaacagacguaagcucaucagucauaaccagccuaggagcaauaguauccuguuacggcaaaacaaaaugcacagcuucaaacaaaaacaaaggcauaauaaaaacauucucaaacggaugugacuauguaucaaauaaaggaguugacacaguaucaguuggaaacacacuauacuauguaaacaaacaagaaggaaaaucacuauacguuaaaggcgaacccauaaucaauuucuacgacccccuagucuucccauccgaugaauuugacgcaucaauaucccaaguaaaugaaaaaaucaaccaaucccuagcauuuauacgaaaauccgacgaacuacuccauaaugucaacgucgguaaaucaacgacaaacaucaugaucacaacaauaauaauaguaauaauuguaauauuacucuuacucauagcaguaggccuauuucuauauugcaaagccagaucaacaccaguaaccuuauccaaagaccaacuaucuggaauaaacaacauagcauuuuccaacugaggacuaguggaagcauuuuccuggcugauuaaaagaaauuacucagcuauggucaucuguuccuguuagaaggcuaugcagcauauuauauacuaugcgcauguuaugaaaugcauaauaaaaaauuuuaaaaaaucuaaaagaucuaaaaaaaaaaaaaaaaaaaaaaaaaaaaaaaaaaaaaaaaaaaaaaaaaaaaaaaaaaaaaaaaugcaucccccccccccccccccccccccccccccccaaaggcucuuuucagagccaccagaauu

SEQ ID NO: 18488 - RNA, 1979 nt, Artificial Sequence
  mRNA product Design c-4 comprising derived and/or modified sequence from HRSV(Memphis-37)__AIY60640.1__F_DSCav1_mut7 (opt11)
gggagaguccgcucagccagguugcagaagcggcuuagcguguguccuaaucuucucucugcguguagguaggccugugccgcaaacaagcuuaccauggaacuccccauacuuaaaacaaacgccauaacaacuauacucgcagccgucacccucuguuucgcauccucucaaaacaucaccgaagaguucuaucaaucaaccugcuccgccgucucaaaaggcuaccucuccgcccuacgcacaggcugguacaccagcgucauuaccauagaacucucgaacaucaaagaaaacaaaugcaacggcaccgacgcaaaagugaaacucaucaaacaagaacucgacaaauacaaaaacgccgucaccgaacuucagaugcucaugugcuccaccccugccgccggcagcggcuccgccauagccuccggcaucgcagucugcaaaguccuccaccucgaaggagaaguaaacaaaaucaaaaaugcucuccucuccacaaacaaagccgucgucucacucuccaauggagucuccguccucaccuucaaaguccucgaccucaaaaacuacauagacaaacaacuacuccccauccucaacaagcaauccugcucuaucuccaacauagaaaccguuauggaguuccaacagaaaaauaaccgccugcuagaaauaacccgagaguucuccgucaacgcaggcgucacuacccccgucagcacauacaugcuaacaaacuccgaacugcucucccuuaucaacgacaugcccaucacaaacgaucagaaaaagcucaugucuaacaacguacaaaucguucggcaacaauccuacuccaucaugugcaucaucaaagaagaagugcucgccuacguaguccaacucccccucuacggagucaucgacacacccugcuggaaacuccacacaucaccccucugcaccaccaacacaaaagaaggguccaacaucugccucacgcgcaccgaccgaggcugguacugcgacaacgccggcuccguauccuucuucccccaagcagaaaccugcaaggucugcuccaaccgcguauucugcgacaccaugaacucgcucacccuccccucagaagucaaccuauguaacaucgacauauucaaucccaaauacgacugcaagauaaugacuuccaaaaccgacguaagcuccucggucaucaccucccucggcgccaucgucuccugcuacggcaaaaccaaaugcaccgccuccaauaagaauaaaggcauaauaaagacauucagcaacggcugcgauuacgucuccaacaaaggugucgacaccgucucagucggcaacacucuauacuacgugaacaaacaagaaggcaaaagccuauacguuaaaggcgaaccaauaaucaauuucuacgacccucuagucuuucccucugacgaguucgaugccagcauaagccaagucaacgaaaagaucaaccaaucacucgccuucauccguaaauccgacgaacugcuccacaaugucaauguaggcaaaucaacaaccaacaucaugaucaccacuauuaucaucgucaucaucguaauccuacuccuacuaaucgccgucggccuauuccucuacugcaaagcccgcucgacccccgucacucucagcaaggaucaacuauccggcaucaacaacaucgccuucuccaacuaaggacuaguggaagcauuuuccuggcugauuaaaagaaauuacucagcuauggucaucuguuccuguuagaaggcuaugcagcauauuauauacuaugcgcauguuaugaaaugcauaauaaaaaauuuuaaaaaaucuaaaagaucuaaaaaaaaaaaaaaaaaaaaaaaaaaaaaaaaaaaaaaaaaaaaaaaaaaaaaaaaaaaaaaaaugcaucccccccccccccccccccccccccccccccaaaggcucuuuucagagccaccagaauu

SEQ ID NO: 18489 - RNA, 1897 nt, Artificial Sequence
  mRNA product Design c-5 comprising derived and/or modified sequence from HRSV(Memphis-37)__AIY60640.1__F_DSCav1_mut7 (opt1)
gggagagcggcucggccauuuugucccagucaguccggaggcugcggcugcagaaguaccgccugcggaguaacugcaaagaagcuuaccauggagcugcccauccucaagaccaacgccaucaccacgauccuggccgcggugacccugugcuucgccagcucccagaacaucaccgaggaguucuaccagagcacgugcuccgccgucagcaagggcuaccucuccgcccugcgcaccgggugguacaccagcgugaucaccaucgagcuguccaacaucaaggagaacaagugcaacggcaccgacgccaaggugaagcucaucaagcaggagcuggacaaguacaagaacgcggucacggagcugcagaugcugaugugcagcaccccggccgccggcuccgggagcgcgaucgccuccggcaucgccgucugcaaggugcugcaccucgagggcgaggugaacaagaucaagaacgcccugcuguccaccaacaaggccgucgugagccucuccaacggggugagcguccugaccuucaaggugcuggaccucaagaacuacaucgacaagcagcugcugcccauccugaacaagcagagcugcuccaucagcaacaucgagaccgucauggaguuccagcagaagaacaaccgccuccuggagaucacgcgggaguucagcgugaacgcgggcgugaccacccccgucuccaccuacaugcugacgaacagcgagcuccugucccugaucaacgacaugccgaucaccaacgaccagaagaagcucaugagcaacaacgugcagaucgugcgccagcaguccuacagcaucaugugcaucaucaaggaggagguccuggccuacguggugcagcugccccucuacggggucaucgacacccccugcuggaagcugcacaccagcccccugugcacgaccaacaccaaggagggcuccaacaucugccucacccggacggaccgcgggugguacugcgacaacgccggcagcguguccuucuucccgcaggccgagaccugcaaggucugcagcaaccggguguucugcgacaccaugaacucccugacccugcccagcgaggugaaccucugcaacaucgacaucuucaaccccaaguacgacugcaagaucaugacguccaagaccgacgucagcuccagcgugaucaccucccugggcgccaucgugagcugcuacgggaagaccaagugcacggcgagcaacaagaacaagggcaucaucaagaccuucuccaacgggugcgacuacgucagcaacaagggcguggacaccguguccgucggcaacacccuguacuacgugaacaagcaggagggcaagagccucuacgugaagggggagcccaucaucaacuucuacgacccgcuggucuuccccuccgacgaguucgacgccagcaucucccaggugaacgagaagaucaaccagagccuggccuucauccggaaguccgacgagcuccugcacaacgugaacgucggcaagagcaccacgaacaucaugaucaccaccaucaucaucgugaucaucgugauccugcugcuccugaucgccgucgggcuguuccucuacugcaaggcccgcuccacccccgugacgcugagcaaggaccagcuguccgggaucaacaacaucgcguucagcaacugaggacuagucccuguucccagagcccacuuuuuuuucuuuuuuugaaauaaaauagccugucuuucagaucuaaaaaaaaaaaaaaaaaaaaaaaaaaaaaaaaaaaaaaaaaaaaaaaaaaaaaaaaaaaaaaaaugcaucccccccccccccccccccccccccccccccaaaggcucuuuucagagccaccagaauu

SEQ ID NO: 18490 - RNA, 1897 nt, Artificial Sequence
  mRNA product Design c-5 comprising derived and/or modified sequence from HRSV(Memphis-37)__AIY60640.1__F_DSCav1_mut7 (opt1)
gggagagcggcucggccauuuugucccagucaguccggaggcugcggcugcagaaguaccgccugcggaguaacugcaaagaagcuuaccauggagcugcccauccucaagaccaacgccaucaccacgauccuggccgcggugacccugugcuucgccagcucccagaacaucaccgaggaguucuaccagagcacgugcuccgccgucagcaagggcuaccucuccgcccugcgcaccgggugguacaccagcgugaucaccaucgagcuguccaacaucaaggagaacaagugcaacggcaccgacgccaaggugaagcucaucaagcaggagcuggacaaguacaagaacgcggucacggagcugcagaugcucaugugcagcaccccggccgccggguccggcagcgccaucgcguccgggaucgccgugugcaaggugcugcaccuggagggcgaggucaacaagaucaagaacgcccuccugagcaccaacaaggccguggugucccugagcaacggcgucuccgugcucaccuucaaggugcuggaccugaagaacuacaucgacaagcagcuccugcccauccugaacaagcagagcugcuccaucagcaacaucgagacggucauggaguuccagcagaagaacaaccggcuccuggagaucacccgcgaguucuccgugaacgccggggugaccacccccgucagcacguacaugcugaccaacagcgagcuccugucccugaucaacgacaugcccaucaccaacgaccagaagaagcucaugagcaacaacgugcagaucgugcggcagcaguccuacagcaucaugugcaucaucaaggaggagguccuggcguacguggugcagcugccgcucuacggcgucaucgacacccccugcuggaagcugcacacgagcccccugugcaccaccaacaccaaggaggggagcaacaucugccucacgcgcaccgaccggggcugguacugcgacaacgccggguccgugagcuucuucccccaggccgagaccugcaaggugugcuccaaccgcgucuucugcgacaccaugaacagccugacgcugccguccgaggugaaccucugcaacaucgacaucuucaaccccaaguacgacugcaagaucaugaccagcaagaccgacgucuccagcuccgugaucaccagccugggcgccaucguguccugcuacggcaagacgaagugcaccgccagcaacaagaacaaggggaucaucaagaccuucuccaacggcugcgacuacgucagcaacaaggggguggacaccgugagcgucggcaacacgcuguacuacgugaacaagcaggagggcaagucccucuacgugaagggggagcccaucaucaacuucuacgacccccuggucuucccgagcgacgaguucgacgcguccaucagccaggugaacgagaagaucaaccagucccuggccuucauccggaaguccgacgagcuccugcacaacgugaacgucggcaaguccaccaccaacaucaugaucaccaccaucaucaucgugaucaucgugauccugcuccugcugaucgccgucggccucuuccuguacugcaaggcccgcagcacgcccgugacccuguccaaggaccagcugagcgggaucaacaacaucgccuucuccaacugaggacuagucccuguucccagagcccacuuuuuuuucuuuuuuugaaauaaaauagccugucuuucagaucuaaaaaaaaaaaaaaaaaaaaaaaaaaaaaaaaaaaaaaaaaaaaaaaaaaaaaaaaaaaaaaaaugcaucccccccccccccccccccccccccccccccaaaggcucuuuucagagccaccagaauu

SEQ ID NO: 18491 - RNA, 1897 nt, Artificial Sequence
  mRNA product Design c-5 comprising derived and/or modified sequence from HRSV(Memphis-37)__AIY60640.1__F_DSCav1_mut7 (opt2)
gggagagcggcucggccauuuugucccagucaguccggaggcugcggcugcagaaguaccgccugcggaguaacugcaaagaagcuuaccauggagcuccccauccucaagaccaacgccaucaccaccauccucgccgccgucacccucugcuucgccuccucccagaacaucaccgaggaguucuaccaguccaccugcuccgccgucuccaagggcuaccucuccgcccuccgcaccggcugguacaccuccgucaucaccaucgagcucuccaacaucaaggagaacaagugcaacggcaccgacgccaaggucaagcucaucaagcaggagcucgacaaguacaagaacgccgucaccgagcuccagaugcucaugugcuccacccccgccgccggcuccggcuccgccaucgccuccggcaucgccgucugcaagguccuccaccucgagggcgaggucaacaagaucaagaacgcccuccucuccaccaacaaggccgucgucucccucuccaacggcgucuccguccucaccuucaagguccucgaccucaagaacuacaucgacaagcagcuccuccccauccucaacaagcaguccugcuccaucuccaacaucgagaccgucauggaguuccagcagaagaacaaccgccuccucgagaucacccgcgaguucuccgucaacgccggcgucaccacccccgucuccaccuacaugcucaccaacuccgagcuccucucccucaucaacgacaugcccaucaccaacgaccagaagaagcucauguccaacaacguccagaucguccgccagcaguccuacuccaucaugugcaucaucaaggaggagguccucgccuacgucguccagcucccccucuacggcgucaucgacacccccugcuggaagcuccacaccuccccccucugcaccaccaacaccaaggagggcuccaacaucugccucacccgcaccgaccgcggcugguacugcgacaacgccggcuccgucuccuucuucccccaggccgagaccugcaaggucugcuccaaccgcgucuucugcgacaccaugaacucccucacccuccccuccgaggucaaccucugcaacaucgacaucuucaaccccaaguacgacugcaagaucaugaccuccaagaccgacgucuccuccuccgucaucaccucccucggcgccaucgucuccugcuacggcaagaccaagugcaccgccuccaacaagaacaagggcaucaucaagaccuucuccaacggcugcgacuacgucuccaacaagggcgucgacaccgucuccgucggcaacacccucuacuacgucaacaagcaggagggcaagucccucuacgucaagggcgagcccaucaucaacuucuacgacccccucgucuuccccuccgacgaguucgacgccuccaucucccaggucaacgagaagaucaaccagucccucgccuucauccgcaaguccgacgagcuccuccacaacgucaacgucggcaaguccaccaccaacaucaugaucaccaccaucaucaucgucaucaucgucauccuccuccuccucaucgccgucggccucuuccucuacugcaaggcccgcuccacccccgucacccucuccaaggaccagcucuccggcaucaacaacaucgccuucuccaacugaggacuagucccuguucccagagcccacuuuuuuuucuuuuuuugaaauaaaauagccugucuuucagaucuaaaaaaaaaaaaaaaaaaaaaaaaaaaaaaaaaaaaaaaaaaaaaaaaaaaaaaaaaaaaaaaaugcaucccccccccccccccccccccccccccccccaaaggcucuuuucagagccaccagaauu

SEQ ID NO: 18492 - RNA, 1897 nt, Artificial Sequence
  mRNA product Design c-5 comprising derived and/or modified sequence from HRSV(Memphis-37)__AIY60640.1__F_DSCav1_mut7 (opt3)
gggagagcggcucggccauuuugucccagucaguccggaggcugcggcugcagaaguaccgccugcggaguaacugcaaagaagcuuaccauggagcugcccauccucaagaccaacgccauuacaacuauacuugcugcagugacgcugugcuucgccagcucccagaauaucaccgaagaguuuuaccaaucuacauguucagcggucaguaaaggcuauuugagcgcuuuaagaacugggugguacaccuccguuauuacaaucgaacugucuaacauuaaggagaauaaaugcaacggaaccgacgccaaggugaaacuaaucaagcaggaacucgauaaguauaaaaaugcaguaacugagcugcagaugcuuauguguucgaccccugccgcugguucaggcagcgcaauagccagugggaucgcugugugcaagguccugcacuuggagggagaagugaacaaaauuaagaaugcccuccuguccacaaacaaagcgguugugucucugagcaauggcgucuccgugcucacguucaagguauuagaccugaagaacuacaucgauaaacagcuuuugccaauucugaauaagcaaucauguaguaucagcaacauagagacuguuauggaauuucagcagaaaaauaacaggcuacucgagauuacccgggaguucucugugaaugccggugucacaacuccgguguccaccuauaugcugacaaacucagaacuucugagcuugaucaacgacaugcccauuaccaaugaucagaagaaacucaugaguaacaaugugcaaaucguccgccagcagucuuacuccaucaugugcauuauaaaggaggaaguucuggcauaugugguacaguuaccucuguacggggugaucgacacgccauguuggaaacuccauacuagcccccuuugcacaaccaacacuaaggagggaucgaauauuugucugacacgaaccgaucguggcugguacugcgacaacgcuggcucugucuccuuuuucccucaagccgaaacguguaaggugugcucaaauagaguguuuugcgauaccaugaacaguuugacacuaccaagcgagguuaaucuguguaacaucgacauauucaaucccaaauaugauugcaagauuaugacuuccaaaaccgacgucucuagcucagugaucacaagucucggggcaaucguauccuguuacggaaagacuaaaugcaccgcuagcaacaagaauaaggguauuaucaaaacauuuucuaacggcugugauuauguuucaaauaaggggguggacaccgucagugugggaaacacucuguacuaugucaacaaacaggagggcaagagccuuuacgugaaaggugaaccuauuauaaauuucuaugacccacugguuuuuccguccgaugaguucgacgccucuaucagccaggugaacgaaaagauuaaucaaucguuggcguuuaucaggaaguccgaugagcuccugcacaacguaaaugucgggaaaucaacgacaaacaucaugauuaccacuauaaucauugugaucauuguuaucuuacugcuacucauagccgugggacuguuccuuuacugcaaggcacggaguacccccgucacauugucuaaagaccagcugagcggcaucaauaacauugcuuucuccaauugaggacuagucccuguucccagagcccacuuuuuuuucuuuuuuugaaauaaaauagccugucuuucagaucuaaaaaaaaaaaaaaaaaaaaaaaaaaaaaaaaaaaaaaaaaaaaaaaaaaaaaaaaaaaaaaaaugcaucccccccccccccccccccccccccccccccaaaggcucuuuucagagccaccagaauu

SEQ ID NO: 18493 - RNA, 1897 nt, Artificial Sequence
  mRNA product Design c-5 comprising derived and/or modified sequence from HRSV(Memphis-37)__AIY60640.1__F_DSCav1_mut7 (opt4)
gggagagcggcucggccauuuugucccagucaguccggaggcugcggcugcagaaguaccgccugcggaguaacugcaaagaagcuuaccauggagcugcccauccugaagaccaacgccaucaccaccauccuggccgccgugacccugugcuucgccagcagccagaacaucaccgaggaguucuaccagagcaccugcagcgccgugagcaagggcuaccugagcgcccugagaaccggcugguacaccagcgugaucaccaucgagcugagcaacaucaaggagaacaagugcaacggcaccgacgccaaggugaagcugaucaagcaggagcuggacaaguacaagaacgccgugaccgagcugcagaugcugaugugcagcacccccgccgccggcagcggcagcgccaucgccagcggcaucgccgugugcaaggugcugcaccuggagggcgaggugaacaagaucaagaacgcccugcugagcaccaacaaggccguggugagccugagcaacggcgugagcgugcugaccuucaaggugcuggaccugaagaacuacaucgacaagcagcugcugcccauccugaacaagcagagcugcagcaucagcaacaucgagaccgugauggaguuccagcagaagaacaacagacugcuggagaucaccagagaguucagcgugaacgccggcgugaccacccccgugagcaccuacaugcugaccaacagcgagcugcugagccugaucaacgacaugcccaucaccaacgaccagaagaagcugaugagcaacaacgugcagaucgugagacagcagagcuacagcaucaugugcaucaucaaggaggaggugcuggccuacguggugcagcugccccuguacggcgugaucgacacccccugcuggaagcugcacaccagcccccugugcaccaccaacaccaaggagggcagcaacaucugccugaccagaaccgacagaggcugguacugcgacaacgccggcagcgugagcuucuucccccaggccgagaccugcaaggugugcagcaacagaguguucugcgacaccaugaacagccugacccugcccagcgaggugaaccugugcaacaucgacaucuucaaccccaaguacgacugcaagaucaugaccagcaagaccgacgugagcagcagcgugaucaccagccugggcgccaucgugagcugcuacggcaagaccaagugcaccgccagcaacaagaacaagggcaucaucaagaccuucagcaacggcugcgacuacgugagcaacaagggcguggacaccgugagcgugggcaacacccuguacuacgugaacaagcaggagggcaagagccuguacgugaagggcgagcccaucaucaacuucuacgacccccugguguuccccagcgacgaguucgacgccagcaucagccaggugaacgagaagaucaaccagagccuggccuucaucagaaagagcgacgagcugcugcacaacgugaacgugggcaagagcaccaccaacaucaugaucaccaccaucaucaucgugaucaucgugauccugcugcugcugaucgccgugggccuguuccuguacugcaaggccagaagcacccccgugacccugagcaaggaccagcugagcggcaucaacaacaucgccuucagcaacugaggacuagucccuguucccagagcccacuuuuuuuucuuuuuuugaaauaaaauagccugucuuucagaucuaaaaaaaaaaaaaaaaaaaaaaaaaaaaaaaaaaaaaaaaaaaaaaaaaaaaaaaaaaaaaaaaugcaucccccccccccccccccccccccccccccccaaaggcucuuuucagagccaccagaauu

SEQ ID NO: 18494 - RNA, 1897 nt, Artificial Sequence
  mRNA product Design c-5 comprising derived and/or modified sequence from HRSV(Memphis-37)__AIY60640.1__F_DSCav1_mut7 (opt5)
gggagagcggcucggccauuuugucccagucaguccggaggcugcggcugcagaaguaccgccugcggaguaacugcaaagaagcuuaccauggagcugcccauccucaagaccaacgccauuacaacgauccuggcugccgugacccuuugcuucgcgagcucccagaauauuacagaagaguuuuaccaaucuaccuguagcgcugucuccaaaggcuaucugucugcccucagaacagggugguacaccagcguuaucacaauugaacuguccaacaucaaggagaauaaaugcaacggaaccgacgccaaggugaaacuuaucaagcaggaacuggauaaguauaaaaaugcugugacggagcuccagaugcugauguguucuaccccugccgcuggcagcggguccgccauugcgagcggaaucgccgucugcaaggugcugcaccucgagggcgaaguuaacaaaauuaagaaugcucugcuuucuacaaacaaagccguggucucccugagcaauggggugucuguucucaccuucaaggugcuggaccuuaagaacuacaucgauaaacagcugcucccgauucugaauaagcaauccuguagcaucucuaacauugagacagucauggaauuucagcagaaaaauaaccggcugcucgagaucacccgcgaguucuccgugaaugcuggagugacgacacccgucagcaccuauaugcugacaaacuccgaacuucugucucucaucaacgacaugccuauuaccaaugaucagaagaaacugaugagcaacaauguucaaaucgugagacagcaguccuacagcauuaugugcaucauuaaggaggaagugcuugccuaugucgugcagcugccccucuacggcguuaucgacaccccuuguuggaaacugcauacaucuccccugugcacgaccaacacaaaggagggcuccaauaucugucucacccggacagaucgcgggugguacugcgacaacgcgggaagcgugagcuuuuucccucaagccgaaaccuguaaggucugcucuaauagaguguuuugcgauacgaugaacucccugacacuuccgucugagguuaaucuguguaacauugacaucuucaaucccaaauaugauugcaagauuaugaccagcaaaaccgacguguccagcucugucaucacaucccucggcgcuauugugagcuguuacgggaagaccaaaugcacagccucuaacaagaauaagggaaucaucaaaacguuuuccaacggcugugauuaugucagcaauaaggggguggacaccguuuccgugggaaacacacuguacuaugucaacaaacaggagggcaagucucuuuacgugaaaggcgaaccuauuaucaauuucuaugacccccugguuuuuccuagcgaugaguucgacgcuuccauuucucaggugaacgaaaagaucaaucaaagccucgccuuuauucggaaguccgaugagcugcugcacaacgucaauguggggaaaagcaccacaaacaucaugauuaccacgaucaucauugugaucauuguuauccuccugcuucugauugccgucggacucuuccuguacugcaaggcucgcucuacccccgugacacuguccaaagaccagcuuagcggcaucaauaacaucgcguucucuaauugaggacuagucccuguucccagagcccacuuuuuuuucuuuuuuugaaauaaaauagccugucuuucagaucuaaaaaaaaaaaaaaaaaaaaaaaaaaaaaaaaaaaaaaaaaaaaaaaaaaaaaaaaaaaaaaaaugcaucccccccccccccccccccccccccccccccaaaggcucuuuucagagccaccagaauu

SEQ ID NO: 18495 - RNA, 1897 nt, Artificial Sequence
  mRNA product Design c-5 comprising derived and/or modified sequence from HRSV(Memphis-37)__AIY60640.1__F_DSCav1_mut7 (opt6)
gggagagcggcucggccauuuugucccagucaguccggaggcugcggcugcagaaguaccgccugcggaguaacugcaaagaagcuuaccauggaacuaccaauacucaaaacaaaugcuauaaccacaauacucgcagcaguaacauuauguuucgcaucaucccaaaacauaacagaagaauuuuaucaaucaaccuguucagcaguauccaaaggauaccuaagugcauuaagaaccggaugguacacaucaguaauaaccauagaacuuucaaacauaaaagaaaacaaauguaacggcacagacgcaaaagucaaacucaucaaacaggaacuugacaaauauaaaaacgcaguaaccgaacuacaaaugcuaaugugcucaacaccagcagcaggaucaggaucagcaauugcaucuggaauagcuguaugcaaaguccuacaccuagaaggagaaguaaacaaaaucaaaaacgcauuacucuccacaaacaaagcaguaguaucacuaucaaacggaguuucaguacuaaccuucaaaguauuagaccuaaaaaacuacauagacaaacaacuacuaccuauacuaaacaaacaauccuguucaauaagcaacauugaaacuguaauggaauuucaacaaaaaaacaaccgccuauuagaaauaaccagagaauuuuccguaaaugcaggaguaaccacaccagucucuacauacauguuaaccaacucagaacuauuaucacucauaaaugacaugccuauaacaaacgaccaaaaaaaacuaaugucaaacaacguacaaauaguaagacaacaaucauauuccauaaugugcauaauaaaagaagaaguacuugcauacgugguucaacuaccccuauauggaguuauagacacaccaugcuggaaacuccacacuuccccacuuugcacaacuaacacaaaagaaggaucaaauauaugccuaaccagaacagaccguggaugguacugcgacaacgcuggaucagucuccuucuuuccacaagcagaaaccugcaaagucugcucaaauagagucuucugugacacaaugaacucacucacccuacccucagaaguaaaccuauguaauauagauauauuuaauccaaaauacgacugcaaaauuaugacaaguaaaacagacguaagcucaucagucauaaccagccuaggagcaauaguauccuguuacggcaaaacaaaaugcacagcuucaaacaaaaacaaaggcauaauaaaaacauucucaaacggaugugacuauguaucaaauaaaggaguugacacaguaucaguuggaaacacacuauacuauguaaacaaacaagaaggaaaaucacuauacguuaaaggcgaacccauaaucaauuucuacgacccccuagucuucccauccgaugaauuugacgcaucaauaucccaaguaaaugaaaaaaucaaccaaucccuagcauuuauacgaaaauccgacgaacuacuccauaaugucaacgucgguaaaucaacgacaaacaucaugaucacaacaauaauaauaguaauaauuguaauauuacucuuacucauagcaguaggccuauuucuauauugcaaagccagaucaacaccaguaaccuuauccaaagaccaacuaucuggaauaaacaacauagcauuuuccaacugaggacuagucccuguucccagagcccacuuuuuuuucuuuuuuugaaauaaaauagccugucuuucagaucuaaaaaaaaaaaaaaaaaaaaaaaaaaaaaaaaaaaaaaaaaaaaaaaaaaaaaaaaaaaaaaaaugcaucccccccccccccccccccccccccccccccaaaggcucuuuucagagccaccagaauu

SEQ ID NO: 18496 - RNA, 1897 nt, Artificial Sequence
  mRNA product Design c-5 comprising derived and/or modified sequence from HRSV(Memphis-37)__AIY60640.1__F_DSCav1_mut7 (opt11)
gggagagcggcucggccauuuugucccagucaguccggaggcugcggcugcagaaguaccgccugcggaguaacugcaaagaagcuuaccauggaacuccccauacuuaaaacaaacgccauaacaacuauacucgcagccgucacccucuguuucgcauccucucaaaacaucaccgaagaguucuaucaaucaaccugcuccgccgucucaaaaggcuaccucuccgcccuacgcacaggcugguacaccagcgucauuaccauagaacucucgaacaucaaagaaaacaaaugcaacggcaccgacgcaaaagugaaacucaucaaacaagaacucgacaaauacaaaaacgccgucaccgaacuucagaugcucaugugcuccaccccugccgccggcagcggcuccgccauagccuccggcaucgcagucugcaaaguccuccaccucgaaggagaaguaaacaaaaucaaaaaugcucuccucuccacaaacaaagccgucgucucacucuccaauggagucuccguccucaccuucaaaguccucgaccucaaaaacuacauagacaaacaacuacuccccauccucaacaagcaauccugcucuaucuccaacauagaaaccguuauggaguuccaacagaaaaauaaccgccugcuagaaauaacccgagaguucuccgucaacgcaggcgucacuacccccgucagcacauacaugcuaacaaacuccgaacugcucucccuuaucaacgacaugcccaucacaaacgaucagaaaaagcucaugucuaacaacguacaaaucguucggcaacaauccuacuccaucaugugcaucaucaaagaagaagugcucgccuacguaguccaacucccccucuacggagucaucgacacacccugcuggaaacuccacacaucaccccucugcaccaccaacacaaaagaaggguccaacaucugccucacgcgcaccgaccgaggcugguacugcgacaacgccggcuccguauccuucuucccccaagcagaaaccugcaaggucugcuccaaccgcguauucugcgacaccaugaacucgcucacccuccccucagaagucaaccuauguaacaucgacauauucaaucccaaauacgacugcaagauaaugacuuccaaaaccgacguaagcuccucggucaucaccucccucggcgccaucgucuccugcuacggcaaaaccaaaugcaccgccuccaauaagaauaaaggcauaauaaagacauucagcaacggcugcgauuacgucuccaacaaaggugucgacaccgucucagucggcaacacucuauacuacgugaacaaacaagaaggcaaaagccuauacguuaaaggcgaaccaauaaucaauuucuacgacccucuagucuuucccucugacgaguucgaugccagcauaagccaagucaacgaaaagaucaaccaaucacucgccuucauccguaaauccgacgaacugcuccacaaugucaauguaggcaaaucaacaaccaacaucaugaucaccacuauuaucaucgucaucaucguaauccuacuccuacuaaucgccgucggccuauuccucuacugcaaagcccgcucgacccccgucacucucagcaaggaucaacuauccggcaucaacaacaucgccuucuccaacuaaggacuagucccuguucccagagcccacuuuuuuuucuuuuuuugaaauaaaauagccugucuuucagaucuaaaaaaaaaaaaaaaaaaaaaaaaaaaaaaaaaaaaaaaaaaaaaaaaaaaaaaaaaaaaaaaaugcaucccccccccccccccccccccccccccccccaaaggcucuuuucagagccaccagaauu

SEQ ID NO: 18497 - RNA, 1906 nt, Artificial Sequence
  mRNA product Design d-1 comprising derived and/or modified sequence from HRSV(Memphis-37)__AIY60640.1__F_DSCav1_mut7 (opt1)
gggagacccgugacccggaaguuguacggcuacgcgacuuucccucccacaaacccucgcgcccuuccuuuccuacuugggcccggcagaaagcuuaccauggagcugcccauccucaagaccaacgccaucaccacgauccuggccgcggugacccugugcuucgccagcucccagaacaucaccgaggaguucuaccagagcacgugcuccgccgucagcaagggcuaccucuccgcccugcgcaccgggugguacaccagcgugaucaccaucgagcuguccaacaucaaggagaacaagugcaacggcaccgacgccaaggugaagcucaucaagcaggagcuggacaaguacaagaacgcggucacggagcugcagaugcugaugugcagcaccccggccgccggcuccgggagcgcgaucgccuccggcaucgccgucugcaaggugcugcaccucgagggcgaggugaacaagaucaagaacgcccugcuguccaccaacaaggccgucgugagccucuccaacggggugagcguccugaccuucaaggugcuggaccucaagaacuacaucgacaagcagcugcugcccauccugaacaagcagagcugcuccaucagcaacaucgagaccgucauggaguuccagcagaagaacaaccgccuccuggagaucacgcgggaguucagcgugaacgcgggcgugaccacccccgucuccaccuacaugcugacgaacagcgagcuccugucccugaucaacgacaugccgaucaccaacgaccagaagaagcucaugagcaacaacgugcagaucgugcgccagcaguccuacagcaucaugugcaucaucaaggaggagguccuggccuacguggugcagcugccccucuacggggucaucgacacccccugcuggaagcugcacaccagcccccugugcacgaccaacaccaaggagggcuccaacaucugccucacccggacggaccgcgggugguacugcgacaacgccggcagcguguccuucuucccgcaggccgagaccugcaaggucugcagcaaccggguguucugcgacaccaugaacucccugacccugcccagcgaggugaaccucugcaacaucgacaucuucaaccccaaguacgacugcaagaucaugacguccaagaccgacgucagcuccagcgugaucaccucccugggcgccaucgugagcugcuacgggaagaccaagugcacggcgagcaacaagaacaagggcaucaucaagaccuucuccaacgggugcgacuacgucagcaacaagggcguggacaccguguccgucggcaacacccuguacuacgugaacaagcaggagggcaagagccucuacgugaagggggagcccaucaucaacuucuacgacccgcuggucuuccccuccgacgaguucgacgccagcaucucccaggugaacgagaagaucaaccagagccuggccuucauccggaaguccgacgagcuccugcacaacgugaacgucggcaagagcaccacgaacaucaugaucaccaccaucaucaucgugaucaucgugauccugcugcuccugaucgccgucgggcuguuccucuacugcaaggcccgcuccacccccgugacgcugagcaaggaccagcuguccgggaucaacaacaucgcguucagcaacugaggacuagucccuguucccagagcccacuuuuuuuucuuuuuuugaaauaaaauagccugucuuucagaucuaaaaaaaaaaaaaaaaaaaaaaaaaaaaaaaaaaaaaaaaaaaaaaaaaaaaaaaaaaaaaaaaugcaucccccccccccccccccccccccccccccccaaaggcucuuuucagagccaccagaauu

SEQ ID NO: 18498 - RNA, 1906 nt, Artificial Sequence
  mRNA product Design d-1 comprising derived and/or modified sequence from HRSV(Memphis-37)__AIY60640.1__F_DSCav1_mut7 (opt1)
gggagacccgugacccggaaguuguacggcuacgcgacuuucccucccacaaacccucgcgcccuuccuuuccuacuugggcccggcagaaagcuuaccauggagcugcccauccucaagaccaacgccaucaccacgauccuggccgcggugacccugugcuucgccagcucccagaacaucaccgaggaguucuaccagagcacgugcuccgccgucagcaagggcuaccucuccgcccugcgcaccgggugguacaccagcgugaucaccaucgagcuguccaacaucaaggagaacaagugcaacggcaccgacgccaaggugaagcucaucaagcaggagcuggacaaguacaagaacgcggucacggagcugcagaugcucaugugcagcaccccggccgccggguccggcagcgccaucgcguccgggaucgccgugugcaaggugcugcaccuggagggcgaggucaacaagaucaagaacgcccuccugagcaccaacaaggccguggugucccugagcaacggcgucuccgugcucaccuucaaggugcuggaccugaagaacuacaucgacaagcagcuccugcccauccugaacaagcagagcugcuccaucagcaacaucgagacggucauggaguuccagcagaagaacaaccggcuccuggagaucacccgcgaguucuccgugaacgccggggugaccacccccgucagcacguacaugcugaccaacagcgagcuccugucccugaucaacgacaugcccaucaccaacgaccagaagaagcucaugagcaacaacgugcagaucgugcggcagcaguccuacagcaucaugugcaucaucaaggaggagguccuggcguacguggugcagcugccgcucuacggcgucaucgacacccccugcuggaagcugcacacgagcccccugugcaccaccaacaccaaggaggggagcaacaucugccucacgcgcaccgaccggggcugguacugcgacaacgccggguccgugagcuucuucccccaggccgagaccugcaaggugugcuccaaccgcgucuucugcgacaccaugaacagccugacgcugccguccgaggugaaccucugcaacaucgacaucuucaaccccaaguacgacugcaagaucaugaccagcaagaccgacgucuccagcuccgugaucaccagccugggcgccaucguguccugcuacggcaagacgaagugcaccgccagcaacaagaacaaggggaucaucaagaccuucuccaacggcugcgacuacgucagcaacaaggggguggacaccgugagcgucggcaacacgcuguacuacgugaacaagcaggagggcaagucccucuacgugaagggggagcccaucaucaacuucuacgacccccuggucuucccgagcgacgaguucgacgcguccaucagccaggugaacgagaagaucaaccagucccuggccuucauccggaaguccgacgagcuccugcacaacgugaacgucggcaaguccaccaccaacaucaugaucaccaccaucaucaucgugaucaucgugauccugcuccugcugaucgccgucggccucuuccuguacugcaaggcccgcagcacgcccgugacccuguccaaggaccagcugagcgggaucaacaacaucgccuucuccaacugaggacuagucccuguucccagagcccacuuuuuuuucuuuuuuugaaauaaaauagccugucuuucagaucuaaaaaaaaaaaaaaaaaaaaaaaaaaaaaaaaaaaaaaaaaaaaaaaaaaaaaaaaaaaaaaaaugcaucccccccccccccccccccccccccccccccaaaggcucuuuucagagccaccagaauu

SEQ ID NO: 18499 - RNA, 1906 nt, Artificial Sequence
  mRNA product Design d-1 comprising derived and/or modified sequence from HRSV(Memphis-37)__AIY60640.1__F_DSCav1_mut7 (opt2)
gggagacccgugacccggaaguuguacggcuacgcgacuuucccucccacaaacccucgcgcccuuccuuuccuacuugggcccggcagaaagcuuaccauggagcuccccauccucaagaccaacgccaucaccaccauccucgccgccgucacccucugcuucgccuccucccagaacaucaccgaggaguucuaccaguccaccugcuccgccgucuccaagggcuaccucuccgcccuccgcaccggcugguacaccuccgucaucaccaucgagcucuccaacaucaaggagaacaagugcaacggcaccgacgccaaggucaagcucaucaagcaggagcucgacaaguacaagaacgccgucaccgagcuccagaugcucaugugcuccacccccgccgccggcuccggcuccgccaucgccuccggcaucgccgucugcaagguccuccaccucgagggcgaggucaacaagaucaagaacgcccuccucuccaccaacaaggccgucgucucccucuccaacggcgucuccguccucaccuucaagguccucgaccucaagaacuacaucgacaagcagcuccuccccauccucaacaagcaguccugcuccaucuccaacaucgagaccgucauggaguuccagcagaagaacaaccgccuccucgagaucacccgcgaguucuccgucaacgccggcgucaccacccccgucuccaccuacaugcucaccaacuccgagcuccucucccucaucaacgacaugcccaucaccaacgaccagaagaagcucauguccaacaacguccagaucguccgccagcaguccuacuccaucaugugcaucaucaaggaggagguccucgccuacgucguccagcucccccucuacggcgucaucgacacccccugcuggaagcuccacaccuccccccucugcaccaccaacaccaaggagggcuccaacaucugccucacccgcaccgaccgcggcugguacugcgacaacgccggcuccgucuccuucuucccccaggccgagaccugcaaggucugcuccaaccgcgucuucugcgacaccaugaacucccucacccuccccuccgaggucaaccucugcaacaucgacaucuucaaccccaaguacgacugcaagaucaugaccuccaagaccgacgucuccuccuccgucaucaccucccucggcgccaucgucuccugcuacggcaagaccaagugcaccgccuccaacaagaacaagggcaucaucaagaccuucuccaacggcugcgacuacgucuccaacaagggcgucgacaccgucuccgucggcaacacccucuacuacgucaacaagcaggagggcaagucccucuacgucaagggcgagcccaucaucaacuucuacgacccccucgucuuccccuccgacgaguucgacgccuccaucucccaggucaacgagaagaucaaccagucccucgccuucauccgcaaguccgacgagcuccuccacaacgucaacgucggcaaguccaccaccaacaucaugaucaccaccaucaucaucgucaucaucgucauccuccuccuccucaucgccgucggccucuuccucuacugcaaggcccgcuccacccccgucacccucuccaaggaccagcucuccggcaucaacaacaucgccuucuccaacugaggacuagucccuguucccagagcccacuuuuuuuucuuuuuuugaaauaaaauagccugucuuucagaucuaaaaaaaaaaaaaaaaaaaaaaaaaaaaaaaaaaaaaaaaaaaaaaaaaaaaaaaaaaaaaaaaugcaucccccccccccccccccccccccccccccccaaaggcucuuuucagagccaccagaauu

SEQ ID NO: 18500 - RNA, 1906 nt, Artificial Sequence
  mRNA product Design d-1 comprising derived and/or modified sequence from HRSV(Memphis-37)__AIY60640.1__F_DSCav1_mut7 (opt3)
gggagacccgugacccggaaguuguacggcuacgcgacuuucccucccacaaacccucgcgcccuuccuuuccuacuugggcccggcagaaagcuuaccauggagcugcccauccucaagaccaacgccauuacaacuauacuugcugcagugacgcugugcuucgccagcucccagaauaucaccgaagaguuuuaccaaucuacauguucagcggucaguaaaggcuauuugagcgcuuuaagaacugggugguacaccuccguuauuacaaucgaacugucuaacauuaaggagaauaaaugcaacggaaccgacgccaaggugaaacuaaucaagcaggaacucgauaaguauaaaaaugcaguaacugagcugcagaugcuuauguguucgaccccugccgcugguucaggcagcgcaauagccagugggaucgcugugugcaagguccugcacuuggagggagaagugaacaaaauuaagaaugcccuccuguccacaaacaaagcgguugugucucugagcaauggcgucuccgugcucacguucaagguauuagaccugaagaacuacaucgauaaacagcuuuugccaauucugaauaagcaaucauguaguaucagcaacauagagacuguuauggaauuucagcagaaaaauaacaggcuacucgagauuacccgggaguucucugugaaugccggugucacaacuccgguguccaccuauaugcugacaaacucagaacuucugagcuugaucaacgacaugcccauuaccaaugaucagaagaaacucaugaguaacaaugugcaaaucguccgccagcagucuuacuccaucaugugcauuauaaaggaggaaguucuggcauaugugguacaguuaccucuguacggggugaucgacacgccauguuggaaacuccauacuagcccccuuugcacaaccaacacuaaggagggaucgaauauuugucugacacgaaccgaucguggcugguacugcgacaacgcuggcucugucuccuuuuucccucaagccgaaacguguaaggugugcucaaauagaguguuuugcgauaccaugaacaguuugacacuaccaagcgagguuaaucuguguaacaucgacauauucaaucccaaauaugauugcaagauuaugacuuccaaaaccgacgucucuagcucagugaucacaagucucggggcaaucguauccuguuacggaaagacuaaaugcaccgcuagcaacaagaauaaggguauuaucaaaacauuuucuaacggcugugauuauguuucaaauaaggggguggacaccgucagugugggaaacacucuguacuaugucaacaaacaggagggcaagagccuuuacgugaaaggugaaccuauuauaaauuucuaugacccacugguuuuuccguccgaugaguucgacgccucuaucagccaggugaacgaaaagauuaaucaaucguuggcguuuaucaggaaguccgaugagcuccugcacaacguaaaugucgggaaaucaacgacaaacaucaugauuaccacuauaaucauugugaucauuguuaucuuacugcuacucauagccgugggacuguuccuuuacugcaaggcacggaguacccccgucacauugucuaaagaccagcugagcggcaucaauaacauugcuuucuccaauugaggacuagucccuguucccagagcccacuuuuuuuucuuuuuuugaaauaaaauagccugucuuucagaucuaaaaaaaaaaaaaaaaaaaaaaaaaaaaaaaaaaaaaaaaaaaaaaaaaaaaaaaaaaaaaaaaugcaucccccccccccccccccccccccccccccccaaaggcucuuuucagagccaccagaauu

SEQ ID NO: 18501 - RNA, 1906 nt, Artificial Sequence
  mRNA product Design d-1 comprising derived and/or modified sequence from HRSV(Memphis-37)__AIY60640.1__F_DSCav1_mut7 (opt4)
gggagacccgugacccggaaguuguacggcuacgcgacuuucccucccacaaacccucgcgcccuuccuuuccuacuugggcccggcagaaagcuuaccauggagcugcccauccugaagaccaacgccaucaccaccauccuggccgccgugacccugugcuucgccagcagccagaacaucaccgaggaguucuaccagagcaccugcagcgccgugagcaagggcuaccugagcgcccugagaaccggcugguacaccagcgugaucaccaucgagcugagcaacaucaaggagaacaagugcaacggcaccgacgccaaggugaagcugaucaagcaggagcuggacaaguacaagaacgccgugaccgagcugcagaugcugaugugcagcacccccgccgccggcagcggcagcgccaucgccagcggcaucgccgugugcaaggugcugcaccuggagggcgaggugaacaagaucaagaacgcccugcugagcaccaacaaggccguggugagccugagcaacggcgugagcgugcugaccuucaaggugcuggaccugaagaacuacaucgacaagcagcugcugcccauccugaacaagcagagcugcagcaucagcaacaucgagaccgugauggaguuccagcagaagaacaacagacugcuggagaucaccagagaguucagcgugaacgccggcgugaccacccccgugagcaccuacaugcugaccaacagcgagcugcugagccugaucaacgacaugcccaucaccaacgaccagaagaagcugaugagcaacaacgugcagaucgugagacagcagagcuacagcaucaugugcaucaucaaggaggaggugcuggccuacguggugcagcugccccuguacggcgugaucgacacccccugcuggaagcugcacaccagcccccugugcaccaccaacaccaaggagggcagcaacaucugccugaccagaaccgacagaggcugguacugcgacaacgccggcagcgugagcuucuucccccaggccgagaccugcaaggugugcagcaacagaguguucugcgacaccaugaacagccugacccugcccagcgaggugaaccugugcaacaucgacaucuucaaccccaaguacgacugcaagaucaugaccagcaagaccgacgugagcagcagcgugaucaccagccugggcgccaucgugagcugcuacggcaagaccaagugcaccgccagcaacaagaacaagggcaucaucaagaccuucagcaacggcugcgacuacgugagcaacaagggcguggacaccgugagcgugggcaacacccuguacuacgugaacaagcaggagggcaagagccuguacgugaagggcgagcccaucaucaacuucuacgacccccugguguuccccagcgacgaguucgacgccagcaucagccaggugaacgagaagaucaaccagagccuggccuucaucagaaagagcgacgagcugcugcacaacgugaacgugggcaagagcaccaccaacaucaugaucaccaccaucaucaucgugaucaucgugauccugcugcugcugaucgccgugggccuguuccuguacugcaaggccagaagcacccccgugacccugagcaaggaccagcugagcggcaucaacaacaucgccuucagcaacugaggacuagucccuguucccagagcccacuuuuuuuucuuuuuuugaaauaaaauagccugucuuucagaucuaaaaaaaaaaaaaaaaaaaaaaaaaaaaaaaaaaaaaaaaaaaaaaaaaaaaaaaaaaaaaaaaugcaucccccccccccccccccccccccccccccccaaaggcucuuuucagagccaccagaauu

SEQ ID NO: 18502 - RNA, 1906 nt, Artificial Sequence
  mRNA product Design d-1 comprising derived and/or modified sequence from HRSV(Memphis-37)__AIY60640.1__F_DSCav1_mut7 (opt5)
gggagacccgugacccggaaguuguacggcuacgcgacuuucccucccacaaacccucgcgcccuuccuuuccuacuugggcccggcagaaagcuuaccauggagcugcccauccucaagaccaacgccauuacaacgauccuggcugccgugacccuuugcuucgcgagcucccagaauauuacagaagaguuuuaccaaucuaccuguagcgcugucuccaaaggcuaucugucugcccucagaacagggugguacaccagcguuaucacaauugaacuguccaacaucaaggagaauaaaugcaacggaaccgacgccaaggugaaacuuaucaagcaggaacuggauaaguauaaaaaugcugugacggagcuccagaugcugauguguucuaccccugccgcuggcagcggguccgccauugcgagcggaaucgccgucugcaaggugcugcaccucgagggcgaaguuaacaaaauuaagaaugcucugcuuucuacaaacaaagccguggucucccugagcaauggggugucuguucucaccuucaaggugcuggaccuuaagaacuacaucgauaaacagcugcucccgauucugaauaagcaauccuguagcaucucuaacauugagacagucauggaauuucagcagaaaaauaaccggcugcucgagaucacccgcgaguucuccgugaaugcuggagugacgacacccgucagcaccuauaugcugacaaacuccgaacuucugucucucaucaacgacaugccuauuaccaaugaucagaagaaacugaugagcaacaauguucaaaucgugagacagcaguccuacagcauuaugugcaucauuaaggaggaagugcuugccuaugucgugcagcugccccucuacggcguuaucgacaccccuuguuggaaacugcauacaucuccccugugcacgaccaacacaaaggagggcuccaauaucugucucacccggacagaucgcgggugguacugcgacaacgcgggaagcgugagcuuuuucccucaagccgaaaccuguaaggucugcucuaauagaguguuuugcgauacgaugaacucccugacacuuccgucugagguuaaucuguguaacauugacaucuucaaucccaaauaugauugcaagauuaugaccagcaaaaccgacguguccagcucugucaucacaucccucggcgcuauugugagcuguuacgggaagaccaaaugcacagccucuaacaagaauaagggaaucaucaaaacguuuuccaacggcugugauuaugucagcaauaaggggguggacaccguuuccgugggaaacacacuguacuaugucaacaaacaggagggcaagucucuuuacgugaaaggcgaaccuauuaucaauuucuaugacccccugguuuuuccuagcgaugaguucgacgcuuccauuucucaggugaacgaaaagaucaaucaaagccucgccuuuauucggaaguccgaugagcugcugcacaacgucaauguggggaaaagcaccacaaacaucaugauuaccacgaucaucauugugaucauuguuauccuccugcuucugauugccgucggacucuuccuguacugcaaggcucgcucuacccccgugacacuguccaaagaccagcuuagcggcaucaauaacaucgcguucucuaauugaggacuagucccuguucccagagcccacuuuuuuuucuuuuuuugaaauaaaauagccugucuuucagaucuaaaaaaaaaaaaaaaaaaaaaaaaaaaaaaaaaaaaaaaaaaaaaaaaaaaaaaaaaaaaaaaaugcaucccccccccccccccccccccccccccccccaaaggcucuuuucagagccaccagaauu

SEQ ID NO: 18503 - RNA, 1906 nt, Artificial Sequence
  mRNA product Design d-1 comprising derived and/or modified sequence from HRSV(Memphis-37)__AIY60640.1__F_DSCav1_mut7 (opt6)
gggagacccgugacccggaaguuguacggcuacgcgacuuucccucccacaaacccucgcgcccuuccuuuccuacuugggcccggcagaaagcuuaccauggaacuaccaauacucaaaacaaaugcuauaaccacaauacucgcagcaguaacauuauguuucgcaucaucccaaaacauaacagaagaauuuuaucaaucaaccuguucagcaguauccaaaggauaccuaagugcauuaagaaccggaugguacacaucaguaauaaccauagaacuuucaaacauaaaagaaaacaaauguaacggcacagacgcaaaagucaaacucaucaaacaggaacuugacaaauauaaaaacgcaguaaccgaacuacaaaugcuaaugugcucaacaccagcagcaggaucaggaucagcaauugcaucuggaauagcuguaugcaaaguccuacaccuagaaggagaaguaaacaaaaucaaaaacgcauuacucuccacaaacaaagcaguaguaucacuaucaaacggaguuucaguacuaaccuucaaaguauuagaccuaaaaaacuacauagacaaacaacuacuaccuauacuaaacaaacaauccuguucaauaagcaacauugaaacuguaauggaauuucaacaaaaaaacaaccgccuauuagaaauaaccagagaauuuuccguaaaugcaggaguaaccacaccagucucuacauacauguuaaccaacucagaacuauuaucacucauaaaugacaugccuauaacaaacgaccaaaaaaaacuaaugucaaacaacguacaaauaguaagacaacaaucauauuccauaaugugcauaauaaaagaagaaguacuugcauacgugguucaacuaccccuauauggaguuauagacacaccaugcuggaaacuccacacuuccccacuuugcacaacuaacacaaaagaaggaucaaauauaugccuaaccagaacagaccguggaugguacugcgacaacgcuggaucagucuccuucuuuccacaagcagaaaccugcaaagucugcucaaauagagucuucugugacacaaugaacucacucacccuacccucagaaguaaaccuauguaauauagauauauuuaauccaaaauacgacugcaaaauuaugacaaguaaaacagacguaagcucaucagucauaaccagccuaggagcaauaguauccuguuacggcaaaacaaaaugcacagcuucaaacaaaaacaaaggcauaauaaaaacauucucaaacggaugugacuauguaucaaauaaaggaguugacacaguaucaguuggaaacacacuauacuauguaaacaaacaagaaggaaaaucacuauacguuaaaggcgaacccauaaucaauuucuacgacccccuagucuucccauccgaugaauuugacgcaucaauaucccaaguaaaugaaaaaaucaaccaaucccuagcauuuauacgaaaauccgacgaacuacuccauaaugucaacgucgguaaaucaacgacaaacaucaugaucacaacaauaauaauaguaauaauuguaauauuacucuuacucauagcaguaggccuauuucuauauugcaaagccagaucaacaccaguaaccuuauccaaagaccaacuaucuggaauaaacaacauagcauuuuccaacugaggacuagucccuguucccagagcccacuuuuuuuucuuuuuuugaaauaaaauagccugucuuucagaucuaaaaaaaaaaaaaaaaaaaaaaaaaaaaaaaaaaaaaaaaaaaaaaaaaaaaaaaaaaaaaaaaugcaucccccccccccccccccccccccccccccccaaaggcucuuuucagagccaccagaauu

SEQ ID NO: 18504 - RNA, 1906 nt, Artificial Sequence
  mRNA product Design d-1 comprising derived and/or modified sequence from HRSV(Memphis-37)__AIY60640.1__F_DSCav1_mut7 (opt11)
gggagacccgugacccggaaguuguacggcuacgcgacuuucccucccacaaacccucgcgcccuuccuuuccuacuugggcccggcagaaagcuuaccauggaacuccccauacuuaaaacaaacgccauaacaacuauacucgcagccgucacccucuguuucgcauccucucaaaacaucaccgaagaguucuaucaaucaaccugcuccgccgucucaaaaggcuaccucuccgcccuacgcacaggcugguacaccagcgucauuaccauagaacucucgaacaucaaagaaaacaaaugcaacggcaccgacgcaaaagugaaacucaucaaacaagaacucgacaaauacaaaaacgccgucaccgaacuucagaugcucaugugcuccaccccugccgccggcagcggcuccgccauagccuccggcaucgcagucugcaaaguccuccaccucgaaggagaaguaaacaaaaucaaaaaugcucuccucuccacaaacaaagccgucgucucacucuccaauggagucuccguccucaccuucaaaguccucgaccucaaaaacuacauagacaaacaacuacuccccauccucaacaagcaauccugcucuaucuccaacauagaaaccguuauggaguuccaacagaaaaauaaccgccugcuagaaauaacccgagaguucuccgucaacgcaggcgucacuacccccgucagcacauacaugcuaacaaacuccgaacugcucucccuuaucaacgacaugcccaucacaaacgaucagaaaaagcucaugucuaacaacguacaaaucguucggcaacaauccuacuccaucaugugcaucaucaaagaagaagugcucgccuacguaguccaacucccccucuacggagucaucgacacacccugcuggaaacuccacacaucaccccucugcaccaccaacacaaaagaaggguccaacaucugccucacgcgcaccgaccgaggcugguacugcgacaacgccggcuccguauccuucuucccccaagcagaaaccugcaaggucugcuccaaccgcguauucugcgacaccaugaacucgcucacccuccccucagaagucaaccuauguaacaucgacauauucaaucccaaauacgacugcaagauaaugacuuccaaaaccgacguaagcuccucggucaucaccucccucggcgccaucgucuccugcuacggcaaaaccaaaugcaccgccuccaauaagaauaaaggcauaauaaagacauucagcaacggcugcgauuacgucuccaacaaaggugucgacaccgucucagucggcaacacucuauacuacgugaacaaacaagaaggcaaaagccuauacguuaaaggcgaaccaauaaucaauuucuacgacccucuagucuuucccucugacgaguucgaugccagcauaagccaagucaacgaaaagaucaaccaaucacucgccuucauccguaaauccgacgaacugcuccacaaugucaauguaggcaaaucaacaaccaacaucaugaucaccacuauuaucaucgucaucaucguaauccuacuccuacuaaucgccgucggccuauuccucuacugcaaagcccgcucgacccccgucacucucagcaaggaucaacuauccggcaucaacaacaucgccuucuccaacuaaggacuagucccuguucccagagcccacuuuuuuuucuuuuuuugaaauaaaauagccugucuuucagaucuaaaaaaaaaaaaaaaaaaaaaaaaaaaaaaaaaaaaaaaaaaaaaaaaaaaaaaaaaaaaaaaaugcaucccccccccccccccccccccccccccccccaaaggcucuuuucagagccaccagaauu

SEQ ID NO: 18505 - RNA, 1961 nt, Artificial Sequence
  mRNA product Design d-2 comprising derived and/or modified sequence from HRSV(Memphis-37)__AIY60640.1__F_DSCav1_mut7 (opt1)
gggagagcggcucggccauuuugucccagucaguccggaggcugcggcugcagaaguaccgccugcggaguaacugcaaagaagcuuaccauggagcugcccauccucaagaccaacgccaucaccacgauccuggccgcggugacccugugcuucgccagcucccagaacaucaccgaggaguucuaccagagcacgugcuccgccgucagcaagggcuaccucuccgcccugcgcaccgggugguacaccagcgugaucaccaucgagcuguccaacaucaaggagaacaagugcaacggcaccgacgccaaggugaagcucaucaagcaggagcuggacaaguacaagaacgcggucacggagcugcagaugcugaugugcagcaccccggccgccggcuccgggagcgcgaucgccuccggcaucgccgucugcaaggugcugcaccucgagggcgaggugaacaagaucaagaacgcccugcuguccaccaacaaggccgucgugagccucuccaacggggugagcguccugaccuucaaggugcuggaccucaagaacuacaucgacaagcagcugcugcccauccugaacaagcagagcugcuccaucagcaacaucgagaccgucauggaguuccagcagaagaacaaccgccuccuggagaucacgcgggaguucagcgugaacgcgggcgugaccacccccgucuccaccuacaugcugacgaacagcgagcuccugucccugaucaacgacaugccgaucaccaacgaccagaagaagcucaugagcaacaacgugcagaucgugcgccagcaguccuacagcaucaugugcaucaucaaggaggagguccuggccuacguggugcagcugccccucuacggggucaucgacacccccugcuggaagcugcacaccagcccccugugcacgaccaacaccaaggagggcuccaacaucugccucacccggacggaccgcgggugguacugcgacaacgccggcagcguguccuucuucccgcaggccgagaccugcaaggucugcagcaaccggguguucugcgacaccaugaacucccugacccugcccagcgaggugaaccucugcaacaucgacaucuucaaccccaaguacgacugcaagaucaugacguccaagaccgacgucagcuccagcgugaucaccucccugggcgccaucgugagcugcuacgggaagaccaagugcacggcgagcaacaagaacaagggcaucaucaagaccuucuccaacgggugcgacuacgucagcaacaagggcguggacaccguguccgucggcaacacccuguacuacgugaacaagcaggagggcaagagccucuacgugaagggggagcccaucaucaacuucuacgacccgcuggucuuccccuccgacgaguucgacgccagcaucucccaggugaacgagaagaucaaccagagccuggccuucauccggaaguccgacgagcuccugcacaacgugaacgucggcaagagcaccacgaacaucaugaucaccaccaucaucaucgugaucaucgugauccugcugcuccugaucgccgucgggcuguuccucuacugcaaggcccgcuccacccccgugacgcugagcaaggaccagcuguccgggaucaacaacaucgcguucagcaacugaggacuaguaauaaggaaacuguaugaaugucugugggcaggaagugaagagauccuucuguaaagguuuuuggaauuaugucugcugaauaauaaacuuuuuugaaauaauaaaucugguagaaaaaugagaucuaaaaaaaaaaaaaaaaaaaaaaaaaaaaaaaaaaaaaaaaaaaaaaaaaaaaaaaaaaaaaaaaugcaucccccccccccccccccccccccccccccccaaaggcucuuuucagagccaccagaauu

SEQ ID NO: 18506 - RNA, 1961 nt, Artificial Sequence
  mRNA product Design d-2 comprising derived and/or modified sequence from HRSV(Memphis-37)__AIY60640.1__F_DSCav1_mut7 (opt1)
gggagagcggcucggccauuuugucccagucaguccggaggcugcggcugcagaaguaccgccugcggaguaacugcaaagaagcuuaccauggagcugcccauccucaagaccaacgccaucaccacgauccuggccgcggugacccugugcuucgccagcucccagaacaucaccgaggaguucuaccagagcacgugcuccgccgucagcaagggcuaccucuccgcccugcgcaccgggugguacaccagcgugaucaccaucgagcuguccaacaucaaggagaacaagugcaacggcaccgacgccaaggugaagcucaucaagcaggagcuggacaaguacaagaacgcggucacggagcugcagaugcucaugugcagcaccccggccgccggguccggcagcgccaucgcguccgggaucgccgugugcaaggugcugcaccuggagggcgaggucaacaagaucaagaacgcccuccugagcaccaacaaggccguggugucccugagcaacggcgucuccgugcucaccuucaaggugcuggaccugaagaacuacaucgacaagcagcuccugcccauccugaacaagcagagcugcuccaucagcaacaucgagacggucauggaguuccagcagaagaacaaccggcuccuggagaucacccgcgaguucuccgugaacgccggggugaccacccccgucagcacguacaugcugaccaacagcgagcuccugucccugaucaacgacaugcccaucaccaacgaccagaagaagcucaugagcaacaacgugcagaucgugcggcagcaguccuacagcaucaugugcaucaucaaggaggagguccuggcguacguggugcagcugccgcucuacggcgucaucgacacccccugcuggaagcugcacacgagcccccugugcaccaccaacaccaaggaggggagcaacaucugccucacgcgcaccgaccggggcugguacugcgacaacgccggguccgugagcuucuucccccaggccgagaccugcaaggugugcuccaaccgcgucuucugcgacaccaugaacagccugacgcugccguccgaggugaaccucugcaacaucgacaucuucaaccccaaguacgacugcaagaucaugaccagcaagaccgacgucuccagcuccgugaucaccagccugggcgccaucguguccugcuacggcaagacgaagugcaccgccagcaacaagaacaaggggaucaucaagaccuucuccaacggcugcgacuacgucagcaacaaggggguggacaccgugagcgucggcaacacgcuguacuacgugaacaagcaggagggcaagucccucuacgugaagggggagcccaucaucaacuucuacgacccccuggucuucccgagcgacgaguucgacgcguccaucagccaggugaacgagaagaucaaccagucccuggccuucauccggaaguccgacgagcuccugcacaacgugaacgucggcaaguccaccaccaacaucaugaucaccaccaucaucaucgugaucaucgugauccugcuccugcugaucgccgucggccucuuccuguacugcaaggcccgcagcacgcccgugacccuguccaaggaccagcugagcgggaucaacaacaucgccuucuccaacugaggacuaguaauaaggaaacuguaugaaugucugugggcaggaagugaagagauccuucuguaaagguuuuuggaauuaugucugcugaauaauaaacuuuuuugaaauaauaaaucugguagaaaaaugagaucuaaaaaaaaaaaaaaaaaaaaaaaaaaaaaaaaaaaaaaaaaaaaaaaaaaaaaaaaaaaaaaaaugcaucccccccccccccccccccccccccccccccaaaggcucuuuucagagccaccagaauu

SEQ ID NO: 18507 - RNA, 1961 nt, Artificial Sequence
  mRNA product Design d-2 comprising derived and/or modified sequence from HRSV(Memphis-37)__AIY60640.1__F_DSCav1_mut7 (opt2)
gggagagcggcucggccauuuugucccagucaguccggaggcugcggcugcagaaguaccgccugcggaguaacugcaaagaagcuuaccauggagcuccccauccucaagaccaacgccaucaccaccauccucgccgccgucacccucugcuucgccuccucccagaacaucaccgaggaguucuaccaguccaccugcuccgccgucuccaagggcuaccucuccgcccuccgcaccggcugguacaccuccgucaucaccaucgagcucuccaacaucaaggagaacaagugcaacggcaccgacgccaaggucaagcucaucaagcaggagcucgacaaguacaagaacgccgucaccgagcuccagaugcucaugugcuccacccccgccgccggcuccggcuccgccaucgccuccggcaucgccgucugcaagguccuccaccucgagggcgaggucaacaagaucaagaacgcccuccucuccaccaacaaggccgucgucucccucuccaacggcgucuccguccucaccuucaagguccucgaccucaagaacuacaucgacaagcagcuccuccccauccucaacaagcaguccugcuccaucuccaacaucgagaccgucauggaguuccagcagaagaacaaccgccuccucgagaucacccgcgaguucuccgucaacgccggcgucaccacccccgucuccaccuacaugcucaccaacuccgagcuccucucccucaucaacgacaugcccaucaccaacgaccagaagaagcucauguccaacaacguccagaucguccgccagcaguccuacuccaucaugugcaucaucaaggaggagguccucgccuacgucguccagcucccccucuacggcgucaucgacacccccugcuggaagcuccacaccuccccccucugcaccaccaacaccaaggagggcuccaacaucugccucacccgcaccgaccgcggcugguacugcgacaacgccggcuccgucuccuucuucccccaggccgagaccugcaaggucugcuccaaccgcgucuucugcgacaccaugaacucccucacccuccccuccgaggucaaccucugcaacaucgacaucuucaaccccaaguacgacugcaagaucaugaccuccaagaccgacgucuccuccuccgucaucaccucccucggcgccaucgucuccugcuacggcaagaccaagugcaccgccuccaacaagaacaagggcaucaucaagaccuucuccaacggcugcgacuacgucuccaacaagggcgucgacaccgucuccgucggcaacacccucuacuacgucaacaagcaggagggcaagucccucuacgucaagggcgagcccaucaucaacuucuacgacccccucgucuuccccuccgacgaguucgacgccuccaucucccaggucaacgagaagaucaaccagucccucgccuucauccgcaaguccgacgagcuccuccacaacgucaacgucggcaaguccaccaccaacaucaugaucaccaccaucaucaucgucaucaucgucauccuccuccuccucaucgccgucggccucuuccucuacugcaaggcccgcuccacccccgucacccucuccaaggaccagcucuccggcaucaacaacaucgccuucuccaacugaggacuaguaauaaggaaacuguaugaaugucugugggcaggaagugaagagauccuucuguaaagguuuuuggaauuaugucugcugaauaauaaacuuuuuugaaauaauaaaucugguagaaaaaugagaucuaaaaaaaaaaaaaaaaaaaaaaaaaaaaaaaaaaaaaaaaaaaaaaaaaaaaaaaaaaaaaaaaugcaucccccccccccccccccccccccccccccccaaaggcucuuuucagagccaccagaauu

SEQ ID NO: 18508 - RNA, 1961 nt, Artificial Sequence
  mRNA product Design d-2 comprising derived and/or modified sequence from HRSV(Memphis-37)__AIY60640.1__F_DSCav1_mut7 (opt3)
gggagagcggcucggccauuuugucccagucaguccggaggcugcggcugcagaaguaccgccugcggaguaacugcaaagaagcuuaccauggagcugcccauccucaagaccaacgccauuacaacuauacuugcugcagugacgcugugcuucgccagcucccagaauaucaccgaagaguuuuaccaaucuacauguucagcggucaguaaaggcuauuugagcgcuuuaagaacugggugguacaccuccguuauuacaaucgaacugucuaacauuaaggagaauaaaugcaacggaaccgacgccaaggugaaacuaaucaagcaggaacucgauaaguauaaaaaugcaguaacugagcugcagaugcuuauguguucgaccccugccgcugguucaggcagcgcaauagccagugggaucgcugugugcaagguccugcacuuggagggagaagugaacaaaauuaagaaugcccuccuguccacaaacaaagcgguugugucucugagcaauggcgucuccgugcucacguucaagguauuagaccugaagaacuacaucgauaaacagcuuuugccaauucugaauaagcaaucauguaguaucagcaacauagagacuguuauggaauuucagcagaaaaauaacaggcuacucgagauuacccgggaguucucugugaaugccggugucacaacuccgguguccaccuauaugcugacaaacucagaacuucugagcuugaucaacgacaugcccauuaccaaugaucagaagaaacucaugaguaacaaugugcaaaucguccgccagcagucuuacuccaucaugugcauuauaaaggaggaaguucuggcauaugugguacaguuaccucuguacggggugaucgacacgccauguuggaaacuccauacuagcccccuuugcacaaccaacacuaaggagggaucgaauauuugucugacacgaaccgaucguggcugguacugcgacaacgcuggcucugucuccuuuuucccucaagccgaaacguguaaggugugcucaaauagaguguuuugcgauaccaugaacaguuugacacuaccaagcgagguuaaucuguguaacaucgacauauucaaucccaaauaugauugcaagauuaugacuuccaaaaccgacgucucuagcucagugaucacaagucucggggcaaucguauccuguuacggaaagacuaaaugcaccgcuagcaacaagaauaaggguauuaucaaaacauuuucuaacggcugugauuauguuucaaauaaggggguggacaccgucagugugggaaacacucuguacuaugucaacaaacaggagggcaagagccuuuacgugaaaggugaaccuauuauaaauuucuaugacccacugguuuuuccguccgaugaguucgacgccucuaucagccaggugaacgaaaagauuaaucaaucguuggcguuuaucaggaaguccgaugagcuccugcacaacguaaaugucgggaaaucaacgacaaacaucaugauuaccacuauaaucauugugaucauuguuaucuuacugcuacucauagccgugggacuguuccuuuacugcaaggcacggaguacccccgucacauugucuaaagaccagcugagcggcaucaauaacauugcuuucuccaauugaggacuaguaauaaggaaacuguaugaaugucugugggcaggaagugaagagauccuucuguaaagguuuuuggaauuaugucugcugaauaauaaacuuuuuugaaauaauaaaucugguagaaaaaugagaucuaaaaaaaaaaaaaaaaaaaaaaaaaaaaaaaaaaaaaaaaaaaaaaaaaaaaaaaaaaaaaaaaugcaucccccccccccccccccccccccccccccccaaaggcucuuuucagagccaccagaauu

SEQ ID NO: 18509 - RNA, 1961 nt, Artificial Sequence
  mRNA product Design d-2 comprising derived and/or modified sequence from HRSV(Memphis-37)__AIY60640.1__F_DSCav1_mut7 (opt4)
gggagagcggcucggccauuuugucccagucaguccggaggcugcggcugcagaaguaccgccugcggaguaacugcaaagaagcuuaccauggagcugcccauccugaagaccaacgccaucaccaccauccuggccgccgugacccugugcuucgccagcagccagaacaucaccgaggaguucuaccagagcaccugcagcgccgugagcaagggcuaccugagcgcccugagaaccggcugguacaccagcgugaucaccaucgagcugagcaacaucaaggagaacaagugcaacggcaccgacgccaaggugaagcugaucaagcaggagcuggacaaguacaagaacgccgugaccgagcugcagaugcugaugugcagcacccccgccgccggcagcggcagcgccaucgccagcggcaucgccgugugcaaggugcugcaccuggagggcgaggugaacaagaucaagaacgcccugcugagcaccaacaaggccguggugagccugagcaacggcgugagcgugcugaccuucaaggugcuggaccugaagaacuacaucgacaagcagcugcugcccauccugaacaagcagagcugcagcaucagcaacaucgagaccgugauggaguuccagcagaagaacaacagacugcuggagaucaccagagaguucagcgugaacgccggcgugaccacccccgugagcaccuacaugcugaccaacagcgagcugcugagccugaucaacgacaugcccaucaccaacgaccagaagaagcugaugagcaacaacgugcagaucgugagacagcagagcuacagcaucaugugcaucaucaaggaggaggugcuggccuacguggugcagcugccccuguacggcgugaucgacacccccugcuggaagcugcacaccagcccccugugcaccaccaacaccaaggagggcagcaacaucugccugaccagaaccgacagaggcugguacugcgacaacgccggcagcgugagcuucuucccccaggccgagaccugcaaggugugcagcaacagaguguucugcgacaccaugaacagccugacccugcccagcgaggugaaccugugcaacaucgacaucuucaaccccaaguacgacugcaagaucaugaccagcaagaccgacgugagcagcagcgugaucaccagccugggcgccaucgugagcugcuacggcaagaccaagugcaccgccagcaacaagaacaagggcaucaucaagaccuucagcaacggcugcgacuacgugagcaacaagggcguggacaccgugagcgugggcaacacccuguacuacgugaacaagcaggagggcaagagccuguacgugaagggcgagcccaucaucaacuucuacgacccccugguguuccccagcgacgaguucgacgccagcaucagccaggugaacgagaagaucaaccagagccuggccuucaucagaaagagcgacgagcugcugcacaacgugaacgugggcaagagcaccaccaacaucaugaucaccaccaucaucaucgugaucaucgugauccugcugcugcugaucgccgugggccuguuccuguacugcaaggccagaagcacccccgugacccugagcaaggaccagcugagcggcaucaacaacaucgccuucagcaacugaggacuaguaauaaggaaacuguaugaaugucugugggcaggaagugaagagauccuucuguaaagguuuuuggaauuaugucugcugaauaauaaacuuuuuugaaauaauaaaucugguagaaaaaugagaucuaaaaaaaaaaaaaaaaaaaaaaaaaaaaaaaaaaaaaaaaaaaaaaaaaaaaaaaaaaaaaaaaugcaucccccccccccccccccccccccccccccccaaaggcucuuuucagagccaccagaauu

SEQ ID NO: 18510 - RNA, 1961 nt, Artificial Sequence
  mRNA product Design d-2 comprising derived and/or modified sequence from HRSV(Memphis-37)__AIY60640.1__F_DSCav1_mut7 (opt5)
gggagagcggcucggccauuuugucccagucaguccggaggcugcggcugcagaaguaccgccugcggaguaacugcaaagaagcuuaccauggagcugcccauccucaagaccaacgccauuacaacgauccuggcugccgugacccuuugcuucgcgagcucccagaauauuacagaagaguuuuaccaaucuaccuguagcgcugucuccaaaggcuaucugucugcccucagaacagggugguacaccagcguuaucacaauugaacuguccaacaucaaggagaauaaaugcaacggaaccgacgccaaggugaaacuuaucaagcaggaacuggauaaguauaaaaaugcugugacggagcuccagaugcugauguguucuaccccugccgcuggcagcggguccgccauugcgagcggaaucgccgucugcaaggugcugcaccucgagggcgaaguuaacaaaauuaagaaugcucugcuuucuacaaacaaagccguggucucccugagcaauggggugucuguucucaccuucaaggugcuggaccuuaagaacuacaucgauaaacagcugcucccgauucugaauaagcaauccuguagcaucucuaacauugagacagucauggaauuucagcagaaaaauaaccggcugcucgagaucacccgcgaguucuccgugaaugcuggagugacgacacccgucagcaccuauaugcugacaaacuccgaacuucugucucucaucaacgacaugccuauuaccaaugaucagaagaaacugaugagcaacaauguucaaaucgugagacagcaguccuacagcauuaugugcaucauuaaggaggaagugcuugccuaugucgugcagcugccccucuacggcguuaucgacaccccuuguuggaaacugcauacaucuccccugugcacgaccaacacaaaggagggcuccaauaucugucucacccggacagaucgcgggugguacugcgacaacgcgggaagcgugagcuuuuucccucaagccgaaaccuguaaggucugcucuaauagaguguuuugcgauacgaugaacucccugacacuuccgucugagguuaaucuguguaacauugacaucuucaaucccaaauaugauugcaagauuaugaccagcaaaaccgacguguccagcucugucaucacaucccucggcgcuauugugagcuguuacgggaagaccaaaugcacagccucuaacaagaauaagggaaucaucaaaacguuuuccaacggcugugauuaugucagcaauaaggggguggacaccguuuccgugggaaacacacuguacuaugucaacaaacaggagggcaagucucuuuacgugaaaggcgaaccuauuaucaauuucuaugacccccugguuuuuccuagcgaugaguucgacgcuuccauuucucaggugaacgaaaagaucaaucaaagccucgccuuuauucggaaguccgaugagcugcugcacaacgucaauguggggaaaagcaccacaaacaucaugauuaccacgaucaucauugugaucauuguuauccuccugcuucugauugccgucggacucuuccuguacugcaaggcucgcucuacccccgugacacuguccaaagaccagcuuagcggcaucaauaacaucgcguucucuaauugaggacuaguaauaaggaaacuguaugaaugucugugggcaggaagugaagagauccuucuguaaagguuuuuggaauuaugucugcugaauaauaaacuuuuuugaaauaauaaaucugguagaaaaaugagaucuaaaaaaaaaaaaaaaaaaaaaaaaaaaaaaaaaaaaaaaaaaaaaaaaaaaaaaaaaaaaaaaaugcaucccccccccccccccccccccccccccccccaaaggcucuuuucagagccaccagaauu

SEQ ID NO: 18511 - RNA, 1961 nt, Artificial Sequence
  mRNA product Design d-2 comprising derived and/or modified sequence from HRSV(Memphis-37)__AIY60640.1__F_DSCav1_mut7 (opt6)
gggagagcggcucggccauuuugucccagucaguccggaggcugcggcugcagaaguaccgccugcggaguaacugcaaagaagcuuaccauggaacuaccaauacucaaaacaaaugcuauaaccacaauacucgcagcaguaacauuauguuucgcaucaucccaaaacauaacagaagaauuuuaucaaucaaccuguucagcaguauccaaaggauaccuaagugcauuaagaaccggaugguacacaucaguaauaaccauagaacuuucaaacauaaaagaaaacaaauguaacggcacagacgcaaaagucaaacucaucaaacaggaacuugacaaauauaaaaacgcaguaaccgaacuacaaaugcuaaugugcucaacaccagcagcaggaucaggaucagcaauugcaucuggaauagcuguaugcaaaguccuacaccuagaaggagaaguaaacaaaaucaaaaacgcauuacucuccacaaacaaagcaguaguaucacuaucaaacggaguuucaguacuaaccuucaaaguauuagaccuaaaaaacuacauagacaaacaacuacuaccuauacuaaacaaacaauccuguucaauaagcaacauugaaacuguaauggaauuucaacaaaaaaacaaccgccuauuagaaauaaccagagaauuuuccguaaaugcaggaguaaccacaccagucucuacauacauguuaaccaacucagaacuauuaucacucauaaaugacaugccuauaacaaacgaccaaaaaaaacuaaugucaaacaacguacaaauaguaagacaacaaucauauuccauaaugugcauaauaaaagaagaaguacuugcauacgugguucaacuaccccuauauggaguuauagacacaccaugcuggaaacuccacacuuccccacuuugcacaacuaacacaaaagaaggaucaaauauaugccuaaccagaacagaccguggaugguacugcgacaacgcuggaucagucuccuucuuuccacaagcagaaaccugcaaagucugcucaaauagagucuucugugacacaaugaacucacucacccuacccucagaaguaaaccuauguaauauagauauauuuaauccaaaauacgacugcaaaauuaugacaaguaaaacagacguaagcucaucagucauaaccagccuaggagcaauaguauccuguuacggcaaaacaaaaugcacagcuucaaacaaaaacaaaggcauaauaaaaacauucucaaacggaugugacuauguaucaaauaaaggaguugacacaguaucaguuggaaacacacuauacuauguaaacaaacaagaaggaaaaucacuauacguuaaaggcgaacccauaaucaauuucuacgacccccuagucuucccauccgaugaauuugacgcaucaauaucccaaguaaaugaaaaaaucaaccaaucccuagcauuuauacgaaaauccgacgaacuacuccauaaugucaacgucgguaaaucaacgacaaacaucaugaucacaacaauaauaauaguaauaauuguaauauuacucuuacucauagcaguaggccuauuucuauauugcaaagccagaucaacaccaguaaccuuauccaaagaccaacuaucuggaauaaacaacauagcauuuuccaacugaggacuaguaauaaggaaacuguaugaaugucugugggcaggaagugaagagauccuucuguaaagguuuuuggaauuaugucugcugaauaauaaacuuuuuugaaauaauaaaucugguagaaaaaugagaucuaaaaaaaaaaaaaaaaaaaaaaaaaaaaaaaaaaaaaaaaaaaaaaaaaaaaaaaaaaaaaaaaugcaucccccccccccccccccccccccccccccccaaaggcucuuuucagagccaccagaauu

SEQ ID NO: 18512 - RNA, 1961 nt, Artificial Sequence
  mRNA product Design d-2 comprising derived and/or modified sequence from HRSV(Memphis-37)__AIY60640.1__F_DSCav1_mut7 (opt11)
gggagagcggcucggccauuuugucccagucaguccggaggcugcggcugcagaaguaccgccugcggaguaacugcaaagaagcuuaccauggaacuccccauacuuaaaacaaacgccauaacaacuauacucgcagccgucacccucuguuucgcauccucucaaaacaucaccgaagaguucuaucaaucaaccugcuccgccgucucaaaaggcuaccucuccgcccuacgcacaggcugguacaccagcgucauuaccauagaacucucgaacaucaaagaaaacaaaugcaacggcaccgacgcaaaagugaaacucaucaaacaagaacucgacaaauacaaaaacgccgucaccgaacuucagaugcucaugugcuccaccccugccgccggcagcggcuccgccauagccuccggcaucgcagucugcaaaguccuccaccucgaaggagaaguaaacaaaaucaaaaaugcucuccucuccacaaacaaagccgucgucucacucuccaauggagucuccguccucaccuucaaaguccucgaccucaaaaacuacauagacaaacaacuacuccccauccucaacaagcaauccugcucuaucuccaacauagaaaccguuauggaguuccaacagaaaaauaaccgccugcuagaaauaacccgagaguucuccgucaacgcaggcgucacuacccccgucagcacauacaugcuaacaaacuccgaacugcucucccuuaucaacgacaugcccaucacaaacgaucagaaaaagcucaugucuaacaacguacaaaucguucggcaacaauccuacuccaucaugugcaucaucaaagaagaagugcucgccuacguaguccaacucccccucuacggagucaucgacacacccugcuggaaacuccacacaucaccccucugcaccaccaacacaaaagaaggguccaacaucugccucacgcgcaccgaccgaggcugguacugcgacaacgccggcuccguauccuucuucccccaagcagaaaccugcaaggucugcuccaaccgcguauucugcgacaccaugaacucgcucacccuccccucagaagucaaccuauguaacaucgacauauucaaucccaaauacgacugcaagauaaugacuuccaaaaccgacguaagcuccucggucaucaccucccucggcgccaucgucuccugcuacggcaaaaccaaaugcaccgccuccaauaagaauaaaggcauaauaaagacauucagcaacggcugcgauuacgucuccaacaaaggugucgacaccgucucagucggcaacacucuauacuacgugaacaaacaagaaggcaaaagccuauacguuaaaggcgaaccaauaaucaauuucuacgacccucuagucuuucccucugacgaguucgaugccagcauaagccaagucaacgaaaagaucaaccaaucacucgccuucauccguaaauccgacgaacugcuccacaaugucaauguaggcaaaucaacaaccaacaucaugaucaccacuauuaucaucgucaucaucguaauccuacuccuacuaaucgccgucggccuauuccucuacugcaaagcccgcucgacccccgucacucucagcaaggaucaacuauccggcaucaacaacaucgccuucuccaacuaaggacuaguaauaaggaaacuguaugaaugucugugggcaggaagugaagagauccuucuguaaagguuuuuggaauuaugucugcugaauaauaaacuuuuuugaaauaauaaaucugguagaaaaaugagaucuaaaaaaaaaaaaaaaaaaaaaaaaaaaaaaaaaaaaaaaaaaaaaaaaaaaaaaaaaaaaaaaaugcaucccccccccccccccccccccccccccccccaaaggcucuuuucagagccaccagaauu

SEQ ID NO: 18513 - RNA, 2277 nt, Artificial Sequence
  mRNA product Design d-3 comprising derived and/or modified sequence from HRSV(Memphis-37)__AIY60640.1__F_DSCav1_mut7 (opt1)
gggagagggcgcuuggcuugcaaggacccugagcugcggcauugaagcacacccaacccaacucgacugaagucagccucacugaaccggaucugagaaucuucucucucugggcuugccagggcucuccgaaccuagcuagcauccucuucaauuccaacuagaaagcuuaccauggagcugcccauccucaagaccaacgccaucaccacgauccuggccgcggugacccugugcuucgccagcucccagaacaucaccgaggaguucuaccagagcacgugcuccgccgucagcaagggcuaccucuccgcccugcgcaccgggugguacaccagcgugaucaccaucgagcuguccaacaucaaggagaacaagugcaacggcaccgacgccaaggugaagcucaucaagcaggagcuggacaaguacaagaacgcggucacggagcugcagaugcugaugugcagcaccccggccgccggcuccgggagcgcgaucgccuccggcaucgccgucugcaaggugcugcaccucgagggcgaggugaacaagaucaagaacgcccugcuguccaccaacaaggccgucgugagccucuccaacggggugagcguccugaccuucaaggugcuggaccucaagaacuacaucgacaagcagcugcugcccauccugaacaagcagagcugcuccaucagcaacaucgagaccgucauggaguuccagcagaagaacaaccgccuccuggagaucacgcgggaguucagcgugaacgcgggcgugaccacccccgucuccaccuacaugcugacgaacagcgagcuccugucccugaucaacgacaugccgaucaccaacgaccagaagaagcucaugagcaacaacgugcagaucgugcgccagcaguccuacagcaucaugugcaucaucaaggaggagguccuggccuacguggugcagcugccccucuacggggucaucgacacccccugcuggaagcugcacaccagcccccugugcacgaccaacaccaaggagggcuccaacaucugccucacccggacggaccgcgggugguacugcgacaacgccggcagcguguccuucuucccgcaggccgagaccugcaaggucugcagcaaccggguguucugcgacaccaugaacucccugacccugcccagcgaggugaaccucugcaacaucgacaucuucaaccccaaguacgacugcaagaucaugacguccaagaccgacgucagcuccagcgugaucaccucccugggcgccaucgugagcugcuacgggaagaccaagugcacggcgagcaacaagaacaagggcaucaucaagaccuucuccaacgggugcgacuacgucagcaacaagggcguggacaccguguccgucggcaacacccuguacuacgugaacaagcaggagggcaagagccucuacgugaagggggagcccaucaucaacuucuacgacccgcuggucuuccccuccgacgaguucgacgccagcaucucccaggugaacgagaagaucaaccagagccuggccuucauccggaaguccgacgagcuccugcacaacgugaacgucggcaagagcaccacgaacaucaugaucaccaccaucaucaucgugaucaucgugauccugcugcuccugaucgccgucgggcuguuccucuacugcaaggcccgcuccacccccgugacgcugagcaaggaccagcuguccgggaucaacaacaucgcguucagcaacugaggacuagugaagggaacacccaaauuuaauucagccuuaagcacaauuaauuaagagugaaacguaauuguacaagcaguuggucacccaccauagggcaugaucaacaccgcaaccuuuccuuuuucccccagugauucugaaaaaccccucuucccuucagcuugcuuagauguuccaaauuuaguaagcuuaaggcggccuacagaagaaaaagaaaaaaaaggccacaaaaguucccucucacuuucaguaaauaaaauaaaagcagcaacagaaauaaagaaauaaaugaaauucaaaaugaaauaaauauuguguugugcagcauuaaaaaaucaauaaaaauuaaaaaugagcaagaucuaaaaaaaaaaaaaaaaaaaaaaaaaaaaaaaaaaaaaaaaaaaaaaaaaaaaaaaaaaaaaaaaugcaucccccccccccccccccccccccccccccccaaaggcucuuuucagagccaccagaauu

SEQ ID NO: 18514 - RNA, 2277 nt, Artificial Sequence
  mRNA product Design d-3 comprising derived and/or modified sequence from HRSV(Memphis-37)__AIY60640.1__F_DSCav1_mut7 (opt1)
gggagagggcgcuuggcuugcaaggacccugagcugcggcauugaagcacacccaacccaacucgacugaagucagccucacugaaccggaucugagaaucuucucucucugggcuugccagggcucuccgaaccuagcuagcauccucuucaauuccaacuagaaagcuuaccauggagcugcccauccucaagaccaacgccaucaccacgauccuggccgcggugacccugugcuucgccagcucccagaacaucaccgaggaguucuaccagagcacgugcuccgccgucagcaagggcuaccucuccgcccugcgcaccgggugguacaccagcgugaucaccaucgagcuguccaacaucaaggagaacaagugcaacggcaccgacgccaaggugaagcucaucaagcaggagcuggacaaguacaagaacgcggucacggagcugcagaugcucaugugcagcaccccggccgccggguccggcagcgccaucgcguccgggaucgccgugugcaaggugcugcaccuggagggcgaggucaacaagaucaagaacgcccuccugagcaccaacaaggccguggugucccugagcaacggcgucuccgugcucaccuucaaggugcuggaccugaagaacuacaucgacaagcagcuccugcccauccugaacaagcagagcugcuccaucagcaacaucgagacggucauggaguuccagcagaagaacaaccggcuccuggagaucacccgcgaguucuccgugaacgccggggugaccacccccgucagcacguacaugcugaccaacagcgagcuccugucccugaucaacgacaugcccaucaccaacgaccagaagaagcucaugagcaacaacgugcagaucgugcggcagcaguccuacagcaucaugugcaucaucaaggaggagguccuggcguacguggugcagcugccgcucuacggcgucaucgacacccccugcuggaagcugcacacgagcccccugugcaccaccaacaccaaggaggggagcaacaucugccucacgcgcaccgaccggggcugguacugcgacaacgccggguccgugagcuucuucccccaggccgagaccugcaaggugugcuccaaccgcgucuucugcgacaccaugaacagccugacgcugccguccgaggugaaccucugcaacaucgacaucuucaaccccaaguacgacugcaagaucaugaccagcaagaccgacgucuccagcuccgugaucaccagccugggcgccaucguguccugcuacggcaagacgaagugcaccgccagcaacaagaacaaggggaucaucaagaccuucuccaacggcugcgacuacgucagcaacaaggggguggacaccgugagcgucggcaacacgcuguacuacgugaacaagcaggagggcaagucccucuacgugaagggggagcccaucaucaacuucuacgacccccuggucuucccgagcgacgaguucgacgcguccaucagccaggugaacgagaagaucaaccagucccuggccuucauccggaaguccgacgagcuccugcacaacgugaacgucggcaaguccaccaccaacaucaugaucaccaccaucaucaucgugaucaucgugauccugcuccugcugaucgccgucggccucuuccuguacugcaaggcccgcagcacgcccgugacccuguccaaggaccagcugagcgggaucaacaacaucgccuucuccaacugaggacuagugaagggaacacccaaauuuaauucagccuuaagcacaauuaauuaagagugaaacguaauuguacaagcaguuggucacccaccauagggcaugaucaacaccgcaaccuuuccuuuuucccccagugauucugaaaaaccccucuucccuucagcuugcuuagauguuccaaauuuaguaagcuuaaggcggccuacagaagaaaaagaaaaaaaaggccacaaaaguucccucucacuuucaguaaauaaaauaaaagcagcaacagaaauaaagaaauaaaugaaauucaaaaugaaauaaauauuguguugugcagcauuaaaaaaucaauaaaaauuaaaaaugagcaagaucuaaaaaaaaaaaaaaaaaaaaaaaaaaaaaaaaaaaaaaaaaaaaaaaaaaaaaaaaaaaaaaaaugcaucccccccccccccccccccccccccccccccaaaggcucuuuucagagccaccagaauu

SEQ ID NO: 18515 - RNA, 2277 nt, Artificial Sequence
  mRNA product Design d-3 comprising derived and/or modified sequence from HRSV(Memphis-37)__AIY60640.1__F_DSCav1_mut7 (opt2)
gggagagggcgcuuggcuugcaaggacccugagcugcggcauugaagcacacccaacccaacucgacugaagucagccucacugaaccggaucugagaaucuucucucucugggcuugccagggcucuccgaaccuagcuagcauccucuucaauuccaacuagaaagcuuaccauggagcuccccauccucaagaccaacgccaucaccaccauccucgccgccgucacccucugcuucgccuccucccagaacaucaccgaggaguucuaccaguccaccugcuccgccgucuccaagggcuaccucuccgcccuccgcaccggcugguacaccuccgucaucaccaucgagcucuccaacaucaaggagaacaagugcaacggcaccgacgccaaggucaagcucaucaagcaggagcucgacaaguacaagaacgccgucaccgagcuccagaugcucaugugcuccacccccgccgccggcuccggcuccgccaucgccuccggcaucgccgucugcaagguccuccaccucgagggcgaggucaacaagaucaagaacgcccuccucuccaccaacaaggccgucgucucccucuccaacggcgucuccguccucaccuucaagguccucgaccucaagaacuacaucgacaagcagcuccuccccauccucaacaagcaguccugcuccaucuccaacaucgagaccgucauggaguuccagcagaagaacaaccgccuccucgagaucacccgcgaguucuccgucaacgccggcgucaccacccccgucuccaccuacaugcucaccaacuccgagcuccucucccucaucaacgacaugcccaucaccaacgaccagaagaagcucauguccaacaacguccagaucguccgccagcaguccuacuccaucaugugcaucaucaaggaggagguccucgccuacgucguccagcucccccucuacggcgucaucgacacccccugcuggaagcuccacaccuccccccucugcaccaccaacaccaaggagggcuccaacaucugccucacccgcaccgaccgcggcugguacugcgacaacgccggcuccgucuccuucuucccccaggccgagaccugcaaggucugcuccaaccgcgucuucugcgacaccaugaacucccucacccuccccuccgaggucaaccucugcaacaucgacaucuucaaccccaaguacgacugcaagaucaugaccuccaagaccgacgucuccuccuccgucaucaccucccucggcgccaucgucuccugcuacggcaagaccaagugcaccgccuccaacaagaacaagggcaucaucaagaccuucuccaacggcugcgacuacgucuccaacaagggcgucgacaccgucuccgucggcaacacccucuacuacgucaacaagcaggagggcaagucccucuacgucaagggcgagcccaucaucaacuucuacgacccccucgucuuccccuccgacgaguucgacgccuccaucucccaggucaacgagaagaucaaccagucccucgccuucauccgcaaguccgacgagcuccuccacaacgucaacgucggcaaguccaccaccaacaucaugaucaccaccaucaucaucgucaucaucgucauccuccuccuccucaucgccgucggccucuuccucuacugcaaggcccgcuccacccccgucacccucuccaaggaccagcucuccggcaucaacaacaucgccuucuccaacugaggacuagugaagggaacacccaaauuuaauucagccuuaagcacaauuaauuaagagugaaacguaauuguacaagcaguuggucacccaccauagggcaugaucaacaccgcaaccuuuccuuuuucccccagugauucugaaaaaccccucuucccuucagcuugcuuagauguuccaaauuuaguaagcuuaaggcggccuacagaagaaaaagaaaaaaaaggccacaaaaguucccucucacuuucaguaaauaaaauaaaagcagcaacagaaauaaagaaauaaaugaaauucaaaaugaaauaaauauuguguugugcagcauuaaaaaaucaauaaaaauuaaaaaugagcaagaucuaaaaaaaaaaaaaaaaaaaaaaaaaaaaaaaaaaaaaaaaaaaaaaaaaaaaaaaaaaaaaaaaugcaucccccccccccccccccccccccccccccccaaaggcucuuuucagagccaccagaauu

SEQ ID NO: 18516 - RNA, 2277 nt, Artificial Sequence
  mRNA product Design d-3 comprising derived and/or modified sequence from HRSV(Memphis-37)__AIY60640.1__F_DSCav1_mut7 (opt3)
gggagagggcgcuuggcuugcaaggacccugagcugcggcauugaagcacacccaacccaacucgacugaagucagccucacugaaccggaucugagaaucuucucucucugggcuugccagggcucuccgaaccuagcuagcauccucuucaauuccaacuagaaagcuuaccauggagcugcccauccucaagaccaacgccauuacaacuauacuugcugcagugacgcugugcuucgccagcucccagaauaucaccgaagaguuuuaccaaucuacauguucagcggucaguaaaggcuauuugagcgcuuuaagaacugggugguacaccuccguuauuacaaucgaacugucuaacauuaaggagaauaaaugcaacggaaccgacgccaaggugaaacuaaucaagcaggaacucgauaaguauaaaaaugcaguaacugagcugcagaugcuuauguguucgaccccugccgcugguucaggcagcgcaauagccagugggaucgcugugugcaagguccugcacuuggagggagaagugaacaaaauuaagaaugcccuccuguccacaaacaaagcgguugugucucugagcaauggcgucuccgugcucacguucaagguauuagaccugaagaacuacaucgauaaacagcuuuugccaauucugaauaagcaaucauguaguaucagcaacauagagacuguuauggaauuucagcagaaaaauaacaggcuacucgagauuacccgggaguucucugugaaugccggugucacaacuccgguguccaccuauaugcugacaaacucagaacuucugagcuugaucaacgacaugcccauuaccaaugaucagaagaaacucaugaguaacaaugugcaaaucguccgccagcagucuuacuccaucaugugcauuauaaaggaggaaguucuggcauaugugguacaguuaccucuguacggggugaucgacacgccauguuggaaacuccauacuagcccccuuugcacaaccaacacuaaggagggaucgaauauuugucugacacgaaccgaucguggcugguacugcgacaacgcuggcucugucuccuuuuucccucaagccgaaacguguaaggugugcucaaauagaguguuuugcgauaccaugaacaguuugacacuaccaagcgagguuaaucuguguaacaucgacauauucaaucccaaauaugauugcaagauuaugacuuccaaaaccgacgucucuagcucagugaucacaagucucggggcaaucguauccuguuacggaaagacuaaaugcaccgcuagcaacaagaauaaggguauuaucaaaacauuuucuaacggcugugauuauguuucaaauaaggggguggacaccgucagugugggaaacacucuguacuaugucaacaaacaggagggcaagagccuuuacgugaaaggugaaccuauuauaaauuucuaugacccacugguuuuuccguccgaugaguucgacgccucuaucagccaggugaacgaaaagauuaaucaaucguuggcguuuaucaggaaguccgaugagcuccugcacaacguaaaugucgggaaaucaacgacaaacaucaugauuaccacuauaaucauugugaucauuguuaucuuacugcuacucauagccgugggacuguuccuuuacugcaaggcacggaguacccccgucacauugucuaaagaccagcugagcggcaucaauaacauugcuuucuccaauugaggacuagugaagggaacacccaaauuuaauucagccuuaagcacaauuaauuaagagugaaacguaauuguacaagcaguuggucacccaccauagggcaugaucaacaccgcaaccuuuccuuuuucccccagugauucugaaaaaccccucuucccuucagcuugcuuagauguuccaaauuuaguaagcuuaaggcggccuacagaagaaaaagaaaaaaaaggccacaaaaguucccucucacuuucaguaaauaaaauaaaagcagcaacagaaauaaagaaauaaaugaaauucaaaaugaaauaaauauuguguugugcagcauuaaaaaaucaauaaaaauuaaaaaugagcaagaucuaaaaaaaaaaaaaaaaaaaaaaaaaaaaaaaaaaaaaaaaaaaaaaaaaaaaaaaaaaaaaaaaugcaucccccccccccccccccccccccccccccccaaaggcucuuuucagagccaccagaauu

SEQ ID NO: 18517 - RNA, 2277 nt, Artificial Sequence
  mRNA product Design d-3 comprising derived and/or modified sequence from HRSV(Memphis-37)__AIY60640.1__F_DSCav1_mut7 (opt4)
gggagagggcgcuuggcuugcaaggacccugagcugcggcauugaagcacacccaacccaacucgacugaagucagccucacugaaccggaucugagaaucuucucucucugggcuugccagggcucuccgaaccuagcuagcauccucuucaauuccaacuagaaagcuuaccauggagcugcccauccugaagaccaacgccaucaccaccauccuggccgccgugacccugugcuucgccagcagccagaacaucaccgaggaguucuaccagagcaccugcagcgccgugagcaagggcuaccugagcgcccugagaaccggcugguacaccagcgugaucaccaucgagcugagcaacaucaaggagaacaagugcaacggcaccgacgccaaggugaagcugaucaagcaggagcuggacaaguacaagaacgccgugaccgagcugcagaugcugaugugcagcacccccgccgccggcagcggcagcgccaucgccagcggcaucgccgugugcaaggugcugcaccuggagggcgaggugaacaagaucaagaacgcccugcugagcaccaacaaggccguggugagccugagcaacggcgugagcgugcugaccuucaaggugcuggaccugaagaacuacaucgacaagcagcugcugcccauccugaacaagcagagcugcagcaucagcaacaucgagaccgugauggaguuccagcagaagaacaacagacugcuggagaucaccagagaguucagcgugaacgccggcgugaccacccccgugagcaccuacaugcugaccaacagcgagcugcugagccugaucaacgacaugcccaucaccaacgaccagaagaagcugaugagcaacaacgugcagaucgugagacagcagagcuacagcaucaugugcaucaucaaggaggaggugcuggccuacguggugcagcugccccuguacggcgugaucgacacccccugcuggaagcugcacaccagcccccugugcaccaccaacaccaaggagggcagcaacaucugccugaccagaaccgacagaggcugguacugcgacaacgccggcagcgugagcuucuucccccaggccgagaccugcaaggugugcagcaacagaguguucugcgacaccaugaacagccugacccugcccagcgaggugaaccugugcaacaucgacaucuucaaccccaaguacgacugcaagaucaugaccagcaagaccgacgugagcagcagcgugaucaccagccugggcgccaucgugagcugcuacggcaagaccaagugcaccgccagcaacaagaacaagggcaucaucaagaccuucagcaacggcugcgacuacgugagcaacaagggcguggacaccgugagcgugggcaacacccuguacuacgugaacaagcaggagggcaagagccuguacgugaagggcgagcccaucaucaacuucuacgacccccugguguuccccagcgacgaguucgacgccagcaucagccaggugaacgagaagaucaaccagagccuggccuucaucagaaagagcgacgagcugcugcacaacgugaacgugggcaagagcaccaccaacaucaugaucaccaccaucaucaucgugaucaucgugauccugcugcugcugaucgccgugggccuguuccuguacugcaaggccagaagcacccccgugacccugagcaaggaccagcugagcggcaucaacaacaucgccuucagcaacugaggacuagugaagggaacacccaaauuuaauucagccuuaagcacaauuaauuaagagugaaacguaauuguacaagcaguuggucacccaccauagggcaugaucaacaccgcaaccuuuccuuuuucccccagugauucugaaaaaccccucuucccuucagcuugcuuagauguuccaaauuuaguaagcuuaaggcggccuacagaagaaaaagaaaaaaaaggccacaaaaguucccucucacuuucaguaaauaaaauaaaagcagcaacagaaauaaagaaauaaaugaaauucaaaaugaaauaaauauuguguugugcagcauuaaaaaaucaauaaaaauuaaaaaugagcaagaucuaaaaaaaaaaaaaaaaaaaaaaaaaaaaaaaaaaaaaaaaaaaaaaaaaaaaaaaaaaaaaaaaugcaucccccccccccccccccccccccccccccccaaaggcucuuuucagagccaccagaauu

SEQ ID NO: 18518 - RNA, 2277 nt, Artificial Sequence
  mRNA product Design d-3 comprising derived and/or modified sequence from HRSV(Memphis-37)__AIY60640.1__F_DSCav1_mut7 (opt5)
gggagagggcgcuuggcuugcaaggacccugagcugcggcauugaagcacacccaacccaacucgacugaagucagccucacugaaccggaucugagaaucuucucucucugggcuugccagggcucuccgaaccuagcuagcauccucuucaauuccaacuagaaagcuuaccauggagcugcccauccucaagaccaacgccauuacaacgauccuggcugccgugacccuuugcuucgcgagcucccagaauauuacagaagaguuuuaccaaucuaccuguagcgcugucuccaaaggcuaucugucugcccucagaacagggugguacaccagcguuaucacaauugaacuguccaacaucaaggagaauaaaugcaacggaaccgacgccaaggugaaacuuaucaagcaggaacuggauaaguauaaaaaugcugugacggagcuccagaugcugauguguucuaccccugccgcuggcagcggguccgccauugcgagcggaaucgccgucugcaaggugcugcaccucgagggcgaaguuaacaaaauuaagaaugcucugcuuucuacaaacaaagccguggucucccugagcaauggggugucuguucucaccuucaaggugcuggaccuuaagaacuacaucgauaaacagcugcucccgauucugaauaagcaauccuguagcaucucuaacauugagacagucauggaauuucagcagaaaaauaaccggcugcucgagaucacccgcgaguucuccgugaaugcuggagugacgacacccgucagcaccuauaugcugacaaacuccgaacuucugucucucaucaacgacaugccuauuaccaaugaucagaagaaacugaugagcaacaauguucaaaucgugagacagcaguccuacagcauuaugugcaucauuaaggaggaagugcuugccuaugucgugcagcugccccucuacggcguuaucgacaccccuuguuggaaacugcauacaucuccccugugcacgaccaacacaaaggagggcuccaauaucugucucacccggacagaucgcgggugguacugcgacaacgcgggaagcgugagcuuuuucccucaagccgaaaccuguaaggucugcucuaauagaguguuuugcgauacgaugaacucccugacacuuccgucugagguuaaucuguguaacauugacaucuucaaucccaaauaugauugcaagauuaugaccagcaaaaccgacguguccagcucugucaucacaucccucggcgcuauugugagcuguuacgggaagaccaaaugcacagccucuaacaagaauaagggaaucaucaaaacguuuuccaacggcugugauuaugucagcaauaaggggguggacaccguuuccgugggaaacacacuguacuaugucaacaaacaggagggcaagucucuuuacgugaaaggcgaaccuauuaucaauuucuaugacccccugguuuuuccuagcgaugaguucgacgcuuccauuucucaggugaacgaaaagaucaaucaaagccucgccuuuauucggaaguccgaugagcugcugcacaacgucaauguggggaaaagcaccacaaacaucaugauuaccacgaucaucauugugaucauuguuauccuccugcuucugauugccgucggacucuuccuguacugcaaggcucgcucuacccccgugacacuguccaaagaccagcuuagcggcaucaauaacaucgcguucucuaauugaggacuagugaagggaacacccaaauuuaauucagccuuaagcacaauuaauuaagagugaaacguaauuguacaagcaguuggucacccaccauagggcaugaucaacaccgcaaccuuuccuuuuucccccagugauucugaaaaaccccucuucccuucagcuugcuuagauguuccaaauuuaguaagcuuaaggcggccuacagaagaaaaagaaaaaaaaggccacaaaaguucccucucacuuucaguaaauaaaauaaaagcagcaacagaaauaaagaaauaaaugaaauucaaaaugaaauaaauauuguguugugcagcauuaaaaaaucaauaaaaauuaaaaaugagcaagaucuaaaaaaaaaaaaaaaaaaaaaaaaaaaaaaaaaaaaaaaaaaaaaaaaaaaaaaaaaaaaaaaaugcaucccccccccccccccccccccccccccccccaaaggcucuuuucagagccaccagaauu

SEQ ID NO: 18519 - RNA, 2277 nt, Artificial Sequence
  mRNA product Design d-3 comprising derived and/or modified sequence from HRSV(Memphis-37)__AIY60640.1__F_DSCav1_mut7 (opt6)
gggagagggcgcuuggcuugcaaggacccugagcugcggcauugaagcacacccaacccaacucgacugaagucagccucacugaaccggaucugagaaucuucucucucugggcuugccagggcucuccgaaccuagcuagcauccucuucaauuccaacuagaaagcuuaccauggaacuaccaauacucaaaacaaaugcuauaaccacaauacucgcagcaguaacauuauguuucgcaucaucccaaaacauaacagaagaauuuuaucaaucaaccuguucagcaguauccaaaggauaccuaagugcauuaagaaccggaugguacacaucaguaauaaccauagaacuuucaaacauaaaagaaaacaaauguaacggcacagacgcaaaagucaaacucaucaaacaggaacuugacaaauauaaaaacgcaguaaccgaacuacaaaugcuaaugugcucaacaccagcagcaggaucaggaucagcaauugcaucuggaauagcuguaugcaaaguccuacaccuagaaggagaaguaaacaaaaucaaaaacgcauuacucuccacaaacaaagcaguaguaucacuaucaaacggaguuucaguacuaaccuucaaaguauuagaccuaaaaaacuacauagacaaacaacuacuaccuauacuaaacaaacaauccuguucaauaagcaacauugaaacuguaauggaauuucaacaaaaaaacaaccgccuauuagaaauaaccagagaauuuuccguaaaugcaggaguaaccacaccagucucuacauacauguuaaccaacucagaacuauuaucacucauaaaugacaugccuauaacaaacgaccaaaaaaaacuaaugucaaacaacguacaaauaguaagacaacaaucauauuccauaaugugcauaauaaaagaagaaguacuugcauacgugguucaacuaccccuauauggaguuauagacacaccaugcuggaaacuccacacuuccccacuuugcacaacuaacacaaaagaaggaucaaauauaugccuaaccagaacagaccguggaugguacugcgacaacgcuggaucagucuccuucuuuccacaagcagaaaccugcaaagucugcucaaauagagucuucugugacacaaugaacucacucacccuacccucagaaguaaaccuauguaauauagauauauuuaauccaaaauacgacugcaaaauuaugacaaguaaaacagacguaagcucaucagucauaaccagccuaggagcaauaguauccuguuacggcaaaacaaaaugcacagcuucaaacaaaaacaaaggcauaauaaaaacauucucaaacggaugugacuauguaucaaauaaaggaguugacacaguaucaguuggaaacacacuauacuauguaaacaaacaagaaggaaaaucacuauacguuaaaggcgaacccauaaucaauuucuacgacccccuagucuucccauccgaugaauuugacgcaucaauaucccaaguaaaugaaaaaaucaaccaaucccuagcauuuauacgaaaauccgacgaacuacuccauaaugucaacgucgguaaaucaacgacaaacaucaugaucacaacaauaauaauaguaauaauuguaauauuacucuuacucauagcaguaggccuauuucuauauugcaaagccagaucaacaccaguaaccuuauccaaagaccaacuaucuggaauaaacaacauagcauuuuccaacugaggacuagugaagggaacacccaaauuuaauucagccuuaagcacaauuaauuaagagugaaacguaauuguacaagcaguuggucacccaccauagggcaugaucaacaccgcaaccuuuccuuuuucccccagugauucugaaaaaccccucuucccuucagcuugcuuagauguuccaaauuuaguaagcuuaaggcggccuacagaagaaaaagaaaaaaaaggccacaaaaguucccucucacuuucaguaaauaaaauaaaagcagcaacagaaauaaagaaauaaaugaaauucaaaaugaaauaaauauuguguugugcagcauuaaaaaaucaauaaaaauuaaaaaugagcaagaucuaaaaaaaaaaaaaaaaaaaaaaaaaaaaaaaaaaaaaaaaaaaaaaaaaaaaaaaaaaaaaaaaugcaucccccccccccccccccccccccccccccccaaaggcucuuuucagagccaccagaauu

SEQ ID NO: 18520 - RNA, 2277 nt, Artificial Sequence
  mRNA product Design d-3 comprising derived and/or modified sequence from HRSV(Memphis-37)__AIY60640.1__F_DSCav1_mut7 (opt11)
gggagagggcgcuuggcuugcaaggacccugagcugcggcauugaagcacacccaacccaacucgacugaagucagccucacugaaccggaucugagaaucuucucucucugggcuugccagggcucuccgaaccuagcuagcauccucuucaauuccaacuagaaagcuuaccauggaacuccccauacuuaaaacaaacgccauaacaacuauacucgcagccgucacccucuguuucgcauccucucaaaacaucaccgaagaguucuaucaaucaaccugcuccgccgucucaaaaggcuaccucuccgcccuacgcacaggcugguacaccagcgucauuaccauagaacucucgaacaucaaagaaaacaaaugcaacggcaccgacgcaaaagugaaacucaucaaacaagaacucgacaaauacaaaaacgccgucaccgaacuucagaugcucaugugcuccaccccugccgccggcagcggcuccgccauagccuccggcaucgcagucugcaaaguccuccaccucgaaggagaaguaaacaaaaucaaaaaugcucuccucuccacaaacaaagccgucgucucacucuccaauggagucuccguccucaccuucaaaguccucgaccucaaaaacuacauagacaaacaacuacuccccauccucaacaagcaauccugcucuaucuccaacauagaaaccguuauggaguuccaacagaaaaauaaccgccugcuagaaauaacccgagaguucuccgucaacgcaggcgucacuacccccgucagcacauacaugcuaacaaacuccgaacugcucucccuuaucaacgacaugcccaucacaaacgaucagaaaaagcucaugucuaacaacguacaaaucguucggcaacaauccuacuccaucaugugcaucaucaaagaagaagugcucgccuacguaguccaacucccccucuacggagucaucgacacacccugcuggaaacuccacacaucaccccucugcaccaccaacacaaaagaaggguccaacaucugccucacgcgcaccgaccgaggcugguacugcgacaacgccggcuccguauccuucuucccccaagcagaaaccugcaaggucugcuccaaccgcguauucugcgacaccaugaacucgcucacccuccccucagaagucaaccuauguaacaucgacauauucaaucccaaauacgacugcaagauaaugacuuccaaaaccgacguaagcuccucggucaucaccucccucggcgccaucgucuccugcuacggcaaaaccaaaugcaccgccuccaauaagaauaaaggcauaauaaagacauucagcaacggcugcgauuacgucuccaacaaaggugucgacaccgucucagucggcaacacucuauacuacgugaacaaacaagaaggcaaaagccuauacguuaaaggcgaaccaauaaucaauuucuacgacccucuagucuuucccucugacgaguucgaugccagcauaagccaagucaacgaaaagaucaaccaaucacucgccuucauccguaaauccgacgaacugcuccacaaugucaauguaggcaaaucaacaaccaacaucaugaucaccacuauuaucaucgucaucaucguaauccuacuccuacuaaucgccgucggccuauuccucuacugcaaagcccgcucgacccccgucacucucagcaaggaucaacuauccggcaucaacaacaucgccuucuccaacuaaggacuagugaagggaacacccaaauuuaauucagccuuaagcacaauuaauuaagagugaaacguaauuguacaagcaguuggucacccaccauagggcaugaucaacaccgcaaccuuuccuuuuucccccagugauucugaaaaaccccucuucccuucagcuugcuuagauguuccaaauuuaguaagcuuaaggcggccuacagaagaaaaagaaaaaaaaggccacaaaaguucccucucacuuucaguaaauaaaauaaaagcagcaacagaaauaaagaaauaaaugaaauucaaaaugaaauaaauauuguguugugcagcauuaaaaaaucaauaaaaauuaaaaaugagcaagaucuaaaaaaaaaaaaaaaaaaaaaaaaaaaaaaaaaaaaaaaaaaaaaaaaaaaaaaaaaaaaaaaaugcaucccccccccccccccccccccccccccccccaaaggcucuuuucagagccaccagaauu

SEQ ID NO: 18521 - RNA, 1960 nt, Artificial Sequence
  mRNA product Design d-4 comprising derived and/or modified sequence from HRSV(Memphis-37)__AIY60640.1__F_DSCav1_mut7 (opt1)
gggagagucccgcagucggcguccagcggcucugcuuguucgugugugugucguugcaggccuuauucaagcuuaccauggagcugcccauccucaagaccaacgccaucaccacgauccuggccgcggugacccugugcuucgccagcucccagaacaucaccgaggaguucuaccagagcacgugcuccgccgucagcaagggcuaccucuccgcccugcgcaccgggugguacaccagcgugaucaccaucgagcuguccaacaucaaggagaacaagugcaacggcaccgacgccaaggugaagcucaucaagcaggagcuggacaaguacaagaacgcggucacggagcugcagaugcugaugugcagcaccccggccgccggcuccgggagcgcgaucgccuccggcaucgccgucugcaaggugcugcaccucgagggcgaggugaacaagaucaagaacgcccugcuguccaccaacaaggccgucgugagccucuccaacggggugagcguccugaccuucaaggugcuggaccucaagaacuacaucgacaagcagcugcugcccauccugaacaagcagagcugcuccaucagcaacaucgagaccgucauggaguuccagcagaagaacaaccgccuccuggagaucacgcgggaguucagcgugaacgcgggcgugaccacccccgucuccaccuacaugcugacgaacagcgagcuccugucccugaucaacgacaugccgaucaccaacgaccagaagaagcucaugagcaacaacgugcagaucgugcgccagcaguccuacagcaucaugugcaucaucaaggaggagguccuggccuacguggugcagcugccccucuacggggucaucgacacccccugcuggaagcugcacaccagcccccugugcacgaccaacaccaaggagggcuccaacaucugccucacccggacggaccgcgggugguacugcgacaacgccggcagcguguccuucuucccgcaggccgagaccugcaaggucugcagcaaccggguguucugcgacaccaugaacucccugacccugcccagcgaggugaaccucugcaacaucgacaucuucaaccccaaguacgacugcaagaucaugacguccaagaccgacgucagcuccagcgugaucaccucccugggcgccaucgugagcugcuacgggaagaccaagugcacggcgagcaacaagaacaagggcaucaucaagaccuucuccaacgggugcgacuacgucagcaacaagggcguggacaccguguccgucggcaacacccuguacuacgugaacaagcaggagggcaagagccucuacgugaagggggagcccaucaucaacuucuacgacccgcuggucuuccccuccgacgaguucgacgccagcaucucccaggugaacgagaagaucaaccagagccuggccuucauccggaaguccgacgagcuccugcacaacgugaacgucggcaagagcaccacgaacaucaugaucaccaccaucaucaucgugaucaucgugauccugcugcuccugaucgccgucgggcuguuccucuacugcaaggcccgcuccacccccgugacgcugagcaaggaccagcuguccgggaucaacaacaucgcguucagcaacugaggacuaguggaagcauuuuccuggcugauuaaaagaaauuacucagcuauggucaucuguuccuguuagaaggcuaugcagcauauuauauacuaugcgcauguuaugaaaugcauaauaaaaaauuuuaaaaaaucuaaaagaucuaaaaaaaaaaaaaaaaaaaaaaaaaaaaaaaaaaaaaaaaaaaaaaaaaaaaaaaaaaaaaaaaugcaucccccccccccccccccccccccccccccccaaaggcucuuuucagagccaccagaauu

SEQ ID NO: 18522 - RNA, 1960 nt, Artificial Sequence
  mRNA product Design d-4 comprising derived and/or modified sequence from HRSV(Memphis-37)__AIY60640.1__F_DSCav1_mut7 (opt1)
gggagagucccgcagucggcguccagcggcucugcuuguucgugugugugucguugcaggccuuauucaagcuuaccauggagcugcccauccucaagaccaacgccaucaccacgauccuggccgcggugacccugugcuucgccagcucccagaacaucaccgaggaguucuaccagagcacgugcuccgccgucagcaagggcuaccucuccgcccugcgcaccgggugguacaccagcgugaucaccaucgagcuguccaacaucaaggagaacaagugcaacggcaccgacgccaaggugaagcucaucaagcaggagcuggacaaguacaagaacgcggucacggagcugcagaugcucaugugcagcaccccggccgccggguccggcagcgccaucgcguccgggaucgccgugugcaaggugcugcaccuggagggcgaggucaacaagaucaagaacgcccuccugagcaccaacaaggccguggugucccugagcaacggcgucuccgugcucaccuucaaggugcuggaccugaagaacuacaucgacaagcagcuccugcccauccugaacaagcagagcugcuccaucagcaacaucgagacggucauggaguuccagcagaagaacaaccggcuccuggagaucacccgcgaguucuccgugaacgccggggugaccacccccgucagcacguacaugcugaccaacagcgagcuccugucccugaucaacgacaugcccaucaccaacgaccagaagaagcucaugagcaacaacgugcagaucgugcggcagcaguccuacagcaucaugugcaucaucaaggaggagguccuggcguacguggugcagcugccgcucuacggcgucaucgacacccccugcuggaagcugcacacgagcccccugugcaccaccaacaccaaggaggggagcaacaucugccucacgcgcaccgaccggggcugguacugcgacaacgccggguccgugagcuucuucccccaggccgagaccugcaaggugugcuccaaccgcgucuucugcgacaccaugaacagccugacgcugccguccgaggugaaccucugcaacaucgacaucuucaaccccaaguacgacugcaagaucaugaccagcaagaccgacgucuccagcuccgugaucaccagccugggcgccaucguguccugcuacggcaagacgaagugcaccgccagcaacaagaacaaggggaucaucaagaccuucuccaacggcugcgacuacgucagcaacaaggggguggacaccgugagcgucggcaacacgcuguacuacgugaacaagcaggagggcaagucccucuacgugaagggggagcccaucaucaacuucuacgacccccuggucuucccgagcgacgaguucgacgcguccaucagccaggugaacgagaagaucaaccagucccuggccuucauccggaaguccgacgagcuccugcacaacgugaacgucggcaaguccaccaccaacaucaugaucaccaccaucaucaucgugaucaucgugauccugcuccugcugaucgccgucggccucuuccuguacugcaaggcccgcagcacgcccgugacccuguccaaggaccagcugagcgggaucaacaacaucgccuucuccaacugaggacuaguggaagcauuuuccuggcugauuaaaagaaauuacucagcuauggucaucuguuccuguuagaaggcuaugcagcauauuauauacuaugcgcauguuaugaaaugcauaauaaaaaauuuuaaaaaaucuaaaagaucuaaaaaaaaaaaaaaaaaaaaaaaaaaaaaaaaaaaaaaaaaaaaaaaaaaaaaaaaaaaaaaaaugcaucccccccccccccccccccccccccccccccaaaggcucuuuucagagccaccagaauu

SEQ ID NO: 18523 - RNA, 1960 nt, Artificial Sequence
  mRNA product Design d-4 comprising derived and/or modified sequence from HRSV(Memphis-37)__AIY60640.1__F_DSCav1_mut7 (opt2)
gggagagucccgcagucggcguccagcggcucugcuuguucgugugugugucguugcaggccuuauucaagcuuaccauggagcuccccauccucaagaccaacgccaucaccaccauccucgccgccgucacccucugcuucgccuccucccagaacaucaccgaggaguucuaccaguccaccugcuccgccgucuccaagggcuaccucuccgcccuccgcaccggcugguacaccuccgucaucaccaucgagcucuccaacaucaaggagaacaagugcaacggcaccgacgccaaggucaagcucaucaagcaggagcucgacaaguacaagaacgccgucaccgagcuccagaugcucaugugcuccacccccgccgccggcuccggcuccgccaucgccuccggcaucgccgucugcaagguccuccaccucgagggcgaggucaacaagaucaagaacgcccuccucuccaccaacaaggccgucgucucccucuccaacggcgucuccguccucaccuucaagguccucgaccucaagaacuacaucgacaagcagcuccuccccauccucaacaagcaguccugcuccaucuccaacaucgagaccgucauggaguuccagcagaagaacaaccgccuccucgagaucacccgcgaguucuccgucaacgccggcgucaccacccccgucuccaccuacaugcucaccaacuccgagcuccucucccucaucaacgacaugcccaucaccaacgaccagaagaagcucauguccaacaacguccagaucguccgccagcaguccuacuccaucaugugcaucaucaaggaggagguccucgccuacgucguccagcucccccucuacggcgucaucgacacccccugcuggaagcuccacaccuccccccucugcaccaccaacaccaaggagggcuccaacaucugccucacccgcaccgaccgcggcugguacugcgacaacgccggcuccgucuccuucuucccccaggccgagaccugcaaggucugcuccaaccgcgucuucugcgacaccaugaacucccucacccuccccuccgaggucaaccucugcaacaucgacaucuucaaccccaaguacgacugcaagaucaugaccuccaagaccgacgucuccuccuccgucaucaccucccucggcgccaucgucuccugcuacggcaagaccaagugcaccgccuccaacaagaacaagggcaucaucaagaccuucuccaacggcugcgacuacgucuccaacaagggcgucgacaccgucuccgucggcaacacccucuacuacgucaacaagcaggagggcaagucccucuacgucaagggcgagcccaucaucaacuucuacgacccccucgucuuccccuccgacgaguucgacgccuccaucucccaggucaacgagaagaucaaccagucccucgccuucauccgcaaguccgacgagcuccuccacaacgucaacgucggcaaguccaccaccaacaucaugaucaccaccaucaucaucgucaucaucgucauccuccuccuccucaucgccgucggccucuuccucuacugcaaggcccgcuccacccccgucacccucuccaaggaccagcucuccggcaucaacaacaucgccuucuccaacugaggacuaguggaagcauuuuccuggcugauuaaaagaaauuacucagcuauggucaucuguuccuguuagaaggcuaugcagcauauuauauacuaugcgcauguuaugaaaugcauaauaaaaaauuuuaaaaaaucuaaaagaucuaaaaaaaaaaaaaaaaaaaaaaaaaaaaaaaaaaaaaaaaaaaaaaaaaaaaaaaaaaaaaaaaugcaucccccccccccccccccccccccccccccccaaaggcucuuuucagagccaccagaauu

SEQ ID NO: 18524 - RNA, 1960 nt, Artificial Sequence
  mRNA product Design d-4 comprising derived and/or modified sequence from HRSV(Memphis-37)__AIY60640.1__F_DSCav1_mut7 (opt3)
gggagagucccgcagucggcguccagcggcucugcuuguucgugugugugucguugcaggccuuauucaagcuuaccauggagcugcccauccucaagaccaacgccauuacaacuauacuugcugcagugacgcugugcuucgccagcucccagaauaucaccgaagaguuuuaccaaucuacauguucagcggucaguaaaggcuauuugagcgcuuuaagaacugggugguacaccuccguuauuacaaucgaacugucuaacauuaaggagaauaaaugcaacggaaccgacgccaaggugaaacuaaucaagcaggaacucgauaaguauaaaaaugcaguaacugagcugcagaugcuuauguguucgaccccugccgcugguucaggcagcgcaauagccagugggaucgcugugugcaagguccugcacuuggagggagaagugaacaaaauuaagaaugcccuccuguccacaaacaaagcgguugugucucugagcaauggcgucuccgugcucacguucaagguauuagaccugaagaacuacaucgauaaacagcuuuugccaauucugaauaagcaaucauguaguaucagcaacauagagacuguuauggaauuucagcagaaaaauaacaggcuacucgagauuacccgggaguucucugugaaugccggugucacaacuccgguguccaccuauaugcugacaaacucagaacuucugagcuugaucaacgacaugcccauuaccaaugaucagaagaaacucaugaguaacaaugugcaaaucguccgccagcagucuuacuccaucaugugcauuauaaaggaggaaguucuggcauaugugguacaguuaccucuguacggggugaucgacacgccauguuggaaacuccauacuagcccccuuugcacaaccaacacuaaggagggaucgaauauuugucugacacgaaccgaucguggcugguacugcgacaacgcuggcucugucuccuuuuucccucaagccgaaacguguaaggugugcucaaauagaguguuuugcgauaccaugaacaguuugacacuaccaagcgagguuaaucuguguaacaucgacauauucaaucccaaauaugauugcaagauuaugacuuccaaaaccgacgucucuagcucagugaucacaagucucggggcaaucguauccuguuacggaaagacuaaaugcaccgcuagcaacaagaauaaggguauuaucaaaacauuuucuaacggcugugauuauguuucaaauaaggggguggacaccgucagugugggaaacacucuguacuaugucaacaaacaggagggcaagagccuuuacgugaaaggugaaccuauuauaaauuucuaugacccacugguuuuuccguccgaugaguucgacgccucuaucagccaggugaacgaaaagauuaaucaaucguuggcguuuaucaggaaguccgaugagcuccugcacaacguaaaugucgggaaaucaacgacaaacaucaugauuaccacuauaaucauugugaucauuguuaucuuacugcuacucauagccgugggacuguuccuuuacugcaaggcacggaguacccccgucacauugucuaaagaccagcugagcggcaucaauaacauugcuuucuccaauugaggacuaguggaagcauuuuccuggcugauuaaaagaaauuacucagcuauggucaucuguuccuguuagaaggcuaugcagcauauuauauacuaugcgcauguuaugaaaugcauaauaaaaaauuuuaaaaaaucuaaaagaucuaaaaaaaaaaaaaaaaaaaaaaaaaaaaaaaaaaaaaaaaaaaaaaaaaaaaaaaaaaaaaaaaugcaucccccccccccccccccccccccccccccccaaaggcucuuuucagagccaccagaauu

SEQ ID NO: 18525 - RNA, 1960 nt, Artificial Sequence
  mRNA product Design d-4 comprising derived and/or modified sequence from HRSV(Memphis-37)__AIY60640.1__F_DSCav1_mut7 (opt4)
gggagagucccgcagucggcguccagcggcucugcuuguucgugugugugucguugcaggccuuauucaagcuuaccauggagcugcccauccugaagaccaacgccaucaccaccauccuggccgccgugacccugugcuucgccagcagccagaacaucaccgaggaguucuaccagagcaccugcagcgccgugagcaagggcuaccugagcgcccugagaaccggcugguacaccagcgugaucaccaucgagcugagcaacaucaaggagaacaagugcaacggcaccgacgccaaggugaagcugaucaagcaggagcuggacaaguacaagaacgccgugaccgagcugcagaugcugaugugcagcacccccgccgccggcagcggcagcgccaucgccagcggcaucgccgugugcaaggugcugcaccuggagggcgaggugaacaagaucaagaacgcccugcugagcaccaacaaggccguggugagccugagcaacggcgugagcgugcugaccuucaaggugcuggaccugaagaacuacaucgacaagcagcugcugcccauccugaacaagcagagcugcagcaucagcaacaucgagaccgugauggaguuccagcagaagaacaacagacugcuggagaucaccagagaguucagcgugaacgccggcgugaccacccccgugagcaccuacaugcugaccaacagcgagcugcugagccugaucaacgacaugcccaucaccaacgaccagaagaagcugaugagcaacaacgugcagaucgugagacagcagagcuacagcaucaugugcaucaucaaggaggaggugcuggccuacguggugcagcugccccuguacggcgugaucgacacccccugcuggaagcugcacaccagcccccugugcaccaccaacaccaaggagggcagcaacaucugccugaccagaaccgacagaggcugguacugcgacaacgccggcagcgugagcuucuucccccaggccgagaccugcaaggugugcagcaacagaguguucugcgacaccaugaacagccugacccugcccagcgaggugaaccugugcaacaucgacaucuucaaccccaaguacgacugcaagaucaugaccagcaagaccgacgugagcagcagcgugaucaccagccugggcgccaucgugagcugcuacggcaagaccaagugcaccgccagcaacaagaacaagggcaucaucaagaccuucagcaacggcugcgacuacgugagcaacaagggcguggacaccgugagcgugggcaacacccuguacuacgugaacaagcaggagggcaagagccuguacgugaagggcgagcccaucaucaacuucuacgacccccugguguuccccagcgacgaguucgacgccagcaucagccaggugaacgagaagaucaaccagagccuggccuucaucagaaagagcgacgagcugcugcacaacgugaacgugggcaagagcaccaccaacaucaugaucaccaccaucaucaucgugaucaucgugauccugcugcugcugaucgccgugggccuguuccuguacugcaaggccagaagcacccccgugacccugagcaaggaccagcugagcggcaucaacaacaucgccuucagcaacugaggacuaguggaagcauuuuccuggcugauuaaaagaaauuacucagcuauggucaucuguuccuguuagaaggcuaugcagcauauuauauacuaugcgcauguuaugaaaugcauaauaaaaaauuuuaaaaaaucuaaaagaucuaaaaaaaaaaaaaaaaaaaaaaaaaaaaaaaaaaaaaaaaaaaaaaaaaaaaaaaaaaaaaaaaugcaucccccccccccccccccccccccccccccccaaaggcucuuuucagagccaccagaauu

SEQ ID NO: 18526 - RNA, 1960 nt, Artificial Sequence
  mRNA product Design d-4 comprising derived and/or modified sequence from HRSV(Memphis-37)__AIY60640.1__F_DSCav1_mut7 (opt5)
gggagagucccgcagucggcguccagcggcucugcuuguucgugugugugucguugcaggccuuauucaagcuuaccauggagcugcccauccucaagaccaacgccauuacaacgauccuggcugccgugacccuuugcuucgcgagcucccagaauauuacagaagaguuuuaccaaucuaccuguagcgcugucuccaaaggcuaucugucugcccucagaacagggugguacaccagcguuaucacaauugaacuguccaacaucaaggagaauaaaugcaacggaaccgacgccaaggugaaacuuaucaagcaggaacuggauaaguauaaaaaugcugugacggagcuccagaugcugauguguucuaccccugccgcuggcagcggguccgccauugcgagcggaaucgccgucugcaaggugcugcaccucgagggcgaaguuaacaaaauuaagaaugcucugcuuucuacaaacaaagccguggucucccugagcaauggggugucuguucucaccuucaaggugcuggaccuuaagaacuacaucgauaaacagcugcucccgauucugaauaagcaauccuguagcaucucuaacauugagacagucauggaauuucagcagaaaaauaaccggcugcucgagaucacccgcgaguucuccgugaaugcuggagugacgacacccgucagcaccuauaugcugacaaacuccgaacuucugucucucaucaacgacaugccuauuaccaaugaucagaagaaacugaugagcaacaauguucaaaucgugagacagcaguccuacagcauuaugugcaucauuaaggaggaagugcuugccuaugucgugcagcugccccucuacggcguuaucgacaccccuuguuggaaacugcauacaucuccccugugcacgaccaacacaaaggagggcuccaauaucugucucacccggacagaucgcgggugguacugcgacaacgcgggaagcgugagcuuuuucccucaagccgaaaccuguaaggucugcucuaauagaguguuuugcgauacgaugaacucccugacacuuccgucugagguuaaucuguguaacauugacaucuucaaucccaaauaugauugcaagauuaugaccagcaaaaccgacguguccagcucugucaucacaucccucggcgcuauugugagcuguuacgggaagaccaaaugcacagccucuaacaagaauaagggaaucaucaaaacguuuuccaacggcugugauuaugucagcaauaaggggguggacaccguuuccgugggaaacacacuguacuaugucaacaaacaggagggcaagucucuuuacgugaaaggcgaaccuauuaucaauuucuaugacccccugguuuuuccuagcgaugaguucgacgcuuccauuucucaggugaacgaaaagaucaaucaaagccucgccuuuauucggaaguccgaugagcugcugcacaacgucaauguggggaaaagcaccacaaacaucaugauuaccacgaucaucauugugaucauuguuauccuccugcuucugauugccgucggacucuuccuguacugcaaggcucgcucuacccccgugacacuguccaaagaccagcuuagcggcaucaauaacaucgcguucucuaauugaggacuaguggaagcauuuuccuggcugauuaaaagaaauuacucagcuauggucaucuguuccuguuagaaggcuaugcagcauauuauauacuaugcgcauguuaugaaaugcauaauaaaaaauuuuaaaaaaucuaaaagaucuaaaaaaaaaaaaaaaaaaaaaaaaaaaaaaaaaaaaaaaaaaaaaaaaaaaaaaaaaaaaaaaaugcaucccccccccccccccccccccccccccccccaaaggcucuuuucagagccaccagaauu

SEQ ID NO: 18527 - RNA, 1960 nt, Artificial Sequence
  mRNA product Design d-4 comprising derived and/or modified sequence from HRSV(Memphis-37)__AIY60640.1__F_DSCav1_mut7 (opt6)
gggagagucccgcagucggcguccagcggcucugcuuguucgugugugugucguugcaggccuuauucaagcuuaccauggaacuaccaauacucaaaacaaaugcuauaaccacaauacucgcagcaguaacauuauguuucgcaucaucccaaaacauaacagaagaauuuuaucaaucaaccuguucagcaguauccaaaggauaccuaagugcauuaagaaccggaugguacacaucaguaauaaccauagaacuuucaaacauaaaagaaaacaaauguaacggcacagacgcaaaagucaaacucaucaaacaggaacuugacaaauauaaaaacgcaguaaccgaacuacaaaugcuaaugugcucaacaccagcagcaggaucaggaucagcaauugcaucuggaauagcuguaugcaaaguccuacaccuagaaggagaaguaaacaaaaucaaaaacgcauuacucuccacaaacaaagcaguaguaucacuaucaaacggaguuucaguacuaaccuucaaaguauuagaccuaaaaaacuacauagacaaacaacuacuaccuauacuaaacaaacaauccuguucaauaagcaacauugaaacuguaauggaauuucaacaaaaaaacaaccgccuauuagaaauaaccagagaauuuuccguaaaugcaggaguaaccacaccagucucuacauacauguuaaccaacucagaacuauuaucacucauaaaugacaugccuauaacaaacgaccaaaaaaaacuaaugucaaacaacguacaaauaguaagacaacaaucauauuccauaaugugcauaauaaaagaagaaguacuugcauacgugguucaacuaccccuauauggaguuauagacacaccaugcuggaaacuccacacuuccccacuuugcacaacuaacacaaaagaaggaucaaauauaugccuaaccagaacagaccguggaugguacugcgacaacgcuggaucagucuccuucuuuccacaagcagaaaccugcaaagucugcucaaauagagucuucugugacacaaugaacucacucacccuacccucagaaguaaaccuauguaauauagauauauuuaauccaaaauacgacugcaaaauuaugacaaguaaaacagacguaagcucaucagucauaaccagccuaggagcaauaguauccuguuacggcaaaacaaaaugcacagcuucaaacaaaaacaaaggcauaauaaaaacauucucaaacggaugugacuauguaucaaauaaaggaguugacacaguaucaguuggaaacacacuauacuauguaaacaaacaagaaggaaaaucacuauacguuaaaggcgaacccauaaucaauuucuacgacccccuagucuucccauccgaugaauuugacgcaucaauaucccaaguaaaugaaaaaaucaaccaaucccuagcauuuauacgaaaauccgacgaacuacuccauaaugucaacgucgguaaaucaacgacaaacaucaugaucacaacaauaauaauaguaauaauuguaauauuacucuuacucauagcaguaggccuauuucuauauugcaaagccagaucaacaccaguaaccuuauccaaagaccaacuaucuggaauaaacaacauagcauuuuccaacugaggacuaguggaagcauuuuccuggcugauuaaaagaaauuacucagcuauggucaucuguuccuguuagaaggcuaugcagcauauuauauacuaugcgcauguuaugaaaugcauaauaaaaaauuuuaaaaaaucuaaaagaucuaaaaaaaaaaaaaaaaaaaaaaaaaaaaaaaaaaaaaaaaaaaaaaaaaaaaaaaaaaaaaaaaugcaucccccccccccccccccccccccccccccccaaaggcucuuuucagagccaccagaauu

SEQ ID NO: 18528 - RNA, 1960 nt, Artificial Sequence
  mRNA product Design d-4 comprising derived and/or modified sequence from HRSV(Memphis-37)__AIY60640.1__F_DSCav1_mut7 (opt11)
gggagagucccgcagucggcguccagcggcucugcuuguucgugugugugucguugcaggccuuauucaagcuuaccauggaacuccccauacuuaaaacaaacgccauaacaacuauacucgcagccgucacccucuguuucgcauccucucaaaacaucaccgaagaguucuaucaaucaaccugcuccgccgucucaaaaggcuaccucuccgcccuacgcacaggcugguacaccagcgucauuaccauagaacucucgaacaucaaagaaaacaaaugcaacggcaccgacgcaaaagugaaacucaucaaacaagaacucgacaaauacaaaaacgccgucaccgaacuucagaugcucaugugcuccaccccugccgccggcagcggcuccgccauagccuccggcaucgcagucugcaaaguccuccaccucgaaggagaaguaaacaaaaucaaaaaugcucuccucuccacaaacaaagccgucgucucacucuccaauggagucuccguccucaccuucaaaguccucgaccucaaaaacuacauagacaaacaacuacuccccauccucaacaagcaauccugcucuaucuccaacauagaaaccguuauggaguuccaacagaaaaauaaccgccugcuagaaauaacccgagaguucuccgucaacgcaggcgucacuacccccgucagcacauacaugcuaacaaacuccgaacugcucucccuuaucaacgacaugcccaucacaaacgaucagaaaaagcucaugucuaacaacguacaaaucguucggcaacaauccuacuccaucaugugcaucaucaaagaagaagugcucgccuacguaguccaacucccccucuacggagucaucgacacacccugcuggaaacuccacacaucaccccucugcaccaccaacacaaaagaaggguccaacaucugccucacgcgcaccgaccgaggcugguacugcgacaacgccggcuccguauccuucuucccccaagcagaaaccugcaaggucugcuccaaccgcguauucugcgacaccaugaacucgcucacccuccccucagaagucaaccuauguaacaucgacauauucaaucccaaauacgacugcaagauaaugacuuccaaaaccgacguaagcuccucggucaucaccucccucggcgccaucgucuccugcuacggcaaaaccaaaugcaccgccuccaauaagaauaaaggcauaauaaagacauucagcaacggcugcgauuacgucuccaacaaaggugucgacaccgucucagucggcaacacucuauacuacgugaacaaacaagaaggcaaaagccuauacguuaaaggcgaaccaauaaucaauuucuacgacccucuagucuuucccucugacgaguucgaugccagcauaagccaagucaacgaaaagaucaaccaaucacucgccuucauccguaaauccgacgaacugcuccacaaugucaauguaggcaaaucaacaaccaacaucaugaucaccacuauuaucaucgucaucaucguaauccuacuccuacuaaucgccgucggccuauuccucuacugcaaagcccgcucgacccccgucacucucagcaaggaucaacuauccggcaucaacaacaucgccuucuccaacuaaggacuaguggaagcauuuuccuggcugauuaaaagaaauuacucagcuauggucaucuguuccuguuagaaggcuaugcagcauauuauauacuaugcgcauguuaugaaaugcauaauaaaaaauuuuaaaaaaucuaaaagaucuaaaaaaaaaaaaaaaaaaaaaaaaaaaaaaaaaaaaaaaaaaaaaaaaaaaaaaaaaaaaaaaaugcaucccccccccccccccccccccccccccccccaaaggcucuuuucagagccaccagaauu

SEQ ID NO: 18529 - RNA, 2057 nt, Artificial Sequence
  mRNA product Design d-5 comprising derived and/or modified sequence from HRSV(Memphis-37)__AIY60640.1__F_DSCav1_mut7 (opt1)
gggagagggcgcuuggcuugcaaggacccugagcugcggcauugaagcacacccaacccaacucgacugaagucagccucacugaaccggaucugagaaucuucucucucugggcuugccagggcucuccgaaccuagcuagcauccucuucaauuccaacuagaaagcuuaccauggagcugcccauccucaagaccaacgccaucaccacgauccuggccgcggugacccugugcuucgccagcucccagaacaucaccgaggaguucuaccagagcacgugcuccgccgucagcaagggcuaccucuccgcccugcgcaccgggugguacaccagcgugaucaccaucgagcuguccaacaucaaggagaacaagugcaacggcaccgacgccaaggugaagcucaucaagcaggagcuggacaaguacaagaacgcggucacggagcugcagaugcugaugugcagcaccccggccgccggcuccgggagcgcgaucgccuccggcaucgccgucugcaaggugcugcaccucgagggcgaggugaacaagaucaagaacgcccugcuguccaccaacaaggccgucgugagccucuccaacggggugagcguccugaccuucaaggugcuggaccucaagaacuacaucgacaagcagcugcugcccauccugaacaagcagagcugcuccaucagcaacaucgagaccgucauggaguuccagcagaagaacaaccgccuccuggagaucacgcgggaguucagcgugaacgcgggcgugaccacccccgucuccaccuacaugcugacgaacagcgagcuccugucccugaucaacgacaugccgaucaccaacgaccagaagaagcucaugagcaacaacgugcagaucgugcgccagcaguccuacagcaucaugugcaucaucaaggaggagguccuggccuacguggugcagcugccccucuacggggucaucgacacccccugcuggaagcugcacaccagcccccugugcacgaccaacaccaaggagggcuccaacaucugccucacccggacggaccgcgggugguacugcgacaacgccggcagcguguccuucuucccgcaggccgagaccugcaaggucugcagcaaccggguguucugcgacaccaugaacucccugacccugcccagcgaggugaaccucugcaacaucgacaucuucaaccccaaguacgacugcaagaucaugacguccaagaccgacgucagcuccagcgugaucaccucccugggcgccaucgugagcugcuacgggaagaccaagugcacggcgagcaacaagaacaagggcaucaucaagaccuucuccaacgggugcgacuacgucagcaacaagggcguggacaccguguccgucggcaacacccuguacuacgugaacaagcaggagggcaagagccucuacgugaagggggagcccaucaucaacuucuacgacccgcuggucuuccccuccgacgaguucgacgccagcaucucccaggugaacgagaagaucaaccagagccuggccuucauccggaaguccgacgagcuccugcacaacgugaacgucggcaagagcaccacgaacaucaugaucaccaccaucaucaucgugaucaucgugauccugcugcuccugaucgccgucgggcuguuccucuacugcaaggcccgcuccacccccgugacgcugagcaaggaccagcuguccgggaucaacaacaucgcguucagcaacugaggacuaguggaagcauuuuccuggcugauuaaaagaaauuacucagcuauggucaucuguuccuguuagaaggcuaugcagcauauuauauacuaugcgcauguuaugaaaugcauaauaaaaaauuuuaaaaaaucuaaaagaucuaaaaaaaaaaaaaaaaaaaaaaaaaaaaaaaaaaaaaaaaaaaaaaaaaaaaaaaaaaaaaaaaugcaucccccccccccccccccccccccccccccccaaaggcucuuuucagagccaccagaauu

SEQ ID NO: 18530 - RNA, 2057 nt, Artificial Sequence
  mRNA product Design d-5 comprising derived and/or modified sequence from HRSV(Memphis-37)__AIY60640.1__F_DSCav1_mut7 (opt1)
gggagagggcgcuuggcuugcaaggacccugagcugcggcauugaagcacacccaacccaacucgacugaagucagccucacugaaccggaucugagaaucuucucucucugggcuugccagggcucuccgaaccuagcuagcauccucuucaauuccaacuagaaagcuuaccauggagcugcccauccucaagaccaacgccaucaccacgauccuggccgcggugacccugugcuucgccagcucccagaacaucaccgaggaguucuaccagagcacgugcuccgccgucagcaagggcuaccucuccgcccugcgcaccgggugguacaccagcgugaucaccaucgagcuguccaacaucaaggagaacaagugcaacggcaccgacgccaaggugaagcucaucaagcaggagcuggacaaguacaagaacgcggucacggagcugcagaugcucaugugcagcaccccggccgccggguccggcagcgccaucgcguccgggaucgccgugugcaaggugcugcaccuggagggcgaggucaacaagaucaagaacgcccuccugagcaccaacaaggccguggugucccugagcaacggcgucuccgugcucaccuucaaggugcuggaccugaagaacuacaucgacaagcagcuccugcccauccugaacaagcagagcugcuccaucagcaacaucgagacggucauggaguuccagcagaagaacaaccggcuccuggagaucacccgcgaguucuccgugaacgccggggugaccacccccgucagcacguacaugcugaccaacagcgagcuccugucccugaucaacgacaugcccaucaccaacgaccagaagaagcucaugagcaacaacgugcagaucgugcggcagcaguccuacagcaucaugugcaucaucaaggaggagguccuggcguacguggugcagcugccgcucuacggcgucaucgacacccccugcuggaagcugcacacgagcccccugugcaccaccaacaccaaggaggggagcaacaucugccucacgcgcaccgaccggggcugguacugcgacaacgccggguccgugagcuucuucccccaggccgagaccugcaaggugugcuccaaccgcgucuucugcgacaccaugaacagccugacgcugccguccgaggugaaccucugcaacaucgacaucuucaaccccaaguacgacugcaagaucaugaccagcaagaccgacgucuccagcuccgugaucaccagccugggcgccaucguguccugcuacggcaagacgaagugcaccgccagcaacaagaacaaggggaucaucaagaccuucuccaacggcugcgacuacgucagcaacaaggggguggacaccgugagcgucggcaacacgcuguacuacgugaacaagcaggagggcaagucccucuacgugaagggggagcccaucaucaacuucuacgacccccuggucuucccgagcgacgaguucgacgcguccaucagccaggugaacgagaagaucaaccagucccuggccuucauccggaaguccgacgagcuccugcacaacgugaacgucggcaaguccaccaccaacaucaugaucaccaccaucaucaucgugaucaucgugauccugcuccugcugaucgccgucggccucuuccuguacugcaaggcccgcagcacgcccgugacccuguccaaggaccagcugagcgggaucaacaacaucgccuucuccaacugaggacuaguggaagcauuuuccuggcugauuaaaagaaauuacucagcuauggucaucuguuccuguuagaaggcuaugcagcauauuauauacuaugcgcauguuaugaaaugcauaauaaaaaauuuuaaaaaaucuaaaagaucuaaaaaaaaaaaaaaaaaaaaaaaaaaaaaaaaaaaaaaaaaaaaaaaaaaaaaaaaaaaaaaaaugcaucccccccccccccccccccccccccccccccaaaggcucuuuucagagccaccagaauu

SEQ ID NO: 18531 - RNA, 2057 nt, Artificial Sequence
  mRNA product Design d-5 comprising derived and/or modified sequence from HRSV(Memphis-37)__AIY60640.1__F_DSCav1_mut7 (opt2)
gggagagggcgcuuggcuugcaaggacccugagcugcggcauugaagcacacccaacccaacucgacugaagucagccucacugaaccggaucugagaaucuucucucucugggcuugccagggcucuccgaaccuagcuagcauccucuucaauuccaacuagaaagcuuaccauggagcuccccauccucaagaccaacgccaucaccaccauccucgccgccgucacccucugcuucgccuccucccagaacaucaccgaggaguucuaccaguccaccugcuccgccgucuccaagggcuaccucuccgcccuccgcaccggcugguacaccuccgucaucaccaucgagcucuccaacaucaaggagaacaagugcaacggcaccgacgccaaggucaagcucaucaagcaggagcucgacaaguacaagaacgccgucaccgagcuccagaugcucaugugcuccacccccgccgccggcuccggcuccgccaucgccuccggcaucgccgucugcaagguccuccaccucgagggcgaggucaacaagaucaagaacgcccuccucuccaccaacaaggccgucgucucccucuccaacggcgucuccguccucaccuucaagguccucgaccucaagaacuacaucgacaagcagcuccuccccauccucaacaagcaguccugcuccaucuccaacaucgagaccgucauggaguuccagcagaagaacaaccgccuccucgagaucacccgcgaguucuccgucaacgccggcgucaccacccccgucuccaccuacaugcucaccaacuccgagcuccucucccucaucaacgacaugcccaucaccaacgaccagaagaagcucauguccaacaacguccagaucguccgccagcaguccuacuccaucaugugcaucaucaaggaggagguccucgccuacgucguccagcucccccucuacggcgucaucgacacccccugcuggaagcuccacaccuccccccucugcaccaccaacaccaaggagggcuccaacaucugccucacccgcaccgaccgcggcugguacugcgacaacgccggcuccgucuccuucuucccccaggccgagaccugcaaggucugcuccaaccgcgucuucugcgacaccaugaacucccucacccuccccuccgaggucaaccucugcaacaucgacaucuucaaccccaaguacgacugcaagaucaugaccuccaagaccgacgucuccuccuccgucaucaccucccucggcgccaucgucuccugcuacggcaagaccaagugcaccgccuccaacaagaacaagggcaucaucaagaccuucuccaacggcugcgacuacgucuccaacaagggcgucgacaccgucuccgucggcaacacccucuacuacgucaacaagcaggagggcaagucccucuacgucaagggcgagcccaucaucaacuucuacgacccccucgucuuccccuccgacgaguucgacgccuccaucucccaggucaacgagaagaucaaccagucccucgccuucauccgcaaguccgacgagcuccuccacaacgucaacgucggcaaguccaccaccaacaucaugaucaccaccaucaucaucgucaucaucgucauccuccuccuccucaucgccgucggccucuuccucuacugcaaggcccgcuccacccccgucacccucuccaaggaccagcucuccggcaucaacaacaucgccuucuccaacugaggacuaguggaagcauuuuccuggcugauuaaaagaaauuacucagcuauggucaucuguuccuguuagaaggcuaugcagcauauuauauacuaugcgcauguuaugaaaugcauaauaaaaaauuuuaaaaaaucuaaaagaucuaaaaaaaaaaaaaaaaaaaaaaaaaaaaaaaaaaaaaaaaaaaaaaaaaaaaaaaaaaaaaaaaugcaucccccccccccccccccccccccccccccccaaaggcucuuuucagagccaccagaauu

SEQ ID NO: 18532 - RNA, 2057 nt, Artificial Sequence
  mRNA product Design d-5 comprising derived and/or modified sequence from HRSV(Memphis-37)__AIY60640.1__F_DSCav1_mut7 (opt3)
gggagagggcgcuuggcuugcaaggacccugagcugcggcauugaagcacacccaacccaacucgacugaagucagccucacugaaccggaucugagaaucuucucucucugggcuugccagggcucuccgaaccuagcuagcauccucuucaauuccaacuagaaagcuuaccauggagcugcccauccucaagaccaacgccauuacaacuauacuugcugcagugacgcugugcuucgccagcucccagaauaucaccgaagaguuuuaccaaucuacauguucagcggucaguaaaggcuauuugagcgcuuuaagaacugggugguacaccuccguuauuacaaucgaacugucuaacauuaaggagaauaaaugcaacggaaccgacgccaaggugaaacuaaucaagcaggaacucgauaaguauaaaaaugcaguaacugagcugcagaugcuuauguguucgaccccugccgcugguucaggcagcgcaauagccagugggaucgcugugugcaagguccugcacuuggagggagaagugaacaaaauuaagaaugcccuccuguccacaaacaaagcgguugugucucugagcaauggcgucuccgugcucacguucaagguauuagaccugaagaacuacaucgauaaacagcuuuugccaauucugaauaagcaaucauguaguaucagcaacauagagacuguuauggaauuucagcagaaaaauaacaggcuacucgagauuacccgggaguucucugugaaugccggugucacaacuccgguguccaccuauaugcugacaaacucagaacuucugagcuugaucaacgacaugcccauuaccaaugaucagaagaaacucaugaguaacaaugugcaaaucguccgccagcagucuuacuccaucaugugcauuauaaaggaggaaguucuggcauaugugguacaguuaccucuguacggggugaucgacacgccauguuggaaacuccauacuagcccccuuugcacaaccaacacuaaggagggaucgaauauuugucugacacgaaccgaucguggcugguacugcgacaacgcuggcucugucuccuuuuucccucaagccgaaacguguaaggugugcucaaauagaguguuuugcgauaccaugaacaguuugacacuaccaagcgagguuaaucuguguaacaucgacauauucaaucccaaauaugauugcaagauuaugacuuccaaaaccgacgucucuagcucagugaucacaagucucggggcaaucguauccuguuacggaaagacuaaaugcaccgcuagcaacaagaauaaggguauuaucaaaacauuuucuaacggcugugauuauguuucaaauaaggggguggacaccgucagugugggaaacacucuguacuaugucaacaaacaggagggcaagagccuuuacgugaaaggugaaccuauuauaaauuucuaugacccacugguuuuuccguccgaugaguucgacgccucuaucagccaggugaacgaaaagauuaaucaaucguuggcguuuaucaggaaguccgaugagcuccugcacaacguaaaugucgggaaaucaacgacaaacaucaugauuaccacuauaaucauugugaucauuguuaucuuacugcuacucauagccgugggacuguuccuuuacugcaaggcacggaguacccccgucacauugucuaaagaccagcugagcggcaucaauaacauugcuuucuccaauugaggacuaguggaagcauuuuccuggcugauuaaaagaaauuacucagcuauggucaucuguuccuguuagaaggcuaugcagcauauuauauacuaugcgcauguuaugaaaugcauaauaaaaaauuuuaaaaaaucuaaaagaucuaaaaaaaaaaaaaaaaaaaaaaaaaaaaaaaaaaaaaaaaaaaaaaaaaaaaaaaaaaaaaaaaugcaucccccccccccccccccccccccccccccccaaaggcucuuuucagagccaccagaauu

SEQ ID NO: 18533 - RNA, 2057 nt, Artificial Sequence
  mRNA product Design d-5 comprising derived and/or modified sequence from HRSV(Memphis-37)__AIY60640.1__F_DSCav1_mut7 (opt4)
gggagagggcgcuuggcuugcaaggacccugagcugcggcauugaagcacacccaacccaacucgacugaagucagccucacugaaccggaucugagaaucuucucucucugggcuugccagggcucuccgaaccuagcuagcauccucuucaauuccaacuagaaagcuuaccauggagcugcccauccugaagaccaacgccaucaccaccauccuggccgccgugacccugugcuucgccagcagccagaacaucaccgaggaguucuaccagagcaccugcagcgccgugagcaagggcuaccugagcgcccugagaaccggcugguacaccagcgugaucaccaucgagcugagcaacaucaaggagaacaagugcaacggcaccgacgccaaggugaagcugaucaagcaggagcuggacaaguacaagaacgccgugaccgagcugcagaugcugaugugcagcacccccgccgccggcagcggcagcgccaucgccagcggcaucgccgugugcaaggugcugcaccuggagggcgaggugaacaagaucaagaacgcccugcugagcaccaacaaggccguggugagccugagcaacggcgugagcgugcugaccuucaaggugcuggaccugaagaacuacaucgacaagcagcugcugcccauccugaacaagcagagcugcagcaucagcaacaucgagaccgugauggaguuccagcagaagaacaacagacugcuggagaucaccagagaguucagcgugaacgccggcgugaccacccccgugagcaccuacaugcugaccaacagcgagcugcugagccugaucaacgacaugcccaucaccaacgaccagaagaagcugaugagcaacaacgugcagaucgugagacagcagagcuacagcaucaugugcaucaucaaggaggaggugcuggccuacguggugcagcugccccuguacggcgugaucgacacccccugcuggaagcugcacaccagcccccugugcaccaccaacaccaaggagggcagcaacaucugccugaccagaaccgacagaggcugguacugcgacaacgccggcagcgugagcuucuucccccaggccgagaccugcaaggugugcagcaacagaguguucugcgacaccaugaacagccugacccugcccagcgaggugaaccugugcaacaucgacaucuucaaccccaaguacgacugcaagaucaugaccagcaagaccgacgugagcagcagcgugaucaccagccugggcgccaucgugagcugcuacggcaagaccaagugcaccgccagcaacaagaacaagggcaucaucaagaccuucagcaacggcugcgacuacgugagcaacaagggcguggacaccgugagcgugggcaacacccuguacuacgugaacaagcaggagggcaagagccuguacgugaagggcgagcccaucaucaacuucuacgacccccugguguuccccagcgacgaguucgacgccagcaucagccaggugaacgagaagaucaaccagagccuggccuucaucagaaagagcgacgagcugcugcacaacgugaacgugggcaagagcaccaccaacaucaugaucaccaccaucaucaucgugaucaucgugauccugcugcugcugaucgccgugggccuguuccuguacugcaaggccagaagcacccccgugacccugagcaaggaccagcugagcggcaucaacaacaucgccuucagcaacugaggacuaguggaagcauuuuccuggcugauuaaaagaaauuacucagcuauggucaucuguuccuguuagaaggcuaugcagcauauuauauacuaugcgcauguuaugaaaugcauaauaaaaaauuuuaaaaaaucuaaaagaucuaaaaaaaaaaaaaaaaaaaaaaaaaaaaaaaaaaaaaaaaaaaaaaaaaaaaaaaaaaaaaaaaugcaucccccccccccccccccccccccccccccccaaaggcucuuuucagagccaccagaauu

SEQ ID NO: 18534 - RNA, 2057 nt, Artificial Sequence
  mRNA product Design d-5 comprising derived and/or modified sequence from HRSV(Memphis-37)__AIY60640.1__F_DSCav1_mut7 (opt5)
gggagagggcgcuuggcuugcaaggacccugagcugcggcauugaagcacacccaacccaacucgacugaagucagccucacugaaccggaucugagaaucuucucucucugggcuugccagggcucuccgaaccuagcuagcauccucuucaauuccaacuagaaagcuuaccauggagcugcccauccucaagaccaacgccauuacaacgauccuggcugccgugacccuuugcuucgcgagcucccagaauauuacagaagaguuuuaccaaucuaccuguagcgcugucuccaaaggcuaucugucugcccucagaacagggugguacaccagcguuaucacaauugaacuguccaacaucaaggagaauaaaugcaacggaaccgacgccaaggugaaacuuaucaagcaggaacuggauaaguauaaaaaugcugugacggagcuccagaugcugauguguucuaccccugccgcuggcagcggguccgccauugcgagcggaaucgccgucugcaaggugcugcaccucgagggcgaaguuaacaaaauuaagaaugcucugcuuucuacaaacaaagccguggucucccugagcaauggggugucuguucucaccuucaaggugcuggaccuuaagaacuacaucgauaaacagcugcucccgauucugaauaagcaauccuguagcaucucuaacauugagacagucauggaauuucagcagaaaaauaaccggcugcucgagaucacccgcgaguucuccgugaaugcuggagugacgacacccgucagcaccuauaugcugacaaacuccgaacuucugucucucaucaacgacaugccuauuaccaaugaucagaagaaacugaugagcaacaauguucaaaucgugagacagcaguccuacagcauuaugugcaucauuaaggaggaagugcuugccuaugucgugcagcugccccucuacggcguuaucgacaccccuuguuggaaacugcauacaucuccccugugcacgaccaacacaaaggagggcuccaauaucugucucacccggacagaucgcgggugguacugcgacaacgcgggaagcgugagcuuuuucccucaagccgaaaccuguaaggucugcucuaauagaguguuuugcgauacgaugaacucccugacacuuccgucugagguuaaucuguguaacauugacaucuucaaucccaaauaugauugcaagauuaugaccagcaaaaccgacguguccagcucugucaucacaucccucggcgcuauugugagcuguuacgggaagaccaaaugcacagccucuaacaagaauaagggaaucaucaaaacguuuuccaacggcugugauuaugucagcaauaaggggguggacaccguuuccgugggaaacacacuguacuaugucaacaaacaggagggcaagucucuuuacgugaaaggcgaaccuauuaucaauuucuaugacccccugguuuuuccuagcgaugaguucgacgcuuccauuucucaggugaacgaaaagaucaaucaaagccucgccuuuauucggaaguccgaugagcugcugcacaacgucaauguggggaaaagcaccacaaacaucaugauuaccacgaucaucauugugaucauuguuauccuccugcuucugauugccgucggacucuuccuguacugcaaggcucgcucuacccccgugacacuguccaaagaccagcuuagcggcaucaauaacaucgcguucucuaauugaggacuaguggaagcauuuuccuggcugauuaaaagaaauuacucagcuauggucaucuguuccuguuagaaggcuaugcagcauauuauauacuaugcgcauguuaugaaaugcauaauaaaaaauuuuaaaaaaucuaaaagaucuaaaaaaaaaaaaaaaaaaaaaaaaaaaaaaaaaaaaaaaaaaaaaaaaaaaaaaaaaaaaaaaaugcaucccccccccccccccccccccccccccccccaaaggcucuuuucagagccaccagaauu

SEQ ID NO: 18535 - RNA, 2057 nt, Artificial Sequence
  mRNA product Design d-5 comprising derived and/or modified sequence from HRSV(Memphis-37)__AIY60640.1__F_DSCav1_mut7 (opt6)
gggagagggcgcuuggcuugcaaggacccugagcugcggcauugaagcacacccaacccaacucgacugaagucagccucacugaaccggaucugagaaucuucucucucugggcuugccagggcucuccgaaccuagcuagcauccucuucaauuccaacuagaaagcuuaccauggaacuaccaauacucaaaacaaaugcuauaaccacaauacucgcagcaguaacauuauguuucgcaucaucccaaaacauaacagaagaauuuuaucaaucaaccuguucagcaguauccaaaggauaccuaagugcauuaagaaccggaugguacacaucaguaauaaccauagaacuuucaaacauaaaagaaaacaaauguaacggcacagacgcaaaagucaaacucaucaaacaggaacuugacaaauauaaaaacgcaguaaccgaacuacaaaugcuaaugugcucaacaccagcagcaggaucaggaucagcaauugcaucuggaauagcuguaugcaaaguccuacaccuagaaggagaaguaaacaaaaucaaaaacgcauuacucuccacaaacaaagcaguaguaucacuaucaaacggaguuucaguacuaaccuucaaaguauuagaccuaaaaaacuacauagacaaacaacuacuaccuauacuaaacaaacaauccuguucaauaagcaacauugaaacuguaauggaauuucaacaaaaaaacaaccgccuauuagaaauaaccagagaauuuuccguaaaugcaggaguaaccacaccagucucuacauacauguuaaccaacucagaacuauuaucacucauaaaugacaugccuauaacaaacgaccaaaaaaaacuaaugucaaacaacguacaaauaguaagacaacaaucauauuccauaaugugcauaauaaaagaagaaguacuugcauacgugguucaacuaccccuauauggaguuauagacacaccaugcuggaaacuccacacuuccccacuuugcacaacuaacacaaaagaaggaucaaauauaugccuaaccagaacagaccguggaugguacugcgacaacgcuggaucagucuccuucuuuccacaagcagaaaccugcaaagucugcucaaauagagucuucugugacacaaugaacucacucacccuacccucagaaguaaaccuauguaauauagauauauuuaauccaaaauacgacugcaaaauuaugacaaguaaaacagacguaagcucaucagucauaaccagccuaggagcaauaguauccuguuacggcaaaacaaaaugcacagcuucaaacaaaaacaaaggcauaauaaaaacauucucaaacggaugugacuauguaucaaauaaaggaguugacacaguaucaguuggaaacacacuauacuauguaaacaaacaagaaggaaaaucacuauacguuaaaggcgaacccauaaucaauuucuacgacccccuagucuucccauccgaugaauuugacgcaucaauaucccaaguaaaugaaaaaaucaaccaaucccuagcauuuauacgaaaauccgacgaacuacuccauaaugucaacgucgguaaaucaacgacaaacaucaugaucacaacaauaauaauaguaauaauuguaauauuacucuuacucauagcaguaggccuauuucuauauugcaaagccagaucaacaccaguaaccuuauccaaagaccaacuaucuggaauaaacaacauagcauuuuccaacugaggacuaguggaagcauuuuccuggcugauuaaaagaaauuacucagcuauggucaucuguuccuguuagaaggcuaugcagcauauuauauacuaugcgcauguuaugaaaugcauaauaaaaaauuuuaaaaaaucuaaaagaucuaaaaaaaaaaaaaaaaaaaaaaaaaaaaaaaaaaaaaaaaaaaaaaaaaaaaaaaaaaaaaaaaugcaucccccccccccccccccccccccccccccccaaaggcucuuuucagagccaccagaauu

SEQ ID NO: 18536 - RNA, 2057 nt, Artificial Sequence
  mRNA product Design d-5 comprising derived and/or modified sequence from HRSV(Memphis-37)__AIY60640.1__F_DSCav1_mut7 (opt11)
gggagagggcgcuuggcuugcaaggacccugagcugcggcauugaagcacacccaacccaacucgacugaagucagccucacugaaccggaucugagaaucuucucucucugggcuugccagggcucuccgaaccuagcuagcauccucuucaauuccaacuagaaagcuuaccauggaacuccccauacuuaaaacaaacgccauaacaacuauacucgcagccgucacccucuguuucgcauccucucaaaacaucaccgaagaguucuaucaaucaaccugcuccgccgucucaaaaggcuaccucuccgcccuacgcacaggcugguacaccagcgucauuaccauagaacucucgaacaucaaagaaaacaaaugcaacggcaccgacgcaaaagugaaacucaucaaacaagaacucgacaaauacaaaaacgccgucaccgaacuucagaugcucaugugcuccaccccugccgccggcagcggcuccgccauagccuccggcaucgcagucugcaaaguccuccaccucgaaggagaaguaaacaaaaucaaaaaugcucuccucuccacaaacaaagccgucgucucacucuccaauggagucuccguccucaccuucaaaguccucgaccucaaaaacuacauagacaaacaacuacuccccauccucaacaagcaauccugcucuaucuccaacauagaaaccguuauggaguuccaacagaaaaauaaccgccugcuagaaauaacccgagaguucuccgucaacgcaggcgucacuacccccgucagcacauacaugcuaacaaacuccgaacugcucucccuuaucaacgacaugcccaucacaaacgaucagaaaaagcucaugucuaacaacguacaaaucguucggcaacaauccuacuccaucaugugcaucaucaaagaagaagugcucgccuacguaguccaacucccccucuacggagucaucgacacacccugcuggaaacuccacacaucaccccucugcaccaccaacacaaaagaaggguccaacaucugccucacgcgcaccgaccgaggcugguacugcgacaacgccggcuccguauccuucuucccccaagcagaaaccugcaaggucugcuccaaccgcguauucugcgacaccaugaacucgcucacccuccccucagaagucaaccuauguaacaucgacauauucaaucccaaauacgacugcaagauaaugacuuccaaaaccgacguaagcuccucggucaucaccucccucggcgccaucgucuccugcuacggcaaaaccaaaugcaccgccuccaauaagaauaaaggcauaauaaagacauucagcaacggcugcgauuacgucuccaacaaaggugucgacaccgucucagucggcaacacucuauacuacgugaacaaacaagaaggcaaaagccuauacguuaaaggcgaaccaauaaucaauuucuacgacccucuagucuuucccucugacgaguucgaugccagcauaagccaagucaacgaaaagaucaaccaaucacucgccuucauccguaaauccgacgaacugcuccacaaugucaauguaggcaaaucaacaaccaacaucaugaucaccacuauuaucaucgucaucaucguaauccuacuccuacuaaucgccgucggccuauuccucuacugcaaagcccgcucgacccccgucacucucagcaaggaucaacuauccggcaucaacaacaucgccuucuccaacuaaggacuaguggaagcauuuuccuggcugauuaaaagaaauuacucagcuauggucaucuguuccuguuagaaggcuaugcagcauauuauauacuaugcgcauguuaugaaaugcauaauaaaaaauuuuaaaaaaucuaaaagaucuaaaaaaaaaaaaaaaaaaaaaaaaaaaaaaaaaaaaaaaaaaaaaaaaaaaaaaaaaaaaaaaaugcaucccccccccccccccccccccccccccccccaaaggcucuuuucagagccaccagaauu

SEQ ID NO: 18537 - RNA, 1937 nt, Artificial Sequence
  mRNA product Design e-1 comprising derived and/or modified sequence from HRSV(Memphis-37)__AIY60640.1__F_DSCav1_mut7 (opt1)
gggagaauauaagcguuggcggagcgucgguuguagcacucugcgcgcccgcucuucugcugcuguuugucuacuuccuccugcuuccccgccgccgccgccgccaucaagcuuaccauggagcugcccauccucaagaccaacgccaucaccacgauccuggccgcggugacccugugcuucgccagcucccagaacaucaccgaggaguucuaccagagcacgugcuccgccgucagcaagggcuaccucuccgcccugcgcaccgggugguacaccagcgugaucaccaucgagcuguccaacaucaaggagaacaagugcaacggcaccgacgccaaggugaagcucaucaagcaggagcuggacaaguacaagaacgcggucacggagcugcagaugcugaugugcagcaccccggccgccggcuccgggagcgcgaucgccuccggcaucgccgucugcaaggugcugcaccucgagggcgaggugaacaagaucaagaacgcccugcuguccaccaacaaggccgucgugagccucuccaacggggugagcguccugaccuucaaggugcuggaccucaagaacuacaucgacaagcagcugcugcccauccugaacaagcagagcugcuccaucagcaacaucgagaccgucauggaguuccagcagaagaacaaccgccuccuggagaucacgcgggaguucagcgugaacgcgggcgugaccacccccgucuccaccuacaugcugacgaacagcgagcuccugucccugaucaacgacaugccgaucaccaacgaccagaagaagcucaugagcaacaacgugcagaucgugcgccagcaguccuacagcaucaugugcaucaucaaggaggagguccuggccuacguggugcagcugccccucuacggggucaucgacacccccugcuggaagcugcacaccagcccccugugcacgaccaacaccaaggagggcuccaacaucugccucacccggacggaccgcgggugguacugcgacaacgccggcagcguguccuucuucccgcaggccgagaccugcaaggucugcagcaaccggguguucugcgacaccaugaacucccugacccugcccagcgaggugaaccucugcaacaucgacaucuucaaccccaaguacgacugcaagaucaugacguccaagaccgacgucagcuccagcgugaucaccucccugggcgccaucgugagcugcuacgggaagaccaagugcacggcgagcaacaagaacaagggcaucaucaagaccuucuccaacgggugcgacuacgucagcaacaagggcguggacaccguguccgucggcaacacccuguacuacgugaacaagcaggagggcaagagccucuacgugaagggggagcccaucaucaacuucuacgacccgcuggucuuccccuccgacgaguucgacgccagcaucucccaggugaacgagaagaucaaccagagccuggccuucauccggaaguccgacgagcuccugcacaacgugaacgucggcaagagcaccacgaacaucaugaucaccaccaucaucaucgugaucaucgugauccugcugcuccugaucgccgucgggcuguuccucuacugcaaggcccgcuccacccccgugacgcugagcaaggaccagcuguccgggaucaacaacaucgcguucagcaacugaggacuaguguccaccugucccuccugggcugcuggauugucucguuuuccugccaaauaaacaggaucagcgcuuuacagaucuaaaaaaaaaaaaaaaaaaaaaaaaaaaaaaaaaaaaaaaaaaaaaaaaaaaaaaaaaaaaaaaaugcaucccccccccccccccccccccccccccccccaaaggcucuuuucagagccaccagaauu

SEQ ID NO: 18538 - RNA, 1937 nt, Artificial Sequence
  mRNA product Design e-1 comprising derived and/or modified sequence from HRSV(Memphis-37)__AIY60640.1__F_DSCav1_mut7 (opt1)
gggagaauauaagcguuggcggagcgucgguuguagcacucugcgcgcccgcucuucugcugcuguuugucuacuuccuccugcuuccccgccgccgccgccgccaucaagcuuaccauggagcugcccauccucaagaccaacgccaucaccacgauccuggccgcggugacccugugcuucgccagcucccagaacaucaccgaggaguucuaccagagcacgugcuccgccgucagcaagggcuaccucuccgcccugcgcaccgggugguacaccagcgugaucaccaucgagcuguccaacaucaaggagaacaagugcaacggcaccgacgccaaggugaagcucaucaagcaggagcuggacaaguacaagaacgcggucacggagcugcagaugcucaugugcagcaccccggccgccggguccggcagcgccaucgcguccgggaucgccgugugcaaggugcugcaccuggagggcgaggucaacaagaucaagaacgcccuccugagcaccaacaaggccguggugucccugagcaacggcgucuccgugcucaccuucaaggugcuggaccugaagaacuacaucgacaagcagcuccugcccauccugaacaagcagagcugcuccaucagcaacaucgagacggucauggaguuccagcagaagaacaaccggcuccuggagaucacccgcgaguucuccgugaacgccggggugaccacccccgucagcacguacaugcugaccaacagcgagcuccugucccugaucaacgacaugcccaucaccaacgaccagaagaagcucaugagcaacaacgugcagaucgugcggcagcaguccuacagcaucaugugcaucaucaaggaggagguccuggcguacguggugcagcugccgcucuacggcgucaucgacacccccugcuggaagcugcacacgagcccccugugcaccaccaacaccaaggaggggagcaacaucugccucacgcgcaccgaccggggcugguacugcgacaacgccggguccgugagcuucuucccccaggccgagaccugcaaggugugcuccaaccgcgucuucugcgacaccaugaacagccugacgcugccguccgaggugaaccucugcaacaucgacaucuucaaccccaaguacgacugcaagaucaugaccagcaagaccgacgucuccagcuccgugaucaccagccugggcgccaucguguccugcuacggcaagacgaagugcaccgccagcaacaagaacaaggggaucaucaagaccuucuccaacggcugcgacuacgucagcaacaaggggguggacaccgugagcgucggcaacacgcuguacuacgugaacaagcaggagggcaagucccucuacgugaagggggagcccaucaucaacuucuacgacccccuggucuucccgagcgacgaguucgacgcguccaucagccaggugaacgagaagaucaaccagucccuggccuucauccggaaguccgacgagcuccugcacaacgugaacgucggcaaguccaccaccaacaucaugaucaccaccaucaucaucgugaucaucgugauccugcuccugcugaucgccgucggccucuuccuguacugcaaggcccgcagcacgcccgugacccuguccaaggaccagcugagcgggaucaacaacaucgccuucuccaacugaggacuaguguccaccugucccuccugggcugcuggauugucucguuuuccugccaaauaaacaggaucagcgcuuuacagaucuaaaaaaaaaaaaaaaaaaaaaaaaaaaaaaaaaaaaaaaaaaaaaaaaaaaaaaaaaaaaaaaaugcaucccccccccccccccccccccccccccccccaaaggcucuuuucagagccaccagaauu

SEQ ID NO: 18539 - RNA, 1937 nt, Artificial Sequence
  mRNA product Design e-1 comprising derived and/or modified sequence from HRSV(Memphis-37)__AIY60640.1__F_DSCav1_mut7 (opt2)
gggagaauauaagcguuggcggagcgucgguuguagcacucugcgcgcccgcucuucugcugcuguuugucuacuuccuccugcuuccccgccgccgccgccgccaucaagcuuaccauggagcuccccauccucaagaccaacgccaucaccaccauccucgccgccgucacccucugcuucgccuccucccagaacaucaccgaggaguucuaccaguccaccugcuccgccgucuccaagggcuaccucuccgcccuccgcaccggcugguacaccuccgucaucaccaucgagcucuccaacaucaaggagaacaagugcaacggcaccgacgccaaggucaagcucaucaagcaggagcucgacaaguacaagaacgccgucaccgagcuccagaugcucaugugcuccacccccgccgccggcuccggcuccgccaucgccuccggcaucgccgucugcaagguccuccaccucgagggcgaggucaacaagaucaagaacgcccuccucuccaccaacaaggccgucgucucccucuccaacggcgucuccguccucaccuucaagguccucgaccucaagaacuacaucgacaagcagcuccuccccauccucaacaagcaguccugcuccaucuccaacaucgagaccgucauggaguuccagcagaagaacaaccgccuccucgagaucacccgcgaguucuccgucaacgccggcgucaccacccccgucuccaccuacaugcucaccaacuccgagcuccucucccucaucaacgacaugcccaucaccaacgaccagaagaagcucauguccaacaacguccagaucguccgccagcaguccuacuccaucaugugcaucaucaaggaggagguccucgccuacgucguccagcucccccucuacggcgucaucgacacccccugcuggaagcuccacaccuccccccucugcaccaccaacaccaaggagggcuccaacaucugccucacccgcaccgaccgcggcugguacugcgacaacgccggcuccgucuccuucuucccccaggccgagaccugcaaggucugcuccaaccgcgucuucugcgacaccaugaacucccucacccuccccuccgaggucaaccucugcaacaucgacaucuucaaccccaaguacgacugcaagaucaugaccuccaagaccgacgucuccuccuccgucaucaccucccucggcgccaucgucuccugcuacggcaagaccaagugcaccgccuccaacaagaacaagggcaucaucaagaccuucuccaacggcugcgacuacgucuccaacaagggcgucgacaccgucuccgucggcaacacccucuacuacgucaacaagcaggagggcaagucccucuacgucaagggcgagcccaucaucaacuucuacgacccccucgucuuccccuccgacgaguucgacgccuccaucucccaggucaacgagaagaucaaccagucccucgccuucauccgcaaguccgacgagcuccuccacaacgucaacgucggcaaguccaccaccaacaucaugaucaccaccaucaucaucgucaucaucgucauccuccuccuccucaucgccgucggccucuuccucuacugcaaggcccgcuccacccccgucacccucuccaaggaccagcucuccggcaucaacaacaucgccuucuccaacugaggacuaguguccaccugucccuccugggcugcuggauugucucguuuuccugccaaauaaacaggaucagcgcuuuacagaucuaaaaaaaaaaaaaaaaaaaaaaaaaaaaaaaaaaaaaaaaaaaaaaaaaaaaaaaaaaaaaaaaugcaucccccccccccccccccccccccccccccccaaaggcucuuuucagagccaccagaauu

SEQ ID NO: 18540 - RNA, 1937 nt, Artificial Sequence
  mRNA product Design e-1 comprising derived and/or modified sequence from HRSV(Memphis-37)__AIY60640.1__F_DSCav1_mut7 (opt3)
gggagaauauaagcguuggcggagcgucgguuguagcacucugcgcgcccgcucuucugcugcuguuugucuacuuccuccugcuuccccgccgccgccgccgccaucaagcuuaccauggagcugcccauccucaagaccaacgccauuacaacuauacuugcugcagugacgcugugcuucgccagcucccagaauaucaccgaagaguuuuaccaaucuacauguucagcggucaguaaaggcuauuugagcgcuuuaagaacugggugguacaccuccguuauuacaaucgaacugucuaacauuaaggagaauaaaugcaacggaaccgacgccaaggugaaacuaaucaagcaggaacucgauaaguauaaaaaugcaguaacugagcugcagaugcuuauguguucgaccccugccgcugguucaggcagcgcaauagccagugggaucgcugugugcaagguccugcacuuggagggagaagugaacaaaauuaagaaugcccuccuguccacaaacaaagcgguugugucucugagcaauggcgucuccgugcucacguucaagguauuagaccugaagaacuacaucgauaaacagcuuuugccaauucugaauaagcaaucauguaguaucagcaacauagagacuguuauggaauuucagcagaaaaauaacaggcuacucgagauuacccgggaguucucugugaaugccggugucacaacuccgguguccaccuauaugcugacaaacucagaacuucugagcuugaucaacgacaugcccauuaccaaugaucagaagaaacucaugaguaacaaugugcaaaucguccgccagcagucuuacuccaucaugugcauuauaaaggaggaaguucuggcauaugugguacaguuaccucuguacggggugaucgacacgccauguuggaaacuccauacuagcccccuuugcacaaccaacacuaaggagggaucgaauauuugucugacacgaaccgaucguggcugguacugcgacaacgcuggcucugucuccuuuuucccucaagccgaaacguguaaggugugcucaaauagaguguuuugcgauaccaugaacaguuugacacuaccaagcgagguuaaucuguguaacaucgacauauucaaucccaaauaugauugcaagauuaugacuuccaaaaccgacgucucuagcucagugaucacaagucucggggcaaucguauccuguuacggaaagacuaaaugcaccgcuagcaacaagaauaaggguauuaucaaaacauuuucuaacggcugugauuauguuucaaauaaggggguggacaccgucagugugggaaacacucuguacuaugucaacaaacaggagggcaagagccuuuacgugaaaggugaaccuauuauaaauuucuaugacccacugguuuuuccguccgaugaguucgacgccucuaucagccaggugaacgaaaagauuaaucaaucguuggcguuuaucaggaaguccgaugagcuccugcacaacguaaaugucgggaaaucaacgacaaacaucaugauuaccacuauaaucauugugaucauuguuaucuuacugcuacucauagccgugggacuguuccuuuacugcaaggcacggaguacccccgucacauugucuaaagaccagcugagcggcaucaauaacauugcuuucuccaauugaggacuaguguccaccugucccuccugggcugcuggauugucucguuuuccugccaaauaaacaggaucagcgcuuuacagaucuaaaaaaaaaaaaaaaaaaaaaaaaaaaaaaaaaaaaaaaaaaaaaaaaaaaaaaaaaaaaaaaaugcaucccccccccccccccccccccccccccccccaaaggcucuuuucagagccaccagaauu

SEQ ID NO: 18541 - RNA, 1937 nt, Artificial Sequence
  mRNA product Design e-1 comprising derived and/or modified sequence from HRSV(Memphis-37)__AIY60640.1__F_DSCav1_mut7 (opt4)
gggagaauauaagcguuggcggagcgucgguuguagcacucugcgcgcccgcucuucugcugcuguuugucuacuuccuccugcuuccccgccgccgccgccgccaucaagcuuaccauggagcugcccauccugaagaccaacgccaucaccaccauccuggccgccgugacccugugcuucgccagcagccagaacaucaccgaggaguucuaccagagcaccugcagcgccgugagcaagggcuaccugagcgcccugagaaccggcugguacaccagcgugaucaccaucgagcugagcaacaucaaggagaacaagugcaacggcaccgacgccaaggugaagcugaucaagcaggagcuggacaaguacaagaacgccgugaccgagcugcagaugcugaugugcagcacccccgccgccggcagcggcagcgccaucgccagcggcaucgccgugugcaaggugcugcaccuggagggcgaggugaacaagaucaagaacgcccugcugagcaccaacaaggccguggugagccugagcaacggcgugagcgugcugaccuucaaggugcuggaccugaagaacuacaucgacaagcagcugcugcccauccugaacaagcagagcugcagcaucagcaacaucgagaccgugauggaguuccagcagaagaacaacagacugcuggagaucaccagagaguucagcgugaacgccggcgugaccacccccgugagcaccuacaugcugaccaacagcgagcugcugagccugaucaacgacaugcccaucaccaacgaccagaagaagcugaugagcaacaacgugcagaucgugagacagcagagcuacagcaucaugugcaucaucaaggaggaggugcuggccuacguggugcagcugccccuguacggcgugaucgacacccccugcuggaagcugcacaccagcccccugugcaccaccaacaccaaggagggcagcaacaucugccugaccagaaccgacagaggcugguacugcgacaacgccggcagcgugagcuucuucccccaggccgagaccugcaaggugugcagcaacagaguguucugcgacaccaugaacagccugacccugcccagcgaggugaaccugugcaacaucgacaucuucaaccccaaguacgacugcaagaucaugaccagcaagaccgacgugagcagcagcgugaucaccagccugggcgccaucgugagcugcuacggcaagaccaagugcaccgccagcaacaagaacaagggcaucaucaagaccuucagcaacggcugcgacuacgugagcaacaagggcguggacaccgugagcgugggcaacacccuguacuacgugaacaagcaggagggcaagagccuguacgugaagggcgagcccaucaucaacuucuacgacccccugguguuccccagcgacgaguucgacgccagcaucagccaggugaacgagaagaucaaccagagccuggccuucaucagaaagagcgacgagcugcugcacaacgugaacgugggcaagagcaccaccaacaucaugaucaccaccaucaucaucgugaucaucgugauccugcugcugcugaucgccgugggccuguuccuguacugcaaggccagaagcacccccgugacccugagcaaggaccagcugagcggcaucaacaacaucgccuucagcaacugaggacuaguguccaccugucccuccugggcugcuggauugucucguuuuccugccaaauaaacaggaucagcgcuuuacagaucuaaaaaaaaaaaaaaaaaaaaaaaaaaaaaaaaaaaaaaaaaaaaaaaaaaaaaaaaaaaaaaaaugcaucccccccccccccccccccccccccccccccaaaggcucuuuucagagccaccagaauu

SEQ ID NO: 18542 - RNA, 1937 nt, Artificial Sequence
  mRNA product Design e-1 comprising derived and/or modified sequence from HRSV(Memphis-37)__AIY60640.1__F_DSCav1_mut7 (opt5)
gggagaauauaagcguuggcggagcgucgguuguagcacucugcgcgcccgcucuucugcugcuguuugucuacuuccuccugcuuccccgccgccgccgccgccaucaagcuuaccauggagcugcccauccucaagaccaacgccauuacaacgauccuggcugccgugacccuuugcuucgcgagcucccagaauauuacagaagaguuuuaccaaucuaccuguagcgcugucuccaaaggcuaucugucugcccucagaacagggugguacaccagcguuaucacaauugaacuguccaacaucaaggagaauaaaugcaacggaaccgacgccaaggugaaacuuaucaagcaggaacuggauaaguauaaaaaugcugugacggagcuccagaugcugauguguucuaccccugccgcuggcagcggguccgccauugcgagcggaaucgccgucugcaaggugcugcaccucgagggcgaaguuaacaaaauuaagaaugcucugcuuucuacaaacaaagccguggucucccugagcaauggggugucuguucucaccuucaaggugcuggaccuuaagaacuacaucgauaaacagcugcucccgauucugaauaagcaauccuguagcaucucuaacauugagacagucauggaauuucagcagaaaaauaaccggcugcucgagaucacccgcgaguucuccgugaaugcuggagugacgacacccgucagcaccuauaugcugacaaacuccgaacuucugucucucaucaacgacaugccuauuaccaaugaucagaagaaacugaugagcaacaauguucaaaucgugagacagcaguccuacagcauuaugugcaucauuaaggaggaagugcuugccuaugucgugcagcugccccucuacggcguuaucgacaccccuuguuggaaacugcauacaucuccccugugcacgaccaacacaaaggagggcuccaauaucugucucacccggacagaucgcgggugguacugcgacaacgcgggaagcgugagcuuuuucccucaagccgaaaccuguaaggucugcucuaauagaguguuuugcgauacgaugaacucccugacacuuccgucugagguuaaucuguguaacauugacaucuucaaucccaaauaugauugcaagauuaugaccagcaaaaccgacguguccagcucugucaucacaucccucggcgcuauugugagcuguuacgggaagaccaaaugcacagccucuaacaagaauaagggaaucaucaaaacguuuuccaacggcugugauuaugucagcaauaaggggguggacaccguuuccgugggaaacacacuguacuaugucaacaaacaggagggcaagucucuuuacgugaaaggcgaaccuauuaucaauuucuaugacccccugguuuuuccuagcgaugaguucgacgcuuccauuucucaggugaacgaaaagaucaaucaaagccucgccuuuauucggaaguccgaugagcugcugcacaacgucaauguggggaaaagcaccacaaacaucaugauuaccacgaucaucauugugaucauuguuauccuccugcuucugauugccgucggacucuuccuguacugcaaggcucgcucuacccccgugacacuguccaaagaccagcuuagcggcaucaauaacaucgcguucucuaauugaggacuaguguccaccugucccuccugggcugcuggauugucucguuuuccugccaaauaaacaggaucagcgcuuuacagaucuaaaaaaaaaaaaaaaaaaaaaaaaaaaaaaaaaaaaaaaaaaaaaaaaaaaaaaaaaaaaaaaaugcaucccccccccccccccccccccccccccccccaaaggcucuuuucagagccaccagaauu

SEQ ID NO: 18543 - RNA, 1937 nt, Artificial Sequence
  mRNA product Design e-1 comprising derived and/or modified sequence from HRSV(Memphis-37)__AIY60640.1__F_DSCav1_mut7 (opt6)
gggagaauauaagcguuggcggagcgucgguuguagcacucugcgcgcccgcucuucugcugcuguuugucuacuuccuccugcuuccccgccgccgccgccgccaucaagcuuaccauggaacuaccaauacucaaaacaaaugcuauaaccacaauacucgcagcaguaacauuauguuucgcaucaucccaaaacauaacagaagaauuuuaucaaucaaccuguucagcaguauccaaaggauaccuaagugcauuaagaaccggaugguacacaucaguaauaaccauagaacuuucaaacauaaaagaaaacaaauguaacggcacagacgcaaaagucaaacucaucaaacaggaacuugacaaauauaaaaacgcaguaaccgaacuacaaaugcuaaugugcucaacaccagcagcaggaucaggaucagcaauugcaucuggaauagcuguaugcaaaguccuacaccuagaaggagaaguaaacaaaaucaaaaacgcauuacucuccacaaacaaagcaguaguaucacuaucaaacggaguuucaguacuaaccuucaaaguauuagaccuaaaaaacuacauagacaaacaacuacuaccuauacuaaacaaacaauccuguucaauaagcaacauugaaacuguaauggaauuucaacaaaaaaacaaccgccuauuagaaauaaccagagaauuuuccguaaaugcaggaguaaccacaccagucucuacauacauguuaaccaacucagaacuauuaucacucauaaaugacaugccuauaacaaacgaccaaaaaaaacuaaugucaaacaacguacaaauaguaagacaacaaucauauuccauaaugugcauaauaaaagaagaaguacuugcauacgugguucaacuaccccuauauggaguuauagacacaccaugcuggaaacuccacacuuccccacuuugcacaacuaacacaaaagaaggaucaaauauaugccuaaccagaacagaccguggaugguacugcgacaacgcuggaucagucuccuucuuuccacaagcagaaaccugcaaagucugcucaaauagagucuucugugacacaaugaacucacucacccuacccucagaaguaaaccuauguaauauagauauauuuaauccaaaauacgacugcaaaauuaugacaaguaaaacagacguaagcucaucagucauaaccagccuaggagcaauaguauccuguuacggcaaaacaaaaugcacagcuucaaacaaaaacaaaggcauaauaaaaacauucucaaacggaugugacuauguaucaaauaaaggaguugacacaguaucaguuggaaacacacuauacuauguaaacaaacaagaaggaaaaucacuauacguuaaaggcgaacccauaaucaauuucuacgacccccuagucuucccauccgaugaauuugacgcaucaauaucccaaguaaaugaaaaaaucaaccaaucccuagcauuuauacgaaaauccgacgaacuacuccauaaugucaacgucgguaaaucaacgacaaacaucaugaucacaacaauaauaauaguaauaauuguaauauuacucuuacucauagcaguaggccuauuucuauauugcaaagccagaucaacaccaguaaccuuauccaaagaccaacuaucuggaauaaacaacauagcauuuuccaacugaggacuaguguccaccugucccuccugggcugcuggauugucucguuuuccugccaaauaaacaggaucagcgcuuuacagaucuaaaaaaaaaaaaaaaaaaaaaaaaaaaaaaaaaaaaaaaaaaaaaaaaaaaaaaaaaaaaaaaaugcaucccccccccccccccccccccccccccccccaaaggcucuuuucagagccaccagaauu

SEQ ID NO: 18544 - RNA, 1937 nt, Artificial Sequence
  mRNA product Design e-1 comprising derived and/or modified sequence from HRSV(Memphis-37)__AIY60640.1__F_DSCav1_mut7 (opt11)
gggagaauauaagcguuggcggagcgucgguuguagcacucugcgcgcccgcucuucugcugcuguuugucuacuuccuccugcuuccccgccgccgccgccgccaucaagcuuaccauggaacuccccauacuuaaaacaaacgccauaacaacuauacucgcagccgucacccucuguuucgcauccucucaaaacaucaccgaagaguucuaucaaucaaccugcuccgccgucucaaaaggcuaccucuccgcccuacgcacaggcugguacaccagcgucauuaccauagaacucucgaacaucaaagaaaacaaaugcaacggcaccgacgcaaaagugaaacucaucaaacaagaacucgacaaauacaaaaacgccgucaccgaacuucagaugcucaugugcuccaccccugccgccggcagcggcuccgccauagccuccggcaucgcagucugcaaaguccuccaccucgaaggagaaguaaacaaaaucaaaaaugcucuccucuccacaaacaaagccgucgucucacucuccaauggagucuccguccucaccuucaaaguccucgaccucaaaaacuacauagacaaacaacuacuccccauccucaacaagcaauccugcucuaucuccaacauagaaaccguuauggaguuccaacagaaaaauaaccgccugcuagaaauaacccgagaguucuccgucaacgcaggcgucacuacccccgucagcacauacaugcuaacaaacuccgaacugcucucccuuaucaacgacaugcccaucacaaacgaucagaaaaagcucaugucuaacaacguacaaaucguucggcaacaauccuacuccaucaugugcaucaucaaagaagaagugcucgccuacguaguccaacucccccucuacggagucaucgacacacccugcuggaaacuccacacaucaccccucugcaccaccaacacaaaagaaggguccaacaucugccucacgcgcaccgaccgaggcugguacugcgacaacgccggcuccguauccuucuucccccaagcagaaaccugcaaggucugcuccaaccgcguauucugcgacaccaugaacucgcucacccuccccucagaagucaaccuauguaacaucgacauauucaaucccaaauacgacugcaagauaaugacuuccaaaaccgacguaagcuccucggucaucaccucccucggcgccaucgucuccugcuacggcaaaaccaaaugcaccgccuccaauaagaauaaaggcauaauaaagacauucagcaacggcugcgauuacgucuccaacaaaggugucgacaccgucucagucggcaacacucuauacuacgugaacaaacaagaaggcaaaagccuauacguuaaaggcgaaccaauaaucaauuucuacgacccucuagucuuucccucugacgaguucgaugccagcauaagccaagucaacgaaaagaucaaccaaucacucgccuucauccguaaauccgacgaacugcuccacaaugucaauguaggcaaaucaacaaccaacaucaugaucaccacuauuaucaucgucaucaucguaauccuacuccuacuaaucgccgucggccuauuccucuacugcaaagcccgcucgacccccgucacucucagcaaggaucaacuauccggcaucaacaacaucgccuucuccaacuaaggacuaguguccaccugucccuccugggcugcuggauugucucguuuuccugccaaauaaacaggaucagcgcuuuacagaucuaaaaaaaaaaaaaaaaaaaaaaaaaaaaaaaaaaaaaaaaaaaaaaaaaaaaaaaaaaaaaaaaugcaucccccccccccccccccccccccccccccccaaaggcucuuuucagagccaccagaauu

SEQ ID NO: 18545 - RNA, 1919 nt, Artificial Sequence
  mRNA product Design e-2 comprising derived and/or modified sequence from HRSV(Memphis-37)__AIY60640.1__F_DSCav1_mut7 (opt1)
gggagacccgugacccggaaguuguacggcuacgcgacuuucccucccacaaacccucgcgcccuuccuuuccuacuugggcccggcagaaagcuuaccauggagcugcccauccucaagaccaacgccaucaccacgauccuggccgcggugacccugugcuucgccagcucccagaacaucaccgaggaguucuaccagagcacgugcuccgccgucagcaagggcuaccucuccgcccugcgcaccgggugguacaccagcgugaucaccaucgagcuguccaacaucaaggagaacaagugcaacggcaccgacgccaaggugaagcucaucaagcaggagcuggacaaguacaagaacgcggucacggagcugcagaugcugaugugcagcaccccggccgccggcuccgggagcgcgaucgccuccggcaucgccgucugcaaggugcugcaccucgagggcgaggugaacaagaucaagaacgcccugcuguccaccaacaaggccgucgugagccucuccaacggggugagcguccugaccuucaaggugcuggaccucaagaacuacaucgacaagcagcugcugcccauccugaacaagcagagcugcuccaucagcaacaucgagaccgucauggaguuccagcagaagaacaaccgccuccuggagaucacgcgggaguucagcgugaacgcgggcgugaccacccccgucuccaccuacaugcugacgaacagcgagcuccugucccugaucaacgacaugccgaucaccaacgaccagaagaagcucaugagcaacaacgugcagaucgugcgccagcaguccuacagcaucaugugcaucaucaaggaggagguccuggccuacguggugcagcugccccucuacggggucaucgacacccccugcuggaagcugcacaccagcccccugugcacgaccaacaccaaggagggcuccaacaucugccucacccggacggaccgcgggugguacugcgacaacgccggcagcguguccuucuucccgcaggccgagaccugcaaggucugcagcaaccggguguucugcgacaccaugaacucccugacccugcccagcgaggugaaccucugcaacaucgacaucuucaaccccaaguacgacugcaagaucaugacguccaagaccgacgucagcuccagcgugaucaccucccugggcgccaucgugagcugcuacgggaagaccaagugcacggcgagcaacaagaacaagggcaucaucaagaccuucuccaacgggugcgacuacgucagcaacaagggcguggacaccguguccgucggcaacacccuguacuacgugaacaagcaggagggcaagagccucuacgugaagggggagcccaucaucaacuucuacgacccgcuggucuuccccuccgacgaguucgacgccagcaucucccaggugaacgagaagaucaaccagagccuggccuucauccggaaguccgacgagcuccugcacaacgugaacgucggcaagagcaccacgaacaucaugaucaccaccaucaucaucgugaucaucgugauccugcugcuccugaucgccgucgggcuguuccucuacugcaaggcccgcuccacccccgugacgcugagcaaggaccagcuguccgggaucaacaacaucgcguucagcaacugaggacuaguguccaccugucccuccugggcugcuggauugucucguuuuccugccaaauaaacaggaucagcgcuuuacagaucuaaaaaaaaaaaaaaaaaaaaaaaaaaaaaaaaaaaaaaaaaaaaaaaaaaaaaaaaaaaaaaaaugcaucccccccccccccccccccccccccccccccaaaggcucuuuucagagccaccagaauu

SEQ ID NO: 18546 - RNA, 1919 nt, Artificial Sequence
  mRNA product Design e-2 comprising derived and/or modified sequence from HRSV(Memphis-37)__AIY60640.1__F_DSCav1_mut7 (opt1)
gggagacccgugacccggaaguuguacggcuacgcgacuuucccucccacaaacccucgcgcccuuccuuuccuacuugggcccggcagaaagcuuaccauggagcugcccauccucaagaccaacgccaucaccacgauccuggccgcggugacccugugcuucgccagcucccagaacaucaccgaggaguucuaccagagcacgugcuccgccgucagcaagggcuaccucuccgcccugcgcaccgggugguacaccagcgugaucaccaucgagcuguccaacaucaaggagaacaagugcaacggcaccgacgccaaggugaagcucaucaagcaggagcuggacaaguacaagaacgcggucacggagcugcagaugcucaugugcagcaccccggccgccggguccggcagcgccaucgcguccgggaucgccgugugcaaggugcugcaccuggagggcgaggucaacaagaucaagaacgcccuccugagcaccaacaaggccguggugucccugagcaacggcgucuccgugcucaccuucaaggugcuggaccugaagaacuacaucgacaagcagcuccugcccauccugaacaagcagagcugcuccaucagcaacaucgagacggucauggaguuccagcagaagaacaaccggcuccuggagaucacccgcgaguucuccgugaacgccggggugaccacccccgucagcacguacaugcugaccaacagcgagcuccugucccugaucaacgacaugcccaucaccaacgaccagaagaagcucaugagcaacaacgugcagaucgugcggcagcaguccuacagcaucaugugcaucaucaaggaggagguccuggcguacguggugcagcugccgcucuacggcgucaucgacacccccugcuggaagcugcacacgagcccccugugcaccaccaacaccaaggaggggagcaacaucugccucacgcgcaccgaccggggcugguacugcgacaacgccggguccgugagcuucuucccccaggccgagaccugcaaggugugcuccaaccgcgucuucugcgacaccaugaacagccugacgcugccguccgaggugaaccucugcaacaucgacaucuucaaccccaaguacgacugcaagaucaugaccagcaagaccgacgucuccagcuccgugaucaccagccugggcgccaucguguccugcuacggcaagacgaagugcaccgccagcaacaagaacaaggggaucaucaagaccuucuccaacggcugcgacuacgucagcaacaaggggguggacaccgugagcgucggcaacacgcuguacuacgugaacaagcaggagggcaagucccucuacgugaagggggagcccaucaucaacuucuacgacccccuggucuucccgagcgacgaguucgacgcguccaucagccaggugaacgagaagaucaaccagucccuggccuucauccggaaguccgacgagcuccugcacaacgugaacgucggcaaguccaccaccaacaucaugaucaccaccaucaucaucgugaucaucgugauccugcuccugcugaucgccgucggccucuuccuguacugcaaggcccgcagcacgcccgugacccuguccaaggaccagcugagcgggaucaacaacaucgccuucuccaacugaggacuaguguccaccugucccuccugggcugcuggauugucucguuuuccugccaaauaaacaggaucagcgcuuuacagaucuaaaaaaaaaaaaaaaaaaaaaaaaaaaaaaaaaaaaaaaaaaaaaaaaaaaaaaaaaaaaaaaaugcaucccccccccccccccccccccccccccccccaaaggcucuuuucagagccaccagaauu

SEQ ID NO: 18547 - RNA, 1919 nt, Artificial Sequence
  mRNA product Design e-2 comprising derived and/or modified sequence from HRSV(Memphis-37)__AIY60640.1__F_DSCav1_mut7 (opt2)
gggagacccgugacccggaaguuguacggcuacgcgacuuucccucccacaaacccucgcgcccuuccuuuccuacuugggcccggcagaaagcuuaccauggagcuccccauccucaagaccaacgccaucaccaccauccucgccgccgucacccucugcuucgccuccucccagaacaucaccgaggaguucuaccaguccaccugcuccgccgucuccaagggcuaccucuccgcccuccgcaccggcugguacaccuccgucaucaccaucgagcucuccaacaucaaggagaacaagugcaacggcaccgacgccaaggucaagcucaucaagcaggagcucgacaaguacaagaacgccgucaccgagcuccagaugcucaugugcuccacccccgccgccggcuccggcuccgccaucgccuccggcaucgccgucugcaagguccuccaccucgagggcgaggucaacaagaucaagaacgcccuccucuccaccaacaaggccgucgucucccucuccaacggcgucuccguccucaccuucaagguccucgaccucaagaacuacaucgacaagcagcuccuccccauccucaacaagcaguccugcuccaucuccaacaucgagaccgucauggaguuccagcagaagaacaaccgccuccucgagaucacccgcgaguucuccgucaacgccggcgucaccacccccgucuccaccuacaugcucaccaacuccgagcuccucucccucaucaacgacaugcccaucaccaacgaccagaagaagcucauguccaacaacguccagaucguccgccagcaguccuacuccaucaugugcaucaucaaggaggagguccucgccuacgucguccagcucccccucuacggcgucaucgacacccccugcuggaagcuccacaccuccccccucugcaccaccaacaccaaggagggcuccaacaucugccucacccgcaccgaccgcggcugguacugcgacaacgccggcuccgucuccuucuucccccaggccgagaccugcaaggucugcuccaaccgcgucuucugcgacaccaugaacucccucacccuccccuccgaggucaaccucugcaacaucgacaucuucaaccccaaguacgacugcaagaucaugaccuccaagaccgacgucuccuccuccgucaucaccucccucggcgccaucgucuccugcuacggcaagaccaagugcaccgccuccaacaagaacaagggcaucaucaagaccuucuccaacggcugcgacuacgucuccaacaagggcgucgacaccgucuccgucggcaacacccucuacuacgucaacaagcaggagggcaagucccucuacgucaagggcgagcccaucaucaacuucuacgacccccucgucuuccccuccgacgaguucgacgccuccaucucccaggucaacgagaagaucaaccagucccucgccuucauccgcaaguccgacgagcuccuccacaacgucaacgucggcaaguccaccaccaacaucaugaucaccaccaucaucaucgucaucaucgucauccuccuccuccucaucgccgucggccucuuccucuacugcaaggcccgcuccacccccgucacccucuccaaggaccagcucuccggcaucaacaacaucgccuucuccaacugaggacuaguguccaccugucccuccugggcugcuggauugucucguuuuccugccaaauaaacaggaucagcgcuuuacagaucuaaaaaaaaaaaaaaaaaaaaaaaaaaaaaaaaaaaaaaaaaaaaaaaaaaaaaaaaaaaaaaaaugcaucccccccccccccccccccccccccccccccaaaggcucuuuucagagccaccagaauu

SEQ ID NO: 18548 - RNA, 1919 nt, Artificial Sequence
  mRNA product Design e-2 comprising derived and/or modified sequence from HRSV(Memphis-37)__AIY60640.1__F_DSCav1_mut7 (opt3)
gggagacccgugacccggaaguuguacggcuacgcgacuuucccucccacaaacccucgcgcccuuccuuuccuacuugggcccggcagaaagcuuaccauggagcugcccauccucaagaccaacgccauuacaacuauacuugcugcagugacgcugugcuucgccagcucccagaauaucaccgaagaguuuuaccaaucuacauguucagcggucaguaaaggcuauuugagcgcuuuaagaacugggugguacaccuccguuauuacaaucgaacugucuaacauuaaggagaauaaaugcaacggaaccgacgccaaggugaaacuaaucaagcaggaacucgauaaguauaaaaaugcaguaacugagcugcagaugcuuauguguucgaccccugccgcugguucaggcagcgcaauagccagugggaucgcugugugcaagguccugcacuuggagggagaagugaacaaaauuaagaaugcccuccuguccacaaacaaagcgguugugucucugagcaauggcgucuccgugcucacguucaagguauuagaccugaagaacuacaucgauaaacagcuuuugccaauucugaauaagcaaucauguaguaucagcaacauagagacuguuauggaauuucagcagaaaaauaacaggcuacucgagauuacccgggaguucucugugaaugccggugucacaacuccgguguccaccuauaugcugacaaacucagaacuucugagcuugaucaacgacaugcccauuaccaaugaucagaagaaacucaugaguaacaaugugcaaaucguccgccagcagucuuacuccaucaugugcauuauaaaggaggaaguucuggcauaugugguacaguuaccucuguacggggugaucgacacgccauguuggaaacuccauacuagcccccuuugcacaaccaacacuaaggagggaucgaauauuugucugacacgaaccgaucguggcugguacugcgacaacgcuggcucugucuccuuuuucccucaagccgaaacguguaaggugugcucaaauagaguguuuugcgauaccaugaacaguuugacacuaccaagcgagguuaaucuguguaacaucgacauauucaaucccaaauaugauugcaagauuaugacuuccaaaaccgacgucucuagcucagugaucacaagucucggggcaaucguauccuguuacggaaagacuaaaugcaccgcuagcaacaagaauaaggguauuaucaaaacauuuucuaacggcugugauuauguuucaaauaaggggguggacaccgucagugugggaaacacucuguacuaugucaacaaacaggagggcaagagccuuuacgugaaaggugaaccuauuauaaauuucuaugacccacugguuuuuccguccgaugaguucgacgccucuaucagccaggugaacgaaaagauuaaucaaucguuggcguuuaucaggaaguccgaugagcuccugcacaacguaaaugucgggaaaucaacgacaaacaucaugauuaccacuauaaucauugugaucauuguuaucuuacugcuacucauagccgugggacuguuccuuuacugcaaggcacggaguacccccgucacauugucuaaagaccagcugagcggcaucaauaacauugcuuucuccaauugaggacuaguguccaccugucccuccugggcugcuggauugucucguuuuccugccaaauaaacaggaucagcgcuuuacagaucuaaaaaaaaaaaaaaaaaaaaaaaaaaaaaaaaaaaaaaaaaaaaaaaaaaaaaaaaaaaaaaaaugcaucccccccccccccccccccccccccccccccaaaggcucuuuucagagccaccagaauu

SEQ ID NO: 18549 - RNA, 1919 nt, Artificial Sequence
  mRNA product Design e-2 comprising derived and/or modified sequence from HRSV(Memphis-37)__AIY60640.1__F_DSCav1_mut7 (opt4)
gggagacccgugacccggaaguuguacggcuacgcgacuuucccucccacaaacccucgcgcccuuccuuuccuacuugggcccggcagaaagcuuaccauggagcugcccauccugaagaccaacgccaucaccaccauccuggccgccgugacccugugcuucgccagcagccagaacaucaccgaggaguucuaccagagcaccugcagcgccgugagcaagggcuaccugagcgcccugagaaccggcugguacaccagcgugaucaccaucgagcugagcaacaucaaggagaacaagugcaacggcaccgacgccaaggugaagcugaucaagcaggagcuggacaaguacaagaacgccgugaccgagcugcagaugcugaugugcagcacccccgccgccggcagcggcagcgccaucgccagcggcaucgccgugugcaaggugcugcaccuggagggcgaggugaacaagaucaagaacgcccugcugagcaccaacaaggccguggugagccugagcaacggcgugagcgugcugaccuucaaggugcuggaccugaagaacuacaucgacaagcagcugcugcccauccugaacaagcagagcugcagcaucagcaacaucgagaccgugauggaguuccagcagaagaacaacagacugcuggagaucaccagagaguucagcgugaacgccggcgugaccacccccgugagcaccuacaugcugaccaacagcgagcugcugagccugaucaacgacaugcccaucaccaacgaccagaagaagcugaugagcaacaacgugcagaucgugagacagcagagcuacagcaucaugugcaucaucaaggaggaggugcuggccuacguggugcagcugccccuguacggcgugaucgacacccccugcuggaagcugcacaccagcccccugugcaccaccaacaccaaggagggcagcaacaucugccugaccagaaccgacagaggcugguacugcgacaacgccggcagcgugagcuucuucccccaggccgagaccugcaaggugugcagcaacagaguguucugcgacaccaugaacagccugacccugcccagcgaggugaaccugugcaacaucgacaucuucaaccccaaguacgacugcaagaucaugaccagcaagaccgacgugagcagcagcgugaucaccagccugggcgccaucgugagcugcuacggcaagaccaagugcaccgccagcaacaagaacaagggcaucaucaagaccuucagcaacggcugcgacuacgugagcaacaagggcguggacaccgugagcgugggcaacacccuguacuacgugaacaagcaggagggcaagagccuguacgugaagggcgagcccaucaucaacuucuacgacccccugguguuccccagcgacgaguucgacgccagcaucagccaggugaacgagaagaucaaccagagccuggccuucaucagaaagagcgacgagcugcugcacaacgugaacgugggcaagagcaccaccaacaucaugaucaccaccaucaucaucgugaucaucgugauccugcugcugcugaucgccgugggccuguuccuguacugcaaggccagaagcacccccgugacccugagcaaggaccagcugagcggcaucaacaacaucgccuucagcaacugaggacuaguguccaccugucccuccugggcugcuggauugucucguuuuccugccaaauaaacaggaucagcgcuuuacagaucuaaaaaaaaaaaaaaaaaaaaaaaaaaaaaaaaaaaaaaaaaaaaaaaaaaaaaaaaaaaaaaaaugcaucccccccccccccccccccccccccccccccaaaggcucuuuucagagccaccagaauu

SEQ ID NO: 18550 - RNA, 1919 nt, Artificial Sequence
  mRNA product Design e-2 comprising derived and/or modified sequence from HRSV(Memphis-37)__AIY60640.1__F_DSCav1_mut7 (opt5)
gggagacccgugacccggaaguuguacggcuacgcgacuuucccucccacaaacccucgcgcccuuccuuuccuacuugggcccggcagaaagcuuaccauggagcugcccauccucaagaccaacgccauuacaacgauccuggcugccgugacccuuugcuucgcgagcucccagaauauuacagaagaguuuuaccaaucuaccuguagcgcugucuccaaaggcuaucugucugcccucagaacagggugguacaccagcguuaucacaauugaacuguccaacaucaaggagaauaaaugcaacggaaccgacgccaaggugaaacuuaucaagcaggaacuggauaaguauaaaaaugcugugacggagcuccagaugcugauguguucuaccccugccgcuggcagcggguccgccauugcgagcggaaucgccgucugcaaggugcugcaccucgagggcgaaguuaacaaaauuaagaaugcucugcuuucuacaaacaaagccguggucucccugagcaauggggugucuguucucaccuucaaggugcuggaccuuaagaacuacaucgauaaacagcugcucccgauucugaauaagcaauccuguagcaucucuaacauugagacagucauggaauuucagcagaaaaauaaccggcugcucgagaucacccgcgaguucuccgugaaugcuggagugacgacacccgucagcaccuauaugcugacaaacuccgaacuucugucucucaucaacgacaugccuauuaccaaugaucagaagaaacugaugagcaacaauguucaaaucgugagacagcaguccuacagcauuaugugcaucauuaaggaggaagugcuugccuaugucgugcagcugccccucuacggcguuaucgacaccccuuguuggaaacugcauacaucuccccugugcacgaccaacacaaaggagggcuccaauaucugucucacccggacagaucgcgggugguacugcgacaacgcgggaagcgugagcuuuuucccucaagccgaaaccuguaaggucugcucuaauagaguguuuugcgauacgaugaacucccugacacuuccgucugagguuaaucuguguaacauugacaucuucaaucccaaauaugauugcaagauuaugaccagcaaaaccgacguguccagcucugucaucacaucccucggcgcuauugugagcuguuacgggaagaccaaaugcacagccucuaacaagaauaagggaaucaucaaaacguuuuccaacggcugugauuaugucagcaauaaggggguggacaccguuuccgugggaaacacacuguacuaugucaacaaacaggagggcaagucucuuuacgugaaaggcgaaccuauuaucaauuucuaugacccccugguuuuuccuagcgaugaguucgacgcuuccauuucucaggugaacgaaaagaucaaucaaagccucgccuuuauucggaaguccgaugagcugcugcacaacgucaauguggggaaaagcaccacaaacaucaugauuaccacgaucaucauugugaucauuguuauccuccugcuucugauugccgucggacucuuccuguacugcaaggcucgcucuacccccgugacacuguccaaagaccagcuuagcggcaucaauaacaucgcguucucuaauugaggacuaguguccaccugucccuccugggcugcuggauugucucguuuuccugccaaauaaacaggaucagcgcuuuacagaucuaaaaaaaaaaaaaaaaaaaaaaaaaaaaaaaaaaaaaaaaaaaaaaaaaaaaaaaaaaaaaaaaugcaucccccccccccccccccccccccccccccccaaaggcucuuuucagagccaccagaauu

SEQ ID NO: 18551 - RNA, 1919 nt, Artificial Sequence
  mRNA product Design e-2 comprising derived and/or modified sequence from HRSV(Memphis-37)__AIY60640.1__F_DSCav1_mut7 (opt6)
gggagacccgugacccggaaguuguacggcuacgcgacuuucccucccacaaacccucgcgcccuuccuuuccuacuugggcccggcagaaagcuuaccauggaacuaccaauacucaaaacaaaugcuauaaccacaauacucgcagcaguaacauuauguuucgcaucaucccaaaacauaacagaagaauuuuaucaaucaaccuguucagcaguauccaaaggauaccuaagugcauuaagaaccggaugguacacaucaguaauaaccauagaacuuucaaacauaaaagaaaacaaauguaacggcacagacgcaaaagucaaacucaucaaacaggaacuugacaaauauaaaaacgcaguaaccgaacuacaaaugcuaaugugcucaacaccagcagcaggaucaggaucagcaauugcaucuggaauagcuguaugcaaaguccuacaccuagaaggagaaguaaacaaaaucaaaaacgcauuacucuccacaaacaaagcaguaguaucacuaucaaacggaguuucaguacuaaccuucaaaguauuagaccuaaaaaacuacauagacaaacaacuacuaccuauacuaaacaaacaauccuguucaauaagcaacauugaaacuguaauggaauuucaacaaaaaaacaaccgccuauuagaaauaaccagagaauuuuccguaaaugcaggaguaaccacaccagucucuacauacauguuaaccaacucagaacuauuaucacucauaaaugacaugccuauaacaaacgaccaaaaaaaacuaaugucaaacaacguacaaauaguaagacaacaaucauauuccauaaugugcauaauaaaagaagaaguacuugcauacgugguucaacuaccccuauauggaguuauagacacaccaugcuggaaacuccacacuuccccacuuugcacaacuaacacaaaagaaggaucaaauauaugccuaaccagaacagaccguggaugguacugcgacaacgcuggaucagucuccuucuuuccacaagcagaaaccugcaaagucugcucaaauagagucuucugugacacaaugaacucacucacccuacccucagaaguaaaccuauguaauauagauauauuuaauccaaaauacgacugcaaaauuaugacaaguaaaacagacguaagcucaucagucauaaccagccuaggagcaauaguauccuguuacggcaaaacaaaaugcacagcuucaaacaaaaacaaaggcauaauaaaaacauucucaaacggaugugacuauguaucaaauaaaggaguugacacaguaucaguuggaaacacacuauacuauguaaacaaacaagaaggaaaaucacuauacguuaaaggcgaacccauaaucaauuucuacgacccccuagucuucccauccgaugaauuugacgcaucaauaucccaaguaaaugaaaaaaucaaccaaucccuagcauuuauacgaaaauccgacgaacuacuccauaaugucaacgucgguaaaucaacgacaaacaucaugaucacaacaauaauaauaguaauaauuguaauauuacucuuacucauagcaguaggccuauuucuauauugcaaagccagaucaacaccaguaaccuuauccaaagaccaacuaucuggaauaaacaacauagcauuuuccaacugaggacuaguguccaccugucccuccugggcugcuggauugucucguuuuccugccaaauaaacaggaucagcgcuuuacagaucuaaaaaaaaaaaaaaaaaaaaaaaaaaaaaaaaaaaaaaaaaaaaaaaaaaaaaaaaaaaaaaaaugcaucccccccccccccccccccccccccccccccaaaggcucuuuucagagccaccagaauu

SEQ ID NO: 18552 - RNA, 1919 nt, Artificial Sequence
  mRNA product Design e-2 comprising derived and/or modified sequence from HRSV(Memphis-37)__AIY60640.1__F_DSCav1_mut7 (opt11)
gggagacccgugacccggaaguuguacggcuacgcgacuuucccucccacaaacccucgcgcccuuccuuuccuacuugggcccggcagaaagcuuaccauggaacuccccauacuuaaaacaaacgccauaacaacuauacucgcagccgucacccucuguuucgcauccucucaaaacaucaccgaagaguucuaucaaucaaccugcuccgccgucucaaaaggcuaccucuccgcccuacgcacaggcugguacaccagcgucauuaccauagaacucucgaacaucaaagaaaacaaaugcaacggcaccgacgcaaaagugaaacucaucaaacaagaacucgacaaauacaaaaacgccgucaccgaacuucagaugcucaugugcuccaccccugccgccggcagcggcuccgccauagccuccggcaucgcagucugcaaaguccuccaccucgaaggagaaguaaacaaaaucaaaaaugcucuccucuccacaaacaaagccgucgucucacucuccaauggagucuccguccucaccuucaaaguccucgaccucaaaaacuacauagacaaacaacuacuccccauccucaacaagcaauccugcucuaucuccaacauagaaaccguuauggaguuccaacagaaaaauaaccgccugcuagaaauaacccgagaguucuccgucaacgcaggcgucacuacccccgucagcacauacaugcuaacaaacuccgaacugcucucccuuaucaacgacaugcccaucacaaacgaucagaaaaagcucaugucuaacaacguacaaaucguucggcaacaauccuacuccaucaugugcaucaucaaagaagaagugcucgccuacguaguccaacucccccucuacggagucaucgacacacccugcuggaaacuccacacaucaccccucugcaccaccaacacaaaagaaggguccaacaucugccucacgcgcaccgaccgaggcugguacugcgacaacgccggcuccguauccuucuucccccaagcagaaaccugcaaggucugcuccaaccgcguauucugcgacaccaugaacucgcucacccuccccucagaagucaaccuauguaacaucgacauauucaaucccaaauacgacugcaagauaaugacuuccaaaaccgacguaagcuccucggucaucaccucccucggcgccaucgucuccugcuacggcaaaaccaaaugcaccgccuccaauaagaauaaaggcauaauaaagacauucagcaacggcugcgauuacgucuccaacaaaggugucgacaccgucucagucggcaacacucuauacuacgugaacaaacaagaaggcaaaagccuauacguuaaaggcgaaccaauaaucaauuucuacgacccucuagucuuucccucugacgaguucgaugccagcauaagccaagucaacgaaaagaucaaccaaucacucgccuucauccguaaauccgacgaacugcuccacaaugucaauguaggcaaaucaacaaccaacaucaugaucaccacuauuaucaucgucaucaucguaauccuacuccuacuaaucgccgucggccuauuccucuacugcaaagcccgcucgacccccgucacucucagcaaggaucaacuauccggcaucaacaacaucgccuucuccaacuaaggacuaguguccaccugucccuccugggcugcuggauugucucguuuuccugccaaauaaacaggaucagcgcuuuacagaucuaaaaaaaaaaaaaaaaaaaaaaaaaaaaaaaaaaaaaaaaaaaaaaaaaaaaaaaaaaaaaaaaugcaucccccccccccccccccccccccccccccccaaaggcucuuuucagagccaccagaauu

SEQ ID NO: 18553 - RNA, 1889 nt, Artificial Sequence
  mRNA product Design e-3 comprising derived and/or modified sequence from HRSV(Memphis-37)__AIY60640.1__F_DSCav1_mut7 (opt1)
gggagacuuucccauucuguagcagaauuugguguugccuguggucuuggucccgcggagaagcuuaccauggagcugcccauccucaagaccaacgccaucaccacgauccuggccgcggugacccugugcuucgccagcucccagaacaucaccgaggaguucuaccagagcacgugcuccgccgucagcaagggcuaccucuccgcccugcgcaccgggugguacaccagcgugaucaccaucgagcuguccaacaucaaggagaacaagugcaacggcaccgacgccaaggugaagcucaucaagcaggagcuggacaaguacaagaacgcggucacggagcugcagaugcugaugugcagcaccccggccgccggcuccgggagcgcgaucgccuccggcaucgccgucugcaaggugcugcaccucgagggcgaggugaacaagaucaagaacgcccugcuguccaccaacaaggccgucgugagccucuccaacggggugagcguccugaccuucaaggugcuggaccucaagaacuacaucgacaagcagcugcugcccauccugaacaagcagagcugcuccaucagcaacaucgagaccgucauggaguuccagcagaagaacaaccgccuccuggagaucacgcgggaguucagcgugaacgcgggcgugaccacccccgucuccaccuacaugcugacgaacagcgagcuccugucccugaucaacgacaugccgaucaccaacgaccagaagaagcucaugagcaacaacgugcagaucgugcgccagcaguccuacagcaucaugugcaucaucaaggaggagguccuggccuacguggugcagcugccccucuacggggucaucgacacccccugcuggaagcugcacaccagcccccugugcacgaccaacaccaaggagggcuccaacaucugccucacccggacggaccgcgggugguacugcgacaacgccggcagcguguccuucuucccgcaggccgagaccugcaaggucugcagcaaccggguguucugcgacaccaugaacucccugacccugcccagcgaggugaaccucugcaacaucgacaucuucaaccccaaguacgacugcaagaucaugacguccaagaccgacgucagcuccagcgugaucaccucccugggcgccaucgugagcugcuacgggaagaccaagugcacggcgagcaacaagaacaagggcaucaucaagaccuucuccaacgggugcgacuacgucagcaacaagggcguggacaccguguccgucggcaacacccuguacuacgugaacaagcaggagggcaagagccucuacgugaagggggagcccaucaucaacuucuacgacccgcuggucuuccccuccgacgaguucgacgccagcaucucccaggugaacgagaagaucaaccagagccuggccuucauccggaaguccgacgagcuccugcacaacgugaacgucggcaagagcaccacgaacaucaugaucaccaccaucaucaucgugaucaucgugauccugcugcuccugaucgccgucgggcuguuccucuacugcaaggcccgcuccacccccgugacgcugagcaaggaccagcuguccgggaucaacaacaucgcguucagcaacugaggacuaguguccaccugucccuccugggcugcuggauugucucguuuuccugccaaauaaacaggaucagcgcuuuacagaucuaaaaaaaaaaaaaaaaaaaaaaaaaaaaaaaaaaaaaaaaaaaaaaaaaaaaaaaaaaaaaaaaugcaucccccccccccccccccccccccccccccccaaaggcucuuuucagagccaccagaauu

SEQ ID NO: 18554 - RNA, 1889 nt, Artificial Sequence
  mRNA product Design e-3 comprising derived and/or modified sequence from HRSV(Memphis-37)__AIY60640.1__F_DSCav1_mut7 (opt1)
gggagacuuucccauucuguagcagaauuugguguugccuguggucuuggucccgcggagaagcuuaccauggagcugcccauccucaagaccaacgccaucaccacgauccuggccgcggugacccugugcuucgccagcucccagaacaucaccgaggaguucuaccagagcacgugcuccgccgucagcaagggcuaccucuccgcccugcgcaccgggugguacaccagcgugaucaccaucgagcuguccaacaucaaggagaacaagugcaacggcaccgacgccaaggugaagcucaucaagcaggagcuggacaaguacaagaacgcggucacggagcugcagaugcucaugugcagcaccccggccgccggguccggcagcgccaucgcguccgggaucgccgugugcaaggugcugcaccuggagggcgaggucaacaagaucaagaacgcccuccugagcaccaacaaggccguggugucccugagcaacggcgucuccgugcucaccuucaaggugcuggaccugaagaacuacaucgacaagcagcuccugcccauccugaacaagcagagcugcuccaucagcaacaucgagacggucauggaguuccagcagaagaacaaccggcuccuggagaucacccgcgaguucuccgugaacgccggggugaccacccccgucagcacguacaugcugaccaacagcgagcuccugucccugaucaacgacaugcccaucaccaacgaccagaagaagcucaugagcaacaacgugcagaucgugcggcagcaguccuacagcaucaugugcaucaucaaggaggagguccuggcguacguggugcagcugccgcucuacggcgucaucgacacccccugcuggaagcugcacacgagcccccugugcaccaccaacaccaaggaggggagcaacaucugccucacgcgcaccgaccggggcugguacugcgacaacgccggguccgugagcuucuucccccaggccgagaccugcaaggugugcuccaaccgcgucuucugcgacaccaugaacagccugacgcugccguccgaggugaaccucugcaacaucgacaucuucaaccccaaguacgacugcaagaucaugaccagcaagaccgacgucuccagcuccgugaucaccagccugggcgccaucguguccugcuacggcaagacgaagugcaccgccagcaacaagaacaaggggaucaucaagaccuucuccaacggcugcgacuacgucagcaacaaggggguggacaccgugagcgucggcaacacgcuguacuacgugaacaagcaggagggcaagucccucuacgugaagggggagcccaucaucaacuucuacgacccccuggucuucccgagcgacgaguucgacgcguccaucagccaggugaacgagaagaucaaccagucccuggccuucauccggaaguccgacgagcuccugcacaacgugaacgucggcaaguccaccaccaacaucaugaucaccaccaucaucaucgugaucaucgugauccugcuccugcugaucgccgucggccucuuccuguacugcaaggcccgcagcacgcccgugacccuguccaaggaccagcugagcgggaucaacaacaucgccuucuccaacugaggacuaguguccaccugucccuccugggcugcuggauugucucguuuuccugccaaauaaacaggaucagcgcuuuacagaucuaaaaaaaaaaaaaaaaaaaaaaaaaaaaaaaaaaaaaaaaaaaaaaaaaaaaaaaaaaaaaaaaugcaucccccccccccccccccccccccccccccccaaaggcucuuuucagagccaccagaauu

SEQ ID NO: 18555 - RNA, 1889 nt, Artificial Sequence
  mRNA product Design e-3 comprising derived and/or modified sequence from HRSV(Memphis-37)__AIY60640.1__F_DSCav1_mut7 (opt2)
gggagacuuucccauucuguagcagaauuugguguugccuguggucuuggucccgcggagaagcuuaccauggagcuccccauccucaagaccaacgccaucaccaccauccucgccgccgucacccucugcuucgccuccucccagaacaucaccgaggaguucuaccaguccaccugcuccgccgucuccaagggcuaccucuccgcccuccgcaccggcugguacaccuccgucaucaccaucgagcucuccaacaucaaggagaacaagugcaacggcaccgacgccaaggucaagcucaucaagcaggagcucgacaaguacaagaacgccgucaccgagcuccagaugcucaugugcuccacccccgccgccggcuccggcuccgccaucgccuccggcaucgccgucugcaagguccuccaccucgagggcgaggucaacaagaucaagaacgcccuccucuccaccaacaaggccgucgucucccucuccaacggcgucuccguccucaccuucaagguccucgaccucaagaacuacaucgacaagcagcuccuccccauccucaacaagcaguccugcuccaucuccaacaucgagaccgucauggaguuccagcagaagaacaaccgccuccucgagaucacccgcgaguucuccgucaacgccggcgucaccacccccgucuccaccuacaugcucaccaacuccgagcuccucucccucaucaacgacaugcccaucaccaacgaccagaagaagcucauguccaacaacguccagaucguccgccagcaguccuacuccaucaugugcaucaucaaggaggagguccucgccuacgucguccagcucccccucuacggcgucaucgacacccccugcuggaagcuccacaccuccccccucugcaccaccaacaccaaggagggcuccaacaucugccucacccgcaccgaccgcggcugguacugcgacaacgccggcuccgucuccuucuucccccaggccgagaccugcaaggucugcuccaaccgcgucuucugcgacaccaugaacucccucacccuccccuccgaggucaaccucugcaacaucgacaucuucaaccccaaguacgacugcaagaucaugaccuccaagaccgacgucuccuccuccgucaucaccucccucggcgccaucgucuccugcuacggcaagaccaagugcaccgccuccaacaagaacaagggcaucaucaagaccuucuccaacggcugcgacuacgucuccaacaagggcgucgacaccgucuccgucggcaacacccucuacuacgucaacaagcaggagggcaagucccucuacgucaagggcgagcccaucaucaacuucuacgacccccucgucuuccccuccgacgaguucgacgccuccaucucccaggucaacgagaagaucaaccagucccucgccuucauccgcaaguccgacgagcuccuccacaacgucaacgucggcaaguccaccaccaacaucaugaucaccaccaucaucaucgucaucaucgucauccuccuccuccucaucgccgucggccucuuccucuacugcaaggcccgcuccacccccgucacccucuccaaggaccagcucuccggcaucaacaacaucgccuucuccaacugaggacuaguguccaccugucccuccugggcugcuggauugucucguuuuccugccaaauaaacaggaucagcgcuuuacagaucuaaaaaaaaaaaaaaaaaaaaaaaaaaaaaaaaaaaaaaaaaaaaaaaaaaaaaaaaaaaaaaaaugcaucccccccccccccccccccccccccccccccaaaggcucuuuucagagccaccagaauu

SEQ ID NO: 18556 - RNA, 1889 nt, Artificial Sequence
  mRNA product Design e-3 comprising derived and/or modified sequence from HRSV(Memphis-37)__AIY60640.1__F_DSCav1_mut7 (opt3)
gggagacuuucccauucuguagcagaauuugguguugccuguggucuuggucccgcggagaagcuuaccauggagcugcccauccucaagaccaacgccauuacaacuauacuugcugcagugacgcugugcuucgccagcucccagaauaucaccgaagaguuuuaccaaucuacauguucagcggucaguaaaggcuauuugagcgcuuuaagaacugggugguacaccuccguuauuacaaucgaacugucuaacauuaaggagaauaaaugcaacggaaccgacgccaaggugaaacuaaucaagcaggaacucgauaaguauaaaaaugcaguaacugagcugcagaugcuuauguguucgaccccugccgcugguucaggcagcgcaauagccagugggaucgcugugugcaagguccugcacuuggagggagaagugaacaaaauuaagaaugcccuccuguccacaaacaaagcgguugugucucugagcaauggcgucuccgugcucacguucaagguauuagaccugaagaacuacaucgauaaacagcuuuugccaauucugaauaagcaaucauguaguaucagcaacauagagacuguuauggaauuucagcagaaaaauaacaggcuacucgagauuacccgggaguucucugugaaugccggugucacaacuccgguguccaccuauaugcugacaaacucagaacuucugagcuugaucaacgacaugcccauuaccaaugaucagaagaaacucaugaguaacaaugugcaaaucguccgccagcagucuuacuccaucaugugcauuauaaaggaggaaguucuggcauaugugguacaguuaccucuguacggggugaucgacacgccauguuggaaacuccauacuagcccccuuugcacaaccaacacuaaggagggaucgaauauuugucugacacgaaccgaucguggcugguacugcgacaacgcuggcucugucuccuuuuucccucaagccgaaacguguaaggugugcucaaauagaguguuuugcgauaccaugaacaguuugacacuaccaagcgagguuaaucuguguaacaucgacauauucaaucccaaauaugauugcaagauuaugacuuccaaaaccgacgucucuagcucagugaucacaagucucggggcaaucguauccuguuacggaaagacuaaaugcaccgcuagcaacaagaauaaggguauuaucaaaacauuuucuaacggcugugauuauguuucaaauaaggggguggacaccgucagugugggaaacacucuguacuaugucaacaaacaggagggcaagagccuuuacgugaaaggugaaccuauuauaaauuucuaugacccacugguuuuuccguccgaugaguucgacgccucuaucagccaggugaacgaaaagauuaaucaaucguuggcguuuaucaggaaguccgaugagcuccugcacaacguaaaugucgggaaaucaacgacaaacaucaugauuaccacuauaaucauugugaucauuguuaucuuacugcuacucauagccgugggacuguuccuuuacugcaaggcacggaguacccccgucacauugucuaaagaccagcugagcggcaucaauaacauugcuuucuccaauugaggacuaguguccaccugucccuccugggcugcuggauugucucguuuuccugccaaauaaacaggaucagcgcuuuacagaucuaaaaaaaaaaaaaaaaaaaaaaaaaaaaaaaaaaaaaaaaaaaaaaaaaaaaaaaaaaaaaaaaugcaucccccccccccccccccccccccccccccccaaaggcucuuuucagagccaccagaauu

SEQ ID NO: 18557 - RNA, 1889 nt, Artificial Sequence
  mRNA product Design e-3 comprising derived and/or modified sequence from HRSV(Memphis-37)__AIY60640.1__F_DSCav1_mut7 (opt4)
gggagacuuucccauucuguagcagaauuugguguugccuguggucuuggucccgcggagaagcuuaccauggagcugcccauccugaagaccaacgccaucaccaccauccuggccgccgugacccugugcuucgccagcagccagaacaucaccgaggaguucuaccagagcaccugcagcgccgugagcaagggcuaccugagcgcccugagaaccggcugguacaccagcgugaucaccaucgagcugagcaacaucaaggagaacaagugcaacggcaccgacgccaaggugaagcugaucaagcaggagcuggacaaguacaagaacgccgugaccgagcugcagaugcugaugugcagcacccccgccgccggcagcggcagcgccaucgccagcggcaucgccgugugcaaggugcugcaccuggagggcgaggugaacaagaucaagaacgcccugcugagcaccaacaaggccguggugagccugagcaacggcgugagcgugcugaccuucaaggugcuggaccugaagaacuacaucgacaagcagcugcugcccauccugaacaagcagagcugcagcaucagcaacaucgagaccgugauggaguuccagcagaagaacaacagacugcuggagaucaccagagaguucagcgugaacgccggcgugaccacccccgugagcaccuacaugcugaccaacagcgagcugcugagccugaucaacgacaugcccaucaccaacgaccagaagaagcugaugagcaacaacgugcagaucgugagacagcagagcuacagcaucaugugcaucaucaaggaggaggugcuggccuacguggugcagcugccccuguacggcgugaucgacacccccugcuggaagcugcacaccagcccccugugcaccaccaacaccaaggagggcagcaacaucugccugaccagaaccgacagaggcugguacugcgacaacgccggcagcgugagcuucuucccccaggccgagaccugcaaggugugcagcaacagaguguucugcgacaccaugaacagccugacccugcccagcgaggugaaccugugcaacaucgacaucuucaaccccaaguacgacugcaagaucaugaccagcaagaccgacgugagcagcagcgugaucaccagccugggcgccaucgugagcugcuacggcaagaccaagugcaccgccagcaacaagaacaagggcaucaucaagaccuucagcaacggcugcgacuacgugagcaacaagggcguggacaccgugagcgugggcaacacccuguacuacgugaacaagcaggagggcaagagccuguacgugaagggcgagcccaucaucaacuucuacgacccccugguguuccccagcgacgaguucgacgccagcaucagccaggugaacgagaagaucaaccagagccuggccuucaucagaaagagcgacgagcugcugcacaacgugaacgugggcaagagcaccaccaacaucaugaucaccaccaucaucaucgugaucaucgugauccugcugcugcugaucgccgugggccuguuccuguacugcaaggccagaagcacccccgugacccugagcaaggaccagcugagcggcaucaacaacaucgccuucagcaacugaggacuaguguccaccugucccuccugggcugcuggauugucucguuuuccugccaaauaaacaggaucagcgcuuuacagaucuaaaaaaaaaaaaaaaaaaaaaaaaaaaaaaaaaaaaaaaaaaaaaaaaaaaaaaaaaaaaaaaaugcaucccccccccccccccccccccccccccccccaaaggcucuuuucagagccaccagaauu

SEQ ID NO: 18558 - RNA, 1889 nt, Artificial Sequence
  mRNA product Design e-3 comprising derived and/or modified sequence from HRSV(Memphis-37)__AIY60640.1__F_DSCav1_mut7 (opt5)
gggagacuuucccauucuguagcagaauuugguguugccuguggucuuggucccgcggagaagcuuaccauggagcugcccauccucaagaccaacgccauuacaacgauccuggcugccgugacccuuugcuucgcgagcucccagaauauuacagaagaguuuuaccaaucuaccuguagcgcugucuccaaaggcuaucugucugcccucagaacagggugguacaccagcguuaucacaauugaacuguccaacaucaaggagaauaaaugcaacggaaccgacgccaaggugaaacuuaucaagcaggaacuggauaaguauaaaaaugcugugacggagcuccagaugcugauguguucuaccccugccgcuggcagcggguccgccauugcgagcggaaucgccgucugcaaggugcugcaccucgagggcgaaguuaacaaaauuaagaaugcucugcuuucuacaaacaaagccguggucucccugagcaauggggugucuguucucaccuucaaggugcuggaccuuaagaacuacaucgauaaacagcugcucccgauucugaauaagcaauccuguagcaucucuaacauugagacagucauggaauuucagcagaaaaauaaccggcugcucgagaucacccgcgaguucuccgugaaugcuggagugacgacacccgucagcaccuauaugcugacaaacuccgaacuucugucucucaucaacgacaugccuauuaccaaugaucagaagaaacugaugagcaacaauguucaaaucgugagacagcaguccuacagcauuaugugcaucauuaaggaggaagugcuugccuaugucgugcagcugccccucuacggcguuaucgacaccccuuguuggaaacugcauacaucuccccugugcacgaccaacacaaaggagggcuccaauaucugucucacccggacagaucgcgggugguacugcgacaacgcgggaagcgugagcuuuuucccucaagccgaaaccuguaaggucugcucuaauagaguguuuugcgauacgaugaacucccugacacuuccgucugagguuaaucuguguaacauugacaucuucaaucccaaauaugauugcaagauuaugaccagcaaaaccgacguguccagcucugucaucacaucccucggcgcuauugugagcuguuacgggaagaccaaaugcacagccucuaacaagaauaagggaaucaucaaaacguuuuccaacggcugugauuaugucagcaauaaggggguggacaccguuuccgugggaaacacacuguacuaugucaacaaacaggagggcaagucucuuuacgugaaaggcgaaccuauuaucaauuucuaugacccccugguuuuuccuagcgaugaguucgacgcuuccauuucucaggugaacgaaaagaucaaucaaagccucgccuuuauucggaaguccgaugagcugcugcacaacgucaauguggggaaaagcaccacaaacaucaugauuaccacgaucaucauugugaucauuguuauccuccugcuucugauugccgucggacucuuccuguacugcaaggcucgcucuacccccgugacacuguccaaagaccagcuuagcggcaucaauaacaucgcguucucuaauugaggacuaguguccaccugucccuccugggcugcuggauugucucguuuuccugccaaauaaacaggaucagcgcuuuacagaucuaaaaaaaaaaaaaaaaaaaaaaaaaaaaaaaaaaaaaaaaaaaaaaaaaaaaaaaaaaaaaaaaugcaucccccccccccccccccccccccccccccccaaaggcucuuuucagagccaccagaauu

SEQ ID NO: 18559 - RNA, 1889 nt, Artificial Sequence
  mRNA product Design e-3 comprising derived and/or modified sequence from HRSV(Memphis-37)__AIY60640.1__F_DSCav1_mut7 (opt6)
gggagacuuucccauucuguagcagaauuugguguugccuguggucuuggucccgcggagaagcuuaccauggaacuaccaauacucaaaacaaaugcuauaaccacaauacucgcagcaguaacauuauguuucgcaucaucccaaaacauaacagaagaauuuuaucaaucaaccuguucagcaguauccaaaggauaccuaagugcauuaagaaccggaugguacacaucaguaauaaccauagaacuuucaaacauaaaagaaaacaaauguaacggcacagacgcaaaagucaaacucaucaaacaggaacuugacaaauauaaaaacgcaguaaccgaacuacaaaugcuaaugugcucaacaccagcagcaggaucaggaucagcaauugcaucuggaauagcuguaugcaaaguccuacaccuagaaggagaaguaaacaaaaucaaaaacgcauuacucuccacaaacaaagcaguaguaucacuaucaaacggaguuucaguacuaaccuucaaaguauuagaccuaaaaaacuacauagacaaacaacuacuaccuauacuaaacaaacaauccuguucaauaagcaacauugaaacuguaauggaauuucaacaaaaaaacaaccgccuauuagaaauaaccagagaauuuuccguaaaugcaggaguaaccacaccagucucuacauacauguuaaccaacucagaacuauuaucacucauaaaugacaugccuauaacaaacgaccaaaaaaaacuaaugucaaacaacguacaaauaguaagacaacaaucauauuccauaaugugcauaauaaaagaagaaguacuugcauacgugguucaacuaccccuauauggaguuauagacacaccaugcuggaaacuccacacuuccccacuuugcacaacuaacacaaaagaaggaucaaauauaugccuaaccagaacagaccguggaugguacugcgacaacgcuggaucagucuccuucuuuccacaagcagaaaccugcaaagucugcucaaauagagucuucugugacacaaugaacucacucacccuacccucagaaguaaaccuauguaauauagauauauuuaauccaaaauacgacugcaaaauuaugacaaguaaaacagacguaagcucaucagucauaaccagccuaggagcaauaguauccuguuacggcaaaacaaaaugcacagcuucaaacaaaaacaaaggcauaauaaaaacauucucaaacggaugugacuauguaucaaauaaaggaguugacacaguaucaguuggaaacacacuauacuauguaaacaaacaagaaggaaaaucacuauacguuaaaggcgaacccauaaucaauuucuacgacccccuagucuucccauccgaugaauuugacgcaucaauaucccaaguaaaugaaaaaaucaaccaaucccuagcauuuauacgaaaauccgacgaacuacuccauaaugucaacgucgguaaaucaacgacaaacaucaugaucacaacaauaauaauaguaauaauuguaauauuacucuuacucauagcaguaggccuauuucuauauugcaaagccagaucaacaccaguaaccuuauccaaagaccaacuaucuggaauaaacaacauagcauuuuccaacugaggacuaguguccaccugucccuccugggcugcuggauugucucguuuuccugccaaauaaacaggaucagcgcuuuacagaucuaaaaaaaaaaaaaaaaaaaaaaaaaaaaaaaaaaaaaaaaaaaaaaaaaaaaaaaaaaaaaaaaugcaucccccccccccccccccccccccccccccccaaaggcucuuuucagagccaccagaauu

SEQ ID NO: 18560 - RNA, 1889 nt, Artificial Sequence
  mRNA product Design e-3 comprising derived and/or modified sequence from HRSV(Memphis-37)__AIY60640.1__F_DSCav1_mut7 (opt11)
gggagacuuucccauucuguagcagaauuugguguugccuguggucuuggucccgcggagaagcuuaccauggaacuccccauacuuaaaacaaacgccauaacaacuauacucgcagccgucacccucuguuucgcauccucucaaaacaucaccgaagaguucuaucaaucaaccugcuccgccgucucaaaaggcuaccucuccgcccuacgcacaggcugguacaccagcgucauuaccauagaacucucgaacaucaaagaaaacaaaugcaacggcaccgacgcaaaagugaaacucaucaaacaagaacucgacaaauacaaaaacgccgucaccgaacuucagaugcucaugugcuccaccccugccgccggcagcggcuccgccauagccuccggcaucgcagucugcaaaguccuccaccucgaaggagaaguaaacaaaaucaaaaaugcucuccucuccacaaacaaagccgucgucucacucuccaauggagucuccguccucaccuucaaaguccucgaccucaaaaacuacauagacaaacaacuacuccccauccucaacaagcaauccugcucuaucuccaacauagaaaccguuauggaguuccaacagaaaaauaaccgccugcuagaaauaacccgagaguucuccgucaacgcaggcgucacuacccccgucagcacauacaugcuaacaaacuccgaacugcucucccuuaucaacgacaugcccaucacaaacgaucagaaaaagcucaugucuaacaacguacaaaucguucggcaacaauccuacuccaucaugugcaucaucaaagaagaagugcucgccuacguaguccaacucccccucuacggagucaucgacacacccugcuggaaacuccacacaucaccccucugcaccaccaacacaaaagaaggguccaacaucugccucacgcgcaccgaccgaggcugguacugcgacaacgccggcuccguauccuucuucccccaagcagaaaccugcaaggucugcuccaaccgcguauucugcgacaccaugaacucgcucacccuccccucagaagucaaccuauguaacaucgacauauucaaucccaaauacgacugcaagauaaugacuuccaaaaccgacguaagcuccucggucaucaccucccucggcgccaucgucuccugcuacggcaaaaccaaaugcaccgccuccaauaagaauaaaggcauaauaaagacauucagcaacggcugcgauuacgucuccaacaaaggugucgacaccgucucagucggcaacacucuauacuacgugaacaaacaagaaggcaaaagccuauacguuaaaggcgaaccaauaaucaauuucuacgacccucuagucuuucccucugacgaguucgaugccagcauaagccaagucaacgaaaagaucaaccaaucacucgccuucauccguaaauccgacgaacugcuccacaaugucaauguaggcaaaucaacaaccaacaucaugaucaccacuauuaucaucgucaucaucguaauccuacuccuacuaaucgccgucggccuauuccucuacugcaaagcccgcucgacccccgucacucucagcaaggaucaacuauccggcaucaacaacaucgccuucuccaacuaaggacuaguguccaccugucccuccugggcugcuggauugucucguuuuccugccaaauaaacaggaucagcgcuuuacagaucuaaaaaaaaaaaaaaaaaaaaaaaaaaaaaaaaaaaaaaaaaaaaaaaaaaaaaaaaaaaaaaaaugcaucccccccccccccccccccccccccccccccaaaggcucuuuucagagccaccagaauu

SEQ ID NO: 18561 - RNA, 1943 nt, Artificial Sequence
  mRNA product Design e-4 comprising derived and/or modified sequence from HRSV(Memphis-37)__AIY60640.1__F_DSCav1_mut7 (opt1)
gggagacuccugucgggcggaaguaggaggaguagaguuuaaaaacaguacucuuuuuccgguucgggacguaguugaagcaacgacaagccggauaaccgcucuugagacaggaagcuuaccauggagcugcccauccucaagaccaacgccaucaccacgauccuggccgcggugacccugugcuucgccagcucccagaacaucaccgaggaguucuaccagagcacgugcuccgccgucagcaagggcuaccucuccgcccugcgcaccgggugguacaccagcgugaucaccaucgagcuguccaacaucaaggagaacaagugcaacggcaccgacgccaaggugaagcucaucaagcaggagcuggacaaguacaagaacgcggucacggagcugcagaugcugaugugcagcaccccggccgccggcuccgggagcgcgaucgccuccggcaucgccgucugcaaggugcugcaccucgagggcgaggugaacaagaucaagaacgcccugcuguccaccaacaaggccgucgugagccucuccaacggggugagcguccugaccuucaaggugcuggaccucaagaacuacaucgacaagcagcugcugcccauccugaacaagcagagcugcuccaucagcaacaucgagaccgucauggaguuccagcagaagaacaaccgccuccuggagaucacgcgggaguucagcgugaacgcgggcgugaccacccccgucuccaccuacaugcugacgaacagcgagcuccugucccugaucaacgacaugccgaucaccaacgaccagaagaagcucaugagcaacaacgugcagaucgugcgccagcaguccuacagcaucaugugcaucaucaaggaggagguccuggccuacguggugcagcugccccucuacggggucaucgacacccccugcuggaagcugcacaccagcccccugugcacgaccaacaccaaggagggcuccaacaucugccucacccggacggaccgcgggugguacugcgacaacgccggcagcguguccuucuucccgcaggccgagaccugcaaggucugcagcaaccggguguucugcgacaccaugaacucccugacccugcccagcgaggugaaccucugcaacaucgacaucuucaaccccaaguacgacugcaagaucaugacguccaagaccgacgucagcuccagcgugaucaccucccugggcgccaucgugagcugcuacgggaagaccaagugcacggcgagcaacaagaacaagggcaucaucaagaccuucuccaacgggugcgacuacgucagcaacaagggcguggacaccguguccgucggcaacacccuguacuacgugaacaagcaggagggcaagagccucuacgugaagggggagcccaucaucaacuucuacgacccgcuggucuuccccuccgacgaguucgacgccagcaucucccaggugaacgagaagaucaaccagagccuggccuucauccggaaguccgacgagcuccugcacaacgugaacgucggcaagagcaccacgaacaucaugaucaccaccaucaucaucgugaucaucgugauccugcugcuccugaucgccgucgggcuguuccucuacugcaaggcccgcuccacccccgugacgcugagcaaggaccagcuguccgggaucaacaacaucgcguucagcaacugaggacuaguguccaccugucccuccugggcugcuggauugucucguuuuccugccaaauaaacaggaucagcgcuuuacagaucuaaaaaaaaaaaaaaaaaaaaaaaaaaaaaaaaaaaaaaaaaaaaaaaaaaaaaaaaaaaaaaaaugcaucccccccccccccccccccccccccccccccaaaggcucuuuucagagccaccagaauu

SEQ ID NO: 18562 - RNA, 1943 nt, Artificial Sequence
  mRNA product Design e-4 comprising derived and/or modified sequence from HRSV(Memphis-37)__AIY60640.1__F_DSCav1_mut7 (opt1)
gggagacuccugucgggcggaaguaggaggaguagaguuuaaaaacaguacucuuuuuccgguucgggacguaguugaagcaacgacaagccggauaaccgcucuugagacaggaagcuuaccauggagcugcccauccucaagaccaacgccaucaccacgauccuggccgcggugacccugugcuucgccagcucccagaacaucaccgaggaguucuaccagagcacgugcuccgccgucagcaagggcuaccucuccgcccugcgcaccgggugguacaccagcgugaucaccaucgagcuguccaacaucaaggagaacaagugcaacggcaccgacgccaaggugaagcucaucaagcaggagcuggacaaguacaagaacgcggucacggagcugcagaugcucaugugcagcaccccggccgccggguccggcagcgccaucgcguccgggaucgccgugugcaaggugcugcaccuggagggcgaggucaacaagaucaagaacgcccuccugagcaccaacaaggccguggugucccugagcaacggcgucuccgugcucaccuucaaggugcuggaccugaagaacuacaucgacaagcagcuccugcccauccugaacaagcagagcugcuccaucagcaacaucgagacggucauggaguuccagcagaagaacaaccggcuccuggagaucacccgcgaguucuccgugaacgccggggugaccacccccgucagcacguacaugcugaccaacagcgagcuccugucccugaucaacgacaugcccaucaccaacgaccagaagaagcucaugagcaacaacgugcagaucgugcggcagcaguccuacagcaucaugugcaucaucaaggaggagguccuggcguacguggugcagcugccgcucuacggcgucaucgacacccccugcuggaagcugcacacgagcccccugugcaccaccaacaccaaggaggggagcaacaucugccucacgcgcaccgaccggggcugguacugcgacaacgccggguccgugagcuucuucccccaggccgagaccugcaaggugugcuccaaccgcgucuucugcgacaccaugaacagccugacgcugccguccgaggugaaccucugcaacaucgacaucuucaaccccaaguacgacugcaagaucaugaccagcaagaccgacgucuccagcuccgugaucaccagccugggcgccaucguguccugcuacggcaagacgaagugcaccgccagcaacaagaacaaggggaucaucaagaccuucuccaacggcugcgacuacgucagcaacaaggggguggacaccgugagcgucggcaacacgcuguacuacgugaacaagcaggagggcaagucccucuacgugaagggggagcccaucaucaacuucuacgacccccuggucuucccgagcgacgaguucgacgcguccaucagccaggugaacgagaagaucaaccagucccuggccuucauccggaaguccgacgagcuccugcacaacgugaacgucggcaaguccaccaccaacaucaugaucaccaccaucaucaucgugaucaucgugauccugcuccugcugaucgccgucggccucuuccuguacugcaaggcccgcagcacgcccgugacccuguccaaggaccagcugagcgggaucaacaacaucgccuucuccaacugaggacuaguguccaccugucccuccugggcugcuggauugucucguuuuccugccaaauaaacaggaucagcgcuuuacagaucuaaaaaaaaaaaaaaaaaaaaaaaaaaaaaaaaaaaaaaaaaaaaaaaaaaaaaaaaaaaaaaaaugcaucccccccccccccccccccccccccccccccaaaggcucuuuucagagccaccagaauu

SEQ ID NO: 18563 - RNA, 1943 nt, Artificial Sequence
  mRNA product Design e-4 comprising derived and/or modified sequence from HRSV(Memphis-37)__AIY60640.1__F_DSCav1_mut7 (opt2)
gggagacuccugucgggcggaaguaggaggaguagaguuuaaaaacaguacucuuuuuccgguucgggacguaguugaagcaacgacaagccggauaaccgcucuugagacaggaagcuuaccauggagcuccccauccucaagaccaacgccaucaccaccauccucgccgccgucacccucugcuucgccuccucccagaacaucaccgaggaguucuaccaguccaccugcuccgccgucuccaagggcuaccucuccgcccuccgcaccggcugguacaccuccgucaucaccaucgagcucuccaacaucaaggagaacaagugcaacggcaccgacgccaaggucaagcucaucaagcaggagcucgacaaguacaagaacgccgucaccgagcuccagaugcucaugugcuccacccccgccgccggcuccggcuccgccaucgccuccggcaucgccgucugcaagguccuccaccucgagggcgaggucaacaagaucaagaacgcccuccucuccaccaacaaggccgucgucucccucuccaacggcgucuccguccucaccuucaagguccucgaccucaagaacuacaucgacaagcagcuccuccccauccucaacaagcaguccugcuccaucuccaacaucgagaccgucauggaguuccagcagaagaacaaccgccuccucgagaucacccgcgaguucuccgucaacgccggcgucaccacccccgucuccaccuacaugcucaccaacuccgagcuccucucccucaucaacgacaugcccaucaccaacgaccagaagaagcucauguccaacaacguccagaucguccgccagcaguccuacuccaucaugugcaucaucaaggaggagguccucgccuacgucguccagcucccccucuacggcgucaucgacacccccugcuggaagcuccacaccuccccccucugcaccaccaacaccaaggagggcuccaacaucugccucacccgcaccgaccgcggcugguacugcgacaacgccggcuccgucuccuucuucccccaggccgagaccugcaaggucugcuccaaccgcgucuucugcgacaccaugaacucccucacccuccccuccgaggucaaccucugcaacaucgacaucuucaaccccaaguacgacugcaagaucaugaccuccaagaccgacgucuccuccuccgucaucaccucccucggcgccaucgucuccugcuacggcaagaccaagugcaccgccuccaacaagaacaagggcaucaucaagaccuucuccaacggcugcgacuacgucuccaacaagggcgucgacaccgucuccgucggcaacacccucuacuacgucaacaagcaggagggcaagucccucuacgucaagggcgagcccaucaucaacuucuacgacccccucgucuuccccuccgacgaguucgacgccuccaucucccaggucaacgagaagaucaaccagucccucgccuucauccgcaaguccgacgagcuccuccacaacgucaacgucggcaaguccaccaccaacaucaugaucaccaccaucaucaucgucaucaucgucauccuccuccuccucaucgccgucggccucuuccucuacugcaaggcccgcuccacccccgucacccucuccaaggaccagcucuccggcaucaacaacaucgccuucuccaacugaggacuaguguccaccugucccuccugggcugcuggauugucucguuuuccugccaaauaaacaggaucagcgcuuuacagaucuaaaaaaaaaaaaaaaaaaaaaaaaaaaaaaaaaaaaaaaaaaaaaaaaaaaaaaaaaaaaaaaaugcaucccccccccccccccccccccccccccccccaaaggcucuuuucagagccaccagaauu

SEQ ID NO: 18564 - RNA, 1943 nt, Artificial Sequence
  mRNA product Design e-4 comprising derived and/or modified sequence from HRSV(Memphis-37)__AIY60640.1__F_DSCav1_mut7 (opt3)
gggagacuccugucgggcggaaguaggaggaguagaguuuaaaaacaguacucuuuuuccgguucgggacguaguugaagcaacgacaagccggauaaccgcucuugagacaggaagcuuaccauggagcugcccauccucaagaccaacgccauuacaacuauacuugcugcagugacgcugugcuucgccagcucccagaauaucaccgaagaguuuuaccaaucuacauguucagcggucaguaaaggcuauuugagcgcuuuaagaacugggugguacaccuccguuauuacaaucgaacugucuaacauuaaggagaauaaaugcaacggaaccgacgccaaggugaaacuaaucaagcaggaacucgauaaguauaaaaaugcaguaacugagcugcagaugcuuauguguucgaccccugccgcugguucaggcagcgcaauagccagugggaucgcugugugcaagguccugcacuuggagggagaagugaacaaaauuaagaaugcccuccuguccacaaacaaagcgguugugucucugagcaauggcgucuccgugcucacguucaagguauuagaccugaagaacuacaucgauaaacagcuuuugccaauucugaauaagcaaucauguaguaucagcaacauagagacuguuauggaauuucagcagaaaaauaacaggcuacucgagauuacccgggaguucucugugaaugccggugucacaacuccgguguccaccuauaugcugacaaacucagaacuucugagcuugaucaacgacaugcccauuaccaaugaucagaagaaacucaugaguaacaaugugcaaaucguccgccagcagucuuacuccaucaugugcauuauaaaggaggaaguucuggcauaugugguacaguuaccucuguacggggugaucgacacgccauguuggaaacuccauacuagcccccuuugcacaaccaacacuaaggagggaucgaauauuugucugacacgaaccgaucguggcugguacugcgacaacgcuggcucugucuccuuuuucccucaagccgaaacguguaaggugugcucaaauagaguguuuugcgauaccaugaacaguuugacacuaccaagcgagguuaaucuguguaacaucgacauauucaaucccaaauaugauugcaagauuaugacuuccaaaaccgacgucucuagcucagugaucacaagucucggggcaaucguauccuguuacggaaagacuaaaugcaccgcuagcaacaagaauaaggguauuaucaaaacauuuucuaacggcugugauuauguuucaaauaaggggguggacaccgucagugugggaaacacucuguacuaugucaacaaacaggagggcaagagccuuuacgugaaaggugaaccuauuauaaauuucuaugacccacugguuuuuccguccgaugaguucgacgccucuaucagccaggugaacgaaaagauuaaucaaucguuggcguuuaucaggaaguccgaugagcuccugcacaacguaaaugucgggaaaucaacgacaaacaucaugauuaccacuauaaucauugugaucauuguuaucuuacugcuacucauagccgugggacuguuccuuuacugcaaggcacggaguacccccgucacauugucuaaagaccagcugagcggcaucaauaacauugcuuucuccaauugaggacuaguguccaccugucccuccugggcugcuggauugucucguuuuccugccaaauaaacaggaucagcgcuuuacagaucuaaaaaaaaaaaaaaaaaaaaaaaaaaaaaaaaaaaaaaaaaaaaaaaaaaaaaaaaaaaaaaaaugcaucccccccccccccccccccccccccccccccaaaggcucuuuucagagccaccagaauu

SEQ ID NO: 18565 - RNA, 1943 nt, Artificial Sequence
  mRNA product Design e-4 comprising derived and/or modified sequence from HRSV(Memphis-37)__AIY60640.1__F_DSCav1_mut7 (opt4)
gggagacuccugucgggcggaaguaggaggaguagaguuuaaaaacaguacucuuuuuccgguucgggacguaguugaagcaacgacaagccggauaaccgcucuugagacaggaagcuuaccauggagcugcccauccugaagaccaacgccaucaccaccauccuggccgccgugacccugugcuucgccagcagccagaacaucaccgaggaguucuaccagagcaccugcagcgccgugagcaagggcuaccugagcgcccugagaaccggcugguacaccagcgugaucaccaucgagcugagcaacaucaaggagaacaagugcaacggcaccgacgccaaggugaagcugaucaagcaggagcuggacaaguacaagaacgccgugaccgagcugcagaugcugaugugcagcacccccgccgccggcagcggcagcgccaucgccagcggcaucgccgugugcaaggugcugcaccuggagggcgaggugaacaagaucaagaacgcccugcugagcaccaacaaggccguggugagccugagcaacggcgugagcgugcugaccuucaaggugcuggaccugaagaacuacaucgacaagcagcugcugcccauccugaacaagcagagcugcagcaucagcaacaucgagaccgugauggaguuccagcagaagaacaacagacugcuggagaucaccagagaguucagcgugaacgccggcgugaccacccccgugagcaccuacaugcugaccaacagcgagcugcugagccugaucaacgacaugcccaucaccaacgaccagaagaagcugaugagcaacaacgugcagaucgugagacagcagagcuacagcaucaugugcaucaucaaggaggaggugcuggccuacguggugcagcugccccuguacggcgugaucgacacccccugcuggaagcugcacaccagcccccugugcaccaccaacaccaaggagggcagcaacaucugccugaccagaaccgacagaggcugguacugcgacaacgccggcagcgugagcuucuucccccaggccgagaccugcaaggugugcagcaacagaguguucugcgacaccaugaacagccugacccugcccagcgaggugaaccugugcaacaucgacaucuucaaccccaaguacgacugcaagaucaugaccagcaagaccgacgugagcagcagcgugaucaccagccugggcgccaucgugagcugcuacggcaagaccaagugcaccgccagcaacaagaacaagggcaucaucaagaccuucagcaacggcugcgacuacgugagcaacaagggcguggacaccgugagcgugggcaacacccuguacuacgugaacaagcaggagggcaagagccuguacgugaagggcgagcccaucaucaacuucuacgacccccugguguuccccagcgacgaguucgacgccagcaucagccaggugaacgagaagaucaaccagagccuggccuucaucagaaagagcgacgagcugcugcacaacgugaacgugggcaagagcaccaccaacaucaugaucaccaccaucaucaucgugaucaucgugauccugcugcugcugaucgccgugggccuguuccuguacugcaaggccagaagcacccccgugacccugagcaaggaccagcugagcggcaucaacaacaucgccuucagcaacugaggacuaguguccaccugucccuccugggcugcuggauugucucguuuuccugccaaauaaacaggaucagcgcuuuacagaucuaaaaaaaaaaaaaaaaaaaaaaaaaaaaaaaaaaaaaaaaaaaaaaaaaaaaaaaaaaaaaaaaugcaucccccccccccccccccccccccccccccccaaaggcucuuuucagagccaccagaauu

SEQ ID NO: 18566 - RNA, 1943 nt, Artificial Sequence
  mRNA product Design e-4 comprising derived and/or modified sequence from HRSV(Memphis-37)__AIY60640.1__F_DSCav1_mut7 (opt5)
gggagacuccugucgggcggaaguaggaggaguagaguuuaaaaacaguacucuuuuuccgguucgggacguaguugaagcaacgacaagccggauaaccgcucuugagacaggaagcuuaccauggagcugcccauccucaagaccaacgccauuacaacgauccuggcugccgugacccuuugcuucgcgagcucccagaauauuacagaagaguuuuaccaaucuaccuguagcgcugucuccaaaggcuaucugucugcccucagaacagggugguacaccagcguuaucacaauugaacuguccaacaucaaggagaauaaaugcaacggaaccgacgccaaggugaaacuuaucaagcaggaacuggauaaguauaaaaaugcugugacggagcuccagaugcugauguguucuaccccugccgcuggcagcggguccgccauugcgagcggaaucgccgucugcaaggugcugcaccucgagggcgaaguuaacaaaauuaagaaugcucugcuuucuacaaacaaagccguggucucccugagcaauggggugucuguucucaccuucaaggugcuggaccuuaagaacuacaucgauaaacagcugcucccgauucugaauaagcaauccuguagcaucucuaacauugagacagucauggaauuucagcagaaaaauaaccggcugcucgagaucacccgcgaguucuccgugaaugcuggagugacgacacccgucagcaccuauaugcugacaaacuccgaacuucugucucucaucaacgacaugccuauuaccaaugaucagaagaaacugaugagcaacaauguucaaaucgugagacagcaguccuacagcauuaugugcaucauuaaggaggaagugcuugccuaugucgugcagcugccccucuacggcguuaucgacaccccuuguuggaaacugcauacaucuccccugugcacgaccaacacaaaggagggcuccaauaucugucucacccggacagaucgcgggugguacugcgacaacgcgggaagcgugagcuuuuucccucaagccgaaaccuguaaggucugcucuaauagaguguuuugcgauacgaugaacucccugacacuuccgucugagguuaaucuguguaacauugacaucuucaaucccaaauaugauugcaagauuaugaccagcaaaaccgacguguccagcucugucaucacaucccucggcgcuauugugagcuguuacgggaagaccaaaugcacagccucuaacaagaauaagggaaucaucaaaacguuuuccaacggcugugauuaugucagcaauaaggggguggacaccguuuccgugggaaacacacuguacuaugucaacaaacaggagggcaagucucuuuacgugaaaggcgaaccuauuaucaauuucuaugacccccugguuuuuccuagcgaugaguucgacgcuuccauuucucaggugaacgaaaagaucaaucaaagccucgccuuuauucggaaguccgaugagcugcugcacaacgucaauguggggaaaagcaccacaaacaucaugauuaccacgaucaucauugugaucauuguuauccuccugcuucugauugccgucggacucuuccuguacugcaaggcucgcucuacccccgugacacuguccaaagaccagcuuagcggcaucaauaacaucgcguucucuaauugaggacuaguguccaccugucccuccugggcugcuggauugucucguuuuccugccaaauaaacaggaucagcgcuuuacagaucuaaaaaaaaaaaaaaaaaaaaaaaaaaaaaaaaaaaaaaaaaaaaaaaaaaaaaaaaaaaaaaaaugcaucccccccccccccccccccccccccccccccaaaggcucuuuucagagccaccagaauu

SEQ ID NO: 18567 - RNA, 1943 nt, Artificial Sequence
  mRNA product Design e-4 comprising derived and/or modified sequence from HRSV(Memphis-37)__AIY60640.1__F_DSCav1_mut7 (opt6)
gggagacuccugucgggcggaaguaggaggaguagaguuuaaaaacaguacucuuuuuccgguucgggacguaguugaagcaacgacaagccggauaaccgcucuugagacaggaagcuuaccauggaacuaccaauacucaaaacaaaugcuauaaccacaauacucgcagcaguaacauuauguuucgcaucaucccaaaacauaacagaagaauuuuaucaaucaaccuguucagcaguauccaaaggauaccuaagugcauuaagaaccggaugguacacaucaguaauaaccauagaacuuucaaacauaaaagaaaacaaauguaacggcacagacgcaaaagucaaacucaucaaacaggaacuugacaaauauaaaaacgcaguaaccgaacuacaaaugcuaaugugcucaacaccagcagcaggaucaggaucagcaauugcaucuggaauagcuguaugcaaaguccuacaccuagaaggagaaguaaacaaaaucaaaaacgcauuacucuccacaaacaaagcaguaguaucacuaucaaacggaguuucaguacuaaccuucaaaguauuagaccuaaaaaacuacauagacaaacaacuacuaccuauacuaaacaaacaauccuguucaauaagcaacauugaaacuguaauggaauuucaacaaaaaaacaaccgccuauuagaaauaaccagagaauuuuccguaaaugcaggaguaaccacaccagucucuacauacauguuaaccaacucagaacuauuaucacucauaaaugacaugccuauaacaaacgaccaaaaaaaacuaaugucaaacaacguacaaauaguaagacaacaaucauauuccauaaugugcauaauaaaagaagaaguacuugcauacgugguucaacuaccccuauauggaguuauagacacaccaugcuggaaacuccacacuuccccacuuugcacaacuaacacaaaagaaggaucaaauauaugccuaaccagaacagaccguggaugguacugcgacaacgcuggaucagucuccuucuuuccacaagcagaaaccugcaaagucugcucaaauagagucuucugugacacaaugaacucacucacccuacccucagaaguaaaccuauguaauauagauauauuuaauccaaaauacgacugcaaaauuaugacaaguaaaacagacguaagcucaucagucauaaccagccuaggagcaauaguauccuguuacggcaaaacaaaaugcacagcuucaaacaaaaacaaaggcauaauaaaaacauucucaaacggaugugacuauguaucaaauaaaggaguugacacaguaucaguuggaaacacacuauacuauguaaacaaacaagaaggaaaaucacuauacguuaaaggcgaacccauaaucaauuucuacgacccccuagucuucccauccgaugaauuugacgcaucaauaucccaaguaaaugaaaaaaucaaccaaucccuagcauuuauacgaaaauccgacgaacuacuccauaaugucaacgucgguaaaucaacgacaaacaucaugaucacaacaauaauaauaguaauaauuguaauauuacucuuacucauagcaguaggccuauuucuauauugcaaagccagaucaacaccaguaaccuuauccaaagaccaacuaucuggaauaaacaacauagcauuuuccaacugaggacuaguguccaccugucccuccugggcugcuggauugucucguuuuccugccaaauaaacaggaucagcgcuuuacagaucuaaaaaaaaaaaaaaaaaaaaaaaaaaaaaaaaaaaaaaaaaaaaaaaaaaaaaaaaaaaaaaaaugcaucccccccccccccccccccccccccccccccaaaggcucuuuucagagccaccagaauu

SEQ ID NO: 18568 - RNA, 1943 nt, Artificial Sequence
  mRNA product Design e-4 comprising derived and/or modified sequence from HRSV(Memphis-37)__AIY60640.1__F_DSCav1_mut7 (opt11)
gggagacuccugucgggcggaaguaggaggaguagaguuuaaaaacaguacucuuuuuccgguucgggacguaguugaagcaacgacaagccggauaaccgcucuugagacaggaagcuuaccauggaacuccccauacuuaaaacaaacgccauaacaacuauacucgcagccgucacccucuguuucgcauccucucaaaacaucaccgaagaguucuaucaaucaaccugcuccgccgucucaaaaggcuaccucuccgcccuacgcacaggcugguacaccagcgucauuaccauagaacucucgaacaucaaagaaaacaaaugcaacggcaccgacgcaaaagugaaacucaucaaacaagaacucgacaaauacaaaaacgccgucaccgaacuucagaugcucaugugcuccaccccugccgccggcagcggcuccgccauagccuccggcaucgcagucugcaaaguccuccaccucgaaggagaaguaaacaaaaucaaaaaugcucuccucuccacaaacaaagccgucgucucacucuccaauggagucuccguccucaccuucaaaguccucgaccucaaaaacuacauagacaaacaacuacuccccauccucaacaagcaauccugcucuaucuccaacauagaaaccguuauggaguuccaacagaaaaauaaccgccugcuagaaauaacccgagaguucuccgucaacgcaggcgucacuacccccgucagcacauacaugcuaacaaacuccgaacugcucucccuuaucaacgacaugcccaucacaaacgaucagaaaaagcucaugucuaacaacguacaaaucguucggcaacaauccuacuccaucaugugcaucaucaaagaagaagugcucgccuacguaguccaacucccccucuacggagucaucgacacacccugcuggaaacuccacacaucaccccucugcaccaccaacacaaaagaaggguccaacaucugccucacgcgcaccgaccgaggcugguacugcgacaacgccggcuccguauccuucuucccccaagcagaaaccugcaaggucugcuccaaccgcguauucugcgacaccaugaacucgcucacccuccccucagaagucaaccuauguaacaucgacauauucaaucccaaauacgacugcaagauaaugacuuccaaaaccgacguaagcuccucggucaucaccucccucggcgccaucgucuccugcuacggcaaaaccaaaugcaccgccuccaauaagaauaaaggcauaauaaagacauucagcaacggcugcgauuacgucuccaacaaaggugucgacaccgucucagucggcaacacucuauacuacgugaacaaacaagaaggcaaaagccuauacguuaaaggcgaaccaauaaucaauuucuacgacccucuagucuuucccucugacgaguucgaugccagcauaagccaagucaacgaaaagaucaaccaaucacucgccuucauccguaaauccgacgaacugcuccacaaugucaauguaggcaaaucaacaaccaacaucaugaucaccacuauuaucaucgucaucaucguaauccuacuccuacuaaucgccgucggccuauuccucuacugcaaagcccgcucgacccccgucacucucagcaaggaucaacuauccggcaucaacaacaucgccuucuccaacuaaggacuaguguccaccugucccuccugggcugcuggauugucucguuuuccugccaaauaaacaggaucagcgcuuuacagaucuaaaaaaaaaaaaaaaaaaaaaaaaaaaaaaaaaaaaaaaaaaaaaaaaaaaaaaaaaaaaaaaaugcaucccccccccccccccccccccccccccccccaaaggcucuuuucagagccaccagaauu

SEQ ID NO: 18569 - RNA, 1910 nt, Artificial Sequence
  mRNA product Design e-5 comprising derived and/or modified sequence from HRSV(Memphis-37)__AIY60640.1__F_DSCav1_mut7 (opt1)
gggagagcggcucggccauuuugucccagucaguccggaggcugcggcugcagaaguaccgccugcggaguaacugcaaagaagcuuaccauggagcugcccauccucaagaccaacgccaucaccacgauccuggccgcggugacccugugcuucgccagcucccagaacaucaccgaggaguucuaccagagcacgugcuccgccgucagcaagggcuaccucuccgcccugcgcaccgggugguacaccagcgugaucaccaucgagcuguccaacaucaaggagaacaagugcaacggcaccgacgccaaggugaagcucaucaagcaggagcuggacaaguacaagaacgcggucacggagcugcagaugcugaugugcagcaccccggccgccggcuccgggagcgcgaucgccuccggcaucgccgucugcaaggugcugcaccucgagggcgaggugaacaagaucaagaacgcccugcuguccaccaacaaggccgucgugagccucuccaacggggugagcguccugaccuucaaggugcuggaccucaagaacuacaucgacaagcagcugcugcccauccugaacaagcagagcugcuccaucagcaacaucgagaccgucauggaguuccagcagaagaacaaccgccuccuggagaucacgcgggaguucagcgugaacgcgggcgugaccacccccgucuccaccuacaugcugacgaacagcgagcuccugucccugaucaacgacaugccgaucaccaacgaccagaagaagcucaugagcaacaacgugcagaucgugcgccagcaguccuacagcaucaugugcaucaucaaggaggagguccuggccuacguggugcagcugccccucuacggggucaucgacacccccugcuggaagcugcacaccagcccccugugcacgaccaacaccaaggagggcuccaacaucugccucacccggacggaccgcgggugguacugcgacaacgccggcagcguguccuucuucccgcaggccgagaccugcaaggucugcagcaaccggguguucugcgacaccaugaacucccugacccugcccagcgaggugaaccucugcaacaucgacaucuucaaccccaaguacgacugcaagaucaugacguccaagaccgacgucagcuccagcgugaucaccucccugggcgccaucgugagcugcuacgggaagaccaagugcacggcgagcaacaagaacaagggcaucaucaagaccuucuccaacgggugcgacuacgucagcaacaagggcguggacaccguguccgucggcaacacccuguacuacgugaacaagcaggagggcaagagccucuacgugaagggggagcccaucaucaacuucuacgacccgcuggucuuccccuccgacgaguucgacgccagcaucucccaggugaacgagaagaucaaccagagccuggccuucauccggaaguccgacgagcuccugcacaacgugaacgucggcaagagcaccacgaacaucaugaucaccaccaucaucaucgugaucaucgugauccugcugcuccugaucgccgucgggcuguuccucuacugcaaggcccgcuccacccccgugacgcugagcaaggaccagcuguccgggaucaacaacaucgcguucagcaacugaggacuaguguccaccugucccuccugggcugcuggauugucucguuuuccugccaaauaaacaggaucagcgcuuuacagaucuaaaaaaaaaaaaaaaaaaaaaaaaaaaaaaaaaaaaaaaaaaaaaaaaaaaaaaaaaaaaaaaaugcaucccccccccccccccccccccccccccccccaaaggcucuuuucagagccaccagaauu

SEQ ID NO: 18570 - RNA, 1910 nt, Artificial Sequence
  mRNA product Design e-5 comprising derived and/or modified sequence from HRSV(Memphis-37)__AIY60640.1__F_DSCav1_mut7 (opt1)
gggagagcggcucggccauuuugucccagucaguccggaggcugcggcugcagaaguaccgccugcggaguaacugcaaagaagcuuaccauggagcugcccauccucaagaccaacgccaucaccacgauccuggccgcggugacccugugcuucgccagcucccagaacaucaccgaggaguucuaccagagcacgugcuccgccgucagcaagggcuaccucuccgcccugcgcaccgggugguacaccagcgugaucaccaucgagcuguccaacaucaaggagaacaagugcaacggcaccgacgccaaggugaagcucaucaagcaggagcuggacaaguacaagaacgcggucacggagcugcagaugcucaugugcagcaccccggccgccggguccggcagcgccaucgcguccgggaucgccgugugcaaggugcugcaccuggagggcgaggucaacaagaucaagaacgcccuccugagcaccaacaaggccguggugucccugagcaacggcgucuccgugcucaccuucaaggugcuggaccugaagaacuacaucgacaagcagcuccugcccauccugaacaagcagagcugcuccaucagcaacaucgagacggucauggaguuccagcagaagaacaaccggcuccuggagaucacccgcgaguucuccgugaacgccggggugaccacccccgucagcacguacaugcugaccaacagcgagcuccugucccugaucaacgacaugcccaucaccaacgaccagaagaagcucaugagcaacaacgugcagaucgugcggcagcaguccuacagcaucaugugcaucaucaaggaggagguccuggcguacguggugcagcugccgcucuacggcgucaucgacacccccugcuggaagcugcacacgagcccccugugcaccaccaacaccaaggaggggagcaacaucugccucacgcgcaccgaccggggcugguacugcgacaacgccggguccgugagcuucuucccccaggccgagaccugcaaggugugcuccaaccgcgucuucugcgacaccaugaacagccugacgcugccguccgaggugaaccucugcaacaucgacaucuucaaccccaaguacgacugcaagaucaugaccagcaagaccgacgucuccagcuccgugaucaccagccugggcgccaucguguccugcuacggcaagacgaagugcaccgccagcaacaagaacaaggggaucaucaagaccuucuccaacggcugcgacuacgucagcaacaaggggguggacaccgugagcgucggcaacacgcuguacuacgugaacaagcaggagggcaagucccucuacgugaagggggagcccaucaucaacuucuacgacccccuggucuucccgagcgacgaguucgacgcguccaucagccaggugaacgagaagaucaaccagucccuggccuucauccggaaguccgacgagcuccugcacaacgugaacgucggcaaguccaccaccaacaucaugaucaccaccaucaucaucgugaucaucgugauccugcuccugcugaucgccgucggccucuuccuguacugcaaggcccgcagcacgcccgugacccuguccaaggaccagcugagcgggaucaacaacaucgccuucuccaacugaggacuaguguccaccugucccuccugggcugcuggauugucucguuuuccugccaaauaaacaggaucagcgcuuuacagaucuaaaaaaaaaaaaaaaaaaaaaaaaaaaaaaaaaaaaaaaaaaaaaaaaaaaaaaaaaaaaaaaaugcaucccccccccccccccccccccccccccccccaaaggcucuuuucagagccaccagaauu

SEQ ID NO: 18571 - RNA, 1910 nt, Artificial Sequence
  mRNA product Design e-5 comprising derived and/or modified sequence from HRSV(Memphis-37)__AIY60640.1__F_DSCav1_mut7 (opt2)
gggagagcggcucggccauuuugucccagucaguccggaggcugcggcugcagaaguaccgccugcggaguaacugcaaagaagcuuaccauggagcuccccauccucaagaccaacgccaucaccaccauccucgccgccgucacccucugcuucgccuccucccagaacaucaccgaggaguucuaccaguccaccugcuccgccgucuccaagggcuaccucuccgcccuccgcaccggcugguacaccuccgucaucaccaucgagcucuccaacaucaaggagaacaagugcaacggcaccgacgccaaggucaagcucaucaagcaggagcucgacaaguacaagaacgccgucaccgagcuccagaugcucaugugcuccacccccgccgccggcuccggcuccgccaucgccuccggcaucgccgucugcaagguccuccaccucgagggcgaggucaacaagaucaagaacgcccuccucuccaccaacaaggccgucgucucccucuccaacggcgucuccguccucaccuucaagguccucgaccucaagaacuacaucgacaagcagcuccuccccauccucaacaagcaguccugcuccaucuccaacaucgagaccgucauggaguuccagcagaagaacaaccgccuccucgagaucacccgcgaguucuccgucaacgccggcgucaccacccccgucuccaccuacaugcucaccaacuccgagcuccucucccucaucaacgacaugcccaucaccaacgaccagaagaagcucauguccaacaacguccagaucguccgccagcaguccuacuccaucaugugcaucaucaaggaggagguccucgccuacgucguccagcucccccucuacggcgucaucgacacccccugcuggaagcuccacaccuccccccucugcaccaccaacaccaaggagggcuccaacaucugccucacccgcaccgaccgcggcugguacugcgacaacgccggcuccgucuccuucuucccccaggccgagaccugcaaggucugcuccaaccgcgucuucugcgacaccaugaacucccucacccuccccuccgaggucaaccucugcaacaucgacaucuucaaccccaaguacgacugcaagaucaugaccuccaagaccgacgucuccuccuccgucaucaccucccucggcgccaucgucuccugcuacggcaagaccaagugcaccgccuccaacaagaacaagggcaucaucaagaccuucuccaacggcugcgacuacgucuccaacaagggcgucgacaccgucuccgucggcaacacccucuacuacgucaacaagcaggagggcaagucccucuacgucaagggcgagcccaucaucaacuucuacgacccccucgucuuccccuccgacgaguucgacgccuccaucucccaggucaacgagaagaucaaccagucccucgccuucauccgcaaguccgacgagcuccuccacaacgucaacgucggcaaguccaccaccaacaucaugaucaccaccaucaucaucgucaucaucgucauccuccuccuccucaucgccgucggccucuuccucuacugcaaggcccgcuccacccccgucacccucuccaaggaccagcucuccggcaucaacaacaucgccuucuccaacugaggacuaguguccaccugucccuccugggcugcuggauugucucguuuuccugccaaauaaacaggaucagcgcuuuacagaucuaaaaaaaaaaaaaaaaaaaaaaaaaaaaaaaaaaaaaaaaaaaaaaaaaaaaaaaaaaaaaaaaugcaucccccccccccccccccccccccccccccccaaaggcucuuuucagagccaccagaauu

SEQ ID NO: 18572 - RNA, 1910 nt, Artificial Sequence
  mRNA product Design e-5 comprising derived and/or modified sequence from HRSV(Memphis-37)__AIY60640.1__F_DSCav1_mut7 (opt3)
gggagagcggcucggccauuuugucccagucaguccggaggcugcggcugcagaaguaccgccugcggaguaacugcaaagaagcuuaccauggagcugcccauccucaagaccaacgccauuacaacuauacuugcugcagugacgcugugcuucgccagcucccagaauaucaccgaagaguuuuaccaaucuacauguucagcggucaguaaaggcuauuugagcgcuuuaagaacugggugguacaccuccguuauuacaaucgaacugucuaacauuaaggagaauaaaugcaacggaaccgacgccaaggugaaacuaaucaagcaggaacucgauaaguauaaaaaugcaguaacugagcugcagaugcuuauguguucgaccccugccgcugguucaggcagcgcaauagccagugggaucgcugugugcaagguccugcacuuggagggagaagugaacaaaauuaagaaugcccuccuguccacaaacaaagcgguugugucucugagcaauggcgucuccgugcucacguucaagguauuagaccugaagaacuacaucgauaaacagcuuuugccaauucugaauaagcaaucauguaguaucagcaacauagagacuguuauggaauuucagcagaaaaauaacaggcuacucgagauuacccgggaguucucugugaaugccggugucacaacuccgguguccaccuauaugcugacaaacucagaacuucugagcuugaucaacgacaugcccauuaccaaugaucagaagaaacucaugaguaacaaugugcaaaucguccgccagcagucuuacuccaucaugugcauuauaaaggaggaaguucuggcauaugugguacaguuaccucuguacggggugaucgacacgccauguuggaaacuccauacuagcccccuuugcacaaccaacacuaaggagggaucgaauauuugucugacacgaaccgaucguggcugguacugcgacaacgcuggcucugucuccuuuuucccucaagccgaaacguguaaggugugcucaaauagaguguuuugcgauaccaugaacaguuugacacuaccaagcgagguuaaucuguguaacaucgacauauucaaucccaaauaugauugcaagauuaugacuuccaaaaccgacgucucuagcucagugaucacaagucucggggcaaucguauccuguuacggaaagacuaaaugcaccgcuagcaacaagaauaaggguauuaucaaaacauuuucuaacggcugugauuauguuucaaauaaggggguggacaccgucagugugggaaacacucuguacuaugucaacaaacaggagggcaagagccuuuacgugaaaggugaaccuauuauaaauuucuaugacccacugguuuuuccguccgaugaguucgacgccucuaucagccaggugaacgaaaagauuaaucaaucguuggcguuuaucaggaaguccgaugagcuccugcacaacguaaaugucgggaaaucaacgacaaacaucaugauuaccacuauaaucauugugaucauuguuaucuuacugcuacucauagccgugggacuguuccuuuacugcaaggcacggaguacccccgucacauugucuaaagaccagcugagcggcaucaauaacauugcuuucuccaauugaggacuaguguccaccugucccuccugggcugcuggauugucucguuuuccugccaaauaaacaggaucagcgcuuuacagaucuaaaaaaaaaaaaaaaaaaaaaaaaaaaaaaaaaaaaaaaaaaaaaaaaaaaaaaaaaaaaaaaaugcaucccccccccccccccccccccccccccccccaaaggcucuuuucagagccaccagaauu

SEQ ID NO: 18573 - RNA, 1910 nt, Artificial Sequence
  mRNA product Design e-5 comprising derived and/or modified sequence from HRSV(Memphis-37)__AIY60640.1__F_DSCav1_mut7 (opt4)
gggagagcggcucggccauuuugucccagucaguccggaggcugcggcugcagaaguaccgccugcggaguaacugcaaagaagcuuaccauggagcugcccauccugaagaccaacgccaucaccaccauccuggccgccgugacccugugcuucgccagcagccagaacaucaccgaggaguucuaccagagcaccugcagcgccgugagcaagggcuaccugagcgcccugagaaccggcugguacaccagcgugaucaccaucgagcugagcaacaucaaggagaacaagugcaacggcaccgacgccaaggugaagcugaucaagcaggagcuggacaaguacaagaacgccgugaccgagcugcagaugcugaugugcagcacccccgccgccggcagcggcagcgccaucgccagcggcaucgccgugugcaaggugcugcaccuggagggcgaggugaacaagaucaagaacgcccugcugagcaccaacaaggccguggugagccugagcaacggcgugagcgugcugaccuucaaggugcuggaccugaagaacuacaucgacaagcagcugcugcccauccugaacaagcagagcugcagcaucagcaacaucgagaccgugauggaguuccagcagaagaacaacagacugcuggagaucaccagagaguucagcgugaacgccggcgugaccacccccgugagcaccuacaugcugaccaacagcgagcugcugagccugaucaacgacaugcccaucaccaacgaccagaagaagcugaugagcaacaacgugcagaucgugagacagcagagcuacagcaucaugugcaucaucaaggaggaggugcuggccuacguggugcagcugccccuguacggcgugaucgacacccccugcuggaagcugcacaccagcccccugugcaccaccaacaccaaggagggcagcaacaucugccugaccagaaccgacagaggcugguacugcgacaacgccggcagcgugagcuucuucccccaggccgagaccugcaaggugugcagcaacagaguguucugcgacaccaugaacagccugacccugcccagcgaggugaaccugugcaacaucgacaucuucaaccccaaguacgacugcaagaucaugaccagcaagaccgacgugagcagcagcgugaucaccagccugggcgccaucgugagcugcuacggcaagaccaagugcaccgccagcaacaagaacaagggcaucaucaagaccuucagcaacggcugcgacuacgugagcaacaagggcguggacaccgugagcgugggcaacacccuguacuacgugaacaagcaggagggcaagagccuguacgugaagggcgagcccaucaucaacuucuacgacccccugguguuccccagcgacgaguucgacgccagcaucagccaggugaacgagaagaucaaccagagccuggccuucaucagaaagagcgacgagcugcugcacaacgugaacgugggcaagagcaccaccaacaucaugaucaccaccaucaucaucgugaucaucgugauccugcugcugcugaucgccgugggccuguuccuguacugcaaggccagaagcacccccgugacccugagcaaggaccagcugagcggcaucaacaacaucgccuucagcaacugaggacuaguguccaccugucccuccugggcugcuggauugucucguuuuccugccaaauaaacaggaucagcgcuuuacagaucuaaaaaaaaaaaaaaaaaaaaaaaaaaaaaaaaaaaaaaaaaaaaaaaaaaaaaaaaaaaaaaaaugcaucccccccccccccccccccccccccccccccaaaggcucuuuucagagccaccagaauu

SEQ ID NO: 18574 - RNA, 1910 nt, Artificial Sequence
  mRNA product Design e-5 comprising derived and/or modified sequence from HRSV(Memphis-37)__AIY60640.1__F_DSCav1_mut7 (opt5)
gggagagcggcucggccauuuugucccagucaguccggaggcugcggcugcagaaguaccgccugcggaguaacugcaaagaagcuuaccauggagcugcccauccucaagaccaacgccauuacaacgauccuggcugccgugacccuuugcuucgcgagcucccagaauauuacagaagaguuuuaccaaucuaccuguagcgcugucuccaaaggcuaucugucugcccucagaacagggugguacaccagcguuaucacaauugaacuguccaacaucaaggagaauaaaugcaacggaaccgacgccaaggugaaacuuaucaagcaggaacuggauaaguauaaaaaugcugugacggagcuccagaugcugauguguucuaccccugccgcuggcagcggguccgccauugcgagcggaaucgccgucugcaaggugcugcaccucgagggcgaaguuaacaaaauuaagaaugcucugcuuucuacaaacaaagccguggucucccugagcaauggggugucuguucucaccuucaaggugcuggaccuuaagaacuacaucgauaaacagcugcucccgauucugaauaagcaauccuguagcaucucuaacauugagacagucauggaauuucagcagaaaaauaaccggcugcucgagaucacccgcgaguucuccgugaaugcuggagugacgacacccgucagcaccuauaugcugacaaacuccgaacuucugucucucaucaacgacaugccuauuaccaaugaucagaagaaacugaugagcaacaauguucaaaucgugagacagcaguccuacagcauuaugugcaucauuaaggaggaagugcuugccuaugucgugcagcugccccucuacggcguuaucgacaccccuuguuggaaacugcauacaucuccccugugcacgaccaacacaaaggagggcuccaauaucugucucacccggacagaucgcgggugguacugcgacaacgcgggaagcgugagcuuuuucccucaagccgaaaccuguaaggucugcucuaauagaguguuuugcgauacgaugaacucccugacacuuccgucugagguuaaucuguguaacauugacaucuucaaucccaaauaugauugcaagauuaugaccagcaaaaccgacguguccagcucugucaucacaucccucggcgcuauugugagcuguuacgggaagaccaaaugcacagccucuaacaagaauaagggaaucaucaaaacguuuuccaacggcugugauuaugucagcaauaaggggguggacaccguuuccgugggaaacacacuguacuaugucaacaaacaggagggcaagucucuuuacgugaaaggcgaaccuauuaucaauuucuaugacccccugguuuuuccuagcgaugaguucgacgcuuccauuucucaggugaacgaaaagaucaaucaaagccucgccuuuauucggaaguccgaugagcugcugcacaacgucaauguggggaaaagcaccacaaacaucaugauuaccacgaucaucauugugaucauuguuauccuccugcuucugauugccgucggacucuuccuguacugcaaggcucgcucuacccccgugacacuguccaaagaccagcuuagcggcaucaauaacaucgcguucucuaauugaggacuaguguccaccugucccuccugggcugcuggauugucucguuuuccugccaaauaaacaggaucagcgcuuuacagaucuaaaaaaaaaaaaaaaaaaaaaaaaaaaaaaaaaaaaaaaaaaaaaaaaaaaaaaaaaaaaaaaaugcaucccccccccccccccccccccccccccccccaaaggcucuuuucagagccaccagaauu

SEQ ID NO: 18575 - RNA, 1910 nt, Artificial Sequence
  mRNA product Design e-5 comprising derived and/or modified sequence from HRSV(Memphis-37)__AIY60640.1__F_DSCav1_mut7 (opt6)
gggagagcggcucggccauuuugucccagucaguccggaggcugcggcugcagaaguaccgccugcggaguaacugcaaagaagcuuaccauggaacuaccaauacucaaaacaaaugcuauaaccacaauacucgcagcaguaacauuauguuucgcaucaucccaaaacauaacagaagaauuuuaucaaucaaccuguucagcaguauccaaaggauaccuaagugcauuaagaaccggaugguacacaucaguaauaaccauagaacuuucaaacauaaaagaaaacaaauguaacggcacagacgcaaaagucaaacucaucaaacaggaacuugacaaauauaaaaacgcaguaaccgaacuacaaaugcuaaugugcucaacaccagcagcaggaucaggaucagcaauugcaucuggaauagcuguaugcaaaguccuacaccuagaaggagaaguaaacaaaaucaaaaacgcauuacucuccacaaacaaagcaguaguaucacuaucaaacggaguuucaguacuaaccuucaaaguauuagaccuaaaaaacuacauagacaaacaacuacuaccuauacuaaacaaacaauccuguucaauaagcaacauugaaacuguaauggaauuucaacaaaaaaacaaccgccuauuagaaauaaccagagaauuuuccguaaaugcaggaguaaccacaccagucucuacauacauguuaaccaacucagaacuauuaucacucauaaaugacaugccuauaacaaacgaccaaaaaaaacuaaugucaaacaacguacaaauaguaagacaacaaucauauuccauaaugugcauaauaaaagaagaaguacuugcauacgugguucaacuaccccuauauggaguuauagacacaccaugcuggaaacuccacacuuccccacuuugcacaacuaacacaaaagaaggaucaaauauaugccuaaccagaacagaccguggaugguacugcgacaacgcuggaucagucuccuucuuuccacaagcagaaaccugcaaagucugcucaaauagagucuucugugacacaaugaacucacucacccuacccucagaaguaaaccuauguaauauagauauauuuaauccaaaauacgacugcaaaauuaugacaaguaaaacagacguaagcucaucagucauaaccagccuaggagcaauaguauccuguuacggcaaaacaaaaugcacagcuucaaacaaaaacaaaggcauaauaaaaacauucucaaacggaugugacuauguaucaaauaaaggaguugacacaguaucaguuggaaacacacuauacuauguaaacaaacaagaaggaaaaucacuauacguuaaaggcgaacccauaaucaauuucuacgacccccuagucuucccauccgaugaauuugacgcaucaauaucccaaguaaaugaaaaaaucaaccaaucccuagcauuuauacgaaaauccgacgaacuacuccauaaugucaacgucgguaaaucaacgacaaacaucaugaucacaacaauaauaauaguaauaauuguaauauuacucuuacucauagcaguaggccuauuucuauauugcaaagccagaucaacaccaguaaccuuauccaaagaccaacuaucuggaauaaacaacauagcauuuuccaacugaggacuaguguccaccugucccuccugggcugcuggauugucucguuuuccugccaaauaaacaggaucagcgcuuuacagaucuaaaaaaaaaaaaaaaaaaaaaaaaaaaaaaaaaaaaaaaaaaaaaaaaaaaaaaaaaaaaaaaaugcaucccccccccccccccccccccccccccccccaaaggcucuuuucagagccaccagaauu

SEQ ID NO: 18576 - RNA, 1910 nt, Artificial Sequence
  mRNA product Design e-5 comprising derived and/or modified sequence from HRSV(Memphis-37)__AIY60640.1__F_DSCav1_mut7 (opt11)
gggagagcggcucggccauuuugucccagucaguccggaggcugcggcugcagaaguaccgccugcggaguaacugcaaagaagcuuaccauggaacuccccauacuuaaaacaaacgccauaacaacuauacucgcagccgucacccucuguuucgcauccucucaaaacaucaccgaagaguucuaucaaucaaccugcuccgccgucucaaaaggcuaccucuccgcccuacgcacaggcugguacaccagcgucauuaccauagaacucucgaacaucaaagaaaacaaaugcaacggcaccgacgcaaaagugaaacucaucaaacaagaacucgacaaauacaaaaacgccgucaccgaacuucagaugcucaugugcuccaccccugccgccggcagcggcuccgccauagccuccggcaucgcagucugcaaaguccuccaccucgaaggagaaguaaacaaaaucaaaaaugcucuccucuccacaaacaaagccgucgucucacucuccaauggagucuccguccucaccuucaaaguccucgaccucaaaaacuacauagacaaacaacuacuccccauccucaacaagcaauccugcucuaucuccaacauagaaaccguuauggaguuccaacagaaaaauaaccgccugcuagaaauaacccgagaguucuccgucaacgcaggcgucacuacccccgucagcacauacaugcuaacaaacuccgaacugcucucccuuaucaacgacaugcccaucacaaacgaucagaaaaagcucaugucuaacaacguacaaaucguucggcaacaauccuacuccaucaugugcaucaucaaagaagaagugcucgccuacguaguccaacucccccucuacggagucaucgacacacccugcuggaaacuccacacaucaccccucugcaccaccaacacaaaagaaggguccaacaucugccucacgcgcaccgaccgaggcugguacugcgacaacgccggcuccguauccuucuucccccaagcagaaaccugcaaggucugcuccaaccgcguauucugcgacaccaugaacucgcucacccuccccucagaagucaaccuauguaacaucgacauauucaaucccaaauacgacugcaagauaaugacuuccaaaaccgacguaagcuccucggucaucaccucccucggcgccaucgucuccugcuacggcaaaaccaaaugcaccgccuccaauaagaauaaaggcauaauaaagacauucagcaacggcugcgauuacgucuccaacaaaggugucgacaccgucucagucggcaacacucuauacuacgugaacaaacaagaaggcaaaagccuauacguuaaaggcgaaccaauaaucaauuucuacgacccucuagucuuucccucugacgaguucgaugccagcauaagccaagucaacgaaaagaucaaccaaucacucgccuucauccguaaauccgacgaacugcuccacaaugucaauguaggcaaaucaacaaccaacaucaugaucaccacuauuaucaucgucaucaucguaauccuacuccuacuaaucgccgucggccuauuccucuacugcaaagcccgcucgacccccgucacucucagcaaggaucaacuauccggcaucaacaacaucgccuucuccaacuaaggacuaguguccaccugucccuccugggcugcuggauugucucguuuuccugccaaauaaacaggaucagcgcuuuacagaucuaaaaaaaaaaaaaaaaaaaaaaaaaaaaaaaaaaaaaaaaaaaaaaaaaaaaaaaaaaaaaaaaugcaucccccccccccccccccccccccccccccccaaaggcucuuuucagagccaccagaauu

SEQ ID NO: 18577 - RNA, 1977 nt, Artificial Sequence
  mRNA product Design e-6 comprising derived and/or modified sequence from HRSV(Memphis-37)__AIY60640.1__F_DSCav1_mut7 (opt1)
gggagagcggcucggccauuuugucccagucaguccggaggcugcggcugcagaaguaccgccugcggaguaacugcaaagaagcuuaccauggagcugcccauccucaagaccaacgccaucaccacgauccuggccgcggugacccugugcuucgccagcucccagaacaucaccgaggaguucuaccagagcacgugcuccgccgucagcaagggcuaccucuccgcccugcgcaccgggugguacaccagcgugaucaccaucgagcuguccaacaucaaggagaacaagugcaacggcaccgacgccaaggugaagcucaucaagcaggagcuggacaaguacaagaacgcggucacggagcugcagaugcugaugugcagcaccccggccgccggcuccgggagcgcgaucgccuccggcaucgccgucugcaaggugcugcaccucgagggcgaggugaacaagaucaagaacgcccugcuguccaccaacaaggccgucgugagccucuccaacggggugagcguccugaccuucaaggugcuggaccucaagaacuacaucgacaagcagcugcugcccauccugaacaagcagagcugcuccaucagcaacaucgagaccgucauggaguuccagcagaagaacaaccgccuccuggagaucacgcgggaguucagcgugaacgcgggcgugaccacccccgucuccaccuacaugcugacgaacagcgagcuccugucccugaucaacgacaugccgaucaccaacgaccagaagaagcucaugagcaacaacgugcagaucgugcgccagcaguccuacagcaucaugugcaucaucaaggaggagguccuggccuacguggugcagcugccccucuacggggucaucgacacccccugcuggaagcugcacaccagcccccugugcacgaccaacaccaaggagggcuccaacaucugccucacccggacggaccgcgggugguacugcgacaacgccggcagcguguccuucuucccgcaggccgagaccugcaaggucugcagcaaccggguguucugcgacaccaugaacucccugacccugcccagcgaggugaaccucugcaacaucgacaucuucaaccccaaguacgacugcaagaucaugacguccaagaccgacgucagcuccagcgugaucaccucccugggcgccaucgugagcugcuacgggaagaccaagugcacggcgagcaacaagaacaagggcaucaucaagaccuucuccaacgggugcgacuacgucagcaacaagggcguggacaccguguccgucggcaacacccuguacuacgugaacaagcaggagggcaagagccucuacgugaagggggagcccaucaucaacuucuacgacccgcuggucuuccccuccgacgaguucgacgccagcaucucccaggugaacgagaagaucaaccagagccuggccuucauccggaaguccgacgagcuccugcacaacgugaacgucggcaagagcaccacgaacaucaugaucaccaccaucaucaucgugaucaucgugauccugcugcuccugaucgccgucgggcuguuccucuacugcaaggcccgcuccacccccgugacgcugagcaaggaccagcuguccgggaucaacaacaucgcguucagcaacugaggacuaguacuggcugcaucucccuuuccucuguccuccauccuucucccaggauggugaagggggaccugguacccagugauccccaccccaggauccuaaaucaugacuuaccugcuaauaaaaacucauuggaaaagugagaagaucuaaaaaaaaaaaaaaaaaaaaaaaaaaaaaaaaaaaaaaaaaaaaaaaaaaaaaaaaaaaaaaaaugcaucccccccccccccccccccccccccccccccaaaggcucuuuucagagccaccagaauu

SEQ ID NO: 18578 - RNA, 1977 nt, Artificial Sequence
  mRNA product Design e-6 comprising derived and/or modified sequence from HRSV(Memphis-37)__AIY60640.1__F_DSCav1_mut7 (opt1)
gggagagcggcucggccauuuugucccagucaguccggaggcugcggcugcagaaguaccgccugcggaguaacugcaaagaagcuuaccauggagcugcccauccucaagaccaacgccaucaccacgauccuggccgcggugacccugugcuucgccagcucccagaacaucaccgaggaguucuaccagagcacgugcuccgccgucagcaagggcuaccucuccgcccugcgcaccgggugguacaccagcgugaucaccaucgagcuguccaacaucaaggagaacaagugcaacggcaccgacgccaaggugaagcucaucaagcaggagcuggacaaguacaagaacgcggucacggagcugcagaugcucaugugcagcaccccggccgccggguccggcagcgccaucgcguccgggaucgccgugugcaaggugcugcaccuggagggcgaggucaacaagaucaagaacgcccuccugagcaccaacaaggccguggugucccugagcaacggcgucuccgugcucaccuucaaggugcuggaccugaagaacuacaucgacaagcagcuccugcccauccugaacaagcagagcugcuccaucagcaacaucgagacggucauggaguuccagcagaagaacaaccggcuccuggagaucacccgcgaguucuccgugaacgccggggugaccacccccgucagcacguacaugcugaccaacagcgagcuccugucccugaucaacgacaugcccaucaccaacgaccagaagaagcucaugagcaacaacgugcagaucgugcggcagcaguccuacagcaucaugugcaucaucaaggaggagguccuggcguacguggugcagcugccgcucuacggcgucaucgacacccccugcuggaagcugcacacgagcccccugugcaccaccaacaccaaggaggggagcaacaucugccucacgcgcaccgaccggggcugguacugcgacaacgccggguccgugagcuucuucccccaggccgagaccugcaaggugugcuccaaccgcgucuucugcgacaccaugaacagccugacgcugccguccgaggugaaccucugcaacaucgacaucuucaaccccaaguacgacugcaagaucaugaccagcaagaccgacgucuccagcuccgugaucaccagccugggcgccaucguguccugcuacggcaagacgaagugcaccgccagcaacaagaacaaggggaucaucaagaccuucuccaacggcugcgacuacgucagcaacaaggggguggacaccgugagcgucggcaacacgcuguacuacgugaacaagcaggagggcaagucccucuacgugaagggggagcccaucaucaacuucuacgacccccuggucuucccgagcgacgaguucgacgcguccaucagccaggugaacgagaagaucaaccagucccuggccuucauccggaaguccgacgagcuccugcacaacgugaacgucggcaaguccaccaccaacaucaugaucaccaccaucaucaucgugaucaucgugauccugcuccugcugaucgccgucggccucuuccuguacugcaaggcccgcagcacgcccgugacccuguccaaggaccagcugagcgggaucaacaacaucgccuucuccaacugaggacuaguacuggcugcaucucccuuuccucuguccuccauccuucucccaggauggugaagggggaccugguacccagugauccccaccccaggauccuaaaucaugacuuaccugcuaauaaaaacucauuggaaaagugagaagaucuaaaaaaaaaaaaaaaaaaaaaaaaaaaaaaaaaaaaaaaaaaaaaaaaaaaaaaaaaaaaaaaaugcaucccccccccccccccccccccccccccccccaaaggcucuuuucagagccaccagaauu

SEQ ID NO: 18579 - RNA, 1977 nt, Artificial Sequence
  mRNA product Design e-6 comprising derived and/or modified sequence from HRSV(Memphis-37)__AIY60640.1__F_DSCav1_mut7 (opt2)
gggagagcggcucggccauuuugucccagucaguccggaggcugcggcugcagaaguaccgccugcggaguaacugcaaagaagcuuaccauggagcuccccauccucaagaccaacgccaucaccaccauccucgccgccgucacccucugcuucgccuccucccagaacaucaccgaggaguucuaccaguccaccugcuccgccgucuccaagggcuaccucuccgcccuccgcaccggcugguacaccuccgucaucaccaucgagcucuccaacaucaaggagaacaagugcaacggcaccgacgccaaggucaagcucaucaagcaggagcucgacaaguacaagaacgccgucaccgagcuccagaugcucaugugcuccacccccgccgccggcuccggcuccgccaucgccuccggcaucgccgucugcaagguccuccaccucgagggcgaggucaacaagaucaagaacgcccuccucuccaccaacaaggccgucgucucccucuccaacggcgucuccguccucaccuucaagguccucgaccucaagaacuacaucgacaagcagcuccuccccauccucaacaagcaguccugcuccaucuccaacaucgagaccgucauggaguuccagcagaagaacaaccgccuccucgagaucacccgcgaguucuccgucaacgccggcgucaccacccccgucuccaccuacaugcucaccaacuccgagcuccucucccucaucaacgacaugcccaucaccaacgaccagaagaagcucauguccaacaacguccagaucguccgccagcaguccuacuccaucaugugcaucaucaaggaggagguccucgccuacgucguccagcucccccucuacggcgucaucgacacccccugcuggaagcuccacaccuccccccucugcaccaccaacaccaaggagggcuccaacaucugccucacccgcaccgaccgcggcugguacugcgacaacgccggcuccgucuccuucuucccccaggccgagaccugcaaggucugcuccaaccgcgucuucugcgacaccaugaacucccucacccuccccuccgaggucaaccucugcaacaucgacaucuucaaccccaaguacgacugcaagaucaugaccuccaagaccgacgucuccuccuccgucaucaccucccucggcgccaucgucuccugcuacggcaagaccaagugcaccgccuccaacaagaacaagggcaucaucaagaccuucuccaacggcugcgacuacgucuccaacaagggcgucgacaccgucuccgucggcaacacccucuacuacgucaacaagcaggagggcaagucccucuacgucaagggcgagcccaucaucaacuucuacgacccccucgucuuccccuccgacgaguucgacgccuccaucucccaggucaacgagaagaucaaccagucccucgccuucauccgcaaguccgacgagcuccuccacaacgucaacgucggcaaguccaccaccaacaucaugaucaccaccaucaucaucgucaucaucgucauccuccuccuccucaucgccgucggccucuuccucuacugcaaggcccgcuccacccccgucacccucuccaaggaccagcucuccggcaucaacaacaucgccuucuccaacugaggacuaguacuggcugcaucucccuuuccucuguccuccauccuucucccaggauggugaagggggaccugguacccagugauccccaccccaggauccuaaaucaugacuuaccugcuaauaaaaacucauuggaaaagugagaagaucuaaaaaaaaaaaaaaaaaaaaaaaaaaaaaaaaaaaaaaaaaaaaaaaaaaaaaaaaaaaaaaaaugcaucccccccccccccccccccccccccccccccaaaggcucuuuucagagccaccagaauu

SEQ ID NO: 18580 - RNA, 1977 nt, Artificial Sequence
  mRNA product Design e-6 comprising derived and/or modified sequence from HRSV(Memphis-37)__AIY60640.1__F_DSCav1_mut7 (opt3)
gggagagcggcucggccauuuugucccagucaguccggaggcugcggcugcagaaguaccgccugcggaguaacugcaaagaagcuuaccauggagcugcccauccucaagaccaacgccauuacaacuauacuugcugcagugacgcugugcuucgccagcucccagaauaucaccgaagaguuuuaccaaucuacauguucagcggucaguaaaggcuauuugagcgcuuuaagaacugggugguacaccuccguuauuacaaucgaacugucuaacauuaaggagaauaaaugcaacggaaccgacgccaaggugaaacuaaucaagcaggaacucgauaaguauaaaaaugcaguaacugagcugcagaugcuuauguguucgaccccugccgcugguucaggcagcgcaauagccagugggaucgcugugugcaagguccugcacuuggagggagaagugaacaaaauuaagaaugcccuccuguccacaaacaaagcgguugugucucugagcaauggcgucuccgugcucacguucaagguauuagaccugaagaacuacaucgauaaacagcuuuugccaauucugaauaagcaaucauguaguaucagcaacauagagacuguuauggaauuucagcagaaaaauaacaggcuacucgagauuacccgggaguucucugugaaugccggugucacaacuccgguguccaccuauaugcugacaaacucagaacuucugagcuugaucaacgacaugcccauuaccaaugaucagaagaaacucaugaguaacaaugugcaaaucguccgccagcagucuuacuccaucaugugcauuauaaaggaggaaguucuggcauaugugguacaguuaccucuguacggggugaucgacacgccauguuggaaacuccauacuagcccccuuugcacaaccaacacuaaggagggaucgaauauuugucugacacgaaccgaucguggcugguacugcgacaacgcuggcucugucuccuuuuucccucaagccgaaacguguaaggugugcucaaauagaguguuuugcgauaccaugaacaguuugacacuaccaagcgagguuaaucuguguaacaucgacauauucaaucccaaauaugauugcaagauuaugacuuccaaaaccgacgucucuagcucagugaucacaagucucggggcaaucguauccuguuacggaaagacuaaaugcaccgcuagcaacaagaauaaggguauuaucaaaacauuuucuaacggcugugauuauguuucaaauaaggggguggacaccgucagugugggaaacacucuguacuaugucaacaaacaggagggcaagagccuuuacgugaaaggugaaccuauuauaaauuucuaugacccacugguuuuuccguccgaugaguucgacgccucuaucagccaggugaacgaaaagauuaaucaaucguuggcguuuaucaggaaguccgaugagcuccugcacaacguaaaugucgggaaaucaacgacaaacaucaugauuaccacuauaaucauugugaucauuguuaucuuacugcuacucauagccgugggacuguuccuuuacugcaaggcacggaguacccccgucacauugucuaaagaccagcugagcggcaucaauaacauugcuuucuccaauugaggacuaguacuggcugcaucucccuuuccucuguccuccauccuucucccaggauggugaagggggaccugguacccagugauccccaccccaggauccuaaaucaugacuuaccugcuaauaaaaacucauuggaaaagugagaagaucuaaaaaaaaaaaaaaaaaaaaaaaaaaaaaaaaaaaaaaaaaaaaaaaaaaaaaaaaaaaaaaaaugcaucccccccccccccccccccccccccccccccaaaggcucuuuucagagccaccagaauu

SEQ ID NO: 18581 - RNA, 1977 nt, Artificial Sequence
  mRNA product Design e-6 comprising derived and/or modified sequence from HRSV(Memphis-37)__AIY60640.1__F_DSCav1_mut7 (opt4)
gggagagcggcucggccauuuugucccagucaguccggaggcugcggcugcagaaguaccgccugcggaguaacugcaaagaagcuuaccauggagcugcccauccugaagaccaacgccaucaccaccauccuggccgccgugacccugugcuucgccagcagccagaacaucaccgaggaguucuaccagagcaccugcagcgccgugagcaagggcuaccugagcgcccugagaaccggcugguacaccagcgugaucaccaucgagcugagcaacaucaaggagaacaagugcaacggcaccgacgccaaggugaagcugaucaagcaggagcuggacaaguacaagaacgccgugaccgagcugcagaugcugaugugcagcacccccgccgccggcagcggcagcgccaucgccagcggcaucgccgugugcaaggugcugcaccuggagggcgaggugaacaagaucaagaacgcccugcugagcaccaacaaggccguggugagccugagcaacggcgugagcgugcugaccuucaaggugcuggaccugaagaacuacaucgacaagcagcugcugcccauccugaacaagcagagcugcagcaucagcaacaucgagaccgugauggaguuccagcagaagaacaacagacugcuggagaucaccagagaguucagcgugaacgccggcgugaccacccccgugagcaccuacaugcugaccaacagcgagcugcugagccugaucaacgacaugcccaucaccaacgaccagaagaagcugaugagcaacaacgugcagaucgugagacagcagagcuacagcaucaugugcaucaucaaggaggaggugcuggccuacguggugcagcugccccuguacggcgugaucgacacccccugcuggaagcugcacaccagcccccugugcaccaccaacaccaaggagggcagcaacaucugccugaccagaaccgacagaggcugguacugcgacaacgccggcagcgugagcuucuucccccaggccgagaccugcaaggugugcagcaacagaguguucugcgacaccaugaacagccugacccugcccagcgaggugaaccugugcaacaucgacaucuucaaccccaaguacgacugcaagaucaugaccagcaagaccgacgugagcagcagcgugaucaccagccugggcgccaucgugagcugcuacggcaagaccaagugcaccgccagcaacaagaacaagggcaucaucaagaccuucagcaacggcugcgacuacgugagcaacaagggcguggacaccgugagcgugggcaacacccuguacuacgugaacaagcaggagggcaagagccuguacgugaagggcgagcccaucaucaacuucuacgacccccugguguuccccagcgacgaguucgacgccagcaucagccaggugaacgagaagaucaaccagagccuggccuucaucagaaagagcgacgagcugcugcacaacgugaacgugggcaagagcaccaccaacaucaugaucaccaccaucaucaucgugaucaucgugauccugcugcugcugaucgccgugggccuguuccuguacugcaaggccagaagcacccccgugacccugagcaaggaccagcugagcggcaucaacaacaucgccuucagcaacugaggacuaguacuggcugcaucucccuuuccucuguccuccauccuucucccaggauggugaagggggaccugguacccagugauccccaccccaggauccuaaaucaugacuuaccugcuaauaaaaacucauuggaaaagugagaagaucuaaaaaaaaaaaaaaaaaaaaaaaaaaaaaaaaaaaaaaaaaaaaaaaaaaaaaaaaaaaaaaaaugcaucccccccccccccccccccccccccccccccaaaggcucuuuucagagccaccagaauu

SEQ ID NO: 18582 - RNA, 1977 nt, Artificial Sequence
  mRNA product Design e-6 comprising derived and/or modified sequence from HRSV(Memphis-37)__AIY60640.1__F_DSCav1_mut7 (opt5)
gggagagcggcucggccauuuugucccagucaguccggaggcugcggcugcagaaguaccgccugcggaguaacugcaaagaagcuuaccauggagcugcccauccucaagaccaacgccauuacaacgauccuggcugccgugacccuuugcuucgcgagcucccagaauauuacagaagaguuuuaccaaucuaccuguagcgcugucuccaaaggcuaucugucugcccucagaacagggugguacaccagcguuaucacaauugaacuguccaacaucaaggagaauaaaugcaacggaaccgacgccaaggugaaacuuaucaagcaggaacuggauaaguauaaaaaugcugugacggagcuccagaugcugauguguucuaccccugccgcuggcagcggguccgccauugcgagcggaaucgccgucugcaaggugcugcaccucgagggcgaaguuaacaaaauuaagaaugcucugcuuucuacaaacaaagccguggucucccugagcaauggggugucuguucucaccuucaaggugcuggaccuuaagaacuacaucgauaaacagcugcucccgauucugaauaagcaauccuguagcaucucuaacauugagacagucauggaauuucagcagaaaaauaaccggcugcucgagaucacccgcgaguucuccgugaaugcuggagugacgacacccgucagcaccuauaugcugacaaacuccgaacuucugucucucaucaacgacaugccuauuaccaaugaucagaagaaacugaugagcaacaauguucaaaucgugagacagcaguccuacagcauuaugugcaucauuaaggaggaagugcuugccuaugucgugcagcugccccucuacggcguuaucgacaccccuuguuggaaacugcauacaucuccccugugcacgaccaacacaaaggagggcuccaauaucugucucacccggacagaucgcgggugguacugcgacaacgcgggaagcgugagcuuuuucccucaagccgaaaccuguaaggucugcucuaauagaguguuuugcgauacgaugaacucccugacacuuccgucugagguuaaucuguguaacauugacaucuucaaucccaaauaugauugcaagauuaugaccagcaaaaccgacguguccagcucugucaucacaucccucggcgcuauugugagcuguuacgggaagaccaaaugcacagccucuaacaagaauaagggaaucaucaaaacguuuuccaacggcugugauuaugucagcaauaaggggguggacaccguuuccgugggaaacacacuguacuaugucaacaaacaggagggcaagucucuuuacgugaaaggcgaaccuauuaucaauuucuaugacccccugguuuuuccuagcgaugaguucgacgcuuccauuucucaggugaacgaaaagaucaaucaaagccucgccuuuauucggaaguccgaugagcugcugcacaacgucaauguggggaaaagcaccacaaacaucaugauuaccacgaucaucauugugaucauuguuauccuccugcuucugauugccgucggacucuuccuguacugcaaggcucgcucuacccccgugacacuguccaaagaccagcuuagcggcaucaauaacaucgcguucucuaauugaggacuaguacuggcugcaucucccuuuccucuguccuccauccuucucccaggauggugaagggggaccugguacccagugauccccaccccaggauccuaaaucaugacuuaccugcuaauaaaaacucauuggaaaagugagaagaucuaaaaaaaaaaaaaaaaaaaaaaaaaaaaaaaaaaaaaaaaaaaaaaaaaaaaaaaaaaaaaaaaugcaucccccccccccccccccccccccccccccccaaaggcucuuuucagagccaccagaauu

SEQ ID NO: 18583 - RNA, 1977 nt, Artificial Sequence
  mRNA product Design e-6 comprising derived and/or modified sequence from HRSV(Memphis-37)__AIY60640.1__F_DSCav1_mut7 (opt6)
gggagagcggcucggccauuuugucccagucaguccggaggcugcggcugcagaaguaccgccugcggaguaacugcaaagaagcuuaccauggaacuaccaauacucaaaacaaaugcuauaaccacaauacucgcagcaguaacauuauguuucgcaucaucccaaaacauaacagaagaauuuuaucaaucaaccuguucagcaguauccaaaggauaccuaagugcauuaagaaccggaugguacacaucaguaauaaccauagaacuuucaaacauaaaagaaaacaaauguaacggcacagacgcaaaagucaaacucaucaaacaggaacuugacaaauauaaaaacgcaguaaccgaacuacaaaugcuaaugugcucaacaccagcagcaggaucaggaucagcaauugcaucuggaauagcuguaugcaaaguccuacaccuagaaggagaaguaaacaaaaucaaaaacgcauuacucuccacaaacaaagcaguaguaucacuaucaaacggaguuucaguacuaaccuucaaaguauuagaccuaaaaaacuacauagacaaacaacuacuaccuauacuaaacaaacaauccuguucaauaagcaacauugaaacuguaauggaauuucaacaaaaaaacaaccgccuauuagaaauaaccagagaauuuuccguaaaugcaggaguaaccacaccagucucuacauacauguuaaccaacucagaacuauuaucacucauaaaugacaugccuauaacaaacgaccaaaaaaaacuaaugucaaacaacguacaaauaguaagacaacaaucauauuccauaaugugcauaauaaaagaagaaguacuugcauacgugguucaacuaccccuauauggaguuauagacacaccaugcuggaaacuccacacuuccccacuuugcacaacuaacacaaaagaaggaucaaauauaugccuaaccagaacagaccguggaugguacugcgacaacgcuggaucagucuccuucuuuccacaagcagaaaccugcaaagucugcucaaauagagucuucugugacacaaugaacucacucacccuacccucagaaguaaaccuauguaauauagauauauuuaauccaaaauacgacugcaaaauuaugacaaguaaaacagacguaagcucaucagucauaaccagccuaggagcaauaguauccuguuacggcaaaacaaaaugcacagcuucaaacaaaaacaaaggcauaauaaaaacauucucaaacggaugugacuauguaucaaauaaaggaguugacacaguaucaguuggaaacacacuauacuauguaaacaaacaagaaggaaaaucacuauacguuaaaggcgaacccauaaucaauuucuacgacccccuagucuucccauccgaugaauuugacgcaucaauaucccaaguaaaugaaaaaaucaaccaaucccuagcauuuauacgaaaauccgacgaacuacuccauaaugucaacgucgguaaaucaacgacaaacaucaugaucacaacaauaauaauaguaauaauuguaauauuacucuuacucauagcaguaggccuauuucuauauugcaaagccagaucaacaccaguaaccuuauccaaagaccaacuaucuggaauaaacaacauagcauuuuccaacugaggacuaguacuggcugcaucucccuuuccucuguccuccauccuucucccaggauggugaagggggaccugguacccagugauccccaccccaggauccuaaaucaugacuuaccugcuaauaaaaacucauuggaaaagugagaagaucuaaaaaaaaaaaaaaaaaaaaaaaaaaaaaaaaaaaaaaaaaaaaaaaaaaaaaaaaaaaaaaaaugcaucccccccccccccccccccccccccccccccaaaggcucuuuucagagccaccagaauu

SEQ ID NO: 18584 - RNA, 1977 nt, Artificial Sequence
  mRNA product Design e-6 comprising derived and/or modified sequence from HRSV(Memphis-37)__AIY60640.1__F_DSCav1_mut7 (opt11)
gggagagcggcucggccauuuugucccagucaguccggaggcugcggcugcagaaguaccgccugcggaguaacugcaaagaagcuuaccauggaacuccccauacuuaaaacaaacgccauaacaacuauacucgcagccgucacccucuguuucgcauccucucaaaacaucaccgaagaguucuaucaaucaaccugcuccgccgucucaaaaggcuaccucuccgcccuacgcacaggcugguacaccagcgucauuaccauagaacucucgaacaucaaagaaaacaaaugcaacggcaccgacgcaaaagugaaacucaucaaacaagaacucgacaaauacaaaaacgccgucaccgaacuucagaugcucaugugcuccaccccugccgccggcagcggcuccgccauagccuccggcaucgcagucugcaaaguccuccaccucgaaggagaaguaaacaaaaucaaaaaugcucuccucuccacaaacaaagccgucgucucacucuccaauggagucuccguccucaccuucaaaguccucgaccucaaaaacuacauagacaaacaacuacuccccauccucaacaagcaauccugcucuaucuccaacauagaaaccguuauggaguuccaacagaaaaauaaccgccugcuagaaauaacccgagaguucuccgucaacgcaggcgucacuacccccgucagcacauacaugcuaacaaacuccgaacugcucucccuuaucaacgacaugcccaucacaaacgaucagaaaaagcucaugucuaacaacguacaaaucguucggcaacaauccuacuccaucaugugcaucaucaaagaagaagugcucgccuacguaguccaacucccccucuacggagucaucgacacacccugcuggaaacuccacacaucaccccucugcaccaccaacacaaaagaaggguccaacaucugccucacgcgcaccgaccgaggcugguacugcgacaacgccggcuccguauccuucuucccccaagcagaaaccugcaaggucugcuccaaccgcguauucugcgacaccaugaacucgcucacccuccccucagaagucaaccuauguaacaucgacauauucaaucccaaauacgacugcaagauaaugacuuccaaaaccgacguaagcuccucggucaucaccucccucggcgccaucgucuccugcuacggcaaaaccaaaugcaccgccuccaauaagaauaaaggcauaauaaagacauucagcaacggcugcgauuacgucuccaacaaaggugucgacaccgucucagucggcaacacucuauacuacgugaacaaacaagaaggcaaaagccuauacguuaaaggcgaaccaauaaucaauuucuacgacccucuagucuuucccucugacgaguucgaugccagcauaagccaagucaacgaaaagaucaaccaaucacucgccuucauccguaaauccgacgaacugcuccacaaugucaauguaggcaaaucaacaaccaacaucaugaucaccacuauuaucaucgucaucaucguaauccuacuccuacuaaucgccgucggccuauuccucuacugcaaagcccgcucgacccccgucacucucagcaaggaucaacuauccggcaucaacaacaucgccuucuccaacuaaggacuaguacuggcugcaucucccuuuccucuguccuccauccuucucccaggauggugaagggggaccugguacccagugauccccaccccaggauccuaaaucaugacuuaccugcuaauaaaaacucauuggaaaagugagaagaucuaaaaaaaaaaaaaaaaaaaaaaaaaaaaaaaaaaaaaaaaaaaaaaaaaaaaaaaaaaaaaaaaugcaucccccccccccccccccccccccccccccccaaaggcucuuuucagagccaccagaauu

SEQ ID NO: 18585 - RNA, 2193 nt, Artificial Sequence
  mRNA product Design f-1 comprising derived and/or modified sequence from HRSV(Memphis-37)__AIY60640.1__F_DSCav1_mut7 (opt1)
gggagagcggcucggccauuuugucccagucaguccggaggcugcggcugcagaaguaccgccugcggaguaacugcaaagaagcuuaccauggagcugcccauccucaagaccaacgccaucaccacgauccuggccgcggugacccugugcuucgccagcucccagaacaucaccgaggaguucuaccagagcacgugcuccgccgucagcaagggcuaccucuccgcccugcgcaccgggugguacaccagcgugaucaccaucgagcuguccaacaucaaggagaacaagugcaacggcaccgacgccaaggugaagcucaucaagcaggagcuggacaaguacaagaacgcggucacggagcugcagaugcugaugugcagcaccccggccgccggcuccgggagcgcgaucgccuccggcaucgccgucugcaaggugcugcaccucgagggcgaggugaacaagaucaagaacgcccugcuguccaccaacaaggccgucgugagccucuccaacggggugagcguccugaccuucaaggugcuggaccucaagaacuacaucgacaagcagcugcugcccauccugaacaagcagagcugcuccaucagcaacaucgagaccgucauggaguuccagcagaagaacaaccgccuccuggagaucacgcgggaguucagcgugaacgcgggcgugaccacccccgucuccaccuacaugcugacgaacagcgagcuccugucccugaucaacgacaugccgaucaccaacgaccagaagaagcucaugagcaacaacgugcagaucgugcgccagcaguccuacagcaucaugugcaucaucaaggaggagguccuggccuacguggugcagcugccccucuacggggucaucgacacccccugcuggaagcugcacaccagcccccugugcacgaccaacaccaaggagggcuccaacaucugccucacccggacggaccgcgggugguacugcgacaacgccggcagcguguccuucuucccgcaggccgagaccugcaaggucugcagcaaccggguguucugcgacaccaugaacucccugacccugcccagcgaggugaaccucugcaacaucgacaucuucaaccccaaguacgacugcaagaucaugacguccaagaccgacgucagcuccagcgugaucaccucccugggcgccaucgugagcugcuacgggaagaccaagugcacggcgagcaacaagaacaagggcaucaucaagaccuucuccaacgggugcgacuacgucagcaacaagggcguggacaccguguccgucggcaacacccuguacuacgugaacaagcaggagggcaagagccucuacgugaagggggagcccaucaucaacuucuacgacccgcuggucuuccccuccgacgaguucgacgccagcaucucccaggugaacgagaagaucaaccagagccuggccuucauccggaaguccgacgagcuccugcacaacgugaacgucggcaagagcaccacgaacaucaugaucaccaccaucaucaucgugaucaucgugauccugcugcuccugaucgccgucgggcuguuccucuacugcaaggcccgcuccacccccgugacgcugagcaaggaccagcuguccgggaucaacaacaucgcguucagcaacugaggacuagugaagggaacacccaaauuuaauucagccuuaagcacaauuaauuaagagugaaacguaauuguacaagcaguuggucacccaccauagggcaugaucaacaccgcaaccuuuccuuuuucccccagugauucugaaaaaccccucuucccuucagcuugcuuagauguuccaaauuuaguaagcuuaaggcggccuacagaagaaaaagaaaaaaaaggccacaaaaguucccucucacuuucaguaaauaaaauaaaagcagcaacagaaauaaagaaauaaaugaaauucaaaaugaaauaaauauuguguugugcagcauuaaaaaaucaauaaaaauuaaaaaugagcaagaucuaaaaaaaaaaaaaaaaaaaaaaaaaaaaaaaaaaaaaaaaaaaaaaaaaaaaaaaaaaaaaaaaugcaucccccccccccccccccccccccccccccccaaaggcucuuuucagagccaccagaauu

SEQ ID NO: 18586 - RNA, 2193 nt, Artificial Sequence
  mRNA product Design f-1 comprising derived and/or modified sequence from HRSV(Memphis-37)__AIY60640.1__F_DSCav1_mut7 (opt1)
gggagagcggcucggccauuuugucccagucaguccggaggcugcggcugcagaaguaccgccugcggaguaacugcaaagaagcuuaccauggagcugcccauccucaagaccaacgccaucaccacgauccuggccgcggugacccugugcuucgccagcucccagaacaucaccgaggaguucuaccagagcacgugcuccgccgucagcaagggcuaccucuccgcccugcgcaccgggugguacaccagcgugaucaccaucgagcuguccaacaucaaggagaacaagugcaacggcaccgacgccaaggugaagcucaucaagcaggagcuggacaaguacaagaacgcggucacggagcugcagaugcucaugugcagcaccccggccgccggguccggcagcgccaucgcguccgggaucgccgugugcaaggugcugcaccuggagggcgaggucaacaagaucaagaacgcccuccugagcaccaacaaggccguggugucccugagcaacggcgucuccgugcucaccuucaaggugcuggaccugaagaacuacaucgacaagcagcuccugcccauccugaacaagcagagcugcuccaucagcaacaucgagacggucauggaguuccagcagaagaacaaccggcuccuggagaucacccgcgaguucuccgugaacgccggggugaccacccccgucagcacguacaugcugaccaacagcgagcuccugucccugaucaacgacaugcccaucaccaacgaccagaagaagcucaugagcaacaacgugcagaucgugcggcagcaguccuacagcaucaugugcaucaucaaggaggagguccuggcguacguggugcagcugccgcucuacggcgucaucgacacccccugcuggaagcugcacacgagcccccugugcaccaccaacaccaaggaggggagcaacaucugccucacgcgcaccgaccggggcugguacugcgacaacgccggguccgugagcuucuucccccaggccgagaccugcaaggugugcuccaaccgcgucuucugcgacaccaugaacagccugacgcugccguccgaggugaaccucugcaacaucgacaucuucaaccccaaguacgacugcaagaucaugaccagcaagaccgacgucuccagcuccgugaucaccagccugggcgccaucguguccugcuacggcaagacgaagugcaccgccagcaacaagaacaaggggaucaucaagaccuucuccaacggcugcgacuacgucagcaacaaggggguggacaccgugagcgucggcaacacgcuguacuacgugaacaagcaggagggcaagucccucuacgugaagggggagcccaucaucaacuucuacgacccccuggucuucccgagcgacgaguucgacgcguccaucagccaggugaacgagaagaucaaccagucccuggccuucauccggaaguccgacgagcuccugcacaacgugaacgucggcaaguccaccaccaacaucaugaucaccaccaucaucaucgugaucaucgugauccugcuccugcugaucgccgucggccucuuccuguacugcaaggcccgcagcacgcccgugacccuguccaaggaccagcugagcgggaucaacaacaucgccuucuccaacugaggacuagugaagggaacacccaaauuuaauucagccuuaagcacaauuaauuaagagugaaacguaauuguacaagcaguuggucacccaccauagggcaugaucaacaccgcaaccuuuccuuuuucccccagugauucugaaaaaccccucuucccuucagcuugcuuagauguuccaaauuuaguaagcuuaaggcggccuacagaagaaaaagaaaaaaaaggccacaaaaguucccucucacuuucaguaaauaaaauaaaagcagcaacagaaauaaagaaauaaaugaaauucaaaaugaaauaaauauuguguugugcagcauuaaaaaaucaauaaaaauuaaaaaugagcaagaucuaaaaaaaaaaaaaaaaaaaaaaaaaaaaaaaaaaaaaaaaaaaaaaaaaaaaaaaaaaaaaaaaugcaucccccccccccccccccccccccccccccccaaaggcucuuuucagagccaccagaauu

SEQ ID NO: 18587 - RNA, 2193 nt, Artificial Sequence
  mRNA product Design f-1 comprising derived and/or modified sequence from HRSV(Memphis-37)__AIY60640.1__F_DSCav1_mut7 (opt2)
gggagagcggcucggccauuuugucccagucaguccggaggcugcggcugcagaaguaccgccugcggaguaacugcaaagaagcuuaccauggagcuccccauccucaagaccaacgccaucaccaccauccucgccgccgucacccucugcuucgccuccucccagaacaucaccgaggaguucuaccaguccaccugcuccgccgucuccaagggcuaccucuccgcccuccgcaccggcugguacaccuccgucaucaccaucgagcucuccaacaucaaggagaacaagugcaacggcaccgacgccaaggucaagcucaucaagcaggagcucgacaaguacaagaacgccgucaccgagcuccagaugcucaugugcuccacccccgccgccggcuccggcuccgccaucgccuccggcaucgccgucugcaagguccuccaccucgagggcgaggucaacaagaucaagaacgcccuccucuccaccaacaaggccgucgucucccucuccaacggcgucuccguccucaccuucaagguccucgaccucaagaacuacaucgacaagcagcuccuccccauccucaacaagcaguccugcuccaucuccaacaucgagaccgucauggaguuccagcagaagaacaaccgccuccucgagaucacccgcgaguucuccgucaacgccggcgucaccacccccgucuccaccuacaugcucaccaacuccgagcuccucucccucaucaacgacaugcccaucaccaacgaccagaagaagcucauguccaacaacguccagaucguccgccagcaguccuacuccaucaugugcaucaucaaggaggagguccucgccuacgucguccagcucccccucuacggcgucaucgacacccccugcuggaagcuccacaccuccccccucugcaccaccaacaccaaggagggcuccaacaucugccucacccgcaccgaccgcggcugguacugcgacaacgccggcuccgucuccuucuucccccaggccgagaccugcaaggucugcuccaaccgcgucuucugcgacaccaugaacucccucacccuccccuccgaggucaaccucugcaacaucgacaucuucaaccccaaguacgacugcaagaucaugaccuccaagaccgacgucuccuccuccgucaucaccucccucggcgccaucgucuccugcuacggcaagaccaagugcaccgccuccaacaagaacaagggcaucaucaagaccuucuccaacggcugcgacuacgucuccaacaagggcgucgacaccgucuccgucggcaacacccucuacuacgucaacaagcaggagggcaagucccucuacgucaagggcgagcccaucaucaacuucuacgacccccucgucuuccccuccgacgaguucgacgccuccaucucccaggucaacgagaagaucaaccagucccucgccuucauccgcaaguccgacgagcuccuccacaacgucaacgucggcaaguccaccaccaacaucaugaucaccaccaucaucaucgucaucaucgucauccuccuccuccucaucgccgucggccucuuccucuacugcaaggcccgcuccacccccgucacccucuccaaggaccagcucuccggcaucaacaacaucgccuucuccaacugaggacuagugaagggaacacccaaauuuaauucagccuuaagcacaauuaauuaagagugaaacguaauuguacaagcaguuggucacccaccauagggcaugaucaacaccgcaaccuuuccuuuuucccccagugauucugaaaaaccccucuucccuucagcuugcuuagauguuccaaauuuaguaagcuuaaggcggccuacagaagaaaaagaaaaaaaaggccacaaaaguucccucucacuuucaguaaauaaaauaaaagcagcaacagaaauaaagaaauaaaugaaauucaaaaugaaauaaauauuguguugugcagcauuaaaaaaucaauaaaaauuaaaaaugagcaagaucuaaaaaaaaaaaaaaaaaaaaaaaaaaaaaaaaaaaaaaaaaaaaaaaaaaaaaaaaaaaaaaaaugcaucccccccccccccccccccccccccccccccaaaggcucuuuucagagccaccagaauu

SEQ ID NO: 18588 - RNA, 2193 nt, Artificial Sequence
  mRNA product Design f-1 comprising derived and/or modified sequence from HRSV(Memphis-37)__AIY60640.1__F_DSCav1_mut7 (opt3)
gggagagcggcucggccauuuugucccagucaguccggaggcugcggcugcagaaguaccgccugcggaguaacugcaaagaagcuuaccauggagcugcccauccucaagaccaacgccauuacaacuauacuugcugcagugacgcugugcuucgccagcucccagaauaucaccgaagaguuuuaccaaucuacauguucagcggucaguaaaggcuauuugagcgcuuuaagaacugggugguacaccuccguuauuacaaucgaacugucuaacauuaaggagaauaaaugcaacggaaccgacgccaaggugaaacuaaucaagcaggaacucgauaaguauaaaaaugcaguaacugagcugcagaugcuuauguguucgaccccugccgcugguucaggcagcgcaauagccagugggaucgcugugugcaagguccugcacuuggagggagaagugaacaaaauuaagaaugcccuccuguccacaaacaaagcgguugugucucugagcaauggcgucuccgugcucacguucaagguauuagaccugaagaacuacaucgauaaacagcuuuugccaauucugaauaagcaaucauguaguaucagcaacauagagacuguuauggaauuucagcagaaaaauaacaggcuacucgagauuacccgggaguucucugugaaugccggugucacaacuccgguguccaccuauaugcugacaaacucagaacuucugagcuugaucaacgacaugcccauuaccaaugaucagaagaaacucaugaguaacaaugugcaaaucguccgccagcagucuuacuccaucaugugcauuauaaaggaggaaguucuggcauaugugguacaguuaccucuguacggggugaucgacacgccauguuggaaacuccauacuagcccccuuugcacaaccaacacuaaggagggaucgaauauuugucugacacgaaccgaucguggcugguacugcgacaacgcuggcucugucuccuuuuucccucaagccgaaacguguaaggugugcucaaauagaguguuuugcgauaccaugaacaguuugacacuaccaagcgagguuaaucuguguaacaucgacauauucaaucccaaauaugauugcaagauuaugacuuccaaaaccgacgucucuagcucagugaucacaagucucggggcaaucguauccuguuacggaaagacuaaaugcaccgcuagcaacaagaauaaggguauuaucaaaacauuuucuaacggcugugauuauguuucaaauaaggggguggacaccgucagugugggaaacacucuguacuaugucaacaaacaggagggcaagagccuuuacgugaaaggugaaccuauuauaaauuucuaugacccacugguuuuuccguccgaugaguucgacgccucuaucagccaggugaacgaaaagauuaaucaaucguuggcguuuaucaggaaguccgaugagcuccugcacaacguaaaugucgggaaaucaacgacaaacaucaugauuaccacuauaaucauugugaucauuguuaucuuacugcuacucauagccgugggacuguuccuuuacugcaaggcacggaguacccccgucacauugucuaaagaccagcugagcggcaucaauaacauugcuuucuccaauugaggacuagugaagggaacacccaaauuuaauucagccuuaagcacaauuaauuaagagugaaacguaauuguacaagcaguuggucacccaccauagggcaugaucaacaccgcaaccuuuccuuuuucccccagugauucugaaaaaccccucuucccuucagcuugcuuagauguuccaaauuuaguaagcuuaaggcggccuacagaagaaaaagaaaaaaaaggccacaaaaguucccucucacuuucaguaaauaaaauaaaagcagcaacagaaauaaagaaauaaaugaaauucaaaaugaaauaaauauuguguugugcagcauuaaaaaaucaauaaaaauuaaaaaugagcaagaucuaaaaaaaaaaaaaaaaaaaaaaaaaaaaaaaaaaaaaaaaaaaaaaaaaaaaaaaaaaaaaaaaugcaucccccccccccccccccccccccccccccccaaaggcucuuuucagagccaccagaauu

SEQ ID NO: 18589 - RNA, 2193 nt, Artificial Sequence
  mRNA product Design f-1 comprising derived and/or modified sequence from HRSV(Memphis-37)__AIY60640.1__F_DSCav1_mut7 (opt4)
gggagagcggcucggccauuuugucccagucaguccggaggcugcggcugcagaaguaccgccugcggaguaacugcaaagaagcuuaccauggagcugcccauccugaagaccaacgccaucaccaccauccuggccgccgugacccugugcuucgccagcagccagaacaucaccgaggaguucuaccagagcaccugcagcgccgugagcaagggcuaccugagcgcccugagaaccggcugguacaccagcgugaucaccaucgagcugagcaacaucaaggagaacaagugcaacggcaccgacgccaaggugaagcugaucaagcaggagcuggacaaguacaagaacgccgugaccgagcugcagaugcugaugugcagcacccccgccgccggcagcggcagcgccaucgccagcggcaucgccgugugcaaggugcugcaccuggagggcgaggugaacaagaucaagaacgcccugcugagcaccaacaaggccguggugagccugagcaacggcgugagcgugcugaccuucaaggugcuggaccugaagaacuacaucgacaagcagcugcugcccauccugaacaagcagagcugcagcaucagcaacaucgagaccgugauggaguuccagcagaagaacaacagacugcuggagaucaccagagaguucagcgugaacgccggcgugaccacccccgugagcaccuacaugcugaccaacagcgagcugcugagccugaucaacgacaugcccaucaccaacgaccagaagaagcugaugagcaacaacgugcagaucgugagacagcagagcuacagcaucaugugcaucaucaaggaggaggugcuggccuacguggugcagcugccccuguacggcgugaucgacacccccugcuggaagcugcacaccagcccccugugcaccaccaacaccaaggagggcagcaacaucugccugaccagaaccgacagaggcugguacugcgacaacgccggcagcgugagcuucuucccccaggccgagaccugcaaggugugcagcaacagaguguucugcgacaccaugaacagccugacccugcccagcgaggugaaccugugcaacaucgacaucuucaaccccaaguacgacugcaagaucaugaccagcaagaccgacgugagcagcagcgugaucaccagccugggcgccaucgugagcugcuacggcaagaccaagugcaccgccagcaacaagaacaagggcaucaucaagaccuucagcaacggcugcgacuacgugagcaacaagggcguggacaccgugagcgugggcaacacccuguacuacgugaacaagcaggagggcaagagccuguacgugaagggcgagcccaucaucaacuucuacgacccccugguguuccccagcgacgaguucgacgccagcaucagccaggugaacgagaagaucaaccagagccuggccuucaucagaaagagcgacgagcugcugcacaacgugaacgugggcaagagcaccaccaacaucaugaucaccaccaucaucaucgugaucaucgugauccugcugcugcugaucgccgugggccuguuccuguacugcaaggccagaagcacccccgugacccugagcaaggaccagcugagcggcaucaacaacaucgccuucagcaacugaggacuagugaagggaacacccaaauuuaauucagccuuaagcacaauuaauuaagagugaaacguaauuguacaagcaguuggucacccaccauagggcaugaucaacaccgcaaccuuuccuuuuucccccagugauucugaaaaaccccucuucccuucagcuugcuuagauguuccaaauuuaguaagcuuaaggcggccuacagaagaaaaagaaaaaaaaggccacaaaaguucccucucacuuucaguaaauaaaauaaaagcagcaacagaaauaaagaaauaaaugaaauucaaaaugaaauaaauauuguguugugcagcauuaaaaaaucaauaaaaauuaaaaaugagcaagaucuaaaaaaaaaaaaaaaaaaaaaaaaaaaaaaaaaaaaaaaaaaaaaaaaaaaaaaaaaaaaaaaaugcaucccccccccccccccccccccccccccccccaaaggcucuuuucagagccaccagaauu

SEQ ID NO: 18590 - RNA, 2193 nt, Artificial Sequence
  mRNA product Design f-1 comprising derived and/or modified sequence from HRSV(Memphis-37)__AIY60640.1__F_DSCav1_mut7 (opt5)
gggagagcggcucggccauuuugucccagucaguccggaggcugcggcugcagaaguaccgccugcggaguaacugcaaagaagcuuaccauggagcugcccauccucaagaccaacgccauuacaacgauccuggcugccgugacccuuugcuucgcgagcucccagaauauuacagaagaguuuuaccaaucuaccuguagcgcugucuccaaaggcuaucugucugcccucagaacagggugguacaccagcguuaucacaauugaacuguccaacaucaaggagaauaaaugcaacggaaccgacgccaaggugaaacuuaucaagcaggaacuggauaaguauaaaaaugcugugacggagcuccagaugcugauguguucuaccccugccgcuggcagcggguccgccauugcgagcggaaucgccgucugcaaggugcugcaccucgagggcgaaguuaacaaaauuaagaaugcucugcuuucuacaaacaaagccguggucucccugagcaauggggugucuguucucaccuucaaggugcuggaccuuaagaacuacaucgauaaacagcugcucccgauucugaauaagcaauccuguagcaucucuaacauugagacagucauggaauuucagcagaaaaauaaccggcugcucgagaucacccgcgaguucuccgugaaugcuggagugacgacacccgucagcaccuauaugcugacaaacuccgaacuucugucucucaucaacgacaugccuauuaccaaugaucagaagaaacugaugagcaacaauguucaaaucgugagacagcaguccuacagcauuaugugcaucauuaaggaggaagugcuugccuaugucgugcagcugccccucuacggcguuaucgacaccccuuguuggaaacugcauacaucuccccugugcacgaccaacacaaaggagggcuccaauaucugucucacccggacagaucgcgggugguacugcgacaacgcgggaagcgugagcuuuuucccucaagccgaaaccuguaaggucugcucuaauagaguguuuugcgauacgaugaacucccugacacuuccgucugagguuaaucuguguaacauugacaucuucaaucccaaauaugauugcaagauuaugaccagcaaaaccgacguguccagcucugucaucacaucccucggcgcuauugugagcuguuacgggaagaccaaaugcacagccucuaacaagaauaagggaaucaucaaaacguuuuccaacggcugugauuaugucagcaauaaggggguggacaccguuuccgugggaaacacacuguacuaugucaacaaacaggagggcaagucucuuuacgugaaaggcgaaccuauuaucaauuucuaugacccccugguuuuuccuagcgaugaguucgacgcuuccauuucucaggugaacgaaaagaucaaucaaagccucgccuuuauucggaaguccgaugagcugcugcacaacgucaauguggggaaaagcaccacaaacaucaugauuaccacgaucaucauugugaucauuguuauccuccugcuucugauugccgucggacucuuccuguacugcaaggcucgcucuacccccgugacacuguccaaagaccagcuuagcggcaucaauaacaucgcguucucuaauugaggacuagugaagggaacacccaaauuuaauucagccuuaagcacaauuaauuaagagugaaacguaauuguacaagcaguuggucacccaccauagggcaugaucaacaccgcaaccuuuccuuuuucccccagugauucugaaaaaccccucuucccuucagcuugcuuagauguuccaaauuuaguaagcuuaaggcggccuacagaagaaaaagaaaaaaaaggccacaaaaguucccucucacuuucaguaaauaaaauaaaagcagcaacagaaauaaagaaauaaaugaaauucaaaaugaaauaaauauuguguugugcagcauuaaaaaaucaauaaaaauuaaaaaugagcaagaucuaaaaaaaaaaaaaaaaaaaaaaaaaaaaaaaaaaaaaaaaaaaaaaaaaaaaaaaaaaaaaaaaugcaucccccccccccccccccccccccccccccccaaaggcucuuuucagagccaccagaauu

SEQ ID NO: 18591 - RNA, 2193 nt, Artificial Sequence
  mRNA product Design f-1 comprising derived and/or modified sequence from HRSV(Memphis-37)__AIY60640.1__F_DSCav1_mut7 (opt6)
gggagagcggcucggccauuuugucccagucaguccggaggcugcggcugcagaaguaccgccugcggaguaacugcaaagaagcuuaccauggaacuaccaauacucaaaacaaaugcuauaaccacaauacucgcagcaguaacauuauguuucgcaucaucccaaaacauaacagaagaauuuuaucaaucaaccuguucagcaguauccaaaggauaccuaagugcauuaagaaccggaugguacacaucaguaauaaccauagaacuuucaaacauaaaagaaaacaaauguaacggcacagacgcaaaagucaaacucaucaaacaggaacuugacaaauauaaaaacgcaguaaccgaacuacaaaugcuaaugugcucaacaccagcagcaggaucaggaucagcaauugcaucuggaauagcuguaugcaaaguccuacaccuagaaggagaaguaaacaaaaucaaaaacgcauuacucuccacaaacaaagcaguaguaucacuaucaaacggaguuucaguacuaaccuucaaaguauuagaccuaaaaaacuacauagacaaacaacuacuaccuauacuaaacaaacaauccuguucaauaagcaacauugaaacuguaauggaauuucaacaaaaaaacaaccgccuauuagaaauaaccagagaauuuuccguaaaugcaggaguaaccacaccagucucuacauacauguuaaccaacucagaacuauuaucacucauaaaugacaugccuauaacaaacgaccaaaaaaaacuaaugucaaacaacguacaaauaguaagacaacaaucauauuccauaaugugcauaauaaaagaagaaguacuugcauacgugguucaacuaccccuauauggaguuauagacacaccaugcuggaaacuccacacuuccccacuuugcacaacuaacacaaaagaaggaucaaauauaugccuaaccagaacagaccguggaugguacugcgacaacgcuggaucagucuccuucuuuccacaagcagaaaccugcaaagucugcucaaauagagucuucugugacacaaugaacucacucacccuacccucagaaguaaaccuauguaauauagauauauuuaauccaaaauacgacugcaaaauuaugacaaguaaaacagacguaagcucaucagucauaaccagccuaggagcaauaguauccuguuacggcaaaacaaaaugcacagcuucaaacaaaaacaaaggcauaauaaaaacauucucaaacggaugugacuauguaucaaauaaaggaguugacacaguaucaguuggaaacacacuauacuauguaaacaaacaagaaggaaaaucacuauacguuaaaggcgaacccauaaucaauuucuacgacccccuagucuucccauccgaugaauuugacgcaucaauaucccaaguaaaugaaaaaaucaaccaaucccuagcauuuauacgaaaauccgacgaacuacuccauaaugucaacgucgguaaaucaacgacaaacaucaugaucacaacaauaauaauaguaauaauuguaauauuacucuuacucauagcaguaggccuauuucuauauugcaaagccagaucaacaccaguaaccuuauccaaagaccaacuaucuggaauaaacaacauagcauuuuccaacugaggacuagugaagggaacacccaaauuuaauucagccuuaagcacaauuaauuaagagugaaacguaauuguacaagcaguuggucacccaccauagggcaugaucaacaccgcaaccuuuccuuuuucccccagugauucugaaaaaccccucuucccuucagcuugcuuagauguuccaaauuuaguaagcuuaaggcggccuacagaagaaaaagaaaaaaaaggccacaaaaguucccucucacuuucaguaaauaaaauaaaagcagcaacagaaauaaagaaauaaaugaaauucaaaaugaaauaaauauuguguugugcagcauuaaaaaaucaauaaaaauuaaaaaugagcaagaucuaaaaaaaaaaaaaaaaaaaaaaaaaaaaaaaaaaaaaaaaaaaaaaaaaaaaaaaaaaaaaaaaugcaucccccccccccccccccccccccccccccccaaaggcucuuuucagagccaccagaauu

SEQ ID NO: 18592 - RNA, 2193 nt, Artificial Sequence
  mRNA product Design f-1 comprising derived and/or modified sequence from HRSV(Memphis-37)__AIY60640.1__F_DSCav1_mut7 (opt11)
gggagagcggcucggccauuuugucccagucaguccggaggcugcggcugcagaaguaccgccugcggaguaacugcaaagaagcuuaccauggaacuccccauacuuaaaacaaacgccauaacaacuauacucgcagccgucacccucuguuucgcauccucucaaaacaucaccgaagaguucuaucaaucaaccugcuccgccgucucaaaaggcuaccucuccgcccuacgcacaggcugguacaccagcgucauuaccauagaacucucgaacaucaaagaaaacaaaugcaacggcaccgacgcaaaagugaaacucaucaaacaagaacucgacaaauacaaaaacgccgucaccgaacuucagaugcucaugugcuccaccccugccgccggcagcggcuccgccauagccuccggcaucgcagucugcaaaguccuccaccucgaaggagaaguaaacaaaaucaaaaaugcucuccucuccacaaacaaagccgucgucucacucuccaauggagucuccguccucaccuucaaaguccucgaccucaaaaacuacauagacaaacaacuacuccccauccucaacaagcaauccugcucuaucuccaacauagaaaccguuauggaguuccaacagaaaaauaaccgccugcuagaaauaacccgagaguucuccgucaacgcaggcgucacuacccccgucagcacauacaugcuaacaaacuccgaacugcucucccuuaucaacgacaugcccaucacaaacgaucagaaaaagcucaugucuaacaacguacaaaucguucggcaacaauccuacuccaucaugugcaucaucaaagaagaagugcucgccuacguaguccaacucccccucuacggagucaucgacacacccugcuggaaacuccacacaucaccccucugcaccaccaacacaaaagaaggguccaacaucugccucacgcgcaccgaccgaggcugguacugcgacaacgccggcuccguauccuucuucccccaagcagaaaccugcaaggucugcuccaaccgcguauucugcgacaccaugaacucgcucacccuccccucagaagucaaccuauguaacaucgacauauucaaucccaaauacgacugcaagauaaugacuuccaaaaccgacguaagcuccucggucaucaccucccucggcgccaucgucuccugcuacggcaaaaccaaaugcaccgccuccaauaagaauaaaggcauaauaaagacauucagcaacggcugcgauuacgucuccaacaaaggugucgacaccgucucagucggcaacacucuauacuacgugaacaaacaagaaggcaaaagccuauacguuaaaggcgaaccaauaaucaauuucuacgacccucuagucuuucccucugacgaguucgaugccagcauaagccaagucaacgaaaagaucaaccaaucacucgccuucauccguaaauccgacgaacugcuccacaaugucaauguaggcaaaucaacaaccaacaucaugaucaccacuauuaucaucgucaucaucguaauccuacuccuacuaaucgccgucggccuauuccucuacugcaaagcccgcucgacccccgucacucucagcaaggaucaacuauccggcaucaacaacaucgccuucuccaacuaaggacuagugaagggaacacccaaauuuaauucagccuuaagcacaauuaauuaagagugaaacguaauuguacaagcaguuggucacccaccauagggcaugaucaacaccgcaaccuuuccuuuuucccccagugauucugaaaaaccccucuucccuucagcuugcuuagauguuccaaauuuaguaagcuuaaggcggccuacagaagaaaaagaaaaaaaaggccacaaaaguucccucucacuuucaguaaauaaaauaaaagcagcaacagaaauaaagaaauaaaugaaauucaaaaugaaauaaauauuguguugugcagcauuaaaaaaucaauaaaaauuaaaaaugagcaagaucuaaaaaaaaaaaaaaaaaaaaaaaaaaaaaaaaaaaaaaaaaaaaaaaaaaaaaaaaaaaaaaaaugcaucccccccccccccccccccccccccccccccaaaggcucuuuucagagccaccagaauu

SEQ ID NO: 18593 - RNA, 1973 nt, Artificial Sequence
  mRNA product Design f-2 comprising derived and/or modified sequence from HRSV(Memphis-37)__AIY60640.1__F_DSCav1_mut7 (opt1)
gggagagcggcucggccauuuugucccagucaguccggaggcugcggcugcagaaguaccgccugcggaguaacugcaaagaagcuuaccauggagcugcccauccucaagaccaacgccaucaccacgauccuggccgcggugacccugugcuucgccagcucccagaacaucaccgaggaguucuaccagagcacgugcuccgccgucagcaagggcuaccucuccgcccugcgcaccgggugguacaccagcgugaucaccaucgagcuguccaacaucaaggagaacaagugcaacggcaccgacgccaaggugaagcucaucaagcaggagcuggacaaguacaagaacgcggucacggagcugcagaugcugaugugcagcaccccggccgccggcuccgggagcgcgaucgccuccggcaucgccgucugcaaggugcugcaccucgagggcgaggugaacaagaucaagaacgcccugcuguccaccaacaaggccgucgugagccucuccaacggggugagcguccugaccuucaaggugcuggaccucaagaacuacaucgacaagcagcugcugcccauccugaacaagcagagcugcuccaucagcaacaucgagaccgucauggaguuccagcagaagaacaaccgccuccuggagaucacgcgggaguucagcgugaacgcgggcgugaccacccccgucuccaccuacaugcugacgaacagcgagcuccugucccugaucaacgacaugccgaucaccaacgaccagaagaagcucaugagcaacaacgugcagaucgugcgccagcaguccuacagcaucaugugcaucaucaaggaggagguccuggccuacguggugcagcugccccucuacggggucaucgacacccccugcuggaagcugcacaccagcccccugugcacgaccaacaccaaggagggcuccaacaucugccucacccggacggaccgcgggugguacugcgacaacgccggcagcguguccuucuucccgcaggccgagaccugcaaggucugcagcaaccggguguucugcgacaccaugaacucccugacccugcccagcgaggugaaccucugcaacaucgacaucuucaaccccaaguacgacugcaagaucaugacguccaagaccgacgucagcuccagcgugaucaccucccugggcgccaucgugagcugcuacgggaagaccaagugcacggcgagcaacaagaacaagggcaucaucaagaccuucuccaacgggugcgacuacgucagcaacaagggcguggacaccguguccgucggcaacacccuguacuacgugaacaagcaggagggcaagagccucuacgugaagggggagcccaucaucaacuucuacgacccgcuggucuuccccuccgacgaguucgacgccagcaucucccaggugaacgagaagaucaaccagagccuggccuucauccggaaguccgacgagcuccugcacaacgugaacgucggcaagagcaccacgaacaucaugaucaccaccaucaucaucgugaucaucgugauccugcugcuccugaucgccgucgggcuguuccucuacugcaaggcccgcuccacccccgugacgcugagcaaggaccagcuguccgggaucaacaacaucgcguucagcaacugaggacuaguggaagcauuuuccuggcugauuaaaagaaauuacucagcuauggucaucuguuccuguuagaaggcuaugcagcauauuauauacuaugcgcauguuaugaaaugcauaauaaaaaauuuuaaaaaaucuaaaagaucuaaaaaaaaaaaaaaaaaaaaaaaaaaaaaaaaaaaaaaaaaaaaaaaaaaaaaaaaaaaaaaaaugcaucccccccccccccccccccccccccccccccaaaggcucuuuucagagccaccagaauu

SEQ ID NO: 18594 - RNA, 1973 nt, Artificial Sequence
  mRNA product Design f-2 comprising derived and/or modified sequence from HRSV(Memphis-37)__AIY60640.1__F_DSCav1_mut7 (opt1)
gggagagcggcucggccauuuugucccagucaguccggaggcugcggcugcagaaguaccgccugcggaguaacugcaaagaagcuuaccauggagcugcccauccucaagaccaacgccaucaccacgauccuggccgcggugacccugugcuucgccagcucccagaacaucaccgaggaguucuaccagagcacgugcuccgccgucagcaagggcuaccucuccgcccugcgcaccgggugguacaccagcgugaucaccaucgagcuguccaacaucaaggagaacaagugcaacggcaccgacgccaaggugaagcucaucaagcaggagcuggacaaguacaagaacgcggucacggagcugcagaugcucaugugcagcaccccggccgccggguccggcagcgccaucgcguccgggaucgccgugugcaaggugcugcaccuggagggcgaggucaacaagaucaagaacgcccuccugagcaccaacaaggccguggugucccugagcaacggcgucuccgugcucaccuucaaggugcuggaccugaagaacuacaucgacaagcagcuccugcccauccugaacaagcagagcugcuccaucagcaacaucgagacggucauggaguuccagcagaagaacaaccggcuccuggagaucacccgcgaguucuccgugaacgccggggugaccacccccgucagcacguacaugcugaccaacagcgagcuccugucccugaucaacgacaugcccaucaccaacgaccagaagaagcucaugagcaacaacgugcagaucgugcggcagcaguccuacagcaucaugugcaucaucaaggaggagguccuggcguacguggugcagcugccgcucuacggcgucaucgacacccccugcuggaagcugcacacgagcccccugugcaccaccaacaccaaggaggggagcaacaucugccucacgcgcaccgaccggggcugguacugcgacaacgccggguccgugagcuucuucccccaggccgagaccugcaaggugugcuccaaccgcgucuucugcgacaccaugaacagccugacgcugccguccgaggugaaccucugcaacaucgacaucuucaaccccaaguacgacugcaagaucaugaccagcaagaccgacgucuccagcuccgugaucaccagccugggcgccaucguguccugcuacggcaagacgaagugcaccgccagcaacaagaacaaggggaucaucaagaccuucuccaacggcugcgacuacgucagcaacaaggggguggacaccgugagcgucggcaacacgcuguacuacgugaacaagcaggagggcaagucccucuacgugaagggggagcccaucaucaacuucuacgacccccuggucuucccgagcgacgaguucgacgcguccaucagccaggugaacgagaagaucaaccagucccuggccuucauccggaaguccgacgagcuccugcacaacgugaacgucggcaaguccaccaccaacaucaugaucaccaccaucaucaucgugaucaucgugauccugcuccugcugaucgccgucggccucuuccuguacugcaaggcccgcagcacgcccgugacccuguccaaggaccagcugagcgggaucaacaacaucgccuucuccaacugaggacuaguggaagcauuuuccuggcugauuaaaagaaauuacucagcuauggucaucuguuccuguuagaaggcuaugcagcauauuauauacuaugcgcauguuaugaaaugcauaauaaaaaauuuuaaaaaaucuaaaagaucuaaaaaaaaaaaaaaaaaaaaaaaaaaaaaaaaaaaaaaaaaaaaaaaaaaaaaaaaaaaaaaaaugcaucccccccccccccccccccccccccccccccaaaggcucuuuucagagccaccagaauu

SEQ ID NO: 18595 - RNA, 1973 nt, Artificial Sequence
  mRNA product Design f-2 comprising derived and/or modified sequence from HRSV(Memphis-37)__AIY60640.1__F_DSCav1_mut7 (opt2)
gggagagcggcucggccauuuugucccagucaguccggaggcugcggcugcagaaguaccgccugcggaguaacugcaaagaagcuuaccauggagcuccccauccucaagaccaacgccaucaccaccauccucgccgccgucacccucugcuucgccuccucccagaacaucaccgaggaguucuaccaguccaccugcuccgccgucuccaagggcuaccucuccgcccuccgcaccggcugguacaccuccgucaucaccaucgagcucuccaacaucaaggagaacaagugcaacggcaccgacgccaaggucaagcucaucaagcaggagcucgacaaguacaagaacgccgucaccgagcuccagaugcucaugugcuccacccccgccgccggcuccggcuccgccaucgccuccggcaucgccgucugcaagguccuccaccucgagggcgaggucaacaagaucaagaacgcccuccucuccaccaacaaggccgucgucucccucuccaacggcgucuccguccucaccuucaagguccucgaccucaagaacuacaucgacaagcagcuccuccccauccucaacaagcaguccugcuccaucuccaacaucgagaccgucauggaguuccagcagaagaacaaccgccuccucgagaucacccgcgaguucuccgucaacgccggcgucaccacccccgucuccaccuacaugcucaccaacuccgagcuccucucccucaucaacgacaugcccaucaccaacgaccagaagaagcucauguccaacaacguccagaucguccgccagcaguccuacuccaucaugugcaucaucaaggaggagguccucgccuacgucguccagcucccccucuacggcgucaucgacacccccugcuggaagcuccacaccuccccccucugcaccaccaacaccaaggagggcuccaacaucugccucacccgcaccgaccgcggcugguacugcgacaacgccggcuccgucuccuucuucccccaggccgagaccugcaaggucugcuccaaccgcgucuucugcgacaccaugaacucccucacccuccccuccgaggucaaccucugcaacaucgacaucuucaaccccaaguacgacugcaagaucaugaccuccaagaccgacgucuccuccuccgucaucaccucccucggcgccaucgucuccugcuacggcaagaccaagugcaccgccuccaacaagaacaagggcaucaucaagaccuucuccaacggcugcgacuacgucuccaacaagggcgucgacaccgucuccgucggcaacacccucuacuacgucaacaagcaggagggcaagucccucuacgucaagggcgagcccaucaucaacuucuacgacccccucgucuuccccuccgacgaguucgacgccuccaucucccaggucaacgagaagaucaaccagucccucgccuucauccgcaaguccgacgagcuccuccacaacgucaacgucggcaaguccaccaccaacaucaugaucaccaccaucaucaucgucaucaucgucauccuccuccuccucaucgccgucggccucuuccucuacugcaaggcccgcuccacccccgucacccucuccaaggaccagcucuccggcaucaacaacaucgccuucuccaacugaggacuaguggaagcauuuuccuggcugauuaaaagaaauuacucagcuauggucaucuguuccuguuagaaggcuaugcagcauauuauauacuaugcgcauguuaugaaaugcauaauaaaaaauuuuaaaaaaucuaaaagaucuaaaaaaaaaaaaaaaaaaaaaaaaaaaaaaaaaaaaaaaaaaaaaaaaaaaaaaaaaaaaaaaaugcaucccccccccccccccccccccccccccccccaaaggcucuuuucagagccaccagaauu

SEQ ID NO: 18596 - RNA, 1973 nt, Artificial Sequence
  mRNA product Design f-2 comprising derived and/or modified sequence from HRSV(Memphis-37)__AIY60640.1__F_DSCav1_mut7 (opt3)
gggagagcggcucggccauuuugucccagucaguccggaggcugcggcugcagaaguaccgccugcggaguaacugcaaagaagcuuaccauggagcugcccauccucaagaccaacgccauuacaacuauacuugcugcagugacgcugugcuucgccagcucccagaauaucaccgaagaguuuuaccaaucuacauguucagcggucaguaaaggcuauuugagcgcuuuaagaacugggugguacaccuccguuauuacaaucgaacugucuaacauuaaggagaauaaaugcaacggaaccgacgccaaggugaaacuaaucaagcaggaacucgauaaguauaaaaaugcaguaacugagcugcagaugcuuauguguucgaccccugccgcugguucaggcagcgcaauagccagugggaucgcugugugcaagguccugcacuuggagggagaagugaacaaaauuaagaaugcccuccuguccacaaacaaagcgguugugucucugagcaauggcgucuccgugcucacguucaagguauuagaccugaagaacuacaucgauaaacagcuuuugccaauucugaauaagcaaucauguaguaucagcaacauagagacuguuauggaauuucagcagaaaaauaacaggcuacucgagauuacccgggaguucucugugaaugccggugucacaacuccgguguccaccuauaugcugacaaacucagaacuucugagcuugaucaacgacaugcccauuaccaaugaucagaagaaacucaugaguaacaaugugcaaaucguccgccagcagucuuacuccaucaugugcauuauaaaggaggaaguucuggcauaugugguacaguuaccucuguacggggugaucgacacgccauguuggaaacuccauacuagcccccuuugcacaaccaacacuaaggagggaucgaauauuugucugacacgaaccgaucguggcugguacugcgacaacgcuggcucugucuccuuuuucccucaagccgaaacguguaaggugugcucaaauagaguguuuugcgauaccaugaacaguuugacacuaccaagcgagguuaaucuguguaacaucgacauauucaaucccaaauaugauugcaagauuaugacuuccaaaaccgacgucucuagcucagugaucacaagucucggggcaaucguauccuguuacggaaagacuaaaugcaccgcuagcaacaagaauaaggguauuaucaaaacauuuucuaacggcugugauuauguuucaaauaaggggguggacaccgucagugugggaaacacucuguacuaugucaacaaacaggagggcaagagccuuuacgugaaaggugaaccuauuauaaauuucuaugacccacugguuuuuccguccgaugaguucgacgccucuaucagccaggugaacgaaaagauuaaucaaucguuggcguuuaucaggaaguccgaugagcuccugcacaacguaaaugucgggaaaucaacgacaaacaucaugauuaccacuauaaucauugugaucauuguuaucuuacugcuacucauagccgugggacuguuccuuuacugcaaggcacggaguacccccgucacauugucuaaagaccagcugagcggcaucaauaacauugcuuucuccaauugaggacuaguggaagcauuuuccuggcugauuaaaagaaauuacucagcuauggucaucuguuccuguuagaaggcuaugcagcauauuauauacuaugcgcauguuaugaaaugcauaauaaaaaauuuuaaaaaaucuaaaagaucuaaaaaaaaaaaaaaaaaaaaaaaaaaaaaaaaaaaaaaaaaaaaaaaaaaaaaaaaaaaaaaaaugcaucccccccccccccccccccccccccccccccaaaggcucuuuucagagccaccagaauu

SEQ ID NO: 18597 - RNA, 1973 nt, Artificial Sequence
  mRNA product Design f-2 comprising derived and/or modified sequence from HRSV(Memphis-37)__AIY60640.1__F_DSCav1_mut7 (opt4)
gggagagcggcucggccauuuugucccagucaguccggaggcugcggcugcagaaguaccgccugcggaguaacugcaaagaagcuuaccauggagcugcccauccugaagaccaacgccaucaccaccauccuggccgccgugacccugugcuucgccagcagccagaacaucaccgaggaguucuaccagagcaccugcagcgccgugagcaagggcuaccugagcgcccugagaaccggcugguacaccagcgugaucaccaucgagcugagcaacaucaaggagaacaagugcaacggcaccgacgccaaggugaagcugaucaagcaggagcuggacaaguacaagaacgccgugaccgagcugcagaugcugaugugcagcacccccgccgccggcagcggcagcgccaucgccagcggcaucgccgugugcaaggugcugcaccuggagggcgaggugaacaagaucaagaacgcccugcugagcaccaacaaggccguggugagccugagcaacggcgugagcgugcugaccuucaaggugcuggaccugaagaacuacaucgacaagcagcugcugcccauccugaacaagcagagcugcagcaucagcaacaucgagaccgugauggaguuccagcagaagaacaacagacugcuggagaucaccagagaguucagcgugaacgccggcgugaccacccccgugagcaccuacaugcugaccaacagcgagcugcugagccugaucaacgacaugcccaucaccaacgaccagaagaagcugaugagcaacaacgugcagaucgugagacagcagagcuacagcaucaugugcaucaucaaggaggaggugcuggccuacguggugcagcugccccuguacggcgugaucgacacccccugcuggaagcugcacaccagcccccugugcaccaccaacaccaaggagggcagcaacaucugccugaccagaaccgacagaggcugguacugcgacaacgccggcagcgugagcuucuucccccaggccgagaccugcaaggugugcagcaacagaguguucugcgacaccaugaacagccugacccugcccagcgaggugaaccugugcaacaucgacaucuucaaccccaaguacgacugcaagaucaugaccagcaagaccgacgugagcagcagcgugaucaccagccugggcgccaucgugagcugcuacggcaagaccaagugcaccgccagcaacaagaacaagggcaucaucaagaccuucagcaacggcugcgacuacgugagcaacaagggcguggacaccgugagcgugggcaacacccuguacuacgugaacaagcaggagggcaagagccuguacgugaagggcgagcccaucaucaacuucuacgacccccugguguuccccagcgacgaguucgacgccagcaucagccaggugaacgagaagaucaaccagagccuggccuucaucagaaagagcgacgagcugcugcacaacgugaacgugggcaagagcaccaccaacaucaugaucaccaccaucaucaucgugaucaucgugauccugcugcugcugaucgccgugggccuguuccuguacugcaaggccagaagcacccccgugacccugagcaaggaccagcugagcggcaucaacaacaucgccuucagcaacugaggacuaguggaagcauuuuccuggcugauuaaaagaaauuacucagcuauggucaucuguuccuguuagaaggcuaugcagcauauuauauacuaugcgcauguuaugaaaugcauaauaaaaaauuuuaaaaaaucuaaaagaucuaaaaaaaaaaaaaaaaaaaaaaaaaaaaaaaaaaaaaaaaaaaaaaaaaaaaaaaaaaaaaaaaugcaucccccccccccccccccccccccccccccccaaaggcucuuuucagagccaccagaauu

SEQ ID NO: 18598 - RNA, 1973 nt, Artificial Sequence
  mRNA product Design f-2 comprising derived and/or modified sequence from HRSV(Memphis-37)__AIY60640.1__F_DSCav1_mut7 (opt5)
gggagagcggcucggccauuuugucccagucaguccggaggcugcggcugcagaaguaccgccugcggaguaacugcaaagaagcuuaccauggagcugcccauccucaagaccaacgccauuacaacgauccuggcugccgugacccuuugcuucgcgagcucccagaauauuacagaagaguuuuaccaaucuaccuguagcgcugucuccaaaggcuaucugucugcccucagaacagggugguacaccagcguuaucacaauugaacuguccaacaucaaggagaauaaaugcaacggaaccgacgccaaggugaaacuuaucaagcaggaacuggauaaguauaaaaaugcugugacggagcuccagaugcugauguguucuaccccugccgcuggcagcggguccgccauugcgagcggaaucgccgucugcaaggugcugcaccucgagggcgaaguuaacaaaauuaagaaugcucugcuuucuacaaacaaagccguggucucccugagcaauggggugucuguucucaccuucaaggugcuggaccuuaagaacuacaucgauaaacagcugcucccgauucugaauaagcaauccuguagcaucucuaacauugagacagucauggaauuucagcagaaaaauaaccggcugcucgagaucacccgcgaguucuccgugaaugcuggagugacgacacccgucagcaccuauaugcugacaaacuccgaacuucugucucucaucaacgacaugccuauuaccaaugaucagaagaaacugaugagcaacaauguucaaaucgugagacagcaguccuacagcauuaugugcaucauuaaggaggaagugcuugccuaugucgugcagcugccccucuacggcguuaucgacaccccuuguuggaaacugcauacaucuccccugugcacgaccaacacaaaggagggcuccaauaucugucucacccggacagaucgcgggugguacugcgacaacgcgggaagcgugagcuuuuucccucaagccgaaaccuguaaggucugcucuaauagaguguuuugcgauacgaugaacucccugacacuuccgucugagguuaaucuguguaacauugacaucuucaaucccaaauaugauugcaagauuaugaccagcaaaaccgacguguccagcucugucaucacaucccucggcgcuauugugagcuguuacgggaagaccaaaugcacagccucuaacaagaauaagggaaucaucaaaacguuuuccaacggcugugauuaugucagcaauaaggggguggacaccguuuccgugggaaacacacuguacuaugucaacaaacaggagggcaagucucuuuacgugaaaggcgaaccuauuaucaauuucuaugacccccugguuuuuccuagcgaugaguucgacgcuuccauuucucaggugaacgaaaagaucaaucaaagccucgccuuuauucggaaguccgaugagcugcugcacaacgucaauguggggaaaagcaccacaaacaucaugauuaccacgaucaucauugugaucauuguuauccuccugcuucugauugccgucggacucuuccuguacugcaaggcucgcucuacccccgugacacuguccaaagaccagcuuagcggcaucaauaacaucgcguucucuaauugaggacuaguggaagcauuuuccuggcugauuaaaagaaauuacucagcuauggucaucuguuccuguuagaaggcuaugcagcauauuauauacuaugcgcauguuaugaaaugcauaauaaaaaauuuuaaaaaaucuaaaagaucuaaaaaaaaaaaaaaaaaaaaaaaaaaaaaaaaaaaaaaaaaaaaaaaaaaaaaaaaaaaaaaaaugcaucccccccccccccccccccccccccccccccaaaggcucuuuucagagccaccagaauu

SEQ ID NO: 18599 - RNA, 1973 nt, Artificial Sequence
  mRNA product Design f-2 comprising derived and/or modified sequence from HRSV(Memphis-37)__AIY60640.1__F_DSCav1_mut7 (opt6)
gggagagcggcucggccauuuugucccagucaguccggaggcugcggcugcagaaguaccgccugcggaguaacugcaaagaagcuuaccauggaacuaccaauacucaaaacaaaugcuauaaccacaauacucgcagcaguaacauuauguuucgcaucaucccaaaacauaacagaagaauuuuaucaaucaaccuguucagcaguauccaaaggauaccuaagugcauuaagaaccggaugguacacaucaguaauaaccauagaacuuucaaacauaaaagaaaacaaauguaacggcacagacgcaaaagucaaacucaucaaacaggaacuugacaaauauaaaaacgcaguaaccgaacuacaaaugcuaaugugcucaacaccagcagcaggaucaggaucagcaauugcaucuggaauagcuguaugcaaaguccuacaccuagaaggagaaguaaacaaaaucaaaaacgcauuacucuccacaaacaaagcaguaguaucacuaucaaacggaguuucaguacuaaccuucaaaguauuagaccuaaaaaacuacauagacaaacaacuacuaccuauacuaaacaaacaauccuguucaauaagcaacauugaaacuguaauggaauuucaacaaaaaaacaaccgccuauuagaaauaaccagagaauuuuccguaaaugcaggaguaaccacaccagucucuacauacauguuaaccaacucagaacuauuaucacucauaaaugacaugccuauaacaaacgaccaaaaaaaacuaaugucaaacaacguacaaauaguaagacaacaaucauauuccauaaugugcauaauaaaagaagaaguacuugcauacgugguucaacuaccccuauauggaguuauagacacaccaugcuggaaacuccacacuuccccacuuugcacaacuaacacaaaagaaggaucaaauauaugccuaaccagaacagaccguggaugguacugcgacaacgcuggaucagucuccuucuuuccacaagcagaaaccugcaaagucugcucaaauagagucuucugugacacaaugaacucacucacccuacccucagaaguaaaccuauguaauauagauauauuuaauccaaaauacgacugcaaaauuaugacaaguaaaacagacguaagcucaucagucauaaccagccuaggagcaauaguauccuguuacggcaaaacaaaaugcacagcuucaaacaaaaacaaaggcauaauaaaaacauucucaaacggaugugacuauguaucaaauaaaggaguugacacaguaucaguuggaaacacacuauacuauguaaacaaacaagaaggaaaaucacuauacguuaaaggcgaacccauaaucaauuucuacgacccccuagucuucccauccgaugaauuugacgcaucaauaucccaaguaaaugaaaaaaucaaccaaucccuagcauuuauacgaaaauccgacgaacuacuccauaaugucaacgucgguaaaucaacgacaaacaucaugaucacaacaauaauaauaguaauaauuguaauauuacucuuacucauagcaguaggccuauuucuauauugcaaagccagaucaacaccaguaaccuuauccaaagaccaacuaucuggaauaaacaacauagcauuuuccaacugaggacuaguggaagcauuuuccuggcugauuaaaagaaauuacucagcuauggucaucuguuccuguuagaaggcuaugcagcauauuauauacuaugcgcauguuaugaaaugcauaauaaaaaauuuuaaaaaaucuaaaagaucuaaaaaaaaaaaaaaaaaaaaaaaaaaaaaaaaaaaaaaaaaaaaaaaaaaaaaaaaaaaaaaaaugcaucccccccccccccccccccccccccccccccaaaggcucuuuucagagccaccagaauu

SEQ ID NO: 18600 - RNA, 1973 nt, Artificial Sequence
  mRNA product Design f-2 comprising derived and/or modified sequence from HRSV(Memphis-37)__AIY60640.1__F_DSCav1_mut7 (opt11)
gggagagcggcucggccauuuugucccagucaguccggaggcugcggcugcagaaguaccgccugcggaguaacugcaaagaagcuuaccauggaacuccccauacuuaaaacaaacgccauaacaacuauacucgcagccgucacccucuguuucgcauccucucaaaacaucaccgaagaguucuaucaaucaaccugcuccgccgucucaaaaggcuaccucuccgcccuacgcacaggcugguacaccagcgucauuaccauagaacucucgaacaucaaagaaaacaaaugcaacggcaccgacgcaaaagugaaacucaucaaacaagaacucgacaaauacaaaaacgccgucaccgaacuucagaugcucaugugcuccaccccugccgccggcagcggcuccgccauagccuccggcaucgcagucugcaaaguccuccaccucgaaggagaaguaaacaaaaucaaaaaugcucuccucuccacaaacaaagccgucgucucacucuccaauggagucuccguccucaccuucaaaguccucgaccucaaaaacuacauagacaaacaacuacuccccauccucaacaagcaauccugcucuaucuccaacauagaaaccguuauggaguuccaacagaaaaauaaccgccugcuagaaauaacccgagaguucuccgucaacgcaggcgucacuacccccgucagcacauacaugcuaacaaacuccgaacugcucucccuuaucaacgacaugcccaucacaaacgaucagaaaaagcucaugucuaacaacguacaaaucguucggcaacaauccuacuccaucaugugcaucaucaaagaagaagugcucgccuacguaguccaacucccccucuacggagucaucgacacacccugcuggaaacuccacacaucaccccucugcaccaccaacacaaaagaaggguccaacaucugccucacgcgcaccgaccgaggcugguacugcgacaacgccggcuccguauccuucuucccccaagcagaaaccugcaaggucugcuccaaccgcguauucugcgacaccaugaacucgcucacccuccccucagaagucaaccuauguaacaucgacauauucaaucccaaauacgacugcaagauaaugacuuccaaaaccgacguaagcuccucggucaucaccucccucggcgccaucgucuccugcuacggcaaaaccaaaugcaccgccuccaauaagaauaaaggcauaauaaagacauucagcaacggcugcgauuacgucuccaacaaaggugucgacaccgucucagucggcaacacucuauacuacgugaacaaacaagaaggcaaaagccuauacguuaaaggcgaaccaauaaucaauuucuacgacccucuagucuuucccucugacgaguucgaugccagcauaagccaagucaacgaaaagaucaaccaaucacucgccuucauccguaaauccgacgaacugcuccacaaugucaauguaggcaaaucaacaaccaacaucaugaucaccacuauuaucaucgucaucaucguaauccuacuccuacuaaucgccgucggccuauuccucuacugcaaagcccgcucgacccccgucacucucagcaaggaucaacuauccggcaucaacaacaucgccuucuccaacuaaggacuaguggaagcauuuuccuggcugauuaaaagaaauuacucagcuauggucaucuguuccuguuagaaggcuaugcagcauauuauauacuaugcgcauguuaugaaaugcauaauaaaaaauuuuaaaaaaucuaaaagaucuaaaaaaaaaaaaaaaaaaaaaaaaaaaaaaaaaaaaaaaaaaaaaaaaaaaaaaaaaaaaaaaaugcaucccccccccccccccccccccccccccccccaaaggcucuuuucagagccaccagaauu

SEQ ID NO: 18601 - RNA, 1964 nt, Artificial Sequence
  mRNA product Design f-3 comprising derived and/or modified sequence from HRSV(Memphis-37)__AIY60640.1__F_DSCav1_mut7 (opt1)
gggagagucccgcagucggcguccagcggcucugcuuguucgugugugugucguugcaggccuuauucaagcuuaccauggagcugcccauccucaagaccaacgccaucaccacgauccuggccgcggugacccugugcuucgccagcucccagaacaucaccgaggaguucuaccagagcacgugcuccgccgucagcaagggcuaccucuccgcccugcgcaccgggugguacaccagcgugaucaccaucgagcuguccaacaucaaggagaacaagugcaacggcaccgacgccaaggugaagcucaucaagcaggagcuggacaaguacaagaacgcggucacggagcugcagaugcugaugugcagcaccccggccgccggcuccgggagcgcgaucgccuccggcaucgccgucugcaaggugcugcaccucgagggcgaggugaacaagaucaagaacgcccugcuguccaccaacaaggccgucgugagccucuccaacggggugagcguccugaccuucaaggugcuggaccucaagaacuacaucgacaagcagcugcugcccauccugaacaagcagagcugcuccaucagcaacaucgagaccgucauggaguuccagcagaagaacaaccgccuccuggagaucacgcgggaguucagcgugaacgcgggcgugaccacccccgucuccaccuacaugcugacgaacagcgagcuccugucccugaucaacgacaugccgaucaccaacgaccagaagaagcucaugagcaacaacgugcagaucgugcgccagcaguccuacagcaucaugugcaucaucaaggaggagguccuggccuacguggugcagcugccccucuacggggucaucgacacccccugcuggaagcugcacaccagcccccugugcacgaccaacaccaaggagggcuccaacaucugccucacccggacggaccgcgggugguacugcgacaacgccggcagcguguccuucuucccgcaggccgagaccugcaaggucugcagcaaccggguguucugcgacaccaugaacucccugacccugcccagcgaggugaaccucugcaacaucgacaucuucaaccccaaguacgacugcaagaucaugacguccaagaccgacgucagcuccagcgugaucaccucccugggcgccaucgugagcugcuacgggaagaccaagugcacggcgagcaacaagaacaagggcaucaucaagaccuucuccaacgggugcgacuacgucagcaacaagggcguggacaccguguccgucggcaacacccuguacuacgugaacaagcaggagggcaagagccucuacgugaagggggagcccaucaucaacuucuacgacccgcuggucuuccccuccgacgaguucgacgccagcaucucccaggugaacgagaagaucaaccagagccuggccuucauccggaaguccgacgagcuccugcacaacgugaacgucggcaagagcaccacgaacaucaugaucaccaccaucaucaucgugaucaucgugauccugcugcuccugaucgccgucgggcuguuccucuacugcaaggcccgcuccacccccgugacgcugagcaaggaccagcuguccgggaucaacaacaucgcguucagcaacugaggacuaguacuggcugcaucucccuuuccucuguccuccauccuucucccaggauggugaagggggaccugguacccagugauccccaccccaggauccuaaaucaugacuuaccugcuaauaaaaacucauuggaaaagugagaagaucuaaaaaaaaaaaaaaaaaaaaaaaaaaaaaaaaaaaaaaaaaaaaaaaaaaaaaaaaaaaaaaaaugcaucccccccccccccccccccccccccccccccaaaggcucuuuucagagccaccagaauu

SEQ ID NO: 18602 - RNA, 1964 nt, Artificial Sequence
  mRNA product Design f-3 comprising derived and/or modified sequence from HRSV(Memphis-37)__AIY60640.1__F_DSCav1_mut7 (opt1)
gggagagucccgcagucggcguccagcggcucugcuuguucgugugugugucguugcaggccuuauucaagcuuaccauggagcugcccauccucaagaccaacgccaucaccacgauccuggccgcggugacccugugcuucgccagcucccagaacaucaccgaggaguucuaccagagcacgugcuccgccgucagcaagggcuaccucuccgcccugcgcaccgggugguacaccagcgugaucaccaucgagcuguccaacaucaaggagaacaagugcaacggcaccgacgccaaggugaagcucaucaagcaggagcuggacaaguacaagaacgcggucacggagcugcagaugcucaugugcagcaccccggccgccggguccggcagcgccaucgcguccgggaucgccgugugcaaggugcugcaccuggagggcgaggucaacaagaucaagaacgcccuccugagcaccaacaaggccguggugucccugagcaacggcgucuccgugcucaccuucaaggugcuggaccugaagaacuacaucgacaagcagcuccugcccauccugaacaagcagagcugcuccaucagcaacaucgagacggucauggaguuccagcagaagaacaaccggcuccuggagaucacccgcgaguucuccgugaacgccggggugaccacccccgucagcacguacaugcugaccaacagcgagcuccugucccugaucaacgacaugcccaucaccaacgaccagaagaagcucaugagcaacaacgugcagaucgugcggcagcaguccuacagcaucaugugcaucaucaaggaggagguccuggcguacguggugcagcugccgcucuacggcgucaucgacacccccugcuggaagcugcacacgagcccccugugcaccaccaacaccaaggaggggagcaacaucugccucacgcgcaccgaccggggcugguacugcgacaacgccggguccgugagcuucuucccccaggccgagaccugcaaggugugcuccaaccgcgucuucugcgacaccaugaacagccugacgcugccguccgaggugaaccucugcaacaucgacaucuucaaccccaaguacgacugcaagaucaugaccagcaagaccgacgucuccagcuccgugaucaccagccugggcgccaucguguccugcuacggcaagacgaagugcaccgccagcaacaagaacaaggggaucaucaagaccuucuccaacggcugcgacuacgucagcaacaaggggguggacaccgugagcgucggcaacacgcuguacuacgugaacaagcaggagggcaagucccucuacgugaagggggagcccaucaucaacuucuacgacccccuggucuucccgagcgacgaguucgacgcguccaucagccaggugaacgagaagaucaaccagucccuggccuucauccggaaguccgacgagcuccugcacaacgugaacgucggcaaguccaccaccaacaucaugaucaccaccaucaucaucgugaucaucgugauccugcuccugcugaucgccgucggccucuuccuguacugcaaggcccgcagcacgcccgugacccuguccaaggaccagcugagcgggaucaacaacaucgccuucuccaacugaggacuaguacuggcugcaucucccuuuccucuguccuccauccuucucccaggauggugaagggggaccugguacccagugauccccaccccaggauccuaaaucaugacuuaccugcuaauaaaaacucauuggaaaagugagaagaucuaaaaaaaaaaaaaaaaaaaaaaaaaaaaaaaaaaaaaaaaaaaaaaaaaaaaaaaaaaaaaaaaugcaucccccccccccccccccccccccccccccccaaaggcucuuuucagagccaccagaauu

SEQ ID NO: 18603 - RNA, 1964 nt, Artificial Sequence
  mRNA product Design f-3 comprising derived and/or modified sequence from HRSV(Memphis-37)__AIY60640.1__F_DSCav1_mut7 (opt2)
gggagagucccgcagucggcguccagcggcucugcuuguucgugugugugucguugcaggccuuauucaagcuuaccauggagcuccccauccucaagaccaacgccaucaccaccauccucgccgccgucacccucugcuucgccuccucccagaacaucaccgaggaguucuaccaguccaccugcuccgccgucuccaagggcuaccucuccgcccuccgcaccggcugguacaccuccgucaucaccaucgagcucuccaacaucaaggagaacaagugcaacggcaccgacgccaaggucaagcucaucaagcaggagcucgacaaguacaagaacgccgucaccgagcuccagaugcucaugugcuccacccccgccgccggcuccggcuccgccaucgccuccggcaucgccgucugcaagguccuccaccucgagggcgaggucaacaagaucaagaacgcccuccucuccaccaacaaggccgucgucucccucuccaacggcgucuccguccucaccuucaagguccucgaccucaagaacuacaucgacaagcagcuccuccccauccucaacaagcaguccugcuccaucuccaacaucgagaccgucauggaguuccagcagaagaacaaccgccuccucgagaucacccgcgaguucuccgucaacgccggcgucaccacccccgucuccaccuacaugcucaccaacuccgagcuccucucccucaucaacgacaugcccaucaccaacgaccagaagaagcucauguccaacaacguccagaucguccgccagcaguccuacuccaucaugugcaucaucaaggaggagguccucgccuacgucguccagcucccccucuacggcgucaucgacacccccugcuggaagcuccacaccuccccccucugcaccaccaacaccaaggagggcuccaacaucugccucacccgcaccgaccgcggcugguacugcgacaacgccggcuccgucuccuucuucccccaggccgagaccugcaaggucugcuccaaccgcgucuucugcgacaccaugaacucccucacccuccccuccgaggucaaccucugcaacaucgacaucuucaaccccaaguacgacugcaagaucaugaccuccaagaccgacgucuccuccuccgucaucaccucccucggcgccaucgucuccugcuacggcaagaccaagugcaccgccuccaacaagaacaagggcaucaucaagaccuucuccaacggcugcgacuacgucuccaacaagggcgucgacaccgucuccgucggcaacacccucuacuacgucaacaagcaggagggcaagucccucuacgucaagggcgagcccaucaucaacuucuacgacccccucgucuuccccuccgacgaguucgacgccuccaucucccaggucaacgagaagaucaaccagucccucgccuucauccgcaaguccgacgagcuccuccacaacgucaacgucggcaaguccaccaccaacaucaugaucaccaccaucaucaucgucaucaucgucauccuccuccuccucaucgccgucggccucuuccucuacugcaaggcccgcuccacccccgucacccucuccaaggaccagcucuccggcaucaacaacaucgccuucuccaacugaggacuaguacuggcugcaucucccuuuccucuguccuccauccuucucccaggauggugaagggggaccugguacccagugauccccaccccaggauccuaaaucaugacuuaccugcuaauaaaaacucauuggaaaagugagaagaucuaaaaaaaaaaaaaaaaaaaaaaaaaaaaaaaaaaaaaaaaaaaaaaaaaaaaaaaaaaaaaaaaugcaucccccccccccccccccccccccccccccccaaaggcucuuuucagagccaccagaauu

SEQ ID NO: 18604 - RNA, 1964 nt, Artificial Sequence
  mRNA product Design f-3 comprising derived and/or modified sequence from HRSV(Memphis-37)__AIY60640.1__F_DSCav1_mut7 (opt3)
gggagagucccgcagucggcguccagcggcucugcuuguucgugugugugucguugcaggccuuauucaagcuuaccauggagcugcccauccucaagaccaacgccauuacaacuauacuugcugcagugacgcugugcuucgccagcucccagaauaucaccgaagaguuuuaccaaucuacauguucagcggucaguaaaggcuauuugagcgcuuuaagaacugggugguacaccuccguuauuacaaucgaacugucuaacauuaaggagaauaaaugcaacggaaccgacgccaaggugaaacuaaucaagcaggaacucgauaaguauaaaaaugcaguaacugagcugcagaugcuuauguguucgaccccugccgcugguucaggcagcgcaauagccagugggaucgcugugugcaagguccugcacuuggagggagaagugaacaaaauuaagaaugcccuccuguccacaaacaaagcgguugugucucugagcaauggcgucuccgugcucacguucaagguauuagaccugaagaacuacaucgauaaacagcuuuugccaauucugaauaagcaaucauguaguaucagcaacauagagacuguuauggaauuucagcagaaaaauaacaggcuacucgagauuacccgggaguucucugugaaugccggugucacaacuccgguguccaccuauaugcugacaaacucagaacuucugagcuugaucaacgacaugcccauuaccaaugaucagaagaaacucaugaguaacaaugugcaaaucguccgccagcagucuuacuccaucaugugcauuauaaaggaggaaguucuggcauaugugguacaguuaccucuguacggggugaucgacacgccauguuggaaacuccauacuagcccccuuugcacaaccaacacuaaggagggaucgaauauuugucugacacgaaccgaucguggcugguacugcgacaacgcuggcucugucuccuuuuucccucaagccgaaacguguaaggugugcucaaauagaguguuuugcgauaccaugaacaguuugacacuaccaagcgagguuaaucuguguaacaucgacauauucaaucccaaauaugauugcaagauuaugacuuccaaaaccgacgucucuagcucagugaucacaagucucggggcaaucguauccuguuacggaaagacuaaaugcaccgcuagcaacaagaauaaggguauuaucaaaacauuuucuaacggcugugauuauguuucaaauaaggggguggacaccgucagugugggaaacacucuguacuaugucaacaaacaggagggcaagagccuuuacgugaaaggugaaccuauuauaaauuucuaugacccacugguuuuuccguccgaugaguucgacgccucuaucagccaggugaacgaaaagauuaaucaaucguuggcguuuaucaggaaguccgaugagcuccugcacaacguaaaugucgggaaaucaacgacaaacaucaugauuaccacuauaaucauugugaucauuguuaucuuacugcuacucauagccgugggacuguuccuuuacugcaaggcacggaguacccccgucacauugucuaaagaccagcugagcggcaucaauaacauugcuuucuccaauugaggacuaguacuggcugcaucucccuuuccucuguccuccauccuucucccaggauggugaagggggaccugguacccagugauccccaccccaggauccuaaaucaugacuuaccugcuaauaaaaacucauuggaaaagugagaagaucuaaaaaaaaaaaaaaaaaaaaaaaaaaaaaaaaaaaaaaaaaaaaaaaaaaaaaaaaaaaaaaaaugcaucccccccccccccccccccccccccccccccaaaggcucuuuucagagccaccagaauu

SEQ ID NO: 18605 - RNA, 1964 nt, Artificial Sequence
  mRNA product Design f-3 comprising derived and/or modified sequence from HRSV(Memphis-37)__AIY60640.1__F_DSCav1_mut7 (opt4)
gggagagucccgcagucggcguccagcggcucugcuuguucgugugugugucguugcaggccuuauucaagcuuaccauggagcugcccauccugaagaccaacgccaucaccaccauccuggccgccgugacccugugcuucgccagcagccagaacaucaccgaggaguucuaccagagcaccugcagcgccgugagcaagggcuaccugagcgcccugagaaccggcugguacaccagcgugaucaccaucgagcugagcaacaucaaggagaacaagugcaacggcaccgacgccaaggugaagcugaucaagcaggagcuggacaaguacaagaacgccgugaccgagcugcagaugcugaugugcagcacccccgccgccggcagcggcagcgccaucgccagcggcaucgccgugugcaaggugcugcaccuggagggcgaggugaacaagaucaagaacgcccugcugagcaccaacaaggccguggugagccugagcaacggcgugagcgugcugaccuucaaggugcuggaccugaagaacuacaucgacaagcagcugcugcccauccugaacaagcagagcugcagcaucagcaacaucgagaccgugauggaguuccagcagaagaacaacagacugcuggagaucaccagagaguucagcgugaacgccggcgugaccacccccgugagcaccuacaugcugaccaacagcgagcugcugagccugaucaacgacaugcccaucaccaacgaccagaagaagcugaugagcaacaacgugcagaucgugagacagcagagcuacagcaucaugugcaucaucaaggaggaggugcuggccuacguggugcagcugccccuguacggcgugaucgacacccccugcuggaagcugcacaccagcccccugugcaccaccaacaccaaggagggcagcaacaucugccugaccagaaccgacagaggcugguacugcgacaacgccggcagcgugagcuucuucccccaggccgagaccugcaaggugugcagcaacagaguguucugcgacaccaugaacagccugacccugcccagcgaggugaaccugugcaacaucgacaucuucaaccccaaguacgacugcaagaucaugaccagcaagaccgacgugagcagcagcgugaucaccagccugggcgccaucgugagcugcuacggcaagaccaagugcaccgccagcaacaagaacaagggcaucaucaagaccuucagcaacggcugcgacuacgugagcaacaagggcguggacaccgugagcgugggcaacacccuguacuacgugaacaagcaggagggcaagagccuguacgugaagggcgagcccaucaucaacuucuacgacccccugguguuccccagcgacgaguucgacgccagcaucagccaggugaacgagaagaucaaccagagccuggccuucaucagaaagagcgacgagcugcugcacaacgugaacgugggcaagagcaccaccaacaucaugaucaccaccaucaucaucgugaucaucgugauccugcugcugcugaucgccgugggccuguuccuguacugcaaggccagaagcacccccgugacccugagcaaggaccagcugagcggcaucaacaacaucgccuucagcaacugaggacuaguacuggcugcaucucccuuuccucuguccuccauccuucucccaggauggugaagggggaccugguacccagugauccccaccccaggauccuaaaucaugacuuaccugcuaauaaaaacucauuggaaaagugagaagaucuaaaaaaaaaaaaaaaaaaaaaaaaaaaaaaaaaaaaaaaaaaaaaaaaaaaaaaaaaaaaaaaaugcaucccccccccccccccccccccccccccccccaaaggcucuuuucagagccaccagaauu

SEQ ID NO: 18606 - RNA, 1964 nt, Artificial Sequence
  mRNA product Design f-3 comprising derived and/or modified sequence from HRSV(Memphis-37)__AIY60640.1__F_DSCav1_mut7 (opt5)
gggagagucccgcagucggcguccagcggcucugcuuguucgugugugugucguugcaggccuuauucaagcuuaccauggagcugcccauccucaagaccaacgccauuacaacgauccuggcugccgugacccuuugcuucgcgagcucccagaauauuacagaagaguuuuaccaaucuaccuguagcgcugucuccaaaggcuaucugucugcccucagaacagggugguacaccagcguuaucacaauugaacuguccaacaucaaggagaauaaaugcaacggaaccgacgccaaggugaaacuuaucaagcaggaacuggauaaguauaaaaaugcugugacggagcuccagaugcugauguguucuaccccugccgcuggcagcggguccgccauugcgagcggaaucgccgucugcaaggugcugcaccucgagggcgaaguuaacaaaauuaagaaugcucugcuuucuacaaacaaagccguggucucccugagcaauggggugucuguucucaccuucaaggugcuggaccuuaagaacuacaucgauaaacagcugcucccgauucugaauaagcaauccuguagcaucucuaacauugagacagucauggaauuucagcagaaaaauaaccggcugcucgagaucacccgcgaguucuccgugaaugcuggagugacgacacccgucagcaccuauaugcugacaaacuccgaacuucugucucucaucaacgacaugccuauuaccaaugaucagaagaaacugaugagcaacaauguucaaaucgugagacagcaguccuacagcauuaugugcaucauuaaggaggaagugcuugccuaugucgugcagcugccccucuacggcguuaucgacaccccuuguuggaaacugcauacaucuccccugugcacgaccaacacaaaggagggcuccaauaucugucucacccggacagaucgcgggugguacugcgacaacgcgggaagcgugagcuuuuucccucaagccgaaaccuguaaggucugcucuaauagaguguuuugcgauacgaugaacucccugacacuuccgucugagguuaaucuguguaacauugacaucuucaaucccaaauaugauugcaagauuaugaccagcaaaaccgacguguccagcucugucaucacaucccucggcgcuauugugagcuguuacgggaagaccaaaugcacagccucuaacaagaauaagggaaucaucaaaacguuuuccaacggcugugauuaugucagcaauaaggggguggacaccguuuccgugggaaacacacuguacuaugucaacaaacaggagggcaagucucuuuacgugaaaggcgaaccuauuaucaauuucuaugacccccugguuuuuccuagcgaugaguucgacgcuuccauuucucaggugaacgaaaagaucaaucaaagccucgccuuuauucggaaguccgaugagcugcugcacaacgucaauguggggaaaagcaccacaaacaucaugauuaccacgaucaucauugugaucauuguuauccuccugcuucugauugccgucggacucuuccuguacugcaaggcucgcucuacccccgugacacuguccaaagaccagcuuagcggcaucaauaacaucgcguucucuaauugaggacuaguacuggcugcaucucccuuuccucuguccuccauccuucucccaggauggugaagggggaccugguacccagugauccccaccccaggauccuaaaucaugacuuaccugcuaauaaaaacucauuggaaaagugagaagaucuaaaaaaaaaaaaaaaaaaaaaaaaaaaaaaaaaaaaaaaaaaaaaaaaaaaaaaaaaaaaaaaaugcaucccccccccccccccccccccccccccccccaaaggcucuuuucagagccaccagaauu

SEQ ID NO: 18607 - RNA, 1964 nt, Artificial Sequence
  mRNA product Design f-3 comprising derived and/or modified sequence from HRSV(Memphis-37)__AIY60640.1__F_DSCav1_mut7 (opt6)
gggagagucccgcagucggcguccagcggcucugcuuguucgugugugugucguugcaggccuuauucaagcuuaccauggaacuaccaauacucaaaacaaaugcuauaaccacaauacucgcagcaguaacauuauguuucgcaucaucccaaaacauaacagaagaauuuuaucaaucaaccuguucagcaguauccaaaggauaccuaagugcauuaagaaccggaugguacacaucaguaauaaccauagaacuuucaaacauaaaagaaaacaaauguaacggcacagacgcaaaagucaaacucaucaaacaggaacuugacaaauauaaaaacgcaguaaccgaacuacaaaugcuaaugugcucaacaccagcagcaggaucaggaucagcaauugcaucuggaauagcuguaugcaaaguccuacaccuagaaggagaaguaaacaaaaucaaaaacgcauuacucuccacaaacaaagcaguaguaucacuaucaaacggaguuucaguacuaaccuucaaaguauuagaccuaaaaaacuacauagacaaacaacuacuaccuauacuaaacaaacaauccuguucaauaagcaacauugaaacuguaauggaauuucaacaaaaaaacaaccgccuauuagaaauaaccagagaauuuuccguaaaugcaggaguaaccacaccagucucuacauacauguuaaccaacucagaacuauuaucacucauaaaugacaugccuauaacaaacgaccaaaaaaaacuaaugucaaacaacguacaaauaguaagacaacaaucauauuccauaaugugcauaauaaaagaagaaguacuugcauacgugguucaacuaccccuauauggaguuauagacacaccaugcuggaaacuccacacuuccccacuuugcacaacuaacacaaaagaaggaucaaauauaugccuaaccagaacagaccguggaugguacugcgacaacgcuggaucagucuccuucuuuccacaagcagaaaccugcaaagucugcucaaauagagucuucugugacacaaugaacucacucacccuacccucagaaguaaaccuauguaauauagauauauuuaauccaaaauacgacugcaaaauuaugacaaguaaaacagacguaagcucaucagucauaaccagccuaggagcaauaguauccuguuacggcaaaacaaaaugcacagcuucaaacaaaaacaaaggcauaauaaaaacauucucaaacggaugugacuauguaucaaauaaaggaguugacacaguaucaguuggaaacacacuauacuauguaaacaaacaagaaggaaaaucacuauacguuaaaggcgaacccauaaucaauuucuacgacccccuagucuucccauccgaugaauuugacgcaucaauaucccaaguaaaugaaaaaaucaaccaaucccuagcauuuauacgaaaauccgacgaacuacuccauaaugucaacgucgguaaaucaacgacaaacaucaugaucacaacaauaauaauaguaauaauuguaauauuacucuuacucauagcaguaggccuauuucuauauugcaaagccagaucaacaccaguaaccuuauccaaagaccaacuaucuggaauaaacaacauagcauuuuccaacugaggacuaguacuggcugcaucucccuuuccucuguccuccauccuucucccaggauggugaagggggaccugguacccagugauccccaccccaggauccuaaaucaugacuuaccugcuaauaaaaacucauuggaaaagugagaagaucuaaaaaaaaaaaaaaaaaaaaaaaaaaaaaaaaaaaaaaaaaaaaaaaaaaaaaaaaaaaaaaaaugcaucccccccccccccccccccccccccccccccaaaggcucuuuucagagccaccagaauu

SEQ ID NO: 18608 - RNA, 1964 nt, Artificial Sequence
  mRNA product Design f-3 comprising derived and/or modified sequence from HRSV(Memphis-37)__AIY60640.1__F_DSCav1_mut7 (opt11)
gggagagucccgcagucggcguccagcggcucugcuuguucgugugugugucguugcaggccuuauucaagcuuaccauggaacuccccauacuuaaaacaaacgccauaacaacuauacucgcagccgucacccucuguuucgcauccucucaaaacaucaccgaagaguucuaucaaucaaccugcuccgccgucucaaaaggcuaccucuccgcccuacgcacaggcugguacaccagcgucauuaccauagaacucucgaacaucaaagaaaacaaaugcaacggcaccgacgcaaaagugaaacucaucaaacaagaacucgacaaauacaaaaacgccgucaccgaacuucagaugcucaugugcuccaccccugccgccggcagcggcuccgccauagccuccggcaucgcagucugcaaaguccuccaccucgaaggagaaguaaacaaaaucaaaaaugcucuccucuccacaaacaaagccgucgucucacucuccaauggagucuccguccucaccuucaaaguccucgaccucaaaaacuacauagacaaacaacuacuccccauccucaacaagcaauccugcucuaucuccaacauagaaaccguuauggaguuccaacagaaaaauaaccgccugcuagaaauaacccgagaguucuccgucaacgcaggcgucacuacccccgucagcacauacaugcuaacaaacuccgaacugcucucccuuaucaacgacaugcccaucacaaacgaucagaaaaagcucaugucuaacaacguacaaaucguucggcaacaauccuacuccaucaugugcaucaucaaagaagaagugcucgccuacguaguccaacucccccucuacggagucaucgacacacccugcuggaaacuccacacaucaccccucugcaccaccaacacaaaagaaggguccaacaucugccucacgcgcaccgaccgaggcugguacugcgacaacgccggcuccguauccuucuucccccaagcagaaaccugcaaggucugcuccaaccgcguauucugcgacaccaugaacucgcucacccuccccucagaagucaaccuauguaacaucgacauauucaaucccaaauacgacugcaagauaaugacuuccaaaaccgacguaagcuccucggucaucaccucccucggcgccaucgucuccugcuacggcaaaaccaaaugcaccgccuccaauaagaauaaaggcauaauaaagacauucagcaacggcugcgauuacgucuccaacaaaggugucgacaccgucucagucggcaacacucuauacuacgugaacaaacaagaaggcaaaagccuauacguuaaaggcgaaccaauaaucaauuucuacgacccucuagucuuucccucugacgaguucgaugccagcauaagccaagucaacgaaaagaucaaccaaucacucgccuucauccguaaauccgacgaacugcuccacaaugucaauguaggcaaaucaacaaccaacaucaugaucaccacuauuaucaucgucaucaucguaauccuacuccuacuaaucgccgucggccuauuccucuacugcaaagcccgcucgacccccgucacucucagcaaggaucaacuauccggcaucaacaacaucgccuucuccaacuaaggacuaguacuggcugcaucucccuuuccucuguccuccauccuucucccaggauggugaagggggaccugguacccagugauccccaccccaggauccuaaaucaugacuuaccugcuaauaaaaacucauuggaaaagugagaagaucuaaaaaaaaaaaaaaaaaaaaaaaaaaaaaaaaaaaaaaaaaaaaaaaaaaaaaaaaaaaaaaaaugcaucccccccccccccccccccccccccccccccaaaggcucuuuucagagccaccagaauu

SEQ ID NO: 18609 - RNA, 2180 nt, Artificial Sequence
  mRNA product Design f-4 comprising derived and/or modified sequence from HRSV(Memphis-37)__AIY60640.1__F_DSCav1_mut7 (opt1)
gggagagucccgcagucggcguccagcggcucugcuuguucgugugugugucguugcaggccuuauucaagcuuaccauggagcugcccauccucaagaccaacgccaucaccacgauccuggccgcggugacccugugcuucgccagcucccagaacaucaccgaggaguucuaccagagcacgugcuccgccgucagcaagggcuaccucuccgcccugcgcaccgggugguacaccagcgugaucaccaucgagcuguccaacaucaaggagaacaagugcaacggcaccgacgccaaggugaagcucaucaagcaggagcuggacaaguacaagaacgcggucacggagcugcagaugcugaugugcagcaccccggccgccggcuccgggagcgcgaucgccuccggcaucgccgucugcaaggugcugcaccucgagggcgaggugaacaagaucaagaacgcccugcuguccaccaacaaggccgucgugagccucuccaacggggugagcguccugaccuucaaggugcuggaccucaagaacuacaucgacaagcagcugcugcccauccugaacaagcagagcugcuccaucagcaacaucgagaccgucauggaguuccagcagaagaacaaccgccuccuggagaucacgcgggaguucagcgugaacgcgggcgugaccacccccgucuccaccuacaugcugacgaacagcgagcuccugucccugaucaacgacaugccgaucaccaacgaccagaagaagcucaugagcaacaacgugcagaucgugcgccagcaguccuacagcaucaugugcaucaucaaggaggagguccuggccuacguggugcagcugccccucuacggggucaucgacacccccugcuggaagcugcacaccagcccccugugcacgaccaacaccaaggagggcuccaacaucugccucacccggacggaccgcgggugguacugcgacaacgccggcagcguguccuucuucccgcaggccgagaccugcaaggucugcagcaaccggguguucugcgacaccaugaacucccugacccugcccagcgaggugaaccucugcaacaucgacaucuucaaccccaaguacgacugcaagaucaugacguccaagaccgacgucagcuccagcgugaucaccucccugggcgccaucgugagcugcuacgggaagaccaagugcacggcgagcaacaagaacaagggcaucaucaagaccuucuccaacgggugcgacuacgucagcaacaagggcguggacaccguguccgucggcaacacccuguacuacgugaacaagcaggagggcaagagccucuacgugaagggggagcccaucaucaacuucuacgacccgcuggucuuccccuccgacgaguucgacgccagcaucucccaggugaacgagaagaucaaccagagccuggccuucauccggaaguccgacgagcuccugcacaacgugaacgucggcaagagcaccacgaacaucaugaucaccaccaucaucaucgugaucaucgugauccugcugcuccugaucgccgucgggcuguuccucuacugcaaggcccgcuccacccccgugacgcugagcaaggaccagcuguccgggaucaacaacaucgcguucagcaacugaggacuagugaagggaacacccaaauuuaauucagccuuaagcacaauuaauuaagagugaaacguaauuguacaagcaguuggucacccaccauagggcaugaucaacaccgcaaccuuuccuuuuucccccagugauucugaaaaaccccucuucccuucagcuugcuuagauguuccaaauuuaguaagcuuaaggcggccuacagaagaaaaagaaaaaaaaggccacaaaaguucccucucacuuucaguaaauaaaauaaaagcagcaacagaaauaaagaaauaaaugaaauucaaaaugaaauaaauauuguguugugcagcauuaaaaaaucaauaaaaauuaaaaaugagcaagaucuaaaaaaaaaaaaaaaaaaaaaaaaaaaaaaaaaaaaaaaaaaaaaaaaaaaaaaaaaaaaaaaaugcaucccccccccccccccccccccccccccccccaaaggcucuuuucagagccaccagaauu

SEQ ID NO: 18610 - RNA, 2180 nt, Artificial Sequence
  mRNA product Design f-4 comprising derived and/or modified sequence from HRSV(Memphis-37)__AIY60640.1__F_DSCav1_mut7 (opt1)
gggagagucccgcagucggcguccagcggcucugcuuguucgugugugugucguugcaggccuuauucaagcuuaccauggagcugcccauccucaagaccaacgccaucaccacgauccuggccgcggugacccugugcuucgccagcucccagaacaucaccgaggaguucuaccagagcacgugcuccgccgucagcaagggcuaccucuccgcccugcgcaccgggugguacaccagcgugaucaccaucgagcuguccaacaucaaggagaacaagugcaacggcaccgacgccaaggugaagcucaucaagcaggagcuggacaaguacaagaacgcggucacggagcugcagaugcucaugugcagcaccccggccgccggguccggcagcgccaucgcguccgggaucgccgugugcaaggugcugcaccuggagggcgaggucaacaagaucaagaacgcccuccugagcaccaacaaggccguggugucccugagcaacggcgucuccgugcucaccuucaaggugcuggaccugaagaacuacaucgacaagcagcuccugcccauccugaacaagcagagcugcuccaucagcaacaucgagacggucauggaguuccagcagaagaacaaccggcuccuggagaucacccgcgaguucuccgugaacgccggggugaccacccccgucagcacguacaugcugaccaacagcgagcuccugucccugaucaacgacaugcccaucaccaacgaccagaagaagcucaugagcaacaacgugcagaucgugcggcagcaguccuacagcaucaugugcaucaucaaggaggagguccuggcguacguggugcagcugccgcucuacggcgucaucgacacccccugcuggaagcugcacacgagcccccugugcaccaccaacaccaaggaggggagcaacaucugccucacgcgcaccgaccggggcugguacugcgacaacgccggguccgugagcuucuucccccaggccgagaccugcaaggugugcuccaaccgcgucuucugcgacaccaugaacagccugacgcugccguccgaggugaaccucugcaacaucgacaucuucaaccccaaguacgacugcaagaucaugaccagcaagaccgacgucuccagcuccgugaucaccagccugggcgccaucguguccugcuacggcaagacgaagugcaccgccagcaacaagaacaaggggaucaucaagaccuucuccaacggcugcgacuacgucagcaacaaggggguggacaccgugagcgucggcaacacgcuguacuacgugaacaagcaggagggcaagucccucuacgugaagggggagcccaucaucaacuucuacgacccccuggucuucccgagcgacgaguucgacgcguccaucagccaggugaacgagaagaucaaccagucccuggccuucauccggaaguccgacgagcuccugcacaacgugaacgucggcaaguccaccaccaacaucaugaucaccaccaucaucaucgugaucaucgugauccugcuccugcugaucgccgucggccucuuccuguacugcaaggcccgcagcacgcccgugacccuguccaaggaccagcugagcgggaucaacaacaucgccuucuccaacugaggacuagugaagggaacacccaaauuuaauucagccuuaagcacaauuaauuaagagugaaacguaauuguacaagcaguuggucacccaccauagggcaugaucaacaccgcaaccuuuccuuuuucccccagugauucugaaaaaccccucuucccuucagcuugcuuagauguuccaaauuuaguaagcuuaaggcggccuacagaagaaaaagaaaaaaaaggccacaaaaguucccucucacuuucaguaaauaaaauaaaagcagcaacagaaauaaagaaauaaaugaaauucaaaaugaaauaaauauuguguugugcagcauuaaaaaaucaauaaaaauuaaaaaugagcaagaucuaaaaaaaaaaaaaaaaaaaaaaaaaaaaaaaaaaaaaaaaaaaaaaaaaaaaaaaaaaaaaaaaugcaucccccccccccccccccccccccccccccccaaaggcucuuuucagagccaccagaauu

SEQ ID NO: 18611 - RNA, 2180 nt, Artificial Sequence
  mRNA product Design f-4 comprising derived and/or modified sequence from HRSV(Memphis-37)__AIY60640.1__F_DSCav1_mut7 (opt2)
gggagagucccgcagucggcguccagcggcucugcuuguucgugugugugucguugcaggccuuauucaagcuuaccauggagcuccccauccucaagaccaacgccaucaccaccauccucgccgccgucacccucugcuucgccuccucccagaacaucaccgaggaguucuaccaguccaccugcuccgccgucuccaagggcuaccucuccgcccuccgcaccggcugguacaccuccgucaucaccaucgagcucuccaacaucaaggagaacaagugcaacggcaccgacgccaaggucaagcucaucaagcaggagcucgacaaguacaagaacgccgucaccgagcuccagaugcucaugugcuccacccccgccgccggcuccggcuccgccaucgccuccggcaucgccgucugcaagguccuccaccucgagggcgaggucaacaagaucaagaacgcccuccucuccaccaacaaggccgucgucucccucuccaacggcgucuccguccucaccuucaagguccucgaccucaagaacuacaucgacaagcagcuccuccccauccucaacaagcaguccugcuccaucuccaacaucgagaccgucauggaguuccagcagaagaacaaccgccuccucgagaucacccgcgaguucuccgucaacgccggcgucaccacccccgucuccaccuacaugcucaccaacuccgagcuccucucccucaucaacgacaugcccaucaccaacgaccagaagaagcucauguccaacaacguccagaucguccgccagcaguccuacuccaucaugugcaucaucaaggaggagguccucgccuacgucguccagcucccccucuacggcgucaucgacacccccugcuggaagcuccacaccuccccccucugcaccaccaacaccaaggagggcuccaacaucugccucacccgcaccgaccgcggcugguacugcgacaacgccggcuccgucuccuucuucccccaggccgagaccugcaaggucugcuccaaccgcgucuucugcgacaccaugaacucccucacccuccccuccgaggucaaccucugcaacaucgacaucuucaaccccaaguacgacugcaagaucaugaccuccaagaccgacgucuccuccuccgucaucaccucccucggcgccaucgucuccugcuacggcaagaccaagugcaccgccuccaacaagaacaagggcaucaucaagaccuucuccaacggcugcgacuacgucuccaacaagggcgucgacaccgucuccgucggcaacacccucuacuacgucaacaagcaggagggcaagucccucuacgucaagggcgagcccaucaucaacuucuacgacccccucgucuuccccuccgacgaguucgacgccuccaucucccaggucaacgagaagaucaaccagucccucgccuucauccgcaaguccgacgagcuccuccacaacgucaacgucggcaaguccaccaccaacaucaugaucaccaccaucaucaucgucaucaucgucauccuccuccuccucaucgccgucggccucuuccucuacugcaaggcccgcuccacccccgucacccucuccaaggaccagcucuccggcaucaacaacaucgccuucuccaacugaggacuagugaagggaacacccaaauuuaauucagccuuaagcacaauuaauuaagagugaaacguaauuguacaagcaguuggucacccaccauagggcaugaucaacaccgcaaccuuuccuuuuucccccagugauucugaaaaaccccucuucccuucagcuugcuuagauguuccaaauuuaguaagcuuaaggcggccuacagaagaaaaagaaaaaaaaggccacaaaaguucccucucacuuucaguaaauaaaauaaaagcagcaacagaaauaaagaaauaaaugaaauucaaaaugaaauaaauauuguguugugcagcauuaaaaaaucaauaaaaauuaaaaaugagcaagaucuaaaaaaaaaaaaaaaaaaaaaaaaaaaaaaaaaaaaaaaaaaaaaaaaaaaaaaaaaaaaaaaaugcaucccccccccccccccccccccccccccccccaaaggcucuuuucagagccaccagaauu

SEQ ID NO: 18612 - RNA, 2180 nt, Artificial Sequence
  mRNA product Design f-4 comprising derived and/or modified sequence from HRSV(Memphis-37)__AIY60640.1__F_DSCav1_mut7 (opt3)
gggagagucccgcagucggcguccagcggcucugcuuguucgugugugugucguugcaggccuuauucaagcuuaccauggagcugcccauccucaagaccaacgccauuacaacuauacuugcugcagugacgcugugcuucgccagcucccagaauaucaccgaagaguuuuaccaaucuacauguucagcggucaguaaaggcuauuugagcgcuuuaagaacugggugguacaccuccguuauuacaaucgaacugucuaacauuaaggagaauaaaugcaacggaaccgacgccaaggugaaacuaaucaagcaggaacucgauaaguauaaaaaugcaguaacugagcugcagaugcuuauguguucgaccccugccgcugguucaggcagcgcaauagccagugggaucgcugugugcaagguccugcacuuggagggagaagugaacaaaauuaagaaugcccuccuguccacaaacaaagcgguugugucucugagcaauggcgucuccgugcucacguucaagguauuagaccugaagaacuacaucgauaaacagcuuuugccaauucugaauaagcaaucauguaguaucagcaacauagagacuguuauggaauuucagcagaaaaauaacaggcuacucgagauuacccgggaguucucugugaaugccggugucacaacuccgguguccaccuauaugcugacaaacucagaacuucugagcuugaucaacgacaugcccauuaccaaugaucagaagaaacucaugaguaacaaugugcaaaucguccgccagcagucuuacuccaucaugugcauuauaaaggaggaaguucuggcauaugugguacaguuaccucuguacggggugaucgacacgccauguuggaaacuccauacuagcccccuuugcacaaccaacacuaaggagggaucgaauauuugucugacacgaaccgaucguggcugguacugcgacaacgcuggcucugucuccuuuuucccucaagccgaaacguguaaggugugcucaaauagaguguuuugcgauaccaugaacaguuugacacuaccaagcgagguuaaucuguguaacaucgacauauucaaucccaaauaugauugcaagauuaugacuuccaaaaccgacgucucuagcucagugaucacaagucucggggcaaucguauccuguuacggaaagacuaaaugcaccgcuagcaacaagaauaaggguauuaucaaaacauuuucuaacggcugugauuauguuucaaauaaggggguggacaccgucagugugggaaacacucuguacuaugucaacaaacaggagggcaagagccuuuacgugaaaggugaaccuauuauaaauuucuaugacccacugguuuuuccguccgaugaguucgacgccucuaucagccaggugaacgaaaagauuaaucaaucguuggcguuuaucaggaaguccgaugagcuccugcacaacguaaaugucgggaaaucaacgacaaacaucaugauuaccacuauaaucauugugaucauuguuaucuuacugcuacucauagccgugggacuguuccuuuacugcaaggcacggaguacccccgucacauugucuaaagaccagcugagcggcaucaauaacauugcuuucuccaauugaggacuagugaagggaacacccaaauuuaauucagccuuaagcacaauuaauuaagagugaaacguaauuguacaagcaguuggucacccaccauagggcaugaucaacaccgcaaccuuuccuuuuucccccagugauucugaaaaaccccucuucccuucagcuugcuuagauguuccaaauuuaguaagcuuaaggcggccuacagaagaaaaagaaaaaaaaggccacaaaaguucccucucacuuucaguaaauaaaauaaaagcagcaacagaaauaaagaaauaaaugaaauucaaaaugaaauaaauauuguguugugcagcauuaaaaaaucaauaaaaauuaaaaaugagcaagaucuaaaaaaaaaaaaaaaaaaaaaaaaaaaaaaaaaaaaaaaaaaaaaaaaaaaaaaaaaaaaaaaaugcaucccccccccccccccccccccccccccccccaaaggcucuuuucagagccaccagaauu

SEQ ID NO: 18613 - RNA, 2180 nt, Artificial Sequence
  mRNA product Design f-4 comprising derived and/or modified sequence from HRSV(Memphis-37)__AIY60640.1__F_DSCav1_mut7 (opt4)
gggagagucccgcagucggcguccagcggcucugcuuguucgugugugugucguugcaggccuuauucaagcuuaccauggagcugcccauccugaagaccaacgccaucaccaccauccuggccgccgugacccugugcuucgccagcagccagaacaucaccgaggaguucuaccagagcaccugcagcgccgugagcaagggcuaccugagcgcccugagaaccggcugguacaccagcgugaucaccaucgagcugagcaacaucaaggagaacaagugcaacggcaccgacgccaaggugaagcugaucaagcaggagcuggacaaguacaagaacgccgugaccgagcugcagaugcugaugugcagcacccccgccgccggcagcggcagcgccaucgccagcggcaucgccgugugcaaggugcugcaccuggagggcgaggugaacaagaucaagaacgcccugcugagcaccaacaaggccguggugagccugagcaacggcgugagcgugcugaccuucaaggugcuggaccugaagaacuacaucgacaagcagcugcugcccauccugaacaagcagagcugcagcaucagcaacaucgagaccgugauggaguuccagcagaagaacaacagacugcuggagaucaccagagaguucagcgugaacgccggcgugaccacccccgugagcaccuacaugcugaccaacagcgagcugcugagccugaucaacgacaugcccaucaccaacgaccagaagaagcugaugagcaacaacgugcagaucgugagacagcagagcuacagcaucaugugcaucaucaaggaggaggugcuggccuacguggugcagcugccccuguacggcgugaucgacacccccugcuggaagcugcacaccagcccccugugcaccaccaacaccaaggagggcagcaacaucugccugaccagaaccgacagaggcugguacugcgacaacgccggcagcgugagcuucuucccccaggccgagaccugcaaggugugcagcaacagaguguucugcgacaccaugaacagccugacccugcccagcgaggugaaccugugcaacaucgacaucuucaaccccaaguacgacugcaagaucaugaccagcaagaccgacgugagcagcagcgugaucaccagccugggcgccaucgugagcugcuacggcaagaccaagugcaccgccagcaacaagaacaagggcaucaucaagaccuucagcaacggcugcgacuacgugagcaacaagggcguggacaccgugagcgugggcaacacccuguacuacgugaacaagcaggagggcaagagccuguacgugaagggcgagcccaucaucaacuucuacgacccccugguguuccccagcgacgaguucgacgccagcaucagccaggugaacgagaagaucaaccagagccuggccuucaucagaaagagcgacgagcugcugcacaacgugaacgugggcaagagcaccaccaacaucaugaucaccaccaucaucaucgugaucaucgugauccugcugcugcugaucgccgugggccuguuccuguacugcaaggccagaagcacccccgugacccugagcaaggaccagcugagcggcaucaacaacaucgccuucagcaacugaggacuagugaagggaacacccaaauuuaauucagccuuaagcacaauuaauuaagagugaaacguaauuguacaagcaguuggucacccaccauagggcaugaucaacaccgcaaccuuuccuuuuucccccagugauucugaaaaaccccucuucccuucagcuugcuuagauguuccaaauuuaguaagcuuaaggcggccuacagaagaaaaagaaaaaaaaggccacaaaaguucccucucacuuucaguaaauaaaauaaaagcagcaacagaaauaaagaaauaaaugaaauucaaaaugaaauaaauauuguguugugcagcauuaaaaaaucaauaaaaauuaaaaaugagcaagaucuaaaaaaaaaaaaaaaaaaaaaaaaaaaaaaaaaaaaaaaaaaaaaaaaaaaaaaaaaaaaaaaaugcaucccccccccccccccccccccccccccccccaaaggcucuuuucagagccaccagaauu

SEQ ID NO: 18614 - RNA, 2180 nt, Artificial Sequence
  mRNA product Design f-4 comprising derived and/or modified sequence from HRSV(Memphis-37)__AIY60640.1__F_DSCav1_mut7 (opt5)
gggagagucccgcagucggcguccagcggcucugcuuguucgugugugugucguugcaggccuuauucaagcuuaccauggagcugcccauccucaagaccaacgccauuacaacgauccuggcugccgugacccuuugcuucgcgagcucccagaauauuacagaagaguuuuaccaaucuaccuguagcgcugucuccaaaggcuaucugucugcccucagaacagggugguacaccagcguuaucacaauugaacuguccaacaucaaggagaauaaaugcaacggaaccgacgccaaggugaaacuuaucaagcaggaacuggauaaguauaaaaaugcugugacggagcuccagaugcugauguguucuaccccugccgcuggcagcggguccgccauugcgagcggaaucgccgucugcaaggugcugcaccucgagggcgaaguuaacaaaauuaagaaugcucugcuuucuacaaacaaagccguggucucccugagcaauggggugucuguucucaccuucaaggugcuggaccuuaagaacuacaucgauaaacagcugcucccgauucugaauaagcaauccuguagcaucucuaacauugagacagucauggaauuucagcagaaaaauaaccggcugcucgagaucacccgcgaguucuccgugaaugcuggagugacgacacccgucagcaccuauaugcugacaaacuccgaacuucugucucucaucaacgacaugccuauuaccaaugaucagaagaaacugaugagcaacaauguucaaaucgugagacagcaguccuacagcauuaugugcaucauuaaggaggaagugcuugccuaugucgugcagcugccccucuacggcguuaucgacaccccuuguuggaaacugcauacaucuccccugugcacgaccaacacaaaggagggcuccaauaucugucucacccggacagaucgcgggugguacugcgacaacgcgggaagcgugagcuuuuucccucaagccgaaaccuguaaggucugcucuaauagaguguuuugcgauacgaugaacucccugacacuuccgucugagguuaaucuguguaacauugacaucuucaaucccaaauaugauugcaagauuaugaccagcaaaaccgacguguccagcucugucaucacaucccucggcgcuauugugagcuguuacgggaagaccaaaugcacagccucuaacaagaauaagggaaucaucaaaacguuuuccaacggcugugauuaugucagcaauaaggggguggacaccguuuccgugggaaacacacuguacuaugucaacaaacaggagggcaagucucuuuacgugaaaggcgaaccuauuaucaauuucuaugacccccugguuuuuccuagcgaugaguucgacgcuuccauuucucaggugaacgaaaagaucaaucaaagccucgccuuuauucggaaguccgaugagcugcugcacaacgucaauguggggaaaagcaccacaaacaucaugauuaccacgaucaucauugugaucauuguuauccuccugcuucugauugccgucggacucuuccuguacugcaaggcucgcucuacccccgugacacuguccaaagaccagcuuagcggcaucaauaacaucgcguucucuaauugaggacuagugaagggaacacccaaauuuaauucagccuuaagcacaauuaauuaagagugaaacguaauuguacaagcaguuggucacccaccauagggcaugaucaacaccgcaaccuuuccuuuuucccccagugauucugaaaaaccccucuucccuucagcuugcuuagauguuccaaauuuaguaagcuuaaggcggccuacagaagaaaaagaaaaaaaaggccacaaaaguucccucucacuuucaguaaauaaaauaaaagcagcaacagaaauaaagaaauaaaugaaauucaaaaugaaauaaauauuguguugugcagcauuaaaaaaucaauaaaaauuaaaaaugagcaagaucuaaaaaaaaaaaaaaaaaaaaaaaaaaaaaaaaaaaaaaaaaaaaaaaaaaaaaaaaaaaaaaaaugcaucccccccccccccccccccccccccccccccaaaggcucuuuucagagccaccagaauu

SEQ ID NO: 18615 - RNA, 2180 nt, Artificial Sequence
  mRNA product Design f-4 comprising derived and/or modified sequence from HRSV(Memphis-37)__AIY60640.1__F_DSCav1_mut7 (opt6)
gggagagucccgcagucggcguccagcggcucugcuuguucgugugugugucguugcaggccuuauucaagcuuaccauggaacuaccaauacucaaaacaaaugcuauaaccacaauacucgcagcaguaacauuauguuucgcaucaucccaaaacauaacagaagaauuuuaucaaucaaccuguucagcaguauccaaaggauaccuaagugcauuaagaaccggaugguacacaucaguaauaaccauagaacuuucaaacauaaaagaaaacaaauguaacggcacagacgcaaaagucaaacucaucaaacaggaacuugacaaauauaaaaacgcaguaaccgaacuacaaaugcuaaugugcucaacaccagcagcaggaucaggaucagcaauugcaucuggaauagcuguaugcaaaguccuacaccuagaaggagaaguaaacaaaaucaaaaacgcauuacucuccacaaacaaagcaguaguaucacuaucaaacggaguuucaguacuaaccuucaaaguauuagaccuaaaaaacuacauagacaaacaacuacuaccuauacuaaacaaacaauccuguucaauaagcaacauugaaacuguaauggaauuucaacaaaaaaacaaccgccuauuagaaauaaccagagaauuuuccguaaaugcaggaguaaccacaccagucucuacauacauguuaaccaacucagaacuauuaucacucauaaaugacaugccuauaacaaacgaccaaaaaaaacuaaugucaaacaacguacaaauaguaagacaacaaucauauuccauaaugugcauaauaaaagaagaaguacuugcauacgugguucaacuaccccuauauggaguuauagacacaccaugcuggaaacuccacacuuccccacuuugcacaacuaacacaaaagaaggaucaaauauaugccuaaccagaacagaccguggaugguacugcgacaacgcuggaucagucuccuucuuuccacaagcagaaaccugcaaagucugcucaaauagagucuucugugacacaaugaacucacucacccuacccucagaaguaaaccuauguaauauagauauauuuaauccaaaauacgacugcaaaauuaugacaaguaaaacagacguaagcucaucagucauaaccagccuaggagcaauaguauccuguuacggcaaaacaaaaugcacagcuucaaacaaaaacaaaggcauaauaaaaacauucucaaacggaugugacuauguaucaaauaaaggaguugacacaguaucaguuggaaacacacuauacuauguaaacaaacaagaaggaaaaucacuauacguuaaaggcgaacccauaaucaauuucuacgacccccuagucuucccauccgaugaauuugacgcaucaauaucccaaguaaaugaaaaaaucaaccaaucccuagcauuuauacgaaaauccgacgaacuacuccauaaugucaacgucgguaaaucaacgacaaacaucaugaucacaacaauaauaauaguaauaauuguaauauuacucuuacucauagcaguaggccuauuucuauauugcaaagccagaucaacaccaguaaccuuauccaaagaccaacuaucuggaauaaacaacauagcauuuuccaacugaggacuagugaagggaacacccaaauuuaauucagccuuaagcacaauuaauuaagagugaaacguaauuguacaagcaguuggucacccaccauagggcaugaucaacaccgcaaccuuuccuuuuucccccagugauucugaaaaaccccucuucccuucagcuugcuuagauguuccaaauuuaguaagcuuaaggcggccuacagaagaaaaagaaaaaaaaggccacaaaaguucccucucacuuucaguaaauaaaauaaaagcagcaacagaaauaaagaaauaaaugaaauucaaaaugaaauaaauauuguguugugcagcauuaaaaaaucaauaaaaauuaaaaaugagcaagaucuaaaaaaaaaaaaaaaaaaaaaaaaaaaaaaaaaaaaaaaaaaaaaaaaaaaaaaaaaaaaaaaaugcaucccccccccccccccccccccccccccccccaaaggcucuuuucagagccaccagaauu

SEQ ID NO: 18616 - RNA, 2180 nt, Artificial Sequence
  mRNA product Design f-4 comprising derived and/or modified sequence from HRSV(Memphis-37)__AIY60640.1__F_DSCav1_mut7 (opt11)
gggagagucccgcagucggcguccagcggcucugcuuguucgugugugugucguugcaggccuuauucaagcuuaccauggaacuccccauacuuaaaacaaacgccauaacaacuauacucgcagccgucacccucuguuucgcauccucucaaaacaucaccgaagaguucuaucaaucaaccugcuccgccgucucaaaaggcuaccucuccgcccuacgcacaggcugguacaccagcgucauuaccauagaacucucgaacaucaaagaaaacaaaugcaacggcaccgacgcaaaagugaaacucaucaaacaagaacucgacaaauacaaaaacgccgucaccgaacuucagaugcucaugugcuccaccccugccgccggcagcggcuccgccauagccuccggcaucgcagucugcaaaguccuccaccucgaaggagaaguaaacaaaaucaaaaaugcucuccucuccacaaacaaagccgucgucucacucuccaauggagucuccguccucaccuucaaaguccucgaccucaaaaacuacauagacaaacaacuacuccccauccucaacaagcaauccugcucuaucuccaacauagaaaccguuauggaguuccaacagaaaaauaaccgccugcuagaaauaacccgagaguucuccgucaacgcaggcgucacuacccccgucagcacauacaugcuaacaaacuccgaacugcucucccuuaucaacgacaugcccaucacaaacgaucagaaaaagcucaugucuaacaacguacaaaucguucggcaacaauccuacuccaucaugugcaucaucaaagaagaagugcucgccuacguaguccaacucccccucuacggagucaucgacacacccugcuggaaacuccacacaucaccccucugcaccaccaacacaaaagaaggguccaacaucugccucacgcgcaccgaccgaggcugguacugcgacaacgccggcuccguauccuucuucccccaagcagaaaccugcaaggucugcuccaaccgcguauucugcgacaccaugaacucgcucacccuccccucagaagucaaccuauguaacaucgacauauucaaucccaaauacgacugcaagauaaugacuuccaaaaccgacguaagcuccucggucaucaccucccucggcgccaucgucuccugcuacggcaaaaccaaaugcaccgccuccaauaagaauaaaggcauaauaaagacauucagcaacggcugcgauuacgucuccaacaaaggugucgacaccgucucagucggcaacacucuauacuacgugaacaaacaagaaggcaaaagccuauacguuaaaggcgaaccaauaaucaauuucuacgacccucuagucuuucccucugacgaguucgaugccagcauaagccaagucaacgaaaagaucaaccaaucacucgccuucauccguaaauccgacgaacugcuccacaaugucaauguaggcaaaucaacaaccaacaucaugaucaccacuauuaucaucgucaucaucguaauccuacuccuacuaaucgccgucggccuauuccucuacugcaaagcccgcucgacccccgucacucucagcaaggaucaacuauccggcaucaacaacaucgccuucuccaacuaaggacuagugaagggaacacccaaauuuaauucagccuuaagcacaauuaauuaagagugaaacguaauuguacaagcaguuggucacccaccauagggcaugaucaacaccgcaaccuuuccuuuuucccccagugauucugaaaaaccccucuucccuucagcuugcuuagauguuccaaauuuaguaagcuuaaggcggccuacagaagaaaaagaaaaaaaaggccacaaaaguucccucucacuuucaguaaauaaaauaaaagcagcaacagaaauaaagaaauaaaugaaauucaaaaugaaauaaauauuguguugugcagcauuaaaaaaucaauaaaaauuaaaaaugagcaagaucuaaaaaaaaaaaaaaaaaaaaaaaaaaaaaaaaaaaaaaaaaaaaaaaaaaaaaaaaaaaaaaaaugcaucccccccccccccccccccccccccccccccaaaggcucuuuucagagccaccagaauu

SEQ ID NO: 18617 - RNA, 1956 nt, Artificial Sequence
  mRNA product Design f-5 comprising derived and/or modified sequence from HRSV(Memphis-37)__AIY60640.1__F_DSCav1_mut7 (opt1)
gggagacuuucccauucuguagcagaauuugguguugccuguggucuuggucccgcggagaagcuuaccauggagcugcccauccucaagaccaacgccaucaccacgauccuggccgcggugacccugugcuucgccagcucccagaacaucaccgaggaguucuaccagagcacgugcuccgccgucagcaagggcuaccucuccgcccugcgcaccgggugguacaccagcgugaucaccaucgagcuguccaacaucaaggagaacaagugcaacggcaccgacgccaaggugaagcucaucaagcaggagcuggacaaguacaagaacgcggucacggagcugcagaugcugaugugcagcaccccggccgccggcuccgggagcgcgaucgccuccggcaucgccgucugcaaggugcugcaccucgagggcgaggugaacaagaucaagaacgcccugcuguccaccaacaaggccgucgugagccucuccaacggggugagcguccugaccuucaaggugcuggaccucaagaacuacaucgacaagcagcugcugcccauccugaacaagcagagcugcuccaucagcaacaucgagaccgucauggaguuccagcagaagaacaaccgccuccuggagaucacgcgggaguucagcgugaacgcgggcgugaccacccccgucuccaccuacaugcugacgaacagcgagcuccugucccugaucaacgacaugccgaucaccaacgaccagaagaagcucaugagcaacaacgugcagaucgugcgccagcaguccuacagcaucaugugcaucaucaaggaggagguccuggccuacguggugcagcugccccucuacggggucaucgacacccccugcuggaagcugcacaccagcccccugugcacgaccaacaccaaggagggcuccaacaucugccucacccggacggaccgcgggugguacugcgacaacgccggcagcguguccuucuucccgcaggccgagaccugcaaggucugcagcaaccggguguucugcgacaccaugaacucccugacccugcccagcgaggugaaccucugcaacaucgacaucuucaaccccaaguacgacugcaagaucaugacguccaagaccgacgucagcuccagcgugaucaccucccugggcgccaucgugagcugcuacgggaagaccaagugcacggcgagcaacaagaacaagggcaucaucaagaccuucuccaacgggugcgacuacgucagcaacaagggcguggacaccguguccgucggcaacacccuguacuacgugaacaagcaggagggcaagagccucuacgugaagggggagcccaucaucaacuucuacgacccgcuggucuuccccuccgacgaguucgacgccagcaucucccaggugaacgagaagaucaaccagagccuggccuucauccggaaguccgacgagcuccugcacaacgugaacgucggcaagagcaccacgaacaucaugaucaccaccaucaucaucgugaucaucgugauccugcugcuccugaucgccgucgggcuguuccucuacugcaaggcccgcuccacccccgugacgcugagcaaggaccagcuguccgggaucaacaacaucgcguucagcaacugaggacuaguacuggcugcaucucccuuuccucuguccuccauccuucucccaggauggugaagggggaccugguacccagugauccccaccccaggauccuaaaucaugacuuaccugcuaauaaaaacucauuggaaaagugagaagaucuaaaaaaaaaaaaaaaaaaaaaaaaaaaaaaaaaaaaaaaaaaaaaaaaaaaaaaaaaaaaaaaaugcaucccccccccccccccccccccccccccccccaaaggcucuuuucagagccaccagaauu

SEQ ID NO: 18618 - RNA, 1956 nt, Artificial Sequence
  mRNA product Design f-5 comprising derived and/or modified sequence from HRSV(Memphis-37)__AIY60640.1__F_DSCav1_mut7 (opt1)
gggagacuuucccauucuguagcagaauuugguguugccuguggucuuggucccgcggagaagcuuaccauggagcugcccauccucaagaccaacgccaucaccacgauccuggccgcggugacccugugcuucgccagcucccagaacaucaccgaggaguucuaccagagcacgugcuccgccgucagcaagggcuaccucuccgcccugcgcaccgggugguacaccagcgugaucaccaucgagcuguccaacaucaaggagaacaagugcaacggcaccgacgccaaggugaagcucaucaagcaggagcuggacaaguacaagaacgcggucacggagcugcagaugcucaugugcagcaccccggccgccggguccggcagcgccaucgcguccgggaucgccgugugcaaggugcugcaccuggagggcgaggucaacaagaucaagaacgcccuccugagcaccaacaaggccguggugucccugagcaacggcgucuccgugcucaccuucaaggugcuggaccugaagaacuacaucgacaagcagcuccugcccauccugaacaagcagagcugcuccaucagcaacaucgagacggucauggaguuccagcagaagaacaaccggcuccuggagaucacccgcgaguucuccgugaacgccggggugaccacccccgucagcacguacaugcugaccaacagcgagcuccugucccugaucaacgacaugcccaucaccaacgaccagaagaagcucaugagcaacaacgugcagaucgugcggcagcaguccuacagcaucaugugcaucaucaaggaggagguccuggcguacguggugcagcugccgcucuacggcgucaucgacacccccugcuggaagcugcacacgagcccccugugcaccaccaacaccaaggaggggagcaacaucugccucacgcgcaccgaccggggcugguacugcgacaacgccggguccgugagcuucuucccccaggccgagaccugcaaggugugcuccaaccgcgucuucugcgacaccaugaacagccugacgcugccguccgaggugaaccucugcaacaucgacaucuucaaccccaaguacgacugcaagaucaugaccagcaagaccgacgucuccagcuccgugaucaccagccugggcgccaucguguccugcuacggcaagacgaagugcaccgccagcaacaagaacaaggggaucaucaagaccuucuccaacggcugcgacuacgucagcaacaaggggguggacaccgugagcgucggcaacacgcuguacuacgugaacaagcaggagggcaagucccucuacgugaagggggagcccaucaucaacuucuacgacccccuggucuucccgagcgacgaguucgacgcguccaucagccaggugaacgagaagaucaaccagucccuggccuucauccggaaguccgacgagcuccugcacaacgugaacgucggcaaguccaccaccaacaucaugaucaccaccaucaucaucgugaucaucgugauccugcuccugcugaucgccgucggccucuuccuguacugcaaggcccgcagcacgcccgugacccuguccaaggaccagcugagcgggaucaacaacaucgccuucuccaacugaggacuaguacuggcugcaucucccuuuccucuguccuccauccuucucccaggauggugaagggggaccugguacccagugauccccaccccaggauccuaaaucaugacuuaccugcuaauaaaaacucauuggaaaagugagaagaucuaaaaaaaaaaaaaaaaaaaaaaaaaaaaaaaaaaaaaaaaaaaaaaaaaaaaaaaaaaaaaaaaugcaucccccccccccccccccccccccccccccccaaaggcucuuuucagagccaccagaauu

SEQ ID NO: 18619 - RNA, 1956 nt, Artificial Sequence
  mRNA product Design f-5 comprising derived and/or modified sequence from HRSV(Memphis-37)__AIY60640.1__F_DSCav1_mut7 (opt2)
gggagacuuucccauucuguagcagaauuugguguugccuguggucuuggucccgcggagaagcuuaccauggagcuccccauccucaagaccaacgccaucaccaccauccucgccgccgucacccucugcuucgccuccucccagaacaucaccgaggaguucuaccaguccaccugcuccgccgucuccaagggcuaccucuccgcccuccgcaccggcugguacaccuccgucaucaccaucgagcucuccaacaucaaggagaacaagugcaacggcaccgacgccaaggucaagcucaucaagcaggagcucgacaaguacaagaacgccgucaccgagcuccagaugcucaugugcuccacccccgccgccggcuccggcuccgccaucgccuccggcaucgccgucugcaagguccuccaccucgagggcgaggucaacaagaucaagaacgcccuccucuccaccaacaaggccgucgucucccucuccaacggcgucuccguccucaccuucaagguccucgaccucaagaacuacaucgacaagcagcuccuccccauccucaacaagcaguccugcuccaucuccaacaucgagaccgucauggaguuccagcagaagaacaaccgccuccucgagaucacccgcgaguucuccgucaacgccggcgucaccacccccgucuccaccuacaugcucaccaacuccgagcuccucucccucaucaacgacaugcccaucaccaacgaccagaagaagcucauguccaacaacguccagaucguccgccagcaguccuacuccaucaugugcaucaucaaggaggagguccucgccuacgucguccagcucccccucuacggcgucaucgacacccccugcuggaagcuccacaccuccccccucugcaccaccaacaccaaggagggcuccaacaucugccucacccgcaccgaccgcggcugguacugcgacaacgccggcuccgucuccuucuucccccaggccgagaccugcaaggucugcuccaaccgcgucuucugcgacaccaugaacucccucacccuccccuccgaggucaaccucugcaacaucgacaucuucaaccccaaguacgacugcaagaucaugaccuccaagaccgacgucuccuccuccgucaucaccucccucggcgccaucgucuccugcuacggcaagaccaagugcaccgccuccaacaagaacaagggcaucaucaagaccuucuccaacggcugcgacuacgucuccaacaagggcgucgacaccgucuccgucggcaacacccucuacuacgucaacaagcaggagggcaagucccucuacgucaagggcgagcccaucaucaacuucuacgacccccucgucuuccccuccgacgaguucgacgccuccaucucccaggucaacgagaagaucaaccagucccucgccuucauccgcaaguccgacgagcuccuccacaacgucaacgucggcaaguccaccaccaacaucaugaucaccaccaucaucaucgucaucaucgucauccuccuccuccucaucgccgucggccucuuccucuacugcaaggcccgcuccacccccgucacccucuccaaggaccagcucuccggcaucaacaacaucgccuucuccaacugaggacuaguacuggcugcaucucccuuuccucuguccuccauccuucucccaggauggugaagggggaccugguacccagugauccccaccccaggauccuaaaucaugacuuaccugcuaauaaaaacucauuggaaaagugagaagaucuaaaaaaaaaaaaaaaaaaaaaaaaaaaaaaaaaaaaaaaaaaaaaaaaaaaaaaaaaaaaaaaaugcaucccccccccccccccccccccccccccccccaaaggcucuuuucagagccaccagaauu

SEQ ID NO: 18620 - RNA, 1956 nt, Artificial Sequence
  mRNA product Design f-5 comprising derived and/or modified sequence from HRSV(Memphis-37)__AIY60640.1__F_DSCav1_mut7 (opt3)
gggagacuuucccauucuguagcagaauuugguguugccuguggucuuggucccgcggagaagcuuaccauggagcugcccauccucaagaccaacgccauuacaacuauacuugcugcagugacgcugugcuucgccagcucccagaauaucaccgaagaguuuuaccaaucuacauguucagcggucaguaaaggcuauuugagcgcuuuaagaacugggugguacaccuccguuauuacaaucgaacugucuaacauuaaggagaauaaaugcaacggaaccgacgccaaggugaaacuaaucaagcaggaacucgauaaguauaaaaaugcaguaacugagcugcagaugcuuauguguucgaccccugccgcugguucaggcagcgcaauagccagugggaucgcugugugcaagguccugcacuuggagggagaagugaacaaaauuaagaaugcccuccuguccacaaacaaagcgguugugucucugagcaauggcgucuccgugcucacguucaagguauuagaccugaagaacuacaucgauaaacagcuuuugccaauucugaauaagcaaucauguaguaucagcaacauagagacuguuauggaauuucagcagaaaaauaacaggcuacucgagauuacccgggaguucucugugaaugccggugucacaacuccgguguccaccuauaugcugacaaacucagaacuucugagcuugaucaacgacaugcccauuaccaaugaucagaagaaacucaugaguaacaaugugcaaaucguccgccagcagucuuacuccaucaugugcauuauaaaggaggaaguucuggcauaugugguacaguuaccucuguacggggugaucgacacgccauguuggaaacuccauacuagcccccuuugcacaaccaacacuaaggagggaucgaauauuugucugacacgaaccgaucguggcugguacugcgacaacgcuggcucugucuccuuuuucccucaagccgaaacguguaaggugugcucaaauagaguguuuugcgauaccaugaacaguuugacacuaccaagcgagguuaaucuguguaacaucgacauauucaaucccaaauaugauugcaagauuaugacuuccaaaaccgacgucucuagcucagugaucacaagucucggggcaaucguauccuguuacggaaagacuaaaugcaccgcuagcaacaagaauaaggguauuaucaaaacauuuucuaacggcugugauuauguuucaaauaaggggguggacaccgucagugugggaaacacucuguacuaugucaacaaacaggagggcaagagccuuuacgugaaaggugaaccuauuauaaauuucuaugacccacugguuuuuccguccgaugaguucgacgccucuaucagccaggugaacgaaaagauuaaucaaucguuggcguuuaucaggaaguccgaugagcuccugcacaacguaaaugucgggaaaucaacgacaaacaucaugauuaccacuauaaucauugugaucauuguuaucuuacugcuacucauagccgugggacuguuccuuuacugcaaggcacggaguacccccgucacauugucuaaagaccagcugagcggcaucaauaacauugcuuucuccaauugaggacuaguacuggcugcaucucccuuuccucuguccuccauccuucucccaggauggugaagggggaccugguacccagugauccccaccccaggauccuaaaucaugacuuaccugcuaauaaaaacucauuggaaaagugagaagaucuaaaaaaaaaaaaaaaaaaaaaaaaaaaaaaaaaaaaaaaaaaaaaaaaaaaaaaaaaaaaaaaaugcaucccccccccccccccccccccccccccccccaaaggcucuuuucagagccaccagaauu

SEQ ID NO: 18621 - RNA, 1956 nt, Artificial Sequence
  mRNA product Design f-5 comprising derived and/or modified sequence from HRSV(Memphis-37)__AIY60640.1__F_DSCav1_mut7 (opt4)
gggagacuuucccauucuguagcagaauuugguguugccuguggucuuggucccgcggagaagcuuaccauggagcugcccauccugaagaccaacgccaucaccaccauccuggccgccgugacccugugcuucgccagcagccagaacaucaccgaggaguucuaccagagcaccugcagcgccgugagcaagggcuaccugagcgcccugagaaccggcugguacaccagcgugaucaccaucgagcugagcaacaucaaggagaacaagugcaacggcaccgacgccaaggugaagcugaucaagcaggagcuggacaaguacaagaacgccgugaccgagcugcagaugcugaugugcagcacccccgccgccggcagcggcagcgccaucgccagcggcaucgccgugugcaaggugcugcaccuggagggcgaggugaacaagaucaagaacgcccugcugagcaccaacaaggccguggugagccugagcaacggcgugagcgugcugaccuucaaggugcuggaccugaagaacuacaucgacaagcagcugcugcccauccugaacaagcagagcugcagcaucagcaacaucgagaccgugauggaguuccagcagaagaacaacagacugcuggagaucaccagagaguucagcgugaacgccggcgugaccacccccgugagcaccuacaugcugaccaacagcgagcugcugagccugaucaacgacaugcccaucaccaacgaccagaagaagcugaugagcaacaacgugcagaucgugagacagcagagcuacagcaucaugugcaucaucaaggaggaggugcuggccuacguggugcagcugccccuguacggcgugaucgacacccccugcuggaagcugcacaccagcccccugugcaccaccaacaccaaggagggcagcaacaucugccugaccagaaccgacagaggcugguacugcgacaacgccggcagcgugagcuucuucccccaggccgagaccugcaaggugugcagcaacagaguguucugcgacaccaugaacagccugacccugcccagcgaggugaaccugugcaacaucgacaucuucaaccccaaguacgacugcaagaucaugaccagcaagaccgacgugagcagcagcgugaucaccagccugggcgccaucgugagcugcuacggcaagaccaagugcaccgccagcaacaagaacaagggcaucaucaagaccuucagcaacggcugcgacuacgugagcaacaagggcguggacaccgugagcgugggcaacacccuguacuacgugaacaagcaggagggcaagagccuguacgugaagggcgagcccaucaucaacuucuacgacccccugguguuccccagcgacgaguucgacgccagcaucagccaggugaacgagaagaucaaccagagccuggccuucaucagaaagagcgacgagcugcugcacaacgugaacgugggcaagagcaccaccaacaucaugaucaccaccaucaucaucgugaucaucgugauccugcugcugcugaucgccgugggccuguuccuguacugcaaggccagaagcacccccgugacccugagcaaggaccagcugagcggcaucaacaacaucgccuucagcaacugaggacuaguacuggcugcaucucccuuuccucuguccuccauccuucucccaggauggugaagggggaccugguacccagugauccccaccccaggauccuaaaucaugacuuaccugcuaauaaaaacucauuggaaaagugagaagaucuaaaaaaaaaaaaaaaaaaaaaaaaaaaaaaaaaaaaaaaaaaaaaaaaaaaaaaaaaaaaaaaaugcaucccccccccccccccccccccccccccccccaaaggcucuuuucagagccaccagaauu

SEQ ID NO: 18622 - RNA, 1956 nt, Artificial Sequence
  mRNA product Design f-5 comprising derived and/or modified sequence from HRSV(Memphis-37)__AIY60640.1__F_DSCav1_mut7 (opt5)
gggagacuuucccauucuguagcagaauuugguguugccuguggucuuggucccgcggagaagcuuaccauggagcugcccauccucaagaccaacgccauuacaacgauccuggcugccgugacccuuugcuucgcgagcucccagaauauuacagaagaguuuuaccaaucuaccuguagcgcugucuccaaaggcuaucugucugcccucagaacagggugguacaccagcguuaucacaauugaacuguccaacaucaaggagaauaaaugcaacggaaccgacgccaaggugaaacuuaucaagcaggaacuggauaaguauaaaaaugcugugacggagcuccagaugcugauguguucuaccccugccgcuggcagcggguccgccauugcgagcggaaucgccgucugcaaggugcugcaccucgagggcgaaguuaacaaaauuaagaaugcucugcuuucuacaaacaaagccguggucucccugagcaauggggugucuguucucaccuucaaggugcuggaccuuaagaacuacaucgauaaacagcugcucccgauucugaauaagcaauccuguagcaucucuaacauugagacagucauggaauuucagcagaaaaauaaccggcugcucgagaucacccgcgaguucuccgugaaugcuggagugacgacacccgucagcaccuauaugcugacaaacuccgaacuucugucucucaucaacgacaugccuauuaccaaugaucagaagaaacugaugagcaacaauguucaaaucgugagacagcaguccuacagcauuaugugcaucauuaaggaggaagugcuugccuaugucgugcagcugccccucuacggcguuaucgacaccccuuguuggaaacugcauacaucuccccugugcacgaccaacacaaaggagggcuccaauaucugucucacccggacagaucgcgggugguacugcgacaacgcgggaagcgugagcuuuuucccucaagccgaaaccuguaaggucugcucuaauagaguguuuugcgauacgaugaacucccugacacuuccgucugagguuaaucuguguaacauugacaucuucaaucccaaauaugauugcaagauuaugaccagcaaaaccgacguguccagcucugucaucacaucccucggcgcuauugugagcuguuacgggaagaccaaaugcacagccucuaacaagaauaagggaaucaucaaaacguuuuccaacggcugugauuaugucagcaauaaggggguggacaccguuuccgugggaaacacacuguacuaugucaacaaacaggagggcaagucucuuuacgugaaaggcgaaccuauuaucaauuucuaugacccccugguuuuuccuagcgaugaguucgacgcuuccauuucucaggugaacgaaaagaucaaucaaagccucgccuuuauucggaaguccgaugagcugcugcacaacgucaauguggggaaaagcaccacaaacaucaugauuaccacgaucaucauugugaucauuguuauccuccugcuucugauugccgucggacucuuccuguacugcaaggcucgcucuacccccgugacacuguccaaagaccagcuuagcggcaucaauaacaucgcguucucuaauugaggacuaguacuggcugcaucucccuuuccucuguccuccauccuucucccaggauggugaagggggaccugguacccagugauccccaccccaggauccuaaaucaugacuuaccugcuaauaaaaacucauuggaaaagugagaagaucuaaaaaaaaaaaaaaaaaaaaaaaaaaaaaaaaaaaaaaaaaaaaaaaaaaaaaaaaaaaaaaaaugcaucccccccccccccccccccccccccccccccaaaggcucuuuucagagccaccagaauu

SEQ ID NO: 18623 - RNA, 1956 nt, Artificial Sequence
  mRNA product Design f-5 comprising derived and/or modified sequence from HRSV(Memphis-37)__AIY60640.1__F_DSCav1_mut7 (opt6)
gggagacuuucccauucuguagcagaauuugguguugccuguggucuuggucccgcggagaagcuuaccauggaacuaccaauacucaaaacaaaugcuauaaccacaauacucgcagcaguaacauuauguuucgcaucaucccaaaacauaacagaagaauuuuaucaaucaaccuguucagcaguauccaaaggauaccuaagugcauuaagaaccggaugguacacaucaguaauaaccauagaacuuucaaacauaaaagaaaacaaauguaacggcacagacgcaaaagucaaacucaucaaacaggaacuugacaaauauaaaaacgcaguaaccgaacuacaaaugcuaaugugcucaacaccagcagcaggaucaggaucagcaauugcaucuggaauagcuguaugcaaaguccuacaccuagaaggagaaguaaacaaaaucaaaaacgcauuacucuccacaaacaaagcaguaguaucacuaucaaacggaguuucaguacuaaccuucaaaguauuagaccuaaaaaacuacauagacaaacaacuacuaccuauacuaaacaaacaauccuguucaauaagcaacauugaaacuguaauggaauuucaacaaaaaaacaaccgccuauuagaaauaaccagagaauuuuccguaaaugcaggaguaaccacaccagucucuacauacauguuaaccaacucagaacuauuaucacucauaaaugacaugccuauaacaaacgaccaaaaaaaacuaaugucaaacaacguacaaauaguaagacaacaaucauauuccauaaugugcauaauaaaagaagaaguacuugcauacgugguucaacuaccccuauauggaguuauagacacaccaugcuggaaacuccacacuuccccacuuugcacaacuaacacaaaagaaggaucaaauauaugccuaaccagaacagaccguggaugguacugcgacaacgcuggaucagucuccuucuuuccacaagcagaaaccugcaaagucugcucaaauagagucuucugugacacaaugaacucacucacccuacccucagaaguaaaccuauguaauauagauauauuuaauccaaaauacgacugcaaaauuaugacaaguaaaacagacguaagcucaucagucauaaccagccuaggagcaauaguauccuguuacggcaaaacaaaaugcacagcuucaaacaaaaacaaaggcauaauaaaaacauucucaaacggaugugacuauguaucaaauaaaggaguugacacaguaucaguuggaaacacacuauacuauguaaacaaacaagaaggaaaaucacuauacguuaaaggcgaacccauaaucaauuucuacgacccccuagucuucccauccgaugaauuugacgcaucaauaucccaaguaaaugaaaaaaucaaccaaucccuagcauuuauacgaaaauccgacgaacuacuccauaaugucaacgucgguaaaucaacgacaaacaucaugaucacaacaauaauaauaguaauaauuguaauauuacucuuacucauagcaguaggccuauuucuauauugcaaagccagaucaacaccaguaaccuuauccaaagaccaacuaucuggaauaaacaacauagcauuuuccaacugaggacuaguacuggcugcaucucccuuuccucuguccuccauccuucucccaggauggugaagggggaccugguacccagugauccccaccccaggauccuaaaucaugacuuaccugcuaauaaaaacucauuggaaaagugagaagaucuaaaaaaaaaaaaaaaaaaaaaaaaaaaaaaaaaaaaaaaaaaaaaaaaaaaaaaaaaaaaaaaaugcaucccccccccccccccccccccccccccccccaaaggcucuuuucagagccaccagaauu

SEQ ID NO: 18624 - RNA, 1956 nt, Artificial Sequence
  mRNA product Design f-5 comprising derived and/or modified sequence from HRSV(Memphis-37)__AIY60640.1__F_DSCav1_mut7 (opt11)
gggagacuuucccauucuguagcagaauuugguguugccuguggucuuggucccgcggagaagcuuaccauggaacuccccauacuuaaaacaaacgccauaacaacuauacucgcagccgucacccucuguuucgcauccucucaaaacaucaccgaagaguucuaucaaucaaccugcuccgccgucucaaaaggcuaccucuccgcccuacgcacaggcugguacaccagcgucauuaccauagaacucucgaacaucaaagaaaacaaaugcaacggcaccgacgcaaaagugaaacucaucaaacaagaacucgacaaauacaaaaacgccgucaccgaacuucagaugcucaugugcuccaccccugccgccggcagcggcuccgccauagccuccggcaucgcagucugcaaaguccuccaccucgaaggagaaguaaacaaaaucaaaaaugcucuccucuccacaaacaaagccgucgucucacucuccaauggagucuccguccucaccuucaaaguccucgaccucaaaaacuacauagacaaacaacuacuccccauccucaacaagcaauccugcucuaucuccaacauagaaaccguuauggaguuccaacagaaaaauaaccgccugcuagaaauaacccgagaguucuccgucaacgcaggcgucacuacccccgucagcacauacaugcuaacaaacuccgaacugcucucccuuaucaacgacaugcccaucacaaacgaucagaaaaagcucaugucuaacaacguacaaaucguucggcaacaauccuacuccaucaugugcaucaucaaagaagaagugcucgccuacguaguccaacucccccucuacggagucaucgacacacccugcuggaaacuccacacaucaccccucugcaccaccaacacaaaagaaggguccaacaucugccucacgcgcaccgaccgaggcugguacugcgacaacgccggcuccguauccuucuucccccaagcagaaaccugcaaggucugcuccaaccgcguauucugcgacaccaugaacucgcucacccuccccucagaagucaaccuauguaacaucgacauauucaaucccaaauacgacugcaagauaaugacuuccaaaaccgacguaagcuccucggucaucaccucccucggcgccaucgucuccugcuacggcaaaaccaaaugcaccgccuccaauaagaauaaaggcauaauaaagacauucagcaacggcugcgauuacgucuccaacaaaggugucgacaccgucucagucggcaacacucuauacuacgugaacaaacaagaaggcaaaagccuauacguuaaaggcgaaccaauaaucaauuucuacgacccucuagucuuucccucugacgaguucgaugccagcauaagccaagucaacgaaaagaucaaccaaucacucgccuucauccguaaauccgacgaacugcuccacaaugucaauguaggcaaaucaacaaccaacaucaugaucaccacuauuaucaucgucaucaucguaauccuacuccuacuaaucgccgucggccuauuccucuacugcaaagcccgcucgacccccgucacucucagcaaggaucaacuauccggcaucaacaacaucgccuucuccaacuaaggacuaguacuggcugcaucucccuuuccucuguccuccauccuucucccaggauggugaagggggaccugguacccagugauccccaccccaggauccuaaaucaugacuuaccugcuaauaaaaacucauuggaaaagugagaagaucuaaaaaaaaaaaaaaaaaaaaaaaaaaaaaaaaaaaaaaaaaaaaaaaaaaaaaaaaaaaaaaaaugcaucccccccccccccccccccccccccccccccaaaggcucuuuucagagccaccagaauu

SEQ ID NO: 18625 - RNA, 1952 nt, Artificial Sequence
  mRNA product Design g-1 comprising derived and/or modified sequence from HRSV(Memphis-37)__AIY60640.1__F_DSCav1_mut7 (opt1)
gggagacuuucccauucuguagcagaauuugguguugccuguggucuuggucccgcggagaagcuuaccauggagcugcccauccucaagaccaacgccaucaccacgauccuggccgcggugacccugugcuucgccagcucccagaacaucaccgaggaguucuaccagagcacgugcuccgccgucagcaagggcuaccucuccgcccugcgcaccgggugguacaccagcgugaucaccaucgagcuguccaacaucaaggagaacaagugcaacggcaccgacgccaaggugaagcucaucaagcaggagcuggacaaguacaagaacgcggucacggagcugcagaugcugaugugcagcaccccggccgccggcuccgggagcgcgaucgccuccggcaucgccgucugcaaggugcugcaccucgagggcgaggugaacaagaucaagaacgcccugcuguccaccaacaaggccgucgugagccucuccaacggggugagcguccugaccuucaaggugcuggaccucaagaacuacaucgacaagcagcugcugcccauccugaacaagcagagcugcuccaucagcaacaucgagaccgucauggaguuccagcagaagaacaaccgccuccuggagaucacgcgggaguucagcgugaacgcgggcgugaccacccccgucuccaccuacaugcugacgaacagcgagcuccugucccugaucaacgacaugccgaucaccaacgaccagaagaagcucaugagcaacaacgugcagaucgugcgccagcaguccuacagcaucaugugcaucaucaaggaggagguccuggccuacguggugcagcugccccucuacggggucaucgacacccccugcuggaagcugcacaccagcccccugugcacgaccaacaccaaggagggcuccaacaucugccucacccggacggaccgcgggugguacugcgacaacgccggcagcguguccuucuucccgcaggccgagaccugcaaggucugcagcaaccggguguucugcgacaccaugaacucccugacccugcccagcgaggugaaccucugcaacaucgacaucuucaaccccaaguacgacugcaagaucaugacguccaagaccgacgucagcuccagcgugaucaccucccugggcgccaucgugagcugcuacgggaagaccaagugcacggcgagcaacaagaacaagggcaucaucaagaccuucuccaacgggugcgacuacgucagcaacaagggcguggacaccguguccgucggcaacacccuguacuacgugaacaagcaggagggcaagagccucuacgugaagggggagcccaucaucaacuucuacgacccgcuggucuuccccuccgacgaguucgacgccagcaucucccaggugaacgagaagaucaaccagagccuggccuucauccggaaguccgacgagcuccugcacaacgugaacgucggcaagagcaccacgaacaucaugaucaccaccaucaucaucgugaucaucgugauccugcugcuccugaucgccgucgggcuguuccucuacugcaaggcccgcuccacccccgugacgcugagcaaggaccagcuguccgggaucaacaacaucgcguucagcaacugaggacuaguggaagcauuuuccuggcugauuaaaagaaauuacucagcuauggucaucuguuccuguuagaaggcuaugcagcauauuauauacuaugcgcauguuaugaaaugcauaauaaaaaauuuuaaaaaaucuaaaagaucuaaaaaaaaaaaaaaaaaaaaaaaaaaaaaaaaaaaaaaaaaaaaaaaaaaaaaaaaaaaaaaaaugcaucccccccccccccccccccccccccccccccaaaggcucuuuucagagccaccagaauu

SEQ ID NO: 18626 - RNA, 1952 nt, Artificial Sequence
  mRNA product Design g-1 comprising derived and/or modified sequence from HRSV(Memphis-37)__AIY60640.1__F_DSCav1_mut7 (opt1)
gggagacuuucccauucuguagcagaauuugguguugccuguggucuuggucccgcggagaagcuuaccauggagcugcccauccucaagaccaacgccaucaccacgauccuggccgcggugacccugugcuucgccagcucccagaacaucaccgaggaguucuaccagagcacgugcuccgccgucagcaagggcuaccucuccgcccugcgcaccgggugguacaccagcgugaucaccaucgagcuguccaacaucaaggagaacaagugcaacggcaccgacgccaaggugaagcucaucaagcaggagcuggacaaguacaagaacgcggucacggagcugcagaugcucaugugcagcaccccggccgccggguccggcagcgccaucgcguccgggaucgccgugugcaaggugcugcaccuggagggcgaggucaacaagaucaagaacgcccuccugagcaccaacaaggccguggugucccugagcaacggcgucuccgugcucaccuucaaggugcuggaccugaagaacuacaucgacaagcagcuccugcccauccugaacaagcagagcugcuccaucagcaacaucgagacggucauggaguuccagcagaagaacaaccggcuccuggagaucacccgcgaguucuccgugaacgccggggugaccacccccgucagcacguacaugcugaccaacagcgagcuccugucccugaucaacgacaugcccaucaccaacgaccagaagaagcucaugagcaacaacgugcagaucgugcggcagcaguccuacagcaucaugugcaucaucaaggaggagguccuggcguacguggugcagcugccgcucuacggcgucaucgacacccccugcuggaagcugcacacgagcccccugugcaccaccaacaccaaggaggggagcaacaucugccucacgcgcaccgaccggggcugguacugcgacaacgccggguccgugagcuucuucccccaggccgagaccugcaaggugugcuccaaccgcgucuucugcgacaccaugaacagccugacgcugccguccgaggugaaccucugcaacaucgacaucuucaaccccaaguacgacugcaagaucaugaccagcaagaccgacgucuccagcuccgugaucaccagccugggcgccaucguguccugcuacggcaagacgaagugcaccgccagcaacaagaacaaggggaucaucaagaccuucuccaacggcugcgacuacgucagcaacaaggggguggacaccgugagcgucggcaacacgcuguacuacgugaacaagcaggagggcaagucccucuacgugaagggggagcccaucaucaacuucuacgacccccuggucuucccgagcgacgaguucgacgcguccaucagccaggugaacgagaagaucaaccagucccuggccuucauccggaaguccgacgagcuccugcacaacgugaacgucggcaaguccaccaccaacaucaugaucaccaccaucaucaucgugaucaucgugauccugcuccugcugaucgccgucggccucuuccuguacugcaaggcccgcagcacgcccgugacccuguccaaggaccagcugagcgggaucaacaacaucgccuucuccaacugaggacuaguggaagcauuuuccuggcugauuaaaagaaauuacucagcuauggucaucuguuccuguuagaaggcuaugcagcauauuauauacuaugcgcauguuaugaaaugcauaauaaaaaauuuuaaaaaaucuaaaagaucuaaaaaaaaaaaaaaaaaaaaaaaaaaaaaaaaaaaaaaaaaaaaaaaaaaaaaaaaaaaaaaaaugcaucccccccccccccccccccccccccccccccaaaggcucuuuucagagccaccagaauu

SEQ ID NO: 18627 - RNA, 1952 nt, Artificial Sequence
  mRNA product Design g-1 comprising derived and/or modified sequence from HRSV(Memphis-37)__AIY60640.1__F_DSCav1_mut7 (opt2)
gggagacuuucccauucuguagcagaauuugguguugccuguggucuuggucccgcggagaagcuuaccauggagcuccccauccucaagaccaacgccaucaccaccauccucgccgccgucacccucugcuucgccuccucccagaacaucaccgaggaguucuaccaguccaccugcuccgccgucuccaagggcuaccucuccgcccuccgcaccggcugguacaccuccgucaucaccaucgagcucuccaacaucaaggagaacaagugcaacggcaccgacgccaaggucaagcucaucaagcaggagcucgacaaguacaagaacgccgucaccgagcuccagaugcucaugugcuccacccccgccgccggcuccggcuccgccaucgccuccggcaucgccgucugcaagguccuccaccucgagggcgaggucaacaagaucaagaacgcccuccucuccaccaacaaggccgucgucucccucuccaacggcgucuccguccucaccuucaagguccucgaccucaagaacuacaucgacaagcagcuccuccccauccucaacaagcaguccugcuccaucuccaacaucgagaccgucauggaguuccagcagaagaacaaccgccuccucgagaucacccgcgaguucuccgucaacgccggcgucaccacccccgucuccaccuacaugcucaccaacuccgagcuccucucccucaucaacgacaugcccaucaccaacgaccagaagaagcucauguccaacaacguccagaucguccgccagcaguccuacuccaucaugugcaucaucaaggaggagguccucgccuacgucguccagcucccccucuacggcgucaucgacacccccugcuggaagcuccacaccuccccccucugcaccaccaacaccaaggagggcuccaacaucugccucacccgcaccgaccgcggcugguacugcgacaacgccggcuccgucuccuucuucccccaggccgagaccugcaaggucugcuccaaccgcgucuucugcgacaccaugaacucccucacccuccccuccgaggucaaccucugcaacaucgacaucuucaaccccaaguacgacugcaagaucaugaccuccaagaccgacgucuccuccuccgucaucaccucccucggcgccaucgucuccugcuacggcaagaccaagugcaccgccuccaacaagaacaagggcaucaucaagaccuucuccaacggcugcgacuacgucuccaacaagggcgucgacaccgucuccgucggcaacacccucuacuacgucaacaagcaggagggcaagucccucuacgucaagggcgagcccaucaucaacuucuacgacccccucgucuuccccuccgacgaguucgacgccuccaucucccaggucaacgagaagaucaaccagucccucgccuucauccgcaaguccgacgagcuccuccacaacgucaacgucggcaaguccaccaccaacaucaugaucaccaccaucaucaucgucaucaucgucauccuccuccuccucaucgccgucggccucuuccucuacugcaaggcccgcuccacccccgucacccucuccaaggaccagcucuccggcaucaacaacaucgccuucuccaacugaggacuaguggaagcauuuuccuggcugauuaaaagaaauuacucagcuauggucaucuguuccuguuagaaggcuaugcagcauauuauauacuaugcgcauguuaugaaaugcauaauaaaaaauuuuaaaaaaucuaaaagaucuaaaaaaaaaaaaaaaaaaaaaaaaaaaaaaaaaaaaaaaaaaaaaaaaaaaaaaaaaaaaaaaaugcaucccccccccccccccccccccccccccccccaaaggcucuuuucagagccaccagaauu

SEQ ID NO: 18628 - RNA, 1952 nt, Artificial Sequence
  mRNA product Design g-1 comprising derived and/or modified sequence from HRSV(Memphis-37)__AIY60640.1__F_DSCav1_mut7 (opt3)
gggagacuuucccauucuguagcagaauuugguguugccuguggucuuggucccgcggagaagcuuaccauggagcugcccauccucaagaccaacgccauuacaacuauacuugcugcagugacgcugugcuucgccagcucccagaauaucaccgaagaguuuuaccaaucuacauguucagcggucaguaaaggcuauuugagcgcuuuaagaacugggugguacaccuccguuauuacaaucgaacugucuaacauuaaggagaauaaaugcaacggaaccgacgccaaggugaaacuaaucaagcaggaacucgauaaguauaaaaaugcaguaacugagcugcagaugcuuauguguucgaccccugccgcugguucaggcagcgcaauagccagugggaucgcugugugcaagguccugcacuuggagggagaagugaacaaaauuaagaaugcccuccuguccacaaacaaagcgguugugucucugagcaauggcgucuccgugcucacguucaagguauuagaccugaagaacuacaucgauaaacagcuuuugccaauucugaauaagcaaucauguaguaucagcaacauagagacuguuauggaauuucagcagaaaaauaacaggcuacucgagauuacccgggaguucucugugaaugccggugucacaacuccgguguccaccuauaugcugacaaacucagaacuucugagcuugaucaacgacaugcccauuaccaaugaucagaagaaacucaugaguaacaaugugcaaaucguccgccagcagucuuacuccaucaugugcauuauaaaggaggaaguucuggcauaugugguacaguuaccucuguacggggugaucgacacgccauguuggaaacuccauacuagcccccuuugcacaaccaacacuaaggagggaucgaauauuugucugacacgaaccgaucguggcugguacugcgacaacgcuggcucugucuccuuuuucccucaagccgaaacguguaaggugugcucaaauagaguguuuugcgauaccaugaacaguuugacacuaccaagcgagguuaaucuguguaacaucgacauauucaaucccaaauaugauugcaagauuaugacuuccaaaaccgacgucucuagcucagugaucacaagucucggggcaaucguauccuguuacggaaagacuaaaugcaccgcuagcaacaagaauaaggguauuaucaaaacauuuucuaacggcugugauuauguuucaaauaaggggguggacaccgucagugugggaaacacucuguacuaugucaacaaacaggagggcaagagccuuuacgugaaaggugaaccuauuauaaauuucuaugacccacugguuuuuccguccgaugaguucgacgccucuaucagccaggugaacgaaaagauuaaucaaucguuggcguuuaucaggaaguccgaugagcuccugcacaacguaaaugucgggaaaucaacgacaaacaucaugauuaccacuauaaucauugugaucauuguuaucuuacugcuacucauagccgugggacuguuccuuuacugcaaggcacggaguacccccgucacauugucuaaagaccagcugagcggcaucaauaacauugcuuucuccaauugaggacuaguggaagcauuuuccuggcugauuaaaagaaauuacucagcuauggucaucuguuccuguuagaaggcuaugcagcauauuauauacuaugcgcauguuaugaaaugcauaauaaaaaauuuuaaaaaaucuaaaagaucuaaaaaaaaaaaaaaaaaaaaaaaaaaaaaaaaaaaaaaaaaaaaaaaaaaaaaaaaaaaaaaaaugcaucccccccccccccccccccccccccccccccaaaggcucuuuucagagccaccagaauu

SEQ ID NO: 18629 - RNA, 1952 nt, Artificial Sequence
  mRNA product Design g-1 comprising derived and/or modified sequence from HRSV(Memphis-37)__AIY60640.1__F_DSCav1_mut7 (opt4)
gggagacuuucccauucuguagcagaauuugguguugccuguggucuuggucccgcggagaagcuuaccauggagcugcccauccugaagaccaacgccaucaccaccauccuggccgccgugacccugugcuucgccagcagccagaacaucaccgaggaguucuaccagagcaccugcagcgccgugagcaagggcuaccugagcgcccugagaaccggcugguacaccagcgugaucaccaucgagcugagcaacaucaaggagaacaagugcaacggcaccgacgccaaggugaagcugaucaagcaggagcuggacaaguacaagaacgccgugaccgagcugcagaugcugaugugcagcacccccgccgccggcagcggcagcgccaucgccagcggcaucgccgugugcaaggugcugcaccuggagggcgaggugaacaagaucaagaacgcccugcugagcaccaacaaggccguggugagccugagcaacggcgugagcgugcugaccuucaaggugcuggaccugaagaacuacaucgacaagcagcugcugcccauccugaacaagcagagcugcagcaucagcaacaucgagaccgugauggaguuccagcagaagaacaacagacugcuggagaucaccagagaguucagcgugaacgccggcgugaccacccccgugagcaccuacaugcugaccaacagcgagcugcugagccugaucaacgacaugcccaucaccaacgaccagaagaagcugaugagcaacaacgugcagaucgugagacagcagagcuacagcaucaugugcaucaucaaggaggaggugcuggccuacguggugcagcugccccuguacggcgugaucgacacccccugcuggaagcugcacaccagcccccugugcaccaccaacaccaaggagggcagcaacaucugccugaccagaaccgacagaggcugguacugcgacaacgccggcagcgugagcuucuucccccaggccgagaccugcaaggugugcagcaacagaguguucugcgacaccaugaacagccugacccugcccagcgaggugaaccugugcaacaucgacaucuucaaccccaaguacgacugcaagaucaugaccagcaagaccgacgugagcagcagcgugaucaccagccugggcgccaucgugagcugcuacggcaagaccaagugcaccgccagcaacaagaacaagggcaucaucaagaccuucagcaacggcugcgacuacgugagcaacaagggcguggacaccgugagcgugggcaacacccuguacuacgugaacaagcaggagggcaagagccuguacgugaagggcgagcccaucaucaacuucuacgacccccugguguuccccagcgacgaguucgacgccagcaucagccaggugaacgagaagaucaaccagagccuggccuucaucagaaagagcgacgagcugcugcacaacgugaacgugggcaagagcaccaccaacaucaugaucaccaccaucaucaucgugaucaucgugauccugcugcugcugaucgccgugggccuguuccuguacugcaaggccagaagcacccccgugacccugagcaaggaccagcugagcggcaucaacaacaucgccuucagcaacugaggacuaguggaagcauuuuccuggcugauuaaaagaaauuacucagcuauggucaucuguuccuguuagaaggcuaugcagcauauuauauacuaugcgcauguuaugaaaugcauaauaaaaaauuuuaaaaaaucuaaaagaucuaaaaaaaaaaaaaaaaaaaaaaaaaaaaaaaaaaaaaaaaaaaaaaaaaaaaaaaaaaaaaaaaugcaucccccccccccccccccccccccccccccccaaaggcucuuuucagagccaccagaauu

SEQ ID NO: 18630 - RNA, 1952 nt, Artificial Sequence
  mRNA product Design g-1 comprising derived and/or modified sequence from HRSV(Memphis-37)__AIY60640.1__F_DSCav1_mut7 (opt5)
gggagacuuucccauucuguagcagaauuugguguugccuguggucuuggucccgcggagaagcuuaccauggagcugcccauccucaagaccaacgccauuacaacgauccuggcugccgugacccuuugcuucgcgagcucccagaauauuacagaagaguuuuaccaaucuaccuguagcgcugucuccaaaggcuaucugucugcccucagaacagggugguacaccagcguuaucacaauugaacuguccaacaucaaggagaauaaaugcaacggaaccgacgccaaggugaaacuuaucaagcaggaacuggauaaguauaaaaaugcugugacggagcuccagaugcugauguguucuaccccugccgcuggcagcggguccgccauugcgagcggaaucgccgucugcaaggugcugcaccucgagggcgaaguuaacaaaauuaagaaugcucugcuuucuacaaacaaagccguggucucccugagcaauggggugucuguucucaccuucaaggugcuggaccuuaagaacuacaucgauaaacagcugcucccgauucugaauaagcaauccuguagcaucucuaacauugagacagucauggaauuucagcagaaaaauaaccggcugcucgagaucacccgcgaguucuccgugaaugcuggagugacgacacccgucagcaccuauaugcugacaaacuccgaacuucugucucucaucaacgacaugccuauuaccaaugaucagaagaaacugaugagcaacaauguucaaaucgugagacagcaguccuacagcauuaugugcaucauuaaggaggaagugcuugccuaugucgugcagcugccccucuacggcguuaucgacaccccuuguuggaaacugcauacaucuccccugugcacgaccaacacaaaggagggcuccaauaucugucucacccggacagaucgcgggugguacugcgacaacgcgggaagcgugagcuuuuucccucaagccgaaaccuguaaggucugcucuaauagaguguuuugcgauacgaugaacucccugacacuuccgucugagguuaaucuguguaacauugacaucuucaaucccaaauaugauugcaagauuaugaccagcaaaaccgacguguccagcucugucaucacaucccucggcgcuauugugagcuguuacgggaagaccaaaugcacagccucuaacaagaauaagggaaucaucaaaacguuuuccaacggcugugauuaugucagcaauaaggggguggacaccguuuccgugggaaacacacuguacuaugucaacaaacaggagggcaagucucuuuacgugaaaggcgaaccuauuaucaauuucuaugacccccugguuuuuccuagcgaugaguucgacgcuuccauuucucaggugaacgaaaagaucaaucaaagccucgccuuuauucggaaguccgaugagcugcugcacaacgucaauguggggaaaagcaccacaaacaucaugauuaccacgaucaucauugugaucauuguuauccuccugcuucugauugccgucggacucuuccuguacugcaaggcucgcucuacccccgugacacuguccaaagaccagcuuagcggcaucaauaacaucgcguucucuaauugaggacuaguggaagcauuuuccuggcugauuaaaagaaauuacucagcuauggucaucuguuccuguuagaaggcuaugcagcauauuauauacuaugcgcauguuaugaaaugcauaauaaaaaauuuuaaaaaaucuaaaagaucuaaaaaaaaaaaaaaaaaaaaaaaaaaaaaaaaaaaaaaaaaaaaaaaaaaaaaaaaaaaaaaaaugcaucccccccccccccccccccccccccccccccaaaggcucuuuucagagccaccagaauu

SEQ ID NO: 18631 - RNA, 1952 nt, Artificial Sequence
  mRNA product Design g-1 comprising derived and/or modified sequence from HRSV(Memphis-37)__AIY60640.1__F_DSCav1_mut7 (opt6)
gggagacuuucccauucuguagcagaauuugguguugccuguggucuuggucccgcggagaagcuuaccauggaacuaccaauacucaaaacaaaugcuauaaccacaauacucgcagcaguaacauuauguuucgcaucaucccaaaacauaacagaagaauuuuaucaaucaaccuguucagcaguauccaaaggauaccuaagugcauuaagaaccggaugguacacaucaguaauaaccauagaacuuucaaacauaaaagaaaacaaauguaacggcacagacgcaaaagucaaacucaucaaacaggaacuugacaaauauaaaaacgcaguaaccgaacuacaaaugcuaaugugcucaacaccagcagcaggaucaggaucagcaauugcaucuggaauagcuguaugcaaaguccuacaccuagaaggagaaguaaacaaaaucaaaaacgcauuacucuccacaaacaaagcaguaguaucacuaucaaacggaguuucaguacuaaccuucaaaguauuagaccuaaaaaacuacauagacaaacaacuacuaccuauacuaaacaaacaauccuguucaauaagcaacauugaaacuguaauggaauuucaacaaaaaaacaaccgccuauuagaaauaaccagagaauuuuccguaaaugcaggaguaaccacaccagucucuacauacauguuaaccaacucagaacuauuaucacucauaaaugacaugccuauaacaaacgaccaaaaaaaacuaaugucaaacaacguacaaauaguaagacaacaaucauauuccauaaugugcauaauaaaagaagaaguacuugcauacgugguucaacuaccccuauauggaguuauagacacaccaugcuggaaacuccacacuuccccacuuugcacaacuaacacaaaagaaggaucaaauauaugccuaaccagaacagaccguggaugguacugcgacaacgcuggaucagucuccuucuuuccacaagcagaaaccugcaaagucugcucaaauagagucuucugugacacaaugaacucacucacccuacccucagaaguaaaccuauguaauauagauauauuuaauccaaaauacgacugcaaaauuaugacaaguaaaacagacguaagcucaucagucauaaccagccuaggagcaauaguauccuguuacggcaaaacaaaaugcacagcuucaaacaaaaacaaaggcauaauaaaaacauucucaaacggaugugacuauguaucaaauaaaggaguugacacaguaucaguuggaaacacacuauacuauguaaacaaacaagaaggaaaaucacuauacguuaaaggcgaacccauaaucaauuucuacgacccccuagucuucccauccgaugaauuugacgcaucaauaucccaaguaaaugaaaaaaucaaccaaucccuagcauuuauacgaaaauccgacgaacuacuccauaaugucaacgucgguaaaucaacgacaaacaucaugaucacaacaauaauaauaguaauaauuguaauauuacucuuacucauagcaguaggccuauuucuauauugcaaagccagaucaacaccaguaaccuuauccaaagaccaacuaucuggaauaaacaacauagcauuuuccaacugaggacuaguggaagcauuuuccuggcugauuaaaagaaauuacucagcuauggucaucuguuccuguuagaaggcuaugcagcauauuauauacuaugcgcauguuaugaaaugcauaauaaaaaauuuuaaaaaaucuaaaagaucuaaaaaaaaaaaaaaaaaaaaaaaaaaaaaaaaaaaaaaaaaaaaaaaaaaaaaaaaaaaaaaaaugcaucccccccccccccccccccccccccccccccaaaggcucuuuucagagccaccagaauu

SEQ ID NO: 18632 - RNA, 1952 nt, Artificial Sequence
  mRNA product Design g-1 comprising derived and/or modified sequence from HRSV(Memphis-37)__AIY60640.1__F_DSCav1_mut7 (opt11)
gggagacuuucccauucuguagcagaauuugguguugccuguggucuuggucccgcggagaagcuuaccauggaacuccccauacuuaaaacaaacgccauaacaacuauacucgcagccgucacccucuguuucgcauccucucaaaacaucaccgaagaguucuaucaaucaaccugcuccgccgucucaaaaggcuaccucuccgcccuacgcacaggcugguacaccagcgucauuaccauagaacucucgaacaucaaagaaaacaaaugcaacggcaccgacgcaaaagugaaacucaucaaacaagaacucgacaaauacaaaaacgccgucaccgaacuucagaugcucaugugcuccaccccugccgccggcagcggcuccgccauagccuccggcaucgcagucugcaaaguccuccaccucgaaggagaaguaaacaaaaucaaaaaugcucuccucuccacaaacaaagccgucgucucacucuccaauggagucuccguccucaccuucaaaguccucgaccucaaaaacuacauagacaaacaacuacuccccauccucaacaagcaauccugcucuaucuccaacauagaaaccguuauggaguuccaacagaaaaauaaccgccugcuagaaauaacccgagaguucuccgucaacgcaggcgucacuacccccgucagcacauacaugcuaacaaacuccgaacugcucucccuuaucaacgacaugcccaucacaaacgaucagaaaaagcucaugucuaacaacguacaaaucguucggcaacaauccuacuccaucaugugcaucaucaaagaagaagugcucgccuacguaguccaacucccccucuacggagucaucgacacacccugcuggaaacuccacacaucaccccucugcaccaccaacacaaaagaaggguccaacaucugccucacgcgcaccgaccgaggcugguacugcgacaacgccggcuccguauccuucuucccccaagcagaaaccugcaaggucugcuccaaccgcguauucugcgacaccaugaacucgcucacccuccccucagaagucaaccuauguaacaucgacauauucaaucccaaauacgacugcaagauaaugacuuccaaaaccgacguaagcuccucggucaucaccucccucggcgccaucgucuccugcuacggcaaaaccaaaugcaccgccuccaauaagaauaaaggcauaauaaagacauucagcaacggcugcgauuacgucuccaacaaaggugucgacaccgucucagucggcaacacucuauacuacgugaacaaacaagaaggcaaaagccuauacguuaaaggcgaaccaauaaucaauuucuacgacccucuagucuuucccucugacgaguucgaugccagcauaagccaagucaacgaaaagaucaaccaaucacucgccuucauccguaaauccgacgaacugcuccacaaugucaauguaggcaaaucaacaaccaacaucaugaucaccacuauuaucaucgucaucaucguaauccuacuccuacuaaucgccgucggccuauuccucuacugcaaagcccgcucgacccccgucacucucagcaaggaucaacuauccggcaucaacaacaucgccuucuccaacuaaggacuaguggaagcauuuuccuggcugauuaaaagaaauuacucagcuauggucaucuguuccuguuagaaggcuaugcagcauauuauauacuaugcgcauguuaugaaaugcauaauaaaaaauuuuaaaaaaucuaaaagaucuaaaaaaaaaaaaaaaaaaaaaaaaaaaaaaaaaaaaaaaaaaaaaaaaaaaaaaaaaaaaaaaaugcaucccccccccccccccccccccccccccccccaaaggcucuuuucagagccaccagaauu

SEQ ID NO: 18633 - RNA, 1967 nt, Artificial Sequence
  mRNA product Design g-2 comprising derived and/or modified sequence from HRSV(Memphis-37)__AIY60640.1__F_DSCav1_mut7 (opt1)
gggagaguccgcucagccagguugcagaagcggcuuagcguguguccuaaucuucucucugcguguagguaggccugugccgcaaacaagcuuaccauggagcugcccauccucaagaccaacgccaucaccacgauccuggccgcggugacccugugcuucgccagcucccagaacaucaccgaggaguucuaccagagcacgugcuccgccgucagcaagggcuaccucuccgcccugcgcaccgggugguacaccagcgugaucaccaucgagcuguccaacaucaaggagaacaagugcaacggcaccgacgccaaggugaagcucaucaagcaggagcuggacaaguacaagaacgcggucacggagcugcagaugcugaugugcagcaccccggccgccggcuccgggagcgcgaucgccuccggcaucgccgucugcaaggugcugcaccucgagggcgaggugaacaagaucaagaacgcccugcuguccaccaacaaggccgucgugagccucuccaacggggugagcguccugaccuucaaggugcuggaccucaagaacuacaucgacaagcagcugcugcccauccugaacaagcagagcugcuccaucagcaacaucgagaccgucauggaguuccagcagaagaacaaccgccuccuggagaucacgcgggaguucagcgugaacgcgggcgugaccacccccgucuccaccuacaugcugacgaacagcgagcuccugucccugaucaacgacaugccgaucaccaacgaccagaagaagcucaugagcaacaacgugcagaucgugcgccagcaguccuacagcaucaugugcaucaucaaggaggagguccuggccuacguggugcagcugccccucuacggggucaucgacacccccugcuggaagcugcacaccagcccccugugcacgaccaacaccaaggagggcuccaacaucugccucacccggacggaccgcgggugguacugcgacaacgccggcagcguguccuucuucccgcaggccgagaccugcaaggucugcagcaaccggguguucugcgacaccaugaacucccugacccugcccagcgaggugaaccucugcaacaucgacaucuucaaccccaaguacgacugcaagaucaugacguccaagaccgacgucagcuccagcgugaucaccucccugggcgccaucgugagcugcuacgggaagaccaagugcacggcgagcaacaagaacaagggcaucaucaagaccuucuccaacgggugcgacuacgucagcaacaagggcguggacaccguguccgucggcaacacccuguacuacgugaacaagcaggagggcaagagccucuacgugaagggggagcccaucaucaacuucuacgacccgcuggucuuccccuccgacgaguucgacgccagcaucucccaggugaacgagaagaucaaccagagccuggccuucauccggaaguccgacgagcuccugcacaacgugaacgucggcaagagcaccacgaacaucaugaucaccaccaucaucaucgugaucaucgugauccugcugcuccugaucgccgucgggcuguuccucuacugcaaggcccgcuccacccccgugacgcugagcaaggaccagcuguccgggaucaacaacaucgcguucagcaacugaggacuaguaauaaggaaacuguaugaaugucugugggcaggaagugaagagauccuucuguaaagguuuuuggaauuaugucugcugaauaauaaacuuuuuugaaauaauaaaucugguagaaaaaugagaucuaaaaaaaaaaaaaaaaaaaaaaaaaaaaaaaaaaaaaaaaaaaaaaaaaaaaaaaaaaaaaaaaugcaucccccccccccccccccccccccccccccccaaaggcucuuuucagagccaccagaauu

SEQ ID NO: 18634 - RNA, 1967 nt, Artificial Sequence
  mRNA product Design g-2 comprising derived and/or modified sequence from HRSV(Memphis-37)__AIY60640.1__F_DSCav1_mut7 (opt1)
gggagaguccgcucagccagguugcagaagcggcuuagcguguguccuaaucuucucucugcguguagguaggccugugccgcaaacaagcuuaccauggagcugcccauccucaagaccaacgccaucaccacgauccuggccgcggugacccugugcuucgccagcucccagaacaucaccgaggaguucuaccagagcacgugcuccgccgucagcaagggcuaccucuccgcccugcgcaccgggugguacaccagcgugaucaccaucgagcuguccaacaucaaggagaacaagugcaacggcaccgacgccaaggugaagcucaucaagcaggagcuggacaaguacaagaacgcggucacggagcugcagaugcucaugugcagcaccccggccgccggguccggcagcgccaucgcguccgggaucgccgugugcaaggugcugcaccuggagggcgaggucaacaagaucaagaacgcccuccugagcaccaacaaggccguggugucccugagcaacggcgucuccgugcucaccuucaaggugcuggaccugaagaacuacaucgacaagcagcuccugcccauccugaacaagcagagcugcuccaucagcaacaucgagacggucauggaguuccagcagaagaacaaccggcuccuggagaucacccgcgaguucuccgugaacgccggggugaccacccccgucagcacguacaugcugaccaacagcgagcuccugucccugaucaacgacaugcccaucaccaacgaccagaagaagcucaugagcaacaacgugcagaucgugcggcagcaguccuacagcaucaugugcaucaucaaggaggagguccuggcguacguggugcagcugccgcucuacggcgucaucgacacccccugcuggaagcugcacacgagcccccugugcaccaccaacaccaaggaggggagcaacaucugccucacgcgcaccgaccggggcugguacugcgacaacgccggguccgugagcuucuucccccaggccgagaccugcaaggugugcuccaaccgcgucuucugcgacaccaugaacagccugacgcugccguccgaggugaaccucugcaacaucgacaucuucaaccccaaguacgacugcaagaucaugaccagcaagaccgacgucuccagcuccgugaucaccagccugggcgccaucguguccugcuacggcaagacgaagugcaccgccagcaacaagaacaaggggaucaucaagaccuucuccaacggcugcgacuacgucagcaacaaggggguggacaccgugagcgucggcaacacgcuguacuacgugaacaagcaggagggcaagucccucuacgugaagggggagcccaucaucaacuucuacgacccccuggucuucccgagcgacgaguucgacgcguccaucagccaggugaacgagaagaucaaccagucccuggccuucauccggaaguccgacgagcuccugcacaacgugaacgucggcaaguccaccaccaacaucaugaucaccaccaucaucaucgugaucaucgugauccugcuccugcugaucgccgucggccucuuccuguacugcaaggcccgcagcacgcccgugacccuguccaaggaccagcugagcgggaucaacaacaucgccuucuccaacugaggacuaguaauaaggaaacuguaugaaugucugugggcaggaagugaagagauccuucuguaaagguuuuuggaauuaugucugcugaauaauaaacuuuuuugaaauaauaaaucugguagaaaaaugagaucuaaaaaaaaaaaaaaaaaaaaaaaaaaaaaaaaaaaaaaaaaaaaaaaaaaaaaaaaaaaaaaaaugcaucccccccccccccccccccccccccccccccaaaggcucuuuucagagccaccagaauu

SEQ ID NO: 18635 - RNA, 1967 nt, Artificial Sequence
  mRNA product Design g-2 comprising derived and/or modified sequence from HRSV(Memphis-37)__AIY60640.1__F_DSCav1_mut7 (opt2)
gggagaguccgcucagccagguugcagaagcggcuuagcguguguccuaaucuucucucugcguguagguaggccugugccgcaaacaagcuuaccauggagcuccccauccucaagaccaacgccaucaccaccauccucgccgccgucacccucugcuucgccuccucccagaacaucaccgaggaguucuaccaguccaccugcuccgccgucuccaagggcuaccucuccgcccuccgcaccggcugguacaccuccgucaucaccaucgagcucuccaacaucaaggagaacaagugcaacggcaccgacgccaaggucaagcucaucaagcaggagcucgacaaguacaagaacgccgucaccgagcuccagaugcucaugugcuccacccccgccgccggcuccggcuccgccaucgccuccggcaucgccgucugcaagguccuccaccucgagggcgaggucaacaagaucaagaacgcccuccucuccaccaacaaggccgucgucucccucuccaacggcgucuccguccucaccuucaagguccucgaccucaagaacuacaucgacaagcagcuccuccccauccucaacaagcaguccugcuccaucuccaacaucgagaccgucauggaguuccagcagaagaacaaccgccuccucgagaucacccgcgaguucuccgucaacgccggcgucaccacccccgucuccaccuacaugcucaccaacuccgagcuccucucccucaucaacgacaugcccaucaccaacgaccagaagaagcucauguccaacaacguccagaucguccgccagcaguccuacuccaucaugugcaucaucaaggaggagguccucgccuacgucguccagcucccccucuacggcgucaucgacacccccugcuggaagcuccacaccuccccccucugcaccaccaacaccaaggagggcuccaacaucugccucacccgcaccgaccgcggcugguacugcgacaacgccggcuccgucuccuucuucccccaggccgagaccugcaaggucugcuccaaccgcgucuucugcgacaccaugaacucccucacccuccccuccgaggucaaccucugcaacaucgacaucuucaaccccaaguacgacugcaagaucaugaccuccaagaccgacgucuccuccuccgucaucaccucccucggcgccaucgucuccugcuacggcaagaccaagugcaccgccuccaacaagaacaagggcaucaucaagaccuucuccaacggcugcgacuacgucuccaacaagggcgucgacaccgucuccgucggcaacacccucuacuacgucaacaagcaggagggcaagucccucuacgucaagggcgagcccaucaucaacuucuacgacccccucgucuuccccuccgacgaguucgacgccuccaucucccaggucaacgagaagaucaaccagucccucgccuucauccgcaaguccgacgagcuccuccacaacgucaacgucggcaaguccaccaccaacaucaugaucaccaccaucaucaucgucaucaucgucauccuccuccuccucaucgccgucggccucuuccucuacugcaaggcccgcuccacccccgucacccucuccaaggaccagcucuccggcaucaacaacaucgccuucuccaacugaggacuaguaauaaggaaacuguaugaaugucugugggcaggaagugaagagauccuucuguaaagguuuuuggaauuaugucugcugaauaauaaacuuuuuugaaauaauaaaucugguagaaaaaugagaucuaaaaaaaaaaaaaaaaaaaaaaaaaaaaaaaaaaaaaaaaaaaaaaaaaaaaaaaaaaaaaaaaugcaucccccccccccccccccccccccccccccccaaaggcucuuuucagagccaccagaauu

SEQ ID NO: 18636 - RNA, 1967 nt, Artificial Sequence
  mRNA product Design g-2 comprising derived and/or modified sequence from HRSV(Memphis-37)__AIY60640.1__F_DSCav1_mut7 (opt3)
gggagaguccgcucagccagguugcagaagcggcuuagcguguguccuaaucuucucucugcguguagguaggccugugccgcaaacaagcuuaccauggagcugcccauccucaagaccaacgccauuacaacuauacuugcugcagugacgcugugcuucgccagcucccagaauaucaccgaagaguuuuaccaaucuacauguucagcggucaguaaaggcuauuugagcgcuuuaagaacugggugguacaccuccguuauuacaaucgaacugucuaacauuaaggagaauaaaugcaacggaaccgacgccaaggugaaacuaaucaagcaggaacucgauaaguauaaaaaugcaguaacugagcugcagaugcuuauguguucgaccccugccgcugguucaggcagcgcaauagccagugggaucgcugugugcaagguccugcacuuggagggagaagugaacaaaauuaagaaugcccuccuguccacaaacaaagcgguugugucucugagcaauggcgucuccgugcucacguucaagguauuagaccugaagaacuacaucgauaaacagcuuuugccaauucugaauaagcaaucauguaguaucagcaacauagagacuguuauggaauuucagcagaaaaauaacaggcuacucgagauuacccgggaguucucugugaaugccggugucacaacuccgguguccaccuauaugcugacaaacucagaacuucugagcuugaucaacgacaugcccauuaccaaugaucagaagaaacucaugaguaacaaugugcaaaucguccgccagcagucuuacuccaucaugugcauuauaaaggaggaaguucuggcauaugugguacaguuaccucuguacggggugaucgacacgccauguuggaaacuccauacuagcccccuuugcacaaccaacacuaaggagggaucgaauauuugucugacacgaaccgaucguggcugguacugcgacaacgcuggcucugucuccuuuuucccucaagccgaaacguguaaggugugcucaaauagaguguuuugcgauaccaugaacaguuugacacuaccaagcgagguuaaucuguguaacaucgacauauucaaucccaaauaugauugcaagauuaugacuuccaaaaccgacgucucuagcucagugaucacaagucucggggcaaucguauccuguuacggaaagacuaaaugcaccgcuagcaacaagaauaaggguauuaucaaaacauuuucuaacggcugugauuauguuucaaauaaggggguggacaccgucagugugggaaacacucuguacuaugucaacaaacaggagggcaagagccuuuacgugaaaggugaaccuauuauaaauuucuaugacccacugguuuuuccguccgaugaguucgacgccucuaucagccaggugaacgaaaagauuaaucaaucguuggcguuuaucaggaaguccgaugagcuccugcacaacguaaaugucgggaaaucaacgacaaacaucaugauuaccacuauaaucauugugaucauuguuaucuuacugcuacucauagccgugggacuguuccuuuacugcaaggcacggaguacccccgucacauugucuaaagaccagcugagcggcaucaauaacauugcuuucuccaauugaggacuaguaauaaggaaacuguaugaaugucugugggcaggaagugaagagauccuucuguaaagguuuuuggaauuaugucugcugaauaauaaacuuuuuugaaauaauaaaucugguagaaaaaugagaucuaaaaaaaaaaaaaaaaaaaaaaaaaaaaaaaaaaaaaaaaaaaaaaaaaaaaaaaaaaaaaaaaugcaucccccccccccccccccccccccccccccccaaaggcucuuuucagagccaccagaauu

SEQ ID NO: 18637 - RNA, 1967 nt, Artificial Sequence
  mRNA product Design g-2 comprising derived and/or modified sequence from HRSV(Memphis-37)__AIY60640.1__F_DSCav1_mut7 (opt4)
gggagaguccgcucagccagguugcagaagcggcuuagcguguguccuaaucuucucucugcguguagguaggccugugccgcaaacaagcuuaccauggagcugcccauccugaagaccaacgccaucaccaccauccuggccgccgugacccugugcuucgccagcagccagaacaucaccgaggaguucuaccagagcaccugcagcgccgugagcaagggcuaccugagcgcccugagaaccggcugguacaccagcgugaucaccaucgagcugagcaacaucaaggagaacaagugcaacggcaccgacgccaaggugaagcugaucaagcaggagcuggacaaguacaagaacgccgugaccgagcugcagaugcugaugugcagcacccccgccgccggcagcggcagcgccaucgccagcggcaucgccgugugcaaggugcugcaccuggagggcgaggugaacaagaucaagaacgcccugcugagcaccaacaaggccguggugagccugagcaacggcgugagcgugcugaccuucaaggugcuggaccugaagaacuacaucgacaagcagcugcugcccauccugaacaagcagagcugcagcaucagcaacaucgagaccgugauggaguuccagcagaagaacaacagacugcuggagaucaccagagaguucagcgugaacgccggcgugaccacccccgugagcaccuacaugcugaccaacagcgagcugcugagccugaucaacgacaugcccaucaccaacgaccagaagaagcugaugagcaacaacgugcagaucgugagacagcagagcuacagcaucaugugcaucaucaaggaggaggugcuggccuacguggugcagcugccccuguacggcgugaucgacacccccugcuggaagcugcacaccagcccccugugcaccaccaacaccaaggagggcagcaacaucugccugaccagaaccgacagaggcugguacugcgacaacgccggcagcgugagcuucuucccccaggccgagaccugcaaggugugcagcaacagaguguucugcgacaccaugaacagccugacccugcccagcgaggugaaccugugcaacaucgacaucuucaaccccaaguacgacugcaagaucaugaccagcaagaccgacgugagcagcagcgugaucaccagccugggcgccaucgugagcugcuacggcaagaccaagugcaccgccagcaacaagaacaagggcaucaucaagaccuucagcaacggcugcgacuacgugagcaacaagggcguggacaccgugagcgugggcaacacccuguacuacgugaacaagcaggagggcaagagccuguacgugaagggcgagcccaucaucaacuucuacgacccccugguguuccccagcgacgaguucgacgccagcaucagccaggugaacgagaagaucaaccagagccuggccuucaucagaaagagcgacgagcugcugcacaacgugaacgugggcaagagcaccaccaacaucaugaucaccaccaucaucaucgugaucaucgugauccugcugcugcugaucgccgugggccuguuccuguacugcaaggccagaagcacccccgugacccugagcaaggaccagcugagcggcaucaacaacaucgccuucagcaacugaggacuaguaauaaggaaacuguaugaaugucugugggcaggaagugaagagauccuucuguaaagguuuuuggaauuaugucugcugaauaauaaacuuuuuugaaauaauaaaucugguagaaaaaugagaucuaaaaaaaaaaaaaaaaaaaaaaaaaaaaaaaaaaaaaaaaaaaaaaaaaaaaaaaaaaaaaaaaugcaucccccccccccccccccccccccccccccccaaaggcucuuuucagagccaccagaauu

SEQ ID NO: 18638 - RNA, 1967 nt, Artificial Sequence
  mRNA product Design g-2 comprising derived and/or modified sequence from HRSV(Memphis-37)__AIY60640.1__F_DSCav1_mut7 (opt5)
gggagaguccgcucagccagguugcagaagcggcuuagcguguguccuaaucuucucucugcguguagguaggccugugccgcaaacaagcuuaccauggagcugcccauccucaagaccaacgccauuacaacgauccuggcugccgugacccuuugcuucgcgagcucccagaauauuacagaagaguuuuaccaaucuaccuguagcgcugucuccaaaggcuaucugucugcccucagaacagggugguacaccagcguuaucacaauugaacuguccaacaucaaggagaauaaaugcaacggaaccgacgccaaggugaaacuuaucaagcaggaacuggauaaguauaaaaaugcugugacggagcuccagaugcugauguguucuaccccugccgcuggcagcggguccgccauugcgagcggaaucgccgucugcaaggugcugcaccucgagggcgaaguuaacaaaauuaagaaugcucugcuuucuacaaacaaagccguggucucccugagcaauggggugucuguucucaccuucaaggugcuggaccuuaagaacuacaucgauaaacagcugcucccgauucugaauaagcaauccuguagcaucucuaacauugagacagucauggaauuucagcagaaaaauaaccggcugcucgagaucacccgcgaguucuccgugaaugcuggagugacgacacccgucagcaccuauaugcugacaaacuccgaacuucugucucucaucaacgacaugccuauuaccaaugaucagaagaaacugaugagcaacaauguucaaaucgugagacagcaguccuacagcauuaugugcaucauuaaggaggaagugcuugccuaugucgugcagcugccccucuacggcguuaucgacaccccuuguuggaaacugcauacaucuccccugugcacgaccaacacaaaggagggcuccaauaucugucucacccggacagaucgcgggugguacugcgacaacgcgggaagcgugagcuuuuucccucaagccgaaaccuguaaggucugcucuaauagaguguuuugcgauacgaugaacucccugacacuuccgucugagguuaaucuguguaacauugacaucuucaaucccaaauaugauugcaagauuaugaccagcaaaaccgacguguccagcucugucaucacaucccucggcgcuauugugagcuguuacgggaagaccaaaugcacagccucuaacaagaauaagggaaucaucaaaacguuuuccaacggcugugauuaugucagcaauaaggggguggacaccguuuccgugggaaacacacuguacuaugucaacaaacaggagggcaagucucuuuacgugaaaggcgaaccuauuaucaauuucuaugacccccugguuuuuccuagcgaugaguucgacgcuuccauuucucaggugaacgaaaagaucaaucaaagccucgccuuuauucggaaguccgaugagcugcugcacaacgucaauguggggaaaagcaccacaaacaucaugauuaccacgaucaucauugugaucauuguuauccuccugcuucugauugccgucggacucuuccuguacugcaaggcucgcucuacccccgugacacuguccaaagaccagcuuagcggcaucaauaacaucgcguucucuaauugaggacuaguaauaaggaaacuguaugaaugucugugggcaggaagugaagagauccuucuguaaagguuuuuggaauuaugucugcugaauaauaaacuuuuuugaaauaauaaaucugguagaaaaaugagaucuaaaaaaaaaaaaaaaaaaaaaaaaaaaaaaaaaaaaaaaaaaaaaaaaaaaaaaaaaaaaaaaaugcaucccccccccccccccccccccccccccccccaaaggcucuuuucagagccaccagaauu

SEQ ID NO: 18639 - RNA, 1967 nt, Artificial Sequence
  mRNA product Design g-2 comprising derived and/or modified sequence from HRSV(Memphis-37)__AIY60640.1__F_DSCav1_mut7 (opt6)
gggagaguccgcucagccagguugcagaagcggcuuagcguguguccuaaucuucucucugcguguagguaggccugugccgcaaacaagcuuaccauggaacuaccaauacucaaaacaaaugcuauaaccacaauacucgcagcaguaacauuauguuucgcaucaucccaaaacauaacagaagaauuuuaucaaucaaccuguucagcaguauccaaaggauaccuaagugcauuaagaaccggaugguacacaucaguaauaaccauagaacuuucaaacauaaaagaaaacaaauguaacggcacagacgcaaaagucaaacucaucaaacaggaacuugacaaauauaaaaacgcaguaaccgaacuacaaaugcuaaugugcucaacaccagcagcaggaucaggaucagcaauugcaucuggaauagcuguaugcaaaguccuacaccuagaaggagaaguaaacaaaaucaaaaacgcauuacucuccacaaacaaagcaguaguaucacuaucaaacggaguuucaguacuaaccuucaaaguauuagaccuaaaaaacuacauagacaaacaacuacuaccuauacuaaacaaacaauccuguucaauaagcaacauugaaacuguaauggaauuucaacaaaaaaacaaccgccuauuagaaauaaccagagaauuuuccguaaaugcaggaguaaccacaccagucucuacauacauguuaaccaacucagaacuauuaucacucauaaaugacaugccuauaacaaacgaccaaaaaaaacuaaugucaaacaacguacaaauaguaagacaacaaucauauuccauaaugugcauaauaaaagaagaaguacuugcauacgugguucaacuaccccuauauggaguuauagacacaccaugcuggaaacuccacacuuccccacuuugcacaacuaacacaaaagaaggaucaaauauaugccuaaccagaacagaccguggaugguacugcgacaacgcuggaucagucuccuucuuuccacaagcagaaaccugcaaagucugcucaaauagagucuucugugacacaaugaacucacucacccuacccucagaaguaaaccuauguaauauagauauauuuaauccaaaauacgacugcaaaauuaugacaaguaaaacagacguaagcucaucagucauaaccagccuaggagcaauaguauccuguuacggcaaaacaaaaugcacagcuucaaacaaaaacaaaggcauaauaaaaacauucucaaacggaugugacuauguaucaaauaaaggaguugacacaguaucaguuggaaacacacuauacuauguaaacaaacaagaaggaaaaucacuauacguuaaaggcgaacccauaaucaauuucuacgacccccuagucuucccauccgaugaauuugacgcaucaauaucccaaguaaaugaaaaaaucaaccaaucccuagcauuuauacgaaaauccgacgaacuacuccauaaugucaacgucgguaaaucaacgacaaacaucaugaucacaacaauaauaauaguaauaauuguaauauuacucuuacucauagcaguaggccuauuucuauauugcaaagccagaucaacaccaguaaccuuauccaaagaccaacuaucuggaauaaacaacauagcauuuuccaacugaggacuaguaauaaggaaacuguaugaaugucugugggcaggaagugaagagauccuucuguaaagguuuuuggaauuaugucugcugaauaauaaacuuuuuugaaauaauaaaucugguagaaaaaugagaucuaaaaaaaaaaaaaaaaaaaaaaaaaaaaaaaaaaaaaaaaaaaaaaaaaaaaaaaaaaaaaaaaugcaucccccccccccccccccccccccccccccccaaaggcucuuuucagagccaccagaauu

SEQ ID NO: 18640 - RNA, 1967 nt, Artificial Sequence
  mRNA product Design g-2 comprising derived and/or modified sequence from HRSV(Memphis-37)__AIY60640.1__F_DSCav1_mut7 (opt11)
gggagaguccgcucagccagguugcagaagcggcuuagcguguguccuaaucuucucucugcguguagguaggccugugccgcaaacaagcuuaccauggaacuccccauacuuaaaacaaacgccauaacaacuauacucgcagccgucacccucuguuucgcauccucucaaaacaucaccgaagaguucuaucaaucaaccugcuccgccgucucaaaaggcuaccucuccgcccuacgcacaggcugguacaccagcgucauuaccauagaacucucgaacaucaaagaaaacaaaugcaacggcaccgacgcaaaagugaaacucaucaaacaagaacucgacaaauacaaaaacgccgucaccgaacuucagaugcucaugugcuccaccccugccgccggcagcggcuccgccauagccuccggcaucgcagucugcaaaguccuccaccucgaaggagaaguaaacaaaaucaaaaaugcucuccucuccacaaacaaagccgucgucucacucuccaauggagucuccguccucaccuucaaaguccucgaccucaaaaacuacauagacaaacaacuacuccccauccucaacaagcaauccugcucuaucuccaacauagaaaccguuauggaguuccaacagaaaaauaaccgccugcuagaaauaacccgagaguucuccgucaacgcaggcgucacuacccccgucagcacauacaugcuaacaaacuccgaacugcucucccuuaucaacgacaugcccaucacaaacgaucagaaaaagcucaugucuaacaacguacaaaucguucggcaacaauccuacuccaucaugugcaucaucaaagaagaagugcucgccuacguaguccaacucccccucuacggagucaucgacacacccugcuggaaacuccacacaucaccccucugcaccaccaacacaaaagaaggguccaacaucugccucacgcgcaccgaccgaggcugguacugcgacaacgccggcuccguauccuucuucccccaagcagaaaccugcaaggucugcuccaaccgcguauucugcgacaccaugaacucgcucacccuccccucagaagucaaccuauguaacaucgacauauucaaucccaaauacgacugcaagauaaugacuuccaaaaccgacguaagcuccucggucaucaccucccucggcgccaucgucuccugcuacggcaaaaccaaaugcaccgccuccaauaagaauaaaggcauaauaaagacauucagcaacggcugcgauuacgucuccaacaaaggugucgacaccgucucagucggcaacacucuauacuacgugaacaaacaagaaggcaaaagccuauacguuaaaggcgaaccaauaaucaauuucuacgacccucuagucuuucccucugacgaguucgaugccagcauaagccaagucaacgaaaagaucaaccaaucacucgccuucauccguaaauccgacgaacugcuccacaaugucaauguaggcaaaucaacaaccaacaucaugaucaccacuauuaucaucgucaucaucguaauccuacuccuacuaaucgccgucggccuauuccucuacugcaaagcccgcucgacccccgucacucucagcaaggaucaacuauccggcaucaacaacaucgccuucuccaacuaaggacuaguaauaaggaaacuguaugaaugucugugggcaggaagugaagagauccuucuguaaagguuuuuggaauuaugucugcugaauaauaaacuuuuuugaaauaauaaaucugguagaaaaaugagaucuaaaaaaaaaaaaaaaaaaaaaaaaaaaaaaaaaaaaaaaaaaaaaaaaaaaaaaaaaaaaaaaaugcaucccccccccccccccccccccccccccccccaaaggcucuuuucagagccaccagaauu

SEQ ID NO: 18641 - RNA, 2199 nt, Artificial Sequence
  mRNA product Design g-3 comprising derived and/or modified sequence from HRSV(Memphis-37)__AIY60640.1__F_DSCav1_mut7 (opt1)
gggagaguccgcucagccagguugcagaagcggcuuagcguguguccuaaucuucucucugcguguagguaggccugugccgcaaacaagcuuaccauggagcugcccauccucaagaccaacgccaucaccacgauccuggccgcggugacccugugcuucgccagcucccagaacaucaccgaggaguucuaccagagcacgugcuccgccgucagcaagggcuaccucuccgcccugcgcaccgggugguacaccagcgugaucaccaucgagcuguccaacaucaaggagaacaagugcaacggcaccgacgccaaggugaagcucaucaagcaggagcuggacaaguacaagaacgcggucacggagcugcagaugcugaugugcagcaccccggccgccggcuccgggagcgcgaucgccuccggcaucgccgucugcaaggugcugcaccucgagggcgaggugaacaagaucaagaacgcccugcuguccaccaacaaggccgucgugagccucuccaacggggugagcguccugaccuucaaggugcuggaccucaagaacuacaucgacaagcagcugcugcccauccugaacaagcagagcugcuccaucagcaacaucgagaccgucauggaguuccagcagaagaacaaccgccuccuggagaucacgcgggaguucagcgugaacgcgggcgugaccacccccgucuccaccuacaugcugacgaacagcgagcuccugucccugaucaacgacaugccgaucaccaacgaccagaagaagcucaugagcaacaacgugcagaucgugcgccagcaguccuacagcaucaugugcaucaucaaggaggagguccuggccuacguggugcagcugccccucuacggggucaucgacacccccugcuggaagcugcacaccagcccccugugcacgaccaacaccaaggagggcuccaacaucugccucacccggacggaccgcgggugguacugcgacaacgccggcagcguguccuucuucccgcaggccgagaccugcaaggucugcagcaaccggguguucugcgacaccaugaacucccugacccugcccagcgaggugaaccucugcaacaucgacaucuucaaccccaaguacgacugcaagaucaugacguccaagaccgacgucagcuccagcgugaucaccucccugggcgccaucgugagcugcuacgggaagaccaagugcacggcgagcaacaagaacaagggcaucaucaagaccuucuccaacgggugcgacuacgucagcaacaagggcguggacaccguguccgucggcaacacccuguacuacgugaacaagcaggagggcaagagccucuacgugaagggggagcccaucaucaacuucuacgacccgcuggucuuccccuccgacgaguucgacgccagcaucucccaggugaacgagaagaucaaccagagccuggccuucauccggaaguccgacgagcuccugcacaacgugaacgucggcaagagcaccacgaacaucaugaucaccaccaucaucaucgugaucaucgugauccugcugcuccugaucgccgucgggcuguuccucuacugcaaggcccgcuccacccccgugacgcugagcaaggaccagcuguccgggaucaacaacaucgcguucagcaacugaggacuagugaagggaacacccaaauuuaauucagccuuaagcacaauuaauuaagagugaaacguaauuguacaagcaguuggucacccaccauagggcaugaucaacaccgcaaccuuuccuuuuucccccagugauucugaaaaaccccucuucccuucagcuugcuuagauguuccaaauuuaguaagcuuaaggcggccuacagaagaaaaagaaaaaaaaggccacaaaaguucccucucacuuucaguaaauaaaauaaaagcagcaacagaaauaaagaaauaaaugaaauucaaaaugaaauaaauauuguguugugcagcauuaaaaaaucaauaaaaauuaaaaaugagcaagaucuaaaaaaaaaaaaaaaaaaaaaaaaaaaaaaaaaaaaaaaaaaaaaaaaaaaaaaaaaaaaaaaaugcaucccccccccccccccccccccccccccccccaaaggcucuuuucagagccaccagaauu

SEQ ID NO: 18642 - RNA, 2199 nt, Artificial Sequence
  mRNA product Design g-3 comprising derived and/or modified sequence from HRSV(Memphis-37)__AIY60640.1__F_DSCav1_mut7 (opt1)
gggagaguccgcucagccagguugcagaagcggcuuagcguguguccuaaucuucucucugcguguagguaggccugugccgcaaacaagcuuaccauggagcugcccauccucaagaccaacgccaucaccacgauccuggccgcggugacccugugcuucgccagcucccagaacaucaccgaggaguucuaccagagcacgugcuccgccgucagcaagggcuaccucuccgcccugcgcaccgggugguacaccagcgugaucaccaucgagcuguccaacaucaaggagaacaagugcaacggcaccgacgccaaggugaagcucaucaagcaggagcuggacaaguacaagaacgcggucacggagcugcagaugcucaugugcagcaccccggccgccggguccggcagcgccaucgcguccgggaucgccgugugcaaggugcugcaccuggagggcgaggucaacaagaucaagaacgcccuccugagcaccaacaaggccguggugucccugagcaacggcgucuccgugcucaccuucaaggugcuggaccugaagaacuacaucgacaagcagcuccugcccauccugaacaagcagagcugcuccaucagcaacaucgagacggucauggaguuccagcagaagaacaaccggcuccuggagaucacccgcgaguucuccgugaacgccggggugaccacccccgucagcacguacaugcugaccaacagcgagcuccugucccugaucaacgacaugcccaucaccaacgaccagaagaagcucaugagcaacaacgugcagaucgugcggcagcaguccuacagcaucaugugcaucaucaaggaggagguccuggcguacguggugcagcugccgcucuacggcgucaucgacacccccugcuggaagcugcacacgagcccccugugcaccaccaacaccaaggaggggagcaacaucugccucacgcgcaccgaccggggcugguacugcgacaacgccggguccgugagcuucuucccccaggccgagaccugcaaggugugcuccaaccgcgucuucugcgacaccaugaacagccugacgcugccguccgaggugaaccucugcaacaucgacaucuucaaccccaaguacgacugcaagaucaugaccagcaagaccgacgucuccagcuccgugaucaccagccugggcgccaucguguccugcuacggcaagacgaagugcaccgccagcaacaagaacaaggggaucaucaagaccuucuccaacggcugcgacuacgucagcaacaaggggguggacaccgugagcgucggcaacacgcuguacuacgugaacaagcaggagggcaagucccucuacgugaagggggagcccaucaucaacuucuacgacccccuggucuucccgagcgacgaguucgacgcguccaucagccaggugaacgagaagaucaaccagucccuggccuucauccggaaguccgacgagcuccugcacaacgugaacgucggcaaguccaccaccaacaucaugaucaccaccaucaucaucgugaucaucgugauccugcuccugcugaucgccgucggccucuuccuguacugcaaggcccgcagcacgcccgugacccuguccaaggaccagcugagcgggaucaacaacaucgccuucuccaacugaggacuagugaagggaacacccaaauuuaauucagccuuaagcacaauuaauuaagagugaaacguaauuguacaagcaguuggucacccaccauagggcaugaucaacaccgcaaccuuuccuuuuucccccagugauucugaaaaaccccucuucccuucagcuugcuuagauguuccaaauuuaguaagcuuaaggcggccuacagaagaaaaagaaaaaaaaggccacaaaaguucccucucacuuucaguaaauaaaauaaaagcagcaacagaaauaaagaaauaaaugaaauucaaaaugaaauaaauauuguguugugcagcauuaaaaaaucaauaaaaauuaaaaaugagcaagaucuaaaaaaaaaaaaaaaaaaaaaaaaaaaaaaaaaaaaaaaaaaaaaaaaaaaaaaaaaaaaaaaaugcaucccccccccccccccccccccccccccccccaaaggcucuuuucagagccaccagaauu

SEQ ID NO: 18643 - RNA, 2199 nt, Artificial Sequence
  mRNA product Design g-3 comprising derived and/or modified sequence from HRSV(Memphis-37)__AIY60640.1__F_DSCav1_mut7 (opt2)
gggagaguccgcucagccagguugcagaagcggcuuagcguguguccuaaucuucucucugcguguagguaggccugugccgcaaacaagcuuaccauggagcuccccauccucaagaccaacgccaucaccaccauccucgccgccgucacccucugcuucgccuccucccagaacaucaccgaggaguucuaccaguccaccugcuccgccgucuccaagggcuaccucuccgcccuccgcaccggcugguacaccuccgucaucaccaucgagcucuccaacaucaaggagaacaagugcaacggcaccgacgccaaggucaagcucaucaagcaggagcucgacaaguacaagaacgccgucaccgagcuccagaugcucaugugcuccacccccgccgccggcuccggcuccgccaucgccuccggcaucgccgucugcaagguccuccaccucgagggcgaggucaacaagaucaagaacgcccuccucuccaccaacaaggccgucgucucccucuccaacggcgucuccguccucaccuucaagguccucgaccucaagaacuacaucgacaagcagcuccuccccauccucaacaagcaguccugcuccaucuccaacaucgagaccgucauggaguuccagcagaagaacaaccgccuccucgagaucacccgcgaguucuccgucaacgccggcgucaccacccccgucuccaccuacaugcucaccaacuccgagcuccucucccucaucaacgacaugcccaucaccaacgaccagaagaagcucauguccaacaacguccagaucguccgccagcaguccuacuccaucaugugcaucaucaaggaggagguccucgccuacgucguccagcucccccucuacggcgucaucgacacccccugcuggaagcuccacaccuccccccucugcaccaccaacaccaaggagggcuccaacaucugccucacccgcaccgaccgcggcugguacugcgacaacgccggcuccgucuccuucuucccccaggccgagaccugcaaggucugcuccaaccgcgucuucugcgacaccaugaacucccucacccuccccuccgaggucaaccucugcaacaucgacaucuucaaccccaaguacgacugcaagaucaugaccuccaagaccgacgucuccuccuccgucaucaccucccucggcgccaucgucuccugcuacggcaagaccaagugcaccgccuccaacaagaacaagggcaucaucaagaccuucuccaacggcugcgacuacgucuccaacaagggcgucgacaccgucuccgucggcaacacccucuacuacgucaacaagcaggagggcaagucccucuacgucaagggcgagcccaucaucaacuucuacgacccccucgucuuccccuccgacgaguucgacgccuccaucucccaggucaacgagaagaucaaccagucccucgccuucauccgcaaguccgacgagcuccuccacaacgucaacgucggcaaguccaccaccaacaucaugaucaccaccaucaucaucgucaucaucgucauccuccuccuccucaucgccgucggccucuuccucuacugcaaggcccgcuccacccccgucacccucuccaaggaccagcucuccggcaucaacaacaucgccuucuccaacugaggacuagugaagggaacacccaaauuuaauucagccuuaagcacaauuaauuaagagugaaacguaauuguacaagcaguuggucacccaccauagggcaugaucaacaccgcaaccuuuccuuuuucccccagugauucugaaaaaccccucuucccuucagcuugcuuagauguuccaaauuuaguaagcuuaaggcggccuacagaagaaaaagaaaaaaaaggccacaaaaguucccucucacuuucaguaaauaaaauaaaagcagcaacagaaauaaagaaauaaaugaaauucaaaaugaaauaaauauuguguugugcagcauuaaaaaaucaauaaaaauuaaaaaugagcaagaucuaaaaaaaaaaaaaaaaaaaaaaaaaaaaaaaaaaaaaaaaaaaaaaaaaaaaaaaaaaaaaaaaugcaucccccccccccccccccccccccccccccccaaaggcucuuuucagagccaccagaauu

SEQ ID NO: 18644 - RNA, 2199 nt, Artificial Sequence
  mRNA product Design g-3 comprising derived and/or modified sequence from HRSV(Memphis-37)__AIY60640.1__F_DSCav1_mut7 (opt3)
gggagaguccgcucagccagguugcagaagcggcuuagcguguguccuaaucuucucucugcguguagguaggccugugccgcaaacaagcuuaccauggagcugcccauccucaagaccaacgccauuacaacuauacuugcugcagugacgcugugcuucgccagcucccagaauaucaccgaagaguuuuaccaaucuacauguucagcggucaguaaaggcuauuugagcgcuuuaagaacugggugguacaccuccguuauuacaaucgaacugucuaacauuaaggagaauaaaugcaacggaaccgacgccaaggugaaacuaaucaagcaggaacucgauaaguauaaaaaugcaguaacugagcugcagaugcuuauguguucgaccccugccgcugguucaggcagcgcaauagccagugggaucgcugugugcaagguccugcacuuggagggagaagugaacaaaauuaagaaugcccuccuguccacaaacaaagcgguugugucucugagcaauggcgucuccgugcucacguucaagguauuagaccugaagaacuacaucgauaaacagcuuuugccaauucugaauaagcaaucauguaguaucagcaacauagagacuguuauggaauuucagcagaaaaauaacaggcuacucgagauuacccgggaguucucugugaaugccggugucacaacuccgguguccaccuauaugcugacaaacucagaacuucugagcuugaucaacgacaugcccauuaccaaugaucagaagaaacucaugaguaacaaugugcaaaucguccgccagcagucuuacuccaucaugugcauuauaaaggaggaaguucuggcauaugugguacaguuaccucuguacggggugaucgacacgccauguuggaaacuccauacuagcccccuuugcacaaccaacacuaaggagggaucgaauauuugucugacacgaaccgaucguggcugguacugcgacaacgcuggcucugucuccuuuuucccucaagccgaaacguguaaggugugcucaaauagaguguuuugcgauaccaugaacaguuugacacuaccaagcgagguuaaucuguguaacaucgacauauucaaucccaaauaugauugcaagauuaugacuuccaaaaccgacgucucuagcucagugaucacaagucucggggcaaucguauccuguuacggaaagacuaaaugcaccgcuagcaacaagaauaaggguauuaucaaaacauuuucuaacggcugugauuauguuucaaauaaggggguggacaccgucagugugggaaacacucuguacuaugucaacaaacaggagggcaagagccuuuacgugaaaggugaaccuauuauaaauuucuaugacccacugguuuuuccguccgaugaguucgacgccucuaucagccaggugaacgaaaagauuaaucaaucguuggcguuuaucaggaaguccgaugagcuccugcacaacguaaaugucgggaaaucaacgacaaacaucaugauuaccacuauaaucauugugaucauuguuaucuuacugcuacucauagccgugggacuguuccuuuacugcaaggcacggaguacccccgucacauugucuaaagaccagcugagcggcaucaauaacauugcuuucuccaauugaggacuagugaagggaacacccaaauuuaauucagccuuaagcacaauuaauuaagagugaaacguaauuguacaagcaguuggucacccaccauagggcaugaucaacaccgcaaccuuuccuuuuucccccagugauucugaaaaaccccucuucccuucagcuugcuuagauguuccaaauuuaguaagcuuaaggcggccuacagaagaaaaagaaaaaaaaggccacaaaaguucccucucacuuucaguaaauaaaauaaaagcagcaacagaaauaaagaaauaaaugaaauucaaaaugaaauaaauauuguguugugcagcauuaaaaaaucaauaaaaauuaaaaaugagcaagaucuaaaaaaaaaaaaaaaaaaaaaaaaaaaaaaaaaaaaaaaaaaaaaaaaaaaaaaaaaaaaaaaaugcaucccccccccccccccccccccccccccccccaaaggcucuuuucagagccaccagaauu

SEQ ID NO: 18645 - RNA, 2199 nt, Artificial Sequence
  mRNA product Design g-3 comprising derived and/or modified sequence from HRSV(Memphis-37)__AIY60640.1__F_DSCav1_mut7 (opt4)
gggagaguccgcucagccagguugcagaagcggcuuagcguguguccuaaucuucucucugcguguagguaggccugugccgcaaacaagcuuaccauggagcugcccauccugaagaccaacgccaucaccaccauccuggccgccgugacccugugcuucgccagcagccagaacaucaccgaggaguucuaccagagcaccugcagcgccgugagcaagggcuaccugagcgcccugagaaccggcugguacaccagcgugaucaccaucgagcugagcaacaucaaggagaacaagugcaacggcaccgacgccaaggugaagcugaucaagcaggagcuggacaaguacaagaacgccgugaccgagcugcagaugcugaugugcagcacccccgccgccggcagcggcagcgccaucgccagcggcaucgccgugugcaaggugcugcaccuggagggcgaggugaacaagaucaagaacgcccugcugagcaccaacaaggccguggugagccugagcaacggcgugagcgugcugaccuucaaggugcuggaccugaagaacuacaucgacaagcagcugcugcccauccugaacaagcagagcugcagcaucagcaacaucgagaccgugauggaguuccagcagaagaacaacagacugcuggagaucaccagagaguucagcgugaacgccggcgugaccacccccgugagcaccuacaugcugaccaacagcgagcugcugagccugaucaacgacaugcccaucaccaacgaccagaagaagcugaugagcaacaacgugcagaucgugagacagcagagcuacagcaucaugugcaucaucaaggaggaggugcuggccuacguggugcagcugccccuguacggcgugaucgacacccccugcuggaagcugcacaccagcccccugugcaccaccaacaccaaggagggcagcaacaucugccugaccagaaccgacagaggcugguacugcgacaacgccggcagcgugagcuucuucccccaggccgagaccugcaaggugugcagcaacagaguguucugcgacaccaugaacagccugacccugcccagcgaggugaaccugugcaacaucgacaucuucaaccccaaguacgacugcaagaucaugaccagcaagaccgacgugagcagcagcgugaucaccagccugggcgccaucgugagcugcuacggcaagaccaagugcaccgccagcaacaagaacaagggcaucaucaagaccuucagcaacggcugcgacuacgugagcaacaagggcguggacaccgugagcgugggcaacacccuguacuacgugaacaagcaggagggcaagagccuguacgugaagggcgagcccaucaucaacuucuacgacccccugguguuccccagcgacgaguucgacgccagcaucagccaggugaacgagaagaucaaccagagccuggccuucaucagaaagagcgacgagcugcugcacaacgugaacgugggcaagagcaccaccaacaucaugaucaccaccaucaucaucgugaucaucgugauccugcugcugcugaucgccgugggccuguuccuguacugcaaggccagaagcacccccgugacccugagcaaggaccagcugagcggcaucaacaacaucgccuucagcaacugaggacuagugaagggaacacccaaauuuaauucagccuuaagcacaauuaauuaagagugaaacguaauuguacaagcaguuggucacccaccauagggcaugaucaacaccgcaaccuuuccuuuuucccccagugauucugaaaaaccccucuucccuucagcuugcuuagauguuccaaauuuaguaagcuuaaggcggccuacagaagaaaaagaaaaaaaaggccacaaaaguucccucucacuuucaguaaauaaaauaaaagcagcaacagaaauaaagaaauaaaugaaauucaaaaugaaauaaauauuguguugugcagcauuaaaaaaucaauaaaaauuaaaaaugagcaagaucuaaaaaaaaaaaaaaaaaaaaaaaaaaaaaaaaaaaaaaaaaaaaaaaaaaaaaaaaaaaaaaaaugcaucccccccccccccccccccccccccccccccaaaggcucuuuucagagccaccagaauu

SEQ ID NO: 18646 - RNA, 2199 nt, Artificial Sequence
  mRNA product Design g-3 comprising derived and/or modified sequence from HRSV(Memphis-37)__AIY60640.1__F_DSCav1_mut7 (opt5)
gggagaguccgcucagccagguugcagaagcggcuuagcguguguccuaaucuucucucugcguguagguaggccugugccgcaaacaagcuuaccauggagcugcccauccucaagaccaacgccauuacaacgauccuggcugccgugacccuuugcuucgcgagcucccagaauauuacagaagaguuuuaccaaucuaccuguagcgcugucuccaaaggcuaucugucugcccucagaacagggugguacaccagcguuaucacaauugaacuguccaacaucaaggagaauaaaugcaacggaaccgacgccaaggugaaacuuaucaagcaggaacuggauaaguauaaaaaugcugugacggagcuccagaugcugauguguucuaccccugccgcuggcagcggguccgccauugcgagcggaaucgccgucugcaaggugcugcaccucgagggcgaaguuaacaaaauuaagaaugcucugcuuucuacaaacaaagccguggucucccugagcaauggggugucuguucucaccuucaaggugcuggaccuuaagaacuacaucgauaaacagcugcucccgauucugaauaagcaauccuguagcaucucuaacauugagacagucauggaauuucagcagaaaaauaaccggcugcucgagaucacccgcgaguucuccgugaaugcuggagugacgacacccgucagcaccuauaugcugacaaacuccgaacuucugucucucaucaacgacaugccuauuaccaaugaucagaagaaacugaugagcaacaauguucaaaucgugagacagcaguccuacagcauuaugugcaucauuaaggaggaagugcuugccuaugucgugcagcugccccucuacggcguuaucgacaccccuuguuggaaacugcauacaucuccccugugcacgaccaacacaaaggagggcuccaauaucugucucacccggacagaucgcgggugguacugcgacaacgcgggaagcgugagcuuuuucccucaagccgaaaccuguaaggucugcucuaauagaguguuuugcgauacgaugaacucccugacacuuccgucugagguuaaucuguguaacauugacaucuucaaucccaaauaugauugcaagauuaugaccagcaaaaccgacguguccagcucugucaucacaucccucggcgcuauugugagcuguuacgggaagaccaaaugcacagccucuaacaagaauaagggaaucaucaaaacguuuuccaacggcugugauuaugucagcaauaaggggguggacaccguuuccgugggaaacacacuguacuaugucaacaaacaggagggcaagucucuuuacgugaaaggcgaaccuauuaucaauuucuaugacccccugguuuuuccuagcgaugaguucgacgcuuccauuucucaggugaacgaaaagaucaaucaaagccucgccuuuauucggaaguccgaugagcugcugcacaacgucaauguggggaaaagcaccacaaacaucaugauuaccacgaucaucauugugaucauuguuauccuccugcuucugauugccgucggacucuuccuguacugcaaggcucgcucuacccccgugacacuguccaaagaccagcuuagcggcaucaauaacaucgcguucucuaauugaggacuagugaagggaacacccaaauuuaauucagccuuaagcacaauuaauuaagagugaaacguaauuguacaagcaguuggucacccaccauagggcaugaucaacaccgcaaccuuuccuuuuucccccagugauucugaaaaaccccucuucccuucagcuugcuuagauguuccaaauuuaguaagcuuaaggcggccuacagaagaaaaagaaaaaaaaggccacaaaaguucccucucacuuucaguaaauaaaauaaaagcagcaacagaaauaaagaaauaaaugaaauucaaaaugaaauaaauauuguguugugcagcauuaaaaaaucaauaaaaauuaaaaaugagcaagaucuaaaaaaaaaaaaaaaaaaaaaaaaaaaaaaaaaaaaaaaaaaaaaaaaaaaaaaaaaaaaaaaaugcaucccccccccccccccccccccccccccccccaaaggcucuuuucagagccaccagaauu

SEQ ID NO: 18647 - RNA, 2199 nt, Artificial Sequence
  mRNA product Design g-3 comprising derived and/or modified sequence from HRSV(Memphis-37)__AIY60640.1__F_DSCav1_mut7 (opt6)
gggagaguccgcucagccagguugcagaagcggcuuagcguguguccuaaucuucucucugcguguagguaggccugugccgcaaacaagcuuaccauggaacuaccaauacucaaaacaaaugcuauaaccacaauacucgcagcaguaacauuauguuucgcaucaucccaaaacauaacagaagaauuuuaucaaucaaccuguucagcaguauccaaaggauaccuaagugcauuaagaaccggaugguacacaucaguaauaaccauagaacuuucaaacauaaaagaaaacaaauguaacggcacagacgcaaaagucaaacucaucaaacaggaacuugacaaauauaaaaacgcaguaaccgaacuacaaaugcuaaugugcucaacaccagcagcaggaucaggaucagcaauugcaucuggaauagcuguaugcaaaguccuacaccuagaaggagaaguaaacaaaaucaaaaacgcauuacucuccacaaacaaagcaguaguaucacuaucaaacggaguuucaguacuaaccuucaaaguauuagaccuaaaaaacuacauagacaaacaacuacuaccuauacuaaacaaacaauccuguucaauaagcaacauugaaacuguaauggaauuucaacaaaaaaacaaccgccuauuagaaauaaccagagaauuuuccguaaaugcaggaguaaccacaccagucucuacauacauguuaaccaacucagaacuauuaucacucauaaaugacaugccuauaacaaacgaccaaaaaaaacuaaugucaaacaacguacaaauaguaagacaacaaucauauuccauaaugugcauaauaaaagaagaaguacuugcauacgugguucaacuaccccuauauggaguuauagacacaccaugcuggaaacuccacacuuccccacuuugcacaacuaacacaaaagaaggaucaaauauaugccuaaccagaacagaccguggaugguacugcgacaacgcuggaucagucuccuucuuuccacaagcagaaaccugcaaagucugcucaaauagagucuucugugacacaaugaacucacucacccuacccucagaaguaaaccuauguaauauagauauauuuaauccaaaauacgacugcaaaauuaugacaaguaaaacagacguaagcucaucagucauaaccagccuaggagcaauaguauccuguuacggcaaaacaaaaugcacagcuucaaacaaaaacaaaggcauaauaaaaacauucucaaacggaugugacuauguaucaaauaaaggaguugacacaguaucaguuggaaacacacuauacuauguaaacaaacaagaaggaaaaucacuauacguuaaaggcgaacccauaaucaauuucuacgacccccuagucuucccauccgaugaauuugacgcaucaauaucccaaguaaaugaaaaaaucaaccaaucccuagcauuuauacgaaaauccgacgaacuacuccauaaugucaacgucgguaaaucaacgacaaacaucaugaucacaacaauaauaauaguaauaauuguaauauuacucuuacucauagcaguaggccuauuucuauauugcaaagccagaucaacaccaguaaccuuauccaaagaccaacuaucuggaauaaacaacauagcauuuuccaacugaggacuagugaagggaacacccaaauuuaauucagccuuaagcacaauuaauuaagagugaaacguaauuguacaagcaguuggucacccaccauagggcaugaucaacaccgcaaccuuuccuuuuucccccagugauucugaaaaaccccucuucccuucagcuugcuuagauguuccaaauuuaguaagcuuaaggcggccuacagaagaaaaagaaaaaaaaggccacaaaaguucccucucacuuucaguaaauaaaauaaaagcagcaacagaaauaaagaaauaaaugaaauucaaaaugaaauaaauauuguguugugcagcauuaaaaaaucaauaaaaauuaaaaaugagcaagaucuaaaaaaaaaaaaaaaaaaaaaaaaaaaaaaaaaaaaaaaaaaaaaaaaaaaaaaaaaaaaaaaaugcaucccccccccccccccccccccccccccccccaaaggcucuuuucagagccaccagaauu

SEQ ID NO: 18648 - RNA, 2199 nt, Artificial Sequence
  mRNA product Design g-3 comprising derived and/or modified sequence from HRSV(Memphis-37)__AIY60640.1__F_DSCav1_mut7 (opt11)
gggagaguccgcucagccagguugcagaagcggcuuagcguguguccuaaucuucucucugcguguagguaggccugugccgcaaacaagcuuaccauggaacuccccauacuuaaaacaaacgccauaacaacuauacucgcagccgucacccucuguuucgcauccucucaaaacaucaccgaagaguucuaucaaucaaccugcuccgccgucucaaaaggcuaccucuccgcccuacgcacaggcugguacaccagcgucauuaccauagaacucucgaacaucaaagaaaacaaaugcaacggcaccgacgcaaaagugaaacucaucaaacaagaacucgacaaauacaaaaacgccgucaccgaacuucagaugcucaugugcuccaccccugccgccggcagcggcuccgccauagccuccggcaucgcagucugcaaaguccuccaccucgaaggagaaguaaacaaaaucaaaaaugcucuccucuccacaaacaaagccgucgucucacucuccaauggagucuccguccucaccuucaaaguccucgaccucaaaaacuacauagacaaacaacuacuccccauccucaacaagcaauccugcucuaucuccaacauagaaaccguuauggaguuccaacagaaaaauaaccgccugcuagaaauaacccgagaguucuccgucaacgcaggcgucacuacccccgucagcacauacaugcuaacaaacuccgaacugcucucccuuaucaacgacaugcccaucacaaacgaucagaaaaagcucaugucuaacaacguacaaaucguucggcaacaauccuacuccaucaugugcaucaucaaagaagaagugcucgccuacguaguccaacucccccucuacggagucaucgacacacccugcuggaaacuccacacaucaccccucugcaccaccaacacaaaagaaggguccaacaucugccucacgcgcaccgaccgaggcugguacugcgacaacgccggcuccguauccuucuucccccaagcagaaaccugcaaggucugcuccaaccgcguauucugcgacaccaugaacucgcucacccuccccucagaagucaaccuauguaacaucgacauauucaaucccaaauacgacugcaagauaaugacuuccaaaaccgacguaagcuccucggucaucaccucccucggcgccaucgucuccugcuacggcaaaaccaaaugcaccgccuccaauaagaauaaaggcauaauaaagacauucagcaacggcugcgauuacgucuccaacaaaggugucgacaccgucucagucggcaacacucuauacuacgugaacaaacaagaaggcaaaagccuauacguuaaaggcgaaccaauaaucaauuucuacgacccucuagucuuucccucugacgaguucgaugccagcauaagccaagucaacgaaaagaucaaccaaucacucgccuucauccguaaauccgacgaacugcuccacaaugucaauguaggcaaaucaacaaccaacaucaugaucaccacuauuaucaucgucaucaucguaauccuacuccuacuaaucgccgucggccuauuccucuacugcaaagcccgcucgacccccgucacucucagcaaggaucaacuauccggcaucaacaacaucgccuucuccaacuaaggacuagugaagggaacacccaaauuuaauucagccuuaagcacaauuaauuaagagugaaacguaauuguacaagcaguuggucacccaccauagggcaugaucaacaccgcaaccuuuccuuuuucccccagugauucugaaaaaccccucuucccuucagcuugcuuagauguuccaaauuuaguaagcuuaaggcggccuacagaagaaaaagaaaaaaaaggccacaaaaguucccucucacuuucaguaaauaaaauaaaagcagcaacagaaauaaagaaauaaaugaaauucaaaaugaaauaaauauuguguugugcagcauuaaaaaaucaauaaaaauuaaaaaugagcaagaucuaaaaaaaaaaaaaaaaaaaaaaaaaaaaaaaaaaaaaaaaaaaaaaaaaaaaaaaaaaaaaaaaugcaucccccccccccccccccccccccccccccccaaaggcucuuuucagagccaccagaauu

SEQ ID NO: 18649 - RNA, 1994 nt, Artificial Sequence
  mRNA product Design g-4 comprising derived and/or modified sequence from HRSV(Memphis-37)__AIY60640.1__F_DSCav1_mut7 (opt1)
gggagacuccugucgggcggaaguaggaggaguagaguuuaaaaacaguacucuuuuuccgguucgggacguaguugaagcaacgacaagccggauaaccgcucuugagacaggaagcuuaccauggagcugcccauccucaagaccaacgccaucaccacgauccuggccgcggugacccugugcuucgccagcucccagaacaucaccgaggaguucuaccagagcacgugcuccgccgucagcaagggcuaccucuccgcccugcgcaccgggugguacaccagcgugaucaccaucgagcuguccaacaucaaggagaacaagugcaacggcaccgacgccaaggugaagcucaucaagcaggagcuggacaaguacaagaacgcggucacggagcugcagaugcugaugugcagcaccccggccgccggcuccgggagcgcgaucgccuccggcaucgccgucugcaaggugcugcaccucgagggcgaggugaacaagaucaagaacgcccugcuguccaccaacaaggccgucgugagccucuccaacggggugagcguccugaccuucaaggugcuggaccucaagaacuacaucgacaagcagcugcugcccauccugaacaagcagagcugcuccaucagcaacaucgagaccgucauggaguuccagcagaagaacaaccgccuccuggagaucacgcgggaguucagcgugaacgcgggcgugaccacccccgucuccaccuacaugcugacgaacagcgagcuccugucccugaucaacgacaugccgaucaccaacgaccagaagaagcucaugagcaacaacgugcagaucgugcgccagcaguccuacagcaucaugugcaucaucaaggaggagguccuggccuacguggugcagcugccccucuacggggucaucgacacccccugcuggaagcugcacaccagcccccugugcacgaccaacaccaaggagggcuccaacaucugccucacccggacggaccgcgggugguacugcgacaacgccggcagcguguccuucuucccgcaggccgagaccugcaaggucugcagcaaccggguguucugcgacaccaugaacucccugacccugcccagcgaggugaaccucugcaacaucgacaucuucaaccccaaguacgacugcaagaucaugacguccaagaccgacgucagcuccagcgugaucaccucccugggcgccaucgugagcugcuacgggaagaccaagugcacggcgagcaacaagaacaagggcaucaucaagaccuucuccaacgggugcgacuacgucagcaacaagggcguggacaccguguccgucggcaacacccuguacuacgugaacaagcaggagggcaagagccucuacgugaagggggagcccaucaucaacuucuacgacccgcuggucuuccccuccgacgaguucgacgccagcaucucccaggugaacgagaagaucaaccagagccuggccuucauccggaaguccgacgagcuccugcacaacgugaacgucggcaagagcaccacgaacaucaugaucaccaccaucaucaucgugaucaucgugauccugcugcuccugaucgccgucgggcuguuccucuacugcaaggcccgcuccacccccgugacgcugagcaaggaccagcuguccgggaucaacaacaucgcguucagcaacugaggacuaguaauaaggaaacuguaugaaugucugugggcaggaagugaagagauccuucuguaaagguuuuuggaauuaugucugcugaauaauaaacuuuuuugaaauaauaaaucugguagaaaaaugagaucuaaaaaaaaaaaaaaaaaaaaaaaaaaaaaaaaaaaaaaaaaaaaaaaaaaaaaaaaaaaaaaaaugcaucccccccccccccccccccccccccccccccaaaggcucuuuucagagccaccagaauu

SEQ ID NO: 18650 - RNA, 1994 nt, Artificial Sequence
  mRNA product Design g-4 comprising derived and/or modified sequence from HRSV(Memphis-37)__AIY60640.1__F_DSCav1_mut7 (opt1)
gggagacuccugucgggcggaaguaggaggaguagaguuuaaaaacaguacucuuuuuccgguucgggacguaguugaagcaacgacaagccggauaaccgcucuugagacaggaagcuuaccauggagcugcccauccucaagaccaacgccaucaccacgauccuggccgcggugacccugugcuucgccagcucccagaacaucaccgaggaguucuaccagagcacgugcuccgccgucagcaagggcuaccucuccgcccugcgcaccgggugguacaccagcgugaucaccaucgagcuguccaacaucaaggagaacaagugcaacggcaccgacgccaaggugaagcucaucaagcaggagcuggacaaguacaagaacgcggucacggagcugcagaugcucaugugcagcaccccggccgccggguccggcagcgccaucgcguccgggaucgccgugugcaaggugcugcaccuggagggcgaggucaacaagaucaagaacgcccuccugagcaccaacaaggccguggugucccugagcaacggcgucuccgugcucaccuucaaggugcuggaccugaagaacuacaucgacaagcagcuccugcccauccugaacaagcagagcugcuccaucagcaacaucgagacggucauggaguuccagcagaagaacaaccggcuccuggagaucacccgcgaguucuccgugaacgccggggugaccacccccgucagcacguacaugcugaccaacagcgagcuccugucccugaucaacgacaugcccaucaccaacgaccagaagaagcucaugagcaacaacgugcagaucgugcggcagcaguccuacagcaucaugugcaucaucaaggaggagguccuggcguacguggugcagcugccgcucuacggcgucaucgacacccccugcuggaagcugcacacgagcccccugugcaccaccaacaccaaggaggggagcaacaucugccucacgcgcaccgaccggggcugguacugcgacaacgccggguccgugagcuucuucccccaggccgagaccugcaaggugugcuccaaccgcgucuucugcgacaccaugaacagccugacgcugccguccgaggugaaccucugcaacaucgacaucuucaaccccaaguacgacugcaagaucaugaccagcaagaccgacgucuccagcuccgugaucaccagccugggcgccaucguguccugcuacggcaagacgaagugcaccgccagcaacaagaacaaggggaucaucaagaccuucuccaacggcugcgacuacgucagcaacaaggggguggacaccgugagcgucggcaacacgcuguacuacgugaacaagcaggagggcaagucccucuacgugaagggggagcccaucaucaacuucuacgacccccuggucuucccgagcgacgaguucgacgcguccaucagccaggugaacgagaagaucaaccagucccuggccuucauccggaaguccgacgagcuccugcacaacgugaacgucggcaaguccaccaccaacaucaugaucaccaccaucaucaucgugaucaucgugauccugcuccugcugaucgccgucggccucuuccuguacugcaaggcccgcagcacgcccgugacccuguccaaggaccagcugagcgggaucaacaacaucgccuucuccaacugaggacuaguaauaaggaaacuguaugaaugucugugggcaggaagugaagagauccuucuguaaagguuuuuggaauuaugucugcugaauaauaaacuuuuuugaaauaauaaaucugguagaaaaaugagaucuaaaaaaaaaaaaaaaaaaaaaaaaaaaaaaaaaaaaaaaaaaaaaaaaaaaaaaaaaaaaaaaaugcaucccccccccccccccccccccccccccccccaaaggcucuuuucagagccaccagaauu

SEQ ID NO: 18651 - RNA, 1994 nt, Artificial Sequence
  mRNA product Design g-4 comprising derived and/or modified sequence from HRSV(Memphis-37)__AIY60640.1__F_DSCav1_mut7 (opt2)
gggagacuccugucgggcggaaguaggaggaguagaguuuaaaaacaguacucuuuuuccgguucgggacguaguugaagcaacgacaagccggauaaccgcucuugagacaggaagcuuaccauggagcuccccauccucaagaccaacgccaucaccaccauccucgccgccgucacccucugcuucgccuccucccagaacaucaccgaggaguucuaccaguccaccugcuccgccgucuccaagggcuaccucuccgcccuccgcaccggcugguacaccuccgucaucaccaucgagcucuccaacaucaaggagaacaagugcaacggcaccgacgccaaggucaagcucaucaagcaggagcucgacaaguacaagaacgccgucaccgagcuccagaugcucaugugcuccacccccgccgccggcuccggcuccgccaucgccuccggcaucgccgucugcaagguccuccaccucgagggcgaggucaacaagaucaagaacgcccuccucuccaccaacaaggccgucgucucccucuccaacggcgucuccguccucaccuucaagguccucgaccucaagaacuacaucgacaagcagcuccuccccauccucaacaagcaguccugcuccaucuccaacaucgagaccgucauggaguuccagcagaagaacaaccgccuccucgagaucacccgcgaguucuccgucaacgccggcgucaccacccccgucuccaccuacaugcucaccaacuccgagcuccucucccucaucaacgacaugcccaucaccaacgaccagaagaagcucauguccaacaacguccagaucguccgccagcaguccuacuccaucaugugcaucaucaaggaggagguccucgccuacgucguccagcucccccucuacggcgucaucgacacccccugcuggaagcuccacaccuccccccucugcaccaccaacaccaaggagggcuccaacaucugccucacccgcaccgaccgcggcugguacugcgacaacgccggcuccgucuccuucuucccccaggccgagaccugcaaggucugcuccaaccgcgucuucugcgacaccaugaacucccucacccuccccuccgaggucaaccucugcaacaucgacaucuucaaccccaaguacgacugcaagaucaugaccuccaagaccgacgucuccuccuccgucaucaccucccucggcgccaucgucuccugcuacggcaagaccaagugcaccgccuccaacaagaacaagggcaucaucaagaccuucuccaacggcugcgacuacgucuccaacaagggcgucgacaccgucuccgucggcaacacccucuacuacgucaacaagcaggagggcaagucccucuacgucaagggcgagcccaucaucaacuucuacgacccccucgucuuccccuccgacgaguucgacgccuccaucucccaggucaacgagaagaucaaccagucccucgccuucauccgcaaguccgacgagcuccuccacaacgucaacgucggcaaguccaccaccaacaucaugaucaccaccaucaucaucgucaucaucgucauccuccuccuccucaucgccgucggccucuuccucuacugcaaggcccgcuccacccccgucacccucuccaaggaccagcucuccggcaucaacaacaucgccuucuccaacugaggacuaguaauaaggaaacuguaugaaugucugugggcaggaagugaagagauccuucuguaaagguuuuuggaauuaugucugcugaauaauaaacuuuuuugaaauaauaaaucugguagaaaaaugagaucuaaaaaaaaaaaaaaaaaaaaaaaaaaaaaaaaaaaaaaaaaaaaaaaaaaaaaaaaaaaaaaaaugcaucccccccccccccccccccccccccccccccaaaggcucuuuucagagccaccagaauu

SEQ ID NO: 18652 - RNA, 1994 nt, Artificial Sequence
  mRNA product Design g-4 comprising derived and/or modified sequence from HRSV(Memphis-37)__AIY60640.1__F_DSCav1_mut7 (opt3)
gggagacuccugucgggcggaaguaggaggaguagaguuuaaaaacaguacucuuuuuccgguucgggacguaguugaagcaacgacaagccggauaaccgcucuugagacaggaagcuuaccauggagcugcccauccucaagaccaacgccauuacaacuauacuugcugcagugacgcugugcuucgccagcucccagaauaucaccgaagaguuuuaccaaucuacauguucagcggucaguaaaggcuauuugagcgcuuuaagaacugggugguacaccuccguuauuacaaucgaacugucuaacauuaaggagaauaaaugcaacggaaccgacgccaaggugaaacuaaucaagcaggaacucgauaaguauaaaaaugcaguaacugagcugcagaugcuuauguguucgaccccugccgcugguucaggcagcgcaauagccagugggaucgcugugugcaagguccugcacuuggagggagaagugaacaaaauuaagaaugcccuccuguccacaaacaaagcgguugugucucugagcaauggcgucuccgugcucacguucaagguauuagaccugaagaacuacaucgauaaacagcuuuugccaauucugaauaagcaaucauguaguaucagcaacauagagacuguuauggaauuucagcagaaaaauaacaggcuacucgagauuacccgggaguucucugugaaugccggugucacaacuccgguguccaccuauaugcugacaaacucagaacuucugagcuugaucaacgacaugcccauuaccaaugaucagaagaaacucaugaguaacaaugugcaaaucguccgccagcagucuuacuccaucaugugcauuauaaaggaggaaguucuggcauaugugguacaguuaccucuguacggggugaucgacacgccauguuggaaacuccauacuagcccccuuugcacaaccaacacuaaggagggaucgaauauuugucugacacgaaccgaucguggcugguacugcgacaacgcuggcucugucuccuuuuucccucaagccgaaacguguaaggugugcucaaauagaguguuuugcgauaccaugaacaguuugacacuaccaagcgagguuaaucuguguaacaucgacauauucaaucccaaauaugauugcaagauuaugacuuccaaaaccgacgucucuagcucagugaucacaagucucggggcaaucguauccuguuacggaaagacuaaaugcaccgcuagcaacaagaauaaggguauuaucaaaacauuuucuaacggcugugauuauguuucaaauaaggggguggacaccgucagugugggaaacacucuguacuaugucaacaaacaggagggcaagagccuuuacgugaaaggugaaccuauuauaaauuucuaugacccacugguuuuuccguccgaugaguucgacgccucuaucagccaggugaacgaaaagauuaaucaaucguuggcguuuaucaggaaguccgaugagcuccugcacaacguaaaugucgggaaaucaacgacaaacaucaugauuaccacuauaaucauugugaucauuguuaucuuacugcuacucauagccgugggacuguuccuuuacugcaaggcacggaguacccccgucacauugucuaaagaccagcugagcggcaucaauaacauugcuuucuccaauugaggacuaguaauaaggaaacuguaugaaugucugugggcaggaagugaagagauccuucuguaaagguuuuuggaauuaugucugcugaauaauaaacuuuuuugaaauaauaaaucugguagaaaaaugagaucuaaaaaaaaaaaaaaaaaaaaaaaaaaaaaaaaaaaaaaaaaaaaaaaaaaaaaaaaaaaaaaaaugcaucccccccccccccccccccccccccccccccaaaggcucuuuucagagccaccagaauu

SEQ ID NO: 18653 - RNA, 1994 nt, Artificial Sequence
  mRNA product Design g-4 comprising derived and/or modified sequence from HRSV(Memphis-37)__AIY60640.1__F_DSCav1_mut7 (opt4)
gggagacuccugucgggcggaaguaggaggaguagaguuuaaaaacaguacucuuuuuccgguucgggacguaguugaagcaacgacaagccggauaaccgcucuugagacaggaagcuuaccauggagcugcccauccugaagaccaacgccaucaccaccauccuggccgccgugacccugugcuucgccagcagccagaacaucaccgaggaguucuaccagagcaccugcagcgccgugagcaagggcuaccugagcgcccugagaaccggcugguacaccagcgugaucaccaucgagcugagcaacaucaaggagaacaagugcaacggcaccgacgccaaggugaagcugaucaagcaggagcuggacaaguacaagaacgccgugaccgagcugcagaugcugaugugcagcacccccgccgccggcagcggcagcgccaucgccagcggcaucgccgugugcaaggugcugcaccuggagggcgaggugaacaagaucaagaacgcccugcugagcaccaacaaggccguggugagccugagcaacggcgugagcgugcugaccuucaaggugcuggaccugaagaacuacaucgacaagcagcugcugcccauccugaacaagcagagcugcagcaucagcaacaucgagaccgugauggaguuccagcagaagaacaacagacugcuggagaucaccagagaguucagcgugaacgccggcgugaccacccccgugagcaccuacaugcugaccaacagcgagcugcugagccugaucaacgacaugcccaucaccaacgaccagaagaagcugaugagcaacaacgugcagaucgugagacagcagagcuacagcaucaugugcaucaucaaggaggaggugcuggccuacguggugcagcugccccuguacggcgugaucgacacccccugcuggaagcugcacaccagcccccugugcaccaccaacaccaaggagggcagcaacaucugccugaccagaaccgacagaggcugguacugcgacaacgccggcagcgugagcuucuucccccaggccgagaccugcaaggugugcagcaacagaguguucugcgacaccaugaacagccugacccugcccagcgaggugaaccugugcaacaucgacaucuucaaccccaaguacgacugcaagaucaugaccagcaagaccgacgugagcagcagcgugaucaccagccugggcgccaucgugagcugcuacggcaagaccaagugcaccgccagcaacaagaacaagggcaucaucaagaccuucagcaacggcugcgacuacgugagcaacaagggcguggacaccgugagcgugggcaacacccuguacuacgugaacaagcaggagggcaagagccuguacgugaagggcgagcccaucaucaacuucuacgacccccugguguuccccagcgacgaguucgacgccagcaucagccaggugaacgagaagaucaaccagagccuggccuucaucagaaagagcgacgagcugcugcacaacgugaacgugggcaagagcaccaccaacaucaugaucaccaccaucaucaucgugaucaucgugauccugcugcugcugaucgccgugggccuguuccuguacugcaaggccagaagcacccccgugacccugagcaaggaccagcugagcggcaucaacaacaucgccuucagcaacugaggacuaguaauaaggaaacuguaugaaugucugugggcaggaagugaagagauccuucuguaaagguuuuuggaauuaugucugcugaauaauaaacuuuuuugaaauaauaaaucugguagaaaaaugagaucuaaaaaaaaaaaaaaaaaaaaaaaaaaaaaaaaaaaaaaaaaaaaaaaaaaaaaaaaaaaaaaaaugcaucccccccccccccccccccccccccccccccaaaggcucuuuucagagccaccagaauu

SEQ ID NO: 18654 - RNA, 1994 nt, Artificial Sequence
  mRNA product Design g-4 comprising derived and/or modified sequence from HRSV(Memphis-37)__AIY60640.1__F_DSCav1_mut7 (opt5)
gggagacuccugucgggcggaaguaggaggaguagaguuuaaaaacaguacucuuuuuccgguucgggacguaguugaagcaacgacaagccggauaaccgcucuugagacaggaagcuuaccauggagcugcccauccucaagaccaacgccauuacaacgauccuggcugccgugacccuuugcuucgcgagcucccagaauauuacagaagaguuuuaccaaucuaccuguagcgcugucuccaaaggcuaucugucugcccucagaacagggugguacaccagcguuaucacaauugaacuguccaacaucaaggagaauaaaugcaacggaaccgacgccaaggugaaacuuaucaagcaggaacuggauaaguauaaaaaugcugugacggagcuccagaugcugauguguucuaccccugccgcuggcagcggguccgccauugcgagcggaaucgccgucugcaaggugcugcaccucgagggcgaaguuaacaaaauuaagaaugcucugcuuucuacaaacaaagccguggucucccugagcaauggggugucuguucucaccuucaaggugcuggaccuuaagaacuacaucgauaaacagcugcucccgauucugaauaagcaauccuguagcaucucuaacauugagacagucauggaauuucagcagaaaaauaaccggcugcucgagaucacccgcgaguucuccgugaaugcuggagugacgacacccgucagcaccuauaugcugacaaacuccgaacuucugucucucaucaacgacaugccuauuaccaaugaucagaagaaacugaugagcaacaauguucaaaucgugagacagcaguccuacagcauuaugugcaucauuaaggaggaagugcuugccuaugucgugcagcugccccucuacggcguuaucgacaccccuuguuggaaacugcauacaucuccccugugcacgaccaacacaaaggagggcuccaauaucugucucacccggacagaucgcgggugguacugcgacaacgcgggaagcgugagcuuuuucccucaagccgaaaccuguaaggucugcucuaauagaguguuuugcgauacgaugaacucccugacacuuccgucugagguuaaucuguguaacauugacaucuucaaucccaaauaugauugcaagauuaugaccagcaaaaccgacguguccagcucugucaucacaucccucggcgcuauugugagcuguuacgggaagaccaaaugcacagccucuaacaagaauaagggaaucaucaaaacguuuuccaacggcugugauuaugucagcaauaaggggguggacaccguuuccgugggaaacacacuguacuaugucaacaaacaggagggcaagucucuuuacgugaaaggcgaaccuauuaucaauuucuaugacccccugguuuuuccuagcgaugaguucgacgcuuccauuucucaggugaacgaaaagaucaaucaaagccucgccuuuauucggaaguccgaugagcugcugcacaacgucaauguggggaaaagcaccacaaacaucaugauuaccacgaucaucauugugaucauuguuauccuccugcuucugauugccgucggacucuuccuguacugcaaggcucgcucuacccccgugacacuguccaaagaccagcuuagcggcaucaauaacaucgcguucucuaauugaggacuaguaauaaggaaacuguaugaaugucugugggcaggaagugaagagauccuucuguaaagguuuuuggaauuaugucugcugaauaauaaacuuuuuugaaauaauaaaucugguagaaaaaugagaucuaaaaaaaaaaaaaaaaaaaaaaaaaaaaaaaaaaaaaaaaaaaaaaaaaaaaaaaaaaaaaaaaugcaucccccccccccccccccccccccccccccccaaaggcucuuuucagagccaccagaauu

SEQ ID NO: 18655 - RNA, 1994 nt, Artificial Sequence
  mRNA product Design g-4 comprising derived and/or modified sequence from HRSV(Memphis-37)__AIY60640.1__F_DSCav1_mut7 (opt6)
gggagacuccugucgggcggaaguaggaggaguagaguuuaaaaacaguacucuuuuuccgguucgggacguaguugaagcaacgacaagccggauaaccgcucuugagacaggaagcuuaccauggaacuaccaauacucaaaacaaaugcuauaaccacaauacucgcagcaguaacauuauguuucgcaucaucccaaaacauaacagaagaauuuuaucaaucaaccuguucagcaguauccaaaggauaccuaagugcauuaagaaccggaugguacacaucaguaauaaccauagaacuuucaaacauaaaagaaaacaaauguaacggcacagacgcaaaagucaaacucaucaaacaggaacuugacaaauauaaaaacgcaguaaccgaacuacaaaugcuaaugugcucaacaccagcagcaggaucaggaucagcaauugcaucuggaauagcuguaugcaaaguccuacaccuagaaggagaaguaaacaaaaucaaaaacgcauuacucuccacaaacaaagcaguaguaucacuaucaaacggaguuucaguacuaaccuucaaaguauuagaccuaaaaaacuacauagacaaacaacuacuaccuauacuaaacaaacaauccuguucaauaagcaacauugaaacuguaauggaauuucaacaaaaaaacaaccgccuauuagaaauaaccagagaauuuuccguaaaugcaggaguaaccacaccagucucuacauacauguuaaccaacucagaacuauuaucacucauaaaugacaugccuauaacaaacgaccaaaaaaaacuaaugucaaacaacguacaaauaguaagacaacaaucauauuccauaaugugcauaauaaaagaagaaguacuugcauacgugguucaacuaccccuauauggaguuauagacacaccaugcuggaaacuccacacuuccccacuuugcacaacuaacacaaaagaaggaucaaauauaugccuaaccagaacagaccguggaugguacugcgacaacgcuggaucagucuccuucuuuccacaagcagaaaccugcaaagucugcucaaauagagucuucugugacacaaugaacucacucacccuacccucagaaguaaaccuauguaauauagauauauuuaauccaaaauacgacugcaaaauuaugacaaguaaaacagacguaagcucaucagucauaaccagccuaggagcaauaguauccuguuacggcaaaacaaaaugcacagcuucaaacaaaaacaaaggcauaauaaaaacauucucaaacggaugugacuauguaucaaauaaaggaguugacacaguaucaguuggaaacacacuauacuauguaaacaaacaagaaggaaaaucacuauacguuaaaggcgaacccauaaucaauuucuacgacccccuagucuucccauccgaugaauuugacgcaucaauaucccaaguaaaugaaaaaaucaaccaaucccuagcauuuauacgaaaauccgacgaacuacuccauaaugucaacgucgguaaaucaacgacaaacaucaugaucacaacaauaauaauaguaauaauuguaauauuacucuuacucauagcaguaggccuauuucuauauugcaaagccagaucaacaccaguaaccuuauccaaagaccaacuaucuggaauaaacaacauagcauuuuccaacugaggacuaguaauaaggaaacuguaugaaugucugugggcaggaagugaagagauccuucuguaaagguuuuuggaauuaugucugcugaauaauaaacuuuuuugaaauaauaaaucugguagaaaaaugagaucuaaaaaaaaaaaaaaaaaaaaaaaaaaaaaaaaaaaaaaaaaaaaaaaaaaaaaaaaaaaaaaaaugcaucccccccccccccccccccccccccccccccaaaggcucuuuucagagccaccagaauu

SEQ ID NO: 18656 - RNA, 1994 nt, Artificial Sequence
  mRNA product Design g-4 comprising derived and/or modified sequence from HRSV(Memphis-37)__AIY60640.1__F_DSCav1_mut7 (opt11)
gggagacuccugucgggcggaaguaggaggaguagaguuuaaaaacaguacucuuuuuccgguucgggacguaguugaagcaacgacaagccggauaaccgcucuugagacaggaagcuuaccauggaacuccccauacuuaaaacaaacgccauaacaacuauacucgcagccgucacccucuguuucgcauccucucaaaacaucaccgaagaguucuaucaaucaaccugcuccgccgucucaaaaggcuaccucuccgcccuacgcacaggcugguacaccagcgucauuaccauagaacucucgaacaucaaagaaaacaaaugcaacggcaccgacgcaaaagugaaacucaucaaacaagaacucgacaaauacaaaaacgccgucaccgaacuucagaugcucaugugcuccaccccugccgccggcagcggcuccgccauagccuccggcaucgcagucugcaaaguccuccaccucgaaggagaaguaaacaaaaucaaaaaugcucuccucuccacaaacaaagccgucgucucacucuccaauggagucuccguccucaccuucaaaguccucgaccucaaaaacuacauagacaaacaacuacuccccauccucaacaagcaauccugcucuaucuccaacauagaaaccguuauggaguuccaacagaaaaauaaccgccugcuagaaauaacccgagaguucuccgucaacgcaggcgucacuacccccgucagcacauacaugcuaacaaacuccgaacugcucucccuuaucaacgacaugcccaucacaaacgaucagaaaaagcucaugucuaacaacguacaaaucguucggcaacaauccuacuccaucaugugcaucaucaaagaagaagugcucgccuacguaguccaacucccccucuacggagucaucgacacacccugcuggaaacuccacacaucaccccucugcaccaccaacacaaaagaaggguccaacaucugccucacgcgcaccgaccgaggcugguacugcgacaacgccggcuccguauccuucuucccccaagcagaaaccugcaaggucugcuccaaccgcguauucugcgacaccaugaacucgcucacccuccccucagaagucaaccuauguaacaucgacauauucaaucccaaauacgacugcaagauaaugacuuccaaaaccgacguaagcuccucggucaucaccucccucggcgccaucgucuccugcuacggcaaaaccaaaugcaccgccuccaauaagaauaaaggcauaauaaagacauucagcaacggcugcgauuacgucuccaacaaaggugucgacaccgucucagucggcaacacucuauacuacgugaacaaacaagaaggcaaaagccuauacguuaaaggcgaaccaauaaucaauuucuacgacccucuagucuuucccucugacgaguucgaugccagcauaagccaagucaacgaaaagaucaaccaaucacucgccuucauccguaaauccgacgaacugcuccacaaugucaauguaggcaaaucaacaaccaacaucaugaucaccacuauuaucaucgucaucaucguaauccuacuccuacuaaucgccgucggccuauuccucuacugcaaagcccgcucgacccccgucacucucagcaaggaucaacuauccggcaucaacaacaucgccuucuccaacuaaggacuaguaauaaggaaacuguaugaaugucugugggcaggaagugaagagauccuucuguaaagguuuuuggaauuaugucugcugaauaauaaacuuuuuugaaauaauaaaucugguagaaaaaugagaucuaaaaaaaaaaaaaaaaaaaaaaaaaaaaaaaaaaaaaaaaaaaaaaaaaaaaaaaaaaaaaaaaugcaucccccccccccccccccccccccccccccccaaaggcucuuuucagagccaccagaauu

SEQ ID NO: 18657 - RNA, 1970 nt, Artificial Sequence
  mRNA product Design g-5 comprising derived and/or modified sequence from HRSV(Memphis-37)__AIY60640.1__F_DSCav1_mut7 (opt1)
gggagacccgugacccggaaguuguacggcuacgcgacuuucccucccacaaacccucgcgcccuuccuuuccuacuugggcccggcagaaagcuuaccauggagcugcccauccucaagaccaacgccaucaccacgauccuggccgcggugacccugugcuucgccagcucccagaacaucaccgaggaguucuaccagagcacgugcuccgccgucagcaagggcuaccucuccgcccugcgcaccgggugguacaccagcgugaucaccaucgagcuguccaacaucaaggagaacaagugcaacggcaccgacgccaaggugaagcucaucaagcaggagcuggacaaguacaagaacgcggucacggagcugcagaugcugaugugcagcaccccggccgccggcuccgggagcgcgaucgccuccggcaucgccgucugcaaggugcugcaccucgagggcgaggugaacaagaucaagaacgcccugcuguccaccaacaaggccgucgugagccucuccaacggggugagcguccugaccuucaaggugcuggaccucaagaacuacaucgacaagcagcugcugcccauccugaacaagcagagcugcuccaucagcaacaucgagaccgucauggaguuccagcagaagaacaaccgccuccuggagaucacgcgggaguucagcgugaacgcgggcgugaccacccccgucuccaccuacaugcugacgaacagcgagcuccugucccugaucaacgacaugccgaucaccaacgaccagaagaagcucaugagcaacaacgugcagaucgugcgccagcaguccuacagcaucaugugcaucaucaaggaggagguccuggccuacguggugcagcugccccucuacggggucaucgacacccccugcuggaagcugcacaccagcccccugugcacgaccaacaccaaggagggcuccaacaucugccucacccggacggaccgcgggugguacugcgacaacgccggcagcguguccuucuucccgcaggccgagaccugcaaggucugcagcaaccggguguucugcgacaccaugaacucccugacccugcccagcgaggugaaccucugcaacaucgacaucuucaaccccaaguacgacugcaagaucaugacguccaagaccgacgucagcuccagcgugaucaccucccugggcgccaucgugagcugcuacgggaagaccaagugcacggcgagcaacaagaacaagggcaucaucaagaccuucuccaacgggugcgacuacgucagcaacaagggcguggacaccguguccgucggcaacacccuguacuacgugaacaagcaggagggcaagagccucuacgugaagggggagcccaucaucaacuucuacgacccgcuggucuuccccuccgacgaguucgacgccagcaucucccaggugaacgagaagaucaaccagagccuggccuucauccggaaguccgacgagcuccugcacaacgugaacgucggcaagagcaccacgaacaucaugaucaccaccaucaucaucgugaucaucgugauccugcugcuccugaucgccgucgggcuguuccucuacugcaaggcccgcuccacccccgugacgcugagcaaggaccagcuguccgggaucaacaacaucgcguucagcaacugaggacuaguaauaaggaaacuguaugaaugucugugggcaggaagugaagagauccuucuguaaagguuuuuggaauuaugucugcugaauaauaaacuuuuuugaaauaauaaaucugguagaaaaaugagaucuaaaaaaaaaaaaaaaaaaaaaaaaaaaaaaaaaaaaaaaaaaaaaaaaaaaaaaaaaaaaaaaaugcaucccccccccccccccccccccccccccccccaaaggcucuuuucagagccaccagaauu

SEQ ID NO: 18658 - RNA, 1970 nt, Artificial Sequence
  mRNA product Design g-5 comprising derived and/or modified sequence from HRSV(Memphis-37)__AIY60640.1__F_DSCav1_mut7 (opt1)
gggagacccgugacccggaaguuguacggcuacgcgacuuucccucccacaaacccucgcgcccuuccuuuccuacuugggcccggcagaaagcuuaccauggagcugcccauccucaagaccaacgccaucaccacgauccuggccgcggugacccugugcuucgccagcucccagaacaucaccgaggaguucuaccagagcacgugcuccgccgucagcaagggcuaccucuccgcccugcgcaccgggugguacaccagcgugaucaccaucgagcuguccaacaucaaggagaacaagugcaacggcaccgacgccaaggugaagcucaucaagcaggagcuggacaaguacaagaacgcggucacggagcugcagaugcucaugugcagcaccccggccgccggguccggcagcgccaucgcguccgggaucgccgugugcaaggugcugcaccuggagggcgaggucaacaagaucaagaacgcccuccugagcaccaacaaggccguggugucccugagcaacggcgucuccgugcucaccuucaaggugcuggaccugaagaacuacaucgacaagcagcuccugcccauccugaacaagcagagcugcuccaucagcaacaucgagacggucauggaguuccagcagaagaacaaccggcuccuggagaucacccgcgaguucuccgugaacgccggggugaccacccccgucagcacguacaugcugaccaacagcgagcuccugucccugaucaacgacaugcccaucaccaacgaccagaagaagcucaugagcaacaacgugcagaucgugcggcagcaguccuacagcaucaugugcaucaucaaggaggagguccuggcguacguggugcagcugccgcucuacggcgucaucgacacccccugcuggaagcugcacacgagcccccugugcaccaccaacaccaaggaggggagcaacaucugccucacgcgcaccgaccggggcugguacugcgacaacgccggguccgugagcuucuucccccaggccgagaccugcaaggugugcuccaaccgcgucuucugcgacaccaugaacagccugacgcugccguccgaggugaaccucugcaacaucgacaucuucaaccccaaguacgacugcaagaucaugaccagcaagaccgacgucuccagcuccgugaucaccagccugggcgccaucguguccugcuacggcaagacgaagugcaccgccagcaacaagaacaaggggaucaucaagaccuucuccaacggcugcgacuacgucagcaacaaggggguggacaccgugagcgucggcaacacgcuguacuacgugaacaagcaggagggcaagucccucuacgugaagggggagcccaucaucaacuucuacgacccccuggucuucccgagcgacgaguucgacgcguccaucagccaggugaacgagaagaucaaccagucccuggccuucauccggaaguccgacgagcuccugcacaacgugaacgucggcaaguccaccaccaacaucaugaucaccaccaucaucaucgugaucaucgugauccugcuccugcugaucgccgucggccucuuccuguacugcaaggcccgcagcacgcccgugacccuguccaaggaccagcugagcgggaucaacaacaucgccuucuccaacugaggacuaguaauaaggaaacuguaugaaugucugugggcaggaagugaagagauccuucuguaaagguuuuuggaauuaugucugcugaauaauaaacuuuuuugaaauaauaaaucugguagaaaaaugagaucuaaaaaaaaaaaaaaaaaaaaaaaaaaaaaaaaaaaaaaaaaaaaaaaaaaaaaaaaaaaaaaaaugcaucccccccccccccccccccccccccccccccaaaggcucuuuucagagccaccagaauu

SEQ ID NO: 18659 - RNA, 1970 nt, Artificial Sequence
  mRNA product Design g-5 comprising derived and/or modified sequence from HRSV(Memphis-37)__AIY60640.1__F_DSCav1_mut7 (opt2)
gggagacccgugacccggaaguuguacggcuacgcgacuuucccucccacaaacccucgcgcccuuccuuuccuacuugggcccggcagaaagcuuaccauggagcuccccauccucaagaccaacgccaucaccaccauccucgccgccgucacccucugcuucgccuccucccagaacaucaccgaggaguucuaccaguccaccugcuccgccgucuccaagggcuaccucuccgcccuccgcaccggcugguacaccuccgucaucaccaucgagcucuccaacaucaaggagaacaagugcaacggcaccgacgccaaggucaagcucaucaagcaggagcucgacaaguacaagaacgccgucaccgagcuccagaugcucaugugcuccacccccgccgccggcuccggcuccgccaucgccuccggcaucgccgucugcaagguccuccaccucgagggcgaggucaacaagaucaagaacgcccuccucuccaccaacaaggccgucgucucccucuccaacggcgucuccguccucaccuucaagguccucgaccucaagaacuacaucgacaagcagcuccuccccauccucaacaagcaguccugcuccaucuccaacaucgagaccgucauggaguuccagcagaagaacaaccgccuccucgagaucacccgcgaguucuccgucaacgccggcgucaccacccccgucuccaccuacaugcucaccaacuccgagcuccucucccucaucaacgacaugcccaucaccaacgaccagaagaagcucauguccaacaacguccagaucguccgccagcaguccuacuccaucaugugcaucaucaaggaggagguccucgccuacgucguccagcucccccucuacggcgucaucgacacccccugcuggaagcuccacaccuccccccucugcaccaccaacaccaaggagggcuccaacaucugccucacccgcaccgaccgcggcugguacugcgacaacgccggcuccgucuccuucuucccccaggccgagaccugcaaggucugcuccaaccgcgucuucugcgacaccaugaacucccucacccuccccuccgaggucaaccucugcaacaucgacaucuucaaccccaaguacgacugcaagaucaugaccuccaagaccgacgucuccuccuccgucaucaccucccucggcgccaucgucuccugcuacggcaagaccaagugcaccgccuccaacaagaacaagggcaucaucaagaccuucuccaacggcugcgacuacgucuccaacaagggcgucgacaccgucuccgucggcaacacccucuacuacgucaacaagcaggagggcaagucccucuacgucaagggcgagcccaucaucaacuucuacgacccccucgucuuccccuccgacgaguucgacgccuccaucucccaggucaacgagaagaucaaccagucccucgccuucauccgcaaguccgacgagcuccuccacaacgucaacgucggcaaguccaccaccaacaucaugaucaccaccaucaucaucgucaucaucgucauccuccuccuccucaucgccgucggccucuuccucuacugcaaggcccgcuccacccccgucacccucuccaaggaccagcucuccggcaucaacaacaucgccuucuccaacugaggacuaguaauaaggaaacuguaugaaugucugugggcaggaagugaagagauccuucuguaaagguuuuuggaauuaugucugcugaauaauaaacuuuuuugaaauaauaaaucugguagaaaaaugagaucuaaaaaaaaaaaaaaaaaaaaaaaaaaaaaaaaaaaaaaaaaaaaaaaaaaaaaaaaaaaaaaaaugcaucccccccccccccccccccccccccccccccaaaggcucuuuucagagccaccagaauu

SEQ ID NO: 18660 - RNA, 1970 nt, Artificial Sequence
  mRNA product Design g-5 comprising derived and/or modified sequence from HRSV(Memphis-37)__AIY60640.1__F_DSCav1_mut7 (opt3)
gggagacccgugacccggaaguuguacggcuacgcgacuuucccucccacaaacccucgcgcccuuccuuuccuacuugggcccggcagaaagcuuaccauggagcugcccauccucaagaccaacgccauuacaacuauacuugcugcagugacgcugugcuucgccagcucccagaauaucaccgaagaguuuuaccaaucuacauguucagcggucaguaaaggcuauuugagcgcuuuaagaacugggugguacaccuccguuauuacaaucgaacugucuaacauuaaggagaauaaaugcaacggaaccgacgccaaggugaaacuaaucaagcaggaacucgauaaguauaaaaaugcaguaacugagcugcagaugcuuauguguucgaccccugccgcugguucaggcagcgcaauagccagugggaucgcugugugcaagguccugcacuuggagggagaagugaacaaaauuaagaaugcccuccuguccacaaacaaagcgguugugucucugagcaauggcgucuccgugcucacguucaagguauuagaccugaagaacuacaucgauaaacagcuuuugccaauucugaauaagcaaucauguaguaucagcaacauagagacuguuauggaauuucagcagaaaaauaacaggcuacucgagauuacccgggaguucucugugaaugccggugucacaacuccgguguccaccuauaugcugacaaacucagaacuucugagcuugaucaacgacaugcccauuaccaaugaucagaagaaacucaugaguaacaaugugcaaaucguccgccagcagucuuacuccaucaugugcauuauaaaggaggaaguucuggcauaugugguacaguuaccucuguacggggugaucgacacgccauguuggaaacuccauacuagcccccuuugcacaaccaacacuaaggagggaucgaauauuugucugacacgaaccgaucguggcugguacugcgacaacgcuggcucugucuccuuuuucccucaagccgaaacguguaaggugugcucaaauagaguguuuugcgauaccaugaacaguuugacacuaccaagcgagguuaaucuguguaacaucgacauauucaaucccaaauaugauugcaagauuaugacuuccaaaaccgacgucucuagcucagugaucacaagucucggggcaaucguauccuguuacggaaagacuaaaugcaccgcuagcaacaagaauaaggguauuaucaaaacauuuucuaacggcugugauuauguuucaaauaaggggguggacaccgucagugugggaaacacucuguacuaugucaacaaacaggagggcaagagccuuuacgugaaaggugaaccuauuauaaauuucuaugacccacugguuuuuccguccgaugaguucgacgccucuaucagccaggugaacgaaaagauuaaucaaucguuggcguuuaucaggaaguccgaugagcuccugcacaacguaaaugucgggaaaucaacgacaaacaucaugauuaccacuauaaucauugugaucauuguuaucuuacugcuacucauagccgugggacuguuccuuuacugcaaggcacggaguacccccgucacauugucuaaagaccagcugagcggcaucaauaacauugcuuucuccaauugaggacuaguaauaaggaaacuguaugaaugucugugggcaggaagugaagagauccuucuguaaagguuuuuggaauuaugucugcugaauaauaaacuuuuuugaaauaauaaaucugguagaaaaaugagaucuaaaaaaaaaaaaaaaaaaaaaaaaaaaaaaaaaaaaaaaaaaaaaaaaaaaaaaaaaaaaaaaaugcaucccccccccccccccccccccccccccccccaaaggcucuuuucagagccaccagaauu

SEQ ID NO: 18661 - RNA, 1970 nt, Artificial Sequence
  mRNA product Design g-5 comprising derived and/or modified sequence from HRSV(Memphis-37)__AIY60640.1__F_DSCav1_mut7 (opt4)
gggagacccgugacccggaaguuguacggcuacgcgacuuucccucccacaaacccucgcgcccuuccuuuccuacuugggcccggcagaaagcuuaccauggagcugcccauccugaagaccaacgccaucaccaccauccuggccgccgugacccugugcuucgccagcagccagaacaucaccgaggaguucuaccagagcaccugcagcgccgugagcaagggcuaccugagcgcccugagaaccggcugguacaccagcgugaucaccaucgagcugagcaacaucaaggagaacaagugcaacggcaccgacgccaaggugaagcugaucaagcaggagcuggacaaguacaagaacgccgugaccgagcugcagaugcugaugugcagcacccccgccgccggcagcggcagcgccaucgccagcggcaucgccgugugcaaggugcugcaccuggagggcgaggugaacaagaucaagaacgcccugcugagcaccaacaaggccguggugagccugagcaacggcgugagcgugcugaccuucaaggugcuggaccugaagaacuacaucgacaagcagcugcugcccauccugaacaagcagagcugcagcaucagcaacaucgagaccgugauggaguuccagcagaagaacaacagacugcuggagaucaccagagaguucagcgugaacgccggcgugaccacccccgugagcaccuacaugcugaccaacagcgagcugcugagccugaucaacgacaugcccaucaccaacgaccagaagaagcugaugagcaacaacgugcagaucgugagacagcagagcuacagcaucaugugcaucaucaaggaggaggugcuggccuacguggugcagcugccccuguacggcgugaucgacacccccugcuggaagcugcacaccagcccccugugcaccaccaacaccaaggagggcagcaacaucugccugaccagaaccgacagaggcugguacugcgacaacgccggcagcgugagcuucuucccccaggccgagaccugcaaggugugcagcaacagaguguucugcgacaccaugaacagccugacccugcccagcgaggugaaccugugcaacaucgacaucuucaaccccaaguacgacugcaagaucaugaccagcaagaccgacgugagcagcagcgugaucaccagccugggcgccaucgugagcugcuacggcaagaccaagugcaccgccagcaacaagaacaagggcaucaucaagaccuucagcaacggcugcgacuacgugagcaacaagggcguggacaccgugagcgugggcaacacccuguacuacgugaacaagcaggagggcaagagccuguacgugaagggcgagcccaucaucaacuucuacgacccccugguguuccccagcgacgaguucgacgccagcaucagccaggugaacgagaagaucaaccagagccuggccuucaucagaaagagcgacgagcugcugcacaacgugaacgugggcaagagcaccaccaacaucaugaucaccaccaucaucaucgugaucaucgugauccugcugcugcugaucgccgugggccuguuccuguacugcaaggccagaagcacccccgugacccugagcaaggaccagcugagcggcaucaacaacaucgccuucagcaacugaggacuaguaauaaggaaacuguaugaaugucugugggcaggaagugaagagauccuucuguaaagguuuuuggaauuaugucugcugaauaauaaacuuuuuugaaauaauaaaucugguagaaaaaugagaucuaaaaaaaaaaaaaaaaaaaaaaaaaaaaaaaaaaaaaaaaaaaaaaaaaaaaaaaaaaaaaaaaugcaucccccccccccccccccccccccccccccccaaaggcucuuuucagagccaccagaauu

SEQ ID NO: 18662 - RNA, 1970 nt, Artificial Sequence
  mRNA product Design g-5 comprising derived and/or modified sequence from HRSV(Memphis-37)__AIY60640.1__F_DSCav1_mut7 (opt5)
gggagacccgugacccggaaguuguacggcuacgcgacuuucccucccacaaacccucgcgcccuuccuuuccuacuugggcccggcagaaagcuuaccauggagcugcccauccucaagaccaacgccauuacaacgauccuggcugccgugacccuuugcuucgcgagcucccagaauauuacagaagaguuuuaccaaucuaccuguagcgcugucuccaaaggcuaucugucugcccucagaacagggugguacaccagcguuaucacaauugaacuguccaacaucaaggagaauaaaugcaacggaaccgacgccaaggugaaacuuaucaagcaggaacuggauaaguauaaaaaugcugugacggagcuccagaugcugauguguucuaccccugccgcuggcagcggguccgccauugcgagcggaaucgccgucugcaaggugcugcaccucgagggcgaaguuaacaaaauuaagaaugcucugcuuucuacaaacaaagccguggucucccugagcaauggggugucuguucucaccuucaaggugcuggaccuuaagaacuacaucgauaaacagcugcucccgauucugaauaagcaauccuguagcaucucuaacauugagacagucauggaauuucagcagaaaaauaaccggcugcucgagaucacccgcgaguucuccgugaaugcuggagugacgacacccgucagcaccuauaugcugacaaacuccgaacuucugucucucaucaacgacaugccuauuaccaaugaucagaagaaacugaugagcaacaauguucaaaucgugagacagcaguccuacagcauuaugugcaucauuaaggaggaagugcuugccuaugucgugcagcugccccucuacggcguuaucgacaccccuuguuggaaacugcauacaucuccccugugcacgaccaacacaaaggagggcuccaauaucugucucacccggacagaucgcgggugguacugcgacaacgcgggaagcgugagcuuuuucccucaagccgaaaccuguaaggucugcucuaauagaguguuuugcgauacgaugaacucccugacacuuccgucugagguuaaucuguguaacauugacaucuucaaucccaaauaugauugcaagauuaugaccagcaaaaccgacguguccagcucugucaucacaucccucggcgcuauugugagcuguuacgggaagaccaaaugcacagccucuaacaagaauaagggaaucaucaaaacguuuuccaacggcugugauuaugucagcaauaaggggguggacaccguuuccgugggaaacacacuguacuaugucaacaaacaggagggcaagucucuuuacgugaaaggcgaaccuauuaucaauuucuaugacccccugguuuuuccuagcgaugaguucgacgcuuccauuucucaggugaacgaaaagaucaaucaaagccucgccuuuauucggaaguccgaugagcugcugcacaacgucaauguggggaaaagcaccacaaacaucaugauuaccacgaucaucauugugaucauuguuauccuccugcuucugauugccgucggacucuuccuguacugcaaggcucgcucuacccccgugacacuguccaaagaccagcuuagcggcaucaauaacaucgcguucucuaauugaggacuaguaauaaggaaacuguaugaaugucugugggcaggaagugaagagauccuucuguaaagguuuuuggaauuaugucugcugaauaauaaacuuuuuugaaauaauaaaucugguagaaaaaugagaucuaaaaaaaaaaaaaaaaaaaaaaaaaaaaaaaaaaaaaaaaaaaaaaaaaaaaaaaaaaaaaaaaugcaucccccccccccccccccccccccccccccccaaaggcucuuuucagagccaccagaauu

SEQ ID NO: 18663 - RNA, 1970 nt, Artificial Sequence
  mRNA product Design g-5 comprising derived and/or modified sequence from HRSV(Memphis-37)__AIY60640.1__F_DSCav1_mut7 (opt6)
gggagacccgugacccggaaguuguacggcuacgcgacuuucccucccacaaacccucgcgcccuuccuuuccuacuugggcccggcagaaagcuuaccauggaacuaccaauacucaaaacaaaugcuauaaccacaauacucgcagcaguaacauuauguuucgcaucaucccaaaacauaacagaagaauuuuaucaaucaaccuguucagcaguauccaaaggauaccuaagugcauuaagaaccggaugguacacaucaguaauaaccauagaacuuucaaacauaaaagaaaacaaauguaacggcacagacgcaaaagucaaacucaucaaacaggaacuugacaaauauaaaaacgcaguaaccgaacuacaaaugcuaaugugcucaacaccagcagcaggaucaggaucagcaauugcaucuggaauagcuguaugcaaaguccuacaccuagaaggagaaguaaacaaaaucaaaaacgcauuacucuccacaaacaaagcaguaguaucacuaucaaacggaguuucaguacuaaccuucaaaguauuagaccuaaaaaacuacauagacaaacaacuacuaccuauacuaaacaaacaauccuguucaauaagcaacauugaaacuguaauggaauuucaacaaaaaaacaaccgccuauuagaaauaaccagagaauuuuccguaaaugcaggaguaaccacaccagucucuacauacauguuaaccaacucagaacuauuaucacucauaaaugacaugccuauaacaaacgaccaaaaaaaacuaaugucaaacaacguacaaauaguaagacaacaaucauauuccauaaugugcauaauaaaagaagaaguacuugcauacgugguucaacuaccccuauauggaguuauagacacaccaugcuggaaacuccacacuuccccacuuugcacaacuaacacaaaagaaggaucaaauauaugccuaaccagaacagaccguggaugguacugcgacaacgcuggaucagucuccuucuuuccacaagcagaaaccugcaaagucugcucaaauagagucuucugugacacaaugaacucacucacccuacccucagaaguaaaccuauguaauauagauauauuuaauccaaaauacgacugcaaaauuaugacaaguaaaacagacguaagcucaucagucauaaccagccuaggagcaauaguauccuguuacggcaaaacaaaaugcacagcuucaaacaaaaacaaaggcauaauaaaaacauucucaaacggaugugacuauguaucaaauaaaggaguugacacaguaucaguuggaaacacacuauacuauguaaacaaacaagaaggaaaaucacuauacguuaaaggcgaacccauaaucaauuucuacgacccccuagucuucccauccgaugaauuugacgcaucaauaucccaaguaaaugaaaaaaucaaccaaucccuagcauuuauacgaaaauccgacgaacuacuccauaaugucaacgucgguaaaucaacgacaaacaucaugaucacaacaauaauaauaguaauaauuguaauauuacucuuacucauagcaguaggccuauuucuauauugcaaagccagaucaacaccaguaaccuuauccaaagaccaacuaucuggaauaaacaacauagcauuuuccaacugaggacuaguaauaaggaaacuguaugaaugucugugggcaggaagugaagagauccuucuguaaagguuuuuggaauuaugucugcugaauaauaaacuuuuuugaaauaauaaaucugguagaaaaaugagaucuaaaaaaaaaaaaaaaaaaaaaaaaaaaaaaaaaaaaaaaaaaaaaaaaaaaaaaaaaaaaaaaaugcaucccccccccccccccccccccccccccccccaaaggcucuuuucagagccaccagaauu

SEQ ID NO: 18664 - RNA, 1970 nt, Artificial Sequence
  mRNA product Design g-5 comprising derived and/or modified sequence from HRSV(Memphis-37)__AIY60640.1__F_DSCav1_mut7 (opt11)
gggagacccgugacccggaaguuguacggcuacgcgacuuucccucccacaaacccucgcgcccuuccuuuccuacuugggcccggcagaaagcuuaccauggaacuccccauacuuaaaacaaacgccauaacaacuauacucgcagccgucacccucuguuucgcauccucucaaaacaucaccgaagaguucuaucaaucaaccugcuccgccgucucaaaaggcuaccucuccgcccuacgcacaggcugguacaccagcgucauuaccauagaacucucgaacaucaaagaaaacaaaugcaacggcaccgacgcaaaagugaaacucaucaaacaagaacucgacaaauacaaaaacgccgucaccgaacuucagaugcucaugugcuccaccccugccgccggcagcggcuccgccauagccuccggcaucgcagucugcaaaguccuccaccucgaaggagaaguaaacaaaaucaaaaaugcucuccucuccacaaacaaagccgucgucucacucuccaauggagucuccguccucaccuucaaaguccucgaccucaaaaacuacauagacaaacaacuacuccccauccucaacaagcaauccugcucuaucuccaacauagaaaccguuauggaguuccaacagaaaaauaaccgccugcuagaaauaacccgagaguucuccgucaacgcaggcgucacuacccccgucagcacauacaugcuaacaaacuccgaacugcucucccuuaucaacgacaugcccaucacaaacgaucagaaaaagcucaugucuaacaacguacaaaucguucggcaacaauccuacuccaucaugugcaucaucaaagaagaagugcucgccuacguaguccaacucccccucuacggagucaucgacacacccugcuggaaacuccacacaucaccccucugcaccaccaacacaaaagaaggguccaacaucugccucacgcgcaccgaccgaggcugguacugcgacaacgccggcuccguauccuucuucccccaagcagaaaccugcaaggucugcuccaaccgcguauucugcgacaccaugaacucgcucacccuccccucagaagucaaccuauguaacaucgacauauucaaucccaaauacgacugcaagauaaugacuuccaaaaccgacguaagcuccucggucaucaccucccucggcgccaucgucuccugcuacggcaaaaccaaaugcaccgccuccaauaagaauaaaggcauaauaaagacauucagcaacggcugcgauuacgucuccaacaaaggugucgacaccgucucagucggcaacacucuauacuacgugaacaaacaagaaggcaaaagccuauacguuaaaggcgaaccaauaaucaauuucuacgacccucuagucuuucccucugacgaguucgaugccagcauaagccaagucaacgaaaagaucaaccaaucacucgccuucauccguaaauccgacgaacugcuccacaaugucaauguaggcaaaucaacaaccaacaucaugaucaccacuauuaucaucgucaucaucguaauccuacuccuacuaaucgccgucggccuauuccucuacugcaaagcccgcucgacccccgucacucucagcaaggaucaacuauccggcaucaacaacaucgccuucuccaacuaaggacuaguaauaaggaaacuguaugaaugucugugggcaggaagugaagagauccuucuguaaagguuuuuggaauuaugucugcugaauaauaaacuuuuuugaaauaauaaaucugguagaaaaaugagaucuaaaaaaaaaaaaaaaaaaaaaaaaaaaaaaaaaaaaaaaaaaaaaaaaaaaaaaaaaaaaaaaaugcaucccccccccccccccccccccccccccccccaaaggcucuuuucagagccaccagaauu

SEQ ID NO: 18665 - RNA, 1986 nt, Artificial Sequence
  mRNA product Design h-1 comprising derived and/or modified sequence from HRSV(Memphis-37)__AIY60640.1__F_DSCav1_mut7 (opt1)
gggagacccgugacccggaaguuguacggcuacgcgacuuucccucccacaaacccucgcgcccuuccuuuccuacuugggcccggcagaaagcuuaccauggagcugcccauccucaagaccaacgccaucaccacgauccuggccgcggugacccugugcuucgccagcucccagaacaucaccgaggaguucuaccagagcacgugcuccgccgucagcaagggcuaccucuccgcccugcgcaccgggugguacaccagcgugaucaccaucgagcuguccaacaucaaggagaacaagugcaacggcaccgacgccaaggugaagcucaucaagcaggagcuggacaaguacaagaacgcggucacggagcugcagaugcugaugugcagcaccccggccgccggcuccgggagcgcgaucgccuccggcaucgccgucugcaaggugcugcaccucgagggcgaggugaacaagaucaagaacgcccugcuguccaccaacaaggccgucgugagccucuccaacggggugagcguccugaccuucaaggugcuggaccucaagaacuacaucgacaagcagcugcugcccauccugaacaagcagagcugcuccaucagcaacaucgagaccgucauggaguuccagcagaagaacaaccgccuccuggagaucacgcgggaguucagcgugaacgcgggcgugaccacccccgucuccaccuacaugcugacgaacagcgagcuccugucccugaucaacgacaugccgaucaccaacgaccagaagaagcucaugagcaacaacgugcagaucgugcgccagcaguccuacagcaucaugugcaucaucaaggaggagguccuggccuacguggugcagcugccccucuacggggucaucgacacccccugcuggaagcugcacaccagcccccugugcacgaccaacaccaaggagggcuccaacaucugccucacccggacggaccgcgggugguacugcgacaacgccggcagcguguccuucuucccgcaggccgagaccugcaaggucugcagcaaccggguguucugcgacaccaugaacucccugacccugcccagcgaggugaaccucugcaacaucgacaucuucaaccccaaguacgacugcaagaucaugacguccaagaccgacgucagcuccagcgugaucaccucccugggcgccaucgugagcugcuacgggaagaccaagugcacggcgagcaacaagaacaagggcaucaucaagaccuucuccaacgggugcgacuacgucagcaacaagggcguggacaccguguccgucggcaacacccuguacuacgugaacaagcaggagggcaagagccucuacgugaagggggagcccaucaucaacuucuacgacccgcuggucuuccccuccgacgaguucgacgccagcaucucccaggugaacgagaagaucaaccagagccuggccuucauccggaaguccgacgagcuccugcacaacgugaacgucggcaagagcaccacgaacaucaugaucaccaccaucaucaucgugaucaucgugauccugcugcuccugaucgccgucgggcuguuccucuacugcaaggcccgcuccacccccgugacgcugagcaaggaccagcuguccgggaucaacaacaucgcguucagcaacugaggacuaguacuggcugcaucucccuuuccucuguccuccauccuucucccaggauggugaagggggaccugguacccagugauccccaccccaggauccuaaaucaugacuuaccugcuaauaaaaacucauuggaaaagugagaagaucuaaaaaaaaaaaaaaaaaaaaaaaaaaaaaaaaaaaaaaaaaaaaaaaaaaaaaaaaaaaaaaaaugcaucccccccccccccccccccccccccccccccaaaggcucuuuucagagccaccagaauu

SEQ ID NO: 18666 - RNA, 1986 nt, Artificial Sequence
  mRNA product Design h-1 comprising derived and/or modified sequence from HRSV(Memphis-37)__AIY60640.1__F_DSCav1_mut7 (opt1)
gggagacccgugacccggaaguuguacggcuacgcgacuuucccucccacaaacccucgcgcccuuccuuuccuacuugggcccggcagaaagcuuaccauggagcugcccauccucaagaccaacgccaucaccacgauccuggccgcggugacccugugcuucgccagcucccagaacaucaccgaggaguucuaccagagcacgugcuccgccgucagcaagggcuaccucuccgcccugcgcaccgggugguacaccagcgugaucaccaucgagcuguccaacaucaaggagaacaagugcaacggcaccgacgccaaggugaagcucaucaagcaggagcuggacaaguacaagaacgcggucacggagcugcagaugcucaugugcagcaccccggccgccggguccggcagcgccaucgcguccgggaucgccgugugcaaggugcugcaccuggagggcgaggucaacaagaucaagaacgcccuccugagcaccaacaaggccguggugucccugagcaacggcgucuccgugcucaccuucaaggugcuggaccugaagaacuacaucgacaagcagcuccugcccauccugaacaagcagagcugcuccaucagcaacaucgagacggucauggaguuccagcagaagaacaaccggcuccuggagaucacccgcgaguucuccgugaacgccggggugaccacccccgucagcacguacaugcugaccaacagcgagcuccugucccugaucaacgacaugcccaucaccaacgaccagaagaagcucaugagcaacaacgugcagaucgugcggcagcaguccuacagcaucaugugcaucaucaaggaggagguccuggcguacguggugcagcugccgcucuacggcgucaucgacacccccugcuggaagcugcacacgagcccccugugcaccaccaacaccaaggaggggagcaacaucugccucacgcgcaccgaccggggcugguacugcgacaacgccggguccgugagcuucuucccccaggccgagaccugcaaggugugcuccaaccgcgucuucugcgacaccaugaacagccugacgcugccguccgaggugaaccucugcaacaucgacaucuucaaccccaaguacgacugcaagaucaugaccagcaagaccgacgucuccagcuccgugaucaccagccugggcgccaucguguccugcuacggcaagacgaagugcaccgccagcaacaagaacaaggggaucaucaagaccuucuccaacggcugcgacuacgucagcaacaaggggguggacaccgugagcgucggcaacacgcuguacuacgugaacaagcaggagggcaagucccucuacgugaagggggagcccaucaucaacuucuacgacccccuggucuucccgagcgacgaguucgacgcguccaucagccaggugaacgagaagaucaaccagucccuggccuucauccggaaguccgacgagcuccugcacaacgugaacgucggcaaguccaccaccaacaucaugaucaccaccaucaucaucgugaucaucgugauccugcuccugcugaucgccgucggccucuuccuguacugcaaggcccgcagcacgcccgugacccuguccaaggaccagcugagcgggaucaacaacaucgccuucuccaacugaggacuaguacuggcugcaucucccuuuccucuguccuccauccuucucccaggauggugaagggggaccugguacccagugauccccaccccaggauccuaaaucaugacuuaccugcuaauaaaaacucauuggaaaagugagaagaucuaaaaaaaaaaaaaaaaaaaaaaaaaaaaaaaaaaaaaaaaaaaaaaaaaaaaaaaaaaaaaaaaugcaucccccccccccccccccccccccccccccccaaaggcucuuuucagagccaccagaauu

SEQ ID NO: 18667 - RNA, 1986 nt, Artificial Sequence
  mRNA product Design h-1 comprising derived and/or modified sequence from HRSV(Memphis-37)__AIY60640.1__F_DSCav1_mut7 (opt2)
gggagacccgugacccggaaguuguacggcuacgcgacuuucccucccacaaacccucgcgcccuuccuuuccuacuugggcccggcagaaagcuuaccauggagcuccccauccucaagaccaacgccaucaccaccauccucgccgccgucacccucugcuucgccuccucccagaacaucaccgaggaguucuaccaguccaccugcuccgccgucuccaagggcuaccucuccgcccuccgcaccggcugguacaccuccgucaucaccaucgagcucuccaacaucaaggagaacaagugcaacggcaccgacgccaaggucaagcucaucaagcaggagcucgacaaguacaagaacgccgucaccgagcuccagaugcucaugugcuccacccccgccgccggcuccggcuccgccaucgccuccggcaucgccgucugcaagguccuccaccucgagggcgaggucaacaagaucaagaacgcccuccucuccaccaacaaggccgucgucucccucuccaacggcgucuccguccucaccuucaagguccucgaccucaagaacuacaucgacaagcagcuccuccccauccucaacaagcaguccugcuccaucuccaacaucgagaccgucauggaguuccagcagaagaacaaccgccuccucgagaucacccgcgaguucuccgucaacgccggcgucaccacccccgucuccaccuacaugcucaccaacuccgagcuccucucccucaucaacgacaugcccaucaccaacgaccagaagaagcucauguccaacaacguccagaucguccgccagcaguccuacuccaucaugugcaucaucaaggaggagguccucgccuacgucguccagcucccccucuacggcgucaucgacacccccugcuggaagcuccacaccuccccccucugcaccaccaacaccaaggagggcuccaacaucugccucacccgcaccgaccgcggcugguacugcgacaacgccggcuccgucuccuucuucccccaggccgagaccugcaaggucugcuccaaccgcgucuucugcgacaccaugaacucccucacccuccccuccgaggucaaccucugcaacaucgacaucuucaaccccaaguacgacugcaagaucaugaccuccaagaccgacgucuccuccuccgucaucaccucccucggcgccaucgucuccugcuacggcaagaccaagugcaccgccuccaacaagaacaagggcaucaucaagaccuucuccaacggcugcgacuacgucuccaacaagggcgucgacaccgucuccgucggcaacacccucuacuacgucaacaagcaggagggcaagucccucuacgucaagggcgagcccaucaucaacuucuacgacccccucgucuuccccuccgacgaguucgacgccuccaucucccaggucaacgagaagaucaaccagucccucgccuucauccgcaaguccgacgagcuccuccacaacgucaacgucggcaaguccaccaccaacaucaugaucaccaccaucaucaucgucaucaucgucauccuccuccuccucaucgccgucggccucuuccucuacugcaaggcccgcuccacccccgucacccucuccaaggaccagcucuccggcaucaacaacaucgccuucuccaacugaggacuaguacuggcugcaucucccuuuccucuguccuccauccuucucccaggauggugaagggggaccugguacccagugauccccaccccaggauccuaaaucaugacuuaccugcuaauaaaaacucauuggaaaagugagaagaucuaaaaaaaaaaaaaaaaaaaaaaaaaaaaaaaaaaaaaaaaaaaaaaaaaaaaaaaaaaaaaaaaugcaucccccccccccccccccccccccccccccccaaaggcucuuuucagagccaccagaauu

SEQ ID NO: 18668 - RNA, 1986 nt, Artificial Sequence
  mRNA product Design h-1 comprising derived and/or modified sequence from HRSV(Memphis-37)__AIY60640.1__F_DSCav1_mut7 (opt3)
gggagacccgugacccggaaguuguacggcuacgcgacuuucccucccacaaacccucgcgcccuuccuuuccuacuugggcccggcagaaagcuuaccauggagcugcccauccucaagaccaacgccauuacaacuauacuugcugcagugacgcugugcuucgccagcucccagaauaucaccgaagaguuuuaccaaucuacauguucagcggucaguaaaggcuauuugagcgcuuuaagaacugggugguacaccuccguuauuacaaucgaacugucuaacauuaaggagaauaaaugcaacggaaccgacgccaaggugaaacuaaucaagcaggaacucgauaaguauaaaaaugcaguaacugagcugcagaugcuuauguguucgaccccugccgcugguucaggcagcgcaauagccagugggaucgcugugugcaagguccugcacuuggagggagaagugaacaaaauuaagaaugcccuccuguccacaaacaaagcgguugugucucugagcaauggcgucuccgugcucacguucaagguauuagaccugaagaacuacaucgauaaacagcuuuugccaauucugaauaagcaaucauguaguaucagcaacauagagacuguuauggaauuucagcagaaaaauaacaggcuacucgagauuacccgggaguucucugugaaugccggugucacaacuccgguguccaccuauaugcugacaaacucagaacuucugagcuugaucaacgacaugcccauuaccaaugaucagaagaaacucaugaguaacaaugugcaaaucguccgccagcagucuuacuccaucaugugcauuauaaaggaggaaguucuggcauaugugguacaguuaccucuguacggggugaucgacacgccauguuggaaacuccauacuagcccccuuugcacaaccaacacuaaggagggaucgaauauuugucugacacgaaccgaucguggcugguacugcgacaacgcuggcucugucuccuuuuucccucaagccgaaacguguaaggugugcucaaauagaguguuuugcgauaccaugaacaguuugacacuaccaagcgagguuaaucuguguaacaucgacauauucaaucccaaauaugauugcaagauuaugacuuccaaaaccgacgucucuagcucagugaucacaagucucggggcaaucguauccuguuacggaaagacuaaaugcaccgcuagcaacaagaauaaggguauuaucaaaacauuuucuaacggcugugauuauguuucaaauaaggggguggacaccgucagugugggaaacacucuguacuaugucaacaaacaggagggcaagagccuuuacgugaaaggugaaccuauuauaaauuucuaugacccacugguuuuuccguccgaugaguucgacgccucuaucagccaggugaacgaaaagauuaaucaaucguuggcguuuaucaggaaguccgaugagcuccugcacaacguaaaugucgggaaaucaacgacaaacaucaugauuaccacuauaaucauugugaucauuguuaucuuacugcuacucauagccgugggacuguuccuuuacugcaaggcacggaguacccccgucacauugucuaaagaccagcugagcggcaucaauaacauugcuuucuccaauugaggacuaguacuggcugcaucucccuuuccucuguccuccauccuucucccaggauggugaagggggaccugguacccagugauccccaccccaggauccuaaaucaugacuuaccugcuaauaaaaacucauuggaaaagugagaagaucuaaaaaaaaaaaaaaaaaaaaaaaaaaaaaaaaaaaaaaaaaaaaaaaaaaaaaaaaaaaaaaaaugcaucccccccccccccccccccccccccccccccaaaggcucuuuucagagccaccagaauu

SEQ ID NO: 18669 - RNA, 1986 nt, Artificial Sequence
  mRNA product Design h-1 comprising derived and/or modified sequence from HRSV(Memphis-37)__AIY60640.1__F_DSCav1_mut7 (opt4)
gggagacccgugacccggaaguuguacggcuacgcgacuuucccucccacaaacccucgcgcccuuccuuuccuacuugggcccggcagaaagcuuaccauggagcugcccauccugaagaccaacgccaucaccaccauccuggccgccgugacccugugcuucgccagcagccagaacaucaccgaggaguucuaccagagcaccugcagcgccgugagcaagggcuaccugagcgcccugagaaccggcugguacaccagcgugaucaccaucgagcugagcaacaucaaggagaacaagugcaacggcaccgacgccaaggugaagcugaucaagcaggagcuggacaaguacaagaacgccgugaccgagcugcagaugcugaugugcagcacccccgccgccggcagcggcagcgccaucgccagcggcaucgccgugugcaaggugcugcaccuggagggcgaggugaacaagaucaagaacgcccugcugagcaccaacaaggccguggugagccugagcaacggcgugagcgugcugaccuucaaggugcuggaccugaagaacuacaucgacaagcagcugcugcccauccugaacaagcagagcugcagcaucagcaacaucgagaccgugauggaguuccagcagaagaacaacagacugcuggagaucaccagagaguucagcgugaacgccggcgugaccacccccgugagcaccuacaugcugaccaacagcgagcugcugagccugaucaacgacaugcccaucaccaacgaccagaagaagcugaugagcaacaacgugcagaucgugagacagcagagcuacagcaucaugugcaucaucaaggaggaggugcuggccuacguggugcagcugccccuguacggcgugaucgacacccccugcuggaagcugcacaccagcccccugugcaccaccaacaccaaggagggcagcaacaucugccugaccagaaccgacagaggcugguacugcgacaacgccggcagcgugagcuucuucccccaggccgagaccugcaaggugugcagcaacagaguguucugcgacaccaugaacagccugacccugcccagcgaggugaaccugugcaacaucgacaucuucaaccccaaguacgacugcaagaucaugaccagcaagaccgacgugagcagcagcgugaucaccagccugggcgccaucgugagcugcuacggcaagaccaagugcaccgccagcaacaagaacaagggcaucaucaagaccuucagcaacggcugcgacuacgugagcaacaagggcguggacaccgugagcgugggcaacacccuguacuacgugaacaagcaggagggcaagagccuguacgugaagggcgagcccaucaucaacuucuacgacccccugguguuccccagcgacgaguucgacgccagcaucagccaggugaacgagaagaucaaccagagccuggccuucaucagaaagagcgacgagcugcugcacaacgugaacgugggcaagagcaccaccaacaucaugaucaccaccaucaucaucgugaucaucgugauccugcugcugcugaucgccgugggccuguuccuguacugcaaggccagaagcacccccgugacccugagcaaggaccagcugagcggcaucaacaacaucgccuucagcaacugaggacuaguacuggcugcaucucccuuuccucuguccuccauccuucucccaggauggugaagggggaccugguacccagugauccccaccccaggauccuaaaucaugacuuaccugcuaauaaaaacucauuggaaaagugagaagaucuaaaaaaaaaaaaaaaaaaaaaaaaaaaaaaaaaaaaaaaaaaaaaaaaaaaaaaaaaaaaaaaaugcaucccccccccccccccccccccccccccccccaaaggcucuuuucagagccaccagaauu

SEQ ID NO: 18670 - RNA, 1986 nt, Artificial Sequence
  mRNA product Design h-1 comprising derived and/or modified sequence from HRSV(Memphis-37)__AIY60640.1__F_DSCav1_mut7 (opt5)
gggagacccgugacccggaaguuguacggcuacgcgacuuucccucccacaaacccucgcgcccuuccuuuccuacuugggcccggcagaaagcuuaccauggagcugcccauccucaagaccaacgccauuacaacgauccuggcugccgugacccuuugcuucgcgagcucccagaauauuacagaagaguuuuaccaaucuaccuguagcgcugucuccaaaggcuaucugucugcccucagaacagggugguacaccagcguuaucacaauugaacuguccaacaucaaggagaauaaaugcaacggaaccgacgccaaggugaaacuuaucaagcaggaacuggauaaguauaaaaaugcugugacggagcuccagaugcugauguguucuaccccugccgcuggcagcggguccgccauugcgagcggaaucgccgucugcaaggugcugcaccucgagggcgaaguuaacaaaauuaagaaugcucugcuuucuacaaacaaagccguggucucccugagcaauggggugucuguucucaccuucaaggugcuggaccuuaagaacuacaucgauaaacagcugcucccgauucugaauaagcaauccuguagcaucucuaacauugagacagucauggaauuucagcagaaaaauaaccggcugcucgagaucacccgcgaguucuccgugaaugcuggagugacgacacccgucagcaccuauaugcugacaaacuccgaacuucugucucucaucaacgacaugccuauuaccaaugaucagaagaaacugaugagcaacaauguucaaaucgugagacagcaguccuacagcauuaugugcaucauuaaggaggaagugcuugccuaugucgugcagcugccccucuacggcguuaucgacaccccuuguuggaaacugcauacaucuccccugugcacgaccaacacaaaggagggcuccaauaucugucucacccggacagaucgcgggugguacugcgacaacgcgggaagcgugagcuuuuucccucaagccgaaaccuguaaggucugcucuaauagaguguuuugcgauacgaugaacucccugacacuuccgucugagguuaaucuguguaacauugacaucuucaaucccaaauaugauugcaagauuaugaccagcaaaaccgacguguccagcucugucaucacaucccucggcgcuauugugagcuguuacgggaagaccaaaugcacagccucuaacaagaauaagggaaucaucaaaacguuuuccaacggcugugauuaugucagcaauaaggggguggacaccguuuccgugggaaacacacuguacuaugucaacaaacaggagggcaagucucuuuacgugaaaggcgaaccuauuaucaauuucuaugacccccugguuuuuccuagcgaugaguucgacgcuuccauuucucaggugaacgaaaagaucaaucaaagccucgccuuuauucggaaguccgaugagcugcugcacaacgucaauguggggaaaagcaccacaaacaucaugauuaccacgaucaucauugugaucauuguuauccuccugcuucugauugccgucggacucuuccuguacugcaaggcucgcucuacccccgugacacuguccaaagaccagcuuagcggcaucaauaacaucgcguucucuaauugaggacuaguacuggcugcaucucccuuuccucuguccuccauccuucucccaggauggugaagggggaccugguacccagugauccccaccccaggauccuaaaucaugacuuaccugcuaauaaaaacucauuggaaaagugagaagaucuaaaaaaaaaaaaaaaaaaaaaaaaaaaaaaaaaaaaaaaaaaaaaaaaaaaaaaaaaaaaaaaaugcaucccccccccccccccccccccccccccccccaaaggcucuuuucagagccaccagaauu

SEQ ID NO: 18671 - RNA, 1986 nt, Artificial Sequence
  mRNA product Design h-1 comprising derived and/or modified sequence from HRSV(Memphis-37)__AIY60640.1__F_DSCav1_mut7 (opt6)
gggagacccgugacccggaaguuguacggcuacgcgacuuucccucccacaaacccucgcgcccuuccuuuccuacuugggcccggcagaaagcuuaccauggaacuaccaauacucaaaacaaaugcuauaaccacaauacucgcagcaguaacauuauguuucgcaucaucccaaaacauaacagaagaauuuuaucaaucaaccuguucagcaguauccaaaggauaccuaagugcauuaagaaccggaugguacacaucaguaauaaccauagaacuuucaaacauaaaagaaaacaaauguaacggcacagacgcaaaagucaaacucaucaaacaggaacuugacaaauauaaaaacgcaguaaccgaacuacaaaugcuaaugugcucaacaccagcagcaggaucaggaucagcaauugcaucuggaauagcuguaugcaaaguccuacaccuagaaggagaaguaaacaaaaucaaaaacgcauuacucuccacaaacaaagcaguaguaucacuaucaaacggaguuucaguacuaaccuucaaaguauuagaccuaaaaaacuacauagacaaacaacuacuaccuauacuaaacaaacaauccuguucaauaagcaacauugaaacuguaauggaauuucaacaaaaaaacaaccgccuauuagaaauaaccagagaauuuuccguaaaugcaggaguaaccacaccagucucuacauacauguuaaccaacucagaacuauuaucacucauaaaugacaugccuauaacaaacgaccaaaaaaaacuaaugucaaacaacguacaaauaguaagacaacaaucauauuccauaaugugcauaauaaaagaagaaguacuugcauacgugguucaacuaccccuauauggaguuauagacacaccaugcuggaaacuccacacuuccccacuuugcacaacuaacacaaaagaaggaucaaauauaugccuaaccagaacagaccguggaugguacugcgacaacgcuggaucagucuccuucuuuccacaagcagaaaccugcaaagucugcucaaauagagucuucugugacacaaugaacucacucacccuacccucagaaguaaaccuauguaauauagauauauuuaauccaaaauacgacugcaaaauuaugacaaguaaaacagacguaagcucaucagucauaaccagccuaggagcaauaguauccuguuacggcaaaacaaaaugcacagcuucaaacaaaaacaaaggcauaauaaaaacauucucaaacggaugugacuauguaucaaauaaaggaguugacacaguaucaguuggaaacacacuauacuauguaaacaaacaagaaggaaaaucacuauacguuaaaggcgaacccauaaucaauuucuacgacccccuagucuucccauccgaugaauuugacgcaucaauaucccaaguaaaugaaaaaaucaaccaaucccuagcauuuauacgaaaauccgacgaacuacuccauaaugucaacgucgguaaaucaacgacaaacaucaugaucacaacaauaauaauaguaauaauuguaauauuacucuuacucauagcaguaggccuauuucuauauugcaaagccagaucaacaccaguaaccuuauccaaagaccaacuaucuggaauaaacaacauagcauuuuccaacugaggacuaguacuggcugcaucucccuuuccucuguccuccauccuucucccaggauggugaagggggaccugguacccagugauccccaccccaggauccuaaaucaugacuuaccugcuaauaaaaacucauuggaaaagugagaagaucuaaaaaaaaaaaaaaaaaaaaaaaaaaaaaaaaaaaaaaaaaaaaaaaaaaaaaaaaaaaaaaaaugcaucccccccccccccccccccccccccccccccaaaggcucuuuucagagccaccagaauu

SEQ ID NO: 18672 - RNA, 1986 nt, Artificial Sequence
  mRNA product Design h-1 comprising derived and/or modified sequence from HRSV(Memphis-37)__AIY60640.1__F_DSCav1_mut7 (opt11)
gggagacccgugacccggaaguuguacggcuacgcgacuuucccucccacaaacccucgcgcccuuccuuuccuacuugggcccggcagaaagcuuaccauggaacuccccauacuuaaaacaaacgccauaacaacuauacucgcagccgucacccucuguuucgcauccucucaaaacaucaccgaagaguucuaucaaucaaccugcuccgccgucucaaaaggcuaccucuccgcccuacgcacaggcugguacaccagcgucauuaccauagaacucucgaacaucaaagaaaacaaaugcaacggcaccgacgcaaaagugaaacucaucaaacaagaacucgacaaauacaaaaacgccgucaccgaacuucagaugcucaugugcuccaccccugccgccggcagcggcuccgccauagccuccggcaucgcagucugcaaaguccuccaccucgaaggagaaguaaacaaaaucaaaaaugcucuccucuccacaaacaaagccgucgucucacucuccaauggagucuccguccucaccuucaaaguccucgaccucaaaaacuacauagacaaacaacuacuccccauccucaacaagcaauccugcucuaucuccaacauagaaaccguuauggaguuccaacagaaaaauaaccgccugcuagaaauaacccgagaguucuccgucaacgcaggcgucacuacccccgucagcacauacaugcuaacaaacuccgaacugcucucccuuaucaacgacaugcccaucacaaacgaucagaaaaagcucaugucuaacaacguacaaaucguucggcaacaauccuacuccaucaugugcaucaucaaagaagaagugcucgccuacguaguccaacucccccucuacggagucaucgacacacccugcuggaaacuccacacaucaccccucugcaccaccaacacaaaagaaggguccaacaucugccucacgcgcaccgaccgaggcugguacugcgacaacgccggcuccguauccuucuucccccaagcagaaaccugcaaggucugcuccaaccgcguauucugcgacaccaugaacucgcucacccuccccucagaagucaaccuauguaacaucgacauauucaaucccaaauacgacugcaagauaaugacuuccaaaaccgacguaagcuccucggucaucaccucccucggcgccaucgucuccugcuacggcaaaaccaaaugcaccgccuccaauaagaauaaaggcauaauaaagacauucagcaacggcugcgauuacgucuccaacaaaggugucgacaccgucucagucggcaacacucuauacuacgugaacaaacaagaaggcaaaagccuauacguuaaaggcgaaccaauaaucaauuucuacgacccucuagucuuucccucugacgaguucgaugccagcauaagccaagucaacgaaaagaucaaccaaucacucgccuucauccguaaauccgacgaacugcuccacaaugucaauguaggcaaaucaacaaccaacaucaugaucaccacuauuaucaucgucaucaucguaauccuacuccuacuaaucgccgucggccuauuccucuacugcaaagcccgcucgacccccgucacucucagcaaggaucaacuauccggcaucaacaacaucgccuucuccaacuaaggacuaguacuggcugcaucucccuuuccucuguccuccauccuucucccaggauggugaagggggaccugguacccagugauccccaccccaggauccuaaaucaugacuuaccugcuaauaaaaacucauuggaaaagugagaagaucuaaaaaaaaaaaaaaaaaaaaaaaaaaaaaaaaaaaaaaaaaaaaaaaaaaaaaaaaaaaaaaaaugcaucccccccccccccccccccccccccccccccaaaggcucuuuucagagccaccagaauu

SEQ ID NO: 18673 - RNA, 2202 nt, Artificial Sequence
  mRNA product Design h-2 comprising derived and/or modified sequence from HRSV(Memphis-37)__AIY60640.1__F_DSCav1_mut7 (opt1)
gggagacccgugacccggaaguuguacggcuacgcgacuuucccucccacaaacccucgcgcccuuccuuuccuacuugggcccggcagaaagcuuaccauggagcugcccauccucaagaccaacgccaucaccacgauccuggccgcggugacccugugcuucgccagcucccagaacaucaccgaggaguucuaccagagcacgugcuccgccgucagcaagggcuaccucuccgcccugcgcaccgggugguacaccagcgugaucaccaucgagcuguccaacaucaaggagaacaagugcaacggcaccgacgccaaggugaagcucaucaagcaggagcuggacaaguacaagaacgcggucacggagcugcagaugcugaugugcagcaccccggccgccggcuccgggagcgcgaucgccuccggcaucgccgucugcaaggugcugcaccucgagggcgaggugaacaagaucaagaacgcccugcuguccaccaacaaggccgucgugagccucuccaacggggugagcguccugaccuucaaggugcuggaccucaagaacuacaucgacaagcagcugcugcccauccugaacaagcagagcugcuccaucagcaacaucgagaccgucauggaguuccagcagaagaacaaccgccuccuggagaucacgcgggaguucagcgugaacgcgggcgugaccacccccgucuccaccuacaugcugacgaacagcgagcuccugucccugaucaacgacaugccgaucaccaacgaccagaagaagcucaugagcaacaacgugcagaucgugcgccagcaguccuacagcaucaugugcaucaucaaggaggagguccuggccuacguggugcagcugccccucuacggggucaucgacacccccugcuggaagcugcacaccagcccccugugcacgaccaacaccaaggagggcuccaacaucugccucacccggacggaccgcgggugguacugcgacaacgccggcagcguguccuucuucccgcaggccgagaccugcaaggucugcagcaaccggguguucugcgacaccaugaacucccugacccugcccagcgaggugaaccucugcaacaucgacaucuucaaccccaaguacgacugcaagaucaugacguccaagaccgacgucagcuccagcgugaucaccucccugggcgccaucgugagcugcuacgggaagaccaagugcacggcgagcaacaagaacaagggcaucaucaagaccuucuccaacgggugcgacuacgucagcaacaagggcguggacaccguguccgucggcaacacccuguacuacgugaacaagcaggagggcaagagccucuacgugaagggggagcccaucaucaacuucuacgacccgcuggucuuccccuccgacgaguucgacgccagcaucucccaggugaacgagaagaucaaccagagccuggccuucauccggaaguccgacgagcuccugcacaacgugaacgucggcaagagcaccacgaacaucaugaucaccaccaucaucaucgugaucaucgugauccugcugcuccugaucgccgucgggcuguuccucuacugcaaggcccgcuccacccccgugacgcugagcaaggaccagcuguccgggaucaacaacaucgcguucagcaacugaggacuagugaagggaacacccaaauuuaauucagccuuaagcacaauuaauuaagagugaaacguaauuguacaagcaguuggucacccaccauagggcaugaucaacaccgcaaccuuuccuuuuucccccagugauucugaaaaaccccucuucccuucagcuugcuuagauguuccaaauuuaguaagcuuaaggcggccuacagaagaaaaagaaaaaaaaggccacaaaaguucccucucacuuucaguaaauaaaauaaaagcagcaacagaaauaaagaaauaaaugaaauucaaaaugaaauaaauauuguguugugcagcauuaaaaaaucaauaaaaauuaaaaaugagcaagaucuaaaaaaaaaaaaaaaaaaaaaaaaaaaaaaaaaaaaaaaaaaaaaaaaaaaaaaaaaaaaaaaaugcaucccccccccccccccccccccccccccccccaaaggcucuuuucagagccaccagaauu

SEQ ID NO: 18674 - RNA, 2202 nt, Artificial Sequence
  mRNA product Design h-2 comprising derived and/or modified sequence from HRSV(Memphis-37)__AIY60640.1__F_DSCav1_mut7 (opt1)
gggagacccgugacccggaaguuguacggcuacgcgacuuucccucccacaaacccucgcgcccuuccuuuccuacuugggcccggcagaaagcuuaccauggagcugcccauccucaagaccaacgccaucaccacgauccuggccgcggugacccugugcuucgccagcucccagaacaucaccgaggaguucuaccagagcacgugcuccgccgucagcaagggcuaccucuccgcccugcgcaccgggugguacaccagcgugaucaccaucgagcuguccaacaucaaggagaacaagugcaacggcaccgacgccaaggugaagcucaucaagcaggagcuggacaaguacaagaacgcggucacggagcugcagaugcucaugugcagcaccccggccgccggguccggcagcgccaucgcguccgggaucgccgugugcaaggugcugcaccuggagggcgaggucaacaagaucaagaacgcccuccugagcaccaacaaggccguggugucccugagcaacggcgucuccgugcucaccuucaaggugcuggaccugaagaacuacaucgacaagcagcuccugcccauccugaacaagcagagcugcuccaucagcaacaucgagacggucauggaguuccagcagaagaacaaccggcuccuggagaucacccgcgaguucuccgugaacgccggggugaccacccccgucagcacguacaugcugaccaacagcgagcuccugucccugaucaacgacaugcccaucaccaacgaccagaagaagcucaugagcaacaacgugcagaucgugcggcagcaguccuacagcaucaugugcaucaucaaggaggagguccuggcguacguggugcagcugccgcucuacggcgucaucgacacccccugcuggaagcugcacacgagcccccugugcaccaccaacaccaaggaggggagcaacaucugccucacgcgcaccgaccggggcugguacugcgacaacgccggguccgugagcuucuucccccaggccgagaccugcaaggugugcuccaaccgcgucuucugcgacaccaugaacagccugacgcugccguccgaggugaaccucugcaacaucgacaucuucaaccccaaguacgacugcaagaucaugaccagcaagaccgacgucuccagcuccgugaucaccagccugggcgccaucguguccugcuacggcaagacgaagugcaccgccagcaacaagaacaaggggaucaucaagaccuucuccaacggcugcgacuacgucagcaacaaggggguggacaccgugagcgucggcaacacgcuguacuacgugaacaagcaggagggcaagucccucuacgugaagggggagcccaucaucaacuucuacgacccccuggucuucccgagcgacgaguucgacgcguccaucagccaggugaacgagaagaucaaccagucccuggccuucauccggaaguccgacgagcuccugcacaacgugaacgucggcaaguccaccaccaacaucaugaucaccaccaucaucaucgugaucaucgugauccugcuccugcugaucgccgucggccucuuccuguacugcaaggcccgcagcacgcccgugacccuguccaaggaccagcugagcgggaucaacaacaucgccuucuccaacugaggacuagugaagggaacacccaaauuuaauucagccuuaagcacaauuaauuaagagugaaacguaauuguacaagcaguuggucacccaccauagggcaugaucaacaccgcaaccuuuccuuuuucccccagugauucugaaaaaccccucuucccuucagcuugcuuagauguuccaaauuuaguaagcuuaaggcggccuacagaagaaaaagaaaaaaaaggccacaaaaguucccucucacuuucaguaaauaaaauaaaagcagcaacagaaauaaagaaauaaaugaaauucaaaaugaaauaaauauuguguugugcagcauuaaaaaaucaauaaaaauuaaaaaugagcaagaucuaaaaaaaaaaaaaaaaaaaaaaaaaaaaaaaaaaaaaaaaaaaaaaaaaaaaaaaaaaaaaaaaugcaucccccccccccccccccccccccccccccccaaaggcucuuuucagagccaccagaauu

SEQ ID NO: 18675 - RNA, 2202 nt, Artificial Sequence
  mRNA product Design h-2 comprising derived and/or modified sequence from HRSV(Memphis-37)__AIY60640.1__F_DSCav1_mut7 (opt2)
gggagacccgugacccggaaguuguacggcuacgcgacuuucccucccacaaacccucgcgcccuuccuuuccuacuugggcccggcagaaagcuuaccauggagcuccccauccucaagaccaacgccaucaccaccauccucgccgccgucacccucugcuucgccuccucccagaacaucaccgaggaguucuaccaguccaccugcuccgccgucuccaagggcuaccucuccgcccuccgcaccggcugguacaccuccgucaucaccaucgagcucuccaacaucaaggagaacaagugcaacggcaccgacgccaaggucaagcucaucaagcaggagcucgacaaguacaagaacgccgucaccgagcuccagaugcucaugugcuccacccccgccgccggcuccggcuccgccaucgccuccggcaucgccgucugcaagguccuccaccucgagggcgaggucaacaagaucaagaacgcccuccucuccaccaacaaggccgucgucucccucuccaacggcgucuccguccucaccuucaagguccucgaccucaagaacuacaucgacaagcagcuccuccccauccucaacaagcaguccugcuccaucuccaacaucgagaccgucauggaguuccagcagaagaacaaccgccuccucgagaucacccgcgaguucuccgucaacgccggcgucaccacccccgucuccaccuacaugcucaccaacuccgagcuccucucccucaucaacgacaugcccaucaccaacgaccagaagaagcucauguccaacaacguccagaucguccgccagcaguccuacuccaucaugugcaucaucaaggaggagguccucgccuacgucguccagcucccccucuacggcgucaucgacacccccugcuggaagcuccacaccuccccccucugcaccaccaacaccaaggagggcuccaacaucugccucacccgcaccgaccgcggcugguacugcgacaacgccggcuccgucuccuucuucccccaggccgagaccugcaaggucugcuccaaccgcgucuucugcgacaccaugaacucccucacccuccccuccgaggucaaccucugcaacaucgacaucuucaaccccaaguacgacugcaagaucaugaccuccaagaccgacgucuccuccuccgucaucaccucccucggcgccaucgucuccugcuacggcaagaccaagugcaccgccuccaacaagaacaagggcaucaucaagaccuucuccaacggcugcgacuacgucuccaacaagggcgucgacaccgucuccgucggcaacacccucuacuacgucaacaagcaggagggcaagucccucuacgucaagggcgagcccaucaucaacuucuacgacccccucgucuuccccuccgacgaguucgacgccuccaucucccaggucaacgagaagaucaaccagucccucgccuucauccgcaaguccgacgagcuccuccacaacgucaacgucggcaaguccaccaccaacaucaugaucaccaccaucaucaucgucaucaucgucauccuccuccuccucaucgccgucggccucuuccucuacugcaaggcccgcuccacccccgucacccucuccaaggaccagcucuccggcaucaacaacaucgccuucuccaacugaggacuagugaagggaacacccaaauuuaauucagccuuaagcacaauuaauuaagagugaaacguaauuguacaagcaguuggucacccaccauagggcaugaucaacaccgcaaccuuuccuuuuucccccagugauucugaaaaaccccucuucccuucagcuugcuuagauguuccaaauuuaguaagcuuaaggcggccuacagaagaaaaagaaaaaaaaggccacaaaaguucccucucacuuucaguaaauaaaauaaaagcagcaacagaaauaaagaaauaaaugaaauucaaaaugaaauaaauauuguguugugcagcauuaaaaaaucaauaaaaauuaaaaaugagcaagaucuaaaaaaaaaaaaaaaaaaaaaaaaaaaaaaaaaaaaaaaaaaaaaaaaaaaaaaaaaaaaaaaaugcaucccccccccccccccccccccccccccccccaaaggcucuuuucagagccaccagaauu

SEQ ID NO: 18676 - RNA, 2202 nt, Artificial Sequence
  mRNA product Design h-2 comprising derived and/or modified sequence from HRSV(Memphis-37)__AIY60640.1__F_DSCav1_mut7 (opt3)
gggagacccgugacccggaaguuguacggcuacgcgacuuucccucccacaaacccucgcgcccuuccuuuccuacuugggcccggcagaaagcuuaccauggagcugcccauccucaagaccaacgccauuacaacuauacuugcugcagugacgcugugcuucgccagcucccagaauaucaccgaagaguuuuaccaaucuacauguucagcggucaguaaaggcuauuugagcgcuuuaagaacugggugguacaccuccguuauuacaaucgaacugucuaacauuaaggagaauaaaugcaacggaaccgacgccaaggugaaacuaaucaagcaggaacucgauaaguauaaaaaugcaguaacugagcugcagaugcuuauguguucgaccccugccgcugguucaggcagcgcaauagccagugggaucgcugugugcaagguccugcacuuggagggagaagugaacaaaauuaagaaugcccuccuguccacaaacaaagcgguugugucucugagcaauggcgucuccgugcucacguucaagguauuagaccugaagaacuacaucgauaaacagcuuuugccaauucugaauaagcaaucauguaguaucagcaacauagagacuguuauggaauuucagcagaaaaauaacaggcuacucgagauuacccgggaguucucugugaaugccggugucacaacuccgguguccaccuauaugcugacaaacucagaacuucugagcuugaucaacgacaugcccauuaccaaugaucagaagaaacucaugaguaacaaugugcaaaucguccgccagcagucuuacuccaucaugugcauuauaaaggaggaaguucuggcauaugugguacaguuaccucuguacggggugaucgacacgccauguuggaaacuccauacuagcccccuuugcacaaccaacacuaaggagggaucgaauauuugucugacacgaaccgaucguggcugguacugcgacaacgcuggcucugucuccuuuuucccucaagccgaaacguguaaggugugcucaaauagaguguuuugcgauaccaugaacaguuugacacuaccaagcgagguuaaucuguguaacaucgacauauucaaucccaaauaugauugcaagauuaugacuuccaaaaccgacgucucuagcucagugaucacaagucucggggcaaucguauccuguuacggaaagacuaaaugcaccgcuagcaacaagaauaaggguauuaucaaaacauuuucuaacggcugugauuauguuucaaauaaggggguggacaccgucagugugggaaacacucuguacuaugucaacaaacaggagggcaagagccuuuacgugaaaggugaaccuauuauaaauuucuaugacccacugguuuuuccguccgaugaguucgacgccucuaucagccaggugaacgaaaagauuaaucaaucguuggcguuuaucaggaaguccgaugagcuccugcacaacguaaaugucgggaaaucaacgacaaacaucaugauuaccacuauaaucauugugaucauuguuaucuuacugcuacucauagccgugggacuguuccuuuacugcaaggcacggaguacccccgucacauugucuaaagaccagcugagcggcaucaauaacauugcuuucuccaauugaggacuagugaagggaacacccaaauuuaauucagccuuaagcacaauuaauuaagagugaaacguaauuguacaagcaguuggucacccaccauagggcaugaucaacaccgcaaccuuuccuuuuucccccagugauucugaaaaaccccucuucccuucagcuugcuuagauguuccaaauuuaguaagcuuaaggcggccuacagaagaaaaagaaaaaaaaggccacaaaaguucccucucacuuucaguaaauaaaauaaaagcagcaacagaaauaaagaaauaaaugaaauucaaaaugaaauaaauauuguguugugcagcauuaaaaaaucaauaaaaauuaaaaaugagcaagaucuaaaaaaaaaaaaaaaaaaaaaaaaaaaaaaaaaaaaaaaaaaaaaaaaaaaaaaaaaaaaaaaaugcaucccccccccccccccccccccccccccccccaaaggcucuuuucagagccaccagaauu

SEQ ID NO: 18677 - RNA, 2202 nt, Artificial Sequence
  mRNA product Design h-2 comprising derived and/or modified sequence from HRSV(Memphis-37)__AIY60640.1__F_DSCav1_mut7 (opt4)
gggagacccgugacccggaaguuguacggcuacgcgacuuucccucccacaaacccucgcgcccuuccuuuccuacuugggcccggcagaaagcuuaccauggagcugcccauccugaagaccaacgccaucaccaccauccuggccgccgugacccugugcuucgccagcagccagaacaucaccgaggaguucuaccagagcaccugcagcgccgugagcaagggcuaccugagcgcccugagaaccggcugguacaccagcgugaucaccaucgagcugagcaacaucaaggagaacaagugcaacggcaccgacgccaaggugaagcugaucaagcaggagcuggacaaguacaagaacgccgugaccgagcugcagaugcugaugugcagcacccccgccgccggcagcggcagcgccaucgccagcggcaucgccgugugcaaggugcugcaccuggagggcgaggugaacaagaucaagaacgcccugcugagcaccaacaaggccguggugagccugagcaacggcgugagcgugcugaccuucaaggugcuggaccugaagaacuacaucgacaagcagcugcugcccauccugaacaagcagagcugcagcaucagcaacaucgagaccgugauggaguuccagcagaagaacaacagacugcuggagaucaccagagaguucagcgugaacgccggcgugaccacccccgugagcaccuacaugcugaccaacagcgagcugcugagccugaucaacgacaugcccaucaccaacgaccagaagaagcugaugagcaacaacgugcagaucgugagacagcagagcuacagcaucaugugcaucaucaaggaggaggugcuggccuacguggugcagcugccccuguacggcgugaucgacacccccugcuggaagcugcacaccagcccccugugcaccaccaacaccaaggagggcagcaacaucugccugaccagaaccgacagaggcugguacugcgacaacgccggcagcgugagcuucuucccccaggccgagaccugcaaggugugcagcaacagaguguucugcgacaccaugaacagccugacccugcccagcgaggugaaccugugcaacaucgacaucuucaaccccaaguacgacugcaagaucaugaccagcaagaccgacgugagcagcagcgugaucaccagccugggcgccaucgugagcugcuacggcaagaccaagugcaccgccagcaacaagaacaagggcaucaucaagaccuucagcaacggcugcgacuacgugagcaacaagggcguggacaccgugagcgugggcaacacccuguacuacgugaacaagcaggagggcaagagccuguacgugaagggcgagcccaucaucaacuucuacgacccccugguguuccccagcgacgaguucgacgccagcaucagccaggugaacgagaagaucaaccagagccuggccuucaucagaaagagcgacgagcugcugcacaacgugaacgugggcaagagcaccaccaacaucaugaucaccaccaucaucaucgugaucaucgugauccugcugcugcugaucgccgugggccuguuccuguacugcaaggccagaagcacccccgugacccugagcaaggaccagcugagcggcaucaacaacaucgccuucagcaacugaggacuagugaagggaacacccaaauuuaauucagccuuaagcacaauuaauuaagagugaaacguaauuguacaagcaguuggucacccaccauagggcaugaucaacaccgcaaccuuuccuuuuucccccagugauucugaaaaaccccucuucccuucagcuugcuuagauguuccaaauuuaguaagcuuaaggcggccuacagaagaaaaagaaaaaaaaggccacaaaaguucccucucacuuucaguaaauaaaauaaaagcagcaacagaaauaaagaaauaaaugaaauucaaaaugaaauaaauauuguguugugcagcauuaaaaaaucaauaaaaauuaaaaaugagcaagaucuaaaaaaaaaaaaaaaaaaaaaaaaaaaaaaaaaaaaaaaaaaaaaaaaaaaaaaaaaaaaaaaaugcaucccccccccccccccccccccccccccccccaaaggcucuuuucagagccaccagaauu

SEQ ID NO: 18678 - RNA, 2202 nt, Artificial Sequence
  mRNA product Design h-2 comprising derived and/or modified sequence from HRSV(Memphis-37)__AIY60640.1__F_DSCav1_mut7 (opt5)
gggagacccgugacccggaaguuguacggcuacgcgacuuucccucccacaaacccucgcgcccuuccuuuccuacuugggcccggcagaaagcuuaccauggagcugcccauccucaagaccaacgccauuacaacgauccuggcugccgugacccuuugcuucgcgagcucccagaauauuacagaagaguuuuaccaaucuaccuguagcgcugucuccaaaggcuaucugucugcccucagaacagggugguacaccagcguuaucacaauugaacuguccaacaucaaggagaauaaaugcaacggaaccgacgccaaggugaaacuuaucaagcaggaacuggauaaguauaaaaaugcugugacggagcuccagaugcugauguguucuaccccugccgcuggcagcggguccgccauugcgagcggaaucgccgucugcaaggugcugcaccucgagggcgaaguuaacaaaauuaagaaugcucugcuuucuacaaacaaagccguggucucccugagcaauggggugucuguucucaccuucaaggugcuggaccuuaagaacuacaucgauaaacagcugcucccgauucugaauaagcaauccuguagcaucucuaacauugagacagucauggaauuucagcagaaaaauaaccggcugcucgagaucacccgcgaguucuccgugaaugcuggagugacgacacccgucagcaccuauaugcugacaaacuccgaacuucugucucucaucaacgacaugccuauuaccaaugaucagaagaaacugaugagcaacaauguucaaaucgugagacagcaguccuacagcauuaugugcaucauuaaggaggaagugcuugccuaugucgugcagcugccccucuacggcguuaucgacaccccuuguuggaaacugcauacaucuccccugugcacgaccaacacaaaggagggcuccaauaucugucucacccggacagaucgcgggugguacugcgacaacgcgggaagcgugagcuuuuucccucaagccgaaaccuguaaggucugcucuaauagaguguuuugcgauacgaugaacucccugacacuuccgucugagguuaaucuguguaacauugacaucuucaaucccaaauaugauugcaagauuaugaccagcaaaaccgacguguccagcucugucaucacaucccucggcgcuauugugagcuguuacgggaagaccaaaugcacagccucuaacaagaauaagggaaucaucaaaacguuuuccaacggcugugauuaugucagcaauaaggggguggacaccguuuccgugggaaacacacuguacuaugucaacaaacaggagggcaagucucuuuacgugaaaggcgaaccuauuaucaauuucuaugacccccugguuuuuccuagcgaugaguucgacgcuuccauuucucaggugaacgaaaagaucaaucaaagccucgccuuuauucggaaguccgaugagcugcugcacaacgucaauguggggaaaagcaccacaaacaucaugauuaccacgaucaucauugugaucauuguuauccuccugcuucugauugccgucggacucuuccuguacugcaaggcucgcucuacccccgugacacuguccaaagaccagcuuagcggcaucaauaacaucgcguucucuaauugaggacuagugaagggaacacccaaauuuaauucagccuuaagcacaauuaauuaagagugaaacguaauuguacaagcaguuggucacccaccauagggcaugaucaacaccgcaaccuuuccuuuuucccccagugauucugaaaaaccccucuucccuucagcuugcuuagauguuccaaauuuaguaagcuuaaggcggccuacagaagaaaaagaaaaaaaaggccacaaaaguucccucucacuuucaguaaauaaaauaaaagcagcaacagaaauaaagaaauaaaugaaauucaaaaugaaauaaauauuguguugugcagcauuaaaaaaucaauaaaaauuaaaaaugagcaagaucuaaaaaaaaaaaaaaaaaaaaaaaaaaaaaaaaaaaaaaaaaaaaaaaaaaaaaaaaaaaaaaaaugcaucccccccccccccccccccccccccccccccaaaggcucuuuucagagccaccagaauu

SEQ ID NO: 18679 - RNA, 2202 nt, Artificial Sequence
  mRNA product Design h-2 comprising derived and/or modified sequence from HRSV(Memphis-37)__AIY60640.1__F_DSCav1_mut7 (opt6)
gggagacccgugacccggaaguuguacggcuacgcgacuuucccucccacaaacccucgcgcccuuccuuuccuacuugggcccggcagaaagcuuaccauggaacuaccaauacucaaaacaaaugcuauaaccacaauacucgcagcaguaacauuauguuucgcaucaucccaaaacauaacagaagaauuuuaucaaucaaccuguucagcaguauccaaaggauaccuaagugcauuaagaaccggaugguacacaucaguaauaaccauagaacuuucaaacauaaaagaaaacaaauguaacggcacagacgcaaaagucaaacucaucaaacaggaacuugacaaauauaaaaacgcaguaaccgaacuacaaaugcuaaugugcucaacaccagcagcaggaucaggaucagcaauugcaucuggaauagcuguaugcaaaguccuacaccuagaaggagaaguaaacaaaaucaaaaacgcauuacucuccacaaacaaagcaguaguaucacuaucaaacggaguuucaguacuaaccuucaaaguauuagaccuaaaaaacuacauagacaaacaacuacuaccuauacuaaacaaacaauccuguucaauaagcaacauugaaacuguaauggaauuucaacaaaaaaacaaccgccuauuagaaauaaccagagaauuuuccguaaaugcaggaguaaccacaccagucucuacauacauguuaaccaacucagaacuauuaucacucauaaaugacaugccuauaacaaacgaccaaaaaaaacuaaugucaaacaacguacaaauaguaagacaacaaucauauuccauaaugugcauaauaaaagaagaaguacuugcauacgugguucaacuaccccuauauggaguuauagacacaccaugcuggaaacuccacacuuccccacuuugcacaacuaacacaaaagaaggaucaaauauaugccuaaccagaacagaccguggaugguacugcgacaacgcuggaucagucuccuucuuuccacaagcagaaaccugcaaagucugcucaaauagagucuucugugacacaaugaacucacucacccuacccucagaaguaaaccuauguaauauagauauauuuaauccaaaauacgacugcaaaauuaugacaaguaaaacagacguaagcucaucagucauaaccagccuaggagcaauaguauccuguuacggcaaaacaaaaugcacagcuucaaacaaaaacaaaggcauaauaaaaacauucucaaacggaugugacuauguaucaaauaaaggaguugacacaguaucaguuggaaacacacuauacuauguaaacaaacaagaaggaaaaucacuauacguuaaaggcgaacccauaaucaauuucuacgacccccuagucuucccauccgaugaauuugacgcaucaauaucccaaguaaaugaaaaaaucaaccaaucccuagcauuuauacgaaaauccgacgaacuacuccauaaugucaacgucgguaaaucaacgacaaacaucaugaucacaacaauaauaauaguaauaauuguaauauuacucuuacucauagcaguaggccuauuucuauauugcaaagccagaucaacaccaguaaccuuauccaaagaccaacuaucuggaauaaacaacauagcauuuuccaacugaggacuagugaagggaacacccaaauuuaauucagccuuaagcacaauuaauuaagagugaaacguaauuguacaagcaguuggucacccaccauagggcaugaucaacaccgcaaccuuuccuuuuucccccagugauucugaaaaaccccucuucccuucagcuugcuuagauguuccaaauuuaguaagcuuaaggcggccuacagaagaaaaagaaaaaaaaggccacaaaaguucccucucacuuucaguaaauaaaauaaaagcagcaacagaaauaaagaaauaaaugaaauucaaaaugaaauaaauauuguguugugcagcauuaaaaaaucaauaaaaauuaaaaaugagcaagaucuaaaaaaaaaaaaaaaaaaaaaaaaaaaaaaaaaaaaaaaaaaaaaaaaaaaaaaaaaaaaaaaaugcaucccccccccccccccccccccccccccccccaaaggcucuuuucagagccaccagaauu

SEQ ID NO: 18680 - RNA, 2202 nt, Artificial Sequence
  mRNA product Design h-2 comprising derived and/or modified sequence from HRSV(Memphis-37)__AIY60640.1__F_DSCav1_mut7 (opt11)
gggagacccgugacccggaaguuguacggcuacgcgacuuucccucccacaaacccucgcgcccuuccuuuccuacuugggcccggcagaaagcuuaccauggaacuccccauacuuaaaacaaacgccauaacaacuauacucgcagccgucacccucuguuucgcauccucucaaaacaucaccgaagaguucuaucaaucaaccugcuccgccgucucaaaaggcuaccucuccgcccuacgcacaggcugguacaccagcgucauuaccauagaacucucgaacaucaaagaaaacaaaugcaacggcaccgacgcaaaagugaaacucaucaaacaagaacucgacaaauacaaaaacgccgucaccgaacuucagaugcucaugugcuccaccccugccgccggcagcggcuccgccauagccuccggcaucgcagucugcaaaguccuccaccucgaaggagaaguaaacaaaaucaaaaaugcucuccucuccacaaacaaagccgucgucucacucuccaauggagucuccguccucaccuucaaaguccucgaccucaaaaacuacauagacaaacaacuacuccccauccucaacaagcaauccugcucuaucuccaacauagaaaccguuauggaguuccaacagaaaaauaaccgccugcuagaaauaacccgagaguucuccgucaacgcaggcgucacuacccccgucagcacauacaugcuaacaaacuccgaacugcucucccuuaucaacgacaugcccaucacaaacgaucagaaaaagcucaugucuaacaacguacaaaucguucggcaacaauccuacuccaucaugugcaucaucaaagaagaagugcucgccuacguaguccaacucccccucuacggagucaucgacacacccugcuggaaacuccacacaucaccccucugcaccaccaacacaaaagaaggguccaacaucugccucacgcgcaccgaccgaggcugguacugcgacaacgccggcuccguauccuucuucccccaagcagaaaccugcaaggucugcuccaaccgcguauucugcgacaccaugaacucgcucacccuccccucagaagucaaccuauguaacaucgacauauucaaucccaaauacgacugcaagauaaugacuuccaaaaccgacguaagcuccucggucaucaccucccucggcgccaucgucuccugcuacggcaaaaccaaaugcaccgccuccaauaagaauaaaggcauaauaaagacauucagcaacggcugcgauuacgucuccaacaaaggugucgacaccgucucagucggcaacacucuauacuacgugaacaaacaagaaggcaaaagccuauacguuaaaggcgaaccaauaaucaauuucuacgacccucuagucuuucccucugacgaguucgaugccagcauaagccaagucaacgaaaagaucaaccaaucacucgccuucauccguaaauccgacgaacugcuccacaaugucaauguaggcaaaucaacaaccaacaucaugaucaccacuauuaucaucgucaucaucguaauccuacuccuacuaaucgccgucggccuauuccucuacugcaaagcccgcucgacccccgucacucucagcaaggaucaacuauccggcaucaacaacaucgccuucuccaacuaaggacuagugaagggaacacccaaauuuaauucagccuuaagcacaauuaauuaagagugaaacguaauuguacaagcaguuggucacccaccauagggcaugaucaacaccgcaaccuuuccuuuuucccccagugauucugaaaaaccccucuucccuucagcuugcuuagauguuccaaauuuaguaagcuuaaggcggccuacagaagaaaaagaaaaaaaaggccacaaaaguucccucucacuuucaguaaauaaaauaaaagcagcaacagaaauaaagaaauaaaugaaauucaaaaugaaauaaauauuguguugugcagcauuaaaaaaucaauaaaaauuaaaaaugagcaagaucuaaaaaaaaaaaaaaaaaaaaaaaaaaaaaaaaaaaaaaaaaaaaaaaaaaaaaaaaaaaaaaaaugcaucccccccccccccccccccccccccccccccaaaggcucuuuucagagccaccagaauu

SEQ ID NO: 18681 - RNA, 1982 nt, Artificial Sequence
  mRNA product Design h-3 comprising derived and/or modified sequence from HRSV(Memphis-37)__AIY60640.1__F_DSCav1_mut7 (opt1)
gggagacccgugacccggaaguuguacggcuacgcgacuuucccucccacaaacccucgcgcccuuccuuuccuacuugggcccggcagaaagcuuaccauggagcugcccauccucaagaccaacgccaucaccacgauccuggccgcggugacccugugcuucgccagcucccagaacaucaccgaggaguucuaccagagcacgugcuccgccgucagcaagggcuaccucuccgcccugcgcaccgggugguacaccagcgugaucaccaucgagcuguccaacaucaaggagaacaagugcaacggcaccgacgccaaggugaagcucaucaagcaggagcuggacaaguacaagaacgcggucacggagcugcagaugcugaugugcagcaccccggccgccggcuccgggagcgcgaucgccuccggcaucgccgucugcaaggugcugcaccucgagggcgaggugaacaagaucaagaacgcccugcuguccaccaacaaggccgucgugagccucuccaacggggugagcguccugaccuucaaggugcuggaccucaagaacuacaucgacaagcagcugcugcccauccugaacaagcagagcugcuccaucagcaacaucgagaccgucauggaguuccagcagaagaacaaccgccuccuggagaucacgcgggaguucagcgugaacgcgggcgugaccacccccgucuccaccuacaugcugacgaacagcgagcuccugucccugaucaacgacaugccgaucaccaacgaccagaagaagcucaugagcaacaacgugcagaucgugcgccagcaguccuacagcaucaugugcaucaucaaggaggagguccuggccuacguggugcagcugccccucuacggggucaucgacacccccugcuggaagcugcacaccagcccccugugcacgaccaacaccaaggagggcuccaacaucugccucacccggacggaccgcgggugguacugcgacaacgccggcagcguguccuucuucccgcaggccgagaccugcaaggucugcagcaaccggguguucugcgacaccaugaacucccugacccugcccagcgaggugaaccucugcaacaucgacaucuucaaccccaaguacgacugcaagaucaugacguccaagaccgacgucagcuccagcgugaucaccucccugggcgccaucgugagcugcuacgggaagaccaagugcacggcgagcaacaagaacaagggcaucaucaagaccuucuccaacgggugcgacuacgucagcaacaagggcguggacaccguguccgucggcaacacccuguacuacgugaacaagcaggagggcaagagccucuacgugaagggggagcccaucaucaacuucuacgacccgcuggucuuccccuccgacgaguucgacgccagcaucucccaggugaacgagaagaucaaccagagccuggccuucauccggaaguccgacgagcuccugcacaacgugaacgucggcaagagcaccacgaacaucaugaucaccaccaucaucaucgugaucaucgugauccugcugcuccugaucgccgucgggcuguuccucuacugcaaggcccgcuccacccccgugacgcugagcaaggaccagcuguccgggaucaacaacaucgcguucagcaacugaggacuaguggaagcauuuuccuggcugauuaaaagaaauuacucagcuauggucaucuguuccuguuagaaggcuaugcagcauauuauauacuaugcgcauguuaugaaaugcauaauaaaaaauuuuaaaaaaucuaaaagaucuaaaaaaaaaaaaaaaaaaaaaaaaaaaaaaaaaaaaaaaaaaaaaaaaaaaaaaaaaaaaaaaaugcaucccccccccccccccccccccccccccccccaaaggcucuuuucagagccaccagaauu

SEQ ID NO: 18682 - RNA, 1982 nt, Artificial Sequence
  mRNA product Design h-3 comprising derived and/or modified sequence from HRSV(Memphis-37)__AIY60640.1__F_DSCav1_mut7 (opt1)
gggagacccgugacccggaaguuguacggcuacgcgacuuucccucccacaaacccucgcgcccuuccuuuccuacuugggcccggcagaaagcuuaccauggagcugcccauccucaagaccaacgccaucaccacgauccuggccgcggugacccugugcuucgccagcucccagaacaucaccgaggaguucuaccagagcacgugcuccgccgucagcaagggcuaccucuccgcccugcgcaccgggugguacaccagcgugaucaccaucgagcuguccaacaucaaggagaacaagugcaacggcaccgacgccaaggugaagcucaucaagcaggagcuggacaaguacaagaacgcggucacggagcugcagaugcucaugugcagcaccccggccgccggguccggcagcgccaucgcguccgggaucgccgugugcaaggugcugcaccuggagggcgaggucaacaagaucaagaacgcccuccugagcaccaacaaggccguggugucccugagcaacggcgucuccgugcucaccuucaaggugcuggaccugaagaacuacaucgacaagcagcuccugcccauccugaacaagcagagcugcuccaucagcaacaucgagacggucauggaguuccagcagaagaacaaccggcuccuggagaucacccgcgaguucuccgugaacgccggggugaccacccccgucagcacguacaugcugaccaacagcgagcuccugucccugaucaacgacaugcccaucaccaacgaccagaagaagcucaugagcaacaacgugcagaucgugcggcagcaguccuacagcaucaugugcaucaucaaggaggagguccuggcguacguggugcagcugccgcucuacggcgucaucgacacccccugcuggaagcugcacacgagcccccugugcaccaccaacaccaaggaggggagcaacaucugccucacgcgcaccgaccggggcugguacugcgacaacgccggguccgugagcuucuucccccaggccgagaccugcaaggugugcuccaaccgcgucuucugcgacaccaugaacagccugacgcugccguccgaggugaaccucugcaacaucgacaucuucaaccccaaguacgacugcaagaucaugaccagcaagaccgacgucuccagcuccgugaucaccagccugggcgccaucguguccugcuacggcaagacgaagugcaccgccagcaacaagaacaaggggaucaucaagaccuucuccaacggcugcgacuacgucagcaacaaggggguggacaccgugagcgucggcaacacgcuguacuacgugaacaagcaggagggcaagucccucuacgugaagggggagcccaucaucaacuucuacgacccccuggucuucccgagcgacgaguucgacgcguccaucagccaggugaacgagaagaucaaccagucccuggccuucauccggaaguccgacgagcuccugcacaacgugaacgucggcaaguccaccaccaacaucaugaucaccaccaucaucaucgugaucaucgugauccugcuccugcugaucgccgucggccucuuccuguacugcaaggcccgcagcacgcccgugacccuguccaaggaccagcugagcgggaucaacaacaucgccuucuccaacugaggacuaguggaagcauuuuccuggcugauuaaaagaaauuacucagcuauggucaucuguuccuguuagaaggcuaugcagcauauuauauacuaugcgcauguuaugaaaugcauaauaaaaaauuuuaaaaaaucuaaaagaucuaaaaaaaaaaaaaaaaaaaaaaaaaaaaaaaaaaaaaaaaaaaaaaaaaaaaaaaaaaaaaaaaugcaucccccccccccccccccccccccccccccccaaaggcucuuuucagagccaccagaauu

SEQ ID NO: 18683 - RNA, 1982 nt, Artificial Sequence
  mRNA product Design h-3 comprising derived and/or modified sequence from HRSV(Memphis-37)__AIY60640.1__F_DSCav1_mut7 (opt2)
gggagacccgugacccggaaguuguacggcuacgcgacuuucccucccacaaacccucgcgcccuuccuuuccuacuugggcccggcagaaagcuuaccauggagcuccccauccucaagaccaacgccaucaccaccauccucgccgccgucacccucugcuucgccuccucccagaacaucaccgaggaguucuaccaguccaccugcuccgccgucuccaagggcuaccucuccgcccuccgcaccggcugguacaccuccgucaucaccaucgagcucuccaacaucaaggagaacaagugcaacggcaccgacgccaaggucaagcucaucaagcaggagcucgacaaguacaagaacgccgucaccgagcuccagaugcucaugugcuccacccccgccgccggcuccggcuccgccaucgccuccggcaucgccgucugcaagguccuccaccucgagggcgaggucaacaagaucaagaacgcccuccucuccaccaacaaggccgucgucucccucuccaacggcgucuccguccucaccuucaagguccucgaccucaagaacuacaucgacaagcagcuccuccccauccucaacaagcaguccugcuccaucuccaacaucgagaccgucauggaguuccagcagaagaacaaccgccuccucgagaucacccgcgaguucuccgucaacgccggcgucaccacccccgucuccaccuacaugcucaccaacuccgagcuccucucccucaucaacgacaugcccaucaccaacgaccagaagaagcucauguccaacaacguccagaucguccgccagcaguccuacuccaucaugugcaucaucaaggaggagguccucgccuacgucguccagcucccccucuacggcgucaucgacacccccugcuggaagcuccacaccuccccccucugcaccaccaacaccaaggagggcuccaacaucugccucacccgcaccgaccgcggcugguacugcgacaacgccggcuccgucuccuucuucccccaggccgagaccugcaaggucugcuccaaccgcgucuucugcgacaccaugaacucccucacccuccccuccgaggucaaccucugcaacaucgacaucuucaaccccaaguacgacugcaagaucaugaccuccaagaccgacgucuccuccuccgucaucaccucccucggcgccaucgucuccugcuacggcaagaccaagugcaccgccuccaacaagaacaagggcaucaucaagaccuucuccaacggcugcgacuacgucuccaacaagggcgucgacaccgucuccgucggcaacacccucuacuacgucaacaagcaggagggcaagucccucuacgucaagggcgagcccaucaucaacuucuacgacccccucgucuuccccuccgacgaguucgacgccuccaucucccaggucaacgagaagaucaaccagucccucgccuucauccgcaaguccgacgagcuccuccacaacgucaacgucggcaaguccaccaccaacaucaugaucaccaccaucaucaucgucaucaucgucauccuccuccuccucaucgccgucggccucuuccucuacugcaaggcccgcuccacccccgucacccucuccaaggaccagcucuccggcaucaacaacaucgccuucuccaacugaggacuaguggaagcauuuuccuggcugauuaaaagaaauuacucagcuauggucaucuguuccuguuagaaggcuaugcagcauauuauauacuaugcgcauguuaugaaaugcauaauaaaaaauuuuaaaaaaucuaaaagaucuaaaaaaaaaaaaaaaaaaaaaaaaaaaaaaaaaaaaaaaaaaaaaaaaaaaaaaaaaaaaaaaaugcaucccccccccccccccccccccccccccccccaaaggcucuuuucagagccaccagaauu

SEQ ID NO: 18684 - RNA, 1982 nt, Artificial Sequence
  mRNA product Design h-3 comprising derived and/or modified sequence from HRSV(Memphis-37)__AIY60640.1__F_DSCav1_mut7 (opt3)
gggagacccgugacccggaaguuguacggcuacgcgacuuucccucccacaaacccucgcgcccuuccuuuccuacuugggcccggcagaaagcuuaccauggagcugcccauccucaagaccaacgccauuacaacuauacuugcugcagugacgcugugcuucgccagcucccagaauaucaccgaagaguuuuaccaaucuacauguucagcggucaguaaaggcuauuugagcgcuuuaagaacugggugguacaccuccguuauuacaaucgaacugucuaacauuaaggagaauaaaugcaacggaaccgacgccaaggugaaacuaaucaagcaggaacucgauaaguauaaaaaugcaguaacugagcugcagaugcuuauguguucgaccccugccgcugguucaggcagcgcaauagccagugggaucgcugugugcaagguccugcacuuggagggagaagugaacaaaauuaagaaugcccuccuguccacaaacaaagcgguugugucucugagcaauggcgucuccgugcucacguucaagguauuagaccugaagaacuacaucgauaaacagcuuuugccaauucugaauaagcaaucauguaguaucagcaacauagagacuguuauggaauuucagcagaaaaauaacaggcuacucgagauuacccgggaguucucugugaaugccggugucacaacuccgguguccaccuauaugcugacaaacucagaacuucugagcuugaucaacgacaugcccauuaccaaugaucagaagaaacucaugaguaacaaugugcaaaucguccgccagcagucuuacuccaucaugugcauuauaaaggaggaaguucuggcauaugugguacaguuaccucuguacggggugaucgacacgccauguuggaaacuccauacuagcccccuuugcacaaccaacacuaaggagggaucgaauauuugucugacacgaaccgaucguggcugguacugcgacaacgcuggcucugucuccuuuuucccucaagccgaaacguguaaggugugcucaaauagaguguuuugcgauaccaugaacaguuugacacuaccaagcgagguuaaucuguguaacaucgacauauucaaucccaaauaugauugcaagauuaugacuuccaaaaccgacgucucuagcucagugaucacaagucucggggcaaucguauccuguuacggaaagacuaaaugcaccgcuagcaacaagaauaaggguauuaucaaaacauuuucuaacggcugugauuauguuucaaauaaggggguggacaccgucagugugggaaacacucuguacuaugucaacaaacaggagggcaagagccuuuacgugaaaggugaaccuauuauaaauuucuaugacccacugguuuuuccguccgaugaguucgacgccucuaucagccaggugaacgaaaagauuaaucaaucguuggcguuuaucaggaaguccgaugagcuccugcacaacguaaaugucgggaaaucaacgacaaacaucaugauuaccacuauaaucauugugaucauuguuaucuuacugcuacucauagccgugggacuguuccuuuacugcaaggcacggaguacccccgucacauugucuaaagaccagcugagcggcaucaauaacauugcuuucuccaauugaggacuaguggaagcauuuuccuggcugauuaaaagaaauuacucagcuauggucaucuguuccuguuagaaggcuaugcagcauauuauauacuaugcgcauguuaugaaaugcauaauaaaaaauuuuaaaaaaucuaaaagaucuaaaaaaaaaaaaaaaaaaaaaaaaaaaaaaaaaaaaaaaaaaaaaaaaaaaaaaaaaaaaaaaaugcaucccccccccccccccccccccccccccccccaaaggcucuuuucagagccaccagaauu

SEQ ID NO: 18685 - RNA, 1982 nt, Artificial Sequence
  mRNA product Design h-3 comprising derived and/or modified sequence from HRSV(Memphis-37)__AIY60640.1__F_DSCav1_mut7 (opt4)
gggagacccgugacccggaaguuguacggcuacgcgacuuucccucccacaaacccucgcgcccuuccuuuccuacuugggcccggcagaaagcuuaccauggagcugcccauccugaagaccaacgccaucaccaccauccuggccgccgugacccugugcuucgccagcagccagaacaucaccgaggaguucuaccagagcaccugcagcgccgugagcaagggcuaccugagcgcccugagaaccggcugguacaccagcgugaucaccaucgagcugagcaacaucaaggagaacaagugcaacggcaccgacgccaaggugaagcugaucaagcaggagcuggacaaguacaagaacgccgugaccgagcugcagaugcugaugugcagcacccccgccgccggcagcggcagcgccaucgccagcggcaucgccgugugcaaggugcugcaccuggagggcgaggugaacaagaucaagaacgcccugcugagcaccaacaaggccguggugagccugagcaacggcgugagcgugcugaccuucaaggugcuggaccugaagaacuacaucgacaagcagcugcugcccauccugaacaagcagagcugcagcaucagcaacaucgagaccgugauggaguuccagcagaagaacaacagacugcuggagaucaccagagaguucagcgugaacgccggcgugaccacccccgugagcaccuacaugcugaccaacagcgagcugcugagccugaucaacgacaugcccaucaccaacgaccagaagaagcugaugagcaacaacgugcagaucgugagacagcagagcuacagcaucaugugcaucaucaaggaggaggugcuggccuacguggugcagcugccccuguacggcgugaucgacacccccugcuggaagcugcacaccagcccccugugcaccaccaacaccaaggagggcagcaacaucugccugaccagaaccgacagaggcugguacugcgacaacgccggcagcgugagcuucuucccccaggccgagaccugcaaggugugcagcaacagaguguucugcgacaccaugaacagccugacccugcccagcgaggugaaccugugcaacaucgacaucuucaaccccaaguacgacugcaagaucaugaccagcaagaccgacgugagcagcagcgugaucaccagccugggcgccaucgugagcugcuacggcaagaccaagugcaccgccagcaacaagaacaagggcaucaucaagaccuucagcaacggcugcgacuacgugagcaacaagggcguggacaccgugagcgugggcaacacccuguacuacgugaacaagcaggagggcaagagccuguacgugaagggcgagcccaucaucaacuucuacgacccccugguguuccccagcgacgaguucgacgccagcaucagccaggugaacgagaagaucaaccagagccuggccuucaucagaaagagcgacgagcugcugcacaacgugaacgugggcaagagcaccaccaacaucaugaucaccaccaucaucaucgugaucaucgugauccugcugcugcugaucgccgugggccuguuccuguacugcaaggccagaagcacccccgugacccugagcaaggaccagcugagcggcaucaacaacaucgccuucagcaacugaggacuaguggaagcauuuuccuggcugauuaaaagaaauuacucagcuauggucaucuguuccuguuagaaggcuaugcagcauauuauauacuaugcgcauguuaugaaaugcauaauaaaaaauuuuaaaaaaucuaaaagaucuaaaaaaaaaaaaaaaaaaaaaaaaaaaaaaaaaaaaaaaaaaaaaaaaaaaaaaaaaaaaaaaaugcaucccccccccccccccccccccccccccccccaaaggcucuuuucagagccaccagaauu

SEQ ID NO: 18686 - RNA, 1982 nt, Artificial Sequence
  mRNA product Design h-3 comprising derived and/or modified sequence from HRSV(Memphis-37)__AIY60640.1__F_DSCav1_mut7 (opt5)
gggagacccgugacccggaaguuguacggcuacgcgacuuucccucccacaaacccucgcgcccuuccuuuccuacuugggcccggcagaaagcuuaccauggagcugcccauccucaagaccaacgccauuacaacgauccuggcugccgugacccuuugcuucgcgagcucccagaauauuacagaagaguuuuaccaaucuaccuguagcgcugucuccaaaggcuaucugucugcccucagaacagggugguacaccagcguuaucacaauugaacuguccaacaucaaggagaauaaaugcaacggaaccgacgccaaggugaaacuuaucaagcaggaacuggauaaguauaaaaaugcugugacggagcuccagaugcugauguguucuaccccugccgcuggcagcggguccgccauugcgagcggaaucgccgucugcaaggugcugcaccucgagggcgaaguuaacaaaauuaagaaugcucugcuuucuacaaacaaagccguggucucccugagcaauggggugucuguucucaccuucaaggugcuggaccuuaagaacuacaucgauaaacagcugcucccgauucugaauaagcaauccuguagcaucucuaacauugagacagucauggaauuucagcagaaaaauaaccggcugcucgagaucacccgcgaguucuccgugaaugcuggagugacgacacccgucagcaccuauaugcugacaaacuccgaacuucugucucucaucaacgacaugccuauuaccaaugaucagaagaaacugaugagcaacaauguucaaaucgugagacagcaguccuacagcauuaugugcaucauuaaggaggaagugcuugccuaugucgugcagcugccccucuacggcguuaucgacaccccuuguuggaaacugcauacaucuccccugugcacgaccaacacaaaggagggcuccaauaucugucucacccggacagaucgcgggugguacugcgacaacgcgggaagcgugagcuuuuucccucaagccgaaaccuguaaggucugcucuaauagaguguuuugcgauacgaugaacucccugacacuuccgucugagguuaaucuguguaacauugacaucuucaaucccaaauaugauugcaagauuaugaccagcaaaaccgacguguccagcucugucaucacaucccucggcgcuauugugagcuguuacgggaagaccaaaugcacagccucuaacaagaauaagggaaucaucaaaacguuuuccaacggcugugauuaugucagcaauaaggggguggacaccguuuccgugggaaacacacuguacuaugucaacaaacaggagggcaagucucuuuacgugaaaggcgaaccuauuaucaauuucuaugacccccugguuuuuccuagcgaugaguucgacgcuuccauuucucaggugaacgaaaagaucaaucaaagccucgccuuuauucggaaguccgaugagcugcugcacaacgucaauguggggaaaagcaccacaaacaucaugauuaccacgaucaucauugugaucauuguuauccuccugcuucugauugccgucggacucuuccuguacugcaaggcucgcucuacccccgugacacuguccaaagaccagcuuagcggcaucaauaacaucgcguucucuaauugaggacuaguggaagcauuuuccuggcugauuaaaagaaauuacucagcuauggucaucuguuccuguuagaaggcuaugcagcauauuauauacuaugcgcauguuaugaaaugcauaauaaaaaauuuuaaaaaaucuaaaagaucuaaaaaaaaaaaaaaaaaaaaaaaaaaaaaaaaaaaaaaaaaaaaaaaaaaaaaaaaaaaaaaaaugcaucccccccccccccccccccccccccccccccaaaggcucuuuucagagccaccagaauu

SEQ ID NO: 18687 - RNA, 1982 nt, Artificial Sequence
  mRNA product Design h-3 comprising derived and/or modified sequence from HRSV(Memphis-37)__AIY60640.1__F_DSCav1_mut7 (opt6)
gggagacccgugacccggaaguuguacggcuacgcgacuuucccucccacaaacccucgcgcccuuccuuuccuacuugggcccggcagaaagcuuaccauggaacuaccaauacucaaaacaaaugcuauaaccacaauacucgcagcaguaacauuauguuucgcaucaucccaaaacauaacagaagaauuuuaucaaucaaccuguucagcaguauccaaaggauaccuaagugcauuaagaaccggaugguacacaucaguaauaaccauagaacuuucaaacauaaaagaaaacaaauguaacggcacagacgcaaaagucaaacucaucaaacaggaacuugacaaauauaaaaacgcaguaaccgaacuacaaaugcuaaugugcucaacaccagcagcaggaucaggaucagcaauugcaucuggaauagcuguaugcaaaguccuacaccuagaaggagaaguaaacaaaaucaaaaacgcauuacucuccacaaacaaagcaguaguaucacuaucaaacggaguuucaguacuaaccuucaaaguauuagaccuaaaaaacuacauagacaaacaacuacuaccuauacuaaacaaacaauccuguucaauaagcaacauugaaacuguaauggaauuucaacaaaaaaacaaccgccuauuagaaauaaccagagaauuuuccguaaaugcaggaguaaccacaccagucucuacauacauguuaaccaacucagaacuauuaucacucauaaaugacaugccuauaacaaacgaccaaaaaaaacuaaugucaaacaacguacaaauaguaagacaacaaucauauuccauaaugugcauaauaaaagaagaaguacuugcauacgugguucaacuaccccuauauggaguuauagacacaccaugcuggaaacuccacacuuccccacuuugcacaacuaacacaaaagaaggaucaaauauaugccuaaccagaacagaccguggaugguacugcgacaacgcuggaucagucuccuucuuuccacaagcagaaaccugcaaagucugcucaaauagagucuucugugacacaaugaacucacucacccuacccucagaaguaaaccuauguaauauagauauauuuaauccaaaauacgacugcaaaauuaugacaaguaaaacagacguaagcucaucagucauaaccagccuaggagcaauaguauccuguuacggcaaaacaaaaugcacagcuucaaacaaaaacaaaggcauaauaaaaacauucucaaacggaugugacuauguaucaaauaaaggaguugacacaguaucaguuggaaacacacuauacuauguaaacaaacaagaaggaaaaucacuauacguuaaaggcgaacccauaaucaauuucuacgacccccuagucuucccauccgaugaauuugacgcaucaauaucccaaguaaaugaaaaaaucaaccaaucccuagcauuuauacgaaaauccgacgaacuacuccauaaugucaacgucgguaaaucaacgacaaacaucaugaucacaacaauaauaauaguaauaauuguaauauuacucuuacucauagcaguaggccuauuucuauauugcaaagccagaucaacaccaguaaccuuauccaaagaccaacuaucuggaauaaacaacauagcauuuuccaacugaggacuaguggaagcauuuuccuggcugauuaaaagaaauuacucagcuauggucaucuguuccuguuagaaggcuaugcagcauauuauauacuaugcgcauguuaugaaaugcauaauaaaaaauuuuaaaaaaucuaaaagaucuaaaaaaaaaaaaaaaaaaaaaaaaaaaaaaaaaaaaaaaaaaaaaaaaaaaaaaaaaaaaaaaaugcaucccccccccccccccccccccccccccccccaaaggcucuuuucagagccaccagaauu

SEQ ID NO: 18688 - RNA, 1982 nt, Artificial Sequence
  mRNA product Design h-3 comprising derived and/or modified sequence from HRSV(Memphis-37)__AIY60640.1__F_DSCav1_mut7 (opt11)
gggagacccgugacccggaaguuguacggcuacgcgacuuucccucccacaaacccucgcgcccuuccuuuccuacuugggcccggcagaaagcuuaccauggaacuccccauacuuaaaacaaacgccauaacaacuauacucgcagccgucacccucuguuucgcauccucucaaaacaucaccgaagaguucuaucaaucaaccugcuccgccgucucaaaaggcuaccucuccgcccuacgcacaggcugguacaccagcgucauuaccauagaacucucgaacaucaaagaaaacaaaugcaacggcaccgacgcaaaagugaaacucaucaaacaagaacucgacaaauacaaaaacgccgucaccgaacuucagaugcucaugugcuccaccccugccgccggcagcggcuccgccauagccuccggcaucgcagucugcaaaguccuccaccucgaaggagaaguaaacaaaaucaaaaaugcucuccucuccacaaacaaagccgucgucucacucuccaauggagucuccguccucaccuucaaaguccucgaccucaaaaacuacauagacaaacaacuacuccccauccucaacaagcaauccugcucuaucuccaacauagaaaccguuauggaguuccaacagaaaaauaaccgccugcuagaaauaacccgagaguucuccgucaacgcaggcgucacuacccccgucagcacauacaugcuaacaaacuccgaacugcucucccuuaucaacgacaugcccaucacaaacgaucagaaaaagcucaugucuaacaacguacaaaucguucggcaacaauccuacuccaucaugugcaucaucaaagaagaagugcucgccuacguaguccaacucccccucuacggagucaucgacacacccugcuggaaacuccacacaucaccccucugcaccaccaacacaaaagaaggguccaacaucugccucacgcgcaccgaccgaggcugguacugcgacaacgccggcuccguauccuucuucccccaagcagaaaccugcaaggucugcuccaaccgcguauucugcgacaccaugaacucgcucacccuccccucagaagucaaccuauguaacaucgacauauucaaucccaaauacgacugcaagauaaugacuuccaaaaccgacguaagcuccucggucaucaccucccucggcgccaucgucuccugcuacggcaaaaccaaaugcaccgccuccaauaagaauaaaggcauaauaaagacauucagcaacggcugcgauuacgucuccaacaaaggugucgacaccgucucagucggcaacacucuauacuacgugaacaaacaagaaggcaaaagccuauacguuaaaggcgaaccaauaaucaauuucuacgacccucuagucuuucccucugacgaguucgaugccagcauaagccaagucaacgaaaagaucaaccaaucacucgccuucauccguaaauccgacgaacugcuccacaaugucaauguaggcaaaucaacaaccaacaucaugaucaccacuauuaucaucgucaucaucguaauccuacuccuacuaaucgccgucggccuauuccucuacugcaaagcccgcucgacccccgucacucucagcaaggaucaacuauccggcaucaacaacaucgccuucuccaacuaaggacuaguggaagcauuuuccuggcugauuaaaagaaauuacucagcuauggucaucuguuccuguuagaaggcuaugcagcauauuauauacuaugcgcauguuaugaaaugcauaauaaaaaauuuuaaaaaaucuaaaagaucuaaaaaaaaaaaaaaaaaaaaaaaaaaaaaaaaaaaaaaaaaaaaaaaaaaaaaaaaaaaaaaaaugcaucccccccccccccccccccccccccccccccaaaggcucuuuucagagccaccagaauu

SEQ ID NO: 18689 - RNA, 2045 nt, Artificial Sequence
  mRNA product Design h-4 comprising derived and/or modified sequence from HRSV(Memphis-37)__AIY60640.1__F_DSCav1_mut7 (opt1)
gggagagggcgcuuggcuugcaaggacccugagcugcggcauugaagcacacccaacccaacucgacugaagucagccucacugaaccggaucugagaaucuucucucucugggcuugccagggcucuccgaaccuagcuagcauccucuucaauuccaacuagaaagcuuaccauggagcugcccauccucaagaccaacgccaucaccacgauccuggccgcggugacccugugcuucgccagcucccagaacaucaccgaggaguucuaccagagcacgugcuccgccgucagcaagggcuaccucuccgcccugcgcaccgggugguacaccagcgugaucaccaucgagcuguccaacaucaaggagaacaagugcaacggcaccgacgccaaggugaagcucaucaagcaggagcuggacaaguacaagaacgcggucacggagcugcagaugcugaugugcagcaccccggccgccggcuccgggagcgcgaucgccuccggcaucgccgucugcaaggugcugcaccucgagggcgaggugaacaagaucaagaacgcccugcuguccaccaacaaggccgucgugagccucuccaacggggugagcguccugaccuucaaggugcuggaccucaagaacuacaucgacaagcagcugcugcccauccugaacaagcagagcugcuccaucagcaacaucgagaccgucauggaguuccagcagaagaacaaccgccuccuggagaucacgcgggaguucagcgugaacgcgggcgugaccacccccgucuccaccuacaugcugacgaacagcgagcuccugucccugaucaacgacaugccgaucaccaacgaccagaagaagcucaugagcaacaacgugcagaucgugcgccagcaguccuacagcaucaugugcaucaucaaggaggagguccuggccuacguggugcagcugccccucuacggggucaucgacacccccugcuggaagcugcacaccagcccccugugcacgaccaacaccaaggagggcuccaacaucugccucacccggacggaccgcgggugguacugcgacaacgccggcagcguguccuucuucccgcaggccgagaccugcaaggucugcagcaaccggguguucugcgacaccaugaacucccugacccugcccagcgaggugaaccucugcaacaucgacaucuucaaccccaaguacgacugcaagaucaugacguccaagaccgacgucagcuccagcgugaucaccucccugggcgccaucgugagcugcuacgggaagaccaagugcacggcgagcaacaagaacaagggcaucaucaagaccuucuccaacgggugcgacuacgucagcaacaagggcguggacaccguguccgucggcaacacccuguacuacgugaacaagcaggagggcaagagccucuacgugaagggggagcccaucaucaacuucuacgacccgcuggucuuccccuccgacgaguucgacgccagcaucucccaggugaacgagaagaucaaccagagccuggccuucauccggaaguccgacgagcuccugcacaacgugaacgucggcaagagcaccacgaacaucaugaucaccaccaucaucaucgugaucaucgugauccugcugcuccugaucgccgucgggcuguuccucuacugcaaggcccgcuccacccccgugacgcugagcaaggaccagcuguccgggaucaacaacaucgcguucagcaacugaggacuaguaauaaggaaacuguaugaaugucugugggcaggaagugaagagauccuucuguaaagguuuuuggaauuaugucugcugaauaauaaacuuuuuugaaauaauaaaucugguagaaaaaugagaucuaaaaaaaaaaaaaaaaaaaaaaaaaaaaaaaaaaaaaaaaaaaaaaaaaaaaaaaaaaaaaaaaugcaucccccccccccccccccccccccccccccccaaaggcucuuuucagagccaccagaauu

SEQ ID NO: 18690 - RNA, 2045 nt, Artificial Sequence
  mRNA product Design h-4 comprising derived and/or modified sequence from HRSV(Memphis-37)__AIY60640.1__F_DSCav1_mut7 (opt1)
gggagagggcgcuuggcuugcaaggacccugagcugcggcauugaagcacacccaacccaacucgacugaagucagccucacugaaccggaucugagaaucuucucucucugggcuugccagggcucuccgaaccuagcuagcauccucuucaauuccaacuagaaagcuuaccauggagcugcccauccucaagaccaacgccaucaccacgauccuggccgcggugacccugugcuucgccagcucccagaacaucaccgaggaguucuaccagagcacgugcuccgccgucagcaagggcuaccucuccgcccugcgcaccgggugguacaccagcgugaucaccaucgagcuguccaacaucaaggagaacaagugcaacggcaccgacgccaaggugaagcucaucaagcaggagcuggacaaguacaagaacgcggucacggagcugcagaugcucaugugcagcaccccggccgccggguccggcagcgccaucgcguccgggaucgccgugugcaaggugcugcaccuggagggcgaggucaacaagaucaagaacgcccuccugagcaccaacaaggccguggugucccugagcaacggcgucuccgugcucaccuucaaggugcuggaccugaagaacuacaucgacaagcagcuccugcccauccugaacaagcagagcugcuccaucagcaacaucgagacggucauggaguuccagcagaagaacaaccggcuccuggagaucacccgcgaguucuccgugaacgccggggugaccacccccgucagcacguacaugcugaccaacagcgagcuccugucccugaucaacgacaugcccaucaccaacgaccagaagaagcucaugagcaacaacgugcagaucgugcggcagcaguccuacagcaucaugugcaucaucaaggaggagguccuggcguacguggugcagcugccgcucuacggcgucaucgacacccccugcuggaagcugcacacgagcccccugugcaccaccaacaccaaggaggggagcaacaucugccucacgcgcaccgaccggggcugguacugcgacaacgccggguccgugagcuucuucccccaggccgagaccugcaaggugugcuccaaccgcgucuucugcgacaccaugaacagccugacgcugccguccgaggugaaccucugcaacaucgacaucuucaaccccaaguacgacugcaagaucaugaccagcaagaccgacgucuccagcuccgugaucaccagccugggcgccaucguguccugcuacggcaagacgaagugcaccgccagcaacaagaacaaggggaucaucaagaccuucuccaacggcugcgacuacgucagcaacaaggggguggacaccgugagcgucggcaacacgcuguacuacgugaacaagcaggagggcaagucccucuacgugaagggggagcccaucaucaacuucuacgacccccuggucuucccgagcgacgaguucgacgcguccaucagccaggugaacgagaagaucaaccagucccuggccuucauccggaaguccgacgagcuccugcacaacgugaacgucggcaaguccaccaccaacaucaugaucaccaccaucaucaucgugaucaucgugauccugcuccugcugaucgccgucggccucuuccuguacugcaaggcccgcagcacgcccgugacccuguccaaggaccagcugagcgggaucaacaacaucgccuucuccaacugaggacuaguaauaaggaaacuguaugaaugucugugggcaggaagugaagagauccuucuguaaagguuuuuggaauuaugucugcugaauaauaaacuuuuuugaaauaauaaaucugguagaaaaaugagaucuaaaaaaaaaaaaaaaaaaaaaaaaaaaaaaaaaaaaaaaaaaaaaaaaaaaaaaaaaaaaaaaaugcaucccccccccccccccccccccccccccccccaaaggcucuuuucagagccaccagaauu

SEQ ID NO: 18691 - RNA, 2045 nt, Artificial Sequence
  mRNA product Design h-4 comprising derived and/or modified sequence from HRSV(Memphis-37)__AIY60640.1__F_DSCav1_mut7 (opt2)
gggagagggcgcuuggcuugcaaggacccugagcugcggcauugaagcacacccaacccaacucgacugaagucagccucacugaaccggaucugagaaucuucucucucugggcuugccagggcucuccgaaccuagcuagcauccucuucaauuccaacuagaaagcuuaccauggagcuccccauccucaagaccaacgccaucaccaccauccucgccgccgucacccucugcuucgccuccucccagaacaucaccgaggaguucuaccaguccaccugcuccgccgucuccaagggcuaccucuccgcccuccgcaccggcugguacaccuccgucaucaccaucgagcucuccaacaucaaggagaacaagugcaacggcaccgacgccaaggucaagcucaucaagcaggagcucgacaaguacaagaacgccgucaccgagcuccagaugcucaugugcuccacccccgccgccggcuccggcuccgccaucgccuccggcaucgccgucugcaagguccuccaccucgagggcgaggucaacaagaucaagaacgcccuccucuccaccaacaaggccgucgucucccucuccaacggcgucuccguccucaccuucaagguccucgaccucaagaacuacaucgacaagcagcuccuccccauccucaacaagcaguccugcuccaucuccaacaucgagaccgucauggaguuccagcagaagaacaaccgccuccucgagaucacccgcgaguucuccgucaacgccggcgucaccacccccgucuccaccuacaugcucaccaacuccgagcuccucucccucaucaacgacaugcccaucaccaacgaccagaagaagcucauguccaacaacguccagaucguccgccagcaguccuacuccaucaugugcaucaucaaggaggagguccucgccuacgucguccagcucccccucuacggcgucaucgacacccccugcuggaagcuccacaccuccccccucugcaccaccaacaccaaggagggcuccaacaucugccucacccgcaccgaccgcggcugguacugcgacaacgccggcuccgucuccuucuucccccaggccgagaccugcaaggucugcuccaaccgcgucuucugcgacaccaugaacucccucacccuccccuccgaggucaaccucugcaacaucgacaucuucaaccccaaguacgacugcaagaucaugaccuccaagaccgacgucuccuccuccgucaucaccucccucggcgccaucgucuccugcuacggcaagaccaagugcaccgccuccaacaagaacaagggcaucaucaagaccuucuccaacggcugcgacuacgucuccaacaagggcgucgacaccgucuccgucggcaacacccucuacuacgucaacaagcaggagggcaagucccucuacgucaagggcgagcccaucaucaacuucuacgacccccucgucuuccccuccgacgaguucgacgccuccaucucccaggucaacgagaagaucaaccagucccucgccuucauccgcaaguccgacgagcuccuccacaacgucaacgucggcaaguccaccaccaacaucaugaucaccaccaucaucaucgucaucaucgucauccuccuccuccucaucgccgucggccucuuccucuacugcaaggcccgcuccacccccgucacccucuccaaggaccagcucuccggcaucaacaacaucgccuucuccaacugaggacuaguaauaaggaaacuguaugaaugucugugggcaggaagugaagagauccuucuguaaagguuuuuggaauuaugucugcugaauaauaaacuuuuuugaaauaauaaaucugguagaaaaaugagaucuaaaaaaaaaaaaaaaaaaaaaaaaaaaaaaaaaaaaaaaaaaaaaaaaaaaaaaaaaaaaaaaaugcaucccccccccccccccccccccccccccccccaaaggcucuuuucagagccaccagaauu

SEQ ID NO: 18692 - RNA, 2045 nt, Artificial Sequence
  mRNA product Design h-4 comprising derived and/or modified sequence from HRSV(Memphis-37)__AIY60640.1__F_DSCav1_mut7 (opt3)
gggagagggcgcuuggcuugcaaggacccugagcugcggcauugaagcacacccaacccaacucgacugaagucagccucacugaaccggaucugagaaucuucucucucugggcuugccagggcucuccgaaccuagcuagcauccucuucaauuccaacuagaaagcuuaccauggagcugcccauccucaagaccaacgccauuacaacuauacuugcugcagugacgcugugcuucgccagcucccagaauaucaccgaagaguuuuaccaaucuacauguucagcggucaguaaaggcuauuugagcgcuuuaagaacugggugguacaccuccguuauuacaaucgaacugucuaacauuaaggagaauaaaugcaacggaaccgacgccaaggugaaacuaaucaagcaggaacucgauaaguauaaaaaugcaguaacugagcugcagaugcuuauguguucgaccccugccgcugguucaggcagcgcaauagccagugggaucgcugugugcaagguccugcacuuggagggagaagugaacaaaauuaagaaugcccuccuguccacaaacaaagcgguugugucucugagcaauggcgucuccgugcucacguucaagguauuagaccugaagaacuacaucgauaaacagcuuuugccaauucugaauaagcaaucauguaguaucagcaacauagagacuguuauggaauuucagcagaaaaauaacaggcuacucgagauuacccgggaguucucugugaaugccggugucacaacuccgguguccaccuauaugcugacaaacucagaacuucugagcuugaucaacgacaugcccauuaccaaugaucagaagaaacucaugaguaacaaugugcaaaucguccgccagcagucuuacuccaucaugugcauuauaaaggaggaaguucuggcauaugugguacaguuaccucuguacggggugaucgacacgccauguuggaaacuccauacuagcccccuuugcacaaccaacacuaaggagggaucgaauauuugucugacacgaaccgaucguggcugguacugcgacaacgcuggcucugucuccuuuuucccucaagccgaaacguguaaggugugcucaaauagaguguuuugcgauaccaugaacaguuugacacuaccaagcgagguuaaucuguguaacaucgacauauucaaucccaaauaugauugcaagauuaugacuuccaaaaccgacgucucuagcucagugaucacaagucucggggcaaucguauccuguuacggaaagacuaaaugcaccgcuagcaacaagaauaaggguauuaucaaaacauuuucuaacggcugugauuauguuucaaauaaggggguggacaccgucagugugggaaacacucuguacuaugucaacaaacaggagggcaagagccuuuacgugaaaggugaaccuauuauaaauuucuaugacccacugguuuuuccguccgaugaguucgacgccucuaucagccaggugaacgaaaagauuaaucaaucguuggcguuuaucaggaaguccgaugagcuccugcacaacguaaaugucgggaaaucaacgacaaacaucaugauuaccacuauaaucauugugaucauuguuaucuuacugcuacucauagccgugggacuguuccuuuacugcaaggcacggaguacccccgucacauugucuaaagaccagcugagcggcaucaauaacauugcuuucuccaauugaggacuaguaauaaggaaacuguaugaaugucugugggcaggaagugaagagauccuucuguaaagguuuuuggaauuaugucugcugaauaauaaacuuuuuugaaauaauaaaucugguagaaaaaugagaucuaaaaaaaaaaaaaaaaaaaaaaaaaaaaaaaaaaaaaaaaaaaaaaaaaaaaaaaaaaaaaaaaugcaucccccccccccccccccccccccccccccccaaaggcucuuuucagagccaccagaauu

SEQ ID NO: 18693 - RNA, 2045 nt, Artificial Sequence
  mRNA product Design h-4 comprising derived and/or modified sequence from HRSV(Memphis-37)__AIY60640.1__F_DSCav1_mut7 (opt4)
gggagagggcgcuuggcuugcaaggacccugagcugcggcauugaagcacacccaacccaacucgacugaagucagccucacugaaccggaucugagaaucuucucucucugggcuugccagggcucuccgaaccuagcuagcauccucuucaauuccaacuagaaagcuuaccauggagcugcccauccugaagaccaacgccaucaccaccauccuggccgccgugacccugugcuucgccagcagccagaacaucaccgaggaguucuaccagagcaccugcagcgccgugagcaagggcuaccugagcgcccugagaaccggcugguacaccagcgugaucaccaucgagcugagcaacaucaaggagaacaagugcaacggcaccgacgccaaggugaagcugaucaagcaggagcuggacaaguacaagaacgccgugaccgagcugcagaugcugaugugcagcacccccgccgccggcagcggcagcgccaucgccagcggcaucgccgugugcaaggugcugcaccuggagggcgaggugaacaagaucaagaacgcccugcugagcaccaacaaggccguggugagccugagcaacggcgugagcgugcugaccuucaaggugcuggaccugaagaacuacaucgacaagcagcugcugcccauccugaacaagcagagcugcagcaucagcaacaucgagaccgugauggaguuccagcagaagaacaacagacugcuggagaucaccagagaguucagcgugaacgccggcgugaccacccccgugagcaccuacaugcugaccaacagcgagcugcugagccugaucaacgacaugcccaucaccaacgaccagaagaagcugaugagcaacaacgugcagaucgugagacagcagagcuacagcaucaugugcaucaucaaggaggaggugcuggccuacguggugcagcugccccuguacggcgugaucgacacccccugcuggaagcugcacaccagcccccugugcaccaccaacaccaaggagggcagcaacaucugccugaccagaaccgacagaggcugguacugcgacaacgccggcagcgugagcuucuucccccaggccgagaccugcaaggugugcagcaacagaguguucugcgacaccaugaacagccugacccugcccagcgaggugaaccugugcaacaucgacaucuucaaccccaaguacgacugcaagaucaugaccagcaagaccgacgugagcagcagcgugaucaccagccugggcgccaucgugagcugcuacggcaagaccaagugcaccgccagcaacaagaacaagggcaucaucaagaccuucagcaacggcugcgacuacgugagcaacaagggcguggacaccgugagcgugggcaacacccuguacuacgugaacaagcaggagggcaagagccuguacgugaagggcgagcccaucaucaacuucuacgacccccugguguuccccagcgacgaguucgacgccagcaucagccaggugaacgagaagaucaaccagagccuggccuucaucagaaagagcgacgagcugcugcacaacgugaacgugggcaagagcaccaccaacaucaugaucaccaccaucaucaucgugaucaucgugauccugcugcugcugaucgccgugggccuguuccuguacugcaaggccagaagcacccccgugacccugagcaaggaccagcugagcggcaucaacaacaucgccuucagcaacugaggacuaguaauaaggaaacuguaugaaugucugugggcaggaagugaagagauccuucuguaaagguuuuuggaauuaugucugcugaauaauaaacuuuuuugaaauaauaaaucugguagaaaaaugagaucuaaaaaaaaaaaaaaaaaaaaaaaaaaaaaaaaaaaaaaaaaaaaaaaaaaaaaaaaaaaaaaaaugcaucccccccccccccccccccccccccccccccaaaggcucuuuucagagccaccagaauu

SEQ ID NO: 18694 - RNA, 2045 nt, Artificial Sequence
  mRNA product Design h-4 comprising derived and/or modified sequence from HRSV(Memphis-37)__AIY60640.1__F_DSCav1_mut7 (opt5)
gggagagggcgcuuggcuugcaaggacccugagcugcggcauugaagcacacccaacccaacucgacugaagucagccucacugaaccggaucugagaaucuucucucucugggcuugccagggcucuccgaaccuagcuagcauccucuucaauuccaacuagaaagcuuaccauggagcugcccauccucaagaccaacgccauuacaacgauccuggcugccgugacccuuugcuucgcgagcucccagaauauuacagaagaguuuuaccaaucuaccuguagcgcugucuccaaaggcuaucugucugcccucagaacagggugguacaccagcguuaucacaauugaacuguccaacaucaaggagaauaaaugcaacggaaccgacgccaaggugaaacuuaucaagcaggaacuggauaaguauaaaaaugcugugacggagcuccagaugcugauguguucuaccccugccgcuggcagcggguccgccauugcgagcggaaucgccgucugcaaggugcugcaccucgagggcgaaguuaacaaaauuaagaaugcucugcuuucuacaaacaaagccguggucucccugagcaauggggugucuguucucaccuucaaggugcuggaccuuaagaacuacaucgauaaacagcugcucccgauucugaauaagcaauccuguagcaucucuaacauugagacagucauggaauuucagcagaaaaauaaccggcugcucgagaucacccgcgaguucuccgugaaugcuggagugacgacacccgucagcaccuauaugcugacaaacuccgaacuucugucucucaucaacgacaugccuauuaccaaugaucagaagaaacugaugagcaacaauguucaaaucgugagacagcaguccuacagcauuaugugcaucauuaaggaggaagugcuugccuaugucgugcagcugccccucuacggcguuaucgacaccccuuguuggaaacugcauacaucuccccugugcacgaccaacacaaaggagggcuccaauaucugucucacccggacagaucgcgggugguacugcgacaacgcgggaagcgugagcuuuuucccucaagccgaaaccuguaaggucugcucuaauagaguguuuugcgauacgaugaacucccugacacuuccgucugagguuaaucuguguaacauugacaucuucaaucccaaauaugauugcaagauuaugaccagcaaaaccgacguguccagcucugucaucacaucccucggcgcuauugugagcuguuacgggaagaccaaaugcacagccucuaacaagaauaagggaaucaucaaaacguuuuccaacggcugugauuaugucagcaauaaggggguggacaccguuuccgugggaaacacacuguacuaugucaacaaacaggagggcaagucucuuuacgugaaaggcgaaccuauuaucaauuucuaugacccccugguuuuuccuagcgaugaguucgacgcuuccauuucucaggugaacgaaaagaucaaucaaagccucgccuuuauucggaaguccgaugagcugcugcacaacgucaauguggggaaaagcaccacaaacaucaugauuaccacgaucaucauugugaucauuguuauccuccugcuucugauugccgucggacucuuccuguacugcaaggcucgcucuacccccgugacacuguccaaagaccagcuuagcggcaucaauaacaucgcguucucuaauugaggacuaguaauaaggaaacuguaugaaugucugugggcaggaagugaagagauccuucuguaaagguuuuuggaauuaugucugcugaauaauaaacuuuuuugaaauaauaaaucugguagaaaaaugagaucuaaaaaaaaaaaaaaaaaaaaaaaaaaaaaaaaaaaaaaaaaaaaaaaaaaaaaaaaaaaaaaaaugcaucccccccccccccccccccccccccccccccaaaggcucuuuucagagccaccagaauu

SEQ ID NO: 18695 - RNA, 2045 nt, Artificial Sequence
  mRNA product Design h-4 comprising derived and/or modified sequence from HRSV(Memphis-37)__AIY60640.1__F_DSCav1_mut7 (opt6)
gggagagggcgcuuggcuugcaaggacccugagcugcggcauugaagcacacccaacccaacucgacugaagucagccucacugaaccggaucugagaaucuucucucucugggcuugccagggcucuccgaaccuagcuagcauccucuucaauuccaacuagaaagcuuaccauggaacuaccaauacucaaaacaaaugcuauaaccacaauacucgcagcaguaacauuauguuucgcaucaucccaaaacauaacagaagaauuuuaucaaucaaccuguucagcaguauccaaaggauaccuaagugcauuaagaaccggaugguacacaucaguaauaaccauagaacuuucaaacauaaaagaaaacaaauguaacggcacagacgcaaaagucaaacucaucaaacaggaacuugacaaauauaaaaacgcaguaaccgaacuacaaaugcuaaugugcucaacaccagcagcaggaucaggaucagcaauugcaucuggaauagcuguaugcaaaguccuacaccuagaaggagaaguaaacaaaaucaaaaacgcauuacucuccacaaacaaagcaguaguaucacuaucaaacggaguuucaguacuaaccuucaaaguauuagaccuaaaaaacuacauagacaaacaacuacuaccuauacuaaacaaacaauccuguucaauaagcaacauugaaacuguaauggaauuucaacaaaaaaacaaccgccuauuagaaauaaccagagaauuuuccguaaaugcaggaguaaccacaccagucucuacauacauguuaaccaacucagaacuauuaucacucauaaaugacaugccuauaacaaacgaccaaaaaaaacuaaugucaaacaacguacaaauaguaagacaacaaucauauuccauaaugugcauaauaaaagaagaaguacuugcauacgugguucaacuaccccuauauggaguuauagacacaccaugcuggaaacuccacacuuccccacuuugcacaacuaacacaaaagaaggaucaaauauaugccuaaccagaacagaccguggaugguacugcgacaacgcuggaucagucuccuucuuuccacaagcagaaaccugcaaagucugcucaaauagagucuucugugacacaaugaacucacucacccuacccucagaaguaaaccuauguaauauagauauauuuaauccaaaauacgacugcaaaauuaugacaaguaaaacagacguaagcucaucagucauaaccagccuaggagcaauaguauccuguuacggcaaaacaaaaugcacagcuucaaacaaaaacaaaggcauaauaaaaacauucucaaacggaugugacuauguaucaaauaaaggaguugacacaguaucaguuggaaacacacuauacuauguaaacaaacaagaaggaaaaucacuauacguuaaaggcgaacccauaaucaauuucuacgacccccuagucuucccauccgaugaauuugacgcaucaauaucccaaguaaaugaaaaaaucaaccaaucccuagcauuuauacgaaaauccgacgaacuacuccauaaugucaacgucgguaaaucaacgacaaacaucaugaucacaacaauaauaauaguaauaauuguaauauuacucuuacucauagcaguaggccuauuucuauauugcaaagccagaucaacaccaguaaccuuauccaaagaccaacuaucuggaauaaacaacauagcauuuuccaacugaggacuaguaauaaggaaacuguaugaaugucugugggcaggaagugaagagauccuucuguaaagguuuuuggaauuaugucugcugaauaauaaacuuuuuugaaauaauaaaucugguagaaaaaugagaucuaaaaaaaaaaaaaaaaaaaaaaaaaaaaaaaaaaaaaaaaaaaaaaaaaaaaaaaaaaaaaaaaugcaucccccccccccccccccccccccccccccccaaaggcucuuuucagagccaccagaauu

SEQ ID NO: 18696 - RNA, 2045 nt, Artificial Sequence
  mRNA product Design h-4 comprising derived and/or modified sequence from HRSV(Memphis-37)__AIY60640.1__F_DSCav1_mut7 (opt11)
gggagagggcgcuuggcuugcaaggacccugagcugcggcauugaagcacacccaacccaacucgacugaagucagccucacugaaccggaucugagaaucuucucucucugggcuugccagggcucuccgaaccuagcuagcauccucuucaauuccaacuagaaagcuuaccauggaacuccccauacuuaaaacaaacgccauaacaacuauacucgcagccgucacccucuguuucgcauccucucaaaacaucaccgaagaguucuaucaaucaaccugcuccgccgucucaaaaggcuaccucuccgcccuacgcacaggcugguacaccagcgucauuaccauagaacucucgaacaucaaagaaaacaaaugcaacggcaccgacgcaaaagugaaacucaucaaacaagaacucgacaaauacaaaaacgccgucaccgaacuucagaugcucaugugcuccaccccugccgccggcagcggcuccgccauagccuccggcaucgcagucugcaaaguccuccaccucgaaggagaaguaaacaaaaucaaaaaugcucuccucuccacaaacaaagccgucgucucacucuccaauggagucuccguccucaccuucaaaguccucgaccucaaaaacuacauagacaaacaacuacuccccauccucaacaagcaauccugcucuaucuccaacauagaaaccguuauggaguuccaacagaaaaauaaccgccugcuagaaauaacccgagaguucuccgucaacgcaggcgucacuacccccgucagcacauacaugcuaacaaacuccgaacugcucucccuuaucaacgacaugcccaucacaaacgaucagaaaaagcucaugucuaacaacguacaaaucguucggcaacaauccuacuccaucaugugcaucaucaaagaagaagugcucgccuacguaguccaacucccccucuacggagucaucgacacacccugcuggaaacuccacacaucaccccucugcaccaccaacacaaaagaaggguccaacaucugccucacgcgcaccgaccgaggcugguacugcgacaacgccggcuccguauccuucuucccccaagcagaaaccugcaaggucugcuccaaccgcguauucugcgacaccaugaacucgcucacccuccccucagaagucaaccuauguaacaucgacauauucaaucccaaauacgacugcaagauaaugacuuccaaaaccgacguaagcuccucggucaucaccucccucggcgccaucgucuccugcuacggcaaaaccaaaugcaccgccuccaauaagaauaaaggcauaauaaagacauucagcaacggcugcgauuacgucuccaacaaaggugucgacaccgucucagucggcaacacucuauacuacgugaacaaacaagaaggcaaaagccuauacguuaaaggcgaaccaauaaucaauuucuacgacccucuagucuuucccucugacgaguucgaugccagcauaagccaagucaacgaaaagaucaaccaaucacucgccuucauccguaaauccgacgaacugcuccacaaugucaauguaggcaaaucaacaaccaacaucaugaucaccacuauuaucaucgucaucaucguaauccuacuccuacuaaucgccgucggccuauuccucuacugcaaagcccgcucgacccccgucacucucagcaaggaucaacuauccggcaucaacaacaucgccuucuccaacuaaggacuaguaauaaggaaacuguaugaaugucugugggcaggaagugaagagauccuucuguaaagguuuuuggaauuaugucugcugaauaauaaacuuuuuugaaauaauaaaucugguagaaaaaugagaucuaaaaaaaaaaaaaaaaaaaaaaaaaaaaaaaaaaaaaaaaaaaaaaaaaaaaaaaaaaaaaaaaugcaucccccccccccccccccccccccccccccccaaaggcucuuuucagagccaccagaauu

SEQ ID NO: 18697 - RNA, 2061 nt, Artificial Sequence
  mRNA product Design h-5 comprising derived and/or modified sequence from HRSV(Memphis-37)__AIY60640.1__F_DSCav1_mut7 (opt1)
gggagagggcgcuuggcuugcaaggacccugagcugcggcauugaagcacacccaacccaacucgacugaagucagccucacugaaccggaucugagaaucuucucucucugggcuugccagggcucuccgaaccuagcuagcauccucuucaauuccaacuagaaagcuuaccauggagcugcccauccucaagaccaacgccaucaccacgauccuggccgcggugacccugugcuucgccagcucccagaacaucaccgaggaguucuaccagagcacgugcuccgccgucagcaagggcuaccucuccgcccugcgcaccgggugguacaccagcgugaucaccaucgagcuguccaacaucaaggagaacaagugcaacggcaccgacgccaaggugaagcucaucaagcaggagcuggacaaguacaagaacgcggucacggagcugcagaugcugaugugcagcaccccggccgccggcuccgggagcgcgaucgccuccggcaucgccgucugcaaggugcugcaccucgagggcgaggugaacaagaucaagaacgcccugcuguccaccaacaaggccgucgugagccucuccaacggggugagcguccugaccuucaaggugcuggaccucaagaacuacaucgacaagcagcugcugcccauccugaacaagcagagcugcuccaucagcaacaucgagaccgucauggaguuccagcagaagaacaaccgccuccuggagaucacgcgggaguucagcgugaacgcgggcgugaccacccccgucuccaccuacaugcugacgaacagcgagcuccugucccugaucaacgacaugccgaucaccaacgaccagaagaagcucaugagcaacaacgugcagaucgugcgccagcaguccuacagcaucaugugcaucaucaaggaggagguccuggccuacguggugcagcugccccucuacggggucaucgacacccccugcuggaagcugcacaccagcccccugugcacgaccaacaccaaggagggcuccaacaucugccucacccggacggaccgcgggugguacugcgacaacgccggcagcguguccuucuucccgcaggccgagaccugcaaggucugcagcaaccggguguucugcgacaccaugaacucccugacccugcccagcgaggugaaccucugcaacaucgacaucuucaaccccaaguacgacugcaagaucaugacguccaagaccgacgucagcuccagcgugaucaccucccugggcgccaucgugagcugcuacgggaagaccaagugcacggcgagcaacaagaacaagggcaucaucaagaccuucuccaacgggugcgacuacgucagcaacaagggcguggacaccguguccgucggcaacacccuguacuacgugaacaagcaggagggcaagagccucuacgugaagggggagcccaucaucaacuucuacgacccgcuggucuuccccuccgacgaguucgacgccagcaucucccaggugaacgagaagaucaaccagagccuggccuucauccggaaguccgacgagcuccugcacaacgugaacgucggcaagagcaccacgaacaucaugaucaccaccaucaucaucgugaucaucgugauccugcugcuccugaucgccgucgggcuguuccucuacugcaaggcccgcuccacccccgugacgcugagcaaggaccagcuguccgggaucaacaacaucgcguucagcaacugaggacuaguacuggcugcaucucccuuuccucuguccuccauccuucucccaggauggugaagggggaccugguacccagugauccccaccccaggauccuaaaucaugacuuaccugcuaauaaaaacucauuggaaaagugagaagaucuaaaaaaaaaaaaaaaaaaaaaaaaaaaaaaaaaaaaaaaaaaaaaaaaaaaaaaaaaaaaaaaaugcaucccccccccccccccccccccccccccccccaaaggcucuuuucagagccaccagaauu

SEQ ID NO: 18698 - RNA, 2061 nt, Artificial Sequence
  mRNA product Design h-5 comprising derived and/or modified sequence from HRSV(Memphis-37)__AIY60640.1__F_DSCav1_mut7 (opt1)
gggagagggcgcuuggcuugcaaggacccugagcugcggcauugaagcacacccaacccaacucgacugaagucagccucacugaaccggaucugagaaucuucucucucugggcuugccagggcucuccgaaccuagcuagcauccucuucaauuccaacuagaaagcuuaccauggagcugcccauccucaagaccaacgccaucaccacgauccuggccgcggugacccugugcuucgccagcucccagaacaucaccgaggaguucuaccagagcacgugcuccgccgucagcaagggcuaccucuccgcccugcgcaccgggugguacaccagcgugaucaccaucgagcuguccaacaucaaggagaacaagugcaacggcaccgacgccaaggugaagcucaucaagcaggagcuggacaaguacaagaacgcggucacggagcugcagaugcucaugugcagcaccccggccgccggguccggcagcgccaucgcguccgggaucgccgugugcaaggugcugcaccuggagggcgaggucaacaagaucaagaacgcccuccugagcaccaacaaggccguggugucccugagcaacggcgucuccgugcucaccuucaaggugcuggaccugaagaacuacaucgacaagcagcuccugcccauccugaacaagcagagcugcuccaucagcaacaucgagacggucauggaguuccagcagaagaacaaccggcuccuggagaucacccgcgaguucuccgugaacgccggggugaccacccccgucagcacguacaugcugaccaacagcgagcuccugucccugaucaacgacaugcccaucaccaacgaccagaagaagcucaugagcaacaacgugcagaucgugcggcagcaguccuacagcaucaugugcaucaucaaggaggagguccuggcguacguggugcagcugccgcucuacggcgucaucgacacccccugcuggaagcugcacacgagcccccugugcaccaccaacaccaaggaggggagcaacaucugccucacgcgcaccgaccggggcugguacugcgacaacgccggguccgugagcuucuucccccaggccgagaccugcaaggugugcuccaaccgcgucuucugcgacaccaugaacagccugacgcugccguccgaggugaaccucugcaacaucgacaucuucaaccccaaguacgacugcaagaucaugaccagcaagaccgacgucuccagcuccgugaucaccagccugggcgccaucguguccugcuacggcaagacgaagugcaccgccagcaacaagaacaaggggaucaucaagaccuucuccaacggcugcgacuacgucagcaacaaggggguggacaccgugagcgucggcaacacgcuguacuacgugaacaagcaggagggcaagucccucuacgugaagggggagcccaucaucaacuucuacgacccccuggucuucccgagcgacgaguucgacgcguccaucagccaggugaacgagaagaucaaccagucccuggccuucauccggaaguccgacgagcuccugcacaacgugaacgucggcaaguccaccaccaacaucaugaucaccaccaucaucaucgugaucaucgugauccugcuccugcugaucgccgucggccucuuccuguacugcaaggcccgcagcacgcccgugacccuguccaaggaccagcugagcgggaucaacaacaucgccuucuccaacugaggacuaguacuggcugcaucucccuuuccucuguccuccauccuucucccaggauggugaagggggaccugguacccagugauccccaccccaggauccuaaaucaugacuuaccugcuaauaaaaacucauuggaaaagugagaagaucuaaaaaaaaaaaaaaaaaaaaaaaaaaaaaaaaaaaaaaaaaaaaaaaaaaaaaaaaaaaaaaaaugcaucccccccccccccccccccccccccccccccaaaggcucuuuucagagccaccagaauu

SEQ ID NO: 18699 - RNA, 2061 nt, Artificial Sequence
  mRNA product Design h-5 comprising derived and/or modified sequence from HRSV(Memphis-37)__AIY60640.1__F_DSCav1_mut7 (opt2)
gggagagggcgcuuggcuugcaaggacccugagcugcggcauugaagcacacccaacccaacucgacugaagucagccucacugaaccggaucugagaaucuucucucucugggcuugccagggcucuccgaaccuagcuagcauccucuucaauuccaacuagaaagcuuaccauggagcuccccauccucaagaccaacgccaucaccaccauccucgccgccgucacccucugcuucgccuccucccagaacaucaccgaggaguucuaccaguccaccugcuccgccgucuccaagggcuaccucuccgcccuccgcaccggcugguacaccuccgucaucaccaucgagcucuccaacaucaaggagaacaagugcaacggcaccgacgccaaggucaagcucaucaagcaggagcucgacaaguacaagaacgccgucaccgagcuccagaugcucaugugcuccacccccgccgccggcuccggcuccgccaucgccuccggcaucgccgucugcaagguccuccaccucgagggcgaggucaacaagaucaagaacgcccuccucuccaccaacaaggccgucgucucccucuccaacggcgucuccguccucaccuucaagguccucgaccucaagaacuacaucgacaagcagcuccuccccauccucaacaagcaguccugcuccaucuccaacaucgagaccgucauggaguuccagcagaagaacaaccgccuccucgagaucacccgcgaguucuccgucaacgccggcgucaccacccccgucuccaccuacaugcucaccaacuccgagcuccucucccucaucaacgacaugcccaucaccaacgaccagaagaagcucauguccaacaacguccagaucguccgccagcaguccuacuccaucaugugcaucaucaaggaggagguccucgccuacgucguccagcucccccucuacggcgucaucgacacccccugcuggaagcuccacaccuccccccucugcaccaccaacaccaaggagggcuccaacaucugccucacccgcaccgaccgcggcugguacugcgacaacgccggcuccgucuccuucuucccccaggccgagaccugcaaggucugcuccaaccgcgucuucugcgacaccaugaacucccucacccuccccuccgaggucaaccucugcaacaucgacaucuucaaccccaaguacgacugcaagaucaugaccuccaagaccgacgucuccuccuccgucaucaccucccucggcgccaucgucuccugcuacggcaagaccaagugcaccgccuccaacaagaacaagggcaucaucaagaccuucuccaacggcugcgacuacgucuccaacaagggcgucgacaccgucuccgucggcaacacccucuacuacgucaacaagcaggagggcaagucccucuacgucaagggcgagcccaucaucaacuucuacgacccccucgucuuccccuccgacgaguucgacgccuccaucucccaggucaacgagaagaucaaccagucccucgccuucauccgcaaguccgacgagcuccuccacaacgucaacgucggcaaguccaccaccaacaucaugaucaccaccaucaucaucgucaucaucgucauccuccuccuccucaucgccgucggccucuuccucuacugcaaggcccgcuccacccccgucacccucuccaaggaccagcucuccggcaucaacaacaucgccuucuccaacugaggacuaguacuggcugcaucucccuuuccucuguccuccauccuucucccaggauggugaagggggaccugguacccagugauccccaccccaggauccuaaaucaugacuuaccugcuaauaaaaacucauuggaaaagugagaagaucuaaaaaaaaaaaaaaaaaaaaaaaaaaaaaaaaaaaaaaaaaaaaaaaaaaaaaaaaaaaaaaaaugcaucccccccccccccccccccccccccccccccaaaggcucuuuucagagccaccagaauu

SEQ ID NO: 18700 - RNA, 2061 nt, Artificial Sequence
  mRNA product Design h-5 comprising derived and/or modified sequence from HRSV(Memphis-37)__AIY60640.1__F_DSCav1_mut7 (opt3)
gggagagggcgcuuggcuugcaaggacccugagcugcggcauugaagcacacccaacccaacucgacugaagucagccucacugaaccggaucugagaaucuucucucucugggcuugccagggcucuccgaaccuagcuagcauccucuucaauuccaacuagaaagcuuaccauggagcugcccauccucaagaccaacgccauuacaacuauacuugcugcagugacgcugugcuucgccagcucccagaauaucaccgaagaguuuuaccaaucuacauguucagcggucaguaaaggcuauuugagcgcuuuaagaacugggugguacaccuccguuauuacaaucgaacugucuaacauuaaggagaauaaaugcaacggaaccgacgccaaggugaaacuaaucaagcaggaacucgauaaguauaaaaaugcaguaacugagcugcagaugcuuauguguucgaccccugccgcugguucaggcagcgcaauagccagugggaucgcugugugcaagguccugcacuuggagggagaagugaacaaaauuaagaaugcccuccuguccacaaacaaagcgguugugucucugagcaauggcgucuccgugcucacguucaagguauuagaccugaagaacuacaucgauaaacagcuuuugccaauucugaauaagcaaucauguaguaucagcaacauagagacuguuauggaauuucagcagaaaaauaacaggcuacucgagauuacccgggaguucucugugaaugccggugucacaacuccgguguccaccuauaugcugacaaacucagaacuucugagcuugaucaacgacaugcccauuaccaaugaucagaagaaacucaugaguaacaaugugcaaaucguccgccagcagucuuacuccaucaugugcauuauaaaggaggaaguucuggcauaugugguacaguuaccucuguacggggugaucgacacgccauguuggaaacuccauacuagcccccuuugcacaaccaacacuaaggagggaucgaauauuugucugacacgaaccgaucguggcugguacugcgacaacgcuggcucugucuccuuuuucccucaagccgaaacguguaaggugugcucaaauagaguguuuugcgauaccaugaacaguuugacacuaccaagcgagguuaaucuguguaacaucgacauauucaaucccaaauaugauugcaagauuaugacuuccaaaaccgacgucucuagcucagugaucacaagucucggggcaaucguauccuguuacggaaagacuaaaugcaccgcuagcaacaagaauaaggguauuaucaaaacauuuucuaacggcugugauuauguuucaaauaaggggguggacaccgucagugugggaaacacucuguacuaugucaacaaacaggagggcaagagccuuuacgugaaaggugaaccuauuauaaauuucuaugacccacugguuuuuccguccgaugaguucgacgccucuaucagccaggugaacgaaaagauuaaucaaucguuggcguuuaucaggaaguccgaugagcuccugcacaacguaaaugucgggaaaucaacgacaaacaucaugauuaccacuauaaucauugugaucauuguuaucuuacugcuacucauagccgugggacuguuccuuuacugcaaggcacggaguacccccgucacauugucuaaagaccagcugagcggcaucaauaacauugcuuucuccaauugaggacuaguacuggcugcaucucccuuuccucuguccuccauccuucucccaggauggugaagggggaccugguacccagugauccccaccccaggauccuaaaucaugacuuaccugcuaauaaaaacucauuggaaaagugagaagaucuaaaaaaaaaaaaaaaaaaaaaaaaaaaaaaaaaaaaaaaaaaaaaaaaaaaaaaaaaaaaaaaaugcaucccccccccccccccccccccccccccccccaaaggcucuuuucagagccaccagaauu

SEQ ID NO: 18701 - RNA, 2061 nt, Artificial Sequence
  mRNA product Design h-5 comprising derived and/or modified sequence from HRSV(Memphis-37)__AIY60640.1__F_DSCav1_mut7 (opt4)
gggagagggcgcuuggcuugcaaggacccugagcugcggcauugaagcacacccaacccaacucgacugaagucagccucacugaaccggaucugagaaucuucucucucugggcuugccagggcucuccgaaccuagcuagcauccucuucaauuccaacuagaaagcuuaccauggagcugcccauccugaagaccaacgccaucaccaccauccuggccgccgugacccugugcuucgccagcagccagaacaucaccgaggaguucuaccagagcaccugcagcgccgugagcaagggcuaccugagcgcccugagaaccggcugguacaccagcgugaucaccaucgagcugagcaacaucaaggagaacaagugcaacggcaccgacgccaaggugaagcugaucaagcaggagcuggacaaguacaagaacgccgugaccgagcugcagaugcugaugugcagcacccccgccgccggcagcggcagcgccaucgccagcggcaucgccgugugcaaggugcugcaccuggagggcgaggugaacaagaucaagaacgcccugcugagcaccaacaaggccguggugagccugagcaacggcgugagcgugcugaccuucaaggugcuggaccugaagaacuacaucgacaagcagcugcugcccauccugaacaagcagagcugcagcaucagcaacaucgagaccgugauggaguuccagcagaagaacaacagacugcuggagaucaccagagaguucagcgugaacgccggcgugaccacccccgugagcaccuacaugcugaccaacagcgagcugcugagccugaucaacgacaugcccaucaccaacgaccagaagaagcugaugagcaacaacgugcagaucgugagacagcagagcuacagcaucaugugcaucaucaaggaggaggugcuggccuacguggugcagcugccccuguacggcgugaucgacacccccugcuggaagcugcacaccagcccccugugcaccaccaacaccaaggagggcagcaacaucugccugaccagaaccgacagaggcugguacugcgacaacgccggcagcgugagcuucuucccccaggccgagaccugcaaggugugcagcaacagaguguucugcgacaccaugaacagccugacccugcccagcgaggugaaccugugcaacaucgacaucuucaaccccaaguacgacugcaagaucaugaccagcaagaccgacgugagcagcagcgugaucaccagccugggcgccaucgugagcugcuacggcaagaccaagugcaccgccagcaacaagaacaagggcaucaucaagaccuucagcaacggcugcgacuacgugagcaacaagggcguggacaccgugagcgugggcaacacccuguacuacgugaacaagcaggagggcaagagccuguacgugaagggcgagcccaucaucaacuucuacgacccccugguguuccccagcgacgaguucgacgccagcaucagccaggugaacgagaagaucaaccagagccuggccuucaucagaaagagcgacgagcugcugcacaacgugaacgugggcaagagcaccaccaacaucaugaucaccaccaucaucaucgugaucaucgugauccugcugcugcugaucgccgugggccuguuccuguacugcaaggccagaagcacccccgugacccugagcaaggaccagcugagcggcaucaacaacaucgccuucagcaacugaggacuaguacuggcugcaucucccuuuccucuguccuccauccuucucccaggauggugaagggggaccugguacccagugauccccaccccaggauccuaaaucaugacuuaccugcuaauaaaaacucauuggaaaagugagaagaucuaaaaaaaaaaaaaaaaaaaaaaaaaaaaaaaaaaaaaaaaaaaaaaaaaaaaaaaaaaaaaaaaugcaucccccccccccccccccccccccccccccccaaaggcucuuuucagagccaccagaauu

SEQ ID NO: 18702 - RNA, 2061 nt, Artificial Sequence
  mRNA product Design h-5 comprising derived and/or modified sequence from HRSV(Memphis-37)__AIY60640.1__F_DSCav1_mut7 (opt5)
gggagagggcgcuuggcuugcaaggacccugagcugcggcauugaagcacacccaacccaacucgacugaagucagccucacugaaccggaucugagaaucuucucucucugggcuugccagggcucuccgaaccuagcuagcauccucuucaauuccaacuagaaagcuuaccauggagcugcccauccucaagaccaacgccauuacaacgauccuggcugccgugacccuuugcuucgcgagcucccagaauauuacagaagaguuuuaccaaucuaccuguagcgcugucuccaaaggcuaucugucugcccucagaacagggugguacaccagcguuaucacaauugaacuguccaacaucaaggagaauaaaugcaacggaaccgacgccaaggugaaacuuaucaagcaggaacuggauaaguauaaaaaugcugugacggagcuccagaugcugauguguucuaccccugccgcuggcagcggguccgccauugcgagcggaaucgccgucugcaaggugcugcaccucgagggcgaaguuaacaaaauuaagaaugcucugcuuucuacaaacaaagccguggucucccugagcaauggggugucuguucucaccuucaaggugcuggaccuuaagaacuacaucgauaaacagcugcucccgauucugaauaagcaauccuguagcaucucuaacauugagacagucauggaauuucagcagaaaaauaaccggcugcucgagaucacccgcgaguucuccgugaaugcuggagugacgacacccgucagcaccuauaugcugacaaacuccgaacuucugucucucaucaacgacaugccuauuaccaaugaucagaagaaacugaugagcaacaauguucaaaucgugagacagcaguccuacagcauuaugugcaucauuaaggaggaagugcuugccuaugucgugcagcugccccucuacggcguuaucgacaccccuuguuggaaacugcauacaucuccccugugcacgaccaacacaaaggagggcuccaauaucugucucacccggacagaucgcgggugguacugcgacaacgcgggaagcgugagcuuuuucccucaagccgaaaccuguaaggucugcucuaauagaguguuuugcgauacgaugaacucccugacacuuccgucugagguuaaucuguguaacauugacaucuucaaucccaaauaugauugcaagauuaugaccagcaaaaccgacguguccagcucugucaucacaucccucggcgcuauugugagcuguuacgggaagaccaaaugcacagccucuaacaagaauaagggaaucaucaaaacguuuuccaacggcugugauuaugucagcaauaaggggguggacaccguuuccgugggaaacacacuguacuaugucaacaaacaggagggcaagucucuuuacgugaaaggcgaaccuauuaucaauuucuaugacccccugguuuuuccuagcgaugaguucgacgcuuccauuucucaggugaacgaaaagaucaaucaaagccucgccuuuauucggaaguccgaugagcugcugcacaacgucaauguggggaaaagcaccacaaacaucaugauuaccacgaucaucauugugaucauuguuauccuccugcuucugauugccgucggacucuuccuguacugcaaggcucgcucuacccccgugacacuguccaaagaccagcuuagcggcaucaauaacaucgcguucucuaauugaggacuaguacuggcugcaucucccuuuccucuguccuccauccuucucccaggauggugaagggggaccugguacccagugauccccaccccaggauccuaaaucaugacuuaccugcuaauaaaaacucauuggaaaagugagaagaucuaaaaaaaaaaaaaaaaaaaaaaaaaaaaaaaaaaaaaaaaaaaaaaaaaaaaaaaaaaaaaaaaugcaucccccccccccccccccccccccccccccccaaaggcucuuuucagagccaccagaauu

SEQ ID NO: 18703 - RNA, 2061 nt, Artificial Sequence
  mRNA product Design h-5 comprising derived and/or modified sequence from HRSV(Memphis-37)__AIY60640.1__F_DSCav1_mut7 (opt6)
gggagagggcgcuuggcuugcaaggacccugagcugcggcauugaagcacacccaacccaacucgacugaagucagccucacugaaccggaucugagaaucuucucucucugggcuugccagggcucuccgaaccuagcuagcauccucuucaauuccaacuagaaagcuuaccauggaacuaccaauacucaaaacaaaugcuauaaccacaauacucgcagcaguaacauuauguuucgcaucaucccaaaacauaacagaagaauuuuaucaaucaaccuguucagcaguauccaaaggauaccuaagugcauuaagaaccggaugguacacaucaguaauaaccauagaacuuucaaacauaaaagaaaacaaauguaacggcacagacgcaaaagucaaacucaucaaacaggaacuugacaaauauaaaaacgcaguaaccgaacuacaaaugcuaaugugcucaacaccagcagcaggaucaggaucagcaauugcaucuggaauagcuguaugcaaaguccuacaccuagaaggagaaguaaacaaaaucaaaaacgcauuacucuccacaaacaaagcaguaguaucacuaucaaacggaguuucaguacuaaccuucaaaguauuagaccuaaaaaacuacauagacaaacaacuacuaccuauacuaaacaaacaauccuguucaauaagcaacauugaaacuguaauggaauuucaacaaaaaaacaaccgccuauuagaaauaaccagagaauuuuccguaaaugcaggaguaaccacaccagucucuacauacauguuaaccaacucagaacuauuaucacucauaaaugacaugccuauaacaaacgaccaaaaaaaacuaaugucaaacaacguacaaauaguaagacaacaaucauauuccauaaugugcauaauaaaagaagaaguacuugcauacgugguucaacuaccccuauauggaguuauagacacaccaugcuggaaacuccacacuuccccacuuugcacaacuaacacaaaagaaggaucaaauauaugccuaaccagaacagaccguggaugguacugcgacaacgcuggaucagucuccuucuuuccacaagcagaaaccugcaaagucugcucaaauagagucuucugugacacaaugaacucacucacccuacccucagaaguaaaccuauguaauauagauauauuuaauccaaaauacgacugcaaaauuaugacaaguaaaacagacguaagcucaucagucauaaccagccuaggagcaauaguauccuguuacggcaaaacaaaaugcacagcuucaaacaaaaacaaaggcauaauaaaaacauucucaaacggaugugacuauguaucaaauaaaggaguugacacaguaucaguuggaaacacacuauacuauguaaacaaacaagaaggaaaaucacuauacguuaaaggcgaacccauaaucaauuucuacgacccccuagucuucccauccgaugaauuugacgcaucaauaucccaaguaaaugaaaaaaucaaccaaucccuagcauuuauacgaaaauccgacgaacuacuccauaaugucaacgucgguaaaucaacgacaaacaucaugaucacaacaauaauaauaguaauaauuguaauauuacucuuacucauagcaguaggccuauuucuauauugcaaagccagaucaacaccaguaaccuuauccaaagaccaacuaucuggaauaaacaacauagcauuuuccaacugaggacuaguacuggcugcaucucccuuuccucuguccuccauccuucucccaggauggugaagggggaccugguacccagugauccccaccccaggauccuaaaucaugacuuaccugcuaauaaaaacucauuggaaaagugagaagaucuaaaaaaaaaaaaaaaaaaaaaaaaaaaaaaaaaaaaaaaaaaaaaaaaaaaaaaaaaaaaaaaaugcaucccccccccccccccccccccccccccccccaaaggcucuuuucagagccaccagaauu

SEQ ID NO: 18704 - RNA, 2061 nt, Artificial Sequence
  mRNA product Design h-5 comprising derived and/or modified sequence from HRSV(Memphis-37)__AIY60640.1__F_DSCav1_mut7 (opt11)
gggagagggcgcuuggcuugcaaggacccugagcugcggcauugaagcacacccaacccaacucgacugaagucagccucacugaaccggaucugagaaucuucucucucugggcuugccagggcucuccgaaccuagcuagcauccucuucaauuccaacuagaaagcuuaccauggaacuccccauacuuaaaacaaacgccauaacaacuauacucgcagccgucacccucuguuucgcauccucucaaaacaucaccgaagaguucuaucaaucaaccugcuccgccgucucaaaaggcuaccucuccgcccuacgcacaggcugguacaccagcgucauuaccauagaacucucgaacaucaaagaaaacaaaugcaacggcaccgacgcaaaagugaaacucaucaaacaagaacucgacaaauacaaaaacgccgucaccgaacuucagaugcucaugugcuccaccccugccgccggcagcggcuccgccauagccuccggcaucgcagucugcaaaguccuccaccucgaaggagaaguaaacaaaaucaaaaaugcucuccucuccacaaacaaagccgucgucucacucuccaauggagucuccguccucaccuucaaaguccucgaccucaaaaacuacauagacaaacaacuacuccccauccucaacaagcaauccugcucuaucuccaacauagaaaccguuauggaguuccaacagaaaaauaaccgccugcuagaaauaacccgagaguucuccgucaacgcaggcgucacuacccccgucagcacauacaugcuaacaaacuccgaacugcucucccuuaucaacgacaugcccaucacaaacgaucagaaaaagcucaugucuaacaacguacaaaucguucggcaacaauccuacuccaucaugugcaucaucaaagaagaagugcucgccuacguaguccaacucccccucuacggagucaucgacacacccugcuggaaacuccacacaucaccccucugcaccaccaacacaaaagaaggguccaacaucugccucacgcgcaccgaccgaggcugguacugcgacaacgccggcuccguauccuucuucccccaagcagaaaccugcaaggucugcuccaaccgcguauucugcgacaccaugaacucgcucacccuccccucagaagucaaccuauguaacaucgacauauucaaucccaaauacgacugcaagauaaugacuuccaaaaccgacguaagcuccucggucaucaccucccucggcgccaucgucuccugcuacggcaaaaccaaaugcaccgccuccaauaagaauaaaggcauaauaaagacauucagcaacggcugcgauuacgucuccaacaaaggugucgacaccgucucagucggcaacacucuauacuacgugaacaaacaagaaggcaaaagccuauacguuaaaggcgaaccaauaaucaauuucuacgacccucuagucuuucccucugacgaguucgaugccagcauaagccaagucaacgaaaagaucaaccaaucacucgccuucauccguaaauccgacgaacugcuccacaaugucaauguaggcaaaucaacaaccaacaucaugaucaccacuauuaucaucgucaucaucguaauccuacuccuacuaaucgccgucggccuauuccucuacugcaaagcccgcucgacccccgucacucucagcaaggaucaacuauccggcaucaacaacaucgccuucuccaacuaaggacuaguacuggcugcaucucccuuuccucuguccuccauccuucucccaggauggugaagggggaccugguacccagugauccccaccccaggauccuaaaucaugacuuaccugcuaauaaaaacucauuggaaaagugagaagaucuaaaaaaaaaaaaaaaaaaaaaaaaaaaaaaaaaaaaaaaaaaaaaaaaaaaaaaaaaaaaaaaaugcaucccccccccccccccccccccccccccccccaaaggcucuuuucagagccaccagaauu

SEQ ID NO: 18705 - RNA, 1994 nt, Artificial Sequence
  mRNA product Design i-1 comprising derived and/or modified sequence from HRSV(Memphis-37)__AIY60640.1__F_DSCav1_mut7 (opt1)
gggagagggcgcuuggcuugcaaggacccugagcugcggcauugaagcacacccaacccaacucgacugaagucagccucacugaaccggaucugagaaucuucucucucugggcuugccagggcucuccgaaccuagcuagcauccucuucaauuccaacuagaaagcuuaccauggagcugcccauccucaagaccaacgccaucaccacgauccuggccgcggugacccugugcuucgccagcucccagaacaucaccgaggaguucuaccagagcacgugcuccgccgucagcaagggcuaccucuccgcccugcgcaccgggugguacaccagcgugaucaccaucgagcuguccaacaucaaggagaacaagugcaacggcaccgacgccaaggugaagcucaucaagcaggagcuggacaaguacaagaacgcggucacggagcugcagaugcugaugugcagcaccccggccgccggcuccgggagcgcgaucgccuccggcaucgccgucugcaaggugcugcaccucgagggcgaggugaacaagaucaagaacgcccugcuguccaccaacaaggccgucgugagccucuccaacggggugagcguccugaccuucaaggugcuggaccucaagaacuacaucgacaagcagcugcugcccauccugaacaagcagagcugcuccaucagcaacaucgagaccgucauggaguuccagcagaagaacaaccgccuccuggagaucacgcgggaguucagcgugaacgcgggcgugaccacccccgucuccaccuacaugcugacgaacagcgagcuccugucccugaucaacgacaugccgaucaccaacgaccagaagaagcucaugagcaacaacgugcagaucgugcgccagcaguccuacagcaucaugugcaucaucaaggaggagguccuggccuacguggugcagcugccccucuacggggucaucgacacccccugcuggaagcugcacaccagcccccugugcacgaccaacaccaaggagggcuccaacaucugccucacccggacggaccgcgggugguacugcgacaacgccggcagcguguccuucuucccgcaggccgagaccugcaaggucugcagcaaccggguguucugcgacaccaugaacucccugacccugcccagcgaggugaaccucugcaacaucgacaucuucaaccccaaguacgacugcaagaucaugacguccaagaccgacgucagcuccagcgugaucaccucccugggcgccaucgugagcugcuacgggaagaccaagugcacggcgagcaacaagaacaagggcaucaucaagaccuucuccaacgggugcgacuacgucagcaacaagggcguggacaccguguccgucggcaacacccuguacuacgugaacaagcaggagggcaagagccucuacgugaagggggagcccaucaucaacuucuacgacccgcuggucuuccccuccgacgaguucgacgccagcaucucccaggugaacgagaagaucaaccagagccuggccuucauccggaaguccgacgagcuccugcacaacgugaacgucggcaagagcaccacgaacaucaugaucaccaccaucaucaucgugaucaucgugauccugcugcuccugaucgccgucgggcuguuccucuacugcaaggcccgcuccacccccgugacgcugagcaaggaccagcuguccgggaucaacaacaucgcguucagcaacugaggacuaguguccaccugucccuccugggcugcuggauugucucguuuuccugccaaauaaacaggaucagcgcuuuacagaucuaaaaaaaaaaaaaaaaaaaaaaaaaaaaaaaaaaaaaaaaaaaaaaaaaaaaaaaaaaaaaaaaugcaucccccccccccccccccccccccccccccccaaaggcucuuuucagagccaccagaauu

SEQ ID NO: 18706 - RNA, 1994 nt, Artificial Sequence
  mRNA product Design i-1 comprising derived and/or modified sequence from HRSV(Memphis-37)__AIY60640.1__F_DSCav1_mut7 (opt1)
gggagagggcgcuuggcuugcaaggacccugagcugcggcauugaagcacacccaacccaacucgacugaagucagccucacugaaccggaucugagaaucuucucucucugggcuugccagggcucuccgaaccuagcuagcauccucuucaauuccaacuagaaagcuuaccauggagcugcccauccucaagaccaacgccaucaccacgauccuggccgcggugacccugugcuucgccagcucccagaacaucaccgaggaguucuaccagagcacgugcuccgccgucagcaagggcuaccucuccgcccugcgcaccgggugguacaccagcgugaucaccaucgagcuguccaacaucaaggagaacaagugcaacggcaccgacgccaaggugaagcucaucaagcaggagcuggacaaguacaagaacgcggucacggagcugcagaugcucaugugcagcaccccggccgccggguccggcagcgccaucgcguccgggaucgccgugugcaaggugcugcaccuggagggcgaggucaacaagaucaagaacgcccuccugagcaccaacaaggccguggugucccugagcaacggcgucuccgugcucaccuucaaggugcuggaccugaagaacuacaucgacaagcagcuccugcccauccugaacaagcagagcugcuccaucagcaacaucgagacggucauggaguuccagcagaagaacaaccggcuccuggagaucacccgcgaguucuccgugaacgccggggugaccacccccgucagcacguacaugcugaccaacagcgagcuccugucccugaucaacgacaugcccaucaccaacgaccagaagaagcucaugagcaacaacgugcagaucgugcggcagcaguccuacagcaucaugugcaucaucaaggaggagguccuggcguacguggugcagcugccgcucuacggcgucaucgacacccccugcuggaagcugcacacgagcccccugugcaccaccaacaccaaggaggggagcaacaucugccucacgcgcaccgaccggggcugguacugcgacaacgccggguccgugagcuucuucccccaggccgagaccugcaaggugugcuccaaccgcgucuucugcgacaccaugaacagccugacgcugccguccgaggugaaccucugcaacaucgacaucuucaaccccaaguacgacugcaagaucaugaccagcaagaccgacgucuccagcuccgugaucaccagccugggcgccaucguguccugcuacggcaagacgaagugcaccgccagcaacaagaacaaggggaucaucaagaccuucuccaacggcugcgacuacgucagcaacaaggggguggacaccgugagcgucggcaacacgcuguacuacgugaacaagcaggagggcaagucccucuacgugaagggggagcccaucaucaacuucuacgacccccuggucuucccgagcgacgaguucgacgcguccaucagccaggugaacgagaagaucaaccagucccuggccuucauccggaaguccgacgagcuccugcacaacgugaacgucggcaaguccaccaccaacaucaugaucaccaccaucaucaucgugaucaucgugauccugcuccugcugaucgccgucggccucuuccuguacugcaaggcccgcagcacgcccgugacccuguccaaggaccagcugagcgggaucaacaacaucgccuucuccaacugaggacuaguguccaccugucccuccugggcugcuggauugucucguuuuccugccaaauaaacaggaucagcgcuuuacagaucuaaaaaaaaaaaaaaaaaaaaaaaaaaaaaaaaaaaaaaaaaaaaaaaaaaaaaaaaaaaaaaaaugcaucccccccccccccccccccccccccccccccaaaggcucuuuucagagccaccagaauu

SEQ ID NO: 18707 - RNA, 1994 nt, Artificial Sequence
  mRNA product Design i-1 comprising derived and/or modified sequence from HRSV(Memphis-37)__AIY60640.1__F_DSCav1_mut7 (opt2)
gggagagggcgcuuggcuugcaaggacccugagcugcggcauugaagcacacccaacccaacucgacugaagucagccucacugaaccggaucugagaaucuucucucucugggcuugccagggcucuccgaaccuagcuagcauccucuucaauuccaacuagaaagcuuaccauggagcuccccauccucaagaccaacgccaucaccaccauccucgccgccgucacccucugcuucgccuccucccagaacaucaccgaggaguucuaccaguccaccugcuccgccgucuccaagggcuaccucuccgcccuccgcaccggcugguacaccuccgucaucaccaucgagcucuccaacaucaaggagaacaagugcaacggcaccgacgccaaggucaagcucaucaagcaggagcucgacaaguacaagaacgccgucaccgagcuccagaugcucaugugcuccacccccgccgccggcuccggcuccgccaucgccuccggcaucgccgucugcaagguccuccaccucgagggcgaggucaacaagaucaagaacgcccuccucuccaccaacaaggccgucgucucccucuccaacggcgucuccguccucaccuucaagguccucgaccucaagaacuacaucgacaagcagcuccuccccauccucaacaagcaguccugcuccaucuccaacaucgagaccgucauggaguuccagcagaagaacaaccgccuccucgagaucacccgcgaguucuccgucaacgccggcgucaccacccccgucuccaccuacaugcucaccaacuccgagcuccucucccucaucaacgacaugcccaucaccaacgaccagaagaagcucauguccaacaacguccagaucguccgccagcaguccuacuccaucaugugcaucaucaaggaggagguccucgccuacgucguccagcucccccucuacggcgucaucgacacccccugcuggaagcuccacaccuccccccucugcaccaccaacaccaaggagggcuccaacaucugccucacccgcaccgaccgcggcugguacugcgacaacgccggcuccgucuccuucuucccccaggccgagaccugcaaggucugcuccaaccgcgucuucugcgacaccaugaacucccucacccuccccuccgaggucaaccucugcaacaucgacaucuucaaccccaaguacgacugcaagaucaugaccuccaagaccgacgucuccuccuccgucaucaccucccucggcgccaucgucuccugcuacggcaagaccaagugcaccgccuccaacaagaacaagggcaucaucaagaccuucuccaacggcugcgacuacgucuccaacaagggcgucgacaccgucuccgucggcaacacccucuacuacgucaacaagcaggagggcaagucccucuacgucaagggcgagcccaucaucaacuucuacgacccccucgucuuccccuccgacgaguucgacgccuccaucucccaggucaacgagaagaucaaccagucccucgccuucauccgcaaguccgacgagcuccuccacaacgucaacgucggcaaguccaccaccaacaucaugaucaccaccaucaucaucgucaucaucgucauccuccuccuccucaucgccgucggccucuuccucuacugcaaggcccgcuccacccccgucacccucuccaaggaccagcucuccggcaucaacaacaucgccuucuccaacugaggacuaguguccaccugucccuccugggcugcuggauugucucguuuuccugccaaauaaacaggaucagcgcuuuacagaucuaaaaaaaaaaaaaaaaaaaaaaaaaaaaaaaaaaaaaaaaaaaaaaaaaaaaaaaaaaaaaaaaugcaucccccccccccccccccccccccccccccccaaaggcucuuuucagagccaccagaauu

SEQ ID NO: 18708 - RNA, 1994 nt, Artificial Sequence
  mRNA product Design i-1 comprising derived and/or modified sequence from HRSV(Memphis-37)__AIY60640.1__F_DSCav1_mut7 (opt3)
gggagagggcgcuuggcuugcaaggacccugagcugcggcauugaagcacacccaacccaacucgacugaagucagccucacugaaccggaucugagaaucuucucucucugggcuugccagggcucuccgaaccuagcuagcauccucuucaauuccaacuagaaagcuuaccauggagcugcccauccucaagaccaacgccauuacaacuauacuugcugcagugacgcugugcuucgccagcucccagaauaucaccgaagaguuuuaccaaucuacauguucagcggucaguaaaggcuauuugagcgcuuuaagaacugggugguacaccuccguuauuacaaucgaacugucuaacauuaaggagaauaaaugcaacggaaccgacgccaaggugaaacuaaucaagcaggaacucgauaaguauaaaaaugcaguaacugagcugcagaugcuuauguguucgaccccugccgcugguucaggcagcgcaauagccagugggaucgcugugugcaagguccugcacuuggagggagaagugaacaaaauuaagaaugcccuccuguccacaaacaaagcgguugugucucugagcaauggcgucuccgugcucacguucaagguauuagaccugaagaacuacaucgauaaacagcuuuugccaauucugaauaagcaaucauguaguaucagcaacauagagacuguuauggaauuucagcagaaaaauaacaggcuacucgagauuacccgggaguucucugugaaugccggugucacaacuccgguguccaccuauaugcugacaaacucagaacuucugagcuugaucaacgacaugcccauuaccaaugaucagaagaaacucaugaguaacaaugugcaaaucguccgccagcagucuuacuccaucaugugcauuauaaaggaggaaguucuggcauaugugguacaguuaccucuguacggggugaucgacacgccauguuggaaacuccauacuagcccccuuugcacaaccaacacuaaggagggaucgaauauuugucugacacgaaccgaucguggcugguacugcgacaacgcuggcucugucuccuuuuucccucaagccgaaacguguaaggugugcucaaauagaguguuuugcgauaccaugaacaguuugacacuaccaagcgagguuaaucuguguaacaucgacauauucaaucccaaauaugauugcaagauuaugacuuccaaaaccgacgucucuagcucagugaucacaagucucggggcaaucguauccuguuacggaaagacuaaaugcaccgcuagcaacaagaauaaggguauuaucaaaacauuuucuaacggcugugauuauguuucaaauaaggggguggacaccgucagugugggaaacacucuguacuaugucaacaaacaggagggcaagagccuuuacgugaaaggugaaccuauuauaaauuucuaugacccacugguuuuuccguccgaugaguucgacgccucuaucagccaggugaacgaaaagauuaaucaaucguuggcguuuaucaggaaguccgaugagcuccugcacaacguaaaugucgggaaaucaacgacaaacaucaugauuaccacuauaaucauugugaucauuguuaucuuacugcuacucauagccgugggacuguuccuuuacugcaaggcacggaguacccccgucacauugucuaaagaccagcugagcggcaucaauaacauugcuuucuccaauugaggacuaguguccaccugucccuccugggcugcuggauugucucguuuuccugccaaauaaacaggaucagcgcuuuacagaucuaaaaaaaaaaaaaaaaaaaaaaaaaaaaaaaaaaaaaaaaaaaaaaaaaaaaaaaaaaaaaaaaugcaucccccccccccccccccccccccccccccccaaaggcucuuuucagagccaccagaauu

SEQ ID NO: 18709 - RNA, 1994 nt, Artificial Sequence
  mRNA product Design i-1 comprising derived and/or modified sequence from HRSV(Memphis-37)__AIY60640.1__F_DSCav1_mut7 (opt4)
gggagagggcgcuuggcuugcaaggacccugagcugcggcauugaagcacacccaacccaacucgacugaagucagccucacugaaccggaucugagaaucuucucucucugggcuugccagggcucuccgaaccuagcuagcauccucuucaauuccaacuagaaagcuuaccauggagcugcccauccugaagaccaacgccaucaccaccauccuggccgccgugacccugugcuucgccagcagccagaacaucaccgaggaguucuaccagagcaccugcagcgccgugagcaagggcuaccugagcgcccugagaaccggcugguacaccagcgugaucaccaucgagcugagcaacaucaaggagaacaagugcaacggcaccgacgccaaggugaagcugaucaagcaggagcuggacaaguacaagaacgccgugaccgagcugcagaugcugaugugcagcacccccgccgccggcagcggcagcgccaucgccagcggcaucgccgugugcaaggugcugcaccuggagggcgaggugaacaagaucaagaacgcccugcugagcaccaacaaggccguggugagccugagcaacggcgugagcgugcugaccuucaaggugcuggaccugaagaacuacaucgacaagcagcugcugcccauccugaacaagcagagcugcagcaucagcaacaucgagaccgugauggaguuccagcagaagaacaacagacugcuggagaucaccagagaguucagcgugaacgccggcgugaccacccccgugagcaccuacaugcugaccaacagcgagcugcugagccugaucaacgacaugcccaucaccaacgaccagaagaagcugaugagcaacaacgugcagaucgugagacagcagagcuacagcaucaugugcaucaucaaggaggaggugcuggccuacguggugcagcugccccuguacggcgugaucgacacccccugcuggaagcugcacaccagcccccugugcaccaccaacaccaaggagggcagcaacaucugccugaccagaaccgacagaggcugguacugcgacaacgccggcagcgugagcuucuucccccaggccgagaccugcaaggugugcagcaacagaguguucugcgacaccaugaacagccugacccugcccagcgaggugaaccugugcaacaucgacaucuucaaccccaaguacgacugcaagaucaugaccagcaagaccgacgugagcagcagcgugaucaccagccugggcgccaucgugagcugcuacggcaagaccaagugcaccgccagcaacaagaacaagggcaucaucaagaccuucagcaacggcugcgacuacgugagcaacaagggcguggacaccgugagcgugggcaacacccuguacuacgugaacaagcaggagggcaagagccuguacgugaagggcgagcccaucaucaacuucuacgacccccugguguuccccagcgacgaguucgacgccagcaucagccaggugaacgagaagaucaaccagagccuggccuucaucagaaagagcgacgagcugcugcacaacgugaacgugggcaagagcaccaccaacaucaugaucaccaccaucaucaucgugaucaucgugauccugcugcugcugaucgccgugggccuguuccuguacugcaaggccagaagcacccccgugacccugagcaaggaccagcugagcggcaucaacaacaucgccuucagcaacugaggacuaguguccaccugucccuccugggcugcuggauugucucguuuuccugccaaauaaacaggaucagcgcuuuacagaucuaaaaaaaaaaaaaaaaaaaaaaaaaaaaaaaaaaaaaaaaaaaaaaaaaaaaaaaaaaaaaaaaugcaucccccccccccccccccccccccccccccccaaaggcucuuuucagagccaccagaauu

SEQ ID NO: 18710 - RNA, 1994 nt, Artificial Sequence
  mRNA product Design i-1 comprising derived and/or modified sequence from HRSV(Memphis-37)__AIY60640.1__F_DSCav1_mut7 (opt5)
gggagagggcgcuuggcuugcaaggacccugagcugcggcauugaagcacacccaacccaacucgacugaagucagccucacugaaccggaucugagaaucuucucucucugggcuugccagggcucuccgaaccuagcuagcauccucuucaauuccaacuagaaagcuuaccauggagcugcccauccucaagaccaacgccauuacaacgauccuggcugccgugacccuuugcuucgcgagcucccagaauauuacagaagaguuuuaccaaucuaccuguagcgcugucuccaaaggcuaucugucugcccucagaacagggugguacaccagcguuaucacaauugaacuguccaacaucaaggagaauaaaugcaacggaaccgacgccaaggugaaacuuaucaagcaggaacuggauaaguauaaaaaugcugugacggagcuccagaugcugauguguucuaccccugccgcuggcagcggguccgccauugcgagcggaaucgccgucugcaaggugcugcaccucgagggcgaaguuaacaaaauuaagaaugcucugcuuucuacaaacaaagccguggucucccugagcaauggggugucuguucucaccuucaaggugcuggaccuuaagaacuacaucgauaaacagcugcucccgauucugaauaagcaauccuguagcaucucuaacauugagacagucauggaauuucagcagaaaaauaaccggcugcucgagaucacccgcgaguucuccgugaaugcuggagugacgacacccgucagcaccuauaugcugacaaacuccgaacuucugucucucaucaacgacaugccuauuaccaaugaucagaagaaacugaugagcaacaauguucaaaucgugagacagcaguccuacagcauuaugugcaucauuaaggaggaagugcuugccuaugucgugcagcugccccucuacggcguuaucgacaccccuuguuggaaacugcauacaucuccccugugcacgaccaacacaaaggagggcuccaauaucugucucacccggacagaucgcgggugguacugcgacaacgcgggaagcgugagcuuuuucccucaagccgaaaccuguaaggucugcucuaauagaguguuuugcgauacgaugaacucccugacacuuccgucugagguuaaucuguguaacauugacaucuucaaucccaaauaugauugcaagauuaugaccagcaaaaccgacguguccagcucugucaucacaucccucggcgcuauugugagcuguuacgggaagaccaaaugcacagccucuaacaagaauaagggaaucaucaaaacguuuuccaacggcugugauuaugucagcaauaaggggguggacaccguuuccgugggaaacacacuguacuaugucaacaaacaggagggcaagucucuuuacgugaaaggcgaaccuauuaucaauuucuaugacccccugguuuuuccuagcgaugaguucgacgcuuccauuucucaggugaacgaaaagaucaaucaaagccucgccuuuauucggaaguccgaugagcugcugcacaacgucaauguggggaaaagcaccacaaacaucaugauuaccacgaucaucauugugaucauuguuauccuccugcuucugauugccgucggacucuuccuguacugcaaggcucgcucuacccccgugacacuguccaaagaccagcuuagcggcaucaauaacaucgcguucucuaauugaggacuaguguccaccugucccuccugggcugcuggauugucucguuuuccugccaaauaaacaggaucagcgcuuuacagaucuaaaaaaaaaaaaaaaaaaaaaaaaaaaaaaaaaaaaaaaaaaaaaaaaaaaaaaaaaaaaaaaaugcaucccccccccccccccccccccccccccccccaaaggcucuuuucagagccaccagaauu

SEQ ID NO: 18711 - RNA, 1994 nt, Artificial Sequence
  mRNA product Design i-1 comprising derived and/or modified sequence from HRSV(Memphis-37)__AIY60640.1__F_DSCav1_mut7 (opt6)
gggagagggcgcuuggcuugcaaggacccugagcugcggcauugaagcacacccaacccaacucgacugaagucagccucacugaaccggaucugagaaucuucucucucugggcuugccagggcucuccgaaccuagcuagcauccucuucaauuccaacuagaaagcuuaccauggaacuaccaauacucaaaacaaaugcuauaaccacaauacucgcagcaguaacauuauguuucgcaucaucccaaaacauaacagaagaauuuuaucaaucaaccuguucagcaguauccaaaggauaccuaagugcauuaagaaccggaugguacacaucaguaauaaccauagaacuuucaaacauaaaagaaaacaaauguaacggcacagacgcaaaagucaaacucaucaaacaggaacuugacaaauauaaaaacgcaguaaccgaacuacaaaugcuaaugugcucaacaccagcagcaggaucaggaucagcaauugcaucuggaauagcuguaugcaaaguccuacaccuagaaggagaaguaaacaaaaucaaaaacgcauuacucuccacaaacaaagcaguaguaucacuaucaaacggaguuucaguacuaaccuucaaaguauuagaccuaaaaaacuacauagacaaacaacuacuaccuauacuaaacaaacaauccuguucaauaagcaacauugaaacuguaauggaauuucaacaaaaaaacaaccgccuauuagaaauaaccagagaauuuuccguaaaugcaggaguaaccacaccagucucuacauacauguuaaccaacucagaacuauuaucacucauaaaugacaugccuauaacaaacgaccaaaaaaaacuaaugucaaacaacguacaaauaguaagacaacaaucauauuccauaaugugcauaauaaaagaagaaguacuugcauacgugguucaacuaccccuauauggaguuauagacacaccaugcuggaaacuccacacuuccccacuuugcacaacuaacacaaaagaaggaucaaauauaugccuaaccagaacagaccguggaugguacugcgacaacgcuggaucagucuccuucuuuccacaagcagaaaccugcaaagucugcucaaauagagucuucugugacacaaugaacucacucacccuacccucagaaguaaaccuauguaauauagauauauuuaauccaaaauacgacugcaaaauuaugacaaguaaaacagacguaagcucaucagucauaaccagccuaggagcaauaguauccuguuacggcaaaacaaaaugcacagcuucaaacaaaaacaaaggcauaauaaaaacauucucaaacggaugugacuauguaucaaauaaaggaguugacacaguaucaguuggaaacacacuauacuauguaaacaaacaagaaggaaaaucacuauacguuaaaggcgaacccauaaucaauuucuacgacccccuagucuucccauccgaugaauuugacgcaucaauaucccaaguaaaugaaaaaaucaaccaaucccuagcauuuauacgaaaauccgacgaacuacuccauaaugucaacgucgguaaaucaacgacaaacaucaugaucacaacaauaauaauaguaauaauuguaauauuacucuuacucauagcaguaggccuauuucuauauugcaaagccagaucaacaccaguaaccuuauccaaagaccaacuaucuggaauaaacaacauagcauuuuccaacugaggacuaguguccaccugucccuccugggcugcuggauugucucguuuuccugccaaauaaacaggaucagcgcuuuacagaucuaaaaaaaaaaaaaaaaaaaaaaaaaaaaaaaaaaaaaaaaaaaaaaaaaaaaaaaaaaaaaaaaugcaucccccccccccccccccccccccccccccccaaaggcucuuuucagagccaccagaauu

SEQ ID NO: 18712 - RNA, 1994 nt, Artificial Sequence
  mRNA product Design i-1 comprising derived and/or modified sequence from HRSV(Memphis-37)__AIY60640.1__F_DSCav1_mut7 (opt11)
gggagagggcgcuuggcuugcaaggacccugagcugcggcauugaagcacacccaacccaacucgacugaagucagccucacugaaccggaucugagaaucuucucucucugggcuugccagggcucuccgaaccuagcuagcauccucuucaauuccaacuagaaagcuuaccauggaacuccccauacuuaaaacaaacgccauaacaacuauacucgcagccgucacccucuguuucgcauccucucaaaacaucaccgaagaguucuaucaaucaaccugcuccgccgucucaaaaggcuaccucuccgcccuacgcacaggcugguacaccagcgucauuaccauagaacucucgaacaucaaagaaaacaaaugcaacggcaccgacgcaaaagugaaacucaucaaacaagaacucgacaaauacaaaaacgccgucaccgaacuucagaugcucaugugcuccaccccugccgccggcagcggcuccgccauagccuccggcaucgcagucugcaaaguccuccaccucgaaggagaaguaaacaaaaucaaaaaugcucuccucuccacaaacaaagccgucgucucacucuccaauggagucuccguccucaccuucaaaguccucgaccucaaaaacuacauagacaaacaacuacuccccauccucaacaagcaauccugcucuaucuccaacauagaaaccguuauggaguuccaacagaaaaauaaccgccugcuagaaauaacccgagaguucuccgucaacgcaggcgucacuacccccgucagcacauacaugcuaacaaacuccgaacugcucucccuuaucaacgacaugcccaucacaaacgaucagaaaaagcucaugucuaacaacguacaaaucguucggcaacaauccuacuccaucaugugcaucaucaaagaagaagugcucgccuacguaguccaacucccccucuacggagucaucgacacacccugcuggaaacuccacacaucaccccucugcaccaccaacacaaaagaaggguccaacaucugccucacgcgcaccgaccgaggcugguacugcgacaacgccggcuccguauccuucuucccccaagcagaaaccugcaaggucugcuccaaccgcguauucugcgacaccaugaacucgcucacccuccccucagaagucaaccuauguaacaucgacauauucaaucccaaauacgacugcaagauaaugacuuccaaaaccgacguaagcuccucggucaucaccucccucggcgccaucgucuccugcuacggcaaaaccaaaugcaccgccuccaauaagaauaaaggcauaauaaagacauucagcaacggcugcgauuacgucuccaacaaaggugucgacaccgucucagucggcaacacucuauacuacgugaacaaacaagaaggcaaaagccuauacguuaaaggcgaaccaauaaucaauuucuacgacccucuagucuuucccucugacgaguucgaugccagcauaagccaagucaacgaaaagaucaaccaaucacucgccuucauccguaaauccgacgaacugcuccacaaugucaauguaggcaaaucaacaaccaacaucaugaucaccacuauuaucaucgucaucaucguaauccuacuccuacuaaucgccgucggccuauuccucuacugcaaagcccgcucgacccccgucacucucagcaaggaucaacuauccggcaucaacaacaucgccuucuccaacuaaggacuaguguccaccugucccuccugggcugcuggauugucucguuuuccugccaaauaaacaggaucagcgcuuuacagaucuaaaaaaaaaaaaaaaaaaaaaaaaaaaaaaaaaaaaaaaaaaaaaaaaaaaaaaaaaaaaaaaaugcaucccccccccccccccccccccccccccccccaaaggcucuuuucagagccaccagaauu

SEQ ID NO: 18713 - RNA, 1994 nt, Artificial Sequence
  mRNA product Design i-2 comprising derived and/or modified sequence from HRSV(Memphis-37)__AIY60640.1__F_DSCav1_mut7 (opt1)
gggagaggcgcugccuacggagguggcagccaucuccuucucggcaucaagcuuaccauggagcugcccauccucaagaccaacgccaucaccacgauccuggccgcggugacccugugcuucgccagcucccagaacaucaccgaggaguucuaccagagcacgugcuccgccgucagcaagggcuaccucuccgcccugcgcaccgggugguacaccagcgugaucaccaucgagcuguccaacaucaaggagaacaagugcaacggcaccgacgccaaggugaagcucaucaagcaggagcuggacaaguacaagaacgcggucacggagcugcagaugcugaugugcagcaccccggccgccggcuccgggagcgcgaucgccuccggcaucgccgucugcaaggugcugcaccucgagggcgaggugaacaagaucaagaacgcccugcuguccaccaacaaggccgucgugagccucuccaacggggugagcguccugaccuucaaggugcuggaccucaagaacuacaucgacaagcagcugcugcccauccugaacaagcagagcugcuccaucagcaacaucgagaccgucauggaguuccagcagaagaacaaccgccuccuggagaucacgcgggaguucagcgugaacgcgggcgugaccacccccgucuccaccuacaugcugacgaacagcgagcuccugucccugaucaacgacaugccgaucaccaacgaccagaagaagcucaugagcaacaacgugcagaucgugcgccagcaguccuacagcaucaugugcaucaucaaggaggagguccuggccuacguggugcagcugccccucuacggggucaucgacacccccugcuggaagcugcacaccagcccccugugcacgaccaacaccaaggagggcuccaacaucugccucacccggacggaccgcgggugguacugcgacaacgccggcagcguguccuucuucccgcaggccgagaccugcaaggucugcagcaaccggguguucugcgacaccaugaacucccugacccugcccagcgaggugaaccucugcaacaucgacaucuucaaccccaaguacgacugcaagaucaugacguccaagaccgacgucagcuccagcgugaucaccucccugggcgccaucgugagcugcuacgggaagaccaagugcacggcgagcaacaagaacaagggcaucaucaagaccuucuccaacgggugcgacuacgucagcaacaagggcguggacaccguguccgucggcaacacccuguacuacgugaacaagcaggagggcaagagccucuacgugaagggggagcccaucaucaacuucuacgacccgcuggucuuccccuccgacgaguucgacgccagcaucucccaggugaacgagaagaucaaccagagccuggccuucauccggaaguccgacgagcuccugcacaacgugaacgucggcaagagcaccacgaacaucaugaucaccaccaucaucaucgugaucaucgugauccugcugcuccugaucgccgucgggcuguuccucuacugcaaggcccgcuccacccccgugacgcugagcaaggaccagcuguccgggaucaacaacaucgcguucagcaacugaggacuagugcaucacauuuaaaagcaucucagccuaccaugagaauaagagaaagaaaaugaagaucaauagcuuauucaucucuuuuucuuuuucguugguguaaagccaacacccugucuaaaaaacauaaauuucuuuaaucauuuugccucuuuucucugugcuucaauuaauaaaaaauggaaagaaccuagaucuaaaaaaaaaaaaaaaaaaaaaaaaaaaaaaaaaaaaaaaaaaaaaaaaaaaaaaaaaaaaaaaaugcaucccccccccccccccccccccccccccccccaaaggcucuuuucagagccaccagaauu

SEQ ID NO: 18714 - RNA, 1994 nt, Artificial Sequence
  mRNA product Design i-2 comprising derived and/or modified sequence from HRSV(Memphis-37)__AIY60640.1__F_DSCav1_mut7 (opt1)
gggagaggcgcugccuacggagguggcagccaucuccuucucggcaucaagcuuaccauggagcugcccauccucaagaccaacgccaucaccacgauccuggccgcggugacccugugcuucgccagcucccagaacaucaccgaggaguucuaccagagcacgugcuccgccgucagcaagggcuaccucuccgcccugcgcaccgggugguacaccagcgugaucaccaucgagcuguccaacaucaaggagaacaagugcaacggcaccgacgccaaggugaagcucaucaagcaggagcuggacaaguacaagaacgcggucacggagcugcagaugcucaugugcagcaccccggccgccggguccggcagcgccaucgcguccgggaucgccgugugcaaggugcugcaccuggagggcgaggucaacaagaucaagaacgcccuccugagcaccaacaaggccguggugucccugagcaacggcgucuccgugcucaccuucaaggugcuggaccugaagaacuacaucgacaagcagcuccugcccauccugaacaagcagagcugcuccaucagcaacaucgagacggucauggaguuccagcagaagaacaaccggcuccuggagaucacccgcgaguucuccgugaacgccggggugaccacccccgucagcacguacaugcugaccaacagcgagcuccugucccugaucaacgacaugcccaucaccaacgaccagaagaagcucaugagcaacaacgugcagaucgugcggcagcaguccuacagcaucaugugcaucaucaaggaggagguccuggcguacguggugcagcugccgcucuacggcgucaucgacacccccugcuggaagcugcacacgagcccccugugcaccaccaacaccaaggaggggagcaacaucugccucacgcgcaccgaccggggcugguacugcgacaacgccggguccgugagcuucuucccccaggccgagaccugcaaggugugcuccaaccgcgucuucugcgacaccaugaacagccugacgcugccguccgaggugaaccucugcaacaucgacaucuucaaccccaaguacgacugcaagaucaugaccagcaagaccgacgucuccagcuccgugaucaccagccugggcgccaucguguccugcuacggcaagacgaagugcaccgccagcaacaagaacaaggggaucaucaagaccuucuccaacggcugcgacuacgucagcaacaaggggguggacaccgugagcgucggcaacacgcuguacuacgugaacaagcaggagggcaagucccucuacgugaagggggagcccaucaucaacuucuacgacccccuggucuucccgagcgacgaguucgacgcguccaucagccaggugaacgagaagaucaaccagucccuggccuucauccggaaguccgacgagcuccugcacaacgugaacgucggcaaguccaccaccaacaucaugaucaccaccaucaucaucgugaucaucgugauccugcuccugcugaucgccgucggccucuuccuguacugcaaggcccgcagcacgcccgugacccuguccaaggaccagcugagcgggaucaacaacaucgccuucuccaacugaggacuagugcaucacauuuaaaagcaucucagccuaccaugagaauaagagaaagaaaaugaagaucaauagcuuauucaucucuuuuucuuuuucguugguguaaagccaacacccugucuaaaaaacauaaauuucuuuaaucauuuugccucuuuucucugugcuucaauuaauaaaaaauggaaagaaccuagaucuaaaaaaaaaaaaaaaaaaaaaaaaaaaaaaaaaaaaaaaaaaaaaaaaaaaaaaaaaaaaaaaaugcaucccccccccccccccccccccccccccccccaaaggcucuuuucagagccaccagaauu

SEQ ID NO: 18715 - RNA, 1994 nt, Artificial Sequence
  mRNA product Design i-2 comprising derived and/or modified sequence from HRSV(Memphis-37)__AIY60640.1__F_DSCav1_mut7 (opt2)
gggagaggcgcugccuacggagguggcagccaucuccuucucggcaucaagcuuaccauggagcuccccauccucaagaccaacgccaucaccaccauccucgccgccgucacccucugcuucgccuccucccagaacaucaccgaggaguucuaccaguccaccugcuccgccgucuccaagggcuaccucuccgcccuccgcaccggcugguacaccuccgucaucaccaucgagcucuccaacaucaaggagaacaagugcaacggcaccgacgccaaggucaagcucaucaagcaggagcucgacaaguacaagaacgccgucaccgagcuccagaugcucaugugcuccacccccgccgccggcuccggcuccgccaucgccuccggcaucgccgucugcaagguccuccaccucgagggcgaggucaacaagaucaagaacgcccuccucuccaccaacaaggccgucgucucccucuccaacggcgucuccguccucaccuucaagguccucgaccucaagaacuacaucgacaagcagcuccuccccauccucaacaagcaguccugcuccaucuccaacaucgagaccgucauggaguuccagcagaagaacaaccgccuccucgagaucacccgcgaguucuccgucaacgccggcgucaccacccccgucuccaccuacaugcucaccaacuccgagcuccucucccucaucaacgacaugcccaucaccaacgaccagaagaagcucauguccaacaacguccagaucguccgccagcaguccuacuccaucaugugcaucaucaaggaggagguccucgccuacgucguccagcucccccucuacggcgucaucgacacccccugcuggaagcuccacaccuccccccucugcaccaccaacaccaaggagggcuccaacaucugccucacccgcaccgaccgcggcugguacugcgacaacgccggcuccgucuccuucuucccccaggccgagaccugcaaggucugcuccaaccgcgucuucugcgacaccaugaacucccucacccuccccuccgaggucaaccucugcaacaucgacaucuucaaccccaaguacgacugcaagaucaugaccuccaagaccgacgucuccuccuccgucaucaccucccucggcgccaucgucuccugcuacggcaagaccaagugcaccgccuccaacaagaacaagggcaucaucaagaccuucuccaacggcugcgacuacgucuccaacaagggcgucgacaccgucuccgucggcaacacccucuacuacgucaacaagcaggagggcaagucccucuacgucaagggcgagcccaucaucaacuucuacgacccccucgucuuccccuccgacgaguucgacgccuccaucucccaggucaacgagaagaucaaccagucccucgccuucauccgcaaguccgacgagcuccuccacaacgucaacgucggcaaguccaccaccaacaucaugaucaccaccaucaucaucgucaucaucgucauccuccuccuccucaucgccgucggccucuuccucuacugcaaggcccgcuccacccccgucacccucuccaaggaccagcucuccggcaucaacaacaucgccuucuccaacugaggacuagugcaucacauuuaaaagcaucucagccuaccaugagaauaagagaaagaaaaugaagaucaauagcuuauucaucucuuuuucuuuuucguugguguaaagccaacacccugucuaaaaaacauaaauuucuuuaaucauuuugccucuuuucucugugcuucaauuaauaaaaaauggaaagaaccuagaucuaaaaaaaaaaaaaaaaaaaaaaaaaaaaaaaaaaaaaaaaaaaaaaaaaaaaaaaaaaaaaaaaugcaucccccccccccccccccccccccccccccccaaaggcucuuuucagagccaccagaauu

SEQ ID NO: 18716 - RNA, 1994 nt, Artificial Sequence
  mRNA product Design i-2 comprising derived and/or modified sequence from HRSV(Memphis-37)__AIY60640.1__F_DSCav1_mut7 (opt3)
gggagaggcgcugccuacggagguggcagccaucuccuucucggcaucaagcuuaccauggagcugcccauccucaagaccaacgccauuacaacuauacuugcugcagugacgcugugcuucgccagcucccagaauaucaccgaagaguuuuaccaaucuacauguucagcggucaguaaaggcuauuugagcgcuuuaagaacugggugguacaccuccguuauuacaaucgaacugucuaacauuaaggagaauaaaugcaacggaaccgacgccaaggugaaacuaaucaagcaggaacucgauaaguauaaaaaugcaguaacugagcugcagaugcuuauguguucgaccccugccgcugguucaggcagcgcaauagccagugggaucgcugugugcaagguccugcacuuggagggagaagugaacaaaauuaagaaugcccuccuguccacaaacaaagcgguugugucucugagcaauggcgucuccgugcucacguucaagguauuagaccugaagaacuacaucgauaaacagcuuuugccaauucugaauaagcaaucauguaguaucagcaacauagagacuguuauggaauuucagcagaaaaauaacaggcuacucgagauuacccgggaguucucugugaaugccggugucacaacuccgguguccaccuauaugcugacaaacucagaacuucugagcuugaucaacgacaugcccauuaccaaugaucagaagaaacucaugaguaacaaugugcaaaucguccgccagcagucuuacuccaucaugugcauuauaaaggaggaaguucuggcauaugugguacaguuaccucuguacggggugaucgacacgccauguuggaaacuccauacuagcccccuuugcacaaccaacacuaaggagggaucgaauauuugucugacacgaaccgaucguggcugguacugcgacaacgcuggcucugucuccuuuuucccucaagccgaaacguguaaggugugcucaaauagaguguuuugcgauaccaugaacaguuugacacuaccaagcgagguuaaucuguguaacaucgacauauucaaucccaaauaugauugcaagauuaugacuuccaaaaccgacgucucuagcucagugaucacaagucucggggcaaucguauccuguuacggaaagacuaaaugcaccgcuagcaacaagaauaaggguauuaucaaaacauuuucuaacggcugugauuauguuucaaauaaggggguggacaccgucagugugggaaacacucuguacuaugucaacaaacaggagggcaagagccuuuacgugaaaggugaaccuauuauaaauuucuaugacccacugguuuuuccguccgaugaguucgacgccucuaucagccaggugaacgaaaagauuaaucaaucguuggcguuuaucaggaaguccgaugagcuccugcacaacguaaaugucgggaaaucaacgacaaacaucaugauuaccacuauaaucauugugaucauuguuaucuuacugcuacucauagccgugggacuguuccuuuacugcaaggcacggaguacccccgucacauugucuaaagaccagcugagcggcaucaauaacauugcuuucuccaauugaggacuagugcaucacauuuaaaagcaucucagccuaccaugagaauaagagaaagaaaaugaagaucaauagcuuauucaucucuuuuucuuuuucguugguguaaagccaacacccugucuaaaaaacauaaauuucuuuaaucauuuugccucuuuucucugugcuucaauuaauaaaaaauggaaagaaccuagaucuaaaaaaaaaaaaaaaaaaaaaaaaaaaaaaaaaaaaaaaaaaaaaaaaaaaaaaaaaaaaaaaaugcaucccccccccccccccccccccccccccccccaaaggcucuuuucagagccaccagaauu

SEQ ID NO: 18717 - RNA, 1994 nt, Artificial Sequence
  mRNA product Design i-2 comprising derived and/or modified sequence from HRSV(Memphis-37)__AIY60640.1__F_DSCav1_mut7 (opt4)
gggagaggcgcugccuacggagguggcagccaucuccuucucggcaucaagcuuaccauggagcugcccauccugaagaccaacgccaucaccaccauccuggccgccgugacccugugcuucgccagcagccagaacaucaccgaggaguucuaccagagcaccugcagcgccgugagcaagggcuaccugagcgcccugagaaccggcugguacaccagcgugaucaccaucgagcugagcaacaucaaggagaacaagugcaacggcaccgacgccaaggugaagcugaucaagcaggagcuggacaaguacaagaacgccgugaccgagcugcagaugcugaugugcagcacccccgccgccggcagcggcagcgccaucgccagcggcaucgccgugugcaaggugcugcaccuggagggcgaggugaacaagaucaagaacgcccugcugagcaccaacaaggccguggugagccugagcaacggcgugagcgugcugaccuucaaggugcuggaccugaagaacuacaucgacaagcagcugcugcccauccugaacaagcagagcugcagcaucagcaacaucgagaccgugauggaguuccagcagaagaacaacagacugcuggagaucaccagagaguucagcgugaacgccggcgugaccacccccgugagcaccuacaugcugaccaacagcgagcugcugagccugaucaacgacaugcccaucaccaacgaccagaagaagcugaugagcaacaacgugcagaucgugagacagcagagcuacagcaucaugugcaucaucaaggaggaggugcuggccuacguggugcagcugccccuguacggcgugaucgacacccccugcuggaagcugcacaccagcccccugugcaccaccaacaccaaggagggcagcaacaucugccugaccagaaccgacagaggcugguacugcgacaacgccggcagcgugagcuucuucccccaggccgagaccugcaaggugugcagcaacagaguguucugcgacaccaugaacagccugacccugcccagcgaggugaaccugugcaacaucgacaucuucaaccccaaguacgacugcaagaucaugaccagcaagaccgacgugagcagcagcgugaucaccagccugggcgccaucgugagcugcuacggcaagaccaagugcaccgccagcaacaagaacaagggcaucaucaagaccuucagcaacggcugcgacuacgugagcaacaagggcguggacaccgugagcgugggcaacacccuguacuacgugaacaagcaggagggcaagagccuguacgugaagggcgagcccaucaucaacuucuacgacccccugguguuccccagcgacgaguucgacgccagcaucagccaggugaacgagaagaucaaccagagccuggccuucaucagaaagagcgacgagcugcugcacaacgugaacgugggcaagagcaccaccaacaucaugaucaccaccaucaucaucgugaucaucgugauccugcugcugcugaucgccgugggccuguuccuguacugcaaggccagaagcacccccgugacccugagcaaggaccagcugagcggcaucaacaacaucgccuucagcaacugaggacuagugcaucacauuuaaaagcaucucagccuaccaugagaauaagagaaagaaaaugaagaucaauagcuuauucaucucuuuuucuuuuucguugguguaaagccaacacccugucuaaaaaacauaaauuucuuuaaucauuuugccucuuuucucugugcuucaauuaauaaaaaauggaaagaaccuagaucuaaaaaaaaaaaaaaaaaaaaaaaaaaaaaaaaaaaaaaaaaaaaaaaaaaaaaaaaaaaaaaaaugcaucccccccccccccccccccccccccccccccaaaggcucuuuucagagccaccagaauu

SEQ ID NO: 18718 - RNA, 1994 nt, Artificial Sequence
  mRNA product Design i-2 comprising derived and/or modified sequence from HRSV(Memphis-37)__AIY60640.1__F_DSCav1_mut7 (opt5)
gggagaggcgcugccuacggagguggcagccaucuccuucucggcaucaagcuuaccauggagcugcccauccucaagaccaacgccauuacaacgauccuggcugccgugacccuuugcuucgcgagcucccagaauauuacagaagaguuuuaccaaucuaccuguagcgcugucuccaaaggcuaucugucugcccucagaacagggugguacaccagcguuaucacaauugaacuguccaacaucaaggagaauaaaugcaacggaaccgacgccaaggugaaacuuaucaagcaggaacuggauaaguauaaaaaugcugugacggagcuccagaugcugauguguucuaccccugccgcuggcagcggguccgccauugcgagcggaaucgccgucugcaaggugcugcaccucgagggcgaaguuaacaaaauuaagaaugcucugcuuucuacaaacaaagccguggucucccugagcaauggggugucuguucucaccuucaaggugcuggaccuuaagaacuacaucgauaaacagcugcucccgauucugaauaagcaauccuguagcaucucuaacauugagacagucauggaauuucagcagaaaaauaaccggcugcucgagaucacccgcgaguucuccgugaaugcuggagugacgacacccgucagcaccuauaugcugacaaacuccgaacuucugucucucaucaacgacaugccuauuaccaaugaucagaagaaacugaugagcaacaauguucaaaucgugagacagcaguccuacagcauuaugugcaucauuaaggaggaagugcuugccuaugucgugcagcugccccucuacggcguuaucgacaccccuuguuggaaacugcauacaucuccccugugcacgaccaacacaaaggagggcuccaauaucugucucacccggacagaucgcgggugguacugcgacaacgcgggaagcgugagcuuuuucccucaagccgaaaccuguaaggucugcucuaauagaguguuuugcgauacgaugaacucccugacacuuccgucugagguuaaucuguguaacauugacaucuucaaucccaaauaugauugcaagauuaugaccagcaaaaccgacguguccagcucugucaucacaucccucggcgcuauugugagcuguuacgggaagaccaaaugcacagccucuaacaagaauaagggaaucaucaaaacguuuuccaacggcugugauuaugucagcaauaaggggguggacaccguuuccgugggaaacacacuguacuaugucaacaaacaggagggcaagucucuuuacgugaaaggcgaaccuauuaucaauuucuaugacccccugguuuuuccuagcgaugaguucgacgcuuccauuucucaggugaacgaaaagaucaaucaaagccucgccuuuauucggaaguccgaugagcugcugcacaacgucaauguggggaaaagcaccacaaacaucaugauuaccacgaucaucauugugaucauuguuauccuccugcuucugauugccgucggacucuuccuguacugcaaggcucgcucuacccccgugacacuguccaaagaccagcuuagcggcaucaauaacaucgcguucucuaauugaggacuagugcaucacauuuaaaagcaucucagccuaccaugagaauaagagaaagaaaaugaagaucaauagcuuauucaucucuuuuucuuuuucguugguguaaagccaacacccugucuaaaaaacauaaauuucuuuaaucauuuugccucuuuucucugugcuucaauuaauaaaaaauggaaagaaccuagaucuaaaaaaaaaaaaaaaaaaaaaaaaaaaaaaaaaaaaaaaaaaaaaaaaaaaaaaaaaaaaaaaaugcaucccccccccccccccccccccccccccccccaaaggcucuuuucagagccaccagaauu

SEQ ID NO: 18719 - RNA, 1994 nt, Artificial Sequence
  mRNA product Design i-2 comprising derived and/or modified sequence from HRSV(Memphis-37)__AIY60640.1__F_DSCav1_mut7 (opt6)
gggagaggcgcugccuacggagguggcagccaucuccuucucggcaucaagcuuaccauggaacuaccaauacucaaaacaaaugcuauaaccacaauacucgcagcaguaacauuauguuucgcaucaucccaaaacauaacagaagaauuuuaucaaucaaccuguucagcaguauccaaaggauaccuaagugcauuaagaaccggaugguacacaucaguaauaaccauagaacuuucaaacauaaaagaaaacaaauguaacggcacagacgcaaaagucaaacucaucaaacaggaacuugacaaauauaaaaacgcaguaaccgaacuacaaaugcuaaugugcucaacaccagcagcaggaucaggaucagcaauugcaucuggaauagcuguaugcaaaguccuacaccuagaaggagaaguaaacaaaaucaaaaacgcauuacucuccacaaacaaagcaguaguaucacuaucaaacggaguuucaguacuaaccuucaaaguauuagaccuaaaaaacuacauagacaaacaacuacuaccuauacuaaacaaacaauccuguucaauaagcaacauugaaacuguaauggaauuucaacaaaaaaacaaccgccuauuagaaauaaccagagaauuuuccguaaaugcaggaguaaccacaccagucucuacauacauguuaaccaacucagaacuauuaucacucauaaaugacaugccuauaacaaacgaccaaaaaaaacuaaugucaaacaacguacaaauaguaagacaacaaucauauuccauaaugugcauaauaaaagaagaaguacuugcauacgugguucaacuaccccuauauggaguuauagacacaccaugcuggaaacuccacacuuccccacuuugcacaacuaacacaaaagaaggaucaaauauaugccuaaccagaacagaccguggaugguacugcgacaacgcuggaucagucuccuucuuuccacaagcagaaaccugcaaagucugcucaaauagagucuucugugacacaaugaacucacucacccuacccucagaaguaaaccuauguaauauagauauauuuaauccaaaauacgacugcaaaauuaugacaaguaaaacagacguaagcucaucagucauaaccagccuaggagcaauaguauccuguuacggcaaaacaaaaugcacagcuucaaacaaaaacaaaggcauaauaaaaacauucucaaacggaugugacuauguaucaaauaaaggaguugacacaguaucaguuggaaacacacuauacuauguaaacaaacaagaaggaaaaucacuauacguuaaaggcgaacccauaaucaauuucuacgacccccuagucuucccauccgaugaauuugacgcaucaauaucccaaguaaaugaaaaaaucaaccaaucccuagcauuuauacgaaaauccgacgaacuacuccauaaugucaacgucgguaaaucaacgacaaacaucaugaucacaacaauaauaauaguaauaauuguaauauuacucuuacucauagcaguaggccuauuucuauauugcaaagccagaucaacaccaguaaccuuauccaaagaccaacuaucuggaauaaacaacauagcauuuuccaacugaggacuagugcaucacauuuaaaagcaucucagccuaccaugagaauaagagaaagaaaaugaagaucaauagcuuauucaucucuuuuucuuuuucguugguguaaagccaacacccugucuaaaaaacauaaauuucuuuaaucauuuugccucuuuucucugugcuucaauuaauaaaaaauggaaagaaccuagaucuaaaaaaaaaaaaaaaaaaaaaaaaaaaaaaaaaaaaaaaaaaaaaaaaaaaaaaaaaaaaaaaaugcaucccccccccccccccccccccccccccccccaaaggcucuuuucagagccaccagaauu

SEQ ID NO: 18720 - RNA, 1994 nt, Artificial Sequence
  mRNA product Design i-2 comprising derived and/or modified sequence from HRSV(Memphis-37)__AIY60640.1__F_DSCav1_mut7 (opt11)
gggagaggcgcugccuacggagguggcagccaucuccuucucggcaucaagcuuaccauggaacuccccauacuuaaaacaaacgccauaacaacuauacucgcagccgucacccucuguuucgcauccucucaaaacaucaccgaagaguucuaucaaucaaccugcuccgccgucucaaaaggcuaccucuccgcccuacgcacaggcugguacaccagcgucauuaccauagaacucucgaacaucaaagaaaacaaaugcaacggcaccgacgcaaaagugaaacucaucaaacaagaacucgacaaauacaaaaacgccgucaccgaacuucagaugcucaugugcuccaccccugccgccggcagcggcuccgccauagccuccggcaucgcagucugcaaaguccuccaccucgaaggagaaguaaacaaaaucaaaaaugcucuccucuccacaaacaaagccgucgucucacucuccaauggagucuccguccucaccuucaaaguccucgaccucaaaaacuacauagacaaacaacuacuccccauccucaacaagcaauccugcucuaucuccaacauagaaaccguuauggaguuccaacagaaaaauaaccgccugcuagaaauaacccgagaguucuccgucaacgcaggcgucacuacccccgucagcacauacaugcuaacaaacuccgaacugcucucccuuaucaacgacaugcccaucacaaacgaucagaaaaagcucaugucuaacaacguacaaaucguucggcaacaauccuacuccaucaugugcaucaucaaagaagaagugcucgccuacguaguccaacucccccucuacggagucaucgacacacccugcuggaaacuccacacaucaccccucugcaccaccaacacaaaagaaggguccaacaucugccucacgcgcaccgaccgaggcugguacugcgacaacgccggcuccguauccuucuucccccaagcagaaaccugcaaggucugcuccaaccgcguauucugcgacaccaugaacucgcucacccuccccucagaagucaaccuauguaacaucgacauauucaaucccaaauacgacugcaagauaaugacuuccaaaaccgacguaagcuccucggucaucaccucccucggcgccaucgucuccugcuacggcaaaaccaaaugcaccgccuccaauaagaauaaaggcauaauaaagacauucagcaacggcugcgauuacgucuccaacaaaggugucgacaccgucucagucggcaacacucuauacuacgugaacaaacaagaaggcaaaagccuauacguuaaaggcgaaccaauaaucaauuucuacgacccucuagucuuucccucugacgaguucgaugccagcauaagccaagucaacgaaaagaucaaccaaucacucgccuucauccguaaauccgacgaacugcuccacaaugucaauguaggcaaaucaacaaccaacaucaugaucaccacuauuaucaucgucaucaucguaauccuacuccuacuaaucgccgucggccuauuccucuacugcaaagcccgcucgacccccgucacucucagcaaggaucaacuauccggcaucaacaacaucgccuucuccaacuaaggacuagugcaucacauuuaaaagcaucucagccuaccaugagaauaagagaaagaaaaugaagaucaauagcuuauucaucucuuuuucuuuuucguugguguaaagccaacacccugucuaaaaaacauaaauuucuuuaaucauuuugccucuuuucucugugcuucaauuaauaaaaaauggaaagaaccuagaucuaaaaaaaaaaaaaaaaaaaaaaaaaaaaaaaaaaaaaaaaaaaaaaaaaaaaaaaaaaaaaaaaugcaucccccccccccccccccccccccccccccccaaaggcucuuuucagagccaccagaauu

SEQ ID NO: 18721 - RNA, 1990 nt, Artificial Sequence
  mRNA product Design i-2 comprising derived and/or modified sequence from HRSV(Memphis-37)__AIY60640.1__F_DSCav1_mut7 (opt1)
ggggcgcugccuacggagguggcagccaucuccuucucggcaucaagcuuaccauggagcugcccauccucaagaccaacgccaucaccacgauccuggccgcggugacccugugcuucgccagcucccagaacaucaccgaggaguucuaccagagcacgugcuccgccgucagcaagggcuaccucuccgcccugcgcaccgggugguacaccagcgugaucaccaucgagcuguccaacaucaaggagaacaagugcaacggcaccgacgccaaggugaagcucaucaagcaggagcuggacaaguacaagaacgcggucacggagcugcagaugcugaugugcagcaccccggccgccggcuccgggagcgcgaucgccuccggcaucgccgucugcaaggugcugcaccucgagggcgaggugaacaagaucaagaacgcccugcuguccaccaacaaggccgucgugagccucuccaacggggugagcguccugaccuucaaggugcuggaccucaagaacuacaucgacaagcagcugcugcccauccugaacaagcagagcugcuccaucagcaacaucgagaccgucauggaguuccagcagaagaacaaccgccuccuggagaucacgcgggaguucagcgugaacgcgggcgugaccacccccgucuccaccuacaugcugacgaacagcgagcuccugucccugaucaacgacaugccgaucaccaacgaccagaagaagcucaugagcaacaacgugcagaucgugcgccagcaguccuacagcaucaugugcaucaucaaggaggagguccuggccuacguggugcagcugccccucuacggggucaucgacacccccugcuggaagcugcacaccagcccccugugcacgaccaacaccaaggagggcuccaacaucugccucacccggacggaccgcgggugguacugcgacaacgccggcagcguguccuucuucccgcaggccgagaccugcaaggucugcagcaaccggguguucugcgacaccaugaacucccugacccugcccagcgaggugaaccucugcaacaucgacaucuucaaccccaaguacgacugcaagaucaugacguccaagaccgacgucagcuccagcgugaucaccucccugggcgccaucgugagcugcuacgggaagaccaagugcacggcgagcaacaagaacaagggcaucaucaagaccuucuccaacgggugcgacuacgucagcaacaagggcguggacaccguguccgucggcaacacccuguacuacgugaacaagcaggagggcaagagccucuacgugaagggggagcccaucaucaacuucuacgacccgcuggucuuccccuccgacgaguucgacgccagcaucucccaggugaacgagaagaucaaccagagccuggccuucauccggaaguccgacgagcuccugcacaacgugaacgucggcaagagcaccacgaacaucaugaucaccaccaucaucaucgugaucaucgugauccugcugcuccugaucgccgucgggcuguuccucuacugcaaggcccgcuccacccccgugacgcugagcaaggaccagcuguccgggaucaacaacaucgcguucagcaacugaggacuagugcaucacauuuaaaagcaucucagccuaccaugagaauaagagaaagaaaaugaagaucaauagcuuauucaucucuuuuucuuuuucguugguguaaagccaacacccugucuaaaaaacauaaauuucuuuaaucauuuugccucuuuucucugugcuucaauuaauaaaaaauggaaagaaccuagaucuaaaaaaaaaaaaaaaaaaaaaaaaaaaaaaaaaaaaaaaaaaaaaaaaaaaaaaaaaaaaaaaaugcaucccccccccccccccccccccccccccccccaaaggcucuuuucagagccaccagaauu

SEQ ID NO: 18722 - RNA, 1990 nt, Artificial Sequence
  mRNA product Design i-2 comprising derived and/or modified sequence from HRSV(Memphis-37)__AIY60640.1__F_DSCav1_mut7 (opt1)
ggggcgcugccuacggagguggcagccaucuccuucucggcaucaagcuuaccauggagcugcccauccucaagaccaacgccaucaccacgauccuggccgcggugacccugugcuucgccagcucccagaacaucaccgaggaguucuaccagagcacgugcuccgccgucagcaagggcuaccucuccgcccugcgcaccgggugguacaccagcgugaucaccaucgagcuguccaacaucaaggagaacaagugcaacggcaccgacgccaaggugaagcucaucaagcaggagcuggacaaguacaagaacgcggucacggagcugcagaugcucaugugcagcaccccggccgccggguccggcagcgccaucgcguccgggaucgccgugugcaaggugcugcaccuggagggcgaggucaacaagaucaagaacgcccuccugagcaccaacaaggccguggugucccugagcaacggcgucuccgugcucaccuucaaggugcuggaccugaagaacuacaucgacaagcagcuccugcccauccugaacaagcagagcugcuccaucagcaacaucgagacggucauggaguuccagcagaagaacaaccggcuccuggagaucacccgcgaguucuccgugaacgccggggugaccacccccgucagcacguacaugcugaccaacagcgagcuccugucccugaucaacgacaugcccaucaccaacgaccagaagaagcucaugagcaacaacgugcagaucgugcggcagcaguccuacagcaucaugugcaucaucaaggaggagguccuggcguacguggugcagcugccgcucuacggcgucaucgacacccccugcuggaagcugcacacgagcccccugugcaccaccaacaccaaggaggggagcaacaucugccucacgcgcaccgaccggggcugguacugcgacaacgccggguccgugagcuucuucccccaggccgagaccugcaaggugugcuccaaccgcgucuucugcgacaccaugaacagccugacgcugccguccgaggugaaccucugcaacaucgacaucuucaaccccaaguacgacugcaagaucaugaccagcaagaccgacgucuccagcuccgugaucaccagccugggcgccaucguguccugcuacggcaagacgaagugcaccgccagcaacaagaacaaggggaucaucaagaccuucuccaacggcugcgacuacgucagcaacaaggggguggacaccgugagcgucggcaacacgcuguacuacgugaacaagcaggagggcaagucccucuacgugaagggggagcccaucaucaacuucuacgacccccuggucuucccgagcgacgaguucgacgcguccaucagccaggugaacgagaagaucaaccagucccuggccuucauccggaaguccgacgagcuccugcacaacgugaacgucggcaaguccaccaccaacaucaugaucaccaccaucaucaucgugaucaucgugauccugcuccugcugaucgccgucggccucuuccuguacugcaaggcccgcagcacgcccgugacccuguccaaggaccagcugagcgggaucaacaacaucgccuucuccaacugaggacuagugcaucacauuuaaaagcaucucagccuaccaugagaauaagagaaagaaaaugaagaucaauagcuuauucaucucuuuuucuuuuucguugguguaaagccaacacccugucuaaaaaacauaaauuucuuuaaucauuuugccucuuuucucugugcuucaauuaauaaaaaauggaaagaaccuagaucuaaaaaaaaaaaaaaaaaaaaaaaaaaaaaaaaaaaaaaaaaaaaaaaaaaaaaaaaaaaaaaaaugcaucccccccccccccccccccccccccccccccaaaggcucuuuucagagccaccagaauu

SEQ ID NO: 18723 - RNA, 1990 nt, Artificial Sequence
  mRNA product Design i-2 comprising derived and/or modified sequence from HRSV(Memphis-37)__AIY60640.1__F_DSCav1_mut7 (opt2)
ggggcgcugccuacggagguggcagccaucuccuucucggcaucaagcuuaccauggagcuccccauccucaagaccaacgccaucaccaccauccucgccgccgucacccucugcuucgccuccucccagaacaucaccgaggaguucuaccaguccaccugcuccgccgucuccaagggcuaccucuccgcccuccgcaccggcugguacaccuccgucaucaccaucgagcucuccaacaucaaggagaacaagugcaacggcaccgacgccaaggucaagcucaucaagcaggagcucgacaaguacaagaacgccgucaccgagcuccagaugcucaugugcuccacccccgccgccggcuccggcuccgccaucgccuccggcaucgccgucugcaagguccuccaccucgagggcgaggucaacaagaucaagaacgcccuccucuccaccaacaaggccgucgucucccucuccaacggcgucuccguccucaccuucaagguccucgaccucaagaacuacaucgacaagcagcuccuccccauccucaacaagcaguccugcuccaucuccaacaucgagaccgucauggaguuccagcagaagaacaaccgccuccucgagaucacccgcgaguucuccgucaacgccggcgucaccacccccgucuccaccuacaugcucaccaacuccgagcuccucucccucaucaacgacaugcccaucaccaacgaccagaagaagcucauguccaacaacguccagaucguccgccagcaguccuacuccaucaugugcaucaucaaggaggagguccucgccuacgucguccagcucccccucuacggcgucaucgacacccccugcuggaagcuccacaccuccccccucugcaccaccaacaccaaggagggcuccaacaucugccucacccgcaccgaccgcggcugguacugcgacaacgccggcuccgucuccuucuucccccaggccgagaccugcaaggucugcuccaaccgcgucuucugcgacaccaugaacucccucacccuccccuccgaggucaaccucugcaacaucgacaucuucaaccccaaguacgacugcaagaucaugaccuccaagaccgacgucuccuccuccgucaucaccucccucggcgccaucgucuccugcuacggcaagaccaagugcaccgccuccaacaagaacaagggcaucaucaagaccuucuccaacggcugcgacuacgucuccaacaagggcgucgacaccgucuccgucggcaacacccucuacuacgucaacaagcaggagggcaagucccucuacgucaagggcgagcccaucaucaacuucuacgacccccucgucuuccccuccgacgaguucgacgccuccaucucccaggucaacgagaagaucaaccagucccucgccuucauccgcaaguccgacgagcuccuccacaacgucaacgucggcaaguccaccaccaacaucaugaucaccaccaucaucaucgucaucaucgucauccuccuccuccucaucgccgucggccucuuccucuacugcaaggcccgcuccacccccgucacccucuccaaggaccagcucuccggcaucaacaacaucgccuucuccaacugaggacuagugcaucacauuuaaaagcaucucagccuaccaugagaauaagagaaagaaaaugaagaucaauagcuuauucaucucuuuuucuuuuucguugguguaaagccaacacccugucuaaaaaacauaaauuucuuuaaucauuuugccucuuuucucugugcuucaauuaauaaaaaauggaaagaaccuagaucuaaaaaaaaaaaaaaaaaaaaaaaaaaaaaaaaaaaaaaaaaaaaaaaaaaaaaaaaaaaaaaaaugcaucccccccccccccccccccccccccccccccaaaggcucuuuucagagccaccagaauu

SEQ ID NO: 18724 - RNA, 1990 nt, Artificial Sequence
  mRNA product Design i-2 comprising derived and/or modified sequence from HRSV(Memphis-37)__AIY60640.1__F_DSCav1_mut7 (opt3)
ggggcgcugccuacggagguggcagccaucuccuucucggcaucaagcuuaccauggagcugcccauccucaagaccaacgccauuacaacuauacuugcugcagugacgcugugcuucgccagcucccagaauaucaccgaagaguuuuaccaaucuacauguucagcggucaguaaaggcuauuugagcgcuuuaagaacugggugguacaccuccguuauuacaaucgaacugucuaacauuaaggagaauaaaugcaacggaaccgacgccaaggugaaacuaaucaagcaggaacucgauaaguauaaaaaugcaguaacugagcugcagaugcuuauguguucgaccccugccgcugguucaggcagcgcaauagccagugggaucgcugugugcaagguccugcacuuggagggagaagugaacaaaauuaagaaugcccuccuguccacaaacaaagcgguugugucucugagcaauggcgucuccgugcucacguucaagguauuagaccugaagaacuacaucgauaaacagcuuuugccaauucugaauaagcaaucauguaguaucagcaacauagagacuguuauggaauuucagcagaaaaauaacaggcuacucgagauuacccgggaguucucugugaaugccggugucacaacuccgguguccaccuauaugcugacaaacucagaacuucugagcuugaucaacgacaugcccauuaccaaugaucagaagaaacucaugaguaacaaugugcaaaucguccgccagcagucuuacuccaucaugugcauuauaaaggaggaaguucuggcauaugugguacaguuaccucuguacggggugaucgacacgccauguuggaaacuccauacuagcccccuuugcacaaccaacacuaaggagggaucgaauauuugucugacacgaaccgaucguggcugguacugcgacaacgcuggcucugucuccuuuuucccucaagccgaaacguguaaggugugcucaaauagaguguuuugcgauaccaugaacaguuugacacuaccaagcgagguuaaucuguguaacaucgacauauucaaucccaaauaugauugcaagauuaugacuuccaaaaccgacgucucuagcucagugaucacaagucucggggcaaucguauccuguuacggaaagacuaaaugcaccgcuagcaacaagaauaaggguauuaucaaaacauuuucuaacggcugugauuauguuucaaauaaggggguggacaccgucagugugggaaacacucuguacuaugucaacaaacaggagggcaagagccuuuacgugaaaggugaaccuauuauaaauuucuaugacccacugguuuuuccguccgaugaguucgacgccucuaucagccaggugaacgaaaagauuaaucaaucguuggcguuuaucaggaaguccgaugagcuccugcacaacguaaaugucgggaaaucaacgacaaacaucaugauuaccacuauaaucauugugaucauuguuaucuuacugcuacucauagccgugggacuguuccuuuacugcaaggcacggaguacccccgucacauugucuaaagaccagcugagcggcaucaauaacauugcuuucuccaauugaggacuagugcaucacauuuaaaagcaucucagccuaccaugagaauaagagaaagaaaaugaagaucaauagcuuauucaucucuuuuucuuuuucguugguguaaagccaacacccugucuaaaaaacauaaauuucuuuaaucauuuugccucuuuucucugugcuucaauuaauaaaaaauggaaagaaccuagaucuaaaaaaaaaaaaaaaaaaaaaaaaaaaaaaaaaaaaaaaaaaaaaaaaaaaaaaaaaaaaaaaaugcaucccccccccccccccccccccccccccccccaaaggcucuuuucagagccaccagaauu

SEQ ID NO: 18725 - RNA, 1990 nt, Artificial Sequence
  mRNA product Design i-2 comprising derived and/or modified sequence from HRSV(Memphis-37)__AIY60640.1__F_DSCav1_mut7 (opt4)
ggggcgcugccuacggagguggcagccaucuccuucucggcaucaagcuuaccauggagcugcccauccugaagaccaacgccaucaccaccauccuggccgccgugacccugugcuucgccagcagccagaacaucaccgaggaguucuaccagagcaccugcagcgccgugagcaagggcuaccugagcgcccugagaaccggcugguacaccagcgugaucaccaucgagcugagcaacaucaaggagaacaagugcaacggcaccgacgccaaggugaagcugaucaagcaggagcuggacaaguacaagaacgccgugaccgagcugcagaugcugaugugcagcacccccgccgccggcagcggcagcgccaucgccagcggcaucgccgugugcaaggugcugcaccuggagggcgaggugaacaagaucaagaacgcccugcugagcaccaacaaggccguggugagccugagcaacggcgugagcgugcugaccuucaaggugcuggaccugaagaacuacaucgacaagcagcugcugcccauccugaacaagcagagcugcagcaucagcaacaucgagaccgugauggaguuccagcagaagaacaacagacugcuggagaucaccagagaguucagcgugaacgccggcgugaccacccccgugagcaccuacaugcugaccaacagcgagcugcugagccugaucaacgacaugcccaucaccaacgaccagaagaagcugaugagcaacaacgugcagaucgugagacagcagagcuacagcaucaugugcaucaucaaggaggaggugcuggccuacguggugcagcugccccuguacggcgugaucgacacccccugcuggaagcugcacaccagcccccugugcaccaccaacaccaaggagggcagcaacaucugccugaccagaaccgacagaggcugguacugcgacaacgccggcagcgugagcuucuucccccaggccgagaccugcaaggugugcagcaacagaguguucugcgacaccaugaacagccugacccugcccagcgaggugaaccugugcaacaucgacaucuucaaccccaaguacgacugcaagaucaugaccagcaagaccgacgugagcagcagcgugaucaccagccugggcgccaucgugagcugcuacggcaagaccaagugcaccgccagcaacaagaacaagggcaucaucaagaccuucagcaacggcugcgacuacgugagcaacaagggcguggacaccgugagcgugggcaacacccuguacuacgugaacaagcaggagggcaagagccuguacgugaagggcgagcccaucaucaacuucuacgacccccugguguuccccagcgacgaguucgacgccagcaucagccaggugaacgagaagaucaaccagagccuggccuucaucagaaagagcgacgagcugcugcacaacgugaacgugggcaagagcaccaccaacaucaugaucaccaccaucaucaucgugaucaucgugauccugcugcugcugaucgccgugggccuguuccuguacugcaaggccagaagcacccccgugacccugagcaaggaccagcugagcggcaucaacaacaucgccuucagcaacugaggacuagugcaucacauuuaaaagcaucucagccuaccaugagaauaagagaaagaaaaugaagaucaauagcuuauucaucucuuuuucuuuuucguugguguaaagccaacacccugucuaaaaaacauaaauuucuuuaaucauuuugccucuuuucucugugcuucaauuaauaaaaaauggaaagaaccuagaucuaaaaaaaaaaaaaaaaaaaaaaaaaaaaaaaaaaaaaaaaaaaaaaaaaaaaaaaaaaaaaaaaugcaucccccccccccccccccccccccccccccccaaaggcucuuuucagagccaccagaauu

SEQ ID NO: 18726 - RNA, 1990 nt, Artificial Sequence
  mRNA product Design i-2 comprising derived and/or modified sequence from HRSV(Memphis-37)__AIY60640.1__F_DSCav1_mut7 (opt5)
ggggcgcugccuacggagguggcagccaucuccuucucggcaucaagcuuaccauggagcugcccauccucaagaccaacgccauuacaacgauccuggcugccgugacccuuugcuucgcgagcucccagaauauuacagaagaguuuuaccaaucuaccuguagcgcugucuccaaaggcuaucugucugcccucagaacagggugguacaccagcguuaucacaauugaacuguccaacaucaaggagaauaaaugcaacggaaccgacgccaaggugaaacuuaucaagcaggaacuggauaaguauaaaaaugcugugacggagcuccagaugcugauguguucuaccccugccgcuggcagcggguccgccauugcgagcggaaucgccgucugcaaggugcugcaccucgagggcgaaguuaacaaaauuaagaaugcucugcuuucuacaaacaaagccguggucucccugagcaauggggugucuguucucaccuucaaggugcuggaccuuaagaacuacaucgauaaacagcugcucccgauucugaauaagcaauccuguagcaucucuaacauugagacagucauggaauuucagcagaaaaauaaccggcugcucgagaucacccgcgaguucuccgugaaugcuggagugacgacacccgucagcaccuauaugcugacaaacuccgaacuucugucucucaucaacgacaugccuauuaccaaugaucagaagaaacugaugagcaacaauguucaaaucgugagacagcaguccuacagcauuaugugcaucauuaaggaggaagugcuugccuaugucgugcagcugccccucuacggcguuaucgacaccccuuguuggaaacugcauacaucuccccugugcacgaccaacacaaaggagggcuccaauaucugucucacccggacagaucgcgggugguacugcgacaacgcgggaagcgugagcuuuuucccucaagccgaaaccuguaaggucugcucuaauagaguguuuugcgauacgaugaacucccugacacuuccgucugagguuaaucuguguaacauugacaucuucaaucccaaauaugauugcaagauuaugaccagcaaaaccgacguguccagcucugucaucacaucccucggcgcuauugugagcuguuacgggaagaccaaaugcacagccucuaacaagaauaagggaaucaucaaaacguuuuccaacggcugugauuaugucagcaauaaggggguggacaccguuuccgugggaaacacacuguacuaugucaacaaacaggagggcaagucucuuuacgugaaaggcgaaccuauuaucaauuucuaugacccccugguuuuuccuagcgaugaguucgacgcuuccauuucucaggugaacgaaaagaucaaucaaagccucgccuuuauucggaaguccgaugagcugcugcacaacgucaauguggggaaaagcaccacaaacaucaugauuaccacgaucaucauugugaucauuguuauccuccugcuucugauugccgucggacucuuccuguacugcaaggcucgcucuacccccgugacacuguccaaagaccagcuuagcggcaucaauaacaucgcguucucuaauugaggacuagugcaucacauuuaaaagcaucucagccuaccaugagaauaagagaaagaaaaugaagaucaauagcuuauucaucucuuuuucuuuuucguugguguaaagccaacacccugucuaaaaaacauaaauuucuuuaaucauuuugccucuuuucucugugcuucaauuaauaaaaaauggaaagaaccuagaucuaaaaaaaaaaaaaaaaaaaaaaaaaaaaaaaaaaaaaaaaaaaaaaaaaaaaaaaaaaaaaaaaugcaucccccccccccccccccccccccccccccccaaaggcucuuuucagagccaccagaauu

SEQ ID NO: 18727 - RNA, 1990 nt, Artificial Sequence
  mRNA product Design i-2 comprising derived and/or modified sequence from HRSV(Memphis-37)__AIY60640.1__F_DSCav1_mut7 (opt6)
ggggcgcugccuacggagguggcagccaucuccuucucggcaucaagcuuaccauggaacuaccaauacucaaaacaaaugcuauaaccacaauacucgcagcaguaacauuauguuucgcaucaucccaaaacauaacagaagaauuuuaucaaucaaccuguucagcaguauccaaaggauaccuaagugcauuaagaaccggaugguacacaucaguaauaaccauagaacuuucaaacauaaaagaaaacaaauguaacggcacagacgcaaaagucaaacucaucaaacaggaacuugacaaauauaaaaacgcaguaaccgaacuacaaaugcuaaugugcucaacaccagcagcaggaucaggaucagcaauugcaucuggaauagcuguaugcaaaguccuacaccuagaaggagaaguaaacaaaaucaaaaacgcauuacucuccacaaacaaagcaguaguaucacuaucaaacggaguuucaguacuaaccuucaaaguauuagaccuaaaaaacuacauagacaaacaacuacuaccuauacuaaacaaacaauccuguucaauaagcaacauugaaacuguaauggaauuucaacaaaaaaacaaccgccuauuagaaauaaccagagaauuuuccguaaaugcaggaguaaccacaccagucucuacauacauguuaaccaacucagaacuauuaucacucauaaaugacaugccuauaacaaacgaccaaaaaaaacuaaugucaaacaacguacaaauaguaagacaacaaucauauuccauaaugugcauaauaaaagaagaaguacuugcauacgugguucaacuaccccuauauggaguuauagacacaccaugcuggaaacuccacacuuccccacuuugcacaacuaacacaaaagaaggaucaaauauaugccuaaccagaacagaccguggaugguacugcgacaacgcuggaucagucuccuucuuuccacaagcagaaaccugcaaagucugcucaaauagagucuucugugacacaaugaacucacucacccuacccucagaaguaaaccuauguaauauagauauauuuaauccaaaauacgacugcaaaauuaugacaaguaaaacagacguaagcucaucagucauaaccagccuaggagcaauaguauccuguuacggcaaaacaaaaugcacagcuucaaacaaaaacaaaggcauaauaaaaacauucucaaacggaugugacuauguaucaaauaaaggaguugacacaguaucaguuggaaacacacuauacuauguaaacaaacaagaaggaaaaucacuauacguuaaaggcgaacccauaaucaauuucuacgacccccuagucuucccauccgaugaauuugacgcaucaauaucccaaguaaaugaaaaaaucaaccaaucccuagcauuuauacgaaaauccgacgaacuacuccauaaugucaacgucgguaaaucaacgacaaacaucaugaucacaacaauaauaauaguaauaauuguaauauuacucuuacucauagcaguaggccuauuucuauauugcaaagccagaucaacaccaguaaccuuauccaaagaccaacuaucuggaauaaacaacauagcauuuuccaacugaggacuagugcaucacauuuaaaagcaucucagccuaccaugagaauaagagaaagaaaaugaagaucaauagcuuauucaucucuuuuucuuuuucguugguguaaagccaacacccugucuaaaaaacauaaauuucuuuaaucauuuugccucuuuucucugugcuucaauuaauaaaaaauggaaagaaccuagaucuaaaaaaaaaaaaaaaaaaaaaaaaaaaaaaaaaaaaaaaaaaaaaaaaaaaaaaaaaaaaaaaaugcaucccccccccccccccccccccccccccccccaaaggcucuuuucagagccaccagaauu

SEQ ID NO: 18728 - RNA, 1990 nt, Artificial Sequence
  mRNA product Design i-2 comprising derived and/or modified sequence from HRSV(Memphis-37)__AIY60640.1__F_DSCav1_mut7 (opt11)
ggggcgcugccuacggagguggcagccaucuccuucucggcaucaagcuuaccauggaacuccccauacuuaaaacaaacgccauaacaacuauacucgcagccgucacccucuguuucgcauccucucaaaacaucaccgaagaguucuaucaaucaaccugcuccgccgucucaaaaggcuaccucuccgcccuacgcacaggcugguacaccagcgucauuaccauagaacucucgaacaucaaagaaaacaaaugcaacggcaccgacgcaaaagugaaacucaucaaacaagaacucgacaaauacaaaaacgccgucaccgaacuucagaugcucaugugcuccaccccugccgccggcagcggcuccgccauagccuccggcaucgcagucugcaaaguccuccaccucgaaggagaaguaaacaaaaucaaaaaugcucuccucuccacaaacaaagccgucgucucacucuccaauggagucuccguccucaccuucaaaguccucgaccucaaaaacuacauagacaaacaacuacuccccauccucaacaagcaauccugcucuaucuccaacauagaaaccguuauggaguuccaacagaaaaauaaccgccugcuagaaauaacccgagaguucuccgucaacgcaggcgucacuacccccgucagcacauacaugcuaacaaacuccgaacugcucucccuuaucaacgacaugcccaucacaaacgaucagaaaaagcucaugucuaacaacguacaaaucguucggcaacaauccuacuccaucaugugcaucaucaaagaagaagugcucgccuacguaguccaacucccccucuacggagucaucgacacacccugcuggaaacuccacacaucaccccucugcaccaccaacacaaaagaaggguccaacaucugccucacgcgcaccgaccgaggcugguacugcgacaacgccggcuccguauccuucuucccccaagcagaaaccugcaaggucugcuccaaccgcguauucugcgacaccaugaacucgcucacccuccccucagaagucaaccuauguaacaucgacauauucaaucccaaauacgacugcaagauaaugacuuccaaaaccgacguaagcuccucggucaucaccucccucggcgccaucgucuccugcuacggcaaaaccaaaugcaccgccuccaauaagaauaaaggcauaauaaagacauucagcaacggcugcgauuacgucuccaacaaaggugucgacaccgucucagucggcaacacucuauacuacgugaacaaacaagaaggcaaaagccuauacguuaaaggcgaaccaauaaucaauuucuacgacccucuagucuuucccucugacgaguucgaugccagcauaagccaagucaacgaaaagaucaaccaaucacucgccuucauccguaaauccgacgaacugcuccacaaugucaauguaggcaaaucaacaaccaacaucaugaucaccacuauuaucaucgucaucaucguaauccuacuccuacuaaucgccgucggccuauuccucuacugcaaagcccgcucgacccccgucacucucagcaaggaucaacuauccggcaucaacaacaucgccuucuccaacuaaggacuagugcaucacauuuaaaagcaucucagccuaccaugagaauaagagaaagaaaaugaagaucaauagcuuauucaucucuuuuucuuuuucguugguguaaagccaacacccugucuaaaaaacauaaauuucuuuaaucauuuugccucuuuucucugugcuucaauuaauaaaaaauggaaagaaccuagaucuaaaaaaaaaaaaaaaaaaaaaaaaaaaaaaaaaaaaaaaaaaaaaaaaaaaaaaaaaaaaaaaaugcaucccccccccccccccccccccccccccccccaaaggcucuuuucagagccaccagaauu

SEQ ID NO: 18729 - RNA, 1825 nt, Artificial Sequence
  mRNA product Design i-3 comprising derived and/or modified sequence from HRSV(Memphis-37)__AIY60640.1__F_DSCav1_mut7 (opt1)
gggagaaagcuuaccauggagcugcccauccucaagaccaacgccaucaccacgauccuggccgcggugacccugugcuucgccagcucccagaacaucaccgaggaguucuaccagagcacgugcuccgccgucagcaagggcuaccucuccgcccugcgcaccgggugguacaccagcgugaucaccaucgagcuguccaacaucaaggagaacaagugcaacggcaccgacgccaaggugaagcucaucaagcaggagcuggacaaguacaagaacgcggucacggagcugcagaugcugaugugcagcaccccggccgccggcuccgggagcgcgaucgccuccggcaucgccgucugcaaggugcugcaccucgagggcgaggugaacaagaucaagaacgcccugcuguccaccaacaaggccgucgugagccucuccaacggggugagcguccugaccuucaaggugcuggaccucaagaacuacaucgacaagcagcugcugcccauccugaacaagcagagcugcuccaucagcaacaucgagaccgucauggaguuccagcagaagaacaaccgccuccuggagaucacgcgggaguucagcgugaacgcgggcgugaccacccccgucuccaccuacaugcugacgaacagcgagcuccugucccugaucaacgacaugccgaucaccaacgaccagaagaagcucaugagcaacaacgugcagaucgugcgccagcaguccuacagcaucaugugcaucaucaaggaggagguccuggccuacguggugcagcugccccucuacggggucaucgacacccccugcuggaagcugcacaccagcccccugugcacgaccaacaccaaggagggcuccaacaucugccucacccggacggaccgcgggugguacugcgacaacgccggcagcguguccuucuucccgcaggccgagaccugcaaggucugcagcaaccggguguucugcgacaccaugaacucccugacccugcccagcgaggugaaccucugcaacaucgacaucuucaaccccaaguacgacugcaagaucaugacguccaagaccgacgucagcuccagcgugaucaccucccugggcgccaucgugagcugcuacgggaagaccaagugcacggcgagcaacaagaacaagggcaucaucaagaccuucuccaacgggugcgacuacgucagcaacaagggcguggacaccguguccgucggcaacacccuguacuacgugaacaagcaggagggcaagagccucuacgugaagggggagcccaucaucaacuucuacgacccgcuggucuuccccuccgacgaguucgacgccagcaucucccaggugaacgagaagaucaaccagagccuggccuucauccggaaguccgacgagcuccugcacaacgugaacgucggcaagagcaccacgaacaucaugaucaccaccaucaucaucgugaucaucgugauccugcugcuccugaucgccgucgggcuguuccucuacugcaaggcccgcuccacccccgugacgcugagcaaggaccagcuguccgggaucaacaacaucgcguucagcaacugaggacuaguuauaagacugacuagcccgaugggccucccaacgggcccuccuccccuccuugcaccgagauuaauaaaaaaaaaaaaaaaaaaaaaaaaaaaaaaaaaaaaaaaaaaaaaaaaaaaaaaaaaaaaaaaaugcaucccccccccccccccccccccccccccccccaaaggcucuuuucagagccaccagaauu

SEQ ID NO: 18730 - RNA, 1825 nt, Artificial Sequence
  mRNA product Design i-3 comprising derived and/or modified sequence from HRSV(Memphis-37)__AIY60640.1__F_DSCav1_mut7 (opt1)
gggagaaagcuuaccauggagcugcccauccucaagaccaacgccaucaccacgauccuggccgcggugacccugugcuucgccagcucccagaacaucaccgaggaguucuaccagagcacgugcuccgccgucagcaagggcuaccucuccgcccugcgcaccgggugguacaccagcgugaucaccaucgagcuguccaacaucaaggagaacaagugcaacggcaccgacgccaaggugaagcucaucaagcaggagcuggacaaguacaagaacgcggucacggagcugcagaugcucaugugcagcaccccggccgccggguccggcagcgccaucgcguccgggaucgccgugugcaaggugcugcaccuggagggcgaggucaacaagaucaagaacgcccuccugagcaccaacaaggccguggugucccugagcaacggcgucuccgugcucaccuucaaggugcuggaccugaagaacuacaucgacaagcagcuccugcccauccugaacaagcagagcugcuccaucagcaacaucgagacggucauggaguuccagcagaagaacaaccggcuccuggagaucacccgcgaguucuccgugaacgccggggugaccacccccgucagcacguacaugcugaccaacagcgagcuccugucccugaucaacgacaugcccaucaccaacgaccagaagaagcucaugagcaacaacgugcagaucgugcggcagcaguccuacagcaucaugugcaucaucaaggaggagguccuggcguacguggugcagcugccgcucuacggcgucaucgacacccccugcuggaagcugcacacgagcccccugugcaccaccaacaccaaggaggggagcaacaucugccucacgcgcaccgaccggggcugguacugcgacaacgccggguccgugagcuucuucccccaggccgagaccugcaaggugugcuccaaccgcgucuucugcgacaccaugaacagccugacgcugccguccgaggugaaccucugcaacaucgacaucuucaaccccaaguacgacugcaagaucaugaccagcaagaccgacgucuccagcuccgugaucaccagccugggcgccaucguguccugcuacggcaagacgaagugcaccgccagcaacaagaacaaggggaucaucaagaccuucuccaacggcugcgacuacgucagcaacaaggggguggacaccgugagcgucggcaacacgcuguacuacgugaacaagcaggagggcaagucccucuacgugaagggggagcccaucaucaacuucuacgacccccuggucuucccgagcgacgaguucgacgcguccaucagccaggugaacgagaagaucaaccagucccuggccuucauccggaaguccgacgagcuccugcacaacgugaacgucggcaaguccaccaccaacaucaugaucaccaccaucaucaucgugaucaucgugauccugcuccugcugaucgccgucggccucuuccuguacugcaaggcccgcagcacgcccgugacccuguccaaggaccagcugagcgggaucaacaacaucgccuucuccaacugaggacuaguuauaagacugacuagcccgaugggccucccaacgggcccuccuccccuccuugcaccgagauuaauaaaaaaaaaaaaaaaaaaaaaaaaaaaaaaaaaaaaaaaaaaaaaaaaaaaaaaaaaaaaaaaaugcaucccccccccccccccccccccccccccccccaaaggcucuuuucagagccaccagaauu

SEQ ID NO: 18731 - RNA, 1825 nt, Artificial Sequence
  mRNA product Design i-3 comprising derived and/or modified sequence from HRSV(Memphis-37)__AIY60640.1__F_DSCav1_mut7 (opt2)
gggagaaagcuuaccauggagcuccccauccucaagaccaacgccaucaccaccauccucgccgccgucacccucugcuucgccuccucccagaacaucaccgaggaguucuaccaguccaccugcuccgccgucuccaagggcuaccucuccgcccuccgcaccggcugguacaccuccgucaucaccaucgagcucuccaacaucaaggagaacaagugcaacggcaccgacgccaaggucaagcucaucaagcaggagcucgacaaguacaagaacgccgucaccgagcuccagaugcucaugugcuccacccccgccgccggcuccggcuccgccaucgccuccggcaucgccgucugcaagguccuccaccucgagggcgaggucaacaagaucaagaacgcccuccucuccaccaacaaggccgucgucucccucuccaacggcgucuccguccucaccuucaagguccucgaccucaagaacuacaucgacaagcagcuccuccccauccucaacaagcaguccugcuccaucuccaacaucgagaccgucauggaguuccagcagaagaacaaccgccuccucgagaucacccgcgaguucuccgucaacgccggcgucaccacccccgucuccaccuacaugcucaccaacuccgagcuccucucccucaucaacgacaugcccaucaccaacgaccagaagaagcucauguccaacaacguccagaucguccgccagcaguccuacuccaucaugugcaucaucaaggaggagguccucgccuacgucguccagcucccccucuacggcgucaucgacacccccugcuggaagcuccacaccuccccccucugcaccaccaacaccaaggagggcuccaacaucugccucacccgcaccgaccgcggcugguacugcgacaacgccggcuccgucuccuucuucccccaggccgagaccugcaaggucugcuccaaccgcgucuucugcgacaccaugaacucccucacccuccccuccgaggucaaccucugcaacaucgacaucuucaaccccaaguacgacugcaagaucaugaccuccaagaccgacgucuccuccuccgucaucaccucccucggcgccaucgucuccugcuacggcaagaccaagugcaccgccuccaacaagaacaagggcaucaucaagaccuucuccaacggcugcgacuacgucuccaacaagggcgucgacaccgucuccgucggcaacacccucuacuacgucaacaagcaggagggcaagucccucuacgucaagggcgagcccaucaucaacuucuacgacccccucgucuuccccuccgacgaguucgacgccuccaucucccaggucaacgagaagaucaaccagucccucgccuucauccgcaaguccgacgagcuccuccacaacgucaacgucggcaaguccaccaccaacaucaugaucaccaccaucaucaucgucaucaucgucauccuccuccuccucaucgccgucggccucuuccucuacugcaaggcccgcuccacccccgucacccucuccaaggaccagcucuccggcaucaacaacaucgccuucuccaacugaggacuaguuauaagacugacuagcccgaugggccucccaacgggcccuccuccccuccuugcaccgagauuaauaaaaaaaaaaaaaaaaaaaaaaaaaaaaaaaaaaaaaaaaaaaaaaaaaaaaaaaaaaaaaaaaugcaucccccccccccccccccccccccccccccccaaaggcucuuuucagagccaccagaauu

SEQ ID NO: 18732 - RNA, 1825 nt, Artificial Sequence
  mRNA product Design i-3 comprising derived and/or modified sequence from HRSV(Memphis-37)__AIY60640.1__F_DSCav1_mut7 (opt3)
gggagaaagcuuaccauggagcugcccauccucaagaccaacgccauuacaacuauacuugcugcagugacgcugugcuucgccagcucccagaauaucaccgaagaguuuuaccaaucuacauguucagcggucaguaaaggcuauuugagcgcuuuaagaacugggugguacaccuccguuauuacaaucgaacugucuaacauuaaggagaauaaaugcaacggaaccgacgccaaggugaaacuaaucaagcaggaacucgauaaguauaaaaaugcaguaacugagcugcagaugcuuauguguucgaccccugccgcugguucaggcagcgcaauagccagugggaucgcugugugcaagguccugcacuuggagggagaagugaacaaaauuaagaaugcccuccuguccacaaacaaagcgguugugucucugagcaauggcgucuccgugcucacguucaagguauuagaccugaagaacuacaucgauaaacagcuuuugccaauucugaauaagcaaucauguaguaucagcaacauagagacuguuauggaauuucagcagaaaaauaacaggcuacucgagauuacccgggaguucucugugaaugccggugucacaacuccgguguccaccuauaugcugacaaacucagaacuucugagcuugaucaacgacaugcccauuaccaaugaucagaagaaacucaugaguaacaaugugcaaaucguccgccagcagucuuacuccaucaugugcauuauaaaggaggaaguucuggcauaugugguacaguuaccucuguacggggugaucgacacgccauguuggaaacuccauacuagcccccuuugcacaaccaacacuaaggagggaucgaauauuugucugacacgaaccgaucguggcugguacugcgacaacgcuggcucugucuccuuuuucccucaagccgaaacguguaaggugugcucaaauagaguguuuugcgauaccaugaacaguuugacacuaccaagcgagguuaaucuguguaacaucgacauauucaaucccaaauaugauugcaagauuaugacuuccaaaaccgacgucucuagcucagugaucacaagucucggggcaaucguauccuguuacggaaagacuaaaugcaccgcuagcaacaagaauaaggguauuaucaaaacauuuucuaacggcugugauuauguuucaaauaaggggguggacaccgucagugugggaaacacucuguacuaugucaacaaacaggagggcaagagccuuuacgugaaaggugaaccuauuauaaauuucuaugacccacugguuuuuccguccgaugaguucgacgccucuaucagccaggugaacgaaaagauuaaucaaucguuggcguuuaucaggaaguccgaugagcuccugcacaacguaaaugucgggaaaucaacgacaaacaucaugauuaccacuauaaucauugugaucauuguuaucuuacugcuacucauagccgugggacuguuccuuuacugcaaggcacggaguacccccgucacauugucuaaagaccagcugagcggcaucaauaacauugcuuucuccaauugaggacuaguuauaagacugacuagcccgaugggccucccaacgggcccuccuccccuccuugcaccgagauuaauaaaaaaaaaaaaaaaaaaaaaaaaaaaaaaaaaaaaaaaaaaaaaaaaaaaaaaaaaaaaaaaaugcaucccccccccccccccccccccccccccccccaaaggcucuuuucagagccaccagaauu

SEQ ID NO: 18733 - RNA, 1825 nt, Artificial Sequence
  mRNA product Design i-3 comprising derived and/or modified sequence from HRSV(Memphis-37)__AIY60640.1__F_DSCav1_mut7 (opt4)
gggagaaagcuuaccauggagcugcccauccugaagaccaacgccaucaccaccauccuggccgccgugacccugugcuucgccagcagccagaacaucaccgaggaguucuaccagagcaccugcagcgccgugagcaagggcuaccugagcgcccugagaaccggcugguacaccagcgugaucaccaucgagcugagcaacaucaaggagaacaagugcaacggcaccgacgccaaggugaagcugaucaagcaggagcuggacaaguacaagaacgccgugaccgagcugcagaugcugaugugcagcacccccgccgccggcagcggcagcgccaucgccagcggcaucgccgugugcaaggugcugcaccuggagggcgaggugaacaagaucaagaacgcccugcugagcaccaacaaggccguggugagccugagcaacggcgugagcgugcugaccuucaaggugcuggaccugaagaacuacaucgacaagcagcugcugcccauccugaacaagcagagcugcagcaucagcaacaucgagaccgugauggaguuccagcagaagaacaacagacugcuggagaucaccagagaguucagcgugaacgccggcgugaccacccccgugagcaccuacaugcugaccaacagcgagcugcugagccugaucaacgacaugcccaucaccaacgaccagaagaagcugaugagcaacaacgugcagaucgugagacagcagagcuacagcaucaugugcaucaucaaggaggaggugcuggccuacguggugcagcugccccuguacggcgugaucgacacccccugcuggaagcugcacaccagcccccugugcaccaccaacaccaaggagggcagcaacaucugccugaccagaaccgacagaggcugguacugcgacaacgccggcagcgugagcuucuucccccaggccgagaccugcaaggugugcagcaacagaguguucugcgacaccaugaacagccugacccugcccagcgaggugaaccugugcaacaucgacaucuucaaccccaaguacgacugcaagaucaugaccagcaagaccgacgugagcagcagcgugaucaccagccugggcgccaucgugagcugcuacggcaagaccaagugcaccgccagcaacaagaacaagggcaucaucaagaccuucagcaacggcugcgacuacgugagcaacaagggcguggacaccgugagcgugggcaacacccuguacuacgugaacaagcaggagggcaagagccuguacgugaagggcgagcccaucaucaacuucuacgacccccugguguuccccagcgacgaguucgacgccagcaucagccaggugaacgagaagaucaaccagagccuggccuucaucagaaagagcgacgagcugcugcacaacgugaacgugggcaagagcaccaccaacaucaugaucaccaccaucaucaucgugaucaucgugauccugcugcugcugaucgccgugggccuguuccuguacugcaaggccagaagcacccccgugacccugagcaaggaccagcugagcggcaucaacaacaucgccuucagcaacugaggacuaguuauaagacugacuagcccgaugggccucccaacgggcccuccuccccuccuugcaccgagauuaauaaaaaaaaaaaaaaaaaaaaaaaaaaaaaaaaaaaaaaaaaaaaaaaaaaaaaaaaaaaaaaaaugcaucccccccccccccccccccccccccccccccaaaggcucuuuucagagccaccagaauu

SEQ ID NO: 18734 - RNA, 1825 nt, Artificial Sequence
  mRNA product Design i-3 comprising derived and/or modified sequence from HRSV(Memphis-37)__AIY60640.1__F_DSCav1_mut7 (opt5)
gggagaaagcuuaccauggagcugcccauccucaagaccaacgccauuacaacgauccuggcugccgugacccuuugcuucgcgagcucccagaauauuacagaagaguuuuaccaaucuaccuguagcgcugucuccaaaggcuaucugucugcccucagaacagggugguacaccagcguuaucacaauugaacuguccaacaucaaggagaauaaaugcaacggaaccgacgccaaggugaaacuuaucaagcaggaacuggauaaguauaaaaaugcugugacggagcuccagaugcugauguguucuaccccugccgcuggcagcggguccgccauugcgagcggaaucgccgucugcaaggugcugcaccucgagggcgaaguuaacaaaauuaagaaugcucugcuuucuacaaacaaagccguggucucccugagcaauggggugucuguucucaccuucaaggugcuggaccuuaagaacuacaucgauaaacagcugcucccgauucugaauaagcaauccuguagcaucucuaacauugagacagucauggaauuucagcagaaaaauaaccggcugcucgagaucacccgcgaguucuccgugaaugcuggagugacgacacccgucagcaccuauaugcugacaaacuccgaacuucugucucucaucaacgacaugccuauuaccaaugaucagaagaaacugaugagcaacaauguucaaaucgugagacagcaguccuacagcauuaugugcaucauuaaggaggaagugcuugccuaugucgugcagcugccccucuacggcguuaucgacaccccuuguuggaaacugcauacaucuccccugugcacgaccaacacaaaggagggcuccaauaucugucucacccggacagaucgcgggugguacugcgacaacgcgggaagcgugagcuuuuucccucaagccgaaaccuguaaggucugcucuaauagaguguuuugcgauacgaugaacucccugacacuuccgucugagguuaaucuguguaacauugacaucuucaaucccaaauaugauugcaagauuaugaccagcaaaaccgacguguccagcucugucaucacaucccucggcgcuauugugagcuguuacgggaagaccaaaugcacagccucuaacaagaauaagggaaucaucaaaacguuuuccaacggcugugauuaugucagcaauaaggggguggacaccguuuccgugggaaacacacuguacuaugucaacaaacaggagggcaagucucuuuacgugaaaggcgaaccuauuaucaauuucuaugacccccugguuuuuccuagcgaugaguucgacgcuuccauuucucaggugaacgaaaagaucaaucaaagccucgccuuuauucggaaguccgaugagcugcugcacaacgucaauguggggaaaagcaccacaaacaucaugauuaccacgaucaucauugugaucauuguuauccuccugcuucugauugccgucggacucuuccuguacugcaaggcucgcucuacccccgugacacuguccaaagaccagcuuagcggcaucaauaacaucgcguucucuaauugaggacuaguuauaagacugacuagcccgaugggccucccaacgggcccuccuccccuccuugcaccgagauuaauaaaaaaaaaaaaaaaaaaaaaaaaaaaaaaaaaaaaaaaaaaaaaaaaaaaaaaaaaaaaaaaaugcaucccccccccccccccccccccccccccccccaaaggcucuuuucagagccaccagaauu

SEQ ID NO: 18735 - RNA, 1825 nt, Artificial Sequence
  mRNA product Design i-3 comprising derived and/or modified sequence from HRSV(Memphis-37)__AIY60640.1__F_DSCav1_mut7 (opt6)
gggagaaagcuuaccauggaacuaccaauacucaaaacaaaugcuauaaccacaauacucgcagcaguaacauuauguuucgcaucaucccaaaacauaacagaagaauuuuaucaaucaaccuguucagcaguauccaaaggauaccuaagugcauuaagaaccggaugguacacaucaguaauaaccauagaacuuucaaacauaaaagaaaacaaauguaacggcacagacgcaaaagucaaacucaucaaacaggaacuugacaaauauaaaaacgcaguaaccgaacuacaaaugcuaaugugcucaacaccagcagcaggaucaggaucagcaauugcaucuggaauagcuguaugcaaaguccuacaccuagaaggagaaguaaacaaaaucaaaaacgcauuacucuccacaaacaaagcaguaguaucacuaucaaacggaguuucaguacuaaccuucaaaguauuagaccuaaaaaacuacauagacaaacaacuacuaccuauacuaaacaaacaauccuguucaauaagcaacauugaaacuguaauggaauuucaacaaaaaaacaaccgccuauuagaaauaaccagagaauuuuccguaaaugcaggaguaaccacaccagucucuacauacauguuaaccaacucagaacuauuaucacucauaaaugacaugccuauaacaaacgaccaaaaaaaacuaaugucaaacaacguacaaauaguaagacaacaaucauauuccauaaugugcauaauaaaagaagaaguacuugcauacgugguucaacuaccccuauauggaguuauagacacaccaugcuggaaacuccacacuuccccacuuugcacaacuaacacaaaagaaggaucaaauauaugccuaaccagaacagaccguggaugguacugcgacaacgcuggaucagucuccuucuuuccacaagcagaaaccugcaaagucugcucaaauagagucuucugugacacaaugaacucacucacccuacccucagaaguaaaccuauguaauauagauauauuuaauccaaaauacgacugcaaaauuaugacaaguaaaacagacguaagcucaucagucauaaccagccuaggagcaauaguauccuguuacggcaaaacaaaaugcacagcuucaaacaaaaacaaaggcauaauaaaaacauucucaaacggaugugacuauguaucaaauaaaggaguugacacaguaucaguuggaaacacacuauacuauguaaacaaacaagaaggaaaaucacuauacguuaaaggcgaacccauaaucaauuucuacgacccccuagucuucccauccgaugaauuugacgcaucaauaucccaaguaaaugaaaaaaucaaccaaucccuagcauuuauacgaaaauccgacgaacuacuccauaaugucaacgucgguaaaucaacgacaaacaucaugaucacaacaauaauaauaguaauaauuguaauauuacucuuacucauagcaguaggccuauuucuauauugcaaagccagaucaacaccaguaaccuuauccaaagaccaacuaucuggaauaaacaacauagcauuuuccaacugaggacuaguuauaagacugacuagcccgaugggccucccaacgggcccuccuccccuccuugcaccgagauuaauaaaaaaaaaaaaaaaaaaaaaaaaaaaaaaaaaaaaaaaaaaaaaaaaaaaaaaaaaaaaaaaaugcaucccccccccccccccccccccccccccccccaaaggcucuuuucagagccaccagaauu

SEQ ID NO: 18736 - RNA, 1825 nt, Artificial Sequence
  mRNA product Design i-3 comprising derived and/or modified sequence from HRSV(Memphis-37)__AIY60640.1__F_DSCav1_mut7 (opt11)
gggagaaagcuuaccauggaacuccccauacuuaaaacaaacgccauaacaacuauacucgcagccgucacccucuguuucgcauccucucaaaacaucaccgaagaguucuaucaaucaaccugcuccgccgucucaaaaggcuaccucuccgcccuacgcacaggcugguacaccagcgucauuaccauagaacucucgaacaucaaagaaaacaaaugcaacggcaccgacgcaaaagugaaacucaucaaacaagaacucgacaaauacaaaaacgccgucaccgaacuucagaugcucaugugcuccaccccugccgccggcagcggcuccgccauagccuccggcaucgcagucugcaaaguccuccaccucgaaggagaaguaaacaaaaucaaaaaugcucuccucuccacaaacaaagccgucgucucacucuccaauggagucuccguccucaccuucaaaguccucgaccucaaaaacuacauagacaaacaacuacuccccauccucaacaagcaauccugcucuaucuccaacauagaaaccguuauggaguuccaacagaaaaauaaccgccugcuagaaauaacccgagaguucuccgucaacgcaggcgucacuacccccgucagcacauacaugcuaacaaacuccgaacugcucucccuuaucaacgacaugcccaucacaaacgaucagaaaaagcucaugucuaacaacguacaaaucguucggcaacaauccuacuccaucaugugcaucaucaaagaagaagugcucgccuacguaguccaacucccccucuacggagucaucgacacacccugcuggaaacuccacacaucaccccucugcaccaccaacacaaaagaaggguccaacaucugccucacgcgcaccgaccgaggcugguacugcgacaacgccggcuccguauccuucuucccccaagcagaaaccugcaaggucugcuccaaccgcguauucugcgacaccaugaacucgcucacccuccccucagaagucaaccuauguaacaucgacauauucaaucccaaauacgacugcaagauaaugacuuccaaaaccgacguaagcuccucggucaucaccucccucggcgccaucgucuccugcuacggcaaaaccaaaugcaccgccuccaauaagaauaaaggcauaauaaagacauucagcaacggcugcgauuacgucuccaacaaaggugucgacaccgucucagucggcaacacucuauacuacgugaacaaacaagaaggcaaaagccuauacguuaaaggcgaaccaauaaucaauuucuacgacccucuagucuuucccucugacgaguucgaugccagcauaagccaagucaacgaaaagaucaaccaaucacucgccuucauccguaaauccgacgaacugcuccacaaugucaauguaggcaaaucaacaaccaacaucaugaucaccacuauuaucaucgucaucaucguaauccuacuccuacuaaucgccgucggccuauuccucuacugcaaagcccgcucgacccccgucacucucagcaaggaucaacuauccggcaucaacaacaucgccuucuccaacuaaggacuaguuauaagacugacuagcccgaugggccucccaacgggcccuccuccccuccuugcaccgagauuaauaaaaaaaaaaaaaaaaaaaaaaaaaaaaaaaaaaaaaaaaaaaaaaaaaaaaaaaaaaaaaaaaugcaucccccccccccccccccccccccccccccccaaaggcucuuuucagagccaccagaauu

SEQ ID NO: 18737 - protein, 514 aa, Artificial Sequence
  derived and/or modified protein sequence (artificial) from HRSV(Memphis-37)__AIY60640.1__F-del_DSCav1_mut7
MELPILKTNAITTILAAVTLCFASSQNITEEFYQSTCSAVSKGYLSALRTGWYTSVITIELSNIKENKCNGTDAKVKLIKQELDKYKNAVTELQMLMCSTPAAGSGSAIASGIAVCKVLHLEGEVNKIKNALLSTNKAVVSLSNGVSVLTFKVLDLKNYIDKQLLPILNKQSCSISNIETVMEFQQKNNRLLEITREFSVNAGVTTPVSTYMLTNSELLSLINDMPITNDQKKLMSNNVQIVRQQSYSIMCIIKEEVLAYVVQLPLYGVIDTPCWKLHTSPLCTTNTKEGSNICLTRTDRGWYCDNAGSVSFFPQAETCKVCSNRVFCDTMNSLTLPSEVNLCNIDIFNPKYDCKIMTSKTDVSSSVITSLGAIVSCYGKTKCTASNKNKGIIKTFSNGCDYVSNKGVDTVSVGNTLYYVNKQEGKSLYVKGEPIINFYDPLVFPSDEFDASISQVNEKINQSLAFIRKSDELLHNVNVGKSTTNIMITTIIIVIIVILLLLIAVGLFLYCKAR

SEQ ID NO: 18738 - RNA, 1545 nt, Artificial Sequence
  derived and/or modified CDS sequence (opt1) from HRSV(Memphis-37)__AIY60640.1__F-del_DSCav1_mut7
auggagcugcccauccucaagaccaacgccaucaccacgauccuggccgcggugacccugugcuucgccagcucccagaacaucaccgaggaguucuaccagagcacgugcuccgccgucagcaagggcuaccucuccgcccugcgcaccgggugguacaccagcgugaucaccaucgagcuguccaacaucaaggagaacaagugcaacggcaccgacgccaaggugaagcucaucaagcaggagcuggacaaguacaagaacgcggucacggagcugcagaugcugaugugcagcaccccggccgccggcuccgggagcgcgaucgccuccggcaucgccgucugcaaggugcugcaccucgagggcgaggugaacaagaucaagaacgcccugcuguccaccaacaaggccgucgugagccucuccaacggggugagcguccugaccuucaaggugcuggaccucaagaacuacaucgacaagcagcugcugcccauccugaacaagcagagcugcuccaucagcaacaucgagaccgucauggaguuccagcagaagaacaaccgccuccuggagaucacgcgggaguucagcgugaacgcgggcgugaccacccccgucuccaccuacaugcugacgaacagcgagcuccugucccugaucaacgacaugccgaucaccaacgaccagaagaagcucaugagcaacaacgugcagaucgugcgccagcaguccuacagcaucaugugcaucaucaaggaggagguccuggccuacguggugcagcugccccucuacggggucaucgacacccccugcuggaagcugcacaccagcccccugugcacgaccaacaccaaggagggcuccaacaucugccucacccggacggaccgcgggugguacugcgacaacgccggcagcguguccuucuucccgcaggccgagaccugcaaggucugcagcaaccggguguucugcgacaccaugaacucccugacccugcccagcgaggugaaccucugcaacaucgacaucuucaaccccaaguacgacugcaagaucaugacguccaagaccgacgucagcuccagcgugaucaccucccugggcgccaucgugagcugcuacgggaagaccaagugcacggcgagcaacaagaacaagggcaucaucaagaccuucuccaacgggugcgacuacgucagcaacaagggcguggacaccguguccgucggcaacacccuguacuacgugaacaagcaggagggcaagagccucuacgugaagggggagcccaucaucaacuucuacgacccgcuggucuuccccuccgacgaguucgacgccagcaucucccaggugaacgagaagaucaaccagagccuggccuucauccggaaguccgacgagcuccugcacaacgugaacgucggcaagagcaccacgaacaucaugaucaccaccaucaucaucgugaucaucgugauccugcugcuccugaucgccgucgggcuguuccucuacugcaaggcccgcuga

SEQ ID NO: 18739 - RNA, 1545 nt, Artificial Sequence
  derived and/or modified CDS sequence (opt1) from HRSV(Memphis-37)__AIY60640.1__F-del_DSCav1_mut7
auggagcugcccauccucaagaccaacgccaucaccacgauccuggccgcggugacccugugcuucgccagcucccagaacaucaccgaggaguucuaccagagcacgugcuccgccgucagcaagggguaccucuccgcccugcgcaccgggugguacaccagcgugaucaccaucgagcuguccaacaucaaggagaacaagugcaacggcaccgacgccaaggugaagcucaucaagcaggagcuggacaaguacaagaacgcggucacggagcugcagaugcucaugugcagcaccccggccgccggguccggcagcgccaucgcguccgggaucgccgugugcaaggugcugcaccuggagggcgaggucaacaagaucaagaacgcccuccugagcaccaacaaggccguggugucccugagcaacggcgucuccgugcucaccuucaaggugcuggaccugaagaacuacaucgacaagcagcuccugcccauccugaacaagcagagcugcuccaucagcaacaucgagacggucauggaguuccagcagaagaacaaccggcuccuggagaucacccgcgaguucuccgugaacgccggggugaccacccccgucagcacguacaugcugaccaacagcgagcuccugucccugaucaacgacaugcccaucaccaacgaccagaagaagcucaugagcaacaacgugcagaucgugcggcagcaguccuacagcaucaugugcaucaucaaggaggagguccuggcguacguggugcagcugccgcucuacggcgucaucgacacccccugcuggaagcugcacacgagcccccugugcaccaccaacaccaaggaggggagcaacaucugccucacgcgcaccgaccggggcugguacugcgacaacgccggguccgugagcuucuucccccaggccgagaccugcaaggugugcuccaaccgcgucuucugcgacaccaugaacagccugacgcugccguccgaggugaaccucugcaacaucgacaucuucaaccccaaguacgacugcaagaucaugaccagcaagaccgacgucuccagcuccgugaucaccagccugggcgccaucguguccugcuacggcaagacgaagugcaccgccagcaacaagaacaaggggaucaucaagaccuucuccaacggcugcgacuacgucagcaacaaggggguggacaccgugagcgucggcaacacgcuguacuacgugaacaagcaggagggcaagucccucuacgugaagggggagcccaucaucaacuucuacgacccccuggucuucccgagcgacgaguucgacgcguccaucagccaggugaacgagaagaucaaccagucccuggccuucauccggaaguccgacgagcuccugcacaacgugaacgucggcaaguccaccaccaacaucaugaucaccaccaucaucaucgugaucaucgugauccugcuccugcugaucgccgucggccucuuccuguacugcaaggcccgcuga

SEQ ID NO: 18740 - RNA, 1545 nt, Artificial Sequence
  derived and/or modified CDS sequence (opt2) from HRSV(Memphis-37)__AIY60640.1__F-del_DSCav1_mut7
auggagcuccccauccucaagaccaacgccaucaccaccauccucgccgccgucacccucugcuucgccuccucccagaacaucaccgaggaguucuaccaguccaccugcuccgccgucuccaagggcuaccucuccgcccuccgcaccggcugguacaccuccgucaucaccaucgagcucuccaacaucaaggagaacaagugcaacggcaccgacgccaaggucaagcucaucaagcaggagcucgacaaguacaagaacgccgucaccgagcuccagaugcucaugugcuccacccccgccgccggcuccggcuccgccaucgccuccggcaucgccgucugcaagguccuccaccucgagggcgaggucaacaagaucaagaacgcccuccucuccaccaacaaggccgucgucucccucuccaacggcgucuccguccucaccuucaagguccucgaccucaagaacuacaucgacaagcagcuccuccccauccucaacaagcaguccugcuccaucuccaacaucgagaccgucauggaguuccagcagaagaacaaccgccuccucgagaucacccgcgaguucuccgucaacgccggcgucaccacccccgucuccaccuacaugcucaccaacuccgagcuccucucccucaucaacgacaugcccaucaccaacgaccagaagaagcucauguccaacaacguccagaucguccgccagcaguccuacuccaucaugugcaucaucaaggaggagguccucgccuacgucguccagcucccccucuacggcgucaucgacacccccugcuggaagcuccacaccuccccccucugcaccaccaacaccaaggagggcuccaacaucugccucacccgcaccgaccgcggcugguacugcgacaacgccggcuccgucuccuucuucccccaggccgagaccugcaaggucugcuccaaccgcgucuucugcgacaccaugaacucccucacccuccccuccgaggucaaccucugcaacaucgacaucuucaaccccaaguacgacugcaagaucaugaccuccaagaccgacgucuccuccuccgucaucaccucccucggcgccaucgucuccugcuacggcaagaccaagugcaccgccuccaacaagaacaagggcaucaucaagaccuucuccaacggcugcgacuacgucuccaacaagggcgucgacaccgucuccgucggcaacacccucuacuacgucaacaagcaggagggcaagucccucuacgucaagggcgagcccaucaucaacuucuacgacccccucgucuuccccuccgacgaguucgacgccuccaucucccaggucaacgagaagaucaaccagucccucgccuucauccgcaaguccgacgagcuccuccacaacgucaacgucggcaaguccaccaccaacaucaugaucaccaccaucaucaucgucaucaucgucauccuccuccuccucaucgccgucggccucuuccucuacugcaaggcccgcuga

SEQ ID NO: 18741 - RNA, 1545 nt, Artificial Sequence
  derived and/or modified CDS sequence (opt3) from HRSV(Memphis-37)__AIY60640.1__F-del_DSCav1_mut7
auggagcugcccauccucaagaccaacgccauuacaacuauacuugcugcagugacgcugugcuucgccagcucccagaauaucaccgaagaguuuuaccaaucuacauguucagcggucaguaaaggcuauuugagcgcuuuaagaacugggugguacaccuccguuauuacaaucgaacugucuaacauuaaggagaauaaaugcaacggaaccgacgccaaggugaaacuaaucaagcaggaacucgauaaguauaaaaaugcaguaacugagcugcagaugcuuauguguucgaccccugccgcugguucaggcagcgcaauagccagugggaucgcugugugcaagguccugcacuuggagggagaagugaacaaaauuaagaaugcccuccuguccacaaacaaagcgguugugucucugagcaauggcgucuccgugcucacguucaagguauuagaccugaagaacuacaucgauaaacagcuuuugccaauucugaauaagcaaucauguaguaucagcaacauagagacuguuauggaauuucagcagaaaaauaacaggcuacucgagauuacccgggaguucucugugaaugccggugucacaacuccgguguccaccuauaugcugacaaacucagaacuucugagcuugaucaacgacaugcccauuaccaaugaucagaagaaacucaugaguaacaaugugcaaaucguccgccagcagucuuacuccaucaugugcauuauaaaggaggaaguucuggcauaugugguacaguuaccucuguacggggugaucgacacgccauguuggaaacuccauacuagcccccuuugcacaaccaacacuaaggagggaucgaauauuugucugacacgaaccgaucguggcugguacugcgacaacgcuggcucugucuccuuuuucccucaagccgaaacguguaaggugugcucaaauagaguguuuugcgauaccaugaacaguuugacacuaccaagcgagguuaaucuguguaacaucgacauauucaaucccaaauaugauugcaagauuaugacuuccaaaaccgacgucucuagcucagugaucacaagucucggggcaaucguauccuguuacggaaagacuaaaugcaccgcuagcaacaagaauaaggguauuaucaaaacauuuucuaacggcugugauuauguuucaaauaaggggguggacaccgucagugugggaaacacucuguacuaugucaacaaacaggagggcaagagccuuuacgugaaaggugaaccuauuauaaauuucuaugacccacugguuuuuccguccgaugaguucgacgccucuaucagccaggugaacgaaaagauuaaucaaucguuggcguuuaucaggaaguccgaugagcuccugcacaacguaaaugucgggaaaucaacgacaaacaucaugauuaccacuauaaucauugugaucauuguuaucuuacugcuacucauagccgugggacuguuccuuuacugcaaggcacgguga

SEQ ID NO: 18742 - RNA, 1545 nt, Artificial Sequence
  derived and/or modified CDS sequence (opt4) from HRSV(Memphis-37)__AIY60640.1__F-del_DSCav1_mut7
auggagcugcccauccugaagaccaacgccaucaccaccauccuggccgccgugacccugugcuucgccagcagccagaacaucaccgaggaguucuaccagagcaccugcagcgccgugagcaagggcuaccugagcgcccugagaaccggcugguacaccagcgugaucaccaucgagcugagcaacaucaaggagaacaagugcaacggcaccgacgccaaggugaagcugaucaagcaggagcuggacaaguacaagaacgccgugaccgagcugcagaugcugaugugcagcacccccgccgccggcagcggcagcgccaucgccagcggcaucgccgugugcaaggugcugcaccuggagggcgaggugaacaagaucaagaacgcccugcugagcaccaacaaggccguggugagccugagcaacggcgugagcgugcugaccuucaaggugcuggaccugaagaacuacaucgacaagcagcugcugcccauccugaacaagcagagcugcagcaucagcaacaucgagaccgugauggaguuccagcagaagaacaacagacugcuggagaucaccagagaguucagcgugaacgccggcgugaccacccccgugagcaccuacaugcugaccaacagcgagcugcugagccugaucaacgacaugcccaucaccaacgaccagaagaagcugaugagcaacaacgugcagaucgugagacagcagagcuacagcaucaugugcaucaucaaggaggaggugcuggccuacguggugcagcugccccuguacggcgugaucgacacccccugcuggaagcugcacaccagcccccugugcaccaccaacaccaaggagggcagcaacaucugccugaccagaaccgacagaggcugguacugcgacaacgccggcagcgugagcuucuucccccaggccgagaccugcaaggugugcagcaacagaguguucugcgacaccaugaacagccugacccugcccagcgaggugaaccugugcaacaucgacaucuucaaccccaaguacgacugcaagaucaugaccagcaagaccgacgugagcagcagcgugaucaccagccugggcgccaucgugagcugcuacggcaagaccaagugcaccgccagcaacaagaacaagggcaucaucaagaccuucagcaacggcugcgacuacgugagcaacaagggcguggacaccgugagcgugggcaacacccuguacuacgugaacaagcaggagggcaagagccuguacgugaagggcgagcccaucaucaacuucuacgacccccugguguuccccagcgacgaguucgacgccagcaucagccaggugaacgagaagaucaaccagagccuggccuucaucagaaagagcgacgagcugcugcacaacgugaacgugggcaagagcaccaccaacaucaugaucaccaccaucaucaucgugaucaucgugauccugcugcugcugaucgccgugggccuguuccuguacugcaaggccagauga

SEQ ID NO: 18743 - RNA, 1545 nt, Artificial Sequence
  derived and/or modified CDS sequence (opt5) from HRSV(Memphis-37)__AIY60640.1__F-del_DSCav1_mut7
auggagcugcccauccucaagaccaacgccauuacaacgauccuggcugccgugacccuuugcuucgcgagcucccagaauauuacagaagaguuuuaccaaucuaccuguagcgcugucuccaaaggcuaucugucugcccucagaacagggugguacaccagcguuaucacaauugaacuguccaacaucaaggagaauaaaugcaacggaaccgacgccaaggugaaacuuaucaagcaggaacuggauaaguauaaaaaugcugugacggagcuccagaugcugauguguucuaccccugccgcuggcagcggguccgccauugcgagcggaaucgccgucugcaaggugcugcaccucgagggcgaaguuaacaaaauuaagaaugcucugcuuucuacaaacaaagccguggucucccugagcaauggggugucuguucucaccuucaaggugcuggaccuuaagaacuacaucgauaaacagcugcucccgauucugaauaagcaauccuguagcaucucuaacauugagacagucauggaauuucagcagaaaaauaaccggcugcucgagaucacccgcgaguucuccgugaaugcuggagugacgacacccgucagcaccuauaugcugacaaacuccgaacuucugucucucaucaacgacaugccuauuaccaaugaucagaagaaacugaugagcaacaauguucaaaucgugagacagcaguccuacagcauuaugugcaucauuaaggaggaagugcuugccuaugucgugcagcugccccucuacggcguuaucgacaccccuuguuggaaacugcauacaucuccccugugcacgaccaacacaaaggagggcuccaauaucugucucacccggacagaucgcgggugguacugcgacaacgcgggaagcgugagcuuuuucccucaagccgaaaccuguaaggucugcucuaauagaguguuuugcgauacgaugaacucccugacacuuccgucugagguuaaucuguguaacauugacaucuucaaucccaaauaugauugcaagauuaugaccagcaaaaccgacguguccagcucugucaucacaucccucggcgcuauugugagcuguuacgggaagaccaaaugcacagccucuaacaagaauaagggaaucaucaaaacguuuuccaacggcugugauuaugucagcaauaaggggguggacaccguuuccgugggaaacacacuguacuaugucaacaaacaggagggcaagucucuuuacgugaaaggcgaaccuauuaucaauuucuaugacccccugguuuuuccuagcgaugaguucgacgcuuccauuucucaggugaacgaaaagaucaaucaaagccucgccuuuauucggaaguccgaugagcugcugcacaacgucaauguggggaaaagcaccacaaacaucaugauuaccacgaucaucauugugaucauuguuauccuccugcuucugauugccgucggacucuuccuguacugcaaggcucgcuga

SEQ ID NO: 18744 - RNA, 1545 nt, Artificial Sequence
  derived and/or modified CDS sequence (opt6) from HRSV(Memphis-37)__AIY60640.1__F-del_DSCav1_mut7
auggaacuaccaauacucaaaacaaacgccauaaccacaauacuagccgcaguaacacuuugcuuugccucaagucaaaacauaacagaagaauuuuaccaauccacaugcucagcuguauccaaaggauauuuauccgcacuaagaacaggaugguacacaucaguaaucacaauagaauuaucaaacauaaaagaaaacaaauguaauggcacagacgccaaaguaaaacuaauuaaacaagaacuagacaaauauaaaaaugcaguaaccgaacuccaaaugcucaugugcucuacaccagcugcaggaucaggaucagccauugcaagcgguauagcuguuugcaaaguauuacacuuagaaggagaaguaaauaaaauaaaaaacgcacuacuaucaacaaauaaagcaguaguaucccuaucaaacggaguaucaguacuuacauucaaaguauuagauuuaaaaaacuauauagacaaacaacuacuucccauauuaaacaaacaaucaugcucaauuuccaacauugaaacuguaauggaauuucaacaaaaaaacaacagacuacuugaaaucacacgagaauuuucaguaaacgcuggaguaacaacaccugucucuaccuacaugcucacaaauagcgaauuacuaucucuaaucaaugacaugccaauaacaaacgaucaaaaaaaacuaauguccaacaacguacaaauaguaagacaacaauccuauucaauaaugugcauaauaaaagaagaagucuuagcauacguuguacaacuaccauuauacggaguaauagauacaccaugcuggaaacuccacacaagcccccucugcacaacaaacaccaaagaagggucaaacauaugcuuaacaagaacagacagaggaugguacugugauaacgcaggaucugucucauucuuuccacaagcagaaacauguaaaguaugcuccaacagagucuuuugcgacaccaugaacucacuaaccuuacccucagaaguaaaccugugcaacaucgauaucuucaaccccaaauacgauugcaaaaucaugacaagcaaaacugauguauccagcucuguaauaacaucacuaggugcaauaguaucaugcuacggaaaaacaaaaugcacagcuucuaacaaaaauaaaggaauaauaaaaacauucuccaauggaugcgacuaugucucaaauaaaggaguagauacaguuucagucggcaacacacucuauuauguaaauaaacaagaaggaaaaucauuauacguaaaaggagaacccauaauaaacuucuacgacccccucguauucccaagcgacgaauuugacgccucaauaucacaaguaaacgaaaaaauaaaccaaucacucgcauucaucagaaaaucagaugaacuacuacacaauguaaacgucggaaaauccaccacaaauauaaugauaacuaccaucauaauaguaauaauagucaucuuacuacuauuaaucgcuguaggacuauuucucuacugcaaggccagauaa

SEQ ID NO: 18745 - RNA, 1545 nt, Artificial Sequence
  derived and/or modified CDS sequence (opt11) from HRSV(Memphis-37)__AIY60640.1__F-del_DSCav1_mut7
auggaacucccaauccucaaaacaaaugccaucaccaccauccuagccgcugucacacuaugcuucgccuccucacaaaacaucaccgaagaguucuaucaauccacaugcuccgccgucagcaagggauaccucuccgcccuuagaaccggcugguacaccucagucaucacaauugaacugucaaacaucaaagaaaacaaaugcaacggcaccgacgcaaaaguaaagcucaucaaacaagaacuggacaaguacaagaacgccgucaccgaacuacagaugcuuaugugcucaaccccugccgccggcuccggaucugccauagcuucaggcaucgccguaugcaaaguccugcaccuagaaggggaagucaacaaaaucaaaaacgcccuccucuccaccaacaaggccguugucucccugucaaacggagucuccguccuaaccuucaaaguccucgaccucaaaaacuacauagacaaacaacuccuacccauccucaacaaacaaagcugcucaauauccaacaucgaaaccgucauggaguuccaacaaaagaacaaccgacuacucgaaauaacacgcgaguucucagucaacgccggcgucaccaccccagucuccacauacaugcucaccaacuccgaacuccuaucgcucaucaacgacaugcccaucaccaaugaccagaagaaacucauguccaacaacguacaaaucguccgccaacaguccuacucaaucaugugcaucaucaaagaagaaguccuugccuacgucguccagcuuccacucuacggagucaucgacacccccugcuggaaacuccacaccuccccacuaugcaccaccaacaccaaagaaggauccaacauaugccucacccguacugaccgcggcugguacugcgacaacgccggauccgucucauucuucccccaggccgaaaccugcaaagucugcuccaaccgcgucuucugcgacaccaugaacucgcucacccucccauccgaagucaaucuaugcaacaucgacauuuucaaccccaaauacgacugcaaaauuaugacaucaaaaaccgacgucucauccucagucaucacuucccucggcgcaaucguaagcugcuacgggaaaacaaagugcaccgcuuccaacaaaaacaaaggcaucaucaaaaccuucucuaacggcugcgacuacgucuccaacaaaggagucgacaccguauccgucggcaacacccucuacuacgucaacaaacaggaaggaaaaucgcucuacgucaaaggagaaccaaucaucaacuucuacgacccccuagucuucccauccgacgaguucgacgccagcaucucacaagucaaugaaaagaucaaccagucacucgcauucauccguaagucagacgaacuccuacacaacgucaacgucggcaagucaacaaccaacauaaugaucaccaccauaaucaucgucauaauaguaauccuccuucuccuaaucgcagucggccucuuccucuacugcaaagcacgcuaa

SEQ ID NO: 18746 - RNA, 1821 nt, Artificial Sequence
  mRNA product Design a-1 comprising derived and/or modified sequence from HRSV(Memphis-37)__AIY60640.1__F-del_DSCav1_mut7 (opt1)
gggagagucccgcagucggcguccagcggcucugcuuguucgugugugugucguugcaggccuuauucaagcuuaccauggagcugcccauccucaagaccaacgccaucaccacgauccuggccgcggugacccugugcuucgccagcucccagaacaucaccgaggaguucuaccagagcacgugcuccgccgucagcaagggcuaccucuccgcccugcgcaccgggugguacaccagcgugaucaccaucgagcuguccaacaucaaggagaacaagugcaacggcaccgacgccaaggugaagcucaucaagcaggagcuggacaaguacaagaacgcggucacggagcugcagaugcugaugugcagcaccccggccgccggcuccgggagcgcgaucgccuccggcaucgccgucugcaaggugcugcaccucgagggcgaggugaacaagaucaagaacgcccugcuguccaccaacaaggccgucgugagccucuccaacggggugagcguccugaccuucaaggugcuggaccucaagaacuacaucgacaagcagcugcugcccauccugaacaagcagagcugcuccaucagcaacaucgagaccgucauggaguuccagcagaagaacaaccgccuccuggagaucacgcgggaguucagcgugaacgcgggcgugaccacccccgucuccaccuacaugcugacgaacagcgagcuccugucccugaucaacgacaugccgaucaccaacgaccagaagaagcucaugagcaacaacgugcagaucgugcgccagcaguccuacagcaucaugugcaucaucaaggaggagguccuggccuacguggugcagcugccccucuacggggucaucgacacccccugcuggaagcugcacaccagcccccugugcacgaccaacaccaaggagggcuccaacaucugccucacccggacggaccgcgggugguacugcgacaacgccggcagcguguccuucuucccgcaggccgagaccugcaaggucugcagcaaccggguguucugcgacaccaugaacucccugacccugcccagcgaggugaaccucugcaacaucgacaucuucaaccccaaguacgacugcaagaucaugacguccaagaccgacgucagcuccagcgugaucaccucccugggcgccaucgugagcugcuacgggaagaccaagugcacggcgagcaacaagaacaagggcaucaucaagaccuucuccaacgggugcgacuacgucagcaacaagggcguggacaccguguccgucggcaacacccuguacuacgugaacaagcaggagggcaagagccucuacgugaagggggagcccaucaucaacuucuacgacccgcuggucuuccccuccgacgaguucgacgccagcaucucccaggugaacgagaagaucaaccagagccuggccuucauccggaaguccgacgagcuccugcacaacgugaacgucggcaagagcaccacgaacaucaugaucaccaccaucaucaucgugaucaucgugauccugcugcuccugaucgccgucgggcuguuccucuacugcaaggcccgcugaggacuagucccuguucccagagcccacuuuuuuuucuuuuuuugaaauaaaauagccugucuuucagaucuaaaaaaaaaaaaaaaaaaaaaaaaaaaaaaaaaaaaaaaaaaaaaaaaaaaaaaaaaaaaaaaaugcaucccccccccccccccccccccccccccccccaaaggcucuuuucagagccaccagaauu

SEQ ID NO: 18747 - RNA, 1821 nt, Artificial Sequence
  mRNA product Design a-1 comprising derived and/or modified sequence from HRSV(Memphis-37)__AIY60640.1__F-del_DSCav1_mut7 (opt1)
gggagagucccgcagucggcguccagcggcucugcuuguucgugugugugucguugcaggccuuauucaagcuuaccauggagcugcccauccucaagaccaacgccaucaccacgauccuggccgcggugacccugugcuucgccagcucccagaacaucaccgaggaguucuaccagagcacgugcuccgccgucagcaagggguaccucuccgcccugcgcaccgggugguacaccagcgugaucaccaucgagcuguccaacaucaaggagaacaagugcaacggcaccgacgccaaggugaagcucaucaagcaggagcuggacaaguacaagaacgcggucacggagcugcagaugcucaugugcagcaccccggccgccggguccggcagcgccaucgcguccgggaucgccgugugcaaggugcugcaccuggagggcgaggucaacaagaucaagaacgcccuccugagcaccaacaaggccguggugucccugagcaacggcgucuccgugcucaccuucaaggugcuggaccugaagaacuacaucgacaagcagcuccugcccauccugaacaagcagagcugcuccaucagcaacaucgagacggucauggaguuccagcagaagaacaaccggcuccuggagaucacccgcgaguucuccgugaacgccggggugaccacccccgucagcacguacaugcugaccaacagcgagcuccugucccugaucaacgacaugcccaucaccaacgaccagaagaagcucaugagcaacaacgugcagaucgugcggcagcaguccuacagcaucaugugcaucaucaaggaggagguccuggcguacguggugcagcugccgcucuacggcgucaucgacacccccugcuggaagcugcacacgagcccccugugcaccaccaacaccaaggaggggagcaacaucugccucacgcgcaccgaccggggcugguacugcgacaacgccggguccgugagcuucuucccccaggccgagaccugcaaggugugcuccaaccgcgucuucugcgacaccaugaacagccugacgcugccguccgaggugaaccucugcaacaucgacaucuucaaccccaaguacgacugcaagaucaugaccagcaagaccgacgucuccagcuccgugaucaccagccugggcgccaucguguccugcuacggcaagacgaagugcaccgccagcaacaagaacaaggggaucaucaagaccuucuccaacggcugcgacuacgucagcaacaaggggguggacaccgugagcgucggcaacacgcuguacuacgugaacaagcaggagggcaagucccucuacgugaagggggagcccaucaucaacuucuacgacccccuggucuucccgagcgacgaguucgacgcguccaucagccaggugaacgagaagaucaaccagucccuggccuucauccggaaguccgacgagcuccugcacaacgugaacgucggcaaguccaccaccaacaucaugaucaccaccaucaucaucgugaucaucgugauccugcuccugcugaucgccgucggccucuuccuguacugcaaggcccgcugaggacuagucccuguucccagagcccacuuuuuuuucuuuuuuugaaauaaaauagccugucuuucagaucuaaaaaaaaaaaaaaaaaaaaaaaaaaaaaaaaaaaaaaaaaaaaaaaaaaaaaaaaaaaaaaaaugcaucccccccccccccccccccccccccccccccaaaggcucuuuucagagccaccagaauu

SEQ ID NO: 18748 - RNA, 1821 nt, Artificial Sequence
  mRNA product Design a-1 comprising derived and/or modified sequence from HRSV(Memphis-37)__AIY60640.1__F-del_DSCav1_mut7 (opt2)
gggagagucccgcagucggcguccagcggcucugcuuguucgugugugugucguugcaggccuuauucaagcuuaccauggagcuccccauccucaagaccaacgccaucaccaccauccucgccgccgucacccucugcuucgccuccucccagaacaucaccgaggaguucuaccaguccaccugcuccgccgucuccaagggcuaccucuccgcccuccgcaccggcugguacaccuccgucaucaccaucgagcucuccaacaucaaggagaacaagugcaacggcaccgacgccaaggucaagcucaucaagcaggagcucgacaaguacaagaacgccgucaccgagcuccagaugcucaugugcuccacccccgccgccggcuccggcuccgccaucgccuccggcaucgccgucugcaagguccuccaccucgagggcgaggucaacaagaucaagaacgcccuccucuccaccaacaaggccgucgucucccucuccaacggcgucuccguccucaccuucaagguccucgaccucaagaacuacaucgacaagcagcuccuccccauccucaacaagcaguccugcuccaucuccaacaucgagaccgucauggaguuccagcagaagaacaaccgccuccucgagaucacccgcgaguucuccgucaacgccggcgucaccacccccgucuccaccuacaugcucaccaacuccgagcuccucucccucaucaacgacaugcccaucaccaacgaccagaagaagcucauguccaacaacguccagaucguccgccagcaguccuacuccaucaugugcaucaucaaggaggagguccucgccuacgucguccagcucccccucuacggcgucaucgacacccccugcuggaagcuccacaccuccccccucugcaccaccaacaccaaggagggcuccaacaucugccucacccgcaccgaccgcggcugguacugcgacaacgccggcuccgucuccuucuucccccaggccgagaccugcaaggucugcuccaaccgcgucuucugcgacaccaugaacucccucacccuccccuccgaggucaaccucugcaacaucgacaucuucaaccccaaguacgacugcaagaucaugaccuccaagaccgacgucuccuccuccgucaucaccucccucggcgccaucgucuccugcuacggcaagaccaagugcaccgccuccaacaagaacaagggcaucaucaagaccuucuccaacggcugcgacuacgucuccaacaagggcgucgacaccgucuccgucggcaacacccucuacuacgucaacaagcaggagggcaagucccucuacgucaagggcgagcccaucaucaacuucuacgacccccucgucuuccccuccgacgaguucgacgccuccaucucccaggucaacgagaagaucaaccagucccucgccuucauccgcaaguccgacgagcuccuccacaacgucaacgucggcaaguccaccaccaacaucaugaucaccaccaucaucaucgucaucaucgucauccuccuccuccucaucgccgucggccucuuccucuacugcaaggcccgcugaggacuagucccuguucccagagcccacuuuuuuuucuuuuuuugaaauaaaauagccugucuuucagaucuaaaaaaaaaaaaaaaaaaaaaaaaaaaaaaaaaaaaaaaaaaaaaaaaaaaaaaaaaaaaaaaaugcaucccccccccccccccccccccccccccccccaaaggcucuuuucagagccaccagaauu

SEQ ID NO: 18749 - RNA, 1821 nt, Artificial Sequence
  mRNA product Design a-1 comprising derived and/or modified sequence from HRSV(Memphis-37)__AIY60640.1__F-del_DSCav1_mut7 (opt3)
gggagagucccgcagucggcguccagcggcucugcuuguucgugugugugucguugcaggccuuauucaagcuuaccauggagcugcccauccucaagaccaacgccauuacaacuauacuugcugcagugacgcugugcuucgccagcucccagaauaucaccgaagaguuuuaccaaucuacauguucagcggucaguaaaggcuauuugagcgcuuuaagaacugggugguacaccuccguuauuacaaucgaacugucuaacauuaaggagaauaaaugcaacggaaccgacgccaaggugaaacuaaucaagcaggaacucgauaaguauaaaaaugcaguaacugagcugcagaugcuuauguguucgaccccugccgcugguucaggcagcgcaauagccagugggaucgcugugugcaagguccugcacuuggagggagaagugaacaaaauuaagaaugcccuccuguccacaaacaaagcgguugugucucugagcaauggcgucuccgugcucacguucaagguauuagaccugaagaacuacaucgauaaacagcuuuugccaauucugaauaagcaaucauguaguaucagcaacauagagacuguuauggaauuucagcagaaaaauaacaggcuacucgagauuacccgggaguucucugugaaugccggugucacaacuccgguguccaccuauaugcugacaaacucagaacuucugagcuugaucaacgacaugcccauuaccaaugaucagaagaaacucaugaguaacaaugugcaaaucguccgccagcagucuuacuccaucaugugcauuauaaaggaggaaguucuggcauaugugguacaguuaccucuguacggggugaucgacacgccauguuggaaacuccauacuagcccccuuugcacaaccaacacuaaggagggaucgaauauuugucugacacgaaccgaucguggcugguacugcgacaacgcuggcucugucuccuuuuucccucaagccgaaacguguaaggugugcucaaauagaguguuuugcgauaccaugaacaguuugacacuaccaagcgagguuaaucuguguaacaucgacauauucaaucccaaauaugauugcaagauuaugacuuccaaaaccgacgucucuagcucagugaucacaagucucggggcaaucguauccuguuacggaaagacuaaaugcaccgcuagcaacaagaauaaggguauuaucaaaacauuuucuaacggcugugauuauguuucaaauaaggggguggacaccgucagugugggaaacacucuguacuaugucaacaaacaggagggcaagagccuuuacgugaaaggugaaccuauuauaaauuucuaugacccacugguuuuuccguccgaugaguucgacgccucuaucagccaggugaacgaaaagauuaaucaaucguuggcguuuaucaggaaguccgaugagcuccugcacaacguaaaugucgggaaaucaacgacaaacaucaugauuaccacuauaaucauugugaucauuguuaucuuacugcuacucauagccgugggacuguuccuuuacugcaaggcacggugaggacuagucccuguucccagagcccacuuuuuuuucuuuuuuugaaauaaaauagccugucuuucagaucuaaaaaaaaaaaaaaaaaaaaaaaaaaaaaaaaaaaaaaaaaaaaaaaaaaaaaaaaaaaaaaaaugcaucccccccccccccccccccccccccccccccaaaggcucuuuucagagccaccagaauu

SEQ ID NO: 18750 - RNA, 1821 nt, Artificial Sequence
  mRNA product Design a-1 comprising derived and/or modified sequence from HRSV(Memphis-37)__AIY60640.1__F-del_DSCav1_mut7 (opt4)
gggagagucccgcagucggcguccagcggcucugcuuguucgugugugugucguugcaggccuuauucaagcuuaccauggagcugcccauccugaagaccaacgccaucaccaccauccuggccgccgugacccugugcuucgccagcagccagaacaucaccgaggaguucuaccagagcaccugcagcgccgugagcaagggcuaccugagcgcccugagaaccggcugguacaccagcgugaucaccaucgagcugagcaacaucaaggagaacaagugcaacggcaccgacgccaaggugaagcugaucaagcaggagcuggacaaguacaagaacgccgugaccgagcugcagaugcugaugugcagcacccccgccgccggcagcggcagcgccaucgccagcggcaucgccgugugcaaggugcugcaccuggagggcgaggugaacaagaucaagaacgcccugcugagcaccaacaaggccguggugagccugagcaacggcgugagcgugcugaccuucaaggugcuggaccugaagaacuacaucgacaagcagcugcugcccauccugaacaagcagagcugcagcaucagcaacaucgagaccgugauggaguuccagcagaagaacaacagacugcuggagaucaccagagaguucagcgugaacgccggcgugaccacccccgugagcaccuacaugcugaccaacagcgagcugcugagccugaucaacgacaugcccaucaccaacgaccagaagaagcugaugagcaacaacgugcagaucgugagacagcagagcuacagcaucaugugcaucaucaaggaggaggugcuggccuacguggugcagcugccccuguacggcgugaucgacacccccugcuggaagcugcacaccagcccccugugcaccaccaacaccaaggagggcagcaacaucugccugaccagaaccgacagaggcugguacugcgacaacgccggcagcgugagcuucuucccccaggccgagaccugcaaggugugcagcaacagaguguucugcgacaccaugaacagccugacccugcccagcgaggugaaccugugcaacaucgacaucuucaaccccaaguacgacugcaagaucaugaccagcaagaccgacgugagcagcagcgugaucaccagccugggcgccaucgugagcugcuacggcaagaccaagugcaccgccagcaacaagaacaagggcaucaucaagaccuucagcaacggcugcgacuacgugagcaacaagggcguggacaccgugagcgugggcaacacccuguacuacgugaacaagcaggagggcaagagccuguacgugaagggcgagcccaucaucaacuucuacgacccccugguguuccccagcgacgaguucgacgccagcaucagccaggugaacgagaagaucaaccagagccuggccuucaucagaaagagcgacgagcugcugcacaacgugaacgugggcaagagcaccaccaacaucaugaucaccaccaucaucaucgugaucaucgugauccugcugcugcugaucgccgugggccuguuccuguacugcaaggccagaugaggacuagucccuguucccagagcccacuuuuuuuucuuuuuuugaaauaaaauagccugucuuucagaucuaaaaaaaaaaaaaaaaaaaaaaaaaaaaaaaaaaaaaaaaaaaaaaaaaaaaaaaaaaaaaaaaugcaucccccccccccccccccccccccccccccccaaaggcucuuuucagagccaccagaauu

SEQ ID NO: 18751 - RNA, 1821 nt, Artificial Sequence
  mRNA product Design a-1 comprising derived and/or modified sequence from HRSV(Memphis-37)__AIY60640.1__F-del_DSCav1_mut7 (opt5)
gggagagucccgcagucggcguccagcggcucugcuuguucgugugugugucguugcaggccuuauucaagcuuaccauggagcugcccauccucaagaccaacgccauuacaacgauccuggcugccgugacccuuugcuucgcgagcucccagaauauuacagaagaguuuuaccaaucuaccuguagcgcugucuccaaaggcuaucugucugcccucagaacagggugguacaccagcguuaucacaauugaacuguccaacaucaaggagaauaaaugcaacggaaccgacgccaaggugaaacuuaucaagcaggaacuggauaaguauaaaaaugcugugacggagcuccagaugcugauguguucuaccccugccgcuggcagcggguccgccauugcgagcggaaucgccgucugcaaggugcugcaccucgagggcgaaguuaacaaaauuaagaaugcucugcuuucuacaaacaaagccguggucucccugagcaauggggugucuguucucaccuucaaggugcuggaccuuaagaacuacaucgauaaacagcugcucccgauucugaauaagcaauccuguagcaucucuaacauugagacagucauggaauuucagcagaaaaauaaccggcugcucgagaucacccgcgaguucuccgugaaugcuggagugacgacacccgucagcaccuauaugcugacaaacuccgaacuucugucucucaucaacgacaugccuauuaccaaugaucagaagaaacugaugagcaacaauguucaaaucgugagacagcaguccuacagcauuaugugcaucauuaaggaggaagugcuugccuaugucgugcagcugccccucuacggcguuaucgacaccccuuguuggaaacugcauacaucuccccugugcacgaccaacacaaaggagggcuccaauaucugucucacccggacagaucgcgggugguacugcgacaacgcgggaagcgugagcuuuuucccucaagccgaaaccuguaaggucugcucuaauagaguguuuugcgauacgaugaacucccugacacuuccgucugagguuaaucuguguaacauugacaucuucaaucccaaauaugauugcaagauuaugaccagcaaaaccgacguguccagcucugucaucacaucccucggcgcuauugugagcuguuacgggaagaccaaaugcacagccucuaacaagaauaagggaaucaucaaaacguuuuccaacggcugugauuaugucagcaauaaggggguggacaccguuuccgugggaaacacacuguacuaugucaacaaacaggagggcaagucucuuuacgugaaaggcgaaccuauuaucaauuucuaugacccccugguuuuuccuagcgaugaguucgacgcuuccauuucucaggugaacgaaaagaucaaucaaagccucgccuuuauucggaaguccgaugagcugcugcacaacgucaauguggggaaaagcaccacaaacaucaugauuaccacgaucaucauugugaucauuguuauccuccugcuucugauugccgucggacucuuccuguacugcaaggcucgcugaggacuagucccuguucccagagcccacuuuuuuuucuuuuuuugaaauaaaauagccugucuuucagaucuaaaaaaaaaaaaaaaaaaaaaaaaaaaaaaaaaaaaaaaaaaaaaaaaaaaaaaaaaaaaaaaaugcaucccccccccccccccccccccccccccccccaaaggcucuuuucagagccaccagaauu

SEQ ID NO: 18752 - RNA, 1821 nt, Artificial Sequence
  mRNA product Design a-1 comprising derived and/or modified sequence from HRSV(Memphis-37)__AIY60640.1__F-del_DSCav1_mut7 (opt6)
gggagagucccgcagucggcguccagcggcucugcuuguucgugugugugucguugcaggccuuauucaagcuuaccauggaacuaccaauacucaaaacaaacgccauaaccacaauacuagccgcaguaacacuuugcuuugccucaagucaaaacauaacagaagaauuuuaccaauccacaugcucagcuguauccaaaggauauuuauccgcacuaagaacaggaugguacacaucaguaaucacaauagaauuaucaaacauaaaagaaaacaaauguaauggcacagacgccaaaguaaaacuaauuaaacaagaacuagacaaauauaaaaaugcaguaaccgaacuccaaaugcucaugugcucuacaccagcugcaggaucaggaucagccauugcaagcgguauagcuguuugcaaaguauuacacuuagaaggagaaguaaauaaaauaaaaaacgcacuacuaucaacaaauaaagcaguaguaucccuaucaaacggaguaucaguacuuacauucaaaguauuagauuuaaaaaacuauauagacaaacaacuacuucccauauuaaacaaacaaucaugcucaauuuccaacauugaaacuguaauggaauuucaacaaaaaaacaacagacuacuugaaaucacacgagaauuuucaguaaacgcuggaguaacaacaccugucucuaccuacaugcucacaaauagcgaauuacuaucucuaaucaaugacaugccaauaacaaacgaucaaaaaaaacuaauguccaacaacguacaaauaguaagacaacaauccuauucaauaaugugcauaauaaaagaagaagucuuagcauacguuguacaacuaccauuauacggaguaauagauacaccaugcuggaaacuccacacaagcccccucugcacaacaaacaccaaagaagggucaaacauaugcuuaacaagaacagacagaggaugguacugugauaacgcaggaucugucucauucuuuccacaagcagaaacauguaaaguaugcuccaacagagucuuuugcgacaccaugaacucacuaaccuuacccucagaaguaaaccugugcaacaucgauaucuucaaccccaaauacgauugcaaaaucaugacaagcaaaacugauguauccagcucuguaauaacaucacuaggugcaauaguaucaugcuacggaaaaacaaaaugcacagcuucuaacaaaaauaaaggaauaauaaaaacauucuccaauggaugcgacuaugucucaaauaaaggaguagauacaguuucagucggcaacacacucuauuauguaaauaaacaagaaggaaaaucauuauacguaaaaggagaacccauaauaaacuucuacgacccccucguauucccaagcgacgaauuugacgccucaauaucacaaguaaacgaaaaaauaaaccaaucacucgcauucaucagaaaaucagaugaacuacuacacaauguaaacgucggaaaauccaccacaaauauaaugauaacuaccaucauaauaguaauaauagucaucuuacuacuauuaaucgcuguaggacuauuucucuacugcaaggccagauaaggacuagucccuguucccagagcccacuuuuuuuucuuuuuuugaaauaaaauagccugucuuucagaucuaaaaaaaaaaaaaaaaaaaaaaaaaaaaaaaaaaaaaaaaaaaaaaaaaaaaaaaaaaaaaaaaugcaucccccccccccccccccccccccccccccccaaaggcucuuuucagagccaccagaauu

SEQ ID NO: 18753 - RNA, 1821 nt, Artificial Sequence
  mRNA product Design a-1 comprising derived and/or modified sequence from HRSV(Memphis-37)__AIY60640.1__F-del_DSCav1_mut7 (opt11)
gggagagucccgcagucggcguccagcggcucugcuuguucgugugugugucguugcaggccuuauucaagcuuaccauggaacucccaauccucaaaacaaaugccaucaccaccauccuagccgcugucacacuaugcuucgccuccucacaaaacaucaccgaagaguucuaucaauccacaugcuccgccgucagcaagggauaccucuccgcccuuagaaccggcugguacaccucagucaucacaauugaacugucaaacaucaaagaaaacaaaugcaacggcaccgacgcaaaaguaaagcucaucaaacaagaacuggacaaguacaagaacgccgucaccgaacuacagaugcuuaugugcucaaccccugccgccggcuccggaucugccauagcuucaggcaucgccguaugcaaaguccugcaccuagaaggggaagucaacaaaaucaaaaacgcccuccucuccaccaacaaggccguugucucccugucaaacggagucuccguccuaaccuucaaaguccucgaccucaaaaacuacauagacaaacaacuccuacccauccucaacaaacaaagcugcucaauauccaacaucgaaaccgucauggaguuccaacaaaagaacaaccgacuacucgaaauaacacgcgaguucucagucaacgccggcgucaccaccccagucuccacauacaugcucaccaacuccgaacuccuaucgcucaucaacgacaugcccaucaccaaugaccagaagaaacucauguccaacaacguacaaaucguccgccaacaguccuacucaaucaugugcaucaucaaagaagaaguccuugccuacgucguccagcuuccacucuacggagucaucgacacccccugcuggaaacuccacaccuccccacuaugcaccaccaacaccaaagaaggauccaacauaugccucacccguacugaccgcggcugguacugcgacaacgccggauccgucucauucuucccccaggccgaaaccugcaaagucugcuccaaccgcgucuucugcgacaccaugaacucgcucacccucccauccgaagucaaucuaugcaacaucgacauuuucaaccccaaauacgacugcaaaauuaugacaucaaaaaccgacgucucauccucagucaucacuucccucggcgcaaucguaagcugcuacgggaaaacaaagugcaccgcuuccaacaaaaacaaaggcaucaucaaaaccuucucuaacggcugcgacuacgucuccaacaaaggagucgacaccguauccgucggcaacacccucuacuacgucaacaaacaggaaggaaaaucgcucuacgucaaaggagaaccaaucaucaacuucuacgacccccuagucuucccauccgacgaguucgacgccagcaucucacaagucaaugaaaagaucaaccagucacucgcauucauccguaagucagacgaacuccuacacaacgucaacgucggcaagucaacaaccaacauaaugaucaccaccauaaucaucgucauaauaguaauccuccuucuccuaaucgcagucggccucuuccucuacugcaaagcacgcuaaggacuagucccuguucccagagcccacuuuuuuuucuuuuuuugaaauaaaauagccugucuuucagaucuaaaaaaaaaaaaaaaaaaaaaaaaaaaaaaaaaaaaaaaaaaaaaaaaaaaaaaaaaaaaaaaaugcaucccccccccccccccccccccccccccccccaaaggcucuuuucagagccaccagaauu

SEQ ID NO: 18754 - RNA, 1840 nt, Artificial Sequence
  mRNA product Design a-2 comprising derived and/or modified sequence from HRSV(Memphis-37)__AIY60640.1__F-del_DSCav1_mut7 (opt1)
gggagaguccgcucagccagguugcagaagcggcuuagcguguguccuaaucuucucucugcguguagguaggccugugccgcaaacaagcuuaccauggagcugcccauccucaagaccaacgccaucaccacgauccuggccgcggugacccugugcuucgccagcucccagaacaucaccgaggaguucuaccagagcacgugcuccgccgucagcaagggcuaccucuccgcccugcgcaccgggugguacaccagcgugaucaccaucgagcuguccaacaucaaggagaacaagugcaacggcaccgacgccaaggugaagcucaucaagcaggagcuggacaaguacaagaacgcggucacggagcugcagaugcugaugugcagcaccccggccgccggcuccgggagcgcgaucgccuccggcaucgccgucugcaaggugcugcaccucgagggcgaggugaacaagaucaagaacgcccugcuguccaccaacaaggccgucgugagccucuccaacggggugagcguccugaccuucaaggugcuggaccucaagaacuacaucgacaagcagcugcugcccauccugaacaagcagagcugcuccaucagcaacaucgagaccgucauggaguuccagcagaagaacaaccgccuccuggagaucacgcgggaguucagcgugaacgcgggcgugaccacccccgucuccaccuacaugcugacgaacagcgagcuccugucccugaucaacgacaugccgaucaccaacgaccagaagaagcucaugagcaacaacgugcagaucgugcgccagcaguccuacagcaucaugugcaucaucaaggaggagguccuggccuacguggugcagcugccccucuacggggucaucgacacccccugcuggaagcugcacaccagcccccugugcacgaccaacaccaaggagggcuccaacaucugccucacccggacggaccgcgggugguacugcgacaacgccggcagcguguccuucuucccgcaggccgagaccugcaaggucugcagcaaccggguguucugcgacaccaugaacucccugacccugcccagcgaggugaaccucugcaacaucgacaucuucaaccccaaguacgacugcaagaucaugacguccaagaccgacgucagcuccagcgugaucaccucccugggcgccaucgugagcugcuacgggaagaccaagugcacggcgagcaacaagaacaagggcaucaucaagaccuucuccaacgggugcgacuacgucagcaacaagggcguggacaccguguccgucggcaacacccuguacuacgugaacaagcaggagggcaagagccucuacgugaagggggagcccaucaucaacuucuacgacccgcuggucuuccccuccgacgaguucgacgccagcaucucccaggugaacgagaagaucaaccagagccuggccuucauccggaaguccgacgagcuccugcacaacgugaacgucggcaagagcaccacgaacaucaugaucaccaccaucaucaucgugaucaucgugauccugcugcuccugaucgccgucgggcuguuccucuacugcaaggcccgcugaggacuagucccuguucccagagcccacuuuuuuuucuuuuuuugaaauaaaauagccugucuuucagaucuaaaaaaaaaaaaaaaaaaaaaaaaaaaaaaaaaaaaaaaaaaaaaaaaaaaaaaaaaaaaaaaaugcaucccccccccccccccccccccccccccccccaaaggcucuuuucagagccaccagaauu

SEQ ID NO: 18755 - RNA, 1840 nt, Artificial Sequence
  mRNA product Design a-2 comprising derived and/or modified sequence from HRSV(Memphis-37)__AIY60640.1__F-del_DSCav1_mut7 (opt1)
gggagaguccgcucagccagguugcagaagcggcuuagcguguguccuaaucuucucucugcguguagguaggccugugccgcaaacaagcuuaccauggagcugcccauccucaagaccaacgccaucaccacgauccuggccgcggugacccugugcuucgccagcucccagaacaucaccgaggaguucuaccagagcacgugcuccgccgucagcaagggguaccucuccgcccugcgcaccgggugguacaccagcgugaucaccaucgagcuguccaacaucaaggagaacaagugcaacggcaccgacgccaaggugaagcucaucaagcaggagcuggacaaguacaagaacgcggucacggagcugcagaugcucaugugcagcaccccggccgccggguccggcagcgccaucgcguccgggaucgccgugugcaaggugcugcaccuggagggcgaggucaacaagaucaagaacgcccuccugagcaccaacaaggccguggugucccugagcaacggcgucuccgugcucaccuucaaggugcuggaccugaagaacuacaucgacaagcagcuccugcccauccugaacaagcagagcugcuccaucagcaacaucgagacggucauggaguuccagcagaagaacaaccggcuccuggagaucacccgcgaguucuccgugaacgccggggugaccacccccgucagcacguacaugcugaccaacagcgagcuccugucccugaucaacgacaugcccaucaccaacgaccagaagaagcucaugagcaacaacgugcagaucgugcggcagcaguccuacagcaucaugugcaucaucaaggaggagguccuggcguacguggugcagcugccgcucuacggcgucaucgacacccccugcuggaagcugcacacgagcccccugugcaccaccaacaccaaggaggggagcaacaucugccucacgcgcaccgaccggggcugguacugcgacaacgccggguccgugagcuucuucccccaggccgagaccugcaaggugugcuccaaccgcgucuucugcgacaccaugaacagccugacgcugccguccgaggugaaccucugcaacaucgacaucuucaaccccaaguacgacugcaagaucaugaccagcaagaccgacgucuccagcuccgugaucaccagccugggcgccaucguguccugcuacggcaagacgaagugcaccgccagcaacaagaacaaggggaucaucaagaccuucuccaacggcugcgacuacgucagcaacaaggggguggacaccgugagcgucggcaacacgcuguacuacgugaacaagcaggagggcaagucccucuacgugaagggggagcccaucaucaacuucuacgacccccuggucuucccgagcgacgaguucgacgcguccaucagccaggugaacgagaagaucaaccagucccuggccuucauccggaaguccgacgagcuccugcacaacgugaacgucggcaaguccaccaccaacaucaugaucaccaccaucaucaucgugaucaucgugauccugcuccugcugaucgccgucggccucuuccuguacugcaaggcccgcugaggacuagucccuguucccagagcccacuuuuuuuucuuuuuuugaaauaaaauagccugucuuucagaucuaaaaaaaaaaaaaaaaaaaaaaaaaaaaaaaaaaaaaaaaaaaaaaaaaaaaaaaaaaaaaaaaugcaucccccccccccccccccccccccccccccccaaaggcucuuuucagagccaccagaauu

SEQ ID NO: 18756 - RNA, 1840 nt, Artificial Sequence
  mRNA product Design a-2 comprising derived and/or modified sequence from HRSV(Memphis-37)__AIY60640.1__F-del_DSCav1_mut7 (opt2)
gggagaguccgcucagccagguugcagaagcggcuuagcguguguccuaaucuucucucugcguguagguaggccugugccgcaaacaagcuuaccauggagcuccccauccucaagaccaacgccaucaccaccauccucgccgccgucacccucugcuucgccuccucccagaacaucaccgaggaguucuaccaguccaccugcuccgccgucuccaagggcuaccucuccgcccuccgcaccggcugguacaccuccgucaucaccaucgagcucuccaacaucaaggagaacaagugcaacggcaccgacgccaaggucaagcucaucaagcaggagcucgacaaguacaagaacgccgucaccgagcuccagaugcucaugugcuccacccccgccgccggcuccggcuccgccaucgccuccggcaucgccgucugcaagguccuccaccucgagggcgaggucaacaagaucaagaacgcccuccucuccaccaacaaggccgucgucucccucuccaacggcgucuccguccucaccuucaagguccucgaccucaagaacuacaucgacaagcagcuccuccccauccucaacaagcaguccugcuccaucuccaacaucgagaccgucauggaguuccagcagaagaacaaccgccuccucgagaucacccgcgaguucuccgucaacgccggcgucaccacccccgucuccaccuacaugcucaccaacuccgagcuccucucccucaucaacgacaugcccaucaccaacgaccagaagaagcucauguccaacaacguccagaucguccgccagcaguccuacuccaucaugugcaucaucaaggaggagguccucgccuacgucguccagcucccccucuacggcgucaucgacacccccugcuggaagcuccacaccuccccccucugcaccaccaacaccaaggagggcuccaacaucugccucacccgcaccgaccgcggcugguacugcgacaacgccggcuccgucuccuucuucccccaggccgagaccugcaaggucugcuccaaccgcgucuucugcgacaccaugaacucccucacccuccccuccgaggucaaccucugcaacaucgacaucuucaaccccaaguacgacugcaagaucaugaccuccaagaccgacgucuccuccuccgucaucaccucccucggcgccaucgucuccugcuacggcaagaccaagugcaccgccuccaacaagaacaagggcaucaucaagaccuucuccaacggcugcgacuacgucuccaacaagggcgucgacaccgucuccgucggcaacacccucuacuacgucaacaagcaggagggcaagucccucuacgucaagggcgagcccaucaucaacuucuacgacccccucgucuuccccuccgacgaguucgacgccuccaucucccaggucaacgagaagaucaaccagucccucgccuucauccgcaaguccgacgagcuccuccacaacgucaacgucggcaaguccaccaccaacaucaugaucaccaccaucaucaucgucaucaucgucauccuccuccuccucaucgccgucggccucuuccucuacugcaaggcccgcugaggacuagucccuguucccagagcccacuuuuuuuucuuuuuuugaaauaaaauagccugucuuucagaucuaaaaaaaaaaaaaaaaaaaaaaaaaaaaaaaaaaaaaaaaaaaaaaaaaaaaaaaaaaaaaaaaugcaucccccccccccccccccccccccccccccccaaaggcucuuuucagagccaccagaauu

SEQ ID NO: 18757 - RNA, 1840 nt, Artificial Sequence
  mRNA product Design a-2 comprising derived and/or modified sequence from HRSV(Memphis-37)__AIY60640.1__F-del_DSCav1_mut7 (opt3)
gggagaguccgcucagccagguugcagaagcggcuuagcguguguccuaaucuucucucugcguguagguaggccugugccgcaaacaagcuuaccauggagcugcccauccucaagaccaacgccauuacaacuauacuugcugcagugacgcugugcuucgccagcucccagaauaucaccgaagaguuuuaccaaucuacauguucagcggucaguaaaggcuauuugagcgcuuuaagaacugggugguacaccuccguuauuacaaucgaacugucuaacauuaaggagaauaaaugcaacggaaccgacgccaaggugaaacuaaucaagcaggaacucgauaaguauaaaaaugcaguaacugagcugcagaugcuuauguguucgaccccugccgcugguucaggcagcgcaauagccagugggaucgcugugugcaagguccugcacuuggagggagaagugaacaaaauuaagaaugcccuccuguccacaaacaaagcgguugugucucugagcaauggcgucuccgugcucacguucaagguauuagaccugaagaacuacaucgauaaacagcuuuugccaauucugaauaagcaaucauguaguaucagcaacauagagacuguuauggaauuucagcagaaaaauaacaggcuacucgagauuacccgggaguucucugugaaugccggugucacaacuccgguguccaccuauaugcugacaaacucagaacuucugagcuugaucaacgacaugcccauuaccaaugaucagaagaaacucaugaguaacaaugugcaaaucguccgccagcagucuuacuccaucaugugcauuauaaaggaggaaguucuggcauaugugguacaguuaccucuguacggggugaucgacacgccauguuggaaacuccauacuagcccccuuugcacaaccaacacuaaggagggaucgaauauuugucugacacgaaccgaucguggcugguacugcgacaacgcuggcucugucuccuuuuucccucaagccgaaacguguaaggugugcucaaauagaguguuuugcgauaccaugaacaguuugacacuaccaagcgagguuaaucuguguaacaucgacauauucaaucccaaauaugauugcaagauuaugacuuccaaaaccgacgucucuagcucagugaucacaagucucggggcaaucguauccuguuacggaaagacuaaaugcaccgcuagcaacaagaauaaggguauuaucaaaacauuuucuaacggcugugauuauguuucaaauaaggggguggacaccgucagugugggaaacacucuguacuaugucaacaaacaggagggcaagagccuuuacgugaaaggugaaccuauuauaaauuucuaugacccacugguuuuuccguccgaugaguucgacgccucuaucagccaggugaacgaaaagauuaaucaaucguuggcguuuaucaggaaguccgaugagcuccugcacaacguaaaugucgggaaaucaacgacaaacaucaugauuaccacuauaaucauugugaucauuguuaucuuacugcuacucauagccgugggacuguuccuuuacugcaaggcacggugaggacuagucccuguucccagagcccacuuuuuuuucuuuuuuugaaauaaaauagccugucuuucagaucuaaaaaaaaaaaaaaaaaaaaaaaaaaaaaaaaaaaaaaaaaaaaaaaaaaaaaaaaaaaaaaaaugcaucccccccccccccccccccccccccccccccaaaggcucuuuucagagccaccagaauu

SEQ ID NO: 18758 - RNA, 1840 nt, Artificial Sequence
  mRNA product Design a-2 comprising derived and/or modified sequence from HRSV(Memphis-37)__AIY60640.1__F-del_DSCav1_mut7 (opt4)
gggagaguccgcucagccagguugcagaagcggcuuagcguguguccuaaucuucucucugcguguagguaggccugugccgcaaacaagcuuaccauggagcugcccauccugaagaccaacgccaucaccaccauccuggccgccgugacccugugcuucgccagcagccagaacaucaccgaggaguucuaccagagcaccugcagcgccgugagcaagggcuaccugagcgcccugagaaccggcugguacaccagcgugaucaccaucgagcugagcaacaucaaggagaacaagugcaacggcaccgacgccaaggugaagcugaucaagcaggagcuggacaaguacaagaacgccgugaccgagcugcagaugcugaugugcagcacccccgccgccggcagcggcagcgccaucgccagcggcaucgccgugugcaaggugcugcaccuggagggcgaggugaacaagaucaagaacgcccugcugagcaccaacaaggccguggugagccugagcaacggcgugagcgugcugaccuucaaggugcuggaccugaagaacuacaucgacaagcagcugcugcccauccugaacaagcagagcugcagcaucagcaacaucgagaccgugauggaguuccagcagaagaacaacagacugcuggagaucaccagagaguucagcgugaacgccggcgugaccacccccgugagcaccuacaugcugaccaacagcgagcugcugagccugaucaacgacaugcccaucaccaacgaccagaagaagcugaugagcaacaacgugcagaucgugagacagcagagcuacagcaucaugugcaucaucaaggaggaggugcuggccuacguggugcagcugccccuguacggcgugaucgacacccccugcuggaagcugcacaccagcccccugugcaccaccaacaccaaggagggcagcaacaucugccugaccagaaccgacagaggcugguacugcgacaacgccggcagcgugagcuucuucccccaggccgagaccugcaaggugugcagcaacagaguguucugcgacaccaugaacagccugacccugcccagcgaggugaaccugugcaacaucgacaucuucaaccccaaguacgacugcaagaucaugaccagcaagaccgacgugagcagcagcgugaucaccagccugggcgccaucgugagcugcuacggcaagaccaagugcaccgccagcaacaagaacaagggcaucaucaagaccuucagcaacggcugcgacuacgugagcaacaagggcguggacaccgugagcgugggcaacacccuguacuacgugaacaagcaggagggcaagagccuguacgugaagggcgagcccaucaucaacuucuacgacccccugguguuccccagcgacgaguucgacgccagcaucagccaggugaacgagaagaucaaccagagccuggccuucaucagaaagagcgacgagcugcugcacaacgugaacgugggcaagagcaccaccaacaucaugaucaccaccaucaucaucgugaucaucgugauccugcugcugcugaucgccgugggccuguuccuguacugcaaggccagaugaggacuagucccuguucccagagcccacuuuuuuuucuuuuuuugaaauaaaauagccugucuuucagaucuaaaaaaaaaaaaaaaaaaaaaaaaaaaaaaaaaaaaaaaaaaaaaaaaaaaaaaaaaaaaaaaaugcaucccccccccccccccccccccccccccccccaaaggcucuuuucagagccaccagaauu

SEQ ID NO: 18759 - RNA, 1840 nt, Artificial Sequence
  mRNA product Design a-2 comprising derived and/or modified sequence from HRSV(Memphis-37)__AIY60640.1__F-del_DSCav1_mut7 (opt5)
gggagaguccgcucagccagguugcagaagcggcuuagcguguguccuaaucuucucucugcguguagguaggccugugccgcaaacaagcuuaccauggagcugcccauccucaagaccaacgccauuacaacgauccuggcugccgugacccuuugcuucgcgagcucccagaauauuacagaagaguuuuaccaaucuaccuguagcgcugucuccaaaggcuaucugucugcccucagaacagggugguacaccagcguuaucacaauugaacuguccaacaucaaggagaauaaaugcaacggaaccgacgccaaggugaaacuuaucaagcaggaacuggauaaguauaaaaaugcugugacggagcuccagaugcugauguguucuaccccugccgcuggcagcggguccgccauugcgagcggaaucgccgucugcaaggugcugcaccucgagggcgaaguuaacaaaauuaagaaugcucugcuuucuacaaacaaagccguggucucccugagcaauggggugucuguucucaccuucaaggugcuggaccuuaagaacuacaucgauaaacagcugcucccgauucugaauaagcaauccuguagcaucucuaacauugagacagucauggaauuucagcagaaaaauaaccggcugcucgagaucacccgcgaguucuccgugaaugcuggagugacgacacccgucagcaccuauaugcugacaaacuccgaacuucugucucucaucaacgacaugccuauuaccaaugaucagaagaaacugaugagcaacaauguucaaaucgugagacagcaguccuacagcauuaugugcaucauuaaggaggaagugcuugccuaugucgugcagcugccccucuacggcguuaucgacaccccuuguuggaaacugcauacaucuccccugugcacgaccaacacaaaggagggcuccaauaucugucucacccggacagaucgcgggugguacugcgacaacgcgggaagcgugagcuuuuucccucaagccgaaaccuguaaggucugcucuaauagaguguuuugcgauacgaugaacucccugacacuuccgucugagguuaaucuguguaacauugacaucuucaaucccaaauaugauugcaagauuaugaccagcaaaaccgacguguccagcucugucaucacaucccucggcgcuauugugagcuguuacgggaagaccaaaugcacagccucuaacaagaauaagggaaucaucaaaacguuuuccaacggcugugauuaugucagcaauaaggggguggacaccguuuccgugggaaacacacuguacuaugucaacaaacaggagggcaagucucuuuacgugaaaggcgaaccuauuaucaauuucuaugacccccugguuuuuccuagcgaugaguucgacgcuuccauuucucaggugaacgaaaagaucaaucaaagccucgccuuuauucggaaguccgaugagcugcugcacaacgucaauguggggaaaagcaccacaaacaucaugauuaccacgaucaucauugugaucauuguuauccuccugcuucugauugccgucggacucuuccuguacugcaaggcucgcugaggacuagucccuguucccagagcccacuuuuuuuucuuuuuuugaaauaaaauagccugucuuucagaucuaaaaaaaaaaaaaaaaaaaaaaaaaaaaaaaaaaaaaaaaaaaaaaaaaaaaaaaaaaaaaaaaugcaucccccccccccccccccccccccccccccccaaaggcucuuuucagagccaccagaauu

SEQ ID NO: 18760 - RNA, 1840 nt, Artificial Sequence
  mRNA product Design a-2 comprising derived and/or modified sequence from HRSV(Memphis-37)__AIY60640.1__F-del_DSCav1_mut7 (opt6)
gggagaguccgcucagccagguugcagaagcggcuuagcguguguccuaaucuucucucugcguguagguaggccugugccgcaaacaagcuuaccauggaacuaccaauacucaaaacaaacgccauaaccacaauacuagccgcaguaacacuuugcuuugccucaagucaaaacauaacagaagaauuuuaccaauccacaugcucagcuguauccaaaggauauuuauccgcacuaagaacaggaugguacacaucaguaaucacaauagaauuaucaaacauaaaagaaaacaaauguaauggcacagacgccaaaguaaaacuaauuaaacaagaacuagacaaauauaaaaaugcaguaaccgaacuccaaaugcucaugugcucuacaccagcugcaggaucaggaucagccauugcaagcgguauagcuguuugcaaaguauuacacuuagaaggagaaguaaauaaaauaaaaaacgcacuacuaucaacaaauaaagcaguaguaucccuaucaaacggaguaucaguacuuacauucaaaguauuagauuuaaaaaacuauauagacaaacaacuacuucccauauuaaacaaacaaucaugcucaauuuccaacauugaaacuguaauggaauuucaacaaaaaaacaacagacuacuugaaaucacacgagaauuuucaguaaacgcuggaguaacaacaccugucucuaccuacaugcucacaaauagcgaauuacuaucucuaaucaaugacaugccaauaacaaacgaucaaaaaaaacuaauguccaacaacguacaaauaguaagacaacaauccuauucaauaaugugcauaauaaaagaagaagucuuagcauacguuguacaacuaccauuauacggaguaauagauacaccaugcuggaaacuccacacaagcccccucugcacaacaaacaccaaagaagggucaaacauaugcuuaacaagaacagacagaggaugguacugugauaacgcaggaucugucucauucuuuccacaagcagaaacauguaaaguaugcuccaacagagucuuuugcgacaccaugaacucacuaaccuuacccucagaaguaaaccugugcaacaucgauaucuucaaccccaaauacgauugcaaaaucaugacaagcaaaacugauguauccagcucuguaauaacaucacuaggugcaauaguaucaugcuacggaaaaacaaaaugcacagcuucuaacaaaaauaaaggaauaauaaaaacauucuccaauggaugcgacuaugucucaaauaaaggaguagauacaguuucagucggcaacacacucuauuauguaaauaaacaagaaggaaaaucauuauacguaaaaggagaacccauaauaaacuucuacgacccccucguauucccaagcgacgaauuugacgccucaauaucacaaguaaacgaaaaaauaaaccaaucacucgcauucaucagaaaaucagaugaacuacuacacaauguaaacgucggaaaauccaccacaaauauaaugauaacuaccaucauaauaguaauaauagucaucuuacuacuauuaaucgcuguaggacuauuucucuacugcaaggccagauaaggacuagucccuguucccagagcccacuuuuuuuucuuuuuuugaaauaaaauagccugucuuucagaucuaaaaaaaaaaaaaaaaaaaaaaaaaaaaaaaaaaaaaaaaaaaaaaaaaaaaaaaaaaaaaaaaugcaucccccccccccccccccccccccccccccccaaaggcucuuuucagagccaccagaauu

SEQ ID NO: 18761 - RNA, 1840 nt, Artificial Sequence
  mRNA product Design a-2 comprising derived and/or modified sequence from HRSV(Memphis-37)__AIY60640.1__F-del_DSCav1_mut7 (opt11)
gggagaguccgcucagccagguugcagaagcggcuuagcguguguccuaaucuucucucugcguguagguaggccugugccgcaaacaagcuuaccauggaacucccaauccucaaaacaaaugccaucaccaccauccuagccgcugucacacuaugcuucgccuccucacaaaacaucaccgaagaguucuaucaauccacaugcuccgccgucagcaagggauaccucuccgcccuuagaaccggcugguacaccucagucaucacaauugaacugucaaacaucaaagaaaacaaaugcaacggcaccgacgcaaaaguaaagcucaucaaacaagaacuggacaaguacaagaacgccgucaccgaacuacagaugcuuaugugcucaaccccugccgccggcuccggaucugccauagcuucaggcaucgccguaugcaaaguccugcaccuagaaggggaagucaacaaaaucaaaaacgcccuccucuccaccaacaaggccguugucucccugucaaacggagucuccguccuaaccuucaaaguccucgaccucaaaaacuacauagacaaacaacuccuacccauccucaacaaacaaagcugcucaauauccaacaucgaaaccgucauggaguuccaacaaaagaacaaccgacuacucgaaauaacacgcgaguucucagucaacgccggcgucaccaccccagucuccacauacaugcucaccaacuccgaacuccuaucgcucaucaacgacaugcccaucaccaaugaccagaagaaacucauguccaacaacguacaaaucguccgccaacaguccuacucaaucaugugcaucaucaaagaagaaguccuugccuacgucguccagcuuccacucuacggagucaucgacacccccugcuggaaacuccacaccuccccacuaugcaccaccaacaccaaagaaggauccaacauaugccucacccguacugaccgcggcugguacugcgacaacgccggauccgucucauucuucccccaggccgaaaccugcaaagucugcuccaaccgcgucuucugcgacaccaugaacucgcucacccucccauccgaagucaaucuaugcaacaucgacauuuucaaccccaaauacgacugcaaaauuaugacaucaaaaaccgacgucucauccucagucaucacuucccucggcgcaaucguaagcugcuacgggaaaacaaagugcaccgcuuccaacaaaaacaaaggcaucaucaaaaccuucucuaacggcugcgacuacgucuccaacaaaggagucgacaccguauccgucggcaacacccucuacuacgucaacaaacaggaaggaaaaucgcucuacgucaaaggagaaccaaucaucaacuucuacgacccccuagucuucccauccgacgaguucgacgccagcaucucacaagucaaugaaaagaucaaccagucacucgcauucauccguaagucagacgaacuccuacacaacgucaacgucggcaagucaacaaccaacauaaugaucaccaccauaaucaucgucauaauaguaauccuccuucuccuaaucgcagucggccucuuccucuacugcaaagcacgcuaaggacuagucccuguucccagagcccacuuuuuuuucuuuuuuugaaauaaaauagccugucuuucagaucuaaaaaaaaaaaaaaaaaaaaaaaaaaaaaaaaaaaaaaaaaaaaaaaaaaaaaaaaaaaaaaaaugcaucccccccccccccccccccccccccccccccaaaggcucuuuucagagccaccagaauu

SEQ ID NO: 18762 - RNA, 1918 nt, Artificial Sequence
  mRNA product Design a-3 comprising derived and/or modified sequence from HRSV(Memphis-37)__AIY60640.1__F-del_DSCav1_mut7 (opt1)
gggagagggcgcuuggcuugcaaggacccugagcugcggcauugaagcacacccaacccaacucgacugaagucagccucacugaaccggaucugagaaucuucucucucugggcuugccagggcucuccgaaccuagcuagcauccucuucaauuccaacuagaaagcuuaccauggagcugcccauccucaagaccaacgccaucaccacgauccuggccgcggugacccugugcuucgccagcucccagaacaucaccgaggaguucuaccagagcacgugcuccgccgucagcaagggcuaccucuccgcccugcgcaccgggugguacaccagcgugaucaccaucgagcuguccaacaucaaggagaacaagugcaacggcaccgacgccaaggugaagcucaucaagcaggagcuggacaaguacaagaacgcggucacggagcugcagaugcugaugugcagcaccccggccgccggcuccgggagcgcgaucgccuccggcaucgccgucugcaaggugcugcaccucgagggcgaggugaacaagaucaagaacgcccugcuguccaccaacaaggccgucgugagccucuccaacggggugagcguccugaccuucaaggugcuggaccucaagaacuacaucgacaagcagcugcugcccauccugaacaagcagagcugcuccaucagcaacaucgagaccgucauggaguuccagcagaagaacaaccgccuccuggagaucacgcgggaguucagcgugaacgcgggcgugaccacccccgucuccaccuacaugcugacgaacagcgagcuccugucccugaucaacgacaugccgaucaccaacgaccagaagaagcucaugagcaacaacgugcagaucgugcgccagcaguccuacagcaucaugugcaucaucaaggaggagguccuggccuacguggugcagcugccccucuacggggucaucgacacccccugcuggaagcugcacaccagcccccugugcacgaccaacaccaaggagggcuccaacaucugccucacccggacggaccgcgggugguacugcgacaacgccggcagcguguccuucuucccgcaggccgagaccugcaaggucugcagcaaccggguguucugcgacaccaugaacucccugacccugcccagcgaggugaaccucugcaacaucgacaucuucaaccccaaguacgacugcaagaucaugacguccaagaccgacgucagcuccagcgugaucaccucccugggcgccaucgugagcugcuacgggaagaccaagugcacggcgagcaacaagaacaagggcaucaucaagaccuucuccaacgggugcgacuacgucagcaacaagggcguggacaccguguccgucggcaacacccuguacuacgugaacaagcaggagggcaagagccucuacgugaagggggagcccaucaucaacuucuacgacccgcuggucuuccccuccgacgaguucgacgccagcaucucccaggugaacgagaagaucaaccagagccuggccuucauccggaaguccgacgagcuccugcacaacgugaacgucggcaagagcaccacgaacaucaugaucaccaccaucaucaucgugaucaucgugauccugcugcuccugaucgccgucgggcuguuccucuacugcaaggcccgcugaggacuagucccuguucccagagcccacuuuuuuuucuuuuuuugaaauaaaauagccugucuuucagaucuaaaaaaaaaaaaaaaaaaaaaaaaaaaaaaaaaaaaaaaaaaaaaaaaaaaaaaaaaaaaaaaaugcaucccccccccccccccccccccccccccccccaaaggcucuuuucagagccaccagaauu

SEQ ID NO: 18763 - RNA, 1918 nt, Artificial Sequence
  mRNA product Design a-3 comprising derived and/or modified sequence from HRSV(Memphis-37)__AIY60640.1__F-del_DSCav1_mut7 (opt1)
gggagagggcgcuuggcuugcaaggacccugagcugcggcauugaagcacacccaacccaacucgacugaagucagccucacugaaccggaucugagaaucuucucucucugggcuugccagggcucuccgaaccuagcuagcauccucuucaauuccaacuagaaagcuuaccauggagcugcccauccucaagaccaacgccaucaccacgauccuggccgcggugacccugugcuucgccagcucccagaacaucaccgaggaguucuaccagagcacgugcuccgccgucagcaagggguaccucuccgcccugcgcaccgggugguacaccagcgugaucaccaucgagcuguccaacaucaaggagaacaagugcaacggcaccgacgccaaggugaagcucaucaagcaggagcuggacaaguacaagaacgcggucacggagcugcagaugcucaugugcagcaccccggccgccggguccggcagcgccaucgcguccgggaucgccgugugcaaggugcugcaccuggagggcgaggucaacaagaucaagaacgcccuccugagcaccaacaaggccguggugucccugagcaacggcgucuccgugcucaccuucaaggugcuggaccugaagaacuacaucgacaagcagcuccugcccauccugaacaagcagagcugcuccaucagcaacaucgagacggucauggaguuccagcagaagaacaaccggcuccuggagaucacccgcgaguucuccgugaacgccggggugaccacccccgucagcacguacaugcugaccaacagcgagcuccugucccugaucaacgacaugcccaucaccaacgaccagaagaagcucaugagcaacaacgugcagaucgugcggcagcaguccuacagcaucaugugcaucaucaaggaggagguccuggcguacguggugcagcugccgcucuacggcgucaucgacacccccugcuggaagcugcacacgagcccccugugcaccaccaacaccaaggaggggagcaacaucugccucacgcgcaccgaccggggcugguacugcgacaacgccggguccgugagcuucuucccccaggccgagaccugcaaggugugcuccaaccgcgucuucugcgacaccaugaacagccugacgcugccguccgaggugaaccucugcaacaucgacaucuucaaccccaaguacgacugcaagaucaugaccagcaagaccgacgucuccagcuccgugaucaccagccugggcgccaucguguccugcuacggcaagacgaagugcaccgccagcaacaagaacaaggggaucaucaagaccuucuccaacggcugcgacuacgucagcaacaaggggguggacaccgugagcgucggcaacacgcuguacuacgugaacaagcaggagggcaagucccucuacgugaagggggagcccaucaucaacuucuacgacccccuggucuucccgagcgacgaguucgacgcguccaucagccaggugaacgagaagaucaaccagucccuggccuucauccggaaguccgacgagcuccugcacaacgugaacgucggcaaguccaccaccaacaucaugaucaccaccaucaucaucgugaucaucgugauccugcuccugcugaucgccgucggccucuuccuguacugcaaggcccgcugaggacuagucccuguucccagagcccacuuuuuuuucuuuuuuugaaauaaaauagccugucuuucagaucuaaaaaaaaaaaaaaaaaaaaaaaaaaaaaaaaaaaaaaaaaaaaaaaaaaaaaaaaaaaaaaaaugcaucccccccccccccccccccccccccccccccaaaggcucuuuucagagccaccagaauu

SEQ ID NO: 18764 - RNA, 1918 nt, Artificial Sequence
  mRNA product Design a-3 comprising derived and/or modified sequence from HRSV(Memphis-37)__AIY60640.1__F-del_DSCav1_mut7 (opt2)
gggagagggcgcuuggcuugcaaggacccugagcugcggcauugaagcacacccaacccaacucgacugaagucagccucacugaaccggaucugagaaucuucucucucugggcuugccagggcucuccgaaccuagcuagcauccucuucaauuccaacuagaaagcuuaccauggagcuccccauccucaagaccaacgccaucaccaccauccucgccgccgucacccucugcuucgccuccucccagaacaucaccgaggaguucuaccaguccaccugcuccgccgucuccaagggcuaccucuccgcccuccgcaccggcugguacaccuccgucaucaccaucgagcucuccaacaucaaggagaacaagugcaacggcaccgacgccaaggucaagcucaucaagcaggagcucgacaaguacaagaacgccgucaccgagcuccagaugcucaugugcuccacccccgccgccggcuccggcuccgccaucgccuccggcaucgccgucugcaagguccuccaccucgagggcgaggucaacaagaucaagaacgcccuccucuccaccaacaaggccgucgucucccucuccaacggcgucuccguccucaccuucaagguccucgaccucaagaacuacaucgacaagcagcuccuccccauccucaacaagcaguccugcuccaucuccaacaucgagaccgucauggaguuccagcagaagaacaaccgccuccucgagaucacccgcgaguucuccgucaacgccggcgucaccacccccgucuccaccuacaugcucaccaacuccgagcuccucucccucaucaacgacaugcccaucaccaacgaccagaagaagcucauguccaacaacguccagaucguccgccagcaguccuacuccaucaugugcaucaucaaggaggagguccucgccuacgucguccagcucccccucuacggcgucaucgacacccccugcuggaagcuccacaccuccccccucugcaccaccaacaccaaggagggcuccaacaucugccucacccgcaccgaccgcggcugguacugcgacaacgccggcuccgucuccuucuucccccaggccgagaccugcaaggucugcuccaaccgcgucuucugcgacaccaugaacucccucacccuccccuccgaggucaaccucugcaacaucgacaucuucaaccccaaguacgacugcaagaucaugaccuccaagaccgacgucuccuccuccgucaucaccucccucggcgccaucgucuccugcuacggcaagaccaagugcaccgccuccaacaagaacaagggcaucaucaagaccuucuccaacggcugcgacuacgucuccaacaagggcgucgacaccgucuccgucggcaacacccucuacuacgucaacaagcaggagggcaagucccucuacgucaagggcgagcccaucaucaacuucuacgacccccucgucuuccccuccgacgaguucgacgccuccaucucccaggucaacgagaagaucaaccagucccucgccuucauccgcaaguccgacgagcuccuccacaacgucaacgucggcaaguccaccaccaacaucaugaucaccaccaucaucaucgucaucaucgucauccuccuccuccucaucgccgucggccucuuccucuacugcaaggcccgcugaggacuagucccuguucccagagcccacuuuuuuuucuuuuuuugaaauaaaauagccugucuuucagaucuaaaaaaaaaaaaaaaaaaaaaaaaaaaaaaaaaaaaaaaaaaaaaaaaaaaaaaaaaaaaaaaaugcaucccccccccccccccccccccccccccccccaaaggcucuuuucagagccaccagaauu

SEQ ID NO: 18765 - RNA, 1918 nt, Artificial Sequence
  mRNA product Design a-3 comprising derived and/or modified sequence from HRSV(Memphis-37)__AIY60640.1__F-del_DSCav1_mut7 (opt3)
gggagagggcgcuuggcuugcaaggacccugagcugcggcauugaagcacacccaacccaacucgacugaagucagccucacugaaccggaucugagaaucuucucucucugggcuugccagggcucuccgaaccuagcuagcauccucuucaauuccaacuagaaagcuuaccauggagcugcccauccucaagaccaacgccauuacaacuauacuugcugcagugacgcugugcuucgccagcucccagaauaucaccgaagaguuuuaccaaucuacauguucagcggucaguaaaggcuauuugagcgcuuuaagaacugggugguacaccuccguuauuacaaucgaacugucuaacauuaaggagaauaaaugcaacggaaccgacgccaaggugaaacuaaucaagcaggaacucgauaaguauaaaaaugcaguaacugagcugcagaugcuuauguguucgaccccugccgcugguucaggcagcgcaauagccagugggaucgcugugugcaagguccugcacuuggagggagaagugaacaaaauuaagaaugcccuccuguccacaaacaaagcgguugugucucugagcaauggcgucuccgugcucacguucaagguauuagaccugaagaacuacaucgauaaacagcuuuugccaauucugaauaagcaaucauguaguaucagcaacauagagacuguuauggaauuucagcagaaaaauaacaggcuacucgagauuacccgggaguucucugugaaugccggugucacaacuccgguguccaccuauaugcugacaaacucagaacuucugagcuugaucaacgacaugcccauuaccaaugaucagaagaaacucaugaguaacaaugugcaaaucguccgccagcagucuuacuccaucaugugcauuauaaaggaggaaguucuggcauaugugguacaguuaccucuguacggggugaucgacacgccauguuggaaacuccauacuagcccccuuugcacaaccaacacuaaggagggaucgaauauuugucugacacgaaccgaucguggcugguacugcgacaacgcuggcucugucuccuuuuucccucaagccgaaacguguaaggugugcucaaauagaguguuuugcgauaccaugaacaguuugacacuaccaagcgagguuaaucuguguaacaucgacauauucaaucccaaauaugauugcaagauuaugacuuccaaaaccgacgucucuagcucagugaucacaagucucggggcaaucguauccuguuacggaaagacuaaaugcaccgcuagcaacaagaauaaggguauuaucaaaacauuuucuaacggcugugauuauguuucaaauaaggggguggacaccgucagugugggaaacacucuguacuaugucaacaaacaggagggcaagagccuuuacgugaaaggugaaccuauuauaaauuucuaugacccacugguuuuuccguccgaugaguucgacgccucuaucagccaggugaacgaaaagauuaaucaaucguuggcguuuaucaggaaguccgaugagcuccugcacaacguaaaugucgggaaaucaacgacaaacaucaugauuaccacuauaaucauugugaucauuguuaucuuacugcuacucauagccgugggacuguuccuuuacugcaaggcacggugaggacuagucccuguucccagagcccacuuuuuuuucuuuuuuugaaauaaaauagccugucuuucagaucuaaaaaaaaaaaaaaaaaaaaaaaaaaaaaaaaaaaaaaaaaaaaaaaaaaaaaaaaaaaaaaaaugcaucccccccccccccccccccccccccccccccaaaggcucuuuucagagccaccagaauu

SEQ ID NO: 18766 - RNA, 1918 nt, Artificial Sequence
  mRNA product Design a-3 comprising derived and/or modified sequence from HRSV(Memphis-37)__AIY60640.1__F-del_DSCav1_mut7 (opt4)
gggagagggcgcuuggcuugcaaggacccugagcugcggcauugaagcacacccaacccaacucgacugaagucagccucacugaaccggaucugagaaucuucucucucugggcuugccagggcucuccgaaccuagcuagcauccucuucaauuccaacuagaaagcuuaccauggagcugcccauccugaagaccaacgccaucaccaccauccuggccgccgugacccugugcuucgccagcagccagaacaucaccgaggaguucuaccagagcaccugcagcgccgugagcaagggcuaccugagcgcccugagaaccggcugguacaccagcgugaucaccaucgagcugagcaacaucaaggagaacaagugcaacggcaccgacgccaaggugaagcugaucaagcaggagcuggacaaguacaagaacgccgugaccgagcugcagaugcugaugugcagcacccccgccgccggcagcggcagcgccaucgccagcggcaucgccgugugcaaggugcugcaccuggagggcgaggugaacaagaucaagaacgcccugcugagcaccaacaaggccguggugagccugagcaacggcgugagcgugcugaccuucaaggugcuggaccugaagaacuacaucgacaagcagcugcugcccauccugaacaagcagagcugcagcaucagcaacaucgagaccgugauggaguuccagcagaagaacaacagacugcuggagaucaccagagaguucagcgugaacgccggcgugaccacccccgugagcaccuacaugcugaccaacagcgagcugcugagccugaucaacgacaugcccaucaccaacgaccagaagaagcugaugagcaacaacgugcagaucgugagacagcagagcuacagcaucaugugcaucaucaaggaggaggugcuggccuacguggugcagcugccccuguacggcgugaucgacacccccugcuggaagcugcacaccagcccccugugcaccaccaacaccaaggagggcagcaacaucugccugaccagaaccgacagaggcugguacugcgacaacgccggcagcgugagcuucuucccccaggccgagaccugcaaggugugcagcaacagaguguucugcgacaccaugaacagccugacccugcccagcgaggugaaccugugcaacaucgacaucuucaaccccaaguacgacugcaagaucaugaccagcaagaccgacgugagcagcagcgugaucaccagccugggcgccaucgugagcugcuacggcaagaccaagugcaccgccagcaacaagaacaagggcaucaucaagaccuucagcaacggcugcgacuacgugagcaacaagggcguggacaccgugagcgugggcaacacccuguacuacgugaacaagcaggagggcaagagccuguacgugaagggcgagcccaucaucaacuucuacgacccccugguguuccccagcgacgaguucgacgccagcaucagccaggugaacgagaagaucaaccagagccuggccuucaucagaaagagcgacgagcugcugcacaacgugaacgugggcaagagcaccaccaacaucaugaucaccaccaucaucaucgugaucaucgugauccugcugcugcugaucgccgugggccuguuccuguacugcaaggccagaugaggacuagucccuguucccagagcccacuuuuuuuucuuuuuuugaaauaaaauagccugucuuucagaucuaaaaaaaaaaaaaaaaaaaaaaaaaaaaaaaaaaaaaaaaaaaaaaaaaaaaaaaaaaaaaaaaugcaucccccccccccccccccccccccccccccccaaaggcucuuuucagagccaccagaauu

SEQ ID NO: 18767 - RNA, 1918 nt, Artificial Sequence
  mRNA product Design a-3 comprising derived and/or modified sequence from HRSV(Memphis-37)__AIY60640.1__F-del_DSCav1_mut7 (opt5)
gggagagggcgcuuggcuugcaaggacccugagcugcggcauugaagcacacccaacccaacucgacugaagucagccucacugaaccggaucugagaaucuucucucucugggcuugccagggcucuccgaaccuagcuagcauccucuucaauuccaacuagaaagcuuaccauggagcugcccauccucaagaccaacgccauuacaacgauccuggcugccgugacccuuugcuucgcgagcucccagaauauuacagaagaguuuuaccaaucuaccuguagcgcugucuccaaaggcuaucugucugcccucagaacagggugguacaccagcguuaucacaauugaacuguccaacaucaaggagaauaaaugcaacggaaccgacgccaaggugaaacuuaucaagcaggaacuggauaaguauaaaaaugcugugacggagcuccagaugcugauguguucuaccccugccgcuggcagcggguccgccauugcgagcggaaucgccgucugcaaggugcugcaccucgagggcgaaguuaacaaaauuaagaaugcucugcuuucuacaaacaaagccguggucucccugagcaauggggugucuguucucaccuucaaggugcuggaccuuaagaacuacaucgauaaacagcugcucccgauucugaauaagcaauccuguagcaucucuaacauugagacagucauggaauuucagcagaaaaauaaccggcugcucgagaucacccgcgaguucuccgugaaugcuggagugacgacacccgucagcaccuauaugcugacaaacuccgaacuucugucucucaucaacgacaugccuauuaccaaugaucagaagaaacugaugagcaacaauguucaaaucgugagacagcaguccuacagcauuaugugcaucauuaaggaggaagugcuugccuaugucgugcagcugccccucuacggcguuaucgacaccccuuguuggaaacugcauacaucuccccugugcacgaccaacacaaaggagggcuccaauaucugucucacccggacagaucgcgggugguacugcgacaacgcgggaagcgugagcuuuuucccucaagccgaaaccuguaaggucugcucuaauagaguguuuugcgauacgaugaacucccugacacuuccgucugagguuaaucuguguaacauugacaucuucaaucccaaauaugauugcaagauuaugaccagcaaaaccgacguguccagcucugucaucacaucccucggcgcuauugugagcuguuacgggaagaccaaaugcacagccucuaacaagaauaagggaaucaucaaaacguuuuccaacggcugugauuaugucagcaauaaggggguggacaccguuuccgugggaaacacacuguacuaugucaacaaacaggagggcaagucucuuuacgugaaaggcgaaccuauuaucaauuucuaugacccccugguuuuuccuagcgaugaguucgacgcuuccauuucucaggugaacgaaaagaucaaucaaagccucgccuuuauucggaaguccgaugagcugcugcacaacgucaauguggggaaaagcaccacaaacaucaugauuaccacgaucaucauugugaucauuguuauccuccugcuucugauugccgucggacucuuccuguacugcaaggcucgcugaggacuagucccuguucccagagcccacuuuuuuuucuuuuuuugaaauaaaauagccugucuuucagaucuaaaaaaaaaaaaaaaaaaaaaaaaaaaaaaaaaaaaaaaaaaaaaaaaaaaaaaaaaaaaaaaaugcaucccccccccccccccccccccccccccccccaaaggcucuuuucagagccaccagaauu

SEQ ID NO: 18768 - RNA, 1918 nt, Artificial Sequence
  mRNA product Design a-3 comprising derived and/or modified sequence from HRSV(Memphis-37)__AIY60640.1__F-del_DSCav1_mut7 (opt6)
gggagagggcgcuuggcuugcaaggacccugagcugcggcauugaagcacacccaacccaacucgacugaagucagccucacugaaccggaucugagaaucuucucucucugggcuugccagggcucuccgaaccuagcuagcauccucuucaauuccaacuagaaagcuuaccauggaacuaccaauacucaaaacaaacgccauaaccacaauacuagccgcaguaacacuuugcuuugccucaagucaaaacauaacagaagaauuuuaccaauccacaugcucagcuguauccaaaggauauuuauccgcacuaagaacaggaugguacacaucaguaaucacaauagaauuaucaaacauaaaagaaaacaaauguaauggcacagacgccaaaguaaaacuaauuaaacaagaacuagacaaauauaaaaaugcaguaaccgaacuccaaaugcucaugugcucuacaccagcugcaggaucaggaucagccauugcaagcgguauagcuguuugcaaaguauuacacuuagaaggagaaguaaauaaaauaaaaaacgcacuacuaucaacaaauaaagcaguaguaucccuaucaaacggaguaucaguacuuacauucaaaguauuagauuuaaaaaacuauauagacaaacaacuacuucccauauuaaacaaacaaucaugcucaauuuccaacauugaaacuguaauggaauuucaacaaaaaaacaacagacuacuugaaaucacacgagaauuuucaguaaacgcuggaguaacaacaccugucucuaccuacaugcucacaaauagcgaauuacuaucucuaaucaaugacaugccaauaacaaacgaucaaaaaaaacuaauguccaacaacguacaaauaguaagacaacaauccuauucaauaaugugcauaauaaaagaagaagucuuagcauacguuguacaacuaccauuauacggaguaauagauacaccaugcuggaaacuccacacaagcccccucugcacaacaaacaccaaagaagggucaaacauaugcuuaacaagaacagacagaggaugguacugugauaacgcaggaucugucucauucuuuccacaagcagaaacauguaaaguaugcuccaacagagucuuuugcgacaccaugaacucacuaaccuuacccucagaaguaaaccugugcaacaucgauaucuucaaccccaaauacgauugcaaaaucaugacaagcaaaacugauguauccagcucuguaauaacaucacuaggugcaauaguaucaugcuacggaaaaacaaaaugcacagcuucuaacaaaaauaaaggaauaauaaaaacauucuccaauggaugcgacuaugucucaaauaaaggaguagauacaguuucagucggcaacacacucuauuauguaaauaaacaagaaggaaaaucauuauacguaaaaggagaacccauaauaaacuucuacgacccccucguauucccaagcgacgaauuugacgccucaauaucacaaguaaacgaaaaaauaaaccaaucacucgcauucaucagaaaaucagaugaacuacuacacaauguaaacgucggaaaauccaccacaaauauaaugauaacuaccaucauaauaguaauaauagucaucuuacuacuauuaaucgcuguaggacuauuucucuacugcaaggccagauaaggacuagucccuguucccagagcccacuuuuuuuucuuuuuuugaaauaaaauagccugucuuucagaucuaaaaaaaaaaaaaaaaaaaaaaaaaaaaaaaaaaaaaaaaaaaaaaaaaaaaaaaaaaaaaaaaugcaucccccccccccccccccccccccccccccccaaaggcucuuuucagagccaccagaauu

SEQ ID NO: 18769 - RNA, 1918 nt, Artificial Sequence
  mRNA product Design a-3 comprising derived and/or modified sequence from HRSV(Memphis-37)__AIY60640.1__F-del_DSCav1_mut7 (opt11)
gggagagggcgcuuggcuugcaaggacccugagcugcggcauugaagcacacccaacccaacucgacugaagucagccucacugaaccggaucugagaaucuucucucucugggcuugccagggcucuccgaaccuagcuagcauccucuucaauuccaacuagaaagcuuaccauggaacucccaauccucaaaacaaaugccaucaccaccauccuagccgcugucacacuaugcuucgccuccucacaaaacaucaccgaagaguucuaucaauccacaugcuccgccgucagcaagggauaccucuccgcccuuagaaccggcugguacaccucagucaucacaauugaacugucaaacaucaaagaaaacaaaugcaacggcaccgacgcaaaaguaaagcucaucaaacaagaacuggacaaguacaagaacgccgucaccgaacuacagaugcuuaugugcucaaccccugccgccggcuccggaucugccauagcuucaggcaucgccguaugcaaaguccugcaccuagaaggggaagucaacaaaaucaaaaacgcccuccucuccaccaacaaggccguugucucccugucaaacggagucuccguccuaaccuucaaaguccucgaccucaaaaacuacauagacaaacaacuccuacccauccucaacaaacaaagcugcucaauauccaacaucgaaaccgucauggaguuccaacaaaagaacaaccgacuacucgaaauaacacgcgaguucucagucaacgccggcgucaccaccccagucuccacauacaugcucaccaacuccgaacuccuaucgcucaucaacgacaugcccaucaccaaugaccagaagaaacucauguccaacaacguacaaaucguccgccaacaguccuacucaaucaugugcaucaucaaagaagaaguccuugccuacgucguccagcuuccacucuacggagucaucgacacccccugcuggaaacuccacaccuccccacuaugcaccaccaacaccaaagaaggauccaacauaugccucacccguacugaccgcggcugguacugcgacaacgccggauccgucucauucuucccccaggccgaaaccugcaaagucugcuccaaccgcgucuucugcgacaccaugaacucgcucacccucccauccgaagucaaucuaugcaacaucgacauuuucaaccccaaauacgacugcaaaauuaugacaucaaaaaccgacgucucauccucagucaucacuucccucggcgcaaucguaagcugcuacgggaaaacaaagugcaccgcuuccaacaaaaacaaaggcaucaucaaaaccuucucuaacggcugcgacuacgucuccaacaaaggagucgacaccguauccgucggcaacacccucuacuacgucaacaaacaggaaggaaaaucgcucuacgucaaaggagaaccaaucaucaacuucuacgacccccuagucuucccauccgacgaguucgacgccagcaucucacaagucaaugaaaagaucaaccagucacucgcauucauccguaagucagacgaacuccuacacaacgucaacgucggcaagucaacaaccaacauaaugaucaccaccauaaucaucgucauaauaguaauccuccuucuccuaaucgcagucggccucuuccucuacugcaaagcacgcuaaggacuagucccuguucccagagcccacuuuuuuuucuuuuuuugaaauaaaauagccugucuuucagaucuaaaaaaaaaaaaaaaaaaaaaaaaaaaaaaaaaaaaaaaaaaaaaaaaaaaaaaaaaaaaaaaaugcaucccccccccccccccccccccccccccccccaaaggcucuuuucagagccaccagaauu

SEQ ID NO: 18770 - RNA, 1867 nt, Artificial Sequence
  mRNA product Design a-4 comprising derived and/or modified sequence from HRSV(Memphis-37)__AIY60640.1__F-del_DSCav1_mut7 (opt1)
gggagacuccugucgggcggaaguaggaggaguagaguuuaaaaacaguacucuuuuuccgguucgggacguaguugaagcaacgacaagccggauaaccgcucuugagacaggaagcuuaccauggagcugcccauccucaagaccaacgccaucaccacgauccuggccgcggugacccugugcuucgccagcucccagaacaucaccgaggaguucuaccagagcacgugcuccgccgucagcaagggcuaccucuccgcccugcgcaccgggugguacaccagcgugaucaccaucgagcuguccaacaucaaggagaacaagugcaacggcaccgacgccaaggugaagcucaucaagcaggagcuggacaaguacaagaacgcggucacggagcugcagaugcugaugugcagcaccccggccgccggcuccgggagcgcgaucgccuccggcaucgccgucugcaaggugcugcaccucgagggcgaggugaacaagaucaagaacgcccugcuguccaccaacaaggccgucgugagccucuccaacggggugagcguccugaccuucaaggugcuggaccucaagaacuacaucgacaagcagcugcugcccauccugaacaagcagagcugcuccaucagcaacaucgagaccgucauggaguuccagcagaagaacaaccgccuccuggagaucacgcgggaguucagcgugaacgcgggcgugaccacccccgucuccaccuacaugcugacgaacagcgagcuccugucccugaucaacgacaugccgaucaccaacgaccagaagaagcucaugagcaacaacgugcagaucgugcgccagcaguccuacagcaucaugugcaucaucaaggaggagguccuggccuacguggugcagcugccccucuacggggucaucgacacccccugcuggaagcugcacaccagcccccugugcacgaccaacaccaaggagggcuccaacaucugccucacccggacggaccgcgggugguacugcgacaacgccggcagcguguccuucuucccgcaggccgagaccugcaaggucugcagcaaccggguguucugcgacaccaugaacucccugacccugcccagcgaggugaaccucugcaacaucgacaucuucaaccccaaguacgacugcaagaucaugacguccaagaccgacgucagcuccagcgugaucaccucccugggcgccaucgugagcugcuacgggaagaccaagugcacggcgagcaacaagaacaagggcaucaucaagaccuucuccaacgggugcgacuacgucagcaacaagggcguggacaccguguccgucggcaacacccuguacuacgugaacaagcaggagggcaagagccucuacgugaagggggagcccaucaucaacuucuacgacccgcuggucuuccccuccgacgaguucgacgccagcaucucccaggugaacgagaagaucaaccagagccuggccuucauccggaaguccgacgagcuccugcacaacgugaacgucggcaagagcaccacgaacaucaugaucaccaccaucaucaucgugaucaucgugauccugcugcuccugaucgccgucgggcuguuccucuacugcaaggcccgcugaggacuagucccuguucccagagcccacuuuuuuuucuuuuuuugaaauaaaauagccugucuuucagaucuaaaaaaaaaaaaaaaaaaaaaaaaaaaaaaaaaaaaaaaaaaaaaaaaaaaaaaaaaaaaaaaaugcaucccccccccccccccccccccccccccccccaaaggcucuuuucagagccaccagaauu

SEQ ID NO: 18771 - RNA, 1867 nt, Artificial Sequence
  mRNA product Design a-4 comprising derived and/or modified sequence from HRSV(Memphis-37)__AIY60640.1__F-del_DSCav1_mut7 (opt1)
gggagacuccugucgggcggaaguaggaggaguagaguuuaaaaacaguacucuuuuuccgguucgggacguaguugaagcaacgacaagccggauaaccgcucuugagacaggaagcuuaccauggagcugcccauccucaagaccaacgccaucaccacgauccuggccgcggugacccugugcuucgccagcucccagaacaucaccgaggaguucuaccagagcacgugcuccgccgucagcaagggguaccucuccgcccugcgcaccgggugguacaccagcgugaucaccaucgagcuguccaacaucaaggagaacaagugcaacggcaccgacgccaaggugaagcucaucaagcaggagcuggacaaguacaagaacgcggucacggagcugcagaugcucaugugcagcaccccggccgccggguccggcagcgccaucgcguccgggaucgccgugugcaaggugcugcaccuggagggcgaggucaacaagaucaagaacgcccuccugagcaccaacaaggccguggugucccugagcaacggcgucuccgugcucaccuucaaggugcuggaccugaagaacuacaucgacaagcagcuccugcccauccugaacaagcagagcugcuccaucagcaacaucgagacggucauggaguuccagcagaagaacaaccggcuccuggagaucacccgcgaguucuccgugaacgccggggugaccacccccgucagcacguacaugcugaccaacagcgagcuccugucccugaucaacgacaugcccaucaccaacgaccagaagaagcucaugagcaacaacgugcagaucgugcggcagcaguccuacagcaucaugugcaucaucaaggaggagguccuggcguacguggugcagcugccgcucuacggcgucaucgacacccccugcuggaagcugcacacgagcccccugugcaccaccaacaccaaggaggggagcaacaucugccucacgcgcaccgaccggggcugguacugcgacaacgccggguccgugagcuucuucccccaggccgagaccugcaaggugugcuccaaccgcgucuucugcgacaccaugaacagccugacgcugccguccgaggugaaccucugcaacaucgacaucuucaaccccaaguacgacugcaagaucaugaccagcaagaccgacgucuccagcuccgugaucaccagccugggcgccaucguguccugcuacggcaagacgaagugcaccgccagcaacaagaacaaggggaucaucaagaccuucuccaacggcugcgacuacgucagcaacaaggggguggacaccgugagcgucggcaacacgcuguacuacgugaacaagcaggagggcaagucccucuacgugaagggggagcccaucaucaacuucuacgacccccuggucuucccgagcgacgaguucgacgcguccaucagccaggugaacgagaagaucaaccagucccuggccuucauccggaaguccgacgagcuccugcacaacgugaacgucggcaaguccaccaccaacaucaugaucaccaccaucaucaucgugaucaucgugauccugcuccugcugaucgccgucggccucuuccuguacugcaaggcccgcugaggacuagucccuguucccagagcccacuuuuuuuucuuuuuuugaaauaaaauagccugucuuucagaucuaaaaaaaaaaaaaaaaaaaaaaaaaaaaaaaaaaaaaaaaaaaaaaaaaaaaaaaaaaaaaaaaugcaucccccccccccccccccccccccccccccccaaaggcucuuuucagagccaccagaauu

SEQ ID NO: 18772 - RNA, 1867 nt, Artificial Sequence
  mRNA product Design a-4 comprising derived and/or modified sequence from HRSV(Memphis-37)__AIY60640.1__F-del_DSCav1_mut7 (opt2)
gggagacuccugucgggcggaaguaggaggaguagaguuuaaaaacaguacucuuuuuccgguucgggacguaguugaagcaacgacaagccggauaaccgcucuugagacaggaagcuuaccauggagcuccccauccucaagaccaacgccaucaccaccauccucgccgccgucacccucugcuucgccuccucccagaacaucaccgaggaguucuaccaguccaccugcuccgccgucuccaagggcuaccucuccgcccuccgcaccggcugguacaccuccgucaucaccaucgagcucuccaacaucaaggagaacaagugcaacggcaccgacgccaaggucaagcucaucaagcaggagcucgacaaguacaagaacgccgucaccgagcuccagaugcucaugugcuccacccccgccgccggcuccggcuccgccaucgccuccggcaucgccgucugcaagguccuccaccucgagggcgaggucaacaagaucaagaacgcccuccucuccaccaacaaggccgucgucucccucuccaacggcgucuccguccucaccuucaagguccucgaccucaagaacuacaucgacaagcagcuccuccccauccucaacaagcaguccugcuccaucuccaacaucgagaccgucauggaguuccagcagaagaacaaccgccuccucgagaucacccgcgaguucuccgucaacgccggcgucaccacccccgucuccaccuacaugcucaccaacuccgagcuccucucccucaucaacgacaugcccaucaccaacgaccagaagaagcucauguccaacaacguccagaucguccgccagcaguccuacuccaucaugugcaucaucaaggaggagguccucgccuacgucguccagcucccccucuacggcgucaucgacacccccugcuggaagcuccacaccuccccccucugcaccaccaacaccaaggagggcuccaacaucugccucacccgcaccgaccgcggcugguacugcgacaacgccggcuccgucuccuucuucccccaggccgagaccugcaaggucugcuccaaccgcgucuucugcgacaccaugaacucccucacccuccccuccgaggucaaccucugcaacaucgacaucuucaaccccaaguacgacugcaagaucaugaccuccaagaccgacgucuccuccuccgucaucaccucccucggcgccaucgucuccugcuacggcaagaccaagugcaccgccuccaacaagaacaagggcaucaucaagaccuucuccaacggcugcgacuacgucuccaacaagggcgucgacaccgucuccgucggcaacacccucuacuacgucaacaagcaggagggcaagucccucuacgucaagggcgagcccaucaucaacuucuacgacccccucgucuuccccuccgacgaguucgacgccuccaucucccaggucaacgagaagaucaaccagucccucgccuucauccgcaaguccgacgagcuccuccacaacgucaacgucggcaaguccaccaccaacaucaugaucaccaccaucaucaucgucaucaucgucauccuccuccuccucaucgccgucggccucuuccucuacugcaaggcccgcugaggacuagucccuguucccagagcccacuuuuuuuucuuuuuuugaaauaaaauagccugucuuucagaucuaaaaaaaaaaaaaaaaaaaaaaaaaaaaaaaaaaaaaaaaaaaaaaaaaaaaaaaaaaaaaaaaugcaucccccccccccccccccccccccccccccccaaaggcucuuuucagagccaccagaauu

SEQ ID NO: 18773 - RNA, 1867 nt, Artificial Sequence
  mRNA product Design a-4 comprising derived and/or modified sequence from HRSV(Memphis-37)__AIY60640.1__F-del_DSCav1_mut7 (opt3)
gggagacuccugucgggcggaaguaggaggaguagaguuuaaaaacaguacucuuuuuccgguucgggacguaguugaagcaacgacaagccggauaaccgcucuugagacaggaagcuuaccauggagcugcccauccucaagaccaacgccauuacaacuauacuugcugcagugacgcugugcuucgccagcucccagaauaucaccgaagaguuuuaccaaucuacauguucagcggucaguaaaggcuauuugagcgcuuuaagaacugggugguacaccuccguuauuacaaucgaacugucuaacauuaaggagaauaaaugcaacggaaccgacgccaaggugaaacuaaucaagcaggaacucgauaaguauaaaaaugcaguaacugagcugcagaugcuuauguguucgaccccugccgcugguucaggcagcgcaauagccagugggaucgcugugugcaagguccugcacuuggagggagaagugaacaaaauuaagaaugcccuccuguccacaaacaaagcgguugugucucugagcaauggcgucuccgugcucacguucaagguauuagaccugaagaacuacaucgauaaacagcuuuugccaauucugaauaagcaaucauguaguaucagcaacauagagacuguuauggaauuucagcagaaaaauaacaggcuacucgagauuacccgggaguucucugugaaugccggugucacaacuccgguguccaccuauaugcugacaaacucagaacuucugagcuugaucaacgacaugcccauuaccaaugaucagaagaaacucaugaguaacaaugugcaaaucguccgccagcagucuuacuccaucaugugcauuauaaaggaggaaguucuggcauaugugguacaguuaccucuguacggggugaucgacacgccauguuggaaacuccauacuagcccccuuugcacaaccaacacuaaggagggaucgaauauuugucugacacgaaccgaucguggcugguacugcgacaacgcuggcucugucuccuuuuucccucaagccgaaacguguaaggugugcucaaauagaguguuuugcgauaccaugaacaguuugacacuaccaagcgagguuaaucuguguaacaucgacauauucaaucccaaauaugauugcaagauuaugacuuccaaaaccgacgucucuagcucagugaucacaagucucggggcaaucguauccuguuacggaaagacuaaaugcaccgcuagcaacaagaauaaggguauuaucaaaacauuuucuaacggcugugauuauguuucaaauaaggggguggacaccgucagugugggaaacacucuguacuaugucaacaaacaggagggcaagagccuuuacgugaaaggugaaccuauuauaaauuucuaugacccacugguuuuuccguccgaugaguucgacgccucuaucagccaggugaacgaaaagauuaaucaaucguuggcguuuaucaggaaguccgaugagcuccugcacaacguaaaugucgggaaaucaacgacaaacaucaugauuaccacuauaaucauugugaucauuguuaucuuacugcuacucauagccgugggacuguuccuuuacugcaaggcacggugaggacuagucccuguucccagagcccacuuuuuuuucuuuuuuugaaauaaaauagccugucuuucagaucuaaaaaaaaaaaaaaaaaaaaaaaaaaaaaaaaaaaaaaaaaaaaaaaaaaaaaaaaaaaaaaaaugcaucccccccccccccccccccccccccccccccaaaggcucuuuucagagccaccagaauu

SEQ ID NO: 18774 - RNA, 1867 nt, Artificial Sequence
  mRNA product Design a-4 comprising derived and/or modified sequence from HRSV(Memphis-37)__AIY60640.1__F-del_DSCav1_mut7 (opt4)
gggagacuccugucgggcggaaguaggaggaguagaguuuaaaaacaguacucuuuuuccgguucgggacguaguugaagcaacgacaagccggauaaccgcucuugagacaggaagcuuaccauggagcugcccauccugaagaccaacgccaucaccaccauccuggccgccgugacccugugcuucgccagcagccagaacaucaccgaggaguucuaccagagcaccugcagcgccgugagcaagggcuaccugagcgcccugagaaccggcugguacaccagcgugaucaccaucgagcugagcaacaucaaggagaacaagugcaacggcaccgacgccaaggugaagcugaucaagcaggagcuggacaaguacaagaacgccgugaccgagcugcagaugcugaugugcagcacccccgccgccggcagcggcagcgccaucgccagcggcaucgccgugugcaaggugcugcaccuggagggcgaggugaacaagaucaagaacgcccugcugagcaccaacaaggccguggugagccugagcaacggcgugagcgugcugaccuucaaggugcuggaccugaagaacuacaucgacaagcagcugcugcccauccugaacaagcagagcugcagcaucagcaacaucgagaccgugauggaguuccagcagaagaacaacagacugcuggagaucaccagagaguucagcgugaacgccggcgugaccacccccgugagcaccuacaugcugaccaacagcgagcugcugagccugaucaacgacaugcccaucaccaacgaccagaagaagcugaugagcaacaacgugcagaucgugagacagcagagcuacagcaucaugugcaucaucaaggaggaggugcuggccuacguggugcagcugccccuguacggcgugaucgacacccccugcuggaagcugcacaccagcccccugugcaccaccaacaccaaggagggcagcaacaucugccugaccagaaccgacagaggcugguacugcgacaacgccggcagcgugagcuucuucccccaggccgagaccugcaaggugugcagcaacagaguguucugcgacaccaugaacagccugacccugcccagcgaggugaaccugugcaacaucgacaucuucaaccccaaguacgacugcaagaucaugaccagcaagaccgacgugagcagcagcgugaucaccagccugggcgccaucgugagcugcuacggcaagaccaagugcaccgccagcaacaagaacaagggcaucaucaagaccuucagcaacggcugcgacuacgugagcaacaagggcguggacaccgugagcgugggcaacacccuguacuacgugaacaagcaggagggcaagagccuguacgugaagggcgagcccaucaucaacuucuacgacccccugguguuccccagcgacgaguucgacgccagcaucagccaggugaacgagaagaucaaccagagccuggccuucaucagaaagagcgacgagcugcugcacaacgugaacgugggcaagagcaccaccaacaucaugaucaccaccaucaucaucgugaucaucgugauccugcugcugcugaucgccgugggccuguuccuguacugcaaggccagaugaggacuagucccuguucccagagcccacuuuuuuuucuuuuuuugaaauaaaauagccugucuuucagaucuaaaaaaaaaaaaaaaaaaaaaaaaaaaaaaaaaaaaaaaaaaaaaaaaaaaaaaaaaaaaaaaaugcaucccccccccccccccccccccccccccccccaaaggcucuuuucagagccaccagaauu

SEQ ID NO: 18775 - RNA, 1867 nt, Artificial Sequence
  mRNA product Design a-4 comprising derived and/or modified sequence from HRSV(Memphis-37)__AIY60640.1__F-del_DSCav1_mut7 (opt5)
gggagacuccugucgggcggaaguaggaggaguagaguuuaaaaacaguacucuuuuuccgguucgggacguaguugaagcaacgacaagccggauaaccgcucuugagacaggaagcuuaccauggagcugcccauccucaagaccaacgccauuacaacgauccuggcugccgugacccuuugcuucgcgagcucccagaauauuacagaagaguuuuaccaaucuaccuguagcgcugucuccaaaggcuaucugucugcccucagaacagggugguacaccagcguuaucacaauugaacuguccaacaucaaggagaauaaaugcaacggaaccgacgccaaggugaaacuuaucaagcaggaacuggauaaguauaaaaaugcugugacggagcuccagaugcugauguguucuaccccugccgcuggcagcggguccgccauugcgagcggaaucgccgucugcaaggugcugcaccucgagggcgaaguuaacaaaauuaagaaugcucugcuuucuacaaacaaagccguggucucccugagcaauggggugucuguucucaccuucaaggugcuggaccuuaagaacuacaucgauaaacagcugcucccgauucugaauaagcaauccuguagcaucucuaacauugagacagucauggaauuucagcagaaaaauaaccggcugcucgagaucacccgcgaguucuccgugaaugcuggagugacgacacccgucagcaccuauaugcugacaaacuccgaacuucugucucucaucaacgacaugccuauuaccaaugaucagaagaaacugaugagcaacaauguucaaaucgugagacagcaguccuacagcauuaugugcaucauuaaggaggaagugcuugccuaugucgugcagcugccccucuacggcguuaucgacaccccuuguuggaaacugcauacaucuccccugugcacgaccaacacaaaggagggcuccaauaucugucucacccggacagaucgcgggugguacugcgacaacgcgggaagcgugagcuuuuucccucaagccgaaaccuguaaggucugcucuaauagaguguuuugcgauacgaugaacucccugacacuuccgucugagguuaaucuguguaacauugacaucuucaaucccaaauaugauugcaagauuaugaccagcaaaaccgacguguccagcucugucaucacaucccucggcgcuauugugagcuguuacgggaagaccaaaugcacagccucuaacaagaauaagggaaucaucaaaacguuuuccaacggcugugauuaugucagcaauaaggggguggacaccguuuccgugggaaacacacuguacuaugucaacaaacaggagggcaagucucuuuacgugaaaggcgaaccuauuaucaauuucuaugacccccugguuuuuccuagcgaugaguucgacgcuuccauuucucaggugaacgaaaagaucaaucaaagccucgccuuuauucggaaguccgaugagcugcugcacaacgucaauguggggaaaagcaccacaaacaucaugauuaccacgaucaucauugugaucauuguuauccuccugcuucugauugccgucggacucuuccuguacugcaaggcucgcugaggacuagucccuguucccagagcccacuuuuuuuucuuuuuuugaaauaaaauagccugucuuucagaucuaaaaaaaaaaaaaaaaaaaaaaaaaaaaaaaaaaaaaaaaaaaaaaaaaaaaaaaaaaaaaaaaugcaucccccccccccccccccccccccccccccccaaaggcucuuuucagagccaccagaauu

SEQ ID NO: 18776 - RNA, 1867 nt, Artificial Sequence
  mRNA product Design a-4 comprising derived and/or modified sequence from HRSV(Memphis-37)__AIY60640.1__F-del_DSCav1_mut7 (opt6)
gggagacuccugucgggcggaaguaggaggaguagaguuuaaaaacaguacucuuuuuccgguucgggacguaguugaagcaacgacaagccggauaaccgcucuugagacaggaagcuuaccauggaacuaccaauacucaaaacaaacgccauaaccacaauacuagccgcaguaacacuuugcuuugccucaagucaaaacauaacagaagaauuuuaccaauccacaugcucagcuguauccaaaggauauuuauccgcacuaagaacaggaugguacacaucaguaaucacaauagaauuaucaaacauaaaagaaaacaaauguaauggcacagacgccaaaguaaaacuaauuaaacaagaacuagacaaauauaaaaaugcaguaaccgaacuccaaaugcucaugugcucuacaccagcugcaggaucaggaucagccauugcaagcgguauagcuguuugcaaaguauuacacuuagaaggagaaguaaauaaaauaaaaaacgcacuacuaucaacaaauaaagcaguaguaucccuaucaaacggaguaucaguacuuacauucaaaguauuagauuuaaaaaacuauauagacaaacaacuacuucccauauuaaacaaacaaucaugcucaauuuccaacauugaaacuguaauggaauuucaacaaaaaaacaacagacuacuugaaaucacacgagaauuuucaguaaacgcuggaguaacaacaccugucucuaccuacaugcucacaaauagcgaauuacuaucucuaaucaaugacaugccaauaacaaacgaucaaaaaaaacuaauguccaacaacguacaaauaguaagacaacaauccuauucaauaaugugcauaauaaaagaagaagucuuagcauacguuguacaacuaccauuauacggaguaauagauacaccaugcuggaaacuccacacaagcccccucugcacaacaaacaccaaagaagggucaaacauaugcuuaacaagaacagacagaggaugguacugugauaacgcaggaucugucucauucuuuccacaagcagaaacauguaaaguaugcuccaacagagucuuuugcgacaccaugaacucacuaaccuuacccucagaaguaaaccugugcaacaucgauaucuucaaccccaaauacgauugcaaaaucaugacaagcaaaacugauguauccagcucuguaauaacaucacuaggugcaauaguaucaugcuacggaaaaacaaaaugcacagcuucuaacaaaaauaaaggaauaauaaaaacauucuccaauggaugcgacuaugucucaaauaaaggaguagauacaguuucagucggcaacacacucuauuauguaaauaaacaagaaggaaaaucauuauacguaaaaggagaacccauaauaaacuucuacgacccccucguauucccaagcgacgaauuugacgccucaauaucacaaguaaacgaaaaaauaaaccaaucacucgcauucaucagaaaaucagaugaacuacuacacaauguaaacgucggaaaauccaccacaaauauaaugauaacuaccaucauaauaguaauaauagucaucuuacuacuauuaaucgcuguaggacuauuucucuacugcaaggccagauaaggacuagucccuguucccagagcccacuuuuuuuucuuuuuuugaaauaaaauagccugucuuucagaucuaaaaaaaaaaaaaaaaaaaaaaaaaaaaaaaaaaaaaaaaaaaaaaaaaaaaaaaaaaaaaaaaugcaucccccccccccccccccccccccccccccccaaaggcucuuuucagagccaccagaauu

SEQ ID NO: 18777 - RNA, 1867 nt, Artificial Sequence
  mRNA product Design a-4 comprising derived and/or modified sequence from HRSV(Memphis-37)__AIY60640.1__F-del_DSCav1_mut7 (opt11)
gggagacuccugucgggcggaaguaggaggaguagaguuuaaaaacaguacucuuuuuccgguucgggacguaguugaagcaacgacaagccggauaaccgcucuugagacaggaagcuuaccauggaacucccaauccucaaaacaaaugccaucaccaccauccuagccgcugucacacuaugcuucgccuccucacaaaacaucaccgaagaguucuaucaauccacaugcuccgccgucagcaagggauaccucuccgcccuuagaaccggcugguacaccucagucaucacaauugaacugucaaacaucaaagaaaacaaaugcaacggcaccgacgcaaaaguaaagcucaucaaacaagaacuggacaaguacaagaacgccgucaccgaacuacagaugcuuaugugcucaaccccugccgccggcuccggaucugccauagcuucaggcaucgccguaugcaaaguccugcaccuagaaggggaagucaacaaaaucaaaaacgcccuccucuccaccaacaaggccguugucucccugucaaacggagucuccguccuaaccuucaaaguccucgaccucaaaaacuacauagacaaacaacuccuacccauccucaacaaacaaagcugcucaauauccaacaucgaaaccgucauggaguuccaacaaaagaacaaccgacuacucgaaauaacacgcgaguucucagucaacgccggcgucaccaccccagucuccacauacaugcucaccaacuccgaacuccuaucgcucaucaacgacaugcccaucaccaaugaccagaagaaacucauguccaacaacguacaaaucguccgccaacaguccuacucaaucaugugcaucaucaaagaagaaguccuugccuacgucguccagcuuccacucuacggagucaucgacacccccugcuggaaacuccacaccuccccacuaugcaccaccaacaccaaagaaggauccaacauaugccucacccguacugaccgcggcugguacugcgacaacgccggauccgucucauucuucccccaggccgaaaccugcaaagucugcuccaaccgcgucuucugcgacaccaugaacucgcucacccucccauccgaagucaaucuaugcaacaucgacauuuucaaccccaaauacgacugcaaaauuaugacaucaaaaaccgacgucucauccucagucaucacuucccucggcgcaaucguaagcugcuacgggaaaacaaagugcaccgcuuccaacaaaaacaaaggcaucaucaaaaccuucucuaacggcugcgacuacgucuccaacaaaggagucgacaccguauccgucggcaacacccucuacuacgucaacaaacaggaaggaaaaucgcucuacgucaaaggagaaccaaucaucaacuucuacgacccccuagucuucccauccgacgaguucgacgccagcaucucacaagucaaugaaaagaucaaccagucacucgcauucauccguaagucagacgaacuccuacacaacgucaacgucggcaagucaacaaccaacauaaugaucaccaccauaaucaucgucauaauaguaauccuccuucuccuaaucgcagucggccucuuccucuacugcaaagcacgcuaaggacuagucccuguucccagagcccacuuuuuuuucuuuuuuugaaauaaaauagccugucuuucagaucuaaaaaaaaaaaaaaaaaaaaaaaaaaaaaaaaaaaaaaaaaaaaaaaaaaaaaaaaaaaaaaaaugcaucccccccccccccccccccccccccccccccaaaggcucuuuucagagccaccagaauu

SEQ ID NO: 18778 - RNA, 1813 nt, Artificial Sequence
  mRNA product Design a-5 comprising derived and/or modified sequence from HRSV(Memphis-37)__AIY60640.1__F-del_DSCav1_mut7 (opt1)
gggagacuuucccauucuguagcagaauuugguguugccuguggucuuggucccgcggagaagcuuaccauggagcugcccauccucaagaccaacgccaucaccacgauccuggccgcggugacccugugcuucgccagcucccagaacaucaccgaggaguucuaccagagcacgugcuccgccgucagcaagggcuaccucuccgcccugcgcaccgggugguacaccagcgugaucaccaucgagcuguccaacaucaaggagaacaagugcaacggcaccgacgccaaggugaagcucaucaagcaggagcuggacaaguacaagaacgcggucacggagcugcagaugcugaugugcagcaccccggccgccggcuccgggagcgcgaucgccuccggcaucgccgucugcaaggugcugcaccucgagggcgaggugaacaagaucaagaacgcccugcuguccaccaacaaggccgucgugagccucuccaacggggugagcguccugaccuucaaggugcuggaccucaagaacuacaucgacaagcagcugcugcccauccugaacaagcagagcugcuccaucagcaacaucgagaccgucauggaguuccagcagaagaacaaccgccuccuggagaucacgcgggaguucagcgugaacgcgggcgugaccacccccgucuccaccuacaugcugacgaacagcgagcuccugucccugaucaacgacaugccgaucaccaacgaccagaagaagcucaugagcaacaacgugcagaucgugcgccagcaguccuacagcaucaugugcaucaucaaggaggagguccuggccuacguggugcagcugccccucuacggggucaucgacacccccugcuggaagcugcacaccagcccccugugcacgaccaacaccaaggagggcuccaacaucugccucacccggacggaccgcgggugguacugcgacaacgccggcagcguguccuucuucccgcaggccgagaccugcaaggucugcagcaaccggguguucugcgacaccaugaacucccugacccugcccagcgaggugaaccucugcaacaucgacaucuucaaccccaaguacgacugcaagaucaugacguccaagaccgacgucagcuccagcgugaucaccucccugggcgccaucgugagcugcuacgggaagaccaagugcacggcgagcaacaagaacaagggcaucaucaagaccuucuccaacgggugcgacuacgucagcaacaagggcguggacaccguguccgucggcaacacccuguacuacgugaacaagcaggagggcaagagccucuacgugaagggggagcccaucaucaacuucuacgacccgcuggucuuccccuccgacgaguucgacgccagcaucucccaggugaacgagaagaucaaccagagccuggccuucauccggaaguccgacgagcuccugcacaacgugaacgucggcaagagcaccacgaacaucaugaucaccaccaucaucaucgugaucaucgugauccugcugcuccugaucgccgucgggcuguuccucuacugcaaggcccgcugaggacuagucccuguucccagagcccacuuuuuuuucuuuuuuugaaauaaaauagccugucuuucagaucuaaaaaaaaaaaaaaaaaaaaaaaaaaaaaaaaaaaaaaaaaaaaaaaaaaaaaaaaaaaaaaaaugcaucccccccccccccccccccccccccccccccaaaggcucuuuucagagccaccagaauu

SEQ ID NO: 18779 - RNA, 1813 nt, Artificial Sequence
  mRNA product Design a-5 comprising derived and/or modified sequence from HRSV(Memphis-37)__AIY60640.1__F-del_DSCav1_mut7 (opt1)
gggagacuuucccauucuguagcagaauuugguguugccuguggucuuggucccgcggagaagcuuaccauggagcugcccauccucaagaccaacgccaucaccacgauccuggccgcggugacccugugcuucgccagcucccagaacaucaccgaggaguucuaccagagcacgugcuccgccgucagcaagggguaccucuccgcccugcgcaccgggugguacaccagcgugaucaccaucgagcuguccaacaucaaggagaacaagugcaacggcaccgacgccaaggugaagcucaucaagcaggagcuggacaaguacaagaacgcggucacggagcugcagaugcucaugugcagcaccccggccgccggguccggcagcgccaucgcguccgggaucgccgugugcaaggugcugcaccuggagggcgaggucaacaagaucaagaacgcccuccugagcaccaacaaggccguggugucccugagcaacggcgucuccgugcucaccuucaaggugcuggaccugaagaacuacaucgacaagcagcuccugcccauccugaacaagcagagcugcuccaucagcaacaucgagacggucauggaguuccagcagaagaacaaccggcuccuggagaucacccgcgaguucuccgugaacgccggggugaccacccccgucagcacguacaugcugaccaacagcgagcuccugucccugaucaacgacaugcccaucaccaacgaccagaagaagcucaugagcaacaacgugcagaucgugcggcagcaguccuacagcaucaugugcaucaucaaggaggagguccuggcguacguggugcagcugccgcucuacggcgucaucgacacccccugcuggaagcugcacacgagcccccugugcaccaccaacaccaaggaggggagcaacaucugccucacgcgcaccgaccggggcugguacugcgacaacgccggguccgugagcuucuucccccaggccgagaccugcaaggugugcuccaaccgcgucuucugcgacaccaugaacagccugacgcugccguccgaggugaaccucugcaacaucgacaucuucaaccccaaguacgacugcaagaucaugaccagcaagaccgacgucuccagcuccgugaucaccagccugggcgccaucguguccugcuacggcaagacgaagugcaccgccagcaacaagaacaaggggaucaucaagaccuucuccaacggcugcgacuacgucagcaacaaggggguggacaccgugagcgucggcaacacgcuguacuacgugaacaagcaggagggcaagucccucuacgugaagggggagcccaucaucaacuucuacgacccccuggucuucccgagcgacgaguucgacgcguccaucagccaggugaacgagaagaucaaccagucccuggccuucauccggaaguccgacgagcuccugcacaacgugaacgucggcaaguccaccaccaacaucaugaucaccaccaucaucaucgugaucaucgugauccugcuccugcugaucgccgucggccucuuccuguacugcaaggcccgcugaggacuagucccuguucccagagcccacuuuuuuuucuuuuuuugaaauaaaauagccugucuuucagaucuaaaaaaaaaaaaaaaaaaaaaaaaaaaaaaaaaaaaaaaaaaaaaaaaaaaaaaaaaaaaaaaaugcaucccccccccccccccccccccccccccccccaaaggcucuuuucagagccaccagaauu

SEQ ID NO: 18780 - RNA, 1813 nt, Artificial Sequence
  mRNA product Design a-5 comprising derived and/or modified sequence from HRSV(Memphis-37)__AIY60640.1__F-del_DSCav1_mut7 (opt2)
gggagacuuucccauucuguagcagaauuugguguugccuguggucuuggucccgcggagaagcuuaccauggagcuccccauccucaagaccaacgccaucaccaccauccucgccgccgucacccucugcuucgccuccucccagaacaucaccgaggaguucuaccaguccaccugcuccgccgucuccaagggcuaccucuccgcccuccgcaccggcugguacaccuccgucaucaccaucgagcucuccaacaucaaggagaacaagugcaacggcaccgacgccaaggucaagcucaucaagcaggagcucgacaaguacaagaacgccgucaccgagcuccagaugcucaugugcuccacccccgccgccggcuccggcuccgccaucgccuccggcaucgccgucugcaagguccuccaccucgagggcgaggucaacaagaucaagaacgcccuccucuccaccaacaaggccgucgucucccucuccaacggcgucuccguccucaccuucaagguccucgaccucaagaacuacaucgacaagcagcuccuccccauccucaacaagcaguccugcuccaucuccaacaucgagaccgucauggaguuccagcagaagaacaaccgccuccucgagaucacccgcgaguucuccgucaacgccggcgucaccacccccgucuccaccuacaugcucaccaacuccgagcuccucucccucaucaacgacaugcccaucaccaacgaccagaagaagcucauguccaacaacguccagaucguccgccagcaguccuacuccaucaugugcaucaucaaggaggagguccucgccuacgucguccagcucccccucuacggcgucaucgacacccccugcuggaagcuccacaccuccccccucugcaccaccaacaccaaggagggcuccaacaucugccucacccgcaccgaccgcggcugguacugcgacaacgccggcuccgucuccuucuucccccaggccgagaccugcaaggucugcuccaaccgcgucuucugcgacaccaugaacucccucacccuccccuccgaggucaaccucugcaacaucgacaucuucaaccccaaguacgacugcaagaucaugaccuccaagaccgacgucuccuccuccgucaucaccucccucggcgccaucgucuccugcuacggcaagaccaagugcaccgccuccaacaagaacaagggcaucaucaagaccuucuccaacggcugcgacuacgucuccaacaagggcgucgacaccgucuccgucggcaacacccucuacuacgucaacaagcaggagggcaagucccucuacgucaagggcgagcccaucaucaacuucuacgacccccucgucuuccccuccgacgaguucgacgccuccaucucccaggucaacgagaagaucaaccagucccucgccuucauccgcaaguccgacgagcuccuccacaacgucaacgucggcaaguccaccaccaacaucaugaucaccaccaucaucaucgucaucaucgucauccuccuccuccucaucgccgucggccucuuccucuacugcaaggcccgcugaggacuagucccuguucccagagcccacuuuuuuuucuuuuuuugaaauaaaauagccugucuuucagaucuaaaaaaaaaaaaaaaaaaaaaaaaaaaaaaaaaaaaaaaaaaaaaaaaaaaaaaaaaaaaaaaaugcaucccccccccccccccccccccccccccccccaaaggcucuuuucagagccaccagaauu

SEQ ID NO: 18781 - RNA, 1813 nt, Artificial Sequence
  mRNA product Design a-5 comprising derived and/or modified sequence from HRSV(Memphis-37)__AIY60640.1__F-del_DSCav1_mut7 (opt3)
gggagacuuucccauucuguagcagaauuugguguugccuguggucuuggucccgcggagaagcuuaccauggagcugcccauccucaagaccaacgccauuacaacuauacuugcugcagugacgcugugcuucgccagcucccagaauaucaccgaagaguuuuaccaaucuacauguucagcggucaguaaaggcuauuugagcgcuuuaagaacugggugguacaccuccguuauuacaaucgaacugucuaacauuaaggagaauaaaugcaacggaaccgacgccaaggugaaacuaaucaagcaggaacucgauaaguauaaaaaugcaguaacugagcugcagaugcuuauguguucgaccccugccgcugguucaggcagcgcaauagccagugggaucgcugugugcaagguccugcacuuggagggagaagugaacaaaauuaagaaugcccuccuguccacaaacaaagcgguugugucucugagcaauggcgucuccgugcucacguucaagguauuagaccugaagaacuacaucgauaaacagcuuuugccaauucugaauaagcaaucauguaguaucagcaacauagagacuguuauggaauuucagcagaaaaauaacaggcuacucgagauuacccgggaguucucugugaaugccggugucacaacuccgguguccaccuauaugcugacaaacucagaacuucugagcuugaucaacgacaugcccauuaccaaugaucagaagaaacucaugaguaacaaugugcaaaucguccgccagcagucuuacuccaucaugugcauuauaaaggaggaaguucuggcauaugugguacaguuaccucuguacggggugaucgacacgccauguuggaaacuccauacuagcccccuuugcacaaccaacacuaaggagggaucgaauauuugucugacacgaaccgaucguggcugguacugcgacaacgcuggcucugucuccuuuuucccucaagccgaaacguguaaggugugcucaaauagaguguuuugcgauaccaugaacaguuugacacuaccaagcgagguuaaucuguguaacaucgacauauucaaucccaaauaugauugcaagauuaugacuuccaaaaccgacgucucuagcucagugaucacaagucucggggcaaucguauccuguuacggaaagacuaaaugcaccgcuagcaacaagaauaaggguauuaucaaaacauuuucuaacggcugugauuauguuucaaauaaggggguggacaccgucagugugggaaacacucuguacuaugucaacaaacaggagggcaagagccuuuacgugaaaggugaaccuauuauaaauuucuaugacccacugguuuuuccguccgaugaguucgacgccucuaucagccaggugaacgaaaagauuaaucaaucguuggcguuuaucaggaaguccgaugagcuccugcacaacguaaaugucgggaaaucaacgacaaacaucaugauuaccacuauaaucauugugaucauuguuaucuuacugcuacucauagccgugggacuguuccuuuacugcaaggcacggugaggacuagucccuguucccagagcccacuuuuuuuucuuuuuuugaaauaaaauagccugucuuucagaucuaaaaaaaaaaaaaaaaaaaaaaaaaaaaaaaaaaaaaaaaaaaaaaaaaaaaaaaaaaaaaaaaugcaucccccccccccccccccccccccccccccccaaaggcucuuuucagagccaccagaauu

SEQ ID NO: 18782 - RNA, 1813 nt, Artificial Sequence
  mRNA product Design a-5 comprising derived and/or modified sequence from HRSV(Memphis-37)__AIY60640.1__F-del_DSCav1_mut7 (opt4)
gggagacuuucccauucuguagcagaauuugguguugccuguggucuuggucccgcggagaagcuuaccauggagcugcccauccugaagaccaacgccaucaccaccauccuggccgccgugacccugugcuucgccagcagccagaacaucaccgaggaguucuaccagagcaccugcagcgccgugagcaagggcuaccugagcgcccugagaaccggcugguacaccagcgugaucaccaucgagcugagcaacaucaaggagaacaagugcaacggcaccgacgccaaggugaagcugaucaagcaggagcuggacaaguacaagaacgccgugaccgagcugcagaugcugaugugcagcacccccgccgccggcagcggcagcgccaucgccagcggcaucgccgugugcaaggugcugcaccuggagggcgaggugaacaagaucaagaacgcccugcugagcaccaacaaggccguggugagccugagcaacggcgugagcgugcugaccuucaaggugcuggaccugaagaacuacaucgacaagcagcugcugcccauccugaacaagcagagcugcagcaucagcaacaucgagaccgugauggaguuccagcagaagaacaacagacugcuggagaucaccagagaguucagcgugaacgccggcgugaccacccccgugagcaccuacaugcugaccaacagcgagcugcugagccugaucaacgacaugcccaucaccaacgaccagaagaagcugaugagcaacaacgugcagaucgugagacagcagagcuacagcaucaugugcaucaucaaggaggaggugcuggccuacguggugcagcugccccuguacggcgugaucgacacccccugcuggaagcugcacaccagcccccugugcaccaccaacaccaaggagggcagcaacaucugccugaccagaaccgacagaggcugguacugcgacaacgccggcagcgugagcuucuucccccaggccgagaccugcaaggugugcagcaacagaguguucugcgacaccaugaacagccugacccugcccagcgaggugaaccugugcaacaucgacaucuucaaccccaaguacgacugcaagaucaugaccagcaagaccgacgugagcagcagcgugaucaccagccugggcgccaucgugagcugcuacggcaagaccaagugcaccgccagcaacaagaacaagggcaucaucaagaccuucagcaacggcugcgacuacgugagcaacaagggcguggacaccgugagcgugggcaacacccuguacuacgugaacaagcaggagggcaagagccuguacgugaagggcgagcccaucaucaacuucuacgacccccugguguuccccagcgacgaguucgacgccagcaucagccaggugaacgagaagaucaaccagagccuggccuucaucagaaagagcgacgagcugcugcacaacgugaacgugggcaagagcaccaccaacaucaugaucaccaccaucaucaucgugaucaucgugauccugcugcugcugaucgccgugggccuguuccuguacugcaaggccagaugaggacuagucccuguucccagagcccacuuuuuuuucuuuuuuugaaauaaaauagccugucuuucagaucuaaaaaaaaaaaaaaaaaaaaaaaaaaaaaaaaaaaaaaaaaaaaaaaaaaaaaaaaaaaaaaaaugcaucccccccccccccccccccccccccccccccaaaggcucuuuucagagccaccagaauu

SEQ ID NO: 18783 - RNA, 1813 nt, Artificial Sequence
  mRNA product Design a-5 comprising derived and/or modified sequence from HRSV(Memphis-37)__AIY60640.1__F-del_DSCav1_mut7 (opt5)
gggagacuuucccauucuguagcagaauuugguguugccuguggucuuggucccgcggagaagcuuaccauggagcugcccauccucaagaccaacgccauuacaacgauccuggcugccgugacccuuugcuucgcgagcucccagaauauuacagaagaguuuuaccaaucuaccuguagcgcugucuccaaaggcuaucugucugcccucagaacagggugguacaccagcguuaucacaauugaacuguccaacaucaaggagaauaaaugcaacggaaccgacgccaaggugaaacuuaucaagcaggaacuggauaaguauaaaaaugcugugacggagcuccagaugcugauguguucuaccccugccgcuggcagcggguccgccauugcgagcggaaucgccgucugcaaggugcugcaccucgagggcgaaguuaacaaaauuaagaaugcucugcuuucuacaaacaaagccguggucucccugagcaauggggugucuguucucaccuucaaggugcuggaccuuaagaacuacaucgauaaacagcugcucccgauucugaauaagcaauccuguagcaucucuaacauugagacagucauggaauuucagcagaaaaauaaccggcugcucgagaucacccgcgaguucuccgugaaugcuggagugacgacacccgucagcaccuauaugcugacaaacuccgaacuucugucucucaucaacgacaugccuauuaccaaugaucagaagaaacugaugagcaacaauguucaaaucgugagacagcaguccuacagcauuaugugcaucauuaaggaggaagugcuugccuaugucgugcagcugccccucuacggcguuaucgacaccccuuguuggaaacugcauacaucuccccugugcacgaccaacacaaaggagggcuccaauaucugucucacccggacagaucgcgggugguacugcgacaacgcgggaagcgugagcuuuuucccucaagccgaaaccuguaaggucugcucuaauagaguguuuugcgauacgaugaacucccugacacuuccgucugagguuaaucuguguaacauugacaucuucaaucccaaauaugauugcaagauuaugaccagcaaaaccgacguguccagcucugucaucacaucccucggcgcuauugugagcuguuacgggaagaccaaaugcacagccucuaacaagaauaagggaaucaucaaaacguuuuccaacggcugugauuaugucagcaauaaggggguggacaccguuuccgugggaaacacacuguacuaugucaacaaacaggagggcaagucucuuuacgugaaaggcgaaccuauuaucaauuucuaugacccccugguuuuuccuagcgaugaguucgacgcuuccauuucucaggugaacgaaaagaucaaucaaagccucgccuuuauucggaaguccgaugagcugcugcacaacgucaauguggggaaaagcaccacaaacaucaugauuaccacgaucaucauugugaucauuguuauccuccugcuucugauugccgucggacucuuccuguacugcaaggcucgcugaggacuagucccuguucccagagcccacuuuuuuuucuuuuuuugaaauaaaauagccugucuuucagaucuaaaaaaaaaaaaaaaaaaaaaaaaaaaaaaaaaaaaaaaaaaaaaaaaaaaaaaaaaaaaaaaaugcaucccccccccccccccccccccccccccccccaaaggcucuuuucagagccaccagaauu

SEQ ID NO: 18784 - RNA, 1813 nt, Artificial Sequence
  mRNA product Design a-5 comprising derived and/or modified sequence from HRSV(Memphis-37)__AIY60640.1__F-del_DSCav1_mut7 (opt6)
gggagacuuucccauucuguagcagaauuugguguugccuguggucuuggucccgcggagaagcuuaccauggaacuaccaauacucaaaacaaacgccauaaccacaauacuagccgcaguaacacuuugcuuugccucaagucaaaacauaacagaagaauuuuaccaauccacaugcucagcuguauccaaaggauauuuauccgcacuaagaacaggaugguacacaucaguaaucacaauagaauuaucaaacauaaaagaaaacaaauguaauggcacagacgccaaaguaaaacuaauuaaacaagaacuagacaaauauaaaaaugcaguaaccgaacuccaaaugcucaugugcucuacaccagcugcaggaucaggaucagccauugcaagcgguauagcuguuugcaaaguauuacacuuagaaggagaaguaaauaaaauaaaaaacgcacuacuaucaacaaauaaagcaguaguaucccuaucaaacggaguaucaguacuuacauucaaaguauuagauuuaaaaaacuauauagacaaacaacuacuucccauauuaaacaaacaaucaugcucaauuuccaacauugaaacuguaauggaauuucaacaaaaaaacaacagacuacuugaaaucacacgagaauuuucaguaaacgcuggaguaacaacaccugucucuaccuacaugcucacaaauagcgaauuacuaucucuaaucaaugacaugccaauaacaaacgaucaaaaaaaacuaauguccaacaacguacaaauaguaagacaacaauccuauucaauaaugugcauaauaaaagaagaagucuuagcauacguuguacaacuaccauuauacggaguaauagauacaccaugcuggaaacuccacacaagcccccucugcacaacaaacaccaaagaagggucaaacauaugcuuaacaagaacagacagaggaugguacugugauaacgcaggaucugucucauucuuuccacaagcagaaacauguaaaguaugcuccaacagagucuuuugcgacaccaugaacucacuaaccuuacccucagaaguaaaccugugcaacaucgauaucuucaaccccaaauacgauugcaaaaucaugacaagcaaaacugauguauccagcucuguaauaacaucacuaggugcaauaguaucaugcuacggaaaaacaaaaugcacagcuucuaacaaaaauaaaggaauaauaaaaacauucuccaauggaugcgacuaugucucaaauaaaggaguagauacaguuucagucggcaacacacucuauuauguaaauaaacaagaaggaaaaucauuauacguaaaaggagaacccauaauaaacuucuacgacccccucguauucccaagcgacgaauuugacgccucaauaucacaaguaaacgaaaaaauaaaccaaucacucgcauucaucagaaaaucagaugaacuacuacacaauguaaacgucggaaaauccaccacaaauauaaugauaacuaccaucauaauaguaauaauagucaucuuacuacuauuaaucgcuguaggacuauuucucuacugcaaggccagauaaggacuagucccuguucccagagcccacuuuuuuuucuuuuuuugaaauaaaauagccugucuuucagaucuaaaaaaaaaaaaaaaaaaaaaaaaaaaaaaaaaaaaaaaaaaaaaaaaaaaaaaaaaaaaaaaaugcaucccccccccccccccccccccccccccccccaaaggcucuuuucagagccaccagaauu

SEQ ID NO: 18785 - RNA, 1813 nt, Artificial Sequence
  mRNA product Design a-5 comprising derived and/or modified sequence from HRSV(Memphis-37)__AIY60640.1__F-del_DSCav1_mut7 (opt11)
gggagacuuucccauucuguagcagaauuugguguugccuguggucuuggucccgcggagaagcuuaccauggaacucccaauccucaaaacaaaugccaucaccaccauccuagccgcugucacacuaugcuucgccuccucacaaaacaucaccgaagaguucuaucaauccacaugcuccgccgucagcaagggauaccucuccgcccuuagaaccggcugguacaccucagucaucacaauugaacugucaaacaucaaagaaaacaaaugcaacggcaccgacgcaaaaguaaagcucaucaaacaagaacuggacaaguacaagaacgccgucaccgaacuacagaugcuuaugugcucaaccccugccgccggcuccggaucugccauagcuucaggcaucgccguaugcaaaguccugcaccuagaaggggaagucaacaaaaucaaaaacgcccuccucuccaccaacaaggccguugucucccugucaaacggagucuccguccuaaccuucaaaguccucgaccucaaaaacuacauagacaaacaacuccuacccauccucaacaaacaaagcugcucaauauccaacaucgaaaccgucauggaguuccaacaaaagaacaaccgacuacucgaaauaacacgcgaguucucagucaacgccggcgucaccaccccagucuccacauacaugcucaccaacuccgaacuccuaucgcucaucaacgacaugcccaucaccaaugaccagaagaaacucauguccaacaacguacaaaucguccgccaacaguccuacucaaucaugugcaucaucaaagaagaaguccuugccuacgucguccagcuuccacucuacggagucaucgacacccccugcuggaaacuccacaccuccccacuaugcaccaccaacaccaaagaaggauccaacauaugccucacccguacugaccgcggcugguacugcgacaacgccggauccgucucauucuucccccaggccgaaaccugcaaagucugcuccaaccgcgucuucugcgacaccaugaacucgcucacccucccauccgaagucaaucuaugcaacaucgacauuuucaaccccaaauacgacugcaaaauuaugacaucaaaaaccgacgucucauccucagucaucacuucccucggcgcaaucguaagcugcuacgggaaaacaaagugcaccgcuuccaacaaaaacaaaggcaucaucaaaaccuucucuaacggcugcgacuacgucuccaacaaaggagucgacaccguauccgucggcaacacccucuacuacgucaacaaacaggaaggaaaaucgcucuacgucaaaggagaaccaaucaucaacuucuacgacccccuagucuucccauccgacgaguucgacgccagcaucucacaagucaaugaaaagaucaaccagucacucgcauucauccguaagucagacgaacuccuacacaacgucaacgucggcaagucaacaaccaacauaaugaucaccaccauaaucaucgucauaauaguaauccuccuucuccuaaucgcagucggccucuuccucuacugcaaagcacgcuaaggacuagucccuguucccagagcccacuuuuuuuucuuuuuuugaaauaaaauagccugucuuucagaucuaaaaaaaaaaaaaaaaaaaaaaaaaaaaaaaaaaaaaaaaaaaaaaaaaaaaaaaaaaaaaaaaugcaucccccccccccccccccccccccccccccccaaaggcucuuuucagagccaccagaauu

SEQ ID NO: 18786 - RNA, 1994 nt, Artificial Sequence
  mRNA product Design b-1 comprising derived and/or modified sequence from HRSV(Memphis-37)__AIY60640.1__F-del_DSCav1_mut7 (opt1)
gggagacggagacggccugcaggaccugcucucucagcccucagccgaggccuacgccgagccgagugcgcagccgacgaccgggaggagccgcagccuucaacucugagguacugugauccgcgcugcccgccgggccgccccaguccgcugcugcggcaccuccuucccucgcgcccucuucgcucgccagcgccuucccugugagccugcgucaccgcggccgccaagcuuaccauggagcugcccauccucaagaccaacgccaucaccacgauccuggccgcggugacccugugcuucgccagcucccagaacaucaccgaggaguucuaccagagcacgugcuccgccgucagcaagggcuaccucuccgcccugcgcaccgggugguacaccagcgugaucaccaucgagcuguccaacaucaaggagaacaagugcaacggcaccgacgccaaggugaagcucaucaagcaggagcuggacaaguacaagaacgcggucacggagcugcagaugcugaugugcagcaccccggccgccggcuccgggagcgcgaucgccuccggcaucgccgucugcaaggugcugcaccucgagggcgaggugaacaagaucaagaacgcccugcuguccaccaacaaggccgucgugagccucuccaacggggugagcguccugaccuucaaggugcuggaccucaagaacuacaucgacaagcagcugcugcccauccugaacaagcagagcugcuccaucagcaacaucgagaccgucauggaguuccagcagaagaacaaccgccuccuggagaucacgcgggaguucagcgugaacgcgggcgugaccacccccgucuccaccuacaugcugacgaacagcgagcuccugucccugaucaacgacaugccgaucaccaacgaccagaagaagcucaugagcaacaacgugcagaucgugcgccagcaguccuacagcaucaugugcaucaucaaggaggagguccuggccuacguggugcagcugccccucuacggggucaucgacacccccugcuggaagcugcacaccagcccccugugcacgaccaacaccaaggagggcuccaacaucugccucacccggacggaccgcgggugguacugcgacaacgccggcagcguguccuucuucccgcaggccgagaccugcaaggucugcagcaaccggguguucugcgacaccaugaacucccugacccugcccagcgaggugaaccucugcaacaucgacaucuucaaccccaaguacgacugcaagaucaugacguccaagaccgacgucagcuccagcgugaucaccucccugggcgccaucgugagcugcuacgggaagaccaagugcacggcgagcaacaagaacaagggcaucaucaagaccuucuccaacgggugcgacuacgucagcaacaagggcguggacaccguguccgucggcaacacccuguacuacgugaacaagcaggagggcaagagccucuacgugaagggggagcccaucaucaacuucuacgacccgcuggucuuccccuccgacgaguucgacgccagcaucucccaggugaacgagaagaucaaccagagccuggccuucauccggaaguccgacgagcuccugcacaacgugaacgucggcaagagcaccacgaacaucaugaucaccaccaucaucaucgugaucaucgugauccugcugcuccugaucgccgucgggcuguuccucuacugcaaggcccgcugaggacuaguguccaccugucccuccugggcugcuggauugucucguuuuccugccaaauaaacaggaucagcgcuuuacagaucuaaaaaaaaaaaaaaaaaaaaaaaaaaaaaaaaaaaaaaaaaaaaaaaaaaaaaaaaaaaaaaaaugcaucccccccccccccccccccccccccccccccaaaggcucuuuucagagccaccagaauu

SEQ ID NO: 18787 - RNA, 1994 nt, Artificial Sequence
  mRNA product Design b-1 comprising derived and/or modified sequence from HRSV(Memphis-37)__AIY60640.1__F-del_DSCav1_mut7 (opt1)
gggagacggagacggccugcaggaccugcucucucagcccucagccgaggccuacgccgagccgagugcgcagccgacgaccgggaggagccgcagccuucaacucugagguacugugauccgcgcugcccgccgggccgccccaguccgcugcugcggcaccuccuucccucgcgcccucuucgcucgccagcgccuucccugugagccugcgucaccgcggccgccaagcuuaccauggagcugcccauccucaagaccaacgccaucaccacgauccuggccgcggugacccugugcuucgccagcucccagaacaucaccgaggaguucuaccagagcacgugcuccgccgucagcaagggguaccucuccgcccugcgcaccgggugguacaccagcgugaucaccaucgagcuguccaacaucaaggagaacaagugcaacggcaccgacgccaaggugaagcucaucaagcaggagcuggacaaguacaagaacgcggucacggagcugcagaugcucaugugcagcaccccggccgccggguccggcagcgccaucgcguccgggaucgccgugugcaaggugcugcaccuggagggcgaggucaacaagaucaagaacgcccuccugagcaccaacaaggccguggugucccugagcaacggcgucuccgugcucaccuucaaggugcuggaccugaagaacuacaucgacaagcagcuccugcccauccugaacaagcagagcugcuccaucagcaacaucgagacggucauggaguuccagcagaagaacaaccggcuccuggagaucacccgcgaguucuccgugaacgccggggugaccacccccgucagcacguacaugcugaccaacagcgagcuccugucccugaucaacgacaugcccaucaccaacgaccagaagaagcucaugagcaacaacgugcagaucgugcggcagcaguccuacagcaucaugugcaucaucaaggaggagguccuggcguacguggugcagcugccgcucuacggcgucaucgacacccccugcuggaagcugcacacgagcccccugugcaccaccaacaccaaggaggggagcaacaucugccucacgcgcaccgaccggggcugguacugcgacaacgccggguccgugagcuucuucccccaggccgagaccugcaaggugugcuccaaccgcgucuucugcgacaccaugaacagccugacgcugccguccgaggugaaccucugcaacaucgacaucuucaaccccaaguacgacugcaagaucaugaccagcaagaccgacgucuccagcuccgugaucaccagccugggcgccaucguguccugcuacggcaagacgaagugcaccgccagcaacaagaacaaggggaucaucaagaccuucuccaacggcugcgacuacgucagcaacaaggggguggacaccgugagcgucggcaacacgcuguacuacgugaacaagcaggagggcaagucccucuacgugaagggggagcccaucaucaacuucuacgacccccuggucuucccgagcgacgaguucgacgcguccaucagccaggugaacgagaagaucaaccagucccuggccuucauccggaaguccgacgagcuccugcacaacgugaacgucggcaaguccaccaccaacaucaugaucaccaccaucaucaucgugaucaucgugauccugcuccugcugaucgccgucggccucuuccuguacugcaaggcccgcugaggacuaguguccaccugucccuccugggcugcuggauugucucguuuuccugccaaauaaacaggaucagcgcuuuacagaucuaaaaaaaaaaaaaaaaaaaaaaaaaaaaaaaaaaaaaaaaaaaaaaaaaaaaaaaaaaaaaaaaugcaucccccccccccccccccccccccccccccccaaaggcucuuuucagagccaccagaauu

SEQ ID NO: 18788 - RNA, 1994 nt, Artificial Sequence
  mRNA product Design b-1 comprising derived and/or modified sequence from HRSV(Memphis-37)__AIY60640.1__F-del_DSCav1_mut7 (opt2)
gggagacggagacggccugcaggaccugcucucucagcccucagccgaggccuacgccgagccgagugcgcagccgacgaccgggaggagccgcagccuucaacucugagguacugugauccgcgcugcccgccgggccgccccaguccgcugcugcggcaccuccuucccucgcgcccucuucgcucgccagcgccuucccugugagccugcgucaccgcggccgccaagcuuaccauggagcuccccauccucaagaccaacgccaucaccaccauccucgccgccgucacccucugcuucgccuccucccagaacaucaccgaggaguucuaccaguccaccugcuccgccgucuccaagggcuaccucuccgcccuccgcaccggcugguacaccuccgucaucaccaucgagcucuccaacaucaaggagaacaagugcaacggcaccgacgccaaggucaagcucaucaagcaggagcucgacaaguacaagaacgccgucaccgagcuccagaugcucaugugcuccacccccgccgccggcuccggcuccgccaucgccuccggcaucgccgucugcaagguccuccaccucgagggcgaggucaacaagaucaagaacgcccuccucuccaccaacaaggccgucgucucccucuccaacggcgucuccguccucaccuucaagguccucgaccucaagaacuacaucgacaagcagcuccuccccauccucaacaagcaguccugcuccaucuccaacaucgagaccgucauggaguuccagcagaagaacaaccgccuccucgagaucacccgcgaguucuccgucaacgccggcgucaccacccccgucuccaccuacaugcucaccaacuccgagcuccucucccucaucaacgacaugcccaucaccaacgaccagaagaagcucauguccaacaacguccagaucguccgccagcaguccuacuccaucaugugcaucaucaaggaggagguccucgccuacgucguccagcucccccucuacggcgucaucgacacccccugcuggaagcuccacaccuccccccucugcaccaccaacaccaaggagggcuccaacaucugccucacccgcaccgaccgcggcugguacugcgacaacgccggcuccgucuccuucuucccccaggccgagaccugcaaggucugcuccaaccgcgucuucugcgacaccaugaacucccucacccuccccuccgaggucaaccucugcaacaucgacaucuucaaccccaaguacgacugcaagaucaugaccuccaagaccgacgucuccuccuccgucaucaccucccucggcgccaucgucuccugcuacggcaagaccaagugcaccgccuccaacaagaacaagggcaucaucaagaccuucuccaacggcugcgacuacgucuccaacaagggcgucgacaccgucuccgucggcaacacccucuacuacgucaacaagcaggagggcaagucccucuacgucaagggcgagcccaucaucaacuucuacgacccccucgucuuccccuccgacgaguucgacgccuccaucucccaggucaacgagaagaucaaccagucccucgccuucauccgcaaguccgacgagcuccuccacaacgucaacgucggcaaguccaccaccaacaucaugaucaccaccaucaucaucgucaucaucgucauccuccuccuccucaucgccgucggccucuuccucuacugcaaggcccgcugaggacuaguguccaccugucccuccugggcugcuggauugucucguuuuccugccaaauaaacaggaucagcgcuuuacagaucuaaaaaaaaaaaaaaaaaaaaaaaaaaaaaaaaaaaaaaaaaaaaaaaaaaaaaaaaaaaaaaaaugcaucccccccccccccccccccccccccccccccaaaggcucuuuucagagccaccagaauu

SEQ ID NO: 18789 - RNA, 1994 nt, Artificial Sequence
  mRNA product Design b-1 comprising derived and/or modified sequence from HRSV(Memphis-37)__AIY60640.1__F-del_DSCav1_mut7 (opt3)
gggagacggagacggccugcaggaccugcucucucagcccucagccgaggccuacgccgagccgagugcgcagccgacgaccgggaggagccgcagccuucaacucugagguacugugauccgcgcugcccgccgggccgccccaguccgcugcugcggcaccuccuucccucgcgcccucuucgcucgccagcgccuucccugugagccugcgucaccgcggccgccaagcuuaccauggagcugcccauccucaagaccaacgccauuacaacuauacuugcugcagugacgcugugcuucgccagcucccagaauaucaccgaagaguuuuaccaaucuacauguucagcggucaguaaaggcuauuugagcgcuuuaagaacugggugguacaccuccguuauuacaaucgaacugucuaacauuaaggagaauaaaugcaacggaaccgacgccaaggugaaacuaaucaagcaggaacucgauaaguauaaaaaugcaguaacugagcugcagaugcuuauguguucgaccccugccgcugguucaggcagcgcaauagccagugggaucgcugugugcaagguccugcacuuggagggagaagugaacaaaauuaagaaugcccuccuguccacaaacaaagcgguugugucucugagcaauggcgucuccgugcucacguucaagguauuagaccugaagaacuacaucgauaaacagcuuuugccaauucugaauaagcaaucauguaguaucagcaacauagagacuguuauggaauuucagcagaaaaauaacaggcuacucgagauuacccgggaguucucugugaaugccggugucacaacuccgguguccaccuauaugcugacaaacucagaacuucugagcuugaucaacgacaugcccauuaccaaugaucagaagaaacucaugaguaacaaugugcaaaucguccgccagcagucuuacuccaucaugugcauuauaaaggaggaaguucuggcauaugugguacaguuaccucuguacggggugaucgacacgccauguuggaaacuccauacuagcccccuuugcacaaccaacacuaaggagggaucgaauauuugucugacacgaaccgaucguggcugguacugcgacaacgcuggcucugucuccuuuuucccucaagccgaaacguguaaggugugcucaaauagaguguuuugcgauaccaugaacaguuugacacuaccaagcgagguuaaucuguguaacaucgacauauucaaucccaaauaugauugcaagauuaugacuuccaaaaccgacgucucuagcucagugaucacaagucucggggcaaucguauccuguuacggaaagacuaaaugcaccgcuagcaacaagaauaaggguauuaucaaaacauuuucuaacggcugugauuauguuucaaauaaggggguggacaccgucagugugggaaacacucuguacuaugucaacaaacaggagggcaagagccuuuacgugaaaggugaaccuauuauaaauuucuaugacccacugguuuuuccguccgaugaguucgacgccucuaucagccaggugaacgaaaagauuaaucaaucguuggcguuuaucaggaaguccgaugagcuccugcacaacguaaaugucgggaaaucaacgacaaacaucaugauuaccacuauaaucauugugaucauuguuaucuuacugcuacucauagccgugggacuguuccuuuacugcaaggcacggugaggacuaguguccaccugucccuccugggcugcuggauugucucguuuuccugccaaauaaacaggaucagcgcuuuacagaucuaaaaaaaaaaaaaaaaaaaaaaaaaaaaaaaaaaaaaaaaaaaaaaaaaaaaaaaaaaaaaaaaugcaucccccccccccccccccccccccccccccccaaaggcucuuuucagagccaccagaauu

SEQ ID NO: 18790 - RNA, 1994 nt, Artificial Sequence
  mRNA product Design b-1 comprising derived and/or modified sequence from HRSV(Memphis-37)__AIY60640.1__F-del_DSCav1_mut7 (opt4)
gggagacggagacggccugcaggaccugcucucucagcccucagccgaggccuacgccgagccgagugcgcagccgacgaccgggaggagccgcagccuucaacucugagguacugugauccgcgcugcccgccgggccgccccaguccgcugcugcggcaccuccuucccucgcgcccucuucgcucgccagcgccuucccugugagccugcgucaccgcggccgccaagcuuaccauggagcugcccauccugaagaccaacgccaucaccaccauccuggccgccgugacccugugcuucgccagcagccagaacaucaccgaggaguucuaccagagcaccugcagcgccgugagcaagggcuaccugagcgcccugagaaccggcugguacaccagcgugaucaccaucgagcugagcaacaucaaggagaacaagugcaacggcaccgacgccaaggugaagcugaucaagcaggagcuggacaaguacaagaacgccgugaccgagcugcagaugcugaugugcagcacccccgccgccggcagcggcagcgccaucgccagcggcaucgccgugugcaaggugcugcaccuggagggcgaggugaacaagaucaagaacgcccugcugagcaccaacaaggccguggugagccugagcaacggcgugagcgugcugaccuucaaggugcuggaccugaagaacuacaucgacaagcagcugcugcccauccugaacaagcagagcugcagcaucagcaacaucgagaccgugauggaguuccagcagaagaacaacagacugcuggagaucaccagagaguucagcgugaacgccggcgugaccacccccgugagcaccuacaugcugaccaacagcgagcugcugagccugaucaacgacaugcccaucaccaacgaccagaagaagcugaugagcaacaacgugcagaucgugagacagcagagcuacagcaucaugugcaucaucaaggaggaggugcuggccuacguggugcagcugccccuguacggcgugaucgacacccccugcuggaagcugcacaccagcccccugugcaccaccaacaccaaggagggcagcaacaucugccugaccagaaccgacagaggcugguacugcgacaacgccggcagcgugagcuucuucccccaggccgagaccugcaaggugugcagcaacagaguguucugcgacaccaugaacagccugacccugcccagcgaggugaaccugugcaacaucgacaucuucaaccccaaguacgacugcaagaucaugaccagcaagaccgacgugagcagcagcgugaucaccagccugggcgccaucgugagcugcuacggcaagaccaagugcaccgccagcaacaagaacaagggcaucaucaagaccuucagcaacggcugcgacuacgugagcaacaagggcguggacaccgugagcgugggcaacacccuguacuacgugaacaagcaggagggcaagagccuguacgugaagggcgagcccaucaucaacuucuacgacccccugguguuccccagcgacgaguucgacgccagcaucagccaggugaacgagaagaucaaccagagccuggccuucaucagaaagagcgacgagcugcugcacaacgugaacgugggcaagagcaccaccaacaucaugaucaccaccaucaucaucgugaucaucgugauccugcugcugcugaucgccgugggccuguuccuguacugcaaggccagaugaggacuaguguccaccugucccuccugggcugcuggauugucucguuuuccugccaaauaaacaggaucagcgcuuuacagaucuaaaaaaaaaaaaaaaaaaaaaaaaaaaaaaaaaaaaaaaaaaaaaaaaaaaaaaaaaaaaaaaaugcaucccccccccccccccccccccccccccccccaaaggcucuuuucagagccaccagaauu

SEQ ID NO: 18791 - RNA, 1994 nt, Artificial Sequence
  mRNA product Design b-1 comprising derived and/or modified sequence from HRSV(Memphis-37)__AIY60640.1__F-del_DSCav1_mut7 (opt5)
gggagacggagacggccugcaggaccugcucucucagcccucagccgaggccuacgccgagccgagugcgcagccgacgaccgggaggagccgcagccuucaacucugagguacugugauccgcgcugcccgccgggccgccccaguccgcugcugcggcaccuccuucccucgcgcccucuucgcucgccagcgccuucccugugagccugcgucaccgcggccgccaagcuuaccauggagcugcccauccucaagaccaacgccauuacaacgauccuggcugccgugacccuuugcuucgcgagcucccagaauauuacagaagaguuuuaccaaucuaccuguagcgcugucuccaaaggcuaucugucugcccucagaacagggugguacaccagcguuaucacaauugaacuguccaacaucaaggagaauaaaugcaacggaaccgacgccaaggugaaacuuaucaagcaggaacuggauaaguauaaaaaugcugugacggagcuccagaugcugauguguucuaccccugccgcuggcagcggguccgccauugcgagcggaaucgccgucugcaaggugcugcaccucgagggcgaaguuaacaaaauuaagaaugcucugcuuucuacaaacaaagccguggucucccugagcaauggggugucuguucucaccuucaaggugcuggaccuuaagaacuacaucgauaaacagcugcucccgauucugaauaagcaauccuguagcaucucuaacauugagacagucauggaauuucagcagaaaaauaaccggcugcucgagaucacccgcgaguucuccgugaaugcuggagugacgacacccgucagcaccuauaugcugacaaacuccgaacuucugucucucaucaacgacaugccuauuaccaaugaucagaagaaacugaugagcaacaauguucaaaucgugagacagcaguccuacagcauuaugugcaucauuaaggaggaagugcuugccuaugucgugcagcugccccucuacggcguuaucgacaccccuuguuggaaacugcauacaucuccccugugcacgaccaacacaaaggagggcuccaauaucugucucacccggacagaucgcgggugguacugcgacaacgcgggaagcgugagcuuuuucccucaagccgaaaccuguaaggucugcucuaauagaguguuuugcgauacgaugaacucccugacacuuccgucugagguuaaucuguguaacauugacaucuucaaucccaaauaugauugcaagauuaugaccagcaaaaccgacguguccagcucugucaucacaucccucggcgcuauugugagcuguuacgggaagaccaaaugcacagccucuaacaagaauaagggaaucaucaaaacguuuuccaacggcugugauuaugucagcaauaaggggguggacaccguuuccgugggaaacacacuguacuaugucaacaaacaggagggcaagucucuuuacgugaaaggcgaaccuauuaucaauuucuaugacccccugguuuuuccuagcgaugaguucgacgcuuccauuucucaggugaacgaaaagaucaaucaaagccucgccuuuauucggaaguccgaugagcugcugcacaacgucaauguggggaaaagcaccacaaacaucaugauuaccacgaucaucauugugaucauuguuauccuccugcuucugauugccgucggacucuuccuguacugcaaggcucgcugaggacuaguguccaccugucccuccugggcugcuggauugucucguuuuccugccaaauaaacaggaucagcgcuuuacagaucuaaaaaaaaaaaaaaaaaaaaaaaaaaaaaaaaaaaaaaaaaaaaaaaaaaaaaaaaaaaaaaaaugcaucccccccccccccccccccccccccccccccaaaggcucuuuucagagccaccagaauu

SEQ ID NO: 18792 - RNA, 1994 nt, Artificial Sequence
  mRNA product Design b-1 comprising derived and/or modified sequence from HRSV(Memphis-37)__AIY60640.1__F-del_DSCav1_mut7 (opt6)
gggagacggagacggccugcaggaccugcucucucagcccucagccgaggccuacgccgagccgagugcgcagccgacgaccgggaggagccgcagccuucaacucugagguacugugauccgcgcugcccgccgggccgccccaguccgcugcugcggcaccuccuucccucgcgcccucuucgcucgccagcgccuucccugugagccugcgucaccgcggccgccaagcuuaccauggaacuaccaauacucaaaacaaacgccauaaccacaauacuagccgcaguaacacuuugcuuugccucaagucaaaacauaacagaagaauuuuaccaauccacaugcucagcuguauccaaaggauauuuauccgcacuaagaacaggaugguacacaucaguaaucacaauagaauuaucaaacauaaaagaaaacaaauguaauggcacagacgccaaaguaaaacuaauuaaacaagaacuagacaaauauaaaaaugcaguaaccgaacuccaaaugcucaugugcucuacaccagcugcaggaucaggaucagccauugcaagcgguauagcuguuugcaaaguauuacacuuagaaggagaaguaaauaaaauaaaaaacgcacuacuaucaacaaauaaagcaguaguaucccuaucaaacggaguaucaguacuuacauucaaaguauuagauuuaaaaaacuauauagacaaacaacuacuucccauauuaaacaaacaaucaugcucaauuuccaacauugaaacuguaauggaauuucaacaaaaaaacaacagacuacuugaaaucacacgagaauuuucaguaaacgcuggaguaacaacaccugucucuaccuacaugcucacaaauagcgaauuacuaucucuaaucaaugacaugccaauaacaaacgaucaaaaaaaacuaauguccaacaacguacaaauaguaagacaacaauccuauucaauaaugugcauaauaaaagaagaagucuuagcauacguuguacaacuaccauuauacggaguaauagauacaccaugcuggaaacuccacacaagcccccucugcacaacaaacaccaaagaagggucaaacauaugcuuaacaagaacagacagaggaugguacugugauaacgcaggaucugucucauucuuuccacaagcagaaacauguaaaguaugcuccaacagagucuuuugcgacaccaugaacucacuaaccuuacccucagaaguaaaccugugcaacaucgauaucuucaaccccaaauacgauugcaaaaucaugacaagcaaaacugauguauccagcucuguaauaacaucacuaggugcaauaguaucaugcuacggaaaaacaaaaugcacagcuucuaacaaaaauaaaggaauaauaaaaacauucuccaauggaugcgacuaugucucaaauaaaggaguagauacaguuucagucggcaacacacucuauuauguaaauaaacaagaaggaaaaucauuauacguaaaaggagaacccauaauaaacuucuacgacccccucguauucccaagcgacgaauuugacgccucaauaucacaaguaaacgaaaaaauaaaccaaucacucgcauucaucagaaaaucagaugaacuacuacacaauguaaacgucggaaaauccaccacaaauauaaugauaacuaccaucauaauaguaauaauagucaucuuacuacuauuaaucgcuguaggacuauuucucuacugcaaggccagauaaggacuaguguccaccugucccuccugggcugcuggauugucucguuuuccugccaaauaaacaggaucagcgcuuuacagaucuaaaaaaaaaaaaaaaaaaaaaaaaaaaaaaaaaaaaaaaaaaaaaaaaaaaaaaaaaaaaaaaaugcaucccccccccccccccccccccccccccccccaaaggcucuuuucagagccaccagaauu

SEQ ID NO: 18793 - RNA, 1994 nt, Artificial Sequence
  mRNA product Design b-1 comprising derived and/or modified sequence from HRSV(Memphis-37)__AIY60640.1__F-del_DSCav1_mut7 (opt11)
gggagacggagacggccugcaggaccugcucucucagcccucagccgaggccuacgccgagccgagugcgcagccgacgaccgggaggagccgcagccuucaacucugagguacugugauccgcgcugcccgccgggccgccccaguccgcugcugcggcaccuccuucccucgcgcccucuucgcucgccagcgccuucccugugagccugcgucaccgcggccgccaagcuuaccauggaacucccaauccucaaaacaaaugccaucaccaccauccuagccgcugucacacuaugcuucgccuccucacaaaacaucaccgaagaguucuaucaauccacaugcuccgccgucagcaagggauaccucuccgcccuuagaaccggcugguacaccucagucaucacaauugaacugucaaacaucaaagaaaacaaaugcaacggcaccgacgcaaaaguaaagcucaucaaacaagaacuggacaaguacaagaacgccgucaccgaacuacagaugcuuaugugcucaaccccugccgccggcuccggaucugccauagcuucaggcaucgccguaugcaaaguccugcaccuagaaggggaagucaacaaaaucaaaaacgcccuccucuccaccaacaaggccguugucucccugucaaacggagucuccguccuaaccuucaaaguccucgaccucaaaaacuacauagacaaacaacuccuacccauccucaacaaacaaagcugcucaauauccaacaucgaaaccgucauggaguuccaacaaaagaacaaccgacuacucgaaauaacacgcgaguucucagucaacgccggcgucaccaccccagucuccacauacaugcucaccaacuccgaacuccuaucgcucaucaacgacaugcccaucaccaaugaccagaagaaacucauguccaacaacguacaaaucguccgccaacaguccuacucaaucaugugcaucaucaaagaagaaguccuugccuacgucguccagcuuccacucuacggagucaucgacacccccugcuggaaacuccacaccuccccacuaugcaccaccaacaccaaagaaggauccaacauaugccucacccguacugaccgcggcugguacugcgacaacgccggauccgucucauucuucccccaggccgaaaccugcaaagucugcuccaaccgcgucuucugcgacaccaugaacucgcucacccucccauccgaagucaaucuaugcaacaucgacauuuucaaccccaaauacgacugcaaaauuaugacaucaaaaaccgacgucucauccucagucaucacuucccucggcgcaaucguaagcugcuacgggaaaacaaagugcaccgcuuccaacaaaaacaaaggcaucaucaaaaccuucucuaacggcugcgacuacgucuccaacaaaggagucgacaccguauccgucggcaacacccucuacuacgucaacaaacaggaaggaaaaucgcucuacgucaaaggagaaccaaucaucaacuucuacgacccccuagucuucccauccgacgaguucgacgccagcaucucacaagucaaugaaaagaucaaccagucacucgcauucauccguaagucagacgaacuccuacacaacgucaacgucggcaagucaacaaccaacauaaugaucaccaccauaaucaucgucauaauaguaauccuccuucuccuaaucgcagucggccucuuccucuacugcaaagcacgcuaaggacuaguguccaccugucccuccugggcugcuggauugucucguuuuccugccaaauaaacaggaucagcgcuuuacagaucuaaaaaaaaaaaaaaaaaaaaaaaaaaaaaaaaaaaaaaaaaaaaaaaaaaaaaaaaaaaaaaaaugcaucccccccccccccccccccccccccccccccaaaggcucuuuucagagccaccagaauu

SEQ ID NO: 18794 - RNA, 1814 nt, Artificial Sequence
  mRNA product Design b-2 comprising derived and/or modified sequence from HRSV(Memphis-37)__AIY60640.1__F-del_DSCav1_mut7 (opt1)
gggagagccucugcuggaguccggggaguggcguuggcugcuagagcgaagcuuaccauggagcugcccauccucaagaccaacgccaucaccacgauccuggccgcggugacccugugcuucgccagcucccagaacaucaccgaggaguucuaccagagcacgugcuccgccgucagcaagggcuaccucuccgcccugcgcaccgggugguacaccagcgugaucaccaucgagcuguccaacaucaaggagaacaagugcaacggcaccgacgccaaggugaagcucaucaagcaggagcuggacaaguacaagaacgcggucacggagcugcagaugcugaugugcagcaccccggccgccggcuccgggagcgcgaucgccuccggcaucgccgucugcaaggugcugcaccucgagggcgaggugaacaagaucaagaacgcccugcuguccaccaacaaggccgucgugagccucuccaacggggugagcguccugaccuucaaggugcuggaccucaagaacuacaucgacaagcagcugcugcccauccugaacaagcagagcugcuccaucagcaacaucgagaccgucauggaguuccagcagaagaacaaccgccuccuggagaucacgcgggaguucagcgugaacgcgggcgugaccacccccgucuccaccuacaugcugacgaacagcgagcuccugucccugaucaacgacaugccgaucaccaacgaccagaagaagcucaugagcaacaacgugcagaucgugcgccagcaguccuacagcaucaugugcaucaucaaggaggagguccuggccuacguggugcagcugccccucuacggggucaucgacacccccugcuggaagcugcacaccagcccccugugcacgaccaacaccaaggagggcuccaacaucugccucacccggacggaccgcgggugguacugcgacaacgccggcagcguguccuucuucccgcaggccgagaccugcaaggucugcagcaaccggguguucugcgacaccaugaacucccugacccugcccagcgaggugaaccucugcaacaucgacaucuucaaccccaaguacgacugcaagaucaugacguccaagaccgacgucagcuccagcgugaucaccucccugggcgccaucgugagcugcuacgggaagaccaagugcacggcgagcaacaagaacaagggcaucaucaagaccuucuccaacgggugcgacuacgucagcaacaagggcguggacaccguguccgucggcaacacccuguacuacgugaacaagcaggagggcaagagccucuacgugaagggggagcccaucaucaacuucuacgacccgcuggucuuccccuccgacgaguucgacgccagcaucucccaggugaacgagaagaucaaccagagccuggccuucauccggaaguccgacgagcuccugcacaacgugaacgucggcaagagcaccacgaacaucaugaucaccaccaucaucaucgugaucaucgugauccugcugcuccugaucgccgucgggcuguuccucuacugcaaggcccgcugaggacuaguguccaccugucccuccugggcugcuggauugucucguuuuccugccaaauaaacaggaucagcgcuuuacagaucuaaaaaaaaaaaaaaaaaaaaaaaaaaaaaaaaaaaaaaaaaaaaaaaaaaaaaaaaaaaaaaaaugcaucccccccccccccccccccccccccccccccaaaggcucuuuucagagccaccagaauu

SEQ ID NO: 18795 - RNA, 1814 nt, Artificial Sequence
  mRNA product Design b-2 comprising derived and/or modified sequence from HRSV(Memphis-37)__AIY60640.1__F-del_DSCav1_mut7 (opt1)
gggagagccucugcuggaguccggggaguggcguuggcugcuagagcgaagcuuaccauggagcugcccauccucaagaccaacgccaucaccacgauccuggccgcggugacccugugcuucgccagcucccagaacaucaccgaggaguucuaccagagcacgugcuccgccgucagcaagggguaccucuccgcccugcgcaccgggugguacaccagcgugaucaccaucgagcuguccaacaucaaggagaacaagugcaacggcaccgacgccaaggugaagcucaucaagcaggagcuggacaaguacaagaacgcggucacggagcugcagaugcucaugugcagcaccccggccgccggguccggcagcgccaucgcguccgggaucgccgugugcaaggugcugcaccuggagggcgaggucaacaagaucaagaacgcccuccugagcaccaacaaggccguggugucccugagcaacggcgucuccgugcucaccuucaaggugcuggaccugaagaacuacaucgacaagcagcuccugcccauccugaacaagcagagcugcuccaucagcaacaucgagacggucauggaguuccagcagaagaacaaccggcuccuggagaucacccgcgaguucuccgugaacgccggggugaccacccccgucagcacguacaugcugaccaacagcgagcuccugucccugaucaacgacaugcccaucaccaacgaccagaagaagcucaugagcaacaacgugcagaucgugcggcagcaguccuacagcaucaugugcaucaucaaggaggagguccuggcguacguggugcagcugccgcucuacggcgucaucgacacccccugcuggaagcugcacacgagcccccugugcaccaccaacaccaaggaggggagcaacaucugccucacgcgcaccgaccggggcugguacugcgacaacgccggguccgugagcuucuucccccaggccgagaccugcaaggugugcuccaaccgcgucuucugcgacaccaugaacagccugacgcugccguccgaggugaaccucugcaacaucgacaucuucaaccccaaguacgacugcaagaucaugaccagcaagaccgacgucuccagcuccgugaucaccagccugggcgccaucguguccugcuacggcaagacgaagugcaccgccagcaacaagaacaaggggaucaucaagaccuucuccaacggcugcgacuacgucagcaacaaggggguggacaccgugagcgucggcaacacgcuguacuacgugaacaagcaggagggcaagucccucuacgugaagggggagcccaucaucaacuucuacgacccccuggucuucccgagcgacgaguucgacgcguccaucagccaggugaacgagaagaucaaccagucccuggccuucauccggaaguccgacgagcuccugcacaacgugaacgucggcaaguccaccaccaacaucaugaucaccaccaucaucaucgugaucaucgugauccugcuccugcugaucgccgucggccucuuccuguacugcaaggcccgcugaggacuaguguccaccugucccuccugggcugcuggauugucucguuuuccugccaaauaaacaggaucagcgcuuuacagaucuaaaaaaaaaaaaaaaaaaaaaaaaaaaaaaaaaaaaaaaaaaaaaaaaaaaaaaaaaaaaaaaaugcaucccccccccccccccccccccccccccccccaaaggcucuuuucagagccaccagaauu

SEQ ID NO: 18796 - RNA, 1814 nt, Artificial Sequence
  mRNA product Design b-2 comprising derived and/or modified sequence from HRSV(Memphis-37)__AIY60640.1__F-del_DSCav1_mut7 (opt2)
gggagagccucugcuggaguccggggaguggcguuggcugcuagagcgaagcuuaccauggagcuccccauccucaagaccaacgccaucaccaccauccucgccgccgucacccucugcuucgccuccucccagaacaucaccgaggaguucuaccaguccaccugcuccgccgucuccaagggcuaccucuccgcccuccgcaccggcugguacaccuccgucaucaccaucgagcucuccaacaucaaggagaacaagugcaacggcaccgacgccaaggucaagcucaucaagcaggagcucgacaaguacaagaacgccgucaccgagcuccagaugcucaugugcuccacccccgccgccggcuccggcuccgccaucgccuccggcaucgccgucugcaagguccuccaccucgagggcgaggucaacaagaucaagaacgcccuccucuccaccaacaaggccgucgucucccucuccaacggcgucuccguccucaccuucaagguccucgaccucaagaacuacaucgacaagcagcuccuccccauccucaacaagcaguccugcuccaucuccaacaucgagaccgucauggaguuccagcagaagaacaaccgccuccucgagaucacccgcgaguucuccgucaacgccggcgucaccacccccgucuccaccuacaugcucaccaacuccgagcuccucucccucaucaacgacaugcccaucaccaacgaccagaagaagcucauguccaacaacguccagaucguccgccagcaguccuacuccaucaugugcaucaucaaggaggagguccucgccuacgucguccagcucccccucuacggcgucaucgacacccccugcuggaagcuccacaccuccccccucugcaccaccaacaccaaggagggcuccaacaucugccucacccgcaccgaccgcggcugguacugcgacaacgccggcuccgucuccuucuucccccaggccgagaccugcaaggucugcuccaaccgcgucuucugcgacaccaugaacucccucacccuccccuccgaggucaaccucugcaacaucgacaucuucaaccccaaguacgacugcaagaucaugaccuccaagaccgacgucuccuccuccgucaucaccucccucggcgccaucgucuccugcuacggcaagaccaagugcaccgccuccaacaagaacaagggcaucaucaagaccuucuccaacggcugcgacuacgucuccaacaagggcgucgacaccgucuccgucggcaacacccucuacuacgucaacaagcaggagggcaagucccucuacgucaagggcgagcccaucaucaacuucuacgacccccucgucuuccccuccgacgaguucgacgccuccaucucccaggucaacgagaagaucaaccagucccucgccuucauccgcaaguccgacgagcuccuccacaacgucaacgucggcaaguccaccaccaacaucaugaucaccaccaucaucaucgucaucaucgucauccuccuccuccucaucgccgucggccucuuccucuacugcaaggcccgcugaggacuaguguccaccugucccuccugggcugcuggauugucucguuuuccugccaaauaaacaggaucagcgcuuuacagaucuaaaaaaaaaaaaaaaaaaaaaaaaaaaaaaaaaaaaaaaaaaaaaaaaaaaaaaaaaaaaaaaaugcaucccccccccccccccccccccccccccccccaaaggcucuuuucagagccaccagaauu

SEQ ID NO: 18797 - RNA, 1814 nt, Artificial Sequence
  mRNA product Design b-2 comprising derived and/or modified sequence from HRSV(Memphis-37)__AIY60640.1__F-del_DSCav1_mut7 (opt3)
gggagagccucugcuggaguccggggaguggcguuggcugcuagagcgaagcuuaccauggagcugcccauccucaagaccaacgccauuacaacuauacuugcugcagugacgcugugcuucgccagcucccagaauaucaccgaagaguuuuaccaaucuacauguucagcggucaguaaaggcuauuugagcgcuuuaagaacugggugguacaccuccguuauuacaaucgaacugucuaacauuaaggagaauaaaugcaacggaaccgacgccaaggugaaacuaaucaagcaggaacucgauaaguauaaaaaugcaguaacugagcugcagaugcuuauguguucgaccccugccgcugguucaggcagcgcaauagccagugggaucgcugugugcaagguccugcacuuggagggagaagugaacaaaauuaagaaugcccuccuguccacaaacaaagcgguugugucucugagcaauggcgucuccgugcucacguucaagguauuagaccugaagaacuacaucgauaaacagcuuuugccaauucugaauaagcaaucauguaguaucagcaacauagagacuguuauggaauuucagcagaaaaauaacaggcuacucgagauuacccgggaguucucugugaaugccggugucacaacuccgguguccaccuauaugcugacaaacucagaacuucugagcuugaucaacgacaugcccauuaccaaugaucagaagaaacucaugaguaacaaugugcaaaucguccgccagcagucuuacuccaucaugugcauuauaaaggaggaaguucuggcauaugugguacaguuaccucuguacggggugaucgacacgccauguuggaaacuccauacuagcccccuuugcacaaccaacacuaaggagggaucgaauauuugucugacacgaaccgaucguggcugguacugcgacaacgcuggcucugucuccuuuuucccucaagccgaaacguguaaggugugcucaaauagaguguuuugcgauaccaugaacaguuugacacuaccaagcgagguuaaucuguguaacaucgacauauucaaucccaaauaugauugcaagauuaugacuuccaaaaccgacgucucuagcucagugaucacaagucucggggcaaucguauccuguuacggaaagacuaaaugcaccgcuagcaacaagaauaaggguauuaucaaaacauuuucuaacggcugugauuauguuucaaauaaggggguggacaccgucagugugggaaacacucuguacuaugucaacaaacaggagggcaagagccuuuacgugaaaggugaaccuauuauaaauuucuaugacccacugguuuuuccguccgaugaguucgacgccucuaucagccaggugaacgaaaagauuaaucaaucguuggcguuuaucaggaaguccgaugagcuccugcacaacguaaaugucgggaaaucaacgacaaacaucaugauuaccacuauaaucauugugaucauuguuaucuuacugcuacucauagccgugggacuguuccuuuacugcaaggcacggugaggacuaguguccaccugucccuccugggcugcuggauugucucguuuuccugccaaauaaacaggaucagcgcuuuacagaucuaaaaaaaaaaaaaaaaaaaaaaaaaaaaaaaaaaaaaaaaaaaaaaaaaaaaaaaaaaaaaaaaugcaucccccccccccccccccccccccccccccccaaaggcucuuuucagagccaccagaauu

SEQ ID NO: 18798 - RNA, 1814 nt, Artificial Sequence
  mRNA product Design b-2 comprising derived and/or modified sequence from HRSV(Memphis-37)__AIY60640.1__F-del_DSCav1_mut7 (opt4)
gggagagccucugcuggaguccggggaguggcguuggcugcuagagcgaagcuuaccauggagcugcccauccugaagaccaacgccaucaccaccauccuggccgccgugacccugugcuucgccagcagccagaacaucaccgaggaguucuaccagagcaccugcagcgccgugagcaagggcuaccugagcgcccugagaaccggcugguacaccagcgugaucaccaucgagcugagcaacaucaaggagaacaagugcaacggcaccgacgccaaggugaagcugaucaagcaggagcuggacaaguacaagaacgccgugaccgagcugcagaugcugaugugcagcacccccgccgccggcagcggcagcgccaucgccagcggcaucgccgugugcaaggugcugcaccuggagggcgaggugaacaagaucaagaacgcccugcugagcaccaacaaggccguggugagccugagcaacggcgugagcgugcugaccuucaaggugcuggaccugaagaacuacaucgacaagcagcugcugcccauccugaacaagcagagcugcagcaucagcaacaucgagaccgugauggaguuccagcagaagaacaacagacugcuggagaucaccagagaguucagcgugaacgccggcgugaccacccccgugagcaccuacaugcugaccaacagcgagcugcugagccugaucaacgacaugcccaucaccaacgaccagaagaagcugaugagcaacaacgugcagaucgugagacagcagagcuacagcaucaugugcaucaucaaggaggaggugcuggccuacguggugcagcugccccuguacggcgugaucgacacccccugcuggaagcugcacaccagcccccugugcaccaccaacaccaaggagggcagcaacaucugccugaccagaaccgacagaggcugguacugcgacaacgccggcagcgugagcuucuucccccaggccgagaccugcaaggugugcagcaacagaguguucugcgacaccaugaacagccugacccugcccagcgaggugaaccugugcaacaucgacaucuucaaccccaaguacgacugcaagaucaugaccagcaagaccgacgugagcagcagcgugaucaccagccugggcgccaucgugagcugcuacggcaagaccaagugcaccgccagcaacaagaacaagggcaucaucaagaccuucagcaacggcugcgacuacgugagcaacaagggcguggacaccgugagcgugggcaacacccuguacuacgugaacaagcaggagggcaagagccuguacgugaagggcgagcccaucaucaacuucuacgacccccugguguuccccagcgacgaguucgacgccagcaucagccaggugaacgagaagaucaaccagagccuggccuucaucagaaagagcgacgagcugcugcacaacgugaacgugggcaagagcaccaccaacaucaugaucaccaccaucaucaucgugaucaucgugauccugcugcugcugaucgccgugggccuguuccuguacugcaaggccagaugaggacuaguguccaccugucccuccugggcugcuggauugucucguuuuccugccaaauaaacaggaucagcgcuuuacagaucuaaaaaaaaaaaaaaaaaaaaaaaaaaaaaaaaaaaaaaaaaaaaaaaaaaaaaaaaaaaaaaaaugcaucccccccccccccccccccccccccccccccaaaggcucuuuucagagccaccagaauu

SEQ ID NO: 18799 - RNA, 1814 nt, Artificial Sequence
  mRNA product Design b-2 comprising derived and/or modified sequence from HRSV(Memphis-37)__AIY60640.1__F-del_DSCav1_mut7 (opt5)
gggagagccucugcuggaguccggggaguggcguuggcugcuagagcgaagcuuaccauggagcugcccauccucaagaccaacgccauuacaacgauccuggcugccgugacccuuugcuucgcgagcucccagaauauuacagaagaguuuuaccaaucuaccuguagcgcugucuccaaaggcuaucugucugcccucagaacagggugguacaccagcguuaucacaauugaacuguccaacaucaaggagaauaaaugcaacggaaccgacgccaaggugaaacuuaucaagcaggaacuggauaaguauaaaaaugcugugacggagcuccagaugcugauguguucuaccccugccgcuggcagcggguccgccauugcgagcggaaucgccgucugcaaggugcugcaccucgagggcgaaguuaacaaaauuaagaaugcucugcuuucuacaaacaaagccguggucucccugagcaauggggugucuguucucaccuucaaggugcuggaccuuaagaacuacaucgauaaacagcugcucccgauucugaauaagcaauccuguagcaucucuaacauugagacagucauggaauuucagcagaaaaauaaccggcugcucgagaucacccgcgaguucuccgugaaugcuggagugacgacacccgucagcaccuauaugcugacaaacuccgaacuucugucucucaucaacgacaugccuauuaccaaugaucagaagaaacugaugagcaacaauguucaaaucgugagacagcaguccuacagcauuaugugcaucauuaaggaggaagugcuugccuaugucgugcagcugccccucuacggcguuaucgacaccccuuguuggaaacugcauacaucuccccugugcacgaccaacacaaaggagggcuccaauaucugucucacccggacagaucgcgggugguacugcgacaacgcgggaagcgugagcuuuuucccucaagccgaaaccuguaaggucugcucuaauagaguguuuugcgauacgaugaacucccugacacuuccgucugagguuaaucuguguaacauugacaucuucaaucccaaauaugauugcaagauuaugaccagcaaaaccgacguguccagcucugucaucacaucccucggcgcuauugugagcuguuacgggaagaccaaaugcacagccucuaacaagaauaagggaaucaucaaaacguuuuccaacggcugugauuaugucagcaauaaggggguggacaccguuuccgugggaaacacacuguacuaugucaacaaacaggagggcaagucucuuuacgugaaaggcgaaccuauuaucaauuucuaugacccccugguuuuuccuagcgaugaguucgacgcuuccauuucucaggugaacgaaaagaucaaucaaagccucgccuuuauucggaaguccgaugagcugcugcacaacgucaauguggggaaaagcaccacaaacaucaugauuaccacgaucaucauugugaucauuguuauccuccugcuucugauugccgucggacucuuccuguacugcaaggcucgcugaggacuaguguccaccugucccuccugggcugcuggauugucucguuuuccugccaaauaaacaggaucagcgcuuuacagaucuaaaaaaaaaaaaaaaaaaaaaaaaaaaaaaaaaaaaaaaaaaaaaaaaaaaaaaaaaaaaaaaaugcaucccccccccccccccccccccccccccccccaaaggcucuuuucagagccaccagaauu

SEQ ID NO: 18800 - RNA, 1814 nt, Artificial Sequence
  mRNA product Design b-2 comprising derived and/or modified sequence from HRSV(Memphis-37)__AIY60640.1__F-del_DSCav1_mut7 (opt6)
gggagagccucugcuggaguccggggaguggcguuggcugcuagagcgaagcuuaccauggaacuaccaauacucaaaacaaacgccauaaccacaauacuagccgcaguaacacuuugcuuugccucaagucaaaacauaacagaagaauuuuaccaauccacaugcucagcuguauccaaaggauauuuauccgcacuaagaacaggaugguacacaucaguaaucacaauagaauuaucaaacauaaaagaaaacaaauguaauggcacagacgccaaaguaaaacuaauuaaacaagaacuagacaaauauaaaaaugcaguaaccgaacuccaaaugcucaugugcucuacaccagcugcaggaucaggaucagccauugcaagcgguauagcuguuugcaaaguauuacacuuagaaggagaaguaaauaaaauaaaaaacgcacuacuaucaacaaauaaagcaguaguaucccuaucaaacggaguaucaguacuuacauucaaaguauuagauuuaaaaaacuauauagacaaacaacuacuucccauauuaaacaaacaaucaugcucaauuuccaacauugaaacuguaauggaauuucaacaaaaaaacaacagacuacuugaaaucacacgagaauuuucaguaaacgcuggaguaacaacaccugucucuaccuacaugcucacaaauagcgaauuacuaucucuaaucaaugacaugccaauaacaaacgaucaaaaaaaacuaauguccaacaacguacaaauaguaagacaacaauccuauucaauaaugugcauaauaaaagaagaagucuuagcauacguuguacaacuaccauuauacggaguaauagauacaccaugcuggaaacuccacacaagcccccucugcacaacaaacaccaaagaagggucaaacauaugcuuaacaagaacagacagaggaugguacugugauaacgcaggaucugucucauucuuuccacaagcagaaacauguaaaguaugcuccaacagagucuuuugcgacaccaugaacucacuaaccuuacccucagaaguaaaccugugcaacaucgauaucuucaaccccaaauacgauugcaaaaucaugacaagcaaaacugauguauccagcucuguaauaacaucacuaggugcaauaguaucaugcuacggaaaaacaaaaugcacagcuucuaacaaaaauaaaggaauaauaaaaacauucuccaauggaugcgacuaugucucaaauaaaggaguagauacaguuucagucggcaacacacucuauuauguaaauaaacaagaaggaaaaucauuauacguaaaaggagaacccauaauaaacuucuacgacccccucguauucccaagcgacgaauuugacgccucaauaucacaaguaaacgaaaaaauaaaccaaucacucgcauucaucagaaaaucagaugaacuacuacacaauguaaacgucggaaaauccaccacaaauauaaugauaacuaccaucauaauaguaauaauagucaucuuacuacuauuaaucgcuguaggacuauuucucuacugcaaggccagauaaggacuaguguccaccugucccuccugggcugcuggauugucucguuuuccugccaaauaaacaggaucagcgcuuuacagaucuaaaaaaaaaaaaaaaaaaaaaaaaaaaaaaaaaaaaaaaaaaaaaaaaaaaaaaaaaaaaaaaaugcaucccccccccccccccccccccccccccccccaaaggcucuuuucagagccaccagaauu

SEQ ID NO: 18801 - RNA, 1814 nt, Artificial Sequence
  mRNA product Design b-2 comprising derived and/or modified sequence from HRSV(Memphis-37)__AIY60640.1__F-del_DSCav1_mut7 (opt11)
gggagagccucugcuggaguccggggaguggcguuggcugcuagagcgaagcuuaccauggaacucccaauccucaaaacaaaugccaucaccaccauccuagccgcugucacacuaugcuucgccuccucacaaaacaucaccgaagaguucuaucaauccacaugcuccgccgucagcaagggauaccucuccgcccuuagaaccggcugguacaccucagucaucacaauugaacugucaaacaucaaagaaaacaaaugcaacggcaccgacgcaaaaguaaagcucaucaaacaagaacuggacaaguacaagaacgccgucaccgaacuacagaugcuuaugugcucaaccccugccgccggcuccggaucugccauagcuucaggcaucgccguaugcaaaguccugcaccuagaaggggaagucaacaaaaucaaaaacgcccuccucuccaccaacaaggccguugucucccugucaaacggagucuccguccuaaccuucaaaguccucgaccucaaaaacuacauagacaaacaacuccuacccauccucaacaaacaaagcugcucaauauccaacaucgaaaccgucauggaguuccaacaaaagaacaaccgacuacucgaaauaacacgcgaguucucagucaacgccggcgucaccaccccagucuccacauacaugcucaccaacuccgaacuccuaucgcucaucaacgacaugcccaucaccaaugaccagaagaaacucauguccaacaacguacaaaucguccgccaacaguccuacucaaucaugugcaucaucaaagaagaaguccuugccuacgucguccagcuuccacucuacggagucaucgacacccccugcuggaaacuccacaccuccccacuaugcaccaccaacaccaaagaaggauccaacauaugccucacccguacugaccgcggcugguacugcgacaacgccggauccgucucauucuucccccaggccgaaaccugcaaagucugcuccaaccgcgucuucugcgacaccaugaacucgcucacccucccauccgaagucaaucuaugcaacaucgacauuuucaaccccaaauacgacugcaaaauuaugacaucaaaaaccgacgucucauccucagucaucacuucccucggcgcaaucguaagcugcuacgggaaaacaaagugcaccgcuuccaacaaaaacaaaggcaucaucaaaaccuucucuaacggcugcgacuacgucuccaacaaaggagucgacaccguauccgucggcaacacccucuacuacgucaacaaacaggaaggaaaaucgcucuacgucaaaggagaaccaaucaucaacuucuacgacccccuagucuucccauccgacgaguucgacgccagcaucucacaagucaaugaaaagaucaaccagucacucgcauucauccguaagucagacgaacuccuacacaacgucaacgucggcaagucaacaaccaacauaaugaucaccaccauaaucaucgucauaauaguaauccuccuucuccuaaucgcagucggccucuuccucuacugcaaagcacgcuaaggacuaguguccaccugucccuccugggcugcuggauugucucguuuuccugccaaauaaacaggaucagcgcuuuacagaucuaaaaaaaaaaaaaaaaaaaaaaaaaaaaaaaaaaaaaaaaaaaaaaaaaaaaaaaaaaaaaaaaugcaucccccccccccccccccccccccccccccccaaaggcucuuuucagagccaccagaauu

SEQ ID NO: 18802 - RNA, 1834 nt, Artificial Sequence
  mRNA product Design b-3 comprising derived and/or modified sequence from HRSV(Memphis-37)__AIY60640.1__F-del_DSCav1_mut7 (opt1)
gggagagucccgcagucggcguccagcggcucugcuuguucgugugugugucguugcaggccuuauucaagcuuaccauggagcugcccauccucaagaccaacgccaucaccacgauccuggccgcggugacccugugcuucgccagcucccagaacaucaccgaggaguucuaccagagcacgugcuccgccgucagcaagggcuaccucuccgcccugcgcaccgggugguacaccagcgugaucaccaucgagcuguccaacaucaaggagaacaagugcaacggcaccgacgccaaggugaagcucaucaagcaggagcuggacaaguacaagaacgcggucacggagcugcagaugcugaugugcagcaccccggccgccggcuccgggagcgcgaucgccuccggcaucgccgucugcaaggugcugcaccucgagggcgaggugaacaagaucaagaacgcccugcuguccaccaacaaggccgucgugagccucuccaacggggugagcguccugaccuucaaggugcuggaccucaagaacuacaucgacaagcagcugcugcccauccugaacaagcagagcugcuccaucagcaacaucgagaccgucauggaguuccagcagaagaacaaccgccuccuggagaucacgcgggaguucagcgugaacgcgggcgugaccacccccgucuccaccuacaugcugacgaacagcgagcuccugucccugaucaacgacaugccgaucaccaacgaccagaagaagcucaugagcaacaacgugcagaucgugcgccagcaguccuacagcaucaugugcaucaucaaggaggagguccuggccuacguggugcagcugccccucuacggggucaucgacacccccugcuggaagcugcacaccagcccccugugcacgaccaacaccaaggagggcuccaacaucugccucacccggacggaccgcgggugguacugcgacaacgccggcagcguguccuucuucccgcaggccgagaccugcaaggucugcagcaaccggguguucugcgacaccaugaacucccugacccugcccagcgaggugaaccucugcaacaucgacaucuucaaccccaaguacgacugcaagaucaugacguccaagaccgacgucagcuccagcgugaucaccucccugggcgccaucgugagcugcuacgggaagaccaagugcacggcgagcaacaagaacaagggcaucaucaagaccuucuccaacgggugcgacuacgucagcaacaagggcguggacaccguguccgucggcaacacccuguacuacgugaacaagcaggagggcaagagccucuacgugaagggggagcccaucaucaacuucuacgacccgcuggucuuccccuccgacgaguucgacgccagcaucucccaggugaacgagaagaucaaccagagccuggccuucauccggaaguccgacgagcuccugcacaacgugaacgucggcaagagcaccacgaacaucaugaucaccaccaucaucaucgugaucaucgugauccugcugcuccugaucgccgucgggcuguuccucuacugcaaggcccgcugaggacuaguguccaccugucccuccugggcugcuggauugucucguuuuccugccaaauaaacaggaucagcgcuuuacagaucuaaaaaaaaaaaaaaaaaaaaaaaaaaaaaaaaaaaaaaaaaaaaaaaaaaaaaaaaaaaaaaaaugcaucccccccccccccccccccccccccccccccaaaggcucuuuucagagccaccagaauu

SEQ ID NO: 18803 - RNA, 1834 nt, Artificial Sequence
  mRNA product Design b-3 comprising derived and/or modified sequence from HRSV(Memphis-37)__AIY60640.1__F-del_DSCav1_mut7 (opt1)
gggagagucccgcagucggcguccagcggcucugcuuguucgugugugugucguugcaggccuuauucaagcuuaccauggagcugcccauccucaagaccaacgccaucaccacgauccuggccgcggugacccugugcuucgccagcucccagaacaucaccgaggaguucuaccagagcacgugcuccgccgucagcaagggguaccucuccgcccugcgcaccgggugguacaccagcgugaucaccaucgagcuguccaacaucaaggagaacaagugcaacggcaccgacgccaaggugaagcucaucaagcaggagcuggacaaguacaagaacgcggucacggagcugcagaugcucaugugcagcaccccggccgccggguccggcagcgccaucgcguccgggaucgccgugugcaaggugcugcaccuggagggcgaggucaacaagaucaagaacgcccuccugagcaccaacaaggccguggugucccugagcaacggcgucuccgugcucaccuucaaggugcuggaccugaagaacuacaucgacaagcagcuccugcccauccugaacaagcagagcugcuccaucagcaacaucgagacggucauggaguuccagcagaagaacaaccggcuccuggagaucacccgcgaguucuccgugaacgccggggugaccacccccgucagcacguacaugcugaccaacagcgagcuccugucccugaucaacgacaugcccaucaccaacgaccagaagaagcucaugagcaacaacgugcagaucgugcggcagcaguccuacagcaucaugugcaucaucaaggaggagguccuggcguacguggugcagcugccgcucuacggcgucaucgacacccccugcuggaagcugcacacgagcccccugugcaccaccaacaccaaggaggggagcaacaucugccucacgcgcaccgaccggggcugguacugcgacaacgccggguccgugagcuucuucccccaggccgagaccugcaaggugugcuccaaccgcgucuucugcgacaccaugaacagccugacgcugccguccgaggugaaccucugcaacaucgacaucuucaaccccaaguacgacugcaagaucaugaccagcaagaccgacgucuccagcuccgugaucaccagccugggcgccaucguguccugcuacggcaagacgaagugcaccgccagcaacaagaacaaggggaucaucaagaccuucuccaacggcugcgacuacgucagcaacaaggggguggacaccgugagcgucggcaacacgcuguacuacgugaacaagcaggagggcaagucccucuacgugaagggggagcccaucaucaacuucuacgacccccuggucuucccgagcgacgaguucgacgcguccaucagccaggugaacgagaagaucaaccagucccuggccuucauccggaaguccgacgagcuccugcacaacgugaacgucggcaaguccaccaccaacaucaugaucaccaccaucaucaucgugaucaucgugauccugcuccugcugaucgccgucggccucuuccuguacugcaaggcccgcugaggacuaguguccaccugucccuccugggcugcuggauugucucguuuuccugccaaauaaacaggaucagcgcuuuacagaucuaaaaaaaaaaaaaaaaaaaaaaaaaaaaaaaaaaaaaaaaaaaaaaaaaaaaaaaaaaaaaaaaugcaucccccccccccccccccccccccccccccccaaaggcucuuuucagagccaccagaauu

SEQ ID NO: 18804 - RNA, 1834 nt, Artificial Sequence
  mRNA product Design b-3 comprising derived and/or modified sequence from HRSV(Memphis-37)__AIY60640.1__F-del_DSCav1_mut7 (opt2)
gggagagucccgcagucggcguccagcggcucugcuuguucgugugugugucguugcaggccuuauucaagcuuaccauggagcuccccauccucaagaccaacgccaucaccaccauccucgccgccgucacccucugcuucgccuccucccagaacaucaccgaggaguucuaccaguccaccugcuccgccgucuccaagggcuaccucuccgcccuccgcaccggcugguacaccuccgucaucaccaucgagcucuccaacaucaaggagaacaagugcaacggcaccgacgccaaggucaagcucaucaagcaggagcucgacaaguacaagaacgccgucaccgagcuccagaugcucaugugcuccacccccgccgccggcuccggcuccgccaucgccuccggcaucgccgucugcaagguccuccaccucgagggcgaggucaacaagaucaagaacgcccuccucuccaccaacaaggccgucgucucccucuccaacggcgucuccguccucaccuucaagguccucgaccucaagaacuacaucgacaagcagcuccuccccauccucaacaagcaguccugcuccaucuccaacaucgagaccgucauggaguuccagcagaagaacaaccgccuccucgagaucacccgcgaguucuccgucaacgccggcgucaccacccccgucuccaccuacaugcucaccaacuccgagcuccucucccucaucaacgacaugcccaucaccaacgaccagaagaagcucauguccaacaacguccagaucguccgccagcaguccuacuccaucaugugcaucaucaaggaggagguccucgccuacgucguccagcucccccucuacggcgucaucgacacccccugcuggaagcuccacaccuccccccucugcaccaccaacaccaaggagggcuccaacaucugccucacccgcaccgaccgcggcugguacugcgacaacgccggcuccgucuccuucuucccccaggccgagaccugcaaggucugcuccaaccgcgucuucugcgacaccaugaacucccucacccuccccuccgaggucaaccucugcaacaucgacaucuucaaccccaaguacgacugcaagaucaugaccuccaagaccgacgucuccuccuccgucaucaccucccucggcgccaucgucuccugcuacggcaagaccaagugcaccgccuccaacaagaacaagggcaucaucaagaccuucuccaacggcugcgacuacgucuccaacaagggcgucgacaccgucuccgucggcaacacccucuacuacgucaacaagcaggagggcaagucccucuacgucaagggcgagcccaucaucaacuucuacgacccccucgucuuccccuccgacgaguucgacgccuccaucucccaggucaacgagaagaucaaccagucccucgccuucauccgcaaguccgacgagcuccuccacaacgucaacgucggcaaguccaccaccaacaucaugaucaccaccaucaucaucgucaucaucgucauccuccuccuccucaucgccgucggccucuuccucuacugcaaggcccgcugaggacuaguguccaccugucccuccugggcugcuggauugucucguuuuccugccaaauaaacaggaucagcgcuuuacagaucuaaaaaaaaaaaaaaaaaaaaaaaaaaaaaaaaaaaaaaaaaaaaaaaaaaaaaaaaaaaaaaaaugcaucccccccccccccccccccccccccccccccaaaggcucuuuucagagccaccagaauu

SEQ ID NO: 18805 - RNA, 1834 nt, Artificial Sequence
  mRNA product Design b-3 comprising derived and/or modified sequence from HRSV(Memphis-37)__AIY60640.1__F-del_DSCav1_mut7 (opt3)
gggagagucccgcagucggcguccagcggcucugcuuguucgugugugugucguugcaggccuuauucaagcuuaccauggagcugcccauccucaagaccaacgccauuacaacuauacuugcugcagugacgcugugcuucgccagcucccagaauaucaccgaagaguuuuaccaaucuacauguucagcggucaguaaaggcuauuugagcgcuuuaagaacugggugguacaccuccguuauuacaaucgaacugucuaacauuaaggagaauaaaugcaacggaaccgacgccaaggugaaacuaaucaagcaggaacucgauaaguauaaaaaugcaguaacugagcugcagaugcuuauguguucgaccccugccgcugguucaggcagcgcaauagccagugggaucgcugugugcaagguccugcacuuggagggagaagugaacaaaauuaagaaugcccuccuguccacaaacaaagcgguugugucucugagcaauggcgucuccgugcucacguucaagguauuagaccugaagaacuacaucgauaaacagcuuuugccaauucugaauaagcaaucauguaguaucagcaacauagagacuguuauggaauuucagcagaaaaauaacaggcuacucgagauuacccgggaguucucugugaaugccggugucacaacuccgguguccaccuauaugcugacaaacucagaacuucugagcuugaucaacgacaugcccauuaccaaugaucagaagaaacucaugaguaacaaugugcaaaucguccgccagcagucuuacuccaucaugugcauuauaaaggaggaaguucuggcauaugugguacaguuaccucuguacggggugaucgacacgccauguuggaaacuccauacuagcccccuuugcacaaccaacacuaaggagggaucgaauauuugucugacacgaaccgaucguggcugguacugcgacaacgcuggcucugucuccuuuuucccucaagccgaaacguguaaggugugcucaaauagaguguuuugcgauaccaugaacaguuugacacuaccaagcgagguuaaucuguguaacaucgacauauucaaucccaaauaugauugcaagauuaugacuuccaaaaccgacgucucuagcucagugaucacaagucucggggcaaucguauccuguuacggaaagacuaaaugcaccgcuagcaacaagaauaaggguauuaucaaaacauuuucuaacggcugugauuauguuucaaauaaggggguggacaccgucagugugggaaacacucuguacuaugucaacaaacaggagggcaagagccuuuacgugaaaggugaaccuauuauaaauuucuaugacccacugguuuuuccguccgaugaguucgacgccucuaucagccaggugaacgaaaagauuaaucaaucguuggcguuuaucaggaaguccgaugagcuccugcacaacguaaaugucgggaaaucaacgacaaacaucaugauuaccacuauaaucauugugaucauuguuaucuuacugcuacucauagccgugggacuguuccuuuacugcaaggcacggugaggacuaguguccaccugucccuccugggcugcuggauugucucguuuuccugccaaauaaacaggaucagcgcuuuacagaucuaaaaaaaaaaaaaaaaaaaaaaaaaaaaaaaaaaaaaaaaaaaaaaaaaaaaaaaaaaaaaaaaugcaucccccccccccccccccccccccccccccccaaaggcucuuuucagagccaccagaauu

SEQ ID NO: 18806 - RNA, 1834 nt, Artificial Sequence
  mRNA product Design b-3 comprising derived and/or modified sequence from HRSV(Memphis-37)__AIY60640.1__F-del_DSCav1_mut7 (opt4)
gggagagucccgcagucggcguccagcggcucugcuuguucgugugugugucguugcaggccuuauucaagcuuaccauggagcugcccauccugaagaccaacgccaucaccaccauccuggccgccgugacccugugcuucgccagcagccagaacaucaccgaggaguucuaccagagcaccugcagcgccgugagcaagggcuaccugagcgcccugagaaccggcugguacaccagcgugaucaccaucgagcugagcaacaucaaggagaacaagugcaacggcaccgacgccaaggugaagcugaucaagcaggagcuggacaaguacaagaacgccgugaccgagcugcagaugcugaugugcagcacccccgccgccggcagcggcagcgccaucgccagcggcaucgccgugugcaaggugcugcaccuggagggcgaggugaacaagaucaagaacgcccugcugagcaccaacaaggccguggugagccugagcaacggcgugagcgugcugaccuucaaggugcuggaccugaagaacuacaucgacaagcagcugcugcccauccugaacaagcagagcugcagcaucagcaacaucgagaccgugauggaguuccagcagaagaacaacagacugcuggagaucaccagagaguucagcgugaacgccggcgugaccacccccgugagcaccuacaugcugaccaacagcgagcugcugagccugaucaacgacaugcccaucaccaacgaccagaagaagcugaugagcaacaacgugcagaucgugagacagcagagcuacagcaucaugugcaucaucaaggaggaggugcuggccuacguggugcagcugccccuguacggcgugaucgacacccccugcuggaagcugcacaccagcccccugugcaccaccaacaccaaggagggcagcaacaucugccugaccagaaccgacagaggcugguacugcgacaacgccggcagcgugagcuucuucccccaggccgagaccugcaaggugugcagcaacagaguguucugcgacaccaugaacagccugacccugcccagcgaggugaaccugugcaacaucgacaucuucaaccccaaguacgacugcaagaucaugaccagcaagaccgacgugagcagcagcgugaucaccagccugggcgccaucgugagcugcuacggcaagaccaagugcaccgccagcaacaagaacaagggcaucaucaagaccuucagcaacggcugcgacuacgugagcaacaagggcguggacaccgugagcgugggcaacacccuguacuacgugaacaagcaggagggcaagagccuguacgugaagggcgagcccaucaucaacuucuacgacccccugguguuccccagcgacgaguucgacgccagcaucagccaggugaacgagaagaucaaccagagccuggccuucaucagaaagagcgacgagcugcugcacaacgugaacgugggcaagagcaccaccaacaucaugaucaccaccaucaucaucgugaucaucgugauccugcugcugcugaucgccgugggccuguuccuguacugcaaggccagaugaggacuaguguccaccugucccuccugggcugcuggauugucucguuuuccugccaaauaaacaggaucagcgcuuuacagaucuaaaaaaaaaaaaaaaaaaaaaaaaaaaaaaaaaaaaaaaaaaaaaaaaaaaaaaaaaaaaaaaaugcaucccccccccccccccccccccccccccccccaaaggcucuuuucagagccaccagaauu

SEQ ID NO: 18807 - RNA, 1834 nt, Artificial Sequence
  mRNA product Design b-3 comprising derived and/or modified sequence from HRSV(Memphis-37)__AIY60640.1__F-del_DSCav1_mut7 (opt5)
gggagagucccgcagucggcguccagcggcucugcuuguucgugugugugucguugcaggccuuauucaagcuuaccauggagcugcccauccucaagaccaacgccauuacaacgauccuggcugccgugacccuuugcuucgcgagcucccagaauauuacagaagaguuuuaccaaucuaccuguagcgcugucuccaaaggcuaucugucugcccucagaacagggugguacaccagcguuaucacaauugaacuguccaacaucaaggagaauaaaugcaacggaaccgacgccaaggugaaacuuaucaagcaggaacuggauaaguauaaaaaugcugugacggagcuccagaugcugauguguucuaccccugccgcuggcagcggguccgccauugcgagcggaaucgccgucugcaaggugcugcaccucgagggcgaaguuaacaaaauuaagaaugcucugcuuucuacaaacaaagccguggucucccugagcaauggggugucuguucucaccuucaaggugcuggaccuuaagaacuacaucgauaaacagcugcucccgauucugaauaagcaauccuguagcaucucuaacauugagacagucauggaauuucagcagaaaaauaaccggcugcucgagaucacccgcgaguucuccgugaaugcuggagugacgacacccgucagcaccuauaugcugacaaacuccgaacuucugucucucaucaacgacaugccuauuaccaaugaucagaagaaacugaugagcaacaauguucaaaucgugagacagcaguccuacagcauuaugugcaucauuaaggaggaagugcuugccuaugucgugcagcugccccucuacggcguuaucgacaccccuuguuggaaacugcauacaucuccccugugcacgaccaacacaaaggagggcuccaauaucugucucacccggacagaucgcgggugguacugcgacaacgcgggaagcgugagcuuuuucccucaagccgaaaccuguaaggucugcucuaauagaguguuuugcgauacgaugaacucccugacacuuccgucugagguuaaucuguguaacauugacaucuucaaucccaaauaugauugcaagauuaugaccagcaaaaccgacguguccagcucugucaucacaucccucggcgcuauugugagcuguuacgggaagaccaaaugcacagccucuaacaagaauaagggaaucaucaaaacguuuuccaacggcugugauuaugucagcaauaaggggguggacaccguuuccgugggaaacacacuguacuaugucaacaaacaggagggcaagucucuuuacgugaaaggcgaaccuauuaucaauuucuaugacccccugguuuuuccuagcgaugaguucgacgcuuccauuucucaggugaacgaaaagaucaaucaaagccucgccuuuauucggaaguccgaugagcugcugcacaacgucaauguggggaaaagcaccacaaacaucaugauuaccacgaucaucauugugaucauuguuauccuccugcuucugauugccgucggacucuuccuguacugcaaggcucgcugaggacuaguguccaccugucccuccugggcugcuggauugucucguuuuccugccaaauaaacaggaucagcgcuuuacagaucuaaaaaaaaaaaaaaaaaaaaaaaaaaaaaaaaaaaaaaaaaaaaaaaaaaaaaaaaaaaaaaaaugcaucccccccccccccccccccccccccccccccaaaggcucuuuucagagccaccagaauu

SEQ ID NO: 18808 - RNA, 1834 nt, Artificial Sequence
  mRNA product Design b-3 comprising derived and/or modified sequence from HRSV(Memphis-37)__AIY60640.1__F-del_DSCav1_mut7 (opt6)
gggagagucccgcagucggcguccagcggcucugcuuguucgugugugugucguugcaggccuuauucaagcuuaccauggaacuaccaauacucaaaacaaacgccauaaccacaauacuagccgcaguaacacuuugcuuugccucaagucaaaacauaacagaagaauuuuaccaauccacaugcucagcuguauccaaaggauauuuauccgcacuaagaacaggaugguacacaucaguaaucacaauagaauuaucaaacauaaaagaaaacaaauguaauggcacagacgccaaaguaaaacuaauuaaacaagaacuagacaaauauaaaaaugcaguaaccgaacuccaaaugcucaugugcucuacaccagcugcaggaucaggaucagccauugcaagcgguauagcuguuugcaaaguauuacacuuagaaggagaaguaaauaaaauaaaaaacgcacuacuaucaacaaauaaagcaguaguaucccuaucaaacggaguaucaguacuuacauucaaaguauuagauuuaaaaaacuauauagacaaacaacuacuucccauauuaaacaaacaaucaugcucaauuuccaacauugaaacuguaauggaauuucaacaaaaaaacaacagacuacuugaaaucacacgagaauuuucaguaaacgcuggaguaacaacaccugucucuaccuacaugcucacaaauagcgaauuacuaucucuaaucaaugacaugccaauaacaaacgaucaaaaaaaacuaauguccaacaacguacaaauaguaagacaacaauccuauucaauaaugugcauaauaaaagaagaagucuuagcauacguuguacaacuaccauuauacggaguaauagauacaccaugcuggaaacuccacacaagcccccucugcacaacaaacaccaaagaagggucaaacauaugcuuaacaagaacagacagaggaugguacugugauaacgcaggaucugucucauucuuuccacaagcagaaacauguaaaguaugcuccaacagagucuuuugcgacaccaugaacucacuaaccuuacccucagaaguaaaccugugcaacaucgauaucuucaaccccaaauacgauugcaaaaucaugacaagcaaaacugauguauccagcucuguaauaacaucacuaggugcaauaguaucaugcuacggaaaaacaaaaugcacagcuucuaacaaaaauaaaggaauaauaaaaacauucuccaauggaugcgacuaugucucaaauaaaggaguagauacaguuucagucggcaacacacucuauuauguaaauaaacaagaaggaaaaucauuauacguaaaaggagaacccauaauaaacuucuacgacccccucguauucccaagcgacgaauuugacgccucaauaucacaaguaaacgaaaaaauaaaccaaucacucgcauucaucagaaaaucagaugaacuacuacacaauguaaacgucggaaaauccaccacaaauauaaugauaacuaccaucauaauaguaauaauagucaucuuacuacuauuaaucgcuguaggacuauuucucuacugcaaggccagauaaggacuaguguccaccugucccuccugggcugcuggauugucucguuuuccugccaaauaaacaggaucagcgcuuuacagaucuaaaaaaaaaaaaaaaaaaaaaaaaaaaaaaaaaaaaaaaaaaaaaaaaaaaaaaaaaaaaaaaaugcaucccccccccccccccccccccccccccccccaaaggcucuuuucagagccaccagaauu

SEQ ID NO: 18809 - RNA, 1834 nt, Artificial Sequence
  mRNA product Design b-3 comprising derived and/or modified sequence from HRSV(Memphis-37)__AIY60640.1__F-del_DSCav1_mut7 (opt11)
gggagagucccgcagucggcguccagcggcucugcuuguucgugugugugucguugcaggccuuauucaagcuuaccauggaacucccaauccucaaaacaaaugccaucaccaccauccuagccgcugucacacuaugcuucgccuccucacaaaacaucaccgaagaguucuaucaauccacaugcuccgccgucagcaagggauaccucuccgcccuuagaaccggcugguacaccucagucaucacaauugaacugucaaacaucaaagaaaacaaaugcaacggcaccgacgcaaaaguaaagcucaucaaacaagaacuggacaaguacaagaacgccgucaccgaacuacagaugcuuaugugcucaaccccugccgccggcuccggaucugccauagcuucaggcaucgccguaugcaaaguccugcaccuagaaggggaagucaacaaaaucaaaaacgcccuccucuccaccaacaaggccguugucucccugucaaacggagucuccguccuaaccuucaaaguccucgaccucaaaaacuacauagacaaacaacuccuacccauccucaacaaacaaagcugcucaauauccaacaucgaaaccgucauggaguuccaacaaaagaacaaccgacuacucgaaauaacacgcgaguucucagucaacgccggcgucaccaccccagucuccacauacaugcucaccaacuccgaacuccuaucgcucaucaacgacaugcccaucaccaaugaccagaagaaacucauguccaacaacguacaaaucguccgccaacaguccuacucaaucaugugcaucaucaaagaagaaguccuugccuacgucguccagcuuccacucuacggagucaucgacacccccugcuggaaacuccacaccuccccacuaugcaccaccaacaccaaagaaggauccaacauaugccucacccguacugaccgcggcugguacugcgacaacgccggauccgucucauucuucccccaggccgaaaccugcaaagucugcuccaaccgcgucuucugcgacaccaugaacucgcucacccucccauccgaagucaaucuaugcaacaucgacauuuucaaccccaaauacgacugcaaaauuaugacaucaaaaaccgacgucucauccucagucaucacuucccucggcgcaaucguaagcugcuacgggaaaacaaagugcaccgcuuccaacaaaaacaaaggcaucaucaaaaccuucucuaacggcugcgacuacgucuccaacaaaggagucgacaccguauccgucggcaacacccucuacuacgucaacaaacaggaaggaaaaucgcucuacgucaaaggagaaccaaucaucaacuucuacgacccccuagucuucccauccgacgaguucgacgccagcaucucacaagucaaugaaaagaucaaccagucacucgcauucauccguaagucagacgaacuccuacacaacgucaacgucggcaagucaacaaccaacauaaugaucaccaccauaaucaucgucauaauaguaauccuccuucuccuaaucgcagucggccucuuccucuacugcaaagcacgcuaaggacuaguguccaccugucccuccugggcugcuggauugucucguuuuccugccaaauaaacaggaucagcgcuuuacagaucuaaaaaaaaaaaaaaaaaaaaaaaaaaaaaaaaaaaaaaaaaaaaaaaaaaaaaaaaaaaaaaaaugcaucccccccccccccccccccccccccccccccaaaggcucuuuucagagccaccagaauu

SEQ ID NO: 18810 - RNA, 1885 nt, Artificial Sequence
  mRNA product Design b-4 comprising derived and/or modified sequence from HRSV(Memphis-37)__AIY60640.1__F-del_DSCav1_mut7 (opt1)
gggagagucccgcagucggcguccagcggcucugcuuguucgugugugugucguugcaggccuuauucaagcuuaccauggagcugcccauccucaagaccaacgccaucaccacgauccuggccgcggugacccugugcuucgccagcucccagaacaucaccgaggaguucuaccagagcacgugcuccgccgucagcaagggcuaccucuccgcccugcgcaccgggugguacaccagcgugaucaccaucgagcuguccaacaucaaggagaacaagugcaacggcaccgacgccaaggugaagcucaucaagcaggagcuggacaaguacaagaacgcggucacggagcugcagaugcugaugugcagcaccccggccgccggcuccgggagcgcgaucgccuccggcaucgccgucugcaaggugcugcaccucgagggcgaggugaacaagaucaagaacgcccugcuguccaccaacaaggccgucgugagccucuccaacggggugagcguccugaccuucaaggugcuggaccucaagaacuacaucgacaagcagcugcugcccauccugaacaagcagagcugcuccaucagcaacaucgagaccgucauggaguuccagcagaagaacaaccgccuccuggagaucacgcgggaguucagcgugaacgcgggcgugaccacccccgucuccaccuacaugcugacgaacagcgagcuccugucccugaucaacgacaugccgaucaccaacgaccagaagaagcucaugagcaacaacgugcagaucgugcgccagcaguccuacagcaucaugugcaucaucaaggaggagguccuggccuacguggugcagcugccccucuacggggucaucgacacccccugcuggaagcugcacaccagcccccugugcacgaccaacaccaaggagggcuccaacaucugccucacccggacggaccgcgggugguacugcgacaacgccggcagcguguccuucuucccgcaggccgagaccugcaaggucugcagcaaccggguguucugcgacaccaugaacucccugacccugcccagcgaggugaaccucugcaacaucgacaucuucaaccccaaguacgacugcaagaucaugacguccaagaccgacgucagcuccagcgugaucaccucccugggcgccaucgugagcugcuacgggaagaccaagugcacggcgagcaacaagaacaagggcaucaucaagaccuucuccaacgggugcgacuacgucagcaacaagggcguggacaccguguccgucggcaacacccuguacuacgugaacaagcaggagggcaagagccucuacgugaagggggagcccaucaucaacuucuacgacccgcuggucuuccccuccgacgaguucgacgccagcaucucccaggugaacgagaagaucaaccagagccuggccuucauccggaaguccgacgagcuccugcacaacgugaacgucggcaagagcaccacgaacaucaugaucaccaccaucaucaucgugaucaucgugauccugcugcuccugaucgccgucgggcuguuccucuacugcaaggcccgcugaggacuaguaauaaggaaacuguaugaaugucugugggcaggaagugaagagauccuucuguaaagguuuuuggaauuaugucugcugaauaauaaacuuuuuugaaauaauaaaucugguagaaaaaugagaucuaaaaaaaaaaaaaaaaaaaaaaaaaaaaaaaaaaaaaaaaaaaaaaaaaaaaaaaaaaaaaaaaugcaucccccccccccccccccccccccccccccccaaaggcucuuuucagagccaccagaauu

SEQ ID NO: 18811 - RNA, 1885 nt, Artificial Sequence
  mRNA product Design b-4 comprising derived and/or modified sequence from HRSV(Memphis-37)__AIY60640.1__F-del_DSCav1_mut7 (opt1)
gggagagucccgcagucggcguccagcggcucugcuuguucgugugugugucguugcaggccuuauucaagcuuaccauggagcugcccauccucaagaccaacgccaucaccacgauccuggccgcggugacccugugcuucgccagcucccagaacaucaccgaggaguucuaccagagcacgugcuccgccgucagcaagggguaccucuccgcccugcgcaccgggugguacaccagcgugaucaccaucgagcuguccaacaucaaggagaacaagugcaacggcaccgacgccaaggugaagcucaucaagcaggagcuggacaaguacaagaacgcggucacggagcugcagaugcucaugugcagcaccccggccgccggguccggcagcgccaucgcguccgggaucgccgugugcaaggugcugcaccuggagggcgaggucaacaagaucaagaacgcccuccugagcaccaacaaggccguggugucccugagcaacggcgucuccgugcucaccuucaaggugcuggaccugaagaacuacaucgacaagcagcuccugcccauccugaacaagcagagcugcuccaucagcaacaucgagacggucauggaguuccagcagaagaacaaccggcuccuggagaucacccgcgaguucuccgugaacgccggggugaccacccccgucagcacguacaugcugaccaacagcgagcuccugucccugaucaacgacaugcccaucaccaacgaccagaagaagcucaugagcaacaacgugcagaucgugcggcagcaguccuacagcaucaugugcaucaucaaggaggagguccuggcguacguggugcagcugccgcucuacggcgucaucgacacccccugcuggaagcugcacacgagcccccugugcaccaccaacaccaaggaggggagcaacaucugccucacgcgcaccgaccggggcugguacugcgacaacgccggguccgugagcuucuucccccaggccgagaccugcaaggugugcuccaaccgcgucuucugcgacaccaugaacagccugacgcugccguccgaggugaaccucugcaacaucgacaucuucaaccccaaguacgacugcaagaucaugaccagcaagaccgacgucuccagcuccgugaucaccagccugggcgccaucguguccugcuacggcaagacgaagugcaccgccagcaacaagaacaaggggaucaucaagaccuucuccaacggcugcgacuacgucagcaacaaggggguggacaccgugagcgucggcaacacgcuguacuacgugaacaagcaggagggcaagucccucuacgugaagggggagcccaucaucaacuucuacgacccccuggucuucccgagcgacgaguucgacgcguccaucagccaggugaacgagaagaucaaccagucccuggccuucauccggaaguccgacgagcuccugcacaacgugaacgucggcaaguccaccaccaacaucaugaucaccaccaucaucaucgugaucaucgugauccugcuccugcugaucgccgucggccucuuccuguacugcaaggcccgcugaggacuaguaauaaggaaacuguaugaaugucugugggcaggaagugaagagauccuucuguaaagguuuuuggaauuaugucugcugaauaauaaacuuuuuugaaauaauaaaucugguagaaaaaugagaucuaaaaaaaaaaaaaaaaaaaaaaaaaaaaaaaaaaaaaaaaaaaaaaaaaaaaaaaaaaaaaaaaugcaucccccccccccccccccccccccccccccccaaaggcucuuuucagagccaccagaauu

SEQ ID NO: 18812 - RNA, 1885 nt, Artificial Sequence
  mRNA product Design b-4 comprising derived and/or modified sequence from HRSV(Memphis-37)__AIY60640.1__F-del_DSCav1_mut7 (opt2)
gggagagucccgcagucggcguccagcggcucugcuuguucgugugugugucguugcaggccuuauucaagcuuaccauggagcuccccauccucaagaccaacgccaucaccaccauccucgccgccgucacccucugcuucgccuccucccagaacaucaccgaggaguucuaccaguccaccugcuccgccgucuccaagggcuaccucuccgcccuccgcaccggcugguacaccuccgucaucaccaucgagcucuccaacaucaaggagaacaagugcaacggcaccgacgccaaggucaagcucaucaagcaggagcucgacaaguacaagaacgccgucaccgagcuccagaugcucaugugcuccacccccgccgccggcuccggcuccgccaucgccuccggcaucgccgucugcaagguccuccaccucgagggcgaggucaacaagaucaagaacgcccuccucuccaccaacaaggccgucgucucccucuccaacggcgucuccguccucaccuucaagguccucgaccucaagaacuacaucgacaagcagcuccuccccauccucaacaagcaguccugcuccaucuccaacaucgagaccgucauggaguuccagcagaagaacaaccgccuccucgagaucacccgcgaguucuccgucaacgccggcgucaccacccccgucuccaccuacaugcucaccaacuccgagcuccucucccucaucaacgacaugcccaucaccaacgaccagaagaagcucauguccaacaacguccagaucguccgccagcaguccuacuccaucaugugcaucaucaaggaggagguccucgccuacgucguccagcucccccucuacggcgucaucgacacccccugcuggaagcuccacaccuccccccucugcaccaccaacaccaaggagggcuccaacaucugccucacccgcaccgaccgcggcugguacugcgacaacgccggcuccgucuccuucuucccccaggccgagaccugcaaggucugcuccaaccgcgucuucugcgacaccaugaacucccucacccuccccuccgaggucaaccucugcaacaucgacaucuucaaccccaaguacgacugcaagaucaugaccuccaagaccgacgucuccuccuccgucaucaccucccucggcgccaucgucuccugcuacggcaagaccaagugcaccgccuccaacaagaacaagggcaucaucaagaccuucuccaacggcugcgacuacgucuccaacaagggcgucgacaccgucuccgucggcaacacccucuacuacgucaacaagcaggagggcaagucccucuacgucaagggcgagcccaucaucaacuucuacgacccccucgucuuccccuccgacgaguucgacgccuccaucucccaggucaacgagaagaucaaccagucccucgccuucauccgcaaguccgacgagcuccuccacaacgucaacgucggcaaguccaccaccaacaucaugaucaccaccaucaucaucgucaucaucgucauccuccuccuccucaucgccgucggccucuuccucuacugcaaggcccgcugaggacuaguaauaaggaaacuguaugaaugucugugggcaggaagugaagagauccuucuguaaagguuuuuggaauuaugucugcugaauaauaaacuuuuuugaaauaauaaaucugguagaaaaaugagaucuaaaaaaaaaaaaaaaaaaaaaaaaaaaaaaaaaaaaaaaaaaaaaaaaaaaaaaaaaaaaaaaaugcaucccccccccccccccccccccccccccccccaaaggcucuuuucagagccaccagaauu

SEQ ID NO: 18813 - RNA, 1885 nt, Artificial Sequence
  mRNA product Design b-4 comprising derived and/or modified sequence from HRSV(Memphis-37)__AIY60640.1__F-del_DSCav1_mut7 (opt3)
gggagagucccgcagucggcguccagcggcucugcuuguucgugugugugucguugcaggccuuauucaagcuuaccauggagcugcccauccucaagaccaacgccauuacaacuauacuugcugcagugacgcugugcuucgccagcucccagaauaucaccgaagaguuuuaccaaucuacauguucagcggucaguaaaggcuauuugagcgcuuuaagaacugggugguacaccuccguuauuacaaucgaacugucuaacauuaaggagaauaaaugcaacggaaccgacgccaaggugaaacuaaucaagcaggaacucgauaaguauaaaaaugcaguaacugagcugcagaugcuuauguguucgaccccugccgcugguucaggcagcgcaauagccagugggaucgcugugugcaagguccugcacuuggagggagaagugaacaaaauuaagaaugcccuccuguccacaaacaaagcgguugugucucugagcaauggcgucuccgugcucacguucaagguauuagaccugaagaacuacaucgauaaacagcuuuugccaauucugaauaagcaaucauguaguaucagcaacauagagacuguuauggaauuucagcagaaaaauaacaggcuacucgagauuacccgggaguucucugugaaugccggugucacaacuccgguguccaccuauaugcugacaaacucagaacuucugagcuugaucaacgacaugcccauuaccaaugaucagaagaaacucaugaguaacaaugugcaaaucguccgccagcagucuuacuccaucaugugcauuauaaaggaggaaguucuggcauaugugguacaguuaccucuguacggggugaucgacacgccauguuggaaacuccauacuagcccccuuugcacaaccaacacuaaggagggaucgaauauuugucugacacgaaccgaucguggcugguacugcgacaacgcuggcucugucuccuuuuucccucaagccgaaacguguaaggugugcucaaauagaguguuuugcgauaccaugaacaguuugacacuaccaagcgagguuaaucuguguaacaucgacauauucaaucccaaauaugauugcaagauuaugacuuccaaaaccgacgucucuagcucagugaucacaagucucggggcaaucguauccuguuacggaaagacuaaaugcaccgcuagcaacaagaauaaggguauuaucaaaacauuuucuaacggcugugauuauguuucaaauaaggggguggacaccgucagugugggaaacacucuguacuaugucaacaaacaggagggcaagagccuuuacgugaaaggugaaccuauuauaaauuucuaugacccacugguuuuuccguccgaugaguucgacgccucuaucagccaggugaacgaaaagauuaaucaaucguuggcguuuaucaggaaguccgaugagcuccugcacaacguaaaugucgggaaaucaacgacaaacaucaugauuaccacuauaaucauugugaucauuguuaucuuacugcuacucauagccgugggacuguuccuuuacugcaaggcacggugaggacuaguaauaaggaaacuguaugaaugucugugggcaggaagugaagagauccuucuguaaagguuuuuggaauuaugucugcugaauaauaaacuuuuuugaaauaauaaaucugguagaaaaaugagaucuaaaaaaaaaaaaaaaaaaaaaaaaaaaaaaaaaaaaaaaaaaaaaaaaaaaaaaaaaaaaaaaaugcaucccccccccccccccccccccccccccccccaaaggcucuuuucagagccaccagaauu

SEQ ID NO: 18814 - RNA, 1885 nt, Artificial Sequence
  mRNA product Design b-4 comprising derived and/or modified sequence from HRSV(Memphis-37)__AIY60640.1__F-del_DSCav1_mut7 (opt4)
gggagagucccgcagucggcguccagcggcucugcuuguucgugugugugucguugcaggccuuauucaagcuuaccauggagcugcccauccugaagaccaacgccaucaccaccauccuggccgccgugacccugugcuucgccagcagccagaacaucaccgaggaguucuaccagagcaccugcagcgccgugagcaagggcuaccugagcgcccugagaaccggcugguacaccagcgugaucaccaucgagcugagcaacaucaaggagaacaagugcaacggcaccgacgccaaggugaagcugaucaagcaggagcuggacaaguacaagaacgccgugaccgagcugcagaugcugaugugcagcacccccgccgccggcagcggcagcgccaucgccagcggcaucgccgugugcaaggugcugcaccuggagggcgaggugaacaagaucaagaacgcccugcugagcaccaacaaggccguggugagccugagcaacggcgugagcgugcugaccuucaaggugcuggaccugaagaacuacaucgacaagcagcugcugcccauccugaacaagcagagcugcagcaucagcaacaucgagaccgugauggaguuccagcagaagaacaacagacugcuggagaucaccagagaguucagcgugaacgccggcgugaccacccccgugagcaccuacaugcugaccaacagcgagcugcugagccugaucaacgacaugcccaucaccaacgaccagaagaagcugaugagcaacaacgugcagaucgugagacagcagagcuacagcaucaugugcaucaucaaggaggaggugcuggccuacguggugcagcugccccuguacggcgugaucgacacccccugcuggaagcugcacaccagcccccugugcaccaccaacaccaaggagggcagcaacaucugccugaccagaaccgacagaggcugguacugcgacaacgccggcagcgugagcuucuucccccaggccgagaccugcaaggugugcagcaacagaguguucugcgacaccaugaacagccugacccugcccagcgaggugaaccugugcaacaucgacaucuucaaccccaaguacgacugcaagaucaugaccagcaagaccgacgugagcagcagcgugaucaccagccugggcgccaucgugagcugcuacggcaagaccaagugcaccgccagcaacaagaacaagggcaucaucaagaccuucagcaacggcugcgacuacgugagcaacaagggcguggacaccgugagcgugggcaacacccuguacuacgugaacaagcaggagggcaagagccuguacgugaagggcgagcccaucaucaacuucuacgacccccugguguuccccagcgacgaguucgacgccagcaucagccaggugaacgagaagaucaaccagagccuggccuucaucagaaagagcgacgagcugcugcacaacgugaacgugggcaagagcaccaccaacaucaugaucaccaccaucaucaucgugaucaucgugauccugcugcugcugaucgccgugggccuguuccuguacugcaaggccagaugaggacuaguaauaaggaaacuguaugaaugucugugggcaggaagugaagagauccuucuguaaagguuuuuggaauuaugucugcugaauaauaaacuuuuuugaaauaauaaaucugguagaaaaaugagaucuaaaaaaaaaaaaaaaaaaaaaaaaaaaaaaaaaaaaaaaaaaaaaaaaaaaaaaaaaaaaaaaaugcaucccccccccccccccccccccccccccccccaaaggcucuuuucagagccaccagaauu

SEQ ID NO: 18815 - RNA, 1885 nt, Artificial Sequence
  mRNA product Design b-4 comprising derived and/or modified sequence from HRSV(Memphis-37)__AIY60640.1__F-del_DSCav1_mut7 (opt5)
gggagagucccgcagucggcguccagcggcucugcuuguucgugugugugucguugcaggccuuauucaagcuuaccauggagcugcccauccucaagaccaacgccauuacaacgauccuggcugccgugacccuuugcuucgcgagcucccagaauauuacagaagaguuuuaccaaucuaccuguagcgcugucuccaaaggcuaucugucugcccucagaacagggugguacaccagcguuaucacaauugaacuguccaacaucaaggagaauaaaugcaacggaaccgacgccaaggugaaacuuaucaagcaggaacuggauaaguauaaaaaugcugugacggagcuccagaugcugauguguucuaccccugccgcuggcagcggguccgccauugcgagcggaaucgccgucugcaaggugcugcaccucgagggcgaaguuaacaaaauuaagaaugcucugcuuucuacaaacaaagccguggucucccugagcaauggggugucuguucucaccuucaaggugcuggaccuuaagaacuacaucgauaaacagcugcucccgauucugaauaagcaauccuguagcaucucuaacauugagacagucauggaauuucagcagaaaaauaaccggcugcucgagaucacccgcgaguucuccgugaaugcuggagugacgacacccgucagcaccuauaugcugacaaacuccgaacuucugucucucaucaacgacaugccuauuaccaaugaucagaagaaacugaugagcaacaauguucaaaucgugagacagcaguccuacagcauuaugugcaucauuaaggaggaagugcuugccuaugucgugcagcugccccucuacggcguuaucgacaccccuuguuggaaacugcauacaucuccccugugcacgaccaacacaaaggagggcuccaauaucugucucacccggacagaucgcgggugguacugcgacaacgcgggaagcgugagcuuuuucccucaagccgaaaccuguaaggucugcucuaauagaguguuuugcgauacgaugaacucccugacacuuccgucugagguuaaucuguguaacauugacaucuucaaucccaaauaugauugcaagauuaugaccagcaaaaccgacguguccagcucugucaucacaucccucggcgcuauugugagcuguuacgggaagaccaaaugcacagccucuaacaagaauaagggaaucaucaaaacguuuuccaacggcugugauuaugucagcaauaaggggguggacaccguuuccgugggaaacacacuguacuaugucaacaaacaggagggcaagucucuuuacgugaaaggcgaaccuauuaucaauuucuaugacccccugguuuuuccuagcgaugaguucgacgcuuccauuucucaggugaacgaaaagaucaaucaaagccucgccuuuauucggaaguccgaugagcugcugcacaacgucaauguggggaaaagcaccacaaacaucaugauuaccacgaucaucauugugaucauuguuauccuccugcuucugauugccgucggacucuuccuguacugcaaggcucgcugaggacuaguaauaaggaaacuguaugaaugucugugggcaggaagugaagagauccuucuguaaagguuuuuggaauuaugucugcugaauaauaaacuuuuuugaaauaauaaaucugguagaaaaaugagaucuaaaaaaaaaaaaaaaaaaaaaaaaaaaaaaaaaaaaaaaaaaaaaaaaaaaaaaaaaaaaaaaaugcaucccccccccccccccccccccccccccccccaaaggcucuuuucagagccaccagaauu

SEQ ID NO: 18816 - RNA, 1885 nt, Artificial Sequence
  mRNA product Design b-4 comprising derived and/or modified sequence from HRSV(Memphis-37)__AIY60640.1__F-del_DSCav1_mut7 (opt6)
gggagagucccgcagucggcguccagcggcucugcuuguucgugugugugucguugcaggccuuauucaagcuuaccauggaacuaccaauacucaaaacaaacgccauaaccacaauacuagccgcaguaacacuuugcuuugccucaagucaaaacauaacagaagaauuuuaccaauccacaugcucagcuguauccaaaggauauuuauccgcacuaagaacaggaugguacacaucaguaaucacaauagaauuaucaaacauaaaagaaaacaaauguaauggcacagacgccaaaguaaaacuaauuaaacaagaacuagacaaauauaaaaaugcaguaaccgaacuccaaaugcucaugugcucuacaccagcugcaggaucaggaucagccauugcaagcgguauagcuguuugcaaaguauuacacuuagaaggagaaguaaauaaaauaaaaaacgcacuacuaucaacaaauaaagcaguaguaucccuaucaaacggaguaucaguacuuacauucaaaguauuagauuuaaaaaacuauauagacaaacaacuacuucccauauuaaacaaacaaucaugcucaauuuccaacauugaaacuguaauggaauuucaacaaaaaaacaacagacuacuugaaaucacacgagaauuuucaguaaacgcuggaguaacaacaccugucucuaccuacaugcucacaaauagcgaauuacuaucucuaaucaaugacaugccaauaacaaacgaucaaaaaaaacuaauguccaacaacguacaaauaguaagacaacaauccuauucaauaaugugcauaauaaaagaagaagucuuagcauacguuguacaacuaccauuauacggaguaauagauacaccaugcuggaaacuccacacaagcccccucugcacaacaaacaccaaagaagggucaaacauaugcuuaacaagaacagacagaggaugguacugugauaacgcaggaucugucucauucuuuccacaagcagaaacauguaaaguaugcuccaacagagucuuuugcgacaccaugaacucacuaaccuuacccucagaaguaaaccugugcaacaucgauaucuucaaccccaaauacgauugcaaaaucaugacaagcaaaacugauguauccagcucuguaauaacaucacuaggugcaauaguaucaugcuacggaaaaacaaaaugcacagcuucuaacaaaaauaaaggaauaauaaaaacauucuccaauggaugcgacuaugucucaaauaaaggaguagauacaguuucagucggcaacacacucuauuauguaaauaaacaagaaggaaaaucauuauacguaaaaggagaacccauaauaaacuucuacgacccccucguauucccaagcgacgaauuugacgccucaauaucacaaguaaacgaaaaaauaaaccaaucacucgcauucaucagaaaaucagaugaacuacuacacaauguaaacgucggaaaauccaccacaaauauaaugauaacuaccaucauaauaguaauaauagucaucuuacuacuauuaaucgcuguaggacuauuucucuacugcaaggccagauaaggacuaguaauaaggaaacuguaugaaugucugugggcaggaagugaagagauccuucuguaaagguuuuuggaauuaugucugcugaauaauaaacuuuuuugaaauaauaaaucugguagaaaaaugagaucuaaaaaaaaaaaaaaaaaaaaaaaaaaaaaaaaaaaaaaaaaaaaaaaaaaaaaaaaaaaaaaaaugcaucccccccccccccccccccccccccccccccaaaggcucuuuucagagccaccagaauu

SEQ ID NO: 18817 - RNA, 1885 nt, Artificial Sequence
  mRNA product Design b-4 comprising derived and/or modified sequence from HRSV(Memphis-37)__AIY60640.1__F-del_DSCav1_mut7 (opt11)
gggagagucccgcagucggcguccagcggcucugcuuguucgugugugugucguugcaggccuuauucaagcuuaccauggaacucccaauccucaaaacaaaugccaucaccaccauccuagccgcugucacacuaugcuucgccuccucacaaaacaucaccgaagaguucuaucaauccacaugcuccgccgucagcaagggauaccucuccgcccuuagaaccggcugguacaccucagucaucacaauugaacugucaaacaucaaagaaaacaaaugcaacggcaccgacgcaaaaguaaagcucaucaaacaagaacuggacaaguacaagaacgccgucaccgaacuacagaugcuuaugugcucaaccccugccgccggcuccggaucugccauagcuucaggcaucgccguaugcaaaguccugcaccuagaaggggaagucaacaaaaucaaaaacgcccuccucuccaccaacaaggccguugucucccugucaaacggagucuccguccuaaccuucaaaguccucgaccucaaaaacuacauagacaaacaacuccuacccauccucaacaaacaaagcugcucaauauccaacaucgaaaccgucauggaguuccaacaaaagaacaaccgacuacucgaaauaacacgcgaguucucagucaacgccggcgucaccaccccagucuccacauacaugcucaccaacuccgaacuccuaucgcucaucaacgacaugcccaucaccaaugaccagaagaaacucauguccaacaacguacaaaucguccgccaacaguccuacucaaucaugugcaucaucaaagaagaaguccuugccuacgucguccagcuuccacucuacggagucaucgacacccccugcuggaaacuccacaccuccccacuaugcaccaccaacaccaaagaaggauccaacauaugccucacccguacugaccgcggcugguacugcgacaacgccggauccgucucauucuucccccaggccgaaaccugcaaagucugcuccaaccgcgucuucugcgacaccaugaacucgcucacccucccauccgaagucaaucuaugcaacaucgacauuuucaaccccaaauacgacugcaaaauuaugacaucaaaaaccgacgucucauccucagucaucacuucccucggcgcaaucguaagcugcuacgggaaaacaaagugcaccgcuuccaacaaaaacaaaggcaucaucaaaaccuucucuaacggcugcgacuacgucuccaacaaaggagucgacaccguauccgucggcaacacccucuacuacgucaacaaacaggaaggaaaaucgcucuacgucaaaggagaaccaaucaucaacuucuacgacccccuagucuucccauccgacgaguucgacgccagcaucucacaagucaaugaaaagaucaaccagucacucgcauucauccguaagucagacgaacuccuacacaacgucaacgucggcaagucaacaaccaacauaaugaucaccaccauaaucaucgucauaauaguaauccuccuucuccuaaucgcagucggccucuuccucuacugcaaagcacgcuaaggacuaguaauaaggaaacuguaugaaugucugugggcaggaagugaagagauccuucuguaaagguuuuuggaauuaugucugcugaauaauaaacuuuuuugaaauaauaaaucugguagaaaaaugagaucuaaaaaaaaaaaaaaaaaaaaaaaaaaaaaaaaaaaaaaaaaaaaaaaaaaaaaaaaaaaaaaaaugcaucccccccccccccccccccccccccccccccaaaggcucuuuucagagccaccagaauu

SEQ ID NO: 18818 - RNA, 1947 nt, Artificial Sequence
  mRNA product Design b-5 comprising derived and/or modified sequence from HRSV(Memphis-37)__AIY60640.1__F-del_DSCav1_mut7 (opt1)
gggagacuccugucgggcggaaguaggaggaguagaguuuaaaaacaguacucuuuuuccgguucgggacguaguugaagcaacgacaagccggauaaccgcucuugagacaggaagcuuaccauggagcugcccauccucaagaccaacgccaucaccacgauccuggccgcggugacccugugcuucgccagcucccagaacaucaccgaggaguucuaccagagcacgugcuccgccgucagcaagggcuaccucuccgcccugcgcaccgggugguacaccagcgugaucaccaucgagcuguccaacaucaaggagaacaagugcaacggcaccgacgccaaggugaagcucaucaagcaggagcuggacaaguacaagaacgcggucacggagcugcagaugcugaugugcagcaccccggccgccggcuccgggagcgcgaucgccuccggcaucgccgucugcaaggugcugcaccucgagggcgaggugaacaagaucaagaacgcccugcuguccaccaacaaggccgucgugagccucuccaacggggugagcguccugaccuucaaggugcuggaccucaagaacuacaucgacaagcagcugcugcccauccugaacaagcagagcugcuccaucagcaacaucgagaccgucauggaguuccagcagaagaacaaccgccuccuggagaucacgcgggaguucagcgugaacgcgggcgugaccacccccgucuccaccuacaugcugacgaacagcgagcuccugucccugaucaacgacaugccgaucaccaacgaccagaagaagcucaugagcaacaacgugcagaucgugcgccagcaguccuacagcaucaugugcaucaucaaggaggagguccuggccuacguggugcagcugccccucuacggggucaucgacacccccugcuggaagcugcacaccagcccccugugcacgaccaacaccaaggagggcuccaacaucugccucacccggacggaccgcgggugguacugcgacaacgccggcagcguguccuucuucccgcaggccgagaccugcaaggucugcagcaaccggguguucugcgacaccaugaacucccugacccugcccagcgaggugaaccucugcaacaucgacaucuucaaccccaaguacgacugcaagaucaugacguccaagaccgacgucagcuccagcgugaucaccucccugggcgccaucgugagcugcuacgggaagaccaagugcacggcgagcaacaagaacaagggcaucaucaagaccuucuccaacgggugcgacuacgucagcaacaagggcguggacaccguguccgucggcaacacccuguacuacgugaacaagcaggagggcaagagccucuacgugaagggggagcccaucaucaacuucuacgacccgcuggucuuccccuccgacgaguucgacgccagcaucucccaggugaacgagaagaucaaccagagccuggccuucauccggaaguccgacgagcuccugcacaacgugaacgucggcaagagcaccacgaacaucaugaucaccaccaucaucaucgugaucaucgugauccugcugcuccugaucgccgucgggcuguuccucuacugcaaggcccgcugaggacuaguacuggcugcaucucccuuuccucuguccuccauccuucucccaggauggugaagggggaccugguacccagugauccccaccccaggauccuaaaucaugacuuaccugcuaauaaaaacucauuggaaaagugagaagaucuaaaaaaaaaaaaaaaaaaaaaaaaaaaaaaaaaaaaaaaaaaaaaaaaaaaaaaaaaaaaaaaaugcaucccccccccccccccccccccccccccccccaaaggcucuuuucagagccaccagaauu

SEQ ID NO: 18819 - RNA, 1947 nt, Artificial Sequence
  mRNA product Design b-5 comprising derived and/or modified sequence from HRSV(Memphis-37)__AIY60640.1__F-del_DSCav1_mut7 (opt1)
gggagacuccugucgggcggaaguaggaggaguagaguuuaaaaacaguacucuuuuuccgguucgggacguaguugaagcaacgacaagccggauaaccgcucuugagacaggaagcuuaccauggagcugcccauccucaagaccaacgccaucaccacgauccuggccgcggugacccugugcuucgccagcucccagaacaucaccgaggaguucuaccagagcacgugcuccgccgucagcaagggguaccucuccgcccugcgcaccgggugguacaccagcgugaucaccaucgagcuguccaacaucaaggagaacaagugcaacggcaccgacgccaaggugaagcucaucaagcaggagcuggacaaguacaagaacgcggucacggagcugcagaugcucaugugcagcaccccggccgccggguccggcagcgccaucgcguccgggaucgccgugugcaaggugcugcaccuggagggcgaggucaacaagaucaagaacgcccuccugagcaccaacaaggccguggugucccugagcaacggcgucuccgugcucaccuucaaggugcuggaccugaagaacuacaucgacaagcagcuccugcccauccugaacaagcagagcugcuccaucagcaacaucgagacggucauggaguuccagcagaagaacaaccggcuccuggagaucacccgcgaguucuccgugaacgccggggugaccacccccgucagcacguacaugcugaccaacagcgagcuccugucccugaucaacgacaugcccaucaccaacgaccagaagaagcucaugagcaacaacgugcagaucgugcggcagcaguccuacagcaucaugugcaucaucaaggaggagguccuggcguacguggugcagcugccgcucuacggcgucaucgacacccccugcuggaagcugcacacgagcccccugugcaccaccaacaccaaggaggggagcaacaucugccucacgcgcaccgaccggggcugguacugcgacaacgccggguccgugagcuucuucccccaggccgagaccugcaaggugugcuccaaccgcgucuucugcgacaccaugaacagccugacgcugccguccgaggugaaccucugcaacaucgacaucuucaaccccaaguacgacugcaagaucaugaccagcaagaccgacgucuccagcuccgugaucaccagccugggcgccaucguguccugcuacggcaagacgaagugcaccgccagcaacaagaacaaggggaucaucaagaccuucuccaacggcugcgacuacgucagcaacaaggggguggacaccgugagcgucggcaacacgcuguacuacgugaacaagcaggagggcaagucccucuacgugaagggggagcccaucaucaacuucuacgacccccuggucuucccgagcgacgaguucgacgcguccaucagccaggugaacgagaagaucaaccagucccuggccuucauccggaaguccgacgagcuccugcacaacgugaacgucggcaaguccaccaccaacaucaugaucaccaccaucaucaucgugaucaucgugauccugcuccugcugaucgccgucggccucuuccuguacugcaaggcccgcugaggacuaguacuggcugcaucucccuuuccucuguccuccauccuucucccaggauggugaagggggaccugguacccagugauccccaccccaggauccuaaaucaugacuuaccugcuaauaaaaacucauuggaaaagugagaagaucuaaaaaaaaaaaaaaaaaaaaaaaaaaaaaaaaaaaaaaaaaaaaaaaaaaaaaaaaaaaaaaaaugcaucccccccccccccccccccccccccccccccaaaggcucuuuucagagccaccagaauu

SEQ ID NO: 18820 - RNA, 1947 nt, Artificial Sequence
  mRNA product Design b-5 comprising derived and/or modified sequence from HRSV(Memphis-37)__AIY60640.1__F-del_DSCav1_mut7 (opt2)
gggagacuccugucgggcggaaguaggaggaguagaguuuaaaaacaguacucuuuuuccgguucgggacguaguugaagcaacgacaagccggauaaccgcucuugagacaggaagcuuaccauggagcuccccauccucaagaccaacgccaucaccaccauccucgccgccgucacccucugcuucgccuccucccagaacaucaccgaggaguucuaccaguccaccugcuccgccgucuccaagggcuaccucuccgcccuccgcaccggcugguacaccuccgucaucaccaucgagcucuccaacaucaaggagaacaagugcaacggcaccgacgccaaggucaagcucaucaagcaggagcucgacaaguacaagaacgccgucaccgagcuccagaugcucaugugcuccacccccgccgccggcuccggcuccgccaucgccuccggcaucgccgucugcaagguccuccaccucgagggcgaggucaacaagaucaagaacgcccuccucuccaccaacaaggccgucgucucccucuccaacggcgucuccguccucaccuucaagguccucgaccucaagaacuacaucgacaagcagcuccuccccauccucaacaagcaguccugcuccaucuccaacaucgagaccgucauggaguuccagcagaagaacaaccgccuccucgagaucacccgcgaguucuccgucaacgccggcgucaccacccccgucuccaccuacaugcucaccaacuccgagcuccucucccucaucaacgacaugcccaucaccaacgaccagaagaagcucauguccaacaacguccagaucguccgccagcaguccuacuccaucaugugcaucaucaaggaggagguccucgccuacgucguccagcucccccucuacggcgucaucgacacccccugcuggaagcuccacaccuccccccucugcaccaccaacaccaaggagggcuccaacaucugccucacccgcaccgaccgcggcugguacugcgacaacgccggcuccgucuccuucuucccccaggccgagaccugcaaggucugcuccaaccgcgucuucugcgacaccaugaacucccucacccuccccuccgaggucaaccucugcaacaucgacaucuucaaccccaaguacgacugcaagaucaugaccuccaagaccgacgucuccuccuccgucaucaccucccucggcgccaucgucuccugcuacggcaagaccaagugcaccgccuccaacaagaacaagggcaucaucaagaccuucuccaacggcugcgacuacgucuccaacaagggcgucgacaccgucuccgucggcaacacccucuacuacgucaacaagcaggagggcaagucccucuacgucaagggcgagcccaucaucaacuucuacgacccccucgucuuccccuccgacgaguucgacgccuccaucucccaggucaacgagaagaucaaccagucccucgccuucauccgcaaguccgacgagcuccuccacaacgucaacgucggcaaguccaccaccaacaucaugaucaccaccaucaucaucgucaucaucgucauccuccuccuccucaucgccgucggccucuuccucuacugcaaggcccgcugaggacuaguacuggcugcaucucccuuuccucuguccuccauccuucucccaggauggugaagggggaccugguacccagugauccccaccccaggauccuaaaucaugacuuaccugcuaauaaaaacucauuggaaaagugagaagaucuaaaaaaaaaaaaaaaaaaaaaaaaaaaaaaaaaaaaaaaaaaaaaaaaaaaaaaaaaaaaaaaaugcaucccccccccccccccccccccccccccccccaaaggcucuuuucagagccaccagaauu

SEQ ID NO: 18821 - RNA, 1947 nt, Artificial Sequence
  mRNA product Design b-5 comprising derived and/or modified sequence from HRSV(Memphis-37)__AIY60640.1__F-del_DSCav1_mut7 (opt3)
gggagacuccugucgggcggaaguaggaggaguagaguuuaaaaacaguacucuuuuuccgguucgggacguaguugaagcaacgacaagccggauaaccgcucuugagacaggaagcuuaccauggagcugcccauccucaagaccaacgccauuacaacuauacuugcugcagugacgcugugcuucgccagcucccagaauaucaccgaagaguuuuaccaaucuacauguucagcggucaguaaaggcuauuugagcgcuuuaagaacugggugguacaccuccguuauuacaaucgaacugucuaacauuaaggagaauaaaugcaacggaaccgacgccaaggugaaacuaaucaagcaggaacucgauaaguauaaaaaugcaguaacugagcugcagaugcuuauguguucgaccccugccgcugguucaggcagcgcaauagccagugggaucgcugugugcaagguccugcacuuggagggagaagugaacaaaauuaagaaugcccuccuguccacaaacaaagcgguugugucucugagcaauggcgucuccgugcucacguucaagguauuagaccugaagaacuacaucgauaaacagcuuuugccaauucugaauaagcaaucauguaguaucagcaacauagagacuguuauggaauuucagcagaaaaauaacaggcuacucgagauuacccgggaguucucugugaaugccggugucacaacuccgguguccaccuauaugcugacaaacucagaacuucugagcuugaucaacgacaugcccauuaccaaugaucagaagaaacucaugaguaacaaugugcaaaucguccgccagcagucuuacuccaucaugugcauuauaaaggaggaaguucuggcauaugugguacaguuaccucuguacggggugaucgacacgccauguuggaaacuccauacuagcccccuuugcacaaccaacacuaaggagggaucgaauauuugucugacacgaaccgaucguggcugguacugcgacaacgcuggcucugucuccuuuuucccucaagccgaaacguguaaggugugcucaaauagaguguuuugcgauaccaugaacaguuugacacuaccaagcgagguuaaucuguguaacaucgacauauucaaucccaaauaugauugcaagauuaugacuuccaaaaccgacgucucuagcucagugaucacaagucucggggcaaucguauccuguuacggaaagacuaaaugcaccgcuagcaacaagaauaaggguauuaucaaaacauuuucuaacggcugugauuauguuucaaauaaggggguggacaccgucagugugggaaacacucuguacuaugucaacaaacaggagggcaagagccuuuacgugaaaggugaaccuauuauaaauuucuaugacccacugguuuuuccguccgaugaguucgacgccucuaucagccaggugaacgaaaagauuaaucaaucguuggcguuuaucaggaaguccgaugagcuccugcacaacguaaaugucgggaaaucaacgacaaacaucaugauuaccacuauaaucauugugaucauuguuaucuuacugcuacucauagccgugggacuguuccuuuacugcaaggcacggugaggacuaguacuggcugcaucucccuuuccucuguccuccauccuucucccaggauggugaagggggaccugguacccagugauccccaccccaggauccuaaaucaugacuuaccugcuaauaaaaacucauuggaaaagugagaagaucuaaaaaaaaaaaaaaaaaaaaaaaaaaaaaaaaaaaaaaaaaaaaaaaaaaaaaaaaaaaaaaaaugcaucccccccccccccccccccccccccccccccaaaggcucuuuucagagccaccagaauu

SEQ ID NO: 18822 - RNA, 1947 nt, Artificial Sequence
  mRNA product Design b-5 comprising derived and/or modified sequence from HRSV(Memphis-37)__AIY60640.1__F-del_DSCav1_mut7 (opt4)
gggagacuccugucgggcggaaguaggaggaguagaguuuaaaaacaguacucuuuuuccgguucgggacguaguugaagcaacgacaagccggauaaccgcucuugagacaggaagcuuaccauggagcugcccauccugaagaccaacgccaucaccaccauccuggccgccgugacccugugcuucgccagcagccagaacaucaccgaggaguucuaccagagcaccugcagcgccgugagcaagggcuaccugagcgcccugagaaccggcugguacaccagcgugaucaccaucgagcugagcaacaucaaggagaacaagugcaacggcaccgacgccaaggugaagcugaucaagcaggagcuggacaaguacaagaacgccgugaccgagcugcagaugcugaugugcagcacccccgccgccggcagcggcagcgccaucgccagcggcaucgccgugugcaaggugcugcaccuggagggcgaggugaacaagaucaagaacgcccugcugagcaccaacaaggccguggugagccugagcaacggcgugagcgugcugaccuucaaggugcuggaccugaagaacuacaucgacaagcagcugcugcccauccugaacaagcagagcugcagcaucagcaacaucgagaccgugauggaguuccagcagaagaacaacagacugcuggagaucaccagagaguucagcgugaacgccggcgugaccacccccgugagcaccuacaugcugaccaacagcgagcugcugagccugaucaacgacaugcccaucaccaacgaccagaagaagcugaugagcaacaacgugcagaucgugagacagcagagcuacagcaucaugugcaucaucaaggaggaggugcuggccuacguggugcagcugccccuguacggcgugaucgacacccccugcuggaagcugcacaccagcccccugugcaccaccaacaccaaggagggcagcaacaucugccugaccagaaccgacagaggcugguacugcgacaacgccggcagcgugagcuucuucccccaggccgagaccugcaaggugugcagcaacagaguguucugcgacaccaugaacagccugacccugcccagcgaggugaaccugugcaacaucgacaucuucaaccccaaguacgacugcaagaucaugaccagcaagaccgacgugagcagcagcgugaucaccagccugggcgccaucgugagcugcuacggcaagaccaagugcaccgccagcaacaagaacaagggcaucaucaagaccuucagcaacggcugcgacuacgugagcaacaagggcguggacaccgugagcgugggcaacacccuguacuacgugaacaagcaggagggcaagagccuguacgugaagggcgagcccaucaucaacuucuacgacccccugguguuccccagcgacgaguucgacgccagcaucagccaggugaacgagaagaucaaccagagccuggccuucaucagaaagagcgacgagcugcugcacaacgugaacgugggcaagagcaccaccaacaucaugaucaccaccaucaucaucgugaucaucgugauccugcugcugcugaucgccgugggccuguuccuguacugcaaggccagaugaggacuaguacuggcugcaucucccuuuccucuguccuccauccuucucccaggauggugaagggggaccugguacccagugauccccaccccaggauccuaaaucaugacuuaccugcuaauaaaaacucauuggaaaagugagaagaucuaaaaaaaaaaaaaaaaaaaaaaaaaaaaaaaaaaaaaaaaaaaaaaaaaaaaaaaaaaaaaaaaugcaucccccccccccccccccccccccccccccccaaaggcucuuuucagagccaccagaauu

SEQ ID NO: 18823 - RNA, 1947 nt, Artificial Sequence
  mRNA product Design b-5 comprising derived and/or modified sequence from HRSV(Memphis-37)__AIY60640.1__F-del_DSCav1_mut7 (opt5)
gggagacuccugucgggcggaaguaggaggaguagaguuuaaaaacaguacucuuuuuccgguucgggacguaguugaagcaacgacaagccggauaaccgcucuugagacaggaagcuuaccauggagcugcccauccucaagaccaacgccauuacaacgauccuggcugccgugacccuuugcuucgcgagcucccagaauauuacagaagaguuuuaccaaucuaccuguagcgcugucuccaaaggcuaucugucugcccucagaacagggugguacaccagcguuaucacaauugaacuguccaacaucaaggagaauaaaugcaacggaaccgacgccaaggugaaacuuaucaagcaggaacuggauaaguauaaaaaugcugugacggagcuccagaugcugauguguucuaccccugccgcuggcagcggguccgccauugcgagcggaaucgccgucugcaaggugcugcaccucgagggcgaaguuaacaaaauuaagaaugcucugcuuucuacaaacaaagccguggucucccugagcaauggggugucuguucucaccuucaaggugcuggaccuuaagaacuacaucgauaaacagcugcucccgauucugaauaagcaauccuguagcaucucuaacauugagacagucauggaauuucagcagaaaaauaaccggcugcucgagaucacccgcgaguucuccgugaaugcuggagugacgacacccgucagcaccuauaugcugacaaacuccgaacuucugucucucaucaacgacaugccuauuaccaaugaucagaagaaacugaugagcaacaauguucaaaucgugagacagcaguccuacagcauuaugugcaucauuaaggaggaagugcuugccuaugucgugcagcugccccucuacggcguuaucgacaccccuuguuggaaacugcauacaucuccccugugcacgaccaacacaaaggagggcuccaauaucugucucacccggacagaucgcgggugguacugcgacaacgcgggaagcgugagcuuuuucccucaagccgaaaccuguaaggucugcucuaauagaguguuuugcgauacgaugaacucccugacacuuccgucugagguuaaucuguguaacauugacaucuucaaucccaaauaugauugcaagauuaugaccagcaaaaccgacguguccagcucugucaucacaucccucggcgcuauugugagcuguuacgggaagaccaaaugcacagccucuaacaagaauaagggaaucaucaaaacguuuuccaacggcugugauuaugucagcaauaaggggguggacaccguuuccgugggaaacacacuguacuaugucaacaaacaggagggcaagucucuuuacgugaaaggcgaaccuauuaucaauuucuaugacccccugguuuuuccuagcgaugaguucgacgcuuccauuucucaggugaacgaaaagaucaaucaaagccucgccuuuauucggaaguccgaugagcugcugcacaacgucaauguggggaaaagcaccacaaacaucaugauuaccacgaucaucauugugaucauuguuauccuccugcuucugauugccgucggacucuuccuguacugcaaggcucgcugaggacuaguacuggcugcaucucccuuuccucuguccuccauccuucucccaggauggugaagggggaccugguacccagugauccccaccccaggauccuaaaucaugacuuaccugcuaauaaaaacucauuggaaaagugagaagaucuaaaaaaaaaaaaaaaaaaaaaaaaaaaaaaaaaaaaaaaaaaaaaaaaaaaaaaaaaaaaaaaaugcaucccccccccccccccccccccccccccccccaaaggcucuuuucagagccaccagaauu

SEQ ID NO: 18824 - RNA, 1947 nt, Artificial Sequence
  mRNA product Design b-5 comprising derived and/or modified sequence from HRSV(Memphis-37)__AIY60640.1__F-del_DSCav1_mut7 (opt6)
gggagacuccugucgggcggaaguaggaggaguagaguuuaaaaacaguacucuuuuuccgguucgggacguaguugaagcaacgacaagccggauaaccgcucuugagacaggaagcuuaccauggaacuaccaauacucaaaacaaacgccauaaccacaauacuagccgcaguaacacuuugcuuugccucaagucaaaacauaacagaagaauuuuaccaauccacaugcucagcuguauccaaaggauauuuauccgcacuaagaacaggaugguacacaucaguaaucacaauagaauuaucaaacauaaaagaaaacaaauguaauggcacagacgccaaaguaaaacuaauuaaacaagaacuagacaaauauaaaaaugcaguaaccgaacuccaaaugcucaugugcucuacaccagcugcaggaucaggaucagccauugcaagcgguauagcuguuugcaaaguauuacacuuagaaggagaaguaaauaaaauaaaaaacgcacuacuaucaacaaauaaagcaguaguaucccuaucaaacggaguaucaguacuuacauucaaaguauuagauuuaaaaaacuauauagacaaacaacuacuucccauauuaaacaaacaaucaugcucaauuuccaacauugaaacuguaauggaauuucaacaaaaaaacaacagacuacuugaaaucacacgagaauuuucaguaaacgcuggaguaacaacaccugucucuaccuacaugcucacaaauagcgaauuacuaucucuaaucaaugacaugccaauaacaaacgaucaaaaaaaacuaauguccaacaacguacaaauaguaagacaacaauccuauucaauaaugugcauaauaaaagaagaagucuuagcauacguuguacaacuaccauuauacggaguaauagauacaccaugcuggaaacuccacacaagcccccucugcacaacaaacaccaaagaagggucaaacauaugcuuaacaagaacagacagaggaugguacugugauaacgcaggaucugucucauucuuuccacaagcagaaacauguaaaguaugcuccaacagagucuuuugcgacaccaugaacucacuaaccuuacccucagaaguaaaccugugcaacaucgauaucuucaaccccaaauacgauugcaaaaucaugacaagcaaaacugauguauccagcucuguaauaacaucacuaggugcaauaguaucaugcuacggaaaaacaaaaugcacagcuucuaacaaaaauaaaggaauaauaaaaacauucuccaauggaugcgacuaugucucaaauaaaggaguagauacaguuucagucggcaacacacucuauuauguaaauaaacaagaaggaaaaucauuauacguaaaaggagaacccauaauaaacuucuacgacccccucguauucccaagcgacgaauuugacgccucaauaucacaaguaaacgaaaaaauaaaccaaucacucgcauucaucagaaaaucagaugaacuacuacacaauguaaacgucggaaaauccaccacaaauauaaugauaacuaccaucauaauaguaauaauagucaucuuacuacuauuaaucgcuguaggacuauuucucuacugcaaggccagauaaggacuaguacuggcugcaucucccuuuccucuguccuccauccuucucccaggauggugaagggggaccugguacccagugauccccaccccaggauccuaaaucaugacuuaccugcuaauaaaaacucauuggaaaagugagaagaucuaaaaaaaaaaaaaaaaaaaaaaaaaaaaaaaaaaaaaaaaaaaaaaaaaaaaaaaaaaaaaaaaugcaucccccccccccccccccccccccccccccccaaaggcucuuuucagagccaccagaauu

SEQ ID NO: 18825 - RNA, 1947 nt, Artificial Sequence
  mRNA product Design b-5 comprising derived and/or modified sequence from HRSV(Memphis-37)__AIY60640.1__F-del_DSCav1_mut7 (opt11)
gggagacuccugucgggcggaaguaggaggaguagaguuuaaaaacaguacucuuuuuccgguucgggacguaguugaagcaacgacaagccggauaaccgcucuugagacaggaagcuuaccauggaacucccaauccucaaaacaaaugccaucaccaccauccuagccgcugucacacuaugcuucgccuccucacaaaacaucaccgaagaguucuaucaauccacaugcuccgccgucagcaagggauaccucuccgcccuuagaaccggcugguacaccucagucaucacaauugaacugucaaacaucaaagaaaacaaaugcaacggcaccgacgcaaaaguaaagcucaucaaacaagaacuggacaaguacaagaacgccgucaccgaacuacagaugcuuaugugcucaaccccugccgccggcuccggaucugccauagcuucaggcaucgccguaugcaaaguccugcaccuagaaggggaagucaacaaaaucaaaaacgcccuccucuccaccaacaaggccguugucucccugucaaacggagucuccguccuaaccuucaaaguccucgaccucaaaaacuacauagacaaacaacuccuacccauccucaacaaacaaagcugcucaauauccaacaucgaaaccgucauggaguuccaacaaaagaacaaccgacuacucgaaauaacacgcgaguucucagucaacgccggcgucaccaccccagucuccacauacaugcucaccaacuccgaacuccuaucgcucaucaacgacaugcccaucaccaaugaccagaagaaacucauguccaacaacguacaaaucguccgccaacaguccuacucaaucaugugcaucaucaaagaagaaguccuugccuacgucguccagcuuccacucuacggagucaucgacacccccugcuggaaacuccacaccuccccacuaugcaccaccaacaccaaagaaggauccaacauaugccucacccguacugaccgcggcugguacugcgacaacgccggauccgucucauucuucccccaggccgaaaccugcaaagucugcuccaaccgcgucuucugcgacaccaugaacucgcucacccucccauccgaagucaaucuaugcaacaucgacauuuucaaccccaaauacgacugcaaaauuaugacaucaaaaaccgacgucucauccucagucaucacuucccucggcgcaaucguaagcugcuacgggaaaacaaagugcaccgcuuccaacaaaaacaaaggcaucaucaaaaccuucucuaacggcugcgacuacgucuccaacaaaggagucgacaccguauccgucggcaacacccucuacuacgucaacaaacaggaaggaaaaucgcucuacgucaaaggagaaccaaucaucaacuucuacgacccccuagucuucccauccgacgaguucgacgccagcaucucacaagucaaugaaaagaucaaccagucacucgcauucauccguaagucagacgaacuccuacacaacgucaacgucggcaagucaacaaccaacauaaugaucaccaccauaaucaucgucauaauaguaauccuccuucuccuaaucgcagucggccucuuccucuacugcaaagcacgcuaaggacuaguacuggcugcaucucccuuuccucuguccuccauccuucucccaggauggugaagggggaccugguacccagugauccccaccccaggauccuaaaucaugacuuaccugcuaauaaaaacucauuggaaaagugagaagaucuaaaaaaaaaaaaaaaaaaaaaaaaaaaaaaaaaaaaaaaaaaaaaaaaaaaaaaaaaaaaaaaaugcaucccccccccccccccccccccccccccccccaaaggcucuuuucagagccaccagaauu

SEQ ID NO: 18826 - RNA, 1853 nt, Artificial Sequence
  mRNA product Design c-1 comprising derived and/or modified sequence from HRSV(Memphis-37)__AIY60640.1__F-del_DSCav1_mut7 (opt1)
gggagaguccgcucagccagguugcagaagcggcuuagcguguguccuaaucuucucucugcguguagguaggccugugccgcaaacaagcuuaccauggagcugcccauccucaagaccaacgccaucaccacgauccuggccgcggugacccugugcuucgccagcucccagaacaucaccgaggaguucuaccagagcacgugcuccgccgucagcaagggcuaccucuccgcccugcgcaccgggugguacaccagcgugaucaccaucgagcuguccaacaucaaggagaacaagugcaacggcaccgacgccaaggugaagcucaucaagcaggagcuggacaaguacaagaacgcggucacggagcugcagaugcugaugugcagcaccccggccgccggcuccgggagcgcgaucgccuccggcaucgccgucugcaaggugcugcaccucgagggcgaggugaacaagaucaagaacgcccugcuguccaccaacaaggccgucgugagccucuccaacggggugagcguccugaccuucaaggugcuggaccucaagaacuacaucgacaagcagcugcugcccauccugaacaagcagagcugcuccaucagcaacaucgagaccgucauggaguuccagcagaagaacaaccgccuccuggagaucacgcgggaguucagcgugaacgcgggcgugaccacccccgucuccaccuacaugcugacgaacagcgagcuccugucccugaucaacgacaugccgaucaccaacgaccagaagaagcucaugagcaacaacgugcagaucgugcgccagcaguccuacagcaucaugugcaucaucaaggaggagguccuggccuacguggugcagcugccccucuacggggucaucgacacccccugcuggaagcugcacaccagcccccugugcacgaccaacaccaaggagggcuccaacaucugccucacccggacggaccgcgggugguacugcgacaacgccggcagcguguccuucuucccgcaggccgagaccugcaaggucugcagcaaccggguguucugcgacaccaugaacucccugacccugcccagcgaggugaaccucugcaacaucgacaucuucaaccccaaguacgacugcaagaucaugacguccaagaccgacgucagcuccagcgugaucaccucccugggcgccaucgugagcugcuacgggaagaccaagugcacggcgagcaacaagaacaagggcaucaucaagaccuucuccaacgggugcgacuacgucagcaacaagggcguggacaccguguccgucggcaacacccuguacuacgugaacaagcaggagggcaagagccucuacgugaagggggagcccaucaucaacuucuacgacccgcuggucuuccccuccgacgaguucgacgccagcaucucccaggugaacgagaagaucaaccagagccuggccuucauccggaaguccgacgagcuccugcacaacgugaacgucggcaagagcaccacgaacaucaugaucaccaccaucaucaucgugaucaucgugauccugcugcuccugaucgccgucgggcuguuccucuacugcaaggcccgcugaggacuaguguccaccugucccuccugggcugcuggauugucucguuuuccugccaaauaaacaggaucagcgcuuuacagaucuaaaaaaaaaaaaaaaaaaaaaaaaaaaaaaaaaaaaaaaaaaaaaaaaaaaaaaaaaaaaaaaaugcaucccccccccccccccccccccccccccccccaaaggcucuuuucagagccaccagaauu

SEQ ID NO: 18827 - RNA, 1853 nt, Artificial Sequence
  mRNA product Design c-1 comprising derived and/or modified sequence from HRSV(Memphis-37)__AIY60640.1__F-del_DSCav1_mut7 (opt1)
gggagaguccgcucagccagguugcagaagcggcuuagcguguguccuaaucuucucucugcguguagguaggccugugccgcaaacaagcuuaccauggagcugcccauccucaagaccaacgccaucaccacgauccuggccgcggugacccugugcuucgccagcucccagaacaucaccgaggaguucuaccagagcacgugcuccgccgucagcaagggguaccucuccgcccugcgcaccgggugguacaccagcgugaucaccaucgagcuguccaacaucaaggagaacaagugcaacggcaccgacgccaaggugaagcucaucaagcaggagcuggacaaguacaagaacgcggucacggagcugcagaugcucaugugcagcaccccggccgccggguccggcagcgccaucgcguccgggaucgccgugugcaaggugcugcaccuggagggcgaggucaacaagaucaagaacgcccuccugagcaccaacaaggccguggugucccugagcaacggcgucuccgugcucaccuucaaggugcuggaccugaagaacuacaucgacaagcagcuccugcccauccugaacaagcagagcugcuccaucagcaacaucgagacggucauggaguuccagcagaagaacaaccggcuccuggagaucacccgcgaguucuccgugaacgccggggugaccacccccgucagcacguacaugcugaccaacagcgagcuccugucccugaucaacgacaugcccaucaccaacgaccagaagaagcucaugagcaacaacgugcagaucgugcggcagcaguccuacagcaucaugugcaucaucaaggaggagguccuggcguacguggugcagcugccgcucuacggcgucaucgacacccccugcuggaagcugcacacgagcccccugugcaccaccaacaccaaggaggggagcaacaucugccucacgcgcaccgaccggggcugguacugcgacaacgccggguccgugagcuucuucccccaggccgagaccugcaaggugugcuccaaccgcgucuucugcgacaccaugaacagccugacgcugccguccgaggugaaccucugcaacaucgacaucuucaaccccaaguacgacugcaagaucaugaccagcaagaccgacgucuccagcuccgugaucaccagccugggcgccaucguguccugcuacggcaagacgaagugcaccgccagcaacaagaacaaggggaucaucaagaccuucuccaacggcugcgacuacgucagcaacaaggggguggacaccgugagcgucggcaacacgcuguacuacgugaacaagcaggagggcaagucccucuacgugaagggggagcccaucaucaacuucuacgacccccuggucuucccgagcgacgaguucgacgcguccaucagccaggugaacgagaagaucaaccagucccuggccuucauccggaaguccgacgagcuccugcacaacgugaacgucggcaaguccaccaccaacaucaugaucaccaccaucaucaucgugaucaucgugauccugcuccugcugaucgccgucggccucuuccuguacugcaaggcccgcugaggacuaguguccaccugucccuccugggcugcuggauugucucguuuuccugccaaauaaacaggaucagcgcuuuacagaucuaaaaaaaaaaaaaaaaaaaaaaaaaaaaaaaaaaaaaaaaaaaaaaaaaaaaaaaaaaaaaaaaugcaucccccccccccccccccccccccccccccccaaaggcucuuuucagagccaccagaauu

SEQ ID NO: 18828 - RNA, 1853 nt, Artificial Sequence
  mRNA product Design c-1 comprising derived and/or modified sequence from HRSV(Memphis-37)__AIY60640.1__F-del_DSCav1_mut7 (opt2)
gggagaguccgcucagccagguugcagaagcggcuuagcguguguccuaaucuucucucugcguguagguaggccugugccgcaaacaagcuuaccauggagcuccccauccucaagaccaacgccaucaccaccauccucgccgccgucacccucugcuucgccuccucccagaacaucaccgaggaguucuaccaguccaccugcuccgccgucuccaagggcuaccucuccgcccuccgcaccggcugguacaccuccgucaucaccaucgagcucuccaacaucaaggagaacaagugcaacggcaccgacgccaaggucaagcucaucaagcaggagcucgacaaguacaagaacgccgucaccgagcuccagaugcucaugugcuccacccccgccgccggcuccggcuccgccaucgccuccggcaucgccgucugcaagguccuccaccucgagggcgaggucaacaagaucaagaacgcccuccucuccaccaacaaggccgucgucucccucuccaacggcgucuccguccucaccuucaagguccucgaccucaagaacuacaucgacaagcagcuccuccccauccucaacaagcaguccugcuccaucuccaacaucgagaccgucauggaguuccagcagaagaacaaccgccuccucgagaucacccgcgaguucuccgucaacgccggcgucaccacccccgucuccaccuacaugcucaccaacuccgagcuccucucccucaucaacgacaugcccaucaccaacgaccagaagaagcucauguccaacaacguccagaucguccgccagcaguccuacuccaucaugugcaucaucaaggaggagguccucgccuacgucguccagcucccccucuacggcgucaucgacacccccugcuggaagcuccacaccuccccccucugcaccaccaacaccaaggagggcuccaacaucugccucacccgcaccgaccgcggcugguacugcgacaacgccggcuccgucuccuucuucccccaggccgagaccugcaaggucugcuccaaccgcgucuucugcgacaccaugaacucccucacccuccccuccgaggucaaccucugcaacaucgacaucuucaaccccaaguacgacugcaagaucaugaccuccaagaccgacgucuccuccuccgucaucaccucccucggcgccaucgucuccugcuacggcaagaccaagugcaccgccuccaacaagaacaagggcaucaucaagaccuucuccaacggcugcgacuacgucuccaacaagggcgucgacaccgucuccgucggcaacacccucuacuacgucaacaagcaggagggcaagucccucuacgucaagggcgagcccaucaucaacuucuacgacccccucgucuuccccuccgacgaguucgacgccuccaucucccaggucaacgagaagaucaaccagucccucgccuucauccgcaaguccgacgagcuccuccacaacgucaacgucggcaaguccaccaccaacaucaugaucaccaccaucaucaucgucaucaucgucauccuccuccuccucaucgccgucggccucuuccucuacugcaaggcccgcugaggacuaguguccaccugucccuccugggcugcuggauugucucguuuuccugccaaauaaacaggaucagcgcuuuacagaucuaaaaaaaaaaaaaaaaaaaaaaaaaaaaaaaaaaaaaaaaaaaaaaaaaaaaaaaaaaaaaaaaugcaucccccccccccccccccccccccccccccccaaaggcucuuuucagagccaccagaauu

SEQ ID NO: 18829 - RNA, 1853 nt, Artificial Sequence
  mRNA product Design c-1 comprising derived and/or modified sequence from HRSV(Memphis-37)__AIY60640.1__F-del_DSCav1_mut7 (opt3)
gggagaguccgcucagccagguugcagaagcggcuuagcguguguccuaaucuucucucugcguguagguaggccugugccgcaaacaagcuuaccauggagcugcccauccucaagaccaacgccauuacaacuauacuugcugcagugacgcugugcuucgccagcucccagaauaucaccgaagaguuuuaccaaucuacauguucagcggucaguaaaggcuauuugagcgcuuuaagaacugggugguacaccuccguuauuacaaucgaacugucuaacauuaaggagaauaaaugcaacggaaccgacgccaaggugaaacuaaucaagcaggaacucgauaaguauaaaaaugcaguaacugagcugcagaugcuuauguguucgaccccugccgcugguucaggcagcgcaauagccagugggaucgcugugugcaagguccugcacuuggagggagaagugaacaaaauuaagaaugcccuccuguccacaaacaaagcgguugugucucugagcaauggcgucuccgugcucacguucaagguauuagaccugaagaacuacaucgauaaacagcuuuugccaauucugaauaagcaaucauguaguaucagcaacauagagacuguuauggaauuucagcagaaaaauaacaggcuacucgagauuacccgggaguucucugugaaugccggugucacaacuccgguguccaccuauaugcugacaaacucagaacuucugagcuugaucaacgacaugcccauuaccaaugaucagaagaaacucaugaguaacaaugugcaaaucguccgccagcagucuuacuccaucaugugcauuauaaaggaggaaguucuggcauaugugguacaguuaccucuguacggggugaucgacacgccauguuggaaacuccauacuagcccccuuugcacaaccaacacuaaggagggaucgaauauuugucugacacgaaccgaucguggcugguacugcgacaacgcuggcucugucuccuuuuucccucaagccgaaacguguaaggugugcucaaauagaguguuuugcgauaccaugaacaguuugacacuaccaagcgagguuaaucuguguaacaucgacauauucaaucccaaauaugauugcaagauuaugacuuccaaaaccgacgucucuagcucagugaucacaagucucggggcaaucguauccuguuacggaaagacuaaaugcaccgcuagcaacaagaauaaggguauuaucaaaacauuuucuaacggcugugauuauguuucaaauaaggggguggacaccgucagugugggaaacacucuguacuaugucaacaaacaggagggcaagagccuuuacgugaaaggugaaccuauuauaaauuucuaugacccacugguuuuuccguccgaugaguucgacgccucuaucagccaggugaacgaaaagauuaaucaaucguuggcguuuaucaggaaguccgaugagcuccugcacaacguaaaugucgggaaaucaacgacaaacaucaugauuaccacuauaaucauugugaucauuguuaucuuacugcuacucauagccgugggacuguuccuuuacugcaaggcacggugaggacuaguguccaccugucccuccugggcugcuggauugucucguuuuccugccaaauaaacaggaucagcgcuuuacagaucuaaaaaaaaaaaaaaaaaaaaaaaaaaaaaaaaaaaaaaaaaaaaaaaaaaaaaaaaaaaaaaaaugcaucccccccccccccccccccccccccccccccaaaggcucuuuucagagccaccagaauu

SEQ ID NO: 18830 - RNA, 1853 nt, Artificial Sequence
  mRNA product Design c-1 comprising derived and/or modified sequence from HRSV(Memphis-37)__AIY60640.1__F-del_DSCav1_mut7 (opt4)
gggagaguccgcucagccagguugcagaagcggcuuagcguguguccuaaucuucucucugcguguagguaggccugugccgcaaacaagcuuaccauggagcugcccauccugaagaccaacgccaucaccaccauccuggccgccgugacccugugcuucgccagcagccagaacaucaccgaggaguucuaccagagcaccugcagcgccgugagcaagggcuaccugagcgcccugagaaccggcugguacaccagcgugaucaccaucgagcugagcaacaucaaggagaacaagugcaacggcaccgacgccaaggugaagcugaucaagcaggagcuggacaaguacaagaacgccgugaccgagcugcagaugcugaugugcagcacccccgccgccggcagcggcagcgccaucgccagcggcaucgccgugugcaaggugcugcaccuggagggcgaggugaacaagaucaagaacgcccugcugagcaccaacaaggccguggugagccugagcaacggcgugagcgugcugaccuucaaggugcuggaccugaagaacuacaucgacaagcagcugcugcccauccugaacaagcagagcugcagcaucagcaacaucgagaccgugauggaguuccagcagaagaacaacagacugcuggagaucaccagagaguucagcgugaacgccggcgugaccacccccgugagcaccuacaugcugaccaacagcgagcugcugagccugaucaacgacaugcccaucaccaacgaccagaagaagcugaugagcaacaacgugcagaucgugagacagcagagcuacagcaucaugugcaucaucaaggaggaggugcuggccuacguggugcagcugccccuguacggcgugaucgacacccccugcuggaagcugcacaccagcccccugugcaccaccaacaccaaggagggcagcaacaucugccugaccagaaccgacagaggcugguacugcgacaacgccggcagcgugagcuucuucccccaggccgagaccugcaaggugugcagcaacagaguguucugcgacaccaugaacagccugacccugcccagcgaggugaaccugugcaacaucgacaucuucaaccccaaguacgacugcaagaucaugaccagcaagaccgacgugagcagcagcgugaucaccagccugggcgccaucgugagcugcuacggcaagaccaagugcaccgccagcaacaagaacaagggcaucaucaagaccuucagcaacggcugcgacuacgugagcaacaagggcguggacaccgugagcgugggcaacacccuguacuacgugaacaagcaggagggcaagagccuguacgugaagggcgagcccaucaucaacuucuacgacccccugguguuccccagcgacgaguucgacgccagcaucagccaggugaacgagaagaucaaccagagccuggccuucaucagaaagagcgacgagcugcugcacaacgugaacgugggcaagagcaccaccaacaucaugaucaccaccaucaucaucgugaucaucgugauccugcugcugcugaucgccgugggccuguuccuguacugcaaggccagaugaggacuaguguccaccugucccuccugggcugcuggauugucucguuuuccugccaaauaaacaggaucagcgcuuuacagaucuaaaaaaaaaaaaaaaaaaaaaaaaaaaaaaaaaaaaaaaaaaaaaaaaaaaaaaaaaaaaaaaaugcaucccccccccccccccccccccccccccccccaaaggcucuuuucagagccaccagaauu

SEQ ID NO: 18831 - RNA, 1853 nt, Artificial Sequence
  mRNA product Design c-1 comprising derived and/or modified sequence from HRSV(Memphis-37)__AIY60640.1__F-del_DSCav1_mut7 (opt5)
gggagaguccgcucagccagguugcagaagcggcuuagcguguguccuaaucuucucucugcguguagguaggccugugccgcaaacaagcuuaccauggagcugcccauccucaagaccaacgccauuacaacgauccuggcugccgugacccuuugcuucgcgagcucccagaauauuacagaagaguuuuaccaaucuaccuguagcgcugucuccaaaggcuaucugucugcccucagaacagggugguacaccagcguuaucacaauugaacuguccaacaucaaggagaauaaaugcaacggaaccgacgccaaggugaaacuuaucaagcaggaacuggauaaguauaaaaaugcugugacggagcuccagaugcugauguguucuaccccugccgcuggcagcggguccgccauugcgagcggaaucgccgucugcaaggugcugcaccucgagggcgaaguuaacaaaauuaagaaugcucugcuuucuacaaacaaagccguggucucccugagcaauggggugucuguucucaccuucaaggugcuggaccuuaagaacuacaucgauaaacagcugcucccgauucugaauaagcaauccuguagcaucucuaacauugagacagucauggaauuucagcagaaaaauaaccggcugcucgagaucacccgcgaguucuccgugaaugcuggagugacgacacccgucagcaccuauaugcugacaaacuccgaacuucugucucucaucaacgacaugccuauuaccaaugaucagaagaaacugaugagcaacaauguucaaaucgugagacagcaguccuacagcauuaugugcaucauuaaggaggaagugcuugccuaugucgugcagcugccccucuacggcguuaucgacaccccuuguuggaaacugcauacaucuccccugugcacgaccaacacaaaggagggcuccaauaucugucucacccggacagaucgcgggugguacugcgacaacgcgggaagcgugagcuuuuucccucaagccgaaaccuguaaggucugcucuaauagaguguuuugcgauacgaugaacucccugacacuuccgucugagguuaaucuguguaacauugacaucuucaaucccaaauaugauugcaagauuaugaccagcaaaaccgacguguccagcucugucaucacaucccucggcgcuauugugagcuguuacgggaagaccaaaugcacagccucuaacaagaauaagggaaucaucaaaacguuuuccaacggcugugauuaugucagcaauaaggggguggacaccguuuccgugggaaacacacuguacuaugucaacaaacaggagggcaagucucuuuacgugaaaggcgaaccuauuaucaauuucuaugacccccugguuuuuccuagcgaugaguucgacgcuuccauuucucaggugaacgaaaagaucaaucaaagccucgccuuuauucggaaguccgaugagcugcugcacaacgucaauguggggaaaagcaccacaaacaucaugauuaccacgaucaucauugugaucauuguuauccuccugcuucugauugccgucggacucuuccuguacugcaaggcucgcugaggacuaguguccaccugucccuccugggcugcuggauugucucguuuuccugccaaauaaacaggaucagcgcuuuacagaucuaaaaaaaaaaaaaaaaaaaaaaaaaaaaaaaaaaaaaaaaaaaaaaaaaaaaaaaaaaaaaaaaugcaucccccccccccccccccccccccccccccccaaaggcucuuuucagagccaccagaauu

SEQ ID NO: 18832 - RNA, 1853 nt, Artificial Sequence
  mRNA product Design c-1 comprising derived and/or modified sequence from HRSV(Memphis-37)__AIY60640.1__F-del_DSCav1_mut7 (opt6)
gggagaguccgcucagccagguugcagaagcggcuuagcguguguccuaaucuucucucugcguguagguaggccugugccgcaaacaagcuuaccauggaacuaccaauacucaaaacaaacgccauaaccacaauacuagccgcaguaacacuuugcuuugccucaagucaaaacauaacagaagaauuuuaccaauccacaugcucagcuguauccaaaggauauuuauccgcacuaagaacaggaugguacacaucaguaaucacaauagaauuaucaaacauaaaagaaaacaaauguaauggcacagacgccaaaguaaaacuaauuaaacaagaacuagacaaauauaaaaaugcaguaaccgaacuccaaaugcucaugugcucuacaccagcugcaggaucaggaucagccauugcaagcgguauagcuguuugcaaaguauuacacuuagaaggagaaguaaauaaaauaaaaaacgcacuacuaucaacaaauaaagcaguaguaucccuaucaaacggaguaucaguacuuacauucaaaguauuagauuuaaaaaacuauauagacaaacaacuacuucccauauuaaacaaacaaucaugcucaauuuccaacauugaaacuguaauggaauuucaacaaaaaaacaacagacuacuugaaaucacacgagaauuuucaguaaacgcuggaguaacaacaccugucucuaccuacaugcucacaaauagcgaauuacuaucucuaaucaaugacaugccaauaacaaacgaucaaaaaaaacuaauguccaacaacguacaaauaguaagacaacaauccuauucaauaaugugcauaauaaaagaagaagucuuagcauacguuguacaacuaccauuauacggaguaauagauacaccaugcuggaaacuccacacaagcccccucugcacaacaaacaccaaagaagggucaaacauaugcuuaacaagaacagacagaggaugguacugugauaacgcaggaucugucucauucuuuccacaagcagaaacauguaaaguaugcuccaacagagucuuuugcgacaccaugaacucacuaaccuuacccucagaaguaaaccugugcaacaucgauaucuucaaccccaaauacgauugcaaaaucaugacaagcaaaacugauguauccagcucuguaauaacaucacuaggugcaauaguaucaugcuacggaaaaacaaaaugcacagcuucuaacaaaaauaaaggaauaauaaaaacauucuccaauggaugcgacuaugucucaaauaaaggaguagauacaguuucagucggcaacacacucuauuauguaaauaaacaagaaggaaaaucauuauacguaaaaggagaacccauaauaaacuucuacgacccccucguauucccaagcgacgaauuugacgccucaauaucacaaguaaacgaaaaaauaaaccaaucacucgcauucaucagaaaaucagaugaacuacuacacaauguaaacgucggaaaauccaccacaaauauaaugauaacuaccaucauaauaguaauaauagucaucuuacuacuauuaaucgcuguaggacuauuucucuacugcaaggccagauaaggacuaguguccaccugucccuccugggcugcuggauugucucguuuuccugccaaauaaacaggaucagcgcuuuacagaucuaaaaaaaaaaaaaaaaaaaaaaaaaaaaaaaaaaaaaaaaaaaaaaaaaaaaaaaaaaaaaaaaugcaucccccccccccccccccccccccccccccccaaaggcucuuuucagagccaccagaauu

SEQ ID NO: 18833 - RNA, 1853 nt, Artificial Sequence
  mRNA product Design c-1 comprising derived and/or modified sequence from HRSV(Memphis-37)__AIY60640.1__F-del_DSCav1_mut7 (opt11)
gggagaguccgcucagccagguugcagaagcggcuuagcguguguccuaaucuucucucugcguguagguaggccugugccgcaaacaagcuuaccauggaacucccaauccucaaaacaaaugccaucaccaccauccuagccgcugucacacuaugcuucgccuccucacaaaacaucaccgaagaguucuaucaauccacaugcuccgccgucagcaagggauaccucuccgcccuuagaaccggcugguacaccucagucaucacaauugaacugucaaacaucaaagaaaacaaaugcaacggcaccgacgcaaaaguaaagcucaucaaacaagaacuggacaaguacaagaacgccgucaccgaacuacagaugcuuaugugcucaaccccugccgccggcuccggaucugccauagcuucaggcaucgccguaugcaaaguccugcaccuagaaggggaagucaacaaaaucaaaaacgcccuccucuccaccaacaaggccguugucucccugucaaacggagucuccguccuaaccuucaaaguccucgaccucaaaaacuacauagacaaacaacuccuacccauccucaacaaacaaagcugcucaauauccaacaucgaaaccgucauggaguuccaacaaaagaacaaccgacuacucgaaauaacacgcgaguucucagucaacgccggcgucaccaccccagucuccacauacaugcucaccaacuccgaacuccuaucgcucaucaacgacaugcccaucaccaaugaccagaagaaacucauguccaacaacguacaaaucguccgccaacaguccuacucaaucaugugcaucaucaaagaagaaguccuugccuacgucguccagcuuccacucuacggagucaucgacacccccugcuggaaacuccacaccuccccacuaugcaccaccaacaccaaagaaggauccaacauaugccucacccguacugaccgcggcugguacugcgacaacgccggauccgucucauucuucccccaggccgaaaccugcaaagucugcuccaaccgcgucuucugcgacaccaugaacucgcucacccucccauccgaagucaaucuaugcaacaucgacauuuucaaccccaaauacgacugcaaaauuaugacaucaaaaaccgacgucucauccucagucaucacuucccucggcgcaaucguaagcugcuacgggaaaacaaagugcaccgcuuccaacaaaaacaaaggcaucaucaaaaccuucucuaacggcugcgacuacgucuccaacaaaggagucgacaccguauccgucggcaacacccucuacuacgucaacaaacaggaaggaaaaucgcucuacgucaaaggagaaccaaucaucaacuucuacgacccccuagucuucccauccgacgaguucgacgccagcaucucacaagucaaugaaaagaucaaccagucacucgcauucauccguaagucagacgaacuccuacacaacgucaacgucggcaagucaacaaccaacauaaugaucaccaccauaaucaucgucauaauaguaauccuccuucuccuaaucgcagucggccucuuccucuacugcaaagcacgcuaaggacuaguguccaccugucccuccugggcugcuggauugucucguuuuccugccaaauaaacaggaucagcgcuuuacagaucuaaaaaaaaaaaaaaaaaaaaaaaaaaaaaaaaaaaaaaaaaaaaaaaaaaaaaaaaaaaaaaaaugcaucccccccccccccccccccccccccccccccaaaggcucuuuucagagccaccagaauu

SEQ ID NO: 18834 - RNA, 1943 nt, Artificial Sequence
  mRNA product Design c-2 comprising derived and/or modified sequence from HRSV(Memphis-37)__AIY60640.1__F-del_DSCav1_mut7 (opt1)
gggagacuccugucgggcggaaguaggaggaguagaguuuaaaaacaguacucuuuuuccgguucgggacguaguugaagcaacgacaagccggauaaccgcucuugagacaggaagcuuaccauggagcugcccauccucaagaccaacgccaucaccacgauccuggccgcggugacccugugcuucgccagcucccagaacaucaccgaggaguucuaccagagcacgugcuccgccgucagcaagggcuaccucuccgcccugcgcaccgggugguacaccagcgugaucaccaucgagcuguccaacaucaaggagaacaagugcaacggcaccgacgccaaggugaagcucaucaagcaggagcuggacaaguacaagaacgcggucacggagcugcagaugcugaugugcagcaccccggccgccggcuccgggagcgcgaucgccuccggcaucgccgucugcaaggugcugcaccucgagggcgaggugaacaagaucaagaacgcccugcuguccaccaacaaggccgucgugagccucuccaacggggugagcguccugaccuucaaggugcuggaccucaagaacuacaucgacaagcagcugcugcccauccugaacaagcagagcugcuccaucagcaacaucgagaccgucauggaguuccagcagaagaacaaccgccuccuggagaucacgcgggaguucagcgugaacgcgggcgugaccacccccgucuccaccuacaugcugacgaacagcgagcuccugucccugaucaacgacaugccgaucaccaacgaccagaagaagcucaugagcaacaacgugcagaucgugcgccagcaguccuacagcaucaugugcaucaucaaggaggagguccuggccuacguggugcagcugccccucuacggggucaucgacacccccugcuggaagcugcacaccagcccccugugcacgaccaacaccaaggagggcuccaacaucugccucacccggacggaccgcgggugguacugcgacaacgccggcagcguguccuucuucccgcaggccgagaccugcaaggucugcagcaaccggguguucugcgacaccaugaacucccugacccugcccagcgaggugaaccucugcaacaucgacaucuucaaccccaaguacgacugcaagaucaugacguccaagaccgacgucagcuccagcgugaucaccucccugggcgccaucgugagcugcuacgggaagaccaagugcacggcgagcaacaagaacaagggcaucaucaagaccuucuccaacgggugcgacuacgucagcaacaagggcguggacaccguguccgucggcaacacccuguacuacgugaacaagcaggagggcaagagccucuacgugaagggggagcccaucaucaacuucuacgacccgcuggucuuccccuccgacgaguucgacgccagcaucucccaggugaacgagaagaucaaccagagccuggccuucauccggaaguccgacgagcuccugcacaacgugaacgucggcaagagcaccacgaacaucaugaucaccaccaucaucaucgugaucaucgugauccugcugcuccugaucgccgucgggcuguuccucuacugcaaggcccgcugaggacuaguggaagcauuuuccuggcugauuaaaagaaauuacucagcuauggucaucuguuccuguuagaaggcuaugcagcauauuauauacuaugcgcauguuaugaaaugcauaauaaaaaauuuuaaaaaaucuaaaagaucuaaaaaaaaaaaaaaaaaaaaaaaaaaaaaaaaaaaaaaaaaaaaaaaaaaaaaaaaaaaaaaaaugcaucccccccccccccccccccccccccccccccaaaggcucuuuucagagccaccagaauu

SEQ ID NO: 18835 - RNA, 1943 nt, Artificial Sequence
  mRNA product Design c-2 comprising derived and/or modified sequence from HRSV(Memphis-37)__AIY60640.1__F-del_DSCav1_mut7 (opt1)
gggagacuccugucgggcggaaguaggaggaguagaguuuaaaaacaguacucuuuuuccgguucgggacguaguugaagcaacgacaagccggauaaccgcucuugagacaggaagcuuaccauggagcugcccauccucaagaccaacgccaucaccacgauccuggccgcggugacccugugcuucgccagcucccagaacaucaccgaggaguucuaccagagcacgugcuccgccgucagcaagggguaccucuccgcccugcgcaccgggugguacaccagcgugaucaccaucgagcuguccaacaucaaggagaacaagugcaacggcaccgacgccaaggugaagcucaucaagcaggagcuggacaaguacaagaacgcggucacggagcugcagaugcucaugugcagcaccccggccgccggguccggcagcgccaucgcguccgggaucgccgugugcaaggugcugcaccuggagggcgaggucaacaagaucaagaacgcccuccugagcaccaacaaggccguggugucccugagcaacggcgucuccgugcucaccuucaaggugcuggaccugaagaacuacaucgacaagcagcuccugcccauccugaacaagcagagcugcuccaucagcaacaucgagacggucauggaguuccagcagaagaacaaccggcuccuggagaucacccgcgaguucuccgugaacgccggggugaccacccccgucagcacguacaugcugaccaacagcgagcuccugucccugaucaacgacaugcccaucaccaacgaccagaagaagcucaugagcaacaacgugcagaucgugcggcagcaguccuacagcaucaugugcaucaucaaggaggagguccuggcguacguggugcagcugccgcucuacggcgucaucgacacccccugcuggaagcugcacacgagcccccugugcaccaccaacaccaaggaggggagcaacaucugccucacgcgcaccgaccggggcugguacugcgacaacgccggguccgugagcuucuucccccaggccgagaccugcaaggugugcuccaaccgcgucuucugcgacaccaugaacagccugacgcugccguccgaggugaaccucugcaacaucgacaucuucaaccccaaguacgacugcaagaucaugaccagcaagaccgacgucuccagcuccgugaucaccagccugggcgccaucguguccugcuacggcaagacgaagugcaccgccagcaacaagaacaaggggaucaucaagaccuucuccaacggcugcgacuacgucagcaacaaggggguggacaccgugagcgucggcaacacgcuguacuacgugaacaagcaggagggcaagucccucuacgugaagggggagcccaucaucaacuucuacgacccccuggucuucccgagcgacgaguucgacgcguccaucagccaggugaacgagaagaucaaccagucccuggccuucauccggaaguccgacgagcuccugcacaacgugaacgucggcaaguccaccaccaacaucaugaucaccaccaucaucaucgugaucaucgugauccugcuccugcugaucgccgucggccucuuccuguacugcaaggcccgcugaggacuaguggaagcauuuuccuggcugauuaaaagaaauuacucagcuauggucaucuguuccuguuagaaggcuaugcagcauauuauauacuaugcgcauguuaugaaaugcauaauaaaaaauuuuaaaaaaucuaaaagaucuaaaaaaaaaaaaaaaaaaaaaaaaaaaaaaaaaaaaaaaaaaaaaaaaaaaaaaaaaaaaaaaaugcaucccccccccccccccccccccccccccccccaaaggcucuuuucagagccaccagaauu

SEQ ID NO: 18836 - RNA, 1943 nt, Artificial Sequence
  mRNA product Design c-2 comprising derived and/or modified sequence from HRSV(Memphis-37)__AIY60640.1__F-del_DSCav1_mut7 (opt2)
gggagacuccugucgggcggaaguaggaggaguagaguuuaaaaacaguacucuuuuuccgguucgggacguaguugaagcaacgacaagccggauaaccgcucuugagacaggaagcuuaccauggagcuccccauccucaagaccaacgccaucaccaccauccucgccgccgucacccucugcuucgccuccucccagaacaucaccgaggaguucuaccaguccaccugcuccgccgucuccaagggcuaccucuccgcccuccgcaccggcugguacaccuccgucaucaccaucgagcucuccaacaucaaggagaacaagugcaacggcaccgacgccaaggucaagcucaucaagcaggagcucgacaaguacaagaacgccgucaccgagcuccagaugcucaugugcuccacccccgccgccggcuccggcuccgccaucgccuccggcaucgccgucugcaagguccuccaccucgagggcgaggucaacaagaucaagaacgcccuccucuccaccaacaaggccgucgucucccucuccaacggcgucuccguccucaccuucaagguccucgaccucaagaacuacaucgacaagcagcuccuccccauccucaacaagcaguccugcuccaucuccaacaucgagaccgucauggaguuccagcagaagaacaaccgccuccucgagaucacccgcgaguucuccgucaacgccggcgucaccacccccgucuccaccuacaugcucaccaacuccgagcuccucucccucaucaacgacaugcccaucaccaacgaccagaagaagcucauguccaacaacguccagaucguccgccagcaguccuacuccaucaugugcaucaucaaggaggagguccucgccuacgucguccagcucccccucuacggcgucaucgacacccccugcuggaagcuccacaccuccccccucugcaccaccaacaccaaggagggcuccaacaucugccucacccgcaccgaccgcggcugguacugcgacaacgccggcuccgucuccuucuucccccaggccgagaccugcaaggucugcuccaaccgcgucuucugcgacaccaugaacucccucacccuccccuccgaggucaaccucugcaacaucgacaucuucaaccccaaguacgacugcaagaucaugaccuccaagaccgacgucuccuccuccgucaucaccucccucggcgccaucgucuccugcuacggcaagaccaagugcaccgccuccaacaagaacaagggcaucaucaagaccuucuccaacggcugcgacuacgucuccaacaagggcgucgacaccgucuccgucggcaacacccucuacuacgucaacaagcaggagggcaagucccucuacgucaagggcgagcccaucaucaacuucuacgacccccucgucuuccccuccgacgaguucgacgccuccaucucccaggucaacgagaagaucaaccagucccucgccuucauccgcaaguccgacgagcuccuccacaacgucaacgucggcaaguccaccaccaacaucaugaucaccaccaucaucaucgucaucaucgucauccuccuccuccucaucgccgucggccucuuccucuacugcaaggcccgcugaggacuaguggaagcauuuuccuggcugauuaaaagaaauuacucagcuauggucaucuguuccuguuagaaggcuaugcagcauauuauauacuaugcgcauguuaugaaaugcauaauaaaaaauuuuaaaaaaucuaaaagaucuaaaaaaaaaaaaaaaaaaaaaaaaaaaaaaaaaaaaaaaaaaaaaaaaaaaaaaaaaaaaaaaaugcaucccccccccccccccccccccccccccccccaaaggcucuuuucagagccaccagaauu

SEQ ID NO: 18837 - RNA, 1943 nt, Artificial Sequence
  mRNA product Design c-2 comprising derived and/or modified sequence from HRSV(Memphis-37)__AIY60640.1__F-del_DSCav1_mut7 (opt3)
gggagacuccugucgggcggaaguaggaggaguagaguuuaaaaacaguacucuuuuuccgguucgggacguaguugaagcaacgacaagccggauaaccgcucuugagacaggaagcuuaccauggagcugcccauccucaagaccaacgccauuacaacuauacuugcugcagugacgcugugcuucgccagcucccagaauaucaccgaagaguuuuaccaaucuacauguucagcggucaguaaaggcuauuugagcgcuuuaagaacugggugguacaccuccguuauuacaaucgaacugucuaacauuaaggagaauaaaugcaacggaaccgacgccaaggugaaacuaaucaagcaggaacucgauaaguauaaaaaugcaguaacugagcugcagaugcuuauguguucgaccccugccgcugguucaggcagcgcaauagccagugggaucgcugugugcaagguccugcacuuggagggagaagugaacaaaauuaagaaugcccuccuguccacaaacaaagcgguugugucucugagcaauggcgucuccgugcucacguucaagguauuagaccugaagaacuacaucgauaaacagcuuuugccaauucugaauaagcaaucauguaguaucagcaacauagagacuguuauggaauuucagcagaaaaauaacaggcuacucgagauuacccgggaguucucugugaaugccggugucacaacuccgguguccaccuauaugcugacaaacucagaacuucugagcuugaucaacgacaugcccauuaccaaugaucagaagaaacucaugaguaacaaugugcaaaucguccgccagcagucuuacuccaucaugugcauuauaaaggaggaaguucuggcauaugugguacaguuaccucuguacggggugaucgacacgccauguuggaaacuccauacuagcccccuuugcacaaccaacacuaaggagggaucgaauauuugucugacacgaaccgaucguggcugguacugcgacaacgcuggcucugucuccuuuuucccucaagccgaaacguguaaggugugcucaaauagaguguuuugcgauaccaugaacaguuugacacuaccaagcgagguuaaucuguguaacaucgacauauucaaucccaaauaugauugcaagauuaugacuuccaaaaccgacgucucuagcucagugaucacaagucucggggcaaucguauccuguuacggaaagacuaaaugcaccgcuagcaacaagaauaaggguauuaucaaaacauuuucuaacggcugugauuauguuucaaauaaggggguggacaccgucagugugggaaacacucuguacuaugucaacaaacaggagggcaagagccuuuacgugaaaggugaaccuauuauaaauuucuaugacccacugguuuuuccguccgaugaguucgacgccucuaucagccaggugaacgaaaagauuaaucaaucguuggcguuuaucaggaaguccgaugagcuccugcacaacguaaaugucgggaaaucaacgacaaacaucaugauuaccacuauaaucauugugaucauuguuaucuuacugcuacucauagccgugggacuguuccuuuacugcaaggcacggugaggacuaguggaagcauuuuccuggcugauuaaaagaaauuacucagcuauggucaucuguuccuguuagaaggcuaugcagcauauuauauacuaugcgcauguuaugaaaugcauaauaaaaaauuuuaaaaaaucuaaaagaucuaaaaaaaaaaaaaaaaaaaaaaaaaaaaaaaaaaaaaaaaaaaaaaaaaaaaaaaaaaaaaaaaugcaucccccccccccccccccccccccccccccccaaaggcucuuuucagagccaccagaauu

SEQ ID NO: 18838 - RNA, 1943 nt, Artificial Sequence
  mRNA product Design c-2 comprising derived and/or modified sequence from HRSV(Memphis-37)__AIY60640.1__F-del_DSCav1_mut7 (opt4)
gggagacuccugucgggcggaaguaggaggaguagaguuuaaaaacaguacucuuuuuccgguucgggacguaguugaagcaacgacaagccggauaaccgcucuugagacaggaagcuuaccauggagcugcccauccugaagaccaacgccaucaccaccauccuggccgccgugacccugugcuucgccagcagccagaacaucaccgaggaguucuaccagagcaccugcagcgccgugagcaagggcuaccugagcgcccugagaaccggcugguacaccagcgugaucaccaucgagcugagcaacaucaaggagaacaagugcaacggcaccgacgccaaggugaagcugaucaagcaggagcuggacaaguacaagaacgccgugaccgagcugcagaugcugaugugcagcacccccgccgccggcagcggcagcgccaucgccagcggcaucgccgugugcaaggugcugcaccuggagggcgaggugaacaagaucaagaacgcccugcugagcaccaacaaggccguggugagccugagcaacggcgugagcgugcugaccuucaaggugcuggaccugaagaacuacaucgacaagcagcugcugcccauccugaacaagcagagcugcagcaucagcaacaucgagaccgugauggaguuccagcagaagaacaacagacugcuggagaucaccagagaguucagcgugaacgccggcgugaccacccccgugagcaccuacaugcugaccaacagcgagcugcugagccugaucaacgacaugcccaucaccaacgaccagaagaagcugaugagcaacaacgugcagaucgugagacagcagagcuacagcaucaugugcaucaucaaggaggaggugcuggccuacguggugcagcugccccuguacggcgugaucgacacccccugcuggaagcugcacaccagcccccugugcaccaccaacaccaaggagggcagcaacaucugccugaccagaaccgacagaggcugguacugcgacaacgccggcagcgugagcuucuucccccaggccgagaccugcaaggugugcagcaacagaguguucugcgacaccaugaacagccugacccugcccagcgaggugaaccugugcaacaucgacaucuucaaccccaaguacgacugcaagaucaugaccagcaagaccgacgugagcagcagcgugaucaccagccugggcgccaucgugagcugcuacggcaagaccaagugcaccgccagcaacaagaacaagggcaucaucaagaccuucagcaacggcugcgacuacgugagcaacaagggcguggacaccgugagcgugggcaacacccuguacuacgugaacaagcaggagggcaagagccuguacgugaagggcgagcccaucaucaacuucuacgacccccugguguuccccagcgacgaguucgacgccagcaucagccaggugaacgagaagaucaaccagagccuggccuucaucagaaagagcgacgagcugcugcacaacgugaacgugggcaagagcaccaccaacaucaugaucaccaccaucaucaucgugaucaucgugauccugcugcugcugaucgccgugggccuguuccuguacugcaaggccagaugaggacuaguggaagcauuuuccuggcugauuaaaagaaauuacucagcuauggucaucuguuccuguuagaaggcuaugcagcauauuauauacuaugcgcauguuaugaaaugcauaauaaaaaauuuuaaaaaaucuaaaagaucuaaaaaaaaaaaaaaaaaaaaaaaaaaaaaaaaaaaaaaaaaaaaaaaaaaaaaaaaaaaaaaaaugcaucccccccccccccccccccccccccccccccaaaggcucuuuucagagccaccagaauu

SEQ ID NO: 18839 - RNA, 1943 nt, Artificial Sequence
  mRNA product Design c-2 comprising derived and/or modified sequence from HRSV(Memphis-37)__AIY60640.1__F-del_DSCav1_mut7 (opt5)
gggagacuccugucgggcggaaguaggaggaguagaguuuaaaaacaguacucuuuuuccgguucgggacguaguugaagcaacgacaagccggauaaccgcucuugagacaggaagcuuaccauggagcugcccauccucaagaccaacgccauuacaacgauccuggcugccgugacccuuugcuucgcgagcucccagaauauuacagaagaguuuuaccaaucuaccuguagcgcugucuccaaaggcuaucugucugcccucagaacagggugguacaccagcguuaucacaauugaacuguccaacaucaaggagaauaaaugcaacggaaccgacgccaaggugaaacuuaucaagcaggaacuggauaaguauaaaaaugcugugacggagcuccagaugcugauguguucuaccccugccgcuggcagcggguccgccauugcgagcggaaucgccgucugcaaggugcugcaccucgagggcgaaguuaacaaaauuaagaaugcucugcuuucuacaaacaaagccguggucucccugagcaauggggugucuguucucaccuucaaggugcuggaccuuaagaacuacaucgauaaacagcugcucccgauucugaauaagcaauccuguagcaucucuaacauugagacagucauggaauuucagcagaaaaauaaccggcugcucgagaucacccgcgaguucuccgugaaugcuggagugacgacacccgucagcaccuauaugcugacaaacuccgaacuucugucucucaucaacgacaugccuauuaccaaugaucagaagaaacugaugagcaacaauguucaaaucgugagacagcaguccuacagcauuaugugcaucauuaaggaggaagugcuugccuaugucgugcagcugccccucuacggcguuaucgacaccccuuguuggaaacugcauacaucuccccugugcacgaccaacacaaaggagggcuccaauaucugucucacccggacagaucgcgggugguacugcgacaacgcgggaagcgugagcuuuuucccucaagccgaaaccuguaaggucugcucuaauagaguguuuugcgauacgaugaacucccugacacuuccgucugagguuaaucuguguaacauugacaucuucaaucccaaauaugauugcaagauuaugaccagcaaaaccgacguguccagcucugucaucacaucccucggcgcuauugugagcuguuacgggaagaccaaaugcacagccucuaacaagaauaagggaaucaucaaaacguuuuccaacggcugugauuaugucagcaauaaggggguggacaccguuuccgugggaaacacacuguacuaugucaacaaacaggagggcaagucucuuuacgugaaaggcgaaccuauuaucaauuucuaugacccccugguuuuuccuagcgaugaguucgacgcuuccauuucucaggugaacgaaaagaucaaucaaagccucgccuuuauucggaaguccgaugagcugcugcacaacgucaauguggggaaaagcaccacaaacaucaugauuaccacgaucaucauugugaucauuguuauccuccugcuucugauugccgucggacucuuccuguacugcaaggcucgcugaggacuaguggaagcauuuuccuggcugauuaaaagaaauuacucagcuauggucaucuguuccuguuagaaggcuaugcagcauauuauauacuaugcgcauguuaugaaaugcauaauaaaaaauuuuaaaaaaucuaaaagaucuaaaaaaaaaaaaaaaaaaaaaaaaaaaaaaaaaaaaaaaaaaaaaaaaaaaaaaaaaaaaaaaaugcaucccccccccccccccccccccccccccccccaaaggcucuuuucagagccaccagaauu

SEQ ID NO: 18840 - RNA, 1943 nt, Artificial Sequence
  mRNA product Design c-2 comprising derived and/or modified sequence from HRSV(Memphis-37)__AIY60640.1__F-del_DSCav1_mut7 (opt6)
gggagacuccugucgggcggaaguaggaggaguagaguuuaaaaacaguacucuuuuuccgguucgggacguaguugaagcaacgacaagccggauaaccgcucuugagacaggaagcuuaccauggaacuaccaauacucaaaacaaacgccauaaccacaauacuagccgcaguaacacuuugcuuugccucaagucaaaacauaacagaagaauuuuaccaauccacaugcucagcuguauccaaaggauauuuauccgcacuaagaacaggaugguacacaucaguaaucacaauagaauuaucaaacauaaaagaaaacaaauguaauggcacagacgccaaaguaaaacuaauuaaacaagaacuagacaaauauaaaaaugcaguaaccgaacuccaaaugcucaugugcucuacaccagcugcaggaucaggaucagccauugcaagcgguauagcuguuugcaaaguauuacacuuagaaggagaaguaaauaaaauaaaaaacgcacuacuaucaacaaauaaagcaguaguaucccuaucaaacggaguaucaguacuuacauucaaaguauuagauuuaaaaaacuauauagacaaacaacuacuucccauauuaaacaaacaaucaugcucaauuuccaacauugaaacuguaauggaauuucaacaaaaaaacaacagacuacuugaaaucacacgagaauuuucaguaaacgcuggaguaacaacaccugucucuaccuacaugcucacaaauagcgaauuacuaucucuaaucaaugacaugccaauaacaaacgaucaaaaaaaacuaauguccaacaacguacaaauaguaagacaacaauccuauucaauaaugugcauaauaaaagaagaagucuuagcauacguuguacaacuaccauuauacggaguaauagauacaccaugcuggaaacuccacacaagcccccucugcacaacaaacaccaaagaagggucaaacauaugcuuaacaagaacagacagaggaugguacugugauaacgcaggaucugucucauucuuuccacaagcagaaacauguaaaguaugcuccaacagagucuuuugcgacaccaugaacucacuaaccuuacccucagaaguaaaccugugcaacaucgauaucuucaaccccaaauacgauugcaaaaucaugacaagcaaaacugauguauccagcucuguaauaacaucacuaggugcaauaguaucaugcuacggaaaaacaaaaugcacagcuucuaacaaaaauaaaggaauaauaaaaacauucuccaauggaugcgacuaugucucaaauaaaggaguagauacaguuucagucggcaacacacucuauuauguaaauaaacaagaaggaaaaucauuauacguaaaaggagaacccauaauaaacuucuacgacccccucguauucccaagcgacgaauuugacgccucaauaucacaaguaaacgaaaaaauaaaccaaucacucgcauucaucagaaaaucagaugaacuacuacacaauguaaacgucggaaaauccaccacaaauauaaugauaacuaccaucauaauaguaauaauagucaucuuacuacuauuaaucgcuguaggacuauuucucuacugcaaggccagauaaggacuaguggaagcauuuuccuggcugauuaaaagaaauuacucagcuauggucaucuguuccuguuagaaggcuaugcagcauauuauauacuaugcgcauguuaugaaaugcauaauaaaaaauuuuaaaaaaucuaaaagaucuaaaaaaaaaaaaaaaaaaaaaaaaaaaaaaaaaaaaaaaaaaaaaaaaaaaaaaaaaaaaaaaaugcaucccccccccccccccccccccccccccccccaaaggcucuuuucagagccaccagaauu

SEQ ID NO: 18841 - RNA, 1943 nt, Artificial Sequence
  mRNA product Design c-2 comprising derived and/or modified sequence from HRSV(Memphis-37)__AIY60640.1__F-del_DSCav1_mut7 (opt11)
gggagacuccugucgggcggaaguaggaggaguagaguuuaaaaacaguacucuuuuuccgguucgggacguaguugaagcaacgacaagccggauaaccgcucuugagacaggaagcuuaccauggaacucccaauccucaaaacaaaugccaucaccaccauccuagccgcugucacacuaugcuucgccuccucacaaaacaucaccgaagaguucuaucaauccacaugcuccgccgucagcaagggauaccucuccgcccuuagaaccggcugguacaccucagucaucacaauugaacugucaaacaucaaagaaaacaaaugcaacggcaccgacgcaaaaguaaagcucaucaaacaagaacuggacaaguacaagaacgccgucaccgaacuacagaugcuuaugugcucaaccccugccgccggcuccggaucugccauagcuucaggcaucgccguaugcaaaguccugcaccuagaaggggaagucaacaaaaucaaaaacgcccuccucuccaccaacaaggccguugucucccugucaaacggagucuccguccuaaccuucaaaguccucgaccucaaaaacuacauagacaaacaacuccuacccauccucaacaaacaaagcugcucaauauccaacaucgaaaccgucauggaguuccaacaaaagaacaaccgacuacucgaaauaacacgcgaguucucagucaacgccggcgucaccaccccagucuccacauacaugcucaccaacuccgaacuccuaucgcucaucaacgacaugcccaucaccaaugaccagaagaaacucauguccaacaacguacaaaucguccgccaacaguccuacucaaucaugugcaucaucaaagaagaaguccuugccuacgucguccagcuuccacucuacggagucaucgacacccccugcuggaaacuccacaccuccccacuaugcaccaccaacaccaaagaaggauccaacauaugccucacccguacugaccgcggcugguacugcgacaacgccggauccgucucauucuucccccaggccgaaaccugcaaagucugcuccaaccgcgucuucugcgacaccaugaacucgcucacccucccauccgaagucaaucuaugcaacaucgacauuuucaaccccaaauacgacugcaaaauuaugacaucaaaaaccgacgucucauccucagucaucacuucccucggcgcaaucguaagcugcuacgggaaaacaaagugcaccgcuuccaacaaaaacaaaggcaucaucaaaaccuucucuaacggcugcgacuacgucuccaacaaaggagucgacaccguauccgucggcaacacccucuacuacgucaacaaacaggaaggaaaaucgcucuacgucaaaggagaaccaaucaucaacuucuacgacccccuagucuucccauccgacgaguucgacgccagcaucucacaagucaaugaaaagaucaaccagucacucgcauucauccguaagucagacgaacuccuacacaacgucaacgucggcaagucaacaaccaacauaaugaucaccaccauaaucaucgucauaauaguaauccuccuucuccuaaucgcagucggccucuuccucuacugcaaagcacgcuaaggacuaguggaagcauuuuccuggcugauuaaaagaaauuacucagcuauggucaucuguuccuguuagaaggcuaugcagcauauuauauacuaugcgcauguuaugaaaugcauaauaaaaaauuuuaaaaaaucuaaaagaucuaaaaaaaaaaaaaaaaaaaaaaaaaaaaaaaaaaaaaaaaaaaaaaaaaaaaaaaaaaaaaaaaugcaucccccccccccccccccccccccccccccccaaaggcucuuuucagagccaccagaauu

SEQ ID NO: 18842 - RNA, 1920 nt, Artificial Sequence
  mRNA product Design c-3 comprising derived and/or modified sequence from HRSV(Memphis-37)__AIY60640.1__F-del_DSCav1_mut7 (opt1)
gggagaguccgcucagccagguugcagaagcggcuuagcguguguccuaaucuucucucugcguguagguaggccugugccgcaaacaagcuuaccauggagcugcccauccucaagaccaacgccaucaccacgauccuggccgcggugacccugugcuucgccagcucccagaacaucaccgaggaguucuaccagagcacgugcuccgccgucagcaagggcuaccucuccgcccugcgcaccgggugguacaccagcgugaucaccaucgagcuguccaacaucaaggagaacaagugcaacggcaccgacgccaaggugaagcucaucaagcaggagcuggacaaguacaagaacgcggucacggagcugcagaugcugaugugcagcaccccggccgccggcuccgggagcgcgaucgccuccggcaucgccgucugcaaggugcugcaccucgagggcgaggugaacaagaucaagaacgcccugcuguccaccaacaaggccgucgugagccucuccaacggggugagcguccugaccuucaaggugcuggaccucaagaacuacaucgacaagcagcugcugcccauccugaacaagcagagcugcuccaucagcaacaucgagaccgucauggaguuccagcagaagaacaaccgccuccuggagaucacgcgggaguucagcgugaacgcgggcgugaccacccccgucuccaccuacaugcugacgaacagcgagcuccugucccugaucaacgacaugccgaucaccaacgaccagaagaagcucaugagcaacaacgugcagaucgugcgccagcaguccuacagcaucaugugcaucaucaaggaggagguccuggccuacguggugcagcugccccucuacggggucaucgacacccccugcuggaagcugcacaccagcccccugugcacgaccaacaccaaggagggcuccaacaucugccucacccggacggaccgcgggugguacugcgacaacgccggcagcguguccuucuucccgcaggccgagaccugcaaggucugcagcaaccggguguucugcgacaccaugaacucccugacccugcccagcgaggugaaccucugcaacaucgacaucuucaaccccaaguacgacugcaagaucaugacguccaagaccgacgucagcuccagcgugaucaccucccugggcgccaucgugagcugcuacgggaagaccaagugcacggcgagcaacaagaacaagggcaucaucaagaccuucuccaacgggugcgacuacgucagcaacaagggcguggacaccguguccgucggcaacacccuguacuacgugaacaagcaggagggcaagagccucuacgugaagggggagcccaucaucaacuucuacgacccgcuggucuuccccuccgacgaguucgacgccagcaucucccaggugaacgagaagaucaaccagagccuggccuucauccggaaguccgacgagcuccugcacaacgugaacgucggcaagagcaccacgaacaucaugaucaccaccaucaucaucgugaucaucgugauccugcugcuccugaucgccgucgggcuguuccucuacugcaaggcccgcugaggacuaguacuggcugcaucucccuuuccucuguccuccauccuucucccaggauggugaagggggaccugguacccagugauccccaccccaggauccuaaaucaugacuuaccugcuaauaaaaacucauuggaaaagugagaagaucuaaaaaaaaaaaaaaaaaaaaaaaaaaaaaaaaaaaaaaaaaaaaaaaaaaaaaaaaaaaaaaaaugcaucccccccccccccccccccccccccccccccaaaggcucuuuucagagccaccagaauu

SEQ ID NO: 18843 - RNA, 1920 nt, Artificial Sequence
  mRNA product Design c-3 comprising derived and/or modified sequence from HRSV(Memphis-37)__AIY60640.1__F-del_DSCav1_mut7 (opt1)
gggagaguccgcucagccagguugcagaagcggcuuagcguguguccuaaucuucucucugcguguagguaggccugugccgcaaacaagcuuaccauggagcugcccauccucaagaccaacgccaucaccacgauccuggccgcggugacccugugcuucgccagcucccagaacaucaccgaggaguucuaccagagcacgugcuccgccgucagcaagggguaccucuccgcccugcgcaccgggugguacaccagcgugaucaccaucgagcuguccaacaucaaggagaacaagugcaacggcaccgacgccaaggugaagcucaucaagcaggagcuggacaaguacaagaacgcggucacggagcugcagaugcucaugugcagcaccccggccgccggguccggcagcgccaucgcguccgggaucgccgugugcaaggugcugcaccuggagggcgaggucaacaagaucaagaacgcccuccugagcaccaacaaggccguggugucccugagcaacggcgucuccgugcucaccuucaaggugcuggaccugaagaacuacaucgacaagcagcuccugcccauccugaacaagcagagcugcuccaucagcaacaucgagacggucauggaguuccagcagaagaacaaccggcuccuggagaucacccgcgaguucuccgugaacgccggggugaccacccccgucagcacguacaugcugaccaacagcgagcuccugucccugaucaacgacaugcccaucaccaacgaccagaagaagcucaugagcaacaacgugcagaucgugcggcagcaguccuacagcaucaugugcaucaucaaggaggagguccuggcguacguggugcagcugccgcucuacggcgucaucgacacccccugcuggaagcugcacacgagcccccugugcaccaccaacaccaaggaggggagcaacaucugccucacgcgcaccgaccggggcugguacugcgacaacgccggguccgugagcuucuucccccaggccgagaccugcaaggugugcuccaaccgcgucuucugcgacaccaugaacagccugacgcugccguccgaggugaaccucugcaacaucgacaucuucaaccccaaguacgacugcaagaucaugaccagcaagaccgacgucuccagcuccgugaucaccagccugggcgccaucguguccugcuacggcaagacgaagugcaccgccagcaacaagaacaaggggaucaucaagaccuucuccaacggcugcgacuacgucagcaacaaggggguggacaccgugagcgucggcaacacgcuguacuacgugaacaagcaggagggcaagucccucuacgugaagggggagcccaucaucaacuucuacgacccccuggucuucccgagcgacgaguucgacgcguccaucagccaggugaacgagaagaucaaccagucccuggccuucauccggaaguccgacgagcuccugcacaacgugaacgucggcaaguccaccaccaacaucaugaucaccaccaucaucaucgugaucaucgugauccugcuccugcugaucgccgucggccucuuccuguacugcaaggcccgcugaggacuaguacuggcugcaucucccuuuccucuguccuccauccuucucccaggauggugaagggggaccugguacccagugauccccaccccaggauccuaaaucaugacuuaccugcuaauaaaaacucauuggaaaagugagaagaucuaaaaaaaaaaaaaaaaaaaaaaaaaaaaaaaaaaaaaaaaaaaaaaaaaaaaaaaaaaaaaaaaugcaucccccccccccccccccccccccccccccccaaaggcucuuuucagagccaccagaauu

SEQ ID NO: 18844 - RNA, 1920 nt, Artificial Sequence
  mRNA product Design c-3 comprising derived and/or modified sequence from HRSV(Memphis-37)__AIY60640.1__F-del_DSCav1_mut7 (opt2)
gggagaguccgcucagccagguugcagaagcggcuuagcguguguccuaaucuucucucugcguguagguaggccugugccgcaaacaagcuuaccauggagcuccccauccucaagaccaacgccaucaccaccauccucgccgccgucacccucugcuucgccuccucccagaacaucaccgaggaguucuaccaguccaccugcuccgccgucuccaagggcuaccucuccgcccuccgcaccggcugguacaccuccgucaucaccaucgagcucuccaacaucaaggagaacaagugcaacggcaccgacgccaaggucaagcucaucaagcaggagcucgacaaguacaagaacgccgucaccgagcuccagaugcucaugugcuccacccccgccgccggcuccggcuccgccaucgccuccggcaucgccgucugcaagguccuccaccucgagggcgaggucaacaagaucaagaacgcccuccucuccaccaacaaggccgucgucucccucuccaacggcgucuccguccucaccuucaagguccucgaccucaagaacuacaucgacaagcagcuccuccccauccucaacaagcaguccugcuccaucuccaacaucgagaccgucauggaguuccagcagaagaacaaccgccuccucgagaucacccgcgaguucuccgucaacgccggcgucaccacccccgucuccaccuacaugcucaccaacuccgagcuccucucccucaucaacgacaugcccaucaccaacgaccagaagaagcucauguccaacaacguccagaucguccgccagcaguccuacuccaucaugugcaucaucaaggaggagguccucgccuacgucguccagcucccccucuacggcgucaucgacacccccugcuggaagcuccacaccuccccccucugcaccaccaacaccaaggagggcuccaacaucugccucacccgcaccgaccgcggcugguacugcgacaacgccggcuccgucuccuucuucccccaggccgagaccugcaaggucugcuccaaccgcgucuucugcgacaccaugaacucccucacccuccccuccgaggucaaccucugcaacaucgacaucuucaaccccaaguacgacugcaagaucaugaccuccaagaccgacgucuccuccuccgucaucaccucccucggcgccaucgucuccugcuacggcaagaccaagugcaccgccuccaacaagaacaagggcaucaucaagaccuucuccaacggcugcgacuacgucuccaacaagggcgucgacaccgucuccgucggcaacacccucuacuacgucaacaagcaggagggcaagucccucuacgucaagggcgagcccaucaucaacuucuacgacccccucgucuuccccuccgacgaguucgacgccuccaucucccaggucaacgagaagaucaaccagucccucgccuucauccgcaaguccgacgagcuccuccacaacgucaacgucggcaaguccaccaccaacaucaugaucaccaccaucaucaucgucaucaucgucauccuccuccuccucaucgccgucggccucuuccucuacugcaaggcccgcugaggacuaguacuggcugcaucucccuuuccucuguccuccauccuucucccaggauggugaagggggaccugguacccagugauccccaccccaggauccuaaaucaugacuuaccugcuaauaaaaacucauuggaaaagugagaagaucuaaaaaaaaaaaaaaaaaaaaaaaaaaaaaaaaaaaaaaaaaaaaaaaaaaaaaaaaaaaaaaaaugcaucccccccccccccccccccccccccccccccaaaggcucuuuucagagccaccagaauu

SEQ ID NO: 18845 - RNA, 1920 nt, Artificial Sequence
  mRNA product Design c-3 comprising derived and/or modified sequence from HRSV(Memphis-37)__AIY60640.1__F-del_DSCav1_mut7 (opt3)
gggagaguccgcucagccagguugcagaagcggcuuagcguguguccuaaucuucucucugcguguagguaggccugugccgcaaacaagcuuaccauggagcugcccauccucaagaccaacgccauuacaacuauacuugcugcagugacgcugugcuucgccagcucccagaauaucaccgaagaguuuuaccaaucuacauguucagcggucaguaaaggcuauuugagcgcuuuaagaacugggugguacaccuccguuauuacaaucgaacugucuaacauuaaggagaauaaaugcaacggaaccgacgccaaggugaaacuaaucaagcaggaacucgauaaguauaaaaaugcaguaacugagcugcagaugcuuauguguucgaccccugccgcugguucaggcagcgcaauagccagugggaucgcugugugcaagguccugcacuuggagggagaagugaacaaaauuaagaaugcccuccuguccacaaacaaagcgguugugucucugagcaauggcgucuccgugcucacguucaagguauuagaccugaagaacuacaucgauaaacagcuuuugccaauucugaauaagcaaucauguaguaucagcaacauagagacuguuauggaauuucagcagaaaaauaacaggcuacucgagauuacccgggaguucucugugaaugccggugucacaacuccgguguccaccuauaugcugacaaacucagaacuucugagcuugaucaacgacaugcccauuaccaaugaucagaagaaacucaugaguaacaaugugcaaaucguccgccagcagucuuacuccaucaugugcauuauaaaggaggaaguucuggcauaugugguacaguuaccucuguacggggugaucgacacgccauguuggaaacuccauacuagcccccuuugcacaaccaacacuaaggagggaucgaauauuugucugacacgaaccgaucguggcugguacugcgacaacgcuggcucugucuccuuuuucccucaagccgaaacguguaaggugugcucaaauagaguguuuugcgauaccaugaacaguuugacacuaccaagcgagguuaaucuguguaacaucgacauauucaaucccaaauaugauugcaagauuaugacuuccaaaaccgacgucucuagcucagugaucacaagucucggggcaaucguauccuguuacggaaagacuaaaugcaccgcuagcaacaagaauaaggguauuaucaaaacauuuucuaacggcugugauuauguuucaaauaaggggguggacaccgucagugugggaaacacucuguacuaugucaacaaacaggagggcaagagccuuuacgugaaaggugaaccuauuauaaauuucuaugacccacugguuuuuccguccgaugaguucgacgccucuaucagccaggugaacgaaaagauuaaucaaucguuggcguuuaucaggaaguccgaugagcuccugcacaacguaaaugucgggaaaucaacgacaaacaucaugauuaccacuauaaucauugugaucauuguuaucuuacugcuacucauagccgugggacuguuccuuuacugcaaggcacggugaggacuaguacuggcugcaucucccuuuccucuguccuccauccuucucccaggauggugaagggggaccugguacccagugauccccaccccaggauccuaaaucaugacuuaccugcuaauaaaaacucauuggaaaagugagaagaucuaaaaaaaaaaaaaaaaaaaaaaaaaaaaaaaaaaaaaaaaaaaaaaaaaaaaaaaaaaaaaaaaugcaucccccccccccccccccccccccccccccccaaaggcucuuuucagagccaccagaauu

SEQ ID NO: 18846 - RNA, 1920 nt, Artificial Sequence
  mRNA product Design c-3 comprising derived and/or modified sequence from HRSV(Memphis-37)__AIY60640.1__F-del_DSCav1_mut7 (opt4)
gggagaguccgcucagccagguugcagaagcggcuuagcguguguccuaaucuucucucugcguguagguaggccugugccgcaaacaagcuuaccauggagcugcccauccugaagaccaacgccaucaccaccauccuggccgccgugacccugugcuucgccagcagccagaacaucaccgaggaguucuaccagagcaccugcagcgccgugagcaagggcuaccugagcgcccugagaaccggcugguacaccagcgugaucaccaucgagcugagcaacaucaaggagaacaagugcaacggcaccgacgccaaggugaagcugaucaagcaggagcuggacaaguacaagaacgccgugaccgagcugcagaugcugaugugcagcacccccgccgccggcagcggcagcgccaucgccagcggcaucgccgugugcaaggugcugcaccuggagggcgaggugaacaagaucaagaacgcccugcugagcaccaacaaggccguggugagccugagcaacggcgugagcgugcugaccuucaaggugcuggaccugaagaacuacaucgacaagcagcugcugcccauccugaacaagcagagcugcagcaucagcaacaucgagaccgugauggaguuccagcagaagaacaacagacugcuggagaucaccagagaguucagcgugaacgccggcgugaccacccccgugagcaccuacaugcugaccaacagcgagcugcugagccugaucaacgacaugcccaucaccaacgaccagaagaagcugaugagcaacaacgugcagaucgugagacagcagagcuacagcaucaugugcaucaucaaggaggaggugcuggccuacguggugcagcugccccuguacggcgugaucgacacccccugcuggaagcugcacaccagcccccugugcaccaccaacaccaaggagggcagcaacaucugccugaccagaaccgacagaggcugguacugcgacaacgccggcagcgugagcuucuucccccaggccgagaccugcaaggugugcagcaacagaguguucugcgacaccaugaacagccugacccugcccagcgaggugaaccugugcaacaucgacaucuucaaccccaaguacgacugcaagaucaugaccagcaagaccgacgugagcagcagcgugaucaccagccugggcgccaucgugagcugcuacggcaagaccaagugcaccgccagcaacaagaacaagggcaucaucaagaccuucagcaacggcugcgacuacgugagcaacaagggcguggacaccgugagcgugggcaacacccuguacuacgugaacaagcaggagggcaagagccuguacgugaagggcgagcccaucaucaacuucuacgacccccugguguuccccagcgacgaguucgacgccagcaucagccaggugaacgagaagaucaaccagagccuggccuucaucagaaagagcgacgagcugcugcacaacgugaacgugggcaagagcaccaccaacaucaugaucaccaccaucaucaucgugaucaucgugauccugcugcugcugaucgccgugggccuguuccuguacugcaaggccagaugaggacuaguacuggcugcaucucccuuuccucuguccuccauccuucucccaggauggugaagggggaccugguacccagugauccccaccccaggauccuaaaucaugacuuaccugcuaauaaaaacucauuggaaaagugagaagaucuaaaaaaaaaaaaaaaaaaaaaaaaaaaaaaaaaaaaaaaaaaaaaaaaaaaaaaaaaaaaaaaaugcaucccccccccccccccccccccccccccccccaaaggcucuuuucagagccaccagaauu

SEQ ID NO: 18847 - RNA, 1920 nt, Artificial Sequence
  mRNA product Design c-3 comprising derived and/or modified sequence from HRSV(Memphis-37)__AIY60640.1__F-del_DSCav1_mut7 (opt5)
gggagaguccgcucagccagguugcagaagcggcuuagcguguguccuaaucuucucucugcguguagguaggccugugccgcaaacaagcuuaccauggagcugcccauccucaagaccaacgccauuacaacgauccuggcugccgugacccuuugcuucgcgagcucccagaauauuacagaagaguuuuaccaaucuaccuguagcgcugucuccaaaggcuaucugucugcccucagaacagggugguacaccagcguuaucacaauugaacuguccaacaucaaggagaauaaaugcaacggaaccgacgccaaggugaaacuuaucaagcaggaacuggauaaguauaaaaaugcugugacggagcuccagaugcugauguguucuaccccugccgcuggcagcggguccgccauugcgagcggaaucgccgucugcaaggugcugcaccucgagggcgaaguuaacaaaauuaagaaugcucugcuuucuacaaacaaagccguggucucccugagcaauggggugucuguucucaccuucaaggugcuggaccuuaagaacuacaucgauaaacagcugcucccgauucugaauaagcaauccuguagcaucucuaacauugagacagucauggaauuucagcagaaaaauaaccggcugcucgagaucacccgcgaguucuccgugaaugcuggagugacgacacccgucagcaccuauaugcugacaaacuccgaacuucugucucucaucaacgacaugccuauuaccaaugaucagaagaaacugaugagcaacaauguucaaaucgugagacagcaguccuacagcauuaugugcaucauuaaggaggaagugcuugccuaugucgugcagcugccccucuacggcguuaucgacaccccuuguuggaaacugcauacaucuccccugugcacgaccaacacaaaggagggcuccaauaucugucucacccggacagaucgcgggugguacugcgacaacgcgggaagcgugagcuuuuucccucaagccgaaaccuguaaggucugcucuaauagaguguuuugcgauacgaugaacucccugacacuuccgucugagguuaaucuguguaacauugacaucuucaaucccaaauaugauugcaagauuaugaccagcaaaaccgacguguccagcucugucaucacaucccucggcgcuauugugagcuguuacgggaagaccaaaugcacagccucuaacaagaauaagggaaucaucaaaacguuuuccaacggcugugauuaugucagcaauaaggggguggacaccguuuccgugggaaacacacuguacuaugucaacaaacaggagggcaagucucuuuacgugaaaggcgaaccuauuaucaauuucuaugacccccugguuuuuccuagcgaugaguucgacgcuuccauuucucaggugaacgaaaagaucaaucaaagccucgccuuuauucggaaguccgaugagcugcugcacaacgucaauguggggaaaagcaccacaaacaucaugauuaccacgaucaucauugugaucauuguuauccuccugcuucugauugccgucggacucuuccuguacugcaaggcucgcugaggacuaguacuggcugcaucucccuuuccucuguccuccauccuucucccaggauggugaagggggaccugguacccagugauccccaccccaggauccuaaaucaugacuuaccugcuaauaaaaacucauuggaaaagugagaagaucuaaaaaaaaaaaaaaaaaaaaaaaaaaaaaaaaaaaaaaaaaaaaaaaaaaaaaaaaaaaaaaaaugcaucccccccccccccccccccccccccccccccaaaggcucuuuucagagccaccagaauu

SEQ ID NO: 18848 - RNA, 1920 nt, Artificial Sequence
  mRNA product Design c-3 comprising derived and/or modified sequence from HRSV(Memphis-37)__AIY60640.1__F-del_DSCav1_mut7 (opt6)
gggagaguccgcucagccagguugcagaagcggcuuagcguguguccuaaucuucucucugcguguagguaggccugugccgcaaacaagcuuaccauggaacuaccaauacucaaaacaaacgccauaaccacaauacuagccgcaguaacacuuugcuuugccucaagucaaaacauaacagaagaauuuuaccaauccacaugcucagcuguauccaaaggauauuuauccgcacuaagaacaggaugguacacaucaguaaucacaauagaauuaucaaacauaaaagaaaacaaauguaauggcacagacgccaaaguaaaacuaauuaaacaagaacuagacaaauauaaaaaugcaguaaccgaacuccaaaugcucaugugcucuacaccagcugcaggaucaggaucagccauugcaagcgguauagcuguuugcaaaguauuacacuuagaaggagaaguaaauaaaauaaaaaacgcacuacuaucaacaaauaaagcaguaguaucccuaucaaacggaguaucaguacuuacauucaaaguauuagauuuaaaaaacuauauagacaaacaacuacuucccauauuaaacaaacaaucaugcucaauuuccaacauugaaacuguaauggaauuucaacaaaaaaacaacagacuacuugaaaucacacgagaauuuucaguaaacgcuggaguaacaacaccugucucuaccuacaugcucacaaauagcgaauuacuaucucuaaucaaugacaugccaauaacaaacgaucaaaaaaaacuaauguccaacaacguacaaauaguaagacaacaauccuauucaauaaugugcauaauaaaagaagaagucuuagcauacguuguacaacuaccauuauacggaguaauagauacaccaugcuggaaacuccacacaagcccccucugcacaacaaacaccaaagaagggucaaacauaugcuuaacaagaacagacagaggaugguacugugauaacgcaggaucugucucauucuuuccacaagcagaaacauguaaaguaugcuccaacagagucuuuugcgacaccaugaacucacuaaccuuacccucagaaguaaaccugugcaacaucgauaucuucaaccccaaauacgauugcaaaaucaugacaagcaaaacugauguauccagcucuguaauaacaucacuaggugcaauaguaucaugcuacggaaaaacaaaaugcacagcuucuaacaaaaauaaaggaauaauaaaaacauucuccaauggaugcgacuaugucucaaauaaaggaguagauacaguuucagucggcaacacacucuauuauguaaauaaacaagaaggaaaaucauuauacguaaaaggagaacccauaauaaacuucuacgacccccucguauucccaagcgacgaauuugacgccucaauaucacaaguaaacgaaaaaauaaaccaaucacucgcauucaucagaaaaucagaugaacuacuacacaauguaaacgucggaaaauccaccacaaauauaaugauaacuaccaucauaauaguaauaauagucaucuuacuacuauuaaucgcuguaggacuauuucucuacugcaaggccagauaaggacuaguacuggcugcaucucccuuuccucuguccuccauccuucucccaggauggugaagggggaccugguacccagugauccccaccccaggauccuaaaucaugacuuaccugcuaauaaaaacucauuggaaaagugagaagaucuaaaaaaaaaaaaaaaaaaaaaaaaaaaaaaaaaaaaaaaaaaaaaaaaaaaaaaaaaaaaaaaaugcaucccccccccccccccccccccccccccccccaaaggcucuuuucagagccaccagaauu

SEQ ID NO: 18849 - RNA, 1920 nt, Artificial Sequence
  mRNA product Design c-3 comprising derived and/or modified sequence from HRSV(Memphis-37)__AIY60640.1__F-del_DSCav1_mut7 (opt11)
gggagaguccgcucagccagguugcagaagcggcuuagcguguguccuaaucuucucucugcguguagguaggccugugccgcaaacaagcuuaccauggaacucccaauccucaaaacaaaugccaucaccaccauccuagccgcugucacacuaugcuucgccuccucacaaaacaucaccgaagaguucuaucaauccacaugcuccgccgucagcaagggauaccucuccgcccuuagaaccggcugguacaccucagucaucacaauugaacugucaaacaucaaagaaaacaaaugcaacggcaccgacgcaaaaguaaagcucaucaaacaagaacuggacaaguacaagaacgccgucaccgaacuacagaugcuuaugugcucaaccccugccgccggcuccggaucugccauagcuucaggcaucgccguaugcaaaguccugcaccuagaaggggaagucaacaaaaucaaaaacgcccuccucuccaccaacaaggccguugucucccugucaaacggagucuccguccuaaccuucaaaguccucgaccucaaaaacuacauagacaaacaacuccuacccauccucaacaaacaaagcugcucaauauccaacaucgaaaccgucauggaguuccaacaaaagaacaaccgacuacucgaaauaacacgcgaguucucagucaacgccggcgucaccaccccagucuccacauacaugcucaccaacuccgaacuccuaucgcucaucaacgacaugcccaucaccaaugaccagaagaaacucauguccaacaacguacaaaucguccgccaacaguccuacucaaucaugugcaucaucaaagaagaaguccuugccuacgucguccagcuuccacucuacggagucaucgacacccccugcuggaaacuccacaccuccccacuaugcaccaccaacaccaaagaaggauccaacauaugccucacccguacugaccgcggcugguacugcgacaacgccggauccgucucauucuucccccaggccgaaaccugcaaagucugcuccaaccgcgucuucugcgacaccaugaacucgcucacccucccauccgaagucaaucuaugcaacaucgacauuuucaaccccaaauacgacugcaaaauuaugacaucaaaaaccgacgucucauccucagucaucacuucccucggcgcaaucguaagcugcuacgggaaaacaaagugcaccgcuuccaacaaaaacaaaggcaucaucaaaaccuucucuaacggcugcgacuacgucuccaacaaaggagucgacaccguauccgucggcaacacccucuacuacgucaacaaacaggaaggaaaaucgcucuacgucaaaggagaaccaaucaucaacuucuacgacccccuagucuucccauccgacgaguucgacgccagcaucucacaagucaaugaaaagaucaaccagucacucgcauucauccguaagucagacgaacuccuacacaacgucaacgucggcaagucaacaaccaacauaaugaucaccaccauaaucaucgucauaauaguaauccuccuucuccuaaucgcagucggccucuuccucuacugcaaagcacgcuaaggacuaguacuggcugcaucucccuuuccucuguccuccauccuucucccaggauggugaagggggaccugguacccagugauccccaccccaggauccuaaaucaugacuuaccugcuaauaaaaacucauuggaaaagugagaagaucuaaaaaaaaaaaaaaaaaaaaaaaaaaaaaaaaaaaaaaaaaaaaaaaaaaaaaaaaaaaaaaaaugcaucccccccccccccccccccccccccccccccaaaggcucuuuucagagccaccagaauu

SEQ ID NO: 18850 - RNA, 1916 nt, Artificial Sequence
  mRNA product Design c-4 comprising derived and/or modified sequence from HRSV(Memphis-37)__AIY60640.1__F-del_DSCav1_mut7 (opt1)
gggagaguccgcucagccagguugcagaagcggcuuagcguguguccuaaucuucucucugcguguagguaggccugugccgcaaacaagcuuaccauggagcugcccauccucaagaccaacgccaucaccacgauccuggccgcggugacccugugcuucgccagcucccagaacaucaccgaggaguucuaccagagcacgugcuccgccgucagcaagggcuaccucuccgcccugcgcaccgggugguacaccagcgugaucaccaucgagcuguccaacaucaaggagaacaagugcaacggcaccgacgccaaggugaagcucaucaagcaggagcuggacaaguacaagaacgcggucacggagcugcagaugcugaugugcagcaccccggccgccggcuccgggagcgcgaucgccuccggcaucgccgucugcaaggugcugcaccucgagggcgaggugaacaagaucaagaacgcccugcuguccaccaacaaggccgucgugagccucuccaacggggugagcguccugaccuucaaggugcuggaccucaagaacuacaucgacaagcagcugcugcccauccugaacaagcagagcugcuccaucagcaacaucgagaccgucauggaguuccagcagaagaacaaccgccuccuggagaucacgcgggaguucagcgugaacgcgggcgugaccacccccgucuccaccuacaugcugacgaacagcgagcuccugucccugaucaacgacaugccgaucaccaacgaccagaagaagcucaugagcaacaacgugcagaucgugcgccagcaguccuacagcaucaugugcaucaucaaggaggagguccuggccuacguggugcagcugccccucuacggggucaucgacacccccugcuggaagcugcacaccagcccccugugcacgaccaacaccaaggagggcuccaacaucugccucacccggacggaccgcgggugguacugcgacaacgccggcagcguguccuucuucccgcaggccgagaccugcaaggucugcagcaaccggguguucugcgacaccaugaacucccugacccugcccagcgaggugaaccucugcaacaucgacaucuucaaccccaaguacgacugcaagaucaugacguccaagaccgacgucagcuccagcgugaucaccucccugggcgccaucgugagcugcuacgggaagaccaagugcacggcgagcaacaagaacaagggcaucaucaagaccuucuccaacgggugcgacuacgucagcaacaagggcguggacaccguguccgucggcaacacccuguacuacgugaacaagcaggagggcaagagccucuacgugaagggggagcccaucaucaacuucuacgacccgcuggucuuccccuccgacgaguucgacgccagcaucucccaggugaacgagaagaucaaccagagccuggccuucauccggaaguccgacgagcuccugcacaacgugaacgucggcaagagcaccacgaacaucaugaucaccaccaucaucaucgugaucaucgugauccugcugcuccugaucgccgucgggcuguuccucuacugcaaggcccgcugaggacuaguggaagcauuuuccuggcugauuaaaagaaauuacucagcuauggucaucuguuccuguuagaaggcuaugcagcauauuauauacuaugcgcauguuaugaaaugcauaauaaaaaauuuuaaaaaaucuaaaagaucuaaaaaaaaaaaaaaaaaaaaaaaaaaaaaaaaaaaaaaaaaaaaaaaaaaaaaaaaaaaaaaaaugcaucccccccccccccccccccccccccccccccaaaggcucuuuucagagccaccagaauu

SEQ ID NO: 18851 - RNA, 1916 nt, Artificial Sequence
  mRNA product Design c-4 comprising derived and/or modified sequence from HRSV(Memphis-37)__AIY60640.1__F-del_DSCav1_mut7 (opt1)
gggagaguccgcucagccagguugcagaagcggcuuagcguguguccuaaucuucucucugcguguagguaggccugugccgcaaacaagcuuaccauggagcugcccauccucaagaccaacgccaucaccacgauccuggccgcggugacccugugcuucgccagcucccagaacaucaccgaggaguucuaccagagcacgugcuccgccgucagcaagggguaccucuccgcccugcgcaccgggugguacaccagcgugaucaccaucgagcuguccaacaucaaggagaacaagugcaacggcaccgacgccaaggugaagcucaucaagcaggagcuggacaaguacaagaacgcggucacggagcugcagaugcucaugugcagcaccccggccgccggguccggcagcgccaucgcguccgggaucgccgugugcaaggugcugcaccuggagggcgaggucaacaagaucaagaacgcccuccugagcaccaacaaggccguggugucccugagcaacggcgucuccgugcucaccuucaaggugcuggaccugaagaacuacaucgacaagcagcuccugcccauccugaacaagcagagcugcuccaucagcaacaucgagacggucauggaguuccagcagaagaacaaccggcuccuggagaucacccgcgaguucuccgugaacgccggggugaccacccccgucagcacguacaugcugaccaacagcgagcuccugucccugaucaacgacaugcccaucaccaacgaccagaagaagcucaugagcaacaacgugcagaucgugcggcagcaguccuacagcaucaugugcaucaucaaggaggagguccuggcguacguggugcagcugccgcucuacggcgucaucgacacccccugcuggaagcugcacacgagcccccugugcaccaccaacaccaaggaggggagcaacaucugccucacgcgcaccgaccggggcugguacugcgacaacgccggguccgugagcuucuucccccaggccgagaccugcaaggugugcuccaaccgcgucuucugcgacaccaugaacagccugacgcugccguccgaggugaaccucugcaacaucgacaucuucaaccccaaguacgacugcaagaucaugaccagcaagaccgacgucuccagcuccgugaucaccagccugggcgccaucguguccugcuacggcaagacgaagugcaccgccagcaacaagaacaaggggaucaucaagaccuucuccaacggcugcgacuacgucagcaacaaggggguggacaccgugagcgucggcaacacgcuguacuacgugaacaagcaggagggcaagucccucuacgugaagggggagcccaucaucaacuucuacgacccccuggucuucccgagcgacgaguucgacgcguccaucagccaggugaacgagaagaucaaccagucccuggccuucauccggaaguccgacgagcuccugcacaacgugaacgucggcaaguccaccaccaacaucaugaucaccaccaucaucaucgugaucaucgugauccugcuccugcugaucgccgucggccucuuccuguacugcaaggcccgcugaggacuaguggaagcauuuuccuggcugauuaaaagaaauuacucagcuauggucaucuguuccuguuagaaggcuaugcagcauauuauauacuaugcgcauguuaugaaaugcauaauaaaaaauuuuaaaaaaucuaaaagaucuaaaaaaaaaaaaaaaaaaaaaaaaaaaaaaaaaaaaaaaaaaaaaaaaaaaaaaaaaaaaaaaaugcaucccccccccccccccccccccccccccccccaaaggcucuuuucagagccaccagaauu

SEQ ID NO: 18852 - RNA, 1916 nt, Artificial Sequence
  mRNA product Design c-4 comprising derived and/or modified sequence from HRSV(Memphis-37)__AIY60640.1__F-del_DSCav1_mut7 (opt2)
gggagaguccgcucagccagguugcagaagcggcuuagcguguguccuaaucuucucucugcguguagguaggccugugccgcaaacaagcuuaccauggagcuccccauccucaagaccaacgccaucaccaccauccucgccgccgucacccucugcuucgccuccucccagaacaucaccgaggaguucuaccaguccaccugcuccgccgucuccaagggcuaccucuccgcccuccgcaccggcugguacaccuccgucaucaccaucgagcucuccaacaucaaggagaacaagugcaacggcaccgacgccaaggucaagcucaucaagcaggagcucgacaaguacaagaacgccgucaccgagcuccagaugcucaugugcuccacccccgccgccggcuccggcuccgccaucgccuccggcaucgccgucugcaagguccuccaccucgagggcgaggucaacaagaucaagaacgcccuccucuccaccaacaaggccgucgucucccucuccaacggcgucuccguccucaccuucaagguccucgaccucaagaacuacaucgacaagcagcuccuccccauccucaacaagcaguccugcuccaucuccaacaucgagaccgucauggaguuccagcagaagaacaaccgccuccucgagaucacccgcgaguucuccgucaacgccggcgucaccacccccgucuccaccuacaugcucaccaacuccgagcuccucucccucaucaacgacaugcccaucaccaacgaccagaagaagcucauguccaacaacguccagaucguccgccagcaguccuacuccaucaugugcaucaucaaggaggagguccucgccuacgucguccagcucccccucuacggcgucaucgacacccccugcuggaagcuccacaccuccccccucugcaccaccaacaccaaggagggcuccaacaucugccucacccgcaccgaccgcggcugguacugcgacaacgccggcuccgucuccuucuucccccaggccgagaccugcaaggucugcuccaaccgcgucuucugcgacaccaugaacucccucacccuccccuccgaggucaaccucugcaacaucgacaucuucaaccccaaguacgacugcaagaucaugaccuccaagaccgacgucuccuccuccgucaucaccucccucggcgccaucgucuccugcuacggcaagaccaagugcaccgccuccaacaagaacaagggcaucaucaagaccuucuccaacggcugcgacuacgucuccaacaagggcgucgacaccgucuccgucggcaacacccucuacuacgucaacaagcaggagggcaagucccucuacgucaagggcgagcccaucaucaacuucuacgacccccucgucuuccccuccgacgaguucgacgccuccaucucccaggucaacgagaagaucaaccagucccucgccuucauccgcaaguccgacgagcuccuccacaacgucaacgucggcaaguccaccaccaacaucaugaucaccaccaucaucaucgucaucaucgucauccuccuccuccucaucgccgucggccucuuccucuacugcaaggcccgcugaggacuaguggaagcauuuuccuggcugauuaaaagaaauuacucagcuauggucaucuguuccuguuagaaggcuaugcagcauauuauauacuaugcgcauguuaugaaaugcauaauaaaaaauuuuaaaaaaucuaaaagaucuaaaaaaaaaaaaaaaaaaaaaaaaaaaaaaaaaaaaaaaaaaaaaaaaaaaaaaaaaaaaaaaaugcaucccccccccccccccccccccccccccccccaaaggcucuuuucagagccaccagaauu

SEQ ID NO: 18853 - RNA, 1916 nt, Artificial Sequence
  mRNA product Design c-4 comprising derived and/or modified sequence from HRSV(Memphis-37)__AIY60640.1__F-del_DSCav1_mut7 (opt3)
gggagaguccgcucagccagguugcagaagcggcuuagcguguguccuaaucuucucucugcguguagguaggccugugccgcaaacaagcuuaccauggagcugcccauccucaagaccaacgccauuacaacuauacuugcugcagugacgcugugcuucgccagcucccagaauaucaccgaagaguuuuaccaaucuacauguucagcggucaguaaaggcuauuugagcgcuuuaagaacugggugguacaccuccguuauuacaaucgaacugucuaacauuaaggagaauaaaugcaacggaaccgacgccaaggugaaacuaaucaagcaggaacucgauaaguauaaaaaugcaguaacugagcugcagaugcuuauguguucgaccccugccgcugguucaggcagcgcaauagccagugggaucgcugugugcaagguccugcacuuggagggagaagugaacaaaauuaagaaugcccuccuguccacaaacaaagcgguugugucucugagcaauggcgucuccgugcucacguucaagguauuagaccugaagaacuacaucgauaaacagcuuuugccaauucugaauaagcaaucauguaguaucagcaacauagagacuguuauggaauuucagcagaaaaauaacaggcuacucgagauuacccgggaguucucugugaaugccggugucacaacuccgguguccaccuauaugcugacaaacucagaacuucugagcuugaucaacgacaugcccauuaccaaugaucagaagaaacucaugaguaacaaugugcaaaucguccgccagcagucuuacuccaucaugugcauuauaaaggaggaaguucuggcauaugugguacaguuaccucuguacggggugaucgacacgccauguuggaaacuccauacuagcccccuuugcacaaccaacacuaaggagggaucgaauauuugucugacacgaaccgaucguggcugguacugcgacaacgcuggcucugucuccuuuuucccucaagccgaaacguguaaggugugcucaaauagaguguuuugcgauaccaugaacaguuugacacuaccaagcgagguuaaucuguguaacaucgacauauucaaucccaaauaugauugcaagauuaugacuuccaaaaccgacgucucuagcucagugaucacaagucucggggcaaucguauccuguuacggaaagacuaaaugcaccgcuagcaacaagaauaaggguauuaucaaaacauuuucuaacggcugugauuauguuucaaauaaggggguggacaccgucagugugggaaacacucuguacuaugucaacaaacaggagggcaagagccuuuacgugaaaggugaaccuauuauaaauuucuaugacccacugguuuuuccguccgaugaguucgacgccucuaucagccaggugaacgaaaagauuaaucaaucguuggcguuuaucaggaaguccgaugagcuccugcacaacguaaaugucgggaaaucaacgacaaacaucaugauuaccacuauaaucauugugaucauuguuaucuuacugcuacucauagccgugggacuguuccuuuacugcaaggcacggugaggacuaguggaagcauuuuccuggcugauuaaaagaaauuacucagcuauggucaucuguuccuguuagaaggcuaugcagcauauuauauacuaugcgcauguuaugaaaugcauaauaaaaaauuuuaaaaaaucuaaaagaucuaaaaaaaaaaaaaaaaaaaaaaaaaaaaaaaaaaaaaaaaaaaaaaaaaaaaaaaaaaaaaaaaugcaucccccccccccccccccccccccccccccccaaaggcucuuuucagagccaccagaauu

SEQ ID NO: 18854 - RNA, 1916 nt, Artificial Sequence
  mRNA product Design c-4 comprising derived and/or modified sequence from HRSV(Memphis-37)__AIY60640.1__F-del_DSCav1_mut7 (opt4)
gggagaguccgcucagccagguugcagaagcggcuuagcguguguccuaaucuucucucugcguguagguaggccugugccgcaaacaagcuuaccauggagcugcccauccugaagaccaacgccaucaccaccauccuggccgccgugacccugugcuucgccagcagccagaacaucaccgaggaguucuaccagagcaccugcagcgccgugagcaagggcuaccugagcgcccugagaaccggcugguacaccagcgugaucaccaucgagcugagcaacaucaaggagaacaagugcaacggcaccgacgccaaggugaagcugaucaagcaggagcuggacaaguacaagaacgccgugaccgagcugcagaugcugaugugcagcacccccgccgccggcagcggcagcgccaucgccagcggcaucgccgugugcaaggugcugcaccuggagggcgaggugaacaagaucaagaacgcccugcugagcaccaacaaggccguggugagccugagcaacggcgugagcgugcugaccuucaaggugcuggaccugaagaacuacaucgacaagcagcugcugcccauccugaacaagcagagcugcagcaucagcaacaucgagaccgugauggaguuccagcagaagaacaacagacugcuggagaucaccagagaguucagcgugaacgccggcgugaccacccccgugagcaccuacaugcugaccaacagcgagcugcugagccugaucaacgacaugcccaucaccaacgaccagaagaagcugaugagcaacaacgugcagaucgugagacagcagagcuacagcaucaugugcaucaucaaggaggaggugcuggccuacguggugcagcugccccuguacggcgugaucgacacccccugcuggaagcugcacaccagcccccugugcaccaccaacaccaaggagggcagcaacaucugccugaccagaaccgacagaggcugguacugcgacaacgccggcagcgugagcuucuucccccaggccgagaccugcaaggugugcagcaacagaguguucugcgacaccaugaacagccugacccugcccagcgaggugaaccugugcaacaucgacaucuucaaccccaaguacgacugcaagaucaugaccagcaagaccgacgugagcagcagcgugaucaccagccugggcgccaucgugagcugcuacggcaagaccaagugcaccgccagcaacaagaacaagggcaucaucaagaccuucagcaacggcugcgacuacgugagcaacaagggcguggacaccgugagcgugggcaacacccuguacuacgugaacaagcaggagggcaagagccuguacgugaagggcgagcccaucaucaacuucuacgacccccugguguuccccagcgacgaguucgacgccagcaucagccaggugaacgagaagaucaaccagagccuggccuucaucagaaagagcgacgagcugcugcacaacgugaacgugggcaagagcaccaccaacaucaugaucaccaccaucaucaucgugaucaucgugauccugcugcugcugaucgccgugggccuguuccuguacugcaaggccagaugaggacuaguggaagcauuuuccuggcugauuaaaagaaauuacucagcuauggucaucuguuccuguuagaaggcuaugcagcauauuauauacuaugcgcauguuaugaaaugcauaauaaaaaauuuuaaaaaaucuaaaagaucuaaaaaaaaaaaaaaaaaaaaaaaaaaaaaaaaaaaaaaaaaaaaaaaaaaaaaaaaaaaaaaaaugcaucccccccccccccccccccccccccccccccaaaggcucuuuucagagccaccagaauu

SEQ ID NO: 18855 - RNA, 1916 nt, Artificial Sequence
  mRNA product Design c-4 comprising derived and/or modified sequence from HRSV(Memphis-37)__AIY60640.1__F-del_DSCav1_mut7 (opt5)
gggagaguccgcucagccagguugcagaagcggcuuagcguguguccuaaucuucucucugcguguagguaggccugugccgcaaacaagcuuaccauggagcugcccauccucaagaccaacgccauuacaacgauccuggcugccgugacccuuugcuucgcgagcucccagaauauuacagaagaguuuuaccaaucuaccuguagcgcugucuccaaaggcuaucugucugcccucagaacagggugguacaccagcguuaucacaauugaacuguccaacaucaaggagaauaaaugcaacggaaccgacgccaaggugaaacuuaucaagcaggaacuggauaaguauaaaaaugcugugacggagcuccagaugcugauguguucuaccccugccgcuggcagcggguccgccauugcgagcggaaucgccgucugcaaggugcugcaccucgagggcgaaguuaacaaaauuaagaaugcucugcuuucuacaaacaaagccguggucucccugagcaauggggugucuguucucaccuucaaggugcuggaccuuaagaacuacaucgauaaacagcugcucccgauucugaauaagcaauccuguagcaucucuaacauugagacagucauggaauuucagcagaaaaauaaccggcugcucgagaucacccgcgaguucuccgugaaugcuggagugacgacacccgucagcaccuauaugcugacaaacuccgaacuucugucucucaucaacgacaugccuauuaccaaugaucagaagaaacugaugagcaacaauguucaaaucgugagacagcaguccuacagcauuaugugcaucauuaaggaggaagugcuugccuaugucgugcagcugccccucuacggcguuaucgacaccccuuguuggaaacugcauacaucuccccugugcacgaccaacacaaaggagggcuccaauaucugucucacccggacagaucgcgggugguacugcgacaacgcgggaagcgugagcuuuuucccucaagccgaaaccuguaaggucugcucuaauagaguguuuugcgauacgaugaacucccugacacuuccgucugagguuaaucuguguaacauugacaucuucaaucccaaauaugauugcaagauuaugaccagcaaaaccgacguguccagcucugucaucacaucccucggcgcuauugugagcuguuacgggaagaccaaaugcacagccucuaacaagaauaagggaaucaucaaaacguuuuccaacggcugugauuaugucagcaauaaggggguggacaccguuuccgugggaaacacacuguacuaugucaacaaacaggagggcaagucucuuuacgugaaaggcgaaccuauuaucaauuucuaugacccccugguuuuuccuagcgaugaguucgacgcuuccauuucucaggugaacgaaaagaucaaucaaagccucgccuuuauucggaaguccgaugagcugcugcacaacgucaauguggggaaaagcaccacaaacaucaugauuaccacgaucaucauugugaucauuguuauccuccugcuucugauugccgucggacucuuccuguacugcaaggcucgcugaggacuaguggaagcauuuuccuggcugauuaaaagaaauuacucagcuauggucaucuguuccuguuagaaggcuaugcagcauauuauauacuaugcgcauguuaugaaaugcauaauaaaaaauuuuaaaaaaucuaaaagaucuaaaaaaaaaaaaaaaaaaaaaaaaaaaaaaaaaaaaaaaaaaaaaaaaaaaaaaaaaaaaaaaaugcaucccccccccccccccccccccccccccccccaaaggcucuuuucagagccaccagaauu

SEQ ID NO: 18856 - RNA, 1916 nt, Artificial Sequence
  mRNA product Design c-4 comprising derived and/or modified sequence from HRSV(Memphis-37)__AIY60640.1__F-del_DSCav1_mut7 (opt6)
gggagaguccgcucagccagguugcagaagcggcuuagcguguguccuaaucuucucucugcguguagguaggccugugccgcaaacaagcuuaccauggaacuaccaauacucaaaacaaacgccauaaccacaauacuagccgcaguaacacuuugcuuugccucaagucaaaacauaacagaagaauuuuaccaauccacaugcucagcuguauccaaaggauauuuauccgcacuaagaacaggaugguacacaucaguaaucacaauagaauuaucaaacauaaaagaaaacaaauguaauggcacagacgccaaaguaaaacuaauuaaacaagaacuagacaaauauaaaaaugcaguaaccgaacuccaaaugcucaugugcucuacaccagcugcaggaucaggaucagccauugcaagcgguauagcuguuugcaaaguauuacacuuagaaggagaaguaaauaaaauaaaaaacgcacuacuaucaacaaauaaagcaguaguaucccuaucaaacggaguaucaguacuuacauucaaaguauuagauuuaaaaaacuauauagacaaacaacuacuucccauauuaaacaaacaaucaugcucaauuuccaacauugaaacuguaauggaauuucaacaaaaaaacaacagacuacuugaaaucacacgagaauuuucaguaaacgcuggaguaacaacaccugucucuaccuacaugcucacaaauagcgaauuacuaucucuaaucaaugacaugccaauaacaaacgaucaaaaaaaacuaauguccaacaacguacaaauaguaagacaacaauccuauucaauaaugugcauaauaaaagaagaagucuuagcauacguuguacaacuaccauuauacggaguaauagauacaccaugcuggaaacuccacacaagcccccucugcacaacaaacaccaaagaagggucaaacauaugcuuaacaagaacagacagaggaugguacugugauaacgcaggaucugucucauucuuuccacaagcagaaacauguaaaguaugcuccaacagagucuuuugcgacaccaugaacucacuaaccuuacccucagaaguaaaccugugcaacaucgauaucuucaaccccaaauacgauugcaaaaucaugacaagcaaaacugauguauccagcucuguaauaacaucacuaggugcaauaguaucaugcuacggaaaaacaaaaugcacagcuucuaacaaaaauaaaggaauaauaaaaacauucuccaauggaugcgacuaugucucaaauaaaggaguagauacaguuucagucggcaacacacucuauuauguaaauaaacaagaaggaaaaucauuauacguaaaaggagaacccauaauaaacuucuacgacccccucguauucccaagcgacgaauuugacgccucaauaucacaaguaaacgaaaaaauaaaccaaucacucgcauucaucagaaaaucagaugaacuacuacacaauguaaacgucggaaaauccaccacaaauauaaugauaacuaccaucauaauaguaauaauagucaucuuacuacuauuaaucgcuguaggacuauuucucuacugcaaggccagauaaggacuaguggaagcauuuuccuggcugauuaaaagaaauuacucagcuauggucaucuguuccuguuagaaggcuaugcagcauauuauauacuaugcgcauguuaugaaaugcauaauaaaaaauuuuaaaaaaucuaaaagaucuaaaaaaaaaaaaaaaaaaaaaaaaaaaaaaaaaaaaaaaaaaaaaaaaaaaaaaaaaaaaaaaaugcaucccccccccccccccccccccccccccccccaaaggcucuuuucagagccaccagaauu

SEQ ID NO: 18857 - RNA, 1916 nt, Artificial Sequence
  mRNA product Design c-4 comprising derived and/or modified sequence from HRSV(Memphis-37)__AIY60640.1__F-del_DSCav1_mut7 (opt11)
gggagaguccgcucagccagguugcagaagcggcuuagcguguguccuaaucuucucucugcguguagguaggccugugccgcaaacaagcuuaccauggaacucccaauccucaaaacaaaugccaucaccaccauccuagccgcugucacacuaugcuucgccuccucacaaaacaucaccgaagaguucuaucaauccacaugcuccgccgucagcaagggauaccucuccgcccuuagaaccggcugguacaccucagucaucacaauugaacugucaaacaucaaagaaaacaaaugcaacggcaccgacgcaaaaguaaagcucaucaaacaagaacuggacaaguacaagaacgccgucaccgaacuacagaugcuuaugugcucaaccccugccgccggcuccggaucugccauagcuucaggcaucgccguaugcaaaguccugcaccuagaaggggaagucaacaaaaucaaaaacgcccuccucuccaccaacaaggccguugucucccugucaaacggagucuccguccuaaccuucaaaguccucgaccucaaaaacuacauagacaaacaacuccuacccauccucaacaaacaaagcugcucaauauccaacaucgaaaccgucauggaguuccaacaaaagaacaaccgacuacucgaaauaacacgcgaguucucagucaacgccggcgucaccaccccagucuccacauacaugcucaccaacuccgaacuccuaucgcucaucaacgacaugcccaucaccaaugaccagaagaaacucauguccaacaacguacaaaucguccgccaacaguccuacucaaucaugugcaucaucaaagaagaaguccuugccuacgucguccagcuuccacucuacggagucaucgacacccccugcuggaaacuccacaccuccccacuaugcaccaccaacaccaaagaaggauccaacauaugccucacccguacugaccgcggcugguacugcgacaacgccggauccgucucauucuucccccaggccgaaaccugcaaagucugcuccaaccgcgucuucugcgacaccaugaacucgcucacccucccauccgaagucaaucuaugcaacaucgacauuuucaaccccaaauacgacugcaaaauuaugacaucaaaaaccgacgucucauccucagucaucacuucccucggcgcaaucguaagcugcuacgggaaaacaaagugcaccgcuuccaacaaaaacaaaggcaucaucaaaaccuucucuaacggcugcgacuacgucuccaacaaaggagucgacaccguauccgucggcaacacccucuacuacgucaacaaacaggaaggaaaaucgcucuacgucaaaggagaaccaaucaucaacuucuacgacccccuagucuucccauccgacgaguucgacgccagcaucucacaagucaaugaaaagaucaaccagucacucgcauucauccguaagucagacgaacuccuacacaacgucaacgucggcaagucaacaaccaacauaaugaucaccaccauaaucaucgucauaauaguaauccuccuucuccuaaucgcagucggccucuuccucuacugcaaagcacgcuaaggacuaguggaagcauuuuccuggcugauuaaaagaaauuacucagcuauggucaucuguuccuguuagaaggcuaugcagcauauuauauacuaugcgcauguuaugaaaugcauaauaaaaaauuuuaaaaaaucuaaaagaucuaaaaaaaaaaaaaaaaaaaaaaaaaaaaaaaaaaaaaaaaaaaaaaaaaaaaaaaaaaaaaaaaugcaucccccccccccccccccccccccccccccccaaaggcucuuuucagagccaccagaauu

SEQ ID NO: 18858 - RNA, 1834 nt, Artificial Sequence
  mRNA product Design c-5 comprising derived and/or modified sequence from HRSV(Memphis-37)__AIY60640.1__F-del_DSCav1_mut7 (opt1)
gggagagcggcucggccauuuugucccagucaguccggaggcugcggcugcagaaguaccgccugcggaguaacugcaaagaagcuuaccauggagcugcccauccucaagaccaacgccaucaccacgauccuggccgcggugacccugugcuucgccagcucccagaacaucaccgaggaguucuaccagagcacgugcuccgccgucagcaagggcuaccucuccgcccugcgcaccgggugguacaccagcgugaucaccaucgagcuguccaacaucaaggagaacaagugcaacggcaccgacgccaaggugaagcucaucaagcaggagcuggacaaguacaagaacgcggucacggagcugcagaugcugaugugcagcaccccggccgccggcuccgggagcgcgaucgccuccggcaucgccgucugcaaggugcugcaccucgagggcgaggugaacaagaucaagaacgcccugcuguccaccaacaaggccgucgugagccucuccaacggggugagcguccugaccuucaaggugcuggaccucaagaacuacaucgacaagcagcugcugcccauccugaacaagcagagcugcuccaucagcaacaucgagaccgucauggaguuccagcagaagaacaaccgccuccuggagaucacgcgggaguucagcgugaacgcgggcgugaccacccccgucuccaccuacaugcugacgaacagcgagcuccugucccugaucaacgacaugccgaucaccaacgaccagaagaagcucaugagcaacaacgugcagaucgugcgccagcaguccuacagcaucaugugcaucaucaaggaggagguccuggccuacguggugcagcugccccucuacggggucaucgacacccccugcuggaagcugcacaccagcccccugugcacgaccaacaccaaggagggcuccaacaucugccucacccggacggaccgcgggugguacugcgacaacgccggcagcguguccuucuucccgcaggccgagaccugcaaggucugcagcaaccggguguucugcgacaccaugaacucccugacccugcccagcgaggugaaccucugcaacaucgacaucuucaaccccaaguacgacugcaagaucaugacguccaagaccgacgucagcuccagcgugaucaccucccugggcgccaucgugagcugcuacgggaagaccaagugcacggcgagcaacaagaacaagggcaucaucaagaccuucuccaacgggugcgacuacgucagcaacaagggcguggacaccguguccgucggcaacacccuguacuacgugaacaagcaggagggcaagagccucuacgugaagggggagcccaucaucaacuucuacgacccgcuggucuuccccuccgacgaguucgacgccagcaucucccaggugaacgagaagaucaaccagagccuggccuucauccggaaguccgacgagcuccugcacaacgugaacgucggcaagagcaccacgaacaucaugaucaccaccaucaucaucgugaucaucgugauccugcugcuccugaucgccgucgggcuguuccucuacugcaaggcccgcugaggacuagucccuguucccagagcccacuuuuuuuucuuuuuuugaaauaaaauagccugucuuucagaucuaaaaaaaaaaaaaaaaaaaaaaaaaaaaaaaaaaaaaaaaaaaaaaaaaaaaaaaaaaaaaaaaugcaucccccccccccccccccccccccccccccccaaaggcucuuuucagagccaccagaauu

SEQ ID NO: 18859 - RNA, 1834 nt, Artificial Sequence
  mRNA product Design c-5 comprising derived and/or modified sequence from HRSV(Memphis-37)__AIY60640.1__F-del_DSCav1_mut7 (opt1)
gggagagcggcucggccauuuugucccagucaguccggaggcugcggcugcagaaguaccgccugcggaguaacugcaaagaagcuuaccauggagcugcccauccucaagaccaacgccaucaccacgauccuggccgcggugacccugugcuucgccagcucccagaacaucaccgaggaguucuaccagagcacgugcuccgccgucagcaagggguaccucuccgcccugcgcaccgggugguacaccagcgugaucaccaucgagcuguccaacaucaaggagaacaagugcaacggcaccgacgccaaggugaagcucaucaagcaggagcuggacaaguacaagaacgcggucacggagcugcagaugcucaugugcagcaccccggccgccggguccggcagcgccaucgcguccgggaucgccgugugcaaggugcugcaccuggagggcgaggucaacaagaucaagaacgcccuccugagcaccaacaaggccguggugucccugagcaacggcgucuccgugcucaccuucaaggugcuggaccugaagaacuacaucgacaagcagcuccugcccauccugaacaagcagagcugcuccaucagcaacaucgagacggucauggaguuccagcagaagaacaaccggcuccuggagaucacccgcgaguucuccgugaacgccggggugaccacccccgucagcacguacaugcugaccaacagcgagcuccugucccugaucaacgacaugcccaucaccaacgaccagaagaagcucaugagcaacaacgugcagaucgugcggcagcaguccuacagcaucaugugcaucaucaaggaggagguccuggcguacguggugcagcugccgcucuacggcgucaucgacacccccugcuggaagcugcacacgagcccccugugcaccaccaacaccaaggaggggagcaacaucugccucacgcgcaccgaccggggcugguacugcgacaacgccggguccgugagcuucuucccccaggccgagaccugcaaggugugcuccaaccgcgucuucugcgacaccaugaacagccugacgcugccguccgaggugaaccucugcaacaucgacaucuucaaccccaaguacgacugcaagaucaugaccagcaagaccgacgucuccagcuccgugaucaccagccugggcgccaucguguccugcuacggcaagacgaagugcaccgccagcaacaagaacaaggggaucaucaagaccuucuccaacggcugcgacuacgucagcaacaaggggguggacaccgugagcgucggcaacacgcuguacuacgugaacaagcaggagggcaagucccucuacgugaagggggagcccaucaucaacuucuacgacccccuggucuucccgagcgacgaguucgacgcguccaucagccaggugaacgagaagaucaaccagucccuggccuucauccggaaguccgacgagcuccugcacaacgugaacgucggcaaguccaccaccaacaucaugaucaccaccaucaucaucgugaucaucgugauccugcuccugcugaucgccgucggccucuuccuguacugcaaggcccgcugaggacuagucccuguucccagagcccacuuuuuuuucuuuuuuugaaauaaaauagccugucuuucagaucuaaaaaaaaaaaaaaaaaaaaaaaaaaaaaaaaaaaaaaaaaaaaaaaaaaaaaaaaaaaaaaaaugcaucccccccccccccccccccccccccccccccaaaggcucuuuucagagccaccagaauu

SEQ ID NO: 18860 - RNA, 1834 nt, Artificial Sequence
  mRNA product Design c-5 comprising derived and/or modified sequence from HRSV(Memphis-37)__AIY60640.1__F-del_DSCav1_mut7 (opt2)
gggagagcggcucggccauuuugucccagucaguccggaggcugcggcugcagaaguaccgccugcggaguaacugcaaagaagcuuaccauggagcuccccauccucaagaccaacgccaucaccaccauccucgccgccgucacccucugcuucgccuccucccagaacaucaccgaggaguucuaccaguccaccugcuccgccgucuccaagggcuaccucuccgcccuccgcaccggcugguacaccuccgucaucaccaucgagcucuccaacaucaaggagaacaagugcaacggcaccgacgccaaggucaagcucaucaagcaggagcucgacaaguacaagaacgccgucaccgagcuccagaugcucaugugcuccacccccgccgccggcuccggcuccgccaucgccuccggcaucgccgucugcaagguccuccaccucgagggcgaggucaacaagaucaagaacgcccuccucuccaccaacaaggccgucgucucccucuccaacggcgucuccguccucaccuucaagguccucgaccucaagaacuacaucgacaagcagcuccuccccauccucaacaagcaguccugcuccaucuccaacaucgagaccgucauggaguuccagcagaagaacaaccgccuccucgagaucacccgcgaguucuccgucaacgccggcgucaccacccccgucuccaccuacaugcucaccaacuccgagcuccucucccucaucaacgacaugcccaucaccaacgaccagaagaagcucauguccaacaacguccagaucguccgccagcaguccuacuccaucaugugcaucaucaaggaggagguccucgccuacgucguccagcucccccucuacggcgucaucgacacccccugcuggaagcuccacaccuccccccucugcaccaccaacaccaaggagggcuccaacaucugccucacccgcaccgaccgcggcugguacugcgacaacgccggcuccgucuccuucuucccccaggccgagaccugcaaggucugcuccaaccgcgucuucugcgacaccaugaacucccucacccuccccuccgaggucaaccucugcaacaucgacaucuucaaccccaaguacgacugcaagaucaugaccuccaagaccgacgucuccuccuccgucaucaccucccucggcgccaucgucuccugcuacggcaagaccaagugcaccgccuccaacaagaacaagggcaucaucaagaccuucuccaacggcugcgacuacgucuccaacaagggcgucgacaccgucuccgucggcaacacccucuacuacgucaacaagcaggagggcaagucccucuacgucaagggcgagcccaucaucaacuucuacgacccccucgucuuccccuccgacgaguucgacgccuccaucucccaggucaacgagaagaucaaccagucccucgccuucauccgcaaguccgacgagcuccuccacaacgucaacgucggcaaguccaccaccaacaucaugaucaccaccaucaucaucgucaucaucgucauccuccuccuccucaucgccgucggccucuuccucuacugcaaggcccgcugaggacuagucccuguucccagagcccacuuuuuuuucuuuuuuugaaauaaaauagccugucuuucagaucuaaaaaaaaaaaaaaaaaaaaaaaaaaaaaaaaaaaaaaaaaaaaaaaaaaaaaaaaaaaaaaaaugcaucccccccccccccccccccccccccccccccaaaggcucuuuucagagccaccagaauu

SEQ ID NO: 18861 - RNA, 1834 nt, Artificial Sequence
  mRNA product Design c-5 comprising derived and/or modified sequence from HRSV(Memphis-37)__AIY60640.1__F-del_DSCav1_mut7 (opt3)
gggagagcggcucggccauuuugucccagucaguccggaggcugcggcugcagaaguaccgccugcggaguaacugcaaagaagcuuaccauggagcugcccauccucaagaccaacgccauuacaacuauacuugcugcagugacgcugugcuucgccagcucccagaauaucaccgaagaguuuuaccaaucuacauguucagcggucaguaaaggcuauuugagcgcuuuaagaacugggugguacaccuccguuauuacaaucgaacugucuaacauuaaggagaauaaaugcaacggaaccgacgccaaggugaaacuaaucaagcaggaacucgauaaguauaaaaaugcaguaacugagcugcagaugcuuauguguucgaccccugccgcugguucaggcagcgcaauagccagugggaucgcugugugcaagguccugcacuuggagggagaagugaacaaaauuaagaaugcccuccuguccacaaacaaagcgguugugucucugagcaauggcgucuccgugcucacguucaagguauuagaccugaagaacuacaucgauaaacagcuuuugccaauucugaauaagcaaucauguaguaucagcaacauagagacuguuauggaauuucagcagaaaaauaacaggcuacucgagauuacccgggaguucucugugaaugccggugucacaacuccgguguccaccuauaugcugacaaacucagaacuucugagcuugaucaacgacaugcccauuaccaaugaucagaagaaacucaugaguaacaaugugcaaaucguccgccagcagucuuacuccaucaugugcauuauaaaggaggaaguucuggcauaugugguacaguuaccucuguacggggugaucgacacgccauguuggaaacuccauacuagcccccuuugcacaaccaacacuaaggagggaucgaauauuugucugacacgaaccgaucguggcugguacugcgacaacgcuggcucugucuccuuuuucccucaagccgaaacguguaaggugugcucaaauagaguguuuugcgauaccaugaacaguuugacacuaccaagcgagguuaaucuguguaacaucgacauauucaaucccaaauaugauugcaagauuaugacuuccaaaaccgacgucucuagcucagugaucacaagucucggggcaaucguauccuguuacggaaagacuaaaugcaccgcuagcaacaagaauaaggguauuaucaaaacauuuucuaacggcugugauuauguuucaaauaaggggguggacaccgucagugugggaaacacucuguacuaugucaacaaacaggagggcaagagccuuuacgugaaaggugaaccuauuauaaauuucuaugacccacugguuuuuccguccgaugaguucgacgccucuaucagccaggugaacgaaaagauuaaucaaucguuggcguuuaucaggaaguccgaugagcuccugcacaacguaaaugucgggaaaucaacgacaaacaucaugauuaccacuauaaucauugugaucauuguuaucuuacugcuacucauagccgugggacuguuccuuuacugcaaggcacggugaggacuagucccuguucccagagcccacuuuuuuuucuuuuuuugaaauaaaauagccugucuuucagaucuaaaaaaaaaaaaaaaaaaaaaaaaaaaaaaaaaaaaaaaaaaaaaaaaaaaaaaaaaaaaaaaaugcaucccccccccccccccccccccccccccccccaaaggcucuuuucagagccaccagaauu

SEQ ID NO: 18862 - RNA, 1834 nt, Artificial Sequence
  mRNA product Design c-5 comprising derived and/or modified sequence from HRSV(Memphis-37)__AIY60640.1__F-del_DSCav1_mut7 (opt4)
gggagagcggcucggccauuuugucccagucaguccggaggcugcggcugcagaaguaccgccugcggaguaacugcaaagaagcuuaccauggagcugcccauccugaagaccaacgccaucaccaccauccuggccgccgugacccugugcuucgccagcagccagaacaucaccgaggaguucuaccagagcaccugcagcgccgugagcaagggcuaccugagcgcccugagaaccggcugguacaccagcgugaucaccaucgagcugagcaacaucaaggagaacaagugcaacggcaccgacgccaaggugaagcugaucaagcaggagcuggacaaguacaagaacgccgugaccgagcugcagaugcugaugugcagcacccccgccgccggcagcggcagcgccaucgccagcggcaucgccgugugcaaggugcugcaccuggagggcgaggugaacaagaucaagaacgcccugcugagcaccaacaaggccguggugagccugagcaacggcgugagcgugcugaccuucaaggugcuggaccugaagaacuacaucgacaagcagcugcugcccauccugaacaagcagagcugcagcaucagcaacaucgagaccgugauggaguuccagcagaagaacaacagacugcuggagaucaccagagaguucagcgugaacgccggcgugaccacccccgugagcaccuacaugcugaccaacagcgagcugcugagccugaucaacgacaugcccaucaccaacgaccagaagaagcugaugagcaacaacgugcagaucgugagacagcagagcuacagcaucaugugcaucaucaaggaggaggugcuggccuacguggugcagcugccccuguacggcgugaucgacacccccugcuggaagcugcacaccagcccccugugcaccaccaacaccaaggagggcagcaacaucugccugaccagaaccgacagaggcugguacugcgacaacgccggcagcgugagcuucuucccccaggccgagaccugcaaggugugcagcaacagaguguucugcgacaccaugaacagccugacccugcccagcgaggugaaccugugcaacaucgacaucuucaaccccaaguacgacugcaagaucaugaccagcaagaccgacgugagcagcagcgugaucaccagccugggcgccaucgugagcugcuacggcaagaccaagugcaccgccagcaacaagaacaagggcaucaucaagaccuucagcaacggcugcgacuacgugagcaacaagggcguggacaccgugagcgugggcaacacccuguacuacgugaacaagcaggagggcaagagccuguacgugaagggcgagcccaucaucaacuucuacgacccccugguguuccccagcgacgaguucgacgccagcaucagccaggugaacgagaagaucaaccagagccuggccuucaucagaaagagcgacgagcugcugcacaacgugaacgugggcaagagcaccaccaacaucaugaucaccaccaucaucaucgugaucaucgugauccugcugcugcugaucgccgugggccuguuccuguacugcaaggccagaugaggacuagucccuguucccagagcccacuuuuuuuucuuuuuuugaaauaaaauagccugucuuucagaucuaaaaaaaaaaaaaaaaaaaaaaaaaaaaaaaaaaaaaaaaaaaaaaaaaaaaaaaaaaaaaaaaugcaucccccccccccccccccccccccccccccccaaaggcucuuuucagagccaccagaauu

SEQ ID NO: 18863 - RNA, 1834 nt, Artificial Sequence
  mRNA product Design c-5 comprising derived and/or modified sequence from HRSV(Memphis-37)__AIY60640.1__F-del_DSCav1_mut7 (opt5)
gggagagcggcucggccauuuugucccagucaguccggaggcugcggcugcagaaguaccgccugcggaguaacugcaaagaagcuuaccauggagcugcccauccucaagaccaacgccauuacaacgauccuggcugccgugacccuuugcuucgcgagcucccagaauauuacagaagaguuuuaccaaucuaccuguagcgcugucuccaaaggcuaucugucugcccucagaacagggugguacaccagcguuaucacaauugaacuguccaacaucaaggagaauaaaugcaacggaaccgacgccaaggugaaacuuaucaagcaggaacuggauaaguauaaaaaugcugugacggagcuccagaugcugauguguucuaccccugccgcuggcagcggguccgccauugcgagcggaaucgccgucugcaaggugcugcaccucgagggcgaaguuaacaaaauuaagaaugcucugcuuucuacaaacaaagccguggucucccugagcaauggggugucuguucucaccuucaaggugcuggaccuuaagaacuacaucgauaaacagcugcucccgauucugaauaagcaauccuguagcaucucuaacauugagacagucauggaauuucagcagaaaaauaaccggcugcucgagaucacccgcgaguucuccgugaaugcuggagugacgacacccgucagcaccuauaugcugacaaacuccgaacuucugucucucaucaacgacaugccuauuaccaaugaucagaagaaacugaugagcaacaauguucaaaucgugagacagcaguccuacagcauuaugugcaucauuaaggaggaagugcuugccuaugucgugcagcugccccucuacggcguuaucgacaccccuuguuggaaacugcauacaucuccccugugcacgaccaacacaaaggagggcuccaauaucugucucacccggacagaucgcgggugguacugcgacaacgcgggaagcgugagcuuuuucccucaagccgaaaccuguaaggucugcucuaauagaguguuuugcgauacgaugaacucccugacacuuccgucugagguuaaucuguguaacauugacaucuucaaucccaaauaugauugcaagauuaugaccagcaaaaccgacguguccagcucugucaucacaucccucggcgcuauugugagcuguuacgggaagaccaaaugcacagccucuaacaagaauaagggaaucaucaaaacguuuuccaacggcugugauuaugucagcaauaaggggguggacaccguuuccgugggaaacacacuguacuaugucaacaaacaggagggcaagucucuuuacgugaaaggcgaaccuauuaucaauuucuaugacccccugguuuuuccuagcgaugaguucgacgcuuccauuucucaggugaacgaaaagaucaaucaaagccucgccuuuauucggaaguccgaugagcugcugcacaacgucaauguggggaaaagcaccacaaacaucaugauuaccacgaucaucauugugaucauuguuauccuccugcuucugauugccgucggacucuuccuguacugcaaggcucgcugaggacuagucccuguucccagagcccacuuuuuuuucuuuuuuugaaauaaaauagccugucuuucagaucuaaaaaaaaaaaaaaaaaaaaaaaaaaaaaaaaaaaaaaaaaaaaaaaaaaaaaaaaaaaaaaaaugcaucccccccccccccccccccccccccccccccaaaggcucuuuucagagccaccagaauu

SEQ ID NO: 18864 - RNA, 1834 nt, Artificial Sequence
  mRNA product Design c-5 comprising derived and/or modified sequence from HRSV(Memphis-37)__AIY60640.1__F-del_DSCav1_mut7 (opt6)
gggagagcggcucggccauuuugucccagucaguccggaggcugcggcugcagaaguaccgccugcggaguaacugcaaagaagcuuaccauggaacuaccaauacucaaaacaaacgccauaaccacaauacuagccgcaguaacacuuugcuuugccucaagucaaaacauaacagaagaauuuuaccaauccacaugcucagcuguauccaaaggauauuuauccgcacuaagaacaggaugguacacaucaguaaucacaauagaauuaucaaacauaaaagaaaacaaauguaauggcacagacgccaaaguaaaacuaauuaaacaagaacuagacaaauauaaaaaugcaguaaccgaacuccaaaugcucaugugcucuacaccagcugcaggaucaggaucagccauugcaagcgguauagcuguuugcaaaguauuacacuuagaaggagaaguaaauaaaauaaaaaacgcacuacuaucaacaaauaaagcaguaguaucccuaucaaacggaguaucaguacuuacauucaaaguauuagauuuaaaaaacuauauagacaaacaacuacuucccauauuaaacaaacaaucaugcucaauuuccaacauugaaacuguaauggaauuucaacaaaaaaacaacagacuacuugaaaucacacgagaauuuucaguaaacgcuggaguaacaacaccugucucuaccuacaugcucacaaauagcgaauuacuaucucuaaucaaugacaugccaauaacaaacgaucaaaaaaaacuaauguccaacaacguacaaauaguaagacaacaauccuauucaauaaugugcauaauaaaagaagaagucuuagcauacguuguacaacuaccauuauacggaguaauagauacaccaugcuggaaacuccacacaagcccccucugcacaacaaacaccaaagaagggucaaacauaugcuuaacaagaacagacagaggaugguacugugauaacgcaggaucugucucauucuuuccacaagcagaaacauguaaaguaugcuccaacagagucuuuugcgacaccaugaacucacuaaccuuacccucagaaguaaaccugugcaacaucgauaucuucaaccccaaauacgauugcaaaaucaugacaagcaaaacugauguauccagcucuguaauaacaucacuaggugcaauaguaucaugcuacggaaaaacaaaaugcacagcuucuaacaaaaauaaaggaauaauaaaaacauucuccaauggaugcgacuaugucucaaauaaaggaguagauacaguuucagucggcaacacacucuauuauguaaauaaacaagaaggaaaaucauuauacguaaaaggagaacccauaauaaacuucuacgacccccucguauucccaagcgacgaauuugacgccucaauaucacaaguaaacgaaaaaauaaaccaaucacucgcauucaucagaaaaucagaugaacuacuacacaauguaaacgucggaaaauccaccacaaauauaaugauaacuaccaucauaauaguaauaauagucaucuuacuacuauuaaucgcuguaggacuauuucucuacugcaaggccagauaaggacuagucccuguucccagagcccacuuuuuuuucuuuuuuugaaauaaaauagccugucuuucagaucuaaaaaaaaaaaaaaaaaaaaaaaaaaaaaaaaaaaaaaaaaaaaaaaaaaaaaaaaaaaaaaaaugcaucccccccccccccccccccccccccccccccaaaggcucuuuucagagccaccagaauu

SEQ ID NO: 18865 - RNA, 1834 nt, Artificial Sequence
  mRNA product Design c-5 comprising derived and/or modified sequence from HRSV(Memphis-37)__AIY60640.1__F-del_DSCav1_mut7 (opt11)
gggagagcggcucggccauuuugucccagucaguccggaggcugcggcugcagaaguaccgccugcggaguaacugcaaagaagcuuaccauggaacucccaauccucaaaacaaaugccaucaccaccauccuagccgcugucacacuaugcuucgccuccucacaaaacaucaccgaagaguucuaucaauccacaugcuccgccgucagcaagggauaccucuccgcccuuagaaccggcugguacaccucagucaucacaauugaacugucaaacaucaaagaaaacaaaugcaacggcaccgacgcaaaaguaaagcucaucaaacaagaacuggacaaguacaagaacgccgucaccgaacuacagaugcuuaugugcucaaccccugccgccggcuccggaucugccauagcuucaggcaucgccguaugcaaaguccugcaccuagaaggggaagucaacaaaaucaaaaacgcccuccucuccaccaacaaggccguugucucccugucaaacggagucuccguccuaaccuucaaaguccucgaccucaaaaacuacauagacaaacaacuccuacccauccucaacaaacaaagcugcucaauauccaacaucgaaaccgucauggaguuccaacaaaagaacaaccgacuacucgaaauaacacgcgaguucucagucaacgccggcgucaccaccccagucuccacauacaugcucaccaacuccgaacuccuaucgcucaucaacgacaugcccaucaccaaugaccagaagaaacucauguccaacaacguacaaaucguccgccaacaguccuacucaaucaugugcaucaucaaagaagaaguccuugccuacgucguccagcuuccacucuacggagucaucgacacccccugcuggaaacuccacaccuccccacuaugcaccaccaacaccaaagaaggauccaacauaugccucacccguacugaccgcggcugguacugcgacaacgccggauccgucucauucuucccccaggccgaaaccugcaaagucugcuccaaccgcgucuucugcgacaccaugaacucgcucacccucccauccgaagucaaucuaugcaacaucgacauuuucaaccccaaauacgacugcaaaauuaugacaucaaaaaccgacgucucauccucagucaucacuucccucggcgcaaucguaagcugcuacgggaaaacaaagugcaccgcuuccaacaaaaacaaaggcaucaucaaaaccuucucuaacggcugcgacuacgucuccaacaaaggagucgacaccguauccgucggcaacacccucuacuacgucaacaaacaggaaggaaaaucgcucuacgucaaaggagaaccaaucaucaacuucuacgacccccuagucuucccauccgacgaguucgacgccagcaucucacaagucaaugaaaagaucaaccagucacucgcauucauccguaagucagacgaacuccuacacaacgucaacgucggcaagucaacaaccaacauaaugaucaccaccauaaucaucgucauaauaguaauccuccuucuccuaaucgcagucggccucuuccucuacugcaaagcacgcuaaggacuagucccuguucccagagcccacuuuuuuuucuuuuuuugaaauaaaauagccugucuuucagaucuaaaaaaaaaaaaaaaaaaaaaaaaaaaaaaaaaaaaaaaaaaaaaaaaaaaaaaaaaaaaaaaaugcaucccccccccccccccccccccccccccccccaaaggcucuuuucagagccaccagaauu

SEQ ID NO: 18866 - RNA, 1843 nt, Artificial Sequence
  mRNA product Design d-1 comprising derived and/or modified sequence from HRSV(Memphis-37)__AIY60640.1__F-del_DSCav1_mut7 (opt1)
gggagacccgugacccggaaguuguacggcuacgcgacuuucccucccacaaacccucgcgcccuuccuuuccuacuugggcccggcagaaagcuuaccauggagcugcccauccucaagaccaacgccaucaccacgauccuggccgcggugacccugugcuucgccagcucccagaacaucaccgaggaguucuaccagagcacgugcuccgccgucagcaagggcuaccucuccgcccugcgcaccgggugguacaccagcgugaucaccaucgagcuguccaacaucaaggagaacaagugcaacggcaccgacgccaaggugaagcucaucaagcaggagcuggacaaguacaagaacgcggucacggagcugcagaugcugaugugcagcaccccggccgccggcuccgggagcgcgaucgccuccggcaucgccgucugcaaggugcugcaccucgagggcgaggugaacaagaucaagaacgcccugcuguccaccaacaaggccgucgugagccucuccaacggggugagcguccugaccuucaaggugcuggaccucaagaacuacaucgacaagcagcugcugcccauccugaacaagcagagcugcuccaucagcaacaucgagaccgucauggaguuccagcagaagaacaaccgccuccuggagaucacgcgggaguucagcgugaacgcgggcgugaccacccccgucuccaccuacaugcugacgaacagcgagcuccugucccugaucaacgacaugccgaucaccaacgaccagaagaagcucaugagcaacaacgugcagaucgugcgccagcaguccuacagcaucaugugcaucaucaaggaggagguccuggccuacguggugcagcugccccucuacggggucaucgacacccccugcuggaagcugcacaccagcccccugugcacgaccaacaccaaggagggcuccaacaucugccucacccggacggaccgcgggugguacugcgacaacgccggcagcguguccuucuucccgcaggccgagaccugcaaggucugcagcaaccggguguucugcgacaccaugaacucccugacccugcccagcgaggugaaccucugcaacaucgacaucuucaaccccaaguacgacugcaagaucaugacguccaagaccgacgucagcuccagcgugaucaccucccugggcgccaucgugagcugcuacgggaagaccaagugcacggcgagcaacaagaacaagggcaucaucaagaccuucuccaacgggugcgacuacgucagcaacaagggcguggacaccguguccgucggcaacacccuguacuacgugaacaagcaggagggcaagagccucuacgugaagggggagcccaucaucaacuucuacgacccgcuggucuuccccuccgacgaguucgacgccagcaucucccaggugaacgagaagaucaaccagagccuggccuucauccggaaguccgacgagcuccugcacaacgugaacgucggcaagagcaccacgaacaucaugaucaccaccaucaucaucgugaucaucgugauccugcugcuccugaucgccgucgggcuguuccucuacugcaaggcccgcugaggacuagucccuguucccagagcccacuuuuuuuucuuuuuuugaaauaaaauagccugucuuucagaucuaaaaaaaaaaaaaaaaaaaaaaaaaaaaaaaaaaaaaaaaaaaaaaaaaaaaaaaaaaaaaaaaugcaucccccccccccccccccccccccccccccccaaaggcucuuuucagagccaccagaauu

SEQ ID NO: 18867 - RNA, 1843 nt, Artificial Sequence
  mRNA product Design d-1 comprising derived and/or modified sequence from HRSV(Memphis-37)__AIY60640.1__F-del_DSCav1_mut7 (opt1)
gggagacccgugacccggaaguuguacggcuacgcgacuuucccucccacaaacccucgcgcccuuccuuuccuacuugggcccggcagaaagcuuaccauggagcugcccauccucaagaccaacgccaucaccacgauccuggccgcggugacccugugcuucgccagcucccagaacaucaccgaggaguucuaccagagcacgugcuccgccgucagcaagggguaccucuccgcccugcgcaccgggugguacaccagcgugaucaccaucgagcuguccaacaucaaggagaacaagugcaacggcaccgacgccaaggugaagcucaucaagcaggagcuggacaaguacaagaacgcggucacggagcugcagaugcucaugugcagcaccccggccgccggguccggcagcgccaucgcguccgggaucgccgugugcaaggugcugcaccuggagggcgaggucaacaagaucaagaacgcccuccugagcaccaacaaggccguggugucccugagcaacggcgucuccgugcucaccuucaaggugcuggaccugaagaacuacaucgacaagcagcuccugcccauccugaacaagcagagcugcuccaucagcaacaucgagacggucauggaguuccagcagaagaacaaccggcuccuggagaucacccgcgaguucuccgugaacgccggggugaccacccccgucagcacguacaugcugaccaacagcgagcuccugucccugaucaacgacaugcccaucaccaacgaccagaagaagcucaugagcaacaacgugcagaucgugcggcagcaguccuacagcaucaugugcaucaucaaggaggagguccuggcguacguggugcagcugccgcucuacggcgucaucgacacccccugcuggaagcugcacacgagcccccugugcaccaccaacaccaaggaggggagcaacaucugccucacgcgcaccgaccggggcugguacugcgacaacgccggguccgugagcuucuucccccaggccgagaccugcaaggugugcuccaaccgcgucuucugcgacaccaugaacagccugacgcugccguccgaggugaaccucugcaacaucgacaucuucaaccccaaguacgacugcaagaucaugaccagcaagaccgacgucuccagcuccgugaucaccagccugggcgccaucguguccugcuacggcaagacgaagugcaccgccagcaacaagaacaaggggaucaucaagaccuucuccaacggcugcgacuacgucagcaacaaggggguggacaccgugagcgucggcaacacgcuguacuacgugaacaagcaggagggcaagucccucuacgugaagggggagcccaucaucaacuucuacgacccccuggucuucccgagcgacgaguucgacgcguccaucagccaggugaacgagaagaucaaccagucccuggccuucauccggaaguccgacgagcuccugcacaacgugaacgucggcaaguccaccaccaacaucaugaucaccaccaucaucaucgugaucaucgugauccugcuccugcugaucgccgucggccucuuccuguacugcaaggcccgcugaggacuagucccuguucccagagcccacuuuuuuuucuuuuuuugaaauaaaauagccugucuuucagaucuaaaaaaaaaaaaaaaaaaaaaaaaaaaaaaaaaaaaaaaaaaaaaaaaaaaaaaaaaaaaaaaaugcaucccccccccccccccccccccccccccccccaaaggcucuuuucagagccaccagaauu

SEQ ID NO: 18868 - RNA, 1843 nt, Artificial Sequence
  mRNA product Design d-1 comprising derived and/or modified sequence from HRSV(Memphis-37)__AIY60640.1__F-del_DSCav1_mut7 (opt2)
gggagacccgugacccggaaguuguacggcuacgcgacuuucccucccacaaacccucgcgcccuuccuuuccuacuugggcccggcagaaagcuuaccauggagcuccccauccucaagaccaacgccaucaccaccauccucgccgccgucacccucugcuucgccuccucccagaacaucaccgaggaguucuaccaguccaccugcuccgccgucuccaagggcuaccucuccgcccuccgcaccggcugguacaccuccgucaucaccaucgagcucuccaacaucaaggagaacaagugcaacggcaccgacgccaaggucaagcucaucaagcaggagcucgacaaguacaagaacgccgucaccgagcuccagaugcucaugugcuccacccccgccgccggcuccggcuccgccaucgccuccggcaucgccgucugcaagguccuccaccucgagggcgaggucaacaagaucaagaacgcccuccucuccaccaacaaggccgucgucucccucuccaacggcgucuccguccucaccuucaagguccucgaccucaagaacuacaucgacaagcagcuccuccccauccucaacaagcaguccugcuccaucuccaacaucgagaccgucauggaguuccagcagaagaacaaccgccuccucgagaucacccgcgaguucuccgucaacgccggcgucaccacccccgucuccaccuacaugcucaccaacuccgagcuccucucccucaucaacgacaugcccaucaccaacgaccagaagaagcucauguccaacaacguccagaucguccgccagcaguccuacuccaucaugugcaucaucaaggaggagguccucgccuacgucguccagcucccccucuacggcgucaucgacacccccugcuggaagcuccacaccuccccccucugcaccaccaacaccaaggagggcuccaacaucugccucacccgcaccgaccgcggcugguacugcgacaacgccggcuccgucuccuucuucccccaggccgagaccugcaaggucugcuccaaccgcgucuucugcgacaccaugaacucccucacccuccccuccgaggucaaccucugcaacaucgacaucuucaaccccaaguacgacugcaagaucaugaccuccaagaccgacgucuccuccuccgucaucaccucccucggcgccaucgucuccugcuacggcaagaccaagugcaccgccuccaacaagaacaagggcaucaucaagaccuucuccaacggcugcgacuacgucuccaacaagggcgucgacaccgucuccgucggcaacacccucuacuacgucaacaagcaggagggcaagucccucuacgucaagggcgagcccaucaucaacuucuacgacccccucgucuuccccuccgacgaguucgacgccuccaucucccaggucaacgagaagaucaaccagucccucgccuucauccgcaaguccgacgagcuccuccacaacgucaacgucggcaaguccaccaccaacaucaugaucaccaccaucaucaucgucaucaucgucauccuccuccuccucaucgccgucggccucuuccucuacugcaaggcccgcugaggacuagucccuguucccagagcccacuuuuuuuucuuuuuuugaaauaaaauagccugucuuucagaucuaaaaaaaaaaaaaaaaaaaaaaaaaaaaaaaaaaaaaaaaaaaaaaaaaaaaaaaaaaaaaaaaugcaucccccccccccccccccccccccccccccccaaaggcucuuuucagagccaccagaauu

SEQ ID NO: 18869 - RNA, 1843 nt, Artificial Sequence
  mRNA product Design d-1 comprising derived and/or modified sequence from HRSV(Memphis-37)__AIY60640.1__F-del_DSCav1_mut7 (opt3)
gggagacccgugacccggaaguuguacggcuacgcgacuuucccucccacaaacccucgcgcccuuccuuuccuacuugggcccggcagaaagcuuaccauggagcugcccauccucaagaccaacgccauuacaacuauacuugcugcagugacgcugugcuucgccagcucccagaauaucaccgaagaguuuuaccaaucuacauguucagcggucaguaaaggcuauuugagcgcuuuaagaacugggugguacaccuccguuauuacaaucgaacugucuaacauuaaggagaauaaaugcaacggaaccgacgccaaggugaaacuaaucaagcaggaacucgauaaguauaaaaaugcaguaacugagcugcagaugcuuauguguucgaccccugccgcugguucaggcagcgcaauagccagugggaucgcugugugcaagguccugcacuuggagggagaagugaacaaaauuaagaaugcccuccuguccacaaacaaagcgguugugucucugagcaauggcgucuccgugcucacguucaagguauuagaccugaagaacuacaucgauaaacagcuuuugccaauucugaauaagcaaucauguaguaucagcaacauagagacuguuauggaauuucagcagaaaaauaacaggcuacucgagauuacccgggaguucucugugaaugccggugucacaacuccgguguccaccuauaugcugacaaacucagaacuucugagcuugaucaacgacaugcccauuaccaaugaucagaagaaacucaugaguaacaaugugcaaaucguccgccagcagucuuacuccaucaugugcauuauaaaggaggaaguucuggcauaugugguacaguuaccucuguacggggugaucgacacgccauguuggaaacuccauacuagcccccuuugcacaaccaacacuaaggagggaucgaauauuugucugacacgaaccgaucguggcugguacugcgacaacgcuggcucugucuccuuuuucccucaagccgaaacguguaaggugugcucaaauagaguguuuugcgauaccaugaacaguuugacacuaccaagcgagguuaaucuguguaacaucgacauauucaaucccaaauaugauugcaagauuaugacuuccaaaaccgacgucucuagcucagugaucacaagucucggggcaaucguauccuguuacggaaagacuaaaugcaccgcuagcaacaagaauaaggguauuaucaaaacauuuucuaacggcugugauuauguuucaaauaaggggguggacaccgucagugugggaaacacucuguacuaugucaacaaacaggagggcaagagccuuuacgugaaaggugaaccuauuauaaauuucuaugacccacugguuuuuccguccgaugaguucgacgccucuaucagccaggugaacgaaaagauuaaucaaucguuggcguuuaucaggaaguccgaugagcuccugcacaacguaaaugucgggaaaucaacgacaaacaucaugauuaccacuauaaucauugugaucauuguuaucuuacugcuacucauagccgugggacuguuccuuuacugcaaggcacggugaggacuagucccuguucccagagcccacuuuuuuuucuuuuuuugaaauaaaauagccugucuuucagaucuaaaaaaaaaaaaaaaaaaaaaaaaaaaaaaaaaaaaaaaaaaaaaaaaaaaaaaaaaaaaaaaaugcaucccccccccccccccccccccccccccccccaaaggcucuuuucagagccaccagaauu

SEQ ID NO: 18870 - RNA, 1843 nt, Artificial Sequence
  mRNA product Design d-1 comprising derived and/or modified sequence from HRSV(Memphis-37)__AIY60640.1__F-del_DSCav1_mut7 (opt4)
gggagacccgugacccggaaguuguacggcuacgcgacuuucccucccacaaacccucgcgcccuuccuuuccuacuugggcccggcagaaagcuuaccauggagcugcccauccugaagaccaacgccaucaccaccauccuggccgccgugacccugugcuucgccagcagccagaacaucaccgaggaguucuaccagagcaccugcagcgccgugagcaagggcuaccugagcgcccugagaaccggcugguacaccagcgugaucaccaucgagcugagcaacaucaaggagaacaagugcaacggcaccgacgccaaggugaagcugaucaagcaggagcuggacaaguacaagaacgccgugaccgagcugcagaugcugaugugcagcacccccgccgccggcagcggcagcgccaucgccagcggcaucgccgugugcaaggugcugcaccuggagggcgaggugaacaagaucaagaacgcccugcugagcaccaacaaggccguggugagccugagcaacggcgugagcgugcugaccuucaaggugcuggaccugaagaacuacaucgacaagcagcugcugcccauccugaacaagcagagcugcagcaucagcaacaucgagaccgugauggaguuccagcagaagaacaacagacugcuggagaucaccagagaguucagcgugaacgccggcgugaccacccccgugagcaccuacaugcugaccaacagcgagcugcugagccugaucaacgacaugcccaucaccaacgaccagaagaagcugaugagcaacaacgugcagaucgugagacagcagagcuacagcaucaugugcaucaucaaggaggaggugcuggccuacguggugcagcugccccuguacggcgugaucgacacccccugcuggaagcugcacaccagcccccugugcaccaccaacaccaaggagggcagcaacaucugccugaccagaaccgacagaggcugguacugcgacaacgccggcagcgugagcuucuucccccaggccgagaccugcaaggugugcagcaacagaguguucugcgacaccaugaacagccugacccugcccagcgaggugaaccugugcaacaucgacaucuucaaccccaaguacgacugcaagaucaugaccagcaagaccgacgugagcagcagcgugaucaccagccugggcgccaucgugagcugcuacggcaagaccaagugcaccgccagcaacaagaacaagggcaucaucaagaccuucagcaacggcugcgacuacgugagcaacaagggcguggacaccgugagcgugggcaacacccuguacuacgugaacaagcaggagggcaagagccuguacgugaagggcgagcccaucaucaacuucuacgacccccugguguuccccagcgacgaguucgacgccagcaucagccaggugaacgagaagaucaaccagagccuggccuucaucagaaagagcgacgagcugcugcacaacgugaacgugggcaagagcaccaccaacaucaugaucaccaccaucaucaucgugaucaucgugauccugcugcugcugaucgccgugggccuguuccuguacugcaaggccagaugaggacuagucccuguucccagagcccacuuuuuuuucuuuuuuugaaauaaaauagccugucuuucagaucuaaaaaaaaaaaaaaaaaaaaaaaaaaaaaaaaaaaaaaaaaaaaaaaaaaaaaaaaaaaaaaaaugcaucccccccccccccccccccccccccccccccaaaggcucuuuucagagccaccagaauu

SEQ ID NO: 18871 - RNA, 1843 nt, Artificial Sequence
  mRNA product Design d-1 comprising derived and/or modified sequence from HRSV(Memphis-37)__AIY60640.1__F-del_DSCav1_mut7 (opt5)
gggagacccgugacccggaaguuguacggcuacgcgacuuucccucccacaaacccucgcgcccuuccuuuccuacuugggcccggcagaaagcuuaccauggagcugcccauccucaagaccaacgccauuacaacgauccuggcugccgugacccuuugcuucgcgagcucccagaauauuacagaagaguuuuaccaaucuaccuguagcgcugucuccaaaggcuaucugucugcccucagaacagggugguacaccagcguuaucacaauugaacuguccaacaucaaggagaauaaaugcaacggaaccgacgccaaggugaaacuuaucaagcaggaacuggauaaguauaaaaaugcugugacggagcuccagaugcugauguguucuaccccugccgcuggcagcggguccgccauugcgagcggaaucgccgucugcaaggugcugcaccucgagggcgaaguuaacaaaauuaagaaugcucugcuuucuacaaacaaagccguggucucccugagcaauggggugucuguucucaccuucaaggugcuggaccuuaagaacuacaucgauaaacagcugcucccgauucugaauaagcaauccuguagcaucucuaacauugagacagucauggaauuucagcagaaaaauaaccggcugcucgagaucacccgcgaguucuccgugaaugcuggagugacgacacccgucagcaccuauaugcugacaaacuccgaacuucugucucucaucaacgacaugccuauuaccaaugaucagaagaaacugaugagcaacaauguucaaaucgugagacagcaguccuacagcauuaugugcaucauuaaggaggaagugcuugccuaugucgugcagcugccccucuacggcguuaucgacaccccuuguuggaaacugcauacaucuccccugugcacgaccaacacaaaggagggcuccaauaucugucucacccggacagaucgcgggugguacugcgacaacgcgggaagcgugagcuuuuucccucaagccgaaaccuguaaggucugcucuaauagaguguuuugcgauacgaugaacucccugacacuuccgucugagguuaaucuguguaacauugacaucuucaaucccaaauaugauugcaagauuaugaccagcaaaaccgacguguccagcucugucaucacaucccucggcgcuauugugagcuguuacgggaagaccaaaugcacagccucuaacaagaauaagggaaucaucaaaacguuuuccaacggcugugauuaugucagcaauaaggggguggacaccguuuccgugggaaacacacuguacuaugucaacaaacaggagggcaagucucuuuacgugaaaggcgaaccuauuaucaauuucuaugacccccugguuuuuccuagcgaugaguucgacgcuuccauuucucaggugaacgaaaagaucaaucaaagccucgccuuuauucggaaguccgaugagcugcugcacaacgucaauguggggaaaagcaccacaaacaucaugauuaccacgaucaucauugugaucauuguuauccuccugcuucugauugccgucggacucuuccuguacugcaaggcucgcugaggacuagucccuguucccagagcccacuuuuuuuucuuuuuuugaaauaaaauagccugucuuucagaucuaaaaaaaaaaaaaaaaaaaaaaaaaaaaaaaaaaaaaaaaaaaaaaaaaaaaaaaaaaaaaaaaugcaucccccccccccccccccccccccccccccccaaaggcucuuuucagagccaccagaauu

SEQ ID NO: 18872 - RNA, 1843 nt, Artificial Sequence
  mRNA product Design d-1 comprising derived and/or modified sequence from HRSV(Memphis-37)__AIY60640.1__F-del_DSCav1_mut7 (opt6)
gggagacccgugacccggaaguuguacggcuacgcgacuuucccucccacaaacccucgcgcccuuccuuuccuacuugggcccggcagaaagcuuaccauggaacuaccaauacucaaaacaaacgccauaaccacaauacuagccgcaguaacacuuugcuuugccucaagucaaaacauaacagaagaauuuuaccaauccacaugcucagcuguauccaaaggauauuuauccgcacuaagaacaggaugguacacaucaguaaucacaauagaauuaucaaacauaaaagaaaacaaauguaauggcacagacgccaaaguaaaacuaauuaaacaagaacuagacaaauauaaaaaugcaguaaccgaacuccaaaugcucaugugcucuacaccagcugcaggaucaggaucagccauugcaagcgguauagcuguuugcaaaguauuacacuuagaaggagaaguaaauaaaauaaaaaacgcacuacuaucaacaaauaaagcaguaguaucccuaucaaacggaguaucaguacuuacauucaaaguauuagauuuaaaaaacuauauagacaaacaacuacuucccauauuaaacaaacaaucaugcucaauuuccaacauugaaacuguaauggaauuucaacaaaaaaacaacagacuacuugaaaucacacgagaauuuucaguaaacgcuggaguaacaacaccugucucuaccuacaugcucacaaauagcgaauuacuaucucuaaucaaugacaugccaauaacaaacgaucaaaaaaaacuaauguccaacaacguacaaauaguaagacaacaauccuauucaauaaugugcauaauaaaagaagaagucuuagcauacguuguacaacuaccauuauacggaguaauagauacaccaugcuggaaacuccacacaagcccccucugcacaacaaacaccaaagaagggucaaacauaugcuuaacaagaacagacagaggaugguacugugauaacgcaggaucugucucauucuuuccacaagcagaaacauguaaaguaugcuccaacagagucuuuugcgacaccaugaacucacuaaccuuacccucagaaguaaaccugugcaacaucgauaucuucaaccccaaauacgauugcaaaaucaugacaagcaaaacugauguauccagcucuguaauaacaucacuaggugcaauaguaucaugcuacggaaaaacaaaaugcacagcuucuaacaaaaauaaaggaauaauaaaaacauucuccaauggaugcgacuaugucucaaauaaaggaguagauacaguuucagucggcaacacacucuauuauguaaauaaacaagaaggaaaaucauuauacguaaaaggagaacccauaauaaacuucuacgacccccucguauucccaagcgacgaauuugacgccucaauaucacaaguaaacgaaaaaauaaaccaaucacucgcauucaucagaaaaucagaugaacuacuacacaauguaaacgucggaaaauccaccacaaauauaaugauaacuaccaucauaauaguaauaauagucaucuuacuacuauuaaucgcuguaggacuauuucucuacugcaaggccagauaaggacuagucccuguucccagagcccacuuuuuuuucuuuuuuugaaauaaaauagccugucuuucagaucuaaaaaaaaaaaaaaaaaaaaaaaaaaaaaaaaaaaaaaaaaaaaaaaaaaaaaaaaaaaaaaaaugcaucccccccccccccccccccccccccccccccaaaggcucuuuucagagccaccagaauu

SEQ ID NO: 18873 - RNA, 1843 nt, Artificial Sequence
  mRNA product Design d-1 comprising derived and/or modified sequence from HRSV(Memphis-37)__AIY60640.1__F-del_DSCav1_mut7 (opt11)
gggagacccgugacccggaaguuguacggcuacgcgacuuucccucccacaaacccucgcgcccuuccuuuccuacuugggcccggcagaaagcuuaccauggaacucccaauccucaaaacaaaugccaucaccaccauccuagccgcugucacacuaugcuucgccuccucacaaaacaucaccgaagaguucuaucaauccacaugcuccgccgucagcaagggauaccucuccgcccuuagaaccggcugguacaccucagucaucacaauugaacugucaaacaucaaagaaaacaaaugcaacggcaccgacgcaaaaguaaagcucaucaaacaagaacuggacaaguacaagaacgccgucaccgaacuacagaugcuuaugugcucaaccccugccgccggcuccggaucugccauagcuucaggcaucgccguaugcaaaguccugcaccuagaaggggaagucaacaaaaucaaaaacgcccuccucuccaccaacaaggccguugucucccugucaaacggagucuccguccuaaccuucaaaguccucgaccucaaaaacuacauagacaaacaacuccuacccauccucaacaaacaaagcugcucaauauccaacaucgaaaccgucauggaguuccaacaaaagaacaaccgacuacucgaaauaacacgcgaguucucagucaacgccggcgucaccaccccagucuccacauacaugcucaccaacuccgaacuccuaucgcucaucaacgacaugcccaucaccaaugaccagaagaaacucauguccaacaacguacaaaucguccgccaacaguccuacucaaucaugugcaucaucaaagaagaaguccuugccuacgucguccagcuuccacucuacggagucaucgacacccccugcuggaaacuccacaccuccccacuaugcaccaccaacaccaaagaaggauccaacauaugccucacccguacugaccgcggcugguacugcgacaacgccggauccgucucauucuucccccaggccgaaaccugcaaagucugcuccaaccgcgucuucugcgacaccaugaacucgcucacccucccauccgaagucaaucuaugcaacaucgacauuuucaaccccaaauacgacugcaaaauuaugacaucaaaaaccgacgucucauccucagucaucacuucccucggcgcaaucguaagcugcuacgggaaaacaaagugcaccgcuuccaacaaaaacaaaggcaucaucaaaaccuucucuaacggcugcgacuacgucuccaacaaaggagucgacaccguauccgucggcaacacccucuacuacgucaacaaacaggaaggaaaaucgcucuacgucaaaggagaaccaaucaucaacuucuacgacccccuagucuucccauccgacgaguucgacgccagcaucucacaagucaaugaaaagaucaaccagucacucgcauucauccguaagucagacgaacuccuacacaacgucaacgucggcaagucaacaaccaacauaaugaucaccaccauaaucaucgucauaauaguaauccuccuucuccuaaucgcagucggccucuuccucuacugcaaagcacgcuaaggacuagucccuguucccagagcccacuuuuuuuucuuuuuuugaaauaaaauagccugucuuucagaucuaaaaaaaaaaaaaaaaaaaaaaaaaaaaaaaaaaaaaaaaaaaaaaaaaaaaaaaaaaaaaaaaugcaucccccccccccccccccccccccccccccccaaaggcucuuuucagagccaccagaauu

SEQ ID NO: 18874 - RNA, 1898 nt, Artificial Sequence
  mRNA product Design d-2 comprising derived and/or modified sequence from HRSV(Memphis-37)__AIY60640.1__F-del_DSCav1_mut7 (opt1)
gggagagcggcucggccauuuugucccagucaguccggaggcugcggcugcagaaguaccgccugcggaguaacugcaaagaagcuuaccauggagcugcccauccucaagaccaacgccaucaccacgauccuggccgcggugacccugugcuucgccagcucccagaacaucaccgaggaguucuaccagagcacgugcuccgccgucagcaagggcuaccucuccgcccugcgcaccgggugguacaccagcgugaucaccaucgagcuguccaacaucaaggagaacaagugcaacggcaccgacgccaaggugaagcucaucaagcaggagcuggacaaguacaagaacgcggucacggagcugcagaugcugaugugcagcaccccggccgccggcuccgggagcgcgaucgccuccggcaucgccgucugcaaggugcugcaccucgagggcgaggugaacaagaucaagaacgcccugcuguccaccaacaaggccgucgugagccucuccaacggggugagcguccugaccuucaaggugcuggaccucaagaacuacaucgacaagcagcugcugcccauccugaacaagcagagcugcuccaucagcaacaucgagaccgucauggaguuccagcagaagaacaaccgccuccuggagaucacgcgggaguucagcgugaacgcgggcgugaccacccccgucuccaccuacaugcugacgaacagcgagcuccugucccugaucaacgacaugccgaucaccaacgaccagaagaagcucaugagcaacaacgugcagaucgugcgccagcaguccuacagcaucaugugcaucaucaaggaggagguccuggccuacguggugcagcugccccucuacggggucaucgacacccccugcuggaagcugcacaccagcccccugugcacgaccaacaccaaggagggcuccaacaucugccucacccggacggaccgcgggugguacugcgacaacgccggcagcguguccuucuucccgcaggccgagaccugcaaggucugcagcaaccggguguucugcgacaccaugaacucccugacccugcccagcgaggugaaccucugcaacaucgacaucuucaaccccaaguacgacugcaagaucaugacguccaagaccgacgucagcuccagcgugaucaccucccugggcgccaucgugagcugcuacgggaagaccaagugcacggcgagcaacaagaacaagggcaucaucaagaccuucuccaacgggugcgacuacgucagcaacaagggcguggacaccguguccgucggcaacacccuguacuacgugaacaagcaggagggcaagagccucuacgugaagggggagcccaucaucaacuucuacgacccgcuggucuuccccuccgacgaguucgacgccagcaucucccaggugaacgagaagaucaaccagagccuggccuucauccggaaguccgacgagcuccugcacaacgugaacgucggcaagagcaccacgaacaucaugaucaccaccaucaucaucgugaucaucgugauccugcugcuccugaucgccgucgggcuguuccucuacugcaaggcccgcugaggacuaguaauaaggaaacuguaugaaugucugugggcaggaagugaagagauccuucuguaaagguuuuuggaauuaugucugcugaauaauaaacuuuuuugaaauaauaaaucugguagaaaaaugagaucuaaaaaaaaaaaaaaaaaaaaaaaaaaaaaaaaaaaaaaaaaaaaaaaaaaaaaaaaaaaaaaaaugcaucccccccccccccccccccccccccccccccaaaggcucuuuucagagccaccagaauu

SEQ ID NO: 18875 - RNA, 1898 nt, Artificial Sequence
  mRNA product Design d-2 comprising derived and/or modified sequence from HRSV(Memphis-37)__AIY60640.1__F-del_DSCav1_mut7 (opt1)
gggagagcggcucggccauuuugucccagucaguccggaggcugcggcugcagaaguaccgccugcggaguaacugcaaagaagcuuaccauggagcugcccauccucaagaccaacgccaucaccacgauccuggccgcggugacccugugcuucgccagcucccagaacaucaccgaggaguucuaccagagcacgugcuccgccgucagcaagggguaccucuccgcccugcgcaccgggugguacaccagcgugaucaccaucgagcuguccaacaucaaggagaacaagugcaacggcaccgacgccaaggugaagcucaucaagcaggagcuggacaaguacaagaacgcggucacggagcugcagaugcucaugugcagcaccccggccgccggguccggcagcgccaucgcguccgggaucgccgugugcaaggugcugcaccuggagggcgaggucaacaagaucaagaacgcccuccugagcaccaacaaggccguggugucccugagcaacggcgucuccgugcucaccuucaaggugcuggaccugaagaacuacaucgacaagcagcuccugcccauccugaacaagcagagcugcuccaucagcaacaucgagacggucauggaguuccagcagaagaacaaccggcuccuggagaucacccgcgaguucuccgugaacgccggggugaccacccccgucagcacguacaugcugaccaacagcgagcuccugucccugaucaacgacaugcccaucaccaacgaccagaagaagcucaugagcaacaacgugcagaucgugcggcagcaguccuacagcaucaugugcaucaucaaggaggagguccuggcguacguggugcagcugccgcucuacggcgucaucgacacccccugcuggaagcugcacacgagcccccugugcaccaccaacaccaaggaggggagcaacaucugccucacgcgcaccgaccggggcugguacugcgacaacgccggguccgugagcuucuucccccaggccgagaccugcaaggugugcuccaaccgcgucuucugcgacaccaugaacagccugacgcugccguccgaggugaaccucugcaacaucgacaucuucaaccccaaguacgacugcaagaucaugaccagcaagaccgacgucuccagcuccgugaucaccagccugggcgccaucguguccugcuacggcaagacgaagugcaccgccagcaacaagaacaaggggaucaucaagaccuucuccaacggcugcgacuacgucagcaacaaggggguggacaccgugagcgucggcaacacgcuguacuacgugaacaagcaggagggcaagucccucuacgugaagggggagcccaucaucaacuucuacgacccccuggucuucccgagcgacgaguucgacgcguccaucagccaggugaacgagaagaucaaccagucccuggccuucauccggaaguccgacgagcuccugcacaacgugaacgucggcaaguccaccaccaacaucaugaucaccaccaucaucaucgugaucaucgugauccugcuccugcugaucgccgucggccucuuccuguacugcaaggcccgcugaggacuaguaauaaggaaacuguaugaaugucugugggcaggaagugaagagauccuucuguaaagguuuuuggaauuaugucugcugaauaauaaacuuuuuugaaauaauaaaucugguagaaaaaugagaucuaaaaaaaaaaaaaaaaaaaaaaaaaaaaaaaaaaaaaaaaaaaaaaaaaaaaaaaaaaaaaaaaugcaucccccccccccccccccccccccccccccccaaaggcucuuuucagagccaccagaauu

SEQ ID NO: 18876 - RNA, 1898 nt, Artificial Sequence
  mRNA product Design d-2 comprising derived and/or modified sequence from HRSV(Memphis-37)__AIY60640.1__F-del_DSCav1_mut7 (opt2)
gggagagcggcucggccauuuugucccagucaguccggaggcugcggcugcagaaguaccgccugcggaguaacugcaaagaagcuuaccauggagcuccccauccucaagaccaacgccaucaccaccauccucgccgccgucacccucugcuucgccuccucccagaacaucaccgaggaguucuaccaguccaccugcuccgccgucuccaagggcuaccucuccgcccuccgcaccggcugguacaccuccgucaucaccaucgagcucuccaacaucaaggagaacaagugcaacggcaccgacgccaaggucaagcucaucaagcaggagcucgacaaguacaagaacgccgucaccgagcuccagaugcucaugugcuccacccccgccgccggcuccggcuccgccaucgccuccggcaucgccgucugcaagguccuccaccucgagggcgaggucaacaagaucaagaacgcccuccucuccaccaacaaggccgucgucucccucuccaacggcgucuccguccucaccuucaagguccucgaccucaagaacuacaucgacaagcagcuccuccccauccucaacaagcaguccugcuccaucuccaacaucgagaccgucauggaguuccagcagaagaacaaccgccuccucgagaucacccgcgaguucuccgucaacgccggcgucaccacccccgucuccaccuacaugcucaccaacuccgagcuccucucccucaucaacgacaugcccaucaccaacgaccagaagaagcucauguccaacaacguccagaucguccgccagcaguccuacuccaucaugugcaucaucaaggaggagguccucgccuacgucguccagcucccccucuacggcgucaucgacacccccugcuggaagcuccacaccuccccccucugcaccaccaacaccaaggagggcuccaacaucugccucacccgcaccgaccgcggcugguacugcgacaacgccggcuccgucuccuucuucccccaggccgagaccugcaaggucugcuccaaccgcgucuucugcgacaccaugaacucccucacccuccccuccgaggucaaccucugcaacaucgacaucuucaaccccaaguacgacugcaagaucaugaccuccaagaccgacgucuccuccuccgucaucaccucccucggcgccaucgucuccugcuacggcaagaccaagugcaccgccuccaacaagaacaagggcaucaucaagaccuucuccaacggcugcgacuacgucuccaacaagggcgucgacaccgucuccgucggcaacacccucuacuacgucaacaagcaggagggcaagucccucuacgucaagggcgagcccaucaucaacuucuacgacccccucgucuuccccuccgacgaguucgacgccuccaucucccaggucaacgagaagaucaaccagucccucgccuucauccgcaaguccgacgagcuccuccacaacgucaacgucggcaaguccaccaccaacaucaugaucaccaccaucaucaucgucaucaucgucauccuccuccuccucaucgccgucggccucuuccucuacugcaaggcccgcugaggacuaguaauaaggaaacuguaugaaugucugugggcaggaagugaagagauccuucuguaaagguuuuuggaauuaugucugcugaauaauaaacuuuuuugaaauaauaaaucugguagaaaaaugagaucuaaaaaaaaaaaaaaaaaaaaaaaaaaaaaaaaaaaaaaaaaaaaaaaaaaaaaaaaaaaaaaaaugcaucccccccccccccccccccccccccccccccaaaggcucuuuucagagccaccagaauu

SEQ ID NO: 18877 - RNA, 1898 nt, Artificial Sequence
  mRNA product Design d-2 comprising derived and/or modified sequence from HRSV(Memphis-37)__AIY60640.1__F-del_DSCav1_mut7 (opt3)
gggagagcggcucggccauuuugucccagucaguccggaggcugcggcugcagaaguaccgccugcggaguaacugcaaagaagcuuaccauggagcugcccauccucaagaccaacgccauuacaacuauacuugcugcagugacgcugugcuucgccagcucccagaauaucaccgaagaguuuuaccaaucuacauguucagcggucaguaaaggcuauuugagcgcuuuaagaacugggugguacaccuccguuauuacaaucgaacugucuaacauuaaggagaauaaaugcaacggaaccgacgccaaggugaaacuaaucaagcaggaacucgauaaguauaaaaaugcaguaacugagcugcagaugcuuauguguucgaccccugccgcugguucaggcagcgcaauagccagugggaucgcugugugcaagguccugcacuuggagggagaagugaacaaaauuaagaaugcccuccuguccacaaacaaagcgguugugucucugagcaauggcgucuccgugcucacguucaagguauuagaccugaagaacuacaucgauaaacagcuuuugccaauucugaauaagcaaucauguaguaucagcaacauagagacuguuauggaauuucagcagaaaaauaacaggcuacucgagauuacccgggaguucucugugaaugccggugucacaacuccgguguccaccuauaugcugacaaacucagaacuucugagcuugaucaacgacaugcccauuaccaaugaucagaagaaacucaugaguaacaaugugcaaaucguccgccagcagucuuacuccaucaugugcauuauaaaggaggaaguucuggcauaugugguacaguuaccucuguacggggugaucgacacgccauguuggaaacuccauacuagcccccuuugcacaaccaacacuaaggagggaucgaauauuugucugacacgaaccgaucguggcugguacugcgacaacgcuggcucugucuccuuuuucccucaagccgaaacguguaaggugugcucaaauagaguguuuugcgauaccaugaacaguuugacacuaccaagcgagguuaaucuguguaacaucgacauauucaaucccaaauaugauugcaagauuaugacuuccaaaaccgacgucucuagcucagugaucacaagucucggggcaaucguauccuguuacggaaagacuaaaugcaccgcuagcaacaagaauaaggguauuaucaaaacauuuucuaacggcugugauuauguuucaaauaaggggguggacaccgucagugugggaaacacucuguacuaugucaacaaacaggagggcaagagccuuuacgugaaaggugaaccuauuauaaauuucuaugacccacugguuuuuccguccgaugaguucgacgccucuaucagccaggugaacgaaaagauuaaucaaucguuggcguuuaucaggaaguccgaugagcuccugcacaacguaaaugucgggaaaucaacgacaaacaucaugauuaccacuauaaucauugugaucauuguuaucuuacugcuacucauagccgugggacuguuccuuuacugcaaggcacggugaggacuaguaauaaggaaacuguaugaaugucugugggcaggaagugaagagauccuucuguaaagguuuuuggaauuaugucugcugaauaauaaacuuuuuugaaauaauaaaucugguagaaaaaugagaucuaaaaaaaaaaaaaaaaaaaaaaaaaaaaaaaaaaaaaaaaaaaaaaaaaaaaaaaaaaaaaaaaugcaucccccccccccccccccccccccccccccccaaaggcucuuuucagagccaccagaauu

SEQ ID NO: 18878 - RNA, 1898 nt, Artificial Sequence
  mRNA product Design d-2 comprising derived and/or modified sequence from HRSV(Memphis-37)__AIY60640.1__F-del_DSCav1_mut7 (opt4)
gggagagcggcucggccauuuugucccagucaguccggaggcugcggcugcagaaguaccgccugcggaguaacugcaaagaagcuuaccauggagcugcccauccugaagaccaacgccaucaccaccauccuggccgccgugacccugugcuucgccagcagccagaacaucaccgaggaguucuaccagagcaccugcagcgccgugagcaagggcuaccugagcgcccugagaaccggcugguacaccagcgugaucaccaucgagcugagcaacaucaaggagaacaagugcaacggcaccgacgccaaggugaagcugaucaagcaggagcuggacaaguacaagaacgccgugaccgagcugcagaugcugaugugcagcacccccgccgccggcagcggcagcgccaucgccagcggcaucgccgugugcaaggugcugcaccuggagggcgaggugaacaagaucaagaacgcccugcugagcaccaacaaggccguggugagccugagcaacggcgugagcgugcugaccuucaaggugcuggaccugaagaacuacaucgacaagcagcugcugcccauccugaacaagcagagcugcagcaucagcaacaucgagaccgugauggaguuccagcagaagaacaacagacugcuggagaucaccagagaguucagcgugaacgccggcgugaccacccccgugagcaccuacaugcugaccaacagcgagcugcugagccugaucaacgacaugcccaucaccaacgaccagaagaagcugaugagcaacaacgugcagaucgugagacagcagagcuacagcaucaugugcaucaucaaggaggaggugcuggccuacguggugcagcugccccuguacggcgugaucgacacccccugcuggaagcugcacaccagcccccugugcaccaccaacaccaaggagggcagcaacaucugccugaccagaaccgacagaggcugguacugcgacaacgccggcagcgugagcuucuucccccaggccgagaccugcaaggugugcagcaacagaguguucugcgacaccaugaacagccugacccugcccagcgaggugaaccugugcaacaucgacaucuucaaccccaaguacgacugcaagaucaugaccagcaagaccgacgugagcagcagcgugaucaccagccugggcgccaucgugagcugcuacggcaagaccaagugcaccgccagcaacaagaacaagggcaucaucaagaccuucagcaacggcugcgacuacgugagcaacaagggcguggacaccgugagcgugggcaacacccuguacuacgugaacaagcaggagggcaagagccuguacgugaagggcgagcccaucaucaacuucuacgacccccugguguuccccagcgacgaguucgacgccagcaucagccaggugaacgagaagaucaaccagagccuggccuucaucagaaagagcgacgagcugcugcacaacgugaacgugggcaagagcaccaccaacaucaugaucaccaccaucaucaucgugaucaucgugauccugcugcugcugaucgccgugggccuguuccuguacugcaaggccagaugaggacuaguaauaaggaaacuguaugaaugucugugggcaggaagugaagagauccuucuguaaagguuuuuggaauuaugucugcugaauaauaaacuuuuuugaaauaauaaaucugguagaaaaaugagaucuaaaaaaaaaaaaaaaaaaaaaaaaaaaaaaaaaaaaaaaaaaaaaaaaaaaaaaaaaaaaaaaaugcaucccccccccccccccccccccccccccccccaaaggcucuuuucagagccaccagaauu

SEQ ID NO: 18879 - RNA, 1898 nt, Artificial Sequence
  mRNA product Design d-2 comprising derived and/or modified sequence from HRSV(Memphis-37)__AIY60640.1__F-del_DSCav1_mut7 (opt5)
gggagagcggcucggccauuuugucccagucaguccggaggcugcggcugcagaaguaccgccugcggaguaacugcaaagaagcuuaccauggagcugcccauccucaagaccaacgccauuacaacgauccuggcugccgugacccuuugcuucgcgagcucccagaauauuacagaagaguuuuaccaaucuaccuguagcgcugucuccaaaggcuaucugucugcccucagaacagggugguacaccagcguuaucacaauugaacuguccaacaucaaggagaauaaaugcaacggaaccgacgccaaggugaaacuuaucaagcaggaacuggauaaguauaaaaaugcugugacggagcuccagaugcugauguguucuaccccugccgcuggcagcggguccgccauugcgagcggaaucgccgucugcaaggugcugcaccucgagggcgaaguuaacaaaauuaagaaugcucugcuuucuacaaacaaagccguggucucccugagcaauggggugucuguucucaccuucaaggugcuggaccuuaagaacuacaucgauaaacagcugcucccgauucugaauaagcaauccuguagcaucucuaacauugagacagucauggaauuucagcagaaaaauaaccggcugcucgagaucacccgcgaguucuccgugaaugcuggagugacgacacccgucagcaccuauaugcugacaaacuccgaacuucugucucucaucaacgacaugccuauuaccaaugaucagaagaaacugaugagcaacaauguucaaaucgugagacagcaguccuacagcauuaugugcaucauuaaggaggaagugcuugccuaugucgugcagcugccccucuacggcguuaucgacaccccuuguuggaaacugcauacaucuccccugugcacgaccaacacaaaggagggcuccaauaucugucucacccggacagaucgcgggugguacugcgacaacgcgggaagcgugagcuuuuucccucaagccgaaaccuguaaggucugcucuaauagaguguuuugcgauacgaugaacucccugacacuuccgucugagguuaaucuguguaacauugacaucuucaaucccaaauaugauugcaagauuaugaccagcaaaaccgacguguccagcucugucaucacaucccucggcgcuauugugagcuguuacgggaagaccaaaugcacagccucuaacaagaauaagggaaucaucaaaacguuuuccaacggcugugauuaugucagcaauaaggggguggacaccguuuccgugggaaacacacuguacuaugucaacaaacaggagggcaagucucuuuacgugaaaggcgaaccuauuaucaauuucuaugacccccugguuuuuccuagcgaugaguucgacgcuuccauuucucaggugaacgaaaagaucaaucaaagccucgccuuuauucggaaguccgaugagcugcugcacaacgucaauguggggaaaagcaccacaaacaucaugauuaccacgaucaucauugugaucauuguuauccuccugcuucugauugccgucggacucuuccuguacugcaaggcucgcugaggacuaguaauaaggaaacuguaugaaugucugugggcaggaagugaagagauccuucuguaaagguuuuuggaauuaugucugcugaauaauaaacuuuuuugaaauaauaaaucugguagaaaaaugagaucuaaaaaaaaaaaaaaaaaaaaaaaaaaaaaaaaaaaaaaaaaaaaaaaaaaaaaaaaaaaaaaaaugcaucccccccccccccccccccccccccccccccaaaggcucuuuucagagccaccagaauu

SEQ ID NO: 18880 - RNA, 1898 nt, Artificial Sequence
  mRNA product Design d-2 comprising derived and/or modified sequence from HRSV(Memphis-37)__AIY60640.1__F-del_DSCav1_mut7 (opt6)
gggagagcggcucggccauuuugucccagucaguccggaggcugcggcugcagaaguaccgccugcggaguaacugcaaagaagcuuaccauggaacuaccaauacucaaaacaaacgccauaaccacaauacuagccgcaguaacacuuugcuuugccucaagucaaaacauaacagaagaauuuuaccaauccacaugcucagcuguauccaaaggauauuuauccgcacuaagaacaggaugguacacaucaguaaucacaauagaauuaucaaacauaaaagaaaacaaauguaauggcacagacgccaaaguaaaacuaauuaaacaagaacuagacaaauauaaaaaugcaguaaccgaacuccaaaugcucaugugcucuacaccagcugcaggaucaggaucagccauugcaagcgguauagcuguuugcaaaguauuacacuuagaaggagaaguaaauaaaauaaaaaacgcacuacuaucaacaaauaaagcaguaguaucccuaucaaacggaguaucaguacuuacauucaaaguauuagauuuaaaaaacuauauagacaaacaacuacuucccauauuaaacaaacaaucaugcucaauuuccaacauugaaacuguaauggaauuucaacaaaaaaacaacagacuacuugaaaucacacgagaauuuucaguaaacgcuggaguaacaacaccugucucuaccuacaugcucacaaauagcgaauuacuaucucuaaucaaugacaugccaauaacaaacgaucaaaaaaaacuaauguccaacaacguacaaauaguaagacaacaauccuauucaauaaugugcauaauaaaagaagaagucuuagcauacguuguacaacuaccauuauacggaguaauagauacaccaugcuggaaacuccacacaagcccccucugcacaacaaacaccaaagaagggucaaacauaugcuuaacaagaacagacagaggaugguacugugauaacgcaggaucugucucauucuuuccacaagcagaaacauguaaaguaugcuccaacagagucuuuugcgacaccaugaacucacuaaccuuacccucagaaguaaaccugugcaacaucgauaucuucaaccccaaauacgauugcaaaaucaugacaagcaaaacugauguauccagcucuguaauaacaucacuaggugcaauaguaucaugcuacggaaaaacaaaaugcacagcuucuaacaaaaauaaaggaauaauaaaaacauucuccaauggaugcgacuaugucucaaauaaaggaguagauacaguuucagucggcaacacacucuauuauguaaauaaacaagaaggaaaaucauuauacguaaaaggagaacccauaauaaacuucuacgacccccucguauucccaagcgacgaauuugacgccucaauaucacaaguaaacgaaaaaauaaaccaaucacucgcauucaucagaaaaucagaugaacuacuacacaauguaaacgucggaaaauccaccacaaauauaaugauaacuaccaucauaauaguaauaauagucaucuuacuacuauuaaucgcuguaggacuauuucucuacugcaaggccagauaaggacuaguaauaaggaaacuguaugaaugucugugggcaggaagugaagagauccuucuguaaagguuuuuggaauuaugucugcugaauaauaaacuuuuuugaaauaauaaaucugguagaaaaaugagaucuaaaaaaaaaaaaaaaaaaaaaaaaaaaaaaaaaaaaaaaaaaaaaaaaaaaaaaaaaaaaaaaaugcaucccccccccccccccccccccccccccccccaaaggcucuuuucagagccaccagaauu

SEQ ID NO: 18881 - RNA, 1898 nt, Artificial Sequence
  mRNA product Design d-2 comprising derived and/or modified sequence from HRSV(Memphis-37)__AIY60640.1__F-del_DSCav1_mut7 (opt11)
gggagagcggcucggccauuuugucccagucaguccggaggcugcggcugcagaaguaccgccugcggaguaacugcaaagaagcuuaccauggaacucccaauccucaaaacaaaugccaucaccaccauccuagccgcugucacacuaugcuucgccuccucacaaaacaucaccgaagaguucuaucaauccacaugcuccgccgucagcaagggauaccucuccgcccuuagaaccggcugguacaccucagucaucacaauugaacugucaaacaucaaagaaaacaaaugcaacggcaccgacgcaaaaguaaagcucaucaaacaagaacuggacaaguacaagaacgccgucaccgaacuacagaugcuuaugugcucaaccccugccgccggcuccggaucugccauagcuucaggcaucgccguaugcaaaguccugcaccuagaaggggaagucaacaaaaucaaaaacgcccuccucuccaccaacaaggccguugucucccugucaaacggagucuccguccuaaccuucaaaguccucgaccucaaaaacuacauagacaaacaacuccuacccauccucaacaaacaaagcugcucaauauccaacaucgaaaccgucauggaguuccaacaaaagaacaaccgacuacucgaaauaacacgcgaguucucagucaacgccggcgucaccaccccagucuccacauacaugcucaccaacuccgaacuccuaucgcucaucaacgacaugcccaucaccaaugaccagaagaaacucauguccaacaacguacaaaucguccgccaacaguccuacucaaucaugugcaucaucaaagaagaaguccuugccuacgucguccagcuuccacucuacggagucaucgacacccccugcuggaaacuccacaccuccccacuaugcaccaccaacaccaaagaaggauccaacauaugccucacccguacugaccgcggcugguacugcgacaacgccggauccgucucauucuucccccaggccgaaaccugcaaagucugcuccaaccgcgucuucugcgacaccaugaacucgcucacccucccauccgaagucaaucuaugcaacaucgacauuuucaaccccaaauacgacugcaaaauuaugacaucaaaaaccgacgucucauccucagucaucacuucccucggcgcaaucguaagcugcuacgggaaaacaaagugcaccgcuuccaacaaaaacaaaggcaucaucaaaaccuucucuaacggcugcgacuacgucuccaacaaaggagucgacaccguauccgucggcaacacccucuacuacgucaacaaacaggaaggaaaaucgcucuacgucaaaggagaaccaaucaucaacuucuacgacccccuagucuucccauccgacgaguucgacgccagcaucucacaagucaaugaaaagaucaaccagucacucgcauucauccguaagucagacgaacuccuacacaacgucaacgucggcaagucaacaaccaacauaaugaucaccaccauaaucaucgucauaauaguaauccuccuucuccuaaucgcagucggccucuuccucuacugcaaagcacgcuaaggacuaguaauaaggaaacuguaugaaugucugugggcaggaagugaagagauccuucuguaaagguuuuuggaauuaugucugcugaauaauaaacuuuuuugaaauaauaaaucugguagaaaaaugagaucuaaaaaaaaaaaaaaaaaaaaaaaaaaaaaaaaaaaaaaaaaaaaaaaaaaaaaaaaaaaaaaaaugcaucccccccccccccccccccccccccccccccaaaggcucuuuucagagccaccagaauu

SEQ ID NO: 18882 - RNA, 2214 nt, Artificial Sequence
  mRNA product Design d-3 comprising derived and/or modified sequence from HRSV(Memphis-37)__AIY60640.1__F-del_DSCav1_mut7 (opt1)
gggagagggcgcuuggcuugcaaggacccugagcugcggcauugaagcacacccaacccaacucgacugaagucagccucacugaaccggaucugagaaucuucucucucugggcuugccagggcucuccgaaccuagcuagcauccucuucaauuccaacuagaaagcuuaccauggagcugcccauccucaagaccaacgccaucaccacgauccuggccgcggugacccugugcuucgccagcucccagaacaucaccgaggaguucuaccagagcacgugcuccgccgucagcaagggcuaccucuccgcccugcgcaccgggugguacaccagcgugaucaccaucgagcuguccaacaucaaggagaacaagugcaacggcaccgacgccaaggugaagcucaucaagcaggagcuggacaaguacaagaacgcggucacggagcugcagaugcugaugugcagcaccccggccgccggcuccgggagcgcgaucgccuccggcaucgccgucugcaaggugcugcaccucgagggcgaggugaacaagaucaagaacgcccugcuguccaccaacaaggccgucgugagccucuccaacggggugagcguccugaccuucaaggugcuggaccucaagaacuacaucgacaagcagcugcugcccauccugaacaagcagagcugcuccaucagcaacaucgagaccgucauggaguuccagcagaagaacaaccgccuccuggagaucacgcgggaguucagcgugaacgcgggcgugaccacccccgucuccaccuacaugcugacgaacagcgagcuccugucccugaucaacgacaugccgaucaccaacgaccagaagaagcucaugagcaacaacgugcagaucgugcgccagcaguccuacagcaucaugugcaucaucaaggaggagguccuggccuacguggugcagcugccccucuacggggucaucgacacccccugcuggaagcugcacaccagcccccugugcacgaccaacaccaaggagggcuccaacaucugccucacccggacggaccgcgggugguacugcgacaacgccggcagcguguccuucuucccgcaggccgagaccugcaaggucugcagcaaccggguguucugcgacaccaugaacucccugacccugcccagcgaggugaaccucugcaacaucgacaucuucaaccccaaguacgacugcaagaucaugacguccaagaccgacgucagcuccagcgugaucaccucccugggcgccaucgugagcugcuacgggaagaccaagugcacggcgagcaacaagaacaagggcaucaucaagaccuucuccaacgggugcgacuacgucagcaacaagggcguggacaccguguccgucggcaacacccuguacuacgugaacaagcaggagggcaagagccucuacgugaagggggagcccaucaucaacuucuacgacccgcuggucuuccccuccgacgaguucgacgccagcaucucccaggugaacgagaagaucaaccagagccuggccuucauccggaaguccgacgagcuccugcacaacgugaacgucggcaagagcaccacgaacaucaugaucaccaccaucaucaucgugaucaucgugauccugcugcuccugaucgccgucgggcuguuccucuacugcaaggcccgcugaggacuagugaagggaacacccaaauuuaauucagccuuaagcacaauuaauuaagagugaaacguaauuguacaagcaguuggucacccaccauagggcaugaucaacaccgcaaccuuuccuuuuucccccagugauucugaaaaaccccucuucccuucagcuugcuuagauguuccaaauuuaguaagcuuaaggcggccuacagaagaaaaagaaaaaaaaggccacaaaaguucccucucacuuucaguaaauaaaauaaaagcagcaacagaaauaaagaaauaaaugaaauucaaaaugaaauaaauauuguguugugcagcauuaaaaaaucaauaaaaauuaaaaaugagcaagaucuaaaaaaaaaaaaaaaaaaaaaaaaaaaaaaaaaaaaaaaaaaaaaaaaaaaaaaaaaaaaaaaaugcaucccccccccccccccccccccccccccccccaaaggcucuuuucagagccaccagaauu

SEQ ID NO: 18883 - RNA, 2214 nt, Artificial Sequence
  mRNA product Design d-3 comprising derived and/or modified sequence from HRSV(Memphis-37)__AIY60640.1__F-del_DSCav1_mut7 (opt1)
gggagagggcgcuuggcuugcaaggacccugagcugcggcauugaagcacacccaacccaacucgacugaagucagccucacugaaccggaucugagaaucuucucucucugggcuugccagggcucuccgaaccuagcuagcauccucuucaauuccaacuagaaagcuuaccauggagcugcccauccucaagaccaacgccaucaccacgauccuggccgcggugacccugugcuucgccagcucccagaacaucaccgaggaguucuaccagagcacgugcuccgccgucagcaagggguaccucuccgcccugcgcaccgggugguacaccagcgugaucaccaucgagcuguccaacaucaaggagaacaagugcaacggcaccgacgccaaggugaagcucaucaagcaggagcuggacaaguacaagaacgcggucacggagcugcagaugcucaugugcagcaccccggccgccggguccggcagcgccaucgcguccgggaucgccgugugcaaggugcugcaccuggagggcgaggucaacaagaucaagaacgcccuccugagcaccaacaaggccguggugucccugagcaacggcgucuccgugcucaccuucaaggugcuggaccugaagaacuacaucgacaagcagcuccugcccauccugaacaagcagagcugcuccaucagcaacaucgagacggucauggaguuccagcagaagaacaaccggcuccuggagaucacccgcgaguucuccgugaacgccggggugaccacccccgucagcacguacaugcugaccaacagcgagcuccugucccugaucaacgacaugcccaucaccaacgaccagaagaagcucaugagcaacaacgugcagaucgugcggcagcaguccuacagcaucaugugcaucaucaaggaggagguccuggcguacguggugcagcugccgcucuacggcgucaucgacacccccugcuggaagcugcacacgagcccccugugcaccaccaacaccaaggaggggagcaacaucugccucacgcgcaccgaccggggcugguacugcgacaacgccggguccgugagcuucuucccccaggccgagaccugcaaggugugcuccaaccgcgucuucugcgacaccaugaacagccugacgcugccguccgaggugaaccucugcaacaucgacaucuucaaccccaaguacgacugcaagaucaugaccagcaagaccgacgucuccagcuccgugaucaccagccugggcgccaucguguccugcuacggcaagacgaagugcaccgccagcaacaagaacaaggggaucaucaagaccuucuccaacggcugcgacuacgucagcaacaaggggguggacaccgugagcgucggcaacacgcuguacuacgugaacaagcaggagggcaagucccucuacgugaagggggagcccaucaucaacuucuacgacccccuggucuucccgagcgacgaguucgacgcguccaucagccaggugaacgagaagaucaaccagucccuggccuucauccggaaguccgacgagcuccugcacaacgugaacgucggcaaguccaccaccaacaucaugaucaccaccaucaucaucgugaucaucgugauccugcuccugcugaucgccgucggccucuuccuguacugcaaggcccgcugaggacuagugaagggaacacccaaauuuaauucagccuuaagcacaauuaauuaagagugaaacguaauuguacaagcaguuggucacccaccauagggcaugaucaacaccgcaaccuuuccuuuuucccccagugauucugaaaaaccccucuucccuucagcuugcuuagauguuccaaauuuaguaagcuuaaggcggccuacagaagaaaaagaaaaaaaaggccacaaaaguucccucucacuuucaguaaauaaaauaaaagcagcaacagaaauaaagaaauaaaugaaauucaaaaugaaauaaauauuguguugugcagcauuaaaaaaucaauaaaaauuaaaaaugagcaagaucuaaaaaaaaaaaaaaaaaaaaaaaaaaaaaaaaaaaaaaaaaaaaaaaaaaaaaaaaaaaaaaaaugcaucccccccccccccccccccccccccccccccaaaggcucuuuucagagccaccagaauu

SEQ ID NO: 18884 - RNA, 2214 nt, Artificial Sequence
  mRNA product Design d-3 comprising derived and/or modified sequence from HRSV(Memphis-37)__AIY60640.1__F-del_DSCav1_mut7 (opt2)
gggagagggcgcuuggcuugcaaggacccugagcugcggcauugaagcacacccaacccaacucgacugaagucagccucacugaaccggaucugagaaucuucucucucugggcuugccagggcucuccgaaccuagcuagcauccucuucaauuccaacuagaaagcuuaccauggagcuccccauccucaagaccaacgccaucaccaccauccucgccgccgucacccucugcuucgccuccucccagaacaucaccgaggaguucuaccaguccaccugcuccgccgucuccaagggcuaccucuccgcccuccgcaccggcugguacaccuccgucaucaccaucgagcucuccaacaucaaggagaacaagugcaacggcaccgacgccaaggucaagcucaucaagcaggagcucgacaaguacaagaacgccgucaccgagcuccagaugcucaugugcuccacccccgccgccggcuccggcuccgccaucgccuccggcaucgccgucugcaagguccuccaccucgagggcgaggucaacaagaucaagaacgcccuccucuccaccaacaaggccgucgucucccucuccaacggcgucuccguccucaccuucaagguccucgaccucaagaacuacaucgacaagcagcuccuccccauccucaacaagcaguccugcuccaucuccaacaucgagaccgucauggaguuccagcagaagaacaaccgccuccucgagaucacccgcgaguucuccgucaacgccggcgucaccacccccgucuccaccuacaugcucaccaacuccgagcuccucucccucaucaacgacaugcccaucaccaacgaccagaagaagcucauguccaacaacguccagaucguccgccagcaguccuacuccaucaugugcaucaucaaggaggagguccucgccuacgucguccagcucccccucuacggcgucaucgacacccccugcuggaagcuccacaccuccccccucugcaccaccaacaccaaggagggcuccaacaucugccucacccgcaccgaccgcggcugguacugcgacaacgccggcuccgucuccuucuucccccaggccgagaccugcaaggucugcuccaaccgcgucuucugcgacaccaugaacucccucacccuccccuccgaggucaaccucugcaacaucgacaucuucaaccccaaguacgacugcaagaucaugaccuccaagaccgacgucuccuccuccgucaucaccucccucggcgccaucgucuccugcuacggcaagaccaagugcaccgccuccaacaagaacaagggcaucaucaagaccuucuccaacggcugcgacuacgucuccaacaagggcgucgacaccgucuccgucggcaacacccucuacuacgucaacaagcaggagggcaagucccucuacgucaagggcgagcccaucaucaacuucuacgacccccucgucuuccccuccgacgaguucgacgccuccaucucccaggucaacgagaagaucaaccagucccucgccuucauccgcaaguccgacgagcuccuccacaacgucaacgucggcaaguccaccaccaacaucaugaucaccaccaucaucaucgucaucaucgucauccuccuccuccucaucgccgucggccucuuccucuacugcaaggcccgcugaggacuagugaagggaacacccaaauuuaauucagccuuaagcacaauuaauuaagagugaaacguaauuguacaagcaguuggucacccaccauagggcaugaucaacaccgcaaccuuuccuuuuucccccagugauucugaaaaaccccucuucccuucagcuugcuuagauguuccaaauuuaguaagcuuaaggcggccuacagaagaaaaagaaaaaaaaggccacaaaaguucccucucacuuucaguaaauaaaauaaaagcagcaacagaaauaaagaaauaaaugaaauucaaaaugaaauaaauauuguguugugcagcauuaaaaaaucaauaaaaauuaaaaaugagcaagaucuaaaaaaaaaaaaaaaaaaaaaaaaaaaaaaaaaaaaaaaaaaaaaaaaaaaaaaaaaaaaaaaaugcaucccccccccccccccccccccccccccccccaaaggcucuuuucagagccaccagaauu

SEQ ID NO: 18885 - RNA, 2214 nt, Artificial Sequence
  mRNA product Design d-3 comprising derived and/or modified sequence from HRSV(Memphis-37)__AIY60640.1__F-del_DSCav1_mut7 (opt3)
gggagagggcgcuuggcuugcaaggacccugagcugcggcauugaagcacacccaacccaacucgacugaagucagccucacugaaccggaucugagaaucuucucucucugggcuugccagggcucuccgaaccuagcuagcauccucuucaauuccaacuagaaagcuuaccauggagcugcccauccucaagaccaacgccauuacaacuauacuugcugcagugacgcugugcuucgccagcucccagaauaucaccgaagaguuuuaccaaucuacauguucagcggucaguaaaggcuauuugagcgcuuuaagaacugggugguacaccuccguuauuacaaucgaacugucuaacauuaaggagaauaaaugcaacggaaccgacgccaaggugaaacuaaucaagcaggaacucgauaaguauaaaaaugcaguaacugagcugcagaugcuuauguguucgaccccugccgcugguucaggcagcgcaauagccagugggaucgcugugugcaagguccugcacuuggagggagaagugaacaaaauuaagaaugcccuccuguccacaaacaaagcgguugugucucugagcaauggcgucuccgugcucacguucaagguauuagaccugaagaacuacaucgauaaacagcuuuugccaauucugaauaagcaaucauguaguaucagcaacauagagacuguuauggaauuucagcagaaaaauaacaggcuacucgagauuacccgggaguucucugugaaugccggugucacaacuccgguguccaccuauaugcugacaaacucagaacuucugagcuugaucaacgacaugcccauuaccaaugaucagaagaaacucaugaguaacaaugugcaaaucguccgccagcagucuuacuccaucaugugcauuauaaaggaggaaguucuggcauaugugguacaguuaccucuguacggggugaucgacacgccauguuggaaacuccauacuagcccccuuugcacaaccaacacuaaggagggaucgaauauuugucugacacgaaccgaucguggcugguacugcgacaacgcuggcucugucuccuuuuucccucaagccgaaacguguaaggugugcucaaauagaguguuuugcgauaccaugaacaguuugacacuaccaagcgagguuaaucuguguaacaucgacauauucaaucccaaauaugauugcaagauuaugacuuccaaaaccgacgucucuagcucagugaucacaagucucggggcaaucguauccuguuacggaaagacuaaaugcaccgcuagcaacaagaauaaggguauuaucaaaacauuuucuaacggcugugauuauguuucaaauaaggggguggacaccgucagugugggaaacacucuguacuaugucaacaaacaggagggcaagagccuuuacgugaaaggugaaccuauuauaaauuucuaugacccacugguuuuuccguccgaugaguucgacgccucuaucagccaggugaacgaaaagauuaaucaaucguuggcguuuaucaggaaguccgaugagcuccugcacaacguaaaugucgggaaaucaacgacaaacaucaugauuaccacuauaaucauugugaucauuguuaucuuacugcuacucauagccgugggacuguuccuuuacugcaaggcacggugaggacuagugaagggaacacccaaauuuaauucagccuuaagcacaauuaauuaagagugaaacguaauuguacaagcaguuggucacccaccauagggcaugaucaacaccgcaaccuuuccuuuuucccccagugauucugaaaaaccccucuucccuucagcuugcuuagauguuccaaauuuaguaagcuuaaggcggccuacagaagaaaaagaaaaaaaaggccacaaaaguucccucucacuuucaguaaauaaaauaaaagcagcaacagaaauaaagaaauaaaugaaauucaaaaugaaauaaauauuguguugugcagcauuaaaaaaucaauaaaaauuaaaaaugagcaagaucuaaaaaaaaaaaaaaaaaaaaaaaaaaaaaaaaaaaaaaaaaaaaaaaaaaaaaaaaaaaaaaaaugcaucccccccccccccccccccccccccccccccaaaggcucuuuucagagccaccagaauu

SEQ ID NO: 18886 - RNA, 2214 nt, Artificial Sequence
  mRNA product Design d-3 comprising derived and/or modified sequence from HRSV(Memphis-37)__AIY60640.1__F-del_DSCav1_mut7 (opt4)
gggagagggcgcuuggcuugcaaggacccugagcugcggcauugaagcacacccaacccaacucgacugaagucagccucacugaaccggaucugagaaucuucucucucugggcuugccagggcucuccgaaccuagcuagcauccucuucaauuccaacuagaaagcuuaccauggagcugcccauccugaagaccaacgccaucaccaccauccuggccgccgugacccugugcuucgccagcagccagaacaucaccgaggaguucuaccagagcaccugcagcgccgugagcaagggcuaccugagcgcccugagaaccggcugguacaccagcgugaucaccaucgagcugagcaacaucaaggagaacaagugcaacggcaccgacgccaaggugaagcugaucaagcaggagcuggacaaguacaagaacgccgugaccgagcugcagaugcugaugugcagcacccccgccgccggcagcggcagcgccaucgccagcggcaucgccgugugcaaggugcugcaccuggagggcgaggugaacaagaucaagaacgcccugcugagcaccaacaaggccguggugagccugagcaacggcgugagcgugcugaccuucaaggugcuggaccugaagaacuacaucgacaagcagcugcugcccauccugaacaagcagagcugcagcaucagcaacaucgagaccgugauggaguuccagcagaagaacaacagacugcuggagaucaccagagaguucagcgugaacgccggcgugaccacccccgugagcaccuacaugcugaccaacagcgagcugcugagccugaucaacgacaugcccaucaccaacgaccagaagaagcugaugagcaacaacgugcagaucgugagacagcagagcuacagcaucaugugcaucaucaaggaggaggugcuggccuacguggugcagcugccccuguacggcgugaucgacacccccugcuggaagcugcacaccagcccccugugcaccaccaacaccaaggagggcagcaacaucugccugaccagaaccgacagaggcugguacugcgacaacgccggcagcgugagcuucuucccccaggccgagaccugcaaggugugcagcaacagaguguucugcgacaccaugaacagccugacccugcccagcgaggugaaccugugcaacaucgacaucuucaaccccaaguacgacugcaagaucaugaccagcaagaccgacgugagcagcagcgugaucaccagccugggcgccaucgugagcugcuacggcaagaccaagugcaccgccagcaacaagaacaagggcaucaucaagaccuucagcaacggcugcgacuacgugagcaacaagggcguggacaccgugagcgugggcaacacccuguacuacgugaacaagcaggagggcaagagccuguacgugaagggcgagcccaucaucaacuucuacgacccccugguguuccccagcgacgaguucgacgccagcaucagccaggugaacgagaagaucaaccagagccuggccuucaucagaaagagcgacgagcugcugcacaacgugaacgugggcaagagcaccaccaacaucaugaucaccaccaucaucaucgugaucaucgugauccugcugcugcugaucgccgugggccuguuccuguacugcaaggccagaugaggacuagugaagggaacacccaaauuuaauucagccuuaagcacaauuaauuaagagugaaacguaauuguacaagcaguuggucacccaccauagggcaugaucaacaccgcaaccuuuccuuuuucccccagugauucugaaaaaccccucuucccuucagcuugcuuagauguuccaaauuuaguaagcuuaaggcggccuacagaagaaaaagaaaaaaaaggccacaaaaguucccucucacuuucaguaaauaaaauaaaagcagcaacagaaauaaagaaauaaaugaaauucaaaaugaaauaaauauuguguugugcagcauuaaaaaaucaauaaaaauuaaaaaugagcaagaucuaaaaaaaaaaaaaaaaaaaaaaaaaaaaaaaaaaaaaaaaaaaaaaaaaaaaaaaaaaaaaaaaugcaucccccccccccccccccccccccccccccccaaaggcucuuuucagagccaccagaauu

SEQ ID NO: 18887 - RNA, 2214 nt, Artificial Sequence
  mRNA product Design d-3 comprising derived and/or modified sequence from HRSV(Memphis-37)__AIY60640.1__F-del_DSCav1_mut7 (opt5)
gggagagggcgcuuggcuugcaaggacccugagcugcggcauugaagcacacccaacccaacucgacugaagucagccucacugaaccggaucugagaaucuucucucucugggcuugccagggcucuccgaaccuagcuagcauccucuucaauuccaacuagaaagcuuaccauggagcugcccauccucaagaccaacgccauuacaacgauccuggcugccgugacccuuugcuucgcgagcucccagaauauuacagaagaguuuuaccaaucuaccuguagcgcugucuccaaaggcuaucugucugcccucagaacagggugguacaccagcguuaucacaauugaacuguccaacaucaaggagaauaaaugcaacggaaccgacgccaaggugaaacuuaucaagcaggaacuggauaaguauaaaaaugcugugacggagcuccagaugcugauguguucuaccccugccgcuggcagcggguccgccauugcgagcggaaucgccgucugcaaggugcugcaccucgagggcgaaguuaacaaaauuaagaaugcucugcuuucuacaaacaaagccguggucucccugagcaauggggugucuguucucaccuucaaggugcuggaccuuaagaacuacaucgauaaacagcugcucccgauucugaauaagcaauccuguagcaucucuaacauugagacagucauggaauuucagcagaaaaauaaccggcugcucgagaucacccgcgaguucuccgugaaugcuggagugacgacacccgucagcaccuauaugcugacaaacuccgaacuucugucucucaucaacgacaugccuauuaccaaugaucagaagaaacugaugagcaacaauguucaaaucgugagacagcaguccuacagcauuaugugcaucauuaaggaggaagugcuugccuaugucgugcagcugccccucuacggcguuaucgacaccccuuguuggaaacugcauacaucuccccugugcacgaccaacacaaaggagggcuccaauaucugucucacccggacagaucgcgggugguacugcgacaacgcgggaagcgugagcuuuuucccucaagccgaaaccuguaaggucugcucuaauagaguguuuugcgauacgaugaacucccugacacuuccgucugagguuaaucuguguaacauugacaucuucaaucccaaauaugauugcaagauuaugaccagcaaaaccgacguguccagcucugucaucacaucccucggcgcuauugugagcuguuacgggaagaccaaaugcacagccucuaacaagaauaagggaaucaucaaaacguuuuccaacggcugugauuaugucagcaauaaggggguggacaccguuuccgugggaaacacacuguacuaugucaacaaacaggagggcaagucucuuuacgugaaaggcgaaccuauuaucaauuucuaugacccccugguuuuuccuagcgaugaguucgacgcuuccauuucucaggugaacgaaaagaucaaucaaagccucgccuuuauucggaaguccgaugagcugcugcacaacgucaauguggggaaaagcaccacaaacaucaugauuaccacgaucaucauugugaucauuguuauccuccugcuucugauugccgucggacucuuccuguacugcaaggcucgcugaggacuagugaagggaacacccaaauuuaauucagccuuaagcacaauuaauuaagagugaaacguaauuguacaagcaguuggucacccaccauagggcaugaucaacaccgcaaccuuuccuuuuucccccagugauucugaaaaaccccucuucccuucagcuugcuuagauguuccaaauuuaguaagcuuaaggcggccuacagaagaaaaagaaaaaaaaggccacaaaaguucccucucacuuucaguaaauaaaauaaaagcagcaacagaaauaaagaaauaaaugaaauucaaaaugaaauaaauauuguguugugcagcauuaaaaaaucaauaaaaauuaaaaaugagcaagaucuaaaaaaaaaaaaaaaaaaaaaaaaaaaaaaaaaaaaaaaaaaaaaaaaaaaaaaaaaaaaaaaaugcaucccccccccccccccccccccccccccccccaaaggcucuuuucagagccaccagaauu

SEQ ID NO: 18888 - RNA, 2214 nt, Artificial Sequence
  mRNA product Design d-3 comprising derived and/or modified sequence from HRSV(Memphis-37)__AIY60640.1__F-del_DSCav1_mut7 (opt6)
gggagagggcgcuuggcuugcaaggacccugagcugcggcauugaagcacacccaacccaacucgacugaagucagccucacugaaccggaucugagaaucuucucucucugggcuugccagggcucuccgaaccuagcuagcauccucuucaauuccaacuagaaagcuuaccauggaacuaccaauacucaaaacaaacgccauaaccacaauacuagccgcaguaacacuuugcuuugccucaagucaaaacauaacagaagaauuuuaccaauccacaugcucagcuguauccaaaggauauuuauccgcacuaagaacaggaugguacacaucaguaaucacaauagaauuaucaaacauaaaagaaaacaaauguaauggcacagacgccaaaguaaaacuaauuaaacaagaacuagacaaauauaaaaaugcaguaaccgaacuccaaaugcucaugugcucuacaccagcugcaggaucaggaucagccauugcaagcgguauagcuguuugcaaaguauuacacuuagaaggagaaguaaauaaaauaaaaaacgcacuacuaucaacaaauaaagcaguaguaucccuaucaaacggaguaucaguacuuacauucaaaguauuagauuuaaaaaacuauauagacaaacaacuacuucccauauuaaacaaacaaucaugcucaauuuccaacauugaaacuguaauggaauuucaacaaaaaaacaacagacuacuugaaaucacacgagaauuuucaguaaacgcuggaguaacaacaccugucucuaccuacaugcucacaaauagcgaauuacuaucucuaaucaaugacaugccaauaacaaacgaucaaaaaaaacuaauguccaacaacguacaaauaguaagacaacaauccuauucaauaaugugcauaauaaaagaagaagucuuagcauacguuguacaacuaccauuauacggaguaauagauacaccaugcuggaaacuccacacaagcccccucugcacaacaaacaccaaagaagggucaaacauaugcuuaacaagaacagacagaggaugguacugugauaacgcaggaucugucucauucuuuccacaagcagaaacauguaaaguaugcuccaacagagucuuuugcgacaccaugaacucacuaaccuuacccucagaaguaaaccugugcaacaucgauaucuucaaccccaaauacgauugcaaaaucaugacaagcaaaacugauguauccagcucuguaauaacaucacuaggugcaauaguaucaugcuacggaaaaacaaaaugcacagcuucuaacaaaaauaaaggaauaauaaaaacauucuccaauggaugcgacuaugucucaaauaaaggaguagauacaguuucagucggcaacacacucuauuauguaaauaaacaagaaggaaaaucauuauacguaaaaggagaacccauaauaaacuucuacgacccccucguauucccaagcgacgaauuugacgccucaauaucacaaguaaacgaaaaaauaaaccaaucacucgcauucaucagaaaaucagaugaacuacuacacaauguaaacgucggaaaauccaccacaaauauaaugauaacuaccaucauaauaguaauaauagucaucuuacuacuauuaaucgcuguaggacuauuucucuacugcaaggccagauaaggacuagugaagggaacacccaaauuuaauucagccuuaagcacaauuaauuaagagugaaacguaauuguacaagcaguuggucacccaccauagggcaugaucaacaccgcaaccuuuccuuuuucccccagugauucugaaaaaccccucuucccuucagcuugcuuagauguuccaaauuuaguaagcuuaaggcggccuacagaagaaaaagaaaaaaaaggccacaaaaguucccucucacuuucaguaaauaaaauaaaagcagcaacagaaauaaagaaauaaaugaaauucaaaaugaaauaaauauuguguugugcagcauuaaaaaaucaauaaaaauuaaaaaugagcaagaucuaaaaaaaaaaaaaaaaaaaaaaaaaaaaaaaaaaaaaaaaaaaaaaaaaaaaaaaaaaaaaaaaugcaucccccccccccccccccccccccccccccccaaaggcucuuuucagagccaccagaauu

SEQ ID NO: 18889 - RNA, 2214 nt, Artificial Sequence
  mRNA product Design d-3 comprising derived and/or modified sequence from HRSV(Memphis-37)__AIY60640.1__F-del_DSCav1_mut7 (opt11)
gggagagggcgcuuggcuugcaaggacccugagcugcggcauugaagcacacccaacccaacucgacugaagucagccucacugaaccggaucugagaaucuucucucucugggcuugccagggcucuccgaaccuagcuagcauccucuucaauuccaacuagaaagcuuaccauggaacucccaauccucaaaacaaaugccaucaccaccauccuagccgcugucacacuaugcuucgccuccucacaaaacaucaccgaagaguucuaucaauccacaugcuccgccgucagcaagggauaccucuccgcccuuagaaccggcugguacaccucagucaucacaauugaacugucaaacaucaaagaaaacaaaugcaacggcaccgacgcaaaaguaaagcucaucaaacaagaacuggacaaguacaagaacgccgucaccgaacuacagaugcuuaugugcucaaccccugccgccggcuccggaucugccauagcuucaggcaucgccguaugcaaaguccugcaccuagaaggggaagucaacaaaaucaaaaacgcccuccucuccaccaacaaggccguugucucccugucaaacggagucuccguccuaaccuucaaaguccucgaccucaaaaacuacauagacaaacaacuccuacccauccucaacaaacaaagcugcucaauauccaacaucgaaaccgucauggaguuccaacaaaagaacaaccgacuacucgaaauaacacgcgaguucucagucaacgccggcgucaccaccccagucuccacauacaugcucaccaacuccgaacuccuaucgcucaucaacgacaugcccaucaccaaugaccagaagaaacucauguccaacaacguacaaaucguccgccaacaguccuacucaaucaugugcaucaucaaagaagaaguccuugccuacgucguccagcuuccacucuacggagucaucgacacccccugcuggaaacuccacaccuccccacuaugcaccaccaacaccaaagaaggauccaacauaugccucacccguacugaccgcggcugguacugcgacaacgccggauccgucucauucuucccccaggccgaaaccugcaaagucugcuccaaccgcgucuucugcgacaccaugaacucgcucacccucccauccgaagucaaucuaugcaacaucgacauuuucaaccccaaauacgacugcaaaauuaugacaucaaaaaccgacgucucauccucagucaucacuucccucggcgcaaucguaagcugcuacgggaaaacaaagugcaccgcuuccaacaaaaacaaaggcaucaucaaaaccuucucuaacggcugcgacuacgucuccaacaaaggagucgacaccguauccgucggcaacacccucuacuacgucaacaaacaggaaggaaaaucgcucuacgucaaaggagaaccaaucaucaacuucuacgacccccuagucuucccauccgacgaguucgacgccagcaucucacaagucaaugaaaagaucaaccagucacucgcauucauccguaagucagacgaacuccuacacaacgucaacgucggcaagucaacaaccaacauaaugaucaccaccauaaucaucgucauaauaguaauccuccuucuccuaaucgcagucggccucuuccucuacugcaaagcacgcuaaggacuagugaagggaacacccaaauuuaauucagccuuaagcacaauuaauuaagagugaaacguaauuguacaagcaguuggucacccaccauagggcaugaucaacaccgcaaccuuuccuuuuucccccagugauucugaaaaaccccucuucccuucagcuugcuuagauguuccaaauuuaguaagcuuaaggcggccuacagaagaaaaagaaaaaaaaggccacaaaaguucccucucacuuucaguaaauaaaauaaaagcagcaacagaaauaaagaaauaaaugaaauucaaaaugaaauaaauauuguguugugcagcauuaaaaaaucaauaaaaauuaaaaaugagcaagaucuaaaaaaaaaaaaaaaaaaaaaaaaaaaaaaaaaaaaaaaaaaaaaaaaaaaaaaaaaaaaaaaaugcaucccccccccccccccccccccccccccccccaaaggcucuuuucagagccaccagaauu

SEQ ID NO: 18890 - RNA, 1897 nt, Artificial Sequence
  mRNA product Design d-4 comprising derived and/or modified sequence from HRSV(Memphis-37)__AIY60640.1__F-del_DSCav1_mut7 (opt1)
gggagagucccgcagucggcguccagcggcucugcuuguucgugugugugucguugcaggccuuauucaagcuuaccauggagcugcccauccucaagaccaacgccaucaccacgauccuggccgcggugacccugugcuucgccagcucccagaacaucaccgaggaguucuaccagagcacgugcuccgccgucagcaagggcuaccucuccgcccugcgcaccgggugguacaccagcgugaucaccaucgagcuguccaacaucaaggagaacaagugcaacggcaccgacgccaaggugaagcucaucaagcaggagcuggacaaguacaagaacgcggucacggagcugcagaugcugaugugcagcaccccggccgccggcuccgggagcgcgaucgccuccggcaucgccgucugcaaggugcugcaccucgagggcgaggugaacaagaucaagaacgcccugcuguccaccaacaaggccgucgugagccucuccaacggggugagcguccugaccuucaaggugcuggaccucaagaacuacaucgacaagcagcugcugcccauccugaacaagcagagcugcuccaucagcaacaucgagaccgucauggaguuccagcagaagaacaaccgccuccuggagaucacgcgggaguucagcgugaacgcgggcgugaccacccccgucuccaccuacaugcugacgaacagcgagcuccugucccugaucaacgacaugccgaucaccaacgaccagaagaagcucaugagcaacaacgugcagaucgugcgccagcaguccuacagcaucaugugcaucaucaaggaggagguccuggccuacguggugcagcugccccucuacggggucaucgacacccccugcuggaagcugcacaccagcccccugugcacgaccaacaccaaggagggcuccaacaucugccucacccggacggaccgcgggugguacugcgacaacgccggcagcguguccuucuucccgcaggccgagaccugcaaggucugcagcaaccggguguucugcgacaccaugaacucccugacccugcccagcgaggugaaccucugcaacaucgacaucuucaaccccaaguacgacugcaagaucaugacguccaagaccgacgucagcuccagcgugaucaccucccugggcgccaucgugagcugcuacgggaagaccaagugcacggcgagcaacaagaacaagggcaucaucaagaccuucuccaacgggugcgacuacgucagcaacaagggcguggacaccguguccgucggcaacacccuguacuacgugaacaagcaggagggcaagagccucuacgugaagggggagcccaucaucaacuucuacgacccgcuggucuuccccuccgacgaguucgacgccagcaucucccaggugaacgagaagaucaaccagagccuggccuucauccggaaguccgacgagcuccugcacaacgugaacgucggcaagagcaccacgaacaucaugaucaccaccaucaucaucgugaucaucgugauccugcugcuccugaucgccgucgggcuguuccucuacugcaaggcccgcugaggacuaguggaagcauuuuccuggcugauuaaaagaaauuacucagcuauggucaucuguuccuguuagaaggcuaugcagcauauuauauacuaugcgcauguuaugaaaugcauaauaaaaaauuuuaaaaaaucuaaaagaucuaaaaaaaaaaaaaaaaaaaaaaaaaaaaaaaaaaaaaaaaaaaaaaaaaaaaaaaaaaaaaaaaugcaucccccccccccccccccccccccccccccccaaaggcucuuuucagagccaccagaauu

SEQ ID NO: 18891 - RNA, 1897 nt, Artificial Sequence
  mRNA product Design d-4 comprising derived and/or modified sequence from HRSV(Memphis-37)__AIY60640.1__F-del_DSCav1_mut7 (opt1)
gggagagucccgcagucggcguccagcggcucugcuuguucgugugugugucguugcaggccuuauucaagcuuaccauggagcugcccauccucaagaccaacgccaucaccacgauccuggccgcggugacccugugcuucgccagcucccagaacaucaccgaggaguucuaccagagcacgugcuccgccgucagcaagggguaccucuccgcccugcgcaccgggugguacaccagcgugaucaccaucgagcuguccaacaucaaggagaacaagugcaacggcaccgacgccaaggugaagcucaucaagcaggagcuggacaaguacaagaacgcggucacggagcugcagaugcucaugugcagcaccccggccgccggguccggcagcgccaucgcguccgggaucgccgugugcaaggugcugcaccuggagggcgaggucaacaagaucaagaacgcccuccugagcaccaacaaggccguggugucccugagcaacggcgucuccgugcucaccuucaaggugcuggaccugaagaacuacaucgacaagcagcuccugcccauccugaacaagcagagcugcuccaucagcaacaucgagacggucauggaguuccagcagaagaacaaccggcuccuggagaucacccgcgaguucuccgugaacgccggggugaccacccccgucagcacguacaugcugaccaacagcgagcuccugucccugaucaacgacaugcccaucaccaacgaccagaagaagcucaugagcaacaacgugcagaucgugcggcagcaguccuacagcaucaugugcaucaucaaggaggagguccuggcguacguggugcagcugccgcucuacggcgucaucgacacccccugcuggaagcugcacacgagcccccugugcaccaccaacaccaaggaggggagcaacaucugccucacgcgcaccgaccggggcugguacugcgacaacgccggguccgugagcuucuucccccaggccgagaccugcaaggugugcuccaaccgcgucuucugcgacaccaugaacagccugacgcugccguccgaggugaaccucugcaacaucgacaucuucaaccccaaguacgacugcaagaucaugaccagcaagaccgacgucuccagcuccgugaucaccagccugggcgccaucguguccugcuacggcaagacgaagugcaccgccagcaacaagaacaaggggaucaucaagaccuucuccaacggcugcgacuacgucagcaacaaggggguggacaccgugagcgucggcaacacgcuguacuacgugaacaagcaggagggcaagucccucuacgugaagggggagcccaucaucaacuucuacgacccccuggucuucccgagcgacgaguucgacgcguccaucagccaggugaacgagaagaucaaccagucccuggccuucauccggaaguccgacgagcuccugcacaacgugaacgucggcaaguccaccaccaacaucaugaucaccaccaucaucaucgugaucaucgugauccugcuccugcugaucgccgucggccucuuccuguacugcaaggcccgcugaggacuaguggaagcauuuuccuggcugauuaaaagaaauuacucagcuauggucaucuguuccuguuagaaggcuaugcagcauauuauauacuaugcgcauguuaugaaaugcauaauaaaaaauuuuaaaaaaucuaaaagaucuaaaaaaaaaaaaaaaaaaaaaaaaaaaaaaaaaaaaaaaaaaaaaaaaaaaaaaaaaaaaaaaaugcaucccccccccccccccccccccccccccccccaaaggcucuuuucagagccaccagaauu

SEQ ID NO: 18892 - RNA, 1897 nt, Artificial Sequence
  mRNA product Design d-4 comprising derived and/or modified sequence from HRSV(Memphis-37)__AIY60640.1__F-del_DSCav1_mut7 (opt2)
gggagagucccgcagucggcguccagcggcucugcuuguucgugugugugucguugcaggccuuauucaagcuuaccauggagcuccccauccucaagaccaacgccaucaccaccauccucgccgccgucacccucugcuucgccuccucccagaacaucaccgaggaguucuaccaguccaccugcuccgccgucuccaagggcuaccucuccgcccuccgcaccggcugguacaccuccgucaucaccaucgagcucuccaacaucaaggagaacaagugcaacggcaccgacgccaaggucaagcucaucaagcaggagcucgacaaguacaagaacgccgucaccgagcuccagaugcucaugugcuccacccccgccgccggcuccggcuccgccaucgccuccggcaucgccgucugcaagguccuccaccucgagggcgaggucaacaagaucaagaacgcccuccucuccaccaacaaggccgucgucucccucuccaacggcgucuccguccucaccuucaagguccucgaccucaagaacuacaucgacaagcagcuccuccccauccucaacaagcaguccugcuccaucuccaacaucgagaccgucauggaguuccagcagaagaacaaccgccuccucgagaucacccgcgaguucuccgucaacgccggcgucaccacccccgucuccaccuacaugcucaccaacuccgagcuccucucccucaucaacgacaugcccaucaccaacgaccagaagaagcucauguccaacaacguccagaucguccgccagcaguccuacuccaucaugugcaucaucaaggaggagguccucgccuacgucguccagcucccccucuacggcgucaucgacacccccugcuggaagcuccacaccuccccccucugcaccaccaacaccaaggagggcuccaacaucugccucacccgcaccgaccgcggcugguacugcgacaacgccggcuccgucuccuucuucccccaggccgagaccugcaaggucugcuccaaccgcgucuucugcgacaccaugaacucccucacccuccccuccgaggucaaccucugcaacaucgacaucuucaaccccaaguacgacugcaagaucaugaccuccaagaccgacgucuccuccuccgucaucaccucccucggcgccaucgucuccugcuacggcaagaccaagugcaccgccuccaacaagaacaagggcaucaucaagaccuucuccaacggcugcgacuacgucuccaacaagggcgucgacaccgucuccgucggcaacacccucuacuacgucaacaagcaggagggcaagucccucuacgucaagggcgagcccaucaucaacuucuacgacccccucgucuuccccuccgacgaguucgacgccuccaucucccaggucaacgagaagaucaaccagucccucgccuucauccgcaaguccgacgagcuccuccacaacgucaacgucggcaaguccaccaccaacaucaugaucaccaccaucaucaucgucaucaucgucauccuccuccuccucaucgccgucggccucuuccucuacugcaaggcccgcugaggacuaguggaagcauuuuccuggcugauuaaaagaaauuacucagcuauggucaucuguuccuguuagaaggcuaugcagcauauuauauacuaugcgcauguuaugaaaugcauaauaaaaaauuuuaaaaaaucuaaaagaucuaaaaaaaaaaaaaaaaaaaaaaaaaaaaaaaaaaaaaaaaaaaaaaaaaaaaaaaaaaaaaaaaugcaucccccccccccccccccccccccccccccccaaaggcucuuuucagagccaccagaauu

SEQ ID NO: 18893 - RNA, 1897 nt, Artificial Sequence
  mRNA product Design d-4 comprising derived and/or modified sequence from HRSV(Memphis-37)__AIY60640.1__F-del_DSCav1_mut7 (opt3)
gggagagucccgcagucggcguccagcggcucugcuuguucgugugugugucguugcaggccuuauucaagcuuaccauggagcugcccauccucaagaccaacgccauuacaacuauacuugcugcagugacgcugugcuucgccagcucccagaauaucaccgaagaguuuuaccaaucuacauguucagcggucaguaaaggcuauuugagcgcuuuaagaacugggugguacaccuccguuauuacaaucgaacugucuaacauuaaggagaauaaaugcaacggaaccgacgccaaggugaaacuaaucaagcaggaacucgauaaguauaaaaaugcaguaacugagcugcagaugcuuauguguucgaccccugccgcugguucaggcagcgcaauagccagugggaucgcugugugcaagguccugcacuuggagggagaagugaacaaaauuaagaaugcccuccuguccacaaacaaagcgguugugucucugagcaauggcgucuccgugcucacguucaagguauuagaccugaagaacuacaucgauaaacagcuuuugccaauucugaauaagcaaucauguaguaucagcaacauagagacuguuauggaauuucagcagaaaaauaacaggcuacucgagauuacccgggaguucucugugaaugccggugucacaacuccgguguccaccuauaugcugacaaacucagaacuucugagcuugaucaacgacaugcccauuaccaaugaucagaagaaacucaugaguaacaaugugcaaaucguccgccagcagucuuacuccaucaugugcauuauaaaggaggaaguucuggcauaugugguacaguuaccucuguacggggugaucgacacgccauguuggaaacuccauacuagcccccuuugcacaaccaacacuaaggagggaucgaauauuugucugacacgaaccgaucguggcugguacugcgacaacgcuggcucugucuccuuuuucccucaagccgaaacguguaaggugugcucaaauagaguguuuugcgauaccaugaacaguuugacacuaccaagcgagguuaaucuguguaacaucgacauauucaaucccaaauaugauugcaagauuaugacuuccaaaaccgacgucucuagcucagugaucacaagucucggggcaaucguauccuguuacggaaagacuaaaugcaccgcuagcaacaagaauaaggguauuaucaaaacauuuucuaacggcugugauuauguuucaaauaaggggguggacaccgucagugugggaaacacucuguacuaugucaacaaacaggagggcaagagccuuuacgugaaaggugaaccuauuauaaauuucuaugacccacugguuuuuccguccgaugaguucgacgccucuaucagccaggugaacgaaaagauuaaucaaucguuggcguuuaucaggaaguccgaugagcuccugcacaacguaaaugucgggaaaucaacgacaaacaucaugauuaccacuauaaucauugugaucauuguuaucuuacugcuacucauagccgugggacuguuccuuuacugcaaggcacggugaggacuaguggaagcauuuuccuggcugauuaaaagaaauuacucagcuauggucaucuguuccuguuagaaggcuaugcagcauauuauauacuaugcgcauguuaugaaaugcauaauaaaaaauuuuaaaaaaucuaaaagaucuaaaaaaaaaaaaaaaaaaaaaaaaaaaaaaaaaaaaaaaaaaaaaaaaaaaaaaaaaaaaaaaaugcaucccccccccccccccccccccccccccccccaaaggcucuuuucagagccaccagaauu

SEQ ID NO: 18894 - RNA, 1897 nt, Artificial Sequence
  mRNA product Design d-4 comprising derived and/or modified sequence from HRSV(Memphis-37)__AIY60640.1__F-del_DSCav1_mut7 (opt4)
gggagagucccgcagucggcguccagcggcucugcuuguucgugugugugucguugcaggccuuauucaagcuuaccauggagcugcccauccugaagaccaacgccaucaccaccauccuggccgccgugacccugugcuucgccagcagccagaacaucaccgaggaguucuaccagagcaccugcagcgccgugagcaagggcuaccugagcgcccugagaaccggcugguacaccagcgugaucaccaucgagcugagcaacaucaaggagaacaagugcaacggcaccgacgccaaggugaagcugaucaagcaggagcuggacaaguacaagaacgccgugaccgagcugcagaugcugaugugcagcacccccgccgccggcagcggcagcgccaucgccagcggcaucgccgugugcaaggugcugcaccuggagggcgaggugaacaagaucaagaacgcccugcugagcaccaacaaggccguggugagccugagcaacggcgugagcgugcugaccuucaaggugcuggaccugaagaacuacaucgacaagcagcugcugcccauccugaacaagcagagcugcagcaucagcaacaucgagaccgugauggaguuccagcagaagaacaacagacugcuggagaucaccagagaguucagcgugaacgccggcgugaccacccccgugagcaccuacaugcugaccaacagcgagcugcugagccugaucaacgacaugcccaucaccaacgaccagaagaagcugaugagcaacaacgugcagaucgugagacagcagagcuacagcaucaugugcaucaucaaggaggaggugcuggccuacguggugcagcugccccuguacggcgugaucgacacccccugcuggaagcugcacaccagcccccugugcaccaccaacaccaaggagggcagcaacaucugccugaccagaaccgacagaggcugguacugcgacaacgccggcagcgugagcuucuucccccaggccgagaccugcaaggugugcagcaacagaguguucugcgacaccaugaacagccugacccugcccagcgaggugaaccugugcaacaucgacaucuucaaccccaaguacgacugcaagaucaugaccagcaagaccgacgugagcagcagcgugaucaccagccugggcgccaucgugagcugcuacggcaagaccaagugcaccgccagcaacaagaacaagggcaucaucaagaccuucagcaacggcugcgacuacgugagcaacaagggcguggacaccgugagcgugggcaacacccuguacuacgugaacaagcaggagggcaagagccuguacgugaagggcgagcccaucaucaacuucuacgacccccugguguuccccagcgacgaguucgacgccagcaucagccaggugaacgagaagaucaaccagagccuggccuucaucagaaagagcgacgagcugcugcacaacgugaacgugggcaagagcaccaccaacaucaugaucaccaccaucaucaucgugaucaucgugauccugcugcugcugaucgccgugggccuguuccuguacugcaaggccagaugaggacuaguggaagcauuuuccuggcugauuaaaagaaauuacucagcuauggucaucuguuccuguuagaaggcuaugcagcauauuauauacuaugcgcauguuaugaaaugcauaauaaaaaauuuuaaaaaaucuaaaagaucuaaaaaaaaaaaaaaaaaaaaaaaaaaaaaaaaaaaaaaaaaaaaaaaaaaaaaaaaaaaaaaaaugcaucccccccccccccccccccccccccccccccaaaggcucuuuucagagccaccagaauu

SEQ ID NO: 18895 - RNA, 1897 nt, Artificial Sequence
  mRNA product Design d-4 comprising derived and/or modified sequence from HRSV(Memphis-37)__AIY60640.1__F-del_DSCav1_mut7 (opt5)
gggagagucccgcagucggcguccagcggcucugcuuguucgugugugugucguugcaggccuuauucaagcuuaccauggagcugcccauccucaagaccaacgccauuacaacgauccuggcugccgugacccuuugcuucgcgagcucccagaauauuacagaagaguuuuaccaaucuaccuguagcgcugucuccaaaggcuaucugucugcccucagaacagggugguacaccagcguuaucacaauugaacuguccaacaucaaggagaauaaaugcaacggaaccgacgccaaggugaaacuuaucaagcaggaacuggauaaguauaaaaaugcugugacggagcuccagaugcugauguguucuaccccugccgcuggcagcggguccgccauugcgagcggaaucgccgucugcaaggugcugcaccucgagggcgaaguuaacaaaauuaagaaugcucugcuuucuacaaacaaagccguggucucccugagcaauggggugucuguucucaccuucaaggugcuggaccuuaagaacuacaucgauaaacagcugcucccgauucugaauaagcaauccuguagcaucucuaacauugagacagucauggaauuucagcagaaaaauaaccggcugcucgagaucacccgcgaguucuccgugaaugcuggagugacgacacccgucagcaccuauaugcugacaaacuccgaacuucugucucucaucaacgacaugccuauuaccaaugaucagaagaaacugaugagcaacaauguucaaaucgugagacagcaguccuacagcauuaugugcaucauuaaggaggaagugcuugccuaugucgugcagcugccccucuacggcguuaucgacaccccuuguuggaaacugcauacaucuccccugugcacgaccaacacaaaggagggcuccaauaucugucucacccggacagaucgcgggugguacugcgacaacgcgggaagcgugagcuuuuucccucaagccgaaaccuguaaggucugcucuaauagaguguuuugcgauacgaugaacucccugacacuuccgucugagguuaaucuguguaacauugacaucuucaaucccaaauaugauugcaagauuaugaccagcaaaaccgacguguccagcucugucaucacaucccucggcgcuauugugagcuguuacgggaagaccaaaugcacagccucuaacaagaauaagggaaucaucaaaacguuuuccaacggcugugauuaugucagcaauaaggggguggacaccguuuccgugggaaacacacuguacuaugucaacaaacaggagggcaagucucuuuacgugaaaggcgaaccuauuaucaauuucuaugacccccugguuuuuccuagcgaugaguucgacgcuuccauuucucaggugaacgaaaagaucaaucaaagccucgccuuuauucggaaguccgaugagcugcugcacaacgucaauguggggaaaagcaccacaaacaucaugauuaccacgaucaucauugugaucauuguuauccuccugcuucugauugccgucggacucuuccuguacugcaaggcucgcugaggacuaguggaagcauuuuccuggcugauuaaaagaaauuacucagcuauggucaucuguuccuguuagaaggcuaugcagcauauuauauacuaugcgcauguuaugaaaugcauaauaaaaaauuuuaaaaaaucuaaaagaucuaaaaaaaaaaaaaaaaaaaaaaaaaaaaaaaaaaaaaaaaaaaaaaaaaaaaaaaaaaaaaaaaugcaucccccccccccccccccccccccccccccccaaaggcucuuuucagagccaccagaauu

SEQ ID NO: 18896 - RNA, 1897 nt, Artificial Sequence
  mRNA product Design d-4 comprising derived and/or modified sequence from HRSV(Memphis-37)__AIY60640.1__F-del_DSCav1_mut7 (opt6)
gggagagucccgcagucggcguccagcggcucugcuuguucgugugugugucguugcaggccuuauucaagcuuaccauggaacuaccaauacucaaaacaaacgccauaaccacaauacuagccgcaguaacacuuugcuuugccucaagucaaaacauaacagaagaauuuuaccaauccacaugcucagcuguauccaaaggauauuuauccgcacuaagaacaggaugguacacaucaguaaucacaauagaauuaucaaacauaaaagaaaacaaauguaauggcacagacgccaaaguaaaacuaauuaaacaagaacuagacaaauauaaaaaugcaguaaccgaacuccaaaugcucaugugcucuacaccagcugcaggaucaggaucagccauugcaagcgguauagcuguuugcaaaguauuacacuuagaaggagaaguaaauaaaauaaaaaacgcacuacuaucaacaaauaaagcaguaguaucccuaucaaacggaguaucaguacuuacauucaaaguauuagauuuaaaaaacuauauagacaaacaacuacuucccauauuaaacaaacaaucaugcucaauuuccaacauugaaacuguaauggaauuucaacaaaaaaacaacagacuacuugaaaucacacgagaauuuucaguaaacgcuggaguaacaacaccugucucuaccuacaugcucacaaauagcgaauuacuaucucuaaucaaugacaugccaauaacaaacgaucaaaaaaaacuaauguccaacaacguacaaauaguaagacaacaauccuauucaauaaugugcauaauaaaagaagaagucuuagcauacguuguacaacuaccauuauacggaguaauagauacaccaugcuggaaacuccacacaagcccccucugcacaacaaacaccaaagaagggucaaacauaugcuuaacaagaacagacagaggaugguacugugauaacgcaggaucugucucauucuuuccacaagcagaaacauguaaaguaugcuccaacagagucuuuugcgacaccaugaacucacuaaccuuacccucagaaguaaaccugugcaacaucgauaucuucaaccccaaauacgauugcaaaaucaugacaagcaaaacugauguauccagcucuguaauaacaucacuaggugcaauaguaucaugcuacggaaaaacaaaaugcacagcuucuaacaaaaauaaaggaauaauaaaaacauucuccaauggaugcgacuaugucucaaauaaaggaguagauacaguuucagucggcaacacacucuauuauguaaauaaacaagaaggaaaaucauuauacguaaaaggagaacccauaauaaacuucuacgacccccucguauucccaagcgacgaauuugacgccucaauaucacaaguaaacgaaaaaauaaaccaaucacucgcauucaucagaaaaucagaugaacuacuacacaauguaaacgucggaaaauccaccacaaauauaaugauaacuaccaucauaauaguaauaauagucaucuuacuacuauuaaucgcuguaggacuauuucucuacugcaaggccagauaaggacuaguggaagcauuuuccuggcugauuaaaagaaauuacucagcuauggucaucuguuccuguuagaaggcuaugcagcauauuauauacuaugcgcauguuaugaaaugcauaauaaaaaauuuuaaaaaaucuaaaagaucuaaaaaaaaaaaaaaaaaaaaaaaaaaaaaaaaaaaaaaaaaaaaaaaaaaaaaaaaaaaaaaaaugcaucccccccccccccccccccccccccccccccaaaggcucuuuucagagccaccagaauu

SEQ ID NO: 18897 - RNA, 1897 nt, Artificial Sequence
  mRNA product Design d-4 comprising derived and/or modified sequence from HRSV(Memphis-37)__AIY60640.1__F-del_DSCav1_mut7 (opt11)
gggagagucccgcagucggcguccagcggcucugcuuguucgugugugugucguugcaggccuuauucaagcuuaccauggaacucccaauccucaaaacaaaugccaucaccaccauccuagccgcugucacacuaugcuucgccuccucacaaaacaucaccgaagaguucuaucaauccacaugcuccgccgucagcaagggauaccucuccgcccuuagaaccggcugguacaccucagucaucacaauugaacugucaaacaucaaagaaaacaaaugcaacggcaccgacgcaaaaguaaagcucaucaaacaagaacuggacaaguacaagaacgccgucaccgaacuacagaugcuuaugugcucaaccccugccgccggcuccggaucugccauagcuucaggcaucgccguaugcaaaguccugcaccuagaaggggaagucaacaaaaucaaaaacgcccuccucuccaccaacaaggccguugucucccugucaaacggagucuccguccuaaccuucaaaguccucgaccucaaaaacuacauagacaaacaacuccuacccauccucaacaaacaaagcugcucaauauccaacaucgaaaccgucauggaguuccaacaaaagaacaaccgacuacucgaaauaacacgcgaguucucagucaacgccggcgucaccaccccagucuccacauacaugcucaccaacuccgaacuccuaucgcucaucaacgacaugcccaucaccaaugaccagaagaaacucauguccaacaacguacaaaucguccgccaacaguccuacucaaucaugugcaucaucaaagaagaaguccuugccuacgucguccagcuuccacucuacggagucaucgacacccccugcuggaaacuccacaccuccccacuaugcaccaccaacaccaaagaaggauccaacauaugccucacccguacugaccgcggcugguacugcgacaacgccggauccgucucauucuucccccaggccgaaaccugcaaagucugcuccaaccgcgucuucugcgacaccaugaacucgcucacccucccauccgaagucaaucuaugcaacaucgacauuuucaaccccaaauacgacugcaaaauuaugacaucaaaaaccgacgucucauccucagucaucacuucccucggcgcaaucguaagcugcuacgggaaaacaaagugcaccgcuuccaacaaaaacaaaggcaucaucaaaaccuucucuaacggcugcgacuacgucuccaacaaaggagucgacaccguauccgucggcaacacccucuacuacgucaacaaacaggaaggaaaaucgcucuacgucaaaggagaaccaaucaucaacuucuacgacccccuagucuucccauccgacgaguucgacgccagcaucucacaagucaaugaaaagaucaaccagucacucgcauucauccguaagucagacgaacuccuacacaacgucaacgucggcaagucaacaaccaacauaaugaucaccaccauaaucaucgucauaauaguaauccuccuucuccuaaucgcagucggccucuuccucuacugcaaagcacgcuaaggacuaguggaagcauuuuccuggcugauuaaaagaaauuacucagcuauggucaucuguuccuguuagaaggcuaugcagcauauuauauacuaugcgcauguuaugaaaugcauaauaaaaaauuuuaaaaaaucuaaaagaucuaaaaaaaaaaaaaaaaaaaaaaaaaaaaaaaaaaaaaaaaaaaaaaaaaaaaaaaaaaaaaaaaugcaucccccccccccccccccccccccccccccccaaaggcucuuuucagagccaccagaauu

SEQ ID NO: 18898 - RNA, 1994 nt, Artificial Sequence
  mRNA product Design d-5 comprising derived and/or modified sequence from HRSV(Memphis-37)__AIY60640.1__F-del_DSCav1_mut7 (opt1)
gggagagggcgcuuggcuugcaaggacccugagcugcggcauugaagcacacccaacccaacucgacugaagucagccucacugaaccggaucugagaaucuucucucucugggcuugccagggcucuccgaaccuagcuagcauccucuucaauuccaacuagaaagcuuaccauggagcugcccauccucaagaccaacgccaucaccacgauccuggccgcggugacccugugcuucgccagcucccagaacaucaccgaggaguucuaccagagcacgugcuccgccgucagcaagggcuaccucuccgcccugcgcaccgggugguacaccagcgugaucaccaucgagcuguccaacaucaaggagaacaagugcaacggcaccgacgccaaggugaagcucaucaagcaggagcuggacaaguacaagaacgcggucacggagcugcagaugcugaugugcagcaccccggccgccggcuccgggagcgcgaucgccuccggcaucgccgucugcaaggugcugcaccucgagggcgaggugaacaagaucaagaacgcccugcuguccaccaacaaggccgucgugagccucuccaacggggugagcguccugaccuucaaggugcuggaccucaagaacuacaucgacaagcagcugcugcccauccugaacaagcagagcugcuccaucagcaacaucgagaccgucauggaguuccagcagaagaacaaccgccuccuggagaucacgcgggaguucagcgugaacgcgggcgugaccacccccgucuccaccuacaugcugacgaacagcgagcuccugucccugaucaacgacaugccgaucaccaacgaccagaagaagcucaugagcaacaacgugcagaucgugcgccagcaguccuacagcaucaugugcaucaucaaggaggagguccuggccuacguggugcagcugccccucuacggggucaucgacacccccugcuggaagcugcacaccagcccccugugcacgaccaacaccaaggagggcuccaacaucugccucacccggacggaccgcgggugguacugcgacaacgccggcagcguguccuucuucccgcaggccgagaccugcaaggucugcagcaaccggguguucugcgacaccaugaacucccugacccugcccagcgaggugaaccucugcaacaucgacaucuucaaccccaaguacgacugcaagaucaugacguccaagaccgacgucagcuccagcgugaucaccucccugggcgccaucgugagcugcuacgggaagaccaagugcacggcgagcaacaagaacaagggcaucaucaagaccuucuccaacgggugcgacuacgucagcaacaagggcguggacaccguguccgucggcaacacccuguacuacgugaacaagcaggagggcaagagccucuacgugaagggggagcccaucaucaacuucuacgacccgcuggucuuccccuccgacgaguucgacgccagcaucucccaggugaacgagaagaucaaccagagccuggccuucauccggaaguccgacgagcuccugcacaacgugaacgucggcaagagcaccacgaacaucaugaucaccaccaucaucaucgugaucaucgugauccugcugcuccugaucgccgucgggcuguuccucuacugcaaggcccgcugaggacuaguggaagcauuuuccuggcugauuaaaagaaauuacucagcuauggucaucuguuccuguuagaaggcuaugcagcauauuauauacuaugcgcauguuaugaaaugcauaauaaaaaauuuuaaaaaaucuaaaagaucuaaaaaaaaaaaaaaaaaaaaaaaaaaaaaaaaaaaaaaaaaaaaaaaaaaaaaaaaaaaaaaaaugcaucccccccccccccccccccccccccccccccaaaggcucuuuucagagccaccagaauu

SEQ ID NO: 18899 - RNA, 1994 nt, Artificial Sequence
  mRNA product Design d-5 comprising derived and/or modified sequence from HRSV(Memphis-37)__AIY60640.1__F-del_DSCav1_mut7 (opt1)
gggagagggcgcuuggcuugcaaggacccugagcugcggcauugaagcacacccaacccaacucgacugaagucagccucacugaaccggaucugagaaucuucucucucugggcuugccagggcucuccgaaccuagcuagcauccucuucaauuccaacuagaaagcuuaccauggagcugcccauccucaagaccaacgccaucaccacgauccuggccgcggugacccugugcuucgccagcucccagaacaucaccgaggaguucuaccagagcacgugcuccgccgucagcaagggguaccucuccgcccugcgcaccgggugguacaccagcgugaucaccaucgagcuguccaacaucaaggagaacaagugcaacggcaccgacgccaaggugaagcucaucaagcaggagcuggacaaguacaagaacgcggucacggagcugcagaugcucaugugcagcaccccggccgccggguccggcagcgccaucgcguccgggaucgccgugugcaaggugcugcaccuggagggcgaggucaacaagaucaagaacgcccuccugagcaccaacaaggccguggugucccugagcaacggcgucuccgugcucaccuucaaggugcuggaccugaagaacuacaucgacaagcagcuccugcccauccugaacaagcagagcugcuccaucagcaacaucgagacggucauggaguuccagcagaagaacaaccggcuccuggagaucacccgcgaguucuccgugaacgccggggugaccacccccgucagcacguacaugcugaccaacagcgagcuccugucccugaucaacgacaugcccaucaccaacgaccagaagaagcucaugagcaacaacgugcagaucgugcggcagcaguccuacagcaucaugugcaucaucaaggaggagguccuggcguacguggugcagcugccgcucuacggcgucaucgacacccccugcuggaagcugcacacgagcccccugugcaccaccaacaccaaggaggggagcaacaucugccucacgcgcaccgaccggggcugguacugcgacaacgccggguccgugagcuucuucccccaggccgagaccugcaaggugugcuccaaccgcgucuucugcgacaccaugaacagccugacgcugccguccgaggugaaccucugcaacaucgacaucuucaaccccaaguacgacugcaagaucaugaccagcaagaccgacgucuccagcuccgugaucaccagccugggcgccaucguguccugcuacggcaagacgaagugcaccgccagcaacaagaacaaggggaucaucaagaccuucuccaacggcugcgacuacgucagcaacaaggggguggacaccgugagcgucggcaacacgcuguacuacgugaacaagcaggagggcaagucccucuacgugaagggggagcccaucaucaacuucuacgacccccuggucuucccgagcgacgaguucgacgcguccaucagccaggugaacgagaagaucaaccagucccuggccuucauccggaaguccgacgagcuccugcacaacgugaacgucggcaaguccaccaccaacaucaugaucaccaccaucaucaucgugaucaucgugauccugcuccugcugaucgccgucggccucuuccuguacugcaaggcccgcugaggacuaguggaagcauuuuccuggcugauuaaaagaaauuacucagcuauggucaucuguuccuguuagaaggcuaugcagcauauuauauacuaugcgcauguuaugaaaugcauaauaaaaaauuuuaaaaaaucuaaaagaucuaaaaaaaaaaaaaaaaaaaaaaaaaaaaaaaaaaaaaaaaaaaaaaaaaaaaaaaaaaaaaaaaugcaucccccccccccccccccccccccccccccccaaaggcucuuuucagagccaccagaauu

SEQ ID NO: 18900 - RNA, 1994 nt, Artificial Sequence
  mRNA product Design d-5 comprising derived and/or modified sequence from HRSV(Memphis-37)__AIY60640.1__F-del_DSCav1_mut7 (opt2)
gggagagggcgcuuggcuugcaaggacccugagcugcggcauugaagcacacccaacccaacucgacugaagucagccucacugaaccggaucugagaaucuucucucucugggcuugccagggcucuccgaaccuagcuagcauccucuucaauuccaacuagaaagcuuaccauggagcuccccauccucaagaccaacgccaucaccaccauccucgccgccgucacccucugcuucgccuccucccagaacaucaccgaggaguucuaccaguccaccugcuccgccgucuccaagggcuaccucuccgcccuccgcaccggcugguacaccuccgucaucaccaucgagcucuccaacaucaaggagaacaagugcaacggcaccgacgccaaggucaagcucaucaagcaggagcucgacaaguacaagaacgccgucaccgagcuccagaugcucaugugcuccacccccgccgccggcuccggcuccgccaucgccuccggcaucgccgucugcaagguccuccaccucgagggcgaggucaacaagaucaagaacgcccuccucuccaccaacaaggccgucgucucccucuccaacggcgucuccguccucaccuucaagguccucgaccucaagaacuacaucgacaagcagcuccuccccauccucaacaagcaguccugcuccaucuccaacaucgagaccgucauggaguuccagcagaagaacaaccgccuccucgagaucacccgcgaguucuccgucaacgccggcgucaccacccccgucuccaccuacaugcucaccaacuccgagcuccucucccucaucaacgacaugcccaucaccaacgaccagaagaagcucauguccaacaacguccagaucguccgccagcaguccuacuccaucaugugcaucaucaaggaggagguccucgccuacgucguccagcucccccucuacggcgucaucgacacccccugcuggaagcuccacaccuccccccucugcaccaccaacaccaaggagggcuccaacaucugccucacccgcaccgaccgcggcugguacugcgacaacgccggcuccgucuccuucuucccccaggccgagaccugcaaggucugcuccaaccgcgucuucugcgacaccaugaacucccucacccuccccuccgaggucaaccucugcaacaucgacaucuucaaccccaaguacgacugcaagaucaugaccuccaagaccgacgucuccuccuccgucaucaccucccucggcgccaucgucuccugcuacggcaagaccaagugcaccgccuccaacaagaacaagggcaucaucaagaccuucuccaacggcugcgacuacgucuccaacaagggcgucgacaccgucuccgucggcaacacccucuacuacgucaacaagcaggagggcaagucccucuacgucaagggcgagcccaucaucaacuucuacgacccccucgucuuccccuccgacgaguucgacgccuccaucucccaggucaacgagaagaucaaccagucccucgccuucauccgcaaguccgacgagcuccuccacaacgucaacgucggcaaguccaccaccaacaucaugaucaccaccaucaucaucgucaucaucgucauccuccuccuccucaucgccgucggccucuuccucuacugcaaggcccgcugaggacuaguggaagcauuuuccuggcugauuaaaagaaauuacucagcuauggucaucuguuccuguuagaaggcuaugcagcauauuauauacuaugcgcauguuaugaaaugcauaauaaaaaauuuuaaaaaaucuaaaagaucuaaaaaaaaaaaaaaaaaaaaaaaaaaaaaaaaaaaaaaaaaaaaaaaaaaaaaaaaaaaaaaaaugcaucccccccccccccccccccccccccccccccaaaggcucuuuucagagccaccagaauu

SEQ ID NO: 18901 - RNA, 1994 nt, Artificial Sequence
  mRNA product Design d-5 comprising derived and/or modified sequence from HRSV(Memphis-37)__AIY60640.1__F-del_DSCav1_mut7 (opt3)
gggagagggcgcuuggcuugcaaggacccugagcugcggcauugaagcacacccaacccaacucgacugaagucagccucacugaaccggaucugagaaucuucucucucugggcuugccagggcucuccgaaccuagcuagcauccucuucaauuccaacuagaaagcuuaccauggagcugcccauccucaagaccaacgccauuacaacuauacuugcugcagugacgcugugcuucgccagcucccagaauaucaccgaagaguuuuaccaaucuacauguucagcggucaguaaaggcuauuugagcgcuuuaagaacugggugguacaccuccguuauuacaaucgaacugucuaacauuaaggagaauaaaugcaacggaaccgacgccaaggugaaacuaaucaagcaggaacucgauaaguauaaaaaugcaguaacugagcugcagaugcuuauguguucgaccccugccgcugguucaggcagcgcaauagccagugggaucgcugugugcaagguccugcacuuggagggagaagugaacaaaauuaagaaugcccuccuguccacaaacaaagcgguugugucucugagcaauggcgucuccgugcucacguucaagguauuagaccugaagaacuacaucgauaaacagcuuuugccaauucugaauaagcaaucauguaguaucagcaacauagagacuguuauggaauuucagcagaaaaauaacaggcuacucgagauuacccgggaguucucugugaaugccggugucacaacuccgguguccaccuauaugcugacaaacucagaacuucugagcuugaucaacgacaugcccauuaccaaugaucagaagaaacucaugaguaacaaugugcaaaucguccgccagcagucuuacuccaucaugugcauuauaaaggaggaaguucuggcauaugugguacaguuaccucuguacggggugaucgacacgccauguuggaaacuccauacuagcccccuuugcacaaccaacacuaaggagggaucgaauauuugucugacacgaaccgaucguggcugguacugcgacaacgcuggcucugucuccuuuuucccucaagccgaaacguguaaggugugcucaaauagaguguuuugcgauaccaugaacaguuugacacuaccaagcgagguuaaucuguguaacaucgacauauucaaucccaaauaugauugcaagauuaugacuuccaaaaccgacgucucuagcucagugaucacaagucucggggcaaucguauccuguuacggaaagacuaaaugcaccgcuagcaacaagaauaaggguauuaucaaaacauuuucuaacggcugugauuauguuucaaauaaggggguggacaccgucagugugggaaacacucuguacuaugucaacaaacaggagggcaagagccuuuacgugaaaggugaaccuauuauaaauuucuaugacccacugguuuuuccguccgaugaguucgacgccucuaucagccaggugaacgaaaagauuaaucaaucguuggcguuuaucaggaaguccgaugagcuccugcacaacguaaaugucgggaaaucaacgacaaacaucaugauuaccacuauaaucauugugaucauuguuaucuuacugcuacucauagccgugggacuguuccuuuacugcaaggcacggugaggacuaguggaagcauuuuccuggcugauuaaaagaaauuacucagcuauggucaucuguuccuguuagaaggcuaugcagcauauuauauacuaugcgcauguuaugaaaugcauaauaaaaaauuuuaaaaaaucuaaaagaucuaaaaaaaaaaaaaaaaaaaaaaaaaaaaaaaaaaaaaaaaaaaaaaaaaaaaaaaaaaaaaaaaugcaucccccccccccccccccccccccccccccccaaaggcucuuuucagagccaccagaauu

SEQ ID NO: 18902 - RNA, 1994 nt, Artificial Sequence
  mRNA product Design d-5 comprising derived and/or modified sequence from HRSV(Memphis-37)__AIY60640.1__F-del_DSCav1_mut7 (opt4)
gggagagggcgcuuggcuugcaaggacccugagcugcggcauugaagcacacccaacccaacucgacugaagucagccucacugaaccggaucugagaaucuucucucucugggcuugccagggcucuccgaaccuagcuagcauccucuucaauuccaacuagaaagcuuaccauggagcugcccauccugaagaccaacgccaucaccaccauccuggccgccgugacccugugcuucgccagcagccagaacaucaccgaggaguucuaccagagcaccugcagcgccgugagcaagggcuaccugagcgcccugagaaccggcugguacaccagcgugaucaccaucgagcugagcaacaucaaggagaacaagugcaacggcaccgacgccaaggugaagcugaucaagcaggagcuggacaaguacaagaacgccgugaccgagcugcagaugcugaugugcagcacccccgccgccggcagcggcagcgccaucgccagcggcaucgccgugugcaaggugcugcaccuggagggcgaggugaacaagaucaagaacgcccugcugagcaccaacaaggccguggugagccugagcaacggcgugagcgugcugaccuucaaggugcuggaccugaagaacuacaucgacaagcagcugcugcccauccugaacaagcagagcugcagcaucagcaacaucgagaccgugauggaguuccagcagaagaacaacagacugcuggagaucaccagagaguucagcgugaacgccggcgugaccacccccgugagcaccuacaugcugaccaacagcgagcugcugagccugaucaacgacaugcccaucaccaacgaccagaagaagcugaugagcaacaacgugcagaucgugagacagcagagcuacagcaucaugugcaucaucaaggaggaggugcuggccuacguggugcagcugccccuguacggcgugaucgacacccccugcuggaagcugcacaccagcccccugugcaccaccaacaccaaggagggcagcaacaucugccugaccagaaccgacagaggcugguacugcgacaacgccggcagcgugagcuucuucccccaggccgagaccugcaaggugugcagcaacagaguguucugcgacaccaugaacagccugacccugcccagcgaggugaaccugugcaacaucgacaucuucaaccccaaguacgacugcaagaucaugaccagcaagaccgacgugagcagcagcgugaucaccagccugggcgccaucgugagcugcuacggcaagaccaagugcaccgccagcaacaagaacaagggcaucaucaagaccuucagcaacggcugcgacuacgugagcaacaagggcguggacaccgugagcgugggcaacacccuguacuacgugaacaagcaggagggcaagagccuguacgugaagggcgagcccaucaucaacuucuacgacccccugguguuccccagcgacgaguucgacgccagcaucagccaggugaacgagaagaucaaccagagccuggccuucaucagaaagagcgacgagcugcugcacaacgugaacgugggcaagagcaccaccaacaucaugaucaccaccaucaucaucgugaucaucgugauccugcugcugcugaucgccgugggccuguuccuguacugcaaggccagaugaggacuaguggaagcauuuuccuggcugauuaaaagaaauuacucagcuauggucaucuguuccuguuagaaggcuaugcagcauauuauauacuaugcgcauguuaugaaaugcauaauaaaaaauuuuaaaaaaucuaaaagaucuaaaaaaaaaaaaaaaaaaaaaaaaaaaaaaaaaaaaaaaaaaaaaaaaaaaaaaaaaaaaaaaaugcaucccccccccccccccccccccccccccccccaaaggcucuuuucagagccaccagaauu

SEQ ID NO: 18903 - RNA, 1994 nt, Artificial Sequence
  mRNA product Design d-5 comprising derived and/or modified sequence from HRSV(Memphis-37)__AIY60640.1__F-del_DSCav1_mut7 (opt5)
gggagagggcgcuuggcuugcaaggacccugagcugcggcauugaagcacacccaacccaacucgacugaagucagccucacugaaccggaucugagaaucuucucucucugggcuugccagggcucuccgaaccuagcuagcauccucuucaauuccaacuagaaagcuuaccauggagcugcccauccucaagaccaacgccauuacaacgauccuggcugccgugacccuuugcuucgcgagcucccagaauauuacagaagaguuuuaccaaucuaccuguagcgcugucuccaaaggcuaucugucugcccucagaacagggugguacaccagcguuaucacaauugaacuguccaacaucaaggagaauaaaugcaacggaaccgacgccaaggugaaacuuaucaagcaggaacuggauaaguauaaaaaugcugugacggagcuccagaugcugauguguucuaccccugccgcuggcagcggguccgccauugcgagcggaaucgccgucugcaaggugcugcaccucgagggcgaaguuaacaaaauuaagaaugcucugcuuucuacaaacaaagccguggucucccugagcaauggggugucuguucucaccuucaaggugcuggaccuuaagaacuacaucgauaaacagcugcucccgauucugaauaagcaauccuguagcaucucuaacauugagacagucauggaauuucagcagaaaaauaaccggcugcucgagaucacccgcgaguucuccgugaaugcuggagugacgacacccgucagcaccuauaugcugacaaacuccgaacuucugucucucaucaacgacaugccuauuaccaaugaucagaagaaacugaugagcaacaauguucaaaucgugagacagcaguccuacagcauuaugugcaucauuaaggaggaagugcuugccuaugucgugcagcugccccucuacggcguuaucgacaccccuuguuggaaacugcauacaucuccccugugcacgaccaacacaaaggagggcuccaauaucugucucacccggacagaucgcgggugguacugcgacaacgcgggaagcgugagcuuuuucccucaagccgaaaccuguaaggucugcucuaauagaguguuuugcgauacgaugaacucccugacacuuccgucugagguuaaucuguguaacauugacaucuucaaucccaaauaugauugcaagauuaugaccagcaaaaccgacguguccagcucugucaucacaucccucggcgcuauugugagcuguuacgggaagaccaaaugcacagccucuaacaagaauaagggaaucaucaaaacguuuuccaacggcugugauuaugucagcaauaaggggguggacaccguuuccgugggaaacacacuguacuaugucaacaaacaggagggcaagucucuuuacgugaaaggcgaaccuauuaucaauuucuaugacccccugguuuuuccuagcgaugaguucgacgcuuccauuucucaggugaacgaaaagaucaaucaaagccucgccuuuauucggaaguccgaugagcugcugcacaacgucaauguggggaaaagcaccacaaacaucaugauuaccacgaucaucauugugaucauuguuauccuccugcuucugauugccgucggacucuuccuguacugcaaggcucgcugaggacuaguggaagcauuuuccuggcugauuaaaagaaauuacucagcuauggucaucuguuccuguuagaaggcuaugcagcauauuauauacuaugcgcauguuaugaaaugcauaauaaaaaauuuuaaaaaaucuaaaagaucuaaaaaaaaaaaaaaaaaaaaaaaaaaaaaaaaaaaaaaaaaaaaaaaaaaaaaaaaaaaaaaaaugcaucccccccccccccccccccccccccccccccaaaggcucuuuucagagccaccagaauu

SEQ ID NO: 18904 - RNA, 1994 nt, Artificial Sequence
  mRNA product Design d-5 comprising derived and/or modified sequence from HRSV(Memphis-37)__AIY60640.1__F-del_DSCav1_mut7 (opt6)
gggagagggcgcuuggcuugcaaggacccugagcugcggcauugaagcacacccaacccaacucgacugaagucagccucacugaaccggaucugagaaucuucucucucugggcuugccagggcucuccgaaccuagcuagcauccucuucaauuccaacuagaaagcuuaccauggaacuaccaauacucaaaacaaacgccauaaccacaauacuagccgcaguaacacuuugcuuugccucaagucaaaacauaacagaagaauuuuaccaauccacaugcucagcuguauccaaaggauauuuauccgcacuaagaacaggaugguacacaucaguaaucacaauagaauuaucaaacauaaaagaaaacaaauguaauggcacagacgccaaaguaaaacuaauuaaacaagaacuagacaaauauaaaaaugcaguaaccgaacuccaaaugcucaugugcucuacaccagcugcaggaucaggaucagccauugcaagcgguauagcuguuugcaaaguauuacacuuagaaggagaaguaaauaaaauaaaaaacgcacuacuaucaacaaauaaagcaguaguaucccuaucaaacggaguaucaguacuuacauucaaaguauuagauuuaaaaaacuauauagacaaacaacuacuucccauauuaaacaaacaaucaugcucaauuuccaacauugaaacuguaauggaauuucaacaaaaaaacaacagacuacuugaaaucacacgagaauuuucaguaaacgcuggaguaacaacaccugucucuaccuacaugcucacaaauagcgaauuacuaucucuaaucaaugacaugccaauaacaaacgaucaaaaaaaacuaauguccaacaacguacaaauaguaagacaacaauccuauucaauaaugugcauaauaaaagaagaagucuuagcauacguuguacaacuaccauuauacggaguaauagauacaccaugcuggaaacuccacacaagcccccucugcacaacaaacaccaaagaagggucaaacauaugcuuaacaagaacagacagaggaugguacugugauaacgcaggaucugucucauucuuuccacaagcagaaacauguaaaguaugcuccaacagagucuuuugcgacaccaugaacucacuaaccuuacccucagaaguaaaccugugcaacaucgauaucuucaaccccaaauacgauugcaaaaucaugacaagcaaaacugauguauccagcucuguaauaacaucacuaggugcaauaguaucaugcuacggaaaaacaaaaugcacagcuucuaacaaaaauaaaggaauaauaaaaacauucuccaauggaugcgacuaugucucaaauaaaggaguagauacaguuucagucggcaacacacucuauuauguaaauaaacaagaaggaaaaucauuauacguaaaaggagaacccauaauaaacuucuacgacccccucguauucccaagcgacgaauuugacgccucaauaucacaaguaaacgaaaaaauaaaccaaucacucgcauucaucagaaaaucagaugaacuacuacacaauguaaacgucggaaaauccaccacaaauauaaugauaacuaccaucauaauaguaauaauagucaucuuacuacuauuaaucgcuguaggacuauuucucuacugcaaggccagauaaggacuaguggaagcauuuuccuggcugauuaaaagaaauuacucagcuauggucaucuguuccuguuagaaggcuaugcagcauauuauauacuaugcgcauguuaugaaaugcauaauaaaaaauuuuaaaaaaucuaaaagaucuaaaaaaaaaaaaaaaaaaaaaaaaaaaaaaaaaaaaaaaaaaaaaaaaaaaaaaaaaaaaaaaaugcaucccccccccccccccccccccccccccccccaaaggcucuuuucagagccaccagaauu

SEQ ID NO: 18905 - RNA, 1994 nt, Artificial Sequence
  mRNA product Design d-5 comprising derived and/or modified sequence from HRSV(Memphis-37)__AIY60640.1__F-del_DSCav1_mut7 (opt11)
gggagagggcgcuuggcuugcaaggacccugagcugcggcauugaagcacacccaacccaacucgacugaagucagccucacugaaccggaucugagaaucuucucucucugggcuugccagggcucuccgaaccuagcuagcauccucuucaauuccaacuagaaagcuuaccauggaacucccaauccucaaaacaaaugccaucaccaccauccuagccgcugucacacuaugcuucgccuccucacaaaacaucaccgaagaguucuaucaauccacaugcuccgccgucagcaagggauaccucuccgcccuuagaaccggcugguacaccucagucaucacaauugaacugucaaacaucaaagaaaacaaaugcaacggcaccgacgcaaaaguaaagcucaucaaacaagaacuggacaaguacaagaacgccgucaccgaacuacagaugcuuaugugcucaaccccugccgccggcuccggaucugccauagcuucaggcaucgccguaugcaaaguccugcaccuagaaggggaagucaacaaaaucaaaaacgcccuccucuccaccaacaaggccguugucucccugucaaacggagucuccguccuaaccuucaaaguccucgaccucaaaaacuacauagacaaacaacuccuacccauccucaacaaacaaagcugcucaauauccaacaucgaaaccgucauggaguuccaacaaaagaacaaccgacuacucgaaauaacacgcgaguucucagucaacgccggcgucaccaccccagucuccacauacaugcucaccaacuccgaacuccuaucgcucaucaacgacaugcccaucaccaaugaccagaagaaacucauguccaacaacguacaaaucguccgccaacaguccuacucaaucaugugcaucaucaaagaagaaguccuugccuacgucguccagcuuccacucuacggagucaucgacacccccugcuggaaacuccacaccuccccacuaugcaccaccaacaccaaagaaggauccaacauaugccucacccguacugaccgcggcugguacugcgacaacgccggauccgucucauucuucccccaggccgaaaccugcaaagucugcuccaaccgcgucuucugcgacaccaugaacucgcucacccucccauccgaagucaaucuaugcaacaucgacauuuucaaccccaaauacgacugcaaaauuaugacaucaaaaaccgacgucucauccucagucaucacuucccucggcgcaaucguaagcugcuacgggaaaacaaagugcaccgcuuccaacaaaaacaaaggcaucaucaaaaccuucucuaacggcugcgacuacgucuccaacaaaggagucgacaccguauccgucggcaacacccucuacuacgucaacaaacaggaaggaaaaucgcucuacgucaaaggagaaccaaucaucaacuucuacgacccccuagucuucccauccgacgaguucgacgccagcaucucacaagucaaugaaaagaucaaccagucacucgcauucauccguaagucagacgaacuccuacacaacgucaacgucggcaagucaacaaccaacauaaugaucaccaccauaaucaucgucauaauaguaauccuccuucuccuaaucgcagucggccucuuccucuacugcaaagcacgcuaaggacuaguggaagcauuuuccuggcugauuaaaagaaauuacucagcuauggucaucuguuccuguuagaaggcuaugcagcauauuauauacuaugcgcauguuaugaaaugcauaauaaaaaauuuuaaaaaaucuaaaagaucuaaaaaaaaaaaaaaaaaaaaaaaaaaaaaaaaaaaaaaaaaaaaaaaaaaaaaaaaaaaaaaaaugcaucccccccccccccccccccccccccccccccaaaggcucuuuucagagccaccagaauu

SEQ ID NO: 18906 - RNA, 1874 nt, Artificial Sequence
  mRNA product Design e-1 comprising derived and/or modified sequence from HRSV(Memphis-37)__AIY60640.1__F-del_DSCav1_mut7 (opt1)
gggagaauauaagcguuggcggagcgucgguuguagcacucugcgcgcccgcucuucugcugcuguuugucuacuuccuccugcuuccccgccgccgccgccgccaucaagcuuaccauggagcugcccauccucaagaccaacgccaucaccacgauccuggccgcggugacccugugcuucgccagcucccagaacaucaccgaggaguucuaccagagcacgugcuccgccgucagcaagggcuaccucuccgcccugcgcaccgggugguacaccagcgugaucaccaucgagcuguccaacaucaaggagaacaagugcaacggcaccgacgccaaggugaagcucaucaagcaggagcuggacaaguacaagaacgcggucacggagcugcagaugcugaugugcagcaccccggccgccggcuccgggagcgcgaucgccuccggcaucgccgucugcaaggugcugcaccucgagggcgaggugaacaagaucaagaacgcccugcuguccaccaacaaggccgucgugagccucuccaacggggugagcguccugaccuucaaggugcuggaccucaagaacuacaucgacaagcagcugcugcccauccugaacaagcagagcugcuccaucagcaacaucgagaccgucauggaguuccagcagaagaacaaccgccuccuggagaucacgcgggaguucagcgugaacgcgggcgugaccacccccgucuccaccuacaugcugacgaacagcgagcuccugucccugaucaacgacaugccgaucaccaacgaccagaagaagcucaugagcaacaacgugcagaucgugcgccagcaguccuacagcaucaugugcaucaucaaggaggagguccuggccuacguggugcagcugccccucuacggggucaucgacacccccugcuggaagcugcacaccagcccccugugcacgaccaacaccaaggagggcuccaacaucugccucacccggacggaccgcgggugguacugcgacaacgccggcagcguguccuucuucccgcaggccgagaccugcaaggucugcagcaaccggguguucugcgacaccaugaacucccugacccugcccagcgaggugaaccucugcaacaucgacaucuucaaccccaaguacgacugcaagaucaugacguccaagaccgacgucagcuccagcgugaucaccucccugggcgccaucgugagcugcuacgggaagaccaagugcacggcgagcaacaagaacaagggcaucaucaagaccuucuccaacgggugcgacuacgucagcaacaagggcguggacaccguguccgucggcaacacccuguacuacgugaacaagcaggagggcaagagccucuacgugaagggggagcccaucaucaacuucuacgacccgcuggucuuccccuccgacgaguucgacgccagcaucucccaggugaacgagaagaucaaccagagccuggccuucauccggaaguccgacgagcuccugcacaacgugaacgucggcaagagcaccacgaacaucaugaucaccaccaucaucaucgugaucaucgugauccugcugcuccugaucgccgucgggcuguuccucuacugcaaggcccgcugaggacuaguguccaccugucccuccugggcugcuggauugucucguuuuccugccaaauaaacaggaucagcgcuuuacagaucuaaaaaaaaaaaaaaaaaaaaaaaaaaaaaaaaaaaaaaaaaaaaaaaaaaaaaaaaaaaaaaaaugcaucccccccccccccccccccccccccccccccaaaggcucuuuucagagccaccagaauu

SEQ ID NO: 18907 - RNA, 1874 nt, Artificial Sequence
  mRNA product Design e-1 comprising derived and/or modified sequence from HRSV(Memphis-37)__AIY60640.1__F-del_DSCav1_mut7 (opt1)
gggagaauauaagcguuggcggagcgucgguuguagcacucugcgcgcccgcucuucugcugcuguuugucuacuuccuccugcuuccccgccgccgccgccgccaucaagcuuaccauggagcugcccauccucaagaccaacgccaucaccacgauccuggccgcggugacccugugcuucgccagcucccagaacaucaccgaggaguucuaccagagcacgugcuccgccgucagcaagggguaccucuccgcccugcgcaccgggugguacaccagcgugaucaccaucgagcuguccaacaucaaggagaacaagugcaacggcaccgacgccaaggugaagcucaucaagcaggagcuggacaaguacaagaacgcggucacggagcugcagaugcucaugugcagcaccccggccgccggguccggcagcgccaucgcguccgggaucgccgugugcaaggugcugcaccuggagggcgaggucaacaagaucaagaacgcccuccugagcaccaacaaggccguggugucccugagcaacggcgucuccgugcucaccuucaaggugcuggaccugaagaacuacaucgacaagcagcuccugcccauccugaacaagcagagcugcuccaucagcaacaucgagacggucauggaguuccagcagaagaacaaccggcuccuggagaucacccgcgaguucuccgugaacgccggggugaccacccccgucagcacguacaugcugaccaacagcgagcuccugucccugaucaacgacaugcccaucaccaacgaccagaagaagcucaugagcaacaacgugcagaucgugcggcagcaguccuacagcaucaugugcaucaucaaggaggagguccuggcguacguggugcagcugccgcucuacggcgucaucgacacccccugcuggaagcugcacacgagcccccugugcaccaccaacaccaaggaggggagcaacaucugccucacgcgcaccgaccggggcugguacugcgacaacgccggguccgugagcuucuucccccaggccgagaccugcaaggugugcuccaaccgcgucuucugcgacaccaugaacagccugacgcugccguccgaggugaaccucugcaacaucgacaucuucaaccccaaguacgacugcaagaucaugaccagcaagaccgacgucuccagcuccgugaucaccagccugggcgccaucguguccugcuacggcaagacgaagugcaccgccagcaacaagaacaaggggaucaucaagaccuucuccaacggcugcgacuacgucagcaacaaggggguggacaccgugagcgucggcaacacgcuguacuacgugaacaagcaggagggcaagucccucuacgugaagggggagcccaucaucaacuucuacgacccccuggucuucccgagcgacgaguucgacgcguccaucagccaggugaacgagaagaucaaccagucccuggccuucauccggaaguccgacgagcuccugcacaacgugaacgucggcaaguccaccaccaacaucaugaucaccaccaucaucaucgugaucaucgugauccugcuccugcugaucgccgucggccucuuccuguacugcaaggcccgcugaggacuaguguccaccugucccuccugggcugcuggauugucucguuuuccugccaaauaaacaggaucagcgcuuuacagaucuaaaaaaaaaaaaaaaaaaaaaaaaaaaaaaaaaaaaaaaaaaaaaaaaaaaaaaaaaaaaaaaaugcaucccccccccccccccccccccccccccccccaaaggcucuuuucagagccaccagaauu

SEQ ID NO: 18908 - RNA, 1874 nt, Artificial Sequence
  mRNA product Design e-1 comprising derived and/or modified sequence from HRSV(Memphis-37)__AIY60640.1__F-del_DSCav1_mut7 (opt2)
gggagaauauaagcguuggcggagcgucgguuguagcacucugcgcgcccgcucuucugcugcuguuugucuacuuccuccugcuuccccgccgccgccgccgccaucaagcuuaccauggagcuccccauccucaagaccaacgccaucaccaccauccucgccgccgucacccucugcuucgccuccucccagaacaucaccgaggaguucuaccaguccaccugcuccgccgucuccaagggcuaccucuccgcccuccgcaccggcugguacaccuccgucaucaccaucgagcucuccaacaucaaggagaacaagugcaacggcaccgacgccaaggucaagcucaucaagcaggagcucgacaaguacaagaacgccgucaccgagcuccagaugcucaugugcuccacccccgccgccggcuccggcuccgccaucgccuccggcaucgccgucugcaagguccuccaccucgagggcgaggucaacaagaucaagaacgcccuccucuccaccaacaaggccgucgucucccucuccaacggcgucuccguccucaccuucaagguccucgaccucaagaacuacaucgacaagcagcuccuccccauccucaacaagcaguccugcuccaucuccaacaucgagaccgucauggaguuccagcagaagaacaaccgccuccucgagaucacccgcgaguucuccgucaacgccggcgucaccacccccgucuccaccuacaugcucaccaacuccgagcuccucucccucaucaacgacaugcccaucaccaacgaccagaagaagcucauguccaacaacguccagaucguccgccagcaguccuacuccaucaugugcaucaucaaggaggagguccucgccuacgucguccagcucccccucuacggcgucaucgacacccccugcuggaagcuccacaccuccccccucugcaccaccaacaccaaggagggcuccaacaucugccucacccgcaccgaccgcggcugguacugcgacaacgccggcuccgucuccuucuucccccaggccgagaccugcaaggucugcuccaaccgcgucuucugcgacaccaugaacucccucacccuccccuccgaggucaaccucugcaacaucgacaucuucaaccccaaguacgacugcaagaucaugaccuccaagaccgacgucuccuccuccgucaucaccucccucggcgccaucgucuccugcuacggcaagaccaagugcaccgccuccaacaagaacaagggcaucaucaagaccuucuccaacggcugcgacuacgucuccaacaagggcgucgacaccgucuccgucggcaacacccucuacuacgucaacaagcaggagggcaagucccucuacgucaagggcgagcccaucaucaacuucuacgacccccucgucuuccccuccgacgaguucgacgccuccaucucccaggucaacgagaagaucaaccagucccucgccuucauccgcaaguccgacgagcuccuccacaacgucaacgucggcaaguccaccaccaacaucaugaucaccaccaucaucaucgucaucaucgucauccuccuccuccucaucgccgucggccucuuccucuacugcaaggcccgcugaggacuaguguccaccugucccuccugggcugcuggauugucucguuuuccugccaaauaaacaggaucagcgcuuuacagaucuaaaaaaaaaaaaaaaaaaaaaaaaaaaaaaaaaaaaaaaaaaaaaaaaaaaaaaaaaaaaaaaaugcaucccccccccccccccccccccccccccccccaaaggcucuuuucagagccaccagaauu

SEQ ID NO: 18909 - RNA, 1874 nt, Artificial Sequence
  mRNA product Design e-1 comprising derived and/or modified sequence from HRSV(Memphis-37)__AIY60640.1__F-del_DSCav1_mut7 (opt3)
gggagaauauaagcguuggcggagcgucgguuguagcacucugcgcgcccgcucuucugcugcuguuugucuacuuccuccugcuuccccgccgccgccgccgccaucaagcuuaccauggagcugcccauccucaagaccaacgccauuacaacuauacuugcugcagugacgcugugcuucgccagcucccagaauaucaccgaagaguuuuaccaaucuacauguucagcggucaguaaaggcuauuugagcgcuuuaagaacugggugguacaccuccguuauuacaaucgaacugucuaacauuaaggagaauaaaugcaacggaaccgacgccaaggugaaacuaaucaagcaggaacucgauaaguauaaaaaugcaguaacugagcugcagaugcuuauguguucgaccccugccgcugguucaggcagcgcaauagccagugggaucgcugugugcaagguccugcacuuggagggagaagugaacaaaauuaagaaugcccuccuguccacaaacaaagcgguugugucucugagcaauggcgucuccgugcucacguucaagguauuagaccugaagaacuacaucgauaaacagcuuuugccaauucugaauaagcaaucauguaguaucagcaacauagagacuguuauggaauuucagcagaaaaauaacaggcuacucgagauuacccgggaguucucugugaaugccggugucacaacuccgguguccaccuauaugcugacaaacucagaacuucugagcuugaucaacgacaugcccauuaccaaugaucagaagaaacucaugaguaacaaugugcaaaucguccgccagcagucuuacuccaucaugugcauuauaaaggaggaaguucuggcauaugugguacaguuaccucuguacggggugaucgacacgccauguuggaaacuccauacuagcccccuuugcacaaccaacacuaaggagggaucgaauauuugucugacacgaaccgaucguggcugguacugcgacaacgcuggcucugucuccuuuuucccucaagccgaaacguguaaggugugcucaaauagaguguuuugcgauaccaugaacaguuugacacuaccaagcgagguuaaucuguguaacaucgacauauucaaucccaaauaugauugcaagauuaugacuuccaaaaccgacgucucuagcucagugaucacaagucucggggcaaucguauccuguuacggaaagacuaaaugcaccgcuagcaacaagaauaaggguauuaucaaaacauuuucuaacggcugugauuauguuucaaauaaggggguggacaccgucagugugggaaacacucuguacuaugucaacaaacaggagggcaagagccuuuacgugaaaggugaaccuauuauaaauuucuaugacccacugguuuuuccguccgaugaguucgacgccucuaucagccaggugaacgaaaagauuaaucaaucguuggcguuuaucaggaaguccgaugagcuccugcacaacguaaaugucgggaaaucaacgacaaacaucaugauuaccacuauaaucauugugaucauuguuaucuuacugcuacucauagccgugggacuguuccuuuacugcaaggcacggugaggacuaguguccaccugucccuccugggcugcuggauugucucguuuuccugccaaauaaacaggaucagcgcuuuacagaucuaaaaaaaaaaaaaaaaaaaaaaaaaaaaaaaaaaaaaaaaaaaaaaaaaaaaaaaaaaaaaaaaugcaucccccccccccccccccccccccccccccccaaaggcucuuuucagagccaccagaauu

SEQ ID NO: 18910 - RNA, 1874 nt, Artificial Sequence
  mRNA product Design e-1 comprising derived and/or modified sequence from HRSV(Memphis-37)__AIY60640.1__F-del_DSCav1_mut7 (opt4)
gggagaauauaagcguuggcggagcgucgguuguagcacucugcgcgcccgcucuucugcugcuguuugucuacuuccuccugcuuccccgccgccgccgccgccaucaagcuuaccauggagcugcccauccugaagaccaacgccaucaccaccauccuggccgccgugacccugugcuucgccagcagccagaacaucaccgaggaguucuaccagagcaccugcagcgccgugagcaagggcuaccugagcgcccugagaaccggcugguacaccagcgugaucaccaucgagcugagcaacaucaaggagaacaagugcaacggcaccgacgccaaggugaagcugaucaagcaggagcuggacaaguacaagaacgccgugaccgagcugcagaugcugaugugcagcacccccgccgccggcagcggcagcgccaucgccagcggcaucgccgugugcaaggugcugcaccuggagggcgaggugaacaagaucaagaacgcccugcugagcaccaacaaggccguggugagccugagcaacggcgugagcgugcugaccuucaaggugcuggaccugaagaacuacaucgacaagcagcugcugcccauccugaacaagcagagcugcagcaucagcaacaucgagaccgugauggaguuccagcagaagaacaacagacugcuggagaucaccagagaguucagcgugaacgccggcgugaccacccccgugagcaccuacaugcugaccaacagcgagcugcugagccugaucaacgacaugcccaucaccaacgaccagaagaagcugaugagcaacaacgugcagaucgugagacagcagagcuacagcaucaugugcaucaucaaggaggaggugcuggccuacguggugcagcugccccuguacggcgugaucgacacccccugcuggaagcugcacaccagcccccugugcaccaccaacaccaaggagggcagcaacaucugccugaccagaaccgacagaggcugguacugcgacaacgccggcagcgugagcuucuucccccaggccgagaccugcaaggugugcagcaacagaguguucugcgacaccaugaacagccugacccugcccagcgaggugaaccugugcaacaucgacaucuucaaccccaaguacgacugcaagaucaugaccagcaagaccgacgugagcagcagcgugaucaccagccugggcgccaucgugagcugcuacggcaagaccaagugcaccgccagcaacaagaacaagggcaucaucaagaccuucagcaacggcugcgacuacgugagcaacaagggcguggacaccgugagcgugggcaacacccuguacuacgugaacaagcaggagggcaagagccuguacgugaagggcgagcccaucaucaacuucuacgacccccugguguuccccagcgacgaguucgacgccagcaucagccaggugaacgagaagaucaaccagagccuggccuucaucagaaagagcgacgagcugcugcacaacgugaacgugggcaagagcaccaccaacaucaugaucaccaccaucaucaucgugaucaucgugauccugcugcugcugaucgccgugggccuguuccuguacugcaaggccagaugaggacuaguguccaccugucccuccugggcugcuggauugucucguuuuccugccaaauaaacaggaucagcgcuuuacagaucuaaaaaaaaaaaaaaaaaaaaaaaaaaaaaaaaaaaaaaaaaaaaaaaaaaaaaaaaaaaaaaaaugcaucccccccccccccccccccccccccccccccaaaggcucuuuucagagccaccagaauu

SEQ ID NO: 18911 - RNA, 1874 nt, Artificial Sequence
  mRNA product Design e-1 comprising derived and/or modified sequence from HRSV(Memphis-37)__AIY60640.1__F-del_DSCav1_mut7 (opt5)
gggagaauauaagcguuggcggagcgucgguuguagcacucugcgcgcccgcucuucugcugcuguuugucuacuuccuccugcuuccccgccgccgccgccgccaucaagcuuaccauggagcugcccauccucaagaccaacgccauuacaacgauccuggcugccgugacccuuugcuucgcgagcucccagaauauuacagaagaguuuuaccaaucuaccuguagcgcugucuccaaaggcuaucugucugcccucagaacagggugguacaccagcguuaucacaauugaacuguccaacaucaaggagaauaaaugcaacggaaccgacgccaaggugaaacuuaucaagcaggaacuggauaaguauaaaaaugcugugacggagcuccagaugcugauguguucuaccccugccgcuggcagcggguccgccauugcgagcggaaucgccgucugcaaggugcugcaccucgagggcgaaguuaacaaaauuaagaaugcucugcuuucuacaaacaaagccguggucucccugagcaauggggugucuguucucaccuucaaggugcuggaccuuaagaacuacaucgauaaacagcugcucccgauucugaauaagcaauccuguagcaucucuaacauugagacagucauggaauuucagcagaaaaauaaccggcugcucgagaucacccgcgaguucuccgugaaugcuggagugacgacacccgucagcaccuauaugcugacaaacuccgaacuucugucucucaucaacgacaugccuauuaccaaugaucagaagaaacugaugagcaacaauguucaaaucgugagacagcaguccuacagcauuaugugcaucauuaaggaggaagugcuugccuaugucgugcagcugccccucuacggcguuaucgacaccccuuguuggaaacugcauacaucuccccugugcacgaccaacacaaaggagggcuccaauaucugucucacccggacagaucgcgggugguacugcgacaacgcgggaagcgugagcuuuuucccucaagccgaaaccuguaaggucugcucuaauagaguguuuugcgauacgaugaacucccugacacuuccgucugagguuaaucuguguaacauugacaucuucaaucccaaauaugauugcaagauuaugaccagcaaaaccgacguguccagcucugucaucacaucccucggcgcuauugugagcuguuacgggaagaccaaaugcacagccucuaacaagaauaagggaaucaucaaaacguuuuccaacggcugugauuaugucagcaauaaggggguggacaccguuuccgugggaaacacacuguacuaugucaacaaacaggagggcaagucucuuuacgugaaaggcgaaccuauuaucaauuucuaugacccccugguuuuuccuagcgaugaguucgacgcuuccauuucucaggugaacgaaaagaucaaucaaagccucgccuuuauucggaaguccgaugagcugcugcacaacgucaauguggggaaaagcaccacaaacaucaugauuaccacgaucaucauugugaucauuguuauccuccugcuucugauugccgucggacucuuccuguacugcaaggcucgcugaggacuaguguccaccugucccuccugggcugcuggauugucucguuuuccugccaaauaaacaggaucagcgcuuuacagaucuaaaaaaaaaaaaaaaaaaaaaaaaaaaaaaaaaaaaaaaaaaaaaaaaaaaaaaaaaaaaaaaaugcaucccccccccccccccccccccccccccccccaaaggcucuuuucagagccaccagaauu

SEQ ID NO: 18912 - RNA, 1874 nt, Artificial Sequence
  mRNA product Design e-1 comprising derived and/or modified sequence from HRSV(Memphis-37)__AIY60640.1__F-del_DSCav1_mut7 (opt6)
gggagaauauaagcguuggcggagcgucgguuguagcacucugcgcgcccgcucuucugcugcuguuugucuacuuccuccugcuuccccgccgccgccgccgccaucaagcuuaccauggaacuaccaauacucaaaacaaacgccauaaccacaauacuagccgcaguaacacuuugcuuugccucaagucaaaacauaacagaagaauuuuaccaauccacaugcucagcuguauccaaaggauauuuauccgcacuaagaacaggaugguacacaucaguaaucacaauagaauuaucaaacauaaaagaaaacaaauguaauggcacagacgccaaaguaaaacuaauuaaacaagaacuagacaaauauaaaaaugcaguaaccgaacuccaaaugcucaugugcucuacaccagcugcaggaucaggaucagccauugcaagcgguauagcuguuugcaaaguauuacacuuagaaggagaaguaaauaaaauaaaaaacgcacuacuaucaacaaauaaagcaguaguaucccuaucaaacggaguaucaguacuuacauucaaaguauuagauuuaaaaaacuauauagacaaacaacuacuucccauauuaaacaaacaaucaugcucaauuuccaacauugaaacuguaauggaauuucaacaaaaaaacaacagacuacuugaaaucacacgagaauuuucaguaaacgcuggaguaacaacaccugucucuaccuacaugcucacaaauagcgaauuacuaucucuaaucaaugacaugccaauaacaaacgaucaaaaaaaacuaauguccaacaacguacaaauaguaagacaacaauccuauucaauaaugugcauaauaaaagaagaagucuuagcauacguuguacaacuaccauuauacggaguaauagauacaccaugcuggaaacuccacacaagcccccucugcacaacaaacaccaaagaagggucaaacauaugcuuaacaagaacagacagaggaugguacugugauaacgcaggaucugucucauucuuuccacaagcagaaacauguaaaguaugcuccaacagagucuuuugcgacaccaugaacucacuaaccuuacccucagaaguaaaccugugcaacaucgauaucuucaaccccaaauacgauugcaaaaucaugacaagcaaaacugauguauccagcucuguaauaacaucacuaggugcaauaguaucaugcuacggaaaaacaaaaugcacagcuucuaacaaaaauaaaggaauaauaaaaacauucuccaauggaugcgacuaugucucaaauaaaggaguagauacaguuucagucggcaacacacucuauuauguaaauaaacaagaaggaaaaucauuauacguaaaaggagaacccauaauaaacuucuacgacccccucguauucccaagcgacgaauuugacgccucaauaucacaaguaaacgaaaaaauaaaccaaucacucgcauucaucagaaaaucagaugaacuacuacacaauguaaacgucggaaaauccaccacaaauauaaugauaacuaccaucauaauaguaauaauagucaucuuacuacuauuaaucgcuguaggacuauuucucuacugcaaggccagauaaggacuaguguccaccugucccuccugggcugcuggauugucucguuuuccugccaaauaaacaggaucagcgcuuuacagaucuaaaaaaaaaaaaaaaaaaaaaaaaaaaaaaaaaaaaaaaaaaaaaaaaaaaaaaaaaaaaaaaaugcaucccccccccccccccccccccccccccccccaaaggcucuuuucagagccaccagaauu

SEQ ID NO: 18913 - RNA, 1874 nt, Artificial Sequence
  mRNA product Design e-1 comprising derived and/or modified sequence from HRSV(Memphis-37)__AIY60640.1__F-del_DSCav1_mut7 (opt11)
gggagaauauaagcguuggcggagcgucgguuguagcacucugcgcgcccgcucuucugcugcuguuugucuacuuccuccugcuuccccgccgccgccgccgccaucaagcuuaccauggaacucccaauccucaaaacaaaugccaucaccaccauccuagccgcugucacacuaugcuucgccuccucacaaaacaucaccgaagaguucuaucaauccacaugcuccgccgucagcaagggauaccucuccgcccuuagaaccggcugguacaccucagucaucacaauugaacugucaaacaucaaagaaaacaaaugcaacggcaccgacgcaaaaguaaagcucaucaaacaagaacuggacaaguacaagaacgccgucaccgaacuacagaugcuuaugugcucaaccccugccgccggcuccggaucugccauagcuucaggcaucgccguaugcaaaguccugcaccuagaaggggaagucaacaaaaucaaaaacgcccuccucuccaccaacaaggccguugucucccugucaaacggagucuccguccuaaccuucaaaguccucgaccucaaaaacuacauagacaaacaacuccuacccauccucaacaaacaaagcugcucaauauccaacaucgaaaccgucauggaguuccaacaaaagaacaaccgacuacucgaaauaacacgcgaguucucagucaacgccggcgucaccaccccagucuccacauacaugcucaccaacuccgaacuccuaucgcucaucaacgacaugcccaucaccaaugaccagaagaaacucauguccaacaacguacaaaucguccgccaacaguccuacucaaucaugugcaucaucaaagaagaaguccuugccuacgucguccagcuuccacucuacggagucaucgacacccccugcuggaaacuccacaccuccccacuaugcaccaccaacaccaaagaaggauccaacauaugccucacccguacugaccgcggcugguacugcgacaacgccggauccgucucauucuucccccaggccgaaaccugcaaagucugcuccaaccgcgucuucugcgacaccaugaacucgcucacccucccauccgaagucaaucuaugcaacaucgacauuuucaaccccaaauacgacugcaaaauuaugacaucaaaaaccgacgucucauccucagucaucacuucccucggcgcaaucguaagcugcuacgggaaaacaaagugcaccgcuuccaacaaaaacaaaggcaucaucaaaaccuucucuaacggcugcgacuacgucuccaacaaaggagucgacaccguauccgucggcaacacccucuacuacgucaacaaacaggaaggaaaaucgcucuacgucaaaggagaaccaaucaucaacuucuacgacccccuagucuucccauccgacgaguucgacgccagcaucucacaagucaaugaaaagaucaaccagucacucgcauucauccguaagucagacgaacuccuacacaacgucaacgucggcaagucaacaaccaacauaaugaucaccaccauaaucaucgucauaauaguaauccuccuucuccuaaucgcagucggccucuuccucuacugcaaagcacgcuaaggacuaguguccaccugucccuccugggcugcuggauugucucguuuuccugccaaauaaacaggaucagcgcuuuacagaucuaaaaaaaaaaaaaaaaaaaaaaaaaaaaaaaaaaaaaaaaaaaaaaaaaaaaaaaaaaaaaaaaugcaucccccccccccccccccccccccccccccccaaaggcucuuuucagagccaccagaauu

SEQ ID NO: 18914 - RNA, 1856 nt, Artificial Sequence
  mRNA product Design e-2 comprising derived and/or modified sequence from HRSV(Memphis-37)__AIY60640.1__F-del_DSCav1_mut7 (opt1)
gggagacccgugacccggaaguuguacggcuacgcgacuuucccucccacaaacccucgcgcccuuccuuuccuacuugggcccggcagaaagcuuaccauggagcugcccauccucaagaccaacgccaucaccacgauccuggccgcggugacccugugcuucgccagcucccagaacaucaccgaggaguucuaccagagcacgugcuccgccgucagcaagggcuaccucuccgcccugcgcaccgggugguacaccagcgugaucaccaucgagcuguccaacaucaaggagaacaagugcaacggcaccgacgccaaggugaagcucaucaagcaggagcuggacaaguacaagaacgcggucacggagcugcagaugcugaugugcagcaccccggccgccggcuccgggagcgcgaucgccuccggcaucgccgucugcaaggugcugcaccucgagggcgaggugaacaagaucaagaacgcccugcuguccaccaacaaggccgucgugagccucuccaacggggugagcguccugaccuucaaggugcuggaccucaagaacuacaucgacaagcagcugcugcccauccugaacaagcagagcugcuccaucagcaacaucgagaccgucauggaguuccagcagaagaacaaccgccuccuggagaucacgcgggaguucagcgugaacgcgggcgugaccacccccgucuccaccuacaugcugacgaacagcgagcuccugucccugaucaacgacaugccgaucaccaacgaccagaagaagcucaugagcaacaacgugcagaucgugcgccagcaguccuacagcaucaugugcaucaucaaggaggagguccuggccuacguggugcagcugccccucuacggggucaucgacacccccugcuggaagcugcacaccagcccccugugcacgaccaacaccaaggagggcuccaacaucugccucacccggacggaccgcgggugguacugcgacaacgccggcagcguguccuucuucccgcaggccgagaccugcaaggucugcagcaaccggguguucugcgacaccaugaacucccugacccugcccagcgaggugaaccucugcaacaucgacaucuucaaccccaaguacgacugcaagaucaugacguccaagaccgacgucagcuccagcgugaucaccucccugggcgccaucgugagcugcuacgggaagaccaagugcacggcgagcaacaagaacaagggcaucaucaagaccuucuccaacgggugcgacuacgucagcaacaagggcguggacaccguguccgucggcaacacccuguacuacgugaacaagcaggagggcaagagccucuacgugaagggggagcccaucaucaacuucuacgacccgcuggucuuccccuccgacgaguucgacgccagcaucucccaggugaacgagaagaucaaccagagccuggccuucauccggaaguccgacgagcuccugcacaacgugaacgucggcaagagcaccacgaacaucaugaucaccaccaucaucaucgugaucaucgugauccugcugcuccugaucgccgucgggcuguuccucuacugcaaggcccgcugaggacuaguguccaccugucccuccugggcugcuggauugucucguuuuccugccaaauaaacaggaucagcgcuuuacagaucuaaaaaaaaaaaaaaaaaaaaaaaaaaaaaaaaaaaaaaaaaaaaaaaaaaaaaaaaaaaaaaaaugcaucccccccccccccccccccccccccccccccaaaggcucuuuucagagccaccagaauu

SEQ ID NO: 18915 - RNA, 1856 nt, Artificial Sequence
  mRNA product Design e-2 comprising derived and/or modified sequence from HRSV(Memphis-37)__AIY60640.1__F-del_DSCav1_mut7 (opt1)
gggagacccgugacccggaaguuguacggcuacgcgacuuucccucccacaaacccucgcgcccuuccuuuccuacuugggcccggcagaaagcuuaccauggagcugcccauccucaagaccaacgccaucaccacgauccuggccgcggugacccugugcuucgccagcucccagaacaucaccgaggaguucuaccagagcacgugcuccgccgucagcaagggguaccucuccgcccugcgcaccgggugguacaccagcgugaucaccaucgagcuguccaacaucaaggagaacaagugcaacggcaccgacgccaaggugaagcucaucaagcaggagcuggacaaguacaagaacgcggucacggagcugcagaugcucaugugcagcaccccggccgccggguccggcagcgccaucgcguccgggaucgccgugugcaaggugcugcaccuggagggcgaggucaacaagaucaagaacgcccuccugagcaccaacaaggccguggugucccugagcaacggcgucuccgugcucaccuucaaggugcuggaccugaagaacuacaucgacaagcagcuccugcccauccugaacaagcagagcugcuccaucagcaacaucgagacggucauggaguuccagcagaagaacaaccggcuccuggagaucacccgcgaguucuccgugaacgccggggugaccacccccgucagcacguacaugcugaccaacagcgagcuccugucccugaucaacgacaugcccaucaccaacgaccagaagaagcucaugagcaacaacgugcagaucgugcggcagcaguccuacagcaucaugugcaucaucaaggaggagguccuggcguacguggugcagcugccgcucuacggcgucaucgacacccccugcuggaagcugcacacgagcccccugugcaccaccaacaccaaggaggggagcaacaucugccucacgcgcaccgaccggggcugguacugcgacaacgccggguccgugagcuucuucccccaggccgagaccugcaaggugugcuccaaccgcgucuucugcgacaccaugaacagccugacgcugccguccgaggugaaccucugcaacaucgacaucuucaaccccaaguacgacugcaagaucaugaccagcaagaccgacgucuccagcuccgugaucaccagccugggcgccaucguguccugcuacggcaagacgaagugcaccgccagcaacaagaacaaggggaucaucaagaccuucuccaacggcugcgacuacgucagcaacaaggggguggacaccgugagcgucggcaacacgcuguacuacgugaacaagcaggagggcaagucccucuacgugaagggggagcccaucaucaacuucuacgacccccuggucuucccgagcgacgaguucgacgcguccaucagccaggugaacgagaagaucaaccagucccuggccuucauccggaaguccgacgagcuccugcacaacgugaacgucggcaaguccaccaccaacaucaugaucaccaccaucaucaucgugaucaucgugauccugcuccugcugaucgccgucggccucuuccuguacugcaaggcccgcugaggacuaguguccaccugucccuccugggcugcuggauugucucguuuuccugccaaauaaacaggaucagcgcuuuacagaucuaaaaaaaaaaaaaaaaaaaaaaaaaaaaaaaaaaaaaaaaaaaaaaaaaaaaaaaaaaaaaaaaugcaucccccccccccccccccccccccccccccccaaaggcucuuuucagagccaccagaauu

SEQ ID NO: 18916 - RNA, 1856 nt, Artificial Sequence
  mRNA product Design e-2 comprising derived and/or modified sequence from HRSV(Memphis-37)__AIY60640.1__F-del_DSCav1_mut7 (opt2)
gggagacccgugacccggaaguuguacggcuacgcgacuuucccucccacaaacccucgcgcccuuccuuuccuacuugggcccggcagaaagcuuaccauggagcuccccauccucaagaccaacgccaucaccaccauccucgccgccgucacccucugcuucgccuccucccagaacaucaccgaggaguucuaccaguccaccugcuccgccgucuccaagggcuaccucuccgcccuccgcaccggcugguacaccuccgucaucaccaucgagcucuccaacaucaaggagaacaagugcaacggcaccgacgccaaggucaagcucaucaagcaggagcucgacaaguacaagaacgccgucaccgagcuccagaugcucaugugcuccacccccgccgccggcuccggcuccgccaucgccuccggcaucgccgucugcaagguccuccaccucgagggcgaggucaacaagaucaagaacgcccuccucuccaccaacaaggccgucgucucccucuccaacggcgucuccguccucaccuucaagguccucgaccucaagaacuacaucgacaagcagcuccuccccauccucaacaagcaguccugcuccaucuccaacaucgagaccgucauggaguuccagcagaagaacaaccgccuccucgagaucacccgcgaguucuccgucaacgccggcgucaccacccccgucuccaccuacaugcucaccaacuccgagcuccucucccucaucaacgacaugcccaucaccaacgaccagaagaagcucauguccaacaacguccagaucguccgccagcaguccuacuccaucaugugcaucaucaaggaggagguccucgccuacgucguccagcucccccucuacggcgucaucgacacccccugcuggaagcuccacaccuccccccucugcaccaccaacaccaaggagggcuccaacaucugccucacccgcaccgaccgcggcugguacugcgacaacgccggcuccgucuccuucuucccccaggccgagaccugcaaggucugcuccaaccgcgucuucugcgacaccaugaacucccucacccuccccuccgaggucaaccucugcaacaucgacaucuucaaccccaaguacgacugcaagaucaugaccuccaagaccgacgucuccuccuccgucaucaccucccucggcgccaucgucuccugcuacggcaagaccaagugcaccgccuccaacaagaacaagggcaucaucaagaccuucuccaacggcugcgacuacgucuccaacaagggcgucgacaccgucuccgucggcaacacccucuacuacgucaacaagcaggagggcaagucccucuacgucaagggcgagcccaucaucaacuucuacgacccccucgucuuccccuccgacgaguucgacgccuccaucucccaggucaacgagaagaucaaccagucccucgccuucauccgcaaguccgacgagcuccuccacaacgucaacgucggcaaguccaccaccaacaucaugaucaccaccaucaucaucgucaucaucgucauccuccuccuccucaucgccgucggccucuuccucuacugcaaggcccgcugaggacuaguguccaccugucccuccugggcugcuggauugucucguuuuccugccaaauaaacaggaucagcgcuuuacagaucuaaaaaaaaaaaaaaaaaaaaaaaaaaaaaaaaaaaaaaaaaaaaaaaaaaaaaaaaaaaaaaaaugcaucccccccccccccccccccccccccccccccaaaggcucuuuucagagccaccagaauu

SEQ ID NO: 18917 - RNA, 1856 nt, Artificial Sequence
  mRNA product Design e-2 comprising derived and/or modified sequence from HRSV(Memphis-37)__AIY60640.1__F-del_DSCav1_mut7 (opt3)
gggagacccgugacccggaaguuguacggcuacgcgacuuucccucccacaaacccucgcgcccuuccuuuccuacuugggcccggcagaaagcuuaccauggagcugcccauccucaagaccaacgccauuacaacuauacuugcugcagugacgcugugcuucgccagcucccagaauaucaccgaagaguuuuaccaaucuacauguucagcggucaguaaaggcuauuugagcgcuuuaagaacugggugguacaccuccguuauuacaaucgaacugucuaacauuaaggagaauaaaugcaacggaaccgacgccaaggugaaacuaaucaagcaggaacucgauaaguauaaaaaugcaguaacugagcugcagaugcuuauguguucgaccccugccgcugguucaggcagcgcaauagccagugggaucgcugugugcaagguccugcacuuggagggagaagugaacaaaauuaagaaugcccuccuguccacaaacaaagcgguugugucucugagcaauggcgucuccgugcucacguucaagguauuagaccugaagaacuacaucgauaaacagcuuuugccaauucugaauaagcaaucauguaguaucagcaacauagagacuguuauggaauuucagcagaaaaauaacaggcuacucgagauuacccgggaguucucugugaaugccggugucacaacuccgguguccaccuauaugcugacaaacucagaacuucugagcuugaucaacgacaugcccauuaccaaugaucagaagaaacucaugaguaacaaugugcaaaucguccgccagcagucuuacuccaucaugugcauuauaaaggaggaaguucuggcauaugugguacaguuaccucuguacggggugaucgacacgccauguuggaaacuccauacuagcccccuuugcacaaccaacacuaaggagggaucgaauauuugucugacacgaaccgaucguggcugguacugcgacaacgcuggcucugucuccuuuuucccucaagccgaaacguguaaggugugcucaaauagaguguuuugcgauaccaugaacaguuugacacuaccaagcgagguuaaucuguguaacaucgacauauucaaucccaaauaugauugcaagauuaugacuuccaaaaccgacgucucuagcucagugaucacaagucucggggcaaucguauccuguuacggaaagacuaaaugcaccgcuagcaacaagaauaaggguauuaucaaaacauuuucuaacggcugugauuauguuucaaauaaggggguggacaccgucagugugggaaacacucuguacuaugucaacaaacaggagggcaagagccuuuacgugaaaggugaaccuauuauaaauuucuaugacccacugguuuuuccguccgaugaguucgacgccucuaucagccaggugaacgaaaagauuaaucaaucguuggcguuuaucaggaaguccgaugagcuccugcacaacguaaaugucgggaaaucaacgacaaacaucaugauuaccacuauaaucauugugaucauuguuaucuuacugcuacucauagccgugggacuguuccuuuacugcaaggcacggugaggacuaguguccaccugucccuccugggcugcuggauugucucguuuuccugccaaauaaacaggaucagcgcuuuacagaucuaaaaaaaaaaaaaaaaaaaaaaaaaaaaaaaaaaaaaaaaaaaaaaaaaaaaaaaaaaaaaaaaugcaucccccccccccccccccccccccccccccccaaaggcucuuuucagagccaccagaauu

SEQ ID NO: 18918 - RNA, 1856 nt, Artificial Sequence
  mRNA product Design e-2 comprising derived and/or modified sequence from HRSV(Memphis-37)__AIY60640.1__F-del_DSCav1_mut7 (opt4)
gggagacccgugacccggaaguuguacggcuacgcgacuuucccucccacaaacccucgcgcccuuccuuuccuacuugggcccggcagaaagcuuaccauggagcugcccauccugaagaccaacgccaucaccaccauccuggccgccgugacccugugcuucgccagcagccagaacaucaccgaggaguucuaccagagcaccugcagcgccgugagcaagggcuaccugagcgcccugagaaccggcugguacaccagcgugaucaccaucgagcugagcaacaucaaggagaacaagugcaacggcaccgacgccaaggugaagcugaucaagcaggagcuggacaaguacaagaacgccgugaccgagcugcagaugcugaugugcagcacccccgccgccggcagcggcagcgccaucgccagcggcaucgccgugugcaaggugcugcaccuggagggcgaggugaacaagaucaagaacgcccugcugagcaccaacaaggccguggugagccugagcaacggcgugagcgugcugaccuucaaggugcuggaccugaagaacuacaucgacaagcagcugcugcccauccugaacaagcagagcugcagcaucagcaacaucgagaccgugauggaguuccagcagaagaacaacagacugcuggagaucaccagagaguucagcgugaacgccggcgugaccacccccgugagcaccuacaugcugaccaacagcgagcugcugagccugaucaacgacaugcccaucaccaacgaccagaagaagcugaugagcaacaacgugcagaucgugagacagcagagcuacagcaucaugugcaucaucaaggaggaggugcuggccuacguggugcagcugccccuguacggcgugaucgacacccccugcuggaagcugcacaccagcccccugugcaccaccaacaccaaggagggcagcaacaucugccugaccagaaccgacagaggcugguacugcgacaacgccggcagcgugagcuucuucccccaggccgagaccugcaaggugugcagcaacagaguguucugcgacaccaugaacagccugacccugcccagcgaggugaaccugugcaacaucgacaucuucaaccccaaguacgacugcaagaucaugaccagcaagaccgacgugagcagcagcgugaucaccagccugggcgccaucgugagcugcuacggcaagaccaagugcaccgccagcaacaagaacaagggcaucaucaagaccuucagcaacggcugcgacuacgugagcaacaagggcguggacaccgugagcgugggcaacacccuguacuacgugaacaagcaggagggcaagagccuguacgugaagggcgagcccaucaucaacuucuacgacccccugguguuccccagcgacgaguucgacgccagcaucagccaggugaacgagaagaucaaccagagccuggccuucaucagaaagagcgacgagcugcugcacaacgugaacgugggcaagagcaccaccaacaucaugaucaccaccaucaucaucgugaucaucgugauccugcugcugcugaucgccgugggccuguuccuguacugcaaggccagaugaggacuaguguccaccugucccuccugggcugcuggauugucucguuuuccugccaaauaaacaggaucagcgcuuuacagaucuaaaaaaaaaaaaaaaaaaaaaaaaaaaaaaaaaaaaaaaaaaaaaaaaaaaaaaaaaaaaaaaaugcaucccccccccccccccccccccccccccccccaaaggcucuuuucagagccaccagaauu

SEQ ID NO: 18919 - RNA, 1856 nt, Artificial Sequence
  mRNA product Design e-2 comprising derived and/or modified sequence from HRSV(Memphis-37)__AIY60640.1__F-del_DSCav1_mut7 (opt5)
gggagacccgugacccggaaguuguacggcuacgcgacuuucccucccacaaacccucgcgcccuuccuuuccuacuugggcccggcagaaagcuuaccauggagcugcccauccucaagaccaacgccauuacaacgauccuggcugccgugacccuuugcuucgcgagcucccagaauauuacagaagaguuuuaccaaucuaccuguagcgcugucuccaaaggcuaucugucugcccucagaacagggugguacaccagcguuaucacaauugaacuguccaacaucaaggagaauaaaugcaacggaaccgacgccaaggugaaacuuaucaagcaggaacuggauaaguauaaaaaugcugugacggagcuccagaugcugauguguucuaccccugccgcuggcagcggguccgccauugcgagcggaaucgccgucugcaaggugcugcaccucgagggcgaaguuaacaaaauuaagaaugcucugcuuucuacaaacaaagccguggucucccugagcaauggggugucuguucucaccuucaaggugcuggaccuuaagaacuacaucgauaaacagcugcucccgauucugaauaagcaauccuguagcaucucuaacauugagacagucauggaauuucagcagaaaaauaaccggcugcucgagaucacccgcgaguucuccgugaaugcuggagugacgacacccgucagcaccuauaugcugacaaacuccgaacuucugucucucaucaacgacaugccuauuaccaaugaucagaagaaacugaugagcaacaauguucaaaucgugagacagcaguccuacagcauuaugugcaucauuaaggaggaagugcuugccuaugucgugcagcugccccucuacggcguuaucgacaccccuuguuggaaacugcauacaucuccccugugcacgaccaacacaaaggagggcuccaauaucugucucacccggacagaucgcgggugguacugcgacaacgcgggaagcgugagcuuuuucccucaagccgaaaccuguaaggucugcucuaauagaguguuuugcgauacgaugaacucccugacacuuccgucugagguuaaucuguguaacauugacaucuucaaucccaaauaugauugcaagauuaugaccagcaaaaccgacguguccagcucugucaucacaucccucggcgcuauugugagcuguuacgggaagaccaaaugcacagccucuaacaagaauaagggaaucaucaaaacguuuuccaacggcugugauuaugucagcaauaaggggguggacaccguuuccgugggaaacacacuguacuaugucaacaaacaggagggcaagucucuuuacgugaaaggcgaaccuauuaucaauuucuaugacccccugguuuuuccuagcgaugaguucgacgcuuccauuucucaggugaacgaaaagaucaaucaaagccucgccuuuauucggaaguccgaugagcugcugcacaacgucaauguggggaaaagcaccacaaacaucaugauuaccacgaucaucauugugaucauuguuauccuccugcuucugauugccgucggacucuuccuguacugcaaggcucgcugaggacuaguguccaccugucccuccugggcugcuggauugucucguuuuccugccaaauaaacaggaucagcgcuuuacagaucuaaaaaaaaaaaaaaaaaaaaaaaaaaaaaaaaaaaaaaaaaaaaaaaaaaaaaaaaaaaaaaaaugcaucccccccccccccccccccccccccccccccaaaggcucuuuucagagccaccagaauu

SEQ ID NO: 18920 - RNA, 1856 nt, Artificial Sequence
  mRNA product Design e-2 comprising derived and/or modified sequence from HRSV(Memphis-37)__AIY60640.1__F-del_DSCav1_mut7 (opt6)
gggagacccgugacccggaaguuguacggcuacgcgacuuucccucccacaaacccucgcgcccuuccuuuccuacuugggcccggcagaaagcuuaccauggaacuaccaauacucaaaacaaacgccauaaccacaauacuagccgcaguaacacuuugcuuugccucaagucaaaacauaacagaagaauuuuaccaauccacaugcucagcuguauccaaaggauauuuauccgcacuaagaacaggaugguacacaucaguaaucacaauagaauuaucaaacauaaaagaaaacaaauguaauggcacagacgccaaaguaaaacuaauuaaacaagaacuagacaaauauaaaaaugcaguaaccgaacuccaaaugcucaugugcucuacaccagcugcaggaucaggaucagccauugcaagcgguauagcuguuugcaaaguauuacacuuagaaggagaaguaaauaaaauaaaaaacgcacuacuaucaacaaauaaagcaguaguaucccuaucaaacggaguaucaguacuuacauucaaaguauuagauuuaaaaaacuauauagacaaacaacuacuucccauauuaaacaaacaaucaugcucaauuuccaacauugaaacuguaauggaauuucaacaaaaaaacaacagacuacuugaaaucacacgagaauuuucaguaaacgcuggaguaacaacaccugucucuaccuacaugcucacaaauagcgaauuacuaucucuaaucaaugacaugccaauaacaaacgaucaaaaaaaacuaauguccaacaacguacaaauaguaagacaacaauccuauucaauaaugugcauaauaaaagaagaagucuuagcauacguuguacaacuaccauuauacggaguaauagauacaccaugcuggaaacuccacacaagcccccucugcacaacaaacaccaaagaagggucaaacauaugcuuaacaagaacagacagaggaugguacugugauaacgcaggaucugucucauucuuuccacaagcagaaacauguaaaguaugcuccaacagagucuuuugcgacaccaugaacucacuaaccuuacccucagaaguaaaccugugcaacaucgauaucuucaaccccaaauacgauugcaaaaucaugacaagcaaaacugauguauccagcucuguaauaacaucacuaggugcaauaguaucaugcuacggaaaaacaaaaugcacagcuucuaacaaaaauaaaggaauaauaaaaacauucuccaauggaugcgacuaugucucaaauaaaggaguagauacaguuucagucggcaacacacucuauuauguaaauaaacaagaaggaaaaucauuauacguaaaaggagaacccauaauaaacuucuacgacccccucguauucccaagcgacgaauuugacgccucaauaucacaaguaaacgaaaaaauaaaccaaucacucgcauucaucagaaaaucagaugaacuacuacacaauguaaacgucggaaaauccaccacaaauauaaugauaacuaccaucauaauaguaauaauagucaucuuacuacuauuaaucgcuguaggacuauuucucuacugcaaggccagauaaggacuaguguccaccugucccuccugggcugcuggauugucucguuuuccugccaaauaaacaggaucagcgcuuuacagaucuaaaaaaaaaaaaaaaaaaaaaaaaaaaaaaaaaaaaaaaaaaaaaaaaaaaaaaaaaaaaaaaaugcaucccccccccccccccccccccccccccccccaaaggcucuuuucagagccaccagaauu

SEQ ID NO: 18921 - RNA, 1856 nt, Artificial Sequence
  mRNA product Design e-2 comprising derived and/or modified sequence from HRSV(Memphis-37)__AIY60640.1__F-del_DSCav1_mut7 (opt11)
gggagacccgugacccggaaguuguacggcuacgcgacuuucccucccacaaacccucgcgcccuuccuuuccuacuugggcccggcagaaagcuuaccauggaacucccaauccucaaaacaaaugccaucaccaccauccuagccgcugucacacuaugcuucgccuccucacaaaacaucaccgaagaguucuaucaauccacaugcuccgccgucagcaagggauaccucuccgcccuuagaaccggcugguacaccucagucaucacaauugaacugucaaacaucaaagaaaacaaaugcaacggcaccgacgcaaaaguaaagcucaucaaacaagaacuggacaaguacaagaacgccgucaccgaacuacagaugcuuaugugcucaaccccugccgccggcuccggaucugccauagcuucaggcaucgccguaugcaaaguccugcaccuagaaggggaagucaacaaaaucaaaaacgcccuccucuccaccaacaaggccguugucucccugucaaacggagucuccguccuaaccuucaaaguccucgaccucaaaaacuacauagacaaacaacuccuacccauccucaacaaacaaagcugcucaauauccaacaucgaaaccgucauggaguuccaacaaaagaacaaccgacuacucgaaauaacacgcgaguucucagucaacgccggcgucaccaccccagucuccacauacaugcucaccaacuccgaacuccuaucgcucaucaacgacaugcccaucaccaaugaccagaagaaacucauguccaacaacguacaaaucguccgccaacaguccuacucaaucaugugcaucaucaaagaagaaguccuugccuacgucguccagcuuccacucuacggagucaucgacacccccugcuggaaacuccacaccuccccacuaugcaccaccaacaccaaagaaggauccaacauaugccucacccguacugaccgcggcugguacugcgacaacgccggauccgucucauucuucccccaggccgaaaccugcaaagucugcuccaaccgcgucuucugcgacaccaugaacucgcucacccucccauccgaagucaaucuaugcaacaucgacauuuucaaccccaaauacgacugcaaaauuaugacaucaaaaaccgacgucucauccucagucaucacuucccucggcgcaaucguaagcugcuacgggaaaacaaagugcaccgcuuccaacaaaaacaaaggcaucaucaaaaccuucucuaacggcugcgacuacgucuccaacaaaggagucgacaccguauccgucggcaacacccucuacuacgucaacaaacaggaaggaaaaucgcucuacgucaaaggagaaccaaucaucaacuucuacgacccccuagucuucccauccgacgaguucgacgccagcaucucacaagucaaugaaaagaucaaccagucacucgcauucauccguaagucagacgaacuccuacacaacgucaacgucggcaagucaacaaccaacauaaugaucaccaccauaaucaucgucauaauaguaauccuccuucuccuaaucgcagucggccucuuccucuacugcaaagcacgcuaaggacuaguguccaccugucccuccugggcugcuggauugucucguuuuccugccaaauaaacaggaucagcgcuuuacagaucuaaaaaaaaaaaaaaaaaaaaaaaaaaaaaaaaaaaaaaaaaaaaaaaaaaaaaaaaaaaaaaaaugcaucccccccccccccccccccccccccccccccaaaggcucuuuucagagccaccagaauu

SEQ ID NO: 18922 - RNA, 1826 nt, Artificial Sequence
  mRNA product Design e-3 comprising derived and/or modified sequence from HRSV(Memphis-37)__AIY60640.1__F-del_DSCav1_mut7 (opt1)
gggagacuuucccauucuguagcagaauuugguguugccuguggucuuggucccgcggagaagcuuaccauggagcugcccauccucaagaccaacgccaucaccacgauccuggccgcggugacccugugcuucgccagcucccagaacaucaccgaggaguucuaccagagcacgugcuccgccgucagcaagggcuaccucuccgcccugcgcaccgggugguacaccagcgugaucaccaucgagcuguccaacaucaaggagaacaagugcaacggcaccgacgccaaggugaagcucaucaagcaggagcuggacaaguacaagaacgcggucacggagcugcagaugcugaugugcagcaccccggccgccggcuccgggagcgcgaucgccuccggcaucgccgucugcaaggugcugcaccucgagggcgaggugaacaagaucaagaacgcccugcuguccaccaacaaggccgucgugagccucuccaacggggugagcguccugaccuucaaggugcuggaccucaagaacuacaucgacaagcagcugcugcccauccugaacaagcagagcugcuccaucagcaacaucgagaccgucauggaguuccagcagaagaacaaccgccuccuggagaucacgcgggaguucagcgugaacgcgggcgugaccacccccgucuccaccuacaugcugacgaacagcgagcuccugucccugaucaacgacaugccgaucaccaacgaccagaagaagcucaugagcaacaacgugcagaucgugcgccagcaguccuacagcaucaugugcaucaucaaggaggagguccuggccuacguggugcagcugccccucuacggggucaucgacacccccugcuggaagcugcacaccagcccccugugcacgaccaacaccaaggagggcuccaacaucugccucacccggacggaccgcgggugguacugcgacaacgccggcagcguguccuucuucccgcaggccgagaccugcaaggucugcagcaaccggguguucugcgacaccaugaacucccugacccugcccagcgaggugaaccucugcaacaucgacaucuucaaccccaaguacgacugcaagaucaugacguccaagaccgacgucagcuccagcgugaucaccucccugggcgccaucgugagcugcuacgggaagaccaagugcacggcgagcaacaagaacaagggcaucaucaagaccuucuccaacgggugcgacuacgucagcaacaagggcguggacaccguguccgucggcaacacccuguacuacgugaacaagcaggagggcaagagccucuacgugaagggggagcccaucaucaacuucuacgacccgcuggucuuccccuccgacgaguucgacgccagcaucucccaggugaacgagaagaucaaccagagccuggccuucauccggaaguccgacgagcuccugcacaacgugaacgucggcaagagcaccacgaacaucaugaucaccaccaucaucaucgugaucaucgugauccugcugcuccugaucgccgucgggcuguuccucuacugcaaggcccgcugaggacuaguguccaccugucccuccugggcugcuggauugucucguuuuccugccaaauaaacaggaucagcgcuuuacagaucuaaaaaaaaaaaaaaaaaaaaaaaaaaaaaaaaaaaaaaaaaaaaaaaaaaaaaaaaaaaaaaaaugcaucccccccccccccccccccccccccccccccaaaggcucuuuucagagccaccagaauu

SEQ ID NO: 18923 - RNA, 1826 nt, Artificial Sequence
  mRNA product Design e-3 comprising derived and/or modified sequence from HRSV(Memphis-37)__AIY60640.1__F-del_DSCav1_mut7 (opt1)
gggagacuuucccauucuguagcagaauuugguguugccuguggucuuggucccgcggagaagcuuaccauggagcugcccauccucaagaccaacgccaucaccacgauccuggccgcggugacccugugcuucgccagcucccagaacaucaccgaggaguucuaccagagcacgugcuccgccgucagcaagggguaccucuccgcccugcgcaccgggugguacaccagcgugaucaccaucgagcuguccaacaucaaggagaacaagugcaacggcaccgacgccaaggugaagcucaucaagcaggagcuggacaaguacaagaacgcggucacggagcugcagaugcucaugugcagcaccccggccgccggguccggcagcgccaucgcguccgggaucgccgugugcaaggugcugcaccuggagggcgaggucaacaagaucaagaacgcccuccugagcaccaacaaggccguggugucccugagcaacggcgucuccgugcucaccuucaaggugcuggaccugaagaacuacaucgacaagcagcuccugcccauccugaacaagcagagcugcuccaucagcaacaucgagacggucauggaguuccagcagaagaacaaccggcuccuggagaucacccgcgaguucuccgugaacgccggggugaccacccccgucagcacguacaugcugaccaacagcgagcuccugucccugaucaacgacaugcccaucaccaacgaccagaagaagcucaugagcaacaacgugcagaucgugcggcagcaguccuacagcaucaugugcaucaucaaggaggagguccuggcguacguggugcagcugccgcucuacggcgucaucgacacccccugcuggaagcugcacacgagcccccugugcaccaccaacaccaaggaggggagcaacaucugccucacgcgcaccgaccggggcugguacugcgacaacgccggguccgugagcuucuucccccaggccgagaccugcaaggugugcuccaaccgcgucuucugcgacaccaugaacagccugacgcugccguccgaggugaaccucugcaacaucgacaucuucaaccccaaguacgacugcaagaucaugaccagcaagaccgacgucuccagcuccgugaucaccagccugggcgccaucguguccugcuacggcaagacgaagugcaccgccagcaacaagaacaaggggaucaucaagaccuucuccaacggcugcgacuacgucagcaacaaggggguggacaccgugagcgucggcaacacgcuguacuacgugaacaagcaggagggcaagucccucuacgugaagggggagcccaucaucaacuucuacgacccccuggucuucccgagcgacgaguucgacgcguccaucagccaggugaacgagaagaucaaccagucccuggccuucauccggaaguccgacgagcuccugcacaacgugaacgucggcaaguccaccaccaacaucaugaucaccaccaucaucaucgugaucaucgugauccugcuccugcugaucgccgucggccucuuccuguacugcaaggcccgcugaggacuaguguccaccugucccuccugggcugcuggauugucucguuuuccugccaaauaaacaggaucagcgcuuuacagaucuaaaaaaaaaaaaaaaaaaaaaaaaaaaaaaaaaaaaaaaaaaaaaaaaaaaaaaaaaaaaaaaaugcaucccccccccccccccccccccccccccccccaaaggcucuuuucagagccaccagaauu

SEQ ID NO: 18924 - RNA, 1826 nt, Artificial Sequence
  mRNA product Design e-3 comprising derived and/or modified sequence from HRSV(Memphis-37)__AIY60640.1__F-del_DSCav1_mut7 (opt2)
gggagacuuucccauucuguagcagaauuugguguugccuguggucuuggucccgcggagaagcuuaccauggagcuccccauccucaagaccaacgccaucaccaccauccucgccgccgucacccucugcuucgccuccucccagaacaucaccgaggaguucuaccaguccaccugcuccgccgucuccaagggcuaccucuccgcccuccgcaccggcugguacaccuccgucaucaccaucgagcucuccaacaucaaggagaacaagugcaacggcaccgacgccaaggucaagcucaucaagcaggagcucgacaaguacaagaacgccgucaccgagcuccagaugcucaugugcuccacccccgccgccggcuccggcuccgccaucgccuccggcaucgccgucugcaagguccuccaccucgagggcgaggucaacaagaucaagaacgcccuccucuccaccaacaaggccgucgucucccucuccaacggcgucuccguccucaccuucaagguccucgaccucaagaacuacaucgacaagcagcuccuccccauccucaacaagcaguccugcuccaucuccaacaucgagaccgucauggaguuccagcagaagaacaaccgccuccucgagaucacccgcgaguucuccgucaacgccggcgucaccacccccgucuccaccuacaugcucaccaacuccgagcuccucucccucaucaacgacaugcccaucaccaacgaccagaagaagcucauguccaacaacguccagaucguccgccagcaguccuacuccaucaugugcaucaucaaggaggagguccucgccuacgucguccagcucccccucuacggcgucaucgacacccccugcuggaagcuccacaccuccccccucugcaccaccaacaccaaggagggcuccaacaucugccucacccgcaccgaccgcggcugguacugcgacaacgccggcuccgucuccuucuucccccaggccgagaccugcaaggucugcuccaaccgcgucuucugcgacaccaugaacucccucacccuccccuccgaggucaaccucugcaacaucgacaucuucaaccccaaguacgacugcaagaucaugaccuccaagaccgacgucuccuccuccgucaucaccucccucggcgccaucgucuccugcuacggcaagaccaagugcaccgccuccaacaagaacaagggcaucaucaagaccuucuccaacggcugcgacuacgucuccaacaagggcgucgacaccgucuccgucggcaacacccucuacuacgucaacaagcaggagggcaagucccucuacgucaagggcgagcccaucaucaacuucuacgacccccucgucuuccccuccgacgaguucgacgccuccaucucccaggucaacgagaagaucaaccagucccucgccuucauccgcaaguccgacgagcuccuccacaacgucaacgucggcaaguccaccaccaacaucaugaucaccaccaucaucaucgucaucaucgucauccuccuccuccucaucgccgucggccucuuccucuacugcaaggcccgcugaggacuaguguccaccugucccuccugggcugcuggauugucucguuuuccugccaaauaaacaggaucagcgcuuuacagaucuaaaaaaaaaaaaaaaaaaaaaaaaaaaaaaaaaaaaaaaaaaaaaaaaaaaaaaaaaaaaaaaaugcaucccccccccccccccccccccccccccccccaaaggcucuuuucagagccaccagaauu

SEQ ID NO: 18925 - RNA, 1826 nt, Artificial Sequence
  mRNA product Design e-3 comprising derived and/or modified sequence from HRSV(Memphis-37)__AIY60640.1__F-del_DSCav1_mut7 (opt3)
gggagacuuucccauucuguagcagaauuugguguugccuguggucuuggucccgcggagaagcuuaccauggagcugcccauccucaagaccaacgccauuacaacuauacuugcugcagugacgcugugcuucgccagcucccagaauaucaccgaagaguuuuaccaaucuacauguucagcggucaguaaaggcuauuugagcgcuuuaagaacugggugguacaccuccguuauuacaaucgaacugucuaacauuaaggagaauaaaugcaacggaaccgacgccaaggugaaacuaaucaagcaggaacucgauaaguauaaaaaugcaguaacugagcugcagaugcuuauguguucgaccccugccgcugguucaggcagcgcaauagccagugggaucgcugugugcaagguccugcacuuggagggagaagugaacaaaauuaagaaugcccuccuguccacaaacaaagcgguugugucucugagcaauggcgucuccgugcucacguucaagguauuagaccugaagaacuacaucgauaaacagcuuuugccaauucugaauaagcaaucauguaguaucagcaacauagagacuguuauggaauuucagcagaaaaauaacaggcuacucgagauuacccgggaguucucugugaaugccggugucacaacuccgguguccaccuauaugcugacaaacucagaacuucugagcuugaucaacgacaugcccauuaccaaugaucagaagaaacucaugaguaacaaugugcaaaucguccgccagcagucuuacuccaucaugugcauuauaaaggaggaaguucuggcauaugugguacaguuaccucuguacggggugaucgacacgccauguuggaaacuccauacuagcccccuuugcacaaccaacacuaaggagggaucgaauauuugucugacacgaaccgaucguggcugguacugcgacaacgcuggcucugucuccuuuuucccucaagccgaaacguguaaggugugcucaaauagaguguuuugcgauaccaugaacaguuugacacuaccaagcgagguuaaucuguguaacaucgacauauucaaucccaaauaugauugcaagauuaugacuuccaaaaccgacgucucuagcucagugaucacaagucucggggcaaucguauccuguuacggaaagacuaaaugcaccgcuagcaacaagaauaaggguauuaucaaaacauuuucuaacggcugugauuauguuucaaauaaggggguggacaccgucagugugggaaacacucuguacuaugucaacaaacaggagggcaagagccuuuacgugaaaggugaaccuauuauaaauuucuaugacccacugguuuuuccguccgaugaguucgacgccucuaucagccaggugaacgaaaagauuaaucaaucguuggcguuuaucaggaaguccgaugagcuccugcacaacguaaaugucgggaaaucaacgacaaacaucaugauuaccacuauaaucauugugaucauuguuaucuuacugcuacucauagccgugggacuguuccuuuacugcaaggcacggugaggacuaguguccaccugucccuccugggcugcuggauugucucguuuuccugccaaauaaacaggaucagcgcuuuacagaucuaaaaaaaaaaaaaaaaaaaaaaaaaaaaaaaaaaaaaaaaaaaaaaaaaaaaaaaaaaaaaaaaugcaucccccccccccccccccccccccccccccccaaaggcucuuuucagagccaccagaauu

SEQ ID NO: 18926 - RNA, 1826 nt, Artificial Sequence
  mRNA product Design e-3 comprising derived and/or modified sequence from HRSV(Memphis-37)__AIY60640.1__F-del_DSCav1_mut7 (opt4)
gggagacuuucccauucuguagcagaauuugguguugccuguggucuuggucccgcggagaagcuuaccauggagcugcccauccugaagaccaacgccaucaccaccauccuggccgccgugacccugugcuucgccagcagccagaacaucaccgaggaguucuaccagagcaccugcagcgccgugagcaagggcuaccugagcgcccugagaaccggcugguacaccagcgugaucaccaucgagcugagcaacaucaaggagaacaagugcaacggcaccgacgccaaggugaagcugaucaagcaggagcuggacaaguacaagaacgccgugaccgagcugcagaugcugaugugcagcacccccgccgccggcagcggcagcgccaucgccagcggcaucgccgugugcaaggugcugcaccuggagggcgaggugaacaagaucaagaacgcccugcugagcaccaacaaggccguggugagccugagcaacggcgugagcgugcugaccuucaaggugcuggaccugaagaacuacaucgacaagcagcugcugcccauccugaacaagcagagcugcagcaucagcaacaucgagaccgugauggaguuccagcagaagaacaacagacugcuggagaucaccagagaguucagcgugaacgccggcgugaccacccccgugagcaccuacaugcugaccaacagcgagcugcugagccugaucaacgacaugcccaucaccaacgaccagaagaagcugaugagcaacaacgugcagaucgugagacagcagagcuacagcaucaugugcaucaucaaggaggaggugcuggccuacguggugcagcugccccuguacggcgugaucgacacccccugcuggaagcugcacaccagcccccugugcaccaccaacaccaaggagggcagcaacaucugccugaccagaaccgacagaggcugguacugcgacaacgccggcagcgugagcuucuucccccaggccgagaccugcaaggugugcagcaacagaguguucugcgacaccaugaacagccugacccugcccagcgaggugaaccugugcaacaucgacaucuucaaccccaaguacgacugcaagaucaugaccagcaagaccgacgugagcagcagcgugaucaccagccugggcgccaucgugagcugcuacggcaagaccaagugcaccgccagcaacaagaacaagggcaucaucaagaccuucagcaacggcugcgacuacgugagcaacaagggcguggacaccgugagcgugggcaacacccuguacuacgugaacaagcaggagggcaagagccuguacgugaagggcgagcccaucaucaacuucuacgacccccugguguuccccagcgacgaguucgacgccagcaucagccaggugaacgagaagaucaaccagagccuggccuucaucagaaagagcgacgagcugcugcacaacgugaacgugggcaagagcaccaccaacaucaugaucaccaccaucaucaucgugaucaucgugauccugcugcugcugaucgccgugggccuguuccuguacugcaaggccagaugaggacuaguguccaccugucccuccugggcugcuggauugucucguuuuccugccaaauaaacaggaucagcgcuuuacagaucuaaaaaaaaaaaaaaaaaaaaaaaaaaaaaaaaaaaaaaaaaaaaaaaaaaaaaaaaaaaaaaaaugcaucccccccccccccccccccccccccccccccaaaggcucuuuucagagccaccagaauu

SEQ ID NO: 18927 - RNA, 1826 nt, Artificial Sequence
  mRNA product Design e-3 comprising derived and/or modified sequence from HRSV(Memphis-37)__AIY60640.1__F-del_DSCav1_mut7 (opt5)
gggagacuuucccauucuguagcagaauuugguguugccuguggucuuggucccgcggagaagcuuaccauggagcugcccauccucaagaccaacgccauuacaacgauccuggcugccgugacccuuugcuucgcgagcucccagaauauuacagaagaguuuuaccaaucuaccuguagcgcugucuccaaaggcuaucugucugcccucagaacagggugguacaccagcguuaucacaauugaacuguccaacaucaaggagaauaaaugcaacggaaccgacgccaaggugaaacuuaucaagcaggaacuggauaaguauaaaaaugcugugacggagcuccagaugcugauguguucuaccccugccgcuggcagcggguccgccauugcgagcggaaucgccgucugcaaggugcugcaccucgagggcgaaguuaacaaaauuaagaaugcucugcuuucuacaaacaaagccguggucucccugagcaauggggugucuguucucaccuucaaggugcuggaccuuaagaacuacaucgauaaacagcugcucccgauucugaauaagcaauccuguagcaucucuaacauugagacagucauggaauuucagcagaaaaauaaccggcugcucgagaucacccgcgaguucuccgugaaugcuggagugacgacacccgucagcaccuauaugcugacaaacuccgaacuucugucucucaucaacgacaugccuauuaccaaugaucagaagaaacugaugagcaacaauguucaaaucgugagacagcaguccuacagcauuaugugcaucauuaaggaggaagugcuugccuaugucgugcagcugccccucuacggcguuaucgacaccccuuguuggaaacugcauacaucuccccugugcacgaccaacacaaaggagggcuccaauaucugucucacccggacagaucgcgggugguacugcgacaacgcgggaagcgugagcuuuuucccucaagccgaaaccuguaaggucugcucuaauagaguguuuugcgauacgaugaacucccugacacuuccgucugagguuaaucuguguaacauugacaucuucaaucccaaauaugauugcaagauuaugaccagcaaaaccgacguguccagcucugucaucacaucccucggcgcuauugugagcuguuacgggaagaccaaaugcacagccucuaacaagaauaagggaaucaucaaaacguuuuccaacggcugugauuaugucagcaauaaggggguggacaccguuuccgugggaaacacacuguacuaugucaacaaacaggagggcaagucucuuuacgugaaaggcgaaccuauuaucaauuucuaugacccccugguuuuuccuagcgaugaguucgacgcuuccauuucucaggugaacgaaaagaucaaucaaagccucgccuuuauucggaaguccgaugagcugcugcacaacgucaauguggggaaaagcaccacaaacaucaugauuaccacgaucaucauugugaucauuguuauccuccugcuucugauugccgucggacucuuccuguacugcaaggcucgcugaggacuaguguccaccugucccuccugggcugcuggauugucucguuuuccugccaaauaaacaggaucagcgcuuuacagaucuaaaaaaaaaaaaaaaaaaaaaaaaaaaaaaaaaaaaaaaaaaaaaaaaaaaaaaaaaaaaaaaaugcaucccccccccccccccccccccccccccccccaaaggcucuuuucagagccaccagaauu

SEQ ID NO: 18928 - RNA, 1826 nt, Artificial Sequence
  mRNA product Design e-3 comprising derived and/or modified sequence from HRSV(Memphis-37)__AIY60640.1__F-del_DSCav1_mut7 (opt6)
gggagacuuucccauucuguagcagaauuugguguugccuguggucuuggucccgcggagaagcuuaccauggaacuaccaauacucaaaacaaacgccauaaccacaauacuagccgcaguaacacuuugcuuugccucaagucaaaacauaacagaagaauuuuaccaauccacaugcucagcuguauccaaaggauauuuauccgcacuaagaacaggaugguacacaucaguaaucacaauagaauuaucaaacauaaaagaaaacaaauguaauggcacagacgccaaaguaaaacuaauuaaacaagaacuagacaaauauaaaaaugcaguaaccgaacuccaaaugcucaugugcucuacaccagcugcaggaucaggaucagccauugcaagcgguauagcuguuugcaaaguauuacacuuagaaggagaaguaaauaaaauaaaaaacgcacuacuaucaacaaauaaagcaguaguaucccuaucaaacggaguaucaguacuuacauucaaaguauuagauuuaaaaaacuauauagacaaacaacuacuucccauauuaaacaaacaaucaugcucaauuuccaacauugaaacuguaauggaauuucaacaaaaaaacaacagacuacuugaaaucacacgagaauuuucaguaaacgcuggaguaacaacaccugucucuaccuacaugcucacaaauagcgaauuacuaucucuaaucaaugacaugccaauaacaaacgaucaaaaaaaacuaauguccaacaacguacaaauaguaagacaacaauccuauucaauaaugugcauaauaaaagaagaagucuuagcauacguuguacaacuaccauuauacggaguaauagauacaccaugcuggaaacuccacacaagcccccucugcacaacaaacaccaaagaagggucaaacauaugcuuaacaagaacagacagaggaugguacugugauaacgcaggaucugucucauucuuuccacaagcagaaacauguaaaguaugcuccaacagagucuuuugcgacaccaugaacucacuaaccuuacccucagaaguaaaccugugcaacaucgauaucuucaaccccaaauacgauugcaaaaucaugacaagcaaaacugauguauccagcucuguaauaacaucacuaggugcaauaguaucaugcuacggaaaaacaaaaugcacagcuucuaacaaaaauaaaggaauaauaaaaacauucuccaauggaugcgacuaugucucaaauaaaggaguagauacaguuucagucggcaacacacucuauuauguaaauaaacaagaaggaaaaucauuauacguaaaaggagaacccauaauaaacuucuacgacccccucguauucccaagcgacgaauuugacgccucaauaucacaaguaaacgaaaaaauaaaccaaucacucgcauucaucagaaaaucagaugaacuacuacacaauguaaacgucggaaaauccaccacaaauauaaugauaacuaccaucauaauaguaauaauagucaucuuacuacuauuaaucgcuguaggacuauuucucuacugcaaggccagauaaggacuaguguccaccugucccuccugggcugcuggauugucucguuuuccugccaaauaaacaggaucagcgcuuuacagaucuaaaaaaaaaaaaaaaaaaaaaaaaaaaaaaaaaaaaaaaaaaaaaaaaaaaaaaaaaaaaaaaaugcaucccccccccccccccccccccccccccccccaaaggcucuuuucagagccaccagaauu

SEQ ID NO: 18929 - RNA, 1826 nt, Artificial Sequence
  mRNA product Design e-3 comprising derived and/or modified sequence from HRSV(Memphis-37)__AIY60640.1__F-del_DSCav1_mut7 (opt11)
gggagacuuucccauucuguagcagaauuugguguugccuguggucuuggucccgcggagaagcuuaccauggaacucccaauccucaaaacaaaugccaucaccaccauccuagccgcugucacacuaugcuucgccuccucacaaaacaucaccgaagaguucuaucaauccacaugcuccgccgucagcaagggauaccucuccgcccuuagaaccggcugguacaccucagucaucacaauugaacugucaaacaucaaagaaaacaaaugcaacggcaccgacgcaaaaguaaagcucaucaaacaagaacuggacaaguacaagaacgccgucaccgaacuacagaugcuuaugugcucaaccccugccgccggcuccggaucugccauagcuucaggcaucgccguaugcaaaguccugcaccuagaaggggaagucaacaaaaucaaaaacgcccuccucuccaccaacaaggccguugucucccugucaaacggagucuccguccuaaccuucaaaguccucgaccucaaaaacuacauagacaaacaacuccuacccauccucaacaaacaaagcugcucaauauccaacaucgaaaccgucauggaguuccaacaaaagaacaaccgacuacucgaaauaacacgcgaguucucagucaacgccggcgucaccaccccagucuccacauacaugcucaccaacuccgaacuccuaucgcucaucaacgacaugcccaucaccaaugaccagaagaaacucauguccaacaacguacaaaucguccgccaacaguccuacucaaucaugugcaucaucaaagaagaaguccuugccuacgucguccagcuuccacucuacggagucaucgacacccccugcuggaaacuccacaccuccccacuaugcaccaccaacaccaaagaaggauccaacauaugccucacccguacugaccgcggcugguacugcgacaacgccggauccgucucauucuucccccaggccgaaaccugcaaagucugcuccaaccgcgucuucugcgacaccaugaacucgcucacccucccauccgaagucaaucuaugcaacaucgacauuuucaaccccaaauacgacugcaaaauuaugacaucaaaaaccgacgucucauccucagucaucacuucccucggcgcaaucguaagcugcuacgggaaaacaaagugcaccgcuuccaacaaaaacaaaggcaucaucaaaaccuucucuaacggcugcgacuacgucuccaacaaaggagucgacaccguauccgucggcaacacccucuacuacgucaacaaacaggaaggaaaaucgcucuacgucaaaggagaaccaaucaucaacuucuacgacccccuagucuucccauccgacgaguucgacgccagcaucucacaagucaaugaaaagaucaaccagucacucgcauucauccguaagucagacgaacuccuacacaacgucaacgucggcaagucaacaaccaacauaaugaucaccaccauaaucaucgucauaauaguaauccuccuucuccuaaucgcagucggccucuuccucuacugcaaagcacgcuaaggacuaguguccaccugucccuccugggcugcuggauugucucguuuuccugccaaauaaacaggaucagcgcuuuacagaucuaaaaaaaaaaaaaaaaaaaaaaaaaaaaaaaaaaaaaaaaaaaaaaaaaaaaaaaaaaaaaaaaugcaucccccccccccccccccccccccccccccccaaaggcucuuuucagagccaccagaauu

SEQ ID NO: 18930 - RNA, 1880 nt, Artificial Sequence
  mRNA product Design e-4 comprising derived and/or modified sequence from HRSV(Memphis-37)__AIY60640.1__F-del_DSCav1_mut7 (opt1)
gggagacuccugucgggcggaaguaggaggaguagaguuuaaaaacaguacucuuuuuccgguucgggacguaguugaagcaacgacaagccggauaaccgcucuugagacaggaagcuuaccauggagcugcccauccucaagaccaacgccaucaccacgauccuggccgcggugacccugugcuucgccagcucccagaacaucaccgaggaguucuaccagagcacgugcuccgccgucagcaagggcuaccucuccgcccugcgcaccgggugguacaccagcgugaucaccaucgagcuguccaacaucaaggagaacaagugcaacggcaccgacgccaaggugaagcucaucaagcaggagcuggacaaguacaagaacgcggucacggagcugcagaugcugaugugcagcaccccggccgccggcuccgggagcgcgaucgccuccggcaucgccgucugcaaggugcugcaccucgagggcgaggugaacaagaucaagaacgcccugcuguccaccaacaaggccgucgugagccucuccaacggggugagcguccugaccuucaaggugcuggaccucaagaacuacaucgacaagcagcugcugcccauccugaacaagcagagcugcuccaucagcaacaucgagaccgucauggaguuccagcagaagaacaaccgccuccuggagaucacgcgggaguucagcgugaacgcgggcgugaccacccccgucuccaccuacaugcugacgaacagcgagcuccugucccugaucaacgacaugccgaucaccaacgaccagaagaagcucaugagcaacaacgugcagaucgugcgccagcaguccuacagcaucaugugcaucaucaaggaggagguccuggccuacguggugcagcugccccucuacggggucaucgacacccccugcuggaagcugcacaccagcccccugugcacgaccaacaccaaggagggcuccaacaucugccucacccggacggaccgcgggugguacugcgacaacgccggcagcguguccuucuucccgcaggccgagaccugcaaggucugcagcaaccggguguucugcgacaccaugaacucccugacccugcccagcgaggugaaccucugcaacaucgacaucuucaaccccaaguacgacugcaagaucaugacguccaagaccgacgucagcuccagcgugaucaccucccugggcgccaucgugagcugcuacgggaagaccaagugcacggcgagcaacaagaacaagggcaucaucaagaccuucuccaacgggugcgacuacgucagcaacaagggcguggacaccguguccgucggcaacacccuguacuacgugaacaagcaggagggcaagagccucuacgugaagggggagcccaucaucaacuucuacgacccgcuggucuuccccuccgacgaguucgacgccagcaucucccaggugaacgagaagaucaaccagagccuggccuucauccggaaguccgacgagcuccugcacaacgugaacgucggcaagagcaccacgaacaucaugaucaccaccaucaucaucgugaucaucgugauccugcugcuccugaucgccgucgggcuguuccucuacugcaaggcccgcugaggacuaguguccaccugucccuccugggcugcuggauugucucguuuuccugccaaauaaacaggaucagcgcuuuacagaucuaaaaaaaaaaaaaaaaaaaaaaaaaaaaaaaaaaaaaaaaaaaaaaaaaaaaaaaaaaaaaaaaugcaucccccccccccccccccccccccccccccccaaaggcucuuuucagagccaccagaauu

SEQ ID NO: 18931 - RNA, 1880 nt, Artificial Sequence
  mRNA product Design e-4 comprising derived and/or modified sequence from HRSV(Memphis-37)__AIY60640.1__F-del_DSCav1_mut7 (opt1)
gggagacuccugucgggcggaaguaggaggaguagaguuuaaaaacaguacucuuuuuccgguucgggacguaguugaagcaacgacaagccggauaaccgcucuugagacaggaagcuuaccauggagcugcccauccucaagaccaacgccaucaccacgauccuggccgcggugacccugugcuucgccagcucccagaacaucaccgaggaguucuaccagagcacgugcuccgccgucagcaagggguaccucuccgcccugcgcaccgggugguacaccagcgugaucaccaucgagcuguccaacaucaaggagaacaagugcaacggcaccgacgccaaggugaagcucaucaagcaggagcuggacaaguacaagaacgcggucacggagcugcagaugcucaugugcagcaccccggccgccggguccggcagcgccaucgcguccgggaucgccgugugcaaggugcugcaccuggagggcgaggucaacaagaucaagaacgcccuccugagcaccaacaaggccguggugucccugagcaacggcgucuccgugcucaccuucaaggugcuggaccugaagaacuacaucgacaagcagcuccugcccauccugaacaagcagagcugcuccaucagcaacaucgagacggucauggaguuccagcagaagaacaaccggcuccuggagaucacccgcgaguucuccgugaacgccggggugaccacccccgucagcacguacaugcugaccaacagcgagcuccugucccugaucaacgacaugcccaucaccaacgaccagaagaagcucaugagcaacaacgugcagaucgugcggcagcaguccuacagcaucaugugcaucaucaaggaggagguccuggcguacguggugcagcugccgcucuacggcgucaucgacacccccugcuggaagcugcacacgagcccccugugcaccaccaacaccaaggaggggagcaacaucugccucacgcgcaccgaccggggcugguacugcgacaacgccggguccgugagcuucuucccccaggccgagaccugcaaggugugcuccaaccgcgucuucugcgacaccaugaacagccugacgcugccguccgaggugaaccucugcaacaucgacaucuucaaccccaaguacgacugcaagaucaugaccagcaagaccgacgucuccagcuccgugaucaccagccugggcgccaucguguccugcuacggcaagacgaagugcaccgccagcaacaagaacaaggggaucaucaagaccuucuccaacggcugcgacuacgucagcaacaaggggguggacaccgugagcgucggcaacacgcuguacuacgugaacaagcaggagggcaagucccucuacgugaagggggagcccaucaucaacuucuacgacccccuggucuucccgagcgacgaguucgacgcguccaucagccaggugaacgagaagaucaaccagucccuggccuucauccggaaguccgacgagcuccugcacaacgugaacgucggcaaguccaccaccaacaucaugaucaccaccaucaucaucgugaucaucgugauccugcuccugcugaucgccgucggccucuuccuguacugcaaggcccgcugaggacuaguguccaccugucccuccugggcugcuggauugucucguuuuccugccaaauaaacaggaucagcgcuuuacagaucuaaaaaaaaaaaaaaaaaaaaaaaaaaaaaaaaaaaaaaaaaaaaaaaaaaaaaaaaaaaaaaaaugcaucccccccccccccccccccccccccccccccaaaggcucuuuucagagccaccagaauu

SEQ ID NO: 18932 - RNA, 1880 nt, Artificial Sequence
  mRNA product Design e-4 comprising derived and/or modified sequence from HRSV(Memphis-37)__AIY60640.1__F-del_DSCav1_mut7 (opt2)
gggagacuccugucgggcggaaguaggaggaguagaguuuaaaaacaguacucuuuuuccgguucgggacguaguugaagcaacgacaagccggauaaccgcucuugagacaggaagcuuaccauggagcuccccauccucaagaccaacgccaucaccaccauccucgccgccgucacccucugcuucgccuccucccagaacaucaccgaggaguucuaccaguccaccugcuccgccgucuccaagggcuaccucuccgcccuccgcaccggcugguacaccuccgucaucaccaucgagcucuccaacaucaaggagaacaagugcaacggcaccgacgccaaggucaagcucaucaagcaggagcucgacaaguacaagaacgccgucaccgagcuccagaugcucaugugcuccacccccgccgccggcuccggcuccgccaucgccuccggcaucgccgucugcaagguccuccaccucgagggcgaggucaacaagaucaagaacgcccuccucuccaccaacaaggccgucgucucccucuccaacggcgucuccguccucaccuucaagguccucgaccucaagaacuacaucgacaagcagcuccuccccauccucaacaagcaguccugcuccaucuccaacaucgagaccgucauggaguuccagcagaagaacaaccgccuccucgagaucacccgcgaguucuccgucaacgccggcgucaccacccccgucuccaccuacaugcucaccaacuccgagcuccucucccucaucaacgacaugcccaucaccaacgaccagaagaagcucauguccaacaacguccagaucguccgccagcaguccuacuccaucaugugcaucaucaaggaggagguccucgccuacgucguccagcucccccucuacggcgucaucgacacccccugcuggaagcuccacaccuccccccucugcaccaccaacaccaaggagggcuccaacaucugccucacccgcaccgaccgcggcugguacugcgacaacgccggcuccgucuccuucuucccccaggccgagaccugcaaggucugcuccaaccgcgucuucugcgacaccaugaacucccucacccuccccuccgaggucaaccucugcaacaucgacaucuucaaccccaaguacgacugcaagaucaugaccuccaagaccgacgucuccuccuccgucaucaccucccucggcgccaucgucuccugcuacggcaagaccaagugcaccgccuccaacaagaacaagggcaucaucaagaccuucuccaacggcugcgacuacgucuccaacaagggcgucgacaccgucuccgucggcaacacccucuacuacgucaacaagcaggagggcaagucccucuacgucaagggcgagcccaucaucaacuucuacgacccccucgucuuccccuccgacgaguucgacgccuccaucucccaggucaacgagaagaucaaccagucccucgccuucauccgcaaguccgacgagcuccuccacaacgucaacgucggcaaguccaccaccaacaucaugaucaccaccaucaucaucgucaucaucgucauccuccuccuccucaucgccgucggccucuuccucuacugcaaggcccgcugaggacuaguguccaccugucccuccugggcugcuggauugucucguuuuccugccaaauaaacaggaucagcgcuuuacagaucuaaaaaaaaaaaaaaaaaaaaaaaaaaaaaaaaaaaaaaaaaaaaaaaaaaaaaaaaaaaaaaaaugcaucccccccccccccccccccccccccccccccaaaggcucuuuucagagccaccagaauu

SEQ ID NO: 18933 - RNA, 1880 nt, Artificial Sequence
  mRNA product Design e-4 comprising derived and/or modified sequence from HRSV(Memphis-37)__AIY60640.1__F-del_DSCav1_mut7 (opt3)
gggagacuccugucgggcggaaguaggaggaguagaguuuaaaaacaguacucuuuuuccgguucgggacguaguugaagcaacgacaagccggauaaccgcucuugagacaggaagcuuaccauggagcugcccauccucaagaccaacgccauuacaacuauacuugcugcagugacgcugugcuucgccagcucccagaauaucaccgaagaguuuuaccaaucuacauguucagcggucaguaaaggcuauuugagcgcuuuaagaacugggugguacaccuccguuauuacaaucgaacugucuaacauuaaggagaauaaaugcaacggaaccgacgccaaggugaaacuaaucaagcaggaacucgauaaguauaaaaaugcaguaacugagcugcagaugcuuauguguucgaccccugccgcugguucaggcagcgcaauagccagugggaucgcugugugcaagguccugcacuuggagggagaagugaacaaaauuaagaaugcccuccuguccacaaacaaagcgguugugucucugagcaauggcgucuccgugcucacguucaagguauuagaccugaagaacuacaucgauaaacagcuuuugccaauucugaauaagcaaucauguaguaucagcaacauagagacuguuauggaauuucagcagaaaaauaacaggcuacucgagauuacccgggaguucucugugaaugccggugucacaacuccgguguccaccuauaugcugacaaacucagaacuucugagcuugaucaacgacaugcccauuaccaaugaucagaagaaacucaugaguaacaaugugcaaaucguccgccagcagucuuacuccaucaugugcauuauaaaggaggaaguucuggcauaugugguacaguuaccucuguacggggugaucgacacgccauguuggaaacuccauacuagcccccuuugcacaaccaacacuaaggagggaucgaauauuugucugacacgaaccgaucguggcugguacugcgacaacgcuggcucugucuccuuuuucccucaagccgaaacguguaaggugugcucaaauagaguguuuugcgauaccaugaacaguuugacacuaccaagcgagguuaaucuguguaacaucgacauauucaaucccaaauaugauugcaagauuaugacuuccaaaaccgacgucucuagcucagugaucacaagucucggggcaaucguauccuguuacggaaagacuaaaugcaccgcuagcaacaagaauaaggguauuaucaaaacauuuucuaacggcugugauuauguuucaaauaaggggguggacaccgucagugugggaaacacucuguacuaugucaacaaacaggagggcaagagccuuuacgugaaaggugaaccuauuauaaauuucuaugacccacugguuuuuccguccgaugaguucgacgccucuaucagccaggugaacgaaaagauuaaucaaucguuggcguuuaucaggaaguccgaugagcuccugcacaacguaaaugucgggaaaucaacgacaaacaucaugauuaccacuauaaucauugugaucauuguuaucuuacugcuacucauagccgugggacuguuccuuuacugcaaggcacggugaggacuaguguccaccugucccuccugggcugcuggauugucucguuuuccugccaaauaaacaggaucagcgcuuuacagaucuaaaaaaaaaaaaaaaaaaaaaaaaaaaaaaaaaaaaaaaaaaaaaaaaaaaaaaaaaaaaaaaaugcaucccccccccccccccccccccccccccccccaaaggcucuuuucagagccaccagaauu

SEQ ID NO: 18934 - RNA, 1880 nt, Artificial Sequence
  mRNA product Design e-4 comprising derived and/or modified sequence from HRSV(Memphis-37)__AIY60640.1__F-del_DSCav1_mut7 (opt4)
gggagacuccugucgggcggaaguaggaggaguagaguuuaaaaacaguacucuuuuuccgguucgggacguaguugaagcaacgacaagccggauaaccgcucuugagacaggaagcuuaccauggagcugcccauccugaagaccaacgccaucaccaccauccuggccgccgugacccugugcuucgccagcagccagaacaucaccgaggaguucuaccagagcaccugcagcgccgugagcaagggcuaccugagcgcccugagaaccggcugguacaccagcgugaucaccaucgagcugagcaacaucaaggagaacaagugcaacggcaccgacgccaaggugaagcugaucaagcaggagcuggacaaguacaagaacgccgugaccgagcugcagaugcugaugugcagcacccccgccgccggcagcggcagcgccaucgccagcggcaucgccgugugcaaggugcugcaccuggagggcgaggugaacaagaucaagaacgcccugcugagcaccaacaaggccguggugagccugagcaacggcgugagcgugcugaccuucaaggugcuggaccugaagaacuacaucgacaagcagcugcugcccauccugaacaagcagagcugcagcaucagcaacaucgagaccgugauggaguuccagcagaagaacaacagacugcuggagaucaccagagaguucagcgugaacgccggcgugaccacccccgugagcaccuacaugcugaccaacagcgagcugcugagccugaucaacgacaugcccaucaccaacgaccagaagaagcugaugagcaacaacgugcagaucgugagacagcagagcuacagcaucaugugcaucaucaaggaggaggugcuggccuacguggugcagcugccccuguacggcgugaucgacacccccugcuggaagcugcacaccagcccccugugcaccaccaacaccaaggagggcagcaacaucugccugaccagaaccgacagaggcugguacugcgacaacgccggcagcgugagcuucuucccccaggccgagaccugcaaggugugcagcaacagaguguucugcgacaccaugaacagccugacccugcccagcgaggugaaccugugcaacaucgacaucuucaaccccaaguacgacugcaagaucaugaccagcaagaccgacgugagcagcagcgugaucaccagccugggcgccaucgugagcugcuacggcaagaccaagugcaccgccagcaacaagaacaagggcaucaucaagaccuucagcaacggcugcgacuacgugagcaacaagggcguggacaccgugagcgugggcaacacccuguacuacgugaacaagcaggagggcaagagccuguacgugaagggcgagcccaucaucaacuucuacgacccccugguguuccccagcgacgaguucgacgccagcaucagccaggugaacgagaagaucaaccagagccuggccuucaucagaaagagcgacgagcugcugcacaacgugaacgugggcaagagcaccaccaacaucaugaucaccaccaucaucaucgugaucaucgugauccugcugcugcugaucgccgugggccuguuccuguacugcaaggccagaugaggacuaguguccaccugucccuccugggcugcuggauugucucguuuuccugccaaauaaacaggaucagcgcuuuacagaucuaaaaaaaaaaaaaaaaaaaaaaaaaaaaaaaaaaaaaaaaaaaaaaaaaaaaaaaaaaaaaaaaugcaucccccccccccccccccccccccccccccccaaaggcucuuuucagagccaccagaauu

SEQ ID NO: 18935 - RNA, 1880 nt, Artificial Sequence
  mRNA product Design e-4 comprising derived and/or modified sequence from HRSV(Memphis-37)__AIY60640.1__F-del_DSCav1_mut7 (opt5)
gggagacuccugucgggcggaaguaggaggaguagaguuuaaaaacaguacucuuuuuccgguucgggacguaguugaagcaacgacaagccggauaaccgcucuugagacaggaagcuuaccauggagcugcccauccucaagaccaacgccauuacaacgauccuggcugccgugacccuuugcuucgcgagcucccagaauauuacagaagaguuuuaccaaucuaccuguagcgcugucuccaaaggcuaucugucugcccucagaacagggugguacaccagcguuaucacaauugaacuguccaacaucaaggagaauaaaugcaacggaaccgacgccaaggugaaacuuaucaagcaggaacuggauaaguauaaaaaugcugugacggagcuccagaugcugauguguucuaccccugccgcuggcagcggguccgccauugcgagcggaaucgccgucugcaaggugcugcaccucgagggcgaaguuaacaaaauuaagaaugcucugcuuucuacaaacaaagccguggucucccugagcaauggggugucuguucucaccuucaaggugcuggaccuuaagaacuacaucgauaaacagcugcucccgauucugaauaagcaauccuguagcaucucuaacauugagacagucauggaauuucagcagaaaaauaaccggcugcucgagaucacccgcgaguucuccgugaaugcuggagugacgacacccgucagcaccuauaugcugacaaacuccgaacuucugucucucaucaacgacaugccuauuaccaaugaucagaagaaacugaugagcaacaauguucaaaucgugagacagcaguccuacagcauuaugugcaucauuaaggaggaagugcuugccuaugucgugcagcugccccucuacggcguuaucgacaccccuuguuggaaacugcauacaucuccccugugcacgaccaacacaaaggagggcuccaauaucugucucacccggacagaucgcgggugguacugcgacaacgcgggaagcgugagcuuuuucccucaagccgaaaccuguaaggucugcucuaauagaguguuuugcgauacgaugaacucccugacacuuccgucugagguuaaucuguguaacauugacaucuucaaucccaaauaugauugcaagauuaugaccagcaaaaccgacguguccagcucugucaucacaucccucggcgcuauugugagcuguuacgggaagaccaaaugcacagccucuaacaagaauaagggaaucaucaaaacguuuuccaacggcugugauuaugucagcaauaaggggguggacaccguuuccgugggaaacacacuguacuaugucaacaaacaggagggcaagucucuuuacgugaaaggcgaaccuauuaucaauuucuaugacccccugguuuuuccuagcgaugaguucgacgcuuccauuucucaggugaacgaaaagaucaaucaaagccucgccuuuauucggaaguccgaugagcugcugcacaacgucaauguggggaaaagcaccacaaacaucaugauuaccacgaucaucauugugaucauuguuauccuccugcuucugauugccgucggacucuuccuguacugcaaggcucgcugaggacuaguguccaccugucccuccugggcugcuggauugucucguuuuccugccaaauaaacaggaucagcgcuuuacagaucuaaaaaaaaaaaaaaaaaaaaaaaaaaaaaaaaaaaaaaaaaaaaaaaaaaaaaaaaaaaaaaaaugcaucccccccccccccccccccccccccccccccaaaggcucuuuucagagccaccagaauu

SEQ ID NO: 18936 - RNA, 1880 nt, Artificial Sequence
  mRNA product Design e-4 comprising derived and/or modified sequence from HRSV(Memphis-37)__AIY60640.1__F-del_DSCav1_mut7 (opt6)
gggagacuccugucgggcggaaguaggaggaguagaguuuaaaaacaguacucuuuuuccgguucgggacguaguugaagcaacgacaagccggauaaccgcucuugagacaggaagcuuaccauggaacuaccaauacucaaaacaaacgccauaaccacaauacuagccgcaguaacacuuugcuuugccucaagucaaaacauaacagaagaauuuuaccaauccacaugcucagcuguauccaaaggauauuuauccgcacuaagaacaggaugguacacaucaguaaucacaauagaauuaucaaacauaaaagaaaacaaauguaauggcacagacgccaaaguaaaacuaauuaaacaagaacuagacaaauauaaaaaugcaguaaccgaacuccaaaugcucaugugcucuacaccagcugcaggaucaggaucagccauugcaagcgguauagcuguuugcaaaguauuacacuuagaaggagaaguaaauaaaauaaaaaacgcacuacuaucaacaaauaaagcaguaguaucccuaucaaacggaguaucaguacuuacauucaaaguauuagauuuaaaaaacuauauagacaaacaacuacuucccauauuaaacaaacaaucaugcucaauuuccaacauugaaacuguaauggaauuucaacaaaaaaacaacagacuacuugaaaucacacgagaauuuucaguaaacgcuggaguaacaacaccugucucuaccuacaugcucacaaauagcgaauuacuaucucuaaucaaugacaugccaauaacaaacgaucaaaaaaaacuaauguccaacaacguacaaauaguaagacaacaauccuauucaauaaugugcauaauaaaagaagaagucuuagcauacguuguacaacuaccauuauacggaguaauagauacaccaugcuggaaacuccacacaagcccccucugcacaacaaacaccaaagaagggucaaacauaugcuuaacaagaacagacagaggaugguacugugauaacgcaggaucugucucauucuuuccacaagcagaaacauguaaaguaugcuccaacagagucuuuugcgacaccaugaacucacuaaccuuacccucagaaguaaaccugugcaacaucgauaucuucaaccccaaauacgauugcaaaaucaugacaagcaaaacugauguauccagcucuguaauaacaucacuaggugcaauaguaucaugcuacggaaaaacaaaaugcacagcuucuaacaaaaauaaaggaauaauaaaaacauucuccaauggaugcgacuaugucucaaauaaaggaguagauacaguuucagucggcaacacacucuauuauguaaauaaacaagaaggaaaaucauuauacguaaaaggagaacccauaauaaacuucuacgacccccucguauucccaagcgacgaauuugacgccucaauaucacaaguaaacgaaaaaauaaaccaaucacucgcauucaucagaaaaucagaugaacuacuacacaauguaaacgucggaaaauccaccacaaauauaaugauaacuaccaucauaauaguaauaauagucaucuuacuacuauuaaucgcuguaggacuauuucucuacugcaaggccagauaaggacuaguguccaccugucccuccugggcugcuggauugucucguuuuccugccaaauaaacaggaucagcgcuuuacagaucuaaaaaaaaaaaaaaaaaaaaaaaaaaaaaaaaaaaaaaaaaaaaaaaaaaaaaaaaaaaaaaaaugcaucccccccccccccccccccccccccccccccaaaggcucuuuucagagccaccagaauu

SEQ ID NO: 18937 - RNA, 1880 nt, Artificial Sequence
  mRNA product Design e-4 comprising derived and/or modified sequence from HRSV(Memphis-37)__AIY60640.1__F-del_DSCav1_mut7 (opt11)
gggagacuccugucgggcggaaguaggaggaguagaguuuaaaaacaguacucuuuuuccgguucgggacguaguugaagcaacgacaagccggauaaccgcucuugagacaggaagcuuaccauggaacucccaauccucaaaacaaaugccaucaccaccauccuagccgcugucacacuaugcuucgccuccucacaaaacaucaccgaagaguucuaucaauccacaugcuccgccgucagcaagggauaccucuccgcccuuagaaccggcugguacaccucagucaucacaauugaacugucaaacaucaaagaaaacaaaugcaacggcaccgacgcaaaaguaaagcucaucaaacaagaacuggacaaguacaagaacgccgucaccgaacuacagaugcuuaugugcucaaccccugccgccggcuccggaucugccauagcuucaggcaucgccguaugcaaaguccugcaccuagaaggggaagucaacaaaaucaaaaacgcccuccucuccaccaacaaggccguugucucccugucaaacggagucuccguccuaaccuucaaaguccucgaccucaaaaacuacauagacaaacaacuccuacccauccucaacaaacaaagcugcucaauauccaacaucgaaaccgucauggaguuccaacaaaagaacaaccgacuacucgaaauaacacgcgaguucucagucaacgccggcgucaccaccccagucuccacauacaugcucaccaacuccgaacuccuaucgcucaucaacgacaugcccaucaccaaugaccagaagaaacucauguccaacaacguacaaaucguccgccaacaguccuacucaaucaugugcaucaucaaagaagaaguccuugccuacgucguccagcuuccacucuacggagucaucgacacccccugcuggaaacuccacaccuccccacuaugcaccaccaacaccaaagaaggauccaacauaugccucacccguacugaccgcggcugguacugcgacaacgccggauccgucucauucuucccccaggccgaaaccugcaaagucugcuccaaccgcgucuucugcgacaccaugaacucgcucacccucccauccgaagucaaucuaugcaacaucgacauuuucaaccccaaauacgacugcaaaauuaugacaucaaaaaccgacgucucauccucagucaucacuucccucggcgcaaucguaagcugcuacgggaaaacaaagugcaccgcuuccaacaaaaacaaaggcaucaucaaaaccuucucuaacggcugcgacuacgucuccaacaaaggagucgacaccguauccgucggcaacacccucuacuacgucaacaaacaggaaggaaaaucgcucuacgucaaaggagaaccaaucaucaacuucuacgacccccuagucuucccauccgacgaguucgacgccagcaucucacaagucaaugaaaagaucaaccagucacucgcauucauccguaagucagacgaacuccuacacaacgucaacgucggcaagucaacaaccaacauaaugaucaccaccauaaucaucgucauaauaguaauccuccuucuccuaaucgcagucggccucuuccucuacugcaaagcacgcuaaggacuaguguccaccugucccuccugggcugcuggauugucucguuuuccugccaaauaaacaggaucagcgcuuuacagaucuaaaaaaaaaaaaaaaaaaaaaaaaaaaaaaaaaaaaaaaaaaaaaaaaaaaaaaaaaaaaaaaaugcaucccccccccccccccccccccccccccccccaaaggcucuuuucagagccaccagaauu

SEQ ID NO: 18938 - RNA, 1847 nt, Artificial Sequence
  mRNA product Design e-5 comprising derived and/or modified sequence from HRSV(Memphis-37)__AIY60640.1__F-del_DSCav1_mut7 (opt1)
gggagagcggcucggccauuuugucccagucaguccggaggcugcggcugcagaaguaccgccugcggaguaacugcaaagaagcuuaccauggagcugcccauccucaagaccaacgccaucaccacgauccuggccgcggugacccugugcuucgccagcucccagaacaucaccgaggaguucuaccagagcacgugcuccgccgucagcaagggcuaccucuccgcccugcgcaccgggugguacaccagcgugaucaccaucgagcuguccaacaucaaggagaacaagugcaacggcaccgacgccaaggugaagcucaucaagcaggagcuggacaaguacaagaacgcggucacggagcugcagaugcugaugugcagcaccccggccgccggcuccgggagcgcgaucgccuccggcaucgccgucugcaaggugcugcaccucgagggcgaggugaacaagaucaagaacgcccugcuguccaccaacaaggccgucgugagccucuccaacggggugagcguccugaccuucaaggugcuggaccucaagaacuacaucgacaagcagcugcugcccauccugaacaagcagagcugcuccaucagcaacaucgagaccgucauggaguuccagcagaagaacaaccgccuccuggagaucacgcgggaguucagcgugaacgcgggcgugaccacccccgucuccaccuacaugcugacgaacagcgagcuccugucccugaucaacgacaugccgaucaccaacgaccagaagaagcucaugagcaacaacgugcagaucgugcgccagcaguccuacagcaucaugugcaucaucaaggaggagguccuggccuacguggugcagcugccccucuacggggucaucgacacccccugcuggaagcugcacaccagcccccugugcacgaccaacaccaaggagggcuccaacaucugccucacccggacggaccgcgggugguacugcgacaacgccggcagcguguccuucuucccgcaggccgagaccugcaaggucugcagcaaccggguguucugcgacaccaugaacucccugacccugcccagcgaggugaaccucugcaacaucgacaucuucaaccccaaguacgacugcaagaucaugacguccaagaccgacgucagcuccagcgugaucaccucccugggcgccaucgugagcugcuacgggaagaccaagugcacggcgagcaacaagaacaagggcaucaucaagaccuucuccaacgggugcgacuacgucagcaacaagggcguggacaccguguccgucggcaacacccuguacuacgugaacaagcaggagggcaagagccucuacgugaagggggagcccaucaucaacuucuacgacccgcuggucuuccccuccgacgaguucgacgccagcaucucccaggugaacgagaagaucaaccagagccuggccuucauccggaaguccgacgagcuccugcacaacgugaacgucggcaagagcaccacgaacaucaugaucaccaccaucaucaucgugaucaucgugauccugcugcuccugaucgccgucgggcuguuccucuacugcaaggcccgcugaggacuaguguccaccugucccuccugggcugcuggauugucucguuuuccugccaaauaaacaggaucagcgcuuuacagaucuaaaaaaaaaaaaaaaaaaaaaaaaaaaaaaaaaaaaaaaaaaaaaaaaaaaaaaaaaaaaaaaaugcaucccccccccccccccccccccccccccccccaaaggcucuuuucagagccaccagaauu

SEQ ID NO: 18939 - RNA, 1847 nt, Artificial Sequence
  mRNA product Design e-5 comprising derived and/or modified sequence from HRSV(Memphis-37)__AIY60640.1__F-del_DSCav1_mut7 (opt1)
gggagagcggcucggccauuuugucccagucaguccggaggcugcggcugcagaaguaccgccugcggaguaacugcaaagaagcuuaccauggagcugcccauccucaagaccaacgccaucaccacgauccuggccgcggugacccugugcuucgccagcucccagaacaucaccgaggaguucuaccagagcacgugcuccgccgucagcaagggguaccucuccgcccugcgcaccgggugguacaccagcgugaucaccaucgagcuguccaacaucaaggagaacaagugcaacggcaccgacgccaaggugaagcucaucaagcaggagcuggacaaguacaagaacgcggucacggagcugcagaugcucaugugcagcaccccggccgccggguccggcagcgccaucgcguccgggaucgccgugugcaaggugcugcaccuggagggcgaggucaacaagaucaagaacgcccuccugagcaccaacaaggccguggugucccugagcaacggcgucuccgugcucaccuucaaggugcuggaccugaagaacuacaucgacaagcagcuccugcccauccugaacaagcagagcugcuccaucagcaacaucgagacggucauggaguuccagcagaagaacaaccggcuccuggagaucacccgcgaguucuccgugaacgccggggugaccacccccgucagcacguacaugcugaccaacagcgagcuccugucccugaucaacgacaugcccaucaccaacgaccagaagaagcucaugagcaacaacgugcagaucgugcggcagcaguccuacagcaucaugugcaucaucaaggaggagguccuggcguacguggugcagcugccgcucuacggcgucaucgacacccccugcuggaagcugcacacgagcccccugugcaccaccaacaccaaggaggggagcaacaucugccucacgcgcaccgaccggggcugguacugcgacaacgccggguccgugagcuucuucccccaggccgagaccugcaaggugugcuccaaccgcgucuucugcgacaccaugaacagccugacgcugccguccgaggugaaccucugcaacaucgacaucuucaaccccaaguacgacugcaagaucaugaccagcaagaccgacgucuccagcuccgugaucaccagccugggcgccaucguguccugcuacggcaagacgaagugcaccgccagcaacaagaacaaggggaucaucaagaccuucuccaacggcugcgacuacgucagcaacaaggggguggacaccgugagcgucggcaacacgcuguacuacgugaacaagcaggagggcaagucccucuacgugaagggggagcccaucaucaacuucuacgacccccuggucuucccgagcgacgaguucgacgcguccaucagccaggugaacgagaagaucaaccagucccuggccuucauccggaaguccgacgagcuccugcacaacgugaacgucggcaaguccaccaccaacaucaugaucaccaccaucaucaucgugaucaucgugauccugcuccugcugaucgccgucggccucuuccuguacugcaaggcccgcugaggacuaguguccaccugucccuccugggcugcuggauugucucguuuuccugccaaauaaacaggaucagcgcuuuacagaucuaaaaaaaaaaaaaaaaaaaaaaaaaaaaaaaaaaaaaaaaaaaaaaaaaaaaaaaaaaaaaaaaugcaucccccccccccccccccccccccccccccccaaaggcucuuuucagagccaccagaauu

SEQ ID NO: 18940 - RNA, 1847 nt, Artificial Sequence
  mRNA product Design e-5 comprising derived and/or modified sequence from HRSV(Memphis-37)__AIY60640.1__F-del_DSCav1_mut7 (opt2)
gggagagcggcucggccauuuugucccagucaguccggaggcugcggcugcagaaguaccgccugcggaguaacugcaaagaagcuuaccauggagcuccccauccucaagaccaacgccaucaccaccauccucgccgccgucacccucugcuucgccuccucccagaacaucaccgaggaguucuaccaguccaccugcuccgccgucuccaagggcuaccucuccgcccuccgcaccggcugguacaccuccgucaucaccaucgagcucuccaacaucaaggagaacaagugcaacggcaccgacgccaaggucaagcucaucaagcaggagcucgacaaguacaagaacgccgucaccgagcuccagaugcucaugugcuccacccccgccgccggcuccggcuccgccaucgccuccggcaucgccgucugcaagguccuccaccucgagggcgaggucaacaagaucaagaacgcccuccucuccaccaacaaggccgucgucucccucuccaacggcgucuccguccucaccuucaagguccucgaccucaagaacuacaucgacaagcagcuccuccccauccucaacaagcaguccugcuccaucuccaacaucgagaccgucauggaguuccagcagaagaacaaccgccuccucgagaucacccgcgaguucuccgucaacgccggcgucaccacccccgucuccaccuacaugcucaccaacuccgagcuccucucccucaucaacgacaugcccaucaccaacgaccagaagaagcucauguccaacaacguccagaucguccgccagcaguccuacuccaucaugugcaucaucaaggaggagguccucgccuacgucguccagcucccccucuacggcgucaucgacacccccugcuggaagcuccacaccuccccccucugcaccaccaacaccaaggagggcuccaacaucugccucacccgcaccgaccgcggcugguacugcgacaacgccggcuccgucuccuucuucccccaggccgagaccugcaaggucugcuccaaccgcgucuucugcgacaccaugaacucccucacccuccccuccgaggucaaccucugcaacaucgacaucuucaaccccaaguacgacugcaagaucaugaccuccaagaccgacgucuccuccuccgucaucaccucccucggcgccaucgucuccugcuacggcaagaccaagugcaccgccuccaacaagaacaagggcaucaucaagaccuucuccaacggcugcgacuacgucuccaacaagggcgucgacaccgucuccgucggcaacacccucuacuacgucaacaagcaggagggcaagucccucuacgucaagggcgagcccaucaucaacuucuacgacccccucgucuuccccuccgacgaguucgacgccuccaucucccaggucaacgagaagaucaaccagucccucgccuucauccgcaaguccgacgagcuccuccacaacgucaacgucggcaaguccaccaccaacaucaugaucaccaccaucaucaucgucaucaucgucauccuccuccuccucaucgccgucggccucuuccucuacugcaaggcccgcugaggacuaguguccaccugucccuccugggcugcuggauugucucguuuuccugccaaauaaacaggaucagcgcuuuacagaucuaaaaaaaaaaaaaaaaaaaaaaaaaaaaaaaaaaaaaaaaaaaaaaaaaaaaaaaaaaaaaaaaugcaucccccccccccccccccccccccccccccccaaaggcucuuuucagagccaccagaauu

SEQ ID NO: 18941 - RNA, 1847 nt, Artificial Sequence
  mRNA product Design e-5 comprising derived and/or modified sequence from HRSV(Memphis-37)__AIY60640.1__F-del_DSCav1_mut7 (opt3)
gggagagcggcucggccauuuugucccagucaguccggaggcugcggcugcagaaguaccgccugcggaguaacugcaaagaagcuuaccauggagcugcccauccucaagaccaacgccauuacaacuauacuugcugcagugacgcugugcuucgccagcucccagaauaucaccgaagaguuuuaccaaucuacauguucagcggucaguaaaggcuauuugagcgcuuuaagaacugggugguacaccuccguuauuacaaucgaacugucuaacauuaaggagaauaaaugcaacggaaccgacgccaaggugaaacuaaucaagcaggaacucgauaaguauaaaaaugcaguaacugagcugcagaugcuuauguguucgaccccugccgcugguucaggcagcgcaauagccagugggaucgcugugugcaagguccugcacuuggagggagaagugaacaaaauuaagaaugcccuccuguccacaaacaaagcgguugugucucugagcaauggcgucuccgugcucacguucaagguauuagaccugaagaacuacaucgauaaacagcuuuugccaauucugaauaagcaaucauguaguaucagcaacauagagacuguuauggaauuucagcagaaaaauaacaggcuacucgagauuacccgggaguucucugugaaugccggugucacaacuccgguguccaccuauaugcugacaaacucagaacuucugagcuugaucaacgacaugcccauuaccaaugaucagaagaaacucaugaguaacaaugugcaaaucguccgccagcagucuuacuccaucaugugcauuauaaaggaggaaguucuggcauaugugguacaguuaccucuguacggggugaucgacacgccauguuggaaacuccauacuagcccccuuugcacaaccaacacuaaggagggaucgaauauuugucugacacgaaccgaucguggcugguacugcgacaacgcuggcucugucuccuuuuucccucaagccgaaacguguaaggugugcucaaauagaguguuuugcgauaccaugaacaguuugacacuaccaagcgagguuaaucuguguaacaucgacauauucaaucccaaauaugauugcaagauuaugacuuccaaaaccgacgucucuagcucagugaucacaagucucggggcaaucguauccuguuacggaaagacuaaaugcaccgcuagcaacaagaauaaggguauuaucaaaacauuuucuaacggcugugauuauguuucaaauaaggggguggacaccgucagugugggaaacacucuguacuaugucaacaaacaggagggcaagagccuuuacgugaaaggugaaccuauuauaaauuucuaugacccacugguuuuuccguccgaugaguucgacgccucuaucagccaggugaacgaaaagauuaaucaaucguuggcguuuaucaggaaguccgaugagcuccugcacaacguaaaugucgggaaaucaacgacaaacaucaugauuaccacuauaaucauugugaucauuguuaucuuacugcuacucauagccgugggacuguuccuuuacugcaaggcacggugaggacuaguguccaccugucccuccugggcugcuggauugucucguuuuccugccaaauaaacaggaucagcgcuuuacagaucuaaaaaaaaaaaaaaaaaaaaaaaaaaaaaaaaaaaaaaaaaaaaaaaaaaaaaaaaaaaaaaaaugcaucccccccccccccccccccccccccccccccaaaggcucuuuucagagccaccagaauu

SEQ ID NO: 18942 - RNA, 1847 nt, Artificial Sequence
  mRNA product Design e-5 comprising derived and/or modified sequence from HRSV(Memphis-37)__AIY60640.1__F-del_DSCav1_mut7 (opt4)
gggagagcggcucggccauuuugucccagucaguccggaggcugcggcugcagaaguaccgccugcggaguaacugcaaagaagcuuaccauggagcugcccauccugaagaccaacgccaucaccaccauccuggccgccgugacccugugcuucgccagcagccagaacaucaccgaggaguucuaccagagcaccugcagcgccgugagcaagggcuaccugagcgcccugagaaccggcugguacaccagcgugaucaccaucgagcugagcaacaucaaggagaacaagugcaacggcaccgacgccaaggugaagcugaucaagcaggagcuggacaaguacaagaacgccgugaccgagcugcagaugcugaugugcagcacccccgccgccggcagcggcagcgccaucgccagcggcaucgccgugugcaaggugcugcaccuggagggcgaggugaacaagaucaagaacgcccugcugagcaccaacaaggccguggugagccugagcaacggcgugagcgugcugaccuucaaggugcuggaccugaagaacuacaucgacaagcagcugcugcccauccugaacaagcagagcugcagcaucagcaacaucgagaccgugauggaguuccagcagaagaacaacagacugcuggagaucaccagagaguucagcgugaacgccggcgugaccacccccgugagcaccuacaugcugaccaacagcgagcugcugagccugaucaacgacaugcccaucaccaacgaccagaagaagcugaugagcaacaacgugcagaucgugagacagcagagcuacagcaucaugugcaucaucaaggaggaggugcuggccuacguggugcagcugccccuguacggcgugaucgacacccccugcuggaagcugcacaccagcccccugugcaccaccaacaccaaggagggcagcaacaucugccugaccagaaccgacagaggcugguacugcgacaacgccggcagcgugagcuucuucccccaggccgagaccugcaaggugugcagcaacagaguguucugcgacaccaugaacagccugacccugcccagcgaggugaaccugugcaacaucgacaucuucaaccccaaguacgacugcaagaucaugaccagcaagaccgacgugagcagcagcgugaucaccagccugggcgccaucgugagcugcuacggcaagaccaagugcaccgccagcaacaagaacaagggcaucaucaagaccuucagcaacggcugcgacuacgugagcaacaagggcguggacaccgugagcgugggcaacacccuguacuacgugaacaagcaggagggcaagagccuguacgugaagggcgagcccaucaucaacuucuacgacccccugguguuccccagcgacgaguucgacgccagcaucagccaggugaacgagaagaucaaccagagccuggccuucaucagaaagagcgacgagcugcugcacaacgugaacgugggcaagagcaccaccaacaucaugaucaccaccaucaucaucgugaucaucgugauccugcugcugcugaucgccgugggccuguuccuguacugcaaggccagaugaggacuaguguccaccugucccuccugggcugcuggauugucucguuuuccugccaaauaaacaggaucagcgcuuuacagaucuaaaaaaaaaaaaaaaaaaaaaaaaaaaaaaaaaaaaaaaaaaaaaaaaaaaaaaaaaaaaaaaaugcaucccccccccccccccccccccccccccccccaaaggcucuuuucagagccaccagaauu

SEQ ID NO: 18943 - RNA, 1847 nt, Artificial Sequence
  mRNA product Design e-5 comprising derived and/or modified sequence from HRSV(Memphis-37)__AIY60640.1__F-del_DSCav1_mut7 (opt5)
gggagagcggcucggccauuuugucccagucaguccggaggcugcggcugcagaaguaccgccugcggaguaacugcaaagaagcuuaccauggagcugcccauccucaagaccaacgccauuacaacgauccuggcugccgugacccuuugcuucgcgagcucccagaauauuacagaagaguuuuaccaaucuaccuguagcgcugucuccaaaggcuaucugucugcccucagaacagggugguacaccagcguuaucacaauugaacuguccaacaucaaggagaauaaaugcaacggaaccgacgccaaggugaaacuuaucaagcaggaacuggauaaguauaaaaaugcugugacggagcuccagaugcugauguguucuaccccugccgcuggcagcggguccgccauugcgagcggaaucgccgucugcaaggugcugcaccucgagggcgaaguuaacaaaauuaagaaugcucugcuuucuacaaacaaagccguggucucccugagcaauggggugucuguucucaccuucaaggugcuggaccuuaagaacuacaucgauaaacagcugcucccgauucugaauaagcaauccuguagcaucucuaacauugagacagucauggaauuucagcagaaaaauaaccggcugcucgagaucacccgcgaguucuccgugaaugcuggagugacgacacccgucagcaccuauaugcugacaaacuccgaacuucugucucucaucaacgacaugccuauuaccaaugaucagaagaaacugaugagcaacaauguucaaaucgugagacagcaguccuacagcauuaugugcaucauuaaggaggaagugcuugccuaugucgugcagcugccccucuacggcguuaucgacaccccuuguuggaaacugcauacaucuccccugugcacgaccaacacaaaggagggcuccaauaucugucucacccggacagaucgcgggugguacugcgacaacgcgggaagcgugagcuuuuucccucaagccgaaaccuguaaggucugcucuaauagaguguuuugcgauacgaugaacucccugacacuuccgucugagguuaaucuguguaacauugacaucuucaaucccaaauaugauugcaagauuaugaccagcaaaaccgacguguccagcucugucaucacaucccucggcgcuauugugagcuguuacgggaagaccaaaugcacagccucuaacaagaauaagggaaucaucaaaacguuuuccaacggcugugauuaugucagcaauaaggggguggacaccguuuccgugggaaacacacuguacuaugucaacaaacaggagggcaagucucuuuacgugaaaggcgaaccuauuaucaauuucuaugacccccugguuuuuccuagcgaugaguucgacgcuuccauuucucaggugaacgaaaagaucaaucaaagccucgccuuuauucggaaguccgaugagcugcugcacaacgucaauguggggaaaagcaccacaaacaucaugauuaccacgaucaucauugugaucauuguuauccuccugcuucugauugccgucggacucuuccuguacugcaaggcucgcugaggacuaguguccaccugucccuccugggcugcuggauugucucguuuuccugccaaauaaacaggaucagcgcuuuacagaucuaaaaaaaaaaaaaaaaaaaaaaaaaaaaaaaaaaaaaaaaaaaaaaaaaaaaaaaaaaaaaaaaugcaucccccccccccccccccccccccccccccccaaaggcucuuuucagagccaccagaauu

SEQ ID NO: 18944 - RNA, 1847 nt, Artificial Sequence
  mRNA product Design e-5 comprising derived and/or modified sequence from HRSV(Memphis-37)__AIY60640.1__F-del_DSCav1_mut7 (opt6)
gggagagcggcucggccauuuugucccagucaguccggaggcugcggcugcagaaguaccgccugcggaguaacugcaaagaagcuuaccauggaacuaccaauacucaaaacaaacgccauaaccacaauacuagccgcaguaacacuuugcuuugccucaagucaaaacauaacagaagaauuuuaccaauccacaugcucagcuguauccaaaggauauuuauccgcacuaagaacaggaugguacacaucaguaaucacaauagaauuaucaaacauaaaagaaaacaaauguaauggcacagacgccaaaguaaaacuaauuaaacaagaacuagacaaauauaaaaaugcaguaaccgaacuccaaaugcucaugugcucuacaccagcugcaggaucaggaucagccauugcaagcgguauagcuguuugcaaaguauuacacuuagaaggagaaguaaauaaaauaaaaaacgcacuacuaucaacaaauaaagcaguaguaucccuaucaaacggaguaucaguacuuacauucaaaguauuagauuuaaaaaacuauauagacaaacaacuacuucccauauuaaacaaacaaucaugcucaauuuccaacauugaaacuguaauggaauuucaacaaaaaaacaacagacuacuugaaaucacacgagaauuuucaguaaacgcuggaguaacaacaccugucucuaccuacaugcucacaaauagcgaauuacuaucucuaaucaaugacaugccaauaacaaacgaucaaaaaaaacuaauguccaacaacguacaaauaguaagacaacaauccuauucaauaaugugcauaauaaaagaagaagucuuagcauacguuguacaacuaccauuauacggaguaauagauacaccaugcuggaaacuccacacaagcccccucugcacaacaaacaccaaagaagggucaaacauaugcuuaacaagaacagacagaggaugguacugugauaacgcaggaucugucucauucuuuccacaagcagaaacauguaaaguaugcuccaacagagucuuuugcgacaccaugaacucacuaaccuuacccucagaaguaaaccugugcaacaucgauaucuucaaccccaaauacgauugcaaaaucaugacaagcaaaacugauguauccagcucuguaauaacaucacuaggugcaauaguaucaugcuacggaaaaacaaaaugcacagcuucuaacaaaaauaaaggaauaauaaaaacauucuccaauggaugcgacuaugucucaaauaaaggaguagauacaguuucagucggcaacacacucuauuauguaaauaaacaagaaggaaaaucauuauacguaaaaggagaacccauaauaaacuucuacgacccccucguauucccaagcgacgaauuugacgccucaauaucacaaguaaacgaaaaaauaaaccaaucacucgcauucaucagaaaaucagaugaacuacuacacaauguaaacgucggaaaauccaccacaaauauaaugauaacuaccaucauaauaguaauaauagucaucuuacuacuauuaaucgcuguaggacuauuucucuacugcaaggccagauaaggacuaguguccaccugucccuccugggcugcuggauugucucguuuuccugccaaauaaacaggaucagcgcuuuacagaucuaaaaaaaaaaaaaaaaaaaaaaaaaaaaaaaaaaaaaaaaaaaaaaaaaaaaaaaaaaaaaaaaugcaucccccccccccccccccccccccccccccccaaaggcucuuuucagagccaccagaauu

SEQ ID NO: 18945 - RNA, 1847 nt, Artificial Sequence
  mRNA product Design e-5 comprising derived and/or modified sequence from HRSV(Memphis-37)__AIY60640.1__F-del_DSCav1_mut7 (opt11)
gggagagcggcucggccauuuugucccagucaguccggaggcugcggcugcagaaguaccgccugcggaguaacugcaaagaagcuuaccauggaacucccaauccucaaaacaaaugccaucaccaccauccuagccgcugucacacuaugcuucgccuccucacaaaacaucaccgaagaguucuaucaauccacaugcuccgccgucagcaagggauaccucuccgcccuuagaaccggcugguacaccucagucaucacaauugaacugucaaacaucaaagaaaacaaaugcaacggcaccgacgcaaaaguaaagcucaucaaacaagaacuggacaaguacaagaacgccgucaccgaacuacagaugcuuaugugcucaaccccugccgccggcuccggaucugccauagcuucaggcaucgccguaugcaaaguccugcaccuagaaggggaagucaacaaaaucaaaaacgcccuccucuccaccaacaaggccguugucucccugucaaacggagucuccguccuaaccuucaaaguccucgaccucaaaaacuacauagacaaacaacuccuacccauccucaacaaacaaagcugcucaauauccaacaucgaaaccgucauggaguuccaacaaaagaacaaccgacuacucgaaauaacacgcgaguucucagucaacgccggcgucaccaccccagucuccacauacaugcucaccaacuccgaacuccuaucgcucaucaacgacaugcccaucaccaaugaccagaagaaacucauguccaacaacguacaaaucguccgccaacaguccuacucaaucaugugcaucaucaaagaagaaguccuugccuacgucguccagcuuccacucuacggagucaucgacacccccugcuggaaacuccacaccuccccacuaugcaccaccaacaccaaagaaggauccaacauaugccucacccguacugaccgcggcugguacugcgacaacgccggauccgucucauucuucccccaggccgaaaccugcaaagucugcuccaaccgcgucuucugcgacaccaugaacucgcucacccucccauccgaagucaaucuaugcaacaucgacauuuucaaccccaaauacgacugcaaaauuaugacaucaaaaaccgacgucucauccucagucaucacuucccucggcgcaaucguaagcugcuacgggaaaacaaagugcaccgcuuccaacaaaaacaaaggcaucaucaaaaccuucucuaacggcugcgacuacgucuccaacaaaggagucgacaccguauccgucggcaacacccucuacuacgucaacaaacaggaaggaaaaucgcucuacgucaaaggagaaccaaucaucaacuucuacgacccccuagucuucccauccgacgaguucgacgccagcaucucacaagucaaugaaaagaucaaccagucacucgcauucauccguaagucagacgaacuccuacacaacgucaacgucggcaagucaacaaccaacauaaugaucaccaccauaaucaucgucauaauaguaauccuccuucuccuaaucgcagucggccucuuccucuacugcaaagcacgcuaaggacuaguguccaccugucccuccugggcugcuggauugucucguuuuccugccaaauaaacaggaucagcgcuuuacagaucuaaaaaaaaaaaaaaaaaaaaaaaaaaaaaaaaaaaaaaaaaaaaaaaaaaaaaaaaaaaaaaaaugcaucccccccccccccccccccccccccccccccaaaggcucuuuucagagccaccagaauu

SEQ ID NO: 18946 - RNA, 1914 nt, Artificial Sequence
  mRNA product Design e-6 comprising derived and/or modified sequence from HRSV(Memphis-37)__AIY60640.1__F-del_DSCav1_mut7 (opt1)
gggagagcggcucggccauuuugucccagucaguccggaggcugcggcugcagaaguaccgccugcggaguaacugcaaagaagcuuaccauggagcugcccauccucaagaccaacgccaucaccacgauccuggccgcggugacccugugcuucgccagcucccagaacaucaccgaggaguucuaccagagcacgugcuccgccgucagcaagggcuaccucuccgcccugcgcaccgggugguacaccagcgugaucaccaucgagcuguccaacaucaaggagaacaagugcaacggcaccgacgccaaggugaagcucaucaagcaggagcuggacaaguacaagaacgcggucacggagcugcagaugcugaugugcagcaccccggccgccggcuccgggagcgcgaucgccuccggcaucgccgucugcaaggugcugcaccucgagggcgaggugaacaagaucaagaacgcccugcuguccaccaacaaggccgucgugagccucuccaacggggugagcguccugaccuucaaggugcuggaccucaagaacuacaucgacaagcagcugcugcccauccugaacaagcagagcugcuccaucagcaacaucgagaccgucauggaguuccagcagaagaacaaccgccuccuggagaucacgcgggaguucagcgugaacgcgggcgugaccacccccgucuccaccuacaugcugacgaacagcgagcuccugucccugaucaacgacaugccgaucaccaacgaccagaagaagcucaugagcaacaacgugcagaucgugcgccagcaguccuacagcaucaugugcaucaucaaggaggagguccuggccuacguggugcagcugccccucuacggggucaucgacacccccugcuggaagcugcacaccagcccccugugcacgaccaacaccaaggagggcuccaacaucugccucacccggacggaccgcgggugguacugcgacaacgccggcagcguguccuucuucccgcaggccgagaccugcaaggucugcagcaaccggguguucugcgacaccaugaacucccugacccugcccagcgaggugaaccucugcaacaucgacaucuucaaccccaaguacgacugcaagaucaugacguccaagaccgacgucagcuccagcgugaucaccucccugggcgccaucgugagcugcuacgggaagaccaagugcacggcgagcaacaagaacaagggcaucaucaagaccuucuccaacgggugcgacuacgucagcaacaagggcguggacaccguguccgucggcaacacccuguacuacgugaacaagcaggagggcaagagccucuacgugaagggggagcccaucaucaacuucuacgacccgcuggucuuccccuccgacgaguucgacgccagcaucucccaggugaacgagaagaucaaccagagccuggccuucauccggaaguccgacgagcuccugcacaacgugaacgucggcaagagcaccacgaacaucaugaucaccaccaucaucaucgugaucaucgugauccugcugcuccugaucgccgucgggcuguuccucuacugcaaggcccgcugaggacuaguacuggcugcaucucccuuuccucuguccuccauccuucucccaggauggugaagggggaccugguacccagugauccccaccccaggauccuaaaucaugacuuaccugcuaauaaaaacucauuggaaaagugagaagaucuaaaaaaaaaaaaaaaaaaaaaaaaaaaaaaaaaaaaaaaaaaaaaaaaaaaaaaaaaaaaaaaaugcaucccccccccccccccccccccccccccccccaaaggcucuuuucagagccaccagaauu

SEQ ID NO: 18947 - RNA, 1914 nt, Artificial Sequence
  mRNA product Design e-6 comprising derived and/or modified sequence from HRSV(Memphis-37)__AIY60640.1__F-del_DSCav1_mut7 (opt1)
gggagagcggcucggccauuuugucccagucaguccggaggcugcggcugcagaaguaccgccugcggaguaacugcaaagaagcuuaccauggagcugcccauccucaagaccaacgccaucaccacgauccuggccgcggugacccugugcuucgccagcucccagaacaucaccgaggaguucuaccagagcacgugcuccgccgucagcaagggguaccucuccgcccugcgcaccgggugguacaccagcgugaucaccaucgagcuguccaacaucaaggagaacaagugcaacggcaccgacgccaaggugaagcucaucaagcaggagcuggacaaguacaagaacgcggucacggagcugcagaugcucaugugcagcaccccggccgccggguccggcagcgccaucgcguccgggaucgccgugugcaaggugcugcaccuggagggcgaggucaacaagaucaagaacgcccuccugagcaccaacaaggccguggugucccugagcaacggcgucuccgugcucaccuucaaggugcuggaccugaagaacuacaucgacaagcagcuccugcccauccugaacaagcagagcugcuccaucagcaacaucgagacggucauggaguuccagcagaagaacaaccggcuccuggagaucacccgcgaguucuccgugaacgccggggugaccacccccgucagcacguacaugcugaccaacagcgagcuccugucccugaucaacgacaugcccaucaccaacgaccagaagaagcucaugagcaacaacgugcagaucgugcggcagcaguccuacagcaucaugugcaucaucaaggaggagguccuggcguacguggugcagcugccgcucuacggcgucaucgacacccccugcuggaagcugcacacgagcccccugugcaccaccaacaccaaggaggggagcaacaucugccucacgcgcaccgaccggggcugguacugcgacaacgccggguccgugagcuucuucccccaggccgagaccugcaaggugugcuccaaccgcgucuucugcgacaccaugaacagccugacgcugccguccgaggugaaccucugcaacaucgacaucuucaaccccaaguacgacugcaagaucaugaccagcaagaccgacgucuccagcuccgugaucaccagccugggcgccaucguguccugcuacggcaagacgaagugcaccgccagcaacaagaacaaggggaucaucaagaccuucuccaacggcugcgacuacgucagcaacaaggggguggacaccgugagcgucggcaacacgcuguacuacgugaacaagcaggagggcaagucccucuacgugaagggggagcccaucaucaacuucuacgacccccuggucuucccgagcgacgaguucgacgcguccaucagccaggugaacgagaagaucaaccagucccuggccuucauccggaaguccgacgagcuccugcacaacgugaacgucggcaaguccaccaccaacaucaugaucaccaccaucaucaucgugaucaucgugauccugcuccugcugaucgccgucggccucuuccuguacugcaaggcccgcugaggacuaguacuggcugcaucucccuuuccucuguccuccauccuucucccaggauggugaagggggaccugguacccagugauccccaccccaggauccuaaaucaugacuuaccugcuaauaaaaacucauuggaaaagugagaagaucuaaaaaaaaaaaaaaaaaaaaaaaaaaaaaaaaaaaaaaaaaaaaaaaaaaaaaaaaaaaaaaaaugcaucccccccccccccccccccccccccccccccaaaggcucuuuucagagccaccagaauu

SEQ ID NO: 18948 - RNA, 1914 nt, Artificial Sequence
  mRNA product Design e-6 comprising derived and/or modified sequence from HRSV(Memphis-37)__AIY60640.1__F-del_DSCav1_mut7 (opt2)
gggagagcggcucggccauuuugucccagucaguccggaggcugcggcugcagaaguaccgccugcggaguaacugcaaagaagcuuaccauggagcuccccauccucaagaccaacgccaucaccaccauccucgccgccgucacccucugcuucgccuccucccagaacaucaccgaggaguucuaccaguccaccugcuccgccgucuccaagggcuaccucuccgcccuccgcaccggcugguacaccuccgucaucaccaucgagcucuccaacaucaaggagaacaagugcaacggcaccgacgccaaggucaagcucaucaagcaggagcucgacaaguacaagaacgccgucaccgagcuccagaugcucaugugcuccacccccgccgccggcuccggcuccgccaucgccuccggcaucgccgucugcaagguccuccaccucgagggcgaggucaacaagaucaagaacgcccuccucuccaccaacaaggccgucgucucccucuccaacggcgucuccguccucaccuucaagguccucgaccucaagaacuacaucgacaagcagcuccuccccauccucaacaagcaguccugcuccaucuccaacaucgagaccgucauggaguuccagcagaagaacaaccgccuccucgagaucacccgcgaguucuccgucaacgccggcgucaccacccccgucuccaccuacaugcucaccaacuccgagcuccucucccucaucaacgacaugcccaucaccaacgaccagaagaagcucauguccaacaacguccagaucguccgccagcaguccuacuccaucaugugcaucaucaaggaggagguccucgccuacgucguccagcucccccucuacggcgucaucgacacccccugcuggaagcuccacaccuccccccucugcaccaccaacaccaaggagggcuccaacaucugccucacccgcaccgaccgcggcugguacugcgacaacgccggcuccgucuccuucuucccccaggccgagaccugcaaggucugcuccaaccgcgucuucugcgacaccaugaacucccucacccuccccuccgaggucaaccucugcaacaucgacaucuucaaccccaaguacgacugcaagaucaugaccuccaagaccgacgucuccuccuccgucaucaccucccucggcgccaucgucuccugcuacggcaagaccaagugcaccgccuccaacaagaacaagggcaucaucaagaccuucuccaacggcugcgacuacgucuccaacaagggcgucgacaccgucuccgucggcaacacccucuacuacgucaacaagcaggagggcaagucccucuacgucaagggcgagcccaucaucaacuucuacgacccccucgucuuccccuccgacgaguucgacgccuccaucucccaggucaacgagaagaucaaccagucccucgccuucauccgcaaguccgacgagcuccuccacaacgucaacgucggcaaguccaccaccaacaucaugaucaccaccaucaucaucgucaucaucgucauccuccuccuccucaucgccgucggccucuuccucuacugcaaggcccgcugaggacuaguacuggcugcaucucccuuuccucuguccuccauccuucucccaggauggugaagggggaccugguacccagugauccccaccccaggauccuaaaucaugacuuaccugcuaauaaaaacucauuggaaaagugagaagaucuaaaaaaaaaaaaaaaaaaaaaaaaaaaaaaaaaaaaaaaaaaaaaaaaaaaaaaaaaaaaaaaaugcaucccccccccccccccccccccccccccccccaaaggcucuuuucagagccaccagaauu

SEQ ID NO: 18949 - RNA, 1914 nt, Artificial Sequence
  mRNA product Design e-6 comprising derived and/or modified sequence from HRSV(Memphis-37)__AIY60640.1__F-del_DSCav1_mut7 (opt3)
gggagagcggcucggccauuuugucccagucaguccggaggcugcggcugcagaaguaccgccugcggaguaacugcaaagaagcuuaccauggagcugcccauccucaagaccaacgccauuacaacuauacuugcugcagugacgcugugcuucgccagcucccagaauaucaccgaagaguuuuaccaaucuacauguucagcggucaguaaaggcuauuugagcgcuuuaagaacugggugguacaccuccguuauuacaaucgaacugucuaacauuaaggagaauaaaugcaacggaaccgacgccaaggugaaacuaaucaagcaggaacucgauaaguauaaaaaugcaguaacugagcugcagaugcuuauguguucgaccccugccgcugguucaggcagcgcaauagccagugggaucgcugugugcaagguccugcacuuggagggagaagugaacaaaauuaagaaugcccuccuguccacaaacaaagcgguugugucucugagcaauggcgucuccgugcucacguucaagguauuagaccugaagaacuacaucgauaaacagcuuuugccaauucugaauaagcaaucauguaguaucagcaacauagagacuguuauggaauuucagcagaaaaauaacaggcuacucgagauuacccgggaguucucugugaaugccggugucacaacuccgguguccaccuauaugcugacaaacucagaacuucugagcuugaucaacgacaugcccauuaccaaugaucagaagaaacucaugaguaacaaugugcaaaucguccgccagcagucuuacuccaucaugugcauuauaaaggaggaaguucuggcauaugugguacaguuaccucuguacggggugaucgacacgccauguuggaaacuccauacuagcccccuuugcacaaccaacacuaaggagggaucgaauauuugucugacacgaaccgaucguggcugguacugcgacaacgcuggcucugucuccuuuuucccucaagccgaaacguguaaggugugcucaaauagaguguuuugcgauaccaugaacaguuugacacuaccaagcgagguuaaucuguguaacaucgacauauucaaucccaaauaugauugcaagauuaugacuuccaaaaccgacgucucuagcucagugaucacaagucucggggcaaucguauccuguuacggaaagacuaaaugcaccgcuagcaacaagaauaaggguauuaucaaaacauuuucuaacggcugugauuauguuucaaauaaggggguggacaccgucagugugggaaacacucuguacuaugucaacaaacaggagggcaagagccuuuacgugaaaggugaaccuauuauaaauuucuaugacccacugguuuuuccguccgaugaguucgacgccucuaucagccaggugaacgaaaagauuaaucaaucguuggcguuuaucaggaaguccgaugagcuccugcacaacguaaaugucgggaaaucaacgacaaacaucaugauuaccacuauaaucauugugaucauuguuaucuuacugcuacucauagccgugggacuguuccuuuacugcaaggcacggugaggacuaguacuggcugcaucucccuuuccucuguccuccauccuucucccaggauggugaagggggaccugguacccagugauccccaccccaggauccuaaaucaugacuuaccugcuaauaaaaacucauuggaaaagugagaagaucuaaaaaaaaaaaaaaaaaaaaaaaaaaaaaaaaaaaaaaaaaaaaaaaaaaaaaaaaaaaaaaaaugcaucccccccccccccccccccccccccccccccaaaggcucuuuucagagccaccagaauu

SEQ ID NO: 18950 - RNA, 1914 nt, Artificial Sequence
  mRNA product Design e-6 comprising derived and/or modified sequence from HRSV(Memphis-37)__AIY60640.1__F-del_DSCav1_mut7 (opt4)
gggagagcggcucggccauuuugucccagucaguccggaggcugcggcugcagaaguaccgccugcggaguaacugcaaagaagcuuaccauggagcugcccauccugaagaccaacgccaucaccaccauccuggccgccgugacccugugcuucgccagcagccagaacaucaccgaggaguucuaccagagcaccugcagcgccgugagcaagggcuaccugagcgcccugagaaccggcugguacaccagcgugaucaccaucgagcugagcaacaucaaggagaacaagugcaacggcaccgacgccaaggugaagcugaucaagcaggagcuggacaaguacaagaacgccgugaccgagcugcagaugcugaugugcagcacccccgccgccggcagcggcagcgccaucgccagcggcaucgccgugugcaaggugcugcaccuggagggcgaggugaacaagaucaagaacgcccugcugagcaccaacaaggccguggugagccugagcaacggcgugagcgugcugaccuucaaggugcuggaccugaagaacuacaucgacaagcagcugcugcccauccugaacaagcagagcugcagcaucagcaacaucgagaccgugauggaguuccagcagaagaacaacagacugcuggagaucaccagagaguucagcgugaacgccggcgugaccacccccgugagcaccuacaugcugaccaacagcgagcugcugagccugaucaacgacaugcccaucaccaacgaccagaagaagcugaugagcaacaacgugcagaucgugagacagcagagcuacagcaucaugugcaucaucaaggaggaggugcuggccuacguggugcagcugccccuguacggcgugaucgacacccccugcuggaagcugcacaccagcccccugugcaccaccaacaccaaggagggcagcaacaucugccugaccagaaccgacagaggcugguacugcgacaacgccggcagcgugagcuucuucccccaggccgagaccugcaaggugugcagcaacagaguguucugcgacaccaugaacagccugacccugcccagcgaggugaaccugugcaacaucgacaucuucaaccccaaguacgacugcaagaucaugaccagcaagaccgacgugagcagcagcgugaucaccagccugggcgccaucgugagcugcuacggcaagaccaagugcaccgccagcaacaagaacaagggcaucaucaagaccuucagcaacggcugcgacuacgugagcaacaagggcguggacaccgugagcgugggcaacacccuguacuacgugaacaagcaggagggcaagagccuguacgugaagggcgagcccaucaucaacuucuacgacccccugguguuccccagcgacgaguucgacgccagcaucagccaggugaacgagaagaucaaccagagccuggccuucaucagaaagagcgacgagcugcugcacaacgugaacgugggcaagagcaccaccaacaucaugaucaccaccaucaucaucgugaucaucgugauccugcugcugcugaucgccgugggccuguuccuguacugcaaggccagaugaggacuaguacuggcugcaucucccuuuccucuguccuccauccuucucccaggauggugaagggggaccugguacccagugauccccaccccaggauccuaaaucaugacuuaccugcuaauaaaaacucauuggaaaagugagaagaucuaaaaaaaaaaaaaaaaaaaaaaaaaaaaaaaaaaaaaaaaaaaaaaaaaaaaaaaaaaaaaaaaugcaucccccccccccccccccccccccccccccccaaaggcucuuuucagagccaccagaauu

SEQ ID NO: 18951 - RNA, 1914 nt, Artificial Sequence
  mRNA product Design e-6 comprising derived and/or modified sequence from HRSV(Memphis-37)__AIY60640.1__F-del_DSCav1_mut7 (opt5)
gggagagcggcucggccauuuugucccagucaguccggaggcugcggcugcagaaguaccgccugcggaguaacugcaaagaagcuuaccauggagcugcccauccucaagaccaacgccauuacaacgauccuggcugccgugacccuuugcuucgcgagcucccagaauauuacagaagaguuuuaccaaucuaccuguagcgcugucuccaaaggcuaucugucugcccucagaacagggugguacaccagcguuaucacaauugaacuguccaacaucaaggagaauaaaugcaacggaaccgacgccaaggugaaacuuaucaagcaggaacuggauaaguauaaaaaugcugugacggagcuccagaugcugauguguucuaccccugccgcuggcagcggguccgccauugcgagcggaaucgccgucugcaaggugcugcaccucgagggcgaaguuaacaaaauuaagaaugcucugcuuucuacaaacaaagccguggucucccugagcaauggggugucuguucucaccuucaaggugcuggaccuuaagaacuacaucgauaaacagcugcucccgauucugaauaagcaauccuguagcaucucuaacauugagacagucauggaauuucagcagaaaaauaaccggcugcucgagaucacccgcgaguucuccgugaaugcuggagugacgacacccgucagcaccuauaugcugacaaacuccgaacuucugucucucaucaacgacaugccuauuaccaaugaucagaagaaacugaugagcaacaauguucaaaucgugagacagcaguccuacagcauuaugugcaucauuaaggaggaagugcuugccuaugucgugcagcugccccucuacggcguuaucgacaccccuuguuggaaacugcauacaucuccccugugcacgaccaacacaaaggagggcuccaauaucugucucacccggacagaucgcgggugguacugcgacaacgcgggaagcgugagcuuuuucccucaagccgaaaccuguaaggucugcucuaauagaguguuuugcgauacgaugaacucccugacacuuccgucugagguuaaucuguguaacauugacaucuucaaucccaaauaugauugcaagauuaugaccagcaaaaccgacguguccagcucugucaucacaucccucggcgcuauugugagcuguuacgggaagaccaaaugcacagccucuaacaagaauaagggaaucaucaaaacguuuuccaacggcugugauuaugucagcaauaaggggguggacaccguuuccgugggaaacacacuguacuaugucaacaaacaggagggcaagucucuuuacgugaaaggcgaaccuauuaucaauuucuaugacccccugguuuuuccuagcgaugaguucgacgcuuccauuucucaggugaacgaaaagaucaaucaaagccucgccuuuauucggaaguccgaugagcugcugcacaacgucaauguggggaaaagcaccacaaacaucaugauuaccacgaucaucauugugaucauuguuauccuccugcuucugauugccgucggacucuuccuguacugcaaggcucgcugaggacuaguacuggcugcaucucccuuuccucuguccuccauccuucucccaggauggugaagggggaccugguacccagugauccccaccccaggauccuaaaucaugacuuaccugcuaauaaaaacucauuggaaaagugagaagaucuaaaaaaaaaaaaaaaaaaaaaaaaaaaaaaaaaaaaaaaaaaaaaaaaaaaaaaaaaaaaaaaaugcaucccccccccccccccccccccccccccccccaaaggcucuuuucagagccaccagaauu

SEQ ID NO: 18952 - RNA, 1914 nt, Artificial Sequence
  mRNA product Design e-6 comprising derived and/or modified sequence from HRSV(Memphis-37)__AIY60640.1__F-del_DSCav1_mut7 (opt6)
gggagagcggcucggccauuuugucccagucaguccggaggcugcggcugcagaaguaccgccugcggaguaacugcaaagaagcuuaccauggaacuaccaauacucaaaacaaacgccauaaccacaauacuagccgcaguaacacuuugcuuugccucaagucaaaacauaacagaagaauuuuaccaauccacaugcucagcuguauccaaaggauauuuauccgcacuaagaacaggaugguacacaucaguaaucacaauagaauuaucaaacauaaaagaaaacaaauguaauggcacagacgccaaaguaaaacuaauuaaacaagaacuagacaaauauaaaaaugcaguaaccgaacuccaaaugcucaugugcucuacaccagcugcaggaucaggaucagccauugcaagcgguauagcuguuugcaaaguauuacacuuagaaggagaaguaaauaaaauaaaaaacgcacuacuaucaacaaauaaagcaguaguaucccuaucaaacggaguaucaguacuuacauucaaaguauuagauuuaaaaaacuauauagacaaacaacuacuucccauauuaaacaaacaaucaugcucaauuuccaacauugaaacuguaauggaauuucaacaaaaaaacaacagacuacuugaaaucacacgagaauuuucaguaaacgcuggaguaacaacaccugucucuaccuacaugcucacaaauagcgaauuacuaucucuaaucaaugacaugccaauaacaaacgaucaaaaaaaacuaauguccaacaacguacaaauaguaagacaacaauccuauucaauaaugugcauaauaaaagaagaagucuuagcauacguuguacaacuaccauuauacggaguaauagauacaccaugcuggaaacuccacacaagcccccucugcacaacaaacaccaaagaagggucaaacauaugcuuaacaagaacagacagaggaugguacugugauaacgcaggaucugucucauucuuuccacaagcagaaacauguaaaguaugcuccaacagagucuuuugcgacaccaugaacucacuaaccuuacccucagaaguaaaccugugcaacaucgauaucuucaaccccaaauacgauugcaaaaucaugacaagcaaaacugauguauccagcucuguaauaacaucacuaggugcaauaguaucaugcuacggaaaaacaaaaugcacagcuucuaacaaaaauaaaggaauaauaaaaacauucuccaauggaugcgacuaugucucaaauaaaggaguagauacaguuucagucggcaacacacucuauuauguaaauaaacaagaaggaaaaucauuauacguaaaaggagaacccauaauaaacuucuacgacccccucguauucccaagcgacgaauuugacgccucaauaucacaaguaaacgaaaaaauaaaccaaucacucgcauucaucagaaaaucagaugaacuacuacacaauguaaacgucggaaaauccaccacaaauauaaugauaacuaccaucauaauaguaauaauagucaucuuacuacuauuaaucgcuguaggacuauuucucuacugcaaggccagauaaggacuaguacuggcugcaucucccuuuccucuguccuccauccuucucccaggauggugaagggggaccugguacccagugauccccaccccaggauccuaaaucaugacuuaccugcuaauaaaaacucauuggaaaagugagaagaucuaaaaaaaaaaaaaaaaaaaaaaaaaaaaaaaaaaaaaaaaaaaaaaaaaaaaaaaaaaaaaaaaugcaucccccccccccccccccccccccccccccccaaaggcucuuuucagagccaccagaauu

SEQ ID NO: 18953 - RNA, 1914 nt, Artificial Sequence
  mRNA product Design e-6 comprising derived and/or modified sequence from HRSV(Memphis-37)__AIY60640.1__F-del_DSCav1_mut7 (opt11)
gggagagcggcucggccauuuugucccagucaguccggaggcugcggcugcagaaguaccgccugcggaguaacugcaaagaagcuuaccauggaacucccaauccucaaaacaaaugccaucaccaccauccuagccgcugucacacuaugcuucgccuccucacaaaacaucaccgaagaguucuaucaauccacaugcuccgccgucagcaagggauaccucuccgcccuuagaaccggcugguacaccucagucaucacaauugaacugucaaacaucaaagaaaacaaaugcaacggcaccgacgcaaaaguaaagcucaucaaacaagaacuggacaaguacaagaacgccgucaccgaacuacagaugcuuaugugcucaaccccugccgccggcuccggaucugccauagcuucaggcaucgccguaugcaaaguccugcaccuagaaggggaagucaacaaaaucaaaaacgcccuccucuccaccaacaaggccguugucucccugucaaacggagucuccguccuaaccuucaaaguccucgaccucaaaaacuacauagacaaacaacuccuacccauccucaacaaacaaagcugcucaauauccaacaucgaaaccgucauggaguuccaacaaaagaacaaccgacuacucgaaauaacacgcgaguucucagucaacgccggcgucaccaccccagucuccacauacaugcucaccaacuccgaacuccuaucgcucaucaacgacaugcccaucaccaaugaccagaagaaacucauguccaacaacguacaaaucguccgccaacaguccuacucaaucaugugcaucaucaaagaagaaguccuugccuacgucguccagcuuccacucuacggagucaucgacacccccugcuggaaacuccacaccuccccacuaugcaccaccaacaccaaagaaggauccaacauaugccucacccguacugaccgcggcugguacugcgacaacgccggauccgucucauucuucccccaggccgaaaccugcaaagucugcuccaaccgcgucuucugcgacaccaugaacucgcucacccucccauccgaagucaaucuaugcaacaucgacauuuucaaccccaaauacgacugcaaaauuaugacaucaaaaaccgacgucucauccucagucaucacuucccucggcgcaaucguaagcugcuacgggaaaacaaagugcaccgcuuccaacaaaaacaaaggcaucaucaaaaccuucucuaacggcugcgacuacgucuccaacaaaggagucgacaccguauccgucggcaacacccucuacuacgucaacaaacaggaaggaaaaucgcucuacgucaaaggagaaccaaucaucaacuucuacgacccccuagucuucccauccgacgaguucgacgccagcaucucacaagucaaugaaaagaucaaccagucacucgcauucauccguaagucagacgaacuccuacacaacgucaacgucggcaagucaacaaccaacauaaugaucaccaccauaaucaucgucauaauaguaauccuccuucuccuaaucgcagucggccucuuccucuacugcaaagcacgcuaaggacuaguacuggcugcaucucccuuuccucuguccuccauccuucucccaggauggugaagggggaccugguacccagugauccccaccccaggauccuaaaucaugacuuaccugcuaauaaaaacucauuggaaaagugagaagaucuaaaaaaaaaaaaaaaaaaaaaaaaaaaaaaaaaaaaaaaaaaaaaaaaaaaaaaaaaaaaaaaaugcaucccccccccccccccccccccccccccccccaaaggcucuuuucagagccaccagaauu

SEQ ID NO: 18954 - RNA, 2130 nt, Artificial Sequence
  mRNA product Design f-1 comprising derived and/or modified sequence from HRSV(Memphis-37)__AIY60640.1__F-del_DSCav1_mut7 (opt1)
gggagagcggcucggccauuuugucccagucaguccggaggcugcggcugcagaaguaccgccugcggaguaacugcaaagaagcuuaccauggagcugcccauccucaagaccaacgccaucaccacgauccuggccgcggugacccugugcuucgccagcucccagaacaucaccgaggaguucuaccagagcacgugcuccgccgucagcaagggcuaccucuccgcccugcgcaccgggugguacaccagcgugaucaccaucgagcuguccaacaucaaggagaacaagugcaacggcaccgacgccaaggugaagcucaucaagcaggagcuggacaaguacaagaacgcggucacggagcugcagaugcugaugugcagcaccccggccgccggcuccgggagcgcgaucgccuccggcaucgccgucugcaaggugcugcaccucgagggcgaggugaacaagaucaagaacgcccugcuguccaccaacaaggccgucgugagccucuccaacggggugagcguccugaccuucaaggugcuggaccucaagaacuacaucgacaagcagcugcugcccauccugaacaagcagagcugcuccaucagcaacaucgagaccgucauggaguuccagcagaagaacaaccgccuccuggagaucacgcgggaguucagcgugaacgcgggcgugaccacccccgucuccaccuacaugcugacgaacagcgagcuccugucccugaucaacgacaugccgaucaccaacgaccagaagaagcucaugagcaacaacgugcagaucgugcgccagcaguccuacagcaucaugugcaucaucaaggaggagguccuggccuacguggugcagcugccccucuacggggucaucgacacccccugcuggaagcugcacaccagcccccugugcacgaccaacaccaaggagggcuccaacaucugccucacccggacggaccgcgggugguacugcgacaacgccggcagcguguccuucuucccgcaggccgagaccugcaaggucugcagcaaccggguguucugcgacaccaugaacucccugacccugcccagcgaggugaaccucugcaacaucgacaucuucaaccccaaguacgacugcaagaucaugacguccaagaccgacgucagcuccagcgugaucaccucccugggcgccaucgugagcugcuacgggaagaccaagugcacggcgagcaacaagaacaagggcaucaucaagaccuucuccaacgggugcgacuacgucagcaacaagggcguggacaccguguccgucggcaacacccuguacuacgugaacaagcaggagggcaagagccucuacgugaagggggagcccaucaucaacuucuacgacccgcuggucuuccccuccgacgaguucgacgccagcaucucccaggugaacgagaagaucaaccagagccuggccuucauccggaaguccgacgagcuccugcacaacgugaacgucggcaagagcaccacgaacaucaugaucaccaccaucaucaucgugaucaucgugauccugcugcuccugaucgccgucgggcuguuccucuacugcaaggcccgcugaggacuagugaagggaacacccaaauuuaauucagccuuaagcacaauuaauuaagagugaaacguaauuguacaagcaguuggucacccaccauagggcaugaucaacaccgcaaccuuuccuuuuucccccagugauucugaaaaaccccucuucccuucagcuugcuuagauguuccaaauuuaguaagcuuaaggcggccuacagaagaaaaagaaaaaaaaggccacaaaaguucccucucacuuucaguaaauaaaauaaaagcagcaacagaaauaaagaaauaaaugaaauucaaaaugaaauaaauauuguguugugcagcauuaaaaaaucaauaaaaauuaaaaaugagcaagaucuaaaaaaaaaaaaaaaaaaaaaaaaaaaaaaaaaaaaaaaaaaaaaaaaaaaaaaaaaaaaaaaaugcaucccccccccccccccccccccccccccccccaaaggcucuuuucagagccaccagaauu

SEQ ID NO: 18955 - RNA, 2130 nt, Artificial Sequence
  mRNA product Design f-1 comprising derived and/or modified sequence from HRSV(Memphis-37)__AIY60640.1__F-del_DSCav1_mut7 (opt1)
gggagagcggcucggccauuuugucccagucaguccggaggcugcggcugcagaaguaccgccugcggaguaacugcaaagaagcuuaccauggagcugcccauccucaagaccaacgccaucaccacgauccuggccgcggugacccugugcuucgccagcucccagaacaucaccgaggaguucuaccagagcacgugcuccgccgucagcaagggguaccucuccgcccugcgcaccgggugguacaccagcgugaucaccaucgagcuguccaacaucaaggagaacaagugcaacggcaccgacgccaaggugaagcucaucaagcaggagcuggacaaguacaagaacgcggucacggagcugcagaugcucaugugcagcaccccggccgccggguccggcagcgccaucgcguccgggaucgccgugugcaaggugcugcaccuggagggcgaggucaacaagaucaagaacgcccuccugagcaccaacaaggccguggugucccugagcaacggcgucuccgugcucaccuucaaggugcuggaccugaagaacuacaucgacaagcagcuccugcccauccugaacaagcagagcugcuccaucagcaacaucgagacggucauggaguuccagcagaagaacaaccggcuccuggagaucacccgcgaguucuccgugaacgccggggugaccacccccgucagcacguacaugcugaccaacagcgagcuccugucccugaucaacgacaugcccaucaccaacgaccagaagaagcucaugagcaacaacgugcagaucgugcggcagcaguccuacagcaucaugugcaucaucaaggaggagguccuggcguacguggugcagcugccgcucuacggcgucaucgacacccccugcuggaagcugcacacgagcccccugugcaccaccaacaccaaggaggggagcaacaucugccucacgcgcaccgaccggggcugguacugcgacaacgccggguccgugagcuucuucccccaggccgagaccugcaaggugugcuccaaccgcgucuucugcgacaccaugaacagccugacgcugccguccgaggugaaccucugcaacaucgacaucuucaaccccaaguacgacugcaagaucaugaccagcaagaccgacgucuccagcuccgugaucaccagccugggcgccaucguguccugcuacggcaagacgaagugcaccgccagcaacaagaacaaggggaucaucaagaccuucuccaacggcugcgacuacgucagcaacaaggggguggacaccgugagcgucggcaacacgcuguacuacgugaacaagcaggagggcaagucccucuacgugaagggggagcccaucaucaacuucuacgacccccuggucuucccgagcgacgaguucgacgcguccaucagccaggugaacgagaagaucaaccagucccuggccuucauccggaaguccgacgagcuccugcacaacgugaacgucggcaaguccaccaccaacaucaugaucaccaccaucaucaucgugaucaucgugauccugcuccugcugaucgccgucggccucuuccuguacugcaaggcccgcugaggacuagugaagggaacacccaaauuuaauucagccuuaagcacaauuaauuaagagugaaacguaauuguacaagcaguuggucacccaccauagggcaugaucaacaccgcaaccuuuccuuuuucccccagugauucugaaaaaccccucuucccuucagcuugcuuagauguuccaaauuuaguaagcuuaaggcggccuacagaagaaaaagaaaaaaaaggccacaaaaguucccucucacuuucaguaaauaaaauaaaagcagcaacagaaauaaagaaauaaaugaaauucaaaaugaaauaaauauuguguugugcagcauuaaaaaaucaauaaaaauuaaaaaugagcaagaucuaaaaaaaaaaaaaaaaaaaaaaaaaaaaaaaaaaaaaaaaaaaaaaaaaaaaaaaaaaaaaaaaugcaucccccccccccccccccccccccccccccccaaaggcucuuuucagagccaccagaauu

SEQ ID NO: 18956 - RNA, 2130 nt, Artificial Sequence
  mRNA product Design f-1 comprising derived and/or modified sequence from HRSV(Memphis-37)__AIY60640.1__F-del_DSCav1_mut7 (opt2)
gggagagcggcucggccauuuugucccagucaguccggaggcugcggcugcagaaguaccgccugcggaguaacugcaaagaagcuuaccauggagcuccccauccucaagaccaacgccaucaccaccauccucgccgccgucacccucugcuucgccuccucccagaacaucaccgaggaguucuaccaguccaccugcuccgccgucuccaagggcuaccucuccgcccuccgcaccggcugguacaccuccgucaucaccaucgagcucuccaacaucaaggagaacaagugcaacggcaccgacgccaaggucaagcucaucaagcaggagcucgacaaguacaagaacgccgucaccgagcuccagaugcucaugugcuccacccccgccgccggcuccggcuccgccaucgccuccggcaucgccgucugcaagguccuccaccucgagggcgaggucaacaagaucaagaacgcccuccucuccaccaacaaggccgucgucucccucuccaacggcgucuccguccucaccuucaagguccucgaccucaagaacuacaucgacaagcagcuccuccccauccucaacaagcaguccugcuccaucuccaacaucgagaccgucauggaguuccagcagaagaacaaccgccuccucgagaucacccgcgaguucuccgucaacgccggcgucaccacccccgucuccaccuacaugcucaccaacuccgagcuccucucccucaucaacgacaugcccaucaccaacgaccagaagaagcucauguccaacaacguccagaucguccgccagcaguccuacuccaucaugugcaucaucaaggaggagguccucgccuacgucguccagcucccccucuacggcgucaucgacacccccugcuggaagcuccacaccuccccccucugcaccaccaacaccaaggagggcuccaacaucugccucacccgcaccgaccgcggcugguacugcgacaacgccggcuccgucuccuucuucccccaggccgagaccugcaaggucugcuccaaccgcgucuucugcgacaccaugaacucccucacccuccccuccgaggucaaccucugcaacaucgacaucuucaaccccaaguacgacugcaagaucaugaccuccaagaccgacgucuccuccuccgucaucaccucccucggcgccaucgucuccugcuacggcaagaccaagugcaccgccuccaacaagaacaagggcaucaucaagaccuucuccaacggcugcgacuacgucuccaacaagggcgucgacaccgucuccgucggcaacacccucuacuacgucaacaagcaggagggcaagucccucuacgucaagggcgagcccaucaucaacuucuacgacccccucgucuuccccuccgacgaguucgacgccuccaucucccaggucaacgagaagaucaaccagucccucgccuucauccgcaaguccgacgagcuccuccacaacgucaacgucggcaaguccaccaccaacaucaugaucaccaccaucaucaucgucaucaucgucauccuccuccuccucaucgccgucggccucuuccucuacugcaaggcccgcugaggacuagugaagggaacacccaaauuuaauucagccuuaagcacaauuaauuaagagugaaacguaauuguacaagcaguuggucacccaccauagggcaugaucaacaccgcaaccuuuccuuuuucccccagugauucugaaaaaccccucuucccuucagcuugcuuagauguuccaaauuuaguaagcuuaaggcggccuacagaagaaaaagaaaaaaaaggccacaaaaguucccucucacuuucaguaaauaaaauaaaagcagcaacagaaauaaagaaauaaaugaaauucaaaaugaaauaaauauuguguugugcagcauuaaaaaaucaauaaaaauuaaaaaugagcaagaucuaaaaaaaaaaaaaaaaaaaaaaaaaaaaaaaaaaaaaaaaaaaaaaaaaaaaaaaaaaaaaaaaugcaucccccccccccccccccccccccccccccccaaaggcucuuuucagagccaccagaauu

SEQ ID NO: 18957 - RNA, 2130 nt, Artificial Sequence
  mRNA product Design f-1 comprising derived and/or modified sequence from HRSV(Memphis-37)__AIY60640.1__F-del_DSCav1_mut7 (opt3)
gggagagcggcucggccauuuugucccagucaguccggaggcugcggcugcagaaguaccgccugcggaguaacugcaaagaagcuuaccauggagcugcccauccucaagaccaacgccauuacaacuauacuugcugcagugacgcugugcuucgccagcucccagaauaucaccgaagaguuuuaccaaucuacauguucagcggucaguaaaggcuauuugagcgcuuuaagaacugggugguacaccuccguuauuacaaucgaacugucuaacauuaaggagaauaaaugcaacggaaccgacgccaaggugaaacuaaucaagcaggaacucgauaaguauaaaaaugcaguaacugagcugcagaugcuuauguguucgaccccugccgcugguucaggcagcgcaauagccagugggaucgcugugugcaagguccugcacuuggagggagaagugaacaaaauuaagaaugcccuccuguccacaaacaaagcgguugugucucugagcaauggcgucuccgugcucacguucaagguauuagaccugaagaacuacaucgauaaacagcuuuugccaauucugaauaagcaaucauguaguaucagcaacauagagacuguuauggaauuucagcagaaaaauaacaggcuacucgagauuacccgggaguucucugugaaugccggugucacaacuccgguguccaccuauaugcugacaaacucagaacuucugagcuugaucaacgacaugcccauuaccaaugaucagaagaaacucaugaguaacaaugugcaaaucguccgccagcagucuuacuccaucaugugcauuauaaaggaggaaguucuggcauaugugguacaguuaccucuguacggggugaucgacacgccauguuggaaacuccauacuagcccccuuugcacaaccaacacuaaggagggaucgaauauuugucugacacgaaccgaucguggcugguacugcgacaacgcuggcucugucuccuuuuucccucaagccgaaacguguaaggugugcucaaauagaguguuuugcgauaccaugaacaguuugacacuaccaagcgagguuaaucuguguaacaucgacauauucaaucccaaauaugauugcaagauuaugacuuccaaaaccgacgucucuagcucagugaucacaagucucggggcaaucguauccuguuacggaaagacuaaaugcaccgcuagcaacaagaauaaggguauuaucaaaacauuuucuaacggcugugauuauguuucaaauaaggggguggacaccgucagugugggaaacacucuguacuaugucaacaaacaggagggcaagagccuuuacgugaaaggugaaccuauuauaaauuucuaugacccacugguuuuuccguccgaugaguucgacgccucuaucagccaggugaacgaaaagauuaaucaaucguuggcguuuaucaggaaguccgaugagcuccugcacaacguaaaugucgggaaaucaacgacaaacaucaugauuaccacuauaaucauugugaucauuguuaucuuacugcuacucauagccgugggacuguuccuuuacugcaaggcacggugaggacuagugaagggaacacccaaauuuaauucagccuuaagcacaauuaauuaagagugaaacguaauuguacaagcaguuggucacccaccauagggcaugaucaacaccgcaaccuuuccuuuuucccccagugauucugaaaaaccccucuucccuucagcuugcuuagauguuccaaauuuaguaagcuuaaggcggccuacagaagaaaaagaaaaaaaaggccacaaaaguucccucucacuuucaguaaauaaaauaaaagcagcaacagaaauaaagaaauaaaugaaauucaaaaugaaauaaauauuguguugugcagcauuaaaaaaucaauaaaaauuaaaaaugagcaagaucuaaaaaaaaaaaaaaaaaaaaaaaaaaaaaaaaaaaaaaaaaaaaaaaaaaaaaaaaaaaaaaaaugcaucccccccccccccccccccccccccccccccaaaggcucuuuucagagccaccagaauu

SEQ ID NO: 18958 - RNA, 2130 nt, Artificial Sequence
  mRNA product Design f-1 comprising derived and/or modified sequence from HRSV(Memphis-37)__AIY60640.1__F-del_DSCav1_mut7 (opt4)
gggagagcggcucggccauuuugucccagucaguccggaggcugcggcugcagaaguaccgccugcggaguaacugcaaagaagcuuaccauggagcugcccauccugaagaccaacgccaucaccaccauccuggccgccgugacccugugcuucgccagcagccagaacaucaccgaggaguucuaccagagcaccugcagcgccgugagcaagggcuaccugagcgcccugagaaccggcugguacaccagcgugaucaccaucgagcugagcaacaucaaggagaacaagugcaacggcaccgacgccaaggugaagcugaucaagcaggagcuggacaaguacaagaacgccgugaccgagcugcagaugcugaugugcagcacccccgccgccggcagcggcagcgccaucgccagcggcaucgccgugugcaaggugcugcaccuggagggcgaggugaacaagaucaagaacgcccugcugagcaccaacaaggccguggugagccugagcaacggcgugagcgugcugaccuucaaggugcuggaccugaagaacuacaucgacaagcagcugcugcccauccugaacaagcagagcugcagcaucagcaacaucgagaccgugauggaguuccagcagaagaacaacagacugcuggagaucaccagagaguucagcgugaacgccggcgugaccacccccgugagcaccuacaugcugaccaacagcgagcugcugagccugaucaacgacaugcccaucaccaacgaccagaagaagcugaugagcaacaacgugcagaucgugagacagcagagcuacagcaucaugugcaucaucaaggaggaggugcuggccuacguggugcagcugccccuguacggcgugaucgacacccccugcuggaagcugcacaccagcccccugugcaccaccaacaccaaggagggcagcaacaucugccugaccagaaccgacagaggcugguacugcgacaacgccggcagcgugagcuucuucccccaggccgagaccugcaaggugugcagcaacagaguguucugcgacaccaugaacagccugacccugcccagcgaggugaaccugugcaacaucgacaucuucaaccccaaguacgacugcaagaucaugaccagcaagaccgacgugagcagcagcgugaucaccagccugggcgccaucgugagcugcuacggcaagaccaagugcaccgccagcaacaagaacaagggcaucaucaagaccuucagcaacggcugcgacuacgugagcaacaagggcguggacaccgugagcgugggcaacacccuguacuacgugaacaagcaggagggcaagagccuguacgugaagggcgagcccaucaucaacuucuacgacccccugguguuccccagcgacgaguucgacgccagcaucagccaggugaacgagaagaucaaccagagccuggccuucaucagaaagagcgacgagcugcugcacaacgugaacgugggcaagagcaccaccaacaucaugaucaccaccaucaucaucgugaucaucgugauccugcugcugcugaucgccgugggccuguuccuguacugcaaggccagaugaggacuagugaagggaacacccaaauuuaauucagccuuaagcacaauuaauuaagagugaaacguaauuguacaagcaguuggucacccaccauagggcaugaucaacaccgcaaccuuuccuuuuucccccagugauucugaaaaaccccucuucccuucagcuugcuuagauguuccaaauuuaguaagcuuaaggcggccuacagaagaaaaagaaaaaaaaggccacaaaaguucccucucacuuucaguaaauaaaauaaaagcagcaacagaaauaaagaaauaaaugaaauucaaaaugaaauaaauauuguguugugcagcauuaaaaaaucaauaaaaauuaaaaaugagcaagaucuaaaaaaaaaaaaaaaaaaaaaaaaaaaaaaaaaaaaaaaaaaaaaaaaaaaaaaaaaaaaaaaaugcaucccccccccccccccccccccccccccccccaaaggcucuuuucagagccaccagaauu

SEQ ID NO: 18959 - RNA, 2130 nt, Artificial Sequence
  mRNA product Design f-1 comprising derived and/or modified sequence from HRSV(Memphis-37)__AIY60640.1__F-del_DSCav1_mut7 (opt5)
gggagagcggcucggccauuuugucccagucaguccggaggcugcggcugcagaaguaccgccugcggaguaacugcaaagaagcuuaccauggagcugcccauccucaagaccaacgccauuacaacgauccuggcugccgugacccuuugcuucgcgagcucccagaauauuacagaagaguuuuaccaaucuaccuguagcgcugucuccaaaggcuaucugucugcccucagaacagggugguacaccagcguuaucacaauugaacuguccaacaucaaggagaauaaaugcaacggaaccgacgccaaggugaaacuuaucaagcaggaacuggauaaguauaaaaaugcugugacggagcuccagaugcugauguguucuaccccugccgcuggcagcggguccgccauugcgagcggaaucgccgucugcaaggugcugcaccucgagggcgaaguuaacaaaauuaagaaugcucugcuuucuacaaacaaagccguggucucccugagcaauggggugucuguucucaccuucaaggugcuggaccuuaagaacuacaucgauaaacagcugcucccgauucugaauaagcaauccuguagcaucucuaacauugagacagucauggaauuucagcagaaaaauaaccggcugcucgagaucacccgcgaguucuccgugaaugcuggagugacgacacccgucagcaccuauaugcugacaaacuccgaacuucugucucucaucaacgacaugccuauuaccaaugaucagaagaaacugaugagcaacaauguucaaaucgugagacagcaguccuacagcauuaugugcaucauuaaggaggaagugcuugccuaugucgugcagcugccccucuacggcguuaucgacaccccuuguuggaaacugcauacaucuccccugugcacgaccaacacaaaggagggcuccaauaucugucucacccggacagaucgcgggugguacugcgacaacgcgggaagcgugagcuuuuucccucaagccgaaaccuguaaggucugcucuaauagaguguuuugcgauacgaugaacucccugacacuuccgucugagguuaaucuguguaacauugacaucuucaaucccaaauaugauugcaagauuaugaccagcaaaaccgacguguccagcucugucaucacaucccucggcgcuauugugagcuguuacgggaagaccaaaugcacagccucuaacaagaauaagggaaucaucaaaacguuuuccaacggcugugauuaugucagcaauaaggggguggacaccguuuccgugggaaacacacuguacuaugucaacaaacaggagggcaagucucuuuacgugaaaggcgaaccuauuaucaauuucuaugacccccugguuuuuccuagcgaugaguucgacgcuuccauuucucaggugaacgaaaagaucaaucaaagccucgccuuuauucggaaguccgaugagcugcugcacaacgucaauguggggaaaagcaccacaaacaucaugauuaccacgaucaucauugugaucauuguuauccuccugcuucugauugccgucggacucuuccuguacugcaaggcucgcugaggacuagugaagggaacacccaaauuuaauucagccuuaagcacaauuaauuaagagugaaacguaauuguacaagcaguuggucacccaccauagggcaugaucaacaccgcaaccuuuccuuuuucccccagugauucugaaaaaccccucuucccuucagcuugcuuagauguuccaaauuuaguaagcuuaaggcggccuacagaagaaaaagaaaaaaaaggccacaaaaguucccucucacuuucaguaaauaaaauaaaagcagcaacagaaauaaagaaauaaaugaaauucaaaaugaaauaaauauuguguugugcagcauuaaaaaaucaauaaaaauuaaaaaugagcaagaucuaaaaaaaaaaaaaaaaaaaaaaaaaaaaaaaaaaaaaaaaaaaaaaaaaaaaaaaaaaaaaaaaugcaucccccccccccccccccccccccccccccccaaaggcucuuuucagagccaccagaauu

SEQ ID NO: 18960 - RNA, 2130 nt, Artificial Sequence
  mRNA product Design f-1 comprising derived and/or modified sequence from HRSV(Memphis-37)__AIY60640.1__F-del_DSCav1_mut7 (opt6)
gggagagcggcucggccauuuugucccagucaguccggaggcugcggcugcagaaguaccgccugcggaguaacugcaaagaagcuuaccauggaacuaccaauacucaaaacaaacgccauaaccacaauacuagccgcaguaacacuuugcuuugccucaagucaaaacauaacagaagaauuuuaccaauccacaugcucagcuguauccaaaggauauuuauccgcacuaagaacaggaugguacacaucaguaaucacaauagaauuaucaaacauaaaagaaaacaaauguaauggcacagacgccaaaguaaaacuaauuaaacaagaacuagacaaauauaaaaaugcaguaaccgaacuccaaaugcucaugugcucuacaccagcugcaggaucaggaucagccauugcaagcgguauagcuguuugcaaaguauuacacuuagaaggagaaguaaauaaaauaaaaaacgcacuacuaucaacaaauaaagcaguaguaucccuaucaaacggaguaucaguacuuacauucaaaguauuagauuuaaaaaacuauauagacaaacaacuacuucccauauuaaacaaacaaucaugcucaauuuccaacauugaaacuguaauggaauuucaacaaaaaaacaacagacuacuugaaaucacacgagaauuuucaguaaacgcuggaguaacaacaccugucucuaccuacaugcucacaaauagcgaauuacuaucucuaaucaaugacaugccaauaacaaacgaucaaaaaaaacuaauguccaacaacguacaaauaguaagacaacaauccuauucaauaaugugcauaauaaaagaagaagucuuagcauacguuguacaacuaccauuauacggaguaauagauacaccaugcuggaaacuccacacaagcccccucugcacaacaaacaccaaagaagggucaaacauaugcuuaacaagaacagacagaggaugguacugugauaacgcaggaucugucucauucuuuccacaagcagaaacauguaaaguaugcuccaacagagucuuuugcgacaccaugaacucacuaaccuuacccucagaaguaaaccugugcaacaucgauaucuucaaccccaaauacgauugcaaaaucaugacaagcaaaacugauguauccagcucuguaauaacaucacuaggugcaauaguaucaugcuacggaaaaacaaaaugcacagcuucuaacaaaaauaaaggaauaauaaaaacauucuccaauggaugcgacuaugucucaaauaaaggaguagauacaguuucagucggcaacacacucuauuauguaaauaaacaagaaggaaaaucauuauacguaaaaggagaacccauaauaaacuucuacgacccccucguauucccaagcgacgaauuugacgccucaauaucacaaguaaacgaaaaaauaaaccaaucacucgcauucaucagaaaaucagaugaacuacuacacaauguaaacgucggaaaauccaccacaaauauaaugauaacuaccaucauaauaguaauaauagucaucuuacuacuauuaaucgcuguaggacuauuucucuacugcaaggccagauaaggacuagugaagggaacacccaaauuuaauucagccuuaagcacaauuaauuaagagugaaacguaauuguacaagcaguuggucacccaccauagggcaugaucaacaccgcaaccuuuccuuuuucccccagugauucugaaaaaccccucuucccuucagcuugcuuagauguuccaaauuuaguaagcuuaaggcggccuacagaagaaaaagaaaaaaaaggccacaaaaguucccucucacuuucaguaaauaaaauaaaagcagcaacagaaauaaagaaauaaaugaaauucaaaaugaaauaaauauuguguugugcagcauuaaaaaaucaauaaaaauuaaaaaugagcaagaucuaaaaaaaaaaaaaaaaaaaaaaaaaaaaaaaaaaaaaaaaaaaaaaaaaaaaaaaaaaaaaaaaugcaucccccccccccccccccccccccccccccccaaaggcucuuuucagagccaccagaauu

SEQ ID NO: 18961 - RNA, 2130 nt, Artificial Sequence
  mRNA product Design f-1 comprising derived and/or modified sequence from HRSV(Memphis-37)__AIY60640.1__F-del_DSCav1_mut7 (opt11)
gggagagcggcucggccauuuugucccagucaguccggaggcugcggcugcagaaguaccgccugcggaguaacugcaaagaagcuuaccauggaacucccaauccucaaaacaaaugccaucaccaccauccuagccgcugucacacuaugcuucgccuccucacaaaacaucaccgaagaguucuaucaauccacaugcuccgccgucagcaagggauaccucuccgcccuuagaaccggcugguacaccucagucaucacaauugaacugucaaacaucaaagaaaacaaaugcaacggcaccgacgcaaaaguaaagcucaucaaacaagaacuggacaaguacaagaacgccgucaccgaacuacagaugcuuaugugcucaaccccugccgccggcuccggaucugccauagcuucaggcaucgccguaugcaaaguccugcaccuagaaggggaagucaacaaaaucaaaaacgcccuccucuccaccaacaaggccguugucucccugucaaacggagucuccguccuaaccuucaaaguccucgaccucaaaaacuacauagacaaacaacuccuacccauccucaacaaacaaagcugcucaauauccaacaucgaaaccgucauggaguuccaacaaaagaacaaccgacuacucgaaauaacacgcgaguucucagucaacgccggcgucaccaccccagucuccacauacaugcucaccaacuccgaacuccuaucgcucaucaacgacaugcccaucaccaaugaccagaagaaacucauguccaacaacguacaaaucguccgccaacaguccuacucaaucaugugcaucaucaaagaagaaguccuugccuacgucguccagcuuccacucuacggagucaucgacacccccugcuggaaacuccacaccuccccacuaugcaccaccaacaccaaagaaggauccaacauaugccucacccguacugaccgcggcugguacugcgacaacgccggauccgucucauucuucccccaggccgaaaccugcaaagucugcuccaaccgcgucuucugcgacaccaugaacucgcucacccucccauccgaagucaaucuaugcaacaucgacauuuucaaccccaaauacgacugcaaaauuaugacaucaaaaaccgacgucucauccucagucaucacuucccucggcgcaaucguaagcugcuacgggaaaacaaagugcaccgcuuccaacaaaaacaaaggcaucaucaaaaccuucucuaacggcugcgacuacgucuccaacaaaggagucgacaccguauccgucggcaacacccucuacuacgucaacaaacaggaaggaaaaucgcucuacgucaaaggagaaccaaucaucaacuucuacgacccccuagucuucccauccgacgaguucgacgccagcaucucacaagucaaugaaaagaucaaccagucacucgcauucauccguaagucagacgaacuccuacacaacgucaacgucggcaagucaacaaccaacauaaugaucaccaccauaaucaucgucauaauaguaauccuccuucuccuaaucgcagucggccucuuccucuacugcaaagcacgcuaaggacuagugaagggaacacccaaauuuaauucagccuuaagcacaauuaauuaagagugaaacguaauuguacaagcaguuggucacccaccauagggcaugaucaacaccgcaaccuuuccuuuuucccccagugauucugaaaaaccccucuucccuucagcuugcuuagauguuccaaauuuaguaagcuuaaggcggccuacagaagaaaaagaaaaaaaaggccacaaaaguucccucucacuuucaguaaauaaaauaaaagcagcaacagaaauaaagaaauaaaugaaauucaaaaugaaauaaauauuguguugugcagcauuaaaaaaucaauaaaaauuaaaaaugagcaagaucuaaaaaaaaaaaaaaaaaaaaaaaaaaaaaaaaaaaaaaaaaaaaaaaaaaaaaaaaaaaaaaaaugcaucccccccccccccccccccccccccccccccaaaggcucuuuucagagccaccagaauu

SEQ ID NO: 18962 - RNA, 1910 nt, Artificial Sequence
  mRNA product Design f-2 comprising derived and/or modified sequence from HRSV(Memphis-37)__AIY60640.1__F-del_DSCav1_mut7 (opt1)
gggagagcggcucggccauuuugucccagucaguccggaggcugcggcugcagaaguaccgccugcggaguaacugcaaagaagcuuaccauggagcugcccauccucaagaccaacgccaucaccacgauccuggccgcggugacccugugcuucgccagcucccagaacaucaccgaggaguucuaccagagcacgugcuccgccgucagcaagggcuaccucuccgcccugcgcaccgggugguacaccagcgugaucaccaucgagcuguccaacaucaaggagaacaagugcaacggcaccgacgccaaggugaagcucaucaagcaggagcuggacaaguacaagaacgcggucacggagcugcagaugcugaugugcagcaccccggccgccggcuccgggagcgcgaucgccuccggcaucgccgucugcaaggugcugcaccucgagggcgaggugaacaagaucaagaacgcccugcuguccaccaacaaggccgucgugagccucuccaacggggugagcguccugaccuucaaggugcuggaccucaagaacuacaucgacaagcagcugcugcccauccugaacaagcagagcugcuccaucagcaacaucgagaccgucauggaguuccagcagaagaacaaccgccuccuggagaucacgcgggaguucagcgugaacgcgggcgugaccacccccgucuccaccuacaugcugacgaacagcgagcuccugucccugaucaacgacaugccgaucaccaacgaccagaagaagcucaugagcaacaacgugcagaucgugcgccagcaguccuacagcaucaugugcaucaucaaggaggagguccuggccuacguggugcagcugccccucuacggggucaucgacacccccugcuggaagcugcacaccagcccccugugcacgaccaacaccaaggagggcuccaacaucugccucacccggacggaccgcgggugguacugcgacaacgccggcagcguguccuucuucccgcaggccgagaccugcaaggucugcagcaaccggguguucugcgacaccaugaacucccugacccugcccagcgaggugaaccucugcaacaucgacaucuucaaccccaaguacgacugcaagaucaugacguccaagaccgacgucagcuccagcgugaucaccucccugggcgccaucgugagcugcuacgggaagaccaagugcacggcgagcaacaagaacaagggcaucaucaagaccuucuccaacgggugcgacuacgucagcaacaagggcguggacaccguguccgucggcaacacccuguacuacgugaacaagcaggagggcaagagccucuacgugaagggggagcccaucaucaacuucuacgacccgcuggucuuccccuccgacgaguucgacgccagcaucucccaggugaacgagaagaucaaccagagccuggccuucauccggaaguccgacgagcuccugcacaacgugaacgucggcaagagcaccacgaacaucaugaucaccaccaucaucaucgugaucaucgugauccugcugcuccugaucgccgucgggcuguuccucuacugcaaggcccgcugaggacuaguggaagcauuuuccuggcugauuaaaagaaauuacucagcuauggucaucuguuccuguuagaaggcuaugcagcauauuauauacuaugcgcauguuaugaaaugcauaauaaaaaauuuuaaaaaaucuaaaagaucuaaaaaaaaaaaaaaaaaaaaaaaaaaaaaaaaaaaaaaaaaaaaaaaaaaaaaaaaaaaaaaaaugcaucccccccccccccccccccccccccccccccaaaggcucuuuucagagccaccagaauu

SEQ ID NO: 18963 - RNA, 1910 nt, Artificial Sequence
  mRNA product Design f-2 comprising derived and/or modified sequence from HRSV(Memphis-37)__AIY60640.1__F-del_DSCav1_mut7 (opt1)
gggagagcggcucggccauuuugucccagucaguccggaggcugcggcugcagaaguaccgccugcggaguaacugcaaagaagcuuaccauggagcugcccauccucaagaccaacgccaucaccacgauccuggccgcggugacccugugcuucgccagcucccagaacaucaccgaggaguucuaccagagcacgugcuccgccgucagcaagggguaccucuccgcccugcgcaccgggugguacaccagcgugaucaccaucgagcuguccaacaucaaggagaacaagugcaacggcaccgacgccaaggugaagcucaucaagcaggagcuggacaaguacaagaacgcggucacggagcugcagaugcucaugugcagcaccccggccgccggguccggcagcgccaucgcguccgggaucgccgugugcaaggugcugcaccuggagggcgaggucaacaagaucaagaacgcccuccugagcaccaacaaggccguggugucccugagcaacggcgucuccgugcucaccuucaaggugcuggaccugaagaacuacaucgacaagcagcuccugcccauccugaacaagcagagcugcuccaucagcaacaucgagacggucauggaguuccagcagaagaacaaccggcuccuggagaucacccgcgaguucuccgugaacgccggggugaccacccccgucagcacguacaugcugaccaacagcgagcuccugucccugaucaacgacaugcccaucaccaacgaccagaagaagcucaugagcaacaacgugcagaucgugcggcagcaguccuacagcaucaugugcaucaucaaggaggagguccuggcguacguggugcagcugccgcucuacggcgucaucgacacccccugcuggaagcugcacacgagcccccugugcaccaccaacaccaaggaggggagcaacaucugccucacgcgcaccgaccggggcugguacugcgacaacgccggguccgugagcuucuucccccaggccgagaccugcaaggugugcuccaaccgcgucuucugcgacaccaugaacagccugacgcugccguccgaggugaaccucugcaacaucgacaucuucaaccccaaguacgacugcaagaucaugaccagcaagaccgacgucuccagcuccgugaucaccagccugggcgccaucguguccugcuacggcaagacgaagugcaccgccagcaacaagaacaaggggaucaucaagaccuucuccaacggcugcgacuacgucagcaacaaggggguggacaccgugagcgucggcaacacgcuguacuacgugaacaagcaggagggcaagucccucuacgugaagggggagcccaucaucaacuucuacgacccccuggucuucccgagcgacgaguucgacgcguccaucagccaggugaacgagaagaucaaccagucccuggccuucauccggaaguccgacgagcuccugcacaacgugaacgucggcaaguccaccaccaacaucaugaucaccaccaucaucaucgugaucaucgugauccugcuccugcugaucgccgucggccucuuccuguacugcaaggcccgcugaggacuaguggaagcauuuuccuggcugauuaaaagaaauuacucagcuauggucaucuguuccuguuagaaggcuaugcagcauauuauauacuaugcgcauguuaugaaaugcauaauaaaaaauuuuaaaaaaucuaaaagaucuaaaaaaaaaaaaaaaaaaaaaaaaaaaaaaaaaaaaaaaaaaaaaaaaaaaaaaaaaaaaaaaaugcaucccccccccccccccccccccccccccccccaaaggcucuuuucagagccaccagaauu

SEQ ID NO: 18964 - RNA, 1910 nt, Artificial Sequence
  mRNA product Design f-2 comprising derived and/or modified sequence from HRSV(Memphis-37)__AIY60640.1__F-del_DSCav1_mut7 (opt2)
gggagagcggcucggccauuuugucccagucaguccggaggcugcggcugcagaaguaccgccugcggaguaacugcaaagaagcuuaccauggagcuccccauccucaagaccaacgccaucaccaccauccucgccgccgucacccucugcuucgccuccucccagaacaucaccgaggaguucuaccaguccaccugcuccgccgucuccaagggcuaccucuccgcccuccgcaccggcugguacaccuccgucaucaccaucgagcucuccaacaucaaggagaacaagugcaacggcaccgacgccaaggucaagcucaucaagcaggagcucgacaaguacaagaacgccgucaccgagcuccagaugcucaugugcuccacccccgccgccggcuccggcuccgccaucgccuccggcaucgccgucugcaagguccuccaccucgagggcgaggucaacaagaucaagaacgcccuccucuccaccaacaaggccgucgucucccucuccaacggcgucuccguccucaccuucaagguccucgaccucaagaacuacaucgacaagcagcuccuccccauccucaacaagcaguccugcuccaucuccaacaucgagaccgucauggaguuccagcagaagaacaaccgccuccucgagaucacccgcgaguucuccgucaacgccggcgucaccacccccgucuccaccuacaugcucaccaacuccgagcuccucucccucaucaacgacaugcccaucaccaacgaccagaagaagcucauguccaacaacguccagaucguccgccagcaguccuacuccaucaugugcaucaucaaggaggagguccucgccuacgucguccagcucccccucuacggcgucaucgacacccccugcuggaagcuccacaccuccccccucugcaccaccaacaccaaggagggcuccaacaucugccucacccgcaccgaccgcggcugguacugcgacaacgccggcuccgucuccuucuucccccaggccgagaccugcaaggucugcuccaaccgcgucuucugcgacaccaugaacucccucacccuccccuccgaggucaaccucugcaacaucgacaucuucaaccccaaguacgacugcaagaucaugaccuccaagaccgacgucuccuccuccgucaucaccucccucggcgccaucgucuccugcuacggcaagaccaagugcaccgccuccaacaagaacaagggcaucaucaagaccuucuccaacggcugcgacuacgucuccaacaagggcgucgacaccgucuccgucggcaacacccucuacuacgucaacaagcaggagggcaagucccucuacgucaagggcgagcccaucaucaacuucuacgacccccucgucuuccccuccgacgaguucgacgccuccaucucccaggucaacgagaagaucaaccagucccucgccuucauccgcaaguccgacgagcuccuccacaacgucaacgucggcaaguccaccaccaacaucaugaucaccaccaucaucaucgucaucaucgucauccuccuccuccucaucgccgucggccucuuccucuacugcaaggcccgcugaggacuaguggaagcauuuuccuggcugauuaaaagaaauuacucagcuauggucaucuguuccuguuagaaggcuaugcagcauauuauauacuaugcgcauguuaugaaaugcauaauaaaaaauuuuaaaaaaucuaaaagaucuaaaaaaaaaaaaaaaaaaaaaaaaaaaaaaaaaaaaaaaaaaaaaaaaaaaaaaaaaaaaaaaaugcaucccccccccccccccccccccccccccccccaaaggcucuuuucagagccaccagaauu

SEQ ID NO: 18965 - RNA, 1910 nt, Artificial Sequence
  mRNA product Design f-2 comprising derived and/or modified sequence from HRSV(Memphis-37)__AIY60640.1__F-del_DSCav1_mut7 (opt3)
gggagagcggcucggccauuuugucccagucaguccggaggcugcggcugcagaaguaccgccugcggaguaacugcaaagaagcuuaccauggagcugcccauccucaagaccaacgccauuacaacuauacuugcugcagugacgcugugcuucgccagcucccagaauaucaccgaagaguuuuaccaaucuacauguucagcggucaguaaaggcuauuugagcgcuuuaagaacugggugguacaccuccguuauuacaaucgaacugucuaacauuaaggagaauaaaugcaacggaaccgacgccaaggugaaacuaaucaagcaggaacucgauaaguauaaaaaugcaguaacugagcugcagaugcuuauguguucgaccccugccgcugguucaggcagcgcaauagccagugggaucgcugugugcaagguccugcacuuggagggagaagugaacaaaauuaagaaugcccuccuguccacaaacaaagcgguugugucucugagcaauggcgucuccgugcucacguucaagguauuagaccugaagaacuacaucgauaaacagcuuuugccaauucugaauaagcaaucauguaguaucagcaacauagagacuguuauggaauuucagcagaaaaauaacaggcuacucgagauuacccgggaguucucugugaaugccggugucacaacuccgguguccaccuauaugcugacaaacucagaacuucugagcuugaucaacgacaugcccauuaccaaugaucagaagaaacucaugaguaacaaugugcaaaucguccgccagcagucuuacuccaucaugugcauuauaaaggaggaaguucuggcauaugugguacaguuaccucuguacggggugaucgacacgccauguuggaaacuccauacuagcccccuuugcacaaccaacacuaaggagggaucgaauauuugucugacacgaaccgaucguggcugguacugcgacaacgcuggcucugucuccuuuuucccucaagccgaaacguguaaggugugcucaaauagaguguuuugcgauaccaugaacaguuugacacuaccaagcgagguuaaucuguguaacaucgacauauucaaucccaaauaugauugcaagauuaugacuuccaaaaccgacgucucuagcucagugaucacaagucucggggcaaucguauccuguuacggaaagacuaaaugcaccgcuagcaacaagaauaaggguauuaucaaaacauuuucuaacggcugugauuauguuucaaauaaggggguggacaccgucagugugggaaacacucuguacuaugucaacaaacaggagggcaagagccuuuacgugaaaggugaaccuauuauaaauuucuaugacccacugguuuuuccguccgaugaguucgacgccucuaucagccaggugaacgaaaagauuaaucaaucguuggcguuuaucaggaaguccgaugagcuccugcacaacguaaaugucgggaaaucaacgacaaacaucaugauuaccacuauaaucauugugaucauuguuaucuuacugcuacucauagccgugggacuguuccuuuacugcaaggcacggugaggacuaguggaagcauuuuccuggcugauuaaaagaaauuacucagcuauggucaucuguuccuguuagaaggcuaugcagcauauuauauacuaugcgcauguuaugaaaugcauaauaaaaaauuuuaaaaaaucuaaaagaucuaaaaaaaaaaaaaaaaaaaaaaaaaaaaaaaaaaaaaaaaaaaaaaaaaaaaaaaaaaaaaaaaugcaucccccccccccccccccccccccccccccccaaaggcucuuuucagagccaccagaauu

SEQ ID NO: 18966 - RNA, 1910 nt, Artificial Sequence
  mRNA product Design f-2 comprising derived and/or modified sequence from HRSV(Memphis-37)__AIY60640.1__F-del_DSCav1_mut7 (opt4)
gggagagcggcucggccauuuugucccagucaguccggaggcugcggcugcagaaguaccgccugcggaguaacugcaaagaagcuuaccauggagcugcccauccugaagaccaacgccaucaccaccauccuggccgccgugacccugugcuucgccagcagccagaacaucaccgaggaguucuaccagagcaccugcagcgccgugagcaagggcuaccugagcgcccugagaaccggcugguacaccagcgugaucaccaucgagcugagcaacaucaaggagaacaagugcaacggcaccgacgccaaggugaagcugaucaagcaggagcuggacaaguacaagaacgccgugaccgagcugcagaugcugaugugcagcacccccgccgccggcagcggcagcgccaucgccagcggcaucgccgugugcaaggugcugcaccuggagggcgaggugaacaagaucaagaacgcccugcugagcaccaacaaggccguggugagccugagcaacggcgugagcgugcugaccuucaaggugcuggaccugaagaacuacaucgacaagcagcugcugcccauccugaacaagcagagcugcagcaucagcaacaucgagaccgugauggaguuccagcagaagaacaacagacugcuggagaucaccagagaguucagcgugaacgccggcgugaccacccccgugagcaccuacaugcugaccaacagcgagcugcugagccugaucaacgacaugcccaucaccaacgaccagaagaagcugaugagcaacaacgugcagaucgugagacagcagagcuacagcaucaugugcaucaucaaggaggaggugcuggccuacguggugcagcugccccuguacggcgugaucgacacccccugcuggaagcugcacaccagcccccugugcaccaccaacaccaaggagggcagcaacaucugccugaccagaaccgacagaggcugguacugcgacaacgccggcagcgugagcuucuucccccaggccgagaccugcaaggugugcagcaacagaguguucugcgacaccaugaacagccugacccugcccagcgaggugaaccugugcaacaucgacaucuucaaccccaaguacgacugcaagaucaugaccagcaagaccgacgugagcagcagcgugaucaccagccugggcgccaucgugagcugcuacggcaagaccaagugcaccgccagcaacaagaacaagggcaucaucaagaccuucagcaacggcugcgacuacgugagcaacaagggcguggacaccgugagcgugggcaacacccuguacuacgugaacaagcaggagggcaagagccuguacgugaagggcgagcccaucaucaacuucuacgacccccugguguuccccagcgacgaguucgacgccagcaucagccaggugaacgagaagaucaaccagagccuggccuucaucagaaagagcgacgagcugcugcacaacgugaacgugggcaagagcaccaccaacaucaugaucaccaccaucaucaucgugaucaucgugauccugcugcugcugaucgccgugggccuguuccuguacugcaaggccagaugaggacuaguggaagcauuuuccuggcugauuaaaagaaauuacucagcuauggucaucuguuccuguuagaaggcuaugcagcauauuauauacuaugcgcauguuaugaaaugcauaauaaaaaauuuuaaaaaaucuaaaagaucuaaaaaaaaaaaaaaaaaaaaaaaaaaaaaaaaaaaaaaaaaaaaaaaaaaaaaaaaaaaaaaaaugcaucccccccccccccccccccccccccccccccaaaggcucuuuucagagccaccagaauu

SEQ ID NO: 18967 - RNA, 1910 nt, Artificial Sequence
  mRNA product Design f-2 comprising derived and/or modified sequence from HRSV(Memphis-37)__AIY60640.1__F-del_DSCav1_mut7 (opt5)
gggagagcggcucggccauuuugucccagucaguccggaggcugcggcugcagaaguaccgccugcggaguaacugcaaagaagcuuaccauggagcugcccauccucaagaccaacgccauuacaacgauccuggcugccgugacccuuugcuucgcgagcucccagaauauuacagaagaguuuuaccaaucuaccuguagcgcugucuccaaaggcuaucugucugcccucagaacagggugguacaccagcguuaucacaauugaacuguccaacaucaaggagaauaaaugcaacggaaccgacgccaaggugaaacuuaucaagcaggaacuggauaaguauaaaaaugcugugacggagcuccagaugcugauguguucuaccccugccgcuggcagcggguccgccauugcgagcggaaucgccgucugcaaggugcugcaccucgagggcgaaguuaacaaaauuaagaaugcucugcuuucuacaaacaaagccguggucucccugagcaauggggugucuguucucaccuucaaggugcuggaccuuaagaacuacaucgauaaacagcugcucccgauucugaauaagcaauccuguagcaucucuaacauugagacagucauggaauuucagcagaaaaauaaccggcugcucgagaucacccgcgaguucuccgugaaugcuggagugacgacacccgucagcaccuauaugcugacaaacuccgaacuucugucucucaucaacgacaugccuauuaccaaugaucagaagaaacugaugagcaacaauguucaaaucgugagacagcaguccuacagcauuaugugcaucauuaaggaggaagugcuugccuaugucgugcagcugccccucuacggcguuaucgacaccccuuguuggaaacugcauacaucuccccugugcacgaccaacacaaaggagggcuccaauaucugucucacccggacagaucgcgggugguacugcgacaacgcgggaagcgugagcuuuuucccucaagccgaaaccuguaaggucugcucuaauagaguguuuugcgauacgaugaacucccugacacuuccgucugagguuaaucuguguaacauugacaucuucaaucccaaauaugauugcaagauuaugaccagcaaaaccgacguguccagcucugucaucacaucccucggcgcuauugugagcuguuacgggaagaccaaaugcacagccucuaacaagaauaagggaaucaucaaaacguuuuccaacggcugugauuaugucagcaauaaggggguggacaccguuuccgugggaaacacacuguacuaugucaacaaacaggagggcaagucucuuuacgugaaaggcgaaccuauuaucaauuucuaugacccccugguuuuuccuagcgaugaguucgacgcuuccauuucucaggugaacgaaaagaucaaucaaagccucgccuuuauucggaaguccgaugagcugcugcacaacgucaauguggggaaaagcaccacaaacaucaugauuaccacgaucaucauugugaucauuguuauccuccugcuucugauugccgucggacucuuccuguacugcaaggcucgcugaggacuaguggaagcauuuuccuggcugauuaaaagaaauuacucagcuauggucaucuguuccuguuagaaggcuaugcagcauauuauauacuaugcgcauguuaugaaaugcauaauaaaaaauuuuaaaaaaucuaaaagaucuaaaaaaaaaaaaaaaaaaaaaaaaaaaaaaaaaaaaaaaaaaaaaaaaaaaaaaaaaaaaaaaaugcaucccccccccccccccccccccccccccccccaaaggcucuuuucagagccaccagaauu

SEQ ID NO: 18968 - RNA, 1910 nt, Artificial Sequence
  mRNA product Design f-2 comprising derived and/or modified sequence from HRSV(Memphis-37)__AIY60640.1__F-del_DSCav1_mut7 (opt6)
gggagagcggcucggccauuuugucccagucaguccggaggcugcggcugcagaaguaccgccugcggaguaacugcaaagaagcuuaccauggaacuaccaauacucaaaacaaacgccauaaccacaauacuagccgcaguaacacuuugcuuugccucaagucaaaacauaacagaagaauuuuaccaauccacaugcucagcuguauccaaaggauauuuauccgcacuaagaacaggaugguacacaucaguaaucacaauagaauuaucaaacauaaaagaaaacaaauguaauggcacagacgccaaaguaaaacuaauuaaacaagaacuagacaaauauaaaaaugcaguaaccgaacuccaaaugcucaugugcucuacaccagcugcaggaucaggaucagccauugcaagcgguauagcuguuugcaaaguauuacacuuagaaggagaaguaaauaaaauaaaaaacgcacuacuaucaacaaauaaagcaguaguaucccuaucaaacggaguaucaguacuuacauucaaaguauuagauuuaaaaaacuauauagacaaacaacuacuucccauauuaaacaaacaaucaugcucaauuuccaacauugaaacuguaauggaauuucaacaaaaaaacaacagacuacuugaaaucacacgagaauuuucaguaaacgcuggaguaacaacaccugucucuaccuacaugcucacaaauagcgaauuacuaucucuaaucaaugacaugccaauaacaaacgaucaaaaaaaacuaauguccaacaacguacaaauaguaagacaacaauccuauucaauaaugugcauaauaaaagaagaagucuuagcauacguuguacaacuaccauuauacggaguaauagauacaccaugcuggaaacuccacacaagcccccucugcacaacaaacaccaaagaagggucaaacauaugcuuaacaagaacagacagaggaugguacugugauaacgcaggaucugucucauucuuuccacaagcagaaacauguaaaguaugcuccaacagagucuuuugcgacaccaugaacucacuaaccuuacccucagaaguaaaccugugcaacaucgauaucuucaaccccaaauacgauugcaaaaucaugacaagcaaaacugauguauccagcucuguaauaacaucacuaggugcaauaguaucaugcuacggaaaaacaaaaugcacagcuucuaacaaaaauaaaggaauaauaaaaacauucuccaauggaugcgacuaugucucaaauaaaggaguagauacaguuucagucggcaacacacucuauuauguaaauaaacaagaaggaaaaucauuauacguaaaaggagaacccauaauaaacuucuacgacccccucguauucccaagcgacgaauuugacgccucaauaucacaaguaaacgaaaaaauaaaccaaucacucgcauucaucagaaaaucagaugaacuacuacacaauguaaacgucggaaaauccaccacaaauauaaugauaacuaccaucauaauaguaauaauagucaucuuacuacuauuaaucgcuguaggacuauuucucuacugcaaggccagauaaggacuaguggaagcauuuuccuggcugauuaaaagaaauuacucagcuauggucaucuguuccuguuagaaggcuaugcagcauauuauauacuaugcgcauguuaugaaaugcauaauaaaaaauuuuaaaaaaucuaaaagaucuaaaaaaaaaaaaaaaaaaaaaaaaaaaaaaaaaaaaaaaaaaaaaaaaaaaaaaaaaaaaaaaaugcaucccccccccccccccccccccccccccccccaaaggcucuuuucagagccaccagaauu

SEQ ID NO: 18969 - RNA, 1910 nt, Artificial Sequence
  mRNA product Design f-2 comprising derived and/or modified sequence from HRSV(Memphis-37)__AIY60640.1__F-del_DSCav1_mut7 (opt11)
gggagagcggcucggccauuuugucccagucaguccggaggcugcggcugcagaaguaccgccugcggaguaacugcaaagaagcuuaccauggaacucccaauccucaaaacaaaugccaucaccaccauccuagccgcugucacacuaugcuucgccuccucacaaaacaucaccgaagaguucuaucaauccacaugcuccgccgucagcaagggauaccucuccgcccuuagaaccggcugguacaccucagucaucacaauugaacugucaaacaucaaagaaaacaaaugcaacggcaccgacgcaaaaguaaagcucaucaaacaagaacuggacaaguacaagaacgccgucaccgaacuacagaugcuuaugugcucaaccccugccgccggcuccggaucugccauagcuucaggcaucgccguaugcaaaguccugcaccuagaaggggaagucaacaaaaucaaaaacgcccuccucuccaccaacaaggccguugucucccugucaaacggagucuccguccuaaccuucaaaguccucgaccucaaaaacuacauagacaaacaacuccuacccauccucaacaaacaaagcugcucaauauccaacaucgaaaccgucauggaguuccaacaaaagaacaaccgacuacucgaaauaacacgcgaguucucagucaacgccggcgucaccaccccagucuccacauacaugcucaccaacuccgaacuccuaucgcucaucaacgacaugcccaucaccaaugaccagaagaaacucauguccaacaacguacaaaucguccgccaacaguccuacucaaucaugugcaucaucaaagaagaaguccuugccuacgucguccagcuuccacucuacggagucaucgacacccccugcuggaaacuccacaccuccccacuaugcaccaccaacaccaaagaaggauccaacauaugccucacccguacugaccgcggcugguacugcgacaacgccggauccgucucauucuucccccaggccgaaaccugcaaagucugcuccaaccgcgucuucugcgacaccaugaacucgcucacccucccauccgaagucaaucuaugcaacaucgacauuuucaaccccaaauacgacugcaaaauuaugacaucaaaaaccgacgucucauccucagucaucacuucccucggcgcaaucguaagcugcuacgggaaaacaaagugcaccgcuuccaacaaaaacaaaggcaucaucaaaaccuucucuaacggcugcgacuacgucuccaacaaaggagucgacaccguauccgucggcaacacccucuacuacgucaacaaacaggaaggaaaaucgcucuacgucaaaggagaaccaaucaucaacuucuacgacccccuagucuucccauccgacgaguucgacgccagcaucucacaagucaaugaaaagaucaaccagucacucgcauucauccguaagucagacgaacuccuacacaacgucaacgucggcaagucaacaaccaacauaaugaucaccaccauaaucaucgucauaauaguaauccuccuucuccuaaucgcagucggccucuuccucuacugcaaagcacgcuaaggacuaguggaagcauuuuccuggcugauuaaaagaaauuacucagcuauggucaucuguuccuguuagaaggcuaugcagcauauuauauacuaugcgcauguuaugaaaugcauaauaaaaaauuuuaaaaaaucuaaaagaucuaaaaaaaaaaaaaaaaaaaaaaaaaaaaaaaaaaaaaaaaaaaaaaaaaaaaaaaaaaaaaaaaugcaucccccccccccccccccccccccccccccccaaaggcucuuuucagagccaccagaauu

SEQ ID NO: 18970 - RNA, 1901 nt, Artificial Sequence
  mRNA product Design f-3 comprising derived and/or modified sequence from HRSV(Memphis-37)__AIY60640.1__F-del_DSCav1_mut7 (opt1)
gggagagucccgcagucggcguccagcggcucugcuuguucgugugugugucguugcaggccuuauucaagcuuaccauggagcugcccauccucaagaccaacgccaucaccacgauccuggccgcggugacccugugcuucgccagcucccagaacaucaccgaggaguucuaccagagcacgugcuccgccgucagcaagggcuaccucuccgcccugcgcaccgggugguacaccagcgugaucaccaucgagcuguccaacaucaaggagaacaagugcaacggcaccgacgccaaggugaagcucaucaagcaggagcuggacaaguacaagaacgcggucacggagcugcagaugcugaugugcagcaccccggccgccggcuccgggagcgcgaucgccuccggcaucgccgucugcaaggugcugcaccucgagggcgaggugaacaagaucaagaacgcccugcuguccaccaacaaggccgucgugagccucuccaacggggugagcguccugaccuucaaggugcuggaccucaagaacuacaucgacaagcagcugcugcccauccugaacaagcagagcugcuccaucagcaacaucgagaccgucauggaguuccagcagaagaacaaccgccuccuggagaucacgcgggaguucagcgugaacgcgggcgugaccacccccgucuccaccuacaugcugacgaacagcgagcuccugucccugaucaacgacaugccgaucaccaacgaccagaagaagcucaugagcaacaacgugcagaucgugcgccagcaguccuacagcaucaugugcaucaucaaggaggagguccuggccuacguggugcagcugccccucuacggggucaucgacacccccugcuggaagcugcacaccagcccccugugcacgaccaacaccaaggagggcuccaacaucugccucacccggacggaccgcgggugguacugcgacaacgccggcagcguguccuucuucccgcaggccgagaccugcaaggucugcagcaaccggguguucugcgacaccaugaacucccugacccugcccagcgaggugaaccucugcaacaucgacaucuucaaccccaaguacgacugcaagaucaugacguccaagaccgacgucagcuccagcgugaucaccucccugggcgccaucgugagcugcuacgggaagaccaagugcacggcgagcaacaagaacaagggcaucaucaagaccuucuccaacgggugcgacuacgucagcaacaagggcguggacaccguguccgucggcaacacccuguacuacgugaacaagcaggagggcaagagccucuacgugaagggggagcccaucaucaacuucuacgacccgcuggucuuccccuccgacgaguucgacgccagcaucucccaggugaacgagaagaucaaccagagccuggccuucauccggaaguccgacgagcuccugcacaacgugaacgucggcaagagcaccacgaacaucaugaucaccaccaucaucaucgugaucaucgugauccugcugcuccugaucgccgucgggcuguuccucuacugcaaggcccgcugaggacuaguacuggcugcaucucccuuuccucuguccuccauccuucucccaggauggugaagggggaccugguacccagugauccccaccccaggauccuaaaucaugacuuaccugcuaauaaaaacucauuggaaaagugagaagaucuaaaaaaaaaaaaaaaaaaaaaaaaaaaaaaaaaaaaaaaaaaaaaaaaaaaaaaaaaaaaaaaaugcaucccccccccccccccccccccccccccccccaaaggcucuuuucagagccaccagaauu

SEQ ID NO: 18971 - RNA, 1901 nt, Artificial Sequence
  mRNA product Design f-3 comprising derived and/or modified sequence from HRSV(Memphis-37)__AIY60640.1__F-del_DSCav1_mut7 (opt1)
gggagagucccgcagucggcguccagcggcucugcuuguucgugugugugucguugcaggccuuauucaagcuuaccauggagcugcccauccucaagaccaacgccaucaccacgauccuggccgcggugacccugugcuucgccagcucccagaacaucaccgaggaguucuaccagagcacgugcuccgccgucagcaagggguaccucuccgcccugcgcaccgggugguacaccagcgugaucaccaucgagcuguccaacaucaaggagaacaagugcaacggcaccgacgccaaggugaagcucaucaagcaggagcuggacaaguacaagaacgcggucacggagcugcagaugcucaugugcagcaccccggccgccggguccggcagcgccaucgcguccgggaucgccgugugcaaggugcugcaccuggagggcgaggucaacaagaucaagaacgcccuccugagcaccaacaaggccguggugucccugagcaacggcgucuccgugcucaccuucaaggugcuggaccugaagaacuacaucgacaagcagcuccugcccauccugaacaagcagagcugcuccaucagcaacaucgagacggucauggaguuccagcagaagaacaaccggcuccuggagaucacccgcgaguucuccgugaacgccggggugaccacccccgucagcacguacaugcugaccaacagcgagcuccugucccugaucaacgacaugcccaucaccaacgaccagaagaagcucaugagcaacaacgugcagaucgugcggcagcaguccuacagcaucaugugcaucaucaaggaggagguccuggcguacguggugcagcugccgcucuacggcgucaucgacacccccugcuggaagcugcacacgagcccccugugcaccaccaacaccaaggaggggagcaacaucugccucacgcgcaccgaccggggcugguacugcgacaacgccggguccgugagcuucuucccccaggccgagaccugcaaggugugcuccaaccgcgucuucugcgacaccaugaacagccugacgcugccguccgaggugaaccucugcaacaucgacaucuucaaccccaaguacgacugcaagaucaugaccagcaagaccgacgucuccagcuccgugaucaccagccugggcgccaucguguccugcuacggcaagacgaagugcaccgccagcaacaagaacaaggggaucaucaagaccuucuccaacggcugcgacuacgucagcaacaaggggguggacaccgugagcgucggcaacacgcuguacuacgugaacaagcaggagggcaagucccucuacgugaagggggagcccaucaucaacuucuacgacccccuggucuucccgagcgacgaguucgacgcguccaucagccaggugaacgagaagaucaaccagucccuggccuucauccggaaguccgacgagcuccugcacaacgugaacgucggcaaguccaccaccaacaucaugaucaccaccaucaucaucgugaucaucgugauccugcuccugcugaucgccgucggccucuuccuguacugcaaggcccgcugaggacuaguacuggcugcaucucccuuuccucuguccuccauccuucucccaggauggugaagggggaccugguacccagugauccccaccccaggauccuaaaucaugacuuaccugcuaauaaaaacucauuggaaaagugagaagaucuaaaaaaaaaaaaaaaaaaaaaaaaaaaaaaaaaaaaaaaaaaaaaaaaaaaaaaaaaaaaaaaaugcaucccccccccccccccccccccccccccccccaaaggcucuuuucagagccaccagaauu

SEQ ID NO: 18972 - RNA, 1901 nt, Artificial Sequence
  mRNA product Design f-3 comprising derived and/or modified sequence from HRSV(Memphis-37)__AIY60640.1__F-del_DSCav1_mut7 (opt2)
gggagagucccgcagucggcguccagcggcucugcuuguucgugugugugucguugcaggccuuauucaagcuuaccauggagcuccccauccucaagaccaacgccaucaccaccauccucgccgccgucacccucugcuucgccuccucccagaacaucaccgaggaguucuaccaguccaccugcuccgccgucuccaagggcuaccucuccgcccuccgcaccggcugguacaccuccgucaucaccaucgagcucuccaacaucaaggagaacaagugcaacggcaccgacgccaaggucaagcucaucaagcaggagcucgacaaguacaagaacgccgucaccgagcuccagaugcucaugugcuccacccccgccgccggcuccggcuccgccaucgccuccggcaucgccgucugcaagguccuccaccucgagggcgaggucaacaagaucaagaacgcccuccucuccaccaacaaggccgucgucucccucuccaacggcgucuccguccucaccuucaagguccucgaccucaagaacuacaucgacaagcagcuccuccccauccucaacaagcaguccugcuccaucuccaacaucgagaccgucauggaguuccagcagaagaacaaccgccuccucgagaucacccgcgaguucuccgucaacgccggcgucaccacccccgucuccaccuacaugcucaccaacuccgagcuccucucccucaucaacgacaugcccaucaccaacgaccagaagaagcucauguccaacaacguccagaucguccgccagcaguccuacuccaucaugugcaucaucaaggaggagguccucgccuacgucguccagcucccccucuacggcgucaucgacacccccugcuggaagcuccacaccuccccccucugcaccaccaacaccaaggagggcuccaacaucugccucacccgcaccgaccgcggcugguacugcgacaacgccggcuccgucuccuucuucccccaggccgagaccugcaaggucugcuccaaccgcgucuucugcgacaccaugaacucccucacccuccccuccgaggucaaccucugcaacaucgacaucuucaaccccaaguacgacugcaagaucaugaccuccaagaccgacgucuccuccuccgucaucaccucccucggcgccaucgucuccugcuacggcaagaccaagugcaccgccuccaacaagaacaagggcaucaucaagaccuucuccaacggcugcgacuacgucuccaacaagggcgucgacaccgucuccgucggcaacacccucuacuacgucaacaagcaggagggcaagucccucuacgucaagggcgagcccaucaucaacuucuacgacccccucgucuuccccuccgacgaguucgacgccuccaucucccaggucaacgagaagaucaaccagucccucgccuucauccgcaaguccgacgagcuccuccacaacgucaacgucggcaaguccaccaccaacaucaugaucaccaccaucaucaucgucaucaucgucauccuccuccuccucaucgccgucggccucuuccucuacugcaaggcccgcugaggacuaguacuggcugcaucucccuuuccucuguccuccauccuucucccaggauggugaagggggaccugguacccagugauccccaccccaggauccuaaaucaugacuuaccugcuaauaaaaacucauuggaaaagugagaagaucuaaaaaaaaaaaaaaaaaaaaaaaaaaaaaaaaaaaaaaaaaaaaaaaaaaaaaaaaaaaaaaaaugcaucccccccccccccccccccccccccccccccaaaggcucuuuucagagccaccagaauu

SEQ ID NO: 18973 - RNA, 1901 nt, Artificial Sequence
  mRNA product Design f-3 comprising derived and/or modified sequence from HRSV(Memphis-37)__AIY60640.1__F-del_DSCav1_mut7 (opt3)
gggagagucccgcagucggcguccagcggcucugcuuguucgugugugugucguugcaggccuuauucaagcuuaccauggagcugcccauccucaagaccaacgccauuacaacuauacuugcugcagugacgcugugcuucgccagcucccagaauaucaccgaagaguuuuaccaaucuacauguucagcggucaguaaaggcuauuugagcgcuuuaagaacugggugguacaccuccguuauuacaaucgaacugucuaacauuaaggagaauaaaugcaacggaaccgacgccaaggugaaacuaaucaagcaggaacucgauaaguauaaaaaugcaguaacugagcugcagaugcuuauguguucgaccccugccgcugguucaggcagcgcaauagccagugggaucgcugugugcaagguccugcacuuggagggagaagugaacaaaauuaagaaugcccuccuguccacaaacaaagcgguugugucucugagcaauggcgucuccgugcucacguucaagguauuagaccugaagaacuacaucgauaaacagcuuuugccaauucugaauaagcaaucauguaguaucagcaacauagagacuguuauggaauuucagcagaaaaauaacaggcuacucgagauuacccgggaguucucugugaaugccggugucacaacuccgguguccaccuauaugcugacaaacucagaacuucugagcuugaucaacgacaugcccauuaccaaugaucagaagaaacucaugaguaacaaugugcaaaucguccgccagcagucuuacuccaucaugugcauuauaaaggaggaaguucuggcauaugugguacaguuaccucuguacggggugaucgacacgccauguuggaaacuccauacuagcccccuuugcacaaccaacacuaaggagggaucgaauauuugucugacacgaaccgaucguggcugguacugcgacaacgcuggcucugucuccuuuuucccucaagccgaaacguguaaggugugcucaaauagaguguuuugcgauaccaugaacaguuugacacuaccaagcgagguuaaucuguguaacaucgacauauucaaucccaaauaugauugcaagauuaugacuuccaaaaccgacgucucuagcucagugaucacaagucucggggcaaucguauccuguuacggaaagacuaaaugcaccgcuagcaacaagaauaaggguauuaucaaaacauuuucuaacggcugugauuauguuucaaauaaggggguggacaccgucagugugggaaacacucuguacuaugucaacaaacaggagggcaagagccuuuacgugaaaggugaaccuauuauaaauuucuaugacccacugguuuuuccguccgaugaguucgacgccucuaucagccaggugaacgaaaagauuaaucaaucguuggcguuuaucaggaaguccgaugagcuccugcacaacguaaaugucgggaaaucaacgacaaacaucaugauuaccacuauaaucauugugaucauuguuaucuuacugcuacucauagccgugggacuguuccuuuacugcaaggcacggugaggacuaguacuggcugcaucucccuuuccucuguccuccauccuucucccaggauggugaagggggaccugguacccagugauccccaccccaggauccuaaaucaugacuuaccugcuaauaaaaacucauuggaaaagugagaagaucuaaaaaaaaaaaaaaaaaaaaaaaaaaaaaaaaaaaaaaaaaaaaaaaaaaaaaaaaaaaaaaaaugcaucccccccccccccccccccccccccccccccaaaggcucuuuucagagccaccagaauu

SEQ ID NO: 18974 - RNA, 1901 nt, Artificial Sequence
  mRNA product Design f-3 comprising derived and/or modified sequence from HRSV(Memphis-37)__AIY60640.1__F-del_DSCav1_mut7 (opt4)
gggagagucccgcagucggcguccagcggcucugcuuguucgugugugugucguugcaggccuuauucaagcuuaccauggagcugcccauccugaagaccaacgccaucaccaccauccuggccgccgugacccugugcuucgccagcagccagaacaucaccgaggaguucuaccagagcaccugcagcgccgugagcaagggcuaccugagcgcccugagaaccggcugguacaccagcgugaucaccaucgagcugagcaacaucaaggagaacaagugcaacggcaccgacgccaaggugaagcugaucaagcaggagcuggacaaguacaagaacgccgugaccgagcugcagaugcugaugugcagcacccccgccgccggcagcggcagcgccaucgccagcggcaucgccgugugcaaggugcugcaccuggagggcgaggugaacaagaucaagaacgcccugcugagcaccaacaaggccguggugagccugagcaacggcgugagcgugcugaccuucaaggugcuggaccugaagaacuacaucgacaagcagcugcugcccauccugaacaagcagagcugcagcaucagcaacaucgagaccgugauggaguuccagcagaagaacaacagacugcuggagaucaccagagaguucagcgugaacgccggcgugaccacccccgugagcaccuacaugcugaccaacagcgagcugcugagccugaucaacgacaugcccaucaccaacgaccagaagaagcugaugagcaacaacgugcagaucgugagacagcagagcuacagcaucaugugcaucaucaaggaggaggugcuggccuacguggugcagcugccccuguacggcgugaucgacacccccugcuggaagcugcacaccagcccccugugcaccaccaacaccaaggagggcagcaacaucugccugaccagaaccgacagaggcugguacugcgacaacgccggcagcgugagcuucuucccccaggccgagaccugcaaggugugcagcaacagaguguucugcgacaccaugaacagccugacccugcccagcgaggugaaccugugcaacaucgacaucuucaaccccaaguacgacugcaagaucaugaccagcaagaccgacgugagcagcagcgugaucaccagccugggcgccaucgugagcugcuacggcaagaccaagugcaccgccagcaacaagaacaagggcaucaucaagaccuucagcaacggcugcgacuacgugagcaacaagggcguggacaccgugagcgugggcaacacccuguacuacgugaacaagcaggagggcaagagccuguacgugaagggcgagcccaucaucaacuucuacgacccccugguguuccccagcgacgaguucgacgccagcaucagccaggugaacgagaagaucaaccagagccuggccuucaucagaaagagcgacgagcugcugcacaacgugaacgugggcaagagcaccaccaacaucaugaucaccaccaucaucaucgugaucaucgugauccugcugcugcugaucgccgugggccuguuccuguacugcaaggccagaugaggacuaguacuggcugcaucucccuuuccucuguccuccauccuucucccaggauggugaagggggaccugguacccagugauccccaccccaggauccuaaaucaugacuuaccugcuaauaaaaacucauuggaaaagugagaagaucuaaaaaaaaaaaaaaaaaaaaaaaaaaaaaaaaaaaaaaaaaaaaaaaaaaaaaaaaaaaaaaaaugcaucccccccccccccccccccccccccccccccaaaggcucuuuucagagccaccagaauu

SEQ ID NO: 18975 - RNA, 1901 nt, Artificial Sequence
  mRNA product Design f-3 comprising derived and/or modified sequence from HRSV(Memphis-37)__AIY60640.1__F-del_DSCav1_mut7 (opt5)
gggagagucccgcagucggcguccagcggcucugcuuguucgugugugugucguugcaggccuuauucaagcuuaccauggagcugcccauccucaagaccaacgccauuacaacgauccuggcugccgugacccuuugcuucgcgagcucccagaauauuacagaagaguuuuaccaaucuaccuguagcgcugucuccaaaggcuaucugucugcccucagaacagggugguacaccagcguuaucacaauugaacuguccaacaucaaggagaauaaaugcaacggaaccgacgccaaggugaaacuuaucaagcaggaacuggauaaguauaaaaaugcugugacggagcuccagaugcugauguguucuaccccugccgcuggcagcggguccgccauugcgagcggaaucgccgucugcaaggugcugcaccucgagggcgaaguuaacaaaauuaagaaugcucugcuuucuacaaacaaagccguggucucccugagcaauggggugucuguucucaccuucaaggugcuggaccuuaagaacuacaucgauaaacagcugcucccgauucugaauaagcaauccuguagcaucucuaacauugagacagucauggaauuucagcagaaaaauaaccggcugcucgagaucacccgcgaguucuccgugaaugcuggagugacgacacccgucagcaccuauaugcugacaaacuccgaacuucugucucucaucaacgacaugccuauuaccaaugaucagaagaaacugaugagcaacaauguucaaaucgugagacagcaguccuacagcauuaugugcaucauuaaggaggaagugcuugccuaugucgugcagcugccccucuacggcguuaucgacaccccuuguuggaaacugcauacaucuccccugugcacgaccaacacaaaggagggcuccaauaucugucucacccggacagaucgcgggugguacugcgacaacgcgggaagcgugagcuuuuucccucaagccgaaaccuguaaggucugcucuaauagaguguuuugcgauacgaugaacucccugacacuuccgucugagguuaaucuguguaacauugacaucuucaaucccaaauaugauugcaagauuaugaccagcaaaaccgacguguccagcucugucaucacaucccucggcgcuauugugagcuguuacgggaagaccaaaugcacagccucuaacaagaauaagggaaucaucaaaacguuuuccaacggcugugauuaugucagcaauaaggggguggacaccguuuccgugggaaacacacuguacuaugucaacaaacaggagggcaagucucuuuacgugaaaggcgaaccuauuaucaauuucuaugacccccugguuuuuccuagcgaugaguucgacgcuuccauuucucaggugaacgaaaagaucaaucaaagccucgccuuuauucggaaguccgaugagcugcugcacaacgucaauguggggaaaagcaccacaaacaucaugauuaccacgaucaucauugugaucauuguuauccuccugcuucugauugccgucggacucuuccuguacugcaaggcucgcugaggacuaguacuggcugcaucucccuuuccucuguccuccauccuucucccaggauggugaagggggaccugguacccagugauccccaccccaggauccuaaaucaugacuuaccugcuaauaaaaacucauuggaaaagugagaagaucuaaaaaaaaaaaaaaaaaaaaaaaaaaaaaaaaaaaaaaaaaaaaaaaaaaaaaaaaaaaaaaaaugcaucccccccccccccccccccccccccccccccaaaggcucuuuucagagccaccagaauu

SEQ ID NO: 18976 - RNA, 1901 nt, Artificial Sequence
  mRNA product Design f-3 comprising derived and/or modified sequence from HRSV(Memphis-37)__AIY60640.1__F-del_DSCav1_mut7 (opt6)
gggagagucccgcagucggcguccagcggcucugcuuguucgugugugugucguugcaggccuuauucaagcuuaccauggaacuaccaauacucaaaacaaacgccauaaccacaauacuagccgcaguaacacuuugcuuugccucaagucaaaacauaacagaagaauuuuaccaauccacaugcucagcuguauccaaaggauauuuauccgcacuaagaacaggaugguacacaucaguaaucacaauagaauuaucaaacauaaaagaaaacaaauguaauggcacagacgccaaaguaaaacuaauuaaacaagaacuagacaaauauaaaaaugcaguaaccgaacuccaaaugcucaugugcucuacaccagcugcaggaucaggaucagccauugcaagcgguauagcuguuugcaaaguauuacacuuagaaggagaaguaaauaaaauaaaaaacgcacuacuaucaacaaauaaagcaguaguaucccuaucaaacggaguaucaguacuuacauucaaaguauuagauuuaaaaaacuauauagacaaacaacuacuucccauauuaaacaaacaaucaugcucaauuuccaacauugaaacuguaauggaauuucaacaaaaaaacaacagacuacuugaaaucacacgagaauuuucaguaaacgcuggaguaacaacaccugucucuaccuacaugcucacaaauagcgaauuacuaucucuaaucaaugacaugccaauaacaaacgaucaaaaaaaacuaauguccaacaacguacaaauaguaagacaacaauccuauucaauaaugugcauaauaaaagaagaagucuuagcauacguuguacaacuaccauuauacggaguaauagauacaccaugcuggaaacuccacacaagcccccucugcacaacaaacaccaaagaagggucaaacauaugcuuaacaagaacagacagaggaugguacugugauaacgcaggaucugucucauucuuuccacaagcagaaacauguaaaguaugcuccaacagagucuuuugcgacaccaugaacucacuaaccuuacccucagaaguaaaccugugcaacaucgauaucuucaaccccaaauacgauugcaaaaucaugacaagcaaaacugauguauccagcucuguaauaacaucacuaggugcaauaguaucaugcuacggaaaaacaaaaugcacagcuucuaacaaaaauaaaggaauaauaaaaacauucuccaauggaugcgacuaugucucaaauaaaggaguagauacaguuucagucggcaacacacucuauuauguaaauaaacaagaaggaaaaucauuauacguaaaaggagaacccauaauaaacuucuacgacccccucguauucccaagcgacgaauuugacgccucaauaucacaaguaaacgaaaaaauaaaccaaucacucgcauucaucagaaaaucagaugaacuacuacacaauguaaacgucggaaaauccaccacaaauauaaugauaacuaccaucauaauaguaauaauagucaucuuacuacuauuaaucgcuguaggacuauuucucuacugcaaggccagauaaggacuaguacuggcugcaucucccuuuccucuguccuccauccuucucccaggauggugaagggggaccugguacccagugauccccaccccaggauccuaaaucaugacuuaccugcuaauaaaaacucauuggaaaagugagaagaucuaaaaaaaaaaaaaaaaaaaaaaaaaaaaaaaaaaaaaaaaaaaaaaaaaaaaaaaaaaaaaaaaugcaucccccccccccccccccccccccccccccccaaaggcucuuuucagagccaccagaauu

SEQ ID NO: 18977 - RNA, 1901 nt, Artificial Sequence
  mRNA product Design f-3 comprising derived and/or modified sequence from HRSV(Memphis-37)__AIY60640.1__F-del_DSCav1_mut7 (opt11)
gggagagucccgcagucggcguccagcggcucugcuuguucgugugugugucguugcaggccuuauucaagcuuaccauggaacucccaauccucaaaacaaaugccaucaccaccauccuagccgcugucacacuaugcuucgccuccucacaaaacaucaccgaagaguucuaucaauccacaugcuccgccgucagcaagggauaccucuccgcccuuagaaccggcugguacaccucagucaucacaauugaacugucaaacaucaaagaaaacaaaugcaacggcaccgacgcaaaaguaaagcucaucaaacaagaacuggacaaguacaagaacgccgucaccgaacuacagaugcuuaugugcucaaccccugccgccggcuccggaucugccauagcuucaggcaucgccguaugcaaaguccugcaccuagaaggggaagucaacaaaaucaaaaacgcccuccucuccaccaacaaggccguugucucccugucaaacggagucuccguccuaaccuucaaaguccucgaccucaaaaacuacauagacaaacaacuccuacccauccucaacaaacaaagcugcucaauauccaacaucgaaaccgucauggaguuccaacaaaagaacaaccgacuacucgaaauaacacgcgaguucucagucaacgccggcgucaccaccccagucuccacauacaugcucaccaacuccgaacuccuaucgcucaucaacgacaugcccaucaccaaugaccagaagaaacucauguccaacaacguacaaaucguccgccaacaguccuacucaaucaugugcaucaucaaagaagaaguccuugccuacgucguccagcuuccacucuacggagucaucgacacccccugcuggaaacuccacaccuccccacuaugcaccaccaacaccaaagaaggauccaacauaugccucacccguacugaccgcggcugguacugcgacaacgccggauccgucucauucuucccccaggccgaaaccugcaaagucugcuccaaccgcgucuucugcgacaccaugaacucgcucacccucccauccgaagucaaucuaugcaacaucgacauuuucaaccccaaauacgacugcaaaauuaugacaucaaaaaccgacgucucauccucagucaucacuucccucggcgcaaucguaagcugcuacgggaaaacaaagugcaccgcuuccaacaaaaacaaaggcaucaucaaaaccuucucuaacggcugcgacuacgucuccaacaaaggagucgacaccguauccgucggcaacacccucuacuacgucaacaaacaggaaggaaaaucgcucuacgucaaaggagaaccaaucaucaacuucuacgacccccuagucuucccauccgacgaguucgacgccagcaucucacaagucaaugaaaagaucaaccagucacucgcauucauccguaagucagacgaacuccuacacaacgucaacgucggcaagucaacaaccaacauaaugaucaccaccauaaucaucgucauaauaguaauccuccuucuccuaaucgcagucggccucuuccucuacugcaaagcacgcuaaggacuaguacuggcugcaucucccuuuccucuguccuccauccuucucccaggauggugaagggggaccugguacccagugauccccaccccaggauccuaaaucaugacuuaccugcuaauaaaaacucauuggaaaagugagaagaucuaaaaaaaaaaaaaaaaaaaaaaaaaaaaaaaaaaaaaaaaaaaaaaaaaaaaaaaaaaaaaaaaugcaucccccccccccccccccccccccccccccccaaaggcucuuuucagagccaccagaauu

SEQ ID NO: 18978 - RNA, 2117 nt, Artificial Sequence
  mRNA product Design f-4 comprising derived and/or modified sequence from HRSV(Memphis-37)__AIY60640.1__F-del_DSCav1_mut7 (opt1)
gggagagucccgcagucggcguccagcggcucugcuuguucgugugugugucguugcaggccuuauucaagcuuaccauggagcugcccauccucaagaccaacgccaucaccacgauccuggccgcggugacccugugcuucgccagcucccagaacaucaccgaggaguucuaccagagcacgugcuccgccgucagcaagggcuaccucuccgcccugcgcaccgggugguacaccagcgugaucaccaucgagcuguccaacaucaaggagaacaagugcaacggcaccgacgccaaggugaagcucaucaagcaggagcuggacaaguacaagaacgcggucacggagcugcagaugcugaugugcagcaccccggccgccggcuccgggagcgcgaucgccuccggcaucgccgucugcaaggugcugcaccucgagggcgaggugaacaagaucaagaacgcccugcuguccaccaacaaggccgucgugagccucuccaacggggugagcguccugaccuucaaggugcuggaccucaagaacuacaucgacaagcagcugcugcccauccugaacaagcagagcugcuccaucagcaacaucgagaccgucauggaguuccagcagaagaacaaccgccuccuggagaucacgcgggaguucagcgugaacgcgggcgugaccacccccgucuccaccuacaugcugacgaacagcgagcuccugucccugaucaacgacaugccgaucaccaacgaccagaagaagcucaugagcaacaacgugcagaucgugcgccagcaguccuacagcaucaugugcaucaucaaggaggagguccuggccuacguggugcagcugccccucuacggggucaucgacacccccugcuggaagcugcacaccagcccccugugcacgaccaacaccaaggagggcuccaacaucugccucacccggacggaccgcgggugguacugcgacaacgccggcagcguguccuucuucccgcaggccgagaccugcaaggucugcagcaaccggguguucugcgacaccaugaacucccugacccugcccagcgaggugaaccucugcaacaucgacaucuucaaccccaaguacgacugcaagaucaugacguccaagaccgacgucagcuccagcgugaucaccucccugggcgccaucgugagcugcuacgggaagaccaagugcacggcgagcaacaagaacaagggcaucaucaagaccuucuccaacgggugcgacuacgucagcaacaagggcguggacaccguguccgucggcaacacccuguacuacgugaacaagcaggagggcaagagccucuacgugaagggggagcccaucaucaacuucuacgacccgcuggucuuccccuccgacgaguucgacgccagcaucucccaggugaacgagaagaucaaccagagccuggccuucauccggaaguccgacgagcuccugcacaacgugaacgucggcaagagcaccacgaacaucaugaucaccaccaucaucaucgugaucaucgugauccugcugcuccugaucgccgucgggcuguuccucuacugcaaggcccgcugaggacuagugaagggaacacccaaauuuaauucagccuuaagcacaauuaauuaagagugaaacguaauuguacaagcaguuggucacccaccauagggcaugaucaacaccgcaaccuuuccuuuuucccccagugauucugaaaaaccccucuucccuucagcuugcuuagauguuccaaauuuaguaagcuuaaggcggccuacagaagaaaaagaaaaaaaaggccacaaaaguucccucucacuuucaguaaauaaaauaaaagcagcaacagaaauaaagaaauaaaugaaauucaaaaugaaauaaauauuguguugugcagcauuaaaaaaucaauaaaaauuaaaaaugagcaagaucuaaaaaaaaaaaaaaaaaaaaaaaaaaaaaaaaaaaaaaaaaaaaaaaaaaaaaaaaaaaaaaaaugcaucccccccccccccccccccccccccccccccaaaggcucuuuucagagccaccagaauu

SEQ ID NO: 18979 - RNA, 2117 nt, Artificial Sequence
  mRNA product Design f-4 comprising derived and/or modified sequence from HRSV(Memphis-37)__AIY60640.1__F-del_DSCav1_mut7 (opt1)
gggagagucccgcagucggcguccagcggcucugcuuguucgugugugugucguugcaggccuuauucaagcuuaccauggagcugcccauccucaagaccaacgccaucaccacgauccuggccgcggugacccugugcuucgccagcucccagaacaucaccgaggaguucuaccagagcacgugcuccgccgucagcaagggguaccucuccgcccugcgcaccgggugguacaccagcgugaucaccaucgagcuguccaacaucaaggagaacaagugcaacggcaccgacgccaaggugaagcucaucaagcaggagcuggacaaguacaagaacgcggucacggagcugcagaugcucaugugcagcaccccggccgccggguccggcagcgccaucgcguccgggaucgccgugugcaaggugcugcaccuggagggcgaggucaacaagaucaagaacgcccuccugagcaccaacaaggccguggugucccugagcaacggcgucuccgugcucaccuucaaggugcuggaccugaagaacuacaucgacaagcagcuccugcccauccugaacaagcagagcugcuccaucagcaacaucgagacggucauggaguuccagcagaagaacaaccggcuccuggagaucacccgcgaguucuccgugaacgccggggugaccacccccgucagcacguacaugcugaccaacagcgagcuccugucccugaucaacgacaugcccaucaccaacgaccagaagaagcucaugagcaacaacgugcagaucgugcggcagcaguccuacagcaucaugugcaucaucaaggaggagguccuggcguacguggugcagcugccgcucuacggcgucaucgacacccccugcuggaagcugcacacgagcccccugugcaccaccaacaccaaggaggggagcaacaucugccucacgcgcaccgaccggggcugguacugcgacaacgccggguccgugagcuucuucccccaggccgagaccugcaaggugugcuccaaccgcgucuucugcgacaccaugaacagccugacgcugccguccgaggugaaccucugcaacaucgacaucuucaaccccaaguacgacugcaagaucaugaccagcaagaccgacgucuccagcuccgugaucaccagccugggcgccaucguguccugcuacggcaagacgaagugcaccgccagcaacaagaacaaggggaucaucaagaccuucuccaacggcugcgacuacgucagcaacaaggggguggacaccgugagcgucggcaacacgcuguacuacgugaacaagcaggagggcaagucccucuacgugaagggggagcccaucaucaacuucuacgacccccuggucuucccgagcgacgaguucgacgcguccaucagccaggugaacgagaagaucaaccagucccuggccuucauccggaaguccgacgagcuccugcacaacgugaacgucggcaaguccaccaccaacaucaugaucaccaccaucaucaucgugaucaucgugauccugcuccugcugaucgccgucggccucuuccuguacugcaaggcccgcugaggacuagugaagggaacacccaaauuuaauucagccuuaagcacaauuaauuaagagugaaacguaauuguacaagcaguuggucacccaccauagggcaugaucaacaccgcaaccuuuccuuuuucccccagugauucugaaaaaccccucuucccuucagcuugcuuagauguuccaaauuuaguaagcuuaaggcggccuacagaagaaaaagaaaaaaaaggccacaaaaguucccucucacuuucaguaaauaaaauaaaagcagcaacagaaauaaagaaauaaaugaaauucaaaaugaaauaaauauuguguugugcagcauuaaaaaaucaauaaaaauuaaaaaugagcaagaucuaaaaaaaaaaaaaaaaaaaaaaaaaaaaaaaaaaaaaaaaaaaaaaaaaaaaaaaaaaaaaaaaugcaucccccccccccccccccccccccccccccccaaaggcucuuuucagagccaccagaauu

SEQ ID NO: 18980 - RNA, 2117 nt, Artificial Sequence
  mRNA product Design f-4 comprising derived and/or modified sequence from HRSV(Memphis-37)__AIY60640.1__F-del_DSCav1_mut7 (opt2)
gggagagucccgcagucggcguccagcggcucugcuuguucgugugugugucguugcaggccuuauucaagcuuaccauggagcuccccauccucaagaccaacgccaucaccaccauccucgccgccgucacccucugcuucgccuccucccagaacaucaccgaggaguucuaccaguccaccugcuccgccgucuccaagggcuaccucuccgcccuccgcaccggcugguacaccuccgucaucaccaucgagcucuccaacaucaaggagaacaagugcaacggcaccgacgccaaggucaagcucaucaagcaggagcucgacaaguacaagaacgccgucaccgagcuccagaugcucaugugcuccacccccgccgccggcuccggcuccgccaucgccuccggcaucgccgucugcaagguccuccaccucgagggcgaggucaacaagaucaagaacgcccuccucuccaccaacaaggccgucgucucccucuccaacggcgucuccguccucaccuucaagguccucgaccucaagaacuacaucgacaagcagcuccuccccauccucaacaagcaguccugcuccaucuccaacaucgagaccgucauggaguuccagcagaagaacaaccgccuccucgagaucacccgcgaguucuccgucaacgccggcgucaccacccccgucuccaccuacaugcucaccaacuccgagcuccucucccucaucaacgacaugcccaucaccaacgaccagaagaagcucauguccaacaacguccagaucguccgccagcaguccuacuccaucaugugcaucaucaaggaggagguccucgccuacgucguccagcucccccucuacggcgucaucgacacccccugcuggaagcuccacaccuccccccucugcaccaccaacaccaaggagggcuccaacaucugccucacccgcaccgaccgcggcugguacugcgacaacgccggcuccgucuccuucuucccccaggccgagaccugcaaggucugcuccaaccgcgucuucugcgacaccaugaacucccucacccuccccuccgaggucaaccucugcaacaucgacaucuucaaccccaaguacgacugcaagaucaugaccuccaagaccgacgucuccuccuccgucaucaccucccucggcgccaucgucuccugcuacggcaagaccaagugcaccgccuccaacaagaacaagggcaucaucaagaccuucuccaacggcugcgacuacgucuccaacaagggcgucgacaccgucuccgucggcaacacccucuacuacgucaacaagcaggagggcaagucccucuacgucaagggcgagcccaucaucaacuucuacgacccccucgucuuccccuccgacgaguucgacgccuccaucucccaggucaacgagaagaucaaccagucccucgccuucauccgcaaguccgacgagcuccuccacaacgucaacgucggcaaguccaccaccaacaucaugaucaccaccaucaucaucgucaucaucgucauccuccuccuccucaucgccgucggccucuuccucuacugcaaggcccgcugaggacuagugaagggaacacccaaauuuaauucagccuuaagcacaauuaauuaagagugaaacguaauuguacaagcaguuggucacccaccauagggcaugaucaacaccgcaaccuuuccuuuuucccccagugauucugaaaaaccccucuucccuucagcuugcuuagauguuccaaauuuaguaagcuuaaggcggccuacagaagaaaaagaaaaaaaaggccacaaaaguucccucucacuuucaguaaauaaaauaaaagcagcaacagaaauaaagaaauaaaugaaauucaaaaugaaauaaauauuguguugugcagcauuaaaaaaucaauaaaaauuaaaaaugagcaagaucuaaaaaaaaaaaaaaaaaaaaaaaaaaaaaaaaaaaaaaaaaaaaaaaaaaaaaaaaaaaaaaaaugcaucccccccccccccccccccccccccccccccaaaggcucuuuucagagccaccagaauu

SEQ ID NO: 18981 - RNA, 2117 nt, Artificial Sequence
  mRNA product Design f-4 comprising derived and/or modified sequence from HRSV(Memphis-37)__AIY60640.1__F-del_DSCav1_mut7 (opt3)
gggagagucccgcagucggcguccagcggcucugcuuguucgugugugugucguugcaggccuuauucaagcuuaccauggagcugcccauccucaagaccaacgccauuacaacuauacuugcugcagugacgcugugcuucgccagcucccagaauaucaccgaagaguuuuaccaaucuacauguucagcggucaguaaaggcuauuugagcgcuuuaagaacugggugguacaccuccguuauuacaaucgaacugucuaacauuaaggagaauaaaugcaacggaaccgacgccaaggugaaacuaaucaagcaggaacucgauaaguauaaaaaugcaguaacugagcugcagaugcuuauguguucgaccccugccgcugguucaggcagcgcaauagccagugggaucgcugugugcaagguccugcacuuggagggagaagugaacaaaauuaagaaugcccuccuguccacaaacaaagcgguugugucucugagcaauggcgucuccgugcucacguucaagguauuagaccugaagaacuacaucgauaaacagcuuuugccaauucugaauaagcaaucauguaguaucagcaacauagagacuguuauggaauuucagcagaaaaauaacaggcuacucgagauuacccgggaguucucugugaaugccggugucacaacuccgguguccaccuauaugcugacaaacucagaacuucugagcuugaucaacgacaugcccauuaccaaugaucagaagaaacucaugaguaacaaugugcaaaucguccgccagcagucuuacuccaucaugugcauuauaaaggaggaaguucuggcauaugugguacaguuaccucuguacggggugaucgacacgccauguuggaaacuccauacuagcccccuuugcacaaccaacacuaaggagggaucgaauauuugucugacacgaaccgaucguggcugguacugcgacaacgcuggcucugucuccuuuuucccucaagccgaaacguguaaggugugcucaaauagaguguuuugcgauaccaugaacaguuugacacuaccaagcgagguuaaucuguguaacaucgacauauucaaucccaaauaugauugcaagauuaugacuuccaaaaccgacgucucuagcucagugaucacaagucucggggcaaucguauccuguuacggaaagacuaaaugcaccgcuagcaacaagaauaaggguauuaucaaaacauuuucuaacggcugugauuauguuucaaauaaggggguggacaccgucagugugggaaacacucuguacuaugucaacaaacaggagggcaagagccuuuacgugaaaggugaaccuauuauaaauuucuaugacccacugguuuuuccguccgaugaguucgacgccucuaucagccaggugaacgaaaagauuaaucaaucguuggcguuuaucaggaaguccgaugagcuccugcacaacguaaaugucgggaaaucaacgacaaacaucaugauuaccacuauaaucauugugaucauuguuaucuuacugcuacucauagccgugggacuguuccuuuacugcaaggcacggugaggacuagugaagggaacacccaaauuuaauucagccuuaagcacaauuaauuaagagugaaacguaauuguacaagcaguuggucacccaccauagggcaugaucaacaccgcaaccuuuccuuuuucccccagugauucugaaaaaccccucuucccuucagcuugcuuagauguuccaaauuuaguaagcuuaaggcggccuacagaagaaaaagaaaaaaaaggccacaaaaguucccucucacuuucaguaaauaaaauaaaagcagcaacagaaauaaagaaauaaaugaaauucaaaaugaaauaaauauuguguugugcagcauuaaaaaaucaauaaaaauuaaaaaugagcaagaucuaaaaaaaaaaaaaaaaaaaaaaaaaaaaaaaaaaaaaaaaaaaaaaaaaaaaaaaaaaaaaaaaugcaucccccccccccccccccccccccccccccccaaaggcucuuuucagagccaccagaauu

SEQ ID NO: 18982 - RNA, 2117 nt, Artificial Sequence
  mRNA product Design f-4 comprising derived and/or modified sequence from HRSV(Memphis-37)__AIY60640.1__F-del_DSCav1_mut7 (opt4)
gggagagucccgcagucggcguccagcggcucugcuuguucgugugugugucguugcaggccuuauucaagcuuaccauggagcugcccauccugaagaccaacgccaucaccaccauccuggccgccgugacccugugcuucgccagcagccagaacaucaccgaggaguucuaccagagcaccugcagcgccgugagcaagggcuaccugagcgcccugagaaccggcugguacaccagcgugaucaccaucgagcugagcaacaucaaggagaacaagugcaacggcaccgacgccaaggugaagcugaucaagcaggagcuggacaaguacaagaacgccgugaccgagcugcagaugcugaugugcagcacccccgccgccggcagcggcagcgccaucgccagcggcaucgccgugugcaaggugcugcaccuggagggcgaggugaacaagaucaagaacgcccugcugagcaccaacaaggccguggugagccugagcaacggcgugagcgugcugaccuucaaggugcuggaccugaagaacuacaucgacaagcagcugcugcccauccugaacaagcagagcugcagcaucagcaacaucgagaccgugauggaguuccagcagaagaacaacagacugcuggagaucaccagagaguucagcgugaacgccggcgugaccacccccgugagcaccuacaugcugaccaacagcgagcugcugagccugaucaacgacaugcccaucaccaacgaccagaagaagcugaugagcaacaacgugcagaucgugagacagcagagcuacagcaucaugugcaucaucaaggaggaggugcuggccuacguggugcagcugccccuguacggcgugaucgacacccccugcuggaagcugcacaccagcccccugugcaccaccaacaccaaggagggcagcaacaucugccugaccagaaccgacagaggcugguacugcgacaacgccggcagcgugagcuucuucccccaggccgagaccugcaaggugugcagcaacagaguguucugcgacaccaugaacagccugacccugcccagcgaggugaaccugugcaacaucgacaucuucaaccccaaguacgacugcaagaucaugaccagcaagaccgacgugagcagcagcgugaucaccagccugggcgccaucgugagcugcuacggcaagaccaagugcaccgccagcaacaagaacaagggcaucaucaagaccuucagcaacggcugcgacuacgugagcaacaagggcguggacaccgugagcgugggcaacacccuguacuacgugaacaagcaggagggcaagagccuguacgugaagggcgagcccaucaucaacuucuacgacccccugguguuccccagcgacgaguucgacgccagcaucagccaggugaacgagaagaucaaccagagccuggccuucaucagaaagagcgacgagcugcugcacaacgugaacgugggcaagagcaccaccaacaucaugaucaccaccaucaucaucgugaucaucgugauccugcugcugcugaucgccgugggccuguuccuguacugcaaggccagaugaggacuagugaagggaacacccaaauuuaauucagccuuaagcacaauuaauuaagagugaaacguaauuguacaagcaguuggucacccaccauagggcaugaucaacaccgcaaccuuuccuuuuucccccagugauucugaaaaaccccucuucccuucagcuugcuuagauguuccaaauuuaguaagcuuaaggcggccuacagaagaaaaagaaaaaaaaggccacaaaaguucccucucacuuucaguaaauaaaauaaaagcagcaacagaaauaaagaaauaaaugaaauucaaaaugaaauaaauauuguguugugcagcauuaaaaaaucaauaaaaauuaaaaaugagcaagaucuaaaaaaaaaaaaaaaaaaaaaaaaaaaaaaaaaaaaaaaaaaaaaaaaaaaaaaaaaaaaaaaaugcaucccccccccccccccccccccccccccccccaaaggcucuuuucagagccaccagaauu

SEQ ID NO: 18983 - RNA, 2117 nt, Artificial Sequence
  mRNA product Design f-4 comprising derived and/or modified sequence from HRSV(Memphis-37)__AIY60640.1__F-del_DSCav1_mut7 (opt5)
gggagagucccgcagucggcguccagcggcucugcuuguucgugugugugucguugcaggccuuauucaagcuuaccauggagcugcccauccucaagaccaacgccauuacaacgauccuggcugccgugacccuuugcuucgcgagcucccagaauauuacagaagaguuuuaccaaucuaccuguagcgcugucuccaaaggcuaucugucugcccucagaacagggugguacaccagcguuaucacaauugaacuguccaacaucaaggagaauaaaugcaacggaaccgacgccaaggugaaacuuaucaagcaggaacuggauaaguauaaaaaugcugugacggagcuccagaugcugauguguucuaccccugccgcuggcagcggguccgccauugcgagcggaaucgccgucugcaaggugcugcaccucgagggcgaaguuaacaaaauuaagaaugcucugcuuucuacaaacaaagccguggucucccugagcaauggggugucuguucucaccuucaaggugcuggaccuuaagaacuacaucgauaaacagcugcucccgauucugaauaagcaauccuguagcaucucuaacauugagacagucauggaauuucagcagaaaaauaaccggcugcucgagaucacccgcgaguucuccgugaaugcuggagugacgacacccgucagcaccuauaugcugacaaacuccgaacuucugucucucaucaacgacaugccuauuaccaaugaucagaagaaacugaugagcaacaauguucaaaucgugagacagcaguccuacagcauuaugugcaucauuaaggaggaagugcuugccuaugucgugcagcugccccucuacggcguuaucgacaccccuuguuggaaacugcauacaucuccccugugcacgaccaacacaaaggagggcuccaauaucugucucacccggacagaucgcgggugguacugcgacaacgcgggaagcgugagcuuuuucccucaagccgaaaccuguaaggucugcucuaauagaguguuuugcgauacgaugaacucccugacacuuccgucugagguuaaucuguguaacauugacaucuucaaucccaaauaugauugcaagauuaugaccagcaaaaccgacguguccagcucugucaucacaucccucggcgcuauugugagcuguuacgggaagaccaaaugcacagccucuaacaagaauaagggaaucaucaaaacguuuuccaacggcugugauuaugucagcaauaaggggguggacaccguuuccgugggaaacacacuguacuaugucaacaaacaggagggcaagucucuuuacgugaaaggcgaaccuauuaucaauuucuaugacccccugguuuuuccuagcgaugaguucgacgcuuccauuucucaggugaacgaaaagaucaaucaaagccucgccuuuauucggaaguccgaugagcugcugcacaacgucaauguggggaaaagcaccacaaacaucaugauuaccacgaucaucauugugaucauuguuauccuccugcuucugauugccgucggacucuuccuguacugcaaggcucgcugaggacuagugaagggaacacccaaauuuaauucagccuuaagcacaauuaauuaagagugaaacguaauuguacaagcaguuggucacccaccauagggcaugaucaacaccgcaaccuuuccuuuuucccccagugauucugaaaaaccccucuucccuucagcuugcuuagauguuccaaauuuaguaagcuuaaggcggccuacagaagaaaaagaaaaaaaaggccacaaaaguucccucucacuuucaguaaauaaaauaaaagcagcaacagaaauaaagaaauaaaugaaauucaaaaugaaauaaauauuguguugugcagcauuaaaaaaucaauaaaaauuaaaaaugagcaagaucuaaaaaaaaaaaaaaaaaaaaaaaaaaaaaaaaaaaaaaaaaaaaaaaaaaaaaaaaaaaaaaaaugcaucccccccccccccccccccccccccccccccaaaggcucuuuucagagccaccagaauu

SEQ ID NO: 18984 - RNA, 2117 nt, Artificial Sequence
  mRNA product Design f-4 comprising derived and/or modified sequence from HRSV(Memphis-37)__AIY60640.1__F-del_DSCav1_mut7 (opt6)
gggagagucccgcagucggcguccagcggcucugcuuguucgugugugugucguugcaggccuuauucaagcuuaccauggaacuaccaauacucaaaacaaacgccauaaccacaauacuagccgcaguaacacuuugcuuugccucaagucaaaacauaacagaagaauuuuaccaauccacaugcucagcuguauccaaaggauauuuauccgcacuaagaacaggaugguacacaucaguaaucacaauagaauuaucaaacauaaaagaaaacaaauguaauggcacagacgccaaaguaaaacuaauuaaacaagaacuagacaaauauaaaaaugcaguaaccgaacuccaaaugcucaugugcucuacaccagcugcaggaucaggaucagccauugcaagcgguauagcuguuugcaaaguauuacacuuagaaggagaaguaaauaaaauaaaaaacgcacuacuaucaacaaauaaagcaguaguaucccuaucaaacggaguaucaguacuuacauucaaaguauuagauuuaaaaaacuauauagacaaacaacuacuucccauauuaaacaaacaaucaugcucaauuuccaacauugaaacuguaauggaauuucaacaaaaaaacaacagacuacuugaaaucacacgagaauuuucaguaaacgcuggaguaacaacaccugucucuaccuacaugcucacaaauagcgaauuacuaucucuaaucaaugacaugccaauaacaaacgaucaaaaaaaacuaauguccaacaacguacaaauaguaagacaacaauccuauucaauaaugugcauaauaaaagaagaagucuuagcauacguuguacaacuaccauuauacggaguaauagauacaccaugcuggaaacuccacacaagcccccucugcacaacaaacaccaaagaagggucaaacauaugcuuaacaagaacagacagaggaugguacugugauaacgcaggaucugucucauucuuuccacaagcagaaacauguaaaguaugcuccaacagagucuuuugcgacaccaugaacucacuaaccuuacccucagaaguaaaccugugcaacaucgauaucuucaaccccaaauacgauugcaaaaucaugacaagcaaaacugauguauccagcucuguaauaacaucacuaggugcaauaguaucaugcuacggaaaaacaaaaugcacagcuucuaacaaaaauaaaggaauaauaaaaacauucuccaauggaugcgacuaugucucaaauaaaggaguagauacaguuucagucggcaacacacucuauuauguaaauaaacaagaaggaaaaucauuauacguaaaaggagaacccauaauaaacuucuacgacccccucguauucccaagcgacgaauuugacgccucaauaucacaaguaaacgaaaaaauaaaccaaucacucgcauucaucagaaaaucagaugaacuacuacacaauguaaacgucggaaaauccaccacaaauauaaugauaacuaccaucauaauaguaauaauagucaucuuacuacuauuaaucgcuguaggacuauuucucuacugcaaggccagauaaggacuagugaagggaacacccaaauuuaauucagccuuaagcacaauuaauuaagagugaaacguaauuguacaagcaguuggucacccaccauagggcaugaucaacaccgcaaccuuuccuuuuucccccagugauucugaaaaaccccucuucccuucagcuugcuuagauguuccaaauuuaguaagcuuaaggcggccuacagaagaaaaagaaaaaaaaggccacaaaaguucccucucacuuucaguaaauaaaauaaaagcagcaacagaaauaaagaaauaaaugaaauucaaaaugaaauaaauauuguguugugcagcauuaaaaaaucaauaaaaauuaaaaaugagcaagaucuaaaaaaaaaaaaaaaaaaaaaaaaaaaaaaaaaaaaaaaaaaaaaaaaaaaaaaaaaaaaaaaaugcaucccccccccccccccccccccccccccccccaaaggcucuuuucagagccaccagaauu

SEQ ID NO: 18985 - RNA, 2117 nt, Artificial Sequence
  mRNA product Design f-4 comprising derived and/or modified sequence from HRSV(Memphis-37)__AIY60640.1__F-del_DSCav1_mut7 (opt11)
gggagagucccgcagucggcguccagcggcucugcuuguucgugugugugucguugcaggccuuauucaagcuuaccauggaacucccaauccucaaaacaaaugccaucaccaccauccuagccgcugucacacuaugcuucgccuccucacaaaacaucaccgaagaguucuaucaauccacaugcuccgccgucagcaagggauaccucuccgcccuuagaaccggcugguacaccucagucaucacaauugaacugucaaacaucaaagaaaacaaaugcaacggcaccgacgcaaaaguaaagcucaucaaacaagaacuggacaaguacaagaacgccgucaccgaacuacagaugcuuaugugcucaaccccugccgccggcuccggaucugccauagcuucaggcaucgccguaugcaaaguccugcaccuagaaggggaagucaacaaaaucaaaaacgcccuccucuccaccaacaaggccguugucucccugucaaacggagucuccguccuaaccuucaaaguccucgaccucaaaaacuacauagacaaacaacuccuacccauccucaacaaacaaagcugcucaauauccaacaucgaaaccgucauggaguuccaacaaaagaacaaccgacuacucgaaauaacacgcgaguucucagucaacgccggcgucaccaccccagucuccacauacaugcucaccaacuccgaacuccuaucgcucaucaacgacaugcccaucaccaaugaccagaagaaacucauguccaacaacguacaaaucguccgccaacaguccuacucaaucaugugcaucaucaaagaagaaguccuugccuacgucguccagcuuccacucuacggagucaucgacacccccugcuggaaacuccacaccuccccacuaugcaccaccaacaccaaagaaggauccaacauaugccucacccguacugaccgcggcugguacugcgacaacgccggauccgucucauucuucccccaggccgaaaccugcaaagucugcuccaaccgcgucuucugcgacaccaugaacucgcucacccucccauccgaagucaaucuaugcaacaucgacauuuucaaccccaaauacgacugcaaaauuaugacaucaaaaaccgacgucucauccucagucaucacuucccucggcgcaaucguaagcugcuacgggaaaacaaagugcaccgcuuccaacaaaaacaaaggcaucaucaaaaccuucucuaacggcugcgacuacgucuccaacaaaggagucgacaccguauccgucggcaacacccucuacuacgucaacaaacaggaaggaaaaucgcucuacgucaaaggagaaccaaucaucaacuucuacgacccccuagucuucccauccgacgaguucgacgccagcaucucacaagucaaugaaaagaucaaccagucacucgcauucauccguaagucagacgaacuccuacacaacgucaacgucggcaagucaacaaccaacauaaugaucaccaccauaaucaucgucauaauaguaauccuccuucuccuaaucgcagucggccucuuccucuacugcaaagcacgcuaaggacuagugaagggaacacccaaauuuaauucagccuuaagcacaauuaauuaagagugaaacguaauuguacaagcaguuggucacccaccauagggcaugaucaacaccgcaaccuuuccuuuuucccccagugauucugaaaaaccccucuucccuucagcuugcuuagauguuccaaauuuaguaagcuuaaggcggccuacagaagaaaaagaaaaaaaaggccacaaaaguucccucucacuuucaguaaauaaaauaaaagcagcaacagaaauaaagaaauaaaugaaauucaaaaugaaauaaauauuguguugugcagcauuaaaaaaucaauaaaaauuaaaaaugagcaagaucuaaaaaaaaaaaaaaaaaaaaaaaaaaaaaaaaaaaaaaaaaaaaaaaaaaaaaaaaaaaaaaaaugcaucccccccccccccccccccccccccccccccaaaggcucuuuucagagccaccagaauu

SEQ ID NO: 18986 - RNA, 1893 nt, Artificial Sequence
  mRNA product Design f-5 comprising derived and/or modified sequence from HRSV(Memphis-37)__AIY60640.1__F-del_DSCav1_mut7 (opt1)
gggagacuuucccauucuguagcagaauuugguguugccuguggucuuggucccgcggagaagcuuaccauggagcugcccauccucaagaccaacgccaucaccacgauccuggccgcggugacccugugcuucgccagcucccagaacaucaccgaggaguucuaccagagcacgugcuccgccgucagcaagggcuaccucuccgcccugcgcaccgggugguacaccagcgugaucaccaucgagcuguccaacaucaaggagaacaagugcaacggcaccgacgccaaggugaagcucaucaagcaggagcuggacaaguacaagaacgcggucacggagcugcagaugcugaugugcagcaccccggccgccggcuccgggagcgcgaucgccuccggcaucgccgucugcaaggugcugcaccucgagggcgaggugaacaagaucaagaacgcccugcuguccaccaacaaggccgucgugagccucuccaacggggugagcguccugaccuucaaggugcuggaccucaagaacuacaucgacaagcagcugcugcccauccugaacaagcagagcugcuccaucagcaacaucgagaccgucauggaguuccagcagaagaacaaccgccuccuggagaucacgcgggaguucagcgugaacgcgggcgugaccacccccgucuccaccuacaugcugacgaacagcgagcuccugucccugaucaacgacaugccgaucaccaacgaccagaagaagcucaugagcaacaacgugcagaucgugcgccagcaguccuacagcaucaugugcaucaucaaggaggagguccuggccuacguggugcagcugccccucuacggggucaucgacacccccugcuggaagcugcacaccagcccccugugcacgaccaacaccaaggagggcuccaacaucugccucacccggacggaccgcgggugguacugcgacaacgccggcagcguguccuucuucccgcaggccgagaccugcaaggucugcagcaaccggguguucugcgacaccaugaacucccugacccugcccagcgaggugaaccucugcaacaucgacaucuucaaccccaaguacgacugcaagaucaugacguccaagaccgacgucagcuccagcgugaucaccucccugggcgccaucgugagcugcuacgggaagaccaagugcacggcgagcaacaagaacaagggcaucaucaagaccuucuccaacgggugcgacuacgucagcaacaagggcguggacaccguguccgucggcaacacccuguacuacgugaacaagcaggagggcaagagccucuacgugaagggggagcccaucaucaacuucuacgacccgcuggucuuccccuccgacgaguucgacgccagcaucucccaggugaacgagaagaucaaccagagccuggccuucauccggaaguccgacgagcuccugcacaacgugaacgucggcaagagcaccacgaacaucaugaucaccaccaucaucaucgugaucaucgugauccugcugcuccugaucgccgucgggcuguuccucuacugcaaggcccgcugaggacuaguacuggcugcaucucccuuuccucuguccuccauccuucucccaggauggugaagggggaccugguacccagugauccccaccccaggauccuaaaucaugacuuaccugcuaauaaaaacucauuggaaaagugagaagaucuaaaaaaaaaaaaaaaaaaaaaaaaaaaaaaaaaaaaaaaaaaaaaaaaaaaaaaaaaaaaaaaaugcaucccccccccccccccccccccccccccccccaaaggcucuuuucagagccaccagaauu

SEQ ID NO: 18987 - RNA, 1893 nt, Artificial Sequence
  mRNA product Design f-5 comprising derived and/or modified sequence from HRSV(Memphis-37)__AIY60640.1__F-del_DSCav1_mut7 (opt1)
gggagacuuucccauucuguagcagaauuugguguugccuguggucuuggucccgcggagaagcuuaccauggagcugcccauccucaagaccaacgccaucaccacgauccuggccgcggugacccugugcuucgccagcucccagaacaucaccgaggaguucuaccagagcacgugcuccgccgucagcaagggguaccucuccgcccugcgcaccgggugguacaccagcgugaucaccaucgagcuguccaacaucaaggagaacaagugcaacggcaccgacgccaaggugaagcucaucaagcaggagcuggacaaguacaagaacgcggucacggagcugcagaugcucaugugcagcaccccggccgccggguccggcagcgccaucgcguccgggaucgccgugugcaaggugcugcaccuggagggcgaggucaacaagaucaagaacgcccuccugagcaccaacaaggccguggugucccugagcaacggcgucuccgugcucaccuucaaggugcuggaccugaagaacuacaucgacaagcagcuccugcccauccugaacaagcagagcugcuccaucagcaacaucgagacggucauggaguuccagcagaagaacaaccggcuccuggagaucacccgcgaguucuccgugaacgccggggugaccacccccgucagcacguacaugcugaccaacagcgagcuccugucccugaucaacgacaugcccaucaccaacgaccagaagaagcucaugagcaacaacgugcagaucgugcggcagcaguccuacagcaucaugugcaucaucaaggaggagguccuggcguacguggugcagcugccgcucuacggcgucaucgacacccccugcuggaagcugcacacgagcccccugugcaccaccaacaccaaggaggggagcaacaucugccucacgcgcaccgaccggggcugguacugcgacaacgccggguccgugagcuucuucccccaggccgagaccugcaaggugugcuccaaccgcgucuucugcgacaccaugaacagccugacgcugccguccgaggugaaccucugcaacaucgacaucuucaaccccaaguacgacugcaagaucaugaccagcaagaccgacgucuccagcuccgugaucaccagccugggcgccaucguguccugcuacggcaagacgaagugcaccgccagcaacaagaacaaggggaucaucaagaccuucuccaacggcugcgacuacgucagcaacaaggggguggacaccgugagcgucggcaacacgcuguacuacgugaacaagcaggagggcaagucccucuacgugaagggggagcccaucaucaacuucuacgacccccuggucuucccgagcgacgaguucgacgcguccaucagccaggugaacgagaagaucaaccagucccuggccuucauccggaaguccgacgagcuccugcacaacgugaacgucggcaaguccaccaccaacaucaugaucaccaccaucaucaucgugaucaucgugauccugcuccugcugaucgccgucggccucuuccuguacugcaaggcccgcugaggacuaguacuggcugcaucucccuuuccucuguccuccauccuucucccaggauggugaagggggaccugguacccagugauccccaccccaggauccuaaaucaugacuuaccugcuaauaaaaacucauuggaaaagugagaagaucuaaaaaaaaaaaaaaaaaaaaaaaaaaaaaaaaaaaaaaaaaaaaaaaaaaaaaaaaaaaaaaaaugcaucccccccccccccccccccccccccccccccaaaggcucuuuucagagccaccagaauu

SEQ ID NO: 18988 - RNA, 1893 nt, Artificial Sequence
  mRNA product Design f-5 comprising derived and/or modified sequence from HRSV(Memphis-37)__AIY60640.1__F-del_DSCav1_mut7 (opt2)
gggagacuuucccauucuguagcagaauuugguguugccuguggucuuggucccgcggagaagcuuaccauggagcuccccauccucaagaccaacgccaucaccaccauccucgccgccgucacccucugcuucgccuccucccagaacaucaccgaggaguucuaccaguccaccugcuccgccgucuccaagggcuaccucuccgcccuccgcaccggcugguacaccuccgucaucaccaucgagcucuccaacaucaaggagaacaagugcaacggcaccgacgccaaggucaagcucaucaagcaggagcucgacaaguacaagaacgccgucaccgagcuccagaugcucaugugcuccacccccgccgccggcuccggcuccgccaucgccuccggcaucgccgucugcaagguccuccaccucgagggcgaggucaacaagaucaagaacgcccuccucuccaccaacaaggccgucgucucccucuccaacggcgucuccguccucaccuucaagguccucgaccucaagaacuacaucgacaagcagcuccuccccauccucaacaagcaguccugcuccaucuccaacaucgagaccgucauggaguuccagcagaagaacaaccgccuccucgagaucacccgcgaguucuccgucaacgccggcgucaccacccccgucuccaccuacaugcucaccaacuccgagcuccucucccucaucaacgacaugcccaucaccaacgaccagaagaagcucauguccaacaacguccagaucguccgccagcaguccuacuccaucaugugcaucaucaaggaggagguccucgccuacgucguccagcucccccucuacggcgucaucgacacccccugcuggaagcuccacaccuccccccucugcaccaccaacaccaaggagggcuccaacaucugccucacccgcaccgaccgcggcugguacugcgacaacgccggcuccgucuccuucuucccccaggccgagaccugcaaggucugcuccaaccgcgucuucugcgacaccaugaacucccucacccuccccuccgaggucaaccucugcaacaucgacaucuucaaccccaaguacgacugcaagaucaugaccuccaagaccgacgucuccuccuccgucaucaccucccucggcgccaucgucuccugcuacggcaagaccaagugcaccgccuccaacaagaacaagggcaucaucaagaccuucuccaacggcugcgacuacgucuccaacaagggcgucgacaccgucuccgucggcaacacccucuacuacgucaacaagcaggagggcaagucccucuacgucaagggcgagcccaucaucaacuucuacgacccccucgucuuccccuccgacgaguucgacgccuccaucucccaggucaacgagaagaucaaccagucccucgccuucauccgcaaguccgacgagcuccuccacaacgucaacgucggcaaguccaccaccaacaucaugaucaccaccaucaucaucgucaucaucgucauccuccuccuccucaucgccgucggccucuuccucuacugcaaggcccgcugaggacuaguacuggcugcaucucccuuuccucuguccuccauccuucucccaggauggugaagggggaccugguacccagugauccccaccccaggauccuaaaucaugacuuaccugcuaauaaaaacucauuggaaaagugagaagaucuaaaaaaaaaaaaaaaaaaaaaaaaaaaaaaaaaaaaaaaaaaaaaaaaaaaaaaaaaaaaaaaaugcaucccccccccccccccccccccccccccccccaaaggcucuuuucagagccaccagaauu

SEQ ID NO: 18989 - RNA, 1893 nt, Artificial Sequence
  mRNA product Design f-5 comprising derived and/or modified sequence from HRSV(Memphis-37)__AIY60640.1__F-del_DSCav1_mut7 (opt3)
gggagacuuucccauucuguagcagaauuugguguugccuguggucuuggucccgcggagaagcuuaccauggagcugcccauccucaagaccaacgccauuacaacuauacuugcugcagugacgcugugcuucgccagcucccagaauaucaccgaagaguuuuaccaaucuacauguucagcggucaguaaaggcuauuugagcgcuuuaagaacugggugguacaccuccguuauuacaaucgaacugucuaacauuaaggagaauaaaugcaacggaaccgacgccaaggugaaacuaaucaagcaggaacucgauaaguauaaaaaugcaguaacugagcugcagaugcuuauguguucgaccccugccgcugguucaggcagcgcaauagccagugggaucgcugugugcaagguccugcacuuggagggagaagugaacaaaauuaagaaugcccuccuguccacaaacaaagcgguugugucucugagcaauggcgucuccgugcucacguucaagguauuagaccugaagaacuacaucgauaaacagcuuuugccaauucugaauaagcaaucauguaguaucagcaacauagagacuguuauggaauuucagcagaaaaauaacaggcuacucgagauuacccgggaguucucugugaaugccggugucacaacuccgguguccaccuauaugcugacaaacucagaacuucugagcuugaucaacgacaugcccauuaccaaugaucagaagaaacucaugaguaacaaugugcaaaucguccgccagcagucuuacuccaucaugugcauuauaaaggaggaaguucuggcauaugugguacaguuaccucuguacggggugaucgacacgccauguuggaaacuccauacuagcccccuuugcacaaccaacacuaaggagggaucgaauauuugucugacacgaaccgaucguggcugguacugcgacaacgcuggcucugucuccuuuuucccucaagccgaaacguguaaggugugcucaaauagaguguuuugcgauaccaugaacaguuugacacuaccaagcgagguuaaucuguguaacaucgacauauucaaucccaaauaugauugcaagauuaugacuuccaaaaccgacgucucuagcucagugaucacaagucucggggcaaucguauccuguuacggaaagacuaaaugcaccgcuagcaacaagaauaaggguauuaucaaaacauuuucuaacggcugugauuauguuucaaauaaggggguggacaccgucagugugggaaacacucuguacuaugucaacaaacaggagggcaagagccuuuacgugaaaggugaaccuauuauaaauuucuaugacccacugguuuuuccguccgaugaguucgacgccucuaucagccaggugaacgaaaagauuaaucaaucguuggcguuuaucaggaaguccgaugagcuccugcacaacguaaaugucgggaaaucaacgacaaacaucaugauuaccacuauaaucauugugaucauuguuaucuuacugcuacucauagccgugggacuguuccuuuacugcaaggcacggugaggacuaguacuggcugcaucucccuuuccucuguccuccauccuucucccaggauggugaagggggaccugguacccagugauccccaccccaggauccuaaaucaugacuuaccugcuaauaaaaacucauuggaaaagugagaagaucuaaaaaaaaaaaaaaaaaaaaaaaaaaaaaaaaaaaaaaaaaaaaaaaaaaaaaaaaaaaaaaaaugcaucccccccccccccccccccccccccccccccaaaggcucuuuucagagccaccagaauu

SEQ ID NO: 18990 - RNA, 1893 nt, Artificial Sequence
  mRNA product Design f-5 comprising derived and/or modified sequence from HRSV(Memphis-37)__AIY60640.1__F-del_DSCav1_mut7 (opt4)
gggagacuuucccauucuguagcagaauuugguguugccuguggucuuggucccgcggagaagcuuaccauggagcugcccauccugaagaccaacgccaucaccaccauccuggccgccgugacccugugcuucgccagcagccagaacaucaccgaggaguucuaccagagcaccugcagcgccgugagcaagggcuaccugagcgcccugagaaccggcugguacaccagcgugaucaccaucgagcugagcaacaucaaggagaacaagugcaacggcaccgacgccaaggugaagcugaucaagcaggagcuggacaaguacaagaacgccgugaccgagcugcagaugcugaugugcagcacccccgccgccggcagcggcagcgccaucgccagcggcaucgccgugugcaaggugcugcaccuggagggcgaggugaacaagaucaagaacgcccugcugagcaccaacaaggccguggugagccugagcaacggcgugagcgugcugaccuucaaggugcuggaccugaagaacuacaucgacaagcagcugcugcccauccugaacaagcagagcugcagcaucagcaacaucgagaccgugauggaguuccagcagaagaacaacagacugcuggagaucaccagagaguucagcgugaacgccggcgugaccacccccgugagcaccuacaugcugaccaacagcgagcugcugagccugaucaacgacaugcccaucaccaacgaccagaagaagcugaugagcaacaacgugcagaucgugagacagcagagcuacagcaucaugugcaucaucaaggaggaggugcuggccuacguggugcagcugccccuguacggcgugaucgacacccccugcuggaagcugcacaccagcccccugugcaccaccaacaccaaggagggcagcaacaucugccugaccagaaccgacagaggcugguacugcgacaacgccggcagcgugagcuucuucccccaggccgagaccugcaaggugugcagcaacagaguguucugcgacaccaugaacagccugacccugcccagcgaggugaaccugugcaacaucgacaucuucaaccccaaguacgacugcaagaucaugaccagcaagaccgacgugagcagcagcgugaucaccagccugggcgccaucgugagcugcuacggcaagaccaagugcaccgccagcaacaagaacaagggcaucaucaagaccuucagcaacggcugcgacuacgugagcaacaagggcguggacaccgugagcgugggcaacacccuguacuacgugaacaagcaggagggcaagagccuguacgugaagggcgagcccaucaucaacuucuacgacccccugguguuccccagcgacgaguucgacgccagcaucagccaggugaacgagaagaucaaccagagccuggccuucaucagaaagagcgacgagcugcugcacaacgugaacgugggcaagagcaccaccaacaucaugaucaccaccaucaucaucgugaucaucgugauccugcugcugcugaucgccgugggccuguuccuguacugcaaggccagaugaggacuaguacuggcugcaucucccuuuccucuguccuccauccuucucccaggauggugaagggggaccugguacccagugauccccaccccaggauccuaaaucaugacuuaccugcuaauaaaaacucauuggaaaagugagaagaucuaaaaaaaaaaaaaaaaaaaaaaaaaaaaaaaaaaaaaaaaaaaaaaaaaaaaaaaaaaaaaaaaugcaucccccccccccccccccccccccccccccccaaaggcucuuuucagagccaccagaauu

SEQ ID NO: 18991 - RNA, 1893 nt, Artificial Sequence
  mRNA product Design f-5 comprising derived and/or modified sequence from HRSV(Memphis-37)__AIY60640.1__F-del_DSCav1_mut7 (opt5)
gggagacuuucccauucuguagcagaauuugguguugccuguggucuuggucccgcggagaagcuuaccauggagcugcccauccucaagaccaacgccauuacaacgauccuggcugccgugacccuuugcuucgcgagcucccagaauauuacagaagaguuuuaccaaucuaccuguagcgcugucuccaaaggcuaucugucugcccucagaacagggugguacaccagcguuaucacaauugaacuguccaacaucaaggagaauaaaugcaacggaaccgacgccaaggugaaacuuaucaagcaggaacuggauaaguauaaaaaugcugugacggagcuccagaugcugauguguucuaccccugccgcuggcagcggguccgccauugcgagcggaaucgccgucugcaaggugcugcaccucgagggcgaaguuaacaaaauuaagaaugcucugcuuucuacaaacaaagccguggucucccugagcaauggggugucuguucucaccuucaaggugcuggaccuuaagaacuacaucgauaaacagcugcucccgauucugaauaagcaauccuguagcaucucuaacauugagacagucauggaauuucagcagaaaaauaaccggcugcucgagaucacccgcgaguucuccgugaaugcuggagugacgacacccgucagcaccuauaugcugacaaacuccgaacuucugucucucaucaacgacaugccuauuaccaaugaucagaagaaacugaugagcaacaauguucaaaucgugagacagcaguccuacagcauuaugugcaucauuaaggaggaagugcuugccuaugucgugcagcugccccucuacggcguuaucgacaccccuuguuggaaacugcauacaucuccccugugcacgaccaacacaaaggagggcuccaauaucugucucacccggacagaucgcgggugguacugcgacaacgcgggaagcgugagcuuuuucccucaagccgaaaccuguaaggucugcucuaauagaguguuuugcgauacgaugaacucccugacacuuccgucugagguuaaucuguguaacauugacaucuucaaucccaaauaugauugcaagauuaugaccagcaaaaccgacguguccagcucugucaucacaucccucggcgcuauugugagcuguuacgggaagaccaaaugcacagccucuaacaagaauaagggaaucaucaaaacguuuuccaacggcugugauuaugucagcaauaaggggguggacaccguuuccgugggaaacacacuguacuaugucaacaaacaggagggcaagucucuuuacgugaaaggcgaaccuauuaucaauuucuaugacccccugguuuuuccuagcgaugaguucgacgcuuccauuucucaggugaacgaaaagaucaaucaaagccucgccuuuauucggaaguccgaugagcugcugcacaacgucaauguggggaaaagcaccacaaacaucaugauuaccacgaucaucauugugaucauuguuauccuccugcuucugauugccgucggacucuuccuguacugcaaggcucgcugaggacuaguacuggcugcaucucccuuuccucuguccuccauccuucucccaggauggugaagggggaccugguacccagugauccccaccccaggauccuaaaucaugacuuaccugcuaauaaaaacucauuggaaaagugagaagaucuaaaaaaaaaaaaaaaaaaaaaaaaaaaaaaaaaaaaaaaaaaaaaaaaaaaaaaaaaaaaaaaaugcaucccccccccccccccccccccccccccccccaaaggcucuuuucagagccaccagaauu

SEQ ID NO: 18992 - RNA, 1893 nt, Artificial Sequence
  mRNA product Design f-5 comprising derived and/or modified sequence from HRSV(Memphis-37)__AIY60640.1__F-del_DSCav1_mut7 (opt6)
gggagacuuucccauucuguagcagaauuugguguugccuguggucuuggucccgcggagaagcuuaccauggaacuaccaauacucaaaacaaacgccauaaccacaauacuagccgcaguaacacuuugcuuugccucaagucaaaacauaacagaagaauuuuaccaauccacaugcucagcuguauccaaaggauauuuauccgcacuaagaacaggaugguacacaucaguaaucacaauagaauuaucaaacauaaaagaaaacaaauguaauggcacagacgccaaaguaaaacuaauuaaacaagaacuagacaaauauaaaaaugcaguaaccgaacuccaaaugcucaugugcucuacaccagcugcaggaucaggaucagccauugcaagcgguauagcuguuugcaaaguauuacacuuagaaggagaaguaaauaaaauaaaaaacgcacuacuaucaacaaauaaagcaguaguaucccuaucaaacggaguaucaguacuuacauucaaaguauuagauuuaaaaaacuauauagacaaacaacuacuucccauauuaaacaaacaaucaugcucaauuuccaacauugaaacuguaauggaauuucaacaaaaaaacaacagacuacuugaaaucacacgagaauuuucaguaaacgcuggaguaacaacaccugucucuaccuacaugcucacaaauagcgaauuacuaucucuaaucaaugacaugccaauaacaaacgaucaaaaaaaacuaauguccaacaacguacaaauaguaagacaacaauccuauucaauaaugugcauaauaaaagaagaagucuuagcauacguuguacaacuaccauuauacggaguaauagauacaccaugcuggaaacuccacacaagcccccucugcacaacaaacaccaaagaagggucaaacauaugcuuaacaagaacagacagaggaugguacugugauaacgcaggaucugucucauucuuuccacaagcagaaacauguaaaguaugcuccaacagagucuuuugcgacaccaugaacucacuaaccuuacccucagaaguaaaccugugcaacaucgauaucuucaaccccaaauacgauugcaaaaucaugacaagcaaaacugauguauccagcucuguaauaacaucacuaggugcaauaguaucaugcuacggaaaaacaaaaugcacagcuucuaacaaaaauaaaggaauaauaaaaacauucuccaauggaugcgacuaugucucaaauaaaggaguagauacaguuucagucggcaacacacucuauuauguaaauaaacaagaaggaaaaucauuauacguaaaaggagaacccauaauaaacuucuacgacccccucguauucccaagcgacgaauuugacgccucaauaucacaaguaaacgaaaaaauaaaccaaucacucgcauucaucagaaaaucagaugaacuacuacacaauguaaacgucggaaaauccaccacaaauauaaugauaacuaccaucauaauaguaauaauagucaucuuacuacuauuaaucgcuguaggacuauuucucuacugcaaggccagauaaggacuaguacuggcugcaucucccuuuccucuguccuccauccuucucccaggauggugaagggggaccugguacccagugauccccaccccaggauccuaaaucaugacuuaccugcuaauaaaaacucauuggaaaagugagaagaucuaaaaaaaaaaaaaaaaaaaaaaaaaaaaaaaaaaaaaaaaaaaaaaaaaaaaaaaaaaaaaaaaugcaucccccccccccccccccccccccccccccccaaaggcucuuuucagagccaccagaauu

SEQ ID NO: 18993 - RNA, 1893 nt, Artificial Sequence
  mRNA product Design f-5 comprising derived and/or modified sequence from HRSV(Memphis-37)__AIY60640.1__F-del_DSCav1_mut7 (opt11)
gggagacuuucccauucuguagcagaauuugguguugccuguggucuuggucccgcggagaagcuuaccauggaacucccaauccucaaaacaaaugccaucaccaccauccuagccgcugucacacuaugcuucgccuccucacaaaacaucaccgaagaguucuaucaauccacaugcuccgccgucagcaagggauaccucuccgcccuuagaaccggcugguacaccucagucaucacaauugaacugucaaacaucaaagaaaacaaaugcaacggcaccgacgcaaaaguaaagcucaucaaacaagaacuggacaaguacaagaacgccgucaccgaacuacagaugcuuaugugcucaaccccugccgccggcuccggaucugccauagcuucaggcaucgccguaugcaaaguccugcaccuagaaggggaagucaacaaaaucaaaaacgcccuccucuccaccaacaaggccguugucucccugucaaacggagucuccguccuaaccuucaaaguccucgaccucaaaaacuacauagacaaacaacuccuacccauccucaacaaacaaagcugcucaauauccaacaucgaaaccgucauggaguuccaacaaaagaacaaccgacuacucgaaauaacacgcgaguucucagucaacgccggcgucaccaccccagucuccacauacaugcucaccaacuccgaacuccuaucgcucaucaacgacaugcccaucaccaaugaccagaagaaacucauguccaacaacguacaaaucguccgccaacaguccuacucaaucaugugcaucaucaaagaagaaguccuugccuacgucguccagcuuccacucuacggagucaucgacacccccugcuggaaacuccacaccuccccacuaugcaccaccaacaccaaagaaggauccaacauaugccucacccguacugaccgcggcugguacugcgacaacgccggauccgucucauucuucccccaggccgaaaccugcaaagucugcuccaaccgcgucuucugcgacaccaugaacucgcucacccucccauccgaagucaaucuaugcaacaucgacauuuucaaccccaaauacgacugcaaaauuaugacaucaaaaaccgacgucucauccucagucaucacuucccucggcgcaaucguaagcugcuacgggaaaacaaagugcaccgcuuccaacaaaaacaaaggcaucaucaaaaccuucucuaacggcugcgacuacgucuccaacaaaggagucgacaccguauccgucggcaacacccucuacuacgucaacaaacaggaaggaaaaucgcucuacgucaaaggagaaccaaucaucaacuucuacgacccccuagucuucccauccgacgaguucgacgccagcaucucacaagucaaugaaaagaucaaccagucacucgcauucauccguaagucagacgaacuccuacacaacgucaacgucggcaagucaacaaccaacauaaugaucaccaccauaaucaucgucauaauaguaauccuccuucuccuaaucgcagucggccucuuccucuacugcaaagcacgcuaaggacuaguacuggcugcaucucccuuuccucuguccuccauccuucucccaggauggugaagggggaccugguacccagugauccccaccccaggauccuaaaucaugacuuaccugcuaauaaaaacucauuggaaaagugagaagaucuaaaaaaaaaaaaaaaaaaaaaaaaaaaaaaaaaaaaaaaaaaaaaaaaaaaaaaaaaaaaaaaaugcaucccccccccccccccccccccccccccccccaaaggcucuuuucagagccaccagaauu

SEQ ID NO: 18994 - RNA, 1889 nt, Artificial Sequence
  mRNA product Design g-1 comprising derived and/or modified sequence from HRSV(Memphis-37)__AIY60640.1__F-del_DSCav1_mut7 (opt1)
gggagacuuucccauucuguagcagaauuugguguugccuguggucuuggucccgcggagaagcuuaccauggagcugcccauccucaagaccaacgccaucaccacgauccuggccgcggugacccugugcuucgccagcucccagaacaucaccgaggaguucuaccagagcacgugcuccgccgucagcaagggcuaccucuccgcccugcgcaccgggugguacaccagcgugaucaccaucgagcuguccaacaucaaggagaacaagugcaacggcaccgacgccaaggugaagcucaucaagcaggagcuggacaaguacaagaacgcggucacggagcugcagaugcugaugugcagcaccccggccgccggcuccgggagcgcgaucgccuccggcaucgccgucugcaaggugcugcaccucgagggcgaggugaacaagaucaagaacgcccugcuguccaccaacaaggccgucgugagccucuccaacggggugagcguccugaccuucaaggugcuggaccucaagaacuacaucgacaagcagcugcugcccauccugaacaagcagagcugcuccaucagcaacaucgagaccgucauggaguuccagcagaagaacaaccgccuccuggagaucacgcgggaguucagcgugaacgcgggcgugaccacccccgucuccaccuacaugcugacgaacagcgagcuccugucccugaucaacgacaugccgaucaccaacgaccagaagaagcucaugagcaacaacgugcagaucgugcgccagcaguccuacagcaucaugugcaucaucaaggaggagguccuggccuacguggugcagcugccccucuacggggucaucgacacccccugcuggaagcugcacaccagcccccugugcacgaccaacaccaaggagggcuccaacaucugccucacccggacggaccgcgggugguacugcgacaacgccggcagcguguccuucuucccgcaggccgagaccugcaaggucugcagcaaccggguguucugcgacaccaugaacucccugacccugcccagcgaggugaaccucugcaacaucgacaucuucaaccccaaguacgacugcaagaucaugacguccaagaccgacgucagcuccagcgugaucaccucccugggcgccaucgugagcugcuacgggaagaccaagugcacggcgagcaacaagaacaagggcaucaucaagaccuucuccaacgggugcgacuacgucagcaacaagggcguggacaccguguccgucggcaacacccuguacuacgugaacaagcaggagggcaagagccucuacgugaagggggagcccaucaucaacuucuacgacccgcuggucuuccccuccgacgaguucgacgccagcaucucccaggugaacgagaagaucaaccagagccuggccuucauccggaaguccgacgagcuccugcacaacgugaacgucggcaagagcaccacgaacaucaugaucaccaccaucaucaucgugaucaucgugauccugcugcuccugaucgccgucgggcuguuccucuacugcaaggcccgcugaggacuaguggaagcauuuuccuggcugauuaaaagaaauuacucagcuauggucaucuguuccuguuagaaggcuaugcagcauauuauauacuaugcgcauguuaugaaaugcauaauaaaaaauuuuaaaaaaucuaaaagaucuaaaaaaaaaaaaaaaaaaaaaaaaaaaaaaaaaaaaaaaaaaaaaaaaaaaaaaaaaaaaaaaaugcaucccccccccccccccccccccccccccccccaaaggcucuuuucagagccaccagaauu

SEQ ID NO: 18995 - RNA, 1889 nt, Artificial Sequence
  mRNA product Design g-1 comprising derived and/or modified sequence from HRSV(Memphis-37)__AIY60640.1__F-del_DSCav1_mut7 (opt1)
gggagacuuucccauucuguagcagaauuugguguugccuguggucuuggucccgcggagaagcuuaccauggagcugcccauccucaagaccaacgccaucaccacgauccuggccgcggugacccugugcuucgccagcucccagaacaucaccgaggaguucuaccagagcacgugcuccgccgucagcaagggguaccucuccgcccugcgcaccgggugguacaccagcgugaucaccaucgagcuguccaacaucaaggagaacaagugcaacggcaccgacgccaaggugaagcucaucaagcaggagcuggacaaguacaagaacgcggucacggagcugcagaugcucaugugcagcaccccggccgccggguccggcagcgccaucgcguccgggaucgccgugugcaaggugcugcaccuggagggcgaggucaacaagaucaagaacgcccuccugagcaccaacaaggccguggugucccugagcaacggcgucuccgugcucaccuucaaggugcuggaccugaagaacuacaucgacaagcagcuccugcccauccugaacaagcagagcugcuccaucagcaacaucgagacggucauggaguuccagcagaagaacaaccggcuccuggagaucacccgcgaguucuccgugaacgccggggugaccacccccgucagcacguacaugcugaccaacagcgagcuccugucccugaucaacgacaugcccaucaccaacgaccagaagaagcucaugagcaacaacgugcagaucgugcggcagcaguccuacagcaucaugugcaucaucaaggaggagguccuggcguacguggugcagcugccgcucuacggcgucaucgacacccccugcuggaagcugcacacgagcccccugugcaccaccaacaccaaggaggggagcaacaucugccucacgcgcaccgaccggggcugguacugcgacaacgccggguccgugagcuucuucccccaggccgagaccugcaaggugugcuccaaccgcgucuucugcgacaccaugaacagccugacgcugccguccgaggugaaccucugcaacaucgacaucuucaaccccaaguacgacugcaagaucaugaccagcaagaccgacgucuccagcuccgugaucaccagccugggcgccaucguguccugcuacggcaagacgaagugcaccgccagcaacaagaacaaggggaucaucaagaccuucuccaacggcugcgacuacgucagcaacaaggggguggacaccgugagcgucggcaacacgcuguacuacgugaacaagcaggagggcaagucccucuacgugaagggggagcccaucaucaacuucuacgacccccuggucuucccgagcgacgaguucgacgcguccaucagccaggugaacgagaagaucaaccagucccuggccuucauccggaaguccgacgagcuccugcacaacgugaacgucggcaaguccaccaccaacaucaugaucaccaccaucaucaucgugaucaucgugauccugcuccugcugaucgccgucggccucuuccuguacugcaaggcccgcugaggacuaguggaagcauuuuccuggcugauuaaaagaaauuacucagcuauggucaucuguuccuguuagaaggcuaugcagcauauuauauacuaugcgcauguuaugaaaugcauaauaaaaaauuuuaaaaaaucuaaaagaucuaaaaaaaaaaaaaaaaaaaaaaaaaaaaaaaaaaaaaaaaaaaaaaaaaaaaaaaaaaaaaaaaugcaucccccccccccccccccccccccccccccccaaaggcucuuuucagagccaccagaauu

SEQ ID NO: 18996 - RNA, 1889 nt, Artificial Sequence
  mRNA product Design g-1 comprising derived and/or modified sequence from HRSV(Memphis-37)__AIY60640.1__F-del_DSCav1_mut7 (opt2)
gggagacuuucccauucuguagcagaauuugguguugccuguggucuuggucccgcggagaagcuuaccauggagcuccccauccucaagaccaacgccaucaccaccauccucgccgccgucacccucugcuucgccuccucccagaacaucaccgaggaguucuaccaguccaccugcuccgccgucuccaagggcuaccucuccgcccuccgcaccggcugguacaccuccgucaucaccaucgagcucuccaacaucaaggagaacaagugcaacggcaccgacgccaaggucaagcucaucaagcaggagcucgacaaguacaagaacgccgucaccgagcuccagaugcucaugugcuccacccccgccgccggcuccggcuccgccaucgccuccggcaucgccgucugcaagguccuccaccucgagggcgaggucaacaagaucaagaacgcccuccucuccaccaacaaggccgucgucucccucuccaacggcgucuccguccucaccuucaagguccucgaccucaagaacuacaucgacaagcagcuccuccccauccucaacaagcaguccugcuccaucuccaacaucgagaccgucauggaguuccagcagaagaacaaccgccuccucgagaucacccgcgaguucuccgucaacgccggcgucaccacccccgucuccaccuacaugcucaccaacuccgagcuccucucccucaucaacgacaugcccaucaccaacgaccagaagaagcucauguccaacaacguccagaucguccgccagcaguccuacuccaucaugugcaucaucaaggaggagguccucgccuacgucguccagcucccccucuacggcgucaucgacacccccugcuggaagcuccacaccuccccccucugcaccaccaacaccaaggagggcuccaacaucugccucacccgcaccgaccgcggcugguacugcgacaacgccggcuccgucuccuucuucccccaggccgagaccugcaaggucugcuccaaccgcgucuucugcgacaccaugaacucccucacccuccccuccgaggucaaccucugcaacaucgacaucuucaaccccaaguacgacugcaagaucaugaccuccaagaccgacgucuccuccuccgucaucaccucccucggcgccaucgucuccugcuacggcaagaccaagugcaccgccuccaacaagaacaagggcaucaucaagaccuucuccaacggcugcgacuacgucuccaacaagggcgucgacaccgucuccgucggcaacacccucuacuacgucaacaagcaggagggcaagucccucuacgucaagggcgagcccaucaucaacuucuacgacccccucgucuuccccuccgacgaguucgacgccuccaucucccaggucaacgagaagaucaaccagucccucgccuucauccgcaaguccgacgagcuccuccacaacgucaacgucggcaaguccaccaccaacaucaugaucaccaccaucaucaucgucaucaucgucauccuccuccuccucaucgccgucggccucuuccucuacugcaaggcccgcugaggacuaguggaagcauuuuccuggcugauuaaaagaaauuacucagcuauggucaucuguuccuguuagaaggcuaugcagcauauuauauacuaugcgcauguuaugaaaugcauaauaaaaaauuuuaaaaaaucuaaaagaucuaaaaaaaaaaaaaaaaaaaaaaaaaaaaaaaaaaaaaaaaaaaaaaaaaaaaaaaaaaaaaaaaugcaucccccccccccccccccccccccccccccccaaaggcucuuuucagagccaccagaauu

SEQ ID NO: 18997 - RNA, 1889 nt, Artificial Sequence
  mRNA product Design g-1 comprising derived and/or modified sequence from HRSV(Memphis-37)__AIY60640.1__F-del_DSCav1_mut7 (opt3)
gggagacuuucccauucuguagcagaauuugguguugccuguggucuuggucccgcggagaagcuuaccauggagcugcccauccucaagaccaacgccauuacaacuauacuugcugcagugacgcugugcuucgccagcucccagaauaucaccgaagaguuuuaccaaucuacauguucagcggucaguaaaggcuauuugagcgcuuuaagaacugggugguacaccuccguuauuacaaucgaacugucuaacauuaaggagaauaaaugcaacggaaccgacgccaaggugaaacuaaucaagcaggaacucgauaaguauaaaaaugcaguaacugagcugcagaugcuuauguguucgaccccugccgcugguucaggcagcgcaauagccagugggaucgcugugugcaagguccugcacuuggagggagaagugaacaaaauuaagaaugcccuccuguccacaaacaaagcgguugugucucugagcaauggcgucuccgugcucacguucaagguauuagaccugaagaacuacaucgauaaacagcuuuugccaauucugaauaagcaaucauguaguaucagcaacauagagacuguuauggaauuucagcagaaaaauaacaggcuacucgagauuacccgggaguucucugugaaugccggugucacaacuccgguguccaccuauaugcugacaaacucagaacuucugagcuugaucaacgacaugcccauuaccaaugaucagaagaaacucaugaguaacaaugugcaaaucguccgccagcagucuuacuccaucaugugcauuauaaaggaggaaguucuggcauaugugguacaguuaccucuguacggggugaucgacacgccauguuggaaacuccauacuagcccccuuugcacaaccaacacuaaggagggaucgaauauuugucugacacgaaccgaucguggcugguacugcgacaacgcuggcucugucuccuuuuucccucaagccgaaacguguaaggugugcucaaauagaguguuuugcgauaccaugaacaguuugacacuaccaagcgagguuaaucuguguaacaucgacauauucaaucccaaauaugauugcaagauuaugacuuccaaaaccgacgucucuagcucagugaucacaagucucggggcaaucguauccuguuacggaaagacuaaaugcaccgcuagcaacaagaauaaggguauuaucaaaacauuuucuaacggcugugauuauguuucaaauaaggggguggacaccgucagugugggaaacacucuguacuaugucaacaaacaggagggcaagagccuuuacgugaaaggugaaccuauuauaaauuucuaugacccacugguuuuuccguccgaugaguucgacgccucuaucagccaggugaacgaaaagauuaaucaaucguuggcguuuaucaggaaguccgaugagcuccugcacaacguaaaugucgggaaaucaacgacaaacaucaugauuaccacuauaaucauugugaucauuguuaucuuacugcuacucauagccgugggacuguuccuuuacugcaaggcacggugaggacuaguggaagcauuuuccuggcugauuaaaagaaauuacucagcuauggucaucuguuccuguuagaaggcuaugcagcauauuauauacuaugcgcauguuaugaaaugcauaauaaaaaauuuuaaaaaaucuaaaagaucuaaaaaaaaaaaaaaaaaaaaaaaaaaaaaaaaaaaaaaaaaaaaaaaaaaaaaaaaaaaaaaaaugcaucccccccccccccccccccccccccccccccaaaggcucuuuucagagccaccagaauu

SEQ ID NO: 18998 - RNA, 1889 nt, Artificial Sequence
  mRNA product Design g-1 comprising derived and/or modified sequence from HRSV(Memphis-37)__AIY60640.1__F-del_DSCav1_mut7 (opt4)
gggagacuuucccauucuguagcagaauuugguguugccuguggucuuggucccgcggagaagcuuaccauggagcugcccauccugaagaccaacgccaucaccaccauccuggccgccgugacccugugcuucgccagcagccagaacaucaccgaggaguucuaccagagcaccugcagcgccgugagcaagggcuaccugagcgcccugagaaccggcugguacaccagcgugaucaccaucgagcugagcaacaucaaggagaacaagugcaacggcaccgacgccaaggugaagcugaucaagcaggagcuggacaaguacaagaacgccgugaccgagcugcagaugcugaugugcagcacccccgccgccggcagcggcagcgccaucgccagcggcaucgccgugugcaaggugcugcaccuggagggcgaggugaacaagaucaagaacgcccugcugagcaccaacaaggccguggugagccugagcaacggcgugagcgugcugaccuucaaggugcuggaccugaagaacuacaucgacaagcagcugcugcccauccugaacaagcagagcugcagcaucagcaacaucgagaccgugauggaguuccagcagaagaacaacagacugcuggagaucaccagagaguucagcgugaacgccggcgugaccacccccgugagcaccuacaugcugaccaacagcgagcugcugagccugaucaacgacaugcccaucaccaacgaccagaagaagcugaugagcaacaacgugcagaucgugagacagcagagcuacagcaucaugugcaucaucaaggaggaggugcuggccuacguggugcagcugccccuguacggcgugaucgacacccccugcuggaagcugcacaccagcccccugugcaccaccaacaccaaggagggcagcaacaucugccugaccagaaccgacagaggcugguacugcgacaacgccggcagcgugagcuucuucccccaggccgagaccugcaaggugugcagcaacagaguguucugcgacaccaugaacagccugacccugcccagcgaggugaaccugugcaacaucgacaucuucaaccccaaguacgacugcaagaucaugaccagcaagaccgacgugagcagcagcgugaucaccagccugggcgccaucgugagcugcuacggcaagaccaagugcaccgccagcaacaagaacaagggcaucaucaagaccuucagcaacggcugcgacuacgugagcaacaagggcguggacaccgugagcgugggcaacacccuguacuacgugaacaagcaggagggcaagagccuguacgugaagggcgagcccaucaucaacuucuacgacccccugguguuccccagcgacgaguucgacgccagcaucagccaggugaacgagaagaucaaccagagccuggccuucaucagaaagagcgacgagcugcugcacaacgugaacgugggcaagagcaccaccaacaucaugaucaccaccaucaucaucgugaucaucgugauccugcugcugcugaucgccgugggccuguuccuguacugcaaggccagaugaggacuaguggaagcauuuuccuggcugauuaaaagaaauuacucagcuauggucaucuguuccuguuagaaggcuaugcagcauauuauauacuaugcgcauguuaugaaaugcauaauaaaaaauuuuaaaaaaucuaaaagaucuaaaaaaaaaaaaaaaaaaaaaaaaaaaaaaaaaaaaaaaaaaaaaaaaaaaaaaaaaaaaaaaaugcaucccccccccccccccccccccccccccccccaaaggcucuuuucagagccaccagaauu

SEQ ID NO: 18999 - RNA, 1889 nt, Artificial Sequence
  mRNA product Design g-1 comprising derived and/or modified sequence from HRSV(Memphis-37)__AIY60640.1__F-del_DSCav1_mut7 (opt5)
gggagacuuucccauucuguagcagaauuugguguugccuguggucuuggucccgcggagaagcuuaccauggagcugcccauccucaagaccaacgccauuacaacgauccuggcugccgugacccuuugcuucgcgagcucccagaauauuacagaagaguuuuaccaaucuaccuguagcgcugucuccaaaggcuaucugucugcccucagaacagggugguacaccagcguuaucacaauugaacuguccaacaucaaggagaauaaaugcaacggaaccgacgccaaggugaaacuuaucaagcaggaacuggauaaguauaaaaaugcugugacggagcuccagaugcugauguguucuaccccugccgcuggcagcggguccgccauugcgagcggaaucgccgucugcaaggugcugcaccucgagggcgaaguuaacaaaauuaagaaugcucugcuuucuacaaacaaagccguggucucccugagcaauggggugucuguucucaccuucaaggugcuggaccuuaagaacuacaucgauaaacagcugcucccgauucugaauaagcaauccuguagcaucucuaacauugagacagucauggaauuucagcagaaaaauaaccggcugcucgagaucacccgcgaguucuccgugaaugcuggagugacgacacccgucagcaccuauaugcugacaaacuccgaacuucugucucucaucaacgacaugccuauuaccaaugaucagaagaaacugaugagcaacaauguucaaaucgugagacagcaguccuacagcauuaugugcaucauuaaggaggaagugcuugccuaugucgugcagcugccccucuacggcguuaucgacaccccuuguuggaaacugcauacaucuccccugugcacgaccaacacaaaggagggcuccaauaucugucucacccggacagaucgcgggugguacugcgacaacgcgggaagcgugagcuuuuucccucaagccgaaaccuguaaggucugcucuaauagaguguuuugcgauacgaugaacucccugacacuuccgucugagguuaaucuguguaacauugacaucuucaaucccaaauaugauugcaagauuaugaccagcaaaaccgacguguccagcucugucaucacaucccucggcgcuauugugagcuguuacgggaagaccaaaugcacagccucuaacaagaauaagggaaucaucaaaacguuuuccaacggcugugauuaugucagcaauaaggggguggacaccguuuccgugggaaacacacuguacuaugucaacaaacaggagggcaagucucuuuacgugaaaggcgaaccuauuaucaauuucuaugacccccugguuuuuccuagcgaugaguucgacgcuuccauuucucaggugaacgaaaagaucaaucaaagccucgccuuuauucggaaguccgaugagcugcugcacaacgucaauguggggaaaagcaccacaaacaucaugauuaccacgaucaucauugugaucauuguuauccuccugcuucugauugccgucggacucuuccuguacugcaaggcucgcugaggacuaguggaagcauuuuccuggcugauuaaaagaaauuacucagcuauggucaucuguuccuguuagaaggcuaugcagcauauuauauacuaugcgcauguuaugaaaugcauaauaaaaaauuuuaaaaaaucuaaaagaucuaaaaaaaaaaaaaaaaaaaaaaaaaaaaaaaaaaaaaaaaaaaaaaaaaaaaaaaaaaaaaaaaugcaucccccccccccccccccccccccccccccccaaaggcucuuuucagagccaccagaauu

SEQ ID NO: 19000 - RNA, 1889 nt, Artificial Sequence
  mRNA product Design g-1 comprising derived and/or modified sequence from HRSV(Memphis-37)__AIY60640.1__F-del_DSCav1_mut7 (opt6)
gggagacuuucccauucuguagcagaauuugguguugccuguggucuuggucccgcggagaagcuuaccauggaacuaccaauacucaaaacaaacgccauaaccacaauacuagccgcaguaacacuuugcuuugccucaagucaaaacauaacagaagaauuuuaccaauccacaugcucagcuguauccaaaggauauuuauccgcacuaagaacaggaugguacacaucaguaaucacaauagaauuaucaaacauaaaagaaaacaaauguaauggcacagacgccaaaguaaaacuaauuaaacaagaacuagacaaauauaaaaaugcaguaaccgaacuccaaaugcucaugugcucuacaccagcugcaggaucaggaucagccauugcaagcgguauagcuguuugcaaaguauuacacuuagaaggagaaguaaauaaaauaaaaaacgcacuacuaucaacaaauaaagcaguaguaucccuaucaaacggaguaucaguacuuacauucaaaguauuagauuuaaaaaacuauauagacaaacaacuacuucccauauuaaacaaacaaucaugcucaauuuccaacauugaaacuguaauggaauuucaacaaaaaaacaacagacuacuugaaaucacacgagaauuuucaguaaacgcuggaguaacaacaccugucucuaccuacaugcucacaaauagcgaauuacuaucucuaaucaaugacaugccaauaacaaacgaucaaaaaaaacuaauguccaacaacguacaaauaguaagacaacaauccuauucaauaaugugcauaauaaaagaagaagucuuagcauacguuguacaacuaccauuauacggaguaauagauacaccaugcuggaaacuccacacaagcccccucugcacaacaaacaccaaagaagggucaaacauaugcuuaacaagaacagacagaggaugguacugugauaacgcaggaucugucucauucuuuccacaagcagaaacauguaaaguaugcuccaacagagucuuuugcgacaccaugaacucacuaaccuuacccucagaaguaaaccugugcaacaucgauaucuucaaccccaaauacgauugcaaaaucaugacaagcaaaacugauguauccagcucuguaauaacaucacuaggugcaauaguaucaugcuacggaaaaacaaaaugcacagcuucuaacaaaaauaaaggaauaauaaaaacauucuccaauggaugcgacuaugucucaaauaaaggaguagauacaguuucagucggcaacacacucuauuauguaaauaaacaagaaggaaaaucauuauacguaaaaggagaacccauaauaaacuucuacgacccccucguauucccaagcgacgaauuugacgccucaauaucacaaguaaacgaaaaaauaaaccaaucacucgcauucaucagaaaaucagaugaacuacuacacaauguaaacgucggaaaauccaccacaaauauaaugauaacuaccaucauaauaguaauaauagucaucuuacuacuauuaaucgcuguaggacuauuucucuacugcaaggccagauaaggacuaguggaagcauuuuccuggcugauuaaaagaaauuacucagcuauggucaucuguuccuguuagaaggcuaugcagcauauuauauacuaugcgcauguuaugaaaugcauaauaaaaaauuuuaaaaaaucuaaaagaucuaaaaaaaaaaaaaaaaaaaaaaaaaaaaaaaaaaaaaaaaaaaaaaaaaaaaaaaaaaaaaaaaugcaucccccccccccccccccccccccccccccccaaaggcucuuuucagagccaccagaauu

SEQ ID NO: 19001 - RNA, 1889 nt, Artificial Sequence
  mRNA product Design g-1 comprising derived and/or modified sequence from HRSV(Memphis-37)__AIY60640.1__F-del_DSCav1_mut7 (opt11)
gggagacuuucccauucuguagcagaauuugguguugccuguggucuuggucccgcggagaagcuuaccauggaacucccaauccucaaaacaaaugccaucaccaccauccuagccgcugucacacuaugcuucgccuccucacaaaacaucaccgaagaguucuaucaauccacaugcuccgccgucagcaagggauaccucuccgcccuuagaaccggcugguacaccucagucaucacaauugaacugucaaacaucaaagaaaacaaaugcaacggcaccgacgcaaaaguaaagcucaucaaacaagaacuggacaaguacaagaacgccgucaccgaacuacagaugcuuaugugcucaaccccugccgccggcuccggaucugccauagcuucaggcaucgccguaugcaaaguccugcaccuagaaggggaagucaacaaaaucaaaaacgcccuccucuccaccaacaaggccguugucucccugucaaacggagucuccguccuaaccuucaaaguccucgaccucaaaaacuacauagacaaacaacuccuacccauccucaacaaacaaagcugcucaauauccaacaucgaaaccgucauggaguuccaacaaaagaacaaccgacuacucgaaauaacacgcgaguucucagucaacgccggcgucaccaccccagucuccacauacaugcucaccaacuccgaacuccuaucgcucaucaacgacaugcccaucaccaaugaccagaagaaacucauguccaacaacguacaaaucguccgccaacaguccuacucaaucaugugcaucaucaaagaagaaguccuugccuacgucguccagcuuccacucuacggagucaucgacacccccugcuggaaacuccacaccuccccacuaugcaccaccaacaccaaagaaggauccaacauaugccucacccguacugaccgcggcugguacugcgacaacgccggauccgucucauucuucccccaggccgaaaccugcaaagucugcuccaaccgcgucuucugcgacaccaugaacucgcucacccucccauccgaagucaaucuaugcaacaucgacauuuucaaccccaaauacgacugcaaaauuaugacaucaaaaaccgacgucucauccucagucaucacuucccucggcgcaaucguaagcugcuacgggaaaacaaagugcaccgcuuccaacaaaaacaaaggcaucaucaaaaccuucucuaacggcugcgacuacgucuccaacaaaggagucgacaccguauccgucggcaacacccucuacuacgucaacaaacaggaaggaaaaucgcucuacgucaaaggagaaccaaucaucaacuucuacgacccccuagucuucccauccgacgaguucgacgccagcaucucacaagucaaugaaaagaucaaccagucacucgcauucauccguaagucagacgaacuccuacacaacgucaacgucggcaagucaacaaccaacauaaugaucaccaccauaaucaucgucauaauaguaauccuccuucuccuaaucgcagucggccucuuccucuacugcaaagcacgcuaaggacuaguggaagcauuuuccuggcugauuaaaagaaauuacucagcuauggucaucuguuccuguuagaaggcuaugcagcauauuauauacuaugcgcauguuaugaaaugcauaauaaaaaauuuuaaaaaaucuaaaagaucuaaaaaaaaaaaaaaaaaaaaaaaaaaaaaaaaaaaaaaaaaaaaaaaaaaaaaaaaaaaaaaaaugcaucccccccccccccccccccccccccccccccaaaggcucuuuucagagccaccagaauu

SEQ ID NO: 19002 - RNA, 1904 nt, Artificial Sequence
  mRNA product Design g-2 comprising derived and/or modified sequence from HRSV(Memphis-37)__AIY60640.1__F-del_DSCav1_mut7 (opt1)
gggagaguccgcucagccagguugcagaagcggcuuagcguguguccuaaucuucucucugcguguagguaggccugugccgcaaacaagcuuaccauggagcugcccauccucaagaccaacgccaucaccacgauccuggccgcggugacccugugcuucgccagcucccagaacaucaccgaggaguucuaccagagcacgugcuccgccgucagcaagggcuaccucuccgcccugcgcaccgggugguacaccagcgugaucaccaucgagcuguccaacaucaaggagaacaagugcaacggcaccgacgccaaggugaagcucaucaagcaggagcuggacaaguacaagaacgcggucacggagcugcagaugcugaugugcagcaccccggccgccggcuccgggagcgcgaucgccuccggcaucgccgucugcaaggugcugcaccucgagggcgaggugaacaagaucaagaacgcccugcuguccaccaacaaggccgucgugagccucuccaacggggugagcguccugaccuucaaggugcuggaccucaagaacuacaucgacaagcagcugcugcccauccugaacaagcagagcugcuccaucagcaacaucgagaccgucauggaguuccagcagaagaacaaccgccuccuggagaucacgcgggaguucagcgugaacgcgggcgugaccacccccgucuccaccuacaugcugacgaacagcgagcuccugucccugaucaacgacaugccgaucaccaacgaccagaagaagcucaugagcaacaacgugcagaucgugcgccagcaguccuacagcaucaugugcaucaucaaggaggagguccuggccuacguggugcagcugccccucuacggggucaucgacacccccugcuggaagcugcacaccagcccccugugcacgaccaacaccaaggagggcuccaacaucugccucacccggacggaccgcgggugguacugcgacaacgccggcagcguguccuucuucccgcaggccgagaccugcaaggucugcagcaaccggguguucugcgacaccaugaacucccugacccugcccagcgaggugaaccucugcaacaucgacaucuucaaccccaaguacgacugcaagaucaugacguccaagaccgacgucagcuccagcgugaucaccucccugggcgccaucgugagcugcuacgggaagaccaagugcacggcgagcaacaagaacaagggcaucaucaagaccuucuccaacgggugcgacuacgucagcaacaagggcguggacaccguguccgucggcaacacccuguacuacgugaacaagcaggagggcaagagccucuacgugaagggggagcccaucaucaacuucuacgacccgcuggucuuccccuccgacgaguucgacgccagcaucucccaggugaacgagaagaucaaccagagccuggccuucauccggaaguccgacgagcuccugcacaacgugaacgucggcaagagcaccacgaacaucaugaucaccaccaucaucaucgugaucaucgugauccugcugcuccugaucgccgucgggcuguuccucuacugcaaggcccgcugaggacuaguaauaaggaaacuguaugaaugucugugggcaggaagugaagagauccuucuguaaagguuuuuggaauuaugucugcugaauaauaaacuuuuuugaaauaauaaaucugguagaaaaaugagaucuaaaaaaaaaaaaaaaaaaaaaaaaaaaaaaaaaaaaaaaaaaaaaaaaaaaaaaaaaaaaaaaaugcaucccccccccccccccccccccccccccccccaaaggcucuuuucagagccaccagaauu

SEQ ID NO: 19003 - RNA, 1904 nt, Artificial Sequence
  mRNA product Design g-2 comprising derived and/or modified sequence from HRSV(Memphis-37)__AIY60640.1__F-del_DSCav1_mut7 (opt1)
gggagaguccgcucagccagguugcagaagcggcuuagcguguguccuaaucuucucucugcguguagguaggccugugccgcaaacaagcuuaccauggagcugcccauccucaagaccaacgccaucaccacgauccuggccgcggugacccugugcuucgccagcucccagaacaucaccgaggaguucuaccagagcacgugcuccgccgucagcaagggguaccucuccgcccugcgcaccgggugguacaccagcgugaucaccaucgagcuguccaacaucaaggagaacaagugcaacggcaccgacgccaaggugaagcucaucaagcaggagcuggacaaguacaagaacgcggucacggagcugcagaugcucaugugcagcaccccggccgccggguccggcagcgccaucgcguccgggaucgccgugugcaaggugcugcaccuggagggcgaggucaacaagaucaagaacgcccuccugagcaccaacaaggccguggugucccugagcaacggcgucuccgugcucaccuucaaggugcuggaccugaagaacuacaucgacaagcagcuccugcccauccugaacaagcagagcugcuccaucagcaacaucgagacggucauggaguuccagcagaagaacaaccggcuccuggagaucacccgcgaguucuccgugaacgccggggugaccacccccgucagcacguacaugcugaccaacagcgagcuccugucccugaucaacgacaugcccaucaccaacgaccagaagaagcucaugagcaacaacgugcagaucgugcggcagcaguccuacagcaucaugugcaucaucaaggaggagguccuggcguacguggugcagcugccgcucuacggcgucaucgacacccccugcuggaagcugcacacgagcccccugugcaccaccaacaccaaggaggggagcaacaucugccucacgcgcaccgaccggggcugguacugcgacaacgccggguccgugagcuucuucccccaggccgagaccugcaaggugugcuccaaccgcgucuucugcgacaccaugaacagccugacgcugccguccgaggugaaccucugcaacaucgacaucuucaaccccaaguacgacugcaagaucaugaccagcaagaccgacgucuccagcuccgugaucaccagccugggcgccaucguguccugcuacggcaagacgaagugcaccgccagcaacaagaacaaggggaucaucaagaccuucuccaacggcugcgacuacgucagcaacaaggggguggacaccgugagcgucggcaacacgcuguacuacgugaacaagcaggagggcaagucccucuacgugaagggggagcccaucaucaacuucuacgacccccuggucuucccgagcgacgaguucgacgcguccaucagccaggugaacgagaagaucaaccagucccuggccuucauccggaaguccgacgagcuccugcacaacgugaacgucggcaaguccaccaccaacaucaugaucaccaccaucaucaucgugaucaucgugauccugcuccugcugaucgccgucggccucuuccuguacugcaaggcccgcugaggacuaguaauaaggaaacuguaugaaugucugugggcaggaagugaagagauccuucuguaaagguuuuuggaauuaugucugcugaauaauaaacuuuuuugaaauaauaaaucugguagaaaaaugagaucuaaaaaaaaaaaaaaaaaaaaaaaaaaaaaaaaaaaaaaaaaaaaaaaaaaaaaaaaaaaaaaaaugcaucccccccccccccccccccccccccccccccaaaggcucuuuucagagccaccagaauu

SEQ ID NO: 19004 - RNA, 1904 nt, Artificial Sequence
  mRNA product Design g-2 comprising derived and/or modified sequence from HRSV(Memphis-37)__AIY60640.1__F-del_DSCav1_mut7 (opt2)
gggagaguccgcucagccagguugcagaagcggcuuagcguguguccuaaucuucucucugcguguagguaggccugugccgcaaacaagcuuaccauggagcuccccauccucaagaccaacgccaucaccaccauccucgccgccgucacccucugcuucgccuccucccagaacaucaccgaggaguucuaccaguccaccugcuccgccgucuccaagggcuaccucuccgcccuccgcaccggcugguacaccuccgucaucaccaucgagcucuccaacaucaaggagaacaagugcaacggcaccgacgccaaggucaagcucaucaagcaggagcucgacaaguacaagaacgccgucaccgagcuccagaugcucaugugcuccacccccgccgccggcuccggcuccgccaucgccuccggcaucgccgucugcaagguccuccaccucgagggcgaggucaacaagaucaagaacgcccuccucuccaccaacaaggccgucgucucccucuccaacggcgucuccguccucaccuucaagguccucgaccucaagaacuacaucgacaagcagcuccuccccauccucaacaagcaguccugcuccaucuccaacaucgagaccgucauggaguuccagcagaagaacaaccgccuccucgagaucacccgcgaguucuccgucaacgccggcgucaccacccccgucuccaccuacaugcucaccaacuccgagcuccucucccucaucaacgacaugcccaucaccaacgaccagaagaagcucauguccaacaacguccagaucguccgccagcaguccuacuccaucaugugcaucaucaaggaggagguccucgccuacgucguccagcucccccucuacggcgucaucgacacccccugcuggaagcuccacaccuccccccucugcaccaccaacaccaaggagggcuccaacaucugccucacccgcaccgaccgcggcugguacugcgacaacgccggcuccgucuccuucuucccccaggccgagaccugcaaggucugcuccaaccgcgucuucugcgacaccaugaacucccucacccuccccuccgaggucaaccucugcaacaucgacaucuucaaccccaaguacgacugcaagaucaugaccuccaagaccgacgucuccuccuccgucaucaccucccucggcgccaucgucuccugcuacggcaagaccaagugcaccgccuccaacaagaacaagggcaucaucaagaccuucuccaacggcugcgacuacgucuccaacaagggcgucgacaccgucuccgucggcaacacccucuacuacgucaacaagcaggagggcaagucccucuacgucaagggcgagcccaucaucaacuucuacgacccccucgucuuccccuccgacgaguucgacgccuccaucucccaggucaacgagaagaucaaccagucccucgccuucauccgcaaguccgacgagcuccuccacaacgucaacgucggcaaguccaccaccaacaucaugaucaccaccaucaucaucgucaucaucgucauccuccuccuccucaucgccgucggccucuuccucuacugcaaggcccgcugaggacuaguaauaaggaaacuguaugaaugucugugggcaggaagugaagagauccuucuguaaagguuuuuggaauuaugucugcugaauaauaaacuuuuuugaaauaauaaaucugguagaaaaaugagaucuaaaaaaaaaaaaaaaaaaaaaaaaaaaaaaaaaaaaaaaaaaaaaaaaaaaaaaaaaaaaaaaaugcaucccccccccccccccccccccccccccccccaaaggcucuuuucagagccaccagaauu

SEQ ID NO: 19005 - RNA, 1904 nt, Artificial Sequence
  mRNA product Design g-2 comprising derived and/or modified sequence from HRSV(Memphis-37)__AIY60640.1__F-del_DSCav1_mut7 (opt3)
gggagaguccgcucagccagguugcagaagcggcuuagcguguguccuaaucuucucucugcguguagguaggccugugccgcaaacaagcuuaccauggagcugcccauccucaagaccaacgccauuacaacuauacuugcugcagugacgcugugcuucgccagcucccagaauaucaccgaagaguuuuaccaaucuacauguucagcggucaguaaaggcuauuugagcgcuuuaagaacugggugguacaccuccguuauuacaaucgaacugucuaacauuaaggagaauaaaugcaacggaaccgacgccaaggugaaacuaaucaagcaggaacucgauaaguauaaaaaugcaguaacugagcugcagaugcuuauguguucgaccccugccgcugguucaggcagcgcaauagccagugggaucgcugugugcaagguccugcacuuggagggagaagugaacaaaauuaagaaugcccuccuguccacaaacaaagcgguugugucucugagcaauggcgucuccgugcucacguucaagguauuagaccugaagaacuacaucgauaaacagcuuuugccaauucugaauaagcaaucauguaguaucagcaacauagagacuguuauggaauuucagcagaaaaauaacaggcuacucgagauuacccgggaguucucugugaaugccggugucacaacuccgguguccaccuauaugcugacaaacucagaacuucugagcuugaucaacgacaugcccauuaccaaugaucagaagaaacucaugaguaacaaugugcaaaucguccgccagcagucuuacuccaucaugugcauuauaaaggaggaaguucuggcauaugugguacaguuaccucuguacggggugaucgacacgccauguuggaaacuccauacuagcccccuuugcacaaccaacacuaaggagggaucgaauauuugucugacacgaaccgaucguggcugguacugcgacaacgcuggcucugucuccuuuuucccucaagccgaaacguguaaggugugcucaaauagaguguuuugcgauaccaugaacaguuugacacuaccaagcgagguuaaucuguguaacaucgacauauucaaucccaaauaugauugcaagauuaugacuuccaaaaccgacgucucuagcucagugaucacaagucucggggcaaucguauccuguuacggaaagacuaaaugcaccgcuagcaacaagaauaaggguauuaucaaaacauuuucuaacggcugugauuauguuucaaauaaggggguggacaccgucagugugggaaacacucuguacuaugucaacaaacaggagggcaagagccuuuacgugaaaggugaaccuauuauaaauuucuaugacccacugguuuuuccguccgaugaguucgacgccucuaucagccaggugaacgaaaagauuaaucaaucguuggcguuuaucaggaaguccgaugagcuccugcacaacguaaaugucgggaaaucaacgacaaacaucaugauuaccacuauaaucauugugaucauuguuaucuuacugcuacucauagccgugggacuguuccuuuacugcaaggcacggugaggacuaguaauaaggaaacuguaugaaugucugugggcaggaagugaagagauccuucuguaaagguuuuuggaauuaugucugcugaauaauaaacuuuuuugaaauaauaaaucugguagaaaaaugagaucuaaaaaaaaaaaaaaaaaaaaaaaaaaaaaaaaaaaaaaaaaaaaaaaaaaaaaaaaaaaaaaaaugcaucccccccccccccccccccccccccccccccaaaggcucuuuucagagccaccagaauu

SEQ ID NO: 19006 - RNA, 1904 nt, Artificial Sequence
  mRNA product Design g-2 comprising derived and/or modified sequence from HRSV(Memphis-37)__AIY60640.1__F-del_DSCav1_mut7 (opt4)
gggagaguccgcucagccagguugcagaagcggcuuagcguguguccuaaucuucucucugcguguagguaggccugugccgcaaacaagcuuaccauggagcugcccauccugaagaccaacgccaucaccaccauccuggccgccgugacccugugcuucgccagcagccagaacaucaccgaggaguucuaccagagcaccugcagcgccgugagcaagggcuaccugagcgcccugagaaccggcugguacaccagcgugaucaccaucgagcugagcaacaucaaggagaacaagugcaacggcaccgacgccaaggugaagcugaucaagcaggagcuggacaaguacaagaacgccgugaccgagcugcagaugcugaugugcagcacccccgccgccggcagcggcagcgccaucgccagcggcaucgccgugugcaaggugcugcaccuggagggcgaggugaacaagaucaagaacgcccugcugagcaccaacaaggccguggugagccugagcaacggcgugagcgugcugaccuucaaggugcuggaccugaagaacuacaucgacaagcagcugcugcccauccugaacaagcagagcugcagcaucagcaacaucgagaccgugauggaguuccagcagaagaacaacagacugcuggagaucaccagagaguucagcgugaacgccggcgugaccacccccgugagcaccuacaugcugaccaacagcgagcugcugagccugaucaacgacaugcccaucaccaacgaccagaagaagcugaugagcaacaacgugcagaucgugagacagcagagcuacagcaucaugugcaucaucaaggaggaggugcuggccuacguggugcagcugccccuguacggcgugaucgacacccccugcuggaagcugcacaccagcccccugugcaccaccaacaccaaggagggcagcaacaucugccugaccagaaccgacagaggcugguacugcgacaacgccggcagcgugagcuucuucccccaggccgagaccugcaaggugugcagcaacagaguguucugcgacaccaugaacagccugacccugcccagcgaggugaaccugugcaacaucgacaucuucaaccccaaguacgacugcaagaucaugaccagcaagaccgacgugagcagcagcgugaucaccagccugggcgccaucgugagcugcuacggcaagaccaagugcaccgccagcaacaagaacaagggcaucaucaagaccuucagcaacggcugcgacuacgugagcaacaagggcguggacaccgugagcgugggcaacacccuguacuacgugaacaagcaggagggcaagagccuguacgugaagggcgagcccaucaucaacuucuacgacccccugguguuccccagcgacgaguucgacgccagcaucagccaggugaacgagaagaucaaccagagccuggccuucaucagaaagagcgacgagcugcugcacaacgugaacgugggcaagagcaccaccaacaucaugaucaccaccaucaucaucgugaucaucgugauccugcugcugcugaucgccgugggccuguuccuguacugcaaggccagaugaggacuaguaauaaggaaacuguaugaaugucugugggcaggaagugaagagauccuucuguaaagguuuuuggaauuaugucugcugaauaauaaacuuuuuugaaauaauaaaucugguagaaaaaugagaucuaaaaaaaaaaaaaaaaaaaaaaaaaaaaaaaaaaaaaaaaaaaaaaaaaaaaaaaaaaaaaaaaugcaucccccccccccccccccccccccccccccccaaaggcucuuuucagagccaccagaauu

SEQ ID NO: 19007 - RNA, 1904 nt, Artificial Sequence
  mRNA product Design g-2 comprising derived and/or modified sequence from HRSV(Memphis-37)__AIY60640.1__F-del_DSCav1_mut7 (opt5)
gggagaguccgcucagccagguugcagaagcggcuuagcguguguccuaaucuucucucugcguguagguaggccugugccgcaaacaagcuuaccauggagcugcccauccucaagaccaacgccauuacaacgauccuggcugccgugacccuuugcuucgcgagcucccagaauauuacagaagaguuuuaccaaucuaccuguagcgcugucuccaaaggcuaucugucugcccucagaacagggugguacaccagcguuaucacaauugaacuguccaacaucaaggagaauaaaugcaacggaaccgacgccaaggugaaacuuaucaagcaggaacuggauaaguauaaaaaugcugugacggagcuccagaugcugauguguucuaccccugccgcuggcagcggguccgccauugcgagcggaaucgccgucugcaaggugcugcaccucgagggcgaaguuaacaaaauuaagaaugcucugcuuucuacaaacaaagccguggucucccugagcaauggggugucuguucucaccuucaaggugcuggaccuuaagaacuacaucgauaaacagcugcucccgauucugaauaagcaauccuguagcaucucuaacauugagacagucauggaauuucagcagaaaaauaaccggcugcucgagaucacccgcgaguucuccgugaaugcuggagugacgacacccgucagcaccuauaugcugacaaacuccgaacuucugucucucaucaacgacaugccuauuaccaaugaucagaagaaacugaugagcaacaauguucaaaucgugagacagcaguccuacagcauuaugugcaucauuaaggaggaagugcuugccuaugucgugcagcugccccucuacggcguuaucgacaccccuuguuggaaacugcauacaucuccccugugcacgaccaacacaaaggagggcuccaauaucugucucacccggacagaucgcgggugguacugcgacaacgcgggaagcgugagcuuuuucccucaagccgaaaccuguaaggucugcucuaauagaguguuuugcgauacgaugaacucccugacacuuccgucugagguuaaucuguguaacauugacaucuucaaucccaaauaugauugcaagauuaugaccagcaaaaccgacguguccagcucugucaucacaucccucggcgcuauugugagcuguuacgggaagaccaaaugcacagccucuaacaagaauaagggaaucaucaaaacguuuuccaacggcugugauuaugucagcaauaaggggguggacaccguuuccgugggaaacacacuguacuaugucaacaaacaggagggcaagucucuuuacgugaaaggcgaaccuauuaucaauuucuaugacccccugguuuuuccuagcgaugaguucgacgcuuccauuucucaggugaacgaaaagaucaaucaaagccucgccuuuauucggaaguccgaugagcugcugcacaacgucaauguggggaaaagcaccacaaacaucaugauuaccacgaucaucauugugaucauuguuauccuccugcuucugauugccgucggacucuuccuguacugcaaggcucgcugaggacuaguaauaaggaaacuguaugaaugucugugggcaggaagugaagagauccuucuguaaagguuuuuggaauuaugucugcugaauaauaaacuuuuuugaaauaauaaaucugguagaaaaaugagaucuaaaaaaaaaaaaaaaaaaaaaaaaaaaaaaaaaaaaaaaaaaaaaaaaaaaaaaaaaaaaaaaaugcaucccccccccccccccccccccccccccccccaaaggcucuuuucagagccaccagaauu

SEQ ID NO: 19008 - RNA, 1904 nt, Artificial Sequence
  mRNA product Design g-2 comprising derived and/or modified sequence from HRSV(Memphis-37)__AIY60640.1__F-del_DSCav1_mut7 (opt6)
gggagaguccgcucagccagguugcagaagcggcuuagcguguguccuaaucuucucucugcguguagguaggccugugccgcaaacaagcuuaccauggaacuaccaauacucaaaacaaacgccauaaccacaauacuagccgcaguaacacuuugcuuugccucaagucaaaacauaacagaagaauuuuaccaauccacaugcucagcuguauccaaaggauauuuauccgcacuaagaacaggaugguacacaucaguaaucacaauagaauuaucaaacauaaaagaaaacaaauguaauggcacagacgccaaaguaaaacuaauuaaacaagaacuagacaaauauaaaaaugcaguaaccgaacuccaaaugcucaugugcucuacaccagcugcaggaucaggaucagccauugcaagcgguauagcuguuugcaaaguauuacacuuagaaggagaaguaaauaaaauaaaaaacgcacuacuaucaacaaauaaagcaguaguaucccuaucaaacggaguaucaguacuuacauucaaaguauuagauuuaaaaaacuauauagacaaacaacuacuucccauauuaaacaaacaaucaugcucaauuuccaacauugaaacuguaauggaauuucaacaaaaaaacaacagacuacuugaaaucacacgagaauuuucaguaaacgcuggaguaacaacaccugucucuaccuacaugcucacaaauagcgaauuacuaucucuaaucaaugacaugccaauaacaaacgaucaaaaaaaacuaauguccaacaacguacaaauaguaagacaacaauccuauucaauaaugugcauaauaaaagaagaagucuuagcauacguuguacaacuaccauuauacggaguaauagauacaccaugcuggaaacuccacacaagcccccucugcacaacaaacaccaaagaagggucaaacauaugcuuaacaagaacagacagaggaugguacugugauaacgcaggaucugucucauucuuuccacaagcagaaacauguaaaguaugcuccaacagagucuuuugcgacaccaugaacucacuaaccuuacccucagaaguaaaccugugcaacaucgauaucuucaaccccaaauacgauugcaaaaucaugacaagcaaaacugauguauccagcucuguaauaacaucacuaggugcaauaguaucaugcuacggaaaaacaaaaugcacagcuucuaacaaaaauaaaggaauaauaaaaacauucuccaauggaugcgacuaugucucaaauaaaggaguagauacaguuucagucggcaacacacucuauuauguaaauaaacaagaaggaaaaucauuauacguaaaaggagaacccauaauaaacuucuacgacccccucguauucccaagcgacgaauuugacgccucaauaucacaaguaaacgaaaaaauaaaccaaucacucgcauucaucagaaaaucagaugaacuacuacacaauguaaacgucggaaaauccaccacaaauauaaugauaacuaccaucauaauaguaauaauagucaucuuacuacuauuaaucgcuguaggacuauuucucuacugcaaggccagauaaggacuaguaauaaggaaacuguaugaaugucugugggcaggaagugaagagauccuucuguaaagguuuuuggaauuaugucugcugaauaauaaacuuuuuugaaauaauaaaucugguagaaaaaugagaucuaaaaaaaaaaaaaaaaaaaaaaaaaaaaaaaaaaaaaaaaaaaaaaaaaaaaaaaaaaaaaaaaugcaucccccccccccccccccccccccccccccccaaaggcucuuuucagagccaccagaauu

SEQ ID NO: 19009 - RNA, 1904 nt, Artificial Sequence
  mRNA product Design g-2 comprising derived and/or modified sequence from HRSV(Memphis-37)__AIY60640.1__F-del_DSCav1_mut7 (opt11)
gggagaguccgcucagccagguugcagaagcggcuuagcguguguccuaaucuucucucugcguguagguaggccugugccgcaaacaagcuuaccauggaacucccaauccucaaaacaaaugccaucaccaccauccuagccgcugucacacuaugcuucgccuccucacaaaacaucaccgaagaguucuaucaauccacaugcuccgccgucagcaagggauaccucuccgcccuuagaaccggcugguacaccucagucaucacaauugaacugucaaacaucaaagaaaacaaaugcaacggcaccgacgcaaaaguaaagcucaucaaacaagaacuggacaaguacaagaacgccgucaccgaacuacagaugcuuaugugcucaaccccugccgccggcuccggaucugccauagcuucaggcaucgccguaugcaaaguccugcaccuagaaggggaagucaacaaaaucaaaaacgcccuccucuccaccaacaaggccguugucucccugucaaacggagucuccguccuaaccuucaaaguccucgaccucaaaaacuacauagacaaacaacuccuacccauccucaacaaacaaagcugcucaauauccaacaucgaaaccgucauggaguuccaacaaaagaacaaccgacuacucgaaauaacacgcgaguucucagucaacgccggcgucaccaccccagucuccacauacaugcucaccaacuccgaacuccuaucgcucaucaacgacaugcccaucaccaaugaccagaagaaacucauguccaacaacguacaaaucguccgccaacaguccuacucaaucaugugcaucaucaaagaagaaguccuugccuacgucguccagcuuccacucuacggagucaucgacacccccugcuggaaacuccacaccuccccacuaugcaccaccaacaccaaagaaggauccaacauaugccucacccguacugaccgcggcugguacugcgacaacgccggauccgucucauucuucccccaggccgaaaccugcaaagucugcuccaaccgcgucuucugcgacaccaugaacucgcucacccucccauccgaagucaaucuaugcaacaucgacauuuucaaccccaaauacgacugcaaaauuaugacaucaaaaaccgacgucucauccucagucaucacuucccucggcgcaaucguaagcugcuacgggaaaacaaagugcaccgcuuccaacaaaaacaaaggcaucaucaaaaccuucucuaacggcugcgacuacgucuccaacaaaggagucgacaccguauccgucggcaacacccucuacuacgucaacaaacaggaaggaaaaucgcucuacgucaaaggagaaccaaucaucaacuucuacgacccccuagucuucccauccgacgaguucgacgccagcaucucacaagucaaugaaaagaucaaccagucacucgcauucauccguaagucagacgaacuccuacacaacgucaacgucggcaagucaacaaccaacauaaugaucaccaccauaaucaucgucauaauaguaauccuccuucuccuaaucgcagucggccucuuccucuacugcaaagcacgcuaaggacuaguaauaaggaaacuguaugaaugucugugggcaggaagugaagagauccuucuguaaagguuuuuggaauuaugucugcugaauaauaaacuuuuuugaaauaauaaaucugguagaaaaaugagaucuaaaaaaaaaaaaaaaaaaaaaaaaaaaaaaaaaaaaaaaaaaaaaaaaaaaaaaaaaaaaaaaaugcaucccccccccccccccccccccccccccccccaaaggcucuuuucagagccaccagaauu

SEQ ID NO: 19010 - RNA, 2136 nt, Artificial Sequence
  mRNA product Design g-3 comprising derived and/or modified sequence from HRSV(Memphis-37)__AIY60640.1__F-del_DSCav1_mut7 (opt1)
gggagaguccgcucagccagguugcagaagcggcuuagcguguguccuaaucuucucucugcguguagguaggccugugccgcaaacaagcuuaccauggagcugcccauccucaagaccaacgccaucaccacgauccuggccgcggugacccugugcuucgccagcucccagaacaucaccgaggaguucuaccagagcacgugcuccgccgucagcaagggcuaccucuccgcccugcgcaccgggugguacaccagcgugaucaccaucgagcuguccaacaucaaggagaacaagugcaacggcaccgacgccaaggugaagcucaucaagcaggagcuggacaaguacaagaacgcggucacggagcugcagaugcugaugugcagcaccccggccgccggcuccgggagcgcgaucgccuccggcaucgccgucugcaaggugcugcaccucgagggcgaggugaacaagaucaagaacgcccugcuguccaccaacaaggccgucgugagccucuccaacggggugagcguccugaccuucaaggugcuggaccucaagaacuacaucgacaagcagcugcugcccauccugaacaagcagagcugcuccaucagcaacaucgagaccgucauggaguuccagcagaagaacaaccgccuccuggagaucacgcgggaguucagcgugaacgcgggcgugaccacccccgucuccaccuacaugcugacgaacagcgagcuccugucccugaucaacgacaugccgaucaccaacgaccagaagaagcucaugagcaacaacgugcagaucgugcgccagcaguccuacagcaucaugugcaucaucaaggaggagguccuggccuacguggugcagcugccccucuacggggucaucgacacccccugcuggaagcugcacaccagcccccugugcacgaccaacaccaaggagggcuccaacaucugccucacccggacggaccgcgggugguacugcgacaacgccggcagcguguccuucuucccgcaggccgagaccugcaaggucugcagcaaccggguguucugcgacaccaugaacucccugacccugcccagcgaggugaaccucugcaacaucgacaucuucaaccccaaguacgacugcaagaucaugacguccaagaccgacgucagcuccagcgugaucaccucccugggcgccaucgugagcugcuacgggaagaccaagugcacggcgagcaacaagaacaagggcaucaucaagaccuucuccaacgggugcgacuacgucagcaacaagggcguggacaccguguccgucggcaacacccuguacuacgugaacaagcaggagggcaagagccucuacgugaagggggagcccaucaucaacuucuacgacccgcuggucuuccccuccgacgaguucgacgccagcaucucccaggugaacgagaagaucaaccagagccuggccuucauccggaaguccgacgagcuccugcacaacgugaacgucggcaagagcaccacgaacaucaugaucaccaccaucaucaucgugaucaucgugauccugcugcuccugaucgccgucgggcuguuccucuacugcaaggcccgcugaggacuagugaagggaacacccaaauuuaauucagccuuaagcacaauuaauuaagagugaaacguaauuguacaagcaguuggucacccaccauagggcaugaucaacaccgcaaccuuuccuuuuucccccagugauucugaaaaaccccucuucccuucagcuugcuuagauguuccaaauuuaguaagcuuaaggcggccuacagaagaaaaagaaaaaaaaggccacaaaaguucccucucacuuucaguaaauaaaauaaaagcagcaacagaaauaaagaaauaaaugaaauucaaaaugaaauaaauauuguguugugcagcauuaaaaaaucaauaaaaauuaaaaaugagcaagaucuaaaaaaaaaaaaaaaaaaaaaaaaaaaaaaaaaaaaaaaaaaaaaaaaaaaaaaaaaaaaaaaaugcaucccccccccccccccccccccccccccccccaaaggcucuuuucagagccaccagaauu

SEQ ID NO: 19011 - RNA, 2136 nt, Artificial Sequence
  mRNA product Design g-3 comprising derived and/or modified sequence from HRSV(Memphis-37)__AIY60640.1__F-del_DSCav1_mut7 (opt1)
gggagaguccgcucagccagguugcagaagcggcuuagcguguguccuaaucuucucucugcguguagguaggccugugccgcaaacaagcuuaccauggagcugcccauccucaagaccaacgccaucaccacgauccuggccgcggugacccugugcuucgccagcucccagaacaucaccgaggaguucuaccagagcacgugcuccgccgucagcaagggguaccucuccgcccugcgcaccgggugguacaccagcgugaucaccaucgagcuguccaacaucaaggagaacaagugcaacggcaccgacgccaaggugaagcucaucaagcaggagcuggacaaguacaagaacgcggucacggagcugcagaugcucaugugcagcaccccggccgccggguccggcagcgccaucgcguccgggaucgccgugugcaaggugcugcaccuggagggcgaggucaacaagaucaagaacgcccuccugagcaccaacaaggccguggugucccugagcaacggcgucuccgugcucaccuucaaggugcuggaccugaagaacuacaucgacaagcagcuccugcccauccugaacaagcagagcugcuccaucagcaacaucgagacggucauggaguuccagcagaagaacaaccggcuccuggagaucacccgcgaguucuccgugaacgccggggugaccacccccgucagcacguacaugcugaccaacagcgagcuccugucccugaucaacgacaugcccaucaccaacgaccagaagaagcucaugagcaacaacgugcagaucgugcggcagcaguccuacagcaucaugugcaucaucaaggaggagguccuggcguacguggugcagcugccgcucuacggcgucaucgacacccccugcuggaagcugcacacgagcccccugugcaccaccaacaccaaggaggggagcaacaucugccucacgcgcaccgaccggggcugguacugcgacaacgccggguccgugagcuucuucccccaggccgagaccugcaaggugugcuccaaccgcgucuucugcgacaccaugaacagccugacgcugccguccgaggugaaccucugcaacaucgacaucuucaaccccaaguacgacugcaagaucaugaccagcaagaccgacgucuccagcuccgugaucaccagccugggcgccaucguguccugcuacggcaagacgaagugcaccgccagcaacaagaacaaggggaucaucaagaccuucuccaacggcugcgacuacgucagcaacaaggggguggacaccgugagcgucggcaacacgcuguacuacgugaacaagcaggagggcaagucccucuacgugaagggggagcccaucaucaacuucuacgacccccuggucuucccgagcgacgaguucgacgcguccaucagccaggugaacgagaagaucaaccagucccuggccuucauccggaaguccgacgagcuccugcacaacgugaacgucggcaaguccaccaccaacaucaugaucaccaccaucaucaucgugaucaucgugauccugcuccugcugaucgccgucggccucuuccuguacugcaaggcccgcugaggacuagugaagggaacacccaaauuuaauucagccuuaagcacaauuaauuaagagugaaacguaauuguacaagcaguuggucacccaccauagggcaugaucaacaccgcaaccuuuccuuuuucccccagugauucugaaaaaccccucuucccuucagcuugcuuagauguuccaaauuuaguaagcuuaaggcggccuacagaagaaaaagaaaaaaaaggccacaaaaguucccucucacuuucaguaaauaaaauaaaagcagcaacagaaauaaagaaauaaaugaaauucaaaaugaaauaaauauuguguugugcagcauuaaaaaaucaauaaaaauuaaaaaugagcaagaucuaaaaaaaaaaaaaaaaaaaaaaaaaaaaaaaaaaaaaaaaaaaaaaaaaaaaaaaaaaaaaaaaugcaucccccccccccccccccccccccccccccccaaaggcucuuuucagagccaccagaauu

SEQ ID NO: 19012 - RNA, 2136 nt, Artificial Sequence
  mRNA product Design g-3 comprising derived and/or modified sequence from HRSV(Memphis-37)__AIY60640.1__F-del_DSCav1_mut7 (opt2)
gggagaguccgcucagccagguugcagaagcggcuuagcguguguccuaaucuucucucugcguguagguaggccugugccgcaaacaagcuuaccauggagcuccccauccucaagaccaacgccaucaccaccauccucgccgccgucacccucugcuucgccuccucccagaacaucaccgaggaguucuaccaguccaccugcuccgccgucuccaagggcuaccucuccgcccuccgcaccggcugguacaccuccgucaucaccaucgagcucuccaacaucaaggagaacaagugcaacggcaccgacgccaaggucaagcucaucaagcaggagcucgacaaguacaagaacgccgucaccgagcuccagaugcucaugugcuccacccccgccgccggcuccggcuccgccaucgccuccggcaucgccgucugcaagguccuccaccucgagggcgaggucaacaagaucaagaacgcccuccucuccaccaacaaggccgucgucucccucuccaacggcgucuccguccucaccuucaagguccucgaccucaagaacuacaucgacaagcagcuccuccccauccucaacaagcaguccugcuccaucuccaacaucgagaccgucauggaguuccagcagaagaacaaccgccuccucgagaucacccgcgaguucuccgucaacgccggcgucaccacccccgucuccaccuacaugcucaccaacuccgagcuccucucccucaucaacgacaugcccaucaccaacgaccagaagaagcucauguccaacaacguccagaucguccgccagcaguccuacuccaucaugugcaucaucaaggaggagguccucgccuacgucguccagcucccccucuacggcgucaucgacacccccugcuggaagcuccacaccuccccccucugcaccaccaacaccaaggagggcuccaacaucugccucacccgcaccgaccgcggcugguacugcgacaacgccggcuccgucuccuucuucccccaggccgagaccugcaaggucugcuccaaccgcgucuucugcgacaccaugaacucccucacccuccccuccgaggucaaccucugcaacaucgacaucuucaaccccaaguacgacugcaagaucaugaccuccaagaccgacgucuccuccuccgucaucaccucccucggcgccaucgucuccugcuacggcaagaccaagugcaccgccuccaacaagaacaagggcaucaucaagaccuucuccaacggcugcgacuacgucuccaacaagggcgucgacaccgucuccgucggcaacacccucuacuacgucaacaagcaggagggcaagucccucuacgucaagggcgagcccaucaucaacuucuacgacccccucgucuuccccuccgacgaguucgacgccuccaucucccaggucaacgagaagaucaaccagucccucgccuucauccgcaaguccgacgagcuccuccacaacgucaacgucggcaaguccaccaccaacaucaugaucaccaccaucaucaucgucaucaucgucauccuccuccuccucaucgccgucggccucuuccucuacugcaaggcccgcugaggacuagugaagggaacacccaaauuuaauucagccuuaagcacaauuaauuaagagugaaacguaauuguacaagcaguuggucacccaccauagggcaugaucaacaccgcaaccuuuccuuuuucccccagugauucugaaaaaccccucuucccuucagcuugcuuagauguuccaaauuuaguaagcuuaaggcggccuacagaagaaaaagaaaaaaaaggccacaaaaguucccucucacuuucaguaaauaaaauaaaagcagcaacagaaauaaagaaauaaaugaaauucaaaaugaaauaaauauuguguugugcagcauuaaaaaaucaauaaaaauuaaaaaugagcaagaucuaaaaaaaaaaaaaaaaaaaaaaaaaaaaaaaaaaaaaaaaaaaaaaaaaaaaaaaaaaaaaaaaugcaucccccccccccccccccccccccccccccccaaaggcucuuuucagagccaccagaauu

SEQ ID NO: 19013 - RNA, 2136 nt, Artificial Sequence
  mRNA product Design g-3 comprising derived and/or modified sequence from HRSV(Memphis-37)__AIY60640.1__F-del_DSCav1_mut7 (opt3)
gggagaguccgcucagccagguugcagaagcggcuuagcguguguccuaaucuucucucugcguguagguaggccugugccgcaaacaagcuuaccauggagcugcccauccucaagaccaacgccauuacaacuauacuugcugcagugacgcugugcuucgccagcucccagaauaucaccgaagaguuuuaccaaucuacauguucagcggucaguaaaggcuauuugagcgcuuuaagaacugggugguacaccuccguuauuacaaucgaacugucuaacauuaaggagaauaaaugcaacggaaccgacgccaaggugaaacuaaucaagcaggaacucgauaaguauaaaaaugcaguaacugagcugcagaugcuuauguguucgaccccugccgcugguucaggcagcgcaauagccagugggaucgcugugugcaagguccugcacuuggagggagaagugaacaaaauuaagaaugcccuccuguccacaaacaaagcgguugugucucugagcaauggcgucuccgugcucacguucaagguauuagaccugaagaacuacaucgauaaacagcuuuugccaauucugaauaagcaaucauguaguaucagcaacauagagacuguuauggaauuucagcagaaaaauaacaggcuacucgagauuacccgggaguucucugugaaugccggugucacaacuccgguguccaccuauaugcugacaaacucagaacuucugagcuugaucaacgacaugcccauuaccaaugaucagaagaaacucaugaguaacaaugugcaaaucguccgccagcagucuuacuccaucaugugcauuauaaaggaggaaguucuggcauaugugguacaguuaccucuguacggggugaucgacacgccauguuggaaacuccauacuagcccccuuugcacaaccaacacuaaggagggaucgaauauuugucugacacgaaccgaucguggcugguacugcgacaacgcuggcucugucuccuuuuucccucaagccgaaacguguaaggugugcucaaauagaguguuuugcgauaccaugaacaguuugacacuaccaagcgagguuaaucuguguaacaucgacauauucaaucccaaauaugauugcaagauuaugacuuccaaaaccgacgucucuagcucagugaucacaagucucggggcaaucguauccuguuacggaaagacuaaaugcaccgcuagcaacaagaauaaggguauuaucaaaacauuuucuaacggcugugauuauguuucaaauaaggggguggacaccgucagugugggaaacacucuguacuaugucaacaaacaggagggcaagagccuuuacgugaaaggugaaccuauuauaaauuucuaugacccacugguuuuuccguccgaugaguucgacgccucuaucagccaggugaacgaaaagauuaaucaaucguuggcguuuaucaggaaguccgaugagcuccugcacaacguaaaugucgggaaaucaacgacaaacaucaugauuaccacuauaaucauugugaucauuguuaucuuacugcuacucauagccgugggacuguuccuuuacugcaaggcacggugaggacuagugaagggaacacccaaauuuaauucagccuuaagcacaauuaauuaagagugaaacguaauuguacaagcaguuggucacccaccauagggcaugaucaacaccgcaaccuuuccuuuuucccccagugauucugaaaaaccccucuucccuucagcuugcuuagauguuccaaauuuaguaagcuuaaggcggccuacagaagaaaaagaaaaaaaaggccacaaaaguucccucucacuuucaguaaauaaaauaaaagcagcaacagaaauaaagaaauaaaugaaauucaaaaugaaauaaauauuguguugugcagcauuaaaaaaucaauaaaaauuaaaaaugagcaagaucuaaaaaaaaaaaaaaaaaaaaaaaaaaaaaaaaaaaaaaaaaaaaaaaaaaaaaaaaaaaaaaaaugcaucccccccccccccccccccccccccccccccaaaggcucuuuucagagccaccagaauu

SEQ ID NO: 19014 - RNA, 2136 nt, Artificial Sequence
  mRNA product Design g-3 comprising derived and/or modified sequence from HRSV(Memphis-37)__AIY60640.1__F-del_DSCav1_mut7 (opt4)
gggagaguccgcucagccagguugcagaagcggcuuagcguguguccuaaucuucucucugcguguagguaggccugugccgcaaacaagcuuaccauggagcugcccauccugaagaccaacgccaucaccaccauccuggccgccgugacccugugcuucgccagcagccagaacaucaccgaggaguucuaccagagcaccugcagcgccgugagcaagggcuaccugagcgcccugagaaccggcugguacaccagcgugaucaccaucgagcugagcaacaucaaggagaacaagugcaacggcaccgacgccaaggugaagcugaucaagcaggagcuggacaaguacaagaacgccgugaccgagcugcagaugcugaugugcagcacccccgccgccggcagcggcagcgccaucgccagcggcaucgccgugugcaaggugcugcaccuggagggcgaggugaacaagaucaagaacgcccugcugagcaccaacaaggccguggugagccugagcaacggcgugagcgugcugaccuucaaggugcuggaccugaagaacuacaucgacaagcagcugcugcccauccugaacaagcagagcugcagcaucagcaacaucgagaccgugauggaguuccagcagaagaacaacagacugcuggagaucaccagagaguucagcgugaacgccggcgugaccacccccgugagcaccuacaugcugaccaacagcgagcugcugagccugaucaacgacaugcccaucaccaacgaccagaagaagcugaugagcaacaacgugcagaucgugagacagcagagcuacagcaucaugugcaucaucaaggaggaggugcuggccuacguggugcagcugccccuguacggcgugaucgacacccccugcuggaagcugcacaccagcccccugugcaccaccaacaccaaggagggcagcaacaucugccugaccagaaccgacagaggcugguacugcgacaacgccggcagcgugagcuucuucccccaggccgagaccugcaaggugugcagcaacagaguguucugcgacaccaugaacagccugacccugcccagcgaggugaaccugugcaacaucgacaucuucaaccccaaguacgacugcaagaucaugaccagcaagaccgacgugagcagcagcgugaucaccagccugggcgccaucgugagcugcuacggcaagaccaagugcaccgccagcaacaagaacaagggcaucaucaagaccuucagcaacggcugcgacuacgugagcaacaagggcguggacaccgugagcgugggcaacacccuguacuacgugaacaagcaggagggcaagagccuguacgugaagggcgagcccaucaucaacuucuacgacccccugguguuccccagcgacgaguucgacgccagcaucagccaggugaacgagaagaucaaccagagccuggccuucaucagaaagagcgacgagcugcugcacaacgugaacgugggcaagagcaccaccaacaucaugaucaccaccaucaucaucgugaucaucgugauccugcugcugcugaucgccgugggccuguuccuguacugcaaggccagaugaggacuagugaagggaacacccaaauuuaauucagccuuaagcacaauuaauuaagagugaaacguaauuguacaagcaguuggucacccaccauagggcaugaucaacaccgcaaccuuuccuuuuucccccagugauucugaaaaaccccucuucccuucagcuugcuuagauguuccaaauuuaguaagcuuaaggcggccuacagaagaaaaagaaaaaaaaggccacaaaaguucccucucacuuucaguaaauaaaauaaaagcagcaacagaaauaaagaaauaaaugaaauucaaaaugaaauaaauauuguguugugcagcauuaaaaaaucaauaaaaauuaaaaaugagcaagaucuaaaaaaaaaaaaaaaaaaaaaaaaaaaaaaaaaaaaaaaaaaaaaaaaaaaaaaaaaaaaaaaaugcaucccccccccccccccccccccccccccccccaaaggcucuuuucagagccaccagaauu

SEQ ID NO: 19015 - RNA, 2136 nt, Artificial Sequence
  mRNA product Design g-3 comprising derived and/or modified sequence from HRSV(Memphis-37)__AIY60640.1__F-del_DSCav1_mut7 (opt5)
gggagaguccgcucagccagguugcagaagcggcuuagcguguguccuaaucuucucucugcguguagguaggccugugccgcaaacaagcuuaccauggagcugcccauccucaagaccaacgccauuacaacgauccuggcugccgugacccuuugcuucgcgagcucccagaauauuacagaagaguuuuaccaaucuaccuguagcgcugucuccaaaggcuaucugucugcccucagaacagggugguacaccagcguuaucacaauugaacuguccaacaucaaggagaauaaaugcaacggaaccgacgccaaggugaaacuuaucaagcaggaacuggauaaguauaaaaaugcugugacggagcuccagaugcugauguguucuaccccugccgcuggcagcggguccgccauugcgagcggaaucgccgucugcaaggugcugcaccucgagggcgaaguuaacaaaauuaagaaugcucugcuuucuacaaacaaagccguggucucccugagcaauggggugucuguucucaccuucaaggugcuggaccuuaagaacuacaucgauaaacagcugcucccgauucugaauaagcaauccuguagcaucucuaacauugagacagucauggaauuucagcagaaaaauaaccggcugcucgagaucacccgcgaguucuccgugaaugcuggagugacgacacccgucagcaccuauaugcugacaaacuccgaacuucugucucucaucaacgacaugccuauuaccaaugaucagaagaaacugaugagcaacaauguucaaaucgugagacagcaguccuacagcauuaugugcaucauuaaggaggaagugcuugccuaugucgugcagcugccccucuacggcguuaucgacaccccuuguuggaaacugcauacaucuccccugugcacgaccaacacaaaggagggcuccaauaucugucucacccggacagaucgcgggugguacugcgacaacgcgggaagcgugagcuuuuucccucaagccgaaaccuguaaggucugcucuaauagaguguuuugcgauacgaugaacucccugacacuuccgucugagguuaaucuguguaacauugacaucuucaaucccaaauaugauugcaagauuaugaccagcaaaaccgacguguccagcucugucaucacaucccucggcgcuauugugagcuguuacgggaagaccaaaugcacagccucuaacaagaauaagggaaucaucaaaacguuuuccaacggcugugauuaugucagcaauaaggggguggacaccguuuccgugggaaacacacuguacuaugucaacaaacaggagggcaagucucuuuacgugaaaggcgaaccuauuaucaauuucuaugacccccugguuuuuccuagcgaugaguucgacgcuuccauuucucaggugaacgaaaagaucaaucaaagccucgccuuuauucggaaguccgaugagcugcugcacaacgucaauguggggaaaagcaccacaaacaucaugauuaccacgaucaucauugugaucauuguuauccuccugcuucugauugccgucggacucuuccuguacugcaaggcucgcugaggacuagugaagggaacacccaaauuuaauucagccuuaagcacaauuaauuaagagugaaacguaauuguacaagcaguuggucacccaccauagggcaugaucaacaccgcaaccuuuccuuuuucccccagugauucugaaaaaccccucuucccuucagcuugcuuagauguuccaaauuuaguaagcuuaaggcggccuacagaagaaaaagaaaaaaaaggccacaaaaguucccucucacuuucaguaaauaaaauaaaagcagcaacagaaauaaagaaauaaaugaaauucaaaaugaaauaaauauuguguugugcagcauuaaaaaaucaauaaaaauuaaaaaugagcaagaucuaaaaaaaaaaaaaaaaaaaaaaaaaaaaaaaaaaaaaaaaaaaaaaaaaaaaaaaaaaaaaaaaugcaucccccccccccccccccccccccccccccccaaaggcucuuuucagagccaccagaauu

SEQ ID NO: 19016 - RNA, 2136 nt, Artificial Sequence
  mRNA product Design g-3 comprising derived and/or modified sequence from HRSV(Memphis-37)__AIY60640.1__F-del_DSCav1_mut7 (opt6)
gggagaguccgcucagccagguugcagaagcggcuuagcguguguccuaaucuucucucugcguguagguaggccugugccgcaaacaagcuuaccauggaacuaccaauacucaaaacaaacgccauaaccacaauacuagccgcaguaacacuuugcuuugccucaagucaaaacauaacagaagaauuuuaccaauccacaugcucagcuguauccaaaggauauuuauccgcacuaagaacaggaugguacacaucaguaaucacaauagaauuaucaaacauaaaagaaaacaaauguaauggcacagacgccaaaguaaaacuaauuaaacaagaacuagacaaauauaaaaaugcaguaaccgaacuccaaaugcucaugugcucuacaccagcugcaggaucaggaucagccauugcaagcgguauagcuguuugcaaaguauuacacuuagaaggagaaguaaauaaaauaaaaaacgcacuacuaucaacaaauaaagcaguaguaucccuaucaaacggaguaucaguacuuacauucaaaguauuagauuuaaaaaacuauauagacaaacaacuacuucccauauuaaacaaacaaucaugcucaauuuccaacauugaaacuguaauggaauuucaacaaaaaaacaacagacuacuugaaaucacacgagaauuuucaguaaacgcuggaguaacaacaccugucucuaccuacaugcucacaaauagcgaauuacuaucucuaaucaaugacaugccaauaacaaacgaucaaaaaaaacuaauguccaacaacguacaaauaguaagacaacaauccuauucaauaaugugcauaauaaaagaagaagucuuagcauacguuguacaacuaccauuauacggaguaauagauacaccaugcuggaaacuccacacaagcccccucugcacaacaaacaccaaagaagggucaaacauaugcuuaacaagaacagacagaggaugguacugugauaacgcaggaucugucucauucuuuccacaagcagaaacauguaaaguaugcuccaacagagucuuuugcgacaccaugaacucacuaaccuuacccucagaaguaaaccugugcaacaucgauaucuucaaccccaaauacgauugcaaaaucaugacaagcaaaacugauguauccagcucuguaauaacaucacuaggugcaauaguaucaugcuacggaaaaacaaaaugcacagcuucuaacaaaaauaaaggaauaauaaaaacauucuccaauggaugcgacuaugucucaaauaaaggaguagauacaguuucagucggcaacacacucuauuauguaaauaaacaagaaggaaaaucauuauacguaaaaggagaacccauaauaaacuucuacgacccccucguauucccaagcgacgaauuugacgccucaauaucacaaguaaacgaaaaaauaaaccaaucacucgcauucaucagaaaaucagaugaacuacuacacaauguaaacgucggaaaauccaccacaaauauaaugauaacuaccaucauaauaguaauaauagucaucuuacuacuauuaaucgcuguaggacuauuucucuacugcaaggccagauaaggacuagugaagggaacacccaaauuuaauucagccuuaagcacaauuaauuaagagugaaacguaauuguacaagcaguuggucacccaccauagggcaugaucaacaccgcaaccuuuccuuuuucccccagugauucugaaaaaccccucuucccuucagcuugcuuagauguuccaaauuuaguaagcuuaaggcggccuacagaagaaaaagaaaaaaaaggccacaaaaguucccucucacuuucaguaaauaaaauaaaagcagcaacagaaauaaagaaauaaaugaaauucaaaaugaaauaaauauuguguugugcagcauuaaaaaaucaauaaaaauuaaaaaugagcaagaucuaaaaaaaaaaaaaaaaaaaaaaaaaaaaaaaaaaaaaaaaaaaaaaaaaaaaaaaaaaaaaaaaugcaucccccccccccccccccccccccccccccccaaaggcucuuuucagagccaccagaauu

SEQ ID NO: 19017 - RNA, 2136 nt, Artificial Sequence
  mRNA product Design g-3 comprising derived and/or modified sequence from HRSV(Memphis-37)__AIY60640.1__F-del_DSCav1_mut7 (opt11)
gggagaguccgcucagccagguugcagaagcggcuuagcguguguccuaaucuucucucugcguguagguaggccugugccgcaaacaagcuuaccauggaacucccaauccucaaaacaaaugccaucaccaccauccuagccgcugucacacuaugcuucgccuccucacaaaacaucaccgaagaguucuaucaauccacaugcuccgccgucagcaagggauaccucuccgcccuuagaaccggcugguacaccucagucaucacaauugaacugucaaacaucaaagaaaacaaaugcaacggcaccgacgcaaaaguaaagcucaucaaacaagaacuggacaaguacaagaacgccgucaccgaacuacagaugcuuaugugcucaaccccugccgccggcuccggaucugccauagcuucaggcaucgccguaugcaaaguccugcaccuagaaggggaagucaacaaaaucaaaaacgcccuccucuccaccaacaaggccguugucucccugucaaacggagucuccguccuaaccuucaaaguccucgaccucaaaaacuacauagacaaacaacuccuacccauccucaacaaacaaagcugcucaauauccaacaucgaaaccgucauggaguuccaacaaaagaacaaccgacuacucgaaauaacacgcgaguucucagucaacgccggcgucaccaccccagucuccacauacaugcucaccaacuccgaacuccuaucgcucaucaacgacaugcccaucaccaaugaccagaagaaacucauguccaacaacguacaaaucguccgccaacaguccuacucaaucaugugcaucaucaaagaagaaguccuugccuacgucguccagcuuccacucuacggagucaucgacacccccugcuggaaacuccacaccuccccacuaugcaccaccaacaccaaagaaggauccaacauaugccucacccguacugaccgcggcugguacugcgacaacgccggauccgucucauucuucccccaggccgaaaccugcaaagucugcuccaaccgcgucuucugcgacaccaugaacucgcucacccucccauccgaagucaaucuaugcaacaucgacauuuucaaccccaaauacgacugcaaaauuaugacaucaaaaaccgacgucucauccucagucaucacuucccucggcgcaaucguaagcugcuacgggaaaacaaagugcaccgcuuccaacaaaaacaaaggcaucaucaaaaccuucucuaacggcugcgacuacgucuccaacaaaggagucgacaccguauccgucggcaacacccucuacuacgucaacaaacaggaaggaaaaucgcucuacgucaaaggagaaccaaucaucaacuucuacgacccccuagucuucccauccgacgaguucgacgccagcaucucacaagucaaugaaaagaucaaccagucacucgcauucauccguaagucagacgaacuccuacacaacgucaacgucggcaagucaacaaccaacauaaugaucaccaccauaaucaucgucauaauaguaauccuccuucuccuaaucgcagucggccucuuccucuacugcaaagcacgcuaaggacuagugaagggaacacccaaauuuaauucagccuuaagcacaauuaauuaagagugaaacguaauuguacaagcaguuggucacccaccauagggcaugaucaacaccgcaaccuuuccuuuuucccccagugauucugaaaaaccccucuucccuucagcuugcuuagauguuccaaauuuaguaagcuuaaggcggccuacagaagaaaaagaaaaaaaaggccacaaaaguucccucucacuuucaguaaauaaaauaaaagcagcaacagaaauaaagaaauaaaugaaauucaaaaugaaauaaauauuguguugugcagcauuaaaaaaucaauaaaaauuaaaaaugagcaagaucuaaaaaaaaaaaaaaaaaaaaaaaaaaaaaaaaaaaaaaaaaaaaaaaaaaaaaaaaaaaaaaaaugcaucccccccccccccccccccccccccccccccaaaggcucuuuucagagccaccagaauu

SEQ ID NO: 19018 - RNA, 1931 nt, Artificial Sequence
  mRNA product Design g-4 comprising derived and/or modified sequence from HRSV(Memphis-37)__AIY60640.1__F-del_DSCav1_mut7 (opt1)
gggagacuccugucgggcggaaguaggaggaguagaguuuaaaaacaguacucuuuuuccgguucgggacguaguugaagcaacgacaagccggauaaccgcucuugagacaggaagcuuaccauggagcugcccauccucaagaccaacgccaucaccacgauccuggccgcggugacccugugcuucgccagcucccagaacaucaccgaggaguucuaccagagcacgugcuccgccgucagcaagggcuaccucuccgcccugcgcaccgggugguacaccagcgugaucaccaucgagcuguccaacaucaaggagaacaagugcaacggcaccgacgccaaggugaagcucaucaagcaggagcuggacaaguacaagaacgcggucacggagcugcagaugcugaugugcagcaccccggccgccggcuccgggagcgcgaucgccuccggcaucgccgucugcaaggugcugcaccucgagggcgaggugaacaagaucaagaacgcccugcuguccaccaacaaggccgucgugagccucuccaacggggugagcguccugaccuucaaggugcuggaccucaagaacuacaucgacaagcagcugcugcccauccugaacaagcagagcugcuccaucagcaacaucgagaccgucauggaguuccagcagaagaacaaccgccuccuggagaucacgcgggaguucagcgugaacgcgggcgugaccacccccgucuccaccuacaugcugacgaacagcgagcuccugucccugaucaacgacaugccgaucaccaacgaccagaagaagcucaugagcaacaacgugcagaucgugcgccagcaguccuacagcaucaugugcaucaucaaggaggagguccuggccuacguggugcagcugccccucuacggggucaucgacacccccugcuggaagcugcacaccagcccccugugcacgaccaacaccaaggagggcuccaacaucugccucacccggacggaccgcgggugguacugcgacaacgccggcagcguguccuucuucccgcaggccgagaccugcaaggucugcagcaaccggguguucugcgacaccaugaacucccugacccugcccagcgaggugaaccucugcaacaucgacaucuucaaccccaaguacgacugcaagaucaugacguccaagaccgacgucagcuccagcgugaucaccucccugggcgccaucgugagcugcuacgggaagaccaagugcacggcgagcaacaagaacaagggcaucaucaagaccuucuccaacgggugcgacuacgucagcaacaagggcguggacaccguguccgucggcaacacccuguacuacgugaacaagcaggagggcaagagccucuacgugaagggggagcccaucaucaacuucuacgacccgcuggucuuccccuccgacgaguucgacgccagcaucucccaggugaacgagaagaucaaccagagccuggccuucauccggaaguccgacgagcuccugcacaacgugaacgucggcaagagcaccacgaacaucaugaucaccaccaucaucaucgugaucaucgugauccugcugcuccugaucgccgucgggcuguuccucuacugcaaggcccgcugaggacuaguaauaaggaaacuguaugaaugucugugggcaggaagugaagagauccuucuguaaagguuuuuggaauuaugucugcugaauaauaaacuuuuuugaaauaauaaaucugguagaaaaaugagaucuaaaaaaaaaaaaaaaaaaaaaaaaaaaaaaaaaaaaaaaaaaaaaaaaaaaaaaaaaaaaaaaaugcaucccccccccccccccccccccccccccccccaaaggcucuuuucagagccaccagaauu

SEQ ID NO: 19019 - RNA, 1931 nt, Artificial Sequence
  mRNA product Design g-4 comprising derived and/or modified sequence from HRSV(Memphis-37)__AIY60640.1__F-del_DSCav1_mut7 (opt1)
gggagacuccugucgggcggaaguaggaggaguagaguuuaaaaacaguacucuuuuuccgguucgggacguaguugaagcaacgacaagccggauaaccgcucuugagacaggaagcuuaccauggagcugcccauccucaagaccaacgccaucaccacgauccuggccgcggugacccugugcuucgccagcucccagaacaucaccgaggaguucuaccagagcacgugcuccgccgucagcaagggguaccucuccgcccugcgcaccgggugguacaccagcgugaucaccaucgagcuguccaacaucaaggagaacaagugcaacggcaccgacgccaaggugaagcucaucaagcaggagcuggacaaguacaagaacgcggucacggagcugcagaugcucaugugcagcaccccggccgccggguccggcagcgccaucgcguccgggaucgccgugugcaaggugcugcaccuggagggcgaggucaacaagaucaagaacgcccuccugagcaccaacaaggccguggugucccugagcaacggcgucuccgugcucaccuucaaggugcuggaccugaagaacuacaucgacaagcagcuccugcccauccugaacaagcagagcugcuccaucagcaacaucgagacggucauggaguuccagcagaagaacaaccggcuccuggagaucacccgcgaguucuccgugaacgccggggugaccacccccgucagcacguacaugcugaccaacagcgagcuccugucccugaucaacgacaugcccaucaccaacgaccagaagaagcucaugagcaacaacgugcagaucgugcggcagcaguccuacagcaucaugugcaucaucaaggaggagguccuggcguacguggugcagcugccgcucuacggcgucaucgacacccccugcuggaagcugcacacgagcccccugugcaccaccaacaccaaggaggggagcaacaucugccucacgcgcaccgaccggggcugguacugcgacaacgccggguccgugagcuucuucccccaggccgagaccugcaaggugugcuccaaccgcgucuucugcgacaccaugaacagccugacgcugccguccgaggugaaccucugcaacaucgacaucuucaaccccaaguacgacugcaagaucaugaccagcaagaccgacgucuccagcuccgugaucaccagccugggcgccaucguguccugcuacggcaagacgaagugcaccgccagcaacaagaacaaggggaucaucaagaccuucuccaacggcugcgacuacgucagcaacaaggggguggacaccgugagcgucggcaacacgcuguacuacgugaacaagcaggagggcaagucccucuacgugaagggggagcccaucaucaacuucuacgacccccuggucuucccgagcgacgaguucgacgcguccaucagccaggugaacgagaagaucaaccagucccuggccuucauccggaaguccgacgagcuccugcacaacgugaacgucggcaaguccaccaccaacaucaugaucaccaccaucaucaucgugaucaucgugauccugcuccugcugaucgccgucggccucuuccuguacugcaaggcccgcugaggacuaguaauaaggaaacuguaugaaugucugugggcaggaagugaagagauccuucuguaaagguuuuuggaauuaugucugcugaauaauaaacuuuuuugaaauaauaaaucugguagaaaaaugagaucuaaaaaaaaaaaaaaaaaaaaaaaaaaaaaaaaaaaaaaaaaaaaaaaaaaaaaaaaaaaaaaaaugcaucccccccccccccccccccccccccccccccaaaggcucuuuucagagccaccagaauu

SEQ ID NO: 19020 - RNA, 1931 nt, Artificial Sequence
  mRNA product Design g-4 comprising derived and/or modified sequence from HRSV(Memphis-37)__AIY60640.1__F-del_DSCav1_mut7 (opt2)
gggagacuccugucgggcggaaguaggaggaguagaguuuaaaaacaguacucuuuuuccgguucgggacguaguugaagcaacgacaagccggauaaccgcucuugagacaggaagcuuaccauggagcuccccauccucaagaccaacgccaucaccaccauccucgccgccgucacccucugcuucgccuccucccagaacaucaccgaggaguucuaccaguccaccugcuccgccgucuccaagggcuaccucuccgcccuccgcaccggcugguacaccuccgucaucaccaucgagcucuccaacaucaaggagaacaagugcaacggcaccgacgccaaggucaagcucaucaagcaggagcucgacaaguacaagaacgccgucaccgagcuccagaugcucaugugcuccacccccgccgccggcuccggcuccgccaucgccuccggcaucgccgucugcaagguccuccaccucgagggcgaggucaacaagaucaagaacgcccuccucuccaccaacaaggccgucgucucccucuccaacggcgucuccguccucaccuucaagguccucgaccucaagaacuacaucgacaagcagcuccuccccauccucaacaagcaguccugcuccaucuccaacaucgagaccgucauggaguuccagcagaagaacaaccgccuccucgagaucacccgcgaguucuccgucaacgccggcgucaccacccccgucuccaccuacaugcucaccaacuccgagcuccucucccucaucaacgacaugcccaucaccaacgaccagaagaagcucauguccaacaacguccagaucguccgccagcaguccuacuccaucaugugcaucaucaaggaggagguccucgccuacgucguccagcucccccucuacggcgucaucgacacccccugcuggaagcuccacaccuccccccucugcaccaccaacaccaaggagggcuccaacaucugccucacccgcaccgaccgcggcugguacugcgacaacgccggcuccgucuccuucuucccccaggccgagaccugcaaggucugcuccaaccgcgucuucugcgacaccaugaacucccucacccuccccuccgaggucaaccucugcaacaucgacaucuucaaccccaaguacgacugcaagaucaugaccuccaagaccgacgucuccuccuccgucaucaccucccucggcgccaucgucuccugcuacggcaagaccaagugcaccgccuccaacaagaacaagggcaucaucaagaccuucuccaacggcugcgacuacgucuccaacaagggcgucgacaccgucuccgucggcaacacccucuacuacgucaacaagcaggagggcaagucccucuacgucaagggcgagcccaucaucaacuucuacgacccccucgucuuccccuccgacgaguucgacgccuccaucucccaggucaacgagaagaucaaccagucccucgccuucauccgcaaguccgacgagcuccuccacaacgucaacgucggcaaguccaccaccaacaucaugaucaccaccaucaucaucgucaucaucgucauccuccuccuccucaucgccgucggccucuuccucuacugcaaggcccgcugaggacuaguaauaaggaaacuguaugaaugucugugggcaggaagugaagagauccuucuguaaagguuuuuggaauuaugucugcugaauaauaaacuuuuuugaaauaauaaaucugguagaaaaaugagaucuaaaaaaaaaaaaaaaaaaaaaaaaaaaaaaaaaaaaaaaaaaaaaaaaaaaaaaaaaaaaaaaaugcaucccccccccccccccccccccccccccccccaaaggcucuuuucagagccaccagaauu

SEQ ID NO: 19021 - RNA, 1931 nt, Artificial Sequence
  mRNA product Design g-4 comprising derived and/or modified sequence from HRSV(Memphis-37)__AIY60640.1__F-del_DSCav1_mut7 (opt3)
gggagacuccugucgggcggaaguaggaggaguagaguuuaaaaacaguacucuuuuuccgguucgggacguaguugaagcaacgacaagccggauaaccgcucuugagacaggaagcuuaccauggagcugcccauccucaagaccaacgccauuacaacuauacuugcugcagugacgcugugcuucgccagcucccagaauaucaccgaagaguuuuaccaaucuacauguucagcggucaguaaaggcuauuugagcgcuuuaagaacugggugguacaccuccguuauuacaaucgaacugucuaacauuaaggagaauaaaugcaacggaaccgacgccaaggugaaacuaaucaagcaggaacucgauaaguauaaaaaugcaguaacugagcugcagaugcuuauguguucgaccccugccgcugguucaggcagcgcaauagccagugggaucgcugugugcaagguccugcacuuggagggagaagugaacaaaauuaagaaugcccuccuguccacaaacaaagcgguugugucucugagcaauggcgucuccgugcucacguucaagguauuagaccugaagaacuacaucgauaaacagcuuuugccaauucugaauaagcaaucauguaguaucagcaacauagagacuguuauggaauuucagcagaaaaauaacaggcuacucgagauuacccgggaguucucugugaaugccggugucacaacuccgguguccaccuauaugcugacaaacucagaacuucugagcuugaucaacgacaugcccauuaccaaugaucagaagaaacucaugaguaacaaugugcaaaucguccgccagcagucuuacuccaucaugugcauuauaaaggaggaaguucuggcauaugugguacaguuaccucuguacggggugaucgacacgccauguuggaaacuccauacuagcccccuuugcacaaccaacacuaaggagggaucgaauauuugucugacacgaaccgaucguggcugguacugcgacaacgcuggcucugucuccuuuuucccucaagccgaaacguguaaggugugcucaaauagaguguuuugcgauaccaugaacaguuugacacuaccaagcgagguuaaucuguguaacaucgacauauucaaucccaaauaugauugcaagauuaugacuuccaaaaccgacgucucuagcucagugaucacaagucucggggcaaucguauccuguuacggaaagacuaaaugcaccgcuagcaacaagaauaaggguauuaucaaaacauuuucuaacggcugugauuauguuucaaauaaggggguggacaccgucagugugggaaacacucuguacuaugucaacaaacaggagggcaagagccuuuacgugaaaggugaaccuauuauaaauuucuaugacccacugguuuuuccguccgaugaguucgacgccucuaucagccaggugaacgaaaagauuaaucaaucguuggcguuuaucaggaaguccgaugagcuccugcacaacguaaaugucgggaaaucaacgacaaacaucaugauuaccacuauaaucauugugaucauuguuaucuuacugcuacucauagccgugggacuguuccuuuacugcaaggcacggugaggacuaguaauaaggaaacuguaugaaugucugugggcaggaagugaagagauccuucuguaaagguuuuuggaauuaugucugcugaauaauaaacuuuuuugaaauaauaaaucugguagaaaaaugagaucuaaaaaaaaaaaaaaaaaaaaaaaaaaaaaaaaaaaaaaaaaaaaaaaaaaaaaaaaaaaaaaaaugcaucccccccccccccccccccccccccccccccaaaggcucuuuucagagccaccagaauu

SEQ ID NO: 19022 - RNA, 1931 nt, Artificial Sequence
  mRNA product Design g-4 comprising derived and/or modified sequence from HRSV(Memphis-37)__AIY60640.1__F-del_DSCav1_mut7 (opt4)
gggagacuccugucgggcggaaguaggaggaguagaguuuaaaaacaguacucuuuuuccgguucgggacguaguugaagcaacgacaagccggauaaccgcucuugagacaggaagcuuaccauggagcugcccauccugaagaccaacgccaucaccaccauccuggccgccgugacccugugcuucgccagcagccagaacaucaccgaggaguucuaccagagcaccugcagcgccgugagcaagggcuaccugagcgcccugagaaccggcugguacaccagcgugaucaccaucgagcugagcaacaucaaggagaacaagugcaacggcaccgacgccaaggugaagcugaucaagcaggagcuggacaaguacaagaacgccgugaccgagcugcagaugcugaugugcagcacccccgccgccggcagcggcagcgccaucgccagcggcaucgccgugugcaaggugcugcaccuggagggcgaggugaacaagaucaagaacgcccugcugagcaccaacaaggccguggugagccugagcaacggcgugagcgugcugaccuucaaggugcuggaccugaagaacuacaucgacaagcagcugcugcccauccugaacaagcagagcugcagcaucagcaacaucgagaccgugauggaguuccagcagaagaacaacagacugcuggagaucaccagagaguucagcgugaacgccggcgugaccacccccgugagcaccuacaugcugaccaacagcgagcugcugagccugaucaacgacaugcccaucaccaacgaccagaagaagcugaugagcaacaacgugcagaucgugagacagcagagcuacagcaucaugugcaucaucaaggaggaggugcuggccuacguggugcagcugccccuguacggcgugaucgacacccccugcuggaagcugcacaccagcccccugugcaccaccaacaccaaggagggcagcaacaucugccugaccagaaccgacagaggcugguacugcgacaacgccggcagcgugagcuucuucccccaggccgagaccugcaaggugugcagcaacagaguguucugcgacaccaugaacagccugacccugcccagcgaggugaaccugugcaacaucgacaucuucaaccccaaguacgacugcaagaucaugaccagcaagaccgacgugagcagcagcgugaucaccagccugggcgccaucgugagcugcuacggcaagaccaagugcaccgccagcaacaagaacaagggcaucaucaagaccuucagcaacggcugcgacuacgugagcaacaagggcguggacaccgugagcgugggcaacacccuguacuacgugaacaagcaggagggcaagagccuguacgugaagggcgagcccaucaucaacuucuacgacccccugguguuccccagcgacgaguucgacgccagcaucagccaggugaacgagaagaucaaccagagccuggccuucaucagaaagagcgacgagcugcugcacaacgugaacgugggcaagagcaccaccaacaucaugaucaccaccaucaucaucgugaucaucgugauccugcugcugcugaucgccgugggccuguuccuguacugcaaggccagaugaggacuaguaauaaggaaacuguaugaaugucugugggcaggaagugaagagauccuucuguaaagguuuuuggaauuaugucugcugaauaauaaacuuuuuugaaauaauaaaucugguagaaaaaugagaucuaaaaaaaaaaaaaaaaaaaaaaaaaaaaaaaaaaaaaaaaaaaaaaaaaaaaaaaaaaaaaaaaugcaucccccccccccccccccccccccccccccccaaaggcucuuuucagagccaccagaauu

SEQ ID NO: 19023 - RNA, 1931 nt, Artificial Sequence
  mRNA product Design g-4 comprising derived and/or modified sequence from HRSV(Memphis-37)__AIY60640.1__F-del_DSCav1_mut7 (opt5)
gggagacuccugucgggcggaaguaggaggaguagaguuuaaaaacaguacucuuuuuccgguucgggacguaguugaagcaacgacaagccggauaaccgcucuugagacaggaagcuuaccauggagcugcccauccucaagaccaacgccauuacaacgauccuggcugccgugacccuuugcuucgcgagcucccagaauauuacagaagaguuuuaccaaucuaccuguagcgcugucuccaaaggcuaucugucugcccucagaacagggugguacaccagcguuaucacaauugaacuguccaacaucaaggagaauaaaugcaacggaaccgacgccaaggugaaacuuaucaagcaggaacuggauaaguauaaaaaugcugugacggagcuccagaugcugauguguucuaccccugccgcuggcagcggguccgccauugcgagcggaaucgccgucugcaaggugcugcaccucgagggcgaaguuaacaaaauuaagaaugcucugcuuucuacaaacaaagccguggucucccugagcaauggggugucuguucucaccuucaaggugcuggaccuuaagaacuacaucgauaaacagcugcucccgauucugaauaagcaauccuguagcaucucuaacauugagacagucauggaauuucagcagaaaaauaaccggcugcucgagaucacccgcgaguucuccgugaaugcuggagugacgacacccgucagcaccuauaugcugacaaacuccgaacuucugucucucaucaacgacaugccuauuaccaaugaucagaagaaacugaugagcaacaauguucaaaucgugagacagcaguccuacagcauuaugugcaucauuaaggaggaagugcuugccuaugucgugcagcugccccucuacggcguuaucgacaccccuuguuggaaacugcauacaucuccccugugcacgaccaacacaaaggagggcuccaauaucugucucacccggacagaucgcgggugguacugcgacaacgcgggaagcgugagcuuuuucccucaagccgaaaccuguaaggucugcucuaauagaguguuuugcgauacgaugaacucccugacacuuccgucugagguuaaucuguguaacauugacaucuucaaucccaaauaugauugcaagauuaugaccagcaaaaccgacguguccagcucugucaucacaucccucggcgcuauugugagcuguuacgggaagaccaaaugcacagccucuaacaagaauaagggaaucaucaaaacguuuuccaacggcugugauuaugucagcaauaaggggguggacaccguuuccgugggaaacacacuguacuaugucaacaaacaggagggcaagucucuuuacgugaaaggcgaaccuauuaucaauuucuaugacccccugguuuuuccuagcgaugaguucgacgcuuccauuucucaggugaacgaaaagaucaaucaaagccucgccuuuauucggaaguccgaugagcugcugcacaacgucaauguggggaaaagcaccacaaacaucaugauuaccacgaucaucauugugaucauuguuauccuccugcuucugauugccgucggacucuuccuguacugcaaggcucgcugaggacuaguaauaaggaaacuguaugaaugucugugggcaggaagugaagagauccuucuguaaagguuuuuggaauuaugucugcugaauaauaaacuuuuuugaaauaauaaaucugguagaaaaaugagaucuaaaaaaaaaaaaaaaaaaaaaaaaaaaaaaaaaaaaaaaaaaaaaaaaaaaaaaaaaaaaaaaaugcaucccccccccccccccccccccccccccccccaaaggcucuuuucagagccaccagaauu

SEQ ID NO: 19024 - RNA, 1931 nt, Artificial Sequence
  mRNA product Design g-4 comprising derived and/or modified sequence from HRSV(Memphis-37)__AIY60640.1__F-del_DSCav1_mut7 (opt6)
gggagacuccugucgggcggaaguaggaggaguagaguuuaaaaacaguacucuuuuuccgguucgggacguaguugaagcaacgacaagccggauaaccgcucuugagacaggaagcuuaccauggaacuaccaauacucaaaacaaacgccauaaccacaauacuagccgcaguaacacuuugcuuugccucaagucaaaacauaacagaagaauuuuaccaauccacaugcucagcuguauccaaaggauauuuauccgcacuaagaacaggaugguacacaucaguaaucacaauagaauuaucaaacauaaaagaaaacaaauguaauggcacagacgccaaaguaaaacuaauuaaacaagaacuagacaaauauaaaaaugcaguaaccgaacuccaaaugcucaugugcucuacaccagcugcaggaucaggaucagccauugcaagcgguauagcuguuugcaaaguauuacacuuagaaggagaaguaaauaaaauaaaaaacgcacuacuaucaacaaauaaagcaguaguaucccuaucaaacggaguaucaguacuuacauucaaaguauuagauuuaaaaaacuauauagacaaacaacuacuucccauauuaaacaaacaaucaugcucaauuuccaacauugaaacuguaauggaauuucaacaaaaaaacaacagacuacuugaaaucacacgagaauuuucaguaaacgcuggaguaacaacaccugucucuaccuacaugcucacaaauagcgaauuacuaucucuaaucaaugacaugccaauaacaaacgaucaaaaaaaacuaauguccaacaacguacaaauaguaagacaacaauccuauucaauaaugugcauaauaaaagaagaagucuuagcauacguuguacaacuaccauuauacggaguaauagauacaccaugcuggaaacuccacacaagcccccucugcacaacaaacaccaaagaagggucaaacauaugcuuaacaagaacagacagaggaugguacugugauaacgcaggaucugucucauucuuuccacaagcagaaacauguaaaguaugcuccaacagagucuuuugcgacaccaugaacucacuaaccuuacccucagaaguaaaccugugcaacaucgauaucuucaaccccaaauacgauugcaaaaucaugacaagcaaaacugauguauccagcucuguaauaacaucacuaggugcaauaguaucaugcuacggaaaaacaaaaugcacagcuucuaacaaaaauaaaggaauaauaaaaacauucuccaauggaugcgacuaugucucaaauaaaggaguagauacaguuucagucggcaacacacucuauuauguaaauaaacaagaaggaaaaucauuauacguaaaaggagaacccauaauaaacuucuacgacccccucguauucccaagcgacgaauuugacgccucaauaucacaaguaaacgaaaaaauaaaccaaucacucgcauucaucagaaaaucagaugaacuacuacacaauguaaacgucggaaaauccaccacaaauauaaugauaacuaccaucauaauaguaauaauagucaucuuacuacuauuaaucgcuguaggacuauuucucuacugcaaggccagauaaggacuaguaauaaggaaacuguaugaaugucugugggcaggaagugaagagauccuucuguaaagguuuuuggaauuaugucugcugaauaauaaacuuuuuugaaauaauaaaucugguagaaaaaugagaucuaaaaaaaaaaaaaaaaaaaaaaaaaaaaaaaaaaaaaaaaaaaaaaaaaaaaaaaaaaaaaaaaugcaucccccccccccccccccccccccccccccccaaaggcucuuuucagagccaccagaauu

SEQ ID NO: 19025 - RNA, 1931 nt, Artificial Sequence
  mRNA product Design g-4 comprising derived and/or modified sequence from HRSV(Memphis-37)__AIY60640.1__F-del_DSCav1_mut7 (opt11)
gggagacuccugucgggcggaaguaggaggaguagaguuuaaaaacaguacucuuuuuccgguucgggacguaguugaagcaacgacaagccggauaaccgcucuugagacaggaagcuuaccauggaacucccaauccucaaaacaaaugccaucaccaccauccuagccgcugucacacuaugcuucgccuccucacaaaacaucaccgaagaguucuaucaauccacaugcuccgccgucagcaagggauaccucuccgcccuuagaaccggcugguacaccucagucaucacaauugaacugucaaacaucaaagaaaacaaaugcaacggcaccgacgcaaaaguaaagcucaucaaacaagaacuggacaaguacaagaacgccgucaccgaacuacagaugcuuaugugcucaaccccugccgccggcuccggaucugccauagcuucaggcaucgccguaugcaaaguccugcaccuagaaggggaagucaacaaaaucaaaaacgcccuccucuccaccaacaaggccguugucucccugucaaacggagucuccguccuaaccuucaaaguccucgaccucaaaaacuacauagacaaacaacuccuacccauccucaacaaacaaagcugcucaauauccaacaucgaaaccgucauggaguuccaacaaaagaacaaccgacuacucgaaauaacacgcgaguucucagucaacgccggcgucaccaccccagucuccacauacaugcucaccaacuccgaacuccuaucgcucaucaacgacaugcccaucaccaaugaccagaagaaacucauguccaacaacguacaaaucguccgccaacaguccuacucaaucaugugcaucaucaaagaagaaguccuugccuacgucguccagcuuccacucuacggagucaucgacacccccugcuggaaacuccacaccuccccacuaugcaccaccaacaccaaagaaggauccaacauaugccucacccguacugaccgcggcugguacugcgacaacgccggauccgucucauucuucccccaggccgaaaccugcaaagucugcuccaaccgcgucuucugcgacaccaugaacucgcucacccucccauccgaagucaaucuaugcaacaucgacauuuucaaccccaaauacgacugcaaaauuaugacaucaaaaaccgacgucucauccucagucaucacuucccucggcgcaaucguaagcugcuacgggaaaacaaagugcaccgcuuccaacaaaaacaaaggcaucaucaaaaccuucucuaacggcugcgacuacgucuccaacaaaggagucgacaccguauccgucggcaacacccucuacuacgucaacaaacaggaaggaaaaucgcucuacgucaaaggagaaccaaucaucaacuucuacgacccccuagucuucccauccgacgaguucgacgccagcaucucacaagucaaugaaaagaucaaccagucacucgcauucauccguaagucagacgaacuccuacacaacgucaacgucggcaagucaacaaccaacauaaugaucaccaccauaaucaucgucauaauaguaauccuccuucuccuaaucgcagucggccucuuccucuacugcaaagcacgcuaaggacuaguaauaaggaaacuguaugaaugucugugggcaggaagugaagagauccuucuguaaagguuuuuggaauuaugucugcugaauaauaaacuuuuuugaaauaauaaaucugguagaaaaaugagaucuaaaaaaaaaaaaaaaaaaaaaaaaaaaaaaaaaaaaaaaaaaaaaaaaaaaaaaaaaaaaaaaaugcaucccccccccccccccccccccccccccccccaaaggcucuuuucagagccaccagaauu

SEQ ID NO: 19026 - RNA, 1907 nt, Artificial Sequence
  mRNA product Design g-5 comprising derived and/or modified sequence from HRSV(Memphis-37)__AIY60640.1__F-del_DSCav1_mut7 (opt1)
gggagacccgugacccggaaguuguacggcuacgcgacuuucccucccacaaacccucgcgcccuuccuuuccuacuugggcccggcagaaagcuuaccauggagcugcccauccucaagaccaacgccaucaccacgauccuggccgcggugacccugugcuucgccagcucccagaacaucaccgaggaguucuaccagagcacgugcuccgccgucagcaagggcuaccucuccgcccugcgcaccgggugguacaccagcgugaucaccaucgagcuguccaacaucaaggagaacaagugcaacggcaccgacgccaaggugaagcucaucaagcaggagcuggacaaguacaagaacgcggucacggagcugcagaugcugaugugcagcaccccggccgccggcuccgggagcgcgaucgccuccggcaucgccgucugcaaggugcugcaccucgagggcgaggugaacaagaucaagaacgcccugcuguccaccaacaaggccgucgugagccucuccaacggggugagcguccugaccuucaaggugcuggaccucaagaacuacaucgacaagcagcugcugcccauccugaacaagcagagcugcuccaucagcaacaucgagaccgucauggaguuccagcagaagaacaaccgccuccuggagaucacgcgggaguucagcgugaacgcgggcgugaccacccccgucuccaccuacaugcugacgaacagcgagcuccugucccugaucaacgacaugccgaucaccaacgaccagaagaagcucaugagcaacaacgugcagaucgugcgccagcaguccuacagcaucaugugcaucaucaaggaggagguccuggccuacguggugcagcugccccucuacggggucaucgacacccccugcuggaagcugcacaccagcccccugugcacgaccaacaccaaggagggcuccaacaucugccucacccggacggaccgcgggugguacugcgacaacgccggcagcguguccuucuucccgcaggccgagaccugcaaggucugcagcaaccggguguucugcgacaccaugaacucccugacccugcccagcgaggugaaccucugcaacaucgacaucuucaaccccaaguacgacugcaagaucaugacguccaagaccgacgucagcuccagcgugaucaccucccugggcgccaucgugagcugcuacgggaagaccaagugcacggcgagcaacaagaacaagggcaucaucaagaccuucuccaacgggugcgacuacgucagcaacaagggcguggacaccguguccgucggcaacacccuguacuacgugaacaagcaggagggcaagagccucuacgugaagggggagcccaucaucaacuucuacgacccgcuggucuuccccuccgacgaguucgacgccagcaucucccaggugaacgagaagaucaaccagagccuggccuucauccggaaguccgacgagcuccugcacaacgugaacgucggcaagagcaccacgaacaucaugaucaccaccaucaucaucgugaucaucgugauccugcugcuccugaucgccgucgggcuguuccucuacugcaaggcccgcugaggacuaguaauaaggaaacuguaugaaugucugugggcaggaagugaagagauccuucuguaaagguuuuuggaauuaugucugcugaauaauaaacuuuuuugaaauaauaaaucugguagaaaaaugagaucuaaaaaaaaaaaaaaaaaaaaaaaaaaaaaaaaaaaaaaaaaaaaaaaaaaaaaaaaaaaaaaaaugcaucccccccccccccccccccccccccccccccaaaggcucuuuucagagccaccagaauu

SEQ ID NO: 19027 - RNA, 1907 nt, Artificial Sequence
  mRNA product Design g-5 comprising derived and/or modified sequence from HRSV(Memphis-37)__AIY60640.1__F-del_DSCav1_mut7 (opt1)
gggagacccgugacccggaaguuguacggcuacgcgacuuucccucccacaaacccucgcgcccuuccuuuccuacuugggcccggcagaaagcuuaccauggagcugcccauccucaagaccaacgccaucaccacgauccuggccgcggugacccugugcuucgccagcucccagaacaucaccgaggaguucuaccagagcacgugcuccgccgucagcaagggguaccucuccgcccugcgcaccgggugguacaccagcgugaucaccaucgagcuguccaacaucaaggagaacaagugcaacggcaccgacgccaaggugaagcucaucaagcaggagcuggacaaguacaagaacgcggucacggagcugcagaugcucaugugcagcaccccggccgccggguccggcagcgccaucgcguccgggaucgccgugugcaaggugcugcaccuggagggcgaggucaacaagaucaagaacgcccuccugagcaccaacaaggccguggugucccugagcaacggcgucuccgugcucaccuucaaggugcuggaccugaagaacuacaucgacaagcagcuccugcccauccugaacaagcagagcugcuccaucagcaacaucgagacggucauggaguuccagcagaagaacaaccggcuccuggagaucacccgcgaguucuccgugaacgccggggugaccacccccgucagcacguacaugcugaccaacagcgagcuccugucccugaucaacgacaugcccaucaccaacgaccagaagaagcucaugagcaacaacgugcagaucgugcggcagcaguccuacagcaucaugugcaucaucaaggaggagguccuggcguacguggugcagcugccgcucuacggcgucaucgacacccccugcuggaagcugcacacgagcccccugugcaccaccaacaccaaggaggggagcaacaucugccucacgcgcaccgaccggggcugguacugcgacaacgccggguccgugagcuucuucccccaggccgagaccugcaaggugugcuccaaccgcgucuucugcgacaccaugaacagccugacgcugccguccgaggugaaccucugcaacaucgacaucuucaaccccaaguacgacugcaagaucaugaccagcaagaccgacgucuccagcuccgugaucaccagccugggcgccaucguguccugcuacggcaagacgaagugcaccgccagcaacaagaacaaggggaucaucaagaccuucuccaacggcugcgacuacgucagcaacaaggggguggacaccgugagcgucggcaacacgcuguacuacgugaacaagcaggagggcaagucccucuacgugaagggggagcccaucaucaacuucuacgacccccuggucuucccgagcgacgaguucgacgcguccaucagccaggugaacgagaagaucaaccagucccuggccuucauccggaaguccgacgagcuccugcacaacgugaacgucggcaaguccaccaccaacaucaugaucaccaccaucaucaucgugaucaucgugauccugcuccugcugaucgccgucggccucuuccuguacugcaaggcccgcugaggacuaguaauaaggaaacuguaugaaugucugugggcaggaagugaagagauccuucuguaaagguuuuuggaauuaugucugcugaauaauaaacuuuuuugaaauaauaaaucugguagaaaaaugagaucuaaaaaaaaaaaaaaaaaaaaaaaaaaaaaaaaaaaaaaaaaaaaaaaaaaaaaaaaaaaaaaaaugcaucccccccccccccccccccccccccccccccaaaggcucuuuucagagccaccagaauu

SEQ ID NO: 19028 - RNA, 1907 nt, Artificial Sequence
  mRNA product Design g-5 comprising derived and/or modified sequence from HRSV(Memphis-37)__AIY60640.1__F-del_DSCav1_mut7 (opt2)
gggagacccgugacccggaaguuguacggcuacgcgacuuucccucccacaaacccucgcgcccuuccuuuccuacuugggcccggcagaaagcuuaccauggagcuccccauccucaagaccaacgccaucaccaccauccucgccgccgucacccucugcuucgccuccucccagaacaucaccgaggaguucuaccaguccaccugcuccgccgucuccaagggcuaccucuccgcccuccgcaccggcugguacaccuccgucaucaccaucgagcucuccaacaucaaggagaacaagugcaacggcaccgacgccaaggucaagcucaucaagcaggagcucgacaaguacaagaacgccgucaccgagcuccagaugcucaugugcuccacccccgccgccggcuccggcuccgccaucgccuccggcaucgccgucugcaagguccuccaccucgagggcgaggucaacaagaucaagaacgcccuccucuccaccaacaaggccgucgucucccucuccaacggcgucuccguccucaccuucaagguccucgaccucaagaacuacaucgacaagcagcuccuccccauccucaacaagcaguccugcuccaucuccaacaucgagaccgucauggaguuccagcagaagaacaaccgccuccucgagaucacccgcgaguucuccgucaacgccggcgucaccacccccgucuccaccuacaugcucaccaacuccgagcuccucucccucaucaacgacaugcccaucaccaacgaccagaagaagcucauguccaacaacguccagaucguccgccagcaguccuacuccaucaugugcaucaucaaggaggagguccucgccuacgucguccagcucccccucuacggcgucaucgacacccccugcuggaagcuccacaccuccccccucugcaccaccaacaccaaggagggcuccaacaucugccucacccgcaccgaccgcggcugguacugcgacaacgccggcuccgucuccuucuucccccaggccgagaccugcaaggucugcuccaaccgcgucuucugcgacaccaugaacucccucacccuccccuccgaggucaaccucugcaacaucgacaucuucaaccccaaguacgacugcaagaucaugaccuccaagaccgacgucuccuccuccgucaucaccucccucggcgccaucgucuccugcuacggcaagaccaagugcaccgccuccaacaagaacaagggcaucaucaagaccuucuccaacggcugcgacuacgucuccaacaagggcgucgacaccgucuccgucggcaacacccucuacuacgucaacaagcaggagggcaagucccucuacgucaagggcgagcccaucaucaacuucuacgacccccucgucuuccccuccgacgaguucgacgccuccaucucccaggucaacgagaagaucaaccagucccucgccuucauccgcaaguccgacgagcuccuccacaacgucaacgucggcaaguccaccaccaacaucaugaucaccaccaucaucaucgucaucaucgucauccuccuccuccucaucgccgucggccucuuccucuacugcaaggcccgcugaggacuaguaauaaggaaacuguaugaaugucugugggcaggaagugaagagauccuucuguaaagguuuuuggaauuaugucugcugaauaauaaacuuuuuugaaauaauaaaucugguagaaaaaugagaucuaaaaaaaaaaaaaaaaaaaaaaaaaaaaaaaaaaaaaaaaaaaaaaaaaaaaaaaaaaaaaaaaugcaucccccccccccccccccccccccccccccccaaaggcucuuuucagagccaccagaauu

SEQ ID NO: 19029 - RNA, 1907 nt, Artificial Sequence
  mRNA product Design g-5 comprising derived and/or modified sequence from HRSV(Memphis-37)__AIY60640.1__F-del_DSCav1_mut7 (opt3)
gggagacccgugacccggaaguuguacggcuacgcgacuuucccucccacaaacccucgcgcccuuccuuuccuacuugggcccggcagaaagcuuaccauggagcugcccauccucaagaccaacgccauuacaacuauacuugcugcagugacgcugugcuucgccagcucccagaauaucaccgaagaguuuuaccaaucuacauguucagcggucaguaaaggcuauuugagcgcuuuaagaacugggugguacaccuccguuauuacaaucgaacugucuaacauuaaggagaauaaaugcaacggaaccgacgccaaggugaaacuaaucaagcaggaacucgauaaguauaaaaaugcaguaacugagcugcagaugcuuauguguucgaccccugccgcugguucaggcagcgcaauagccagugggaucgcugugugcaagguccugcacuuggagggagaagugaacaaaauuaagaaugcccuccuguccacaaacaaagcgguugugucucugagcaauggcgucuccgugcucacguucaagguauuagaccugaagaacuacaucgauaaacagcuuuugccaauucugaauaagcaaucauguaguaucagcaacauagagacuguuauggaauuucagcagaaaaauaacaggcuacucgagauuacccgggaguucucugugaaugccggugucacaacuccgguguccaccuauaugcugacaaacucagaacuucugagcuugaucaacgacaugcccauuaccaaugaucagaagaaacucaugaguaacaaugugcaaaucguccgccagcagucuuacuccaucaugugcauuauaaaggaggaaguucuggcauaugugguacaguuaccucuguacggggugaucgacacgccauguuggaaacuccauacuagcccccuuugcacaaccaacacuaaggagggaucgaauauuugucugacacgaaccgaucguggcugguacugcgacaacgcuggcucugucuccuuuuucccucaagccgaaacguguaaggugugcucaaauagaguguuuugcgauaccaugaacaguuugacacuaccaagcgagguuaaucuguguaacaucgacauauucaaucccaaauaugauugcaagauuaugacuuccaaaaccgacgucucuagcucagugaucacaagucucggggcaaucguauccuguuacggaaagacuaaaugcaccgcuagcaacaagaauaaggguauuaucaaaacauuuucuaacggcugugauuauguuucaaauaaggggguggacaccgucagugugggaaacacucuguacuaugucaacaaacaggagggcaagagccuuuacgugaaaggugaaccuauuauaaauuucuaugacccacugguuuuuccguccgaugaguucgacgccucuaucagccaggugaacgaaaagauuaaucaaucguuggcguuuaucaggaaguccgaugagcuccugcacaacguaaaugucgggaaaucaacgacaaacaucaugauuaccacuauaaucauugugaucauuguuaucuuacugcuacucauagccgugggacuguuccuuuacugcaaggcacggugaggacuaguaauaaggaaacuguaugaaugucugugggcaggaagugaagagauccuucuguaaagguuuuuggaauuaugucugcugaauaauaaacuuuuuugaaauaauaaaucugguagaaaaaugagaucuaaaaaaaaaaaaaaaaaaaaaaaaaaaaaaaaaaaaaaaaaaaaaaaaaaaaaaaaaaaaaaaaugcaucccccccccccccccccccccccccccccccaaaggcucuuuucagagccaccagaauu

SEQ ID NO: 19030 - RNA, 1907 nt, Artificial Sequence
  mRNA product Design g-5 comprising derived and/or modified sequence from HRSV(Memphis-37)__AIY60640.1__F-del_DSCav1_mut7 (opt4)
gggagacccgugacccggaaguuguacggcuacgcgacuuucccucccacaaacccucgcgcccuuccuuuccuacuugggcccggcagaaagcuuaccauggagcugcccauccugaagaccaacgccaucaccaccauccuggccgccgugacccugugcuucgccagcagccagaacaucaccgaggaguucuaccagagcaccugcagcgccgugagcaagggcuaccugagcgcccugagaaccggcugguacaccagcgugaucaccaucgagcugagcaacaucaaggagaacaagugcaacggcaccgacgccaaggugaagcugaucaagcaggagcuggacaaguacaagaacgccgugaccgagcugcagaugcugaugugcagcacccccgccgccggcagcggcagcgccaucgccagcggcaucgccgugugcaaggugcugcaccuggagggcgaggugaacaagaucaagaacgcccugcugagcaccaacaaggccguggugagccugagcaacggcgugagcgugcugaccuucaaggugcuggaccugaagaacuacaucgacaagcagcugcugcccauccugaacaagcagagcugcagcaucagcaacaucgagaccgugauggaguuccagcagaagaacaacagacugcuggagaucaccagagaguucagcgugaacgccggcgugaccacccccgugagcaccuacaugcugaccaacagcgagcugcugagccugaucaacgacaugcccaucaccaacgaccagaagaagcugaugagcaacaacgugcagaucgugagacagcagagcuacagcaucaugugcaucaucaaggaggaggugcuggccuacguggugcagcugccccuguacggcgugaucgacacccccugcuggaagcugcacaccagcccccugugcaccaccaacaccaaggagggcagcaacaucugccugaccagaaccgacagaggcugguacugcgacaacgccggcagcgugagcuucuucccccaggccgagaccugcaaggugugcagcaacagaguguucugcgacaccaugaacagccugacccugcccagcgaggugaaccugugcaacaucgacaucuucaaccccaaguacgacugcaagaucaugaccagcaagaccgacgugagcagcagcgugaucaccagccugggcgccaucgugagcugcuacggcaagaccaagugcaccgccagcaacaagaacaagggcaucaucaagaccuucagcaacggcugcgacuacgugagcaacaagggcguggacaccgugagcgugggcaacacccuguacuacgugaacaagcaggagggcaagagccuguacgugaagggcgagcccaucaucaacuucuacgacccccugguguuccccagcgacgaguucgacgccagcaucagccaggugaacgagaagaucaaccagagccuggccuucaucagaaagagcgacgagcugcugcacaacgugaacgugggcaagagcaccaccaacaucaugaucaccaccaucaucaucgugaucaucgugauccugcugcugcugaucgccgugggccuguuccuguacugcaaggccagaugaggacuaguaauaaggaaacuguaugaaugucugugggcaggaagugaagagauccuucuguaaagguuuuuggaauuaugucugcugaauaauaaacuuuuuugaaauaauaaaucugguagaaaaaugagaucuaaaaaaaaaaaaaaaaaaaaaaaaaaaaaaaaaaaaaaaaaaaaaaaaaaaaaaaaaaaaaaaaugcaucccccccccccccccccccccccccccccccaaaggcucuuuucagagccaccagaauu

SEQ ID NO: 19031 - RNA, 1907 nt, Artificial Sequence
  mRNA product Design g-5 comprising derived and/or modified sequence from HRSV(Memphis-37)__AIY60640.1__F-del_DSCav1_mut7 (opt5)
gggagacccgugacccggaaguuguacggcuacgcgacuuucccucccacaaacccucgcgcccuuccuuuccuacuugggcccggcagaaagcuuaccauggagcugcccauccucaagaccaacgccauuacaacgauccuggcugccgugacccuuugcuucgcgagcucccagaauauuacagaagaguuuuaccaaucuaccuguagcgcugucuccaaaggcuaucugucugcccucagaacagggugguacaccagcguuaucacaauugaacuguccaacaucaaggagaauaaaugcaacggaaccgacgccaaggugaaacuuaucaagcaggaacuggauaaguauaaaaaugcugugacggagcuccagaugcugauguguucuaccccugccgcuggcagcggguccgccauugcgagcggaaucgccgucugcaaggugcugcaccucgagggcgaaguuaacaaaauuaagaaugcucugcuuucuacaaacaaagccguggucucccugagcaauggggugucuguucucaccuucaaggugcuggaccuuaagaacuacaucgauaaacagcugcucccgauucugaauaagcaauccuguagcaucucuaacauugagacagucauggaauuucagcagaaaaauaaccggcugcucgagaucacccgcgaguucuccgugaaugcuggagugacgacacccgucagcaccuauaugcugacaaacuccgaacuucugucucucaucaacgacaugccuauuaccaaugaucagaagaaacugaugagcaacaauguucaaaucgugagacagcaguccuacagcauuaugugcaucauuaaggaggaagugcuugccuaugucgugcagcugccccucuacggcguuaucgacaccccuuguuggaaacugcauacaucuccccugugcacgaccaacacaaaggagggcuccaauaucugucucacccggacagaucgcgggugguacugcgacaacgcgggaagcgugagcuuuuucccucaagccgaaaccuguaaggucugcucuaauagaguguuuugcgauacgaugaacucccugacacuuccgucugagguuaaucuguguaacauugacaucuucaaucccaaauaugauugcaagauuaugaccagcaaaaccgacguguccagcucugucaucacaucccucggcgcuauugugagcuguuacgggaagaccaaaugcacagccucuaacaagaauaagggaaucaucaaaacguuuuccaacggcugugauuaugucagcaauaaggggguggacaccguuuccgugggaaacacacuguacuaugucaacaaacaggagggcaagucucuuuacgugaaaggcgaaccuauuaucaauuucuaugacccccugguuuuuccuagcgaugaguucgacgcuuccauuucucaggugaacgaaaagaucaaucaaagccucgccuuuauucggaaguccgaugagcugcugcacaacgucaauguggggaaaagcaccacaaacaucaugauuaccacgaucaucauugugaucauuguuauccuccugcuucugauugccgucggacucuuccuguacugcaaggcucgcugaggacuaguaauaaggaaacuguaugaaugucugugggcaggaagugaagagauccuucuguaaagguuuuuggaauuaugucugcugaauaauaaacuuuuuugaaauaauaaaucugguagaaaaaugagaucuaaaaaaaaaaaaaaaaaaaaaaaaaaaaaaaaaaaaaaaaaaaaaaaaaaaaaaaaaaaaaaaaugcaucccccccccccccccccccccccccccccccaaaggcucuuuucagagccaccagaauu

SEQ ID NO: 19032 - RNA, 1907 nt, Artificial Sequence
  mRNA product Design g-5 comprising derived and/or modified sequence from HRSV(Memphis-37)__AIY60640.1__F-del_DSCav1_mut7 (opt6)
gggagacccgugacccggaaguuguacggcuacgcgacuuucccucccacaaacccucgcgcccuuccuuuccuacuugggcccggcagaaagcuuaccauggaacuaccaauacucaaaacaaacgccauaaccacaauacuagccgcaguaacacuuugcuuugccucaagucaaaacauaacagaagaauuuuaccaauccacaugcucagcuguauccaaaggauauuuauccgcacuaagaacaggaugguacacaucaguaaucacaauagaauuaucaaacauaaaagaaaacaaauguaauggcacagacgccaaaguaaaacuaauuaaacaagaacuagacaaauauaaaaaugcaguaaccgaacuccaaaugcucaugugcucuacaccagcugcaggaucaggaucagccauugcaagcgguauagcuguuugcaaaguauuacacuuagaaggagaaguaaauaaaauaaaaaacgcacuacuaucaacaaauaaagcaguaguaucccuaucaaacggaguaucaguacuuacauucaaaguauuagauuuaaaaaacuauauagacaaacaacuacuucccauauuaaacaaacaaucaugcucaauuuccaacauugaaacuguaauggaauuucaacaaaaaaacaacagacuacuugaaaucacacgagaauuuucaguaaacgcuggaguaacaacaccugucucuaccuacaugcucacaaauagcgaauuacuaucucuaaucaaugacaugccaauaacaaacgaucaaaaaaaacuaauguccaacaacguacaaauaguaagacaacaauccuauucaauaaugugcauaauaaaagaagaagucuuagcauacguuguacaacuaccauuauacggaguaauagauacaccaugcuggaaacuccacacaagcccccucugcacaacaaacaccaaagaagggucaaacauaugcuuaacaagaacagacagaggaugguacugugauaacgcaggaucugucucauucuuuccacaagcagaaacauguaaaguaugcuccaacagagucuuuugcgacaccaugaacucacuaaccuuacccucagaaguaaaccugugcaacaucgauaucuucaaccccaaauacgauugcaaaaucaugacaagcaaaacugauguauccagcucuguaauaacaucacuaggugcaauaguaucaugcuacggaaaaacaaaaugcacagcuucuaacaaaaauaaaggaauaauaaaaacauucuccaauggaugcgacuaugucucaaauaaaggaguagauacaguuucagucggcaacacacucuauuauguaaauaaacaagaaggaaaaucauuauacguaaaaggagaacccauaauaaacuucuacgacccccucguauucccaagcgacgaauuugacgccucaauaucacaaguaaacgaaaaaauaaaccaaucacucgcauucaucagaaaaucagaugaacuacuacacaauguaaacgucggaaaauccaccacaaauauaaugauaacuaccaucauaauaguaauaauagucaucuuacuacuauuaaucgcuguaggacuauuucucuacugcaaggccagauaaggacuaguaauaaggaaacuguaugaaugucugugggcaggaagugaagagauccuucuguaaagguuuuuggaauuaugucugcugaauaauaaacuuuuuugaaauaauaaaucugguagaaaaaugagaucuaaaaaaaaaaaaaaaaaaaaaaaaaaaaaaaaaaaaaaaaaaaaaaaaaaaaaaaaaaaaaaaaugcaucccccccccccccccccccccccccccccccaaaggcucuuuucagagccaccagaauu

SEQ ID NO: 19033 - RNA, 1907 nt, Artificial Sequence
  mRNA product Design g-5 comprising derived and/or modified sequence from HRSV(Memphis-37)__AIY60640.1__F-del_DSCav1_mut7 (opt11)
gggagacccgugacccggaaguuguacggcuacgcgacuuucccucccacaaacccucgcgcccuuccuuuccuacuugggcccggcagaaagcuuaccauggaacucccaauccucaaaacaaaugccaucaccaccauccuagccgcugucacacuaugcuucgccuccucacaaaacaucaccgaagaguucuaucaauccacaugcuccgccgucagcaagggauaccucuccgcccuuagaaccggcugguacaccucagucaucacaauugaacugucaaacaucaaagaaaacaaaugcaacggcaccgacgcaaaaguaaagcucaucaaacaagaacuggacaaguacaagaacgccgucaccgaacuacagaugcuuaugugcucaaccccugccgccggcuccggaucugccauagcuucaggcaucgccguaugcaaaguccugcaccuagaaggggaagucaacaaaaucaaaaacgcccuccucuccaccaacaaggccguugucucccugucaaacggagucuccguccuaaccuucaaaguccucgaccucaaaaacuacauagacaaacaacuccuacccauccucaacaaacaaagcugcucaauauccaacaucgaaaccgucauggaguuccaacaaaagaacaaccgacuacucgaaauaacacgcgaguucucagucaacgccggcgucaccaccccagucuccacauacaugcucaccaacuccgaacuccuaucgcucaucaacgacaugcccaucaccaaugaccagaagaaacucauguccaacaacguacaaaucguccgccaacaguccuacucaaucaugugcaucaucaaagaagaaguccuugccuacgucguccagcuuccacucuacggagucaucgacacccccugcuggaaacuccacaccuccccacuaugcaccaccaacaccaaagaaggauccaacauaugccucacccguacugaccgcggcugguacugcgacaacgccggauccgucucauucuucccccaggccgaaaccugcaaagucugcuccaaccgcgucuucugcgacaccaugaacucgcucacccucccauccgaagucaaucuaugcaacaucgacauuuucaaccccaaauacgacugcaaaauuaugacaucaaaaaccgacgucucauccucagucaucacuucccucggcgcaaucguaagcugcuacgggaaaacaaagugcaccgcuuccaacaaaaacaaaggcaucaucaaaaccuucucuaacggcugcgacuacgucuccaacaaaggagucgacaccguauccgucggcaacacccucuacuacgucaacaaacaggaaggaaaaucgcucuacgucaaaggagaaccaaucaucaacuucuacgacccccuagucuucccauccgacgaguucgacgccagcaucucacaagucaaugaaaagaucaaccagucacucgcauucauccguaagucagacgaacuccuacacaacgucaacgucggcaagucaacaaccaacauaaugaucaccaccauaaucaucgucauaauaguaauccuccuucuccuaaucgcagucggccucuuccucuacugcaaagcacgcuaaggacuaguaauaaggaaacuguaugaaugucugugggcaggaagugaagagauccuucuguaaagguuuuuggaauuaugucugcugaauaauaaacuuuuuugaaauaauaaaucugguagaaaaaugagaucuaaaaaaaaaaaaaaaaaaaaaaaaaaaaaaaaaaaaaaaaaaaaaaaaaaaaaaaaaaaaaaaaugcaucccccccccccccccccccccccccccccccaaaggcucuuuucagagccaccagaauu

SEQ ID NO: 19034 - RNA, 1923 nt, Artificial Sequence
  mRNA product Design h-1 comprising derived and/or modified sequence from HRSV(Memphis-37)__AIY60640.1__F-del_DSCav1_mut7 (opt1)
gggagacccgugacccggaaguuguacggcuacgcgacuuucccucccacaaacccucgcgcccuuccuuuccuacuugggcccggcagaaagcuuaccauggagcugcccauccucaagaccaacgccaucaccacgauccuggccgcggugacccugugcuucgccagcucccagaacaucaccgaggaguucuaccagagcacgugcuccgccgucagcaagggcuaccucuccgcccugcgcaccgggugguacaccagcgugaucaccaucgagcuguccaacaucaaggagaacaagugcaacggcaccgacgccaaggugaagcucaucaagcaggagcuggacaaguacaagaacgcggucacggagcugcagaugcugaugugcagcaccccggccgccggcuccgggagcgcgaucgccuccggcaucgccgucugcaaggugcugcaccucgagggcgaggugaacaagaucaagaacgcccugcuguccaccaacaaggccgucgugagccucuccaacggggugagcguccugaccuucaaggugcuggaccucaagaacuacaucgacaagcagcugcugcccauccugaacaagcagagcugcuccaucagcaacaucgagaccgucauggaguuccagcagaagaacaaccgccuccuggagaucacgcgggaguucagcgugaacgcgggcgugaccacccccgucuccaccuacaugcugacgaacagcgagcuccugucccugaucaacgacaugccgaucaccaacgaccagaagaagcucaugagcaacaacgugcagaucgugcgccagcaguccuacagcaucaugugcaucaucaaggaggagguccuggccuacguggugcagcugccccucuacggggucaucgacacccccugcuggaagcugcacaccagcccccugugcacgaccaacaccaaggagggcuccaacaucugccucacccggacggaccgcgggugguacugcgacaacgccggcagcguguccuucuucccgcaggccgagaccugcaaggucugcagcaaccggguguucugcgacaccaugaacucccugacccugcccagcgaggugaaccucugcaacaucgacaucuucaaccccaaguacgacugcaagaucaugacguccaagaccgacgucagcuccagcgugaucaccucccugggcgccaucgugagcugcuacgggaagaccaagugcacggcgagcaacaagaacaagggcaucaucaagaccuucuccaacgggugcgacuacgucagcaacaagggcguggacaccguguccgucggcaacacccuguacuacgugaacaagcaggagggcaagagccucuacgugaagggggagcccaucaucaacuucuacgacccgcuggucuuccccuccgacgaguucgacgccagcaucucccaggugaacgagaagaucaaccagagccuggccuucauccggaaguccgacgagcuccugcacaacgugaacgucggcaagagcaccacgaacaucaugaucaccaccaucaucaucgugaucaucgugauccugcugcuccugaucgccgucgggcuguuccucuacugcaaggcccgcugaggacuaguacuggcugcaucucccuuuccucuguccuccauccuucucccaggauggugaagggggaccugguacccagugauccccaccccaggauccuaaaucaugacuuaccugcuaauaaaaacucauuggaaaagugagaagaucuaaaaaaaaaaaaaaaaaaaaaaaaaaaaaaaaaaaaaaaaaaaaaaaaaaaaaaaaaaaaaaaaugcaucccccccccccccccccccccccccccccccaaaggcucuuuucagagccaccagaauu

SEQ ID NO: 19035 - RNA, 1923 nt, Artificial Sequence
  mRNA product Design h-1 comprising derived and/or modified sequence from HRSV(Memphis-37)__AIY60640.1__F-del_DSCav1_mut7 (opt1)
gggagacccgugacccggaaguuguacggcuacgcgacuuucccucccacaaacccucgcgcccuuccuuuccuacuugggcccggcagaaagcuuaccauggagcugcccauccucaagaccaacgccaucaccacgauccuggccgcggugacccugugcuucgccagcucccagaacaucaccgaggaguucuaccagagcacgugcuccgccgucagcaagggguaccucuccgcccugcgcaccgggugguacaccagcgugaucaccaucgagcuguccaacaucaaggagaacaagugcaacggcaccgacgccaaggugaagcucaucaagcaggagcuggacaaguacaagaacgcggucacggagcugcagaugcucaugugcagcaccccggccgccggguccggcagcgccaucgcguccgggaucgccgugugcaaggugcugcaccuggagggcgaggucaacaagaucaagaacgcccuccugagcaccaacaaggccguggugucccugagcaacggcgucuccgugcucaccuucaaggugcuggaccugaagaacuacaucgacaagcagcuccugcccauccugaacaagcagagcugcuccaucagcaacaucgagacggucauggaguuccagcagaagaacaaccggcuccuggagaucacccgcgaguucuccgugaacgccggggugaccacccccgucagcacguacaugcugaccaacagcgagcuccugucccugaucaacgacaugcccaucaccaacgaccagaagaagcucaugagcaacaacgugcagaucgugcggcagcaguccuacagcaucaugugcaucaucaaggaggagguccuggcguacguggugcagcugccgcucuacggcgucaucgacacccccugcuggaagcugcacacgagcccccugugcaccaccaacaccaaggaggggagcaacaucugccucacgcgcaccgaccggggcugguacugcgacaacgccggguccgugagcuucuucccccaggccgagaccugcaaggugugcuccaaccgcgucuucugcgacaccaugaacagccugacgcugccguccgaggugaaccucugcaacaucgacaucuucaaccccaaguacgacugcaagaucaugaccagcaagaccgacgucuccagcuccgugaucaccagccugggcgccaucguguccugcuacggcaagacgaagugcaccgccagcaacaagaacaaggggaucaucaagaccuucuccaacggcugcgacuacgucagcaacaaggggguggacaccgugagcgucggcaacacgcuguacuacgugaacaagcaggagggcaagucccucuacgugaagggggagcccaucaucaacuucuacgacccccuggucuucccgagcgacgaguucgacgcguccaucagccaggugaacgagaagaucaaccagucccuggccuucauccggaaguccgacgagcuccugcacaacgugaacgucggcaaguccaccaccaacaucaugaucaccaccaucaucaucgugaucaucgugauccugcuccugcugaucgccgucggccucuuccuguacugcaaggcccgcugaggacuaguacuggcugcaucucccuuuccucuguccuccauccuucucccaggauggugaagggggaccugguacccagugauccccaccccaggauccuaaaucaugacuuaccugcuaauaaaaacucauuggaaaagugagaagaucuaaaaaaaaaaaaaaaaaaaaaaaaaaaaaaaaaaaaaaaaaaaaaaaaaaaaaaaaaaaaaaaaugcaucccccccccccccccccccccccccccccccaaaggcucuuuucagagccaccagaauu

SEQ ID NO: 19036 - RNA, 1923 nt, Artificial Sequence
  mRNA product Design h-1 comprising derived and/or modified sequence from HRSV(Memphis-37)__AIY60640.1__F-del_DSCav1_mut7 (opt2)
gggagacccgugacccggaaguuguacggcuacgcgacuuucccucccacaaacccucgcgcccuuccuuuccuacuugggcccggcagaaagcuuaccauggagcuccccauccucaagaccaacgccaucaccaccauccucgccgccgucacccucugcuucgccuccucccagaacaucaccgaggaguucuaccaguccaccugcuccgccgucuccaagggcuaccucuccgcccuccgcaccggcugguacaccuccgucaucaccaucgagcucuccaacaucaaggagaacaagugcaacggcaccgacgccaaggucaagcucaucaagcaggagcucgacaaguacaagaacgccgucaccgagcuccagaugcucaugugcuccacccccgccgccggcuccggcuccgccaucgccuccggcaucgccgucugcaagguccuccaccucgagggcgaggucaacaagaucaagaacgcccuccucuccaccaacaaggccgucgucucccucuccaacggcgucuccguccucaccuucaagguccucgaccucaagaacuacaucgacaagcagcuccuccccauccucaacaagcaguccugcuccaucuccaacaucgagaccgucauggaguuccagcagaagaacaaccgccuccucgagaucacccgcgaguucuccgucaacgccggcgucaccacccccgucuccaccuacaugcucaccaacuccgagcuccucucccucaucaacgacaugcccaucaccaacgaccagaagaagcucauguccaacaacguccagaucguccgccagcaguccuacuccaucaugugcaucaucaaggaggagguccucgccuacgucguccagcucccccucuacggcgucaucgacacccccugcuggaagcuccacaccuccccccucugcaccaccaacaccaaggagggcuccaacaucugccucacccgcaccgaccgcggcugguacugcgacaacgccggcuccgucuccuucuucccccaggccgagaccugcaaggucugcuccaaccgcgucuucugcgacaccaugaacucccucacccuccccuccgaggucaaccucugcaacaucgacaucuucaaccccaaguacgacugcaagaucaugaccuccaagaccgacgucuccuccuccgucaucaccucccucggcgccaucgucuccugcuacggcaagaccaagugcaccgccuccaacaagaacaagggcaucaucaagaccuucuccaacggcugcgacuacgucuccaacaagggcgucgacaccgucuccgucggcaacacccucuacuacgucaacaagcaggagggcaagucccucuacgucaagggcgagcccaucaucaacuucuacgacccccucgucuuccccuccgacgaguucgacgccuccaucucccaggucaacgagaagaucaaccagucccucgccuucauccgcaaguccgacgagcuccuccacaacgucaacgucggcaaguccaccaccaacaucaugaucaccaccaucaucaucgucaucaucgucauccuccuccuccucaucgccgucggccucuuccucuacugcaaggcccgcugaggacuaguacuggcugcaucucccuuuccucuguccuccauccuucucccaggauggugaagggggaccugguacccagugauccccaccccaggauccuaaaucaugacuuaccugcuaauaaaaacucauuggaaaagugagaagaucuaaaaaaaaaaaaaaaaaaaaaaaaaaaaaaaaaaaaaaaaaaaaaaaaaaaaaaaaaaaaaaaaugcaucccccccccccccccccccccccccccccccaaaggcucuuuucagagccaccagaauu

SEQ ID NO: 19037 - RNA, 1923 nt, Artificial Sequence
  mRNA product Design h-1 comprising derived and/or modified sequence from HRSV(Memphis-37)__AIY60640.1__F-del_DSCav1_mut7 (opt3)
gggagacccgugacccggaaguuguacggcuacgcgacuuucccucccacaaacccucgcgcccuuccuuuccuacuugggcccggcagaaagcuuaccauggagcugcccauccucaagaccaacgccauuacaacuauacuugcugcagugacgcugugcuucgccagcucccagaauaucaccgaagaguuuuaccaaucuacauguucagcggucaguaaaggcuauuugagcgcuuuaagaacugggugguacaccuccguuauuacaaucgaacugucuaacauuaaggagaauaaaugcaacggaaccgacgccaaggugaaacuaaucaagcaggaacucgauaaguauaaaaaugcaguaacugagcugcagaugcuuauguguucgaccccugccgcugguucaggcagcgcaauagccagugggaucgcugugugcaagguccugcacuuggagggagaagugaacaaaauuaagaaugcccuccuguccacaaacaaagcgguugugucucugagcaauggcgucuccgugcucacguucaagguauuagaccugaagaacuacaucgauaaacagcuuuugccaauucugaauaagcaaucauguaguaucagcaacauagagacuguuauggaauuucagcagaaaaauaacaggcuacucgagauuacccgggaguucucugugaaugccggugucacaacuccgguguccaccuauaugcugacaaacucagaacuucugagcuugaucaacgacaugcccauuaccaaugaucagaagaaacucaugaguaacaaugugcaaaucguccgccagcagucuuacuccaucaugugcauuauaaaggaggaaguucuggcauaugugguacaguuaccucuguacggggugaucgacacgccauguuggaaacuccauacuagcccccuuugcacaaccaacacuaaggagggaucgaauauuugucugacacgaaccgaucguggcugguacugcgacaacgcuggcucugucuccuuuuucccucaagccgaaacguguaaggugugcucaaauagaguguuuugcgauaccaugaacaguuugacacuaccaagcgagguuaaucuguguaacaucgacauauucaaucccaaauaugauugcaagauuaugacuuccaaaaccgacgucucuagcucagugaucacaagucucggggcaaucguauccuguuacggaaagacuaaaugcaccgcuagcaacaagaauaaggguauuaucaaaacauuuucuaacggcugugauuauguuucaaauaaggggguggacaccgucagugugggaaacacucuguacuaugucaacaaacaggagggcaagagccuuuacgugaaaggugaaccuauuauaaauuucuaugacccacugguuuuuccguccgaugaguucgacgccucuaucagccaggugaacgaaaagauuaaucaaucguuggcguuuaucaggaaguccgaugagcuccugcacaacguaaaugucgggaaaucaacgacaaacaucaugauuaccacuauaaucauugugaucauuguuaucuuacugcuacucauagccgugggacuguuccuuuacugcaaggcacggugaggacuaguacuggcugcaucucccuuuccucuguccuccauccuucucccaggauggugaagggggaccugguacccagugauccccaccccaggauccuaaaucaugacuuaccugcuaauaaaaacucauuggaaaagugagaagaucuaaaaaaaaaaaaaaaaaaaaaaaaaaaaaaaaaaaaaaaaaaaaaaaaaaaaaaaaaaaaaaaaugcaucccccccccccccccccccccccccccccccaaaggcucuuuucagagccaccagaauu

SEQ ID NO: 19038 - RNA, 1923 nt, Artificial Sequence
  mRNA product Design h-1 comprising derived and/or modified sequence from HRSV(Memphis-37)__AIY60640.1__F-del_DSCav1_mut7 (opt4)
gggagacccgugacccggaaguuguacggcuacgcgacuuucccucccacaaacccucgcgcccuuccuuuccuacuugggcccggcagaaagcuuaccauggagcugcccauccugaagaccaacgccaucaccaccauccuggccgccgugacccugugcuucgccagcagccagaacaucaccgaggaguucuaccagagcaccugcagcgccgugagcaagggcuaccugagcgcccugagaaccggcugguacaccagcgugaucaccaucgagcugagcaacaucaaggagaacaagugcaacggcaccgacgccaaggugaagcugaucaagcaggagcuggacaaguacaagaacgccgugaccgagcugcagaugcugaugugcagcacccccgccgccggcagcggcagcgccaucgccagcggcaucgccgugugcaaggugcugcaccuggagggcgaggugaacaagaucaagaacgcccugcugagcaccaacaaggccguggugagccugagcaacggcgugagcgugcugaccuucaaggugcuggaccugaagaacuacaucgacaagcagcugcugcccauccugaacaagcagagcugcagcaucagcaacaucgagaccgugauggaguuccagcagaagaacaacagacugcuggagaucaccagagaguucagcgugaacgccggcgugaccacccccgugagcaccuacaugcugaccaacagcgagcugcugagccugaucaacgacaugcccaucaccaacgaccagaagaagcugaugagcaacaacgugcagaucgugagacagcagagcuacagcaucaugugcaucaucaaggaggaggugcuggccuacguggugcagcugccccuguacggcgugaucgacacccccugcuggaagcugcacaccagcccccugugcaccaccaacaccaaggagggcagcaacaucugccugaccagaaccgacagaggcugguacugcgacaacgccggcagcgugagcuucuucccccaggccgagaccugcaaggugugcagcaacagaguguucugcgacaccaugaacagccugacccugcccagcgaggugaaccugugcaacaucgacaucuucaaccccaaguacgacugcaagaucaugaccagcaagaccgacgugagcagcagcgugaucaccagccugggcgccaucgugagcugcuacggcaagaccaagugcaccgccagcaacaagaacaagggcaucaucaagaccuucagcaacggcugcgacuacgugagcaacaagggcguggacaccgugagcgugggcaacacccuguacuacgugaacaagcaggagggcaagagccuguacgugaagggcgagcccaucaucaacuucuacgacccccugguguuccccagcgacgaguucgacgccagcaucagccaggugaacgagaagaucaaccagagccuggccuucaucagaaagagcgacgagcugcugcacaacgugaacgugggcaagagcaccaccaacaucaugaucaccaccaucaucaucgugaucaucgugauccugcugcugcugaucgccgugggccuguuccuguacugcaaggccagaugaggacuaguacuggcugcaucucccuuuccucuguccuccauccuucucccaggauggugaagggggaccugguacccagugauccccaccccaggauccuaaaucaugacuuaccugcuaauaaaaacucauuggaaaagugagaagaucuaaaaaaaaaaaaaaaaaaaaaaaaaaaaaaaaaaaaaaaaaaaaaaaaaaaaaaaaaaaaaaaaugcaucccccccccccccccccccccccccccccccaaaggcucuuuucagagccaccagaauu

SEQ ID NO: 19039 - RNA, 1923 nt, Artificial Sequence
  mRNA product Design h-1 comprising derived and/or modified sequence from HRSV(Memphis-37)__AIY60640.1__F-del_DSCav1_mut7 (opt5)
gggagacccgugacccggaaguuguacggcuacgcgacuuucccucccacaaacccucgcgcccuuccuuuccuacuugggcccggcagaaagcuuaccauggagcugcccauccucaagaccaacgccauuacaacgauccuggcugccgugacccuuugcuucgcgagcucccagaauauuacagaagaguuuuaccaaucuaccuguagcgcugucuccaaaggcuaucugucugcccucagaacagggugguacaccagcguuaucacaauugaacuguccaacaucaaggagaauaaaugcaacggaaccgacgccaaggugaaacuuaucaagcaggaacuggauaaguauaaaaaugcugugacggagcuccagaugcugauguguucuaccccugccgcuggcagcggguccgccauugcgagcggaaucgccgucugcaaggugcugcaccucgagggcgaaguuaacaaaauuaagaaugcucugcuuucuacaaacaaagccguggucucccugagcaauggggugucuguucucaccuucaaggugcuggaccuuaagaacuacaucgauaaacagcugcucccgauucugaauaagcaauccuguagcaucucuaacauugagacagucauggaauuucagcagaaaaauaaccggcugcucgagaucacccgcgaguucuccgugaaugcuggagugacgacacccgucagcaccuauaugcugacaaacuccgaacuucugucucucaucaacgacaugccuauuaccaaugaucagaagaaacugaugagcaacaauguucaaaucgugagacagcaguccuacagcauuaugugcaucauuaaggaggaagugcuugccuaugucgugcagcugccccucuacggcguuaucgacaccccuuguuggaaacugcauacaucuccccugugcacgaccaacacaaaggagggcuccaauaucugucucacccggacagaucgcgggugguacugcgacaacgcgggaagcgugagcuuuuucccucaagccgaaaccuguaaggucugcucuaauagaguguuuugcgauacgaugaacucccugacacuuccgucugagguuaaucuguguaacauugacaucuucaaucccaaauaugauugcaagauuaugaccagcaaaaccgacguguccagcucugucaucacaucccucggcgcuauugugagcuguuacgggaagaccaaaugcacagccucuaacaagaauaagggaaucaucaaaacguuuuccaacggcugugauuaugucagcaauaaggggguggacaccguuuccgugggaaacacacuguacuaugucaacaaacaggagggcaagucucuuuacgugaaaggcgaaccuauuaucaauuucuaugacccccugguuuuuccuagcgaugaguucgacgcuuccauuucucaggugaacgaaaagaucaaucaaagccucgccuuuauucggaaguccgaugagcugcugcacaacgucaauguggggaaaagcaccacaaacaucaugauuaccacgaucaucauugugaucauuguuauccuccugcuucugauugccgucggacucuuccuguacugcaaggcucgcugaggacuaguacuggcugcaucucccuuuccucuguccuccauccuucucccaggauggugaagggggaccugguacccagugauccccaccccaggauccuaaaucaugacuuaccugcuaauaaaaacucauuggaaaagugagaagaucuaaaaaaaaaaaaaaaaaaaaaaaaaaaaaaaaaaaaaaaaaaaaaaaaaaaaaaaaaaaaaaaaugcaucccccccccccccccccccccccccccccccaaaggcucuuuucagagccaccagaauu

SEQ ID NO: 19040 - RNA, 1923 nt, Artificial Sequence
  mRNA product Design h-1 comprising derived and/or modified sequence from HRSV(Memphis-37)__AIY60640.1__F-del_DSCav1_mut7 (opt6)
gggagacccgugacccggaaguuguacggcuacgcgacuuucccucccacaaacccucgcgcccuuccuuuccuacuugggcccggcagaaagcuuaccauggaacuaccaauacucaaaacaaacgccauaaccacaauacuagccgcaguaacacuuugcuuugccucaagucaaaacauaacagaagaauuuuaccaauccacaugcucagcuguauccaaaggauauuuauccgcacuaagaacaggaugguacacaucaguaaucacaauagaauuaucaaacauaaaagaaaacaaauguaauggcacagacgccaaaguaaaacuaauuaaacaagaacuagacaaauauaaaaaugcaguaaccgaacuccaaaugcucaugugcucuacaccagcugcaggaucaggaucagccauugcaagcgguauagcuguuugcaaaguauuacacuuagaaggagaaguaaauaaaauaaaaaacgcacuacuaucaacaaauaaagcaguaguaucccuaucaaacggaguaucaguacuuacauucaaaguauuagauuuaaaaaacuauauagacaaacaacuacuucccauauuaaacaaacaaucaugcucaauuuccaacauugaaacuguaauggaauuucaacaaaaaaacaacagacuacuugaaaucacacgagaauuuucaguaaacgcuggaguaacaacaccugucucuaccuacaugcucacaaauagcgaauuacuaucucuaaucaaugacaugccaauaacaaacgaucaaaaaaaacuaauguccaacaacguacaaauaguaagacaacaauccuauucaauaaugugcauaauaaaagaagaagucuuagcauacguuguacaacuaccauuauacggaguaauagauacaccaugcuggaaacuccacacaagcccccucugcacaacaaacaccaaagaagggucaaacauaugcuuaacaagaacagacagaggaugguacugugauaacgcaggaucugucucauucuuuccacaagcagaaacauguaaaguaugcuccaacagagucuuuugcgacaccaugaacucacuaaccuuacccucagaaguaaaccugugcaacaucgauaucuucaaccccaaauacgauugcaaaaucaugacaagcaaaacugauguauccagcucuguaauaacaucacuaggugcaauaguaucaugcuacggaaaaacaaaaugcacagcuucuaacaaaaauaaaggaauaauaaaaacauucuccaauggaugcgacuaugucucaaauaaaggaguagauacaguuucagucggcaacacacucuauuauguaaauaaacaagaaggaaaaucauuauacguaaaaggagaacccauaauaaacuucuacgacccccucguauucccaagcgacgaauuugacgccucaauaucacaaguaaacgaaaaaauaaaccaaucacucgcauucaucagaaaaucagaugaacuacuacacaauguaaacgucggaaaauccaccacaaauauaaugauaacuaccaucauaauaguaauaauagucaucuuacuacuauuaaucgcuguaggacuauuucucuacugcaaggccagauaaggacuaguacuggcugcaucucccuuuccucuguccuccauccuucucccaggauggugaagggggaccugguacccagugauccccaccccaggauccuaaaucaugacuuaccugcuaauaaaaacucauuggaaaagugagaagaucuaaaaaaaaaaaaaaaaaaaaaaaaaaaaaaaaaaaaaaaaaaaaaaaaaaaaaaaaaaaaaaaaugcaucccccccccccccccccccccccccccccccaaaggcucuuuucagagccaccagaauu

SEQ ID NO: 19041 - RNA, 1923 nt, Artificial Sequence
  mRNA product Design h-1 comprising derived and/or modified sequence from HRSV(Memphis-37)__AIY60640.1__F-del_DSCav1_mut7 (opt11)
gggagacccgugacccggaaguuguacggcuacgcgacuuucccucccacaaacccucgcgcccuuccuuuccuacuugggcccggcagaaagcuuaccauggaacucccaauccucaaaacaaaugccaucaccaccauccuagccgcugucacacuaugcuucgccuccucacaaaacaucaccgaagaguucuaucaauccacaugcuccgccgucagcaagggauaccucuccgcccuuagaaccggcugguacaccucagucaucacaauugaacugucaaacaucaaagaaaacaaaugcaacggcaccgacgcaaaaguaaagcucaucaaacaagaacuggacaaguacaagaacgccgucaccgaacuacagaugcuuaugugcucaaccccugccgccggcuccggaucugccauagcuucaggcaucgccguaugcaaaguccugcaccuagaaggggaagucaacaaaaucaaaaacgcccuccucuccaccaacaaggccguugucucccugucaaacggagucuccguccuaaccuucaaaguccucgaccucaaaaacuacauagacaaacaacuccuacccauccucaacaaacaaagcugcucaauauccaacaucgaaaccgucauggaguuccaacaaaagaacaaccgacuacucgaaauaacacgcgaguucucagucaacgccggcgucaccaccccagucuccacauacaugcucaccaacuccgaacuccuaucgcucaucaacgacaugcccaucaccaaugaccagaagaaacucauguccaacaacguacaaaucguccgccaacaguccuacucaaucaugugcaucaucaaagaagaaguccuugccuacgucguccagcuuccacucuacggagucaucgacacccccugcuggaaacuccacaccuccccacuaugcaccaccaacaccaaagaaggauccaacauaugccucacccguacugaccgcggcugguacugcgacaacgccggauccgucucauucuucccccaggccgaaaccugcaaagucugcuccaaccgcgucuucugcgacaccaugaacucgcucacccucccauccgaagucaaucuaugcaacaucgacauuuucaaccccaaauacgacugcaaaauuaugacaucaaaaaccgacgucucauccucagucaucacuucccucggcgcaaucguaagcugcuacgggaaaacaaagugcaccgcuuccaacaaaaacaaaggcaucaucaaaaccuucucuaacggcugcgacuacgucuccaacaaaggagucgacaccguauccgucggcaacacccucuacuacgucaacaaacaggaaggaaaaucgcucuacgucaaaggagaaccaaucaucaacuucuacgacccccuagucuucccauccgacgaguucgacgccagcaucucacaagucaaugaaaagaucaaccagucacucgcauucauccguaagucagacgaacuccuacacaacgucaacgucggcaagucaacaaccaacauaaugaucaccaccauaaucaucgucauaauaguaauccuccuucuccuaaucgcagucggccucuuccucuacugcaaagcacgcuaaggacuaguacuggcugcaucucccuuuccucuguccuccauccuucucccaggauggugaagggggaccugguacccagugauccccaccccaggauccuaaaucaugacuuaccugcuaauaaaaacucauuggaaaagugagaagaucuaaaaaaaaaaaaaaaaaaaaaaaaaaaaaaaaaaaaaaaaaaaaaaaaaaaaaaaaaaaaaaaaugcaucccccccccccccccccccccccccccccccaaaggcucuuuucagagccaccagaauu

SEQ ID NO: 19042 - RNA, 2139 nt, Artificial Sequence
  mRNA product Design h-2 comprising derived and/or modified sequence from HRSV(Memphis-37)__AIY60640.1__F-del_DSCav1_mut7 (opt1)
gggagacccgugacccggaaguuguacggcuacgcgacuuucccucccacaaacccucgcgcccuuccuuuccuacuugggcccggcagaaagcuuaccauggagcugcccauccucaagaccaacgccaucaccacgauccuggccgcggugacccugugcuucgccagcucccagaacaucaccgaggaguucuaccagagcacgugcuccgccgucagcaagggcuaccucuccgcccugcgcaccgggugguacaccagcgugaucaccaucgagcuguccaacaucaaggagaacaagugcaacggcaccgacgccaaggugaagcucaucaagcaggagcuggacaaguacaagaacgcggucacggagcugcagaugcugaugugcagcaccccggccgccggcuccgggagcgcgaucgccuccggcaucgccgucugcaaggugcugcaccucgagggcgaggugaacaagaucaagaacgcccugcuguccaccaacaaggccgucgugagccucuccaacggggugagcguccugaccuucaaggugcuggaccucaagaacuacaucgacaagcagcugcugcccauccugaacaagcagagcugcuccaucagcaacaucgagaccgucauggaguuccagcagaagaacaaccgccuccuggagaucacgcgggaguucagcgugaacgcgggcgugaccacccccgucuccaccuacaugcugacgaacagcgagcuccugucccugaucaacgacaugccgaucaccaacgaccagaagaagcucaugagcaacaacgugcagaucgugcgccagcaguccuacagcaucaugugcaucaucaaggaggagguccuggccuacguggugcagcugccccucuacggggucaucgacacccccugcuggaagcugcacaccagcccccugugcacgaccaacaccaaggagggcuccaacaucugccucacccggacggaccgcgggugguacugcgacaacgccggcagcguguccuucuucccgcaggccgagaccugcaaggucugcagcaaccggguguucugcgacaccaugaacucccugacccugcccagcgaggugaaccucugcaacaucgacaucuucaaccccaaguacgacugcaagaucaugacguccaagaccgacgucagcuccagcgugaucaccucccugggcgccaucgugagcugcuacgggaagaccaagugcacggcgagcaacaagaacaagggcaucaucaagaccuucuccaacgggugcgacuacgucagcaacaagggcguggacaccguguccgucggcaacacccuguacuacgugaacaagcaggagggcaagagccucuacgugaagggggagcccaucaucaacuucuacgacccgcuggucuuccccuccgacgaguucgacgccagcaucucccaggugaacgagaagaucaaccagagccuggccuucauccggaaguccgacgagcuccugcacaacgugaacgucggcaagagcaccacgaacaucaugaucaccaccaucaucaucgugaucaucgugauccugcugcuccugaucgccgucgggcuguuccucuacugcaaggcccgcugaggacuagugaagggaacacccaaauuuaauucagccuuaagcacaauuaauuaagagugaaacguaauuguacaagcaguuggucacccaccauagggcaugaucaacaccgcaaccuuuccuuuuucccccagugauucugaaaaaccccucuucccuucagcuugcuuagauguuccaaauuuaguaagcuuaaggcggccuacagaagaaaaagaaaaaaaaggccacaaaaguucccucucacuuucaguaaauaaaauaaaagcagcaacagaaauaaagaaauaaaugaaauucaaaaugaaauaaauauuguguugugcagcauuaaaaaaucaauaaaaauuaaaaaugagcaagaucuaaaaaaaaaaaaaaaaaaaaaaaaaaaaaaaaaaaaaaaaaaaaaaaaaaaaaaaaaaaaaaaaugcaucccccccccccccccccccccccccccccccaaaggcucuuuucagagccaccagaauu

SEQ ID NO: 19043 - RNA, 2139 nt, Artificial Sequence
  mRNA product Design h-2 comprising derived and/or modified sequence from HRSV(Memphis-37)__AIY60640.1__F-del_DSCav1_mut7 (opt1)
gggagacccgugacccggaaguuguacggcuacgcgacuuucccucccacaaacccucgcgcccuuccuuuccuacuugggcccggcagaaagcuuaccauggagcugcccauccucaagaccaacgccaucaccacgauccuggccgcggugacccugugcuucgccagcucccagaacaucaccgaggaguucuaccagagcacgugcuccgccgucagcaagggguaccucuccgcccugcgcaccgggugguacaccagcgugaucaccaucgagcuguccaacaucaaggagaacaagugcaacggcaccgacgccaaggugaagcucaucaagcaggagcuggacaaguacaagaacgcggucacggagcugcagaugcucaugugcagcaccccggccgccggguccggcagcgccaucgcguccgggaucgccgugugcaaggugcugcaccuggagggcgaggucaacaagaucaagaacgcccuccugagcaccaacaaggccguggugucccugagcaacggcgucuccgugcucaccuucaaggugcuggaccugaagaacuacaucgacaagcagcuccugcccauccugaacaagcagagcugcuccaucagcaacaucgagacggucauggaguuccagcagaagaacaaccggcuccuggagaucacccgcgaguucuccgugaacgccggggugaccacccccgucagcacguacaugcugaccaacagcgagcuccugucccugaucaacgacaugcccaucaccaacgaccagaagaagcucaugagcaacaacgugcagaucgugcggcagcaguccuacagcaucaugugcaucaucaaggaggagguccuggcguacguggugcagcugccgcucuacggcgucaucgacacccccugcuggaagcugcacacgagcccccugugcaccaccaacaccaaggaggggagcaacaucugccucacgcgcaccgaccggggcugguacugcgacaacgccggguccgugagcuucuucccccaggccgagaccugcaaggugugcuccaaccgcgucuucugcgacaccaugaacagccugacgcugccguccgaggugaaccucugcaacaucgacaucuucaaccccaaguacgacugcaagaucaugaccagcaagaccgacgucuccagcuccgugaucaccagccugggcgccaucguguccugcuacggcaagacgaagugcaccgccagcaacaagaacaaggggaucaucaagaccuucuccaacggcugcgacuacgucagcaacaaggggguggacaccgugagcgucggcaacacgcuguacuacgugaacaagcaggagggcaagucccucuacgugaagggggagcccaucaucaacuucuacgacccccuggucuucccgagcgacgaguucgacgcguccaucagccaggugaacgagaagaucaaccagucccuggccuucauccggaaguccgacgagcuccugcacaacgugaacgucggcaaguccaccaccaacaucaugaucaccaccaucaucaucgugaucaucgugauccugcuccugcugaucgccgucggccucuuccuguacugcaaggcccgcugaggacuagugaagggaacacccaaauuuaauucagccuuaagcacaauuaauuaagagugaaacguaauuguacaagcaguuggucacccaccauagggcaugaucaacaccgcaaccuuuccuuuuucccccagugauucugaaaaaccccucuucccuucagcuugcuuagauguuccaaauuuaguaagcuuaaggcggccuacagaagaaaaagaaaaaaaaggccacaaaaguucccucucacuuucaguaaauaaaauaaaagcagcaacagaaauaaagaaauaaaugaaauucaaaaugaaauaaauauuguguugugcagcauuaaaaaaucaauaaaaauuaaaaaugagcaagaucuaaaaaaaaaaaaaaaaaaaaaaaaaaaaaaaaaaaaaaaaaaaaaaaaaaaaaaaaaaaaaaaaugcaucccccccccccccccccccccccccccccccaaaggcucuuuucagagccaccagaauu

SEQ ID NO: 19044 - RNA, 2139 nt, Artificial Sequence
  mRNA product Design h-2 comprising derived and/or modified sequence from HRSV(Memphis-37)__AIY60640.1__F-del_DSCav1_mut7 (opt2)
gggagacccgugacccggaaguuguacggcuacgcgacuuucccucccacaaacccucgcgcccuuccuuuccuacuugggcccggcagaaagcuuaccauggagcuccccauccucaagaccaacgccaucaccaccauccucgccgccgucacccucugcuucgccuccucccagaacaucaccgaggaguucuaccaguccaccugcuccgccgucuccaagggcuaccucuccgcccuccgcaccggcugguacaccuccgucaucaccaucgagcucuccaacaucaaggagaacaagugcaacggcaccgacgccaaggucaagcucaucaagcaggagcucgacaaguacaagaacgccgucaccgagcuccagaugcucaugugcuccacccccgccgccggcuccggcuccgccaucgccuccggcaucgccgucugcaagguccuccaccucgagggcgaggucaacaagaucaagaacgcccuccucuccaccaacaaggccgucgucucccucuccaacggcgucuccguccucaccuucaagguccucgaccucaagaacuacaucgacaagcagcuccuccccauccucaacaagcaguccugcuccaucuccaacaucgagaccgucauggaguuccagcagaagaacaaccgccuccucgagaucacccgcgaguucuccgucaacgccggcgucaccacccccgucuccaccuacaugcucaccaacuccgagcuccucucccucaucaacgacaugcccaucaccaacgaccagaagaagcucauguccaacaacguccagaucguccgccagcaguccuacuccaucaugugcaucaucaaggaggagguccucgccuacgucguccagcucccccucuacggcgucaucgacacccccugcuggaagcuccacaccuccccccucugcaccaccaacaccaaggagggcuccaacaucugccucacccgcaccgaccgcggcugguacugcgacaacgccggcuccgucuccuucuucccccaggccgagaccugcaaggucugcuccaaccgcgucuucugcgacaccaugaacucccucacccuccccuccgaggucaaccucugcaacaucgacaucuucaaccccaaguacgacugcaagaucaugaccuccaagaccgacgucuccuccuccgucaucaccucccucggcgccaucgucuccugcuacggcaagaccaagugcaccgccuccaacaagaacaagggcaucaucaagaccuucuccaacggcugcgacuacgucuccaacaagggcgucgacaccgucuccgucggcaacacccucuacuacgucaacaagcaggagggcaagucccucuacgucaagggcgagcccaucaucaacuucuacgacccccucgucuuccccuccgacgaguucgacgccuccaucucccaggucaacgagaagaucaaccagucccucgccuucauccgcaaguccgacgagcuccuccacaacgucaacgucggcaaguccaccaccaacaucaugaucaccaccaucaucaucgucaucaucgucauccuccuccuccucaucgccgucggccucuuccucuacugcaaggcccgcugaggacuagugaagggaacacccaaauuuaauucagccuuaagcacaauuaauuaagagugaaacguaauuguacaagcaguuggucacccaccauagggcaugaucaacaccgcaaccuuuccuuuuucccccagugauucugaaaaaccccucuucccuucagcuugcuuagauguuccaaauuuaguaagcuuaaggcggccuacagaagaaaaagaaaaaaaaggccacaaaaguucccucucacuuucaguaaauaaaauaaaagcagcaacagaaauaaagaaauaaaugaaauucaaaaugaaauaaauauuguguugugcagcauuaaaaaaucaauaaaaauuaaaaaugagcaagaucuaaaaaaaaaaaaaaaaaaaaaaaaaaaaaaaaaaaaaaaaaaaaaaaaaaaaaaaaaaaaaaaaugcaucccccccccccccccccccccccccccccccaaaggcucuuuucagagccaccagaauu

SEQ ID NO: 19045 - RNA, 2139 nt, Artificial Sequence
  mRNA product Design h-2 comprising derived and/or modified sequence from HRSV(Memphis-37)__AIY60640.1__F-del_DSCav1_mut7 (opt3)
gggagacccgugacccggaaguuguacggcuacgcgacuuucccucccacaaacccucgcgcccuuccuuuccuacuugggcccggcagaaagcuuaccauggagcugcccauccucaagaccaacgccauuacaacuauacuugcugcagugacgcugugcuucgccagcucccagaauaucaccgaagaguuuuaccaaucuacauguucagcggucaguaaaggcuauuugagcgcuuuaagaacugggugguacaccuccguuauuacaaucgaacugucuaacauuaaggagaauaaaugcaacggaaccgacgccaaggugaaacuaaucaagcaggaacucgauaaguauaaaaaugcaguaacugagcugcagaugcuuauguguucgaccccugccgcugguucaggcagcgcaauagccagugggaucgcugugugcaagguccugcacuuggagggagaagugaacaaaauuaagaaugcccuccuguccacaaacaaagcgguugugucucugagcaauggcgucuccgugcucacguucaagguauuagaccugaagaacuacaucgauaaacagcuuuugccaauucugaauaagcaaucauguaguaucagcaacauagagacuguuauggaauuucagcagaaaaauaacaggcuacucgagauuacccgggaguucucugugaaugccggugucacaacuccgguguccaccuauaugcugacaaacucagaacuucugagcuugaucaacgacaugcccauuaccaaugaucagaagaaacucaugaguaacaaugugcaaaucguccgccagcagucuuacuccaucaugugcauuauaaaggaggaaguucuggcauaugugguacaguuaccucuguacggggugaucgacacgccauguuggaaacuccauacuagcccccuuugcacaaccaacacuaaggagggaucgaauauuugucugacacgaaccgaucguggcugguacugcgacaacgcuggcucugucuccuuuuucccucaagccgaaacguguaaggugugcucaaauagaguguuuugcgauaccaugaacaguuugacacuaccaagcgagguuaaucuguguaacaucgacauauucaaucccaaauaugauugcaagauuaugacuuccaaaaccgacgucucuagcucagugaucacaagucucggggcaaucguauccuguuacggaaagacuaaaugcaccgcuagcaacaagaauaaggguauuaucaaaacauuuucuaacggcugugauuauguuucaaauaaggggguggacaccgucagugugggaaacacucuguacuaugucaacaaacaggagggcaagagccuuuacgugaaaggugaaccuauuauaaauuucuaugacccacugguuuuuccguccgaugaguucgacgccucuaucagccaggugaacgaaaagauuaaucaaucguuggcguuuaucaggaaguccgaugagcuccugcacaacguaaaugucgggaaaucaacgacaaacaucaugauuaccacuauaaucauugugaucauuguuaucuuacugcuacucauagccgugggacuguuccuuuacugcaaggcacggugaggacuagugaagggaacacccaaauuuaauucagccuuaagcacaauuaauuaagagugaaacguaauuguacaagcaguuggucacccaccauagggcaugaucaacaccgcaaccuuuccuuuuucccccagugauucugaaaaaccccucuucccuucagcuugcuuagauguuccaaauuuaguaagcuuaaggcggccuacagaagaaaaagaaaaaaaaggccacaaaaguucccucucacuuucaguaaauaaaauaaaagcagcaacagaaauaaagaaauaaaugaaauucaaaaugaaauaaauauuguguugugcagcauuaaaaaaucaauaaaaauuaaaaaugagcaagaucuaaaaaaaaaaaaaaaaaaaaaaaaaaaaaaaaaaaaaaaaaaaaaaaaaaaaaaaaaaaaaaaaugcaucccccccccccccccccccccccccccccccaaaggcucuuuucagagccaccagaauu

SEQ ID NO: 19046 - RNA, 2139 nt, Artificial Sequence
  mRNA product Design h-2 comprising derived and/or modified sequence from HRSV(Memphis-37)__AIY60640.1__F-del_DSCav1_mut7 (opt4)
gggagacccgugacccggaaguuguacggcuacgcgacuuucccucccacaaacccucgcgcccuuccuuuccuacuugggcccggcagaaagcuuaccauggagcugcccauccugaagaccaacgccaucaccaccauccuggccgccgugacccugugcuucgccagcagccagaacaucaccgaggaguucuaccagagcaccugcagcgccgugagcaagggcuaccugagcgcccugagaaccggcugguacaccagcgugaucaccaucgagcugagcaacaucaaggagaacaagugcaacggcaccgacgccaaggugaagcugaucaagcaggagcuggacaaguacaagaacgccgugaccgagcugcagaugcugaugugcagcacccccgccgccggcagcggcagcgccaucgccagcggcaucgccgugugcaaggugcugcaccuggagggcgaggugaacaagaucaagaacgcccugcugagcaccaacaaggccguggugagccugagcaacggcgugagcgugcugaccuucaaggugcuggaccugaagaacuacaucgacaagcagcugcugcccauccugaacaagcagagcugcagcaucagcaacaucgagaccgugauggaguuccagcagaagaacaacagacugcuggagaucaccagagaguucagcgugaacgccggcgugaccacccccgugagcaccuacaugcugaccaacagcgagcugcugagccugaucaacgacaugcccaucaccaacgaccagaagaagcugaugagcaacaacgugcagaucgugagacagcagagcuacagcaucaugugcaucaucaaggaggaggugcuggccuacguggugcagcugccccuguacggcgugaucgacacccccugcuggaagcugcacaccagcccccugugcaccaccaacaccaaggagggcagcaacaucugccugaccagaaccgacagaggcugguacugcgacaacgccggcagcgugagcuucuucccccaggccgagaccugcaaggugugcagcaacagaguguucugcgacaccaugaacagccugacccugcccagcgaggugaaccugugcaacaucgacaucuucaaccccaaguacgacugcaagaucaugaccagcaagaccgacgugagcagcagcgugaucaccagccugggcgccaucgugagcugcuacggcaagaccaagugcaccgccagcaacaagaacaagggcaucaucaagaccuucagcaacggcugcgacuacgugagcaacaagggcguggacaccgugagcgugggcaacacccuguacuacgugaacaagcaggagggcaagagccuguacgugaagggcgagcccaucaucaacuucuacgacccccugguguuccccagcgacgaguucgacgccagcaucagccaggugaacgagaagaucaaccagagccuggccuucaucagaaagagcgacgagcugcugcacaacgugaacgugggcaagagcaccaccaacaucaugaucaccaccaucaucaucgugaucaucgugauccugcugcugcugaucgccgugggccuguuccuguacugcaaggccagaugaggacuagugaagggaacacccaaauuuaauucagccuuaagcacaauuaauuaagagugaaacguaauuguacaagcaguuggucacccaccauagggcaugaucaacaccgcaaccuuuccuuuuucccccagugauucugaaaaaccccucuucccuucagcuugcuuagauguuccaaauuuaguaagcuuaaggcggccuacagaagaaaaagaaaaaaaaggccacaaaaguucccucucacuuucaguaaauaaaauaaaagcagcaacagaaauaaagaaauaaaugaaauucaaaaugaaauaaauauuguguugugcagcauuaaaaaaucaauaaaaauuaaaaaugagcaagaucuaaaaaaaaaaaaaaaaaaaaaaaaaaaaaaaaaaaaaaaaaaaaaaaaaaaaaaaaaaaaaaaaugcaucccccccccccccccccccccccccccccccaaaggcucuuuucagagccaccagaauu

SEQ ID NO: 19047 - RNA, 2139 nt, Artificial Sequence
  mRNA product Design h-2 comprising derived and/or modified sequence from HRSV(Memphis-37)__AIY60640.1__F-del_DSCav1_mut7 (opt5)
gggagacccgugacccggaaguuguacggcuacgcgacuuucccucccacaaacccucgcgcccuuccuuuccuacuugggcccggcagaaagcuuaccauggagcugcccauccucaagaccaacgccauuacaacgauccuggcugccgugacccuuugcuucgcgagcucccagaauauuacagaagaguuuuaccaaucuaccuguagcgcugucuccaaaggcuaucugucugcccucagaacagggugguacaccagcguuaucacaauugaacuguccaacaucaaggagaauaaaugcaacggaaccgacgccaaggugaaacuuaucaagcaggaacuggauaaguauaaaaaugcugugacggagcuccagaugcugauguguucuaccccugccgcuggcagcggguccgccauugcgagcggaaucgccgucugcaaggugcugcaccucgagggcgaaguuaacaaaauuaagaaugcucugcuuucuacaaacaaagccguggucucccugagcaauggggugucuguucucaccuucaaggugcuggaccuuaagaacuacaucgauaaacagcugcucccgauucugaauaagcaauccuguagcaucucuaacauugagacagucauggaauuucagcagaaaaauaaccggcugcucgagaucacccgcgaguucuccgugaaugcuggagugacgacacccgucagcaccuauaugcugacaaacuccgaacuucugucucucaucaacgacaugccuauuaccaaugaucagaagaaacugaugagcaacaauguucaaaucgugagacagcaguccuacagcauuaugugcaucauuaaggaggaagugcuugccuaugucgugcagcugccccucuacggcguuaucgacaccccuuguuggaaacugcauacaucuccccugugcacgaccaacacaaaggagggcuccaauaucugucucacccggacagaucgcgggugguacugcgacaacgcgggaagcgugagcuuuuucccucaagccgaaaccuguaaggucugcucuaauagaguguuuugcgauacgaugaacucccugacacuuccgucugagguuaaucuguguaacauugacaucuucaaucccaaauaugauugcaagauuaugaccagcaaaaccgacguguccagcucugucaucacaucccucggcgcuauugugagcuguuacgggaagaccaaaugcacagccucuaacaagaauaagggaaucaucaaaacguuuuccaacggcugugauuaugucagcaauaaggggguggacaccguuuccgugggaaacacacuguacuaugucaacaaacaggagggcaagucucuuuacgugaaaggcgaaccuauuaucaauuucuaugacccccugguuuuuccuagcgaugaguucgacgcuuccauuucucaggugaacgaaaagaucaaucaaagccucgccuuuauucggaaguccgaugagcugcugcacaacgucaauguggggaaaagcaccacaaacaucaugauuaccacgaucaucauugugaucauuguuauccuccugcuucugauugccgucggacucuuccuguacugcaaggcucgcugaggacuagugaagggaacacccaaauuuaauucagccuuaagcacaauuaauuaagagugaaacguaauuguacaagcaguuggucacccaccauagggcaugaucaacaccgcaaccuuuccuuuuucccccagugauucugaaaaaccccucuucccuucagcuugcuuagauguuccaaauuuaguaagcuuaaggcggccuacagaagaaaaagaaaaaaaaggccacaaaaguucccucucacuuucaguaaauaaaauaaaagcagcaacagaaauaaagaaauaaaugaaauucaaaaugaaauaaauauuguguugugcagcauuaaaaaaucaauaaaaauuaaaaaugagcaagaucuaaaaaaaaaaaaaaaaaaaaaaaaaaaaaaaaaaaaaaaaaaaaaaaaaaaaaaaaaaaaaaaaugcaucccccccccccccccccccccccccccccccaaaggcucuuuucagagccaccagaauu

SEQ ID NO: 19048 - RNA, 2139 nt, Artificial Sequence
  mRNA product Design h-2 comprising derived and/or modified sequence from HRSV(Memphis-37)__AIY60640.1__F-del_DSCav1_mut7 (opt6)
gggagacccgugacccggaaguuguacggcuacgcgacuuucccucccacaaacccucgcgcccuuccuuuccuacuugggcccggcagaaagcuuaccauggaacuaccaauacucaaaacaaacgccauaaccacaauacuagccgcaguaacacuuugcuuugccucaagucaaaacauaacagaagaauuuuaccaauccacaugcucagcuguauccaaaggauauuuauccgcacuaagaacaggaugguacacaucaguaaucacaauagaauuaucaaacauaaaagaaaacaaauguaauggcacagacgccaaaguaaaacuaauuaaacaagaacuagacaaauauaaaaaugcaguaaccgaacuccaaaugcucaugugcucuacaccagcugcaggaucaggaucagccauugcaagcgguauagcuguuugcaaaguauuacacuuagaaggagaaguaaauaaaauaaaaaacgcacuacuaucaacaaauaaagcaguaguaucccuaucaaacggaguaucaguacuuacauucaaaguauuagauuuaaaaaacuauauagacaaacaacuacuucccauauuaaacaaacaaucaugcucaauuuccaacauugaaacuguaauggaauuucaacaaaaaaacaacagacuacuugaaaucacacgagaauuuucaguaaacgcuggaguaacaacaccugucucuaccuacaugcucacaaauagcgaauuacuaucucuaaucaaugacaugccaauaacaaacgaucaaaaaaaacuaauguccaacaacguacaaauaguaagacaacaauccuauucaauaaugugcauaauaaaagaagaagucuuagcauacguuguacaacuaccauuauacggaguaauagauacaccaugcuggaaacuccacacaagcccccucugcacaacaaacaccaaagaagggucaaacauaugcuuaacaagaacagacagaggaugguacugugauaacgcaggaucugucucauucuuuccacaagcagaaacauguaaaguaugcuccaacagagucuuuugcgacaccaugaacucacuaaccuuacccucagaaguaaaccugugcaacaucgauaucuucaaccccaaauacgauugcaaaaucaugacaagcaaaacugauguauccagcucuguaauaacaucacuaggugcaauaguaucaugcuacggaaaaacaaaaugcacagcuucuaacaaaaauaaaggaauaauaaaaacauucuccaauggaugcgacuaugucucaaauaaaggaguagauacaguuucagucggcaacacacucuauuauguaaauaaacaagaaggaaaaucauuauacguaaaaggagaacccauaauaaacuucuacgacccccucguauucccaagcgacgaauuugacgccucaauaucacaaguaaacgaaaaaauaaaccaaucacucgcauucaucagaaaaucagaugaacuacuacacaauguaaacgucggaaaauccaccacaaauauaaugauaacuaccaucauaauaguaauaauagucaucuuacuacuauuaaucgcuguaggacuauuucucuacugcaaggccagauaaggacuagugaagggaacacccaaauuuaauucagccuuaagcacaauuaauuaagagugaaacguaauuguacaagcaguuggucacccaccauagggcaugaucaacaccgcaaccuuuccuuuuucccccagugauucugaaaaaccccucuucccuucagcuugcuuagauguuccaaauuuaguaagcuuaaggcggccuacagaagaaaaagaaaaaaaaggccacaaaaguucccucucacuuucaguaaauaaaauaaaagcagcaacagaaauaaagaaauaaaugaaauucaaaaugaaauaaauauuguguugugcagcauuaaaaaaucaauaaaaauuaaaaaugagcaagaucuaaaaaaaaaaaaaaaaaaaaaaaaaaaaaaaaaaaaaaaaaaaaaaaaaaaaaaaaaaaaaaaaugcaucccccccccccccccccccccccccccccccaaaggcucuuuucagagccaccagaauu

SEQ ID NO: 19049 - RNA, 2139 nt, Artificial Sequence
  mRNA product Design h-2 comprising derived and/or modified sequence from HRSV(Memphis-37)__AIY60640.1__F-del_DSCav1_mut7 (opt11)
gggagacccgugacccggaaguuguacggcuacgcgacuuucccucccacaaacccucgcgcccuuccuuuccuacuugggcccggcagaaagcuuaccauggaacucccaauccucaaaacaaaugccaucaccaccauccuagccgcugucacacuaugcuucgccuccucacaaaacaucaccgaagaguucuaucaauccacaugcuccgccgucagcaagggauaccucuccgcccuuagaaccggcugguacaccucagucaucacaauugaacugucaaacaucaaagaaaacaaaugcaacggcaccgacgcaaaaguaaagcucaucaaacaagaacuggacaaguacaagaacgccgucaccgaacuacagaugcuuaugugcucaaccccugccgccggcuccggaucugccauagcuucaggcaucgccguaugcaaaguccugcaccuagaaggggaagucaacaaaaucaaaaacgcccuccucuccaccaacaaggccguugucucccugucaaacggagucuccguccuaaccuucaaaguccucgaccucaaaaacuacauagacaaacaacuccuacccauccucaacaaacaaagcugcucaauauccaacaucgaaaccgucauggaguuccaacaaaagaacaaccgacuacucgaaauaacacgcgaguucucagucaacgccggcgucaccaccccagucuccacauacaugcucaccaacuccgaacuccuaucgcucaucaacgacaugcccaucaccaaugaccagaagaaacucauguccaacaacguacaaaucguccgccaacaguccuacucaaucaugugcaucaucaaagaagaaguccuugccuacgucguccagcuuccacucuacggagucaucgacacccccugcuggaaacuccacaccuccccacuaugcaccaccaacaccaaagaaggauccaacauaugccucacccguacugaccgcggcugguacugcgacaacgccggauccgucucauucuucccccaggccgaaaccugcaaagucugcuccaaccgcgucuucugcgacaccaugaacucgcucacccucccauccgaagucaaucuaugcaacaucgacauuuucaaccccaaauacgacugcaaaauuaugacaucaaaaaccgacgucucauccucagucaucacuucccucggcgcaaucguaagcugcuacgggaaaacaaagugcaccgcuuccaacaaaaacaaaggcaucaucaaaaccuucucuaacggcugcgacuacgucuccaacaaaggagucgacaccguauccgucggcaacacccucuacuacgucaacaaacaggaaggaaaaucgcucuacgucaaaggagaaccaaucaucaacuucuacgacccccuagucuucccauccgacgaguucgacgccagcaucucacaagucaaugaaaagaucaaccagucacucgcauucauccguaagucagacgaacuccuacacaacgucaacgucggcaagucaacaaccaacauaaugaucaccaccauaaucaucgucauaauaguaauccuccuucuccuaaucgcagucggccucuuccucuacugcaaagcacgcuaaggacuagugaagggaacacccaaauuuaauucagccuuaagcacaauuaauuaagagugaaacguaauuguacaagcaguuggucacccaccauagggcaugaucaacaccgcaaccuuuccuuuuucccccagugauucugaaaaaccccucuucccuucagcuugcuuagauguuccaaauuuaguaagcuuaaggcggccuacagaagaaaaagaaaaaaaaggccacaaaaguucccucucacuuucaguaaauaaaauaaaagcagcaacagaaauaaagaaauaaaugaaauucaaaaugaaauaaauauuguguugugcagcauuaaaaaaucaauaaaaauuaaaaaugagcaagaucuaaaaaaaaaaaaaaaaaaaaaaaaaaaaaaaaaaaaaaaaaaaaaaaaaaaaaaaaaaaaaaaaugcaucccccccccccccccccccccccccccccccaaaggcucuuuucagagccaccagaauu

SEQ ID NO: 19050 - RNA, 1919 nt, Artificial Sequence
  mRNA product Design h-3 comprising derived and/or modified sequence from HRSV(Memphis-37)__AIY60640.1__F-del_DSCav1_mut7 (opt1)
gggagacccgugacccggaaguuguacggcuacgcgacuuucccucccacaaacccucgcgcccuuccuuuccuacuugggcccggcagaaagcuuaccauggagcugcccauccucaagaccaacgccaucaccacgauccuggccgcggugacccugugcuucgccagcucccagaacaucaccgaggaguucuaccagagcacgugcuccgccgucagcaagggcuaccucuccgcccugcgcaccgggugguacaccagcgugaucaccaucgagcuguccaacaucaaggagaacaagugcaacggcaccgacgccaaggugaagcucaucaagcaggagcuggacaaguacaagaacgcggucacggagcugcagaugcugaugugcagcaccccggccgccggcuccgggagcgcgaucgccuccggcaucgccgucugcaaggugcugcaccucgagggcgaggugaacaagaucaagaacgcccugcuguccaccaacaaggccgucgugagccucuccaacggggugagcguccugaccuucaaggugcuggaccucaagaacuacaucgacaagcagcugcugcccauccugaacaagcagagcugcuccaucagcaacaucgagaccgucauggaguuccagcagaagaacaaccgccuccuggagaucacgcgggaguucagcgugaacgcgggcgugaccacccccgucuccaccuacaugcugacgaacagcgagcuccugucccugaucaacgacaugccgaucaccaacgaccagaagaagcucaugagcaacaacgugcagaucgugcgccagcaguccuacagcaucaugugcaucaucaaggaggagguccuggccuacguggugcagcugccccucuacggggucaucgacacccccugcuggaagcugcacaccagcccccugugcacgaccaacaccaaggagggcuccaacaucugccucacccggacggaccgcgggugguacugcgacaacgccggcagcguguccuucuucccgcaggccgagaccugcaaggucugcagcaaccggguguucugcgacaccaugaacucccugacccugcccagcgaggugaaccucugcaacaucgacaucuucaaccccaaguacgacugcaagaucaugacguccaagaccgacgucagcuccagcgugaucaccucccugggcgccaucgugagcugcuacgggaagaccaagugcacggcgagcaacaagaacaagggcaucaucaagaccuucuccaacgggugcgacuacgucagcaacaagggcguggacaccguguccgucggcaacacccuguacuacgugaacaagcaggagggcaagagccucuacgugaagggggagcccaucaucaacuucuacgacccgcuggucuuccccuccgacgaguucgacgccagcaucucccaggugaacgagaagaucaaccagagccuggccuucauccggaaguccgacgagcuccugcacaacgugaacgucggcaagagcaccacgaacaucaugaucaccaccaucaucaucgugaucaucgugauccugcugcuccugaucgccgucgggcuguuccucuacugcaaggcccgcugaggacuaguggaagcauuuuccuggcugauuaaaagaaauuacucagcuauggucaucuguuccuguuagaaggcuaugcagcauauuauauacuaugcgcauguuaugaaaugcauaauaaaaaauuuuaaaaaaucuaaaagaucuaaaaaaaaaaaaaaaaaaaaaaaaaaaaaaaaaaaaaaaaaaaaaaaaaaaaaaaaaaaaaaaaugcaucccccccccccccccccccccccccccccccaaaggcucuuuucagagccaccagaauu

SEQ ID NO: 19051 - RNA, 1919 nt, Artificial Sequence
  mRNA product Design h-3 comprising derived and/or modified sequence from HRSV(Memphis-37)__AIY60640.1__F-del_DSCav1_mut7 (opt1)
gggagacccgugacccggaaguuguacggcuacgcgacuuucccucccacaaacccucgcgcccuuccuuuccuacuugggcccggcagaaagcuuaccauggagcugcccauccucaagaccaacgccaucaccacgauccuggccgcggugacccugugcuucgccagcucccagaacaucaccgaggaguucuaccagagcacgugcuccgccgucagcaagggguaccucuccgcccugcgcaccgggugguacaccagcgugaucaccaucgagcuguccaacaucaaggagaacaagugcaacggcaccgacgccaaggugaagcucaucaagcaggagcuggacaaguacaagaacgcggucacggagcugcagaugcucaugugcagcaccccggccgccggguccggcagcgccaucgcguccgggaucgccgugugcaaggugcugcaccuggagggcgaggucaacaagaucaagaacgcccuccugagcaccaacaaggccguggugucccugagcaacggcgucuccgugcucaccuucaaggugcuggaccugaagaacuacaucgacaagcagcuccugcccauccugaacaagcagagcugcuccaucagcaacaucgagacggucauggaguuccagcagaagaacaaccggcuccuggagaucacccgcgaguucuccgugaacgccggggugaccacccccgucagcacguacaugcugaccaacagcgagcuccugucccugaucaacgacaugcccaucaccaacgaccagaagaagcucaugagcaacaacgugcagaucgugcggcagcaguccuacagcaucaugugcaucaucaaggaggagguccuggcguacguggugcagcugccgcucuacggcgucaucgacacccccugcuggaagcugcacacgagcccccugugcaccaccaacaccaaggaggggagcaacaucugccucacgcgcaccgaccggggcugguacugcgacaacgccggguccgugagcuucuucccccaggccgagaccugcaaggugugcuccaaccgcgucuucugcgacaccaugaacagccugacgcugccguccgaggugaaccucugcaacaucgacaucuucaaccccaaguacgacugcaagaucaugaccagcaagaccgacgucuccagcuccgugaucaccagccugggcgccaucguguccugcuacggcaagacgaagugcaccgccagcaacaagaacaaggggaucaucaagaccuucuccaacggcugcgacuacgucagcaacaaggggguggacaccgugagcgucggcaacacgcuguacuacgugaacaagcaggagggcaagucccucuacgugaagggggagcccaucaucaacuucuacgacccccuggucuucccgagcgacgaguucgacgcguccaucagccaggugaacgagaagaucaaccagucccuggccuucauccggaaguccgacgagcuccugcacaacgugaacgucggcaaguccaccaccaacaucaugaucaccaccaucaucaucgugaucaucgugauccugcuccugcugaucgccgucggccucuuccuguacugcaaggcccgcugaggacuaguggaagcauuuuccuggcugauuaaaagaaauuacucagcuauggucaucuguuccuguuagaaggcuaugcagcauauuauauacuaugcgcauguuaugaaaugcauaauaaaaaauuuuaaaaaaucuaaaagaucuaaaaaaaaaaaaaaaaaaaaaaaaaaaaaaaaaaaaaaaaaaaaaaaaaaaaaaaaaaaaaaaaugcaucccccccccccccccccccccccccccccccaaaggcucuuuucagagccaccagaauu

SEQ ID NO: 19052 - RNA, 1919 nt, Artificial Sequence
  mRNA product Design h-3 comprising derived and/or modified sequence from HRSV(Memphis-37)__AIY60640.1__F-del_DSCav1_mut7 (opt2)
gggagacccgugacccggaaguuguacggcuacgcgacuuucccucccacaaacccucgcgcccuuccuuuccuacuugggcccggcagaaagcuuaccauggagcuccccauccucaagaccaacgccaucaccaccauccucgccgccgucacccucugcuucgccuccucccagaacaucaccgaggaguucuaccaguccaccugcuccgccgucuccaagggcuaccucuccgcccuccgcaccggcugguacaccuccgucaucaccaucgagcucuccaacaucaaggagaacaagugcaacggcaccgacgccaaggucaagcucaucaagcaggagcucgacaaguacaagaacgccgucaccgagcuccagaugcucaugugcuccacccccgccgccggcuccggcuccgccaucgccuccggcaucgccgucugcaagguccuccaccucgagggcgaggucaacaagaucaagaacgcccuccucuccaccaacaaggccgucgucucccucuccaacggcgucuccguccucaccuucaagguccucgaccucaagaacuacaucgacaagcagcuccuccccauccucaacaagcaguccugcuccaucuccaacaucgagaccgucauggaguuccagcagaagaacaaccgccuccucgagaucacccgcgaguucuccgucaacgccggcgucaccacccccgucuccaccuacaugcucaccaacuccgagcuccucucccucaucaacgacaugcccaucaccaacgaccagaagaagcucauguccaacaacguccagaucguccgccagcaguccuacuccaucaugugcaucaucaaggaggagguccucgccuacgucguccagcucccccucuacggcgucaucgacacccccugcuggaagcuccacaccuccccccucugcaccaccaacaccaaggagggcuccaacaucugccucacccgcaccgaccgcggcugguacugcgacaacgccggcuccgucuccuucuucccccaggccgagaccugcaaggucugcuccaaccgcgucuucugcgacaccaugaacucccucacccuccccuccgaggucaaccucugcaacaucgacaucuucaaccccaaguacgacugcaagaucaugaccuccaagaccgacgucuccuccuccgucaucaccucccucggcgccaucgucuccugcuacggcaagaccaagugcaccgccuccaacaagaacaagggcaucaucaagaccuucuccaacggcugcgacuacgucuccaacaagggcgucgacaccgucuccgucggcaacacccucuacuacgucaacaagcaggagggcaagucccucuacgucaagggcgagcccaucaucaacuucuacgacccccucgucuuccccuccgacgaguucgacgccuccaucucccaggucaacgagaagaucaaccagucccucgccuucauccgcaaguccgacgagcuccuccacaacgucaacgucggcaaguccaccaccaacaucaugaucaccaccaucaucaucgucaucaucgucauccuccuccuccucaucgccgucggccucuuccucuacugcaaggcccgcugaggacuaguggaagcauuuuccuggcugauuaaaagaaauuacucagcuauggucaucuguuccuguuagaaggcuaugcagcauauuauauacuaugcgcauguuaugaaaugcauaauaaaaaauuuuaaaaaaucuaaaagaucuaaaaaaaaaaaaaaaaaaaaaaaaaaaaaaaaaaaaaaaaaaaaaaaaaaaaaaaaaaaaaaaaugcaucccccccccccccccccccccccccccccccaaaggcucuuuucagagccaccagaauu

SEQ ID NO: 19053 - RNA, 1919 nt, Artificial Sequence
  mRNA product Design h-3 comprising derived and/or modified sequence from HRSV(Memphis-37)__AIY60640.1__F-del_DSCav1_mut7 (opt3)
gggagacccgugacccggaaguuguacggcuacgcgacuuucccucccacaaacccucgcgcccuuccuuuccuacuugggcccggcagaaagcuuaccauggagcugcccauccucaagaccaacgccauuacaacuauacuugcugcagugacgcugugcuucgccagcucccagaauaucaccgaagaguuuuaccaaucuacauguucagcggucaguaaaggcuauuugagcgcuuuaagaacugggugguacaccuccguuauuacaaucgaacugucuaacauuaaggagaauaaaugcaacggaaccgacgccaaggugaaacuaaucaagcaggaacucgauaaguauaaaaaugcaguaacugagcugcagaugcuuauguguucgaccccugccgcugguucaggcagcgcaauagccagugggaucgcugugugcaagguccugcacuuggagggagaagugaacaaaauuaagaaugcccuccuguccacaaacaaagcgguugugucucugagcaauggcgucuccgugcucacguucaagguauuagaccugaagaacuacaucgauaaacagcuuuugccaauucugaauaagcaaucauguaguaucagcaacauagagacuguuauggaauuucagcagaaaaauaacaggcuacucgagauuacccgggaguucucugugaaugccggugucacaacuccgguguccaccuauaugcugacaaacucagaacuucugagcuugaucaacgacaugcccauuaccaaugaucagaagaaacucaugaguaacaaugugcaaaucguccgccagcagucuuacuccaucaugugcauuauaaaggaggaaguucuggcauaugugguacaguuaccucuguacggggugaucgacacgccauguuggaaacuccauacuagcccccuuugcacaaccaacacuaaggagggaucgaauauuugucugacacgaaccgaucguggcugguacugcgacaacgcuggcucugucuccuuuuucccucaagccgaaacguguaaggugugcucaaauagaguguuuugcgauaccaugaacaguuugacacuaccaagcgagguuaaucuguguaacaucgacauauucaaucccaaauaugauugcaagauuaugacuuccaaaaccgacgucucuagcucagugaucacaagucucggggcaaucguauccuguuacggaaagacuaaaugcaccgcuagcaacaagaauaaggguauuaucaaaacauuuucuaacggcugugauuauguuucaaauaaggggguggacaccgucagugugggaaacacucuguacuaugucaacaaacaggagggcaagagccuuuacgugaaaggugaaccuauuauaaauuucuaugacccacugguuuuuccguccgaugaguucgacgccucuaucagccaggugaacgaaaagauuaaucaaucguuggcguuuaucaggaaguccgaugagcuccugcacaacguaaaugucgggaaaucaacgacaaacaucaugauuaccacuauaaucauugugaucauuguuaucuuacugcuacucauagccgugggacuguuccuuuacugcaaggcacggugaggacuaguggaagcauuuuccuggcugauuaaaagaaauuacucagcuauggucaucuguuccuguuagaaggcuaugcagcauauuauauacuaugcgcauguuaugaaaugcauaauaaaaaauuuuaaaaaaucuaaaagaucuaaaaaaaaaaaaaaaaaaaaaaaaaaaaaaaaaaaaaaaaaaaaaaaaaaaaaaaaaaaaaaaaugcaucccccccccccccccccccccccccccccccaaaggcucuuuucagagccaccagaauu

SEQ ID NO: 19054 - RNA, 1919 nt, Artificial Sequence
  mRNA product Design h-3 comprising derived and/or modified sequence from HRSV(Memphis-37)__AIY60640.1__F-del_DSCav1_mut7 (opt4)
gggagacccgugacccggaaguuguacggcuacgcgacuuucccucccacaaacccucgcgcccuuccuuuccuacuugggcccggcagaaagcuuaccauggagcugcccauccugaagaccaacgccaucaccaccauccuggccgccgugacccugugcuucgccagcagccagaacaucaccgaggaguucuaccagagcaccugcagcgccgugagcaagggcuaccugagcgcccugagaaccggcugguacaccagcgugaucaccaucgagcugagcaacaucaaggagaacaagugcaacggcaccgacgccaaggugaagcugaucaagcaggagcuggacaaguacaagaacgccgugaccgagcugcagaugcugaugugcagcacccccgccgccggcagcggcagcgccaucgccagcggcaucgccgugugcaaggugcugcaccuggagggcgaggugaacaagaucaagaacgcccugcugagcaccaacaaggccguggugagccugagcaacggcgugagcgugcugaccuucaaggugcuggaccugaagaacuacaucgacaagcagcugcugcccauccugaacaagcagagcugcagcaucagcaacaucgagaccgugauggaguuccagcagaagaacaacagacugcuggagaucaccagagaguucagcgugaacgccggcgugaccacccccgugagcaccuacaugcugaccaacagcgagcugcugagccugaucaacgacaugcccaucaccaacgaccagaagaagcugaugagcaacaacgugcagaucgugagacagcagagcuacagcaucaugugcaucaucaaggaggaggugcuggccuacguggugcagcugccccuguacggcgugaucgacacccccugcuggaagcugcacaccagcccccugugcaccaccaacaccaaggagggcagcaacaucugccugaccagaaccgacagaggcugguacugcgacaacgccggcagcgugagcuucuucccccaggccgagaccugcaaggugugcagcaacagaguguucugcgacaccaugaacagccugacccugcccagcgaggugaaccugugcaacaucgacaucuucaaccccaaguacgacugcaagaucaugaccagcaagaccgacgugagcagcagcgugaucaccagccugggcgccaucgugagcugcuacggcaagaccaagugcaccgccagcaacaagaacaagggcaucaucaagaccuucagcaacggcugcgacuacgugagcaacaagggcguggacaccgugagcgugggcaacacccuguacuacgugaacaagcaggagggcaagagccuguacgugaagggcgagcccaucaucaacuucuacgacccccugguguuccccagcgacgaguucgacgccagcaucagccaggugaacgagaagaucaaccagagccuggccuucaucagaaagagcgacgagcugcugcacaacgugaacgugggcaagagcaccaccaacaucaugaucaccaccaucaucaucgugaucaucgugauccugcugcugcugaucgccgugggccuguuccuguacugcaaggccagaugaggacuaguggaagcauuuuccuggcugauuaaaagaaauuacucagcuauggucaucuguuccuguuagaaggcuaugcagcauauuauauacuaugcgcauguuaugaaaugcauaauaaaaaauuuuaaaaaaucuaaaagaucuaaaaaaaaaaaaaaaaaaaaaaaaaaaaaaaaaaaaaaaaaaaaaaaaaaaaaaaaaaaaaaaaugcaucccccccccccccccccccccccccccccccaaaggcucuuuucagagccaccagaauu

SEQ ID NO: 19055 - RNA, 1919 nt, Artificial Sequence
  mRNA product Design h-3 comprising derived and/or modified sequence from HRSV(Memphis-37)__AIY60640.1__F-del_DSCav1_mut7 (opt5)
gggagacccgugacccggaaguuguacggcuacgcgacuuucccucccacaaacccucgcgcccuuccuuuccuacuugggcccggcagaaagcuuaccauggagcugcccauccucaagaccaacgccauuacaacgauccuggcugccgugacccuuugcuucgcgagcucccagaauauuacagaagaguuuuaccaaucuaccuguagcgcugucuccaaaggcuaucugucugcccucagaacagggugguacaccagcguuaucacaauugaacuguccaacaucaaggagaauaaaugcaacggaaccgacgccaaggugaaacuuaucaagcaggaacuggauaaguauaaaaaugcugugacggagcuccagaugcugauguguucuaccccugccgcuggcagcggguccgccauugcgagcggaaucgccgucugcaaggugcugcaccucgagggcgaaguuaacaaaauuaagaaugcucugcuuucuacaaacaaagccguggucucccugagcaauggggugucuguucucaccuucaaggugcuggaccuuaagaacuacaucgauaaacagcugcucccgauucugaauaagcaauccuguagcaucucuaacauugagacagucauggaauuucagcagaaaaauaaccggcugcucgagaucacccgcgaguucuccgugaaugcuggagugacgacacccgucagcaccuauaugcugacaaacuccgaacuucugucucucaucaacgacaugccuauuaccaaugaucagaagaaacugaugagcaacaauguucaaaucgugagacagcaguccuacagcauuaugugcaucauuaaggaggaagugcuugccuaugucgugcagcugccccucuacggcguuaucgacaccccuuguuggaaacugcauacaucuccccugugcacgaccaacacaaaggagggcuccaauaucugucucacccggacagaucgcgggugguacugcgacaacgcgggaagcgugagcuuuuucccucaagccgaaaccuguaaggucugcucuaauagaguguuuugcgauacgaugaacucccugacacuuccgucugagguuaaucuguguaacauugacaucuucaaucccaaauaugauugcaagauuaugaccagcaaaaccgacguguccagcucugucaucacaucccucggcgcuauugugagcuguuacgggaagaccaaaugcacagccucuaacaagaauaagggaaucaucaaaacguuuuccaacggcugugauuaugucagcaauaaggggguggacaccguuuccgugggaaacacacuguacuaugucaacaaacaggagggcaagucucuuuacgugaaaggcgaaccuauuaucaauuucuaugacccccugguuuuuccuagcgaugaguucgacgcuuccauuucucaggugaacgaaaagaucaaucaaagccucgccuuuauucggaaguccgaugagcugcugcacaacgucaauguggggaaaagcaccacaaacaucaugauuaccacgaucaucauugugaucauuguuauccuccugcuucugauugccgucggacucuuccuguacugcaaggcucgcugaggacuaguggaagcauuuuccuggcugauuaaaagaaauuacucagcuauggucaucuguuccuguuagaaggcuaugcagcauauuauauacuaugcgcauguuaugaaaugcauaauaaaaaauuuuaaaaaaucuaaaagaucuaaaaaaaaaaaaaaaaaaaaaaaaaaaaaaaaaaaaaaaaaaaaaaaaaaaaaaaaaaaaaaaaugcaucccccccccccccccccccccccccccccccaaaggcucuuuucagagccaccagaauu

SEQ ID NO: 19056 - RNA, 1919 nt, Artificial Sequence
  mRNA product Design h-3 comprising derived and/or modified sequence from HRSV(Memphis-37)__AIY60640.1__F-del_DSCav1_mut7 (opt6)
gggagacccgugacccggaaguuguacggcuacgcgacuuucccucccacaaacccucgcgcccuuccuuuccuacuugggcccggcagaaagcuuaccauggaacuaccaauacucaaaacaaacgccauaaccacaauacuagccgcaguaacacuuugcuuugccucaagucaaaacauaacagaagaauuuuaccaauccacaugcucagcuguauccaaaggauauuuauccgcacuaagaacaggaugguacacaucaguaaucacaauagaauuaucaaacauaaaagaaaacaaauguaauggcacagacgccaaaguaaaacuaauuaaacaagaacuagacaaauauaaaaaugcaguaaccgaacuccaaaugcucaugugcucuacaccagcugcaggaucaggaucagccauugcaagcgguauagcuguuugcaaaguauuacacuuagaaggagaaguaaauaaaauaaaaaacgcacuacuaucaacaaauaaagcaguaguaucccuaucaaacggaguaucaguacuuacauucaaaguauuagauuuaaaaaacuauauagacaaacaacuacuucccauauuaaacaaacaaucaugcucaauuuccaacauugaaacuguaauggaauuucaacaaaaaaacaacagacuacuugaaaucacacgagaauuuucaguaaacgcuggaguaacaacaccugucucuaccuacaugcucacaaauagcgaauuacuaucucuaaucaaugacaugccaauaacaaacgaucaaaaaaaacuaauguccaacaacguacaaauaguaagacaacaauccuauucaauaaugugcauaauaaaagaagaagucuuagcauacguuguacaacuaccauuauacggaguaauagauacaccaugcuggaaacuccacacaagcccccucugcacaacaaacaccaaagaagggucaaacauaugcuuaacaagaacagacagaggaugguacugugauaacgcaggaucugucucauucuuuccacaagcagaaacauguaaaguaugcuccaacagagucuuuugcgacaccaugaacucacuaaccuuacccucagaaguaaaccugugcaacaucgauaucuucaaccccaaauacgauugcaaaaucaugacaagcaaaacugauguauccagcucuguaauaacaucacuaggugcaauaguaucaugcuacggaaaaacaaaaugcacagcuucuaacaaaaauaaaggaauaauaaaaacauucuccaauggaugcgacuaugucucaaauaaaggaguagauacaguuucagucggcaacacacucuauuauguaaauaaacaagaaggaaaaucauuauacguaaaaggagaacccauaauaaacuucuacgacccccucguauucccaagcgacgaauuugacgccucaauaucacaaguaaacgaaaaaauaaaccaaucacucgcauucaucagaaaaucagaugaacuacuacacaauguaaacgucggaaaauccaccacaaauauaaugauaacuaccaucauaauaguaauaauagucaucuuacuacuauuaaucgcuguaggacuauuucucuacugcaaggccagauaaggacuaguggaagcauuuuccuggcugauuaaaagaaauuacucagcuauggucaucuguuccuguuagaaggcuaugcagcauauuauauacuaugcgcauguuaugaaaugcauaauaaaaaauuuuaaaaaaucuaaaagaucuaaaaaaaaaaaaaaaaaaaaaaaaaaaaaaaaaaaaaaaaaaaaaaaaaaaaaaaaaaaaaaaaugcaucccccccccccccccccccccccccccccccaaaggcucuuuucagagccaccagaauu

SEQ ID NO: 19057 - RNA, 1919 nt, Artificial Sequence
  mRNA product Design h-3 comprising derived and/or modified sequence from HRSV(Memphis-37)__AIY60640.1__F-del_DSCav1_mut7 (opt11)
gggagacccgugacccggaaguuguacggcuacgcgacuuucccucccacaaacccucgcgcccuuccuuuccuacuugggcccggcagaaagcuuaccauggaacucccaauccucaaaacaaaugccaucaccaccauccuagccgcugucacacuaugcuucgccuccucacaaaacaucaccgaagaguucuaucaauccacaugcuccgccgucagcaagggauaccucuccgcccuuagaaccggcugguacaccucagucaucacaauugaacugucaaacaucaaagaaaacaaaugcaacggcaccgacgcaaaaguaaagcucaucaaacaagaacuggacaaguacaagaacgccgucaccgaacuacagaugcuuaugugcucaaccccugccgccggcuccggaucugccauagcuucaggcaucgccguaugcaaaguccugcaccuagaaggggaagucaacaaaaucaaaaacgcccuccucuccaccaacaaggccguugucucccugucaaacggagucuccguccuaaccuucaaaguccucgaccucaaaaacuacauagacaaacaacuccuacccauccucaacaaacaaagcugcucaauauccaacaucgaaaccgucauggaguuccaacaaaagaacaaccgacuacucgaaauaacacgcgaguucucagucaacgccggcgucaccaccccagucuccacauacaugcucaccaacuccgaacuccuaucgcucaucaacgacaugcccaucaccaaugaccagaagaaacucauguccaacaacguacaaaucguccgccaacaguccuacucaaucaugugcaucaucaaagaagaaguccuugccuacgucguccagcuuccacucuacggagucaucgacacccccugcuggaaacuccacaccuccccacuaugcaccaccaacaccaaagaaggauccaacauaugccucacccguacugaccgcggcugguacugcgacaacgccggauccgucucauucuucccccaggccgaaaccugcaaagucugcuccaaccgcgucuucugcgacaccaugaacucgcucacccucccauccgaagucaaucuaugcaacaucgacauuuucaaccccaaauacgacugcaaaauuaugacaucaaaaaccgacgucucauccucagucaucacuucccucggcgcaaucguaagcugcuacgggaaaacaaagugcaccgcuuccaacaaaaacaaaggcaucaucaaaaccuucucuaacggcugcgacuacgucuccaacaaaggagucgacaccguauccgucggcaacacccucuacuacgucaacaaacaggaaggaaaaucgcucuacgucaaaggagaaccaaucaucaacuucuacgacccccuagucuucccauccgacgaguucgacgccagcaucucacaagucaaugaaaagaucaaccagucacucgcauucauccguaagucagacgaacuccuacacaacgucaacgucggcaagucaacaaccaacauaaugaucaccaccauaaucaucgucauaauaguaauccuccuucuccuaaucgcagucggccucuuccucuacugcaaagcacgcuaaggacuaguggaagcauuuuccuggcugauuaaaagaaauuacucagcuauggucaucuguuccuguuagaaggcuaugcagcauauuauauacuaugcgcauguuaugaaaugcauaauaaaaaauuuuaaaaaaucuaaaagaucuaaaaaaaaaaaaaaaaaaaaaaaaaaaaaaaaaaaaaaaaaaaaaaaaaaaaaaaaaaaaaaaaugcaucccccccccccccccccccccccccccccccaaaggcucuuuucagagccaccagaauu

SEQ ID NO: 19058 - RNA, 1982 nt, Artificial Sequence
  mRNA product Design h-4 comprising derived and/or modified sequence from HRSV(Memphis-37)__AIY60640.1__F-del_DSCav1_mut7 (opt1)
gggagagggcgcuuggcuugcaaggacccugagcugcggcauugaagcacacccaacccaacucgacugaagucagccucacugaaccggaucugagaaucuucucucucugggcuugccagggcucuccgaaccuagcuagcauccucuucaauuccaacuagaaagcuuaccauggagcugcccauccucaagaccaacgccaucaccacgauccuggccgcggugacccugugcuucgccagcucccagaacaucaccgaggaguucuaccagagcacgugcuccgccgucagcaagggcuaccucuccgcccugcgcaccgggugguacaccagcgugaucaccaucgagcuguccaacaucaaggagaacaagugcaacggcaccgacgccaaggugaagcucaucaagcaggagcuggacaaguacaagaacgcggucacggagcugcagaugcugaugugcagcaccccggccgccggcuccgggagcgcgaucgccuccggcaucgccgucugcaaggugcugcaccucgagggcgaggugaacaagaucaagaacgcccugcuguccaccaacaaggccgucgugagccucuccaacggggugagcguccugaccuucaaggugcuggaccucaagaacuacaucgacaagcagcugcugcccauccugaacaagcagagcugcuccaucagcaacaucgagaccgucauggaguuccagcagaagaacaaccgccuccuggagaucacgcgggaguucagcgugaacgcgggcgugaccacccccgucuccaccuacaugcugacgaacagcgagcuccugucccugaucaacgacaugccgaucaccaacgaccagaagaagcucaugagcaacaacgugcagaucgugcgccagcaguccuacagcaucaugugcaucaucaaggaggagguccuggccuacguggugcagcugccccucuacggggucaucgacacccccugcuggaagcugcacaccagcccccugugcacgaccaacaccaaggagggcuccaacaucugccucacccggacggaccgcgggugguacugcgacaacgccggcagcguguccuucuucccgcaggccgagaccugcaaggucugcagcaaccggguguucugcgacaccaugaacucccugacccugcccagcgaggugaaccucugcaacaucgacaucuucaaccccaaguacgacugcaagaucaugacguccaagaccgacgucagcuccagcgugaucaccucccugggcgccaucgugagcugcuacgggaagaccaagugcacggcgagcaacaagaacaagggcaucaucaagaccuucuccaacgggugcgacuacgucagcaacaagggcguggacaccguguccgucggcaacacccuguacuacgugaacaagcaggagggcaagagccucuacgugaagggggagcccaucaucaacuucuacgacccgcuggucuuccccuccgacgaguucgacgccagcaucucccaggugaacgagaagaucaaccagagccuggccuucauccggaaguccgacgagcuccugcacaacgugaacgucggcaagagcaccacgaacaucaugaucaccaccaucaucaucgugaucaucgugauccugcugcuccugaucgccgucgggcuguuccucuacugcaaggcccgcugaggacuaguaauaaggaaacuguaugaaugucugugggcaggaagugaagagauccuucuguaaagguuuuuggaauuaugucugcugaauaauaaacuuuuuugaaauaauaaaucugguagaaaaaugagaucuaaaaaaaaaaaaaaaaaaaaaaaaaaaaaaaaaaaaaaaaaaaaaaaaaaaaaaaaaaaaaaaaugcaucccccccccccccccccccccccccccccccaaaggcucuuuucagagccaccagaauu

SEQ ID NO: 19059 - RNA, 1982 nt, Artificial Sequence
  mRNA product Design h-4 comprising derived and/or modified sequence from HRSV(Memphis-37)__AIY60640.1__F-del_DSCav1_mut7 (opt1)
gggagagggcgcuuggcuugcaaggacccugagcugcggcauugaagcacacccaacccaacucgacugaagucagccucacugaaccggaucugagaaucuucucucucugggcuugccagggcucuccgaaccuagcuagcauccucuucaauuccaacuagaaagcuuaccauggagcugcccauccucaagaccaacgccaucaccacgauccuggccgcggugacccugugcuucgccagcucccagaacaucaccgaggaguucuaccagagcacgugcuccgccgucagcaagggguaccucuccgcccugcgcaccgggugguacaccagcgugaucaccaucgagcuguccaacaucaaggagaacaagugcaacggcaccgacgccaaggugaagcucaucaagcaggagcuggacaaguacaagaacgcggucacggagcugcagaugcucaugugcagcaccccggccgccggguccggcagcgccaucgcguccgggaucgccgugugcaaggugcugcaccuggagggcgaggucaacaagaucaagaacgcccuccugagcaccaacaaggccguggugucccugagcaacggcgucuccgugcucaccuucaaggugcuggaccugaagaacuacaucgacaagcagcuccugcccauccugaacaagcagagcugcuccaucagcaacaucgagacggucauggaguuccagcagaagaacaaccggcuccuggagaucacccgcgaguucuccgugaacgccggggugaccacccccgucagcacguacaugcugaccaacagcgagcuccugucccugaucaacgacaugcccaucaccaacgaccagaagaagcucaugagcaacaacgugcagaucgugcggcagcaguccuacagcaucaugugcaucaucaaggaggagguccuggcguacguggugcagcugccgcucuacggcgucaucgacacccccugcuggaagcugcacacgagcccccugugcaccaccaacaccaaggaggggagcaacaucugccucacgcgcaccgaccggggcugguacugcgacaacgccggguccgugagcuucuucccccaggccgagaccugcaaggugugcuccaaccgcgucuucugcgacaccaugaacagccugacgcugccguccgaggugaaccucugcaacaucgacaucuucaaccccaaguacgacugcaagaucaugaccagcaagaccgacgucuccagcuccgugaucaccagccugggcgccaucguguccugcuacggcaagacgaagugcaccgccagcaacaagaacaaggggaucaucaagaccuucuccaacggcugcgacuacgucagcaacaaggggguggacaccgugagcgucggcaacacgcuguacuacgugaacaagcaggagggcaagucccucuacgugaagggggagcccaucaucaacuucuacgacccccuggucuucccgagcgacgaguucgacgcguccaucagccaggugaacgagaagaucaaccagucccuggccuucauccggaaguccgacgagcuccugcacaacgugaacgucggcaaguccaccaccaacaucaugaucaccaccaucaucaucgugaucaucgugauccugcuccugcugaucgccgucggccucuuccuguacugcaaggcccgcugaggacuaguaauaaggaaacuguaugaaugucugugggcaggaagugaagagauccuucuguaaagguuuuuggaauuaugucugcugaauaauaaacuuuuuugaaauaauaaaucugguagaaaaaugagaucuaaaaaaaaaaaaaaaaaaaaaaaaaaaaaaaaaaaaaaaaaaaaaaaaaaaaaaaaaaaaaaaaugcaucccccccccccccccccccccccccccccccaaaggcucuuuucagagccaccagaauu

SEQ ID NO: 19060 - RNA, 1982 nt, Artificial Sequence
  mRNA product Design h-4 comprising derived and/or modified sequence from HRSV(Memphis-37)__AIY60640.1__F-del_DSCav1_mut7 (opt2)
gggagagggcgcuuggcuugcaaggacccugagcugcggcauugaagcacacccaacccaacucgacugaagucagccucacugaaccggaucugagaaucuucucucucugggcuugccagggcucuccgaaccuagcuagcauccucuucaauuccaacuagaaagcuuaccauggagcuccccauccucaagaccaacgccaucaccaccauccucgccgccgucacccucugcuucgccuccucccagaacaucaccgaggaguucuaccaguccaccugcuccgccgucuccaagggcuaccucuccgcccuccgcaccggcugguacaccuccgucaucaccaucgagcucuccaacaucaaggagaacaagugcaacggcaccgacgccaaggucaagcucaucaagcaggagcucgacaaguacaagaacgccgucaccgagcuccagaugcucaugugcuccacccccgccgccggcuccggcuccgccaucgccuccggcaucgccgucugcaagguccuccaccucgagggcgaggucaacaagaucaagaacgcccuccucuccaccaacaaggccgucgucucccucuccaacggcgucuccguccucaccuucaagguccucgaccucaagaacuacaucgacaagcagcuccuccccauccucaacaagcaguccugcuccaucuccaacaucgagaccgucauggaguuccagcagaagaacaaccgccuccucgagaucacccgcgaguucuccgucaacgccggcgucaccacccccgucuccaccuacaugcucaccaacuccgagcuccucucccucaucaacgacaugcccaucaccaacgaccagaagaagcucauguccaacaacguccagaucguccgccagcaguccuacuccaucaugugcaucaucaaggaggagguccucgccuacgucguccagcucccccucuacggcgucaucgacacccccugcuggaagcuccacaccuccccccucugcaccaccaacaccaaggagggcuccaacaucugccucacccgcaccgaccgcggcugguacugcgacaacgccggcuccgucuccuucuucccccaggccgagaccugcaaggucugcuccaaccgcgucuucugcgacaccaugaacucccucacccuccccuccgaggucaaccucugcaacaucgacaucuucaaccccaaguacgacugcaagaucaugaccuccaagaccgacgucuccuccuccgucaucaccucccucggcgccaucgucuccugcuacggcaagaccaagugcaccgccuccaacaagaacaagggcaucaucaagaccuucuccaacggcugcgacuacgucuccaacaagggcgucgacaccgucuccgucggcaacacccucuacuacgucaacaagcaggagggcaagucccucuacgucaagggcgagcccaucaucaacuucuacgacccccucgucuuccccuccgacgaguucgacgccuccaucucccaggucaacgagaagaucaaccagucccucgccuucauccgcaaguccgacgagcuccuccacaacgucaacgucggcaaguccaccaccaacaucaugaucaccaccaucaucaucgucaucaucgucauccuccuccuccucaucgccgucggccucuuccucuacugcaaggcccgcugaggacuaguaauaaggaaacuguaugaaugucugugggcaggaagugaagagauccuucuguaaagguuuuuggaauuaugucugcugaauaauaaacuuuuuugaaauaauaaaucugguagaaaaaugagaucuaaaaaaaaaaaaaaaaaaaaaaaaaaaaaaaaaaaaaaaaaaaaaaaaaaaaaaaaaaaaaaaaugcaucccccccccccccccccccccccccccccccaaaggcucuuuucagagccaccagaauu

SEQ ID NO: 19061 - RNA, 1982 nt, Artificial Sequence
  mRNA product Design h-4 comprising derived and/or modified sequence from HRSV(Memphis-37)__AIY60640.1__F-del_DSCav1_mut7 (opt3)
gggagagggcgcuuggcuugcaaggacccugagcugcggcauugaagcacacccaacccaacucgacugaagucagccucacugaaccggaucugagaaucuucucucucugggcuugccagggcucuccgaaccuagcuagcauccucuucaauuccaacuagaaagcuuaccauggagcugcccauccucaagaccaacgccauuacaacuauacuugcugcagugacgcugugcuucgccagcucccagaauaucaccgaagaguuuuaccaaucuacauguucagcggucaguaaaggcuauuugagcgcuuuaagaacugggugguacaccuccguuauuacaaucgaacugucuaacauuaaggagaauaaaugcaacggaaccgacgccaaggugaaacuaaucaagcaggaacucgauaaguauaaaaaugcaguaacugagcugcagaugcuuauguguucgaccccugccgcugguucaggcagcgcaauagccagugggaucgcugugugcaagguccugcacuuggagggagaagugaacaaaauuaagaaugcccuccuguccacaaacaaagcgguugugucucugagcaauggcgucuccgugcucacguucaagguauuagaccugaagaacuacaucgauaaacagcuuuugccaauucugaauaagcaaucauguaguaucagcaacauagagacuguuauggaauuucagcagaaaaauaacaggcuacucgagauuacccgggaguucucugugaaugccggugucacaacuccgguguccaccuauaugcugacaaacucagaacuucugagcuugaucaacgacaugcccauuaccaaugaucagaagaaacucaugaguaacaaugugcaaaucguccgccagcagucuuacuccaucaugugcauuauaaaggaggaaguucuggcauaugugguacaguuaccucuguacggggugaucgacacgccauguuggaaacuccauacuagcccccuuugcacaaccaacacuaaggagggaucgaauauuugucugacacgaaccgaucguggcugguacugcgacaacgcuggcucugucuccuuuuucccucaagccgaaacguguaaggugugcucaaauagaguguuuugcgauaccaugaacaguuugacacuaccaagcgagguuaaucuguguaacaucgacauauucaaucccaaauaugauugcaagauuaugacuuccaaaaccgacgucucuagcucagugaucacaagucucggggcaaucguauccuguuacggaaagacuaaaugcaccgcuagcaacaagaauaaggguauuaucaaaacauuuucuaacggcugugauuauguuucaaauaaggggguggacaccgucagugugggaaacacucuguacuaugucaacaaacaggagggcaagagccuuuacgugaaaggugaaccuauuauaaauuucuaugacccacugguuuuuccguccgaugaguucgacgccucuaucagccaggugaacgaaaagauuaaucaaucguuggcguuuaucaggaaguccgaugagcuccugcacaacguaaaugucgggaaaucaacgacaaacaucaugauuaccacuauaaucauugugaucauuguuaucuuacugcuacucauagccgugggacuguuccuuuacugcaaggcacggugaggacuaguaauaaggaaacuguaugaaugucugugggcaggaagugaagagauccuucuguaaagguuuuuggaauuaugucugcugaauaauaaacuuuuuugaaauaauaaaucugguagaaaaaugagaucuaaaaaaaaaaaaaaaaaaaaaaaaaaaaaaaaaaaaaaaaaaaaaaaaaaaaaaaaaaaaaaaaugcaucccccccccccccccccccccccccccccccaaaggcucuuuucagagccaccagaauu

SEQ ID NO: 19062 - RNA, 1982 nt, Artificial Sequence
  mRNA product Design h-4 comprising derived and/or modified sequence from HRSV(Memphis-37)__AIY60640.1__F-del_DSCav1_mut7 (opt4)
gggagagggcgcuuggcuugcaaggacccugagcugcggcauugaagcacacccaacccaacucgacugaagucagccucacugaaccggaucugagaaucuucucucucugggcuugccagggcucuccgaaccuagcuagcauccucuucaauuccaacuagaaagcuuaccauggagcugcccauccugaagaccaacgccaucaccaccauccuggccgccgugacccugugcuucgccagcagccagaacaucaccgaggaguucuaccagagcaccugcagcgccgugagcaagggcuaccugagcgcccugagaaccggcugguacaccagcgugaucaccaucgagcugagcaacaucaaggagaacaagugcaacggcaccgacgccaaggugaagcugaucaagcaggagcuggacaaguacaagaacgccgugaccgagcugcagaugcugaugugcagcacccccgccgccggcagcggcagcgccaucgccagcggcaucgccgugugcaaggugcugcaccuggagggcgaggugaacaagaucaagaacgcccugcugagcaccaacaaggccguggugagccugagcaacggcgugagcgugcugaccuucaaggugcuggaccugaagaacuacaucgacaagcagcugcugcccauccugaacaagcagagcugcagcaucagcaacaucgagaccgugauggaguuccagcagaagaacaacagacugcuggagaucaccagagaguucagcgugaacgccggcgugaccacccccgugagcaccuacaugcugaccaacagcgagcugcugagccugaucaacgacaugcccaucaccaacgaccagaagaagcugaugagcaacaacgugcagaucgugagacagcagagcuacagcaucaugugcaucaucaaggaggaggugcuggccuacguggugcagcugccccuguacggcgugaucgacacccccugcuggaagcugcacaccagcccccugugcaccaccaacaccaaggagggcagcaacaucugccugaccagaaccgacagaggcugguacugcgacaacgccggcagcgugagcuucuucccccaggccgagaccugcaaggugugcagcaacagaguguucugcgacaccaugaacagccugacccugcccagcgaggugaaccugugcaacaucgacaucuucaaccccaaguacgacugcaagaucaugaccagcaagaccgacgugagcagcagcgugaucaccagccugggcgccaucgugagcugcuacggcaagaccaagugcaccgccagcaacaagaacaagggcaucaucaagaccuucagcaacggcugcgacuacgugagcaacaagggcguggacaccgugagcgugggcaacacccuguacuacgugaacaagcaggagggcaagagccuguacgugaagggcgagcccaucaucaacuucuacgacccccugguguuccccagcgacgaguucgacgccagcaucagccaggugaacgagaagaucaaccagagccuggccuucaucagaaagagcgacgagcugcugcacaacgugaacgugggcaagagcaccaccaacaucaugaucaccaccaucaucaucgugaucaucgugauccugcugcugcugaucgccgugggccuguuccuguacugcaaggccagaugaggacuaguaauaaggaaacuguaugaaugucugugggcaggaagugaagagauccuucuguaaagguuuuuggaauuaugucugcugaauaauaaacuuuuuugaaauaauaaaucugguagaaaaaugagaucuaaaaaaaaaaaaaaaaaaaaaaaaaaaaaaaaaaaaaaaaaaaaaaaaaaaaaaaaaaaaaaaaugcaucccccccccccccccccccccccccccccccaaaggcucuuuucagagccaccagaauu

SEQ ID NO: 19063 - RNA, 1982 nt, Artificial Sequence
  mRNA product Design h-4 comprising derived and/or modified sequence from HRSV(Memphis-37)__AIY60640.1__F-del_DSCav1_mut7 (opt5)
gggagagggcgcuuggcuugcaaggacccugagcugcggcauugaagcacacccaacccaacucgacugaagucagccucacugaaccggaucugagaaucuucucucucugggcuugccagggcucuccgaaccuagcuagcauccucuucaauuccaacuagaaagcuuaccauggagcugcccauccucaagaccaacgccauuacaacgauccuggcugccgugacccuuugcuucgcgagcucccagaauauuacagaagaguuuuaccaaucuaccuguagcgcugucuccaaaggcuaucugucugcccucagaacagggugguacaccagcguuaucacaauugaacuguccaacaucaaggagaauaaaugcaacggaaccgacgccaaggugaaacuuaucaagcaggaacuggauaaguauaaaaaugcugugacggagcuccagaugcugauguguucuaccccugccgcuggcagcggguccgccauugcgagcggaaucgccgucugcaaggugcugcaccucgagggcgaaguuaacaaaauuaagaaugcucugcuuucuacaaacaaagccguggucucccugagcaauggggugucuguucucaccuucaaggugcuggaccuuaagaacuacaucgauaaacagcugcucccgauucugaauaagcaauccuguagcaucucuaacauugagacagucauggaauuucagcagaaaaauaaccggcugcucgagaucacccgcgaguucuccgugaaugcuggagugacgacacccgucagcaccuauaugcugacaaacuccgaacuucugucucucaucaacgacaugccuauuaccaaugaucagaagaaacugaugagcaacaauguucaaaucgugagacagcaguccuacagcauuaugugcaucauuaaggaggaagugcuugccuaugucgugcagcugccccucuacggcguuaucgacaccccuuguuggaaacugcauacaucuccccugugcacgaccaacacaaaggagggcuccaauaucugucucacccggacagaucgcgggugguacugcgacaacgcgggaagcgugagcuuuuucccucaagccgaaaccuguaaggucugcucuaauagaguguuuugcgauacgaugaacucccugacacuuccgucugagguuaaucuguguaacauugacaucuucaaucccaaauaugauugcaagauuaugaccagcaaaaccgacguguccagcucugucaucacaucccucggcgcuauugugagcuguuacgggaagaccaaaugcacagccucuaacaagaauaagggaaucaucaaaacguuuuccaacggcugugauuaugucagcaauaaggggguggacaccguuuccgugggaaacacacuguacuaugucaacaaacaggagggcaagucucuuuacgugaaaggcgaaccuauuaucaauuucuaugacccccugguuuuuccuagcgaugaguucgacgcuuccauuucucaggugaacgaaaagaucaaucaaagccucgccuuuauucggaaguccgaugagcugcugcacaacgucaauguggggaaaagcaccacaaacaucaugauuaccacgaucaucauugugaucauuguuauccuccugcuucugauugccgucggacucuuccuguacugcaaggcucgcugaggacuaguaauaaggaaacuguaugaaugucugugggcaggaagugaagagauccuucuguaaagguuuuuggaauuaugucugcugaauaauaaacuuuuuugaaauaauaaaucugguagaaaaaugagaucuaaaaaaaaaaaaaaaaaaaaaaaaaaaaaaaaaaaaaaaaaaaaaaaaaaaaaaaaaaaaaaaaugcaucccccccccccccccccccccccccccccccaaaggcucuuuucagagccaccagaauu

SEQ ID NO: 19064 - RNA, 1982 nt, Artificial Sequence
  mRNA product Design h-4 comprising derived and/or modified sequence from HRSV(Memphis-37)__AIY60640.1__F-del_DSCav1_mut7 (opt6)
gggagagggcgcuuggcuugcaaggacccugagcugcggcauugaagcacacccaacccaacucgacugaagucagccucacugaaccggaucugagaaucuucucucucugggcuugccagggcucuccgaaccuagcuagcauccucuucaauuccaacuagaaagcuuaccauggaacuaccaauacucaaaacaaacgccauaaccacaauacuagccgcaguaacacuuugcuuugccucaagucaaaacauaacagaagaauuuuaccaauccacaugcucagcuguauccaaaggauauuuauccgcacuaagaacaggaugguacacaucaguaaucacaauagaauuaucaaacauaaaagaaaacaaauguaauggcacagacgccaaaguaaaacuaauuaaacaagaacuagacaaauauaaaaaugcaguaaccgaacuccaaaugcucaugugcucuacaccagcugcaggaucaggaucagccauugcaagcgguauagcuguuugcaaaguauuacacuuagaaggagaaguaaauaaaauaaaaaacgcacuacuaucaacaaauaaagcaguaguaucccuaucaaacggaguaucaguacuuacauucaaaguauuagauuuaaaaaacuauauagacaaacaacuacuucccauauuaaacaaacaaucaugcucaauuuccaacauugaaacuguaauggaauuucaacaaaaaaacaacagacuacuugaaaucacacgagaauuuucaguaaacgcuggaguaacaacaccugucucuaccuacaugcucacaaauagcgaauuacuaucucuaaucaaugacaugccaauaacaaacgaucaaaaaaaacuaauguccaacaacguacaaauaguaagacaacaauccuauucaauaaugugcauaauaaaagaagaagucuuagcauacguuguacaacuaccauuauacggaguaauagauacaccaugcuggaaacuccacacaagcccccucugcacaacaaacaccaaagaagggucaaacauaugcuuaacaagaacagacagaggaugguacugugauaacgcaggaucugucucauucuuuccacaagcagaaacauguaaaguaugcuccaacagagucuuuugcgacaccaugaacucacuaaccuuacccucagaaguaaaccugugcaacaucgauaucuucaaccccaaauacgauugcaaaaucaugacaagcaaaacugauguauccagcucuguaauaacaucacuaggugcaauaguaucaugcuacggaaaaacaaaaugcacagcuucuaacaaaaauaaaggaauaauaaaaacauucuccaauggaugcgacuaugucucaaauaaaggaguagauacaguuucagucggcaacacacucuauuauguaaauaaacaagaaggaaaaucauuauacguaaaaggagaacccauaauaaacuucuacgacccccucguauucccaagcgacgaauuugacgccucaauaucacaaguaaacgaaaaaauaaaccaaucacucgcauucaucagaaaaucagaugaacuacuacacaauguaaacgucggaaaauccaccacaaauauaaugauaacuaccaucauaauaguaauaauagucaucuuacuacuauuaaucgcuguaggacuauuucucuacugcaaggccagauaaggacuaguaauaaggaaacuguaugaaugucugugggcaggaagugaagagauccuucuguaaagguuuuuggaauuaugucugcugaauaauaaacuuuuuugaaauaauaaaucugguagaaaaaugagaucuaaaaaaaaaaaaaaaaaaaaaaaaaaaaaaaaaaaaaaaaaaaaaaaaaaaaaaaaaaaaaaaaugcaucccccccccccccccccccccccccccccccaaaggcucuuuucagagccaccagaauu

SEQ ID NO: 19065 - RNA, 1982 nt, Artificial Sequence
  mRNA product Design h-4 comprising derived and/or modified sequence from HRSV(Memphis-37)__AIY60640.1__F-del_DSCav1_mut7 (opt11)
gggagagggcgcuuggcuugcaaggacccugagcugcggcauugaagcacacccaacccaacucgacugaagucagccucacugaaccggaucugagaaucuucucucucugggcuugccagggcucuccgaaccuagcuagcauccucuucaauuccaacuagaaagcuuaccauggaacucccaauccucaaaacaaaugccaucaccaccauccuagccgcugucacacuaugcuucgccuccucacaaaacaucaccgaagaguucuaucaauccacaugcuccgccgucagcaagggauaccucuccgcccuuagaaccggcugguacaccucagucaucacaauugaacugucaaacaucaaagaaaacaaaugcaacggcaccgacgcaaaaguaaagcucaucaaacaagaacuggacaaguacaagaacgccgucaccgaacuacagaugcuuaugugcucaaccccugccgccggcuccggaucugccauagcuucaggcaucgccguaugcaaaguccugcaccuagaaggggaagucaacaaaaucaaaaacgcccuccucuccaccaacaaggccguugucucccugucaaacggagucuccguccuaaccuucaaaguccucgaccucaaaaacuacauagacaaacaacuccuacccauccucaacaaacaaagcugcucaauauccaacaucgaaaccgucauggaguuccaacaaaagaacaaccgacuacucgaaauaacacgcgaguucucagucaacgccggcgucaccaccccagucuccacauacaugcucaccaacuccgaacuccuaucgcucaucaacgacaugcccaucaccaaugaccagaagaaacucauguccaacaacguacaaaucguccgccaacaguccuacucaaucaugugcaucaucaaagaagaaguccuugccuacgucguccagcuuccacucuacggagucaucgacacccccugcuggaaacuccacaccuccccacuaugcaccaccaacaccaaagaaggauccaacauaugccucacccguacugaccgcggcugguacugcgacaacgccggauccgucucauucuucccccaggccgaaaccugcaaagucugcuccaaccgcgucuucugcgacaccaugaacucgcucacccucccauccgaagucaaucuaugcaacaucgacauuuucaaccccaaauacgacugcaaaauuaugacaucaaaaaccgacgucucauccucagucaucacuucccucggcgcaaucguaagcugcuacgggaaaacaaagugcaccgcuuccaacaaaaacaaaggcaucaucaaaaccuucucuaacggcugcgacuacgucuccaacaaaggagucgacaccguauccgucggcaacacccucuacuacgucaacaaacaggaaggaaaaucgcucuacgucaaaggagaaccaaucaucaacuucuacgacccccuagucuucccauccgacgaguucgacgccagcaucucacaagucaaugaaaagaucaaccagucacucgcauucauccguaagucagacgaacuccuacacaacgucaacgucggcaagucaacaaccaacauaaugaucaccaccauaaucaucgucauaauaguaauccuccuucuccuaaucgcagucggccucuuccucuacugcaaagcacgcuaaggacuaguaauaaggaaacuguaugaaugucugugggcaggaagugaagagauccuucuguaaagguuuuuggaauuaugucugcugaauaauaaacuuuuuugaaauaauaaaucugguagaaaaaugagaucuaaaaaaaaaaaaaaaaaaaaaaaaaaaaaaaaaaaaaaaaaaaaaaaaaaaaaaaaaaaaaaaaugcaucccccccccccccccccccccccccccccccaaaggcucuuuucagagccaccagaauu

SEQ ID NO: 19066 - RNA, 1998 nt, Artificial Sequence
  mRNA product Design h-5 comprising derived and/or modified sequence from HRSV(Memphis-37)__AIY60640.1__F-del_DSCav1_mut7 (opt1)
gggagagggcgcuuggcuugcaaggacccugagcugcggcauugaagcacacccaacccaacucgacugaagucagccucacugaaccggaucugagaaucuucucucucugggcuugccagggcucuccgaaccuagcuagcauccucuucaauuccaacuagaaagcuuaccauggagcugcccauccucaagaccaacgccaucaccacgauccuggccgcggugacccugugcuucgccagcucccagaacaucaccgaggaguucuaccagagcacgugcuccgccgucagcaagggcuaccucuccgcccugcgcaccgggugguacaccagcgugaucaccaucgagcuguccaacaucaaggagaacaagugcaacggcaccgacgccaaggugaagcucaucaagcaggagcuggacaaguacaagaacgcggucacggagcugcagaugcugaugugcagcaccccggccgccggcuccgggagcgcgaucgccuccggcaucgccgucugcaaggugcugcaccucgagggcgaggugaacaagaucaagaacgcccugcuguccaccaacaaggccgucgugagccucuccaacggggugagcguccugaccuucaaggugcuggaccucaagaacuacaucgacaagcagcugcugcccauccugaacaagcagagcugcuccaucagcaacaucgagaccgucauggaguuccagcagaagaacaaccgccuccuggagaucacgcgggaguucagcgugaacgcgggcgugaccacccccgucuccaccuacaugcugacgaacagcgagcuccugucccugaucaacgacaugccgaucaccaacgaccagaagaagcucaugagcaacaacgugcagaucgugcgccagcaguccuacagcaucaugugcaucaucaaggaggagguccuggccuacguggugcagcugccccucuacggggucaucgacacccccugcuggaagcugcacaccagcccccugugcacgaccaacaccaaggagggcuccaacaucugccucacccggacggaccgcgggugguacugcgacaacgccggcagcguguccuucuucccgcaggccgagaccugcaaggucugcagcaaccggguguucugcgacaccaugaacucccugacccugcccagcgaggugaaccucugcaacaucgacaucuucaaccccaaguacgacugcaagaucaugacguccaagaccgacgucagcuccagcgugaucaccucccugggcgccaucgugagcugcuacgggaagaccaagugcacggcgagcaacaagaacaagggcaucaucaagaccuucuccaacgggugcgacuacgucagcaacaagggcguggacaccguguccgucggcaacacccuguacuacgugaacaagcaggagggcaagagccucuacgugaagggggagcccaucaucaacuucuacgacccgcuggucuuccccuccgacgaguucgacgccagcaucucccaggugaacgagaagaucaaccagagccuggccuucauccggaaguccgacgagcuccugcacaacgugaacgucggcaagagcaccacgaacaucaugaucaccaccaucaucaucgugaucaucgugauccugcugcuccugaucgccgucgggcuguuccucuacugcaaggcccgcugaggacuaguacuggcugcaucucccuuuccucuguccuccauccuucucccaggauggugaagggggaccugguacccagugauccccaccccaggauccuaaaucaugacuuaccugcuaauaaaaacucauuggaaaagugagaagaucuaaaaaaaaaaaaaaaaaaaaaaaaaaaaaaaaaaaaaaaaaaaaaaaaaaaaaaaaaaaaaaaaugcaucccccccccccccccccccccccccccccccaaaggcucuuuucagagccaccagaauu

SEQ ID NO: 19067 - RNA, 1998 nt, Artificial Sequence
  mRNA product Design h-5 comprising derived and/or modified sequence from HRSV(Memphis-37)__AIY60640.1__F-del_DSCav1_mut7 (opt1)
gggagagggcgcuuggcuugcaaggacccugagcugcggcauugaagcacacccaacccaacucgacugaagucagccucacugaaccggaucugagaaucuucucucucugggcuugccagggcucuccgaaccuagcuagcauccucuucaauuccaacuagaaagcuuaccauggagcugcccauccucaagaccaacgccaucaccacgauccuggccgcggugacccugugcuucgccagcucccagaacaucaccgaggaguucuaccagagcacgugcuccgccgucagcaagggguaccucuccgcccugcgcaccgggugguacaccagcgugaucaccaucgagcuguccaacaucaaggagaacaagugcaacggcaccgacgccaaggugaagcucaucaagcaggagcuggacaaguacaagaacgcggucacggagcugcagaugcucaugugcagcaccccggccgccggguccggcagcgccaucgcguccgggaucgccgugugcaaggugcugcaccuggagggcgaggucaacaagaucaagaacgcccuccugagcaccaacaaggccguggugucccugagcaacggcgucuccgugcucaccuucaaggugcuggaccugaagaacuacaucgacaagcagcuccugcccauccugaacaagcagagcugcuccaucagcaacaucgagacggucauggaguuccagcagaagaacaaccggcuccuggagaucacccgcgaguucuccgugaacgccggggugaccacccccgucagcacguacaugcugaccaacagcgagcuccugucccugaucaacgacaugcccaucaccaacgaccagaagaagcucaugagcaacaacgugcagaucgugcggcagcaguccuacagcaucaugugcaucaucaaggaggagguccuggcguacguggugcagcugccgcucuacggcgucaucgacacccccugcuggaagcugcacacgagcccccugugcaccaccaacaccaaggaggggagcaacaucugccucacgcgcaccgaccggggcugguacugcgacaacgccggguccgugagcuucuucccccaggccgagaccugcaaggugugcuccaaccgcgucuucugcgacaccaugaacagccugacgcugccguccgaggugaaccucugcaacaucgacaucuucaaccccaaguacgacugcaagaucaugaccagcaagaccgacgucuccagcuccgugaucaccagccugggcgccaucguguccugcuacggcaagacgaagugcaccgccagcaacaagaacaaggggaucaucaagaccuucuccaacggcugcgacuacgucagcaacaaggggguggacaccgugagcgucggcaacacgcuguacuacgugaacaagcaggagggcaagucccucuacgugaagggggagcccaucaucaacuucuacgacccccuggucuucccgagcgacgaguucgacgcguccaucagccaggugaacgagaagaucaaccagucccuggccuucauccggaaguccgacgagcuccugcacaacgugaacgucggcaaguccaccaccaacaucaugaucaccaccaucaucaucgugaucaucgugauccugcuccugcugaucgccgucggccucuuccuguacugcaaggcccgcugaggacuaguacuggcugcaucucccuuuccucuguccuccauccuucucccaggauggugaagggggaccugguacccagugauccccaccccaggauccuaaaucaugacuuaccugcuaauaaaaacucauuggaaaagugagaagaucuaaaaaaaaaaaaaaaaaaaaaaaaaaaaaaaaaaaaaaaaaaaaaaaaaaaaaaaaaaaaaaaaugcaucccccccccccccccccccccccccccccccaaaggcucuuuucagagccaccagaauu

SEQ ID NO: 19068 - RNA, 1998 nt, Artificial Sequence
  mRNA product Design h-5 comprising derived and/or modified sequence from HRSV(Memphis-37)__AIY60640.1__F-del_DSCav1_mut7 (opt2)
gggagagggcgcuuggcuugcaaggacccugagcugcggcauugaagcacacccaacccaacucgacugaagucagccucacugaaccggaucugagaaucuucucucucugggcuugccagggcucuccgaaccuagcuagcauccucuucaauuccaacuagaaagcuuaccauggagcuccccauccucaagaccaacgccaucaccaccauccucgccgccgucacccucugcuucgccuccucccagaacaucaccgaggaguucuaccaguccaccugcuccgccgucuccaagggcuaccucuccgcccuccgcaccggcugguacaccuccgucaucaccaucgagcucuccaacaucaaggagaacaagugcaacggcaccgacgccaaggucaagcucaucaagcaggagcucgacaaguacaagaacgccgucaccgagcuccagaugcucaugugcuccacccccgccgccggcuccggcuccgccaucgccuccggcaucgccgucugcaagguccuccaccucgagggcgaggucaacaagaucaagaacgcccuccucuccaccaacaaggccgucgucucccucuccaacggcgucuccguccucaccuucaagguccucgaccucaagaacuacaucgacaagcagcuccuccccauccucaacaagcaguccugcuccaucuccaacaucgagaccgucauggaguuccagcagaagaacaaccgccuccucgagaucacccgcgaguucuccgucaacgccggcgucaccacccccgucuccaccuacaugcucaccaacuccgagcuccucucccucaucaacgacaugcccaucaccaacgaccagaagaagcucauguccaacaacguccagaucguccgccagcaguccuacuccaucaugugcaucaucaaggaggagguccucgccuacgucguccagcucccccucuacggcgucaucgacacccccugcuggaagcuccacaccuccccccucugcaccaccaacaccaaggagggcuccaacaucugccucacccgcaccgaccgcggcugguacugcgacaacgccggcuccgucuccuucuucccccaggccgagaccugcaaggucugcuccaaccgcgucuucugcgacaccaugaacucccucacccuccccuccgaggucaaccucugcaacaucgacaucuucaaccccaaguacgacugcaagaucaugaccuccaagaccgacgucuccuccuccgucaucaccucccucggcgccaucgucuccugcuacggcaagaccaagugcaccgccuccaacaagaacaagggcaucaucaagaccuucuccaacggcugcgacuacgucuccaacaagggcgucgacaccgucuccgucggcaacacccucuacuacgucaacaagcaggagggcaagucccucuacgucaagggcgagcccaucaucaacuucuacgacccccucgucuuccccuccgacgaguucgacgccuccaucucccaggucaacgagaagaucaaccagucccucgccuucauccgcaaguccgacgagcuccuccacaacgucaacgucggcaaguccaccaccaacaucaugaucaccaccaucaucaucgucaucaucgucauccuccuccuccucaucgccgucggccucuuccucuacugcaaggcccgcugaggacuaguacuggcugcaucucccuuuccucuguccuccauccuucucccaggauggugaagggggaccugguacccagugauccccaccccaggauccuaaaucaugacuuaccugcuaauaaaaacucauuggaaaagugagaagaucuaaaaaaaaaaaaaaaaaaaaaaaaaaaaaaaaaaaaaaaaaaaaaaaaaaaaaaaaaaaaaaaaugcaucccccccccccccccccccccccccccccccaaaggcucuuuucagagccaccagaauu

SEQ ID NO: 19069 - RNA, 1998 nt, Artificial Sequence
  mRNA product Design h-5 comprising derived and/or modified sequence from HRSV(Memphis-37)__AIY60640.1__F-del_DSCav1_mut7 (opt3)
gggagagggcgcuuggcuugcaaggacccugagcugcggcauugaagcacacccaacccaacucgacugaagucagccucacugaaccggaucugagaaucuucucucucugggcuugccagggcucuccgaaccuagcuagcauccucuucaauuccaacuagaaagcuuaccauggagcugcccauccucaagaccaacgccauuacaacuauacuugcugcagugacgcugugcuucgccagcucccagaauaucaccgaagaguuuuaccaaucuacauguucagcggucaguaaaggcuauuugagcgcuuuaagaacugggugguacaccuccguuauuacaaucgaacugucuaacauuaaggagaauaaaugcaacggaaccgacgccaaggugaaacuaaucaagcaggaacucgauaaguauaaaaaugcaguaacugagcugcagaugcuuauguguucgaccccugccgcugguucaggcagcgcaauagccagugggaucgcugugugcaagguccugcacuuggagggagaagugaacaaaauuaagaaugcccuccuguccacaaacaaagcgguugugucucugagcaauggcgucuccgugcucacguucaagguauuagaccugaagaacuacaucgauaaacagcuuuugccaauucugaauaagcaaucauguaguaucagcaacauagagacuguuauggaauuucagcagaaaaauaacaggcuacucgagauuacccgggaguucucugugaaugccggugucacaacuccgguguccaccuauaugcugacaaacucagaacuucugagcuugaucaacgacaugcccauuaccaaugaucagaagaaacucaugaguaacaaugugcaaaucguccgccagcagucuuacuccaucaugugcauuauaaaggaggaaguucuggcauaugugguacaguuaccucuguacggggugaucgacacgccauguuggaaacuccauacuagcccccuuugcacaaccaacacuaaggagggaucgaauauuugucugacacgaaccgaucguggcugguacugcgacaacgcuggcucugucuccuuuuucccucaagccgaaacguguaaggugugcucaaauagaguguuuugcgauaccaugaacaguuugacacuaccaagcgagguuaaucuguguaacaucgacauauucaaucccaaauaugauugcaagauuaugacuuccaaaaccgacgucucuagcucagugaucacaagucucggggcaaucguauccuguuacggaaagacuaaaugcaccgcuagcaacaagaauaaggguauuaucaaaacauuuucuaacggcugugauuauguuucaaauaaggggguggacaccgucagugugggaaacacucuguacuaugucaacaaacaggagggcaagagccuuuacgugaaaggugaaccuauuauaaauuucuaugacccacugguuuuuccguccgaugaguucgacgccucuaucagccaggugaacgaaaagauuaaucaaucguuggcguuuaucaggaaguccgaugagcuccugcacaacguaaaugucgggaaaucaacgacaaacaucaugauuaccacuauaaucauugugaucauuguuaucuuacugcuacucauagccgugggacuguuccuuuacugcaaggcacggugaggacuaguacuggcugcaucucccuuuccucuguccuccauccuucucccaggauggugaagggggaccugguacccagugauccccaccccaggauccuaaaucaugacuuaccugcuaauaaaaacucauuggaaaagugagaagaucuaaaaaaaaaaaaaaaaaaaaaaaaaaaaaaaaaaaaaaaaaaaaaaaaaaaaaaaaaaaaaaaaugcaucccccccccccccccccccccccccccccccaaaggcucuuuucagagccaccagaauu

SEQ ID NO: 19070 - RNA, 1998 nt, Artificial Sequence
  mRNA product Design h-5 comprising derived and/or modified sequence from HRSV(Memphis-37)__AIY60640.1__F-del_DSCav1_mut7 (opt4)
gggagagggcgcuuggcuugcaaggacccugagcugcggcauugaagcacacccaacccaacucgacugaagucagccucacugaaccggaucugagaaucuucucucucugggcuugccagggcucuccgaaccuagcuagcauccucuucaauuccaacuagaaagcuuaccauggagcugcccauccugaagaccaacgccaucaccaccauccuggccgccgugacccugugcuucgccagcagccagaacaucaccgaggaguucuaccagagcaccugcagcgccgugagcaagggcuaccugagcgcccugagaaccggcugguacaccagcgugaucaccaucgagcugagcaacaucaaggagaacaagugcaacggcaccgacgccaaggugaagcugaucaagcaggagcuggacaaguacaagaacgccgugaccgagcugcagaugcugaugugcagcacccccgccgccggcagcggcagcgccaucgccagcggcaucgccgugugcaaggugcugcaccuggagggcgaggugaacaagaucaagaacgcccugcugagcaccaacaaggccguggugagccugagcaacggcgugagcgugcugaccuucaaggugcuggaccugaagaacuacaucgacaagcagcugcugcccauccugaacaagcagagcugcagcaucagcaacaucgagaccgugauggaguuccagcagaagaacaacagacugcuggagaucaccagagaguucagcgugaacgccggcgugaccacccccgugagcaccuacaugcugaccaacagcgagcugcugagccugaucaacgacaugcccaucaccaacgaccagaagaagcugaugagcaacaacgugcagaucgugagacagcagagcuacagcaucaugugcaucaucaaggaggaggugcuggccuacguggugcagcugccccuguacggcgugaucgacacccccugcuggaagcugcacaccagcccccugugcaccaccaacaccaaggagggcagcaacaucugccugaccagaaccgacagaggcugguacugcgacaacgccggcagcgugagcuucuucccccaggccgagaccugcaaggugugcagcaacagaguguucugcgacaccaugaacagccugacccugcccagcgaggugaaccugugcaacaucgacaucuucaaccccaaguacgacugcaagaucaugaccagcaagaccgacgugagcagcagcgugaucaccagccugggcgccaucgugagcugcuacggcaagaccaagugcaccgccagcaacaagaacaagggcaucaucaagaccuucagcaacggcugcgacuacgugagcaacaagggcguggacaccgugagcgugggcaacacccuguacuacgugaacaagcaggagggcaagagccuguacgugaagggcgagcccaucaucaacuucuacgacccccugguguuccccagcgacgaguucgacgccagcaucagccaggugaacgagaagaucaaccagagccuggccuucaucagaaagagcgacgagcugcugcacaacgugaacgugggcaagagcaccaccaacaucaugaucaccaccaucaucaucgugaucaucgugauccugcugcugcugaucgccgugggccuguuccuguacugcaaggccagaugaggacuaguacuggcugcaucucccuuuccucuguccuccauccuucucccaggauggugaagggggaccugguacccagugauccccaccccaggauccuaaaucaugacuuaccugcuaauaaaaacucauuggaaaagugagaagaucuaaaaaaaaaaaaaaaaaaaaaaaaaaaaaaaaaaaaaaaaaaaaaaaaaaaaaaaaaaaaaaaaugcaucccccccccccccccccccccccccccccccaaaggcucuuuucagagccaccagaauu

SEQ ID NO: 19071 - RNA, 1998 nt, Artificial Sequence
  mRNA product Design h-5 comprising derived and/or modified sequence from HRSV(Memphis-37)__AIY60640.1__F-del_DSCav1_mut7 (opt5)
gggagagggcgcuuggcuugcaaggacccugagcugcggcauugaagcacacccaacccaacucgacugaagucagccucacugaaccggaucugagaaucuucucucucugggcuugccagggcucuccgaaccuagcuagcauccucuucaauuccaacuagaaagcuuaccauggagcugcccauccucaagaccaacgccauuacaacgauccuggcugccgugacccuuugcuucgcgagcucccagaauauuacagaagaguuuuaccaaucuaccuguagcgcugucuccaaaggcuaucugucugcccucagaacagggugguacaccagcguuaucacaauugaacuguccaacaucaaggagaauaaaugcaacggaaccgacgccaaggugaaacuuaucaagcaggaacuggauaaguauaaaaaugcugugacggagcuccagaugcugauguguucuaccccugccgcuggcagcggguccgccauugcgagcggaaucgccgucugcaaggugcugcaccucgagggcgaaguuaacaaaauuaagaaugcucugcuuucuacaaacaaagccguggucucccugagcaauggggugucuguucucaccuucaaggugcuggaccuuaagaacuacaucgauaaacagcugcucccgauucugaauaagcaauccuguagcaucucuaacauugagacagucauggaauuucagcagaaaaauaaccggcugcucgagaucacccgcgaguucuccgugaaugcuggagugacgacacccgucagcaccuauaugcugacaaacuccgaacuucugucucucaucaacgacaugccuauuaccaaugaucagaagaaacugaugagcaacaauguucaaaucgugagacagcaguccuacagcauuaugugcaucauuaaggaggaagugcuugccuaugucgugcagcugccccucuacggcguuaucgacaccccuuguuggaaacugcauacaucuccccugugcacgaccaacacaaaggagggcuccaauaucugucucacccggacagaucgcgggugguacugcgacaacgcgggaagcgugagcuuuuucccucaagccgaaaccuguaaggucugcucuaauagaguguuuugcgauacgaugaacucccugacacuuccgucugagguuaaucuguguaacauugacaucuucaaucccaaauaugauugcaagauuaugaccagcaaaaccgacguguccagcucugucaucacaucccucggcgcuauugugagcuguuacgggaagaccaaaugcacagccucuaacaagaauaagggaaucaucaaaacguuuuccaacggcugugauuaugucagcaauaaggggguggacaccguuuccgugggaaacacacuguacuaugucaacaaacaggagggcaagucucuuuacgugaaaggcgaaccuauuaucaauuucuaugacccccugguuuuuccuagcgaugaguucgacgcuuccauuucucaggugaacgaaaagaucaaucaaagccucgccuuuauucggaaguccgaugagcugcugcacaacgucaauguggggaaaagcaccacaaacaucaugauuaccacgaucaucauugugaucauuguuauccuccugcuucugauugccgucggacucuuccuguacugcaaggcucgcugaggacuaguacuggcugcaucucccuuuccucuguccuccauccuucucccaggauggugaagggggaccugguacccagugauccccaccccaggauccuaaaucaugacuuaccugcuaauaaaaacucauuggaaaagugagaagaucuaaaaaaaaaaaaaaaaaaaaaaaaaaaaaaaaaaaaaaaaaaaaaaaaaaaaaaaaaaaaaaaaugcaucccccccccccccccccccccccccccccccaaaggcucuuuucagagccaccagaauu

SEQ ID NO: 19072 - RNA, 1998 nt, Artificial Sequence
  mRNA product Design h-5 comprising derived and/or modified sequence from HRSV(Memphis-37)__AIY60640.1__F-del_DSCav1_mut7 (opt6)
gggagagggcgcuuggcuugcaaggacccugagcugcggcauugaagcacacccaacccaacucgacugaagucagccucacugaaccggaucugagaaucuucucucucugggcuugccagggcucuccgaaccuagcuagcauccucuucaauuccaacuagaaagcuuaccauggaacuaccaauacucaaaacaaacgccauaaccacaauacuagccgcaguaacacuuugcuuugccucaagucaaaacauaacagaagaauuuuaccaauccacaugcucagcuguauccaaaggauauuuauccgcacuaagaacaggaugguacacaucaguaaucacaauagaauuaucaaacauaaaagaaaacaaauguaauggcacagacgccaaaguaaaacuaauuaaacaagaacuagacaaauauaaaaaugcaguaaccgaacuccaaaugcucaugugcucuacaccagcugcaggaucaggaucagccauugcaagcgguauagcuguuugcaaaguauuacacuuagaaggagaaguaaauaaaauaaaaaacgcacuacuaucaacaaauaaagcaguaguaucccuaucaaacggaguaucaguacuuacauucaaaguauuagauuuaaaaaacuauauagacaaacaacuacuucccauauuaaacaaacaaucaugcucaauuuccaacauugaaacuguaauggaauuucaacaaaaaaacaacagacuacuugaaaucacacgagaauuuucaguaaacgcuggaguaacaacaccugucucuaccuacaugcucacaaauagcgaauuacuaucucuaaucaaugacaugccaauaacaaacgaucaaaaaaaacuaauguccaacaacguacaaauaguaagacaacaauccuauucaauaaugugcauaauaaaagaagaagucuuagcauacguuguacaacuaccauuauacggaguaauagauacaccaugcuggaaacuccacacaagcccccucugcacaacaaacaccaaagaagggucaaacauaugcuuaacaagaacagacagaggaugguacugugauaacgcaggaucugucucauucuuuccacaagcagaaacauguaaaguaugcuccaacagagucuuuugcgacaccaugaacucacuaaccuuacccucagaaguaaaccugugcaacaucgauaucuucaaccccaaauacgauugcaaaaucaugacaagcaaaacugauguauccagcucuguaauaacaucacuaggugcaauaguaucaugcuacggaaaaacaaaaugcacagcuucuaacaaaaauaaaggaauaauaaaaacauucuccaauggaugcgacuaugucucaaauaaaggaguagauacaguuucagucggcaacacacucuauuauguaaauaaacaagaaggaaaaucauuauacguaaaaggagaacccauaauaaacuucuacgacccccucguauucccaagcgacgaauuugacgccucaauaucacaaguaaacgaaaaaauaaaccaaucacucgcauucaucagaaaaucagaugaacuacuacacaauguaaacgucggaaaauccaccacaaauauaaugauaacuaccaucauaauaguaauaauagucaucuuacuacuauuaaucgcuguaggacuauuucucuacugcaaggccagauaaggacuaguacuggcugcaucucccuuuccucuguccuccauccuucucccaggauggugaagggggaccugguacccagugauccccaccccaggauccuaaaucaugacuuaccugcuaauaaaaacucauuggaaaagugagaagaucuaaaaaaaaaaaaaaaaaaaaaaaaaaaaaaaaaaaaaaaaaaaaaaaaaaaaaaaaaaaaaaaaugcaucccccccccccccccccccccccccccccccaaaggcucuuuucagagccaccagaauu

SEQ ID NO: 19073 - RNA, 1998 nt, Artificial Sequence
  mRNA product Design h-5 comprising derived and/or modified sequence from HRSV(Memphis-37)__AIY60640.1__F-del_DSCav1_mut7 (opt11)
gggagagggcgcuuggcuugcaaggacccugagcugcggcauugaagcacacccaacccaacucgacugaagucagccucacugaaccggaucugagaaucuucucucucugggcuugccagggcucuccgaaccuagcuagcauccucuucaauuccaacuagaaagcuuaccauggaacucccaauccucaaaacaaaugccaucaccaccauccuagccgcugucacacuaugcuucgccuccucacaaaacaucaccgaagaguucuaucaauccacaugcuccgccgucagcaagggauaccucuccgcccuuagaaccggcugguacaccucagucaucacaauugaacugucaaacaucaaagaaaacaaaugcaacggcaccgacgcaaaaguaaagcucaucaaacaagaacuggacaaguacaagaacgccgucaccgaacuacagaugcuuaugugcucaaccccugccgccggcuccggaucugccauagcuucaggcaucgccguaugcaaaguccugcaccuagaaggggaagucaacaaaaucaaaaacgcccuccucuccaccaacaaggccguugucucccugucaaacggagucuccguccuaaccuucaaaguccucgaccucaaaaacuacauagacaaacaacuccuacccauccucaacaaacaaagcugcucaauauccaacaucgaaaccgucauggaguuccaacaaaagaacaaccgacuacucgaaauaacacgcgaguucucagucaacgccggcgucaccaccccagucuccacauacaugcucaccaacuccgaacuccuaucgcucaucaacgacaugcccaucaccaaugaccagaagaaacucauguccaacaacguacaaaucguccgccaacaguccuacucaaucaugugcaucaucaaagaagaaguccuugccuacgucguccagcuuccacucuacggagucaucgacacccccugcuggaaacuccacaccuccccacuaugcaccaccaacaccaaagaaggauccaacauaugccucacccguacugaccgcggcugguacugcgacaacgccggauccgucucauucuucccccaggccgaaaccugcaaagucugcuccaaccgcgucuucugcgacaccaugaacucgcucacccucccauccgaagucaaucuaugcaacaucgacauuuucaaccccaaauacgacugcaaaauuaugacaucaaaaaccgacgucucauccucagucaucacuucccucggcgcaaucguaagcugcuacgggaaaacaaagugcaccgcuuccaacaaaaacaaaggcaucaucaaaaccuucucuaacggcugcgacuacgucuccaacaaaggagucgacaccguauccgucggcaacacccucuacuacgucaacaaacaggaaggaaaaucgcucuacgucaaaggagaaccaaucaucaacuucuacgacccccuagucuucccauccgacgaguucgacgccagcaucucacaagucaaugaaaagaucaaccagucacucgcauucauccguaagucagacgaacuccuacacaacgucaacgucggcaagucaacaaccaacauaaugaucaccaccauaaucaucgucauaauaguaauccuccuucuccuaaucgcagucggccucuuccucuacugcaaagcacgcuaaggacuaguacuggcugcaucucccuuuccucuguccuccauccuucucccaggauggugaagggggaccugguacccagugauccccaccccaggauccuaaaucaugacuuaccugcuaauaaaaacucauuggaaaagugagaagaucuaaaaaaaaaaaaaaaaaaaaaaaaaaaaaaaaaaaaaaaaaaaaaaaaaaaaaaaaaaaaaaaaugcaucccccccccccccccccccccccccccccccaaaggcucuuuucagagccaccagaauu

SEQ ID NO: 19074 - RNA, 1931 nt, Artificial Sequence
  mRNA product Design i-1 comprising derived and/or modified sequence from HRSV(Memphis-37)__AIY60640.1__F-del_DSCav1_mut7 (opt1)
gggagagggcgcuuggcuugcaaggacccugagcugcggcauugaagcacacccaacccaacucgacugaagucagccucacugaaccggaucugagaaucuucucucucugggcuugccagggcucuccgaaccuagcuagcauccucuucaauuccaacuagaaagcuuaccauggagcugcccauccucaagaccaacgccaucaccacgauccuggccgcggugacccugugcuucgccagcucccagaacaucaccgaggaguucuaccagagcacgugcuccgccgucagcaagggcuaccucuccgcccugcgcaccgggugguacaccagcgugaucaccaucgagcuguccaacaucaaggagaacaagugcaacggcaccgacgccaaggugaagcucaucaagcaggagcuggacaaguacaagaacgcggucacggagcugcagaugcugaugugcagcaccccggccgccggcuccgggagcgcgaucgccuccggcaucgccgucugcaaggugcugcaccucgagggcgaggugaacaagaucaagaacgcccugcuguccaccaacaaggccgucgugagccucuccaacggggugagcguccugaccuucaaggugcuggaccucaagaacuacaucgacaagcagcugcugcccauccugaacaagcagagcugcuccaucagcaacaucgagaccgucauggaguuccagcagaagaacaaccgccuccuggagaucacgcgggaguucagcgugaacgcgggcgugaccacccccgucuccaccuacaugcugacgaacagcgagcuccugucccugaucaacgacaugccgaucaccaacgaccagaagaagcucaugagcaacaacgugcagaucgugcgccagcaguccuacagcaucaugugcaucaucaaggaggagguccuggccuacguggugcagcugccccucuacggggucaucgacacccccugcuggaagcugcacaccagcccccugugcacgaccaacaccaaggagggcuccaacaucugccucacccggacggaccgcgggugguacugcgacaacgccggcagcguguccuucuucccgcaggccgagaccugcaaggucugcagcaaccggguguucugcgacaccaugaacucccugacccugcccagcgaggugaaccucugcaacaucgacaucuucaaccccaaguacgacugcaagaucaugacguccaagaccgacgucagcuccagcgugaucaccucccugggcgccaucgugagcugcuacgggaagaccaagugcacggcgagcaacaagaacaagggcaucaucaagaccuucuccaacgggugcgacuacgucagcaacaagggcguggacaccguguccgucggcaacacccuguacuacgugaacaagcaggagggcaagagccucuacgugaagggggagcccaucaucaacuucuacgacccgcuggucuuccccuccgacgaguucgacgccagcaucucccaggugaacgagaagaucaaccagagccuggccuucauccggaaguccgacgagcuccugcacaacgugaacgucggcaagagcaccacgaacaucaugaucaccaccaucaucaucgugaucaucgugauccugcugcuccugaucgccgucgggcuguuccucuacugcaaggcccgcugaggacuaguguccaccugucccuccugggcugcuggauugucucguuuuccugccaaauaaacaggaucagcgcuuuacagaucuaaaaaaaaaaaaaaaaaaaaaaaaaaaaaaaaaaaaaaaaaaaaaaaaaaaaaaaaaaaaaaaaugcaucccccccccccccccccccccccccccccccaaaggcucuuuucagagccaccagaauu

SEQ ID NO: 19075 - RNA, 1931 nt, Artificial Sequence
  mRNA product Design i-1 comprising derived and/or modified sequence from HRSV(Memphis-37)__AIY60640.1__F-del_DSCav1_mut7 (opt1)
gggagagggcgcuuggcuugcaaggacccugagcugcggcauugaagcacacccaacccaacucgacugaagucagccucacugaaccggaucugagaaucuucucucucugggcuugccagggcucuccgaaccuagcuagcauccucuucaauuccaacuagaaagcuuaccauggagcugcccauccucaagaccaacgccaucaccacgauccuggccgcggugacccugugcuucgccagcucccagaacaucaccgaggaguucuaccagagcacgugcuccgccgucagcaagggguaccucuccgcccugcgcaccgggugguacaccagcgugaucaccaucgagcuguccaacaucaaggagaacaagugcaacggcaccgacgccaaggugaagcucaucaagcaggagcuggacaaguacaagaacgcggucacggagcugcagaugcucaugugcagcaccccggccgccggguccggcagcgccaucgcguccgggaucgccgugugcaaggugcugcaccuggagggcgaggucaacaagaucaagaacgcccuccugagcaccaacaaggccguggugucccugagcaacggcgucuccgugcucaccuucaaggugcuggaccugaagaacuacaucgacaagcagcuccugcccauccugaacaagcagagcugcuccaucagcaacaucgagacggucauggaguuccagcagaagaacaaccggcuccuggagaucacccgcgaguucuccgugaacgccggggugaccacccccgucagcacguacaugcugaccaacagcgagcuccugucccugaucaacgacaugcccaucaccaacgaccagaagaagcucaugagcaacaacgugcagaucgugcggcagcaguccuacagcaucaugugcaucaucaaggaggagguccuggcguacguggugcagcugccgcucuacggcgucaucgacacccccugcuggaagcugcacacgagcccccugugcaccaccaacaccaaggaggggagcaacaucugccucacgcgcaccgaccggggcugguacugcgacaacgccggguccgugagcuucuucccccaggccgagaccugcaaggugugcuccaaccgcgucuucugcgacaccaugaacagccugacgcugccguccgaggugaaccucugcaacaucgacaucuucaaccccaaguacgacugcaagaucaugaccagcaagaccgacgucuccagcuccgugaucaccagccugggcgccaucguguccugcuacggcaagacgaagugcaccgccagcaacaagaacaaggggaucaucaagaccuucuccaacggcugcgacuacgucagcaacaaggggguggacaccgugagcgucggcaacacgcuguacuacgugaacaagcaggagggcaagucccucuacgugaagggggagcccaucaucaacuucuacgacccccuggucuucccgagcgacgaguucgacgcguccaucagccaggugaacgagaagaucaaccagucccuggccuucauccggaaguccgacgagcuccugcacaacgugaacgucggcaaguccaccaccaacaucaugaucaccaccaucaucaucgugaucaucgugauccugcuccugcugaucgccgucggccucuuccuguacugcaaggcccgcugaggacuaguguccaccugucccuccugggcugcuggauugucucguuuuccugccaaauaaacaggaucagcgcuuuacagaucuaaaaaaaaaaaaaaaaaaaaaaaaaaaaaaaaaaaaaaaaaaaaaaaaaaaaaaaaaaaaaaaaugcaucccccccccccccccccccccccccccccccaaaggcucuuuucagagccaccagaauu

SEQ ID NO: 19076 - RNA, 1931 nt, Artificial Sequence
  mRNA product Design i-1 comprising derived and/or modified sequence from HRSV(Memphis-37)__AIY60640.1__F-del_DSCav1_mut7 (opt2)
gggagagggcgcuuggcuugcaaggacccugagcugcggcauugaagcacacccaacccaacucgacugaagucagccucacugaaccggaucugagaaucuucucucucugggcuugccagggcucuccgaaccuagcuagcauccucuucaauuccaacuagaaagcuuaccauggagcuccccauccucaagaccaacgccaucaccaccauccucgccgccgucacccucugcuucgccuccucccagaacaucaccgaggaguucuaccaguccaccugcuccgccgucuccaagggcuaccucuccgcccuccgcaccggcugguacaccuccgucaucaccaucgagcucuccaacaucaaggagaacaagugcaacggcaccgacgccaaggucaagcucaucaagcaggagcucgacaaguacaagaacgccgucaccgagcuccagaugcucaugugcuccacccccgccgccggcuccggcuccgccaucgccuccggcaucgccgucugcaagguccuccaccucgagggcgaggucaacaagaucaagaacgcccuccucuccaccaacaaggccgucgucucccucuccaacggcgucuccguccucaccuucaagguccucgaccucaagaacuacaucgacaagcagcuccuccccauccucaacaagcaguccugcuccaucuccaacaucgagaccgucauggaguuccagcagaagaacaaccgccuccucgagaucacccgcgaguucuccgucaacgccggcgucaccacccccgucuccaccuacaugcucaccaacuccgagcuccucucccucaucaacgacaugcccaucaccaacgaccagaagaagcucauguccaacaacguccagaucguccgccagcaguccuacuccaucaugugcaucaucaaggaggagguccucgccuacgucguccagcucccccucuacggcgucaucgacacccccugcuggaagcuccacaccuccccccucugcaccaccaacaccaaggagggcuccaacaucugccucacccgcaccgaccgcggcugguacugcgacaacgccggcuccgucuccuucuucccccaggccgagaccugcaaggucugcuccaaccgcgucuucugcgacaccaugaacucccucacccuccccuccgaggucaaccucugcaacaucgacaucuucaaccccaaguacgacugcaagaucaugaccuccaagaccgacgucuccuccuccgucaucaccucccucggcgccaucgucuccugcuacggcaagaccaagugcaccgccuccaacaagaacaagggcaucaucaagaccuucuccaacggcugcgacuacgucuccaacaagggcgucgacaccgucuccgucggcaacacccucuacuacgucaacaagcaggagggcaagucccucuacgucaagggcgagcccaucaucaacuucuacgacccccucgucuuccccuccgacgaguucgacgccuccaucucccaggucaacgagaagaucaaccagucccucgccuucauccgcaaguccgacgagcuccuccacaacgucaacgucggcaaguccaccaccaacaucaugaucaccaccaucaucaucgucaucaucgucauccuccuccuccucaucgccgucggccucuuccucuacugcaaggcccgcugaggacuaguguccaccugucccuccugggcugcuggauugucucguuuuccugccaaauaaacaggaucagcgcuuuacagaucuaaaaaaaaaaaaaaaaaaaaaaaaaaaaaaaaaaaaaaaaaaaaaaaaaaaaaaaaaaaaaaaaugcaucccccccccccccccccccccccccccccccaaaggcucuuuucagagccaccagaauu

SEQ ID NO: 19077 - RNA, 1931 nt, Artificial Sequence
  mRNA product Design i-1 comprising derived and/or modified sequence from HRSV(Memphis-37)__AIY60640.1__F-del_DSCav1_mut7 (opt3)
gggagagggcgcuuggcuugcaaggacccugagcugcggcauugaagcacacccaacccaacucgacugaagucagccucacugaaccggaucugagaaucuucucucucugggcuugccagggcucuccgaaccuagcuagcauccucuucaauuccaacuagaaagcuuaccauggagcugcccauccucaagaccaacgccauuacaacuauacuugcugcagugacgcugugcuucgccagcucccagaauaucaccgaagaguuuuaccaaucuacauguucagcggucaguaaaggcuauuugagcgcuuuaagaacugggugguacaccuccguuauuacaaucgaacugucuaacauuaaggagaauaaaugcaacggaaccgacgccaaggugaaacuaaucaagcaggaacucgauaaguauaaaaaugcaguaacugagcugcagaugcuuauguguucgaccccugccgcugguucaggcagcgcaauagccagugggaucgcugugugcaagguccugcacuuggagggagaagugaacaaaauuaagaaugcccuccuguccacaaacaaagcgguugugucucugagcaauggcgucuccgugcucacguucaagguauuagaccugaagaacuacaucgauaaacagcuuuugccaauucugaauaagcaaucauguaguaucagcaacauagagacuguuauggaauuucagcagaaaaauaacaggcuacucgagauuacccgggaguucucugugaaugccggugucacaacuccgguguccaccuauaugcugacaaacucagaacuucugagcuugaucaacgacaugcccauuaccaaugaucagaagaaacucaugaguaacaaugugcaaaucguccgccagcagucuuacuccaucaugugcauuauaaaggaggaaguucuggcauaugugguacaguuaccucuguacggggugaucgacacgccauguuggaaacuccauacuagcccccuuugcacaaccaacacuaaggagggaucgaauauuugucugacacgaaccgaucguggcugguacugcgacaacgcuggcucugucuccuuuuucccucaagccgaaacguguaaggugugcucaaauagaguguuuugcgauaccaugaacaguuugacacuaccaagcgagguuaaucuguguaacaucgacauauucaaucccaaauaugauugcaagauuaugacuuccaaaaccgacgucucuagcucagugaucacaagucucggggcaaucguauccuguuacggaaagacuaaaugcaccgcuagcaacaagaauaaggguauuaucaaaacauuuucuaacggcugugauuauguuucaaauaaggggguggacaccgucagugugggaaacacucuguacuaugucaacaaacaggagggcaagagccuuuacgugaaaggugaaccuauuauaaauuucuaugacccacugguuuuuccguccgaugaguucgacgccucuaucagccaggugaacgaaaagauuaaucaaucguuggcguuuaucaggaaguccgaugagcuccugcacaacguaaaugucgggaaaucaacgacaaacaucaugauuaccacuauaaucauugugaucauuguuaucuuacugcuacucauagccgugggacuguuccuuuacugcaaggcacggugaggacuaguguccaccugucccuccugggcugcuggauugucucguuuuccugccaaauaaacaggaucagcgcuuuacagaucuaaaaaaaaaaaaaaaaaaaaaaaaaaaaaaaaaaaaaaaaaaaaaaaaaaaaaaaaaaaaaaaaugcaucccccccccccccccccccccccccccccccaaaggcucuuuucagagccaccagaauu

SEQ ID NO: 19078 - RNA, 1931 nt, Artificial Sequence
  mRNA product Design i-1 comprising derived and/or modified sequence from HRSV(Memphis-37)__AIY60640.1__F-del_DSCav1_mut7 (opt4)
gggagagggcgcuuggcuugcaaggacccugagcugcggcauugaagcacacccaacccaacucgacugaagucagccucacugaaccggaucugagaaucuucucucucugggcuugccagggcucuccgaaccuagcuagcauccucuucaauuccaacuagaaagcuuaccauggagcugcccauccugaagaccaacgccaucaccaccauccuggccgccgugacccugugcuucgccagcagccagaacaucaccgaggaguucuaccagagcaccugcagcgccgugagcaagggcuaccugagcgcccugagaaccggcugguacaccagcgugaucaccaucgagcugagcaacaucaaggagaacaagugcaacggcaccgacgccaaggugaagcugaucaagcaggagcuggacaaguacaagaacgccgugaccgagcugcagaugcugaugugcagcacccccgccgccggcagcggcagcgccaucgccagcggcaucgccgugugcaaggugcugcaccuggagggcgaggugaacaagaucaagaacgcccugcugagcaccaacaaggccguggugagccugagcaacggcgugagcgugcugaccuucaaggugcuggaccugaagaacuacaucgacaagcagcugcugcccauccugaacaagcagagcugcagcaucagcaacaucgagaccgugauggaguuccagcagaagaacaacagacugcuggagaucaccagagaguucagcgugaacgccggcgugaccacccccgugagcaccuacaugcugaccaacagcgagcugcugagccugaucaacgacaugcccaucaccaacgaccagaagaagcugaugagcaacaacgugcagaucgugagacagcagagcuacagcaucaugugcaucaucaaggaggaggugcuggccuacguggugcagcugccccuguacggcgugaucgacacccccugcuggaagcugcacaccagcccccugugcaccaccaacaccaaggagggcagcaacaucugccugaccagaaccgacagaggcugguacugcgacaacgccggcagcgugagcuucuucccccaggccgagaccugcaaggugugcagcaacagaguguucugcgacaccaugaacagccugacccugcccagcgaggugaaccugugcaacaucgacaucuucaaccccaaguacgacugcaagaucaugaccagcaagaccgacgugagcagcagcgugaucaccagccugggcgccaucgugagcugcuacggcaagaccaagugcaccgccagcaacaagaacaagggcaucaucaagaccuucagcaacggcugcgacuacgugagcaacaagggcguggacaccgugagcgugggcaacacccuguacuacgugaacaagcaggagggcaagagccuguacgugaagggcgagcccaucaucaacuucuacgacccccugguguuccccagcgacgaguucgacgccagcaucagccaggugaacgagaagaucaaccagagccuggccuucaucagaaagagcgacgagcugcugcacaacgugaacgugggcaagagcaccaccaacaucaugaucaccaccaucaucaucgugaucaucgugauccugcugcugcugaucgccgugggccuguuccuguacugcaaggccagaugaggacuaguguccaccugucccuccugggcugcuggauugucucguuuuccugccaaauaaacaggaucagcgcuuuacagaucuaaaaaaaaaaaaaaaaaaaaaaaaaaaaaaaaaaaaaaaaaaaaaaaaaaaaaaaaaaaaaaaaugcaucccccccccccccccccccccccccccccccaaaggcucuuuucagagccaccagaauu

SEQ ID NO: 19079 - RNA, 1931 nt, Artificial Sequence
  mRNA product Design i-1 comprising derived and/or modified sequence from HRSV(Memphis-37)__AIY60640.1__F-del_DSCav1_mut7 (opt5)
gggagagggcgcuuggcuugcaaggacccugagcugcggcauugaagcacacccaacccaacucgacugaagucagccucacugaaccggaucugagaaucuucucucucugggcuugccagggcucuccgaaccuagcuagcauccucuucaauuccaacuagaaagcuuaccauggagcugcccauccucaagaccaacgccauuacaacgauccuggcugccgugacccuuugcuucgcgagcucccagaauauuacagaagaguuuuaccaaucuaccuguagcgcugucuccaaaggcuaucugucugcccucagaacagggugguacaccagcguuaucacaauugaacuguccaacaucaaggagaauaaaugcaacggaaccgacgccaaggugaaacuuaucaagcaggaacuggauaaguauaaaaaugcugugacggagcuccagaugcugauguguucuaccccugccgcuggcagcggguccgccauugcgagcggaaucgccgucugcaaggugcugcaccucgagggcgaaguuaacaaaauuaagaaugcucugcuuucuacaaacaaagccguggucucccugagcaauggggugucuguucucaccuucaaggugcuggaccuuaagaacuacaucgauaaacagcugcucccgauucugaauaagcaauccuguagcaucucuaacauugagacagucauggaauuucagcagaaaaauaaccggcugcucgagaucacccgcgaguucuccgugaaugcuggagugacgacacccgucagcaccuauaugcugacaaacuccgaacuucugucucucaucaacgacaugccuauuaccaaugaucagaagaaacugaugagcaacaauguucaaaucgugagacagcaguccuacagcauuaugugcaucauuaaggaggaagugcuugccuaugucgugcagcugccccucuacggcguuaucgacaccccuuguuggaaacugcauacaucuccccugugcacgaccaacacaaaggagggcuccaauaucugucucacccggacagaucgcgggugguacugcgacaacgcgggaagcgugagcuuuuucccucaagccgaaaccuguaaggucugcucuaauagaguguuuugcgauacgaugaacucccugacacuuccgucugagguuaaucuguguaacauugacaucuucaaucccaaauaugauugcaagauuaugaccagcaaaaccgacguguccagcucugucaucacaucccucggcgcuauugugagcuguuacgggaagaccaaaugcacagccucuaacaagaauaagggaaucaucaaaacguuuuccaacggcugugauuaugucagcaauaaggggguggacaccguuuccgugggaaacacacuguacuaugucaacaaacaggagggcaagucucuuuacgugaaaggcgaaccuauuaucaauuucuaugacccccugguuuuuccuagcgaugaguucgacgcuuccauuucucaggugaacgaaaagaucaaucaaagccucgccuuuauucggaaguccgaugagcugcugcacaacgucaauguggggaaaagcaccacaaacaucaugauuaccacgaucaucauugugaucauuguuauccuccugcuucugauugccgucggacucuuccuguacugcaaggcucgcugaggacuaguguccaccugucccuccugggcugcuggauugucucguuuuccugccaaauaaacaggaucagcgcuuuacagaucuaaaaaaaaaaaaaaaaaaaaaaaaaaaaaaaaaaaaaaaaaaaaaaaaaaaaaaaaaaaaaaaaugcaucccccccccccccccccccccccccccccccaaaggcucuuuucagagccaccagaauu

SEQ ID NO: 19080 - RNA, 1931 nt, Artificial Sequence
  mRNA product Design i-1 comprising derived and/or modified sequence from HRSV(Memphis-37)__AIY60640.1__F-del_DSCav1_mut7 (opt6)
gggagagggcgcuuggcuugcaaggacccugagcugcggcauugaagcacacccaacccaacucgacugaagucagccucacugaaccggaucugagaaucuucucucucugggcuugccagggcucuccgaaccuagcuagcauccucuucaauuccaacuagaaagcuuaccauggaacuaccaauacucaaaacaaacgccauaaccacaauacuagccgcaguaacacuuugcuuugccucaagucaaaacauaacagaagaauuuuaccaauccacaugcucagcuguauccaaaggauauuuauccgcacuaagaacaggaugguacacaucaguaaucacaauagaauuaucaaacauaaaagaaaacaaauguaauggcacagacgccaaaguaaaacuaauuaaacaagaacuagacaaauauaaaaaugcaguaaccgaacuccaaaugcucaugugcucuacaccagcugcaggaucaggaucagccauugcaagcgguauagcuguuugcaaaguauuacacuuagaaggagaaguaaauaaaauaaaaaacgcacuacuaucaacaaauaaagcaguaguaucccuaucaaacggaguaucaguacuuacauucaaaguauuagauuuaaaaaacuauauagacaaacaacuacuucccauauuaaacaaacaaucaugcucaauuuccaacauugaaacuguaauggaauuucaacaaaaaaacaacagacuacuugaaaucacacgagaauuuucaguaaacgcuggaguaacaacaccugucucuaccuacaugcucacaaauagcgaauuacuaucucuaaucaaugacaugccaauaacaaacgaucaaaaaaaacuaauguccaacaacguacaaauaguaagacaacaauccuauucaauaaugugcauaauaaaagaagaagucuuagcauacguuguacaacuaccauuauacggaguaauagauacaccaugcuggaaacuccacacaagcccccucugcacaacaaacaccaaagaagggucaaacauaugcuuaacaagaacagacagaggaugguacugugauaacgcaggaucugucucauucuuuccacaagcagaaacauguaaaguaugcuccaacagagucuuuugcgacaccaugaacucacuaaccuuacccucagaaguaaaccugugcaacaucgauaucuucaaccccaaauacgauugcaaaaucaugacaagcaaaacugauguauccagcucuguaauaacaucacuaggugcaauaguaucaugcuacggaaaaacaaaaugcacagcuucuaacaaaaauaaaggaauaauaaaaacauucuccaauggaugcgacuaugucucaaauaaaggaguagauacaguuucagucggcaacacacucuauuauguaaauaaacaagaaggaaaaucauuauacguaaaaggagaacccauaauaaacuucuacgacccccucguauucccaagcgacgaauuugacgccucaauaucacaaguaaacgaaaaaauaaaccaaucacucgcauucaucagaaaaucagaugaacuacuacacaauguaaacgucggaaaauccaccacaaauauaaugauaacuaccaucauaauaguaauaauagucaucuuacuacuauuaaucgcuguaggacuauuucucuacugcaaggccagauaaggacuaguguccaccugucccuccugggcugcuggauugucucguuuuccugccaaauaaacaggaucagcgcuuuacagaucuaaaaaaaaaaaaaaaaaaaaaaaaaaaaaaaaaaaaaaaaaaaaaaaaaaaaaaaaaaaaaaaaugcaucccccccccccccccccccccccccccccccaaaggcucuuuucagagccaccagaauu

SEQ ID NO: 19081 - RNA, 1931 nt, Artificial Sequence
  mRNA product Design i-1 comprising derived and/or modified sequence from HRSV(Memphis-37)__AIY60640.1__F-del_DSCav1_mut7 (opt11)
gggagagggcgcuuggcuugcaaggacccugagcugcggcauugaagcacacccaacccaacucgacugaagucagccucacugaaccggaucugagaaucuucucucucugggcuugccagggcucuccgaaccuagcuagcauccucuucaauuccaacuagaaagcuuaccauggaacucccaauccucaaaacaaaugccaucaccaccauccuagccgcugucacacuaugcuucgccuccucacaaaacaucaccgaagaguucuaucaauccacaugcuccgccgucagcaagggauaccucuccgcccuuagaaccggcugguacaccucagucaucacaauugaacugucaaacaucaaagaaaacaaaugcaacggcaccgacgcaaaaguaaagcucaucaaacaagaacuggacaaguacaagaacgccgucaccgaacuacagaugcuuaugugcucaaccccugccgccggcuccggaucugccauagcuucaggcaucgccguaugcaaaguccugcaccuagaaggggaagucaacaaaaucaaaaacgcccuccucuccaccaacaaggccguugucucccugucaaacggagucuccguccuaaccuucaaaguccucgaccucaaaaacuacauagacaaacaacuccuacccauccucaacaaacaaagcugcucaauauccaacaucgaaaccgucauggaguuccaacaaaagaacaaccgacuacucgaaauaacacgcgaguucucagucaacgccggcgucaccaccccagucuccacauacaugcucaccaacuccgaacuccuaucgcucaucaacgacaugcccaucaccaaugaccagaagaaacucauguccaacaacguacaaaucguccgccaacaguccuacucaaucaugugcaucaucaaagaagaaguccuugccuacgucguccagcuuccacucuacggagucaucgacacccccugcuggaaacuccacaccuccccacuaugcaccaccaacaccaaagaaggauccaacauaugccucacccguacugaccgcggcugguacugcgacaacgccggauccgucucauucuucccccaggccgaaaccugcaaagucugcuccaaccgcgucuucugcgacaccaugaacucgcucacccucccauccgaagucaaucuaugcaacaucgacauuuucaaccccaaauacgacugcaaaauuaugacaucaaaaaccgacgucucauccucagucaucacuucccucggcgcaaucguaagcugcuacgggaaaacaaagugcaccgcuuccaacaaaaacaaaggcaucaucaaaaccuucucuaacggcugcgacuacgucuccaacaaaggagucgacaccguauccgucggcaacacccucuacuacgucaacaaacaggaaggaaaaucgcucuacgucaaaggagaaccaaucaucaacuucuacgacccccuagucuucccauccgacgaguucgacgccagcaucucacaagucaaugaaaagaucaaccagucacucgcauucauccguaagucagacgaacuccuacacaacgucaacgucggcaagucaacaaccaacauaaugaucaccaccauaaucaucgucauaauaguaauccuccuucuccuaaucgcagucggccucuuccucuacugcaaagcacgcuaaggacuaguguccaccugucccuccugggcugcuggauugucucguuuuccugccaaauaaacaggaucagcgcuuuacagaucuaaaaaaaaaaaaaaaaaaaaaaaaaaaaaaaaaaaaaaaaaaaaaaaaaaaaaaaaaaaaaaaaugcaucccccccccccccccccccccccccccccccaaaggcucuuuucagagccaccagaauu

SEQ ID NO: 19082 - RNA, 1931 nt, Artificial Sequence
  mRNA product Design i-2 comprising derived and/or modified sequence from HRSV(Memphis-37)__AIY60640.1__F-del_DSCav1_mut7 (opt1)
gggagaggcgcugccuacggagguggcagccaucuccuucucggcaucaagcuuaccauggagcugcccauccucaagaccaacgccaucaccacgauccuggccgcggugacccugugcuucgccagcucccagaacaucaccgaggaguucuaccagagcacgugcuccgccgucagcaagggcuaccucuccgcccugcgcaccgggugguacaccagcgugaucaccaucgagcuguccaacaucaaggagaacaagugcaacggcaccgacgccaaggugaagcucaucaagcaggagcuggacaaguacaagaacgcggucacggagcugcagaugcugaugugcagcaccccggccgccggcuccgggagcgcgaucgccuccggcaucgccgucugcaaggugcugcaccucgagggcgaggugaacaagaucaagaacgcccugcuguccaccaacaaggccgucgugagccucuccaacggggugagcguccugaccuucaaggugcuggaccucaagaacuacaucgacaagcagcugcugcccauccugaacaagcagagcugcuccaucagcaacaucgagaccgucauggaguuccagcagaagaacaaccgccuccuggagaucacgcgggaguucagcgugaacgcgggcgugaccacccccgucuccaccuacaugcugacgaacagcgagcuccugucccugaucaacgacaugccgaucaccaacgaccagaagaagcucaugagcaacaacgugcagaucgugcgccagcaguccuacagcaucaugugcaucaucaaggaggagguccuggccuacguggugcagcugccccucuacggggucaucgacacccccugcuggaagcugcacaccagcccccugugcacgaccaacaccaaggagggcuccaacaucugccucacccggacggaccgcgggugguacugcgacaacgccggcagcguguccuucuucccgcaggccgagaccugcaaggucugcagcaaccggguguucugcgacaccaugaacucccugacccugcccagcgaggugaaccucugcaacaucgacaucuucaaccccaaguacgacugcaagaucaugacguccaagaccgacgucagcuccagcgugaucaccucccugggcgccaucgugagcugcuacgggaagaccaagugcacggcgagcaacaagaacaagggcaucaucaagaccuucuccaacgggugcgacuacgucagcaacaagggcguggacaccguguccgucggcaacacccuguacuacgugaacaagcaggagggcaagagccucuacgugaagggggagcccaucaucaacuucuacgacccgcuggucuuccccuccgacgaguucgacgccagcaucucccaggugaacgagaagaucaaccagagccuggccuucauccggaaguccgacgagcuccugcacaacgugaacgucggcaagagcaccacgaacaucaugaucaccaccaucaucaucgugaucaucgugauccugcugcuccugaucgccgucgggcuguuccucuacugcaaggcccgcugaggacuagugcaucacauuuaaaagcaucucagccuaccaugagaauaagagaaagaaaaugaagaucaauagcuuauucaucucuuuuucuuuuucguugguguaaagccaacacccugucuaaaaaacauaaauuucuuuaaucauuuugccucuuuucucugugcuucaauuaauaaaaaauggaaagaaccuagaucuaaaaaaaaaaaaaaaaaaaaaaaaaaaaaaaaaaaaaaaaaaaaaaaaaaaaaaaaaaaaaaaaugcaucccccccccccccccccccccccccccccccaaaggcucuuuucagagccaccagaauu

SEQ ID NO: 19083 - RNA, 1931 nt, Artificial Sequence
  mRNA product Design i-2 comprising derived and/or modified sequence from HRSV(Memphis-37)__AIY60640.1__F-del_DSCav1_mut7 (opt1)
gggagaggcgcugccuacggagguggcagccaucuccuucucggcaucaagcuuaccauggagcugcccauccucaagaccaacgccaucaccacgauccuggccgcggugacccugugcuucgccagcucccagaacaucaccgaggaguucuaccagagcacgugcuccgccgucagcaagggguaccucuccgcccugcgcaccgggugguacaccagcgugaucaccaucgagcuguccaacaucaaggagaacaagugcaacggcaccgacgccaaggugaagcucaucaagcaggagcuggacaaguacaagaacgcggucacggagcugcagaugcucaugugcagcaccccggccgccggguccggcagcgccaucgcguccgggaucgccgugugcaaggugcugcaccuggagggcgaggucaacaagaucaagaacgcccuccugagcaccaacaaggccguggugucccugagcaacggcgucuccgugcucaccuucaaggugcuggaccugaagaacuacaucgacaagcagcuccugcccauccugaacaagcagagcugcuccaucagcaacaucgagacggucauggaguuccagcagaagaacaaccggcuccuggagaucacccgcgaguucuccgugaacgccggggugaccacccccgucagcacguacaugcugaccaacagcgagcuccugucccugaucaacgacaugcccaucaccaacgaccagaagaagcucaugagcaacaacgugcagaucgugcggcagcaguccuacagcaucaugugcaucaucaaggaggagguccuggcguacguggugcagcugccgcucuacggcgucaucgacacccccugcuggaagcugcacacgagcccccugugcaccaccaacaccaaggaggggagcaacaucugccucacgcgcaccgaccggggcugguacugcgacaacgccggguccgugagcuucuucccccaggccgagaccugcaaggugugcuccaaccgcgucuucugcgacaccaugaacagccugacgcugccguccgaggugaaccucugcaacaucgacaucuucaaccccaaguacgacugcaagaucaugaccagcaagaccgacgucuccagcuccgugaucaccagccugggcgccaucguguccugcuacggcaagacgaagugcaccgccagcaacaagaacaaggggaucaucaagaccuucuccaacggcugcgacuacgucagcaacaaggggguggacaccgugagcgucggcaacacgcuguacuacgugaacaagcaggagggcaagucccucuacgugaagggggagcccaucaucaacuucuacgacccccuggucuucccgagcgacgaguucgacgcguccaucagccaggugaacgagaagaucaaccagucccuggccuucauccggaaguccgacgagcuccugcacaacgugaacgucggcaaguccaccaccaacaucaugaucaccaccaucaucaucgugaucaucgugauccugcuccugcugaucgccgucggccucuuccuguacugcaaggcccgcugaggacuagugcaucacauuuaaaagcaucucagccuaccaugagaauaagagaaagaaaaugaagaucaauagcuuauucaucucuuuuucuuuuucguugguguaaagccaacacccugucuaaaaaacauaaauuucuuuaaucauuuugccucuuuucucugugcuucaauuaauaaaaaauggaaagaaccuagaucuaaaaaaaaaaaaaaaaaaaaaaaaaaaaaaaaaaaaaaaaaaaaaaaaaaaaaaaaaaaaaaaaugcaucccccccccccccccccccccccccccccccaaaggcucuuuucagagccaccagaauu

SEQ ID NO: 19084 - RNA, 1931 nt, Artificial Sequence
  mRNA product Design i-2 comprising derived and/or modified sequence from HRSV(Memphis-37)__AIY60640.1__F-del_DSCav1_mut7 (opt2)
gggagaggcgcugccuacggagguggcagccaucuccuucucggcaucaagcuuaccauggagcuccccauccucaagaccaacgccaucaccaccauccucgccgccgucacccucugcuucgccuccucccagaacaucaccgaggaguucuaccaguccaccugcuccgccgucuccaagggcuaccucuccgcccuccgcaccggcugguacaccuccgucaucaccaucgagcucuccaacaucaaggagaacaagugcaacggcaccgacgccaaggucaagcucaucaagcaggagcucgacaaguacaagaacgccgucaccgagcuccagaugcucaugugcuccacccccgccgccggcuccggcuccgccaucgccuccggcaucgccgucugcaagguccuccaccucgagggcgaggucaacaagaucaagaacgcccuccucuccaccaacaaggccgucgucucccucuccaacggcgucuccguccucaccuucaagguccucgaccucaagaacuacaucgacaagcagcuccuccccauccucaacaagcaguccugcuccaucuccaacaucgagaccgucauggaguuccagcagaagaacaaccgccuccucgagaucacccgcgaguucuccgucaacgccggcgucaccacccccgucuccaccuacaugcucaccaacuccgagcuccucucccucaucaacgacaugcccaucaccaacgaccagaagaagcucauguccaacaacguccagaucguccgccagcaguccuacuccaucaugugcaucaucaaggaggagguccucgccuacgucguccagcucccccucuacggcgucaucgacacccccugcuggaagcuccacaccuccccccucugcaccaccaacaccaaggagggcuccaacaucugccucacccgcaccgaccgcggcugguacugcgacaacgccggcuccgucuccuucuucccccaggccgagaccugcaaggucugcuccaaccgcgucuucugcgacaccaugaacucccucacccuccccuccgaggucaaccucugcaacaucgacaucuucaaccccaaguacgacugcaagaucaugaccuccaagaccgacgucuccuccuccgucaucaccucccucggcgccaucgucuccugcuacggcaagaccaagugcaccgccuccaacaagaacaagggcaucaucaagaccuucuccaacggcugcgacuacgucuccaacaagggcgucgacaccgucuccgucggcaacacccucuacuacgucaacaagcaggagggcaagucccucuacgucaagggcgagcccaucaucaacuucuacgacccccucgucuuccccuccgacgaguucgacgccuccaucucccaggucaacgagaagaucaaccagucccucgccuucauccgcaaguccgacgagcuccuccacaacgucaacgucggcaaguccaccaccaacaucaugaucaccaccaucaucaucgucaucaucgucauccuccuccuccucaucgccgucggccucuuccucuacugcaaggcccgcugaggacuagugcaucacauuuaaaagcaucucagccuaccaugagaauaagagaaagaaaaugaagaucaauagcuuauucaucucuuuuucuuuuucguugguguaaagccaacacccugucuaaaaaacauaaauuucuuuaaucauuuugccucuuuucucugugcuucaauuaauaaaaaauggaaagaaccuagaucuaaaaaaaaaaaaaaaaaaaaaaaaaaaaaaaaaaaaaaaaaaaaaaaaaaaaaaaaaaaaaaaaugcaucccccccccccccccccccccccccccccccaaaggcucuuuucagagccaccagaauu

SEQ ID NO: 19085 - RNA, 1931 nt, Artificial Sequence
  mRNA product Design i-2 comprising derived and/or modified sequence from HRSV(Memphis-37)__AIY60640.1__F-del_DSCav1_mut7 (opt3)
gggagaggcgcugccuacggagguggcagccaucuccuucucggcaucaagcuuaccauggagcugcccauccucaagaccaacgccauuacaacuauacuugcugcagugacgcugugcuucgccagcucccagaauaucaccgaagaguuuuaccaaucuacauguucagcggucaguaaaggcuauuugagcgcuuuaagaacugggugguacaccuccguuauuacaaucgaacugucuaacauuaaggagaauaaaugcaacggaaccgacgccaaggugaaacuaaucaagcaggaacucgauaaguauaaaaaugcaguaacugagcugcagaugcuuauguguucgaccccugccgcugguucaggcagcgcaauagccagugggaucgcugugugcaagguccugcacuuggagggagaagugaacaaaauuaagaaugcccuccuguccacaaacaaagcgguugugucucugagcaauggcgucuccgugcucacguucaagguauuagaccugaagaacuacaucgauaaacagcuuuugccaauucugaauaagcaaucauguaguaucagcaacauagagacuguuauggaauuucagcagaaaaauaacaggcuacucgagauuacccgggaguucucugugaaugccggugucacaacuccgguguccaccuauaugcugacaaacucagaacuucugagcuugaucaacgacaugcccauuaccaaugaucagaagaaacucaugaguaacaaugugcaaaucguccgccagcagucuuacuccaucaugugcauuauaaaggaggaaguucuggcauaugugguacaguuaccucuguacggggugaucgacacgccauguuggaaacuccauacuagcccccuuugcacaaccaacacuaaggagggaucgaauauuugucugacacgaaccgaucguggcugguacugcgacaacgcuggcucugucuccuuuuucccucaagccgaaacguguaaggugugcucaaauagaguguuuugcgauaccaugaacaguuugacacuaccaagcgagguuaaucuguguaacaucgacauauucaaucccaaauaugauugcaagauuaugacuuccaaaaccgacgucucuagcucagugaucacaagucucggggcaaucguauccuguuacggaaagacuaaaugcaccgcuagcaacaagaauaaggguauuaucaaaacauuuucuaacggcugugauuauguuucaaauaaggggguggacaccgucagugugggaaacacucuguacuaugucaacaaacaggagggcaagagccuuuacgugaaaggugaaccuauuauaaauuucuaugacccacugguuuuuccguccgaugaguucgacgccucuaucagccaggugaacgaaaagauuaaucaaucguuggcguuuaucaggaaguccgaugagcuccugcacaacguaaaugucgggaaaucaacgacaaacaucaugauuaccacuauaaucauugugaucauuguuaucuuacugcuacucauagccgugggacuguuccuuuacugcaaggcacggugaggacuagugcaucacauuuaaaagcaucucagccuaccaugagaauaagagaaagaaaaugaagaucaauagcuuauucaucucuuuuucuuuuucguugguguaaagccaacacccugucuaaaaaacauaaauuucuuuaaucauuuugccucuuuucucugugcuucaauuaauaaaaaauggaaagaaccuagaucuaaaaaaaaaaaaaaaaaaaaaaaaaaaaaaaaaaaaaaaaaaaaaaaaaaaaaaaaaaaaaaaaugcaucccccccccccccccccccccccccccccccaaaggcucuuuucagagccaccagaauu

SEQ ID NO: 19086 - RNA, 1931 nt, Artificial Sequence
  mRNA product Design i-2 comprising derived and/or modified sequence from HRSV(Memphis-37)__AIY60640.1__F-del_DSCav1_mut7 (opt4)
gggagaggcgcugccuacggagguggcagccaucuccuucucggcaucaagcuuaccauggagcugcccauccugaagaccaacgccaucaccaccauccuggccgccgugacccugugcuucgccagcagccagaacaucaccgaggaguucuaccagagcaccugcagcgccgugagcaagggcuaccugagcgcccugagaaccggcugguacaccagcgugaucaccaucgagcugagcaacaucaaggagaacaagugcaacggcaccgacgccaaggugaagcugaucaagcaggagcuggacaaguacaagaacgccgugaccgagcugcagaugcugaugugcagcacccccgccgccggcagcggcagcgccaucgccagcggcaucgccgugugcaaggugcugcaccuggagggcgaggugaacaagaucaagaacgcccugcugagcaccaacaaggccguggugagccugagcaacggcgugagcgugcugaccuucaaggugcuggaccugaagaacuacaucgacaagcagcugcugcccauccugaacaagcagagcugcagcaucagcaacaucgagaccgugauggaguuccagcagaagaacaacagacugcuggagaucaccagagaguucagcgugaacgccggcgugaccacccccgugagcaccuacaugcugaccaacagcgagcugcugagccugaucaacgacaugcccaucaccaacgaccagaagaagcugaugagcaacaacgugcagaucgugagacagcagagcuacagcaucaugugcaucaucaaggaggaggugcuggccuacguggugcagcugccccuguacggcgugaucgacacccccugcuggaagcugcacaccagcccccugugcaccaccaacaccaaggagggcagcaacaucugccugaccagaaccgacagaggcugguacugcgacaacgccggcagcgugagcuucuucccccaggccgagaccugcaaggugugcagcaacagaguguucugcgacaccaugaacagccugacccugcccagcgaggugaaccugugcaacaucgacaucuucaaccccaaguacgacugcaagaucaugaccagcaagaccgacgugagcagcagcgugaucaccagccugggcgccaucgugagcugcuacggcaagaccaagugcaccgccagcaacaagaacaagggcaucaucaagaccuucagcaacggcugcgacuacgugagcaacaagggcguggacaccgugagcgugggcaacacccuguacuacgugaacaagcaggagggcaagagccuguacgugaagggcgagcccaucaucaacuucuacgacccccugguguuccccagcgacgaguucgacgccagcaucagccaggugaacgagaagaucaaccagagccuggccuucaucagaaagagcgacgagcugcugcacaacgugaacgugggcaagagcaccaccaacaucaugaucaccaccaucaucaucgugaucaucgugauccugcugcugcugaucgccgugggccuguuccuguacugcaaggccagaugaggacuagugcaucacauuuaaaagcaucucagccuaccaugagaauaagagaaagaaaaugaagaucaauagcuuauucaucucuuuuucuuuuucguugguguaaagccaacacccugucuaaaaaacauaaauuucuuuaaucauuuugccucuuuucucugugcuucaauuaauaaaaaauggaaagaaccuagaucuaaaaaaaaaaaaaaaaaaaaaaaaaaaaaaaaaaaaaaaaaaaaaaaaaaaaaaaaaaaaaaaaugcaucccccccccccccccccccccccccccccccaaaggcucuuuucagagccaccagaauu

SEQ ID NO: 19087 - RNA, 1931 nt, Artificial Sequence
  mRNA product Design i-2 comprising derived and/or modified sequence from HRSV(Memphis-37)__AIY60640.1__F-del_DSCav1_mut7 (opt5)
gggagaggcgcugccuacggagguggcagccaucuccuucucggcaucaagcuuaccauggagcugcccauccucaagaccaacgccauuacaacgauccuggcugccgugacccuuugcuucgcgagcucccagaauauuacagaagaguuuuaccaaucuaccuguagcgcugucuccaaaggcuaucugucugcccucagaacagggugguacaccagcguuaucacaauugaacuguccaacaucaaggagaauaaaugcaacggaaccgacgccaaggugaaacuuaucaagcaggaacuggauaaguauaaaaaugcugugacggagcuccagaugcugauguguucuaccccugccgcuggcagcggguccgccauugcgagcggaaucgccgucugcaaggugcugcaccucgagggcgaaguuaacaaaauuaagaaugcucugcuuucuacaaacaaagccguggucucccugagcaauggggugucuguucucaccuucaaggugcuggaccuuaagaacuacaucgauaaacagcugcucccgauucugaauaagcaauccuguagcaucucuaacauugagacagucauggaauuucagcagaaaaauaaccggcugcucgagaucacccgcgaguucuccgugaaugcuggagugacgacacccgucagcaccuauaugcugacaaacuccgaacuucugucucucaucaacgacaugccuauuaccaaugaucagaagaaacugaugagcaacaauguucaaaucgugagacagcaguccuacagcauuaugugcaucauuaaggaggaagugcuugccuaugucgugcagcugccccucuacggcguuaucgacaccccuuguuggaaacugcauacaucuccccugugcacgaccaacacaaaggagggcuccaauaucugucucacccggacagaucgcgggugguacugcgacaacgcgggaagcgugagcuuuuucccucaagccgaaaccuguaaggucugcucuaauagaguguuuugcgauacgaugaacucccugacacuuccgucugagguuaaucuguguaacauugacaucuucaaucccaaauaugauugcaagauuaugaccagcaaaaccgacguguccagcucugucaucacaucccucggcgcuauugugagcuguuacgggaagaccaaaugcacagccucuaacaagaauaagggaaucaucaaaacguuuuccaacggcugugauuaugucagcaauaaggggguggacaccguuuccgugggaaacacacuguacuaugucaacaaacaggagggcaagucucuuuacgugaaaggcgaaccuauuaucaauuucuaugacccccugguuuuuccuagcgaugaguucgacgcuuccauuucucaggugaacgaaaagaucaaucaaagccucgccuuuauucggaaguccgaugagcugcugcacaacgucaauguggggaaaagcaccacaaacaucaugauuaccacgaucaucauugugaucauuguuauccuccugcuucugauugccgucggacucuuccuguacugcaaggcucgcugaggacuagugcaucacauuuaaaagcaucucagccuaccaugagaauaagagaaagaaaaugaagaucaauagcuuauucaucucuuuuucuuuuucguugguguaaagccaacacccugucuaaaaaacauaaauuucuuuaaucauuuugccucuuuucucugugcuucaauuaauaaaaaauggaaagaaccuagaucuaaaaaaaaaaaaaaaaaaaaaaaaaaaaaaaaaaaaaaaaaaaaaaaaaaaaaaaaaaaaaaaaugcaucccccccccccccccccccccccccccccccaaaggcucuuuucagagccaccagaauu

SEQ ID NO: 19088 - RNA, 1931 nt, Artificial Sequence
  mRNA product Design i-2 comprising derived and/or modified sequence from HRSV(Memphis-37)__AIY60640.1__F-del_DSCav1_mut7 (opt6)
gggagaggcgcugccuacggagguggcagccaucuccuucucggcaucaagcuuaccauggaacuaccaauacucaaaacaaacgccauaaccacaauacuagccgcaguaacacuuugcuuugccucaagucaaaacauaacagaagaauuuuaccaauccacaugcucagcuguauccaaaggauauuuauccgcacuaagaacaggaugguacacaucaguaaucacaauagaauuaucaaacauaaaagaaaacaaauguaauggcacagacgccaaaguaaaacuaauuaaacaagaacuagacaaauauaaaaaugcaguaaccgaacuccaaaugcucaugugcucuacaccagcugcaggaucaggaucagccauugcaagcgguauagcuguuugcaaaguauuacacuuagaaggagaaguaaauaaaauaaaaaacgcacuacuaucaacaaauaaagcaguaguaucccuaucaaacggaguaucaguacuuacauucaaaguauuagauuuaaaaaacuauauagacaaacaacuacuucccauauuaaacaaacaaucaugcucaauuuccaacauugaaacuguaauggaauuucaacaaaaaaacaacagacuacuugaaaucacacgagaauuuucaguaaacgcuggaguaacaacaccugucucuaccuacaugcucacaaauagcgaauuacuaucucuaaucaaugacaugccaauaacaaacgaucaaaaaaaacuaauguccaacaacguacaaauaguaagacaacaauccuauucaauaaugugcauaauaaaagaagaagucuuagcauacguuguacaacuaccauuauacggaguaauagauacaccaugcuggaaacuccacacaagcccccucugcacaacaaacaccaaagaagggucaaacauaugcuuaacaagaacagacagaggaugguacugugauaacgcaggaucugucucauucuuuccacaagcagaaacauguaaaguaugcuccaacagagucuuuugcgacaccaugaacucacuaaccuuacccucagaaguaaaccugugcaacaucgauaucuucaaccccaaauacgauugcaaaaucaugacaagcaaaacugauguauccagcucuguaauaacaucacuaggugcaauaguaucaugcuacggaaaaacaaaaugcacagcuucuaacaaaaauaaaggaauaauaaaaacauucuccaauggaugcgacuaugucucaaauaaaggaguagauacaguuucagucggcaacacacucuauuauguaaauaaacaagaaggaaaaucauuauacguaaaaggagaacccauaauaaacuucuacgacccccucguauucccaagcgacgaauuugacgccucaauaucacaaguaaacgaaaaaauaaaccaaucacucgcauucaucagaaaaucagaugaacuacuacacaauguaaacgucggaaaauccaccacaaauauaaugauaacuaccaucauaauaguaauaauagucaucuuacuacuauuaaucgcuguaggacuauuucucuacugcaaggccagauaaggacuagugcaucacauuuaaaagcaucucagccuaccaugagaauaagagaaagaaaaugaagaucaauagcuuauucaucucuuuuucuuuuucguugguguaaagccaacacccugucuaaaaaacauaaauuucuuuaaucauuuugccucuuuucucugugcuucaauuaauaaaaaauggaaagaaccuagaucuaaaaaaaaaaaaaaaaaaaaaaaaaaaaaaaaaaaaaaaaaaaaaaaaaaaaaaaaaaaaaaaaugcaucccccccccccccccccccccccccccccccaaaggcucuuuucagagccaccagaauu

SEQ ID NO: 19089 - RNA, 1931 nt, Artificial Sequence
  mRNA product Design i-2 comprising derived and/or modified sequence from HRSV(Memphis-37)__AIY60640.1__F-del_DSCav1_mut7 (opt11)
gggagaggcgcugccuacggagguggcagccaucuccuucucggcaucaagcuuaccauggaacucccaauccucaaaacaaaugccaucaccaccauccuagccgcugucacacuaugcuucgccuccucacaaaacaucaccgaagaguucuaucaauccacaugcuccgccgucagcaagggauaccucuccgcccuuagaaccggcugguacaccucagucaucacaauugaacugucaaacaucaaagaaaacaaaugcaacggcaccgacgcaaaaguaaagcucaucaaacaagaacuggacaaguacaagaacgccgucaccgaacuacagaugcuuaugugcucaaccccugccgccggcuccggaucugccauagcuucaggcaucgccguaugcaaaguccugcaccuagaaggggaagucaacaaaaucaaaaacgcccuccucuccaccaacaaggccguugucucccugucaaacggagucuccguccuaaccuucaaaguccucgaccucaaaaacuacauagacaaacaacuccuacccauccucaacaaacaaagcugcucaauauccaacaucgaaaccgucauggaguuccaacaaaagaacaaccgacuacucgaaauaacacgcgaguucucagucaacgccggcgucaccaccccagucuccacauacaugcucaccaacuccgaacuccuaucgcucaucaacgacaugcccaucaccaaugaccagaagaaacucauguccaacaacguacaaaucguccgccaacaguccuacucaaucaugugcaucaucaaagaagaaguccuugccuacgucguccagcuuccacucuacggagucaucgacacccccugcuggaaacuccacaccuccccacuaugcaccaccaacaccaaagaaggauccaacauaugccucacccguacugaccgcggcugguacugcgacaacgccggauccgucucauucuucccccaggccgaaaccugcaaagucugcuccaaccgcgucuucugcgacaccaugaacucgcucacccucccauccgaagucaaucuaugcaacaucgacauuuucaaccccaaauacgacugcaaaauuaugacaucaaaaaccgacgucucauccucagucaucacuucccucggcgcaaucguaagcugcuacgggaaaacaaagugcaccgcuuccaacaaaaacaaaggcaucaucaaaaccuucucuaacggcugcgacuacgucuccaacaaaggagucgacaccguauccgucggcaacacccucuacuacgucaacaaacaggaaggaaaaucgcucuacgucaaaggagaaccaaucaucaacuucuacgacccccuagucuucccauccgacgaguucgacgccagcaucucacaagucaaugaaaagaucaaccagucacucgcauucauccguaagucagacgaacuccuacacaacgucaacgucggcaagucaacaaccaacauaaugaucaccaccauaaucaucgucauaauaguaauccuccuucuccuaaucgcagucggccucuuccucuacugcaaagcacgcuaaggacuagugcaucacauuuaaaagcaucucagccuaccaugagaauaagagaaagaaaaugaagaucaauagcuuauucaucucuuuuucuuuuucguugguguaaagccaacacccugucuaaaaaacauaaauuucuuuaaucauuuugccucuuuucucugugcuucaauuaauaaaaaauggaaagaaccuagaucuaaaaaaaaaaaaaaaaaaaaaaaaaaaaaaaaaaaaaaaaaaaaaaaaaaaaaaaaaaaaaaaaugcaucccccccccccccccccccccccccccccccaaaggcucuuuucagagccaccagaauu

SEQ ID NO: 19090 - RNA, 1927 nt, Artificial Sequence
  mRNA product Design i-2 comprising derived and/or modified sequence from HRSV(Memphis-37)__AIY60640.1__F-del_DSCav1_mut7 (opt1)
ggggcgcugccuacggagguggcagccaucuccuucucggcaucaagcuuaccauggagcugcccauccucaagaccaacgccaucaccacgauccuggccgcggugacccugugcuucgccagcucccagaacaucaccgaggaguucuaccagagcacgugcuccgccgucagcaagggcuaccucuccgcccugcgcaccgggugguacaccagcgugaucaccaucgagcuguccaacaucaaggagaacaagugcaacggcaccgacgccaaggugaagcucaucaagcaggagcuggacaaguacaagaacgcggucacggagcugcagaugcugaugugcagcaccccggccgccggcuccgggagcgcgaucgccuccggcaucgccgucugcaaggugcugcaccucgagggcgaggugaacaagaucaagaacgcccugcuguccaccaacaaggccgucgugagccucuccaacggggugagcguccugaccuucaaggugcuggaccucaagaacuacaucgacaagcagcugcugcccauccugaacaagcagagcugcuccaucagcaacaucgagaccgucauggaguuccagcagaagaacaaccgccuccuggagaucacgcgggaguucagcgugaacgcgggcgugaccacccccgucuccaccuacaugcugacgaacagcgagcuccugucccugaucaacgacaugccgaucaccaacgaccagaagaagcucaugagcaacaacgugcagaucgugcgccagcaguccuacagcaucaugugcaucaucaaggaggagguccuggccuacguggugcagcugccccucuacggggucaucgacacccccugcuggaagcugcacaccagcccccugugcacgaccaacaccaaggagggcuccaacaucugccucacccggacggaccgcgggugguacugcgacaacgccggcagcguguccuucuucccgcaggccgagaccugcaaggucugcagcaaccggguguucugcgacaccaugaacucccugacccugcccagcgaggugaaccucugcaacaucgacaucuucaaccccaaguacgacugcaagaucaugacguccaagaccgacgucagcuccagcgugaucaccucccugggcgccaucgugagcugcuacgggaagaccaagugcacggcgagcaacaagaacaagggcaucaucaagaccuucuccaacgggugcgacuacgucagcaacaagggcguggacaccguguccgucggcaacacccuguacuacgugaacaagcaggagggcaagagccucuacgugaagggggagcccaucaucaacuucuacgacccgcuggucuuccccuccgacgaguucgacgccagcaucucccaggugaacgagaagaucaaccagagccuggccuucauccggaaguccgacgagcuccugcacaacgugaacgucggcaagagcaccacgaacaucaugaucaccaccaucaucaucgugaucaucgugauccugcugcuccugaucgccgucgggcuguuccucuacugcaaggcccgcugaggacuagugcaucacauuuaaaagcaucucagccuaccaugagaauaagagaaagaaaaugaagaucaauagcuuauucaucucuuuuucuuuuucguugguguaaagccaacacccugucuaaaaaacauaaauuucuuuaaucauuuugccucuuuucucugugcuucaauuaauaaaaaauggaaagaaccuagaucuaaaaaaaaaaaaaaaaaaaaaaaaaaaaaaaaaaaaaaaaaaaaaaaaaaaaaaaaaaaaaaaaugcaucccccccccccccccccccccccccccccccaaaggcucuuuucagagccaccagaauu

SEQ ID NO: 19091 - RNA, 1927 nt, Artificial Sequence
  mRNA product Design i-2 comprising derived and/or modified sequence from HRSV(Memphis-37)__AIY60640.1__F-del_DSCav1_mut7 (opt1)
ggggcgcugccuacggagguggcagccaucuccuucucggcaucaagcuuaccauggagcugcccauccucaagaccaacgccaucaccacgauccuggccgcggugacccugugcuucgccagcucccagaacaucaccgaggaguucuaccagagcacgugcuccgccgucagcaagggguaccucuccgcccugcgcaccgggugguacaccagcgugaucaccaucgagcuguccaacaucaaggagaacaagugcaacggcaccgacgccaaggugaagcucaucaagcaggagcuggacaaguacaagaacgcggucacggagcugcagaugcucaugugcagcaccccggccgccggguccggcagcgccaucgcguccgggaucgccgugugcaaggugcugcaccuggagggcgaggucaacaagaucaagaacgcccuccugagcaccaacaaggccguggugucccugagcaacggcgucuccgugcucaccuucaaggugcuggaccugaagaacuacaucgacaagcagcuccugcccauccugaacaagcagagcugcuccaucagcaacaucgagacggucauggaguuccagcagaagaacaaccggcuccuggagaucacccgcgaguucuccgugaacgccggggugaccacccccgucagcacguacaugcugaccaacagcgagcuccugucccugaucaacgacaugcccaucaccaacgaccagaagaagcucaugagcaacaacgugcagaucgugcggcagcaguccuacagcaucaugugcaucaucaaggaggagguccuggcguacguggugcagcugccgcucuacggcgucaucgacacccccugcuggaagcugcacacgagcccccugugcaccaccaacaccaaggaggggagcaacaucugccucacgcgcaccgaccggggcugguacugcgacaacgccggguccgugagcuucuucccccaggccgagaccugcaaggugugcuccaaccgcgucuucugcgacaccaugaacagccugacgcugccguccgaggugaaccucugcaacaucgacaucuucaaccccaaguacgacugcaagaucaugaccagcaagaccgacgucuccagcuccgugaucaccagccugggcgccaucguguccugcuacggcaagacgaagugcaccgccagcaacaagaacaaggggaucaucaagaccuucuccaacggcugcgacuacgucagcaacaaggggguggacaccgugagcgucggcaacacgcuguacuacgugaacaagcaggagggcaagucccucuacgugaagggggagcccaucaucaacuucuacgacccccuggucuucccgagcgacgaguucgacgcguccaucagccaggugaacgagaagaucaaccagucccuggccuucauccggaaguccgacgagcuccugcacaacgugaacgucggcaaguccaccaccaacaucaugaucaccaccaucaucaucgugaucaucgugauccugcuccugcugaucgccgucggccucuuccuguacugcaaggcccgcugaggacuagugcaucacauuuaaaagcaucucagccuaccaugagaauaagagaaagaaaaugaagaucaauagcuuauucaucucuuuuucuuuuucguugguguaaagccaacacccugucuaaaaaacauaaauuucuuuaaucauuuugccucuuuucucugugcuucaauuaauaaaaaauggaaagaaccuagaucuaaaaaaaaaaaaaaaaaaaaaaaaaaaaaaaaaaaaaaaaaaaaaaaaaaaaaaaaaaaaaaaaugcaucccccccccccccccccccccccccccccccaaaggcucuuuucagagccaccagaauu

SEQ ID NO: 19092 - RNA, 1927 nt, Artificial Sequence
  mRNA product Design i-2 comprising derived and/or modified sequence from HRSV(Memphis-37)__AIY60640.1__F-del_DSCav1_mut7 (opt2)
ggggcgcugccuacggagguggcagccaucuccuucucggcaucaagcuuaccauggagcuccccauccucaagaccaacgccaucaccaccauccucgccgccgucacccucugcuucgccuccucccagaacaucaccgaggaguucuaccaguccaccugcuccgccgucuccaagggcuaccucuccgcccuccgcaccggcugguacaccuccgucaucaccaucgagcucuccaacaucaaggagaacaagugcaacggcaccgacgccaaggucaagcucaucaagcaggagcucgacaaguacaagaacgccgucaccgagcuccagaugcucaugugcuccacccccgccgccggcuccggcuccgccaucgccuccggcaucgccgucugcaagguccuccaccucgagggcgaggucaacaagaucaagaacgcccuccucuccaccaacaaggccgucgucucccucuccaacggcgucuccguccucaccuucaagguccucgaccucaagaacuacaucgacaagcagcuccuccccauccucaacaagcaguccugcuccaucuccaacaucgagaccgucauggaguuccagcagaagaacaaccgccuccucgagaucacccgcgaguucuccgucaacgccggcgucaccacccccgucuccaccuacaugcucaccaacuccgagcuccucucccucaucaacgacaugcccaucaccaacgaccagaagaagcucauguccaacaacguccagaucguccgccagcaguccuacuccaucaugugcaucaucaaggaggagguccucgccuacgucguccagcucccccucuacggcgucaucgacacccccugcuggaagcuccacaccuccccccucugcaccaccaacaccaaggagggcuccaacaucugccucacccgcaccgaccgcggcugguacugcgacaacgccggcuccgucuccuucuucccccaggccgagaccugcaaggucugcuccaaccgcgucuucugcgacaccaugaacucccucacccuccccuccgaggucaaccucugcaacaucgacaucuucaaccccaaguacgacugcaagaucaugaccuccaagaccgacgucuccuccuccgucaucaccucccucggcgccaucgucuccugcuacggcaagaccaagugcaccgccuccaacaagaacaagggcaucaucaagaccuucuccaacggcugcgacuacgucuccaacaagggcgucgacaccgucuccgucggcaacacccucuacuacgucaacaagcaggagggcaagucccucuacgucaagggcgagcccaucaucaacuucuacgacccccucgucuuccccuccgacgaguucgacgccuccaucucccaggucaacgagaagaucaaccagucccucgccuucauccgcaaguccgacgagcuccuccacaacgucaacgucggcaaguccaccaccaacaucaugaucaccaccaucaucaucgucaucaucgucauccuccuccuccucaucgccgucggccucuuccucuacugcaaggcccgcugaggacuagugcaucacauuuaaaagcaucucagccuaccaugagaauaagagaaagaaaaugaagaucaauagcuuauucaucucuuuuucuuuuucguugguguaaagccaacacccugucuaaaaaacauaaauuucuuuaaucauuuugccucuuuucucugugcuucaauuaauaaaaaauggaaagaaccuagaucuaaaaaaaaaaaaaaaaaaaaaaaaaaaaaaaaaaaaaaaaaaaaaaaaaaaaaaaaaaaaaaaaugcaucccccccccccccccccccccccccccccccaaaggcucuuuucagagccaccagaauu

SEQ ID NO: 19093 - RNA, 1927 nt, Artificial Sequence
  mRNA product Design i-2 comprising derived and/or modified sequence from HRSV(Memphis-37)__AIY60640.1__F-del_DSCav1_mut7 (opt3)
ggggcgcugccuacggagguggcagccaucuccuucucggcaucaagcuuaccauggagcugcccauccucaagaccaacgccauuacaacuauacuugcugcagugacgcugugcuucgccagcucccagaauaucaccgaagaguuuuaccaaucuacauguucagcggucaguaaaggcuauuugagcgcuuuaagaacugggugguacaccuccguuauuacaaucgaacugucuaacauuaaggagaauaaaugcaacggaaccgacgccaaggugaaacuaaucaagcaggaacucgauaaguauaaaaaugcaguaacugagcugcagaugcuuauguguucgaccccugccgcugguucaggcagcgcaauagccagugggaucgcugugugcaagguccugcacuuggagggagaagugaacaaaauuaagaaugcccuccuguccacaaacaaagcgguugugucucugagcaauggcgucuccgugcucacguucaagguauuagaccugaagaacuacaucgauaaacagcuuuugccaauucugaauaagcaaucauguaguaucagcaacauagagacuguuauggaauuucagcagaaaaauaacaggcuacucgagauuacccgggaguucucugugaaugccggugucacaacuccgguguccaccuauaugcugacaaacucagaacuucugagcuugaucaacgacaugcccauuaccaaugaucagaagaaacucaugaguaacaaugugcaaaucguccgccagcagucuuacuccaucaugugcauuauaaaggaggaaguucuggcauaugugguacaguuaccucuguacggggugaucgacacgccauguuggaaacuccauacuagcccccuuugcacaaccaacacuaaggagggaucgaauauuugucugacacgaaccgaucguggcugguacugcgacaacgcuggcucugucuccuuuuucccucaagccgaaacguguaaggugugcucaaauagaguguuuugcgauaccaugaacaguuugacacuaccaagcgagguuaaucuguguaacaucgacauauucaaucccaaauaugauugcaagauuaugacuuccaaaaccgacgucucuagcucagugaucacaagucucggggcaaucguauccuguuacggaaagacuaaaugcaccgcuagcaacaagaauaaggguauuaucaaaacauuuucuaacggcugugauuauguuucaaauaaggggguggacaccgucagugugggaaacacucuguacuaugucaacaaacaggagggcaagagccuuuacgugaaaggugaaccuauuauaaauuucuaugacccacugguuuuuccguccgaugaguucgacgccucuaucagccaggugaacgaaaagauuaaucaaucguuggcguuuaucaggaaguccgaugagcuccugcacaacguaaaugucgggaaaucaacgacaaacaucaugauuaccacuauaaucauugugaucauuguuaucuuacugcuacucauagccgugggacuguuccuuuacugcaaggcacggugaggacuagugcaucacauuuaaaagcaucucagccuaccaugagaauaagagaaagaaaaugaagaucaauagcuuauucaucucuuuuucuuuuucguugguguaaagccaacacccugucuaaaaaacauaaauuucuuuaaucauuuugccucuuuucucugugcuucaauuaauaaaaaauggaaagaaccuagaucuaaaaaaaaaaaaaaaaaaaaaaaaaaaaaaaaaaaaaaaaaaaaaaaaaaaaaaaaaaaaaaaaugcaucccccccccccccccccccccccccccccccaaaggcucuuuucagagccaccagaauu

SEQ ID NO: 19094 - RNA, 1927 nt, Artificial Sequence
  mRNA product Design i-2 comprising derived and/or modified sequence from HRSV(Memphis-37)__AIY60640.1__F-del_DSCav1_mut7 (opt4)
ggggcgcugccuacggagguggcagccaucuccuucucggcaucaagcuuaccauggagcugcccauccugaagaccaacgccaucaccaccauccuggccgccgugacccugugcuucgccagcagccagaacaucaccgaggaguucuaccagagcaccugcagcgccgugagcaagggcuaccugagcgcccugagaaccggcugguacaccagcgugaucaccaucgagcugagcaacaucaaggagaacaagugcaacggcaccgacgccaaggugaagcugaucaagcaggagcuggacaaguacaagaacgccgugaccgagcugcagaugcugaugugcagcacccccgccgccggcagcggcagcgccaucgccagcggcaucgccgugugcaaggugcugcaccuggagggcgaggugaacaagaucaagaacgcccugcugagcaccaacaaggccguggugagccugagcaacggcgugagcgugcugaccuucaaggugcuggaccugaagaacuacaucgacaagcagcugcugcccauccugaacaagcagagcugcagcaucagcaacaucgagaccgugauggaguuccagcagaagaacaacagacugcuggagaucaccagagaguucagcgugaacgccggcgugaccacccccgugagcaccuacaugcugaccaacagcgagcugcugagccugaucaacgacaugcccaucaccaacgaccagaagaagcugaugagcaacaacgugcagaucgugagacagcagagcuacagcaucaugugcaucaucaaggaggaggugcuggccuacguggugcagcugccccuguacggcgugaucgacacccccugcuggaagcugcacaccagcccccugugcaccaccaacaccaaggagggcagcaacaucugccugaccagaaccgacagaggcugguacugcgacaacgccggcagcgugagcuucuucccccaggccgagaccugcaaggugugcagcaacagaguguucugcgacaccaugaacagccugacccugcccagcgaggugaaccugugcaacaucgacaucuucaaccccaaguacgacugcaagaucaugaccagcaagaccgacgugagcagcagcgugaucaccagccugggcgccaucgugagcugcuacggcaagaccaagugcaccgccagcaacaagaacaagggcaucaucaagaccuucagcaacggcugcgacuacgugagcaacaagggcguggacaccgugagcgugggcaacacccuguacuacgugaacaagcaggagggcaagagccuguacgugaagggcgagcccaucaucaacuucuacgacccccugguguuccccagcgacgaguucgacgccagcaucagccaggugaacgagaagaucaaccagagccuggccuucaucagaaagagcgacgagcugcugcacaacgugaacgugggcaagagcaccaccaacaucaugaucaccaccaucaucaucgugaucaucgugauccugcugcugcugaucgccgugggccuguuccuguacugcaaggccagaugaggacuagugcaucacauuuaaaagcaucucagccuaccaugagaauaagagaaagaaaaugaagaucaauagcuuauucaucucuuuuucuuuuucguugguguaaagccaacacccugucuaaaaaacauaaauuucuuuaaucauuuugccucuuuucucugugcuucaauuaauaaaaaauggaaagaaccuagaucuaaaaaaaaaaaaaaaaaaaaaaaaaaaaaaaaaaaaaaaaaaaaaaaaaaaaaaaaaaaaaaaaugcaucccccccccccccccccccccccccccccccaaaggcucuuuucagagccaccagaauu

SEQ ID NO: 19095 - RNA, 1927 nt, Artificial Sequence
  mRNA product Design i-2 comprising derived and/or modified sequence from HRSV(Memphis-37)__AIY60640.1__F-del_DSCav1_mut7 (opt5)
ggggcgcugccuacggagguggcagccaucuccuucucggcaucaagcuuaccauggagcugcccauccucaagaccaacgccauuacaacgauccuggcugccgugacccuuugcuucgcgagcucccagaauauuacagaagaguuuuaccaaucuaccuguagcgcugucuccaaaggcuaucugucugcccucagaacagggugguacaccagcguuaucacaauugaacuguccaacaucaaggagaauaaaugcaacggaaccgacgccaaggugaaacuuaucaagcaggaacuggauaaguauaaaaaugcugugacggagcuccagaugcugauguguucuaccccugccgcuggcagcggguccgccauugcgagcggaaucgccgucugcaaggugcugcaccucgagggcgaaguuaacaaaauuaagaaugcucugcuuucuacaaacaaagccguggucucccugagcaauggggugucuguucucaccuucaaggugcuggaccuuaagaacuacaucgauaaacagcugcucccgauucugaauaagcaauccuguagcaucucuaacauugagacagucauggaauuucagcagaaaaauaaccggcugcucgagaucacccgcgaguucuccgugaaugcuggagugacgacacccgucagcaccuauaugcugacaaacuccgaacuucugucucucaucaacgacaugccuauuaccaaugaucagaagaaacugaugagcaacaauguucaaaucgugagacagcaguccuacagcauuaugugcaucauuaaggaggaagugcuugccuaugucgugcagcugccccucuacggcguuaucgacaccccuuguuggaaacugcauacaucuccccugugcacgaccaacacaaaggagggcuccaauaucugucucacccggacagaucgcgggugguacugcgacaacgcgggaagcgugagcuuuuucccucaagccgaaaccuguaaggucugcucuaauagaguguuuugcgauacgaugaacucccugacacuuccgucugagguuaaucuguguaacauugacaucuucaaucccaaauaugauugcaagauuaugaccagcaaaaccgacguguccagcucugucaucacaucccucggcgcuauugugagcuguuacgggaagaccaaaugcacagccucuaacaagaauaagggaaucaucaaaacguuuuccaacggcugugauuaugucagcaauaaggggguggacaccguuuccgugggaaacacacuguacuaugucaacaaacaggagggcaagucucuuuacgugaaaggcgaaccuauuaucaauuucuaugacccccugguuuuuccuagcgaugaguucgacgcuuccauuucucaggugaacgaaaagaucaaucaaagccucgccuuuauucggaaguccgaugagcugcugcacaacgucaauguggggaaaagcaccacaaacaucaugauuaccacgaucaucauugugaucauuguuauccuccugcuucugauugccgucggacucuuccuguacugcaaggcucgcugaggacuagugcaucacauuuaaaagcaucucagccuaccaugagaauaagagaaagaaaaugaagaucaauagcuuauucaucucuuuuucuuuuucguugguguaaagccaacacccugucuaaaaaacauaaauuucuuuaaucauuuugccucuuuucucugugcuucaauuaauaaaaaauggaaagaaccuagaucuaaaaaaaaaaaaaaaaaaaaaaaaaaaaaaaaaaaaaaaaaaaaaaaaaaaaaaaaaaaaaaaaugcaucccccccccccccccccccccccccccccccaaaggcucuuuucagagccaccagaauu

SEQ ID NO: 19096 - RNA, 1927 nt, Artificial Sequence
  mRNA product Design i-2 comprising derived and/or modified sequence from HRSV(Memphis-37)__AIY60640.1__F-del_DSCav1_mut7 (opt6)
ggggcgcugccuacggagguggcagccaucuccuucucggcaucaagcuuaccauggaacuaccaauacucaaaacaaacgccauaaccacaauacuagccgcaguaacacuuugcuuugccucaagucaaaacauaacagaagaauuuuaccaauccacaugcucagcuguauccaaaggauauuuauccgcacuaagaacaggaugguacacaucaguaaucacaauagaauuaucaaacauaaaagaaaacaaauguaauggcacagacgccaaaguaaaacuaauuaaacaagaacuagacaaauauaaaaaugcaguaaccgaacuccaaaugcucaugugcucuacaccagcugcaggaucaggaucagccauugcaagcgguauagcuguuugcaaaguauuacacuuagaaggagaaguaaauaaaauaaaaaacgcacuacuaucaacaaauaaagcaguaguaucccuaucaaacggaguaucaguacuuacauucaaaguauuagauuuaaaaaacuauauagacaaacaacuacuucccauauuaaacaaacaaucaugcucaauuuccaacauugaaacuguaauggaauuucaacaaaaaaacaacagacuacuugaaaucacacgagaauuuucaguaaacgcuggaguaacaacaccugucucuaccuacaugcucacaaauagcgaauuacuaucucuaaucaaugacaugccaauaacaaacgaucaaaaaaaacuaauguccaacaacguacaaauaguaagacaacaauccuauucaauaaugugcauaauaaaagaagaagucuuagcauacguuguacaacuaccauuauacggaguaauagauacaccaugcuggaaacuccacacaagcccccucugcacaacaaacaccaaagaagggucaaacauaugcuuaacaagaacagacagaggaugguacugugauaacgcaggaucugucucauucuuuccacaagcagaaacauguaaaguaugcuccaacagagucuuuugcgacaccaugaacucacuaaccuuacccucagaaguaaaccugugcaacaucgauaucuucaaccccaaauacgauugcaaaaucaugacaagcaaaacugauguauccagcucuguaauaacaucacuaggugcaauaguaucaugcuacggaaaaacaaaaugcacagcuucuaacaaaaauaaaggaauaauaaaaacauucuccaauggaugcgacuaugucucaaauaaaggaguagauacaguuucagucggcaacacacucuauuauguaaauaaacaagaaggaaaaucauuauacguaaaaggagaacccauaauaaacuucuacgacccccucguauucccaagcgacgaauuugacgccucaauaucacaaguaaacgaaaaaauaaaccaaucacucgcauucaucagaaaaucagaugaacuacuacacaauguaaacgucggaaaauccaccacaaauauaaugauaacuaccaucauaauaguaauaauagucaucuuacuacuauuaaucgcuguaggacuauuucucuacugcaaggccagauaaggacuagugcaucacauuuaaaagcaucucagccuaccaugagaauaagagaaagaaaaugaagaucaauagcuuauucaucucuuuuucuuuuucguugguguaaagccaacacccugucuaaaaaacauaaauuucuuuaaucauuuugccucuuuucucugugcuucaauuaauaaaaaauggaaagaaccuagaucuaaaaaaaaaaaaaaaaaaaaaaaaaaaaaaaaaaaaaaaaaaaaaaaaaaaaaaaaaaaaaaaaugcaucccccccccccccccccccccccccccccccaaaggcucuuuucagagccaccagaauu

SEQ ID NO: 19097 - RNA, 1927 nt, Artificial Sequence
  mRNA product Design i-2 comprising derived and/or modified sequence from HRSV(Memphis-37)__AIY60640.1__F-del_DSCav1_mut7 (opt11)
ggggcgcugccuacggagguggcagccaucuccuucucggcaucaagcuuaccauggaacucccaauccucaaaacaaaugccaucaccaccauccuagccgcugucacacuaugcuucgccuccucacaaaacaucaccgaagaguucuaucaauccacaugcuccgccgucagcaagggauaccucuccgcccuuagaaccggcugguacaccucagucaucacaauugaacugucaaacaucaaagaaaacaaaugcaacggcaccgacgcaaaaguaaagcucaucaaacaagaacuggacaaguacaagaacgccgucaccgaacuacagaugcuuaugugcucaaccccugccgccggcuccggaucugccauagcuucaggcaucgccguaugcaaaguccugcaccuagaaggggaagucaacaaaaucaaaaacgcccuccucuccaccaacaaggccguugucucccugucaaacggagucuccguccuaaccuucaaaguccucgaccucaaaaacuacauagacaaacaacuccuacccauccucaacaaacaaagcugcucaauauccaacaucgaaaccgucauggaguuccaacaaaagaacaaccgacuacucgaaauaacacgcgaguucucagucaacgccggcgucaccaccccagucuccacauacaugcucaccaacuccgaacuccuaucgcucaucaacgacaugcccaucaccaaugaccagaagaaacucauguccaacaacguacaaaucguccgccaacaguccuacucaaucaugugcaucaucaaagaagaaguccuugccuacgucguccagcuuccacucuacggagucaucgacacccccugcuggaaacuccacaccuccccacuaugcaccaccaacaccaaagaaggauccaacauaugccucacccguacugaccgcggcugguacugcgacaacgccggauccgucucauucuucccccaggccgaaaccugcaaagucugcuccaaccgcgucuucugcgacaccaugaacucgcucacccucccauccgaagucaaucuaugcaacaucgacauuuucaaccccaaauacgacugcaaaauuaugacaucaaaaaccgacgucucauccucagucaucacuucccucggcgcaaucguaagcugcuacgggaaaacaaagugcaccgcuuccaacaaaaacaaaggcaucaucaaaaccuucucuaacggcugcgacuacgucuccaacaaaggagucgacaccguauccgucggcaacacccucuacuacgucaacaaacaggaaggaaaaucgcucuacgucaaaggagaaccaaucaucaacuucuacgacccccuagucuucccauccgacgaguucgacgccagcaucucacaagucaaugaaaagaucaaccagucacucgcauucauccguaagucagacgaacuccuacacaacgucaacgucggcaagucaacaaccaacauaaugaucaccaccauaaucaucgucauaauaguaauccuccuucuccuaaucgcagucggccucuuccucuacugcaaagcacgcuaaggacuagugcaucacauuuaaaagcaucucagccuaccaugagaauaagagaaagaaaaugaagaucaauagcuuauucaucucuuuuucuuuuucguugguguaaagccaacacccugucuaaaaaacauaaauuucuuuaaucauuuugccucuuuucucugugcuucaauuaauaaaaaauggaaagaaccuagaucuaaaaaaaaaaaaaaaaaaaaaaaaaaaaaaaaaaaaaaaaaaaaaaaaaaaaaaaaaaaaaaaaugcaucccccccccccccccccccccccccccccccaaaggcucuuuucagagccaccagaauu

SEQ ID NO: 19098 - RNA, 1762 nt, Artificial Sequence
  mRNA product Design i-3 comprising derived and/or modified sequence from HRSV(Memphis-37)__AIY60640.1__F-del_DSCav1_mut7 (opt1)
gggagaaagcuuaccauggagcugcccauccucaagaccaacgccaucaccacgauccuggccgcggugacccugugcuucgccagcucccagaacaucaccgaggaguucuaccagagcacgugcuccgccgucagcaagggcuaccucuccgcccugcgcaccgggugguacaccagcgugaucaccaucgagcuguccaacaucaaggagaacaagugcaacggcaccgacgccaaggugaagcucaucaagcaggagcuggacaaguacaagaacgcggucacggagcugcagaugcugaugugcagcaccccggccgccggcuccgggagcgcgaucgccuccggcaucgccgucugcaaggugcugcaccucgagggcgaggugaacaagaucaagaacgcccugcuguccaccaacaaggccgucgugagccucuccaacggggugagcguccugaccuucaaggugcuggaccucaagaacuacaucgacaagcagcugcugcccauccugaacaagcagagcugcuccaucagcaacaucgagaccgucauggaguuccagcagaagaacaaccgccuccuggagaucacgcgggaguucagcgugaacgcgggcgugaccacccccgucuccaccuacaugcugacgaacagcgagcuccugucccugaucaacgacaugccgaucaccaacgaccagaagaagcucaugagcaacaacgugcagaucgugcgccagcaguccuacagcaucaugugcaucaucaaggaggagguccuggccuacguggugcagcugccccucuacggggucaucgacacccccugcuggaagcugcacaccagcccccugugcacgaccaacaccaaggagggcuccaacaucugccucacccggacggaccgcgggugguacugcgacaacgccggcagcguguccuucuucccgcaggccgagaccugcaaggucugcagcaaccggguguucugcgacaccaugaacucccugacccugcccagcgaggugaaccucugcaacaucgacaucuucaaccccaaguacgacugcaagaucaugacguccaagaccgacgucagcuccagcgugaucaccucccugggcgccaucgugagcugcuacgggaagaccaagugcacggcgagcaacaagaacaagggcaucaucaagaccuucuccaacgggugcgacuacgucagcaacaagggcguggacaccguguccgucggcaacacccuguacuacgugaacaagcaggagggcaagagccucuacgugaagggggagcccaucaucaacuucuacgacccgcuggucuuccccuccgacgaguucgacgccagcaucucccaggugaacgagaagaucaaccagagccuggccuucauccggaaguccgacgagcuccugcacaacgugaacgucggcaagagcaccacgaacaucaugaucaccaccaucaucaucgugaucaucgugauccugcugcuccugaucgccgucgggcuguuccucuacugcaaggcccgcugaggacuaguuauaagacugacuagcccgaugggccucccaacgggcccuccuccccuccuugcaccgagauuaauaaaaaaaaaaaaaaaaaaaaaaaaaaaaaaaaaaaaaaaaaaaaaaaaaaaaaaaaaaaaaaaaugcaucccccccccccccccccccccccccccccccaaaggcucuuuucagagccaccagaauu

SEQ ID NO: 19099 - RNA, 1762 nt, Artificial Sequence
  mRNA product Design i-3 comprising derived and/or modified sequence from HRSV(Memphis-37)__AIY60640.1__F-del_DSCav1_mut7 (opt1)
gggagaaagcuuaccauggagcugcccauccucaagaccaacgccaucaccacgauccuggccgcggugacccugugcuucgccagcucccagaacaucaccgaggaguucuaccagagcacgugcuccgccgucagcaagggguaccucuccgcccugcgcaccgggugguacaccagcgugaucaccaucgagcuguccaacaucaaggagaacaagugcaacggcaccgacgccaaggugaagcucaucaagcaggagcuggacaaguacaagaacgcggucacggagcugcagaugcucaugugcagcaccccggccgccggguccggcagcgccaucgcguccgggaucgccgugugcaaggugcugcaccuggagggcgaggucaacaagaucaagaacgcccuccugagcaccaacaaggccguggugucccugagcaacggcgucuccgugcucaccuucaaggugcuggaccugaagaacuacaucgacaagcagcuccugcccauccugaacaagcagagcugcuccaucagcaacaucgagacggucauggaguuccagcagaagaacaaccggcuccuggagaucacccgcgaguucuccgugaacgccggggugaccacccccgucagcacguacaugcugaccaacagcgagcuccugucccugaucaacgacaugcccaucaccaacgaccagaagaagcucaugagcaacaacgugcagaucgugcggcagcaguccuacagcaucaugugcaucaucaaggaggagguccuggcguacguggugcagcugccgcucuacggcgucaucgacacccccugcuggaagcugcacacgagcccccugugcaccaccaacaccaaggaggggagcaacaucugccucacgcgcaccgaccggggcugguacugcgacaacgccggguccgugagcuucuucccccaggccgagaccugcaaggugugcuccaaccgcgucuucugcgacaccaugaacagccugacgcugccguccgaggugaaccucugcaacaucgacaucuucaaccccaaguacgacugcaagaucaugaccagcaagaccgacgucuccagcuccgugaucaccagccugggcgccaucguguccugcuacggcaagacgaagugcaccgccagcaacaagaacaaggggaucaucaagaccuucuccaacggcugcgacuacgucagcaacaaggggguggacaccgugagcgucggcaacacgcuguacuacgugaacaagcaggagggcaagucccucuacgugaagggggagcccaucaucaacuucuacgacccccuggucuucccgagcgacgaguucgacgcguccaucagccaggugaacgagaagaucaaccagucccuggccuucauccggaaguccgacgagcuccugcacaacgugaacgucggcaaguccaccaccaacaucaugaucaccaccaucaucaucgugaucaucgugauccugcuccugcugaucgccgucggccucuuccuguacugcaaggcccgcugaggacuaguuauaagacugacuagcccgaugggccucccaacgggcccuccuccccuccuugcaccgagauuaauaaaaaaaaaaaaaaaaaaaaaaaaaaaaaaaaaaaaaaaaaaaaaaaaaaaaaaaaaaaaaaaaugcaucccccccccccccccccccccccccccccccaaaggcucuuuucagagccaccagaauu

SEQ ID NO: 19100 - RNA, 1762 nt, Artificial Sequence
  mRNA product Design i-3 comprising derived and/or modified sequence from HRSV(Memphis-37)__AIY60640.1__F-del_DSCav1_mut7 (opt2)
gggagaaagcuuaccauggagcuccccauccucaagaccaacgccaucaccaccauccucgccgccgucacccucugcuucgccuccucccagaacaucaccgaggaguucuaccaguccaccugcuccgccgucuccaagggcuaccucuccgcccuccgcaccggcugguacaccuccgucaucaccaucgagcucuccaacaucaaggagaacaagugcaacggcaccgacgccaaggucaagcucaucaagcaggagcucgacaaguacaagaacgccgucaccgagcuccagaugcucaugugcuccacccccgccgccggcuccggcuccgccaucgccuccggcaucgccgucugcaagguccuccaccucgagggcgaggucaacaagaucaagaacgcccuccucuccaccaacaaggccgucgucucccucuccaacggcgucuccguccucaccuucaagguccucgaccucaagaacuacaucgacaagcagcuccuccccauccucaacaagcaguccugcuccaucuccaacaucgagaccgucauggaguuccagcagaagaacaaccgccuccucgagaucacccgcgaguucuccgucaacgccggcgucaccacccccgucuccaccuacaugcucaccaacuccgagcuccucucccucaucaacgacaugcccaucaccaacgaccagaagaagcucauguccaacaacguccagaucguccgccagcaguccuacuccaucaugugcaucaucaaggaggagguccucgccuacgucguccagcucccccucuacggcgucaucgacacccccugcuggaagcuccacaccuccccccucugcaccaccaacaccaaggagggcuccaacaucugccucacccgcaccgaccgcggcugguacugcgacaacgccggcuccgucuccuucuucccccaggccgagaccugcaaggucugcuccaaccgcgucuucugcgacaccaugaacucccucacccuccccuccgaggucaaccucugcaacaucgacaucuucaaccccaaguacgacugcaagaucaugaccuccaagaccgacgucuccuccuccgucaucaccucccucggcgccaucgucuccugcuacggcaagaccaagugcaccgccuccaacaagaacaagggcaucaucaagaccuucuccaacggcugcgacuacgucuccaacaagggcgucgacaccgucuccgucggcaacacccucuacuacgucaacaagcaggagggcaagucccucuacgucaagggcgagcccaucaucaacuucuacgacccccucgucuuccccuccgacgaguucgacgccuccaucucccaggucaacgagaagaucaaccagucccucgccuucauccgcaaguccgacgagcuccuccacaacgucaacgucggcaaguccaccaccaacaucaugaucaccaccaucaucaucgucaucaucgucauccuccuccuccucaucgccgucggccucuuccucuacugcaaggcccgcugaggacuaguuauaagacugacuagcccgaugggccucccaacgggcccuccuccccuccuugcaccgagauuaauaaaaaaaaaaaaaaaaaaaaaaaaaaaaaaaaaaaaaaaaaaaaaaaaaaaaaaaaaaaaaaaaugcaucccccccccccccccccccccccccccccccaaaggcucuuuucagagccaccagaauu

SEQ ID NO: 19101 - RNA, 1762 nt, Artificial Sequence
  mRNA product Design i-3 comprising derived and/or modified sequence from HRSV(Memphis-37)__AIY60640.1__F-del_DSCav1_mut7 (opt3)
gggagaaagcuuaccauggagcugcccauccucaagaccaacgccauuacaacuauacuugcugcagugacgcugugcuucgccagcucccagaauaucaccgaagaguuuuaccaaucuacauguucagcggucaguaaaggcuauuugagcgcuuuaagaacugggugguacaccuccguuauuacaaucgaacugucuaacauuaaggagaauaaaugcaacggaaccgacgccaaggugaaacuaaucaagcaggaacucgauaaguauaaaaaugcaguaacugagcugcagaugcuuauguguucgaccccugccgcugguucaggcagcgcaauagccagugggaucgcugugugcaagguccugcacuuggagggagaagugaacaaaauuaagaaugcccuccuguccacaaacaaagcgguugugucucugagcaauggcgucuccgugcucacguucaagguauuagaccugaagaacuacaucgauaaacagcuuuugccaauucugaauaagcaaucauguaguaucagcaacauagagacuguuauggaauuucagcagaaaaauaacaggcuacucgagauuacccgggaguucucugugaaugccggugucacaacuccgguguccaccuauaugcugacaaacucagaacuucugagcuugaucaacgacaugcccauuaccaaugaucagaagaaacucaugaguaacaaugugcaaaucguccgccagcagucuuacuccaucaugugcauuauaaaggaggaaguucuggcauaugugguacaguuaccucuguacggggugaucgacacgccauguuggaaacuccauacuagcccccuuugcacaaccaacacuaaggagggaucgaauauuugucugacacgaaccgaucguggcugguacugcgacaacgcuggcucugucuccuuuuucccucaagccgaaacguguaaggugugcucaaauagaguguuuugcgauaccaugaacaguuugacacuaccaagcgagguuaaucuguguaacaucgacauauucaaucccaaauaugauugcaagauuaugacuuccaaaaccgacgucucuagcucagugaucacaagucucggggcaaucguauccuguuacggaaagacuaaaugcaccgcuagcaacaagaauaaggguauuaucaaaacauuuucuaacggcugugauuauguuucaaauaaggggguggacaccgucagugugggaaacacucuguacuaugucaacaaacaggagggcaagagccuuuacgugaaaggugaaccuauuauaaauuucuaugacccacugguuuuuccguccgaugaguucgacgccucuaucagccaggugaacgaaaagauuaaucaaucguuggcguuuaucaggaaguccgaugagcuccugcacaacguaaaugucgggaaaucaacgacaaacaucaugauuaccacuauaaucauugugaucauuguuaucuuacugcuacucauagccgugggacuguuccuuuacugcaaggcacggugaggacuaguuauaagacugacuagcccgaugggccucccaacgggcccuccuccccuccuugcaccgagauuaauaaaaaaaaaaaaaaaaaaaaaaaaaaaaaaaaaaaaaaaaaaaaaaaaaaaaaaaaaaaaaaaaugcaucccccccccccccccccccccccccccccccaaaggcucuuuucagagccaccagaauu

SEQ ID NO: 19102 - RNA, 1762 nt, Artificial Sequence
  mRNA product Design i-3 comprising derived and/or modified sequence from HRSV(Memphis-37)__AIY60640.1__F-del_DSCav1_mut7 (opt4)
gggagaaagcuuaccauggagcugcccauccugaagaccaacgccaucaccaccauccuggccgccgugacccugugcuucgccagcagccagaacaucaccgaggaguucuaccagagcaccugcagcgccgugagcaagggcuaccugagcgcccugagaaccggcugguacaccagcgugaucaccaucgagcugagcaacaucaaggagaacaagugcaacggcaccgacgccaaggugaagcugaucaagcaggagcuggacaaguacaagaacgccgugaccgagcugcagaugcugaugugcagcacccccgccgccggcagcggcagcgccaucgccagcggcaucgccgugugcaaggugcugcaccuggagggcgaggugaacaagaucaagaacgcccugcugagcaccaacaaggccguggugagccugagcaacggcgugagcgugcugaccuucaaggugcuggaccugaagaacuacaucgacaagcagcugcugcccauccugaacaagcagagcugcagcaucagcaacaucgagaccgugauggaguuccagcagaagaacaacagacugcuggagaucaccagagaguucagcgugaacgccggcgugaccacccccgugagcaccuacaugcugaccaacagcgagcugcugagccugaucaacgacaugcccaucaccaacgaccagaagaagcugaugagcaacaacgugcagaucgugagacagcagagcuacagcaucaugugcaucaucaaggaggaggugcuggccuacguggugcagcugccccuguacggcgugaucgacacccccugcuggaagcugcacaccagcccccugugcaccaccaacaccaaggagggcagcaacaucugccugaccagaaccgacagaggcugguacugcgacaacgccggcagcgugagcuucuucccccaggccgagaccugcaaggugugcagcaacagaguguucugcgacaccaugaacagccugacccugcccagcgaggugaaccugugcaacaucgacaucuucaaccccaaguacgacugcaagaucaugaccagcaagaccgacgugagcagcagcgugaucaccagccugggcgccaucgugagcugcuacggcaagaccaagugcaccgccagcaacaagaacaagggcaucaucaagaccuucagcaacggcugcgacuacgugagcaacaagggcguggacaccgugagcgugggcaacacccuguacuacgugaacaagcaggagggcaagagccuguacgugaagggcgagcccaucaucaacuucuacgacccccugguguuccccagcgacgaguucgacgccagcaucagccaggugaacgagaagaucaaccagagccuggccuucaucagaaagagcgacgagcugcugcacaacgugaacgugggcaagagcaccaccaacaucaugaucaccaccaucaucaucgugaucaucgugauccugcugcugcugaucgccgugggccuguuccuguacugcaaggccagaugaggacuaguuauaagacugacuagcccgaugggccucccaacgggcccuccuccccuccuugcaccgagauuaauaaaaaaaaaaaaaaaaaaaaaaaaaaaaaaaaaaaaaaaaaaaaaaaaaaaaaaaaaaaaaaaaugcaucccccccccccccccccccccccccccccccaaaggcucuuuucagagccaccagaauu

SEQ ID NO: 19103 - RNA, 1762 nt, Artificial Sequence
  mRNA product Design i-3 comprising derived and/or modified sequence from HRSV(Memphis-37)__AIY60640.1__F-del_DSCav1_mut7 (opt5)
gggagaaagcuuaccauggagcugcccauccucaagaccaacgccauuacaacgauccuggcugccgugacccuuugcuucgcgagcucccagaauauuacagaagaguuuuaccaaucuaccuguagcgcugucuccaaaggcuaucugucugcccucagaacagggugguacaccagcguuaucacaauugaacuguccaacaucaaggagaauaaaugcaacggaaccgacgccaaggugaaacuuaucaagcaggaacuggauaaguauaaaaaugcugugacggagcuccagaugcugauguguucuaccccugccgcuggcagcggguccgccauugcgagcggaaucgccgucugcaaggugcugcaccucgagggcgaaguuaacaaaauuaagaaugcucugcuuucuacaaacaaagccguggucucccugagcaauggggugucuguucucaccuucaaggugcuggaccuuaagaacuacaucgauaaacagcugcucccgauucugaauaagcaauccuguagcaucucuaacauugagacagucauggaauuucagcagaaaaauaaccggcugcucgagaucacccgcgaguucuccgugaaugcuggagugacgacacccgucagcaccuauaugcugacaaacuccgaacuucugucucucaucaacgacaugccuauuaccaaugaucagaagaaacugaugagcaacaauguucaaaucgugagacagcaguccuacagcauuaugugcaucauuaaggaggaagugcuugccuaugucgugcagcugccccucuacggcguuaucgacaccccuuguuggaaacugcauacaucuccccugugcacgaccaacacaaaggagggcuccaauaucugucucacccggacagaucgcgggugguacugcgacaacgcgggaagcgugagcuuuuucccucaagccgaaaccuguaaggucugcucuaauagaguguuuugcgauacgaugaacucccugacacuuccgucugagguuaaucuguguaacauugacaucuucaaucccaaauaugauugcaagauuaugaccagcaaaaccgacguguccagcucugucaucacaucccucggcgcuauugugagcuguuacgggaagaccaaaugcacagccucuaacaagaauaagggaaucaucaaaacguuuuccaacggcugugauuaugucagcaauaaggggguggacaccguuuccgugggaaacacacuguacuaugucaacaaacaggagggcaagucucuuuacgugaaaggcgaaccuauuaucaauuucuaugacccccugguuuuuccuagcgaugaguucgacgcuuccauuucucaggugaacgaaaagaucaaucaaagccucgccuuuauucggaaguccgaugagcugcugcacaacgucaauguggggaaaagcaccacaaacaucaugauuaccacgaucaucauugugaucauuguuauccuccugcuucugauugccgucggacucuuccuguacugcaaggcucgcugaggacuaguuauaagacugacuagcccgaugggccucccaacgggcccuccuccccuccuugcaccgagauuaauaaaaaaaaaaaaaaaaaaaaaaaaaaaaaaaaaaaaaaaaaaaaaaaaaaaaaaaaaaaaaaaaugcaucccccccccccccccccccccccccccccccaaaggcucuuuucagagccaccagaauu

SEQ ID NO: 19104 - RNA, 1762 nt, Artificial Sequence
  mRNA product Design i-3 comprising derived and/or modified sequence from HRSV(Memphis-37)__AIY60640.1__F-del_DSCav1_mut7 (opt6)
gggagaaagcuuaccauggaacuaccaauacucaaaacaaacgccauaaccacaauacuagccgcaguaacacuuugcuuugccucaagucaaaacauaacagaagaauuuuaccaauccacaugcucagcuguauccaaaggauauuuauccgcacuaagaacaggaugguacacaucaguaaucacaauagaauuaucaaacauaaaagaaaacaaauguaauggcacagacgccaaaguaaaacuaauuaaacaagaacuagacaaauauaaaaaugcaguaaccgaacuccaaaugcucaugugcucuacaccagcugcaggaucaggaucagccauugcaagcgguauagcuguuugcaaaguauuacacuuagaaggagaaguaaauaaaauaaaaaacgcacuacuaucaacaaauaaagcaguaguaucccuaucaaacggaguaucaguacuuacauucaaaguauuagauuuaaaaaacuauauagacaaacaacuacuucccauauuaaacaaacaaucaugcucaauuuccaacauugaaacuguaauggaauuucaacaaaaaaacaacagacuacuugaaaucacacgagaauuuucaguaaacgcuggaguaacaacaccugucucuaccuacaugcucacaaauagcgaauuacuaucucuaaucaaugacaugccaauaacaaacgaucaaaaaaaacuaauguccaacaacguacaaauaguaagacaacaauccuauucaauaaugugcauaauaaaagaagaagucuuagcauacguuguacaacuaccauuauacggaguaauagauacaccaugcuggaaacuccacacaagcccccucugcacaacaaacaccaaagaagggucaaacauaugcuuaacaagaacagacagaggaugguacugugauaacgcaggaucugucucauucuuuccacaagcagaaacauguaaaguaugcuccaacagagucuuuugcgacaccaugaacucacuaaccuuacccucagaaguaaaccugugcaacaucgauaucuucaaccccaaauacgauugcaaaaucaugacaagcaaaacugauguauccagcucuguaauaacaucacuaggugcaauaguaucaugcuacggaaaaacaaaaugcacagcuucuaacaaaaauaaaggaauaauaaaaacauucuccaauggaugcgacuaugucucaaauaaaggaguagauacaguuucagucggcaacacacucuauuauguaaauaaacaagaaggaaaaucauuauacguaaaaggagaacccauaauaaacuucuacgacccccucguauucccaagcgacgaauuugacgccucaauaucacaaguaaacgaaaaaauaaaccaaucacucgcauucaucagaaaaucagaugaacuacuacacaauguaaacgucggaaaauccaccacaaauauaaugauaacuaccaucauaauaguaauaauagucaucuuacuacuauuaaucgcuguaggacuauuucucuacugcaaggccagauaaggacuaguuauaagacugacuagcccgaugggccucccaacgggcccuccuccccuccuugcaccgagauuaauaaaaaaaaaaaaaaaaaaaaaaaaaaaaaaaaaaaaaaaaaaaaaaaaaaaaaaaaaaaaaaaaugcaucccccccccccccccccccccccccccccccaaaggcucuuuucagagccaccagaauu

SEQ ID NO: 19105 - RNA, 1762 nt, Artificial Sequence
  mRNA product Design i-3 comprising derived and/or modified sequence from HRSV(Memphis-37)__AIY60640.1__F-del_DSCav1_mut7 (opt11)
gggagaaagcuuaccauggaacucccaauccucaaaacaaaugccaucaccaccauccuagccgcugucacacuaugcuucgccuccucacaaaacaucaccgaagaguucuaucaauccacaugcuccgccgucagcaagggauaccucuccgcccuuagaaccggcugguacaccucagucaucacaauugaacugucaaacaucaaagaaaacaaaugcaacggcaccgacgcaaaaguaaagcucaucaaacaagaacuggacaaguacaagaacgccgucaccgaacuacagaugcuuaugugcucaaccccugccgccggcuccggaucugccauagcuucaggcaucgccguaugcaaaguccugcaccuagaaggggaagucaacaaaaucaaaaacgcccuccucuccaccaacaaggccguugucucccugucaaacggagucuccguccuaaccuucaaaguccucgaccucaaaaacuacauagacaaacaacuccuacccauccucaacaaacaaagcugcucaauauccaacaucgaaaccgucauggaguuccaacaaaagaacaaccgacuacucgaaauaacacgcgaguucucagucaacgccggcgucaccaccccagucuccacauacaugcucaccaacuccgaacuccuaucgcucaucaacgacaugcccaucaccaaugaccagaagaaacucauguccaacaacguacaaaucguccgccaacaguccuacucaaucaugugcaucaucaaagaagaaguccuugccuacgucguccagcuuccacucuacggagucaucgacacccccugcuggaaacuccacaccuccccacuaugcaccaccaacaccaaagaaggauccaacauaugccucacccguacugaccgcggcugguacugcgacaacgccggauccgucucauucuucccccaggccgaaaccugcaaagucugcuccaaccgcgucuucugcgacaccaugaacucgcucacccucccauccgaagucaaucuaugcaacaucgacauuuucaaccccaaauacgacugcaaaauuaugacaucaaaaaccgacgucucauccucagucaucacuucccucggcgcaaucguaagcugcuacgggaaaacaaagugcaccgcuuccaacaaaaacaaaggcaucaucaaaaccuucucuaacggcugcgacuacgucuccaacaaaggagucgacaccguauccgucggcaacacccucuacuacgucaacaaacaggaaggaaaaucgcucuacgucaaaggagaaccaaucaucaacuucuacgacccccuagucuucccauccgacgaguucgacgccagcaucucacaagucaaugaaaagaucaaccagucacucgcauucauccguaagucagacgaacuccuacacaacgucaacgucggcaagucaacaaccaacauaaugaucaccaccauaaucaucgucauaauaguaauccuccuucuccuaaucgcagucggccucuuccucuacugcaaagcacgcuaaggacuaguuauaagacugacuagcccgaugggccucccaacgggcccuccuccccuccuugcaccgagauuaauaaaaaaaaaaaaaaaaaaaaaaaaaaaaaaaaaaaaaaaaaaaaaaaaaaaaaaaaaaaaaaaaugcaucccccccccccccccccccccccccccccccaaaggcucuuuucagagccaccagaauu

SEQ ID NO: 19106 - protein, 536 aa, Artificial Sequence
  derived and/or modified protein sequence (artificial) from HRSV(Memphis-37)__AIY60640.1__F_DSCav1_mut8
MELPILKTNAITTILAAVTLCFASSQNITEEFYQSTCSAVSKGYLGALRTGWYTSVITIELSNIKEIKCNGTDAKVKLIKQELDKYKNAVTDLQLLMQSTPAAGSGSAIASGIAVCKVLHLEGEVNKIKNALLSTNKAVVSLSGCGVSVLTFKVLDLKNYIDKQLLPILNKQSCSIPNIETVIEFQQKNNRLLEITREFSVNAGVTTPVSTYMLTNSELLSLINDMPITNDQKKLMSNNVQIVRQQSYSIMCIIKEEVLAYVVQLPLYGVIDTPCWKLHTSPLCTTNTKEGSNICLTRTDRGWYCDNAGSVSFFPQAETCKVQSNRVFCDTMNSLTLPSEVNLCNIDIFNPKYDCKIMTSKTDVSSSVITSLGAIVSCYGKTKCTASNKCRGIIKTFSNGCDYVSNKGVDTVSVGNTLYYVNKQEGQSLYVKGEPIINFYDPLVFPSDEFDASISQVNEKINQSLAFIRKSDELLHNVNVGKSTTNIMITTIIIVIIVILLLLIAVGLFLYCKARSTPVTLSKDQLSGINNIAFSN

SEQ ID NO: 19107 - RNA, 1611 nt, Artificial Sequence
  derived and/or modified CDS sequence (opt1) from HRSV(Memphis-37)__AIY60640.1__F_DSCav1_mut8
auggagcugcccauccucaagaccaacgccaucaccacgauccuggccgcggugacccugugcuucgccagcucccagaacaucaccgaggaguucuaccagagcacgugcuccgccgucagcaagggcuaccucggcgcccugcgcaccgggugguacaccagcgugaucaccaucgagcuguccaacaucaaggagaucaagugcaacggcaccgacgccaaggugaagcucaucaagcaggagcuggacaaguacaagaacgcggucacggaccugcagcuccugaugcagagcaccccggccgccggcuccgggagcgcgaucgccuccggcaucgccgucugcaaggugcugcaccucgagggcgaggugaacaagaucaagaacgcccugcuguccaccaacaaggccgucgugagccucuccggcugcggggugagcguccugaccuucaaggugcuggaccucaagaacuacaucgacaagcagcugcugcccauccugaacaagcagagcugcuccauccccaacaucgagaccgucaucgaguuccagcagaagaacaaccgccuccuggagaucacgcgggaguucagcgugaacgcgggcgugaccacccccgucuccaccuacaugcugacgaacagcgagcuccugucccugaucaacgacaugccgaucaccaacgaccagaagaagcucaugagcaacaacgugcagaucgugcgccagcaguccuacagcaucaugugcaucaucaaggaggagguccuggccuacguggugcagcugccccucuacggggucaucgacacccccugcuggaagcugcacaccagcccccugugcacgaccaacaccaaggagggcuccaacaucugccucacccggacggaccgcgggugguacugcgacaacgccggcagcguguccuucuucccgcaggccgagaccugcaagguccagagcaaccggguguucugcgacaccaugaacucccugacccugcccagcgaggugaaccucugcaacaucgacaucuucaaccccaaguacgacugcaagaucaugacguccaagaccgacgucagcuccagcgugaucaccucccugggcgccaucgugagcugcuacgggaagaccaagugcacggcgagcaacaagugccgcggcaucaucaagaccuucuccaacgggugcgacuacgucagcaacaagggcguggacaccguguccgucggcaacacccuguacuacgugaacaagcaggagggccagagccucuacgugaagggggagcccaucaucaacuucuacgacccgcuggucuuccccuccgacgaguucgacgccagcaucucccaggugaacgagaagaucaaccagagccuggccuucauccggaaguccgacgagcuccugcacaacgugaacgucggcaagagcaccacgaacaucaugaucaccaccaucaucaucgugaucaucgugauccugcugcuccugaucgccgucgggcuguuccucuacugcaaggcccgcuccacccccgugacgcugagcaaggaccagcuguccgggaucaacaacaucgcguucagcaacuga

SEQ ID NO: 19108 - RNA, 1611 nt, Artificial Sequence
  derived and/or modified CDS sequence (opt1) from HRSV(Memphis-37)__AIY60640.1__F_DSCav1_mut8
auggagcugcccauccucaagaccaacgccaucaccacgauccuggccgcggugacccugugcuucgccagcucccagaacaucaccgaggaguucuaccagagcacgugcuccgccgucagcaagggcuaccucggggcccugcgcaccggcugguacaccuccgugaucaccaucgagcugagcaacaucaaggagaucaagugcaacgggaccgacgccaaggugaagcucaucaagcaggagcuggacaaguacaagaacgcggucacggaccugcagcuccugaugcaguccaccccggccgccggcagcggguccgccaucgcgagcggcaucgccgugugcaaggugcugcaccucgagggcgaggucaacaagaucaagaacgcccugcuguccaccaacaaggccguggugagccucuccgggugcggcgucagcgugcugaccuucaaggugcuggaccucaagaacuacaucgacaagcagcugcugcccauccucaacaagcaguccugcagcauccccaacaucgagacggucaucgaguuccagcagaagaacaaccggcugcuggagaucacccgcgaguucuccgugaacgccggggugaccacccccgucagcacguacaugcucaccaacuccgagcugcugagccucaucaacgacaugccgaucaccaacgaccagaagaagcugaugagcaacaacgugcagaucgugcggcagcaguccuacagcaucaugugcaucaucaaggaggagguccuggcguacguggugcagcucccccuguacggcgucaucgacacccccugcuggaagcugcacacgagcccccucugcaccaccaacaccaaggagggguccaacaucugccugacgcgcaccgaccggggcugguacugcgacaacgccggcuccgugagcuucuucccgcaggccgagaccugcaaggugcaguccaaccgcgucuucugcgacaccaugaacagccugacgcuccccuccgaggugaaccugugcaacaucgacaucuucaaccccaaguacgacugcaagaucaugaccagcaagaccgacgucuccagcuccgugaucaccagccugggggccaucguguccugcuacggcaagacgaagugcaccgccagcaacaagugccgggggaucaucaagaccuucuccaacggcugcgacuacgucagcaacaagggcguggacaccguguccgucgggaacacgcucuacuacgugaacaagcaggagggccagagccuguacgugaagggggagcccaucaucaacuucuacgacccgcuggucuuccccagcgacgaguucgacgcguccaucagccaggugaacgagaagaucaaccagucccucgccuucauccgcaagagcgacgagcugcugcacaacgugaacgucggcaaguccaccaccaacaucaugaucaccaccaucaucaucgugaucaucgugauccuccugcugcucaucgccgucgggcuguuccuguacugcaaggcccggagcacgcccgugacccuguccaaggaccagcucagcggcaucaacaacaucgccuucuccaacuga

SEQ ID NO: 19109 - RNA, 1611 nt, Artificial Sequence
  derived and/or modified CDS sequence (opt2) from HRSV(Memphis-37)__AIY60640.1__F_DSCav1_mut8
auggagcuccccauccucaagaccaacgccaucaccaccauccucgccgccgucacccucugcuucgccuccucccagaacaucaccgaggaguucuaccaguccaccugcuccgccgucuccaagggcuaccucggcgcccuccgcaccggcugguacaccuccgucaucaccaucgagcucuccaacaucaaggagaucaagugcaacggcaccgacgccaaggucaagcucaucaagcaggagcucgacaaguacaagaacgccgucaccgaccuccagcuccucaugcaguccacccccgccgccggcuccggcuccgccaucgccuccggcaucgccgucugcaagguccuccaccucgagggcgaggucaacaagaucaagaacgcccuccucuccaccaacaaggccgucgucucccucuccggcugcggcgucuccguccucaccuucaagguccucgaccucaagaacuacaucgacaagcagcuccuccccauccucaacaagcaguccugcuccauccccaacaucgagaccgucaucgaguuccagcagaagaacaaccgccuccucgagaucacccgcgaguucuccgucaacgccggcgucaccacccccgucuccaccuacaugcucaccaacuccgagcuccucucccucaucaacgacaugcccaucaccaacgaccagaagaagcucauguccaacaacguccagaucguccgccagcaguccuacuccaucaugugcaucaucaaggaggagguccucgccuacgucguccagcucccccucuacggcgucaucgacacccccugcuggaagcuccacaccuccccccucugcaccaccaacaccaaggagggcuccaacaucugccucacccgcaccgaccgcggcugguacugcgacaacgccggcuccgucuccuucuucccccaggccgagaccugcaagguccaguccaaccgcgucuucugcgacaccaugaacucccucacccuccccuccgaggucaaccucugcaacaucgacaucuucaaccccaaguacgacugcaagaucaugaccuccaagaccgacgucuccuccuccgucaucaccucccucggcgccaucgucuccugcuacggcaagaccaagugcaccgccuccaacaagugccgcggcaucaucaagaccuucuccaacggcugcgacuacgucuccaacaagggcgucgacaccgucuccgucggcaacacccucuacuacgucaacaagcaggagggccagucccucuacgucaagggcgagcccaucaucaacuucuacgacccccucgucuuccccuccgacgaguucgacgccuccaucucccaggucaacgagaagaucaaccagucccucgccuucauccgcaaguccgacgagcuccuccacaacgucaacgucggcaaguccaccaccaacaucaugaucaccaccaucaucaucgucaucaucgucauccuccuccuccucaucgccgucggccucuuccucuacugcaaggcccgcuccacccccgucacccucuccaaggaccagcucuccggcaucaacaacaucgccuucuccaacuga

SEQ ID NO: 19110 - RNA, 1611 nt, Artificial Sequence
  derived and/or modified CDS sequence (opt3) from HRSV(Memphis-37)__AIY60640.1__F_DSCav1_mut8
auggagcugcccauccucaagaccaacgccauuacaacuauacuugcugcagugacgcugugcuucgccagcucccagaauaucaccgaagaguuuuaccaaucuacauguucagcggucaguaaaggcuauuugggggcuuuaagaacuggaugguacaccagcguuauuacaaucgaacuguccaacauuaaggagaucaaaugcaaugguaccgacgccaaggugaaacuaauaaagcaggaacucgauaaguauaaaaacgcaguaacugaccugcagcuucugaugcagucuacuccugccgcuggcucggggucagcaaucgccagcggaauugcuguguguaaggucuugcaccucgagggcgaggugaauaaaaucaagaacgcccugcugaguaccaauaaagcgguugugucccucucugguugcggggucagcguguuaacguucaagguacuggaucuuaagaacuacauugacaaacaauugcugccaauccuaaauaagcaguccuguucaauaccgaacauugaaacuguuaucgaguuucagcagaaaaauaacaggcuccuggaaauuacccgggaguucagugugaaugcaggagucacaacucccgugagcaccuauaugcuuacaaacucugagcuguugucccucaucaaugauaugccuaucaccaacgaccaaaagaaacugaugucaaacaaugugcagauuguccgccagcagagcuacaguauaaugugcaucauuaaggaagagguuuuagccuaugugguacaacugccacucuacggcgugaucgauacgcccuguuggaaacuucauacuucuccucugugcacaaccaacacuaaggaaggcuccaauauauguuugacacgaaccgaccgugggugguacugcgauaacgcuggaagcgucucguuuuucccacaggccgagacguguaaggugcagucuaauagaguuuucugcgacaccaugaacucccuaacacugcccucagaagugaaucucugcaacauugauaucuucaauccuaaauaugacuguaagaucaugacaaguaaaaccgaugucagcuccucugugauuacaagccugggugcaaucguaucaugcuacggcaagacuaaauguaccgcuaguaacaagugcagggggauuauaaagacauuuuccaauggaugugacuauguuagcaacaaaggcguggacaccgucucuguggguaauacucuuuacuaugucaacaagcaagaggggcagucacuguacgugaaaggagagccaaucauuaauuucuaugauccguugguuuuucccagugacgaauuugaugccagcaucucccaggugaacgagaagaucaaccagucucucgcguuuauucggaaaucggacgaacuguuacacaauguaaacgucggcaagagcacgacaaauauaaugaucaccacuauuaucauugugaucauaguuauccugcuacuccugauugccgugggccuuuucuuguacugcaaggcacgcuccaccccugucacacugucaaaagaucaacucagugggaucaacaauauugcuuucucuaacuga

SEQ ID NO: 19111 - RNA, 1611 nt, Artificial Sequence
  derived and/or modified CDS sequence (opt4) from HRSV(Memphis-37)__AIY60640.1__F_DSCav1_mut8
auggagcugcccauccugaagaccaacgccaucaccaccauccuggccgccgugacccugugcuucgccagcagccagaacaucaccgaggaguucuaccagagcaccugcagcgccgugagcaagggcuaccugggcgcccugagaaccggcugguacaccagcgugaucaccaucgagcugagcaacaucaaggagaucaagugcaacggcaccgacgccaaggugaagcugaucaagcaggagcuggacaaguacaagaacgccgugaccgaccugcagcugcugaugcagagcacccccgccgccggcagcggcagcgccaucgccagcggcaucgccgugugcaaggugcugcaccuggagggcgaggugaacaagaucaagaacgcccugcugagcaccaacaaggccguggugagccugagcggcugcggcgugagcgugcugaccuucaaggugcuggaccugaagaacuacaucgacaagcagcugcugcccauccugaacaagcagagcugcagcauccccaacaucgagaccgugaucgaguuccagcagaagaacaacagacugcuggagaucaccagagaguucagcgugaacgccggcgugaccacccccgugagcaccuacaugcugaccaacagcgagcugcugagccugaucaacgacaugcccaucaccaacgaccagaagaagcugaugagcaacaacgugcagaucgugagacagcagagcuacagcaucaugugcaucaucaaggaggaggugcuggccuacguggugcagcugccccuguacggcgugaucgacacccccugcuggaagcugcacaccagcccccugugcaccaccaacaccaaggagggcagcaacaucugccugaccagaaccgacagaggcugguacugcgacaacgccggcagcgugagcuucuucccccaggccgagaccugcaaggugcagagcaacagaguguucugcgacaccaugaacagccugacccugcccagcgaggugaaccugugcaacaucgacaucuucaaccccaaguacgacugcaagaucaugaccagcaagaccgacgugagcagcagcgugaucaccagccugggcgccaucgugagcugcuacggcaagaccaagugcaccgccagcaacaagugcagaggcaucaucaagaccuucagcaacggcugcgacuacgugagcaacaagggcguggacaccgugagcgugggcaacacccuguacuacgugaacaagcaggagggccagagccuguacgugaagggcgagcccaucaucaacuucuacgacccccugguguuccccagcgacgaguucgacgccagcaucagccaggugaacgagaagaucaaccagagccuggccuucaucagaaagagcgacgagcugcugcacaacgugaacgugggcaagagcaccaccaacaucaugaucaccaccaucaucaucgugaucaucgugauccugcugcugcugaucgccgugggccuguuccuguacugcaaggccagaagcacccccgugacccugagcaaggaccagcugagcggcaucaacaacaucgccuucagcaacuga

SEQ ID NO: 19112 - RNA, 1611 nt, Artificial Sequence
  derived and/or modified CDS sequence (opt5) from HRSV(Memphis-37)__AIY60640.1__F_DSCav1_mut8
auggagcugcccauccucaagaccaacgccauuacaacgauccuggcugccgugacccuuugcuucgcgagcucccagaauauuacagaagaguuuuaccaaucuaccuguagcgcugucuccaaaggcuaucugggggcccucagaacaggaugguacaccucuguuaucacaauugaacugagcaacaucaaggagaucaaaugcaauggcaccgacgccaaggugaaacuuauuaagcaggaacuggauaaguauaaaaacgcugugacggaccuccagcugcugaugcaguccaccccugccgcugggucuggaagcgccaucgcguccggcauugccgucuguaaggugcuccaccuggagggggagguuaauaaaaucaagaacgcccuucugagcacaaauaaagcuguggucucucucuccggaugcggcgugagcguucugaccuucaaggugcuugaucugaagaacuacauugacaaacaacuccugccgauccugaauaagcagucuuguuccauucccaacaucgaaacagucaucgaguuucagcagaaaaauaaccggcuccuggaaauuacccgcgaguucagcgugaaugcuggcgugacgacaccugucucuaccuauaugcuuacaaacuccgagcugcucagccugaucaaugauaugcccauuaccaacgaccaaaagaaacuuauguccaacaauguucagaucgugagacagcagucuuacagcauuaugugcaucaucaaggaagaggugcuggccuaugucgugcaacucccucuguacgggguuauugauacccccuguuggaaacugcauacauccccucucugcacgaccaacacaaaggaaggaagcaauaucugucugacccggacagaccgcggcugguacugcgauaacgcggggucuguguccuuuuucccgcaggccgagaccuguaagguccagagcaauagaguguuuugcgacacgaugaacucucuuacacugcccagcgaaguuaaucucugcaacauugauaucuucaauccuaaauaugacuguaagauuaugaccuccaaaaccgaugugucuagcuccgucaucacaagccugggagcuaucgugucuugcuacggcaagaccaaauguacagccuccaacaagugccgggggauuaucaagacguuuagcaauggaugugacuaugucucuaacaaaggcguggacaccguuuccgugggcaauacacuuuacuaugucaacaagcaagaggggcagagccuguacgugaaaggagagcccauuaucaauuucuaugauccucucguuuuucccuccgacgaguucgaugcuucuauuagccaggugaacgaaaagaucaaccagucccuggccuuuauucgcaaaucugacgaacugcuccacaaugucaacgugggcaagagcaccacaaauaucaugaucaccacgauuaucauugugaucauuguuauccugcuucugcucaucgccgucgggcuguuccuguacugcaaggcuagauccaccccggugacacuuagcaaagaucaacucucuggaauuaacaauaucgcguucuccaacuga

SEQ ID NO: 19113 - RNA, 1611 nt, Artificial Sequence
  derived and/or modified CDS sequence (opt6) from HRSV(Memphis-37)__AIY60640.1__F_DSCav1_mut8
auggaacuuccuauuuuaaaaacaaacgcaauuacaaccauauuagcagcaguaacacuaugcuuugcaucaucacaaaacaucaccgaagaauuuuaucaauccacaugcucagcaguaucaaaaggauaccuuggcgcacuccgaacaggcugguauacaucggucauaacuauagaacucuccaacauaaaagaaauaaaaugcaaugguacugacgcaaaaguaaaauuaauaaaacaagaacuagacaaauacaaaaacgcaguaaccgauuuacaacuacuuaugcaaucaacaccugcagcaggaagcggaucagcaauagcaaguggaauagcaguaugcaaaguacuucaccucgaaggagaaguaaauaaaauaaaaaacgccuuacuaucaacaaauaaagccgucguaucacuuuccgguugcggcguaucaguauuaaccuuuaaagucuuagacuuaaaaaacuacauagacaaacaauuauuaccaauacuaaacaaacaauccuguuccauacccaacauagaaaccguaauagaauuucaacaaaaaaacaacagacuauuagaaauaacacgcgaauuuucaguaaacgcaggcguaacaacaccaguaucaacauauauguuaaccaauucagaauuauuaucccuuauaaaugacaugccuauaacaaacgaccaaaaaaaauuaaugaguaacaacguucaaauaguaagacaacaaucauacagcauaaugugcauaauaaaagaagaaguacuagcauacguaguucaacuaccacucuauggcguuaucgacaccccaugcuggaaacuacauaccucaccacucuguaccacuaauacgaaagaaggaucuaacauaugccuaaccagaacagaucgagguugguauugcgacaaugcuggaucaguaucauucuucccacaagcagaaaccugcaaaguacaaagcaacagaguauuuugugacacuaugaacucacuaacgcuaccuucagaaguaaaccuaugcaacaucgacauauucaacccaaaauacgauugcaaaauaaugacaucaaaaacagacguuuccucaucaguaauaacaucauuaggagcaauaguauccugcuacgguaaaaccaaaugcacagcauccaauaaaugccgaggaaucauuaaaacauuuucaaauggcugcgacuauguaaguaauaaagguguagauacaguaucaguaggcaacacacuauauuacguaaacaaacaagaagggcaaucccuauaugucaaaggcgaaccaauuauaaacuucuacgacccccucguauucccaucagacgaauuugacgcaucaauaucccaaguaaacgaaaaaaucaaccaaucacucgcauucauacguaaauccgacgaauuacuacauaacguaaacguaggcaaaucaacaacaaauauaaugauaacaaccauaaucauaguaauaauaguuauacuccuacuacucauugcagucggccuauuucuauacuguaaagcacgcucuacaccaguaacacuaucuaaagaucaauuauccggaauaaacaacauugccuucuccaauuaa

SEQ ID NO: 19114 - RNA, 1611 nt, Artificial Sequence
  derived and/or modified CDS sequence (opt11) from HRSV(Memphis-37)__AIY60640.1__F_DSCav1_mut8
auggaacuucccauccugaagaccaacgcuaucacaaccauccucgccgcagucacccuuugcuucgccucaucccaaaacaucaccgaagaauuuuaccagucaaccugcucggccgucuccaagggcuaccucggcgcccuccgcacuggcugguacacauccgucaucaccaucgaacucuccaacauaaaagaaauaaaaugcaacggaaccgacgccaaagucaaacucaucaaacaagaacuagauaaauauaaaaacgccgucaccgaccugcaacuccucaugcaauccaccccagccgccggcucuggcagcgccaucgcaagcggaaucgccgucugcaaaguccuccaccuagaaggcgaagucaacaaaauuaaaaacgcccuccucuccaccaacaaagcaguugucucccucucuggcugcggagucucuguacucaccuucaaaguacuagaccucaagaauuacauagacaaacaacuccugcccauccuuaacaaacaaaguuguaguauccccaacaucgaaacaguaaucgaauuucagcagaaaaacaaccgccuccucgaaaucacacgagaguucucggucaacgccggcgucaccacccccguaucaaccuacaugcuaacaaacuccgaacuacuuucccucaucaaugacaugcccauaaccaacgaccaaaagaaacuaauguccaauaacguccagauaguccgucaacaguccuacucaaucaugugcauaauuaaagaagaaguacucgccuacgucguccaacuaccccucuauggagucaucgacacccccugcuggaaacuccacacaucaccccuaugcacaaccaacaccaaagaaggcuccaacaucugccucacaagaaccgaccgcggcugguacugcgacaacgcuggcuccgucucguucuucccacaagccgaaaccugcaaaguccaaucaaaccgggucuucugcgacaccaugaacucccucacucucccaagcgaagucaaccuaugcaacaucgacaucuucaacccaaaauacgacuguaaaaucaugacuucgaaaacagacgucuccucaucaguaaucacauccuuaggcgccaucguguccugcuacgguaagaccaaaugcacagccuccaacaaaugccggggcaucaucaaaaccuucagcaacgguugugauuacgucuccaacaaaggaguagacaccgucuccguaggaaacacccucuacuacgucaacaagcaagaaggccaaucccucuacgucaaaggggaacccaucaucaacuucuacgacccacucgucuuccccuccgacgaguucgacgcaagcaucucccaagucaacgaaaagaucaaccaaucacuagccuucauccgcaaauccgacgaacuccuccacaacguuaacguaggcaaauccaccaccaacaucaugaucacaaccaucaucauagucauaauagucauccuacuacuccucaucgccguaggucuauuccuauacuguaaagcucgaucaacccccgucacacucuccaaagaucaacucucaggaaucaacaacaucgccuucuccaacuaa

SEQ ID NO: 19115 - RNA, 1887 nt, Artificial Sequence
  mRNA product Design a-1 comprising derived and/or modified sequence from HRSV(Memphis-37)__AIY60640.1__F_DSCav1_mut8 (opt1)
gggagagucccgcagucggcguccagcggcucugcuuguucgugugugugucguugcaggccuuauucaagcuuaccauggagcugcccauccucaagaccaacgccaucaccacgauccuggccgcggugacccugugcuucgccagcucccagaacaucaccgaggaguucuaccagagcacgugcuccgccgucagcaagggcuaccucggcgcccugcgcaccgggugguacaccagcgugaucaccaucgagcuguccaacaucaaggagaucaagugcaacggcaccgacgccaaggugaagcucaucaagcaggagcuggacaaguacaagaacgcggucacggaccugcagcuccugaugcagagcaccccggccgccggcuccgggagcgcgaucgccuccggcaucgccgucugcaaggugcugcaccucgagggcgaggugaacaagaucaagaacgcccugcuguccaccaacaaggccgucgugagccucuccggcugcggggugagcguccugaccuucaaggugcuggaccucaagaacuacaucgacaagcagcugcugcccauccugaacaagcagagcugcuccauccccaacaucgagaccgucaucgaguuccagcagaagaacaaccgccuccuggagaucacgcgggaguucagcgugaacgcgggcgugaccacccccgucuccaccuacaugcugacgaacagcgagcuccugucccugaucaacgacaugccgaucaccaacgaccagaagaagcucaugagcaacaacgugcagaucgugcgccagcaguccuacagcaucaugugcaucaucaaggaggagguccuggccuacguggugcagcugccccucuacggggucaucgacacccccugcuggaagcugcacaccagcccccugugcacgaccaacaccaaggagggcuccaacaucugccucacccggacggaccgcgggugguacugcgacaacgccggcagcguguccuucuucccgcaggccgagaccugcaagguccagagcaaccggguguucugcgacaccaugaacucccugacccugcccagcgaggugaaccucugcaacaucgacaucuucaaccccaaguacgacugcaagaucaugacguccaagaccgacgucagcuccagcgugaucaccucccugggcgccaucgugagcugcuacgggaagaccaagugcacggcgagcaacaagugccgcggcaucaucaagaccuucuccaacgggugcgacuacgucagcaacaagggcguggacaccguguccgucggcaacacccuguacuacgugaacaagcaggagggccagagccucuacgugaagggggagcccaucaucaacuucuacgacccgcuggucuuccccuccgacgaguucgacgccagcaucucccaggugaacgagaagaucaaccagagccuggccuucauccggaaguccgacgagcuccugcacaacgugaacgucggcaagagcaccacgaacaucaugaucaccaccaucaucaucgugaucaucgugauccugcugcuccugaucgccgucgggcuguuccucuacugcaaggcccgcuccacccccgugacgcugagcaaggaccagcuguccgggaucaacaacaucgcguucagcaacugaggacuagucccuguucccagagcccacuuuuuuuucuuuuuuugaaauaaaauagccugucuuucagaucuaaaaaaaaaaaaaaaaaaaaaaaaaaaaaaaaaaaaaaaaaaaaaaaaaaaaaaaaaaaaaaaaugcaucccccccccccccccccccccccccccccccaaaggcucuuuucagagccaccagaauu

SEQ ID NO: 19116 - RNA, 1887 nt, Artificial Sequence
  mRNA product Design a-1 comprising derived and/or modified sequence from HRSV(Memphis-37)__AIY60640.1__F_DSCav1_mut8 (opt1)
gggagagucccgcagucggcguccagcggcucugcuuguucgugugugugucguugcaggccuuauucaagcuuaccauggagcugcccauccucaagaccaacgccaucaccacgauccuggccgcggugacccugugcuucgccagcucccagaacaucaccgaggaguucuaccagagcacgugcuccgccgucagcaagggcuaccucggggcccugcgcaccggcugguacaccuccgugaucaccaucgagcugagcaacaucaaggagaucaagugcaacgggaccgacgccaaggugaagcucaucaagcaggagcuggacaaguacaagaacgcggucacggaccugcagcuccugaugcaguccaccccggccgccggcagcggguccgccaucgcgagcggcaucgccgugugcaaggugcugcaccucgagggcgaggucaacaagaucaagaacgcccugcuguccaccaacaaggccguggugagccucuccgggugcggcgucagcgugcugaccuucaaggugcuggaccucaagaacuacaucgacaagcagcugcugcccauccucaacaagcaguccugcagcauccccaacaucgagacggucaucgaguuccagcagaagaacaaccggcugcuggagaucacccgcgaguucuccgugaacgccggggugaccacccccgucagcacguacaugcucaccaacuccgagcugcugagccucaucaacgacaugccgaucaccaacgaccagaagaagcugaugagcaacaacgugcagaucgugcggcagcaguccuacagcaucaugugcaucaucaaggaggagguccuggcguacguggugcagcucccccuguacggcgucaucgacacccccugcuggaagcugcacacgagcccccucugcaccaccaacaccaaggagggguccaacaucugccugacgcgcaccgaccggggcugguacugcgacaacgccggcuccgugagcuucuucccgcaggccgagaccugcaaggugcaguccaaccgcgucuucugcgacaccaugaacagccugacgcuccccuccgaggugaaccugugcaacaucgacaucuucaaccccaaguacgacugcaagaucaugaccagcaagaccgacgucuccagcuccgugaucaccagccugggggccaucguguccugcuacggcaagacgaagugcaccgccagcaacaagugccgggggaucaucaagaccuucuccaacggcugcgacuacgucagcaacaagggcguggacaccguguccgucgggaacacgcucuacuacgugaacaagcaggagggccagagccuguacgugaagggggagcccaucaucaacuucuacgacccgcuggucuuccccagcgacgaguucgacgcguccaucagccaggugaacgagaagaucaaccagucccucgccuucauccgcaagagcgacgagcugcugcacaacgugaacgucggcaaguccaccaccaacaucaugaucaccaccaucaucaucgugaucaucgugauccuccugcugcucaucgccgucgggcuguuccuguacugcaaggcccggagcacgcccgugacccuguccaaggaccagcucagcggcaucaacaacaucgccuucuccaacugaggacuagucccuguucccagagcccacuuuuuuuucuuuuuuugaaauaaaauagccugucuuucagaucuaaaaaaaaaaaaaaaaaaaaaaaaaaaaaaaaaaaaaaaaaaaaaaaaaaaaaaaaaaaaaaaaugcaucccccccccccccccccccccccccccccccaaaggcucuuuucagagccaccagaauu

SEQ ID NO: 19117 - RNA, 1887 nt, Artificial Sequence
  mRNA product Design a-1 comprising derived and/or modified sequence from HRSV(Memphis-37)__AIY60640.1__F_DSCav1_mut8 (opt2)
gggagagucccgcagucggcguccagcggcucugcuuguucgugugugugucguugcaggccuuauucaagcuuaccauggagcuccccauccucaagaccaacgccaucaccaccauccucgccgccgucacccucugcuucgccuccucccagaacaucaccgaggaguucuaccaguccaccugcuccgccgucuccaagggcuaccucggcgcccuccgcaccggcugguacaccuccgucaucaccaucgagcucuccaacaucaaggagaucaagugcaacggcaccgacgccaaggucaagcucaucaagcaggagcucgacaaguacaagaacgccgucaccgaccuccagcuccucaugcaguccacccccgccgccggcuccggcuccgccaucgccuccggcaucgccgucugcaagguccuccaccucgagggcgaggucaacaagaucaagaacgcccuccucuccaccaacaaggccgucgucucccucuccggcugcggcgucuccguccucaccuucaagguccucgaccucaagaacuacaucgacaagcagcuccuccccauccucaacaagcaguccugcuccauccccaacaucgagaccgucaucgaguuccagcagaagaacaaccgccuccucgagaucacccgcgaguucuccgucaacgccggcgucaccacccccgucuccaccuacaugcucaccaacuccgagcuccucucccucaucaacgacaugcccaucaccaacgaccagaagaagcucauguccaacaacguccagaucguccgccagcaguccuacuccaucaugugcaucaucaaggaggagguccucgccuacgucguccagcucccccucuacggcgucaucgacacccccugcuggaagcuccacaccuccccccucugcaccaccaacaccaaggagggcuccaacaucugccucacccgcaccgaccgcggcugguacugcgacaacgccggcuccgucuccuucuucccccaggccgagaccugcaagguccaguccaaccgcgucuucugcgacaccaugaacucccucacccuccccuccgaggucaaccucugcaacaucgacaucuucaaccccaaguacgacugcaagaucaugaccuccaagaccgacgucuccuccuccgucaucaccucccucggcgccaucgucuccugcuacggcaagaccaagugcaccgccuccaacaagugccgcggcaucaucaagaccuucuccaacggcugcgacuacgucuccaacaagggcgucgacaccgucuccgucggcaacacccucuacuacgucaacaagcaggagggccagucccucuacgucaagggcgagcccaucaucaacuucuacgacccccucgucuuccccuccgacgaguucgacgccuccaucucccaggucaacgagaagaucaaccagucccucgccuucauccgcaaguccgacgagcuccuccacaacgucaacgucggcaaguccaccaccaacaucaugaucaccaccaucaucaucgucaucaucgucauccuccuccuccucaucgccgucggccucuuccucuacugcaaggcccgcuccacccccgucacccucuccaaggaccagcucuccggcaucaacaacaucgccuucuccaacugaggacuagucccuguucccagagcccacuuuuuuuucuuuuuuugaaauaaaauagccugucuuucagaucuaaaaaaaaaaaaaaaaaaaaaaaaaaaaaaaaaaaaaaaaaaaaaaaaaaaaaaaaaaaaaaaaugcaucccccccccccccccccccccccccccccccaaaggcucuuuucagagccaccagaauu

SEQ ID NO: 19118 - RNA, 1887 nt, Artificial Sequence
  mRNA product Design a-1 comprising derived and/or modified sequence from HRSV(Memphis-37)__AIY60640.1__F_DSCav1_mut8 (opt3)
gggagagucccgcagucggcguccagcggcucugcuuguucgugugugugucguugcaggccuuauucaagcuuaccauggagcugcccauccucaagaccaacgccauuacaacuauacuugcugcagugacgcugugcuucgccagcucccagaauaucaccgaagaguuuuaccaaucuacauguucagcggucaguaaaggcuauuugggggcuuuaagaacuggaugguacaccagcguuauuacaaucgaacuguccaacauuaaggagaucaaaugcaaugguaccgacgccaaggugaaacuaauaaagcaggaacucgauaaguauaaaaacgcaguaacugaccugcagcuucugaugcagucuacuccugccgcuggcucggggucagcaaucgccagcggaauugcuguguguaaggucuugcaccucgagggcgaggugaauaaaaucaagaacgcccugcugaguaccaauaaagcgguugugucccucucugguugcggggucagcguguuaacguucaagguacuggaucuuaagaacuacauugacaaacaauugcugccaauccuaaauaagcaguccuguucaauaccgaacauugaaacuguuaucgaguuucagcagaaaaauaacaggcuccuggaaauuacccgggaguucagugugaaugcaggagucacaacucccgugagcaccuauaugcuuacaaacucugagcuguugucccucaucaaugauaugccuaucaccaacgaccaaaagaaacugaugucaaacaaugugcagauuguccgccagcagagcuacaguauaaugugcaucauuaaggaagagguuuuagccuaugugguacaacugccacucuacggcgugaucgauacgcccuguuggaaacuucauacuucuccucugugcacaaccaacacuaaggaaggcuccaauauauguuugacacgaaccgaccgugggugguacugcgauaacgcuggaagcgucucguuuuucccacaggccgagacguguaaggugcagucuaauagaguuuucugcgacaccaugaacucccuaacacugcccucagaagugaaucucugcaacauugauaucuucaauccuaaauaugacuguaagaucaugacaaguaaaaccgaugucagcuccucugugauuacaagccugggugcaaucguaucaugcuacggcaagacuaaauguaccgcuaguaacaagugcagggggauuauaaagacauuuuccaauggaugugacuauguuagcaacaaaggcguggacaccgucucuguggguaauacucuuuacuaugucaacaagcaagaggggcagucacuguacgugaaaggagagccaaucauuaauuucuaugauccguugguuuuucccagugacgaauuugaugccagcaucucccaggugaacgagaagaucaaccagucucucgcguuuauucggaaaucggacgaacuguuacacaauguaaacgucggcaagagcacgacaaauauaaugaucaccacuauuaucauugugaucauaguuauccugcuacuccugauugccgugggccuuuucuuguacugcaaggcacgcuccaccccugucacacugucaaaagaucaacucagugggaucaacaauauugcuuucucuaacugaggacuagucccuguucccagagcccacuuuuuuuucuuuuuuugaaauaaaauagccugucuuucagaucuaaaaaaaaaaaaaaaaaaaaaaaaaaaaaaaaaaaaaaaaaaaaaaaaaaaaaaaaaaaaaaaaugcaucccccccccccccccccccccccccccccccaaaggcucuuuucagagccaccagaauu

SEQ ID NO: 19119 - RNA, 1887 nt, Artificial Sequence
  mRNA product Design a-1 comprising derived and/or modified sequence from HRSV(Memphis-37)__AIY60640.1__F_DSCav1_mut8 (opt4)
gggagagucccgcagucggcguccagcggcucugcuuguucgugugugugucguugcaggccuuauucaagcuuaccauggagcugcccauccugaagaccaacgccaucaccaccauccuggccgccgugacccugugcuucgccagcagccagaacaucaccgaggaguucuaccagagcaccugcagcgccgugagcaagggcuaccugggcgcccugagaaccggcugguacaccagcgugaucaccaucgagcugagcaacaucaaggagaucaagugcaacggcaccgacgccaaggugaagcugaucaagcaggagcuggacaaguacaagaacgccgugaccgaccugcagcugcugaugcagagcacccccgccgccggcagcggcagcgccaucgccagcggcaucgccgugugcaaggugcugcaccuggagggcgaggugaacaagaucaagaacgcccugcugagcaccaacaaggccguggugagccugagcggcugcggcgugagcgugcugaccuucaaggugcuggaccugaagaacuacaucgacaagcagcugcugcccauccugaacaagcagagcugcagcauccccaacaucgagaccgugaucgaguuccagcagaagaacaacagacugcuggagaucaccagagaguucagcgugaacgccggcgugaccacccccgugagcaccuacaugcugaccaacagcgagcugcugagccugaucaacgacaugcccaucaccaacgaccagaagaagcugaugagcaacaacgugcagaucgugagacagcagagcuacagcaucaugugcaucaucaaggaggaggugcuggccuacguggugcagcugccccuguacggcgugaucgacacccccugcuggaagcugcacaccagcccccugugcaccaccaacaccaaggagggcagcaacaucugccugaccagaaccgacagaggcugguacugcgacaacgccggcagcgugagcuucuucccccaggccgagaccugcaaggugcagagcaacagaguguucugcgacaccaugaacagccugacccugcccagcgaggugaaccugugcaacaucgacaucuucaaccccaaguacgacugcaagaucaugaccagcaagaccgacgugagcagcagcgugaucaccagccugggcgccaucgugagcugcuacggcaagaccaagugcaccgccagcaacaagugcagaggcaucaucaagaccuucagcaacggcugcgacuacgugagcaacaagggcguggacaccgugagcgugggcaacacccuguacuacgugaacaagcaggagggccagagccuguacgugaagggcgagcccaucaucaacuucuacgacccccugguguuccccagcgacgaguucgacgccagcaucagccaggugaacgagaagaucaaccagagccuggccuucaucagaaagagcgacgagcugcugcacaacgugaacgugggcaagagcaccaccaacaucaugaucaccaccaucaucaucgugaucaucgugauccugcugcugcugaucgccgugggccuguuccuguacugcaaggccagaagcacccccgugacccugagcaaggaccagcugagcggcaucaacaacaucgccuucagcaacugaggacuagucccuguucccagagcccacuuuuuuuucuuuuuuugaaauaaaauagccugucuuucagaucuaaaaaaaaaaaaaaaaaaaaaaaaaaaaaaaaaaaaaaaaaaaaaaaaaaaaaaaaaaaaaaaaugcaucccccccccccccccccccccccccccccccaaaggcucuuuucagagccaccagaauu

SEQ ID NO: 19120 - RNA, 1887 nt, Artificial Sequence
  mRNA product Design a-1 comprising derived and/or modified sequence from HRSV(Memphis-37)__AIY60640.1__F_DSCav1_mut8 (opt5)
gggagagucccgcagucggcguccagcggcucugcuuguucgugugugugucguugcaggccuuauucaagcuuaccauggagcugcccauccucaagaccaacgccauuacaacgauccuggcugccgugacccuuugcuucgcgagcucccagaauauuacagaagaguuuuaccaaucuaccuguagcgcugucuccaaaggcuaucugggggcccucagaacaggaugguacaccucuguuaucacaauugaacugagcaacaucaaggagaucaaaugcaauggcaccgacgccaaggugaaacuuauuaagcaggaacuggauaaguauaaaaacgcugugacggaccuccagcugcugaugcaguccaccccugccgcugggucuggaagcgccaucgcguccggcauugccgucuguaaggugcuccaccuggagggggagguuaauaaaaucaagaacgcccuucugagcacaaauaaagcuguggucucucucuccggaugcggcgugagcguucugaccuucaaggugcuugaucugaagaacuacauugacaaacaacuccugccgauccugaauaagcagucuuguuccauucccaacaucgaaacagucaucgaguuucagcagaaaaauaaccggcuccuggaaauuacccgcgaguucagcgugaaugcuggcgugacgacaccugucucuaccuauaugcuuacaaacuccgagcugcucagccugaucaaugauaugcccauuaccaacgaccaaaagaaacuuauguccaacaauguucagaucgugagacagcagucuuacagcauuaugugcaucaucaaggaagaggugcuggccuaugucgugcaacucccucuguacgggguuauugauacccccuguuggaaacugcauacauccccucucugcacgaccaacacaaaggaaggaagcaauaucugucugacccggacagaccgcggcugguacugcgauaacgcggggucuguguccuuuuucccgcaggccgagaccuguaagguccagagcaauagaguguuuugcgacacgaugaacucucuuacacugcccagcgaaguuaaucucugcaacauugauaucuucaauccuaaauaugacuguaagauuaugaccuccaaaaccgaugugucuagcuccgucaucacaagccugggagcuaucgugucuugcuacggcaagaccaaauguacagccuccaacaagugccgggggauuaucaagacguuuagcaauggaugugacuaugucucuaacaaaggcguggacaccguuuccgugggcaauacacuuuacuaugucaacaagcaagaggggcagagccuguacgugaaaggagagcccauuaucaauuucuaugauccucucguuuuucccuccgacgaguucgaugcuucuauuagccaggugaacgaaaagaucaaccagucccuggccuuuauucgcaaaucugacgaacugcuccacaaugucaacgugggcaagagcaccacaaauaucaugaucaccacgauuaucauugugaucauuguuauccugcuucugcucaucgccgucgggcuguuccuguacugcaaggcuagauccaccccggugacacuuagcaaagaucaacucucuggaauuaacaauaucgcguucuccaacugaggacuagucccuguucccagagcccacuuuuuuuucuuuuuuugaaauaaaauagccugucuuucagaucuaaaaaaaaaaaaaaaaaaaaaaaaaaaaaaaaaaaaaaaaaaaaaaaaaaaaaaaaaaaaaaaaugcaucccccccccccccccccccccccccccccccaaaggcucuuuucagagccaccagaauu

SEQ ID NO: 19121 - RNA, 1887 nt, Artificial Sequence
  mRNA product Design a-1 comprising derived and/or modified sequence from HRSV(Memphis-37)__AIY60640.1__F_DSCav1_mut8 (opt6)
gggagagucccgcagucggcguccagcggcucugcuuguucgugugugugucguugcaggccuuauucaagcuuaccauggaacuuccuauuuuaaaaacaaacgcaauuacaaccauauuagcagcaguaacacuaugcuuugcaucaucacaaaacaucaccgaagaauuuuaucaauccacaugcucagcaguaucaaaaggauaccuuggcgcacuccgaacaggcugguauacaucggucauaacuauagaacucuccaacauaaaagaaauaaaaugcaaugguacugacgcaaaaguaaaauuaauaaaacaagaacuagacaaauacaaaaacgcaguaaccgauuuacaacuacuuaugcaaucaacaccugcagcaggaagcggaucagcaauagcaaguggaauagcaguaugcaaaguacuucaccucgaaggagaaguaaauaaaauaaaaaacgccuuacuaucaacaaauaaagccgucguaucacuuuccgguugcggcguaucaguauuaaccuuuaaagucuuagacuuaaaaaacuacauagacaaacaauuauuaccaauacuaaacaaacaauccuguuccauacccaacauagaaaccguaauagaauuucaacaaaaaaacaacagacuauuagaaauaacacgcgaauuuucaguaaacgcaggcguaacaacaccaguaucaacauauauguuaaccaauucagaauuauuaucccuuauaaaugacaugccuauaacaaacgaccaaaaaaaauuaaugaguaacaacguucaaauaguaagacaacaaucauacagcauaaugugcauaauaaaagaagaaguacuagcauacguaguucaacuaccacucuauggcguuaucgacaccccaugcuggaaacuacauaccucaccacucuguaccacuaauacgaaagaaggaucuaacauaugccuaaccagaacagaucgagguugguauugcgacaaugcuggaucaguaucauucuucccacaagcagaaaccugcaaaguacaaagcaacagaguauuuugugacacuaugaacucacuaacgcuaccuucagaaguaaaccuaugcaacaucgacauauucaacccaaaauacgauugcaaaauaaugacaucaaaaacagacguuuccucaucaguaauaacaucauuaggagcaauaguauccugcuacgguaaaaccaaaugcacagcauccaauaaaugccgaggaaucauuaaaacauuuucaaauggcugcgacuauguaaguaauaaagguguagauacaguaucaguaggcaacacacuauauuacguaaacaaacaagaagggcaaucccuauaugucaaaggcgaaccaauuauaaacuucuacgacccccucguauucccaucagacgaauuugacgcaucaauaucccaaguaaacgaaaaaaucaaccaaucacucgcauucauacguaaauccgacgaauuacuacauaacguaaacguaggcaaaucaacaacaaauauaaugauaacaaccauaaucauaguaauaauaguuauacuccuacuacucauugcagucggccuauuucuauacuguaaagcacgcucuacaccaguaacacuaucuaaagaucaauuauccggaauaaacaacauugccuucuccaauuaaggacuagucccuguucccagagcccacuuuuuuuucuuuuuuugaaauaaaauagccugucuuucagaucuaaaaaaaaaaaaaaaaaaaaaaaaaaaaaaaaaaaaaaaaaaaaaaaaaaaaaaaaaaaaaaaaugcaucccccccccccccccccccccccccccccccaaaggcucuuuucagagccaccagaauu

SEQ ID NO: 19122 - RNA, 1887 nt, Artificial Sequence
  mRNA product Design a-1 comprising derived and/or modified sequence from HRSV(Memphis-37)__AIY60640.1__F_DSCav1_mut8 (opt11)
gggagagucccgcagucggcguccagcggcucugcuuguucgugugugugucguugcaggccuuauucaagcuuaccauggaacuucccauccugaagaccaacgcuaucacaaccauccucgccgcagucacccuuugcuucgccucaucccaaaacaucaccgaagaauuuuaccagucaaccugcucggccgucuccaagggcuaccucggcgcccuccgcacuggcugguacacauccgucaucaccaucgaacucuccaacauaaaagaaauaaaaugcaacggaaccgacgccaaagucaaacucaucaaacaagaacuagauaaauauaaaaacgccgucaccgaccugcaacuccucaugcaauccaccccagccgccggcucuggcagcgccaucgcaagcggaaucgccgucugcaaaguccuccaccuagaaggcgaagucaacaaaauuaaaaacgcccuccucuccaccaacaaagcaguugucucccucucuggcugcggagucucuguacucaccuucaaaguacuagaccucaagaauuacauagacaaacaacuccugcccauccuuaacaaacaaaguuguaguauccccaacaucgaaacaguaaucgaauuucagcagaaaaacaaccgccuccucgaaaucacacgagaguucucggucaacgccggcgucaccacccccguaucaaccuacaugcuaacaaacuccgaacuacuuucccucaucaaugacaugcccauaaccaacgaccaaaagaaacuaauguccaauaacguccagauaguccgucaacaguccuacucaaucaugugcauaauuaaagaagaaguacucgccuacgucguccaacuaccccucuauggagucaucgacacccccugcuggaaacuccacacaucaccccuaugcacaaccaacaccaaagaaggcuccaacaucugccucacaagaaccgaccgcggcugguacugcgacaacgcuggcuccgucucguucuucccacaagccgaaaccugcaaaguccaaucaaaccgggucuucugcgacaccaugaacucccucacucucccaagcgaagucaaccuaugcaacaucgacaucuucaacccaaaauacgacuguaaaaucaugacuucgaaaacagacgucuccucaucaguaaucacauccuuaggcgccaucguguccugcuacgguaagaccaaaugcacagccuccaacaaaugccggggcaucaucaaaaccuucagcaacgguugugauuacgucuccaacaaaggaguagacaccgucuccguaggaaacacccucuacuacgucaacaagcaagaaggccaaucccucuacgucaaaggggaacccaucaucaacuucuacgacccacucgucuuccccuccgacgaguucgacgcaagcaucucccaagucaacgaaaagaucaaccaaucacuagccuucauccgcaaauccgacgaacuccuccacaacguuaacguaggcaaauccaccaccaacaucaugaucacaaccaucaucauagucauaauagucauccuacuacuccucaucgccguaggucuauuccuauacuguaaagcucgaucaacccccgucacacucuccaaagaucaacucucaggaaucaacaacaucgccuucuccaacuaaggacuagucccuguucccagagcccacuuuuuuuucuuuuuuugaaauaaaauagccugucuuucagaucuaaaaaaaaaaaaaaaaaaaaaaaaaaaaaaaaaaaaaaaaaaaaaaaaaaaaaaaaaaaaaaaaugcaucccccccccccccccccccccccccccccccaaaggcucuuuucagagccaccagaauu

SEQ ID NO: 19123 - RNA, 1906 nt, Artificial Sequence
  mRNA product Design a-2 comprising derived and/or modified sequence from HRSV(Memphis-37)__AIY60640.1__F_DSCav1_mut8 (opt1)
gggagaguccgcucagccagguugcagaagcggcuuagcguguguccuaaucuucucucugcguguagguaggccugugccgcaaacaagcuuaccauggagcugcccauccucaagaccaacgccaucaccacgauccuggccgcggugacccugugcuucgccagcucccagaacaucaccgaggaguucuaccagagcacgugcuccgccgucagcaagggcuaccucggcgcccugcgcaccgggugguacaccagcgugaucaccaucgagcuguccaacaucaaggagaucaagugcaacggcaccgacgccaaggugaagcucaucaagcaggagcuggacaaguacaagaacgcggucacggaccugcagcuccugaugcagagcaccccggccgccggcuccgggagcgcgaucgccuccggcaucgccgucugcaaggugcugcaccucgagggcgaggugaacaagaucaagaacgcccugcuguccaccaacaaggccgucgugagccucuccggcugcggggugagcguccugaccuucaaggugcuggaccucaagaacuacaucgacaagcagcugcugcccauccugaacaagcagagcugcuccauccccaacaucgagaccgucaucgaguuccagcagaagaacaaccgccuccuggagaucacgcgggaguucagcgugaacgcgggcgugaccacccccgucuccaccuacaugcugacgaacagcgagcuccugucccugaucaacgacaugccgaucaccaacgaccagaagaagcucaugagcaacaacgugcagaucgugcgccagcaguccuacagcaucaugugcaucaucaaggaggagguccuggccuacguggugcagcugccccucuacggggucaucgacacccccugcuggaagcugcacaccagcccccugugcacgaccaacaccaaggagggcuccaacaucugccucacccggacggaccgcgggugguacugcgacaacgccggcagcguguccuucuucccgcaggccgagaccugcaagguccagagcaaccggguguucugcgacaccaugaacucccugacccugcccagcgaggugaaccucugcaacaucgacaucuucaaccccaaguacgacugcaagaucaugacguccaagaccgacgucagcuccagcgugaucaccucccugggcgccaucgugagcugcuacgggaagaccaagugcacggcgagcaacaagugccgcggcaucaucaagaccuucuccaacgggugcgacuacgucagcaacaagggcguggacaccguguccgucggcaacacccuguacuacgugaacaagcaggagggccagagccucuacgugaagggggagcccaucaucaacuucuacgacccgcuggucuuccccuccgacgaguucgacgccagcaucucccaggugaacgagaagaucaaccagagccuggccuucauccggaaguccgacgagcuccugcacaacgugaacgucggcaagagcaccacgaacaucaugaucaccaccaucaucaucgugaucaucgugauccugcugcuccugaucgccgucgggcuguuccucuacugcaaggcccgcuccacccccgugacgcugagcaaggaccagcuguccgggaucaacaacaucgcguucagcaacugaggacuagucccuguucccagagcccacuuuuuuuucuuuuuuugaaauaaaauagccugucuuucagaucuaaaaaaaaaaaaaaaaaaaaaaaaaaaaaaaaaaaaaaaaaaaaaaaaaaaaaaaaaaaaaaaaugcaucccccccccccccccccccccccccccccccaaaggcucuuuucagagccaccagaauu

SEQ ID NO: 19124 - RNA, 1906 nt, Artificial Sequence
  mRNA product Design a-2 comprising derived and/or modified sequence from HRSV(Memphis-37)__AIY60640.1__F_DSCav1_mut8 (opt1)
gggagaguccgcucagccagguugcagaagcggcuuagcguguguccuaaucuucucucugcguguagguaggccugugccgcaaacaagcuuaccauggagcugcccauccucaagaccaacgccaucaccacgauccuggccgcggugacccugugcuucgccagcucccagaacaucaccgaggaguucuaccagagcacgugcuccgccgucagcaagggcuaccucggggcccugcgcaccggcugguacaccuccgugaucaccaucgagcugagcaacaucaaggagaucaagugcaacgggaccgacgccaaggugaagcucaucaagcaggagcuggacaaguacaagaacgcggucacggaccugcagcuccugaugcaguccaccccggccgccggcagcggguccgccaucgcgagcggcaucgccgugugcaaggugcugcaccucgagggcgaggucaacaagaucaagaacgcccugcuguccaccaacaaggccguggugagccucuccgggugcggcgucagcgugcugaccuucaaggugcuggaccucaagaacuacaucgacaagcagcugcugcccauccucaacaagcaguccugcagcauccccaacaucgagacggucaucgaguuccagcagaagaacaaccggcugcuggagaucacccgcgaguucuccgugaacgccggggugaccacccccgucagcacguacaugcucaccaacuccgagcugcugagccucaucaacgacaugccgaucaccaacgaccagaagaagcugaugagcaacaacgugcagaucgugcggcagcaguccuacagcaucaugugcaucaucaaggaggagguccuggcguacguggugcagcucccccuguacggcgucaucgacacccccugcuggaagcugcacacgagcccccucugcaccaccaacaccaaggagggguccaacaucugccugacgcgcaccgaccggggcugguacugcgacaacgccggcuccgugagcuucuucccgcaggccgagaccugcaaggugcaguccaaccgcgucuucugcgacaccaugaacagccugacgcuccccuccgaggugaaccugugcaacaucgacaucuucaaccccaaguacgacugcaagaucaugaccagcaagaccgacgucuccagcuccgugaucaccagccugggggccaucguguccugcuacggcaagacgaagugcaccgccagcaacaagugccgggggaucaucaagaccuucuccaacggcugcgacuacgucagcaacaagggcguggacaccguguccgucgggaacacgcucuacuacgugaacaagcaggagggccagagccuguacgugaagggggagcccaucaucaacuucuacgacccgcuggucuuccccagcgacgaguucgacgcguccaucagccaggugaacgagaagaucaaccagucccucgccuucauccgcaagagcgacgagcugcugcacaacgugaacgucggcaaguccaccaccaacaucaugaucaccaccaucaucaucgugaucaucgugauccuccugcugcucaucgccgucgggcuguuccuguacugcaaggcccggagcacgcccgugacccuguccaaggaccagcucagcggcaucaacaacaucgccuucuccaacugaggacuagucccuguucccagagcccacuuuuuuuucuuuuuuugaaauaaaauagccugucuuucagaucuaaaaaaaaaaaaaaaaaaaaaaaaaaaaaaaaaaaaaaaaaaaaaaaaaaaaaaaaaaaaaaaaugcaucccccccccccccccccccccccccccccccaaaggcucuuuucagagccaccagaauu

SEQ ID NO: 19125 - RNA, 1906 nt, Artificial Sequence
  mRNA product Design a-2 comprising derived and/or modified sequence from HRSV(Memphis-37)__AIY60640.1__F_DSCav1_mut8 (opt2)
gggagaguccgcucagccagguugcagaagcggcuuagcguguguccuaaucuucucucugcguguagguaggccugugccgcaaacaagcuuaccauggagcuccccauccucaagaccaacgccaucaccaccauccucgccgccgucacccucugcuucgccuccucccagaacaucaccgaggaguucuaccaguccaccugcuccgccgucuccaagggcuaccucggcgcccuccgcaccggcugguacaccuccgucaucaccaucgagcucuccaacaucaaggagaucaagugcaacggcaccgacgccaaggucaagcucaucaagcaggagcucgacaaguacaagaacgccgucaccgaccuccagcuccucaugcaguccacccccgccgccggcuccggcuccgccaucgccuccggcaucgccgucugcaagguccuccaccucgagggcgaggucaacaagaucaagaacgcccuccucuccaccaacaaggccgucgucucccucuccggcugcggcgucuccguccucaccuucaagguccucgaccucaagaacuacaucgacaagcagcuccuccccauccucaacaagcaguccugcuccauccccaacaucgagaccgucaucgaguuccagcagaagaacaaccgccuccucgagaucacccgcgaguucuccgucaacgccggcgucaccacccccgucuccaccuacaugcucaccaacuccgagcuccucucccucaucaacgacaugcccaucaccaacgaccagaagaagcucauguccaacaacguccagaucguccgccagcaguccuacuccaucaugugcaucaucaaggaggagguccucgccuacgucguccagcucccccucuacggcgucaucgacacccccugcuggaagcuccacaccuccccccucugcaccaccaacaccaaggagggcuccaacaucugccucacccgcaccgaccgcggcugguacugcgacaacgccggcuccgucuccuucuucccccaggccgagaccugcaagguccaguccaaccgcgucuucugcgacaccaugaacucccucacccuccccuccgaggucaaccucugcaacaucgacaucuucaaccccaaguacgacugcaagaucaugaccuccaagaccgacgucuccuccuccgucaucaccucccucggcgccaucgucuccugcuacggcaagaccaagugcaccgccuccaacaagugccgcggcaucaucaagaccuucuccaacggcugcgacuacgucuccaacaagggcgucgacaccgucuccgucggcaacacccucuacuacgucaacaagcaggagggccagucccucuacgucaagggcgagcccaucaucaacuucuacgacccccucgucuuccccuccgacgaguucgacgccuccaucucccaggucaacgagaagaucaaccagucccucgccuucauccgcaaguccgacgagcuccuccacaacgucaacgucggcaaguccaccaccaacaucaugaucaccaccaucaucaucgucaucaucgucauccuccuccuccucaucgccgucggccucuuccucuacugcaaggcccgcuccacccccgucacccucuccaaggaccagcucuccggcaucaacaacaucgccuucuccaacugaggacuagucccuguucccagagcccacuuuuuuuucuuuuuuugaaauaaaauagccugucuuucagaucuaaaaaaaaaaaaaaaaaaaaaaaaaaaaaaaaaaaaaaaaaaaaaaaaaaaaaaaaaaaaaaaaugcaucccccccccccccccccccccccccccccccaaaggcucuuuucagagccaccagaauu

SEQ ID NO: 19126 - RNA, 1906 nt, Artificial Sequence
  mRNA product Design a-2 comprising derived and/or modified sequence from HRSV(Memphis-37)__AIY60640.1__F_DSCav1_mut8 (opt3)
gggagaguccgcucagccagguugcagaagcggcuuagcguguguccuaaucuucucucugcguguagguaggccugugccgcaaacaagcuuaccauggagcugcccauccucaagaccaacgccauuacaacuauacuugcugcagugacgcugugcuucgccagcucccagaauaucaccgaagaguuuuaccaaucuacauguucagcggucaguaaaggcuauuugggggcuuuaagaacuggaugguacaccagcguuauuacaaucgaacuguccaacauuaaggagaucaaaugcaaugguaccgacgccaaggugaaacuaauaaagcaggaacucgauaaguauaaaaacgcaguaacugaccugcagcuucugaugcagucuacuccugccgcuggcucggggucagcaaucgccagcggaauugcuguguguaaggucuugcaccucgagggcgaggugaauaaaaucaagaacgcccugcugaguaccaauaaagcgguugugucccucucugguugcggggucagcguguuaacguucaagguacuggaucuuaagaacuacauugacaaacaauugcugccaauccuaaauaagcaguccuguucaauaccgaacauugaaacuguuaucgaguuucagcagaaaaauaacaggcuccuggaaauuacccgggaguucagugugaaugcaggagucacaacucccgugagcaccuauaugcuuacaaacucugagcuguugucccucaucaaugauaugccuaucaccaacgaccaaaagaaacugaugucaaacaaugugcagauuguccgccagcagagcuacaguauaaugugcaucauuaaggaagagguuuuagccuaugugguacaacugccacucuacggcgugaucgauacgcccuguuggaaacuucauacuucuccucugugcacaaccaacacuaaggaaggcuccaauauauguuugacacgaaccgaccgugggugguacugcgauaacgcuggaagcgucucguuuuucccacaggccgagacguguaaggugcagucuaauagaguuuucugcgacaccaugaacucccuaacacugcccucagaagugaaucucugcaacauugauaucuucaauccuaaauaugacuguaagaucaugacaaguaaaaccgaugucagcuccucugugauuacaagccugggugcaaucguaucaugcuacggcaagacuaaauguaccgcuaguaacaagugcagggggauuauaaagacauuuuccaauggaugugacuauguuagcaacaaaggcguggacaccgucucuguggguaauacucuuuacuaugucaacaagcaagaggggcagucacuguacgugaaaggagagccaaucauuaauuucuaugauccguugguuuuucccagugacgaauuugaugccagcaucucccaggugaacgagaagaucaaccagucucucgcguuuauucggaaaucggacgaacuguuacacaauguaaacgucggcaagagcacgacaaauauaaugaucaccacuauuaucauugugaucauaguuauccugcuacuccugauugccgugggccuuuucuuguacugcaaggcacgcuccaccccugucacacugucaaaagaucaacucagugggaucaacaauauugcuuucucuaacugaggacuagucccuguucccagagcccacuuuuuuuucuuuuuuugaaauaaaauagccugucuuucagaucuaaaaaaaaaaaaaaaaaaaaaaaaaaaaaaaaaaaaaaaaaaaaaaaaaaaaaaaaaaaaaaaaugcaucccccccccccccccccccccccccccccccaaaggcucuuuucagagccaccagaauu

SEQ ID NO: 19127 - RNA, 1906 nt, Artificial Sequence
  mRNA product Design a-2 comprising derived and/or modified sequence from HRSV(Memphis-37)__AIY60640.1__F_DSCav1_mut8 (opt4)
gggagaguccgcucagccagguugcagaagcggcuuagcguguguccuaaucuucucucugcguguagguaggccugugccgcaaacaagcuuaccauggagcugcccauccugaagaccaacgccaucaccaccauccuggccgccgugacccugugcuucgccagcagccagaacaucaccgaggaguucuaccagagcaccugcagcgccgugagcaagggcuaccugggcgcccugagaaccggcugguacaccagcgugaucaccaucgagcugagcaacaucaaggagaucaagugcaacggcaccgacgccaaggugaagcugaucaagcaggagcuggacaaguacaagaacgccgugaccgaccugcagcugcugaugcagagcacccccgccgccggcagcggcagcgccaucgccagcggcaucgccgugugcaaggugcugcaccuggagggcgaggugaacaagaucaagaacgcccugcugagcaccaacaaggccguggugagccugagcggcugcggcgugagcgugcugaccuucaaggugcuggaccugaagaacuacaucgacaagcagcugcugcccauccugaacaagcagagcugcagcauccccaacaucgagaccgugaucgaguuccagcagaagaacaacagacugcuggagaucaccagagaguucagcgugaacgccggcgugaccacccccgugagcaccuacaugcugaccaacagcgagcugcugagccugaucaacgacaugcccaucaccaacgaccagaagaagcugaugagcaacaacgugcagaucgugagacagcagagcuacagcaucaugugcaucaucaaggaggaggugcuggccuacguggugcagcugccccuguacggcgugaucgacacccccugcuggaagcugcacaccagcccccugugcaccaccaacaccaaggagggcagcaacaucugccugaccagaaccgacagaggcugguacugcgacaacgccggcagcgugagcuucuucccccaggccgagaccugcaaggugcagagcaacagaguguucugcgacaccaugaacagccugacccugcccagcgaggugaaccugugcaacaucgacaucuucaaccccaaguacgacugcaagaucaugaccagcaagaccgacgugagcagcagcgugaucaccagccugggcgccaucgugagcugcuacggcaagaccaagugcaccgccagcaacaagugcagaggcaucaucaagaccuucagcaacggcugcgacuacgugagcaacaagggcguggacaccgugagcgugggcaacacccuguacuacgugaacaagcaggagggccagagccuguacgugaagggcgagcccaucaucaacuucuacgacccccugguguuccccagcgacgaguucgacgccagcaucagccaggugaacgagaagaucaaccagagccuggccuucaucagaaagagcgacgagcugcugcacaacgugaacgugggcaagagcaccaccaacaucaugaucaccaccaucaucaucgugaucaucgugauccugcugcugcugaucgccgugggccuguuccuguacugcaaggccagaagcacccccgugacccugagcaaggaccagcugagcggcaucaacaacaucgccuucagcaacugaggacuagucccuguucccagagcccacuuuuuuuucuuuuuuugaaauaaaauagccugucuuucagaucuaaaaaaaaaaaaaaaaaaaaaaaaaaaaaaaaaaaaaaaaaaaaaaaaaaaaaaaaaaaaaaaaugcaucccccccccccccccccccccccccccccccaaaggcucuuuucagagccaccagaauu

SEQ ID NO: 19128 - RNA, 1906 nt, Artificial Sequence
  mRNA product Design a-2 comprising derived and/or modified sequence from HRSV(Memphis-37)__AIY60640.1__F_DSCav1_mut8 (opt5)
gggagaguccgcucagccagguugcagaagcggcuuagcguguguccuaaucuucucucugcguguagguaggccugugccgcaaacaagcuuaccauggagcugcccauccucaagaccaacgccauuacaacgauccuggcugccgugacccuuugcuucgcgagcucccagaauauuacagaagaguuuuaccaaucuaccuguagcgcugucuccaaaggcuaucugggggcccucagaacaggaugguacaccucuguuaucacaauugaacugagcaacaucaaggagaucaaaugcaauggcaccgacgccaaggugaaacuuauuaagcaggaacuggauaaguauaaaaacgcugugacggaccuccagcugcugaugcaguccaccccugccgcugggucuggaagcgccaucgcguccggcauugccgucuguaaggugcuccaccuggagggggagguuaauaaaaucaagaacgcccuucugagcacaaauaaagcuguggucucucucuccggaugcggcgugagcguucugaccuucaaggugcuugaucugaagaacuacauugacaaacaacuccugccgauccugaauaagcagucuuguuccauucccaacaucgaaacagucaucgaguuucagcagaaaaauaaccggcuccuggaaauuacccgcgaguucagcgugaaugcuggcgugacgacaccugucucuaccuauaugcuuacaaacuccgagcugcucagccugaucaaugauaugcccauuaccaacgaccaaaagaaacuuauguccaacaauguucagaucgugagacagcagucuuacagcauuaugugcaucaucaaggaagaggugcuggccuaugucgugcaacucccucuguacgggguuauugauacccccuguuggaaacugcauacauccccucucugcacgaccaacacaaaggaaggaagcaauaucugucugacccggacagaccgcggcugguacugcgauaacgcggggucuguguccuuuuucccgcaggccgagaccuguaagguccagagcaauagaguguuuugcgacacgaugaacucucuuacacugcccagcgaaguuaaucucugcaacauugauaucuucaauccuaaauaugacuguaagauuaugaccuccaaaaccgaugugucuagcuccgucaucacaagccugggagcuaucgugucuugcuacggcaagaccaaauguacagccuccaacaagugccgggggauuaucaagacguuuagcaauggaugugacuaugucucuaacaaaggcguggacaccguuuccgugggcaauacacuuuacuaugucaacaagcaagaggggcagagccuguacgugaaaggagagcccauuaucaauuucuaugauccucucguuuuucccuccgacgaguucgaugcuucuauuagccaggugaacgaaaagaucaaccagucccuggccuuuauucgcaaaucugacgaacugcuccacaaugucaacgugggcaagagcaccacaaauaucaugaucaccacgauuaucauugugaucauuguuauccugcuucugcucaucgccgucgggcuguuccuguacugcaaggcuagauccaccccggugacacuuagcaaagaucaacucucuggaauuaacaauaucgcguucuccaacugaggacuagucccuguucccagagcccacuuuuuuuucuuuuuuugaaauaaaauagccugucuuucagaucuaaaaaaaaaaaaaaaaaaaaaaaaaaaaaaaaaaaaaaaaaaaaaaaaaaaaaaaaaaaaaaaaugcaucccccccccccccccccccccccccccccccaaaggcucuuuucagagccaccagaauu

SEQ ID NO: 19129 - RNA, 1906 nt, Artificial Sequence
  mRNA product Design a-2 comprising derived and/or modified sequence from HRSV(Memphis-37)__AIY60640.1__F_DSCav1_mut8 (opt6)
gggagaguccgcucagccagguugcagaagcggcuuagcguguguccuaaucuucucucugcguguagguaggccugugccgcaaacaagcuuaccauggaacuuccuauuuuaaaaacaaacgcaauuacaaccauauuagcagcaguaacacuaugcuuugcaucaucacaaaacaucaccgaagaauuuuaucaauccacaugcucagcaguaucaaaaggauaccuuggcgcacuccgaacaggcugguauacaucggucauaacuauagaacucuccaacauaaaagaaauaaaaugcaaugguacugacgcaaaaguaaaauuaauaaaacaagaacuagacaaauacaaaaacgcaguaaccgauuuacaacuacuuaugcaaucaacaccugcagcaggaagcggaucagcaauagcaaguggaauagcaguaugcaaaguacuucaccucgaaggagaaguaaauaaaauaaaaaacgccuuacuaucaacaaauaaagccgucguaucacuuuccgguugcggcguaucaguauuaaccuuuaaagucuuagacuuaaaaaacuacauagacaaacaauuauuaccaauacuaaacaaacaauccuguuccauacccaacauagaaaccguaauagaauuucaacaaaaaaacaacagacuauuagaaauaacacgcgaauuuucaguaaacgcaggcguaacaacaccaguaucaacauauauguuaaccaauucagaauuauuaucccuuauaaaugacaugccuauaacaaacgaccaaaaaaaauuaaugaguaacaacguucaaauaguaagacaacaaucauacagcauaaugugcauaauaaaagaagaaguacuagcauacguaguucaacuaccacucuauggcguuaucgacaccccaugcuggaaacuacauaccucaccacucuguaccacuaauacgaaagaaggaucuaacauaugccuaaccagaacagaucgagguugguauugcgacaaugcuggaucaguaucauucuucccacaagcagaaaccugcaaaguacaaagcaacagaguauuuugugacacuaugaacucacuaacgcuaccuucagaaguaaaccuaugcaacaucgacauauucaacccaaaauacgauugcaaaauaaugacaucaaaaacagacguuuccucaucaguaauaacaucauuaggagcaauaguauccugcuacgguaaaaccaaaugcacagcauccaauaaaugccgaggaaucauuaaaacauuuucaaauggcugcgacuauguaaguaauaaagguguagauacaguaucaguaggcaacacacuauauuacguaaacaaacaagaagggcaaucccuauaugucaaaggcgaaccaauuauaaacuucuacgacccccucguauucccaucagacgaauuugacgcaucaauaucccaaguaaacgaaaaaaucaaccaaucacucgcauucauacguaaauccgacgaauuacuacauaacguaaacguaggcaaaucaacaacaaauauaaugauaacaaccauaaucauaguaauaauaguuauacuccuacuacucauugcagucggccuauuucuauacuguaaagcacgcucuacaccaguaacacuaucuaaagaucaauuauccggaauaaacaacauugccuucuccaauuaaggacuagucccuguucccagagcccacuuuuuuuucuuuuuuugaaauaaaauagccugucuuucagaucuaaaaaaaaaaaaaaaaaaaaaaaaaaaaaaaaaaaaaaaaaaaaaaaaaaaaaaaaaaaaaaaaugcaucccccccccccccccccccccccccccccccaaaggcucuuuucagagccaccagaauu

SEQ ID NO: 19130 - RNA, 1906 nt, Artificial Sequence
  mRNA product Design a-2 comprising derived and/or modified sequence from HRSV(Memphis-37)__AIY60640.1__F_DSCav1_mut8 (opt11)
gggagaguccgcucagccagguugcagaagcggcuuagcguguguccuaaucuucucucugcguguagguaggccugugccgcaaacaagcuuaccauggaacuucccauccugaagaccaacgcuaucacaaccauccucgccgcagucacccuuugcuucgccucaucccaaaacaucaccgaagaauuuuaccagucaaccugcucggccgucuccaagggcuaccucggcgcccuccgcacuggcugguacacauccgucaucaccaucgaacucuccaacauaaaagaaauaaaaugcaacggaaccgacgccaaagucaaacucaucaaacaagaacuagauaaauauaaaaacgccgucaccgaccugcaacuccucaugcaauccaccccagccgccggcucuggcagcgccaucgcaagcggaaucgccgucugcaaaguccuccaccuagaaggcgaagucaacaaaauuaaaaacgcccuccucuccaccaacaaagcaguugucucccucucuggcugcggagucucuguacucaccuucaaaguacuagaccucaagaauuacauagacaaacaacuccugcccauccuuaacaaacaaaguuguaguauccccaacaucgaaacaguaaucgaauuucagcagaaaaacaaccgccuccucgaaaucacacgagaguucucggucaacgccggcgucaccacccccguaucaaccuacaugcuaacaaacuccgaacuacuuucccucaucaaugacaugcccauaaccaacgaccaaaagaaacuaauguccaauaacguccagauaguccgucaacaguccuacucaaucaugugcauaauuaaagaagaaguacucgccuacgucguccaacuaccccucuauggagucaucgacacccccugcuggaaacuccacacaucaccccuaugcacaaccaacaccaaagaaggcuccaacaucugccucacaagaaccgaccgcggcugguacugcgacaacgcuggcuccgucucguucuucccacaagccgaaaccugcaaaguccaaucaaaccgggucuucugcgacaccaugaacucccucacucucccaagcgaagucaaccuaugcaacaucgacaucuucaacccaaaauacgacuguaaaaucaugacuucgaaaacagacgucuccucaucaguaaucacauccuuaggcgccaucguguccugcuacgguaagaccaaaugcacagccuccaacaaaugccggggcaucaucaaaaccuucagcaacgguugugauuacgucuccaacaaaggaguagacaccgucuccguaggaaacacccucuacuacgucaacaagcaagaaggccaaucccucuacgucaaaggggaacccaucaucaacuucuacgacccacucgucuuccccuccgacgaguucgacgcaagcaucucccaagucaacgaaaagaucaaccaaucacuagccuucauccgcaaauccgacgaacuccuccacaacguuaacguaggcaaauccaccaccaacaucaugaucacaaccaucaucauagucauaauagucauccuacuacuccucaucgccguaggucuauuccuauacuguaaagcucgaucaacccccgucacacucuccaaagaucaacucucaggaaucaacaacaucgccuucuccaacuaaggacuagucccuguucccagagcccacuuuuuuuucuuuuuuugaaauaaaauagccugucuuucagaucuaaaaaaaaaaaaaaaaaaaaaaaaaaaaaaaaaaaaaaaaaaaaaaaaaaaaaaaaaaaaaaaaugcaucccccccccccccccccccccccccccccccaaaggcucuuuucagagccaccagaauu

SEQ ID NO: 19131 - RNA, 1984 nt, Artificial Sequence
  mRNA product Design a-3 comprising derived and/or modified sequence from HRSV(Memphis-37)__AIY60640.1__F_DSCav1_mut8 (opt1)
gggagagggcgcuuggcuugcaaggacccugagcugcggcauugaagcacacccaacccaacucgacugaagucagccucacugaaccggaucugagaaucuucucucucugggcuugccagggcucuccgaaccuagcuagcauccucuucaauuccaacuagaaagcuuaccauggagcugcccauccucaagaccaacgccaucaccacgauccuggccgcggugacccugugcuucgccagcucccagaacaucaccgaggaguucuaccagagcacgugcuccgccgucagcaagggcuaccucggcgcccugcgcaccgggugguacaccagcgugaucaccaucgagcuguccaacaucaaggagaucaagugcaacggcaccgacgccaaggugaagcucaucaagcaggagcuggacaaguacaagaacgcggucacggaccugcagcuccugaugcagagcaccccggccgccggcuccgggagcgcgaucgccuccggcaucgccgucugcaaggugcugcaccucgagggcgaggugaacaagaucaagaacgcccugcuguccaccaacaaggccgucgugagccucuccggcugcggggugagcguccugaccuucaaggugcuggaccucaagaacuacaucgacaagcagcugcugcccauccugaacaagcagagcugcuccauccccaacaucgagaccgucaucgaguuccagcagaagaacaaccgccuccuggagaucacgcgggaguucagcgugaacgcgggcgugaccacccccgucuccaccuacaugcugacgaacagcgagcuccugucccugaucaacgacaugccgaucaccaacgaccagaagaagcucaugagcaacaacgugcagaucgugcgccagcaguccuacagcaucaugugcaucaucaaggaggagguccuggccuacguggugcagcugccccucuacggggucaucgacacccccugcuggaagcugcacaccagcccccugugcacgaccaacaccaaggagggcuccaacaucugccucacccggacggaccgcgggugguacugcgacaacgccggcagcguguccuucuucccgcaggccgagaccugcaagguccagagcaaccggguguucugcgacaccaugaacucccugacccugcccagcgaggugaaccucugcaacaucgacaucuucaaccccaaguacgacugcaagaucaugacguccaagaccgacgucagcuccagcgugaucaccucccugggcgccaucgugagcugcuacgggaagaccaagugcacggcgagcaacaagugccgcggcaucaucaagaccuucuccaacgggugcgacuacgucagcaacaagggcguggacaccguguccgucggcaacacccuguacuacgugaacaagcaggagggccagagccucuacgugaagggggagcccaucaucaacuucuacgacccgcuggucuuccccuccgacgaguucgacgccagcaucucccaggugaacgagaagaucaaccagagccuggccuucauccggaaguccgacgagcuccugcacaacgugaacgucggcaagagcaccacgaacaucaugaucaccaccaucaucaucgugaucaucgugauccugcugcuccugaucgccgucgggcuguuccucuacugcaaggcccgcuccacccccgugacgcugagcaaggaccagcuguccgggaucaacaacaucgcguucagcaacugaggacuagucccuguucccagagcccacuuuuuuuucuuuuuuugaaauaaaauagccugucuuucagaucuaaaaaaaaaaaaaaaaaaaaaaaaaaaaaaaaaaaaaaaaaaaaaaaaaaaaaaaaaaaaaaaaugcaucccccccccccccccccccccccccccccccaaaggcucuuuucagagccaccagaauu

SEQ ID NO: 19132 - RNA, 1984 nt, Artificial Sequence
  mRNA product Design a-3 comprising derived and/or modified sequence from HRSV(Memphis-37)__AIY60640.1__F_DSCav1_mut8 (opt1)
gggagagggcgcuuggcuugcaaggacccugagcugcggcauugaagcacacccaacccaacucgacugaagucagccucacugaaccggaucugagaaucuucucucucugggcuugccagggcucuccgaaccuagcuagcauccucuucaauuccaacuagaaagcuuaccauggagcugcccauccucaagaccaacgccaucaccacgauccuggccgcggugacccugugcuucgccagcucccagaacaucaccgaggaguucuaccagagcacgugcuccgccgucagcaagggcuaccucggggcccugcgcaccggcugguacaccuccgugaucaccaucgagcugagcaacaucaaggagaucaagugcaacgggaccgacgccaaggugaagcucaucaagcaggagcuggacaaguacaagaacgcggucacggaccugcagcuccugaugcaguccaccccggccgccggcagcggguccgccaucgcgagcggcaucgccgugugcaaggugcugcaccucgagggcgaggucaacaagaucaagaacgcccugcuguccaccaacaaggccguggugagccucuccgggugcggcgucagcgugcugaccuucaaggugcuggaccucaagaacuacaucgacaagcagcugcugcccauccucaacaagcaguccugcagcauccccaacaucgagacggucaucgaguuccagcagaagaacaaccggcugcuggagaucacccgcgaguucuccgugaacgccggggugaccacccccgucagcacguacaugcucaccaacuccgagcugcugagccucaucaacgacaugccgaucaccaacgaccagaagaagcugaugagcaacaacgugcagaucgugcggcagcaguccuacagcaucaugugcaucaucaaggaggagguccuggcguacguggugcagcucccccuguacggcgucaucgacacccccugcuggaagcugcacacgagcccccucugcaccaccaacaccaaggagggguccaacaucugccugacgcgcaccgaccggggcugguacugcgacaacgccggcuccgugagcuucuucccgcaggccgagaccugcaaggugcaguccaaccgcgucuucugcgacaccaugaacagccugacgcuccccuccgaggugaaccugugcaacaucgacaucuucaaccccaaguacgacugcaagaucaugaccagcaagaccgacgucuccagcuccgugaucaccagccugggggccaucguguccugcuacggcaagacgaagugcaccgccagcaacaagugccgggggaucaucaagaccuucuccaacggcugcgacuacgucagcaacaagggcguggacaccguguccgucgggaacacgcucuacuacgugaacaagcaggagggccagagccuguacgugaagggggagcccaucaucaacuucuacgacccgcuggucuuccccagcgacgaguucgacgcguccaucagccaggugaacgagaagaucaaccagucccucgccuucauccgcaagagcgacgagcugcugcacaacgugaacgucggcaaguccaccaccaacaucaugaucaccaccaucaucaucgugaucaucgugauccuccugcugcucaucgccgucgggcuguuccuguacugcaaggcccggagcacgcccgugacccuguccaaggaccagcucagcggcaucaacaacaucgccuucuccaacugaggacuagucccuguucccagagcccacuuuuuuuucuuuuuuugaaauaaaauagccugucuuucagaucuaaaaaaaaaaaaaaaaaaaaaaaaaaaaaaaaaaaaaaaaaaaaaaaaaaaaaaaaaaaaaaaaugcaucccccccccccccccccccccccccccccccaaaggcucuuuucagagccaccagaauu

SEQ ID NO: 19133 - RNA, 1984 nt, Artificial Sequence
  mRNA product Design a-3 comprising derived and/or modified sequence from HRSV(Memphis-37)__AIY60640.1__F_DSCav1_mut8 (opt2)
gggagagggcgcuuggcuugcaaggacccugagcugcggcauugaagcacacccaacccaacucgacugaagucagccucacugaaccggaucugagaaucuucucucucugggcuugccagggcucuccgaaccuagcuagcauccucuucaauuccaacuagaaagcuuaccauggagcuccccauccucaagaccaacgccaucaccaccauccucgccgccgucacccucugcuucgccuccucccagaacaucaccgaggaguucuaccaguccaccugcuccgccgucuccaagggcuaccucggcgcccuccgcaccggcugguacaccuccgucaucaccaucgagcucuccaacaucaaggagaucaagugcaacggcaccgacgccaaggucaagcucaucaagcaggagcucgacaaguacaagaacgccgucaccgaccuccagcuccucaugcaguccacccccgccgccggcuccggcuccgccaucgccuccggcaucgccgucugcaagguccuccaccucgagggcgaggucaacaagaucaagaacgcccuccucuccaccaacaaggccgucgucucccucuccggcugcggcgucuccguccucaccuucaagguccucgaccucaagaacuacaucgacaagcagcuccuccccauccucaacaagcaguccugcuccauccccaacaucgagaccgucaucgaguuccagcagaagaacaaccgccuccucgagaucacccgcgaguucuccgucaacgccggcgucaccacccccgucuccaccuacaugcucaccaacuccgagcuccucucccucaucaacgacaugcccaucaccaacgaccagaagaagcucauguccaacaacguccagaucguccgccagcaguccuacuccaucaugugcaucaucaaggaggagguccucgccuacgucguccagcucccccucuacggcgucaucgacacccccugcuggaagcuccacaccuccccccucugcaccaccaacaccaaggagggcuccaacaucugccucacccgcaccgaccgcggcugguacugcgacaacgccggcuccgucuccuucuucccccaggccgagaccugcaagguccaguccaaccgcgucuucugcgacaccaugaacucccucacccuccccuccgaggucaaccucugcaacaucgacaucuucaaccccaaguacgacugcaagaucaugaccuccaagaccgacgucuccuccuccgucaucaccucccucggcgccaucgucuccugcuacggcaagaccaagugcaccgccuccaacaagugccgcggcaucaucaagaccuucuccaacggcugcgacuacgucuccaacaagggcgucgacaccgucuccgucggcaacacccucuacuacgucaacaagcaggagggccagucccucuacgucaagggcgagcccaucaucaacuucuacgacccccucgucuuccccuccgacgaguucgacgccuccaucucccaggucaacgagaagaucaaccagucccucgccuucauccgcaaguccgacgagcuccuccacaacgucaacgucggcaaguccaccaccaacaucaugaucaccaccaucaucaucgucaucaucgucauccuccuccuccucaucgccgucggccucuuccucuacugcaaggcccgcuccacccccgucacccucuccaaggaccagcucuccggcaucaacaacaucgccuucuccaacugaggacuagucccuguucccagagcccacuuuuuuuucuuuuuuugaaauaaaauagccugucuuucagaucuaaaaaaaaaaaaaaaaaaaaaaaaaaaaaaaaaaaaaaaaaaaaaaaaaaaaaaaaaaaaaaaaugcaucccccccccccccccccccccccccccccccaaaggcucuuuucagagccaccagaauu

SEQ ID NO: 19134 - RNA, 1984 nt, Artificial Sequence
  mRNA product Design a-3 comprising derived and/or modified sequence from HRSV(Memphis-37)__AIY60640.1__F_DSCav1_mut8 (opt3)
gggagagggcgcuuggcuugcaaggacccugagcugcggcauugaagcacacccaacccaacucgacugaagucagccucacugaaccggaucugagaaucuucucucucugggcuugccagggcucuccgaaccuagcuagcauccucuucaauuccaacuagaaagcuuaccauggagcugcccauccucaagaccaacgccauuacaacuauacuugcugcagugacgcugugcuucgccagcucccagaauaucaccgaagaguuuuaccaaucuacauguucagcggucaguaaaggcuauuugggggcuuuaagaacuggaugguacaccagcguuauuacaaucgaacuguccaacauuaaggagaucaaaugcaaugguaccgacgccaaggugaaacuaauaaagcaggaacucgauaaguauaaaaacgcaguaacugaccugcagcuucugaugcagucuacuccugccgcuggcucggggucagcaaucgccagcggaauugcuguguguaaggucuugcaccucgagggcgaggugaauaaaaucaagaacgcccugcugaguaccaauaaagcgguugugucccucucugguugcggggucagcguguuaacguucaagguacuggaucuuaagaacuacauugacaaacaauugcugccaauccuaaauaagcaguccuguucaauaccgaacauugaaacuguuaucgaguuucagcagaaaaauaacaggcuccuggaaauuacccgggaguucagugugaaugcaggagucacaacucccgugagcaccuauaugcuuacaaacucugagcuguugucccucaucaaugauaugccuaucaccaacgaccaaaagaaacugaugucaaacaaugugcagauuguccgccagcagagcuacaguauaaugugcaucauuaaggaagagguuuuagccuaugugguacaacugccacucuacggcgugaucgauacgcccuguuggaaacuucauacuucuccucugugcacaaccaacacuaaggaaggcuccaauauauguuugacacgaaccgaccgugggugguacugcgauaacgcuggaagcgucucguuuuucccacaggccgagacguguaaggugcagucuaauagaguuuucugcgacaccaugaacucccuaacacugcccucagaagugaaucucugcaacauugauaucuucaauccuaaauaugacuguaagaucaugacaaguaaaaccgaugucagcuccucugugauuacaagccugggugcaaucguaucaugcuacggcaagacuaaauguaccgcuaguaacaagugcagggggauuauaaagacauuuuccaauggaugugacuauguuagcaacaaaggcguggacaccgucucuguggguaauacucuuuacuaugucaacaagcaagaggggcagucacuguacgugaaaggagagccaaucauuaauuucuaugauccguugguuuuucccagugacgaauuugaugccagcaucucccaggugaacgagaagaucaaccagucucucgcguuuauucggaaaucggacgaacuguuacacaauguaaacgucggcaagagcacgacaaauauaaugaucaccacuauuaucauugugaucauaguuauccugcuacuccugauugccgugggccuuuucuuguacugcaaggcacgcuccaccccugucacacugucaaaagaucaacucagugggaucaacaauauugcuuucucuaacugaggacuagucccuguucccagagcccacuuuuuuuucuuuuuuugaaauaaaauagccugucuuucagaucuaaaaaaaaaaaaaaaaaaaaaaaaaaaaaaaaaaaaaaaaaaaaaaaaaaaaaaaaaaaaaaaaugcaucccccccccccccccccccccccccccccccaaaggcucuuuucagagccaccagaauu

SEQ ID NO: 19135 - RNA, 1984 nt, Artificial Sequence
  mRNA product Design a-3 comprising derived and/or modified sequence from HRSV(Memphis-37)__AIY60640.1__F_DSCav1_mut8 (opt4)
gggagagggcgcuuggcuugcaaggacccugagcugcggcauugaagcacacccaacccaacucgacugaagucagccucacugaaccggaucugagaaucuucucucucugggcuugccagggcucuccgaaccuagcuagcauccucuucaauuccaacuagaaagcuuaccauggagcugcccauccugaagaccaacgccaucaccaccauccuggccgccgugacccugugcuucgccagcagccagaacaucaccgaggaguucuaccagagcaccugcagcgccgugagcaagggcuaccugggcgcccugagaaccggcugguacaccagcgugaucaccaucgagcugagcaacaucaaggagaucaagugcaacggcaccgacgccaaggugaagcugaucaagcaggagcuggacaaguacaagaacgccgugaccgaccugcagcugcugaugcagagcacccccgccgccggcagcggcagcgccaucgccagcggcaucgccgugugcaaggugcugcaccuggagggcgaggugaacaagaucaagaacgcccugcugagcaccaacaaggccguggugagccugagcggcugcggcgugagcgugcugaccuucaaggugcuggaccugaagaacuacaucgacaagcagcugcugcccauccugaacaagcagagcugcagcauccccaacaucgagaccgugaucgaguuccagcagaagaacaacagacugcuggagaucaccagagaguucagcgugaacgccggcgugaccacccccgugagcaccuacaugcugaccaacagcgagcugcugagccugaucaacgacaugcccaucaccaacgaccagaagaagcugaugagcaacaacgugcagaucgugagacagcagagcuacagcaucaugugcaucaucaaggaggaggugcuggccuacguggugcagcugccccuguacggcgugaucgacacccccugcuggaagcugcacaccagcccccugugcaccaccaacaccaaggagggcagcaacaucugccugaccagaaccgacagaggcugguacugcgacaacgccggcagcgugagcuucuucccccaggccgagaccugcaaggugcagagcaacagaguguucugcgacaccaugaacagccugacccugcccagcgaggugaaccugugcaacaucgacaucuucaaccccaaguacgacugcaagaucaugaccagcaagaccgacgugagcagcagcgugaucaccagccugggcgccaucgugagcugcuacggcaagaccaagugcaccgccagcaacaagugcagaggcaucaucaagaccuucagcaacggcugcgacuacgugagcaacaagggcguggacaccgugagcgugggcaacacccuguacuacgugaacaagcaggagggccagagccuguacgugaagggcgagcccaucaucaacuucuacgacccccugguguuccccagcgacgaguucgacgccagcaucagccaggugaacgagaagaucaaccagagccuggccuucaucagaaagagcgacgagcugcugcacaacgugaacgugggcaagagcaccaccaacaucaugaucaccaccaucaucaucgugaucaucgugauccugcugcugcugaucgccgugggccuguuccuguacugcaaggccagaagcacccccgugacccugagcaaggaccagcugagcggcaucaacaacaucgccuucagcaacugaggacuagucccuguucccagagcccacuuuuuuuucuuuuuuugaaauaaaauagccugucuuucagaucuaaaaaaaaaaaaaaaaaaaaaaaaaaaaaaaaaaaaaaaaaaaaaaaaaaaaaaaaaaaaaaaaugcaucccccccccccccccccccccccccccccccaaaggcucuuuucagagccaccagaauu

SEQ ID NO: 19136 - RNA, 1984 nt, Artificial Sequence
  mRNA product Design a-3 comprising derived and/or modified sequence from HRSV(Memphis-37)__AIY60640.1__F_DSCav1_mut8 (opt5)
gggagagggcgcuuggcuugcaaggacccugagcugcggcauugaagcacacccaacccaacucgacugaagucagccucacugaaccggaucugagaaucuucucucucugggcuugccagggcucuccgaaccuagcuagcauccucuucaauuccaacuagaaagcuuaccauggagcugcccauccucaagaccaacgccauuacaacgauccuggcugccgugacccuuugcuucgcgagcucccagaauauuacagaagaguuuuaccaaucuaccuguagcgcugucuccaaaggcuaucugggggcccucagaacaggaugguacaccucuguuaucacaauugaacugagcaacaucaaggagaucaaaugcaauggcaccgacgccaaggugaaacuuauuaagcaggaacuggauaaguauaaaaacgcugugacggaccuccagcugcugaugcaguccaccccugccgcugggucuggaagcgccaucgcguccggcauugccgucuguaaggugcuccaccuggagggggagguuaauaaaaucaagaacgcccuucugagcacaaauaaagcuguggucucucucuccggaugcggcgugagcguucugaccuucaaggugcuugaucugaagaacuacauugacaaacaacuccugccgauccugaauaagcagucuuguuccauucccaacaucgaaacagucaucgaguuucagcagaaaaauaaccggcuccuggaaauuacccgcgaguucagcgugaaugcuggcgugacgacaccugucucuaccuauaugcuuacaaacuccgagcugcucagccugaucaaugauaugcccauuaccaacgaccaaaagaaacuuauguccaacaauguucagaucgugagacagcagucuuacagcauuaugugcaucaucaaggaagaggugcuggccuaugucgugcaacucccucuguacgggguuauugauacccccuguuggaaacugcauacauccccucucugcacgaccaacacaaaggaaggaagcaauaucugucugacccggacagaccgcggcugguacugcgauaacgcggggucuguguccuuuuucccgcaggccgagaccuguaagguccagagcaauagaguguuuugcgacacgaugaacucucuuacacugcccagcgaaguuaaucucugcaacauugauaucuucaauccuaaauaugacuguaagauuaugaccuccaaaaccgaugugucuagcuccgucaucacaagccugggagcuaucgugucuugcuacggcaagaccaaauguacagccuccaacaagugccgggggauuaucaagacguuuagcaauggaugugacuaugucucuaacaaaggcguggacaccguuuccgugggcaauacacuuuacuaugucaacaagcaagaggggcagagccuguacgugaaaggagagcccauuaucaauuucuaugauccucucguuuuucccuccgacgaguucgaugcuucuauuagccaggugaacgaaaagaucaaccagucccuggccuuuauucgcaaaucugacgaacugcuccacaaugucaacgugggcaagagcaccacaaauaucaugaucaccacgauuaucauugugaucauuguuauccugcuucugcucaucgccgucgggcuguuccuguacugcaaggcuagauccaccccggugacacuuagcaaagaucaacucucuggaauuaacaauaucgcguucuccaacugaggacuagucccuguucccagagcccacuuuuuuuucuuuuuuugaaauaaaauagccugucuuucagaucuaaaaaaaaaaaaaaaaaaaaaaaaaaaaaaaaaaaaaaaaaaaaaaaaaaaaaaaaaaaaaaaaugcaucccccccccccccccccccccccccccccccaaaggcucuuuucagagccaccagaauu

SEQ ID NO: 19137 - RNA, 1984 nt, Artificial Sequence
  mRNA product Design a-3 comprising derived and/or modified sequence from HRSV(Memphis-37)__AIY60640.1__F_DSCav1_mut8 (opt6)
gggagagggcgcuuggcuugcaaggacccugagcugcggcauugaagcacacccaacccaacucgacugaagucagccucacugaaccggaucugagaaucuucucucucugggcuugccagggcucuccgaaccuagcuagcauccucuucaauuccaacuagaaagcuuaccauggaacuuccuauuuuaaaaacaaacgcaauuacaaccauauuagcagcaguaacacuaugcuuugcaucaucacaaaacaucaccgaagaauuuuaucaauccacaugcucagcaguaucaaaaggauaccuuggcgcacuccgaacaggcugguauacaucggucauaacuauagaacucuccaacauaaaagaaauaaaaugcaaugguacugacgcaaaaguaaaauuaauaaaacaagaacuagacaaauacaaaaacgcaguaaccgauuuacaacuacuuaugcaaucaacaccugcagcaggaagcggaucagcaauagcaaguggaauagcaguaugcaaaguacuucaccucgaaggagaaguaaauaaaauaaaaaacgccuuacuaucaacaaauaaagccgucguaucacuuuccgguugcggcguaucaguauuaaccuuuaaagucuuagacuuaaaaaacuacauagacaaacaauuauuaccaauacuaaacaaacaauccuguuccauacccaacauagaaaccguaauagaauuucaacaaaaaaacaacagacuauuagaaauaacacgcgaauuuucaguaaacgcaggcguaacaacaccaguaucaacauauauguuaaccaauucagaauuauuaucccuuauaaaugacaugccuauaacaaacgaccaaaaaaaauuaaugaguaacaacguucaaauaguaagacaacaaucauacagcauaaugugcauaauaaaagaagaaguacuagcauacguaguucaacuaccacucuauggcguuaucgacaccccaugcuggaaacuacauaccucaccacucuguaccacuaauacgaaagaaggaucuaacauaugccuaaccagaacagaucgagguugguauugcgacaaugcuggaucaguaucauucuucccacaagcagaaaccugcaaaguacaaagcaacagaguauuuugugacacuaugaacucacuaacgcuaccuucagaaguaaaccuaugcaacaucgacauauucaacccaaaauacgauugcaaaauaaugacaucaaaaacagacguuuccucaucaguaauaacaucauuaggagcaauaguauccugcuacgguaaaaccaaaugcacagcauccaauaaaugccgaggaaucauuaaaacauuuucaaauggcugcgacuauguaaguaauaaagguguagauacaguaucaguaggcaacacacuauauuacguaaacaaacaagaagggcaaucccuauaugucaaaggcgaaccaauuauaaacuucuacgacccccucguauucccaucagacgaauuugacgcaucaauaucccaaguaaacgaaaaaaucaaccaaucacucgcauucauacguaaauccgacgaauuacuacauaacguaaacguaggcaaaucaacaacaaauauaaugauaacaaccauaaucauaguaauaauaguuauacuccuacuacucauugcagucggccuauuucuauacuguaaagcacgcucuacaccaguaacacuaucuaaagaucaauuauccggaauaaacaacauugccuucuccaauuaaggacuagucccuguucccagagcccacuuuuuuuucuuuuuuugaaauaaaauagccugucuuucagaucuaaaaaaaaaaaaaaaaaaaaaaaaaaaaaaaaaaaaaaaaaaaaaaaaaaaaaaaaaaaaaaaaugcaucccccccccccccccccccccccccccccccaaaggcucuuuucagagccaccagaauu

SEQ ID NO: 19138 - RNA, 1984 nt, Artificial Sequence
  mRNA product Design a-3 comprising derived and/or modified sequence from HRSV(Memphis-37)__AIY60640.1__F_DSCav1_mut8 (opt11)
gggagagggcgcuuggcuugcaaggacccugagcugcggcauugaagcacacccaacccaacucgacugaagucagccucacugaaccggaucugagaaucuucucucucugggcuugccagggcucuccgaaccuagcuagcauccucuucaauuccaacuagaaagcuuaccauggaacuucccauccugaagaccaacgcuaucacaaccauccucgccgcagucacccuuugcuucgccucaucccaaaacaucaccgaagaauuuuaccagucaaccugcucggccgucuccaagggcuaccucggcgcccuccgcacuggcugguacacauccgucaucaccaucgaacucuccaacauaaaagaaauaaaaugcaacggaaccgacgccaaagucaaacucaucaaacaagaacuagauaaauauaaaaacgccgucaccgaccugcaacuccucaugcaauccaccccagccgccggcucuggcagcgccaucgcaagcggaaucgccgucugcaaaguccuccaccuagaaggcgaagucaacaaaauuaaaaacgcccuccucuccaccaacaaagcaguugucucccucucuggcugcggagucucuguacucaccuucaaaguacuagaccucaagaauuacauagacaaacaacuccugcccauccuuaacaaacaaaguuguaguauccccaacaucgaaacaguaaucgaauuucagcagaaaaacaaccgccuccucgaaaucacacgagaguucucggucaacgccggcgucaccacccccguaucaaccuacaugcuaacaaacuccgaacuacuuucccucaucaaugacaugcccauaaccaacgaccaaaagaaacuaauguccaauaacguccagauaguccgucaacaguccuacucaaucaugugcauaauuaaagaagaaguacucgccuacgucguccaacuaccccucuauggagucaucgacacccccugcuggaaacuccacacaucaccccuaugcacaaccaacaccaaagaaggcuccaacaucugccucacaagaaccgaccgcggcugguacugcgacaacgcuggcuccgucucguucuucccacaagccgaaaccugcaaaguccaaucaaaccgggucuucugcgacaccaugaacucccucacucucccaagcgaagucaaccuaugcaacaucgacaucuucaacccaaaauacgacuguaaaaucaugacuucgaaaacagacgucuccucaucaguaaucacauccuuaggcgccaucguguccugcuacgguaagaccaaaugcacagccuccaacaaaugccggggcaucaucaaaaccuucagcaacgguugugauuacgucuccaacaaaggaguagacaccgucuccguaggaaacacccucuacuacgucaacaagcaagaaggccaaucccucuacgucaaaggggaacccaucaucaacuucuacgacccacucgucuuccccuccgacgaguucgacgcaagcaucucccaagucaacgaaaagaucaaccaaucacuagccuucauccgcaaauccgacgaacuccuccacaacguuaacguaggcaaauccaccaccaacaucaugaucacaaccaucaucauagucauaauagucauccuacuacuccucaucgccguaggucuauuccuauacuguaaagcucgaucaacccccgucacacucuccaaagaucaacucucaggaaucaacaacaucgccuucuccaacuaaggacuagucccuguucccagagcccacuuuuuuuucuuuuuuugaaauaaaauagccugucuuucagaucuaaaaaaaaaaaaaaaaaaaaaaaaaaaaaaaaaaaaaaaaaaaaaaaaaaaaaaaaaaaaaaaaugcaucccccccccccccccccccccccccccccccaaaggcucuuuucagagccaccagaauu

SEQ ID NO: 19139 - RNA, 1933 nt, Artificial Sequence
  mRNA product Design a-4 comprising derived and/or modified sequence from HRSV(Memphis-37)__AIY60640.1__F_DSCav1_mut8 (opt1)
gggagacuccugucgggcggaaguaggaggaguagaguuuaaaaacaguacucuuuuuccgguucgggacguaguugaagcaacgacaagccggauaaccgcucuugagacaggaagcuuaccauggagcugcccauccucaagaccaacgccaucaccacgauccuggccgcggugacccugugcuucgccagcucccagaacaucaccgaggaguucuaccagagcacgugcuccgccgucagcaagggcuaccucggcgcccugcgcaccgggugguacaccagcgugaucaccaucgagcuguccaacaucaaggagaucaagugcaacggcaccgacgccaaggugaagcucaucaagcaggagcuggacaaguacaagaacgcggucacggaccugcagcuccugaugcagagcaccccggccgccggcuccgggagcgcgaucgccuccggcaucgccgucugcaaggugcugcaccucgagggcgaggugaacaagaucaagaacgcccugcuguccaccaacaaggccgucgugagccucuccggcugcggggugagcguccugaccuucaaggugcuggaccucaagaacuacaucgacaagcagcugcugcccauccugaacaagcagagcugcuccauccccaacaucgagaccgucaucgaguuccagcagaagaacaaccgccuccuggagaucacgcgggaguucagcgugaacgcgggcgugaccacccccgucuccaccuacaugcugacgaacagcgagcuccugucccugaucaacgacaugccgaucaccaacgaccagaagaagcucaugagcaacaacgugcagaucgugcgccagcaguccuacagcaucaugugcaucaucaaggaggagguccuggccuacguggugcagcugccccucuacggggucaucgacacccccugcuggaagcugcacaccagcccccugugcacgaccaacaccaaggagggcuccaacaucugccucacccggacggaccgcgggugguacugcgacaacgccggcagcguguccuucuucccgcaggccgagaccugcaagguccagagcaaccggguguucugcgacaccaugaacucccugacccugcccagcgaggugaaccucugcaacaucgacaucuucaaccccaaguacgacugcaagaucaugacguccaagaccgacgucagcuccagcgugaucaccucccugggcgccaucgugagcugcuacgggaagaccaagugcacggcgagcaacaagugccgcggcaucaucaagaccuucuccaacgggugcgacuacgucagcaacaagggcguggacaccguguccgucggcaacacccuguacuacgugaacaagcaggagggccagagccucuacgugaagggggagcccaucaucaacuucuacgacccgcuggucuuccccuccgacgaguucgacgccagcaucucccaggugaacgagaagaucaaccagagccuggccuucauccggaaguccgacgagcuccugcacaacgugaacgucggcaagagcaccacgaacaucaugaucaccaccaucaucaucgugaucaucgugauccugcugcuccugaucgccgucgggcuguuccucuacugcaaggcccgcuccacccccgugacgcugagcaaggaccagcuguccgggaucaacaacaucgcguucagcaacugaggacuagucccuguucccagagcccacuuuuuuuucuuuuuuugaaauaaaauagccugucuuucagaucuaaaaaaaaaaaaaaaaaaaaaaaaaaaaaaaaaaaaaaaaaaaaaaaaaaaaaaaaaaaaaaaaugcaucccccccccccccccccccccccccccccccaaaggcucuuuucagagccaccagaauu

SEQ ID NO: 19140 - RNA, 1933 nt, Artificial Sequence
  mRNA product Design a-4 comprising derived and/or modified sequence from HRSV(Memphis-37)__AIY60640.1__F_DSCav1_mut8 (opt1)
gggagacuccugucgggcggaaguaggaggaguagaguuuaaaaacaguacucuuuuuccgguucgggacguaguugaagcaacgacaagccggauaaccgcucuugagacaggaagcuuaccauggagcugcccauccucaagaccaacgccaucaccacgauccuggccgcggugacccugugcuucgccagcucccagaacaucaccgaggaguucuaccagagcacgugcuccgccgucagcaagggcuaccucggggcccugcgcaccggcugguacaccuccgugaucaccaucgagcugagcaacaucaaggagaucaagugcaacgggaccgacgccaaggugaagcucaucaagcaggagcuggacaaguacaagaacgcggucacggaccugcagcuccugaugcaguccaccccggccgccggcagcggguccgccaucgcgagcggcaucgccgugugcaaggugcugcaccucgagggcgaggucaacaagaucaagaacgcccugcuguccaccaacaaggccguggugagccucuccgggugcggcgucagcgugcugaccuucaaggugcuggaccucaagaacuacaucgacaagcagcugcugcccauccucaacaagcaguccugcagcauccccaacaucgagacggucaucgaguuccagcagaagaacaaccggcugcuggagaucacccgcgaguucuccgugaacgccggggugaccacccccgucagcacguacaugcucaccaacuccgagcugcugagccucaucaacgacaugccgaucaccaacgaccagaagaagcugaugagcaacaacgugcagaucgugcggcagcaguccuacagcaucaugugcaucaucaaggaggagguccuggcguacguggugcagcucccccuguacggcgucaucgacacccccugcuggaagcugcacacgagcccccucugcaccaccaacaccaaggagggguccaacaucugccugacgcgcaccgaccggggcugguacugcgacaacgccggcuccgugagcuucuucccgcaggccgagaccugcaaggugcaguccaaccgcgucuucugcgacaccaugaacagccugacgcuccccuccgaggugaaccugugcaacaucgacaucuucaaccccaaguacgacugcaagaucaugaccagcaagaccgacgucuccagcuccgugaucaccagccugggggccaucguguccugcuacggcaagacgaagugcaccgccagcaacaagugccgggggaucaucaagaccuucuccaacggcugcgacuacgucagcaacaagggcguggacaccguguccgucgggaacacgcucuacuacgugaacaagcaggagggccagagccuguacgugaagggggagcccaucaucaacuucuacgacccgcuggucuuccccagcgacgaguucgacgcguccaucagccaggugaacgagaagaucaaccagucccucgccuucauccgcaagagcgacgagcugcugcacaacgugaacgucggcaaguccaccaccaacaucaugaucaccaccaucaucaucgugaucaucgugauccuccugcugcucaucgccgucgggcuguuccuguacugcaaggcccggagcacgcccgugacccuguccaaggaccagcucagcggcaucaacaacaucgccuucuccaacugaggacuagucccuguucccagagcccacuuuuuuuucuuuuuuugaaauaaaauagccugucuuucagaucuaaaaaaaaaaaaaaaaaaaaaaaaaaaaaaaaaaaaaaaaaaaaaaaaaaaaaaaaaaaaaaaaugcaucccccccccccccccccccccccccccccccaaaggcucuuuucagagccaccagaauu

SEQ ID NO: 19141 - RNA, 1933 nt, Artificial Sequence
  mRNA product Design a-4 comprising derived and/or modified sequence from HRSV(Memphis-37)__AIY60640.1__F_DSCav1_mut8 (opt2)
gggagacuccugucgggcggaaguaggaggaguagaguuuaaaaacaguacucuuuuuccgguucgggacguaguugaagcaacgacaagccggauaaccgcucuugagacaggaagcuuaccauggagcuccccauccucaagaccaacgccaucaccaccauccucgccgccgucacccucugcuucgccuccucccagaacaucaccgaggaguucuaccaguccaccugcuccgccgucuccaagggcuaccucggcgcccuccgcaccggcugguacaccuccgucaucaccaucgagcucuccaacaucaaggagaucaagugcaacggcaccgacgccaaggucaagcucaucaagcaggagcucgacaaguacaagaacgccgucaccgaccuccagcuccucaugcaguccacccccgccgccggcuccggcuccgccaucgccuccggcaucgccgucugcaagguccuccaccucgagggcgaggucaacaagaucaagaacgcccuccucuccaccaacaaggccgucgucucccucuccggcugcggcgucuccguccucaccuucaagguccucgaccucaagaacuacaucgacaagcagcuccuccccauccucaacaagcaguccugcuccauccccaacaucgagaccgucaucgaguuccagcagaagaacaaccgccuccucgagaucacccgcgaguucuccgucaacgccggcgucaccacccccgucuccaccuacaugcucaccaacuccgagcuccucucccucaucaacgacaugcccaucaccaacgaccagaagaagcucauguccaacaacguccagaucguccgccagcaguccuacuccaucaugugcaucaucaaggaggagguccucgccuacgucguccagcucccccucuacggcgucaucgacacccccugcuggaagcuccacaccuccccccucugcaccaccaacaccaaggagggcuccaacaucugccucacccgcaccgaccgcggcugguacugcgacaacgccggcuccgucuccuucuucccccaggccgagaccugcaagguccaguccaaccgcgucuucugcgacaccaugaacucccucacccuccccuccgaggucaaccucugcaacaucgacaucuucaaccccaaguacgacugcaagaucaugaccuccaagaccgacgucuccuccuccgucaucaccucccucggcgccaucgucuccugcuacggcaagaccaagugcaccgccuccaacaagugccgcggcaucaucaagaccuucuccaacggcugcgacuacgucuccaacaagggcgucgacaccgucuccgucggcaacacccucuacuacgucaacaagcaggagggccagucccucuacgucaagggcgagcccaucaucaacuucuacgacccccucgucuuccccuccgacgaguucgacgccuccaucucccaggucaacgagaagaucaaccagucccucgccuucauccgcaaguccgacgagcuccuccacaacgucaacgucggcaaguccaccaccaacaucaugaucaccaccaucaucaucgucaucaucgucauccuccuccuccucaucgccgucggccucuuccucuacugcaaggcccgcuccacccccgucacccucuccaaggaccagcucuccggcaucaacaacaucgccuucuccaacugaggacuagucccuguucccagagcccacuuuuuuuucuuuuuuugaaauaaaauagccugucuuucagaucuaaaaaaaaaaaaaaaaaaaaaaaaaaaaaaaaaaaaaaaaaaaaaaaaaaaaaaaaaaaaaaaaugcaucccccccccccccccccccccccccccccccaaaggcucuuuucagagccaccagaauu

SEQ ID NO: 19142 - RNA, 1933 nt, Artificial Sequence
  mRNA product Design a-4 comprising derived and/or modified sequence from HRSV(Memphis-37)__AIY60640.1__F_DSCav1_mut8 (opt3)
gggagacuccugucgggcggaaguaggaggaguagaguuuaaaaacaguacucuuuuuccgguucgggacguaguugaagcaacgacaagccggauaaccgcucuugagacaggaagcuuaccauggagcugcccauccucaagaccaacgccauuacaacuauacuugcugcagugacgcugugcuucgccagcucccagaauaucaccgaagaguuuuaccaaucuacauguucagcggucaguaaaggcuauuugggggcuuuaagaacuggaugguacaccagcguuauuacaaucgaacuguccaacauuaaggagaucaaaugcaaugguaccgacgccaaggugaaacuaauaaagcaggaacucgauaaguauaaaaacgcaguaacugaccugcagcuucugaugcagucuacuccugccgcuggcucggggucagcaaucgccagcggaauugcuguguguaaggucuugcaccucgagggcgaggugaauaaaaucaagaacgcccugcugaguaccaauaaagcgguugugucccucucugguugcggggucagcguguuaacguucaagguacuggaucuuaagaacuacauugacaaacaauugcugccaauccuaaauaagcaguccuguucaauaccgaacauugaaacuguuaucgaguuucagcagaaaaauaacaggcuccuggaaauuacccgggaguucagugugaaugcaggagucacaacucccgugagcaccuauaugcuuacaaacucugagcuguugucccucaucaaugauaugccuaucaccaacgaccaaaagaaacugaugucaaacaaugugcagauuguccgccagcagagcuacaguauaaugugcaucauuaaggaagagguuuuagccuaugugguacaacugccacucuacggcgugaucgauacgcccuguuggaaacuucauacuucuccucugugcacaaccaacacuaaggaaggcuccaauauauguuugacacgaaccgaccgugggugguacugcgauaacgcuggaagcgucucguuuuucccacaggccgagacguguaaggugcagucuaauagaguuuucugcgacaccaugaacucccuaacacugcccucagaagugaaucucugcaacauugauaucuucaauccuaaauaugacuguaagaucaugacaaguaaaaccgaugucagcuccucugugauuacaagccugggugcaaucguaucaugcuacggcaagacuaaauguaccgcuaguaacaagugcagggggauuauaaagacauuuuccaauggaugugacuauguuagcaacaaaggcguggacaccgucucuguggguaauacucuuuacuaugucaacaagcaagaggggcagucacuguacgugaaaggagagccaaucauuaauuucuaugauccguugguuuuucccagugacgaauuugaugccagcaucucccaggugaacgagaagaucaaccagucucucgcguuuauucggaaaucggacgaacuguuacacaauguaaacgucggcaagagcacgacaaauauaaugaucaccacuauuaucauugugaucauaguuauccugcuacuccugauugccgugggccuuuucuuguacugcaaggcacgcuccaccccugucacacugucaaaagaucaacucagugggaucaacaauauugcuuucucuaacugaggacuagucccuguucccagagcccacuuuuuuuucuuuuuuugaaauaaaauagccugucuuucagaucuaaaaaaaaaaaaaaaaaaaaaaaaaaaaaaaaaaaaaaaaaaaaaaaaaaaaaaaaaaaaaaaaugcaucccccccccccccccccccccccccccccccaaaggcucuuuucagagccaccagaauu

SEQ ID NO: 19143 - RNA, 1933 nt, Artificial Sequence
  mRNA product Design a-4 comprising derived and/or modified sequence from HRSV(Memphis-37)__AIY60640.1__F_DSCav1_mut8 (opt4)
gggagacuccugucgggcggaaguaggaggaguagaguuuaaaaacaguacucuuuuuccgguucgggacguaguugaagcaacgacaagccggauaaccgcucuugagacaggaagcuuaccauggagcugcccauccugaagaccaacgccaucaccaccauccuggccgccgugacccugugcuucgccagcagccagaacaucaccgaggaguucuaccagagcaccugcagcgccgugagcaagggcuaccugggcgcccugagaaccggcugguacaccagcgugaucaccaucgagcugagcaacaucaaggagaucaagugcaacggcaccgacgccaaggugaagcugaucaagcaggagcuggacaaguacaagaacgccgugaccgaccugcagcugcugaugcagagcacccccgccgccggcagcggcagcgccaucgccagcggcaucgccgugugcaaggugcugcaccuggagggcgaggugaacaagaucaagaacgcccugcugagcaccaacaaggccguggugagccugagcggcugcggcgugagcgugcugaccuucaaggugcuggaccugaagaacuacaucgacaagcagcugcugcccauccugaacaagcagagcugcagcauccccaacaucgagaccgugaucgaguuccagcagaagaacaacagacugcuggagaucaccagagaguucagcgugaacgccggcgugaccacccccgugagcaccuacaugcugaccaacagcgagcugcugagccugaucaacgacaugcccaucaccaacgaccagaagaagcugaugagcaacaacgugcagaucgugagacagcagagcuacagcaucaugugcaucaucaaggaggaggugcuggccuacguggugcagcugccccuguacggcgugaucgacacccccugcuggaagcugcacaccagcccccugugcaccaccaacaccaaggagggcagcaacaucugccugaccagaaccgacagaggcugguacugcgacaacgccggcagcgugagcuucuucccccaggccgagaccugcaaggugcagagcaacagaguguucugcgacaccaugaacagccugacccugcccagcgaggugaaccugugcaacaucgacaucuucaaccccaaguacgacugcaagaucaugaccagcaagaccgacgugagcagcagcgugaucaccagccugggcgccaucgugagcugcuacggcaagaccaagugcaccgccagcaacaagugcagaggcaucaucaagaccuucagcaacggcugcgacuacgugagcaacaagggcguggacaccgugagcgugggcaacacccuguacuacgugaacaagcaggagggccagagccuguacgugaagggcgagcccaucaucaacuucuacgacccccugguguuccccagcgacgaguucgacgccagcaucagccaggugaacgagaagaucaaccagagccuggccuucaucagaaagagcgacgagcugcugcacaacgugaacgugggcaagagcaccaccaacaucaugaucaccaccaucaucaucgugaucaucgugauccugcugcugcugaucgccgugggccuguuccuguacugcaaggccagaagcacccccgugacccugagcaaggaccagcugagcggcaucaacaacaucgccuucagcaacugaggacuagucccuguucccagagcccacuuuuuuuucuuuuuuugaaauaaaauagccugucuuucagaucuaaaaaaaaaaaaaaaaaaaaaaaaaaaaaaaaaaaaaaaaaaaaaaaaaaaaaaaaaaaaaaaaugcaucccccccccccccccccccccccccccccccaaaggcucuuuucagagccaccagaauu

SEQ ID NO: 19144 - RNA, 1933 nt, Artificial Sequence
  mRNA product Design a-4 comprising derived and/or modified sequence from HRSV(Memphis-37)__AIY60640.1__F_DSCav1_mut8 (opt5)
gggagacuccugucgggcggaaguaggaggaguagaguuuaaaaacaguacucuuuuuccgguucgggacguaguugaagcaacgacaagccggauaaccgcucuugagacaggaagcuuaccauggagcugcccauccucaagaccaacgccauuacaacgauccuggcugccgugacccuuugcuucgcgagcucccagaauauuacagaagaguuuuaccaaucuaccuguagcgcugucuccaaaggcuaucugggggcccucagaacaggaugguacaccucuguuaucacaauugaacugagcaacaucaaggagaucaaaugcaauggcaccgacgccaaggugaaacuuauuaagcaggaacuggauaaguauaaaaacgcugugacggaccuccagcugcugaugcaguccaccccugccgcugggucuggaagcgccaucgcguccggcauugccgucuguaaggugcuccaccuggagggggagguuaauaaaaucaagaacgcccuucugagcacaaauaaagcuguggucucucucuccggaugcggcgugagcguucugaccuucaaggugcuugaucugaagaacuacauugacaaacaacuccugccgauccugaauaagcagucuuguuccauucccaacaucgaaacagucaucgaguuucagcagaaaaauaaccggcuccuggaaauuacccgcgaguucagcgugaaugcuggcgugacgacaccugucucuaccuauaugcuuacaaacuccgagcugcucagccugaucaaugauaugcccauuaccaacgaccaaaagaaacuuauguccaacaauguucagaucgugagacagcagucuuacagcauuaugugcaucaucaaggaagaggugcuggccuaugucgugcaacucccucuguacgggguuauugauacccccuguuggaaacugcauacauccccucucugcacgaccaacacaaaggaaggaagcaauaucugucugacccggacagaccgcggcugguacugcgauaacgcggggucuguguccuuuuucccgcaggccgagaccuguaagguccagagcaauagaguguuuugcgacacgaugaacucucuuacacugcccagcgaaguuaaucucugcaacauugauaucuucaauccuaaauaugacuguaagauuaugaccuccaaaaccgaugugucuagcuccgucaucacaagccugggagcuaucgugucuugcuacggcaagaccaaauguacagccuccaacaagugccgggggauuaucaagacguuuagcaauggaugugacuaugucucuaacaaaggcguggacaccguuuccgugggcaauacacuuuacuaugucaacaagcaagaggggcagagccuguacgugaaaggagagcccauuaucaauuucuaugauccucucguuuuucccuccgacgaguucgaugcuucuauuagccaggugaacgaaaagaucaaccagucccuggccuuuauucgcaaaucugacgaacugcuccacaaugucaacgugggcaagagcaccacaaauaucaugaucaccacgauuaucauugugaucauuguuauccugcuucugcucaucgccgucgggcuguuccuguacugcaaggcuagauccaccccggugacacuuagcaaagaucaacucucuggaauuaacaauaucgcguucuccaacugaggacuagucccuguucccagagcccacuuuuuuuucuuuuuuugaaauaaaauagccugucuuucagaucuaaaaaaaaaaaaaaaaaaaaaaaaaaaaaaaaaaaaaaaaaaaaaaaaaaaaaaaaaaaaaaaaugcaucccccccccccccccccccccccccccccccaaaggcucuuuucagagccaccagaauu

SEQ ID NO: 19145 - RNA, 1933 nt, Artificial Sequence
  mRNA product Design a-4 comprising derived and/or modified sequence from HRSV(Memphis-37)__AIY60640.1__F_DSCav1_mut8 (opt6)
gggagacuccugucgggcggaaguaggaggaguagaguuuaaaaacaguacucuuuuuccgguucgggacguaguugaagcaacgacaagccggauaaccgcucuugagacaggaagcuuaccauggaacuuccuauuuuaaaaacaaacgcaauuacaaccauauuagcagcaguaacacuaugcuuugcaucaucacaaaacaucaccgaagaauuuuaucaauccacaugcucagcaguaucaaaaggauaccuuggcgcacuccgaacaggcugguauacaucggucauaacuauagaacucuccaacauaaaagaaauaaaaugcaaugguacugacgcaaaaguaaaauuaauaaaacaagaacuagacaaauacaaaaacgcaguaaccgauuuacaacuacuuaugcaaucaacaccugcagcaggaagcggaucagcaauagcaaguggaauagcaguaugcaaaguacuucaccucgaaggagaaguaaauaaaauaaaaaacgccuuacuaucaacaaauaaagccgucguaucacuuuccgguugcggcguaucaguauuaaccuuuaaagucuuagacuuaaaaaacuacauagacaaacaauuauuaccaauacuaaacaaacaauccuguuccauacccaacauagaaaccguaauagaauuucaacaaaaaaacaacagacuauuagaaauaacacgcgaauuuucaguaaacgcaggcguaacaacaccaguaucaacauauauguuaaccaauucagaauuauuaucccuuauaaaugacaugccuauaacaaacgaccaaaaaaaauuaaugaguaacaacguucaaauaguaagacaacaaucauacagcauaaugugcauaauaaaagaagaaguacuagcauacguaguucaacuaccacucuauggcguuaucgacaccccaugcuggaaacuacauaccucaccacucuguaccacuaauacgaaagaaggaucuaacauaugccuaaccagaacagaucgagguugguauugcgacaaugcuggaucaguaucauucuucccacaagcagaaaccugcaaaguacaaagcaacagaguauuuugugacacuaugaacucacuaacgcuaccuucagaaguaaaccuaugcaacaucgacauauucaacccaaaauacgauugcaaaauaaugacaucaaaaacagacguuuccucaucaguaauaacaucauuaggagcaauaguauccugcuacgguaaaaccaaaugcacagcauccaauaaaugccgaggaaucauuaaaacauuuucaaauggcugcgacuauguaaguaauaaagguguagauacaguaucaguaggcaacacacuauauuacguaaacaaacaagaagggcaaucccuauaugucaaaggcgaaccaauuauaaacuucuacgacccccucguauucccaucagacgaauuugacgcaucaauaucccaaguaaacgaaaaaaucaaccaaucacucgcauucauacguaaauccgacgaauuacuacauaacguaaacguaggcaaaucaacaacaaauauaaugauaacaaccauaaucauaguaauaauaguuauacuccuacuacucauugcagucggccuauuucuauacuguaaagcacgcucuacaccaguaacacuaucuaaagaucaauuauccggaauaaacaacauugccuucuccaauuaaggacuagucccuguucccagagcccacuuuuuuuucuuuuuuugaaauaaaauagccugucuuucagaucuaaaaaaaaaaaaaaaaaaaaaaaaaaaaaaaaaaaaaaaaaaaaaaaaaaaaaaaaaaaaaaaaugcaucccccccccccccccccccccccccccccccaaaggcucuuuucagagccaccagaauu

SEQ ID NO: 19146 - RNA, 1933 nt, Artificial Sequence
  mRNA product Design a-4 comprising derived and/or modified sequence from HRSV(Memphis-37)__AIY60640.1__F_DSCav1_mut8 (opt11)
gggagacuccugucgggcggaaguaggaggaguagaguuuaaaaacaguacucuuuuuccgguucgggacguaguugaagcaacgacaagccggauaaccgcucuugagacaggaagcuuaccauggaacuucccauccugaagaccaacgcuaucacaaccauccucgccgcagucacccuuugcuucgccucaucccaaaacaucaccgaagaauuuuaccagucaaccugcucggccgucuccaagggcuaccucggcgcccuccgcacuggcugguacacauccgucaucaccaucgaacucuccaacauaaaagaaauaaaaugcaacggaaccgacgccaaagucaaacucaucaaacaagaacuagauaaauauaaaaacgccgucaccgaccugcaacuccucaugcaauccaccccagccgccggcucuggcagcgccaucgcaagcggaaucgccgucugcaaaguccuccaccuagaaggcgaagucaacaaaauuaaaaacgcccuccucuccaccaacaaagcaguugucucccucucuggcugcggagucucuguacucaccuucaaaguacuagaccucaagaauuacauagacaaacaacuccugcccauccuuaacaaacaaaguuguaguauccccaacaucgaaacaguaaucgaauuucagcagaaaaacaaccgccuccucgaaaucacacgagaguucucggucaacgccggcgucaccacccccguaucaaccuacaugcuaacaaacuccgaacuacuuucccucaucaaugacaugcccauaaccaacgaccaaaagaaacuaauguccaauaacguccagauaguccgucaacaguccuacucaaucaugugcauaauuaaagaagaaguacucgccuacgucguccaacuaccccucuauggagucaucgacacccccugcuggaaacuccacacaucaccccuaugcacaaccaacaccaaagaaggcuccaacaucugccucacaagaaccgaccgcggcugguacugcgacaacgcuggcuccgucucguucuucccacaagccgaaaccugcaaaguccaaucaaaccgggucuucugcgacaccaugaacucccucacucucccaagcgaagucaaccuaugcaacaucgacaucuucaacccaaaauacgacuguaaaaucaugacuucgaaaacagacgucuccucaucaguaaucacauccuuaggcgccaucguguccugcuacgguaagaccaaaugcacagccuccaacaaaugccggggcaucaucaaaaccuucagcaacgguugugauuacgucuccaacaaaggaguagacaccgucuccguaggaaacacccucuacuacgucaacaagcaagaaggccaaucccucuacgucaaaggggaacccaucaucaacuucuacgacccacucgucuuccccuccgacgaguucgacgcaagcaucucccaagucaacgaaaagaucaaccaaucacuagccuucauccgcaaauccgacgaacuccuccacaacguuaacguaggcaaauccaccaccaacaucaugaucacaaccaucaucauagucauaauagucauccuacuacuccucaucgccguaggucuauuccuauacuguaaagcucgaucaacccccgucacacucuccaaagaucaacucucaggaaucaacaacaucgccuucuccaacuaaggacuagucccuguucccagagcccacuuuuuuuucuuuuuuugaaauaaaauagccugucuuucagaucuaaaaaaaaaaaaaaaaaaaaaaaaaaaaaaaaaaaaaaaaaaaaaaaaaaaaaaaaaaaaaaaaugcaucccccccccccccccccccccccccccccccaaaggcucuuuucagagccaccagaauu

SEQ ID NO: 19147 - RNA, 1879 nt, Artificial Sequence
  mRNA product Design a-5 comprising derived and/or modified sequence from HRSV(Memphis-37)__AIY60640.1__F_DSCav1_mut8 (opt1)
gggagacuuucccauucuguagcagaauuugguguugccuguggucuuggucccgcggagaagcuuaccauggagcugcccauccucaagaccaacgccaucaccacgauccuggccgcggugacccugugcuucgccagcucccagaacaucaccgaggaguucuaccagagcacgugcuccgccgucagcaagggcuaccucggcgcccugcgcaccgggugguacaccagcgugaucaccaucgagcuguccaacaucaaggagaucaagugcaacggcaccgacgccaaggugaagcucaucaagcaggagcuggacaaguacaagaacgcggucacggaccugcagcuccugaugcagagcaccccggccgccggcuccgggagcgcgaucgccuccggcaucgccgucugcaaggugcugcaccucgagggcgaggugaacaagaucaagaacgcccugcuguccaccaacaaggccgucgugagccucuccggcugcggggugagcguccugaccuucaaggugcuggaccucaagaacuacaucgacaagcagcugcugcccauccugaacaagcagagcugcuccauccccaacaucgagaccgucaucgaguuccagcagaagaacaaccgccuccuggagaucacgcgggaguucagcgugaacgcgggcgugaccacccccgucuccaccuacaugcugacgaacagcgagcuccugucccugaucaacgacaugccgaucaccaacgaccagaagaagcucaugagcaacaacgugcagaucgugcgccagcaguccuacagcaucaugugcaucaucaaggaggagguccuggccuacguggugcagcugccccucuacggggucaucgacacccccugcuggaagcugcacaccagcccccugugcacgaccaacaccaaggagggcuccaacaucugccucacccggacggaccgcgggugguacugcgacaacgccggcagcguguccuucuucccgcaggccgagaccugcaagguccagagcaaccggguguucugcgacaccaugaacucccugacccugcccagcgaggugaaccucugcaacaucgacaucuucaaccccaaguacgacugcaagaucaugacguccaagaccgacgucagcuccagcgugaucaccucccugggcgccaucgugagcugcuacgggaagaccaagugcacggcgagcaacaagugccgcggcaucaucaagaccuucuccaacgggugcgacuacgucagcaacaagggcguggacaccguguccgucggcaacacccuguacuacgugaacaagcaggagggccagagccucuacgugaagggggagcccaucaucaacuucuacgacccgcuggucuuccccuccgacgaguucgacgccagcaucucccaggugaacgagaagaucaaccagagccuggccuucauccggaaguccgacgagcuccugcacaacgugaacgucggcaagagcaccacgaacaucaugaucaccaccaucaucaucgugaucaucgugauccugcugcuccugaucgccgucgggcuguuccucuacugcaaggcccgcuccacccccgugacgcugagcaaggaccagcuguccgggaucaacaacaucgcguucagcaacugaggacuagucccuguucccagagcccacuuuuuuuucuuuuuuugaaauaaaauagccugucuuucagaucuaaaaaaaaaaaaaaaaaaaaaaaaaaaaaaaaaaaaaaaaaaaaaaaaaaaaaaaaaaaaaaaaugcaucccccccccccccccccccccccccccccccaaaggcucuuuucagagccaccagaauu

SEQ ID NO: 19148 - RNA, 1879 nt, Artificial Sequence
  mRNA product Design a-5 comprising derived and/or modified sequence from HRSV(Memphis-37)__AIY60640.1__F_DSCav1_mut8 (opt1)
gggagacuuucccauucuguagcagaauuugguguugccuguggucuuggucccgcggagaagcuuaccauggagcugcccauccucaagaccaacgccaucaccacgauccuggccgcggugacccugugcuucgccagcucccagaacaucaccgaggaguucuaccagagcacgugcuccgccgucagcaagggcuaccucggggcccugcgcaccggcugguacaccuccgugaucaccaucgagcugagcaacaucaaggagaucaagugcaacgggaccgacgccaaggugaagcucaucaagcaggagcuggacaaguacaagaacgcggucacggaccugcagcuccugaugcaguccaccccggccgccggcagcggguccgccaucgcgagcggcaucgccgugugcaaggugcugcaccucgagggcgaggucaacaagaucaagaacgcccugcuguccaccaacaaggccguggugagccucuccgggugcggcgucagcgugcugaccuucaaggugcuggaccucaagaacuacaucgacaagcagcugcugcccauccucaacaagcaguccugcagcauccccaacaucgagacggucaucgaguuccagcagaagaacaaccggcugcuggagaucacccgcgaguucuccgugaacgccggggugaccacccccgucagcacguacaugcucaccaacuccgagcugcugagccucaucaacgacaugccgaucaccaacgaccagaagaagcugaugagcaacaacgugcagaucgugcggcagcaguccuacagcaucaugugcaucaucaaggaggagguccuggcguacguggugcagcucccccuguacggcgucaucgacacccccugcuggaagcugcacacgagcccccucugcaccaccaacaccaaggagggguccaacaucugccugacgcgcaccgaccggggcugguacugcgacaacgccggcuccgugagcuucuucccgcaggccgagaccugcaaggugcaguccaaccgcgucuucugcgacaccaugaacagccugacgcuccccuccgaggugaaccugugcaacaucgacaucuucaaccccaaguacgacugcaagaucaugaccagcaagaccgacgucuccagcuccgugaucaccagccugggggccaucguguccugcuacggcaagacgaagugcaccgccagcaacaagugccgggggaucaucaagaccuucuccaacggcugcgacuacgucagcaacaagggcguggacaccguguccgucgggaacacgcucuacuacgugaacaagcaggagggccagagccuguacgugaagggggagcccaucaucaacuucuacgacccgcuggucuuccccagcgacgaguucgacgcguccaucagccaggugaacgagaagaucaaccagucccucgccuucauccgcaagagcgacgagcugcugcacaacgugaacgucggcaaguccaccaccaacaucaugaucaccaccaucaucaucgugaucaucgugauccuccugcugcucaucgccgucgggcuguuccuguacugcaaggcccggagcacgcccgugacccuguccaaggaccagcucagcggcaucaacaacaucgccuucuccaacugaggacuagucccuguucccagagcccacuuuuuuuucuuuuuuugaaauaaaauagccugucuuucagaucuaaaaaaaaaaaaaaaaaaaaaaaaaaaaaaaaaaaaaaaaaaaaaaaaaaaaaaaaaaaaaaaaugcaucccccccccccccccccccccccccccccccaaaggcucuuuucagagccaccagaauu

SEQ ID NO: 19149 - RNA, 1879 nt, Artificial Sequence
  mRNA product Design a-5 comprising derived and/or modified sequence from HRSV(Memphis-37)__AIY60640.1__F_DSCav1_mut8 (opt2)
gggagacuuucccauucuguagcagaauuugguguugccuguggucuuggucccgcggagaagcuuaccauggagcuccccauccucaagaccaacgccaucaccaccauccucgccgccgucacccucugcuucgccuccucccagaacaucaccgaggaguucuaccaguccaccugcuccgccgucuccaagggcuaccucggcgcccuccgcaccggcugguacaccuccgucaucaccaucgagcucuccaacaucaaggagaucaagugcaacggcaccgacgccaaggucaagcucaucaagcaggagcucgacaaguacaagaacgccgucaccgaccuccagcuccucaugcaguccacccccgccgccggcuccggcuccgccaucgccuccggcaucgccgucugcaagguccuccaccucgagggcgaggucaacaagaucaagaacgcccuccucuccaccaacaaggccgucgucucccucuccggcugcggcgucuccguccucaccuucaagguccucgaccucaagaacuacaucgacaagcagcuccuccccauccucaacaagcaguccugcuccauccccaacaucgagaccgucaucgaguuccagcagaagaacaaccgccuccucgagaucacccgcgaguucuccgucaacgccggcgucaccacccccgucuccaccuacaugcucaccaacuccgagcuccucucccucaucaacgacaugcccaucaccaacgaccagaagaagcucauguccaacaacguccagaucguccgccagcaguccuacuccaucaugugcaucaucaaggaggagguccucgccuacgucguccagcucccccucuacggcgucaucgacacccccugcuggaagcuccacaccuccccccucugcaccaccaacaccaaggagggcuccaacaucugccucacccgcaccgaccgcggcugguacugcgacaacgccggcuccgucuccuucuucccccaggccgagaccugcaagguccaguccaaccgcgucuucugcgacaccaugaacucccucacccuccccuccgaggucaaccucugcaacaucgacaucuucaaccccaaguacgacugcaagaucaugaccuccaagaccgacgucuccuccuccgucaucaccucccucggcgccaucgucuccugcuacggcaagaccaagugcaccgccuccaacaagugccgcggcaucaucaagaccuucuccaacggcugcgacuacgucuccaacaagggcgucgacaccgucuccgucggcaacacccucuacuacgucaacaagcaggagggccagucccucuacgucaagggcgagcccaucaucaacuucuacgacccccucgucuuccccuccgacgaguucgacgccuccaucucccaggucaacgagaagaucaaccagucccucgccuucauccgcaaguccgacgagcuccuccacaacgucaacgucggcaaguccaccaccaacaucaugaucaccaccaucaucaucgucaucaucgucauccuccuccuccucaucgccgucggccucuuccucuacugcaaggcccgcuccacccccgucacccucuccaaggaccagcucuccggcaucaacaacaucgccuucuccaacugaggacuagucccuguucccagagcccacuuuuuuuucuuuuuuugaaauaaaauagccugucuuucagaucuaaaaaaaaaaaaaaaaaaaaaaaaaaaaaaaaaaaaaaaaaaaaaaaaaaaaaaaaaaaaaaaaugcaucccccccccccccccccccccccccccccccaaaggcucuuuucagagccaccagaauu

SEQ ID NO: 19150 - RNA, 1879 nt, Artificial Sequence
  mRNA product Design a-5 comprising derived and/or modified sequence from HRSV(Memphis-37)__AIY60640.1__F_DSCav1_mut8 (opt3)
gggagacuuucccauucuguagcagaauuugguguugccuguggucuuggucccgcggagaagcuuaccauggagcugcccauccucaagaccaacgccauuacaacuauacuugcugcagugacgcugugcuucgccagcucccagaauaucaccgaagaguuuuaccaaucuacauguucagcggucaguaaaggcuauuugggggcuuuaagaacuggaugguacaccagcguuauuacaaucgaacuguccaacauuaaggagaucaaaugcaaugguaccgacgccaaggugaaacuaauaaagcaggaacucgauaaguauaaaaacgcaguaacugaccugcagcuucugaugcagucuacuccugccgcuggcucggggucagcaaucgccagcggaauugcuguguguaaggucuugcaccucgagggcgaggugaauaaaaucaagaacgcccugcugaguaccaauaaagcgguugugucccucucugguugcggggucagcguguuaacguucaagguacuggaucuuaagaacuacauugacaaacaauugcugccaauccuaaauaagcaguccuguucaauaccgaacauugaaacuguuaucgaguuucagcagaaaaauaacaggcuccuggaaauuacccgggaguucagugugaaugcaggagucacaacucccgugagcaccuauaugcuuacaaacucugagcuguugucccucaucaaugauaugccuaucaccaacgaccaaaagaaacugaugucaaacaaugugcagauuguccgccagcagagcuacaguauaaugugcaucauuaaggaagagguuuuagccuaugugguacaacugccacucuacggcgugaucgauacgcccuguuggaaacuucauacuucuccucugugcacaaccaacacuaaggaaggcuccaauauauguuugacacgaaccgaccgugggugguacugcgauaacgcuggaagcgucucguuuuucccacaggccgagacguguaaggugcagucuaauagaguuuucugcgacaccaugaacucccuaacacugcccucagaagugaaucucugcaacauugauaucuucaauccuaaauaugacuguaagaucaugacaaguaaaaccgaugucagcuccucugugauuacaagccugggugcaaucguaucaugcuacggcaagacuaaauguaccgcuaguaacaagugcagggggauuauaaagacauuuuccaauggaugugacuauguuagcaacaaaggcguggacaccgucucuguggguaauacucuuuacuaugucaacaagcaagaggggcagucacuguacgugaaaggagagccaaucauuaauuucuaugauccguugguuuuucccagugacgaauuugaugccagcaucucccaggugaacgagaagaucaaccagucucucgcguuuauucggaaaucggacgaacuguuacacaauguaaacgucggcaagagcacgacaaauauaaugaucaccacuauuaucauugugaucauaguuauccugcuacuccugauugccgugggccuuuucuuguacugcaaggcacgcuccaccccugucacacugucaaaagaucaacucagugggaucaacaauauugcuuucucuaacugaggacuagucccuguucccagagcccacuuuuuuuucuuuuuuugaaauaaaauagccugucuuucagaucuaaaaaaaaaaaaaaaaaaaaaaaaaaaaaaaaaaaaaaaaaaaaaaaaaaaaaaaaaaaaaaaaugcaucccccccccccccccccccccccccccccccaaaggcucuuuucagagccaccagaauu

SEQ ID NO: 19151 - RNA, 1879 nt, Artificial Sequence
  mRNA product Design a-5 comprising derived and/or modified sequence from HRSV(Memphis-37)__AIY60640.1__F_DSCav1_mut8 (opt4)
gggagacuuucccauucuguagcagaauuugguguugccuguggucuuggucccgcggagaagcuuaccauggagcugcccauccugaagaccaacgccaucaccaccauccuggccgccgugacccugugcuucgccagcagccagaacaucaccgaggaguucuaccagagcaccugcagcgccgugagcaagggcuaccugggcgcccugagaaccggcugguacaccagcgugaucaccaucgagcugagcaacaucaaggagaucaagugcaacggcaccgacgccaaggugaagcugaucaagcaggagcuggacaaguacaagaacgccgugaccgaccugcagcugcugaugcagagcacccccgccgccggcagcggcagcgccaucgccagcggcaucgccgugugcaaggugcugcaccuggagggcgaggugaacaagaucaagaacgcccugcugagcaccaacaaggccguggugagccugagcggcugcggcgugagcgugcugaccuucaaggugcuggaccugaagaacuacaucgacaagcagcugcugcccauccugaacaagcagagcugcagcauccccaacaucgagaccgugaucgaguuccagcagaagaacaacagacugcuggagaucaccagagaguucagcgugaacgccggcgugaccacccccgugagcaccuacaugcugaccaacagcgagcugcugagccugaucaacgacaugcccaucaccaacgaccagaagaagcugaugagcaacaacgugcagaucgugagacagcagagcuacagcaucaugugcaucaucaaggaggaggugcuggccuacguggugcagcugccccuguacggcgugaucgacacccccugcuggaagcugcacaccagcccccugugcaccaccaacaccaaggagggcagcaacaucugccugaccagaaccgacagaggcugguacugcgacaacgccggcagcgugagcuucuucccccaggccgagaccugcaaggugcagagcaacagaguguucugcgacaccaugaacagccugacccugcccagcgaggugaaccugugcaacaucgacaucuucaaccccaaguacgacugcaagaucaugaccagcaagaccgacgugagcagcagcgugaucaccagccugggcgccaucgugagcugcuacggcaagaccaagugcaccgccagcaacaagugcagaggcaucaucaagaccuucagcaacggcugcgacuacgugagcaacaagggcguggacaccgugagcgugggcaacacccuguacuacgugaacaagcaggagggccagagccuguacgugaagggcgagcccaucaucaacuucuacgacccccugguguuccccagcgacgaguucgacgccagcaucagccaggugaacgagaagaucaaccagagccuggccuucaucagaaagagcgacgagcugcugcacaacgugaacgugggcaagagcaccaccaacaucaugaucaccaccaucaucaucgugaucaucgugauccugcugcugcugaucgccgugggccuguuccuguacugcaaggccagaagcacccccgugacccugagcaaggaccagcugagcggcaucaacaacaucgccuucagcaacugaggacuagucccuguucccagagcccacuuuuuuuucuuuuuuugaaauaaaauagccugucuuucagaucuaaaaaaaaaaaaaaaaaaaaaaaaaaaaaaaaaaaaaaaaaaaaaaaaaaaaaaaaaaaaaaaaugcaucccccccccccccccccccccccccccccccaaaggcucuuuucagagccaccagaauu

SEQ ID NO: 19152 - RNA, 1879 nt, Artificial Sequence
  mRNA product Design a-5 comprising derived and/or modified sequence from HRSV(Memphis-37)__AIY60640.1__F_DSCav1_mut8 (opt5)
gggagacuuucccauucuguagcagaauuugguguugccuguggucuuggucccgcggagaagcuuaccauggagcugcccauccucaagaccaacgccauuacaacgauccuggcugccgugacccuuugcuucgcgagcucccagaauauuacagaagaguuuuaccaaucuaccuguagcgcugucuccaaaggcuaucugggggcccucagaacaggaugguacaccucuguuaucacaauugaacugagcaacaucaaggagaucaaaugcaauggcaccgacgccaaggugaaacuuauuaagcaggaacuggauaaguauaaaaacgcugugacggaccuccagcugcugaugcaguccaccccugccgcugggucuggaagcgccaucgcguccggcauugccgucuguaaggugcuccaccuggagggggagguuaauaaaaucaagaacgcccuucugagcacaaauaaagcuguggucucucucuccggaugcggcgugagcguucugaccuucaaggugcuugaucugaagaacuacauugacaaacaacuccugccgauccugaauaagcagucuuguuccauucccaacaucgaaacagucaucgaguuucagcagaaaaauaaccggcuccuggaaauuacccgcgaguucagcgugaaugcuggcgugacgacaccugucucuaccuauaugcuuacaaacuccgagcugcucagccugaucaaugauaugcccauuaccaacgaccaaaagaaacuuauguccaacaauguucagaucgugagacagcagucuuacagcauuaugugcaucaucaaggaagaggugcuggccuaugucgugcaacucccucuguacgggguuauugauacccccuguuggaaacugcauacauccccucucugcacgaccaacacaaaggaaggaagcaauaucugucugacccggacagaccgcggcugguacugcgauaacgcggggucuguguccuuuuucccgcaggccgagaccuguaagguccagagcaauagaguguuuugcgacacgaugaacucucuuacacugcccagcgaaguuaaucucugcaacauugauaucuucaauccuaaauaugacuguaagauuaugaccuccaaaaccgaugugucuagcuccgucaucacaagccugggagcuaucgugucuugcuacggcaagaccaaauguacagccuccaacaagugccgggggauuaucaagacguuuagcaauggaugugacuaugucucuaacaaaggcguggacaccguuuccgugggcaauacacuuuacuaugucaacaagcaagaggggcagagccuguacgugaaaggagagcccauuaucaauuucuaugauccucucguuuuucccuccgacgaguucgaugcuucuauuagccaggugaacgaaaagaucaaccagucccuggccuuuauucgcaaaucugacgaacugcuccacaaugucaacgugggcaagagcaccacaaauaucaugaucaccacgauuaucauugugaucauuguuauccugcuucugcucaucgccgucgggcuguuccuguacugcaaggcuagauccaccccggugacacuuagcaaagaucaacucucuggaauuaacaauaucgcguucuccaacugaggacuagucccuguucccagagcccacuuuuuuuucuuuuuuugaaauaaaauagccugucuuucagaucuaaaaaaaaaaaaaaaaaaaaaaaaaaaaaaaaaaaaaaaaaaaaaaaaaaaaaaaaaaaaaaaaugcaucccccccccccccccccccccccccccccccaaaggcucuuuucagagccaccagaauu

SEQ ID NO: 19153 - RNA, 1879 nt, Artificial Sequence
  mRNA product Design a-5 comprising derived and/or modified sequence from HRSV(Memphis-37)__AIY60640.1__F_DSCav1_mut8 (opt6)
gggagacuuucccauucuguagcagaauuugguguugccuguggucuuggucccgcggagaagcuuaccauggaacuuccuauuuuaaaaacaaacgcaauuacaaccauauuagcagcaguaacacuaugcuuugcaucaucacaaaacaucaccgaagaauuuuaucaauccacaugcucagcaguaucaaaaggauaccuuggcgcacuccgaacaggcugguauacaucggucauaacuauagaacucuccaacauaaaagaaauaaaaugcaaugguacugacgcaaaaguaaaauuaauaaaacaagaacuagacaaauacaaaaacgcaguaaccgauuuacaacuacuuaugcaaucaacaccugcagcaggaagcggaucagcaauagcaaguggaauagcaguaugcaaaguacuucaccucgaaggagaaguaaauaaaauaaaaaacgccuuacuaucaacaaauaaagccgucguaucacuuuccgguugcggcguaucaguauuaaccuuuaaagucuuagacuuaaaaaacuacauagacaaacaauuauuaccaauacuaaacaaacaauccuguuccauacccaacauagaaaccguaauagaauuucaacaaaaaaacaacagacuauuagaaauaacacgcgaauuuucaguaaacgcaggcguaacaacaccaguaucaacauauauguuaaccaauucagaauuauuaucccuuauaaaugacaugccuauaacaaacgaccaaaaaaaauuaaugaguaacaacguucaaauaguaagacaacaaucauacagcauaaugugcauaauaaaagaagaaguacuagcauacguaguucaacuaccacucuauggcguuaucgacaccccaugcuggaaacuacauaccucaccacucuguaccacuaauacgaaagaaggaucuaacauaugccuaaccagaacagaucgagguugguauugcgacaaugcuggaucaguaucauucuucccacaagcagaaaccugcaaaguacaaagcaacagaguauuuugugacacuaugaacucacuaacgcuaccuucagaaguaaaccuaugcaacaucgacauauucaacccaaaauacgauugcaaaauaaugacaucaaaaacagacguuuccucaucaguaauaacaucauuaggagcaauaguauccugcuacgguaaaaccaaaugcacagcauccaauaaaugccgaggaaucauuaaaacauuuucaaauggcugcgacuauguaaguaauaaagguguagauacaguaucaguaggcaacacacuauauuacguaaacaaacaagaagggcaaucccuauaugucaaaggcgaaccaauuauaaacuucuacgacccccucguauucccaucagacgaauuugacgcaucaauaucccaaguaaacgaaaaaaucaaccaaucacucgcauucauacguaaauccgacgaauuacuacauaacguaaacguaggcaaaucaacaacaaauauaaugauaacaaccauaaucauaguaauaauaguuauacuccuacuacucauugcagucggccuauuucuauacuguaaagcacgcucuacaccaguaacacuaucuaaagaucaauuauccggaauaaacaacauugccuucuccaauuaaggacuagucccuguucccagagcccacuuuuuuuucuuuuuuugaaauaaaauagccugucuuucagaucuaaaaaaaaaaaaaaaaaaaaaaaaaaaaaaaaaaaaaaaaaaaaaaaaaaaaaaaaaaaaaaaaugcaucccccccccccccccccccccccccccccccaaaggcucuuuucagagccaccagaauu

SEQ ID NO: 19154 - RNA, 1879 nt, Artificial Sequence
  mRNA product Design a-5 comprising derived and/or modified sequence from HRSV(Memphis-37)__AIY60640.1__F_DSCav1_mut8 (opt11)
gggagacuuucccauucuguagcagaauuugguguugccuguggucuuggucccgcggagaagcuuaccauggaacuucccauccugaagaccaacgcuaucacaaccauccucgccgcagucacccuuugcuucgccucaucccaaaacaucaccgaagaauuuuaccagucaaccugcucggccgucuccaagggcuaccucggcgcccuccgcacuggcugguacacauccgucaucaccaucgaacucuccaacauaaaagaaauaaaaugcaacggaaccgacgccaaagucaaacucaucaaacaagaacuagauaaauauaaaaacgccgucaccgaccugcaacuccucaugcaauccaccccagccgccggcucuggcagcgccaucgcaagcggaaucgccgucugcaaaguccuccaccuagaaggcgaagucaacaaaauuaaaaacgcccuccucuccaccaacaaagcaguugucucccucucuggcugcggagucucuguacucaccuucaaaguacuagaccucaagaauuacauagacaaacaacuccugcccauccuuaacaaacaaaguuguaguauccccaacaucgaaacaguaaucgaauuucagcagaaaaacaaccgccuccucgaaaucacacgagaguucucggucaacgccggcgucaccacccccguaucaaccuacaugcuaacaaacuccgaacuacuuucccucaucaaugacaugcccauaaccaacgaccaaaagaaacuaauguccaauaacguccagauaguccgucaacaguccuacucaaucaugugcauaauuaaagaagaaguacucgccuacgucguccaacuaccccucuauggagucaucgacacccccugcuggaaacuccacacaucaccccuaugcacaaccaacaccaaagaaggcuccaacaucugccucacaagaaccgaccgcggcugguacugcgacaacgcuggcuccgucucguucuucccacaagccgaaaccugcaaaguccaaucaaaccgggucuucugcgacaccaugaacucccucacucucccaagcgaagucaaccuaugcaacaucgacaucuucaacccaaaauacgacuguaaaaucaugacuucgaaaacagacgucuccucaucaguaaucacauccuuaggcgccaucguguccugcuacgguaagaccaaaugcacagccuccaacaaaugccggggcaucaucaaaaccuucagcaacgguugugauuacgucuccaacaaaggaguagacaccgucuccguaggaaacacccucuacuacgucaacaagcaagaaggccaaucccucuacgucaaaggggaacccaucaucaacuucuacgacccacucgucuuccccuccgacgaguucgacgcaagcaucucccaagucaacgaaaagaucaaccaaucacuagccuucauccgcaaauccgacgaacuccuccacaacguuaacguaggcaaauccaccaccaacaucaugaucacaaccaucaucauagucauaauagucauccuacuacuccucaucgccguaggucuauuccuauacuguaaagcucgaucaacccccgucacacucuccaaagaucaacucucaggaaucaacaacaucgccuucuccaacuaaggacuagucccuguucccagagcccacuuuuuuuucuuuuuuugaaauaaaauagccugucuuucagaucuaaaaaaaaaaaaaaaaaaaaaaaaaaaaaaaaaaaaaaaaaaaaaaaaaaaaaaaaaaaaaaaaugcaucccccccccccccccccccccccccccccccaaaggcucuuuucagagccaccagaauu

SEQ ID NO: 19155 - RNA, 2060 nt, Artificial Sequence
  mRNA product Design b-1 comprising derived and/or modified sequence from HRSV(Memphis-37)__AIY60640.1__F_DSCav1_mut8 (opt1)
gggagacggagacggccugcaggaccugcucucucagcccucagccgaggccuacgccgagccgagugcgcagccgacgaccgggaggagccgcagccuucaacucugagguacugugauccgcgcugcccgccgggccgccccaguccgcugcugcggcaccuccuucccucgcgcccucuucgcucgccagcgccuucccugugagccugcgucaccgcggccgccaagcuuaccauggagcugcccauccucaagaccaacgccaucaccacgauccuggccgcggugacccugugcuucgccagcucccagaacaucaccgaggaguucuaccagagcacgugcuccgccgucagcaagggcuaccucggcgcccugcgcaccgggugguacaccagcgugaucaccaucgagcuguccaacaucaaggagaucaagugcaacggcaccgacgccaaggugaagcucaucaagcaggagcuggacaaguacaagaacgcggucacggaccugcagcuccugaugcagagcaccccggccgccggcuccgggagcgcgaucgccuccggcaucgccgucugcaaggugcugcaccucgagggcgaggugaacaagaucaagaacgcccugcuguccaccaacaaggccgucgugagccucuccggcugcggggugagcguccugaccuucaaggugcuggaccucaagaacuacaucgacaagcagcugcugcccauccugaacaagcagagcugcuccauccccaacaucgagaccgucaucgaguuccagcagaagaacaaccgccuccuggagaucacgcgggaguucagcgugaacgcgggcgugaccacccccgucuccaccuacaugcugacgaacagcgagcuccugucccugaucaacgacaugccgaucaccaacgaccagaagaagcucaugagcaacaacgugcagaucgugcgccagcaguccuacagcaucaugugcaucaucaaggaggagguccuggccuacguggugcagcugccccucuacggggucaucgacacccccugcuggaagcugcacaccagcccccugugcacgaccaacaccaaggagggcuccaacaucugccucacccggacggaccgcgggugguacugcgacaacgccggcagcguguccuucuucccgcaggccgagaccugcaagguccagagcaaccggguguucugcgacaccaugaacucccugacccugcccagcgaggugaaccucugcaacaucgacaucuucaaccccaaguacgacugcaagaucaugacguccaagaccgacgucagcuccagcgugaucaccucccugggcgccaucgugagcugcuacgggaagaccaagugcacggcgagcaacaagugccgcggcaucaucaagaccuucuccaacgggugcgacuacgucagcaacaagggcguggacaccguguccgucggcaacacccuguacuacgugaacaagcaggagggccagagccucuacgugaagggggagcccaucaucaacuucuacgacccgcuggucuuccccuccgacgaguucgacgccagcaucucccaggugaacgagaagaucaaccagagccuggccuucauccggaaguccgacgagcuccugcacaacgugaacgucggcaagagcaccacgaacaucaugaucaccaccaucaucaucgugaucaucgugauccugcugcuccugaucgccgucgggcuguuccucuacugcaaggcccgcuccacccccgugacgcugagcaaggaccagcuguccgggaucaacaacaucgcguucagcaacugaggacuaguguccaccugucccuccugggcugcuggauugucucguuuuccugccaaauaaacaggaucagcgcuuuacagaucuaaaaaaaaaaaaaaaaaaaaaaaaaaaaaaaaaaaaaaaaaaaaaaaaaaaaaaaaaaaaaaaaugcaucccccccccccccccccccccccccccccccaaaggcucuuuucagagccaccagaauu

SEQ ID NO: 19156 - RNA, 2060 nt, Artificial Sequence
  mRNA product Design b-1 comprising derived and/or modified sequence from HRSV(Memphis-37)__AIY60640.1__F_DSCav1_mut8 (opt1)
gggagacggagacggccugcaggaccugcucucucagcccucagccgaggccuacgccgagccgagugcgcagccgacgaccgggaggagccgcagccuucaacucugagguacugugauccgcgcugcccgccgggccgccccaguccgcugcugcggcaccuccuucccucgcgcccucuucgcucgccagcgccuucccugugagccugcgucaccgcggccgccaagcuuaccauggagcugcccauccucaagaccaacgccaucaccacgauccuggccgcggugacccugugcuucgccagcucccagaacaucaccgaggaguucuaccagagcacgugcuccgccgucagcaagggcuaccucggggcccugcgcaccggcugguacaccuccgugaucaccaucgagcugagcaacaucaaggagaucaagugcaacgggaccgacgccaaggugaagcucaucaagcaggagcuggacaaguacaagaacgcggucacggaccugcagcuccugaugcaguccaccccggccgccggcagcggguccgccaucgcgagcggcaucgccgugugcaaggugcugcaccucgagggcgaggucaacaagaucaagaacgcccugcuguccaccaacaaggccguggugagccucuccgggugcggcgucagcgugcugaccuucaaggugcuggaccucaagaacuacaucgacaagcagcugcugcccauccucaacaagcaguccugcagcauccccaacaucgagacggucaucgaguuccagcagaagaacaaccggcugcuggagaucacccgcgaguucuccgugaacgccggggugaccacccccgucagcacguacaugcucaccaacuccgagcugcugagccucaucaacgacaugccgaucaccaacgaccagaagaagcugaugagcaacaacgugcagaucgugcggcagcaguccuacagcaucaugugcaucaucaaggaggagguccuggcguacguggugcagcucccccuguacggcgucaucgacacccccugcuggaagcugcacacgagcccccucugcaccaccaacaccaaggagggguccaacaucugccugacgcgcaccgaccggggcugguacugcgacaacgccggcuccgugagcuucuucccgcaggccgagaccugcaaggugcaguccaaccgcgucuucugcgacaccaugaacagccugacgcuccccuccgaggugaaccugugcaacaucgacaucuucaaccccaaguacgacugcaagaucaugaccagcaagaccgacgucuccagcuccgugaucaccagccugggggccaucguguccugcuacggcaagacgaagugcaccgccagcaacaagugccgggggaucaucaagaccuucuccaacggcugcgacuacgucagcaacaagggcguggacaccguguccgucgggaacacgcucuacuacgugaacaagcaggagggccagagccuguacgugaagggggagcccaucaucaacuucuacgacccgcuggucuuccccagcgacgaguucgacgcguccaucagccaggugaacgagaagaucaaccagucccucgccuucauccgcaagagcgacgagcugcugcacaacgugaacgucggcaaguccaccaccaacaucaugaucaccaccaucaucaucgugaucaucgugauccuccugcugcucaucgccgucgggcuguuccuguacugcaaggcccggagcacgcccgugacccuguccaaggaccagcucagcggcaucaacaacaucgccuucuccaacugaggacuaguguccaccugucccuccugggcugcuggauugucucguuuuccugccaaauaaacaggaucagcgcuuuacagaucuaaaaaaaaaaaaaaaaaaaaaaaaaaaaaaaaaaaaaaaaaaaaaaaaaaaaaaaaaaaaaaaaugcaucccccccccccccccccccccccccccccccaaaggcucuuuucagagccaccagaauu

SEQ ID NO: 19157 - RNA, 2060 nt, Artificial Sequence
  mRNA product Design b-1 comprising derived and/or modified sequence from HRSV(Memphis-37)__AIY60640.1__F_DSCav1_mut8 (opt2)
gggagacggagacggccugcaggaccugcucucucagcccucagccgaggccuacgccgagccgagugcgcagccgacgaccgggaggagccgcagccuucaacucugagguacugugauccgcgcugcccgccgggccgccccaguccgcugcugcggcaccuccuucccucgcgcccucuucgcucgccagcgccuucccugugagccugcgucaccgcggccgccaagcuuaccauggagcuccccauccucaagaccaacgccaucaccaccauccucgccgccgucacccucugcuucgccuccucccagaacaucaccgaggaguucuaccaguccaccugcuccgccgucuccaagggcuaccucggcgcccuccgcaccggcugguacaccuccgucaucaccaucgagcucuccaacaucaaggagaucaagugcaacggcaccgacgccaaggucaagcucaucaagcaggagcucgacaaguacaagaacgccgucaccgaccuccagcuccucaugcaguccacccccgccgccggcuccggcuccgccaucgccuccggcaucgccgucugcaagguccuccaccucgagggcgaggucaacaagaucaagaacgcccuccucuccaccaacaaggccgucgucucccucuccggcugcggcgucuccguccucaccuucaagguccucgaccucaagaacuacaucgacaagcagcuccuccccauccucaacaagcaguccugcuccauccccaacaucgagaccgucaucgaguuccagcagaagaacaaccgccuccucgagaucacccgcgaguucuccgucaacgccggcgucaccacccccgucuccaccuacaugcucaccaacuccgagcuccucucccucaucaacgacaugcccaucaccaacgaccagaagaagcucauguccaacaacguccagaucguccgccagcaguccuacuccaucaugugcaucaucaaggaggagguccucgccuacgucguccagcucccccucuacggcgucaucgacacccccugcuggaagcuccacaccuccccccucugcaccaccaacaccaaggagggcuccaacaucugccucacccgcaccgaccgcggcugguacugcgacaacgccggcuccgucuccuucuucccccaggccgagaccugcaagguccaguccaaccgcgucuucugcgacaccaugaacucccucacccuccccuccgaggucaaccucugcaacaucgacaucuucaaccccaaguacgacugcaagaucaugaccuccaagaccgacgucuccuccuccgucaucaccucccucggcgccaucgucuccugcuacggcaagaccaagugcaccgccuccaacaagugccgcggcaucaucaagaccuucuccaacggcugcgacuacgucuccaacaagggcgucgacaccgucuccgucggcaacacccucuacuacgucaacaagcaggagggccagucccucuacgucaagggcgagcccaucaucaacuucuacgacccccucgucuuccccuccgacgaguucgacgccuccaucucccaggucaacgagaagaucaaccagucccucgccuucauccgcaaguccgacgagcuccuccacaacgucaacgucggcaaguccaccaccaacaucaugaucaccaccaucaucaucgucaucaucgucauccuccuccuccucaucgccgucggccucuuccucuacugcaaggcccgcuccacccccgucacccucuccaaggaccagcucuccggcaucaacaacaucgccuucuccaacugaggacuaguguccaccugucccuccugggcugcuggauugucucguuuuccugccaaauaaacaggaucagcgcuuuacagaucuaaaaaaaaaaaaaaaaaaaaaaaaaaaaaaaaaaaaaaaaaaaaaaaaaaaaaaaaaaaaaaaaugcaucccccccccccccccccccccccccccccccaaaggcucuuuucagagccaccagaauu

SEQ ID NO: 19158 - RNA, 2060 nt, Artificial Sequence
  mRNA product Design b-1 comprising derived and/or modified sequence from HRSV(Memphis-37)__AIY60640.1__F_DSCav1_mut8 (opt3)
gggagacggagacggccugcaggaccugcucucucagcccucagccgaggccuacgccgagccgagugcgcagccgacgaccgggaggagccgcagccuucaacucugagguacugugauccgcgcugcccgccgggccgccccaguccgcugcugcggcaccuccuucccucgcgcccucuucgcucgccagcgccuucccugugagccugcgucaccgcggccgccaagcuuaccauggagcugcccauccucaagaccaacgccauuacaacuauacuugcugcagugacgcugugcuucgccagcucccagaauaucaccgaagaguuuuaccaaucuacauguucagcggucaguaaaggcuauuugggggcuuuaagaacuggaugguacaccagcguuauuacaaucgaacuguccaacauuaaggagaucaaaugcaaugguaccgacgccaaggugaaacuaauaaagcaggaacucgauaaguauaaaaacgcaguaacugaccugcagcuucugaugcagucuacuccugccgcuggcucggggucagcaaucgccagcggaauugcuguguguaaggucuugcaccucgagggcgaggugaauaaaaucaagaacgcccugcugaguaccaauaaagcgguugugucccucucugguugcggggucagcguguuaacguucaagguacuggaucuuaagaacuacauugacaaacaauugcugccaauccuaaauaagcaguccuguucaauaccgaacauugaaacuguuaucgaguuucagcagaaaaauaacaggcuccuggaaauuacccgggaguucagugugaaugcaggagucacaacucccgugagcaccuauaugcuuacaaacucugagcuguugucccucaucaaugauaugccuaucaccaacgaccaaaagaaacugaugucaaacaaugugcagauuguccgccagcagagcuacaguauaaugugcaucauuaaggaagagguuuuagccuaugugguacaacugccacucuacggcgugaucgauacgcccuguuggaaacuucauacuucuccucugugcacaaccaacacuaaggaaggcuccaauauauguuugacacgaaccgaccgugggugguacugcgauaacgcuggaagcgucucguuuuucccacaggccgagacguguaaggugcagucuaauagaguuuucugcgacaccaugaacucccuaacacugcccucagaagugaaucucugcaacauugauaucuucaauccuaaauaugacuguaagaucaugacaaguaaaaccgaugucagcuccucugugauuacaagccugggugcaaucguaucaugcuacggcaagacuaaauguaccgcuaguaacaagugcagggggauuauaaagacauuuuccaauggaugugacuauguuagcaacaaaggcguggacaccgucucuguggguaauacucuuuacuaugucaacaagcaagaggggcagucacuguacgugaaaggagagccaaucauuaauuucuaugauccguugguuuuucccagugacgaauuugaugccagcaucucccaggugaacgagaagaucaaccagucucucgcguuuauucggaaaucggacgaacuguuacacaauguaaacgucggcaagagcacgacaaauauaaugaucaccacuauuaucauugugaucauaguuauccugcuacuccugauugccgugggccuuuucuuguacugcaaggcacgcuccaccccugucacacugucaaaagaucaacucagugggaucaacaauauugcuuucucuaacugaggacuaguguccaccugucccuccugggcugcuggauugucucguuuuccugccaaauaaacaggaucagcgcuuuacagaucuaaaaaaaaaaaaaaaaaaaaaaaaaaaaaaaaaaaaaaaaaaaaaaaaaaaaaaaaaaaaaaaaugcaucccccccccccccccccccccccccccccccaaaggcucuuuucagagccaccagaauu

SEQ ID NO: 19159 - RNA, 2060 nt, Artificial Sequence
  mRNA product Design b-1 comprising derived and/or modified sequence from HRSV(Memphis-37)__AIY60640.1__F_DSCav1_mut8 (opt4)
gggagacggagacggccugcaggaccugcucucucagcccucagccgaggccuacgccgagccgagugcgcagccgacgaccgggaggagccgcagccuucaacucugagguacugugauccgcgcugcccgccgggccgccccaguccgcugcugcggcaccuccuucccucgcgcccucuucgcucgccagcgccuucccugugagccugcgucaccgcggccgccaagcuuaccauggagcugcccauccugaagaccaacgccaucaccaccauccuggccgccgugacccugugcuucgccagcagccagaacaucaccgaggaguucuaccagagcaccugcagcgccgugagcaagggcuaccugggcgcccugagaaccggcugguacaccagcgugaucaccaucgagcugagcaacaucaaggagaucaagugcaacggcaccgacgccaaggugaagcugaucaagcaggagcuggacaaguacaagaacgccgugaccgaccugcagcugcugaugcagagcacccccgccgccggcagcggcagcgccaucgccagcggcaucgccgugugcaaggugcugcaccuggagggcgaggugaacaagaucaagaacgcccugcugagcaccaacaaggccguggugagccugagcggcugcggcgugagcgugcugaccuucaaggugcuggaccugaagaacuacaucgacaagcagcugcugcccauccugaacaagcagagcugcagcauccccaacaucgagaccgugaucgaguuccagcagaagaacaacagacugcuggagaucaccagagaguucagcgugaacgccggcgugaccacccccgugagcaccuacaugcugaccaacagcgagcugcugagccugaucaacgacaugcccaucaccaacgaccagaagaagcugaugagcaacaacgugcagaucgugagacagcagagcuacagcaucaugugcaucaucaaggaggaggugcuggccuacguggugcagcugccccuguacggcgugaucgacacccccugcuggaagcugcacaccagcccccugugcaccaccaacaccaaggagggcagcaacaucugccugaccagaaccgacagaggcugguacugcgacaacgccggcagcgugagcuucuucccccaggccgagaccugcaaggugcagagcaacagaguguucugcgacaccaugaacagccugacccugcccagcgaggugaaccugugcaacaucgacaucuucaaccccaaguacgacugcaagaucaugaccagcaagaccgacgugagcagcagcgugaucaccagccugggcgccaucgugagcugcuacggcaagaccaagugcaccgccagcaacaagugcagaggcaucaucaagaccuucagcaacggcugcgacuacgugagcaacaagggcguggacaccgugagcgugggcaacacccuguacuacgugaacaagcaggagggccagagccuguacgugaagggcgagcccaucaucaacuucuacgacccccugguguuccccagcgacgaguucgacgccagcaucagccaggugaacgagaagaucaaccagagccuggccuucaucagaaagagcgacgagcugcugcacaacgugaacgugggcaagagcaccaccaacaucaugaucaccaccaucaucaucgugaucaucgugauccugcugcugcugaucgccgugggccuguuccuguacugcaaggccagaagcacccccgugacccugagcaaggaccagcugagcggcaucaacaacaucgccuucagcaacugaggacuaguguccaccugucccuccugggcugcuggauugucucguuuuccugccaaauaaacaggaucagcgcuuuacagaucuaaaaaaaaaaaaaaaaaaaaaaaaaaaaaaaaaaaaaaaaaaaaaaaaaaaaaaaaaaaaaaaaugcaucccccccccccccccccccccccccccccccaaaggcucuuuucagagccaccagaauu

SEQ ID NO: 19160 - RNA, 2060 nt, Artificial Sequence
  mRNA product Design b-1 comprising derived and/or modified sequence from HRSV(Memphis-37)__AIY60640.1__F_DSCav1_mut8 (opt5)
gggagacggagacggccugcaggaccugcucucucagcccucagccgaggccuacgccgagccgagugcgcagccgacgaccgggaggagccgcagccuucaacucugagguacugugauccgcgcugcccgccgggccgccccaguccgcugcugcggcaccuccuucccucgcgcccucuucgcucgccagcgccuucccugugagccugcgucaccgcggccgccaagcuuaccauggagcugcccauccucaagaccaacgccauuacaacgauccuggcugccgugacccuuugcuucgcgagcucccagaauauuacagaagaguuuuaccaaucuaccuguagcgcugucuccaaaggcuaucugggggcccucagaacaggaugguacaccucuguuaucacaauugaacugagcaacaucaaggagaucaaaugcaauggcaccgacgccaaggugaaacuuauuaagcaggaacuggauaaguauaaaaacgcugugacggaccuccagcugcugaugcaguccaccccugccgcugggucuggaagcgccaucgcguccggcauugccgucuguaaggugcuccaccuggagggggagguuaauaaaaucaagaacgcccuucugagcacaaauaaagcuguggucucucucuccggaugcggcgugagcguucugaccuucaaggugcuugaucugaagaacuacauugacaaacaacuccugccgauccugaauaagcagucuuguuccauucccaacaucgaaacagucaucgaguuucagcagaaaaauaaccggcuccuggaaauuacccgcgaguucagcgugaaugcuggcgugacgacaccugucucuaccuauaugcuuacaaacuccgagcugcucagccugaucaaugauaugcccauuaccaacgaccaaaagaaacuuauguccaacaauguucagaucgugagacagcagucuuacagcauuaugugcaucaucaaggaagaggugcuggccuaugucgugcaacucccucuguacgggguuauugauacccccuguuggaaacugcauacauccccucucugcacgaccaacacaaaggaaggaagcaauaucugucugacccggacagaccgcggcugguacugcgauaacgcggggucuguguccuuuuucccgcaggccgagaccuguaagguccagagcaauagaguguuuugcgacacgaugaacucucuuacacugcccagcgaaguuaaucucugcaacauugauaucuucaauccuaaauaugacuguaagauuaugaccuccaaaaccgaugugucuagcuccgucaucacaagccugggagcuaucgugucuugcuacggcaagaccaaauguacagccuccaacaagugccgggggauuaucaagacguuuagcaauggaugugacuaugucucuaacaaaggcguggacaccguuuccgugggcaauacacuuuacuaugucaacaagcaagaggggcagagccuguacgugaaaggagagcccauuaucaauuucuaugauccucucguuuuucccuccgacgaguucgaugcuucuauuagccaggugaacgaaaagaucaaccagucccuggccuuuauucgcaaaucugacgaacugcuccacaaugucaacgugggcaagagcaccacaaauaucaugaucaccacgauuaucauugugaucauuguuauccugcuucugcucaucgccgucgggcuguuccuguacugcaaggcuagauccaccccggugacacuuagcaaagaucaacucucuggaauuaacaauaucgcguucuccaacugaggacuaguguccaccugucccuccugggcugcuggauugucucguuuuccugccaaauaaacaggaucagcgcuuuacagaucuaaaaaaaaaaaaaaaaaaaaaaaaaaaaaaaaaaaaaaaaaaaaaaaaaaaaaaaaaaaaaaaaugcaucccccccccccccccccccccccccccccccaaaggcucuuuucagagccaccagaauu

SEQ ID NO: 19161 - RNA, 2060 nt, Artificial Sequence
  mRNA product Design b-1 comprising derived and/or modified sequence from HRSV(Memphis-37)__AIY60640.1__F_DSCav1_mut8 (opt6)
gggagacggagacggccugcaggaccugcucucucagcccucagccgaggccuacgccgagccgagugcgcagccgacgaccgggaggagccgcagccuucaacucugagguacugugauccgcgcugcccgccgggccgccccaguccgcugcugcggcaccuccuucccucgcgcccucuucgcucgccagcgccuucccugugagccugcgucaccgcggccgccaagcuuaccauggaacuuccuauuuuaaaaacaaacgcaauuacaaccauauuagcagcaguaacacuaugcuuugcaucaucacaaaacaucaccgaagaauuuuaucaauccacaugcucagcaguaucaaaaggauaccuuggcgcacuccgaacaggcugguauacaucggucauaacuauagaacucuccaacauaaaagaaauaaaaugcaaugguacugacgcaaaaguaaaauuaauaaaacaagaacuagacaaauacaaaaacgcaguaaccgauuuacaacuacuuaugcaaucaacaccugcagcaggaagcggaucagcaauagcaaguggaauagcaguaugcaaaguacuucaccucgaaggagaaguaaauaaaauaaaaaacgccuuacuaucaacaaauaaagccgucguaucacuuuccgguugcggcguaucaguauuaaccuuuaaagucuuagacuuaaaaaacuacauagacaaacaauuauuaccaauacuaaacaaacaauccuguuccauacccaacauagaaaccguaauagaauuucaacaaaaaaacaacagacuauuagaaauaacacgcgaauuuucaguaaacgcaggcguaacaacaccaguaucaacauauauguuaaccaauucagaauuauuaucccuuauaaaugacaugccuauaacaaacgaccaaaaaaaauuaaugaguaacaacguucaaauaguaagacaacaaucauacagcauaaugugcauaauaaaagaagaaguacuagcauacguaguucaacuaccacucuauggcguuaucgacaccccaugcuggaaacuacauaccucaccacucuguaccacuaauacgaaagaaggaucuaacauaugccuaaccagaacagaucgagguugguauugcgacaaugcuggaucaguaucauucuucccacaagcagaaaccugcaaaguacaaagcaacagaguauuuugugacacuaugaacucacuaacgcuaccuucagaaguaaaccuaugcaacaucgacauauucaacccaaaauacgauugcaaaauaaugacaucaaaaacagacguuuccucaucaguaauaacaucauuaggagcaauaguauccugcuacgguaaaaccaaaugcacagcauccaauaaaugccgaggaaucauuaaaacauuuucaaauggcugcgacuauguaaguaauaaagguguagauacaguaucaguaggcaacacacuauauuacguaaacaaacaagaagggcaaucccuauaugucaaaggcgaaccaauuauaaacuucuacgacccccucguauucccaucagacgaauuugacgcaucaauaucccaaguaaacgaaaaaaucaaccaaucacucgcauucauacguaaauccgacgaauuacuacauaacguaaacguaggcaaaucaacaacaaauauaaugauaacaaccauaaucauaguaauaauaguuauacuccuacuacucauugcagucggccuauuucuauacuguaaagcacgcucuacaccaguaacacuaucuaaagaucaauuauccggaauaaacaacauugccuucuccaauuaaggacuaguguccaccugucccuccugggcugcuggauugucucguuuuccugccaaauaaacaggaucagcgcuuuacagaucuaaaaaaaaaaaaaaaaaaaaaaaaaaaaaaaaaaaaaaaaaaaaaaaaaaaaaaaaaaaaaaaaugcaucccccccccccccccccccccccccccccccaaaggcucuuuucagagccaccagaauu

SEQ ID NO: 19162 - RNA, 2060 nt, Artificial Sequence
  mRNA product Design b-1 comprising derived and/or modified sequence from HRSV(Memphis-37)__AIY60640.1__F_DSCav1_mut8 (opt11)
gggagacggagacggccugcaggaccugcucucucagcccucagccgaggccuacgccgagccgagugcgcagccgacgaccgggaggagccgcagccuucaacucugagguacugugauccgcgcugcccgccgggccgccccaguccgcugcugcggcaccuccuucccucgcgcccucuucgcucgccagcgccuucccugugagccugcgucaccgcggccgccaagcuuaccauggaacuucccauccugaagaccaacgcuaucacaaccauccucgccgcagucacccuuugcuucgccucaucccaaaacaucaccgaagaauuuuaccagucaaccugcucggccgucuccaagggcuaccucggcgcccuccgcacuggcugguacacauccgucaucaccaucgaacucuccaacauaaaagaaauaaaaugcaacggaaccgacgccaaagucaaacucaucaaacaagaacuagauaaauauaaaaacgccgucaccgaccugcaacuccucaugcaauccaccccagccgccggcucuggcagcgccaucgcaagcggaaucgccgucugcaaaguccuccaccuagaaggcgaagucaacaaaauuaaaaacgcccuccucuccaccaacaaagcaguugucucccucucuggcugcggagucucuguacucaccuucaaaguacuagaccucaagaauuacauagacaaacaacuccugcccauccuuaacaaacaaaguuguaguauccccaacaucgaaacaguaaucgaauuucagcagaaaaacaaccgccuccucgaaaucacacgagaguucucggucaacgccggcgucaccacccccguaucaaccuacaugcuaacaaacuccgaacuacuuucccucaucaaugacaugcccauaaccaacgaccaaaagaaacuaauguccaauaacguccagauaguccgucaacaguccuacucaaucaugugcauaauuaaagaagaaguacucgccuacgucguccaacuaccccucuauggagucaucgacacccccugcuggaaacuccacacaucaccccuaugcacaaccaacaccaaagaaggcuccaacaucugccucacaagaaccgaccgcggcugguacugcgacaacgcuggcuccgucucguucuucccacaagccgaaaccugcaaaguccaaucaaaccgggucuucugcgacaccaugaacucccucacucucccaagcgaagucaaccuaugcaacaucgacaucuucaacccaaaauacgacuguaaaaucaugacuucgaaaacagacgucuccucaucaguaaucacauccuuaggcgccaucguguccugcuacgguaagaccaaaugcacagccuccaacaaaugccggggcaucaucaaaaccuucagcaacgguugugauuacgucuccaacaaaggaguagacaccgucuccguaggaaacacccucuacuacgucaacaagcaagaaggccaaucccucuacgucaaaggggaacccaucaucaacuucuacgacccacucgucuuccccuccgacgaguucgacgcaagcaucucccaagucaacgaaaagaucaaccaaucacuagccuucauccgcaaauccgacgaacuccuccacaacguuaacguaggcaaauccaccaccaacaucaugaucacaaccaucaucauagucauaauagucauccuacuacuccucaucgccguaggucuauuccuauacuguaaagcucgaucaacccccgucacacucuccaaagaucaacucucaggaaucaacaacaucgccuucuccaacuaaggacuaguguccaccugucccuccugggcugcuggauugucucguuuuccugccaaauaaacaggaucagcgcuuuacagaucuaaaaaaaaaaaaaaaaaaaaaaaaaaaaaaaaaaaaaaaaaaaaaaaaaaaaaaaaaaaaaaaaugcaucccccccccccccccccccccccccccccccaaaggcucuuuucagagccaccagaauu

SEQ ID NO: 19163 - RNA, 1880 nt, Artificial Sequence
  mRNA product Design b-2 comprising derived and/or modified sequence from HRSV(Memphis-37)__AIY60640.1__F_DSCav1_mut8 (opt1)
gggagagccucugcuggaguccggggaguggcguuggcugcuagagcgaagcuuaccauggagcugcccauccucaagaccaacgccaucaccacgauccuggccgcggugacccugugcuucgccagcucccagaacaucaccgaggaguucuaccagagcacgugcuccgccgucagcaagggcuaccucggcgcccugcgcaccgggugguacaccagcgugaucaccaucgagcuguccaacaucaaggagaucaagugcaacggcaccgacgccaaggugaagcucaucaagcaggagcuggacaaguacaagaacgcggucacggaccugcagcuccugaugcagagcaccccggccgccggcuccgggagcgcgaucgccuccggcaucgccgucugcaaggugcugcaccucgagggcgaggugaacaagaucaagaacgcccugcuguccaccaacaaggccgucgugagccucuccggcugcggggugagcguccugaccuucaaggugcuggaccucaagaacuacaucgacaagcagcugcugcccauccugaacaagcagagcugcuccauccccaacaucgagaccgucaucgaguuccagcagaagaacaaccgccuccuggagaucacgcgggaguucagcgugaacgcgggcgugaccacccccgucuccaccuacaugcugacgaacagcgagcuccugucccugaucaacgacaugccgaucaccaacgaccagaagaagcucaugagcaacaacgugcagaucgugcgccagcaguccuacagcaucaugugcaucaucaaggaggagguccuggccuacguggugcagcugccccucuacggggucaucgacacccccugcuggaagcugcacaccagcccccugugcacgaccaacaccaaggagggcuccaacaucugccucacccggacggaccgcgggugguacugcgacaacgccggcagcguguccuucuucccgcaggccgagaccugcaagguccagagcaaccggguguucugcgacaccaugaacucccugacccugcccagcgaggugaaccucugcaacaucgacaucuucaaccccaaguacgacugcaagaucaugacguccaagaccgacgucagcuccagcgugaucaccucccugggcgccaucgugagcugcuacgggaagaccaagugcacggcgagcaacaagugccgcggcaucaucaagaccuucuccaacgggugcgacuacgucagcaacaagggcguggacaccguguccgucggcaacacccuguacuacgugaacaagcaggagggccagagccucuacgugaagggggagcccaucaucaacuucuacgacccgcuggucuuccccuccgacgaguucgacgccagcaucucccaggugaacgagaagaucaaccagagccuggccuucauccggaaguccgacgagcuccugcacaacgugaacgucggcaagagcaccacgaacaucaugaucaccaccaucaucaucgugaucaucgugauccugcugcuccugaucgccgucgggcuguuccucuacugcaaggcccgcuccacccccgugacgcugagcaaggaccagcuguccgggaucaacaacaucgcguucagcaacugaggacuaguguccaccugucccuccugggcugcuggauugucucguuuuccugccaaauaaacaggaucagcgcuuuacagaucuaaaaaaaaaaaaaaaaaaaaaaaaaaaaaaaaaaaaaaaaaaaaaaaaaaaaaaaaaaaaaaaaugcaucccccccccccccccccccccccccccccccaaaggcucuuuucagagccaccagaauu

SEQ ID NO: 19164 - RNA, 1880 nt, Artificial Sequence
  mRNA product Design b-2 comprising derived and/or modified sequence from HRSV(Memphis-37)__AIY60640.1__F_DSCav1_mut8 (opt1)
gggagagccucugcuggaguccggggaguggcguuggcugcuagagcgaagcuuaccauggagcugcccauccucaagaccaacgccaucaccacgauccuggccgcggugacccugugcuucgccagcucccagaacaucaccgaggaguucuaccagagcacgugcuccgccgucagcaagggcuaccucggggcccugcgcaccggcugguacaccuccgugaucaccaucgagcugagcaacaucaaggagaucaagugcaacgggaccgacgccaaggugaagcucaucaagcaggagcuggacaaguacaagaacgcggucacggaccugcagcuccugaugcaguccaccccggccgccggcagcggguccgccaucgcgagcggcaucgccgugugcaaggugcugcaccucgagggcgaggucaacaagaucaagaacgcccugcuguccaccaacaaggccguggugagccucuccgggugcggcgucagcgugcugaccuucaaggugcuggaccucaagaacuacaucgacaagcagcugcugcccauccucaacaagcaguccugcagcauccccaacaucgagacggucaucgaguuccagcagaagaacaaccggcugcuggagaucacccgcgaguucuccgugaacgccggggugaccacccccgucagcacguacaugcucaccaacuccgagcugcugagccucaucaacgacaugccgaucaccaacgaccagaagaagcugaugagcaacaacgugcagaucgugcggcagcaguccuacagcaucaugugcaucaucaaggaggagguccuggcguacguggugcagcucccccuguacggcgucaucgacacccccugcuggaagcugcacacgagcccccucugcaccaccaacaccaaggagggguccaacaucugccugacgcgcaccgaccggggcugguacugcgacaacgccggcuccgugagcuucuucccgcaggccgagaccugcaaggugcaguccaaccgcgucuucugcgacaccaugaacagccugacgcuccccuccgaggugaaccugugcaacaucgacaucuucaaccccaaguacgacugcaagaucaugaccagcaagaccgacgucuccagcuccgugaucaccagccugggggccaucguguccugcuacggcaagacgaagugcaccgccagcaacaagugccgggggaucaucaagaccuucuccaacggcugcgacuacgucagcaacaagggcguggacaccguguccgucgggaacacgcucuacuacgugaacaagcaggagggccagagccuguacgugaagggggagcccaucaucaacuucuacgacccgcuggucuuccccagcgacgaguucgacgcguccaucagccaggugaacgagaagaucaaccagucccucgccuucauccgcaagagcgacgagcugcugcacaacgugaacgucggcaaguccaccaccaacaucaugaucaccaccaucaucaucgugaucaucgugauccuccugcugcucaucgccgucgggcuguuccuguacugcaaggcccggagcacgcccgugacccuguccaaggaccagcucagcggcaucaacaacaucgccuucuccaacugaggacuaguguccaccugucccuccugggcugcuggauugucucguuuuccugccaaauaaacaggaucagcgcuuuacagaucuaaaaaaaaaaaaaaaaaaaaaaaaaaaaaaaaaaaaaaaaaaaaaaaaaaaaaaaaaaaaaaaaugcaucccccccccccccccccccccccccccccccaaaggcucuuuucagagccaccagaauu

SEQ ID NO: 19165 - RNA, 1880 nt, Artificial Sequence
  mRNA product Design b-2 comprising derived and/or modified sequence from HRSV(Memphis-37)__AIY60640.1__F_DSCav1_mut8 (opt2)
gggagagccucugcuggaguccggggaguggcguuggcugcuagagcgaagcuuaccauggagcuccccauccucaagaccaacgccaucaccaccauccucgccgccgucacccucugcuucgccuccucccagaacaucaccgaggaguucuaccaguccaccugcuccgccgucuccaagggcuaccucggcgcccuccgcaccggcugguacaccuccgucaucaccaucgagcucuccaacaucaaggagaucaagugcaacggcaccgacgccaaggucaagcucaucaagcaggagcucgacaaguacaagaacgccgucaccgaccuccagcuccucaugcaguccacccccgccgccggcuccggcuccgccaucgccuccggcaucgccgucugcaagguccuccaccucgagggcgaggucaacaagaucaagaacgcccuccucuccaccaacaaggccgucgucucccucuccggcugcggcgucuccguccucaccuucaagguccucgaccucaagaacuacaucgacaagcagcuccuccccauccucaacaagcaguccugcuccauccccaacaucgagaccgucaucgaguuccagcagaagaacaaccgccuccucgagaucacccgcgaguucuccgucaacgccggcgucaccacccccgucuccaccuacaugcucaccaacuccgagcuccucucccucaucaacgacaugcccaucaccaacgaccagaagaagcucauguccaacaacguccagaucguccgccagcaguccuacuccaucaugugcaucaucaaggaggagguccucgccuacgucguccagcucccccucuacggcgucaucgacacccccugcuggaagcuccacaccuccccccucugcaccaccaacaccaaggagggcuccaacaucugccucacccgcaccgaccgcggcugguacugcgacaacgccggcuccgucuccuucuucccccaggccgagaccugcaagguccaguccaaccgcgucuucugcgacaccaugaacucccucacccuccccuccgaggucaaccucugcaacaucgacaucuucaaccccaaguacgacugcaagaucaugaccuccaagaccgacgucuccuccuccgucaucaccucccucggcgccaucgucuccugcuacggcaagaccaagugcaccgccuccaacaagugccgcggcaucaucaagaccuucuccaacggcugcgacuacgucuccaacaagggcgucgacaccgucuccgucggcaacacccucuacuacgucaacaagcaggagggccagucccucuacgucaagggcgagcccaucaucaacuucuacgacccccucgucuuccccuccgacgaguucgacgccuccaucucccaggucaacgagaagaucaaccagucccucgccuucauccgcaaguccgacgagcuccuccacaacgucaacgucggcaaguccaccaccaacaucaugaucaccaccaucaucaucgucaucaucgucauccuccuccuccucaucgccgucggccucuuccucuacugcaaggcccgcuccacccccgucacccucuccaaggaccagcucuccggcaucaacaacaucgccuucuccaacugaggacuaguguccaccugucccuccugggcugcuggauugucucguuuuccugccaaauaaacaggaucagcgcuuuacagaucuaaaaaaaaaaaaaaaaaaaaaaaaaaaaaaaaaaaaaaaaaaaaaaaaaaaaaaaaaaaaaaaaugcaucccccccccccccccccccccccccccccccaaaggcucuuuucagagccaccagaauu

SEQ ID NO: 19166 - RNA, 1880 nt, Artificial Sequence
  mRNA product Design b-2 comprising derived and/or modified sequence from HRSV(Memphis-37)__AIY60640.1__F_DSCav1_mut8 (opt3)
gggagagccucugcuggaguccggggaguggcguuggcugcuagagcgaagcuuaccauggagcugcccauccucaagaccaacgccauuacaacuauacuugcugcagugacgcugugcuucgccagcucccagaauaucaccgaagaguuuuaccaaucuacauguucagcggucaguaaaggcuauuugggggcuuuaagaacuggaugguacaccagcguuauuacaaucgaacuguccaacauuaaggagaucaaaugcaaugguaccgacgccaaggugaaacuaauaaagcaggaacucgauaaguauaaaaacgcaguaacugaccugcagcuucugaugcagucuacuccugccgcuggcucggggucagcaaucgccagcggaauugcuguguguaaggucuugcaccucgagggcgaggugaauaaaaucaagaacgcccugcugaguaccaauaaagcgguugugucccucucugguugcggggucagcguguuaacguucaagguacuggaucuuaagaacuacauugacaaacaauugcugccaauccuaaauaagcaguccuguucaauaccgaacauugaaacuguuaucgaguuucagcagaaaaauaacaggcuccuggaaauuacccgggaguucagugugaaugcaggagucacaacucccgugagcaccuauaugcuuacaaacucugagcuguugucccucaucaaugauaugccuaucaccaacgaccaaaagaaacugaugucaaacaaugugcagauuguccgccagcagagcuacaguauaaugugcaucauuaaggaagagguuuuagccuaugugguacaacugccacucuacggcgugaucgauacgcccuguuggaaacuucauacuucuccucugugcacaaccaacacuaaggaaggcuccaauauauguuugacacgaaccgaccgugggugguacugcgauaacgcuggaagcgucucguuuuucccacaggccgagacguguaaggugcagucuaauagaguuuucugcgacaccaugaacucccuaacacugcccucagaagugaaucucugcaacauugauaucuucaauccuaaauaugacuguaagaucaugacaaguaaaaccgaugucagcuccucugugauuacaagccugggugcaaucguaucaugcuacggcaagacuaaauguaccgcuaguaacaagugcagggggauuauaaagacauuuuccaauggaugugacuauguuagcaacaaaggcguggacaccgucucuguggguaauacucuuuacuaugucaacaagcaagaggggcagucacuguacgugaaaggagagccaaucauuaauuucuaugauccguugguuuuucccagugacgaauuugaugccagcaucucccaggugaacgagaagaucaaccagucucucgcguuuauucggaaaucggacgaacuguuacacaauguaaacgucggcaagagcacgacaaauauaaugaucaccacuauuaucauugugaucauaguuauccugcuacuccugauugccgugggccuuuucuuguacugcaaggcacgcuccaccccugucacacugucaaaagaucaacucagugggaucaacaauauugcuuucucuaacugaggacuaguguccaccugucccuccugggcugcuggauugucucguuuuccugccaaauaaacaggaucagcgcuuuacagaucuaaaaaaaaaaaaaaaaaaaaaaaaaaaaaaaaaaaaaaaaaaaaaaaaaaaaaaaaaaaaaaaaugcaucccccccccccccccccccccccccccccccaaaggcucuuuucagagccaccagaauu

SEQ ID NO: 19167 - RNA, 1880 nt, Artificial Sequence
  mRNA product Design b-2 comprising derived and/or modified sequence from HRSV(Memphis-37)__AIY60640.1__F_DSCav1_mut8 (opt4)
gggagagccucugcuggaguccggggaguggcguuggcugcuagagcgaagcuuaccauggagcugcccauccugaagaccaacgccaucaccaccauccuggccgccgugacccugugcuucgccagcagccagaacaucaccgaggaguucuaccagagcaccugcagcgccgugagcaagggcuaccugggcgcccugagaaccggcugguacaccagcgugaucaccaucgagcugagcaacaucaaggagaucaagugcaacggcaccgacgccaaggugaagcugaucaagcaggagcuggacaaguacaagaacgccgugaccgaccugcagcugcugaugcagagcacccccgccgccggcagcggcagcgccaucgccagcggcaucgccgugugcaaggugcugcaccuggagggcgaggugaacaagaucaagaacgcccugcugagcaccaacaaggccguggugagccugagcggcugcggcgugagcgugcugaccuucaaggugcuggaccugaagaacuacaucgacaagcagcugcugcccauccugaacaagcagagcugcagcauccccaacaucgagaccgugaucgaguuccagcagaagaacaacagacugcuggagaucaccagagaguucagcgugaacgccggcgugaccacccccgugagcaccuacaugcugaccaacagcgagcugcugagccugaucaacgacaugcccaucaccaacgaccagaagaagcugaugagcaacaacgugcagaucgugagacagcagagcuacagcaucaugugcaucaucaaggaggaggugcuggccuacguggugcagcugccccuguacggcgugaucgacacccccugcuggaagcugcacaccagcccccugugcaccaccaacaccaaggagggcagcaacaucugccugaccagaaccgacagaggcugguacugcgacaacgccggcagcgugagcuucuucccccaggccgagaccugcaaggugcagagcaacagaguguucugcgacaccaugaacagccugacccugcccagcgaggugaaccugugcaacaucgacaucuucaaccccaaguacgacugcaagaucaugaccagcaagaccgacgugagcagcagcgugaucaccagccugggcgccaucgugagcugcuacggcaagaccaagugcaccgccagcaacaagugcagaggcaucaucaagaccuucagcaacggcugcgacuacgugagcaacaagggcguggacaccgugagcgugggcaacacccuguacuacgugaacaagcaggagggccagagccuguacgugaagggcgagcccaucaucaacuucuacgacccccugguguuccccagcgacgaguucgacgccagcaucagccaggugaacgagaagaucaaccagagccuggccuucaucagaaagagcgacgagcugcugcacaacgugaacgugggcaagagcaccaccaacaucaugaucaccaccaucaucaucgugaucaucgugauccugcugcugcugaucgccgugggccuguuccuguacugcaaggccagaagcacccccgugacccugagcaaggaccagcugagcggcaucaacaacaucgccuucagcaacugaggacuaguguccaccugucccuccugggcugcuggauugucucguuuuccugccaaauaaacaggaucagcgcuuuacagaucuaaaaaaaaaaaaaaaaaaaaaaaaaaaaaaaaaaaaaaaaaaaaaaaaaaaaaaaaaaaaaaaaugcaucccccccccccccccccccccccccccccccaaaggcucuuuucagagccaccagaauu

SEQ ID NO: 19168 - RNA, 1880 nt, Artificial Sequence
  mRNA product Design b-2 comprising derived and/or modified sequence from HRSV(Memphis-37)__AIY60640.1__F_DSCav1_mut8 (opt5)
gggagagccucugcuggaguccggggaguggcguuggcugcuagagcgaagcuuaccauggagcugcccauccucaagaccaacgccauuacaacgauccuggcugccgugacccuuugcuucgcgagcucccagaauauuacagaagaguuuuaccaaucuaccuguagcgcugucuccaaaggcuaucugggggcccucagaacaggaugguacaccucuguuaucacaauugaacugagcaacaucaaggagaucaaaugcaauggcaccgacgccaaggugaaacuuauuaagcaggaacuggauaaguauaaaaacgcugugacggaccuccagcugcugaugcaguccaccccugccgcugggucuggaagcgccaucgcguccggcauugccgucuguaaggugcuccaccuggagggggagguuaauaaaaucaagaacgcccuucugagcacaaauaaagcuguggucucucucuccggaugcggcgugagcguucugaccuucaaggugcuugaucugaagaacuacauugacaaacaacuccugccgauccugaauaagcagucuuguuccauucccaacaucgaaacagucaucgaguuucagcagaaaaauaaccggcuccuggaaauuacccgcgaguucagcgugaaugcuggcgugacgacaccugucucuaccuauaugcuuacaaacuccgagcugcucagccugaucaaugauaugcccauuaccaacgaccaaaagaaacuuauguccaacaauguucagaucgugagacagcagucuuacagcauuaugugcaucaucaaggaagaggugcuggccuaugucgugcaacucccucuguacgggguuauugauacccccuguuggaaacugcauacauccccucucugcacgaccaacacaaaggaaggaagcaauaucugucugacccggacagaccgcggcugguacugcgauaacgcggggucuguguccuuuuucccgcaggccgagaccuguaagguccagagcaauagaguguuuugcgacacgaugaacucucuuacacugcccagcgaaguuaaucucugcaacauugauaucuucaauccuaaauaugacuguaagauuaugaccuccaaaaccgaugugucuagcuccgucaucacaagccugggagcuaucgugucuugcuacggcaagaccaaauguacagccuccaacaagugccgggggauuaucaagacguuuagcaauggaugugacuaugucucuaacaaaggcguggacaccguuuccgugggcaauacacuuuacuaugucaacaagcaagaggggcagagccuguacgugaaaggagagcccauuaucaauuucuaugauccucucguuuuucccuccgacgaguucgaugcuucuauuagccaggugaacgaaaagaucaaccagucccuggccuuuauucgcaaaucugacgaacugcuccacaaugucaacgugggcaagagcaccacaaauaucaugaucaccacgauuaucauugugaucauuguuauccugcuucugcucaucgccgucgggcuguuccuguacugcaaggcuagauccaccccggugacacuuagcaaagaucaacucucuggaauuaacaauaucgcguucuccaacugaggacuaguguccaccugucccuccugggcugcuggauugucucguuuuccugccaaauaaacaggaucagcgcuuuacagaucuaaaaaaaaaaaaaaaaaaaaaaaaaaaaaaaaaaaaaaaaaaaaaaaaaaaaaaaaaaaaaaaaugcaucccccccccccccccccccccccccccccccaaaggcucuuuucagagccaccagaauu

SEQ ID NO: 19169 - RNA, 1880 nt, Artificial Sequence
  mRNA product Design b-2 comprising derived and/or modified sequence from HRSV(Memphis-37)__AIY60640.1__F_DSCav1_mut8 (opt6)
gggagagccucugcuggaguccggggaguggcguuggcugcuagagcgaagcuuaccauggaacuuccuauuuuaaaaacaaacgcaauuacaaccauauuagcagcaguaacacuaugcuuugcaucaucacaaaacaucaccgaagaauuuuaucaauccacaugcucagcaguaucaaaaggauaccuuggcgcacuccgaacaggcugguauacaucggucauaacuauagaacucuccaacauaaaagaaauaaaaugcaaugguacugacgcaaaaguaaaauuaauaaaacaagaacuagacaaauacaaaaacgcaguaaccgauuuacaacuacuuaugcaaucaacaccugcagcaggaagcggaucagcaauagcaaguggaauagcaguaugcaaaguacuucaccucgaaggagaaguaaauaaaauaaaaaacgccuuacuaucaacaaauaaagccgucguaucacuuuccgguugcggcguaucaguauuaaccuuuaaagucuuagacuuaaaaaacuacauagacaaacaauuauuaccaauacuaaacaaacaauccuguuccauacccaacauagaaaccguaauagaauuucaacaaaaaaacaacagacuauuagaaauaacacgcgaauuuucaguaaacgcaggcguaacaacaccaguaucaacauauauguuaaccaauucagaauuauuaucccuuauaaaugacaugccuauaacaaacgaccaaaaaaaauuaaugaguaacaacguucaaauaguaagacaacaaucauacagcauaaugugcauaauaaaagaagaaguacuagcauacguaguucaacuaccacucuauggcguuaucgacaccccaugcuggaaacuacauaccucaccacucuguaccacuaauacgaaagaaggaucuaacauaugccuaaccagaacagaucgagguugguauugcgacaaugcuggaucaguaucauucuucccacaagcagaaaccugcaaaguacaaagcaacagaguauuuugugacacuaugaacucacuaacgcuaccuucagaaguaaaccuaugcaacaucgacauauucaacccaaaauacgauugcaaaauaaugacaucaaaaacagacguuuccucaucaguaauaacaucauuaggagcaauaguauccugcuacgguaaaaccaaaugcacagcauccaauaaaugccgaggaaucauuaaaacauuuucaaauggcugcgacuauguaaguaauaaagguguagauacaguaucaguaggcaacacacuauauuacguaaacaaacaagaagggcaaucccuauaugucaaaggcgaaccaauuauaaacuucuacgacccccucguauucccaucagacgaauuugacgcaucaauaucccaaguaaacgaaaaaaucaaccaaucacucgcauucauacguaaauccgacgaauuacuacauaacguaaacguaggcaaaucaacaacaaauauaaugauaacaaccauaaucauaguaauaauaguuauacuccuacuacucauugcagucggccuauuucuauacuguaaagcacgcucuacaccaguaacacuaucuaaagaucaauuauccggaauaaacaacauugccuucuccaauuaaggacuaguguccaccugucccuccugggcugcuggauugucucguuuuccugccaaauaaacaggaucagcgcuuuacagaucuaaaaaaaaaaaaaaaaaaaaaaaaaaaaaaaaaaaaaaaaaaaaaaaaaaaaaaaaaaaaaaaaugcaucccccccccccccccccccccccccccccccaaaggcucuuuucagagccaccagaauu

SEQ ID NO: 19170 - RNA, 1880 nt, Artificial Sequence
  mRNA product Design b-2 comprising derived and/or modified sequence from HRSV(Memphis-37)__AIY60640.1__F_DSCav1_mut8 (opt11)
gggagagccucugcuggaguccggggaguggcguuggcugcuagagcgaagcuuaccauggaacuucccauccugaagaccaacgcuaucacaaccauccucgccgcagucacccuuugcuucgccucaucccaaaacaucaccgaagaauuuuaccagucaaccugcucggccgucuccaagggcuaccucggcgcccuccgcacuggcugguacacauccgucaucaccaucgaacucuccaacauaaaagaaauaaaaugcaacggaaccgacgccaaagucaaacucaucaaacaagaacuagauaaauauaaaaacgccgucaccgaccugcaacuccucaugcaauccaccccagccgccggcucuggcagcgccaucgcaagcggaaucgccgucugcaaaguccuccaccuagaaggcgaagucaacaaaauuaaaaacgcccuccucuccaccaacaaagcaguugucucccucucuggcugcggagucucuguacucaccuucaaaguacuagaccucaagaauuacauagacaaacaacuccugcccauccuuaacaaacaaaguuguaguauccccaacaucgaaacaguaaucgaauuucagcagaaaaacaaccgccuccucgaaaucacacgagaguucucggucaacgccggcgucaccacccccguaucaaccuacaugcuaacaaacuccgaacuacuuucccucaucaaugacaugcccauaaccaacgaccaaaagaaacuaauguccaauaacguccagauaguccgucaacaguccuacucaaucaugugcauaauuaaagaagaaguacucgccuacgucguccaacuaccccucuauggagucaucgacacccccugcuggaaacuccacacaucaccccuaugcacaaccaacaccaaagaaggcuccaacaucugccucacaagaaccgaccgcggcugguacugcgacaacgcuggcuccgucucguucuucccacaagccgaaaccugcaaaguccaaucaaaccgggucuucugcgacaccaugaacucccucacucucccaagcgaagucaaccuaugcaacaucgacaucuucaacccaaaauacgacuguaaaaucaugacuucgaaaacagacgucuccucaucaguaaucacauccuuaggcgccaucguguccugcuacgguaagaccaaaugcacagccuccaacaaaugccggggcaucaucaaaaccuucagcaacgguugugauuacgucuccaacaaaggaguagacaccgucuccguaggaaacacccucuacuacgucaacaagcaagaaggccaaucccucuacgucaaaggggaacccaucaucaacuucuacgacccacucgucuuccccuccgacgaguucgacgcaagcaucucccaagucaacgaaaagaucaaccaaucacuagccuucauccgcaaauccgacgaacuccuccacaacguuaacguaggcaaauccaccaccaacaucaugaucacaaccaucaucauagucauaauagucauccuacuacuccucaucgccguaggucuauuccuauacuguaaagcucgaucaacccccgucacacucuccaaagaucaacucucaggaaucaacaacaucgccuucuccaacuaaggacuaguguccaccugucccuccugggcugcuggauugucucguuuuccugccaaauaaacaggaucagcgcuuuacagaucuaaaaaaaaaaaaaaaaaaaaaaaaaaaaaaaaaaaaaaaaaaaaaaaaaaaaaaaaaaaaaaaaugcaucccccccccccccccccccccccccccccccaaaggcucuuuucagagccaccagaauu

SEQ ID NO: 19171 - RNA, 1900 nt, Artificial Sequence
  mRNA product Design b-3 comprising derived and/or modified sequence from HRSV(Memphis-37)__AIY60640.1__F_DSCav1_mut8 (opt1)
gggagagucccgcagucggcguccagcggcucugcuuguucgugugugugucguugcaggccuuauucaagcuuaccauggagcugcccauccucaagaccaacgccaucaccacgauccuggccgcggugacccugugcuucgccagcucccagaacaucaccgaggaguucuaccagagcacgugcuccgccgucagcaagggcuaccucggcgcccugcgcaccgggugguacaccagcgugaucaccaucgagcuguccaacaucaaggagaucaagugcaacggcaccgacgccaaggugaagcucaucaagcaggagcuggacaaguacaagaacgcggucacggaccugcagcuccugaugcagagcaccccggccgccggcuccgggagcgcgaucgccuccggcaucgccgucugcaaggugcugcaccucgagggcgaggugaacaagaucaagaacgcccugcuguccaccaacaaggccgucgugagccucuccggcugcggggugagcguccugaccuucaaggugcuggaccucaagaacuacaucgacaagcagcugcugcccauccugaacaagcagagcugcuccauccccaacaucgagaccgucaucgaguuccagcagaagaacaaccgccuccuggagaucacgcgggaguucagcgugaacgcgggcgugaccacccccgucuccaccuacaugcugacgaacagcgagcuccugucccugaucaacgacaugccgaucaccaacgaccagaagaagcucaugagcaacaacgugcagaucgugcgccagcaguccuacagcaucaugugcaucaucaaggaggagguccuggccuacguggugcagcugccccucuacggggucaucgacacccccugcuggaagcugcacaccagcccccugugcacgaccaacaccaaggagggcuccaacaucugccucacccggacggaccgcgggugguacugcgacaacgccggcagcguguccuucuucccgcaggccgagaccugcaagguccagagcaaccggguguucugcgacaccaugaacucccugacccugcccagcgaggugaaccucugcaacaucgacaucuucaaccccaaguacgacugcaagaucaugacguccaagaccgacgucagcuccagcgugaucaccucccugggcgccaucgugagcugcuacgggaagaccaagugcacggcgagcaacaagugccgcggcaucaucaagaccuucuccaacgggugcgacuacgucagcaacaagggcguggacaccguguccgucggcaacacccuguacuacgugaacaagcaggagggccagagccucuacgugaagggggagcccaucaucaacuucuacgacccgcuggucuuccccuccgacgaguucgacgccagcaucucccaggugaacgagaagaucaaccagagccuggccuucauccggaaguccgacgagcuccugcacaacgugaacgucggcaagagcaccacgaacaucaugaucaccaccaucaucaucgugaucaucgugauccugcugcuccugaucgccgucgggcuguuccucuacugcaaggcccgcuccacccccgugacgcugagcaaggaccagcuguccgggaucaacaacaucgcguucagcaacugaggacuaguguccaccugucccuccugggcugcuggauugucucguuuuccugccaaauaaacaggaucagcgcuuuacagaucuaaaaaaaaaaaaaaaaaaaaaaaaaaaaaaaaaaaaaaaaaaaaaaaaaaaaaaaaaaaaaaaaugcaucccccccccccccccccccccccccccccccaaaggcucuuuucagagccaccagaauu

SEQ ID NO: 19172 - RNA, 1900 nt, Artificial Sequence
  mRNA product Design b-3 comprising derived and/or modified sequence from HRSV(Memphis-37)__AIY60640.1__F_DSCav1_mut8 (opt1)
gggagagucccgcagucggcguccagcggcucugcuuguucgugugugugucguugcaggccuuauucaagcuuaccauggagcugcccauccucaagaccaacgccaucaccacgauccuggccgcggugacccugugcuucgccagcucccagaacaucaccgaggaguucuaccagagcacgugcuccgccgucagcaagggcuaccucggggcccugcgcaccggcugguacaccuccgugaucaccaucgagcugagcaacaucaaggagaucaagugcaacgggaccgacgccaaggugaagcucaucaagcaggagcuggacaaguacaagaacgcggucacggaccugcagcuccugaugcaguccaccccggccgccggcagcggguccgccaucgcgagcggcaucgccgugugcaaggugcugcaccucgagggcgaggucaacaagaucaagaacgcccugcuguccaccaacaaggccguggugagccucuccgggugcggcgucagcgugcugaccuucaaggugcuggaccucaagaacuacaucgacaagcagcugcugcccauccucaacaagcaguccugcagcauccccaacaucgagacggucaucgaguuccagcagaagaacaaccggcugcuggagaucacccgcgaguucuccgugaacgccggggugaccacccccgucagcacguacaugcucaccaacuccgagcugcugagccucaucaacgacaugccgaucaccaacgaccagaagaagcugaugagcaacaacgugcagaucgugcggcagcaguccuacagcaucaugugcaucaucaaggaggagguccuggcguacguggugcagcucccccuguacggcgucaucgacacccccugcuggaagcugcacacgagcccccucugcaccaccaacaccaaggagggguccaacaucugccugacgcgcaccgaccggggcugguacugcgacaacgccggcuccgugagcuucuucccgcaggccgagaccugcaaggugcaguccaaccgcgucuucugcgacaccaugaacagccugacgcuccccuccgaggugaaccugugcaacaucgacaucuucaaccccaaguacgacugcaagaucaugaccagcaagaccgacgucuccagcuccgugaucaccagccugggggccaucguguccugcuacggcaagacgaagugcaccgccagcaacaagugccgggggaucaucaagaccuucuccaacggcugcgacuacgucagcaacaagggcguggacaccguguccgucgggaacacgcucuacuacgugaacaagcaggagggccagagccuguacgugaagggggagcccaucaucaacuucuacgacccgcuggucuuccccagcgacgaguucgacgcguccaucagccaggugaacgagaagaucaaccagucccucgccuucauccgcaagagcgacgagcugcugcacaacgugaacgucggcaaguccaccaccaacaucaugaucaccaccaucaucaucgugaucaucgugauccuccugcugcucaucgccgucgggcuguuccuguacugcaaggcccggagcacgcccgugacccuguccaaggaccagcucagcggcaucaacaacaucgccuucuccaacugaggacuaguguccaccugucccuccugggcugcuggauugucucguuuuccugccaaauaaacaggaucagcgcuuuacagaucuaaaaaaaaaaaaaaaaaaaaaaaaaaaaaaaaaaaaaaaaaaaaaaaaaaaaaaaaaaaaaaaaugcaucccccccccccccccccccccccccccccccaaaggcucuuuucagagccaccagaauu

SEQ ID NO: 19173 - RNA, 1900 nt, Artificial Sequence
  mRNA product Design b-3 comprising derived and/or modified sequence from HRSV(Memphis-37)__AIY60640.1__F_DSCav1_mut8 (opt2)
gggagagucccgcagucggcguccagcggcucugcuuguucgugugugugucguugcaggccuuauucaagcuuaccauggagcuccccauccucaagaccaacgccaucaccaccauccucgccgccgucacccucugcuucgccuccucccagaacaucaccgaggaguucuaccaguccaccugcuccgccgucuccaagggcuaccucggcgcccuccgcaccggcugguacaccuccgucaucaccaucgagcucuccaacaucaaggagaucaagugcaacggcaccgacgccaaggucaagcucaucaagcaggagcucgacaaguacaagaacgccgucaccgaccuccagcuccucaugcaguccacccccgccgccggcuccggcuccgccaucgccuccggcaucgccgucugcaagguccuccaccucgagggcgaggucaacaagaucaagaacgcccuccucuccaccaacaaggccgucgucucccucuccggcugcggcgucuccguccucaccuucaagguccucgaccucaagaacuacaucgacaagcagcuccuccccauccucaacaagcaguccugcuccauccccaacaucgagaccgucaucgaguuccagcagaagaacaaccgccuccucgagaucacccgcgaguucuccgucaacgccggcgucaccacccccgucuccaccuacaugcucaccaacuccgagcuccucucccucaucaacgacaugcccaucaccaacgaccagaagaagcucauguccaacaacguccagaucguccgccagcaguccuacuccaucaugugcaucaucaaggaggagguccucgccuacgucguccagcucccccucuacggcgucaucgacacccccugcuggaagcuccacaccuccccccucugcaccaccaacaccaaggagggcuccaacaucugccucacccgcaccgaccgcggcugguacugcgacaacgccggcuccgucuccuucuucccccaggccgagaccugcaagguccaguccaaccgcgucuucugcgacaccaugaacucccucacccuccccuccgaggucaaccucugcaacaucgacaucuucaaccccaaguacgacugcaagaucaugaccuccaagaccgacgucuccuccuccgucaucaccucccucggcgccaucgucuccugcuacggcaagaccaagugcaccgccuccaacaagugccgcggcaucaucaagaccuucuccaacggcugcgacuacgucuccaacaagggcgucgacaccgucuccgucggcaacacccucuacuacgucaacaagcaggagggccagucccucuacgucaagggcgagcccaucaucaacuucuacgacccccucgucuuccccuccgacgaguucgacgccuccaucucccaggucaacgagaagaucaaccagucccucgccuucauccgcaaguccgacgagcuccuccacaacgucaacgucggcaaguccaccaccaacaucaugaucaccaccaucaucaucgucaucaucgucauccuccuccuccucaucgccgucggccucuuccucuacugcaaggcccgcuccacccccgucacccucuccaaggaccagcucuccggcaucaacaacaucgccuucuccaacugaggacuaguguccaccugucccuccugggcugcuggauugucucguuuuccugccaaauaaacaggaucagcgcuuuacagaucuaaaaaaaaaaaaaaaaaaaaaaaaaaaaaaaaaaaaaaaaaaaaaaaaaaaaaaaaaaaaaaaaugcaucccccccccccccccccccccccccccccccaaaggcucuuuucagagccaccagaauu

SEQ ID NO: 19174 - RNA, 1900 nt, Artificial Sequence
  mRNA product Design b-3 comprising derived and/or modified sequence from HRSV(Memphis-37)__AIY60640.1__F_DSCav1_mut8 (opt3)
gggagagucccgcagucggcguccagcggcucugcuuguucgugugugugucguugcaggccuuauucaagcuuaccauggagcugcccauccucaagaccaacgccauuacaacuauacuugcugcagugacgcugugcuucgccagcucccagaauaucaccgaagaguuuuaccaaucuacauguucagcggucaguaaaggcuauuugggggcuuuaagaacuggaugguacaccagcguuauuacaaucgaacuguccaacauuaaggagaucaaaugcaaugguaccgacgccaaggugaaacuaauaaagcaggaacucgauaaguauaaaaacgcaguaacugaccugcagcuucugaugcagucuacuccugccgcuggcucggggucagcaaucgccagcggaauugcuguguguaaggucuugcaccucgagggcgaggugaauaaaaucaagaacgcccugcugaguaccaauaaagcgguugugucccucucugguugcggggucagcguguuaacguucaagguacuggaucuuaagaacuacauugacaaacaauugcugccaauccuaaauaagcaguccuguucaauaccgaacauugaaacuguuaucgaguuucagcagaaaaauaacaggcuccuggaaauuacccgggaguucagugugaaugcaggagucacaacucccgugagcaccuauaugcuuacaaacucugagcuguugucccucaucaaugauaugccuaucaccaacgaccaaaagaaacugaugucaaacaaugugcagauuguccgccagcagagcuacaguauaaugugcaucauuaaggaagagguuuuagccuaugugguacaacugccacucuacggcgugaucgauacgcccuguuggaaacuucauacuucuccucugugcacaaccaacacuaaggaaggcuccaauauauguuugacacgaaccgaccgugggugguacugcgauaacgcuggaagcgucucguuuuucccacaggccgagacguguaaggugcagucuaauagaguuuucugcgacaccaugaacucccuaacacugcccucagaagugaaucucugcaacauugauaucuucaauccuaaauaugacuguaagaucaugacaaguaaaaccgaugucagcuccucugugauuacaagccugggugcaaucguaucaugcuacggcaagacuaaauguaccgcuaguaacaagugcagggggauuauaaagacauuuuccaauggaugugacuauguuagcaacaaaggcguggacaccgucucuguggguaauacucuuuacuaugucaacaagcaagaggggcagucacuguacgugaaaggagagccaaucauuaauuucuaugauccguugguuuuucccagugacgaauuugaugccagcaucucccaggugaacgagaagaucaaccagucucucgcguuuauucggaaaucggacgaacuguuacacaauguaaacgucggcaagagcacgacaaauauaaugaucaccacuauuaucauugugaucauaguuauccugcuacuccugauugccgugggccuuuucuuguacugcaaggcacgcuccaccccugucacacugucaaaagaucaacucagugggaucaacaauauugcuuucucuaacugaggacuaguguccaccugucccuccugggcugcuggauugucucguuuuccugccaaauaaacaggaucagcgcuuuacagaucuaaaaaaaaaaaaaaaaaaaaaaaaaaaaaaaaaaaaaaaaaaaaaaaaaaaaaaaaaaaaaaaaugcaucccccccccccccccccccccccccccccccaaaggcucuuuucagagccaccagaauu

SEQ ID NO: 19175 - RNA, 1900 nt, Artificial Sequence
  mRNA product Design b-3 comprising derived and/or modified sequence from HRSV(Memphis-37)__AIY60640.1__F_DSCav1_mut8 (opt4)
gggagagucccgcagucggcguccagcggcucugcuuguucgugugugugucguugcaggccuuauucaagcuuaccauggagcugcccauccugaagaccaacgccaucaccaccauccuggccgccgugacccugugcuucgccagcagccagaacaucaccgaggaguucuaccagagcaccugcagcgccgugagcaagggcuaccugggcgcccugagaaccggcugguacaccagcgugaucaccaucgagcugagcaacaucaaggagaucaagugcaacggcaccgacgccaaggugaagcugaucaagcaggagcuggacaaguacaagaacgccgugaccgaccugcagcugcugaugcagagcacccccgccgccggcagcggcagcgccaucgccagcggcaucgccgugugcaaggugcugcaccuggagggcgaggugaacaagaucaagaacgcccugcugagcaccaacaaggccguggugagccugagcggcugcggcgugagcgugcugaccuucaaggugcuggaccugaagaacuacaucgacaagcagcugcugcccauccugaacaagcagagcugcagcauccccaacaucgagaccgugaucgaguuccagcagaagaacaacagacugcuggagaucaccagagaguucagcgugaacgccggcgugaccacccccgugagcaccuacaugcugaccaacagcgagcugcugagccugaucaacgacaugcccaucaccaacgaccagaagaagcugaugagcaacaacgugcagaucgugagacagcagagcuacagcaucaugugcaucaucaaggaggaggugcuggccuacguggugcagcugccccuguacggcgugaucgacacccccugcuggaagcugcacaccagcccccugugcaccaccaacaccaaggagggcagcaacaucugccugaccagaaccgacagaggcugguacugcgacaacgccggcagcgugagcuucuucccccaggccgagaccugcaaggugcagagcaacagaguguucugcgacaccaugaacagccugacccugcccagcgaggugaaccugugcaacaucgacaucuucaaccccaaguacgacugcaagaucaugaccagcaagaccgacgugagcagcagcgugaucaccagccugggcgccaucgugagcugcuacggcaagaccaagugcaccgccagcaacaagugcagaggcaucaucaagaccuucagcaacggcugcgacuacgugagcaacaagggcguggacaccgugagcgugggcaacacccuguacuacgugaacaagcaggagggccagagccuguacgugaagggcgagcccaucaucaacuucuacgacccccugguguuccccagcgacgaguucgacgccagcaucagccaggugaacgagaagaucaaccagagccuggccuucaucagaaagagcgacgagcugcugcacaacgugaacgugggcaagagcaccaccaacaucaugaucaccaccaucaucaucgugaucaucgugauccugcugcugcugaucgccgugggccuguuccuguacugcaaggccagaagcacccccgugacccugagcaaggaccagcugagcggcaucaacaacaucgccuucagcaacugaggacuaguguccaccugucccuccugggcugcuggauugucucguuuuccugccaaauaaacaggaucagcgcuuuacagaucuaaaaaaaaaaaaaaaaaaaaaaaaaaaaaaaaaaaaaaaaaaaaaaaaaaaaaaaaaaaaaaaaugcaucccccccccccccccccccccccccccccccaaaggcucuuuucagagccaccagaauu

SEQ ID NO: 19176 - RNA, 1900 nt, Artificial Sequence
  mRNA product Design b-3 comprising derived and/or modified sequence from HRSV(Memphis-37)__AIY60640.1__F_DSCav1_mut8 (opt5)
gggagagucccgcagucggcguccagcggcucugcuuguucgugugugugucguugcaggccuuauucaagcuuaccauggagcugcccauccucaagaccaacgccauuacaacgauccuggcugccgugacccuuugcuucgcgagcucccagaauauuacagaagaguuuuaccaaucuaccuguagcgcugucuccaaaggcuaucugggggcccucagaacaggaugguacaccucuguuaucacaauugaacugagcaacaucaaggagaucaaaugcaauggcaccgacgccaaggugaaacuuauuaagcaggaacuggauaaguauaaaaacgcugugacggaccuccagcugcugaugcaguccaccccugccgcugggucuggaagcgccaucgcguccggcauugccgucuguaaggugcuccaccuggagggggagguuaauaaaaucaagaacgcccuucugagcacaaauaaagcuguggucucucucuccggaugcggcgugagcguucugaccuucaaggugcuugaucugaagaacuacauugacaaacaacuccugccgauccugaauaagcagucuuguuccauucccaacaucgaaacagucaucgaguuucagcagaaaaauaaccggcuccuggaaauuacccgcgaguucagcgugaaugcuggcgugacgacaccugucucuaccuauaugcuuacaaacuccgagcugcucagccugaucaaugauaugcccauuaccaacgaccaaaagaaacuuauguccaacaauguucagaucgugagacagcagucuuacagcauuaugugcaucaucaaggaagaggugcuggccuaugucgugcaacucccucuguacgggguuauugauacccccuguuggaaacugcauacauccccucucugcacgaccaacacaaaggaaggaagcaauaucugucugacccggacagaccgcggcugguacugcgauaacgcggggucuguguccuuuuucccgcaggccgagaccuguaagguccagagcaauagaguguuuugcgacacgaugaacucucuuacacugcccagcgaaguuaaucucugcaacauugauaucuucaauccuaaauaugacuguaagauuaugaccuccaaaaccgaugugucuagcuccgucaucacaagccugggagcuaucgugucuugcuacggcaagaccaaauguacagccuccaacaagugccgggggauuaucaagacguuuagcaauggaugugacuaugucucuaacaaaggcguggacaccguuuccgugggcaauacacuuuacuaugucaacaagcaagaggggcagagccuguacgugaaaggagagcccauuaucaauuucuaugauccucucguuuuucccuccgacgaguucgaugcuucuauuagccaggugaacgaaaagaucaaccagucccuggccuuuauucgcaaaucugacgaacugcuccacaaugucaacgugggcaagagcaccacaaauaucaugaucaccacgauuaucauugugaucauuguuauccugcuucugcucaucgccgucgggcuguuccuguacugcaaggcuagauccaccccggugacacuuagcaaagaucaacucucuggaauuaacaauaucgcguucuccaacugaggacuaguguccaccugucccuccugggcugcuggauugucucguuuuccugccaaauaaacaggaucagcgcuuuacagaucuaaaaaaaaaaaaaaaaaaaaaaaaaaaaaaaaaaaaaaaaaaaaaaaaaaaaaaaaaaaaaaaaugcaucccccccccccccccccccccccccccccccaaaggcucuuuucagagccaccagaauu

SEQ ID NO: 19177 - RNA, 1900 nt, Artificial Sequence
  mRNA product Design b-3 comprising derived and/or modified sequence from HRSV(Memphis-37)__AIY60640.1__F_DSCav1_mut8 (opt6)
gggagagucccgcagucggcguccagcggcucugcuuguucgugugugugucguugcaggccuuauucaagcuuaccauggaacuuccuauuuuaaaaacaaacgcaauuacaaccauauuagcagcaguaacacuaugcuuugcaucaucacaaaacaucaccgaagaauuuuaucaauccacaugcucagcaguaucaaaaggauaccuuggcgcacuccgaacaggcugguauacaucggucauaacuauagaacucuccaacauaaaagaaauaaaaugcaaugguacugacgcaaaaguaaaauuaauaaaacaagaacuagacaaauacaaaaacgcaguaaccgauuuacaacuacuuaugcaaucaacaccugcagcaggaagcggaucagcaauagcaaguggaauagcaguaugcaaaguacuucaccucgaaggagaaguaaauaaaauaaaaaacgccuuacuaucaacaaauaaagccgucguaucacuuuccgguugcggcguaucaguauuaaccuuuaaagucuuagacuuaaaaaacuacauagacaaacaauuauuaccaauacuaaacaaacaauccuguuccauacccaacauagaaaccguaauagaauuucaacaaaaaaacaacagacuauuagaaauaacacgcgaauuuucaguaaacgcaggcguaacaacaccaguaucaacauauauguuaaccaauucagaauuauuaucccuuauaaaugacaugccuauaacaaacgaccaaaaaaaauuaaugaguaacaacguucaaauaguaagacaacaaucauacagcauaaugugcauaauaaaagaagaaguacuagcauacguaguucaacuaccacucuauggcguuaucgacaccccaugcuggaaacuacauaccucaccacucuguaccacuaauacgaaagaaggaucuaacauaugccuaaccagaacagaucgagguugguauugcgacaaugcuggaucaguaucauucuucccacaagcagaaaccugcaaaguacaaagcaacagaguauuuugugacacuaugaacucacuaacgcuaccuucagaaguaaaccuaugcaacaucgacauauucaacccaaaauacgauugcaaaauaaugacaucaaaaacagacguuuccucaucaguaauaacaucauuaggagcaauaguauccugcuacgguaaaaccaaaugcacagcauccaauaaaugccgaggaaucauuaaaacauuuucaaauggcugcgacuauguaaguaauaaagguguagauacaguaucaguaggcaacacacuauauuacguaaacaaacaagaagggcaaucccuauaugucaaaggcgaaccaauuauaaacuucuacgacccccucguauucccaucagacgaauuugacgcaucaauaucccaaguaaacgaaaaaaucaaccaaucacucgcauucauacguaaauccgacgaauuacuacauaacguaaacguaggcaaaucaacaacaaauauaaugauaacaaccauaaucauaguaauaauaguuauacuccuacuacucauugcagucggccuauuucuauacuguaaagcacgcucuacaccaguaacacuaucuaaagaucaauuauccggaauaaacaacauugccuucuccaauuaaggacuaguguccaccugucccuccugggcugcuggauugucucguuuuccugccaaauaaacaggaucagcgcuuuacagaucuaaaaaaaaaaaaaaaaaaaaaaaaaaaaaaaaaaaaaaaaaaaaaaaaaaaaaaaaaaaaaaaaugcaucccccccccccccccccccccccccccccccaaaggcucuuuucagagccaccagaauu

SEQ ID NO: 19178 - RNA, 1900 nt, Artificial Sequence
  mRNA product Design b-3 comprising derived and/or modified sequence from HRSV(Memphis-37)__AIY60640.1__F_DSCav1_mut8 (opt11)
gggagagucccgcagucggcguccagcggcucugcuuguucgugugugugucguugcaggccuuauucaagcuuaccauggaacuucccauccugaagaccaacgcuaucacaaccauccucgccgcagucacccuuugcuucgccucaucccaaaacaucaccgaagaauuuuaccagucaaccugcucggccgucuccaagggcuaccucggcgcccuccgcacuggcugguacacauccgucaucaccaucgaacucuccaacauaaaagaaauaaaaugcaacggaaccgacgccaaagucaaacucaucaaacaagaacuagauaaauauaaaaacgccgucaccgaccugcaacuccucaugcaauccaccccagccgccggcucuggcagcgccaucgcaagcggaaucgccgucugcaaaguccuccaccuagaaggcgaagucaacaaaauuaaaaacgcccuccucuccaccaacaaagcaguugucucccucucuggcugcggagucucuguacucaccuucaaaguacuagaccucaagaauuacauagacaaacaacuccugcccauccuuaacaaacaaaguuguaguauccccaacaucgaaacaguaaucgaauuucagcagaaaaacaaccgccuccucgaaaucacacgagaguucucggucaacgccggcgucaccacccccguaucaaccuacaugcuaacaaacuccgaacuacuuucccucaucaaugacaugcccauaaccaacgaccaaaagaaacuaauguccaauaacguccagauaguccgucaacaguccuacucaaucaugugcauaauuaaagaagaaguacucgccuacgucguccaacuaccccucuauggagucaucgacacccccugcuggaaacuccacacaucaccccuaugcacaaccaacaccaaagaaggcuccaacaucugccucacaagaaccgaccgcggcugguacugcgacaacgcuggcuccgucucguucuucccacaagccgaaaccugcaaaguccaaucaaaccgggucuucugcgacaccaugaacucccucacucucccaagcgaagucaaccuaugcaacaucgacaucuucaacccaaaauacgacuguaaaaucaugacuucgaaaacagacgucuccucaucaguaaucacauccuuaggcgccaucguguccugcuacgguaagaccaaaugcacagccuccaacaaaugccggggcaucaucaaaaccuucagcaacgguugugauuacgucuccaacaaaggaguagacaccgucuccguaggaaacacccucuacuacgucaacaagcaagaaggccaaucccucuacgucaaaggggaacccaucaucaacuucuacgacccacucgucuuccccuccgacgaguucgacgcaagcaucucccaagucaacgaaaagaucaaccaaucacuagccuucauccgcaaauccgacgaacuccuccacaacguuaacguaggcaaauccaccaccaacaucaugaucacaaccaucaucauagucauaauagucauccuacuacuccucaucgccguaggucuauuccuauacuguaaagcucgaucaacccccgucacacucuccaaagaucaacucucaggaaucaacaacaucgccuucuccaacuaaggacuaguguccaccugucccuccugggcugcuggauugucucguuuuccugccaaauaaacaggaucagcgcuuuacagaucuaaaaaaaaaaaaaaaaaaaaaaaaaaaaaaaaaaaaaaaaaaaaaaaaaaaaaaaaaaaaaaaaugcaucccccccccccccccccccccccccccccccaaaggcucuuuucagagccaccagaauu

SEQ ID NO: 19179 - RNA, 1951 nt, Artificial Sequence
  mRNA product Design b-4 comprising derived and/or modified sequence from HRSV(Memphis-37)__AIY60640.1__F_DSCav1_mut8 (opt1)
gggagagucccgcagucggcguccagcggcucugcuuguucgugugugugucguugcaggccuuauucaagcuuaccauggagcugcccauccucaagaccaacgccaucaccacgauccuggccgcggugacccugugcuucgccagcucccagaacaucaccgaggaguucuaccagagcacgugcuccgccgucagcaagggcuaccucggcgcccugcgcaccgggugguacaccagcgugaucaccaucgagcuguccaacaucaaggagaucaagugcaacggcaccgacgccaaggugaagcucaucaagcaggagcuggacaaguacaagaacgcggucacggaccugcagcuccugaugcagagcaccccggccgccggcuccgggagcgcgaucgccuccggcaucgccgucugcaaggugcugcaccucgagggcgaggugaacaagaucaagaacgcccugcuguccaccaacaaggccgucgugagccucuccggcugcggggugagcguccugaccuucaaggugcuggaccucaagaacuacaucgacaagcagcugcugcccauccugaacaagcagagcugcuccauccccaacaucgagaccgucaucgaguuccagcagaagaacaaccgccuccuggagaucacgcgggaguucagcgugaacgcgggcgugaccacccccgucuccaccuacaugcugacgaacagcgagcuccugucccugaucaacgacaugccgaucaccaacgaccagaagaagcucaugagcaacaacgugcagaucgugcgccagcaguccuacagcaucaugugcaucaucaaggaggagguccuggccuacguggugcagcugccccucuacggggucaucgacacccccugcuggaagcugcacaccagcccccugugcacgaccaacaccaaggagggcuccaacaucugccucacccggacggaccgcgggugguacugcgacaacgccggcagcguguccuucuucccgcaggccgagaccugcaagguccagagcaaccggguguucugcgacaccaugaacucccugacccugcccagcgaggugaaccucugcaacaucgacaucuucaaccccaaguacgacugcaagaucaugacguccaagaccgacgucagcuccagcgugaucaccucccugggcgccaucgugagcugcuacgggaagaccaagugcacggcgagcaacaagugccgcggcaucaucaagaccuucuccaacgggugcgacuacgucagcaacaagggcguggacaccguguccgucggcaacacccuguacuacgugaacaagcaggagggccagagccucuacgugaagggggagcccaucaucaacuucuacgacccgcuggucuuccccuccgacgaguucgacgccagcaucucccaggugaacgagaagaucaaccagagccuggccuucauccggaaguccgacgagcuccugcacaacgugaacgucggcaagagcaccacgaacaucaugaucaccaccaucaucaucgugaucaucgugauccugcugcuccugaucgccgucgggcuguuccucuacugcaaggcccgcuccacccccgugacgcugagcaaggaccagcuguccgggaucaacaacaucgcguucagcaacugaggacuaguaauaaggaaacuguaugaaugucugugggcaggaagugaagagauccuucuguaaagguuuuuggaauuaugucugcugaauaauaaacuuuuuugaaauaauaaaucugguagaaaaaugagaucuaaaaaaaaaaaaaaaaaaaaaaaaaaaaaaaaaaaaaaaaaaaaaaaaaaaaaaaaaaaaaaaaugcaucccccccccccccccccccccccccccccccaaaggcucuuuucagagccaccagaauu

SEQ ID NO: 19180 - RNA, 1951 nt, Artificial Sequence
  mRNA product Design b-4 comprising derived and/or modified sequence from HRSV(Memphis-37)__AIY60640.1__F_DSCav1_mut8 (opt1)
gggagagucccgcagucggcguccagcggcucugcuuguucgugugugugucguugcaggccuuauucaagcuuaccauggagcugcccauccucaagaccaacgccaucaccacgauccuggccgcggugacccugugcuucgccagcucccagaacaucaccgaggaguucuaccagagcacgugcuccgccgucagcaagggcuaccucggggcccugcgcaccggcugguacaccuccgugaucaccaucgagcugagcaacaucaaggagaucaagugcaacgggaccgacgccaaggugaagcucaucaagcaggagcuggacaaguacaagaacgcggucacggaccugcagcuccugaugcaguccaccccggccgccggcagcggguccgccaucgcgagcggcaucgccgugugcaaggugcugcaccucgagggcgaggucaacaagaucaagaacgcccugcuguccaccaacaaggccguggugagccucuccgggugcggcgucagcgugcugaccuucaaggugcuggaccucaagaacuacaucgacaagcagcugcugcccauccucaacaagcaguccugcagcauccccaacaucgagacggucaucgaguuccagcagaagaacaaccggcugcuggagaucacccgcgaguucuccgugaacgccggggugaccacccccgucagcacguacaugcucaccaacuccgagcugcugagccucaucaacgacaugccgaucaccaacgaccagaagaagcugaugagcaacaacgugcagaucgugcggcagcaguccuacagcaucaugugcaucaucaaggaggagguccuggcguacguggugcagcucccccuguacggcgucaucgacacccccugcuggaagcugcacacgagcccccucugcaccaccaacaccaaggagggguccaacaucugccugacgcgcaccgaccggggcugguacugcgacaacgccggcuccgugagcuucuucccgcaggccgagaccugcaaggugcaguccaaccgcgucuucugcgacaccaugaacagccugacgcuccccuccgaggugaaccugugcaacaucgacaucuucaaccccaaguacgacugcaagaucaugaccagcaagaccgacgucuccagcuccgugaucaccagccugggggccaucguguccugcuacggcaagacgaagugcaccgccagcaacaagugccgggggaucaucaagaccuucuccaacggcugcgacuacgucagcaacaagggcguggacaccguguccgucgggaacacgcucuacuacgugaacaagcaggagggccagagccuguacgugaagggggagcccaucaucaacuucuacgacccgcuggucuuccccagcgacgaguucgacgcguccaucagccaggugaacgagaagaucaaccagucccucgccuucauccgcaagagcgacgagcugcugcacaacgugaacgucggcaaguccaccaccaacaucaugaucaccaccaucaucaucgugaucaucgugauccuccugcugcucaucgccgucgggcuguuccuguacugcaaggcccggagcacgcccgugacccuguccaaggaccagcucagcggcaucaacaacaucgccuucuccaacugaggacuaguaauaaggaaacuguaugaaugucugugggcaggaagugaagagauccuucuguaaagguuuuuggaauuaugucugcugaauaauaaacuuuuuugaaauaauaaaucugguagaaaaaugagaucuaaaaaaaaaaaaaaaaaaaaaaaaaaaaaaaaaaaaaaaaaaaaaaaaaaaaaaaaaaaaaaaaugcaucccccccccccccccccccccccccccccccaaaggcucuuuucagagccaccagaauu

SEQ ID NO: 19181 - RNA, 1951 nt, Artificial Sequence
  mRNA product Design b-4 comprising derived and/or modified sequence from HRSV(Memphis-37)__AIY60640.1__F_DSCav1_mut8 (opt2)
gggagagucccgcagucggcguccagcggcucugcuuguucgugugugugucguugcaggccuuauucaagcuuaccauggagcuccccauccucaagaccaacgccaucaccaccauccucgccgccgucacccucugcuucgccuccucccagaacaucaccgaggaguucuaccaguccaccugcuccgccgucuccaagggcuaccucggcgcccuccgcaccggcugguacaccuccgucaucaccaucgagcucuccaacaucaaggagaucaagugcaacggcaccgacgccaaggucaagcucaucaagcaggagcucgacaaguacaagaacgccgucaccgaccuccagcuccucaugcaguccacccccgccgccggcuccggcuccgccaucgccuccggcaucgccgucugcaagguccuccaccucgagggcgaggucaacaagaucaagaacgcccuccucuccaccaacaaggccgucgucucccucuccggcugcggcgucuccguccucaccuucaagguccucgaccucaagaacuacaucgacaagcagcuccuccccauccucaacaagcaguccugcuccauccccaacaucgagaccgucaucgaguuccagcagaagaacaaccgccuccucgagaucacccgcgaguucuccgucaacgccggcgucaccacccccgucuccaccuacaugcucaccaacuccgagcuccucucccucaucaacgacaugcccaucaccaacgaccagaagaagcucauguccaacaacguccagaucguccgccagcaguccuacuccaucaugugcaucaucaaggaggagguccucgccuacgucguccagcucccccucuacggcgucaucgacacccccugcuggaagcuccacaccuccccccucugcaccaccaacaccaaggagggcuccaacaucugccucacccgcaccgaccgcggcugguacugcgacaacgccggcuccgucuccuucuucccccaggccgagaccugcaagguccaguccaaccgcgucuucugcgacaccaugaacucccucacccuccccuccgaggucaaccucugcaacaucgacaucuucaaccccaaguacgacugcaagaucaugaccuccaagaccgacgucuccuccuccgucaucaccucccucggcgccaucgucuccugcuacggcaagaccaagugcaccgccuccaacaagugccgcggcaucaucaagaccuucuccaacggcugcgacuacgucuccaacaagggcgucgacaccgucuccgucggcaacacccucuacuacgucaacaagcaggagggccagucccucuacgucaagggcgagcccaucaucaacuucuacgacccccucgucuuccccuccgacgaguucgacgccuccaucucccaggucaacgagaagaucaaccagucccucgccuucauccgcaaguccgacgagcuccuccacaacgucaacgucggcaaguccaccaccaacaucaugaucaccaccaucaucaucgucaucaucgucauccuccuccuccucaucgccgucggccucuuccucuacugcaaggcccgcuccacccccgucacccucuccaaggaccagcucuccggcaucaacaacaucgccuucuccaacugaggacuaguaauaaggaaacuguaugaaugucugugggcaggaagugaagagauccuucuguaaagguuuuuggaauuaugucugcugaauaauaaacuuuuuugaaauaauaaaucugguagaaaaaugagaucuaaaaaaaaaaaaaaaaaaaaaaaaaaaaaaaaaaaaaaaaaaaaaaaaaaaaaaaaaaaaaaaaugcaucccccccccccccccccccccccccccccccaaaggcucuuuucagagccaccagaauu

SEQ ID NO: 19182 - RNA, 1951 nt, Artificial Sequence
  mRNA product Design b-4 comprising derived and/or modified sequence from HRSV(Memphis-37)__AIY60640.1__F_DSCav1_mut8 (opt3)
gggagagucccgcagucggcguccagcggcucugcuuguucgugugugugucguugcaggccuuauucaagcuuaccauggagcugcccauccucaagaccaacgccauuacaacuauacuugcugcagugacgcugugcuucgccagcucccagaauaucaccgaagaguuuuaccaaucuacauguucagcggucaguaaaggcuauuugggggcuuuaagaacuggaugguacaccagcguuauuacaaucgaacuguccaacauuaaggagaucaaaugcaaugguaccgacgccaaggugaaacuaauaaagcaggaacucgauaaguauaaaaacgcaguaacugaccugcagcuucugaugcagucuacuccugccgcuggcucggggucagcaaucgccagcggaauugcuguguguaaggucuugcaccucgagggcgaggugaauaaaaucaagaacgcccugcugaguaccaauaaagcgguugugucccucucugguugcggggucagcguguuaacguucaagguacuggaucuuaagaacuacauugacaaacaauugcugccaauccuaaauaagcaguccuguucaauaccgaacauugaaacuguuaucgaguuucagcagaaaaauaacaggcuccuggaaauuacccgggaguucagugugaaugcaggagucacaacucccgugagcaccuauaugcuuacaaacucugagcuguugucccucaucaaugauaugccuaucaccaacgaccaaaagaaacugaugucaaacaaugugcagauuguccgccagcagagcuacaguauaaugugcaucauuaaggaagagguuuuagccuaugugguacaacugccacucuacggcgugaucgauacgcccuguuggaaacuucauacuucuccucugugcacaaccaacacuaaggaaggcuccaauauauguuugacacgaaccgaccgugggugguacugcgauaacgcuggaagcgucucguuuuucccacaggccgagacguguaaggugcagucuaauagaguuuucugcgacaccaugaacucccuaacacugcccucagaagugaaucucugcaacauugauaucuucaauccuaaauaugacuguaagaucaugacaaguaaaaccgaugucagcuccucugugauuacaagccugggugcaaucguaucaugcuacggcaagacuaaauguaccgcuaguaacaagugcagggggauuauaaagacauuuuccaauggaugugacuauguuagcaacaaaggcguggacaccgucucuguggguaauacucuuuacuaugucaacaagcaagaggggcagucacuguacgugaaaggagagccaaucauuaauuucuaugauccguugguuuuucccagugacgaauuugaugccagcaucucccaggugaacgagaagaucaaccagucucucgcguuuauucggaaaucggacgaacuguuacacaauguaaacgucggcaagagcacgacaaauauaaugaucaccacuauuaucauugugaucauaguuauccugcuacuccugauugccgugggccuuuucuuguacugcaaggcacgcuccaccccugucacacugucaaaagaucaacucagugggaucaacaauauugcuuucucuaacugaggacuaguaauaaggaaacuguaugaaugucugugggcaggaagugaagagauccuucuguaaagguuuuuggaauuaugucugcugaauaauaaacuuuuuugaaauaauaaaucugguagaaaaaugagaucuaaaaaaaaaaaaaaaaaaaaaaaaaaaaaaaaaaaaaaaaaaaaaaaaaaaaaaaaaaaaaaaaugcaucccccccccccccccccccccccccccccccaaaggcucuuuucagagccaccagaauu

SEQ ID NO: 19183 - RNA, 1951 nt, Artificial Sequence
  mRNA product Design b-4 comprising derived and/or modified sequence from HRSV(Memphis-37)__AIY60640.1__F_DSCav1_mut8 (opt4)
gggagagucccgcagucggcguccagcggcucugcuuguucgugugugugucguugcaggccuuauucaagcuuaccauggagcugcccauccugaagaccaacgccaucaccaccauccuggccgccgugacccugugcuucgccagcagccagaacaucaccgaggaguucuaccagagcaccugcagcgccgugagcaagggcuaccugggcgcccugagaaccggcugguacaccagcgugaucaccaucgagcugagcaacaucaaggagaucaagugcaacggcaccgacgccaaggugaagcugaucaagcaggagcuggacaaguacaagaacgccgugaccgaccugcagcugcugaugcagagcacccccgccgccggcagcggcagcgccaucgccagcggcaucgccgugugcaaggugcugcaccuggagggcgaggugaacaagaucaagaacgcccugcugagcaccaacaaggccguggugagccugagcggcugcggcgugagcgugcugaccuucaaggugcuggaccugaagaacuacaucgacaagcagcugcugcccauccugaacaagcagagcugcagcauccccaacaucgagaccgugaucgaguuccagcagaagaacaacagacugcuggagaucaccagagaguucagcgugaacgccggcgugaccacccccgugagcaccuacaugcugaccaacagcgagcugcugagccugaucaacgacaugcccaucaccaacgaccagaagaagcugaugagcaacaacgugcagaucgugagacagcagagcuacagcaucaugugcaucaucaaggaggaggugcuggccuacguggugcagcugccccuguacggcgugaucgacacccccugcuggaagcugcacaccagcccccugugcaccaccaacaccaaggagggcagcaacaucugccugaccagaaccgacagaggcugguacugcgacaacgccggcagcgugagcuucuucccccaggccgagaccugcaaggugcagagcaacagaguguucugcgacaccaugaacagccugacccugcccagcgaggugaaccugugcaacaucgacaucuucaaccccaaguacgacugcaagaucaugaccagcaagaccgacgugagcagcagcgugaucaccagccugggcgccaucgugagcugcuacggcaagaccaagugcaccgccagcaacaagugcagaggcaucaucaagaccuucagcaacggcugcgacuacgugagcaacaagggcguggacaccgugagcgugggcaacacccuguacuacgugaacaagcaggagggccagagccuguacgugaagggcgagcccaucaucaacuucuacgacccccugguguuccccagcgacgaguucgacgccagcaucagccaggugaacgagaagaucaaccagagccuggccuucaucagaaagagcgacgagcugcugcacaacgugaacgugggcaagagcaccaccaacaucaugaucaccaccaucaucaucgugaucaucgugauccugcugcugcugaucgccgugggccuguuccuguacugcaaggccagaagcacccccgugacccugagcaaggaccagcugagcggcaucaacaacaucgccuucagcaacugaggacuaguaauaaggaaacuguaugaaugucugugggcaggaagugaagagauccuucuguaaagguuuuuggaauuaugucugcugaauaauaaacuuuuuugaaauaauaaaucugguagaaaaaugagaucuaaaaaaaaaaaaaaaaaaaaaaaaaaaaaaaaaaaaaaaaaaaaaaaaaaaaaaaaaaaaaaaaugcaucccccccccccccccccccccccccccccccaaaggcucuuuucagagccaccagaauu

SEQ ID NO: 19184 - RNA, 1951 nt, Artificial Sequence
  mRNA product Design b-4 comprising derived and/or modified sequence from HRSV(Memphis-37)__AIY60640.1__F_DSCav1_mut8 (opt5)
gggagagucccgcagucggcguccagcggcucugcuuguucgugugugugucguugcaggccuuauucaagcuuaccauggagcugcccauccucaagaccaacgccauuacaacgauccuggcugccgugacccuuugcuucgcgagcucccagaauauuacagaagaguuuuaccaaucuaccuguagcgcugucuccaaaggcuaucugggggcccucagaacaggaugguacaccucuguuaucacaauugaacugagcaacaucaaggagaucaaaugcaauggcaccgacgccaaggugaaacuuauuaagcaggaacuggauaaguauaaaaacgcugugacggaccuccagcugcugaugcaguccaccccugccgcugggucuggaagcgccaucgcguccggcauugccgucuguaaggugcuccaccuggagggggagguuaauaaaaucaagaacgcccuucugagcacaaauaaagcuguggucucucucuccggaugcggcgugagcguucugaccuucaaggugcuugaucugaagaacuacauugacaaacaacuccugccgauccugaauaagcagucuuguuccauucccaacaucgaaacagucaucgaguuucagcagaaaaauaaccggcuccuggaaauuacccgcgaguucagcgugaaugcuggcgugacgacaccugucucuaccuauaugcuuacaaacuccgagcugcucagccugaucaaugauaugcccauuaccaacgaccaaaagaaacuuauguccaacaauguucagaucgugagacagcagucuuacagcauuaugugcaucaucaaggaagaggugcuggccuaugucgugcaacucccucuguacgggguuauugauacccccuguuggaaacugcauacauccccucucugcacgaccaacacaaaggaaggaagcaauaucugucugacccggacagaccgcggcugguacugcgauaacgcggggucuguguccuuuuucccgcaggccgagaccuguaagguccagagcaauagaguguuuugcgacacgaugaacucucuuacacugcccagcgaaguuaaucucugcaacauugauaucuucaauccuaaauaugacuguaagauuaugaccuccaaaaccgaugugucuagcuccgucaucacaagccugggagcuaucgugucuugcuacggcaagaccaaauguacagccuccaacaagugccgggggauuaucaagacguuuagcaauggaugugacuaugucucuaacaaaggcguggacaccguuuccgugggcaauacacuuuacuaugucaacaagcaagaggggcagagccuguacgugaaaggagagcccauuaucaauuucuaugauccucucguuuuucccuccgacgaguucgaugcuucuauuagccaggugaacgaaaagaucaaccagucccuggccuuuauucgcaaaucugacgaacugcuccacaaugucaacgugggcaagagcaccacaaauaucaugaucaccacgauuaucauugugaucauuguuauccugcuucugcucaucgccgucgggcuguuccuguacugcaaggcuagauccaccccggugacacuuagcaaagaucaacucucuggaauuaacaauaucgcguucuccaacugaggacuaguaauaaggaaacuguaugaaugucugugggcaggaagugaagagauccuucuguaaagguuuuuggaauuaugucugcugaauaauaaacuuuuuugaaauaauaaaucugguagaaaaaugagaucuaaaaaaaaaaaaaaaaaaaaaaaaaaaaaaaaaaaaaaaaaaaaaaaaaaaaaaaaaaaaaaaaugcaucccccccccccccccccccccccccccccccaaaggcucuuuucagagccaccagaauu

SEQ ID NO: 19185 - RNA, 1951 nt, Artificial Sequence
  mRNA product Design b-4 comprising derived and/or modified sequence from HRSV(Memphis-37)__AIY60640.1__F_DSCav1_mut8 (opt6)
gggagagucccgcagucggcguccagcggcucugcuuguucgugugugugucguugcaggccuuauucaagcuuaccauggaacuuccuauuuuaaaaacaaacgcaauuacaaccauauuagcagcaguaacacuaugcuuugcaucaucacaaaacaucaccgaagaauuuuaucaauccacaugcucagcaguaucaaaaggauaccuuggcgcacuccgaacaggcugguauacaucggucauaacuauagaacucuccaacauaaaagaaauaaaaugcaaugguacugacgcaaaaguaaaauuaauaaaacaagaacuagacaaauacaaaaacgcaguaaccgauuuacaacuacuuaugcaaucaacaccugcagcaggaagcggaucagcaauagcaaguggaauagcaguaugcaaaguacuucaccucgaaggagaaguaaauaaaauaaaaaacgccuuacuaucaacaaauaaagccgucguaucacuuuccgguugcggcguaucaguauuaaccuuuaaagucuuagacuuaaaaaacuacauagacaaacaauuauuaccaauacuaaacaaacaauccuguuccauacccaacauagaaaccguaauagaauuucaacaaaaaaacaacagacuauuagaaauaacacgcgaauuuucaguaaacgcaggcguaacaacaccaguaucaacauauauguuaaccaauucagaauuauuaucccuuauaaaugacaugccuauaacaaacgaccaaaaaaaauuaaugaguaacaacguucaaauaguaagacaacaaucauacagcauaaugugcauaauaaaagaagaaguacuagcauacguaguucaacuaccacucuauggcguuaucgacaccccaugcuggaaacuacauaccucaccacucuguaccacuaauacgaaagaaggaucuaacauaugccuaaccagaacagaucgagguugguauugcgacaaugcuggaucaguaucauucuucccacaagcagaaaccugcaaaguacaaagcaacagaguauuuugugacacuaugaacucacuaacgcuaccuucagaaguaaaccuaugcaacaucgacauauucaacccaaaauacgauugcaaaauaaugacaucaaaaacagacguuuccucaucaguaauaacaucauuaggagcaauaguauccugcuacgguaaaaccaaaugcacagcauccaauaaaugccgaggaaucauuaaaacauuuucaaauggcugcgacuauguaaguaauaaagguguagauacaguaucaguaggcaacacacuauauuacguaaacaaacaagaagggcaaucccuauaugucaaaggcgaaccaauuauaaacuucuacgacccccucguauucccaucagacgaauuugacgcaucaauaucccaaguaaacgaaaaaaucaaccaaucacucgcauucauacguaaauccgacgaauuacuacauaacguaaacguaggcaaaucaacaacaaauauaaugauaacaaccauaaucauaguaauaauaguuauacuccuacuacucauugcagucggccuauuucuauacuguaaagcacgcucuacaccaguaacacuaucuaaagaucaauuauccggaauaaacaacauugccuucuccaauuaaggacuaguaauaaggaaacuguaugaaugucugugggcaggaagugaagagauccuucuguaaagguuuuuggaauuaugucugcugaauaauaaacuuuuuugaaauaauaaaucugguagaaaaaugagaucuaaaaaaaaaaaaaaaaaaaaaaaaaaaaaaaaaaaaaaaaaaaaaaaaaaaaaaaaaaaaaaaaugcaucccccccccccccccccccccccccccccccaaaggcucuuuucagagccaccagaauu

SEQ ID NO: 19186 - RNA, 1951 nt, Artificial Sequence
  mRNA product Design b-4 comprising derived and/or modified sequence from HRSV(Memphis-37)__AIY60640.1__F_DSCav1_mut8 (opt11)
gggagagucccgcagucggcguccagcggcucugcuuguucgugugugugucguugcaggccuuauucaagcuuaccauggaacuucccauccugaagaccaacgcuaucacaaccauccucgccgcagucacccuuugcuucgccucaucccaaaacaucaccgaagaauuuuaccagucaaccugcucggccgucuccaagggcuaccucggcgcccuccgcacuggcugguacacauccgucaucaccaucgaacucuccaacauaaaagaaauaaaaugcaacggaaccgacgccaaagucaaacucaucaaacaagaacuagauaaauauaaaaacgccgucaccgaccugcaacuccucaugcaauccaccccagccgccggcucuggcagcgccaucgcaagcggaaucgccgucugcaaaguccuccaccuagaaggcgaagucaacaaaauuaaaaacgcccuccucuccaccaacaaagcaguugucucccucucuggcugcggagucucuguacucaccuucaaaguacuagaccucaagaauuacauagacaaacaacuccugcccauccuuaacaaacaaaguuguaguauccccaacaucgaaacaguaaucgaauuucagcagaaaaacaaccgccuccucgaaaucacacgagaguucucggucaacgccggcgucaccacccccguaucaaccuacaugcuaacaaacuccgaacuacuuucccucaucaaugacaugcccauaaccaacgaccaaaagaaacuaauguccaauaacguccagauaguccgucaacaguccuacucaaucaugugcauaauuaaagaagaaguacucgccuacgucguccaacuaccccucuauggagucaucgacacccccugcuggaaacuccacacaucaccccuaugcacaaccaacaccaaagaaggcuccaacaucugccucacaagaaccgaccgcggcugguacugcgacaacgcuggcuccgucucguucuucccacaagccgaaaccugcaaaguccaaucaaaccgggucuucugcgacaccaugaacucccucacucucccaagcgaagucaaccuaugcaacaucgacaucuucaacccaaaauacgacuguaaaaucaugacuucgaaaacagacgucuccucaucaguaaucacauccuuaggcgccaucguguccugcuacgguaagaccaaaugcacagccuccaacaaaugccggggcaucaucaaaaccuucagcaacgguugugauuacgucuccaacaaaggaguagacaccgucuccguaggaaacacccucuacuacgucaacaagcaagaaggccaaucccucuacgucaaaggggaacccaucaucaacuucuacgacccacucgucuuccccuccgacgaguucgacgcaagcaucucccaagucaacgaaaagaucaaccaaucacuagccuucauccgcaaauccgacgaacuccuccacaacguuaacguaggcaaauccaccaccaacaucaugaucacaaccaucaucauagucauaauagucauccuacuacuccucaucgccguaggucuauuccuauacuguaaagcucgaucaacccccgucacacucuccaaagaucaacucucaggaaucaacaacaucgccuucuccaacuaaggacuaguaauaaggaaacuguaugaaugucugugggcaggaagugaagagauccuucuguaaagguuuuuggaauuaugucugcugaauaauaaacuuuuuugaaauaauaaaucugguagaaaaaugagaucuaaaaaaaaaaaaaaaaaaaaaaaaaaaaaaaaaaaaaaaaaaaaaaaaaaaaaaaaaaaaaaaaugcaucccccccccccccccccccccccccccccccaaaggcucuuuucagagccaccagaauu

SEQ ID NO: 19187 - RNA, 2013 nt, Artificial Sequence
  mRNA product Design b-5 comprising derived and/or modified sequence from HRSV(Memphis-37)__AIY60640.1__F_DSCav1_mut8 (opt1)
gggagacuccugucgggcggaaguaggaggaguagaguuuaaaaacaguacucuuuuuccgguucgggacguaguugaagcaacgacaagccggauaaccgcucuugagacaggaagcuuaccauggagcugcccauccucaagaccaacgccaucaccacgauccuggccgcggugacccugugcuucgccagcucccagaacaucaccgaggaguucuaccagagcacgugcuccgccgucagcaagggcuaccucggcgcccugcgcaccgggugguacaccagcgugaucaccaucgagcuguccaacaucaaggagaucaagugcaacggcaccgacgccaaggugaagcucaucaagcaggagcuggacaaguacaagaacgcggucacggaccugcagcuccugaugcagagcaccccggccgccggcuccgggagcgcgaucgccuccggcaucgccgucugcaaggugcugcaccucgagggcgaggugaacaagaucaagaacgcccugcuguccaccaacaaggccgucgugagccucuccggcugcggggugagcguccugaccuucaaggugcuggaccucaagaacuacaucgacaagcagcugcugcccauccugaacaagcagagcugcuccauccccaacaucgagaccgucaucgaguuccagcagaagaacaaccgccuccuggagaucacgcgggaguucagcgugaacgcgggcgugaccacccccgucuccaccuacaugcugacgaacagcgagcuccugucccugaucaacgacaugccgaucaccaacgaccagaagaagcucaugagcaacaacgugcagaucgugcgccagcaguccuacagcaucaugugcaucaucaaggaggagguccuggccuacguggugcagcugccccucuacggggucaucgacacccccugcuggaagcugcacaccagcccccugugcacgaccaacaccaaggagggcuccaacaucugccucacccggacggaccgcgggugguacugcgacaacgccggcagcguguccuucuucccgcaggccgagaccugcaagguccagagcaaccggguguucugcgacaccaugaacucccugacccugcccagcgaggugaaccucugcaacaucgacaucuucaaccccaaguacgacugcaagaucaugacguccaagaccgacgucagcuccagcgugaucaccucccugggcgccaucgugagcugcuacgggaagaccaagugcacggcgagcaacaagugccgcggcaucaucaagaccuucuccaacgggugcgacuacgucagcaacaagggcguggacaccguguccgucggcaacacccuguacuacgugaacaagcaggagggccagagccucuacgugaagggggagcccaucaucaacuucuacgacccgcuggucuuccccuccgacgaguucgacgccagcaucucccaggugaacgagaagaucaaccagagccuggccuucauccggaaguccgacgagcuccugcacaacgugaacgucggcaagagcaccacgaacaucaugaucaccaccaucaucaucgugaucaucgugauccugcugcuccugaucgccgucgggcuguuccucuacugcaaggcccgcuccacccccgugacgcugagcaaggaccagcuguccgggaucaacaacaucgcguucagcaacugaggacuaguacuggcugcaucucccuuuccucuguccuccauccuucucccaggauggugaagggggaccugguacccagugauccccaccccaggauccuaaaucaugacuuaccugcuaauaaaaacucauuggaaaagugagaagaucuaaaaaaaaaaaaaaaaaaaaaaaaaaaaaaaaaaaaaaaaaaaaaaaaaaaaaaaaaaaaaaaaugcaucccccccccccccccccccccccccccccccaaaggcucuuuucagagccaccagaauu

SEQ ID NO: 19188 - RNA, 2013 nt, Artificial Sequence
  mRNA product Design b-5 comprising derived and/or modified sequence from HRSV(Memphis-37)__AIY60640.1__F_DSCav1_mut8 (opt1)
gggagacuccugucgggcggaaguaggaggaguagaguuuaaaaacaguacucuuuuuccgguucgggacguaguugaagcaacgacaagccggauaaccgcucuugagacaggaagcuuaccauggagcugcccauccucaagaccaacgccaucaccacgauccuggccgcggugacccugugcuucgccagcucccagaacaucaccgaggaguucuaccagagcacgugcuccgccgucagcaagggcuaccucggggcccugcgcaccggcugguacaccuccgugaucaccaucgagcugagcaacaucaaggagaucaagugcaacgggaccgacgccaaggugaagcucaucaagcaggagcuggacaaguacaagaacgcggucacggaccugcagcuccugaugcaguccaccccggccgccggcagcggguccgccaucgcgagcggcaucgccgugugcaaggugcugcaccucgagggcgaggucaacaagaucaagaacgcccugcuguccaccaacaaggccguggugagccucuccgggugcggcgucagcgugcugaccuucaaggugcuggaccucaagaacuacaucgacaagcagcugcugcccauccucaacaagcaguccugcagcauccccaacaucgagacggucaucgaguuccagcagaagaacaaccggcugcuggagaucacccgcgaguucuccgugaacgccggggugaccacccccgucagcacguacaugcucaccaacuccgagcugcugagccucaucaacgacaugccgaucaccaacgaccagaagaagcugaugagcaacaacgugcagaucgugcggcagcaguccuacagcaucaugugcaucaucaaggaggagguccuggcguacguggugcagcucccccuguacggcgucaucgacacccccugcuggaagcugcacacgagcccccucugcaccaccaacaccaaggagggguccaacaucugccugacgcgcaccgaccggggcugguacugcgacaacgccggcuccgugagcuucuucccgcaggccgagaccugcaaggugcaguccaaccgcgucuucugcgacaccaugaacagccugacgcuccccuccgaggugaaccugugcaacaucgacaucuucaaccccaaguacgacugcaagaucaugaccagcaagaccgacgucuccagcuccgugaucaccagccugggggccaucguguccugcuacggcaagacgaagugcaccgccagcaacaagugccgggggaucaucaagaccuucuccaacggcugcgacuacgucagcaacaagggcguggacaccguguccgucgggaacacgcucuacuacgugaacaagcaggagggccagagccuguacgugaagggggagcccaucaucaacuucuacgacccgcuggucuuccccagcgacgaguucgacgcguccaucagccaggugaacgagaagaucaaccagucccucgccuucauccgcaagagcgacgagcugcugcacaacgugaacgucggcaaguccaccaccaacaucaugaucaccaccaucaucaucgugaucaucgugauccuccugcugcucaucgccgucgggcuguuccuguacugcaaggcccggagcacgcccgugacccuguccaaggaccagcucagcggcaucaacaacaucgccuucuccaacugaggacuaguacuggcugcaucucccuuuccucuguccuccauccuucucccaggauggugaagggggaccugguacccagugauccccaccccaggauccuaaaucaugacuuaccugcuaauaaaaacucauuggaaaagugagaagaucuaaaaaaaaaaaaaaaaaaaaaaaaaaaaaaaaaaaaaaaaaaaaaaaaaaaaaaaaaaaaaaaaugcaucccccccccccccccccccccccccccccccaaaggcucuuuucagagccaccagaauu

SEQ ID NO: 19189 - RNA, 2013 nt, Artificial Sequence
  mRNA product Design b-5 comprising derived and/or modified sequence from HRSV(Memphis-37)__AIY60640.1__F_DSCav1_mut8 (opt2)
gggagacuccugucgggcggaaguaggaggaguagaguuuaaaaacaguacucuuuuuccgguucgggacguaguugaagcaacgacaagccggauaaccgcucuugagacaggaagcuuaccauggagcuccccauccucaagaccaacgccaucaccaccauccucgccgccgucacccucugcuucgccuccucccagaacaucaccgaggaguucuaccaguccaccugcuccgccgucuccaagggcuaccucggcgcccuccgcaccggcugguacaccuccgucaucaccaucgagcucuccaacaucaaggagaucaagugcaacggcaccgacgccaaggucaagcucaucaagcaggagcucgacaaguacaagaacgccgucaccgaccuccagcuccucaugcaguccacccccgccgccggcuccggcuccgccaucgccuccggcaucgccgucugcaagguccuccaccucgagggcgaggucaacaagaucaagaacgcccuccucuccaccaacaaggccgucgucucccucuccggcugcggcgucuccguccucaccuucaagguccucgaccucaagaacuacaucgacaagcagcuccuccccauccucaacaagcaguccugcuccauccccaacaucgagaccgucaucgaguuccagcagaagaacaaccgccuccucgagaucacccgcgaguucuccgucaacgccggcgucaccacccccgucuccaccuacaugcucaccaacuccgagcuccucucccucaucaacgacaugcccaucaccaacgaccagaagaagcucauguccaacaacguccagaucguccgccagcaguccuacuccaucaugugcaucaucaaggaggagguccucgccuacgucguccagcucccccucuacggcgucaucgacacccccugcuggaagcuccacaccuccccccucugcaccaccaacaccaaggagggcuccaacaucugccucacccgcaccgaccgcggcugguacugcgacaacgccggcuccgucuccuucuucccccaggccgagaccugcaagguccaguccaaccgcgucuucugcgacaccaugaacucccucacccuccccuccgaggucaaccucugcaacaucgacaucuucaaccccaaguacgacugcaagaucaugaccuccaagaccgacgucuccuccuccgucaucaccucccucggcgccaucgucuccugcuacggcaagaccaagugcaccgccuccaacaagugccgcggcaucaucaagaccuucuccaacggcugcgacuacgucuccaacaagggcgucgacaccgucuccgucggcaacacccucuacuacgucaacaagcaggagggccagucccucuacgucaagggcgagcccaucaucaacuucuacgacccccucgucuuccccuccgacgaguucgacgccuccaucucccaggucaacgagaagaucaaccagucccucgccuucauccgcaaguccgacgagcuccuccacaacgucaacgucggcaaguccaccaccaacaucaugaucaccaccaucaucaucgucaucaucgucauccuccuccuccucaucgccgucggccucuuccucuacugcaaggcccgcuccacccccgucacccucuccaaggaccagcucuccggcaucaacaacaucgccuucuccaacugaggacuaguacuggcugcaucucccuuuccucuguccuccauccuucucccaggauggugaagggggaccugguacccagugauccccaccccaggauccuaaaucaugacuuaccugcuaauaaaaacucauuggaaaagugagaagaucuaaaaaaaaaaaaaaaaaaaaaaaaaaaaaaaaaaaaaaaaaaaaaaaaaaaaaaaaaaaaaaaaugcaucccccccccccccccccccccccccccccccaaaggcucuuuucagagccaccagaauu

SEQ ID NO: 19190 - RNA, 2013 nt, Artificial Sequence
  mRNA product Design b-5 comprising derived and/or modified sequence from HRSV(Memphis-37)__AIY60640.1__F_DSCav1_mut8 (opt3)
gggagacuccugucgggcggaaguaggaggaguagaguuuaaaaacaguacucuuuuuccgguucgggacguaguugaagcaacgacaagccggauaaccgcucuugagacaggaagcuuaccauggagcugcccauccucaagaccaacgccauuacaacuauacuugcugcagugacgcugugcuucgccagcucccagaauaucaccgaagaguuuuaccaaucuacauguucagcggucaguaaaggcuauuugggggcuuuaagaacuggaugguacaccagcguuauuacaaucgaacuguccaacauuaaggagaucaaaugcaaugguaccgacgccaaggugaaacuaauaaagcaggaacucgauaaguauaaaaacgcaguaacugaccugcagcuucugaugcagucuacuccugccgcuggcucggggucagcaaucgccagcggaauugcuguguguaaggucuugcaccucgagggcgaggugaauaaaaucaagaacgcccugcugaguaccaauaaagcgguugugucccucucugguugcggggucagcguguuaacguucaagguacuggaucuuaagaacuacauugacaaacaauugcugccaauccuaaauaagcaguccuguucaauaccgaacauugaaacuguuaucgaguuucagcagaaaaauaacaggcuccuggaaauuacccgggaguucagugugaaugcaggagucacaacucccgugagcaccuauaugcuuacaaacucugagcuguugucccucaucaaugauaugccuaucaccaacgaccaaaagaaacugaugucaaacaaugugcagauuguccgccagcagagcuacaguauaaugugcaucauuaaggaagagguuuuagccuaugugguacaacugccacucuacggcgugaucgauacgcccuguuggaaacuucauacuucuccucugugcacaaccaacacuaaggaaggcuccaauauauguuugacacgaaccgaccgugggugguacugcgauaacgcuggaagcgucucguuuuucccacaggccgagacguguaaggugcagucuaauagaguuuucugcgacaccaugaacucccuaacacugcccucagaagugaaucucugcaacauugauaucuucaauccuaaauaugacuguaagaucaugacaaguaaaaccgaugucagcuccucugugauuacaagccugggugcaaucguaucaugcuacggcaagacuaaauguaccgcuaguaacaagugcagggggauuauaaagacauuuuccaauggaugugacuauguuagcaacaaaggcguggacaccgucucuguggguaauacucuuuacuaugucaacaagcaagaggggcagucacuguacgugaaaggagagccaaucauuaauuucuaugauccguugguuuuucccagugacgaauuugaugccagcaucucccaggugaacgagaagaucaaccagucucucgcguuuauucggaaaucggacgaacuguuacacaauguaaacgucggcaagagcacgacaaauauaaugaucaccacuauuaucauugugaucauaguuauccugcuacuccugauugccgugggccuuuucuuguacugcaaggcacgcuccaccccugucacacugucaaaagaucaacucagugggaucaacaauauugcuuucucuaacugaggacuaguacuggcugcaucucccuuuccucuguccuccauccuucucccaggauggugaagggggaccugguacccagugauccccaccccaggauccuaaaucaugacuuaccugcuaauaaaaacucauuggaaaagugagaagaucuaaaaaaaaaaaaaaaaaaaaaaaaaaaaaaaaaaaaaaaaaaaaaaaaaaaaaaaaaaaaaaaaugcaucccccccccccccccccccccccccccccccaaaggcucuuuucagagccaccagaauu

SEQ ID NO: 19191 - RNA, 2013 nt, Artificial Sequence
  mRNA product Design b-5 comprising derived and/or modified sequence from HRSV(Memphis-37)__AIY60640.1__F_DSCav1_mut8 (opt4)
gggagacuccugucgggcggaaguaggaggaguagaguuuaaaaacaguacucuuuuuccgguucgggacguaguugaagcaacgacaagccggauaaccgcucuugagacaggaagcuuaccauggagcugcccauccugaagaccaacgccaucaccaccauccuggccgccgugacccugugcuucgccagcagccagaacaucaccgaggaguucuaccagagcaccugcagcgccgugagcaagggcuaccugggcgcccugagaaccggcugguacaccagcgugaucaccaucgagcugagcaacaucaaggagaucaagugcaacggcaccgacgccaaggugaagcugaucaagcaggagcuggacaaguacaagaacgccgugaccgaccugcagcugcugaugcagagcacccccgccgccggcagcggcagcgccaucgccagcggcaucgccgugugcaaggugcugcaccuggagggcgaggugaacaagaucaagaacgcccugcugagcaccaacaaggccguggugagccugagcggcugcggcgugagcgugcugaccuucaaggugcuggaccugaagaacuacaucgacaagcagcugcugcccauccugaacaagcagagcugcagcauccccaacaucgagaccgugaucgaguuccagcagaagaacaacagacugcuggagaucaccagagaguucagcgugaacgccggcgugaccacccccgugagcaccuacaugcugaccaacagcgagcugcugagccugaucaacgacaugcccaucaccaacgaccagaagaagcugaugagcaacaacgugcagaucgugagacagcagagcuacagcaucaugugcaucaucaaggaggaggugcuggccuacguggugcagcugccccuguacggcgugaucgacacccccugcuggaagcugcacaccagcccccugugcaccaccaacaccaaggagggcagcaacaucugccugaccagaaccgacagaggcugguacugcgacaacgccggcagcgugagcuucuucccccaggccgagaccugcaaggugcagagcaacagaguguucugcgacaccaugaacagccugacccugcccagcgaggugaaccugugcaacaucgacaucuucaaccccaaguacgacugcaagaucaugaccagcaagaccgacgugagcagcagcgugaucaccagccugggcgccaucgugagcugcuacggcaagaccaagugcaccgccagcaacaagugcagaggcaucaucaagaccuucagcaacggcugcgacuacgugagcaacaagggcguggacaccgugagcgugggcaacacccuguacuacgugaacaagcaggagggccagagccuguacgugaagggcgagcccaucaucaacuucuacgacccccugguguuccccagcgacgaguucgacgccagcaucagccaggugaacgagaagaucaaccagagccuggccuucaucagaaagagcgacgagcugcugcacaacgugaacgugggcaagagcaccaccaacaucaugaucaccaccaucaucaucgugaucaucgugauccugcugcugcugaucgccgugggccuguuccuguacugcaaggccagaagcacccccgugacccugagcaaggaccagcugagcggcaucaacaacaucgccuucagcaacugaggacuaguacuggcugcaucucccuuuccucuguccuccauccuucucccaggauggugaagggggaccugguacccagugauccccaccccaggauccuaaaucaugacuuaccugcuaauaaaaacucauuggaaaagugagaagaucuaaaaaaaaaaaaaaaaaaaaaaaaaaaaaaaaaaaaaaaaaaaaaaaaaaaaaaaaaaaaaaaaugcaucccccccccccccccccccccccccccccccaaaggcucuuuucagagccaccagaauu

SEQ ID NO: 19192 - RNA, 2013 nt, Artificial Sequence
  mRNA product Design b-5 comprising derived and/or modified sequence from HRSV(Memphis-37)__AIY60640.1__F_DSCav1_mut8 (opt5)
gggagacuccugucgggcggaaguaggaggaguagaguuuaaaaacaguacucuuuuuccgguucgggacguaguugaagcaacgacaagccggauaaccgcucuugagacaggaagcuuaccauggagcugcccauccucaagaccaacgccauuacaacgauccuggcugccgugacccuuugcuucgcgagcucccagaauauuacagaagaguuuuaccaaucuaccuguagcgcugucuccaaaggcuaucugggggcccucagaacaggaugguacaccucuguuaucacaauugaacugagcaacaucaaggagaucaaaugcaauggcaccgacgccaaggugaaacuuauuaagcaggaacuggauaaguauaaaaacgcugugacggaccuccagcugcugaugcaguccaccccugccgcugggucuggaagcgccaucgcguccggcauugccgucuguaaggugcuccaccuggagggggagguuaauaaaaucaagaacgcccuucugagcacaaauaaagcuguggucucucucuccggaugcggcgugagcguucugaccuucaaggugcuugaucugaagaacuacauugacaaacaacuccugccgauccugaauaagcagucuuguuccauucccaacaucgaaacagucaucgaguuucagcagaaaaauaaccggcuccuggaaauuacccgcgaguucagcgugaaugcuggcgugacgacaccugucucuaccuauaugcuuacaaacuccgagcugcucagccugaucaaugauaugcccauuaccaacgaccaaaagaaacuuauguccaacaauguucagaucgugagacagcagucuuacagcauuaugugcaucaucaaggaagaggugcuggccuaugucgugcaacucccucuguacgggguuauugauacccccuguuggaaacugcauacauccccucucugcacgaccaacacaaaggaaggaagcaauaucugucugacccggacagaccgcggcugguacugcgauaacgcggggucuguguccuuuuucccgcaggccgagaccuguaagguccagagcaauagaguguuuugcgacacgaugaacucucuuacacugcccagcgaaguuaaucucugcaacauugauaucuucaauccuaaauaugacuguaagauuaugaccuccaaaaccgaugugucuagcuccgucaucacaagccugggagcuaucgugucuugcuacggcaagaccaaauguacagccuccaacaagugccgggggauuaucaagacguuuagcaauggaugugacuaugucucuaacaaaggcguggacaccguuuccgugggcaauacacuuuacuaugucaacaagcaagaggggcagagccuguacgugaaaggagagcccauuaucaauuucuaugauccucucguuuuucccuccgacgaguucgaugcuucuauuagccaggugaacgaaaagaucaaccagucccuggccuuuauucgcaaaucugacgaacugcuccacaaugucaacgugggcaagagcaccacaaauaucaugaucaccacgauuaucauugugaucauuguuauccugcuucugcucaucgccgucgggcuguuccuguacugcaaggcuagauccaccccggugacacuuagcaaagaucaacucucuggaauuaacaauaucgcguucuccaacugaggacuaguacuggcugcaucucccuuuccucuguccuccauccuucucccaggauggugaagggggaccugguacccagugauccccaccccaggauccuaaaucaugacuuaccugcuaauaaaaacucauuggaaaagugagaagaucuaaaaaaaaaaaaaaaaaaaaaaaaaaaaaaaaaaaaaaaaaaaaaaaaaaaaaaaaaaaaaaaaugcaucccccccccccccccccccccccccccccccaaaggcucuuuucagagccaccagaauu

SEQ ID NO: 19193 - RNA, 2013 nt, Artificial Sequence
  mRNA product Design b-5 comprising derived and/or modified sequence from HRSV(Memphis-37)__AIY60640.1__F_DSCav1_mut8 (opt6)
gggagacuccugucgggcggaaguaggaggaguagaguuuaaaaacaguacucuuuuuccgguucgggacguaguugaagcaacgacaagccggauaaccgcucuugagacaggaagcuuaccauggaacuuccuauuuuaaaaacaaacgcaauuacaaccauauuagcagcaguaacacuaugcuuugcaucaucacaaaacaucaccgaagaauuuuaucaauccacaugcucagcaguaucaaaaggauaccuuggcgcacuccgaacaggcugguauacaucggucauaacuauagaacucuccaacauaaaagaaauaaaaugcaaugguacugacgcaaaaguaaaauuaauaaaacaagaacuagacaaauacaaaaacgcaguaaccgauuuacaacuacuuaugcaaucaacaccugcagcaggaagcggaucagcaauagcaaguggaauagcaguaugcaaaguacuucaccucgaaggagaaguaaauaaaauaaaaaacgccuuacuaucaacaaauaaagccgucguaucacuuuccgguugcggcguaucaguauuaaccuuuaaagucuuagacuuaaaaaacuacauagacaaacaauuauuaccaauacuaaacaaacaauccuguuccauacccaacauagaaaccguaauagaauuucaacaaaaaaacaacagacuauuagaaauaacacgcgaauuuucaguaaacgcaggcguaacaacaccaguaucaacauauauguuaaccaauucagaauuauuaucccuuauaaaugacaugccuauaacaaacgaccaaaaaaaauuaaugaguaacaacguucaaauaguaagacaacaaucauacagcauaaugugcauaauaaaagaagaaguacuagcauacguaguucaacuaccacucuauggcguuaucgacaccccaugcuggaaacuacauaccucaccacucuguaccacuaauacgaaagaaggaucuaacauaugccuaaccagaacagaucgagguugguauugcgacaaugcuggaucaguaucauucuucccacaagcagaaaccugcaaaguacaaagcaacagaguauuuugugacacuaugaacucacuaacgcuaccuucagaaguaaaccuaugcaacaucgacauauucaacccaaaauacgauugcaaaauaaugacaucaaaaacagacguuuccucaucaguaauaacaucauuaggagcaauaguauccugcuacgguaaaaccaaaugcacagcauccaauaaaugccgaggaaucauuaaaacauuuucaaauggcugcgacuauguaaguaauaaagguguagauacaguaucaguaggcaacacacuauauuacguaaacaaacaagaagggcaaucccuauaugucaaaggcgaaccaauuauaaacuucuacgacccccucguauucccaucagacgaauuugacgcaucaauaucccaaguaaacgaaaaaaucaaccaaucacucgcauucauacguaaauccgacgaauuacuacauaacguaaacguaggcaaaucaacaacaaauauaaugauaacaaccauaaucauaguaauaauaguuauacuccuacuacucauugcagucggccuauuucuauacuguaaagcacgcucuacaccaguaacacuaucuaaagaucaauuauccggaauaaacaacauugccuucuccaauuaaggacuaguacuggcugcaucucccuuuccucuguccuccauccuucucccaggauggugaagggggaccugguacccagugauccccaccccaggauccuaaaucaugacuuaccugcuaauaaaaacucauuggaaaagugagaagaucuaaaaaaaaaaaaaaaaaaaaaaaaaaaaaaaaaaaaaaaaaaaaaaaaaaaaaaaaaaaaaaaaugcaucccccccccccccccccccccccccccccccaaaggcucuuuucagagccaccagaauu

SEQ ID NO: 19194 - RNA, 2013 nt, Artificial Sequence
  mRNA product Design b-5 comprising derived and/or modified sequence from HRSV(Memphis-37)__AIY60640.1__F_DSCav1_mut8 (opt11)
gggagacuccugucgggcggaaguaggaggaguagaguuuaaaaacaguacucuuuuuccgguucgggacguaguugaagcaacgacaagccggauaaccgcucuugagacaggaagcuuaccauggaacuucccauccugaagaccaacgcuaucacaaccauccucgccgcagucacccuuugcuucgccucaucccaaaacaucaccgaagaauuuuaccagucaaccugcucggccgucuccaagggcuaccucggcgcccuccgcacuggcugguacacauccgucaucaccaucgaacucuccaacauaaaagaaauaaaaugcaacggaaccgacgccaaagucaaacucaucaaacaagaacuagauaaauauaaaaacgccgucaccgaccugcaacuccucaugcaauccaccccagccgccggcucuggcagcgccaucgcaagcggaaucgccgucugcaaaguccuccaccuagaaggcgaagucaacaaaauuaaaaacgcccuccucuccaccaacaaagcaguugucucccucucuggcugcggagucucuguacucaccuucaaaguacuagaccucaagaauuacauagacaaacaacuccugcccauccuuaacaaacaaaguuguaguauccccaacaucgaaacaguaaucgaauuucagcagaaaaacaaccgccuccucgaaaucacacgagaguucucggucaacgccggcgucaccacccccguaucaaccuacaugcuaacaaacuccgaacuacuuucccucaucaaugacaugcccauaaccaacgaccaaaagaaacuaauguccaauaacguccagauaguccgucaacaguccuacucaaucaugugcauaauuaaagaagaaguacucgccuacgucguccaacuaccccucuauggagucaucgacacccccugcuggaaacuccacacaucaccccuaugcacaaccaacaccaaagaaggcuccaacaucugccucacaagaaccgaccgcggcugguacugcgacaacgcuggcuccgucucguucuucccacaagccgaaaccugcaaaguccaaucaaaccgggucuucugcgacaccaugaacucccucacucucccaagcgaagucaaccuaugcaacaucgacaucuucaacccaaaauacgacuguaaaaucaugacuucgaaaacagacgucuccucaucaguaaucacauccuuaggcgccaucguguccugcuacgguaagaccaaaugcacagccuccaacaaaugccggggcaucaucaaaaccuucagcaacgguugugauuacgucuccaacaaaggaguagacaccgucuccguaggaaacacccucuacuacgucaacaagcaagaaggccaaucccucuacgucaaaggggaacccaucaucaacuucuacgacccacucgucuuccccuccgacgaguucgacgcaagcaucucccaagucaacgaaaagaucaaccaaucacuagccuucauccgcaaauccgacgaacuccuccacaacguuaacguaggcaaauccaccaccaacaucaugaucacaaccaucaucauagucauaauagucauccuacuacuccucaucgccguaggucuauuccuauacuguaaagcucgaucaacccccgucacacucuccaaagaucaacucucaggaaucaacaacaucgccuucuccaacuaaggacuaguacuggcugcaucucccuuuccucuguccuccauccuucucccaggauggugaagggggaccugguacccagugauccccaccccaggauccuaaaucaugacuuaccugcuaauaaaaacucauuggaaaagugagaagaucuaaaaaaaaaaaaaaaaaaaaaaaaaaaaaaaaaaaaaaaaaaaaaaaaaaaaaaaaaaaaaaaaugcaucccccccccccccccccccccccccccccccaaaggcucuuuucagagccaccagaauu

SEQ ID NO: 19195 - RNA, 1919 nt, Artificial Sequence
  mRNA product Design c-1 comprising derived and/or modified sequence from HRSV(Memphis-37)__AIY60640.1__F_DSCav1_mut8 (opt1)
gggagaguccgcucagccagguugcagaagcggcuuagcguguguccuaaucuucucucugcguguagguaggccugugccgcaaacaagcuuaccauggagcugcccauccucaagaccaacgccaucaccacgauccuggccgcggugacccugugcuucgccagcucccagaacaucaccgaggaguucuaccagagcacgugcuccgccgucagcaagggcuaccucggcgcccugcgcaccgggugguacaccagcgugaucaccaucgagcuguccaacaucaaggagaucaagugcaacggcaccgacgccaaggugaagcucaucaagcaggagcuggacaaguacaagaacgcggucacggaccugcagcuccugaugcagagcaccccggccgccggcuccgggagcgcgaucgccuccggcaucgccgucugcaaggugcugcaccucgagggcgaggugaacaagaucaagaacgcccugcuguccaccaacaaggccgucgugagccucuccggcugcggggugagcguccugaccuucaaggugcuggaccucaagaacuacaucgacaagcagcugcugcccauccugaacaagcagagcugcuccauccccaacaucgagaccgucaucgaguuccagcagaagaacaaccgccuccuggagaucacgcgggaguucagcgugaacgcgggcgugaccacccccgucuccaccuacaugcugacgaacagcgagcuccugucccugaucaacgacaugccgaucaccaacgaccagaagaagcucaugagcaacaacgugcagaucgugcgccagcaguccuacagcaucaugugcaucaucaaggaggagguccuggccuacguggugcagcugccccucuacggggucaucgacacccccugcuggaagcugcacaccagcccccugugcacgaccaacaccaaggagggcuccaacaucugccucacccggacggaccgcgggugguacugcgacaacgccggcagcguguccuucuucccgcaggccgagaccugcaagguccagagcaaccggguguucugcgacaccaugaacucccugacccugcccagcgaggugaaccucugcaacaucgacaucuucaaccccaaguacgacugcaagaucaugacguccaagaccgacgucagcuccagcgugaucaccucccugggcgccaucgugagcugcuacgggaagaccaagugcacggcgagcaacaagugccgcggcaucaucaagaccuucuccaacgggugcgacuacgucagcaacaagggcguggacaccguguccgucggcaacacccuguacuacgugaacaagcaggagggccagagccucuacgugaagggggagcccaucaucaacuucuacgacccgcuggucuuccccuccgacgaguucgacgccagcaucucccaggugaacgagaagaucaaccagagccuggccuucauccggaaguccgacgagcuccugcacaacgugaacgucggcaagagcaccacgaacaucaugaucaccaccaucaucaucgugaucaucgugauccugcugcuccugaucgccgucgggcuguuccucuacugcaaggcccgcuccacccccgugacgcugagcaaggaccagcuguccgggaucaacaacaucgcguucagcaacugaggacuaguguccaccugucccuccugggcugcuggauugucucguuuuccugccaaauaaacaggaucagcgcuuuacagaucuaaaaaaaaaaaaaaaaaaaaaaaaaaaaaaaaaaaaaaaaaaaaaaaaaaaaaaaaaaaaaaaaugcaucccccccccccccccccccccccccccccccaaaggcucuuuucagagccaccagaauu

SEQ ID NO: 19196 - RNA, 1919 nt, Artificial Sequence
  mRNA product Design c-1 comprising derived and/or modified sequence from HRSV(Memphis-37)__AIY60640.1__F_DSCav1_mut8 (opt1)
gggagaguccgcucagccagguugcagaagcggcuuagcguguguccuaaucuucucucugcguguagguaggccugugccgcaaacaagcuuaccauggagcugcccauccucaagaccaacgccaucaccacgauccuggccgcggugacccugugcuucgccagcucccagaacaucaccgaggaguucuaccagagcacgugcuccgccgucagcaagggcuaccucggggcccugcgcaccggcugguacaccuccgugaucaccaucgagcugagcaacaucaaggagaucaagugcaacgggaccgacgccaaggugaagcucaucaagcaggagcuggacaaguacaagaacgcggucacggaccugcagcuccugaugcaguccaccccggccgccggcagcggguccgccaucgcgagcggcaucgccgugugcaaggugcugcaccucgagggcgaggucaacaagaucaagaacgcccugcuguccaccaacaaggccguggugagccucuccgggugcggcgucagcgugcugaccuucaaggugcuggaccucaagaacuacaucgacaagcagcugcugcccauccucaacaagcaguccugcagcauccccaacaucgagacggucaucgaguuccagcagaagaacaaccggcugcuggagaucacccgcgaguucuccgugaacgccggggugaccacccccgucagcacguacaugcucaccaacuccgagcugcugagccucaucaacgacaugccgaucaccaacgaccagaagaagcugaugagcaacaacgugcagaucgugcggcagcaguccuacagcaucaugugcaucaucaaggaggagguccuggcguacguggugcagcucccccuguacggcgucaucgacacccccugcuggaagcugcacacgagcccccucugcaccaccaacaccaaggagggguccaacaucugccugacgcgcaccgaccggggcugguacugcgacaacgccggcuccgugagcuucuucccgcaggccgagaccugcaaggugcaguccaaccgcgucuucugcgacaccaugaacagccugacgcuccccuccgaggugaaccugugcaacaucgacaucuucaaccccaaguacgacugcaagaucaugaccagcaagaccgacgucuccagcuccgugaucaccagccugggggccaucguguccugcuacggcaagacgaagugcaccgccagcaacaagugccgggggaucaucaagaccuucuccaacggcugcgacuacgucagcaacaagggcguggacaccguguccgucgggaacacgcucuacuacgugaacaagcaggagggccagagccuguacgugaagggggagcccaucaucaacuucuacgacccgcuggucuuccccagcgacgaguucgacgcguccaucagccaggugaacgagaagaucaaccagucccucgccuucauccgcaagagcgacgagcugcugcacaacgugaacgucggcaaguccaccaccaacaucaugaucaccaccaucaucaucgugaucaucgugauccuccugcugcucaucgccgucgggcuguuccuguacugcaaggcccggagcacgcccgugacccuguccaaggaccagcucagcggcaucaacaacaucgccuucuccaacugaggacuaguguccaccugucccuccugggcugcuggauugucucguuuuccugccaaauaaacaggaucagcgcuuuacagaucuaaaaaaaaaaaaaaaaaaaaaaaaaaaaaaaaaaaaaaaaaaaaaaaaaaaaaaaaaaaaaaaaugcaucccccccccccccccccccccccccccccccaaaggcucuuuucagagccaccagaauu

SEQ ID NO: 19197 - RNA, 1919 nt, Artificial Sequence
  mRNA product Design c-1 comprising derived and/or modified sequence from HRSV(Memphis-37)__AIY60640.1__F_DSCav1_mut8 (opt2)
gggagaguccgcucagccagguugcagaagcggcuuagcguguguccuaaucuucucucugcguguagguaggccugugccgcaaacaagcuuaccauggagcuccccauccucaagaccaacgccaucaccaccauccucgccgccgucacccucugcuucgccuccucccagaacaucaccgaggaguucuaccaguccaccugcuccgccgucuccaagggcuaccucggcgcccuccgcaccggcugguacaccuccgucaucaccaucgagcucuccaacaucaaggagaucaagugcaacggcaccgacgccaaggucaagcucaucaagcaggagcucgacaaguacaagaacgccgucaccgaccuccagcuccucaugcaguccacccccgccgccggcuccggcuccgccaucgccuccggcaucgccgucugcaagguccuccaccucgagggcgaggucaacaagaucaagaacgcccuccucuccaccaacaaggccgucgucucccucuccggcugcggcgucuccguccucaccuucaagguccucgaccucaagaacuacaucgacaagcagcuccuccccauccucaacaagcaguccugcuccauccccaacaucgagaccgucaucgaguuccagcagaagaacaaccgccuccucgagaucacccgcgaguucuccgucaacgccggcgucaccacccccgucuccaccuacaugcucaccaacuccgagcuccucucccucaucaacgacaugcccaucaccaacgaccagaagaagcucauguccaacaacguccagaucguccgccagcaguccuacuccaucaugugcaucaucaaggaggagguccucgccuacgucguccagcucccccucuacggcgucaucgacacccccugcuggaagcuccacaccuccccccucugcaccaccaacaccaaggagggcuccaacaucugccucacccgcaccgaccgcggcugguacugcgacaacgccggcuccgucuccuucuucccccaggccgagaccugcaagguccaguccaaccgcgucuucugcgacaccaugaacucccucacccuccccuccgaggucaaccucugcaacaucgacaucuucaaccccaaguacgacugcaagaucaugaccuccaagaccgacgucuccuccuccgucaucaccucccucggcgccaucgucuccugcuacggcaagaccaagugcaccgccuccaacaagugccgcggcaucaucaagaccuucuccaacggcugcgacuacgucuccaacaagggcgucgacaccgucuccgucggcaacacccucuacuacgucaacaagcaggagggccagucccucuacgucaagggcgagcccaucaucaacuucuacgacccccucgucuuccccuccgacgaguucgacgccuccaucucccaggucaacgagaagaucaaccagucccucgccuucauccgcaaguccgacgagcuccuccacaacgucaacgucggcaaguccaccaccaacaucaugaucaccaccaucaucaucgucaucaucgucauccuccuccuccucaucgccgucggccucuuccucuacugcaaggcccgcuccacccccgucacccucuccaaggaccagcucuccggcaucaacaacaucgccuucuccaacugaggacuaguguccaccugucccuccugggcugcuggauugucucguuuuccugccaaauaaacaggaucagcgcuuuacagaucuaaaaaaaaaaaaaaaaaaaaaaaaaaaaaaaaaaaaaaaaaaaaaaaaaaaaaaaaaaaaaaaaugcaucccccccccccccccccccccccccccccccaaaggcucuuuucagagccaccagaauu

SEQ ID NO: 19198 - RNA, 1919 nt, Artificial Sequence
  mRNA product Design c-1 comprising derived and/or modified sequence from HRSV(Memphis-37)__AIY60640.1__F_DSCav1_mut8 (opt3)
gggagaguccgcucagccagguugcagaagcggcuuagcguguguccuaaucuucucucugcguguagguaggccugugccgcaaacaagcuuaccauggagcugcccauccucaagaccaacgccauuacaacuauacuugcugcagugacgcugugcuucgccagcucccagaauaucaccgaagaguuuuaccaaucuacauguucagcggucaguaaaggcuauuugggggcuuuaagaacuggaugguacaccagcguuauuacaaucgaacuguccaacauuaaggagaucaaaugcaaugguaccgacgccaaggugaaacuaauaaagcaggaacucgauaaguauaaaaacgcaguaacugaccugcagcuucugaugcagucuacuccugccgcuggcucggggucagcaaucgccagcggaauugcuguguguaaggucuugcaccucgagggcgaggugaauaaaaucaagaacgcccugcugaguaccaauaaagcgguugugucccucucugguugcggggucagcguguuaacguucaagguacuggaucuuaagaacuacauugacaaacaauugcugccaauccuaaauaagcaguccuguucaauaccgaacauugaaacuguuaucgaguuucagcagaaaaauaacaggcuccuggaaauuacccgggaguucagugugaaugcaggagucacaacucccgugagcaccuauaugcuuacaaacucugagcuguugucccucaucaaugauaugccuaucaccaacgaccaaaagaaacugaugucaaacaaugugcagauuguccgccagcagagcuacaguauaaugugcaucauuaaggaagagguuuuagccuaugugguacaacugccacucuacggcgugaucgauacgcccuguuggaaacuucauacuucuccucugugcacaaccaacacuaaggaaggcuccaauauauguuugacacgaaccgaccgugggugguacugcgauaacgcuggaagcgucucguuuuucccacaggccgagacguguaaggugcagucuaauagaguuuucugcgacaccaugaacucccuaacacugcccucagaagugaaucucugcaacauugauaucuucaauccuaaauaugacuguaagaucaugacaaguaaaaccgaugucagcuccucugugauuacaagccugggugcaaucguaucaugcuacggcaagacuaaauguaccgcuaguaacaagugcagggggauuauaaagacauuuuccaauggaugugacuauguuagcaacaaaggcguggacaccgucucuguggguaauacucuuuacuaugucaacaagcaagaggggcagucacuguacgugaaaggagagccaaucauuaauuucuaugauccguugguuuuucccagugacgaauuugaugccagcaucucccaggugaacgagaagaucaaccagucucucgcguuuauucggaaaucggacgaacuguuacacaauguaaacgucggcaagagcacgacaaauauaaugaucaccacuauuaucauugugaucauaguuauccugcuacuccugauugccgugggccuuuucuuguacugcaaggcacgcuccaccccugucacacugucaaaagaucaacucagugggaucaacaauauugcuuucucuaacugaggacuaguguccaccugucccuccugggcugcuggauugucucguuuuccugccaaauaaacaggaucagcgcuuuacagaucuaaaaaaaaaaaaaaaaaaaaaaaaaaaaaaaaaaaaaaaaaaaaaaaaaaaaaaaaaaaaaaaaugcaucccccccccccccccccccccccccccccccaaaggcucuuuucagagccaccagaauu

SEQ ID NO: 19199 - RNA, 1919 nt, Artificial Sequence
  mRNA product Design c-1 comprising derived and/or modified sequence from HRSV(Memphis-37)__AIY60640.1__F_DSCav1_mut8 (opt4)
gggagaguccgcucagccagguugcagaagcggcuuagcguguguccuaaucuucucucugcguguagguaggccugugccgcaaacaagcuuaccauggagcugcccauccugaagaccaacgccaucaccaccauccuggccgccgugacccugugcuucgccagcagccagaacaucaccgaggaguucuaccagagcaccugcagcgccgugagcaagggcuaccugggcgcccugagaaccggcugguacaccagcgugaucaccaucgagcugagcaacaucaaggagaucaagugcaacggcaccgacgccaaggugaagcugaucaagcaggagcuggacaaguacaagaacgccgugaccgaccugcagcugcugaugcagagcacccccgccgccggcagcggcagcgccaucgccagcggcaucgccgugugcaaggugcugcaccuggagggcgaggugaacaagaucaagaacgcccugcugagcaccaacaaggccguggugagccugagcggcugcggcgugagcgugcugaccuucaaggugcuggaccugaagaacuacaucgacaagcagcugcugcccauccugaacaagcagagcugcagcauccccaacaucgagaccgugaucgaguuccagcagaagaacaacagacugcuggagaucaccagagaguucagcgugaacgccggcgugaccacccccgugagcaccuacaugcugaccaacagcgagcugcugagccugaucaacgacaugcccaucaccaacgaccagaagaagcugaugagcaacaacgugcagaucgugagacagcagagcuacagcaucaugugcaucaucaaggaggaggugcuggccuacguggugcagcugccccuguacggcgugaucgacacccccugcuggaagcugcacaccagcccccugugcaccaccaacaccaaggagggcagcaacaucugccugaccagaaccgacagaggcugguacugcgacaacgccggcagcgugagcuucuucccccaggccgagaccugcaaggugcagagcaacagaguguucugcgacaccaugaacagccugacccugcccagcgaggugaaccugugcaacaucgacaucuucaaccccaaguacgacugcaagaucaugaccagcaagaccgacgugagcagcagcgugaucaccagccugggcgccaucgugagcugcuacggcaagaccaagugcaccgccagcaacaagugcagaggcaucaucaagaccuucagcaacggcugcgacuacgugagcaacaagggcguggacaccgugagcgugggcaacacccuguacuacgugaacaagcaggagggccagagccuguacgugaagggcgagcccaucaucaacuucuacgacccccugguguuccccagcgacgaguucgacgccagcaucagccaggugaacgagaagaucaaccagagccuggccuucaucagaaagagcgacgagcugcugcacaacgugaacgugggcaagagcaccaccaacaucaugaucaccaccaucaucaucgugaucaucgugauccugcugcugcugaucgccgugggccuguuccuguacugcaaggccagaagcacccccgugacccugagcaaggaccagcugagcggcaucaacaacaucgccuucagcaacugaggacuaguguccaccugucccuccugggcugcuggauugucucguuuuccugccaaauaaacaggaucagcgcuuuacagaucuaaaaaaaaaaaaaaaaaaaaaaaaaaaaaaaaaaaaaaaaaaaaaaaaaaaaaaaaaaaaaaaaugcaucccccccccccccccccccccccccccccccaaaggcucuuuucagagccaccagaauu

SEQ ID NO: 19200 - RNA, 1919 nt, Artificial Sequence
  mRNA product Design c-1 comprising derived and/or modified sequence from HRSV(Memphis-37)__AIY60640.1__F_DSCav1_mut8 (opt5)
gggagaguccgcucagccagguugcagaagcggcuuagcguguguccuaaucuucucucugcguguagguaggccugugccgcaaacaagcuuaccauggagcugcccauccucaagaccaacgccauuacaacgauccuggcugccgugacccuuugcuucgcgagcucccagaauauuacagaagaguuuuaccaaucuaccuguagcgcugucuccaaaggcuaucugggggcccucagaacaggaugguacaccucuguuaucacaauugaacugagcaacaucaaggagaucaaaugcaauggcaccgacgccaaggugaaacuuauuaagcaggaacuggauaaguauaaaaacgcugugacggaccuccagcugcugaugcaguccaccccugccgcugggucuggaagcgccaucgcguccggcauugccgucuguaaggugcuccaccuggagggggagguuaauaaaaucaagaacgcccuucugagcacaaauaaagcuguggucucucucuccggaugcggcgugagcguucugaccuucaaggugcuugaucugaagaacuacauugacaaacaacuccugccgauccugaauaagcagucuuguuccauucccaacaucgaaacagucaucgaguuucagcagaaaaauaaccggcuccuggaaauuacccgcgaguucagcgugaaugcuggcgugacgacaccugucucuaccuauaugcuuacaaacuccgagcugcucagccugaucaaugauaugcccauuaccaacgaccaaaagaaacuuauguccaacaauguucagaucgugagacagcagucuuacagcauuaugugcaucaucaaggaagaggugcuggccuaugucgugcaacucccucuguacgggguuauugauacccccuguuggaaacugcauacauccccucucugcacgaccaacacaaaggaaggaagcaauaucugucugacccggacagaccgcggcugguacugcgauaacgcggggucuguguccuuuuucccgcaggccgagaccuguaagguccagagcaauagaguguuuugcgacacgaugaacucucuuacacugcccagcgaaguuaaucucugcaacauugauaucuucaauccuaaauaugacuguaagauuaugaccuccaaaaccgaugugucuagcuccgucaucacaagccugggagcuaucgugucuugcuacggcaagaccaaauguacagccuccaacaagugccgggggauuaucaagacguuuagcaauggaugugacuaugucucuaacaaaggcguggacaccguuuccgugggcaauacacuuuacuaugucaacaagcaagaggggcagagccuguacgugaaaggagagcccauuaucaauuucuaugauccucucguuuuucccuccgacgaguucgaugcuucuauuagccaggugaacgaaaagaucaaccagucccuggccuuuauucgcaaaucugacgaacugcuccacaaugucaacgugggcaagagcaccacaaauaucaugaucaccacgauuaucauugugaucauuguuauccugcuucugcucaucgccgucgggcuguuccuguacugcaaggcuagauccaccccggugacacuuagcaaagaucaacucucuggaauuaacaauaucgcguucuccaacugaggacuaguguccaccugucccuccugggcugcuggauugucucguuuuccugccaaauaaacaggaucagcgcuuuacagaucuaaaaaaaaaaaaaaaaaaaaaaaaaaaaaaaaaaaaaaaaaaaaaaaaaaaaaaaaaaaaaaaaugcaucccccccccccccccccccccccccccccccaaaggcucuuuucagagccaccagaauu

SEQ ID NO: 19201 - RNA, 1919 nt, Artificial Sequence
  mRNA product Design c-1 comprising derived and/or modified sequence from HRSV(Memphis-37)__AIY60640.1__F_DSCav1_mut8 (opt6)
gggagaguccgcucagccagguugcagaagcggcuuagcguguguccuaaucuucucucugcguguagguaggccugugccgcaaacaagcuuaccauggaacuuccuauuuuaaaaacaaacgcaauuacaaccauauuagcagcaguaacacuaugcuuugcaucaucacaaaacaucaccgaagaauuuuaucaauccacaugcucagcaguaucaaaaggauaccuuggcgcacuccgaacaggcugguauacaucggucauaacuauagaacucuccaacauaaaagaaauaaaaugcaaugguacugacgcaaaaguaaaauuaauaaaacaagaacuagacaaauacaaaaacgcaguaaccgauuuacaacuacuuaugcaaucaacaccugcagcaggaagcggaucagcaauagcaaguggaauagcaguaugcaaaguacuucaccucgaaggagaaguaaauaaaauaaaaaacgccuuacuaucaacaaauaaagccgucguaucacuuuccgguugcggcguaucaguauuaaccuuuaaagucuuagacuuaaaaaacuacauagacaaacaauuauuaccaauacuaaacaaacaauccuguuccauacccaacauagaaaccguaauagaauuucaacaaaaaaacaacagacuauuagaaauaacacgcgaauuuucaguaaacgcaggcguaacaacaccaguaucaacauauauguuaaccaauucagaauuauuaucccuuauaaaugacaugccuauaacaaacgaccaaaaaaaauuaaugaguaacaacguucaaauaguaagacaacaaucauacagcauaaugugcauaauaaaagaagaaguacuagcauacguaguucaacuaccacucuauggcguuaucgacaccccaugcuggaaacuacauaccucaccacucuguaccacuaauacgaaagaaggaucuaacauaugccuaaccagaacagaucgagguugguauugcgacaaugcuggaucaguaucauucuucccacaagcagaaaccugcaaaguacaaagcaacagaguauuuugugacacuaugaacucacuaacgcuaccuucagaaguaaaccuaugcaacaucgacauauucaacccaaaauacgauugcaaaauaaugacaucaaaaacagacguuuccucaucaguaauaacaucauuaggagcaauaguauccugcuacgguaaaaccaaaugcacagcauccaauaaaugccgaggaaucauuaaaacauuuucaaauggcugcgacuauguaaguaauaaagguguagauacaguaucaguaggcaacacacuauauuacguaaacaaacaagaagggcaaucccuauaugucaaaggcgaaccaauuauaaacuucuacgacccccucguauucccaucagacgaauuugacgcaucaauaucccaaguaaacgaaaaaaucaaccaaucacucgcauucauacguaaauccgacgaauuacuacauaacguaaacguaggcaaaucaacaacaaauauaaugauaacaaccauaaucauaguaauaauaguuauacuccuacuacucauugcagucggccuauuucuauacuguaaagcacgcucuacaccaguaacacuaucuaaagaucaauuauccggaauaaacaacauugccuucuccaauuaaggacuaguguccaccugucccuccugggcugcuggauugucucguuuuccugccaaauaaacaggaucagcgcuuuacagaucuaaaaaaaaaaaaaaaaaaaaaaaaaaaaaaaaaaaaaaaaaaaaaaaaaaaaaaaaaaaaaaaaugcaucccccccccccccccccccccccccccccccaaaggcucuuuucagagccaccagaauu

SEQ ID NO: 19202 - RNA, 1919 nt, Artificial Sequence
  mRNA product Design c-1 comprising derived and/or modified sequence from HRSV(Memphis-37)__AIY60640.1__F_DSCav1_mut8 (opt11)
gggagaguccgcucagccagguugcagaagcggcuuagcguguguccuaaucuucucucugcguguagguaggccugugccgcaaacaagcuuaccauggaacuucccauccugaagaccaacgcuaucacaaccauccucgccgcagucacccuuugcuucgccucaucccaaaacaucaccgaagaauuuuaccagucaaccugcucggccgucuccaagggcuaccucggcgcccuccgcacuggcugguacacauccgucaucaccaucgaacucuccaacauaaaagaaauaaaaugcaacggaaccgacgccaaagucaaacucaucaaacaagaacuagauaaauauaaaaacgccgucaccgaccugcaacuccucaugcaauccaccccagccgccggcucuggcagcgccaucgcaagcggaaucgccgucugcaaaguccuccaccuagaaggcgaagucaacaaaauuaaaaacgcccuccucuccaccaacaaagcaguugucucccucucuggcugcggagucucuguacucaccuucaaaguacuagaccucaagaauuacauagacaaacaacuccugcccauccuuaacaaacaaaguuguaguauccccaacaucgaaacaguaaucgaauuucagcagaaaaacaaccgccuccucgaaaucacacgagaguucucggucaacgccggcgucaccacccccguaucaaccuacaugcuaacaaacuccgaacuacuuucccucaucaaugacaugcccauaaccaacgaccaaaagaaacuaauguccaauaacguccagauaguccgucaacaguccuacucaaucaugugcauaauuaaagaagaaguacucgccuacgucguccaacuaccccucuauggagucaucgacacccccugcuggaaacuccacacaucaccccuaugcacaaccaacaccaaagaaggcuccaacaucugccucacaagaaccgaccgcggcugguacugcgacaacgcuggcuccgucucguucuucccacaagccgaaaccugcaaaguccaaucaaaccgggucuucugcgacaccaugaacucccucacucucccaagcgaagucaaccuaugcaacaucgacaucuucaacccaaaauacgacuguaaaaucaugacuucgaaaacagacgucuccucaucaguaaucacauccuuaggcgccaucguguccugcuacgguaagaccaaaugcacagccuccaacaaaugccggggcaucaucaaaaccuucagcaacgguugugauuacgucuccaacaaaggaguagacaccgucuccguaggaaacacccucuacuacgucaacaagcaagaaggccaaucccucuacgucaaaggggaacccaucaucaacuucuacgacccacucgucuuccccuccgacgaguucgacgcaagcaucucccaagucaacgaaaagaucaaccaaucacuagccuucauccgcaaauccgacgaacuccuccacaacguuaacguaggcaaauccaccaccaacaucaugaucacaaccaucaucauagucauaauagucauccuacuacuccucaucgccguaggucuauuccuauacuguaaagcucgaucaacccccgucacacucuccaaagaucaacucucaggaaucaacaacaucgccuucuccaacuaaggacuaguguccaccugucccuccugggcugcuggauugucucguuuuccugccaaauaaacaggaucagcgcuuuacagaucuaaaaaaaaaaaaaaaaaaaaaaaaaaaaaaaaaaaaaaaaaaaaaaaaaaaaaaaaaaaaaaaaugcaucccccccccccccccccccccccccccccccaaaggcucuuuucagagccaccagaauu

SEQ ID NO: 19203 - RNA, 2009 nt, Artificial Sequence
  mRNA product Design c-2 comprising derived and/or modified sequence from HRSV(Memphis-37)__AIY60640.1__F_DSCav1_mut8 (opt1)
gggagacuccugucgggcggaaguaggaggaguagaguuuaaaaacaguacucuuuuuccgguucgggacguaguugaagcaacgacaagccggauaaccgcucuugagacaggaagcuuaccauggagcugcccauccucaagaccaacgccaucaccacgauccuggccgcggugacccugugcuucgccagcucccagaacaucaccgaggaguucuaccagagcacgugcuccgccgucagcaagggcuaccucggcgcccugcgcaccgggugguacaccagcgugaucaccaucgagcuguccaacaucaaggagaucaagugcaacggcaccgacgccaaggugaagcucaucaagcaggagcuggacaaguacaagaacgcggucacggaccugcagcuccugaugcagagcaccccggccgccggcuccgggagcgcgaucgccuccggcaucgccgucugcaaggugcugcaccucgagggcgaggugaacaagaucaagaacgcccugcuguccaccaacaaggccgucgugagccucuccggcugcggggugagcguccugaccuucaaggugcuggaccucaagaacuacaucgacaagcagcugcugcccauccugaacaagcagagcugcuccauccccaacaucgagaccgucaucgaguuccagcagaagaacaaccgccuccuggagaucacgcgggaguucagcgugaacgcgggcgugaccacccccgucuccaccuacaugcugacgaacagcgagcuccugucccugaucaacgacaugccgaucaccaacgaccagaagaagcucaugagcaacaacgugcagaucgugcgccagcaguccuacagcaucaugugcaucaucaaggaggagguccuggccuacguggugcagcugccccucuacggggucaucgacacccccugcuggaagcugcacaccagcccccugugcacgaccaacaccaaggagggcuccaacaucugccucacccggacggaccgcgggugguacugcgacaacgccggcagcguguccuucuucccgcaggccgagaccugcaagguccagagcaaccggguguucugcgacaccaugaacucccugacccugcccagcgaggugaaccucugcaacaucgacaucuucaaccccaaguacgacugcaagaucaugacguccaagaccgacgucagcuccagcgugaucaccucccugggcgccaucgugagcugcuacgggaagaccaagugcacggcgagcaacaagugccgcggcaucaucaagaccuucuccaacgggugcgacuacgucagcaacaagggcguggacaccguguccgucggcaacacccuguacuacgugaacaagcaggagggccagagccucuacgugaagggggagcccaucaucaacuucuacgacccgcuggucuuccccuccgacgaguucgacgccagcaucucccaggugaacgagaagaucaaccagagccuggccuucauccggaaguccgacgagcuccugcacaacgugaacgucggcaagagcaccacgaacaucaugaucaccaccaucaucaucgugaucaucgugauccugcugcuccugaucgccgucgggcuguuccucuacugcaaggcccgcuccacccccgugacgcugagcaaggaccagcuguccgggaucaacaacaucgcguucagcaacugaggacuaguggaagcauuuuccuggcugauuaaaagaaauuacucagcuauggucaucuguuccuguuagaaggcuaugcagcauauuauauacuaugcgcauguuaugaaaugcauaauaaaaaauuuuaaaaaaucuaaaagaucuaaaaaaaaaaaaaaaaaaaaaaaaaaaaaaaaaaaaaaaaaaaaaaaaaaaaaaaaaaaaaaaaugcaucccccccccccccccccccccccccccccccaaaggcucuuuucagagccaccagaauu

SEQ ID NO: 19204 - RNA, 2009 nt, Artificial Sequence
  mRNA product Design c-2 comprising derived and/or modified sequence from HRSV(Memphis-37)__AIY60640.1__F_DSCav1_mut8 (opt1)
gggagacuccugucgggcggaaguaggaggaguagaguuuaaaaacaguacucuuuuuccgguucgggacguaguugaagcaacgacaagccggauaaccgcucuugagacaggaagcuuaccauggagcugcccauccucaagaccaacgccaucaccacgauccuggccgcggugacccugugcuucgccagcucccagaacaucaccgaggaguucuaccagagcacgugcuccgccgucagcaagggcuaccucggggcccugcgcaccggcugguacaccuccgugaucaccaucgagcugagcaacaucaaggagaucaagugcaacgggaccgacgccaaggugaagcucaucaagcaggagcuggacaaguacaagaacgcggucacggaccugcagcuccugaugcaguccaccccggccgccggcagcggguccgccaucgcgagcggcaucgccgugugcaaggugcugcaccucgagggcgaggucaacaagaucaagaacgcccugcuguccaccaacaaggccguggugagccucuccgggugcggcgucagcgugcugaccuucaaggugcuggaccucaagaacuacaucgacaagcagcugcugcccauccucaacaagcaguccugcagcauccccaacaucgagacggucaucgaguuccagcagaagaacaaccggcugcuggagaucacccgcgaguucuccgugaacgccggggugaccacccccgucagcacguacaugcucaccaacuccgagcugcugagccucaucaacgacaugccgaucaccaacgaccagaagaagcugaugagcaacaacgugcagaucgugcggcagcaguccuacagcaucaugugcaucaucaaggaggagguccuggcguacguggugcagcucccccuguacggcgucaucgacacccccugcuggaagcugcacacgagcccccucugcaccaccaacaccaaggagggguccaacaucugccugacgcgcaccgaccggggcugguacugcgacaacgccggcuccgugagcuucuucccgcaggccgagaccugcaaggugcaguccaaccgcgucuucugcgacaccaugaacagccugacgcuccccuccgaggugaaccugugcaacaucgacaucuucaaccccaaguacgacugcaagaucaugaccagcaagaccgacgucuccagcuccgugaucaccagccugggggccaucguguccugcuacggcaagacgaagugcaccgccagcaacaagugccgggggaucaucaagaccuucuccaacggcugcgacuacgucagcaacaagggcguggacaccguguccgucgggaacacgcucuacuacgugaacaagcaggagggccagagccuguacgugaagggggagcccaucaucaacuucuacgacccgcuggucuuccccagcgacgaguucgacgcguccaucagccaggugaacgagaagaucaaccagucccucgccuucauccgcaagagcgacgagcugcugcacaacgugaacgucggcaaguccaccaccaacaucaugaucaccaccaucaucaucgugaucaucgugauccuccugcugcucaucgccgucgggcuguuccuguacugcaaggcccggagcacgcccgugacccuguccaaggaccagcucagcggcaucaacaacaucgccuucuccaacugaggacuaguggaagcauuuuccuggcugauuaaaagaaauuacucagcuauggucaucuguuccuguuagaaggcuaugcagcauauuauauacuaugcgcauguuaugaaaugcauaauaaaaaauuuuaaaaaaucuaaaagaucuaaaaaaaaaaaaaaaaaaaaaaaaaaaaaaaaaaaaaaaaaaaaaaaaaaaaaaaaaaaaaaaaugcaucccccccccccccccccccccccccccccccaaaggcucuuuucagagccaccagaauu

SEQ ID NO: 19205 - RNA, 2009 nt, Artificial Sequence
  mRNA product Design c-2 comprising derived and/or modified sequence from HRSV(Memphis-37)__AIY60640.1__F_DSCav1_mut8 (opt2)
gggagacuccugucgggcggaaguaggaggaguagaguuuaaaaacaguacucuuuuuccgguucgggacguaguugaagcaacgacaagccggauaaccgcucuugagacaggaagcuuaccauggagcuccccauccucaagaccaacgccaucaccaccauccucgccgccgucacccucugcuucgccuccucccagaacaucaccgaggaguucuaccaguccaccugcuccgccgucuccaagggcuaccucggcgcccuccgcaccggcugguacaccuccgucaucaccaucgagcucuccaacaucaaggagaucaagugcaacggcaccgacgccaaggucaagcucaucaagcaggagcucgacaaguacaagaacgccgucaccgaccuccagcuccucaugcaguccacccccgccgccggcuccggcuccgccaucgccuccggcaucgccgucugcaagguccuccaccucgagggcgaggucaacaagaucaagaacgcccuccucuccaccaacaaggccgucgucucccucuccggcugcggcgucuccguccucaccuucaagguccucgaccucaagaacuacaucgacaagcagcuccuccccauccucaacaagcaguccugcuccauccccaacaucgagaccgucaucgaguuccagcagaagaacaaccgccuccucgagaucacccgcgaguucuccgucaacgccggcgucaccacccccgucuccaccuacaugcucaccaacuccgagcuccucucccucaucaacgacaugcccaucaccaacgaccagaagaagcucauguccaacaacguccagaucguccgccagcaguccuacuccaucaugugcaucaucaaggaggagguccucgccuacgucguccagcucccccucuacggcgucaucgacacccccugcuggaagcuccacaccuccccccucugcaccaccaacaccaaggagggcuccaacaucugccucacccgcaccgaccgcggcugguacugcgacaacgccggcuccgucuccuucuucccccaggccgagaccugcaagguccaguccaaccgcgucuucugcgacaccaugaacucccucacccuccccuccgaggucaaccucugcaacaucgacaucuucaaccccaaguacgacugcaagaucaugaccuccaagaccgacgucuccuccuccgucaucaccucccucggcgccaucgucuccugcuacggcaagaccaagugcaccgccuccaacaagugccgcggcaucaucaagaccuucuccaacggcugcgacuacgucuccaacaagggcgucgacaccgucuccgucggcaacacccucuacuacgucaacaagcaggagggccagucccucuacgucaagggcgagcccaucaucaacuucuacgacccccucgucuuccccuccgacgaguucgacgccuccaucucccaggucaacgagaagaucaaccagucccucgccuucauccgcaaguccgacgagcuccuccacaacgucaacgucggcaaguccaccaccaacaucaugaucaccaccaucaucaucgucaucaucgucauccuccuccuccucaucgccgucggccucuuccucuacugcaaggcccgcuccacccccgucacccucuccaaggaccagcucuccggcaucaacaacaucgccuucuccaacugaggacuaguggaagcauuuuccuggcugauuaaaagaaauuacucagcuauggucaucuguuccuguuagaaggcuaugcagcauauuauauacuaugcgcauguuaugaaaugcauaauaaaaaauuuuaaaaaaucuaaaagaucuaaaaaaaaaaaaaaaaaaaaaaaaaaaaaaaaaaaaaaaaaaaaaaaaaaaaaaaaaaaaaaaaugcaucccccccccccccccccccccccccccccccaaaggcucuuuucagagccaccagaauu

SEQ ID NO: 19206 - RNA, 2009 nt, Artificial Sequence
  mRNA product Design c-2 comprising derived and/or modified sequence from HRSV(Memphis-37)__AIY60640.1__F_DSCav1_mut8 (opt3)
gggagacuccugucgggcggaaguaggaggaguagaguuuaaaaacaguacucuuuuuccgguucgggacguaguugaagcaacgacaagccggauaaccgcucuugagacaggaagcuuaccauggagcugcccauccucaagaccaacgccauuacaacuauacuugcugcagugacgcugugcuucgccagcucccagaauaucaccgaagaguuuuaccaaucuacauguucagcggucaguaaaggcuauuugggggcuuuaagaacuggaugguacaccagcguuauuacaaucgaacuguccaacauuaaggagaucaaaugcaaugguaccgacgccaaggugaaacuaauaaagcaggaacucgauaaguauaaaaacgcaguaacugaccugcagcuucugaugcagucuacuccugccgcuggcucggggucagcaaucgccagcggaauugcuguguguaaggucuugcaccucgagggcgaggugaauaaaaucaagaacgcccugcugaguaccaauaaagcgguugugucccucucugguugcggggucagcguguuaacguucaagguacuggaucuuaagaacuacauugacaaacaauugcugccaauccuaaauaagcaguccuguucaauaccgaacauugaaacuguuaucgaguuucagcagaaaaauaacaggcuccuggaaauuacccgggaguucagugugaaugcaggagucacaacucccgugagcaccuauaugcuuacaaacucugagcuguugucccucaucaaugauaugccuaucaccaacgaccaaaagaaacugaugucaaacaaugugcagauuguccgccagcagagcuacaguauaaugugcaucauuaaggaagagguuuuagccuaugugguacaacugccacucuacggcgugaucgauacgcccuguuggaaacuucauacuucuccucugugcacaaccaacacuaaggaaggcuccaauauauguuugacacgaaccgaccgugggugguacugcgauaacgcuggaagcgucucguuuuucccacaggccgagacguguaaggugcagucuaauagaguuuucugcgacaccaugaacucccuaacacugcccucagaagugaaucucugcaacauugauaucuucaauccuaaauaugacuguaagaucaugacaaguaaaaccgaugucagcuccucugugauuacaagccugggugcaaucguaucaugcuacggcaagacuaaauguaccgcuaguaacaagugcagggggauuauaaagacauuuuccaauggaugugacuauguuagcaacaaaggcguggacaccgucucuguggguaauacucuuuacuaugucaacaagcaagaggggcagucacuguacgugaaaggagagccaaucauuaauuucuaugauccguugguuuuucccagugacgaauuugaugccagcaucucccaggugaacgagaagaucaaccagucucucgcguuuauucggaaaucggacgaacuguuacacaauguaaacgucggcaagagcacgacaaauauaaugaucaccacuauuaucauugugaucauaguuauccugcuacuccugauugccgugggccuuuucuuguacugcaaggcacgcuccaccccugucacacugucaaaagaucaacucagugggaucaacaauauugcuuucucuaacugaggacuaguggaagcauuuuccuggcugauuaaaagaaauuacucagcuauggucaucuguuccuguuagaaggcuaugcagcauauuauauacuaugcgcauguuaugaaaugcauaauaaaaaauuuuaaaaaaucuaaaagaucuaaaaaaaaaaaaaaaaaaaaaaaaaaaaaaaaaaaaaaaaaaaaaaaaaaaaaaaaaaaaaaaaugcaucccccccccccccccccccccccccccccccaaaggcucuuuucagagccaccagaauu

SEQ ID NO: 19207 - RNA, 2009 nt, Artificial Sequence
  mRNA product Design c-2 comprising derived and/or modified sequence from HRSV(Memphis-37)__AIY60640.1__F_DSCav1_mut8 (opt4)
gggagacuccugucgggcggaaguaggaggaguagaguuuaaaaacaguacucuuuuuccgguucgggacguaguugaagcaacgacaagccggauaaccgcucuugagacaggaagcuuaccauggagcugcccauccugaagaccaacgccaucaccaccauccuggccgccgugacccugugcuucgccagcagccagaacaucaccgaggaguucuaccagagcaccugcagcgccgugagcaagggcuaccugggcgcccugagaaccggcugguacaccagcgugaucaccaucgagcugagcaacaucaaggagaucaagugcaacggcaccgacgccaaggugaagcugaucaagcaggagcuggacaaguacaagaacgccgugaccgaccugcagcugcugaugcagagcacccccgccgccggcagcggcagcgccaucgccagcggcaucgccgugugcaaggugcugcaccuggagggcgaggugaacaagaucaagaacgcccugcugagcaccaacaaggccguggugagccugagcggcugcggcgugagcgugcugaccuucaaggugcuggaccugaagaacuacaucgacaagcagcugcugcccauccugaacaagcagagcugcagcauccccaacaucgagaccgugaucgaguuccagcagaagaacaacagacugcuggagaucaccagagaguucagcgugaacgccggcgugaccacccccgugagcaccuacaugcugaccaacagcgagcugcugagccugaucaacgacaugcccaucaccaacgaccagaagaagcugaugagcaacaacgugcagaucgugagacagcagagcuacagcaucaugugcaucaucaaggaggaggugcuggccuacguggugcagcugccccuguacggcgugaucgacacccccugcuggaagcugcacaccagcccccugugcaccaccaacaccaaggagggcagcaacaucugccugaccagaaccgacagaggcugguacugcgacaacgccggcagcgugagcuucuucccccaggccgagaccugcaaggugcagagcaacagaguguucugcgacaccaugaacagccugacccugcccagcgaggugaaccugugcaacaucgacaucuucaaccccaaguacgacugcaagaucaugaccagcaagaccgacgugagcagcagcgugaucaccagccugggcgccaucgugagcugcuacggcaagaccaagugcaccgccagcaacaagugcagaggcaucaucaagaccuucagcaacggcugcgacuacgugagcaacaagggcguggacaccgugagcgugggcaacacccuguacuacgugaacaagcaggagggccagagccuguacgugaagggcgagcccaucaucaacuucuacgacccccugguguuccccagcgacgaguucgacgccagcaucagccaggugaacgagaagaucaaccagagccuggccuucaucagaaagagcgacgagcugcugcacaacgugaacgugggcaagagcaccaccaacaucaugaucaccaccaucaucaucgugaucaucgugauccugcugcugcugaucgccgugggccuguuccuguacugcaaggccagaagcacccccgugacccugagcaaggaccagcugagcggcaucaacaacaucgccuucagcaacugaggacuaguggaagcauuuuccuggcugauuaaaagaaauuacucagcuauggucaucuguuccuguuagaaggcuaugcagcauauuauauacuaugcgcauguuaugaaaugcauaauaaaaaauuuuaaaaaaucuaaaagaucuaaaaaaaaaaaaaaaaaaaaaaaaaaaaaaaaaaaaaaaaaaaaaaaaaaaaaaaaaaaaaaaaugcaucccccccccccccccccccccccccccccccaaaggcucuuuucagagccaccagaauu

SEQ ID NO: 19208 - RNA, 2009 nt, Artificial Sequence
  mRNA product Design c-2 comprising derived and/or modified sequence from HRSV(Memphis-37)__AIY60640.1__F_DSCav1_mut8 (opt5)
gggagacuccugucgggcggaaguaggaggaguagaguuuaaaaacaguacucuuuuuccgguucgggacguaguugaagcaacgacaagccggauaaccgcucuugagacaggaagcuuaccauggagcugcccauccucaagaccaacgccauuacaacgauccuggcugccgugacccuuugcuucgcgagcucccagaauauuacagaagaguuuuaccaaucuaccuguagcgcugucuccaaaggcuaucugggggcccucagaacaggaugguacaccucuguuaucacaauugaacugagcaacaucaaggagaucaaaugcaauggcaccgacgccaaggugaaacuuauuaagcaggaacuggauaaguauaaaaacgcugugacggaccuccagcugcugaugcaguccaccccugccgcugggucuggaagcgccaucgcguccggcauugccgucuguaaggugcuccaccuggagggggagguuaauaaaaucaagaacgcccuucugagcacaaauaaagcuguggucucucucuccggaugcggcgugagcguucugaccuucaaggugcuugaucugaagaacuacauugacaaacaacuccugccgauccugaauaagcagucuuguuccauucccaacaucgaaacagucaucgaguuucagcagaaaaauaaccggcuccuggaaauuacccgcgaguucagcgugaaugcuggcgugacgacaccugucucuaccuauaugcuuacaaacuccgagcugcucagccugaucaaugauaugcccauuaccaacgaccaaaagaaacuuauguccaacaauguucagaucgugagacagcagucuuacagcauuaugugcaucaucaaggaagaggugcuggccuaugucgugcaacucccucuguacgggguuauugauacccccuguuggaaacugcauacauccccucucugcacgaccaacacaaaggaaggaagcaauaucugucugacccggacagaccgcggcugguacugcgauaacgcggggucuguguccuuuuucccgcaggccgagaccuguaagguccagagcaauagaguguuuugcgacacgaugaacucucuuacacugcccagcgaaguuaaucucugcaacauugauaucuucaauccuaaauaugacuguaagauuaugaccuccaaaaccgaugugucuagcuccgucaucacaagccugggagcuaucgugucuugcuacggcaagaccaaauguacagccuccaacaagugccgggggauuaucaagacguuuagcaauggaugugacuaugucucuaacaaaggcguggacaccguuuccgugggcaauacacuuuacuaugucaacaagcaagaggggcagagccuguacgugaaaggagagcccauuaucaauuucuaugauccucucguuuuucccuccgacgaguucgaugcuucuauuagccaggugaacgaaaagaucaaccagucccuggccuuuauucgcaaaucugacgaacugcuccacaaugucaacgugggcaagagcaccacaaauaucaugaucaccacgauuaucauugugaucauuguuauccugcuucugcucaucgccgucgggcuguuccuguacugcaaggcuagauccaccccggugacacuuagcaaagaucaacucucuggaauuaacaauaucgcguucuccaacugaggacuaguggaagcauuuuccuggcugauuaaaagaaauuacucagcuauggucaucuguuccuguuagaaggcuaugcagcauauuauauacuaugcgcauguuaugaaaugcauaauaaaaaauuuuaaaaaaucuaaaagaucuaaaaaaaaaaaaaaaaaaaaaaaaaaaaaaaaaaaaaaaaaaaaaaaaaaaaaaaaaaaaaaaaugcaucccccccccccccccccccccccccccccccaaaggcucuuuucagagccaccagaauu

SEQ ID NO: 19209 - RNA, 2009 nt, Artificial Sequence
  mRNA product Design c-2 comprising derived and/or modified sequence from HRSV(Memphis-37)__AIY60640.1__F_DSCav1_mut8 (opt6)
gggagacuccugucgggcggaaguaggaggaguagaguuuaaaaacaguacucuuuuuccgguucgggacguaguugaagcaacgacaagccggauaaccgcucuugagacaggaagcuuaccauggaacuuccuauuuuaaaaacaaacgcaauuacaaccauauuagcagcaguaacacuaugcuuugcaucaucacaaaacaucaccgaagaauuuuaucaauccacaugcucagcaguaucaaaaggauaccuuggcgcacuccgaacaggcugguauacaucggucauaacuauagaacucuccaacauaaaagaaauaaaaugcaaugguacugacgcaaaaguaaaauuaauaaaacaagaacuagacaaauacaaaaacgcaguaaccgauuuacaacuacuuaugcaaucaacaccugcagcaggaagcggaucagcaauagcaaguggaauagcaguaugcaaaguacuucaccucgaaggagaaguaaauaaaauaaaaaacgccuuacuaucaacaaauaaagccgucguaucacuuuccgguugcggcguaucaguauuaaccuuuaaagucuuagacuuaaaaaacuacauagacaaacaauuauuaccaauacuaaacaaacaauccuguuccauacccaacauagaaaccguaauagaauuucaacaaaaaaacaacagacuauuagaaauaacacgcgaauuuucaguaaacgcaggcguaacaacaccaguaucaacauauauguuaaccaauucagaauuauuaucccuuauaaaugacaugccuauaacaaacgaccaaaaaaaauuaaugaguaacaacguucaaauaguaagacaacaaucauacagcauaaugugcauaauaaaagaagaaguacuagcauacguaguucaacuaccacucuauggcguuaucgacaccccaugcuggaaacuacauaccucaccacucuguaccacuaauacgaaagaaggaucuaacauaugccuaaccagaacagaucgagguugguauugcgacaaugcuggaucaguaucauucuucccacaagcagaaaccugcaaaguacaaagcaacagaguauuuugugacacuaugaacucacuaacgcuaccuucagaaguaaaccuaugcaacaucgacauauucaacccaaaauacgauugcaaaauaaugacaucaaaaacagacguuuccucaucaguaauaacaucauuaggagcaauaguauccugcuacgguaaaaccaaaugcacagcauccaauaaaugccgaggaaucauuaaaacauuuucaaauggcugcgacuauguaaguaauaaagguguagauacaguaucaguaggcaacacacuauauuacguaaacaaacaagaagggcaaucccuauaugucaaaggcgaaccaauuauaaacuucuacgacccccucguauucccaucagacgaauuugacgcaucaauaucccaaguaaacgaaaaaaucaaccaaucacucgcauucauacguaaauccgacgaauuacuacauaacguaaacguaggcaaaucaacaacaaauauaaugauaacaaccauaaucauaguaauaauaguuauacuccuacuacucauugcagucggccuauuucuauacuguaaagcacgcucuacaccaguaacacuaucuaaagaucaauuauccggaauaaacaacauugccuucuccaauuaaggacuaguggaagcauuuuccuggcugauuaaaagaaauuacucagcuauggucaucuguuccuguuagaaggcuaugcagcauauuauauacuaugcgcauguuaugaaaugcauaauaaaaaauuuuaaaaaaucuaaaagaucuaaaaaaaaaaaaaaaaaaaaaaaaaaaaaaaaaaaaaaaaaaaaaaaaaaaaaaaaaaaaaaaaugcaucccccccccccccccccccccccccccccccaaaggcucuuuucagagccaccagaauu

SEQ ID NO: 19210 - RNA, 2009 nt, Artificial Sequence
  mRNA product Design c-2 comprising derived and/or modified sequence from HRSV(Memphis-37)__AIY60640.1__F_DSCav1_mut8 (opt11)
gggagacuccugucgggcggaaguaggaggaguagaguuuaaaaacaguacucuuuuuccgguucgggacguaguugaagcaacgacaagccggauaaccgcucuugagacaggaagcuuaccauggaacuucccauccugaagaccaacgcuaucacaaccauccucgccgcagucacccuuugcuucgccucaucccaaaacaucaccgaagaauuuuaccagucaaccugcucggccgucuccaagggcuaccucggcgcccuccgcacuggcugguacacauccgucaucaccaucgaacucuccaacauaaaagaaauaaaaugcaacggaaccgacgccaaagucaaacucaucaaacaagaacuagauaaauauaaaaacgccgucaccgaccugcaacuccucaugcaauccaccccagccgccggcucuggcagcgccaucgcaagcggaaucgccgucugcaaaguccuccaccuagaaggcgaagucaacaaaauuaaaaacgcccuccucuccaccaacaaagcaguugucucccucucuggcugcggagucucuguacucaccuucaaaguacuagaccucaagaauuacauagacaaacaacuccugcccauccuuaacaaacaaaguuguaguauccccaacaucgaaacaguaaucgaauuucagcagaaaaacaaccgccuccucgaaaucacacgagaguucucggucaacgccggcgucaccacccccguaucaaccuacaugcuaacaaacuccgaacuacuuucccucaucaaugacaugcccauaaccaacgaccaaaagaaacuaauguccaauaacguccagauaguccgucaacaguccuacucaaucaugugcauaauuaaagaagaaguacucgccuacgucguccaacuaccccucuauggagucaucgacacccccugcuggaaacuccacacaucaccccuaugcacaaccaacaccaaagaaggcuccaacaucugccucacaagaaccgaccgcggcugguacugcgacaacgcuggcuccgucucguucuucccacaagccgaaaccugcaaaguccaaucaaaccgggucuucugcgacaccaugaacucccucacucucccaagcgaagucaaccuaugcaacaucgacaucuucaacccaaaauacgacuguaaaaucaugacuucgaaaacagacgucuccucaucaguaaucacauccuuaggcgccaucguguccugcuacgguaagaccaaaugcacagccuccaacaaaugccggggcaucaucaaaaccuucagcaacgguugugauuacgucuccaacaaaggaguagacaccgucuccguaggaaacacccucuacuacgucaacaagcaagaaggccaaucccucuacgucaaaggggaacccaucaucaacuucuacgacccacucgucuuccccuccgacgaguucgacgcaagcaucucccaagucaacgaaaagaucaaccaaucacuagccuucauccgcaaauccgacgaacuccuccacaacguuaacguaggcaaauccaccaccaacaucaugaucacaaccaucaucauagucauaauagucauccuacuacuccucaucgccguaggucuauuccuauacuguaaagcucgaucaacccccgucacacucuccaaagaucaacucucaggaaucaacaacaucgccuucuccaacuaaggacuaguggaagcauuuuccuggcugauuaaaagaaauuacucagcuauggucaucuguuccuguuagaaggcuaugcagcauauuauauacuaugcgcauguuaugaaaugcauaauaaaaaauuuuaaaaaaucuaaaagaucuaaaaaaaaaaaaaaaaaaaaaaaaaaaaaaaaaaaaaaaaaaaaaaaaaaaaaaaaaaaaaaaaugcaucccccccccccccccccccccccccccccccaaaggcucuuuucagagccaccagaauu

SEQ ID NO: 19211 - RNA, 1986 nt, Artificial Sequence
  mRNA product Design c-3 comprising derived and/or modified sequence from HRSV(Memphis-37)__AIY60640.1__F_DSCav1_mut8 (opt1)
gggagaguccgcucagccagguugcagaagcggcuuagcguguguccuaaucuucucucugcguguagguaggccugugccgcaaacaagcuuaccauggagcugcccauccucaagaccaacgccaucaccacgauccuggccgcggugacccugugcuucgccagcucccagaacaucaccgaggaguucuaccagagcacgugcuccgccgucagcaagggcuaccucggcgcccugcgcaccgggugguacaccagcgugaucaccaucgagcuguccaacaucaaggagaucaagugcaacggcaccgacgccaaggugaagcucaucaagcaggagcuggacaaguacaagaacgcggucacggaccugcagcuccugaugcagagcaccccggccgccggcuccgggagcgcgaucgccuccggcaucgccgucugcaaggugcugcaccucgagggcgaggugaacaagaucaagaacgcccugcuguccaccaacaaggccgucgugagccucuccggcugcggggugagcguccugaccuucaaggugcuggaccucaagaacuacaucgacaagcagcugcugcccauccugaacaagcagagcugcuccauccccaacaucgagaccgucaucgaguuccagcagaagaacaaccgccuccuggagaucacgcgggaguucagcgugaacgcgggcgugaccacccccgucuccaccuacaugcugacgaacagcgagcuccugucccugaucaacgacaugccgaucaccaacgaccagaagaagcucaugagcaacaacgugcagaucgugcgccagcaguccuacagcaucaugugcaucaucaaggaggagguccuggccuacguggugcagcugccccucuacggggucaucgacacccccugcuggaagcugcacaccagcccccugugcacgaccaacaccaaggagggcuccaacaucugccucacccggacggaccgcgggugguacugcgacaacgccggcagcguguccuucuucccgcaggccgagaccugcaagguccagagcaaccggguguucugcgacaccaugaacucccugacccugcccagcgaggugaaccucugcaacaucgacaucuucaaccccaaguacgacugcaagaucaugacguccaagaccgacgucagcuccagcgugaucaccucccugggcgccaucgugagcugcuacgggaagaccaagugcacggcgagcaacaagugccgcggcaucaucaagaccuucuccaacgggugcgacuacgucagcaacaagggcguggacaccguguccgucggcaacacccuguacuacgugaacaagcaggagggccagagccucuacgugaagggggagcccaucaucaacuucuacgacccgcuggucuuccccuccgacgaguucgacgccagcaucucccaggugaacgagaagaucaaccagagccuggccuucauccggaaguccgacgagcuccugcacaacgugaacgucggcaagagcaccacgaacaucaugaucaccaccaucaucaucgugaucaucgugauccugcugcuccugaucgccgucgggcuguuccucuacugcaaggcccgcuccacccccgugacgcugagcaaggaccagcuguccgggaucaacaacaucgcguucagcaacugaggacuaguacuggcugcaucucccuuuccucuguccuccauccuucucccaggauggugaagggggaccugguacccagugauccccaccccaggauccuaaaucaugacuuaccugcuaauaaaaacucauuggaaaagugagaagaucuaaaaaaaaaaaaaaaaaaaaaaaaaaaaaaaaaaaaaaaaaaaaaaaaaaaaaaaaaaaaaaaaugcaucccccccccccccccccccccccccccccccaaaggcucuuuucagagccaccagaauu

SEQ ID NO: 19212 - RNA, 1986 nt, Artificial Sequence
  mRNA product Design c-3 comprising derived and/or modified sequence from HRSV(Memphis-37)__AIY60640.1__F_DSCav1_mut8 (opt1)
gggagaguccgcucagccagguugcagaagcggcuuagcguguguccuaaucuucucucugcguguagguaggccugugccgcaaacaagcuuaccauggagcugcccauccucaagaccaacgccaucaccacgauccuggccgcggugacccugugcuucgccagcucccagaacaucaccgaggaguucuaccagagcacgugcuccgccgucagcaagggcuaccucggggcccugcgcaccggcugguacaccuccgugaucaccaucgagcugagcaacaucaaggagaucaagugcaacgggaccgacgccaaggugaagcucaucaagcaggagcuggacaaguacaagaacgcggucacggaccugcagcuccugaugcaguccaccccggccgccggcagcggguccgccaucgcgagcggcaucgccgugugcaaggugcugcaccucgagggcgaggucaacaagaucaagaacgcccugcuguccaccaacaaggccguggugagccucuccgggugcggcgucagcgugcugaccuucaaggugcuggaccucaagaacuacaucgacaagcagcugcugcccauccucaacaagcaguccugcagcauccccaacaucgagacggucaucgaguuccagcagaagaacaaccggcugcuggagaucacccgcgaguucuccgugaacgccggggugaccacccccgucagcacguacaugcucaccaacuccgagcugcugagccucaucaacgacaugccgaucaccaacgaccagaagaagcugaugagcaacaacgugcagaucgugcggcagcaguccuacagcaucaugugcaucaucaaggaggagguccuggcguacguggugcagcucccccuguacggcgucaucgacacccccugcuggaagcugcacacgagcccccucugcaccaccaacaccaaggagggguccaacaucugccugacgcgcaccgaccggggcugguacugcgacaacgccggcuccgugagcuucuucccgcaggccgagaccugcaaggugcaguccaaccgcgucuucugcgacaccaugaacagccugacgcuccccuccgaggugaaccugugcaacaucgacaucuucaaccccaaguacgacugcaagaucaugaccagcaagaccgacgucuccagcuccgugaucaccagccugggggccaucguguccugcuacggcaagacgaagugcaccgccagcaacaagugccgggggaucaucaagaccuucuccaacggcugcgacuacgucagcaacaagggcguggacaccguguccgucgggaacacgcucuacuacgugaacaagcaggagggccagagccuguacgugaagggggagcccaucaucaacuucuacgacccgcuggucuuccccagcgacgaguucgacgcguccaucagccaggugaacgagaagaucaaccagucccucgccuucauccgcaagagcgacgagcugcugcacaacgugaacgucggcaaguccaccaccaacaucaugaucaccaccaucaucaucgugaucaucgugauccuccugcugcucaucgccgucgggcuguuccuguacugcaaggcccggagcacgcccgugacccuguccaaggaccagcucagcggcaucaacaacaucgccuucuccaacugaggacuaguacuggcugcaucucccuuuccucuguccuccauccuucucccaggauggugaagggggaccugguacccagugauccccaccccaggauccuaaaucaugacuuaccugcuaauaaaaacucauuggaaaagugagaagaucuaaaaaaaaaaaaaaaaaaaaaaaaaaaaaaaaaaaaaaaaaaaaaaaaaaaaaaaaaaaaaaaaugcaucccccccccccccccccccccccccccccccaaaggcucuuuucagagccaccagaauu

SEQ ID NO: 19213 - RNA, 1986 nt, Artificial Sequence
  mRNA product Design c-3 comprising derived and/or modified sequence from HRSV(Memphis-37)__AIY60640.1__F_DSCav1_mut8 (opt2)
gggagaguccgcucagccagguugcagaagcggcuuagcguguguccuaaucuucucucugcguguagguaggccugugccgcaaacaagcuuaccauggagcuccccauccucaagaccaacgccaucaccaccauccucgccgccgucacccucugcuucgccuccucccagaacaucaccgaggaguucuaccaguccaccugcuccgccgucuccaagggcuaccucggcgcccuccgcaccggcugguacaccuccgucaucaccaucgagcucuccaacaucaaggagaucaagugcaacggcaccgacgccaaggucaagcucaucaagcaggagcucgacaaguacaagaacgccgucaccgaccuccagcuccucaugcaguccacccccgccgccggcuccggcuccgccaucgccuccggcaucgccgucugcaagguccuccaccucgagggcgaggucaacaagaucaagaacgcccuccucuccaccaacaaggccgucgucucccucuccggcugcggcgucuccguccucaccuucaagguccucgaccucaagaacuacaucgacaagcagcuccuccccauccucaacaagcaguccugcuccauccccaacaucgagaccgucaucgaguuccagcagaagaacaaccgccuccucgagaucacccgcgaguucuccgucaacgccggcgucaccacccccgucuccaccuacaugcucaccaacuccgagcuccucucccucaucaacgacaugcccaucaccaacgaccagaagaagcucauguccaacaacguccagaucguccgccagcaguccuacuccaucaugugcaucaucaaggaggagguccucgccuacgucguccagcucccccucuacggcgucaucgacacccccugcuggaagcuccacaccuccccccucugcaccaccaacaccaaggagggcuccaacaucugccucacccgcaccgaccgcggcugguacugcgacaacgccggcuccgucuccuucuucccccaggccgagaccugcaagguccaguccaaccgcgucuucugcgacaccaugaacucccucacccuccccuccgaggucaaccucugcaacaucgacaucuucaaccccaaguacgacugcaagaucaugaccuccaagaccgacgucuccuccuccgucaucaccucccucggcgccaucgucuccugcuacggcaagaccaagugcaccgccuccaacaagugccgcggcaucaucaagaccuucuccaacggcugcgacuacgucuccaacaagggcgucgacaccgucuccgucggcaacacccucuacuacgucaacaagcaggagggccagucccucuacgucaagggcgagcccaucaucaacuucuacgacccccucgucuuccccuccgacgaguucgacgccuccaucucccaggucaacgagaagaucaaccagucccucgccuucauccgcaaguccgacgagcuccuccacaacgucaacgucggcaaguccaccaccaacaucaugaucaccaccaucaucaucgucaucaucgucauccuccuccuccucaucgccgucggccucuuccucuacugcaaggcccgcuccacccccgucacccucuccaaggaccagcucuccggcaucaacaacaucgccuucuccaacugaggacuaguacuggcugcaucucccuuuccucuguccuccauccuucucccaggauggugaagggggaccugguacccagugauccccaccccaggauccuaaaucaugacuuaccugcuaauaaaaacucauuggaaaagugagaagaucuaaaaaaaaaaaaaaaaaaaaaaaaaaaaaaaaaaaaaaaaaaaaaaaaaaaaaaaaaaaaaaaaugcaucccccccccccccccccccccccccccccccaaaggcucuuuucagagccaccagaauu

SEQ ID NO: 19214 - RNA, 1986 nt, Artificial Sequence
  mRNA product Design c-3 comprising derived and/or modified sequence from HRSV(Memphis-37)__AIY60640.1__F_DSCav1_mut8 (opt3)
gggagaguccgcucagccagguugcagaagcggcuuagcguguguccuaaucuucucucugcguguagguaggccugugccgcaaacaagcuuaccauggagcugcccauccucaagaccaacgccauuacaacuauacuugcugcagugacgcugugcuucgccagcucccagaauaucaccgaagaguuuuaccaaucuacauguucagcggucaguaaaggcuauuugggggcuuuaagaacuggaugguacaccagcguuauuacaaucgaacuguccaacauuaaggagaucaaaugcaaugguaccgacgccaaggugaaacuaauaaagcaggaacucgauaaguauaaaaacgcaguaacugaccugcagcuucugaugcagucuacuccugccgcuggcucggggucagcaaucgccagcggaauugcuguguguaaggucuugcaccucgagggcgaggugaauaaaaucaagaacgcccugcugaguaccaauaaagcgguugugucccucucugguugcggggucagcguguuaacguucaagguacuggaucuuaagaacuacauugacaaacaauugcugccaauccuaaauaagcaguccuguucaauaccgaacauugaaacuguuaucgaguuucagcagaaaaauaacaggcuccuggaaauuacccgggaguucagugugaaugcaggagucacaacucccgugagcaccuauaugcuuacaaacucugagcuguugucccucaucaaugauaugccuaucaccaacgaccaaaagaaacugaugucaaacaaugugcagauuguccgccagcagagcuacaguauaaugugcaucauuaaggaagagguuuuagccuaugugguacaacugccacucuacggcgugaucgauacgcccuguuggaaacuucauacuucuccucugugcacaaccaacacuaaggaaggcuccaauauauguuugacacgaaccgaccgugggugguacugcgauaacgcuggaagcgucucguuuuucccacaggccgagacguguaaggugcagucuaauagaguuuucugcgacaccaugaacucccuaacacugcccucagaagugaaucucugcaacauugauaucuucaauccuaaauaugacuguaagaucaugacaaguaaaaccgaugucagcuccucugugauuacaagccugggugcaaucguaucaugcuacggcaagacuaaauguaccgcuaguaacaagugcagggggauuauaaagacauuuuccaauggaugugacuauguuagcaacaaaggcguggacaccgucucuguggguaauacucuuuacuaugucaacaagcaagaggggcagucacuguacgugaaaggagagccaaucauuaauuucuaugauccguugguuuuucccagugacgaauuugaugccagcaucucccaggugaacgagaagaucaaccagucucucgcguuuauucggaaaucggacgaacuguuacacaauguaaacgucggcaagagcacgacaaauauaaugaucaccacuauuaucauugugaucauaguuauccugcuacuccugauugccgugggccuuuucuuguacugcaaggcacgcuccaccccugucacacugucaaaagaucaacucagugggaucaacaauauugcuuucucuaacugaggacuaguacuggcugcaucucccuuuccucuguccuccauccuucucccaggauggugaagggggaccugguacccagugauccccaccccaggauccuaaaucaugacuuaccugcuaauaaaaacucauuggaaaagugagaagaucuaaaaaaaaaaaaaaaaaaaaaaaaaaaaaaaaaaaaaaaaaaaaaaaaaaaaaaaaaaaaaaaaugcaucccccccccccccccccccccccccccccccaaaggcucuuuucagagccaccagaauu

SEQ ID NO: 19215 - RNA, 1986 nt, Artificial Sequence
  mRNA product Design c-3 comprising derived and/or modified sequence from HRSV(Memphis-37)__AIY60640.1__F_DSCav1_mut8 (opt4)
gggagaguccgcucagccagguugcagaagcggcuuagcguguguccuaaucuucucucugcguguagguaggccugugccgcaaacaagcuuaccauggagcugcccauccugaagaccaacgccaucaccaccauccuggccgccgugacccugugcuucgccagcagccagaacaucaccgaggaguucuaccagagcaccugcagcgccgugagcaagggcuaccugggcgcccugagaaccggcugguacaccagcgugaucaccaucgagcugagcaacaucaaggagaucaagugcaacggcaccgacgccaaggugaagcugaucaagcaggagcuggacaaguacaagaacgccgugaccgaccugcagcugcugaugcagagcacccccgccgccggcagcggcagcgccaucgccagcggcaucgccgugugcaaggugcugcaccuggagggcgaggugaacaagaucaagaacgcccugcugagcaccaacaaggccguggugagccugagcggcugcggcgugagcgugcugaccuucaaggugcuggaccugaagaacuacaucgacaagcagcugcugcccauccugaacaagcagagcugcagcauccccaacaucgagaccgugaucgaguuccagcagaagaacaacagacugcuggagaucaccagagaguucagcgugaacgccggcgugaccacccccgugagcaccuacaugcugaccaacagcgagcugcugagccugaucaacgacaugcccaucaccaacgaccagaagaagcugaugagcaacaacgugcagaucgugagacagcagagcuacagcaucaugugcaucaucaaggaggaggugcuggccuacguggugcagcugccccuguacggcgugaucgacacccccugcuggaagcugcacaccagcccccugugcaccaccaacaccaaggagggcagcaacaucugccugaccagaaccgacagaggcugguacugcgacaacgccggcagcgugagcuucuucccccaggccgagaccugcaaggugcagagcaacagaguguucugcgacaccaugaacagccugacccugcccagcgaggugaaccugugcaacaucgacaucuucaaccccaaguacgacugcaagaucaugaccagcaagaccgacgugagcagcagcgugaucaccagccugggcgccaucgugagcugcuacggcaagaccaagugcaccgccagcaacaagugcagaggcaucaucaagaccuucagcaacggcugcgacuacgugagcaacaagggcguggacaccgugagcgugggcaacacccuguacuacgugaacaagcaggagggccagagccuguacgugaagggcgagcccaucaucaacuucuacgacccccugguguuccccagcgacgaguucgacgccagcaucagccaggugaacgagaagaucaaccagagccuggccuucaucagaaagagcgacgagcugcugcacaacgugaacgugggcaagagcaccaccaacaucaugaucaccaccaucaucaucgugaucaucgugauccugcugcugcugaucgccgugggccuguuccuguacugcaaggccagaagcacccccgugacccugagcaaggaccagcugagcggcaucaacaacaucgccuucagcaacugaggacuaguacuggcugcaucucccuuuccucuguccuccauccuucucccaggauggugaagggggaccugguacccagugauccccaccccaggauccuaaaucaugacuuaccugcuaauaaaaacucauuggaaaagugagaagaucuaaaaaaaaaaaaaaaaaaaaaaaaaaaaaaaaaaaaaaaaaaaaaaaaaaaaaaaaaaaaaaaaugcaucccccccccccccccccccccccccccccccaaaggcucuuuucagagccaccagaauu

SEQ ID NO: 19216 - RNA, 1986 nt, Artificial Sequence
  mRNA product Design c-3 comprising derived and/or modified sequence from HRSV(Memphis-37)__AIY60640.1__F_DSCav1_mut8 (opt5)
gggagaguccgcucagccagguugcagaagcggcuuagcguguguccuaaucuucucucugcguguagguaggccugugccgcaaacaagcuuaccauggagcugcccauccucaagaccaacgccauuacaacgauccuggcugccgugacccuuugcuucgcgagcucccagaauauuacagaagaguuuuaccaaucuaccuguagcgcugucuccaaaggcuaucugggggcccucagaacaggaugguacaccucuguuaucacaauugaacugagcaacaucaaggagaucaaaugcaauggcaccgacgccaaggugaaacuuauuaagcaggaacuggauaaguauaaaaacgcugugacggaccuccagcugcugaugcaguccaccccugccgcugggucuggaagcgccaucgcguccggcauugccgucuguaaggugcuccaccuggagggggagguuaauaaaaucaagaacgcccuucugagcacaaauaaagcuguggucucucucuccggaugcggcgugagcguucugaccuucaaggugcuugaucugaagaacuacauugacaaacaacuccugccgauccugaauaagcagucuuguuccauucccaacaucgaaacagucaucgaguuucagcagaaaaauaaccggcuccuggaaauuacccgcgaguucagcgugaaugcuggcgugacgacaccugucucuaccuauaugcuuacaaacuccgagcugcucagccugaucaaugauaugcccauuaccaacgaccaaaagaaacuuauguccaacaauguucagaucgugagacagcagucuuacagcauuaugugcaucaucaaggaagaggugcuggccuaugucgugcaacucccucuguacgggguuauugauacccccuguuggaaacugcauacauccccucucugcacgaccaacacaaaggaaggaagcaauaucugucugacccggacagaccgcggcugguacugcgauaacgcggggucuguguccuuuuucccgcaggccgagaccuguaagguccagagcaauagaguguuuugcgacacgaugaacucucuuacacugcccagcgaaguuaaucucugcaacauugauaucuucaauccuaaauaugacuguaagauuaugaccuccaaaaccgaugugucuagcuccgucaucacaagccugggagcuaucgugucuugcuacggcaagaccaaauguacagccuccaacaagugccgggggauuaucaagacguuuagcaauggaugugacuaugucucuaacaaaggcguggacaccguuuccgugggcaauacacuuuacuaugucaacaagcaagaggggcagagccuguacgugaaaggagagcccauuaucaauuucuaugauccucucguuuuucccuccgacgaguucgaugcuucuauuagccaggugaacgaaaagaucaaccagucccuggccuuuauucgcaaaucugacgaacugcuccacaaugucaacgugggcaagagcaccacaaauaucaugaucaccacgauuaucauugugaucauuguuauccugcuucugcucaucgccgucgggcuguuccuguacugcaaggcuagauccaccccggugacacuuagcaaagaucaacucucuggaauuaacaauaucgcguucuccaacugaggacuaguacuggcugcaucucccuuuccucuguccuccauccuucucccaggauggugaagggggaccugguacccagugauccccaccccaggauccuaaaucaugacuuaccugcuaauaaaaacucauuggaaaagugagaagaucuaaaaaaaaaaaaaaaaaaaaaaaaaaaaaaaaaaaaaaaaaaaaaaaaaaaaaaaaaaaaaaaaugcaucccccccccccccccccccccccccccccccaaaggcucuuuucagagccaccagaauu

SEQ ID NO: 19217 - RNA, 1986 nt, Artificial Sequence
  mRNA product Design c-3 comprising derived and/or modified sequence from HRSV(Memphis-37)__AIY60640.1__F_DSCav1_mut8 (opt6)
gggagaguccgcucagccagguugcagaagcggcuuagcguguguccuaaucuucucucugcguguagguaggccugugccgcaaacaagcuuaccauggaacuuccuauuuuaaaaacaaacgcaauuacaaccauauuagcagcaguaacacuaugcuuugcaucaucacaaaacaucaccgaagaauuuuaucaauccacaugcucagcaguaucaaaaggauaccuuggcgcacuccgaacaggcugguauacaucggucauaacuauagaacucuccaacauaaaagaaauaaaaugcaaugguacugacgcaaaaguaaaauuaauaaaacaagaacuagacaaauacaaaaacgcaguaaccgauuuacaacuacuuaugcaaucaacaccugcagcaggaagcggaucagcaauagcaaguggaauagcaguaugcaaaguacuucaccucgaaggagaaguaaauaaaauaaaaaacgccuuacuaucaacaaauaaagccgucguaucacuuuccgguugcggcguaucaguauuaaccuuuaaagucuuagacuuaaaaaacuacauagacaaacaauuauuaccaauacuaaacaaacaauccuguuccauacccaacauagaaaccguaauagaauuucaacaaaaaaacaacagacuauuagaaauaacacgcgaauuuucaguaaacgcaggcguaacaacaccaguaucaacauauauguuaaccaauucagaauuauuaucccuuauaaaugacaugccuauaacaaacgaccaaaaaaaauuaaugaguaacaacguucaaauaguaagacaacaaucauacagcauaaugugcauaauaaaagaagaaguacuagcauacguaguucaacuaccacucuauggcguuaucgacaccccaugcuggaaacuacauaccucaccacucuguaccacuaauacgaaagaaggaucuaacauaugccuaaccagaacagaucgagguugguauugcgacaaugcuggaucaguaucauucuucccacaagcagaaaccugcaaaguacaaagcaacagaguauuuugugacacuaugaacucacuaacgcuaccuucagaaguaaaccuaugcaacaucgacauauucaacccaaaauacgauugcaaaauaaugacaucaaaaacagacguuuccucaucaguaauaacaucauuaggagcaauaguauccugcuacgguaaaaccaaaugcacagcauccaauaaaugccgaggaaucauuaaaacauuuucaaauggcugcgacuauguaaguaauaaagguguagauacaguaucaguaggcaacacacuauauuacguaaacaaacaagaagggcaaucccuauaugucaaaggcgaaccaauuauaaacuucuacgacccccucguauucccaucagacgaauuugacgcaucaauaucccaaguaaacgaaaaaaucaaccaaucacucgcauucauacguaaauccgacgaauuacuacauaacguaaacguaggcaaaucaacaacaaauauaaugauaacaaccauaaucauaguaauaauaguuauacuccuacuacucauugcagucggccuauuucuauacuguaaagcacgcucuacaccaguaacacuaucuaaagaucaauuauccggaauaaacaacauugccuucuccaauuaaggacuaguacuggcugcaucucccuuuccucuguccuccauccuucucccaggauggugaagggggaccugguacccagugauccccaccccaggauccuaaaucaugacuuaccugcuaauaaaaacucauuggaaaagugagaagaucuaaaaaaaaaaaaaaaaaaaaaaaaaaaaaaaaaaaaaaaaaaaaaaaaaaaaaaaaaaaaaaaaugcaucccccccccccccccccccccccccccccccaaaggcucuuuucagagccaccagaauu

SEQ ID NO: 19218 - RNA, 1986 nt, Artificial Sequence
  mRNA product Design c-3 comprising derived and/or modified sequence from HRSV(Memphis-37)__AIY60640.1__F_DSCav1_mut8 (opt11)
gggagaguccgcucagccagguugcagaagcggcuuagcguguguccuaaucuucucucugcguguagguaggccugugccgcaaacaagcuuaccauggaacuucccauccugaagaccaacgcuaucacaaccauccucgccgcagucacccuuugcuucgccucaucccaaaacaucaccgaagaauuuuaccagucaaccugcucggccgucuccaagggcuaccucggcgcccuccgcacuggcugguacacauccgucaucaccaucgaacucuccaacauaaaagaaauaaaaugcaacggaaccgacgccaaagucaaacucaucaaacaagaacuagauaaauauaaaaacgccgucaccgaccugcaacuccucaugcaauccaccccagccgccggcucuggcagcgccaucgcaagcggaaucgccgucugcaaaguccuccaccuagaaggcgaagucaacaaaauuaaaaacgcccuccucuccaccaacaaagcaguugucucccucucuggcugcggagucucuguacucaccuucaaaguacuagaccucaagaauuacauagacaaacaacuccugcccauccuuaacaaacaaaguuguaguauccccaacaucgaaacaguaaucgaauuucagcagaaaaacaaccgccuccucgaaaucacacgagaguucucggucaacgccggcgucaccacccccguaucaaccuacaugcuaacaaacuccgaacuacuuucccucaucaaugacaugcccauaaccaacgaccaaaagaaacuaauguccaauaacguccagauaguccgucaacaguccuacucaaucaugugcauaauuaaagaagaaguacucgccuacgucguccaacuaccccucuauggagucaucgacacccccugcuggaaacuccacacaucaccccuaugcacaaccaacaccaaagaaggcuccaacaucugccucacaagaaccgaccgcggcugguacugcgacaacgcuggcuccgucucguucuucccacaagccgaaaccugcaaaguccaaucaaaccgggucuucugcgacaccaugaacucccucacucucccaagcgaagucaaccuaugcaacaucgacaucuucaacccaaaauacgacuguaaaaucaugacuucgaaaacagacgucuccucaucaguaaucacauccuuaggcgccaucguguccugcuacgguaagaccaaaugcacagccuccaacaaaugccggggcaucaucaaaaccuucagcaacgguugugauuacgucuccaacaaaggaguagacaccgucuccguaggaaacacccucuacuacgucaacaagcaagaaggccaaucccucuacgucaaaggggaacccaucaucaacuucuacgacccacucgucuuccccuccgacgaguucgacgcaagcaucucccaagucaacgaaaagaucaaccaaucacuagccuucauccgcaaauccgacgaacuccuccacaacguuaacguaggcaaauccaccaccaacaucaugaucacaaccaucaucauagucauaauagucauccuacuacuccucaucgccguaggucuauuccuauacuguaaagcucgaucaacccccgucacacucuccaaagaucaacucucaggaaucaacaacaucgccuucuccaacuaaggacuaguacuggcugcaucucccuuuccucuguccuccauccuucucccaggauggugaagggggaccugguacccagugauccccaccccaggauccuaaaucaugacuuaccugcuaauaaaaacucauuggaaaagugagaagaucuaaaaaaaaaaaaaaaaaaaaaaaaaaaaaaaaaaaaaaaaaaaaaaaaaaaaaaaaaaaaaaaaugcaucccccccccccccccccccccccccccccccaaaggcucuuuucagagccaccagaauu

SEQ ID NO: 19219 - RNA, 1982 nt, Artificial Sequence
  mRNA product Design c-4 comprising derived and/or modified sequence from HRSV(Memphis-37)__AIY60640.1__F_DSCav1_mut8 (opt1)
gggagaguccgcucagccagguugcagaagcggcuuagcguguguccuaaucuucucucugcguguagguaggccugugccgcaaacaagcuuaccauggagcugcccauccucaagaccaacgccaucaccacgauccuggccgcggugacccugugcuucgccagcucccagaacaucaccgaggaguucuaccagagcacgugcuccgccgucagcaagggcuaccucggcgcccugcgcaccgggugguacaccagcgugaucaccaucgagcuguccaacaucaaggagaucaagugcaacggcaccgacgccaaggugaagcucaucaagcaggagcuggacaaguacaagaacgcggucacggaccugcagcuccugaugcagagcaccccggccgccggcuccgggagcgcgaucgccuccggcaucgccgucugcaaggugcugcaccucgagggcgaggugaacaagaucaagaacgcccugcuguccaccaacaaggccgucgugagccucuccggcugcggggugagcguccugaccuucaaggugcuggaccucaagaacuacaucgacaagcagcugcugcccauccugaacaagcagagcugcuccauccccaacaucgagaccgucaucgaguuccagcagaagaacaaccgccuccuggagaucacgcgggaguucagcgugaacgcgggcgugaccacccccgucuccaccuacaugcugacgaacagcgagcuccugucccugaucaacgacaugccgaucaccaacgaccagaagaagcucaugagcaacaacgugcagaucgugcgccagcaguccuacagcaucaugugcaucaucaaggaggagguccuggccuacguggugcagcugccccucuacggggucaucgacacccccugcuggaagcugcacaccagcccccugugcacgaccaacaccaaggagggcuccaacaucugccucacccggacggaccgcgggugguacugcgacaacgccggcagcguguccuucuucccgcaggccgagaccugcaagguccagagcaaccggguguucugcgacaccaugaacucccugacccugcccagcgaggugaaccucugcaacaucgacaucuucaaccccaaguacgacugcaagaucaugacguccaagaccgacgucagcuccagcgugaucaccucccugggcgccaucgugagcugcuacgggaagaccaagugcacggcgagcaacaagugccgcggcaucaucaagaccuucuccaacgggugcgacuacgucagcaacaagggcguggacaccguguccgucggcaacacccuguacuacgugaacaagcaggagggccagagccucuacgugaagggggagcccaucaucaacuucuacgacccgcuggucuuccccuccgacgaguucgacgccagcaucucccaggugaacgagaagaucaaccagagccuggccuucauccggaaguccgacgagcuccugcacaacgugaacgucggcaagagcaccacgaacaucaugaucaccaccaucaucaucgugaucaucgugauccugcugcuccugaucgccgucgggcuguuccucuacugcaaggcccgcuccacccccgugacgcugagcaaggaccagcuguccgggaucaacaacaucgcguucagcaacugaggacuaguggaagcauuuuccuggcugauuaaaagaaauuacucagcuauggucaucuguuccuguuagaaggcuaugcagcauauuauauacuaugcgcauguuaugaaaugcauaauaaaaaauuuuaaaaaaucuaaaagaucuaaaaaaaaaaaaaaaaaaaaaaaaaaaaaaaaaaaaaaaaaaaaaaaaaaaaaaaaaaaaaaaaugcaucccccccccccccccccccccccccccccccaaaggcucuuuucagagccaccagaauu

SEQ ID NO: 19220 - RNA, 1982 nt, Artificial Sequence
  mRNA product Design c-4 comprising derived and/or modified sequence from HRSV(Memphis-37)__AIY60640.1__F_DSCav1_mut8 (opt1)
gggagaguccgcucagccagguugcagaagcggcuuagcguguguccuaaucuucucucugcguguagguaggccugugccgcaaacaagcuuaccauggagcugcccauccucaagaccaacgccaucaccacgauccuggccgcggugacccugugcuucgccagcucccagaacaucaccgaggaguucuaccagagcacgugcuccgccgucagcaagggcuaccucggggcccugcgcaccggcugguacaccuccgugaucaccaucgagcugagcaacaucaaggagaucaagugcaacgggaccgacgccaaggugaagcucaucaagcaggagcuggacaaguacaagaacgcggucacggaccugcagcuccugaugcaguccaccccggccgccggcagcggguccgccaucgcgagcggcaucgccgugugcaaggugcugcaccucgagggcgaggucaacaagaucaagaacgcccugcuguccaccaacaaggccguggugagccucuccgggugcggcgucagcgugcugaccuucaaggugcuggaccucaagaacuacaucgacaagcagcugcugcccauccucaacaagcaguccugcagcauccccaacaucgagacggucaucgaguuccagcagaagaacaaccggcugcuggagaucacccgcgaguucuccgugaacgccggggugaccacccccgucagcacguacaugcucaccaacuccgagcugcugagccucaucaacgacaugccgaucaccaacgaccagaagaagcugaugagcaacaacgugcagaucgugcggcagcaguccuacagcaucaugugcaucaucaaggaggagguccuggcguacguggugcagcucccccuguacggcgucaucgacacccccugcuggaagcugcacacgagcccccucugcaccaccaacaccaaggagggguccaacaucugccugacgcgcaccgaccggggcugguacugcgacaacgccggcuccgugagcuucuucccgcaggccgagaccugcaaggugcaguccaaccgcgucuucugcgacaccaugaacagccugacgcuccccuccgaggugaaccugugcaacaucgacaucuucaaccccaaguacgacugcaagaucaugaccagcaagaccgacgucuccagcuccgugaucaccagccugggggccaucguguccugcuacggcaagacgaagugcaccgccagcaacaagugccgggggaucaucaagaccuucuccaacggcugcgacuacgucagcaacaagggcguggacaccguguccgucgggaacacgcucuacuacgugaacaagcaggagggccagagccuguacgugaagggggagcccaucaucaacuucuacgacccgcuggucuuccccagcgacgaguucgacgcguccaucagccaggugaacgagaagaucaaccagucccucgccuucauccgcaagagcgacgagcugcugcacaacgugaacgucggcaaguccaccaccaacaucaugaucaccaccaucaucaucgugaucaucgugauccuccugcugcucaucgccgucgggcuguuccuguacugcaaggcccggagcacgcccgugacccuguccaaggaccagcucagcggcaucaacaacaucgccuucuccaacugaggacuaguggaagcauuuuccuggcugauuaaaagaaauuacucagcuauggucaucuguuccuguuagaaggcuaugcagcauauuauauacuaugcgcauguuaugaaaugcauaauaaaaaauuuuaaaaaaucuaaaagaucuaaaaaaaaaaaaaaaaaaaaaaaaaaaaaaaaaaaaaaaaaaaaaaaaaaaaaaaaaaaaaaaaugcaucccccccccccccccccccccccccccccccaaaggcucuuuucagagccaccagaauu

SEQ ID NO: 19221 - RNA, 1982 nt, Artificial Sequence
  mRNA product Design c-4 comprising derived and/or modified sequence from HRSV(Memphis-37)__AIY60640.1__F_DSCav1_mut8 (opt2)
gggagaguccgcucagccagguugcagaagcggcuuagcguguguccuaaucuucucucugcguguagguaggccugugccgcaaacaagcuuaccauggagcuccccauccucaagaccaacgccaucaccaccauccucgccgccgucacccucugcuucgccuccucccagaacaucaccgaggaguucuaccaguccaccugcuccgccgucuccaagggcuaccucggcgcccuccgcaccggcugguacaccuccgucaucaccaucgagcucuccaacaucaaggagaucaagugcaacggcaccgacgccaaggucaagcucaucaagcaggagcucgacaaguacaagaacgccgucaccgaccuccagcuccucaugcaguccacccccgccgccggcuccggcuccgccaucgccuccggcaucgccgucugcaagguccuccaccucgagggcgaggucaacaagaucaagaacgcccuccucuccaccaacaaggccgucgucucccucuccggcugcggcgucuccguccucaccuucaagguccucgaccucaagaacuacaucgacaagcagcuccuccccauccucaacaagcaguccugcuccauccccaacaucgagaccgucaucgaguuccagcagaagaacaaccgccuccucgagaucacccgcgaguucuccgucaacgccggcgucaccacccccgucuccaccuacaugcucaccaacuccgagcuccucucccucaucaacgacaugcccaucaccaacgaccagaagaagcucauguccaacaacguccagaucguccgccagcaguccuacuccaucaugugcaucaucaaggaggagguccucgccuacgucguccagcucccccucuacggcgucaucgacacccccugcuggaagcuccacaccuccccccucugcaccaccaacaccaaggagggcuccaacaucugccucacccgcaccgaccgcggcugguacugcgacaacgccggcuccgucuccuucuucccccaggccgagaccugcaagguccaguccaaccgcgucuucugcgacaccaugaacucccucacccuccccuccgaggucaaccucugcaacaucgacaucuucaaccccaaguacgacugcaagaucaugaccuccaagaccgacgucuccuccuccgucaucaccucccucggcgccaucgucuccugcuacggcaagaccaagugcaccgccuccaacaagugccgcggcaucaucaagaccuucuccaacggcugcgacuacgucuccaacaagggcgucgacaccgucuccgucggcaacacccucuacuacgucaacaagcaggagggccagucccucuacgucaagggcgagcccaucaucaacuucuacgacccccucgucuuccccuccgacgaguucgacgccuccaucucccaggucaacgagaagaucaaccagucccucgccuucauccgcaaguccgacgagcuccuccacaacgucaacgucggcaaguccaccaccaacaucaugaucaccaccaucaucaucgucaucaucgucauccuccuccuccucaucgccgucggccucuuccucuacugcaaggcccgcuccacccccgucacccucuccaaggaccagcucuccggcaucaacaacaucgccuucuccaacugaggacuaguggaagcauuuuccuggcugauuaaaagaaauuacucagcuauggucaucuguuccuguuagaaggcuaugcagcauauuauauacuaugcgcauguuaugaaaugcauaauaaaaaauuuuaaaaaaucuaaaagaucuaaaaaaaaaaaaaaaaaaaaaaaaaaaaaaaaaaaaaaaaaaaaaaaaaaaaaaaaaaaaaaaaugcaucccccccccccccccccccccccccccccccaaaggcucuuuucagagccaccagaauu

SEQ ID NO: 19222 - RNA, 1982 nt, Artificial Sequence
  mRNA product Design c-4 comprising derived and/or modified sequence from HRSV(Memphis-37)__AIY60640.1__F_DSCav1_mut8 (opt3)
gggagaguccgcucagccagguugcagaagcggcuuagcguguguccuaaucuucucucugcguguagguaggccugugccgcaaacaagcuuaccauggagcugcccauccucaagaccaacgccauuacaacuauacuugcugcagugacgcugugcuucgccagcucccagaauaucaccgaagaguuuuaccaaucuacauguucagcggucaguaaaggcuauuugggggcuuuaagaacuggaugguacaccagcguuauuacaaucgaacuguccaacauuaaggagaucaaaugcaaugguaccgacgccaaggugaaacuaauaaagcaggaacucgauaaguauaaaaacgcaguaacugaccugcagcuucugaugcagucuacuccugccgcuggcucggggucagcaaucgccagcggaauugcuguguguaaggucuugcaccucgagggcgaggugaauaaaaucaagaacgcccugcugaguaccaauaaagcgguugugucccucucugguugcggggucagcguguuaacguucaagguacuggaucuuaagaacuacauugacaaacaauugcugccaauccuaaauaagcaguccuguucaauaccgaacauugaaacuguuaucgaguuucagcagaaaaauaacaggcuccuggaaauuacccgggaguucagugugaaugcaggagucacaacucccgugagcaccuauaugcuuacaaacucugagcuguugucccucaucaaugauaugccuaucaccaacgaccaaaagaaacugaugucaaacaaugugcagauuguccgccagcagagcuacaguauaaugugcaucauuaaggaagagguuuuagccuaugugguacaacugccacucuacggcgugaucgauacgcccuguuggaaacuucauacuucuccucugugcacaaccaacacuaaggaaggcuccaauauauguuugacacgaaccgaccgugggugguacugcgauaacgcuggaagcgucucguuuuucccacaggccgagacguguaaggugcagucuaauagaguuuucugcgacaccaugaacucccuaacacugcccucagaagugaaucucugcaacauugauaucuucaauccuaaauaugacuguaagaucaugacaaguaaaaccgaugucagcuccucugugauuacaagccugggugcaaucguaucaugcuacggcaagacuaaauguaccgcuaguaacaagugcagggggauuauaaagacauuuuccaauggaugugacuauguuagcaacaaaggcguggacaccgucucuguggguaauacucuuuacuaugucaacaagcaagaggggcagucacuguacgugaaaggagagccaaucauuaauuucuaugauccguugguuuuucccagugacgaauuugaugccagcaucucccaggugaacgagaagaucaaccagucucucgcguuuauucggaaaucggacgaacuguuacacaauguaaacgucggcaagagcacgacaaauauaaugaucaccacuauuaucauugugaucauaguuauccugcuacuccugauugccgugggccuuuucuuguacugcaaggcacgcuccaccccugucacacugucaaaagaucaacucagugggaucaacaauauugcuuucucuaacugaggacuaguggaagcauuuuccuggcugauuaaaagaaauuacucagcuauggucaucuguuccuguuagaaggcuaugcagcauauuauauacuaugcgcauguuaugaaaugcauaauaaaaaauuuuaaaaaaucuaaaagaucuaaaaaaaaaaaaaaaaaaaaaaaaaaaaaaaaaaaaaaaaaaaaaaaaaaaaaaaaaaaaaaaaugcaucccccccccccccccccccccccccccccccaaaggcucuuuucagagccaccagaauu

SEQ ID NO: 19223 - RNA, 1982 nt, Artificial Sequence
  mRNA product Design c-4 comprising derived and/or modified sequence from HRSV(Memphis-37)__AIY60640.1__F_DSCav1_mut8 (opt4)
gggagaguccgcucagccagguugcagaagcggcuuagcguguguccuaaucuucucucugcguguagguaggccugugccgcaaacaagcuuaccauggagcugcccauccugaagaccaacgccaucaccaccauccuggccgccgugacccugugcuucgccagcagccagaacaucaccgaggaguucuaccagagcaccugcagcgccgugagcaagggcuaccugggcgcccugagaaccggcugguacaccagcgugaucaccaucgagcugagcaacaucaaggagaucaagugcaacggcaccgacgccaaggugaagcugaucaagcaggagcuggacaaguacaagaacgccgugaccgaccugcagcugcugaugcagagcacccccgccgccggcagcggcagcgccaucgccagcggcaucgccgugugcaaggugcugcaccuggagggcgaggugaacaagaucaagaacgcccugcugagcaccaacaaggccguggugagccugagcggcugcggcgugagcgugcugaccuucaaggugcuggaccugaagaacuacaucgacaagcagcugcugcccauccugaacaagcagagcugcagcauccccaacaucgagaccgugaucgaguuccagcagaagaacaacagacugcuggagaucaccagagaguucagcgugaacgccggcgugaccacccccgugagcaccuacaugcugaccaacagcgagcugcugagccugaucaacgacaugcccaucaccaacgaccagaagaagcugaugagcaacaacgugcagaucgugagacagcagagcuacagcaucaugugcaucaucaaggaggaggugcuggccuacguggugcagcugccccuguacggcgugaucgacacccccugcuggaagcugcacaccagcccccugugcaccaccaacaccaaggagggcagcaacaucugccugaccagaaccgacagaggcugguacugcgacaacgccggcagcgugagcuucuucccccaggccgagaccugcaaggugcagagcaacagaguguucugcgacaccaugaacagccugacccugcccagcgaggugaaccugugcaacaucgacaucuucaaccccaaguacgacugcaagaucaugaccagcaagaccgacgugagcagcagcgugaucaccagccugggcgccaucgugagcugcuacggcaagaccaagugcaccgccagcaacaagugcagaggcaucaucaagaccuucagcaacggcugcgacuacgugagcaacaagggcguggacaccgugagcgugggcaacacccuguacuacgugaacaagcaggagggccagagccuguacgugaagggcgagcccaucaucaacuucuacgacccccugguguuccccagcgacgaguucgacgccagcaucagccaggugaacgagaagaucaaccagagccuggccuucaucagaaagagcgacgagcugcugcacaacgugaacgugggcaagagcaccaccaacaucaugaucaccaccaucaucaucgugaucaucgugauccugcugcugcugaucgccgugggccuguuccuguacugcaaggccagaagcacccccgugacccugagcaaggaccagcugagcggcaucaacaacaucgccuucagcaacugaggacuaguggaagcauuuuccuggcugauuaaaagaaauuacucagcuauggucaucuguuccuguuagaaggcuaugcagcauauuauauacuaugcgcauguuaugaaaugcauaauaaaaaauuuuaaaaaaucuaaaagaucuaaaaaaaaaaaaaaaaaaaaaaaaaaaaaaaaaaaaaaaaaaaaaaaaaaaaaaaaaaaaaaaaugcaucccccccccccccccccccccccccccccccaaaggcucuuuucagagccaccagaauu

SEQ ID NO: 19224 - RNA, 1982 nt, Artificial Sequence
  mRNA product Design c-4 comprising derived and/or modified sequence from HRSV(Memphis-37)__AIY60640.1__F_DSCav1_mut8 (opt5)
gggagaguccgcucagccagguugcagaagcggcuuagcguguguccuaaucuucucucugcguguagguaggccugugccgcaaacaagcuuaccauggagcugcccauccucaagaccaacgccauuacaacgauccuggcugccgugacccuuugcuucgcgagcucccagaauauuacagaagaguuuuaccaaucuaccuguagcgcugucuccaaaggcuaucugggggcccucagaacaggaugguacaccucuguuaucacaauugaacugagcaacaucaaggagaucaaaugcaauggcaccgacgccaaggugaaacuuauuaagcaggaacuggauaaguauaaaaacgcugugacggaccuccagcugcugaugcaguccaccccugccgcugggucuggaagcgccaucgcguccggcauugccgucuguaaggugcuccaccuggagggggagguuaauaaaaucaagaacgcccuucugagcacaaauaaagcuguggucucucucuccggaugcggcgugagcguucugaccuucaaggugcuugaucugaagaacuacauugacaaacaacuccugccgauccugaauaagcagucuuguuccauucccaacaucgaaacagucaucgaguuucagcagaaaaauaaccggcuccuggaaauuacccgcgaguucagcgugaaugcuggcgugacgacaccugucucuaccuauaugcuuacaaacuccgagcugcucagccugaucaaugauaugcccauuaccaacgaccaaaagaaacuuauguccaacaauguucagaucgugagacagcagucuuacagcauuaugugcaucaucaaggaagaggugcuggccuaugucgugcaacucccucuguacgggguuauugauacccccuguuggaaacugcauacauccccucucugcacgaccaacacaaaggaaggaagcaauaucugucugacccggacagaccgcggcugguacugcgauaacgcggggucuguguccuuuuucccgcaggccgagaccuguaagguccagagcaauagaguguuuugcgacacgaugaacucucuuacacugcccagcgaaguuaaucucugcaacauugauaucuucaauccuaaauaugacuguaagauuaugaccuccaaaaccgaugugucuagcuccgucaucacaagccugggagcuaucgugucuugcuacggcaagaccaaauguacagccuccaacaagugccgggggauuaucaagacguuuagcaauggaugugacuaugucucuaacaaaggcguggacaccguuuccgugggcaauacacuuuacuaugucaacaagcaagaggggcagagccuguacgugaaaggagagcccauuaucaauuucuaugauccucucguuuuucccuccgacgaguucgaugcuucuauuagccaggugaacgaaaagaucaaccagucccuggccuuuauucgcaaaucugacgaacugcuccacaaugucaacgugggcaagagcaccacaaauaucaugaucaccacgauuaucauugugaucauuguuauccugcuucugcucaucgccgucgggcuguuccuguacugcaaggcuagauccaccccggugacacuuagcaaagaucaacucucuggaauuaacaauaucgcguucuccaacugaggacuaguggaagcauuuuccuggcugauuaaaagaaauuacucagcuauggucaucuguuccuguuagaaggcuaugcagcauauuauauacuaugcgcauguuaugaaaugcauaauaaaaaauuuuaaaaaaucuaaaagaucuaaaaaaaaaaaaaaaaaaaaaaaaaaaaaaaaaaaaaaaaaaaaaaaaaaaaaaaaaaaaaaaaugcaucccccccccccccccccccccccccccccccaaaggcucuuuucagagccaccagaauu

SEQ ID NO: 19225 - RNA, 1982 nt, Artificial Sequence
  mRNA product Design c-4 comprising derived and/or modified sequence from HRSV(Memphis-37)__AIY60640.1__F_DSCav1_mut8 (opt6)
gggagaguccgcucagccagguugcagaagcggcuuagcguguguccuaaucuucucucugcguguagguaggccugugccgcaaacaagcuuaccauggaacuuccuauuuuaaaaacaaacgcaauuacaaccauauuagcagcaguaacacuaugcuuugcaucaucacaaaacaucaccgaagaauuuuaucaauccacaugcucagcaguaucaaaaggauaccuuggcgcacuccgaacaggcugguauacaucggucauaacuauagaacucuccaacauaaaagaaauaaaaugcaaugguacugacgcaaaaguaaaauuaauaaaacaagaacuagacaaauacaaaaacgcaguaaccgauuuacaacuacuuaugcaaucaacaccugcagcaggaagcggaucagcaauagcaaguggaauagcaguaugcaaaguacuucaccucgaaggagaaguaaauaaaauaaaaaacgccuuacuaucaacaaauaaagccgucguaucacuuuccgguugcggcguaucaguauuaaccuuuaaagucuuagacuuaaaaaacuacauagacaaacaauuauuaccaauacuaaacaaacaauccuguuccauacccaacauagaaaccguaauagaauuucaacaaaaaaacaacagacuauuagaaauaacacgcgaauuuucaguaaacgcaggcguaacaacaccaguaucaacauauauguuaaccaauucagaauuauuaucccuuauaaaugacaugccuauaacaaacgaccaaaaaaaauuaaugaguaacaacguucaaauaguaagacaacaaucauacagcauaaugugcauaauaaaagaagaaguacuagcauacguaguucaacuaccacucuauggcguuaucgacaccccaugcuggaaacuacauaccucaccacucuguaccacuaauacgaaagaaggaucuaacauaugccuaaccagaacagaucgagguugguauugcgacaaugcuggaucaguaucauucuucccacaagcagaaaccugcaaaguacaaagcaacagaguauuuugugacacuaugaacucacuaacgcuaccuucagaaguaaaccuaugcaacaucgacauauucaacccaaaauacgauugcaaaauaaugacaucaaaaacagacguuuccucaucaguaauaacaucauuaggagcaauaguauccugcuacgguaaaaccaaaugcacagcauccaauaaaugccgaggaaucauuaaaacauuuucaaauggcugcgacuauguaaguaauaaagguguagauacaguaucaguaggcaacacacuauauuacguaaacaaacaagaagggcaaucccuauaugucaaaggcgaaccaauuauaaacuucuacgacccccucguauucccaucagacgaauuugacgcaucaauaucccaaguaaacgaaaaaaucaaccaaucacucgcauucauacguaaauccgacgaauuacuacauaacguaaacguaggcaaaucaacaacaaauauaaugauaacaaccauaaucauaguaauaauaguuauacuccuacuacucauugcagucggccuauuucuauacuguaaagcacgcucuacaccaguaacacuaucuaaagaucaauuauccggaauaaacaacauugccuucuccaauuaaggacuaguggaagcauuuuccuggcugauuaaaagaaauuacucagcuauggucaucuguuccuguuagaaggcuaugcagcauauuauauacuaugcgcauguuaugaaaugcauaauaaaaaauuuuaaaaaaucuaaaagaucuaaaaaaaaaaaaaaaaaaaaaaaaaaaaaaaaaaaaaaaaaaaaaaaaaaaaaaaaaaaaaaaaugcaucccccccccccccccccccccccccccccccaaaggcucuuuucagagccaccagaauu

SEQ ID NO: 19226 - RNA, 1982 nt, Artificial Sequence
  mRNA product Design c-4 comprising derived and/or modified sequence from HRSV(Memphis-37)__AIY60640.1__F_DSCav1_mut8 (opt11)
gggagaguccgcucagccagguugcagaagcggcuuagcguguguccuaaucuucucucugcguguagguaggccugugccgcaaacaagcuuaccauggaacuucccauccugaagaccaacgcuaucacaaccauccucgccgcagucacccuuugcuucgccucaucccaaaacaucaccgaagaauuuuaccagucaaccugcucggccgucuccaagggcuaccucggcgcccuccgcacuggcugguacacauccgucaucaccaucgaacucuccaacauaaaagaaauaaaaugcaacggaaccgacgccaaagucaaacucaucaaacaagaacuagauaaauauaaaaacgccgucaccgaccugcaacuccucaugcaauccaccccagccgccggcucuggcagcgccaucgcaagcggaaucgccgucugcaaaguccuccaccuagaaggcgaagucaacaaaauuaaaaacgcccuccucuccaccaacaaagcaguugucucccucucuggcugcggagucucuguacucaccuucaaaguacuagaccucaagaauuacauagacaaacaacuccugcccauccuuaacaaacaaaguuguaguauccccaacaucgaaacaguaaucgaauuucagcagaaaaacaaccgccuccucgaaaucacacgagaguucucggucaacgccggcgucaccacccccguaucaaccuacaugcuaacaaacuccgaacuacuuucccucaucaaugacaugcccauaaccaacgaccaaaagaaacuaauguccaauaacguccagauaguccgucaacaguccuacucaaucaugugcauaauuaaagaagaaguacucgccuacgucguccaacuaccccucuauggagucaucgacacccccugcuggaaacuccacacaucaccccuaugcacaaccaacaccaaagaaggcuccaacaucugccucacaagaaccgaccgcggcugguacugcgacaacgcuggcuccgucucguucuucccacaagccgaaaccugcaaaguccaaucaaaccgggucuucugcgacaccaugaacucccucacucucccaagcgaagucaaccuaugcaacaucgacaucuucaacccaaaauacgacuguaaaaucaugacuucgaaaacagacgucuccucaucaguaaucacauccuuaggcgccaucguguccugcuacgguaagaccaaaugcacagccuccaacaaaugccggggcaucaucaaaaccuucagcaacgguugugauuacgucuccaacaaaggaguagacaccgucuccguaggaaacacccucuacuacgucaacaagcaagaaggccaaucccucuacgucaaaggggaacccaucaucaacuucuacgacccacucgucuuccccuccgacgaguucgacgcaagcaucucccaagucaacgaaaagaucaaccaaucacuagccuucauccgcaaauccgacgaacuccuccacaacguuaacguaggcaaauccaccaccaacaucaugaucacaaccaucaucauagucauaauagucauccuacuacuccucaucgccguaggucuauuccuauacuguaaagcucgaucaacccccgucacacucuccaaagaucaacucucaggaaucaacaacaucgccuucuccaacuaaggacuaguggaagcauuuuccuggcugauuaaaagaaauuacucagcuauggucaucuguuccuguuagaaggcuaugcagcauauuauauacuaugcgcauguuaugaaaugcauaauaaaaaauuuuaaaaaaucuaaaagaucuaaaaaaaaaaaaaaaaaaaaaaaaaaaaaaaaaaaaaaaaaaaaaaaaaaaaaaaaaaaaaaaaugcaucccccccccccccccccccccccccccccccaaaggcucuuuucagagccaccagaauu

SEQ ID NO: 19227 - RNA, 1900 nt, Artificial Sequence
  mRNA product Design c-5 comprising derived and/or modified sequence from HRSV(Memphis-37)__AIY60640.1__F_DSCav1_mut8 (opt1)
gggagagcggcucggccauuuugucccagucaguccggaggcugcggcugcagaaguaccgccugcggaguaacugcaaagaagcuuaccauggagcugcccauccucaagaccaacgccaucaccacgauccuggccgcggugacccugugcuucgccagcucccagaacaucaccgaggaguucuaccagagcacgugcuccgccgucagcaagggcuaccucggcgcccugcgcaccgggugguacaccagcgugaucaccaucgagcuguccaacaucaaggagaucaagugcaacggcaccgacgccaaggugaagcucaucaagcaggagcuggacaaguacaagaacgcggucacggaccugcagcuccugaugcagagcaccccggccgccggcuccgggagcgcgaucgccuccggcaucgccgucugcaaggugcugcaccucgagggcgaggugaacaagaucaagaacgcccugcuguccaccaacaaggccgucgugagccucuccggcugcggggugagcguccugaccuucaaggugcuggaccucaagaacuacaucgacaagcagcugcugcccauccugaacaagcagagcugcuccauccccaacaucgagaccgucaucgaguuccagcagaagaacaaccgccuccuggagaucacgcgggaguucagcgugaacgcgggcgugaccacccccgucuccaccuacaugcugacgaacagcgagcuccugucccugaucaacgacaugccgaucaccaacgaccagaagaagcucaugagcaacaacgugcagaucgugcgccagcaguccuacagcaucaugugcaucaucaaggaggagguccuggccuacguggugcagcugccccucuacggggucaucgacacccccugcuggaagcugcacaccagcccccugugcacgaccaacaccaaggagggcuccaacaucugccucacccggacggaccgcgggugguacugcgacaacgccggcagcguguccuucuucccgcaggccgagaccugcaagguccagagcaaccggguguucugcgacaccaugaacucccugacccugcccagcgaggugaaccucugcaacaucgacaucuucaaccccaaguacgacugcaagaucaugacguccaagaccgacgucagcuccagcgugaucaccucccugggcgccaucgugagcugcuacgggaagaccaagugcacggcgagcaacaagugccgcggcaucaucaagaccuucuccaacgggugcgacuacgucagcaacaagggcguggacaccguguccgucggcaacacccuguacuacgugaacaagcaggagggccagagccucuacgugaagggggagcccaucaucaacuucuacgacccgcuggucuuccccuccgacgaguucgacgccagcaucucccaggugaacgagaagaucaaccagagccuggccuucauccggaaguccgacgagcuccugcacaacgugaacgucggcaagagcaccacgaacaucaugaucaccaccaucaucaucgugaucaucgugauccugcugcuccugaucgccgucgggcuguuccucuacugcaaggcccgcuccacccccgugacgcugagcaaggaccagcuguccgggaucaacaacaucgcguucagcaacugaggacuagucccuguucccagagcccacuuuuuuuucuuuuuuugaaauaaaauagccugucuuucagaucuaaaaaaaaaaaaaaaaaaaaaaaaaaaaaaaaaaaaaaaaaaaaaaaaaaaaaaaaaaaaaaaaugcaucccccccccccccccccccccccccccccccaaaggcucuuuucagagccaccagaauu

SEQ ID NO: 19228 - RNA, 1900 nt, Artificial Sequence
  mRNA product Design c-5 comprising derived and/or modified sequence from HRSV(Memphis-37)__AIY60640.1__F_DSCav1_mut8 (opt1)
gggagagcggcucggccauuuugucccagucaguccggaggcugcggcugcagaaguaccgccugcggaguaacugcaaagaagcuuaccauggagcugcccauccucaagaccaacgccaucaccacgauccuggccgcggugacccugugcuucgccagcucccagaacaucaccgaggaguucuaccagagcacgugcuccgccgucagcaagggcuaccucggggcccugcgcaccggcugguacaccuccgugaucaccaucgagcugagcaacaucaaggagaucaagugcaacgggaccgacgccaaggugaagcucaucaagcaggagcuggacaaguacaagaacgcggucacggaccugcagcuccugaugcaguccaccccggccgccggcagcggguccgccaucgcgagcggcaucgccgugugcaaggugcugcaccucgagggcgaggucaacaagaucaagaacgcccugcuguccaccaacaaggccguggugagccucuccgggugcggcgucagcgugcugaccuucaaggugcuggaccucaagaacuacaucgacaagcagcugcugcccauccucaacaagcaguccugcagcauccccaacaucgagacggucaucgaguuccagcagaagaacaaccggcugcuggagaucacccgcgaguucuccgugaacgccggggugaccacccccgucagcacguacaugcucaccaacuccgagcugcugagccucaucaacgacaugccgaucaccaacgaccagaagaagcugaugagcaacaacgugcagaucgugcggcagcaguccuacagcaucaugugcaucaucaaggaggagguccuggcguacguggugcagcucccccuguacggcgucaucgacacccccugcuggaagcugcacacgagcccccucugcaccaccaacaccaaggagggguccaacaucugccugacgcgcaccgaccggggcugguacugcgacaacgccggcuccgugagcuucuucccgcaggccgagaccugcaaggugcaguccaaccgcgucuucugcgacaccaugaacagccugacgcuccccuccgaggugaaccugugcaacaucgacaucuucaaccccaaguacgacugcaagaucaugaccagcaagaccgacgucuccagcuccgugaucaccagccugggggccaucguguccugcuacggcaagacgaagugcaccgccagcaacaagugccgggggaucaucaagaccuucuccaacggcugcgacuacgucagcaacaagggcguggacaccguguccgucgggaacacgcucuacuacgugaacaagcaggagggccagagccuguacgugaagggggagcccaucaucaacuucuacgacccgcuggucuuccccagcgacgaguucgacgcguccaucagccaggugaacgagaagaucaaccagucccucgccuucauccgcaagagcgacgagcugcugcacaacgugaacgucggcaaguccaccaccaacaucaugaucaccaccaucaucaucgugaucaucgugauccuccugcugcucaucgccgucgggcuguuccuguacugcaaggcccggagcacgcccgugacccuguccaaggaccagcucagcggcaucaacaacaucgccuucuccaacugaggacuagucccuguucccagagcccacuuuuuuuucuuuuuuugaaauaaaauagccugucuuucagaucuaaaaaaaaaaaaaaaaaaaaaaaaaaaaaaaaaaaaaaaaaaaaaaaaaaaaaaaaaaaaaaaaugcaucccccccccccccccccccccccccccccccaaaggcucuuuucagagccaccagaauu

SEQ ID NO: 19229 - RNA, 1900 nt, Artificial Sequence
  mRNA product Design c-5 comprising derived and/or modified sequence from HRSV(Memphis-37)__AIY60640.1__F_DSCav1_mut8 (opt2)
gggagagcggcucggccauuuugucccagucaguccggaggcugcggcugcagaaguaccgccugcggaguaacugcaaagaagcuuaccauggagcuccccauccucaagaccaacgccaucaccaccauccucgccgccgucacccucugcuucgccuccucccagaacaucaccgaggaguucuaccaguccaccugcuccgccgucuccaagggcuaccucggcgcccuccgcaccggcugguacaccuccgucaucaccaucgagcucuccaacaucaaggagaucaagugcaacggcaccgacgccaaggucaagcucaucaagcaggagcucgacaaguacaagaacgccgucaccgaccuccagcuccucaugcaguccacccccgccgccggcuccggcuccgccaucgccuccggcaucgccgucugcaagguccuccaccucgagggcgaggucaacaagaucaagaacgcccuccucuccaccaacaaggccgucgucucccucuccggcugcggcgucuccguccucaccuucaagguccucgaccucaagaacuacaucgacaagcagcuccuccccauccucaacaagcaguccugcuccauccccaacaucgagaccgucaucgaguuccagcagaagaacaaccgccuccucgagaucacccgcgaguucuccgucaacgccggcgucaccacccccgucuccaccuacaugcucaccaacuccgagcuccucucccucaucaacgacaugcccaucaccaacgaccagaagaagcucauguccaacaacguccagaucguccgccagcaguccuacuccaucaugugcaucaucaaggaggagguccucgccuacgucguccagcucccccucuacggcgucaucgacacccccugcuggaagcuccacaccuccccccucugcaccaccaacaccaaggagggcuccaacaucugccucacccgcaccgaccgcggcugguacugcgacaacgccggcuccgucuccuucuucccccaggccgagaccugcaagguccaguccaaccgcgucuucugcgacaccaugaacucccucacccuccccuccgaggucaaccucugcaacaucgacaucuucaaccccaaguacgacugcaagaucaugaccuccaagaccgacgucuccuccuccgucaucaccucccucggcgccaucgucuccugcuacggcaagaccaagugcaccgccuccaacaagugccgcggcaucaucaagaccuucuccaacggcugcgacuacgucuccaacaagggcgucgacaccgucuccgucggcaacacccucuacuacgucaacaagcaggagggccagucccucuacgucaagggcgagcccaucaucaacuucuacgacccccucgucuuccccuccgacgaguucgacgccuccaucucccaggucaacgagaagaucaaccagucccucgccuucauccgcaaguccgacgagcuccuccacaacgucaacgucggcaaguccaccaccaacaucaugaucaccaccaucaucaucgucaucaucgucauccuccuccuccucaucgccgucggccucuuccucuacugcaaggcccgcuccacccccgucacccucuccaaggaccagcucuccggcaucaacaacaucgccuucuccaacugaggacuagucccuguucccagagcccacuuuuuuuucuuuuuuugaaauaaaauagccugucuuucagaucuaaaaaaaaaaaaaaaaaaaaaaaaaaaaaaaaaaaaaaaaaaaaaaaaaaaaaaaaaaaaaaaaugcaucccccccccccccccccccccccccccccccaaaggcucuuuucagagccaccagaauu

SEQ ID NO: 19230 - RNA, 1900 nt, Artificial Sequence
  mRNA product Design c-5 comprising derived and/or modified sequence from HRSV(Memphis-37)__AIY60640.1__F_DSCav1_mut8 (opt3)
gggagagcggcucggccauuuugucccagucaguccggaggcugcggcugcagaaguaccgccugcggaguaacugcaaagaagcuuaccauggagcugcccauccucaagaccaacgccauuacaacuauacuugcugcagugacgcugugcuucgccagcucccagaauaucaccgaagaguuuuaccaaucuacauguucagcggucaguaaaggcuauuugggggcuuuaagaacuggaugguacaccagcguuauuacaaucgaacuguccaacauuaaggagaucaaaugcaaugguaccgacgccaaggugaaacuaauaaagcaggaacucgauaaguauaaaaacgcaguaacugaccugcagcuucugaugcagucuacuccugccgcuggcucggggucagcaaucgccagcggaauugcuguguguaaggucuugcaccucgagggcgaggugaauaaaaucaagaacgcccugcugaguaccaauaaagcgguugugucccucucugguugcggggucagcguguuaacguucaagguacuggaucuuaagaacuacauugacaaacaauugcugccaauccuaaauaagcaguccuguucaauaccgaacauugaaacuguuaucgaguuucagcagaaaaauaacaggcuccuggaaauuacccgggaguucagugugaaugcaggagucacaacucccgugagcaccuauaugcuuacaaacucugagcuguugucccucaucaaugauaugccuaucaccaacgaccaaaagaaacugaugucaaacaaugugcagauuguccgccagcagagcuacaguauaaugugcaucauuaaggaagagguuuuagccuaugugguacaacugccacucuacggcgugaucgauacgcccuguuggaaacuucauacuucuccucugugcacaaccaacacuaaggaaggcuccaauauauguuugacacgaaccgaccgugggugguacugcgauaacgcuggaagcgucucguuuuucccacaggccgagacguguaaggugcagucuaauagaguuuucugcgacaccaugaacucccuaacacugcccucagaagugaaucucugcaacauugauaucuucaauccuaaauaugacuguaagaucaugacaaguaaaaccgaugucagcuccucugugauuacaagccugggugcaaucguaucaugcuacggcaagacuaaauguaccgcuaguaacaagugcagggggauuauaaagacauuuuccaauggaugugacuauguuagcaacaaaggcguggacaccgucucuguggguaauacucuuuacuaugucaacaagcaagaggggcagucacuguacgugaaaggagagccaaucauuaauuucuaugauccguugguuuuucccagugacgaauuugaugccagcaucucccaggugaacgagaagaucaaccagucucucgcguuuauucggaaaucggacgaacuguuacacaauguaaacgucggcaagagcacgacaaauauaaugaucaccacuauuaucauugugaucauaguuauccugcuacuccugauugccgugggccuuuucuuguacugcaaggcacgcuccaccccugucacacugucaaaagaucaacucagugggaucaacaauauugcuuucucuaacugaggacuagucccuguucccagagcccacuuuuuuuucuuuuuuugaaauaaaauagccugucuuucagaucuaaaaaaaaaaaaaaaaaaaaaaaaaaaaaaaaaaaaaaaaaaaaaaaaaaaaaaaaaaaaaaaaugcaucccccccccccccccccccccccccccccccaaaggcucuuuucagagccaccagaauu

SEQ ID NO: 19231 - RNA, 1900 nt, Artificial Sequence
  mRNA product Design c-5 comprising derived and/or modified sequence from HRSV(Memphis-37)__AIY60640.1__F_DSCav1_mut8 (opt4)
gggagagcggcucggccauuuugucccagucaguccggaggcugcggcugcagaaguaccgccugcggaguaacugcaaagaagcuuaccauggagcugcccauccugaagaccaacgccaucaccaccauccuggccgccgugacccugugcuucgccagcagccagaacaucaccgaggaguucuaccagagcaccugcagcgccgugagcaagggcuaccugggcgcccugagaaccggcugguacaccagcgugaucaccaucgagcugagcaacaucaaggagaucaagugcaacggcaccgacgccaaggugaagcugaucaagcaggagcuggacaaguacaagaacgccgugaccgaccugcagcugcugaugcagagcacccccgccgccggcagcggcagcgccaucgccagcggcaucgccgugugcaaggugcugcaccuggagggcgaggugaacaagaucaagaacgcccugcugagcaccaacaaggccguggugagccugagcggcugcggcgugagcgugcugaccuucaaggugcuggaccugaagaacuacaucgacaagcagcugcugcccauccugaacaagcagagcugcagcauccccaacaucgagaccgugaucgaguuccagcagaagaacaacagacugcuggagaucaccagagaguucagcgugaacgccggcgugaccacccccgugagcaccuacaugcugaccaacagcgagcugcugagccugaucaacgacaugcccaucaccaacgaccagaagaagcugaugagcaacaacgugcagaucgugagacagcagagcuacagcaucaugugcaucaucaaggaggaggugcuggccuacguggugcagcugccccuguacggcgugaucgacacccccugcuggaagcugcacaccagcccccugugcaccaccaacaccaaggagggcagcaacaucugccugaccagaaccgacagaggcugguacugcgacaacgccggcagcgugagcuucuucccccaggccgagaccugcaaggugcagagcaacagaguguucugcgacaccaugaacagccugacccugcccagcgaggugaaccugugcaacaucgacaucuucaaccccaaguacgacugcaagaucaugaccagcaagaccgacgugagcagcagcgugaucaccagccugggcgccaucgugagcugcuacggcaagaccaagugcaccgccagcaacaagugcagaggcaucaucaagaccuucagcaacggcugcgacuacgugagcaacaagggcguggacaccgugagcgugggcaacacccuguacuacgugaacaagcaggagggccagagccuguacgugaagggcgagcccaucaucaacuucuacgacccccugguguuccccagcgacgaguucgacgccagcaucagccaggugaacgagaagaucaaccagagccuggccuucaucagaaagagcgacgagcugcugcacaacgugaacgugggcaagagcaccaccaacaucaugaucaccaccaucaucaucgugaucaucgugauccugcugcugcugaucgccgugggccuguuccuguacugcaaggccagaagcacccccgugacccugagcaaggaccagcugagcggcaucaacaacaucgccuucagcaacugaggacuagucccuguucccagagcccacuuuuuuuucuuuuuuugaaauaaaauagccugucuuucagaucuaaaaaaaaaaaaaaaaaaaaaaaaaaaaaaaaaaaaaaaaaaaaaaaaaaaaaaaaaaaaaaaaugcaucccccccccccccccccccccccccccccccaaaggcucuuuucagagccaccagaauu

SEQ ID NO: 19232 - RNA, 1900 nt, Artificial Sequence
  mRNA product Design c-5 comprising derived and/or modified sequence from HRSV(Memphis-37)__AIY60640.1__F_DSCav1_mut8 (opt5)
gggagagcggcucggccauuuugucccagucaguccggaggcugcggcugcagaaguaccgccugcggaguaacugcaaagaagcuuaccauggagcugcccauccucaagaccaacgccauuacaacgauccuggcugccgugacccuuugcuucgcgagcucccagaauauuacagaagaguuuuaccaaucuaccuguagcgcugucuccaaaggcuaucugggggcccucagaacaggaugguacaccucuguuaucacaauugaacugagcaacaucaaggagaucaaaugcaauggcaccgacgccaaggugaaacuuauuaagcaggaacuggauaaguauaaaaacgcugugacggaccuccagcugcugaugcaguccaccccugccgcugggucuggaagcgccaucgcguccggcauugccgucuguaaggugcuccaccuggagggggagguuaauaaaaucaagaacgcccuucugagcacaaauaaagcuguggucucucucuccggaugcggcgugagcguucugaccuucaaggugcuugaucugaagaacuacauugacaaacaacuccugccgauccugaauaagcagucuuguuccauucccaacaucgaaacagucaucgaguuucagcagaaaaauaaccggcuccuggaaauuacccgcgaguucagcgugaaugcuggcgugacgacaccugucucuaccuauaugcuuacaaacuccgagcugcucagccugaucaaugauaugcccauuaccaacgaccaaaagaaacuuauguccaacaauguucagaucgugagacagcagucuuacagcauuaugugcaucaucaaggaagaggugcuggccuaugucgugcaacucccucuguacgggguuauugauacccccuguuggaaacugcauacauccccucucugcacgaccaacacaaaggaaggaagcaauaucugucugacccggacagaccgcggcugguacugcgauaacgcggggucuguguccuuuuucccgcaggccgagaccuguaagguccagagcaauagaguguuuugcgacacgaugaacucucuuacacugcccagcgaaguuaaucucugcaacauugauaucuucaauccuaaauaugacuguaagauuaugaccuccaaaaccgaugugucuagcuccgucaucacaagccugggagcuaucgugucuugcuacggcaagaccaaauguacagccuccaacaagugccgggggauuaucaagacguuuagcaauggaugugacuaugucucuaacaaaggcguggacaccguuuccgugggcaauacacuuuacuaugucaacaagcaagaggggcagagccuguacgugaaaggagagcccauuaucaauuucuaugauccucucguuuuucccuccgacgaguucgaugcuucuauuagccaggugaacgaaaagaucaaccagucccuggccuuuauucgcaaaucugacgaacugcuccacaaugucaacgugggcaagagcaccacaaauaucaugaucaccacgauuaucauugugaucauuguuauccugcuucugcucaucgccgucgggcuguuccuguacugcaaggcuagauccaccccggugacacuuagcaaagaucaacucucuggaauuaacaauaucgcguucuccaacugaggacuagucccuguucccagagcccacuuuuuuuucuuuuuuugaaauaaaauagccugucuuucagaucuaaaaaaaaaaaaaaaaaaaaaaaaaaaaaaaaaaaaaaaaaaaaaaaaaaaaaaaaaaaaaaaaugcaucccccccccccccccccccccccccccccccaaaggcucuuuucagagccaccagaauu

SEQ ID NO: 19233 - RNA, 1900 nt, Artificial Sequence
  mRNA product Design c-5 comprising derived and/or modified sequence from HRSV(Memphis-37)__AIY60640.1__F_DSCav1_mut8 (opt6)
gggagagcggcucggccauuuugucccagucaguccggaggcugcggcugcagaaguaccgccugcggaguaacugcaaagaagcuuaccauggaacuuccuauuuuaaaaacaaacgcaauuacaaccauauuagcagcaguaacacuaugcuuugcaucaucacaaaacaucaccgaagaauuuuaucaauccacaugcucagcaguaucaaaaggauaccuuggcgcacuccgaacaggcugguauacaucggucauaacuauagaacucuccaacauaaaagaaauaaaaugcaaugguacugacgcaaaaguaaaauuaauaaaacaagaacuagacaaauacaaaaacgcaguaaccgauuuacaacuacuuaugcaaucaacaccugcagcaggaagcggaucagcaauagcaaguggaauagcaguaugcaaaguacuucaccucgaaggagaaguaaauaaaauaaaaaacgccuuacuaucaacaaauaaagccgucguaucacuuuccgguugcggcguaucaguauuaaccuuuaaagucuuagacuuaaaaaacuacauagacaaacaauuauuaccaauacuaaacaaacaauccuguuccauacccaacauagaaaccguaauagaauuucaacaaaaaaacaacagacuauuagaaauaacacgcgaauuuucaguaaacgcaggcguaacaacaccaguaucaacauauauguuaaccaauucagaauuauuaucccuuauaaaugacaugccuauaacaaacgaccaaaaaaaauuaaugaguaacaacguucaaauaguaagacaacaaucauacagcauaaugugcauaauaaaagaagaaguacuagcauacguaguucaacuaccacucuauggcguuaucgacaccccaugcuggaaacuacauaccucaccacucuguaccacuaauacgaaagaaggaucuaacauaugccuaaccagaacagaucgagguugguauugcgacaaugcuggaucaguaucauucuucccacaagcagaaaccugcaaaguacaaagcaacagaguauuuugugacacuaugaacucacuaacgcuaccuucagaaguaaaccuaugcaacaucgacauauucaacccaaaauacgauugcaaaauaaugacaucaaaaacagacguuuccucaucaguaauaacaucauuaggagcaauaguauccugcuacgguaaaaccaaaugcacagcauccaauaaaugccgaggaaucauuaaaacauuuucaaauggcugcgacuauguaaguaauaaagguguagauacaguaucaguaggcaacacacuauauuacguaaacaaacaagaagggcaaucccuauaugucaaaggcgaaccaauuauaaacuucuacgacccccucguauucccaucagacgaauuugacgcaucaauaucccaaguaaacgaaaaaaucaaccaaucacucgcauucauacguaaauccgacgaauuacuacauaacguaaacguaggcaaaucaacaacaaauauaaugauaacaaccauaaucauaguaauaauaguuauacuccuacuacucauugcagucggccuauuucuauacuguaaagcacgcucuacaccaguaacacuaucuaaagaucaauuauccggaauaaacaacauugccuucuccaauuaaggacuagucccuguucccagagcccacuuuuuuuucuuuuuuugaaauaaaauagccugucuuucagaucuaaaaaaaaaaaaaaaaaaaaaaaaaaaaaaaaaaaaaaaaaaaaaaaaaaaaaaaaaaaaaaaaugcaucccccccccccccccccccccccccccccccaaaggcucuuuucagagccaccagaauu

SEQ ID NO: 19234 - RNA, 1900 nt, Artificial Sequence
  mRNA product Design c-5 comprising derived and/or modified sequence from HRSV(Memphis-37)__AIY60640.1__F_DSCav1_mut8 (opt11)
gggagagcggcucggccauuuugucccagucaguccggaggcugcggcugcagaaguaccgccugcggaguaacugcaaagaagcuuaccauggaacuucccauccugaagaccaacgcuaucacaaccauccucgccgcagucacccuuugcuucgccucaucccaaaacaucaccgaagaauuuuaccagucaaccugcucggccgucuccaagggcuaccucggcgcccuccgcacuggcugguacacauccgucaucaccaucgaacucuccaacauaaaagaaauaaaaugcaacggaaccgacgccaaagucaaacucaucaaacaagaacuagauaaauauaaaaacgccgucaccgaccugcaacuccucaugcaauccaccccagccgccggcucuggcagcgccaucgcaagcggaaucgccgucugcaaaguccuccaccuagaaggcgaagucaacaaaauuaaaaacgcccuccucuccaccaacaaagcaguugucucccucucuggcugcggagucucuguacucaccuucaaaguacuagaccucaagaauuacauagacaaacaacuccugcccauccuuaacaaacaaaguuguaguauccccaacaucgaaacaguaaucgaauuucagcagaaaaacaaccgccuccucgaaaucacacgagaguucucggucaacgccggcgucaccacccccguaucaaccuacaugcuaacaaacuccgaacuacuuucccucaucaaugacaugcccauaaccaacgaccaaaagaaacuaauguccaauaacguccagauaguccgucaacaguccuacucaaucaugugcauaauuaaagaagaaguacucgccuacgucguccaacuaccccucuauggagucaucgacacccccugcuggaaacuccacacaucaccccuaugcacaaccaacaccaaagaaggcuccaacaucugccucacaagaaccgaccgcggcugguacugcgacaacgcuggcuccgucucguucuucccacaagccgaaaccugcaaaguccaaucaaaccgggucuucugcgacaccaugaacucccucacucucccaagcgaagucaaccuaugcaacaucgacaucuucaacccaaaauacgacuguaaaaucaugacuucgaaaacagacgucuccucaucaguaaucacauccuuaggcgccaucguguccugcuacgguaagaccaaaugcacagccuccaacaaaugccggggcaucaucaaaaccuucagcaacgguugugauuacgucuccaacaaaggaguagacaccgucuccguaggaaacacccucuacuacgucaacaagcaagaaggccaaucccucuacgucaaaggggaacccaucaucaacuucuacgacccacucgucuuccccuccgacgaguucgacgcaagcaucucccaagucaacgaaaagaucaaccaaucacuagccuucauccgcaaauccgacgaacuccuccacaacguuaacguaggcaaauccaccaccaacaucaugaucacaaccaucaucauagucauaauagucauccuacuacuccucaucgccguaggucuauuccuauacuguaaagcucgaucaacccccgucacacucuccaaagaucaacucucaggaaucaacaacaucgccuucuccaacuaaggacuagucccuguucccagagcccacuuuuuuuucuuuuuuugaaauaaaauagccugucuuucagaucuaaaaaaaaaaaaaaaaaaaaaaaaaaaaaaaaaaaaaaaaaaaaaaaaaaaaaaaaaaaaaaaaugcaucccccccccccccccccccccccccccccccaaaggcucuuuucagagccaccagaauu

SEQ ID NO: 19235 - RNA, 1909 nt, Artificial Sequence
  mRNA product Design d-1 comprising derived and/or modified sequence from HRSV(Memphis-37)__AIY60640.1__F_DSCav1_mut8 (opt1)
gggagacccgugacccggaaguuguacggcuacgcgacuuucccucccacaaacccucgcgcccuuccuuuccuacuugggcccggcagaaagcuuaccauggagcugcccauccucaagaccaacgccaucaccacgauccuggccgcggugacccugugcuucgccagcucccagaacaucaccgaggaguucuaccagagcacgugcuccgccgucagcaagggcuaccucggcgcccugcgcaccgggugguacaccagcgugaucaccaucgagcuguccaacaucaaggagaucaagugcaacggcaccgacgccaaggugaagcucaucaagcaggagcuggacaaguacaagaacgcggucacggaccugcagcuccugaugcagagcaccccggccgccggcuccgggagcgcgaucgccuccggcaucgccgucugcaaggugcugcaccucgagggcgaggugaacaagaucaagaacgcccugcuguccaccaacaaggccgucgugagccucuccggcugcggggugagcguccugaccuucaaggugcuggaccucaagaacuacaucgacaagcagcugcugcccauccugaacaagcagagcugcuccauccccaacaucgagaccgucaucgaguuccagcagaagaacaaccgccuccuggagaucacgcgggaguucagcgugaacgcgggcgugaccacccccgucuccaccuacaugcugacgaacagcgagcuccugucccugaucaacgacaugccgaucaccaacgaccagaagaagcucaugagcaacaacgugcagaucgugcgccagcaguccuacagcaucaugugcaucaucaaggaggagguccuggccuacguggugcagcugccccucuacggggucaucgacacccccugcuggaagcugcacaccagcccccugugcacgaccaacaccaaggagggcuccaacaucugccucacccggacggaccgcgggugguacugcgacaacgccggcagcguguccuucuucccgcaggccgagaccugcaagguccagagcaaccggguguucugcgacaccaugaacucccugacccugcccagcgaggugaaccucugcaacaucgacaucuucaaccccaaguacgacugcaagaucaugacguccaagaccgacgucagcuccagcgugaucaccucccugggcgccaucgugagcugcuacgggaagaccaagugcacggcgagcaacaagugccgcggcaucaucaagaccuucuccaacgggugcgacuacgucagcaacaagggcguggacaccguguccgucggcaacacccuguacuacgugaacaagcaggagggccagagccucuacgugaagggggagcccaucaucaacuucuacgacccgcuggucuuccccuccgacgaguucgacgccagcaucucccaggugaacgagaagaucaaccagagccuggccuucauccggaaguccgacgagcuccugcacaacgugaacgucggcaagagcaccacgaacaucaugaucaccaccaucaucaucgugaucaucgugauccugcugcuccugaucgccgucgggcuguuccucuacugcaaggcccgcuccacccccgugacgcugagcaaggaccagcuguccgggaucaacaacaucgcguucagcaacugaggacuagucccuguucccagagcccacuuuuuuuucuuuuuuugaaauaaaauagccugucuuucagaucuaaaaaaaaaaaaaaaaaaaaaaaaaaaaaaaaaaaaaaaaaaaaaaaaaaaaaaaaaaaaaaaaugcaucccccccccccccccccccccccccccccccaaaggcucuuuucagagccaccagaauu

SEQ ID NO: 19236 - RNA, 1909 nt, Artificial Sequence
  mRNA product Design d-1 comprising derived and/or modified sequence from HRSV(Memphis-37)__AIY60640.1__F_DSCav1_mut8 (opt1)
gggagacccgugacccggaaguuguacggcuacgcgacuuucccucccacaaacccucgcgcccuuccuuuccuacuugggcccggcagaaagcuuaccauggagcugcccauccucaagaccaacgccaucaccacgauccuggccgcggugacccugugcuucgccagcucccagaacaucaccgaggaguucuaccagagcacgugcuccgccgucagcaagggcuaccucggggcccugcgcaccggcugguacaccuccgugaucaccaucgagcugagcaacaucaaggagaucaagugcaacgggaccgacgccaaggugaagcucaucaagcaggagcuggacaaguacaagaacgcggucacggaccugcagcuccugaugcaguccaccccggccgccggcagcggguccgccaucgcgagcggcaucgccgugugcaaggugcugcaccucgagggcgaggucaacaagaucaagaacgcccugcuguccaccaacaaggccguggugagccucuccgggugcggcgucagcgugcugaccuucaaggugcuggaccucaagaacuacaucgacaagcagcugcugcccauccucaacaagcaguccugcagcauccccaacaucgagacggucaucgaguuccagcagaagaacaaccggcugcuggagaucacccgcgaguucuccgugaacgccggggugaccacccccgucagcacguacaugcucaccaacuccgagcugcugagccucaucaacgacaugccgaucaccaacgaccagaagaagcugaugagcaacaacgugcagaucgugcggcagcaguccuacagcaucaugugcaucaucaaggaggagguccuggcguacguggugcagcucccccuguacggcgucaucgacacccccugcuggaagcugcacacgagcccccucugcaccaccaacaccaaggagggguccaacaucugccugacgcgcaccgaccggggcugguacugcgacaacgccggcuccgugagcuucuucccgcaggccgagaccugcaaggugcaguccaaccgcgucuucugcgacaccaugaacagccugacgcuccccuccgaggugaaccugugcaacaucgacaucuucaaccccaaguacgacugcaagaucaugaccagcaagaccgacgucuccagcuccgugaucaccagccugggggccaucguguccugcuacggcaagacgaagugcaccgccagcaacaagugccgggggaucaucaagaccuucuccaacggcugcgacuacgucagcaacaagggcguggacaccguguccgucgggaacacgcucuacuacgugaacaagcaggagggccagagccuguacgugaagggggagcccaucaucaacuucuacgacccgcuggucuuccccagcgacgaguucgacgcguccaucagccaggugaacgagaagaucaaccagucccucgccuucauccgcaagagcgacgagcugcugcacaacgugaacgucggcaaguccaccaccaacaucaugaucaccaccaucaucaucgugaucaucgugauccuccugcugcucaucgccgucgggcuguuccuguacugcaaggcccggagcacgcccgugacccuguccaaggaccagcucagcggcaucaacaacaucgccuucuccaacugaggacuagucccuguucccagagcccacuuuuuuuucuuuuuuugaaauaaaauagccugucuuucagaucuaaaaaaaaaaaaaaaaaaaaaaaaaaaaaaaaaaaaaaaaaaaaaaaaaaaaaaaaaaaaaaaaugcaucccccccccccccccccccccccccccccccaaaggcucuuuucagagccaccagaauu

SEQ ID NO: 19237 - RNA, 1909 nt, Artificial Sequence
  mRNA product Design d-1 comprising derived and/or modified sequence from HRSV(Memphis-37)__AIY60640.1__F_DSCav1_mut8 (opt2)
gggagacccgugacccggaaguuguacggcuacgcgacuuucccucccacaaacccucgcgcccuuccuuuccuacuugggcccggcagaaagcuuaccauggagcuccccauccucaagaccaacgccaucaccaccauccucgccgccgucacccucugcuucgccuccucccagaacaucaccgaggaguucuaccaguccaccugcuccgccgucuccaagggcuaccucggcgcccuccgcaccggcugguacaccuccgucaucaccaucgagcucuccaacaucaaggagaucaagugcaacggcaccgacgccaaggucaagcucaucaagcaggagcucgacaaguacaagaacgccgucaccgaccuccagcuccucaugcaguccacccccgccgccggcuccggcuccgccaucgccuccggcaucgccgucugcaagguccuccaccucgagggcgaggucaacaagaucaagaacgcccuccucuccaccaacaaggccgucgucucccucuccggcugcggcgucuccguccucaccuucaagguccucgaccucaagaacuacaucgacaagcagcuccuccccauccucaacaagcaguccugcuccauccccaacaucgagaccgucaucgaguuccagcagaagaacaaccgccuccucgagaucacccgcgaguucuccgucaacgccggcgucaccacccccgucuccaccuacaugcucaccaacuccgagcuccucucccucaucaacgacaugcccaucaccaacgaccagaagaagcucauguccaacaacguccagaucguccgccagcaguccuacuccaucaugugcaucaucaaggaggagguccucgccuacgucguccagcucccccucuacggcgucaucgacacccccugcuggaagcuccacaccuccccccucugcaccaccaacaccaaggagggcuccaacaucugccucacccgcaccgaccgcggcugguacugcgacaacgccggcuccgucuccuucuucccccaggccgagaccugcaagguccaguccaaccgcgucuucugcgacaccaugaacucccucacccuccccuccgaggucaaccucugcaacaucgacaucuucaaccccaaguacgacugcaagaucaugaccuccaagaccgacgucuccuccuccgucaucaccucccucggcgccaucgucuccugcuacggcaagaccaagugcaccgccuccaacaagugccgcggcaucaucaagaccuucuccaacggcugcgacuacgucuccaacaagggcgucgacaccgucuccgucggcaacacccucuacuacgucaacaagcaggagggccagucccucuacgucaagggcgagcccaucaucaacuucuacgacccccucgucuuccccuccgacgaguucgacgccuccaucucccaggucaacgagaagaucaaccagucccucgccuucauccgcaaguccgacgagcuccuccacaacgucaacgucggcaaguccaccaccaacaucaugaucaccaccaucaucaucgucaucaucgucauccuccuccuccucaucgccgucggccucuuccucuacugcaaggcccgcuccacccccgucacccucuccaaggaccagcucuccggcaucaacaacaucgccuucuccaacugaggacuagucccuguucccagagcccacuuuuuuuucuuuuuuugaaauaaaauagccugucuuucagaucuaaaaaaaaaaaaaaaaaaaaaaaaaaaaaaaaaaaaaaaaaaaaaaaaaaaaaaaaaaaaaaaaugcaucccccccccccccccccccccccccccccccaaaggcucuuuucagagccaccagaauu

SEQ ID NO: 19238 - RNA, 1909 nt, Artificial Sequence
  mRNA product Design d-1 comprising derived and/or modified sequence from HRSV(Memphis-37)__AIY60640.1__F_DSCav1_mut8 (opt3)
gggagacccgugacccggaaguuguacggcuacgcgacuuucccucccacaaacccucgcgcccuuccuuuccuacuugggcccggcagaaagcuuaccauggagcugcccauccucaagaccaacgccauuacaacuauacuugcugcagugacgcugugcuucgccagcucccagaauaucaccgaagaguuuuaccaaucuacauguucagcggucaguaaaggcuauuugggggcuuuaagaacuggaugguacaccagcguuauuacaaucgaacuguccaacauuaaggagaucaaaugcaaugguaccgacgccaaggugaaacuaauaaagcaggaacucgauaaguauaaaaacgcaguaacugaccugcagcuucugaugcagucuacuccugccgcuggcucggggucagcaaucgccagcggaauugcuguguguaaggucuugcaccucgagggcgaggugaauaaaaucaagaacgcccugcugaguaccaauaaagcgguugugucccucucugguugcggggucagcguguuaacguucaagguacuggaucuuaagaacuacauugacaaacaauugcugccaauccuaaauaagcaguccuguucaauaccgaacauugaaacuguuaucgaguuucagcagaaaaauaacaggcuccuggaaauuacccgggaguucagugugaaugcaggagucacaacucccgugagcaccuauaugcuuacaaacucugagcuguugucccucaucaaugauaugccuaucaccaacgaccaaaagaaacugaugucaaacaaugugcagauuguccgccagcagagcuacaguauaaugugcaucauuaaggaagagguuuuagccuaugugguacaacugccacucuacggcgugaucgauacgcccuguuggaaacuucauacuucuccucugugcacaaccaacacuaaggaaggcuccaauauauguuugacacgaaccgaccgugggugguacugcgauaacgcuggaagcgucucguuuuucccacaggccgagacguguaaggugcagucuaauagaguuuucugcgacaccaugaacucccuaacacugcccucagaagugaaucucugcaacauugauaucuucaauccuaaauaugacuguaagaucaugacaaguaaaaccgaugucagcuccucugugauuacaagccugggugcaaucguaucaugcuacggcaagacuaaauguaccgcuaguaacaagugcagggggauuauaaagacauuuuccaauggaugugacuauguuagcaacaaaggcguggacaccgucucuguggguaauacucuuuacuaugucaacaagcaagaggggcagucacuguacgugaaaggagagccaaucauuaauuucuaugauccguugguuuuucccagugacgaauuugaugccagcaucucccaggugaacgagaagaucaaccagucucucgcguuuauucggaaaucggacgaacuguuacacaauguaaacgucggcaagagcacgacaaauauaaugaucaccacuauuaucauugugaucauaguuauccugcuacuccugauugccgugggccuuuucuuguacugcaaggcacgcuccaccccugucacacugucaaaagaucaacucagugggaucaacaauauugcuuucucuaacugaggacuagucccuguucccagagcccacuuuuuuuucuuuuuuugaaauaaaauagccugucuuucagaucuaaaaaaaaaaaaaaaaaaaaaaaaaaaaaaaaaaaaaaaaaaaaaaaaaaaaaaaaaaaaaaaaugcaucccccccccccccccccccccccccccccccaaaggcucuuuucagagccaccagaauu

SEQ ID NO: 19239 - RNA, 1909 nt, Artificial Sequence
  mRNA product Design d-1 comprising derived and/or modified sequence from HRSV(Memphis-37)__AIY60640.1__F_DSCav1_mut8 (opt4)
gggagacccgugacccggaaguuguacggcuacgcgacuuucccucccacaaacccucgcgcccuuccuuuccuacuugggcccggcagaaagcuuaccauggagcugcccauccugaagaccaacgccaucaccaccauccuggccgccgugacccugugcuucgccagcagccagaacaucaccgaggaguucuaccagagcaccugcagcgccgugagcaagggcuaccugggcgcccugagaaccggcugguacaccagcgugaucaccaucgagcugagcaacaucaaggagaucaagugcaacggcaccgacgccaaggugaagcugaucaagcaggagcuggacaaguacaagaacgccgugaccgaccugcagcugcugaugcagagcacccccgccgccggcagcggcagcgccaucgccagcggcaucgccgugugcaaggugcugcaccuggagggcgaggugaacaagaucaagaacgcccugcugagcaccaacaaggccguggugagccugagcggcugcggcgugagcgugcugaccuucaaggugcuggaccugaagaacuacaucgacaagcagcugcugcccauccugaacaagcagagcugcagcauccccaacaucgagaccgugaucgaguuccagcagaagaacaacagacugcuggagaucaccagagaguucagcgugaacgccggcgugaccacccccgugagcaccuacaugcugaccaacagcgagcugcugagccugaucaacgacaugcccaucaccaacgaccagaagaagcugaugagcaacaacgugcagaucgugagacagcagagcuacagcaucaugugcaucaucaaggaggaggugcuggccuacguggugcagcugccccuguacggcgugaucgacacccccugcuggaagcugcacaccagcccccugugcaccaccaacaccaaggagggcagcaacaucugccugaccagaaccgacagaggcugguacugcgacaacgccggcagcgugagcuucuucccccaggccgagaccugcaaggugcagagcaacagaguguucugcgacaccaugaacagccugacccugcccagcgaggugaaccugugcaacaucgacaucuucaaccccaaguacgacugcaagaucaugaccagcaagaccgacgugagcagcagcgugaucaccagccugggcgccaucgugagcugcuacggcaagaccaagugcaccgccagcaacaagugcagaggcaucaucaagaccuucagcaacggcugcgacuacgugagcaacaagggcguggacaccgugagcgugggcaacacccuguacuacgugaacaagcaggagggccagagccuguacgugaagggcgagcccaucaucaacuucuacgacccccugguguuccccagcgacgaguucgacgccagcaucagccaggugaacgagaagaucaaccagagccuggccuucaucagaaagagcgacgagcugcugcacaacgugaacgugggcaagagcaccaccaacaucaugaucaccaccaucaucaucgugaucaucgugauccugcugcugcugaucgccgugggccuguuccuguacugcaaggccagaagcacccccgugacccugagcaaggaccagcugagcggcaucaacaacaucgccuucagcaacugaggacuagucccuguucccagagcccacuuuuuuuucuuuuuuugaaauaaaauagccugucuuucagaucuaaaaaaaaaaaaaaaaaaaaaaaaaaaaaaaaaaaaaaaaaaaaaaaaaaaaaaaaaaaaaaaaugcaucccccccccccccccccccccccccccccccaaaggcucuuuucagagccaccagaauu

SEQ ID NO: 19240 - RNA, 1909 nt, Artificial Sequence
  mRNA product Design d-1 comprising derived and/or modified sequence from HRSV(Memphis-37)__AIY60640.1__F_DSCav1_mut8 (opt5)
gggagacccgugacccggaaguuguacggcuacgcgacuuucccucccacaaacccucgcgcccuuccuuuccuacuugggcccggcagaaagcuuaccauggagcugcccauccucaagaccaacgccauuacaacgauccuggcugccgugacccuuugcuucgcgagcucccagaauauuacagaagaguuuuaccaaucuaccuguagcgcugucuccaaaggcuaucugggggcccucagaacaggaugguacaccucuguuaucacaauugaacugagcaacaucaaggagaucaaaugcaauggcaccgacgccaaggugaaacuuauuaagcaggaacuggauaaguauaaaaacgcugugacggaccuccagcugcugaugcaguccaccccugccgcugggucuggaagcgccaucgcguccggcauugccgucuguaaggugcuccaccuggagggggagguuaauaaaaucaagaacgcccuucugagcacaaauaaagcuguggucucucucuccggaugcggcgugagcguucugaccuucaaggugcuugaucugaagaacuacauugacaaacaacuccugccgauccugaauaagcagucuuguuccauucccaacaucgaaacagucaucgaguuucagcagaaaaauaaccggcuccuggaaauuacccgcgaguucagcgugaaugcuggcgugacgacaccugucucuaccuauaugcuuacaaacuccgagcugcucagccugaucaaugauaugcccauuaccaacgaccaaaagaaacuuauguccaacaauguucagaucgugagacagcagucuuacagcauuaugugcaucaucaaggaagaggugcuggccuaugucgugcaacucccucuguacgggguuauugauacccccuguuggaaacugcauacauccccucucugcacgaccaacacaaaggaaggaagcaauaucugucugacccggacagaccgcggcugguacugcgauaacgcggggucuguguccuuuuucccgcaggccgagaccuguaagguccagagcaauagaguguuuugcgacacgaugaacucucuuacacugcccagcgaaguuaaucucugcaacauugauaucuucaauccuaaauaugacuguaagauuaugaccuccaaaaccgaugugucuagcuccgucaucacaagccugggagcuaucgugucuugcuacggcaagaccaaauguacagccuccaacaagugccgggggauuaucaagacguuuagcaauggaugugacuaugucucuaacaaaggcguggacaccguuuccgugggcaauacacuuuacuaugucaacaagcaagaggggcagagccuguacgugaaaggagagcccauuaucaauuucuaugauccucucguuuuucccuccgacgaguucgaugcuucuauuagccaggugaacgaaaagaucaaccagucccuggccuuuauucgcaaaucugacgaacugcuccacaaugucaacgugggcaagagcaccacaaauaucaugaucaccacgauuaucauugugaucauuguuauccugcuucugcucaucgccgucgggcuguuccuguacugcaaggcuagauccaccccggugacacuuagcaaagaucaacucucuggaauuaacaauaucgcguucuccaacugaggacuagucccuguucccagagcccacuuuuuuuucuuuuuuugaaauaaaauagccugucuuucagaucuaaaaaaaaaaaaaaaaaaaaaaaaaaaaaaaaaaaaaaaaaaaaaaaaaaaaaaaaaaaaaaaaugcaucccccccccccccccccccccccccccccccaaaggcucuuuucagagccaccagaauu

SEQ ID NO: 19241 - RNA, 1909 nt, Artificial Sequence
  mRNA product Design d-1 comprising derived and/or modified sequence from HRSV(Memphis-37)__AIY60640.1__F_DSCav1_mut8 (opt6)
gggagacccgugacccggaaguuguacggcuacgcgacuuucccucccacaaacccucgcgcccuuccuuuccuacuugggcccggcagaaagcuuaccauggaacuuccuauuuuaaaaacaaacgcaauuacaaccauauuagcagcaguaacacuaugcuuugcaucaucacaaaacaucaccgaagaauuuuaucaauccacaugcucagcaguaucaaaaggauaccuuggcgcacuccgaacaggcugguauacaucggucauaacuauagaacucuccaacauaaaagaaauaaaaugcaaugguacugacgcaaaaguaaaauuaauaaaacaagaacuagacaaauacaaaaacgcaguaaccgauuuacaacuacuuaugcaaucaacaccugcagcaggaagcggaucagcaauagcaaguggaauagcaguaugcaaaguacuucaccucgaaggagaaguaaauaaaauaaaaaacgccuuacuaucaacaaauaaagccgucguaucacuuuccgguugcggcguaucaguauuaaccuuuaaagucuuagacuuaaaaaacuacauagacaaacaauuauuaccaauacuaaacaaacaauccuguuccauacccaacauagaaaccguaauagaauuucaacaaaaaaacaacagacuauuagaaauaacacgcgaauuuucaguaaacgcaggcguaacaacaccaguaucaacauauauguuaaccaauucagaauuauuaucccuuauaaaugacaugccuauaacaaacgaccaaaaaaaauuaaugaguaacaacguucaaauaguaagacaacaaucauacagcauaaugugcauaauaaaagaagaaguacuagcauacguaguucaacuaccacucuauggcguuaucgacaccccaugcuggaaacuacauaccucaccacucuguaccacuaauacgaaagaaggaucuaacauaugccuaaccagaacagaucgagguugguauugcgacaaugcuggaucaguaucauucuucccacaagcagaaaccugcaaaguacaaagcaacagaguauuuugugacacuaugaacucacuaacgcuaccuucagaaguaaaccuaugcaacaucgacauauucaacccaaaauacgauugcaaaauaaugacaucaaaaacagacguuuccucaucaguaauaacaucauuaggagcaauaguauccugcuacgguaaaaccaaaugcacagcauccaauaaaugccgaggaaucauuaaaacauuuucaaauggcugcgacuauguaaguaauaaagguguagauacaguaucaguaggcaacacacuauauuacguaaacaaacaagaagggcaaucccuauaugucaaaggcgaaccaauuauaaacuucuacgacccccucguauucccaucagacgaauuugacgcaucaauaucccaaguaaacgaaaaaaucaaccaaucacucgcauucauacguaaauccgacgaauuacuacauaacguaaacguaggcaaaucaacaacaaauauaaugauaacaaccauaaucauaguaauaauaguuauacuccuacuacucauugcagucggccuauuucuauacuguaaagcacgcucuacaccaguaacacuaucuaaagaucaauuauccggaauaaacaacauugccuucuccaauuaaggacuagucccuguucccagagcccacuuuuuuuucuuuuuuugaaauaaaauagccugucuuucagaucuaaaaaaaaaaaaaaaaaaaaaaaaaaaaaaaaaaaaaaaaaaaaaaaaaaaaaaaaaaaaaaaaugcaucccccccccccccccccccccccccccccccaaaggcucuuuucagagccaccagaauu

SEQ ID NO: 19242 - RNA, 1909 nt, Artificial Sequence
  mRNA product Design d-1 comprising derived and/or modified sequence from HRSV(Memphis-37)__AIY60640.1__F_DSCav1_mut8 (opt11)
gggagacccgugacccggaaguuguacggcuacgcgacuuucccucccacaaacccucgcgcccuuccuuuccuacuugggcccggcagaaagcuuaccauggaacuucccauccugaagaccaacgcuaucacaaccauccucgccgcagucacccuuugcuucgccucaucccaaaacaucaccgaagaauuuuaccagucaaccugcucggccgucuccaagggcuaccucggcgcccuccgcacuggcugguacacauccgucaucaccaucgaacucuccaacauaaaagaaauaaaaugcaacggaaccgacgccaaagucaaacucaucaaacaagaacuagauaaauauaaaaacgccgucaccgaccugcaacuccucaugcaauccaccccagccgccggcucuggcagcgccaucgcaagcggaaucgccgucugcaaaguccuccaccuagaaggcgaagucaacaaaauuaaaaacgcccuccucuccaccaacaaagcaguugucucccucucuggcugcggagucucuguacucaccuucaaaguacuagaccucaagaauuacauagacaaacaacuccugcccauccuuaacaaacaaaguuguaguauccccaacaucgaaacaguaaucgaauuucagcagaaaaacaaccgccuccucgaaaucacacgagaguucucggucaacgccggcgucaccacccccguaucaaccuacaugcuaacaaacuccgaacuacuuucccucaucaaugacaugcccauaaccaacgaccaaaagaaacuaauguccaauaacguccagauaguccgucaacaguccuacucaaucaugugcauaauuaaagaagaaguacucgccuacgucguccaacuaccccucuauggagucaucgacacccccugcuggaaacuccacacaucaccccuaugcacaaccaacaccaaagaaggcuccaacaucugccucacaagaaccgaccgcggcugguacugcgacaacgcuggcuccgucucguucuucccacaagccgaaaccugcaaaguccaaucaaaccgggucuucugcgacaccaugaacucccucacucucccaagcgaagucaaccuaugcaacaucgacaucuucaacccaaaauacgacuguaaaaucaugacuucgaaaacagacgucuccucaucaguaaucacauccuuaggcgccaucguguccugcuacgguaagaccaaaugcacagccuccaacaaaugccggggcaucaucaaaaccuucagcaacgguugugauuacgucuccaacaaaggaguagacaccgucuccguaggaaacacccucuacuacgucaacaagcaagaaggccaaucccucuacgucaaaggggaacccaucaucaacuucuacgacccacucgucuuccccuccgacgaguucgacgcaagcaucucccaagucaacgaaaagaucaaccaaucacuagccuucauccgcaaauccgacgaacuccuccacaacguuaacguaggcaaauccaccaccaacaucaugaucacaaccaucaucauagucauaauagucauccuacuacuccucaucgccguaggucuauuccuauacuguaaagcucgaucaacccccgucacacucuccaaagaucaacucucaggaaucaacaacaucgccuucuccaacuaaggacuagucccuguucccagagcccacuuuuuuuucuuuuuuugaaauaaaauagccugucuuucagaucuaaaaaaaaaaaaaaaaaaaaaaaaaaaaaaaaaaaaaaaaaaaaaaaaaaaaaaaaaaaaaaaaugcaucccccccccccccccccccccccccccccccaaaggcucuuuucagagccaccagaauu

SEQ ID NO: 19243 - RNA, 1964 nt, Artificial Sequence
  mRNA product Design d-2 comprising derived and/or modified sequence from HRSV(Memphis-37)__AIY60640.1__F_DSCav1_mut8 (opt1)
gggagagcggcucggccauuuugucccagucaguccggaggcugcggcugcagaaguaccgccugcggaguaacugcaaagaagcuuaccauggagcugcccauccucaagaccaacgccaucaccacgauccuggccgcggugacccugugcuucgccagcucccagaacaucaccgaggaguucuaccagagcacgugcuccgccgucagcaagggcuaccucggcgcccugcgcaccgggugguacaccagcgugaucaccaucgagcuguccaacaucaaggagaucaagugcaacggcaccgacgccaaggugaagcucaucaagcaggagcuggacaaguacaagaacgcggucacggaccugcagcuccugaugcagagcaccccggccgccggcuccgggagcgcgaucgccuccggcaucgccgucugcaaggugcugcaccucgagggcgaggugaacaagaucaagaacgcccugcuguccaccaacaaggccgucgugagccucuccggcugcggggugagcguccugaccuucaaggugcuggaccucaagaacuacaucgacaagcagcugcugcccauccugaacaagcagagcugcuccauccccaacaucgagaccgucaucgaguuccagcagaagaacaaccgccuccuggagaucacgcgggaguucagcgugaacgcgggcgugaccacccccgucuccaccuacaugcugacgaacagcgagcuccugucccugaucaacgacaugccgaucaccaacgaccagaagaagcucaugagcaacaacgugcagaucgugcgccagcaguccuacagcaucaugugcaucaucaaggaggagguccuggccuacguggugcagcugccccucuacggggucaucgacacccccugcuggaagcugcacaccagcccccugugcacgaccaacaccaaggagggcuccaacaucugccucacccggacggaccgcgggugguacugcgacaacgccggcagcguguccuucuucccgcaggccgagaccugcaagguccagagcaaccggguguucugcgacaccaugaacucccugacccugcccagcgaggugaaccucugcaacaucgacaucuucaaccccaaguacgacugcaagaucaugacguccaagaccgacgucagcuccagcgugaucaccucccugggcgccaucgugagcugcuacgggaagaccaagugcacggcgagcaacaagugccgcggcaucaucaagaccuucuccaacgggugcgacuacgucagcaacaagggcguggacaccguguccgucggcaacacccuguacuacgugaacaagcaggagggccagagccucuacgugaagggggagcccaucaucaacuucuacgacccgcuggucuuccccuccgacgaguucgacgccagcaucucccaggugaacgagaagaucaaccagagccuggccuucauccggaaguccgacgagcuccugcacaacgugaacgucggcaagagcaccacgaacaucaugaucaccaccaucaucaucgugaucaucgugauccugcugcuccugaucgccgucgggcuguuccucuacugcaaggcccgcuccacccccgugacgcugagcaaggaccagcuguccgggaucaacaacaucgcguucagcaacugaggacuaguaauaaggaaacuguaugaaugucugugggcaggaagugaagagauccuucuguaaagguuuuuggaauuaugucugcugaauaauaaacuuuuuugaaauaauaaaucugguagaaaaaugagaucuaaaaaaaaaaaaaaaaaaaaaaaaaaaaaaaaaaaaaaaaaaaaaaaaaaaaaaaaaaaaaaaaugcaucccccccccccccccccccccccccccccccaaaggcucuuuucagagccaccagaauu

SEQ ID NO: 19244 - RNA, 1964 nt, Artificial Sequence
  mRNA product Design d-2 comprising derived and/or modified sequence from HRSV(Memphis-37)__AIY60640.1__F_DSCav1_mut8 (opt1)
gggagagcggcucggccauuuugucccagucaguccggaggcugcggcugcagaaguaccgccugcggaguaacugcaaagaagcuuaccauggagcugcccauccucaagaccaacgccaucaccacgauccuggccgcggugacccugugcuucgccagcucccagaacaucaccgaggaguucuaccagagcacgugcuccgccgucagcaagggcuaccucggggcccugcgcaccggcugguacaccuccgugaucaccaucgagcugagcaacaucaaggagaucaagugcaacgggaccgacgccaaggugaagcucaucaagcaggagcuggacaaguacaagaacgcggucacggaccugcagcuccugaugcaguccaccccggccgccggcagcggguccgccaucgcgagcggcaucgccgugugcaaggugcugcaccucgagggcgaggucaacaagaucaagaacgcccugcuguccaccaacaaggccguggugagccucuccgggugcggcgucagcgugcugaccuucaaggugcuggaccucaagaacuacaucgacaagcagcugcugcccauccucaacaagcaguccugcagcauccccaacaucgagacggucaucgaguuccagcagaagaacaaccggcugcuggagaucacccgcgaguucuccgugaacgccggggugaccacccccgucagcacguacaugcucaccaacuccgagcugcugagccucaucaacgacaugccgaucaccaacgaccagaagaagcugaugagcaacaacgugcagaucgugcggcagcaguccuacagcaucaugugcaucaucaaggaggagguccuggcguacguggugcagcucccccuguacggcgucaucgacacccccugcuggaagcugcacacgagcccccucugcaccaccaacaccaaggagggguccaacaucugccugacgcgcaccgaccggggcugguacugcgacaacgccggcuccgugagcuucuucccgcaggccgagaccugcaaggugcaguccaaccgcgucuucugcgacaccaugaacagccugacgcuccccuccgaggugaaccugugcaacaucgacaucuucaaccccaaguacgacugcaagaucaugaccagcaagaccgacgucuccagcuccgugaucaccagccugggggccaucguguccugcuacggcaagacgaagugcaccgccagcaacaagugccgggggaucaucaagaccuucuccaacggcugcgacuacgucagcaacaagggcguggacaccguguccgucgggaacacgcucuacuacgugaacaagcaggagggccagagccuguacgugaagggggagcccaucaucaacuucuacgacccgcuggucuuccccagcgacgaguucgacgcguccaucagccaggugaacgagaagaucaaccagucccucgccuucauccgcaagagcgacgagcugcugcacaacgugaacgucggcaaguccaccaccaacaucaugaucaccaccaucaucaucgugaucaucgugauccuccugcugcucaucgccgucgggcuguuccuguacugcaaggcccggagcacgcccgugacccuguccaaggaccagcucagcggcaucaacaacaucgccuucuccaacugaggacuaguaauaaggaaacuguaugaaugucugugggcaggaagugaagagauccuucuguaaagguuuuuggaauuaugucugcugaauaauaaacuuuuuugaaauaauaaaucugguagaaaaaugagaucuaaaaaaaaaaaaaaaaaaaaaaaaaaaaaaaaaaaaaaaaaaaaaaaaaaaaaaaaaaaaaaaaugcaucccccccccccccccccccccccccccccccaaaggcucuuuucagagccaccagaauu

SEQ ID NO: 19245 - RNA, 1964 nt, Artificial Sequence
  mRNA product Design d-2 comprising derived and/or modified sequence from HRSV(Memphis-37)__AIY60640.1__F_DSCav1_mut8 (opt2)
gggagagcggcucggccauuuugucccagucaguccggaggcugcggcugcagaaguaccgccugcggaguaacugcaaagaagcuuaccauggagcuccccauccucaagaccaacgccaucaccaccauccucgccgccgucacccucugcuucgccuccucccagaacaucaccgaggaguucuaccaguccaccugcuccgccgucuccaagggcuaccucggcgcccuccgcaccggcugguacaccuccgucaucaccaucgagcucuccaacaucaaggagaucaagugcaacggcaccgacgccaaggucaagcucaucaagcaggagcucgacaaguacaagaacgccgucaccgaccuccagcuccucaugcaguccacccccgccgccggcuccggcuccgccaucgccuccggcaucgccgucugcaagguccuccaccucgagggcgaggucaacaagaucaagaacgcccuccucuccaccaacaaggccgucgucucccucuccggcugcggcgucuccguccucaccuucaagguccucgaccucaagaacuacaucgacaagcagcuccuccccauccucaacaagcaguccugcuccauccccaacaucgagaccgucaucgaguuccagcagaagaacaaccgccuccucgagaucacccgcgaguucuccgucaacgccggcgucaccacccccgucuccaccuacaugcucaccaacuccgagcuccucucccucaucaacgacaugcccaucaccaacgaccagaagaagcucauguccaacaacguccagaucguccgccagcaguccuacuccaucaugugcaucaucaaggaggagguccucgccuacgucguccagcucccccucuacggcgucaucgacacccccugcuggaagcuccacaccuccccccucugcaccaccaacaccaaggagggcuccaacaucugccucacccgcaccgaccgcggcugguacugcgacaacgccggcuccgucuccuucuucccccaggccgagaccugcaagguccaguccaaccgcgucuucugcgacaccaugaacucccucacccuccccuccgaggucaaccucugcaacaucgacaucuucaaccccaaguacgacugcaagaucaugaccuccaagaccgacgucuccuccuccgucaucaccucccucggcgccaucgucuccugcuacggcaagaccaagugcaccgccuccaacaagugccgcggcaucaucaagaccuucuccaacggcugcgacuacgucuccaacaagggcgucgacaccgucuccgucggcaacacccucuacuacgucaacaagcaggagggccagucccucuacgucaagggcgagcccaucaucaacuucuacgacccccucgucuuccccuccgacgaguucgacgccuccaucucccaggucaacgagaagaucaaccagucccucgccuucauccgcaaguccgacgagcuccuccacaacgucaacgucggcaaguccaccaccaacaucaugaucaccaccaucaucaucgucaucaucgucauccuccuccuccucaucgccgucggccucuuccucuacugcaaggcccgcuccacccccgucacccucuccaaggaccagcucuccggcaucaacaacaucgccuucuccaacugaggacuaguaauaaggaaacuguaugaaugucugugggcaggaagugaagagauccuucuguaaagguuuuuggaauuaugucugcugaauaauaaacuuuuuugaaauaauaaaucugguagaaaaaugagaucuaaaaaaaaaaaaaaaaaaaaaaaaaaaaaaaaaaaaaaaaaaaaaaaaaaaaaaaaaaaaaaaaugcaucccccccccccccccccccccccccccccccaaaggcucuuuucagagccaccagaauu

SEQ ID NO: 19246 - RNA, 1964 nt, Artificial Sequence
  mRNA product Design d-2 comprising derived and/or modified sequence from HRSV(Memphis-37)__AIY60640.1__F_DSCav1_mut8 (opt3)
gggagagcggcucggccauuuugucccagucaguccggaggcugcggcugcagaaguaccgccugcggaguaacugcaaagaagcuuaccauggagcugcccauccucaagaccaacgccauuacaacuauacuugcugcagugacgcugugcuucgccagcucccagaauaucaccgaagaguuuuaccaaucuacauguucagcggucaguaaaggcuauuugggggcuuuaagaacuggaugguacaccagcguuauuacaaucgaacuguccaacauuaaggagaucaaaugcaaugguaccgacgccaaggugaaacuaauaaagcaggaacucgauaaguauaaaaacgcaguaacugaccugcagcuucugaugcagucuacuccugccgcuggcucggggucagcaaucgccagcggaauugcuguguguaaggucuugcaccucgagggcgaggugaauaaaaucaagaacgcccugcugaguaccaauaaagcgguugugucccucucugguugcggggucagcguguuaacguucaagguacuggaucuuaagaacuacauugacaaacaauugcugccaauccuaaauaagcaguccuguucaauaccgaacauugaaacuguuaucgaguuucagcagaaaaauaacaggcuccuggaaauuacccgggaguucagugugaaugcaggagucacaacucccgugagcaccuauaugcuuacaaacucugagcuguugucccucaucaaugauaugccuaucaccaacgaccaaaagaaacugaugucaaacaaugugcagauuguccgccagcagagcuacaguauaaugugcaucauuaaggaagagguuuuagccuaugugguacaacugccacucuacggcgugaucgauacgcccuguuggaaacuucauacuucuccucugugcacaaccaacacuaaggaaggcuccaauauauguuugacacgaaccgaccgugggugguacugcgauaacgcuggaagcgucucguuuuucccacaggccgagacguguaaggugcagucuaauagaguuuucugcgacaccaugaacucccuaacacugcccucagaagugaaucucugcaacauugauaucuucaauccuaaauaugacuguaagaucaugacaaguaaaaccgaugucagcuccucugugauuacaagccugggugcaaucguaucaugcuacggcaagacuaaauguaccgcuaguaacaagugcagggggauuauaaagacauuuuccaauggaugugacuauguuagcaacaaaggcguggacaccgucucuguggguaauacucuuuacuaugucaacaagcaagaggggcagucacuguacgugaaaggagagccaaucauuaauuucuaugauccguugguuuuucccagugacgaauuugaugccagcaucucccaggugaacgagaagaucaaccagucucucgcguuuauucggaaaucggacgaacuguuacacaauguaaacgucggcaagagcacgacaaauauaaugaucaccacuauuaucauugugaucauaguuauccugcuacuccugauugccgugggccuuuucuuguacugcaaggcacgcuccaccccugucacacugucaaaagaucaacucagugggaucaacaauauugcuuucucuaacugaggacuaguaauaaggaaacuguaugaaugucugugggcaggaagugaagagauccuucuguaaagguuuuuggaauuaugucugcugaauaauaaacuuuuuugaaauaauaaaucugguagaaaaaugagaucuaaaaaaaaaaaaaaaaaaaaaaaaaaaaaaaaaaaaaaaaaaaaaaaaaaaaaaaaaaaaaaaaugcaucccccccccccccccccccccccccccccccaaaggcucuuuucagagccaccagaauu

SEQ ID NO: 19247 - RNA, 1964 nt, Artificial Sequence
  mRNA product Design d-2 comprising derived and/or modified sequence from HRSV(Memphis-37)__AIY60640.1__F_DSCav1_mut8 (opt4)
gggagagcggcucggccauuuugucccagucaguccggaggcugcggcugcagaaguaccgccugcggaguaacugcaaagaagcuuaccauggagcugcccauccugaagaccaacgccaucaccaccauccuggccgccgugacccugugcuucgccagcagccagaacaucaccgaggaguucuaccagagcaccugcagcgccgugagcaagggcuaccugggcgcccugagaaccggcugguacaccagcgugaucaccaucgagcugagcaacaucaaggagaucaagugcaacggcaccgacgccaaggugaagcugaucaagcaggagcuggacaaguacaagaacgccgugaccgaccugcagcugcugaugcagagcacccccgccgccggcagcggcagcgccaucgccagcggcaucgccgugugcaaggugcugcaccuggagggcgaggugaacaagaucaagaacgcccugcugagcaccaacaaggccguggugagccugagcggcugcggcgugagcgugcugaccuucaaggugcuggaccugaagaacuacaucgacaagcagcugcugcccauccugaacaagcagagcugcagcauccccaacaucgagaccgugaucgaguuccagcagaagaacaacagacugcuggagaucaccagagaguucagcgugaacgccggcgugaccacccccgugagcaccuacaugcugaccaacagcgagcugcugagccugaucaacgacaugcccaucaccaacgaccagaagaagcugaugagcaacaacgugcagaucgugagacagcagagcuacagcaucaugugcaucaucaaggaggaggugcuggccuacguggugcagcugccccuguacggcgugaucgacacccccugcuggaagcugcacaccagcccccugugcaccaccaacaccaaggagggcagcaacaucugccugaccagaaccgacagaggcugguacugcgacaacgccggcagcgugagcuucuucccccaggccgagaccugcaaggugcagagcaacagaguguucugcgacaccaugaacagccugacccugcccagcgaggugaaccugugcaacaucgacaucuucaaccccaaguacgacugcaagaucaugaccagcaagaccgacgugagcagcagcgugaucaccagccugggcgccaucgugagcugcuacggcaagaccaagugcaccgccagcaacaagugcagaggcaucaucaagaccuucagcaacggcugcgacuacgugagcaacaagggcguggacaccgugagcgugggcaacacccuguacuacgugaacaagcaggagggccagagccuguacgugaagggcgagcccaucaucaacuucuacgacccccugguguuccccagcgacgaguucgacgccagcaucagccaggugaacgagaagaucaaccagagccuggccuucaucagaaagagcgacgagcugcugcacaacgugaacgugggcaagagcaccaccaacaucaugaucaccaccaucaucaucgugaucaucgugauccugcugcugcugaucgccgugggccuguuccuguacugcaaggccagaagcacccccgugacccugagcaaggaccagcugagcggcaucaacaacaucgccuucagcaacugaggacuaguaauaaggaaacuguaugaaugucugugggcaggaagugaagagauccuucuguaaagguuuuuggaauuaugucugcugaauaauaaacuuuuuugaaauaauaaaucugguagaaaaaugagaucuaaaaaaaaaaaaaaaaaaaaaaaaaaaaaaaaaaaaaaaaaaaaaaaaaaaaaaaaaaaaaaaaugcaucccccccccccccccccccccccccccccccaaaggcucuuuucagagccaccagaauu

SEQ ID NO: 19248 - RNA, 1964 nt, Artificial Sequence
  mRNA product Design d-2 comprising derived and/or modified sequence from HRSV(Memphis-37)__AIY60640.1__F_DSCav1_mut8 (opt5)
gggagagcggcucggccauuuugucccagucaguccggaggcugcggcugcagaaguaccgccugcggaguaacugcaaagaagcuuaccauggagcugcccauccucaagaccaacgccauuacaacgauccuggcugccgugacccuuugcuucgcgagcucccagaauauuacagaagaguuuuaccaaucuaccuguagcgcugucuccaaaggcuaucugggggcccucagaacaggaugguacaccucuguuaucacaauugaacugagcaacaucaaggagaucaaaugcaauggcaccgacgccaaggugaaacuuauuaagcaggaacuggauaaguauaaaaacgcugugacggaccuccagcugcugaugcaguccaccccugccgcugggucuggaagcgccaucgcguccggcauugccgucuguaaggugcuccaccuggagggggagguuaauaaaaucaagaacgcccuucugagcacaaauaaagcuguggucucucucuccggaugcggcgugagcguucugaccuucaaggugcuugaucugaagaacuacauugacaaacaacuccugccgauccugaauaagcagucuuguuccauucccaacaucgaaacagucaucgaguuucagcagaaaaauaaccggcuccuggaaauuacccgcgaguucagcgugaaugcuggcgugacgacaccugucucuaccuauaugcuuacaaacuccgagcugcucagccugaucaaugauaugcccauuaccaacgaccaaaagaaacuuauguccaacaauguucagaucgugagacagcagucuuacagcauuaugugcaucaucaaggaagaggugcuggccuaugucgugcaacucccucuguacgggguuauugauacccccuguuggaaacugcauacauccccucucugcacgaccaacacaaaggaaggaagcaauaucugucugacccggacagaccgcggcugguacugcgauaacgcggggucuguguccuuuuucccgcaggccgagaccuguaagguccagagcaauagaguguuuugcgacacgaugaacucucuuacacugcccagcgaaguuaaucucugcaacauugauaucuucaauccuaaauaugacuguaagauuaugaccuccaaaaccgaugugucuagcuccgucaucacaagccugggagcuaucgugucuugcuacggcaagaccaaauguacagccuccaacaagugccgggggauuaucaagacguuuagcaauggaugugacuaugucucuaacaaaggcguggacaccguuuccgugggcaauacacuuuacuaugucaacaagcaagaggggcagagccuguacgugaaaggagagcccauuaucaauuucuaugauccucucguuuuucccuccgacgaguucgaugcuucuauuagccaggugaacgaaaagaucaaccagucccuggccuuuauucgcaaaucugacgaacugcuccacaaugucaacgugggcaagagcaccacaaauaucaugaucaccacgauuaucauugugaucauuguuauccugcuucugcucaucgccgucgggcuguuccuguacugcaaggcuagauccaccccggugacacuuagcaaagaucaacucucuggaauuaacaauaucgcguucuccaacugaggacuaguaauaaggaaacuguaugaaugucugugggcaggaagugaagagauccuucuguaaagguuuuuggaauuaugucugcugaauaauaaacuuuuuugaaauaauaaaucugguagaaaaaugagaucuaaaaaaaaaaaaaaaaaaaaaaaaaaaaaaaaaaaaaaaaaaaaaaaaaaaaaaaaaaaaaaaaugcaucccccccccccccccccccccccccccccccaaaggcucuuuucagagccaccagaauu

SEQ ID NO: 19249 - RNA, 1964 nt, Artificial Sequence
  mRNA product Design d-2 comprising derived and/or modified sequence from HRSV(Memphis-37)__AIY60640.1__F_DSCav1_mut8 (opt6)
gggagagcggcucggccauuuugucccagucaguccggaggcugcggcugcagaaguaccgccugcggaguaacugcaaagaagcuuaccauggaacuuccuauuuuaaaaacaaacgcaauuacaaccauauuagcagcaguaacacuaugcuuugcaucaucacaaaacaucaccgaagaauuuuaucaauccacaugcucagcaguaucaaaaggauaccuuggcgcacuccgaacaggcugguauacaucggucauaacuauagaacucuccaacauaaaagaaauaaaaugcaaugguacugacgcaaaaguaaaauuaauaaaacaagaacuagacaaauacaaaaacgcaguaaccgauuuacaacuacuuaugcaaucaacaccugcagcaggaagcggaucagcaauagcaaguggaauagcaguaugcaaaguacuucaccucgaaggagaaguaaauaaaauaaaaaacgccuuacuaucaacaaauaaagccgucguaucacuuuccgguugcggcguaucaguauuaaccuuuaaagucuuagacuuaaaaaacuacauagacaaacaauuauuaccaauacuaaacaaacaauccuguuccauacccaacauagaaaccguaauagaauuucaacaaaaaaacaacagacuauuagaaauaacacgcgaauuuucaguaaacgcaggcguaacaacaccaguaucaacauauauguuaaccaauucagaauuauuaucccuuauaaaugacaugccuauaacaaacgaccaaaaaaaauuaaugaguaacaacguucaaauaguaagacaacaaucauacagcauaaugugcauaauaaaagaagaaguacuagcauacguaguucaacuaccacucuauggcguuaucgacaccccaugcuggaaacuacauaccucaccacucuguaccacuaauacgaaagaaggaucuaacauaugccuaaccagaacagaucgagguugguauugcgacaaugcuggaucaguaucauucuucccacaagcagaaaccugcaaaguacaaagcaacagaguauuuugugacacuaugaacucacuaacgcuaccuucagaaguaaaccuaugcaacaucgacauauucaacccaaaauacgauugcaaaauaaugacaucaaaaacagacguuuccucaucaguaauaacaucauuaggagcaauaguauccugcuacgguaaaaccaaaugcacagcauccaauaaaugccgaggaaucauuaaaacauuuucaaauggcugcgacuauguaaguaauaaagguguagauacaguaucaguaggcaacacacuauauuacguaaacaaacaagaagggcaaucccuauaugucaaaggcgaaccaauuauaaacuucuacgacccccucguauucccaucagacgaauuugacgcaucaauaucccaaguaaacgaaaaaaucaaccaaucacucgcauucauacguaaauccgacgaauuacuacauaacguaaacguaggcaaaucaacaacaaauauaaugauaacaaccauaaucauaguaauaauaguuauacuccuacuacucauugcagucggccuauuucuauacuguaaagcacgcucuacaccaguaacacuaucuaaagaucaauuauccggaauaaacaacauugccuucuccaauuaaggacuaguaauaaggaaacuguaugaaugucugugggcaggaagugaagagauccuucuguaaagguuuuuggaauuaugucugcugaauaauaaacuuuuuugaaauaauaaaucugguagaaaaaugagaucuaaaaaaaaaaaaaaaaaaaaaaaaaaaaaaaaaaaaaaaaaaaaaaaaaaaaaaaaaaaaaaaaugcaucccccccccccccccccccccccccccccccaaaggcucuuuucagagccaccagaauu

SEQ ID NO: 19250 - RNA, 1964 nt, Artificial Sequence
  mRNA product Design d-2 comprising derived and/or modified sequence from HRSV(Memphis-37)__AIY60640.1__F_DSCav1_mut8 (opt11)
gggagagcggcucggccauuuugucccagucaguccggaggcugcggcugcagaaguaccgccugcggaguaacugcaaagaagcuuaccauggaacuucccauccugaagaccaacgcuaucacaaccauccucgccgcagucacccuuugcuucgccucaucccaaaacaucaccgaagaauuuuaccagucaaccugcucggccgucuccaagggcuaccucggcgcccuccgcacuggcugguacacauccgucaucaccaucgaacucuccaacauaaaagaaauaaaaugcaacggaaccgacgccaaagucaaacucaucaaacaagaacuagauaaauauaaaaacgccgucaccgaccugcaacuccucaugcaauccaccccagccgccggcucuggcagcgccaucgcaagcggaaucgccgucugcaaaguccuccaccuagaaggcgaagucaacaaaauuaaaaacgcccuccucuccaccaacaaagcaguugucucccucucuggcugcggagucucuguacucaccuucaaaguacuagaccucaagaauuacauagacaaacaacuccugcccauccuuaacaaacaaaguuguaguauccccaacaucgaaacaguaaucgaauuucagcagaaaaacaaccgccuccucgaaaucacacgagaguucucggucaacgccggcgucaccacccccguaucaaccuacaugcuaacaaacuccgaacuacuuucccucaucaaugacaugcccauaaccaacgaccaaaagaaacuaauguccaauaacguccagauaguccgucaacaguccuacucaaucaugugcauaauuaaagaagaaguacucgccuacgucguccaacuaccccucuauggagucaucgacacccccugcuggaaacuccacacaucaccccuaugcacaaccaacaccaaagaaggcuccaacaucugccucacaagaaccgaccgcggcugguacugcgacaacgcuggcuccgucucguucuucccacaagccgaaaccugcaaaguccaaucaaaccgggucuucugcgacaccaugaacucccucacucucccaagcgaagucaaccuaugcaacaucgacaucuucaacccaaaauacgacuguaaaaucaugacuucgaaaacagacgucuccucaucaguaaucacauccuuaggcgccaucguguccugcuacgguaagaccaaaugcacagccuccaacaaaugccggggcaucaucaaaaccuucagcaacgguugugauuacgucuccaacaaaggaguagacaccgucuccguaggaaacacccucuacuacgucaacaagcaagaaggccaaucccucuacgucaaaggggaacccaucaucaacuucuacgacccacucgucuuccccuccgacgaguucgacgcaagcaucucccaagucaacgaaaagaucaaccaaucacuagccuucauccgcaaauccgacgaacuccuccacaacguuaacguaggcaaauccaccaccaacaucaugaucacaaccaucaucauagucauaauagucauccuacuacuccucaucgccguaggucuauuccuauacuguaaagcucgaucaacccccgucacacucuccaaagaucaacucucaggaaucaacaacaucgccuucuccaacuaaggacuaguaauaaggaaacuguaugaaugucugugggcaggaagugaagagauccuucuguaaagguuuuuggaauuaugucugcugaauaauaaacuuuuuugaaauaauaaaucugguagaaaaaugagaucuaaaaaaaaaaaaaaaaaaaaaaaaaaaaaaaaaaaaaaaaaaaaaaaaaaaaaaaaaaaaaaaaugcaucccccccccccccccccccccccccccccccaaaggcucuuuucagagccaccagaauu

SEQ ID NO: 19251 - RNA, 2280 nt, Artificial Sequence
  mRNA product Design d-3 comprising derived and/or modified sequence from HRSV(Memphis-37)__AIY60640.1__F_DSCav1_mut8 (opt1)
gggagagggcgcuuggcuugcaaggacccugagcugcggcauugaagcacacccaacccaacucgacugaagucagccucacugaaccggaucugagaaucuucucucucugggcuugccagggcucuccgaaccuagcuagcauccucuucaauuccaacuagaaagcuuaccauggagcugcccauccucaagaccaacgccaucaccacgauccuggccgcggugacccugugcuucgccagcucccagaacaucaccgaggaguucuaccagagcacgugcuccgccgucagcaagggcuaccucggcgcccugcgcaccgggugguacaccagcgugaucaccaucgagcuguccaacaucaaggagaucaagugcaacggcaccgacgccaaggugaagcucaucaagcaggagcuggacaaguacaagaacgcggucacggaccugcagcuccugaugcagagcaccccggccgccggcuccgggagcgcgaucgccuccggcaucgccgucugcaaggugcugcaccucgagggcgaggugaacaagaucaagaacgcccugcuguccaccaacaaggccgucgugagccucuccggcugcggggugagcguccugaccuucaaggugcuggaccucaagaacuacaucgacaagcagcugcugcccauccugaacaagcagagcugcuccauccccaacaucgagaccgucaucgaguuccagcagaagaacaaccgccuccuggagaucacgcgggaguucagcgugaacgcgggcgugaccacccccgucuccaccuacaugcugacgaacagcgagcuccugucccugaucaacgacaugccgaucaccaacgaccagaagaagcucaugagcaacaacgugcagaucgugcgccagcaguccuacagcaucaugugcaucaucaaggaggagguccuggccuacguggugcagcugccccucuacggggucaucgacacccccugcuggaagcugcacaccagcccccugugcacgaccaacaccaaggagggcuccaacaucugccucacccggacggaccgcgggugguacugcgacaacgccggcagcguguccuucuucccgcaggccgagaccugcaagguccagagcaaccggguguucugcgacaccaugaacucccugacccugcccagcgaggugaaccucugcaacaucgacaucuucaaccccaaguacgacugcaagaucaugacguccaagaccgacgucagcuccagcgugaucaccucccugggcgccaucgugagcugcuacgggaagaccaagugcacggcgagcaacaagugccgcggcaucaucaagaccuucuccaacgggugcgacuacgucagcaacaagggcguggacaccguguccgucggcaacacccuguacuacgugaacaagcaggagggccagagccucuacgugaagggggagcccaucaucaacuucuacgacccgcuggucuuccccuccgacgaguucgacgccagcaucucccaggugaacgagaagaucaaccagagccuggccuucauccggaaguccgacgagcuccugcacaacgugaacgucggcaagagcaccacgaacaucaugaucaccaccaucaucaucgugaucaucgugauccugcugcuccugaucgccgucgggcuguuccucuacugcaaggcccgcuccacccccgugacgcugagcaaggaccagcuguccgggaucaacaacaucgcguucagcaacugaggacuagugaagggaacacccaaauuuaauucagccuuaagcacaauuaauuaagagugaaacguaauuguacaagcaguuggucacccaccauagggcaugaucaacaccgcaaccuuuccuuuuucccccagugauucugaaaaaccccucuucccuucagcuugcuuagauguuccaaauuuaguaagcuuaaggcggccuacagaagaaaaagaaaaaaaaggccacaaaaguucccucucacuuucaguaaauaaaauaaaagcagcaacagaaauaaagaaauaaaugaaauucaaaaugaaauaaauauuguguugugcagcauuaaaaaaucaauaaaaauuaaaaaugagcaagaucuaaaaaaaaaaaaaaaaaaaaaaaaaaaaaaaaaaaaaaaaaaaaaaaaaaaaaaaaaaaaaaaaugcaucccccccccccccccccccccccccccccccaaaggcucuuuucagagccaccagaauu

SEQ ID NO: 19252 - RNA, 2280 nt, Artificial Sequence
  mRNA product Design d-3 comprising derived and/or modified sequence from HRSV(Memphis-37)__AIY60640.1__F_DSCav1_mut8 (opt1)
gggagagggcgcuuggcuugcaaggacccugagcugcggcauugaagcacacccaacccaacucgacugaagucagccucacugaaccggaucugagaaucuucucucucugggcuugccagggcucuccgaaccuagcuagcauccucuucaauuccaacuagaaagcuuaccauggagcugcccauccucaagaccaacgccaucaccacgauccuggccgcggugacccugugcuucgccagcucccagaacaucaccgaggaguucuaccagagcacgugcuccgccgucagcaagggcuaccucggggcccugcgcaccggcugguacaccuccgugaucaccaucgagcugagcaacaucaaggagaucaagugcaacgggaccgacgccaaggugaagcucaucaagcaggagcuggacaaguacaagaacgcggucacggaccugcagcuccugaugcaguccaccccggccgccggcagcggguccgccaucgcgagcggcaucgccgugugcaaggugcugcaccucgagggcgaggucaacaagaucaagaacgcccugcuguccaccaacaaggccguggugagccucuccgggugcggcgucagcgugcugaccuucaaggugcuggaccucaagaacuacaucgacaagcagcugcugcccauccucaacaagcaguccugcagcauccccaacaucgagacggucaucgaguuccagcagaagaacaaccggcugcuggagaucacccgcgaguucuccgugaacgccggggugaccacccccgucagcacguacaugcucaccaacuccgagcugcugagccucaucaacgacaugccgaucaccaacgaccagaagaagcugaugagcaacaacgugcagaucgugcggcagcaguccuacagcaucaugugcaucaucaaggaggagguccuggcguacguggugcagcucccccuguacggcgucaucgacacccccugcuggaagcugcacacgagcccccucugcaccaccaacaccaaggagggguccaacaucugccugacgcgcaccgaccggggcugguacugcgacaacgccggcuccgugagcuucuucccgcaggccgagaccugcaaggugcaguccaaccgcgucuucugcgacaccaugaacagccugacgcuccccuccgaggugaaccugugcaacaucgacaucuucaaccccaaguacgacugcaagaucaugaccagcaagaccgacgucuccagcuccgugaucaccagccugggggccaucguguccugcuacggcaagacgaagugcaccgccagcaacaagugccgggggaucaucaagaccuucuccaacggcugcgacuacgucagcaacaagggcguggacaccguguccgucgggaacacgcucuacuacgugaacaagcaggagggccagagccuguacgugaagggggagcccaucaucaacuucuacgacccgcuggucuuccccagcgacgaguucgacgcguccaucagccaggugaacgagaagaucaaccagucccucgccuucauccgcaagagcgacgagcugcugcacaacgugaacgucggcaaguccaccaccaacaucaugaucaccaccaucaucaucgugaucaucgugauccuccugcugcucaucgccgucgggcuguuccuguacugcaaggcccggagcacgcccgugacccuguccaaggaccagcucagcggcaucaacaacaucgccuucuccaacugaggacuagugaagggaacacccaaauuuaauucagccuuaagcacaauuaauuaagagugaaacguaauuguacaagcaguuggucacccaccauagggcaugaucaacaccgcaaccuuuccuuuuucccccagugauucugaaaaaccccucuucccuucagcuugcuuagauguuccaaauuuaguaagcuuaaggcggccuacagaagaaaaagaaaaaaaaggccacaaaaguucccucucacuuucaguaaauaaaauaaaagcagcaacagaaauaaagaaauaaaugaaauucaaaaugaaauaaauauuguguugugcagcauuaaaaaaucaauaaaaauuaaaaaugagcaagaucuaaaaaaaaaaaaaaaaaaaaaaaaaaaaaaaaaaaaaaaaaaaaaaaaaaaaaaaaaaaaaaaaugcaucccccccccccccccccccccccccccccccaaaggcucuuuucagagccaccagaauu

SEQ ID NO: 19253 - RNA, 2280 nt, Artificial Sequence
  mRNA product Design d-3 comprising derived and/or modified sequence from HRSV(Memphis-37)__AIY60640.1__F_DSCav1_mut8 (opt2)
gggagagggcgcuuggcuugcaaggacccugagcugcggcauugaagcacacccaacccaacucgacugaagucagccucacugaaccggaucugagaaucuucucucucugggcuugccagggcucuccgaaccuagcuagcauccucuucaauuccaacuagaaagcuuaccauggagcuccccauccucaagaccaacgccaucaccaccauccucgccgccgucacccucugcuucgccuccucccagaacaucaccgaggaguucuaccaguccaccugcuccgccgucuccaagggcuaccucggcgcccuccgcaccggcugguacaccuccgucaucaccaucgagcucuccaacaucaaggagaucaagugcaacggcaccgacgccaaggucaagcucaucaagcaggagcucgacaaguacaagaacgccgucaccgaccuccagcuccucaugcaguccacccccgccgccggcuccggcuccgccaucgccuccggcaucgccgucugcaagguccuccaccucgagggcgaggucaacaagaucaagaacgcccuccucuccaccaacaaggccgucgucucccucuccggcugcggcgucuccguccucaccuucaagguccucgaccucaagaacuacaucgacaagcagcuccuccccauccucaacaagcaguccugcuccauccccaacaucgagaccgucaucgaguuccagcagaagaacaaccgccuccucgagaucacccgcgaguucuccgucaacgccggcgucaccacccccgucuccaccuacaugcucaccaacuccgagcuccucucccucaucaacgacaugcccaucaccaacgaccagaagaagcucauguccaacaacguccagaucguccgccagcaguccuacuccaucaugugcaucaucaaggaggagguccucgccuacgucguccagcucccccucuacggcgucaucgacacccccugcuggaagcuccacaccuccccccucugcaccaccaacaccaaggagggcuccaacaucugccucacccgcaccgaccgcggcugguacugcgacaacgccggcuccgucuccuucuucccccaggccgagaccugcaagguccaguccaaccgcgucuucugcgacaccaugaacucccucacccuccccuccgaggucaaccucugcaacaucgacaucuucaaccccaaguacgacugcaagaucaugaccuccaagaccgacgucuccuccuccgucaucaccucccucggcgccaucgucuccugcuacggcaagaccaagugcaccgccuccaacaagugccgcggcaucaucaagaccuucuccaacggcugcgacuacgucuccaacaagggcgucgacaccgucuccgucggcaacacccucuacuacgucaacaagcaggagggccagucccucuacgucaagggcgagcccaucaucaacuucuacgacccccucgucuuccccuccgacgaguucgacgccuccaucucccaggucaacgagaagaucaaccagucccucgccuucauccgcaaguccgacgagcuccuccacaacgucaacgucggcaaguccaccaccaacaucaugaucaccaccaucaucaucgucaucaucgucauccuccuccuccucaucgccgucggccucuuccucuacugcaaggcccgcuccacccccgucacccucuccaaggaccagcucuccggcaucaacaacaucgccuucuccaacugaggacuagugaagggaacacccaaauuuaauucagccuuaagcacaauuaauuaagagugaaacguaauuguacaagcaguuggucacccaccauagggcaugaucaacaccgcaaccuuuccuuuuucccccagugauucugaaaaaccccucuucccuucagcuugcuuagauguuccaaauuuaguaagcuuaaggcggccuacagaagaaaaagaaaaaaaaggccacaaaaguucccucucacuuucaguaaauaaaauaaaagcagcaacagaaauaaagaaauaaaugaaauucaaaaugaaauaaauauuguguugugcagcauuaaaaaaucaauaaaaauuaaaaaugagcaagaucuaaaaaaaaaaaaaaaaaaaaaaaaaaaaaaaaaaaaaaaaaaaaaaaaaaaaaaaaaaaaaaaaugcaucccccccccccccccccccccccccccccccaaaggcucuuuucagagccaccagaauu

SEQ ID NO: 19254 - RNA, 2280 nt, Artificial Sequence
  mRNA product Design d-3 comprising derived and/or modified sequence from HRSV(Memphis-37)__AIY60640.1__F_DSCav1_mut8 (opt3)
gggagagggcgcuuggcuugcaaggacccugagcugcggcauugaagcacacccaacccaacucgacugaagucagccucacugaaccggaucugagaaucuucucucucugggcuugccagggcucuccgaaccuagcuagcauccucuucaauuccaacuagaaagcuuaccauggagcugcccauccucaagaccaacgccauuacaacuauacuugcugcagugacgcugugcuucgccagcucccagaauaucaccgaagaguuuuaccaaucuacauguucagcggucaguaaaggcuauuugggggcuuuaagaacuggaugguacaccagcguuauuacaaucgaacuguccaacauuaaggagaucaaaugcaaugguaccgacgccaaggugaaacuaauaaagcaggaacucgauaaguauaaaaacgcaguaacugaccugcagcuucugaugcagucuacuccugccgcuggcucggggucagcaaucgccagcggaauugcuguguguaaggucuugcaccucgagggcgaggugaauaaaaucaagaacgcccugcugaguaccaauaaagcgguugugucccucucugguugcggggucagcguguuaacguucaagguacuggaucuuaagaacuacauugacaaacaauugcugccaauccuaaauaagcaguccuguucaauaccgaacauugaaacuguuaucgaguuucagcagaaaaauaacaggcuccuggaaauuacccgggaguucagugugaaugcaggagucacaacucccgugagcaccuauaugcuuacaaacucugagcuguugucccucaucaaugauaugccuaucaccaacgaccaaaagaaacugaugucaaacaaugugcagauuguccgccagcagagcuacaguauaaugugcaucauuaaggaagagguuuuagccuaugugguacaacugccacucuacggcgugaucgauacgcccuguuggaaacuucauacuucuccucugugcacaaccaacacuaaggaaggcuccaauauauguuugacacgaaccgaccgugggugguacugcgauaacgcuggaagcgucucguuuuucccacaggccgagacguguaaggugcagucuaauagaguuuucugcgacaccaugaacucccuaacacugcccucagaagugaaucucugcaacauugauaucuucaauccuaaauaugacuguaagaucaugacaaguaaaaccgaugucagcuccucugugauuacaagccugggugcaaucguaucaugcuacggcaagacuaaauguaccgcuaguaacaagugcagggggauuauaaagacauuuuccaauggaugugacuauguuagcaacaaaggcguggacaccgucucuguggguaauacucuuuacuaugucaacaagcaagaggggcagucacuguacgugaaaggagagccaaucauuaauuucuaugauccguugguuuuucccagugacgaauuugaugccagcaucucccaggugaacgagaagaucaaccagucucucgcguuuauucggaaaucggacgaacuguuacacaauguaaacgucggcaagagcacgacaaauauaaugaucaccacuauuaucauugugaucauaguuauccugcuacuccugauugccgugggccuuuucuuguacugcaaggcacgcuccaccccugucacacugucaaaagaucaacucagugggaucaacaauauugcuuucucuaacugaggacuagugaagggaacacccaaauuuaauucagccuuaagcacaauuaauuaagagugaaacguaauuguacaagcaguuggucacccaccauagggcaugaucaacaccgcaaccuuuccuuuuucccccagugauucugaaaaaccccucuucccuucagcuugcuuagauguuccaaauuuaguaagcuuaaggcggccuacagaagaaaaagaaaaaaaaggccacaaaaguucccucucacuuucaguaaauaaaauaaaagcagcaacagaaauaaagaaauaaaugaaauucaaaaugaaauaaauauuguguugugcagcauuaaaaaaucaauaaaaauuaaaaaugagcaagaucuaaaaaaaaaaaaaaaaaaaaaaaaaaaaaaaaaaaaaaaaaaaaaaaaaaaaaaaaaaaaaaaaugcaucccccccccccccccccccccccccccccccaaaggcucuuuucagagccaccagaauu

SEQ ID NO: 19255 - RNA, 2280 nt, Artificial Sequence
  mRNA product Design d-3 comprising derived and/or modified sequence from HRSV(Memphis-37)__AIY60640.1__F_DSCav1_mut8 (opt4)
gggagagggcgcuuggcuugcaaggacccugagcugcggcauugaagcacacccaacccaacucgacugaagucagccucacugaaccggaucugagaaucuucucucucugggcuugccagggcucuccgaaccuagcuagcauccucuucaauuccaacuagaaagcuuaccauggagcugcccauccugaagaccaacgccaucaccaccauccuggccgccgugacccugugcuucgccagcagccagaacaucaccgaggaguucuaccagagcaccugcagcgccgugagcaagggcuaccugggcgcccugagaaccggcugguacaccagcgugaucaccaucgagcugagcaacaucaaggagaucaagugcaacggcaccgacgccaaggugaagcugaucaagcaggagcuggacaaguacaagaacgccgugaccgaccugcagcugcugaugcagagcacccccgccgccggcagcggcagcgccaucgccagcggcaucgccgugugcaaggugcugcaccuggagggcgaggugaacaagaucaagaacgcccugcugagcaccaacaaggccguggugagccugagcggcugcggcgugagcgugcugaccuucaaggugcuggaccugaagaacuacaucgacaagcagcugcugcccauccugaacaagcagagcugcagcauccccaacaucgagaccgugaucgaguuccagcagaagaacaacagacugcuggagaucaccagagaguucagcgugaacgccggcgugaccacccccgugagcaccuacaugcugaccaacagcgagcugcugagccugaucaacgacaugcccaucaccaacgaccagaagaagcugaugagcaacaacgugcagaucgugagacagcagagcuacagcaucaugugcaucaucaaggaggaggugcuggccuacguggugcagcugccccuguacggcgugaucgacacccccugcuggaagcugcacaccagcccccugugcaccaccaacaccaaggagggcagcaacaucugccugaccagaaccgacagaggcugguacugcgacaacgccggcagcgugagcuucuucccccaggccgagaccugcaaggugcagagcaacagaguguucugcgacaccaugaacagccugacccugcccagcgaggugaaccugugcaacaucgacaucuucaaccccaaguacgacugcaagaucaugaccagcaagaccgacgugagcagcagcgugaucaccagccugggcgccaucgugagcugcuacggcaagaccaagugcaccgccagcaacaagugcagaggcaucaucaagaccuucagcaacggcugcgacuacgugagcaacaagggcguggacaccgugagcgugggcaacacccuguacuacgugaacaagcaggagggccagagccuguacgugaagggcgagcccaucaucaacuucuacgacccccugguguuccccagcgacgaguucgacgccagcaucagccaggugaacgagaagaucaaccagagccuggccuucaucagaaagagcgacgagcugcugcacaacgugaacgugggcaagagcaccaccaacaucaugaucaccaccaucaucaucgugaucaucgugauccugcugcugcugaucgccgugggccuguuccuguacugcaaggccagaagcacccccgugacccugagcaaggaccagcugagcggcaucaacaacaucgccuucagcaacugaggacuagugaagggaacacccaaauuuaauucagccuuaagcacaauuaauuaagagugaaacguaauuguacaagcaguuggucacccaccauagggcaugaucaacaccgcaaccuuuccuuuuucccccagugauucugaaaaaccccucuucccuucagcuugcuuagauguuccaaauuuaguaagcuuaaggcggccuacagaagaaaaagaaaaaaaaggccacaaaaguucccucucacuuucaguaaauaaaauaaaagcagcaacagaaauaaagaaauaaaugaaauucaaaaugaaauaaauauuguguugugcagcauuaaaaaaucaauaaaaauuaaaaaugagcaagaucuaaaaaaaaaaaaaaaaaaaaaaaaaaaaaaaaaaaaaaaaaaaaaaaaaaaaaaaaaaaaaaaaugcaucccccccccccccccccccccccccccccccaaaggcucuuuucagagccaccagaauu

SEQ ID NO: 19256 - RNA, 2280 nt, Artificial Sequence
  mRNA product Design d-3 comprising derived and/or modified sequence from HRSV(Memphis-37)__AIY60640.1__F_DSCav1_mut8 (opt5)
gggagagggcgcuuggcuugcaaggacccugagcugcggcauugaagcacacccaacccaacucgacugaagucagccucacugaaccggaucugagaaucuucucucucugggcuugccagggcucuccgaaccuagcuagcauccucuucaauuccaacuagaaagcuuaccauggagcugcccauccucaagaccaacgccauuacaacgauccuggcugccgugacccuuugcuucgcgagcucccagaauauuacagaagaguuuuaccaaucuaccuguagcgcugucuccaaaggcuaucugggggcccucagaacaggaugguacaccucuguuaucacaauugaacugagcaacaucaaggagaucaaaugcaauggcaccgacgccaaggugaaacuuauuaagcaggaacuggauaaguauaaaaacgcugugacggaccuccagcugcugaugcaguccaccccugccgcugggucuggaagcgccaucgcguccggcauugccgucuguaaggugcuccaccuggagggggagguuaauaaaaucaagaacgcccuucugagcacaaauaaagcuguggucucucucuccggaugcggcgugagcguucugaccuucaaggugcuugaucugaagaacuacauugacaaacaacuccugccgauccugaauaagcagucuuguuccauucccaacaucgaaacagucaucgaguuucagcagaaaaauaaccggcuccuggaaauuacccgcgaguucagcgugaaugcuggcgugacgacaccugucucuaccuauaugcuuacaaacuccgagcugcucagccugaucaaugauaugcccauuaccaacgaccaaaagaaacuuauguccaacaauguucagaucgugagacagcagucuuacagcauuaugugcaucaucaaggaagaggugcuggccuaugucgugcaacucccucuguacgggguuauugauacccccuguuggaaacugcauacauccccucucugcacgaccaacacaaaggaaggaagcaauaucugucugacccggacagaccgcggcugguacugcgauaacgcggggucuguguccuuuuucccgcaggccgagaccuguaagguccagagcaauagaguguuuugcgacacgaugaacucucuuacacugcccagcgaaguuaaucucugcaacauugauaucuucaauccuaaauaugacuguaagauuaugaccuccaaaaccgaugugucuagcuccgucaucacaagccugggagcuaucgugucuugcuacggcaagaccaaauguacagccuccaacaagugccgggggauuaucaagacguuuagcaauggaugugacuaugucucuaacaaaggcguggacaccguuuccgugggcaauacacuuuacuaugucaacaagcaagaggggcagagccuguacgugaaaggagagcccauuaucaauuucuaugauccucucguuuuucccuccgacgaguucgaugcuucuauuagccaggugaacgaaaagaucaaccagucccuggccuuuauucgcaaaucugacgaacugcuccacaaugucaacgugggcaagagcaccacaaauaucaugaucaccacgauuaucauugugaucauuguuauccugcuucugcucaucgccgucgggcuguuccuguacugcaaggcuagauccaccccggugacacuuagcaaagaucaacucucuggaauuaacaauaucgcguucuccaacugaggacuagugaagggaacacccaaauuuaauucagccuuaagcacaauuaauuaagagugaaacguaauuguacaagcaguuggucacccaccauagggcaugaucaacaccgcaaccuuuccuuuuucccccagugauucugaaaaaccccucuucccuucagcuugcuuagauguuccaaauuuaguaagcuuaaggcggccuacagaagaaaaagaaaaaaaaggccacaaaaguucccucucacuuucaguaaauaaaauaaaagcagcaacagaaauaaagaaauaaaugaaauucaaaaugaaauaaauauuguguugugcagcauuaaaaaaucaauaaaaauuaaaaaugagcaagaucuaaaaaaaaaaaaaaaaaaaaaaaaaaaaaaaaaaaaaaaaaaaaaaaaaaaaaaaaaaaaaaaaugcaucccccccccccccccccccccccccccccccaaaggcucuuuucagagccaccagaauu

SEQ ID NO: 19257 - RNA, 2280 nt, Artificial Sequence
  mRNA product Design d-3 comprising derived and/or modified sequence from HRSV(Memphis-37)__AIY60640.1__F_DSCav1_mut8 (opt6)
gggagagggcgcuuggcuugcaaggacccugagcugcggcauugaagcacacccaacccaacucgacugaagucagccucacugaaccggaucugagaaucuucucucucugggcuugccagggcucuccgaaccuagcuagcauccucuucaauuccaacuagaaagcuuaccauggaacuuccuauuuuaaaaacaaacgcaauuacaaccauauuagcagcaguaacacuaugcuuugcaucaucacaaaacaucaccgaagaauuuuaucaauccacaugcucagcaguaucaaaaggauaccuuggcgcacuccgaacaggcugguauacaucggucauaacuauagaacucuccaacauaaaagaaauaaaaugcaaugguacugacgcaaaaguaaaauuaauaaaacaagaacuagacaaauacaaaaacgcaguaaccgauuuacaacuacuuaugcaaucaacaccugcagcaggaagcggaucagcaauagcaaguggaauagcaguaugcaaaguacuucaccucgaaggagaaguaaauaaaauaaaaaacgccuuacuaucaacaaauaaagccgucguaucacuuuccgguugcggcguaucaguauuaaccuuuaaagucuuagacuuaaaaaacuacauagacaaacaauuauuaccaauacuaaacaaacaauccuguuccauacccaacauagaaaccguaauagaauuucaacaaaaaaacaacagacuauuagaaauaacacgcgaauuuucaguaaacgcaggcguaacaacaccaguaucaacauauauguuaaccaauucagaauuauuaucccuuauaaaugacaugccuauaacaaacgaccaaaaaaaauuaaugaguaacaacguucaaauaguaagacaacaaucauacagcauaaugugcauaauaaaagaagaaguacuagcauacguaguucaacuaccacucuauggcguuaucgacaccccaugcuggaaacuacauaccucaccacucuguaccacuaauacgaaagaaggaucuaacauaugccuaaccagaacagaucgagguugguauugcgacaaugcuggaucaguaucauucuucccacaagcagaaaccugcaaaguacaaagcaacagaguauuuugugacacuaugaacucacuaacgcuaccuucagaaguaaaccuaugcaacaucgacauauucaacccaaaauacgauugcaaaauaaugacaucaaaaacagacguuuccucaucaguaauaacaucauuaggagcaauaguauccugcuacgguaaaaccaaaugcacagcauccaauaaaugccgaggaaucauuaaaacauuuucaaauggcugcgacuauguaaguaauaaagguguagauacaguaucaguaggcaacacacuauauuacguaaacaaacaagaagggcaaucccuauaugucaaaggcgaaccaauuauaaacuucuacgacccccucguauucccaucagacgaauuugacgcaucaauaucccaaguaaacgaaaaaaucaaccaaucacucgcauucauacguaaauccgacgaauuacuacauaacguaaacguaggcaaaucaacaacaaauauaaugauaacaaccauaaucauaguaauaauaguuauacuccuacuacucauugcagucggccuauuucuauacuguaaagcacgcucuacaccaguaacacuaucuaaagaucaauuauccggaauaaacaacauugccuucuccaauuaaggacuagugaagggaacacccaaauuuaauucagccuuaagcacaauuaauuaagagugaaacguaauuguacaagcaguuggucacccaccauagggcaugaucaacaccgcaaccuuuccuuuuucccccagugauucugaaaaaccccucuucccuucagcuugcuuagauguuccaaauuuaguaagcuuaaggcggccuacagaagaaaaagaaaaaaaaggccacaaaaguucccucucacuuucaguaaauaaaauaaaagcagcaacagaaauaaagaaauaaaugaaauucaaaaugaaauaaauauuguguugugcagcauuaaaaaaucaauaaaaauuaaaaaugagcaagaucuaaaaaaaaaaaaaaaaaaaaaaaaaaaaaaaaaaaaaaaaaaaaaaaaaaaaaaaaaaaaaaaaugcaucccccccccccccccccccccccccccccccaaaggcucuuuucagagccaccagaauu

SEQ ID NO: 19258 - RNA, 2280 nt, Artificial Sequence
  mRNA product Design d-3 comprising derived and/or modified sequence from HRSV(Memphis-37)__AIY60640.1__F_DSCav1_mut8 (opt11)
gggagagggcgcuuggcuugcaaggacccugagcugcggcauugaagcacacccaacccaacucgacugaagucagccucacugaaccggaucugagaaucuucucucucugggcuugccagggcucuccgaaccuagcuagcauccucuucaauuccaacuagaaagcuuaccauggaacuucccauccugaagaccaacgcuaucacaaccauccucgccgcagucacccuuugcuucgccucaucccaaaacaucaccgaagaauuuuaccagucaaccugcucggccgucuccaagggcuaccucggcgcccuccgcacuggcugguacacauccgucaucaccaucgaacucuccaacauaaaagaaauaaaaugcaacggaaccgacgccaaagucaaacucaucaaacaagaacuagauaaauauaaaaacgccgucaccgaccugcaacuccucaugcaauccaccccagccgccggcucuggcagcgccaucgcaagcggaaucgccgucugcaaaguccuccaccuagaaggcgaagucaacaaaauuaaaaacgcccuccucuccaccaacaaagcaguugucucccucucuggcugcggagucucuguacucaccuucaaaguacuagaccucaagaauuacauagacaaacaacuccugcccauccuuaacaaacaaaguuguaguauccccaacaucgaaacaguaaucgaauuucagcagaaaaacaaccgccuccucgaaaucacacgagaguucucggucaacgccggcgucaccacccccguaucaaccuacaugcuaacaaacuccgaacuacuuucccucaucaaugacaugcccauaaccaacgaccaaaagaaacuaauguccaauaacguccagauaguccgucaacaguccuacucaaucaugugcauaauuaaagaagaaguacucgccuacgucguccaacuaccccucuauggagucaucgacacccccugcuggaaacuccacacaucaccccuaugcacaaccaacaccaaagaaggcuccaacaucugccucacaagaaccgaccgcggcugguacugcgacaacgcuggcuccgucucguucuucccacaagccgaaaccugcaaaguccaaucaaaccgggucuucugcgacaccaugaacucccucacucucccaagcgaagucaaccuaugcaacaucgacaucuucaacccaaaauacgacuguaaaaucaugacuucgaaaacagacgucuccucaucaguaaucacauccuuaggcgccaucguguccugcuacgguaagaccaaaugcacagccuccaacaaaugccggggcaucaucaaaaccuucagcaacgguugugauuacgucuccaacaaaggaguagacaccgucuccguaggaaacacccucuacuacgucaacaagcaagaaggccaaucccucuacgucaaaggggaacccaucaucaacuucuacgacccacucgucuuccccuccgacgaguucgacgcaagcaucucccaagucaacgaaaagaucaaccaaucacuagccuucauccgcaaauccgacgaacuccuccacaacguuaacguaggcaaauccaccaccaacaucaugaucacaaccaucaucauagucauaauagucauccuacuacuccucaucgccguaggucuauuccuauacuguaaagcucgaucaacccccgucacacucuccaaagaucaacucucaggaaucaacaacaucgccuucuccaacuaaggacuagugaagggaacacccaaauuuaauucagccuuaagcacaauuaauuaagagugaaacguaauuguacaagcaguuggucacccaccauagggcaugaucaacaccgcaaccuuuccuuuuucccccagugauucugaaaaaccccucuucccuucagcuugcuuagauguuccaaauuuaguaagcuuaaggcggccuacagaagaaaaagaaaaaaaaggccacaaaaguucccucucacuuucaguaaauaaaauaaaagcagcaacagaaauaaagaaauaaaugaaauucaaaaugaaauaaauauuguguugugcagcauuaaaaaaucaauaaaaauuaaaaaugagcaagaucuaaaaaaaaaaaaaaaaaaaaaaaaaaaaaaaaaaaaaaaaaaaaaaaaaaaaaaaaaaaaaaaaugcaucccccccccccccccccccccccccccccccaaaggcucuuuucagagccaccagaauu

SEQ ID NO: 19259 - RNA, 1963 nt, Artificial Sequence
  mRNA product Design d-4 comprising derived and/or modified sequence from HRSV(Memphis-37)__AIY60640.1__F_DSCav1_mut8 (opt1)
gggagagucccgcagucggcguccagcggcucugcuuguucgugugugugucguugcaggccuuauucaagcuuaccauggagcugcccauccucaagaccaacgccaucaccacgauccuggccgcggugacccugugcuucgccagcucccagaacaucaccgaggaguucuaccagagcacgugcuccgccgucagcaagggcuaccucggcgcccugcgcaccgggugguacaccagcgugaucaccaucgagcuguccaacaucaaggagaucaagugcaacggcaccgacgccaaggugaagcucaucaagcaggagcuggacaaguacaagaacgcggucacggaccugcagcuccugaugcagagcaccccggccgccggcuccgggagcgcgaucgccuccggcaucgccgucugcaaggugcugcaccucgagggcgaggugaacaagaucaagaacgcccugcuguccaccaacaaggccgucgugagccucuccggcugcggggugagcguccugaccuucaaggugcuggaccucaagaacuacaucgacaagcagcugcugcccauccugaacaagcagagcugcuccauccccaacaucgagaccgucaucgaguuccagcagaagaacaaccgccuccuggagaucacgcgggaguucagcgugaacgcgggcgugaccacccccgucuccaccuacaugcugacgaacagcgagcuccugucccugaucaacgacaugccgaucaccaacgaccagaagaagcucaugagcaacaacgugcagaucgugcgccagcaguccuacagcaucaugugcaucaucaaggaggagguccuggccuacguggugcagcugccccucuacggggucaucgacacccccugcuggaagcugcacaccagcccccugugcacgaccaacaccaaggagggcuccaacaucugccucacccggacggaccgcgggugguacugcgacaacgccggcagcguguccuucuucccgcaggccgagaccugcaagguccagagcaaccggguguucugcgacaccaugaacucccugacccugcccagcgaggugaaccucugcaacaucgacaucuucaaccccaaguacgacugcaagaucaugacguccaagaccgacgucagcuccagcgugaucaccucccugggcgccaucgugagcugcuacgggaagaccaagugcacggcgagcaacaagugccgcggcaucaucaagaccuucuccaacgggugcgacuacgucagcaacaagggcguggacaccguguccgucggcaacacccuguacuacgugaacaagcaggagggccagagccucuacgugaagggggagcccaucaucaacuucuacgacccgcuggucuuccccuccgacgaguucgacgccagcaucucccaggugaacgagaagaucaaccagagccuggccuucauccggaaguccgacgagcuccugcacaacgugaacgucggcaagagcaccacgaacaucaugaucaccaccaucaucaucgugaucaucgugauccugcugcuccugaucgccgucgggcuguuccucuacugcaaggcccgcuccacccccgugacgcugagcaaggaccagcuguccgggaucaacaacaucgcguucagcaacugaggacuaguggaagcauuuuccuggcugauuaaaagaaauuacucagcuauggucaucuguuccuguuagaaggcuaugcagcauauuauauacuaugcgcauguuaugaaaugcauaauaaaaaauuuuaaaaaaucuaaaagaucuaaaaaaaaaaaaaaaaaaaaaaaaaaaaaaaaaaaaaaaaaaaaaaaaaaaaaaaaaaaaaaaaugcaucccccccccccccccccccccccccccccccaaaggcucuuuucagagccaccagaauu

SEQ ID NO: 19260 - RNA, 1963 nt, Artificial Sequence
  mRNA product Design d-4 comprising derived and/or modified sequence from HRSV(Memphis-37)__AIY60640.1__F_DSCav1_mut8 (opt1)
gggagagucccgcagucggcguccagcggcucugcuuguucgugugugugucguugcaggccuuauucaagcuuaccauggagcugcccauccucaagaccaacgccaucaccacgauccuggccgcggugacccugugcuucgccagcucccagaacaucaccgaggaguucuaccagagcacgugcuccgccgucagcaagggcuaccucggggcccugcgcaccggcugguacaccuccgugaucaccaucgagcugagcaacaucaaggagaucaagugcaacgggaccgacgccaaggugaagcucaucaagcaggagcuggacaaguacaagaacgcggucacggaccugcagcuccugaugcaguccaccccggccgccggcagcggguccgccaucgcgagcggcaucgccgugugcaaggugcugcaccucgagggcgaggucaacaagaucaagaacgcccugcuguccaccaacaaggccguggugagccucuccgggugcggcgucagcgugcugaccuucaaggugcuggaccucaagaacuacaucgacaagcagcugcugcccauccucaacaagcaguccugcagcauccccaacaucgagacggucaucgaguuccagcagaagaacaaccggcugcuggagaucacccgcgaguucuccgugaacgccggggugaccacccccgucagcacguacaugcucaccaacuccgagcugcugagccucaucaacgacaugccgaucaccaacgaccagaagaagcugaugagcaacaacgugcagaucgugcggcagcaguccuacagcaucaugugcaucaucaaggaggagguccuggcguacguggugcagcucccccuguacggcgucaucgacacccccugcuggaagcugcacacgagcccccucugcaccaccaacaccaaggagggguccaacaucugccugacgcgcaccgaccggggcugguacugcgacaacgccggcuccgugagcuucuucccgcaggccgagaccugcaaggugcaguccaaccgcgucuucugcgacaccaugaacagccugacgcuccccuccgaggugaaccugugcaacaucgacaucuucaaccccaaguacgacugcaagaucaugaccagcaagaccgacgucuccagcuccgugaucaccagccugggggccaucguguccugcuacggcaagacgaagugcaccgccagcaacaagugccgggggaucaucaagaccuucuccaacggcugcgacuacgucagcaacaagggcguggacaccguguccgucgggaacacgcucuacuacgugaacaagcaggagggccagagccuguacgugaagggggagcccaucaucaacuucuacgacccgcuggucuuccccagcgacgaguucgacgcguccaucagccaggugaacgagaagaucaaccagucccucgccuucauccgcaagagcgacgagcugcugcacaacgugaacgucggcaaguccaccaccaacaucaugaucaccaccaucaucaucgugaucaucgugauccuccugcugcucaucgccgucgggcuguuccuguacugcaaggcccggagcacgcccgugacccuguccaaggaccagcucagcggcaucaacaacaucgccuucuccaacugaggacuaguggaagcauuuuccuggcugauuaaaagaaauuacucagcuauggucaucuguuccuguuagaaggcuaugcagcauauuauauacuaugcgcauguuaugaaaugcauaauaaaaaauuuuaaaaaaucuaaaagaucuaaaaaaaaaaaaaaaaaaaaaaaaaaaaaaaaaaaaaaaaaaaaaaaaaaaaaaaaaaaaaaaaugcaucccccccccccccccccccccccccccccccaaaggcucuuuucagagccaccagaauu

SEQ ID NO: 19261 - RNA, 1963 nt, Artificial Sequence
  mRNA product Design d-4 comprising derived and/or modified sequence from HRSV(Memphis-37)__AIY60640.1__F_DSCav1_mut8 (opt2)
gggagagucccgcagucggcguccagcggcucugcuuguucgugugugugucguugcaggccuuauucaagcuuaccauggagcuccccauccucaagaccaacgccaucaccaccauccucgccgccgucacccucugcuucgccuccucccagaacaucaccgaggaguucuaccaguccaccugcuccgccgucuccaagggcuaccucggcgcccuccgcaccggcugguacaccuccgucaucaccaucgagcucuccaacaucaaggagaucaagugcaacggcaccgacgccaaggucaagcucaucaagcaggagcucgacaaguacaagaacgccgucaccgaccuccagcuccucaugcaguccacccccgccgccggcuccggcuccgccaucgccuccggcaucgccgucugcaagguccuccaccucgagggcgaggucaacaagaucaagaacgcccuccucuccaccaacaaggccgucgucucccucuccggcugcggcgucuccguccucaccuucaagguccucgaccucaagaacuacaucgacaagcagcuccuccccauccucaacaagcaguccugcuccauccccaacaucgagaccgucaucgaguuccagcagaagaacaaccgccuccucgagaucacccgcgaguucuccgucaacgccggcgucaccacccccgucuccaccuacaugcucaccaacuccgagcuccucucccucaucaacgacaugcccaucaccaacgaccagaagaagcucauguccaacaacguccagaucguccgccagcaguccuacuccaucaugugcaucaucaaggaggagguccucgccuacgucguccagcucccccucuacggcgucaucgacacccccugcuggaagcuccacaccuccccccucugcaccaccaacaccaaggagggcuccaacaucugccucacccgcaccgaccgcggcugguacugcgacaacgccggcuccgucuccuucuucccccaggccgagaccugcaagguccaguccaaccgcgucuucugcgacaccaugaacucccucacccuccccuccgaggucaaccucugcaacaucgacaucuucaaccccaaguacgacugcaagaucaugaccuccaagaccgacgucuccuccuccgucaucaccucccucggcgccaucgucuccugcuacggcaagaccaagugcaccgccuccaacaagugccgcggcaucaucaagaccuucuccaacggcugcgacuacgucuccaacaagggcgucgacaccgucuccgucggcaacacccucuacuacgucaacaagcaggagggccagucccucuacgucaagggcgagcccaucaucaacuucuacgacccccucgucuuccccuccgacgaguucgacgccuccaucucccaggucaacgagaagaucaaccagucccucgccuucauccgcaaguccgacgagcuccuccacaacgucaacgucggcaaguccaccaccaacaucaugaucaccaccaucaucaucgucaucaucgucauccuccuccuccucaucgccgucggccucuuccucuacugcaaggcccgcuccacccccgucacccucuccaaggaccagcucuccggcaucaacaacaucgccuucuccaacugaggacuaguggaagcauuuuccuggcugauuaaaagaaauuacucagcuauggucaucuguuccuguuagaaggcuaugcagcauauuauauacuaugcgcauguuaugaaaugcauaauaaaaaauuuuaaaaaaucuaaaagaucuaaaaaaaaaaaaaaaaaaaaaaaaaaaaaaaaaaaaaaaaaaaaaaaaaaaaaaaaaaaaaaaaugcaucccccccccccccccccccccccccccccccaaaggcucuuuucagagccaccagaauu

SEQ ID NO: 19262 - RNA, 1963 nt, Artificial Sequence
  mRNA product Design d-4 comprising derived and/or modified sequence from HRSV(Memphis-37)__AIY60640.1__F_DSCav1_mut8 (opt3)
gggagagucccgcagucggcguccagcggcucugcuuguucgugugugugucguugcaggccuuauucaagcuuaccauggagcugcccauccucaagaccaacgccauuacaacuauacuugcugcagugacgcugugcuucgccagcucccagaauaucaccgaagaguuuuaccaaucuacauguucagcggucaguaaaggcuauuugggggcuuuaagaacuggaugguacaccagcguuauuacaaucgaacuguccaacauuaaggagaucaaaugcaaugguaccgacgccaaggugaaacuaauaaagcaggaacucgauaaguauaaaaacgcaguaacugaccugcagcuucugaugcagucuacuccugccgcuggcucggggucagcaaucgccagcggaauugcuguguguaaggucuugcaccucgagggcgaggugaauaaaaucaagaacgcccugcugaguaccaauaaagcgguugugucccucucugguugcggggucagcguguuaacguucaagguacuggaucuuaagaacuacauugacaaacaauugcugccaauccuaaauaagcaguccuguucaauaccgaacauugaaacuguuaucgaguuucagcagaaaaauaacaggcuccuggaaauuacccgggaguucagugugaaugcaggagucacaacucccgugagcaccuauaugcuuacaaacucugagcuguugucccucaucaaugauaugccuaucaccaacgaccaaaagaaacugaugucaaacaaugugcagauuguccgccagcagagcuacaguauaaugugcaucauuaaggaagagguuuuagccuaugugguacaacugccacucuacggcgugaucgauacgcccuguuggaaacuucauacuucuccucugugcacaaccaacacuaaggaaggcuccaauauauguuugacacgaaccgaccgugggugguacugcgauaacgcuggaagcgucucguuuuucccacaggccgagacguguaaggugcagucuaauagaguuuucugcgacaccaugaacucccuaacacugcccucagaagugaaucucugcaacauugauaucuucaauccuaaauaugacuguaagaucaugacaaguaaaaccgaugucagcuccucugugauuacaagccugggugcaaucguaucaugcuacggcaagacuaaauguaccgcuaguaacaagugcagggggauuauaaagacauuuuccaauggaugugacuauguuagcaacaaaggcguggacaccgucucuguggguaauacucuuuacuaugucaacaagcaagaggggcagucacuguacgugaaaggagagccaaucauuaauuucuaugauccguugguuuuucccagugacgaauuugaugccagcaucucccaggugaacgagaagaucaaccagucucucgcguuuauucggaaaucggacgaacuguuacacaauguaaacgucggcaagagcacgacaaauauaaugaucaccacuauuaucauugugaucauaguuauccugcuacuccugauugccgugggccuuuucuuguacugcaaggcacgcuccaccccugucacacugucaaaagaucaacucagugggaucaacaauauugcuuucucuaacugaggacuaguggaagcauuuuccuggcugauuaaaagaaauuacucagcuauggucaucuguuccuguuagaaggcuaugcagcauauuauauacuaugcgcauguuaugaaaugcauaauaaaaaauuuuaaaaaaucuaaaagaucuaaaaaaaaaaaaaaaaaaaaaaaaaaaaaaaaaaaaaaaaaaaaaaaaaaaaaaaaaaaaaaaaugcaucccccccccccccccccccccccccccccccaaaggcucuuuucagagccaccagaauu

SEQ ID NO: 19263 - RNA, 1963 nt, Artificial Sequence
  mRNA product Design d-4 comprising derived and/or modified sequence from HRSV(Memphis-37)__AIY60640.1__F_DSCav1_mut8 (opt4)
gggagagucccgcagucggcguccagcggcucugcuuguucgugugugugucguugcaggccuuauucaagcuuaccauggagcugcccauccugaagaccaacgccaucaccaccauccuggccgccgugacccugugcuucgccagcagccagaacaucaccgaggaguucuaccagagcaccugcagcgccgugagcaagggcuaccugggcgcccugagaaccggcugguacaccagcgugaucaccaucgagcugagcaacaucaaggagaucaagugcaacggcaccgacgccaaggugaagcugaucaagcaggagcuggacaaguacaagaacgccgugaccgaccugcagcugcugaugcagagcacccccgccgccggcagcggcagcgccaucgccagcggcaucgccgugugcaaggugcugcaccuggagggcgaggugaacaagaucaagaacgcccugcugagcaccaacaaggccguggugagccugagcggcugcggcgugagcgugcugaccuucaaggugcuggaccugaagaacuacaucgacaagcagcugcugcccauccugaacaagcagagcugcagcauccccaacaucgagaccgugaucgaguuccagcagaagaacaacagacugcuggagaucaccagagaguucagcgugaacgccggcgugaccacccccgugagcaccuacaugcugaccaacagcgagcugcugagccugaucaacgacaugcccaucaccaacgaccagaagaagcugaugagcaacaacgugcagaucgugagacagcagagcuacagcaucaugugcaucaucaaggaggaggugcuggccuacguggugcagcugccccuguacggcgugaucgacacccccugcuggaagcugcacaccagcccccugugcaccaccaacaccaaggagggcagcaacaucugccugaccagaaccgacagaggcugguacugcgacaacgccggcagcgugagcuucuucccccaggccgagaccugcaaggugcagagcaacagaguguucugcgacaccaugaacagccugacccugcccagcgaggugaaccugugcaacaucgacaucuucaaccccaaguacgacugcaagaucaugaccagcaagaccgacgugagcagcagcgugaucaccagccugggcgccaucgugagcugcuacggcaagaccaagugcaccgccagcaacaagugcagaggcaucaucaagaccuucagcaacggcugcgacuacgugagcaacaagggcguggacaccgugagcgugggcaacacccuguacuacgugaacaagcaggagggccagagccuguacgugaagggcgagcccaucaucaacuucuacgacccccugguguuccccagcgacgaguucgacgccagcaucagccaggugaacgagaagaucaaccagagccuggccuucaucagaaagagcgacgagcugcugcacaacgugaacgugggcaagagcaccaccaacaucaugaucaccaccaucaucaucgugaucaucgugauccugcugcugcugaucgccgugggccuguuccuguacugcaaggccagaagcacccccgugacccugagcaaggaccagcugagcggcaucaacaacaucgccuucagcaacugaggacuaguggaagcauuuuccuggcugauuaaaagaaauuacucagcuauggucaucuguuccuguuagaaggcuaugcagcauauuauauacuaugcgcauguuaugaaaugcauaauaaaaaauuuuaaaaaaucuaaaagaucuaaaaaaaaaaaaaaaaaaaaaaaaaaaaaaaaaaaaaaaaaaaaaaaaaaaaaaaaaaaaaaaaugcaucccccccccccccccccccccccccccccccaaaggcucuuuucagagccaccagaauu

SEQ ID NO: 19264 - RNA, 1963 nt, Artificial Sequence
  mRNA product Design d-4 comprising derived and/or modified sequence from HRSV(Memphis-37)__AIY60640.1__F_DSCav1_mut8 (opt5)
gggagagucccgcagucggcguccagcggcucugcuuguucgugugugugucguugcaggccuuauucaagcuuaccauggagcugcccauccucaagaccaacgccauuacaacgauccuggcugccgugacccuuugcuucgcgagcucccagaauauuacagaagaguuuuaccaaucuaccuguagcgcugucuccaaaggcuaucugggggcccucagaacaggaugguacaccucuguuaucacaauugaacugagcaacaucaaggagaucaaaugcaauggcaccgacgccaaggugaaacuuauuaagcaggaacuggauaaguauaaaaacgcugugacggaccuccagcugcugaugcaguccaccccugccgcugggucuggaagcgccaucgcguccggcauugccgucuguaaggugcuccaccuggagggggagguuaauaaaaucaagaacgcccuucugagcacaaauaaagcuguggucucucucuccggaugcggcgugagcguucugaccuucaaggugcuugaucugaagaacuacauugacaaacaacuccugccgauccugaauaagcagucuuguuccauucccaacaucgaaacagucaucgaguuucagcagaaaaauaaccggcuccuggaaauuacccgcgaguucagcgugaaugcuggcgugacgacaccugucucuaccuauaugcuuacaaacuccgagcugcucagccugaucaaugauaugcccauuaccaacgaccaaaagaaacuuauguccaacaauguucagaucgugagacagcagucuuacagcauuaugugcaucaucaaggaagaggugcuggccuaugucgugcaacucccucuguacgggguuauugauacccccuguuggaaacugcauacauccccucucugcacgaccaacacaaaggaaggaagcaauaucugucugacccggacagaccgcggcugguacugcgauaacgcggggucuguguccuuuuucccgcaggccgagaccuguaagguccagagcaauagaguguuuugcgacacgaugaacucucuuacacugcccagcgaaguuaaucucugcaacauugauaucuucaauccuaaauaugacuguaagauuaugaccuccaaaaccgaugugucuagcuccgucaucacaagccugggagcuaucgugucuugcuacggcaagaccaaauguacagccuccaacaagugccgggggauuaucaagacguuuagcaauggaugugacuaugucucuaacaaaggcguggacaccguuuccgugggcaauacacuuuacuaugucaacaagcaagaggggcagagccuguacgugaaaggagagcccauuaucaauuucuaugauccucucguuuuucccuccgacgaguucgaugcuucuauuagccaggugaacgaaaagaucaaccagucccuggccuuuauucgcaaaucugacgaacugcuccacaaugucaacgugggcaagagcaccacaaauaucaugaucaccacgauuaucauugugaucauuguuauccugcuucugcucaucgccgucgggcuguuccuguacugcaaggcuagauccaccccggugacacuuagcaaagaucaacucucuggaauuaacaauaucgcguucuccaacugaggacuaguggaagcauuuuccuggcugauuaaaagaaauuacucagcuauggucaucuguuccuguuagaaggcuaugcagcauauuauauacuaugcgcauguuaugaaaugcauaauaaaaaauuuuaaaaaaucuaaaagaucuaaaaaaaaaaaaaaaaaaaaaaaaaaaaaaaaaaaaaaaaaaaaaaaaaaaaaaaaaaaaaaaaugcaucccccccccccccccccccccccccccccccaaaggcucuuuucagagccaccagaauu

SEQ ID NO: 19265 - RNA, 1963 nt, Artificial Sequence
  mRNA product Design d-4 comprising derived and/or modified sequence from HRSV(Memphis-37)__AIY60640.1__F_DSCav1_mut8 (opt6)
gggagagucccgcagucggcguccagcggcucugcuuguucgugugugugucguugcaggccuuauucaagcuuaccauggaacuuccuauuuuaaaaacaaacgcaauuacaaccauauuagcagcaguaacacuaugcuuugcaucaucacaaaacaucaccgaagaauuuuaucaauccacaugcucagcaguaucaaaaggauaccuuggcgcacuccgaacaggcugguauacaucggucauaacuauagaacucuccaacauaaaagaaauaaaaugcaaugguacugacgcaaaaguaaaauuaauaaaacaagaacuagacaaauacaaaaacgcaguaaccgauuuacaacuacuuaugcaaucaacaccugcagcaggaagcggaucagcaauagcaaguggaauagcaguaugcaaaguacuucaccucgaaggagaaguaaauaaaauaaaaaacgccuuacuaucaacaaauaaagccgucguaucacuuuccgguugcggcguaucaguauuaaccuuuaaagucuuagacuuaaaaaacuacauagacaaacaauuauuaccaauacuaaacaaacaauccuguuccauacccaacauagaaaccguaauagaauuucaacaaaaaaacaacagacuauuagaaauaacacgcgaauuuucaguaaacgcaggcguaacaacaccaguaucaacauauauguuaaccaauucagaauuauuaucccuuauaaaugacaugccuauaacaaacgaccaaaaaaaauuaaugaguaacaacguucaaauaguaagacaacaaucauacagcauaaugugcauaauaaaagaagaaguacuagcauacguaguucaacuaccacucuauggcguuaucgacaccccaugcuggaaacuacauaccucaccacucuguaccacuaauacgaaagaaggaucuaacauaugccuaaccagaacagaucgagguugguauugcgacaaugcuggaucaguaucauucuucccacaagcagaaaccugcaaaguacaaagcaacagaguauuuugugacacuaugaacucacuaacgcuaccuucagaaguaaaccuaugcaacaucgacauauucaacccaaaauacgauugcaaaauaaugacaucaaaaacagacguuuccucaucaguaauaacaucauuaggagcaauaguauccugcuacgguaaaaccaaaugcacagcauccaauaaaugccgaggaaucauuaaaacauuuucaaauggcugcgacuauguaaguaauaaagguguagauacaguaucaguaggcaacacacuauauuacguaaacaaacaagaagggcaaucccuauaugucaaaggcgaaccaauuauaaacuucuacgacccccucguauucccaucagacgaauuugacgcaucaauaucccaaguaaacgaaaaaaucaaccaaucacucgcauucauacguaaauccgacgaauuacuacauaacguaaacguaggcaaaucaacaacaaauauaaugauaacaaccauaaucauaguaauaauaguuauacuccuacuacucauugcagucggccuauuucuauacuguaaagcacgcucuacaccaguaacacuaucuaaagaucaauuauccggaauaaacaacauugccuucuccaauuaaggacuaguggaagcauuuuccuggcugauuaaaagaaauuacucagcuauggucaucuguuccuguuagaaggcuaugcagcauauuauauacuaugcgcauguuaugaaaugcauaauaaaaaauuuuaaaaaaucuaaaagaucuaaaaaaaaaaaaaaaaaaaaaaaaaaaaaaaaaaaaaaaaaaaaaaaaaaaaaaaaaaaaaaaaugcaucccccccccccccccccccccccccccccccaaaggcucuuuucagagccaccagaauu

SEQ ID NO: 19266 - RNA, 1963 nt, Artificial Sequence
  mRNA product Design d-4 comprising derived and/or modified sequence from HRSV(Memphis-37)__AIY60640.1__F_DSCav1_mut8 (opt11)
gggagagucccgcagucggcguccagcggcucugcuuguucgugugugugucguugcaggccuuauucaagcuuaccauggaacuucccauccugaagaccaacgcuaucacaaccauccucgccgcagucacccuuugcuucgccucaucccaaaacaucaccgaagaauuuuaccagucaaccugcucggccgucuccaagggcuaccucggcgcccuccgcacuggcugguacacauccgucaucaccaucgaacucuccaacauaaaagaaauaaaaugcaacggaaccgacgccaaagucaaacucaucaaacaagaacuagauaaauauaaaaacgccgucaccgaccugcaacuccucaugcaauccaccccagccgccggcucuggcagcgccaucgcaagcggaaucgccgucugcaaaguccuccaccuagaaggcgaagucaacaaaauuaaaaacgcccuccucuccaccaacaaagcaguugucucccucucuggcugcggagucucuguacucaccuucaaaguacuagaccucaagaauuacauagacaaacaacuccugcccauccuuaacaaacaaaguuguaguauccccaacaucgaaacaguaaucgaauuucagcagaaaaacaaccgccuccucgaaaucacacgagaguucucggucaacgccggcgucaccacccccguaucaaccuacaugcuaacaaacuccgaacuacuuucccucaucaaugacaugcccauaaccaacgaccaaaagaaacuaauguccaauaacguccagauaguccgucaacaguccuacucaaucaugugcauaauuaaagaagaaguacucgccuacgucguccaacuaccccucuauggagucaucgacacccccugcuggaaacuccacacaucaccccuaugcacaaccaacaccaaagaaggcuccaacaucugccucacaagaaccgaccgcggcugguacugcgacaacgcuggcuccgucucguucuucccacaagccgaaaccugcaaaguccaaucaaaccgggucuucugcgacaccaugaacucccucacucucccaagcgaagucaaccuaugcaacaucgacaucuucaacccaaaauacgacuguaaaaucaugacuucgaaaacagacgucuccucaucaguaaucacauccuuaggcgccaucguguccugcuacgguaagaccaaaugcacagccuccaacaaaugccggggcaucaucaaaaccuucagcaacgguugugauuacgucuccaacaaaggaguagacaccgucuccguaggaaacacccucuacuacgucaacaagcaagaaggccaaucccucuacgucaaaggggaacccaucaucaacuucuacgacccacucgucuuccccuccgacgaguucgacgcaagcaucucccaagucaacgaaaagaucaaccaaucacuagccuucauccgcaaauccgacgaacuccuccacaacguuaacguaggcaaauccaccaccaacaucaugaucacaaccaucaucauagucauaauagucauccuacuacuccucaucgccguaggucuauuccuauacuguaaagcucgaucaacccccgucacacucuccaaagaucaacucucaggaaucaacaacaucgccuucuccaacuaaggacuaguggaagcauuuuccuggcugauuaaaagaaauuacucagcuauggucaucuguuccuguuagaaggcuaugcagcauauuauauacuaugcgcauguuaugaaaugcauaauaaaaaauuuuaaaaaaucuaaaagaucuaaaaaaaaaaaaaaaaaaaaaaaaaaaaaaaaaaaaaaaaaaaaaaaaaaaaaaaaaaaaaaaaugcaucccccccccccccccccccccccccccccccaaaggcucuuuucagagccaccagaauu

SEQ ID NO: 19267 - RNA, 2060 nt, Artificial Sequence
  mRNA product Design d-5 comprising derived and/or modified sequence from HRSV(Memphis-37)__AIY60640.1__F_DSCav1_mut8 (opt1)
gggagagggcgcuuggcuugcaaggacccugagcugcggcauugaagcacacccaacccaacucgacugaagucagccucacugaaccggaucugagaaucuucucucucugggcuugccagggcucuccgaaccuagcuagcauccucuucaauuccaacuagaaagcuuaccauggagcugcccauccucaagaccaacgccaucaccacgauccuggccgcggugacccugugcuucgccagcucccagaacaucaccgaggaguucuaccagagcacgugcuccgccgucagcaagggcuaccucggcgcccugcgcaccgggugguacaccagcgugaucaccaucgagcuguccaacaucaaggagaucaagugcaacggcaccgacgccaaggugaagcucaucaagcaggagcuggacaaguacaagaacgcggucacggaccugcagcuccugaugcagagcaccccggccgccggcuccgggagcgcgaucgccuccggcaucgccgucugcaaggugcugcaccucgagggcgaggugaacaagaucaagaacgcccugcuguccaccaacaaggccgucgugagccucuccggcugcggggugagcguccugaccuucaaggugcuggaccucaagaacuacaucgacaagcagcugcugcccauccugaacaagcagagcugcuccauccccaacaucgagaccgucaucgaguuccagcagaagaacaaccgccuccuggagaucacgcgggaguucagcgugaacgcgggcgugaccacccccgucuccaccuacaugcugacgaacagcgagcuccugucccugaucaacgacaugccgaucaccaacgaccagaagaagcucaugagcaacaacgugcagaucgugcgccagcaguccuacagcaucaugugcaucaucaaggaggagguccuggccuacguggugcagcugccccucuacggggucaucgacacccccugcuggaagcugcacaccagcccccugugcacgaccaacaccaaggagggcuccaacaucugccucacccggacggaccgcgggugguacugcgacaacgccggcagcguguccuucuucccgcaggccgagaccugcaagguccagagcaaccggguguucugcgacaccaugaacucccugacccugcccagcgaggugaaccucugcaacaucgacaucuucaaccccaaguacgacugcaagaucaugacguccaagaccgacgucagcuccagcgugaucaccucccugggcgccaucgugagcugcuacgggaagaccaagugcacggcgagcaacaagugccgcggcaucaucaagaccuucuccaacgggugcgacuacgucagcaacaagggcguggacaccguguccgucggcaacacccuguacuacgugaacaagcaggagggccagagccucuacgugaagggggagcccaucaucaacuucuacgacccgcuggucuuccccuccgacgaguucgacgccagcaucucccaggugaacgagaagaucaaccagagccuggccuucauccggaaguccgacgagcuccugcacaacgugaacgucggcaagagcaccacgaacaucaugaucaccaccaucaucaucgugaucaucgugauccugcugcuccugaucgccgucgggcuguuccucuacugcaaggcccgcuccacccccgugacgcugagcaaggaccagcuguccgggaucaacaacaucgcguucagcaacugaggacuaguggaagcauuuuccuggcugauuaaaagaaauuacucagcuauggucaucuguuccuguuagaaggcuaugcagcauauuauauacuaugcgcauguuaugaaaugcauaauaaaaaauuuuaaaaaaucuaaaagaucuaaaaaaaaaaaaaaaaaaaaaaaaaaaaaaaaaaaaaaaaaaaaaaaaaaaaaaaaaaaaaaaaugcaucccccccccccccccccccccccccccccccaaaggcucuuuucagagccaccagaauu

SEQ ID NO: 19268 - RNA, 2060 nt, Artificial Sequence
  mRNA product Design d-5 comprising derived and/or modified sequence from HRSV(Memphis-37)__AIY60640.1__F_DSCav1_mut8 (opt1)
gggagagggcgcuuggcuugcaaggacccugagcugcggcauugaagcacacccaacccaacucgacugaagucagccucacugaaccggaucugagaaucuucucucucugggcuugccagggcucuccgaaccuagcuagcauccucuucaauuccaacuagaaagcuuaccauggagcugcccauccucaagaccaacgccaucaccacgauccuggccgcggugacccugugcuucgccagcucccagaacaucaccgaggaguucuaccagagcacgugcuccgccgucagcaagggcuaccucggggcccugcgcaccggcugguacaccuccgugaucaccaucgagcugagcaacaucaaggagaucaagugcaacgggaccgacgccaaggugaagcucaucaagcaggagcuggacaaguacaagaacgcggucacggaccugcagcuccugaugcaguccaccccggccgccggcagcggguccgccaucgcgagcggcaucgccgugugcaaggugcugcaccucgagggcgaggucaacaagaucaagaacgcccugcuguccaccaacaaggccguggugagccucuccgggugcggcgucagcgugcugaccuucaaggugcuggaccucaagaacuacaucgacaagcagcugcugcccauccucaacaagcaguccugcagcauccccaacaucgagacggucaucgaguuccagcagaagaacaaccggcugcuggagaucacccgcgaguucuccgugaacgccggggugaccacccccgucagcacguacaugcucaccaacuccgagcugcugagccucaucaacgacaugccgaucaccaacgaccagaagaagcugaugagcaacaacgugcagaucgugcggcagcaguccuacagcaucaugugcaucaucaaggaggagguccuggcguacguggugcagcucccccuguacggcgucaucgacacccccugcuggaagcugcacacgagcccccucugcaccaccaacaccaaggagggguccaacaucugccugacgcgcaccgaccggggcugguacugcgacaacgccggcuccgugagcuucuucccgcaggccgagaccugcaaggugcaguccaaccgcgucuucugcgacaccaugaacagccugacgcuccccuccgaggugaaccugugcaacaucgacaucuucaaccccaaguacgacugcaagaucaugaccagcaagaccgacgucuccagcuccgugaucaccagccugggggccaucguguccugcuacggcaagacgaagugcaccgccagcaacaagugccgggggaucaucaagaccuucuccaacggcugcgacuacgucagcaacaagggcguggacaccguguccgucgggaacacgcucuacuacgugaacaagcaggagggccagagccuguacgugaagggggagcccaucaucaacuucuacgacccgcuggucuuccccagcgacgaguucgacgcguccaucagccaggugaacgagaagaucaaccagucccucgccuucauccgcaagagcgacgagcugcugcacaacgugaacgucggcaaguccaccaccaacaucaugaucaccaccaucaucaucgugaucaucgugauccuccugcugcucaucgccgucgggcuguuccuguacugcaaggcccggagcacgcccgugacccuguccaaggaccagcucagcggcaucaacaacaucgccuucuccaacugaggacuaguggaagcauuuuccuggcugauuaaaagaaauuacucagcuauggucaucuguuccuguuagaaggcuaugcagcauauuauauacuaugcgcauguuaugaaaugcauaauaaaaaauuuuaaaaaaucuaaaagaucuaaaaaaaaaaaaaaaaaaaaaaaaaaaaaaaaaaaaaaaaaaaaaaaaaaaaaaaaaaaaaaaaugcaucccccccccccccccccccccccccccccccaaaggcucuuuucagagccaccagaauu

SEQ ID NO: 19269 - RNA, 2060 nt, Artificial Sequence
  mRNA product Design d-5 comprising derived and/or modified sequence from HRSV(Memphis-37)__AIY60640.1__F_DSCav1_mut8 (opt2)
gggagagggcgcuuggcuugcaaggacccugagcugcggcauugaagcacacccaacccaacucgacugaagucagccucacugaaccggaucugagaaucuucucucucugggcuugccagggcucuccgaaccuagcuagcauccucuucaauuccaacuagaaagcuuaccauggagcuccccauccucaagaccaacgccaucaccaccauccucgccgccgucacccucugcuucgccuccucccagaacaucaccgaggaguucuaccaguccaccugcuccgccgucuccaagggcuaccucggcgcccuccgcaccggcugguacaccuccgucaucaccaucgagcucuccaacaucaaggagaucaagugcaacggcaccgacgccaaggucaagcucaucaagcaggagcucgacaaguacaagaacgccgucaccgaccuccagcuccucaugcaguccacccccgccgccggcuccggcuccgccaucgccuccggcaucgccgucugcaagguccuccaccucgagggcgaggucaacaagaucaagaacgcccuccucuccaccaacaaggccgucgucucccucuccggcugcggcgucuccguccucaccuucaagguccucgaccucaagaacuacaucgacaagcagcuccuccccauccucaacaagcaguccugcuccauccccaacaucgagaccgucaucgaguuccagcagaagaacaaccgccuccucgagaucacccgcgaguucuccgucaacgccggcgucaccacccccgucuccaccuacaugcucaccaacuccgagcuccucucccucaucaacgacaugcccaucaccaacgaccagaagaagcucauguccaacaacguccagaucguccgccagcaguccuacuccaucaugugcaucaucaaggaggagguccucgccuacgucguccagcucccccucuacggcgucaucgacacccccugcuggaagcuccacaccuccccccucugcaccaccaacaccaaggagggcuccaacaucugccucacccgcaccgaccgcggcugguacugcgacaacgccggcuccgucuccuucuucccccaggccgagaccugcaagguccaguccaaccgcgucuucugcgacaccaugaacucccucacccuccccuccgaggucaaccucugcaacaucgacaucuucaaccccaaguacgacugcaagaucaugaccuccaagaccgacgucuccuccuccgucaucaccucccucggcgccaucgucuccugcuacggcaagaccaagugcaccgccuccaacaagugccgcggcaucaucaagaccuucuccaacggcugcgacuacgucuccaacaagggcgucgacaccgucuccgucggcaacacccucuacuacgucaacaagcaggagggccagucccucuacgucaagggcgagcccaucaucaacuucuacgacccccucgucuuccccuccgacgaguucgacgccuccaucucccaggucaacgagaagaucaaccagucccucgccuucauccgcaaguccgacgagcuccuccacaacgucaacgucggcaaguccaccaccaacaucaugaucaccaccaucaucaucgucaucaucgucauccuccuccuccucaucgccgucggccucuuccucuacugcaaggcccgcuccacccccgucacccucuccaaggaccagcucuccggcaucaacaacaucgccuucuccaacugaggacuaguggaagcauuuuccuggcugauuaaaagaaauuacucagcuauggucaucuguuccuguuagaaggcuaugcagcauauuauauacuaugcgcauguuaugaaaugcauaauaaaaaauuuuaaaaaaucuaaaagaucuaaaaaaaaaaaaaaaaaaaaaaaaaaaaaaaaaaaaaaaaaaaaaaaaaaaaaaaaaaaaaaaaugcaucccccccccccccccccccccccccccccccaaaggcucuuuucagagccaccagaauu

SEQ ID NO: 19270 - RNA, 2060 nt, Artificial Sequence
  mRNA product Design d-5 comprising derived and/or modified sequence from HRSV(Memphis-37)__AIY60640.1__F_DSCav1_mut8 (opt3)
gggagagggcgcuuggcuugcaaggacccugagcugcggcauugaagcacacccaacccaacucgacugaagucagccucacugaaccggaucugagaaucuucucucucugggcuugccagggcucuccgaaccuagcuagcauccucuucaauuccaacuagaaagcuuaccauggagcugcccauccucaagaccaacgccauuacaacuauacuugcugcagugacgcugugcuucgccagcucccagaauaucaccgaagaguuuuaccaaucuacauguucagcggucaguaaaggcuauuugggggcuuuaagaacuggaugguacaccagcguuauuacaaucgaacuguccaacauuaaggagaucaaaugcaaugguaccgacgccaaggugaaacuaauaaagcaggaacucgauaaguauaaaaacgcaguaacugaccugcagcuucugaugcagucuacuccugccgcuggcucggggucagcaaucgccagcggaauugcuguguguaaggucuugcaccucgagggcgaggugaauaaaaucaagaacgcccugcugaguaccaauaaagcgguugugucccucucugguugcggggucagcguguuaacguucaagguacuggaucuuaagaacuacauugacaaacaauugcugccaauccuaaauaagcaguccuguucaauaccgaacauugaaacuguuaucgaguuucagcagaaaaauaacaggcuccuggaaauuacccgggaguucagugugaaugcaggagucacaacucccgugagcaccuauaugcuuacaaacucugagcuguugucccucaucaaugauaugccuaucaccaacgaccaaaagaaacugaugucaaacaaugugcagauuguccgccagcagagcuacaguauaaugugcaucauuaaggaagagguuuuagccuaugugguacaacugccacucuacggcgugaucgauacgcccuguuggaaacuucauacuucuccucugugcacaaccaacacuaaggaaggcuccaauauauguuugacacgaaccgaccgugggugguacugcgauaacgcuggaagcgucucguuuuucccacaggccgagacguguaaggugcagucuaauagaguuuucugcgacaccaugaacucccuaacacugcccucagaagugaaucucugcaacauugauaucuucaauccuaaauaugacuguaagaucaugacaaguaaaaccgaugucagcuccucugugauuacaagccugggugcaaucguaucaugcuacggcaagacuaaauguaccgcuaguaacaagugcagggggauuauaaagacauuuuccaauggaugugacuauguuagcaacaaaggcguggacaccgucucuguggguaauacucuuuacuaugucaacaagcaagaggggcagucacuguacgugaaaggagagccaaucauuaauuucuaugauccguugguuuuucccagugacgaauuugaugccagcaucucccaggugaacgagaagaucaaccagucucucgcguuuauucggaaaucggacgaacuguuacacaauguaaacgucggcaagagcacgacaaauauaaugaucaccacuauuaucauugugaucauaguuauccugcuacuccugauugccgugggccuuuucuuguacugcaaggcacgcuccaccccugucacacugucaaaagaucaacucagugggaucaacaauauugcuuucucuaacugaggacuaguggaagcauuuuccuggcugauuaaaagaaauuacucagcuauggucaucuguuccuguuagaaggcuaugcagcauauuauauacuaugcgcauguuaugaaaugcauaauaaaaaauuuuaaaaaaucuaaaagaucuaaaaaaaaaaaaaaaaaaaaaaaaaaaaaaaaaaaaaaaaaaaaaaaaaaaaaaaaaaaaaaaaugcaucccccccccccccccccccccccccccccccaaaggcucuuuucagagccaccagaauu

SEQ ID NO: 19271 - RNA, 2060 nt, Artificial Sequence
  mRNA product Design d-5 comprising derived and/or modified sequence from HRSV(Memphis-37)__AIY60640.1__F_DSCav1_mut8 (opt4)
gggagagggcgcuuggcuugcaaggacccugagcugcggcauugaagcacacccaacccaacucgacugaagucagccucacugaaccggaucugagaaucuucucucucugggcuugccagggcucuccgaaccuagcuagcauccucuucaauuccaacuagaaagcuuaccauggagcugcccauccugaagaccaacgccaucaccaccauccuggccgccgugacccugugcuucgccagcagccagaacaucaccgaggaguucuaccagagcaccugcagcgccgugagcaagggcuaccugggcgcccugagaaccggcugguacaccagcgugaucaccaucgagcugagcaacaucaaggagaucaagugcaacggcaccgacgccaaggugaagcugaucaagcaggagcuggacaaguacaagaacgccgugaccgaccugcagcugcugaugcagagcacccccgccgccggcagcggcagcgccaucgccagcggcaucgccgugugcaaggugcugcaccuggagggcgaggugaacaagaucaagaacgcccugcugagcaccaacaaggccguggugagccugagcggcugcggcgugagcgugcugaccuucaaggugcuggaccugaagaacuacaucgacaagcagcugcugcccauccugaacaagcagagcugcagcauccccaacaucgagaccgugaucgaguuccagcagaagaacaacagacugcuggagaucaccagagaguucagcgugaacgccggcgugaccacccccgugagcaccuacaugcugaccaacagcgagcugcugagccugaucaacgacaugcccaucaccaacgaccagaagaagcugaugagcaacaacgugcagaucgugagacagcagagcuacagcaucaugugcaucaucaaggaggaggugcuggccuacguggugcagcugccccuguacggcgugaucgacacccccugcuggaagcugcacaccagcccccugugcaccaccaacaccaaggagggcagcaacaucugccugaccagaaccgacagaggcugguacugcgacaacgccggcagcgugagcuucuucccccaggccgagaccugcaaggugcagagcaacagaguguucugcgacaccaugaacagccugacccugcccagcgaggugaaccugugcaacaucgacaucuucaaccccaaguacgacugcaagaucaugaccagcaagaccgacgugagcagcagcgugaucaccagccugggcgccaucgugagcugcuacggcaagaccaagugcaccgccagcaacaagugcagaggcaucaucaagaccuucagcaacggcugcgacuacgugagcaacaagggcguggacaccgugagcgugggcaacacccuguacuacgugaacaagcaggagggccagagccuguacgugaagggcgagcccaucaucaacuucuacgacccccugguguuccccagcgacgaguucgacgccagcaucagccaggugaacgagaagaucaaccagagccuggccuucaucagaaagagcgacgagcugcugcacaacgugaacgugggcaagagcaccaccaacaucaugaucaccaccaucaucaucgugaucaucgugauccugcugcugcugaucgccgugggccuguuccuguacugcaaggccagaagcacccccgugacccugagcaaggaccagcugagcggcaucaacaacaucgccuucagcaacugaggacuaguggaagcauuuuccuggcugauuaaaagaaauuacucagcuauggucaucuguuccuguuagaaggcuaugcagcauauuauauacuaugcgcauguuaugaaaugcauaauaaaaaauuuuaaaaaaucuaaaagaucuaaaaaaaaaaaaaaaaaaaaaaaaaaaaaaaaaaaaaaaaaaaaaaaaaaaaaaaaaaaaaaaaugcaucccccccccccccccccccccccccccccccaaaggcucuuuucagagccaccagaauu

SEQ ID NO: 19272 - RNA, 2060 nt, Artificial Sequence
  mRNA product Design d-5 comprising derived and/or modified sequence from HRSV(Memphis-37)__AIY60640.1__F_DSCav1_mut8 (opt5)
gggagagggcgcuuggcuugcaaggacccugagcugcggcauugaagcacacccaacccaacucgacugaagucagccucacugaaccggaucugagaaucuucucucucugggcuugccagggcucuccgaaccuagcuagcauccucuucaauuccaacuagaaagcuuaccauggagcugcccauccucaagaccaacgccauuacaacgauccuggcugccgugacccuuugcuucgcgagcucccagaauauuacagaagaguuuuaccaaucuaccuguagcgcugucuccaaaggcuaucugggggcccucagaacaggaugguacaccucuguuaucacaauugaacugagcaacaucaaggagaucaaaugcaauggcaccgacgccaaggugaaacuuauuaagcaggaacuggauaaguauaaaaacgcugugacggaccuccagcugcugaugcaguccaccccugccgcugggucuggaagcgccaucgcguccggcauugccgucuguaaggugcuccaccuggagggggagguuaauaaaaucaagaacgcccuucugagcacaaauaaagcuguggucucucucuccggaugcggcgugagcguucugaccuucaaggugcuugaucugaagaacuacauugacaaacaacuccugccgauccugaauaagcagucuuguuccauucccaacaucgaaacagucaucgaguuucagcagaaaaauaaccggcuccuggaaauuacccgcgaguucagcgugaaugcuggcgugacgacaccugucucuaccuauaugcuuacaaacuccgagcugcucagccugaucaaugauaugcccauuaccaacgaccaaaagaaacuuauguccaacaauguucagaucgugagacagcagucuuacagcauuaugugcaucaucaaggaagaggugcuggccuaugucgugcaacucccucuguacgggguuauugauacccccuguuggaaacugcauacauccccucucugcacgaccaacacaaaggaaggaagcaauaucugucugacccggacagaccgcggcugguacugcgauaacgcggggucuguguccuuuuucccgcaggccgagaccuguaagguccagagcaauagaguguuuugcgacacgaugaacucucuuacacugcccagcgaaguuaaucucugcaacauugauaucuucaauccuaaauaugacuguaagauuaugaccuccaaaaccgaugugucuagcuccgucaucacaagccugggagcuaucgugucuugcuacggcaagaccaaauguacagccuccaacaagugccgggggauuaucaagacguuuagcaauggaugugacuaugucucuaacaaaggcguggacaccguuuccgugggcaauacacuuuacuaugucaacaagcaagaggggcagagccuguacgugaaaggagagcccauuaucaauuucuaugauccucucguuuuucccuccgacgaguucgaugcuucuauuagccaggugaacgaaaagaucaaccagucccuggccuuuauucgcaaaucugacgaacugcuccacaaugucaacgugggcaagagcaccacaaauaucaugaucaccacgauuaucauugugaucauuguuauccugcuucugcucaucgccgucgggcuguuccuguacugcaaggcuagauccaccccggugacacuuagcaaagaucaacucucuggaauuaacaauaucgcguucuccaacugaggacuaguggaagcauuuuccuggcugauuaaaagaaauuacucagcuauggucaucuguuccuguuagaaggcuaugcagcauauuauauacuaugcgcauguuaugaaaugcauaauaaaaaauuuuaaaaaaucuaaaagaucuaaaaaaaaaaaaaaaaaaaaaaaaaaaaaaaaaaaaaaaaaaaaaaaaaaaaaaaaaaaaaaaaugcaucccccccccccccccccccccccccccccccaaaggcucuuuucagagccaccagaauu

SEQ ID NO: 19273 - RNA, 2060 nt, Artificial Sequence
  mRNA product Design d-5 comprising derived and/or modified sequence from HRSV(Memphis-37)__AIY60640.1__F_DSCav1_mut8 (opt6)
gggagagggcgcuuggcuugcaaggacccugagcugcggcauugaagcacacccaacccaacucgacugaagucagccucacugaaccggaucugagaaucuucucucucugggcuugccagggcucuccgaaccuagcuagcauccucuucaauuccaacuagaaagcuuaccauggaacuuccuauuuuaaaaacaaacgcaauuacaaccauauuagcagcaguaacacuaugcuuugcaucaucacaaaacaucaccgaagaauuuuaucaauccacaugcucagcaguaucaaaaggauaccuuggcgcacuccgaacaggcugguauacaucggucauaacuauagaacucuccaacauaaaagaaauaaaaugcaaugguacugacgcaaaaguaaaauuaauaaaacaagaacuagacaaauacaaaaacgcaguaaccgauuuacaacuacuuaugcaaucaacaccugcagcaggaagcggaucagcaauagcaaguggaauagcaguaugcaaaguacuucaccucgaaggagaaguaaauaaaauaaaaaacgccuuacuaucaacaaauaaagccgucguaucacuuuccgguugcggcguaucaguauuaaccuuuaaagucuuagacuuaaaaaacuacauagacaaacaauuauuaccaauacuaaacaaacaauccuguuccauacccaacauagaaaccguaauagaauuucaacaaaaaaacaacagacuauuagaaauaacacgcgaauuuucaguaaacgcaggcguaacaacaccaguaucaacauauauguuaaccaauucagaauuauuaucccuuauaaaugacaugccuauaacaaacgaccaaaaaaaauuaaugaguaacaacguucaaauaguaagacaacaaucauacagcauaaugugcauaauaaaagaagaaguacuagcauacguaguucaacuaccacucuauggcguuaucgacaccccaugcuggaaacuacauaccucaccacucuguaccacuaauacgaaagaaggaucuaacauaugccuaaccagaacagaucgagguugguauugcgacaaugcuggaucaguaucauucuucccacaagcagaaaccugcaaaguacaaagcaacagaguauuuugugacacuaugaacucacuaacgcuaccuucagaaguaaaccuaugcaacaucgacauauucaacccaaaauacgauugcaaaauaaugacaucaaaaacagacguuuccucaucaguaauaacaucauuaggagcaauaguauccugcuacgguaaaaccaaaugcacagcauccaauaaaugccgaggaaucauuaaaacauuuucaaauggcugcgacuauguaaguaauaaagguguagauacaguaucaguaggcaacacacuauauuacguaaacaaacaagaagggcaaucccuauaugucaaaggcgaaccaauuauaaacuucuacgacccccucguauucccaucagacgaauuugacgcaucaauaucccaaguaaacgaaaaaaucaaccaaucacucgcauucauacguaaauccgacgaauuacuacauaacguaaacguaggcaaaucaacaacaaauauaaugauaacaaccauaaucauaguaauaauaguuauacuccuacuacucauugcagucggccuauuucuauacuguaaagcacgcucuacaccaguaacacuaucuaaagaucaauuauccggaauaaacaacauugccuucuccaauuaaggacuaguggaagcauuuuccuggcugauuaaaagaaauuacucagcuauggucaucuguuccuguuagaaggcuaugcagcauauuauauacuaugcgcauguuaugaaaugcauaauaaaaaauuuuaaaaaaucuaaaagaucuaaaaaaaaaaaaaaaaaaaaaaaaaaaaaaaaaaaaaaaaaaaaaaaaaaaaaaaaaaaaaaaaugcaucccccccccccccccccccccccccccccccaaaggcucuuuucagagccaccagaauu

SEQ ID NO: 19274 - RNA, 2060 nt, Artificial Sequence
  mRNA product Design d-5 comprising derived and/or modified sequence from HRSV(Memphis-37)__AIY60640.1__F_DSCav1_mut8 (opt11)
gggagagggcgcuuggcuugcaaggacccugagcugcggcauugaagcacacccaacccaacucgacugaagucagccucacugaaccggaucugagaaucuucucucucugggcuugccagggcucuccgaaccuagcuagcauccucuucaauuccaacuagaaagcuuaccauggaacuucccauccugaagaccaacgcuaucacaaccauccucgccgcagucacccuuugcuucgccucaucccaaaacaucaccgaagaauuuuaccagucaaccugcucggccgucuccaagggcuaccucggcgcccuccgcacuggcugguacacauccgucaucaccaucgaacucuccaacauaaaagaaauaaaaugcaacggaaccgacgccaaagucaaacucaucaaacaagaacuagauaaauauaaaaacgccgucaccgaccugcaacuccucaugcaauccaccccagccgccggcucuggcagcgccaucgcaagcggaaucgccgucugcaaaguccuccaccuagaaggcgaagucaacaaaauuaaaaacgcccuccucuccaccaacaaagcaguugucucccucucuggcugcggagucucuguacucaccuucaaaguacuagaccucaagaauuacauagacaaacaacuccugcccauccuuaacaaacaaaguuguaguauccccaacaucgaaacaguaaucgaauuucagcagaaaaacaaccgccuccucgaaaucacacgagaguucucggucaacgccggcgucaccacccccguaucaaccuacaugcuaacaaacuccgaacuacuuucccucaucaaugacaugcccauaaccaacgaccaaaagaaacuaauguccaauaacguccagauaguccgucaacaguccuacucaaucaugugcauaauuaaagaagaaguacucgccuacgucguccaacuaccccucuauggagucaucgacacccccugcuggaaacuccacacaucaccccuaugcacaaccaacaccaaagaaggcuccaacaucugccucacaagaaccgaccgcggcugguacugcgacaacgcuggcuccgucucguucuucccacaagccgaaaccugcaaaguccaaucaaaccgggucuucugcgacaccaugaacucccucacucucccaagcgaagucaaccuaugcaacaucgacaucuucaacccaaaauacgacuguaaaaucaugacuucgaaaacagacgucuccucaucaguaaucacauccuuaggcgccaucguguccugcuacgguaagaccaaaugcacagccuccaacaaaugccggggcaucaucaaaaccuucagcaacgguugugauuacgucuccaacaaaggaguagacaccgucuccguaggaaacacccucuacuacgucaacaagcaagaaggccaaucccucuacgucaaaggggaacccaucaucaacuucuacgacccacucgucuuccccuccgacgaguucgacgcaagcaucucccaagucaacgaaaagaucaaccaaucacuagccuucauccgcaaauccgacgaacuccuccacaacguuaacguaggcaaauccaccaccaacaucaugaucacaaccaucaucauagucauaauagucauccuacuacuccucaucgccguaggucuauuccuauacuguaaagcucgaucaacccccgucacacucuccaaagaucaacucucaggaaucaacaacaucgccuucuccaacuaaggacuaguggaagcauuuuccuggcugauuaaaagaaauuacucagcuauggucaucuguuccuguuagaaggcuaugcagcauauuauauacuaugcgcauguuaugaaaugcauaauaaaaaauuuuaaaaaaucuaaaagaucuaaaaaaaaaaaaaaaaaaaaaaaaaaaaaaaaaaaaaaaaaaaaaaaaaaaaaaaaaaaaaaaaugcaucccccccccccccccccccccccccccccccaaaggcucuuuucagagccaccagaauu

SEQ ID NO: 19275 - RNA, 1940 nt, Artificial Sequence
  mRNA product Design e-1 comprising derived and/or modified sequence from HRSV(Memphis-37)__AIY60640.1__F_DSCav1_mut8 (opt1)
gggagaauauaagcguuggcggagcgucgguuguagcacucugcgcgcccgcucuucugcugcuguuugucuacuuccuccugcuuccccgccgccgccgccgccaucaagcuuaccauggagcugcccauccucaagaccaacgccaucaccacgauccuggccgcggugacccugugcuucgccagcucccagaacaucaccgaggaguucuaccagagcacgugcuccgccgucagcaagggcuaccucggcgcccugcgcaccgggugguacaccagcgugaucaccaucgagcuguccaacaucaaggagaucaagugcaacggcaccgacgccaaggugaagcucaucaagcaggagcuggacaaguacaagaacgcggucacggaccugcagcuccugaugcagagcaccccggccgccggcuccgggagcgcgaucgccuccggcaucgccgucugcaaggugcugcaccucgagggcgaggugaacaagaucaagaacgcccugcuguccaccaacaaggccgucgugagccucuccggcugcggggugagcguccugaccuucaaggugcuggaccucaagaacuacaucgacaagcagcugcugcccauccugaacaagcagagcugcuccauccccaacaucgagaccgucaucgaguuccagcagaagaacaaccgccuccuggagaucacgcgggaguucagcgugaacgcgggcgugaccacccccgucuccaccuacaugcugacgaacagcgagcuccugucccugaucaacgacaugccgaucaccaacgaccagaagaagcucaugagcaacaacgugcagaucgugcgccagcaguccuacagcaucaugugcaucaucaaggaggagguccuggccuacguggugcagcugccccucuacggggucaucgacacccccugcuggaagcugcacaccagcccccugugcacgaccaacaccaaggagggcuccaacaucugccucacccggacggaccgcgggugguacugcgacaacgccggcagcguguccuucuucccgcaggccgagaccugcaagguccagagcaaccggguguucugcgacaccaugaacucccugacccugcccagcgaggugaaccucugcaacaucgacaucuucaaccccaaguacgacugcaagaucaugacguccaagaccgacgucagcuccagcgugaucaccucccugggcgccaucgugagcugcuacgggaagaccaagugcacggcgagcaacaagugccgcggcaucaucaagaccuucuccaacgggugcgacuacgucagcaacaagggcguggacaccguguccgucggcaacacccuguacuacgugaacaagcaggagggccagagccucuacgugaagggggagcccaucaucaacuucuacgacccgcuggucuuccccuccgacgaguucgacgccagcaucucccaggugaacgagaagaucaaccagagccuggccuucauccggaaguccgacgagcuccugcacaacgugaacgucggcaagagcaccacgaacaucaugaucaccaccaucaucaucgugaucaucgugauccugcugcuccugaucgccgucgggcuguuccucuacugcaaggcccgcuccacccccgugacgcugagcaaggaccagcuguccgggaucaacaacaucgcguucagcaacugaggacuaguguccaccugucccuccugggcugcuggauugucucguuuuccugccaaauaaacaggaucagcgcuuuacagaucuaaaaaaaaaaaaaaaaaaaaaaaaaaaaaaaaaaaaaaaaaaaaaaaaaaaaaaaaaaaaaaaaugcaucccccccccccccccccccccccccccccccaaaggcucuuuucagagccaccagaauu

SEQ ID NO: 19276 - RNA, 1940 nt, Artificial Sequence
  mRNA product Design e-1 comprising derived and/or modified sequence from HRSV(Memphis-37)__AIY60640.1__F_DSCav1_mut8 (opt1)
gggagaauauaagcguuggcggagcgucgguuguagcacucugcgcgcccgcucuucugcugcuguuugucuacuuccuccugcuuccccgccgccgccgccgccaucaagcuuaccauggagcugcccauccucaagaccaacgccaucaccacgauccuggccgcggugacccugugcuucgccagcucccagaacaucaccgaggaguucuaccagagcacgugcuccgccgucagcaagggcuaccucggggcccugcgcaccggcugguacaccuccgugaucaccaucgagcugagcaacaucaaggagaucaagugcaacgggaccgacgccaaggugaagcucaucaagcaggagcuggacaaguacaagaacgcggucacggaccugcagcuccugaugcaguccaccccggccgccggcagcggguccgccaucgcgagcggcaucgccgugugcaaggugcugcaccucgagggcgaggucaacaagaucaagaacgcccugcuguccaccaacaaggccguggugagccucuccgggugcggcgucagcgugcugaccuucaaggugcuggaccucaagaacuacaucgacaagcagcugcugcccauccucaacaagcaguccugcagcauccccaacaucgagacggucaucgaguuccagcagaagaacaaccggcugcuggagaucacccgcgaguucuccgugaacgccggggugaccacccccgucagcacguacaugcucaccaacuccgagcugcugagccucaucaacgacaugccgaucaccaacgaccagaagaagcugaugagcaacaacgugcagaucgugcggcagcaguccuacagcaucaugugcaucaucaaggaggagguccuggcguacguggugcagcucccccuguacggcgucaucgacacccccugcuggaagcugcacacgagcccccucugcaccaccaacaccaaggagggguccaacaucugccugacgcgcaccgaccggggcugguacugcgacaacgccggcuccgugagcuucuucccgcaggccgagaccugcaaggugcaguccaaccgcgucuucugcgacaccaugaacagccugacgcuccccuccgaggugaaccugugcaacaucgacaucuucaaccccaaguacgacugcaagaucaugaccagcaagaccgacgucuccagcuccgugaucaccagccugggggccaucguguccugcuacggcaagacgaagugcaccgccagcaacaagugccgggggaucaucaagaccuucuccaacggcugcgacuacgucagcaacaagggcguggacaccguguccgucgggaacacgcucuacuacgugaacaagcaggagggccagagccuguacgugaagggggagcccaucaucaacuucuacgacccgcuggucuuccccagcgacgaguucgacgcguccaucagccaggugaacgagaagaucaaccagucccucgccuucauccgcaagagcgacgagcugcugcacaacgugaacgucggcaaguccaccaccaacaucaugaucaccaccaucaucaucgugaucaucgugauccuccugcugcucaucgccgucgggcuguuccuguacugcaaggcccggagcacgcccgugacccuguccaaggaccagcucagcggcaucaacaacaucgccuucuccaacugaggacuaguguccaccugucccuccugggcugcuggauugucucguuuuccugccaaauaaacaggaucagcgcuuuacagaucuaaaaaaaaaaaaaaaaaaaaaaaaaaaaaaaaaaaaaaaaaaaaaaaaaaaaaaaaaaaaaaaaugcaucccccccccccccccccccccccccccccccaaaggcucuuuucagagccaccagaauu

SEQ ID NO: 19277 - RNA, 1940 nt, Artificial Sequence
  mRNA product Design e-1 comprising derived and/or modified sequence from HRSV(Memphis-37)__AIY60640.1__F_DSCav1_mut8 (opt2)
gggagaauauaagcguuggcggagcgucgguuguagcacucugcgcgcccgcucuucugcugcuguuugucuacuuccuccugcuuccccgccgccgccgccgccaucaagcuuaccauggagcuccccauccucaagaccaacgccaucaccaccauccucgccgccgucacccucugcuucgccuccucccagaacaucaccgaggaguucuaccaguccaccugcuccgccgucuccaagggcuaccucggcgcccuccgcaccggcugguacaccuccgucaucaccaucgagcucuccaacaucaaggagaucaagugcaacggcaccgacgccaaggucaagcucaucaagcaggagcucgacaaguacaagaacgccgucaccgaccuccagcuccucaugcaguccacccccgccgccggcuccggcuccgccaucgccuccggcaucgccgucugcaagguccuccaccucgagggcgaggucaacaagaucaagaacgcccuccucuccaccaacaaggccgucgucucccucuccggcugcggcgucuccguccucaccuucaagguccucgaccucaagaacuacaucgacaagcagcuccuccccauccucaacaagcaguccugcuccauccccaacaucgagaccgucaucgaguuccagcagaagaacaaccgccuccucgagaucacccgcgaguucuccgucaacgccggcgucaccacccccgucuccaccuacaugcucaccaacuccgagcuccucucccucaucaacgacaugcccaucaccaacgaccagaagaagcucauguccaacaacguccagaucguccgccagcaguccuacuccaucaugugcaucaucaaggaggagguccucgccuacgucguccagcucccccucuacggcgucaucgacacccccugcuggaagcuccacaccuccccccucugcaccaccaacaccaaggagggcuccaacaucugccucacccgcaccgaccgcggcugguacugcgacaacgccggcuccgucuccuucuucccccaggccgagaccugcaagguccaguccaaccgcgucuucugcgacaccaugaacucccucacccuccccuccgaggucaaccucugcaacaucgacaucuucaaccccaaguacgacugcaagaucaugaccuccaagaccgacgucuccuccuccgucaucaccucccucggcgccaucgucuccugcuacggcaagaccaagugcaccgccuccaacaagugccgcggcaucaucaagaccuucuccaacggcugcgacuacgucuccaacaagggcgucgacaccgucuccgucggcaacacccucuacuacgucaacaagcaggagggccagucccucuacgucaagggcgagcccaucaucaacuucuacgacccccucgucuuccccuccgacgaguucgacgccuccaucucccaggucaacgagaagaucaaccagucccucgccuucauccgcaaguccgacgagcuccuccacaacgucaacgucggcaaguccaccaccaacaucaugaucaccaccaucaucaucgucaucaucgucauccuccuccuccucaucgccgucggccucuuccucuacugcaaggcccgcuccacccccgucacccucuccaaggaccagcucuccggcaucaacaacaucgccuucuccaacugaggacuaguguccaccugucccuccugggcugcuggauugucucguuuuccugccaaauaaacaggaucagcgcuuuacagaucuaaaaaaaaaaaaaaaaaaaaaaaaaaaaaaaaaaaaaaaaaaaaaaaaaaaaaaaaaaaaaaaaugcaucccccccccccccccccccccccccccccccaaaggcucuuuucagagccaccagaauu

SEQ ID NO: 19278 - RNA, 1940 nt, Artificial Sequence
  mRNA product Design e-1 comprising derived and/or modified sequence from HRSV(Memphis-37)__AIY60640.1__F_DSCav1_mut8 (opt3)
gggagaauauaagcguuggcggagcgucgguuguagcacucugcgcgcccgcucuucugcugcuguuugucuacuuccuccugcuuccccgccgccgccgccgccaucaagcuuaccauggagcugcccauccucaagaccaacgccauuacaacuauacuugcugcagugacgcugugcuucgccagcucccagaauaucaccgaagaguuuuaccaaucuacauguucagcggucaguaaaggcuauuugggggcuuuaagaacuggaugguacaccagcguuauuacaaucgaacuguccaacauuaaggagaucaaaugcaaugguaccgacgccaaggugaaacuaauaaagcaggaacucgauaaguauaaaaacgcaguaacugaccugcagcuucugaugcagucuacuccugccgcuggcucggggucagcaaucgccagcggaauugcuguguguaaggucuugcaccucgagggcgaggugaauaaaaucaagaacgcccugcugaguaccaauaaagcgguugugucccucucugguugcggggucagcguguuaacguucaagguacuggaucuuaagaacuacauugacaaacaauugcugccaauccuaaauaagcaguccuguucaauaccgaacauugaaacuguuaucgaguuucagcagaaaaauaacaggcuccuggaaauuacccgggaguucagugugaaugcaggagucacaacucccgugagcaccuauaugcuuacaaacucugagcuguugucccucaucaaugauaugccuaucaccaacgaccaaaagaaacugaugucaaacaaugugcagauuguccgccagcagagcuacaguauaaugugcaucauuaaggaagagguuuuagccuaugugguacaacugccacucuacggcgugaucgauacgcccuguuggaaacuucauacuucuccucugugcacaaccaacacuaaggaaggcuccaauauauguuugacacgaaccgaccgugggugguacugcgauaacgcuggaagcgucucguuuuucccacaggccgagacguguaaggugcagucuaauagaguuuucugcgacaccaugaacucccuaacacugcccucagaagugaaucucugcaacauugauaucuucaauccuaaauaugacuguaagaucaugacaaguaaaaccgaugucagcuccucugugauuacaagccugggugcaaucguaucaugcuacggcaagacuaaauguaccgcuaguaacaagugcagggggauuauaaagacauuuuccaauggaugugacuauguuagcaacaaaggcguggacaccgucucuguggguaauacucuuuacuaugucaacaagcaagaggggcagucacuguacgugaaaggagagccaaucauuaauuucuaugauccguugguuuuucccagugacgaauuugaugccagcaucucccaggugaacgagaagaucaaccagucucucgcguuuauucggaaaucggacgaacuguuacacaauguaaacgucggcaagagcacgacaaauauaaugaucaccacuauuaucauugugaucauaguuauccugcuacuccugauugccgugggccuuuucuuguacugcaaggcacgcuccaccccugucacacugucaaaagaucaacucagugggaucaacaauauugcuuucucuaacugaggacuaguguccaccugucccuccugggcugcuggauugucucguuuuccugccaaauaaacaggaucagcgcuuuacagaucuaaaaaaaaaaaaaaaaaaaaaaaaaaaaaaaaaaaaaaaaaaaaaaaaaaaaaaaaaaaaaaaaugcaucccccccccccccccccccccccccccccccaaaggcucuuuucagagccaccagaauu

SEQ ID NO: 19279 - RNA, 1940 nt, Artificial Sequence
  mRNA product Design e-1 comprising derived and/or modified sequence from HRSV(Memphis-37)__AIY60640.1__F_DSCav1_mut8 (opt4)
gggagaauauaagcguuggcggagcgucgguuguagcacucugcgcgcccgcucuucugcugcuguuugucuacuuccuccugcuuccccgccgccgccgccgccaucaagcuuaccauggagcugcccauccugaagaccaacgccaucaccaccauccuggccgccgugacccugugcuucgccagcagccagaacaucaccgaggaguucuaccagagcaccugcagcgccgugagcaagggcuaccugggcgcccugagaaccggcugguacaccagcgugaucaccaucgagcugagcaacaucaaggagaucaagugcaacggcaccgacgccaaggugaagcugaucaagcaggagcuggacaaguacaagaacgccgugaccgaccugcagcugcugaugcagagcacccccgccgccggcagcggcagcgccaucgccagcggcaucgccgugugcaaggugcugcaccuggagggcgaggugaacaagaucaagaacgcccugcugagcaccaacaaggccguggugagccugagcggcugcggcgugagcgugcugaccuucaaggugcuggaccugaagaacuacaucgacaagcagcugcugcccauccugaacaagcagagcugcagcauccccaacaucgagaccgugaucgaguuccagcagaagaacaacagacugcuggagaucaccagagaguucagcgugaacgccggcgugaccacccccgugagcaccuacaugcugaccaacagcgagcugcugagccugaucaacgacaugcccaucaccaacgaccagaagaagcugaugagcaacaacgugcagaucgugagacagcagagcuacagcaucaugugcaucaucaaggaggaggugcuggccuacguggugcagcugccccuguacggcgugaucgacacccccugcuggaagcugcacaccagcccccugugcaccaccaacaccaaggagggcagcaacaucugccugaccagaaccgacagaggcugguacugcgacaacgccggcagcgugagcuucuucccccaggccgagaccugcaaggugcagagcaacagaguguucugcgacaccaugaacagccugacccugcccagcgaggugaaccugugcaacaucgacaucuucaaccccaaguacgacugcaagaucaugaccagcaagaccgacgugagcagcagcgugaucaccagccugggcgccaucgugagcugcuacggcaagaccaagugcaccgccagcaacaagugcagaggcaucaucaagaccuucagcaacggcugcgacuacgugagcaacaagggcguggacaccgugagcgugggcaacacccuguacuacgugaacaagcaggagggccagagccuguacgugaagggcgagcccaucaucaacuucuacgacccccugguguuccccagcgacgaguucgacgccagcaucagccaggugaacgagaagaucaaccagagccuggccuucaucagaaagagcgacgagcugcugcacaacgugaacgugggcaagagcaccaccaacaucaugaucaccaccaucaucaucgugaucaucgugauccugcugcugcugaucgccgugggccuguuccuguacugcaaggccagaagcacccccgugacccugagcaaggaccagcugagcggcaucaacaacaucgccuucagcaacugaggacuaguguccaccugucccuccugggcugcuggauugucucguuuuccugccaaauaaacaggaucagcgcuuuacagaucuaaaaaaaaaaaaaaaaaaaaaaaaaaaaaaaaaaaaaaaaaaaaaaaaaaaaaaaaaaaaaaaaugcaucccccccccccccccccccccccccccccccaaaggcucuuuucagagccaccagaauu

SEQ ID NO: 19280 - RNA, 1940 nt, Artificial Sequence
  mRNA product Design e-1 comprising derived and/or modified sequence from HRSV(Memphis-37)__AIY60640.1__F_DSCav1_mut8 (opt5)
gggagaauauaagcguuggcggagcgucgguuguagcacucugcgcgcccgcucuucugcugcuguuugucuacuuccuccugcuuccccgccgccgccgccgccaucaagcuuaccauggagcugcccauccucaagaccaacgccauuacaacgauccuggcugccgugacccuuugcuucgcgagcucccagaauauuacagaagaguuuuaccaaucuaccuguagcgcugucuccaaaggcuaucugggggcccucagaacaggaugguacaccucuguuaucacaauugaacugagcaacaucaaggagaucaaaugcaauggcaccgacgccaaggugaaacuuauuaagcaggaacuggauaaguauaaaaacgcugugacggaccuccagcugcugaugcaguccaccccugccgcugggucuggaagcgccaucgcguccggcauugccgucuguaaggugcuccaccuggagggggagguuaauaaaaucaagaacgcccuucugagcacaaauaaagcuguggucucucucuccggaugcggcgugagcguucugaccuucaaggugcuugaucugaagaacuacauugacaaacaacuccugccgauccugaauaagcagucuuguuccauucccaacaucgaaacagucaucgaguuucagcagaaaaauaaccggcuccuggaaauuacccgcgaguucagcgugaaugcuggcgugacgacaccugucucuaccuauaugcuuacaaacuccgagcugcucagccugaucaaugauaugcccauuaccaacgaccaaaagaaacuuauguccaacaauguucagaucgugagacagcagucuuacagcauuaugugcaucaucaaggaagaggugcuggccuaugucgugcaacucccucuguacgggguuauugauacccccuguuggaaacugcauacauccccucucugcacgaccaacacaaaggaaggaagcaauaucugucugacccggacagaccgcggcugguacugcgauaacgcggggucuguguccuuuuucccgcaggccgagaccuguaagguccagagcaauagaguguuuugcgacacgaugaacucucuuacacugcccagcgaaguuaaucucugcaacauugauaucuucaauccuaaauaugacuguaagauuaugaccuccaaaaccgaugugucuagcuccgucaucacaagccugggagcuaucgugucuugcuacggcaagaccaaauguacagccuccaacaagugccgggggauuaucaagacguuuagcaauggaugugacuaugucucuaacaaaggcguggacaccguuuccgugggcaauacacuuuacuaugucaacaagcaagaggggcagagccuguacgugaaaggagagcccauuaucaauuucuaugauccucucguuuuucccuccgacgaguucgaugcuucuauuagccaggugaacgaaaagaucaaccagucccuggccuuuauucgcaaaucugacgaacugcuccacaaugucaacgugggcaagagcaccacaaauaucaugaucaccacgauuaucauugugaucauuguuauccugcuucugcucaucgccgucgggcuguuccuguacugcaaggcuagauccaccccggugacacuuagcaaagaucaacucucuggaauuaacaauaucgcguucuccaacugaggacuaguguccaccugucccuccugggcugcuggauugucucguuuuccugccaaauaaacaggaucagcgcuuuacagaucuaaaaaaaaaaaaaaaaaaaaaaaaaaaaaaaaaaaaaaaaaaaaaaaaaaaaaaaaaaaaaaaaugcaucccccccccccccccccccccccccccccccaaaggcucuuuucagagccaccagaauu

SEQ ID NO: 19281 - RNA, 1940 nt, Artificial Sequence
  mRNA product Design e-1 comprising derived and/or modified sequence from HRSV(Memphis-37)__AIY60640.1__F_DSCav1_mut8 (opt6)
gggagaauauaagcguuggcggagcgucgguuguagcacucugcgcgcccgcucuucugcugcuguuugucuacuuccuccugcuuccccgccgccgccgccgccaucaagcuuaccauggaacuuccuauuuuaaaaacaaacgcaauuacaaccauauuagcagcaguaacacuaugcuuugcaucaucacaaaacaucaccgaagaauuuuaucaauccacaugcucagcaguaucaaaaggauaccuuggcgcacuccgaacaggcugguauacaucggucauaacuauagaacucuccaacauaaaagaaauaaaaugcaaugguacugacgcaaaaguaaaauuaauaaaacaagaacuagacaaauacaaaaacgcaguaaccgauuuacaacuacuuaugcaaucaacaccugcagcaggaagcggaucagcaauagcaaguggaauagcaguaugcaaaguacuucaccucgaaggagaaguaaauaaaauaaaaaacgccuuacuaucaacaaauaaagccgucguaucacuuuccgguugcggcguaucaguauuaaccuuuaaagucuuagacuuaaaaaacuacauagacaaacaauuauuaccaauacuaaacaaacaauccuguuccauacccaacauagaaaccguaauagaauuucaacaaaaaaacaacagacuauuagaaauaacacgcgaauuuucaguaaacgcaggcguaacaacaccaguaucaacauauauguuaaccaauucagaauuauuaucccuuauaaaugacaugccuauaacaaacgaccaaaaaaaauuaaugaguaacaacguucaaauaguaagacaacaaucauacagcauaaugugcauaauaaaagaagaaguacuagcauacguaguucaacuaccacucuauggcguuaucgacaccccaugcuggaaacuacauaccucaccacucuguaccacuaauacgaaagaaggaucuaacauaugccuaaccagaacagaucgagguugguauugcgacaaugcuggaucaguaucauucuucccacaagcagaaaccugcaaaguacaaagcaacagaguauuuugugacacuaugaacucacuaacgcuaccuucagaaguaaaccuaugcaacaucgacauauucaacccaaaauacgauugcaaaauaaugacaucaaaaacagacguuuccucaucaguaauaacaucauuaggagcaauaguauccugcuacgguaaaaccaaaugcacagcauccaauaaaugccgaggaaucauuaaaacauuuucaaauggcugcgacuauguaaguaauaaagguguagauacaguaucaguaggcaacacacuauauuacguaaacaaacaagaagggcaaucccuauaugucaaaggcgaaccaauuauaaacuucuacgacccccucguauucccaucagacgaauuugacgcaucaauaucccaaguaaacgaaaaaaucaaccaaucacucgcauucauacguaaauccgacgaauuacuacauaacguaaacguaggcaaaucaacaacaaauauaaugauaacaaccauaaucauaguaauaauaguuauacuccuacuacucauugcagucggccuauuucuauacuguaaagcacgcucuacaccaguaacacuaucuaaagaucaauuauccggaauaaacaacauugccuucuccaauuaaggacuaguguccaccugucccuccugggcugcuggauugucucguuuuccugccaaauaaacaggaucagcgcuuuacagaucuaaaaaaaaaaaaaaaaaaaaaaaaaaaaaaaaaaaaaaaaaaaaaaaaaaaaaaaaaaaaaaaaugcaucccccccccccccccccccccccccccccccaaaggcucuuuucagagccaccagaauu

SEQ ID NO: 19282 - RNA, 1940 nt, Artificial Sequence
  mRNA product Design e-1 comprising derived and/or modified sequence from HRSV(Memphis-37)__AIY60640.1__F_DSCav1_mut8 (opt11)
gggagaauauaagcguuggcggagcgucgguuguagcacucugcgcgcccgcucuucugcugcuguuugucuacuuccuccugcuuccccgccgccgccgccgccaucaagcuuaccauggaacuucccauccugaagaccaacgcuaucacaaccauccucgccgcagucacccuuugcuucgccucaucccaaaacaucaccgaagaauuuuaccagucaaccugcucggccgucuccaagggcuaccucggcgcccuccgcacuggcugguacacauccgucaucaccaucgaacucuccaacauaaaagaaauaaaaugcaacggaaccgacgccaaagucaaacucaucaaacaagaacuagauaaauauaaaaacgccgucaccgaccugcaacuccucaugcaauccaccccagccgccggcucuggcagcgccaucgcaagcggaaucgccgucugcaaaguccuccaccuagaaggcgaagucaacaaaauuaaaaacgcccuccucuccaccaacaaagcaguugucucccucucuggcugcggagucucuguacucaccuucaaaguacuagaccucaagaauuacauagacaaacaacuccugcccauccuuaacaaacaaaguuguaguauccccaacaucgaaacaguaaucgaauuucagcagaaaaacaaccgccuccucgaaaucacacgagaguucucggucaacgccggcgucaccacccccguaucaaccuacaugcuaacaaacuccgaacuacuuucccucaucaaugacaugcccauaaccaacgaccaaaagaaacuaauguccaauaacguccagauaguccgucaacaguccuacucaaucaugugcauaauuaaagaagaaguacucgccuacgucguccaacuaccccucuauggagucaucgacacccccugcuggaaacuccacacaucaccccuaugcacaaccaacaccaaagaaggcuccaacaucugccucacaagaaccgaccgcggcugguacugcgacaacgcuggcuccgucucguucuucccacaagccgaaaccugcaaaguccaaucaaaccgggucuucugcgacaccaugaacucccucacucucccaagcgaagucaaccuaugcaacaucgacaucuucaacccaaaauacgacuguaaaaucaugacuucgaaaacagacgucuccucaucaguaaucacauccuuaggcgccaucguguccugcuacgguaagaccaaaugcacagccuccaacaaaugccggggcaucaucaaaaccuucagcaacgguugugauuacgucuccaacaaaggaguagacaccgucuccguaggaaacacccucuacuacgucaacaagcaagaaggccaaucccucuacgucaaaggggaacccaucaucaacuucuacgacccacucgucuuccccuccgacgaguucgacgcaagcaucucccaagucaacgaaaagaucaaccaaucacuagccuucauccgcaaauccgacgaacuccuccacaacguuaacguaggcaaauccaccaccaacaucaugaucacaaccaucaucauagucauaauagucauccuacuacuccucaucgccguaggucuauuccuauacuguaaagcucgaucaacccccgucacacucuccaaagaucaacucucaggaaucaacaacaucgccuucuccaacuaaggacuaguguccaccugucccuccugggcugcuggauugucucguuuuccugccaaauaaacaggaucagcgcuuuacagaucuaaaaaaaaaaaaaaaaaaaaaaaaaaaaaaaaaaaaaaaaaaaaaaaaaaaaaaaaaaaaaaaaugcaucccccccccccccccccccccccccccccccaaaggcucuuuucagagccaccagaauu

SEQ ID NO: 19283 - RNA, 1922 nt, Artificial Sequence
  mRNA product Design e-2 comprising derived and/or modified sequence from HRSV(Memphis-37)__AIY60640.1__F_DSCav1_mut8 (opt1)
gggagacccgugacccggaaguuguacggcuacgcgacuuucccucccacaaacccucgcgcccuuccuuuccuacuugggcccggcagaaagcuuaccauggagcugcccauccucaagaccaacgccaucaccacgauccuggccgcggugacccugugcuucgccagcucccagaacaucaccgaggaguucuaccagagcacgugcuccgccgucagcaagggcuaccucggcgcccugcgcaccgggugguacaccagcgugaucaccaucgagcuguccaacaucaaggagaucaagugcaacggcaccgacgccaaggugaagcucaucaagcaggagcuggacaaguacaagaacgcggucacggaccugcagcuccugaugcagagcaccccggccgccggcuccgggagcgcgaucgccuccggcaucgccgucugcaaggugcugcaccucgagggcgaggugaacaagaucaagaacgcccugcuguccaccaacaaggccgucgugagccucuccggcugcggggugagcguccugaccuucaaggugcuggaccucaagaacuacaucgacaagcagcugcugcccauccugaacaagcagagcugcuccauccccaacaucgagaccgucaucgaguuccagcagaagaacaaccgccuccuggagaucacgcgggaguucagcgugaacgcgggcgugaccacccccgucuccaccuacaugcugacgaacagcgagcuccugucccugaucaacgacaugccgaucaccaacgaccagaagaagcucaugagcaacaacgugcagaucgugcgccagcaguccuacagcaucaugugcaucaucaaggaggagguccuggccuacguggugcagcugccccucuacggggucaucgacacccccugcuggaagcugcacaccagcccccugugcacgaccaacaccaaggagggcuccaacaucugccucacccggacggaccgcgggugguacugcgacaacgccggcagcguguccuucuucccgcaggccgagaccugcaagguccagagcaaccggguguucugcgacaccaugaacucccugacccugcccagcgaggugaaccucugcaacaucgacaucuucaaccccaaguacgacugcaagaucaugacguccaagaccgacgucagcuccagcgugaucaccucccugggcgccaucgugagcugcuacgggaagaccaagugcacggcgagcaacaagugccgcggcaucaucaagaccuucuccaacgggugcgacuacgucagcaacaagggcguggacaccguguccgucggcaacacccuguacuacgugaacaagcaggagggccagagccucuacgugaagggggagcccaucaucaacuucuacgacccgcuggucuuccccuccgacgaguucgacgccagcaucucccaggugaacgagaagaucaaccagagccuggccuucauccggaaguccgacgagcuccugcacaacgugaacgucggcaagagcaccacgaacaucaugaucaccaccaucaucaucgugaucaucgugauccugcugcuccugaucgccgucgggcuguuccucuacugcaaggcccgcuccacccccgugacgcugagcaaggaccagcuguccgggaucaacaacaucgcguucagcaacugaggacuaguguccaccugucccuccugggcugcuggauugucucguuuuccugccaaauaaacaggaucagcgcuuuacagaucuaaaaaaaaaaaaaaaaaaaaaaaaaaaaaaaaaaaaaaaaaaaaaaaaaaaaaaaaaaaaaaaaugcaucccccccccccccccccccccccccccccccaaaggcucuuuucagagccaccagaauu

SEQ ID NO: 19284 - RNA, 1922 nt, Artificial Sequence
  mRNA product Design e-2 comprising derived and/or modified sequence from HRSV(Memphis-37)__AIY60640.1__F_DSCav1_mut8 (opt1)
gggagacccgugacccggaaguuguacggcuacgcgacuuucccucccacaaacccucgcgcccuuccuuuccuacuugggcccggcagaaagcuuaccauggagcugcccauccucaagaccaacgccaucaccacgauccuggccgcggugacccugugcuucgccagcucccagaacaucaccgaggaguucuaccagagcacgugcuccgccgucagcaagggcuaccucggggcccugcgcaccggcugguacaccuccgugaucaccaucgagcugagcaacaucaaggagaucaagugcaacgggaccgacgccaaggugaagcucaucaagcaggagcuggacaaguacaagaacgcggucacggaccugcagcuccugaugcaguccaccccggccgccggcagcggguccgccaucgcgagcggcaucgccgugugcaaggugcugcaccucgagggcgaggucaacaagaucaagaacgcccugcuguccaccaacaaggccguggugagccucuccgggugcggcgucagcgugcugaccuucaaggugcuggaccucaagaacuacaucgacaagcagcugcugcccauccucaacaagcaguccugcagcauccccaacaucgagacggucaucgaguuccagcagaagaacaaccggcugcuggagaucacccgcgaguucuccgugaacgccggggugaccacccccgucagcacguacaugcucaccaacuccgagcugcugagccucaucaacgacaugccgaucaccaacgaccagaagaagcugaugagcaacaacgugcagaucgugcggcagcaguccuacagcaucaugugcaucaucaaggaggagguccuggcguacguggugcagcucccccuguacggcgucaucgacacccccugcuggaagcugcacacgagcccccucugcaccaccaacaccaaggagggguccaacaucugccugacgcgcaccgaccggggcugguacugcgacaacgccggcuccgugagcuucuucccgcaggccgagaccugcaaggugcaguccaaccgcgucuucugcgacaccaugaacagccugacgcuccccuccgaggugaaccugugcaacaucgacaucuucaaccccaaguacgacugcaagaucaugaccagcaagaccgacgucuccagcuccgugaucaccagccugggggccaucguguccugcuacggcaagacgaagugcaccgccagcaacaagugccgggggaucaucaagaccuucuccaacggcugcgacuacgucagcaacaagggcguggacaccguguccgucgggaacacgcucuacuacgugaacaagcaggagggccagagccuguacgugaagggggagcccaucaucaacuucuacgacccgcuggucuuccccagcgacgaguucgacgcguccaucagccaggugaacgagaagaucaaccagucccucgccuucauccgcaagagcgacgagcugcugcacaacgugaacgucggcaaguccaccaccaacaucaugaucaccaccaucaucaucgugaucaucgugauccuccugcugcucaucgccgucgggcuguuccuguacugcaaggcccggagcacgcccgugacccuguccaaggaccagcucagcggcaucaacaacaucgccuucuccaacugaggacuaguguccaccugucccuccugggcugcuggauugucucguuuuccugccaaauaaacaggaucagcgcuuuacagaucuaaaaaaaaaaaaaaaaaaaaaaaaaaaaaaaaaaaaaaaaaaaaaaaaaaaaaaaaaaaaaaaaugcaucccccccccccccccccccccccccccccccaaaggcucuuuucagagccaccagaauu

SEQ ID NO: 19285 - RNA, 1922 nt, Artificial Sequence
  mRNA product Design e-2 comprising derived and/or modified sequence from HRSV(Memphis-37)__AIY60640.1__F_DSCav1_mut8 (opt2)
gggagacccgugacccggaaguuguacggcuacgcgacuuucccucccacaaacccucgcgcccuuccuuuccuacuugggcccggcagaaagcuuaccauggagcuccccauccucaagaccaacgccaucaccaccauccucgccgccgucacccucugcuucgccuccucccagaacaucaccgaggaguucuaccaguccaccugcuccgccgucuccaagggcuaccucggcgcccuccgcaccggcugguacaccuccgucaucaccaucgagcucuccaacaucaaggagaucaagugcaacggcaccgacgccaaggucaagcucaucaagcaggagcucgacaaguacaagaacgccgucaccgaccuccagcuccucaugcaguccacccccgccgccggcuccggcuccgccaucgccuccggcaucgccgucugcaagguccuccaccucgagggcgaggucaacaagaucaagaacgcccuccucuccaccaacaaggccgucgucucccucuccggcugcggcgucuccguccucaccuucaagguccucgaccucaagaacuacaucgacaagcagcuccuccccauccucaacaagcaguccugcuccauccccaacaucgagaccgucaucgaguuccagcagaagaacaaccgccuccucgagaucacccgcgaguucuccgucaacgccggcgucaccacccccgucuccaccuacaugcucaccaacuccgagcuccucucccucaucaacgacaugcccaucaccaacgaccagaagaagcucauguccaacaacguccagaucguccgccagcaguccuacuccaucaugugcaucaucaaggaggagguccucgccuacgucguccagcucccccucuacggcgucaucgacacccccugcuggaagcuccacaccuccccccucugcaccaccaacaccaaggagggcuccaacaucugccucacccgcaccgaccgcggcugguacugcgacaacgccggcuccgucuccuucuucccccaggccgagaccugcaagguccaguccaaccgcgucuucugcgacaccaugaacucccucacccuccccuccgaggucaaccucugcaacaucgacaucuucaaccccaaguacgacugcaagaucaugaccuccaagaccgacgucuccuccuccgucaucaccucccucggcgccaucgucuccugcuacggcaagaccaagugcaccgccuccaacaagugccgcggcaucaucaagaccuucuccaacggcugcgacuacgucuccaacaagggcgucgacaccgucuccgucggcaacacccucuacuacgucaacaagcaggagggccagucccucuacgucaagggcgagcccaucaucaacuucuacgacccccucgucuuccccuccgacgaguucgacgccuccaucucccaggucaacgagaagaucaaccagucccucgccuucauccgcaaguccgacgagcuccuccacaacgucaacgucggcaaguccaccaccaacaucaugaucaccaccaucaucaucgucaucaucgucauccuccuccuccucaucgccgucggccucuuccucuacugcaaggcccgcuccacccccgucacccucuccaaggaccagcucuccggcaucaacaacaucgccuucuccaacugaggacuaguguccaccugucccuccugggcugcuggauugucucguuuuccugccaaauaaacaggaucagcgcuuuacagaucuaaaaaaaaaaaaaaaaaaaaaaaaaaaaaaaaaaaaaaaaaaaaaaaaaaaaaaaaaaaaaaaaugcaucccccccccccccccccccccccccccccccaaaggcucuuuucagagccaccagaauu

SEQ ID NO: 19286 - RNA, 1922 nt, Artificial Sequence
  mRNA product Design e-2 comprising derived and/or modified sequence from HRSV(Memphis-37)__AIY60640.1__F_DSCav1_mut8 (opt3)
gggagacccgugacccggaaguuguacggcuacgcgacuuucccucccacaaacccucgcgcccuuccuuuccuacuugggcccggcagaaagcuuaccauggagcugcccauccucaagaccaacgccauuacaacuauacuugcugcagugacgcugugcuucgccagcucccagaauaucaccgaagaguuuuaccaaucuacauguucagcggucaguaaaggcuauuugggggcuuuaagaacuggaugguacaccagcguuauuacaaucgaacuguccaacauuaaggagaucaaaugcaaugguaccgacgccaaggugaaacuaauaaagcaggaacucgauaaguauaaaaacgcaguaacugaccugcagcuucugaugcagucuacuccugccgcuggcucggggucagcaaucgccagcggaauugcuguguguaaggucuugcaccucgagggcgaggugaauaaaaucaagaacgcccugcugaguaccaauaaagcgguugugucccucucugguugcggggucagcguguuaacguucaagguacuggaucuuaagaacuacauugacaaacaauugcugccaauccuaaauaagcaguccuguucaauaccgaacauugaaacuguuaucgaguuucagcagaaaaauaacaggcuccuggaaauuacccgggaguucagugugaaugcaggagucacaacucccgugagcaccuauaugcuuacaaacucugagcuguugucccucaucaaugauaugccuaucaccaacgaccaaaagaaacugaugucaaacaaugugcagauuguccgccagcagagcuacaguauaaugugcaucauuaaggaagagguuuuagccuaugugguacaacugccacucuacggcgugaucgauacgcccuguuggaaacuucauacuucuccucugugcacaaccaacacuaaggaaggcuccaauauauguuugacacgaaccgaccgugggugguacugcgauaacgcuggaagcgucucguuuuucccacaggccgagacguguaaggugcagucuaauagaguuuucugcgacaccaugaacucccuaacacugcccucagaagugaaucucugcaacauugauaucuucaauccuaaauaugacuguaagaucaugacaaguaaaaccgaugucagcuccucugugauuacaagccugggugcaaucguaucaugcuacggcaagacuaaauguaccgcuaguaacaagugcagggggauuauaaagacauuuuccaauggaugugacuauguuagcaacaaaggcguggacaccgucucuguggguaauacucuuuacuaugucaacaagcaagaggggcagucacuguacgugaaaggagagccaaucauuaauuucuaugauccguugguuuuucccagugacgaauuugaugccagcaucucccaggugaacgagaagaucaaccagucucucgcguuuauucggaaaucggacgaacuguuacacaauguaaacgucggcaagagcacgacaaauauaaugaucaccacuauuaucauugugaucauaguuauccugcuacuccugauugccgugggccuuuucuuguacugcaaggcacgcuccaccccugucacacugucaaaagaucaacucagugggaucaacaauauugcuuucucuaacugaggacuaguguccaccugucccuccugggcugcuggauugucucguuuuccugccaaauaaacaggaucagcgcuuuacagaucuaaaaaaaaaaaaaaaaaaaaaaaaaaaaaaaaaaaaaaaaaaaaaaaaaaaaaaaaaaaaaaaaugcaucccccccccccccccccccccccccccccccaaaggcucuuuucagagccaccagaauu

SEQ ID NO: 19287 - RNA, 1922 nt, Artificial Sequence
  mRNA product Design e-2 comprising derived and/or modified sequence from HRSV(Memphis-37)__AIY60640.1__F_DSCav1_mut8 (opt4)
gggagacccgugacccggaaguuguacggcuacgcgacuuucccucccacaaacccucgcgcccuuccuuuccuacuugggcccggcagaaagcuuaccauggagcugcccauccugaagaccaacgccaucaccaccauccuggccgccgugacccugugcuucgccagcagccagaacaucaccgaggaguucuaccagagcaccugcagcgccgugagcaagggcuaccugggcgcccugagaaccggcugguacaccagcgugaucaccaucgagcugagcaacaucaaggagaucaagugcaacggcaccgacgccaaggugaagcugaucaagcaggagcuggacaaguacaagaacgccgugaccgaccugcagcugcugaugcagagcacccccgccgccggcagcggcagcgccaucgccagcggcaucgccgugugcaaggugcugcaccuggagggcgaggugaacaagaucaagaacgcccugcugagcaccaacaaggccguggugagccugagcggcugcggcgugagcgugcugaccuucaaggugcuggaccugaagaacuacaucgacaagcagcugcugcccauccugaacaagcagagcugcagcauccccaacaucgagaccgugaucgaguuccagcagaagaacaacagacugcuggagaucaccagagaguucagcgugaacgccggcgugaccacccccgugagcaccuacaugcugaccaacagcgagcugcugagccugaucaacgacaugcccaucaccaacgaccagaagaagcugaugagcaacaacgugcagaucgugagacagcagagcuacagcaucaugugcaucaucaaggaggaggugcuggccuacguggugcagcugccccuguacggcgugaucgacacccccugcuggaagcugcacaccagcccccugugcaccaccaacaccaaggagggcagcaacaucugccugaccagaaccgacagaggcugguacugcgacaacgccggcagcgugagcuucuucccccaggccgagaccugcaaggugcagagcaacagaguguucugcgacaccaugaacagccugacccugcccagcgaggugaaccugugcaacaucgacaucuucaaccccaaguacgacugcaagaucaugaccagcaagaccgacgugagcagcagcgugaucaccagccugggcgccaucgugagcugcuacggcaagaccaagugcaccgccagcaacaagugcagaggcaucaucaagaccuucagcaacggcugcgacuacgugagcaacaagggcguggacaccgugagcgugggcaacacccuguacuacgugaacaagcaggagggccagagccuguacgugaagggcgagcccaucaucaacuucuacgacccccugguguuccccagcgacgaguucgacgccagcaucagccaggugaacgagaagaucaaccagagccuggccuucaucagaaagagcgacgagcugcugcacaacgugaacgugggcaagagcaccaccaacaucaugaucaccaccaucaucaucgugaucaucgugauccugcugcugcugaucgccgugggccuguuccuguacugcaaggccagaagcacccccgugacccugagcaaggaccagcugagcggcaucaacaacaucgccuucagcaacugaggacuaguguccaccugucccuccugggcugcuggauugucucguuuuccugccaaauaaacaggaucagcgcuuuacagaucuaaaaaaaaaaaaaaaaaaaaaaaaaaaaaaaaaaaaaaaaaaaaaaaaaaaaaaaaaaaaaaaaugcaucccccccccccccccccccccccccccccccaaaggcucuuuucagagccaccagaauu

SEQ ID NO: 19288 - RNA, 1922 nt, Artificial Sequence
  mRNA product Design e-2 comprising derived and/or modified sequence from HRSV(Memphis-37)__AIY60640.1__F_DSCav1_mut8 (opt5)
gggagacccgugacccggaaguuguacggcuacgcgacuuucccucccacaaacccucgcgcccuuccuuuccuacuugggcccggcagaaagcuuaccauggagcugcccauccucaagaccaacgccauuacaacgauccuggcugccgugacccuuugcuucgcgagcucccagaauauuacagaagaguuuuaccaaucuaccuguagcgcugucuccaaaggcuaucugggggcccucagaacaggaugguacaccucuguuaucacaauugaacugagcaacaucaaggagaucaaaugcaauggcaccgacgccaaggugaaacuuauuaagcaggaacuggauaaguauaaaaacgcugugacggaccuccagcugcugaugcaguccaccccugccgcugggucuggaagcgccaucgcguccggcauugccgucuguaaggugcuccaccuggagggggagguuaauaaaaucaagaacgcccuucugagcacaaauaaagcuguggucucucucuccggaugcggcgugagcguucugaccuucaaggugcuugaucugaagaacuacauugacaaacaacuccugccgauccugaauaagcagucuuguuccauucccaacaucgaaacagucaucgaguuucagcagaaaaauaaccggcuccuggaaauuacccgcgaguucagcgugaaugcuggcgugacgacaccugucucuaccuauaugcuuacaaacuccgagcugcucagccugaucaaugauaugcccauuaccaacgaccaaaagaaacuuauguccaacaauguucagaucgugagacagcagucuuacagcauuaugugcaucaucaaggaagaggugcuggccuaugucgugcaacucccucuguacgggguuauugauacccccuguuggaaacugcauacauccccucucugcacgaccaacacaaaggaaggaagcaauaucugucugacccggacagaccgcggcugguacugcgauaacgcggggucuguguccuuuuucccgcaggccgagaccuguaagguccagagcaauagaguguuuugcgacacgaugaacucucuuacacugcccagcgaaguuaaucucugcaacauugauaucuucaauccuaaauaugacuguaagauuaugaccuccaaaaccgaugugucuagcuccgucaucacaagccugggagcuaucgugucuugcuacggcaagaccaaauguacagccuccaacaagugccgggggauuaucaagacguuuagcaauggaugugacuaugucucuaacaaaggcguggacaccguuuccgugggcaauacacuuuacuaugucaacaagcaagaggggcagagccuguacgugaaaggagagcccauuaucaauuucuaugauccucucguuuuucccuccgacgaguucgaugcuucuauuagccaggugaacgaaaagaucaaccagucccuggccuuuauucgcaaaucugacgaacugcuccacaaugucaacgugggcaagagcaccacaaauaucaugaucaccacgauuaucauugugaucauuguuauccugcuucugcucaucgccgucgggcuguuccuguacugcaaggcuagauccaccccggugacacuuagcaaagaucaacucucuggaauuaacaauaucgcguucuccaacugaggacuaguguccaccugucccuccugggcugcuggauugucucguuuuccugccaaauaaacaggaucagcgcuuuacagaucuaaaaaaaaaaaaaaaaaaaaaaaaaaaaaaaaaaaaaaaaaaaaaaaaaaaaaaaaaaaaaaaaugcaucccccccccccccccccccccccccccccccaaaggcucuuuucagagccaccagaauu

SEQ ID NO: 19289 - RNA, 1922 nt, Artificial Sequence
  mRNA product Design e-2 comprising derived and/or modified sequence from HRSV(Memphis-37)__AIY60640.1__F_DSCav1_mut8 (opt6)
gggagacccgugacccggaaguuguacggcuacgcgacuuucccucccacaaacccucgcgcccuuccuuuccuacuugggcccggcagaaagcuuaccauggaacuuccuauuuuaaaaacaaacgcaauuacaaccauauuagcagcaguaacacuaugcuuugcaucaucacaaaacaucaccgaagaauuuuaucaauccacaugcucagcaguaucaaaaggauaccuuggcgcacuccgaacaggcugguauacaucggucauaacuauagaacucuccaacauaaaagaaauaaaaugcaaugguacugacgcaaaaguaaaauuaauaaaacaagaacuagacaaauacaaaaacgcaguaaccgauuuacaacuacuuaugcaaucaacaccugcagcaggaagcggaucagcaauagcaaguggaauagcaguaugcaaaguacuucaccucgaaggagaaguaaauaaaauaaaaaacgccuuacuaucaacaaauaaagccgucguaucacuuuccgguugcggcguaucaguauuaaccuuuaaagucuuagacuuaaaaaacuacauagacaaacaauuauuaccaauacuaaacaaacaauccuguuccauacccaacauagaaaccguaauagaauuucaacaaaaaaacaacagacuauuagaaauaacacgcgaauuuucaguaaacgcaggcguaacaacaccaguaucaacauauauguuaaccaauucagaauuauuaucccuuauaaaugacaugccuauaacaaacgaccaaaaaaaauuaaugaguaacaacguucaaauaguaagacaacaaucauacagcauaaugugcauaauaaaagaagaaguacuagcauacguaguucaacuaccacucuauggcguuaucgacaccccaugcuggaaacuacauaccucaccacucuguaccacuaauacgaaagaaggaucuaacauaugccuaaccagaacagaucgagguugguauugcgacaaugcuggaucaguaucauucuucccacaagcagaaaccugcaaaguacaaagcaacagaguauuuugugacacuaugaacucacuaacgcuaccuucagaaguaaaccuaugcaacaucgacauauucaacccaaaauacgauugcaaaauaaugacaucaaaaacagacguuuccucaucaguaauaacaucauuaggagcaauaguauccugcuacgguaaaaccaaaugcacagcauccaauaaaugccgaggaaucauuaaaacauuuucaaauggcugcgacuauguaaguaauaaagguguagauacaguaucaguaggcaacacacuauauuacguaaacaaacaagaagggcaaucccuauaugucaaaggcgaaccaauuauaaacuucuacgacccccucguauucccaucagacgaauuugacgcaucaauaucccaaguaaacgaaaaaaucaaccaaucacucgcauucauacguaaauccgacgaauuacuacauaacguaaacguaggcaaaucaacaacaaauauaaugauaacaaccauaaucauaguaauaauaguuauacuccuacuacucauugcagucggccuauuucuauacuguaaagcacgcucuacaccaguaacacuaucuaaagaucaauuauccggaauaaacaacauugccuucuccaauuaaggacuaguguccaccugucccuccugggcugcuggauugucucguuuuccugccaaauaaacaggaucagcgcuuuacagaucuaaaaaaaaaaaaaaaaaaaaaaaaaaaaaaaaaaaaaaaaaaaaaaaaaaaaaaaaaaaaaaaaugcaucccccccccccccccccccccccccccccccaaaggcucuuuucagagccaccagaauu

SEQ ID NO: 19290 - RNA, 1922 nt, Artificial Sequence
  mRNA product Design e-2 comprising derived and/or modified sequence from HRSV(Memphis-37)__AIY60640.1__F_DSCav1_mut8 (opt11)
gggagacccgugacccggaaguuguacggcuacgcgacuuucccucccacaaacccucgcgcccuuccuuuccuacuugggcccggcagaaagcuuaccauggaacuucccauccugaagaccaacgcuaucacaaccauccucgccgcagucacccuuugcuucgccucaucccaaaacaucaccgaagaauuuuaccagucaaccugcucggccgucuccaagggcuaccucggcgcccuccgcacuggcugguacacauccgucaucaccaucgaacucuccaacauaaaagaaauaaaaugcaacggaaccgacgccaaagucaaacucaucaaacaagaacuagauaaauauaaaaacgccgucaccgaccugcaacuccucaugcaauccaccccagccgccggcucuggcagcgccaucgcaagcggaaucgccgucugcaaaguccuccaccuagaaggcgaagucaacaaaauuaaaaacgcccuccucuccaccaacaaagcaguugucucccucucuggcugcggagucucuguacucaccuucaaaguacuagaccucaagaauuacauagacaaacaacuccugcccauccuuaacaaacaaaguuguaguauccccaacaucgaaacaguaaucgaauuucagcagaaaaacaaccgccuccucgaaaucacacgagaguucucggucaacgccggcgucaccacccccguaucaaccuacaugcuaacaaacuccgaacuacuuucccucaucaaugacaugcccauaaccaacgaccaaaagaaacuaauguccaauaacguccagauaguccgucaacaguccuacucaaucaugugcauaauuaaagaagaaguacucgccuacgucguccaacuaccccucuauggagucaucgacacccccugcuggaaacuccacacaucaccccuaugcacaaccaacaccaaagaaggcuccaacaucugccucacaagaaccgaccgcggcugguacugcgacaacgcuggcuccgucucguucuucccacaagccgaaaccugcaaaguccaaucaaaccgggucuucugcgacaccaugaacucccucacucucccaagcgaagucaaccuaugcaacaucgacaucuucaacccaaaauacgacuguaaaaucaugacuucgaaaacagacgucuccucaucaguaaucacauccuuaggcgccaucguguccugcuacgguaagaccaaaugcacagccuccaacaaaugccggggcaucaucaaaaccuucagcaacgguugugauuacgucuccaacaaaggaguagacaccgucuccguaggaaacacccucuacuacgucaacaagcaagaaggccaaucccucuacgucaaaggggaacccaucaucaacuucuacgacccacucgucuuccccuccgacgaguucgacgcaagcaucucccaagucaacgaaaagaucaaccaaucacuagccuucauccgcaaauccgacgaacuccuccacaacguuaacguaggcaaauccaccaccaacaucaugaucacaaccaucaucauagucauaauagucauccuacuacuccucaucgccguaggucuauuccuauacuguaaagcucgaucaacccccgucacacucuccaaagaucaacucucaggaaucaacaacaucgccuucuccaacuaaggacuaguguccaccugucccuccugggcugcuggauugucucguuuuccugccaaauaaacaggaucagcgcuuuacagaucuaaaaaaaaaaaaaaaaaaaaaaaaaaaaaaaaaaaaaaaaaaaaaaaaaaaaaaaaaaaaaaaaugcaucccccccccccccccccccccccccccccccaaaggcucuuuucagagccaccagaauu

SEQ ID NO: 19291 - RNA, 1892 nt, Artificial Sequence
  mRNA product Design e-3 comprising derived and/or modified sequence from HRSV(Memphis-37)__AIY60640.1__F_DSCav1_mut8 (opt1)
gggagacuuucccauucuguagcagaauuugguguugccuguggucuuggucccgcggagaagcuuaccauggagcugcccauccucaagaccaacgccaucaccacgauccuggccgcggugacccugugcuucgccagcucccagaacaucaccgaggaguucuaccagagcacgugcuccgccgucagcaagggcuaccucggcgcccugcgcaccgggugguacaccagcgugaucaccaucgagcuguccaacaucaaggagaucaagugcaacggcaccgacgccaaggugaagcucaucaagcaggagcuggacaaguacaagaacgcggucacggaccugcagcuccugaugcagagcaccccggccgccggcuccgggagcgcgaucgccuccggcaucgccgucugcaaggugcugcaccucgagggcgaggugaacaagaucaagaacgcccugcuguccaccaacaaggccgucgugagccucuccggcugcggggugagcguccugaccuucaaggugcuggaccucaagaacuacaucgacaagcagcugcugcccauccugaacaagcagagcugcuccauccccaacaucgagaccgucaucgaguuccagcagaagaacaaccgccuccuggagaucacgcgggaguucagcgugaacgcgggcgugaccacccccgucuccaccuacaugcugacgaacagcgagcuccugucccugaucaacgacaugccgaucaccaacgaccagaagaagcucaugagcaacaacgugcagaucgugcgccagcaguccuacagcaucaugugcaucaucaaggaggagguccuggccuacguggugcagcugccccucuacggggucaucgacacccccugcuggaagcugcacaccagcccccugugcacgaccaacaccaaggagggcuccaacaucugccucacccggacggaccgcgggugguacugcgacaacgccggcagcguguccuucuucccgcaggccgagaccugcaagguccagagcaaccggguguucugcgacaccaugaacucccugacccugcccagcgaggugaaccucugcaacaucgacaucuucaaccccaaguacgacugcaagaucaugacguccaagaccgacgucagcuccagcgugaucaccucccugggcgccaucgugagcugcuacgggaagaccaagugcacggcgagcaacaagugccgcggcaucaucaagaccuucuccaacgggugcgacuacgucagcaacaagggcguggacaccguguccgucggcaacacccuguacuacgugaacaagcaggagggccagagccucuacgugaagggggagcccaucaucaacuucuacgacccgcuggucuuccccuccgacgaguucgacgccagcaucucccaggugaacgagaagaucaaccagagccuggccuucauccggaaguccgacgagcuccugcacaacgugaacgucggcaagagcaccacgaacaucaugaucaccaccaucaucaucgugaucaucgugauccugcugcuccugaucgccgucgggcuguuccucuacugcaaggcccgcuccacccccgugacgcugagcaaggaccagcuguccgggaucaacaacaucgcguucagcaacugaggacuaguguccaccugucccuccugggcugcuggauugucucguuuuccugccaaauaaacaggaucagcgcuuuacagaucuaaaaaaaaaaaaaaaaaaaaaaaaaaaaaaaaaaaaaaaaaaaaaaaaaaaaaaaaaaaaaaaaugcaucccccccccccccccccccccccccccccccaaaggcucuuuucagagccaccagaauu

SEQ ID NO: 19292 - RNA, 1892 nt, Artificial Sequence
  mRNA product Design e-3 comprising derived and/or modified sequence from HRSV(Memphis-37)__AIY60640.1__F_DSCav1_mut8 (opt1)
gggagacuuucccauucuguagcagaauuugguguugccuguggucuuggucccgcggagaagcuuaccauggagcugcccauccucaagaccaacgccaucaccacgauccuggccgcggugacccugugcuucgccagcucccagaacaucaccgaggaguucuaccagagcacgugcuccgccgucagcaagggcuaccucggggcccugcgcaccggcugguacaccuccgugaucaccaucgagcugagcaacaucaaggagaucaagugcaacgggaccgacgccaaggugaagcucaucaagcaggagcuggacaaguacaagaacgcggucacggaccugcagcuccugaugcaguccaccccggccgccggcagcggguccgccaucgcgagcggcaucgccgugugcaaggugcugcaccucgagggcgaggucaacaagaucaagaacgcccugcuguccaccaacaaggccguggugagccucuccgggugcggcgucagcgugcugaccuucaaggugcuggaccucaagaacuacaucgacaagcagcugcugcccauccucaacaagcaguccugcagcauccccaacaucgagacggucaucgaguuccagcagaagaacaaccggcugcuggagaucacccgcgaguucuccgugaacgccggggugaccacccccgucagcacguacaugcucaccaacuccgagcugcugagccucaucaacgacaugccgaucaccaacgaccagaagaagcugaugagcaacaacgugcagaucgugcggcagcaguccuacagcaucaugugcaucaucaaggaggagguccuggcguacguggugcagcucccccuguacggcgucaucgacacccccugcuggaagcugcacacgagcccccucugcaccaccaacaccaaggagggguccaacaucugccugacgcgcaccgaccggggcugguacugcgacaacgccggcuccgugagcuucuucccgcaggccgagaccugcaaggugcaguccaaccgcgucuucugcgacaccaugaacagccugacgcuccccuccgaggugaaccugugcaacaucgacaucuucaaccccaaguacgacugcaagaucaugaccagcaagaccgacgucuccagcuccgugaucaccagccugggggccaucguguccugcuacggcaagacgaagugcaccgccagcaacaagugccgggggaucaucaagaccuucuccaacggcugcgacuacgucagcaacaagggcguggacaccguguccgucgggaacacgcucuacuacgugaacaagcaggagggccagagccuguacgugaagggggagcccaucaucaacuucuacgacccgcuggucuuccccagcgacgaguucgacgcguccaucagccaggugaacgagaagaucaaccagucccucgccuucauccgcaagagcgacgagcugcugcacaacgugaacgucggcaaguccaccaccaacaucaugaucaccaccaucaucaucgugaucaucgugauccuccugcugcucaucgccgucgggcuguuccuguacugcaaggcccggagcacgcccgugacccuguccaaggaccagcucagcggcaucaacaacaucgccuucuccaacugaggacuaguguccaccugucccuccugggcugcuggauugucucguuuuccugccaaauaaacaggaucagcgcuuuacagaucuaaaaaaaaaaaaaaaaaaaaaaaaaaaaaaaaaaaaaaaaaaaaaaaaaaaaaaaaaaaaaaaaugcaucccccccccccccccccccccccccccccccaaaggcucuuuucagagccaccagaauu

SEQ ID NO: 19293 - RNA, 1892 nt, Artificial Sequence
  mRNA product Design e-3 comprising derived and/or modified sequence from HRSV(Memphis-37)__AIY60640.1__F_DSCav1_mut8 (opt2)
gggagacuuucccauucuguagcagaauuugguguugccuguggucuuggucccgcggagaagcuuaccauggagcuccccauccucaagaccaacgccaucaccaccauccucgccgccgucacccucugcuucgccuccucccagaacaucaccgaggaguucuaccaguccaccugcuccgccgucuccaagggcuaccucggcgcccuccgcaccggcugguacaccuccgucaucaccaucgagcucuccaacaucaaggagaucaagugcaacggcaccgacgccaaggucaagcucaucaagcaggagcucgacaaguacaagaacgccgucaccgaccuccagcuccucaugcaguccacccccgccgccggcuccggcuccgccaucgccuccggcaucgccgucugcaagguccuccaccucgagggcgaggucaacaagaucaagaacgcccuccucuccaccaacaaggccgucgucucccucuccggcugcggcgucuccguccucaccuucaagguccucgaccucaagaacuacaucgacaagcagcuccuccccauccucaacaagcaguccugcuccauccccaacaucgagaccgucaucgaguuccagcagaagaacaaccgccuccucgagaucacccgcgaguucuccgucaacgccggcgucaccacccccgucuccaccuacaugcucaccaacuccgagcuccucucccucaucaacgacaugcccaucaccaacgaccagaagaagcucauguccaacaacguccagaucguccgccagcaguccuacuccaucaugugcaucaucaaggaggagguccucgccuacgucguccagcucccccucuacggcgucaucgacacccccugcuggaagcuccacaccuccccccucugcaccaccaacaccaaggagggcuccaacaucugccucacccgcaccgaccgcggcugguacugcgacaacgccggcuccgucuccuucuucccccaggccgagaccugcaagguccaguccaaccgcgucuucugcgacaccaugaacucccucacccuccccuccgaggucaaccucugcaacaucgacaucuucaaccccaaguacgacugcaagaucaugaccuccaagaccgacgucuccuccuccgucaucaccucccucggcgccaucgucuccugcuacggcaagaccaagugcaccgccuccaacaagugccgcggcaucaucaagaccuucuccaacggcugcgacuacgucuccaacaagggcgucgacaccgucuccgucggcaacacccucuacuacgucaacaagcaggagggccagucccucuacgucaagggcgagcccaucaucaacuucuacgacccccucgucuuccccuccgacgaguucgacgccuccaucucccaggucaacgagaagaucaaccagucccucgccuucauccgcaaguccgacgagcuccuccacaacgucaacgucggcaaguccaccaccaacaucaugaucaccaccaucaucaucgucaucaucgucauccuccuccuccucaucgccgucggccucuuccucuacugcaaggcccgcuccacccccgucacccucuccaaggaccagcucuccggcaucaacaacaucgccuucuccaacugaggacuaguguccaccugucccuccugggcugcuggauugucucguuuuccugccaaauaaacaggaucagcgcuuuacagaucuaaaaaaaaaaaaaaaaaaaaaaaaaaaaaaaaaaaaaaaaaaaaaaaaaaaaaaaaaaaaaaaaugcaucccccccccccccccccccccccccccccccaaaggcucuuuucagagccaccagaauu

SEQ ID NO: 19294 - RNA, 1892 nt, Artificial Sequence
  mRNA product Design e-3 comprising derived and/or modified sequence from HRSV(Memphis-37)__AIY60640.1__F_DSCav1_mut8 (opt3)
gggagacuuucccauucuguagcagaauuugguguugccuguggucuuggucccgcggagaagcuuaccauggagcugcccauccucaagaccaacgccauuacaacuauacuugcugcagugacgcugugcuucgccagcucccagaauaucaccgaagaguuuuaccaaucuacauguucagcggucaguaaaggcuauuugggggcuuuaagaacuggaugguacaccagcguuauuacaaucgaacuguccaacauuaaggagaucaaaugcaaugguaccgacgccaaggugaaacuaauaaagcaggaacucgauaaguauaaaaacgcaguaacugaccugcagcuucugaugcagucuacuccugccgcuggcucggggucagcaaucgccagcggaauugcuguguguaaggucuugcaccucgagggcgaggugaauaaaaucaagaacgcccugcugaguaccaauaaagcgguugugucccucucugguugcggggucagcguguuaacguucaagguacuggaucuuaagaacuacauugacaaacaauugcugccaauccuaaauaagcaguccuguucaauaccgaacauugaaacuguuaucgaguuucagcagaaaaauaacaggcuccuggaaauuacccgggaguucagugugaaugcaggagucacaacucccgugagcaccuauaugcuuacaaacucugagcuguugucccucaucaaugauaugccuaucaccaacgaccaaaagaaacugaugucaaacaaugugcagauuguccgccagcagagcuacaguauaaugugcaucauuaaggaagagguuuuagccuaugugguacaacugccacucuacggcgugaucgauacgcccuguuggaaacuucauacuucuccucugugcacaaccaacacuaaggaaggcuccaauauauguuugacacgaaccgaccgugggugguacugcgauaacgcuggaagcgucucguuuuucccacaggccgagacguguaaggugcagucuaauagaguuuucugcgacaccaugaacucccuaacacugcccucagaagugaaucucugcaacauugauaucuucaauccuaaauaugacuguaagaucaugacaaguaaaaccgaugucagcuccucugugauuacaagccugggugcaaucguaucaugcuacggcaagacuaaauguaccgcuaguaacaagugcagggggauuauaaagacauuuuccaauggaugugacuauguuagcaacaaaggcguggacaccgucucuguggguaauacucuuuacuaugucaacaagcaagaggggcagucacuguacgugaaaggagagccaaucauuaauuucuaugauccguugguuuuucccagugacgaauuugaugccagcaucucccaggugaacgagaagaucaaccagucucucgcguuuauucggaaaucggacgaacuguuacacaauguaaacgucggcaagagcacgacaaauauaaugaucaccacuauuaucauugugaucauaguuauccugcuacuccugauugccgugggccuuuucuuguacugcaaggcacgcuccaccccugucacacugucaaaagaucaacucagugggaucaacaauauugcuuucucuaacugaggacuaguguccaccugucccuccugggcugcuggauugucucguuuuccugccaaauaaacaggaucagcgcuuuacagaucuaaaaaaaaaaaaaaaaaaaaaaaaaaaaaaaaaaaaaaaaaaaaaaaaaaaaaaaaaaaaaaaaugcaucccccccccccccccccccccccccccccccaaaggcucuuuucagagccaccagaauu

SEQ ID NO: 19295 - RNA, 1892 nt, Artificial Sequence
  mRNA product Design e-3 comprising derived and/or modified sequence from HRSV(Memphis-37)__AIY60640.1__F_DSCav1_mut8 (opt4)
gggagacuuucccauucuguagcagaauuugguguugccuguggucuuggucccgcggagaagcuuaccauggagcugcccauccugaagaccaacgccaucaccaccauccuggccgccgugacccugugcuucgccagcagccagaacaucaccgaggaguucuaccagagcaccugcagcgccgugagcaagggcuaccugggcgcccugagaaccggcugguacaccagcgugaucaccaucgagcugagcaacaucaaggagaucaagugcaacggcaccgacgccaaggugaagcugaucaagcaggagcuggacaaguacaagaacgccgugaccgaccugcagcugcugaugcagagcacccccgccgccggcagcggcagcgccaucgccagcggcaucgccgugugcaaggugcugcaccuggagggcgaggugaacaagaucaagaacgcccugcugagcaccaacaaggccguggugagccugagcggcugcggcgugagcgugcugaccuucaaggugcuggaccugaagaacuacaucgacaagcagcugcugcccauccugaacaagcagagcugcagcauccccaacaucgagaccgugaucgaguuccagcagaagaacaacagacugcuggagaucaccagagaguucagcgugaacgccggcgugaccacccccgugagcaccuacaugcugaccaacagcgagcugcugagccugaucaacgacaugcccaucaccaacgaccagaagaagcugaugagcaacaacgugcagaucgugagacagcagagcuacagcaucaugugcaucaucaaggaggaggugcuggccuacguggugcagcugccccuguacggcgugaucgacacccccugcuggaagcugcacaccagcccccugugcaccaccaacaccaaggagggcagcaacaucugccugaccagaaccgacagaggcugguacugcgacaacgccggcagcgugagcuucuucccccaggccgagaccugcaaggugcagagcaacagaguguucugcgacaccaugaacagccugacccugcccagcgaggugaaccugugcaacaucgacaucuucaaccccaaguacgacugcaagaucaugaccagcaagaccgacgugagcagcagcgugaucaccagccugggcgccaucgugagcugcuacggcaagaccaagugcaccgccagcaacaagugcagaggcaucaucaagaccuucagcaacggcugcgacuacgugagcaacaagggcguggacaccgugagcgugggcaacacccuguacuacgugaacaagcaggagggccagagccuguacgugaagggcgagcccaucaucaacuucuacgacccccugguguuccccagcgacgaguucgacgccagcaucagccaggugaacgagaagaucaaccagagccuggccuucaucagaaagagcgacgagcugcugcacaacgugaacgugggcaagagcaccaccaacaucaugaucaccaccaucaucaucgugaucaucgugauccugcugcugcugaucgccgugggccuguuccuguacugcaaggccagaagcacccccgugacccugagcaaggaccagcugagcggcaucaacaacaucgccuucagcaacugaggacuaguguccaccugucccuccugggcugcuggauugucucguuuuccugccaaauaaacaggaucagcgcuuuacagaucuaaaaaaaaaaaaaaaaaaaaaaaaaaaaaaaaaaaaaaaaaaaaaaaaaaaaaaaaaaaaaaaaugcaucccccccccccccccccccccccccccccccaaaggcucuuuucagagccaccagaauu

SEQ ID NO: 19296 - RNA, 1892 nt, Artificial Sequence
  mRNA product Design e-3 comprising derived and/or modified sequence from HRSV(Memphis-37)__AIY60640.1__F_DSCav1_mut8 (opt5)
gggagacuuucccauucuguagcagaauuugguguugccuguggucuuggucccgcggagaagcuuaccauggagcugcccauccucaagaccaacgccauuacaacgauccuggcugccgugacccuuugcuucgcgagcucccagaauauuacagaagaguuuuaccaaucuaccuguagcgcugucuccaaaggcuaucugggggcccucagaacaggaugguacaccucuguuaucacaauugaacugagcaacaucaaggagaucaaaugcaauggcaccgacgccaaggugaaacuuauuaagcaggaacuggauaaguauaaaaacgcugugacggaccuccagcugcugaugcaguccaccccugccgcugggucuggaagcgccaucgcguccggcauugccgucuguaaggugcuccaccuggagggggagguuaauaaaaucaagaacgcccuucugagcacaaauaaagcuguggucucucucuccggaugcggcgugagcguucugaccuucaaggugcuugaucugaagaacuacauugacaaacaacuccugccgauccugaauaagcagucuuguuccauucccaacaucgaaacagucaucgaguuucagcagaaaaauaaccggcuccuggaaauuacccgcgaguucagcgugaaugcuggcgugacgacaccugucucuaccuauaugcuuacaaacuccgagcugcucagccugaucaaugauaugcccauuaccaacgaccaaaagaaacuuauguccaacaauguucagaucgugagacagcagucuuacagcauuaugugcaucaucaaggaagaggugcuggccuaugucgugcaacucccucuguacgggguuauugauacccccuguuggaaacugcauacauccccucucugcacgaccaacacaaaggaaggaagcaauaucugucugacccggacagaccgcggcugguacugcgauaacgcggggucuguguccuuuuucccgcaggccgagaccuguaagguccagagcaauagaguguuuugcgacacgaugaacucucuuacacugcccagcgaaguuaaucucugcaacauugauaucuucaauccuaaauaugacuguaagauuaugaccuccaaaaccgaugugucuagcuccgucaucacaagccugggagcuaucgugucuugcuacggcaagaccaaauguacagccuccaacaagugccgggggauuaucaagacguuuagcaauggaugugacuaugucucuaacaaaggcguggacaccguuuccgugggcaauacacuuuacuaugucaacaagcaagaggggcagagccuguacgugaaaggagagcccauuaucaauuucuaugauccucucguuuuucccuccgacgaguucgaugcuucuauuagccaggugaacgaaaagaucaaccagucccuggccuuuauucgcaaaucugacgaacugcuccacaaugucaacgugggcaagagcaccacaaauaucaugaucaccacgauuaucauugugaucauuguuauccugcuucugcucaucgccgucgggcuguuccuguacugcaaggcuagauccaccccggugacacuuagcaaagaucaacucucuggaauuaacaauaucgcguucuccaacugaggacuaguguccaccugucccuccugggcugcuggauugucucguuuuccugccaaauaaacaggaucagcgcuuuacagaucuaaaaaaaaaaaaaaaaaaaaaaaaaaaaaaaaaaaaaaaaaaaaaaaaaaaaaaaaaaaaaaaaugcaucccccccccccccccccccccccccccccccaaaggcucuuuucagagccaccagaauu

SEQ ID NO: 19297 - RNA, 1892 nt, Artificial Sequence
  mRNA product Design e-3 comprising derived and/or modified sequence from HRSV(Memphis-37)__AIY60640.1__F_DSCav1_mut8 (opt6)
gggagacuuucccauucuguagcagaauuugguguugccuguggucuuggucccgcggagaagcuuaccauggaacuuccuauuuuaaaaacaaacgcaauuacaaccauauuagcagcaguaacacuaugcuuugcaucaucacaaaacaucaccgaagaauuuuaucaauccacaugcucagcaguaucaaaaggauaccuuggcgcacuccgaacaggcugguauacaucggucauaacuauagaacucuccaacauaaaagaaauaaaaugcaaugguacugacgcaaaaguaaaauuaauaaaacaagaacuagacaaauacaaaaacgcaguaaccgauuuacaacuacuuaugcaaucaacaccugcagcaggaagcggaucagcaauagcaaguggaauagcaguaugcaaaguacuucaccucgaaggagaaguaaauaaaauaaaaaacgccuuacuaucaacaaauaaagccgucguaucacuuuccgguugcggcguaucaguauuaaccuuuaaagucuuagacuuaaaaaacuacauagacaaacaauuauuaccaauacuaaacaaacaauccuguuccauacccaacauagaaaccguaauagaauuucaacaaaaaaacaacagacuauuagaaauaacacgcgaauuuucaguaaacgcaggcguaacaacaccaguaucaacauauauguuaaccaauucagaauuauuaucccuuauaaaugacaugccuauaacaaacgaccaaaaaaaauuaaugaguaacaacguucaaauaguaagacaacaaucauacagcauaaugugcauaauaaaagaagaaguacuagcauacguaguucaacuaccacucuauggcguuaucgacaccccaugcuggaaacuacauaccucaccacucuguaccacuaauacgaaagaaggaucuaacauaugccuaaccagaacagaucgagguugguauugcgacaaugcuggaucaguaucauucuucccacaagcagaaaccugcaaaguacaaagcaacagaguauuuugugacacuaugaacucacuaacgcuaccuucagaaguaaaccuaugcaacaucgacauauucaacccaaaauacgauugcaaaauaaugacaucaaaaacagacguuuccucaucaguaauaacaucauuaggagcaauaguauccugcuacgguaaaaccaaaugcacagcauccaauaaaugccgaggaaucauuaaaacauuuucaaauggcugcgacuauguaaguaauaaagguguagauacaguaucaguaggcaacacacuauauuacguaaacaaacaagaagggcaaucccuauaugucaaaggcgaaccaauuauaaacuucuacgacccccucguauucccaucagacgaauuugacgcaucaauaucccaaguaaacgaaaaaaucaaccaaucacucgcauucauacguaaauccgacgaauuacuacauaacguaaacguaggcaaaucaacaacaaauauaaugauaacaaccauaaucauaguaauaauaguuauacuccuacuacucauugcagucggccuauuucuauacuguaaagcacgcucuacaccaguaacacuaucuaaagaucaauuauccggaauaaacaacauugccuucuccaauuaaggacuaguguccaccugucccuccugggcugcuggauugucucguuuuccugccaaauaaacaggaucagcgcuuuacagaucuaaaaaaaaaaaaaaaaaaaaaaaaaaaaaaaaaaaaaaaaaaaaaaaaaaaaaaaaaaaaaaaaugcaucccccccccccccccccccccccccccccccaaaggcucuuuucagagccaccagaauu

SEQ ID NO: 19298 - RNA, 1892 nt, Artificial Sequence
  mRNA product Design e-3 comprising derived and/or modified sequence from HRSV(Memphis-37)__AIY60640.1__F_DSCav1_mut8 (opt11)
gggagacuuucccauucuguagcagaauuugguguugccuguggucuuggucccgcggagaagcuuaccauggaacuucccauccugaagaccaacgcuaucacaaccauccucgccgcagucacccuuugcuucgccucaucccaaaacaucaccgaagaauuuuaccagucaaccugcucggccgucuccaagggcuaccucggcgcccuccgcacuggcugguacacauccgucaucaccaucgaacucuccaacauaaaagaaauaaaaugcaacggaaccgacgccaaagucaaacucaucaaacaagaacuagauaaauauaaaaacgccgucaccgaccugcaacuccucaugcaauccaccccagccgccggcucuggcagcgccaucgcaagcggaaucgccgucugcaaaguccuccaccuagaaggcgaagucaacaaaauuaaaaacgcccuccucuccaccaacaaagcaguugucucccucucuggcugcggagucucuguacucaccuucaaaguacuagaccucaagaauuacauagacaaacaacuccugcccauccuuaacaaacaaaguuguaguauccccaacaucgaaacaguaaucgaauuucagcagaaaaacaaccgccuccucgaaaucacacgagaguucucggucaacgccggcgucaccacccccguaucaaccuacaugcuaacaaacuccgaacuacuuucccucaucaaugacaugcccauaaccaacgaccaaaagaaacuaauguccaauaacguccagauaguccgucaacaguccuacucaaucaugugcauaauuaaagaagaaguacucgccuacgucguccaacuaccccucuauggagucaucgacacccccugcuggaaacuccacacaucaccccuaugcacaaccaacaccaaagaaggcuccaacaucugccucacaagaaccgaccgcggcugguacugcgacaacgcuggcuccgucucguucuucccacaagccgaaaccugcaaaguccaaucaaaccgggucuucugcgacaccaugaacucccucacucucccaagcgaagucaaccuaugcaacaucgacaucuucaacccaaaauacgacuguaaaaucaugacuucgaaaacagacgucuccucaucaguaaucacauccuuaggcgccaucguguccugcuacgguaagaccaaaugcacagccuccaacaaaugccggggcaucaucaaaaccuucagcaacgguugugauuacgucuccaacaaaggaguagacaccgucuccguaggaaacacccucuacuacgucaacaagcaagaaggccaaucccucuacgucaaaggggaacccaucaucaacuucuacgacccacucgucuuccccuccgacgaguucgacgcaagcaucucccaagucaacgaaaagaucaaccaaucacuagccuucauccgcaaauccgacgaacuccuccacaacguuaacguaggcaaauccaccaccaacaucaugaucacaaccaucaucauagucauaauagucauccuacuacuccucaucgccguaggucuauuccuauacuguaaagcucgaucaacccccgucacacucuccaaagaucaacucucaggaaucaacaacaucgccuucuccaacuaaggacuaguguccaccugucccuccugggcugcuggauugucucguuuuccugccaaauaaacaggaucagcgcuuuacagaucuaaaaaaaaaaaaaaaaaaaaaaaaaaaaaaaaaaaaaaaaaaaaaaaaaaaaaaaaaaaaaaaaugcaucccccccccccccccccccccccccccccccaaaggcucuuuucagagccaccagaauu

SEQ ID NO: 19299 - RNA, 1946 nt, Artificial Sequence
  mRNA product Design e-4 comprising derived and/or modified sequence from HRSV(Memphis-37)__AIY60640.1__F_DSCav1_mut8 (opt1)
gggagacuccugucgggcggaaguaggaggaguagaguuuaaaaacaguacucuuuuuccgguucgggacguaguugaagcaacgacaagccggauaaccgcucuugagacaggaagcuuaccauggagcugcccauccucaagaccaacgccaucaccacgauccuggccgcggugacccugugcuucgccagcucccagaacaucaccgaggaguucuaccagagcacgugcuccgccgucagcaagggcuaccucggcgcccugcgcaccgggugguacaccagcgugaucaccaucgagcuguccaacaucaaggagaucaagugcaacggcaccgacgccaaggugaagcucaucaagcaggagcuggacaaguacaagaacgcggucacggaccugcagcuccugaugcagagcaccccggccgccggcuccgggagcgcgaucgccuccggcaucgccgucugcaaggugcugcaccucgagggcgaggugaacaagaucaagaacgcccugcuguccaccaacaaggccgucgugagccucuccggcugcggggugagcguccugaccuucaaggugcuggaccucaagaacuacaucgacaagcagcugcugcccauccugaacaagcagagcugcuccauccccaacaucgagaccgucaucgaguuccagcagaagaacaaccgccuccuggagaucacgcgggaguucagcgugaacgcgggcgugaccacccccgucuccaccuacaugcugacgaacagcgagcuccugucccugaucaacgacaugccgaucaccaacgaccagaagaagcucaugagcaacaacgugcagaucgugcgccagcaguccuacagcaucaugugcaucaucaaggaggagguccuggccuacguggugcagcugccccucuacggggucaucgacacccccugcuggaagcugcacaccagcccccugugcacgaccaacaccaaggagggcuccaacaucugccucacccggacggaccgcgggugguacugcgacaacgccggcagcguguccuucuucccgcaggccgagaccugcaagguccagagcaaccggguguucugcgacaccaugaacucccugacccugcccagcgaggugaaccucugcaacaucgacaucuucaaccccaaguacgacugcaagaucaugacguccaagaccgacgucagcuccagcgugaucaccucccugggcgccaucgugagcugcuacgggaagaccaagugcacggcgagcaacaagugccgcggcaucaucaagaccuucuccaacgggugcgacuacgucagcaacaagggcguggacaccguguccgucggcaacacccuguacuacgugaacaagcaggagggccagagccucuacgugaagggggagcccaucaucaacuucuacgacccgcuggucuuccccuccgacgaguucgacgccagcaucucccaggugaacgagaagaucaaccagagccuggccuucauccggaaguccgacgagcuccugcacaacgugaacgucggcaagagcaccacgaacaucaugaucaccaccaucaucaucgugaucaucgugauccugcugcuccugaucgccgucgggcuguuccucuacugcaaggcccgcuccacccccgugacgcugagcaaggaccagcuguccgggaucaacaacaucgcguucagcaacugaggacuaguguccaccugucccuccugggcugcuggauugucucguuuuccugccaaauaaacaggaucagcgcuuuacagaucuaaaaaaaaaaaaaaaaaaaaaaaaaaaaaaaaaaaaaaaaaaaaaaaaaaaaaaaaaaaaaaaaugcaucccccccccccccccccccccccccccccccaaaggcucuuuucagagccaccagaauu

SEQ ID NO: 19300 - RNA, 1946 nt, Artificial Sequence
  mRNA product Design e-4 comprising derived and/or modified sequence from HRSV(Memphis-37)__AIY60640.1__F_DSCav1_mut8 (opt1)
gggagacuccugucgggcggaaguaggaggaguagaguuuaaaaacaguacucuuuuuccgguucgggacguaguugaagcaacgacaagccggauaaccgcucuugagacaggaagcuuaccauggagcugcccauccucaagaccaacgccaucaccacgauccuggccgcggugacccugugcuucgccagcucccagaacaucaccgaggaguucuaccagagcacgugcuccgccgucagcaagggcuaccucggggcccugcgcaccggcugguacaccuccgugaucaccaucgagcugagcaacaucaaggagaucaagugcaacgggaccgacgccaaggugaagcucaucaagcaggagcuggacaaguacaagaacgcggucacggaccugcagcuccugaugcaguccaccccggccgccggcagcggguccgccaucgcgagcggcaucgccgugugcaaggugcugcaccucgagggcgaggucaacaagaucaagaacgcccugcuguccaccaacaaggccguggugagccucuccgggugcggcgucagcgugcugaccuucaaggugcuggaccucaagaacuacaucgacaagcagcugcugcccauccucaacaagcaguccugcagcauccccaacaucgagacggucaucgaguuccagcagaagaacaaccggcugcuggagaucacccgcgaguucuccgugaacgccggggugaccacccccgucagcacguacaugcucaccaacuccgagcugcugagccucaucaacgacaugccgaucaccaacgaccagaagaagcugaugagcaacaacgugcagaucgugcggcagcaguccuacagcaucaugugcaucaucaaggaggagguccuggcguacguggugcagcucccccuguacggcgucaucgacacccccugcuggaagcugcacacgagcccccucugcaccaccaacaccaaggagggguccaacaucugccugacgcgcaccgaccggggcugguacugcgacaacgccggcuccgugagcuucuucccgcaggccgagaccugcaaggugcaguccaaccgcgucuucugcgacaccaugaacagccugacgcuccccuccgaggugaaccugugcaacaucgacaucuucaaccccaaguacgacugcaagaucaugaccagcaagaccgacgucuccagcuccgugaucaccagccugggggccaucguguccugcuacggcaagacgaagugcaccgccagcaacaagugccgggggaucaucaagaccuucuccaacggcugcgacuacgucagcaacaagggcguggacaccguguccgucgggaacacgcucuacuacgugaacaagcaggagggccagagccuguacgugaagggggagcccaucaucaacuucuacgacccgcuggucuuccccagcgacgaguucgacgcguccaucagccaggugaacgagaagaucaaccagucccucgccuucauccgcaagagcgacgagcugcugcacaacgugaacgucggcaaguccaccaccaacaucaugaucaccaccaucaucaucgugaucaucgugauccuccugcugcucaucgccgucgggcuguuccuguacugcaaggcccggagcacgcccgugacccuguccaaggaccagcucagcggcaucaacaacaucgccuucuccaacugaggacuaguguccaccugucccuccugggcugcuggauugucucguuuuccugccaaauaaacaggaucagcgcuuuacagaucuaaaaaaaaaaaaaaaaaaaaaaaaaaaaaaaaaaaaaaaaaaaaaaaaaaaaaaaaaaaaaaaaugcaucccccccccccccccccccccccccccccccaaaggcucuuuucagagccaccagaauu

SEQ ID NO: 19301 - RNA, 1946 nt, Artificial Sequence
  mRNA product Design e-4 comprising derived and/or modified sequence from HRSV(Memphis-37)__AIY60640.1__F_DSCav1_mut8 (opt2)
gggagacuccugucgggcggaaguaggaggaguagaguuuaaaaacaguacucuuuuuccgguucgggacguaguugaagcaacgacaagccggauaaccgcucuugagacaggaagcuuaccauggagcuccccauccucaagaccaacgccaucaccaccauccucgccgccgucacccucugcuucgccuccucccagaacaucaccgaggaguucuaccaguccaccugcuccgccgucuccaagggcuaccucggcgcccuccgcaccggcugguacaccuccgucaucaccaucgagcucuccaacaucaaggagaucaagugcaacggcaccgacgccaaggucaagcucaucaagcaggagcucgacaaguacaagaacgccgucaccgaccuccagcuccucaugcaguccacccccgccgccggcuccggcuccgccaucgccuccggcaucgccgucugcaagguccuccaccucgagggcgaggucaacaagaucaagaacgcccuccucuccaccaacaaggccgucgucucccucuccggcugcggcgucuccguccucaccuucaagguccucgaccucaagaacuacaucgacaagcagcuccuccccauccucaacaagcaguccugcuccauccccaacaucgagaccgucaucgaguuccagcagaagaacaaccgccuccucgagaucacccgcgaguucuccgucaacgccggcgucaccacccccgucuccaccuacaugcucaccaacuccgagcuccucucccucaucaacgacaugcccaucaccaacgaccagaagaagcucauguccaacaacguccagaucguccgccagcaguccuacuccaucaugugcaucaucaaggaggagguccucgccuacgucguccagcucccccucuacggcgucaucgacacccccugcuggaagcuccacaccuccccccucugcaccaccaacaccaaggagggcuccaacaucugccucacccgcaccgaccgcggcugguacugcgacaacgccggcuccgucuccuucuucccccaggccgagaccugcaagguccaguccaaccgcgucuucugcgacaccaugaacucccucacccuccccuccgaggucaaccucugcaacaucgacaucuucaaccccaaguacgacugcaagaucaugaccuccaagaccgacgucuccuccuccgucaucaccucccucggcgccaucgucuccugcuacggcaagaccaagugcaccgccuccaacaagugccgcggcaucaucaagaccuucuccaacggcugcgacuacgucuccaacaagggcgucgacaccgucuccgucggcaacacccucuacuacgucaacaagcaggagggccagucccucuacgucaagggcgagcccaucaucaacuucuacgacccccucgucuuccccuccgacgaguucgacgccuccaucucccaggucaacgagaagaucaaccagucccucgccuucauccgcaaguccgacgagcuccuccacaacgucaacgucggcaaguccaccaccaacaucaugaucaccaccaucaucaucgucaucaucgucauccuccuccuccucaucgccgucggccucuuccucuacugcaaggcccgcuccacccccgucacccucuccaaggaccagcucuccggcaucaacaacaucgccuucuccaacugaggacuaguguccaccugucccuccugggcugcuggauugucucguuuuccugccaaauaaacaggaucagcgcuuuacagaucuaaaaaaaaaaaaaaaaaaaaaaaaaaaaaaaaaaaaaaaaaaaaaaaaaaaaaaaaaaaaaaaaugcaucccccccccccccccccccccccccccccccaaaggcucuuuucagagccaccagaauu

SEQ ID NO: 19302 - RNA, 1946 nt, Artificial Sequence
  mRNA product Design e-4 comprising derived and/or modified sequence from HRSV(Memphis-37)__AIY60640.1__F_DSCav1_mut8 (opt3)
gggagacuccugucgggcggaaguaggaggaguagaguuuaaaaacaguacucuuuuuccgguucgggacguaguugaagcaacgacaagccggauaaccgcucuugagacaggaagcuuaccauggagcugcccauccucaagaccaacgccauuacaacuauacuugcugcagugacgcugugcuucgccagcucccagaauaucaccgaagaguuuuaccaaucuacauguucagcggucaguaaaggcuauuugggggcuuuaagaacuggaugguacaccagcguuauuacaaucgaacuguccaacauuaaggagaucaaaugcaaugguaccgacgccaaggugaaacuaauaaagcaggaacucgauaaguauaaaaacgcaguaacugaccugcagcuucugaugcagucuacuccugccgcuggcucggggucagcaaucgccagcggaauugcuguguguaaggucuugcaccucgagggcgaggugaauaaaaucaagaacgcccugcugaguaccaauaaagcgguugugucccucucugguugcggggucagcguguuaacguucaagguacuggaucuuaagaacuacauugacaaacaauugcugccaauccuaaauaagcaguccuguucaauaccgaacauugaaacuguuaucgaguuucagcagaaaaauaacaggcuccuggaaauuacccgggaguucagugugaaugcaggagucacaacucccgugagcaccuauaugcuuacaaacucugagcuguugucccucaucaaugauaugccuaucaccaacgaccaaaagaaacugaugucaaacaaugugcagauuguccgccagcagagcuacaguauaaugugcaucauuaaggaagagguuuuagccuaugugguacaacugccacucuacggcgugaucgauacgcccuguuggaaacuucauacuucuccucugugcacaaccaacacuaaggaaggcuccaauauauguuugacacgaaccgaccgugggugguacugcgauaacgcuggaagcgucucguuuuucccacaggccgagacguguaaggugcagucuaauagaguuuucugcgacaccaugaacucccuaacacugcccucagaagugaaucucugcaacauugauaucuucaauccuaaauaugacuguaagaucaugacaaguaaaaccgaugucagcuccucugugauuacaagccugggugcaaucguaucaugcuacggcaagacuaaauguaccgcuaguaacaagugcagggggauuauaaagacauuuuccaauggaugugacuauguuagcaacaaaggcguggacaccgucucuguggguaauacucuuuacuaugucaacaagcaagaggggcagucacuguacgugaaaggagagccaaucauuaauuucuaugauccguugguuuuucccagugacgaauuugaugccagcaucucccaggugaacgagaagaucaaccagucucucgcguuuauucggaaaucggacgaacuguuacacaauguaaacgucggcaagagcacgacaaauauaaugaucaccacuauuaucauugugaucauaguuauccugcuacuccugauugccgugggccuuuucuuguacugcaaggcacgcuccaccccugucacacugucaaaagaucaacucagugggaucaacaauauugcuuucucuaacugaggacuaguguccaccugucccuccugggcugcuggauugucucguuuuccugccaaauaaacaggaucagcgcuuuacagaucuaaaaaaaaaaaaaaaaaaaaaaaaaaaaaaaaaaaaaaaaaaaaaaaaaaaaaaaaaaaaaaaaugcaucccccccccccccccccccccccccccccccaaaggcucuuuucagagccaccagaauu

SEQ ID NO: 19303 - RNA, 1946 nt, Artificial Sequence
  mRNA product Design e-4 comprising derived and/or modified sequence from HRSV(Memphis-37)__AIY60640.1__F_DSCav1_mut8 (opt4)
gggagacuccugucgggcggaaguaggaggaguagaguuuaaaaacaguacucuuuuuccgguucgggacguaguugaagcaacgacaagccggauaaccgcucuugagacaggaagcuuaccauggagcugcccauccugaagaccaacgccaucaccaccauccuggccgccgugacccugugcuucgccagcagccagaacaucaccgaggaguucuaccagagcaccugcagcgccgugagcaagggcuaccugggcgcccugagaaccggcugguacaccagcgugaucaccaucgagcugagcaacaucaaggagaucaagugcaacggcaccgacgccaaggugaagcugaucaagcaggagcuggacaaguacaagaacgccgugaccgaccugcagcugcugaugcagagcacccccgccgccggcagcggcagcgccaucgccagcggcaucgccgugugcaaggugcugcaccuggagggcgaggugaacaagaucaagaacgcccugcugagcaccaacaaggccguggugagccugagcggcugcggcgugagcgugcugaccuucaaggugcuggaccugaagaacuacaucgacaagcagcugcugcccauccugaacaagcagagcugcagcauccccaacaucgagaccgugaucgaguuccagcagaagaacaacagacugcuggagaucaccagagaguucagcgugaacgccggcgugaccacccccgugagcaccuacaugcugaccaacagcgagcugcugagccugaucaacgacaugcccaucaccaacgaccagaagaagcugaugagcaacaacgugcagaucgugagacagcagagcuacagcaucaugugcaucaucaaggaggaggugcuggccuacguggugcagcugccccuguacggcgugaucgacacccccugcuggaagcugcacaccagcccccugugcaccaccaacaccaaggagggcagcaacaucugccugaccagaaccgacagaggcugguacugcgacaacgccggcagcgugagcuucuucccccaggccgagaccugcaaggugcagagcaacagaguguucugcgacaccaugaacagccugacccugcccagcgaggugaaccugugcaacaucgacaucuucaaccccaaguacgacugcaagaucaugaccagcaagaccgacgugagcagcagcgugaucaccagccugggcgccaucgugagcugcuacggcaagaccaagugcaccgccagcaacaagugcagaggcaucaucaagaccuucagcaacggcugcgacuacgugagcaacaagggcguggacaccgugagcgugggcaacacccuguacuacgugaacaagcaggagggccagagccuguacgugaagggcgagcccaucaucaacuucuacgacccccugguguuccccagcgacgaguucgacgccagcaucagccaggugaacgagaagaucaaccagagccuggccuucaucagaaagagcgacgagcugcugcacaacgugaacgugggcaagagcaccaccaacaucaugaucaccaccaucaucaucgugaucaucgugauccugcugcugcugaucgccgugggccuguuccuguacugcaaggccagaagcacccccgugacccugagcaaggaccagcugagcggcaucaacaacaucgccuucagcaacugaggacuaguguccaccugucccuccugggcugcuggauugucucguuuuccugccaaauaaacaggaucagcgcuuuacagaucuaaaaaaaaaaaaaaaaaaaaaaaaaaaaaaaaaaaaaaaaaaaaaaaaaaaaaaaaaaaaaaaaugcaucccccccccccccccccccccccccccccccaaaggcucuuuucagagccaccagaauu

SEQ ID NO: 19304 - RNA, 1946 nt, Artificial Sequence
  mRNA product Design e-4 comprising derived and/or modified sequence from HRSV(Memphis-37)__AIY60640.1__F_DSCav1_mut8 (opt5)
gggagacuccugucgggcggaaguaggaggaguagaguuuaaaaacaguacucuuuuuccgguucgggacguaguugaagcaacgacaagccggauaaccgcucuugagacaggaagcuuaccauggagcugcccauccucaagaccaacgccauuacaacgauccuggcugccgugacccuuugcuucgcgagcucccagaauauuacagaagaguuuuaccaaucuaccuguagcgcugucuccaaaggcuaucugggggcccucagaacaggaugguacaccucuguuaucacaauugaacugagcaacaucaaggagaucaaaugcaauggcaccgacgccaaggugaaacuuauuaagcaggaacuggauaaguauaaaaacgcugugacggaccuccagcugcugaugcaguccaccccugccgcugggucuggaagcgccaucgcguccggcauugccgucuguaaggugcuccaccuggagggggagguuaauaaaaucaagaacgcccuucugagcacaaauaaagcuguggucucucucuccggaugcggcgugagcguucugaccuucaaggugcuugaucugaagaacuacauugacaaacaacuccugccgauccugaauaagcagucuuguuccauucccaacaucgaaacagucaucgaguuucagcagaaaaauaaccggcuccuggaaauuacccgcgaguucagcgugaaugcuggcgugacgacaccugucucuaccuauaugcuuacaaacuccgagcugcucagccugaucaaugauaugcccauuaccaacgaccaaaagaaacuuauguccaacaauguucagaucgugagacagcagucuuacagcauuaugugcaucaucaaggaagaggugcuggccuaugucgugcaacucccucuguacgggguuauugauacccccuguuggaaacugcauacauccccucucugcacgaccaacacaaaggaaggaagcaauaucugucugacccggacagaccgcggcugguacugcgauaacgcggggucuguguccuuuuucccgcaggccgagaccuguaagguccagagcaauagaguguuuugcgacacgaugaacucucuuacacugcccagcgaaguuaaucucugcaacauugauaucuucaauccuaaauaugacuguaagauuaugaccuccaaaaccgaugugucuagcuccgucaucacaagccugggagcuaucgugucuugcuacggcaagaccaaauguacagccuccaacaagugccgggggauuaucaagacguuuagcaauggaugugacuaugucucuaacaaaggcguggacaccguuuccgugggcaauacacuuuacuaugucaacaagcaagaggggcagagccuguacgugaaaggagagcccauuaucaauuucuaugauccucucguuuuucccuccgacgaguucgaugcuucuauuagccaggugaacgaaaagaucaaccagucccuggccuuuauucgcaaaucugacgaacugcuccacaaugucaacgugggcaagagcaccacaaauaucaugaucaccacgauuaucauugugaucauuguuauccugcuucugcucaucgccgucgggcuguuccuguacugcaaggcuagauccaccccggugacacuuagcaaagaucaacucucuggaauuaacaauaucgcguucuccaacugaggacuaguguccaccugucccuccugggcugcuggauugucucguuuuccugccaaauaaacaggaucagcgcuuuacagaucuaaaaaaaaaaaaaaaaaaaaaaaaaaaaaaaaaaaaaaaaaaaaaaaaaaaaaaaaaaaaaaaaugcaucccccccccccccccccccccccccccccccaaaggcucuuuucagagccaccagaauu

SEQ ID NO: 19305 - RNA, 1946 nt, Artificial Sequence
  mRNA product Design e-4 comprising derived and/or modified sequence from HRSV(Memphis-37)__AIY60640.1__F_DSCav1_mut8 (opt6)
gggagacuccugucgggcggaaguaggaggaguagaguuuaaaaacaguacucuuuuuccgguucgggacguaguugaagcaacgacaagccggauaaccgcucuugagacaggaagcuuaccauggaacuuccuauuuuaaaaacaaacgcaauuacaaccauauuagcagcaguaacacuaugcuuugcaucaucacaaaacaucaccgaagaauuuuaucaauccacaugcucagcaguaucaaaaggauaccuuggcgcacuccgaacaggcugguauacaucggucauaacuauagaacucuccaacauaaaagaaauaaaaugcaaugguacugacgcaaaaguaaaauuaauaaaacaagaacuagacaaauacaaaaacgcaguaaccgauuuacaacuacuuaugcaaucaacaccugcagcaggaagcggaucagcaauagcaaguggaauagcaguaugcaaaguacuucaccucgaaggagaaguaaauaaaauaaaaaacgccuuacuaucaacaaauaaagccgucguaucacuuuccgguugcggcguaucaguauuaaccuuuaaagucuuagacuuaaaaaacuacauagacaaacaauuauuaccaauacuaaacaaacaauccuguuccauacccaacauagaaaccguaauagaauuucaacaaaaaaacaacagacuauuagaaauaacacgcgaauuuucaguaaacgcaggcguaacaacaccaguaucaacauauauguuaaccaauucagaauuauuaucccuuauaaaugacaugccuauaacaaacgaccaaaaaaaauuaaugaguaacaacguucaaauaguaagacaacaaucauacagcauaaugugcauaauaaaagaagaaguacuagcauacguaguucaacuaccacucuauggcguuaucgacaccccaugcuggaaacuacauaccucaccacucuguaccacuaauacgaaagaaggaucuaacauaugccuaaccagaacagaucgagguugguauugcgacaaugcuggaucaguaucauucuucccacaagcagaaaccugcaaaguacaaagcaacagaguauuuugugacacuaugaacucacuaacgcuaccuucagaaguaaaccuaugcaacaucgacauauucaacccaaaauacgauugcaaaauaaugacaucaaaaacagacguuuccucaucaguaauaacaucauuaggagcaauaguauccugcuacgguaaaaccaaaugcacagcauccaauaaaugccgaggaaucauuaaaacauuuucaaauggcugcgacuauguaaguaauaaagguguagauacaguaucaguaggcaacacacuauauuacguaaacaaacaagaagggcaaucccuauaugucaaaggcgaaccaauuauaaacuucuacgacccccucguauucccaucagacgaauuugacgcaucaauaucccaaguaaacgaaaaaaucaaccaaucacucgcauucauacguaaauccgacgaauuacuacauaacguaaacguaggcaaaucaacaacaaauauaaugauaacaaccauaaucauaguaauaauaguuauacuccuacuacucauugcagucggccuauuucuauacuguaaagcacgcucuacaccaguaacacuaucuaaagaucaauuauccggaauaaacaacauugccuucuccaauuaaggacuaguguccaccugucccuccugggcugcuggauugucucguuuuccugccaaauaaacaggaucagcgcuuuacagaucuaaaaaaaaaaaaaaaaaaaaaaaaaaaaaaaaaaaaaaaaaaaaaaaaaaaaaaaaaaaaaaaaugcaucccccccccccccccccccccccccccccccaaaggcucuuuucagagccaccagaauu

SEQ ID NO: 19306 - RNA, 1946 nt, Artificial Sequence
  mRNA product Design e-4 comprising derived and/or modified sequence from HRSV(Memphis-37)__AIY60640.1__F_DSCav1_mut8 (opt11)
gggagacuccugucgggcggaaguaggaggaguagaguuuaaaaacaguacucuuuuuccgguucgggacguaguugaagcaacgacaagccggauaaccgcucuugagacaggaagcuuaccauggaacuucccauccugaagaccaacgcuaucacaaccauccucgccgcagucacccuuugcuucgccucaucccaaaacaucaccgaagaauuuuaccagucaaccugcucggccgucuccaagggcuaccucggcgcccuccgcacuggcugguacacauccgucaucaccaucgaacucuccaacauaaaagaaauaaaaugcaacggaaccgacgccaaagucaaacucaucaaacaagaacuagauaaauauaaaaacgccgucaccgaccugcaacuccucaugcaauccaccccagccgccggcucuggcagcgccaucgcaagcggaaucgccgucugcaaaguccuccaccuagaaggcgaagucaacaaaauuaaaaacgcccuccucuccaccaacaaagcaguugucucccucucuggcugcggagucucuguacucaccuucaaaguacuagaccucaagaauuacauagacaaacaacuccugcccauccuuaacaaacaaaguuguaguauccccaacaucgaaacaguaaucgaauuucagcagaaaaacaaccgccuccucgaaaucacacgagaguucucggucaacgccggcgucaccacccccguaucaaccuacaugcuaacaaacuccgaacuacuuucccucaucaaugacaugcccauaaccaacgaccaaaagaaacuaauguccaauaacguccagauaguccgucaacaguccuacucaaucaugugcauaauuaaagaagaaguacucgccuacgucguccaacuaccccucuauggagucaucgacacccccugcuggaaacuccacacaucaccccuaugcacaaccaacaccaaagaaggcuccaacaucugccucacaagaaccgaccgcggcugguacugcgacaacgcuggcuccgucucguucuucccacaagccgaaaccugcaaaguccaaucaaaccgggucuucugcgacaccaugaacucccucacucucccaagcgaagucaaccuaugcaacaucgacaucuucaacccaaaauacgacuguaaaaucaugacuucgaaaacagacgucuccucaucaguaaucacauccuuaggcgccaucguguccugcuacgguaagaccaaaugcacagccuccaacaaaugccggggcaucaucaaaaccuucagcaacgguugugauuacgucuccaacaaaggaguagacaccgucuccguaggaaacacccucuacuacgucaacaagcaagaaggccaaucccucuacgucaaaggggaacccaucaucaacuucuacgacccacucgucuuccccuccgacgaguucgacgcaagcaucucccaagucaacgaaaagaucaaccaaucacuagccuucauccgcaaauccgacgaacuccuccacaacguuaacguaggcaaauccaccaccaacaucaugaucacaaccaucaucauagucauaauagucauccuacuacuccucaucgccguaggucuauuccuauacuguaaagcucgaucaacccccgucacacucuccaaagaucaacucucaggaaucaacaacaucgccuucuccaacuaaggacuaguguccaccugucccuccugggcugcuggauugucucguuuuccugccaaauaaacaggaucagcgcuuuacagaucuaaaaaaaaaaaaaaaaaaaaaaaaaaaaaaaaaaaaaaaaaaaaaaaaaaaaaaaaaaaaaaaaugcaucccccccccccccccccccccccccccccccaaaggcucuuuucagagccaccagaauu

SEQ ID NO: 19307 - RNA, 1913 nt, Artificial Sequence
  mRNA product Design e-5 comprising derived and/or modified sequence from HRSV(Memphis-37)__AIY60640.1__F_DSCav1_mut8 (opt1)
gggagagcggcucggccauuuugucccagucaguccggaggcugcggcugcagaaguaccgccugcggaguaacugcaaagaagcuuaccauggagcugcccauccucaagaccaacgccaucaccacgauccuggccgcggugacccugugcuucgccagcucccagaacaucaccgaggaguucuaccagagcacgugcuccgccgucagcaagggcuaccucggcgcccugcgcaccgggugguacaccagcgugaucaccaucgagcuguccaacaucaaggagaucaagugcaacggcaccgacgccaaggugaagcucaucaagcaggagcuggacaaguacaagaacgcggucacggaccugcagcuccugaugcagagcaccccggccgccggcuccgggagcgcgaucgccuccggcaucgccgucugcaaggugcugcaccucgagggcgaggugaacaagaucaagaacgcccugcuguccaccaacaaggccgucgugagccucuccggcugcggggugagcguccugaccuucaaggugcuggaccucaagaacuacaucgacaagcagcugcugcccauccugaacaagcagagcugcuccauccccaacaucgagaccgucaucgaguuccagcagaagaacaaccgccuccuggagaucacgcgggaguucagcgugaacgcgggcgugaccacccccgucuccaccuacaugcugacgaacagcgagcuccugucccugaucaacgacaugccgaucaccaacgaccagaagaagcucaugagcaacaacgugcagaucgugcgccagcaguccuacagcaucaugugcaucaucaaggaggagguccuggccuacguggugcagcugccccucuacggggucaucgacacccccugcuggaagcugcacaccagcccccugugcacgaccaacaccaaggagggcuccaacaucugccucacccggacggaccgcgggugguacugcgacaacgccggcagcguguccuucuucccgcaggccgagaccugcaagguccagagcaaccggguguucugcgacaccaugaacucccugacccugcccagcgaggugaaccucugcaacaucgacaucuucaaccccaaguacgacugcaagaucaugacguccaagaccgacgucagcuccagcgugaucaccucccugggcgccaucgugagcugcuacgggaagaccaagugcacggcgagcaacaagugccgcggcaucaucaagaccuucuccaacgggugcgacuacgucagcaacaagggcguggacaccguguccgucggcaacacccuguacuacgugaacaagcaggagggccagagccucuacgugaagggggagcccaucaucaacuucuacgacccgcuggucuuccccuccgacgaguucgacgccagcaucucccaggugaacgagaagaucaaccagagccuggccuucauccggaaguccgacgagcuccugcacaacgugaacgucggcaagagcaccacgaacaucaugaucaccaccaucaucaucgugaucaucgugauccugcugcuccugaucgccgucgggcuguuccucuacugcaaggcccgcuccacccccgugacgcugagcaaggaccagcuguccgggaucaacaacaucgcguucagcaacugaggacuaguguccaccugucccuccugggcugcuggauugucucguuuuccugccaaauaaacaggaucagcgcuuuacagaucuaaaaaaaaaaaaaaaaaaaaaaaaaaaaaaaaaaaaaaaaaaaaaaaaaaaaaaaaaaaaaaaaugcaucccccccccccccccccccccccccccccccaaaggcucuuuucagagccaccagaauu

SEQ ID NO: 19308 - RNA, 1913 nt, Artificial Sequence
  mRNA product Design e-5 comprising derived and/or modified sequence from HRSV(Memphis-37)__AIY60640.1__F_DSCav1_mut8 (opt1)
gggagagcggcucggccauuuugucccagucaguccggaggcugcggcugcagaaguaccgccugcggaguaacugcaaagaagcuuaccauggagcugcccauccucaagaccaacgccaucaccacgauccuggccgcggugacccugugcuucgccagcucccagaacaucaccgaggaguucuaccagagcacgugcuccgccgucagcaagggcuaccucggggcccugcgcaccggcugguacaccuccgugaucaccaucgagcugagcaacaucaaggagaucaagugcaacgggaccgacgccaaggugaagcucaucaagcaggagcuggacaaguacaagaacgcggucacggaccugcagcuccugaugcaguccaccccggccgccggcagcggguccgccaucgcgagcggcaucgccgugugcaaggugcugcaccucgagggcgaggucaacaagaucaagaacgcccugcuguccaccaacaaggccguggugagccucuccgggugcggcgucagcgugcugaccuucaaggugcuggaccucaagaacuacaucgacaagcagcugcugcccauccucaacaagcaguccugcagcauccccaacaucgagacggucaucgaguuccagcagaagaacaaccggcugcuggagaucacccgcgaguucuccgugaacgccggggugaccacccccgucagcacguacaugcucaccaacuccgagcugcugagccucaucaacgacaugccgaucaccaacgaccagaagaagcugaugagcaacaacgugcagaucgugcggcagcaguccuacagcaucaugugcaucaucaaggaggagguccuggcguacguggugcagcucccccuguacggcgucaucgacacccccugcuggaagcugcacacgagcccccucugcaccaccaacaccaaggagggguccaacaucugccugacgcgcaccgaccggggcugguacugcgacaacgccggcuccgugagcuucuucccgcaggccgagaccugcaaggugcaguccaaccgcgucuucugcgacaccaugaacagccugacgcuccccuccgaggugaaccugugcaacaucgacaucuucaaccccaaguacgacugcaagaucaugaccagcaagaccgacgucuccagcuccgugaucaccagccugggggccaucguguccugcuacggcaagacgaagugcaccgccagcaacaagugccgggggaucaucaagaccuucuccaacggcugcgacuacgucagcaacaagggcguggacaccguguccgucgggaacacgcucuacuacgugaacaagcaggagggccagagccuguacgugaagggggagcccaucaucaacuucuacgacccgcuggucuuccccagcgacgaguucgacgcguccaucagccaggugaacgagaagaucaaccagucccucgccuucauccgcaagagcgacgagcugcugcacaacgugaacgucggcaaguccaccaccaacaucaugaucaccaccaucaucaucgugaucaucgugauccuccugcugcucaucgccgucgggcuguuccuguacugcaaggcccggagcacgcccgugacccuguccaaggaccagcucagcggcaucaacaacaucgccuucuccaacugaggacuaguguccaccugucccuccugggcugcuggauugucucguuuuccugccaaauaaacaggaucagcgcuuuacagaucuaaaaaaaaaaaaaaaaaaaaaaaaaaaaaaaaaaaaaaaaaaaaaaaaaaaaaaaaaaaaaaaaugcaucccccccccccccccccccccccccccccccaaaggcucuuuucagagccaccagaauu

SEQ ID NO: 19309 - RNA, 1913 nt, Artificial Sequence
  mRNA product Design e-5 comprising derived and/or modified sequence from HRSV(Memphis-37)__AIY60640.1__F_DSCav1_mut8 (opt2)
gggagagcggcucggccauuuugucccagucaguccggaggcugcggcugcagaaguaccgccugcggaguaacugcaaagaagcuuaccauggagcuccccauccucaagaccaacgccaucaccaccauccucgccgccgucacccucugcuucgccuccucccagaacaucaccgaggaguucuaccaguccaccugcuccgccgucuccaagggcuaccucggcgcccuccgcaccggcugguacaccuccgucaucaccaucgagcucuccaacaucaaggagaucaagugcaacggcaccgacgccaaggucaagcucaucaagcaggagcucgacaaguacaagaacgccgucaccgaccuccagcuccucaugcaguccacccccgccgccggcuccggcuccgccaucgccuccggcaucgccgucugcaagguccuccaccucgagggcgaggucaacaagaucaagaacgcccuccucuccaccaacaaggccgucgucucccucuccggcugcggcgucuccguccucaccuucaagguccucgaccucaagaacuacaucgacaagcagcuccuccccauccucaacaagcaguccugcuccauccccaacaucgagaccgucaucgaguuccagcagaagaacaaccgccuccucgagaucacccgcgaguucuccgucaacgccggcgucaccacccccgucuccaccuacaugcucaccaacuccgagcuccucucccucaucaacgacaugcccaucaccaacgaccagaagaagcucauguccaacaacguccagaucguccgccagcaguccuacuccaucaugugcaucaucaaggaggagguccucgccuacgucguccagcucccccucuacggcgucaucgacacccccugcuggaagcuccacaccuccccccucugcaccaccaacaccaaggagggcuccaacaucugccucacccgcaccgaccgcggcugguacugcgacaacgccggcuccgucuccuucuucccccaggccgagaccugcaagguccaguccaaccgcgucuucugcgacaccaugaacucccucacccuccccuccgaggucaaccucugcaacaucgacaucuucaaccccaaguacgacugcaagaucaugaccuccaagaccgacgucuccuccuccgucaucaccucccucggcgccaucgucuccugcuacggcaagaccaagugcaccgccuccaacaagugccgcggcaucaucaagaccuucuccaacggcugcgacuacgucuccaacaagggcgucgacaccgucuccgucggcaacacccucuacuacgucaacaagcaggagggccagucccucuacgucaagggcgagcccaucaucaacuucuacgacccccucgucuuccccuccgacgaguucgacgccuccaucucccaggucaacgagaagaucaaccagucccucgccuucauccgcaaguccgacgagcuccuccacaacgucaacgucggcaaguccaccaccaacaucaugaucaccaccaucaucaucgucaucaucgucauccuccuccuccucaucgccgucggccucuuccucuacugcaaggcccgcuccacccccgucacccucuccaaggaccagcucuccggcaucaacaacaucgccuucuccaacugaggacuaguguccaccugucccuccugggcugcuggauugucucguuuuccugccaaauaaacaggaucagcgcuuuacagaucuaaaaaaaaaaaaaaaaaaaaaaaaaaaaaaaaaaaaaaaaaaaaaaaaaaaaaaaaaaaaaaaaugcaucccccccccccccccccccccccccccccccaaaggcucuuuucagagccaccagaauu

SEQ ID NO: 19310 - RNA, 1913 nt, Artificial Sequence
  mRNA product Design e-5 comprising derived and/or modified sequence from HRSV(Memphis-37)__AIY60640.1__F_DSCav1_mut8 (opt3)
gggagagcggcucggccauuuugucccagucaguccggaggcugcggcugcagaaguaccgccugcggaguaacugcaaagaagcuuaccauggagcugcccauccucaagaccaacgccauuacaacuauacuugcugcagugacgcugugcuucgccagcucccagaauaucaccgaagaguuuuaccaaucuacauguucagcggucaguaaaggcuauuugggggcuuuaagaacuggaugguacaccagcguuauuacaaucgaacuguccaacauuaaggagaucaaaugcaaugguaccgacgccaaggugaaacuaauaaagcaggaacucgauaaguauaaaaacgcaguaacugaccugcagcuucugaugcagucuacuccugccgcuggcucggggucagcaaucgccagcggaauugcuguguguaaggucuugcaccucgagggcgaggugaauaaaaucaagaacgcccugcugaguaccaauaaagcgguugugucccucucugguugcggggucagcguguuaacguucaagguacuggaucuuaagaacuacauugacaaacaauugcugccaauccuaaauaagcaguccuguucaauaccgaacauugaaacuguuaucgaguuucagcagaaaaauaacaggcuccuggaaauuacccgggaguucagugugaaugcaggagucacaacucccgugagcaccuauaugcuuacaaacucugagcuguugucccucaucaaugauaugccuaucaccaacgaccaaaagaaacugaugucaaacaaugugcagauuguccgccagcagagcuacaguauaaugugcaucauuaaggaagagguuuuagccuaugugguacaacugccacucuacggcgugaucgauacgcccuguuggaaacuucauacuucuccucugugcacaaccaacacuaaggaaggcuccaauauauguuugacacgaaccgaccgugggugguacugcgauaacgcuggaagcgucucguuuuucccacaggccgagacguguaaggugcagucuaauagaguuuucugcgacaccaugaacucccuaacacugcccucagaagugaaucucugcaacauugauaucuucaauccuaaauaugacuguaagaucaugacaaguaaaaccgaugucagcuccucugugauuacaagccugggugcaaucguaucaugcuacggcaagacuaaauguaccgcuaguaacaagugcagggggauuauaaagacauuuuccaauggaugugacuauguuagcaacaaaggcguggacaccgucucuguggguaauacucuuuacuaugucaacaagcaagaggggcagucacuguacgugaaaggagagccaaucauuaauuucuaugauccguugguuuuucccagugacgaauuugaugccagcaucucccaggugaacgagaagaucaaccagucucucgcguuuauucggaaaucggacgaacuguuacacaauguaaacgucggcaagagcacgacaaauauaaugaucaccacuauuaucauugugaucauaguuauccugcuacuccugauugccgugggccuuuucuuguacugcaaggcacgcuccaccccugucacacugucaaaagaucaacucagugggaucaacaauauugcuuucucuaacugaggacuaguguccaccugucccuccugggcugcuggauugucucguuuuccugccaaauaaacaggaucagcgcuuuacagaucuaaaaaaaaaaaaaaaaaaaaaaaaaaaaaaaaaaaaaaaaaaaaaaaaaaaaaaaaaaaaaaaaugcaucccccccccccccccccccccccccccccccaaaggcucuuuucagagccaccagaauu

SEQ ID NO: 19311 - RNA, 1913 nt, Artificial Sequence
  mRNA product Design e-5 comprising derived and/or modified sequence from HRSV(Memphis-37)__AIY60640.1__F_DSCav1_mut8 (opt4)
gggagagcggcucggccauuuugucccagucaguccggaggcugcggcugcagaaguaccgccugcggaguaacugcaaagaagcuuaccauggagcugcccauccugaagaccaacgccaucaccaccauccuggccgccgugacccugugcuucgccagcagccagaacaucaccgaggaguucuaccagagcaccugcagcgccgugagcaagggcuaccugggcgcccugagaaccggcugguacaccagcgugaucaccaucgagcugagcaacaucaaggagaucaagugcaacggcaccgacgccaaggugaagcugaucaagcaggagcuggacaaguacaagaacgccgugaccgaccugcagcugcugaugcagagcacccccgccgccggcagcggcagcgccaucgccagcggcaucgccgugugcaaggugcugcaccuggagggcgaggugaacaagaucaagaacgcccugcugagcaccaacaaggccguggugagccugagcggcugcggcgugagcgugcugaccuucaaggugcuggaccugaagaacuacaucgacaagcagcugcugcccauccugaacaagcagagcugcagcauccccaacaucgagaccgugaucgaguuccagcagaagaacaacagacugcuggagaucaccagagaguucagcgugaacgccggcgugaccacccccgugagcaccuacaugcugaccaacagcgagcugcugagccugaucaacgacaugcccaucaccaacgaccagaagaagcugaugagcaacaacgugcagaucgugagacagcagagcuacagcaucaugugcaucaucaaggaggaggugcuggccuacguggugcagcugccccuguacggcgugaucgacacccccugcuggaagcugcacaccagcccccugugcaccaccaacaccaaggagggcagcaacaucugccugaccagaaccgacagaggcugguacugcgacaacgccggcagcgugagcuucuucccccaggccgagaccugcaaggugcagagcaacagaguguucugcgacaccaugaacagccugacccugcccagcgaggugaaccugugcaacaucgacaucuucaaccccaaguacgacugcaagaucaugaccagcaagaccgacgugagcagcagcgugaucaccagccugggcgccaucgugagcugcuacggcaagaccaagugcaccgccagcaacaagugcagaggcaucaucaagaccuucagcaacggcugcgacuacgugagcaacaagggcguggacaccgugagcgugggcaacacccuguacuacgugaacaagcaggagggccagagccuguacgugaagggcgagcccaucaucaacuucuacgacccccugguguuccccagcgacgaguucgacgccagcaucagccaggugaacgagaagaucaaccagagccuggccuucaucagaaagagcgacgagcugcugcacaacgugaacgugggcaagagcaccaccaacaucaugaucaccaccaucaucaucgugaucaucgugauccugcugcugcugaucgccgugggccuguuccuguacugcaaggccagaagcacccccgugacccugagcaaggaccagcugagcggcaucaacaacaucgccuucagcaacugaggacuaguguccaccugucccuccugggcugcuggauugucucguuuuccugccaaauaaacaggaucagcgcuuuacagaucuaaaaaaaaaaaaaaaaaaaaaaaaaaaaaaaaaaaaaaaaaaaaaaaaaaaaaaaaaaaaaaaaugcaucccccccccccccccccccccccccccccccaaaggcucuuuucagagccaccagaauu

SEQ ID NO: 19312 - RNA, 1913 nt, Artificial Sequence
  mRNA product Design e-5 comprising derived and/or modified sequence from HRSV(Memphis-37)__AIY60640.1__F_DSCav1_mut8 (opt5)
gggagagcggcucggccauuuugucccagucaguccggaggcugcggcugcagaaguaccgccugcggaguaacugcaaagaagcuuaccauggagcugcccauccucaagaccaacgccauuacaacgauccuggcugccgugacccuuugcuucgcgagcucccagaauauuacagaagaguuuuaccaaucuaccuguagcgcugucuccaaaggcuaucugggggcccucagaacaggaugguacaccucuguuaucacaauugaacugagcaacaucaaggagaucaaaugcaauggcaccgacgccaaggugaaacuuauuaagcaggaacuggauaaguauaaaaacgcugugacggaccuccagcugcugaugcaguccaccccugccgcugggucuggaagcgccaucgcguccggcauugccgucuguaaggugcuccaccuggagggggagguuaauaaaaucaagaacgcccuucugagcacaaauaaagcuguggucucucucuccggaugcggcgugagcguucugaccuucaaggugcuugaucugaagaacuacauugacaaacaacuccugccgauccugaauaagcagucuuguuccauucccaacaucgaaacagucaucgaguuucagcagaaaaauaaccggcuccuggaaauuacccgcgaguucagcgugaaugcuggcgugacgacaccugucucuaccuauaugcuuacaaacuccgagcugcucagccugaucaaugauaugcccauuaccaacgaccaaaagaaacuuauguccaacaauguucagaucgugagacagcagucuuacagcauuaugugcaucaucaaggaagaggugcuggccuaugucgugcaacucccucuguacgggguuauugauacccccuguuggaaacugcauacauccccucucugcacgaccaacacaaaggaaggaagcaauaucugucugacccggacagaccgcggcugguacugcgauaacgcggggucuguguccuuuuucccgcaggccgagaccuguaagguccagagcaauagaguguuuugcgacacgaugaacucucuuacacugcccagcgaaguuaaucucugcaacauugauaucuucaauccuaaauaugacuguaagauuaugaccuccaaaaccgaugugucuagcuccgucaucacaagccugggagcuaucgugucuugcuacggcaagaccaaauguacagccuccaacaagugccgggggauuaucaagacguuuagcaauggaugugacuaugucucuaacaaaggcguggacaccguuuccgugggcaauacacuuuacuaugucaacaagcaagaggggcagagccuguacgugaaaggagagcccauuaucaauuucuaugauccucucguuuuucccuccgacgaguucgaugcuucuauuagccaggugaacgaaaagaucaaccagucccuggccuuuauucgcaaaucugacgaacugcuccacaaugucaacgugggcaagagcaccacaaauaucaugaucaccacgauuaucauugugaucauuguuauccugcuucugcucaucgccgucgggcuguuccuguacugcaaggcuagauccaccccggugacacuuagcaaagaucaacucucuggaauuaacaauaucgcguucuccaacugaggacuaguguccaccugucccuccugggcugcuggauugucucguuuuccugccaaauaaacaggaucagcgcuuuacagaucuaaaaaaaaaaaaaaaaaaaaaaaaaaaaaaaaaaaaaaaaaaaaaaaaaaaaaaaaaaaaaaaaugcaucccccccccccccccccccccccccccccccaaaggcucuuuucagagccaccagaauu

SEQ ID NO: 19313 - RNA, 1913 nt, Artificial Sequence
  mRNA product Design e-5 comprising derived and/or modified sequence from HRSV(Memphis-37)__AIY60640.1__F_DSCav1_mut8 (opt6)
gggagagcggcucggccauuuugucccagucaguccggaggcugcggcugcagaaguaccgccugcggaguaacugcaaagaagcuuaccauggaacuuccuauuuuaaaaacaaacgcaauuacaaccauauuagcagcaguaacacuaugcuuugcaucaucacaaaacaucaccgaagaauuuuaucaauccacaugcucagcaguaucaaaaggauaccuuggcgcacuccgaacaggcugguauacaucggucauaacuauagaacucuccaacauaaaagaaauaaaaugcaaugguacugacgcaaaaguaaaauuaauaaaacaagaacuagacaaauacaaaaacgcaguaaccgauuuacaacuacuuaugcaaucaacaccugcagcaggaagcggaucagcaauagcaaguggaauagcaguaugcaaaguacuucaccucgaaggagaaguaaauaaaauaaaaaacgccuuacuaucaacaaauaaagccgucguaucacuuuccgguugcggcguaucaguauuaaccuuuaaagucuuagacuuaaaaaacuacauagacaaacaauuauuaccaauacuaaacaaacaauccuguuccauacccaacauagaaaccguaauagaauuucaacaaaaaaacaacagacuauuagaaauaacacgcgaauuuucaguaaacgcaggcguaacaacaccaguaucaacauauauguuaaccaauucagaauuauuaucccuuauaaaugacaugccuauaacaaacgaccaaaaaaaauuaaugaguaacaacguucaaauaguaagacaacaaucauacagcauaaugugcauaauaaaagaagaaguacuagcauacguaguucaacuaccacucuauggcguuaucgacaccccaugcuggaaacuacauaccucaccacucuguaccacuaauacgaaagaaggaucuaacauaugccuaaccagaacagaucgagguugguauugcgacaaugcuggaucaguaucauucuucccacaagcagaaaccugcaaaguacaaagcaacagaguauuuugugacacuaugaacucacuaacgcuaccuucagaaguaaaccuaugcaacaucgacauauucaacccaaaauacgauugcaaaauaaugacaucaaaaacagacguuuccucaucaguaauaacaucauuaggagcaauaguauccugcuacgguaaaaccaaaugcacagcauccaauaaaugccgaggaaucauuaaaacauuuucaaauggcugcgacuauguaaguaauaaagguguagauacaguaucaguaggcaacacacuauauuacguaaacaaacaagaagggcaaucccuauaugucaaaggcgaaccaauuauaaacuucuacgacccccucguauucccaucagacgaauuugacgcaucaauaucccaaguaaacgaaaaaaucaaccaaucacucgcauucauacguaaauccgacgaauuacuacauaacguaaacguaggcaaaucaacaacaaauauaaugauaacaaccauaaucauaguaauaauaguuauacuccuacuacucauugcagucggccuauuucuauacuguaaagcacgcucuacaccaguaacacuaucuaaagaucaauuauccggaauaaacaacauugccuucuccaauuaaggacuaguguccaccugucccuccugggcugcuggauugucucguuuuccugccaaauaaacaggaucagcgcuuuacagaucuaaaaaaaaaaaaaaaaaaaaaaaaaaaaaaaaaaaaaaaaaaaaaaaaaaaaaaaaaaaaaaaaugcaucccccccccccccccccccccccccccccccaaaggcucuuuucagagccaccagaauu

SEQ ID NO: 19314 - RNA, 1913 nt, Artificial Sequence
  mRNA product Design e-5 comprising derived and/or modified sequence from HRSV(Memphis-37)__AIY60640.1__F_DSCav1_mut8 (opt11)
gggagagcggcucggccauuuugucccagucaguccggaggcugcggcugcagaaguaccgccugcggaguaacugcaaagaagcuuaccauggaacuucccauccugaagaccaacgcuaucacaaccauccucgccgcagucacccuuugcuucgccucaucccaaaacaucaccgaagaauuuuaccagucaaccugcucggccgucuccaagggcuaccucggcgcccuccgcacuggcugguacacauccgucaucaccaucgaacucuccaacauaaaagaaauaaaaugcaacggaaccgacgccaaagucaaacucaucaaacaagaacuagauaaauauaaaaacgccgucaccgaccugcaacuccucaugcaauccaccccagccgccggcucuggcagcgccaucgcaagcggaaucgccgucugcaaaguccuccaccuagaaggcgaagucaacaaaauuaaaaacgcccuccucuccaccaacaaagcaguugucucccucucuggcugcggagucucuguacucaccuucaaaguacuagaccucaagaauuacauagacaaacaacuccugcccauccuuaacaaacaaaguuguaguauccccaacaucgaaacaguaaucgaauuucagcagaaaaacaaccgccuccucgaaaucacacgagaguucucggucaacgccggcgucaccacccccguaucaaccuacaugcuaacaaacuccgaacuacuuucccucaucaaugacaugcccauaaccaacgaccaaaagaaacuaauguccaauaacguccagauaguccgucaacaguccuacucaaucaugugcauaauuaaagaagaaguacucgccuacgucguccaacuaccccucuauggagucaucgacacccccugcuggaaacuccacacaucaccccuaugcacaaccaacaccaaagaaggcuccaacaucugccucacaagaaccgaccgcggcugguacugcgacaacgcuggcuccgucucguucuucccacaagccgaaaccugcaaaguccaaucaaaccgggucuucugcgacaccaugaacucccucacucucccaagcgaagucaaccuaugcaacaucgacaucuucaacccaaaauacgacuguaaaaucaugacuucgaaaacagacgucuccucaucaguaaucacauccuuaggcgccaucguguccugcuacgguaagaccaaaugcacagccuccaacaaaugccggggcaucaucaaaaccuucagcaacgguugugauuacgucuccaacaaaggaguagacaccgucuccguaggaaacacccucuacuacgucaacaagcaagaaggccaaucccucuacgucaaaggggaacccaucaucaacuucuacgacccacucgucuuccccuccgacgaguucgacgcaagcaucucccaagucaacgaaaagaucaaccaaucacuagccuucauccgcaaauccgacgaacuccuccacaacguuaacguaggcaaauccaccaccaacaucaugaucacaaccaucaucauagucauaauagucauccuacuacuccucaucgccguaggucuauuccuauacuguaaagcucgaucaacccccgucacacucuccaaagaucaacucucaggaaucaacaacaucgccuucuccaacuaaggacuaguguccaccugucccuccugggcugcuggauugucucguuuuccugccaaauaaacaggaucagcgcuuuacagaucuaaaaaaaaaaaaaaaaaaaaaaaaaaaaaaaaaaaaaaaaaaaaaaaaaaaaaaaaaaaaaaaaugcaucccccccccccccccccccccccccccccccaaaggcucuuuucagagccaccagaauu

SEQ ID NO: 19315 - RNA, 1980 nt, Artificial Sequence
  mRNA product Design e-6 comprising derived and/or modified sequence from HRSV(Memphis-37)__AIY60640.1__F_DSCav1_mut8 (opt1)
gggagagcggcucggccauuuugucccagucaguccggaggcugcggcugcagaaguaccgccugcggaguaacugcaaagaagcuuaccauggagcugcccauccucaagaccaacgccaucaccacgauccuggccgcggugacccugugcuucgccagcucccagaacaucaccgaggaguucuaccagagcacgugcuccgccgucagcaagggcuaccucggcgcccugcgcaccgggugguacaccagcgugaucaccaucgagcuguccaacaucaaggagaucaagugcaacggcaccgacgccaaggugaagcucaucaagcaggagcuggacaaguacaagaacgcggucacggaccugcagcuccugaugcagagcaccccggccgccggcuccgggagcgcgaucgccuccggcaucgccgucugcaaggugcugcaccucgagggcgaggugaacaagaucaagaacgcccugcuguccaccaacaaggccgucgugagccucuccggcugcggggugagcguccugaccuucaaggugcuggaccucaagaacuacaucgacaagcagcugcugcccauccugaacaagcagagcugcuccauccccaacaucgagaccgucaucgaguuccagcagaagaacaaccgccuccuggagaucacgcgggaguucagcgugaacgcgggcgugaccacccccgucuccaccuacaugcugacgaacagcgagcuccugucccugaucaacgacaugccgaucaccaacgaccagaagaagcucaugagcaacaacgugcagaucgugcgccagcaguccuacagcaucaugugcaucaucaaggaggagguccuggccuacguggugcagcugccccucuacggggucaucgacacccccugcuggaagcugcacaccagcccccugugcacgaccaacaccaaggagggcuccaacaucugccucacccggacggaccgcgggugguacugcgacaacgccggcagcguguccuucuucccgcaggccgagaccugcaagguccagagcaaccggguguucugcgacaccaugaacucccugacccugcccagcgaggugaaccucugcaacaucgacaucuucaaccccaaguacgacugcaagaucaugacguccaagaccgacgucagcuccagcgugaucaccucccugggcgccaucgugagcugcuacgggaagaccaagugcacggcgagcaacaagugccgcggcaucaucaagaccuucuccaacgggugcgacuacgucagcaacaagggcguggacaccguguccgucggcaacacccuguacuacgugaacaagcaggagggccagagccucuacgugaagggggagcccaucaucaacuucuacgacccgcuggucuuccccuccgacgaguucgacgccagcaucucccaggugaacgagaagaucaaccagagccuggccuucauccggaaguccgacgagcuccugcacaacgugaacgucggcaagagcaccacgaacaucaugaucaccaccaucaucaucgugaucaucgugauccugcugcuccugaucgccgucgggcuguuccucuacugcaaggcccgcuccacccccgugacgcugagcaaggaccagcuguccgggaucaacaacaucgcguucagcaacugaggacuaguacuggcugcaucucccuuuccucuguccuccauccuucucccaggauggugaagggggaccugguacccagugauccccaccccaggauccuaaaucaugacuuaccugcuaauaaaaacucauuggaaaagugagaagaucuaaaaaaaaaaaaaaaaaaaaaaaaaaaaaaaaaaaaaaaaaaaaaaaaaaaaaaaaaaaaaaaaugcaucccccccccccccccccccccccccccccccaaaggcucuuuucagagccaccagaauu

SEQ ID NO: 19316 - RNA, 1980 nt, Artificial Sequence
  mRNA product Design e-6 comprising derived and/or modified sequence from HRSV(Memphis-37)__AIY60640.1__F_DSCav1_mut8 (opt1)
gggagagcggcucggccauuuugucccagucaguccggaggcugcggcugcagaaguaccgccugcggaguaacugcaaagaagcuuaccauggagcugcccauccucaagaccaacgccaucaccacgauccuggccgcggugacccugugcuucgccagcucccagaacaucaccgaggaguucuaccagagcacgugcuccgccgucagcaagggcuaccucggggcccugcgcaccggcugguacaccuccgugaucaccaucgagcugagcaacaucaaggagaucaagugcaacgggaccgacgccaaggugaagcucaucaagcaggagcuggacaaguacaagaacgcggucacggaccugcagcuccugaugcaguccaccccggccgccggcagcggguccgccaucgcgagcggcaucgccgugugcaaggugcugcaccucgagggcgaggucaacaagaucaagaacgcccugcuguccaccaacaaggccguggugagccucuccgggugcggcgucagcgugcugaccuucaaggugcuggaccucaagaacuacaucgacaagcagcugcugcccauccucaacaagcaguccugcagcauccccaacaucgagacggucaucgaguuccagcagaagaacaaccggcugcuggagaucacccgcgaguucuccgugaacgccggggugaccacccccgucagcacguacaugcucaccaacuccgagcugcugagccucaucaacgacaugccgaucaccaacgaccagaagaagcugaugagcaacaacgugcagaucgugcggcagcaguccuacagcaucaugugcaucaucaaggaggagguccuggcguacguggugcagcucccccuguacggcgucaucgacacccccugcuggaagcugcacacgagcccccucugcaccaccaacaccaaggagggguccaacaucugccugacgcgcaccgaccggggcugguacugcgacaacgccggcuccgugagcuucuucccgcaggccgagaccugcaaggugcaguccaaccgcgucuucugcgacaccaugaacagccugacgcuccccuccgaggugaaccugugcaacaucgacaucuucaaccccaaguacgacugcaagaucaugaccagcaagaccgacgucuccagcuccgugaucaccagccugggggccaucguguccugcuacggcaagacgaagugcaccgccagcaacaagugccgggggaucaucaagaccuucuccaacggcugcgacuacgucagcaacaagggcguggacaccguguccgucgggaacacgcucuacuacgugaacaagcaggagggccagagccuguacgugaagggggagcccaucaucaacuucuacgacccgcuggucuuccccagcgacgaguucgacgcguccaucagccaggugaacgagaagaucaaccagucccucgccuucauccgcaagagcgacgagcugcugcacaacgugaacgucggcaaguccaccaccaacaucaugaucaccaccaucaucaucgugaucaucgugauccuccugcugcucaucgccgucgggcuguuccuguacugcaaggcccggagcacgcccgugacccuguccaaggaccagcucagcggcaucaacaacaucgccuucuccaacugaggacuaguacuggcugcaucucccuuuccucuguccuccauccuucucccaggauggugaagggggaccugguacccagugauccccaccccaggauccuaaaucaugacuuaccugcuaauaaaaacucauuggaaaagugagaagaucuaaaaaaaaaaaaaaaaaaaaaaaaaaaaaaaaaaaaaaaaaaaaaaaaaaaaaaaaaaaaaaaaugcaucccccccccccccccccccccccccccccccaaaggcucuuuucagagccaccagaauu

SEQ ID NO: 19317 - RNA, 1980 nt, Artificial Sequence
  mRNA product Design e-6 comprising derived and/or modified sequence from HRSV(Memphis-37)__AIY60640.1__F_DSCav1_mut8 (opt2)
gggagagcggcucggccauuuugucccagucaguccggaggcugcggcugcagaaguaccgccugcggaguaacugcaaagaagcuuaccauggagcuccccauccucaagaccaacgccaucaccaccauccucgccgccgucacccucugcuucgccuccucccagaacaucaccgaggaguucuaccaguccaccugcuccgccgucuccaagggcuaccucggcgcccuccgcaccggcugguacaccuccgucaucaccaucgagcucuccaacaucaaggagaucaagugcaacggcaccgacgccaaggucaagcucaucaagcaggagcucgacaaguacaagaacgccgucaccgaccuccagcuccucaugcaguccacccccgccgccggcuccggcuccgccaucgccuccggcaucgccgucugcaagguccuccaccucgagggcgaggucaacaagaucaagaacgcccuccucuccaccaacaaggccgucgucucccucuccggcugcggcgucuccguccucaccuucaagguccucgaccucaagaacuacaucgacaagcagcuccuccccauccucaacaagcaguccugcuccauccccaacaucgagaccgucaucgaguuccagcagaagaacaaccgccuccucgagaucacccgcgaguucuccgucaacgccggcgucaccacccccgucuccaccuacaugcucaccaacuccgagcuccucucccucaucaacgacaugcccaucaccaacgaccagaagaagcucauguccaacaacguccagaucguccgccagcaguccuacuccaucaugugcaucaucaaggaggagguccucgccuacgucguccagcucccccucuacggcgucaucgacacccccugcuggaagcuccacaccuccccccucugcaccaccaacaccaaggagggcuccaacaucugccucacccgcaccgaccgcggcugguacugcgacaacgccggcuccgucuccuucuucccccaggccgagaccugcaagguccaguccaaccgcgucuucugcgacaccaugaacucccucacccuccccuccgaggucaaccucugcaacaucgacaucuucaaccccaaguacgacugcaagaucaugaccuccaagaccgacgucuccuccuccgucaucaccucccucggcgccaucgucuccugcuacggcaagaccaagugcaccgccuccaacaagugccgcggcaucaucaagaccuucuccaacggcugcgacuacgucuccaacaagggcgucgacaccgucuccgucggcaacacccucuacuacgucaacaagcaggagggccagucccucuacgucaagggcgagcccaucaucaacuucuacgacccccucgucuuccccuccgacgaguucgacgccuccaucucccaggucaacgagaagaucaaccagucccucgccuucauccgcaaguccgacgagcuccuccacaacgucaacgucggcaaguccaccaccaacaucaugaucaccaccaucaucaucgucaucaucgucauccuccuccuccucaucgccgucggccucuuccucuacugcaaggcccgcuccacccccgucacccucuccaaggaccagcucuccggcaucaacaacaucgccuucuccaacugaggacuaguacuggcugcaucucccuuuccucuguccuccauccuucucccaggauggugaagggggaccugguacccagugauccccaccccaggauccuaaaucaugacuuaccugcuaauaaaaacucauuggaaaagugagaagaucuaaaaaaaaaaaaaaaaaaaaaaaaaaaaaaaaaaaaaaaaaaaaaaaaaaaaaaaaaaaaaaaaugcaucccccccccccccccccccccccccccccccaaaggcucuuuucagagccaccagaauu

SEQ ID NO: 19318 - RNA, 1980 nt, Artificial Sequence
  mRNA product Design e-6 comprising derived and/or modified sequence from HRSV(Memphis-37)__AIY60640.1__F_DSCav1_mut8 (opt3)
gggagagcggcucggccauuuugucccagucaguccggaggcugcggcugcagaaguaccgccugcggaguaacugcaaagaagcuuaccauggagcugcccauccucaagaccaacgccauuacaacuauacuugcugcagugacgcugugcuucgccagcucccagaauaucaccgaagaguuuuaccaaucuacauguucagcggucaguaaaggcuauuugggggcuuuaagaacuggaugguacaccagcguuauuacaaucgaacuguccaacauuaaggagaucaaaugcaaugguaccgacgccaaggugaaacuaauaaagcaggaacucgauaaguauaaaaacgcaguaacugaccugcagcuucugaugcagucuacuccugccgcuggcucggggucagcaaucgccagcggaauugcuguguguaaggucuugcaccucgagggcgaggugaauaaaaucaagaacgcccugcugaguaccaauaaagcgguugugucccucucugguugcggggucagcguguuaacguucaagguacuggaucuuaagaacuacauugacaaacaauugcugccaauccuaaauaagcaguccuguucaauaccgaacauugaaacuguuaucgaguuucagcagaaaaauaacaggcuccuggaaauuacccgggaguucagugugaaugcaggagucacaacucccgugagcaccuauaugcuuacaaacucugagcuguugucccucaucaaugauaugccuaucaccaacgaccaaaagaaacugaugucaaacaaugugcagauuguccgccagcagagcuacaguauaaugugcaucauuaaggaagagguuuuagccuaugugguacaacugccacucuacggcgugaucgauacgcccuguuggaaacuucauacuucuccucugugcacaaccaacacuaaggaaggcuccaauauauguuugacacgaaccgaccgugggugguacugcgauaacgcuggaagcgucucguuuuucccacaggccgagacguguaaggugcagucuaauagaguuuucugcgacaccaugaacucccuaacacugcccucagaagugaaucucugcaacauugauaucuucaauccuaaauaugacuguaagaucaugacaaguaaaaccgaugucagcuccucugugauuacaagccugggugcaaucguaucaugcuacggcaagacuaaauguaccgcuaguaacaagugcagggggauuauaaagacauuuuccaauggaugugacuauguuagcaacaaaggcguggacaccgucucuguggguaauacucuuuacuaugucaacaagcaagaggggcagucacuguacgugaaaggagagccaaucauuaauuucuaugauccguugguuuuucccagugacgaauuugaugccagcaucucccaggugaacgagaagaucaaccagucucucgcguuuauucggaaaucggacgaacuguuacacaauguaaacgucggcaagagcacgacaaauauaaugaucaccacuauuaucauugugaucauaguuauccugcuacuccugauugccgugggccuuuucuuguacugcaaggcacgcuccaccccugucacacugucaaaagaucaacucagugggaucaacaauauugcuuucucuaacugaggacuaguacuggcugcaucucccuuuccucuguccuccauccuucucccaggauggugaagggggaccugguacccagugauccccaccccaggauccuaaaucaugacuuaccugcuaauaaaaacucauuggaaaagugagaagaucuaaaaaaaaaaaaaaaaaaaaaaaaaaaaaaaaaaaaaaaaaaaaaaaaaaaaaaaaaaaaaaaaugcaucccccccccccccccccccccccccccccccaaaggcucuuuucagagccaccagaauu

SEQ ID NO: 19319 - RNA, 1980 nt, Artificial Sequence
  mRNA product Design e-6 comprising derived and/or modified sequence from HRSV(Memphis-37)__AIY60640.1__F_DSCav1_mut8 (opt4)
gggagagcggcucggccauuuugucccagucaguccggaggcugcggcugcagaaguaccgccugcggaguaacugcaaagaagcuuaccauggagcugcccauccugaagaccaacgccaucaccaccauccuggccgccgugacccugugcuucgccagcagccagaacaucaccgaggaguucuaccagagcaccugcagcgccgugagcaagggcuaccugggcgcccugagaaccggcugguacaccagcgugaucaccaucgagcugagcaacaucaaggagaucaagugcaacggcaccgacgccaaggugaagcugaucaagcaggagcuggacaaguacaagaacgccgugaccgaccugcagcugcugaugcagagcacccccgccgccggcagcggcagcgccaucgccagcggcaucgccgugugcaaggugcugcaccuggagggcgaggugaacaagaucaagaacgcccugcugagcaccaacaaggccguggugagccugagcggcugcggcgugagcgugcugaccuucaaggugcuggaccugaagaacuacaucgacaagcagcugcugcccauccugaacaagcagagcugcagcauccccaacaucgagaccgugaucgaguuccagcagaagaacaacagacugcuggagaucaccagagaguucagcgugaacgccggcgugaccacccccgugagcaccuacaugcugaccaacagcgagcugcugagccugaucaacgacaugcccaucaccaacgaccagaagaagcugaugagcaacaacgugcagaucgugagacagcagagcuacagcaucaugugcaucaucaaggaggaggugcuggccuacguggugcagcugccccuguacggcgugaucgacacccccugcuggaagcugcacaccagcccccugugcaccaccaacaccaaggagggcagcaacaucugccugaccagaaccgacagaggcugguacugcgacaacgccggcagcgugagcuucuucccccaggccgagaccugcaaggugcagagcaacagaguguucugcgacaccaugaacagccugacccugcccagcgaggugaaccugugcaacaucgacaucuucaaccccaaguacgacugcaagaucaugaccagcaagaccgacgugagcagcagcgugaucaccagccugggcgccaucgugagcugcuacggcaagaccaagugcaccgccagcaacaagugcagaggcaucaucaagaccuucagcaacggcugcgacuacgugagcaacaagggcguggacaccgugagcgugggcaacacccuguacuacgugaacaagcaggagggccagagccuguacgugaagggcgagcccaucaucaacuucuacgacccccugguguuccccagcgacgaguucgacgccagcaucagccaggugaacgagaagaucaaccagagccuggccuucaucagaaagagcgacgagcugcugcacaacgugaacgugggcaagagcaccaccaacaucaugaucaccaccaucaucaucgugaucaucgugauccugcugcugcugaucgccgugggccuguuccuguacugcaaggccagaagcacccccgugacccugagcaaggaccagcugagcggcaucaacaacaucgccuucagcaacugaggacuaguacuggcugcaucucccuuuccucuguccuccauccuucucccaggauggugaagggggaccugguacccagugauccccaccccaggauccuaaaucaugacuuaccugcuaauaaaaacucauuggaaaagugagaagaucuaaaaaaaaaaaaaaaaaaaaaaaaaaaaaaaaaaaaaaaaaaaaaaaaaaaaaaaaaaaaaaaaugcaucccccccccccccccccccccccccccccccaaaggcucuuuucagagccaccagaauu

SEQ ID NO: 19320 - RNA, 1980 nt, Artificial Sequence
  mRNA product Design e-6 comprising derived and/or modified sequence from HRSV(Memphis-37)__AIY60640.1__F_DSCav1_mut8 (opt5)
gggagagcggcucggccauuuugucccagucaguccggaggcugcggcugcagaaguaccgccugcggaguaacugcaaagaagcuuaccauggagcugcccauccucaagaccaacgccauuacaacgauccuggcugccgugacccuuugcuucgcgagcucccagaauauuacagaagaguuuuaccaaucuaccuguagcgcugucuccaaaggcuaucugggggcccucagaacaggaugguacaccucuguuaucacaauugaacugagcaacaucaaggagaucaaaugcaauggcaccgacgccaaggugaaacuuauuaagcaggaacuggauaaguauaaaaacgcugugacggaccuccagcugcugaugcaguccaccccugccgcugggucuggaagcgccaucgcguccggcauugccgucuguaaggugcuccaccuggagggggagguuaauaaaaucaagaacgcccuucugagcacaaauaaagcuguggucucucucuccggaugcggcgugagcguucugaccuucaaggugcuugaucugaagaacuacauugacaaacaacuccugccgauccugaauaagcagucuuguuccauucccaacaucgaaacagucaucgaguuucagcagaaaaauaaccggcuccuggaaauuacccgcgaguucagcgugaaugcuggcgugacgacaccugucucuaccuauaugcuuacaaacuccgagcugcucagccugaucaaugauaugcccauuaccaacgaccaaaagaaacuuauguccaacaauguucagaucgugagacagcagucuuacagcauuaugugcaucaucaaggaagaggugcuggccuaugucgugcaacucccucuguacgggguuauugauacccccuguuggaaacugcauacauccccucucugcacgaccaacacaaaggaaggaagcaauaucugucugacccggacagaccgcggcugguacugcgauaacgcggggucuguguccuuuuucccgcaggccgagaccuguaagguccagagcaauagaguguuuugcgacacgaugaacucucuuacacugcccagcgaaguuaaucucugcaacauugauaucuucaauccuaaauaugacuguaagauuaugaccuccaaaaccgaugugucuagcuccgucaucacaagccugggagcuaucgugucuugcuacggcaagaccaaauguacagccuccaacaagugccgggggauuaucaagacguuuagcaauggaugugacuaugucucuaacaaaggcguggacaccguuuccgugggcaauacacuuuacuaugucaacaagcaagaggggcagagccuguacgugaaaggagagcccauuaucaauuucuaugauccucucguuuuucccuccgacgaguucgaugcuucuauuagccaggugaacgaaaagaucaaccagucccuggccuuuauucgcaaaucugacgaacugcuccacaaugucaacgugggcaagagcaccacaaauaucaugaucaccacgauuaucauugugaucauuguuauccugcuucugcucaucgccgucgggcuguuccuguacugcaaggcuagauccaccccggugacacuuagcaaagaucaacucucuggaauuaacaauaucgcguucuccaacugaggacuaguacuggcugcaucucccuuuccucuguccuccauccuucucccaggauggugaagggggaccugguacccagugauccccaccccaggauccuaaaucaugacuuaccugcuaauaaaaacucauuggaaaagugagaagaucuaaaaaaaaaaaaaaaaaaaaaaaaaaaaaaaaaaaaaaaaaaaaaaaaaaaaaaaaaaaaaaaaugcaucccccccccccccccccccccccccccccccaaaggcucuuuucagagccaccagaauu

SEQ ID NO: 19321 - RNA, 1980 nt, Artificial Sequence
  mRNA product Design e-6 comprising derived and/or modified sequence from HRSV(Memphis-37)__AIY60640.1__F_DSCav1_mut8 (opt6)
gggagagcggcucggccauuuugucccagucaguccggaggcugcggcugcagaaguaccgccugcggaguaacugcaaagaagcuuaccauggaacuuccuauuuuaaaaacaaacgcaauuacaaccauauuagcagcaguaacacuaugcuuugcaucaucacaaaacaucaccgaagaauuuuaucaauccacaugcucagcaguaucaaaaggauaccuuggcgcacuccgaacaggcugguauacaucggucauaacuauagaacucuccaacauaaaagaaauaaaaugcaaugguacugacgcaaaaguaaaauuaauaaaacaagaacuagacaaauacaaaaacgcaguaaccgauuuacaacuacuuaugcaaucaacaccugcagcaggaagcggaucagcaauagcaaguggaauagcaguaugcaaaguacuucaccucgaaggagaaguaaauaaaauaaaaaacgccuuacuaucaacaaauaaagccgucguaucacuuuccgguugcggcguaucaguauuaaccuuuaaagucuuagacuuaaaaaacuacauagacaaacaauuauuaccaauacuaaacaaacaauccuguuccauacccaacauagaaaccguaauagaauuucaacaaaaaaacaacagacuauuagaaauaacacgcgaauuuucaguaaacgcaggcguaacaacaccaguaucaacauauauguuaaccaauucagaauuauuaucccuuauaaaugacaugccuauaacaaacgaccaaaaaaaauuaaugaguaacaacguucaaauaguaagacaacaaucauacagcauaaugugcauaauaaaagaagaaguacuagcauacguaguucaacuaccacucuauggcguuaucgacaccccaugcuggaaacuacauaccucaccacucuguaccacuaauacgaaagaaggaucuaacauaugccuaaccagaacagaucgagguugguauugcgacaaugcuggaucaguaucauucuucccacaagcagaaaccugcaaaguacaaagcaacagaguauuuugugacacuaugaacucacuaacgcuaccuucagaaguaaaccuaugcaacaucgacauauucaacccaaaauacgauugcaaaauaaugacaucaaaaacagacguuuccucaucaguaauaacaucauuaggagcaauaguauccugcuacgguaaaaccaaaugcacagcauccaauaaaugccgaggaaucauuaaaacauuuucaaauggcugcgacuauguaaguaauaaagguguagauacaguaucaguaggcaacacacuauauuacguaaacaaacaagaagggcaaucccuauaugucaaaggcgaaccaauuauaaacuucuacgacccccucguauucccaucagacgaauuugacgcaucaauaucccaaguaaacgaaaaaaucaaccaaucacucgcauucauacguaaauccgacgaauuacuacauaacguaaacguaggcaaaucaacaacaaauauaaugauaacaaccauaaucauaguaauaauaguuauacuccuacuacucauugcagucggccuauuucuauacuguaaagcacgcucuacaccaguaacacuaucuaaagaucaauuauccggaauaaacaacauugccuucuccaauuaaggacuaguacuggcugcaucucccuuuccucuguccuccauccuucucccaggauggugaagggggaccugguacccagugauccccaccccaggauccuaaaucaugacuuaccugcuaauaaaaacucauuggaaaagugagaagaucuaaaaaaaaaaaaaaaaaaaaaaaaaaaaaaaaaaaaaaaaaaaaaaaaaaaaaaaaaaaaaaaaugcaucccccccccccccccccccccccccccccccaaaggcucuuuucagagccaccagaauu

SEQ ID NO: 19322 - RNA, 1980 nt, Artificial Sequence
  mRNA product Design e-6 comprising derived and/or modified sequence from HRSV(Memphis-37)__AIY60640.1__F_DSCav1_mut8 (opt11)
gggagagcggcucggccauuuugucccagucaguccggaggcugcggcugcagaaguaccgccugcggaguaacugcaaagaagcuuaccauggaacuucccauccugaagaccaacgcuaucacaaccauccucgccgcagucacccuuugcuucgccucaucccaaaacaucaccgaagaauuuuaccagucaaccugcucggccgucuccaagggcuaccucggcgcccuccgcacuggcugguacacauccgucaucaccaucgaacucuccaacauaaaagaaauaaaaugcaacggaaccgacgccaaagucaaacucaucaaacaagaacuagauaaauauaaaaacgccgucaccgaccugcaacuccucaugcaauccaccccagccgccggcucuggcagcgccaucgcaagcggaaucgccgucugcaaaguccuccaccuagaaggcgaagucaacaaaauuaaaaacgcccuccucuccaccaacaaagcaguugucucccucucuggcugcggagucucuguacucaccuucaaaguacuagaccucaagaauuacauagacaaacaacuccugcccauccuuaacaaacaaaguuguaguauccccaacaucgaaacaguaaucgaauuucagcagaaaaacaaccgccuccucgaaaucacacgagaguucucggucaacgccggcgucaccacccccguaucaaccuacaugcuaacaaacuccgaacuacuuucccucaucaaugacaugcccauaaccaacgaccaaaagaaacuaauguccaauaacguccagauaguccgucaacaguccuacucaaucaugugcauaauuaaagaagaaguacucgccuacgucguccaacuaccccucuauggagucaucgacacccccugcuggaaacuccacacaucaccccuaugcacaaccaacaccaaagaaggcuccaacaucugccucacaagaaccgaccgcggcugguacugcgacaacgcuggcuccgucucguucuucccacaagccgaaaccugcaaaguccaaucaaaccgggucuucugcgacaccaugaacucccucacucucccaagcgaagucaaccuaugcaacaucgacaucuucaacccaaaauacgacuguaaaaucaugacuucgaaaacagacgucuccucaucaguaaucacauccuuaggcgccaucguguccugcuacgguaagaccaaaugcacagccuccaacaaaugccggggcaucaucaaaaccuucagcaacgguugugauuacgucuccaacaaaggaguagacaccgucuccguaggaaacacccucuacuacgucaacaagcaagaaggccaaucccucuacgucaaaggggaacccaucaucaacuucuacgacccacucgucuuccccuccgacgaguucgacgcaagcaucucccaagucaacgaaaagaucaaccaaucacuagccuucauccgcaaauccgacgaacuccuccacaacguuaacguaggcaaauccaccaccaacaucaugaucacaaccaucaucauagucauaauagucauccuacuacuccucaucgccguaggucuauuccuauacuguaaagcucgaucaacccccgucacacucuccaaagaucaacucucaggaaucaacaacaucgccuucuccaacuaaggacuaguacuggcugcaucucccuuuccucuguccuccauccuucucccaggauggugaagggggaccugguacccagugauccccaccccaggauccuaaaucaugacuuaccugcuaauaaaaacucauuggaaaagugagaagaucuaaaaaaaaaaaaaaaaaaaaaaaaaaaaaaaaaaaaaaaaaaaaaaaaaaaaaaaaaaaaaaaaugcaucccccccccccccccccccccccccccccccaaaggcucuuuucagagccaccagaauu

SEQ ID NO: 19323 - RNA, 2196 nt, Artificial Sequence
  mRNA product Design f-1 comprising derived and/or modified sequence from HRSV(Memphis-37)__AIY60640.1__F_DSCav1_mut8 (opt1)
gggagagcggcucggccauuuugucccagucaguccggaggcugcggcugcagaaguaccgccugcggaguaacugcaaagaagcuuaccauggagcugcccauccucaagaccaacgccaucaccacgauccuggccgcggugacccugugcuucgccagcucccagaacaucaccgaggaguucuaccagagcacgugcuccgccgucagcaagggcuaccucggcgcccugcgcaccgggugguacaccagcgugaucaccaucgagcuguccaacaucaaggagaucaagugcaacggcaccgacgccaaggugaagcucaucaagcaggagcuggacaaguacaagaacgcggucacggaccugcagcuccugaugcagagcaccccggccgccggcuccgggagcgcgaucgccuccggcaucgccgucugcaaggugcugcaccucgagggcgaggugaacaagaucaagaacgcccugcuguccaccaacaaggccgucgugagccucuccggcugcggggugagcguccugaccuucaaggugcuggaccucaagaacuacaucgacaagcagcugcugcccauccugaacaagcagagcugcuccauccccaacaucgagaccgucaucgaguuccagcagaagaacaaccgccuccuggagaucacgcgggaguucagcgugaacgcgggcgugaccacccccgucuccaccuacaugcugacgaacagcgagcuccugucccugaucaacgacaugccgaucaccaacgaccagaagaagcucaugagcaacaacgugcagaucgugcgccagcaguccuacagcaucaugugcaucaucaaggaggagguccuggccuacguggugcagcugccccucuacggggucaucgacacccccugcuggaagcugcacaccagcccccugugcacgaccaacaccaaggagggcuccaacaucugccucacccggacggaccgcgggugguacugcgacaacgccggcagcguguccuucuucccgcaggccgagaccugcaagguccagagcaaccggguguucugcgacaccaugaacucccugacccugcccagcgaggugaaccucugcaacaucgacaucuucaaccccaaguacgacugcaagaucaugacguccaagaccgacgucagcuccagcgugaucaccucccugggcgccaucgugagcugcuacgggaagaccaagugcacggcgagcaacaagugccgcggcaucaucaagaccuucuccaacgggugcgacuacgucagcaacaagggcguggacaccguguccgucggcaacacccuguacuacgugaacaagcaggagggccagagccucuacgugaagggggagcccaucaucaacuucuacgacccgcuggucuuccccuccgacgaguucgacgccagcaucucccaggugaacgagaagaucaaccagagccuggccuucauccggaaguccgacgagcuccugcacaacgugaacgucggcaagagcaccacgaacaucaugaucaccaccaucaucaucgugaucaucgugauccugcugcuccugaucgccgucgggcuguuccucuacugcaaggcccgcuccacccccgugacgcugagcaaggaccagcuguccgggaucaacaacaucgcguucagcaacugaggacuagugaagggaacacccaaauuuaauucagccuuaagcacaauuaauuaagagugaaacguaauuguacaagcaguuggucacccaccauagggcaugaucaacaccgcaaccuuuccuuuuucccccagugauucugaaaaaccccucuucccuucagcuugcuuagauguuccaaauuuaguaagcuuaaggcggccuacagaagaaaaagaaaaaaaaggccacaaaaguucccucucacuuucaguaaauaaaauaaaagcagcaacagaaauaaagaaauaaaugaaauucaaaaugaaauaaauauuguguugugcagcauuaaaaaaucaauaaaaauuaaaaaugagcaagaucuaaaaaaaaaaaaaaaaaaaaaaaaaaaaaaaaaaaaaaaaaaaaaaaaaaaaaaaaaaaaaaaaugcaucccccccccccccccccccccccccccccccaaaggcucuuuucagagccaccagaauu

SEQ ID NO: 19324 - RNA, 2196 nt, Artificial Sequence
  mRNA product Design f-1 comprising derived and/or modified sequence from HRSV(Memphis-37)__AIY60640.1__F_DSCav1_mut8 (opt1)
gggagagcggcucggccauuuugucccagucaguccggaggcugcggcugcagaaguaccgccugcggaguaacugcaaagaagcuuaccauggagcugcccauccucaagaccaacgccaucaccacgauccuggccgcggugacccugugcuucgccagcucccagaacaucaccgaggaguucuaccagagcacgugcuccgccgucagcaagggcuaccucggggcccugcgcaccggcugguacaccuccgugaucaccaucgagcugagcaacaucaaggagaucaagugcaacgggaccgacgccaaggugaagcucaucaagcaggagcuggacaaguacaagaacgcggucacggaccugcagcuccugaugcaguccaccccggccgccggcagcggguccgccaucgcgagcggcaucgccgugugcaaggugcugcaccucgagggcgaggucaacaagaucaagaacgcccugcuguccaccaacaaggccguggugagccucuccgggugcggcgucagcgugcugaccuucaaggugcuggaccucaagaacuacaucgacaagcagcugcugcccauccucaacaagcaguccugcagcauccccaacaucgagacggucaucgaguuccagcagaagaacaaccggcugcuggagaucacccgcgaguucuccgugaacgccggggugaccacccccgucagcacguacaugcucaccaacuccgagcugcugagccucaucaacgacaugccgaucaccaacgaccagaagaagcugaugagcaacaacgugcagaucgugcggcagcaguccuacagcaucaugugcaucaucaaggaggagguccuggcguacguggugcagcucccccuguacggcgucaucgacacccccugcuggaagcugcacacgagcccccucugcaccaccaacaccaaggagggguccaacaucugccugacgcgcaccgaccggggcugguacugcgacaacgccggcuccgugagcuucuucccgcaggccgagaccugcaaggugcaguccaaccgcgucuucugcgacaccaugaacagccugacgcuccccuccgaggugaaccugugcaacaucgacaucuucaaccccaaguacgacugcaagaucaugaccagcaagaccgacgucuccagcuccgugaucaccagccugggggccaucguguccugcuacggcaagacgaagugcaccgccagcaacaagugccgggggaucaucaagaccuucuccaacggcugcgacuacgucagcaacaagggcguggacaccguguccgucgggaacacgcucuacuacgugaacaagcaggagggccagagccuguacgugaagggggagcccaucaucaacuucuacgacccgcuggucuuccccagcgacgaguucgacgcguccaucagccaggugaacgagaagaucaaccagucccucgccuucauccgcaagagcgacgagcugcugcacaacgugaacgucggcaaguccaccaccaacaucaugaucaccaccaucaucaucgugaucaucgugauccuccugcugcucaucgccgucgggcuguuccuguacugcaaggcccggagcacgcccgugacccuguccaaggaccagcucagcggcaucaacaacaucgccuucuccaacugaggacuagugaagggaacacccaaauuuaauucagccuuaagcacaauuaauuaagagugaaacguaauuguacaagcaguuggucacccaccauagggcaugaucaacaccgcaaccuuuccuuuuucccccagugauucugaaaaaccccucuucccuucagcuugcuuagauguuccaaauuuaguaagcuuaaggcggccuacagaagaaaaagaaaaaaaaggccacaaaaguucccucucacuuucaguaaauaaaauaaaagcagcaacagaaauaaagaaauaaaugaaauucaaaaugaaauaaauauuguguugugcagcauuaaaaaaucaauaaaaauuaaaaaugagcaagaucuaaaaaaaaaaaaaaaaaaaaaaaaaaaaaaaaaaaaaaaaaaaaaaaaaaaaaaaaaaaaaaaaugcaucccccccccccccccccccccccccccccccaaaggcucuuuucagagccaccagaauu

SEQ ID NO: 19325 - RNA, 2196 nt, Artificial Sequence
  mRNA product Design f-1 comprising derived and/or modified sequence from HRSV(Memphis-37)__AIY60640.1__F_DSCav1_mut8 (opt2)
gggagagcggcucggccauuuugucccagucaguccggaggcugcggcugcagaaguaccgccugcggaguaacugcaaagaagcuuaccauggagcuccccauccucaagaccaacgccaucaccaccauccucgccgccgucacccucugcuucgccuccucccagaacaucaccgaggaguucuaccaguccaccugcuccgccgucuccaagggcuaccucggcgcccuccgcaccggcugguacaccuccgucaucaccaucgagcucuccaacaucaaggagaucaagugcaacggcaccgacgccaaggucaagcucaucaagcaggagcucgacaaguacaagaacgccgucaccgaccuccagcuccucaugcaguccacccccgccgccggcuccggcuccgccaucgccuccggcaucgccgucugcaagguccuccaccucgagggcgaggucaacaagaucaagaacgcccuccucuccaccaacaaggccgucgucucccucuccggcugcggcgucuccguccucaccuucaagguccucgaccucaagaacuacaucgacaagcagcuccuccccauccucaacaagcaguccugcuccauccccaacaucgagaccgucaucgaguuccagcagaagaacaaccgccuccucgagaucacccgcgaguucuccgucaacgccggcgucaccacccccgucuccaccuacaugcucaccaacuccgagcuccucucccucaucaacgacaugcccaucaccaacgaccagaagaagcucauguccaacaacguccagaucguccgccagcaguccuacuccaucaugugcaucaucaaggaggagguccucgccuacgucguccagcucccccucuacggcgucaucgacacccccugcuggaagcuccacaccuccccccucugcaccaccaacaccaaggagggcuccaacaucugccucacccgcaccgaccgcggcugguacugcgacaacgccggcuccgucuccuucuucccccaggccgagaccugcaagguccaguccaaccgcgucuucugcgacaccaugaacucccucacccuccccuccgaggucaaccucugcaacaucgacaucuucaaccccaaguacgacugcaagaucaugaccuccaagaccgacgucuccuccuccgucaucaccucccucggcgccaucgucuccugcuacggcaagaccaagugcaccgccuccaacaagugccgcggcaucaucaagaccuucuccaacggcugcgacuacgucuccaacaagggcgucgacaccgucuccgucggcaacacccucuacuacgucaacaagcaggagggccagucccucuacgucaagggcgagcccaucaucaacuucuacgacccccucgucuuccccuccgacgaguucgacgccuccaucucccaggucaacgagaagaucaaccagucccucgccuucauccgcaaguccgacgagcuccuccacaacgucaacgucggcaaguccaccaccaacaucaugaucaccaccaucaucaucgucaucaucgucauccuccuccuccucaucgccgucggccucuuccucuacugcaaggcccgcuccacccccgucacccucuccaaggaccagcucuccggcaucaacaacaucgccuucuccaacugaggacuagugaagggaacacccaaauuuaauucagccuuaagcacaauuaauuaagagugaaacguaauuguacaagcaguuggucacccaccauagggcaugaucaacaccgcaaccuuuccuuuuucccccagugauucugaaaaaccccucuucccuucagcuugcuuagauguuccaaauuuaguaagcuuaaggcggccuacagaagaaaaagaaaaaaaaggccacaaaaguucccucucacuuucaguaaauaaaauaaaagcagcaacagaaauaaagaaauaaaugaaauucaaaaugaaauaaauauuguguugugcagcauuaaaaaaucaauaaaaauuaaaaaugagcaagaucuaaaaaaaaaaaaaaaaaaaaaaaaaaaaaaaaaaaaaaaaaaaaaaaaaaaaaaaaaaaaaaaaugcaucccccccccccccccccccccccccccccccaaaggcucuuuucagagccaccagaauu

SEQ ID NO: 19326 - RNA, 2196 nt, Artificial Sequence
  mRNA product Design f-1 comprising derived and/or modified sequence from HRSV(Memphis-37)__AIY60640.1__F_DSCav1_mut8 (opt3)
gggagagcggcucggccauuuugucccagucaguccggaggcugcggcugcagaaguaccgccugcggaguaacugcaaagaagcuuaccauggagcugcccauccucaagaccaacgccauuacaacuauacuugcugcagugacgcugugcuucgccagcucccagaauaucaccgaagaguuuuaccaaucuacauguucagcggucaguaaaggcuauuugggggcuuuaagaacuggaugguacaccagcguuauuacaaucgaacuguccaacauuaaggagaucaaaugcaaugguaccgacgccaaggugaaacuaauaaagcaggaacucgauaaguauaaaaacgcaguaacugaccugcagcuucugaugcagucuacuccugccgcuggcucggggucagcaaucgccagcggaauugcuguguguaaggucuugcaccucgagggcgaggugaauaaaaucaagaacgcccugcugaguaccaauaaagcgguugugucccucucugguugcggggucagcguguuaacguucaagguacuggaucuuaagaacuacauugacaaacaauugcugccaauccuaaauaagcaguccuguucaauaccgaacauugaaacuguuaucgaguuucagcagaaaaauaacaggcuccuggaaauuacccgggaguucagugugaaugcaggagucacaacucccgugagcaccuauaugcuuacaaacucugagcuguugucccucaucaaugauaugccuaucaccaacgaccaaaagaaacugaugucaaacaaugugcagauuguccgccagcagagcuacaguauaaugugcaucauuaaggaagagguuuuagccuaugugguacaacugccacucuacggcgugaucgauacgcccuguuggaaacuucauacuucuccucugugcacaaccaacacuaaggaaggcuccaauauauguuugacacgaaccgaccgugggugguacugcgauaacgcuggaagcgucucguuuuucccacaggccgagacguguaaggugcagucuaauagaguuuucugcgacaccaugaacucccuaacacugcccucagaagugaaucucugcaacauugauaucuucaauccuaaauaugacuguaagaucaugacaaguaaaaccgaugucagcuccucugugauuacaagccugggugcaaucguaucaugcuacggcaagacuaaauguaccgcuaguaacaagugcagggggauuauaaagacauuuuccaauggaugugacuauguuagcaacaaaggcguggacaccgucucuguggguaauacucuuuacuaugucaacaagcaagaggggcagucacuguacgugaaaggagagccaaucauuaauuucuaugauccguugguuuuucccagugacgaauuugaugccagcaucucccaggugaacgagaagaucaaccagucucucgcguuuauucggaaaucggacgaacuguuacacaauguaaacgucggcaagagcacgacaaauauaaugaucaccacuauuaucauugugaucauaguuauccugcuacuccugauugccgugggccuuuucuuguacugcaaggcacgcuccaccccugucacacugucaaaagaucaacucagugggaucaacaauauugcuuucucuaacugaggacuagugaagggaacacccaaauuuaauucagccuuaagcacaauuaauuaagagugaaacguaauuguacaagcaguuggucacccaccauagggcaugaucaacaccgcaaccuuuccuuuuucccccagugauucugaaaaaccccucuucccuucagcuugcuuagauguuccaaauuuaguaagcuuaaggcggccuacagaagaaaaagaaaaaaaaggccacaaaaguucccucucacuuucaguaaauaaaauaaaagcagcaacagaaauaaagaaauaaaugaaauucaaaaugaaauaaauauuguguugugcagcauuaaaaaaucaauaaaaauuaaaaaugagcaagaucuaaaaaaaaaaaaaaaaaaaaaaaaaaaaaaaaaaaaaaaaaaaaaaaaaaaaaaaaaaaaaaaaugcaucccccccccccccccccccccccccccccccaaaggcucuuuucagagccaccagaauu

SEQ ID NO: 19327 - RNA, 2196 nt, Artificial Sequence
  mRNA product Design f-1 comprising derived and/or modified sequence from HRSV(Memphis-37)__AIY60640.1__F_DSCav1_mut8 (opt4)
gggagagcggcucggccauuuugucccagucaguccggaggcugcggcugcagaaguaccgccugcggaguaacugcaaagaagcuuaccauggagcugcccauccugaagaccaacgccaucaccaccauccuggccgccgugacccugugcuucgccagcagccagaacaucaccgaggaguucuaccagagcaccugcagcgccgugagcaagggcuaccugggcgcccugagaaccggcugguacaccagcgugaucaccaucgagcugagcaacaucaaggagaucaagugcaacggcaccgacgccaaggugaagcugaucaagcaggagcuggacaaguacaagaacgccgugaccgaccugcagcugcugaugcagagcacccccgccgccggcagcggcagcgccaucgccagcggcaucgccgugugcaaggugcugcaccuggagggcgaggugaacaagaucaagaacgcccugcugagcaccaacaaggccguggugagccugagcggcugcggcgugagcgugcugaccuucaaggugcuggaccugaagaacuacaucgacaagcagcugcugcccauccugaacaagcagagcugcagcauccccaacaucgagaccgugaucgaguuccagcagaagaacaacagacugcuggagaucaccagagaguucagcgugaacgccggcgugaccacccccgugagcaccuacaugcugaccaacagcgagcugcugagccugaucaacgacaugcccaucaccaacgaccagaagaagcugaugagcaacaacgugcagaucgugagacagcagagcuacagcaucaugugcaucaucaaggaggaggugcuggccuacguggugcagcugccccuguacggcgugaucgacacccccugcuggaagcugcacaccagcccccugugcaccaccaacaccaaggagggcagcaacaucugccugaccagaaccgacagaggcugguacugcgacaacgccggcagcgugagcuucuucccccaggccgagaccugcaaggugcagagcaacagaguguucugcgacaccaugaacagccugacccugcccagcgaggugaaccugugcaacaucgacaucuucaaccccaaguacgacugcaagaucaugaccagcaagaccgacgugagcagcagcgugaucaccagccugggcgccaucgugagcugcuacggcaagaccaagugcaccgccagcaacaagugcagaggcaucaucaagaccuucagcaacggcugcgacuacgugagcaacaagggcguggacaccgugagcgugggcaacacccuguacuacgugaacaagcaggagggccagagccuguacgugaagggcgagcccaucaucaacuucuacgacccccugguguuccccagcgacgaguucgacgccagcaucagccaggugaacgagaagaucaaccagagccuggccuucaucagaaagagcgacgagcugcugcacaacgugaacgugggcaagagcaccaccaacaucaugaucaccaccaucaucaucgugaucaucgugauccugcugcugcugaucgccgugggccuguuccuguacugcaaggccagaagcacccccgugacccugagcaaggaccagcugagcggcaucaacaacaucgccuucagcaacugaggacuagugaagggaacacccaaauuuaauucagccuuaagcacaauuaauuaagagugaaacguaauuguacaagcaguuggucacccaccauagggcaugaucaacaccgcaaccuuuccuuuuucccccagugauucugaaaaaccccucuucccuucagcuugcuuagauguuccaaauuuaguaagcuuaaggcggccuacagaagaaaaagaaaaaaaaggccacaaaaguucccucucacuuucaguaaauaaaauaaaagcagcaacagaaauaaagaaauaaaugaaauucaaaaugaaauaaauauuguguugugcagcauuaaaaaaucaauaaaaauuaaaaaugagcaagaucuaaaaaaaaaaaaaaaaaaaaaaaaaaaaaaaaaaaaaaaaaaaaaaaaaaaaaaaaaaaaaaaaugcaucccccccccccccccccccccccccccccccaaaggcucuuuucagagccaccagaauu

SEQ ID NO: 19328 - RNA, 2196 nt, Artificial Sequence
  mRNA product Design f-1 comprising derived and/or modified sequence from HRSV(Memphis-37)__AIY60640.1__F_DSCav1_mut8 (opt5)
gggagagcggcucggccauuuugucccagucaguccggaggcugcggcugcagaaguaccgccugcggaguaacugcaaagaagcuuaccauggagcugcccauccucaagaccaacgccauuacaacgauccuggcugccgugacccuuugcuucgcgagcucccagaauauuacagaagaguuuuaccaaucuaccuguagcgcugucuccaaaggcuaucugggggcccucagaacaggaugguacaccucuguuaucacaauugaacugagcaacaucaaggagaucaaaugcaauggcaccgacgccaaggugaaacuuauuaagcaggaacuggauaaguauaaaaacgcugugacggaccuccagcugcugaugcaguccaccccugccgcugggucuggaagcgccaucgcguccggcauugccgucuguaaggugcuccaccuggagggggagguuaauaaaaucaagaacgcccuucugagcacaaauaaagcuguggucucucucuccggaugcggcgugagcguucugaccuucaaggugcuugaucugaagaacuacauugacaaacaacuccugccgauccugaauaagcagucuuguuccauucccaacaucgaaacagucaucgaguuucagcagaaaaauaaccggcuccuggaaauuacccgcgaguucagcgugaaugcuggcgugacgacaccugucucuaccuauaugcuuacaaacuccgagcugcucagccugaucaaugauaugcccauuaccaacgaccaaaagaaacuuauguccaacaauguucagaucgugagacagcagucuuacagcauuaugugcaucaucaaggaagaggugcuggccuaugucgugcaacucccucuguacgggguuauugauacccccuguuggaaacugcauacauccccucucugcacgaccaacacaaaggaaggaagcaauaucugucugacccggacagaccgcggcugguacugcgauaacgcggggucuguguccuuuuucccgcaggccgagaccuguaagguccagagcaauagaguguuuugcgacacgaugaacucucuuacacugcccagcgaaguuaaucucugcaacauugauaucuucaauccuaaauaugacuguaagauuaugaccuccaaaaccgaugugucuagcuccgucaucacaagccugggagcuaucgugucuugcuacggcaagaccaaauguacagccuccaacaagugccgggggauuaucaagacguuuagcaauggaugugacuaugucucuaacaaaggcguggacaccguuuccgugggcaauacacuuuacuaugucaacaagcaagaggggcagagccuguacgugaaaggagagcccauuaucaauuucuaugauccucucguuuuucccuccgacgaguucgaugcuucuauuagccaggugaacgaaaagaucaaccagucccuggccuuuauucgcaaaucugacgaacugcuccacaaugucaacgugggcaagagcaccacaaauaucaugaucaccacgauuaucauugugaucauuguuauccugcuucugcucaucgccgucgggcuguuccuguacugcaaggcuagauccaccccggugacacuuagcaaagaucaacucucuggaauuaacaauaucgcguucuccaacugaggacuagugaagggaacacccaaauuuaauucagccuuaagcacaauuaauuaagagugaaacguaauuguacaagcaguuggucacccaccauagggcaugaucaacaccgcaaccuuuccuuuuucccccagugauucugaaaaaccccucuucccuucagcuugcuuagauguuccaaauuuaguaagcuuaaggcggccuacagaagaaaaagaaaaaaaaggccacaaaaguucccucucacuuucaguaaauaaaauaaaagcagcaacagaaauaaagaaauaaaugaaauucaaaaugaaauaaauauuguguugugcagcauuaaaaaaucaauaaaaauuaaaaaugagcaagaucuaaaaaaaaaaaaaaaaaaaaaaaaaaaaaaaaaaaaaaaaaaaaaaaaaaaaaaaaaaaaaaaaugcaucccccccccccccccccccccccccccccccaaaggcucuuuucagagccaccagaauu

SEQ ID NO: 19329 - RNA, 2196 nt, Artificial Sequence
  mRNA product Design f-1 comprising derived and/or modified sequence from HRSV(Memphis-37)__AIY60640.1__F_DSCav1_mut8 (opt6)
gggagagcggcucggccauuuugucccagucaguccggaggcugcggcugcagaaguaccgccugcggaguaacugcaaagaagcuuaccauggaacuuccuauuuuaaaaacaaacgcaauuacaaccauauuagcagcaguaacacuaugcuuugcaucaucacaaaacaucaccgaagaauuuuaucaauccacaugcucagcaguaucaaaaggauaccuuggcgcacuccgaacaggcugguauacaucggucauaacuauagaacucuccaacauaaaagaaauaaaaugcaaugguacugacgcaaaaguaaaauuaauaaaacaagaacuagacaaauacaaaaacgcaguaaccgauuuacaacuacuuaugcaaucaacaccugcagcaggaagcggaucagcaauagcaaguggaauagcaguaugcaaaguacuucaccucgaaggagaaguaaauaaaauaaaaaacgccuuacuaucaacaaauaaagccgucguaucacuuuccgguugcggcguaucaguauuaaccuuuaaagucuuagacuuaaaaaacuacauagacaaacaauuauuaccaauacuaaacaaacaauccuguuccauacccaacauagaaaccguaauagaauuucaacaaaaaaacaacagacuauuagaaauaacacgcgaauuuucaguaaacgcaggcguaacaacaccaguaucaacauauauguuaaccaauucagaauuauuaucccuuauaaaugacaugccuauaacaaacgaccaaaaaaaauuaaugaguaacaacguucaaauaguaagacaacaaucauacagcauaaugugcauaauaaaagaagaaguacuagcauacguaguucaacuaccacucuauggcguuaucgacaccccaugcuggaaacuacauaccucaccacucuguaccacuaauacgaaagaaggaucuaacauaugccuaaccagaacagaucgagguugguauugcgacaaugcuggaucaguaucauucuucccacaagcagaaaccugcaaaguacaaagcaacagaguauuuugugacacuaugaacucacuaacgcuaccuucagaaguaaaccuaugcaacaucgacauauucaacccaaaauacgauugcaaaauaaugacaucaaaaacagacguuuccucaucaguaauaacaucauuaggagcaauaguauccugcuacgguaaaaccaaaugcacagcauccaauaaaugccgaggaaucauuaaaacauuuucaaauggcugcgacuauguaaguaauaaagguguagauacaguaucaguaggcaacacacuauauuacguaaacaaacaagaagggcaaucccuauaugucaaaggcgaaccaauuauaaacuucuacgacccccucguauucccaucagacgaauuugacgcaucaauaucccaaguaaacgaaaaaaucaaccaaucacucgcauucauacguaaauccgacgaauuacuacauaacguaaacguaggcaaaucaacaacaaauauaaugauaacaaccauaaucauaguaauaauaguuauacuccuacuacucauugcagucggccuauuucuauacuguaaagcacgcucuacaccaguaacacuaucuaaagaucaauuauccggaauaaacaacauugccuucuccaauuaaggacuagugaagggaacacccaaauuuaauucagccuuaagcacaauuaauuaagagugaaacguaauuguacaagcaguuggucacccaccauagggcaugaucaacaccgcaaccuuuccuuuuucccccagugauucugaaaaaccccucuucccuucagcuugcuuagauguuccaaauuuaguaagcuuaaggcggccuacagaagaaaaagaaaaaaaaggccacaaaaguucccucucacuuucaguaaauaaaauaaaagcagcaacagaaauaaagaaauaaaugaaauucaaaaugaaauaaauauuguguugugcagcauuaaaaaaucaauaaaaauuaaaaaugagcaagaucuaaaaaaaaaaaaaaaaaaaaaaaaaaaaaaaaaaaaaaaaaaaaaaaaaaaaaaaaaaaaaaaaugcaucccccccccccccccccccccccccccccccaaaggcucuuuucagagccaccagaauu

SEQ ID NO: 19330 - RNA, 2196 nt, Artificial Sequence
  mRNA product Design f-1 comprising derived and/or modified sequence from HRSV(Memphis-37)__AIY60640.1__F_DSCav1_mut8 (opt11)
gggagagcggcucggccauuuugucccagucaguccggaggcugcggcugcagaaguaccgccugcggaguaacugcaaagaagcuuaccauggaacuucccauccugaagaccaacgcuaucacaaccauccucgccgcagucacccuuugcuucgccucaucccaaaacaucaccgaagaauuuuaccagucaaccugcucggccgucuccaagggcuaccucggcgcccuccgcacuggcugguacacauccgucaucaccaucgaacucuccaacauaaaagaaauaaaaugcaacggaaccgacgccaaagucaaacucaucaaacaagaacuagauaaauauaaaaacgccgucaccgaccugcaacuccucaugcaauccaccccagccgccggcucuggcagcgccaucgcaagcggaaucgccgucugcaaaguccuccaccuagaaggcgaagucaacaaaauuaaaaacgcccuccucuccaccaacaaagcaguugucucccucucuggcugcggagucucuguacucaccuucaaaguacuagaccucaagaauuacauagacaaacaacuccugcccauccuuaacaaacaaaguuguaguauccccaacaucgaaacaguaaucgaauuucagcagaaaaacaaccgccuccucgaaaucacacgagaguucucggucaacgccggcgucaccacccccguaucaaccuacaugcuaacaaacuccgaacuacuuucccucaucaaugacaugcccauaaccaacgaccaaaagaaacuaauguccaauaacguccagauaguccgucaacaguccuacucaaucaugugcauaauuaaagaagaaguacucgccuacgucguccaacuaccccucuauggagucaucgacacccccugcuggaaacuccacacaucaccccuaugcacaaccaacaccaaagaaggcuccaacaucugccucacaagaaccgaccgcggcugguacugcgacaacgcuggcuccgucucguucuucccacaagccgaaaccugcaaaguccaaucaaaccgggucuucugcgacaccaugaacucccucacucucccaagcgaagucaaccuaugcaacaucgacaucuucaacccaaaauacgacuguaaaaucaugacuucgaaaacagacgucuccucaucaguaaucacauccuuaggcgccaucguguccugcuacgguaagaccaaaugcacagccuccaacaaaugccggggcaucaucaaaaccuucagcaacgguugugauuacgucuccaacaaaggaguagacaccgucuccguaggaaacacccucuacuacgucaacaagcaagaaggccaaucccucuacgucaaaggggaacccaucaucaacuucuacgacccacucgucuuccccuccgacgaguucgacgcaagcaucucccaagucaacgaaaagaucaaccaaucacuagccuucauccgcaaauccgacgaacuccuccacaacguuaacguaggcaaauccaccaccaacaucaugaucacaaccaucaucauagucauaauagucauccuacuacuccucaucgccguaggucuauuccuauacuguaaagcucgaucaacccccgucacacucuccaaagaucaacucucaggaaucaacaacaucgccuucuccaacuaaggacuagugaagggaacacccaaauuuaauucagccuuaagcacaauuaauuaagagugaaacguaauuguacaagcaguuggucacccaccauagggcaugaucaacaccgcaaccuuuccuuuuucccccagugauucugaaaaaccccucuucccuucagcuugcuuagauguuccaaauuuaguaagcuuaaggcggccuacagaagaaaaagaaaaaaaaggccacaaaaguucccucucacuuucaguaaauaaaauaaaagcagcaacagaaauaaagaaauaaaugaaauucaaaaugaaauaaauauuguguugugcagcauuaaaaaaucaauaaaaauuaaaaaugagcaagaucuaaaaaaaaaaaaaaaaaaaaaaaaaaaaaaaaaaaaaaaaaaaaaaaaaaaaaaaaaaaaaaaaugcaucccccccccccccccccccccccccccccccaaaggcucuuuucagagccaccagaauu

SEQ ID NO: 19331 - RNA, 1976 nt, Artificial Sequence
  mRNA product Design f-2 comprising derived and/or modified sequence from HRSV(Memphis-37)__AIY60640.1__F_DSCav1_mut8 (opt1)
gggagagcggcucggccauuuugucccagucaguccggaggcugcggcugcagaaguaccgccugcggaguaacugcaaagaagcuuaccauggagcugcccauccucaagaccaacgccaucaccacgauccuggccgcggugacccugugcuucgccagcucccagaacaucaccgaggaguucuaccagagcacgugcuccgccgucagcaagggcuaccucggcgcccugcgcaccgggugguacaccagcgugaucaccaucgagcuguccaacaucaaggagaucaagugcaacggcaccgacgccaaggugaagcucaucaagcaggagcuggacaaguacaagaacgcggucacggaccugcagcuccugaugcagagcaccccggccgccggcuccgggagcgcgaucgccuccggcaucgccgucugcaaggugcugcaccucgagggcgaggugaacaagaucaagaacgcccugcuguccaccaacaaggccgucgugagccucuccggcugcggggugagcguccugaccuucaaggugcuggaccucaagaacuacaucgacaagcagcugcugcccauccugaacaagcagagcugcuccauccccaacaucgagaccgucaucgaguuccagcagaagaacaaccgccuccuggagaucacgcgggaguucagcgugaacgcgggcgugaccacccccgucuccaccuacaugcugacgaacagcgagcuccugucccugaucaacgacaugccgaucaccaacgaccagaagaagcucaugagcaacaacgugcagaucgugcgccagcaguccuacagcaucaugugcaucaucaaggaggagguccuggccuacguggugcagcugccccucuacggggucaucgacacccccugcuggaagcugcacaccagcccccugugcacgaccaacaccaaggagggcuccaacaucugccucacccggacggaccgcgggugguacugcgacaacgccggcagcguguccuucuucccgcaggccgagaccugcaagguccagagcaaccggguguucugcgacaccaugaacucccugacccugcccagcgaggugaaccucugcaacaucgacaucuucaaccccaaguacgacugcaagaucaugacguccaagaccgacgucagcuccagcgugaucaccucccugggcgccaucgugagcugcuacgggaagaccaagugcacggcgagcaacaagugccgcggcaucaucaagaccuucuccaacgggugcgacuacgucagcaacaagggcguggacaccguguccgucggcaacacccuguacuacgugaacaagcaggagggccagagccucuacgugaagggggagcccaucaucaacuucuacgacccgcuggucuuccccuccgacgaguucgacgccagcaucucccaggugaacgagaagaucaaccagagccuggccuucauccggaaguccgacgagcuccugcacaacgugaacgucggcaagagcaccacgaacaucaugaucaccaccaucaucaucgugaucaucgugauccugcugcuccugaucgccgucgggcuguuccucuacugcaaggcccgcuccacccccgugacgcugagcaaggaccagcuguccgggaucaacaacaucgcguucagcaacugaggacuaguggaagcauuuuccuggcugauuaaaagaaauuacucagcuauggucaucuguuccuguuagaaggcuaugcagcauauuauauacuaugcgcauguuaugaaaugcauaauaaaaaauuuuaaaaaaucuaaaagaucuaaaaaaaaaaaaaaaaaaaaaaaaaaaaaaaaaaaaaaaaaaaaaaaaaaaaaaaaaaaaaaaaugcaucccccccccccccccccccccccccccccccaaaggcucuuuucagagccaccagaauu

SEQ ID NO: 19332 - RNA, 1976 nt, Artificial Sequence
  mRNA product Design f-2 comprising derived and/or modified sequence from HRSV(Memphis-37)__AIY60640.1__F_DSCav1_mut8 (opt1)
gggagagcggcucggccauuuugucccagucaguccggaggcugcggcugcagaaguaccgccugcggaguaacugcaaagaagcuuaccauggagcugcccauccucaagaccaacgccaucaccacgauccuggccgcggugacccugugcuucgccagcucccagaacaucaccgaggaguucuaccagagcacgugcuccgccgucagcaagggcuaccucggggcccugcgcaccggcugguacaccuccgugaucaccaucgagcugagcaacaucaaggagaucaagugcaacgggaccgacgccaaggugaagcucaucaagcaggagcuggacaaguacaagaacgcggucacggaccugcagcuccugaugcaguccaccccggccgccggcagcggguccgccaucgcgagcggcaucgccgugugcaaggugcugcaccucgagggcgaggucaacaagaucaagaacgcccugcuguccaccaacaaggccguggugagccucuccgggugcggcgucagcgugcugaccuucaaggugcuggaccucaagaacuacaucgacaagcagcugcugcccauccucaacaagcaguccugcagcauccccaacaucgagacggucaucgaguuccagcagaagaacaaccggcugcuggagaucacccgcgaguucuccgugaacgccggggugaccacccccgucagcacguacaugcucaccaacuccgagcugcugagccucaucaacgacaugccgaucaccaacgaccagaagaagcugaugagcaacaacgugcagaucgugcggcagcaguccuacagcaucaugugcaucaucaaggaggagguccuggcguacguggugcagcucccccuguacggcgucaucgacacccccugcuggaagcugcacacgagcccccucugcaccaccaacaccaaggagggguccaacaucugccugacgcgcaccgaccggggcugguacugcgacaacgccggcuccgugagcuucuucccgcaggccgagaccugcaaggugcaguccaaccgcgucuucugcgacaccaugaacagccugacgcuccccuccgaggugaaccugugcaacaucgacaucuucaaccccaaguacgacugcaagaucaugaccagcaagaccgacgucuccagcuccgugaucaccagccugggggccaucguguccugcuacggcaagacgaagugcaccgccagcaacaagugccgggggaucaucaagaccuucuccaacggcugcgacuacgucagcaacaagggcguggacaccguguccgucgggaacacgcucuacuacgugaacaagcaggagggccagagccuguacgugaagggggagcccaucaucaacuucuacgacccgcuggucuuccccagcgacgaguucgacgcguccaucagccaggugaacgagaagaucaaccagucccucgccuucauccgcaagagcgacgagcugcugcacaacgugaacgucggcaaguccaccaccaacaucaugaucaccaccaucaucaucgugaucaucgugauccuccugcugcucaucgccgucgggcuguuccuguacugcaaggcccggagcacgcccgugacccuguccaaggaccagcucagcggcaucaacaacaucgccuucuccaacugaggacuaguggaagcauuuuccuggcugauuaaaagaaauuacucagcuauggucaucuguuccuguuagaaggcuaugcagcauauuauauacuaugcgcauguuaugaaaugcauaauaaaaaauuuuaaaaaaucuaaaagaucuaaaaaaaaaaaaaaaaaaaaaaaaaaaaaaaaaaaaaaaaaaaaaaaaaaaaaaaaaaaaaaaaugcaucccccccccccccccccccccccccccccccaaaggcucuuuucagagccaccagaauu

SEQ ID NO: 19333 - RNA, 1976 nt, Artificial Sequence
  mRNA product Design f-2 comprising derived and/or modified sequence from HRSV(Memphis-37)__AIY60640.1__F_DSCav1_mut8 (opt2)
gggagagcggcucggccauuuugucccagucaguccggaggcugcggcugcagaaguaccgccugcggaguaacugcaaagaagcuuaccauggagcuccccauccucaagaccaacgccaucaccaccauccucgccgccgucacccucugcuucgccuccucccagaacaucaccgaggaguucuaccaguccaccugcuccgccgucuccaagggcuaccucggcgcccuccgcaccggcugguacaccuccgucaucaccaucgagcucuccaacaucaaggagaucaagugcaacggcaccgacgccaaggucaagcucaucaagcaggagcucgacaaguacaagaacgccgucaccgaccuccagcuccucaugcaguccacccccgccgccggcuccggcuccgccaucgccuccggcaucgccgucugcaagguccuccaccucgagggcgaggucaacaagaucaagaacgcccuccucuccaccaacaaggccgucgucucccucuccggcugcggcgucuccguccucaccuucaagguccucgaccucaagaacuacaucgacaagcagcuccuccccauccucaacaagcaguccugcuccauccccaacaucgagaccgucaucgaguuccagcagaagaacaaccgccuccucgagaucacccgcgaguucuccgucaacgccggcgucaccacccccgucuccaccuacaugcucaccaacuccgagcuccucucccucaucaacgacaugcccaucaccaacgaccagaagaagcucauguccaacaacguccagaucguccgccagcaguccuacuccaucaugugcaucaucaaggaggagguccucgccuacgucguccagcucccccucuacggcgucaucgacacccccugcuggaagcuccacaccuccccccucugcaccaccaacaccaaggagggcuccaacaucugccucacccgcaccgaccgcggcugguacugcgacaacgccggcuccgucuccuucuucccccaggccgagaccugcaagguccaguccaaccgcgucuucugcgacaccaugaacucccucacccuccccuccgaggucaaccucugcaacaucgacaucuucaaccccaaguacgacugcaagaucaugaccuccaagaccgacgucuccuccuccgucaucaccucccucggcgccaucgucuccugcuacggcaagaccaagugcaccgccuccaacaagugccgcggcaucaucaagaccuucuccaacggcugcgacuacgucuccaacaagggcgucgacaccgucuccgucggcaacacccucuacuacgucaacaagcaggagggccagucccucuacgucaagggcgagcccaucaucaacuucuacgacccccucgucuuccccuccgacgaguucgacgccuccaucucccaggucaacgagaagaucaaccagucccucgccuucauccgcaaguccgacgagcuccuccacaacgucaacgucggcaaguccaccaccaacaucaugaucaccaccaucaucaucgucaucaucgucauccuccuccuccucaucgccgucggccucuuccucuacugcaaggcccgcuccacccccgucacccucuccaaggaccagcucuccggcaucaacaacaucgccuucuccaacugaggacuaguggaagcauuuuccuggcugauuaaaagaaauuacucagcuauggucaucuguuccuguuagaaggcuaugcagcauauuauauacuaugcgcauguuaugaaaugcauaauaaaaaauuuuaaaaaaucuaaaagaucuaaaaaaaaaaaaaaaaaaaaaaaaaaaaaaaaaaaaaaaaaaaaaaaaaaaaaaaaaaaaaaaaugcaucccccccccccccccccccccccccccccccaaaggcucuuuucagagccaccagaauu

SEQ ID NO: 19334 - RNA, 1976 nt, Artificial Sequence
  mRNA product Design f-2 comprising derived and/or modified sequence from HRSV(Memphis-37)__AIY60640.1__F_DSCav1_mut8 (opt3)
gggagagcggcucggccauuuugucccagucaguccggaggcugcggcugcagaaguaccgccugcggaguaacugcaaagaagcuuaccauggagcugcccauccucaagaccaacgccauuacaacuauacuugcugcagugacgcugugcuucgccagcucccagaauaucaccgaagaguuuuaccaaucuacauguucagcggucaguaaaggcuauuugggggcuuuaagaacuggaugguacaccagcguuauuacaaucgaacuguccaacauuaaggagaucaaaugcaaugguaccgacgccaaggugaaacuaauaaagcaggaacucgauaaguauaaaaacgcaguaacugaccugcagcuucugaugcagucuacuccugccgcuggcucggggucagcaaucgccagcggaauugcuguguguaaggucuugcaccucgagggcgaggugaauaaaaucaagaacgcccugcugaguaccaauaaagcgguugugucccucucugguugcggggucagcguguuaacguucaagguacuggaucuuaagaacuacauugacaaacaauugcugccaauccuaaauaagcaguccuguucaauaccgaacauugaaacuguuaucgaguuucagcagaaaaauaacaggcuccuggaaauuacccgggaguucagugugaaugcaggagucacaacucccgugagcaccuauaugcuuacaaacucugagcuguugucccucaucaaugauaugccuaucaccaacgaccaaaagaaacugaugucaaacaaugugcagauuguccgccagcagagcuacaguauaaugugcaucauuaaggaagagguuuuagccuaugugguacaacugccacucuacggcgugaucgauacgcccuguuggaaacuucauacuucuccucugugcacaaccaacacuaaggaaggcuccaauauauguuugacacgaaccgaccgugggugguacugcgauaacgcuggaagcgucucguuuuucccacaggccgagacguguaaggugcagucuaauagaguuuucugcgacaccaugaacucccuaacacugcccucagaagugaaucucugcaacauugauaucuucaauccuaaauaugacuguaagaucaugacaaguaaaaccgaugucagcuccucugugauuacaagccugggugcaaucguaucaugcuacggcaagacuaaauguaccgcuaguaacaagugcagggggauuauaaagacauuuuccaauggaugugacuauguuagcaacaaaggcguggacaccgucucuguggguaauacucuuuacuaugucaacaagcaagaggggcagucacuguacgugaaaggagagccaaucauuaauuucuaugauccguugguuuuucccagugacgaauuugaugccagcaucucccaggugaacgagaagaucaaccagucucucgcguuuauucggaaaucggacgaacuguuacacaauguaaacgucggcaagagcacgacaaauauaaugaucaccacuauuaucauugugaucauaguuauccugcuacuccugauugccgugggccuuuucuuguacugcaaggcacgcuccaccccugucacacugucaaaagaucaacucagugggaucaacaauauugcuuucucuaacugaggacuaguggaagcauuuuccuggcugauuaaaagaaauuacucagcuauggucaucuguuccuguuagaaggcuaugcagcauauuauauacuaugcgcauguuaugaaaugcauaauaaaaaauuuuaaaaaaucuaaaagaucuaaaaaaaaaaaaaaaaaaaaaaaaaaaaaaaaaaaaaaaaaaaaaaaaaaaaaaaaaaaaaaaaugcaucccccccccccccccccccccccccccccccaaaggcucuuuucagagccaccagaauu

SEQ ID NO: 19335 - RNA, 1976 nt, Artificial Sequence
  mRNA product Design f-2 comprising derived and/or modified sequence from HRSV(Memphis-37)__AIY60640.1__F_DSCav1_mut8 (opt4)
gggagagcggcucggccauuuugucccagucaguccggaggcugcggcugcagaaguaccgccugcggaguaacugcaaagaagcuuaccauggagcugcccauccugaagaccaacgccaucaccaccauccuggccgccgugacccugugcuucgccagcagccagaacaucaccgaggaguucuaccagagcaccugcagcgccgugagcaagggcuaccugggcgcccugagaaccggcugguacaccagcgugaucaccaucgagcugagcaacaucaaggagaucaagugcaacggcaccgacgccaaggugaagcugaucaagcaggagcuggacaaguacaagaacgccgugaccgaccugcagcugcugaugcagagcacccccgccgccggcagcggcagcgccaucgccagcggcaucgccgugugcaaggugcugcaccuggagggcgaggugaacaagaucaagaacgcccugcugagcaccaacaaggccguggugagccugagcggcugcggcgugagcgugcugaccuucaaggugcuggaccugaagaacuacaucgacaagcagcugcugcccauccugaacaagcagagcugcagcauccccaacaucgagaccgugaucgaguuccagcagaagaacaacagacugcuggagaucaccagagaguucagcgugaacgccggcgugaccacccccgugagcaccuacaugcugaccaacagcgagcugcugagccugaucaacgacaugcccaucaccaacgaccagaagaagcugaugagcaacaacgugcagaucgugagacagcagagcuacagcaucaugugcaucaucaaggaggaggugcuggccuacguggugcagcugccccuguacggcgugaucgacacccccugcuggaagcugcacaccagcccccugugcaccaccaacaccaaggagggcagcaacaucugccugaccagaaccgacagaggcugguacugcgacaacgccggcagcgugagcuucuucccccaggccgagaccugcaaggugcagagcaacagaguguucugcgacaccaugaacagccugacccugcccagcgaggugaaccugugcaacaucgacaucuucaaccccaaguacgacugcaagaucaugaccagcaagaccgacgugagcagcagcgugaucaccagccugggcgccaucgugagcugcuacggcaagaccaagugcaccgccagcaacaagugcagaggcaucaucaagaccuucagcaacggcugcgacuacgugagcaacaagggcguggacaccgugagcgugggcaacacccuguacuacgugaacaagcaggagggccagagccuguacgugaagggcgagcccaucaucaacuucuacgacccccugguguuccccagcgacgaguucgacgccagcaucagccaggugaacgagaagaucaaccagagccuggccuucaucagaaagagcgacgagcugcugcacaacgugaacgugggcaagagcaccaccaacaucaugaucaccaccaucaucaucgugaucaucgugauccugcugcugcugaucgccgugggccuguuccuguacugcaaggccagaagcacccccgugacccugagcaaggaccagcugagcggcaucaacaacaucgccuucagcaacugaggacuaguggaagcauuuuccuggcugauuaaaagaaauuacucagcuauggucaucuguuccuguuagaaggcuaugcagcauauuauauacuaugcgcauguuaugaaaugcauaauaaaaaauuuuaaaaaaucuaaaagaucuaaaaaaaaaaaaaaaaaaaaaaaaaaaaaaaaaaaaaaaaaaaaaaaaaaaaaaaaaaaaaaaaugcaucccccccccccccccccccccccccccccccaaaggcucuuuucagagccaccagaauu

SEQ ID NO: 19336 - RNA, 1976 nt, Artificial Sequence
  mRNA product Design f-2 comprising derived and/or modified sequence from HRSV(Memphis-37)__AIY60640.1__F_DSCav1_mut8 (opt5)
gggagagcggcucggccauuuugucccagucaguccggaggcugcggcugcagaaguaccgccugcggaguaacugcaaagaagcuuaccauggagcugcccauccucaagaccaacgccauuacaacgauccuggcugccgugacccuuugcuucgcgagcucccagaauauuacagaagaguuuuaccaaucuaccuguagcgcugucuccaaaggcuaucugggggcccucagaacaggaugguacaccucuguuaucacaauugaacugagcaacaucaaggagaucaaaugcaauggcaccgacgccaaggugaaacuuauuaagcaggaacuggauaaguauaaaaacgcugugacggaccuccagcugcugaugcaguccaccccugccgcugggucuggaagcgccaucgcguccggcauugccgucuguaaggugcuccaccuggagggggagguuaauaaaaucaagaacgcccuucugagcacaaauaaagcuguggucucucucuccggaugcggcgugagcguucugaccuucaaggugcuugaucugaagaacuacauugacaaacaacuccugccgauccugaauaagcagucuuguuccauucccaacaucgaaacagucaucgaguuucagcagaaaaauaaccggcuccuggaaauuacccgcgaguucagcgugaaugcuggcgugacgacaccugucucuaccuauaugcuuacaaacuccgagcugcucagccugaucaaugauaugcccauuaccaacgaccaaaagaaacuuauguccaacaauguucagaucgugagacagcagucuuacagcauuaugugcaucaucaaggaagaggugcuggccuaugucgugcaacucccucuguacgggguuauugauacccccuguuggaaacugcauacauccccucucugcacgaccaacacaaaggaaggaagcaauaucugucugacccggacagaccgcggcugguacugcgauaacgcggggucuguguccuuuuucccgcaggccgagaccuguaagguccagagcaauagaguguuuugcgacacgaugaacucucuuacacugcccagcgaaguuaaucucugcaacauugauaucuucaauccuaaauaugacuguaagauuaugaccuccaaaaccgaugugucuagcuccgucaucacaagccugggagcuaucgugucuugcuacggcaagaccaaauguacagccuccaacaagugccgggggauuaucaagacguuuagcaauggaugugacuaugucucuaacaaaggcguggacaccguuuccgugggcaauacacuuuacuaugucaacaagcaagaggggcagagccuguacgugaaaggagagcccauuaucaauuucuaugauccucucguuuuucccuccgacgaguucgaugcuucuauuagccaggugaacgaaaagaucaaccagucccuggccuuuauucgcaaaucugacgaacugcuccacaaugucaacgugggcaagagcaccacaaauaucaugaucaccacgauuaucauugugaucauuguuauccugcuucugcucaucgccgucgggcuguuccuguacugcaaggcuagauccaccccggugacacuuagcaaagaucaacucucuggaauuaacaauaucgcguucuccaacugaggacuaguggaagcauuuuccuggcugauuaaaagaaauuacucagcuauggucaucuguuccuguuagaaggcuaugcagcauauuauauacuaugcgcauguuaugaaaugcauaauaaaaaauuuuaaaaaaucuaaaagaucuaaaaaaaaaaaaaaaaaaaaaaaaaaaaaaaaaaaaaaaaaaaaaaaaaaaaaaaaaaaaaaaaugcaucccccccccccccccccccccccccccccccaaaggcucuuuucagagccaccagaauu

SEQ ID NO: 19337 - RNA, 1976 nt, Artificial Sequence
  mRNA product Design f-2 comprising derived and/or modified sequence from HRSV(Memphis-37)__AIY60640.1__F_DSCav1_mut8 (opt6)
gggagagcggcucggccauuuugucccagucaguccggaggcugcggcugcagaaguaccgccugcggaguaacugcaaagaagcuuaccauggaacuuccuauuuuaaaaacaaacgcaauuacaaccauauuagcagcaguaacacuaugcuuugcaucaucacaaaacaucaccgaagaauuuuaucaauccacaugcucagcaguaucaaaaggauaccuuggcgcacuccgaacaggcugguauacaucggucauaacuauagaacucuccaacauaaaagaaauaaaaugcaaugguacugacgcaaaaguaaaauuaauaaaacaagaacuagacaaauacaaaaacgcaguaaccgauuuacaacuacuuaugcaaucaacaccugcagcaggaagcggaucagcaauagcaaguggaauagcaguaugcaaaguacuucaccucgaaggagaaguaaauaaaauaaaaaacgccuuacuaucaacaaauaaagccgucguaucacuuuccgguugcggcguaucaguauuaaccuuuaaagucuuagacuuaaaaaacuacauagacaaacaauuauuaccaauacuaaacaaacaauccuguuccauacccaacauagaaaccguaauagaauuucaacaaaaaaacaacagacuauuagaaauaacacgcgaauuuucaguaaacgcaggcguaacaacaccaguaucaacauauauguuaaccaauucagaauuauuaucccuuauaaaugacaugccuauaacaaacgaccaaaaaaaauuaaugaguaacaacguucaaauaguaagacaacaaucauacagcauaaugugcauaauaaaagaagaaguacuagcauacguaguucaacuaccacucuauggcguuaucgacaccccaugcuggaaacuacauaccucaccacucuguaccacuaauacgaaagaaggaucuaacauaugccuaaccagaacagaucgagguugguauugcgacaaugcuggaucaguaucauucuucccacaagcagaaaccugcaaaguacaaagcaacagaguauuuugugacacuaugaacucacuaacgcuaccuucagaaguaaaccuaugcaacaucgacauauucaacccaaaauacgauugcaaaauaaugacaucaaaaacagacguuuccucaucaguaauaacaucauuaggagcaauaguauccugcuacgguaaaaccaaaugcacagcauccaauaaaugccgaggaaucauuaaaacauuuucaaauggcugcgacuauguaaguaauaaagguguagauacaguaucaguaggcaacacacuauauuacguaaacaaacaagaagggcaaucccuauaugucaaaggcgaaccaauuauaaacuucuacgacccccucguauucccaucagacgaauuugacgcaucaauaucccaaguaaacgaaaaaaucaaccaaucacucgcauucauacguaaauccgacgaauuacuacauaacguaaacguaggcaaaucaacaacaaauauaaugauaacaaccauaaucauaguaauaauaguuauacuccuacuacucauugcagucggccuauuucuauacuguaaagcacgcucuacaccaguaacacuaucuaaagaucaauuauccggaauaaacaacauugccuucuccaauuaaggacuaguggaagcauuuuccuggcugauuaaaagaaauuacucagcuauggucaucuguuccuguuagaaggcuaugcagcauauuauauacuaugcgcauguuaugaaaugcauaauaaaaaauuuuaaaaaaucuaaaagaucuaaaaaaaaaaaaaaaaaaaaaaaaaaaaaaaaaaaaaaaaaaaaaaaaaaaaaaaaaaaaaaaaugcaucccccccccccccccccccccccccccccccaaaggcucuuuucagagccaccagaauu

SEQ ID NO: 19338 - RNA, 1976 nt, Artificial Sequence
  mRNA product Design f-2 comprising derived and/or modified sequence from HRSV(Memphis-37)__AIY60640.1__F_DSCav1_mut8 (opt11)
gggagagcggcucggccauuuugucccagucaguccggaggcugcggcugcagaaguaccgccugcggaguaacugcaaagaagcuuaccauggaacuucccauccugaagaccaacgcuaucacaaccauccucgccgcagucacccuuugcuucgccucaucccaaaacaucaccgaagaauuuuaccagucaaccugcucggccgucuccaagggcuaccucggcgcccuccgcacuggcugguacacauccgucaucaccaucgaacucuccaacauaaaagaaauaaaaugcaacggaaccgacgccaaagucaaacucaucaaacaagaacuagauaaauauaaaaacgccgucaccgaccugcaacuccucaugcaauccaccccagccgccggcucuggcagcgccaucgcaagcggaaucgccgucugcaaaguccuccaccuagaaggcgaagucaacaaaauuaaaaacgcccuccucuccaccaacaaagcaguugucucccucucuggcugcggagucucuguacucaccuucaaaguacuagaccucaagaauuacauagacaaacaacuccugcccauccuuaacaaacaaaguuguaguauccccaacaucgaaacaguaaucgaauuucagcagaaaaacaaccgccuccucgaaaucacacgagaguucucggucaacgccggcgucaccacccccguaucaaccuacaugcuaacaaacuccgaacuacuuucccucaucaaugacaugcccauaaccaacgaccaaaagaaacuaauguccaauaacguccagauaguccgucaacaguccuacucaaucaugugcauaauuaaagaagaaguacucgccuacgucguccaacuaccccucuauggagucaucgacacccccugcuggaaacuccacacaucaccccuaugcacaaccaacaccaaagaaggcuccaacaucugccucacaagaaccgaccgcggcugguacugcgacaacgcuggcuccgucucguucuucccacaagccgaaaccugcaaaguccaaucaaaccgggucuucugcgacaccaugaacucccucacucucccaagcgaagucaaccuaugcaacaucgacaucuucaacccaaaauacgacuguaaaaucaugacuucgaaaacagacgucuccucaucaguaaucacauccuuaggcgccaucguguccugcuacgguaagaccaaaugcacagccuccaacaaaugccggggcaucaucaaaaccuucagcaacgguugugauuacgucuccaacaaaggaguagacaccgucuccguaggaaacacccucuacuacgucaacaagcaagaaggccaaucccucuacgucaaaggggaacccaucaucaacuucuacgacccacucgucuuccccuccgacgaguucgacgcaagcaucucccaagucaacgaaaagaucaaccaaucacuagccuucauccgcaaauccgacgaacuccuccacaacguuaacguaggcaaauccaccaccaacaucaugaucacaaccaucaucauagucauaauagucauccuacuacuccucaucgccguaggucuauuccuauacuguaaagcucgaucaacccccgucacacucuccaaagaucaacucucaggaaucaacaacaucgccuucuccaacuaaggacuaguggaagcauuuuccuggcugauuaaaagaaauuacucagcuauggucaucuguuccuguuagaaggcuaugcagcauauuauauacuaugcgcauguuaugaaaugcauaauaaaaaauuuuaaaaaaucuaaaagaucuaaaaaaaaaaaaaaaaaaaaaaaaaaaaaaaaaaaaaaaaaaaaaaaaaaaaaaaaaaaaaaaaugcaucccccccccccccccccccccccccccccccaaaggcucuuuucagagccaccagaauu

SEQ ID NO: 19339 - RNA, 1967 nt, Artificial Sequence
  mRNA product Design f-3 comprising derived and/or modified sequence from HRSV(Memphis-37)__AIY60640.1__F_DSCav1_mut8 (opt1)
gggagagucccgcagucggcguccagcggcucugcuuguucgugugugugucguugcaggccuuauucaagcuuaccauggagcugcccauccucaagaccaacgccaucaccacgauccuggccgcggugacccugugcuucgccagcucccagaacaucaccgaggaguucuaccagagcacgugcuccgccgucagcaagggcuaccucggcgcccugcgcaccgggugguacaccagcgugaucaccaucgagcuguccaacaucaaggagaucaagugcaacggcaccgacgccaaggugaagcucaucaagcaggagcuggacaaguacaagaacgcggucacggaccugcagcuccugaugcagagcaccccggccgccggcuccgggagcgcgaucgccuccggcaucgccgucugcaaggugcugcaccucgagggcgaggugaacaagaucaagaacgcccugcuguccaccaacaaggccgucgugagccucuccggcugcggggugagcguccugaccuucaaggugcuggaccucaagaacuacaucgacaagcagcugcugcccauccugaacaagcagagcugcuccauccccaacaucgagaccgucaucgaguuccagcagaagaacaaccgccuccuggagaucacgcgggaguucagcgugaacgcgggcgugaccacccccgucuccaccuacaugcugacgaacagcgagcuccugucccugaucaacgacaugccgaucaccaacgaccagaagaagcucaugagcaacaacgugcagaucgugcgccagcaguccuacagcaucaugugcaucaucaaggaggagguccuggccuacguggugcagcugccccucuacggggucaucgacacccccugcuggaagcugcacaccagcccccugugcacgaccaacaccaaggagggcuccaacaucugccucacccggacggaccgcgggugguacugcgacaacgccggcagcguguccuucuucccgcaggccgagaccugcaagguccagagcaaccggguguucugcgacaccaugaacucccugacccugcccagcgaggugaaccucugcaacaucgacaucuucaaccccaaguacgacugcaagaucaugacguccaagaccgacgucagcuccagcgugaucaccucccugggcgccaucgugagcugcuacgggaagaccaagugcacggcgagcaacaagugccgcggcaucaucaagaccuucuccaacgggugcgacuacgucagcaacaagggcguggacaccguguccgucggcaacacccuguacuacgugaacaagcaggagggccagagccucuacgugaagggggagcccaucaucaacuucuacgacccgcuggucuuccccuccgacgaguucgacgccagcaucucccaggugaacgagaagaucaaccagagccuggccuucauccggaaguccgacgagcuccugcacaacgugaacgucggcaagagcaccacgaacaucaugaucaccaccaucaucaucgugaucaucgugauccugcugcuccugaucgccgucgggcuguuccucuacugcaaggcccgcuccacccccgugacgcugagcaaggaccagcuguccgggaucaacaacaucgcguucagcaacugaggacuaguacuggcugcaucucccuuuccucuguccuccauccuucucccaggauggugaagggggaccugguacccagugauccccaccccaggauccuaaaucaugacuuaccugcuaauaaaaacucauuggaaaagugagaagaucuaaaaaaaaaaaaaaaaaaaaaaaaaaaaaaaaaaaaaaaaaaaaaaaaaaaaaaaaaaaaaaaaugcaucccccccccccccccccccccccccccccccaaaggcucuuuucagagccaccagaauu

SEQ ID NO: 19340 - RNA, 1967 nt, Artificial Sequence
  mRNA product Design f-3 comprising derived and/or modified sequence from HRSV(Memphis-37)__AIY60640.1__F_DSCav1_mut8 (opt1)
gggagagucccgcagucggcguccagcggcucugcuuguucgugugugugucguugcaggccuuauucaagcuuaccauggagcugcccauccucaagaccaacgccaucaccacgauccuggccgcggugacccugugcuucgccagcucccagaacaucaccgaggaguucuaccagagcacgugcuccgccgucagcaagggcuaccucggggcccugcgcaccggcugguacaccuccgugaucaccaucgagcugagcaacaucaaggagaucaagugcaacgggaccgacgccaaggugaagcucaucaagcaggagcuggacaaguacaagaacgcggucacggaccugcagcuccugaugcaguccaccccggccgccggcagcggguccgccaucgcgagcggcaucgccgugugcaaggugcugcaccucgagggcgaggucaacaagaucaagaacgcccugcuguccaccaacaaggccguggugagccucuccgggugcggcgucagcgugcugaccuucaaggugcuggaccucaagaacuacaucgacaagcagcugcugcccauccucaacaagcaguccugcagcauccccaacaucgagacggucaucgaguuccagcagaagaacaaccggcugcuggagaucacccgcgaguucuccgugaacgccggggugaccacccccgucagcacguacaugcucaccaacuccgagcugcugagccucaucaacgacaugccgaucaccaacgaccagaagaagcugaugagcaacaacgugcagaucgugcggcagcaguccuacagcaucaugugcaucaucaaggaggagguccuggcguacguggugcagcucccccuguacggcgucaucgacacccccugcuggaagcugcacacgagcccccucugcaccaccaacaccaaggagggguccaacaucugccugacgcgcaccgaccggggcugguacugcgacaacgccggcuccgugagcuucuucccgcaggccgagaccugcaaggugcaguccaaccgcgucuucugcgacaccaugaacagccugacgcuccccuccgaggugaaccugugcaacaucgacaucuucaaccccaaguacgacugcaagaucaugaccagcaagaccgacgucuccagcuccgugaucaccagccugggggccaucguguccugcuacggcaagacgaagugcaccgccagcaacaagugccgggggaucaucaagaccuucuccaacggcugcgacuacgucagcaacaagggcguggacaccguguccgucgggaacacgcucuacuacgugaacaagcaggagggccagagccuguacgugaagggggagcccaucaucaacuucuacgacccgcuggucuuccccagcgacgaguucgacgcguccaucagccaggugaacgagaagaucaaccagucccucgccuucauccgcaagagcgacgagcugcugcacaacgugaacgucggcaaguccaccaccaacaucaugaucaccaccaucaucaucgugaucaucgugauccuccugcugcucaucgccgucgggcuguuccuguacugcaaggcccggagcacgcccgugacccuguccaaggaccagcucagcggcaucaacaacaucgccuucuccaacugaggacuaguacuggcugcaucucccuuuccucuguccuccauccuucucccaggauggugaagggggaccugguacccagugauccccaccccaggauccuaaaucaugacuuaccugcuaauaaaaacucauuggaaaagugagaagaucuaaaaaaaaaaaaaaaaaaaaaaaaaaaaaaaaaaaaaaaaaaaaaaaaaaaaaaaaaaaaaaaaugcaucccccccccccccccccccccccccccccccaaaggcucuuuucagagccaccagaauu

SEQ ID NO: 19341 - RNA, 1967 nt, Artificial Sequence
  mRNA product Design f-3 comprising derived and/or modified sequence from HRSV(Memphis-37)__AIY60640.1__F_DSCav1_mut8 (opt2)
gggagagucccgcagucggcguccagcggcucugcuuguucgugugugugucguugcaggccuuauucaagcuuaccauggagcuccccauccucaagaccaacgccaucaccaccauccucgccgccgucacccucugcuucgccuccucccagaacaucaccgaggaguucuaccaguccaccugcuccgccgucuccaagggcuaccucggcgcccuccgcaccggcugguacaccuccgucaucaccaucgagcucuccaacaucaaggagaucaagugcaacggcaccgacgccaaggucaagcucaucaagcaggagcucgacaaguacaagaacgccgucaccgaccuccagcuccucaugcaguccacccccgccgccggcuccggcuccgccaucgccuccggcaucgccgucugcaagguccuccaccucgagggcgaggucaacaagaucaagaacgcccuccucuccaccaacaaggccgucgucucccucuccggcugcggcgucuccguccucaccuucaagguccucgaccucaagaacuacaucgacaagcagcuccuccccauccucaacaagcaguccugcuccauccccaacaucgagaccgucaucgaguuccagcagaagaacaaccgccuccucgagaucacccgcgaguucuccgucaacgccggcgucaccacccccgucuccaccuacaugcucaccaacuccgagcuccucucccucaucaacgacaugcccaucaccaacgaccagaagaagcucauguccaacaacguccagaucguccgccagcaguccuacuccaucaugugcaucaucaaggaggagguccucgccuacgucguccagcucccccucuacggcgucaucgacacccccugcuggaagcuccacaccuccccccucugcaccaccaacaccaaggagggcuccaacaucugccucacccgcaccgaccgcggcugguacugcgacaacgccggcuccgucuccuucuucccccaggccgagaccugcaagguccaguccaaccgcgucuucugcgacaccaugaacucccucacccuccccuccgaggucaaccucugcaacaucgacaucuucaaccccaaguacgacugcaagaucaugaccuccaagaccgacgucuccuccuccgucaucaccucccucggcgccaucgucuccugcuacggcaagaccaagugcaccgccuccaacaagugccgcggcaucaucaagaccuucuccaacggcugcgacuacgucuccaacaagggcgucgacaccgucuccgucggcaacacccucuacuacgucaacaagcaggagggccagucccucuacgucaagggcgagcccaucaucaacuucuacgacccccucgucuuccccuccgacgaguucgacgccuccaucucccaggucaacgagaagaucaaccagucccucgccuucauccgcaaguccgacgagcuccuccacaacgucaacgucggcaaguccaccaccaacaucaugaucaccaccaucaucaucgucaucaucgucauccuccuccuccucaucgccgucggccucuuccucuacugcaaggcccgcuccacccccgucacccucuccaaggaccagcucuccggcaucaacaacaucgccuucuccaacugaggacuaguacuggcugcaucucccuuuccucuguccuccauccuucucccaggauggugaagggggaccugguacccagugauccccaccccaggauccuaaaucaugacuuaccugcuaauaaaaacucauuggaaaagugagaagaucuaaaaaaaaaaaaaaaaaaaaaaaaaaaaaaaaaaaaaaaaaaaaaaaaaaaaaaaaaaaaaaaaugcaucccccccccccccccccccccccccccccccaaaggcucuuuucagagccaccagaauu

SEQ ID NO: 19342 - RNA, 1967 nt, Artificial Sequence
  mRNA product Design f-3 comprising derived and/or modified sequence from HRSV(Memphis-37)__AIY60640.1__F_DSCav1_mut8 (opt3)
gggagagucccgcagucggcguccagcggcucugcuuguucgugugugugucguugcaggccuuauucaagcuuaccauggagcugcccauccucaagaccaacgccauuacaacuauacuugcugcagugacgcugugcuucgccagcucccagaauaucaccgaagaguuuuaccaaucuacauguucagcggucaguaaaggcuauuugggggcuuuaagaacuggaugguacaccagcguuauuacaaucgaacuguccaacauuaaggagaucaaaugcaaugguaccgacgccaaggugaaacuaauaaagcaggaacucgauaaguauaaaaacgcaguaacugaccugcagcuucugaugcagucuacuccugccgcuggcucggggucagcaaucgccagcggaauugcuguguguaaggucuugcaccucgagggcgaggugaauaaaaucaagaacgcccugcugaguaccaauaaagcgguugugucccucucugguugcggggucagcguguuaacguucaagguacuggaucuuaagaacuacauugacaaacaauugcugccaauccuaaauaagcaguccuguucaauaccgaacauugaaacuguuaucgaguuucagcagaaaaauaacaggcuccuggaaauuacccgggaguucagugugaaugcaggagucacaacucccgugagcaccuauaugcuuacaaacucugagcuguugucccucaucaaugauaugccuaucaccaacgaccaaaagaaacugaugucaaacaaugugcagauuguccgccagcagagcuacaguauaaugugcaucauuaaggaagagguuuuagccuaugugguacaacugccacucuacggcgugaucgauacgcccuguuggaaacuucauacuucuccucugugcacaaccaacacuaaggaaggcuccaauauauguuugacacgaaccgaccgugggugguacugcgauaacgcuggaagcgucucguuuuucccacaggccgagacguguaaggugcagucuaauagaguuuucugcgacaccaugaacucccuaacacugcccucagaagugaaucucugcaacauugauaucuucaauccuaaauaugacuguaagaucaugacaaguaaaaccgaugucagcuccucugugauuacaagccugggugcaaucguaucaugcuacggcaagacuaaauguaccgcuaguaacaagugcagggggauuauaaagacauuuuccaauggaugugacuauguuagcaacaaaggcguggacaccgucucuguggguaauacucuuuacuaugucaacaagcaagaggggcagucacuguacgugaaaggagagccaaucauuaauuucuaugauccguugguuuuucccagugacgaauuugaugccagcaucucccaggugaacgagaagaucaaccagucucucgcguuuauucggaaaucggacgaacuguuacacaauguaaacgucggcaagagcacgacaaauauaaugaucaccacuauuaucauugugaucauaguuauccugcuacuccugauugccgugggccuuuucuuguacugcaaggcacgcuccaccccugucacacugucaaaagaucaacucagugggaucaacaauauugcuuucucuaacugaggacuaguacuggcugcaucucccuuuccucuguccuccauccuucucccaggauggugaagggggaccugguacccagugauccccaccccaggauccuaaaucaugacuuaccugcuaauaaaaacucauuggaaaagugagaagaucuaaaaaaaaaaaaaaaaaaaaaaaaaaaaaaaaaaaaaaaaaaaaaaaaaaaaaaaaaaaaaaaaugcaucccccccccccccccccccccccccccccccaaaggcucuuuucagagccaccagaauu

SEQ ID NO: 19343 - RNA, 1967 nt, Artificial Sequence
  mRNA product Design f-3 comprising derived and/or modified sequence from HRSV(Memphis-37)__AIY60640.1__F_DSCav1_mut8 (opt4)
gggagagucccgcagucggcguccagcggcucugcuuguucgugugugugucguugcaggccuuauucaagcuuaccauggagcugcccauccugaagaccaacgccaucaccaccauccuggccgccgugacccugugcuucgccagcagccagaacaucaccgaggaguucuaccagagcaccugcagcgccgugagcaagggcuaccugggcgcccugagaaccggcugguacaccagcgugaucaccaucgagcugagcaacaucaaggagaucaagugcaacggcaccgacgccaaggugaagcugaucaagcaggagcuggacaaguacaagaacgccgugaccgaccugcagcugcugaugcagagcacccccgccgccggcagcggcagcgccaucgccagcggcaucgccgugugcaaggugcugcaccuggagggcgaggugaacaagaucaagaacgcccugcugagcaccaacaaggccguggugagccugagcggcugcggcgugagcgugcugaccuucaaggugcuggaccugaagaacuacaucgacaagcagcugcugcccauccugaacaagcagagcugcagcauccccaacaucgagaccgugaucgaguuccagcagaagaacaacagacugcuggagaucaccagagaguucagcgugaacgccggcgugaccacccccgugagcaccuacaugcugaccaacagcgagcugcugagccugaucaacgacaugcccaucaccaacgaccagaagaagcugaugagcaacaacgugcagaucgugagacagcagagcuacagcaucaugugcaucaucaaggaggaggugcuggccuacguggugcagcugccccuguacggcgugaucgacacccccugcuggaagcugcacaccagcccccugugcaccaccaacaccaaggagggcagcaacaucugccugaccagaaccgacagaggcugguacugcgacaacgccggcagcgugagcuucuucccccaggccgagaccugcaaggugcagagcaacagaguguucugcgacaccaugaacagccugacccugcccagcgaggugaaccugugcaacaucgacaucuucaaccccaaguacgacugcaagaucaugaccagcaagaccgacgugagcagcagcgugaucaccagccugggcgccaucgugagcugcuacggcaagaccaagugcaccgccagcaacaagugcagaggcaucaucaagaccuucagcaacggcugcgacuacgugagcaacaagggcguggacaccgugagcgugggcaacacccuguacuacgugaacaagcaggagggccagagccuguacgugaagggcgagcccaucaucaacuucuacgacccccugguguuccccagcgacgaguucgacgccagcaucagccaggugaacgagaagaucaaccagagccuggccuucaucagaaagagcgacgagcugcugcacaacgugaacgugggcaagagcaccaccaacaucaugaucaccaccaucaucaucgugaucaucgugauccugcugcugcugaucgccgugggccuguuccuguacugcaaggccagaagcacccccgugacccugagcaaggaccagcugagcggcaucaacaacaucgccuucagcaacugaggacuaguacuggcugcaucucccuuuccucuguccuccauccuucucccaggauggugaagggggaccugguacccagugauccccaccccaggauccuaaaucaugacuuaccugcuaauaaaaacucauuggaaaagugagaagaucuaaaaaaaaaaaaaaaaaaaaaaaaaaaaaaaaaaaaaaaaaaaaaaaaaaaaaaaaaaaaaaaaugcaucccccccccccccccccccccccccccccccaaaggcucuuuucagagccaccagaauu

SEQ ID NO: 19344 - RNA, 1967 nt, Artificial Sequence
  mRNA product Design f-3 comprising derived and/or modified sequence from HRSV(Memphis-37)__AIY60640.1__F_DSCav1_mut8 (opt5)
gggagagucccgcagucggcguccagcggcucugcuuguucgugugugugucguugcaggccuuauucaagcuuaccauggagcugcccauccucaagaccaacgccauuacaacgauccuggcugccgugacccuuugcuucgcgagcucccagaauauuacagaagaguuuuaccaaucuaccuguagcgcugucuccaaaggcuaucugggggcccucagaacaggaugguacaccucuguuaucacaauugaacugagcaacaucaaggagaucaaaugcaauggcaccgacgccaaggugaaacuuauuaagcaggaacuggauaaguauaaaaacgcugugacggaccuccagcugcugaugcaguccaccccugccgcugggucuggaagcgccaucgcguccggcauugccgucuguaaggugcuccaccuggagggggagguuaauaaaaucaagaacgcccuucugagcacaaauaaagcuguggucucucucuccggaugcggcgugagcguucugaccuucaaggugcuugaucugaagaacuacauugacaaacaacuccugccgauccugaauaagcagucuuguuccauucccaacaucgaaacagucaucgaguuucagcagaaaaauaaccggcuccuggaaauuacccgcgaguucagcgugaaugcuggcgugacgacaccugucucuaccuauaugcuuacaaacuccgagcugcucagccugaucaaugauaugcccauuaccaacgaccaaaagaaacuuauguccaacaauguucagaucgugagacagcagucuuacagcauuaugugcaucaucaaggaagaggugcuggccuaugucgugcaacucccucuguacgggguuauugauacccccuguuggaaacugcauacauccccucucugcacgaccaacacaaaggaaggaagcaauaucugucugacccggacagaccgcggcugguacugcgauaacgcggggucuguguccuuuuucccgcaggccgagaccuguaagguccagagcaauagaguguuuugcgacacgaugaacucucuuacacugcccagcgaaguuaaucucugcaacauugauaucuucaauccuaaauaugacuguaagauuaugaccuccaaaaccgaugugucuagcuccgucaucacaagccugggagcuaucgugucuugcuacggcaagaccaaauguacagccuccaacaagugccgggggauuaucaagacguuuagcaauggaugugacuaugucucuaacaaaggcguggacaccguuuccgugggcaauacacuuuacuaugucaacaagcaagaggggcagagccuguacgugaaaggagagcccauuaucaauuucuaugauccucucguuuuucccuccgacgaguucgaugcuucuauuagccaggugaacgaaaagaucaaccagucccuggccuuuauucgcaaaucugacgaacugcuccacaaugucaacgugggcaagagcaccacaaauaucaugaucaccacgauuaucauugugaucauuguuauccugcuucugcucaucgccgucgggcuguuccuguacugcaaggcuagauccaccccggugacacuuagcaaagaucaacucucuggaauuaacaauaucgcguucuccaacugaggacuaguacuggcugcaucucccuuuccucuguccuccauccuucucccaggauggugaagggggaccugguacccagugauccccaccccaggauccuaaaucaugacuuaccugcuaauaaaaacucauuggaaaagugagaagaucuaaaaaaaaaaaaaaaaaaaaaaaaaaaaaaaaaaaaaaaaaaaaaaaaaaaaaaaaaaaaaaaaugcaucccccccccccccccccccccccccccccccaaaggcucuuuucagagccaccagaauu

SEQ ID NO: 19345 - RNA, 1967 nt, Artificial Sequence
  mRNA product Design f-3 comprising derived and/or modified sequence from HRSV(Memphis-37)__AIY60640.1__F_DSCav1_mut8 (opt6)
gggagagucccgcagucggcguccagcggcucugcuuguucgugugugugucguugcaggccuuauucaagcuuaccauggaacuuccuauuuuaaaaacaaacgcaauuacaaccauauuagcagcaguaacacuaugcuuugcaucaucacaaaacaucaccgaagaauuuuaucaauccacaugcucagcaguaucaaaaggauaccuuggcgcacuccgaacaggcugguauacaucggucauaacuauagaacucuccaacauaaaagaaauaaaaugcaaugguacugacgcaaaaguaaaauuaauaaaacaagaacuagacaaauacaaaaacgcaguaaccgauuuacaacuacuuaugcaaucaacaccugcagcaggaagcggaucagcaauagcaaguggaauagcaguaugcaaaguacuucaccucgaaggagaaguaaauaaaauaaaaaacgccuuacuaucaacaaauaaagccgucguaucacuuuccgguugcggcguaucaguauuaaccuuuaaagucuuagacuuaaaaaacuacauagacaaacaauuauuaccaauacuaaacaaacaauccuguuccauacccaacauagaaaccguaauagaauuucaacaaaaaaacaacagacuauuagaaauaacacgcgaauuuucaguaaacgcaggcguaacaacaccaguaucaacauauauguuaaccaauucagaauuauuaucccuuauaaaugacaugccuauaacaaacgaccaaaaaaaauuaaugaguaacaacguucaaauaguaagacaacaaucauacagcauaaugugcauaauaaaagaagaaguacuagcauacguaguucaacuaccacucuauggcguuaucgacaccccaugcuggaaacuacauaccucaccacucuguaccacuaauacgaaagaaggaucuaacauaugccuaaccagaacagaucgagguugguauugcgacaaugcuggaucaguaucauucuucccacaagcagaaaccugcaaaguacaaagcaacagaguauuuugugacacuaugaacucacuaacgcuaccuucagaaguaaaccuaugcaacaucgacauauucaacccaaaauacgauugcaaaauaaugacaucaaaaacagacguuuccucaucaguaauaacaucauuaggagcaauaguauccugcuacgguaaaaccaaaugcacagcauccaauaaaugccgaggaaucauuaaaacauuuucaaauggcugcgacuauguaaguaauaaagguguagauacaguaucaguaggcaacacacuauauuacguaaacaaacaagaagggcaaucccuauaugucaaaggcgaaccaauuauaaacuucuacgacccccucguauucccaucagacgaauuugacgcaucaauaucccaaguaaacgaaaaaaucaaccaaucacucgcauucauacguaaauccgacgaauuacuacauaacguaaacguaggcaaaucaacaacaaauauaaugauaacaaccauaaucauaguaauaauaguuauacuccuacuacucauugcagucggccuauuucuauacuguaaagcacgcucuacaccaguaacacuaucuaaagaucaauuauccggaauaaacaacauugccuucuccaauuaaggacuaguacuggcugcaucucccuuuccucuguccuccauccuucucccaggauggugaagggggaccugguacccagugauccccaccccaggauccuaaaucaugacuuaccugcuaauaaaaacucauuggaaaagugagaagaucuaaaaaaaaaaaaaaaaaaaaaaaaaaaaaaaaaaaaaaaaaaaaaaaaaaaaaaaaaaaaaaaaugcaucccccccccccccccccccccccccccccccaaaggcucuuuucagagccaccagaauu

SEQ ID NO: 19346 - RNA, 1967 nt, Artificial Sequence
  mRNA product Design f-3 comprising derived and/or modified sequence from HRSV(Memphis-37)__AIY60640.1__F_DSCav1_mut8 (opt11)
gggagagucccgcagucggcguccagcggcucugcuuguucgugugugugucguugcaggccuuauucaagcuuaccauggaacuucccauccugaagaccaacgcuaucacaaccauccucgccgcagucacccuuugcuucgccucaucccaaaacaucaccgaagaauuuuaccagucaaccugcucggccgucuccaagggcuaccucggcgcccuccgcacuggcugguacacauccgucaucaccaucgaacucuccaacauaaaagaaauaaaaugcaacggaaccgacgccaaagucaaacucaucaaacaagaacuagauaaauauaaaaacgccgucaccgaccugcaacuccucaugcaauccaccccagccgccggcucuggcagcgccaucgcaagcggaaucgccgucugcaaaguccuccaccuagaaggcgaagucaacaaaauuaaaaacgcccuccucuccaccaacaaagcaguugucucccucucuggcugcggagucucuguacucaccuucaaaguacuagaccucaagaauuacauagacaaacaacuccugcccauccuuaacaaacaaaguuguaguauccccaacaucgaaacaguaaucgaauuucagcagaaaaacaaccgccuccucgaaaucacacgagaguucucggucaacgccggcgucaccacccccguaucaaccuacaugcuaacaaacuccgaacuacuuucccucaucaaugacaugcccauaaccaacgaccaaaagaaacuaauguccaauaacguccagauaguccgucaacaguccuacucaaucaugugcauaauuaaagaagaaguacucgccuacgucguccaacuaccccucuauggagucaucgacacccccugcuggaaacuccacacaucaccccuaugcacaaccaacaccaaagaaggcuccaacaucugccucacaagaaccgaccgcggcugguacugcgacaacgcuggcuccgucucguucuucccacaagccgaaaccugcaaaguccaaucaaaccgggucuucugcgacaccaugaacucccucacucucccaagcgaagucaaccuaugcaacaucgacaucuucaacccaaaauacgacuguaaaaucaugacuucgaaaacagacgucuccucaucaguaaucacauccuuaggcgccaucguguccugcuacgguaagaccaaaugcacagccuccaacaaaugccggggcaucaucaaaaccuucagcaacgguugugauuacgucuccaacaaaggaguagacaccgucuccguaggaaacacccucuacuacgucaacaagcaagaaggccaaucccucuacgucaaaggggaacccaucaucaacuucuacgacccacucgucuuccccuccgacgaguucgacgcaagcaucucccaagucaacgaaaagaucaaccaaucacuagccuucauccgcaaauccgacgaacuccuccacaacguuaacguaggcaaauccaccaccaacaucaugaucacaaccaucaucauagucauaauagucauccuacuacuccucaucgccguaggucuauuccuauacuguaaagcucgaucaacccccgucacacucuccaaagaucaacucucaggaaucaacaacaucgccuucuccaacuaaggacuaguacuggcugcaucucccuuuccucuguccuccauccuucucccaggauggugaagggggaccugguacccagugauccccaccccaggauccuaaaucaugacuuaccugcuaauaaaaacucauuggaaaagugagaagaucuaaaaaaaaaaaaaaaaaaaaaaaaaaaaaaaaaaaaaaaaaaaaaaaaaaaaaaaaaaaaaaaaugcaucccccccccccccccccccccccccccccccaaaggcucuuuucagagccaccagaauu

SEQ ID NO: 19347 - RNA, 2183 nt, Artificial Sequence
  mRNA product Design f-4 comprising derived and/or modified sequence from HRSV(Memphis-37)__AIY60640.1__F_DSCav1_mut8 (opt1)
gggagagucccgcagucggcguccagcggcucugcuuguucgugugugugucguugcaggccuuauucaagcuuaccauggagcugcccauccucaagaccaacgccaucaccacgauccuggccgcggugacccugugcuucgccagcucccagaacaucaccgaggaguucuaccagagcacgugcuccgccgucagcaagggcuaccucggcgcccugcgcaccgggugguacaccagcgugaucaccaucgagcuguccaacaucaaggagaucaagugcaacggcaccgacgccaaggugaagcucaucaagcaggagcuggacaaguacaagaacgcggucacggaccugcagcuccugaugcagagcaccccggccgccggcuccgggagcgcgaucgccuccggcaucgccgucugcaaggugcugcaccucgagggcgaggugaacaagaucaagaacgcccugcuguccaccaacaaggccgucgugagccucuccggcugcggggugagcguccugaccuucaaggugcuggaccucaagaacuacaucgacaagcagcugcugcccauccugaacaagcagagcugcuccauccccaacaucgagaccgucaucgaguuccagcagaagaacaaccgccuccuggagaucacgcgggaguucagcgugaacgcgggcgugaccacccccgucuccaccuacaugcugacgaacagcgagcuccugucccugaucaacgacaugccgaucaccaacgaccagaagaagcucaugagcaacaacgugcagaucgugcgccagcaguccuacagcaucaugugcaucaucaaggaggagguccuggccuacguggugcagcugccccucuacggggucaucgacacccccugcuggaagcugcacaccagcccccugugcacgaccaacaccaaggagggcuccaacaucugccucacccggacggaccgcgggugguacugcgacaacgccggcagcguguccuucuucccgcaggccgagaccugcaagguccagagcaaccggguguucugcgacaccaugaacucccugacccugcccagcgaggugaaccucugcaacaucgacaucuucaaccccaaguacgacugcaagaucaugacguccaagaccgacgucagcuccagcgugaucaccucccugggcgccaucgugagcugcuacgggaagaccaagugcacggcgagcaacaagugccgcggcaucaucaagaccuucuccaacgggugcgacuacgucagcaacaagggcguggacaccguguccgucggcaacacccuguacuacgugaacaagcaggagggccagagccucuacgugaagggggagcccaucaucaacuucuacgacccgcuggucuuccccuccgacgaguucgacgccagcaucucccaggugaacgagaagaucaaccagagccuggccuucauccggaaguccgacgagcuccugcacaacgugaacgucggcaagagcaccacgaacaucaugaucaccaccaucaucaucgugaucaucgugauccugcugcuccugaucgccgucgggcuguuccucuacugcaaggcccgcuccacccccgugacgcugagcaaggaccagcuguccgggaucaacaacaucgcguucagcaacugaggacuagugaagggaacacccaaauuuaauucagccuuaagcacaauuaauuaagagugaaacguaauuguacaagcaguuggucacccaccauagggcaugaucaacaccgcaaccuuuccuuuuucccccagugauucugaaaaaccccucuucccuucagcuugcuuagauguuccaaauuuaguaagcuuaaggcggccuacagaagaaaaagaaaaaaaaggccacaaaaguucccucucacuuucaguaaauaaaauaaaagcagcaacagaaauaaagaaauaaaugaaauucaaaaugaaauaaauauuguguugugcagcauuaaaaaaucaauaaaaauuaaaaaugagcaagaucuaaaaaaaaaaaaaaaaaaaaaaaaaaaaaaaaaaaaaaaaaaaaaaaaaaaaaaaaaaaaaaaaugcaucccccccccccccccccccccccccccccccaaaggcucuuuucagagccaccagaauu

SEQ ID NO: 19348 - RNA, 2183 nt, Artificial Sequence
  mRNA product Design f-4 comprising derived and/or modified sequence from HRSV(Memphis-37)__AIY60640.1__F_DSCav1_mut8 (opt1)
gggagagucccgcagucggcguccagcggcucugcuuguucgugugugugucguugcaggccuuauucaagcuuaccauggagcugcccauccucaagaccaacgccaucaccacgauccuggccgcggugacccugugcuucgccagcucccagaacaucaccgaggaguucuaccagagcacgugcuccgccgucagcaagggcuaccucggggcccugcgcaccggcugguacaccuccgugaucaccaucgagcugagcaacaucaaggagaucaagugcaacgggaccgacgccaaggugaagcucaucaagcaggagcuggacaaguacaagaacgcggucacggaccugcagcuccugaugcaguccaccccggccgccggcagcggguccgccaucgcgagcggcaucgccgugugcaaggugcugcaccucgagggcgaggucaacaagaucaagaacgcccugcuguccaccaacaaggccguggugagccucuccgggugcggcgucagcgugcugaccuucaaggugcuggaccucaagaacuacaucgacaagcagcugcugcccauccucaacaagcaguccugcagcauccccaacaucgagacggucaucgaguuccagcagaagaacaaccggcugcuggagaucacccgcgaguucuccgugaacgccggggugaccacccccgucagcacguacaugcucaccaacuccgagcugcugagccucaucaacgacaugccgaucaccaacgaccagaagaagcugaugagcaacaacgugcagaucgugcggcagcaguccuacagcaucaugugcaucaucaaggaggagguccuggcguacguggugcagcucccccuguacggcgucaucgacacccccugcuggaagcugcacacgagcccccucugcaccaccaacaccaaggagggguccaacaucugccugacgcgcaccgaccggggcugguacugcgacaacgccggcuccgugagcuucuucccgcaggccgagaccugcaaggugcaguccaaccgcgucuucugcgacaccaugaacagccugacgcuccccuccgaggugaaccugugcaacaucgacaucuucaaccccaaguacgacugcaagaucaugaccagcaagaccgacgucuccagcuccgugaucaccagccugggggccaucguguccugcuacggcaagacgaagugcaccgccagcaacaagugccgggggaucaucaagaccuucuccaacggcugcgacuacgucagcaacaagggcguggacaccguguccgucgggaacacgcucuacuacgugaacaagcaggagggccagagccuguacgugaagggggagcccaucaucaacuucuacgacccgcuggucuuccccagcgacgaguucgacgcguccaucagccaggugaacgagaagaucaaccagucccucgccuucauccgcaagagcgacgagcugcugcacaacgugaacgucggcaaguccaccaccaacaucaugaucaccaccaucaucaucgugaucaucgugauccuccugcugcucaucgccgucgggcuguuccuguacugcaaggcccggagcacgcccgugacccuguccaaggaccagcucagcggcaucaacaacaucgccuucuccaacugaggacuagugaagggaacacccaaauuuaauucagccuuaagcacaauuaauuaagagugaaacguaauuguacaagcaguuggucacccaccauagggcaugaucaacaccgcaaccuuuccuuuuucccccagugauucugaaaaaccccucuucccuucagcuugcuuagauguuccaaauuuaguaagcuuaaggcggccuacagaagaaaaagaaaaaaaaggccacaaaaguucccucucacuuucaguaaauaaaauaaaagcagcaacagaaauaaagaaauaaaugaaauucaaaaugaaauaaauauuguguugugcagcauuaaaaaaucaauaaaaauuaaaaaugagcaagaucuaaaaaaaaaaaaaaaaaaaaaaaaaaaaaaaaaaaaaaaaaaaaaaaaaaaaaaaaaaaaaaaaugcaucccccccccccccccccccccccccccccccaaaggcucuuuucagagccaccagaauu

SEQ ID NO: 19349 - RNA, 2183 nt, Artificial Sequence
  mRNA product Design f-4 comprising derived and/or modified sequence from HRSV(Memphis-37)__AIY60640.1__F_DSCav1_mut8 (opt2)
gggagagucccgcagucggcguccagcggcucugcuuguucgugugugugucguugcaggccuuauucaagcuuaccauggagcuccccauccucaagaccaacgccaucaccaccauccucgccgccgucacccucugcuucgccuccucccagaacaucaccgaggaguucuaccaguccaccugcuccgccgucuccaagggcuaccucggcgcccuccgcaccggcugguacaccuccgucaucaccaucgagcucuccaacaucaaggagaucaagugcaacggcaccgacgccaaggucaagcucaucaagcaggagcucgacaaguacaagaacgccgucaccgaccuccagcuccucaugcaguccacccccgccgccggcuccggcuccgccaucgccuccggcaucgccgucugcaagguccuccaccucgagggcgaggucaacaagaucaagaacgcccuccucuccaccaacaaggccgucgucucccucuccggcugcggcgucuccguccucaccuucaagguccucgaccucaagaacuacaucgacaagcagcuccuccccauccucaacaagcaguccugcuccauccccaacaucgagaccgucaucgaguuccagcagaagaacaaccgccuccucgagaucacccgcgaguucuccgucaacgccggcgucaccacccccgucuccaccuacaugcucaccaacuccgagcuccucucccucaucaacgacaugcccaucaccaacgaccagaagaagcucauguccaacaacguccagaucguccgccagcaguccuacuccaucaugugcaucaucaaggaggagguccucgccuacgucguccagcucccccucuacggcgucaucgacacccccugcuggaagcuccacaccuccccccucugcaccaccaacaccaaggagggcuccaacaucugccucacccgcaccgaccgcggcugguacugcgacaacgccggcuccgucuccuucuucccccaggccgagaccugcaagguccaguccaaccgcgucuucugcgacaccaugaacucccucacccuccccuccgaggucaaccucugcaacaucgacaucuucaaccccaaguacgacugcaagaucaugaccuccaagaccgacgucuccuccuccgucaucaccucccucggcgccaucgucuccugcuacggcaagaccaagugcaccgccuccaacaagugccgcggcaucaucaagaccuucuccaacggcugcgacuacgucuccaacaagggcgucgacaccgucuccgucggcaacacccucuacuacgucaacaagcaggagggccagucccucuacgucaagggcgagcccaucaucaacuucuacgacccccucgucuuccccuccgacgaguucgacgccuccaucucccaggucaacgagaagaucaaccagucccucgccuucauccgcaaguccgacgagcuccuccacaacgucaacgucggcaaguccaccaccaacaucaugaucaccaccaucaucaucgucaucaucgucauccuccuccuccucaucgccgucggccucuuccucuacugcaaggcccgcuccacccccgucacccucuccaaggaccagcucuccggcaucaacaacaucgccuucuccaacugaggacuagugaagggaacacccaaauuuaauucagccuuaagcacaauuaauuaagagugaaacguaauuguacaagcaguuggucacccaccauagggcaugaucaacaccgcaaccuuuccuuuuucccccagugauucugaaaaaccccucuucccuucagcuugcuuagauguuccaaauuuaguaagcuuaaggcggccuacagaagaaaaagaaaaaaaaggccacaaaaguucccucucacuuucaguaaauaaaauaaaagcagcaacagaaauaaagaaauaaaugaaauucaaaaugaaauaaauauuguguugugcagcauuaaaaaaucaauaaaaauuaaaaaugagcaagaucuaaaaaaaaaaaaaaaaaaaaaaaaaaaaaaaaaaaaaaaaaaaaaaaaaaaaaaaaaaaaaaaaugcaucccccccccccccccccccccccccccccccaaaggcucuuuucagagccaccagaauu

SEQ ID NO: 19350 - RNA, 2183 nt, Artificial Sequence
  mRNA product Design f-4 comprising derived and/or modified sequence from HRSV(Memphis-37)__AIY60640.1__F_DSCav1_mut8 (opt3)
gggagagucccgcagucggcguccagcggcucugcuuguucgugugugugucguugcaggccuuauucaagcuuaccauggagcugcccauccucaagaccaacgccauuacaacuauacuugcugcagugacgcugugcuucgccagcucccagaauaucaccgaagaguuuuaccaaucuacauguucagcggucaguaaaggcuauuugggggcuuuaagaacuggaugguacaccagcguuauuacaaucgaacuguccaacauuaaggagaucaaaugcaaugguaccgacgccaaggugaaacuaauaaagcaggaacucgauaaguauaaaaacgcaguaacugaccugcagcuucugaugcagucuacuccugccgcuggcucggggucagcaaucgccagcggaauugcuguguguaaggucuugcaccucgagggcgaggugaauaaaaucaagaacgcccugcugaguaccaauaaagcgguugugucccucucugguugcggggucagcguguuaacguucaagguacuggaucuuaagaacuacauugacaaacaauugcugccaauccuaaauaagcaguccuguucaauaccgaacauugaaacuguuaucgaguuucagcagaaaaauaacaggcuccuggaaauuacccgggaguucagugugaaugcaggagucacaacucccgugagcaccuauaugcuuacaaacucugagcuguugucccucaucaaugauaugccuaucaccaacgaccaaaagaaacugaugucaaacaaugugcagauuguccgccagcagagcuacaguauaaugugcaucauuaaggaagagguuuuagccuaugugguacaacugccacucuacggcgugaucgauacgcccuguuggaaacuucauacuucuccucugugcacaaccaacacuaaggaaggcuccaauauauguuugacacgaaccgaccgugggugguacugcgauaacgcuggaagcgucucguuuuucccacaggccgagacguguaaggugcagucuaauagaguuuucugcgacaccaugaacucccuaacacugcccucagaagugaaucucugcaacauugauaucuucaauccuaaauaugacuguaagaucaugacaaguaaaaccgaugucagcuccucugugauuacaagccugggugcaaucguaucaugcuacggcaagacuaaauguaccgcuaguaacaagugcagggggauuauaaagacauuuuccaauggaugugacuauguuagcaacaaaggcguggacaccgucucuguggguaauacucuuuacuaugucaacaagcaagaggggcagucacuguacgugaaaggagagccaaucauuaauuucuaugauccguugguuuuucccagugacgaauuugaugccagcaucucccaggugaacgagaagaucaaccagucucucgcguuuauucggaaaucggacgaacuguuacacaauguaaacgucggcaagagcacgacaaauauaaugaucaccacuauuaucauugugaucauaguuauccugcuacuccugauugccgugggccuuuucuuguacugcaaggcacgcuccaccccugucacacugucaaaagaucaacucagugggaucaacaauauugcuuucucuaacugaggacuagugaagggaacacccaaauuuaauucagccuuaagcacaauuaauuaagagugaaacguaauuguacaagcaguuggucacccaccauagggcaugaucaacaccgcaaccuuuccuuuuucccccagugauucugaaaaaccccucuucccuucagcuugcuuagauguuccaaauuuaguaagcuuaaggcggccuacagaagaaaaagaaaaaaaaggccacaaaaguucccucucacuuucaguaaauaaaauaaaagcagcaacagaaauaaagaaauaaaugaaauucaaaaugaaauaaauauuguguugugcagcauuaaaaaaucaauaaaaauuaaaaaugagcaagaucuaaaaaaaaaaaaaaaaaaaaaaaaaaaaaaaaaaaaaaaaaaaaaaaaaaaaaaaaaaaaaaaaugcaucccccccccccccccccccccccccccccccaaaggcucuuuucagagccaccagaauu

SEQ ID NO: 19351 - RNA, 2183 nt, Artificial Sequence
  mRNA product Design f-4 comprising derived and/or modified sequence from HRSV(Memphis-37)__AIY60640.1__F_DSCav1_mut8 (opt4)
gggagagucccgcagucggcguccagcggcucugcuuguucgugugugugucguugcaggccuuauucaagcuuaccauggagcugcccauccugaagaccaacgccaucaccaccauccuggccgccgugacccugugcuucgccagcagccagaacaucaccgaggaguucuaccagagcaccugcagcgccgugagcaagggcuaccugggcgcccugagaaccggcugguacaccagcgugaucaccaucgagcugagcaacaucaaggagaucaagugcaacggcaccgacgccaaggugaagcugaucaagcaggagcuggacaaguacaagaacgccgugaccgaccugcagcugcugaugcagagcacccccgccgccggcagcggcagcgccaucgccagcggcaucgccgugugcaaggugcugcaccuggagggcgaggugaacaagaucaagaacgcccugcugagcaccaacaaggccguggugagccugagcggcugcggcgugagcgugcugaccuucaaggugcuggaccugaagaacuacaucgacaagcagcugcugcccauccugaacaagcagagcugcagcauccccaacaucgagaccgugaucgaguuccagcagaagaacaacagacugcuggagaucaccagagaguucagcgugaacgccggcgugaccacccccgugagcaccuacaugcugaccaacagcgagcugcugagccugaucaacgacaugcccaucaccaacgaccagaagaagcugaugagcaacaacgugcagaucgugagacagcagagcuacagcaucaugugcaucaucaaggaggaggugcuggccuacguggugcagcugccccuguacggcgugaucgacacccccugcuggaagcugcacaccagcccccugugcaccaccaacaccaaggagggcagcaacaucugccugaccagaaccgacagaggcugguacugcgacaacgccggcagcgugagcuucuucccccaggccgagaccugcaaggugcagagcaacagaguguucugcgacaccaugaacagccugacccugcccagcgaggugaaccugugcaacaucgacaucuucaaccccaaguacgacugcaagaucaugaccagcaagaccgacgugagcagcagcgugaucaccagccugggcgccaucgugagcugcuacggcaagaccaagugcaccgccagcaacaagugcagaggcaucaucaagaccuucagcaacggcugcgacuacgugagcaacaagggcguggacaccgugagcgugggcaacacccuguacuacgugaacaagcaggagggccagagccuguacgugaagggcgagcccaucaucaacuucuacgacccccugguguuccccagcgacgaguucgacgccagcaucagccaggugaacgagaagaucaaccagagccuggccuucaucagaaagagcgacgagcugcugcacaacgugaacgugggcaagagcaccaccaacaucaugaucaccaccaucaucaucgugaucaucgugauccugcugcugcugaucgccgugggccuguuccuguacugcaaggccagaagcacccccgugacccugagcaaggaccagcugagcggcaucaacaacaucgccuucagcaacugaggacuagugaagggaacacccaaauuuaauucagccuuaagcacaauuaauuaagagugaaacguaauuguacaagcaguuggucacccaccauagggcaugaucaacaccgcaaccuuuccuuuuucccccagugauucugaaaaaccccucuucccuucagcuugcuuagauguuccaaauuuaguaagcuuaaggcggccuacagaagaaaaagaaaaaaaaggccacaaaaguucccucucacuuucaguaaauaaaauaaaagcagcaacagaaauaaagaaauaaaugaaauucaaaaugaaauaaauauuguguugugcagcauuaaaaaaucaauaaaaauuaaaaaugagcaagaucuaaaaaaaaaaaaaaaaaaaaaaaaaaaaaaaaaaaaaaaaaaaaaaaaaaaaaaaaaaaaaaaaugcaucccccccccccccccccccccccccccccccaaaggcucuuuucagagccaccagaauu

SEQ ID NO: 19352 - RNA, 2183 nt, Artificial Sequence
  mRNA product Design f-4 comprising derived and/or modified sequence from HRSV(Memphis-37)__AIY60640.1__F_DSCav1_mut8 (opt5)
gggagagucccgcagucggcguccagcggcucugcuuguucgugugugugucguugcaggccuuauucaagcuuaccauggagcugcccauccucaagaccaacgccauuacaacgauccuggcugccgugacccuuugcuucgcgagcucccagaauauuacagaagaguuuuaccaaucuaccuguagcgcugucuccaaaggcuaucugggggcccucagaacaggaugguacaccucuguuaucacaauugaacugagcaacaucaaggagaucaaaugcaauggcaccgacgccaaggugaaacuuauuaagcaggaacuggauaaguauaaaaacgcugugacggaccuccagcugcugaugcaguccaccccugccgcugggucuggaagcgccaucgcguccggcauugccgucuguaaggugcuccaccuggagggggagguuaauaaaaucaagaacgcccuucugagcacaaauaaagcuguggucucucucuccggaugcggcgugagcguucugaccuucaaggugcuugaucugaagaacuacauugacaaacaacuccugccgauccugaauaagcagucuuguuccauucccaacaucgaaacagucaucgaguuucagcagaaaaauaaccggcuccuggaaauuacccgcgaguucagcgugaaugcuggcgugacgacaccugucucuaccuauaugcuuacaaacuccgagcugcucagccugaucaaugauaugcccauuaccaacgaccaaaagaaacuuauguccaacaauguucagaucgugagacagcagucuuacagcauuaugugcaucaucaaggaagaggugcuggccuaugucgugcaacucccucuguacgggguuauugauacccccuguuggaaacugcauacauccccucucugcacgaccaacacaaaggaaggaagcaauaucugucugacccggacagaccgcggcugguacugcgauaacgcggggucuguguccuuuuucccgcaggccgagaccuguaagguccagagcaauagaguguuuugcgacacgaugaacucucuuacacugcccagcgaaguuaaucucugcaacauugauaucuucaauccuaaauaugacuguaagauuaugaccuccaaaaccgaugugucuagcuccgucaucacaagccugggagcuaucgugucuugcuacggcaagaccaaauguacagccuccaacaagugccgggggauuaucaagacguuuagcaauggaugugacuaugucucuaacaaaggcguggacaccguuuccgugggcaauacacuuuacuaugucaacaagcaagaggggcagagccuguacgugaaaggagagcccauuaucaauuucuaugauccucucguuuuucccuccgacgaguucgaugcuucuauuagccaggugaacgaaaagaucaaccagucccuggccuuuauucgcaaaucugacgaacugcuccacaaugucaacgugggcaagagcaccacaaauaucaugaucaccacgauuaucauugugaucauuguuauccugcuucugcucaucgccgucgggcuguuccuguacugcaaggcuagauccaccccggugacacuuagcaaagaucaacucucuggaauuaacaauaucgcguucuccaacugaggacuagugaagggaacacccaaauuuaauucagccuuaagcacaauuaauuaagagugaaacguaauuguacaagcaguuggucacccaccauagggcaugaucaacaccgcaaccuuuccuuuuucccccagugauucugaaaaaccccucuucccuucagcuugcuuagauguuccaaauuuaguaagcuuaaggcggccuacagaagaaaaagaaaaaaaaggccacaaaaguucccucucacuuucaguaaauaaaauaaaagcagcaacagaaauaaagaaauaaaugaaauucaaaaugaaauaaauauuguguugugcagcauuaaaaaaucaauaaaaauuaaaaaugagcaagaucuaaaaaaaaaaaaaaaaaaaaaaaaaaaaaaaaaaaaaaaaaaaaaaaaaaaaaaaaaaaaaaaaugcaucccccccccccccccccccccccccccccccaaaggcucuuuucagagccaccagaauu

SEQ ID NO: 19353 - RNA, 2183 nt, Artificial Sequence
  mRNA product Design f-4 comprising derived and/or modified sequence from HRSV(Memphis-37)__AIY60640.1__F_DSCav1_mut8 (opt6)
gggagagucccgcagucggcguccagcggcucugcuuguucgugugugugucguugcaggccuuauucaagcuuaccauggaacuuccuauuuuaaaaacaaacgcaauuacaaccauauuagcagcaguaacacuaugcuuugcaucaucacaaaacaucaccgaagaauuuuaucaauccacaugcucagcaguaucaaaaggauaccuuggcgcacuccgaacaggcugguauacaucggucauaacuauagaacucuccaacauaaaagaaauaaaaugcaaugguacugacgcaaaaguaaaauuaauaaaacaagaacuagacaaauacaaaaacgcaguaaccgauuuacaacuacuuaugcaaucaacaccugcagcaggaagcggaucagcaauagcaaguggaauagcaguaugcaaaguacuucaccucgaaggagaaguaaauaaaauaaaaaacgccuuacuaucaacaaauaaagccgucguaucacuuuccgguugcggcguaucaguauuaaccuuuaaagucuuagacuuaaaaaacuacauagacaaacaauuauuaccaauacuaaacaaacaauccuguuccauacccaacauagaaaccguaauagaauuucaacaaaaaaacaacagacuauuagaaauaacacgcgaauuuucaguaaacgcaggcguaacaacaccaguaucaacauauauguuaaccaauucagaauuauuaucccuuauaaaugacaugccuauaacaaacgaccaaaaaaaauuaaugaguaacaacguucaaauaguaagacaacaaucauacagcauaaugugcauaauaaaagaagaaguacuagcauacguaguucaacuaccacucuauggcguuaucgacaccccaugcuggaaacuacauaccucaccacucuguaccacuaauacgaaagaaggaucuaacauaugccuaaccagaacagaucgagguugguauugcgacaaugcuggaucaguaucauucuucccacaagcagaaaccugcaaaguacaaagcaacagaguauuuugugacacuaugaacucacuaacgcuaccuucagaaguaaaccuaugcaacaucgacauauucaacccaaaauacgauugcaaaauaaugacaucaaaaacagacguuuccucaucaguaauaacaucauuaggagcaauaguauccugcuacgguaaaaccaaaugcacagcauccaauaaaugccgaggaaucauuaaaacauuuucaaauggcugcgacuauguaaguaauaaagguguagauacaguaucaguaggcaacacacuauauuacguaaacaaacaagaagggcaaucccuauaugucaaaggcgaaccaauuauaaacuucuacgacccccucguauucccaucagacgaauuugacgcaucaauaucccaaguaaacgaaaaaaucaaccaaucacucgcauucauacguaaauccgacgaauuacuacauaacguaaacguaggcaaaucaacaacaaauauaaugauaacaaccauaaucauaguaauaauaguuauacuccuacuacucauugcagucggccuauuucuauacuguaaagcacgcucuacaccaguaacacuaucuaaagaucaauuauccggaauaaacaacauugccuucuccaauuaaggacuagugaagggaacacccaaauuuaauucagccuuaagcacaauuaauuaagagugaaacguaauuguacaagcaguuggucacccaccauagggcaugaucaacaccgcaaccuuuccuuuuucccccagugauucugaaaaaccccucuucccuucagcuugcuuagauguuccaaauuuaguaagcuuaaggcggccuacagaagaaaaagaaaaaaaaggccacaaaaguucccucucacuuucaguaaauaaaauaaaagcagcaacagaaauaaagaaauaaaugaaauucaaaaugaaauaaauauuguguugugcagcauuaaaaaaucaauaaaaauuaaaaaugagcaagaucuaaaaaaaaaaaaaaaaaaaaaaaaaaaaaaaaaaaaaaaaaaaaaaaaaaaaaaaaaaaaaaaaugcaucccccccccccccccccccccccccccccccaaaggcucuuuucagagccaccagaauu

SEQ ID NO: 19354 - RNA, 2183 nt, Artificial Sequence
  mRNA product Design f-4 comprising derived and/or modified sequence from HRSV(Memphis-37)__AIY60640.1__F_DSCav1_mut8 (opt11)
gggagagucccgcagucggcguccagcggcucugcuuguucgugugugugucguugcaggccuuauucaagcuuaccauggaacuucccauccugaagaccaacgcuaucacaaccauccucgccgcagucacccuuugcuucgccucaucccaaaacaucaccgaagaauuuuaccagucaaccugcucggccgucuccaagggcuaccucggcgcccuccgcacuggcugguacacauccgucaucaccaucgaacucuccaacauaaaagaaauaaaaugcaacggaaccgacgccaaagucaaacucaucaaacaagaacuagauaaauauaaaaacgccgucaccgaccugcaacuccucaugcaauccaccccagccgccggcucuggcagcgccaucgcaagcggaaucgccgucugcaaaguccuccaccuagaaggcgaagucaacaaaauuaaaaacgcccuccucuccaccaacaaagcaguugucucccucucuggcugcggagucucuguacucaccuucaaaguacuagaccucaagaauuacauagacaaacaacuccugcccauccuuaacaaacaaaguuguaguauccccaacaucgaaacaguaaucgaauuucagcagaaaaacaaccgccuccucgaaaucacacgagaguucucggucaacgccggcgucaccacccccguaucaaccuacaugcuaacaaacuccgaacuacuuucccucaucaaugacaugcccauaaccaacgaccaaaagaaacuaauguccaauaacguccagauaguccgucaacaguccuacucaaucaugugcauaauuaaagaagaaguacucgccuacgucguccaacuaccccucuauggagucaucgacacccccugcuggaaacuccacacaucaccccuaugcacaaccaacaccaaagaaggcuccaacaucugccucacaagaaccgaccgcggcugguacugcgacaacgcuggcuccgucucguucuucccacaagccgaaaccugcaaaguccaaucaaaccgggucuucugcgacaccaugaacucccucacucucccaagcgaagucaaccuaugcaacaucgacaucuucaacccaaaauacgacuguaaaaucaugacuucgaaaacagacgucuccucaucaguaaucacauccuuaggcgccaucguguccugcuacgguaagaccaaaugcacagccuccaacaaaugccggggcaucaucaaaaccuucagcaacgguugugauuacgucuccaacaaaggaguagacaccgucuccguaggaaacacccucuacuacgucaacaagcaagaaggccaaucccucuacgucaaaggggaacccaucaucaacuucuacgacccacucgucuuccccuccgacgaguucgacgcaagcaucucccaagucaacgaaaagaucaaccaaucacuagccuucauccgcaaauccgacgaacuccuccacaacguuaacguaggcaaauccaccaccaacaucaugaucacaaccaucaucauagucauaauagucauccuacuacuccucaucgccguaggucuauuccuauacuguaaagcucgaucaacccccgucacacucuccaaagaucaacucucaggaaucaacaacaucgccuucuccaacuaaggacuagugaagggaacacccaaauuuaauucagccuuaagcacaauuaauuaagagugaaacguaauuguacaagcaguuggucacccaccauagggcaugaucaacaccgcaaccuuuccuuuuucccccagugauucugaaaaaccccucuucccuucagcuugcuuagauguuccaaauuuaguaagcuuaaggcggccuacagaagaaaaagaaaaaaaaggccacaaaaguucccucucacuuucaguaaauaaaauaaaagcagcaacagaaauaaagaaauaaaugaaauucaaaaugaaauaaauauuguguugugcagcauuaaaaaaucaauaaaaauuaaaaaugagcaagaucuaaaaaaaaaaaaaaaaaaaaaaaaaaaaaaaaaaaaaaaaaaaaaaaaaaaaaaaaaaaaaaaaugcaucccccccccccccccccccccccccccccccaaaggcucuuuucagagccaccagaauu

SEQ ID NO: 19355 - RNA, 1959 nt, Artificial Sequence
  mRNA product Design f-5 comprising derived and/or modified sequence from HRSV(Memphis-37)__AIY60640.1__F_DSCav1_mut8 (opt1)
gggagacuuucccauucuguagcagaauuugguguugccuguggucuuggucccgcggagaagcuuaccauggagcugcccauccucaagaccaacgccaucaccacgauccuggccgcggugacccugugcuucgccagcucccagaacaucaccgaggaguucuaccagagcacgugcuccgccgucagcaagggcuaccucggcgcccugcgcaccgggugguacaccagcgugaucaccaucgagcuguccaacaucaaggagaucaagugcaacggcaccgacgccaaggugaagcucaucaagcaggagcuggacaaguacaagaacgcggucacggaccugcagcuccugaugcagagcaccccggccgccggcuccgggagcgcgaucgccuccggcaucgccgucugcaaggugcugcaccucgagggcgaggugaacaagaucaagaacgcccugcuguccaccaacaaggccgucgugagccucuccggcugcggggugagcguccugaccuucaaggugcuggaccucaagaacuacaucgacaagcagcugcugcccauccugaacaagcagagcugcuccauccccaacaucgagaccgucaucgaguuccagcagaagaacaaccgccuccuggagaucacgcgggaguucagcgugaacgcgggcgugaccacccccgucuccaccuacaugcugacgaacagcgagcuccugucccugaucaacgacaugccgaucaccaacgaccagaagaagcucaugagcaacaacgugcagaucgugcgccagcaguccuacagcaucaugugcaucaucaaggaggagguccuggccuacguggugcagcugccccucuacggggucaucgacacccccugcuggaagcugcacaccagcccccugugcacgaccaacaccaaggagggcuccaacaucugccucacccggacggaccgcgggugguacugcgacaacgccggcagcguguccuucuucccgcaggccgagaccugcaagguccagagcaaccggguguucugcgacaccaugaacucccugacccugcccagcgaggugaaccucugcaacaucgacaucuucaaccccaaguacgacugcaagaucaugacguccaagaccgacgucagcuccagcgugaucaccucccugggcgccaucgugagcugcuacgggaagaccaagugcacggcgagcaacaagugccgcggcaucaucaagaccuucuccaacgggugcgacuacgucagcaacaagggcguggacaccguguccgucggcaacacccuguacuacgugaacaagcaggagggccagagccucuacgugaagggggagcccaucaucaacuucuacgacccgcuggucuuccccuccgacgaguucgacgccagcaucucccaggugaacgagaagaucaaccagagccuggccuucauccggaaguccgacgagcuccugcacaacgugaacgucggcaagagcaccacgaacaucaugaucaccaccaucaucaucgugaucaucgugauccugcugcuccugaucgccgucgggcuguuccucuacugcaaggcccgcuccacccccgugacgcugagcaaggaccagcuguccgggaucaacaacaucgcguucagcaacugaggacuaguacuggcugcaucucccuuuccucuguccuccauccuucucccaggauggugaagggggaccugguacccagugauccccaccccaggauccuaaaucaugacuuaccugcuaauaaaaacucauuggaaaagugagaagaucuaaaaaaaaaaaaaaaaaaaaaaaaaaaaaaaaaaaaaaaaaaaaaaaaaaaaaaaaaaaaaaaaugcaucccccccccccccccccccccccccccccccaaaggcucuuuucagagccaccagaauu

SEQ ID NO: 19356 - RNA, 1959 nt, Artificial Sequence
  mRNA product Design f-5 comprising derived and/or modified sequence from HRSV(Memphis-37)__AIY60640.1__F_DSCav1_mut8 (opt1)
gggagacuuucccauucuguagcagaauuugguguugccuguggucuuggucccgcggagaagcuuaccauggagcugcccauccucaagaccaacgccaucaccacgauccuggccgcggugacccugugcuucgccagcucccagaacaucaccgaggaguucuaccagagcacgugcuccgccgucagcaagggcuaccucggggcccugcgcaccggcugguacaccuccgugaucaccaucgagcugagcaacaucaaggagaucaagugcaacgggaccgacgccaaggugaagcucaucaagcaggagcuggacaaguacaagaacgcggucacggaccugcagcuccugaugcaguccaccccggccgccggcagcggguccgccaucgcgagcggcaucgccgugugcaaggugcugcaccucgagggcgaggucaacaagaucaagaacgcccugcuguccaccaacaaggccguggugagccucuccgggugcggcgucagcgugcugaccuucaaggugcuggaccucaagaacuacaucgacaagcagcugcugcccauccucaacaagcaguccugcagcauccccaacaucgagacggucaucgaguuccagcagaagaacaaccggcugcuggagaucacccgcgaguucuccgugaacgccggggugaccacccccgucagcacguacaugcucaccaacuccgagcugcugagccucaucaacgacaugccgaucaccaacgaccagaagaagcugaugagcaacaacgugcagaucgugcggcagcaguccuacagcaucaugugcaucaucaaggaggagguccuggcguacguggugcagcucccccuguacggcgucaucgacacccccugcuggaagcugcacacgagcccccucugcaccaccaacaccaaggagggguccaacaucugccugacgcgcaccgaccggggcugguacugcgacaacgccggcuccgugagcuucuucccgcaggccgagaccugcaaggugcaguccaaccgcgucuucugcgacaccaugaacagccugacgcuccccuccgaggugaaccugugcaacaucgacaucuucaaccccaaguacgacugcaagaucaugaccagcaagaccgacgucuccagcuccgugaucaccagccugggggccaucguguccugcuacggcaagacgaagugcaccgccagcaacaagugccgggggaucaucaagaccuucuccaacggcugcgacuacgucagcaacaagggcguggacaccguguccgucgggaacacgcucuacuacgugaacaagcaggagggccagagccuguacgugaagggggagcccaucaucaacuucuacgacccgcuggucuuccccagcgacgaguucgacgcguccaucagccaggugaacgagaagaucaaccagucccucgccuucauccgcaagagcgacgagcugcugcacaacgugaacgucggcaaguccaccaccaacaucaugaucaccaccaucaucaucgugaucaucgugauccuccugcugcucaucgccgucgggcuguuccuguacugcaaggcccggagcacgcccgugacccuguccaaggaccagcucagcggcaucaacaacaucgccuucuccaacugaggacuaguacuggcugcaucucccuuuccucuguccuccauccuucucccaggauggugaagggggaccugguacccagugauccccaccccaggauccuaaaucaugacuuaccugcuaauaaaaacucauuggaaaagugagaagaucuaaaaaaaaaaaaaaaaaaaaaaaaaaaaaaaaaaaaaaaaaaaaaaaaaaaaaaaaaaaaaaaaugcaucccccccccccccccccccccccccccccccaaaggcucuuuucagagccaccagaauu

SEQ ID NO: 19357 - RNA, 1959 nt, Artificial Sequence
  mRNA product Design f-5 comprising derived and/or modified sequence from HRSV(Memphis-37)__AIY60640.1__F_DSCav1_mut8 (opt2)
gggagacuuucccauucuguagcagaauuugguguugccuguggucuuggucccgcggagaagcuuaccauggagcuccccauccucaagaccaacgccaucaccaccauccucgccgccgucacccucugcuucgccuccucccagaacaucaccgaggaguucuaccaguccaccugcuccgccgucuccaagggcuaccucggcgcccuccgcaccggcugguacaccuccgucaucaccaucgagcucuccaacaucaaggagaucaagugcaacggcaccgacgccaaggucaagcucaucaagcaggagcucgacaaguacaagaacgccgucaccgaccuccagcuccucaugcaguccacccccgccgccggcuccggcuccgccaucgccuccggcaucgccgucugcaagguccuccaccucgagggcgaggucaacaagaucaagaacgcccuccucuccaccaacaaggccgucgucucccucuccggcugcggcgucuccguccucaccuucaagguccucgaccucaagaacuacaucgacaagcagcuccuccccauccucaacaagcaguccugcuccauccccaacaucgagaccgucaucgaguuccagcagaagaacaaccgccuccucgagaucacccgcgaguucuccgucaacgccggcgucaccacccccgucuccaccuacaugcucaccaacuccgagcuccucucccucaucaacgacaugcccaucaccaacgaccagaagaagcucauguccaacaacguccagaucguccgccagcaguccuacuccaucaugugcaucaucaaggaggagguccucgccuacgucguccagcucccccucuacggcgucaucgacacccccugcuggaagcuccacaccuccccccucugcaccaccaacaccaaggagggcuccaacaucugccucacccgcaccgaccgcggcugguacugcgacaacgccggcuccgucuccuucuucccccaggccgagaccugcaagguccaguccaaccgcgucuucugcgacaccaugaacucccucacccuccccuccgaggucaaccucugcaacaucgacaucuucaaccccaaguacgacugcaagaucaugaccuccaagaccgacgucuccuccuccgucaucaccucccucggcgccaucgucuccugcuacggcaagaccaagugcaccgccuccaacaagugccgcggcaucaucaagaccuucuccaacggcugcgacuacgucuccaacaagggcgucgacaccgucuccgucggcaacacccucuacuacgucaacaagcaggagggccagucccucuacgucaagggcgagcccaucaucaacuucuacgacccccucgucuuccccuccgacgaguucgacgccuccaucucccaggucaacgagaagaucaaccagucccucgccuucauccgcaaguccgacgagcuccuccacaacgucaacgucggcaaguccaccaccaacaucaugaucaccaccaucaucaucgucaucaucgucauccuccuccuccucaucgccgucggccucuuccucuacugcaaggcccgcuccacccccgucacccucuccaaggaccagcucuccggcaucaacaacaucgccuucuccaacugaggacuaguacuggcugcaucucccuuuccucuguccuccauccuucucccaggauggugaagggggaccugguacccagugauccccaccccaggauccuaaaucaugacuuaccugcuaauaaaaacucauuggaaaagugagaagaucuaaaaaaaaaaaaaaaaaaaaaaaaaaaaaaaaaaaaaaaaaaaaaaaaaaaaaaaaaaaaaaaaugcaucccccccccccccccccccccccccccccccaaaggcucuuuucagagccaccagaauu

SEQ ID NO: 19358 - RNA, 1959 nt, Artificial Sequence
  mRNA product Design f-5 comprising derived and/or modified sequence from HRSV(Memphis-37)__AIY60640.1__F_DSCav1_mut8 (opt3)
gggagacuuucccauucuguagcagaauuugguguugccuguggucuuggucccgcggagaagcuuaccauggagcugcccauccucaagaccaacgccauuacaacuauacuugcugcagugacgcugugcuucgccagcucccagaauaucaccgaagaguuuuaccaaucuacauguucagcggucaguaaaggcuauuugggggcuuuaagaacuggaugguacaccagcguuauuacaaucgaacuguccaacauuaaggagaucaaaugcaaugguaccgacgccaaggugaaacuaauaaagcaggaacucgauaaguauaaaaacgcaguaacugaccugcagcuucugaugcagucuacuccugccgcuggcucggggucagcaaucgccagcggaauugcuguguguaaggucuugcaccucgagggcgaggugaauaaaaucaagaacgcccugcugaguaccaauaaagcgguugugucccucucugguugcggggucagcguguuaacguucaagguacuggaucuuaagaacuacauugacaaacaauugcugccaauccuaaauaagcaguccuguucaauaccgaacauugaaacuguuaucgaguuucagcagaaaaauaacaggcuccuggaaauuacccgggaguucagugugaaugcaggagucacaacucccgugagcaccuauaugcuuacaaacucugagcuguugucccucaucaaugauaugccuaucaccaacgaccaaaagaaacugaugucaaacaaugugcagauuguccgccagcagagcuacaguauaaugugcaucauuaaggaagagguuuuagccuaugugguacaacugccacucuacggcgugaucgauacgcccuguuggaaacuucauacuucuccucugugcacaaccaacacuaaggaaggcuccaauauauguuugacacgaaccgaccgugggugguacugcgauaacgcuggaagcgucucguuuuucccacaggccgagacguguaaggugcagucuaauagaguuuucugcgacaccaugaacucccuaacacugcccucagaagugaaucucugcaacauugauaucuucaauccuaaauaugacuguaagaucaugacaaguaaaaccgaugucagcuccucugugauuacaagccugggugcaaucguaucaugcuacggcaagacuaaauguaccgcuaguaacaagugcagggggauuauaaagacauuuuccaauggaugugacuauguuagcaacaaaggcguggacaccgucucuguggguaauacucuuuacuaugucaacaagcaagaggggcagucacuguacgugaaaggagagccaaucauuaauuucuaugauccguugguuuuucccagugacgaauuugaugccagcaucucccaggugaacgagaagaucaaccagucucucgcguuuauucggaaaucggacgaacuguuacacaauguaaacgucggcaagagcacgacaaauauaaugaucaccacuauuaucauugugaucauaguuauccugcuacuccugauugccgugggccuuuucuuguacugcaaggcacgcuccaccccugucacacugucaaaagaucaacucagugggaucaacaauauugcuuucucuaacugaggacuaguacuggcugcaucucccuuuccucuguccuccauccuucucccaggauggugaagggggaccugguacccagugauccccaccccaggauccuaaaucaugacuuaccugcuaauaaaaacucauuggaaaagugagaagaucuaaaaaaaaaaaaaaaaaaaaaaaaaaaaaaaaaaaaaaaaaaaaaaaaaaaaaaaaaaaaaaaaugcaucccccccccccccccccccccccccccccccaaaggcucuuuucagagccaccagaauu

SEQ ID NO: 19359 - RNA, 1959 nt, Artificial Sequence
  mRNA product Design f-5 comprising derived and/or modified sequence from HRSV(Memphis-37)__AIY60640.1__F_DSCav1_mut8 (opt4)
gggagacuuucccauucuguagcagaauuugguguugccuguggucuuggucccgcggagaagcuuaccauggagcugcccauccugaagaccaacgccaucaccaccauccuggccgccgugacccugugcuucgccagcagccagaacaucaccgaggaguucuaccagagcaccugcagcgccgugagcaagggcuaccugggcgcccugagaaccggcugguacaccagcgugaucaccaucgagcugagcaacaucaaggagaucaagugcaacggcaccgacgccaaggugaagcugaucaagcaggagcuggacaaguacaagaacgccgugaccgaccugcagcugcugaugcagagcacccccgccgccggcagcggcagcgccaucgccagcggcaucgccgugugcaaggugcugcaccuggagggcgaggugaacaagaucaagaacgcccugcugagcaccaacaaggccguggugagccugagcggcugcggcgugagcgugcugaccuucaaggugcuggaccugaagaacuacaucgacaagcagcugcugcccauccugaacaagcagagcugcagcauccccaacaucgagaccgugaucgaguuccagcagaagaacaacagacugcuggagaucaccagagaguucagcgugaacgccggcgugaccacccccgugagcaccuacaugcugaccaacagcgagcugcugagccugaucaacgacaugcccaucaccaacgaccagaagaagcugaugagcaacaacgugcagaucgugagacagcagagcuacagcaucaugugcaucaucaaggaggaggugcuggccuacguggugcagcugccccuguacggcgugaucgacacccccugcuggaagcugcacaccagcccccugugcaccaccaacaccaaggagggcagcaacaucugccugaccagaaccgacagaggcugguacugcgacaacgccggcagcgugagcuucuucccccaggccgagaccugcaaggugcagagcaacagaguguucugcgacaccaugaacagccugacccugcccagcgaggugaaccugugcaacaucgacaucuucaaccccaaguacgacugcaagaucaugaccagcaagaccgacgugagcagcagcgugaucaccagccugggcgccaucgugagcugcuacggcaagaccaagugcaccgccagcaacaagugcagaggcaucaucaagaccuucagcaacggcugcgacuacgugagcaacaagggcguggacaccgugagcgugggcaacacccuguacuacgugaacaagcaggagggccagagccuguacgugaagggcgagcccaucaucaacuucuacgacccccugguguuccccagcgacgaguucgacgccagcaucagccaggugaacgagaagaucaaccagagccuggccuucaucagaaagagcgacgagcugcugcacaacgugaacgugggcaagagcaccaccaacaucaugaucaccaccaucaucaucgugaucaucgugauccugcugcugcugaucgccgugggccuguuccuguacugcaaggccagaagcacccccgugacccugagcaaggaccagcugagcggcaucaacaacaucgccuucagcaacugaggacuaguacuggcugcaucucccuuuccucuguccuccauccuucucccaggauggugaagggggaccugguacccagugauccccaccccaggauccuaaaucaugacuuaccugcuaauaaaaacucauuggaaaagugagaagaucuaaaaaaaaaaaaaaaaaaaaaaaaaaaaaaaaaaaaaaaaaaaaaaaaaaaaaaaaaaaaaaaaugcaucccccccccccccccccccccccccccccccaaaggcucuuuucagagccaccagaauu

SEQ ID NO: 19360 - RNA, 1959 nt, Artificial Sequence
  mRNA product Design f-5 comprising derived and/or modified sequence from HRSV(Memphis-37)__AIY60640.1__F_DSCav1_mut8 (opt5)
gggagacuuucccauucuguagcagaauuugguguugccuguggucuuggucccgcggagaagcuuaccauggagcugcccauccucaagaccaacgccauuacaacgauccuggcugccgugacccuuugcuucgcgagcucccagaauauuacagaagaguuuuaccaaucuaccuguagcgcugucuccaaaggcuaucugggggcccucagaacaggaugguacaccucuguuaucacaauugaacugagcaacaucaaggagaucaaaugcaauggcaccgacgccaaggugaaacuuauuaagcaggaacuggauaaguauaaaaacgcugugacggaccuccagcugcugaugcaguccaccccugccgcugggucuggaagcgccaucgcguccggcauugccgucuguaaggugcuccaccuggagggggagguuaauaaaaucaagaacgcccuucugagcacaaauaaagcuguggucucucucuccggaugcggcgugagcguucugaccuucaaggugcuugaucugaagaacuacauugacaaacaacuccugccgauccugaauaagcagucuuguuccauucccaacaucgaaacagucaucgaguuucagcagaaaaauaaccggcuccuggaaauuacccgcgaguucagcgugaaugcuggcgugacgacaccugucucuaccuauaugcuuacaaacuccgagcugcucagccugaucaaugauaugcccauuaccaacgaccaaaagaaacuuauguccaacaauguucagaucgugagacagcagucuuacagcauuaugugcaucaucaaggaagaggugcuggccuaugucgugcaacucccucuguacgggguuauugauacccccuguuggaaacugcauacauccccucucugcacgaccaacacaaaggaaggaagcaauaucugucugacccggacagaccgcggcugguacugcgauaacgcggggucuguguccuuuuucccgcaggccgagaccuguaagguccagagcaauagaguguuuugcgacacgaugaacucucuuacacugcccagcgaaguuaaucucugcaacauugauaucuucaauccuaaauaugacuguaagauuaugaccuccaaaaccgaugugucuagcuccgucaucacaagccugggagcuaucgugucuugcuacggcaagaccaaauguacagccuccaacaagugccgggggauuaucaagacguuuagcaauggaugugacuaugucucuaacaaaggcguggacaccguuuccgugggcaauacacuuuacuaugucaacaagcaagaggggcagagccuguacgugaaaggagagcccauuaucaauuucuaugauccucucguuuuucccuccgacgaguucgaugcuucuauuagccaggugaacgaaaagaucaaccagucccuggccuuuauucgcaaaucugacgaacugcuccacaaugucaacgugggcaagagcaccacaaauaucaugaucaccacgauuaucauugugaucauuguuauccugcuucugcucaucgccgucgggcuguuccuguacugcaaggcuagauccaccccggugacacuuagcaaagaucaacucucuggaauuaacaauaucgcguucuccaacugaggacuaguacuggcugcaucucccuuuccucuguccuccauccuucucccaggauggugaagggggaccugguacccagugauccccaccccaggauccuaaaucaugacuuaccugcuaauaaaaacucauuggaaaagugagaagaucuaaaaaaaaaaaaaaaaaaaaaaaaaaaaaaaaaaaaaaaaaaaaaaaaaaaaaaaaaaaaaaaaugcaucccccccccccccccccccccccccccccccaaaggcucuuuucagagccaccagaauu

SEQ ID NO: 19361 - RNA, 1959 nt, Artificial Sequence
  mRNA product Design f-5 comprising derived and/or modified sequence from HRSV(Memphis-37)__AIY60640.1__F_DSCav1_mut8 (opt6)
gggagacuuucccauucuguagcagaauuugguguugccuguggucuuggucccgcggagaagcuuaccauggaacuuccuauuuuaaaaacaaacgcaauuacaaccauauuagcagcaguaacacuaugcuuugcaucaucacaaaacaucaccgaagaauuuuaucaauccacaugcucagcaguaucaaaaggauaccuuggcgcacuccgaacaggcugguauacaucggucauaacuauagaacucuccaacauaaaagaaauaaaaugcaaugguacugacgcaaaaguaaaauuaauaaaacaagaacuagacaaauacaaaaacgcaguaaccgauuuacaacuacuuaugcaaucaacaccugcagcaggaagcggaucagcaauagcaaguggaauagcaguaugcaaaguacuucaccucgaaggagaaguaaauaaaauaaaaaacgccuuacuaucaacaaauaaagccgucguaucacuuuccgguugcggcguaucaguauuaaccuuuaaagucuuagacuuaaaaaacuacauagacaaacaauuauuaccaauacuaaacaaacaauccuguuccauacccaacauagaaaccguaauagaauuucaacaaaaaaacaacagacuauuagaaauaacacgcgaauuuucaguaaacgcaggcguaacaacaccaguaucaacauauauguuaaccaauucagaauuauuaucccuuauaaaugacaugccuauaacaaacgaccaaaaaaaauuaaugaguaacaacguucaaauaguaagacaacaaucauacagcauaaugugcauaauaaaagaagaaguacuagcauacguaguucaacuaccacucuauggcguuaucgacaccccaugcuggaaacuacauaccucaccacucuguaccacuaauacgaaagaaggaucuaacauaugccuaaccagaacagaucgagguugguauugcgacaaugcuggaucaguaucauucuucccacaagcagaaaccugcaaaguacaaagcaacagaguauuuugugacacuaugaacucacuaacgcuaccuucagaaguaaaccuaugcaacaucgacauauucaacccaaaauacgauugcaaaauaaugacaucaaaaacagacguuuccucaucaguaauaacaucauuaggagcaauaguauccugcuacgguaaaaccaaaugcacagcauccaauaaaugccgaggaaucauuaaaacauuuucaaauggcugcgacuauguaaguaauaaagguguagauacaguaucaguaggcaacacacuauauuacguaaacaaacaagaagggcaaucccuauaugucaaaggcgaaccaauuauaaacuucuacgacccccucguauucccaucagacgaauuugacgcaucaauaucccaaguaaacgaaaaaaucaaccaaucacucgcauucauacguaaauccgacgaauuacuacauaacguaaacguaggcaaaucaacaacaaauauaaugauaacaaccauaaucauaguaauaauaguuauacuccuacuacucauugcagucggccuauuucuauacuguaaagcacgcucuacaccaguaacacuaucuaaagaucaauuauccggaauaaacaacauugccuucuccaauuaaggacuaguacuggcugcaucucccuuuccucuguccuccauccuucucccaggauggugaagggggaccugguacccagugauccccaccccaggauccuaaaucaugacuuaccugcuaauaaaaacucauuggaaaagugagaagaucuaaaaaaaaaaaaaaaaaaaaaaaaaaaaaaaaaaaaaaaaaaaaaaaaaaaaaaaaaaaaaaaaugcaucccccccccccccccccccccccccccccccaaaggcucuuuucagagccaccagaauu

SEQ ID NO: 19362 - RNA, 1959 nt, Artificial Sequence
  mRNA product Design f-5 comprising derived and/or modified sequence from HRSV(Memphis-37)__AIY60640.1__F_DSCav1_mut8 (opt11)
gggagacuuucccauucuguagcagaauuugguguugccuguggucuuggucccgcggagaagcuuaccauggaacuucccauccugaagaccaacgcuaucacaaccauccucgccgcagucacccuuugcuucgccucaucccaaaacaucaccgaagaauuuuaccagucaaccugcucggccgucuccaagggcuaccucggcgcccuccgcacuggcugguacacauccgucaucaccaucgaacucuccaacauaaaagaaauaaaaugcaacggaaccgacgccaaagucaaacucaucaaacaagaacuagauaaauauaaaaacgccgucaccgaccugcaacuccucaugcaauccaccccagccgccggcucuggcagcgccaucgcaagcggaaucgccgucugcaaaguccuccaccuagaaggcgaagucaacaaaauuaaaaacgcccuccucuccaccaacaaagcaguugucucccucucuggcugcggagucucuguacucaccuucaaaguacuagaccucaagaauuacauagacaaacaacuccugcccauccuuaacaaacaaaguuguaguauccccaacaucgaaacaguaaucgaauuucagcagaaaaacaaccgccuccucgaaaucacacgagaguucucggucaacgccggcgucaccacccccguaucaaccuacaugcuaacaaacuccgaacuacuuucccucaucaaugacaugcccauaaccaacgaccaaaagaaacuaauguccaauaacguccagauaguccgucaacaguccuacucaaucaugugcauaauuaaagaagaaguacucgccuacgucguccaacuaccccucuauggagucaucgacacccccugcuggaaacuccacacaucaccccuaugcacaaccaacaccaaagaaggcuccaacaucugccucacaagaaccgaccgcggcugguacugcgacaacgcuggcuccgucucguucuucccacaagccgaaaccugcaaaguccaaucaaaccgggucuucugcgacaccaugaacucccucacucucccaagcgaagucaaccuaugcaacaucgacaucuucaacccaaaauacgacuguaaaaucaugacuucgaaaacagacgucuccucaucaguaaucacauccuuaggcgccaucguguccugcuacgguaagaccaaaugcacagccuccaacaaaugccggggcaucaucaaaaccuucagcaacgguugugauuacgucuccaacaaaggaguagacaccgucuccguaggaaacacccucuacuacgucaacaagcaagaaggccaaucccucuacgucaaaggggaacccaucaucaacuucuacgacccacucgucuuccccuccgacgaguucgacgcaagcaucucccaagucaacgaaaagaucaaccaaucacuagccuucauccgcaaauccgacgaacuccuccacaacguuaacguaggcaaauccaccaccaacaucaugaucacaaccaucaucauagucauaauagucauccuacuacuccucaucgccguaggucuauuccuauacuguaaagcucgaucaacccccgucacacucuccaaagaucaacucucaggaaucaacaacaucgccuucuccaacuaaggacuaguacuggcugcaucucccuuuccucuguccuccauccuucucccaggauggugaagggggaccugguacccagugauccccaccccaggauccuaaaucaugacuuaccugcuaauaaaaacucauuggaaaagugagaagaucuaaaaaaaaaaaaaaaaaaaaaaaaaaaaaaaaaaaaaaaaaaaaaaaaaaaaaaaaaaaaaaaaugcaucccccccccccccccccccccccccccccccaaaggcucuuuucagagccaccagaauu

SEQ ID NO: 19363 - RNA, 1955 nt, Artificial Sequence
  mRNA product Design g-1 comprising derived and/or modified sequence from HRSV(Memphis-37)__AIY60640.1__F_DSCav1_mut8 (opt1)
gggagacuuucccauucuguagcagaauuugguguugccuguggucuuggucccgcggagaagcuuaccauggagcugcccauccucaagaccaacgccaucaccacgauccuggccgcggugacccugugcuucgccagcucccagaacaucaccgaggaguucuaccagagcacgugcuccgccgucagcaagggcuaccucggcgcccugcgcaccgggugguacaccagcgugaucaccaucgagcuguccaacaucaaggagaucaagugcaacggcaccgacgccaaggugaagcucaucaagcaggagcuggacaaguacaagaacgcggucacggaccugcagcuccugaugcagagcaccccggccgccggcuccgggagcgcgaucgccuccggcaucgccgucugcaaggugcugcaccucgagggcgaggugaacaagaucaagaacgcccugcuguccaccaacaaggccgucgugagccucuccggcugcggggugagcguccugaccuucaaggugcuggaccucaagaacuacaucgacaagcagcugcugcccauccugaacaagcagagcugcuccauccccaacaucgagaccgucaucgaguuccagcagaagaacaaccgccuccuggagaucacgcgggaguucagcgugaacgcgggcgugaccacccccgucuccaccuacaugcugacgaacagcgagcuccugucccugaucaacgacaugccgaucaccaacgaccagaagaagcucaugagcaacaacgugcagaucgugcgccagcaguccuacagcaucaugugcaucaucaaggaggagguccuggccuacguggugcagcugccccucuacggggucaucgacacccccugcuggaagcugcacaccagcccccugugcacgaccaacaccaaggagggcuccaacaucugccucacccggacggaccgcgggugguacugcgacaacgccggcagcguguccuucuucccgcaggccgagaccugcaagguccagagcaaccggguguucugcgacaccaugaacucccugacccugcccagcgaggugaaccucugcaacaucgacaucuucaaccccaaguacgacugcaagaucaugacguccaagaccgacgucagcuccagcgugaucaccucccugggcgccaucgugagcugcuacgggaagaccaagugcacggcgagcaacaagugccgcggcaucaucaagaccuucuccaacgggugcgacuacgucagcaacaagggcguggacaccguguccgucggcaacacccuguacuacgugaacaagcaggagggccagagccucuacgugaagggggagcccaucaucaacuucuacgacccgcuggucuuccccuccgacgaguucgacgccagcaucucccaggugaacgagaagaucaaccagagccuggccuucauccggaaguccgacgagcuccugcacaacgugaacgucggcaagagcaccacgaacaucaugaucaccaccaucaucaucgugaucaucgugauccugcugcuccugaucgccgucgggcuguuccucuacugcaaggcccgcuccacccccgugacgcugagcaaggaccagcuguccgggaucaacaacaucgcguucagcaacugaggacuaguggaagcauuuuccuggcugauuaaaagaaauuacucagcuauggucaucuguuccuguuagaaggcuaugcagcauauuauauacuaugcgcauguuaugaaaugcauaauaaaaaauuuuaaaaaaucuaaaagaucuaaaaaaaaaaaaaaaaaaaaaaaaaaaaaaaaaaaaaaaaaaaaaaaaaaaaaaaaaaaaaaaaugcaucccccccccccccccccccccccccccccccaaaggcucuuuucagagccaccagaauu

SEQ ID NO: 19364 - RNA, 1955 nt, Artificial Sequence
  mRNA product Design g-1 comprising derived and/or modified sequence from HRSV(Memphis-37)__AIY60640.1__F_DSCav1_mut8 (opt1)
gggagacuuucccauucuguagcagaauuugguguugccuguggucuuggucccgcggagaagcuuaccauggagcugcccauccucaagaccaacgccaucaccacgauccuggccgcggugacccugugcuucgccagcucccagaacaucaccgaggaguucuaccagagcacgugcuccgccgucagcaagggcuaccucggggcccugcgcaccggcugguacaccuccgugaucaccaucgagcugagcaacaucaaggagaucaagugcaacgggaccgacgccaaggugaagcucaucaagcaggagcuggacaaguacaagaacgcggucacggaccugcagcuccugaugcaguccaccccggccgccggcagcggguccgccaucgcgagcggcaucgccgugugcaaggugcugcaccucgagggcgaggucaacaagaucaagaacgcccugcuguccaccaacaaggccguggugagccucuccgggugcggcgucagcgugcugaccuucaaggugcuggaccucaagaacuacaucgacaagcagcugcugcccauccucaacaagcaguccugcagcauccccaacaucgagacggucaucgaguuccagcagaagaacaaccggcugcuggagaucacccgcgaguucuccgugaacgccggggugaccacccccgucagcacguacaugcucaccaacuccgagcugcugagccucaucaacgacaugccgaucaccaacgaccagaagaagcugaugagcaacaacgugcagaucgugcggcagcaguccuacagcaucaugugcaucaucaaggaggagguccuggcguacguggugcagcucccccuguacggcgucaucgacacccccugcuggaagcugcacacgagcccccucugcaccaccaacaccaaggagggguccaacaucugccugacgcgcaccgaccggggcugguacugcgacaacgccggcuccgugagcuucuucccgcaggccgagaccugcaaggugcaguccaaccgcgucuucugcgacaccaugaacagccugacgcuccccuccgaggugaaccugugcaacaucgacaucuucaaccccaaguacgacugcaagaucaugaccagcaagaccgacgucuccagcuccgugaucaccagccugggggccaucguguccugcuacggcaagacgaagugcaccgccagcaacaagugccgggggaucaucaagaccuucuccaacggcugcgacuacgucagcaacaagggcguggacaccguguccgucgggaacacgcucuacuacgugaacaagcaggagggccagagccuguacgugaagggggagcccaucaucaacuucuacgacccgcuggucuuccccagcgacgaguucgacgcguccaucagccaggugaacgagaagaucaaccagucccucgccuucauccgcaagagcgacgagcugcugcacaacgugaacgucggcaaguccaccaccaacaucaugaucaccaccaucaucaucgugaucaucgugauccuccugcugcucaucgccgucgggcuguuccuguacugcaaggcccggagcacgcccgugacccuguccaaggaccagcucagcggcaucaacaacaucgccuucuccaacugaggacuaguggaagcauuuuccuggcugauuaaaagaaauuacucagcuauggucaucuguuccuguuagaaggcuaugcagcauauuauauacuaugcgcauguuaugaaaugcauaauaaaaaauuuuaaaaaaucuaaaagaucuaaaaaaaaaaaaaaaaaaaaaaaaaaaaaaaaaaaaaaaaaaaaaaaaaaaaaaaaaaaaaaaaugcaucccccccccccccccccccccccccccccccaaaggcucuuuucagagccaccagaauu

SEQ ID NO: 19365 - RNA, 1955 nt, Artificial Sequence
  mRNA product Design g-1 comprising derived and/or modified sequence from HRSV(Memphis-37)__AIY60640.1__F_DSCav1_mut8 (opt2)
gggagacuuucccauucuguagcagaauuugguguugccuguggucuuggucccgcggagaagcuuaccauggagcuccccauccucaagaccaacgccaucaccaccauccucgccgccgucacccucugcuucgccuccucccagaacaucaccgaggaguucuaccaguccaccugcuccgccgucuccaagggcuaccucggcgcccuccgcaccggcugguacaccuccgucaucaccaucgagcucuccaacaucaaggagaucaagugcaacggcaccgacgccaaggucaagcucaucaagcaggagcucgacaaguacaagaacgccgucaccgaccuccagcuccucaugcaguccacccccgccgccggcuccggcuccgccaucgccuccggcaucgccgucugcaagguccuccaccucgagggcgaggucaacaagaucaagaacgcccuccucuccaccaacaaggccgucgucucccucuccggcugcggcgucuccguccucaccuucaagguccucgaccucaagaacuacaucgacaagcagcuccuccccauccucaacaagcaguccugcuccauccccaacaucgagaccgucaucgaguuccagcagaagaacaaccgccuccucgagaucacccgcgaguucuccgucaacgccggcgucaccacccccgucuccaccuacaugcucaccaacuccgagcuccucucccucaucaacgacaugcccaucaccaacgaccagaagaagcucauguccaacaacguccagaucguccgccagcaguccuacuccaucaugugcaucaucaaggaggagguccucgccuacgucguccagcucccccucuacggcgucaucgacacccccugcuggaagcuccacaccuccccccucugcaccaccaacaccaaggagggcuccaacaucugccucacccgcaccgaccgcggcugguacugcgacaacgccggcuccgucuccuucuucccccaggccgagaccugcaagguccaguccaaccgcgucuucugcgacaccaugaacucccucacccuccccuccgaggucaaccucugcaacaucgacaucuucaaccccaaguacgacugcaagaucaugaccuccaagaccgacgucuccuccuccgucaucaccucccucggcgccaucgucuccugcuacggcaagaccaagugcaccgccuccaacaagugccgcggcaucaucaagaccuucuccaacggcugcgacuacgucuccaacaagggcgucgacaccgucuccgucggcaacacccucuacuacgucaacaagcaggagggccagucccucuacgucaagggcgagcccaucaucaacuucuacgacccccucgucuuccccuccgacgaguucgacgccuccaucucccaggucaacgagaagaucaaccagucccucgccuucauccgcaaguccgacgagcuccuccacaacgucaacgucggcaaguccaccaccaacaucaugaucaccaccaucaucaucgucaucaucgucauccuccuccuccucaucgccgucggccucuuccucuacugcaaggcccgcuccacccccgucacccucuccaaggaccagcucuccggcaucaacaacaucgccuucuccaacugaggacuaguggaagcauuuuccuggcugauuaaaagaaauuacucagcuauggucaucuguuccuguuagaaggcuaugcagcauauuauauacuaugcgcauguuaugaaaugcauaauaaaaaauuuuaaaaaaucuaaaagaucuaaaaaaaaaaaaaaaaaaaaaaaaaaaaaaaaaaaaaaaaaaaaaaaaaaaaaaaaaaaaaaaaugcaucccccccccccccccccccccccccccccccaaaggcucuuuucagagccaccagaauu

SEQ ID NO: 19366 - RNA, 1955 nt, Artificial Sequence
  mRNA product Design g-1 comprising derived and/or modified sequence from HRSV(Memphis-37)__AIY60640.1__F_DSCav1_mut8 (opt3)
gggagacuuucccauucuguagcagaauuugguguugccuguggucuuggucccgcggagaagcuuaccauggagcugcccauccucaagaccaacgccauuacaacuauacuugcugcagugacgcugugcuucgccagcucccagaauaucaccgaagaguuuuaccaaucuacauguucagcggucaguaaaggcuauuugggggcuuuaagaacuggaugguacaccagcguuauuacaaucgaacuguccaacauuaaggagaucaaaugcaaugguaccgacgccaaggugaaacuaauaaagcaggaacucgauaaguauaaaaacgcaguaacugaccugcagcuucugaugcagucuacuccugccgcuggcucggggucagcaaucgccagcggaauugcuguguguaaggucuugcaccucgagggcgaggugaauaaaaucaagaacgcccugcugaguaccaauaaagcgguugugucccucucugguugcggggucagcguguuaacguucaagguacuggaucuuaagaacuacauugacaaacaauugcugccaauccuaaauaagcaguccuguucaauaccgaacauugaaacuguuaucgaguuucagcagaaaaauaacaggcuccuggaaauuacccgggaguucagugugaaugcaggagucacaacucccgugagcaccuauaugcuuacaaacucugagcuguugucccucaucaaugauaugccuaucaccaacgaccaaaagaaacugaugucaaacaaugugcagauuguccgccagcagagcuacaguauaaugugcaucauuaaggaagagguuuuagccuaugugguacaacugccacucuacggcgugaucgauacgcccuguuggaaacuucauacuucuccucugugcacaaccaacacuaaggaaggcuccaauauauguuugacacgaaccgaccgugggugguacugcgauaacgcuggaagcgucucguuuuucccacaggccgagacguguaaggugcagucuaauagaguuuucugcgacaccaugaacucccuaacacugcccucagaagugaaucucugcaacauugauaucuucaauccuaaauaugacuguaagaucaugacaaguaaaaccgaugucagcuccucugugauuacaagccugggugcaaucguaucaugcuacggcaagacuaaauguaccgcuaguaacaagugcagggggauuauaaagacauuuuccaauggaugugacuauguuagcaacaaaggcguggacaccgucucuguggguaauacucuuuacuaugucaacaagcaagaggggcagucacuguacgugaaaggagagccaaucauuaauuucuaugauccguugguuuuucccagugacgaauuugaugccagcaucucccaggugaacgagaagaucaaccagucucucgcguuuauucggaaaucggacgaacuguuacacaauguaaacgucggcaagagcacgacaaauauaaugaucaccacuauuaucauugugaucauaguuauccugcuacuccugauugccgugggccuuuucuuguacugcaaggcacgcuccaccccugucacacugucaaaagaucaacucagugggaucaacaauauugcuuucucuaacugaggacuaguggaagcauuuuccuggcugauuaaaagaaauuacucagcuauggucaucuguuccuguuagaaggcuaugcagcauauuauauacuaugcgcauguuaugaaaugcauaauaaaaaauuuuaaaaaaucuaaaagaucuaaaaaaaaaaaaaaaaaaaaaaaaaaaaaaaaaaaaaaaaaaaaaaaaaaaaaaaaaaaaaaaaugcaucccccccccccccccccccccccccccccccaaaggcucuuuucagagccaccagaauu

SEQ ID NO: 19367 - RNA, 1955 nt, Artificial Sequence
  mRNA product Design g-1 comprising derived and/or modified sequence from HRSV(Memphis-37)__AIY60640.1__F_DSCav1_mut8 (opt4)
gggagacuuucccauucuguagcagaauuugguguugccuguggucuuggucccgcggagaagcuuaccauggagcugcccauccugaagaccaacgccaucaccaccauccuggccgccgugacccugugcuucgccagcagccagaacaucaccgaggaguucuaccagagcaccugcagcgccgugagcaagggcuaccugggcgcccugagaaccggcugguacaccagcgugaucaccaucgagcugagcaacaucaaggagaucaagugcaacggcaccgacgccaaggugaagcugaucaagcaggagcuggacaaguacaagaacgccgugaccgaccugcagcugcugaugcagagcacccccgccgccggcagcggcagcgccaucgccagcggcaucgccgugugcaaggugcugcaccuggagggcgaggugaacaagaucaagaacgcccugcugagcaccaacaaggccguggugagccugagcggcugcggcgugagcgugcugaccuucaaggugcuggaccugaagaacuacaucgacaagcagcugcugcccauccugaacaagcagagcugcagcauccccaacaucgagaccgugaucgaguuccagcagaagaacaacagacugcuggagaucaccagagaguucagcgugaacgccggcgugaccacccccgugagcaccuacaugcugaccaacagcgagcugcugagccugaucaacgacaugcccaucaccaacgaccagaagaagcugaugagcaacaacgugcagaucgugagacagcagagcuacagcaucaugugcaucaucaaggaggaggugcuggccuacguggugcagcugccccuguacggcgugaucgacacccccugcuggaagcugcacaccagcccccugugcaccaccaacaccaaggagggcagcaacaucugccugaccagaaccgacagaggcugguacugcgacaacgccggcagcgugagcuucuucccccaggccgagaccugcaaggugcagagcaacagaguguucugcgacaccaugaacagccugacccugcccagcgaggugaaccugugcaacaucgacaucuucaaccccaaguacgacugcaagaucaugaccagcaagaccgacgugagcagcagcgugaucaccagccugggcgccaucgugagcugcuacggcaagaccaagugcaccgccagcaacaagugcagaggcaucaucaagaccuucagcaacggcugcgacuacgugagcaacaagggcguggacaccgugagcgugggcaacacccuguacuacgugaacaagcaggagggccagagccuguacgugaagggcgagcccaucaucaacuucuacgacccccugguguuccccagcgacgaguucgacgccagcaucagccaggugaacgagaagaucaaccagagccuggccuucaucagaaagagcgacgagcugcugcacaacgugaacgugggcaagagcaccaccaacaucaugaucaccaccaucaucaucgugaucaucgugauccugcugcugcugaucgccgugggccuguuccuguacugcaaggccagaagcacccccgugacccugagcaaggaccagcugagcggcaucaacaacaucgccuucagcaacugaggacuaguggaagcauuuuccuggcugauuaaaagaaauuacucagcuauggucaucuguuccuguuagaaggcuaugcagcauauuauauacuaugcgcauguuaugaaaugcauaauaaaaaauuuuaaaaaaucuaaaagaucuaaaaaaaaaaaaaaaaaaaaaaaaaaaaaaaaaaaaaaaaaaaaaaaaaaaaaaaaaaaaaaaaugcaucccccccccccccccccccccccccccccccaaaggcucuuuucagagccaccagaauu

SEQ ID NO: 19368 - RNA, 1955 nt, Artificial Sequence
  mRNA product Design g-1 comprising derived and/or modified sequence from HRSV(Memphis-37)__AIY60640.1__F_DSCav1_mut8 (opt5)
gggagacuuucccauucuguagcagaauuugguguugccuguggucuuggucccgcggagaagcuuaccauggagcugcccauccucaagaccaacgccauuacaacgauccuggcugccgugacccuuugcuucgcgagcucccagaauauuacagaagaguuuuaccaaucuaccuguagcgcugucuccaaaggcuaucugggggcccucagaacaggaugguacaccucuguuaucacaauugaacugagcaacaucaaggagaucaaaugcaauggcaccgacgccaaggugaaacuuauuaagcaggaacuggauaaguauaaaaacgcugugacggaccuccagcugcugaugcaguccaccccugccgcugggucuggaagcgccaucgcguccggcauugccgucuguaaggugcuccaccuggagggggagguuaauaaaaucaagaacgcccuucugagcacaaauaaagcuguggucucucucuccggaugcggcgugagcguucugaccuucaaggugcuugaucugaagaacuacauugacaaacaacuccugccgauccugaauaagcagucuuguuccauucccaacaucgaaacagucaucgaguuucagcagaaaaauaaccggcuccuggaaauuacccgcgaguucagcgugaaugcuggcgugacgacaccugucucuaccuauaugcuuacaaacuccgagcugcucagccugaucaaugauaugcccauuaccaacgaccaaaagaaacuuauguccaacaauguucagaucgugagacagcagucuuacagcauuaugugcaucaucaaggaagaggugcuggccuaugucgugcaacucccucuguacgggguuauugauacccccuguuggaaacugcauacauccccucucugcacgaccaacacaaaggaaggaagcaauaucugucugacccggacagaccgcggcugguacugcgauaacgcggggucuguguccuuuuucccgcaggccgagaccuguaagguccagagcaauagaguguuuugcgacacgaugaacucucuuacacugcccagcgaaguuaaucucugcaacauugauaucuucaauccuaaauaugacuguaagauuaugaccuccaaaaccgaugugucuagcuccgucaucacaagccugggagcuaucgugucuugcuacggcaagaccaaauguacagccuccaacaagugccgggggauuaucaagacguuuagcaauggaugugacuaugucucuaacaaaggcguggacaccguuuccgugggcaauacacuuuacuaugucaacaagcaagaggggcagagccuguacgugaaaggagagcccauuaucaauuucuaugauccucucguuuuucccuccgacgaguucgaugcuucuauuagccaggugaacgaaaagaucaaccagucccuggccuuuauucgcaaaucugacgaacugcuccacaaugucaacgugggcaagagcaccacaaauaucaugaucaccacgauuaucauugugaucauuguuauccugcuucugcucaucgccgucgggcuguuccuguacugcaaggcuagauccaccccggugacacuuagcaaagaucaacucucuggaauuaacaauaucgcguucuccaacugaggacuaguggaagcauuuuccuggcugauuaaaagaaauuacucagcuauggucaucuguuccuguuagaaggcuaugcagcauauuauauacuaugcgcauguuaugaaaugcauaauaaaaaauuuuaaaaaaucuaaaagaucuaaaaaaaaaaaaaaaaaaaaaaaaaaaaaaaaaaaaaaaaaaaaaaaaaaaaaaaaaaaaaaaaugcaucccccccccccccccccccccccccccccccaaaggcucuuuucagagccaccagaauu

SEQ ID NO: 19369 - RNA, 1955 nt, Artificial Sequence
  mRNA product Design g-1 comprising derived and/or modified sequence from HRSV(Memphis-37)__AIY60640.1__F_DSCav1_mut8 (opt6)
gggagacuuucccauucuguagcagaauuugguguugccuguggucuuggucccgcggagaagcuuaccauggaacuuccuauuuuaaaaacaaacgcaauuacaaccauauuagcagcaguaacacuaugcuuugcaucaucacaaaacaucaccgaagaauuuuaucaauccacaugcucagcaguaucaaaaggauaccuuggcgcacuccgaacaggcugguauacaucggucauaacuauagaacucuccaacauaaaagaaauaaaaugcaaugguacugacgcaaaaguaaaauuaauaaaacaagaacuagacaaauacaaaaacgcaguaaccgauuuacaacuacuuaugcaaucaacaccugcagcaggaagcggaucagcaauagcaaguggaauagcaguaugcaaaguacuucaccucgaaggagaaguaaauaaaauaaaaaacgccuuacuaucaacaaauaaagccgucguaucacuuuccgguugcggcguaucaguauuaaccuuuaaagucuuagacuuaaaaaacuacauagacaaacaauuauuaccaauacuaaacaaacaauccuguuccauacccaacauagaaaccguaauagaauuucaacaaaaaaacaacagacuauuagaaauaacacgcgaauuuucaguaaacgcaggcguaacaacaccaguaucaacauauauguuaaccaauucagaauuauuaucccuuauaaaugacaugccuauaacaaacgaccaaaaaaaauuaaugaguaacaacguucaaauaguaagacaacaaucauacagcauaaugugcauaauaaaagaagaaguacuagcauacguaguucaacuaccacucuauggcguuaucgacaccccaugcuggaaacuacauaccucaccacucuguaccacuaauacgaaagaaggaucuaacauaugccuaaccagaacagaucgagguugguauugcgacaaugcuggaucaguaucauucuucccacaagcagaaaccugcaaaguacaaagcaacagaguauuuugugacacuaugaacucacuaacgcuaccuucagaaguaaaccuaugcaacaucgacauauucaacccaaaauacgauugcaaaauaaugacaucaaaaacagacguuuccucaucaguaauaacaucauuaggagcaauaguauccugcuacgguaaaaccaaaugcacagcauccaauaaaugccgaggaaucauuaaaacauuuucaaauggcugcgacuauguaaguaauaaagguguagauacaguaucaguaggcaacacacuauauuacguaaacaaacaagaagggcaaucccuauaugucaaaggcgaaccaauuauaaacuucuacgacccccucguauucccaucagacgaauuugacgcaucaauaucccaaguaaacgaaaaaaucaaccaaucacucgcauucauacguaaauccgacgaauuacuacauaacguaaacguaggcaaaucaacaacaaauauaaugauaacaaccauaaucauaguaauaauaguuauacuccuacuacucauugcagucggccuauuucuauacuguaaagcacgcucuacaccaguaacacuaucuaaagaucaauuauccggaauaaacaacauugccuucuccaauuaaggacuaguggaagcauuuuccuggcugauuaaaagaaauuacucagcuauggucaucuguuccuguuagaaggcuaugcagcauauuauauacuaugcgcauguuaugaaaugcauaauaaaaaauuuuaaaaaaucuaaaagaucuaaaaaaaaaaaaaaaaaaaaaaaaaaaaaaaaaaaaaaaaaaaaaaaaaaaaaaaaaaaaaaaaugcaucccccccccccccccccccccccccccccccaaaggcucuuuucagagccaccagaauu

SEQ ID NO: 19370 - RNA, 1955 nt, Artificial Sequence
  mRNA product Design g-1 comprising derived and/or modified sequence from HRSV(Memphis-37)__AIY60640.1__F_DSCav1_mut8 (opt11)
gggagacuuucccauucuguagcagaauuugguguugccuguggucuuggucccgcggagaagcuuaccauggaacuucccauccugaagaccaacgcuaucacaaccauccucgccgcagucacccuuugcuucgccucaucccaaaacaucaccgaagaauuuuaccagucaaccugcucggccgucuccaagggcuaccucggcgcccuccgcacuggcugguacacauccgucaucaccaucgaacucuccaacauaaaagaaauaaaaugcaacggaaccgacgccaaagucaaacucaucaaacaagaacuagauaaauauaaaaacgccgucaccgaccugcaacuccucaugcaauccaccccagccgccggcucuggcagcgccaucgcaagcggaaucgccgucugcaaaguccuccaccuagaaggcgaagucaacaaaauuaaaaacgcccuccucuccaccaacaaagcaguugucucccucucuggcugcggagucucuguacucaccuucaaaguacuagaccucaagaauuacauagacaaacaacuccugcccauccuuaacaaacaaaguuguaguauccccaacaucgaaacaguaaucgaauuucagcagaaaaacaaccgccuccucgaaaucacacgagaguucucggucaacgccggcgucaccacccccguaucaaccuacaugcuaacaaacuccgaacuacuuucccucaucaaugacaugcccauaaccaacgaccaaaagaaacuaauguccaauaacguccagauaguccgucaacaguccuacucaaucaugugcauaauuaaagaagaaguacucgccuacgucguccaacuaccccucuauggagucaucgacacccccugcuggaaacuccacacaucaccccuaugcacaaccaacaccaaagaaggcuccaacaucugccucacaagaaccgaccgcggcugguacugcgacaacgcuggcuccgucucguucuucccacaagccgaaaccugcaaaguccaaucaaaccgggucuucugcgacaccaugaacucccucacucucccaagcgaagucaaccuaugcaacaucgacaucuucaacccaaaauacgacuguaaaaucaugacuucgaaaacagacgucuccucaucaguaaucacauccuuaggcgccaucguguccugcuacgguaagaccaaaugcacagccuccaacaaaugccggggcaucaucaaaaccuucagcaacgguugugauuacgucuccaacaaaggaguagacaccgucuccguaggaaacacccucuacuacgucaacaagcaagaaggccaaucccucuacgucaaaggggaacccaucaucaacuucuacgacccacucgucuuccccuccgacgaguucgacgcaagcaucucccaagucaacgaaaagaucaaccaaucacuagccuucauccgcaaauccgacgaacuccuccacaacguuaacguaggcaaauccaccaccaacaucaugaucacaaccaucaucauagucauaauagucauccuacuacuccucaucgccguaggucuauuccuauacuguaaagcucgaucaacccccgucacacucuccaaagaucaacucucaggaaucaacaacaucgccuucuccaacuaaggacuaguggaagcauuuuccuggcugauuaaaagaaauuacucagcuauggucaucuguuccuguuagaaggcuaugcagcauauuauauacuaugcgcauguuaugaaaugcauaauaaaaaauuuuaaaaaaucuaaaagaucuaaaaaaaaaaaaaaaaaaaaaaaaaaaaaaaaaaaaaaaaaaaaaaaaaaaaaaaaaaaaaaaaugcaucccccccccccccccccccccccccccccccaaaggcucuuuucagagccaccagaauu

SEQ ID NO: 19371 - RNA, 1970 nt, Artificial Sequence
  mRNA product Design g-2 comprising derived and/or modified sequence from HRSV(Memphis-37)__AIY60640.1__F_DSCav1_mut8 (opt1)
gggagaguccgcucagccagguugcagaagcggcuuagcguguguccuaaucuucucucugcguguagguaggccugugccgcaaacaagcuuaccauggagcugcccauccucaagaccaacgccaucaccacgauccuggccgcggugacccugugcuucgccagcucccagaacaucaccgaggaguucuaccagagcacgugcuccgccgucagcaagggcuaccucggcgcccugcgcaccgggugguacaccagcgugaucaccaucgagcuguccaacaucaaggagaucaagugcaacggcaccgacgccaaggugaagcucaucaagcaggagcuggacaaguacaagaacgcggucacggaccugcagcuccugaugcagagcaccccggccgccggcuccgggagcgcgaucgccuccggcaucgccgucugcaaggugcugcaccucgagggcgaggugaacaagaucaagaacgcccugcuguccaccaacaaggccgucgugagccucuccggcugcggggugagcguccugaccuucaaggugcuggaccucaagaacuacaucgacaagcagcugcugcccauccugaacaagcagagcugcuccauccccaacaucgagaccgucaucgaguuccagcagaagaacaaccgccuccuggagaucacgcgggaguucagcgugaacgcgggcgugaccacccccgucuccaccuacaugcugacgaacagcgagcuccugucccugaucaacgacaugccgaucaccaacgaccagaagaagcucaugagcaacaacgugcagaucgugcgccagcaguccuacagcaucaugugcaucaucaaggaggagguccuggccuacguggugcagcugccccucuacggggucaucgacacccccugcuggaagcugcacaccagcccccugugcacgaccaacaccaaggagggcuccaacaucugccucacccggacggaccgcgggugguacugcgacaacgccggcagcguguccuucuucccgcaggccgagaccugcaagguccagagcaaccggguguucugcgacaccaugaacucccugacccugcccagcgaggugaaccucugcaacaucgacaucuucaaccccaaguacgacugcaagaucaugacguccaagaccgacgucagcuccagcgugaucaccucccugggcgccaucgugagcugcuacgggaagaccaagugcacggcgagcaacaagugccgcggcaucaucaagaccuucuccaacgggugcgacuacgucagcaacaagggcguggacaccguguccgucggcaacacccuguacuacgugaacaagcaggagggccagagccucuacgugaagggggagcccaucaucaacuucuacgacccgcuggucuuccccuccgacgaguucgacgccagcaucucccaggugaacgagaagaucaaccagagccuggccuucauccggaaguccgacgagcuccugcacaacgugaacgucggcaagagcaccacgaacaucaugaucaccaccaucaucaucgugaucaucgugauccugcugcuccugaucgccgucgggcuguuccucuacugcaaggcccgcuccacccccgugacgcugagcaaggaccagcuguccgggaucaacaacaucgcguucagcaacugaggacuaguaauaaggaaacuguaugaaugucugugggcaggaagugaagagauccuucuguaaagguuuuuggaauuaugucugcugaauaauaaacuuuuuugaaauaauaaaucugguagaaaaaugagaucuaaaaaaaaaaaaaaaaaaaaaaaaaaaaaaaaaaaaaaaaaaaaaaaaaaaaaaaaaaaaaaaaugcaucccccccccccccccccccccccccccccccaaaggcucuuuucagagccaccagaauu

SEQ ID NO: 19372 - RNA, 1970 nt, Artificial Sequence
  mRNA product Design g-2 comprising derived and/or modified sequence from HRSV(Memphis-37)__AIY60640.1__F_DSCav1_mut8 (opt1)
gggagaguccgcucagccagguugcagaagcggcuuagcguguguccuaaucuucucucugcguguagguaggccugugccgcaaacaagcuuaccauggagcugcccauccucaagaccaacgccaucaccacgauccuggccgcggugacccugugcuucgccagcucccagaacaucaccgaggaguucuaccagagcacgugcuccgccgucagcaagggcuaccucggggcccugcgcaccggcugguacaccuccgugaucaccaucgagcugagcaacaucaaggagaucaagugcaacgggaccgacgccaaggugaagcucaucaagcaggagcuggacaaguacaagaacgcggucacggaccugcagcuccugaugcaguccaccccggccgccggcagcggguccgccaucgcgagcggcaucgccgugugcaaggugcugcaccucgagggcgaggucaacaagaucaagaacgcccugcuguccaccaacaaggccguggugagccucuccgggugcggcgucagcgugcugaccuucaaggugcuggaccucaagaacuacaucgacaagcagcugcugcccauccucaacaagcaguccugcagcauccccaacaucgagacggucaucgaguuccagcagaagaacaaccggcugcuggagaucacccgcgaguucuccgugaacgccggggugaccacccccgucagcacguacaugcucaccaacuccgagcugcugagccucaucaacgacaugccgaucaccaacgaccagaagaagcugaugagcaacaacgugcagaucgugcggcagcaguccuacagcaucaugugcaucaucaaggaggagguccuggcguacguggugcagcucccccuguacggcgucaucgacacccccugcuggaagcugcacacgagcccccucugcaccaccaacaccaaggagggguccaacaucugccugacgcgcaccgaccggggcugguacugcgacaacgccggcuccgugagcuucuucccgcaggccgagaccugcaaggugcaguccaaccgcgucuucugcgacaccaugaacagccugacgcuccccuccgaggugaaccugugcaacaucgacaucuucaaccccaaguacgacugcaagaucaugaccagcaagaccgacgucuccagcuccgugaucaccagccugggggccaucguguccugcuacggcaagacgaagugcaccgccagcaacaagugccgggggaucaucaagaccuucuccaacggcugcgacuacgucagcaacaagggcguggacaccguguccgucgggaacacgcucuacuacgugaacaagcaggagggccagagccuguacgugaagggggagcccaucaucaacuucuacgacccgcuggucuuccccagcgacgaguucgacgcguccaucagccaggugaacgagaagaucaaccagucccucgccuucauccgcaagagcgacgagcugcugcacaacgugaacgucggcaaguccaccaccaacaucaugaucaccaccaucaucaucgugaucaucgugauccuccugcugcucaucgccgucgggcuguuccuguacugcaaggcccggagcacgcccgugacccuguccaaggaccagcucagcggcaucaacaacaucgccuucuccaacugaggacuaguaauaaggaaacuguaugaaugucugugggcaggaagugaagagauccuucuguaaagguuuuuggaauuaugucugcugaauaauaaacuuuuuugaaauaauaaaucugguagaaaaaugagaucuaaaaaaaaaaaaaaaaaaaaaaaaaaaaaaaaaaaaaaaaaaaaaaaaaaaaaaaaaaaaaaaaugcaucccccccccccccccccccccccccccccccaaaggcucuuuucagagccaccagaauu

SEQ ID NO: 19373 - RNA, 1970 nt, Artificial Sequence
  mRNA product Design g-2 comprising derived and/or modified sequence from HRSV(Memphis-37)__AIY60640.1__F_DSCav1_mut8 (opt2)
gggagaguccgcucagccagguugcagaagcggcuuagcguguguccuaaucuucucucugcguguagguaggccugugccgcaaacaagcuuaccauggagcuccccauccucaagaccaacgccaucaccaccauccucgccgccgucacccucugcuucgccuccucccagaacaucaccgaggaguucuaccaguccaccugcuccgccgucuccaagggcuaccucggcgcccuccgcaccggcugguacaccuccgucaucaccaucgagcucuccaacaucaaggagaucaagugcaacggcaccgacgccaaggucaagcucaucaagcaggagcucgacaaguacaagaacgccgucaccgaccuccagcuccucaugcaguccacccccgccgccggcuccggcuccgccaucgccuccggcaucgccgucugcaagguccuccaccucgagggcgaggucaacaagaucaagaacgcccuccucuccaccaacaaggccgucgucucccucuccggcugcggcgucuccguccucaccuucaagguccucgaccucaagaacuacaucgacaagcagcuccuccccauccucaacaagcaguccugcuccauccccaacaucgagaccgucaucgaguuccagcagaagaacaaccgccuccucgagaucacccgcgaguucuccgucaacgccggcgucaccacccccgucuccaccuacaugcucaccaacuccgagcuccucucccucaucaacgacaugcccaucaccaacgaccagaagaagcucauguccaacaacguccagaucguccgccagcaguccuacuccaucaugugcaucaucaaggaggagguccucgccuacgucguccagcucccccucuacggcgucaucgacacccccugcuggaagcuccacaccuccccccucugcaccaccaacaccaaggagggcuccaacaucugccucacccgcaccgaccgcggcugguacugcgacaacgccggcuccgucuccuucuucccccaggccgagaccugcaagguccaguccaaccgcgucuucugcgacaccaugaacucccucacccuccccuccgaggucaaccucugcaacaucgacaucuucaaccccaaguacgacugcaagaucaugaccuccaagaccgacgucuccuccuccgucaucaccucccucggcgccaucgucuccugcuacggcaagaccaagugcaccgccuccaacaagugccgcggcaucaucaagaccuucuccaacggcugcgacuacgucuccaacaagggcgucgacaccgucuccgucggcaacacccucuacuacgucaacaagcaggagggccagucccucuacgucaagggcgagcccaucaucaacuucuacgacccccucgucuuccccuccgacgaguucgacgccuccaucucccaggucaacgagaagaucaaccagucccucgccuucauccgcaaguccgacgagcuccuccacaacgucaacgucggcaaguccaccaccaacaucaugaucaccaccaucaucaucgucaucaucgucauccuccuccuccucaucgccgucggccucuuccucuacugcaaggcccgcuccacccccgucacccucuccaaggaccagcucuccggcaucaacaacaucgccuucuccaacugaggacuaguaauaaggaaacuguaugaaugucugugggcaggaagugaagagauccuucuguaaagguuuuuggaauuaugucugcugaauaauaaacuuuuuugaaauaauaaaucugguagaaaaaugagaucuaaaaaaaaaaaaaaaaaaaaaaaaaaaaaaaaaaaaaaaaaaaaaaaaaaaaaaaaaaaaaaaaugcaucccccccccccccccccccccccccccccccaaaggcucuuuucagagccaccagaauu

SEQ ID NO: 19374 - RNA, 1970 nt, Artificial Sequence
  mRNA product Design g-2 comprising derived and/or modified sequence from HRSV(Memphis-37)__AIY60640.1__F_DSCav1_mut8 (opt3)
gggagaguccgcucagccagguugcagaagcggcuuagcguguguccuaaucuucucucugcguguagguaggccugugccgcaaacaagcuuaccauggagcugcccauccucaagaccaacgccauuacaacuauacuugcugcagugacgcugugcuucgccagcucccagaauaucaccgaagaguuuuaccaaucuacauguucagcggucaguaaaggcuauuugggggcuuuaagaacuggaugguacaccagcguuauuacaaucgaacuguccaacauuaaggagaucaaaugcaaugguaccgacgccaaggugaaacuaauaaagcaggaacucgauaaguauaaaaacgcaguaacugaccugcagcuucugaugcagucuacuccugccgcuggcucggggucagcaaucgccagcggaauugcuguguguaaggucuugcaccucgagggcgaggugaauaaaaucaagaacgcccugcugaguaccaauaaagcgguugugucccucucugguugcggggucagcguguuaacguucaagguacuggaucuuaagaacuacauugacaaacaauugcugccaauccuaaauaagcaguccuguucaauaccgaacauugaaacuguuaucgaguuucagcagaaaaauaacaggcuccuggaaauuacccgggaguucagugugaaugcaggagucacaacucccgugagcaccuauaugcuuacaaacucugagcuguugucccucaucaaugauaugccuaucaccaacgaccaaaagaaacugaugucaaacaaugugcagauuguccgccagcagagcuacaguauaaugugcaucauuaaggaagagguuuuagccuaugugguacaacugccacucuacggcgugaucgauacgcccuguuggaaacuucauacuucuccucugugcacaaccaacacuaaggaaggcuccaauauauguuugacacgaaccgaccgugggugguacugcgauaacgcuggaagcgucucguuuuucccacaggccgagacguguaaggugcagucuaauagaguuuucugcgacaccaugaacucccuaacacugcccucagaagugaaucucugcaacauugauaucuucaauccuaaauaugacuguaagaucaugacaaguaaaaccgaugucagcuccucugugauuacaagccugggugcaaucguaucaugcuacggcaagacuaaauguaccgcuaguaacaagugcagggggauuauaaagacauuuuccaauggaugugacuauguuagcaacaaaggcguggacaccgucucuguggguaauacucuuuacuaugucaacaagcaagaggggcagucacuguacgugaaaggagagccaaucauuaauuucuaugauccguugguuuuucccagugacgaauuugaugccagcaucucccaggugaacgagaagaucaaccagucucucgcguuuauucggaaaucggacgaacuguuacacaauguaaacgucggcaagagcacgacaaauauaaugaucaccacuauuaucauugugaucauaguuauccugcuacuccugauugccgugggccuuuucuuguacugcaaggcacgcuccaccccugucacacugucaaaagaucaacucagugggaucaacaauauugcuuucucuaacugaggacuaguaauaaggaaacuguaugaaugucugugggcaggaagugaagagauccuucuguaaagguuuuuggaauuaugucugcugaauaauaaacuuuuuugaaauaauaaaucugguagaaaaaugagaucuaaaaaaaaaaaaaaaaaaaaaaaaaaaaaaaaaaaaaaaaaaaaaaaaaaaaaaaaaaaaaaaaugcaucccccccccccccccccccccccccccccccaaaggcucuuuucagagccaccagaauu

SEQ ID NO: 19375 - RNA, 1970 nt, Artificial Sequence
  mRNA product Design g-2 comprising derived and/or modified sequence from HRSV(Memphis-37)__AIY60640.1__F_DSCav1_mut8 (opt4)
gggagaguccgcucagccagguugcagaagcggcuuagcguguguccuaaucuucucucugcguguagguaggccugugccgcaaacaagcuuaccauggagcugcccauccugaagaccaacgccaucaccaccauccuggccgccgugacccugugcuucgccagcagccagaacaucaccgaggaguucuaccagagcaccugcagcgccgugagcaagggcuaccugggcgcccugagaaccggcugguacaccagcgugaucaccaucgagcugagcaacaucaaggagaucaagugcaacggcaccgacgccaaggugaagcugaucaagcaggagcuggacaaguacaagaacgccgugaccgaccugcagcugcugaugcagagcacccccgccgccggcagcggcagcgccaucgccagcggcaucgccgugugcaaggugcugcaccuggagggcgaggugaacaagaucaagaacgcccugcugagcaccaacaaggccguggugagccugagcggcugcggcgugagcgugcugaccuucaaggugcuggaccugaagaacuacaucgacaagcagcugcugcccauccugaacaagcagagcugcagcauccccaacaucgagaccgugaucgaguuccagcagaagaacaacagacugcuggagaucaccagagaguucagcgugaacgccggcgugaccacccccgugagcaccuacaugcugaccaacagcgagcugcugagccugaucaacgacaugcccaucaccaacgaccagaagaagcugaugagcaacaacgugcagaucgugagacagcagagcuacagcaucaugugcaucaucaaggaggaggugcuggccuacguggugcagcugccccuguacggcgugaucgacacccccugcuggaagcugcacaccagcccccugugcaccaccaacaccaaggagggcagcaacaucugccugaccagaaccgacagaggcugguacugcgacaacgccggcagcgugagcuucuucccccaggccgagaccugcaaggugcagagcaacagaguguucugcgacaccaugaacagccugacccugcccagcgaggugaaccugugcaacaucgacaucuucaaccccaaguacgacugcaagaucaugaccagcaagaccgacgugagcagcagcgugaucaccagccugggcgccaucgugagcugcuacggcaagaccaagugcaccgccagcaacaagugcagaggcaucaucaagaccuucagcaacggcugcgacuacgugagcaacaagggcguggacaccgugagcgugggcaacacccuguacuacgugaacaagcaggagggccagagccuguacgugaagggcgagcccaucaucaacuucuacgacccccugguguuccccagcgacgaguucgacgccagcaucagccaggugaacgagaagaucaaccagagccuggccuucaucagaaagagcgacgagcugcugcacaacgugaacgugggcaagagcaccaccaacaucaugaucaccaccaucaucaucgugaucaucgugauccugcugcugcugaucgccgugggccuguuccuguacugcaaggccagaagcacccccgugacccugagcaaggaccagcugagcggcaucaacaacaucgccuucagcaacugaggacuaguaauaaggaaacuguaugaaugucugugggcaggaagugaagagauccuucuguaaagguuuuuggaauuaugucugcugaauaauaaacuuuuuugaaauaauaaaucugguagaaaaaugagaucuaaaaaaaaaaaaaaaaaaaaaaaaaaaaaaaaaaaaaaaaaaaaaaaaaaaaaaaaaaaaaaaaugcaucccccccccccccccccccccccccccccccaaaggcucuuuucagagccaccagaauu

SEQ ID NO: 19376 - RNA, 1970 nt, Artificial Sequence
  mRNA product Design g-2 comprising derived and/or modified sequence from HRSV(Memphis-37)__AIY60640.1__F_DSCav1_mut8 (opt5)
gggagaguccgcucagccagguugcagaagcggcuuagcguguguccuaaucuucucucugcguguagguaggccugugccgcaaacaagcuuaccauggagcugcccauccucaagaccaacgccauuacaacgauccuggcugccgugacccuuugcuucgcgagcucccagaauauuacagaagaguuuuaccaaucuaccuguagcgcugucuccaaaggcuaucugggggcccucagaacaggaugguacaccucuguuaucacaauugaacugagcaacaucaaggagaucaaaugcaauggcaccgacgccaaggugaaacuuauuaagcaggaacuggauaaguauaaaaacgcugugacggaccuccagcugcugaugcaguccaccccugccgcugggucuggaagcgccaucgcguccggcauugccgucuguaaggugcuccaccuggagggggagguuaauaaaaucaagaacgcccuucugagcacaaauaaagcuguggucucucucuccggaugcggcgugagcguucugaccuucaaggugcuugaucugaagaacuacauugacaaacaacuccugccgauccugaauaagcagucuuguuccauucccaacaucgaaacagucaucgaguuucagcagaaaaauaaccggcuccuggaaauuacccgcgaguucagcgugaaugcuggcgugacgacaccugucucuaccuauaugcuuacaaacuccgagcugcucagccugaucaaugauaugcccauuaccaacgaccaaaagaaacuuauguccaacaauguucagaucgugagacagcagucuuacagcauuaugugcaucaucaaggaagaggugcuggccuaugucgugcaacucccucuguacgggguuauugauacccccuguuggaaacugcauacauccccucucugcacgaccaacacaaaggaaggaagcaauaucugucugacccggacagaccgcggcugguacugcgauaacgcggggucuguguccuuuuucccgcaggccgagaccuguaagguccagagcaauagaguguuuugcgacacgaugaacucucuuacacugcccagcgaaguuaaucucugcaacauugauaucuucaauccuaaauaugacuguaagauuaugaccuccaaaaccgaugugucuagcuccgucaucacaagccugggagcuaucgugucuugcuacggcaagaccaaauguacagccuccaacaagugccgggggauuaucaagacguuuagcaauggaugugacuaugucucuaacaaaggcguggacaccguuuccgugggcaauacacuuuacuaugucaacaagcaagaggggcagagccuguacgugaaaggagagcccauuaucaauuucuaugauccucucguuuuucccuccgacgaguucgaugcuucuauuagccaggugaacgaaaagaucaaccagucccuggccuuuauucgcaaaucugacgaacugcuccacaaugucaacgugggcaagagcaccacaaauaucaugaucaccacgauuaucauugugaucauuguuauccugcuucugcucaucgccgucgggcuguuccuguacugcaaggcuagauccaccccggugacacuuagcaaagaucaacucucuggaauuaacaauaucgcguucuccaacugaggacuaguaauaaggaaacuguaugaaugucugugggcaggaagugaagagauccuucuguaaagguuuuuggaauuaugucugcugaauaauaaacuuuuuugaaauaauaaaucugguagaaaaaugagaucuaaaaaaaaaaaaaaaaaaaaaaaaaaaaaaaaaaaaaaaaaaaaaaaaaaaaaaaaaaaaaaaaugcaucccccccccccccccccccccccccccccccaaaggcucuuuucagagccaccagaauu

SEQ ID NO: 19377 - RNA, 1970 nt, Artificial Sequence
  mRNA product Design g-2 comprising derived and/or modified sequence from HRSV(Memphis-37)__AIY60640.1__F_DSCav1_mut8 (opt6)
gggagaguccgcucagccagguugcagaagcggcuuagcguguguccuaaucuucucucugcguguagguaggccugugccgcaaacaagcuuaccauggaacuuccuauuuuaaaaacaaacgcaauuacaaccauauuagcagcaguaacacuaugcuuugcaucaucacaaaacaucaccgaagaauuuuaucaauccacaugcucagcaguaucaaaaggauaccuuggcgcacuccgaacaggcugguauacaucggucauaacuauagaacucuccaacauaaaagaaauaaaaugcaaugguacugacgcaaaaguaaaauuaauaaaacaagaacuagacaaauacaaaaacgcaguaaccgauuuacaacuacuuaugcaaucaacaccugcagcaggaagcggaucagcaauagcaaguggaauagcaguaugcaaaguacuucaccucgaaggagaaguaaauaaaauaaaaaacgccuuacuaucaacaaauaaagccgucguaucacuuuccgguugcggcguaucaguauuaaccuuuaaagucuuagacuuaaaaaacuacauagacaaacaauuauuaccaauacuaaacaaacaauccuguuccauacccaacauagaaaccguaauagaauuucaacaaaaaaacaacagacuauuagaaauaacacgcgaauuuucaguaaacgcaggcguaacaacaccaguaucaacauauauguuaaccaauucagaauuauuaucccuuauaaaugacaugccuauaacaaacgaccaaaaaaaauuaaugaguaacaacguucaaauaguaagacaacaaucauacagcauaaugugcauaauaaaagaagaaguacuagcauacguaguucaacuaccacucuauggcguuaucgacaccccaugcuggaaacuacauaccucaccacucuguaccacuaauacgaaagaaggaucuaacauaugccuaaccagaacagaucgagguugguauugcgacaaugcuggaucaguaucauucuucccacaagcagaaaccugcaaaguacaaagcaacagaguauuuugugacacuaugaacucacuaacgcuaccuucagaaguaaaccuaugcaacaucgacauauucaacccaaaauacgauugcaaaauaaugacaucaaaaacagacguuuccucaucaguaauaacaucauuaggagcaauaguauccugcuacgguaaaaccaaaugcacagcauccaauaaaugccgaggaaucauuaaaacauuuucaaauggcugcgacuauguaaguaauaaagguguagauacaguaucaguaggcaacacacuauauuacguaaacaaacaagaagggcaaucccuauaugucaaaggcgaaccaauuauaaacuucuacgacccccucguauucccaucagacgaauuugacgcaucaauaucccaaguaaacgaaaaaaucaaccaaucacucgcauucauacguaaauccgacgaauuacuacauaacguaaacguaggcaaaucaacaacaaauauaaugauaacaaccauaaucauaguaauaauaguuauacuccuacuacucauugcagucggccuauuucuauacuguaaagcacgcucuacaccaguaacacuaucuaaagaucaauuauccggaauaaacaacauugccuucuccaauuaaggacuaguaauaaggaaacuguaugaaugucugugggcaggaagugaagagauccuucuguaaagguuuuuggaauuaugucugcugaauaauaaacuuuuuugaaauaauaaaucugguagaaaaaugagaucuaaaaaaaaaaaaaaaaaaaaaaaaaaaaaaaaaaaaaaaaaaaaaaaaaaaaaaaaaaaaaaaaugcaucccccccccccccccccccccccccccccccaaaggcucuuuucagagccaccagaauu

SEQ ID NO: 19378 - RNA, 1970 nt, Artificial Sequence
  mRNA product Design g-2 comprising derived and/or modified sequence from HRSV(Memphis-37)__AIY60640.1__F_DSCav1_mut8 (opt11)
gggagaguccgcucagccagguugcagaagcggcuuagcguguguccuaaucuucucucugcguguagguaggccugugccgcaaacaagcuuaccauggaacuucccauccugaagaccaacgcuaucacaaccauccucgccgcagucacccuuugcuucgccucaucccaaaacaucaccgaagaauuuuaccagucaaccugcucggccgucuccaagggcuaccucggcgcccuccgcacuggcugguacacauccgucaucaccaucgaacucuccaacauaaaagaaauaaaaugcaacggaaccgacgccaaagucaaacucaucaaacaagaacuagauaaauauaaaaacgccgucaccgaccugcaacuccucaugcaauccaccccagccgccggcucuggcagcgccaucgcaagcggaaucgccgucugcaaaguccuccaccuagaaggcgaagucaacaaaauuaaaaacgcccuccucuccaccaacaaagcaguugucucccucucuggcugcggagucucuguacucaccuucaaaguacuagaccucaagaauuacauagacaaacaacuccugcccauccuuaacaaacaaaguuguaguauccccaacaucgaaacaguaaucgaauuucagcagaaaaacaaccgccuccucgaaaucacacgagaguucucggucaacgccggcgucaccacccccguaucaaccuacaugcuaacaaacuccgaacuacuuucccucaucaaugacaugcccauaaccaacgaccaaaagaaacuaauguccaauaacguccagauaguccgucaacaguccuacucaaucaugugcauaauuaaagaagaaguacucgccuacgucguccaacuaccccucuauggagucaucgacacccccugcuggaaacuccacacaucaccccuaugcacaaccaacaccaaagaaggcuccaacaucugccucacaagaaccgaccgcggcugguacugcgacaacgcuggcuccgucucguucuucccacaagccgaaaccugcaaaguccaaucaaaccgggucuucugcgacaccaugaacucccucacucucccaagcgaagucaaccuaugcaacaucgacaucuucaacccaaaauacgacuguaaaaucaugacuucgaaaacagacgucuccucaucaguaaucacauccuuaggcgccaucguguccugcuacgguaagaccaaaugcacagccuccaacaaaugccggggcaucaucaaaaccuucagcaacgguugugauuacgucuccaacaaaggaguagacaccgucuccguaggaaacacccucuacuacgucaacaagcaagaaggccaaucccucuacgucaaaggggaacccaucaucaacuucuacgacccacucgucuuccccuccgacgaguucgacgcaagcaucucccaagucaacgaaaagaucaaccaaucacuagccuucauccgcaaauccgacgaacuccuccacaacguuaacguaggcaaauccaccaccaacaucaugaucacaaccaucaucauagucauaauagucauccuacuacuccucaucgccguaggucuauuccuauacuguaaagcucgaucaacccccgucacacucuccaaagaucaacucucaggaaucaacaacaucgccuucuccaacuaaggacuaguaauaaggaaacuguaugaaugucugugggcaggaagugaagagauccuucuguaaagguuuuuggaauuaugucugcugaauaauaaacuuuuuugaaauaauaaaucugguagaaaaaugagaucuaaaaaaaaaaaaaaaaaaaaaaaaaaaaaaaaaaaaaaaaaaaaaaaaaaaaaaaaaaaaaaaaugcaucccccccccccccccccccccccccccccccaaaggcucuuuucagagccaccagaauu

SEQ ID NO: 19379 - RNA, 2202 nt, Artificial Sequence
  mRNA product Design g-3 comprising derived and/or modified sequence from HRSV(Memphis-37)__AIY60640.1__F_DSCav1_mut8 (opt1)
gggagaguccgcucagccagguugcagaagcggcuuagcguguguccuaaucuucucucugcguguagguaggccugugccgcaaacaagcuuaccauggagcugcccauccucaagaccaacgccaucaccacgauccuggccgcggugacccugugcuucgccagcucccagaacaucaccgaggaguucuaccagagcacgugcuccgccgucagcaagggcuaccucggcgcccugcgcaccgggugguacaccagcgugaucaccaucgagcuguccaacaucaaggagaucaagugcaacggcaccgacgccaaggugaagcucaucaagcaggagcuggacaaguacaagaacgcggucacggaccugcagcuccugaugcagagcaccccggccgccggcuccgggagcgcgaucgccuccggcaucgccgucugcaaggugcugcaccucgagggcgaggugaacaagaucaagaacgcccugcuguccaccaacaaggccgucgugagccucuccggcugcggggugagcguccugaccuucaaggugcuggaccucaagaacuacaucgacaagcagcugcugcccauccugaacaagcagagcugcuccauccccaacaucgagaccgucaucgaguuccagcagaagaacaaccgccuccuggagaucacgcgggaguucagcgugaacgcgggcgugaccacccccgucuccaccuacaugcugacgaacagcgagcuccugucccugaucaacgacaugccgaucaccaacgaccagaagaagcucaugagcaacaacgugcagaucgugcgccagcaguccuacagcaucaugugcaucaucaaggaggagguccuggccuacguggugcagcugccccucuacggggucaucgacacccccugcuggaagcugcacaccagcccccugugcacgaccaacaccaaggagggcuccaacaucugccucacccggacggaccgcgggugguacugcgacaacgccggcagcguguccuucuucccgcaggccgagaccugcaagguccagagcaaccggguguucugcgacaccaugaacucccugacccugcccagcgaggugaaccucugcaacaucgacaucuucaaccccaaguacgacugcaagaucaugacguccaagaccgacgucagcuccagcgugaucaccucccugggcgccaucgugagcugcuacgggaagaccaagugcacggcgagcaacaagugccgcggcaucaucaagaccuucuccaacgggugcgacuacgucagcaacaagggcguggacaccguguccgucggcaacacccuguacuacgugaacaagcaggagggccagagccucuacgugaagggggagcccaucaucaacuucuacgacccgcuggucuuccccuccgacgaguucgacgccagcaucucccaggugaacgagaagaucaaccagagccuggccuucauccggaaguccgacgagcuccugcacaacgugaacgucggcaagagcaccacgaacaucaugaucaccaccaucaucaucgugaucaucgugauccugcugcuccugaucgccgucgggcuguuccucuacugcaaggcccgcuccacccccgugacgcugagcaaggaccagcuguccgggaucaacaacaucgcguucagcaacugaggacuagugaagggaacacccaaauuuaauucagccuuaagcacaauuaauuaagagugaaacguaauuguacaagcaguuggucacccaccauagggcaugaucaacaccgcaaccuuuccuuuuucccccagugauucugaaaaaccccucuucccuucagcuugcuuagauguuccaaauuuaguaagcuuaaggcggccuacagaagaaaaagaaaaaaaaggccacaaaaguucccucucacuuucaguaaauaaaauaaaagcagcaacagaaauaaagaaauaaaugaaauucaaaaugaaauaaauauuguguugugcagcauuaaaaaaucaauaaaaauuaaaaaugagcaagaucuaaaaaaaaaaaaaaaaaaaaaaaaaaaaaaaaaaaaaaaaaaaaaaaaaaaaaaaaaaaaaaaaugcaucccccccccccccccccccccccccccccccaaaggcucuuuucagagccaccagaauu

SEQ ID NO: 19380 - RNA, 2202 nt, Artificial Sequence
  mRNA product Design g-3 comprising derived and/or modified sequence from HRSV(Memphis-37)__AIY60640.1__F_DSCav1_mut8 (opt1)
gggagaguccgcucagccagguugcagaagcggcuuagcguguguccuaaucuucucucugcguguagguaggccugugccgcaaacaagcuuaccauggagcugcccauccucaagaccaacgccaucaccacgauccuggccgcggugacccugugcuucgccagcucccagaacaucaccgaggaguucuaccagagcacgugcuccgccgucagcaagggcuaccucggggcccugcgcaccggcugguacaccuccgugaucaccaucgagcugagcaacaucaaggagaucaagugcaacgggaccgacgccaaggugaagcucaucaagcaggagcuggacaaguacaagaacgcggucacggaccugcagcuccugaugcaguccaccccggccgccggcagcggguccgccaucgcgagcggcaucgccgugugcaaggugcugcaccucgagggcgaggucaacaagaucaagaacgcccugcuguccaccaacaaggccguggugagccucuccgggugcggcgucagcgugcugaccuucaaggugcuggaccucaagaacuacaucgacaagcagcugcugcccauccucaacaagcaguccugcagcauccccaacaucgagacggucaucgaguuccagcagaagaacaaccggcugcuggagaucacccgcgaguucuccgugaacgccggggugaccacccccgucagcacguacaugcucaccaacuccgagcugcugagccucaucaacgacaugccgaucaccaacgaccagaagaagcugaugagcaacaacgugcagaucgugcggcagcaguccuacagcaucaugugcaucaucaaggaggagguccuggcguacguggugcagcucccccuguacggcgucaucgacacccccugcuggaagcugcacacgagcccccucugcaccaccaacaccaaggagggguccaacaucugccugacgcgcaccgaccggggcugguacugcgacaacgccggcuccgugagcuucuucccgcaggccgagaccugcaaggugcaguccaaccgcgucuucugcgacaccaugaacagccugacgcuccccuccgaggugaaccugugcaacaucgacaucuucaaccccaaguacgacugcaagaucaugaccagcaagaccgacgucuccagcuccgugaucaccagccugggggccaucguguccugcuacggcaagacgaagugcaccgccagcaacaagugccgggggaucaucaagaccuucuccaacggcugcgacuacgucagcaacaagggcguggacaccguguccgucgggaacacgcucuacuacgugaacaagcaggagggccagagccuguacgugaagggggagcccaucaucaacuucuacgacccgcuggucuuccccagcgacgaguucgacgcguccaucagccaggugaacgagaagaucaaccagucccucgccuucauccgcaagagcgacgagcugcugcacaacgugaacgucggcaaguccaccaccaacaucaugaucaccaccaucaucaucgugaucaucgugauccuccugcugcucaucgccgucgggcuguuccuguacugcaaggcccggagcacgcccgugacccuguccaaggaccagcucagcggcaucaacaacaucgccuucuccaacugaggacuagugaagggaacacccaaauuuaauucagccuuaagcacaauuaauuaagagugaaacguaauuguacaagcaguuggucacccaccauagggcaugaucaacaccgcaaccuuuccuuuuucccccagugauucugaaaaaccccucuucccuucagcuugcuuagauguuccaaauuuaguaagcuuaaggcggccuacagaagaaaaagaaaaaaaaggccacaaaaguucccucucacuuucaguaaauaaaauaaaagcagcaacagaaauaaagaaauaaaugaaauucaaaaugaaauaaauauuguguugugcagcauuaaaaaaucaauaaaaauuaaaaaugagcaagaucuaaaaaaaaaaaaaaaaaaaaaaaaaaaaaaaaaaaaaaaaaaaaaaaaaaaaaaaaaaaaaaaaugcaucccccccccccccccccccccccccccccccaaaggcucuuuucagagccaccagaauu

SEQ ID NO: 19381 - RNA, 2202 nt, Artificial Sequence
  mRNA product Design g-3 comprising derived and/or modified sequence from HRSV(Memphis-37)__AIY60640.1__F_DSCav1_mut8 (opt2)
gggagaguccgcucagccagguugcagaagcggcuuagcguguguccuaaucuucucucugcguguagguaggccugugccgcaaacaagcuuaccauggagcuccccauccucaagaccaacgccaucaccaccauccucgccgccgucacccucugcuucgccuccucccagaacaucaccgaggaguucuaccaguccaccugcuccgccgucuccaagggcuaccucggcgcccuccgcaccggcugguacaccuccgucaucaccaucgagcucuccaacaucaaggagaucaagugcaacggcaccgacgccaaggucaagcucaucaagcaggagcucgacaaguacaagaacgccgucaccgaccuccagcuccucaugcaguccacccccgccgccggcuccggcuccgccaucgccuccggcaucgccgucugcaagguccuccaccucgagggcgaggucaacaagaucaagaacgcccuccucuccaccaacaaggccgucgucucccucuccggcugcggcgucuccguccucaccuucaagguccucgaccucaagaacuacaucgacaagcagcuccuccccauccucaacaagcaguccugcuccauccccaacaucgagaccgucaucgaguuccagcagaagaacaaccgccuccucgagaucacccgcgaguucuccgucaacgccggcgucaccacccccgucuccaccuacaugcucaccaacuccgagcuccucucccucaucaacgacaugcccaucaccaacgaccagaagaagcucauguccaacaacguccagaucguccgccagcaguccuacuccaucaugugcaucaucaaggaggagguccucgccuacgucguccagcucccccucuacggcgucaucgacacccccugcuggaagcuccacaccuccccccucugcaccaccaacaccaaggagggcuccaacaucugccucacccgcaccgaccgcggcugguacugcgacaacgccggcuccgucuccuucuucccccaggccgagaccugcaagguccaguccaaccgcgucuucugcgacaccaugaacucccucacccuccccuccgaggucaaccucugcaacaucgacaucuucaaccccaaguacgacugcaagaucaugaccuccaagaccgacgucuccuccuccgucaucaccucccucggcgccaucgucuccugcuacggcaagaccaagugcaccgccuccaacaagugccgcggcaucaucaagaccuucuccaacggcugcgacuacgucuccaacaagggcgucgacaccgucuccgucggcaacacccucuacuacgucaacaagcaggagggccagucccucuacgucaagggcgagcccaucaucaacuucuacgacccccucgucuuccccuccgacgaguucgacgccuccaucucccaggucaacgagaagaucaaccagucccucgccuucauccgcaaguccgacgagcuccuccacaacgucaacgucggcaaguccaccaccaacaucaugaucaccaccaucaucaucgucaucaucgucauccuccuccuccucaucgccgucggccucuuccucuacugcaaggcccgcuccacccccgucacccucuccaaggaccagcucuccggcaucaacaacaucgccuucuccaacugaggacuagugaagggaacacccaaauuuaauucagccuuaagcacaauuaauuaagagugaaacguaauuguacaagcaguuggucacccaccauagggcaugaucaacaccgcaaccuuuccuuuuucccccagugauucugaaaaaccccucuucccuucagcuugcuuagauguuccaaauuuaguaagcuuaaggcggccuacagaagaaaaagaaaaaaaaggccacaaaaguucccucucacuuucaguaaauaaaauaaaagcagcaacagaaauaaagaaauaaaugaaauucaaaaugaaauaaauauuguguugugcagcauuaaaaaaucaauaaaaauuaaaaaugagcaagaucuaaaaaaaaaaaaaaaaaaaaaaaaaaaaaaaaaaaaaaaaaaaaaaaaaaaaaaaaaaaaaaaaugcaucccccccccccccccccccccccccccccccaaaggcucuuuucagagccaccagaauu

SEQ ID NO: 19382 - RNA, 2202 nt, Artificial Sequence
  mRNA product Design g-3 comprising derived and/or modified sequence from HRSV(Memphis-37)__AIY60640.1__F_DSCav1_mut8 (opt3)
gggagaguccgcucagccagguugcagaagcggcuuagcguguguccuaaucuucucucugcguguagguaggccugugccgcaaacaagcuuaccauggagcugcccauccucaagaccaacgccauuacaacuauacuugcugcagugacgcugugcuucgccagcucccagaauaucaccgaagaguuuuaccaaucuacauguucagcggucaguaaaggcuauuugggggcuuuaagaacuggaugguacaccagcguuauuacaaucgaacuguccaacauuaaggagaucaaaugcaaugguaccgacgccaaggugaaacuaauaaagcaggaacucgauaaguauaaaaacgcaguaacugaccugcagcuucugaugcagucuacuccugccgcuggcucggggucagcaaucgccagcggaauugcuguguguaaggucuugcaccucgagggcgaggugaauaaaaucaagaacgcccugcugaguaccaauaaagcgguugugucccucucugguugcggggucagcguguuaacguucaagguacuggaucuuaagaacuacauugacaaacaauugcugccaauccuaaauaagcaguccuguucaauaccgaacauugaaacuguuaucgaguuucagcagaaaaauaacaggcuccuggaaauuacccgggaguucagugugaaugcaggagucacaacucccgugagcaccuauaugcuuacaaacucugagcuguugucccucaucaaugauaugccuaucaccaacgaccaaaagaaacugaugucaaacaaugugcagauuguccgccagcagagcuacaguauaaugugcaucauuaaggaagagguuuuagccuaugugguacaacugccacucuacggcgugaucgauacgcccuguuggaaacuucauacuucuccucugugcacaaccaacacuaaggaaggcuccaauauauguuugacacgaaccgaccgugggugguacugcgauaacgcuggaagcgucucguuuuucccacaggccgagacguguaaggugcagucuaauagaguuuucugcgacaccaugaacucccuaacacugcccucagaagugaaucucugcaacauugauaucuucaauccuaaauaugacuguaagaucaugacaaguaaaaccgaugucagcuccucugugauuacaagccugggugcaaucguaucaugcuacggcaagacuaaauguaccgcuaguaacaagugcagggggauuauaaagacauuuuccaauggaugugacuauguuagcaacaaaggcguggacaccgucucuguggguaauacucuuuacuaugucaacaagcaagaggggcagucacuguacgugaaaggagagccaaucauuaauuucuaugauccguugguuuuucccagugacgaauuugaugccagcaucucccaggugaacgagaagaucaaccagucucucgcguuuauucggaaaucggacgaacuguuacacaauguaaacgucggcaagagcacgacaaauauaaugaucaccacuauuaucauugugaucauaguuauccugcuacuccugauugccgugggccuuuucuuguacugcaaggcacgcuccaccccugucacacugucaaaagaucaacucagugggaucaacaauauugcuuucucuaacugaggacuagugaagggaacacccaaauuuaauucagccuuaagcacaauuaauuaagagugaaacguaauuguacaagcaguuggucacccaccauagggcaugaucaacaccgcaaccuuuccuuuuucccccagugauucugaaaaaccccucuucccuucagcuugcuuagauguuccaaauuuaguaagcuuaaggcggccuacagaagaaaaagaaaaaaaaggccacaaaaguucccucucacuuucaguaaauaaaauaaaagcagcaacagaaauaaagaaauaaaugaaauucaaaaugaaauaaauauuguguugugcagcauuaaaaaaucaauaaaaauuaaaaaugagcaagaucuaaaaaaaaaaaaaaaaaaaaaaaaaaaaaaaaaaaaaaaaaaaaaaaaaaaaaaaaaaaaaaaaugcaucccccccccccccccccccccccccccccccaaaggcucuuuucagagccaccagaauu

SEQ ID NO: 19383 - RNA, 2202 nt, Artificial Sequence
  mRNA product Design g-3 comprising derived and/or modified sequence from HRSV(Memphis-37)__AIY60640.1__F_DSCav1_mut8 (opt4)
gggagaguccgcucagccagguugcagaagcggcuuagcguguguccuaaucuucucucugcguguagguaggccugugccgcaaacaagcuuaccauggagcugcccauccugaagaccaacgccaucaccaccauccuggccgccgugacccugugcuucgccagcagccagaacaucaccgaggaguucuaccagagcaccugcagcgccgugagcaagggcuaccugggcgcccugagaaccggcugguacaccagcgugaucaccaucgagcugagcaacaucaaggagaucaagugcaacggcaccgacgccaaggugaagcugaucaagcaggagcuggacaaguacaagaacgccgugaccgaccugcagcugcugaugcagagcacccccgccgccggcagcggcagcgccaucgccagcggcaucgccgugugcaaggugcugcaccuggagggcgaggugaacaagaucaagaacgcccugcugagcaccaacaaggccguggugagccugagcggcugcggcgugagcgugcugaccuucaaggugcuggaccugaagaacuacaucgacaagcagcugcugcccauccugaacaagcagagcugcagcauccccaacaucgagaccgugaucgaguuccagcagaagaacaacagacugcuggagaucaccagagaguucagcgugaacgccggcgugaccacccccgugagcaccuacaugcugaccaacagcgagcugcugagccugaucaacgacaugcccaucaccaacgaccagaagaagcugaugagcaacaacgugcagaucgugagacagcagagcuacagcaucaugugcaucaucaaggaggaggugcuggccuacguggugcagcugccccuguacggcgugaucgacacccccugcuggaagcugcacaccagcccccugugcaccaccaacaccaaggagggcagcaacaucugccugaccagaaccgacagaggcugguacugcgacaacgccggcagcgugagcuucuucccccaggccgagaccugcaaggugcagagcaacagaguguucugcgacaccaugaacagccugacccugcccagcgaggugaaccugugcaacaucgacaucuucaaccccaaguacgacugcaagaucaugaccagcaagaccgacgugagcagcagcgugaucaccagccugggcgccaucgugagcugcuacggcaagaccaagugcaccgccagcaacaagugcagaggcaucaucaagaccuucagcaacggcugcgacuacgugagcaacaagggcguggacaccgugagcgugggcaacacccuguacuacgugaacaagcaggagggccagagccuguacgugaagggcgagcccaucaucaacuucuacgacccccugguguuccccagcgacgaguucgacgccagcaucagccaggugaacgagaagaucaaccagagccuggccuucaucagaaagagcgacgagcugcugcacaacgugaacgugggcaagagcaccaccaacaucaugaucaccaccaucaucaucgugaucaucgugauccugcugcugcugaucgccgugggccuguuccuguacugcaaggccagaagcacccccgugacccugagcaaggaccagcugagcggcaucaacaacaucgccuucagcaacugaggacuagugaagggaacacccaaauuuaauucagccuuaagcacaauuaauuaagagugaaacguaauuguacaagcaguuggucacccaccauagggcaugaucaacaccgcaaccuuuccuuuuucccccagugauucugaaaaaccccucuucccuucagcuugcuuagauguuccaaauuuaguaagcuuaaggcggccuacagaagaaaaagaaaaaaaaggccacaaaaguucccucucacuuucaguaaauaaaauaaaagcagcaacagaaauaaagaaauaaaugaaauucaaaaugaaauaaauauuguguugugcagcauuaaaaaaucaauaaaaauuaaaaaugagcaagaucuaaaaaaaaaaaaaaaaaaaaaaaaaaaaaaaaaaaaaaaaaaaaaaaaaaaaaaaaaaaaaaaaugcaucccccccccccccccccccccccccccccccaaaggcucuuuucagagccaccagaauu

SEQ ID NO: 19384 - RNA, 2202 nt, Artificial Sequence
  mRNA product Design g-3 comprising derived and/or modified sequence from HRSV(Memphis-37)__AIY60640.1__F_DSCav1_mut8 (opt5)
gggagaguccgcucagccagguugcagaagcggcuuagcguguguccuaaucuucucucugcguguagguaggccugugccgcaaacaagcuuaccauggagcugcccauccucaagaccaacgccauuacaacgauccuggcugccgugacccuuugcuucgcgagcucccagaauauuacagaagaguuuuaccaaucuaccuguagcgcugucuccaaaggcuaucugggggcccucagaacaggaugguacaccucuguuaucacaauugaacugagcaacaucaaggagaucaaaugcaauggcaccgacgccaaggugaaacuuauuaagcaggaacuggauaaguauaaaaacgcugugacggaccuccagcugcugaugcaguccaccccugccgcugggucuggaagcgccaucgcguccggcauugccgucuguaaggugcuccaccuggagggggagguuaauaaaaucaagaacgcccuucugagcacaaauaaagcuguggucucucucuccggaugcggcgugagcguucugaccuucaaggugcuugaucugaagaacuacauugacaaacaacuccugccgauccugaauaagcagucuuguuccauucccaacaucgaaacagucaucgaguuucagcagaaaaauaaccggcuccuggaaauuacccgcgaguucagcgugaaugcuggcgugacgacaccugucucuaccuauaugcuuacaaacuccgagcugcucagccugaucaaugauaugcccauuaccaacgaccaaaagaaacuuauguccaacaauguucagaucgugagacagcagucuuacagcauuaugugcaucaucaaggaagaggugcuggccuaugucgugcaacucccucuguacgggguuauugauacccccuguuggaaacugcauacauccccucucugcacgaccaacacaaaggaaggaagcaauaucugucugacccggacagaccgcggcugguacugcgauaacgcggggucuguguccuuuuucccgcaggccgagaccuguaagguccagagcaauagaguguuuugcgacacgaugaacucucuuacacugcccagcgaaguuaaucucugcaacauugauaucuucaauccuaaauaugacuguaagauuaugaccuccaaaaccgaugugucuagcuccgucaucacaagccugggagcuaucgugucuugcuacggcaagaccaaauguacagccuccaacaagugccgggggauuaucaagacguuuagcaauggaugugacuaugucucuaacaaaggcguggacaccguuuccgugggcaauacacuuuacuaugucaacaagcaagaggggcagagccuguacgugaaaggagagcccauuaucaauuucuaugauccucucguuuuucccuccgacgaguucgaugcuucuauuagccaggugaacgaaaagaucaaccagucccuggccuuuauucgcaaaucugacgaacugcuccacaaugucaacgugggcaagagcaccacaaauaucaugaucaccacgauuaucauugugaucauuguuauccugcuucugcucaucgccgucgggcuguuccuguacugcaaggcuagauccaccccggugacacuuagcaaagaucaacucucuggaauuaacaauaucgcguucuccaacugaggacuagugaagggaacacccaaauuuaauucagccuuaagcacaauuaauuaagagugaaacguaauuguacaagcaguuggucacccaccauagggcaugaucaacaccgcaaccuuuccuuuuucccccagugauucugaaaaaccccucuucccuucagcuugcuuagauguuccaaauuuaguaagcuuaaggcggccuacagaagaaaaagaaaaaaaaggccacaaaaguucccucucacuuucaguaaauaaaauaaaagcagcaacagaaauaaagaaauaaaugaaauucaaaaugaaauaaauauuguguugugcagcauuaaaaaaucaauaaaaauuaaaaaugagcaagaucuaaaaaaaaaaaaaaaaaaaaaaaaaaaaaaaaaaaaaaaaaaaaaaaaaaaaaaaaaaaaaaaaugcaucccccccccccccccccccccccccccccccaaaggcucuuuucagagccaccagaauu

SEQ ID NO: 19385 - RNA, 2202 nt, Artificial Sequence
  mRNA product Design g-3 comprising derived and/or modified sequence from HRSV(Memphis-37)__AIY60640.1__F_DSCav1_mut8 (opt6)
gggagaguccgcucagccagguugcagaagcggcuuagcguguguccuaaucuucucucugcguguagguaggccugugccgcaaacaagcuuaccauggaacuuccuauuuuaaaaacaaacgcaauuacaaccauauuagcagcaguaacacuaugcuuugcaucaucacaaaacaucaccgaagaauuuuaucaauccacaugcucagcaguaucaaaaggauaccuuggcgcacuccgaacaggcugguauacaucggucauaacuauagaacucuccaacauaaaagaaauaaaaugcaaugguacugacgcaaaaguaaaauuaauaaaacaagaacuagacaaauacaaaaacgcaguaaccgauuuacaacuacuuaugcaaucaacaccugcagcaggaagcggaucagcaauagcaaguggaauagcaguaugcaaaguacuucaccucgaaggagaaguaaauaaaauaaaaaacgccuuacuaucaacaaauaaagccgucguaucacuuuccgguugcggcguaucaguauuaaccuuuaaagucuuagacuuaaaaaacuacauagacaaacaauuauuaccaauacuaaacaaacaauccuguuccauacccaacauagaaaccguaauagaauuucaacaaaaaaacaacagacuauuagaaauaacacgcgaauuuucaguaaacgcaggcguaacaacaccaguaucaacauauauguuaaccaauucagaauuauuaucccuuauaaaugacaugccuauaacaaacgaccaaaaaaaauuaaugaguaacaacguucaaauaguaagacaacaaucauacagcauaaugugcauaauaaaagaagaaguacuagcauacguaguucaacuaccacucuauggcguuaucgacaccccaugcuggaaacuacauaccucaccacucuguaccacuaauacgaaagaaggaucuaacauaugccuaaccagaacagaucgagguugguauugcgacaaugcuggaucaguaucauucuucccacaagcagaaaccugcaaaguacaaagcaacagaguauuuugugacacuaugaacucacuaacgcuaccuucagaaguaaaccuaugcaacaucgacauauucaacccaaaauacgauugcaaaauaaugacaucaaaaacagacguuuccucaucaguaauaacaucauuaggagcaauaguauccugcuacgguaaaaccaaaugcacagcauccaauaaaugccgaggaaucauuaaaacauuuucaaauggcugcgacuauguaaguaauaaagguguagauacaguaucaguaggcaacacacuauauuacguaaacaaacaagaagggcaaucccuauaugucaaaggcgaaccaauuauaaacuucuacgacccccucguauucccaucagacgaauuugacgcaucaauaucccaaguaaacgaaaaaaucaaccaaucacucgcauucauacguaaauccgacgaauuacuacauaacguaaacguaggcaaaucaacaacaaauauaaugauaacaaccauaaucauaguaauaauaguuauacuccuacuacucauugcagucggccuauuucuauacuguaaagcacgcucuacaccaguaacacuaucuaaagaucaauuauccggaauaaacaacauugccuucuccaauuaaggacuagugaagggaacacccaaauuuaauucagccuuaagcacaauuaauuaagagugaaacguaauuguacaagcaguuggucacccaccauagggcaugaucaacaccgcaaccuuuccuuuuucccccagugauucugaaaaaccccucuucccuucagcuugcuuagauguuccaaauuuaguaagcuuaaggcggccuacagaagaaaaagaaaaaaaaggccacaaaaguucccucucacuuucaguaaauaaaauaaaagcagcaacagaaauaaagaaauaaaugaaauucaaaaugaaauaaauauuguguugugcagcauuaaaaaaucaauaaaaauuaaaaaugagcaagaucuaaaaaaaaaaaaaaaaaaaaaaaaaaaaaaaaaaaaaaaaaaaaaaaaaaaaaaaaaaaaaaaaugcaucccccccccccccccccccccccccccccccaaaggcucuuuucagagccaccagaauu

SEQ ID NO: 19386 - RNA, 2202 nt, Artificial Sequence
  mRNA product Design g-3 comprising derived and/or modified sequence from HRSV(Memphis-37)__AIY60640.1__F_DSCav1_mut8 (opt11)
gggagaguccgcucagccagguugcagaagcggcuuagcguguguccuaaucuucucucugcguguagguaggccugugccgcaaacaagcuuaccauggaacuucccauccugaagaccaacgcuaucacaaccauccucgccgcagucacccuuugcuucgccucaucccaaaacaucaccgaagaauuuuaccagucaaccugcucggccgucuccaagggcuaccucggcgcccuccgcacuggcugguacacauccgucaucaccaucgaacucuccaacauaaaagaaauaaaaugcaacggaaccgacgccaaagucaaacucaucaaacaagaacuagauaaauauaaaaacgccgucaccgaccugcaacuccucaugcaauccaccccagccgccggcucuggcagcgccaucgcaagcggaaucgccgucugcaaaguccuccaccuagaaggcgaagucaacaaaauuaaaaacgcccuccucuccaccaacaaagcaguugucucccucucuggcugcggagucucuguacucaccuucaaaguacuagaccucaagaauuacauagacaaacaacuccugcccauccuuaacaaacaaaguuguaguauccccaacaucgaaacaguaaucgaauuucagcagaaaaacaaccgccuccucgaaaucacacgagaguucucggucaacgccggcgucaccacccccguaucaaccuacaugcuaacaaacuccgaacuacuuucccucaucaaugacaugcccauaaccaacgaccaaaagaaacuaauguccaauaacguccagauaguccgucaacaguccuacucaaucaugugcauaauuaaagaagaaguacucgccuacgucguccaacuaccccucuauggagucaucgacacccccugcuggaaacuccacacaucaccccuaugcacaaccaacaccaaagaaggcuccaacaucugccucacaagaaccgaccgcggcugguacugcgacaacgcuggcuccgucucguucuucccacaagccgaaaccugcaaaguccaaucaaaccgggucuucugcgacaccaugaacucccucacucucccaagcgaagucaaccuaugcaacaucgacaucuucaacccaaaauacgacuguaaaaucaugacuucgaaaacagacgucuccucaucaguaaucacauccuuaggcgccaucguguccugcuacgguaagaccaaaugcacagccuccaacaaaugccggggcaucaucaaaaccuucagcaacgguugugauuacgucuccaacaaaggaguagacaccgucuccguaggaaacacccucuacuacgucaacaagcaagaaggccaaucccucuacgucaaaggggaacccaucaucaacuucuacgacccacucgucuuccccuccgacgaguucgacgcaagcaucucccaagucaacgaaaagaucaaccaaucacuagccuucauccgcaaauccgacgaacuccuccacaacguuaacguaggcaaauccaccaccaacaucaugaucacaaccaucaucauagucauaauagucauccuacuacuccucaucgccguaggucuauuccuauacuguaaagcucgaucaacccccgucacacucuccaaagaucaacucucaggaaucaacaacaucgccuucuccaacuaaggacuagugaagggaacacccaaauuuaauucagccuuaagcacaauuaauuaagagugaaacguaauuguacaagcaguuggucacccaccauagggcaugaucaacaccgcaaccuuuccuuuuucccccagugauucugaaaaaccccucuucccuucagcuugcuuagauguuccaaauuuaguaagcuuaaggcggccuacagaagaaaaagaaaaaaaaggccacaaaaguucccucucacuuucaguaaauaaaauaaaagcagcaacagaaauaaagaaauaaaugaaauucaaaaugaaauaaauauuguguugugcagcauuaaaaaaucaauaaaaauuaaaaaugagcaagaucuaaaaaaaaaaaaaaaaaaaaaaaaaaaaaaaaaaaaaaaaaaaaaaaaaaaaaaaaaaaaaaaaugcaucccccccccccccccccccccccccccccccaaaggcucuuuucagagccaccagaauu

SEQ ID NO: 19387 - RNA, 1997 nt, Artificial Sequence
  mRNA product Design g-4 comprising derived and/or modified sequence from HRSV(Memphis-37)__AIY60640.1__F_DSCav1_mut8 (opt1)
gggagacuccugucgggcggaaguaggaggaguagaguuuaaaaacaguacucuuuuuccgguucgggacguaguugaagcaacgacaagccggauaaccgcucuugagacaggaagcuuaccauggagcugcccauccucaagaccaacgccaucaccacgauccuggccgcggugacccugugcuucgccagcucccagaacaucaccgaggaguucuaccagagcacgugcuccgccgucagcaagggcuaccucggcgcccugcgcaccgggugguacaccagcgugaucaccaucgagcuguccaacaucaaggagaucaagugcaacggcaccgacgccaaggugaagcucaucaagcaggagcuggacaaguacaagaacgcggucacggaccugcagcuccugaugcagagcaccccggccgccggcuccgggagcgcgaucgccuccggcaucgccgucugcaaggugcugcaccucgagggcgaggugaacaagaucaagaacgcccugcuguccaccaacaaggccgucgugagccucuccggcugcggggugagcguccugaccuucaaggugcuggaccucaagaacuacaucgacaagcagcugcugcccauccugaacaagcagagcugcuccauccccaacaucgagaccgucaucgaguuccagcagaagaacaaccgccuccuggagaucacgcgggaguucagcgugaacgcgggcgugaccacccccgucuccaccuacaugcugacgaacagcgagcuccugucccugaucaacgacaugccgaucaccaacgaccagaagaagcucaugagcaacaacgugcagaucgugcgccagcaguccuacagcaucaugugcaucaucaaggaggagguccuggccuacguggugcagcugccccucuacggggucaucgacacccccugcuggaagcugcacaccagcccccugugcacgaccaacaccaaggagggcuccaacaucugccucacccggacggaccgcgggugguacugcgacaacgccggcagcguguccuucuucccgcaggccgagaccugcaagguccagagcaaccggguguucugcgacaccaugaacucccugacccugcccagcgaggugaaccucugcaacaucgacaucuucaaccccaaguacgacugcaagaucaugacguccaagaccgacgucagcuccagcgugaucaccucccugggcgccaucgugagcugcuacgggaagaccaagugcacggcgagcaacaagugccgcggcaucaucaagaccuucuccaacgggugcgacuacgucagcaacaagggcguggacaccguguccgucggcaacacccuguacuacgugaacaagcaggagggccagagccucuacgugaagggggagcccaucaucaacuucuacgacccgcuggucuuccccuccgacgaguucgacgccagcaucucccaggugaacgagaagaucaaccagagccuggccuucauccggaaguccgacgagcuccugcacaacgugaacgucggcaagagcaccacgaacaucaugaucaccaccaucaucaucgugaucaucgugauccugcugcuccugaucgccgucgggcuguuccucuacugcaaggcccgcuccacccccgugacgcugagcaaggaccagcuguccgggaucaacaacaucgcguucagcaacugaggacuaguaauaaggaaacuguaugaaugucugugggcaggaagugaagagauccuucuguaaagguuuuuggaauuaugucugcugaauaauaaacuuuuuugaaauaauaaaucugguagaaaaaugagaucuaaaaaaaaaaaaaaaaaaaaaaaaaaaaaaaaaaaaaaaaaaaaaaaaaaaaaaaaaaaaaaaaugcaucccccccccccccccccccccccccccccccaaaggcucuuuucagagccaccagaauu

SEQ ID NO: 19388 - RNA, 1997 nt, Artificial Sequence
  mRNA product Design g-4 comprising derived and/or modified sequence from HRSV(Memphis-37)__AIY60640.1__F_DSCav1_mut8 (opt1)
gggagacuccugucgggcggaaguaggaggaguagaguuuaaaaacaguacucuuuuuccgguucgggacguaguugaagcaacgacaagccggauaaccgcucuugagacaggaagcuuaccauggagcugcccauccucaagaccaacgccaucaccacgauccuggccgcggugacccugugcuucgccagcucccagaacaucaccgaggaguucuaccagagcacgugcuccgccgucagcaagggcuaccucggggcccugcgcaccggcugguacaccuccgugaucaccaucgagcugagcaacaucaaggagaucaagugcaacgggaccgacgccaaggugaagcucaucaagcaggagcuggacaaguacaagaacgcggucacggaccugcagcuccugaugcaguccaccccggccgccggcagcggguccgccaucgcgagcggcaucgccgugugcaaggugcugcaccucgagggcgaggucaacaagaucaagaacgcccugcuguccaccaacaaggccguggugagccucuccgggugcggcgucagcgugcugaccuucaaggugcuggaccucaagaacuacaucgacaagcagcugcugcccauccucaacaagcaguccugcagcauccccaacaucgagacggucaucgaguuccagcagaagaacaaccggcugcuggagaucacccgcgaguucuccgugaacgccggggugaccacccccgucagcacguacaugcucaccaacuccgagcugcugagccucaucaacgacaugccgaucaccaacgaccagaagaagcugaugagcaacaacgugcagaucgugcggcagcaguccuacagcaucaugugcaucaucaaggaggagguccuggcguacguggugcagcucccccuguacggcgucaucgacacccccugcuggaagcugcacacgagcccccucugcaccaccaacaccaaggagggguccaacaucugccugacgcgcaccgaccggggcugguacugcgacaacgccggcuccgugagcuucuucccgcaggccgagaccugcaaggugcaguccaaccgcgucuucugcgacaccaugaacagccugacgcuccccuccgaggugaaccugugcaacaucgacaucuucaaccccaaguacgacugcaagaucaugaccagcaagaccgacgucuccagcuccgugaucaccagccugggggccaucguguccugcuacggcaagacgaagugcaccgccagcaacaagugccgggggaucaucaagaccuucuccaacggcugcgacuacgucagcaacaagggcguggacaccguguccgucgggaacacgcucuacuacgugaacaagcaggagggccagagccuguacgugaagggggagcccaucaucaacuucuacgacccgcuggucuuccccagcgacgaguucgacgcguccaucagccaggugaacgagaagaucaaccagucccucgccuucauccgcaagagcgacgagcugcugcacaacgugaacgucggcaaguccaccaccaacaucaugaucaccaccaucaucaucgugaucaucgugauccuccugcugcucaucgccgucgggcuguuccuguacugcaaggcccggagcacgcccgugacccuguccaaggaccagcucagcggcaucaacaacaucgccuucuccaacugaggacuaguaauaaggaaacuguaugaaugucugugggcaggaagugaagagauccuucuguaaagguuuuuggaauuaugucugcugaauaauaaacuuuuuugaaauaauaaaucugguagaaaaaugagaucuaaaaaaaaaaaaaaaaaaaaaaaaaaaaaaaaaaaaaaaaaaaaaaaaaaaaaaaaaaaaaaaaugcaucccccccccccccccccccccccccccccccaaaggcucuuuucagagccaccagaauu

SEQ ID NO: 19389 - RNA, 1997 nt, Artificial Sequence
  mRNA product Design g-4 comprising derived and/or modified sequence from HRSV(Memphis-37)__AIY60640.1__F_DSCav1_mut8 (opt2)
gggagacuccugucgggcggaaguaggaggaguagaguuuaaaaacaguacucuuuuuccgguucgggacguaguugaagcaacgacaagccggauaaccgcucuugagacaggaagcuuaccauggagcuccccauccucaagaccaacgccaucaccaccauccucgccgccgucacccucugcuucgccuccucccagaacaucaccgaggaguucuaccaguccaccugcuccgccgucuccaagggcuaccucggcgcccuccgcaccggcugguacaccuccgucaucaccaucgagcucuccaacaucaaggagaucaagugcaacggcaccgacgccaaggucaagcucaucaagcaggagcucgacaaguacaagaacgccgucaccgaccuccagcuccucaugcaguccacccccgccgccggcuccggcuccgccaucgccuccggcaucgccgucugcaagguccuccaccucgagggcgaggucaacaagaucaagaacgcccuccucuccaccaacaaggccgucgucucccucuccggcugcggcgucuccguccucaccuucaagguccucgaccucaagaacuacaucgacaagcagcuccuccccauccucaacaagcaguccugcuccauccccaacaucgagaccgucaucgaguuccagcagaagaacaaccgccuccucgagaucacccgcgaguucuccgucaacgccggcgucaccacccccgucuccaccuacaugcucaccaacuccgagcuccucucccucaucaacgacaugcccaucaccaacgaccagaagaagcucauguccaacaacguccagaucguccgccagcaguccuacuccaucaugugcaucaucaaggaggagguccucgccuacgucguccagcucccccucuacggcgucaucgacacccccugcuggaagcuccacaccuccccccucugcaccaccaacaccaaggagggcuccaacaucugccucacccgcaccgaccgcggcugguacugcgacaacgccggcuccgucuccuucuucccccaggccgagaccugcaagguccaguccaaccgcgucuucugcgacaccaugaacucccucacccuccccuccgaggucaaccucugcaacaucgacaucuucaaccccaaguacgacugcaagaucaugaccuccaagaccgacgucuccuccuccgucaucaccucccucggcgccaucgucuccugcuacggcaagaccaagugcaccgccuccaacaagugccgcggcaucaucaagaccuucuccaacggcugcgacuacgucuccaacaagggcgucgacaccgucuccgucggcaacacccucuacuacgucaacaagcaggagggccagucccucuacgucaagggcgagcccaucaucaacuucuacgacccccucgucuuccccuccgacgaguucgacgccuccaucucccaggucaacgagaagaucaaccagucccucgccuucauccgcaaguccgacgagcuccuccacaacgucaacgucggcaaguccaccaccaacaucaugaucaccaccaucaucaucgucaucaucgucauccuccuccuccucaucgccgucggccucuuccucuacugcaaggcccgcuccacccccgucacccucuccaaggaccagcucuccggcaucaacaacaucgccuucuccaacugaggacuaguaauaaggaaacuguaugaaugucugugggcaggaagugaagagauccuucuguaaagguuuuuggaauuaugucugcugaauaauaaacuuuuuugaaauaauaaaucugguagaaaaaugagaucuaaaaaaaaaaaaaaaaaaaaaaaaaaaaaaaaaaaaaaaaaaaaaaaaaaaaaaaaaaaaaaaaugcaucccccccccccccccccccccccccccccccaaaggcucuuuucagagccaccagaauu

SEQ ID NO: 19390 - RNA, 1997 nt, Artificial Sequence
  mRNA product Design g-4 comprising derived and/or modified sequence from HRSV(Memphis-37)__AIY60640.1__F_DSCav1_mut8 (opt3)
gggagacuccugucgggcggaaguaggaggaguagaguuuaaaaacaguacucuuuuuccgguucgggacguaguugaagcaacgacaagccggauaaccgcucuugagacaggaagcuuaccauggagcugcccauccucaagaccaacgccauuacaacuauacuugcugcagugacgcugugcuucgccagcucccagaauaucaccgaagaguuuuaccaaucuacauguucagcggucaguaaaggcuauuugggggcuuuaagaacuggaugguacaccagcguuauuacaaucgaacuguccaacauuaaggagaucaaaugcaaugguaccgacgccaaggugaaacuaauaaagcaggaacucgauaaguauaaaaacgcaguaacugaccugcagcuucugaugcagucuacuccugccgcuggcucggggucagcaaucgccagcggaauugcuguguguaaggucuugcaccucgagggcgaggugaauaaaaucaagaacgcccugcugaguaccaauaaagcgguugugucccucucugguugcggggucagcguguuaacguucaagguacuggaucuuaagaacuacauugacaaacaauugcugccaauccuaaauaagcaguccuguucaauaccgaacauugaaacuguuaucgaguuucagcagaaaaauaacaggcuccuggaaauuacccgggaguucagugugaaugcaggagucacaacucccgugagcaccuauaugcuuacaaacucugagcuguugucccucaucaaugauaugccuaucaccaacgaccaaaagaaacugaugucaaacaaugugcagauuguccgccagcagagcuacaguauaaugugcaucauuaaggaagagguuuuagccuaugugguacaacugccacucuacggcgugaucgauacgcccuguuggaaacuucauacuucuccucugugcacaaccaacacuaaggaaggcuccaauauauguuugacacgaaccgaccgugggugguacugcgauaacgcuggaagcgucucguuuuucccacaggccgagacguguaaggugcagucuaauagaguuuucugcgacaccaugaacucccuaacacugcccucagaagugaaucucugcaacauugauaucuucaauccuaaauaugacuguaagaucaugacaaguaaaaccgaugucagcuccucugugauuacaagccugggugcaaucguaucaugcuacggcaagacuaaauguaccgcuaguaacaagugcagggggauuauaaagacauuuuccaauggaugugacuauguuagcaacaaaggcguggacaccgucucuguggguaauacucuuuacuaugucaacaagcaagaggggcagucacuguacgugaaaggagagccaaucauuaauuucuaugauccguugguuuuucccagugacgaauuugaugccagcaucucccaggugaacgagaagaucaaccagucucucgcguuuauucggaaaucggacgaacuguuacacaauguaaacgucggcaagagcacgacaaauauaaugaucaccacuauuaucauugugaucauaguuauccugcuacuccugauugccgugggccuuuucuuguacugcaaggcacgcuccaccccugucacacugucaaaagaucaacucagugggaucaacaauauugcuuucucuaacugaggacuaguaauaaggaaacuguaugaaugucugugggcaggaagugaagagauccuucuguaaagguuuuuggaauuaugucugcugaauaauaaacuuuuuugaaauaauaaaucugguagaaaaaugagaucuaaaaaaaaaaaaaaaaaaaaaaaaaaaaaaaaaaaaaaaaaaaaaaaaaaaaaaaaaaaaaaaaugcaucccccccccccccccccccccccccccccccaaaggcucuuuucagagccaccagaauu

SEQ ID NO: 19391 - RNA, 1997 nt, Artificial Sequence
  mRNA product Design g-4 comprising derived and/or modified sequence from HRSV(Memphis-37)__AIY60640.1__F_DSCav1_mut8 (opt4)
gggagacuccugucgggcggaaguaggaggaguagaguuuaaaaacaguacucuuuuuccgguucgggacguaguugaagcaacgacaagccggauaaccgcucuugagacaggaagcuuaccauggagcugcccauccugaagaccaacgccaucaccaccauccuggccgccgugacccugugcuucgccagcagccagaacaucaccgaggaguucuaccagagcaccugcagcgccgugagcaagggcuaccugggcgcccugagaaccggcugguacaccagcgugaucaccaucgagcugagcaacaucaaggagaucaagugcaacggcaccgacgccaaggugaagcugaucaagcaggagcuggacaaguacaagaacgccgugaccgaccugcagcugcugaugcagagcacccccgccgccggcagcggcagcgccaucgccagcggcaucgccgugugcaaggugcugcaccuggagggcgaggugaacaagaucaagaacgcccugcugagcaccaacaaggccguggugagccugagcggcugcggcgugagcgugcugaccuucaaggugcuggaccugaagaacuacaucgacaagcagcugcugcccauccugaacaagcagagcugcagcauccccaacaucgagaccgugaucgaguuccagcagaagaacaacagacugcuggagaucaccagagaguucagcgugaacgccggcgugaccacccccgugagcaccuacaugcugaccaacagcgagcugcugagccugaucaacgacaugcccaucaccaacgaccagaagaagcugaugagcaacaacgugcagaucgugagacagcagagcuacagcaucaugugcaucaucaaggaggaggugcuggccuacguggugcagcugccccuguacggcgugaucgacacccccugcuggaagcugcacaccagcccccugugcaccaccaacaccaaggagggcagcaacaucugccugaccagaaccgacagaggcugguacugcgacaacgccggcagcgugagcuucuucccccaggccgagaccugcaaggugcagagcaacagaguguucugcgacaccaugaacagccugacccugcccagcgaggugaaccugugcaacaucgacaucuucaaccccaaguacgacugcaagaucaugaccagcaagaccgacgugagcagcagcgugaucaccagccugggcgccaucgugagcugcuacggcaagaccaagugcaccgccagcaacaagugcagaggcaucaucaagaccuucagcaacggcugcgacuacgugagcaacaagggcguggacaccgugagcgugggcaacacccuguacuacgugaacaagcaggagggccagagccuguacgugaagggcgagcccaucaucaacuucuacgacccccugguguuccccagcgacgaguucgacgccagcaucagccaggugaacgagaagaucaaccagagccuggccuucaucagaaagagcgacgagcugcugcacaacgugaacgugggcaagagcaccaccaacaucaugaucaccaccaucaucaucgugaucaucgugauccugcugcugcugaucgccgugggccuguuccuguacugcaaggccagaagcacccccgugacccugagcaaggaccagcugagcggcaucaacaacaucgccuucagcaacugaggacuaguaauaaggaaacuguaugaaugucugugggcaggaagugaagagauccuucuguaaagguuuuuggaauuaugucugcugaauaauaaacuuuuuugaaauaauaaaucugguagaaaaaugagaucuaaaaaaaaaaaaaaaaaaaaaaaaaaaaaaaaaaaaaaaaaaaaaaaaaaaaaaaaaaaaaaaaugcaucccccccccccccccccccccccccccccccaaaggcucuuuucagagccaccagaauu

SEQ ID NO: 19392 - RNA, 1997 nt, Artificial Sequence
  mRNA product Design g-4 comprising derived and/or modified sequence from HRSV(Memphis-37)__AIY60640.1__F_DSCav1_mut8 (opt5)
gggagacuccugucgggcggaaguaggaggaguagaguuuaaaaacaguacucuuuuuccgguucgggacguaguugaagcaacgacaagccggauaaccgcucuugagacaggaagcuuaccauggagcugcccauccucaagaccaacgccauuacaacgauccuggcugccgugacccuuugcuucgcgagcucccagaauauuacagaagaguuuuaccaaucuaccuguagcgcugucuccaaaggcuaucugggggcccucagaacaggaugguacaccucuguuaucacaauugaacugagcaacaucaaggagaucaaaugcaauggcaccgacgccaaggugaaacuuauuaagcaggaacuggauaaguauaaaaacgcugugacggaccuccagcugcugaugcaguccaccccugccgcugggucuggaagcgccaucgcguccggcauugccgucuguaaggugcuccaccuggagggggagguuaauaaaaucaagaacgcccuucugagcacaaauaaagcuguggucucucucuccggaugcggcgugagcguucugaccuucaaggugcuugaucugaagaacuacauugacaaacaacuccugccgauccugaauaagcagucuuguuccauucccaacaucgaaacagucaucgaguuucagcagaaaaauaaccggcuccuggaaauuacccgcgaguucagcgugaaugcuggcgugacgacaccugucucuaccuauaugcuuacaaacuccgagcugcucagccugaucaaugauaugcccauuaccaacgaccaaaagaaacuuauguccaacaauguucagaucgugagacagcagucuuacagcauuaugugcaucaucaaggaagaggugcuggccuaugucgugcaacucccucuguacgggguuauugauacccccuguuggaaacugcauacauccccucucugcacgaccaacacaaaggaaggaagcaauaucugucugacccggacagaccgcggcugguacugcgauaacgcggggucuguguccuuuuucccgcaggccgagaccuguaagguccagagcaauagaguguuuugcgacacgaugaacucucuuacacugcccagcgaaguuaaucucugcaacauugauaucuucaauccuaaauaugacuguaagauuaugaccuccaaaaccgaugugucuagcuccgucaucacaagccugggagcuaucgugucuugcuacggcaagaccaaauguacagccuccaacaagugccgggggauuaucaagacguuuagcaauggaugugacuaugucucuaacaaaggcguggacaccguuuccgugggcaauacacuuuacuaugucaacaagcaagaggggcagagccuguacgugaaaggagagcccauuaucaauuucuaugauccucucguuuuucccuccgacgaguucgaugcuucuauuagccaggugaacgaaaagaucaaccagucccuggccuuuauucgcaaaucugacgaacugcuccacaaugucaacgugggcaagagcaccacaaauaucaugaucaccacgauuaucauugugaucauuguuauccugcuucugcucaucgccgucgggcuguuccuguacugcaaggcuagauccaccccggugacacuuagcaaagaucaacucucuggaauuaacaauaucgcguucuccaacugaggacuaguaauaaggaaacuguaugaaugucugugggcaggaagugaagagauccuucuguaaagguuuuuggaauuaugucugcugaauaauaaacuuuuuugaaauaauaaaucugguagaaaaaugagaucuaaaaaaaaaaaaaaaaaaaaaaaaaaaaaaaaaaaaaaaaaaaaaaaaaaaaaaaaaaaaaaaaugcaucccccccccccccccccccccccccccccccaaaggcucuuuucagagccaccagaauu

SEQ ID NO: 19393 - RNA, 1997 nt, Artificial Sequence
  mRNA product Design g-4 comprising derived and/or modified sequence from HRSV(Memphis-37)__AIY60640.1__F_DSCav1_mut8 (opt6)
gggagacuccugucgggcggaaguaggaggaguagaguuuaaaaacaguacucuuuuuccgguucgggacguaguugaagcaacgacaagccggauaaccgcucuugagacaggaagcuuaccauggaacuuccuauuuuaaaaacaaacgcaauuacaaccauauuagcagcaguaacacuaugcuuugcaucaucacaaaacaucaccgaagaauuuuaucaauccacaugcucagcaguaucaaaaggauaccuuggcgcacuccgaacaggcugguauacaucggucauaacuauagaacucuccaacauaaaagaaauaaaaugcaaugguacugacgcaaaaguaaaauuaauaaaacaagaacuagacaaauacaaaaacgcaguaaccgauuuacaacuacuuaugcaaucaacaccugcagcaggaagcggaucagcaauagcaaguggaauagcaguaugcaaaguacuucaccucgaaggagaaguaaauaaaauaaaaaacgccuuacuaucaacaaauaaagccgucguaucacuuuccgguugcggcguaucaguauuaaccuuuaaagucuuagacuuaaaaaacuacauagacaaacaauuauuaccaauacuaaacaaacaauccuguuccauacccaacauagaaaccguaauagaauuucaacaaaaaaacaacagacuauuagaaauaacacgcgaauuuucaguaaacgcaggcguaacaacaccaguaucaacauauauguuaaccaauucagaauuauuaucccuuauaaaugacaugccuauaacaaacgaccaaaaaaaauuaaugaguaacaacguucaaauaguaagacaacaaucauacagcauaaugugcauaauaaaagaagaaguacuagcauacguaguucaacuaccacucuauggcguuaucgacaccccaugcuggaaacuacauaccucaccacucuguaccacuaauacgaaagaaggaucuaacauaugccuaaccagaacagaucgagguugguauugcgacaaugcuggaucaguaucauucuucccacaagcagaaaccugcaaaguacaaagcaacagaguauuuugugacacuaugaacucacuaacgcuaccuucagaaguaaaccuaugcaacaucgacauauucaacccaaaauacgauugcaaaauaaugacaucaaaaacagacguuuccucaucaguaauaacaucauuaggagcaauaguauccugcuacgguaaaaccaaaugcacagcauccaauaaaugccgaggaaucauuaaaacauuuucaaauggcugcgacuauguaaguaauaaagguguagauacaguaucaguaggcaacacacuauauuacguaaacaaacaagaagggcaaucccuauaugucaaaggcgaaccaauuauaaacuucuacgacccccucguauucccaucagacgaauuugacgcaucaauaucccaaguaaacgaaaaaaucaaccaaucacucgcauucauacguaaauccgacgaauuacuacauaacguaaacguaggcaaaucaacaacaaauauaaugauaacaaccauaaucauaguaauaauaguuauacuccuacuacucauugcagucggccuauuucuauacuguaaagcacgcucuacaccaguaacacuaucuaaagaucaauuauccggaauaaacaacauugccuucuccaauuaaggacuaguaauaaggaaacuguaugaaugucugugggcaggaagugaagagauccuucuguaaagguuuuuggaauuaugucugcugaauaauaaacuuuuuugaaauaauaaaucugguagaaaaaugagaucuaaaaaaaaaaaaaaaaaaaaaaaaaaaaaaaaaaaaaaaaaaaaaaaaaaaaaaaaaaaaaaaaugcaucccccccccccccccccccccccccccccccaaaggcucuuuucagagccaccagaauu

SEQ ID NO: 19394 - RNA, 1997 nt, Artificial Sequence
  mRNA product Design g-4 comprising derived and/or modified sequence from HRSV(Memphis-37)__AIY60640.1__F_DSCav1_mut8 (opt11)
gggagacuccugucgggcggaaguaggaggaguagaguuuaaaaacaguacucuuuuuccgguucgggacguaguugaagcaacgacaagccggauaaccgcucuugagacaggaagcuuaccauggaacuucccauccugaagaccaacgcuaucacaaccauccucgccgcagucacccuuugcuucgccucaucccaaaacaucaccgaagaauuuuaccagucaaccugcucggccgucuccaagggcuaccucggcgcccuccgcacuggcugguacacauccgucaucaccaucgaacucuccaacauaaaagaaauaaaaugcaacggaaccgacgccaaagucaaacucaucaaacaagaacuagauaaauauaaaaacgccgucaccgaccugcaacuccucaugcaauccaccccagccgccggcucuggcagcgccaucgcaagcggaaucgccgucugcaaaguccuccaccuagaaggcgaagucaacaaaauuaaaaacgcccuccucuccaccaacaaagcaguugucucccucucuggcugcggagucucuguacucaccuucaaaguacuagaccucaagaauuacauagacaaacaacuccugcccauccuuaacaaacaaaguuguaguauccccaacaucgaaacaguaaucgaauuucagcagaaaaacaaccgccuccucgaaaucacacgagaguucucggucaacgccggcgucaccacccccguaucaaccuacaugcuaacaaacuccgaacuacuuucccucaucaaugacaugcccauaaccaacgaccaaaagaaacuaauguccaauaacguccagauaguccgucaacaguccuacucaaucaugugcauaauuaaagaagaaguacucgccuacgucguccaacuaccccucuauggagucaucgacacccccugcuggaaacuccacacaucaccccuaugcacaaccaacaccaaagaaggcuccaacaucugccucacaagaaccgaccgcggcugguacugcgacaacgcuggcuccgucucguucuucccacaagccgaaaccugcaaaguccaaucaaaccgggucuucugcgacaccaugaacucccucacucucccaagcgaagucaaccuaugcaacaucgacaucuucaacccaaaauacgacuguaaaaucaugacuucgaaaacagacgucuccucaucaguaaucacauccuuaggcgccaucguguccugcuacgguaagaccaaaugcacagccuccaacaaaugccggggcaucaucaaaaccuucagcaacgguugugauuacgucuccaacaaaggaguagacaccgucuccguaggaaacacccucuacuacgucaacaagcaagaaggccaaucccucuacgucaaaggggaacccaucaucaacuucuacgacccacucgucuuccccuccgacgaguucgacgcaagcaucucccaagucaacgaaaagaucaaccaaucacuagccuucauccgcaaauccgacgaacuccuccacaacguuaacguaggcaaauccaccaccaacaucaugaucacaaccaucaucauagucauaauagucauccuacuacuccucaucgccguaggucuauuccuauacuguaaagcucgaucaacccccgucacacucuccaaagaucaacucucaggaaucaacaacaucgccuucuccaacuaaggacuaguaauaaggaaacuguaugaaugucugugggcaggaagugaagagauccuucuguaaagguuuuuggaauuaugucugcugaauaauaaacuuuuuugaaauaauaaaucugguagaaaaaugagaucuaaaaaaaaaaaaaaaaaaaaaaaaaaaaaaaaaaaaaaaaaaaaaaaaaaaaaaaaaaaaaaaaugcaucccccccccccccccccccccccccccccccaaaggcucuuuucagagccaccagaauu

SEQ ID NO: 19395 - RNA, 1973 nt, Artificial Sequence
  mRNA product Design g-5 comprising derived and/or modified sequence from HRSV(Memphis-37)__AIY60640.1__F_DSCav1_mut8 (opt1)
gggagacccgugacccggaaguuguacggcuacgcgacuuucccucccacaaacccucgcgcccuuccuuuccuacuugggcccggcagaaagcuuaccauggagcugcccauccucaagaccaacgccaucaccacgauccuggccgcggugacccugugcuucgccagcucccagaacaucaccgaggaguucuaccagagcacgugcuccgccgucagcaagggcuaccucggcgcccugcgcaccgggugguacaccagcgugaucaccaucgagcuguccaacaucaaggagaucaagugcaacggcaccgacgccaaggugaagcucaucaagcaggagcuggacaaguacaagaacgcggucacggaccugcagcuccugaugcagagcaccccggccgccggcuccgggagcgcgaucgccuccggcaucgccgucugcaaggugcugcaccucgagggcgaggugaacaagaucaagaacgcccugcuguccaccaacaaggccgucgugagccucuccggcugcggggugagcguccugaccuucaaggugcuggaccucaagaacuacaucgacaagcagcugcugcccauccugaacaagcagagcugcuccauccccaacaucgagaccgucaucgaguuccagcagaagaacaaccgccuccuggagaucacgcgggaguucagcgugaacgcgggcgugaccacccccgucuccaccuacaugcugacgaacagcgagcuccugucccugaucaacgacaugccgaucaccaacgaccagaagaagcucaugagcaacaacgugcagaucgugcgccagcaguccuacagcaucaugugcaucaucaaggaggagguccuggccuacguggugcagcugccccucuacggggucaucgacacccccugcuggaagcugcacaccagcccccugugcacgaccaacaccaaggagggcuccaacaucugccucacccggacggaccgcgggugguacugcgacaacgccggcagcguguccuucuucccgcaggccgagaccugcaagguccagagcaaccggguguucugcgacaccaugaacucccugacccugcccagcgaggugaaccucugcaacaucgacaucuucaaccccaaguacgacugcaagaucaugacguccaagaccgacgucagcuccagcgugaucaccucccugggcgccaucgugagcugcuacgggaagaccaagugcacggcgagcaacaagugccgcggcaucaucaagaccuucuccaacgggugcgacuacgucagcaacaagggcguggacaccguguccgucggcaacacccuguacuacgugaacaagcaggagggccagagccucuacgugaagggggagcccaucaucaacuucuacgacccgcuggucuuccccuccgacgaguucgacgccagcaucucccaggugaacgagaagaucaaccagagccuggccuucauccggaaguccgacgagcuccugcacaacgugaacgucggcaagagcaccacgaacaucaugaucaccaccaucaucaucgugaucaucgugauccugcugcuccugaucgccgucgggcuguuccucuacugcaaggcccgcuccacccccgugacgcugagcaaggaccagcuguccgggaucaacaacaucgcguucagcaacugaggacuaguaauaaggaaacuguaugaaugucugugggcaggaagugaagagauccuucuguaaagguuuuuggaauuaugucugcugaauaauaaacuuuuuugaaauaauaaaucugguagaaaaaugagaucuaaaaaaaaaaaaaaaaaaaaaaaaaaaaaaaaaaaaaaaaaaaaaaaaaaaaaaaaaaaaaaaaugcaucccccccccccccccccccccccccccccccaaaggcucuuuucagagccaccagaauu

SEQ ID NO: 19396 - RNA, 1973 nt, Artificial Sequence
  mRNA product Design g-5 comprising derived and/or modified sequence from HRSV(Memphis-37)__AIY60640.1__F_DSCav1_mut8 (opt1)
gggagacccgugacccggaaguuguacggcuacgcgacuuucccucccacaaacccucgcgcccuuccuuuccuacuugggcccggcagaaagcuuaccauggagcugcccauccucaagaccaacgccaucaccacgauccuggccgcggugacccugugcuucgccagcucccagaacaucaccgaggaguucuaccagagcacgugcuccgccgucagcaagggcuaccucggggcccugcgcaccggcugguacaccuccgugaucaccaucgagcugagcaacaucaaggagaucaagugcaacgggaccgacgccaaggugaagcucaucaagcaggagcuggacaaguacaagaacgcggucacggaccugcagcuccugaugcaguccaccccggccgccggcagcggguccgccaucgcgagcggcaucgccgugugcaaggugcugcaccucgagggcgaggucaacaagaucaagaacgcccugcuguccaccaacaaggccguggugagccucuccgggugcggcgucagcgugcugaccuucaaggugcuggaccucaagaacuacaucgacaagcagcugcugcccauccucaacaagcaguccugcagcauccccaacaucgagacggucaucgaguuccagcagaagaacaaccggcugcuggagaucacccgcgaguucuccgugaacgccggggugaccacccccgucagcacguacaugcucaccaacuccgagcugcugagccucaucaacgacaugccgaucaccaacgaccagaagaagcugaugagcaacaacgugcagaucgugcggcagcaguccuacagcaucaugugcaucaucaaggaggagguccuggcguacguggugcagcucccccuguacggcgucaucgacacccccugcuggaagcugcacacgagcccccucugcaccaccaacaccaaggagggguccaacaucugccugacgcgcaccgaccggggcugguacugcgacaacgccggcuccgugagcuucuucccgcaggccgagaccugcaaggugcaguccaaccgcgucuucugcgacaccaugaacagccugacgcuccccuccgaggugaaccugugcaacaucgacaucuucaaccccaaguacgacugcaagaucaugaccagcaagaccgacgucuccagcuccgugaucaccagccugggggccaucguguccugcuacggcaagacgaagugcaccgccagcaacaagugccgggggaucaucaagaccuucuccaacggcugcgacuacgucagcaacaagggcguggacaccguguccgucgggaacacgcucuacuacgugaacaagcaggagggccagagccuguacgugaagggggagcccaucaucaacuucuacgacccgcuggucuuccccagcgacgaguucgacgcguccaucagccaggugaacgagaagaucaaccagucccucgccuucauccgcaagagcgacgagcugcugcacaacgugaacgucggcaaguccaccaccaacaucaugaucaccaccaucaucaucgugaucaucgugauccuccugcugcucaucgccgucgggcuguuccuguacugcaaggcccggagcacgcccgugacccuguccaaggaccagcucagcggcaucaacaacaucgccuucuccaacugaggacuaguaauaaggaaacuguaugaaugucugugggcaggaagugaagagauccuucuguaaagguuuuuggaauuaugucugcugaauaauaaacuuuuuugaaauaauaaaucugguagaaaaaugagaucuaaaaaaaaaaaaaaaaaaaaaaaaaaaaaaaaaaaaaaaaaaaaaaaaaaaaaaaaaaaaaaaaugcaucccccccccccccccccccccccccccccccaaaggcucuuuucagagccaccagaauu

SEQ ID NO: 19397 - RNA, 1973 nt, Artificial Sequence
  mRNA product Design g-5 comprising derived and/or modified sequence from HRSV(Memphis-37)__AIY60640.1__F_DSCav1_mut8 (opt2)
gggagacccgugacccggaaguuguacggcuacgcgacuuucccucccacaaacccucgcgcccuuccuuuccuacuugggcccggcagaaagcuuaccauggagcuccccauccucaagaccaacgccaucaccaccauccucgccgccgucacccucugcuucgccuccucccagaacaucaccgaggaguucuaccaguccaccugcuccgccgucuccaagggcuaccucggcgcccuccgcaccggcugguacaccuccgucaucaccaucgagcucuccaacaucaaggagaucaagugcaacggcaccgacgccaaggucaagcucaucaagcaggagcucgacaaguacaagaacgccgucaccgaccuccagcuccucaugcaguccacccccgccgccggcuccggcuccgccaucgccuccggcaucgccgucugcaagguccuccaccucgagggcgaggucaacaagaucaagaacgcccuccucuccaccaacaaggccgucgucucccucuccggcugcggcgucuccguccucaccuucaagguccucgaccucaagaacuacaucgacaagcagcuccuccccauccucaacaagcaguccugcuccauccccaacaucgagaccgucaucgaguuccagcagaagaacaaccgccuccucgagaucacccgcgaguucuccgucaacgccggcgucaccacccccgucuccaccuacaugcucaccaacuccgagcuccucucccucaucaacgacaugcccaucaccaacgaccagaagaagcucauguccaacaacguccagaucguccgccagcaguccuacuccaucaugugcaucaucaaggaggagguccucgccuacgucguccagcucccccucuacggcgucaucgacacccccugcuggaagcuccacaccuccccccucugcaccaccaacaccaaggagggcuccaacaucugccucacccgcaccgaccgcggcugguacugcgacaacgccggcuccgucuccuucuucccccaggccgagaccugcaagguccaguccaaccgcgucuucugcgacaccaugaacucccucacccuccccuccgaggucaaccucugcaacaucgacaucuucaaccccaaguacgacugcaagaucaugaccuccaagaccgacgucuccuccuccgucaucaccucccucggcgccaucgucuccugcuacggcaagaccaagugcaccgccuccaacaagugccgcggcaucaucaagaccuucuccaacggcugcgacuacgucuccaacaagggcgucgacaccgucuccgucggcaacacccucuacuacgucaacaagcaggagggccagucccucuacgucaagggcgagcccaucaucaacuucuacgacccccucgucuuccccuccgacgaguucgacgccuccaucucccaggucaacgagaagaucaaccagucccucgccuucauccgcaaguccgacgagcuccuccacaacgucaacgucggcaaguccaccaccaacaucaugaucaccaccaucaucaucgucaucaucgucauccuccuccuccucaucgccgucggccucuuccucuacugcaaggcccgcuccacccccgucacccucuccaaggaccagcucuccggcaucaacaacaucgccuucuccaacugaggacuaguaauaaggaaacuguaugaaugucugugggcaggaagugaagagauccuucuguaaagguuuuuggaauuaugucugcugaauaauaaacuuuuuugaaauaauaaaucugguagaaaaaugagaucuaaaaaaaaaaaaaaaaaaaaaaaaaaaaaaaaaaaaaaaaaaaaaaaaaaaaaaaaaaaaaaaaugcaucccccccccccccccccccccccccccccccaaaggcucuuuucagagccaccagaauu

SEQ ID NO: 19398 - RNA, 1973 nt, Artificial Sequence
  mRNA product Design g-5 comprising derived and/or modified sequence from HRSV(Memphis-37)__AIY60640.1__F_DSCav1_mut8 (opt3)
gggagacccgugacccggaaguuguacggcuacgcgacuuucccucccacaaacccucgcgcccuuccuuuccuacuugggcccggcagaaagcuuaccauggagcugcccauccucaagaccaacgccauuacaacuauacuugcugcagugacgcugugcuucgccagcucccagaauaucaccgaagaguuuuaccaaucuacauguucagcggucaguaaaggcuauuugggggcuuuaagaacuggaugguacaccagcguuauuacaaucgaacuguccaacauuaaggagaucaaaugcaaugguaccgacgccaaggugaaacuaauaaagcaggaacucgauaaguauaaaaacgcaguaacugaccugcagcuucugaugcagucuacuccugccgcuggcucggggucagcaaucgccagcggaauugcuguguguaaggucuugcaccucgagggcgaggugaauaaaaucaagaacgcccugcugaguaccaauaaagcgguugugucccucucugguugcggggucagcguguuaacguucaagguacuggaucuuaagaacuacauugacaaacaauugcugccaauccuaaauaagcaguccuguucaauaccgaacauugaaacuguuaucgaguuucagcagaaaaauaacaggcuccuggaaauuacccgggaguucagugugaaugcaggagucacaacucccgugagcaccuauaugcuuacaaacucugagcuguugucccucaucaaugauaugccuaucaccaacgaccaaaagaaacugaugucaaacaaugugcagauuguccgccagcagagcuacaguauaaugugcaucauuaaggaagagguuuuagccuaugugguacaacugccacucuacggcgugaucgauacgcccuguuggaaacuucauacuucuccucugugcacaaccaacacuaaggaaggcuccaauauauguuugacacgaaccgaccgugggugguacugcgauaacgcuggaagcgucucguuuuucccacaggccgagacguguaaggugcagucuaauagaguuuucugcgacaccaugaacucccuaacacugcccucagaagugaaucucugcaacauugauaucuucaauccuaaauaugacuguaagaucaugacaaguaaaaccgaugucagcuccucugugauuacaagccugggugcaaucguaucaugcuacggcaagacuaaauguaccgcuaguaacaagugcagggggauuauaaagacauuuuccaauggaugugacuauguuagcaacaaaggcguggacaccgucucuguggguaauacucuuuacuaugucaacaagcaagaggggcagucacuguacgugaaaggagagccaaucauuaauuucuaugauccguugguuuuucccagugacgaauuugaugccagcaucucccaggugaacgagaagaucaaccagucucucgcguuuauucggaaaucggacgaacuguuacacaauguaaacgucggcaagagcacgacaaauauaaugaucaccacuauuaucauugugaucauaguuauccugcuacuccugauugccgugggccuuuucuuguacugcaaggcacgcuccaccccugucacacugucaaaagaucaacucagugggaucaacaauauugcuuucucuaacugaggacuaguaauaaggaaacuguaugaaugucugugggcaggaagugaagagauccuucuguaaagguuuuuggaauuaugucugcugaauaauaaacuuuuuugaaauaauaaaucugguagaaaaaugagaucuaaaaaaaaaaaaaaaaaaaaaaaaaaaaaaaaaaaaaaaaaaaaaaaaaaaaaaaaaaaaaaaaugcaucccccccccccccccccccccccccccccccaaaggcucuuuucagagccaccagaauu

SEQ ID NO: 19399 - RNA, 1973 nt, Artificial Sequence
  mRNA product Design g-5 comprising derived and/or modified sequence from HRSV(Memphis-37)__AIY60640.1__F_DSCav1_mut8 (opt4)
gggagacccgugacccggaaguuguacggcuacgcgacuuucccucccacaaacccucgcgcccuuccuuuccuacuugggcccggcagaaagcuuaccauggagcugcccauccugaagaccaacgccaucaccaccauccuggccgccgugacccugugcuucgccagcagccagaacaucaccgaggaguucuaccagagcaccugcagcgccgugagcaagggcuaccugggcgcccugagaaccggcugguacaccagcgugaucaccaucgagcugagcaacaucaaggagaucaagugcaacggcaccgacgccaaggugaagcugaucaagcaggagcuggacaaguacaagaacgccgugaccgaccugcagcugcugaugcagagcacccccgccgccggcagcggcagcgccaucgccagcggcaucgccgugugcaaggugcugcaccuggagggcgaggugaacaagaucaagaacgcccugcugagcaccaacaaggccguggugagccugagcggcugcggcgugagcgugcugaccuucaaggugcuggaccugaagaacuacaucgacaagcagcugcugcccauccugaacaagcagagcugcagcauccccaacaucgagaccgugaucgaguuccagcagaagaacaacagacugcuggagaucaccagagaguucagcgugaacgccggcgugaccacccccgugagcaccuacaugcugaccaacagcgagcugcugagccugaucaacgacaugcccaucaccaacgaccagaagaagcugaugagcaacaacgugcagaucgugagacagcagagcuacagcaucaugugcaucaucaaggaggaggugcuggccuacguggugcagcugccccuguacggcgugaucgacacccccugcuggaagcugcacaccagcccccugugcaccaccaacaccaaggagggcagcaacaucugccugaccagaaccgacagaggcugguacugcgacaacgccggcagcgugagcuucuucccccaggccgagaccugcaaggugcagagcaacagaguguucugcgacaccaugaacagccugacccugcccagcgaggugaaccugugcaacaucgacaucuucaaccccaaguacgacugcaagaucaugaccagcaagaccgacgugagcagcagcgugaucaccagccugggcgccaucgugagcugcuacggcaagaccaagugcaccgccagcaacaagugcagaggcaucaucaagaccuucagcaacggcugcgacuacgugagcaacaagggcguggacaccgugagcgugggcaacacccuguacuacgugaacaagcaggagggccagagccuguacgugaagggcgagcccaucaucaacuucuacgacccccugguguuccccagcgacgaguucgacgccagcaucagccaggugaacgagaagaucaaccagagccuggccuucaucagaaagagcgacgagcugcugcacaacgugaacgugggcaagagcaccaccaacaucaugaucaccaccaucaucaucgugaucaucgugauccugcugcugcugaucgccgugggccuguuccuguacugcaaggccagaagcacccccgugacccugagcaaggaccagcugagcggcaucaacaacaucgccuucagcaacugaggacuaguaauaaggaaacuguaugaaugucugugggcaggaagugaagagauccuucuguaaagguuuuuggaauuaugucugcugaauaauaaacuuuuuugaaauaauaaaucugguagaaaaaugagaucuaaaaaaaaaaaaaaaaaaaaaaaaaaaaaaaaaaaaaaaaaaaaaaaaaaaaaaaaaaaaaaaaugcaucccccccccccccccccccccccccccccccaaaggcucuuuucagagccaccagaauu

SEQ ID NO: 19400 - RNA, 1973 nt, Artificial Sequence
  mRNA product Design g-5 comprising derived and/or modified sequence from HRSV(Memphis-37)__AIY60640.1__F_DSCav1_mut8 (opt5)
gggagacccgugacccggaaguuguacggcuacgcgacuuucccucccacaaacccucgcgcccuuccuuuccuacuugggcccggcagaaagcuuaccauggagcugcccauccucaagaccaacgccauuacaacgauccuggcugccgugacccuuugcuucgcgagcucccagaauauuacagaagaguuuuaccaaucuaccuguagcgcugucuccaaaggcuaucugggggcccucagaacaggaugguacaccucuguuaucacaauugaacugagcaacaucaaggagaucaaaugcaauggcaccgacgccaaggugaaacuuauuaagcaggaacuggauaaguauaaaaacgcugugacggaccuccagcugcugaugcaguccaccccugccgcugggucuggaagcgccaucgcguccggcauugccgucuguaaggugcuccaccuggagggggagguuaauaaaaucaagaacgcccuucugagcacaaauaaagcuguggucucucucuccggaugcggcgugagcguucugaccuucaaggugcuugaucugaagaacuacauugacaaacaacuccugccgauccugaauaagcagucuuguuccauucccaacaucgaaacagucaucgaguuucagcagaaaaauaaccggcuccuggaaauuacccgcgaguucagcgugaaugcuggcgugacgacaccugucucuaccuauaugcuuacaaacuccgagcugcucagccugaucaaugauaugcccauuaccaacgaccaaaagaaacuuauguccaacaauguucagaucgugagacagcagucuuacagcauuaugugcaucaucaaggaagaggugcuggccuaugucgugcaacucccucuguacgggguuauugauacccccuguuggaaacugcauacauccccucucugcacgaccaacacaaaggaaggaagcaauaucugucugacccggacagaccgcggcugguacugcgauaacgcggggucuguguccuuuuucccgcaggccgagaccuguaagguccagagcaauagaguguuuugcgacacgaugaacucucuuacacugcccagcgaaguuaaucucugcaacauugauaucuucaauccuaaauaugacuguaagauuaugaccuccaaaaccgaugugucuagcuccgucaucacaagccugggagcuaucgugucuugcuacggcaagaccaaauguacagccuccaacaagugccgggggauuaucaagacguuuagcaauggaugugacuaugucucuaacaaaggcguggacaccguuuccgugggcaauacacuuuacuaugucaacaagcaagaggggcagagccuguacgugaaaggagagcccauuaucaauuucuaugauccucucguuuuucccuccgacgaguucgaugcuucuauuagccaggugaacgaaaagaucaaccagucccuggccuuuauucgcaaaucugacgaacugcuccacaaugucaacgugggcaagagcaccacaaauaucaugaucaccacgauuaucauugugaucauuguuauccugcuucugcucaucgccgucgggcuguuccuguacugcaaggcuagauccaccccggugacacuuagcaaagaucaacucucuggaauuaacaauaucgcguucuccaacugaggacuaguaauaaggaaacuguaugaaugucugugggcaggaagugaagagauccuucuguaaagguuuuuggaauuaugucugcugaauaauaaacuuuuuugaaauaauaaaucugguagaaaaaugagaucuaaaaaaaaaaaaaaaaaaaaaaaaaaaaaaaaaaaaaaaaaaaaaaaaaaaaaaaaaaaaaaaaugcaucccccccccccccccccccccccccccccccaaaggcucuuuucagagccaccagaauu

SEQ ID NO: 19401 - RNA, 1973 nt, Artificial Sequence
  mRNA product Design g-5 comprising derived and/or modified sequence from HRSV(Memphis-37)__AIY60640.1__F_DSCav1_mut8 (opt6)
gggagacccgugacccggaaguuguacggcuacgcgacuuucccucccacaaacccucgcgcccuuccuuuccuacuugggcccggcagaaagcuuaccauggaacuuccuauuuuaaaaacaaacgcaauuacaaccauauuagcagcaguaacacuaugcuuugcaucaucacaaaacaucaccgaagaauuuuaucaauccacaugcucagcaguaucaaaaggauaccuuggcgcacuccgaacaggcugguauacaucggucauaacuauagaacucuccaacauaaaagaaauaaaaugcaaugguacugacgcaaaaguaaaauuaauaaaacaagaacuagacaaauacaaaaacgcaguaaccgauuuacaacuacuuaugcaaucaacaccugcagcaggaagcggaucagcaauagcaaguggaauagcaguaugcaaaguacuucaccucgaaggagaaguaaauaaaauaaaaaacgccuuacuaucaacaaauaaagccgucguaucacuuuccgguugcggcguaucaguauuaaccuuuaaagucuuagacuuaaaaaacuacauagacaaacaauuauuaccaauacuaaacaaacaauccuguuccauacccaacauagaaaccguaauagaauuucaacaaaaaaacaacagacuauuagaaauaacacgcgaauuuucaguaaacgcaggcguaacaacaccaguaucaacauauauguuaaccaauucagaauuauuaucccuuauaaaugacaugccuauaacaaacgaccaaaaaaaauuaaugaguaacaacguucaaauaguaagacaacaaucauacagcauaaugugcauaauaaaagaagaaguacuagcauacguaguucaacuaccacucuauggcguuaucgacaccccaugcuggaaacuacauaccucaccacucuguaccacuaauacgaaagaaggaucuaacauaugccuaaccagaacagaucgagguugguauugcgacaaugcuggaucaguaucauucuucccacaagcagaaaccugcaaaguacaaagcaacagaguauuuugugacacuaugaacucacuaacgcuaccuucagaaguaaaccuaugcaacaucgacauauucaacccaaaauacgauugcaaaauaaugacaucaaaaacagacguuuccucaucaguaauaacaucauuaggagcaauaguauccugcuacgguaaaaccaaaugcacagcauccaauaaaugccgaggaaucauuaaaacauuuucaaauggcugcgacuauguaaguaauaaagguguagauacaguaucaguaggcaacacacuauauuacguaaacaaacaagaagggcaaucccuauaugucaaaggcgaaccaauuauaaacuucuacgacccccucguauucccaucagacgaauuugacgcaucaauaucccaaguaaacgaaaaaaucaaccaaucacucgcauucauacguaaauccgacgaauuacuacauaacguaaacguaggcaaaucaacaacaaauauaaugauaacaaccauaaucauaguaauaauaguuauacuccuacuacucauugcagucggccuauuucuauacuguaaagcacgcucuacaccaguaacacuaucuaaagaucaauuauccggaauaaacaacauugccuucuccaauuaaggacuaguaauaaggaaacuguaugaaugucugugggcaggaagugaagagauccuucuguaaagguuuuuggaauuaugucugcugaauaauaaacuuuuuugaaauaauaaaucugguagaaaaaugagaucuaaaaaaaaaaaaaaaaaaaaaaaaaaaaaaaaaaaaaaaaaaaaaaaaaaaaaaaaaaaaaaaaugcaucccccccccccccccccccccccccccccccaaaggcucuuuucagagccaccagaauu

SEQ ID NO: 19402 - RNA, 1973 nt, Artificial Sequence
  mRNA product Design g-5 comprising derived and/or modified sequence from HRSV(Memphis-37)__AIY60640.1__F_DSCav1_mut8 (opt11)
gggagacccgugacccggaaguuguacggcuacgcgacuuucccucccacaaacccucgcgcccuuccuuuccuacuugggcccggcagaaagcuuaccauggaacuucccauccugaagaccaacgcuaucacaaccauccucgccgcagucacccuuugcuucgccucaucccaaaacaucaccgaagaauuuuaccagucaaccugcucggccgucuccaagggcuaccucggcgcccuccgcacuggcugguacacauccgucaucaccaucgaacucuccaacauaaaagaaauaaaaugcaacggaaccgacgccaaagucaaacucaucaaacaagaacuagauaaauauaaaaacgccgucaccgaccugcaacuccucaugcaauccaccccagccgccggcucuggcagcgccaucgcaagcggaaucgccgucugcaaaguccuccaccuagaaggcgaagucaacaaaauuaaaaacgcccuccucuccaccaacaaagcaguugucucccucucuggcugcggagucucuguacucaccuucaaaguacuagaccucaagaauuacauagacaaacaacuccugcccauccuuaacaaacaaaguuguaguauccccaacaucgaaacaguaaucgaauuucagcagaaaaacaaccgccuccucgaaaucacacgagaguucucggucaacgccggcgucaccacccccguaucaaccuacaugcuaacaaacuccgaacuacuuucccucaucaaugacaugcccauaaccaacgaccaaaagaaacuaauguccaauaacguccagauaguccgucaacaguccuacucaaucaugugcauaauuaaagaagaaguacucgccuacgucguccaacuaccccucuauggagucaucgacacccccugcuggaaacuccacacaucaccccuaugcacaaccaacaccaaagaaggcuccaacaucugccucacaagaaccgaccgcggcugguacugcgacaacgcuggcuccgucucguucuucccacaagccgaaaccugcaaaguccaaucaaaccgggucuucugcgacaccaugaacucccucacucucccaagcgaagucaaccuaugcaacaucgacaucuucaacccaaaauacgacuguaaaaucaugacuucgaaaacagacgucuccucaucaguaaucacauccuuaggcgccaucguguccugcuacgguaagaccaaaugcacagccuccaacaaaugccggggcaucaucaaaaccuucagcaacgguugugauuacgucuccaacaaaggaguagacaccgucuccguaggaaacacccucuacuacgucaacaagcaagaaggccaaucccucuacgucaaaggggaacccaucaucaacuucuacgacccacucgucuuccccuccgacgaguucgacgcaagcaucucccaagucaacgaaaagaucaaccaaucacuagccuucauccgcaaauccgacgaacuccuccacaacguuaacguaggcaaauccaccaccaacaucaugaucacaaccaucaucauagucauaauagucauccuacuacuccucaucgccguaggucuauuccuauacuguaaagcucgaucaacccccgucacacucuccaaagaucaacucucaggaaucaacaacaucgccuucuccaacuaaggacuaguaauaaggaaacuguaugaaugucugugggcaggaagugaagagauccuucuguaaagguuuuuggaauuaugucugcugaauaauaaacuuuuuugaaauaauaaaucugguagaaaaaugagaucuaaaaaaaaaaaaaaaaaaaaaaaaaaaaaaaaaaaaaaaaaaaaaaaaaaaaaaaaaaaaaaaaugcaucccccccccccccccccccccccccccccccaaaggcucuuuucagagccaccagaauu

SEQ ID NO: 19403 - RNA, 1989 nt, Artificial Sequence
  mRNA product Design h-1 comprising derived and/or modified sequence from HRSV(Memphis-37)__AIY60640.1__F_DSCav1_mut8 (opt1)
gggagacccgugacccggaaguuguacggcuacgcgacuuucccucccacaaacccucgcgcccuuccuuuccuacuugggcccggcagaaagcuuaccauggagcugcccauccucaagaccaacgccaucaccacgauccuggccgcggugacccugugcuucgccagcucccagaacaucaccgaggaguucuaccagagcacgugcuccgccgucagcaagggcuaccucggcgcccugcgcaccgggugguacaccagcgugaucaccaucgagcuguccaacaucaaggagaucaagugcaacggcaccgacgccaaggugaagcucaucaagcaggagcuggacaaguacaagaacgcggucacggaccugcagcuccugaugcagagcaccccggccgccggcuccgggagcgcgaucgccuccggcaucgccgucugcaaggugcugcaccucgagggcgaggugaacaagaucaagaacgcccugcuguccaccaacaaggccgucgugagccucuccggcugcggggugagcguccugaccuucaaggugcuggaccucaagaacuacaucgacaagcagcugcugcccauccugaacaagcagagcugcuccauccccaacaucgagaccgucaucgaguuccagcagaagaacaaccgccuccuggagaucacgcgggaguucagcgugaacgcgggcgugaccacccccgucuccaccuacaugcugacgaacagcgagcuccugucccugaucaacgacaugccgaucaccaacgaccagaagaagcucaugagcaacaacgugcagaucgugcgccagcaguccuacagcaucaugugcaucaucaaggaggagguccuggccuacguggugcagcugccccucuacggggucaucgacacccccugcuggaagcugcacaccagcccccugugcacgaccaacaccaaggagggcuccaacaucugccucacccggacggaccgcgggugguacugcgacaacgccggcagcguguccuucuucccgcaggccgagaccugcaagguccagagcaaccggguguucugcgacaccaugaacucccugacccugcccagcgaggugaaccucugcaacaucgacaucuucaaccccaaguacgacugcaagaucaugacguccaagaccgacgucagcuccagcgugaucaccucccugggcgccaucgugagcugcuacgggaagaccaagugcacggcgagcaacaagugccgcggcaucaucaagaccuucuccaacgggugcgacuacgucagcaacaagggcguggacaccguguccgucggcaacacccuguacuacgugaacaagcaggagggccagagccucuacgugaagggggagcccaucaucaacuucuacgacccgcuggucuuccccuccgacgaguucgacgccagcaucucccaggugaacgagaagaucaaccagagccuggccuucauccggaaguccgacgagcuccugcacaacgugaacgucggcaagagcaccacgaacaucaugaucaccaccaucaucaucgugaucaucgugauccugcugcuccugaucgccgucgggcuguuccucuacugcaaggcccgcuccacccccgugacgcugagcaaggaccagcuguccgggaucaacaacaucgcguucagcaacugaggacuaguacuggcugcaucucccuuuccucuguccuccauccuucucccaggauggugaagggggaccugguacccagugauccccaccccaggauccuaaaucaugacuuaccugcuaauaaaaacucauuggaaaagugagaagaucuaaaaaaaaaaaaaaaaaaaaaaaaaaaaaaaaaaaaaaaaaaaaaaaaaaaaaaaaaaaaaaaaugcaucccccccccccccccccccccccccccccccaaaggcucuuuucagagccaccagaauu

SEQ ID NO: 19404 - RNA, 1989 nt, Artificial Sequence
  mRNA product Design h-1 comprising derived and/or modified sequence from HRSV(Memphis-37)__AIY60640.1__F_DSCav1_mut8 (opt1)
gggagacccgugacccggaaguuguacggcuacgcgacuuucccucccacaaacccucgcgcccuuccuuuccuacuugggcccggcagaaagcuuaccauggagcugcccauccucaagaccaacgccaucaccacgauccuggccgcggugacccugugcuucgccagcucccagaacaucaccgaggaguucuaccagagcacgugcuccgccgucagcaagggcuaccucggggcccugcgcaccggcugguacaccuccgugaucaccaucgagcugagcaacaucaaggagaucaagugcaacgggaccgacgccaaggugaagcucaucaagcaggagcuggacaaguacaagaacgcggucacggaccugcagcuccugaugcaguccaccccggccgccggcagcggguccgccaucgcgagcggcaucgccgugugcaaggugcugcaccucgagggcgaggucaacaagaucaagaacgcccugcuguccaccaacaaggccguggugagccucuccgggugcggcgucagcgugcugaccuucaaggugcuggaccucaagaacuacaucgacaagcagcugcugcccauccucaacaagcaguccugcagcauccccaacaucgagacggucaucgaguuccagcagaagaacaaccggcugcuggagaucacccgcgaguucuccgugaacgccggggugaccacccccgucagcacguacaugcucaccaacuccgagcugcugagccucaucaacgacaugccgaucaccaacgaccagaagaagcugaugagcaacaacgugcagaucgugcggcagcaguccuacagcaucaugugcaucaucaaggaggagguccuggcguacguggugcagcucccccuguacggcgucaucgacacccccugcuggaagcugcacacgagcccccucugcaccaccaacaccaaggagggguccaacaucugccugacgcgcaccgaccggggcugguacugcgacaacgccggcuccgugagcuucuucccgcaggccgagaccugcaaggugcaguccaaccgcgucuucugcgacaccaugaacagccugacgcuccccuccgaggugaaccugugcaacaucgacaucuucaaccccaaguacgacugcaagaucaugaccagcaagaccgacgucuccagcuccgugaucaccagccugggggccaucguguccugcuacggcaagacgaagugcaccgccagcaacaagugccgggggaucaucaagaccuucuccaacggcugcgacuacgucagcaacaagggcguggacaccguguccgucgggaacacgcucuacuacgugaacaagcaggagggccagagccuguacgugaagggggagcccaucaucaacuucuacgacccgcuggucuuccccagcgacgaguucgacgcguccaucagccaggugaacgagaagaucaaccagucccucgccuucauccgcaagagcgacgagcugcugcacaacgugaacgucggcaaguccaccaccaacaucaugaucaccaccaucaucaucgugaucaucgugauccuccugcugcucaucgccgucgggcuguuccuguacugcaaggcccggagcacgcccgugacccuguccaaggaccagcucagcggcaucaacaacaucgccuucuccaacugaggacuaguacuggcugcaucucccuuuccucuguccuccauccuucucccaggauggugaagggggaccugguacccagugauccccaccccaggauccuaaaucaugacuuaccugcuaauaaaaacucauuggaaaagugagaagaucuaaaaaaaaaaaaaaaaaaaaaaaaaaaaaaaaaaaaaaaaaaaaaaaaaaaaaaaaaaaaaaaaugcaucccccccccccccccccccccccccccccccaaaggcucuuuucagagccaccagaauu

SEQ ID NO: 19405 - RNA, 1989 nt, Artificial Sequence
  mRNA product Design h-1 comprising derived and/or modified sequence from HRSV(Memphis-37)__AIY60640.1__F_DSCav1_mut8 (opt2)
gggagacccgugacccggaaguuguacggcuacgcgacuuucccucccacaaacccucgcgcccuuccuuuccuacuugggcccggcagaaagcuuaccauggagcuccccauccucaagaccaacgccaucaccaccauccucgccgccgucacccucugcuucgccuccucccagaacaucaccgaggaguucuaccaguccaccugcuccgccgucuccaagggcuaccucggcgcccuccgcaccggcugguacaccuccgucaucaccaucgagcucuccaacaucaaggagaucaagugcaacggcaccgacgccaaggucaagcucaucaagcaggagcucgacaaguacaagaacgccgucaccgaccuccagcuccucaugcaguccacccccgccgccggcuccggcuccgccaucgccuccggcaucgccgucugcaagguccuccaccucgagggcgaggucaacaagaucaagaacgcccuccucuccaccaacaaggccgucgucucccucuccggcugcggcgucuccguccucaccuucaagguccucgaccucaagaacuacaucgacaagcagcuccuccccauccucaacaagcaguccugcuccauccccaacaucgagaccgucaucgaguuccagcagaagaacaaccgccuccucgagaucacccgcgaguucuccgucaacgccggcgucaccacccccgucuccaccuacaugcucaccaacuccgagcuccucucccucaucaacgacaugcccaucaccaacgaccagaagaagcucauguccaacaacguccagaucguccgccagcaguccuacuccaucaugugcaucaucaaggaggagguccucgccuacgucguccagcucccccucuacggcgucaucgacacccccugcuggaagcuccacaccuccccccucugcaccaccaacaccaaggagggcuccaacaucugccucacccgcaccgaccgcggcugguacugcgacaacgccggcuccgucuccuucuucccccaggccgagaccugcaagguccaguccaaccgcgucuucugcgacaccaugaacucccucacccuccccuccgaggucaaccucugcaacaucgacaucuucaaccccaaguacgacugcaagaucaugaccuccaagaccgacgucuccuccuccgucaucaccucccucggcgccaucgucuccugcuacggcaagaccaagugcaccgccuccaacaagugccgcggcaucaucaagaccuucuccaacggcugcgacuacgucuccaacaagggcgucgacaccgucuccgucggcaacacccucuacuacgucaacaagcaggagggccagucccucuacgucaagggcgagcccaucaucaacuucuacgacccccucgucuuccccuccgacgaguucgacgccuccaucucccaggucaacgagaagaucaaccagucccucgccuucauccgcaaguccgacgagcuccuccacaacgucaacgucggcaaguccaccaccaacaucaugaucaccaccaucaucaucgucaucaucgucauccuccuccuccucaucgccgucggccucuuccucuacugcaaggcccgcuccacccccgucacccucuccaaggaccagcucuccggcaucaacaacaucgccuucuccaacugaggacuaguacuggcugcaucucccuuuccucuguccuccauccuucucccaggauggugaagggggaccugguacccagugauccccaccccaggauccuaaaucaugacuuaccugcuaauaaaaacucauuggaaaagugagaagaucuaaaaaaaaaaaaaaaaaaaaaaaaaaaaaaaaaaaaaaaaaaaaaaaaaaaaaaaaaaaaaaaaugcaucccccccccccccccccccccccccccccccaaaggcucuuuucagagccaccagaauu

SEQ ID NO: 19406 - RNA, 1989 nt, Artificial Sequence
  mRNA product Design h-1 comprising derived and/or modified sequence from HRSV(Memphis-37)__AIY60640.1__F_DSCav1_mut8 (opt3)
gggagacccgugacccggaaguuguacggcuacgcgacuuucccucccacaaacccucgcgcccuuccuuuccuacuugggcccggcagaaagcuuaccauggagcugcccauccucaagaccaacgccauuacaacuauacuugcugcagugacgcugugcuucgccagcucccagaauaucaccgaagaguuuuaccaaucuacauguucagcggucaguaaaggcuauuugggggcuuuaagaacuggaugguacaccagcguuauuacaaucgaacuguccaacauuaaggagaucaaaugcaaugguaccgacgccaaggugaaacuaauaaagcaggaacucgauaaguauaaaaacgcaguaacugaccugcagcuucugaugcagucuacuccugccgcuggcucggggucagcaaucgccagcggaauugcuguguguaaggucuugcaccucgagggcgaggugaauaaaaucaagaacgcccugcugaguaccaauaaagcgguugugucccucucugguugcggggucagcguguuaacguucaagguacuggaucuuaagaacuacauugacaaacaauugcugccaauccuaaauaagcaguccuguucaauaccgaacauugaaacuguuaucgaguuucagcagaaaaauaacaggcuccuggaaauuacccgggaguucagugugaaugcaggagucacaacucccgugagcaccuauaugcuuacaaacucugagcuguugucccucaucaaugauaugccuaucaccaacgaccaaaagaaacugaugucaaacaaugugcagauuguccgccagcagagcuacaguauaaugugcaucauuaaggaagagguuuuagccuaugugguacaacugccacucuacggcgugaucgauacgcccuguuggaaacuucauacuucuccucugugcacaaccaacacuaaggaaggcuccaauauauguuugacacgaaccgaccgugggugguacugcgauaacgcuggaagcgucucguuuuucccacaggccgagacguguaaggugcagucuaauagaguuuucugcgacaccaugaacucccuaacacugcccucagaagugaaucucugcaacauugauaucuucaauccuaaauaugacuguaagaucaugacaaguaaaaccgaugucagcuccucugugauuacaagccugggugcaaucguaucaugcuacggcaagacuaaauguaccgcuaguaacaagugcagggggauuauaaagacauuuuccaauggaugugacuauguuagcaacaaaggcguggacaccgucucuguggguaauacucuuuacuaugucaacaagcaagaggggcagucacuguacgugaaaggagagccaaucauuaauuucuaugauccguugguuuuucccagugacgaauuugaugccagcaucucccaggugaacgagaagaucaaccagucucucgcguuuauucggaaaucggacgaacuguuacacaauguaaacgucggcaagagcacgacaaauauaaugaucaccacuauuaucauugugaucauaguuauccugcuacuccugauugccgugggccuuuucuuguacugcaaggcacgcuccaccccugucacacugucaaaagaucaacucagugggaucaacaauauugcuuucucuaacugaggacuaguacuggcugcaucucccuuuccucuguccuccauccuucucccaggauggugaagggggaccugguacccagugauccccaccccaggauccuaaaucaugacuuaccugcuaauaaaaacucauuggaaaagugagaagaucuaaaaaaaaaaaaaaaaaaaaaaaaaaaaaaaaaaaaaaaaaaaaaaaaaaaaaaaaaaaaaaaaugcaucccccccccccccccccccccccccccccccaaaggcucuuuucagagccaccagaauu

SEQ ID NO: 19407 - RNA, 1989 nt, Artificial Sequence
  mRNA product Design h-1 comprising derived and/or modified sequence from HRSV(Memphis-37)__AIY60640.1__F_DSCav1_mut8 (opt4)
gggagacccgugacccggaaguuguacggcuacgcgacuuucccucccacaaacccucgcgcccuuccuuuccuacuugggcccggcagaaagcuuaccauggagcugcccauccugaagaccaacgccaucaccaccauccuggccgccgugacccugugcuucgccagcagccagaacaucaccgaggaguucuaccagagcaccugcagcgccgugagcaagggcuaccugggcgcccugagaaccggcugguacaccagcgugaucaccaucgagcugagcaacaucaaggagaucaagugcaacggcaccgacgccaaggugaagcugaucaagcaggagcuggacaaguacaagaacgccgugaccgaccugcagcugcugaugcagagcacccccgccgccggcagcggcagcgccaucgccagcggcaucgccgugugcaaggugcugcaccuggagggcgaggugaacaagaucaagaacgcccugcugagcaccaacaaggccguggugagccugagcggcugcggcgugagcgugcugaccuucaaggugcuggaccugaagaacuacaucgacaagcagcugcugcccauccugaacaagcagagcugcagcauccccaacaucgagaccgugaucgaguuccagcagaagaacaacagacugcuggagaucaccagagaguucagcgugaacgccggcgugaccacccccgugagcaccuacaugcugaccaacagcgagcugcugagccugaucaacgacaugcccaucaccaacgaccagaagaagcugaugagcaacaacgugcagaucgugagacagcagagcuacagcaucaugugcaucaucaaggaggaggugcuggccuacguggugcagcugccccuguacggcgugaucgacacccccugcuggaagcugcacaccagcccccugugcaccaccaacaccaaggagggcagcaacaucugccugaccagaaccgacagaggcugguacugcgacaacgccggcagcgugagcuucuucccccaggccgagaccugcaaggugcagagcaacagaguguucugcgacaccaugaacagccugacccugcccagcgaggugaaccugugcaacaucgacaucuucaaccccaaguacgacugcaagaucaugaccagcaagaccgacgugagcagcagcgugaucaccagccugggcgccaucgugagcugcuacggcaagaccaagugcaccgccagcaacaagugcagaggcaucaucaagaccuucagcaacggcugcgacuacgugagcaacaagggcguggacaccgugagcgugggcaacacccuguacuacgugaacaagcaggagggccagagccuguacgugaagggcgagcccaucaucaacuucuacgacccccugguguuccccagcgacgaguucgacgccagcaucagccaggugaacgagaagaucaaccagagccuggccuucaucagaaagagcgacgagcugcugcacaacgugaacgugggcaagagcaccaccaacaucaugaucaccaccaucaucaucgugaucaucgugauccugcugcugcugaucgccgugggccuguuccuguacugcaaggccagaagcacccccgugacccugagcaaggaccagcugagcggcaucaacaacaucgccuucagcaacugaggacuaguacuggcugcaucucccuuuccucuguccuccauccuucucccaggauggugaagggggaccugguacccagugauccccaccccaggauccuaaaucaugacuuaccugcuaauaaaaacucauuggaaaagugagaagaucuaaaaaaaaaaaaaaaaaaaaaaaaaaaaaaaaaaaaaaaaaaaaaaaaaaaaaaaaaaaaaaaaugcaucccccccccccccccccccccccccccccccaaaggcucuuuucagagccaccagaauu

SEQ ID NO: 19408 - RNA, 1989 nt, Artificial Sequence
  mRNA product Design h-1 comprising derived and/or modified sequence from HRSV(Memphis-37)__AIY60640.1__F_DSCav1_mut8 (opt5)
gggagacccgugacccggaaguuguacggcuacgcgacuuucccucccacaaacccucgcgcccuuccuuuccuacuugggcccggcagaaagcuuaccauggagcugcccauccucaagaccaacgccauuacaacgauccuggcugccgugacccuuugcuucgcgagcucccagaauauuacagaagaguuuuaccaaucuaccuguagcgcugucuccaaaggcuaucugggggcccucagaacaggaugguacaccucuguuaucacaauugaacugagcaacaucaaggagaucaaaugcaauggcaccgacgccaaggugaaacuuauuaagcaggaacuggauaaguauaaaaacgcugugacggaccuccagcugcugaugcaguccaccccugccgcugggucuggaagcgccaucgcguccggcauugccgucuguaaggugcuccaccuggagggggagguuaauaaaaucaagaacgcccuucugagcacaaauaaagcuguggucucucucuccggaugcggcgugagcguucugaccuucaaggugcuugaucugaagaacuacauugacaaacaacuccugccgauccugaauaagcagucuuguuccauucccaacaucgaaacagucaucgaguuucagcagaaaaauaaccggcuccuggaaauuacccgcgaguucagcgugaaugcuggcgugacgacaccugucucuaccuauaugcuuacaaacuccgagcugcucagccugaucaaugauaugcccauuaccaacgaccaaaagaaacuuauguccaacaauguucagaucgugagacagcagucuuacagcauuaugugcaucaucaaggaagaggugcuggccuaugucgugcaacucccucuguacgggguuauugauacccccuguuggaaacugcauacauccccucucugcacgaccaacacaaaggaaggaagcaauaucugucugacccggacagaccgcggcugguacugcgauaacgcggggucuguguccuuuuucccgcaggccgagaccuguaagguccagagcaauagaguguuuugcgacacgaugaacucucuuacacugcccagcgaaguuaaucucugcaacauugauaucuucaauccuaaauaugacuguaagauuaugaccuccaaaaccgaugugucuagcuccgucaucacaagccugggagcuaucgugucuugcuacggcaagaccaaauguacagccuccaacaagugccgggggauuaucaagacguuuagcaauggaugugacuaugucucuaacaaaggcguggacaccguuuccgugggcaauacacuuuacuaugucaacaagcaagaggggcagagccuguacgugaaaggagagcccauuaucaauuucuaugauccucucguuuuucccuccgacgaguucgaugcuucuauuagccaggugaacgaaaagaucaaccagucccuggccuuuauucgcaaaucugacgaacugcuccacaaugucaacgugggcaagagcaccacaaauaucaugaucaccacgauuaucauugugaucauuguuauccugcuucugcucaucgccgucgggcuguuccuguacugcaaggcuagauccaccccggugacacuuagcaaagaucaacucucuggaauuaacaauaucgcguucuccaacugaggacuaguacuggcugcaucucccuuuccucuguccuccauccuucucccaggauggugaagggggaccugguacccagugauccccaccccaggauccuaaaucaugacuuaccugcuaauaaaaacucauuggaaaagugagaagaucuaaaaaaaaaaaaaaaaaaaaaaaaaaaaaaaaaaaaaaaaaaaaaaaaaaaaaaaaaaaaaaaaugcaucccccccccccccccccccccccccccccccaaaggcucuuuucagagccaccagaauu

SEQ ID NO: 19409 - RNA, 1989 nt, Artificial Sequence
  mRNA product Design h-1 comprising derived and/or modified sequence from HRSV(Memphis-37)__AIY60640.1__F_DSCav1_mut8 (opt6)
gggagacccgugacccggaaguuguacggcuacgcgacuuucccucccacaaacccucgcgcccuuccuuuccuacuugggcccggcagaaagcuuaccauggaacuuccuauuuuaaaaacaaacgcaauuacaaccauauuagcagcaguaacacuaugcuuugcaucaucacaaaacaucaccgaagaauuuuaucaauccacaugcucagcaguaucaaaaggauaccuuggcgcacuccgaacaggcugguauacaucggucauaacuauagaacucuccaacauaaaagaaauaaaaugcaaugguacugacgcaaaaguaaaauuaauaaaacaagaacuagacaaauacaaaaacgcaguaaccgauuuacaacuacuuaugcaaucaacaccugcagcaggaagcggaucagcaauagcaaguggaauagcaguaugcaaaguacuucaccucgaaggagaaguaaauaaaauaaaaaacgccuuacuaucaacaaauaaagccgucguaucacuuuccgguugcggcguaucaguauuaaccuuuaaagucuuagacuuaaaaaacuacauagacaaacaauuauuaccaauacuaaacaaacaauccuguuccauacccaacauagaaaccguaauagaauuucaacaaaaaaacaacagacuauuagaaauaacacgcgaauuuucaguaaacgcaggcguaacaacaccaguaucaacauauauguuaaccaauucagaauuauuaucccuuauaaaugacaugccuauaacaaacgaccaaaaaaaauuaaugaguaacaacguucaaauaguaagacaacaaucauacagcauaaugugcauaauaaaagaagaaguacuagcauacguaguucaacuaccacucuauggcguuaucgacaccccaugcuggaaacuacauaccucaccacucuguaccacuaauacgaaagaaggaucuaacauaugccuaaccagaacagaucgagguugguauugcgacaaugcuggaucaguaucauucuucccacaagcagaaaccugcaaaguacaaagcaacagaguauuuugugacacuaugaacucacuaacgcuaccuucagaaguaaaccuaugcaacaucgacauauucaacccaaaauacgauugcaaaauaaugacaucaaaaacagacguuuccucaucaguaauaacaucauuaggagcaauaguauccugcuacgguaaaaccaaaugcacagcauccaauaaaugccgaggaaucauuaaaacauuuucaaauggcugcgacuauguaaguaauaaagguguagauacaguaucaguaggcaacacacuauauuacguaaacaaacaagaagggcaaucccuauaugucaaaggcgaaccaauuauaaacuucuacgacccccucguauucccaucagacgaauuugacgcaucaauaucccaaguaaacgaaaaaaucaaccaaucacucgcauucauacguaaauccgacgaauuacuacauaacguaaacguaggcaaaucaacaacaaauauaaugauaacaaccauaaucauaguaauaauaguuauacuccuacuacucauugcagucggccuauuucuauacuguaaagcacgcucuacaccaguaacacuaucuaaagaucaauuauccggaauaaacaacauugccuucuccaauuaaggacuaguacuggcugcaucucccuuuccucuguccuccauccuucucccaggauggugaagggggaccugguacccagugauccccaccccaggauccuaaaucaugacuuaccugcuaauaaaaacucauuggaaaagugagaagaucuaaaaaaaaaaaaaaaaaaaaaaaaaaaaaaaaaaaaaaaaaaaaaaaaaaaaaaaaaaaaaaaaugcaucccccccccccccccccccccccccccccccaaaggcucuuuucagagccaccagaauu

SEQ ID NO: 19410 - RNA, 1989 nt, Artificial Sequence
  mRNA product Design h-1 comprising derived and/or modified sequence from HRSV(Memphis-37)__AIY60640.1__F_DSCav1_mut8 (opt11)
gggagacccgugacccggaaguuguacggcuacgcgacuuucccucccacaaacccucgcgcccuuccuuuccuacuugggcccggcagaaagcuuaccauggaacuucccauccugaagaccaacgcuaucacaaccauccucgccgcagucacccuuugcuucgccucaucccaaaacaucaccgaagaauuuuaccagucaaccugcucggccgucuccaagggcuaccucggcgcccuccgcacuggcugguacacauccgucaucaccaucgaacucuccaacauaaaagaaauaaaaugcaacggaaccgacgccaaagucaaacucaucaaacaagaacuagauaaauauaaaaacgccgucaccgaccugcaacuccucaugcaauccaccccagccgccggcucuggcagcgccaucgcaagcggaaucgccgucugcaaaguccuccaccuagaaggcgaagucaacaaaauuaaaaacgcccuccucuccaccaacaaagcaguugucucccucucuggcugcggagucucuguacucaccuucaaaguacuagaccucaagaauuacauagacaaacaacuccugcccauccuuaacaaacaaaguuguaguauccccaacaucgaaacaguaaucgaauuucagcagaaaaacaaccgccuccucgaaaucacacgagaguucucggucaacgccggcgucaccacccccguaucaaccuacaugcuaacaaacuccgaacuacuuucccucaucaaugacaugcccauaaccaacgaccaaaagaaacuaauguccaauaacguccagauaguccgucaacaguccuacucaaucaugugcauaauuaaagaagaaguacucgccuacgucguccaacuaccccucuauggagucaucgacacccccugcuggaaacuccacacaucaccccuaugcacaaccaacaccaaagaaggcuccaacaucugccucacaagaaccgaccgcggcugguacugcgacaacgcuggcuccgucucguucuucccacaagccgaaaccugcaaaguccaaucaaaccgggucuucugcgacaccaugaacucccucacucucccaagcgaagucaaccuaugcaacaucgacaucuucaacccaaaauacgacuguaaaaucaugacuucgaaaacagacgucuccucaucaguaaucacauccuuaggcgccaucguguccugcuacgguaagaccaaaugcacagccuccaacaaaugccggggcaucaucaaaaccuucagcaacgguugugauuacgucuccaacaaaggaguagacaccgucuccguaggaaacacccucuacuacgucaacaagcaagaaggccaaucccucuacgucaaaggggaacccaucaucaacuucuacgacccacucgucuuccccuccgacgaguucgacgcaagcaucucccaagucaacgaaaagaucaaccaaucacuagccuucauccgcaaauccgacgaacuccuccacaacguuaacguaggcaaauccaccaccaacaucaugaucacaaccaucaucauagucauaauagucauccuacuacuccucaucgccguaggucuauuccuauacuguaaagcucgaucaacccccgucacacucuccaaagaucaacucucaggaaucaacaacaucgccuucuccaacuaaggacuaguacuggcugcaucucccuuuccucuguccuccauccuucucccaggauggugaagggggaccugguacccagugauccccaccccaggauccuaaaucaugacuuaccugcuaauaaaaacucauuggaaaagugagaagaucuaaaaaaaaaaaaaaaaaaaaaaaaaaaaaaaaaaaaaaaaaaaaaaaaaaaaaaaaaaaaaaaaugcaucccccccccccccccccccccccccccccccaaaggcucuuuucagagccaccagaauu

SEQ ID NO: 19411 - RNA, 2205 nt, Artificial Sequence
  mRNA product Design h-2 comprising derived and/or modified sequence from HRSV(Memphis-37)__AIY60640.1__F_DSCav1_mut8 (opt1)
gggagacccgugacccggaaguuguacggcuacgcgacuuucccucccacaaacccucgcgcccuuccuuuccuacuugggcccggcagaaagcuuaccauggagcugcccauccucaagaccaacgccaucaccacgauccuggccgcggugacccugugcuucgccagcucccagaacaucaccgaggaguucuaccagagcacgugcuccgccgucagcaagggcuaccucggcgcccugcgcaccgggugguacaccagcgugaucaccaucgagcuguccaacaucaaggagaucaagugcaacggcaccgacgccaaggugaagcucaucaagcaggagcuggacaaguacaagaacgcggucacggaccugcagcuccugaugcagagcaccccggccgccggcuccgggagcgcgaucgccuccggcaucgccgucugcaaggugcugcaccucgagggcgaggugaacaagaucaagaacgcccugcuguccaccaacaaggccgucgugagccucuccggcugcggggugagcguccugaccuucaaggugcuggaccucaagaacuacaucgacaagcagcugcugcccauccugaacaagcagagcugcuccauccccaacaucgagaccgucaucgaguuccagcagaagaacaaccgccuccuggagaucacgcgggaguucagcgugaacgcgggcgugaccacccccgucuccaccuacaugcugacgaacagcgagcuccugucccugaucaacgacaugccgaucaccaacgaccagaagaagcucaugagcaacaacgugcagaucgugcgccagcaguccuacagcaucaugugcaucaucaaggaggagguccuggccuacguggugcagcugccccucuacggggucaucgacacccccugcuggaagcugcacaccagcccccugugcacgaccaacaccaaggagggcuccaacaucugccucacccggacggaccgcgggugguacugcgacaacgccggcagcguguccuucuucccgcaggccgagaccugcaagguccagagcaaccggguguucugcgacaccaugaacucccugacccugcccagcgaggugaaccucugcaacaucgacaucuucaaccccaaguacgacugcaagaucaugacguccaagaccgacgucagcuccagcgugaucaccucccugggcgccaucgugagcugcuacgggaagaccaagugcacggcgagcaacaagugccgcggcaucaucaagaccuucuccaacgggugcgacuacgucagcaacaagggcguggacaccguguccgucggcaacacccuguacuacgugaacaagcaggagggccagagccucuacgugaagggggagcccaucaucaacuucuacgacccgcuggucuuccccuccgacgaguucgacgccagcaucucccaggugaacgagaagaucaaccagagccuggccuucauccggaaguccgacgagcuccugcacaacgugaacgucggcaagagcaccacgaacaucaugaucaccaccaucaucaucgugaucaucgugauccugcugcuccugaucgccgucgggcuguuccucuacugcaaggcccgcuccacccccgugacgcugagcaaggaccagcuguccgggaucaacaacaucgcguucagcaacugaggacuagugaagggaacacccaaauuuaauucagccuuaagcacaauuaauuaagagugaaacguaauuguacaagcaguuggucacccaccauagggcaugaucaacaccgcaaccuuuccuuuuucccccagugauucugaaaaaccccucuucccuucagcuugcuuagauguuccaaauuuaguaagcuuaaggcggccuacagaagaaaaagaaaaaaaaggccacaaaaguucccucucacuuucaguaaauaaaauaaaagcagcaacagaaauaaagaaauaaaugaaauucaaaaugaaauaaauauuguguugugcagcauuaaaaaaucaauaaaaauuaaaaaugagcaagaucuaaaaaaaaaaaaaaaaaaaaaaaaaaaaaaaaaaaaaaaaaaaaaaaaaaaaaaaaaaaaaaaaugcaucccccccccccccccccccccccccccccccaaaggcucuuuucagagccaccagaauu

SEQ ID NO: 19412 - RNA, 2205 nt, Artificial Sequence
  mRNA product Design h-2 comprising derived and/or modified sequence from HRSV(Memphis-37)__AIY60640.1__F_DSCav1_mut8 (opt1)
gggagacccgugacccggaaguuguacggcuacgcgacuuucccucccacaaacccucgcgcccuuccuuuccuacuugggcccggcagaaagcuuaccauggagcugcccauccucaagaccaacgccaucaccacgauccuggccgcggugacccugugcuucgccagcucccagaacaucaccgaggaguucuaccagagcacgugcuccgccgucagcaagggcuaccucggggcccugcgcaccggcugguacaccuccgugaucaccaucgagcugagcaacaucaaggagaucaagugcaacgggaccgacgccaaggugaagcucaucaagcaggagcuggacaaguacaagaacgcggucacggaccugcagcuccugaugcaguccaccccggccgccggcagcggguccgccaucgcgagcggcaucgccgugugcaaggugcugcaccucgagggcgaggucaacaagaucaagaacgcccugcuguccaccaacaaggccguggugagccucuccgggugcggcgucagcgugcugaccuucaaggugcuggaccucaagaacuacaucgacaagcagcugcugcccauccucaacaagcaguccugcagcauccccaacaucgagacggucaucgaguuccagcagaagaacaaccggcugcuggagaucacccgcgaguucuccgugaacgccggggugaccacccccgucagcacguacaugcucaccaacuccgagcugcugagccucaucaacgacaugccgaucaccaacgaccagaagaagcugaugagcaacaacgugcagaucgugcggcagcaguccuacagcaucaugugcaucaucaaggaggagguccuggcguacguggugcagcucccccuguacggcgucaucgacacccccugcuggaagcugcacacgagcccccucugcaccaccaacaccaaggagggguccaacaucugccugacgcgcaccgaccggggcugguacugcgacaacgccggcuccgugagcuucuucccgcaggccgagaccugcaaggugcaguccaaccgcgucuucugcgacaccaugaacagccugacgcuccccuccgaggugaaccugugcaacaucgacaucuucaaccccaaguacgacugcaagaucaugaccagcaagaccgacgucuccagcuccgugaucaccagccugggggccaucguguccugcuacggcaagacgaagugcaccgccagcaacaagugccgggggaucaucaagaccuucuccaacggcugcgacuacgucagcaacaagggcguggacaccguguccgucgggaacacgcucuacuacgugaacaagcaggagggccagagccuguacgugaagggggagcccaucaucaacuucuacgacccgcuggucuuccccagcgacgaguucgacgcguccaucagccaggugaacgagaagaucaaccagucccucgccuucauccgcaagagcgacgagcugcugcacaacgugaacgucggcaaguccaccaccaacaucaugaucaccaccaucaucaucgugaucaucgugauccuccugcugcucaucgccgucgggcuguuccuguacugcaaggcccggagcacgcccgugacccuguccaaggaccagcucagcggcaucaacaacaucgccuucuccaacugaggacuagugaagggaacacccaaauuuaauucagccuuaagcacaauuaauuaagagugaaacguaauuguacaagcaguuggucacccaccauagggcaugaucaacaccgcaaccuuuccuuuuucccccagugauucugaaaaaccccucuucccuucagcuugcuuagauguuccaaauuuaguaagcuuaaggcggccuacagaagaaaaagaaaaaaaaggccacaaaaguucccucucacuuucaguaaauaaaauaaaagcagcaacagaaauaaagaaauaaaugaaauucaaaaugaaauaaauauuguguugugcagcauuaaaaaaucaauaaaaauuaaaaaugagcaagaucuaaaaaaaaaaaaaaaaaaaaaaaaaaaaaaaaaaaaaaaaaaaaaaaaaaaaaaaaaaaaaaaaugcaucccccccccccccccccccccccccccccccaaaggcucuuuucagagccaccagaauu

SEQ ID NO: 19413 - RNA, 2205 nt, Artificial Sequence
  mRNA product Design h-2 comprising derived and/or modified sequence from HRSV(Memphis-37)__AIY60640.1__F_DSCav1_mut8 (opt2)
gggagacccgugacccggaaguuguacggcuacgcgacuuucccucccacaaacccucgcgcccuuccuuuccuacuugggcccggcagaaagcuuaccauggagcuccccauccucaagaccaacgccaucaccaccauccucgccgccgucacccucugcuucgccuccucccagaacaucaccgaggaguucuaccaguccaccugcuccgccgucuccaagggcuaccucggcgcccuccgcaccggcugguacaccuccgucaucaccaucgagcucuccaacaucaaggagaucaagugcaacggcaccgacgccaaggucaagcucaucaagcaggagcucgacaaguacaagaacgccgucaccgaccuccagcuccucaugcaguccacccccgccgccggcuccggcuccgccaucgccuccggcaucgccgucugcaagguccuccaccucgagggcgaggucaacaagaucaagaacgcccuccucuccaccaacaaggccgucgucucccucuccggcugcggcgucuccguccucaccuucaagguccucgaccucaagaacuacaucgacaagcagcuccuccccauccucaacaagcaguccugcuccauccccaacaucgagaccgucaucgaguuccagcagaagaacaaccgccuccucgagaucacccgcgaguucuccgucaacgccggcgucaccacccccgucuccaccuacaugcucaccaacuccgagcuccucucccucaucaacgacaugcccaucaccaacgaccagaagaagcucauguccaacaacguccagaucguccgccagcaguccuacuccaucaugugcaucaucaaggaggagguccucgccuacgucguccagcucccccucuacggcgucaucgacacccccugcuggaagcuccacaccuccccccucugcaccaccaacaccaaggagggcuccaacaucugccucacccgcaccgaccgcggcugguacugcgacaacgccggcuccgucuccuucuucccccaggccgagaccugcaagguccaguccaaccgcgucuucugcgacaccaugaacucccucacccuccccuccgaggucaaccucugcaacaucgacaucuucaaccccaaguacgacugcaagaucaugaccuccaagaccgacgucuccuccuccgucaucaccucccucggcgccaucgucuccugcuacggcaagaccaagugcaccgccuccaacaagugccgcggcaucaucaagaccuucuccaacggcugcgacuacgucuccaacaagggcgucgacaccgucuccgucggcaacacccucuacuacgucaacaagcaggagggccagucccucuacgucaagggcgagcccaucaucaacuucuacgacccccucgucuuccccuccgacgaguucgacgccuccaucucccaggucaacgagaagaucaaccagucccucgccuucauccgcaaguccgacgagcuccuccacaacgucaacgucggcaaguccaccaccaacaucaugaucaccaccaucaucaucgucaucaucgucauccuccuccuccucaucgccgucggccucuuccucuacugcaaggcccgcuccacccccgucacccucuccaaggaccagcucuccggcaucaacaacaucgccuucuccaacugaggacuagugaagggaacacccaaauuuaauucagccuuaagcacaauuaauuaagagugaaacguaauuguacaagcaguuggucacccaccauagggcaugaucaacaccgcaaccuuuccuuuuucccccagugauucugaaaaaccccucuucccuucagcuugcuuagauguuccaaauuuaguaagcuuaaggcggccuacagaagaaaaagaaaaaaaaggccacaaaaguucccucucacuuucaguaaauaaaauaaaagcagcaacagaaauaaagaaauaaaugaaauucaaaaugaaauaaauauuguguugugcagcauuaaaaaaucaauaaaaauuaaaaaugagcaagaucuaaaaaaaaaaaaaaaaaaaaaaaaaaaaaaaaaaaaaaaaaaaaaaaaaaaaaaaaaaaaaaaaugcaucccccccccccccccccccccccccccccccaaaggcucuuuucagagccaccagaauu

SEQ ID NO: 19414 - RNA, 2205 nt, Artificial Sequence
  mRNA product Design h-2 comprising derived and/or modified sequence from HRSV(Memphis-37)__AIY60640.1__F_DSCav1_mut8 (opt3)
gggagacccgugacccggaaguuguacggcuacgcgacuuucccucccacaaacccucgcgcccuuccuuuccuacuugggcccggcagaaagcuuaccauggagcugcccauccucaagaccaacgccauuacaacuauacuugcugcagugacgcugugcuucgccagcucccagaauaucaccgaagaguuuuaccaaucuacauguucagcggucaguaaaggcuauuugggggcuuuaagaacuggaugguacaccagcguuauuacaaucgaacuguccaacauuaaggagaucaaaugcaaugguaccgacgccaaggugaaacuaauaaagcaggaacucgauaaguauaaaaacgcaguaacugaccugcagcuucugaugcagucuacuccugccgcuggcucggggucagcaaucgccagcggaauugcuguguguaaggucuugcaccucgagggcgaggugaauaaaaucaagaacgcccugcugaguaccaauaaagcgguugugucccucucugguugcggggucagcguguuaacguucaagguacuggaucuuaagaacuacauugacaaacaauugcugccaauccuaaauaagcaguccuguucaauaccgaacauugaaacuguuaucgaguuucagcagaaaaauaacaggcuccuggaaauuacccgggaguucagugugaaugcaggagucacaacucccgugagcaccuauaugcuuacaaacucugagcuguugucccucaucaaugauaugccuaucaccaacgaccaaaagaaacugaugucaaacaaugugcagauuguccgccagcagagcuacaguauaaugugcaucauuaaggaagagguuuuagccuaugugguacaacugccacucuacggcgugaucgauacgcccuguuggaaacuucauacuucuccucugugcacaaccaacacuaaggaaggcuccaauauauguuugacacgaaccgaccgugggugguacugcgauaacgcuggaagcgucucguuuuucccacaggccgagacguguaaggugcagucuaauagaguuuucugcgacaccaugaacucccuaacacugcccucagaagugaaucucugcaacauugauaucuucaauccuaaauaugacuguaagaucaugacaaguaaaaccgaugucagcuccucugugauuacaagccugggugcaaucguaucaugcuacggcaagacuaaauguaccgcuaguaacaagugcagggggauuauaaagacauuuuccaauggaugugacuauguuagcaacaaaggcguggacaccgucucuguggguaauacucuuuacuaugucaacaagcaagaggggcagucacuguacgugaaaggagagccaaucauuaauuucuaugauccguugguuuuucccagugacgaauuugaugccagcaucucccaggugaacgagaagaucaaccagucucucgcguuuauucggaaaucggacgaacuguuacacaauguaaacgucggcaagagcacgacaaauauaaugaucaccacuauuaucauugugaucauaguuauccugcuacuccugauugccgugggccuuuucuuguacugcaaggcacgcuccaccccugucacacugucaaaagaucaacucagugggaucaacaauauugcuuucucuaacugaggacuagugaagggaacacccaaauuuaauucagccuuaagcacaauuaauuaagagugaaacguaauuguacaagcaguuggucacccaccauagggcaugaucaacaccgcaaccuuuccuuuuucccccagugauucugaaaaaccccucuucccuucagcuugcuuagauguuccaaauuuaguaagcuuaaggcggccuacagaagaaaaagaaaaaaaaggccacaaaaguucccucucacuuucaguaaauaaaauaaaagcagcaacagaaauaaagaaauaaaugaaauucaaaaugaaauaaauauuguguugugcagcauuaaaaaaucaauaaaaauuaaaaaugagcaagaucuaaaaaaaaaaaaaaaaaaaaaaaaaaaaaaaaaaaaaaaaaaaaaaaaaaaaaaaaaaaaaaaaugcaucccccccccccccccccccccccccccccccaaaggcucuuuucagagccaccagaauu

SEQ ID NO: 19415 - RNA, 2205 nt, Artificial Sequence
  mRNA product Design h-2 comprising derived and/or modified sequence from HRSV(Memphis-37)__AIY60640.1__F_DSCav1_mut8 (opt4)
gggagacccgugacccggaaguuguacggcuacgcgacuuucccucccacaaacccucgcgcccuuccuuuccuacuugggcccggcagaaagcuuaccauggagcugcccauccugaagaccaacgccaucaccaccauccuggccgccgugacccugugcuucgccagcagccagaacaucaccgaggaguucuaccagagcaccugcagcgccgugagcaagggcuaccugggcgcccugagaaccggcugguacaccagcgugaucaccaucgagcugagcaacaucaaggagaucaagugcaacggcaccgacgccaaggugaagcugaucaagcaggagcuggacaaguacaagaacgccgugaccgaccugcagcugcugaugcagagcacccccgccgccggcagcggcagcgccaucgccagcggcaucgccgugugcaaggugcugcaccuggagggcgaggugaacaagaucaagaacgcccugcugagcaccaacaaggccguggugagccugagcggcugcggcgugagcgugcugaccuucaaggugcuggaccugaagaacuacaucgacaagcagcugcugcccauccugaacaagcagagcugcagcauccccaacaucgagaccgugaucgaguuccagcagaagaacaacagacugcuggagaucaccagagaguucagcgugaacgccggcgugaccacccccgugagcaccuacaugcugaccaacagcgagcugcugagccugaucaacgacaugcccaucaccaacgaccagaagaagcugaugagcaacaacgugcagaucgugagacagcagagcuacagcaucaugugcaucaucaaggaggaggugcuggccuacguggugcagcugccccuguacggcgugaucgacacccccugcuggaagcugcacaccagcccccugugcaccaccaacaccaaggagggcagcaacaucugccugaccagaaccgacagaggcugguacugcgacaacgccggcagcgugagcuucuucccccaggccgagaccugcaaggugcagagcaacagaguguucugcgacaccaugaacagccugacccugcccagcgaggugaaccugugcaacaucgacaucuucaaccccaaguacgacugcaagaucaugaccagcaagaccgacgugagcagcagcgugaucaccagccugggcgccaucgugagcugcuacggcaagaccaagugcaccgccagcaacaagugcagaggcaucaucaagaccuucagcaacggcugcgacuacgugagcaacaagggcguggacaccgugagcgugggcaacacccuguacuacgugaacaagcaggagggccagagccuguacgugaagggcgagcccaucaucaacuucuacgacccccugguguuccccagcgacgaguucgacgccagcaucagccaggugaacgagaagaucaaccagagccuggccuucaucagaaagagcgacgagcugcugcacaacgugaacgugggcaagagcaccaccaacaucaugaucaccaccaucaucaucgugaucaucgugauccugcugcugcugaucgccgugggccuguuccuguacugcaaggccagaagcacccccgugacccugagcaaggaccagcugagcggcaucaacaacaucgccuucagcaacugaggacuagugaagggaacacccaaauuuaauucagccuuaagcacaauuaauuaagagugaaacguaauuguacaagcaguuggucacccaccauagggcaugaucaacaccgcaaccuuuccuuuuucccccagugauucugaaaaaccccucuucccuucagcuugcuuagauguuccaaauuuaguaagcuuaaggcggccuacagaagaaaaagaaaaaaaaggccacaaaaguucccucucacuuucaguaaauaaaauaaaagcagcaacagaaauaaagaaauaaaugaaauucaaaaugaaauaaauauuguguugugcagcauuaaaaaaucaauaaaaauuaaaaaugagcaagaucuaaaaaaaaaaaaaaaaaaaaaaaaaaaaaaaaaaaaaaaaaaaaaaaaaaaaaaaaaaaaaaaaugcaucccccccccccccccccccccccccccccccaaaggcucuuuucagagccaccagaauu

SEQ ID NO: 19416 - RNA, 2205 nt, Artificial Sequence
  mRNA product Design h-2 comprising derived and/or modified sequence from HRSV(Memphis-37)__AIY60640.1__F_DSCav1_mut8 (opt5)
gggagacccgugacccggaaguuguacggcuacgcgacuuucccucccacaaacccucgcgcccuuccuuuccuacuugggcccggcagaaagcuuaccauggagcugcccauccucaagaccaacgccauuacaacgauccuggcugccgugacccuuugcuucgcgagcucccagaauauuacagaagaguuuuaccaaucuaccuguagcgcugucuccaaaggcuaucugggggcccucagaacaggaugguacaccucuguuaucacaauugaacugagcaacaucaaggagaucaaaugcaauggcaccgacgccaaggugaaacuuauuaagcaggaacuggauaaguauaaaaacgcugugacggaccuccagcugcugaugcaguccaccccugccgcugggucuggaagcgccaucgcguccggcauugccgucuguaaggugcuccaccuggagggggagguuaauaaaaucaagaacgcccuucugagcacaaauaaagcuguggucucucucuccggaugcggcgugagcguucugaccuucaaggugcuugaucugaagaacuacauugacaaacaacuccugccgauccugaauaagcagucuuguuccauucccaacaucgaaacagucaucgaguuucagcagaaaaauaaccggcuccuggaaauuacccgcgaguucagcgugaaugcuggcgugacgacaccugucucuaccuauaugcuuacaaacuccgagcugcucagccugaucaaugauaugcccauuaccaacgaccaaaagaaacuuauguccaacaauguucagaucgugagacagcagucuuacagcauuaugugcaucaucaaggaagaggugcuggccuaugucgugcaacucccucuguacgggguuauugauacccccuguuggaaacugcauacauccccucucugcacgaccaacacaaaggaaggaagcaauaucugucugacccggacagaccgcggcugguacugcgauaacgcggggucuguguccuuuuucccgcaggccgagaccuguaagguccagagcaauagaguguuuugcgacacgaugaacucucuuacacugcccagcgaaguuaaucucugcaacauugauaucuucaauccuaaauaugacuguaagauuaugaccuccaaaaccgaugugucuagcuccgucaucacaagccugggagcuaucgugucuugcuacggcaagaccaaauguacagccuccaacaagugccgggggauuaucaagacguuuagcaauggaugugacuaugucucuaacaaaggcguggacaccguuuccgugggcaauacacuuuacuaugucaacaagcaagaggggcagagccuguacgugaaaggagagcccauuaucaauuucuaugauccucucguuuuucccuccgacgaguucgaugcuucuauuagccaggugaacgaaaagaucaaccagucccuggccuuuauucgcaaaucugacgaacugcuccacaaugucaacgugggcaagagcaccacaaauaucaugaucaccacgauuaucauugugaucauuguuauccugcuucugcucaucgccgucgggcuguuccuguacugcaaggcuagauccaccccggugacacuuagcaaagaucaacucucuggaauuaacaauaucgcguucuccaacugaggacuagugaagggaacacccaaauuuaauucagccuuaagcacaauuaauuaagagugaaacguaauuguacaagcaguuggucacccaccauagggcaugaucaacaccgcaaccuuuccuuuuucccccagugauucugaaaaaccccucuucccuucagcuugcuuagauguuccaaauuuaguaagcuuaaggcggccuacagaagaaaaagaaaaaaaaggccacaaaaguucccucucacuuucaguaaauaaaauaaaagcagcaacagaaauaaagaaauaaaugaaauucaaaaugaaauaaauauuguguugugcagcauuaaaaaaucaauaaaaauuaaaaaugagcaagaucuaaaaaaaaaaaaaaaaaaaaaaaaaaaaaaaaaaaaaaaaaaaaaaaaaaaaaaaaaaaaaaaaugcaucccccccccccccccccccccccccccccccaaaggcucuuuucagagccaccagaauu

SEQ ID NO: 19417 - RNA, 2205 nt, Artificial Sequence
  mRNA product Design h-2 comprising derived and/or modified sequence from HRSV(Memphis-37)__AIY60640.1__F_DSCav1_mut8 (opt6)
gggagacccgugacccggaaguuguacggcuacgcgacuuucccucccacaaacccucgcgcccuuccuuuccuacuugggcccggcagaaagcuuaccauggaacuuccuauuuuaaaaacaaacgcaauuacaaccauauuagcagcaguaacacuaugcuuugcaucaucacaaaacaucaccgaagaauuuuaucaauccacaugcucagcaguaucaaaaggauaccuuggcgcacuccgaacaggcugguauacaucggucauaacuauagaacucuccaacauaaaagaaauaaaaugcaaugguacugacgcaaaaguaaaauuaauaaaacaagaacuagacaaauacaaaaacgcaguaaccgauuuacaacuacuuaugcaaucaacaccugcagcaggaagcggaucagcaauagcaaguggaauagcaguaugcaaaguacuucaccucgaaggagaaguaaauaaaauaaaaaacgccuuacuaucaacaaauaaagccgucguaucacuuuccgguugcggcguaucaguauuaaccuuuaaagucuuagacuuaaaaaacuacauagacaaacaauuauuaccaauacuaaacaaacaauccuguuccauacccaacauagaaaccguaauagaauuucaacaaaaaaacaacagacuauuagaaauaacacgcgaauuuucaguaaacgcaggcguaacaacaccaguaucaacauauauguuaaccaauucagaauuauuaucccuuauaaaugacaugccuauaacaaacgaccaaaaaaaauuaaugaguaacaacguucaaauaguaagacaacaaucauacagcauaaugugcauaauaaaagaagaaguacuagcauacguaguucaacuaccacucuauggcguuaucgacaccccaugcuggaaacuacauaccucaccacucuguaccacuaauacgaaagaaggaucuaacauaugccuaaccagaacagaucgagguugguauugcgacaaugcuggaucaguaucauucuucccacaagcagaaaccugcaaaguacaaagcaacagaguauuuugugacacuaugaacucacuaacgcuaccuucagaaguaaaccuaugcaacaucgacauauucaacccaaaauacgauugcaaaauaaugacaucaaaaacagacguuuccucaucaguaauaacaucauuaggagcaauaguauccugcuacgguaaaaccaaaugcacagcauccaauaaaugccgaggaaucauuaaaacauuuucaaauggcugcgacuauguaaguaauaaagguguagauacaguaucaguaggcaacacacuauauuacguaaacaaacaagaagggcaaucccuauaugucaaaggcgaaccaauuauaaacuucuacgacccccucguauucccaucagacgaauuugacgcaucaauaucccaaguaaacgaaaaaaucaaccaaucacucgcauucauacguaaauccgacgaauuacuacauaacguaaacguaggcaaaucaacaacaaauauaaugauaacaaccauaaucauaguaauaauaguuauacuccuacuacucauugcagucggccuauuucuauacuguaaagcacgcucuacaccaguaacacuaucuaaagaucaauuauccggaauaaacaacauugccuucuccaauuaaggacuagugaagggaacacccaaauuuaauucagccuuaagcacaauuaauuaagagugaaacguaauuguacaagcaguuggucacccaccauagggcaugaucaacaccgcaaccuuuccuuuuucccccagugauucugaaaaaccccucuucccuucagcuugcuuagauguuccaaauuuaguaagcuuaaggcggccuacagaagaaaaagaaaaaaaaggccacaaaaguucccucucacuuucaguaaauaaaauaaaagcagcaacagaaauaaagaaauaaaugaaauucaaaaugaaauaaauauuguguugugcagcauuaaaaaaucaauaaaaauuaaaaaugagcaagaucuaaaaaaaaaaaaaaaaaaaaaaaaaaaaaaaaaaaaaaaaaaaaaaaaaaaaaaaaaaaaaaaaugcaucccccccccccccccccccccccccccccccaaaggcucuuuucagagccaccagaauu

SEQ ID NO: 19418 - RNA, 2205 nt, Artificial Sequence
  mRNA product Design h-2 comprising derived and/or modified sequence from HRSV(Memphis-37)__AIY60640.1__F_DSCav1_mut8 (opt11)
gggagacccgugacccggaaguuguacggcuacgcgacuuucccucccacaaacccucgcgcccuuccuuuccuacuugggcccggcagaaagcuuaccauggaacuucccauccugaagaccaacgcuaucacaaccauccucgccgcagucacccuuugcuucgccucaucccaaaacaucaccgaagaauuuuaccagucaaccugcucggccgucuccaagggcuaccucggcgcccuccgcacuggcugguacacauccgucaucaccaucgaacucuccaacauaaaagaaauaaaaugcaacggaaccgacgccaaagucaaacucaucaaacaagaacuagauaaauauaaaaacgccgucaccgaccugcaacuccucaugcaauccaccccagccgccggcucuggcagcgccaucgcaagcggaaucgccgucugcaaaguccuccaccuagaaggcgaagucaacaaaauuaaaaacgcccuccucuccaccaacaaagcaguugucucccucucuggcugcggagucucuguacucaccuucaaaguacuagaccucaagaauuacauagacaaacaacuccugcccauccuuaacaaacaaaguuguaguauccccaacaucgaaacaguaaucgaauuucagcagaaaaacaaccgccuccucgaaaucacacgagaguucucggucaacgccggcgucaccacccccguaucaaccuacaugcuaacaaacuccgaacuacuuucccucaucaaugacaugcccauaaccaacgaccaaaagaaacuaauguccaauaacguccagauaguccgucaacaguccuacucaaucaugugcauaauuaaagaagaaguacucgccuacgucguccaacuaccccucuauggagucaucgacacccccugcuggaaacuccacacaucaccccuaugcacaaccaacaccaaagaaggcuccaacaucugccucacaagaaccgaccgcggcugguacugcgacaacgcuggcuccgucucguucuucccacaagccgaaaccugcaaaguccaaucaaaccgggucuucugcgacaccaugaacucccucacucucccaagcgaagucaaccuaugcaacaucgacaucuucaacccaaaauacgacuguaaaaucaugacuucgaaaacagacgucuccucaucaguaaucacauccuuaggcgccaucguguccugcuacgguaagaccaaaugcacagccuccaacaaaugccggggcaucaucaaaaccuucagcaacgguugugauuacgucuccaacaaaggaguagacaccgucuccguaggaaacacccucuacuacgucaacaagcaagaaggccaaucccucuacgucaaaggggaacccaucaucaacuucuacgacccacucgucuuccccuccgacgaguucgacgcaagcaucucccaagucaacgaaaagaucaaccaaucacuagccuucauccgcaaauccgacgaacuccuccacaacguuaacguaggcaaauccaccaccaacaucaugaucacaaccaucaucauagucauaauagucauccuacuacuccucaucgccguaggucuauuccuauacuguaaagcucgaucaacccccgucacacucuccaaagaucaacucucaggaaucaacaacaucgccuucuccaacuaaggacuagugaagggaacacccaaauuuaauucagccuuaagcacaauuaauuaagagugaaacguaauuguacaagcaguuggucacccaccauagggcaugaucaacaccgcaaccuuuccuuuuucccccagugauucugaaaaaccccucuucccuucagcuugcuuagauguuccaaauuuaguaagcuuaaggcggccuacagaagaaaaagaaaaaaaaggccacaaaaguucccucucacuuucaguaaauaaaauaaaagcagcaacagaaauaaagaaauaaaugaaauucaaaaugaaauaaauauuguguugugcagcauuaaaaaaucaauaaaaauuaaaaaugagcaagaucuaaaaaaaaaaaaaaaaaaaaaaaaaaaaaaaaaaaaaaaaaaaaaaaaaaaaaaaaaaaaaaaaugcaucccccccccccccccccccccccccccccccaaaggcucuuuucagagccaccagaauu

SEQ ID NO: 19419 - RNA, 1985 nt, Artificial Sequence
  mRNA product Design h-3 comprising derived and/or modified sequence from HRSV(Memphis-37)__AIY60640.1__F_DSCav1_mut8 (opt1)
gggagacccgugacccggaaguuguacggcuacgcgacuuucccucccacaaacccucgcgcccuuccuuuccuacuugggcccggcagaaagcuuaccauggagcugcccauccucaagaccaacgccaucaccacgauccuggccgcggugacccugugcuucgccagcucccagaacaucaccgaggaguucuaccagagcacgugcuccgccgucagcaagggcuaccucggcgcccugcgcaccgggugguacaccagcgugaucaccaucgagcuguccaacaucaaggagaucaagugcaacggcaccgacgccaaggugaagcucaucaagcaggagcuggacaaguacaagaacgcggucacggaccugcagcuccugaugcagagcaccccggccgccggcuccgggagcgcgaucgccuccggcaucgccgucugcaaggugcugcaccucgagggcgaggugaacaagaucaagaacgcccugcuguccaccaacaaggccgucgugagccucuccggcugcggggugagcguccugaccuucaaggugcuggaccucaagaacuacaucgacaagcagcugcugcccauccugaacaagcagagcugcuccauccccaacaucgagaccgucaucgaguuccagcagaagaacaaccgccuccuggagaucacgcgggaguucagcgugaacgcgggcgugaccacccccgucuccaccuacaugcugacgaacagcgagcuccugucccugaucaacgacaugccgaucaccaacgaccagaagaagcucaugagcaacaacgugcagaucgugcgccagcaguccuacagcaucaugugcaucaucaaggaggagguccuggccuacguggugcagcugccccucuacggggucaucgacacccccugcuggaagcugcacaccagcccccugugcacgaccaacaccaaggagggcuccaacaucugccucacccggacggaccgcgggugguacugcgacaacgccggcagcguguccuucuucccgcaggccgagaccugcaagguccagagcaaccggguguucugcgacaccaugaacucccugacccugcccagcgaggugaaccucugcaacaucgacaucuucaaccccaaguacgacugcaagaucaugacguccaagaccgacgucagcuccagcgugaucaccucccugggcgccaucgugagcugcuacgggaagaccaagugcacggcgagcaacaagugccgcggcaucaucaagaccuucuccaacgggugcgacuacgucagcaacaagggcguggacaccguguccgucggcaacacccuguacuacgugaacaagcaggagggccagagccucuacgugaagggggagcccaucaucaacuucuacgacccgcuggucuuccccuccgacgaguucgacgccagcaucucccaggugaacgagaagaucaaccagagccuggccuucauccggaaguccgacgagcuccugcacaacgugaacgucggcaagagcaccacgaacaucaugaucaccaccaucaucaucgugaucaucgugauccugcugcuccugaucgccgucgggcuguuccucuacugcaaggcccgcuccacccccgugacgcugagcaaggaccagcuguccgggaucaacaacaucgcguucagcaacugaggacuaguggaagcauuuuccuggcugauuaaaagaaauuacucagcuauggucaucuguuccuguuagaaggcuaugcagcauauuauauacuaugcgcauguuaugaaaugcauaauaaaaaauuuuaaaaaaucuaaaagaucuaaaaaaaaaaaaaaaaaaaaaaaaaaaaaaaaaaaaaaaaaaaaaaaaaaaaaaaaaaaaaaaaugcaucccccccccccccccccccccccccccccccaaaggcucuuuucagagccaccagaauu

SEQ ID NO: 19420 - RNA, 1985 nt, Artificial Sequence
  mRNA product Design h-3 comprising derived and/or modified sequence from HRSV(Memphis-37)__AIY60640.1__F_DSCav1_mut8 (opt1)
gggagacccgugacccggaaguuguacggcuacgcgacuuucccucccacaaacccucgcgcccuuccuuuccuacuugggcccggcagaaagcuuaccauggagcugcccauccucaagaccaacgccaucaccacgauccuggccgcggugacccugugcuucgccagcucccagaacaucaccgaggaguucuaccagagcacgugcuccgccgucagcaagggcuaccucggggcccugcgcaccggcugguacaccuccgugaucaccaucgagcugagcaacaucaaggagaucaagugcaacgggaccgacgccaaggugaagcucaucaagcaggagcuggacaaguacaagaacgcggucacggaccugcagcuccugaugcaguccaccccggccgccggcagcggguccgccaucgcgagcggcaucgccgugugcaaggugcugcaccucgagggcgaggucaacaagaucaagaacgcccugcuguccaccaacaaggccguggugagccucuccgggugcggcgucagcgugcugaccuucaaggugcuggaccucaagaacuacaucgacaagcagcugcugcccauccucaacaagcaguccugcagcauccccaacaucgagacggucaucgaguuccagcagaagaacaaccggcugcuggagaucacccgcgaguucuccgugaacgccggggugaccacccccgucagcacguacaugcucaccaacuccgagcugcugagccucaucaacgacaugccgaucaccaacgaccagaagaagcugaugagcaacaacgugcagaucgugcggcagcaguccuacagcaucaugugcaucaucaaggaggagguccuggcguacguggugcagcucccccuguacggcgucaucgacacccccugcuggaagcugcacacgagcccccucugcaccaccaacaccaaggagggguccaacaucugccugacgcgcaccgaccggggcugguacugcgacaacgccggcuccgugagcuucuucccgcaggccgagaccugcaaggugcaguccaaccgcgucuucugcgacaccaugaacagccugacgcuccccuccgaggugaaccugugcaacaucgacaucuucaaccccaaguacgacugcaagaucaugaccagcaagaccgacgucuccagcuccgugaucaccagccugggggccaucguguccugcuacggcaagacgaagugcaccgccagcaacaagugccgggggaucaucaagaccuucuccaacggcugcgacuacgucagcaacaagggcguggacaccguguccgucgggaacacgcucuacuacgugaacaagcaggagggccagagccuguacgugaagggggagcccaucaucaacuucuacgacccgcuggucuuccccagcgacgaguucgacgcguccaucagccaggugaacgagaagaucaaccagucccucgccuucauccgcaagagcgacgagcugcugcacaacgugaacgucggcaaguccaccaccaacaucaugaucaccaccaucaucaucgugaucaucgugauccuccugcugcucaucgccgucgggcuguuccuguacugcaaggcccggagcacgcccgugacccuguccaaggaccagcucagcggcaucaacaacaucgccuucuccaacugaggacuaguggaagcauuuuccuggcugauuaaaagaaauuacucagcuauggucaucuguuccuguuagaaggcuaugcagcauauuauauacuaugcgcauguuaugaaaugcauaauaaaaaauuuuaaaaaaucuaaaagaucuaaaaaaaaaaaaaaaaaaaaaaaaaaaaaaaaaaaaaaaaaaaaaaaaaaaaaaaaaaaaaaaaugcaucccccccccccccccccccccccccccccccaaaggcucuuuucagagccaccagaauu

SEQ ID NO: 19421 - RNA, 1985 nt, Artificial Sequence
  mRNA product Design h-3 comprising derived and/or modified sequence from HRSV(Memphis-37)__AIY60640.1__F_DSCav1_mut8 (opt2)
gggagacccgugacccggaaguuguacggcuacgcgacuuucccucccacaaacccucgcgcccuuccuuuccuacuugggcccggcagaaagcuuaccauggagcuccccauccucaagaccaacgccaucaccaccauccucgccgccgucacccucugcuucgccuccucccagaacaucaccgaggaguucuaccaguccaccugcuccgccgucuccaagggcuaccucggcgcccuccgcaccggcugguacaccuccgucaucaccaucgagcucuccaacaucaaggagaucaagugcaacggcaccgacgccaaggucaagcucaucaagcaggagcucgacaaguacaagaacgccgucaccgaccuccagcuccucaugcaguccacccccgccgccggcuccggcuccgccaucgccuccggcaucgccgucugcaagguccuccaccucgagggcgaggucaacaagaucaagaacgcccuccucuccaccaacaaggccgucgucucccucuccggcugcggcgucuccguccucaccuucaagguccucgaccucaagaacuacaucgacaagcagcuccuccccauccucaacaagcaguccugcuccauccccaacaucgagaccgucaucgaguuccagcagaagaacaaccgccuccucgagaucacccgcgaguucuccgucaacgccggcgucaccacccccgucuccaccuacaugcucaccaacuccgagcuccucucccucaucaacgacaugcccaucaccaacgaccagaagaagcucauguccaacaacguccagaucguccgccagcaguccuacuccaucaugugcaucaucaaggaggagguccucgccuacgucguccagcucccccucuacggcgucaucgacacccccugcuggaagcuccacaccuccccccucugcaccaccaacaccaaggagggcuccaacaucugccucacccgcaccgaccgcggcugguacugcgacaacgccggcuccgucuccuucuucccccaggccgagaccugcaagguccaguccaaccgcgucuucugcgacaccaugaacucccucacccuccccuccgaggucaaccucugcaacaucgacaucuucaaccccaaguacgacugcaagaucaugaccuccaagaccgacgucuccuccuccgucaucaccucccucggcgccaucgucuccugcuacggcaagaccaagugcaccgccuccaacaagugccgcggcaucaucaagaccuucuccaacggcugcgacuacgucuccaacaagggcgucgacaccgucuccgucggcaacacccucuacuacgucaacaagcaggagggccagucccucuacgucaagggcgagcccaucaucaacuucuacgacccccucgucuuccccuccgacgaguucgacgccuccaucucccaggucaacgagaagaucaaccagucccucgccuucauccgcaaguccgacgagcuccuccacaacgucaacgucggcaaguccaccaccaacaucaugaucaccaccaucaucaucgucaucaucgucauccuccuccuccucaucgccgucggccucuuccucuacugcaaggcccgcuccacccccgucacccucuccaaggaccagcucuccggcaucaacaacaucgccuucuccaacugaggacuaguggaagcauuuuccuggcugauuaaaagaaauuacucagcuauggucaucuguuccuguuagaaggcuaugcagcauauuauauacuaugcgcauguuaugaaaugcauaauaaaaaauuuuaaaaaaucuaaaagaucuaaaaaaaaaaaaaaaaaaaaaaaaaaaaaaaaaaaaaaaaaaaaaaaaaaaaaaaaaaaaaaaaugcaucccccccccccccccccccccccccccccccaaaggcucuuuucagagccaccagaauu

SEQ ID NO: 19422 - RNA, 1985 nt, Artificial Sequence
  mRNA product Design h-3 comprising derived and/or modified sequence from HRSV(Memphis-37)__AIY60640.1__F_DSCav1_mut8 (opt3)
gggagacccgugacccggaaguuguacggcuacgcgacuuucccucccacaaacccucgcgcccuuccuuuccuacuugggcccggcagaaagcuuaccauggagcugcccauccucaagaccaacgccauuacaacuauacuugcugcagugacgcugugcuucgccagcucccagaauaucaccgaagaguuuuaccaaucuacauguucagcggucaguaaaggcuauuugggggcuuuaagaacuggaugguacaccagcguuauuacaaucgaacuguccaacauuaaggagaucaaaugcaaugguaccgacgccaaggugaaacuaauaaagcaggaacucgauaaguauaaaaacgcaguaacugaccugcagcuucugaugcagucuacuccugccgcuggcucggggucagcaaucgccagcggaauugcuguguguaaggucuugcaccucgagggcgaggugaauaaaaucaagaacgcccugcugaguaccaauaaagcgguugugucccucucugguugcggggucagcguguuaacguucaagguacuggaucuuaagaacuacauugacaaacaauugcugccaauccuaaauaagcaguccuguucaauaccgaacauugaaacuguuaucgaguuucagcagaaaaauaacaggcuccuggaaauuacccgggaguucagugugaaugcaggagucacaacucccgugagcaccuauaugcuuacaaacucugagcuguugucccucaucaaugauaugccuaucaccaacgaccaaaagaaacugaugucaaacaaugugcagauuguccgccagcagagcuacaguauaaugugcaucauuaaggaagagguuuuagccuaugugguacaacugccacucuacggcgugaucgauacgcccuguuggaaacuucauacuucuccucugugcacaaccaacacuaaggaaggcuccaauauauguuugacacgaaccgaccgugggugguacugcgauaacgcuggaagcgucucguuuuucccacaggccgagacguguaaggugcagucuaauagaguuuucugcgacaccaugaacucccuaacacugcccucagaagugaaucucugcaacauugauaucuucaauccuaaauaugacuguaagaucaugacaaguaaaaccgaugucagcuccucugugauuacaagccugggugcaaucguaucaugcuacggcaagacuaaauguaccgcuaguaacaagugcagggggauuauaaagacauuuuccaauggaugugacuauguuagcaacaaaggcguggacaccgucucuguggguaauacucuuuacuaugucaacaagcaagaggggcagucacuguacgugaaaggagagccaaucauuaauuucuaugauccguugguuuuucccagugacgaauuugaugccagcaucucccaggugaacgagaagaucaaccagucucucgcguuuauucggaaaucggacgaacuguuacacaauguaaacgucggcaagagcacgacaaauauaaugaucaccacuauuaucauugugaucauaguuauccugcuacuccugauugccgugggccuuuucuuguacugcaaggcacgcuccaccccugucacacugucaaaagaucaacucagugggaucaacaauauugcuuucucuaacugaggacuaguggaagcauuuuccuggcugauuaaaagaaauuacucagcuauggucaucuguuccuguuagaaggcuaugcagcauauuauauacuaugcgcauguuaugaaaugcauaauaaaaaauuuuaaaaaaucuaaaagaucuaaaaaaaaaaaaaaaaaaaaaaaaaaaaaaaaaaaaaaaaaaaaaaaaaaaaaaaaaaaaaaaaugcaucccccccccccccccccccccccccccccccaaaggcucuuuucagagccaccagaauu

SEQ ID NO: 19423 - RNA, 1985 nt, Artificial Sequence
  mRNA product Design h-3 comprising derived and/or modified sequence from HRSV(Memphis-37)__AIY60640.1__F_DSCav1_mut8 (opt4)
gggagacccgugacccggaaguuguacggcuacgcgacuuucccucccacaaacccucgcgcccuuccuuuccuacuugggcccggcagaaagcuuaccauggagcugcccauccugaagaccaacgccaucaccaccauccuggccgccgugacccugugcuucgccagcagccagaacaucaccgaggaguucuaccagagcaccugcagcgccgugagcaagggcuaccugggcgcccugagaaccggcugguacaccagcgugaucaccaucgagcugagcaacaucaaggagaucaagugcaacggcaccgacgccaaggugaagcugaucaagcaggagcuggacaaguacaagaacgccgugaccgaccugcagcugcugaugcagagcacccccgccgccggcagcggcagcgccaucgccagcggcaucgccgugugcaaggugcugcaccuggagggcgaggugaacaagaucaagaacgcccugcugagcaccaacaaggccguggugagccugagcggcugcggcgugagcgugcugaccuucaaggugcuggaccugaagaacuacaucgacaagcagcugcugcccauccugaacaagcagagcugcagcauccccaacaucgagaccgugaucgaguuccagcagaagaacaacagacugcuggagaucaccagagaguucagcgugaacgccggcgugaccacccccgugagcaccuacaugcugaccaacagcgagcugcugagccugaucaacgacaugcccaucaccaacgaccagaagaagcugaugagcaacaacgugcagaucgugagacagcagagcuacagcaucaugugcaucaucaaggaggaggugcuggccuacguggugcagcugccccuguacggcgugaucgacacccccugcuggaagcugcacaccagcccccugugcaccaccaacaccaaggagggcagcaacaucugccugaccagaaccgacagaggcugguacugcgacaacgccggcagcgugagcuucuucccccaggccgagaccugcaaggugcagagcaacagaguguucugcgacaccaugaacagccugacccugcccagcgaggugaaccugugcaacaucgacaucuucaaccccaaguacgacugcaagaucaugaccagcaagaccgacgugagcagcagcgugaucaccagccugggcgccaucgugagcugcuacggcaagaccaagugcaccgccagcaacaagugcagaggcaucaucaagaccuucagcaacggcugcgacuacgugagcaacaagggcguggacaccgugagcgugggcaacacccuguacuacgugaacaagcaggagggccagagccuguacgugaagggcgagcccaucaucaacuucuacgacccccugguguuccccagcgacgaguucgacgccagcaucagccaggugaacgagaagaucaaccagagccuggccuucaucagaaagagcgacgagcugcugcacaacgugaacgugggcaagagcaccaccaacaucaugaucaccaccaucaucaucgugaucaucgugauccugcugcugcugaucgccgugggccuguuccuguacugcaaggccagaagcacccccgugacccugagcaaggaccagcugagcggcaucaacaacaucgccuucagcaacugaggacuaguggaagcauuuuccuggcugauuaaaagaaauuacucagcuauggucaucuguuccuguuagaaggcuaugcagcauauuauauacuaugcgcauguuaugaaaugcauaauaaaaaauuuuaaaaaaucuaaaagaucuaaaaaaaaaaaaaaaaaaaaaaaaaaaaaaaaaaaaaaaaaaaaaaaaaaaaaaaaaaaaaaaaugcaucccccccccccccccccccccccccccccccaaaggcucuuuucagagccaccagaauu

SEQ ID NO: 19424 - RNA, 1985 nt, Artificial Sequence
  mRNA product Design h-3 comprising derived and/or modified sequence from HRSV(Memphis-37)__AIY60640.1__F_DSCav1_mut8 (opt5)
gggagacccgugacccggaaguuguacggcuacgcgacuuucccucccacaaacccucgcgcccuuccuuuccuacuugggcccggcagaaagcuuaccauggagcugcccauccucaagaccaacgccauuacaacgauccuggcugccgugacccuuugcuucgcgagcucccagaauauuacagaagaguuuuaccaaucuaccuguagcgcugucuccaaaggcuaucugggggcccucagaacaggaugguacaccucuguuaucacaauugaacugagcaacaucaaggagaucaaaugcaauggcaccgacgccaaggugaaacuuauuaagcaggaacuggauaaguauaaaaacgcugugacggaccuccagcugcugaugcaguccaccccugccgcugggucuggaagcgccaucgcguccggcauugccgucuguaaggugcuccaccuggagggggagguuaauaaaaucaagaacgcccuucugagcacaaauaaagcuguggucucucucuccggaugcggcgugagcguucugaccuucaaggugcuugaucugaagaacuacauugacaaacaacuccugccgauccugaauaagcagucuuguuccauucccaacaucgaaacagucaucgaguuucagcagaaaaauaaccggcuccuggaaauuacccgcgaguucagcgugaaugcuggcgugacgacaccugucucuaccuauaugcuuacaaacuccgagcugcucagccugaucaaugauaugcccauuaccaacgaccaaaagaaacuuauguccaacaauguucagaucgugagacagcagucuuacagcauuaugugcaucaucaaggaagaggugcuggccuaugucgugcaacucccucuguacgggguuauugauacccccuguuggaaacugcauacauccccucucugcacgaccaacacaaaggaaggaagcaauaucugucugacccggacagaccgcggcugguacugcgauaacgcggggucuguguccuuuuucccgcaggccgagaccuguaagguccagagcaauagaguguuuugcgacacgaugaacucucuuacacugcccagcgaaguuaaucucugcaacauugauaucuucaauccuaaauaugacuguaagauuaugaccuccaaaaccgaugugucuagcuccgucaucacaagccugggagcuaucgugucuugcuacggcaagaccaaauguacagccuccaacaagugccgggggauuaucaagacguuuagcaauggaugugacuaugucucuaacaaaggcguggacaccguuuccgugggcaauacacuuuacuaugucaacaagcaagaggggcagagccuguacgugaaaggagagcccauuaucaauuucuaugauccucucguuuuucccuccgacgaguucgaugcuucuauuagccaggugaacgaaaagaucaaccagucccuggccuuuauucgcaaaucugacgaacugcuccacaaugucaacgugggcaagagcaccacaaauaucaugaucaccacgauuaucauugugaucauuguuauccugcuucugcucaucgccgucgggcuguuccuguacugcaaggcuagauccaccccggugacacuuagcaaagaucaacucucuggaauuaacaauaucgcguucuccaacugaggacuaguggaagcauuuuccuggcugauuaaaagaaauuacucagcuauggucaucuguuccuguuagaaggcuaugcagcauauuauauacuaugcgcauguuaugaaaugcauaauaaaaaauuuuaaaaaaucuaaaagaucuaaaaaaaaaaaaaaaaaaaaaaaaaaaaaaaaaaaaaaaaaaaaaaaaaaaaaaaaaaaaaaaaugcaucccccccccccccccccccccccccccccccaaaggcucuuuucagagccaccagaauu

SEQ ID NO: 19425 - RNA, 1985 nt, Artificial Sequence
  mRNA product Design h-3 comprising derived and/or modified sequence from HRSV(Memphis-37)__AIY60640.1__F_DSCav1_mut8 (opt6)
gggagacccgugacccggaaguuguacggcuacgcgacuuucccucccacaaacccucgcgcccuuccuuuccuacuugggcccggcagaaagcuuaccauggaacuuccuauuuuaaaaacaaacgcaauuacaaccauauuagcagcaguaacacuaugcuuugcaucaucacaaaacaucaccgaagaauuuuaucaauccacaugcucagcaguaucaaaaggauaccuuggcgcacuccgaacaggcugguauacaucggucauaacuauagaacucuccaacauaaaagaaauaaaaugcaaugguacugacgcaaaaguaaaauuaauaaaacaagaacuagacaaauacaaaaacgcaguaaccgauuuacaacuacuuaugcaaucaacaccugcagcaggaagcggaucagcaauagcaaguggaauagcaguaugcaaaguacuucaccucgaaggagaaguaaauaaaauaaaaaacgccuuacuaucaacaaauaaagccgucguaucacuuuccgguugcggcguaucaguauuaaccuuuaaagucuuagacuuaaaaaacuacauagacaaacaauuauuaccaauacuaaacaaacaauccuguuccauacccaacauagaaaccguaauagaauuucaacaaaaaaacaacagacuauuagaaauaacacgcgaauuuucaguaaacgcaggcguaacaacaccaguaucaacauauauguuaaccaauucagaauuauuaucccuuauaaaugacaugccuauaacaaacgaccaaaaaaaauuaaugaguaacaacguucaaauaguaagacaacaaucauacagcauaaugugcauaauaaaagaagaaguacuagcauacguaguucaacuaccacucuauggcguuaucgacaccccaugcuggaaacuacauaccucaccacucuguaccacuaauacgaaagaaggaucuaacauaugccuaaccagaacagaucgagguugguauugcgacaaugcuggaucaguaucauucuucccacaagcagaaaccugcaaaguacaaagcaacagaguauuuugugacacuaugaacucacuaacgcuaccuucagaaguaaaccuaugcaacaucgacauauucaacccaaaauacgauugcaaaauaaugacaucaaaaacagacguuuccucaucaguaauaacaucauuaggagcaauaguauccugcuacgguaaaaccaaaugcacagcauccaauaaaugccgaggaaucauuaaaacauuuucaaauggcugcgacuauguaaguaauaaagguguagauacaguaucaguaggcaacacacuauauuacguaaacaaacaagaagggcaaucccuauaugucaaaggcgaaccaauuauaaacuucuacgacccccucguauucccaucagacgaauuugacgcaucaauaucccaaguaaacgaaaaaaucaaccaaucacucgcauucauacguaaauccgacgaauuacuacauaacguaaacguaggcaaaucaacaacaaauauaaugauaacaaccauaaucauaguaauaauaguuauacuccuacuacucauugcagucggccuauuucuauacuguaaagcacgcucuacaccaguaacacuaucuaaagaucaauuauccggaauaaacaacauugccuucuccaauuaaggacuaguggaagcauuuuccuggcugauuaaaagaaauuacucagcuauggucaucuguuccuguuagaaggcuaugcagcauauuauauacuaugcgcauguuaugaaaugcauaauaaaaaauuuuaaaaaaucuaaaagaucuaaaaaaaaaaaaaaaaaaaaaaaaaaaaaaaaaaaaaaaaaaaaaaaaaaaaaaaaaaaaaaaaugcaucccccccccccccccccccccccccccccccaaaggcucuuuucagagccaccagaauu

SEQ ID NO: 19426 - RNA, 1985 nt, Artificial Sequence
  mRNA product Design h-3 comprising derived and/or modified sequence from HRSV(Memphis-37)__AIY60640.1__F_DSCav1_mut8 (opt11)
gggagacccgugacccggaaguuguacggcuacgcgacuuucccucccacaaacccucgcgcccuuccuuuccuacuugggcccggcagaaagcuuaccauggaacuucccauccugaagaccaacgcuaucacaaccauccucgccgcagucacccuuugcuucgccucaucccaaaacaucaccgaagaauuuuaccagucaaccugcucggccgucuccaagggcuaccucggcgcccuccgcacuggcugguacacauccgucaucaccaucgaacucuccaacauaaaagaaauaaaaugcaacggaaccgacgccaaagucaaacucaucaaacaagaacuagauaaauauaaaaacgccgucaccgaccugcaacuccucaugcaauccaccccagccgccggcucuggcagcgccaucgcaagcggaaucgccgucugcaaaguccuccaccuagaaggcgaagucaacaaaauuaaaaacgcccuccucuccaccaacaaagcaguugucucccucucuggcugcggagucucuguacucaccuucaaaguacuagaccucaagaauuacauagacaaacaacuccugcccauccuuaacaaacaaaguuguaguauccccaacaucgaaacaguaaucgaauuucagcagaaaaacaaccgccuccucgaaaucacacgagaguucucggucaacgccggcgucaccacccccguaucaaccuacaugcuaacaaacuccgaacuacuuucccucaucaaugacaugcccauaaccaacgaccaaaagaaacuaauguccaauaacguccagauaguccgucaacaguccuacucaaucaugugcauaauuaaagaagaaguacucgccuacgucguccaacuaccccucuauggagucaucgacacccccugcuggaaacuccacacaucaccccuaugcacaaccaacaccaaagaaggcuccaacaucugccucacaagaaccgaccgcggcugguacugcgacaacgcuggcuccgucucguucuucccacaagccgaaaccugcaaaguccaaucaaaccgggucuucugcgacaccaugaacucccucacucucccaagcgaagucaaccuaugcaacaucgacaucuucaacccaaaauacgacuguaaaaucaugacuucgaaaacagacgucuccucaucaguaaucacauccuuaggcgccaucguguccugcuacgguaagaccaaaugcacagccuccaacaaaugccggggcaucaucaaaaccuucagcaacgguugugauuacgucuccaacaaaggaguagacaccgucuccguaggaaacacccucuacuacgucaacaagcaagaaggccaaucccucuacgucaaaggggaacccaucaucaacuucuacgacccacucgucuuccccuccgacgaguucgacgcaagcaucucccaagucaacgaaaagaucaaccaaucacuagccuucauccgcaaauccgacgaacuccuccacaacguuaacguaggcaaauccaccaccaacaucaugaucacaaccaucaucauagucauaauagucauccuacuacuccucaucgccguaggucuauuccuauacuguaaagcucgaucaacccccgucacacucuccaaagaucaacucucaggaaucaacaacaucgccuucuccaacuaaggacuaguggaagcauuuuccuggcugauuaaaagaaauuacucagcuauggucaucuguuccuguuagaaggcuaugcagcauauuauauacuaugcgcauguuaugaaaugcauaauaaaaaauuuuaaaaaaucuaaaagaucuaaaaaaaaaaaaaaaaaaaaaaaaaaaaaaaaaaaaaaaaaaaaaaaaaaaaaaaaaaaaaaaaugcaucccccccccccccccccccccccccccccccaaaggcucuuuucagagccaccagaauu

SEQ ID NO: 19427 - RNA, 2048 nt, Artificial Sequence
  mRNA product Design h-4 comprising derived and/or modified sequence from HRSV(Memphis-37)__AIY60640.1__F_DSCav1_mut8 (opt1)
gggagagggcgcuuggcuugcaaggacccugagcugcggcauugaagcacacccaacccaacucgacugaagucagccucacugaaccggaucugagaaucuucucucucugggcuugccagggcucuccgaaccuagcuagcauccucuucaauuccaacuagaaagcuuaccauggagcugcccauccucaagaccaacgccaucaccacgauccuggccgcggugacccugugcuucgccagcucccagaacaucaccgaggaguucuaccagagcacgugcuccgccgucagcaagggcuaccucggcgcccugcgcaccgggugguacaccagcgugaucaccaucgagcuguccaacaucaaggagaucaagugcaacggcaccgacgccaaggugaagcucaucaagcaggagcuggacaaguacaagaacgcggucacggaccugcagcuccugaugcagagcaccccggccgccggcuccgggagcgcgaucgccuccggcaucgccgucugcaaggugcugcaccucgagggcgaggugaacaagaucaagaacgcccugcuguccaccaacaaggccgucgugagccucuccggcugcggggugagcguccugaccuucaaggugcuggaccucaagaacuacaucgacaagcagcugcugcccauccugaacaagcagagcugcuccauccccaacaucgagaccgucaucgaguuccagcagaagaacaaccgccuccuggagaucacgcgggaguucagcgugaacgcgggcgugaccacccccgucuccaccuacaugcugacgaacagcgagcuccugucccugaucaacgacaugccgaucaccaacgaccagaagaagcucaugagcaacaacgugcagaucgugcgccagcaguccuacagcaucaugugcaucaucaaggaggagguccuggccuacguggugcagcugccccucuacggggucaucgacacccccugcuggaagcugcacaccagcccccugugcacgaccaacaccaaggagggcuccaacaucugccucacccggacggaccgcgggugguacugcgacaacgccggcagcguguccuucuucccgcaggccgagaccugcaagguccagagcaaccggguguucugcgacaccaugaacucccugacccugcccagcgaggugaaccucugcaacaucgacaucuucaaccccaaguacgacugcaagaucaugacguccaagaccgacgucagcuccagcgugaucaccucccugggcgccaucgugagcugcuacgggaagaccaagugcacggcgagcaacaagugccgcggcaucaucaagaccuucuccaacgggugcgacuacgucagcaacaagggcguggacaccguguccgucggcaacacccuguacuacgugaacaagcaggagggccagagccucuacgugaagggggagcccaucaucaacuucuacgacccgcuggucuuccccuccgacgaguucgacgccagcaucucccaggugaacgagaagaucaaccagagccuggccuucauccggaaguccgacgagcuccugcacaacgugaacgucggcaagagcaccacgaacaucaugaucaccaccaucaucaucgugaucaucgugauccugcugcuccugaucgccgucgggcuguuccucuacugcaaggcccgcuccacccccgugacgcugagcaaggaccagcuguccgggaucaacaacaucgcguucagcaacugaggacuaguaauaaggaaacuguaugaaugucugugggcaggaagugaagagauccuucuguaaagguuuuuggaauuaugucugcugaauaauaaacuuuuuugaaauaauaaaucugguagaaaaaugagaucuaaaaaaaaaaaaaaaaaaaaaaaaaaaaaaaaaaaaaaaaaaaaaaaaaaaaaaaaaaaaaaaaugcaucccccccccccccccccccccccccccccccaaaggcucuuuucagagccaccagaauu

SEQ ID NO: 19428 - RNA, 2048 nt, Artificial Sequence
  mRNA product Design h-4 comprising derived and/or modified sequence from HRSV(Memphis-37)__AIY60640.1__F_DSCav1_mut8 (opt1)
gggagagggcgcuuggcuugcaaggacccugagcugcggcauugaagcacacccaacccaacucgacugaagucagccucacugaaccggaucugagaaucuucucucucugggcuugccagggcucuccgaaccuagcuagcauccucuucaauuccaacuagaaagcuuaccauggagcugcccauccucaagaccaacgccaucaccacgauccuggccgcggugacccugugcuucgccagcucccagaacaucaccgaggaguucuaccagagcacgugcuccgccgucagcaagggcuaccucggggcccugcgcaccggcugguacaccuccgugaucaccaucgagcugagcaacaucaaggagaucaagugcaacgggaccgacgccaaggugaagcucaucaagcaggagcuggacaaguacaagaacgcggucacggaccugcagcuccugaugcaguccaccccggccgccggcagcggguccgccaucgcgagcggcaucgccgugugcaaggugcugcaccucgagggcgaggucaacaagaucaagaacgcccugcuguccaccaacaaggccguggugagccucuccgggugcggcgucagcgugcugaccuucaaggugcuggaccucaagaacuacaucgacaagcagcugcugcccauccucaacaagcaguccugcagcauccccaacaucgagacggucaucgaguuccagcagaagaacaaccggcugcuggagaucacccgcgaguucuccgugaacgccggggugaccacccccgucagcacguacaugcucaccaacuccgagcugcugagccucaucaacgacaugccgaucaccaacgaccagaagaagcugaugagcaacaacgugcagaucgugcggcagcaguccuacagcaucaugugcaucaucaaggaggagguccuggcguacguggugcagcucccccuguacggcgucaucgacacccccugcuggaagcugcacacgagcccccucugcaccaccaacaccaaggagggguccaacaucugccugacgcgcaccgaccggggcugguacugcgacaacgccggcuccgugagcuucuucccgcaggccgagaccugcaaggugcaguccaaccgcgucuucugcgacaccaugaacagccugacgcuccccuccgaggugaaccugugcaacaucgacaucuucaaccccaaguacgacugcaagaucaugaccagcaagaccgacgucuccagcuccgugaucaccagccugggggccaucguguccugcuacggcaagacgaagugcaccgccagcaacaagugccgggggaucaucaagaccuucuccaacggcugcgacuacgucagcaacaagggcguggacaccguguccgucgggaacacgcucuacuacgugaacaagcaggagggccagagccuguacgugaagggggagcccaucaucaacuucuacgacccgcuggucuuccccagcgacgaguucgacgcguccaucagccaggugaacgagaagaucaaccagucccucgccuucauccgcaagagcgacgagcugcugcacaacgugaacgucggcaaguccaccaccaacaucaugaucaccaccaucaucaucgugaucaucgugauccuccugcugcucaucgccgucgggcuguuccuguacugcaaggcccggagcacgcccgugacccuguccaaggaccagcucagcggcaucaacaacaucgccuucuccaacugaggacuaguaauaaggaaacuguaugaaugucugugggcaggaagugaagagauccuucuguaaagguuuuuggaauuaugucugcugaauaauaaacuuuuuugaaauaauaaaucugguagaaaaaugagaucuaaaaaaaaaaaaaaaaaaaaaaaaaaaaaaaaaaaaaaaaaaaaaaaaaaaaaaaaaaaaaaaaugcaucccccccccccccccccccccccccccccccaaaggcucuuuucagagccaccagaauu

SEQ ID NO: 19429 - RNA, 2048 nt, Artificial Sequence
  mRNA product Design h-4 comprising derived and/or modified sequence from HRSV(Memphis-37)__AIY60640.1__F_DSCav1_mut8 (opt2)
gggagagggcgcuuggcuugcaaggacccugagcugcggcauugaagcacacccaacccaacucgacugaagucagccucacugaaccggaucugagaaucuucucucucugggcuugccagggcucuccgaaccuagcuagcauccucuucaauuccaacuagaaagcuuaccauggagcuccccauccucaagaccaacgccaucaccaccauccucgccgccgucacccucugcuucgccuccucccagaacaucaccgaggaguucuaccaguccaccugcuccgccgucuccaagggcuaccucggcgcccuccgcaccggcugguacaccuccgucaucaccaucgagcucuccaacaucaaggagaucaagugcaacggcaccgacgccaaggucaagcucaucaagcaggagcucgacaaguacaagaacgccgucaccgaccuccagcuccucaugcaguccacccccgccgccggcuccggcuccgccaucgccuccggcaucgccgucugcaagguccuccaccucgagggcgaggucaacaagaucaagaacgcccuccucuccaccaacaaggccgucgucucccucuccggcugcggcgucuccguccucaccuucaagguccucgaccucaagaacuacaucgacaagcagcuccuccccauccucaacaagcaguccugcuccauccccaacaucgagaccgucaucgaguuccagcagaagaacaaccgccuccucgagaucacccgcgaguucuccgucaacgccggcgucaccacccccgucuccaccuacaugcucaccaacuccgagcuccucucccucaucaacgacaugcccaucaccaacgaccagaagaagcucauguccaacaacguccagaucguccgccagcaguccuacuccaucaugugcaucaucaaggaggagguccucgccuacgucguccagcucccccucuacggcgucaucgacacccccugcuggaagcuccacaccuccccccucugcaccaccaacaccaaggagggcuccaacaucugccucacccgcaccgaccgcggcugguacugcgacaacgccggcuccgucuccuucuucccccaggccgagaccugcaagguccaguccaaccgcgucuucugcgacaccaugaacucccucacccuccccuccgaggucaaccucugcaacaucgacaucuucaaccccaaguacgacugcaagaucaugaccuccaagaccgacgucuccuccuccgucaucaccucccucggcgccaucgucuccugcuacggcaagaccaagugcaccgccuccaacaagugccgcggcaucaucaagaccuucuccaacggcugcgacuacgucuccaacaagggcgucgacaccgucuccgucggcaacacccucuacuacgucaacaagcaggagggccagucccucuacgucaagggcgagcccaucaucaacuucuacgacccccucgucuuccccuccgacgaguucgacgccuccaucucccaggucaacgagaagaucaaccagucccucgccuucauccgcaaguccgacgagcuccuccacaacgucaacgucggcaaguccaccaccaacaucaugaucaccaccaucaucaucgucaucaucgucauccuccuccuccucaucgccgucggccucuuccucuacugcaaggcccgcuccacccccgucacccucuccaaggaccagcucuccggcaucaacaacaucgccuucuccaacugaggacuaguaauaaggaaacuguaugaaugucugugggcaggaagugaagagauccuucuguaaagguuuuuggaauuaugucugcugaauaauaaacuuuuuugaaauaauaaaucugguagaaaaaugagaucuaaaaaaaaaaaaaaaaaaaaaaaaaaaaaaaaaaaaaaaaaaaaaaaaaaaaaaaaaaaaaaaaugcaucccccccccccccccccccccccccccccccaaaggcucuuuucagagccaccagaauu

SEQ ID NO: 19430 - RNA, 2048 nt, Artificial Sequence
  mRNA product Design h-4 comprising derived and/or modified sequence from HRSV(Memphis-37)__AIY60640.1__F_DSCav1_mut8 (opt3)
gggagagggcgcuuggcuugcaaggacccugagcugcggcauugaagcacacccaacccaacucgacugaagucagccucacugaaccggaucugagaaucuucucucucugggcuugccagggcucuccgaaccuagcuagcauccucuucaauuccaacuagaaagcuuaccauggagcugcccauccucaagaccaacgccauuacaacuauacuugcugcagugacgcugugcuucgccagcucccagaauaucaccgaagaguuuuaccaaucuacauguucagcggucaguaaaggcuauuugggggcuuuaagaacuggaugguacaccagcguuauuacaaucgaacuguccaacauuaaggagaucaaaugcaaugguaccgacgccaaggugaaacuaauaaagcaggaacucgauaaguauaaaaacgcaguaacugaccugcagcuucugaugcagucuacuccugccgcuggcucggggucagcaaucgccagcggaauugcuguguguaaggucuugcaccucgagggcgaggugaauaaaaucaagaacgcccugcugaguaccaauaaagcgguugugucccucucugguugcggggucagcguguuaacguucaagguacuggaucuuaagaacuacauugacaaacaauugcugccaauccuaaauaagcaguccuguucaauaccgaacauugaaacuguuaucgaguuucagcagaaaaauaacaggcuccuggaaauuacccgggaguucagugugaaugcaggagucacaacucccgugagcaccuauaugcuuacaaacucugagcuguugucccucaucaaugauaugccuaucaccaacgaccaaaagaaacugaugucaaacaaugugcagauuguccgccagcagagcuacaguauaaugugcaucauuaaggaagagguuuuagccuaugugguacaacugccacucuacggcgugaucgauacgcccuguuggaaacuucauacuucuccucugugcacaaccaacacuaaggaaggcuccaauauauguuugacacgaaccgaccgugggugguacugcgauaacgcuggaagcgucucguuuuucccacaggccgagacguguaaggugcagucuaauagaguuuucugcgacaccaugaacucccuaacacugcccucagaagugaaucucugcaacauugauaucuucaauccuaaauaugacuguaagaucaugacaaguaaaaccgaugucagcuccucugugauuacaagccugggugcaaucguaucaugcuacggcaagacuaaauguaccgcuaguaacaagugcagggggauuauaaagacauuuuccaauggaugugacuauguuagcaacaaaggcguggacaccgucucuguggguaauacucuuuacuaugucaacaagcaagaggggcagucacuguacgugaaaggagagccaaucauuaauuucuaugauccguugguuuuucccagugacgaauuugaugccagcaucucccaggugaacgagaagaucaaccagucucucgcguuuauucggaaaucggacgaacuguuacacaauguaaacgucggcaagagcacgacaaauauaaugaucaccacuauuaucauugugaucauaguuauccugcuacuccugauugccgugggccuuuucuuguacugcaaggcacgcuccaccccugucacacugucaaaagaucaacucagugggaucaacaauauugcuuucucuaacugaggacuaguaauaaggaaacuguaugaaugucugugggcaggaagugaagagauccuucuguaaagguuuuuggaauuaugucugcugaauaauaaacuuuuuugaaauaauaaaucugguagaaaaaugagaucuaaaaaaaaaaaaaaaaaaaaaaaaaaaaaaaaaaaaaaaaaaaaaaaaaaaaaaaaaaaaaaaaugcaucccccccccccccccccccccccccccccccaaaggcucuuuucagagccaccagaauu

SEQ ID NO: 19431 - RNA, 2048 nt, Artificial Sequence
  mRNA product Design h-4 comprising derived and/or modified sequence from HRSV(Memphis-37)__AIY60640.1__F_DSCav1_mut8 (opt4)
gggagagggcgcuuggcuugcaaggacccugagcugcggcauugaagcacacccaacccaacucgacugaagucagccucacugaaccggaucugagaaucuucucucucugggcuugccagggcucuccgaaccuagcuagcauccucuucaauuccaacuagaaagcuuaccauggagcugcccauccugaagaccaacgccaucaccaccauccuggccgccgugacccugugcuucgccagcagccagaacaucaccgaggaguucuaccagagcaccugcagcgccgugagcaagggcuaccugggcgcccugagaaccggcugguacaccagcgugaucaccaucgagcugagcaacaucaaggagaucaagugcaacggcaccgacgccaaggugaagcugaucaagcaggagcuggacaaguacaagaacgccgugaccgaccugcagcugcugaugcagagcacccccgccgccggcagcggcagcgccaucgccagcggcaucgccgugugcaaggugcugcaccuggagggcgaggugaacaagaucaagaacgcccugcugagcaccaacaaggccguggugagccugagcggcugcggcgugagcgugcugaccuucaaggugcuggaccugaagaacuacaucgacaagcagcugcugcccauccugaacaagcagagcugcagcauccccaacaucgagaccgugaucgaguuccagcagaagaacaacagacugcuggagaucaccagagaguucagcgugaacgccggcgugaccacccccgugagcaccuacaugcugaccaacagcgagcugcugagccugaucaacgacaugcccaucaccaacgaccagaagaagcugaugagcaacaacgugcagaucgugagacagcagagcuacagcaucaugugcaucaucaaggaggaggugcuggccuacguggugcagcugccccuguacggcgugaucgacacccccugcuggaagcugcacaccagcccccugugcaccaccaacaccaaggagggcagcaacaucugccugaccagaaccgacagaggcugguacugcgacaacgccggcagcgugagcuucuucccccaggccgagaccugcaaggugcagagcaacagaguguucugcgacaccaugaacagccugacccugcccagcgaggugaaccugugcaacaucgacaucuucaaccccaaguacgacugcaagaucaugaccagcaagaccgacgugagcagcagcgugaucaccagccugggcgccaucgugagcugcuacggcaagaccaagugcaccgccagcaacaagugcagaggcaucaucaagaccuucagcaacggcugcgacuacgugagcaacaagggcguggacaccgugagcgugggcaacacccuguacuacgugaacaagcaggagggccagagccuguacgugaagggcgagcccaucaucaacuucuacgacccccugguguuccccagcgacgaguucgacgccagcaucagccaggugaacgagaagaucaaccagagccuggccuucaucagaaagagcgacgagcugcugcacaacgugaacgugggcaagagcaccaccaacaucaugaucaccaccaucaucaucgugaucaucgugauccugcugcugcugaucgccgugggccuguuccuguacugcaaggccagaagcacccccgugacccugagcaaggaccagcugagcggcaucaacaacaucgccuucagcaacugaggacuaguaauaaggaaacuguaugaaugucugugggcaggaagugaagagauccuucuguaaagguuuuuggaauuaugucugcugaauaauaaacuuuuuugaaauaauaaaucugguagaaaaaugagaucuaaaaaaaaaaaaaaaaaaaaaaaaaaaaaaaaaaaaaaaaaaaaaaaaaaaaaaaaaaaaaaaaugcaucccccccccccccccccccccccccccccccaaaggcucuuuucagagccaccagaauu

SEQ ID NO: 19432 - RNA, 2048 nt, Artificial Sequence
  mRNA product Design h-4 comprising derived and/or modified sequence from HRSV(Memphis-37)__AIY60640.1__F_DSCav1_mut8 (opt5)
gggagagggcgcuuggcuugcaaggacccugagcugcggcauugaagcacacccaacccaacucgacugaagucagccucacugaaccggaucugagaaucuucucucucugggcuugccagggcucuccgaaccuagcuagcauccucuucaauuccaacuagaaagcuuaccauggagcugcccauccucaagaccaacgccauuacaacgauccuggcugccgugacccuuugcuucgcgagcucccagaauauuacagaagaguuuuaccaaucuaccuguagcgcugucuccaaaggcuaucugggggcccucagaacaggaugguacaccucuguuaucacaauugaacugagcaacaucaaggagaucaaaugcaauggcaccgacgccaaggugaaacuuauuaagcaggaacuggauaaguauaaaaacgcugugacggaccuccagcugcugaugcaguccaccccugccgcugggucuggaagcgccaucgcguccggcauugccgucuguaaggugcuccaccuggagggggagguuaauaaaaucaagaacgcccuucugagcacaaauaaagcuguggucucucucuccggaugcggcgugagcguucugaccuucaaggugcuugaucugaagaacuacauugacaaacaacuccugccgauccugaauaagcagucuuguuccauucccaacaucgaaacagucaucgaguuucagcagaaaaauaaccggcuccuggaaauuacccgcgaguucagcgugaaugcuggcgugacgacaccugucucuaccuauaugcuuacaaacuccgagcugcucagccugaucaaugauaugcccauuaccaacgaccaaaagaaacuuauguccaacaauguucagaucgugagacagcagucuuacagcauuaugugcaucaucaaggaagaggugcuggccuaugucgugcaacucccucuguacgggguuauugauacccccuguuggaaacugcauacauccccucucugcacgaccaacacaaaggaaggaagcaauaucugucugacccggacagaccgcggcugguacugcgauaacgcggggucuguguccuuuuucccgcaggccgagaccuguaagguccagagcaauagaguguuuugcgacacgaugaacucucuuacacugcccagcgaaguuaaucucugcaacauugauaucuucaauccuaaauaugacuguaagauuaugaccuccaaaaccgaugugucuagcuccgucaucacaagccugggagcuaucgugucuugcuacggcaagaccaaauguacagccuccaacaagugccgggggauuaucaagacguuuagcaauggaugugacuaugucucuaacaaaggcguggacaccguuuccgugggcaauacacuuuacuaugucaacaagcaagaggggcagagccuguacgugaaaggagagcccauuaucaauuucuaugauccucucguuuuucccuccgacgaguucgaugcuucuauuagccaggugaacgaaaagaucaaccagucccuggccuuuauucgcaaaucugacgaacugcuccacaaugucaacgugggcaagagcaccacaaauaucaugaucaccacgauuaucauugugaucauuguuauccugcuucugcucaucgccgucgggcuguuccuguacugcaaggcuagauccaccccggugacacuuagcaaagaucaacucucuggaauuaacaauaucgcguucuccaacugaggacuaguaauaaggaaacuguaugaaugucugugggcaggaagugaagagauccuucuguaaagguuuuuggaauuaugucugcugaauaauaaacuuuuuugaaauaauaaaucugguagaaaaaugagaucuaaaaaaaaaaaaaaaaaaaaaaaaaaaaaaaaaaaaaaaaaaaaaaaaaaaaaaaaaaaaaaaaugcaucccccccccccccccccccccccccccccccaaaggcucuuuucagagccaccagaauu

SEQ ID NO: 19433 - RNA, 2048 nt, Artificial Sequence
  mRNA product Design h-4 comprising derived and/or modified sequence from HRSV(Memphis-37)__AIY60640.1__F_DSCav1_mut8 (opt6)
gggagagggcgcuuggcuugcaaggacccugagcugcggcauugaagcacacccaacccaacucgacugaagucagccucacugaaccggaucugagaaucuucucucucugggcuugccagggcucuccgaaccuagcuagcauccucuucaauuccaacuagaaagcuuaccauggaacuuccuauuuuaaaaacaaacgcaauuacaaccauauuagcagcaguaacacuaugcuuugcaucaucacaaaacaucaccgaagaauuuuaucaauccacaugcucagcaguaucaaaaggauaccuuggcgcacuccgaacaggcugguauacaucggucauaacuauagaacucuccaacauaaaagaaauaaaaugcaaugguacugacgcaaaaguaaaauuaauaaaacaagaacuagacaaauacaaaaacgcaguaaccgauuuacaacuacuuaugcaaucaacaccugcagcaggaagcggaucagcaauagcaaguggaauagcaguaugcaaaguacuucaccucgaaggagaaguaaauaaaauaaaaaacgccuuacuaucaacaaauaaagccgucguaucacuuuccgguugcggcguaucaguauuaaccuuuaaagucuuagacuuaaaaaacuacauagacaaacaauuauuaccaauacuaaacaaacaauccuguuccauacccaacauagaaaccguaauagaauuucaacaaaaaaacaacagacuauuagaaauaacacgcgaauuuucaguaaacgcaggcguaacaacaccaguaucaacauauauguuaaccaauucagaauuauuaucccuuauaaaugacaugccuauaacaaacgaccaaaaaaaauuaaugaguaacaacguucaaauaguaagacaacaaucauacagcauaaugugcauaauaaaagaagaaguacuagcauacguaguucaacuaccacucuauggcguuaucgacaccccaugcuggaaacuacauaccucaccacucuguaccacuaauacgaaagaaggaucuaacauaugccuaaccagaacagaucgagguugguauugcgacaaugcuggaucaguaucauucuucccacaagcagaaaccugcaaaguacaaagcaacagaguauuuugugacacuaugaacucacuaacgcuaccuucagaaguaaaccuaugcaacaucgacauauucaacccaaaauacgauugcaaaauaaugacaucaaaaacagacguuuccucaucaguaauaacaucauuaggagcaauaguauccugcuacgguaaaaccaaaugcacagcauccaauaaaugccgaggaaucauuaaaacauuuucaaauggcugcgacuauguaaguaauaaagguguagauacaguaucaguaggcaacacacuauauuacguaaacaaacaagaagggcaaucccuauaugucaaaggcgaaccaauuauaaacuucuacgacccccucguauucccaucagacgaauuugacgcaucaauaucccaaguaaacgaaaaaaucaaccaaucacucgcauucauacguaaauccgacgaauuacuacauaacguaaacguaggcaaaucaacaacaaauauaaugauaacaaccauaaucauaguaauaauaguuauacuccuacuacucauugcagucggccuauuucuauacuguaaagcacgcucuacaccaguaacacuaucuaaagaucaauuauccggaauaaacaacauugccuucuccaauuaaggacuaguaauaaggaaacuguaugaaugucugugggcaggaagugaagagauccuucuguaaagguuuuuggaauuaugucugcugaauaauaaacuuuuuugaaauaauaaaucugguagaaaaaugagaucuaaaaaaaaaaaaaaaaaaaaaaaaaaaaaaaaaaaaaaaaaaaaaaaaaaaaaaaaaaaaaaaaugcaucccccccccccccccccccccccccccccccaaaggcucuuuucagagccaccagaauu

SEQ ID NO: 19434 - RNA, 2048 nt, Artificial Sequence
  mRNA product Design h-4 comprising derived and/or modified sequence from HRSV(Memphis-37)__AIY60640.1__F_DSCav1_mut8 (opt11)
gggagagggcgcuuggcuugcaaggacccugagcugcggcauugaagcacacccaacccaacucgacugaagucagccucacugaaccggaucugagaaucuucucucucugggcuugccagggcucuccgaaccuagcuagcauccucuucaauuccaacuagaaagcuuaccauggaacuucccauccugaagaccaacgcuaucacaaccauccucgccgcagucacccuuugcuucgccucaucccaaaacaucaccgaagaauuuuaccagucaaccugcucggccgucuccaagggcuaccucggcgcccuccgcacuggcugguacacauccgucaucaccaucgaacucuccaacauaaaagaaauaaaaugcaacggaaccgacgccaaagucaaacucaucaaacaagaacuagauaaauauaaaaacgccgucaccgaccugcaacuccucaugcaauccaccccagccgccggcucuggcagcgccaucgcaagcggaaucgccgucugcaaaguccuccaccuagaaggcgaagucaacaaaauuaaaaacgcccuccucuccaccaacaaagcaguugucucccucucuggcugcggagucucuguacucaccuucaaaguacuagaccucaagaauuacauagacaaacaacuccugcccauccuuaacaaacaaaguuguaguauccccaacaucgaaacaguaaucgaauuucagcagaaaaacaaccgccuccucgaaaucacacgagaguucucggucaacgccggcgucaccacccccguaucaaccuacaugcuaacaaacuccgaacuacuuucccucaucaaugacaugcccauaaccaacgaccaaaagaaacuaauguccaauaacguccagauaguccgucaacaguccuacucaaucaugugcauaauuaaagaagaaguacucgccuacgucguccaacuaccccucuauggagucaucgacacccccugcuggaaacuccacacaucaccccuaugcacaaccaacaccaaagaaggcuccaacaucugccucacaagaaccgaccgcggcugguacugcgacaacgcuggcuccgucucguucuucccacaagccgaaaccugcaaaguccaaucaaaccgggucuucugcgacaccaugaacucccucacucucccaagcgaagucaaccuaugcaacaucgacaucuucaacccaaaauacgacuguaaaaucaugacuucgaaaacagacgucuccucaucaguaaucacauccuuaggcgccaucguguccugcuacgguaagaccaaaugcacagccuccaacaaaugccggggcaucaucaaaaccuucagcaacgguugugauuacgucuccaacaaaggaguagacaccgucuccguaggaaacacccucuacuacgucaacaagcaagaaggccaaucccucuacgucaaaggggaacccaucaucaacuucuacgacccacucgucuuccccuccgacgaguucgacgcaagcaucucccaagucaacgaaaagaucaaccaaucacuagccuucauccgcaaauccgacgaacuccuccacaacguuaacguaggcaaauccaccaccaacaucaugaucacaaccaucaucauagucauaauagucauccuacuacuccucaucgccguaggucuauuccuauacuguaaagcucgaucaacccccgucacacucuccaaagaucaacucucaggaaucaacaacaucgccuucuccaacuaaggacuaguaauaaggaaacuguaugaaugucugugggcaggaagugaagagauccuucuguaaagguuuuuggaauuaugucugcugaauaauaaacuuuuuugaaauaauaaaucugguagaaaaaugagaucuaaaaaaaaaaaaaaaaaaaaaaaaaaaaaaaaaaaaaaaaaaaaaaaaaaaaaaaaaaaaaaaaugcaucccccccccccccccccccccccccccccccaaaggcucuuuucagagccaccagaauu

SEQ ID NO: 19435 - RNA, 2064 nt, Artificial Sequence
  mRNA product Design h-5 comprising derived and/or modified sequence from HRSV(Memphis-37)__AIY60640.1__F_DSCav1_mut8 (opt1)
gggagagggcgcuuggcuugcaaggacccugagcugcggcauugaagcacacccaacccaacucgacugaagucagccucacugaaccggaucugagaaucuucucucucugggcuugccagggcucuccgaaccuagcuagcauccucuucaauuccaacuagaaagcuuaccauggagcugcccauccucaagaccaacgccaucaccacgauccuggccgcggugacccugugcuucgccagcucccagaacaucaccgaggaguucuaccagagcacgugcuccgccgucagcaagggcuaccucggcgcccugcgcaccgggugguacaccagcgugaucaccaucgagcuguccaacaucaaggagaucaagugcaacggcaccgacgccaaggugaagcucaucaagcaggagcuggacaaguacaagaacgcggucacggaccugcagcuccugaugcagagcaccccggccgccggcuccgggagcgcgaucgccuccggcaucgccgucugcaaggugcugcaccucgagggcgaggugaacaagaucaagaacgcccugcuguccaccaacaaggccgucgugagccucuccggcugcggggugagcguccugaccuucaaggugcuggaccucaagaacuacaucgacaagcagcugcugcccauccugaacaagcagagcugcuccauccccaacaucgagaccgucaucgaguuccagcagaagaacaaccgccuccuggagaucacgcgggaguucagcgugaacgcgggcgugaccacccccgucuccaccuacaugcugacgaacagcgagcuccugucccugaucaacgacaugccgaucaccaacgaccagaagaagcucaugagcaacaacgugcagaucgugcgccagcaguccuacagcaucaugugcaucaucaaggaggagguccuggccuacguggugcagcugccccucuacggggucaucgacacccccugcuggaagcugcacaccagcccccugugcacgaccaacaccaaggagggcuccaacaucugccucacccggacggaccgcgggugguacugcgacaacgccggcagcguguccuucuucccgcaggccgagaccugcaagguccagagcaaccggguguucugcgacaccaugaacucccugacccugcccagcgaggugaaccucugcaacaucgacaucuucaaccccaaguacgacugcaagaucaugacguccaagaccgacgucagcuccagcgugaucaccucccugggcgccaucgugagcugcuacgggaagaccaagugcacggcgagcaacaagugccgcggcaucaucaagaccuucuccaacgggugcgacuacgucagcaacaagggcguggacaccguguccgucggcaacacccuguacuacgugaacaagcaggagggccagagccucuacgugaagggggagcccaucaucaacuucuacgacccgcuggucuuccccuccgacgaguucgacgccagcaucucccaggugaacgagaagaucaaccagagccuggccuucauccggaaguccgacgagcuccugcacaacgugaacgucggcaagagcaccacgaacaucaugaucaccaccaucaucaucgugaucaucgugauccugcugcuccugaucgccgucgggcuguuccucuacugcaaggcccgcuccacccccgugacgcugagcaaggaccagcuguccgggaucaacaacaucgcguucagcaacugaggacuaguacuggcugcaucucccuuuccucuguccuccauccuucucccaggauggugaagggggaccugguacccagugauccccaccccaggauccuaaaucaugacuuaccugcuaauaaaaacucauuggaaaagugagaagaucuaaaaaaaaaaaaaaaaaaaaaaaaaaaaaaaaaaaaaaaaaaaaaaaaaaaaaaaaaaaaaaaaugcaucccccccccccccccccccccccccccccccaaaggcucuuuucagagccaccagaauu

SEQ ID NO: 19436 - RNA, 2064 nt, Artificial Sequence
  mRNA product Design h-5 comprising derived and/or modified sequence from HRSV(Memphis-37)__AIY60640.1__F_DSCav1_mut8 (opt1)
gggagagggcgcuuggcuugcaaggacccugagcugcggcauugaagcacacccaacccaacucgacugaagucagccucacugaaccggaucugagaaucuucucucucugggcuugccagggcucuccgaaccuagcuagcauccucuucaauuccaacuagaaagcuuaccauggagcugcccauccucaagaccaacgccaucaccacgauccuggccgcggugacccugugcuucgccagcucccagaacaucaccgaggaguucuaccagagcacgugcuccgccgucagcaagggcuaccucggggcccugcgcaccggcugguacaccuccgugaucaccaucgagcugagcaacaucaaggagaucaagugcaacgggaccgacgccaaggugaagcucaucaagcaggagcuggacaaguacaagaacgcggucacggaccugcagcuccugaugcaguccaccccggccgccggcagcggguccgccaucgcgagcggcaucgccgugugcaaggugcugcaccucgagggcgaggucaacaagaucaagaacgcccugcuguccaccaacaaggccguggugagccucuccgggugcggcgucagcgugcugaccuucaaggugcuggaccucaagaacuacaucgacaagcagcugcugcccauccucaacaagcaguccugcagcauccccaacaucgagacggucaucgaguuccagcagaagaacaaccggcugcuggagaucacccgcgaguucuccgugaacgccggggugaccacccccgucagcacguacaugcucaccaacuccgagcugcugagccucaucaacgacaugccgaucaccaacgaccagaagaagcugaugagcaacaacgugcagaucgugcggcagcaguccuacagcaucaugugcaucaucaaggaggagguccuggcguacguggugcagcucccccuguacggcgucaucgacacccccugcuggaagcugcacacgagcccccucugcaccaccaacaccaaggagggguccaacaucugccugacgcgcaccgaccggggcugguacugcgacaacgccggcuccgugagcuucuucccgcaggccgagaccugcaaggugcaguccaaccgcgucuucugcgacaccaugaacagccugacgcuccccuccgaggugaaccugugcaacaucgacaucuucaaccccaaguacgacugcaagaucaugaccagcaagaccgacgucuccagcuccgugaucaccagccugggggccaucguguccugcuacggcaagacgaagugcaccgccagcaacaagugccgggggaucaucaagaccuucuccaacggcugcgacuacgucagcaacaagggcguggacaccguguccgucgggaacacgcucuacuacgugaacaagcaggagggccagagccuguacgugaagggggagcccaucaucaacuucuacgacccgcuggucuuccccagcgacgaguucgacgcguccaucagccaggugaacgagaagaucaaccagucccucgccuucauccgcaagagcgacgagcugcugcacaacgugaacgucggcaaguccaccaccaacaucaugaucaccaccaucaucaucgugaucaucgugauccuccugcugcucaucgccgucgggcuguuccuguacugcaaggcccggagcacgcccgugacccuguccaaggaccagcucagcggcaucaacaacaucgccuucuccaacugaggacuaguacuggcugcaucucccuuuccucuguccuccauccuucucccaggauggugaagggggaccugguacccagugauccccaccccaggauccuaaaucaugacuuaccugcuaauaaaaacucauuggaaaagugagaagaucuaaaaaaaaaaaaaaaaaaaaaaaaaaaaaaaaaaaaaaaaaaaaaaaaaaaaaaaaaaaaaaaaugcaucccccccccccccccccccccccccccccccaaaggcucuuuucagagccaccagaauu

SEQ ID NO: 19437 - RNA, 2064 nt, Artificial Sequence
  mRNA product Design h-5 comprising derived and/or modified sequence from HRSV(Memphis-37)__AIY60640.1__F_DSCav1_mut8 (opt2)
gggagagggcgcuuggcuugcaaggacccugagcugcggcauugaagcacacccaacccaacucgacugaagucagccucacugaaccggaucugagaaucuucucucucugggcuugccagggcucuccgaaccuagcuagcauccucuucaauuccaacuagaaagcuuaccauggagcuccccauccucaagaccaacgccaucaccaccauccucgccgccgucacccucugcuucgccuccucccagaacaucaccgaggaguucuaccaguccaccugcuccgccgucuccaagggcuaccucggcgcccuccgcaccggcugguacaccuccgucaucaccaucgagcucuccaacaucaaggagaucaagugcaacggcaccgacgccaaggucaagcucaucaagcaggagcucgacaaguacaagaacgccgucaccgaccuccagcuccucaugcaguccacccccgccgccggcuccggcuccgccaucgccuccggcaucgccgucugcaagguccuccaccucgagggcgaggucaacaagaucaagaacgcccuccucuccaccaacaaggccgucgucucccucuccggcugcggcgucuccguccucaccuucaagguccucgaccucaagaacuacaucgacaagcagcuccuccccauccucaacaagcaguccugcuccauccccaacaucgagaccgucaucgaguuccagcagaagaacaaccgccuccucgagaucacccgcgaguucuccgucaacgccggcgucaccacccccgucuccaccuacaugcucaccaacuccgagcuccucucccucaucaacgacaugcccaucaccaacgaccagaagaagcucauguccaacaacguccagaucguccgccagcaguccuacuccaucaugugcaucaucaaggaggagguccucgccuacgucguccagcucccccucuacggcgucaucgacacccccugcuggaagcuccacaccuccccccucugcaccaccaacaccaaggagggcuccaacaucugccucacccgcaccgaccgcggcugguacugcgacaacgccggcuccgucuccuucuucccccaggccgagaccugcaagguccaguccaaccgcgucuucugcgacaccaugaacucccucacccuccccuccgaggucaaccucugcaacaucgacaucuucaaccccaaguacgacugcaagaucaugaccuccaagaccgacgucuccuccuccgucaucaccucccucggcgccaucgucuccugcuacggcaagaccaagugcaccgccuccaacaagugccgcggcaucaucaagaccuucuccaacggcugcgacuacgucuccaacaagggcgucgacaccgucuccgucggcaacacccucuacuacgucaacaagcaggagggccagucccucuacgucaagggcgagcccaucaucaacuucuacgacccccucgucuuccccuccgacgaguucgacgccuccaucucccaggucaacgagaagaucaaccagucccucgccuucauccgcaaguccgacgagcuccuccacaacgucaacgucggcaaguccaccaccaacaucaugaucaccaccaucaucaucgucaucaucgucauccuccuccuccucaucgccgucggccucuuccucuacugcaaggcccgcuccacccccgucacccucuccaaggaccagcucuccggcaucaacaacaucgccuucuccaacugaggacuaguacuggcugcaucucccuuuccucuguccuccauccuucucccaggauggugaagggggaccugguacccagugauccccaccccaggauccuaaaucaugacuuaccugcuaauaaaaacucauuggaaaagugagaagaucuaaaaaaaaaaaaaaaaaaaaaaaaaaaaaaaaaaaaaaaaaaaaaaaaaaaaaaaaaaaaaaaaugcaucccccccccccccccccccccccccccccccaaaggcucuuuucagagccaccagaauu

SEQ ID NO: 19438 - RNA, 2064 nt, Artificial Sequence
  mRNA product Design h-5 comprising derived and/or modified sequence from HRSV(Memphis-37)__AIY60640.1__F_DSCav1_mut8 (opt3)
gggagagggcgcuuggcuugcaaggacccugagcugcggcauugaagcacacccaacccaacucgacugaagucagccucacugaaccggaucugagaaucuucucucucugggcuugccagggcucuccgaaccuagcuagcauccucuucaauuccaacuagaaagcuuaccauggagcugcccauccucaagaccaacgccauuacaacuauacuugcugcagugacgcugugcuucgccagcucccagaauaucaccgaagaguuuuaccaaucuacauguucagcggucaguaaaggcuauuugggggcuuuaagaacuggaugguacaccagcguuauuacaaucgaacuguccaacauuaaggagaucaaaugcaaugguaccgacgccaaggugaaacuaauaaagcaggaacucgauaaguauaaaaacgcaguaacugaccugcagcuucugaugcagucuacuccugccgcuggcucggggucagcaaucgccagcggaauugcuguguguaaggucuugcaccucgagggcgaggugaauaaaaucaagaacgcccugcugaguaccaauaaagcgguugugucccucucugguugcggggucagcguguuaacguucaagguacuggaucuuaagaacuacauugacaaacaauugcugccaauccuaaauaagcaguccuguucaauaccgaacauugaaacuguuaucgaguuucagcagaaaaauaacaggcuccuggaaauuacccgggaguucagugugaaugcaggagucacaacucccgugagcaccuauaugcuuacaaacucugagcuguugucccucaucaaugauaugccuaucaccaacgaccaaaagaaacugaugucaaacaaugugcagauuguccgccagcagagcuacaguauaaugugcaucauuaaggaagagguuuuagccuaugugguacaacugccacucuacggcgugaucgauacgcccuguuggaaacuucauacuucuccucugugcacaaccaacacuaaggaaggcuccaauauauguuugacacgaaccgaccgugggugguacugcgauaacgcuggaagcgucucguuuuucccacaggccgagacguguaaggugcagucuaauagaguuuucugcgacaccaugaacucccuaacacugcccucagaagugaaucucugcaacauugauaucuucaauccuaaauaugacuguaagaucaugacaaguaaaaccgaugucagcuccucugugauuacaagccugggugcaaucguaucaugcuacggcaagacuaaauguaccgcuaguaacaagugcagggggauuauaaagacauuuuccaauggaugugacuauguuagcaacaaaggcguggacaccgucucuguggguaauacucuuuacuaugucaacaagcaagaggggcagucacuguacgugaaaggagagccaaucauuaauuucuaugauccguugguuuuucccagugacgaauuugaugccagcaucucccaggugaacgagaagaucaaccagucucucgcguuuauucggaaaucggacgaacuguuacacaauguaaacgucggcaagagcacgacaaauauaaugaucaccacuauuaucauugugaucauaguuauccugcuacuccugauugccgugggccuuuucuuguacugcaaggcacgcuccaccccugucacacugucaaaagaucaacucagugggaucaacaauauugcuuucucuaacugaggacuaguacuggcugcaucucccuuuccucuguccuccauccuucucccaggauggugaagggggaccugguacccagugauccccaccccaggauccuaaaucaugacuuaccugcuaauaaaaacucauuggaaaagugagaagaucuaaaaaaaaaaaaaaaaaaaaaaaaaaaaaaaaaaaaaaaaaaaaaaaaaaaaaaaaaaaaaaaaugcaucccccccccccccccccccccccccccccccaaaggcucuuuucagagccaccagaauu

SEQ ID NO: 19439 - RNA, 2064 nt, Artificial Sequence
  mRNA product Design h-5 comprising derived and/or modified sequence from HRSV(Memphis-37)__AIY60640.1__F_DSCav1_mut8 (opt4)
gggagagggcgcuuggcuugcaaggacccugagcugcggcauugaagcacacccaacccaacucgacugaagucagccucacugaaccggaucugagaaucuucucucucugggcuugccagggcucuccgaaccuagcuagcauccucuucaauuccaacuagaaagcuuaccauggagcugcccauccugaagaccaacgccaucaccaccauccuggccgccgugacccugugcuucgccagcagccagaacaucaccgaggaguucuaccagagcaccugcagcgccgugagcaagggcuaccugggcgcccugagaaccggcugguacaccagcgugaucaccaucgagcugagcaacaucaaggagaucaagugcaacggcaccgacgccaaggugaagcugaucaagcaggagcuggacaaguacaagaacgccgugaccgaccugcagcugcugaugcagagcacccccgccgccggcagcggcagcgccaucgccagcggcaucgccgugugcaaggugcugcaccuggagggcgaggugaacaagaucaagaacgcccugcugagcaccaacaaggccguggugagccugagcggcugcggcgugagcgugcugaccuucaaggugcuggaccugaagaacuacaucgacaagcagcugcugcccauccugaacaagcagagcugcagcauccccaacaucgagaccgugaucgaguuccagcagaagaacaacagacugcuggagaucaccagagaguucagcgugaacgccggcgugaccacccccgugagcaccuacaugcugaccaacagcgagcugcugagccugaucaacgacaugcccaucaccaacgaccagaagaagcugaugagcaacaacgugcagaucgugagacagcagagcuacagcaucaugugcaucaucaaggaggaggugcuggccuacguggugcagcugccccuguacggcgugaucgacacccccugcuggaagcugcacaccagcccccugugcaccaccaacaccaaggagggcagcaacaucugccugaccagaaccgacagaggcugguacugcgacaacgccggcagcgugagcuucuucccccaggccgagaccugcaaggugcagagcaacagaguguucugcgacaccaugaacagccugacccugcccagcgaggugaaccugugcaacaucgacaucuucaaccccaaguacgacugcaagaucaugaccagcaagaccgacgugagcagcagcgugaucaccagccugggcgccaucgugagcugcuacggcaagaccaagugcaccgccagcaacaagugcagaggcaucaucaagaccuucagcaacggcugcgacuacgugagcaacaagggcguggacaccgugagcgugggcaacacccuguacuacgugaacaagcaggagggccagagccuguacgugaagggcgagcccaucaucaacuucuacgacccccugguguuccccagcgacgaguucgacgccagcaucagccaggugaacgagaagaucaaccagagccuggccuucaucagaaagagcgacgagcugcugcacaacgugaacgugggcaagagcaccaccaacaucaugaucaccaccaucaucaucgugaucaucgugauccugcugcugcugaucgccgugggccuguuccuguacugcaaggccagaagcacccccgugacccugagcaaggaccagcugagcggcaucaacaacaucgccuucagcaacugaggacuaguacuggcugcaucucccuuuccucuguccuccauccuucucccaggauggugaagggggaccugguacccagugauccccaccccaggauccuaaaucaugacuuaccugcuaauaaaaacucauuggaaaagugagaagaucuaaaaaaaaaaaaaaaaaaaaaaaaaaaaaaaaaaaaaaaaaaaaaaaaaaaaaaaaaaaaaaaaugcaucccccccccccccccccccccccccccccccaaaggcucuuuucagagccaccagaauu

SEQ ID NO: 19440 - RNA, 2064 nt, Artificial Sequence
  mRNA product Design h-5 comprising derived and/or modified sequence from HRSV(Memphis-37)__AIY60640.1__F_DSCav1_mut8 (opt5)
gggagagggcgcuuggcuugcaaggacccugagcugcggcauugaagcacacccaacccaacucgacugaagucagccucacugaaccggaucugagaaucuucucucucugggcuugccagggcucuccgaaccuagcuagcauccucuucaauuccaacuagaaagcuuaccauggagcugcccauccucaagaccaacgccauuacaacgauccuggcugccgugacccuuugcuucgcgagcucccagaauauuacagaagaguuuuaccaaucuaccuguagcgcugucuccaaaggcuaucugggggcccucagaacaggaugguacaccucuguuaucacaauugaacugagcaacaucaaggagaucaaaugcaauggcaccgacgccaaggugaaacuuauuaagcaggaacuggauaaguauaaaaacgcugugacggaccuccagcugcugaugcaguccaccccugccgcugggucuggaagcgccaucgcguccggcauugccgucuguaaggugcuccaccuggagggggagguuaauaaaaucaagaacgcccuucugagcacaaauaaagcuguggucucucucuccggaugcggcgugagcguucugaccuucaaggugcuugaucugaagaacuacauugacaaacaacuccugccgauccugaauaagcagucuuguuccauucccaacaucgaaacagucaucgaguuucagcagaaaaauaaccggcuccuggaaauuacccgcgaguucagcgugaaugcuggcgugacgacaccugucucuaccuauaugcuuacaaacuccgagcugcucagccugaucaaugauaugcccauuaccaacgaccaaaagaaacuuauguccaacaauguucagaucgugagacagcagucuuacagcauuaugugcaucaucaaggaagaggugcuggccuaugucgugcaacucccucuguacgggguuauugauacccccuguuggaaacugcauacauccccucucugcacgaccaacacaaaggaaggaagcaauaucugucugacccggacagaccgcggcugguacugcgauaacgcggggucuguguccuuuuucccgcaggccgagaccuguaagguccagagcaauagaguguuuugcgacacgaugaacucucuuacacugcccagcgaaguuaaucucugcaacauugauaucuucaauccuaaauaugacuguaagauuaugaccuccaaaaccgaugugucuagcuccgucaucacaagccugggagcuaucgugucuugcuacggcaagaccaaauguacagccuccaacaagugccgggggauuaucaagacguuuagcaauggaugugacuaugucucuaacaaaggcguggacaccguuuccgugggcaauacacuuuacuaugucaacaagcaagaggggcagagccuguacgugaaaggagagcccauuaucaauuucuaugauccucucguuuuucccuccgacgaguucgaugcuucuauuagccaggugaacgaaaagaucaaccagucccuggccuuuauucgcaaaucugacgaacugcuccacaaugucaacgugggcaagagcaccacaaauaucaugaucaccacgauuaucauugugaucauuguuauccugcuucugcucaucgccgucgggcuguuccuguacugcaaggcuagauccaccccggugacacuuagcaaagaucaacucucuggaauuaacaauaucgcguucuccaacugaggacuaguacuggcugcaucucccuuuccucuguccuccauccuucucccaggauggugaagggggaccugguacccagugauccccaccccaggauccuaaaucaugacuuaccugcuaauaaaaacucauuggaaaagugagaagaucuaaaaaaaaaaaaaaaaaaaaaaaaaaaaaaaaaaaaaaaaaaaaaaaaaaaaaaaaaaaaaaaaugcaucccccccccccccccccccccccccccccccaaaggcucuuuucagagccaccagaauu

SEQ ID NO: 19441 - RNA, 2064 nt, Artificial Sequence
  mRNA product Design h-5 comprising derived and/or modified sequence from HRSV(Memphis-37)__AIY60640.1__F_DSCav1_mut8 (opt6)
gggagagggcgcuuggcuugcaaggacccugagcugcggcauugaagcacacccaacccaacucgacugaagucagccucacugaaccggaucugagaaucuucucucucugggcuugccagggcucuccgaaccuagcuagcauccucuucaauuccaacuagaaagcuuaccauggaacuuccuauuuuaaaaacaaacgcaauuacaaccauauuagcagcaguaacacuaugcuuugcaucaucacaaaacaucaccgaagaauuuuaucaauccacaugcucagcaguaucaaaaggauaccuuggcgcacuccgaacaggcugguauacaucggucauaacuauagaacucuccaacauaaaagaaauaaaaugcaaugguacugacgcaaaaguaaaauuaauaaaacaagaacuagacaaauacaaaaacgcaguaaccgauuuacaacuacuuaugcaaucaacaccugcagcaggaagcggaucagcaauagcaaguggaauagcaguaugcaaaguacuucaccucgaaggagaaguaaauaaaauaaaaaacgccuuacuaucaacaaauaaagccgucguaucacuuuccgguugcggcguaucaguauuaaccuuuaaagucuuagacuuaaaaaacuacauagacaaacaauuauuaccaauacuaaacaaacaauccuguuccauacccaacauagaaaccguaauagaauuucaacaaaaaaacaacagacuauuagaaauaacacgcgaauuuucaguaaacgcaggcguaacaacaccaguaucaacauauauguuaaccaauucagaauuauuaucccuuauaaaugacaugccuauaacaaacgaccaaaaaaaauuaaugaguaacaacguucaaauaguaagacaacaaucauacagcauaaugugcauaauaaaagaagaaguacuagcauacguaguucaacuaccacucuauggcguuaucgacaccccaugcuggaaacuacauaccucaccacucuguaccacuaauacgaaagaaggaucuaacauaugccuaaccagaacagaucgagguugguauugcgacaaugcuggaucaguaucauucuucccacaagcagaaaccugcaaaguacaaagcaacagaguauuuugugacacuaugaacucacuaacgcuaccuucagaaguaaaccuaugcaacaucgacauauucaacccaaaauacgauugcaaaauaaugacaucaaaaacagacguuuccucaucaguaauaacaucauuaggagcaauaguauccugcuacgguaaaaccaaaugcacagcauccaauaaaugccgaggaaucauuaaaacauuuucaaauggcugcgacuauguaaguaauaaagguguagauacaguaucaguaggcaacacacuauauuacguaaacaaacaagaagggcaaucccuauaugucaaaggcgaaccaauuauaaacuucuacgacccccucguauucccaucagacgaauuugacgcaucaauaucccaaguaaacgaaaaaaucaaccaaucacucgcauucauacguaaauccgacgaauuacuacauaacguaaacguaggcaaaucaacaacaaauauaaugauaacaaccauaaucauaguaauaauaguuauacuccuacuacucauugcagucggccuauuucuauacuguaaagcacgcucuacaccaguaacacuaucuaaagaucaauuauccggaauaaacaacauugccuucuccaauuaaggacuaguacuggcugcaucucccuuuccucuguccuccauccuucucccaggauggugaagggggaccugguacccagugauccccaccccaggauccuaaaucaugacuuaccugcuaauaaaaacucauuggaaaagugagaagaucuaaaaaaaaaaaaaaaaaaaaaaaaaaaaaaaaaaaaaaaaaaaaaaaaaaaaaaaaaaaaaaaaugcaucccccccccccccccccccccccccccccccaaaggcucuuuucagagccaccagaauu

SEQ ID NO: 19442 - RNA, 2064 nt, Artificial Sequence
  mRNA product Design h-5 comprising derived and/or modified sequence from HRSV(Memphis-37)__AIY60640.1__F_DSCav1_mut8 (opt11)
gggagagggcgcuuggcuugcaaggacccugagcugcggcauugaagcacacccaacccaacucgacugaagucagccucacugaaccggaucugagaaucuucucucucugggcuugccagggcucuccgaaccuagcuagcauccucuucaauuccaacuagaaagcuuaccauggaacuucccauccugaagaccaacgcuaucacaaccauccucgccgcagucacccuuugcuucgccucaucccaaaacaucaccgaagaauuuuaccagucaaccugcucggccgucuccaagggcuaccucggcgcccuccgcacuggcugguacacauccgucaucaccaucgaacucuccaacauaaaagaaauaaaaugcaacggaaccgacgccaaagucaaacucaucaaacaagaacuagauaaauauaaaaacgccgucaccgaccugcaacuccucaugcaauccaccccagccgccggcucuggcagcgccaucgcaagcggaaucgccgucugcaaaguccuccaccuagaaggcgaagucaacaaaauuaaaaacgcccuccucuccaccaacaaagcaguugucucccucucuggcugcggagucucuguacucaccuucaaaguacuagaccucaagaauuacauagacaaacaacuccugcccauccuuaacaaacaaaguuguaguauccccaacaucgaaacaguaaucgaauuucagcagaaaaacaaccgccuccucgaaaucacacgagaguucucggucaacgccggcgucaccacccccguaucaaccuacaugcuaacaaacuccgaacuacuuucccucaucaaugacaugcccauaaccaacgaccaaaagaaacuaauguccaauaacguccagauaguccgucaacaguccuacucaaucaugugcauaauuaaagaagaaguacucgccuacgucguccaacuaccccucuauggagucaucgacacccccugcuggaaacuccacacaucaccccuaugcacaaccaacaccaaagaaggcuccaacaucugccucacaagaaccgaccgcggcugguacugcgacaacgcuggcuccgucucguucuucccacaagccgaaaccugcaaaguccaaucaaaccgggucuucugcgacaccaugaacucccucacucucccaagcgaagucaaccuaugcaacaucgacaucuucaacccaaaauacgacuguaaaaucaugacuucgaaaacagacgucuccucaucaguaaucacauccuuaggcgccaucguguccugcuacgguaagaccaaaugcacagccuccaacaaaugccggggcaucaucaaaaccuucagcaacgguugugauuacgucuccaacaaaggaguagacaccgucuccguaggaaacacccucuacuacgucaacaagcaagaaggccaaucccucuacgucaaaggggaacccaucaucaacuucuacgacccacucgucuuccccuccgacgaguucgacgcaagcaucucccaagucaacgaaaagaucaaccaaucacuagccuucauccgcaaauccgacgaacuccuccacaacguuaacguaggcaaauccaccaccaacaucaugaucacaaccaucaucauagucauaauagucauccuacuacuccucaucgccguaggucuauuccuauacuguaaagcucgaucaacccccgucacacucuccaaagaucaacucucaggaaucaacaacaucgccuucuccaacuaaggacuaguacuggcugcaucucccuuuccucuguccuccauccuucucccaggauggugaagggggaccugguacccagugauccccaccccaggauccuaaaucaugacuuaccugcuaauaaaaacucauuggaaaagugagaagaucuaaaaaaaaaaaaaaaaaaaaaaaaaaaaaaaaaaaaaaaaaaaaaaaaaaaaaaaaaaaaaaaaugcaucccccccccccccccccccccccccccccccaaaggcucuuuucagagccaccagaauu

SEQ ID NO: 19443 - RNA, 1997 nt, Artificial Sequence
  mRNA product Design i-1 comprising derived and/or modified sequence from HRSV(Memphis-37)__AIY60640.1__F_DSCav1_mut8 (opt1)
gggagagggcgcuuggcuugcaaggacccugagcugcggcauugaagcacacccaacccaacucgacugaagucagccucacugaaccggaucugagaaucuucucucucugggcuugccagggcucuccgaaccuagcuagcauccucuucaauuccaacuagaaagcuuaccauggagcugcccauccucaagaccaacgccaucaccacgauccuggccgcggugacccugugcuucgccagcucccagaacaucaccgaggaguucuaccagagcacgugcuccgccgucagcaagggcuaccucggcgcccugcgcaccgggugguacaccagcgugaucaccaucgagcuguccaacaucaaggagaucaagugcaacggcaccgacgccaaggugaagcucaucaagcaggagcuggacaaguacaagaacgcggucacggaccugcagcuccugaugcagagcaccccggccgccggcuccgggagcgcgaucgccuccggcaucgccgucugcaaggugcugcaccucgagggcgaggugaacaagaucaagaacgcccugcuguccaccaacaaggccgucgugagccucuccggcugcggggugagcguccugaccuucaaggugcuggaccucaagaacuacaucgacaagcagcugcugcccauccugaacaagcagagcugcuccauccccaacaucgagaccgucaucgaguuccagcagaagaacaaccgccuccuggagaucacgcgggaguucagcgugaacgcgggcgugaccacccccgucuccaccuacaugcugacgaacagcgagcuccugucccugaucaacgacaugccgaucaccaacgaccagaagaagcucaugagcaacaacgugcagaucgugcgccagcaguccuacagcaucaugugcaucaucaaggaggagguccuggccuacguggugcagcugccccucuacggggucaucgacacccccugcuggaagcugcacaccagcccccugugcacgaccaacaccaaggagggcuccaacaucugccucacccggacggaccgcgggugguacugcgacaacgccggcagcguguccuucuucccgcaggccgagaccugcaagguccagagcaaccggguguucugcgacaccaugaacucccugacccugcccagcgaggugaaccucugcaacaucgacaucuucaaccccaaguacgacugcaagaucaugacguccaagaccgacgucagcuccagcgugaucaccucccugggcgccaucgugagcugcuacgggaagaccaagugcacggcgagcaacaagugccgcggcaucaucaagaccuucuccaacgggugcgacuacgucagcaacaagggcguggacaccguguccgucggcaacacccuguacuacgugaacaagcaggagggccagagccucuacgugaagggggagcccaucaucaacuucuacgacccgcuggucuuccccuccgacgaguucgacgccagcaucucccaggugaacgagaagaucaaccagagccuggccuucauccggaaguccgacgagcuccugcacaacgugaacgucggcaagagcaccacgaacaucaugaucaccaccaucaucaucgugaucaucgugauccugcugcuccugaucgccgucgggcuguuccucuacugcaaggcccgcuccacccccgugacgcugagcaaggaccagcuguccgggaucaacaacaucgcguucagcaacugaggacuaguguccaccugucccuccugggcugcuggauugucucguuuuccugccaaauaaacaggaucagcgcuuuacagaucuaaaaaaaaaaaaaaaaaaaaaaaaaaaaaaaaaaaaaaaaaaaaaaaaaaaaaaaaaaaaaaaaugcaucccccccccccccccccccccccccccccccaaaggcucuuuucagagccaccagaauu

SEQ ID NO: 19444 - RNA, 1997 nt, Artificial Sequence
  mRNA product Design i-1 comprising derived and/or modified sequence from HRSV(Memphis-37)__AIY60640.1__F_DSCav1_mut8 (opt1)
gggagagggcgcuuggcuugcaaggacccugagcugcggcauugaagcacacccaacccaacucgacugaagucagccucacugaaccggaucugagaaucuucucucucugggcuugccagggcucuccgaaccuagcuagcauccucuucaauuccaacuagaaagcuuaccauggagcugcccauccucaagaccaacgccaucaccacgauccuggccgcggugacccugugcuucgccagcucccagaacaucaccgaggaguucuaccagagcacgugcuccgccgucagcaagggcuaccucggggcccugcgcaccggcugguacaccuccgugaucaccaucgagcugagcaacaucaaggagaucaagugcaacgggaccgacgccaaggugaagcucaucaagcaggagcuggacaaguacaagaacgcggucacggaccugcagcuccugaugcaguccaccccggccgccggcagcggguccgccaucgcgagcggcaucgccgugugcaaggugcugcaccucgagggcgaggucaacaagaucaagaacgcccugcuguccaccaacaaggccguggugagccucuccgggugcggcgucagcgugcugaccuucaaggugcuggaccucaagaacuacaucgacaagcagcugcugcccauccucaacaagcaguccugcagcauccccaacaucgagacggucaucgaguuccagcagaagaacaaccggcugcuggagaucacccgcgaguucuccgugaacgccggggugaccacccccgucagcacguacaugcucaccaacuccgagcugcugagccucaucaacgacaugccgaucaccaacgaccagaagaagcugaugagcaacaacgugcagaucgugcggcagcaguccuacagcaucaugugcaucaucaaggaggagguccuggcguacguggugcagcucccccuguacggcgucaucgacacccccugcuggaagcugcacacgagcccccucugcaccaccaacaccaaggagggguccaacaucugccugacgcgcaccgaccggggcugguacugcgacaacgccggcuccgugagcuucuucccgcaggccgagaccugcaaggugcaguccaaccgcgucuucugcgacaccaugaacagccugacgcuccccuccgaggugaaccugugcaacaucgacaucuucaaccccaaguacgacugcaagaucaugaccagcaagaccgacgucuccagcuccgugaucaccagccugggggccaucguguccugcuacggcaagacgaagugcaccgccagcaacaagugccgggggaucaucaagaccuucuccaacggcugcgacuacgucagcaacaagggcguggacaccguguccgucgggaacacgcucuacuacgugaacaagcaggagggccagagccuguacgugaagggggagcccaucaucaacuucuacgacccgcuggucuuccccagcgacgaguucgacgcguccaucagccaggugaacgagaagaucaaccagucccucgccuucauccgcaagagcgacgagcugcugcacaacgugaacgucggcaaguccaccaccaacaucaugaucaccaccaucaucaucgugaucaucgugauccuccugcugcucaucgccgucgggcuguuccuguacugcaaggcccggagcacgcccgugacccuguccaaggaccagcucagcggcaucaacaacaucgccuucuccaacugaggacuaguguccaccugucccuccugggcugcuggauugucucguuuuccugccaaauaaacaggaucagcgcuuuacagaucuaaaaaaaaaaaaaaaaaaaaaaaaaaaaaaaaaaaaaaaaaaaaaaaaaaaaaaaaaaaaaaaaugcaucccccccccccccccccccccccccccccccaaaggcucuuuucagagccaccagaauu

SEQ ID NO: 19445 - RNA, 1997 nt, Artificial Sequence
  mRNA product Design i-1 comprising derived and/or modified sequence from HRSV(Memphis-37)__AIY60640.1__F_DSCav1_mut8 (opt2)
gggagagggcgcuuggcuugcaaggacccugagcugcggcauugaagcacacccaacccaacucgacugaagucagccucacugaaccggaucugagaaucuucucucucugggcuugccagggcucuccgaaccuagcuagcauccucuucaauuccaacuagaaagcuuaccauggagcuccccauccucaagaccaacgccaucaccaccauccucgccgccgucacccucugcuucgccuccucccagaacaucaccgaggaguucuaccaguccaccugcuccgccgucuccaagggcuaccucggcgcccuccgcaccggcugguacaccuccgucaucaccaucgagcucuccaacaucaaggagaucaagugcaacggcaccgacgccaaggucaagcucaucaagcaggagcucgacaaguacaagaacgccgucaccgaccuccagcuccucaugcaguccacccccgccgccggcuccggcuccgccaucgccuccggcaucgccgucugcaagguccuccaccucgagggcgaggucaacaagaucaagaacgcccuccucuccaccaacaaggccgucgucucccucuccggcugcggcgucuccguccucaccuucaagguccucgaccucaagaacuacaucgacaagcagcuccuccccauccucaacaagcaguccugcuccauccccaacaucgagaccgucaucgaguuccagcagaagaacaaccgccuccucgagaucacccgcgaguucuccgucaacgccggcgucaccacccccgucuccaccuacaugcucaccaacuccgagcuccucucccucaucaacgacaugcccaucaccaacgaccagaagaagcucauguccaacaacguccagaucguccgccagcaguccuacuccaucaugugcaucaucaaggaggagguccucgccuacgucguccagcucccccucuacggcgucaucgacacccccugcuggaagcuccacaccuccccccucugcaccaccaacaccaaggagggcuccaacaucugccucacccgcaccgaccgcggcugguacugcgacaacgccggcuccgucuccuucuucccccaggccgagaccugcaagguccaguccaaccgcgucuucugcgacaccaugaacucccucacccuccccuccgaggucaaccucugcaacaucgacaucuucaaccccaaguacgacugcaagaucaugaccuccaagaccgacgucuccuccuccgucaucaccucccucggcgccaucgucuccugcuacggcaagaccaagugcaccgccuccaacaagugccgcggcaucaucaagaccuucuccaacggcugcgacuacgucuccaacaagggcgucgacaccgucuccgucggcaacacccucuacuacgucaacaagcaggagggccagucccucuacgucaagggcgagcccaucaucaacuucuacgacccccucgucuuccccuccgacgaguucgacgccuccaucucccaggucaacgagaagaucaaccagucccucgccuucauccgcaaguccgacgagcuccuccacaacgucaacgucggcaaguccaccaccaacaucaugaucaccaccaucaucaucgucaucaucgucauccuccuccuccucaucgccgucggccucuuccucuacugcaaggcccgcuccacccccgucacccucuccaaggaccagcucuccggcaucaacaacaucgccuucuccaacugaggacuaguguccaccugucccuccugggcugcuggauugucucguuuuccugccaaauaaacaggaucagcgcuuuacagaucuaaaaaaaaaaaaaaaaaaaaaaaaaaaaaaaaaaaaaaaaaaaaaaaaaaaaaaaaaaaaaaaaugcaucccccccccccccccccccccccccccccccaaaggcucuuuucagagccaccagaauu

SEQ ID NO: 19446 - RNA, 1997 nt, Artificial Sequence
  mRNA product Design i-1 comprising derived and/or modified sequence from HRSV(Memphis-37)__AIY60640.1__F_DSCav1_mut8 (opt3)
gggagagggcgcuuggcuugcaaggacccugagcugcggcauugaagcacacccaacccaacucgacugaagucagccucacugaaccggaucugagaaucuucucucucugggcuugccagggcucuccgaaccuagcuagcauccucuucaauuccaacuagaaagcuuaccauggagcugcccauccucaagaccaacgccauuacaacuauacuugcugcagugacgcugugcuucgccagcucccagaauaucaccgaagaguuuuaccaaucuacauguucagcggucaguaaaggcuauuugggggcuuuaagaacuggaugguacaccagcguuauuacaaucgaacuguccaacauuaaggagaucaaaugcaaugguaccgacgccaaggugaaacuaauaaagcaggaacucgauaaguauaaaaacgcaguaacugaccugcagcuucugaugcagucuacuccugccgcuggcucggggucagcaaucgccagcggaauugcuguguguaaggucuugcaccucgagggcgaggugaauaaaaucaagaacgcccugcugaguaccaauaaagcgguugugucccucucugguugcggggucagcguguuaacguucaagguacuggaucuuaagaacuacauugacaaacaauugcugccaauccuaaauaagcaguccuguucaauaccgaacauugaaacuguuaucgaguuucagcagaaaaauaacaggcuccuggaaauuacccgggaguucagugugaaugcaggagucacaacucccgugagcaccuauaugcuuacaaacucugagcuguugucccucaucaaugauaugccuaucaccaacgaccaaaagaaacugaugucaaacaaugugcagauuguccgccagcagagcuacaguauaaugugcaucauuaaggaagagguuuuagccuaugugguacaacugccacucuacggcgugaucgauacgcccuguuggaaacuucauacuucuccucugugcacaaccaacacuaaggaaggcuccaauauauguuugacacgaaccgaccgugggugguacugcgauaacgcuggaagcgucucguuuuucccacaggccgagacguguaaggugcagucuaauagaguuuucugcgacaccaugaacucccuaacacugcccucagaagugaaucucugcaacauugauaucuucaauccuaaauaugacuguaagaucaugacaaguaaaaccgaugucagcuccucugugauuacaagccugggugcaaucguaucaugcuacggcaagacuaaauguaccgcuaguaacaagugcagggggauuauaaagacauuuuccaauggaugugacuauguuagcaacaaaggcguggacaccgucucuguggguaauacucuuuacuaugucaacaagcaagaggggcagucacuguacgugaaaggagagccaaucauuaauuucuaugauccguugguuuuucccagugacgaauuugaugccagcaucucccaggugaacgagaagaucaaccagucucucgcguuuauucggaaaucggacgaacuguuacacaauguaaacgucggcaagagcacgacaaauauaaugaucaccacuauuaucauugugaucauaguuauccugcuacuccugauugccgugggccuuuucuuguacugcaaggcacgcuccaccccugucacacugucaaaagaucaacucagugggaucaacaauauugcuuucucuaacugaggacuaguguccaccugucccuccugggcugcuggauugucucguuuuccugccaaauaaacaggaucagcgcuuuacagaucuaaaaaaaaaaaaaaaaaaaaaaaaaaaaaaaaaaaaaaaaaaaaaaaaaaaaaaaaaaaaaaaaugcaucccccccccccccccccccccccccccccccaaaggcucuuuucagagccaccagaauu

SEQ ID NO: 19447 - RNA, 1997 nt, Artificial Sequence
  mRNA product Design i-1 comprising derived and/or modified sequence from HRSV(Memphis-37)__AIY60640.1__F_DSCav1_mut8 (opt4)
gggagagggcgcuuggcuugcaaggacccugagcugcggcauugaagcacacccaacccaacucgacugaagucagccucacugaaccggaucugagaaucuucucucucugggcuugccagggcucuccgaaccuagcuagcauccucuucaauuccaacuagaaagcuuaccauggagcugcccauccugaagaccaacgccaucaccaccauccuggccgccgugacccugugcuucgccagcagccagaacaucaccgaggaguucuaccagagcaccugcagcgccgugagcaagggcuaccugggcgcccugagaaccggcugguacaccagcgugaucaccaucgagcugagcaacaucaaggagaucaagugcaacggcaccgacgccaaggugaagcugaucaagcaggagcuggacaaguacaagaacgccgugaccgaccugcagcugcugaugcagagcacccccgccgccggcagcggcagcgccaucgccagcggcaucgccgugugcaaggugcugcaccuggagggcgaggugaacaagaucaagaacgcccugcugagcaccaacaaggccguggugagccugagcggcugcggcgugagcgugcugaccuucaaggugcuggaccugaagaacuacaucgacaagcagcugcugcccauccugaacaagcagagcugcagcauccccaacaucgagaccgugaucgaguuccagcagaagaacaacagacugcuggagaucaccagagaguucagcgugaacgccggcgugaccacccccgugagcaccuacaugcugaccaacagcgagcugcugagccugaucaacgacaugcccaucaccaacgaccagaagaagcugaugagcaacaacgugcagaucgugagacagcagagcuacagcaucaugugcaucaucaaggaggaggugcuggccuacguggugcagcugccccuguacggcgugaucgacacccccugcuggaagcugcacaccagcccccugugcaccaccaacaccaaggagggcagcaacaucugccugaccagaaccgacagaggcugguacugcgacaacgccggcagcgugagcuucuucccccaggccgagaccugcaaggugcagagcaacagaguguucugcgacaccaugaacagccugacccugcccagcgaggugaaccugugcaacaucgacaucuucaaccccaaguacgacugcaagaucaugaccagcaagaccgacgugagcagcagcgugaucaccagccugggcgccaucgugagcugcuacggcaagaccaagugcaccgccagcaacaagugcagaggcaucaucaagaccuucagcaacggcugcgacuacgugagcaacaagggcguggacaccgugagcgugggcaacacccuguacuacgugaacaagcaggagggccagagccuguacgugaagggcgagcccaucaucaacuucuacgacccccugguguuccccagcgacgaguucgacgccagcaucagccaggugaacgagaagaucaaccagagccuggccuucaucagaaagagcgacgagcugcugcacaacgugaacgugggcaagagcaccaccaacaucaugaucaccaccaucaucaucgugaucaucgugauccugcugcugcugaucgccgugggccuguuccuguacugcaaggccagaagcacccccgugacccugagcaaggaccagcugagcggcaucaacaacaucgccuucagcaacugaggacuaguguccaccugucccuccugggcugcuggauugucucguuuuccugccaaauaaacaggaucagcgcuuuacagaucuaaaaaaaaaaaaaaaaaaaaaaaaaaaaaaaaaaaaaaaaaaaaaaaaaaaaaaaaaaaaaaaaugcaucccccccccccccccccccccccccccccccaaaggcucuuuucagagccaccagaauu

SEQ ID NO: 19448 - RNA, 1997 nt, Artificial Sequence
  mRNA product Design i-1 comprising derived and/or modified sequence from HRSV(Memphis-37)__AIY60640.1__F_DSCav1_mut8 (opt5)
gggagagggcgcuuggcuugcaaggacccugagcugcggcauugaagcacacccaacccaacucgacugaagucagccucacugaaccggaucugagaaucuucucucucugggcuugccagggcucuccgaaccuagcuagcauccucuucaauuccaacuagaaagcuuaccauggagcugcccauccucaagaccaacgccauuacaacgauccuggcugccgugacccuuugcuucgcgagcucccagaauauuacagaagaguuuuaccaaucuaccuguagcgcugucuccaaaggcuaucugggggcccucagaacaggaugguacaccucuguuaucacaauugaacugagcaacaucaaggagaucaaaugcaauggcaccgacgccaaggugaaacuuauuaagcaggaacuggauaaguauaaaaacgcugugacggaccuccagcugcugaugcaguccaccccugccgcugggucuggaagcgccaucgcguccggcauugccgucuguaaggugcuccaccuggagggggagguuaauaaaaucaagaacgcccuucugagcacaaauaaagcuguggucucucucuccggaugcggcgugagcguucugaccuucaaggugcuugaucugaagaacuacauugacaaacaacuccugccgauccugaauaagcagucuuguuccauucccaacaucgaaacagucaucgaguuucagcagaaaaauaaccggcuccuggaaauuacccgcgaguucagcgugaaugcuggcgugacgacaccugucucuaccuauaugcuuacaaacuccgagcugcucagccugaucaaugauaugcccauuaccaacgaccaaaagaaacuuauguccaacaauguucagaucgugagacagcagucuuacagcauuaugugcaucaucaaggaagaggugcuggccuaugucgugcaacucccucuguacgggguuauugauacccccuguuggaaacugcauacauccccucucugcacgaccaacacaaaggaaggaagcaauaucugucugacccggacagaccgcggcugguacugcgauaacgcggggucuguguccuuuuucccgcaggccgagaccuguaagguccagagcaauagaguguuuugcgacacgaugaacucucuuacacugcccagcgaaguuaaucucugcaacauugauaucuucaauccuaaauaugacuguaagauuaugaccuccaaaaccgaugugucuagcuccgucaucacaagccugggagcuaucgugucuugcuacggcaagaccaaauguacagccuccaacaagugccgggggauuaucaagacguuuagcaauggaugugacuaugucucuaacaaaggcguggacaccguuuccgugggcaauacacuuuacuaugucaacaagcaagaggggcagagccuguacgugaaaggagagcccauuaucaauuucuaugauccucucguuuuucccuccgacgaguucgaugcuucuauuagccaggugaacgaaaagaucaaccagucccuggccuuuauucgcaaaucugacgaacugcuccacaaugucaacgugggcaagagcaccacaaauaucaugaucaccacgauuaucauugugaucauuguuauccugcuucugcucaucgccgucgggcuguuccuguacugcaaggcuagauccaccccggugacacuuagcaaagaucaacucucuggaauuaacaauaucgcguucuccaacugaggacuaguguccaccugucccuccugggcugcuggauugucucguuuuccugccaaauaaacaggaucagcgcuuuacagaucuaaaaaaaaaaaaaaaaaaaaaaaaaaaaaaaaaaaaaaaaaaaaaaaaaaaaaaaaaaaaaaaaugcaucccccccccccccccccccccccccccccccaaaggcucuuuucagagccaccagaauu

SEQ ID NO: 19449 - RNA, 1997 nt, Artificial Sequence
  mRNA product Design i-1 comprising derived and/or modified sequence from HRSV(Memphis-37)__AIY60640.1__F_DSCav1_mut8 (opt6)
gggagagggcgcuuggcuugcaaggacccugagcugcggcauugaagcacacccaacccaacucgacugaagucagccucacugaaccggaucugagaaucuucucucucugggcuugccagggcucuccgaaccuagcuagcauccucuucaauuccaacuagaaagcuuaccauggaacuuccuauuuuaaaaacaaacgcaauuacaaccauauuagcagcaguaacacuaugcuuugcaucaucacaaaacaucaccgaagaauuuuaucaauccacaugcucagcaguaucaaaaggauaccuuggcgcacuccgaacaggcugguauacaucggucauaacuauagaacucuccaacauaaaagaaauaaaaugcaaugguacugacgcaaaaguaaaauuaauaaaacaagaacuagacaaauacaaaaacgcaguaaccgauuuacaacuacuuaugcaaucaacaccugcagcaggaagcggaucagcaauagcaaguggaauagcaguaugcaaaguacuucaccucgaaggagaaguaaauaaaauaaaaaacgccuuacuaucaacaaauaaagccgucguaucacuuuccgguugcggcguaucaguauuaaccuuuaaagucuuagacuuaaaaaacuacauagacaaacaauuauuaccaauacuaaacaaacaauccuguuccauacccaacauagaaaccguaauagaauuucaacaaaaaaacaacagacuauuagaaauaacacgcgaauuuucaguaaacgcaggcguaacaacaccaguaucaacauauauguuaaccaauucagaauuauuaucccuuauaaaugacaugccuauaacaaacgaccaaaaaaaauuaaugaguaacaacguucaaauaguaagacaacaaucauacagcauaaugugcauaauaaaagaagaaguacuagcauacguaguucaacuaccacucuauggcguuaucgacaccccaugcuggaaacuacauaccucaccacucuguaccacuaauacgaaagaaggaucuaacauaugccuaaccagaacagaucgagguugguauugcgacaaugcuggaucaguaucauucuucccacaagcagaaaccugcaaaguacaaagcaacagaguauuuugugacacuaugaacucacuaacgcuaccuucagaaguaaaccuaugcaacaucgacauauucaacccaaaauacgauugcaaaauaaugacaucaaaaacagacguuuccucaucaguaauaacaucauuaggagcaauaguauccugcuacgguaaaaccaaaugcacagcauccaauaaaugccgaggaaucauuaaaacauuuucaaauggcugcgacuauguaaguaauaaagguguagauacaguaucaguaggcaacacacuauauuacguaaacaaacaagaagggcaaucccuauaugucaaaggcgaaccaauuauaaacuucuacgacccccucguauucccaucagacgaauuugacgcaucaauaucccaaguaaacgaaaaaaucaaccaaucacucgcauucauacguaaauccgacgaauuacuacauaacguaaacguaggcaaaucaacaacaaauauaaugauaacaaccauaaucauaguaauaauaguuauacuccuacuacucauugcagucggccuauuucuauacuguaaagcacgcucuacaccaguaacacuaucuaaagaucaauuauccggaauaaacaacauugccuucuccaauuaaggacuaguguccaccugucccuccugggcugcuggauugucucguuuuccugccaaauaaacaggaucagcgcuuuacagaucuaaaaaaaaaaaaaaaaaaaaaaaaaaaaaaaaaaaaaaaaaaaaaaaaaaaaaaaaaaaaaaaaugcaucccccccccccccccccccccccccccccccaaaggcucuuuucagagccaccagaauu

SEQ ID NO: 19450 - RNA, 1997 nt, Artificial Sequence
  mRNA product Design i-1 comprising derived and/or modified sequence from HRSV(Memphis-37)__AIY60640.1__F_DSCav1_mut8 (opt11)
gggagagggcgcuuggcuugcaaggacccugagcugcggcauugaagcacacccaacccaacucgacugaagucagccucacugaaccggaucugagaaucuucucucucugggcuugccagggcucuccgaaccuagcuagcauccucuucaauuccaacuagaaagcuuaccauggaacuucccauccugaagaccaacgcuaucacaaccauccucgccgcagucacccuuugcuucgccucaucccaaaacaucaccgaagaauuuuaccagucaaccugcucggccgucuccaagggcuaccucggcgcccuccgcacuggcugguacacauccgucaucaccaucgaacucuccaacauaaaagaaauaaaaugcaacggaaccgacgccaaagucaaacucaucaaacaagaacuagauaaauauaaaaacgccgucaccgaccugcaacuccucaugcaauccaccccagccgccggcucuggcagcgccaucgcaagcggaaucgccgucugcaaaguccuccaccuagaaggcgaagucaacaaaauuaaaaacgcccuccucuccaccaacaaagcaguugucucccucucuggcugcggagucucuguacucaccuucaaaguacuagaccucaagaauuacauagacaaacaacuccugcccauccuuaacaaacaaaguuguaguauccccaacaucgaaacaguaaucgaauuucagcagaaaaacaaccgccuccucgaaaucacacgagaguucucggucaacgccggcgucaccacccccguaucaaccuacaugcuaacaaacuccgaacuacuuucccucaucaaugacaugcccauaaccaacgaccaaaagaaacuaauguccaauaacguccagauaguccgucaacaguccuacucaaucaugugcauaauuaaagaagaaguacucgccuacgucguccaacuaccccucuauggagucaucgacacccccugcuggaaacuccacacaucaccccuaugcacaaccaacaccaaagaaggcuccaacaucugccucacaagaaccgaccgcggcugguacugcgacaacgcuggcuccgucucguucuucccacaagccgaaaccugcaaaguccaaucaaaccgggucuucugcgacaccaugaacucccucacucucccaagcgaagucaaccuaugcaacaucgacaucuucaacccaaaauacgacuguaaaaucaugacuucgaaaacagacgucuccucaucaguaaucacauccuuaggcgccaucguguccugcuacgguaagaccaaaugcacagccuccaacaaaugccggggcaucaucaaaaccuucagcaacgguugugauuacgucuccaacaaaggaguagacaccgucuccguaggaaacacccucuacuacgucaacaagcaagaaggccaaucccucuacgucaaaggggaacccaucaucaacuucuacgacccacucgucuuccccuccgacgaguucgacgcaagcaucucccaagucaacgaaaagaucaaccaaucacuagccuucauccgcaaauccgacgaacuccuccacaacguuaacguaggcaaauccaccaccaacaucaugaucacaaccaucaucauagucauaauagucauccuacuacuccucaucgccguaggucuauuccuauacuguaaagcucgaucaacccccgucacacucuccaaagaucaacucucaggaaucaacaacaucgccuucuccaacuaaggacuaguguccaccugucccuccugggcugcuggauugucucguuuuccugccaaauaaacaggaucagcgcuuuacagaucuaaaaaaaaaaaaaaaaaaaaaaaaaaaaaaaaaaaaaaaaaaaaaaaaaaaaaaaaaaaaaaaaugcaucccccccccccccccccccccccccccccccaaaggcucuuuucagagccaccagaauu

SEQ ID NO: 19451 - RNA, 1997 nt, Artificial Sequence
  mRNA product Design i-2 comprising derived and/or modified sequence from HRSV(Memphis-37)__AIY60640.1__F_DSCav1_mut8 (opt1)
gggagaggcgcugccuacggagguggcagccaucuccuucucggcaucaagcuuaccauggagcugcccauccucaagaccaacgccaucaccacgauccuggccgcggugacccugugcuucgccagcucccagaacaucaccgaggaguucuaccagagcacgugcuccgccgucagcaagggcuaccucggcgcccugcgcaccgggugguacaccagcgugaucaccaucgagcuguccaacaucaaggagaucaagugcaacggcaccgacgccaaggugaagcucaucaagcaggagcuggacaaguacaagaacgcggucacggaccugcagcuccugaugcagagcaccccggccgccggcuccgggagcgcgaucgccuccggcaucgccgucugcaaggugcugcaccucgagggcgaggugaacaagaucaagaacgcccugcuguccaccaacaaggccgucgugagccucuccggcugcggggugagcguccugaccuucaaggugcuggaccucaagaacuacaucgacaagcagcugcugcccauccugaacaagcagagcugcuccauccccaacaucgagaccgucaucgaguuccagcagaagaacaaccgccuccuggagaucacgcgggaguucagcgugaacgcgggcgugaccacccccgucuccaccuacaugcugacgaacagcgagcuccugucccugaucaacgacaugccgaucaccaacgaccagaagaagcucaugagcaacaacgugcagaucgugcgccagcaguccuacagcaucaugugcaucaucaaggaggagguccuggccuacguggugcagcugccccucuacggggucaucgacacccccugcuggaagcugcacaccagcccccugugcacgaccaacaccaaggagggcuccaacaucugccucacccggacggaccgcgggugguacugcgacaacgccggcagcguguccuucuucccgcaggccgagaccugcaagguccagagcaaccggguguucugcgacaccaugaacucccugacccugcccagcgaggugaaccucugcaacaucgacaucuucaaccccaaguacgacugcaagaucaugacguccaagaccgacgucagcuccagcgugaucaccucccugggcgccaucgugagcugcuacgggaagaccaagugcacggcgagcaacaagugccgcggcaucaucaagaccuucuccaacgggugcgacuacgucagcaacaagggcguggacaccguguccgucggcaacacccuguacuacgugaacaagcaggagggccagagccucuacgugaagggggagcccaucaucaacuucuacgacccgcuggucuuccccuccgacgaguucgacgccagcaucucccaggugaacgagaagaucaaccagagccuggccuucauccggaaguccgacgagcuccugcacaacgugaacgucggcaagagcaccacgaacaucaugaucaccaccaucaucaucgugaucaucgugauccugcugcuccugaucgccgucgggcuguuccucuacugcaaggcccgcuccacccccgugacgcugagcaaggaccagcuguccgggaucaacaacaucgcguucagcaacugaggacuagugcaucacauuuaaaagcaucucagccuaccaugagaauaagagaaagaaaaugaagaucaauagcuuauucaucucuuuuucuuuuucguugguguaaagccaacacccugucuaaaaaacauaaauuucuuuaaucauuuugccucuuuucucugugcuucaauuaauaaaaaauggaaagaaccuagaucuaaaaaaaaaaaaaaaaaaaaaaaaaaaaaaaaaaaaaaaaaaaaaaaaaaaaaaaaaaaaaaaaugcaucccccccccccccccccccccccccccccccaaaggcucuuuucagagccaccagaauu

SEQ ID NO: 19452 - RNA, 1997 nt, Artificial Sequence
  mRNA product Design i-2 comprising derived and/or modified sequence from HRSV(Memphis-37)__AIY60640.1__F_DSCav1_mut8 (opt1)
gggagaggcgcugccuacggagguggcagccaucuccuucucggcaucaagcuuaccauggagcugcccauccucaagaccaacgccaucaccacgauccuggccgcggugacccugugcuucgccagcucccagaacaucaccgaggaguucuaccagagcacgugcuccgccgucagcaagggcuaccucggggcccugcgcaccggcugguacaccuccgugaucaccaucgagcugagcaacaucaaggagaucaagugcaacgggaccgacgccaaggugaagcucaucaagcaggagcuggacaaguacaagaacgcggucacggaccugcagcuccugaugcaguccaccccggccgccggcagcggguccgccaucgcgagcggcaucgccgugugcaaggugcugcaccucgagggcgaggucaacaagaucaagaacgcccugcuguccaccaacaaggccguggugagccucuccgggugcggcgucagcgugcugaccuucaaggugcuggaccucaagaacuacaucgacaagcagcugcugcccauccucaacaagcaguccugcagcauccccaacaucgagacggucaucgaguuccagcagaagaacaaccggcugcuggagaucacccgcgaguucuccgugaacgccggggugaccacccccgucagcacguacaugcucaccaacuccgagcugcugagccucaucaacgacaugccgaucaccaacgaccagaagaagcugaugagcaacaacgugcagaucgugcggcagcaguccuacagcaucaugugcaucaucaaggaggagguccuggcguacguggugcagcucccccuguacggcgucaucgacacccccugcuggaagcugcacacgagcccccucugcaccaccaacaccaaggagggguccaacaucugccugacgcgcaccgaccggggcugguacugcgacaacgccggcuccgugagcuucuucccgcaggccgagaccugcaaggugcaguccaaccgcgucuucugcgacaccaugaacagccugacgcuccccuccgaggugaaccugugcaacaucgacaucuucaaccccaaguacgacugcaagaucaugaccagcaagaccgacgucuccagcuccgugaucaccagccugggggccaucguguccugcuacggcaagacgaagugcaccgccagcaacaagugccgggggaucaucaagaccuucuccaacggcugcgacuacgucagcaacaagggcguggacaccguguccgucgggaacacgcucuacuacgugaacaagcaggagggccagagccuguacgugaagggggagcccaucaucaacuucuacgacccgcuggucuuccccagcgacgaguucgacgcguccaucagccaggugaacgagaagaucaaccagucccucgccuucauccgcaagagcgacgagcugcugcacaacgugaacgucggcaaguccaccaccaacaucaugaucaccaccaucaucaucgugaucaucgugauccuccugcugcucaucgccgucgggcuguuccuguacugcaaggcccggagcacgcccgugacccuguccaaggaccagcucagcggcaucaacaacaucgccuucuccaacugaggacuagugcaucacauuuaaaagcaucucagccuaccaugagaauaagagaaagaaaaugaagaucaauagcuuauucaucucuuuuucuuuuucguugguguaaagccaacacccugucuaaaaaacauaaauuucuuuaaucauuuugccucuuuucucugugcuucaauuaauaaaaaauggaaagaaccuagaucuaaaaaaaaaaaaaaaaaaaaaaaaaaaaaaaaaaaaaaaaaaaaaaaaaaaaaaaaaaaaaaaaugcaucccccccccccccccccccccccccccccccaaaggcucuuuucagagccaccagaauu

SEQ ID NO: 19453 - RNA, 1997 nt, Artificial Sequence
  mRNA product Design i-2 comprising derived and/or modified sequence from HRSV(Memphis-37)__AIY60640.1__F_DSCav1_mut8 (opt2)
gggagaggcgcugccuacggagguggcagccaucuccuucucggcaucaagcuuaccauggagcuccccauccucaagaccaacgccaucaccaccauccucgccgccgucacccucugcuucgccuccucccagaacaucaccgaggaguucuaccaguccaccugcuccgccgucuccaagggcuaccucggcgcccuccgcaccggcugguacaccuccgucaucaccaucgagcucuccaacaucaaggagaucaagugcaacggcaccgacgccaaggucaagcucaucaagcaggagcucgacaaguacaagaacgccgucaccgaccuccagcuccucaugcaguccacccccgccgccggcuccggcuccgccaucgccuccggcaucgccgucugcaagguccuccaccucgagggcgaggucaacaagaucaagaacgcccuccucuccaccaacaaggccgucgucucccucuccggcugcggcgucuccguccucaccuucaagguccucgaccucaagaacuacaucgacaagcagcuccuccccauccucaacaagcaguccugcuccauccccaacaucgagaccgucaucgaguuccagcagaagaacaaccgccuccucgagaucacccgcgaguucuccgucaacgccggcgucaccacccccgucuccaccuacaugcucaccaacuccgagcuccucucccucaucaacgacaugcccaucaccaacgaccagaagaagcucauguccaacaacguccagaucguccgccagcaguccuacuccaucaugugcaucaucaaggaggagguccucgccuacgucguccagcucccccucuacggcgucaucgacacccccugcuggaagcuccacaccuccccccucugcaccaccaacaccaaggagggcuccaacaucugccucacccgcaccgaccgcggcugguacugcgacaacgccggcuccgucuccuucuucccccaggccgagaccugcaagguccaguccaaccgcgucuucugcgacaccaugaacucccucacccuccccuccgaggucaaccucugcaacaucgacaucuucaaccccaaguacgacugcaagaucaugaccuccaagaccgacgucuccuccuccgucaucaccucccucggcgccaucgucuccugcuacggcaagaccaagugcaccgccuccaacaagugccgcggcaucaucaagaccuucuccaacggcugcgacuacgucuccaacaagggcgucgacaccgucuccgucggcaacacccucuacuacgucaacaagcaggagggccagucccucuacgucaagggcgagcccaucaucaacuucuacgacccccucgucuuccccuccgacgaguucgacgccuccaucucccaggucaacgagaagaucaaccagucccucgccuucauccgcaaguccgacgagcuccuccacaacgucaacgucggcaaguccaccaccaacaucaugaucaccaccaucaucaucgucaucaucgucauccuccuccuccucaucgccgucggccucuuccucuacugcaaggcccgcuccacccccgucacccucuccaaggaccagcucuccggcaucaacaacaucgccuucuccaacugaggacuagugcaucacauuuaaaagcaucucagccuaccaugagaauaagagaaagaaaaugaagaucaauagcuuauucaucucuuuuucuuuuucguugguguaaagccaacacccugucuaaaaaacauaaauuucuuuaaucauuuugccucuuuucucugugcuucaauuaauaaaaaauggaaagaaccuagaucuaaaaaaaaaaaaaaaaaaaaaaaaaaaaaaaaaaaaaaaaaaaaaaaaaaaaaaaaaaaaaaaaugcaucccccccccccccccccccccccccccccccaaaggcucuuuucagagccaccagaauu

SEQ ID NO: 19454 - RNA, 1997 nt, Artificial Sequence
  mRNA product Design i-2 comprising derived and/or modified sequence from HRSV(Memphis-37)__AIY60640.1__F_DSCav1_mut8 (opt3)
gggagaggcgcugccuacggagguggcagccaucuccuucucggcaucaagcuuaccauggagcugcccauccucaagaccaacgccauuacaacuauacuugcugcagugacgcugugcuucgccagcucccagaauaucaccgaagaguuuuaccaaucuacauguucagcggucaguaaaggcuauuugggggcuuuaagaacuggaugguacaccagcguuauuacaaucgaacuguccaacauuaaggagaucaaaugcaaugguaccgacgccaaggugaaacuaauaaagcaggaacucgauaaguauaaaaacgcaguaacugaccugcagcuucugaugcagucuacuccugccgcuggcucggggucagcaaucgccagcggaauugcuguguguaaggucuugcaccucgagggcgaggugaauaaaaucaagaacgcccugcugaguaccaauaaagcgguugugucccucucugguugcggggucagcguguuaacguucaagguacuggaucuuaagaacuacauugacaaacaauugcugccaauccuaaauaagcaguccuguucaauaccgaacauugaaacuguuaucgaguuucagcagaaaaauaacaggcuccuggaaauuacccgggaguucagugugaaugcaggagucacaacucccgugagcaccuauaugcuuacaaacucugagcuguugucccucaucaaugauaugccuaucaccaacgaccaaaagaaacugaugucaaacaaugugcagauuguccgccagcagagcuacaguauaaugugcaucauuaaggaagagguuuuagccuaugugguacaacugccacucuacggcgugaucgauacgcccuguuggaaacuucauacuucuccucugugcacaaccaacacuaaggaaggcuccaauauauguuugacacgaaccgaccgugggugguacugcgauaacgcuggaagcgucucguuuuucccacaggccgagacguguaaggugcagucuaauagaguuuucugcgacaccaugaacucccuaacacugcccucagaagugaaucucugcaacauugauaucuucaauccuaaauaugacuguaagaucaugacaaguaaaaccgaugucagcuccucugugauuacaagccugggugcaaucguaucaugcuacggcaagacuaaauguaccgcuaguaacaagugcagggggauuauaaagacauuuuccaauggaugugacuauguuagcaacaaaggcguggacaccgucucuguggguaauacucuuuacuaugucaacaagcaagaggggcagucacuguacgugaaaggagagccaaucauuaauuucuaugauccguugguuuuucccagugacgaauuugaugccagcaucucccaggugaacgagaagaucaaccagucucucgcguuuauucggaaaucggacgaacuguuacacaauguaaacgucggcaagagcacgacaaauauaaugaucaccacuauuaucauugugaucauaguuauccugcuacuccugauugccgugggccuuuucuuguacugcaaggcacgcuccaccccugucacacugucaaaagaucaacucagugggaucaacaauauugcuuucucuaacugaggacuagugcaucacauuuaaaagcaucucagccuaccaugagaauaagagaaagaaaaugaagaucaauagcuuauucaucucuuuuucuuuuucguugguguaaagccaacacccugucuaaaaaacauaaauuucuuuaaucauuuugccucuuuucucugugcuucaauuaauaaaaaauggaaagaaccuagaucuaaaaaaaaaaaaaaaaaaaaaaaaaaaaaaaaaaaaaaaaaaaaaaaaaaaaaaaaaaaaaaaaugcaucccccccccccccccccccccccccccccccaaaggcucuuuucagagccaccagaauu

SEQ ID NO: 19455 - RNA, 1997 nt, Artificial Sequence
  mRNA product Design i-2 comprising derived and/or modified sequence from HRSV(Memphis-37)__AIY60640.1__F_DSCav1_mut8 (opt4)
gggagaggcgcugccuacggagguggcagccaucuccuucucggcaucaagcuuaccauggagcugcccauccugaagaccaacgccaucaccaccauccuggccgccgugacccugugcuucgccagcagccagaacaucaccgaggaguucuaccagagcaccugcagcgccgugagcaagggcuaccugggcgcccugagaaccggcugguacaccagcgugaucaccaucgagcugagcaacaucaaggagaucaagugcaacggcaccgacgccaaggugaagcugaucaagcaggagcuggacaaguacaagaacgccgugaccgaccugcagcugcugaugcagagcacccccgccgccggcagcggcagcgccaucgccagcggcaucgccgugugcaaggugcugcaccuggagggcgaggugaacaagaucaagaacgcccugcugagcaccaacaaggccguggugagccugagcggcugcggcgugagcgugcugaccuucaaggugcuggaccugaagaacuacaucgacaagcagcugcugcccauccugaacaagcagagcugcagcauccccaacaucgagaccgugaucgaguuccagcagaagaacaacagacugcuggagaucaccagagaguucagcgugaacgccggcgugaccacccccgugagcaccuacaugcugaccaacagcgagcugcugagccugaucaacgacaugcccaucaccaacgaccagaagaagcugaugagcaacaacgugcagaucgugagacagcagagcuacagcaucaugugcaucaucaaggaggaggugcuggccuacguggugcagcugccccuguacggcgugaucgacacccccugcuggaagcugcacaccagcccccugugcaccaccaacaccaaggagggcagcaacaucugccugaccagaaccgacagaggcugguacugcgacaacgccggcagcgugagcuucuucccccaggccgagaccugcaaggugcagagcaacagaguguucugcgacaccaugaacagccugacccugcccagcgaggugaaccugugcaacaucgacaucuucaaccccaaguacgacugcaagaucaugaccagcaagaccgacgugagcagcagcgugaucaccagccugggcgccaucgugagcugcuacggcaagaccaagugcaccgccagcaacaagugcagaggcaucaucaagaccuucagcaacggcugcgacuacgugagcaacaagggcguggacaccgugagcgugggcaacacccuguacuacgugaacaagcaggagggccagagccuguacgugaagggcgagcccaucaucaacuucuacgacccccugguguuccccagcgacgaguucgacgccagcaucagccaggugaacgagaagaucaaccagagccuggccuucaucagaaagagcgacgagcugcugcacaacgugaacgugggcaagagcaccaccaacaucaugaucaccaccaucaucaucgugaucaucgugauccugcugcugcugaucgccgugggccuguuccuguacugcaaggccagaagcacccccgugacccugagcaaggaccagcugagcggcaucaacaacaucgccuucagcaacugaggacuagugcaucacauuuaaaagcaucucagccuaccaugagaauaagagaaagaaaaugaagaucaauagcuuauucaucucuuuuucuuuuucguugguguaaagccaacacccugucuaaaaaacauaaauuucuuuaaucauuuugccucuuuucucugugcuucaauuaauaaaaaauggaaagaaccuagaucuaaaaaaaaaaaaaaaaaaaaaaaaaaaaaaaaaaaaaaaaaaaaaaaaaaaaaaaaaaaaaaaaugcaucccccccccccccccccccccccccccccccaaaggcucuuuucagagccaccagaauu

SEQ ID NO: 19456 - RNA, 1997 nt, Artificial Sequence
  mRNA product Design i-2 comprising derived and/or modified sequence from HRSV(Memphis-37)__AIY60640.1__F_DSCav1_mut8 (opt5)
gggagaggcgcugccuacggagguggcagccaucuccuucucggcaucaagcuuaccauggagcugcccauccucaagaccaacgccauuacaacgauccuggcugccgugacccuuugcuucgcgagcucccagaauauuacagaagaguuuuaccaaucuaccuguagcgcugucuccaaaggcuaucugggggcccucagaacaggaugguacaccucuguuaucacaauugaacugagcaacaucaaggagaucaaaugcaauggcaccgacgccaaggugaaacuuauuaagcaggaacuggauaaguauaaaaacgcugugacggaccuccagcugcugaugcaguccaccccugccgcugggucuggaagcgccaucgcguccggcauugccgucuguaaggugcuccaccuggagggggagguuaauaaaaucaagaacgcccuucugagcacaaauaaagcuguggucucucucuccggaugcggcgugagcguucugaccuucaaggugcuugaucugaagaacuacauugacaaacaacuccugccgauccugaauaagcagucuuguuccauucccaacaucgaaacagucaucgaguuucagcagaaaaauaaccggcuccuggaaauuacccgcgaguucagcgugaaugcuggcgugacgacaccugucucuaccuauaugcuuacaaacuccgagcugcucagccugaucaaugauaugcccauuaccaacgaccaaaagaaacuuauguccaacaauguucagaucgugagacagcagucuuacagcauuaugugcaucaucaaggaagaggugcuggccuaugucgugcaacucccucuguacgggguuauugauacccccuguuggaaacugcauacauccccucucugcacgaccaacacaaaggaaggaagcaauaucugucugacccggacagaccgcggcugguacugcgauaacgcggggucuguguccuuuuucccgcaggccgagaccuguaagguccagagcaauagaguguuuugcgacacgaugaacucucuuacacugcccagcgaaguuaaucucugcaacauugauaucuucaauccuaaauaugacuguaagauuaugaccuccaaaaccgaugugucuagcuccgucaucacaagccugggagcuaucgugucuugcuacggcaagaccaaauguacagccuccaacaagugccgggggauuaucaagacguuuagcaauggaugugacuaugucucuaacaaaggcguggacaccguuuccgugggcaauacacuuuacuaugucaacaagcaagaggggcagagccuguacgugaaaggagagcccauuaucaauuucuaugauccucucguuuuucccuccgacgaguucgaugcuucuauuagccaggugaacgaaaagaucaaccagucccuggccuuuauucgcaaaucugacgaacugcuccacaaugucaacgugggcaagagcaccacaaauaucaugaucaccacgauuaucauugugaucauuguuauccugcuucugcucaucgccgucgggcuguuccuguacugcaaggcuagauccaccccggugacacuuagcaaagaucaacucucuggaauuaacaauaucgcguucuccaacugaggacuagugcaucacauuuaaaagcaucucagccuaccaugagaauaagagaaagaaaaugaagaucaauagcuuauucaucucuuuuucuuuuucguugguguaaagccaacacccugucuaaaaaacauaaauuucuuuaaucauuuugccucuuuucucugugcuucaauuaauaaaaaauggaaagaaccuagaucuaaaaaaaaaaaaaaaaaaaaaaaaaaaaaaaaaaaaaaaaaaaaaaaaaaaaaaaaaaaaaaaaugcaucccccccccccccccccccccccccccccccaaaggcucuuuucagagccaccagaauu

SEQ ID NO: 19457 - RNA, 1997 nt, Artificial Sequence
  mRNA product Design i-2 comprising derived and/or modified sequence from HRSV(Memphis-37)__AIY60640.1__F_DSCav1_mut8 (opt6)
gggagaggcgcugccuacggagguggcagccaucuccuucucggcaucaagcuuaccauggaacuuccuauuuuaaaaacaaacgcaauuacaaccauauuagcagcaguaacacuaugcuuugcaucaucacaaaacaucaccgaagaauuuuaucaauccacaugcucagcaguaucaaaaggauaccuuggcgcacuccgaacaggcugguauacaucggucauaacuauagaacucuccaacauaaaagaaauaaaaugcaaugguacugacgcaaaaguaaaauuaauaaaacaagaacuagacaaauacaaaaacgcaguaaccgauuuacaacuacuuaugcaaucaacaccugcagcaggaagcggaucagcaauagcaaguggaauagcaguaugcaaaguacuucaccucgaaggagaaguaaauaaaauaaaaaacgccuuacuaucaacaaauaaagccgucguaucacuuuccgguugcggcguaucaguauuaaccuuuaaagucuuagacuuaaaaaacuacauagacaaacaauuauuaccaauacuaaacaaacaauccuguuccauacccaacauagaaaccguaauagaauuucaacaaaaaaacaacagacuauuagaaauaacacgcgaauuuucaguaaacgcaggcguaacaacaccaguaucaacauauauguuaaccaauucagaauuauuaucccuuauaaaugacaugccuauaacaaacgaccaaaaaaaauuaaugaguaacaacguucaaauaguaagacaacaaucauacagcauaaugugcauaauaaaagaagaaguacuagcauacguaguucaacuaccacucuauggcguuaucgacaccccaugcuggaaacuacauaccucaccacucuguaccacuaauacgaaagaaggaucuaacauaugccuaaccagaacagaucgagguugguauugcgacaaugcuggaucaguaucauucuucccacaagcagaaaccugcaaaguacaaagcaacagaguauuuugugacacuaugaacucacuaacgcuaccuucagaaguaaaccuaugcaacaucgacauauucaacccaaaauacgauugcaaaauaaugacaucaaaaacagacguuuccucaucaguaauaacaucauuaggagcaauaguauccugcuacgguaaaaccaaaugcacagcauccaauaaaugccgaggaaucauuaaaacauuuucaaauggcugcgacuauguaaguaauaaagguguagauacaguaucaguaggcaacacacuauauuacguaaacaaacaagaagggcaaucccuauaugucaaaggcgaaccaauuauaaacuucuacgacccccucguauucccaucagacgaauuugacgcaucaauaucccaaguaaacgaaaaaaucaaccaaucacucgcauucauacguaaauccgacgaauuacuacauaacguaaacguaggcaaaucaacaacaaauauaaugauaacaaccauaaucauaguaauaauaguuauacuccuacuacucauugcagucggccuauuucuauacuguaaagcacgcucuacaccaguaacacuaucuaaagaucaauuauccggaauaaacaacauugccuucuccaauuaaggacuagugcaucacauuuaaaagcaucucagccuaccaugagaauaagagaaagaaaaugaagaucaauagcuuauucaucucuuuuucuuuuucguugguguaaagccaacacccugucuaaaaaacauaaauuucuuuaaucauuuugccucuuuucucugugcuucaauuaauaaaaaauggaaagaaccuagaucuaaaaaaaaaaaaaaaaaaaaaaaaaaaaaaaaaaaaaaaaaaaaaaaaaaaaaaaaaaaaaaaaugcaucccccccccccccccccccccccccccccccaaaggcucuuuucagagccaccagaauu

SEQ ID NO: 19458 - RNA, 1997 nt, Artificial Sequence
  mRNA product Design i-2 comprising derived and/or modified sequence from HRSV(Memphis-37)__AIY60640.1__F_DSCav1_mut8 (opt11)
gggagaggcgcugccuacggagguggcagccaucuccuucucggcaucaagcuuaccauggaacuucccauccugaagaccaacgcuaucacaaccauccucgccgcagucacccuuugcuucgccucaucccaaaacaucaccgaagaauuuuaccagucaaccugcucggccgucuccaagggcuaccucggcgcccuccgcacuggcugguacacauccgucaucaccaucgaacucuccaacauaaaagaaauaaaaugcaacggaaccgacgccaaagucaaacucaucaaacaagaacuagauaaauauaaaaacgccgucaccgaccugcaacuccucaugcaauccaccccagccgccggcucuggcagcgccaucgcaagcggaaucgccgucugcaaaguccuccaccuagaaggcgaagucaacaaaauuaaaaacgcccuccucuccaccaacaaagcaguugucucccucucuggcugcggagucucuguacucaccuucaaaguacuagaccucaagaauuacauagacaaacaacuccugcccauccuuaacaaacaaaguuguaguauccccaacaucgaaacaguaaucgaauuucagcagaaaaacaaccgccuccucgaaaucacacgagaguucucggucaacgccggcgucaccacccccguaucaaccuacaugcuaacaaacuccgaacuacuuucccucaucaaugacaugcccauaaccaacgaccaaaagaaacuaauguccaauaacguccagauaguccgucaacaguccuacucaaucaugugcauaauuaaagaagaaguacucgccuacgucguccaacuaccccucuauggagucaucgacacccccugcuggaaacuccacacaucaccccuaugcacaaccaacaccaaagaaggcuccaacaucugccucacaagaaccgaccgcggcugguacugcgacaacgcuggcuccgucucguucuucccacaagccgaaaccugcaaaguccaaucaaaccgggucuucugcgacaccaugaacucccucacucucccaagcgaagucaaccuaugcaacaucgacaucuucaacccaaaauacgacuguaaaaucaugacuucgaaaacagacgucuccucaucaguaaucacauccuuaggcgccaucguguccugcuacgguaagaccaaaugcacagccuccaacaaaugccggggcaucaucaaaaccuucagcaacgguugugauuacgucuccaacaaaggaguagacaccgucuccguaggaaacacccucuacuacgucaacaagcaagaaggccaaucccucuacgucaaaggggaacccaucaucaacuucuacgacccacucgucuuccccuccgacgaguucgacgcaagcaucucccaagucaacgaaaagaucaaccaaucacuagccuucauccgcaaauccgacgaacuccuccacaacguuaacguaggcaaauccaccaccaacaucaugaucacaaccaucaucauagucauaauagucauccuacuacuccucaucgccguaggucuauuccuauacuguaaagcucgaucaacccccgucacacucuccaaagaucaacucucaggaaucaacaacaucgccuucuccaacuaaggacuagugcaucacauuuaaaagcaucucagccuaccaugagaauaagagaaagaaaaugaagaucaauagcuuauucaucucuuuuucuuuuucguugguguaaagccaacacccugucuaaaaaacauaaauuucuuuaaucauuuugccucuuuucucugugcuucaauuaauaaaaaauggaaagaaccuagaucuaaaaaaaaaaaaaaaaaaaaaaaaaaaaaaaaaaaaaaaaaaaaaaaaaaaaaaaaaaaaaaaaugcaucccccccccccccccccccccccccccccccaaaggcucuuuucagagccaccagaauu

SEQ ID NO: 19459 - RNA, 1993 nt, Artificial Sequence
  mRNA product Design i-2 comprising derived and/or modified sequence from HRSV(Memphis-37)__AIY60640.1__F_DSCav1_mut8 (opt1)
ggggcgcugccuacggagguggcagccaucuccuucucggcaucaagcuuaccauggagcugcccauccucaagaccaacgccaucaccacgauccuggccgcggugacccugugcuucgccagcucccagaacaucaccgaggaguucuaccagagcacgugcuccgccgucagcaagggcuaccucggcgcccugcgcaccgggugguacaccagcgugaucaccaucgagcuguccaacaucaaggagaucaagugcaacggcaccgacgccaaggugaagcucaucaagcaggagcuggacaaguacaagaacgcggucacggaccugcagcuccugaugcagagcaccccggccgccggcuccgggagcgcgaucgccuccggcaucgccgucugcaaggugcugcaccucgagggcgaggugaacaagaucaagaacgcccugcuguccaccaacaaggccgucgugagccucuccggcugcggggugagcguccugaccuucaaggugcuggaccucaagaacuacaucgacaagcagcugcugcccauccugaacaagcagagcugcuccauccccaacaucgagaccgucaucgaguuccagcagaagaacaaccgccuccuggagaucacgcgggaguucagcgugaacgcgggcgugaccacccccgucuccaccuacaugcugacgaacagcgagcuccugucccugaucaacgacaugccgaucaccaacgaccagaagaagcucaugagcaacaacgugcagaucgugcgccagcaguccuacagcaucaugugcaucaucaaggaggagguccuggccuacguggugcagcugccccucuacggggucaucgacacccccugcuggaagcugcacaccagcccccugugcacgaccaacaccaaggagggcuccaacaucugccucacccggacggaccgcgggugguacugcgacaacgccggcagcguguccuucuucccgcaggccgagaccugcaagguccagagcaaccggguguucugcgacaccaugaacucccugacccugcccagcgaggugaaccucugcaacaucgacaucuucaaccccaaguacgacugcaagaucaugacguccaagaccgacgucagcuccagcgugaucaccucccugggcgccaucgugagcugcuacgggaagaccaagugcacggcgagcaacaagugccgcggcaucaucaagaccuucuccaacgggugcgacuacgucagcaacaagggcguggacaccguguccgucggcaacacccuguacuacgugaacaagcaggagggccagagccucuacgugaagggggagcccaucaucaacuucuacgacccgcuggucuuccccuccgacgaguucgacgccagcaucucccaggugaacgagaagaucaaccagagccuggccuucauccggaaguccgacgagcuccugcacaacgugaacgucggcaagagcaccacgaacaucaugaucaccaccaucaucaucgugaucaucgugauccugcugcuccugaucgccgucgggcuguuccucuacugcaaggcccgcuccacccccgugacgcugagcaaggaccagcuguccgggaucaacaacaucgcguucagcaacugaggacuagugcaucacauuuaaaagcaucucagccuaccaugagaauaagagaaagaaaaugaagaucaauagcuuauucaucucuuuuucuuuuucguugguguaaagccaacacccugucuaaaaaacauaaauuucuuuaaucauuuugccucuuuucucugugcuucaauuaauaaaaaauggaaagaaccuagaucuaaaaaaaaaaaaaaaaaaaaaaaaaaaaaaaaaaaaaaaaaaaaaaaaaaaaaaaaaaaaaaaaugcaucccccccccccccccccccccccccccccccaaaggcucuuuucagagccaccagaauu

SEQ ID NO: 19460 - RNA, 1993 nt, Artificial Sequence
  mRNA product Design i-2 comprising derived and/or modified sequence from HRSV(Memphis-37)__AIY60640.1__F_DSCav1_mut8 (opt1)
ggggcgcugccuacggagguggcagccaucuccuucucggcaucaagcuuaccauggagcugcccauccucaagaccaacgccaucaccacgauccuggccgcggugacccugugcuucgccagcucccagaacaucaccgaggaguucuaccagagcacgugcuccgccgucagcaagggcuaccucggggcccugcgcaccggcugguacaccuccgugaucaccaucgagcugagcaacaucaaggagaucaagugcaacgggaccgacgccaaggugaagcucaucaagcaggagcuggacaaguacaagaacgcggucacggaccugcagcuccugaugcaguccaccccggccgccggcagcggguccgccaucgcgagcggcaucgccgugugcaaggugcugcaccucgagggcgaggucaacaagaucaagaacgcccugcuguccaccaacaaggccguggugagccucuccgggugcggcgucagcgugcugaccuucaaggugcuggaccucaagaacuacaucgacaagcagcugcugcccauccucaacaagcaguccugcagcauccccaacaucgagacggucaucgaguuccagcagaagaacaaccggcugcuggagaucacccgcgaguucuccgugaacgccggggugaccacccccgucagcacguacaugcucaccaacuccgagcugcugagccucaucaacgacaugccgaucaccaacgaccagaagaagcugaugagcaacaacgugcagaucgugcggcagcaguccuacagcaucaugugcaucaucaaggaggagguccuggcguacguggugcagcucccccuguacggcgucaucgacacccccugcuggaagcugcacacgagcccccucugcaccaccaacaccaaggagggguccaacaucugccugacgcgcaccgaccggggcugguacugcgacaacgccggcuccgugagcuucuucccgcaggccgagaccugcaaggugcaguccaaccgcgucuucugcgacaccaugaacagccugacgcuccccuccgaggugaaccugugcaacaucgacaucuucaaccccaaguacgacugcaagaucaugaccagcaagaccgacgucuccagcuccgugaucaccagccugggggccaucguguccugcuacggcaagacgaagugcaccgccagcaacaagugccgggggaucaucaagaccuucuccaacggcugcgacuacgucagcaacaagggcguggacaccguguccgucgggaacacgcucuacuacgugaacaagcaggagggccagagccuguacgugaagggggagcccaucaucaacuucuacgacccgcuggucuuccccagcgacgaguucgacgcguccaucagccaggugaacgagaagaucaaccagucccucgccuucauccgcaagagcgacgagcugcugcacaacgugaacgucggcaaguccaccaccaacaucaugaucaccaccaucaucaucgugaucaucgugauccuccugcugcucaucgccgucgggcuguuccuguacugcaaggcccggagcacgcccgugacccuguccaaggaccagcucagcggcaucaacaacaucgccuucuccaacugaggacuagugcaucacauuuaaaagcaucucagccuaccaugagaauaagagaaagaaaaugaagaucaauagcuuauucaucucuuuuucuuuuucguugguguaaagccaacacccugucuaaaaaacauaaauuucuuuaaucauuuugccucuuuucucugugcuucaauuaauaaaaaauggaaagaaccuagaucuaaaaaaaaaaaaaaaaaaaaaaaaaaaaaaaaaaaaaaaaaaaaaaaaaaaaaaaaaaaaaaaaugcaucccccccccccccccccccccccccccccccaaaggcucuuuucagagccaccagaauu

SEQ ID NO: 19461 - RNA, 1993 nt, Artificial Sequence
  mRNA product Design i-2 comprising derived and/or modified sequence from HRSV(Memphis-37)__AIY60640.1__F_DSCav1_mut8 (opt2)
ggggcgcugccuacggagguggcagccaucuccuucucggcaucaagcuuaccauggagcuccccauccucaagaccaacgccaucaccaccauccucgccgccgucacccucugcuucgccuccucccagaacaucaccgaggaguucuaccaguccaccugcuccgccgucuccaagggcuaccucggcgcccuccgcaccggcugguacaccuccgucaucaccaucgagcucuccaacaucaaggagaucaagugcaacggcaccgacgccaaggucaagcucaucaagcaggagcucgacaaguacaagaacgccgucaccgaccuccagcuccucaugcaguccacccccgccgccggcuccggcuccgccaucgccuccggcaucgccgucugcaagguccuccaccucgagggcgaggucaacaagaucaagaacgcccuccucuccaccaacaaggccgucgucucccucuccggcugcggcgucuccguccucaccuucaagguccucgaccucaagaacuacaucgacaagcagcuccuccccauccucaacaagcaguccugcuccauccccaacaucgagaccgucaucgaguuccagcagaagaacaaccgccuccucgagaucacccgcgaguucuccgucaacgccggcgucaccacccccgucuccaccuacaugcucaccaacuccgagcuccucucccucaucaacgacaugcccaucaccaacgaccagaagaagcucauguccaacaacguccagaucguccgccagcaguccuacuccaucaugugcaucaucaaggaggagguccucgccuacgucguccagcucccccucuacggcgucaucgacacccccugcuggaagcuccacaccuccccccucugcaccaccaacaccaaggagggcuccaacaucugccucacccgcaccgaccgcggcugguacugcgacaacgccggcuccgucuccuucuucccccaggccgagaccugcaagguccaguccaaccgcgucuucugcgacaccaugaacucccucacccuccccuccgaggucaaccucugcaacaucgacaucuucaaccccaaguacgacugcaagaucaugaccuccaagaccgacgucuccuccuccgucaucaccucccucggcgccaucgucuccugcuacggcaagaccaagugcaccgccuccaacaagugccgcggcaucaucaagaccuucuccaacggcugcgacuacgucuccaacaagggcgucgacaccgucuccgucggcaacacccucuacuacgucaacaagcaggagggccagucccucuacgucaagggcgagcccaucaucaacuucuacgacccccucgucuuccccuccgacgaguucgacgccuccaucucccaggucaacgagaagaucaaccagucccucgccuucauccgcaaguccgacgagcuccuccacaacgucaacgucggcaaguccaccaccaacaucaugaucaccaccaucaucaucgucaucaucgucauccuccuccuccucaucgccgucggccucuuccucuacugcaaggcccgcuccacccccgucacccucuccaaggaccagcucuccggcaucaacaacaucgccuucuccaacugaggacuagugcaucacauuuaaaagcaucucagccuaccaugagaauaagagaaagaaaaugaagaucaauagcuuauucaucucuuuuucuuuuucguugguguaaagccaacacccugucuaaaaaacauaaauuucuuuaaucauuuugccucuuuucucugugcuucaauuaauaaaaaauggaaagaaccuagaucuaaaaaaaaaaaaaaaaaaaaaaaaaaaaaaaaaaaaaaaaaaaaaaaaaaaaaaaaaaaaaaaaugcaucccccccccccccccccccccccccccccccaaaggcucuuuucagagccaccagaauu

SEQ ID NO: 19462 - RNA, 1993 nt, Artificial Sequence
  mRNA product Design i-2 comprising derived and/or modified sequence from HRSV(Memphis-37)__AIY60640.1__F_DSCav1_mut8 (opt3)
ggggcgcugccuacggagguggcagccaucuccuucucggcaucaagcuuaccauggagcugcccauccucaagaccaacgccauuacaacuauacuugcugcagugacgcugugcuucgccagcucccagaauaucaccgaagaguuuuaccaaucuacauguucagcggucaguaaaggcuauuugggggcuuuaagaacuggaugguacaccagcguuauuacaaucgaacuguccaacauuaaggagaucaaaugcaaugguaccgacgccaaggugaaacuaauaaagcaggaacucgauaaguauaaaaacgcaguaacugaccugcagcuucugaugcagucuacuccugccgcuggcucggggucagcaaucgccagcggaauugcuguguguaaggucuugcaccucgagggcgaggugaauaaaaucaagaacgcccugcugaguaccaauaaagcgguugugucccucucugguugcggggucagcguguuaacguucaagguacuggaucuuaagaacuacauugacaaacaauugcugccaauccuaaauaagcaguccuguucaauaccgaacauugaaacuguuaucgaguuucagcagaaaaauaacaggcuccuggaaauuacccgggaguucagugugaaugcaggagucacaacucccgugagcaccuauaugcuuacaaacucugagcuguugucccucaucaaugauaugccuaucaccaacgaccaaaagaaacugaugucaaacaaugugcagauuguccgccagcagagcuacaguauaaugugcaucauuaaggaagagguuuuagccuaugugguacaacugccacucuacggcgugaucgauacgcccuguuggaaacuucauacuucuccucugugcacaaccaacacuaaggaaggcuccaauauauguuugacacgaaccgaccgugggugguacugcgauaacgcuggaagcgucucguuuuucccacaggccgagacguguaaggugcagucuaauagaguuuucugcgacaccaugaacucccuaacacugcccucagaagugaaucucugcaacauugauaucuucaauccuaaauaugacuguaagaucaugacaaguaaaaccgaugucagcuccucugugauuacaagccugggugcaaucguaucaugcuacggcaagacuaaauguaccgcuaguaacaagugcagggggauuauaaagacauuuuccaauggaugugacuauguuagcaacaaaggcguggacaccgucucuguggguaauacucuuuacuaugucaacaagcaagaggggcagucacuguacgugaaaggagagccaaucauuaauuucuaugauccguugguuuuucccagugacgaauuugaugccagcaucucccaggugaacgagaagaucaaccagucucucgcguuuauucggaaaucggacgaacuguuacacaauguaaacgucggcaagagcacgacaaauauaaugaucaccacuauuaucauugugaucauaguuauccugcuacuccugauugccgugggccuuuucuuguacugcaaggcacgcuccaccccugucacacugucaaaagaucaacucagugggaucaacaauauugcuuucucuaacugaggacuagugcaucacauuuaaaagcaucucagccuaccaugagaauaagagaaagaaaaugaagaucaauagcuuauucaucucuuuuucuuuuucguugguguaaagccaacacccugucuaaaaaacauaaauuucuuuaaucauuuugccucuuuucucugugcuucaauuaauaaaaaauggaaagaaccuagaucuaaaaaaaaaaaaaaaaaaaaaaaaaaaaaaaaaaaaaaaaaaaaaaaaaaaaaaaaaaaaaaaaugcaucccccccccccccccccccccccccccccccaaaggcucuuuucagagccaccagaauu

SEQ ID NO: 19463 - RNA, 1993 nt, Artificial Sequence
  mRNA product Design i-2 comprising derived and/or modified sequence from HRSV(Memphis-37)__AIY60640.1__F_DSCav1_mut8 (opt4)
ggggcgcugccuacggagguggcagccaucuccuucucggcaucaagcuuaccauggagcugcccauccugaagaccaacgccaucaccaccauccuggccgccgugacccugugcuucgccagcagccagaacaucaccgaggaguucuaccagagcaccugcagcgccgugagcaagggcuaccugggcgcccugagaaccggcugguacaccagcgugaucaccaucgagcugagcaacaucaaggagaucaagugcaacggcaccgacgccaaggugaagcugaucaagcaggagcuggacaaguacaagaacgccgugaccgaccugcagcugcugaugcagagcacccccgccgccggcagcggcagcgccaucgccagcggcaucgccgugugcaaggugcugcaccuggagggcgaggugaacaagaucaagaacgcccugcugagcaccaacaaggccguggugagccugagcggcugcggcgugagcgugcugaccuucaaggugcuggaccugaagaacuacaucgacaagcagcugcugcccauccugaacaagcagagcugcagcauccccaacaucgagaccgugaucgaguuccagcagaagaacaacagacugcuggagaucaccagagaguucagcgugaacgccggcgugaccacccccgugagcaccuacaugcugaccaacagcgagcugcugagccugaucaacgacaugcccaucaccaacgaccagaagaagcugaugagcaacaacgugcagaucgugagacagcagagcuacagcaucaugugcaucaucaaggaggaggugcuggccuacguggugcagcugccccuguacggcgugaucgacacccccugcuggaagcugcacaccagcccccugugcaccaccaacaccaaggagggcagcaacaucugccugaccagaaccgacagaggcugguacugcgacaacgccggcagcgugagcuucuucccccaggccgagaccugcaaggugcagagcaacagaguguucugcgacaccaugaacagccugacccugcccagcgaggugaaccugugcaacaucgacaucuucaaccccaaguacgacugcaagaucaugaccagcaagaccgacgugagcagcagcgugaucaccagccugggcgccaucgugagcugcuacggcaagaccaagugcaccgccagcaacaagugcagaggcaucaucaagaccuucagcaacggcugcgacuacgugagcaacaagggcguggacaccgugagcgugggcaacacccuguacuacgugaacaagcaggagggccagagccuguacgugaagggcgagcccaucaucaacuucuacgacccccugguguuccccagcgacgaguucgacgccagcaucagccaggugaacgagaagaucaaccagagccuggccuucaucagaaagagcgacgagcugcugcacaacgugaacgugggcaagagcaccaccaacaucaugaucaccaccaucaucaucgugaucaucgugauccugcugcugcugaucgccgugggccuguuccuguacugcaaggccagaagcacccccgugacccugagcaaggaccagcugagcggcaucaacaacaucgccuucagcaacugaggacuagugcaucacauuuaaaagcaucucagccuaccaugagaauaagagaaagaaaaugaagaucaauagcuuauucaucucuuuuucuuuuucguugguguaaagccaacacccugucuaaaaaacauaaauuucuuuaaucauuuugccucuuuucucugugcuucaauuaauaaaaaauggaaagaaccuagaucuaaaaaaaaaaaaaaaaaaaaaaaaaaaaaaaaaaaaaaaaaaaaaaaaaaaaaaaaaaaaaaaaugcaucccccccccccccccccccccccccccccccaaaggcucuuuucagagccaccagaauu

SEQ ID NO: 19464 - RNA, 1993 nt, Artificial Sequence
  mRNA product Design i-2 comprising derived and/or modified sequence from HRSV(Memphis-37)__AIY60640.1__F_DSCav1_mut8 (opt5)
ggggcgcugccuacggagguggcagccaucuccuucucggcaucaagcuuaccauggagcugcccauccucaagaccaacgccauuacaacgauccuggcugccgugacccuuugcuucgcgagcucccagaauauuacagaagaguuuuaccaaucuaccuguagcgcugucuccaaaggcuaucugggggcccucagaacaggaugguacaccucuguuaucacaauugaacugagcaacaucaaggagaucaaaugcaauggcaccgacgccaaggugaaacuuauuaagcaggaacuggauaaguauaaaaacgcugugacggaccuccagcugcugaugcaguccaccccugccgcugggucuggaagcgccaucgcguccggcauugccgucuguaaggugcuccaccuggagggggagguuaauaaaaucaagaacgcccuucugagcacaaauaaagcuguggucucucucuccggaugcggcgugagcguucugaccuucaaggugcuugaucugaagaacuacauugacaaacaacuccugccgauccugaauaagcagucuuguuccauucccaacaucgaaacagucaucgaguuucagcagaaaaauaaccggcuccuggaaauuacccgcgaguucagcgugaaugcuggcgugacgacaccugucucuaccuauaugcuuacaaacuccgagcugcucagccugaucaaugauaugcccauuaccaacgaccaaaagaaacuuauguccaacaauguucagaucgugagacagcagucuuacagcauuaugugcaucaucaaggaagaggugcuggccuaugucgugcaacucccucuguacgggguuauugauacccccuguuggaaacugcauacauccccucucugcacgaccaacacaaaggaaggaagcaauaucugucugacccggacagaccgcggcugguacugcgauaacgcggggucuguguccuuuuucccgcaggccgagaccuguaagguccagagcaauagaguguuuugcgacacgaugaacucucuuacacugcccagcgaaguuaaucucugcaacauugauaucuucaauccuaaauaugacuguaagauuaugaccuccaaaaccgaugugucuagcuccgucaucacaagccugggagcuaucgugucuugcuacggcaagaccaaauguacagccuccaacaagugccgggggauuaucaagacguuuagcaauggaugugacuaugucucuaacaaaggcguggacaccguuuccgugggcaauacacuuuacuaugucaacaagcaagaggggcagagccuguacgugaaaggagagcccauuaucaauuucuaugauccucucguuuuucccuccgacgaguucgaugcuucuauuagccaggugaacgaaaagaucaaccagucccuggccuuuauucgcaaaucugacgaacugcuccacaaugucaacgugggcaagagcaccacaaauaucaugaucaccacgauuaucauugugaucauuguuauccugcuucugcucaucgccgucgggcuguuccuguacugcaaggcuagauccaccccggugacacuuagcaaagaucaacucucuggaauuaacaauaucgcguucuccaacugaggacuagugcaucacauuuaaaagcaucucagccuaccaugagaauaagagaaagaaaaugaagaucaauagcuuauucaucucuuuuucuuuuucguugguguaaagccaacacccugucuaaaaaacauaaauuucuuuaaucauuuugccucuuuucucugugcuucaauuaauaaaaaauggaaagaaccuagaucuaaaaaaaaaaaaaaaaaaaaaaaaaaaaaaaaaaaaaaaaaaaaaaaaaaaaaaaaaaaaaaaaugcaucccccccccccccccccccccccccccccccaaaggcucuuuucagagccaccagaauu

SEQ ID NO: 19465 - RNA, 1993 nt, Artificial Sequence
  mRNA product Design i-2 comprising derived and/or modified sequence from HRSV(Memphis-37)__AIY60640.1__F_DSCav1_mut8 (opt6)
ggggcgcugccuacggagguggcagccaucuccuucucggcaucaagcuuaccauggaacuuccuauuuuaaaaacaaacgcaauuacaaccauauuagcagcaguaacacuaugcuuugcaucaucacaaaacaucaccgaagaauuuuaucaauccacaugcucagcaguaucaaaaggauaccuuggcgcacuccgaacaggcugguauacaucggucauaacuauagaacucuccaacauaaaagaaauaaaaugcaaugguacugacgcaaaaguaaaauuaauaaaacaagaacuagacaaauacaaaaacgcaguaaccgauuuacaacuacuuaugcaaucaacaccugcagcaggaagcggaucagcaauagcaaguggaauagcaguaugcaaaguacuucaccucgaaggagaaguaaauaaaauaaaaaacgccuuacuaucaacaaauaaagccgucguaucacuuuccgguugcggcguaucaguauuaaccuuuaaagucuuagacuuaaaaaacuacauagacaaacaauuauuaccaauacuaaacaaacaauccuguuccauacccaacauagaaaccguaauagaauuucaacaaaaaaacaacagacuauuagaaauaacacgcgaauuuucaguaaacgcaggcguaacaacaccaguaucaacauauauguuaaccaauucagaauuauuaucccuuauaaaugacaugccuauaacaaacgaccaaaaaaaauuaaugaguaacaacguucaaauaguaagacaacaaucauacagcauaaugugcauaauaaaagaagaaguacuagcauacguaguucaacuaccacucuauggcguuaucgacaccccaugcuggaaacuacauaccucaccacucuguaccacuaauacgaaagaaggaucuaacauaugccuaaccagaacagaucgagguugguauugcgacaaugcuggaucaguaucauucuucccacaagcagaaaccugcaaaguacaaagcaacagaguauuuugugacacuaugaacucacuaacgcuaccuucagaaguaaaccuaugcaacaucgacauauucaacccaaaauacgauugcaaaauaaugacaucaaaaacagacguuuccucaucaguaauaacaucauuaggagcaauaguauccugcuacgguaaaaccaaaugcacagcauccaauaaaugccgaggaaucauuaaaacauuuucaaauggcugcgacuauguaaguaauaaagguguagauacaguaucaguaggcaacacacuauauuacguaaacaaacaagaagggcaaucccuauaugucaaaggcgaaccaauuauaaacuucuacgacccccucguauucccaucagacgaauuugacgcaucaauaucccaaguaaacgaaaaaaucaaccaaucacucgcauucauacguaaauccgacgaauuacuacauaacguaaacguaggcaaaucaacaacaaauauaaugauaacaaccauaaucauaguaauaauaguuauacuccuacuacucauugcagucggccuauuucuauacuguaaagcacgcucuacaccaguaacacuaucuaaagaucaauuauccggaauaaacaacauugccuucuccaauuaaggacuagugcaucacauuuaaaagcaucucagccuaccaugagaauaagagaaagaaaaugaagaucaauagcuuauucaucucuuuuucuuuuucguugguguaaagccaacacccugucuaaaaaacauaaauuucuuuaaucauuuugccucuuuucucugugcuucaauuaauaaaaaauggaaagaaccuagaucuaaaaaaaaaaaaaaaaaaaaaaaaaaaaaaaaaaaaaaaaaaaaaaaaaaaaaaaaaaaaaaaaugcaucccccccccccccccccccccccccccccccaaaggcucuuuucagagccaccagaauu

SEQ ID NO: 19466 - RNA, 1993 nt, Artificial Sequence
  mRNA product Design i-2 comprising derived and/or modified sequence from HRSV(Memphis-37)__AIY60640.1__F_DSCav1_mut8 (opt11)
ggggcgcugccuacggagguggcagccaucuccuucucggcaucaagcuuaccauggaacuucccauccugaagaccaacgcuaucacaaccauccucgccgcagucacccuuugcuucgccucaucccaaaacaucaccgaagaauuuuaccagucaaccugcucggccgucuccaagggcuaccucggcgcccuccgcacuggcugguacacauccgucaucaccaucgaacucuccaacauaaaagaaauaaaaugcaacggaaccgacgccaaagucaaacucaucaaacaagaacuagauaaauauaaaaacgccgucaccgaccugcaacuccucaugcaauccaccccagccgccggcucuggcagcgccaucgcaagcggaaucgccgucugcaaaguccuccaccuagaaggcgaagucaacaaaauuaaaaacgcccuccucuccaccaacaaagcaguugucucccucucuggcugcggagucucuguacucaccuucaaaguacuagaccucaagaauuacauagacaaacaacuccugcccauccuuaacaaacaaaguuguaguauccccaacaucgaaacaguaaucgaauuucagcagaaaaacaaccgccuccucgaaaucacacgagaguucucggucaacgccggcgucaccacccccguaucaaccuacaugcuaacaaacuccgaacuacuuucccucaucaaugacaugcccauaaccaacgaccaaaagaaacuaauguccaauaacguccagauaguccgucaacaguccuacucaaucaugugcauaauuaaagaagaaguacucgccuacgucguccaacuaccccucuauggagucaucgacacccccugcuggaaacuccacacaucaccccuaugcacaaccaacaccaaagaaggcuccaacaucugccucacaagaaccgaccgcggcugguacugcgacaacgcuggcuccgucucguucuucccacaagccgaaaccugcaaaguccaaucaaaccgggucuucugcgacaccaugaacucccucacucucccaagcgaagucaaccuaugcaacaucgacaucuucaacccaaaauacgacuguaaaaucaugacuucgaaaacagacgucuccucaucaguaaucacauccuuaggcgccaucguguccugcuacgguaagaccaaaugcacagccuccaacaaaugccggggcaucaucaaaaccuucagcaacgguugugauuacgucuccaacaaaggaguagacaccgucuccguaggaaacacccucuacuacgucaacaagcaagaaggccaaucccucuacgucaaaggggaacccaucaucaacuucuacgacccacucgucuuccccuccgacgaguucgacgcaagcaucucccaagucaacgaaaagaucaaccaaucacuagccuucauccgcaaauccgacgaacuccuccacaacguuaacguaggcaaauccaccaccaacaucaugaucacaaccaucaucauagucauaauagucauccuacuacuccucaucgccguaggucuauuccuauacuguaaagcucgaucaacccccgucacacucuccaaagaucaacucucaggaaucaacaacaucgccuucuccaacuaaggacuagugcaucacauuuaaaagcaucucagccuaccaugagaauaagagaaagaaaaugaagaucaauagcuuauucaucucuuuuucuuuuucguugguguaaagccaacacccugucuaaaaaacauaaauuucuuuaaucauuuugccucuuuucucugugcuucaauuaauaaaaaauggaaagaaccuagaucuaaaaaaaaaaaaaaaaaaaaaaaaaaaaaaaaaaaaaaaaaaaaaaaaaaaaaaaaaaaaaaaaugcaucccccccccccccccccccccccccccccccaaaggcucuuuucagagccaccagaauu

SEQ ID NO: 19467 - RNA, 1828 nt, Artificial Sequence
  mRNA product Design i-3 comprising derived and/or modified sequence from HRSV(Memphis-37)__AIY60640.1__F_DSCav1_mut8 (opt1)
gggagaaagcuuaccauggagcugcccauccucaagaccaacgccaucaccacgauccuggccgcggugacccugugcuucgccagcucccagaacaucaccgaggaguucuaccagagcacgugcuccgccgucagcaagggcuaccucggcgcccugcgcaccgggugguacaccagcgugaucaccaucgagcuguccaacaucaaggagaucaagugcaacggcaccgacgccaaggugaagcucaucaagcaggagcuggacaaguacaagaacgcggucacggaccugcagcuccugaugcagagcaccccggccgccggcuccgggagcgcgaucgccuccggcaucgccgucugcaaggugcugcaccucgagggcgaggugaacaagaucaagaacgcccugcuguccaccaacaaggccgucgugagccucuccggcugcggggugagcguccugaccuucaaggugcuggaccucaagaacuacaucgacaagcagcugcugcccauccugaacaagcagagcugcuccauccccaacaucgagaccgucaucgaguuccagcagaagaacaaccgccuccuggagaucacgcgggaguucagcgugaacgcgggcgugaccacccccgucuccaccuacaugcugacgaacagcgagcuccugucccugaucaacgacaugccgaucaccaacgaccagaagaagcucaugagcaacaacgugcagaucgugcgccagcaguccuacagcaucaugugcaucaucaaggaggagguccuggccuacguggugcagcugccccucuacggggucaucgacacccccugcuggaagcugcacaccagcccccugugcacgaccaacaccaaggagggcuccaacaucugccucacccggacggaccgcgggugguacugcgacaacgccggcagcguguccuucuucccgcaggccgagaccugcaagguccagagcaaccggguguucugcgacaccaugaacucccugacccugcccagcgaggugaaccucugcaacaucgacaucuucaaccccaaguacgacugcaagaucaugacguccaagaccgacgucagcuccagcgugaucaccucccugggcgccaucgugagcugcuacgggaagaccaagugcacggcgagcaacaagugccgcggcaucaucaagaccuucuccaacgggugcgacuacgucagcaacaagggcguggacaccguguccgucggcaacacccuguacuacgugaacaagcaggagggccagagccucuacgugaagggggagcccaucaucaacuucuacgacccgcuggucuuccccuccgacgaguucgacgccagcaucucccaggugaacgagaagaucaaccagagccuggccuucauccggaaguccgacgagcuccugcacaacgugaacgucggcaagagcaccacgaacaucaugaucaccaccaucaucaucgugaucaucgugauccugcugcuccugaucgccgucgggcuguuccucuacugcaaggcccgcuccacccccgugacgcugagcaaggaccagcuguccgggaucaacaacaucgcguucagcaacugaggacuaguuauaagacugacuagcccgaugggccucccaacgggcccuccuccccuccuugcaccgagauuaauaaaaaaaaaaaaaaaaaaaaaaaaaaaaaaaaaaaaaaaaaaaaaaaaaaaaaaaaaaaaaaaaugcaucccccccccccccccccccccccccccccccaaaggcucuuuucagagccaccagaauu

SEQ ID NO: 19468 - RNA, 1828 nt, Artificial Sequence
  mRNA product Design i-3 comprising derived and/or modified sequence from HRSV(Memphis-37)__AIY60640.1__F_DSCav1_mut8 (opt1)
gggagaaagcuuaccauggagcugcccauccucaagaccaacgccaucaccacgauccuggccgcggugacccugugcuucgccagcucccagaacaucaccgaggaguucuaccagagcacgugcuccgccgucagcaagggcuaccucggggcccugcgcaccggcugguacaccuccgugaucaccaucgagcugagcaacaucaaggagaucaagugcaacgggaccgacgccaaggugaagcucaucaagcaggagcuggacaaguacaagaacgcggucacggaccugcagcuccugaugcaguccaccccggccgccggcagcggguccgccaucgcgagcggcaucgccgugugcaaggugcugcaccucgagggcgaggucaacaagaucaagaacgcccugcuguccaccaacaaggccguggugagccucuccgggugcggcgucagcgugcugaccuucaaggugcuggaccucaagaacuacaucgacaagcagcugcugcccauccucaacaagcaguccugcagcauccccaacaucgagacggucaucgaguuccagcagaagaacaaccggcugcuggagaucacccgcgaguucuccgugaacgccggggugaccacccccgucagcacguacaugcucaccaacuccgagcugcugagccucaucaacgacaugccgaucaccaacgaccagaagaagcugaugagcaacaacgugcagaucgugcggcagcaguccuacagcaucaugugcaucaucaaggaggagguccuggcguacguggugcagcucccccuguacggcgucaucgacacccccugcuggaagcugcacacgagcccccucugcaccaccaacaccaaggagggguccaacaucugccugacgcgcaccgaccggggcugguacugcgacaacgccggcuccgugagcuucuucccgcaggccgagaccugcaaggugcaguccaaccgcgucuucugcgacaccaugaacagccugacgcuccccuccgaggugaaccugugcaacaucgacaucuucaaccccaaguacgacugcaagaucaugaccagcaagaccgacgucuccagcuccgugaucaccagccugggggccaucguguccugcuacggcaagacgaagugcaccgccagcaacaagugccgggggaucaucaagaccuucuccaacggcugcgacuacgucagcaacaagggcguggacaccguguccgucgggaacacgcucuacuacgugaacaagcaggagggccagagccuguacgugaagggggagcccaucaucaacuucuacgacccgcuggucuuccccagcgacgaguucgacgcguccaucagccaggugaacgagaagaucaaccagucccucgccuucauccgcaagagcgacgagcugcugcacaacgugaacgucggcaaguccaccaccaacaucaugaucaccaccaucaucaucgugaucaucgugauccuccugcugcucaucgccgucgggcuguuccuguacugcaaggcccggagcacgcccgugacccuguccaaggaccagcucagcggcaucaacaacaucgccuucuccaacugaggacuaguuauaagacugacuagcccgaugggccucccaacgggcccuccuccccuccuugcaccgagauuaauaaaaaaaaaaaaaaaaaaaaaaaaaaaaaaaaaaaaaaaaaaaaaaaaaaaaaaaaaaaaaaaaugcaucccccccccccccccccccccccccccccccaaaggcucuuuucagagccaccagaauu

SEQ ID NO: 19469 - RNA, 1828 nt, Artificial Sequence
  mRNA product Design i-3 comprising derived and/or modified sequence from HRSV(Memphis-37)__AIY60640.1__F_DSCav1_mut8 (opt2)
gggagaaagcuuaccauggagcuccccauccucaagaccaacgccaucaccaccauccucgccgccgucacccucugcuucgccuccucccagaacaucaccgaggaguucuaccaguccaccugcuccgccgucuccaagggcuaccucggcgcccuccgcaccggcugguacaccuccgucaucaccaucgagcucuccaacaucaaggagaucaagugcaacggcaccgacgccaaggucaagcucaucaagcaggagcucgacaaguacaagaacgccgucaccgaccuccagcuccucaugcaguccacccccgccgccggcuccggcuccgccaucgccuccggcaucgccgucugcaagguccuccaccucgagggcgaggucaacaagaucaagaacgcccuccucuccaccaacaaggccgucgucucccucuccggcugcggcgucuccguccucaccuucaagguccucgaccucaagaacuacaucgacaagcagcuccuccccauccucaacaagcaguccugcuccauccccaacaucgagaccgucaucgaguuccagcagaagaacaaccgccuccucgagaucacccgcgaguucuccgucaacgccggcgucaccacccccgucuccaccuacaugcucaccaacuccgagcuccucucccucaucaacgacaugcccaucaccaacgaccagaagaagcucauguccaacaacguccagaucguccgccagcaguccuacuccaucaugugcaucaucaaggaggagguccucgccuacgucguccagcucccccucuacggcgucaucgacacccccugcuggaagcuccacaccuccccccucugcaccaccaacaccaaggagggcuccaacaucugccucacccgcaccgaccgcggcugguacugcgacaacgccggcuccgucuccuucuucccccaggccgagaccugcaagguccaguccaaccgcgucuucugcgacaccaugaacucccucacccuccccuccgaggucaaccucugcaacaucgacaucuucaaccccaaguacgacugcaagaucaugaccuccaagaccgacgucuccuccuccgucaucaccucccucggcgccaucgucuccugcuacggcaagaccaagugcaccgccuccaacaagugccgcggcaucaucaagaccuucuccaacggcugcgacuacgucuccaacaagggcgucgacaccgucuccgucggcaacacccucuacuacgucaacaagcaggagggccagucccucuacgucaagggcgagcccaucaucaacuucuacgacccccucgucuuccccuccgacgaguucgacgccuccaucucccaggucaacgagaagaucaaccagucccucgccuucauccgcaaguccgacgagcuccuccacaacgucaacgucggcaaguccaccaccaacaucaugaucaccaccaucaucaucgucaucaucgucauccuccuccuccucaucgccgucggccucuuccucuacugcaaggcccgcuccacccccgucacccucuccaaggaccagcucuccggcaucaacaacaucgccuucuccaacugaggacuaguuauaagacugacuagcccgaugggccucccaacgggcccuccuccccuccuugcaccgagauuaauaaaaaaaaaaaaaaaaaaaaaaaaaaaaaaaaaaaaaaaaaaaaaaaaaaaaaaaaaaaaaaaaugcaucccccccccccccccccccccccccccccccaaaggcucuuuucagagccaccagaauu

SEQ ID NO: 19470 - RNA, 1828 nt, Artificial Sequence
  mRNA product Design i-3 comprising derived and/or modified sequence from HRSV(Memphis-37)__AIY60640.1__F_DSCav1_mut8 (opt3)
gggagaaagcuuaccauggagcugcccauccucaagaccaacgccauuacaacuauacuugcugcagugacgcugugcuucgccagcucccagaauaucaccgaagaguuuuaccaaucuacauguucagcggucaguaaaggcuauuugggggcuuuaagaacuggaugguacaccagcguuauuacaaucgaacuguccaacauuaaggagaucaaaugcaaugguaccgacgccaaggugaaacuaauaaagcaggaacucgauaaguauaaaaacgcaguaacugaccugcagcuucugaugcagucuacuccugccgcuggcucggggucagcaaucgccagcggaauugcuguguguaaggucuugcaccucgagggcgaggugaauaaaaucaagaacgcccugcugaguaccaauaaagcgguugugucccucucugguugcggggucagcguguuaacguucaagguacuggaucuuaagaacuacauugacaaacaauugcugccaauccuaaauaagcaguccuguucaauaccgaacauugaaacuguuaucgaguuucagcagaaaaauaacaggcuccuggaaauuacccgggaguucagugugaaugcaggagucacaacucccgugagcaccuauaugcuuacaaacucugagcuguugucccucaucaaugauaugccuaucaccaacgaccaaaagaaacugaugucaaacaaugugcagauuguccgccagcagagcuacaguauaaugugcaucauuaaggaagagguuuuagccuaugugguacaacugccacucuacggcgugaucgauacgcccuguuggaaacuucauacuucuccucugugcacaaccaacacuaaggaaggcuccaauauauguuugacacgaaccgaccgugggugguacugcgauaacgcuggaagcgucucguuuuucccacaggccgagacguguaaggugcagucuaauagaguuuucugcgacaccaugaacucccuaacacugcccucagaagugaaucucugcaacauugauaucuucaauccuaaauaugacuguaagaucaugacaaguaaaaccgaugucagcuccucugugauuacaagccugggugcaaucguaucaugcuacggcaagacuaaauguaccgcuaguaacaagugcagggggauuauaaagacauuuuccaauggaugugacuauguuagcaacaaaggcguggacaccgucucuguggguaauacucuuuacuaugucaacaagcaagaggggcagucacuguacgugaaaggagagccaaucauuaauuucuaugauccguugguuuuucccagugacgaauuugaugccagcaucucccaggugaacgagaagaucaaccagucucucgcguuuauucggaaaucggacgaacuguuacacaauguaaacgucggcaagagcacgacaaauauaaugaucaccacuauuaucauugugaucauaguuauccugcuacuccugauugccgugggccuuuucuuguacugcaaggcacgcuccaccccugucacacugucaaaagaucaacucagugggaucaacaauauugcuuucucuaacugaggacuaguuauaagacugacuagcccgaugggccucccaacgggcccuccuccccuccuugcaccgagauuaauaaaaaaaaaaaaaaaaaaaaaaaaaaaaaaaaaaaaaaaaaaaaaaaaaaaaaaaaaaaaaaaaugcaucccccccccccccccccccccccccccccccaaaggcucuuuucagagccaccagaauu

SEQ ID NO: 19471 - RNA, 1828 nt, Artificial Sequence
  mRNA product Design i-3 comprising derived and/or modified sequence from HRSV(Memphis-37)__AIY60640.1__F_DSCav1_mut8 (opt4)
gggagaaagcuuaccauggagcugcccauccugaagaccaacgccaucaccaccauccuggccgccgugacccugugcuucgccagcagccagaacaucaccgaggaguucuaccagagcaccugcagcgccgugagcaagggcuaccugggcgcccugagaaccggcugguacaccagcgugaucaccaucgagcugagcaacaucaaggagaucaagugcaacggcaccgacgccaaggugaagcugaucaagcaggagcuggacaaguacaagaacgccgugaccgaccugcagcugcugaugcagagcacccccgccgccggcagcggcagcgccaucgccagcggcaucgccgugugcaaggugcugcaccuggagggcgaggugaacaagaucaagaacgcccugcugagcaccaacaaggccguggugagccugagcggcugcggcgugagcgugcugaccuucaaggugcuggaccugaagaacuacaucgacaagcagcugcugcccauccugaacaagcagagcugcagcauccccaacaucgagaccgugaucgaguuccagcagaagaacaacagacugcuggagaucaccagagaguucagcgugaacgccggcgugaccacccccgugagcaccuacaugcugaccaacagcgagcugcugagccugaucaacgacaugcccaucaccaacgaccagaagaagcugaugagcaacaacgugcagaucgugagacagcagagcuacagcaucaugugcaucaucaaggaggaggugcuggccuacguggugcagcugccccuguacggcgugaucgacacccccugcuggaagcugcacaccagcccccugugcaccaccaacaccaaggagggcagcaacaucugccugaccagaaccgacagaggcugguacugcgacaacgccggcagcgugagcuucuucccccaggccgagaccugcaaggugcagagcaacagaguguucugcgacaccaugaacagccugacccugcccagcgaggugaaccugugcaacaucgacaucuucaaccccaaguacgacugcaagaucaugaccagcaagaccgacgugagcagcagcgugaucaccagccugggcgccaucgugagcugcuacggcaagaccaagugcaccgccagcaacaagugcagaggcaucaucaagaccuucagcaacggcugcgacuacgugagcaacaagggcguggacaccgugagcgugggcaacacccuguacuacgugaacaagcaggagggccagagccuguacgugaagggcgagcccaucaucaacuucuacgacccccugguguuccccagcgacgaguucgacgccagcaucagccaggugaacgagaagaucaaccagagccuggccuucaucagaaagagcgacgagcugcugcacaacgugaacgugggcaagagcaccaccaacaucaugaucaccaccaucaucaucgugaucaucgugauccugcugcugcugaucgccgugggccuguuccuguacugcaaggccagaagcacccccgugacccugagcaaggaccagcugagcggcaucaacaacaucgccuucagcaacugaggacuaguuauaagacugacuagcccgaugggccucccaacgggcccuccuccccuccuugcaccgagauuaauaaaaaaaaaaaaaaaaaaaaaaaaaaaaaaaaaaaaaaaaaaaaaaaaaaaaaaaaaaaaaaaaugcaucccccccccccccccccccccccccccccccaaaggcucuuuucagagccaccagaauu

SEQ ID NO: 19472 - RNA, 1828 nt, Artificial Sequence
  mRNA product Design i-3 comprising derived and/or modified sequence from HRSV(Memphis-37)__AIY60640.1__F_DSCav1_mut8 (opt5)
gggagaaagcuuaccauggagcugcccauccucaagaccaacgccauuacaacgauccuggcugccgugacccuuugcuucgcgagcucccagaauauuacagaagaguuuuaccaaucuaccuguagcgcugucuccaaaggcuaucugggggcccucagaacaggaugguacaccucuguuaucacaauugaacugagcaacaucaaggagaucaaaugcaauggcaccgacgccaaggugaaacuuauuaagcaggaacuggauaaguauaaaaacgcugugacggaccuccagcugcugaugcaguccaccccugccgcugggucuggaagcgccaucgcguccggcauugccgucuguaaggugcuccaccuggagggggagguuaauaaaaucaagaacgcccuucugagcacaaauaaagcuguggucucucucuccggaugcggcgugagcguucugaccuucaaggugcuugaucugaagaacuacauugacaaacaacuccugccgauccugaauaagcagucuuguuccauucccaacaucgaaacagucaucgaguuucagcagaaaaauaaccggcuccuggaaauuacccgcgaguucagcgugaaugcuggcgugacgacaccugucucuaccuauaugcuuacaaacuccgagcugcucagccugaucaaugauaugcccauuaccaacgaccaaaagaaacuuauguccaacaauguucagaucgugagacagcagucuuacagcauuaugugcaucaucaaggaagaggugcuggccuaugucgugcaacucccucuguacgggguuauugauacccccuguuggaaacugcauacauccccucucugcacgaccaacacaaaggaaggaagcaauaucugucugacccggacagaccgcggcugguacugcgauaacgcggggucuguguccuuuuucccgcaggccgagaccuguaagguccagagcaauagaguguuuugcgacacgaugaacucucuuacacugcccagcgaaguuaaucucugcaacauugauaucuucaauccuaaauaugacuguaagauuaugaccuccaaaaccgaugugucuagcuccgucaucacaagccugggagcuaucgugucuugcuacggcaagaccaaauguacagccuccaacaagugccgggggauuaucaagacguuuagcaauggaugugacuaugucucuaacaaaggcguggacaccguuuccgugggcaauacacuuuacuaugucaacaagcaagaggggcagagccuguacgugaaaggagagcccauuaucaauuucuaugauccucucguuuuucccuccgacgaguucgaugcuucuauuagccaggugaacgaaaagaucaaccagucccuggccuuuauucgcaaaucugacgaacugcuccacaaugucaacgugggcaagagcaccacaaauaucaugaucaccacgauuaucauugugaucauuguuauccugcuucugcucaucgccgucgggcuguuccuguacugcaaggcuagauccaccccggugacacuuagcaaagaucaacucucuggaauuaacaauaucgcguucuccaacugaggacuaguuauaagacugacuagcccgaugggccucccaacgggcccuccuccccuccuugcaccgagauuaauaaaaaaaaaaaaaaaaaaaaaaaaaaaaaaaaaaaaaaaaaaaaaaaaaaaaaaaaaaaaaaaaugcaucccccccccccccccccccccccccccccccaaaggcucuuuucagagccaccagaauu

SEQ ID NO: 19473 - RNA, 1828 nt, Artificial Sequence
  mRNA product Design i-3 comprising derived and/or modified sequence from HRSV(Memphis-37)__AIY60640.1__F_DSCav1_mut8 (opt6)
gggagaaagcuuaccauggaacuuccuauuuuaaaaacaaacgcaauuacaaccauauuagcagcaguaacacuaugcuuugcaucaucacaaaacaucaccgaagaauuuuaucaauccacaugcucagcaguaucaaaaggauaccuuggcgcacuccgaacaggcugguauacaucggucauaacuauagaacucuccaacauaaaagaaauaaaaugcaaugguacugacgcaaaaguaaaauuaauaaaacaagaacuagacaaauacaaaaacgcaguaaccgauuuacaacuacuuaugcaaucaacaccugcagcaggaagcggaucagcaauagcaaguggaauagcaguaugcaaaguacuucaccucgaaggagaaguaaauaaaauaaaaaacgccuuacuaucaacaaauaaagccgucguaucacuuuccgguugcggcguaucaguauuaaccuuuaaagucuuagacuuaaaaaacuacauagacaaacaauuauuaccaauacuaaacaaacaauccuguuccauacccaacauagaaaccguaauagaauuucaacaaaaaaacaacagacuauuagaaauaacacgcgaauuuucaguaaacgcaggcguaacaacaccaguaucaacauauauguuaaccaauucagaauuauuaucccuuauaaaugacaugccuauaacaaacgaccaaaaaaaauuaaugaguaacaacguucaaauaguaagacaacaaucauacagcauaaugugcauaauaaaagaagaaguacuagcauacguaguucaacuaccacucuauggcguuaucgacaccccaugcuggaaacuacauaccucaccacucuguaccacuaauacgaaagaaggaucuaacauaugccuaaccagaacagaucgagguugguauugcgacaaugcuggaucaguaucauucuucccacaagcagaaaccugcaaaguacaaagcaacagaguauuuugugacacuaugaacucacuaacgcuaccuucagaaguaaaccuaugcaacaucgacauauucaacccaaaauacgauugcaaaauaaugacaucaaaaacagacguuuccucaucaguaauaacaucauuaggagcaauaguauccugcuacgguaaaaccaaaugcacagcauccaauaaaugccgaggaaucauuaaaacauuuucaaauggcugcgacuauguaaguaauaaagguguagauacaguaucaguaggcaacacacuauauuacguaaacaaacaagaagggcaaucccuauaugucaaaggcgaaccaauuauaaacuucuacgacccccucguauucccaucagacgaauuugacgcaucaauaucccaaguaaacgaaaaaaucaaccaaucacucgcauucauacguaaauccgacgaauuacuacauaacguaaacguaggcaaaucaacaacaaauauaaugauaacaaccauaaucauaguaauaauaguuauacuccuacuacucauugcagucggccuauuucuauacuguaaagcacgcucuacaccaguaacacuaucuaaagaucaauuauccggaauaaacaacauugccuucuccaauuaaggacuaguuauaagacugacuagcccgaugggccucccaacgggcccuccuccccuccuugcaccgagauuaauaaaaaaaaaaaaaaaaaaaaaaaaaaaaaaaaaaaaaaaaaaaaaaaaaaaaaaaaaaaaaaaaugcaucccccccccccccccccccccccccccccccaaaggcucuuuucagagccaccagaauu

SEQ ID NO: 19474 - RNA, 1828 nt, Artificial Sequence
  mRNA product Design i-3 comprising derived and/or modified sequence from HRSV(Memphis-37)__AIY60640.1__F_DSCav1_mut8 (opt11)
gggagaaagcuuaccauggaacuucccauccugaagaccaacgcuaucacaaccauccucgccgcagucacccuuugcuucgccucaucccaaaacaucaccgaagaauuuuaccagucaaccugcucggccgucuccaagggcuaccucggcgcccuccgcacuggcugguacacauccgucaucaccaucgaacucuccaacauaaaagaaauaaaaugcaacggaaccgacgccaaagucaaacucaucaaacaagaacuagauaaauauaaaaacgccgucaccgaccugcaacuccucaugcaauccaccccagccgccggcucuggcagcgccaucgcaagcggaaucgccgucugcaaaguccuccaccuagaaggcgaagucaacaaaauuaaaaacgcccuccucuccaccaacaaagcaguugucucccucucuggcugcggagucucuguacucaccuucaaaguacuagaccucaagaauuacauagacaaacaacuccugcccauccuuaacaaacaaaguuguaguauccccaacaucgaaacaguaaucgaauuucagcagaaaaacaaccgccuccucgaaaucacacgagaguucucggucaacgccggcgucaccacccccguaucaaccuacaugcuaacaaacuccgaacuacuuucccucaucaaugacaugcccauaaccaacgaccaaaagaaacuaauguccaauaacguccagauaguccgucaacaguccuacucaaucaugugcauaauuaaagaagaaguacucgccuacgucguccaacuaccccucuauggagucaucgacacccccugcuggaaacuccacacaucaccccuaugcacaaccaacaccaaagaaggcuccaacaucugccucacaagaaccgaccgcggcugguacugcgacaacgcuggcuccgucucguucuucccacaagccgaaaccugcaaaguccaaucaaaccgggucuucugcgacaccaugaacucccucacucucccaagcgaagucaaccuaugcaacaucgacaucuucaacccaaaauacgacuguaaaaucaugacuucgaaaacagacgucuccucaucaguaaucacauccuuaggcgccaucguguccugcuacgguaagaccaaaugcacagccuccaacaaaugccggggcaucaucaaaaccuucagcaacgguugugauuacgucuccaacaaaggaguagacaccgucuccguaggaaacacccucuacuacgucaacaagcaagaaggccaaucccucuacgucaaaggggaacccaucaucaacuucuacgacccacucgucuuccccuccgacgaguucgacgcaagcaucucccaagucaacgaaaagaucaaccaaucacuagccuucauccgcaaauccgacgaacuccuccacaacguuaacguaggcaaauccaccaccaacaucaugaucacaaccaucaucauagucauaauagucauccuacuacuccucaucgccguaggucuauuccuauacuguaaagcucgaucaacccccgucacacucuccaaagaucaacucucaggaaucaacaacaucgccuucuccaacuaaggacuaguuauaagacugacuagcccgaugggccucccaacgggcccuccuccccuccuugcaccgagauuaauaaaaaaaaaaaaaaaaaaaaaaaaaaaaaaaaaaaaaaaaaaaaaaaaaaaaaaaaaaaaaaaaugcaucccccccccccccccccccccccccccccccaaaggcucuuuucagagccaccagaauu

SEQ ID NO: 19475 - protein, 515 aa, Artificial Sequence
  derived and/or modified protein sequence (artificial) from HRSV(Memphis-37)__AIY60640.1__F-del_DSCav1_mut8
MELPILKTNAITTILAAVTLCFASSQNITEEFYQSTCSAVSKGYLGALRTGWYTSVITIELSNIKEIKCNGTDAKVKLIKQELDKYKNAVTDLQLLMQSTPAAGSGSAIASGIAVCKVLHLEGEVNKIKNALLSTNKAVVSLSGCGVSVLTFKVLDLKNYIDKQLLPILNKQSCSIPNIETVIEFQQKNNRLLEITREFSVNAGVTTPVSTYMLTNSELLSLINDMPITNDQKKLMSNNVQIVRQQSYSIMCIIKEEVLAYVVQLPLYGVIDTPCWKLHTSPLCTTNTKEGSNICLTRTDRGWYCDNAGSVSFFPQAETCKVQSNRVFCDTMNSLTLPSEVNLCNIDIFNPKYDCKIMTSKTDVSSSVITSLGAIVSCYGKTKCTASNKCRGIIKTFSNGCDYVSNKGVDTVSVGNTLYYVNKQEGQSLYVKGEPIINFYDPLVFPSDEFDASISQVNEKINQSLAFIRKSDELLHNVNVGKSTTNIMITTIIIVIIVILLLLIAVGLFLYCKAR

SEQ ID NO: 19476 - RNA, 1548 nt, Artificial Sequence
  derived and/or modified CDS sequence (opt1) from HRSV(Memphis-37)__AIY60640.1__F-del_DSCav1_mut8
auggagcugcccauccucaagaccaacgccaucaccacgauccuggccgcggugacccugugcuucgccagcucccagaacaucaccgaggaguucuaccagagcacgugcuccgccgucagcaagggcuaccucggcgcccugcgcaccgggugguacaccagcgugaucaccaucgagcuguccaacaucaaggagaucaagugcaacggcaccgacgccaaggugaagcucaucaagcaggagcuggacaaguacaagaacgcggucacggaccugcagcuccugaugcagagcaccccggccgccggcuccgggagcgcgaucgccuccggcaucgccgucugcaaggugcugcaccucgagggcgaggugaacaagaucaagaacgcccugcuguccaccaacaaggccgucgugagccucuccggcugcggggugagcguccugaccuucaaggugcuggaccucaagaacuacaucgacaagcagcugcugcccauccugaacaagcagagcugcuccauccccaacaucgagaccgucaucgaguuccagcagaagaacaaccgccuccuggagaucacgcgggaguucagcgugaacgcgggcgugaccacccccgucuccaccuacaugcugacgaacagcgagcuccugucccugaucaacgacaugccgaucaccaacgaccagaagaagcucaugagcaacaacgugcagaucgugcgccagcaguccuacagcaucaugugcaucaucaaggaggagguccuggccuacguggugcagcugccccucuacggggucaucgacacccccugcuggaagcugcacaccagcccccugugcacgaccaacaccaaggagggcuccaacaucugccucacccggacggaccgcgggugguacugcgacaacgccggcagcguguccuucuucccgcaggccgagaccugcaagguccagagcaaccggguguucugcgacaccaugaacucccugacccugcccagcgaggugaaccucugcaacaucgacaucuucaaccccaaguacgacugcaagaucaugacguccaagaccgacgucagcuccagcgugaucaccucccugggcgccaucgugagcugcuacgggaagaccaagugcacggcgagcaacaagugccgcggcaucaucaagaccuucuccaacgggugcgacuacgucagcaacaagggcguggacaccguguccgucggcaacacccuguacuacgugaacaagcaggagggccagagccucuacgugaagggggagcccaucaucaacuucuacgacccgcuggucuuccccuccgacgaguucgacgccagcaucucccaggugaacgagaagaucaaccagagccuggccuucauccggaaguccgacgagcuccugcacaacgugaacgucggcaagagcaccacgaacaucaugaucaccaccaucaucaucgugaucaucgugauccugcugcuccugaucgccgucgggcuguuccucuacugcaaggcccgcuga

SEQ ID NO: 19477 - RNA, 1548 nt, Artificial Sequence
  derived and/or modified CDS sequence (opt1) from HRSV(Memphis-37)__AIY60640.1__F-del_DSCav1_mut8
auggagcugcccauccucaagaccaacgccaucaccacgauccuggccgcggugacccugugcuucgccagcucccagaacaucaccgaggaguucuaccagagcacgugcuccgccgucagcaagggcuaccucggggcccugcgcaccggcugguacaccuccgugaucaccaucgagcugagcaacaucaaggagaucaagugcaacgggaccgacgccaaggugaagcucaucaagcaggagcuggacaaguacaagaacgcggucacggaccugcagcuccugaugcaguccaccccggccgccggcagcggguccgccaucgcgagcggcaucgccgugugcaaggugcugcaccucgagggcgaggucaacaagaucaagaacgcccugcuguccaccaacaaggccguggugagccucuccgggugcggcgucagcgugcugaccuucaaggugcuggaccucaagaacuacaucgacaagcagcugcugcccauccucaacaagcaguccugcagcauccccaacaucgagacggucaucgaguuccagcagaagaacaaccggcugcuggagaucacccgcgaguucuccgugaacgccggggugaccacccccgucagcacguacaugcucaccaacuccgagcugcugagccucaucaacgacaugccgaucaccaacgaccagaagaagcugaugagcaacaacgugcagaucgugcggcagcaguccuacagcaucaugugcaucaucaaggaggagguccuggcguacguggugcagcucccccuguacggcgucaucgacacccccugcuggaagcugcacacgagcccccucugcaccaccaacaccaaggagggguccaacaucugccugacgcgcaccgaccggggcugguacugcgacaacgccggcuccgugagcuucuucccgcaggccgagaccugcaaggugcaguccaaccgcgucuucugcgacaccaugaacagccugacgcuccccuccgaggugaaccugugcaacaucgacaucuucaaccccaaguacgacugcaagaucaugaccagcaagaccgacgucuccagcuccgugaucaccagccugggggccaucguguccugcuacggcaagacgaagugcaccgccagcaacaagugccgggggaucaucaagaccuucuccaacggcugcgacuacgucagcaacaagggcguggacaccguguccgucgggaacacgcucuacuacgugaacaagcaggagggccagagccuguacgugaagggggagcccaucaucaacuucuacgacccgcuggucuuccccagcgacgaguucgacgcguccaucagccaggugaacgagaagaucaaccagucccucgccuucauccgcaagagcgacgagcugcugcacaacgugaacgucggcaaguccaccaccaacaucaugaucaccaccaucaucaucgugaucaucgugauccuccugcugcucaucgccgucgggcuguuccuguacugcaaggcccgguga

SEQ ID NO: 19478 - RNA, 1548 nt, Artificial Sequence
  derived and/or modified CDS sequence (opt2) from HRSV(Memphis-37)__AIY60640.1__F-del_DSCav1_mut8
auggagcuccccauccucaagaccaacgccaucaccaccauccucgccgccgucacccucugcuucgccuccucccagaacaucaccgaggaguucuaccaguccaccugcuccgccgucuccaagggcuaccucggcgcccuccgcaccggcugguacaccuccgucaucaccaucgagcucuccaacaucaaggagaucaagugcaacggcaccgacgccaaggucaagcucaucaagcaggagcucgacaaguacaagaacgccgucaccgaccuccagcuccucaugcaguccacccccgccgccggcuccggcuccgccaucgccuccggcaucgccgucugcaagguccuccaccucgagggcgaggucaacaagaucaagaacgcccuccucuccaccaacaaggccgucgucucccucuccggcugcggcgucuccguccucaccuucaagguccucgaccucaagaacuacaucgacaagcagcuccuccccauccucaacaagcaguccugcuccauccccaacaucgagaccgucaucgaguuccagcagaagaacaaccgccuccucgagaucacccgcgaguucuccgucaacgccggcgucaccacccccgucuccaccuacaugcucaccaacuccgagcuccucucccucaucaacgacaugcccaucaccaacgaccagaagaagcucauguccaacaacguccagaucguccgccagcaguccuacuccaucaugugcaucaucaaggaggagguccucgccuacgucguccagcucccccucuacggcgucaucgacacccccugcuggaagcuccacaccuccccccucugcaccaccaacaccaaggagggcuccaacaucugccucacccgcaccgaccgcggcugguacugcgacaacgccggcuccgucuccuucuucccccaggccgagaccugcaagguccaguccaaccgcgucuucugcgacaccaugaacucccucacccuccccuccgaggucaaccucugcaacaucgacaucuucaaccccaaguacgacugcaagaucaugaccuccaagaccgacgucuccuccuccgucaucaccucccucggcgccaucgucuccugcuacggcaagaccaagugcaccgccuccaacaagugccgcggcaucaucaagaccuucuccaacggcugcgacuacgucuccaacaagggcgucgacaccgucuccgucggcaacacccucuacuacgucaacaagcaggagggccagucccucuacgucaagggcgagcccaucaucaacuucuacgacccccucgucuuccccuccgacgaguucgacgccuccaucucccaggucaacgagaagaucaaccagucccucgccuucauccgcaaguccgacgagcuccuccacaacgucaacgucggcaaguccaccaccaacaucaugaucaccaccaucaucaucgucaucaucgucauccuccuccuccucaucgccgucggccucuuccucuacugcaaggcccgcuga

SEQ ID NO: 19479 - RNA, 1548 nt, Artificial Sequence
  derived and/or modified CDS sequence (opt3) from HRSV(Memphis-37)__AIY60640.1__F-del_DSCav1_mut8
auggagcugcccauccucaagaccaacgccauuacaacuauacuugcugcagugacgcugugcuucgccagcucccagaauaucaccgaagaguuuuaccaaucuacauguucagcggucaguaaaggcuauuugggggcuuuaagaacuggaugguacaccagcguuauuacaaucgaacuguccaacauuaaggagaucaaaugcaaugguaccgacgccaaggugaaacuaauaaagcaggaacucgauaaguauaaaaacgcaguaacugaccugcagcuucugaugcagucuacuccugccgcuggcucggggucagcaaucgccagcggaauugcuguguguaaggucuugcaccucgagggcgaggugaauaaaaucaagaacgcccugcugaguaccaauaaagcgguugugucccucucugguugcggggucagcguguuaacguucaagguacuggaucuuaagaacuacauugacaaacaauugcugccaauccuaaauaagcaguccuguucaauaccgaacauugaaacuguuaucgaguuucagcagaaaaauaacaggcuccuggaaauuacccgggaguucagugugaaugcaggagucacaacucccgugagcaccuauaugcuuacaaacucugagcuguugucccucaucaaugauaugccuaucaccaacgaccaaaagaaacugaugucaaacaaugugcagauuguccgccagcagagcuacaguauaaugugcaucauuaaggaagagguuuuagccuaugugguacaacugccacucuacggcgugaucgauacgcccuguuggaaacuucauacuucuccucugugcacaaccaacacuaaggaaggcuccaauauauguuugacacgaaccgaccgugggugguacugcgauaacgcuggaagcgucucguuuuucccacaggccgagacguguaaggugcagucuaauagaguuuucugcgacaccaugaacucccuaacacugcccucagaagugaaucucugcaacauugauaucuucaauccuaaauaugacuguaagaucaugacaaguaaaaccgaugucagcuccucugugauuacaagccugggugcaaucguaucaugcuacggcaagacuaaauguaccgcuaguaacaagugcagggggauuauaaagacauuuuccaauggaugugacuauguuagcaacaaaggcguggacaccgucucuguggguaauacucuuuacuaugucaacaagcaagaggggcagucacuguacgugaaaggagagccaaucauuaauuucuaugauccguugguuuuucccagugacgaauuugaugccagcaucucccaggugaacgagaagaucaaccagucucucgcguuuauucggaaaucggacgaacuguuacacaauguaaacgucggcaagagcacgacaaauauaaugaucaccacuauuaucauugugaucauaguuauccugcuacuccugauugccgugggccuuuucuuguacugcaaggcacgcuga

SEQ ID NO: 19480 - RNA, 1548 nt, Artificial Sequence
  derived and/or modified CDS sequence (opt4) from HRSV(Memphis-37)__AIY60640.1__F-del_DSCav1_mut8
auggagcugcccauccugaagaccaacgccaucaccaccauccuggccgccgugacccugugcuucgccagcagccagaacaucaccgaggaguucuaccagagcaccugcagcgccgugagcaagggcuaccugggcgcccugagaaccggcugguacaccagcgugaucaccaucgagcugagcaacaucaaggagaucaagugcaacggcaccgacgccaaggugaagcugaucaagcaggagcuggacaaguacaagaacgccgugaccgaccugcagcugcugaugcagagcacccccgccgccggcagcggcagcgccaucgccagcggcaucgccgugugcaaggugcugcaccuggagggcgaggugaacaagaucaagaacgcccugcugagcaccaacaaggccguggugagccugagcggcugcggcgugagcgugcugaccuucaaggugcuggaccugaagaacuacaucgacaagcagcugcugcccauccugaacaagcagagcugcagcauccccaacaucgagaccgugaucgaguuccagcagaagaacaacagacugcuggagaucaccagagaguucagcgugaacgccggcgugaccacccccgugagcaccuacaugcugaccaacagcgagcugcugagccugaucaacgacaugcccaucaccaacgaccagaagaagcugaugagcaacaacgugcagaucgugagacagcagagcuacagcaucaugugcaucaucaaggaggaggugcuggccuacguggugcagcugccccuguacggcgugaucgacacccccugcuggaagcugcacaccagcccccugugcaccaccaacaccaaggagggcagcaacaucugccugaccagaaccgacagaggcugguacugcgacaacgccggcagcgugagcuucuucccccaggccgagaccugcaaggugcagagcaacagaguguucugcgacaccaugaacagccugacccugcccagcgaggugaaccugugcaacaucgacaucuucaaccccaaguacgacugcaagaucaugaccagcaagaccgacgugagcagcagcgugaucaccagccugggcgccaucgugagcugcuacggcaagaccaagugcaccgccagcaacaagugcagaggcaucaucaagaccuucagcaacggcugcgacuacgugagcaacaagggcguggacaccgugagcgugggcaacacccuguacuacgugaacaagcaggagggccagagccuguacgugaagggcgagcccaucaucaacuucuacgacccccugguguuccccagcgacgaguucgacgccagcaucagccaggugaacgagaagaucaaccagagccuggccuucaucagaaagagcgacgagcugcugcacaacgugaacgugggcaagagcaccaccaacaucaugaucaccaccaucaucaucgugaucaucgugauccugcugcugcugaucgccgugggccuguuccuguacugcaaggccagauga

SEQ ID NO: 19481 - RNA, 1548 nt, Artificial Sequence
  derived and/or modified CDS sequence (opt5) from HRSV(Memphis-37)__AIY60640.1__F-del_DSCav1_mut8
auggagcugcccauccucaagaccaacgccauuacaacgauccuggcugccgugacccuuugcuucgcgagcucccagaauauuacagaagaguuuuaccaaucuaccuguagcgcugucuccaaaggcuaucugggggcccucagaacaggaugguacaccucuguuaucacaauugaacugagcaacaucaaggagaucaaaugcaauggcaccgacgccaaggugaaacuuauuaagcaggaacuggauaaguauaaaaacgcugugacggaccuccagcugcugaugcaguccaccccugccgcugggucuggaagcgccaucgcguccggcauugccgucuguaaggugcuccaccuggagggggagguuaauaaaaucaagaacgcccuucugagcacaaauaaagcuguggucucucucuccggaugcggcgugagcguucugaccuucaaggugcuugaucugaagaacuacauugacaaacaacuccugccgauccugaauaagcagucuuguuccauucccaacaucgaaacagucaucgaguuucagcagaaaaauaaccggcuccuggaaauuacccgcgaguucagcgugaaugcuggcgugacgacaccugucucuaccuauaugcuuacaaacuccgagcugcucagccugaucaaugauaugcccauuaccaacgaccaaaagaaacuuauguccaacaauguucagaucgugagacagcagucuuacagcauuaugugcaucaucaaggaagaggugcuggccuaugucgugcaacucccucuguacgggguuauugauacccccuguuggaaacugcauacauccccucucugcacgaccaacacaaaggaaggaagcaauaucugucugacccggacagaccgcggcugguacugcgauaacgcggggucuguguccuuuuucccgcaggccgagaccuguaagguccagagcaauagaguguuuugcgacacgaugaacucucuuacacugcccagcgaaguuaaucucugcaacauugauaucuucaauccuaaauaugacuguaagauuaugaccuccaaaaccgaugugucuagcuccgucaucacaagccugggagcuaucgugucuugcuacggcaagaccaaauguacagccuccaacaagugccgggggauuaucaagacguuuagcaauggaugugacuaugucucuaacaaaggcguggacaccguuuccgugggcaauacacuuuacuaugucaacaagcaagaggggcagagccuguacgugaaaggagagcccauuaucaauuucuaugauccucucguuuuucccuccgacgaguucgaugcuucuauuagccaggugaacgaaaagaucaaccagucccuggccuuuauucgcaaaucugacgaacugcuccacaaugucaacgugggcaagagcaccacaaauaucaugaucaccacgauuaucauugugaucauuguuauccugcuucugcucaucgccgucgggcuguuccuguacugcaaggcuagauga

SEQ ID NO: 19482 - RNA, 1548 nt, Artificial Sequence
  derived and/or modified CDS sequence (opt6) from HRSV(Memphis-37)__AIY60640.1__F-del_DSCav1_mut8
auggaacuacccauacuaaaaacaaacgcaauuacaacaauacuugccgcaguaaccuuaugcuuugccucaucccaaaacauaacagaagaauuuuaucaaucaacaugcuccgcaguaucaaaaggauaccuaggcgcucuaagaacaggaugguacacauccguaaucacaauagaacuauccaauauaaaagaaauaaaauguaauggaacagaugcaaaaguuaaauuaauaaaacaagaacuagacaaauacaaaaacgcaguuaccgaucuccaacuauuaaugcaaucaacaccagcugcaggaaguggaagcgccauagcaagcggaauagcagucugcaaaguauuacaucuugaaggcgaaguaaacaaaaucaaaaaugcccuccucucaacaaacaaagcuguaguaucccuaucaggaugcgguguaucuguucuuacauuuaaaguacucgaucuaaaaaacuacaucgauaaacaguuacuuccaauacucaacaaacaaucauguagcauaccaaacauagaaacaguaauagaauuucaacaaaaaaacaaucgacuacucgaaauaacuagagaauuuucuguaaacgcuggaguaaccacaccagugucuaccuauaugcuuacaaauagcgaacuccuaucacuaaucaaugacaugccaauaacaaaugaccagaaaaaacucaugucaaauaacguacaaauaguacgacaacaaagcuacuccauaaugugcauaaucaaagaagaaguauuagccuacguuguucaacuaccauuauauggaguuauagacacuccaugcuggaaauuacauacaagcccacucuguacaacaaacacaaaagaaggcucaaacauaugcuuaacaagaacagauagaggaugguacugcgauaacgcaggcucagucucauuuuuuccacaagccgaaaccugcaaaguacaaucaaauagaguuuuuugcgacacaaugaacucacucacucuaccaagugaaguaaaucucuguaauaucgacauauucaacccaaaauaugacugcaaaauaaugacaucuaaaaccgauguauccucaagcguaaucacaucauuaggagcuauaguuuccugcuacgguaaaacaaaaugcacagcauccaacaaaugucgcgguaucaucaaaacauucuccaacggaugugauuacguaucaaacaaaggugucgacaccguaagcguaggcaacacuuuauacuauguaaacaaacaagaaggacaaagucuauauguaaaaggagaaccaauaauaaacuucuaugacccccuaguauucccuuccgacgaauuugaugcaagcauuucacaaguuaacgaaaaaaucaaucaaucccuugcuuucauaagaaaaucagacgaauuacuacacaacguaaacguaggaaaaagcacaacaaauaucaugauuacaacaauaauaauuguaauaauaguaauacuccucuuacuuauagcagucggcuuauuccuuuacugcaaagcaagauaa

SEQ ID NO: 19483 - RNA, 1548 nt, Artificial Sequence
  derived and/or modified CDS sequence (opt11) from HRSV(Memphis-37)__AIY60640.1__F-del_DSCav1_mut8
auggaacuccccauccuaaaaaccaacgcaaucaccaccauccucgccgccguaacacucugcuuugcaagcucccaaaacaucaccgaagaauuuuaccaaucuaccugcagcgccguaucuaaaggauaccuaggagcccucagaaccgguugguacaccucugucaucacaauagaacucuccaacaucaaagaaaucaaaugcaacggcaccgacgccaaagucaaacucaucaaacaagaacucgacaaauauaaaaacgccguaaccgaccuccaacuccucaugcaauccacccccgccgccggcaguggcuccgcuaucgccuccggaaucgccguuugcaaaguccugcaccuagaaggcgaagucaacaaaaucaaaaacgcccugcucucaaccaacaaagcugucguaagccucuccggcugcggagucuccguccuuaccuucaaaguacucgaccuuaaaaacuacaucgacaaacaacuucuccccauacucaauaaacaauccugcuccauacccaacaucgaaacagucaucgaguuccaacagaaaaauaaccgccuccucgaaauaacccgcgaguucuccgucaacgcaggcgucaccaccccagucuccaccuacaugcugacaaacuccgaacuccuaucccucaucaacgacaugcccaucaccaacgaccaaaagaaacucaugagcaauaacguccaaaucguacgacaacaauccuacagcaucauguguaucaucaaagaagaaguacucgccuacgucguccaacucccacuauacggcgucaucgacacaccaugcuggaaacuucacaccuccccacucugcaccacaaacacaaaagaaggcuccaacaucugccuuacccgaaccgaccgcgggugguacugcgacaacgccggaucagucucguucuuuccccaagccgaaaccugcaaaguacaaucaaaucgcgucuucugcgacaccaugaacuccuuaacacuaccauccgaaguaaaccucugcaacauagacaucuucaacccaaaauacgacugcaaaaucaugaccuccaaaaccgacguauccuccuccguaaucaccagccucggcgcaauagucucaugcuacggcaaaaccaaaugcaccgccuccaacaaaugccgcggcaucauaaaaacuuucucuaacggaugcgacuacgucagcaacaaaggcgucgacaccguauccguagguaauacacuuuacuacgucaauaaacaagaaggccaaucccucuacgucaaaggagaacccaucauaaacuucuacgacccccucgucuuccccuccgacgaguucgacgccuccaucagccaggucaacgaaaagaucaaccaaucacucgccuucauccgcaaaagcgacgaacuccuccacaacguaaacgucggcaaauccacaaccaacauaaugaucaccacuaucaucaucgugauaaucgucauuuuacuucuccucaucgccguaggccucuuccuauacugcaaagcccgcuaa

SEQ ID NO: 19484 - RNA, 1824 nt, Artificial Sequence
  mRNA product Design a-1 comprising derived and/or modified sequence from HRSV(Memphis-37)__AIY60640.1__F-del_DSCav1_mut8 (opt1)
gggagagucccgcagucggcguccagcggcucugcuuguucgugugugugucguugcaggccuuauucaagcuuaccauggagcugcccauccucaagaccaacgccaucaccacgauccuggccgcggugacccugugcuucgccagcucccagaacaucaccgaggaguucuaccagagcacgugcuccgccgucagcaagggcuaccucggcgcccugcgcaccgggugguacaccagcgugaucaccaucgagcuguccaacaucaaggagaucaagugcaacggcaccgacgccaaggugaagcucaucaagcaggagcuggacaaguacaagaacgcggucacggaccugcagcuccugaugcagagcaccccggccgccggcuccgggagcgcgaucgccuccggcaucgccgucugcaaggugcugcaccucgagggcgaggugaacaagaucaagaacgcccugcuguccaccaacaaggccgucgugagccucuccggcugcggggugagcguccugaccuucaaggugcuggaccucaagaacuacaucgacaagcagcugcugcccauccugaacaagcagagcugcuccauccccaacaucgagaccgucaucgaguuccagcagaagaacaaccgccuccuggagaucacgcgggaguucagcgugaacgcgggcgugaccacccccgucuccaccuacaugcugacgaacagcgagcuccugucccugaucaacgacaugccgaucaccaacgaccagaagaagcucaugagcaacaacgugcagaucgugcgccagcaguccuacagcaucaugugcaucaucaaggaggagguccuggccuacguggugcagcugccccucuacggggucaucgacacccccugcuggaagcugcacaccagcccccugugcacgaccaacaccaaggagggcuccaacaucugccucacccggacggaccgcgggugguacugcgacaacgccggcagcguguccuucuucccgcaggccgagaccugcaagguccagagcaaccggguguucugcgacaccaugaacucccugacccugcccagcgaggugaaccucugcaacaucgacaucuucaaccccaaguacgacugcaagaucaugacguccaagaccgacgucagcuccagcgugaucaccucccugggcgccaucgugagcugcuacgggaagaccaagugcacggcgagcaacaagugccgcggcaucaucaagaccuucuccaacgggugcgacuacgucagcaacaagggcguggacaccguguccgucggcaacacccuguacuacgugaacaagcaggagggccagagccucuacgugaagggggagcccaucaucaacuucuacgacccgcuggucuuccccuccgacgaguucgacgccagcaucucccaggugaacgagaagaucaaccagagccuggccuucauccggaaguccgacgagcuccugcacaacgugaacgucggcaagagcaccacgaacaucaugaucaccaccaucaucaucgugaucaucgugauccugcugcuccugaucgccgucgggcuguuccucuacugcaaggcccgcugaggacuagucccuguucccagagcccacuuuuuuuucuuuuuuugaaauaaaauagccugucuuucagaucuaaaaaaaaaaaaaaaaaaaaaaaaaaaaaaaaaaaaaaaaaaaaaaaaaaaaaaaaaaaaaaaaugcaucccccccccccccccccccccccccccccccaaaggcucuuuucagagccaccagaauu

SEQ ID NO: 19485 - RNA, 1824 nt, Artificial Sequence
  mRNA product Design a-1 comprising derived and/or modified sequence from HRSV(Memphis-37)__AIY60640.1__F-del_DSCav1_mut8 (opt1)
gggagagucccgcagucggcguccagcggcucugcuuguucgugugugugucguugcaggccuuauucaagcuuaccauggagcugcccauccucaagaccaacgccaucaccacgauccuggccgcggugacccugugcuucgccagcucccagaacaucaccgaggaguucuaccagagcacgugcuccgccgucagcaagggcuaccucggggcccugcgcaccggcugguacaccuccgugaucaccaucgagcugagcaacaucaaggagaucaagugcaacgggaccgacgccaaggugaagcucaucaagcaggagcuggacaaguacaagaacgcggucacggaccugcagcuccugaugcaguccaccccggccgccggcagcggguccgccaucgcgagcggcaucgccgugugcaaggugcugcaccucgagggcgaggucaacaagaucaagaacgcccugcuguccaccaacaaggccguggugagccucuccgggugcggcgucagcgugcugaccuucaaggugcuggaccucaagaacuacaucgacaagcagcugcugcccauccucaacaagcaguccugcagcauccccaacaucgagacggucaucgaguuccagcagaagaacaaccggcugcuggagaucacccgcgaguucuccgugaacgccggggugaccacccccgucagcacguacaugcucaccaacuccgagcugcugagccucaucaacgacaugccgaucaccaacgaccagaagaagcugaugagcaacaacgugcagaucgugcggcagcaguccuacagcaucaugugcaucaucaaggaggagguccuggcguacguggugcagcucccccuguacggcgucaucgacacccccugcuggaagcugcacacgagcccccucugcaccaccaacaccaaggagggguccaacaucugccugacgcgcaccgaccggggcugguacugcgacaacgccggcuccgugagcuucuucccgcaggccgagaccugcaaggugcaguccaaccgcgucuucugcgacaccaugaacagccugacgcuccccuccgaggugaaccugugcaacaucgacaucuucaaccccaaguacgacugcaagaucaugaccagcaagaccgacgucuccagcuccgugaucaccagccugggggccaucguguccugcuacggcaagacgaagugcaccgccagcaacaagugccgggggaucaucaagaccuucuccaacggcugcgacuacgucagcaacaagggcguggacaccguguccgucgggaacacgcucuacuacgugaacaagcaggagggccagagccuguacgugaagggggagcccaucaucaacuucuacgacccgcuggucuuccccagcgacgaguucgacgcguccaucagccaggugaacgagaagaucaaccagucccucgccuucauccgcaagagcgacgagcugcugcacaacgugaacgucggcaaguccaccaccaacaucaugaucaccaccaucaucaucgugaucaucgugauccuccugcugcucaucgccgucgggcuguuccuguacugcaaggcccggugaggacuagucccuguucccagagcccacuuuuuuuucuuuuuuugaaauaaaauagccugucuuucagaucuaaaaaaaaaaaaaaaaaaaaaaaaaaaaaaaaaaaaaaaaaaaaaaaaaaaaaaaaaaaaaaaaugcaucccccccccccccccccccccccccccccccaaaggcucuuuucagagccaccagaauu

SEQ ID NO: 19486 - RNA, 1824 nt, Artificial Sequence
  mRNA product Design a-1 comprising derived and/or modified sequence from HRSV(Memphis-37)__AIY60640.1__F-del_DSCav1_mut8 (opt2)
gggagagucccgcagucggcguccagcggcucugcuuguucgugugugugucguugcaggccuuauucaagcuuaccauggagcuccccauccucaagaccaacgccaucaccaccauccucgccgccgucacccucugcuucgccuccucccagaacaucaccgaggaguucuaccaguccaccugcuccgccgucuccaagggcuaccucggcgcccuccgcaccggcugguacaccuccgucaucaccaucgagcucuccaacaucaaggagaucaagugcaacggcaccgacgccaaggucaagcucaucaagcaggagcucgacaaguacaagaacgccgucaccgaccuccagcuccucaugcaguccacccccgccgccggcuccggcuccgccaucgccuccggcaucgccgucugcaagguccuccaccucgagggcgaggucaacaagaucaagaacgcccuccucuccaccaacaaggccgucgucucccucuccggcugcggcgucuccguccucaccuucaagguccucgaccucaagaacuacaucgacaagcagcuccuccccauccucaacaagcaguccugcuccauccccaacaucgagaccgucaucgaguuccagcagaagaacaaccgccuccucgagaucacccgcgaguucuccgucaacgccggcgucaccacccccgucuccaccuacaugcucaccaacuccgagcuccucucccucaucaacgacaugcccaucaccaacgaccagaagaagcucauguccaacaacguccagaucguccgccagcaguccuacuccaucaugugcaucaucaaggaggagguccucgccuacgucguccagcucccccucuacggcgucaucgacacccccugcuggaagcuccacaccuccccccucugcaccaccaacaccaaggagggcuccaacaucugccucacccgcaccgaccgcggcugguacugcgacaacgccggcuccgucuccuucuucccccaggccgagaccugcaagguccaguccaaccgcgucuucugcgacaccaugaacucccucacccuccccuccgaggucaaccucugcaacaucgacaucuucaaccccaaguacgacugcaagaucaugaccuccaagaccgacgucuccuccuccgucaucaccucccucggcgccaucgucuccugcuacggcaagaccaagugcaccgccuccaacaagugccgcggcaucaucaagaccuucuccaacggcugcgacuacgucuccaacaagggcgucgacaccgucuccgucggcaacacccucuacuacgucaacaagcaggagggccagucccucuacgucaagggcgagcccaucaucaacuucuacgacccccucgucuuccccuccgacgaguucgacgccuccaucucccaggucaacgagaagaucaaccagucccucgccuucauccgcaaguccgacgagcuccuccacaacgucaacgucggcaaguccaccaccaacaucaugaucaccaccaucaucaucgucaucaucgucauccuccuccuccucaucgccgucggccucuuccucuacugcaaggcccgcugaggacuagucccuguucccagagcccacuuuuuuuucuuuuuuugaaauaaaauagccugucuuucagaucuaaaaaaaaaaaaaaaaaaaaaaaaaaaaaaaaaaaaaaaaaaaaaaaaaaaaaaaaaaaaaaaaugcaucccccccccccccccccccccccccccccccaaaggcucuuuucagagccaccagaauu

SEQ ID NO: 19487 - RNA, 1824 nt, Artificial Sequence
  mRNA product Design a-1 comprising derived and/or modified sequence from HRSV(Memphis-37)__AIY60640.1__F-del_DSCav1_mut8 (opt3)
gggagagucccgcagucggcguccagcggcucugcuuguucgugugugugucguugcaggccuuauucaagcuuaccauggagcugcccauccucaagaccaacgccauuacaacuauacuugcugcagugacgcugugcuucgccagcucccagaauaucaccgaagaguuuuaccaaucuacauguucagcggucaguaaaggcuauuugggggcuuuaagaacuggaugguacaccagcguuauuacaaucgaacuguccaacauuaaggagaucaaaugcaaugguaccgacgccaaggugaaacuaauaaagcaggaacucgauaaguauaaaaacgcaguaacugaccugcagcuucugaugcagucuacuccugccgcuggcucggggucagcaaucgccagcggaauugcuguguguaaggucuugcaccucgagggcgaggugaauaaaaucaagaacgcccugcugaguaccaauaaagcgguugugucccucucugguugcggggucagcguguuaacguucaagguacuggaucuuaagaacuacauugacaaacaauugcugccaauccuaaauaagcaguccuguucaauaccgaacauugaaacuguuaucgaguuucagcagaaaaauaacaggcuccuggaaauuacccgggaguucagugugaaugcaggagucacaacucccgugagcaccuauaugcuuacaaacucugagcuguugucccucaucaaugauaugccuaucaccaacgaccaaaagaaacugaugucaaacaaugugcagauuguccgccagcagagcuacaguauaaugugcaucauuaaggaagagguuuuagccuaugugguacaacugccacucuacggcgugaucgauacgcccuguuggaaacuucauacuucuccucugugcacaaccaacacuaaggaaggcuccaauauauguuugacacgaaccgaccgugggugguacugcgauaacgcuggaagcgucucguuuuucccacaggccgagacguguaaggugcagucuaauagaguuuucugcgacaccaugaacucccuaacacugcccucagaagugaaucucugcaacauugauaucuucaauccuaaauaugacuguaagaucaugacaaguaaaaccgaugucagcuccucugugauuacaagccugggugcaaucguaucaugcuacggcaagacuaaauguaccgcuaguaacaagugcagggggauuauaaagacauuuuccaauggaugugacuauguuagcaacaaaggcguggacaccgucucuguggguaauacucuuuacuaugucaacaagcaagaggggcagucacuguacgugaaaggagagccaaucauuaauuucuaugauccguugguuuuucccagugacgaauuugaugccagcaucucccaggugaacgagaagaucaaccagucucucgcguuuauucggaaaucggacgaacuguuacacaauguaaacgucggcaagagcacgacaaauauaaugaucaccacuauuaucauugugaucauaguuauccugcuacuccugauugccgugggccuuuucuuguacugcaaggcacgcugaggacuagucccuguucccagagcccacuuuuuuuucuuuuuuugaaauaaaauagccugucuuucagaucuaaaaaaaaaaaaaaaaaaaaaaaaaaaaaaaaaaaaaaaaaaaaaaaaaaaaaaaaaaaaaaaaugcaucccccccccccccccccccccccccccccccaaaggcucuuuucagagccaccagaauu

SEQ ID NO: 19488 - RNA, 1824 nt, Artificial Sequence
  mRNA product Design a-1 comprising derived and/or modified sequence from HRSV(Memphis-37)__AIY60640.1__F-del_DSCav1_mut8 (opt4)
gggagagucccgcagucggcguccagcggcucugcuuguucgugugugugucguugcaggccuuauucaagcuuaccauggagcugcccauccugaagaccaacgccaucaccaccauccuggccgccgugacccugugcuucgccagcagccagaacaucaccgaggaguucuaccagagcaccugcagcgccgugagcaagggcuaccugggcgcccugagaaccggcugguacaccagcgugaucaccaucgagcugagcaacaucaaggagaucaagugcaacggcaccgacgccaaggugaagcugaucaagcaggagcuggacaaguacaagaacgccgugaccgaccugcagcugcugaugcagagcacccccgccgccggcagcggcagcgccaucgccagcggcaucgccgugugcaaggugcugcaccuggagggcgaggugaacaagaucaagaacgcccugcugagcaccaacaaggccguggugagccugagcggcugcggcgugagcgugcugaccuucaaggugcuggaccugaagaacuacaucgacaagcagcugcugcccauccugaacaagcagagcugcagcauccccaacaucgagaccgugaucgaguuccagcagaagaacaacagacugcuggagaucaccagagaguucagcgugaacgccggcgugaccacccccgugagcaccuacaugcugaccaacagcgagcugcugagccugaucaacgacaugcccaucaccaacgaccagaagaagcugaugagcaacaacgugcagaucgugagacagcagagcuacagcaucaugugcaucaucaaggaggaggugcuggccuacguggugcagcugccccuguacggcgugaucgacacccccugcuggaagcugcacaccagcccccugugcaccaccaacaccaaggagggcagcaacaucugccugaccagaaccgacagaggcugguacugcgacaacgccggcagcgugagcuucuucccccaggccgagaccugcaaggugcagagcaacagaguguucugcgacaccaugaacagccugacccugcccagcgaggugaaccugugcaacaucgacaucuucaaccccaaguacgacugcaagaucaugaccagcaagaccgacgugagcagcagcgugaucaccagccugggcgccaucgugagcugcuacggcaagaccaagugcaccgccagcaacaagugcagaggcaucaucaagaccuucagcaacggcugcgacuacgugagcaacaagggcguggacaccgugagcgugggcaacacccuguacuacgugaacaagcaggagggccagagccuguacgugaagggcgagcccaucaucaacuucuacgacccccugguguuccccagcgacgaguucgacgccagcaucagccaggugaacgagaagaucaaccagagccuggccuucaucagaaagagcgacgagcugcugcacaacgugaacgugggcaagagcaccaccaacaucaugaucaccaccaucaucaucgugaucaucgugauccugcugcugcugaucgccgugggccuguuccuguacugcaaggccagaugaggacuagucccuguucccagagcccacuuuuuuuucuuuuuuugaaauaaaauagccugucuuucagaucuaaaaaaaaaaaaaaaaaaaaaaaaaaaaaaaaaaaaaaaaaaaaaaaaaaaaaaaaaaaaaaaaugcaucccccccccccccccccccccccccccccccaaaggcucuuuucagagccaccagaauu

SEQ ID NO: 19489 - RNA, 1824 nt, Artificial Sequence
  mRNA product Design a-1 comprising derived and/or modified sequence from HRSV(Memphis-37)__AIY60640.1__F-del_DSCav1_mut8 (opt5)
gggagagucccgcagucggcguccagcggcucugcuuguucgugugugugucguugcaggccuuauucaagcuuaccauggagcugcccauccucaagaccaacgccauuacaacgauccuggcugccgugacccuuugcuucgcgagcucccagaauauuacagaagaguuuuaccaaucuaccuguagcgcugucuccaaaggcuaucugggggcccucagaacaggaugguacaccucuguuaucacaauugaacugagcaacaucaaggagaucaaaugcaauggcaccgacgccaaggugaaacuuauuaagcaggaacuggauaaguauaaaaacgcugugacggaccuccagcugcugaugcaguccaccccugccgcugggucuggaagcgccaucgcguccggcauugccgucuguaaggugcuccaccuggagggggagguuaauaaaaucaagaacgcccuucugagcacaaauaaagcuguggucucucucuccggaugcggcgugagcguucugaccuucaaggugcuugaucugaagaacuacauugacaaacaacuccugccgauccugaauaagcagucuuguuccauucccaacaucgaaacagucaucgaguuucagcagaaaaauaaccggcuccuggaaauuacccgcgaguucagcgugaaugcuggcgugacgacaccugucucuaccuauaugcuuacaaacuccgagcugcucagccugaucaaugauaugcccauuaccaacgaccaaaagaaacuuauguccaacaauguucagaucgugagacagcagucuuacagcauuaugugcaucaucaaggaagaggugcuggccuaugucgugcaacucccucuguacgggguuauugauacccccuguuggaaacugcauacauccccucucugcacgaccaacacaaaggaaggaagcaauaucugucugacccggacagaccgcggcugguacugcgauaacgcggggucuguguccuuuuucccgcaggccgagaccuguaagguccagagcaauagaguguuuugcgacacgaugaacucucuuacacugcccagcgaaguuaaucucugcaacauugauaucuucaauccuaaauaugacuguaagauuaugaccuccaaaaccgaugugucuagcuccgucaucacaagccugggagcuaucgugucuugcuacggcaagaccaaauguacagccuccaacaagugccgggggauuaucaagacguuuagcaauggaugugacuaugucucuaacaaaggcguggacaccguuuccgugggcaauacacuuuacuaugucaacaagcaagaggggcagagccuguacgugaaaggagagcccauuaucaauuucuaugauccucucguuuuucccuccgacgaguucgaugcuucuauuagccaggugaacgaaaagaucaaccagucccuggccuuuauucgcaaaucugacgaacugcuccacaaugucaacgugggcaagagcaccacaaauaucaugaucaccacgauuaucauugugaucauuguuauccugcuucugcucaucgccgucgggcuguuccuguacugcaaggcuagaugaggacuagucccuguucccagagcccacuuuuuuuucuuuuuuugaaauaaaauagccugucuuucagaucuaaaaaaaaaaaaaaaaaaaaaaaaaaaaaaaaaaaaaaaaaaaaaaaaaaaaaaaaaaaaaaaaugcaucccccccccccccccccccccccccccccccaaaggcucuuuucagagccaccagaauu

SEQ ID NO: 19490 - RNA, 1824 nt, Artificial Sequence
  mRNA product Design a-1 comprising derived and/or modified sequence from HRSV(Memphis-37)__AIY60640.1__F-del_DSCav1_mut8 (opt6)
gggagagucccgcagucggcguccagcggcucugcuuguucgugugugugucguugcaggccuuauucaagcuuaccauggaacuacccauacuaaaaacaaacgcaauuacaacaauacuugccgcaguaaccuuaugcuuugccucaucccaaaacauaacagaagaauuuuaucaaucaacaugcuccgcaguaucaaaaggauaccuaggcgcucuaagaacaggaugguacacauccguaaucacaauagaacuauccaauauaaaagaaauaaaauguaauggaacagaugcaaaaguuaaauuaauaaaacaagaacuagacaaauacaaaaacgcaguuaccgaucuccaacuauuaaugcaaucaacaccagcugcaggaaguggaagcgccauagcaagcggaauagcagucugcaaaguauuacaucuugaaggcgaaguaaacaaaaucaaaaaugcccuccucucaacaaacaaagcuguaguaucccuaucaggaugcgguguaucuguucuuacauuuaaaguacucgaucuaaaaaacuacaucgauaaacaguuacuuccaauacucaacaaacaaucauguagcauaccaaacauagaaacaguaauagaauuucaacaaaaaaacaaucgacuacucgaaauaacuagagaauuuucuguaaacgcuggaguaaccacaccagugucuaccuauaugcuuacaaauagcgaacuccuaucacuaaucaaugacaugccaauaacaaaugaccagaaaaaacucaugucaaauaacguacaaauaguacgacaacaaagcuacuccauaaugugcauaaucaaagaagaaguauuagccuacguuguucaacuaccauuauauggaguuauagacacuccaugcuggaaauuacauacaagcccacucuguacaacaaacacaaaagaaggcucaaacauaugcuuaacaagaacagauagaggaugguacugcgauaacgcaggcucagucucauuuuuuccacaagccgaaaccugcaaaguacaaucaaauagaguuuuuugcgacacaaugaacucacucacucuaccaagugaaguaaaucucuguaauaucgacauauucaacccaaaauaugacugcaaaauaaugacaucuaaaaccgauguauccucaagcguaaucacaucauuaggagcuauaguuuccugcuacgguaaaacaaaaugcacagcauccaacaaaugucgcgguaucaucaaaacauucuccaacggaugugauuacguaucaaacaaaggugucgacaccguaagcguaggcaacacuuuauacuauguaaacaaacaagaaggacaaagucuauauguaaaaggagaaccaauaauaaacuucuaugacccccuaguauucccuuccgacgaauuugaugcaagcauuucacaaguuaacgaaaaaaucaaucaaucccuugcuuucauaagaaaaucagacgaauuacuacacaacguaaacguaggaaaaagcacaacaaauaucaugauuacaacaauaauaauuguaauaauaguaauacuccucuuacuuauagcagucggcuuauuccuuuacugcaaagcaagauaaggacuagucccuguucccagagcccacuuuuuuuucuuuuuuugaaauaaaauagccugucuuucagaucuaaaaaaaaaaaaaaaaaaaaaaaaaaaaaaaaaaaaaaaaaaaaaaaaaaaaaaaaaaaaaaaaugcaucccccccccccccccccccccccccccccccaaaggcucuuuucagagccaccagaauu

SEQ ID NO: 19491 - RNA, 1824 nt, Artificial Sequence
  mRNA product Design a-1 comprising derived and/or modified sequence from HRSV(Memphis-37)__AIY60640.1__F-del_DSCav1_mut8 (opt11)
gggagagucccgcagucggcguccagcggcucugcuuguucgugugugugucguugcaggccuuauucaagcuuaccauggaacuccccauccuaaaaaccaacgcaaucaccaccauccucgccgccguaacacucugcuuugcaagcucccaaaacaucaccgaagaauuuuaccaaucuaccugcagcgccguaucuaaaggauaccuaggagcccucagaaccgguugguacaccucugucaucacaauagaacucuccaacaucaaagaaaucaaaugcaacggcaccgacgccaaagucaaacucaucaaacaagaacucgacaaauauaaaaacgccguaaccgaccuccaacuccucaugcaauccacccccgccgccggcaguggcuccgcuaucgccuccggaaucgccguuugcaaaguccugcaccuagaaggcgaagucaacaaaaucaaaaacgcccugcucucaaccaacaaagcugucguaagccucuccggcugcggagucuccguccuuaccuucaaaguacucgaccuuaaaaacuacaucgacaaacaacuucuccccauacucaauaaacaauccugcuccauacccaacaucgaaacagucaucgaguuccaacagaaaaauaaccgccuccucgaaauaacccgcgaguucuccgucaacgcaggcgucaccaccccagucuccaccuacaugcugacaaacuccgaacuccuaucccucaucaacgacaugcccaucaccaacgaccaaaagaaacucaugagcaauaacguccaaaucguacgacaacaauccuacagcaucauguguaucaucaaagaagaaguacucgccuacgucguccaacucccacuauacggcgucaucgacacaccaugcuggaaacuucacaccuccccacucugcaccacaaacacaaaagaaggcuccaacaucugccuuacccgaaccgaccgcgggugguacugcgacaacgccggaucagucucguucuuuccccaagccgaaaccugcaaaguacaaucaaaucgcgucuucugcgacaccaugaacuccuuaacacuaccauccgaaguaaaccucugcaacauagacaucuucaacccaaaauacgacugcaaaaucaugaccuccaaaaccgacguauccuccuccguaaucaccagccucggcgcaauagucucaugcuacggcaaaaccaaaugcaccgccuccaacaaaugccgcggcaucauaaaaacuuucucuaacggaugcgacuacgucagcaacaaaggcgucgacaccguauccguagguaauacacuuuacuacgucaauaaacaagaaggccaaucccucuacgucaaaggagaacccaucauaaacuucuacgacccccucgucuuccccuccgacgaguucgacgccuccaucagccaggucaacgaaaagaucaaccaaucacucgccuucauccgcaaaagcgacgaacuccuccacaacguaaacgucggcaaauccacaaccaacauaaugaucaccacuaucaucaucgugauaaucgucauuuuacuucuccucaucgccguaggccucuuccuauacugcaaagcccgcuaaggacuagucccuguucccagagcccacuuuuuuuucuuuuuuugaaauaaaauagccugucuuucagaucuaaaaaaaaaaaaaaaaaaaaaaaaaaaaaaaaaaaaaaaaaaaaaaaaaaaaaaaaaaaaaaaaugcaucccccccccccccccccccccccccccccccaaaggcucuuuucagagccaccagaauu

SEQ ID NO: 19492 - RNA, 1843 nt, Artificial Sequence
  mRNA product Design a-2 comprising derived and/or modified sequence from HRSV(Memphis-37)__AIY60640.1__F-del_DSCav1_mut8 (opt1)
gggagaguccgcucagccagguugcagaagcggcuuagcguguguccuaaucuucucucugcguguagguaggccugugccgcaaacaagcuuaccauggagcugcccauccucaagaccaacgccaucaccacgauccuggccgcggugacccugugcuucgccagcucccagaacaucaccgaggaguucuaccagagcacgugcuccgccgucagcaagggcuaccucggcgcccugcgcaccgggugguacaccagcgugaucaccaucgagcuguccaacaucaaggagaucaagugcaacggcaccgacgccaaggugaagcucaucaagcaggagcuggacaaguacaagaacgcggucacggaccugcagcuccugaugcagagcaccccggccgccggcuccgggagcgcgaucgccuccggcaucgccgucugcaaggugcugcaccucgagggcgaggugaacaagaucaagaacgcccugcuguccaccaacaaggccgucgugagccucuccggcugcggggugagcguccugaccuucaaggugcuggaccucaagaacuacaucgacaagcagcugcugcccauccugaacaagcagagcugcuccauccccaacaucgagaccgucaucgaguuccagcagaagaacaaccgccuccuggagaucacgcgggaguucagcgugaacgcgggcgugaccacccccgucuccaccuacaugcugacgaacagcgagcuccugucccugaucaacgacaugccgaucaccaacgaccagaagaagcucaugagcaacaacgugcagaucgugcgccagcaguccuacagcaucaugugcaucaucaaggaggagguccuggccuacguggugcagcugccccucuacggggucaucgacacccccugcuggaagcugcacaccagcccccugugcacgaccaacaccaaggagggcuccaacaucugccucacccggacggaccgcgggugguacugcgacaacgccggcagcguguccuucuucccgcaggccgagaccugcaagguccagagcaaccggguguucugcgacaccaugaacucccugacccugcccagcgaggugaaccucugcaacaucgacaucuucaaccccaaguacgacugcaagaucaugacguccaagaccgacgucagcuccagcgugaucaccucccugggcgccaucgugagcugcuacgggaagaccaagugcacggcgagcaacaagugccgcggcaucaucaagaccuucuccaacgggugcgacuacgucagcaacaagggcguggacaccguguccgucggcaacacccuguacuacgugaacaagcaggagggccagagccucuacgugaagggggagcccaucaucaacuucuacgacccgcuggucuuccccuccgacgaguucgacgccagcaucucccaggugaacgagaagaucaaccagagccuggccuucauccggaaguccgacgagcuccugcacaacgugaacgucggcaagagcaccacgaacaucaugaucaccaccaucaucaucgugaucaucgugauccugcugcuccugaucgccgucgggcuguuccucuacugcaaggcccgcugaggacuagucccuguucccagagcccacuuuuuuuucuuuuuuugaaauaaaauagccugucuuucagaucuaaaaaaaaaaaaaaaaaaaaaaaaaaaaaaaaaaaaaaaaaaaaaaaaaaaaaaaaaaaaaaaaugcaucccccccccccccccccccccccccccccccaaaggcucuuuucagagccaccagaauu

SEQ ID NO: 19493 - RNA, 1843 nt, Artificial Sequence
  mRNA product Design a-2 comprising derived and/or modified sequence from HRSV(Memphis-37)__AIY60640.1__F-del_DSCav1_mut8 (opt1)
gggagaguccgcucagccagguugcagaagcggcuuagcguguguccuaaucuucucucugcguguagguaggccugugccgcaaacaagcuuaccauggagcugcccauccucaagaccaacgccaucaccacgauccuggccgcggugacccugugcuucgccagcucccagaacaucaccgaggaguucuaccagagcacgugcuccgccgucagcaagggcuaccucggggcccugcgcaccggcugguacaccuccgugaucaccaucgagcugagcaacaucaaggagaucaagugcaacgggaccgacgccaaggugaagcucaucaagcaggagcuggacaaguacaagaacgcggucacggaccugcagcuccugaugcaguccaccccggccgccggcagcggguccgccaucgcgagcggcaucgccgugugcaaggugcugcaccucgagggcgaggucaacaagaucaagaacgcccugcuguccaccaacaaggccguggugagccucuccgggugcggcgucagcgugcugaccuucaaggugcuggaccucaagaacuacaucgacaagcagcugcugcccauccucaacaagcaguccugcagcauccccaacaucgagacggucaucgaguuccagcagaagaacaaccggcugcuggagaucacccgcgaguucuccgugaacgccggggugaccacccccgucagcacguacaugcucaccaacuccgagcugcugagccucaucaacgacaugccgaucaccaacgaccagaagaagcugaugagcaacaacgugcagaucgugcggcagcaguccuacagcaucaugugcaucaucaaggaggagguccuggcguacguggugcagcucccccuguacggcgucaucgacacccccugcuggaagcugcacacgagcccccucugcaccaccaacaccaaggagggguccaacaucugccugacgcgcaccgaccggggcugguacugcgacaacgccggcuccgugagcuucuucccgcaggccgagaccugcaaggugcaguccaaccgcgucuucugcgacaccaugaacagccugacgcuccccuccgaggugaaccugugcaacaucgacaucuucaaccccaaguacgacugcaagaucaugaccagcaagaccgacgucuccagcuccgugaucaccagccugggggccaucguguccugcuacggcaagacgaagugcaccgccagcaacaagugccgggggaucaucaagaccuucuccaacggcugcgacuacgucagcaacaagggcguggacaccguguccgucgggaacacgcucuacuacgugaacaagcaggagggccagagccuguacgugaagggggagcccaucaucaacuucuacgacccgcuggucuuccccagcgacgaguucgacgcguccaucagccaggugaacgagaagaucaaccagucccucgccuucauccgcaagagcgacgagcugcugcacaacgugaacgucggcaaguccaccaccaacaucaugaucaccaccaucaucaucgugaucaucgugauccuccugcugcucaucgccgucgggcuguuccuguacugcaaggcccggugaggacuagucccuguucccagagcccacuuuuuuuucuuuuuuugaaauaaaauagccugucuuucagaucuaaaaaaaaaaaaaaaaaaaaaaaaaaaaaaaaaaaaaaaaaaaaaaaaaaaaaaaaaaaaaaaaugcaucccccccccccccccccccccccccccccccaaaggcucuuuucagagccaccagaauu

SEQ ID NO: 19494 - RNA, 1843 nt, Artificial Sequence
  mRNA product Design a-2 comprising derived and/or modified sequence from HRSV(Memphis-37)__AIY60640.1__F-del_DSCav1_mut8 (opt2)
gggagaguccgcucagccagguugcagaagcggcuuagcguguguccuaaucuucucucugcguguagguaggccugugccgcaaacaagcuuaccauggagcuccccauccucaagaccaacgccaucaccaccauccucgccgccgucacccucugcuucgccuccucccagaacaucaccgaggaguucuaccaguccaccugcuccgccgucuccaagggcuaccucggcgcccuccgcaccggcugguacaccuccgucaucaccaucgagcucuccaacaucaaggagaucaagugcaacggcaccgacgccaaggucaagcucaucaagcaggagcucgacaaguacaagaacgccgucaccgaccuccagcuccucaugcaguccacccccgccgccggcuccggcuccgccaucgccuccggcaucgccgucugcaagguccuccaccucgagggcgaggucaacaagaucaagaacgcccuccucuccaccaacaaggccgucgucucccucuccggcugcggcgucuccguccucaccuucaagguccucgaccucaagaacuacaucgacaagcagcuccuccccauccucaacaagcaguccugcuccauccccaacaucgagaccgucaucgaguuccagcagaagaacaaccgccuccucgagaucacccgcgaguucuccgucaacgccggcgucaccacccccgucuccaccuacaugcucaccaacuccgagcuccucucccucaucaacgacaugcccaucaccaacgaccagaagaagcucauguccaacaacguccagaucguccgccagcaguccuacuccaucaugugcaucaucaaggaggagguccucgccuacgucguccagcucccccucuacggcgucaucgacacccccugcuggaagcuccacaccuccccccucugcaccaccaacaccaaggagggcuccaacaucugccucacccgcaccgaccgcggcugguacugcgacaacgccggcuccgucuccuucuucccccaggccgagaccugcaagguccaguccaaccgcgucuucugcgacaccaugaacucccucacccuccccuccgaggucaaccucugcaacaucgacaucuucaaccccaaguacgacugcaagaucaugaccuccaagaccgacgucuccuccuccgucaucaccucccucggcgccaucgucuccugcuacggcaagaccaagugcaccgccuccaacaagugccgcggcaucaucaagaccuucuccaacggcugcgacuacgucuccaacaagggcgucgacaccgucuccgucggcaacacccucuacuacgucaacaagcaggagggccagucccucuacgucaagggcgagcccaucaucaacuucuacgacccccucgucuuccccuccgacgaguucgacgccuccaucucccaggucaacgagaagaucaaccagucccucgccuucauccgcaaguccgacgagcuccuccacaacgucaacgucggcaaguccaccaccaacaucaugaucaccaccaucaucaucgucaucaucgucauccuccuccuccucaucgccgucggccucuuccucuacugcaaggcccgcugaggacuagucccuguucccagagcccacuuuuuuuucuuuuuuugaaauaaaauagccugucuuucagaucuaaaaaaaaaaaaaaaaaaaaaaaaaaaaaaaaaaaaaaaaaaaaaaaaaaaaaaaaaaaaaaaaugcaucccccccccccccccccccccccccccccccaaaggcucuuuucagagccaccagaauu

SEQ ID NO: 19495 - RNA, 1843 nt, Artificial Sequence
  mRNA product Design a-2 comprising derived and/or modified sequence from HRSV(Memphis-37)__AIY60640.1__F-del_DSCav1_mut8 (opt3)
gggagaguccgcucagccagguugcagaagcggcuuagcguguguccuaaucuucucucugcguguagguaggccugugccgcaaacaagcuuaccauggagcugcccauccucaagaccaacgccauuacaacuauacuugcugcagugacgcugugcuucgccagcucccagaauaucaccgaagaguuuuaccaaucuacauguucagcggucaguaaaggcuauuugggggcuuuaagaacuggaugguacaccagcguuauuacaaucgaacuguccaacauuaaggagaucaaaugcaaugguaccgacgccaaggugaaacuaauaaagcaggaacucgauaaguauaaaaacgcaguaacugaccugcagcuucugaugcagucuacuccugccgcuggcucggggucagcaaucgccagcggaauugcuguguguaaggucuugcaccucgagggcgaggugaauaaaaucaagaacgcccugcugaguaccaauaaagcgguugugucccucucugguugcggggucagcguguuaacguucaagguacuggaucuuaagaacuacauugacaaacaauugcugccaauccuaaauaagcaguccuguucaauaccgaacauugaaacuguuaucgaguuucagcagaaaaauaacaggcuccuggaaauuacccgggaguucagugugaaugcaggagucacaacucccgugagcaccuauaugcuuacaaacucugagcuguugucccucaucaaugauaugccuaucaccaacgaccaaaagaaacugaugucaaacaaugugcagauuguccgccagcagagcuacaguauaaugugcaucauuaaggaagagguuuuagccuaugugguacaacugccacucuacggcgugaucgauacgcccuguuggaaacuucauacuucuccucugugcacaaccaacacuaaggaaggcuccaauauauguuugacacgaaccgaccgugggugguacugcgauaacgcuggaagcgucucguuuuucccacaggccgagacguguaaggugcagucuaauagaguuuucugcgacaccaugaacucccuaacacugcccucagaagugaaucucugcaacauugauaucuucaauccuaaauaugacuguaagaucaugacaaguaaaaccgaugucagcuccucugugauuacaagccugggugcaaucguaucaugcuacggcaagacuaaauguaccgcuaguaacaagugcagggggauuauaaagacauuuuccaauggaugugacuauguuagcaacaaaggcguggacaccgucucuguggguaauacucuuuacuaugucaacaagcaagaggggcagucacuguacgugaaaggagagccaaucauuaauuucuaugauccguugguuuuucccagugacgaauuugaugccagcaucucccaggugaacgagaagaucaaccagucucucgcguuuauucggaaaucggacgaacuguuacacaauguaaacgucggcaagagcacgacaaauauaaugaucaccacuauuaucauugugaucauaguuauccugcuacuccugauugccgugggccuuuucuuguacugcaaggcacgcugaggacuagucccuguucccagagcccacuuuuuuuucuuuuuuugaaauaaaauagccugucuuucagaucuaaaaaaaaaaaaaaaaaaaaaaaaaaaaaaaaaaaaaaaaaaaaaaaaaaaaaaaaaaaaaaaaugcaucccccccccccccccccccccccccccccccaaaggcucuuuucagagccaccagaauu

SEQ ID NO: 19496 - RNA, 1843 nt, Artificial Sequence
  mRNA product Design a-2 comprising derived and/or modified sequence from HRSV(Memphis-37)__AIY60640.1__F-del_DSCav1_mut8 (opt4)
gggagaguccgcucagccagguugcagaagcggcuuagcguguguccuaaucuucucucugcguguagguaggccugugccgcaaacaagcuuaccauggagcugcccauccugaagaccaacgccaucaccaccauccuggccgccgugacccugugcuucgccagcagccagaacaucaccgaggaguucuaccagagcaccugcagcgccgugagcaagggcuaccugggcgcccugagaaccggcugguacaccagcgugaucaccaucgagcugagcaacaucaaggagaucaagugcaacggcaccgacgccaaggugaagcugaucaagcaggagcuggacaaguacaagaacgccgugaccgaccugcagcugcugaugcagagcacccccgccgccggcagcggcagcgccaucgccagcggcaucgccgugugcaaggugcugcaccuggagggcgaggugaacaagaucaagaacgcccugcugagcaccaacaaggccguggugagccugagcggcugcggcgugagcgugcugaccuucaaggugcuggaccugaagaacuacaucgacaagcagcugcugcccauccugaacaagcagagcugcagcauccccaacaucgagaccgugaucgaguuccagcagaagaacaacagacugcuggagaucaccagagaguucagcgugaacgccggcgugaccacccccgugagcaccuacaugcugaccaacagcgagcugcugagccugaucaacgacaugcccaucaccaacgaccagaagaagcugaugagcaacaacgugcagaucgugagacagcagagcuacagcaucaugugcaucaucaaggaggaggugcuggccuacguggugcagcugccccuguacggcgugaucgacacccccugcuggaagcugcacaccagcccccugugcaccaccaacaccaaggagggcagcaacaucugccugaccagaaccgacagaggcugguacugcgacaacgccggcagcgugagcuucuucccccaggccgagaccugcaaggugcagagcaacagaguguucugcgacaccaugaacagccugacccugcccagcgaggugaaccugugcaacaucgacaucuucaaccccaaguacgacugcaagaucaugaccagcaagaccgacgugagcagcagcgugaucaccagccugggcgccaucgugagcugcuacggcaagaccaagugcaccgccagcaacaagugcagaggcaucaucaagaccuucagcaacggcugcgacuacgugagcaacaagggcguggacaccgugagcgugggcaacacccuguacuacgugaacaagcaggagggccagagccuguacgugaagggcgagcccaucaucaacuucuacgacccccugguguuccccagcgacgaguucgacgccagcaucagccaggugaacgagaagaucaaccagagccuggccuucaucagaaagagcgacgagcugcugcacaacgugaacgugggcaagagcaccaccaacaucaugaucaccaccaucaucaucgugaucaucgugauccugcugcugcugaucgccgugggccuguuccuguacugcaaggccagaugaggacuagucccuguucccagagcccacuuuuuuuucuuuuuuugaaauaaaauagccugucuuucagaucuaaaaaaaaaaaaaaaaaaaaaaaaaaaaaaaaaaaaaaaaaaaaaaaaaaaaaaaaaaaaaaaaugcaucccccccccccccccccccccccccccccccaaaggcucuuuucagagccaccagaauu

SEQ ID NO: 19497 - RNA, 1843 nt, Artificial Sequence
  mRNA product Design a-2 comprising derived and/or modified sequence from HRSV(Memphis-37)__AIY60640.1__F-del_DSCav1_mut8 (opt5)
gggagaguccgcucagccagguugcagaagcggcuuagcguguguccuaaucuucucucugcguguagguaggccugugccgcaaacaagcuuaccauggagcugcccauccucaagaccaacgccauuacaacgauccuggcugccgugacccuuugcuucgcgagcucccagaauauuacagaagaguuuuaccaaucuaccuguagcgcugucuccaaaggcuaucugggggcccucagaacaggaugguacaccucuguuaucacaauugaacugagcaacaucaaggagaucaaaugcaauggcaccgacgccaaggugaaacuuauuaagcaggaacuggauaaguauaaaaacgcugugacggaccuccagcugcugaugcaguccaccccugccgcugggucuggaagcgccaucgcguccggcauugccgucuguaaggugcuccaccuggagggggagguuaauaaaaucaagaacgcccuucugagcacaaauaaagcuguggucucucucuccggaugcggcgugagcguucugaccuucaaggugcuugaucugaagaacuacauugacaaacaacuccugccgauccugaauaagcagucuuguuccauucccaacaucgaaacagucaucgaguuucagcagaaaaauaaccggcuccuggaaauuacccgcgaguucagcgugaaugcuggcgugacgacaccugucucuaccuauaugcuuacaaacuccgagcugcucagccugaucaaugauaugcccauuaccaacgaccaaaagaaacuuauguccaacaauguucagaucgugagacagcagucuuacagcauuaugugcaucaucaaggaagaggugcuggccuaugucgugcaacucccucuguacgggguuauugauacccccuguuggaaacugcauacauccccucucugcacgaccaacacaaaggaaggaagcaauaucugucugacccggacagaccgcggcugguacugcgauaacgcggggucuguguccuuuuucccgcaggccgagaccuguaagguccagagcaauagaguguuuugcgacacgaugaacucucuuacacugcccagcgaaguuaaucucugcaacauugauaucuucaauccuaaauaugacuguaagauuaugaccuccaaaaccgaugugucuagcuccgucaucacaagccugggagcuaucgugucuugcuacggcaagaccaaauguacagccuccaacaagugccgggggauuaucaagacguuuagcaauggaugugacuaugucucuaacaaaggcguggacaccguuuccgugggcaauacacuuuacuaugucaacaagcaagaggggcagagccuguacgugaaaggagagcccauuaucaauuucuaugauccucucguuuuucccuccgacgaguucgaugcuucuauuagccaggugaacgaaaagaucaaccagucccuggccuuuauucgcaaaucugacgaacugcuccacaaugucaacgugggcaagagcaccacaaauaucaugaucaccacgauuaucauugugaucauuguuauccugcuucugcucaucgccgucgggcuguuccuguacugcaaggcuagaugaggacuagucccuguucccagagcccacuuuuuuuucuuuuuuugaaauaaaauagccugucuuucagaucuaaaaaaaaaaaaaaaaaaaaaaaaaaaaaaaaaaaaaaaaaaaaaaaaaaaaaaaaaaaaaaaaugcaucccccccccccccccccccccccccccccccaaaggcucuuuucagagccaccagaauu

SEQ ID NO: 19498 - RNA, 1843 nt, Artificial Sequence
  mRNA product Design a-2 comprising derived and/or modified sequence from HRSV(Memphis-37)__AIY60640.1__F-del_DSCav1_mut8 (opt6)
gggagaguccgcucagccagguugcagaagcggcuuagcguguguccuaaucuucucucugcguguagguaggccugugccgcaaacaagcuuaccauggaacuacccauacuaaaaacaaacgcaauuacaacaauacuugccgcaguaaccuuaugcuuugccucaucccaaaacauaacagaagaauuuuaucaaucaacaugcuccgcaguaucaaaaggauaccuaggcgcucuaagaacaggaugguacacauccguaaucacaauagaacuauccaauauaaaagaaauaaaauguaauggaacagaugcaaaaguuaaauuaauaaaacaagaacuagacaaauacaaaaacgcaguuaccgaucuccaacuauuaaugcaaucaacaccagcugcaggaaguggaagcgccauagcaagcggaauagcagucugcaaaguauuacaucuugaaggcgaaguaaacaaaaucaaaaaugcccuccucucaacaaacaaagcuguaguaucccuaucaggaugcgguguaucuguucuuacauuuaaaguacucgaucuaaaaaacuacaucgauaaacaguuacuuccaauacucaacaaacaaucauguagcauaccaaacauagaaacaguaauagaauuucaacaaaaaaacaaucgacuacucgaaauaacuagagaauuuucuguaaacgcuggaguaaccacaccagugucuaccuauaugcuuacaaauagcgaacuccuaucacuaaucaaugacaugccaauaacaaaugaccagaaaaaacucaugucaaauaacguacaaauaguacgacaacaaagcuacuccauaaugugcauaaucaaagaagaaguauuagccuacguuguucaacuaccauuauauggaguuauagacacuccaugcuggaaauuacauacaagcccacucuguacaacaaacacaaaagaaggcucaaacauaugcuuaacaagaacagauagaggaugguacugcgauaacgcaggcucagucucauuuuuuccacaagccgaaaccugcaaaguacaaucaaauagaguuuuuugcgacacaaugaacucacucacucuaccaagugaaguaaaucucuguaauaucgacauauucaacccaaaauaugacugcaaaauaaugacaucuaaaaccgauguauccucaagcguaaucacaucauuaggagcuauaguuuccugcuacgguaaaacaaaaugcacagcauccaacaaaugucgcgguaucaucaaaacauucuccaacggaugugauuacguaucaaacaaaggugucgacaccguaagcguaggcaacacuuuauacuauguaaacaaacaagaaggacaaagucuauauguaaaaggagaaccaauaauaaacuucuaugacccccuaguauucccuuccgacgaauuugaugcaagcauuucacaaguuaacgaaaaaaucaaucaaucccuugcuuucauaagaaaaucagacgaauuacuacacaacguaaacguaggaaaaagcacaacaaauaucaugauuacaacaauaauaauuguaauaauaguaauacuccucuuacuuauagcagucggcuuauuccuuuacugcaaagcaagauaaggacuagucccuguucccagagcccacuuuuuuuucuuuuuuugaaauaaaauagccugucuuucagaucuaaaaaaaaaaaaaaaaaaaaaaaaaaaaaaaaaaaaaaaaaaaaaaaaaaaaaaaaaaaaaaaaugcaucccccccccccccccccccccccccccccccaaaggcucuuuucagagccaccagaauu

SEQ ID NO: 19499 - RNA, 1843 nt, Artificial Sequence
  mRNA product Design a-2 comprising derived and/or modified sequence from HRSV(Memphis-37)__AIY60640.1__F-del_DSCav1_mut8 (opt11)
gggagaguccgcucagccagguugcagaagcggcuuagcguguguccuaaucuucucucugcguguagguaggccugugccgcaaacaagcuuaccauggaacuccccauccuaaaaaccaacgcaaucaccaccauccucgccgccguaacacucugcuuugcaagcucccaaaacaucaccgaagaauuuuaccaaucuaccugcagcgccguaucuaaaggauaccuaggagcccucagaaccgguugguacaccucugucaucacaauagaacucuccaacaucaaagaaaucaaaugcaacggcaccgacgccaaagucaaacucaucaaacaagaacucgacaaauauaaaaacgccguaaccgaccuccaacuccucaugcaauccacccccgccgccggcaguggcuccgcuaucgccuccggaaucgccguuugcaaaguccugcaccuagaaggcgaagucaacaaaaucaaaaacgcccugcucucaaccaacaaagcugucguaagccucuccggcugcggagucuccguccuuaccuucaaaguacucgaccuuaaaaacuacaucgacaaacaacuucuccccauacucaauaaacaauccugcuccauacccaacaucgaaacagucaucgaguuccaacagaaaaauaaccgccuccucgaaauaacccgcgaguucuccgucaacgcaggcgucaccaccccagucuccaccuacaugcugacaaacuccgaacuccuaucccucaucaacgacaugcccaucaccaacgaccaaaagaaacucaugagcaauaacguccaaaucguacgacaacaauccuacagcaucauguguaucaucaaagaagaaguacucgccuacgucguccaacucccacuauacggcgucaucgacacaccaugcuggaaacuucacaccuccccacucugcaccacaaacacaaaagaaggcuccaacaucugccuuacccgaaccgaccgcgggugguacugcgacaacgccggaucagucucguucuuuccccaagccgaaaccugcaaaguacaaucaaaucgcgucuucugcgacaccaugaacuccuuaacacuaccauccgaaguaaaccucugcaacauagacaucuucaacccaaaauacgacugcaaaaucaugaccuccaaaaccgacguauccuccuccguaaucaccagccucggcgcaauagucucaugcuacggcaaaaccaaaugcaccgccuccaacaaaugccgcggcaucauaaaaacuuucucuaacggaugcgacuacgucagcaacaaaggcgucgacaccguauccguagguaauacacuuuacuacgucaauaaacaagaaggccaaucccucuacgucaaaggagaacccaucauaaacuucuacgacccccucgucuuccccuccgacgaguucgacgccuccaucagccaggucaacgaaaagaucaaccaaucacucgccuucauccgcaaaagcgacgaacuccuccacaacguaaacgucggcaaauccacaaccaacauaaugaucaccacuaucaucaucgugauaaucgucauuuuacuucuccucaucgccguaggccucuuccuauacugcaaagcccgcuaaggacuagucccuguucccagagcccacuuuuuuuucuuuuuuugaaauaaaauagccugucuuucagaucuaaaaaaaaaaaaaaaaaaaaaaaaaaaaaaaaaaaaaaaaaaaaaaaaaaaaaaaaaaaaaaaaugcaucccccccccccccccccccccccccccccccaaaggcucuuuucagagccaccagaauu

SEQ ID NO: 19500 - RNA, 1921 nt, Artificial Sequence
  mRNA product Design a-3 comprising derived and/or modified sequence from HRSV(Memphis-37)__AIY60640.1__F-del_DSCav1_mut8 (opt1)
gggagagggcgcuuggcuugcaaggacccugagcugcggcauugaagcacacccaacccaacucgacugaagucagccucacugaaccggaucugagaaucuucucucucugggcuugccagggcucuccgaaccuagcuagcauccucuucaauuccaacuagaaagcuuaccauggagcugcccauccucaagaccaacgccaucaccacgauccuggccgcggugacccugugcuucgccagcucccagaacaucaccgaggaguucuaccagagcacgugcuccgccgucagcaagggcuaccucggcgcccugcgcaccgggugguacaccagcgugaucaccaucgagcuguccaacaucaaggagaucaagugcaacggcaccgacgccaaggugaagcucaucaagcaggagcuggacaaguacaagaacgcggucacggaccugcagcuccugaugcagagcaccccggccgccggcuccgggagcgcgaucgccuccggcaucgccgucugcaaggugcugcaccucgagggcgaggugaacaagaucaagaacgcccugcuguccaccaacaaggccgucgugagccucuccggcugcggggugagcguccugaccuucaaggugcuggaccucaagaacuacaucgacaagcagcugcugcccauccugaacaagcagagcugcuccauccccaacaucgagaccgucaucgaguuccagcagaagaacaaccgccuccuggagaucacgcgggaguucagcgugaacgcgggcgugaccacccccgucuccaccuacaugcugacgaacagcgagcuccugucccugaucaacgacaugccgaucaccaacgaccagaagaagcucaugagcaacaacgugcagaucgugcgccagcaguccuacagcaucaugugcaucaucaaggaggagguccuggccuacguggugcagcugccccucuacggggucaucgacacccccugcuggaagcugcacaccagcccccugugcacgaccaacaccaaggagggcuccaacaucugccucacccggacggaccgcgggugguacugcgacaacgccggcagcguguccuucuucccgcaggccgagaccugcaagguccagagcaaccggguguucugcgacaccaugaacucccugacccugcccagcgaggugaaccucugcaacaucgacaucuucaaccccaaguacgacugcaagaucaugacguccaagaccgacgucagcuccagcgugaucaccucccugggcgccaucgugagcugcuacgggaagaccaagugcacggcgagcaacaagugccgcggcaucaucaagaccuucuccaacgggugcgacuacgucagcaacaagggcguggacaccguguccgucggcaacacccuguacuacgugaacaagcaggagggccagagccucuacgugaagggggagcccaucaucaacuucuacgacccgcuggucuuccccuccgacgaguucgacgccagcaucucccaggugaacgagaagaucaaccagagccuggccuucauccggaaguccgacgagcuccugcacaacgugaacgucggcaagagcaccacgaacaucaugaucaccaccaucaucaucgugaucaucgugauccugcugcuccugaucgccgucgggcuguuccucuacugcaaggcccgcugaggacuagucccuguucccagagcccacuuuuuuuucuuuuuuugaaauaaaauagccugucuuucagaucuaaaaaaaaaaaaaaaaaaaaaaaaaaaaaaaaaaaaaaaaaaaaaaaaaaaaaaaaaaaaaaaaugcaucccccccccccccccccccccccccccccccaaaggcucuuuucagagccaccagaauu

SEQ ID NO: 19501 - RNA, 1921 nt, Artificial Sequence
  mRNA product Design a-3 comprising derived and/or modified sequence from HRSV(Memphis-37)__AIY60640.1__F-del_DSCav1_mut8 (opt1)
gggagagggcgcuuggcuugcaaggacccugagcugcggcauugaagcacacccaacccaacucgacugaagucagccucacugaaccggaucugagaaucuucucucucugggcuugccagggcucuccgaaccuagcuagcauccucuucaauuccaacuagaaagcuuaccauggagcugcccauccucaagaccaacgccaucaccacgauccuggccgcggugacccugugcuucgccagcucccagaacaucaccgaggaguucuaccagagcacgugcuccgccgucagcaagggcuaccucggggcccugcgcaccggcugguacaccuccgugaucaccaucgagcugagcaacaucaaggagaucaagugcaacgggaccgacgccaaggugaagcucaucaagcaggagcuggacaaguacaagaacgcggucacggaccugcagcuccugaugcaguccaccccggccgccggcagcggguccgccaucgcgagcggcaucgccgugugcaaggugcugcaccucgagggcgaggucaacaagaucaagaacgcccugcuguccaccaacaaggccguggugagccucuccgggugcggcgucagcgugcugaccuucaaggugcuggaccucaagaacuacaucgacaagcagcugcugcccauccucaacaagcaguccugcagcauccccaacaucgagacggucaucgaguuccagcagaagaacaaccggcugcuggagaucacccgcgaguucuccgugaacgccggggugaccacccccgucagcacguacaugcucaccaacuccgagcugcugagccucaucaacgacaugccgaucaccaacgaccagaagaagcugaugagcaacaacgugcagaucgugcggcagcaguccuacagcaucaugugcaucaucaaggaggagguccuggcguacguggugcagcucccccuguacggcgucaucgacacccccugcuggaagcugcacacgagcccccucugcaccaccaacaccaaggagggguccaacaucugccugacgcgcaccgaccggggcugguacugcgacaacgccggcuccgugagcuucuucccgcaggccgagaccugcaaggugcaguccaaccgcgucuucugcgacaccaugaacagccugacgcuccccuccgaggugaaccugugcaacaucgacaucuucaaccccaaguacgacugcaagaucaugaccagcaagaccgacgucuccagcuccgugaucaccagccugggggccaucguguccugcuacggcaagacgaagugcaccgccagcaacaagugccgggggaucaucaagaccuucuccaacggcugcgacuacgucagcaacaagggcguggacaccguguccgucgggaacacgcucuacuacgugaacaagcaggagggccagagccuguacgugaagggggagcccaucaucaacuucuacgacccgcuggucuuccccagcgacgaguucgacgcguccaucagccaggugaacgagaagaucaaccagucccucgccuucauccgcaagagcgacgagcugcugcacaacgugaacgucggcaaguccaccaccaacaucaugaucaccaccaucaucaucgugaucaucgugauccuccugcugcucaucgccgucgggcuguuccuguacugcaaggcccggugaggacuagucccuguucccagagcccacuuuuuuuucuuuuuuugaaauaaaauagccugucuuucagaucuaaaaaaaaaaaaaaaaaaaaaaaaaaaaaaaaaaaaaaaaaaaaaaaaaaaaaaaaaaaaaaaaugcaucccccccccccccccccccccccccccccccaaaggcucuuuucagagccaccagaauu

SEQ ID NO: 19502 - RNA, 1921 nt, Artificial Sequence
  mRNA product Design a-3 comprising derived and/or modified sequence from HRSV(Memphis-37)__AIY60640.1__F-del_DSCav1_mut8 (opt2)
gggagagggcgcuuggcuugcaaggacccugagcugcggcauugaagcacacccaacccaacucgacugaagucagccucacugaaccggaucugagaaucuucucucucugggcuugccagggcucuccgaaccuagcuagcauccucuucaauuccaacuagaaagcuuaccauggagcuccccauccucaagaccaacgccaucaccaccauccucgccgccgucacccucugcuucgccuccucccagaacaucaccgaggaguucuaccaguccaccugcuccgccgucuccaagggcuaccucggcgcccuccgcaccggcugguacaccuccgucaucaccaucgagcucuccaacaucaaggagaucaagugcaacggcaccgacgccaaggucaagcucaucaagcaggagcucgacaaguacaagaacgccgucaccgaccuccagcuccucaugcaguccacccccgccgccggcuccggcuccgccaucgccuccggcaucgccgucugcaagguccuccaccucgagggcgaggucaacaagaucaagaacgcccuccucuccaccaacaaggccgucgucucccucuccggcugcggcgucuccguccucaccuucaagguccucgaccucaagaacuacaucgacaagcagcuccuccccauccucaacaagcaguccugcuccauccccaacaucgagaccgucaucgaguuccagcagaagaacaaccgccuccucgagaucacccgcgaguucuccgucaacgccggcgucaccacccccgucuccaccuacaugcucaccaacuccgagcuccucucccucaucaacgacaugcccaucaccaacgaccagaagaagcucauguccaacaacguccagaucguccgccagcaguccuacuccaucaugugcaucaucaaggaggagguccucgccuacgucguccagcucccccucuacggcgucaucgacacccccugcuggaagcuccacaccuccccccucugcaccaccaacaccaaggagggcuccaacaucugccucacccgcaccgaccgcggcugguacugcgacaacgccggcuccgucuccuucuucccccaggccgagaccugcaagguccaguccaaccgcgucuucugcgacaccaugaacucccucacccuccccuccgaggucaaccucugcaacaucgacaucuucaaccccaaguacgacugcaagaucaugaccuccaagaccgacgucuccuccuccgucaucaccucccucggcgccaucgucuccugcuacggcaagaccaagugcaccgccuccaacaagugccgcggcaucaucaagaccuucuccaacggcugcgacuacgucuccaacaagggcgucgacaccgucuccgucggcaacacccucuacuacgucaacaagcaggagggccagucccucuacgucaagggcgagcccaucaucaacuucuacgacccccucgucuuccccuccgacgaguucgacgccuccaucucccaggucaacgagaagaucaaccagucccucgccuucauccgcaaguccgacgagcuccuccacaacgucaacgucggcaaguccaccaccaacaucaugaucaccaccaucaucaucgucaucaucgucauccuccuccuccucaucgccgucggccucuuccucuacugcaaggcccgcugaggacuagucccuguucccagagcccacuuuuuuuucuuuuuuugaaauaaaauagccugucuuucagaucuaaaaaaaaaaaaaaaaaaaaaaaaaaaaaaaaaaaaaaaaaaaaaaaaaaaaaaaaaaaaaaaaugcaucccccccccccccccccccccccccccccccaaaggcucuuuucagagccaccagaauu

SEQ ID NO: 19503 - RNA, 1921 nt, Artificial Sequence
  mRNA product Design a-3 comprising derived and/or modified sequence from HRSV(Memphis-37)__AIY60640.1__F-del_DSCav1_mut8 (opt3)
gggagagggcgcuuggcuugcaaggacccugagcugcggcauugaagcacacccaacccaacucgacugaagucagccucacugaaccggaucugagaaucuucucucucugggcuugccagggcucuccgaaccuagcuagcauccucuucaauuccaacuagaaagcuuaccauggagcugcccauccucaagaccaacgccauuacaacuauacuugcugcagugacgcugugcuucgccagcucccagaauaucaccgaagaguuuuaccaaucuacauguucagcggucaguaaaggcuauuugggggcuuuaagaacuggaugguacaccagcguuauuacaaucgaacuguccaacauuaaggagaucaaaugcaaugguaccgacgccaaggugaaacuaauaaagcaggaacucgauaaguauaaaaacgcaguaacugaccugcagcuucugaugcagucuacuccugccgcuggcucggggucagcaaucgccagcggaauugcuguguguaaggucuugcaccucgagggcgaggugaauaaaaucaagaacgcccugcugaguaccaauaaagcgguugugucccucucugguugcggggucagcguguuaacguucaagguacuggaucuuaagaacuacauugacaaacaauugcugccaauccuaaauaagcaguccuguucaauaccgaacauugaaacuguuaucgaguuucagcagaaaaauaacaggcuccuggaaauuacccgggaguucagugugaaugcaggagucacaacucccgugagcaccuauaugcuuacaaacucugagcuguugucccucaucaaugauaugccuaucaccaacgaccaaaagaaacugaugucaaacaaugugcagauuguccgccagcagagcuacaguauaaugugcaucauuaaggaagagguuuuagccuaugugguacaacugccacucuacggcgugaucgauacgcccuguuggaaacuucauacuucuccucugugcacaaccaacacuaaggaaggcuccaauauauguuugacacgaaccgaccgugggugguacugcgauaacgcuggaagcgucucguuuuucccacaggccgagacguguaaggugcagucuaauagaguuuucugcgacaccaugaacucccuaacacugcccucagaagugaaucucugcaacauugauaucuucaauccuaaauaugacuguaagaucaugacaaguaaaaccgaugucagcuccucugugauuacaagccugggugcaaucguaucaugcuacggcaagacuaaauguaccgcuaguaacaagugcagggggauuauaaagacauuuuccaauggaugugacuauguuagcaacaaaggcguggacaccgucucuguggguaauacucuuuacuaugucaacaagcaagaggggcagucacuguacgugaaaggagagccaaucauuaauuucuaugauccguugguuuuucccagugacgaauuugaugccagcaucucccaggugaacgagaagaucaaccagucucucgcguuuauucggaaaucggacgaacuguuacacaauguaaacgucggcaagagcacgacaaauauaaugaucaccacuauuaucauugugaucauaguuauccugcuacuccugauugccgugggccuuuucuuguacugcaaggcacgcugaggacuagucccuguucccagagcccacuuuuuuuucuuuuuuugaaauaaaauagccugucuuucagaucuaaaaaaaaaaaaaaaaaaaaaaaaaaaaaaaaaaaaaaaaaaaaaaaaaaaaaaaaaaaaaaaaugcaucccccccccccccccccccccccccccccccaaaggcucuuuucagagccaccagaauu

SEQ ID NO: 19504 - RNA, 1921 nt, Artificial Sequence
  mRNA product Design a-3 comprising derived and/or modified sequence from HRSV(Memphis-37)__AIY60640.1__F-del_DSCav1_mut8 (opt4)
gggagagggcgcuuggcuugcaaggacccugagcugcggcauugaagcacacccaacccaacucgacugaagucagccucacugaaccggaucugagaaucuucucucucugggcuugccagggcucuccgaaccuagcuagcauccucuucaauuccaacuagaaagcuuaccauggagcugcccauccugaagaccaacgccaucaccaccauccuggccgccgugacccugugcuucgccagcagccagaacaucaccgaggaguucuaccagagcaccugcagcgccgugagcaagggcuaccugggcgcccugagaaccggcugguacaccagcgugaucaccaucgagcugagcaacaucaaggagaucaagugcaacggcaccgacgccaaggugaagcugaucaagcaggagcuggacaaguacaagaacgccgugaccgaccugcagcugcugaugcagagcacccccgccgccggcagcggcagcgccaucgccagcggcaucgccgugugcaaggugcugcaccuggagggcgaggugaacaagaucaagaacgcccugcugagcaccaacaaggccguggugagccugagcggcugcggcgugagcgugcugaccuucaaggugcuggaccugaagaacuacaucgacaagcagcugcugcccauccugaacaagcagagcugcagcauccccaacaucgagaccgugaucgaguuccagcagaagaacaacagacugcuggagaucaccagagaguucagcgugaacgccggcgugaccacccccgugagcaccuacaugcugaccaacagcgagcugcugagccugaucaacgacaugcccaucaccaacgaccagaagaagcugaugagcaacaacgugcagaucgugagacagcagagcuacagcaucaugugcaucaucaaggaggaggugcuggccuacguggugcagcugccccuguacggcgugaucgacacccccugcuggaagcugcacaccagcccccugugcaccaccaacaccaaggagggcagcaacaucugccugaccagaaccgacagaggcugguacugcgacaacgccggcagcgugagcuucuucccccaggccgagaccugcaaggugcagagcaacagaguguucugcgacaccaugaacagccugacccugcccagcgaggugaaccugugcaacaucgacaucuucaaccccaaguacgacugcaagaucaugaccagcaagaccgacgugagcagcagcgugaucaccagccugggcgccaucgugagcugcuacggcaagaccaagugcaccgccagcaacaagugcagaggcaucaucaagaccuucagcaacggcugcgacuacgugagcaacaagggcguggacaccgugagcgugggcaacacccuguacuacgugaacaagcaggagggccagagccuguacgugaagggcgagcccaucaucaacuucuacgacccccugguguuccccagcgacgaguucgacgccagcaucagccaggugaacgagaagaucaaccagagccuggccuucaucagaaagagcgacgagcugcugcacaacgugaacgugggcaagagcaccaccaacaucaugaucaccaccaucaucaucgugaucaucgugauccugcugcugcugaucgccgugggccuguuccuguacugcaaggccagaugaggacuagucccuguucccagagcccacuuuuuuuucuuuuuuugaaauaaaauagccugucuuucagaucuaaaaaaaaaaaaaaaaaaaaaaaaaaaaaaaaaaaaaaaaaaaaaaaaaaaaaaaaaaaaaaaaugcaucccccccccccccccccccccccccccccccaaaggcucuuuucagagccaccagaauu

SEQ ID NO: 19505 - RNA, 1921 nt, Artificial Sequence
  mRNA product Design a-3 comprising derived and/or modified sequence from HRSV(Memphis-37)__AIY60640.1__F-del_DSCav1_mut8 (opt5)
gggagagggcgcuuggcuugcaaggacccugagcugcggcauugaagcacacccaacccaacucgacugaagucagccucacugaaccggaucugagaaucuucucucucugggcuugccagggcucuccgaaccuagcuagcauccucuucaauuccaacuagaaagcuuaccauggagcugcccauccucaagaccaacgccauuacaacgauccuggcugccgugacccuuugcuucgcgagcucccagaauauuacagaagaguuuuaccaaucuaccuguagcgcugucuccaaaggcuaucugggggcccucagaacaggaugguacaccucuguuaucacaauugaacugagcaacaucaaggagaucaaaugcaauggcaccgacgccaaggugaaacuuauuaagcaggaacuggauaaguauaaaaacgcugugacggaccuccagcugcugaugcaguccaccccugccgcugggucuggaagcgccaucgcguccggcauugccgucuguaaggugcuccaccuggagggggagguuaauaaaaucaagaacgcccuucugagcacaaauaaagcuguggucucucucuccggaugcggcgugagcguucugaccuucaaggugcuugaucugaagaacuacauugacaaacaacuccugccgauccugaauaagcagucuuguuccauucccaacaucgaaacagucaucgaguuucagcagaaaaauaaccggcuccuggaaauuacccgcgaguucagcgugaaugcuggcgugacgacaccugucucuaccuauaugcuuacaaacuccgagcugcucagccugaucaaugauaugcccauuaccaacgaccaaaagaaacuuauguccaacaauguucagaucgugagacagcagucuuacagcauuaugugcaucaucaaggaagaggugcuggccuaugucgugcaacucccucuguacgggguuauugauacccccuguuggaaacugcauacauccccucucugcacgaccaacacaaaggaaggaagcaauaucugucugacccggacagaccgcggcugguacugcgauaacgcggggucuguguccuuuuucccgcaggccgagaccuguaagguccagagcaauagaguguuuugcgacacgaugaacucucuuacacugcccagcgaaguuaaucucugcaacauugauaucuucaauccuaaauaugacuguaagauuaugaccuccaaaaccgaugugucuagcuccgucaucacaagccugggagcuaucgugucuugcuacggcaagaccaaauguacagccuccaacaagugccgggggauuaucaagacguuuagcaauggaugugacuaugucucuaacaaaggcguggacaccguuuccgugggcaauacacuuuacuaugucaacaagcaagaggggcagagccuguacgugaaaggagagcccauuaucaauuucuaugauccucucguuuuucccuccgacgaguucgaugcuucuauuagccaggugaacgaaaagaucaaccagucccuggccuuuauucgcaaaucugacgaacugcuccacaaugucaacgugggcaagagcaccacaaauaucaugaucaccacgauuaucauugugaucauuguuauccugcuucugcucaucgccgucgggcuguuccuguacugcaaggcuagaugaggacuagucccuguucccagagcccacuuuuuuuucuuuuuuugaaauaaaauagccugucuuucagaucuaaaaaaaaaaaaaaaaaaaaaaaaaaaaaaaaaaaaaaaaaaaaaaaaaaaaaaaaaaaaaaaaugcaucccccccccccccccccccccccccccccccaaaggcucuuuucagagccaccagaauu

SEQ ID NO: 19506 - RNA, 1921 nt, Artificial Sequence
  mRNA product Design a-3 comprising derived and/or modified sequence from HRSV(Memphis-37)__AIY60640.1__F-del_DSCav1_mut8 (opt6)
gggagagggcgcuuggcuugcaaggacccugagcugcggcauugaagcacacccaacccaacucgacugaagucagccucacugaaccggaucugagaaucuucucucucugggcuugccagggcucuccgaaccuagcuagcauccucuucaauuccaacuagaaagcuuaccauggaacuacccauacuaaaaacaaacgcaauuacaacaauacuugccgcaguaaccuuaugcuuugccucaucccaaaacauaacagaagaauuuuaucaaucaacaugcuccgcaguaucaaaaggauaccuaggcgcucuaagaacaggaugguacacauccguaaucacaauagaacuauccaauauaaaagaaauaaaauguaauggaacagaugcaaaaguuaaauuaauaaaacaagaacuagacaaauacaaaaacgcaguuaccgaucuccaacuauuaaugcaaucaacaccagcugcaggaaguggaagcgccauagcaagcggaauagcagucugcaaaguauuacaucuugaaggcgaaguaaacaaaaucaaaaaugcccuccucucaacaaacaaagcuguaguaucccuaucaggaugcgguguaucuguucuuacauuuaaaguacucgaucuaaaaaacuacaucgauaaacaguuacuuccaauacucaacaaacaaucauguagcauaccaaacauagaaacaguaauagaauuucaacaaaaaaacaaucgacuacucgaaauaacuagagaauuuucuguaaacgcuggaguaaccacaccagugucuaccuauaugcuuacaaauagcgaacuccuaucacuaaucaaugacaugccaauaacaaaugaccagaaaaaacucaugucaaauaacguacaaauaguacgacaacaaagcuacuccauaaugugcauaaucaaagaagaaguauuagccuacguuguucaacuaccauuauauggaguuauagacacuccaugcuggaaauuacauacaagcccacucuguacaacaaacacaaaagaaggcucaaacauaugcuuaacaagaacagauagaggaugguacugcgauaacgcaggcucagucucauuuuuuccacaagccgaaaccugcaaaguacaaucaaauagaguuuuuugcgacacaaugaacucacucacucuaccaagugaaguaaaucucuguaauaucgacauauucaacccaaaauaugacugcaaaauaaugacaucuaaaaccgauguauccucaagcguaaucacaucauuaggagcuauaguuuccugcuacgguaaaacaaaaugcacagcauccaacaaaugucgcgguaucaucaaaacauucuccaacggaugugauuacguaucaaacaaaggugucgacaccguaagcguaggcaacacuuuauacuauguaaacaaacaagaaggacaaagucuauauguaaaaggagaaccaauaauaaacuucuaugacccccuaguauucccuuccgacgaauuugaugcaagcauuucacaaguuaacgaaaaaaucaaucaaucccuugcuuucauaagaaaaucagacgaauuacuacacaacguaaacguaggaaaaagcacaacaaauaucaugauuacaacaauaauaauuguaauaauaguaauacuccucuuacuuauagcagucggcuuauuccuuuacugcaaagcaagauaaggacuagucccuguucccagagcccacuuuuuuuucuuuuuuugaaauaaaauagccugucuuucagaucuaaaaaaaaaaaaaaaaaaaaaaaaaaaaaaaaaaaaaaaaaaaaaaaaaaaaaaaaaaaaaaaaugcaucccccccccccccccccccccccccccccccaaaggcucuuuucagagccaccagaauu

SEQ ID NO: 19507 - RNA, 1921 nt, Artificial Sequence
  mRNA product Design a-3 comprising derived and/or modified sequence from HRSV(Memphis-37)__AIY60640.1__F-del_DSCav1_mut8 (opt11)
gggagagggcgcuuggcuugcaaggacccugagcugcggcauugaagcacacccaacccaacucgacugaagucagccucacugaaccggaucugagaaucuucucucucugggcuugccagggcucuccgaaccuagcuagcauccucuucaauuccaacuagaaagcuuaccauggaacuccccauccuaaaaaccaacgcaaucaccaccauccucgccgccguaacacucugcuuugcaagcucccaaaacaucaccgaagaauuuuaccaaucuaccugcagcgccguaucuaaaggauaccuaggagcccucagaaccgguugguacaccucugucaucacaauagaacucuccaacaucaaagaaaucaaaugcaacggcaccgacgccaaagucaaacucaucaaacaagaacucgacaaauauaaaaacgccguaaccgaccuccaacuccucaugcaauccacccccgccgccggcaguggcuccgcuaucgccuccggaaucgccguuugcaaaguccugcaccuagaaggcgaagucaacaaaaucaaaaacgcccugcucucaaccaacaaagcugucguaagccucuccggcugcggagucuccguccuuaccuucaaaguacucgaccuuaaaaacuacaucgacaaacaacuucuccccauacucaauaaacaauccugcuccauacccaacaucgaaacagucaucgaguuccaacagaaaaauaaccgccuccucgaaauaacccgcgaguucuccgucaacgcaggcgucaccaccccagucuccaccuacaugcugacaaacuccgaacuccuaucccucaucaacgacaugcccaucaccaacgaccaaaagaaacucaugagcaauaacguccaaaucguacgacaacaauccuacagcaucauguguaucaucaaagaagaaguacucgccuacgucguccaacucccacuauacggcgucaucgacacaccaugcuggaaacuucacaccuccccacucugcaccacaaacacaaaagaaggcuccaacaucugccuuacccgaaccgaccgcgggugguacugcgacaacgccggaucagucucguucuuuccccaagccgaaaccugcaaaguacaaucaaaucgcgucuucugcgacaccaugaacuccuuaacacuaccauccgaaguaaaccucugcaacauagacaucuucaacccaaaauacgacugcaaaaucaugaccuccaaaaccgacguauccuccuccguaaucaccagccucggcgcaauagucucaugcuacggcaaaaccaaaugcaccgccuccaacaaaugccgcggcaucauaaaaacuuucucuaacggaugcgacuacgucagcaacaaaggcgucgacaccguauccguagguaauacacuuuacuacgucaauaaacaagaaggccaaucccucuacgucaaaggagaacccaucauaaacuucuacgacccccucgucuuccccuccgacgaguucgacgccuccaucagccaggucaacgaaaagaucaaccaaucacucgccuucauccgcaaaagcgacgaacuccuccacaacguaaacgucggcaaauccacaaccaacauaaugaucaccacuaucaucaucgugauaaucgucauuuuacuucuccucaucgccguaggccucuuccuauacugcaaagcccgcuaaggacuagucccuguucccagagcccacuuuuuuuucuuuuuuugaaauaaaauagccugucuuucagaucuaaaaaaaaaaaaaaaaaaaaaaaaaaaaaaaaaaaaaaaaaaaaaaaaaaaaaaaaaaaaaaaaugcaucccccccccccccccccccccccccccccccaaaggcucuuuucagagccaccagaauu

SEQ ID NO: 19508 - RNA, 1870 nt, Artificial Sequence
  mRNA product Design a-4 comprising derived and/or modified sequence from HRSV(Memphis-37)__AIY60640.1__F-del_DSCav1_mut8 (opt1)
gggagacuccugucgggcggaaguaggaggaguagaguuuaaaaacaguacucuuuuuccgguucgggacguaguugaagcaacgacaagccggauaaccgcucuugagacaggaagcuuaccauggagcugcccauccucaagaccaacgccaucaccacgauccuggccgcggugacccugugcuucgccagcucccagaacaucaccgaggaguucuaccagagcacgugcuccgccgucagcaagggcuaccucggcgcccugcgcaccgggugguacaccagcgugaucaccaucgagcuguccaacaucaaggagaucaagugcaacggcaccgacgccaaggugaagcucaucaagcaggagcuggacaaguacaagaacgcggucacggaccugcagcuccugaugcagagcaccccggccgccggcuccgggagcgcgaucgccuccggcaucgccgucugcaaggugcugcaccucgagggcgaggugaacaagaucaagaacgcccugcuguccaccaacaaggccgucgugagccucuccggcugcggggugagcguccugaccuucaaggugcuggaccucaagaacuacaucgacaagcagcugcugcccauccugaacaagcagagcugcuccauccccaacaucgagaccgucaucgaguuccagcagaagaacaaccgccuccuggagaucacgcgggaguucagcgugaacgcgggcgugaccacccccgucuccaccuacaugcugacgaacagcgagcuccugucccugaucaacgacaugccgaucaccaacgaccagaagaagcucaugagcaacaacgugcagaucgugcgccagcaguccuacagcaucaugugcaucaucaaggaggagguccuggccuacguggugcagcugccccucuacggggucaucgacacccccugcuggaagcugcacaccagcccccugugcacgaccaacaccaaggagggcuccaacaucugccucacccggacggaccgcgggugguacugcgacaacgccggcagcguguccuucuucccgcaggccgagaccugcaagguccagagcaaccggguguucugcgacaccaugaacucccugacccugcccagcgaggugaaccucugcaacaucgacaucuucaaccccaaguacgacugcaagaucaugacguccaagaccgacgucagcuccagcgugaucaccucccugggcgccaucgugagcugcuacgggaagaccaagugcacggcgagcaacaagugccgcggcaucaucaagaccuucuccaacgggugcgacuacgucagcaacaagggcguggacaccguguccgucggcaacacccuguacuacgugaacaagcaggagggccagagccucuacgugaagggggagcccaucaucaacuucuacgacccgcuggucuuccccuccgacgaguucgacgccagcaucucccaggugaacgagaagaucaaccagagccuggccuucauccggaaguccgacgagcuccugcacaacgugaacgucggcaagagcaccacgaacaucaugaucaccaccaucaucaucgugaucaucgugauccugcugcuccugaucgccgucgggcuguuccucuacugcaaggcccgcugaggacuagucccuguucccagagcccacuuuuuuuucuuuuuuugaaauaaaauagccugucuuucagaucuaaaaaaaaaaaaaaaaaaaaaaaaaaaaaaaaaaaaaaaaaaaaaaaaaaaaaaaaaaaaaaaaugcaucccccccccccccccccccccccccccccccaaaggcucuuuucagagccaccagaauu

SEQ ID NO: 19509 - RNA, 1870 nt, Artificial Sequence
  mRNA product Design a-4 comprising derived and/or modified sequence from HRSV(Memphis-37)__AIY60640.1__F-del_DSCav1_mut8 (opt1)
gggagacuccugucgggcggaaguaggaggaguagaguuuaaaaacaguacucuuuuuccgguucgggacguaguugaagcaacgacaagccggauaaccgcucuugagacaggaagcuuaccauggagcugcccauccucaagaccaacgccaucaccacgauccuggccgcggugacccugugcuucgccagcucccagaacaucaccgaggaguucuaccagagcacgugcuccgccgucagcaagggcuaccucggggcccugcgcaccggcugguacaccuccgugaucaccaucgagcugagcaacaucaaggagaucaagugcaacgggaccgacgccaaggugaagcucaucaagcaggagcuggacaaguacaagaacgcggucacggaccugcagcuccugaugcaguccaccccggccgccggcagcggguccgccaucgcgagcggcaucgccgugugcaaggugcugcaccucgagggcgaggucaacaagaucaagaacgcccugcuguccaccaacaaggccguggugagccucuccgggugcggcgucagcgugcugaccuucaaggugcuggaccucaagaacuacaucgacaagcagcugcugcccauccucaacaagcaguccugcagcauccccaacaucgagacggucaucgaguuccagcagaagaacaaccggcugcuggagaucacccgcgaguucuccgugaacgccggggugaccacccccgucagcacguacaugcucaccaacuccgagcugcugagccucaucaacgacaugccgaucaccaacgaccagaagaagcugaugagcaacaacgugcagaucgugcggcagcaguccuacagcaucaugugcaucaucaaggaggagguccuggcguacguggugcagcucccccuguacggcgucaucgacacccccugcuggaagcugcacacgagcccccucugcaccaccaacaccaaggagggguccaacaucugccugacgcgcaccgaccggggcugguacugcgacaacgccggcuccgugagcuucuucccgcaggccgagaccugcaaggugcaguccaaccgcgucuucugcgacaccaugaacagccugacgcuccccuccgaggugaaccugugcaacaucgacaucuucaaccccaaguacgacugcaagaucaugaccagcaagaccgacgucuccagcuccgugaucaccagccugggggccaucguguccugcuacggcaagacgaagugcaccgccagcaacaagugccgggggaucaucaagaccuucuccaacggcugcgacuacgucagcaacaagggcguggacaccguguccgucgggaacacgcucuacuacgugaacaagcaggagggccagagccuguacgugaagggggagcccaucaucaacuucuacgacccgcuggucuuccccagcgacgaguucgacgcguccaucagccaggugaacgagaagaucaaccagucccucgccuucauccgcaagagcgacgagcugcugcacaacgugaacgucggcaaguccaccaccaacaucaugaucaccaccaucaucaucgugaucaucgugauccuccugcugcucaucgccgucgggcuguuccuguacugcaaggcccggugaggacuagucccuguucccagagcccacuuuuuuuucuuuuuuugaaauaaaauagccugucuuucagaucuaaaaaaaaaaaaaaaaaaaaaaaaaaaaaaaaaaaaaaaaaaaaaaaaaaaaaaaaaaaaaaaaugcaucccccccccccccccccccccccccccccccaaaggcucuuuucagagccaccagaauu

SEQ ID NO: 19510 - RNA, 1870 nt, Artificial Sequence
  mRNA product Design a-4 comprising derived and/or modified sequence from HRSV(Memphis-37)__AIY60640.1__F-del_DSCav1_mut8 (opt2)
gggagacuccugucgggcggaaguaggaggaguagaguuuaaaaacaguacucuuuuuccgguucgggacguaguugaagcaacgacaagccggauaaccgcucuugagacaggaagcuuaccauggagcuccccauccucaagaccaacgccaucaccaccauccucgccgccgucacccucugcuucgccuccucccagaacaucaccgaggaguucuaccaguccaccugcuccgccgucuccaagggcuaccucggcgcccuccgcaccggcugguacaccuccgucaucaccaucgagcucuccaacaucaaggagaucaagugcaacggcaccgacgccaaggucaagcucaucaagcaggagcucgacaaguacaagaacgccgucaccgaccuccagcuccucaugcaguccacccccgccgccggcuccggcuccgccaucgccuccggcaucgccgucugcaagguccuccaccucgagggcgaggucaacaagaucaagaacgcccuccucuccaccaacaaggccgucgucucccucuccggcugcggcgucuccguccucaccuucaagguccucgaccucaagaacuacaucgacaagcagcuccuccccauccucaacaagcaguccugcuccauccccaacaucgagaccgucaucgaguuccagcagaagaacaaccgccuccucgagaucacccgcgaguucuccgucaacgccggcgucaccacccccgucuccaccuacaugcucaccaacuccgagcuccucucccucaucaacgacaugcccaucaccaacgaccagaagaagcucauguccaacaacguccagaucguccgccagcaguccuacuccaucaugugcaucaucaaggaggagguccucgccuacgucguccagcucccccucuacggcgucaucgacacccccugcuggaagcuccacaccuccccccucugcaccaccaacaccaaggagggcuccaacaucugccucacccgcaccgaccgcggcugguacugcgacaacgccggcuccgucuccuucuucccccaggccgagaccugcaagguccaguccaaccgcgucuucugcgacaccaugaacucccucacccuccccuccgaggucaaccucugcaacaucgacaucuucaaccccaaguacgacugcaagaucaugaccuccaagaccgacgucuccuccuccgucaucaccucccucggcgccaucgucuccugcuacggcaagaccaagugcaccgccuccaacaagugccgcggcaucaucaagaccuucuccaacggcugcgacuacgucuccaacaagggcgucgacaccgucuccgucggcaacacccucuacuacgucaacaagcaggagggccagucccucuacgucaagggcgagcccaucaucaacuucuacgacccccucgucuuccccuccgacgaguucgacgccuccaucucccaggucaacgagaagaucaaccagucccucgccuucauccgcaaguccgacgagcuccuccacaacgucaacgucggcaaguccaccaccaacaucaugaucaccaccaucaucaucgucaucaucgucauccuccuccuccucaucgccgucggccucuuccucuacugcaaggcccgcugaggacuagucccuguucccagagcccacuuuuuuuucuuuuuuugaaauaaaauagccugucuuucagaucuaaaaaaaaaaaaaaaaaaaaaaaaaaaaaaaaaaaaaaaaaaaaaaaaaaaaaaaaaaaaaaaaugcaucccccccccccccccccccccccccccccccaaaggcucuuuucagagccaccagaauu

SEQ ID NO: 19511 - RNA, 1870 nt, Artificial Sequence
  mRNA product Design a-4 comprising derived and/or modified sequence from HRSV(Memphis-37)__AIY60640.1__F-del_DSCav1_mut8 (opt3)
gggagacuccugucgggcggaaguaggaggaguagaguuuaaaaacaguacucuuuuuccgguucgggacguaguugaagcaacgacaagccggauaaccgcucuugagacaggaagcuuaccauggagcugcccauccucaagaccaacgccauuacaacuauacuugcugcagugacgcugugcuucgccagcucccagaauaucaccgaagaguuuuaccaaucuacauguucagcggucaguaaaggcuauuugggggcuuuaagaacuggaugguacaccagcguuauuacaaucgaacuguccaacauuaaggagaucaaaugcaaugguaccgacgccaaggugaaacuaauaaagcaggaacucgauaaguauaaaaacgcaguaacugaccugcagcuucugaugcagucuacuccugccgcuggcucggggucagcaaucgccagcggaauugcuguguguaaggucuugcaccucgagggcgaggugaauaaaaucaagaacgcccugcugaguaccaauaaagcgguugugucccucucugguugcggggucagcguguuaacguucaagguacuggaucuuaagaacuacauugacaaacaauugcugccaauccuaaauaagcaguccuguucaauaccgaacauugaaacuguuaucgaguuucagcagaaaaauaacaggcuccuggaaauuacccgggaguucagugugaaugcaggagucacaacucccgugagcaccuauaugcuuacaaacucugagcuguugucccucaucaaugauaugccuaucaccaacgaccaaaagaaacugaugucaaacaaugugcagauuguccgccagcagagcuacaguauaaugugcaucauuaaggaagagguuuuagccuaugugguacaacugccacucuacggcgugaucgauacgcccuguuggaaacuucauacuucuccucugugcacaaccaacacuaaggaaggcuccaauauauguuugacacgaaccgaccgugggugguacugcgauaacgcuggaagcgucucguuuuucccacaggccgagacguguaaggugcagucuaauagaguuuucugcgacaccaugaacucccuaacacugcccucagaagugaaucucugcaacauugauaucuucaauccuaaauaugacuguaagaucaugacaaguaaaaccgaugucagcuccucugugauuacaagccugggugcaaucguaucaugcuacggcaagacuaaauguaccgcuaguaacaagugcagggggauuauaaagacauuuuccaauggaugugacuauguuagcaacaaaggcguggacaccgucucuguggguaauacucuuuacuaugucaacaagcaagaggggcagucacuguacgugaaaggagagccaaucauuaauuucuaugauccguugguuuuucccagugacgaauuugaugccagcaucucccaggugaacgagaagaucaaccagucucucgcguuuauucggaaaucggacgaacuguuacacaauguaaacgucggcaagagcacgacaaauauaaugaucaccacuauuaucauugugaucauaguuauccugcuacuccugauugccgugggccuuuucuuguacugcaaggcacgcugaggacuagucccuguucccagagcccacuuuuuuuucuuuuuuugaaauaaaauagccugucuuucagaucuaaaaaaaaaaaaaaaaaaaaaaaaaaaaaaaaaaaaaaaaaaaaaaaaaaaaaaaaaaaaaaaaugcaucccccccccccccccccccccccccccccccaaaggcucuuuucagagccaccagaauu

SEQ ID NO: 19512 - RNA, 1870 nt, Artificial Sequence
  mRNA product Design a-4 comprising derived and/or modified sequence from HRSV(Memphis-37)__AIY60640.1__F-del_DSCav1_mut8 (opt4)
gggagacuccugucgggcggaaguaggaggaguagaguuuaaaaacaguacucuuuuuccgguucgggacguaguugaagcaacgacaagccggauaaccgcucuugagacaggaagcuuaccauggagcugcccauccugaagaccaacgccaucaccaccauccuggccgccgugacccugugcuucgccagcagccagaacaucaccgaggaguucuaccagagcaccugcagcgccgugagcaagggcuaccugggcgcccugagaaccggcugguacaccagcgugaucaccaucgagcugagcaacaucaaggagaucaagugcaacggcaccgacgccaaggugaagcugaucaagcaggagcuggacaaguacaagaacgccgugaccgaccugcagcugcugaugcagagcacccccgccgccggcagcggcagcgccaucgccagcggcaucgccgugugcaaggugcugcaccuggagggcgaggugaacaagaucaagaacgcccugcugagcaccaacaaggccguggugagccugagcggcugcggcgugagcgugcugaccuucaaggugcuggaccugaagaacuacaucgacaagcagcugcugcccauccugaacaagcagagcugcagcauccccaacaucgagaccgugaucgaguuccagcagaagaacaacagacugcuggagaucaccagagaguucagcgugaacgccggcgugaccacccccgugagcaccuacaugcugaccaacagcgagcugcugagccugaucaacgacaugcccaucaccaacgaccagaagaagcugaugagcaacaacgugcagaucgugagacagcagagcuacagcaucaugugcaucaucaaggaggaggugcuggccuacguggugcagcugccccuguacggcgugaucgacacccccugcuggaagcugcacaccagcccccugugcaccaccaacaccaaggagggcagcaacaucugccugaccagaaccgacagaggcugguacugcgacaacgccggcagcgugagcuucuucccccaggccgagaccugcaaggugcagagcaacagaguguucugcgacaccaugaacagccugacccugcccagcgaggugaaccugugcaacaucgacaucuucaaccccaaguacgacugcaagaucaugaccagcaagaccgacgugagcagcagcgugaucaccagccugggcgccaucgugagcugcuacggcaagaccaagugcaccgccagcaacaagugcagaggcaucaucaagaccuucagcaacggcugcgacuacgugagcaacaagggcguggacaccgugagcgugggcaacacccuguacuacgugaacaagcaggagggccagagccuguacgugaagggcgagcccaucaucaacuucuacgacccccugguguuccccagcgacgaguucgacgccagcaucagccaggugaacgagaagaucaaccagagccuggccuucaucagaaagagcgacgagcugcugcacaacgugaacgugggcaagagcaccaccaacaucaugaucaccaccaucaucaucgugaucaucgugauccugcugcugcugaucgccgugggccuguuccuguacugcaaggccagaugaggacuagucccuguucccagagcccacuuuuuuuucuuuuuuugaaauaaaauagccugucuuucagaucuaaaaaaaaaaaaaaaaaaaaaaaaaaaaaaaaaaaaaaaaaaaaaaaaaaaaaaaaaaaaaaaaugcaucccccccccccccccccccccccccccccccaaaggcucuuuucagagccaccagaauu

SEQ ID NO: 19513 - RNA, 1870 nt, Artificial Sequence
  mRNA product Design a-4 comprising derived and/or modified sequence from HRSV(Memphis-37)__AIY60640.1__F-del_DSCav1_mut8 (opt5)
gggagacuccugucgggcggaaguaggaggaguagaguuuaaaaacaguacucuuuuuccgguucgggacguaguugaagcaacgacaagccggauaaccgcucuugagacaggaagcuuaccauggagcugcccauccucaagaccaacgccauuacaacgauccuggcugccgugacccuuugcuucgcgagcucccagaauauuacagaagaguuuuaccaaucuaccuguagcgcugucuccaaaggcuaucugggggcccucagaacaggaugguacaccucuguuaucacaauugaacugagcaacaucaaggagaucaaaugcaauggcaccgacgccaaggugaaacuuauuaagcaggaacuggauaaguauaaaaacgcugugacggaccuccagcugcugaugcaguccaccccugccgcugggucuggaagcgccaucgcguccggcauugccgucuguaaggugcuccaccuggagggggagguuaauaaaaucaagaacgcccuucugagcacaaauaaagcuguggucucucucuccggaugcggcgugagcguucugaccuucaaggugcuugaucugaagaacuacauugacaaacaacuccugccgauccugaauaagcagucuuguuccauucccaacaucgaaacagucaucgaguuucagcagaaaaauaaccggcuccuggaaauuacccgcgaguucagcgugaaugcuggcgugacgacaccugucucuaccuauaugcuuacaaacuccgagcugcucagccugaucaaugauaugcccauuaccaacgaccaaaagaaacuuauguccaacaauguucagaucgugagacagcagucuuacagcauuaugugcaucaucaaggaagaggugcuggccuaugucgugcaacucccucuguacgggguuauugauacccccuguuggaaacugcauacauccccucucugcacgaccaacacaaaggaaggaagcaauaucugucugacccggacagaccgcggcugguacugcgauaacgcggggucuguguccuuuuucccgcaggccgagaccuguaagguccagagcaauagaguguuuugcgacacgaugaacucucuuacacugcccagcgaaguuaaucucugcaacauugauaucuucaauccuaaauaugacuguaagauuaugaccuccaaaaccgaugugucuagcuccgucaucacaagccugggagcuaucgugucuugcuacggcaagaccaaauguacagccuccaacaagugccgggggauuaucaagacguuuagcaauggaugugacuaugucucuaacaaaggcguggacaccguuuccgugggcaauacacuuuacuaugucaacaagcaagaggggcagagccuguacgugaaaggagagcccauuaucaauuucuaugauccucucguuuuucccuccgacgaguucgaugcuucuauuagccaggugaacgaaaagaucaaccagucccuggccuuuauucgcaaaucugacgaacugcuccacaaugucaacgugggcaagagcaccacaaauaucaugaucaccacgauuaucauugugaucauuguuauccugcuucugcucaucgccgucgggcuguuccuguacugcaaggcuagaugaggacuagucccuguucccagagcccacuuuuuuuucuuuuuuugaaauaaaauagccugucuuucagaucuaaaaaaaaaaaaaaaaaaaaaaaaaaaaaaaaaaaaaaaaaaaaaaaaaaaaaaaaaaaaaaaaugcaucccccccccccccccccccccccccccccccaaaggcucuuuucagagccaccagaauu

SEQ ID NO: 19514 - RNA, 1870 nt, Artificial Sequence
  mRNA product Design a-4 comprising derived and/or modified sequence from HRSV(Memphis-37)__AIY60640.1__F-del_DSCav1_mut8 (opt6)
gggagacuccugucgggcggaaguaggaggaguagaguuuaaaaacaguacucuuuuuccgguucgggacguaguugaagcaacgacaagccggauaaccgcucuugagacaggaagcuuaccauggaacuacccauacuaaaaacaaacgcaauuacaacaauacuugccgcaguaaccuuaugcuuugccucaucccaaaacauaacagaagaauuuuaucaaucaacaugcuccgcaguaucaaaaggauaccuaggcgcucuaagaacaggaugguacacauccguaaucacaauagaacuauccaauauaaaagaaauaaaauguaauggaacagaugcaaaaguuaaauuaauaaaacaagaacuagacaaauacaaaaacgcaguuaccgaucuccaacuauuaaugcaaucaacaccagcugcaggaaguggaagcgccauagcaagcggaauagcagucugcaaaguauuacaucuugaaggcgaaguaaacaaaaucaaaaaugcccuccucucaacaaacaaagcuguaguaucccuaucaggaugcgguguaucuguucuuacauuuaaaguacucgaucuaaaaaacuacaucgauaaacaguuacuuccaauacucaacaaacaaucauguagcauaccaaacauagaaacaguaauagaauuucaacaaaaaaacaaucgacuacucgaaauaacuagagaauuuucuguaaacgcuggaguaaccacaccagugucuaccuauaugcuuacaaauagcgaacuccuaucacuaaucaaugacaugccaauaacaaaugaccagaaaaaacucaugucaaauaacguacaaauaguacgacaacaaagcuacuccauaaugugcauaaucaaagaagaaguauuagccuacguuguucaacuaccauuauauggaguuauagacacuccaugcuggaaauuacauacaagcccacucuguacaacaaacacaaaagaaggcucaaacauaugcuuaacaagaacagauagaggaugguacugcgauaacgcaggcucagucucauuuuuuccacaagccgaaaccugcaaaguacaaucaaauagaguuuuuugcgacacaaugaacucacucacucuaccaagugaaguaaaucucuguaauaucgacauauucaacccaaaauaugacugcaaaauaaugacaucuaaaaccgauguauccucaagcguaaucacaucauuaggagcuauaguuuccugcuacgguaaaacaaaaugcacagcauccaacaaaugucgcgguaucaucaaaacauucuccaacggaugugauuacguaucaaacaaaggugucgacaccguaagcguaggcaacacuuuauacuauguaaacaaacaagaaggacaaagucuauauguaaaaggagaaccaauaauaaacuucuaugacccccuaguauucccuuccgacgaauuugaugcaagcauuucacaaguuaacgaaaaaaucaaucaaucccuugcuuucauaagaaaaucagacgaauuacuacacaacguaaacguaggaaaaagcacaacaaauaucaugauuacaacaauaauaauuguaauaauaguaauacuccucuuacuuauagcagucggcuuauuccuuuacugcaaagcaagauaaggacuagucccuguucccagagcccacuuuuuuuucuuuuuuugaaauaaaauagccugucuuucagaucuaaaaaaaaaaaaaaaaaaaaaaaaaaaaaaaaaaaaaaaaaaaaaaaaaaaaaaaaaaaaaaaaugcaucccccccccccccccccccccccccccccccaaaggcucuuuucagagccaccagaauu

SEQ ID NO: 19515 - RNA, 1870 nt, Artificial Sequence
  mRNA product Design a-4 comprising derived and/or modified sequence from HRSV(Memphis-37)__AIY60640.1__F-del_DSCav1_mut8 (opt11)
gggagacuccugucgggcggaaguaggaggaguagaguuuaaaaacaguacucuuuuuccgguucgggacguaguugaagcaacgacaagccggauaaccgcucuugagacaggaagcuuaccauggaacuccccauccuaaaaaccaacgcaaucaccaccauccucgccgccguaacacucugcuuugcaagcucccaaaacaucaccgaagaauuuuaccaaucuaccugcagcgccguaucuaaaggauaccuaggagcccucagaaccgguugguacaccucugucaucacaauagaacucuccaacaucaaagaaaucaaaugcaacggcaccgacgccaaagucaaacucaucaaacaagaacucgacaaauauaaaaacgccguaaccgaccuccaacuccucaugcaauccacccccgccgccggcaguggcuccgcuaucgccuccggaaucgccguuugcaaaguccugcaccuagaaggcgaagucaacaaaaucaaaaacgcccugcucucaaccaacaaagcugucguaagccucuccggcugcggagucuccguccuuaccuucaaaguacucgaccuuaaaaacuacaucgacaaacaacuucuccccauacucaauaaacaauccugcuccauacccaacaucgaaacagucaucgaguuccaacagaaaaauaaccgccuccucgaaauaacccgcgaguucuccgucaacgcaggcgucaccaccccagucuccaccuacaugcugacaaacuccgaacuccuaucccucaucaacgacaugcccaucaccaacgaccaaaagaaacucaugagcaauaacguccaaaucguacgacaacaauccuacagcaucauguguaucaucaaagaagaaguacucgccuacgucguccaacucccacuauacggcgucaucgacacaccaugcuggaaacuucacaccuccccacucugcaccacaaacacaaaagaaggcuccaacaucugccuuacccgaaccgaccgcgggugguacugcgacaacgccggaucagucucguucuuuccccaagccgaaaccugcaaaguacaaucaaaucgcgucuucugcgacaccaugaacuccuuaacacuaccauccgaaguaaaccucugcaacauagacaucuucaacccaaaauacgacugcaaaaucaugaccuccaaaaccgacguauccuccuccguaaucaccagccucggcgcaauagucucaugcuacggcaaaaccaaaugcaccgccuccaacaaaugccgcggcaucauaaaaacuuucucuaacggaugcgacuacgucagcaacaaaggcgucgacaccguauccguagguaauacacuuuacuacgucaauaaacaagaaggccaaucccucuacgucaaaggagaacccaucauaaacuucuacgacccccucgucuuccccuccgacgaguucgacgccuccaucagccaggucaacgaaaagaucaaccaaucacucgccuucauccgcaaaagcgacgaacuccuccacaacguaaacgucggcaaauccacaaccaacauaaugaucaccacuaucaucaucgugauaaucgucauuuuacuucuccucaucgccguaggccucuuccuauacugcaaagcccgcuaaggacuagucccuguucccagagcccacuuuuuuuucuuuuuuugaaauaaaauagccugucuuucagaucuaaaaaaaaaaaaaaaaaaaaaaaaaaaaaaaaaaaaaaaaaaaaaaaaaaaaaaaaaaaaaaaaugcaucccccccccccccccccccccccccccccccaaaggcucuuuucagagccaccagaauu

SEQ ID NO: 19516 - RNA, 1816 nt, Artificial Sequence
  mRNA product Design a-5 comprising derived and/or modified sequence from HRSV(Memphis-37)__AIY60640.1__F-del_DSCav1_mut8 (opt1)
gggagacuuucccauucuguagcagaauuugguguugccuguggucuuggucccgcggagaagcuuaccauggagcugcccauccucaagaccaacgccaucaccacgauccuggccgcggugacccugugcuucgccagcucccagaacaucaccgaggaguucuaccagagcacgugcuccgccgucagcaagggcuaccucggcgcccugcgcaccgggugguacaccagcgugaucaccaucgagcuguccaacaucaaggagaucaagugcaacggcaccgacgccaaggugaagcucaucaagcaggagcuggacaaguacaagaacgcggucacggaccugcagcuccugaugcagagcaccccggccgccggcuccgggagcgcgaucgccuccggcaucgccgucugcaaggugcugcaccucgagggcgaggugaacaagaucaagaacgcccugcuguccaccaacaaggccgucgugagccucuccggcugcggggugagcguccugaccuucaaggugcuggaccucaagaacuacaucgacaagcagcugcugcccauccugaacaagcagagcugcuccauccccaacaucgagaccgucaucgaguuccagcagaagaacaaccgccuccuggagaucacgcgggaguucagcgugaacgcgggcgugaccacccccgucuccaccuacaugcugacgaacagcgagcuccugucccugaucaacgacaugccgaucaccaacgaccagaagaagcucaugagcaacaacgugcagaucgugcgccagcaguccuacagcaucaugugcaucaucaaggaggagguccuggccuacguggugcagcugccccucuacggggucaucgacacccccugcuggaagcugcacaccagcccccugugcacgaccaacaccaaggagggcuccaacaucugccucacccggacggaccgcgggugguacugcgacaacgccggcagcguguccuucuucccgcaggccgagaccugcaagguccagagcaaccggguguucugcgacaccaugaacucccugacccugcccagcgaggugaaccucugcaacaucgacaucuucaaccccaaguacgacugcaagaucaugacguccaagaccgacgucagcuccagcgugaucaccucccugggcgccaucgugagcugcuacgggaagaccaagugcacggcgagcaacaagugccgcggcaucaucaagaccuucuccaacgggugcgacuacgucagcaacaagggcguggacaccguguccgucggcaacacccuguacuacgugaacaagcaggagggccagagccucuacgugaagggggagcccaucaucaacuucuacgacccgcuggucuuccccuccgacgaguucgacgccagcaucucccaggugaacgagaagaucaaccagagccuggccuucauccggaaguccgacgagcuccugcacaacgugaacgucggcaagagcaccacgaacaucaugaucaccaccaucaucaucgugaucaucgugauccugcugcuccugaucgccgucgggcuguuccucuacugcaaggcccgcugaggacuagucccuguucccagagcccacuuuuuuuucuuuuuuugaaauaaaauagccugucuuucagaucuaaaaaaaaaaaaaaaaaaaaaaaaaaaaaaaaaaaaaaaaaaaaaaaaaaaaaaaaaaaaaaaaugcaucccccccccccccccccccccccccccccccaaaggcucuuuucagagccaccagaauu

SEQ ID NO: 19517 - RNA, 1816 nt, Artificial Sequence
  mRNA product Design a-5 comprising derived and/or modified sequence from HRSV(Memphis-37)__AIY60640.1__F-del_DSCav1_mut8 (opt1)
gggagacuuucccauucuguagcagaauuugguguugccuguggucuuggucccgcggagaagcuuaccauggagcugcccauccucaagaccaacgccaucaccacgauccuggccgcggugacccugugcuucgccagcucccagaacaucaccgaggaguucuaccagagcacgugcuccgccgucagcaagggcuaccucggggcccugcgcaccggcugguacaccuccgugaucaccaucgagcugagcaacaucaaggagaucaagugcaacgggaccgacgccaaggugaagcucaucaagcaggagcuggacaaguacaagaacgcggucacggaccugcagcuccugaugcaguccaccccggccgccggcagcggguccgccaucgcgagcggcaucgccgugugcaaggugcugcaccucgagggcgaggucaacaagaucaagaacgcccugcuguccaccaacaaggccguggugagccucuccgggugcggcgucagcgugcugaccuucaaggugcuggaccucaagaacuacaucgacaagcagcugcugcccauccucaacaagcaguccugcagcauccccaacaucgagacggucaucgaguuccagcagaagaacaaccggcugcuggagaucacccgcgaguucuccgugaacgccggggugaccacccccgucagcacguacaugcucaccaacuccgagcugcugagccucaucaacgacaugccgaucaccaacgaccagaagaagcugaugagcaacaacgugcagaucgugcggcagcaguccuacagcaucaugugcaucaucaaggaggagguccuggcguacguggugcagcucccccuguacggcgucaucgacacccccugcuggaagcugcacacgagcccccucugcaccaccaacaccaaggagggguccaacaucugccugacgcgcaccgaccggggcugguacugcgacaacgccggcuccgugagcuucuucccgcaggccgagaccugcaaggugcaguccaaccgcgucuucugcgacaccaugaacagccugacgcuccccuccgaggugaaccugugcaacaucgacaucuucaaccccaaguacgacugcaagaucaugaccagcaagaccgacgucuccagcuccgugaucaccagccugggggccaucguguccugcuacggcaagacgaagugcaccgccagcaacaagugccgggggaucaucaagaccuucuccaacggcugcgacuacgucagcaacaagggcguggacaccguguccgucgggaacacgcucuacuacgugaacaagcaggagggccagagccuguacgugaagggggagcccaucaucaacuucuacgacccgcuggucuuccccagcgacgaguucgacgcguccaucagccaggugaacgagaagaucaaccagucccucgccuucauccgcaagagcgacgagcugcugcacaacgugaacgucggcaaguccaccaccaacaucaugaucaccaccaucaucaucgugaucaucgugauccuccugcugcucaucgccgucgggcuguuccuguacugcaaggcccggugaggacuagucccuguucccagagcccacuuuuuuuucuuuuuuugaaauaaaauagccugucuuucagaucuaaaaaaaaaaaaaaaaaaaaaaaaaaaaaaaaaaaaaaaaaaaaaaaaaaaaaaaaaaaaaaaaugcaucccccccccccccccccccccccccccccccaaaggcucuuuucagagccaccagaauu

SEQ ID NO: 19518 - RNA, 1816 nt, Artificial Sequence
  mRNA product Design a-5 comprising derived and/or modified sequence from HRSV(Memphis-37)__AIY60640.1__F-del_DSCav1_mut8 (opt2)
gggagacuuucccauucuguagcagaauuugguguugccuguggucuuggucccgcggagaagcuuaccauggagcuccccauccucaagaccaacgccaucaccaccauccucgccgccgucacccucugcuucgccuccucccagaacaucaccgaggaguucuaccaguccaccugcuccgccgucuccaagggcuaccucggcgcccuccgcaccggcugguacaccuccgucaucaccaucgagcucuccaacaucaaggagaucaagugcaacggcaccgacgccaaggucaagcucaucaagcaggagcucgacaaguacaagaacgccgucaccgaccuccagcuccucaugcaguccacccccgccgccggcuccggcuccgccaucgccuccggcaucgccgucugcaagguccuccaccucgagggcgaggucaacaagaucaagaacgcccuccucuccaccaacaaggccgucgucucccucuccggcugcggcgucuccguccucaccuucaagguccucgaccucaagaacuacaucgacaagcagcuccuccccauccucaacaagcaguccugcuccauccccaacaucgagaccgucaucgaguuccagcagaagaacaaccgccuccucgagaucacccgcgaguucuccgucaacgccggcgucaccacccccgucuccaccuacaugcucaccaacuccgagcuccucucccucaucaacgacaugcccaucaccaacgaccagaagaagcucauguccaacaacguccagaucguccgccagcaguccuacuccaucaugugcaucaucaaggaggagguccucgccuacgucguccagcucccccucuacggcgucaucgacacccccugcuggaagcuccacaccuccccccucugcaccaccaacaccaaggagggcuccaacaucugccucacccgcaccgaccgcggcugguacugcgacaacgccggcuccgucuccuucuucccccaggccgagaccugcaagguccaguccaaccgcgucuucugcgacaccaugaacucccucacccuccccuccgaggucaaccucugcaacaucgacaucuucaaccccaaguacgacugcaagaucaugaccuccaagaccgacgucuccuccuccgucaucaccucccucggcgccaucgucuccugcuacggcaagaccaagugcaccgccuccaacaagugccgcggcaucaucaagaccuucuccaacggcugcgacuacgucuccaacaagggcgucgacaccgucuccgucggcaacacccucuacuacgucaacaagcaggagggccagucccucuacgucaagggcgagcccaucaucaacuucuacgacccccucgucuuccccuccgacgaguucgacgccuccaucucccaggucaacgagaagaucaaccagucccucgccuucauccgcaaguccgacgagcuccuccacaacgucaacgucggcaaguccaccaccaacaucaugaucaccaccaucaucaucgucaucaucgucauccuccuccuccucaucgccgucggccucuuccucuacugcaaggcccgcugaggacuagucccuguucccagagcccacuuuuuuuucuuuuuuugaaauaaaauagccugucuuucagaucuaaaaaaaaaaaaaaaaaaaaaaaaaaaaaaaaaaaaaaaaaaaaaaaaaaaaaaaaaaaaaaaaugcaucccccccccccccccccccccccccccccccaaaggcucuuuucagagccaccagaauu

SEQ ID NO: 19519 - RNA, 1816 nt, Artificial Sequence
  mRNA product Design a-5 comprising derived and/or modified sequence from HRSV(Memphis-37)__AIY60640.1__F-del_DSCav1_mut8 (opt3)
gggagacuuucccauucuguagcagaauuugguguugccuguggucuuggucccgcggagaagcuuaccauggagcugcccauccucaagaccaacgccauuacaacuauacuugcugcagugacgcugugcuucgccagcucccagaauaucaccgaagaguuuuaccaaucuacauguucagcggucaguaaaggcuauuugggggcuuuaagaacuggaugguacaccagcguuauuacaaucgaacuguccaacauuaaggagaucaaaugcaaugguaccgacgccaaggugaaacuaauaaagcaggaacucgauaaguauaaaaacgcaguaacugaccugcagcuucugaugcagucuacuccugccgcuggcucggggucagcaaucgccagcggaauugcuguguguaaggucuugcaccucgagggcgaggugaauaaaaucaagaacgcccugcugaguaccaauaaagcgguugugucccucucugguugcggggucagcguguuaacguucaagguacuggaucuuaagaacuacauugacaaacaauugcugccaauccuaaauaagcaguccuguucaauaccgaacauugaaacuguuaucgaguuucagcagaaaaauaacaggcuccuggaaauuacccgggaguucagugugaaugcaggagucacaacucccgugagcaccuauaugcuuacaaacucugagcuguugucccucaucaaugauaugccuaucaccaacgaccaaaagaaacugaugucaaacaaugugcagauuguccgccagcagagcuacaguauaaugugcaucauuaaggaagagguuuuagccuaugugguacaacugccacucuacggcgugaucgauacgcccuguuggaaacuucauacuucuccucugugcacaaccaacacuaaggaaggcuccaauauauguuugacacgaaccgaccgugggugguacugcgauaacgcuggaagcgucucguuuuucccacaggccgagacguguaaggugcagucuaauagaguuuucugcgacaccaugaacucccuaacacugcccucagaagugaaucucugcaacauugauaucuucaauccuaaauaugacuguaagaucaugacaaguaaaaccgaugucagcuccucugugauuacaagccugggugcaaucguaucaugcuacggcaagacuaaauguaccgcuaguaacaagugcagggggauuauaaagacauuuuccaauggaugugacuauguuagcaacaaaggcguggacaccgucucuguggguaauacucuuuacuaugucaacaagcaagaggggcagucacuguacgugaaaggagagccaaucauuaauuucuaugauccguugguuuuucccagugacgaauuugaugccagcaucucccaggugaacgagaagaucaaccagucucucgcguuuauucggaaaucggacgaacuguuacacaauguaaacgucggcaagagcacgacaaauauaaugaucaccacuauuaucauugugaucauaguuauccugcuacuccugauugccgugggccuuuucuuguacugcaaggcacgcugaggacuagucccuguucccagagcccacuuuuuuuucuuuuuuugaaauaaaauagccugucuuucagaucuaaaaaaaaaaaaaaaaaaaaaaaaaaaaaaaaaaaaaaaaaaaaaaaaaaaaaaaaaaaaaaaaugcaucccccccccccccccccccccccccccccccaaaggcucuuuucagagccaccagaauu

SEQ ID NO: 19520 - RNA, 1816 nt, Artificial Sequence
  mRNA product Design a-5 comprising derived and/or modified sequence from HRSV(Memphis-37)__AIY60640.1__F-del_DSCav1_mut8 (opt4)
gggagacuuucccauucuguagcagaauuugguguugccuguggucuuggucccgcggagaagcuuaccauggagcugcccauccugaagaccaacgccaucaccaccauccuggccgccgugacccugugcuucgccagcagccagaacaucaccgaggaguucuaccagagcaccugcagcgccgugagcaagggcuaccugggcgcccugagaaccggcugguacaccagcgugaucaccaucgagcugagcaacaucaaggagaucaagugcaacggcaccgacgccaaggugaagcugaucaagcaggagcuggacaaguacaagaacgccgugaccgaccugcagcugcugaugcagagcacccccgccgccggcagcggcagcgccaucgccagcggcaucgccgugugcaaggugcugcaccuggagggcgaggugaacaagaucaagaacgcccugcugagcaccaacaaggccguggugagccugagcggcugcggcgugagcgugcugaccuucaaggugcuggaccugaagaacuacaucgacaagcagcugcugcccauccugaacaagcagagcugcagcauccccaacaucgagaccgugaucgaguuccagcagaagaacaacagacugcuggagaucaccagagaguucagcgugaacgccggcgugaccacccccgugagcaccuacaugcugaccaacagcgagcugcugagccugaucaacgacaugcccaucaccaacgaccagaagaagcugaugagcaacaacgugcagaucgugagacagcagagcuacagcaucaugugcaucaucaaggaggaggugcuggccuacguggugcagcugccccuguacggcgugaucgacacccccugcuggaagcugcacaccagcccccugugcaccaccaacaccaaggagggcagcaacaucugccugaccagaaccgacagaggcugguacugcgacaacgccggcagcgugagcuucuucccccaggccgagaccugcaaggugcagagcaacagaguguucugcgacaccaugaacagccugacccugcccagcgaggugaaccugugcaacaucgacaucuucaaccccaaguacgacugcaagaucaugaccagcaagaccgacgugagcagcagcgugaucaccagccugggcgccaucgugagcugcuacggcaagaccaagugcaccgccagcaacaagugcagaggcaucaucaagaccuucagcaacggcugcgacuacgugagcaacaagggcguggacaccgugagcgugggcaacacccuguacuacgugaacaagcaggagggccagagccuguacgugaagggcgagcccaucaucaacuucuacgacccccugguguuccccagcgacgaguucgacgccagcaucagccaggugaacgagaagaucaaccagagccuggccuucaucagaaagagcgacgagcugcugcacaacgugaacgugggcaagagcaccaccaacaucaugaucaccaccaucaucaucgugaucaucgugauccugcugcugcugaucgccgugggccuguuccuguacugcaaggccagaugaggacuagucccuguucccagagcccacuuuuuuuucuuuuuuugaaauaaaauagccugucuuucagaucuaaaaaaaaaaaaaaaaaaaaaaaaaaaaaaaaaaaaaaaaaaaaaaaaaaaaaaaaaaaaaaaaugcaucccccccccccccccccccccccccccccccaaaggcucuuuucagagccaccagaauu

SEQ ID NO: 19521 - RNA, 1816 nt, Artificial Sequence
  mRNA product Design a-5 comprising derived and/or modified sequence from HRSV(Memphis-37)__AIY60640.1__F-del_DSCav1_mut8 (opt5)
gggagacuuucccauucuguagcagaauuugguguugccuguggucuuggucccgcggagaagcuuaccauggagcugcccauccucaagaccaacgccauuacaacgauccuggcugccgugacccuuugcuucgcgagcucccagaauauuacagaagaguuuuaccaaucuaccuguagcgcugucuccaaaggcuaucugggggcccucagaacaggaugguacaccucuguuaucacaauugaacugagcaacaucaaggagaucaaaugcaauggcaccgacgccaaggugaaacuuauuaagcaggaacuggauaaguauaaaaacgcugugacggaccuccagcugcugaugcaguccaccccugccgcugggucuggaagcgccaucgcguccggcauugccgucuguaaggugcuccaccuggagggggagguuaauaaaaucaagaacgcccuucugagcacaaauaaagcuguggucucucucuccggaugcggcgugagcguucugaccuucaaggugcuugaucugaagaacuacauugacaaacaacuccugccgauccugaauaagcagucuuguuccauucccaacaucgaaacagucaucgaguuucagcagaaaaauaaccggcuccuggaaauuacccgcgaguucagcgugaaugcuggcgugacgacaccugucucuaccuauaugcuuacaaacuccgagcugcucagccugaucaaugauaugcccauuaccaacgaccaaaagaaacuuauguccaacaauguucagaucgugagacagcagucuuacagcauuaugugcaucaucaaggaagaggugcuggccuaugucgugcaacucccucuguacgggguuauugauacccccuguuggaaacugcauacauccccucucugcacgaccaacacaaaggaaggaagcaauaucugucugacccggacagaccgcggcugguacugcgauaacgcggggucuguguccuuuuucccgcaggccgagaccuguaagguccagagcaauagaguguuuugcgacacgaugaacucucuuacacugcccagcgaaguuaaucucugcaacauugauaucuucaauccuaaauaugacuguaagauuaugaccuccaaaaccgaugugucuagcuccgucaucacaagccugggagcuaucgugucuugcuacggcaagaccaaauguacagccuccaacaagugccgggggauuaucaagacguuuagcaauggaugugacuaugucucuaacaaaggcguggacaccguuuccgugggcaauacacuuuacuaugucaacaagcaagaggggcagagccuguacgugaaaggagagcccauuaucaauuucuaugauccucucguuuuucccuccgacgaguucgaugcuucuauuagccaggugaacgaaaagaucaaccagucccuggccuuuauucgcaaaucugacgaacugcuccacaaugucaacgugggcaagagcaccacaaauaucaugaucaccacgauuaucauugugaucauuguuauccugcuucugcucaucgccgucgggcuguuccuguacugcaaggcuagaugaggacuagucccuguucccagagcccacuuuuuuuucuuuuuuugaaauaaaauagccugucuuucagaucuaaaaaaaaaaaaaaaaaaaaaaaaaaaaaaaaaaaaaaaaaaaaaaaaaaaaaaaaaaaaaaaaugcaucccccccccccccccccccccccccccccccaaaggcucuuuucagagccaccagaauu

SEQ ID NO: 19522 - RNA, 1816 nt, Artificial Sequence
  mRNA product Design a-5 comprising derived and/or modified sequence from HRSV(Memphis-37)__AIY60640.1__F-del_DSCav1_mut8 (opt6)
gggagacuuucccauucuguagcagaauuugguguugccuguggucuuggucccgcggagaagcuuaccauggaacuacccauacuaaaaacaaacgcaauuacaacaauacuugccgcaguaaccuuaugcuuugccucaucccaaaacauaacagaagaauuuuaucaaucaacaugcuccgcaguaucaaaaggauaccuaggcgcucuaagaacaggaugguacacauccguaaucacaauagaacuauccaauauaaaagaaauaaaauguaauggaacagaugcaaaaguuaaauuaauaaaacaagaacuagacaaauacaaaaacgcaguuaccgaucuccaacuauuaaugcaaucaacaccagcugcaggaaguggaagcgccauagcaagcggaauagcagucugcaaaguauuacaucuugaaggcgaaguaaacaaaaucaaaaaugcccuccucucaacaaacaaagcuguaguaucccuaucaggaugcgguguaucuguucuuacauuuaaaguacucgaucuaaaaaacuacaucgauaaacaguuacuuccaauacucaacaaacaaucauguagcauaccaaacauagaaacaguaauagaauuucaacaaaaaaacaaucgacuacucgaaauaacuagagaauuuucuguaaacgcuggaguaaccacaccagugucuaccuauaugcuuacaaauagcgaacuccuaucacuaaucaaugacaugccaauaacaaaugaccagaaaaaacucaugucaaauaacguacaaauaguacgacaacaaagcuacuccauaaugugcauaaucaaagaagaaguauuagccuacguuguucaacuaccauuauauggaguuauagacacuccaugcuggaaauuacauacaagcccacucuguacaacaaacacaaaagaaggcucaaacauaugcuuaacaagaacagauagaggaugguacugcgauaacgcaggcucagucucauuuuuuccacaagccgaaaccugcaaaguacaaucaaauagaguuuuuugcgacacaaugaacucacucacucuaccaagugaaguaaaucucuguaauaucgacauauucaacccaaaauaugacugcaaaauaaugacaucuaaaaccgauguauccucaagcguaaucacaucauuaggagcuauaguuuccugcuacgguaaaacaaaaugcacagcauccaacaaaugucgcgguaucaucaaaacauucuccaacggaugugauuacguaucaaacaaaggugucgacaccguaagcguaggcaacacuuuauacuauguaaacaaacaagaaggacaaagucuauauguaaaaggagaaccaauaauaaacuucuaugacccccuaguauucccuuccgacgaauuugaugcaagcauuucacaaguuaacgaaaaaaucaaucaaucccuugcuuucauaagaaaaucagacgaauuacuacacaacguaaacguaggaaaaagcacaacaaauaucaugauuacaacaauaauaauuguaauaauaguaauacuccucuuacuuauagcagucggcuuauuccuuuacugcaaagcaagauaaggacuagucccuguucccagagcccacuuuuuuuucuuuuuuugaaauaaaauagccugucuuucagaucuaaaaaaaaaaaaaaaaaaaaaaaaaaaaaaaaaaaaaaaaaaaaaaaaaaaaaaaaaaaaaaaaugcaucccccccccccccccccccccccccccccccaaaggcucuuuucagagccaccagaauu

SEQ ID NO: 19523 - RNA, 1816 nt, Artificial Sequence
  mRNA product Design a-5 comprising derived and/or modified sequence from HRSV(Memphis-37)__AIY60640.1__F-del_DSCav1_mut8 (opt11)
gggagacuuucccauucuguagcagaauuugguguugccuguggucuuggucccgcggagaagcuuaccauggaacuccccauccuaaaaaccaacgcaaucaccaccauccucgccgccguaacacucugcuuugcaagcucccaaaacaucaccgaagaauuuuaccaaucuaccugcagcgccguaucuaaaggauaccuaggagcccucagaaccgguugguacaccucugucaucacaauagaacucuccaacaucaaagaaaucaaaugcaacggcaccgacgccaaagucaaacucaucaaacaagaacucgacaaauauaaaaacgccguaaccgaccuccaacuccucaugcaauccacccccgccgccggcaguggcuccgcuaucgccuccggaaucgccguuugcaaaguccugcaccuagaaggcgaagucaacaaaaucaaaaacgcccugcucucaaccaacaaagcugucguaagccucuccggcugcggagucuccguccuuaccuucaaaguacucgaccuuaaaaacuacaucgacaaacaacuucuccccauacucaauaaacaauccugcuccauacccaacaucgaaacagucaucgaguuccaacagaaaaauaaccgccuccucgaaauaacccgcgaguucuccgucaacgcaggcgucaccaccccagucuccaccuacaugcugacaaacuccgaacuccuaucccucaucaacgacaugcccaucaccaacgaccaaaagaaacucaugagcaauaacguccaaaucguacgacaacaauccuacagcaucauguguaucaucaaagaagaaguacucgccuacgucguccaacucccacuauacggcgucaucgacacaccaugcuggaaacuucacaccuccccacucugcaccacaaacacaaaagaaggcuccaacaucugccuuacccgaaccgaccgcgggugguacugcgacaacgccggaucagucucguucuuuccccaagccgaaaccugcaaaguacaaucaaaucgcgucuucugcgacaccaugaacuccuuaacacuaccauccgaaguaaaccucugcaacauagacaucuucaacccaaaauacgacugcaaaaucaugaccuccaaaaccgacguauccuccuccguaaucaccagccucggcgcaauagucucaugcuacggcaaaaccaaaugcaccgccuccaacaaaugccgcggcaucauaaaaacuuucucuaacggaugcgacuacgucagcaacaaaggcgucgacaccguauccguagguaauacacuuuacuacgucaauaaacaagaaggccaaucccucuacgucaaaggagaacccaucauaaacuucuacgacccccucgucuuccccuccgacgaguucgacgccuccaucagccaggucaacgaaaagaucaaccaaucacucgccuucauccgcaaaagcgacgaacuccuccacaacguaaacgucggcaaauccacaaccaacauaaugaucaccacuaucaucaucgugauaaucgucauuuuacuucuccucaucgccguaggccucuuccuauacugcaaagcccgcuaaggacuagucccuguucccagagcccacuuuuuuuucuuuuuuugaaauaaaauagccugucuuucagaucuaaaaaaaaaaaaaaaaaaaaaaaaaaaaaaaaaaaaaaaaaaaaaaaaaaaaaaaaaaaaaaaaugcaucccccccccccccccccccccccccccccccaaaggcucuuuucagagccaccagaauu

SEQ ID NO: 19524 - RNA, 1997 nt, Artificial Sequence
  mRNA product Design b-1 comprising derived and/or modified sequence from HRSV(Memphis-37)__AIY60640.1__F-del_DSCav1_mut8 (opt1)
gggagacggagacggccugcaggaccugcucucucagcccucagccgaggccuacgccgagccgagugcgcagccgacgaccgggaggagccgcagccuucaacucugagguacugugauccgcgcugcccgccgggccgccccaguccgcugcugcggcaccuccuucccucgcgcccucuucgcucgccagcgccuucccugugagccugcgucaccgcggccgccaagcuuaccauggagcugcccauccucaagaccaacgccaucaccacgauccuggccgcggugacccugugcuucgccagcucccagaacaucaccgaggaguucuaccagagcacgugcuccgccgucagcaagggcuaccucggcgcccugcgcaccgggugguacaccagcgugaucaccaucgagcuguccaacaucaaggagaucaagugcaacggcaccgacgccaaggugaagcucaucaagcaggagcuggacaaguacaagaacgcggucacggaccugcagcuccugaugcagagcaccccggccgccggcuccgggagcgcgaucgccuccggcaucgccgucugcaaggugcugcaccucgagggcgaggugaacaagaucaagaacgcccugcuguccaccaacaaggccgucgugagccucuccggcugcggggugagcguccugaccuucaaggugcuggaccucaagaacuacaucgacaagcagcugcugcccauccugaacaagcagagcugcuccauccccaacaucgagaccgucaucgaguuccagcagaagaacaaccgccuccuggagaucacgcgggaguucagcgugaacgcgggcgugaccacccccgucuccaccuacaugcugacgaacagcgagcuccugucccugaucaacgacaugccgaucaccaacgaccagaagaagcucaugagcaacaacgugcagaucgugcgccagcaguccuacagcaucaugugcaucaucaaggaggagguccuggccuacguggugcagcugccccucuacggggucaucgacacccccugcuggaagcugcacaccagcccccugugcacgaccaacaccaaggagggcuccaacaucugccucacccggacggaccgcgggugguacugcgacaacgccggcagcguguccuucuucccgcaggccgagaccugcaagguccagagcaaccggguguucugcgacaccaugaacucccugacccugcccagcgaggugaaccucugcaacaucgacaucuucaaccccaaguacgacugcaagaucaugacguccaagaccgacgucagcuccagcgugaucaccucccugggcgccaucgugagcugcuacgggaagaccaagugcacggcgagcaacaagugccgcggcaucaucaagaccuucuccaacgggugcgacuacgucagcaacaagggcguggacaccguguccgucggcaacacccuguacuacgugaacaagcaggagggccagagccucuacgugaagggggagcccaucaucaacuucuacgacccgcuggucuuccccuccgacgaguucgacgccagcaucucccaggugaacgagaagaucaaccagagccuggccuucauccggaaguccgacgagcuccugcacaacgugaacgucggcaagagcaccacgaacaucaugaucaccaccaucaucaucgugaucaucgugauccugcugcuccugaucgccgucgggcuguuccucuacugcaaggcccgcugaggacuaguguccaccugucccuccugggcugcuggauugucucguuuuccugccaaauaaacaggaucagcgcuuuacagaucuaaaaaaaaaaaaaaaaaaaaaaaaaaaaaaaaaaaaaaaaaaaaaaaaaaaaaaaaaaaaaaaaugcaucccccccccccccccccccccccccccccccaaaggcucuuuucagagccaccagaauu

SEQ ID NO: 19525 - RNA, 1997 nt, Artificial Sequence
  mRNA product Design b-1 comprising derived and/or modified sequence from HRSV(Memphis-37)__AIY60640.1__F-del_DSCav1_mut8 (opt1)
gggagacggagacggccugcaggaccugcucucucagcccucagccgaggccuacgccgagccgagugcgcagccgacgaccgggaggagccgcagccuucaacucugagguacugugauccgcgcugcccgccgggccgccccaguccgcugcugcggcaccuccuucccucgcgcccucuucgcucgccagcgccuucccugugagccugcgucaccgcggccgccaagcuuaccauggagcugcccauccucaagaccaacgccaucaccacgauccuggccgcggugacccugugcuucgccagcucccagaacaucaccgaggaguucuaccagagcacgugcuccgccgucagcaagggcuaccucggggcccugcgcaccggcugguacaccuccgugaucaccaucgagcugagcaacaucaaggagaucaagugcaacgggaccgacgccaaggugaagcucaucaagcaggagcuggacaaguacaagaacgcggucacggaccugcagcuccugaugcaguccaccccggccgccggcagcggguccgccaucgcgagcggcaucgccgugugcaaggugcugcaccucgagggcgaggucaacaagaucaagaacgcccugcuguccaccaacaaggccguggugagccucuccgggugcggcgucagcgugcugaccuucaaggugcuggaccucaagaacuacaucgacaagcagcugcugcccauccucaacaagcaguccugcagcauccccaacaucgagacggucaucgaguuccagcagaagaacaaccggcugcuggagaucacccgcgaguucuccgugaacgccggggugaccacccccgucagcacguacaugcucaccaacuccgagcugcugagccucaucaacgacaugccgaucaccaacgaccagaagaagcugaugagcaacaacgugcagaucgugcggcagcaguccuacagcaucaugugcaucaucaaggaggagguccuggcguacguggugcagcucccccuguacggcgucaucgacacccccugcuggaagcugcacacgagcccccucugcaccaccaacaccaaggagggguccaacaucugccugacgcgcaccgaccggggcugguacugcgacaacgccggcuccgugagcuucuucccgcaggccgagaccugcaaggugcaguccaaccgcgucuucugcgacaccaugaacagccugacgcuccccuccgaggugaaccugugcaacaucgacaucuucaaccccaaguacgacugcaagaucaugaccagcaagaccgacgucuccagcuccgugaucaccagccugggggccaucguguccugcuacggcaagacgaagugcaccgccagcaacaagugccgggggaucaucaagaccuucuccaacggcugcgacuacgucagcaacaagggcguggacaccguguccgucgggaacacgcucuacuacgugaacaagcaggagggccagagccuguacgugaagggggagcccaucaucaacuucuacgacccgcuggucuuccccagcgacgaguucgacgcguccaucagccaggugaacgagaagaucaaccagucccucgccuucauccgcaagagcgacgagcugcugcacaacgugaacgucggcaaguccaccaccaacaucaugaucaccaccaucaucaucgugaucaucgugauccuccugcugcucaucgccgucgggcuguuccuguacugcaaggcccggugaggacuaguguccaccugucccuccugggcugcuggauugucucguuuuccugccaaauaaacaggaucagcgcuuuacagaucuaaaaaaaaaaaaaaaaaaaaaaaaaaaaaaaaaaaaaaaaaaaaaaaaaaaaaaaaaaaaaaaaugcaucccccccccccccccccccccccccccccccaaaggcucuuuucagagccaccagaauu

SEQ ID NO: 19526 - RNA, 1997 nt, Artificial Sequence
  mRNA product Design b-1 comprising derived and/or modified sequence from HRSV(Memphis-37)__AIY60640.1__F-del_DSCav1_mut8 (opt2)
gggagacggagacggccugcaggaccugcucucucagcccucagccgaggccuacgccgagccgagugcgcagccgacgaccgggaggagccgcagccuucaacucugagguacugugauccgcgcugcccgccgggccgccccaguccgcugcugcggcaccuccuucccucgcgcccucuucgcucgccagcgccuucccugugagccugcgucaccgcggccgccaagcuuaccauggagcuccccauccucaagaccaacgccaucaccaccauccucgccgccgucacccucugcuucgccuccucccagaacaucaccgaggaguucuaccaguccaccugcuccgccgucuccaagggcuaccucggcgcccuccgcaccggcugguacaccuccgucaucaccaucgagcucuccaacaucaaggagaucaagugcaacggcaccgacgccaaggucaagcucaucaagcaggagcucgacaaguacaagaacgccgucaccgaccuccagcuccucaugcaguccacccccgccgccggcuccggcuccgccaucgccuccggcaucgccgucugcaagguccuccaccucgagggcgaggucaacaagaucaagaacgcccuccucuccaccaacaaggccgucgucucccucuccggcugcggcgucuccguccucaccuucaagguccucgaccucaagaacuacaucgacaagcagcuccuccccauccucaacaagcaguccugcuccauccccaacaucgagaccgucaucgaguuccagcagaagaacaaccgccuccucgagaucacccgcgaguucuccgucaacgccggcgucaccacccccgucuccaccuacaugcucaccaacuccgagcuccucucccucaucaacgacaugcccaucaccaacgaccagaagaagcucauguccaacaacguccagaucguccgccagcaguccuacuccaucaugugcaucaucaaggaggagguccucgccuacgucguccagcucccccucuacggcgucaucgacacccccugcuggaagcuccacaccuccccccucugcaccaccaacaccaaggagggcuccaacaucugccucacccgcaccgaccgcggcugguacugcgacaacgccggcuccgucuccuucuucccccaggccgagaccugcaagguccaguccaaccgcgucuucugcgacaccaugaacucccucacccuccccuccgaggucaaccucugcaacaucgacaucuucaaccccaaguacgacugcaagaucaugaccuccaagaccgacgucuccuccuccgucaucaccucccucggcgccaucgucuccugcuacggcaagaccaagugcaccgccuccaacaagugccgcggcaucaucaagaccuucuccaacggcugcgacuacgucuccaacaagggcgucgacaccgucuccgucggcaacacccucuacuacgucaacaagcaggagggccagucccucuacgucaagggcgagcccaucaucaacuucuacgacccccucgucuuccccuccgacgaguucgacgccuccaucucccaggucaacgagaagaucaaccagucccucgccuucauccgcaaguccgacgagcuccuccacaacgucaacgucggcaaguccaccaccaacaucaugaucaccaccaucaucaucgucaucaucgucauccuccuccuccucaucgccgucggccucuuccucuacugcaaggcccgcugaggacuaguguccaccugucccuccugggcugcuggauugucucguuuuccugccaaauaaacaggaucagcgcuuuacagaucuaaaaaaaaaaaaaaaaaaaaaaaaaaaaaaaaaaaaaaaaaaaaaaaaaaaaaaaaaaaaaaaaugcaucccccccccccccccccccccccccccccccaaaggcucuuuucagagccaccagaauu

SEQ ID NO: 19527 - RNA, 1997 nt, Artificial Sequence
  mRNA product Design b-1 comprising derived and/or modified sequence from HRSV(Memphis-37)__AIY60640.1__F-del_DSCav1_mut8 (opt3)
gggagacggagacggccugcaggaccugcucucucagcccucagccgaggccuacgccgagccgagugcgcagccgacgaccgggaggagccgcagccuucaacucugagguacugugauccgcgcugcccgccgggccgccccaguccgcugcugcggcaccuccuucccucgcgcccucuucgcucgccagcgccuucccugugagccugcgucaccgcggccgccaagcuuaccauggagcugcccauccucaagaccaacgccauuacaacuauacuugcugcagugacgcugugcuucgccagcucccagaauaucaccgaagaguuuuaccaaucuacauguucagcggucaguaaaggcuauuugggggcuuuaagaacuggaugguacaccagcguuauuacaaucgaacuguccaacauuaaggagaucaaaugcaaugguaccgacgccaaggugaaacuaauaaagcaggaacucgauaaguauaaaaacgcaguaacugaccugcagcuucugaugcagucuacuccugccgcuggcucggggucagcaaucgccagcggaauugcuguguguaaggucuugcaccucgagggcgaggugaauaaaaucaagaacgcccugcugaguaccaauaaagcgguugugucccucucugguugcggggucagcguguuaacguucaagguacuggaucuuaagaacuacauugacaaacaauugcugccaauccuaaauaagcaguccuguucaauaccgaacauugaaacuguuaucgaguuucagcagaaaaauaacaggcuccuggaaauuacccgggaguucagugugaaugcaggagucacaacucccgugagcaccuauaugcuuacaaacucugagcuguugucccucaucaaugauaugccuaucaccaacgaccaaaagaaacugaugucaaacaaugugcagauuguccgccagcagagcuacaguauaaugugcaucauuaaggaagagguuuuagccuaugugguacaacugccacucuacggcgugaucgauacgcccuguuggaaacuucauacuucuccucugugcacaaccaacacuaaggaaggcuccaauauauguuugacacgaaccgaccgugggugguacugcgauaacgcuggaagcgucucguuuuucccacaggccgagacguguaaggugcagucuaauagaguuuucugcgacaccaugaacucccuaacacugcccucagaagugaaucucugcaacauugauaucuucaauccuaaauaugacuguaagaucaugacaaguaaaaccgaugucagcuccucugugauuacaagccugggugcaaucguaucaugcuacggcaagacuaaauguaccgcuaguaacaagugcagggggauuauaaagacauuuuccaauggaugugacuauguuagcaacaaaggcguggacaccgucucuguggguaauacucuuuacuaugucaacaagcaagaggggcagucacuguacgugaaaggagagccaaucauuaauuucuaugauccguugguuuuucccagugacgaauuugaugccagcaucucccaggugaacgagaagaucaaccagucucucgcguuuauucggaaaucggacgaacuguuacacaauguaaacgucggcaagagcacgacaaauauaaugaucaccacuauuaucauugugaucauaguuauccugcuacuccugauugccgugggccuuuucuuguacugcaaggcacgcugaggacuaguguccaccugucccuccugggcugcuggauugucucguuuuccugccaaauaaacaggaucagcgcuuuacagaucuaaaaaaaaaaaaaaaaaaaaaaaaaaaaaaaaaaaaaaaaaaaaaaaaaaaaaaaaaaaaaaaaugcaucccccccccccccccccccccccccccccccaaaggcucuuuucagagccaccagaauu

SEQ ID NO: 19528 - RNA, 1997 nt, Artificial Sequence
  mRNA product Design b-1 comprising derived and/or modified sequence from HRSV(Memphis-37)__AIY60640.1__F-del_DSCav1_mut8 (opt4)
gggagacggagacggccugcaggaccugcucucucagcccucagccgaggccuacgccgagccgagugcgcagccgacgaccgggaggagccgcagccuucaacucugagguacugugauccgcgcugcccgccgggccgccccaguccgcugcugcggcaccuccuucccucgcgcccucuucgcucgccagcgccuucccugugagccugcgucaccgcggccgccaagcuuaccauggagcugcccauccugaagaccaacgccaucaccaccauccuggccgccgugacccugugcuucgccagcagccagaacaucaccgaggaguucuaccagagcaccugcagcgccgugagcaagggcuaccugggcgcccugagaaccggcugguacaccagcgugaucaccaucgagcugagcaacaucaaggagaucaagugcaacggcaccgacgccaaggugaagcugaucaagcaggagcuggacaaguacaagaacgccgugaccgaccugcagcugcugaugcagagcacccccgccgccggcagcggcagcgccaucgccagcggcaucgccgugugcaaggugcugcaccuggagggcgaggugaacaagaucaagaacgcccugcugagcaccaacaaggccguggugagccugagcggcugcggcgugagcgugcugaccuucaaggugcuggaccugaagaacuacaucgacaagcagcugcugcccauccugaacaagcagagcugcagcauccccaacaucgagaccgugaucgaguuccagcagaagaacaacagacugcuggagaucaccagagaguucagcgugaacgccggcgugaccacccccgugagcaccuacaugcugaccaacagcgagcugcugagccugaucaacgacaugcccaucaccaacgaccagaagaagcugaugagcaacaacgugcagaucgugagacagcagagcuacagcaucaugugcaucaucaaggaggaggugcuggccuacguggugcagcugccccuguacggcgugaucgacacccccugcuggaagcugcacaccagcccccugugcaccaccaacaccaaggagggcagcaacaucugccugaccagaaccgacagaggcugguacugcgacaacgccggcagcgugagcuucuucccccaggccgagaccugcaaggugcagagcaacagaguguucugcgacaccaugaacagccugacccugcccagcgaggugaaccugugcaacaucgacaucuucaaccccaaguacgacugcaagaucaugaccagcaagaccgacgugagcagcagcgugaucaccagccugggcgccaucgugagcugcuacggcaagaccaagugcaccgccagcaacaagugcagaggcaucaucaagaccuucagcaacggcugcgacuacgugagcaacaagggcguggacaccgugagcgugggcaacacccuguacuacgugaacaagcaggagggccagagccuguacgugaagggcgagcccaucaucaacuucuacgacccccugguguuccccagcgacgaguucgacgccagcaucagccaggugaacgagaagaucaaccagagccuggccuucaucagaaagagcgacgagcugcugcacaacgugaacgugggcaagagcaccaccaacaucaugaucaccaccaucaucaucgugaucaucgugauccugcugcugcugaucgccgugggccuguuccuguacugcaaggccagaugaggacuaguguccaccugucccuccugggcugcuggauugucucguuuuccugccaaauaaacaggaucagcgcuuuacagaucuaaaaaaaaaaaaaaaaaaaaaaaaaaaaaaaaaaaaaaaaaaaaaaaaaaaaaaaaaaaaaaaaugcaucccccccccccccccccccccccccccccccaaaggcucuuuucagagccaccagaauu

SEQ ID NO: 19529 - RNA, 1997 nt, Artificial Sequence
  mRNA product Design b-1 comprising derived and/or modified sequence from HRSV(Memphis-37)__AIY60640.1__F-del_DSCav1_mut8 (opt5)
gggagacggagacggccugcaggaccugcucucucagcccucagccgaggccuacgccgagccgagugcgcagccgacgaccgggaggagccgcagccuucaacucugagguacugugauccgcgcugcccgccgggccgccccaguccgcugcugcggcaccuccuucccucgcgcccucuucgcucgccagcgccuucccugugagccugcgucaccgcggccgccaagcuuaccauggagcugcccauccucaagaccaacgccauuacaacgauccuggcugccgugacccuuugcuucgcgagcucccagaauauuacagaagaguuuuaccaaucuaccuguagcgcugucuccaaaggcuaucugggggcccucagaacaggaugguacaccucuguuaucacaauugaacugagcaacaucaaggagaucaaaugcaauggcaccgacgccaaggugaaacuuauuaagcaggaacuggauaaguauaaaaacgcugugacggaccuccagcugcugaugcaguccaccccugccgcugggucuggaagcgccaucgcguccggcauugccgucuguaaggugcuccaccuggagggggagguuaauaaaaucaagaacgcccuucugagcacaaauaaagcuguggucucucucuccggaugcggcgugagcguucugaccuucaaggugcuugaucugaagaacuacauugacaaacaacuccugccgauccugaauaagcagucuuguuccauucccaacaucgaaacagucaucgaguuucagcagaaaaauaaccggcuccuggaaauuacccgcgaguucagcgugaaugcuggcgugacgacaccugucucuaccuauaugcuuacaaacuccgagcugcucagccugaucaaugauaugcccauuaccaacgaccaaaagaaacuuauguccaacaauguucagaucgugagacagcagucuuacagcauuaugugcaucaucaaggaagaggugcuggccuaugucgugcaacucccucuguacgggguuauugauacccccuguuggaaacugcauacauccccucucugcacgaccaacacaaaggaaggaagcaauaucugucugacccggacagaccgcggcugguacugcgauaacgcggggucuguguccuuuuucccgcaggccgagaccuguaagguccagagcaauagaguguuuugcgacacgaugaacucucuuacacugcccagcgaaguuaaucucugcaacauugauaucuucaauccuaaauaugacuguaagauuaugaccuccaaaaccgaugugucuagcuccgucaucacaagccugggagcuaucgugucuugcuacggcaagaccaaauguacagccuccaacaagugccgggggauuaucaagacguuuagcaauggaugugacuaugucucuaacaaaggcguggacaccguuuccgugggcaauacacuuuacuaugucaacaagcaagaggggcagagccuguacgugaaaggagagcccauuaucaauuucuaugauccucucguuuuucccuccgacgaguucgaugcuucuauuagccaggugaacgaaaagaucaaccagucccuggccuuuauucgcaaaucugacgaacugcuccacaaugucaacgugggcaagagcaccacaaauaucaugaucaccacgauuaucauugugaucauuguuauccugcuucugcucaucgccgucgggcuguuccuguacugcaaggcuagaugaggacuaguguccaccugucccuccugggcugcuggauugucucguuuuccugccaaauaaacaggaucagcgcuuuacagaucuaaaaaaaaaaaaaaaaaaaaaaaaaaaaaaaaaaaaaaaaaaaaaaaaaaaaaaaaaaaaaaaaugcaucccccccccccccccccccccccccccccccaaaggcucuuuucagagccaccagaauu

SEQ ID NO: 19530 - RNA, 1997 nt, Artificial Sequence
  mRNA product Design b-1 comprising derived and/or modified sequence from HRSV(Memphis-37)__AIY60640.1__F-del_DSCav1_mut8 (opt6)
gggagacggagacggccugcaggaccugcucucucagcccucagccgaggccuacgccgagccgagugcgcagccgacgaccgggaggagccgcagccuucaacucugagguacugugauccgcgcugcccgccgggccgccccaguccgcugcugcggcaccuccuucccucgcgcccucuucgcucgccagcgccuucccugugagccugcgucaccgcggccgccaagcuuaccauggaacuacccauacuaaaaacaaacgcaauuacaacaauacuugccgcaguaaccuuaugcuuugccucaucccaaaacauaacagaagaauuuuaucaaucaacaugcuccgcaguaucaaaaggauaccuaggcgcucuaagaacaggaugguacacauccguaaucacaauagaacuauccaauauaaaagaaauaaaauguaauggaacagaugcaaaaguuaaauuaauaaaacaagaacuagacaaauacaaaaacgcaguuaccgaucuccaacuauuaaugcaaucaacaccagcugcaggaaguggaagcgccauagcaagcggaauagcagucugcaaaguauuacaucuugaaggcgaaguaaacaaaaucaaaaaugcccuccucucaacaaacaaagcuguaguaucccuaucaggaugcgguguaucuguucuuacauuuaaaguacucgaucuaaaaaacuacaucgauaaacaguuacuuccaauacucaacaaacaaucauguagcauaccaaacauagaaacaguaauagaauuucaacaaaaaaacaaucgacuacucgaaauaacuagagaauuuucuguaaacgcuggaguaaccacaccagugucuaccuauaugcuuacaaauagcgaacuccuaucacuaaucaaugacaugccaauaacaaaugaccagaaaaaacucaugucaaauaacguacaaauaguacgacaacaaagcuacuccauaaugugcauaaucaaagaagaaguauuagccuacguuguucaacuaccauuauauggaguuauagacacuccaugcuggaaauuacauacaagcccacucuguacaacaaacacaaaagaaggcucaaacauaugcuuaacaagaacagauagaggaugguacugcgauaacgcaggcucagucucauuuuuuccacaagccgaaaccugcaaaguacaaucaaauagaguuuuuugcgacacaaugaacucacucacucuaccaagugaaguaaaucucuguaauaucgacauauucaacccaaaauaugacugcaaaauaaugacaucuaaaaccgauguauccucaagcguaaucacaucauuaggagcuauaguuuccugcuacgguaaaacaaaaugcacagcauccaacaaaugucgcgguaucaucaaaacauucuccaacggaugugauuacguaucaaacaaaggugucgacaccguaagcguaggcaacacuuuauacuauguaaacaaacaagaaggacaaagucuauauguaaaaggagaaccaauaauaaacuucuaugacccccuaguauucccuuccgacgaauuugaugcaagcauuucacaaguuaacgaaaaaaucaaucaaucccuugcuuucauaagaaaaucagacgaauuacuacacaacguaaacguaggaaaaagcacaacaaauaucaugauuacaacaauaauaauuguaauaauaguaauacuccucuuacuuauagcagucggcuuauuccuuuacugcaaagcaagauaaggacuaguguccaccugucccuccugggcugcuggauugucucguuuuccugccaaauaaacaggaucagcgcuuuacagaucuaaaaaaaaaaaaaaaaaaaaaaaaaaaaaaaaaaaaaaaaaaaaaaaaaaaaaaaaaaaaaaaaugcaucccccccccccccccccccccccccccccccaaaggcucuuuucagagccaccagaauu

SEQ ID NO: 19531 - RNA, 1997 nt, Artificial Sequence
  mRNA product Design b-1 comprising derived and/or modified sequence from HRSV(Memphis-37)__AIY60640.1__F-del_DSCav1_mut8 (opt11)
gggagacggagacggccugcaggaccugcucucucagcccucagccgaggccuacgccgagccgagugcgcagccgacgaccgggaggagccgcagccuucaacucugagguacugugauccgcgcugcccgccgggccgccccaguccgcugcugcggcaccuccuucccucgcgcccucuucgcucgccagcgccuucccugugagccugcgucaccgcggccgccaagcuuaccauggaacuccccauccuaaaaaccaacgcaaucaccaccauccucgccgccguaacacucugcuuugcaagcucccaaaacaucaccgaagaauuuuaccaaucuaccugcagcgccguaucuaaaggauaccuaggagcccucagaaccgguugguacaccucugucaucacaauagaacucuccaacaucaaagaaaucaaaugcaacggcaccgacgccaaagucaaacucaucaaacaagaacucgacaaauauaaaaacgccguaaccgaccuccaacuccucaugcaauccacccccgccgccggcaguggcuccgcuaucgccuccggaaucgccguuugcaaaguccugcaccuagaaggcgaagucaacaaaaucaaaaacgcccugcucucaaccaacaaagcugucguaagccucuccggcugcggagucuccguccuuaccuucaaaguacucgaccuuaaaaacuacaucgacaaacaacuucuccccauacucaauaaacaauccugcuccauacccaacaucgaaacagucaucgaguuccaacagaaaaauaaccgccuccucgaaauaacccgcgaguucuccgucaacgcaggcgucaccaccccagucuccaccuacaugcugacaaacuccgaacuccuaucccucaucaacgacaugcccaucaccaacgaccaaaagaaacucaugagcaauaacguccaaaucguacgacaacaauccuacagcaucauguguaucaucaaagaagaaguacucgccuacgucguccaacucccacuauacggcgucaucgacacaccaugcuggaaacuucacaccuccccacucugcaccacaaacacaaaagaaggcuccaacaucugccuuacccgaaccgaccgcgggugguacugcgacaacgccggaucagucucguucuuuccccaagccgaaaccugcaaaguacaaucaaaucgcgucuucugcgacaccaugaacuccuuaacacuaccauccgaaguaaaccucugcaacauagacaucuucaacccaaaauacgacugcaaaaucaugaccuccaaaaccgacguauccuccuccguaaucaccagccucggcgcaauagucucaugcuacggcaaaaccaaaugcaccgccuccaacaaaugccgcggcaucauaaaaacuuucucuaacggaugcgacuacgucagcaacaaaggcgucgacaccguauccguagguaauacacuuuacuacgucaauaaacaagaaggccaaucccucuacgucaaaggagaacccaucauaaacuucuacgacccccucgucuuccccuccgacgaguucgacgccuccaucagccaggucaacgaaaagaucaaccaaucacucgccuucauccgcaaaagcgacgaacuccuccacaacguaaacgucggcaaauccacaaccaacauaaugaucaccacuaucaucaucgugauaaucgucauuuuacuucuccucaucgccguaggccucuuccuauacugcaaagcccgcuaaggacuaguguccaccugucccuccugggcugcuggauugucucguuuuccugccaaauaaacaggaucagcgcuuuacagaucuaaaaaaaaaaaaaaaaaaaaaaaaaaaaaaaaaaaaaaaaaaaaaaaaaaaaaaaaaaaaaaaaugcaucccccccccccccccccccccccccccccccaaaggcucuuuucagagccaccagaauu

SEQ ID NO: 19532 - RNA, 1817 nt, Artificial Sequence
  mRNA product Design b-2 comprising derived and/or modified sequence from HRSV(Memphis-37)__AIY60640.1__F-del_DSCav1_mut8 (opt1)
gggagagccucugcuggaguccggggaguggcguuggcugcuagagcgaagcuuaccauggagcugcccauccucaagaccaacgccaucaccacgauccuggccgcggugacccugugcuucgccagcucccagaacaucaccgaggaguucuaccagagcacgugcuccgccgucagcaagggcuaccucggcgcccugcgcaccgggugguacaccagcgugaucaccaucgagcuguccaacaucaaggagaucaagugcaacggcaccgacgccaaggugaagcucaucaagcaggagcuggacaaguacaagaacgcggucacggaccugcagcuccugaugcagagcaccccggccgccggcuccgggagcgcgaucgccuccggcaucgccgucugcaaggugcugcaccucgagggcgaggugaacaagaucaagaacgcccugcuguccaccaacaaggccgucgugagccucuccggcugcggggugagcguccugaccuucaaggugcuggaccucaagaacuacaucgacaagcagcugcugcccauccugaacaagcagagcugcuccauccccaacaucgagaccgucaucgaguuccagcagaagaacaaccgccuccuggagaucacgcgggaguucagcgugaacgcgggcgugaccacccccgucuccaccuacaugcugacgaacagcgagcuccugucccugaucaacgacaugccgaucaccaacgaccagaagaagcucaugagcaacaacgugcagaucgugcgccagcaguccuacagcaucaugugcaucaucaaggaggagguccuggccuacguggugcagcugccccucuacggggucaucgacacccccugcuggaagcugcacaccagcccccugugcacgaccaacaccaaggagggcuccaacaucugccucacccggacggaccgcgggugguacugcgacaacgccggcagcguguccuucuucccgcaggccgagaccugcaagguccagagcaaccggguguucugcgacaccaugaacucccugacccugcccagcgaggugaaccucugcaacaucgacaucuucaaccccaaguacgacugcaagaucaugacguccaagaccgacgucagcuccagcgugaucaccucccugggcgccaucgugagcugcuacgggaagaccaagugcacggcgagcaacaagugccgcggcaucaucaagaccuucuccaacgggugcgacuacgucagcaacaagggcguggacaccguguccgucggcaacacccuguacuacgugaacaagcaggagggccagagccucuacgugaagggggagcccaucaucaacuucuacgacccgcuggucuuccccuccgacgaguucgacgccagcaucucccaggugaacgagaagaucaaccagagccuggccuucauccggaaguccgacgagcuccugcacaacgugaacgucggcaagagcaccacgaacaucaugaucaccaccaucaucaucgugaucaucgugauccugcugcuccugaucgccgucgggcuguuccucuacugcaaggcccgcugaggacuaguguccaccugucccuccugggcugcuggauugucucguuuuccugccaaauaaacaggaucagcgcuuuacagaucuaaaaaaaaaaaaaaaaaaaaaaaaaaaaaaaaaaaaaaaaaaaaaaaaaaaaaaaaaaaaaaaaugcaucccccccccccccccccccccccccccccccaaaggcucuuuucagagccaccagaauu

SEQ ID NO: 19533 - RNA, 1817 nt, Artificial Sequence
  mRNA product Design b-2 comprising derived and/or modified sequence from HRSV(Memphis-37)__AIY60640.1__F-del_DSCav1_mut8 (opt1)
gggagagccucugcuggaguccggggaguggcguuggcugcuagagcgaagcuuaccauggagcugcccauccucaagaccaacgccaucaccacgauccuggccgcggugacccugugcuucgccagcucccagaacaucaccgaggaguucuaccagagcacgugcuccgccgucagcaagggcuaccucggggcccugcgcaccggcugguacaccuccgugaucaccaucgagcugagcaacaucaaggagaucaagugcaacgggaccgacgccaaggugaagcucaucaagcaggagcuggacaaguacaagaacgcggucacggaccugcagcuccugaugcaguccaccccggccgccggcagcggguccgccaucgcgagcggcaucgccgugugcaaggugcugcaccucgagggcgaggucaacaagaucaagaacgcccugcuguccaccaacaaggccguggugagccucuccgggugcggcgucagcgugcugaccuucaaggugcuggaccucaagaacuacaucgacaagcagcugcugcccauccucaacaagcaguccugcagcauccccaacaucgagacggucaucgaguuccagcagaagaacaaccggcugcuggagaucacccgcgaguucuccgugaacgccggggugaccacccccgucagcacguacaugcucaccaacuccgagcugcugagccucaucaacgacaugccgaucaccaacgaccagaagaagcugaugagcaacaacgugcagaucgugcggcagcaguccuacagcaucaugugcaucaucaaggaggagguccuggcguacguggugcagcucccccuguacggcgucaucgacacccccugcuggaagcugcacacgagcccccucugcaccaccaacaccaaggagggguccaacaucugccugacgcgcaccgaccggggcugguacugcgacaacgccggcuccgugagcuucuucccgcaggccgagaccugcaaggugcaguccaaccgcgucuucugcgacaccaugaacagccugacgcuccccuccgaggugaaccugugcaacaucgacaucuucaaccccaaguacgacugcaagaucaugaccagcaagaccgacgucuccagcuccgugaucaccagccugggggccaucguguccugcuacggcaagacgaagugcaccgccagcaacaagugccgggggaucaucaagaccuucuccaacggcugcgacuacgucagcaacaagggcguggacaccguguccgucgggaacacgcucuacuacgugaacaagcaggagggccagagccuguacgugaagggggagcccaucaucaacuucuacgacccgcuggucuuccccagcgacgaguucgacgcguccaucagccaggugaacgagaagaucaaccagucccucgccuucauccgcaagagcgacgagcugcugcacaacgugaacgucggcaaguccaccaccaacaucaugaucaccaccaucaucaucgugaucaucgugauccuccugcugcucaucgccgucgggcuguuccuguacugcaaggcccggugaggacuaguguccaccugucccuccugggcugcuggauugucucguuuuccugccaaauaaacaggaucagcgcuuuacagaucuaaaaaaaaaaaaaaaaaaaaaaaaaaaaaaaaaaaaaaaaaaaaaaaaaaaaaaaaaaaaaaaaugcaucccccccccccccccccccccccccccccccaaaggcucuuuucagagccaccagaauu

SEQ ID NO: 19534 - RNA, 1817 nt, Artificial Sequence
  mRNA product Design b-2 comprising derived and/or modified sequence from HRSV(Memphis-37)__AIY60640.1__F-del_DSCav1_mut8 (opt2)
gggagagccucugcuggaguccggggaguggcguuggcugcuagagcgaagcuuaccauggagcuccccauccucaagaccaacgccaucaccaccauccucgccgccgucacccucugcuucgccuccucccagaacaucaccgaggaguucuaccaguccaccugcuccgccgucuccaagggcuaccucggcgcccuccgcaccggcugguacaccuccgucaucaccaucgagcucuccaacaucaaggagaucaagugcaacggcaccgacgccaaggucaagcucaucaagcaggagcucgacaaguacaagaacgccgucaccgaccuccagcuccucaugcaguccacccccgccgccggcuccggcuccgccaucgccuccggcaucgccgucugcaagguccuccaccucgagggcgaggucaacaagaucaagaacgcccuccucuccaccaacaaggccgucgucucccucuccggcugcggcgucuccguccucaccuucaagguccucgaccucaagaacuacaucgacaagcagcuccuccccauccucaacaagcaguccugcuccauccccaacaucgagaccgucaucgaguuccagcagaagaacaaccgccuccucgagaucacccgcgaguucuccgucaacgccggcgucaccacccccgucuccaccuacaugcucaccaacuccgagcuccucucccucaucaacgacaugcccaucaccaacgaccagaagaagcucauguccaacaacguccagaucguccgccagcaguccuacuccaucaugugcaucaucaaggaggagguccucgccuacgucguccagcucccccucuacggcgucaucgacacccccugcuggaagcuccacaccuccccccucugcaccaccaacaccaaggagggcuccaacaucugccucacccgcaccgaccgcggcugguacugcgacaacgccggcuccgucuccuucuucccccaggccgagaccugcaagguccaguccaaccgcgucuucugcgacaccaugaacucccucacccuccccuccgaggucaaccucugcaacaucgacaucuucaaccccaaguacgacugcaagaucaugaccuccaagaccgacgucuccuccuccgucaucaccucccucggcgccaucgucuccugcuacggcaagaccaagugcaccgccuccaacaagugccgcggcaucaucaagaccuucuccaacggcugcgacuacgucuccaacaagggcgucgacaccgucuccgucggcaacacccucuacuacgucaacaagcaggagggccagucccucuacgucaagggcgagcccaucaucaacuucuacgacccccucgucuuccccuccgacgaguucgacgccuccaucucccaggucaacgagaagaucaaccagucccucgccuucauccgcaaguccgacgagcuccuccacaacgucaacgucggcaaguccaccaccaacaucaugaucaccaccaucaucaucgucaucaucgucauccuccuccuccucaucgccgucggccucuuccucuacugcaaggcccgcugaggacuaguguccaccugucccuccugggcugcuggauugucucguuuuccugccaaauaaacaggaucagcgcuuuacagaucuaaaaaaaaaaaaaaaaaaaaaaaaaaaaaaaaaaaaaaaaaaaaaaaaaaaaaaaaaaaaaaaaugcaucccccccccccccccccccccccccccccccaaaggcucuuuucagagccaccagaauu

SEQ ID NO: 19535 - RNA, 1817 nt, Artificial Sequence
  mRNA product Design b-2 comprising derived and/or modified sequence from HRSV(Memphis-37)__AIY60640.1__F-del_DSCav1_mut8 (opt3)
gggagagccucugcuggaguccggggaguggcguuggcugcuagagcgaagcuuaccauggagcugcccauccucaagaccaacgccauuacaacuauacuugcugcagugacgcugugcuucgccagcucccagaauaucaccgaagaguuuuaccaaucuacauguucagcggucaguaaaggcuauuugggggcuuuaagaacuggaugguacaccagcguuauuacaaucgaacuguccaacauuaaggagaucaaaugcaaugguaccgacgccaaggugaaacuaauaaagcaggaacucgauaaguauaaaaacgcaguaacugaccugcagcuucugaugcagucuacuccugccgcuggcucggggucagcaaucgccagcggaauugcuguguguaaggucuugcaccucgagggcgaggugaauaaaaucaagaacgcccugcugaguaccaauaaagcgguugugucccucucugguugcggggucagcguguuaacguucaagguacuggaucuuaagaacuacauugacaaacaauugcugccaauccuaaauaagcaguccuguucaauaccgaacauugaaacuguuaucgaguuucagcagaaaaauaacaggcuccuggaaauuacccgggaguucagugugaaugcaggagucacaacucccgugagcaccuauaugcuuacaaacucugagcuguugucccucaucaaugauaugccuaucaccaacgaccaaaagaaacugaugucaaacaaugugcagauuguccgccagcagagcuacaguauaaugugcaucauuaaggaagagguuuuagccuaugugguacaacugccacucuacggcgugaucgauacgcccuguuggaaacuucauacuucuccucugugcacaaccaacacuaaggaaggcuccaauauauguuugacacgaaccgaccgugggugguacugcgauaacgcuggaagcgucucguuuuucccacaggccgagacguguaaggugcagucuaauagaguuuucugcgacaccaugaacucccuaacacugcccucagaagugaaucucugcaacauugauaucuucaauccuaaauaugacuguaagaucaugacaaguaaaaccgaugucagcuccucugugauuacaagccugggugcaaucguaucaugcuacggcaagacuaaauguaccgcuaguaacaagugcagggggauuauaaagacauuuuccaauggaugugacuauguuagcaacaaaggcguggacaccgucucuguggguaauacucuuuacuaugucaacaagcaagaggggcagucacuguacgugaaaggagagccaaucauuaauuucuaugauccguugguuuuucccagugacgaauuugaugccagcaucucccaggugaacgagaagaucaaccagucucucgcguuuauucggaaaucggacgaacuguuacacaauguaaacgucggcaagagcacgacaaauauaaugaucaccacuauuaucauugugaucauaguuauccugcuacuccugauugccgugggccuuuucuuguacugcaaggcacgcugaggacuaguguccaccugucccuccugggcugcuggauugucucguuuuccugccaaauaaacaggaucagcgcuuuacagaucuaaaaaaaaaaaaaaaaaaaaaaaaaaaaaaaaaaaaaaaaaaaaaaaaaaaaaaaaaaaaaaaaugcaucccccccccccccccccccccccccccccccaaaggcucuuuucagagccaccagaauu

SEQ ID NO: 19536 - RNA, 1817 nt, Artificial Sequence
  mRNA product Design b-2 comprising derived and/or modified sequence from HRSV(Memphis-37)__AIY60640.1__F-del_DSCav1_mut8 (opt4)
gggagagccucugcuggaguccggggaguggcguuggcugcuagagcgaagcuuaccauggagcugcccauccugaagaccaacgccaucaccaccauccuggccgccgugacccugugcuucgccagcagccagaacaucaccgaggaguucuaccagagcaccugcagcgccgugagcaagggcuaccugggcgcccugagaaccggcugguacaccagcgugaucaccaucgagcugagcaacaucaaggagaucaagugcaacggcaccgacgccaaggugaagcugaucaagcaggagcuggacaaguacaagaacgccgugaccgaccugcagcugcugaugcagagcacccccgccgccggcagcggcagcgccaucgccagcggcaucgccgugugcaaggugcugcaccuggagggcgaggugaacaagaucaagaacgcccugcugagcaccaacaaggccguggugagccugagcggcugcggcgugagcgugcugaccuucaaggugcuggaccugaagaacuacaucgacaagcagcugcugcccauccugaacaagcagagcugcagcauccccaacaucgagaccgugaucgaguuccagcagaagaacaacagacugcuggagaucaccagagaguucagcgugaacgccggcgugaccacccccgugagcaccuacaugcugaccaacagcgagcugcugagccugaucaacgacaugcccaucaccaacgaccagaagaagcugaugagcaacaacgugcagaucgugagacagcagagcuacagcaucaugugcaucaucaaggaggaggugcuggccuacguggugcagcugccccuguacggcgugaucgacacccccugcuggaagcugcacaccagcccccugugcaccaccaacaccaaggagggcagcaacaucugccugaccagaaccgacagaggcugguacugcgacaacgccggcagcgugagcuucuucccccaggccgagaccugcaaggugcagagcaacagaguguucugcgacaccaugaacagccugacccugcccagcgaggugaaccugugcaacaucgacaucuucaaccccaaguacgacugcaagaucaugaccagcaagaccgacgugagcagcagcgugaucaccagccugggcgccaucgugagcugcuacggcaagaccaagugcaccgccagcaacaagugcagaggcaucaucaagaccuucagcaacggcugcgacuacgugagcaacaagggcguggacaccgugagcgugggcaacacccuguacuacgugaacaagcaggagggccagagccuguacgugaagggcgagcccaucaucaacuucuacgacccccugguguuccccagcgacgaguucgacgccagcaucagccaggugaacgagaagaucaaccagagccuggccuucaucagaaagagcgacgagcugcugcacaacgugaacgugggcaagagcaccaccaacaucaugaucaccaccaucaucaucgugaucaucgugauccugcugcugcugaucgccgugggccuguuccuguacugcaaggccagaugaggacuaguguccaccugucccuccugggcugcuggauugucucguuuuccugccaaauaaacaggaucagcgcuuuacagaucuaaaaaaaaaaaaaaaaaaaaaaaaaaaaaaaaaaaaaaaaaaaaaaaaaaaaaaaaaaaaaaaaugcaucccccccccccccccccccccccccccccccaaaggcucuuuucagagccaccagaauu

SEQ ID NO: 19537 - RNA, 1817 nt, Artificial Sequence
  mRNA product Design b-2 comprising derived and/or modified sequence from HRSV(Memphis-37)__AIY60640.1__F-del_DSCav1_mut8 (opt5)
gggagagccucugcuggaguccggggaguggcguuggcugcuagagcgaagcuuaccauggagcugcccauccucaagaccaacgccauuacaacgauccuggcugccgugacccuuugcuucgcgagcucccagaauauuacagaagaguuuuaccaaucuaccuguagcgcugucuccaaaggcuaucugggggcccucagaacaggaugguacaccucuguuaucacaauugaacugagcaacaucaaggagaucaaaugcaauggcaccgacgccaaggugaaacuuauuaagcaggaacuggauaaguauaaaaacgcugugacggaccuccagcugcugaugcaguccaccccugccgcugggucuggaagcgccaucgcguccggcauugccgucuguaaggugcuccaccuggagggggagguuaauaaaaucaagaacgcccuucugagcacaaauaaagcuguggucucucucuccggaugcggcgugagcguucugaccuucaaggugcuugaucugaagaacuacauugacaaacaacuccugccgauccugaauaagcagucuuguuccauucccaacaucgaaacagucaucgaguuucagcagaaaaauaaccggcuccuggaaauuacccgcgaguucagcgugaaugcuggcgugacgacaccugucucuaccuauaugcuuacaaacuccgagcugcucagccugaucaaugauaugcccauuaccaacgaccaaaagaaacuuauguccaacaauguucagaucgugagacagcagucuuacagcauuaugugcaucaucaaggaagaggugcuggccuaugucgugcaacucccucuguacgggguuauugauacccccuguuggaaacugcauacauccccucucugcacgaccaacacaaaggaaggaagcaauaucugucugacccggacagaccgcggcugguacugcgauaacgcggggucuguguccuuuuucccgcaggccgagaccuguaagguccagagcaauagaguguuuugcgacacgaugaacucucuuacacugcccagcgaaguuaaucucugcaacauugauaucuucaauccuaaauaugacuguaagauuaugaccuccaaaaccgaugugucuagcuccgucaucacaagccugggagcuaucgugucuugcuacggcaagaccaaauguacagccuccaacaagugccgggggauuaucaagacguuuagcaauggaugugacuaugucucuaacaaaggcguggacaccguuuccgugggcaauacacuuuacuaugucaacaagcaagaggggcagagccuguacgugaaaggagagcccauuaucaauuucuaugauccucucguuuuucccuccgacgaguucgaugcuucuauuagccaggugaacgaaaagaucaaccagucccuggccuuuauucgcaaaucugacgaacugcuccacaaugucaacgugggcaagagcaccacaaauaucaugaucaccacgauuaucauugugaucauuguuauccugcuucugcucaucgccgucgggcuguuccuguacugcaaggcuagaugaggacuaguguccaccugucccuccugggcugcuggauugucucguuuuccugccaaauaaacaggaucagcgcuuuacagaucuaaaaaaaaaaaaaaaaaaaaaaaaaaaaaaaaaaaaaaaaaaaaaaaaaaaaaaaaaaaaaaaaugcaucccccccccccccccccccccccccccccccaaaggcucuuuucagagccaccagaauu

SEQ ID NO: 19538 - RNA, 1817 nt, Artificial Sequence
  mRNA product Design b-2 comprising derived and/or modified sequence from HRSV(Memphis-37)__AIY60640.1__F-del_DSCav1_mut8 (opt6)
gggagagccucugcuggaguccggggaguggcguuggcugcuagagcgaagcuuaccauggaacuacccauacuaaaaacaaacgcaauuacaacaauacuugccgcaguaaccuuaugcuuugccucaucccaaaacauaacagaagaauuuuaucaaucaacaugcuccgcaguaucaaaaggauaccuaggcgcucuaagaacaggaugguacacauccguaaucacaauagaacuauccaauauaaaagaaauaaaauguaauggaacagaugcaaaaguuaaauuaauaaaacaagaacuagacaaauacaaaaacgcaguuaccgaucuccaacuauuaaugcaaucaacaccagcugcaggaaguggaagcgccauagcaagcggaauagcagucugcaaaguauuacaucuugaaggcgaaguaaacaaaaucaaaaaugcccuccucucaacaaacaaagcuguaguaucccuaucaggaugcgguguaucuguucuuacauuuaaaguacucgaucuaaaaaacuacaucgauaaacaguuacuuccaauacucaacaaacaaucauguagcauaccaaacauagaaacaguaauagaauuucaacaaaaaaacaaucgacuacucgaaauaacuagagaauuuucuguaaacgcuggaguaaccacaccagugucuaccuauaugcuuacaaauagcgaacuccuaucacuaaucaaugacaugccaauaacaaaugaccagaaaaaacucaugucaaauaacguacaaauaguacgacaacaaagcuacuccauaaugugcauaaucaaagaagaaguauuagccuacguuguucaacuaccauuauauggaguuauagacacuccaugcuggaaauuacauacaagcccacucuguacaacaaacacaaaagaaggcucaaacauaugcuuaacaagaacagauagaggaugguacugcgauaacgcaggcucagucucauuuuuuccacaagccgaaaccugcaaaguacaaucaaauagaguuuuuugcgacacaaugaacucacucacucuaccaagugaaguaaaucucuguaauaucgacauauucaacccaaaauaugacugcaaaauaaugacaucuaaaaccgauguauccucaagcguaaucacaucauuaggagcuauaguuuccugcuacgguaaaacaaaaugcacagcauccaacaaaugucgcgguaucaucaaaacauucuccaacggaugugauuacguaucaaacaaaggugucgacaccguaagcguaggcaacacuuuauacuauguaaacaaacaagaaggacaaagucuauauguaaaaggagaaccaauaauaaacuucuaugacccccuaguauucccuuccgacgaauuugaugcaagcauuucacaaguuaacgaaaaaaucaaucaaucccuugcuuucauaagaaaaucagacgaauuacuacacaacguaaacguaggaaaaagcacaacaaauaucaugauuacaacaauaauaauuguaauaauaguaauacuccucuuacuuauagcagucggcuuauuccuuuacugcaaagcaagauaaggacuaguguccaccugucccuccugggcugcuggauugucucguuuuccugccaaauaaacaggaucagcgcuuuacagaucuaaaaaaaaaaaaaaaaaaaaaaaaaaaaaaaaaaaaaaaaaaaaaaaaaaaaaaaaaaaaaaaaugcaucccccccccccccccccccccccccccccccaaaggcucuuuucagagccaccagaauu

SEQ ID NO: 19539 - RNA, 1817 nt, Artificial Sequence
  mRNA product Design b-2 comprising derived and/or modified sequence from HRSV(Memphis-37)__AIY60640.1__F-del_DSCav1_mut8 (opt11)
gggagagccucugcuggaguccggggaguggcguuggcugcuagagcgaagcuuaccauggaacuccccauccuaaaaaccaacgcaaucaccaccauccucgccgccguaacacucugcuuugcaagcucccaaaacaucaccgaagaauuuuaccaaucuaccugcagcgccguaucuaaaggauaccuaggagcccucagaaccgguugguacaccucugucaucacaauagaacucuccaacaucaaagaaaucaaaugcaacggcaccgacgccaaagucaaacucaucaaacaagaacucgacaaauauaaaaacgccguaaccgaccuccaacuccucaugcaauccacccccgccgccggcaguggcuccgcuaucgccuccggaaucgccguuugcaaaguccugcaccuagaaggcgaagucaacaaaaucaaaaacgcccugcucucaaccaacaaagcugucguaagccucuccggcugcggagucuccguccuuaccuucaaaguacucgaccuuaaaaacuacaucgacaaacaacuucuccccauacucaauaaacaauccugcuccauacccaacaucgaaacagucaucgaguuccaacagaaaaauaaccgccuccucgaaauaacccgcgaguucuccgucaacgcaggcgucaccaccccagucuccaccuacaugcugacaaacuccgaacuccuaucccucaucaacgacaugcccaucaccaacgaccaaaagaaacucaugagcaauaacguccaaaucguacgacaacaauccuacagcaucauguguaucaucaaagaagaaguacucgccuacgucguccaacucccacuauacggcgucaucgacacaccaugcuggaaacuucacaccuccccacucugcaccacaaacacaaaagaaggcuccaacaucugccuuacccgaaccgaccgcgggugguacugcgacaacgccggaucagucucguucuuuccccaagccgaaaccugcaaaguacaaucaaaucgcgucuucugcgacaccaugaacuccuuaacacuaccauccgaaguaaaccucugcaacauagacaucuucaacccaaaauacgacugcaaaaucaugaccuccaaaaccgacguauccuccuccguaaucaccagccucggcgcaauagucucaugcuacggcaaaaccaaaugcaccgccuccaacaaaugccgcggcaucauaaaaacuuucucuaacggaugcgacuacgucagcaacaaaggcgucgacaccguauccguagguaauacacuuuacuacgucaauaaacaagaaggccaaucccucuacgucaaaggagaacccaucauaaacuucuacgacccccucgucuuccccuccgacgaguucgacgccuccaucagccaggucaacgaaaagaucaaccaaucacucgccuucauccgcaaaagcgacgaacuccuccacaacguaaacgucggcaaauccacaaccaacauaaugaucaccacuaucaucaucgugauaaucgucauuuuacuucuccucaucgccguaggccucuuccuauacugcaaagcccgcuaaggacuaguguccaccugucccuccugggcugcuggauugucucguuuuccugccaaauaaacaggaucagcgcuuuacagaucuaaaaaaaaaaaaaaaaaaaaaaaaaaaaaaaaaaaaaaaaaaaaaaaaaaaaaaaaaaaaaaaaugcaucccccccccccccccccccccccccccccccaaaggcucuuuucagagccaccagaauu

SEQ ID NO: 19540 - RNA, 1837 nt, Artificial Sequence
  mRNA product Design b-3 comprising derived and/or modified sequence from HRSV(Memphis-37)__AIY60640.1__F-del_DSCav1_mut8 (opt1)
gggagagucccgcagucggcguccagcggcucugcuuguucgugugugugucguugcaggccuuauucaagcuuaccauggagcugcccauccucaagaccaacgccaucaccacgauccuggccgcggugacccugugcuucgccagcucccagaacaucaccgaggaguucuaccagagcacgugcuccgccgucagcaagggcuaccucggcgcccugcgcaccgggugguacaccagcgugaucaccaucgagcuguccaacaucaaggagaucaagugcaacggcaccgacgccaaggugaagcucaucaagcaggagcuggacaaguacaagaacgcggucacggaccugcagcuccugaugcagagcaccccggccgccggcuccgggagcgcgaucgccuccggcaucgccgucugcaaggugcugcaccucgagggcgaggugaacaagaucaagaacgcccugcuguccaccaacaaggccgucgugagccucuccggcugcggggugagcguccugaccuucaaggugcuggaccucaagaacuacaucgacaagcagcugcugcccauccugaacaagcagagcugcuccauccccaacaucgagaccgucaucgaguuccagcagaagaacaaccgccuccuggagaucacgcgggaguucagcgugaacgcgggcgugaccacccccgucuccaccuacaugcugacgaacagcgagcuccugucccugaucaacgacaugccgaucaccaacgaccagaagaagcucaugagcaacaacgugcagaucgugcgccagcaguccuacagcaucaugugcaucaucaaggaggagguccuggccuacguggugcagcugccccucuacggggucaucgacacccccugcuggaagcugcacaccagcccccugugcacgaccaacaccaaggagggcuccaacaucugccucacccggacggaccgcgggugguacugcgacaacgccggcagcguguccuucuucccgcaggccgagaccugcaagguccagagcaaccggguguucugcgacaccaugaacucccugacccugcccagcgaggugaaccucugcaacaucgacaucuucaaccccaaguacgacugcaagaucaugacguccaagaccgacgucagcuccagcgugaucaccucccugggcgccaucgugagcugcuacgggaagaccaagugcacggcgagcaacaagugccgcggcaucaucaagaccuucuccaacgggugcgacuacgucagcaacaagggcguggacaccguguccgucggcaacacccuguacuacgugaacaagcaggagggccagagccucuacgugaagggggagcccaucaucaacuucuacgacccgcuggucuuccccuccgacgaguucgacgccagcaucucccaggugaacgagaagaucaaccagagccuggccuucauccggaaguccgacgagcuccugcacaacgugaacgucggcaagagcaccacgaacaucaugaucaccaccaucaucaucgugaucaucgugauccugcugcuccugaucgccgucgggcuguuccucuacugcaaggcccgcugaggacuaguguccaccugucccuccugggcugcuggauugucucguuuuccugccaaauaaacaggaucagcgcuuuacagaucuaaaaaaaaaaaaaaaaaaaaaaaaaaaaaaaaaaaaaaaaaaaaaaaaaaaaaaaaaaaaaaaaugcaucccccccccccccccccccccccccccccccaaaggcucuuuucagagccaccagaauu

SEQ ID NO: 19541 - RNA, 1837 nt, Artificial Sequence
  mRNA product Design b-3 comprising derived and/or modified sequence from HRSV(Memphis-37)__AIY60640.1__F-del_DSCav1_mut8 (opt1)
gggagagucccgcagucggcguccagcggcucugcuuguucgugugugugucguugcaggccuuauucaagcuuaccauggagcugcccauccucaagaccaacgccaucaccacgauccuggccgcggugacccugugcuucgccagcucccagaacaucaccgaggaguucuaccagagcacgugcuccgccgucagcaagggcuaccucggggcccugcgcaccggcugguacaccuccgugaucaccaucgagcugagcaacaucaaggagaucaagugcaacgggaccgacgccaaggugaagcucaucaagcaggagcuggacaaguacaagaacgcggucacggaccugcagcuccugaugcaguccaccccggccgccggcagcggguccgccaucgcgagcggcaucgccgugugcaaggugcugcaccucgagggcgaggucaacaagaucaagaacgcccugcuguccaccaacaaggccguggugagccucuccgggugcggcgucagcgugcugaccuucaaggugcuggaccucaagaacuacaucgacaagcagcugcugcccauccucaacaagcaguccugcagcauccccaacaucgagacggucaucgaguuccagcagaagaacaaccggcugcuggagaucacccgcgaguucuccgugaacgccggggugaccacccccgucagcacguacaugcucaccaacuccgagcugcugagccucaucaacgacaugccgaucaccaacgaccagaagaagcugaugagcaacaacgugcagaucgugcggcagcaguccuacagcaucaugugcaucaucaaggaggagguccuggcguacguggugcagcucccccuguacggcgucaucgacacccccugcuggaagcugcacacgagcccccucugcaccaccaacaccaaggagggguccaacaucugccugacgcgcaccgaccggggcugguacugcgacaacgccggcuccgugagcuucuucccgcaggccgagaccugcaaggugcaguccaaccgcgucuucugcgacaccaugaacagccugacgcuccccuccgaggugaaccugugcaacaucgacaucuucaaccccaaguacgacugcaagaucaugaccagcaagaccgacgucuccagcuccgugaucaccagccugggggccaucguguccugcuacggcaagacgaagugcaccgccagcaacaagugccgggggaucaucaagaccuucuccaacggcugcgacuacgucagcaacaagggcguggacaccguguccgucgggaacacgcucuacuacgugaacaagcaggagggccagagccuguacgugaagggggagcccaucaucaacuucuacgacccgcuggucuuccccagcgacgaguucgacgcguccaucagccaggugaacgagaagaucaaccagucccucgccuucauccgcaagagcgacgagcugcugcacaacgugaacgucggcaaguccaccaccaacaucaugaucaccaccaucaucaucgugaucaucgugauccuccugcugcucaucgccgucgggcuguuccuguacugcaaggcccggugaggacuaguguccaccugucccuccugggcugcuggauugucucguuuuccugccaaauaaacaggaucagcgcuuuacagaucuaaaaaaaaaaaaaaaaaaaaaaaaaaaaaaaaaaaaaaaaaaaaaaaaaaaaaaaaaaaaaaaaugcaucccccccccccccccccccccccccccccccaaaggcucuuuucagagccaccagaauu

SEQ ID NO: 19542 - RNA, 1837 nt, Artificial Sequence
  mRNA product Design b-3 comprising derived and/or modified sequence from HRSV(Memphis-37)__AIY60640.1__F-del_DSCav1_mut8 (opt2)
gggagagucccgcagucggcguccagcggcucugcuuguucgugugugugucguugcaggccuuauucaagcuuaccauggagcuccccauccucaagaccaacgccaucaccaccauccucgccgccgucacccucugcuucgccuccucccagaacaucaccgaggaguucuaccaguccaccugcuccgccgucuccaagggcuaccucggcgcccuccgcaccggcugguacaccuccgucaucaccaucgagcucuccaacaucaaggagaucaagugcaacggcaccgacgccaaggucaagcucaucaagcaggagcucgacaaguacaagaacgccgucaccgaccuccagcuccucaugcaguccacccccgccgccggcuccggcuccgccaucgccuccggcaucgccgucugcaagguccuccaccucgagggcgaggucaacaagaucaagaacgcccuccucuccaccaacaaggccgucgucucccucuccggcugcggcgucuccguccucaccuucaagguccucgaccucaagaacuacaucgacaagcagcuccuccccauccucaacaagcaguccugcuccauccccaacaucgagaccgucaucgaguuccagcagaagaacaaccgccuccucgagaucacccgcgaguucuccgucaacgccggcgucaccacccccgucuccaccuacaugcucaccaacuccgagcuccucucccucaucaacgacaugcccaucaccaacgaccagaagaagcucauguccaacaacguccagaucguccgccagcaguccuacuccaucaugugcaucaucaaggaggagguccucgccuacgucguccagcucccccucuacggcgucaucgacacccccugcuggaagcuccacaccuccccccucugcaccaccaacaccaaggagggcuccaacaucugccucacccgcaccgaccgcggcugguacugcgacaacgccggcuccgucuccuucuucccccaggccgagaccugcaagguccaguccaaccgcgucuucugcgacaccaugaacucccucacccuccccuccgaggucaaccucugcaacaucgacaucuucaaccccaaguacgacugcaagaucaugaccuccaagaccgacgucuccuccuccgucaucaccucccucggcgccaucgucuccugcuacggcaagaccaagugcaccgccuccaacaagugccgcggcaucaucaagaccuucuccaacggcugcgacuacgucuccaacaagggcgucgacaccgucuccgucggcaacacccucuacuacgucaacaagcaggagggccagucccucuacgucaagggcgagcccaucaucaacuucuacgacccccucgucuuccccuccgacgaguucgacgccuccaucucccaggucaacgagaagaucaaccagucccucgccuucauccgcaaguccgacgagcuccuccacaacgucaacgucggcaaguccaccaccaacaucaugaucaccaccaucaucaucgucaucaucgucauccuccuccuccucaucgccgucggccucuuccucuacugcaaggcccgcugaggacuaguguccaccugucccuccugggcugcuggauugucucguuuuccugccaaauaaacaggaucagcgcuuuacagaucuaaaaaaaaaaaaaaaaaaaaaaaaaaaaaaaaaaaaaaaaaaaaaaaaaaaaaaaaaaaaaaaaugcaucccccccccccccccccccccccccccccccaaaggcucuuuucagagccaccagaauu

SEQ ID NO: 19543 - RNA, 1837 nt, Artificial Sequence
  mRNA product Design b-3 comprising derived and/or modified sequence from HRSV(Memphis-37)__AIY60640.1__F-del_DSCav1_mut8 (opt3)
gggagagucccgcagucggcguccagcggcucugcuuguucgugugugugucguugcaggccuuauucaagcuuaccauggagcugcccauccucaagaccaacgccauuacaacuauacuugcugcagugacgcugugcuucgccagcucccagaauaucaccgaagaguuuuaccaaucuacauguucagcggucaguaaaggcuauuugggggcuuuaagaacuggaugguacaccagcguuauuacaaucgaacuguccaacauuaaggagaucaaaugcaaugguaccgacgccaaggugaaacuaauaaagcaggaacucgauaaguauaaaaacgcaguaacugaccugcagcuucugaugcagucuacuccugccgcuggcucggggucagcaaucgccagcggaauugcuguguguaaggucuugcaccucgagggcgaggugaauaaaaucaagaacgcccugcugaguaccaauaaagcgguugugucccucucugguugcggggucagcguguuaacguucaagguacuggaucuuaagaacuacauugacaaacaauugcugccaauccuaaauaagcaguccuguucaauaccgaacauugaaacuguuaucgaguuucagcagaaaaauaacaggcuccuggaaauuacccgggaguucagugugaaugcaggagucacaacucccgugagcaccuauaugcuuacaaacucugagcuguugucccucaucaaugauaugccuaucaccaacgaccaaaagaaacugaugucaaacaaugugcagauuguccgccagcagagcuacaguauaaugugcaucauuaaggaagagguuuuagccuaugugguacaacugccacucuacggcgugaucgauacgcccuguuggaaacuucauacuucuccucugugcacaaccaacacuaaggaaggcuccaauauauguuugacacgaaccgaccgugggugguacugcgauaacgcuggaagcgucucguuuuucccacaggccgagacguguaaggugcagucuaauagaguuuucugcgacaccaugaacucccuaacacugcccucagaagugaaucucugcaacauugauaucuucaauccuaaauaugacuguaagaucaugacaaguaaaaccgaugucagcuccucugugauuacaagccugggugcaaucguaucaugcuacggcaagacuaaauguaccgcuaguaacaagugcagggggauuauaaagacauuuuccaauggaugugacuauguuagcaacaaaggcguggacaccgucucuguggguaauacucuuuacuaugucaacaagcaagaggggcagucacuguacgugaaaggagagccaaucauuaauuucuaugauccguugguuuuucccagugacgaauuugaugccagcaucucccaggugaacgagaagaucaaccagucucucgcguuuauucggaaaucggacgaacuguuacacaauguaaacgucggcaagagcacgacaaauauaaugaucaccacuauuaucauugugaucauaguuauccugcuacuccugauugccgugggccuuuucuuguacugcaaggcacgcugaggacuaguguccaccugucccuccugggcugcuggauugucucguuuuccugccaaauaaacaggaucagcgcuuuacagaucuaaaaaaaaaaaaaaaaaaaaaaaaaaaaaaaaaaaaaaaaaaaaaaaaaaaaaaaaaaaaaaaaugcaucccccccccccccccccccccccccccccccaaaggcucuuuucagagccaccagaauu

SEQ ID NO: 19544 - RNA, 1837 nt, Artificial Sequence
  mRNA product Design b-3 comprising derived and/or modified sequence from HRSV(Memphis-37)__AIY60640.1__F-del_DSCav1_mut8 (opt4)
gggagagucccgcagucggcguccagcggcucugcuuguucgugugugugucguugcaggccuuauucaagcuuaccauggagcugcccauccugaagaccaacgccaucaccaccauccuggccgccgugacccugugcuucgccagcagccagaacaucaccgaggaguucuaccagagcaccugcagcgccgugagcaagggcuaccugggcgcccugagaaccggcugguacaccagcgugaucaccaucgagcugagcaacaucaaggagaucaagugcaacggcaccgacgccaaggugaagcugaucaagcaggagcuggacaaguacaagaacgccgugaccgaccugcagcugcugaugcagagcacccccgccgccggcagcggcagcgccaucgccagcggcaucgccgugugcaaggugcugcaccuggagggcgaggugaacaagaucaagaacgcccugcugagcaccaacaaggccguggugagccugagcggcugcggcgugagcgugcugaccuucaaggugcuggaccugaagaacuacaucgacaagcagcugcugcccauccugaacaagcagagcugcagcauccccaacaucgagaccgugaucgaguuccagcagaagaacaacagacugcuggagaucaccagagaguucagcgugaacgccggcgugaccacccccgugagcaccuacaugcugaccaacagcgagcugcugagccugaucaacgacaugcccaucaccaacgaccagaagaagcugaugagcaacaacgugcagaucgugagacagcagagcuacagcaucaugugcaucaucaaggaggaggugcuggccuacguggugcagcugccccuguacggcgugaucgacacccccugcuggaagcugcacaccagcccccugugcaccaccaacaccaaggagggcagcaacaucugccugaccagaaccgacagaggcugguacugcgacaacgccggcagcgugagcuucuucccccaggccgagaccugcaaggugcagagcaacagaguguucugcgacaccaugaacagccugacccugcccagcgaggugaaccugugcaacaucgacaucuucaaccccaaguacgacugcaagaucaugaccagcaagaccgacgugagcagcagcgugaucaccagccugggcgccaucgugagcugcuacggcaagaccaagugcaccgccagcaacaagugcagaggcaucaucaagaccuucagcaacggcugcgacuacgugagcaacaagggcguggacaccgugagcgugggcaacacccuguacuacgugaacaagcaggagggccagagccuguacgugaagggcgagcccaucaucaacuucuacgacccccugguguuccccagcgacgaguucgacgccagcaucagccaggugaacgagaagaucaaccagagccuggccuucaucagaaagagcgacgagcugcugcacaacgugaacgugggcaagagcaccaccaacaucaugaucaccaccaucaucaucgugaucaucgugauccugcugcugcugaucgccgugggccuguuccuguacugcaaggccagaugaggacuaguguccaccugucccuccugggcugcuggauugucucguuuuccugccaaauaaacaggaucagcgcuuuacagaucuaaaaaaaaaaaaaaaaaaaaaaaaaaaaaaaaaaaaaaaaaaaaaaaaaaaaaaaaaaaaaaaaugcaucccccccccccccccccccccccccccccccaaaggcucuuuucagagccaccagaauu

SEQ ID NO: 19545 - RNA, 1837 nt, Artificial Sequence
  mRNA product Design b-3 comprising derived and/or modified sequence from HRSV(Memphis-37)__AIY60640.1__F-del_DSCav1_mut8 (opt5)
gggagagucccgcagucggcguccagcggcucugcuuguucgugugugugucguugcaggccuuauucaagcuuaccauggagcugcccauccucaagaccaacgccauuacaacgauccuggcugccgugacccuuugcuucgcgagcucccagaauauuacagaagaguuuuaccaaucuaccuguagcgcugucuccaaaggcuaucugggggcccucagaacaggaugguacaccucuguuaucacaauugaacugagcaacaucaaggagaucaaaugcaauggcaccgacgccaaggugaaacuuauuaagcaggaacuggauaaguauaaaaacgcugugacggaccuccagcugcugaugcaguccaccccugccgcugggucuggaagcgccaucgcguccggcauugccgucuguaaggugcuccaccuggagggggagguuaauaaaaucaagaacgcccuucugagcacaaauaaagcuguggucucucucuccggaugcggcgugagcguucugaccuucaaggugcuugaucugaagaacuacauugacaaacaacuccugccgauccugaauaagcagucuuguuccauucccaacaucgaaacagucaucgaguuucagcagaaaaauaaccggcuccuggaaauuacccgcgaguucagcgugaaugcuggcgugacgacaccugucucuaccuauaugcuuacaaacuccgagcugcucagccugaucaaugauaugcccauuaccaacgaccaaaagaaacuuauguccaacaauguucagaucgugagacagcagucuuacagcauuaugugcaucaucaaggaagaggugcuggccuaugucgugcaacucccucuguacgggguuauugauacccccuguuggaaacugcauacauccccucucugcacgaccaacacaaaggaaggaagcaauaucugucugacccggacagaccgcggcugguacugcgauaacgcggggucuguguccuuuuucccgcaggccgagaccuguaagguccagagcaauagaguguuuugcgacacgaugaacucucuuacacugcccagcgaaguuaaucucugcaacauugauaucuucaauccuaaauaugacuguaagauuaugaccuccaaaaccgaugugucuagcuccgucaucacaagccugggagcuaucgugucuugcuacggcaagaccaaauguacagccuccaacaagugccgggggauuaucaagacguuuagcaauggaugugacuaugucucuaacaaaggcguggacaccguuuccgugggcaauacacuuuacuaugucaacaagcaagaggggcagagccuguacgugaaaggagagcccauuaucaauuucuaugauccucucguuuuucccuccgacgaguucgaugcuucuauuagccaggugaacgaaaagaucaaccagucccuggccuuuauucgcaaaucugacgaacugcuccacaaugucaacgugggcaagagcaccacaaauaucaugaucaccacgauuaucauugugaucauuguuauccugcuucugcucaucgccgucgggcuguuccuguacugcaaggcuagaugaggacuaguguccaccugucccuccugggcugcuggauugucucguuuuccugccaaauaaacaggaucagcgcuuuacagaucuaaaaaaaaaaaaaaaaaaaaaaaaaaaaaaaaaaaaaaaaaaaaaaaaaaaaaaaaaaaaaaaaugcaucccccccccccccccccccccccccccccccaaaggcucuuuucagagccaccagaauu

SEQ ID NO: 19546 - RNA, 1837 nt, Artificial Sequence
  mRNA product Design b-3 comprising derived and/or modified sequence from HRSV(Memphis-37)__AIY60640.1__F-del_DSCav1_mut8 (opt6)
gggagagucccgcagucggcguccagcggcucugcuuguucgugugugugucguugcaggccuuauucaagcuuaccauggaacuacccauacuaaaaacaaacgcaauuacaacaauacuugccgcaguaaccuuaugcuuugccucaucccaaaacauaacagaagaauuuuaucaaucaacaugcuccgcaguaucaaaaggauaccuaggcgcucuaagaacaggaugguacacauccguaaucacaauagaacuauccaauauaaaagaaauaaaauguaauggaacagaugcaaaaguuaaauuaauaaaacaagaacuagacaaauacaaaaacgcaguuaccgaucuccaacuauuaaugcaaucaacaccagcugcaggaaguggaagcgccauagcaagcggaauagcagucugcaaaguauuacaucuugaaggcgaaguaaacaaaaucaaaaaugcccuccucucaacaaacaaagcuguaguaucccuaucaggaugcgguguaucuguucuuacauuuaaaguacucgaucuaaaaaacuacaucgauaaacaguuacuuccaauacucaacaaacaaucauguagcauaccaaacauagaaacaguaauagaauuucaacaaaaaaacaaucgacuacucgaaauaacuagagaauuuucuguaaacgcuggaguaaccacaccagugucuaccuauaugcuuacaaauagcgaacuccuaucacuaaucaaugacaugccaauaacaaaugaccagaaaaaacucaugucaaauaacguacaaauaguacgacaacaaagcuacuccauaaugugcauaaucaaagaagaaguauuagccuacguuguucaacuaccauuauauggaguuauagacacuccaugcuggaaauuacauacaagcccacucuguacaacaaacacaaaagaaggcucaaacauaugcuuaacaagaacagauagaggaugguacugcgauaacgcaggcucagucucauuuuuuccacaagccgaaaccugcaaaguacaaucaaauagaguuuuuugcgacacaaugaacucacucacucuaccaagugaaguaaaucucuguaauaucgacauauucaacccaaaauaugacugcaaaauaaugacaucuaaaaccgauguauccucaagcguaaucacaucauuaggagcuauaguuuccugcuacgguaaaacaaaaugcacagcauccaacaaaugucgcgguaucaucaaaacauucuccaacggaugugauuacguaucaaacaaaggugucgacaccguaagcguaggcaacacuuuauacuauguaaacaaacaagaaggacaaagucuauauguaaaaggagaaccaauaauaaacuucuaugacccccuaguauucccuuccgacgaauuugaugcaagcauuucacaaguuaacgaaaaaaucaaucaaucccuugcuuucauaagaaaaucagacgaauuacuacacaacguaaacguaggaaaaagcacaacaaauaucaugauuacaacaauaauaauuguaauaauaguaauacuccucuuacuuauagcagucggcuuauuccuuuacugcaaagcaagauaaggacuaguguccaccugucccuccugggcugcuggauugucucguuuuccugccaaauaaacaggaucagcgcuuuacagaucuaaaaaaaaaaaaaaaaaaaaaaaaaaaaaaaaaaaaaaaaaaaaaaaaaaaaaaaaaaaaaaaaugcaucccccccccccccccccccccccccccccccaaaggcucuuuucagagccaccagaauu

SEQ ID NO: 19547 - RNA, 1837 nt, Artificial Sequence
  mRNA product Design b-3 comprising derived and/or modified sequence from HRSV(Memphis-37)__AIY60640.1__F-del_DSCav1_mut8 (opt11)
gggagagucccgcagucggcguccagcggcucugcuuguucgugugugugucguugcaggccuuauucaagcuuaccauggaacuccccauccuaaaaaccaacgcaaucaccaccauccucgccgccguaacacucugcuuugcaagcucccaaaacaucaccgaagaauuuuaccaaucuaccugcagcgccguaucuaaaggauaccuaggagcccucagaaccgguugguacaccucugucaucacaauagaacucuccaacaucaaagaaaucaaaugcaacggcaccgacgccaaagucaaacucaucaaacaagaacucgacaaauauaaaaacgccguaaccgaccuccaacuccucaugcaauccacccccgccgccggcaguggcuccgcuaucgccuccggaaucgccguuugcaaaguccugcaccuagaaggcgaagucaacaaaaucaaaaacgcccugcucucaaccaacaaagcugucguaagccucuccggcugcggagucuccguccuuaccuucaaaguacucgaccuuaaaaacuacaucgacaaacaacuucuccccauacucaauaaacaauccugcuccauacccaacaucgaaacagucaucgaguuccaacagaaaaauaaccgccuccucgaaauaacccgcgaguucuccgucaacgcaggcgucaccaccccagucuccaccuacaugcugacaaacuccgaacuccuaucccucaucaacgacaugcccaucaccaacgaccaaaagaaacucaugagcaauaacguccaaaucguacgacaacaauccuacagcaucauguguaucaucaaagaagaaguacucgccuacgucguccaacucccacuauacggcgucaucgacacaccaugcuggaaacuucacaccuccccacucugcaccacaaacacaaaagaaggcuccaacaucugccuuacccgaaccgaccgcgggugguacugcgacaacgccggaucagucucguucuuuccccaagccgaaaccugcaaaguacaaucaaaucgcgucuucugcgacaccaugaacuccuuaacacuaccauccgaaguaaaccucugcaacauagacaucuucaacccaaaauacgacugcaaaaucaugaccuccaaaaccgacguauccuccuccguaaucaccagccucggcgcaauagucucaugcuacggcaaaaccaaaugcaccgccuccaacaaaugccgcggcaucauaaaaacuuucucuaacggaugcgacuacgucagcaacaaaggcgucgacaccguauccguagguaauacacuuuacuacgucaauaaacaagaaggccaaucccucuacgucaaaggagaacccaucauaaacuucuacgacccccucgucuuccccuccgacgaguucgacgccuccaucagccaggucaacgaaaagaucaaccaaucacucgccuucauccgcaaaagcgacgaacuccuccacaacguaaacgucggcaaauccacaaccaacauaaugaucaccacuaucaucaucgugauaaucgucauuuuacuucuccucaucgccguaggccucuuccuauacugcaaagcccgcuaaggacuaguguccaccugucccuccugggcugcuggauugucucguuuuccugccaaauaaacaggaucagcgcuuuacagaucuaaaaaaaaaaaaaaaaaaaaaaaaaaaaaaaaaaaaaaaaaaaaaaaaaaaaaaaaaaaaaaaaugcaucccccccccccccccccccccccccccccccaaaggcucuuuucagagccaccagaauu

SEQ ID NO: 19548 - RNA, 1888 nt, Artificial Sequence
  mRNA product Design b-4 comprising derived and/or modified sequence from HRSV(Memphis-37)__AIY60640.1__F-del_DSCav1_mut8 (opt1)
gggagagucccgcagucggcguccagcggcucugcuuguucgugugugugucguugcaggccuuauucaagcuuaccauggagcugcccauccucaagaccaacgccaucaccacgauccuggccgcggugacccugugcuucgccagcucccagaacaucaccgaggaguucuaccagagcacgugcuccgccgucagcaagggcuaccucggcgcccugcgcaccgggugguacaccagcgugaucaccaucgagcuguccaacaucaaggagaucaagugcaacggcaccgacgccaaggugaagcucaucaagcaggagcuggacaaguacaagaacgcggucacggaccugcagcuccugaugcagagcaccccggccgccggcuccgggagcgcgaucgccuccggcaucgccgucugcaaggugcugcaccucgagggcgaggugaacaagaucaagaacgcccugcuguccaccaacaaggccgucgugagccucuccggcugcggggugagcguccugaccuucaaggugcuggaccucaagaacuacaucgacaagcagcugcugcccauccugaacaagcagagcugcuccauccccaacaucgagaccgucaucgaguuccagcagaagaacaaccgccuccuggagaucacgcgggaguucagcgugaacgcgggcgugaccacccccgucuccaccuacaugcugacgaacagcgagcuccugucccugaucaacgacaugccgaucaccaacgaccagaagaagcucaugagcaacaacgugcagaucgugcgccagcaguccuacagcaucaugugcaucaucaaggaggagguccuggccuacguggugcagcugccccucuacggggucaucgacacccccugcuggaagcugcacaccagcccccugugcacgaccaacaccaaggagggcuccaacaucugccucacccggacggaccgcgggugguacugcgacaacgccggcagcguguccuucuucccgcaggccgagaccugcaagguccagagcaaccggguguucugcgacaccaugaacucccugacccugcccagcgaggugaaccucugcaacaucgacaucuucaaccccaaguacgacugcaagaucaugacguccaagaccgacgucagcuccagcgugaucaccucccugggcgccaucgugagcugcuacgggaagaccaagugcacggcgagcaacaagugccgcggcaucaucaagaccuucuccaacgggugcgacuacgucagcaacaagggcguggacaccguguccgucggcaacacccuguacuacgugaacaagcaggagggccagagccucuacgugaagggggagcccaucaucaacuucuacgacccgcuggucuuccccuccgacgaguucgacgccagcaucucccaggugaacgagaagaucaaccagagccuggccuucauccggaaguccgacgagcuccugcacaacgugaacgucggcaagagcaccacgaacaucaugaucaccaccaucaucaucgugaucaucgugauccugcugcuccugaucgccgucgggcuguuccucuacugcaaggcccgcugaggacuaguaauaaggaaacuguaugaaugucugugggcaggaagugaagagauccuucuguaaagguuuuuggaauuaugucugcugaauaauaaacuuuuuugaaauaauaaaucugguagaaaaaugagaucuaaaaaaaaaaaaaaaaaaaaaaaaaaaaaaaaaaaaaaaaaaaaaaaaaaaaaaaaaaaaaaaaugcaucccccccccccccccccccccccccccccccaaaggcucuuuucagagccaccagaauu

SEQ ID NO: 19549 - RNA, 1888 nt, Artificial Sequence
  mRNA product Design b-4 comprising derived and/or modified sequence from HRSV(Memphis-37)__AIY60640.1__F-del_DSCav1_mut8 (opt1)
gggagagucccgcagucggcguccagcggcucugcuuguucgugugugugucguugcaggccuuauucaagcuuaccauggagcugcccauccucaagaccaacgccaucaccacgauccuggccgcggugacccugugcuucgccagcucccagaacaucaccgaggaguucuaccagagcacgugcuccgccgucagcaagggcuaccucggggcccugcgcaccggcugguacaccuccgugaucaccaucgagcugagcaacaucaaggagaucaagugcaacgggaccgacgccaaggugaagcucaucaagcaggagcuggacaaguacaagaacgcggucacggaccugcagcuccugaugcaguccaccccggccgccggcagcggguccgccaucgcgagcggcaucgccgugugcaaggugcugcaccucgagggcgaggucaacaagaucaagaacgcccugcuguccaccaacaaggccguggugagccucuccgggugcggcgucagcgugcugaccuucaaggugcuggaccucaagaacuacaucgacaagcagcugcugcccauccucaacaagcaguccugcagcauccccaacaucgagacggucaucgaguuccagcagaagaacaaccggcugcuggagaucacccgcgaguucuccgugaacgccggggugaccacccccgucagcacguacaugcucaccaacuccgagcugcugagccucaucaacgacaugccgaucaccaacgaccagaagaagcugaugagcaacaacgugcagaucgugcggcagcaguccuacagcaucaugugcaucaucaaggaggagguccuggcguacguggugcagcucccccuguacggcgucaucgacacccccugcuggaagcugcacacgagcccccucugcaccaccaacaccaaggagggguccaacaucugccugacgcgcaccgaccggggcugguacugcgacaacgccggcuccgugagcuucuucccgcaggccgagaccugcaaggugcaguccaaccgcgucuucugcgacaccaugaacagccugacgcuccccuccgaggugaaccugugcaacaucgacaucuucaaccccaaguacgacugcaagaucaugaccagcaagaccgacgucuccagcuccgugaucaccagccugggggccaucguguccugcuacggcaagacgaagugcaccgccagcaacaagugccgggggaucaucaagaccuucuccaacggcugcgacuacgucagcaacaagggcguggacaccguguccgucgggaacacgcucuacuacgugaacaagcaggagggccagagccuguacgugaagggggagcccaucaucaacuucuacgacccgcuggucuuccccagcgacgaguucgacgcguccaucagccaggugaacgagaagaucaaccagucccucgccuucauccgcaagagcgacgagcugcugcacaacgugaacgucggcaaguccaccaccaacaucaugaucaccaccaucaucaucgugaucaucgugauccuccugcugcucaucgccgucgggcuguuccuguacugcaaggcccggugaggacuaguaauaaggaaacuguaugaaugucugugggcaggaagugaagagauccuucuguaaagguuuuuggaauuaugucugcugaauaauaaacuuuuuugaaauaauaaaucugguagaaaaaugagaucuaaaaaaaaaaaaaaaaaaaaaaaaaaaaaaaaaaaaaaaaaaaaaaaaaaaaaaaaaaaaaaaaugcaucccccccccccccccccccccccccccccccaaaggcucuuuucagagccaccagaauu

SEQ ID NO: 19550 - RNA, 1888 nt, Artificial Sequence
  mRNA product Design b-4 comprising derived and/or modified sequence from HRSV(Memphis-37)__AIY60640.1__F-del_DSCav1_mut8 (opt2)
gggagagucccgcagucggcguccagcggcucugcuuguucgugugugugucguugcaggccuuauucaagcuuaccauggagcuccccauccucaagaccaacgccaucaccaccauccucgccgccgucacccucugcuucgccuccucccagaacaucaccgaggaguucuaccaguccaccugcuccgccgucuccaagggcuaccucggcgcccuccgcaccggcugguacaccuccgucaucaccaucgagcucuccaacaucaaggagaucaagugcaacggcaccgacgccaaggucaagcucaucaagcaggagcucgacaaguacaagaacgccgucaccgaccuccagcuccucaugcaguccacccccgccgccggcuccggcuccgccaucgccuccggcaucgccgucugcaagguccuccaccucgagggcgaggucaacaagaucaagaacgcccuccucuccaccaacaaggccgucgucucccucuccggcugcggcgucuccguccucaccuucaagguccucgaccucaagaacuacaucgacaagcagcuccuccccauccucaacaagcaguccugcuccauccccaacaucgagaccgucaucgaguuccagcagaagaacaaccgccuccucgagaucacccgcgaguucuccgucaacgccggcgucaccacccccgucuccaccuacaugcucaccaacuccgagcuccucucccucaucaacgacaugcccaucaccaacgaccagaagaagcucauguccaacaacguccagaucguccgccagcaguccuacuccaucaugugcaucaucaaggaggagguccucgccuacgucguccagcucccccucuacggcgucaucgacacccccugcuggaagcuccacaccuccccccucugcaccaccaacaccaaggagggcuccaacaucugccucacccgcaccgaccgcggcugguacugcgacaacgccggcuccgucuccuucuucccccaggccgagaccugcaagguccaguccaaccgcgucuucugcgacaccaugaacucccucacccuccccuccgaggucaaccucugcaacaucgacaucuucaaccccaaguacgacugcaagaucaugaccuccaagaccgacgucuccuccuccgucaucaccucccucggcgccaucgucuccugcuacggcaagaccaagugcaccgccuccaacaagugccgcggcaucaucaagaccuucuccaacggcugcgacuacgucuccaacaagggcgucgacaccgucuccgucggcaacacccucuacuacgucaacaagcaggagggccagucccucuacgucaagggcgagcccaucaucaacuucuacgacccccucgucuuccccuccgacgaguucgacgccuccaucucccaggucaacgagaagaucaaccagucccucgccuucauccgcaaguccgacgagcuccuccacaacgucaacgucggcaaguccaccaccaacaucaugaucaccaccaucaucaucgucaucaucgucauccuccuccuccucaucgccgucggccucuuccucuacugcaaggcccgcugaggacuaguaauaaggaaacuguaugaaugucugugggcaggaagugaagagauccuucuguaaagguuuuuggaauuaugucugcugaauaauaaacuuuuuugaaauaauaaaucugguagaaaaaugagaucuaaaaaaaaaaaaaaaaaaaaaaaaaaaaaaaaaaaaaaaaaaaaaaaaaaaaaaaaaaaaaaaaugcaucccccccccccccccccccccccccccccccaaaggcucuuuucagagccaccagaauu

SEQ ID NO: 19551 - RNA, 1888 nt, Artificial Sequence
  mRNA product Design b-4 comprising derived and/or modified sequence from HRSV(Memphis-37)__AIY60640.1__F-del_DSCav1_mut8 (opt3)
gggagagucccgcagucggcguccagcggcucugcuuguucgugugugugucguugcaggccuuauucaagcuuaccauggagcugcccauccucaagaccaacgccauuacaacuauacuugcugcagugacgcugugcuucgccagcucccagaauaucaccgaagaguuuuaccaaucuacauguucagcggucaguaaaggcuauuugggggcuuuaagaacuggaugguacaccagcguuauuacaaucgaacuguccaacauuaaggagaucaaaugcaaugguaccgacgccaaggugaaacuaauaaagcaggaacucgauaaguauaaaaacgcaguaacugaccugcagcuucugaugcagucuacuccugccgcuggcucggggucagcaaucgccagcggaauugcuguguguaaggucuugcaccucgagggcgaggugaauaaaaucaagaacgcccugcugaguaccaauaaagcgguugugucccucucugguugcggggucagcguguuaacguucaagguacuggaucuuaagaacuacauugacaaacaauugcugccaauccuaaauaagcaguccuguucaauaccgaacauugaaacuguuaucgaguuucagcagaaaaauaacaggcuccuggaaauuacccgggaguucagugugaaugcaggagucacaacucccgugagcaccuauaugcuuacaaacucugagcuguugucccucaucaaugauaugccuaucaccaacgaccaaaagaaacugaugucaaacaaugugcagauuguccgccagcagagcuacaguauaaugugcaucauuaaggaagagguuuuagccuaugugguacaacugccacucuacggcgugaucgauacgcccuguuggaaacuucauacuucuccucugugcacaaccaacacuaaggaaggcuccaauauauguuugacacgaaccgaccgugggugguacugcgauaacgcuggaagcgucucguuuuucccacaggccgagacguguaaggugcagucuaauagaguuuucugcgacaccaugaacucccuaacacugcccucagaagugaaucucugcaacauugauaucuucaauccuaaauaugacuguaagaucaugacaaguaaaaccgaugucagcuccucugugauuacaagccugggugcaaucguaucaugcuacggcaagacuaaauguaccgcuaguaacaagugcagggggauuauaaagacauuuuccaauggaugugacuauguuagcaacaaaggcguggacaccgucucuguggguaauacucuuuacuaugucaacaagcaagaggggcagucacuguacgugaaaggagagccaaucauuaauuucuaugauccguugguuuuucccagugacgaauuugaugccagcaucucccaggugaacgagaagaucaaccagucucucgcguuuauucggaaaucggacgaacuguuacacaauguaaacgucggcaagagcacgacaaauauaaugaucaccacuauuaucauugugaucauaguuauccugcuacuccugauugccgugggccuuuucuuguacugcaaggcacgcugaggacuaguaauaaggaaacuguaugaaugucugugggcaggaagugaagagauccuucuguaaagguuuuuggaauuaugucugcugaauaauaaacuuuuuugaaauaauaaaucugguagaaaaaugagaucuaaaaaaaaaaaaaaaaaaaaaaaaaaaaaaaaaaaaaaaaaaaaaaaaaaaaaaaaaaaaaaaaugcaucccccccccccccccccccccccccccccccaaaggcucuuuucagagccaccagaauu

SEQ ID NO: 19552 - RNA, 1888 nt, Artificial Sequence
  mRNA product Design b-4 comprising derived and/or modified sequence from HRSV(Memphis-37)__AIY60640.1__F-del_DSCav1_mut8 (opt4)
gggagagucccgcagucggcguccagcggcucugcuuguucgugugugugucguugcaggccuuauucaagcuuaccauggagcugcccauccugaagaccaacgccaucaccaccauccuggccgccgugacccugugcuucgccagcagccagaacaucaccgaggaguucuaccagagcaccugcagcgccgugagcaagggcuaccugggcgcccugagaaccggcugguacaccagcgugaucaccaucgagcugagcaacaucaaggagaucaagugcaacggcaccgacgccaaggugaagcugaucaagcaggagcuggacaaguacaagaacgccgugaccgaccugcagcugcugaugcagagcacccccgccgccggcagcggcagcgccaucgccagcggcaucgccgugugcaaggugcugcaccuggagggcgaggugaacaagaucaagaacgcccugcugagcaccaacaaggccguggugagccugagcggcugcggcgugagcgugcugaccuucaaggugcuggaccugaagaacuacaucgacaagcagcugcugcccauccugaacaagcagagcugcagcauccccaacaucgagaccgugaucgaguuccagcagaagaacaacagacugcuggagaucaccagagaguucagcgugaacgccggcgugaccacccccgugagcaccuacaugcugaccaacagcgagcugcugagccugaucaacgacaugcccaucaccaacgaccagaagaagcugaugagcaacaacgugcagaucgugagacagcagagcuacagcaucaugugcaucaucaaggaggaggugcuggccuacguggugcagcugccccuguacggcgugaucgacacccccugcuggaagcugcacaccagcccccugugcaccaccaacaccaaggagggcagcaacaucugccugaccagaaccgacagaggcugguacugcgacaacgccggcagcgugagcuucuucccccaggccgagaccugcaaggugcagagcaacagaguguucugcgacaccaugaacagccugacccugcccagcgaggugaaccugugcaacaucgacaucuucaaccccaaguacgacugcaagaucaugaccagcaagaccgacgugagcagcagcgugaucaccagccugggcgccaucgugagcugcuacggcaagaccaagugcaccgccagcaacaagugcagaggcaucaucaagaccuucagcaacggcugcgacuacgugagcaacaagggcguggacaccgugagcgugggcaacacccuguacuacgugaacaagcaggagggccagagccuguacgugaagggcgagcccaucaucaacuucuacgacccccugguguuccccagcgacgaguucgacgccagcaucagccaggugaacgagaagaucaaccagagccuggccuucaucagaaagagcgacgagcugcugcacaacgugaacgugggcaagagcaccaccaacaucaugaucaccaccaucaucaucgugaucaucgugauccugcugcugcugaucgccgugggccuguuccuguacugcaaggccagaugaggacuaguaauaaggaaacuguaugaaugucugugggcaggaagugaagagauccuucuguaaagguuuuuggaauuaugucugcugaauaauaaacuuuuuugaaauaauaaaucugguagaaaaaugagaucuaaaaaaaaaaaaaaaaaaaaaaaaaaaaaaaaaaaaaaaaaaaaaaaaaaaaaaaaaaaaaaaaugcaucccccccccccccccccccccccccccccccaaaggcucuuuucagagccaccagaauu

SEQ ID NO: 19553 - RNA, 1888 nt, Artificial Sequence
  mRNA product Design b-4 comprising derived and/or modified sequence from HRSV(Memphis-37)__AIY60640.1__F-del_DSCav1_mut8 (opt5)
gggagagucccgcagucggcguccagcggcucugcuuguucgugugugugucguugcaggccuuauucaagcuuaccauggagcugcccauccucaagaccaacgccauuacaacgauccuggcugccgugacccuuugcuucgcgagcucccagaauauuacagaagaguuuuaccaaucuaccuguagcgcugucuccaaaggcuaucugggggcccucagaacaggaugguacaccucuguuaucacaauugaacugagcaacaucaaggagaucaaaugcaauggcaccgacgccaaggugaaacuuauuaagcaggaacuggauaaguauaaaaacgcugugacggaccuccagcugcugaugcaguccaccccugccgcugggucuggaagcgccaucgcguccggcauugccgucuguaaggugcuccaccuggagggggagguuaauaaaaucaagaacgcccuucugagcacaaauaaagcuguggucucucucuccggaugcggcgugagcguucugaccuucaaggugcuugaucugaagaacuacauugacaaacaacuccugccgauccugaauaagcagucuuguuccauucccaacaucgaaacagucaucgaguuucagcagaaaaauaaccggcuccuggaaauuacccgcgaguucagcgugaaugcuggcgugacgacaccugucucuaccuauaugcuuacaaacuccgagcugcucagccugaucaaugauaugcccauuaccaacgaccaaaagaaacuuauguccaacaauguucagaucgugagacagcagucuuacagcauuaugugcaucaucaaggaagaggugcuggccuaugucgugcaacucccucuguacgggguuauugauacccccuguuggaaacugcauacauccccucucugcacgaccaacacaaaggaaggaagcaauaucugucugacccggacagaccgcggcugguacugcgauaacgcggggucuguguccuuuuucccgcaggccgagaccuguaagguccagagcaauagaguguuuugcgacacgaugaacucucuuacacugcccagcgaaguuaaucucugcaacauugauaucuucaauccuaaauaugacuguaagauuaugaccuccaaaaccgaugugucuagcuccgucaucacaagccugggagcuaucgugucuugcuacggcaagaccaaauguacagccuccaacaagugccgggggauuaucaagacguuuagcaauggaugugacuaugucucuaacaaaggcguggacaccguuuccgugggcaauacacuuuacuaugucaacaagcaagaggggcagagccuguacgugaaaggagagcccauuaucaauuucuaugauccucucguuuuucccuccgacgaguucgaugcuucuauuagccaggugaacgaaaagaucaaccagucccuggccuuuauucgcaaaucugacgaacugcuccacaaugucaacgugggcaagagcaccacaaauaucaugaucaccacgauuaucauugugaucauuguuauccugcuucugcucaucgccgucgggcuguuccuguacugcaaggcuagaugaggacuaguaauaaggaaacuguaugaaugucugugggcaggaagugaagagauccuucuguaaagguuuuuggaauuaugucugcugaauaauaaacuuuuuugaaauaauaaaucugguagaaaaaugagaucuaaaaaaaaaaaaaaaaaaaaaaaaaaaaaaaaaaaaaaaaaaaaaaaaaaaaaaaaaaaaaaaaugcaucccccccccccccccccccccccccccccccaaaggcucuuuucagagccaccagaauu

SEQ ID NO: 19554 - RNA, 1888 nt, Artificial Sequence
  mRNA product Design b-4 comprising derived and/or modified sequence from HRSV(Memphis-37)__AIY60640.1__F-del_DSCav1_mut8 (opt6)
gggagagucccgcagucggcguccagcggcucugcuuguucgugugugugucguugcaggccuuauucaagcuuaccauggaacuacccauacuaaaaacaaacgcaauuacaacaauacuugccgcaguaaccuuaugcuuugccucaucccaaaacauaacagaagaauuuuaucaaucaacaugcuccgcaguaucaaaaggauaccuaggcgcucuaagaacaggaugguacacauccguaaucacaauagaacuauccaauauaaaagaaauaaaauguaauggaacagaugcaaaaguuaaauuaauaaaacaagaacuagacaaauacaaaaacgcaguuaccgaucuccaacuauuaaugcaaucaacaccagcugcaggaaguggaagcgccauagcaagcggaauagcagucugcaaaguauuacaucuugaaggcgaaguaaacaaaaucaaaaaugcccuccucucaacaaacaaagcuguaguaucccuaucaggaugcgguguaucuguucuuacauuuaaaguacucgaucuaaaaaacuacaucgauaaacaguuacuuccaauacucaacaaacaaucauguagcauaccaaacauagaaacaguaauagaauuucaacaaaaaaacaaucgacuacucgaaauaacuagagaauuuucuguaaacgcuggaguaaccacaccagugucuaccuauaugcuuacaaauagcgaacuccuaucacuaaucaaugacaugccaauaacaaaugaccagaaaaaacucaugucaaauaacguacaaauaguacgacaacaaagcuacuccauaaugugcauaaucaaagaagaaguauuagccuacguuguucaacuaccauuauauggaguuauagacacuccaugcuggaaauuacauacaagcccacucuguacaacaaacacaaaagaaggcucaaacauaugcuuaacaagaacagauagaggaugguacugcgauaacgcaggcucagucucauuuuuuccacaagccgaaaccugcaaaguacaaucaaauagaguuuuuugcgacacaaugaacucacucacucuaccaagugaaguaaaucucuguaauaucgacauauucaacccaaaauaugacugcaaaauaaugacaucuaaaaccgauguauccucaagcguaaucacaucauuaggagcuauaguuuccugcuacgguaaaacaaaaugcacagcauccaacaaaugucgcgguaucaucaaaacauucuccaacggaugugauuacguaucaaacaaaggugucgacaccguaagcguaggcaacacuuuauacuauguaaacaaacaagaaggacaaagucuauauguaaaaggagaaccaauaauaaacuucuaugacccccuaguauucccuuccgacgaauuugaugcaagcauuucacaaguuaacgaaaaaaucaaucaaucccuugcuuucauaagaaaaucagacgaauuacuacacaacguaaacguaggaaaaagcacaacaaauaucaugauuacaacaauaauaauuguaauaauaguaauacuccucuuacuuauagcagucggcuuauuccuuuacugcaaagcaagauaaggacuaguaauaaggaaacuguaugaaugucugugggcaggaagugaagagauccuucuguaaagguuuuuggaauuaugucugcugaauaauaaacuuuuuugaaauaauaaaucugguagaaaaaugagaucuaaaaaaaaaaaaaaaaaaaaaaaaaaaaaaaaaaaaaaaaaaaaaaaaaaaaaaaaaaaaaaaaugcaucccccccccccccccccccccccccccccccaaaggcucuuuucagagccaccagaauu

SEQ ID NO: 19555 - RNA, 1888 nt, Artificial Sequence
  mRNA product Design b-4 comprising derived and/or modified sequence from HRSV(Memphis-37)__AIY60640.1__F-del_DSCav1_mut8 (opt11)
gggagagucccgcagucggcguccagcggcucugcuuguucgugugugugucguugcaggccuuauucaagcuuaccauggaacuccccauccuaaaaaccaacgcaaucaccaccauccucgccgccguaacacucugcuuugcaagcucccaaaacaucaccgaagaauuuuaccaaucuaccugcagcgccguaucuaaaggauaccuaggagcccucagaaccgguugguacaccucugucaucacaauagaacucuccaacaucaaagaaaucaaaugcaacggcaccgacgccaaagucaaacucaucaaacaagaacucgacaaauauaaaaacgccguaaccgaccuccaacuccucaugcaauccacccccgccgccggcaguggcuccgcuaucgccuccggaaucgccguuugcaaaguccugcaccuagaaggcgaagucaacaaaaucaaaaacgcccugcucucaaccaacaaagcugucguaagccucuccggcugcggagucuccguccuuaccuucaaaguacucgaccuuaaaaacuacaucgacaaacaacuucuccccauacucaauaaacaauccugcuccauacccaacaucgaaacagucaucgaguuccaacagaaaaauaaccgccuccucgaaauaacccgcgaguucuccgucaacgcaggcgucaccaccccagucuccaccuacaugcugacaaacuccgaacuccuaucccucaucaacgacaugcccaucaccaacgaccaaaagaaacucaugagcaauaacguccaaaucguacgacaacaauccuacagcaucauguguaucaucaaagaagaaguacucgccuacgucguccaacucccacuauacggcgucaucgacacaccaugcuggaaacuucacaccuccccacucugcaccacaaacacaaaagaaggcuccaacaucugccuuacccgaaccgaccgcgggugguacugcgacaacgccggaucagucucguucuuuccccaagccgaaaccugcaaaguacaaucaaaucgcgucuucugcgacaccaugaacuccuuaacacuaccauccgaaguaaaccucugcaacauagacaucuucaacccaaaauacgacugcaaaaucaugaccuccaaaaccgacguauccuccuccguaaucaccagccucggcgcaauagucucaugcuacggcaaaaccaaaugcaccgccuccaacaaaugccgcggcaucauaaaaacuuucucuaacggaugcgacuacgucagcaacaaaggcgucgacaccguauccguagguaauacacuuuacuacgucaauaaacaagaaggccaaucccucuacgucaaaggagaacccaucauaaacuucuacgacccccucgucuuccccuccgacgaguucgacgccuccaucagccaggucaacgaaaagaucaaccaaucacucgccuucauccgcaaaagcgacgaacuccuccacaacguaaacgucggcaaauccacaaccaacauaaugaucaccacuaucaucaucgugauaaucgucauuuuacuucuccucaucgccguaggccucuuccuauacugcaaagcccgcuaaggacuaguaauaaggaaacuguaugaaugucugugggcaggaagugaagagauccuucuguaaagguuuuuggaauuaugucugcugaauaauaaacuuuuuugaaauaauaaaucugguagaaaaaugagaucuaaaaaaaaaaaaaaaaaaaaaaaaaaaaaaaaaaaaaaaaaaaaaaaaaaaaaaaaaaaaaaaaugcaucccccccccccccccccccccccccccccccaaaggcucuuuucagagccaccagaauu

SEQ ID NO: 19556 - RNA, 1950 nt, Artificial Sequence
  mRNA product Design b-5 comprising derived and/or modified sequence from HRSV(Memphis-37)__AIY60640.1__F-del_DSCav1_mut8 (opt1)
gggagacuccugucgggcggaaguaggaggaguagaguuuaaaaacaguacucuuuuuccgguucgggacguaguugaagcaacgacaagccggauaaccgcucuugagacaggaagcuuaccauggagcugcccauccucaagaccaacgccaucaccacgauccuggccgcggugacccugugcuucgccagcucccagaacaucaccgaggaguucuaccagagcacgugcuccgccgucagcaagggcuaccucggcgcccugcgcaccgggugguacaccagcgugaucaccaucgagcuguccaacaucaaggagaucaagugcaacggcaccgacgccaaggugaagcucaucaagcaggagcuggacaaguacaagaacgcggucacggaccugcagcuccugaugcagagcaccccggccgccggcuccgggagcgcgaucgccuccggcaucgccgucugcaaggugcugcaccucgagggcgaggugaacaagaucaagaacgcccugcuguccaccaacaaggccgucgugagccucuccggcugcggggugagcguccugaccuucaaggugcuggaccucaagaacuacaucgacaagcagcugcugcccauccugaacaagcagagcugcuccauccccaacaucgagaccgucaucgaguuccagcagaagaacaaccgccuccuggagaucacgcgggaguucagcgugaacgcgggcgugaccacccccgucuccaccuacaugcugacgaacagcgagcuccugucccugaucaacgacaugccgaucaccaacgaccagaagaagcucaugagcaacaacgugcagaucgugcgccagcaguccuacagcaucaugugcaucaucaaggaggagguccuggccuacguggugcagcugccccucuacggggucaucgacacccccugcuggaagcugcacaccagcccccugugcacgaccaacaccaaggagggcuccaacaucugccucacccggacggaccgcgggugguacugcgacaacgccggcagcguguccuucuucccgcaggccgagaccugcaagguccagagcaaccggguguucugcgacaccaugaacucccugacccugcccagcgaggugaaccucugcaacaucgacaucuucaaccccaaguacgacugcaagaucaugacguccaagaccgacgucagcuccagcgugaucaccucccugggcgccaucgugagcugcuacgggaagaccaagugcacggcgagcaacaagugccgcggcaucaucaagaccuucuccaacgggugcgacuacgucagcaacaagggcguggacaccguguccgucggcaacacccuguacuacgugaacaagcaggagggccagagccucuacgugaagggggagcccaucaucaacuucuacgacccgcuggucuuccccuccgacgaguucgacgccagcaucucccaggugaacgagaagaucaaccagagccuggccuucauccggaaguccgacgagcuccugcacaacgugaacgucggcaagagcaccacgaacaucaugaucaccaccaucaucaucgugaucaucgugauccugcugcuccugaucgccgucgggcuguuccucuacugcaaggcccgcugaggacuaguacuggcugcaucucccuuuccucuguccuccauccuucucccaggauggugaagggggaccugguacccagugauccccaccccaggauccuaaaucaugacuuaccugcuaauaaaaacucauuggaaaagugagaagaucuaaaaaaaaaaaaaaaaaaaaaaaaaaaaaaaaaaaaaaaaaaaaaaaaaaaaaaaaaaaaaaaaugcaucccccccccccccccccccccccccccccccaaaggcucuuuucagagccaccagaauu

SEQ ID NO: 19557 - RNA, 1950 nt, Artificial Sequence
  mRNA product Design b-5 comprising derived and/or modified sequence from HRSV(Memphis-37)__AIY60640.1__F-del_DSCav1_mut8 (opt1)
gggagacuccugucgggcggaaguaggaggaguagaguuuaaaaacaguacucuuuuuccgguucgggacguaguugaagcaacgacaagccggauaaccgcucuugagacaggaagcuuaccauggagcugcccauccucaagaccaacgccaucaccacgauccuggccgcggugacccugugcuucgccagcucccagaacaucaccgaggaguucuaccagagcacgugcuccgccgucagcaagggcuaccucggggcccugcgcaccggcugguacaccuccgugaucaccaucgagcugagcaacaucaaggagaucaagugcaacgggaccgacgccaaggugaagcucaucaagcaggagcuggacaaguacaagaacgcggucacggaccugcagcuccugaugcaguccaccccggccgccggcagcggguccgccaucgcgagcggcaucgccgugugcaaggugcugcaccucgagggcgaggucaacaagaucaagaacgcccugcuguccaccaacaaggccguggugagccucuccgggugcggcgucagcgugcugaccuucaaggugcuggaccucaagaacuacaucgacaagcagcugcugcccauccucaacaagcaguccugcagcauccccaacaucgagacggucaucgaguuccagcagaagaacaaccggcugcuggagaucacccgcgaguucuccgugaacgccggggugaccacccccgucagcacguacaugcucaccaacuccgagcugcugagccucaucaacgacaugccgaucaccaacgaccagaagaagcugaugagcaacaacgugcagaucgugcggcagcaguccuacagcaucaugugcaucaucaaggaggagguccuggcguacguggugcagcucccccuguacggcgucaucgacacccccugcuggaagcugcacacgagcccccucugcaccaccaacaccaaggagggguccaacaucugccugacgcgcaccgaccggggcugguacugcgacaacgccggcuccgugagcuucuucccgcaggccgagaccugcaaggugcaguccaaccgcgucuucugcgacaccaugaacagccugacgcuccccuccgaggugaaccugugcaacaucgacaucuucaaccccaaguacgacugcaagaucaugaccagcaagaccgacgucuccagcuccgugaucaccagccugggggccaucguguccugcuacggcaagacgaagugcaccgccagcaacaagugccgggggaucaucaagaccuucuccaacggcugcgacuacgucagcaacaagggcguggacaccguguccgucgggaacacgcucuacuacgugaacaagcaggagggccagagccuguacgugaagggggagcccaucaucaacuucuacgacccgcuggucuuccccagcgacgaguucgacgcguccaucagccaggugaacgagaagaucaaccagucccucgccuucauccgcaagagcgacgagcugcugcacaacgugaacgucggcaaguccaccaccaacaucaugaucaccaccaucaucaucgugaucaucgugauccuccugcugcucaucgccgucgggcuguuccuguacugcaaggcccggugaggacuaguacuggcugcaucucccuuuccucuguccuccauccuucucccaggauggugaagggggaccugguacccagugauccccaccccaggauccuaaaucaugacuuaccugcuaauaaaaacucauuggaaaagugagaagaucuaaaaaaaaaaaaaaaaaaaaaaaaaaaaaaaaaaaaaaaaaaaaaaaaaaaaaaaaaaaaaaaaugcaucccccccccccccccccccccccccccccccaaaggcucuuuucagagccaccagaauu

SEQ ID NO: 19558 - RNA, 1950 nt, Artificial Sequence
  mRNA product Design b-5 comprising derived and/or modified sequence from HRSV(Memphis-37)__AIY60640.1__F-del_DSCav1_mut8 (opt2)
gggagacuccugucgggcggaaguaggaggaguagaguuuaaaaacaguacucuuuuuccgguucgggacguaguugaagcaacgacaagccggauaaccgcucuugagacaggaagcuuaccauggagcuccccauccucaagaccaacgccaucaccaccauccucgccgccgucacccucugcuucgccuccucccagaacaucaccgaggaguucuaccaguccaccugcuccgccgucuccaagggcuaccucggcgcccuccgcaccggcugguacaccuccgucaucaccaucgagcucuccaacaucaaggagaucaagugcaacggcaccgacgccaaggucaagcucaucaagcaggagcucgacaaguacaagaacgccgucaccgaccuccagcuccucaugcaguccacccccgccgccggcuccggcuccgccaucgccuccggcaucgccgucugcaagguccuccaccucgagggcgaggucaacaagaucaagaacgcccuccucuccaccaacaaggccgucgucucccucuccggcugcggcgucuccguccucaccuucaagguccucgaccucaagaacuacaucgacaagcagcuccuccccauccucaacaagcaguccugcuccauccccaacaucgagaccgucaucgaguuccagcagaagaacaaccgccuccucgagaucacccgcgaguucuccgucaacgccggcgucaccacccccgucuccaccuacaugcucaccaacuccgagcuccucucccucaucaacgacaugcccaucaccaacgaccagaagaagcucauguccaacaacguccagaucguccgccagcaguccuacuccaucaugugcaucaucaaggaggagguccucgccuacgucguccagcucccccucuacggcgucaucgacacccccugcuggaagcuccacaccuccccccucugcaccaccaacaccaaggagggcuccaacaucugccucacccgcaccgaccgcggcugguacugcgacaacgccggcuccgucuccuucuucccccaggccgagaccugcaagguccaguccaaccgcgucuucugcgacaccaugaacucccucacccuccccuccgaggucaaccucugcaacaucgacaucuucaaccccaaguacgacugcaagaucaugaccuccaagaccgacgucuccuccuccgucaucaccucccucggcgccaucgucuccugcuacggcaagaccaagugcaccgccuccaacaagugccgcggcaucaucaagaccuucuccaacggcugcgacuacgucuccaacaagggcgucgacaccgucuccgucggcaacacccucuacuacgucaacaagcaggagggccagucccucuacgucaagggcgagcccaucaucaacuucuacgacccccucgucuuccccuccgacgaguucgacgccuccaucucccaggucaacgagaagaucaaccagucccucgccuucauccgcaaguccgacgagcuccuccacaacgucaacgucggcaaguccaccaccaacaucaugaucaccaccaucaucaucgucaucaucgucauccuccuccuccucaucgccgucggccucuuccucuacugcaaggcccgcugaggacuaguacuggcugcaucucccuuuccucuguccuccauccuucucccaggauggugaagggggaccugguacccagugauccccaccccaggauccuaaaucaugacuuaccugcuaauaaaaacucauuggaaaagugagaagaucuaaaaaaaaaaaaaaaaaaaaaaaaaaaaaaaaaaaaaaaaaaaaaaaaaaaaaaaaaaaaaaaaugcaucccccccccccccccccccccccccccccccaaaggcucuuuucagagccaccagaauu

SEQ ID NO: 19559 - RNA, 1950 nt, Artificial Sequence
  mRNA product Design b-5 comprising derived and/or modified sequence from HRSV(Memphis-37)__AIY60640.1__F-del_DSCav1_mut8 (opt3)
gggagacuccugucgggcggaaguaggaggaguagaguuuaaaaacaguacucuuuuuccgguucgggacguaguugaagcaacgacaagccggauaaccgcucuugagacaggaagcuuaccauggagcugcccauccucaagaccaacgccauuacaacuauacuugcugcagugacgcugugcuucgccagcucccagaauaucaccgaagaguuuuaccaaucuacauguucagcggucaguaaaggcuauuugggggcuuuaagaacuggaugguacaccagcguuauuacaaucgaacuguccaacauuaaggagaucaaaugcaaugguaccgacgccaaggugaaacuaauaaagcaggaacucgauaaguauaaaaacgcaguaacugaccugcagcuucugaugcagucuacuccugccgcuggcucggggucagcaaucgccagcggaauugcuguguguaaggucuugcaccucgagggcgaggugaauaaaaucaagaacgcccugcugaguaccaauaaagcgguugugucccucucugguugcggggucagcguguuaacguucaagguacuggaucuuaagaacuacauugacaaacaauugcugccaauccuaaauaagcaguccuguucaauaccgaacauugaaacuguuaucgaguuucagcagaaaaauaacaggcuccuggaaauuacccgggaguucagugugaaugcaggagucacaacucccgugagcaccuauaugcuuacaaacucugagcuguugucccucaucaaugauaugccuaucaccaacgaccaaaagaaacugaugucaaacaaugugcagauuguccgccagcagagcuacaguauaaugugcaucauuaaggaagagguuuuagccuaugugguacaacugccacucuacggcgugaucgauacgcccuguuggaaacuucauacuucuccucugugcacaaccaacacuaaggaaggcuccaauauauguuugacacgaaccgaccgugggugguacugcgauaacgcuggaagcgucucguuuuucccacaggccgagacguguaaggugcagucuaauagaguuuucugcgacaccaugaacucccuaacacugcccucagaagugaaucucugcaacauugauaucuucaauccuaaauaugacuguaagaucaugacaaguaaaaccgaugucagcuccucugugauuacaagccugggugcaaucguaucaugcuacggcaagacuaaauguaccgcuaguaacaagugcagggggauuauaaagacauuuuccaauggaugugacuauguuagcaacaaaggcguggacaccgucucuguggguaauacucuuuacuaugucaacaagcaagaggggcagucacuguacgugaaaggagagccaaucauuaauuucuaugauccguugguuuuucccagugacgaauuugaugccagcaucucccaggugaacgagaagaucaaccagucucucgcguuuauucggaaaucggacgaacuguuacacaauguaaacgucggcaagagcacgacaaauauaaugaucaccacuauuaucauugugaucauaguuauccugcuacuccugauugccgugggccuuuucuuguacugcaaggcacgcugaggacuaguacuggcugcaucucccuuuccucuguccuccauccuucucccaggauggugaagggggaccugguacccagugauccccaccccaggauccuaaaucaugacuuaccugcuaauaaaaacucauuggaaaagugagaagaucuaaaaaaaaaaaaaaaaaaaaaaaaaaaaaaaaaaaaaaaaaaaaaaaaaaaaaaaaaaaaaaaaugcaucccccccccccccccccccccccccccccccaaaggcucuuuucagagccaccagaauu

SEQ ID NO: 19560 - RNA, 1950 nt, Artificial Sequence
  mRNA product Design b-5 comprising derived and/or modified sequence from HRSV(Memphis-37)__AIY60640.1__F-del_DSCav1_mut8 (opt4)
gggagacuccugucgggcggaaguaggaggaguagaguuuaaaaacaguacucuuuuuccgguucgggacguaguugaagcaacgacaagccggauaaccgcucuugagacaggaagcuuaccauggagcugcccauccugaagaccaacgccaucaccaccauccuggccgccgugacccugugcuucgccagcagccagaacaucaccgaggaguucuaccagagcaccugcagcgccgugagcaagggcuaccugggcgcccugagaaccggcugguacaccagcgugaucaccaucgagcugagcaacaucaaggagaucaagugcaacggcaccgacgccaaggugaagcugaucaagcaggagcuggacaaguacaagaacgccgugaccgaccugcagcugcugaugcagagcacccccgccgccggcagcggcagcgccaucgccagcggcaucgccgugugcaaggugcugcaccuggagggcgaggugaacaagaucaagaacgcccugcugagcaccaacaaggccguggugagccugagcggcugcggcgugagcgugcugaccuucaaggugcuggaccugaagaacuacaucgacaagcagcugcugcccauccugaacaagcagagcugcagcauccccaacaucgagaccgugaucgaguuccagcagaagaacaacagacugcuggagaucaccagagaguucagcgugaacgccggcgugaccacccccgugagcaccuacaugcugaccaacagcgagcugcugagccugaucaacgacaugcccaucaccaacgaccagaagaagcugaugagcaacaacgugcagaucgugagacagcagagcuacagcaucaugugcaucaucaaggaggaggugcuggccuacguggugcagcugccccuguacggcgugaucgacacccccugcuggaagcugcacaccagcccccugugcaccaccaacaccaaggagggcagcaacaucugccugaccagaaccgacagaggcugguacugcgacaacgccggcagcgugagcuucuucccccaggccgagaccugcaaggugcagagcaacagaguguucugcgacaccaugaacagccugacccugcccagcgaggugaaccugugcaacaucgacaucuucaaccccaaguacgacugcaagaucaugaccagcaagaccgacgugagcagcagcgugaucaccagccugggcgccaucgugagcugcuacggcaagaccaagugcaccgccagcaacaagugcagaggcaucaucaagaccuucagcaacggcugcgacuacgugagcaacaagggcguggacaccgugagcgugggcaacacccuguacuacgugaacaagcaggagggccagagccuguacgugaagggcgagcccaucaucaacuucuacgacccccugguguuccccagcgacgaguucgacgccagcaucagccaggugaacgagaagaucaaccagagccuggccuucaucagaaagagcgacgagcugcugcacaacgugaacgugggcaagagcaccaccaacaucaugaucaccaccaucaucaucgugaucaucgugauccugcugcugcugaucgccgugggccuguuccuguacugcaaggccagaugaggacuaguacuggcugcaucucccuuuccucuguccuccauccuucucccaggauggugaagggggaccugguacccagugauccccaccccaggauccuaaaucaugacuuaccugcuaauaaaaacucauuggaaaagugagaagaucuaaaaaaaaaaaaaaaaaaaaaaaaaaaaaaaaaaaaaaaaaaaaaaaaaaaaaaaaaaaaaaaaugcaucccccccccccccccccccccccccccccccaaaggcucuuuucagagccaccagaauu

SEQ ID NO: 19561 - RNA, 1950 nt, Artificial Sequence
  mRNA product Design b-5 comprising derived and/or modified sequence from HRSV(Memphis-37)__AIY60640.1__F-del_DSCav1_mut8 (opt5)
gggagacuccugucgggcggaaguaggaggaguagaguuuaaaaacaguacucuuuuuccgguucgggacguaguugaagcaacgacaagccggauaaccgcucuugagacaggaagcuuaccauggagcugcccauccucaagaccaacgccauuacaacgauccuggcugccgugacccuuugcuucgcgagcucccagaauauuacagaagaguuuuaccaaucuaccuguagcgcugucuccaaaggcuaucugggggcccucagaacaggaugguacaccucuguuaucacaauugaacugagcaacaucaaggagaucaaaugcaauggcaccgacgccaaggugaaacuuauuaagcaggaacuggauaaguauaaaaacgcugugacggaccuccagcugcugaugcaguccaccccugccgcugggucuggaagcgccaucgcguccggcauugccgucuguaaggugcuccaccuggagggggagguuaauaaaaucaagaacgcccuucugagcacaaauaaagcuguggucucucucuccggaugcggcgugagcguucugaccuucaaggugcuugaucugaagaacuacauugacaaacaacuccugccgauccugaauaagcagucuuguuccauucccaacaucgaaacagucaucgaguuucagcagaaaaauaaccggcuccuggaaauuacccgcgaguucagcgugaaugcuggcgugacgacaccugucucuaccuauaugcuuacaaacuccgagcugcucagccugaucaaugauaugcccauuaccaacgaccaaaagaaacuuauguccaacaauguucagaucgugagacagcagucuuacagcauuaugugcaucaucaaggaagaggugcuggccuaugucgugcaacucccucuguacgggguuauugauacccccuguuggaaacugcauacauccccucucugcacgaccaacacaaaggaaggaagcaauaucugucugacccggacagaccgcggcugguacugcgauaacgcggggucuguguccuuuuucccgcaggccgagaccuguaagguccagagcaauagaguguuuugcgacacgaugaacucucuuacacugcccagcgaaguuaaucucugcaacauugauaucuucaauccuaaauaugacuguaagauuaugaccuccaaaaccgaugugucuagcuccgucaucacaagccugggagcuaucgugucuugcuacggcaagaccaaauguacagccuccaacaagugccgggggauuaucaagacguuuagcaauggaugugacuaugucucuaacaaaggcguggacaccguuuccgugggcaauacacuuuacuaugucaacaagcaagaggggcagagccuguacgugaaaggagagcccauuaucaauuucuaugauccucucguuuuucccuccgacgaguucgaugcuucuauuagccaggugaacgaaaagaucaaccagucccuggccuuuauucgcaaaucugacgaacugcuccacaaugucaacgugggcaagagcaccacaaauaucaugaucaccacgauuaucauugugaucauuguuauccugcuucugcucaucgccgucgggcuguuccuguacugcaaggcuagaugaggacuaguacuggcugcaucucccuuuccucuguccuccauccuucucccaggauggugaagggggaccugguacccagugauccccaccccaggauccuaaaucaugacuuaccugcuaauaaaaacucauuggaaaagugagaagaucuaaaaaaaaaaaaaaaaaaaaaaaaaaaaaaaaaaaaaaaaaaaaaaaaaaaaaaaaaaaaaaaaugcaucccccccccccccccccccccccccccccccaaaggcucuuuucagagccaccagaauu

SEQ ID NO: 19562 - RNA, 1950 nt, Artificial Sequence
  mRNA product Design b-5 comprising derived and/or modified sequence from HRSV(Memphis-37)__AIY60640.1__F-del_DSCav1_mut8 (opt6)
gggagacuccugucgggcggaaguaggaggaguagaguuuaaaaacaguacucuuuuuccgguucgggacguaguugaagcaacgacaagccggauaaccgcucuugagacaggaagcuuaccauggaacuacccauacuaaaaacaaacgcaauuacaacaauacuugccgcaguaaccuuaugcuuugccucaucccaaaacauaacagaagaauuuuaucaaucaacaugcuccgcaguaucaaaaggauaccuaggcgcucuaagaacaggaugguacacauccguaaucacaauagaacuauccaauauaaaagaaauaaaauguaauggaacagaugcaaaaguuaaauuaauaaaacaagaacuagacaaauacaaaaacgcaguuaccgaucuccaacuauuaaugcaaucaacaccagcugcaggaaguggaagcgccauagcaagcggaauagcagucugcaaaguauuacaucuugaaggcgaaguaaacaaaaucaaaaaugcccuccucucaacaaacaaagcuguaguaucccuaucaggaugcgguguaucuguucuuacauuuaaaguacucgaucuaaaaaacuacaucgauaaacaguuacuuccaauacucaacaaacaaucauguagcauaccaaacauagaaacaguaauagaauuucaacaaaaaaacaaucgacuacucgaaauaacuagagaauuuucuguaaacgcuggaguaaccacaccagugucuaccuauaugcuuacaaauagcgaacuccuaucacuaaucaaugacaugccaauaacaaaugaccagaaaaaacucaugucaaauaacguacaaauaguacgacaacaaagcuacuccauaaugugcauaaucaaagaagaaguauuagccuacguuguucaacuaccauuauauggaguuauagacacuccaugcuggaaauuacauacaagcccacucuguacaacaaacacaaaagaaggcucaaacauaugcuuaacaagaacagauagaggaugguacugcgauaacgcaggcucagucucauuuuuuccacaagccgaaaccugcaaaguacaaucaaauagaguuuuuugcgacacaaugaacucacucacucuaccaagugaaguaaaucucuguaauaucgacauauucaacccaaaauaugacugcaaaauaaugacaucuaaaaccgauguauccucaagcguaaucacaucauuaggagcuauaguuuccugcuacgguaaaacaaaaugcacagcauccaacaaaugucgcgguaucaucaaaacauucuccaacggaugugauuacguaucaaacaaaggugucgacaccguaagcguaggcaacacuuuauacuauguaaacaaacaagaaggacaaagucuauauguaaaaggagaaccaauaauaaacuucuaugacccccuaguauucccuuccgacgaauuugaugcaagcauuucacaaguuaacgaaaaaaucaaucaaucccuugcuuucauaagaaaaucagacgaauuacuacacaacguaaacguaggaaaaagcacaacaaauaucaugauuacaacaauaauaauuguaauaauaguaauacuccucuuacuuauagcagucggcuuauuccuuuacugcaaagcaagauaaggacuaguacuggcugcaucucccuuuccucuguccuccauccuucucccaggauggugaagggggaccugguacccagugauccccaccccaggauccuaaaucaugacuuaccugcuaauaaaaacucauuggaaaagugagaagaucuaaaaaaaaaaaaaaaaaaaaaaaaaaaaaaaaaaaaaaaaaaaaaaaaaaaaaaaaaaaaaaaaugcaucccccccccccccccccccccccccccccccaaaggcucuuuucagagccaccagaauu

SEQ ID NO: 19563 - RNA, 1950 nt, Artificial Sequence
  mRNA product Design b-5 comprising derived and/or modified sequence from HRSV(Memphis-37)__AIY60640.1__F-del_DSCav1_mut8 (opt11)
gggagacuccugucgggcggaaguaggaggaguagaguuuaaaaacaguacucuuuuuccgguucgggacguaguugaagcaacgacaagccggauaaccgcucuugagacaggaagcuuaccauggaacuccccauccuaaaaaccaacgcaaucaccaccauccucgccgccguaacacucugcuuugcaagcucccaaaacaucaccgaagaauuuuaccaaucuaccugcagcgccguaucuaaaggauaccuaggagcccucagaaccgguugguacaccucugucaucacaauagaacucuccaacaucaaagaaaucaaaugcaacggcaccgacgccaaagucaaacucaucaaacaagaacucgacaaauauaaaaacgccguaaccgaccuccaacuccucaugcaauccacccccgccgccggcaguggcuccgcuaucgccuccggaaucgccguuugcaaaguccugcaccuagaaggcgaagucaacaaaaucaaaaacgcccugcucucaaccaacaaagcugucguaagccucuccggcugcggagucuccguccuuaccuucaaaguacucgaccuuaaaaacuacaucgacaaacaacuucuccccauacucaauaaacaauccugcuccauacccaacaucgaaacagucaucgaguuccaacagaaaaauaaccgccuccucgaaauaacccgcgaguucuccgucaacgcaggcgucaccaccccagucuccaccuacaugcugacaaacuccgaacuccuaucccucaucaacgacaugcccaucaccaacgaccaaaagaaacucaugagcaauaacguccaaaucguacgacaacaauccuacagcaucauguguaucaucaaagaagaaguacucgccuacgucguccaacucccacuauacggcgucaucgacacaccaugcuggaaacuucacaccuccccacucugcaccacaaacacaaaagaaggcuccaacaucugccuuacccgaaccgaccgcgggugguacugcgacaacgccggaucagucucguucuuuccccaagccgaaaccugcaaaguacaaucaaaucgcgucuucugcgacaccaugaacuccuuaacacuaccauccgaaguaaaccucugcaacauagacaucuucaacccaaaauacgacugcaaaaucaugaccuccaaaaccgacguauccuccuccguaaucaccagccucggcgcaauagucucaugcuacggcaaaaccaaaugcaccgccuccaacaaaugccgcggcaucauaaaaacuuucucuaacggaugcgacuacgucagcaacaaaggcgucgacaccguauccguagguaauacacuuuacuacgucaauaaacaagaaggccaaucccucuacgucaaaggagaacccaucauaaacuucuacgacccccucgucuuccccuccgacgaguucgacgccuccaucagccaggucaacgaaaagaucaaccaaucacucgccuucauccgcaaaagcgacgaacuccuccacaacguaaacgucggcaaauccacaaccaacauaaugaucaccacuaucaucaucgugauaaucgucauuuuacuucuccucaucgccguaggccucuuccuauacugcaaagcccgcuaaggacuaguacuggcugcaucucccuuuccucuguccuccauccuucucccaggauggugaagggggaccugguacccagugauccccaccccaggauccuaaaucaugacuuaccugcuaauaaaaacucauuggaaaagugagaagaucuaaaaaaaaaaaaaaaaaaaaaaaaaaaaaaaaaaaaaaaaaaaaaaaaaaaaaaaaaaaaaaaaugcaucccccccccccccccccccccccccccccccaaaggcucuuuucagagccaccagaauu

SEQ ID NO: 19564 - RNA, 1856 nt, Artificial Sequence
  mRNA product Design c-1 comprising derived and/or modified sequence from HRSV(Memphis-37)__AIY60640.1__F-del_DSCav1_mut8 (opt1)
gggagaguccgcucagccagguugcagaagcggcuuagcguguguccuaaucuucucucugcguguagguaggccugugccgcaaacaagcuuaccauggagcugcccauccucaagaccaacgccaucaccacgauccuggccgcggugacccugugcuucgccagcucccagaacaucaccgaggaguucuaccagagcacgugcuccgccgucagcaagggcuaccucggcgcccugcgcaccgggugguacaccagcgugaucaccaucgagcuguccaacaucaaggagaucaagugcaacggcaccgacgccaaggugaagcucaucaagcaggagcuggacaaguacaagaacgcggucacggaccugcagcuccugaugcagagcaccccggccgccggcuccgggagcgcgaucgccuccggcaucgccgucugcaaggugcugcaccucgagggcgaggugaacaagaucaagaacgcccugcuguccaccaacaaggccgucgugagccucuccggcugcggggugagcguccugaccuucaaggugcuggaccucaagaacuacaucgacaagcagcugcugcccauccugaacaagcagagcugcuccauccccaacaucgagaccgucaucgaguuccagcagaagaacaaccgccuccuggagaucacgcgggaguucagcgugaacgcgggcgugaccacccccgucuccaccuacaugcugacgaacagcgagcuccugucccugaucaacgacaugccgaucaccaacgaccagaagaagcucaugagcaacaacgugcagaucgugcgccagcaguccuacagcaucaugugcaucaucaaggaggagguccuggccuacguggugcagcugccccucuacggggucaucgacacccccugcuggaagcugcacaccagcccccugugcacgaccaacaccaaggagggcuccaacaucugccucacccggacggaccgcgggugguacugcgacaacgccggcagcguguccuucuucccgcaggccgagaccugcaagguccagagcaaccggguguucugcgacaccaugaacucccugacccugcccagcgaggugaaccucugcaacaucgacaucuucaaccccaaguacgacugcaagaucaugacguccaagaccgacgucagcuccagcgugaucaccucccugggcgccaucgugagcugcuacgggaagaccaagugcacggcgagcaacaagugccgcggcaucaucaagaccuucuccaacgggugcgacuacgucagcaacaagggcguggacaccguguccgucggcaacacccuguacuacgugaacaagcaggagggccagagccucuacgugaagggggagcccaucaucaacuucuacgacccgcuggucuuccccuccgacgaguucgacgccagcaucucccaggugaacgagaagaucaaccagagccuggccuucauccggaaguccgacgagcuccugcacaacgugaacgucggcaagagcaccacgaacaucaugaucaccaccaucaucaucgugaucaucgugauccugcugcuccugaucgccgucgggcuguuccucuacugcaaggcccgcugaggacuaguguccaccugucccuccugggcugcuggauugucucguuuuccugccaaauaaacaggaucagcgcuuuacagaucuaaaaaaaaaaaaaaaaaaaaaaaaaaaaaaaaaaaaaaaaaaaaaaaaaaaaaaaaaaaaaaaaugcaucccccccccccccccccccccccccccccccaaaggcucuuuucagagccaccagaauu

SEQ ID NO: 19565 - RNA, 1856 nt, Artificial Sequence
  mRNA product Design c-1 comprising derived and/or modified sequence from HRSV(Memphis-37)__AIY60640.1__F-del_DSCav1_mut8 (opt1)
gggagaguccgcucagccagguugcagaagcggcuuagcguguguccuaaucuucucucugcguguagguaggccugugccgcaaacaagcuuaccauggagcugcccauccucaagaccaacgccaucaccacgauccuggccgcggugacccugugcuucgccagcucccagaacaucaccgaggaguucuaccagagcacgugcuccgccgucagcaagggcuaccucggggcccugcgcaccggcugguacaccuccgugaucaccaucgagcugagcaacaucaaggagaucaagugcaacgggaccgacgccaaggugaagcucaucaagcaggagcuggacaaguacaagaacgcggucacggaccugcagcuccugaugcaguccaccccggccgccggcagcggguccgccaucgcgagcggcaucgccgugugcaaggugcugcaccucgagggcgaggucaacaagaucaagaacgcccugcuguccaccaacaaggccguggugagccucuccgggugcggcgucagcgugcugaccuucaaggugcuggaccucaagaacuacaucgacaagcagcugcugcccauccucaacaagcaguccugcagcauccccaacaucgagacggucaucgaguuccagcagaagaacaaccggcugcuggagaucacccgcgaguucuccgugaacgccggggugaccacccccgucagcacguacaugcucaccaacuccgagcugcugagccucaucaacgacaugccgaucaccaacgaccagaagaagcugaugagcaacaacgugcagaucgugcggcagcaguccuacagcaucaugugcaucaucaaggaggagguccuggcguacguggugcagcucccccuguacggcgucaucgacacccccugcuggaagcugcacacgagcccccucugcaccaccaacaccaaggagggguccaacaucugccugacgcgcaccgaccggggcugguacugcgacaacgccggcuccgugagcuucuucccgcaggccgagaccugcaaggugcaguccaaccgcgucuucugcgacaccaugaacagccugacgcuccccuccgaggugaaccugugcaacaucgacaucuucaaccccaaguacgacugcaagaucaugaccagcaagaccgacgucuccagcuccgugaucaccagccugggggccaucguguccugcuacggcaagacgaagugcaccgccagcaacaagugccgggggaucaucaagaccuucuccaacggcugcgacuacgucagcaacaagggcguggacaccguguccgucgggaacacgcucuacuacgugaacaagcaggagggccagagccuguacgugaagggggagcccaucaucaacuucuacgacccgcuggucuuccccagcgacgaguucgacgcguccaucagccaggugaacgagaagaucaaccagucccucgccuucauccgcaagagcgacgagcugcugcacaacgugaacgucggcaaguccaccaccaacaucaugaucaccaccaucaucaucgugaucaucgugauccuccugcugcucaucgccgucgggcuguuccuguacugcaaggcccggugaggacuaguguccaccugucccuccugggcugcuggauugucucguuuuccugccaaauaaacaggaucagcgcuuuacagaucuaaaaaaaaaaaaaaaaaaaaaaaaaaaaaaaaaaaaaaaaaaaaaaaaaaaaaaaaaaaaaaaaugcaucccccccccccccccccccccccccccccccaaaggcucuuuucagagccaccagaauu

SEQ ID NO: 19566 - RNA, 1856 nt, Artificial Sequence
  mRNA product Design c-1 comprising derived and/or modified sequence from HRSV(Memphis-37)__AIY60640.1__F-del_DSCav1_mut8 (opt2)
gggagaguccgcucagccagguugcagaagcggcuuagcguguguccuaaucuucucucugcguguagguaggccugugccgcaaacaagcuuaccauggagcuccccauccucaagaccaacgccaucaccaccauccucgccgccgucacccucugcuucgccuccucccagaacaucaccgaggaguucuaccaguccaccugcuccgccgucuccaagggcuaccucggcgcccuccgcaccggcugguacaccuccgucaucaccaucgagcucuccaacaucaaggagaucaagugcaacggcaccgacgccaaggucaagcucaucaagcaggagcucgacaaguacaagaacgccgucaccgaccuccagcuccucaugcaguccacccccgccgccggcuccggcuccgccaucgccuccggcaucgccgucugcaagguccuccaccucgagggcgaggucaacaagaucaagaacgcccuccucuccaccaacaaggccgucgucucccucuccggcugcggcgucuccguccucaccuucaagguccucgaccucaagaacuacaucgacaagcagcuccuccccauccucaacaagcaguccugcuccauccccaacaucgagaccgucaucgaguuccagcagaagaacaaccgccuccucgagaucacccgcgaguucuccgucaacgccggcgucaccacccccgucuccaccuacaugcucaccaacuccgagcuccucucccucaucaacgacaugcccaucaccaacgaccagaagaagcucauguccaacaacguccagaucguccgccagcaguccuacuccaucaugugcaucaucaaggaggagguccucgccuacgucguccagcucccccucuacggcgucaucgacacccccugcuggaagcuccacaccuccccccucugcaccaccaacaccaaggagggcuccaacaucugccucacccgcaccgaccgcggcugguacugcgacaacgccggcuccgucuccuucuucccccaggccgagaccugcaagguccaguccaaccgcgucuucugcgacaccaugaacucccucacccuccccuccgaggucaaccucugcaacaucgacaucuucaaccccaaguacgacugcaagaucaugaccuccaagaccgacgucuccuccuccgucaucaccucccucggcgccaucgucuccugcuacggcaagaccaagugcaccgccuccaacaagugccgcggcaucaucaagaccuucuccaacggcugcgacuacgucuccaacaagggcgucgacaccgucuccgucggcaacacccucuacuacgucaacaagcaggagggccagucccucuacgucaagggcgagcccaucaucaacuucuacgacccccucgucuuccccuccgacgaguucgacgccuccaucucccaggucaacgagaagaucaaccagucccucgccuucauccgcaaguccgacgagcuccuccacaacgucaacgucggcaaguccaccaccaacaucaugaucaccaccaucaucaucgucaucaucgucauccuccuccuccucaucgccgucggccucuuccucuacugcaaggcccgcugaggacuaguguccaccugucccuccugggcugcuggauugucucguuuuccugccaaauaaacaggaucagcgcuuuacagaucuaaaaaaaaaaaaaaaaaaaaaaaaaaaaaaaaaaaaaaaaaaaaaaaaaaaaaaaaaaaaaaaaugcaucccccccccccccccccccccccccccccccaaaggcucuuuucagagccaccagaauu

SEQ ID NO: 19567 - RNA, 1856 nt, Artificial Sequence
  mRNA product Design c-1 comprising derived and/or modified sequence from HRSV(Memphis-37)__AIY60640.1__F-del_DSCav1_mut8 (opt3)
gggagaguccgcucagccagguugcagaagcggcuuagcguguguccuaaucuucucucugcguguagguaggccugugccgcaaacaagcuuaccauggagcugcccauccucaagaccaacgccauuacaacuauacuugcugcagugacgcugugcuucgccagcucccagaauaucaccgaagaguuuuaccaaucuacauguucagcggucaguaaaggcuauuugggggcuuuaagaacuggaugguacaccagcguuauuacaaucgaacuguccaacauuaaggagaucaaaugcaaugguaccgacgccaaggugaaacuaauaaagcaggaacucgauaaguauaaaaacgcaguaacugaccugcagcuucugaugcagucuacuccugccgcuggcucggggucagcaaucgccagcggaauugcuguguguaaggucuugcaccucgagggcgaggugaauaaaaucaagaacgcccugcugaguaccaauaaagcgguugugucccucucugguugcggggucagcguguuaacguucaagguacuggaucuuaagaacuacauugacaaacaauugcugccaauccuaaauaagcaguccuguucaauaccgaacauugaaacuguuaucgaguuucagcagaaaaauaacaggcuccuggaaauuacccgggaguucagugugaaugcaggagucacaacucccgugagcaccuauaugcuuacaaacucugagcuguugucccucaucaaugauaugccuaucaccaacgaccaaaagaaacugaugucaaacaaugugcagauuguccgccagcagagcuacaguauaaugugcaucauuaaggaagagguuuuagccuaugugguacaacugccacucuacggcgugaucgauacgcccuguuggaaacuucauacuucuccucugugcacaaccaacacuaaggaaggcuccaauauauguuugacacgaaccgaccgugggugguacugcgauaacgcuggaagcgucucguuuuucccacaggccgagacguguaaggugcagucuaauagaguuuucugcgacaccaugaacucccuaacacugcccucagaagugaaucucugcaacauugauaucuucaauccuaaauaugacuguaagaucaugacaaguaaaaccgaugucagcuccucugugauuacaagccugggugcaaucguaucaugcuacggcaagacuaaauguaccgcuaguaacaagugcagggggauuauaaagacauuuuccaauggaugugacuauguuagcaacaaaggcguggacaccgucucuguggguaauacucuuuacuaugucaacaagcaagaggggcagucacuguacgugaaaggagagccaaucauuaauuucuaugauccguugguuuuucccagugacgaauuugaugccagcaucucccaggugaacgagaagaucaaccagucucucgcguuuauucggaaaucggacgaacuguuacacaauguaaacgucggcaagagcacgacaaauauaaugaucaccacuauuaucauugugaucauaguuauccugcuacuccugauugccgugggccuuuucuuguacugcaaggcacgcugaggacuaguguccaccugucccuccugggcugcuggauugucucguuuuccugccaaauaaacaggaucagcgcuuuacagaucuaaaaaaaaaaaaaaaaaaaaaaaaaaaaaaaaaaaaaaaaaaaaaaaaaaaaaaaaaaaaaaaaugcaucccccccccccccccccccccccccccccccaaaggcucuuuucagagccaccagaauu

SEQ ID NO: 19568 - RNA, 1856 nt, Artificial Sequence
  mRNA product Design c-1 comprising derived and/or modified sequence from HRSV(Memphis-37)__AIY60640.1__F-del_DSCav1_mut8 (opt4)
gggagaguccgcucagccagguugcagaagcggcuuagcguguguccuaaucuucucucugcguguagguaggccugugccgcaaacaagcuuaccauggagcugcccauccugaagaccaacgccaucaccaccauccuggccgccgugacccugugcuucgccagcagccagaacaucaccgaggaguucuaccagagcaccugcagcgccgugagcaagggcuaccugggcgcccugagaaccggcugguacaccagcgugaucaccaucgagcugagcaacaucaaggagaucaagugcaacggcaccgacgccaaggugaagcugaucaagcaggagcuggacaaguacaagaacgccgugaccgaccugcagcugcugaugcagagcacccccgccgccggcagcggcagcgccaucgccagcggcaucgccgugugcaaggugcugcaccuggagggcgaggugaacaagaucaagaacgcccugcugagcaccaacaaggccguggugagccugagcggcugcggcgugagcgugcugaccuucaaggugcuggaccugaagaacuacaucgacaagcagcugcugcccauccugaacaagcagagcugcagcauccccaacaucgagaccgugaucgaguuccagcagaagaacaacagacugcuggagaucaccagagaguucagcgugaacgccggcgugaccacccccgugagcaccuacaugcugaccaacagcgagcugcugagccugaucaacgacaugcccaucaccaacgaccagaagaagcugaugagcaacaacgugcagaucgugagacagcagagcuacagcaucaugugcaucaucaaggaggaggugcuggccuacguggugcagcugccccuguacggcgugaucgacacccccugcuggaagcugcacaccagcccccugugcaccaccaacaccaaggagggcagcaacaucugccugaccagaaccgacagaggcugguacugcgacaacgccggcagcgugagcuucuucccccaggccgagaccugcaaggugcagagcaacagaguguucugcgacaccaugaacagccugacccugcccagcgaggugaaccugugcaacaucgacaucuucaaccccaaguacgacugcaagaucaugaccagcaagaccgacgugagcagcagcgugaucaccagccugggcgccaucgugagcugcuacggcaagaccaagugcaccgccagcaacaagugcagaggcaucaucaagaccuucagcaacggcugcgacuacgugagcaacaagggcguggacaccgugagcgugggcaacacccuguacuacgugaacaagcaggagggccagagccuguacgugaagggcgagcccaucaucaacuucuacgacccccugguguuccccagcgacgaguucgacgccagcaucagccaggugaacgagaagaucaaccagagccuggccuucaucagaaagagcgacgagcugcugcacaacgugaacgugggcaagagcaccaccaacaucaugaucaccaccaucaucaucgugaucaucgugauccugcugcugcugaucgccgugggccuguuccuguacugcaaggccagaugaggacuaguguccaccugucccuccugggcugcuggauugucucguuuuccugccaaauaaacaggaucagcgcuuuacagaucuaaaaaaaaaaaaaaaaaaaaaaaaaaaaaaaaaaaaaaaaaaaaaaaaaaaaaaaaaaaaaaaaugcaucccccccccccccccccccccccccccccccaaaggcucuuuucagagccaccagaauu

SEQ ID NO: 19569 - RNA, 1856 nt, Artificial Sequence
  mRNA product Design c-1 comprising derived and/or modified sequence from HRSV(Memphis-37)__AIY60640.1__F-del_DSCav1_mut8 (opt5)
gggagaguccgcucagccagguugcagaagcggcuuagcguguguccuaaucuucucucugcguguagguaggccugugccgcaaacaagcuuaccauggagcugcccauccucaagaccaacgccauuacaacgauccuggcugccgugacccuuugcuucgcgagcucccagaauauuacagaagaguuuuaccaaucuaccuguagcgcugucuccaaaggcuaucugggggcccucagaacaggaugguacaccucuguuaucacaauugaacugagcaacaucaaggagaucaaaugcaauggcaccgacgccaaggugaaacuuauuaagcaggaacuggauaaguauaaaaacgcugugacggaccuccagcugcugaugcaguccaccccugccgcugggucuggaagcgccaucgcguccggcauugccgucuguaaggugcuccaccuggagggggagguuaauaaaaucaagaacgcccuucugagcacaaauaaagcuguggucucucucuccggaugcggcgugagcguucugaccuucaaggugcuugaucugaagaacuacauugacaaacaacuccugccgauccugaauaagcagucuuguuccauucccaacaucgaaacagucaucgaguuucagcagaaaaauaaccggcuccuggaaauuacccgcgaguucagcgugaaugcuggcgugacgacaccugucucuaccuauaugcuuacaaacuccgagcugcucagccugaucaaugauaugcccauuaccaacgaccaaaagaaacuuauguccaacaauguucagaucgugagacagcagucuuacagcauuaugugcaucaucaaggaagaggugcuggccuaugucgugcaacucccucuguacgggguuauugauacccccuguuggaaacugcauacauccccucucugcacgaccaacacaaaggaaggaagcaauaucugucugacccggacagaccgcggcugguacugcgauaacgcggggucuguguccuuuuucccgcaggccgagaccuguaagguccagagcaauagaguguuuugcgacacgaugaacucucuuacacugcccagcgaaguuaaucucugcaacauugauaucuucaauccuaaauaugacuguaagauuaugaccuccaaaaccgaugugucuagcuccgucaucacaagccugggagcuaucgugucuugcuacggcaagaccaaauguacagccuccaacaagugccgggggauuaucaagacguuuagcaauggaugugacuaugucucuaacaaaggcguggacaccguuuccgugggcaauacacuuuacuaugucaacaagcaagaggggcagagccuguacgugaaaggagagcccauuaucaauuucuaugauccucucguuuuucccuccgacgaguucgaugcuucuauuagccaggugaacgaaaagaucaaccagucccuggccuuuauucgcaaaucugacgaacugcuccacaaugucaacgugggcaagagcaccacaaauaucaugaucaccacgauuaucauugugaucauuguuauccugcuucugcucaucgccgucgggcuguuccuguacugcaaggcuagaugaggacuaguguccaccugucccuccugggcugcuggauugucucguuuuccugccaaauaaacaggaucagcgcuuuacagaucuaaaaaaaaaaaaaaaaaaaaaaaaaaaaaaaaaaaaaaaaaaaaaaaaaaaaaaaaaaaaaaaaugcaucccccccccccccccccccccccccccccccaaaggcucuuuucagagccaccagaauu

SEQ ID NO: 19570 - RNA, 1856 nt, Artificial Sequence
  mRNA product Design c-1 comprising derived and/or modified sequence from HRSV(Memphis-37)__AIY60640.1__F-del_DSCav1_mut8 (opt6)
gggagaguccgcucagccagguugcagaagcggcuuagcguguguccuaaucuucucucugcguguagguaggccugugccgcaaacaagcuuaccauggaacuacccauacuaaaaacaaacgcaauuacaacaauacuugccgcaguaaccuuaugcuuugccucaucccaaaacauaacagaagaauuuuaucaaucaacaugcuccgcaguaucaaaaggauaccuaggcgcucuaagaacaggaugguacacauccguaaucacaauagaacuauccaauauaaaagaaauaaaauguaauggaacagaugcaaaaguuaaauuaauaaaacaagaacuagacaaauacaaaaacgcaguuaccgaucuccaacuauuaaugcaaucaacaccagcugcaggaaguggaagcgccauagcaagcggaauagcagucugcaaaguauuacaucuugaaggcgaaguaaacaaaaucaaaaaugcccuccucucaacaaacaaagcuguaguaucccuaucaggaugcgguguaucuguucuuacauuuaaaguacucgaucuaaaaaacuacaucgauaaacaguuacuuccaauacucaacaaacaaucauguagcauaccaaacauagaaacaguaauagaauuucaacaaaaaaacaaucgacuacucgaaauaacuagagaauuuucuguaaacgcuggaguaaccacaccagugucuaccuauaugcuuacaaauagcgaacuccuaucacuaaucaaugacaugccaauaacaaaugaccagaaaaaacucaugucaaauaacguacaaauaguacgacaacaaagcuacuccauaaugugcauaaucaaagaagaaguauuagccuacguuguucaacuaccauuauauggaguuauagacacuccaugcuggaaauuacauacaagcccacucuguacaacaaacacaaaagaaggcucaaacauaugcuuaacaagaacagauagaggaugguacugcgauaacgcaggcucagucucauuuuuuccacaagccgaaaccugcaaaguacaaucaaauagaguuuuuugcgacacaaugaacucacucacucuaccaagugaaguaaaucucuguaauaucgacauauucaacccaaaauaugacugcaaaauaaugacaucuaaaaccgauguauccucaagcguaaucacaucauuaggagcuauaguuuccugcuacgguaaaacaaaaugcacagcauccaacaaaugucgcgguaucaucaaaacauucuccaacggaugugauuacguaucaaacaaaggugucgacaccguaagcguaggcaacacuuuauacuauguaaacaaacaagaaggacaaagucuauauguaaaaggagaaccaauaauaaacuucuaugacccccuaguauucccuuccgacgaauuugaugcaagcauuucacaaguuaacgaaaaaaucaaucaaucccuugcuuucauaagaaaaucagacgaauuacuacacaacguaaacguaggaaaaagcacaacaaauaucaugauuacaacaauaauaauuguaauaauaguaauacuccucuuacuuauagcagucggcuuauuccuuuacugcaaagcaagauaaggacuaguguccaccugucccuccugggcugcuggauugucucguuuuccugccaaauaaacaggaucagcgcuuuacagaucuaaaaaaaaaaaaaaaaaaaaaaaaaaaaaaaaaaaaaaaaaaaaaaaaaaaaaaaaaaaaaaaaugcaucccccccccccccccccccccccccccccccaaaggcucuuuucagagccaccagaauu

SEQ ID NO: 19571 - RNA, 1856 nt, Artificial Sequence
  mRNA product Design c-1 comprising derived and/or modified sequence from HRSV(Memphis-37)__AIY60640.1__F-del_DSCav1_mut8 (opt11)
gggagaguccgcucagccagguugcagaagcggcuuagcguguguccuaaucuucucucugcguguagguaggccugugccgcaaacaagcuuaccauggaacuccccauccuaaaaaccaacgcaaucaccaccauccucgccgccguaacacucugcuuugcaagcucccaaaacaucaccgaagaauuuuaccaaucuaccugcagcgccguaucuaaaggauaccuaggagcccucagaaccgguugguacaccucugucaucacaauagaacucuccaacaucaaagaaaucaaaugcaacggcaccgacgccaaagucaaacucaucaaacaagaacucgacaaauauaaaaacgccguaaccgaccuccaacuccucaugcaauccacccccgccgccggcaguggcuccgcuaucgccuccggaaucgccguuugcaaaguccugcaccuagaaggcgaagucaacaaaaucaaaaacgcccugcucucaaccaacaaagcugucguaagccucuccggcugcggagucuccguccuuaccuucaaaguacucgaccuuaaaaacuacaucgacaaacaacuucuccccauacucaauaaacaauccugcuccauacccaacaucgaaacagucaucgaguuccaacagaaaaauaaccgccuccucgaaauaacccgcgaguucuccgucaacgcaggcgucaccaccccagucuccaccuacaugcugacaaacuccgaacuccuaucccucaucaacgacaugcccaucaccaacgaccaaaagaaacucaugagcaauaacguccaaaucguacgacaacaauccuacagcaucauguguaucaucaaagaagaaguacucgccuacgucguccaacucccacuauacggcgucaucgacacaccaugcuggaaacuucacaccuccccacucugcaccacaaacacaaaagaaggcuccaacaucugccuuacccgaaccgaccgcgggugguacugcgacaacgccggaucagucucguucuuuccccaagccgaaaccugcaaaguacaaucaaaucgcgucuucugcgacaccaugaacuccuuaacacuaccauccgaaguaaaccucugcaacauagacaucuucaacccaaaauacgacugcaaaaucaugaccuccaaaaccgacguauccuccuccguaaucaccagccucggcgcaauagucucaugcuacggcaaaaccaaaugcaccgccuccaacaaaugccgcggcaucauaaaaacuuucucuaacggaugcgacuacgucagcaacaaaggcgucgacaccguauccguagguaauacacuuuacuacgucaauaaacaagaaggccaaucccucuacgucaaaggagaacccaucauaaacuucuacgacccccucgucuuccccuccgacgaguucgacgccuccaucagccaggucaacgaaaagaucaaccaaucacucgccuucauccgcaaaagcgacgaacuccuccacaacguaaacgucggcaaauccacaaccaacauaaugaucaccacuaucaucaucgugauaaucgucauuuuacuucuccucaucgccguaggccucuuccuauacugcaaagcccgcuaaggacuaguguccaccugucccuccugggcugcuggauugucucguuuuccugccaaauaaacaggaucagcgcuuuacagaucuaaaaaaaaaaaaaaaaaaaaaaaaaaaaaaaaaaaaaaaaaaaaaaaaaaaaaaaaaaaaaaaaugcaucccccccccccccccccccccccccccccccaaaggcucuuuucagagccaccagaauu

SEQ ID NO: 19572 - RNA, 1946 nt, Artificial Sequence
  mRNA product Design c-2 comprising derived and/or modified sequence from HRSV(Memphis-37)__AIY60640.1__F-del_DSCav1_mut8 (opt1)
gggagacuccugucgggcggaaguaggaggaguagaguuuaaaaacaguacucuuuuuccgguucgggacguaguugaagcaacgacaagccggauaaccgcucuugagacaggaagcuuaccauggagcugcccauccucaagaccaacgccaucaccacgauccuggccgcggugacccugugcuucgccagcucccagaacaucaccgaggaguucuaccagagcacgugcuccgccgucagcaagggcuaccucggcgcccugcgcaccgggugguacaccagcgugaucaccaucgagcuguccaacaucaaggagaucaagugcaacggcaccgacgccaaggugaagcucaucaagcaggagcuggacaaguacaagaacgcggucacggaccugcagcuccugaugcagagcaccccggccgccggcuccgggagcgcgaucgccuccggcaucgccgucugcaaggugcugcaccucgagggcgaggugaacaagaucaagaacgcccugcuguccaccaacaaggccgucgugagccucuccggcugcggggugagcguccugaccuucaaggugcuggaccucaagaacuacaucgacaagcagcugcugcccauccugaacaagcagagcugcuccauccccaacaucgagaccgucaucgaguuccagcagaagaacaaccgccuccuggagaucacgcgggaguucagcgugaacgcgggcgugaccacccccgucuccaccuacaugcugacgaacagcgagcuccugucccugaucaacgacaugccgaucaccaacgaccagaagaagcucaugagcaacaacgugcagaucgugcgccagcaguccuacagcaucaugugcaucaucaaggaggagguccuggccuacguggugcagcugccccucuacggggucaucgacacccccugcuggaagcugcacaccagcccccugugcacgaccaacaccaaggagggcuccaacaucugccucacccggacggaccgcgggugguacugcgacaacgccggcagcguguccuucuucccgcaggccgagaccugcaagguccagagcaaccggguguucugcgacaccaugaacucccugacccugcccagcgaggugaaccucugcaacaucgacaucuucaaccccaaguacgacugcaagaucaugacguccaagaccgacgucagcuccagcgugaucaccucccugggcgccaucgugagcugcuacgggaagaccaagugcacggcgagcaacaagugccgcggcaucaucaagaccuucuccaacgggugcgacuacgucagcaacaagggcguggacaccguguccgucggcaacacccuguacuacgugaacaagcaggagggccagagccucuacgugaagggggagcccaucaucaacuucuacgacccgcuggucuuccccuccgacgaguucgacgccagcaucucccaggugaacgagaagaucaaccagagccuggccuucauccggaaguccgacgagcuccugcacaacgugaacgucggcaagagcaccacgaacaucaugaucaccaccaucaucaucgugaucaucgugauccugcugcuccugaucgccgucgggcuguuccucuacugcaaggcccgcugaggacuaguggaagcauuuuccuggcugauuaaaagaaauuacucagcuauggucaucuguuccuguuagaaggcuaugcagcauauuauauacuaugcgcauguuaugaaaugcauaauaaaaaauuuuaaaaaaucuaaaagaucuaaaaaaaaaaaaaaaaaaaaaaaaaaaaaaaaaaaaaaaaaaaaaaaaaaaaaaaaaaaaaaaaugcaucccccccccccccccccccccccccccccccaaaggcucuuuucagagccaccagaauu

SEQ ID NO: 19573 - RNA, 1946 nt, Artificial Sequence
  mRNA product Design c-2 comprising derived and/or modified sequence from HRSV(Memphis-37)__AIY60640.1__F-del_DSCav1_mut8 (opt1)
gggagacuccugucgggcggaaguaggaggaguagaguuuaaaaacaguacucuuuuuccgguucgggacguaguugaagcaacgacaagccggauaaccgcucuugagacaggaagcuuaccauggagcugcccauccucaagaccaacgccaucaccacgauccuggccgcggugacccugugcuucgccagcucccagaacaucaccgaggaguucuaccagagcacgugcuccgccgucagcaagggcuaccucggggcccugcgcaccggcugguacaccuccgugaucaccaucgagcugagcaacaucaaggagaucaagugcaacgggaccgacgccaaggugaagcucaucaagcaggagcuggacaaguacaagaacgcggucacggaccugcagcuccugaugcaguccaccccggccgccggcagcggguccgccaucgcgagcggcaucgccgugugcaaggugcugcaccucgagggcgaggucaacaagaucaagaacgcccugcuguccaccaacaaggccguggugagccucuccgggugcggcgucagcgugcugaccuucaaggugcuggaccucaagaacuacaucgacaagcagcugcugcccauccucaacaagcaguccugcagcauccccaacaucgagacggucaucgaguuccagcagaagaacaaccggcugcuggagaucacccgcgaguucuccgugaacgccggggugaccacccccgucagcacguacaugcucaccaacuccgagcugcugagccucaucaacgacaugccgaucaccaacgaccagaagaagcugaugagcaacaacgugcagaucgugcggcagcaguccuacagcaucaugugcaucaucaaggaggagguccuggcguacguggugcagcucccccuguacggcgucaucgacacccccugcuggaagcugcacacgagcccccucugcaccaccaacaccaaggagggguccaacaucugccugacgcgcaccgaccggggcugguacugcgacaacgccggcuccgugagcuucuucccgcaggccgagaccugcaaggugcaguccaaccgcgucuucugcgacaccaugaacagccugacgcuccccuccgaggugaaccugugcaacaucgacaucuucaaccccaaguacgacugcaagaucaugaccagcaagaccgacgucuccagcuccgugaucaccagccugggggccaucguguccugcuacggcaagacgaagugcaccgccagcaacaagugccgggggaucaucaagaccuucuccaacggcugcgacuacgucagcaacaagggcguggacaccguguccgucgggaacacgcucuacuacgugaacaagcaggagggccagagccuguacgugaagggggagcccaucaucaacuucuacgacccgcuggucuuccccagcgacgaguucgacgcguccaucagccaggugaacgagaagaucaaccagucccucgccuucauccgcaagagcgacgagcugcugcacaacgugaacgucggcaaguccaccaccaacaucaugaucaccaccaucaucaucgugaucaucgugauccuccugcugcucaucgccgucgggcuguuccuguacugcaaggcccggugaggacuaguggaagcauuuuccuggcugauuaaaagaaauuacucagcuauggucaucuguuccuguuagaaggcuaugcagcauauuauauacuaugcgcauguuaugaaaugcauaauaaaaaauuuuaaaaaaucuaaaagaucuaaaaaaaaaaaaaaaaaaaaaaaaaaaaaaaaaaaaaaaaaaaaaaaaaaaaaaaaaaaaaaaaugcaucccccccccccccccccccccccccccccccaaaggcucuuuucagagccaccagaauu

SEQ ID NO: 19574 - RNA, 1946 nt, Artificial Sequence
  mRNA product Design c-2 comprising derived and/or modified sequence from HRSV(Memphis-37)__AIY60640.1__F-del_DSCav1_mut8 (opt2)
gggagacuccugucgggcggaaguaggaggaguagaguuuaaaaacaguacucuuuuuccgguucgggacguaguugaagcaacgacaagccggauaaccgcucuugagacaggaagcuuaccauggagcuccccauccucaagaccaacgccaucaccaccauccucgccgccgucacccucugcuucgccuccucccagaacaucaccgaggaguucuaccaguccaccugcuccgccgucuccaagggcuaccucggcgcccuccgcaccggcugguacaccuccgucaucaccaucgagcucuccaacaucaaggagaucaagugcaacggcaccgacgccaaggucaagcucaucaagcaggagcucgacaaguacaagaacgccgucaccgaccuccagcuccucaugcaguccacccccgccgccggcuccggcuccgccaucgccuccggcaucgccgucugcaagguccuccaccucgagggcgaggucaacaagaucaagaacgcccuccucuccaccaacaaggccgucgucucccucuccggcugcggcgucuccguccucaccuucaagguccucgaccucaagaacuacaucgacaagcagcuccuccccauccucaacaagcaguccugcuccauccccaacaucgagaccgucaucgaguuccagcagaagaacaaccgccuccucgagaucacccgcgaguucuccgucaacgccggcgucaccacccccgucuccaccuacaugcucaccaacuccgagcuccucucccucaucaacgacaugcccaucaccaacgaccagaagaagcucauguccaacaacguccagaucguccgccagcaguccuacuccaucaugugcaucaucaaggaggagguccucgccuacgucguccagcucccccucuacggcgucaucgacacccccugcuggaagcuccacaccuccccccucugcaccaccaacaccaaggagggcuccaacaucugccucacccgcaccgaccgcggcugguacugcgacaacgccggcuccgucuccuucuucccccaggccgagaccugcaagguccaguccaaccgcgucuucugcgacaccaugaacucccucacccuccccuccgaggucaaccucugcaacaucgacaucuucaaccccaaguacgacugcaagaucaugaccuccaagaccgacgucuccuccuccgucaucaccucccucggcgccaucgucuccugcuacggcaagaccaagugcaccgccuccaacaagugccgcggcaucaucaagaccuucuccaacggcugcgacuacgucuccaacaagggcgucgacaccgucuccgucggcaacacccucuacuacgucaacaagcaggagggccagucccucuacgucaagggcgagcccaucaucaacuucuacgacccccucgucuuccccuccgacgaguucgacgccuccaucucccaggucaacgagaagaucaaccagucccucgccuucauccgcaaguccgacgagcuccuccacaacgucaacgucggcaaguccaccaccaacaucaugaucaccaccaucaucaucgucaucaucgucauccuccuccuccucaucgccgucggccucuuccucuacugcaaggcccgcugaggacuaguggaagcauuuuccuggcugauuaaaagaaauuacucagcuauggucaucuguuccuguuagaaggcuaugcagcauauuauauacuaugcgcauguuaugaaaugcauaauaaaaaauuuuaaaaaaucuaaaagaucuaaaaaaaaaaaaaaaaaaaaaaaaaaaaaaaaaaaaaaaaaaaaaaaaaaaaaaaaaaaaaaaaugcaucccccccccccccccccccccccccccccccaaaggcucuuuucagagccaccagaauu

SEQ ID NO: 19575 - RNA, 1946 nt, Artificial Sequence
  mRNA product Design c-2 comprising derived and/or modified sequence from HRSV(Memphis-37)__AIY60640.1__F-del_DSCav1_mut8 (opt3)
gggagacuccugucgggcggaaguaggaggaguagaguuuaaaaacaguacucuuuuuccgguucgggacguaguugaagcaacgacaagccggauaaccgcucuugagacaggaagcuuaccauggagcugcccauccucaagaccaacgccauuacaacuauacuugcugcagugacgcugugcuucgccagcucccagaauaucaccgaagaguuuuaccaaucuacauguucagcggucaguaaaggcuauuugggggcuuuaagaacuggaugguacaccagcguuauuacaaucgaacuguccaacauuaaggagaucaaaugcaaugguaccgacgccaaggugaaacuaauaaagcaggaacucgauaaguauaaaaacgcaguaacugaccugcagcuucugaugcagucuacuccugccgcuggcucggggucagcaaucgccagcggaauugcuguguguaaggucuugcaccucgagggcgaggugaauaaaaucaagaacgcccugcugaguaccaauaaagcgguugugucccucucugguugcggggucagcguguuaacguucaagguacuggaucuuaagaacuacauugacaaacaauugcugccaauccuaaauaagcaguccuguucaauaccgaacauugaaacuguuaucgaguuucagcagaaaaauaacaggcuccuggaaauuacccgggaguucagugugaaugcaggagucacaacucccgugagcaccuauaugcuuacaaacucugagcuguugucccucaucaaugauaugccuaucaccaacgaccaaaagaaacugaugucaaacaaugugcagauuguccgccagcagagcuacaguauaaugugcaucauuaaggaagagguuuuagccuaugugguacaacugccacucuacggcgugaucgauacgcccuguuggaaacuucauacuucuccucugugcacaaccaacacuaaggaaggcuccaauauauguuugacacgaaccgaccgugggugguacugcgauaacgcuggaagcgucucguuuuucccacaggccgagacguguaaggugcagucuaauagaguuuucugcgacaccaugaacucccuaacacugcccucagaagugaaucucugcaacauugauaucuucaauccuaaauaugacuguaagaucaugacaaguaaaaccgaugucagcuccucugugauuacaagccugggugcaaucguaucaugcuacggcaagacuaaauguaccgcuaguaacaagugcagggggauuauaaagacauuuuccaauggaugugacuauguuagcaacaaaggcguggacaccgucucuguggguaauacucuuuacuaugucaacaagcaagaggggcagucacuguacgugaaaggagagccaaucauuaauuucuaugauccguugguuuuucccagugacgaauuugaugccagcaucucccaggugaacgagaagaucaaccagucucucgcguuuauucggaaaucggacgaacuguuacacaauguaaacgucggcaagagcacgacaaauauaaugaucaccacuauuaucauugugaucauaguuauccugcuacuccugauugccgugggccuuuucuuguacugcaaggcacgcugaggacuaguggaagcauuuuccuggcugauuaaaagaaauuacucagcuauggucaucuguuccuguuagaaggcuaugcagcauauuauauacuaugcgcauguuaugaaaugcauaauaaaaaauuuuaaaaaaucuaaaagaucuaaaaaaaaaaaaaaaaaaaaaaaaaaaaaaaaaaaaaaaaaaaaaaaaaaaaaaaaaaaaaaaaugcaucccccccccccccccccccccccccccccccaaaggcucuuuucagagccaccagaauu

SEQ ID NO: 19576 - RNA, 1946 nt, Artificial Sequence
  mRNA product Design c-2 comprising derived and/or modified sequence from HRSV(Memphis-37)__AIY60640.1__F-del_DSCav1_mut8 (opt4)
gggagacuccugucgggcggaaguaggaggaguagaguuuaaaaacaguacucuuuuuccgguucgggacguaguugaagcaacgacaagccggauaaccgcucuugagacaggaagcuuaccauggagcugcccauccugaagaccaacgccaucaccaccauccuggccgccgugacccugugcuucgccagcagccagaacaucaccgaggaguucuaccagagcaccugcagcgccgugagcaagggcuaccugggcgcccugagaaccggcugguacaccagcgugaucaccaucgagcugagcaacaucaaggagaucaagugcaacggcaccgacgccaaggugaagcugaucaagcaggagcuggacaaguacaagaacgccgugaccgaccugcagcugcugaugcagagcacccccgccgccggcagcggcagcgccaucgccagcggcaucgccgugugcaaggugcugcaccuggagggcgaggugaacaagaucaagaacgcccugcugagcaccaacaaggccguggugagccugagcggcugcggcgugagcgugcugaccuucaaggugcuggaccugaagaacuacaucgacaagcagcugcugcccauccugaacaagcagagcugcagcauccccaacaucgagaccgugaucgaguuccagcagaagaacaacagacugcuggagaucaccagagaguucagcgugaacgccggcgugaccacccccgugagcaccuacaugcugaccaacagcgagcugcugagccugaucaacgacaugcccaucaccaacgaccagaagaagcugaugagcaacaacgugcagaucgugagacagcagagcuacagcaucaugugcaucaucaaggaggaggugcuggccuacguggugcagcugccccuguacggcgugaucgacacccccugcuggaagcugcacaccagcccccugugcaccaccaacaccaaggagggcagcaacaucugccugaccagaaccgacagaggcugguacugcgacaacgccggcagcgugagcuucuucccccaggccgagaccugcaaggugcagagcaacagaguguucugcgacaccaugaacagccugacccugcccagcgaggugaaccugugcaacaucgacaucuucaaccccaaguacgacugcaagaucaugaccagcaagaccgacgugagcagcagcgugaucaccagccugggcgccaucgugagcugcuacggcaagaccaagugcaccgccagcaacaagugcagaggcaucaucaagaccuucagcaacggcugcgacuacgugagcaacaagggcguggacaccgugagcgugggcaacacccuguacuacgugaacaagcaggagggccagagccuguacgugaagggcgagcccaucaucaacuucuacgacccccugguguuccccagcgacgaguucgacgccagcaucagccaggugaacgagaagaucaaccagagccuggccuucaucagaaagagcgacgagcugcugcacaacgugaacgugggcaagagcaccaccaacaucaugaucaccaccaucaucaucgugaucaucgugauccugcugcugcugaucgccgugggccuguuccuguacugcaaggccagaugaggacuaguggaagcauuuuccuggcugauuaaaagaaauuacucagcuauggucaucuguuccuguuagaaggcuaugcagcauauuauauacuaugcgcauguuaugaaaugcauaauaaaaaauuuuaaaaaaucuaaaagaucuaaaaaaaaaaaaaaaaaaaaaaaaaaaaaaaaaaaaaaaaaaaaaaaaaaaaaaaaaaaaaaaaugcaucccccccccccccccccccccccccccccccaaaggcucuuuucagagccaccagaauu

SEQ ID NO: 19577 - RNA, 1946 nt, Artificial Sequence
  mRNA product Design c-2 comprising derived and/or modified sequence from HRSV(Memphis-37)__AIY60640.1__F-del_DSCav1_mut8 (opt5)
gggagacuccugucgggcggaaguaggaggaguagaguuuaaaaacaguacucuuuuuccgguucgggacguaguugaagcaacgacaagccggauaaccgcucuugagacaggaagcuuaccauggagcugcccauccucaagaccaacgccauuacaacgauccuggcugccgugacccuuugcuucgcgagcucccagaauauuacagaagaguuuuaccaaucuaccuguagcgcugucuccaaaggcuaucugggggcccucagaacaggaugguacaccucuguuaucacaauugaacugagcaacaucaaggagaucaaaugcaauggcaccgacgccaaggugaaacuuauuaagcaggaacuggauaaguauaaaaacgcugugacggaccuccagcugcugaugcaguccaccccugccgcugggucuggaagcgccaucgcguccggcauugccgucuguaaggugcuccaccuggagggggagguuaauaaaaucaagaacgcccuucugagcacaaauaaagcuguggucucucucuccggaugcggcgugagcguucugaccuucaaggugcuugaucugaagaacuacauugacaaacaacuccugccgauccugaauaagcagucuuguuccauucccaacaucgaaacagucaucgaguuucagcagaaaaauaaccggcuccuggaaauuacccgcgaguucagcgugaaugcuggcgugacgacaccugucucuaccuauaugcuuacaaacuccgagcugcucagccugaucaaugauaugcccauuaccaacgaccaaaagaaacuuauguccaacaauguucagaucgugagacagcagucuuacagcauuaugugcaucaucaaggaagaggugcuggccuaugucgugcaacucccucuguacgggguuauugauacccccuguuggaaacugcauacauccccucucugcacgaccaacacaaaggaaggaagcaauaucugucugacccggacagaccgcggcugguacugcgauaacgcggggucuguguccuuuuucccgcaggccgagaccuguaagguccagagcaauagaguguuuugcgacacgaugaacucucuuacacugcccagcgaaguuaaucucugcaacauugauaucuucaauccuaaauaugacuguaagauuaugaccuccaaaaccgaugugucuagcuccgucaucacaagccugggagcuaucgugucuugcuacggcaagaccaaauguacagccuccaacaagugccgggggauuaucaagacguuuagcaauggaugugacuaugucucuaacaaaggcguggacaccguuuccgugggcaauacacuuuacuaugucaacaagcaagaggggcagagccuguacgugaaaggagagcccauuaucaauuucuaugauccucucguuuuucccuccgacgaguucgaugcuucuauuagccaggugaacgaaaagaucaaccagucccuggccuuuauucgcaaaucugacgaacugcuccacaaugucaacgugggcaagagcaccacaaauaucaugaucaccacgauuaucauugugaucauuguuauccugcuucugcucaucgccgucgggcuguuccuguacugcaaggcuagaugaggacuaguggaagcauuuuccuggcugauuaaaagaaauuacucagcuauggucaucuguuccuguuagaaggcuaugcagcauauuauauacuaugcgcauguuaugaaaugcauaauaaaaaauuuuaaaaaaucuaaaagaucuaaaaaaaaaaaaaaaaaaaaaaaaaaaaaaaaaaaaaaaaaaaaaaaaaaaaaaaaaaaaaaaaugcaucccccccccccccccccccccccccccccccaaaggcucuuuucagagccaccagaauu

SEQ ID NO: 19578 - RNA, 1946 nt, Artificial Sequence
  mRNA product Design c-2 comprising derived and/or modified sequence from HRSV(Memphis-37)__AIY60640.1__F-del_DSCav1_mut8 (opt6)
gggagacuccugucgggcggaaguaggaggaguagaguuuaaaaacaguacucuuuuuccgguucgggacguaguugaagcaacgacaagccggauaaccgcucuugagacaggaagcuuaccauggaacuacccauacuaaaaacaaacgcaauuacaacaauacuugccgcaguaaccuuaugcuuugccucaucccaaaacauaacagaagaauuuuaucaaucaacaugcuccgcaguaucaaaaggauaccuaggcgcucuaagaacaggaugguacacauccguaaucacaauagaacuauccaauauaaaagaaauaaaauguaauggaacagaugcaaaaguuaaauuaauaaaacaagaacuagacaaauacaaaaacgcaguuaccgaucuccaacuauuaaugcaaucaacaccagcugcaggaaguggaagcgccauagcaagcggaauagcagucugcaaaguauuacaucuugaaggcgaaguaaacaaaaucaaaaaugcccuccucucaacaaacaaagcuguaguaucccuaucaggaugcgguguaucuguucuuacauuuaaaguacucgaucuaaaaaacuacaucgauaaacaguuacuuccaauacucaacaaacaaucauguagcauaccaaacauagaaacaguaauagaauuucaacaaaaaaacaaucgacuacucgaaauaacuagagaauuuucuguaaacgcuggaguaaccacaccagugucuaccuauaugcuuacaaauagcgaacuccuaucacuaaucaaugacaugccaauaacaaaugaccagaaaaaacucaugucaaauaacguacaaauaguacgacaacaaagcuacuccauaaugugcauaaucaaagaagaaguauuagccuacguuguucaacuaccauuauauggaguuauagacacuccaugcuggaaauuacauacaagcccacucuguacaacaaacacaaaagaaggcucaaacauaugcuuaacaagaacagauagaggaugguacugcgauaacgcaggcucagucucauuuuuuccacaagccgaaaccugcaaaguacaaucaaauagaguuuuuugcgacacaaugaacucacucacucuaccaagugaaguaaaucucuguaauaucgacauauucaacccaaaauaugacugcaaaauaaugacaucuaaaaccgauguauccucaagcguaaucacaucauuaggagcuauaguuuccugcuacgguaaaacaaaaugcacagcauccaacaaaugucgcgguaucaucaaaacauucuccaacggaugugauuacguaucaaacaaaggugucgacaccguaagcguaggcaacacuuuauacuauguaaacaaacaagaaggacaaagucuauauguaaaaggagaaccaauaauaaacuucuaugacccccuaguauucccuuccgacgaauuugaugcaagcauuucacaaguuaacgaaaaaaucaaucaaucccuugcuuucauaagaaaaucagacgaauuacuacacaacguaaacguaggaaaaagcacaacaaauaucaugauuacaacaauaauaauuguaauaauaguaauacuccucuuacuuauagcagucggcuuauuccuuuacugcaaagcaagauaaggacuaguggaagcauuuuccuggcugauuaaaagaaauuacucagcuauggucaucuguuccuguuagaaggcuaugcagcauauuauauacuaugcgcauguuaugaaaugcauaauaaaaaauuuuaaaaaaucuaaaagaucuaaaaaaaaaaaaaaaaaaaaaaaaaaaaaaaaaaaaaaaaaaaaaaaaaaaaaaaaaaaaaaaaugcaucccccccccccccccccccccccccccccccaaaggcucuuuucagagccaccagaauu

SEQ ID NO: 19579 - RNA, 1946 nt, Artificial Sequence
  mRNA product Design c-2 comprising derived and/or modified sequence from HRSV(Memphis-37)__AIY60640.1__F-del_DSCav1_mut8 (opt11)
gggagacuccugucgggcggaaguaggaggaguagaguuuaaaaacaguacucuuuuuccgguucgggacguaguugaagcaacgacaagccggauaaccgcucuugagacaggaagcuuaccauggaacuccccauccuaaaaaccaacgcaaucaccaccauccucgccgccguaacacucugcuuugcaagcucccaaaacaucaccgaagaauuuuaccaaucuaccugcagcgccguaucuaaaggauaccuaggagcccucagaaccgguugguacaccucugucaucacaauagaacucuccaacaucaaagaaaucaaaugcaacggcaccgacgccaaagucaaacucaucaaacaagaacucgacaaauauaaaaacgccguaaccgaccuccaacuccucaugcaauccacccccgccgccggcaguggcuccgcuaucgccuccggaaucgccguuugcaaaguccugcaccuagaaggcgaagucaacaaaaucaaaaacgcccugcucucaaccaacaaagcugucguaagccucuccggcugcggagucuccguccuuaccuucaaaguacucgaccuuaaaaacuacaucgacaaacaacuucuccccauacucaauaaacaauccugcuccauacccaacaucgaaacagucaucgaguuccaacagaaaaauaaccgccuccucgaaauaacccgcgaguucuccgucaacgcaggcgucaccaccccagucuccaccuacaugcugacaaacuccgaacuccuaucccucaucaacgacaugcccaucaccaacgaccaaaagaaacucaugagcaauaacguccaaaucguacgacaacaauccuacagcaucauguguaucaucaaagaagaaguacucgccuacgucguccaacucccacuauacggcgucaucgacacaccaugcuggaaacuucacaccuccccacucugcaccacaaacacaaaagaaggcuccaacaucugccuuacccgaaccgaccgcgggugguacugcgacaacgccggaucagucucguucuuuccccaagccgaaaccugcaaaguacaaucaaaucgcgucuucugcgacaccaugaacuccuuaacacuaccauccgaaguaaaccucugcaacauagacaucuucaacccaaaauacgacugcaaaaucaugaccuccaaaaccgacguauccuccuccguaaucaccagccucggcgcaauagucucaugcuacggcaaaaccaaaugcaccgccuccaacaaaugccgcggcaucauaaaaacuuucucuaacggaugcgacuacgucagcaacaaaggcgucgacaccguauccguagguaauacacuuuacuacgucaauaaacaagaaggccaaucccucuacgucaaaggagaacccaucauaaacuucuacgacccccucgucuuccccuccgacgaguucgacgccuccaucagccaggucaacgaaaagaucaaccaaucacucgccuucauccgcaaaagcgacgaacuccuccacaacguaaacgucggcaaauccacaaccaacauaaugaucaccacuaucaucaucgugauaaucgucauuuuacuucuccucaucgccguaggccucuuccuauacugcaaagcccgcuaaggacuaguggaagcauuuuccuggcugauuaaaagaaauuacucagcuauggucaucuguuccuguuagaaggcuaugcagcauauuauauacuaugcgcauguuaugaaaugcauaauaaaaaauuuuaaaaaaucuaaaagaucuaaaaaaaaaaaaaaaaaaaaaaaaaaaaaaaaaaaaaaaaaaaaaaaaaaaaaaaaaaaaaaaaugcaucccccccccccccccccccccccccccccccaaaggcucuuuucagagccaccagaauu

SEQ ID NO: 19580 - RNA, 1923 nt, Artificial Sequence
  mRNA product Design c-3 comprising derived and/or modified sequence from HRSV(Memphis-37)__AIY60640.1__F-del_DSCav1_mut8 (opt1)
gggagaguccgcucagccagguugcagaagcggcuuagcguguguccuaaucuucucucugcguguagguaggccugugccgcaaacaagcuuaccauggagcugcccauccucaagaccaacgccaucaccacgauccuggccgcggugacccugugcuucgccagcucccagaacaucaccgaggaguucuaccagagcacgugcuccgccgucagcaagggcuaccucggcgcccugcgcaccgggugguacaccagcgugaucaccaucgagcuguccaacaucaaggagaucaagugcaacggcaccgacgccaaggugaagcucaucaagcaggagcuggacaaguacaagaacgcggucacggaccugcagcuccugaugcagagcaccccggccgccggcuccgggagcgcgaucgccuccggcaucgccgucugcaaggugcugcaccucgagggcgaggugaacaagaucaagaacgcccugcuguccaccaacaaggccgucgugagccucuccggcugcggggugagcguccugaccuucaaggugcuggaccucaagaacuacaucgacaagcagcugcugcccauccugaacaagcagagcugcuccauccccaacaucgagaccgucaucgaguuccagcagaagaacaaccgccuccuggagaucacgcgggaguucagcgugaacgcgggcgugaccacccccgucuccaccuacaugcugacgaacagcgagcuccugucccugaucaacgacaugccgaucaccaacgaccagaagaagcucaugagcaacaacgugcagaucgugcgccagcaguccuacagcaucaugugcaucaucaaggaggagguccuggccuacguggugcagcugccccucuacggggucaucgacacccccugcuggaagcugcacaccagcccccugugcacgaccaacaccaaggagggcuccaacaucugccucacccggacggaccgcgggugguacugcgacaacgccggcagcguguccuucuucccgcaggccgagaccugcaagguccagagcaaccggguguucugcgacaccaugaacucccugacccugcccagcgaggugaaccucugcaacaucgacaucuucaaccccaaguacgacugcaagaucaugacguccaagaccgacgucagcuccagcgugaucaccucccugggcgccaucgugagcugcuacgggaagaccaagugcacggcgagcaacaagugccgcggcaucaucaagaccuucuccaacgggugcgacuacgucagcaacaagggcguggacaccguguccgucggcaacacccuguacuacgugaacaagcaggagggccagagccucuacgugaagggggagcccaucaucaacuucuacgacccgcuggucuuccccuccgacgaguucgacgccagcaucucccaggugaacgagaagaucaaccagagccuggccuucauccggaaguccgacgagcuccugcacaacgugaacgucggcaagagcaccacgaacaucaugaucaccaccaucaucaucgugaucaucgugauccugcugcuccugaucgccgucgggcuguuccucuacugcaaggcccgcugaggacuaguacuggcugcaucucccuuuccucuguccuccauccuucucccaggauggugaagggggaccugguacccagugauccccaccccaggauccuaaaucaugacuuaccugcuaauaaaaacucauuggaaaagugagaagaucuaaaaaaaaaaaaaaaaaaaaaaaaaaaaaaaaaaaaaaaaaaaaaaaaaaaaaaaaaaaaaaaaugcaucccccccccccccccccccccccccccccccaaaggcucuuuucagagccaccagaauu

SEQ ID NO: 19581 - RNA, 1923 nt, Artificial Sequence
  mRNA product Design c-3 comprising derived and/or modified sequence from HRSV(Memphis-37)__AIY60640.1__F-del_DSCav1_mut8 (opt1)
gggagaguccgcucagccagguugcagaagcggcuuagcguguguccuaaucuucucucugcguguagguaggccugugccgcaaacaagcuuaccauggagcugcccauccucaagaccaacgccaucaccacgauccuggccgcggugacccugugcuucgccagcucccagaacaucaccgaggaguucuaccagagcacgugcuccgccgucagcaagggcuaccucggggcccugcgcaccggcugguacaccuccgugaucaccaucgagcugagcaacaucaaggagaucaagugcaacgggaccgacgccaaggugaagcucaucaagcaggagcuggacaaguacaagaacgcggucacggaccugcagcuccugaugcaguccaccccggccgccggcagcggguccgccaucgcgagcggcaucgccgugugcaaggugcugcaccucgagggcgaggucaacaagaucaagaacgcccugcuguccaccaacaaggccguggugagccucuccgggugcggcgucagcgugcugaccuucaaggugcuggaccucaagaacuacaucgacaagcagcugcugcccauccucaacaagcaguccugcagcauccccaacaucgagacggucaucgaguuccagcagaagaacaaccggcugcuggagaucacccgcgaguucuccgugaacgccggggugaccacccccgucagcacguacaugcucaccaacuccgagcugcugagccucaucaacgacaugccgaucaccaacgaccagaagaagcugaugagcaacaacgugcagaucgugcggcagcaguccuacagcaucaugugcaucaucaaggaggagguccuggcguacguggugcagcucccccuguacggcgucaucgacacccccugcuggaagcugcacacgagcccccucugcaccaccaacaccaaggagggguccaacaucugccugacgcgcaccgaccggggcugguacugcgacaacgccggcuccgugagcuucuucccgcaggccgagaccugcaaggugcaguccaaccgcgucuucugcgacaccaugaacagccugacgcuccccuccgaggugaaccugugcaacaucgacaucuucaaccccaaguacgacugcaagaucaugaccagcaagaccgacgucuccagcuccgugaucaccagccugggggccaucguguccugcuacggcaagacgaagugcaccgccagcaacaagugccgggggaucaucaagaccuucuccaacggcugcgacuacgucagcaacaagggcguggacaccguguccgucgggaacacgcucuacuacgugaacaagcaggagggccagagccuguacgugaagggggagcccaucaucaacuucuacgacccgcuggucuuccccagcgacgaguucgacgcguccaucagccaggugaacgagaagaucaaccagucccucgccuucauccgcaagagcgacgagcugcugcacaacgugaacgucggcaaguccaccaccaacaucaugaucaccaccaucaucaucgugaucaucgugauccuccugcugcucaucgccgucgggcuguuccuguacugcaaggcccggugaggacuaguacuggcugcaucucccuuuccucuguccuccauccuucucccaggauggugaagggggaccugguacccagugauccccaccccaggauccuaaaucaugacuuaccugcuaauaaaaacucauuggaaaagugagaagaucuaaaaaaaaaaaaaaaaaaaaaaaaaaaaaaaaaaaaaaaaaaaaaaaaaaaaaaaaaaaaaaaaugcaucccccccccccccccccccccccccccccccaaaggcucuuuucagagccaccagaauu

SEQ ID NO: 19582 - RNA, 1923 nt, Artificial Sequence
  mRNA product Design c-3 comprising derived and/or modified sequence from HRSV(Memphis-37)__AIY60640.1__F-del_DSCav1_mut8 (opt2)
gggagaguccgcucagccagguugcagaagcggcuuagcguguguccuaaucuucucucugcguguagguaggccugugccgcaaacaagcuuaccauggagcuccccauccucaagaccaacgccaucaccaccauccucgccgccgucacccucugcuucgccuccucccagaacaucaccgaggaguucuaccaguccaccugcuccgccgucuccaagggcuaccucggcgcccuccgcaccggcugguacaccuccgucaucaccaucgagcucuccaacaucaaggagaucaagugcaacggcaccgacgccaaggucaagcucaucaagcaggagcucgacaaguacaagaacgccgucaccgaccuccagcuccucaugcaguccacccccgccgccggcuccggcuccgccaucgccuccggcaucgccgucugcaagguccuccaccucgagggcgaggucaacaagaucaagaacgcccuccucuccaccaacaaggccgucgucucccucuccggcugcggcgucuccguccucaccuucaagguccucgaccucaagaacuacaucgacaagcagcuccuccccauccucaacaagcaguccugcuccauccccaacaucgagaccgucaucgaguuccagcagaagaacaaccgccuccucgagaucacccgcgaguucuccgucaacgccggcgucaccacccccgucuccaccuacaugcucaccaacuccgagcuccucucccucaucaacgacaugcccaucaccaacgaccagaagaagcucauguccaacaacguccagaucguccgccagcaguccuacuccaucaugugcaucaucaaggaggagguccucgccuacgucguccagcucccccucuacggcgucaucgacacccccugcuggaagcuccacaccuccccccucugcaccaccaacaccaaggagggcuccaacaucugccucacccgcaccgaccgcggcugguacugcgacaacgccggcuccgucuccuucuucccccaggccgagaccugcaagguccaguccaaccgcgucuucugcgacaccaugaacucccucacccuccccuccgaggucaaccucugcaacaucgacaucuucaaccccaaguacgacugcaagaucaugaccuccaagaccgacgucuccuccuccgucaucaccucccucggcgccaucgucuccugcuacggcaagaccaagugcaccgccuccaacaagugccgcggcaucaucaagaccuucuccaacggcugcgacuacgucuccaacaagggcgucgacaccgucuccgucggcaacacccucuacuacgucaacaagcaggagggccagucccucuacgucaagggcgagcccaucaucaacuucuacgacccccucgucuuccccuccgacgaguucgacgccuccaucucccaggucaacgagaagaucaaccagucccucgccuucauccgcaaguccgacgagcuccuccacaacgucaacgucggcaaguccaccaccaacaucaugaucaccaccaucaucaucgucaucaucgucauccuccuccuccucaucgccgucggccucuuccucuacugcaaggcccgcugaggacuaguacuggcugcaucucccuuuccucuguccuccauccuucucccaggauggugaagggggaccugguacccagugauccccaccccaggauccuaaaucaugacuuaccugcuaauaaaaacucauuggaaaagugagaagaucuaaaaaaaaaaaaaaaaaaaaaaaaaaaaaaaaaaaaaaaaaaaaaaaaaaaaaaaaaaaaaaaaugcaucccccccccccccccccccccccccccccccaaaggcucuuuucagagccaccagaauu

SEQ ID NO: 19583 - RNA, 1923 nt, Artificial Sequence
  mRNA product Design c-3 comprising derived and/or modified sequence from HRSV(Memphis-37)__AIY60640.1__F-del_DSCav1_mut8 (opt3)
gggagaguccgcucagccagguugcagaagcggcuuagcguguguccuaaucuucucucugcguguagguaggccugugccgcaaacaagcuuaccauggagcugcccauccucaagaccaacgccauuacaacuauacuugcugcagugacgcugugcuucgccagcucccagaauaucaccgaagaguuuuaccaaucuacauguucagcggucaguaaaggcuauuugggggcuuuaagaacuggaugguacaccagcguuauuacaaucgaacuguccaacauuaaggagaucaaaugcaaugguaccgacgccaaggugaaacuaauaaagcaggaacucgauaaguauaaaaacgcaguaacugaccugcagcuucugaugcagucuacuccugccgcuggcucggggucagcaaucgccagcggaauugcuguguguaaggucuugcaccucgagggcgaggugaauaaaaucaagaacgcccugcugaguaccaauaaagcgguugugucccucucugguugcggggucagcguguuaacguucaagguacuggaucuuaagaacuacauugacaaacaauugcugccaauccuaaauaagcaguccuguucaauaccgaacauugaaacuguuaucgaguuucagcagaaaaauaacaggcuccuggaaauuacccgggaguucagugugaaugcaggagucacaacucccgugagcaccuauaugcuuacaaacucugagcuguugucccucaucaaugauaugccuaucaccaacgaccaaaagaaacugaugucaaacaaugugcagauuguccgccagcagagcuacaguauaaugugcaucauuaaggaagagguuuuagccuaugugguacaacugccacucuacggcgugaucgauacgcccuguuggaaacuucauacuucuccucugugcacaaccaacacuaaggaaggcuccaauauauguuugacacgaaccgaccgugggugguacugcgauaacgcuggaagcgucucguuuuucccacaggccgagacguguaaggugcagucuaauagaguuuucugcgacaccaugaacucccuaacacugcccucagaagugaaucucugcaacauugauaucuucaauccuaaauaugacuguaagaucaugacaaguaaaaccgaugucagcuccucugugauuacaagccugggugcaaucguaucaugcuacggcaagacuaaauguaccgcuaguaacaagugcagggggauuauaaagacauuuuccaauggaugugacuauguuagcaacaaaggcguggacaccgucucuguggguaauacucuuuacuaugucaacaagcaagaggggcagucacuguacgugaaaggagagccaaucauuaauuucuaugauccguugguuuuucccagugacgaauuugaugccagcaucucccaggugaacgagaagaucaaccagucucucgcguuuauucggaaaucggacgaacuguuacacaauguaaacgucggcaagagcacgacaaauauaaugaucaccacuauuaucauugugaucauaguuauccugcuacuccugauugccgugggccuuuucuuguacugcaaggcacgcugaggacuaguacuggcugcaucucccuuuccucuguccuccauccuucucccaggauggugaagggggaccugguacccagugauccccaccccaggauccuaaaucaugacuuaccugcuaauaaaaacucauuggaaaagugagaagaucuaaaaaaaaaaaaaaaaaaaaaaaaaaaaaaaaaaaaaaaaaaaaaaaaaaaaaaaaaaaaaaaaugcaucccccccccccccccccccccccccccccccaaaggcucuuuucagagccaccagaauu

SEQ ID NO: 19584 - RNA, 1923 nt, Artificial Sequence
  mRNA product Design c-3 comprising derived and/or modified sequence from HRSV(Memphis-37)__AIY60640.1__F-del_DSCav1_mut8 (opt4)
gggagaguccgcucagccagguugcagaagcggcuuagcguguguccuaaucuucucucugcguguagguaggccugugccgcaaacaagcuuaccauggagcugcccauccugaagaccaacgccaucaccaccauccuggccgccgugacccugugcuucgccagcagccagaacaucaccgaggaguucuaccagagcaccugcagcgccgugagcaagggcuaccugggcgcccugagaaccggcugguacaccagcgugaucaccaucgagcugagcaacaucaaggagaucaagugcaacggcaccgacgccaaggugaagcugaucaagcaggagcuggacaaguacaagaacgccgugaccgaccugcagcugcugaugcagagcacccccgccgccggcagcggcagcgccaucgccagcggcaucgccgugugcaaggugcugcaccuggagggcgaggugaacaagaucaagaacgcccugcugagcaccaacaaggccguggugagccugagcggcugcggcgugagcgugcugaccuucaaggugcuggaccugaagaacuacaucgacaagcagcugcugcccauccugaacaagcagagcugcagcauccccaacaucgagaccgugaucgaguuccagcagaagaacaacagacugcuggagaucaccagagaguucagcgugaacgccggcgugaccacccccgugagcaccuacaugcugaccaacagcgagcugcugagccugaucaacgacaugcccaucaccaacgaccagaagaagcugaugagcaacaacgugcagaucgugagacagcagagcuacagcaucaugugcaucaucaaggaggaggugcuggccuacguggugcagcugccccuguacggcgugaucgacacccccugcuggaagcugcacaccagcccccugugcaccaccaacaccaaggagggcagcaacaucugccugaccagaaccgacagaggcugguacugcgacaacgccggcagcgugagcuucuucccccaggccgagaccugcaaggugcagagcaacagaguguucugcgacaccaugaacagccugacccugcccagcgaggugaaccugugcaacaucgacaucuucaaccccaaguacgacugcaagaucaugaccagcaagaccgacgugagcagcagcgugaucaccagccugggcgccaucgugagcugcuacggcaagaccaagugcaccgccagcaacaagugcagaggcaucaucaagaccuucagcaacggcugcgacuacgugagcaacaagggcguggacaccgugagcgugggcaacacccuguacuacgugaacaagcaggagggccagagccuguacgugaagggcgagcccaucaucaacuucuacgacccccugguguuccccagcgacgaguucgacgccagcaucagccaggugaacgagaagaucaaccagagccuggccuucaucagaaagagcgacgagcugcugcacaacgugaacgugggcaagagcaccaccaacaucaugaucaccaccaucaucaucgugaucaucgugauccugcugcugcugaucgccgugggccuguuccuguacugcaaggccagaugaggacuaguacuggcugcaucucccuuuccucuguccuccauccuucucccaggauggugaagggggaccugguacccagugauccccaccccaggauccuaaaucaugacuuaccugcuaauaaaaacucauuggaaaagugagaagaucuaaaaaaaaaaaaaaaaaaaaaaaaaaaaaaaaaaaaaaaaaaaaaaaaaaaaaaaaaaaaaaaaugcaucccccccccccccccccccccccccccccccaaaggcucuuuucagagccaccagaauu

SEQ ID NO: 19585 - RNA, 1923 nt, Artificial Sequence
  mRNA product Design c-3 comprising derived and/or modified sequence from HRSV(Memphis-37)__AIY60640.1__F-del_DSCav1_mut8 (opt5)
gggagaguccgcucagccagguugcagaagcggcuuagcguguguccuaaucuucucucugcguguagguaggccugugccgcaaacaagcuuaccauggagcugcccauccucaagaccaacgccauuacaacgauccuggcugccgugacccuuugcuucgcgagcucccagaauauuacagaagaguuuuaccaaucuaccuguagcgcugucuccaaaggcuaucugggggcccucagaacaggaugguacaccucuguuaucacaauugaacugagcaacaucaaggagaucaaaugcaauggcaccgacgccaaggugaaacuuauuaagcaggaacuggauaaguauaaaaacgcugugacggaccuccagcugcugaugcaguccaccccugccgcugggucuggaagcgccaucgcguccggcauugccgucuguaaggugcuccaccuggagggggagguuaauaaaaucaagaacgcccuucugagcacaaauaaagcuguggucucucucuccggaugcggcgugagcguucugaccuucaaggugcuugaucugaagaacuacauugacaaacaacuccugccgauccugaauaagcagucuuguuccauucccaacaucgaaacagucaucgaguuucagcagaaaaauaaccggcuccuggaaauuacccgcgaguucagcgugaaugcuggcgugacgacaccugucucuaccuauaugcuuacaaacuccgagcugcucagccugaucaaugauaugcccauuaccaacgaccaaaagaaacuuauguccaacaauguucagaucgugagacagcagucuuacagcauuaugugcaucaucaaggaagaggugcuggccuaugucgugcaacucccucuguacgggguuauugauacccccuguuggaaacugcauacauccccucucugcacgaccaacacaaaggaaggaagcaauaucugucugacccggacagaccgcggcugguacugcgauaacgcggggucuguguccuuuuucccgcaggccgagaccuguaagguccagagcaauagaguguuuugcgacacgaugaacucucuuacacugcccagcgaaguuaaucucugcaacauugauaucuucaauccuaaauaugacuguaagauuaugaccuccaaaaccgaugugucuagcuccgucaucacaagccugggagcuaucgugucuugcuacggcaagaccaaauguacagccuccaacaagugccgggggauuaucaagacguuuagcaauggaugugacuaugucucuaacaaaggcguggacaccguuuccgugggcaauacacuuuacuaugucaacaagcaagaggggcagagccuguacgugaaaggagagcccauuaucaauuucuaugauccucucguuuuucccuccgacgaguucgaugcuucuauuagccaggugaacgaaaagaucaaccagucccuggccuuuauucgcaaaucugacgaacugcuccacaaugucaacgugggcaagagcaccacaaauaucaugaucaccacgauuaucauugugaucauuguuauccugcuucugcucaucgccgucgggcuguuccuguacugcaaggcuagaugaggacuaguacuggcugcaucucccuuuccucuguccuccauccuucucccaggauggugaagggggaccugguacccagugauccccaccccaggauccuaaaucaugacuuaccugcuaauaaaaacucauuggaaaagugagaagaucuaaaaaaaaaaaaaaaaaaaaaaaaaaaaaaaaaaaaaaaaaaaaaaaaaaaaaaaaaaaaaaaaugcaucccccccccccccccccccccccccccccccaaaggcucuuuucagagccaccagaauu

SEQ ID NO: 19586 - RNA, 1923 nt, Artificial Sequence
  mRNA product Design c-3 comprising derived and/or modified sequence from HRSV(Memphis-37)__AIY60640.1__F-del_DSCav1_mut8 (opt6)
gggagaguccgcucagccagguugcagaagcggcuuagcguguguccuaaucuucucucugcguguagguaggccugugccgcaaacaagcuuaccauggaacuacccauacuaaaaacaaacgcaauuacaacaauacuugccgcaguaaccuuaugcuuugccucaucccaaaacauaacagaagaauuuuaucaaucaacaugcuccgcaguaucaaaaggauaccuaggcgcucuaagaacaggaugguacacauccguaaucacaauagaacuauccaauauaaaagaaauaaaauguaauggaacagaugcaaaaguuaaauuaauaaaacaagaacuagacaaauacaaaaacgcaguuaccgaucuccaacuauuaaugcaaucaacaccagcugcaggaaguggaagcgccauagcaagcggaauagcagucugcaaaguauuacaucuugaaggcgaaguaaacaaaaucaaaaaugcccuccucucaacaaacaaagcuguaguaucccuaucaggaugcgguguaucuguucuuacauuuaaaguacucgaucuaaaaaacuacaucgauaaacaguuacuuccaauacucaacaaacaaucauguagcauaccaaacauagaaacaguaauagaauuucaacaaaaaaacaaucgacuacucgaaauaacuagagaauuuucuguaaacgcuggaguaaccacaccagugucuaccuauaugcuuacaaauagcgaacuccuaucacuaaucaaugacaugccaauaacaaaugaccagaaaaaacucaugucaaauaacguacaaauaguacgacaacaaagcuacuccauaaugugcauaaucaaagaagaaguauuagccuacguuguucaacuaccauuauauggaguuauagacacuccaugcuggaaauuacauacaagcccacucuguacaacaaacacaaaagaaggcucaaacauaugcuuaacaagaacagauagaggaugguacugcgauaacgcaggcucagucucauuuuuuccacaagccgaaaccugcaaaguacaaucaaauagaguuuuuugcgacacaaugaacucacucacucuaccaagugaaguaaaucucuguaauaucgacauauucaacccaaaauaugacugcaaaauaaugacaucuaaaaccgauguauccucaagcguaaucacaucauuaggagcuauaguuuccugcuacgguaaaacaaaaugcacagcauccaacaaaugucgcgguaucaucaaaacauucuccaacggaugugauuacguaucaaacaaaggugucgacaccguaagcguaggcaacacuuuauacuauguaaacaaacaagaaggacaaagucuauauguaaaaggagaaccaauaauaaacuucuaugacccccuaguauucccuuccgacgaauuugaugcaagcauuucacaaguuaacgaaaaaaucaaucaaucccuugcuuucauaagaaaaucagacgaauuacuacacaacguaaacguaggaaaaagcacaacaaauaucaugauuacaacaauaauaauuguaauaauaguaauacuccucuuacuuauagcagucggcuuauuccuuuacugcaaagcaagauaaggacuaguacuggcugcaucucccuuuccucuguccuccauccuucucccaggauggugaagggggaccugguacccagugauccccaccccaggauccuaaaucaugacuuaccugcuaauaaaaacucauuggaaaagugagaagaucuaaaaaaaaaaaaaaaaaaaaaaaaaaaaaaaaaaaaaaaaaaaaaaaaaaaaaaaaaaaaaaaaugcaucccccccccccccccccccccccccccccccaaaggcucuuuucagagccaccagaauu

SEQ ID NO: 19587 - RNA, 1923 nt, Artificial Sequence
  mRNA product Design c-3 comprising derived and/or modified sequence from HRSV(Memphis-37)__AIY60640.1__F-del_DSCav1_mut8 (opt11)
gggagaguccgcucagccagguugcagaagcggcuuagcguguguccuaaucuucucucugcguguagguaggccugugccgcaaacaagcuuaccauggaacuccccauccuaaaaaccaacgcaaucaccaccauccucgccgccguaacacucugcuuugcaagcucccaaaacaucaccgaagaauuuuaccaaucuaccugcagcgccguaucuaaaggauaccuaggagcccucagaaccgguugguacaccucugucaucacaauagaacucuccaacaucaaagaaaucaaaugcaacggcaccgacgccaaagucaaacucaucaaacaagaacucgacaaauauaaaaacgccguaaccgaccuccaacuccucaugcaauccacccccgccgccggcaguggcuccgcuaucgccuccggaaucgccguuugcaaaguccugcaccuagaaggcgaagucaacaaaaucaaaaacgcccugcucucaaccaacaaagcugucguaagccucuccggcugcggagucuccguccuuaccuucaaaguacucgaccuuaaaaacuacaucgacaaacaacuucuccccauacucaauaaacaauccugcuccauacccaacaucgaaacagucaucgaguuccaacagaaaaauaaccgccuccucgaaauaacccgcgaguucuccgucaacgcaggcgucaccaccccagucuccaccuacaugcugacaaacuccgaacuccuaucccucaucaacgacaugcccaucaccaacgaccaaaagaaacucaugagcaauaacguccaaaucguacgacaacaauccuacagcaucauguguaucaucaaagaagaaguacucgccuacgucguccaacucccacuauacggcgucaucgacacaccaugcuggaaacuucacaccuccccacucugcaccacaaacacaaaagaaggcuccaacaucugccuuacccgaaccgaccgcgggugguacugcgacaacgccggaucagucucguucuuuccccaagccgaaaccugcaaaguacaaucaaaucgcgucuucugcgacaccaugaacuccuuaacacuaccauccgaaguaaaccucugcaacauagacaucuucaacccaaaauacgacugcaaaaucaugaccuccaaaaccgacguauccuccuccguaaucaccagccucggcgcaauagucucaugcuacggcaaaaccaaaugcaccgccuccaacaaaugccgcggcaucauaaaaacuuucucuaacggaugcgacuacgucagcaacaaaggcgucgacaccguauccguagguaauacacuuuacuacgucaauaaacaagaaggccaaucccucuacgucaaaggagaacccaucauaaacuucuacgacccccucgucuuccccuccgacgaguucgacgccuccaucagccaggucaacgaaaagaucaaccaaucacucgccuucauccgcaaaagcgacgaacuccuccacaacguaaacgucggcaaauccacaaccaacauaaugaucaccacuaucaucaucgugauaaucgucauuuuacuucuccucaucgccguaggccucuuccuauacugcaaagcccgcuaaggacuaguacuggcugcaucucccuuuccucuguccuccauccuucucccaggauggugaagggggaccugguacccagugauccccaccccaggauccuaaaucaugacuuaccugcuaauaaaaacucauuggaaaagugagaagaucuaaaaaaaaaaaaaaaaaaaaaaaaaaaaaaaaaaaaaaaaaaaaaaaaaaaaaaaaaaaaaaaaugcaucccccccccccccccccccccccccccccccaaaggcucuuuucagagccaccagaauu

SEQ ID NO: 19588 - RNA, 1919 nt, Artificial Sequence
  mRNA product Design c-4 comprising derived and/or modified sequence from HRSV(Memphis-37)__AIY60640.1__F-del_DSCav1_mut8 (opt1)
gggagaguccgcucagccagguugcagaagcggcuuagcguguguccuaaucuucucucugcguguagguaggccugugccgcaaacaagcuuaccauggagcugcccauccucaagaccaacgccaucaccacgauccuggccgcggugacccugugcuucgccagcucccagaacaucaccgaggaguucuaccagagcacgugcuccgccgucagcaagggcuaccucggcgcccugcgcaccgggugguacaccagcgugaucaccaucgagcuguccaacaucaaggagaucaagugcaacggcaccgacgccaaggugaagcucaucaagcaggagcuggacaaguacaagaacgcggucacggaccugcagcuccugaugcagagcaccccggccgccggcuccgggagcgcgaucgccuccggcaucgccgucugcaaggugcugcaccucgagggcgaggugaacaagaucaagaacgcccugcuguccaccaacaaggccgucgugagccucuccggcugcggggugagcguccugaccuucaaggugcuggaccucaagaacuacaucgacaagcagcugcugcccauccugaacaagcagagcugcuccauccccaacaucgagaccgucaucgaguuccagcagaagaacaaccgccuccuggagaucacgcgggaguucagcgugaacgcgggcgugaccacccccgucuccaccuacaugcugacgaacagcgagcuccugucccugaucaacgacaugccgaucaccaacgaccagaagaagcucaugagcaacaacgugcagaucgugcgccagcaguccuacagcaucaugugcaucaucaaggaggagguccuggccuacguggugcagcugccccucuacggggucaucgacacccccugcuggaagcugcacaccagcccccugugcacgaccaacaccaaggagggcuccaacaucugccucacccggacggaccgcgggugguacugcgacaacgccggcagcguguccuucuucccgcaggccgagaccugcaagguccagagcaaccggguguucugcgacaccaugaacucccugacccugcccagcgaggugaaccucugcaacaucgacaucuucaaccccaaguacgacugcaagaucaugacguccaagaccgacgucagcuccagcgugaucaccucccugggcgccaucgugagcugcuacgggaagaccaagugcacggcgagcaacaagugccgcggcaucaucaagaccuucuccaacgggugcgacuacgucagcaacaagggcguggacaccguguccgucggcaacacccuguacuacgugaacaagcaggagggccagagccucuacgugaagggggagcccaucaucaacuucuacgacccgcuggucuuccccuccgacgaguucgacgccagcaucucccaggugaacgagaagaucaaccagagccuggccuucauccggaaguccgacgagcuccugcacaacgugaacgucggcaagagcaccacgaacaucaugaucaccaccaucaucaucgugaucaucgugauccugcugcuccugaucgccgucgggcuguuccucuacugcaaggcccgcugaggacuaguggaagcauuuuccuggcugauuaaaagaaauuacucagcuauggucaucuguuccuguuagaaggcuaugcagcauauuauauacuaugcgcauguuaugaaaugcauaauaaaaaauuuuaaaaaaucuaaaagaucuaaaaaaaaaaaaaaaaaaaaaaaaaaaaaaaaaaaaaaaaaaaaaaaaaaaaaaaaaaaaaaaaugcaucccccccccccccccccccccccccccccccaaaggcucuuuucagagccaccagaauu

SEQ ID NO: 19589 - RNA, 1919 nt, Artificial Sequence
  mRNA product Design c-4 comprising derived and/or modified sequence from HRSV(Memphis-37)__AIY60640.1__F-del_DSCav1_mut8 (opt1)
gggagaguccgcucagccagguugcagaagcggcuuagcguguguccuaaucuucucucugcguguagguaggccugugccgcaaacaagcuuaccauggagcugcccauccucaagaccaacgccaucaccacgauccuggccgcggugacccugugcuucgccagcucccagaacaucaccgaggaguucuaccagagcacgugcuccgccgucagcaagggcuaccucggggcccugcgcaccggcugguacaccuccgugaucaccaucgagcugagcaacaucaaggagaucaagugcaacgggaccgacgccaaggugaagcucaucaagcaggagcuggacaaguacaagaacgcggucacggaccugcagcuccugaugcaguccaccccggccgccggcagcggguccgccaucgcgagcggcaucgccgugugcaaggugcugcaccucgagggcgaggucaacaagaucaagaacgcccugcuguccaccaacaaggccguggugagccucuccgggugcggcgucagcgugcugaccuucaaggugcuggaccucaagaacuacaucgacaagcagcugcugcccauccucaacaagcaguccugcagcauccccaacaucgagacggucaucgaguuccagcagaagaacaaccggcugcuggagaucacccgcgaguucuccgugaacgccggggugaccacccccgucagcacguacaugcucaccaacuccgagcugcugagccucaucaacgacaugccgaucaccaacgaccagaagaagcugaugagcaacaacgugcagaucgugcggcagcaguccuacagcaucaugugcaucaucaaggaggagguccuggcguacguggugcagcucccccuguacggcgucaucgacacccccugcuggaagcugcacacgagcccccucugcaccaccaacaccaaggagggguccaacaucugccugacgcgcaccgaccggggcugguacugcgacaacgccggcuccgugagcuucuucccgcaggccgagaccugcaaggugcaguccaaccgcgucuucugcgacaccaugaacagccugacgcuccccuccgaggugaaccugugcaacaucgacaucuucaaccccaaguacgacugcaagaucaugaccagcaagaccgacgucuccagcuccgugaucaccagccugggggccaucguguccugcuacggcaagacgaagugcaccgccagcaacaagugccgggggaucaucaagaccuucuccaacggcugcgacuacgucagcaacaagggcguggacaccguguccgucgggaacacgcucuacuacgugaacaagcaggagggccagagccuguacgugaagggggagcccaucaucaacuucuacgacccgcuggucuuccccagcgacgaguucgacgcguccaucagccaggugaacgagaagaucaaccagucccucgccuucauccgcaagagcgacgagcugcugcacaacgugaacgucggcaaguccaccaccaacaucaugaucaccaccaucaucaucgugaucaucgugauccuccugcugcucaucgccgucgggcuguuccuguacugcaaggcccggugaggacuaguggaagcauuuuccuggcugauuaaaagaaauuacucagcuauggucaucuguuccuguuagaaggcuaugcagcauauuauauacuaugcgcauguuaugaaaugcauaauaaaaaauuuuaaaaaaucuaaaagaucuaaaaaaaaaaaaaaaaaaaaaaaaaaaaaaaaaaaaaaaaaaaaaaaaaaaaaaaaaaaaaaaaugcaucccccccccccccccccccccccccccccccaaaggcucuuuucagagccaccagaauu

SEQ ID NO: 19590 - RNA, 1919 nt, Artificial Sequence
  mRNA product Design c-4 comprising derived and/or modified sequence from HRSV(Memphis-37)__AIY60640.1__F-del_DSCav1_mut8 (opt2)
gggagaguccgcucagccagguugcagaagcggcuuagcguguguccuaaucuucucucugcguguagguaggccugugccgcaaacaagcuuaccauggagcuccccauccucaagaccaacgccaucaccaccauccucgccgccgucacccucugcuucgccuccucccagaacaucaccgaggaguucuaccaguccaccugcuccgccgucuccaagggcuaccucggcgcccuccgcaccggcugguacaccuccgucaucaccaucgagcucuccaacaucaaggagaucaagugcaacggcaccgacgccaaggucaagcucaucaagcaggagcucgacaaguacaagaacgccgucaccgaccuccagcuccucaugcaguccacccccgccgccggcuccggcuccgccaucgccuccggcaucgccgucugcaagguccuccaccucgagggcgaggucaacaagaucaagaacgcccuccucuccaccaacaaggccgucgucucccucuccggcugcggcgucuccguccucaccuucaagguccucgaccucaagaacuacaucgacaagcagcuccuccccauccucaacaagcaguccugcuccauccccaacaucgagaccgucaucgaguuccagcagaagaacaaccgccuccucgagaucacccgcgaguucuccgucaacgccggcgucaccacccccgucuccaccuacaugcucaccaacuccgagcuccucucccucaucaacgacaugcccaucaccaacgaccagaagaagcucauguccaacaacguccagaucguccgccagcaguccuacuccaucaugugcaucaucaaggaggagguccucgccuacgucguccagcucccccucuacggcgucaucgacacccccugcuggaagcuccacaccuccccccucugcaccaccaacaccaaggagggcuccaacaucugccucacccgcaccgaccgcggcugguacugcgacaacgccggcuccgucuccuucuucccccaggccgagaccugcaagguccaguccaaccgcgucuucugcgacaccaugaacucccucacccuccccuccgaggucaaccucugcaacaucgacaucuucaaccccaaguacgacugcaagaucaugaccuccaagaccgacgucuccuccuccgucaucaccucccucggcgccaucgucuccugcuacggcaagaccaagugcaccgccuccaacaagugccgcggcaucaucaagaccuucuccaacggcugcgacuacgucuccaacaagggcgucgacaccgucuccgucggcaacacccucuacuacgucaacaagcaggagggccagucccucuacgucaagggcgagcccaucaucaacuucuacgacccccucgucuuccccuccgacgaguucgacgccuccaucucccaggucaacgagaagaucaaccagucccucgccuucauccgcaaguccgacgagcuccuccacaacgucaacgucggcaaguccaccaccaacaucaugaucaccaccaucaucaucgucaucaucgucauccuccuccuccucaucgccgucggccucuuccucuacugcaaggcccgcugaggacuaguggaagcauuuuccuggcugauuaaaagaaauuacucagcuauggucaucuguuccuguuagaaggcuaugcagcauauuauauacuaugcgcauguuaugaaaugcauaauaaaaaauuuuaaaaaaucuaaaagaucuaaaaaaaaaaaaaaaaaaaaaaaaaaaaaaaaaaaaaaaaaaaaaaaaaaaaaaaaaaaaaaaaugcaucccccccccccccccccccccccccccccccaaaggcucuuuucagagccaccagaauu

SEQ ID NO: 19591 - RNA, 1919 nt, Artificial Sequence
  mRNA product Design c-4 comprising derived and/or modified sequence from HRSV(Memphis-37)__AIY60640.1__F-del_DSCav1_mut8 (opt3)
gggagaguccgcucagccagguugcagaagcggcuuagcguguguccuaaucuucucucugcguguagguaggccugugccgcaaacaagcuuaccauggagcugcccauccucaagaccaacgccauuacaacuauacuugcugcagugacgcugugcuucgccagcucccagaauaucaccgaagaguuuuaccaaucuacauguucagcggucaguaaaggcuauuugggggcuuuaagaacuggaugguacaccagcguuauuacaaucgaacuguccaacauuaaggagaucaaaugcaaugguaccgacgccaaggugaaacuaauaaagcaggaacucgauaaguauaaaaacgcaguaacugaccugcagcuucugaugcagucuacuccugccgcuggcucggggucagcaaucgccagcggaauugcuguguguaaggucuugcaccucgagggcgaggugaauaaaaucaagaacgcccugcugaguaccaauaaagcgguugugucccucucugguugcggggucagcguguuaacguucaagguacuggaucuuaagaacuacauugacaaacaauugcugccaauccuaaauaagcaguccuguucaauaccgaacauugaaacuguuaucgaguuucagcagaaaaauaacaggcuccuggaaauuacccgggaguucagugugaaugcaggagucacaacucccgugagcaccuauaugcuuacaaacucugagcuguugucccucaucaaugauaugccuaucaccaacgaccaaaagaaacugaugucaaacaaugugcagauuguccgccagcagagcuacaguauaaugugcaucauuaaggaagagguuuuagccuaugugguacaacugccacucuacggcgugaucgauacgcccuguuggaaacuucauacuucuccucugugcacaaccaacacuaaggaaggcuccaauauauguuugacacgaaccgaccgugggugguacugcgauaacgcuggaagcgucucguuuuucccacaggccgagacguguaaggugcagucuaauagaguuuucugcgacaccaugaacucccuaacacugcccucagaagugaaucucugcaacauugauaucuucaauccuaaauaugacuguaagaucaugacaaguaaaaccgaugucagcuccucugugauuacaagccugggugcaaucguaucaugcuacggcaagacuaaauguaccgcuaguaacaagugcagggggauuauaaagacauuuuccaauggaugugacuauguuagcaacaaaggcguggacaccgucucuguggguaauacucuuuacuaugucaacaagcaagaggggcagucacuguacgugaaaggagagccaaucauuaauuucuaugauccguugguuuuucccagugacgaauuugaugccagcaucucccaggugaacgagaagaucaaccagucucucgcguuuauucggaaaucggacgaacuguuacacaauguaaacgucggcaagagcacgacaaauauaaugaucaccacuauuaucauugugaucauaguuauccugcuacuccugauugccgugggccuuuucuuguacugcaaggcacgcugaggacuaguggaagcauuuuccuggcugauuaaaagaaauuacucagcuauggucaucuguuccuguuagaaggcuaugcagcauauuauauacuaugcgcauguuaugaaaugcauaauaaaaaauuuuaaaaaaucuaaaagaucuaaaaaaaaaaaaaaaaaaaaaaaaaaaaaaaaaaaaaaaaaaaaaaaaaaaaaaaaaaaaaaaaugcaucccccccccccccccccccccccccccccccaaaggcucuuuucagagccaccagaauu

SEQ ID NO: 19592 - RNA, 1919 nt, Artificial Sequence
  mRNA product Design c-4 comprising derived and/or modified sequence from HRSV(Memphis-37)__AIY60640.1__F-del_DSCav1_mut8 (opt4)
gggagaguccgcucagccagguugcagaagcggcuuagcguguguccuaaucuucucucugcguguagguaggccugugccgcaaacaagcuuaccauggagcugcccauccugaagaccaacgccaucaccaccauccuggccgccgugacccugugcuucgccagcagccagaacaucaccgaggaguucuaccagagcaccugcagcgccgugagcaagggcuaccugggcgcccugagaaccggcugguacaccagcgugaucaccaucgagcugagcaacaucaaggagaucaagugcaacggcaccgacgccaaggugaagcugaucaagcaggagcuggacaaguacaagaacgccgugaccgaccugcagcugcugaugcagagcacccccgccgccggcagcggcagcgccaucgccagcggcaucgccgugugcaaggugcugcaccuggagggcgaggugaacaagaucaagaacgcccugcugagcaccaacaaggccguggugagccugagcggcugcggcgugagcgugcugaccuucaaggugcuggaccugaagaacuacaucgacaagcagcugcugcccauccugaacaagcagagcugcagcauccccaacaucgagaccgugaucgaguuccagcagaagaacaacagacugcuggagaucaccagagaguucagcgugaacgccggcgugaccacccccgugagcaccuacaugcugaccaacagcgagcugcugagccugaucaacgacaugcccaucaccaacgaccagaagaagcugaugagcaacaacgugcagaucgugagacagcagagcuacagcaucaugugcaucaucaaggaggaggugcuggccuacguggugcagcugccccuguacggcgugaucgacacccccugcuggaagcugcacaccagcccccugugcaccaccaacaccaaggagggcagcaacaucugccugaccagaaccgacagaggcugguacugcgacaacgccggcagcgugagcuucuucccccaggccgagaccugcaaggugcagagcaacagaguguucugcgacaccaugaacagccugacccugcccagcgaggugaaccugugcaacaucgacaucuucaaccccaaguacgacugcaagaucaugaccagcaagaccgacgugagcagcagcgugaucaccagccugggcgccaucgugagcugcuacggcaagaccaagugcaccgccagcaacaagugcagaggcaucaucaagaccuucagcaacggcugcgacuacgugagcaacaagggcguggacaccgugagcgugggcaacacccuguacuacgugaacaagcaggagggccagagccuguacgugaagggcgagcccaucaucaacuucuacgacccccugguguuccccagcgacgaguucgacgccagcaucagccaggugaacgagaagaucaaccagagccuggccuucaucagaaagagcgacgagcugcugcacaacgugaacgugggcaagagcaccaccaacaucaugaucaccaccaucaucaucgugaucaucgugauccugcugcugcugaucgccgugggccuguuccuguacugcaaggccagaugaggacuaguggaagcauuuuccuggcugauuaaaagaaauuacucagcuauggucaucuguuccuguuagaaggcuaugcagcauauuauauacuaugcgcauguuaugaaaugcauaauaaaaaauuuuaaaaaaucuaaaagaucuaaaaaaaaaaaaaaaaaaaaaaaaaaaaaaaaaaaaaaaaaaaaaaaaaaaaaaaaaaaaaaaaugcaucccccccccccccccccccccccccccccccaaaggcucuuuucagagccaccagaauu

SEQ ID NO: 19593 - RNA, 1919 nt, Artificial Sequence
  mRNA product Design c-4 comprising derived and/or modified sequence from HRSV(Memphis-37)__AIY60640.1__F-del_DSCav1_mut8 (opt5)
gggagaguccgcucagccagguugcagaagcggcuuagcguguguccuaaucuucucucugcguguagguaggccugugccgcaaacaagcuuaccauggagcugcccauccucaagaccaacgccauuacaacgauccuggcugccgugacccuuugcuucgcgagcucccagaauauuacagaagaguuuuaccaaucuaccuguagcgcugucuccaaaggcuaucugggggcccucagaacaggaugguacaccucuguuaucacaauugaacugagcaacaucaaggagaucaaaugcaauggcaccgacgccaaggugaaacuuauuaagcaggaacuggauaaguauaaaaacgcugugacggaccuccagcugcugaugcaguccaccccugccgcugggucuggaagcgccaucgcguccggcauugccgucuguaaggugcuccaccuggagggggagguuaauaaaaucaagaacgcccuucugagcacaaauaaagcuguggucucucucuccggaugcggcgugagcguucugaccuucaaggugcuugaucugaagaacuacauugacaaacaacuccugccgauccugaauaagcagucuuguuccauucccaacaucgaaacagucaucgaguuucagcagaaaaauaaccggcuccuggaaauuacccgcgaguucagcgugaaugcuggcgugacgacaccugucucuaccuauaugcuuacaaacuccgagcugcucagccugaucaaugauaugcccauuaccaacgaccaaaagaaacuuauguccaacaauguucagaucgugagacagcagucuuacagcauuaugugcaucaucaaggaagaggugcuggccuaugucgugcaacucccucuguacgggguuauugauacccccuguuggaaacugcauacauccccucucugcacgaccaacacaaaggaaggaagcaauaucugucugacccggacagaccgcggcugguacugcgauaacgcggggucuguguccuuuuucccgcaggccgagaccuguaagguccagagcaauagaguguuuugcgacacgaugaacucucuuacacugcccagcgaaguuaaucucugcaacauugauaucuucaauccuaaauaugacuguaagauuaugaccuccaaaaccgaugugucuagcuccgucaucacaagccugggagcuaucgugucuugcuacggcaagaccaaauguacagccuccaacaagugccgggggauuaucaagacguuuagcaauggaugugacuaugucucuaacaaaggcguggacaccguuuccgugggcaauacacuuuacuaugucaacaagcaagaggggcagagccuguacgugaaaggagagcccauuaucaauuucuaugauccucucguuuuucccuccgacgaguucgaugcuucuauuagccaggugaacgaaaagaucaaccagucccuggccuuuauucgcaaaucugacgaacugcuccacaaugucaacgugggcaagagcaccacaaauaucaugaucaccacgauuaucauugugaucauuguuauccugcuucugcucaucgccgucgggcuguuccuguacugcaaggcuagaugaggacuaguggaagcauuuuccuggcugauuaaaagaaauuacucagcuauggucaucuguuccuguuagaaggcuaugcagcauauuauauacuaugcgcauguuaugaaaugcauaauaaaaaauuuuaaaaaaucuaaaagaucuaaaaaaaaaaaaaaaaaaaaaaaaaaaaaaaaaaaaaaaaaaaaaaaaaaaaaaaaaaaaaaaaugcaucccccccccccccccccccccccccccccccaaaggcucuuuucagagccaccagaauu

SEQ ID NO: 19594 - RNA, 1919 nt, Artificial Sequence
  mRNA product Design c-4 comprising derived and/or modified sequence from HRSV(Memphis-37)__AIY60640.1__F-del_DSCav1_mut8 (opt6)
gggagaguccgcucagccagguugcagaagcggcuuagcguguguccuaaucuucucucugcguguagguaggccugugccgcaaacaagcuuaccauggaacuacccauacuaaaaacaaacgcaauuacaacaauacuugccgcaguaaccuuaugcuuugccucaucccaaaacauaacagaagaauuuuaucaaucaacaugcuccgcaguaucaaaaggauaccuaggcgcucuaagaacaggaugguacacauccguaaucacaauagaacuauccaauauaaaagaaauaaaauguaauggaacagaugcaaaaguuaaauuaauaaaacaagaacuagacaaauacaaaaacgcaguuaccgaucuccaacuauuaaugcaaucaacaccagcugcaggaaguggaagcgccauagcaagcggaauagcagucugcaaaguauuacaucuugaaggcgaaguaaacaaaaucaaaaaugcccuccucucaacaaacaaagcuguaguaucccuaucaggaugcgguguaucuguucuuacauuuaaaguacucgaucuaaaaaacuacaucgauaaacaguuacuuccaauacucaacaaacaaucauguagcauaccaaacauagaaacaguaauagaauuucaacaaaaaaacaaucgacuacucgaaauaacuagagaauuuucuguaaacgcuggaguaaccacaccagugucuaccuauaugcuuacaaauagcgaacuccuaucacuaaucaaugacaugccaauaacaaaugaccagaaaaaacucaugucaaauaacguacaaauaguacgacaacaaagcuacuccauaaugugcauaaucaaagaagaaguauuagccuacguuguucaacuaccauuauauggaguuauagacacuccaugcuggaaauuacauacaagcccacucuguacaacaaacacaaaagaaggcucaaacauaugcuuaacaagaacagauagaggaugguacugcgauaacgcaggcucagucucauuuuuuccacaagccgaaaccugcaaaguacaaucaaauagaguuuuuugcgacacaaugaacucacucacucuaccaagugaaguaaaucucuguaauaucgacauauucaacccaaaauaugacugcaaaauaaugacaucuaaaaccgauguauccucaagcguaaucacaucauuaggagcuauaguuuccugcuacgguaaaacaaaaugcacagcauccaacaaaugucgcgguaucaucaaaacauucuccaacggaugugauuacguaucaaacaaaggugucgacaccguaagcguaggcaacacuuuauacuauguaaacaaacaagaaggacaaagucuauauguaaaaggagaaccaauaauaaacuucuaugacccccuaguauucccuuccgacgaauuugaugcaagcauuucacaaguuaacgaaaaaaucaaucaaucccuugcuuucauaagaaaaucagacgaauuacuacacaacguaaacguaggaaaaagcacaacaaauaucaugauuacaacaauaauaauuguaauaauaguaauacuccucuuacuuauagcagucggcuuauuccuuuacugcaaagcaagauaaggacuaguggaagcauuuuccuggcugauuaaaagaaauuacucagcuauggucaucuguuccuguuagaaggcuaugcagcauauuauauacuaugcgcauguuaugaaaugcauaauaaaaaauuuuaaaaaaucuaaaagaucuaaaaaaaaaaaaaaaaaaaaaaaaaaaaaaaaaaaaaaaaaaaaaaaaaaaaaaaaaaaaaaaaugcaucccccccccccccccccccccccccccccccaaaggcucuuuucagagccaccagaauu

SEQ ID NO: 19595 - RNA, 1919 nt, Artificial Sequence
  mRNA product Design c-4 comprising derived and/or modified sequence from HRSV(Memphis-37)__AIY60640.1__F-del_DSCav1_mut8 (opt11)
gggagaguccgcucagccagguugcagaagcggcuuagcguguguccuaaucuucucucugcguguagguaggccugugccgcaaacaagcuuaccauggaacuccccauccuaaaaaccaacgcaaucaccaccauccucgccgccguaacacucugcuuugcaagcucccaaaacaucaccgaagaauuuuaccaaucuaccugcagcgccguaucuaaaggauaccuaggagcccucagaaccgguugguacaccucugucaucacaauagaacucuccaacaucaaagaaaucaaaugcaacggcaccgacgccaaagucaaacucaucaaacaagaacucgacaaauauaaaaacgccguaaccgaccuccaacuccucaugcaauccacccccgccgccggcaguggcuccgcuaucgccuccggaaucgccguuugcaaaguccugcaccuagaaggcgaagucaacaaaaucaaaaacgcccugcucucaaccaacaaagcugucguaagccucuccggcugcggagucuccguccuuaccuucaaaguacucgaccuuaaaaacuacaucgacaaacaacuucuccccauacucaauaaacaauccugcuccauacccaacaucgaaacagucaucgaguuccaacagaaaaauaaccgccuccucgaaauaacccgcgaguucuccgucaacgcaggcgucaccaccccagucuccaccuacaugcugacaaacuccgaacuccuaucccucaucaacgacaugcccaucaccaacgaccaaaagaaacucaugagcaauaacguccaaaucguacgacaacaauccuacagcaucauguguaucaucaaagaagaaguacucgccuacgucguccaacucccacuauacggcgucaucgacacaccaugcuggaaacuucacaccuccccacucugcaccacaaacacaaaagaaggcuccaacaucugccuuacccgaaccgaccgcgggugguacugcgacaacgccggaucagucucguucuuuccccaagccgaaaccugcaaaguacaaucaaaucgcgucuucugcgacaccaugaacuccuuaacacuaccauccgaaguaaaccucugcaacauagacaucuucaacccaaaauacgacugcaaaaucaugaccuccaaaaccgacguauccuccuccguaaucaccagccucggcgcaauagucucaugcuacggcaaaaccaaaugcaccgccuccaacaaaugccgcggcaucauaaaaacuuucucuaacggaugcgacuacgucagcaacaaaggcgucgacaccguauccguagguaauacacuuuacuacgucaauaaacaagaaggccaaucccucuacgucaaaggagaacccaucauaaacuucuacgacccccucgucuuccccuccgacgaguucgacgccuccaucagccaggucaacgaaaagaucaaccaaucacucgccuucauccgcaaaagcgacgaacuccuccacaacguaaacgucggcaaauccacaaccaacauaaugaucaccacuaucaucaucgugauaaucgucauuuuacuucuccucaucgccguaggccucuuccuauacugcaaagcccgcuaaggacuaguggaagcauuuuccuggcugauuaaaagaaauuacucagcuauggucaucuguuccuguuagaaggcuaugcagcauauuauauacuaugcgcauguuaugaaaugcauaauaaaaaauuuuaaaaaaucuaaaagaucuaaaaaaaaaaaaaaaaaaaaaaaaaaaaaaaaaaaaaaaaaaaaaaaaaaaaaaaaaaaaaaaaugcaucccccccccccccccccccccccccccccccaaaggcucuuuucagagccaccagaauu

SEQ ID NO: 19596 - RNA, 1837 nt, Artificial Sequence
  mRNA product Design c-5 comprising derived and/or modified sequence from HRSV(Memphis-37)__AIY60640.1__F-del_DSCav1_mut8 (opt1)
gggagagcggcucggccauuuugucccagucaguccggaggcugcggcugcagaaguaccgccugcggaguaacugcaaagaagcuuaccauggagcugcccauccucaagaccaacgccaucaccacgauccuggccgcggugacccugugcuucgccagcucccagaacaucaccgaggaguucuaccagagcacgugcuccgccgucagcaagggcuaccucggcgcccugcgcaccgggugguacaccagcgugaucaccaucgagcuguccaacaucaaggagaucaagugcaacggcaccgacgccaaggugaagcucaucaagcaggagcuggacaaguacaagaacgcggucacggaccugcagcuccugaugcagagcaccccggccgccggcuccgggagcgcgaucgccuccggcaucgccgucugcaaggugcugcaccucgagggcgaggugaacaagaucaagaacgcccugcuguccaccaacaaggccgucgugagccucuccggcugcggggugagcguccugaccuucaaggugcuggaccucaagaacuacaucgacaagcagcugcugcccauccugaacaagcagagcugcuccauccccaacaucgagaccgucaucgaguuccagcagaagaacaaccgccuccuggagaucacgcgggaguucagcgugaacgcgggcgugaccacccccgucuccaccuacaugcugacgaacagcgagcuccugucccugaucaacgacaugccgaucaccaacgaccagaagaagcucaugagcaacaacgugcagaucgugcgccagcaguccuacagcaucaugugcaucaucaaggaggagguccuggccuacguggugcagcugccccucuacggggucaucgacacccccugcuggaagcugcacaccagcccccugugcacgaccaacaccaaggagggcuccaacaucugccucacccggacggaccgcgggugguacugcgacaacgccggcagcguguccuucuucccgcaggccgagaccugcaagguccagagcaaccggguguucugcgacaccaugaacucccugacccugcccagcgaggugaaccucugcaacaucgacaucuucaaccccaaguacgacugcaagaucaugacguccaagaccgacgucagcuccagcgugaucaccucccugggcgccaucgugagcugcuacgggaagaccaagugcacggcgagcaacaagugccgcggcaucaucaagaccuucuccaacgggugcgacuacgucagcaacaagggcguggacaccguguccgucggcaacacccuguacuacgugaacaagcaggagggccagagccucuacgugaagggggagcccaucaucaacuucuacgacccgcuggucuuccccuccgacgaguucgacgccagcaucucccaggugaacgagaagaucaaccagagccuggccuucauccggaaguccgacgagcuccugcacaacgugaacgucggcaagagcaccacgaacaucaugaucaccaccaucaucaucgugaucaucgugauccugcugcuccugaucgccgucgggcuguuccucuacugcaaggcccgcugaggacuagucccuguucccagagcccacuuuuuuuucuuuuuuugaaauaaaauagccugucuuucagaucuaaaaaaaaaaaaaaaaaaaaaaaaaaaaaaaaaaaaaaaaaaaaaaaaaaaaaaaaaaaaaaaaugcaucccccccccccccccccccccccccccccccaaaggcucuuuucagagccaccagaauu

SEQ ID NO: 19597 - RNA, 1837 nt, Artificial Sequence
  mRNA product Design c-5 comprising derived and/or modified sequence from HRSV(Memphis-37)__AIY60640.1__F-del_DSCav1_mut8 (opt1)
gggagagcggcucggccauuuugucccagucaguccggaggcugcggcugcagaaguaccgccugcggaguaacugcaaagaagcuuaccauggagcugcccauccucaagaccaacgccaucaccacgauccuggccgcggugacccugugcuucgccagcucccagaacaucaccgaggaguucuaccagagcacgugcuccgccgucagcaagggcuaccucggggcccugcgcaccggcugguacaccuccgugaucaccaucgagcugagcaacaucaaggagaucaagugcaacgggaccgacgccaaggugaagcucaucaagcaggagcuggacaaguacaagaacgcggucacggaccugcagcuccugaugcaguccaccccggccgccggcagcggguccgccaucgcgagcggcaucgccgugugcaaggugcugcaccucgagggcgaggucaacaagaucaagaacgcccugcuguccaccaacaaggccguggugagccucuccgggugcggcgucagcgugcugaccuucaaggugcuggaccucaagaacuacaucgacaagcagcugcugcccauccucaacaagcaguccugcagcauccccaacaucgagacggucaucgaguuccagcagaagaacaaccggcugcuggagaucacccgcgaguucuccgugaacgccggggugaccacccccgucagcacguacaugcucaccaacuccgagcugcugagccucaucaacgacaugccgaucaccaacgaccagaagaagcugaugagcaacaacgugcagaucgugcggcagcaguccuacagcaucaugugcaucaucaaggaggagguccuggcguacguggugcagcucccccuguacggcgucaucgacacccccugcuggaagcugcacacgagcccccucugcaccaccaacaccaaggagggguccaacaucugccugacgcgcaccgaccggggcugguacugcgacaacgccggcuccgugagcuucuucccgcaggccgagaccugcaaggugcaguccaaccgcgucuucugcgacaccaugaacagccugacgcuccccuccgaggugaaccugugcaacaucgacaucuucaaccccaaguacgacugcaagaucaugaccagcaagaccgacgucuccagcuccgugaucaccagccugggggccaucguguccugcuacggcaagacgaagugcaccgccagcaacaagugccgggggaucaucaagaccuucuccaacggcugcgacuacgucagcaacaagggcguggacaccguguccgucgggaacacgcucuacuacgugaacaagcaggagggccagagccuguacgugaagggggagcccaucaucaacuucuacgacccgcuggucuuccccagcgacgaguucgacgcguccaucagccaggugaacgagaagaucaaccagucccucgccuucauccgcaagagcgacgagcugcugcacaacgugaacgucggcaaguccaccaccaacaucaugaucaccaccaucaucaucgugaucaucgugauccuccugcugcucaucgccgucgggcuguuccuguacugcaaggcccggugaggacuagucccuguucccagagcccacuuuuuuuucuuuuuuugaaauaaaauagccugucuuucagaucuaaaaaaaaaaaaaaaaaaaaaaaaaaaaaaaaaaaaaaaaaaaaaaaaaaaaaaaaaaaaaaaaugcaucccccccccccccccccccccccccccccccaaaggcucuuuucagagccaccagaauu

SEQ ID NO: 19598 - RNA, 1837 nt, Artificial Sequence
  mRNA product Design c-5 comprising derived and/or modified sequence from HRSV(Memphis-37)__AIY60640.1__F-del_DSCav1_mut8 (opt2)
gggagagcggcucggccauuuugucccagucaguccggaggcugcggcugcagaaguaccgccugcggaguaacugcaaagaagcuuaccauggagcuccccauccucaagaccaacgccaucaccaccauccucgccgccgucacccucugcuucgccuccucccagaacaucaccgaggaguucuaccaguccaccugcuccgccgucuccaagggcuaccucggcgcccuccgcaccggcugguacaccuccgucaucaccaucgagcucuccaacaucaaggagaucaagugcaacggcaccgacgccaaggucaagcucaucaagcaggagcucgacaaguacaagaacgccgucaccgaccuccagcuccucaugcaguccacccccgccgccggcuccggcuccgccaucgccuccggcaucgccgucugcaagguccuccaccucgagggcgaggucaacaagaucaagaacgcccuccucuccaccaacaaggccgucgucucccucuccggcugcggcgucuccguccucaccuucaagguccucgaccucaagaacuacaucgacaagcagcuccuccccauccucaacaagcaguccugcuccauccccaacaucgagaccgucaucgaguuccagcagaagaacaaccgccuccucgagaucacccgcgaguucuccgucaacgccggcgucaccacccccgucuccaccuacaugcucaccaacuccgagcuccucucccucaucaacgacaugcccaucaccaacgaccagaagaagcucauguccaacaacguccagaucguccgccagcaguccuacuccaucaugugcaucaucaaggaggagguccucgccuacgucguccagcucccccucuacggcgucaucgacacccccugcuggaagcuccacaccuccccccucugcaccaccaacaccaaggagggcuccaacaucugccucacccgcaccgaccgcggcugguacugcgacaacgccggcuccgucuccuucuucccccaggccgagaccugcaagguccaguccaaccgcgucuucugcgacaccaugaacucccucacccuccccuccgaggucaaccucugcaacaucgacaucuucaaccccaaguacgacugcaagaucaugaccuccaagaccgacgucuccuccuccgucaucaccucccucggcgccaucgucuccugcuacggcaagaccaagugcaccgccuccaacaagugccgcggcaucaucaagaccuucuccaacggcugcgacuacgucuccaacaagggcgucgacaccgucuccgucggcaacacccucuacuacgucaacaagcaggagggccagucccucuacgucaagggcgagcccaucaucaacuucuacgacccccucgucuuccccuccgacgaguucgacgccuccaucucccaggucaacgagaagaucaaccagucccucgccuucauccgcaaguccgacgagcuccuccacaacgucaacgucggcaaguccaccaccaacaucaugaucaccaccaucaucaucgucaucaucgucauccuccuccuccucaucgccgucggccucuuccucuacugcaaggcccgcugaggacuagucccuguucccagagcccacuuuuuuuucuuuuuuugaaauaaaauagccugucuuucagaucuaaaaaaaaaaaaaaaaaaaaaaaaaaaaaaaaaaaaaaaaaaaaaaaaaaaaaaaaaaaaaaaaugcaucccccccccccccccccccccccccccccccaaaggcucuuuucagagccaccagaauu

SEQ ID NO: 19599 - RNA, 1837 nt, Artificial Sequence
  mRNA product Design c-5 comprising derived and/or modified sequence from HRSV(Memphis-37)__AIY60640.1__F-del_DSCav1_mut8 (opt3)
gggagagcggcucggccauuuugucccagucaguccggaggcugcggcugcagaaguaccgccugcggaguaacugcaaagaagcuuaccauggagcugcccauccucaagaccaacgccauuacaacuauacuugcugcagugacgcugugcuucgccagcucccagaauaucaccgaagaguuuuaccaaucuacauguucagcggucaguaaaggcuauuugggggcuuuaagaacuggaugguacaccagcguuauuacaaucgaacuguccaacauuaaggagaucaaaugcaaugguaccgacgccaaggugaaacuaauaaagcaggaacucgauaaguauaaaaacgcaguaacugaccugcagcuucugaugcagucuacuccugccgcuggcucggggucagcaaucgccagcggaauugcuguguguaaggucuugcaccucgagggcgaggugaauaaaaucaagaacgcccugcugaguaccaauaaagcgguugugucccucucugguugcggggucagcguguuaacguucaagguacuggaucuuaagaacuacauugacaaacaauugcugccaauccuaaauaagcaguccuguucaauaccgaacauugaaacuguuaucgaguuucagcagaaaaauaacaggcuccuggaaauuacccgggaguucagugugaaugcaggagucacaacucccgugagcaccuauaugcuuacaaacucugagcuguugucccucaucaaugauaugccuaucaccaacgaccaaaagaaacugaugucaaacaaugugcagauuguccgccagcagagcuacaguauaaugugcaucauuaaggaagagguuuuagccuaugugguacaacugccacucuacggcgugaucgauacgcccuguuggaaacuucauacuucuccucugugcacaaccaacacuaaggaaggcuccaauauauguuugacacgaaccgaccgugggugguacugcgauaacgcuggaagcgucucguuuuucccacaggccgagacguguaaggugcagucuaauagaguuuucugcgacaccaugaacucccuaacacugcccucagaagugaaucucugcaacauugauaucuucaauccuaaauaugacuguaagaucaugacaaguaaaaccgaugucagcuccucugugauuacaagccugggugcaaucguaucaugcuacggcaagacuaaauguaccgcuaguaacaagugcagggggauuauaaagacauuuuccaauggaugugacuauguuagcaacaaaggcguggacaccgucucuguggguaauacucuuuacuaugucaacaagcaagaggggcagucacuguacgugaaaggagagccaaucauuaauuucuaugauccguugguuuuucccagugacgaauuugaugccagcaucucccaggugaacgagaagaucaaccagucucucgcguuuauucggaaaucggacgaacuguuacacaauguaaacgucggcaagagcacgacaaauauaaugaucaccacuauuaucauugugaucauaguuauccugcuacuccugauugccgugggccuuuucuuguacugcaaggcacgcugaggacuagucccuguucccagagcccacuuuuuuuucuuuuuuugaaauaaaauagccugucuuucagaucuaaaaaaaaaaaaaaaaaaaaaaaaaaaaaaaaaaaaaaaaaaaaaaaaaaaaaaaaaaaaaaaaugcaucccccccccccccccccccccccccccccccaaaggcucuuuucagagccaccagaauu

SEQ ID NO: 19600 - RNA, 1837 nt, Artificial Sequence
  mRNA product Design c-5 comprising derived and/or modified sequence from HRSV(Memphis-37)__AIY60640.1__F-del_DSCav1_mut8 (opt4)
gggagagcggcucggccauuuugucccagucaguccggaggcugcggcugcagaaguaccgccugcggaguaacugcaaagaagcuuaccauggagcugcccauccugaagaccaacgccaucaccaccauccuggccgccgugacccugugcuucgccagcagccagaacaucaccgaggaguucuaccagagcaccugcagcgccgugagcaagggcuaccugggcgcccugagaaccggcugguacaccagcgugaucaccaucgagcugagcaacaucaaggagaucaagugcaacggcaccgacgccaaggugaagcugaucaagcaggagcuggacaaguacaagaacgccgugaccgaccugcagcugcugaugcagagcacccccgccgccggcagcggcagcgccaucgccagcggcaucgccgugugcaaggugcugcaccuggagggcgaggugaacaagaucaagaacgcccugcugagcaccaacaaggccguggugagccugagcggcugcggcgugagcgugcugaccuucaaggugcuggaccugaagaacuacaucgacaagcagcugcugcccauccugaacaagcagagcugcagcauccccaacaucgagaccgugaucgaguuccagcagaagaacaacagacugcuggagaucaccagagaguucagcgugaacgccggcgugaccacccccgugagcaccuacaugcugaccaacagcgagcugcugagccugaucaacgacaugcccaucaccaacgaccagaagaagcugaugagcaacaacgugcagaucgugagacagcagagcuacagcaucaugugcaucaucaaggaggaggugcuggccuacguggugcagcugccccuguacggcgugaucgacacccccugcuggaagcugcacaccagcccccugugcaccaccaacaccaaggagggcagcaacaucugccugaccagaaccgacagaggcugguacugcgacaacgccggcagcgugagcuucuucccccaggccgagaccugcaaggugcagagcaacagaguguucugcgacaccaugaacagccugacccugcccagcgaggugaaccugugcaacaucgacaucuucaaccccaaguacgacugcaagaucaugaccagcaagaccgacgugagcagcagcgugaucaccagccugggcgccaucgugagcugcuacggcaagaccaagugcaccgccagcaacaagugcagaggcaucaucaagaccuucagcaacggcugcgacuacgugagcaacaagggcguggacaccgugagcgugggcaacacccuguacuacgugaacaagcaggagggccagagccuguacgugaagggcgagcccaucaucaacuucuacgacccccugguguuccccagcgacgaguucgacgccagcaucagccaggugaacgagaagaucaaccagagccuggccuucaucagaaagagcgacgagcugcugcacaacgugaacgugggcaagagcaccaccaacaucaugaucaccaccaucaucaucgugaucaucgugauccugcugcugcugaucgccgugggccuguuccuguacugcaaggccagaugaggacuagucccuguucccagagcccacuuuuuuuucuuuuuuugaaauaaaauagccugucuuucagaucuaaaaaaaaaaaaaaaaaaaaaaaaaaaaaaaaaaaaaaaaaaaaaaaaaaaaaaaaaaaaaaaaugcaucccccccccccccccccccccccccccccccaaaggcucuuuucagagccaccagaauu

SEQ ID NO: 19601 - RNA, 1837 nt, Artificial Sequence
  mRNA product Design c-5 comprising derived and/or modified sequence from HRSV(Memphis-37)__AIY60640.1__F-del_DSCav1_mut8 (opt5)
gggagagcggcucggccauuuugucccagucaguccggaggcugcggcugcagaaguaccgccugcggaguaacugcaaagaagcuuaccauggagcugcccauccucaagaccaacgccauuacaacgauccuggcugccgugacccuuugcuucgcgagcucccagaauauuacagaagaguuuuaccaaucuaccuguagcgcugucuccaaaggcuaucugggggcccucagaacaggaugguacaccucuguuaucacaauugaacugagcaacaucaaggagaucaaaugcaauggcaccgacgccaaggugaaacuuauuaagcaggaacuggauaaguauaaaaacgcugugacggaccuccagcugcugaugcaguccaccccugccgcugggucuggaagcgccaucgcguccggcauugccgucuguaaggugcuccaccuggagggggagguuaauaaaaucaagaacgcccuucugagcacaaauaaagcuguggucucucucuccggaugcggcgugagcguucugaccuucaaggugcuugaucugaagaacuacauugacaaacaacuccugccgauccugaauaagcagucuuguuccauucccaacaucgaaacagucaucgaguuucagcagaaaaauaaccggcuccuggaaauuacccgcgaguucagcgugaaugcuggcgugacgacaccugucucuaccuauaugcuuacaaacuccgagcugcucagccugaucaaugauaugcccauuaccaacgaccaaaagaaacuuauguccaacaauguucagaucgugagacagcagucuuacagcauuaugugcaucaucaaggaagaggugcuggccuaugucgugcaacucccucuguacgggguuauugauacccccuguuggaaacugcauacauccccucucugcacgaccaacacaaaggaaggaagcaauaucugucugacccggacagaccgcggcugguacugcgauaacgcggggucuguguccuuuuucccgcaggccgagaccuguaagguccagagcaauagaguguuuugcgacacgaugaacucucuuacacugcccagcgaaguuaaucucugcaacauugauaucuucaauccuaaauaugacuguaagauuaugaccuccaaaaccgaugugucuagcuccgucaucacaagccugggagcuaucgugucuugcuacggcaagaccaaauguacagccuccaacaagugccgggggauuaucaagacguuuagcaauggaugugacuaugucucuaacaaaggcguggacaccguuuccgugggcaauacacuuuacuaugucaacaagcaagaggggcagagccuguacgugaaaggagagcccauuaucaauuucuaugauccucucguuuuucccuccgacgaguucgaugcuucuauuagccaggugaacgaaaagaucaaccagucccuggccuuuauucgcaaaucugacgaacugcuccacaaugucaacgugggcaagagcaccacaaauaucaugaucaccacgauuaucauugugaucauuguuauccugcuucugcucaucgccgucgggcuguuccuguacugcaaggcuagaugaggacuagucccuguucccagagcccacuuuuuuuucuuuuuuugaaauaaaauagccugucuuucagaucuaaaaaaaaaaaaaaaaaaaaaaaaaaaaaaaaaaaaaaaaaaaaaaaaaaaaaaaaaaaaaaaaugcaucccccccccccccccccccccccccccccccaaaggcucuuuucagagccaccagaauu

SEQ ID NO: 19602 - RNA, 1837 nt, Artificial Sequence
  mRNA product Design c-5 comprising derived and/or modified sequence from HRSV(Memphis-37)__AIY60640.1__F-del_DSCav1_mut8 (opt6)
gggagagcggcucggccauuuugucccagucaguccggaggcugcggcugcagaaguaccgccugcggaguaacugcaaagaagcuuaccauggaacuacccauacuaaaaacaaacgcaauuacaacaauacuugccgcaguaaccuuaugcuuugccucaucccaaaacauaacagaagaauuuuaucaaucaacaugcuccgcaguaucaaaaggauaccuaggcgcucuaagaacaggaugguacacauccguaaucacaauagaacuauccaauauaaaagaaauaaaauguaauggaacagaugcaaaaguuaaauuaauaaaacaagaacuagacaaauacaaaaacgcaguuaccgaucuccaacuauuaaugcaaucaacaccagcugcaggaaguggaagcgccauagcaagcggaauagcagucugcaaaguauuacaucuugaaggcgaaguaaacaaaaucaaaaaugcccuccucucaacaaacaaagcuguaguaucccuaucaggaugcgguguaucuguucuuacauuuaaaguacucgaucuaaaaaacuacaucgauaaacaguuacuuccaauacucaacaaacaaucauguagcauaccaaacauagaaacaguaauagaauuucaacaaaaaaacaaucgacuacucgaaauaacuagagaauuuucuguaaacgcuggaguaaccacaccagugucuaccuauaugcuuacaaauagcgaacuccuaucacuaaucaaugacaugccaauaacaaaugaccagaaaaaacucaugucaaauaacguacaaauaguacgacaacaaagcuacuccauaaugugcauaaucaaagaagaaguauuagccuacguuguucaacuaccauuauauggaguuauagacacuccaugcuggaaauuacauacaagcccacucuguacaacaaacacaaaagaaggcucaaacauaugcuuaacaagaacagauagaggaugguacugcgauaacgcaggcucagucucauuuuuuccacaagccgaaaccugcaaaguacaaucaaauagaguuuuuugcgacacaaugaacucacucacucuaccaagugaaguaaaucucuguaauaucgacauauucaacccaaaauaugacugcaaaauaaugacaucuaaaaccgauguauccucaagcguaaucacaucauuaggagcuauaguuuccugcuacgguaaaacaaaaugcacagcauccaacaaaugucgcgguaucaucaaaacauucuccaacggaugugauuacguaucaaacaaaggugucgacaccguaagcguaggcaacacuuuauacuauguaaacaaacaagaaggacaaagucuauauguaaaaggagaaccaauaauaaacuucuaugacccccuaguauucccuuccgacgaauuugaugcaagcauuucacaaguuaacgaaaaaaucaaucaaucccuugcuuucauaagaaaaucagacgaauuacuacacaacguaaacguaggaaaaagcacaacaaauaucaugauuacaacaauaauaauuguaauaauaguaauacuccucuuacuuauagcagucggcuuauuccuuuacugcaaagcaagauaaggacuagucccuguucccagagcccacuuuuuuuucuuuuuuugaaauaaaauagccugucuuucagaucuaaaaaaaaaaaaaaaaaaaaaaaaaaaaaaaaaaaaaaaaaaaaaaaaaaaaaaaaaaaaaaaaugcaucccccccccccccccccccccccccccccccaaaggcucuuuucagagccaccagaauu

SEQ ID NO: 19603 - RNA, 1837 nt, Artificial Sequence
  mRNA product Design c-5 comprising derived and/or modified sequence from HRSV(Memphis-37)__AIY60640.1__F-del_DSCav1_mut8 (opt11)
gggagagcggcucggccauuuugucccagucaguccggaggcugcggcugcagaaguaccgccugcggaguaacugcaaagaagcuuaccauggaacuccccauccuaaaaaccaacgcaaucaccaccauccucgccgccguaacacucugcuuugcaagcucccaaaacaucaccgaagaauuuuaccaaucuaccugcagcgccguaucuaaaggauaccuaggagcccucagaaccgguugguacaccucugucaucacaauagaacucuccaacaucaaagaaaucaaaugcaacggcaccgacgccaaagucaaacucaucaaacaagaacucgacaaauauaaaaacgccguaaccgaccuccaacuccucaugcaauccacccccgccgccggcaguggcuccgcuaucgccuccggaaucgccguuugcaaaguccugcaccuagaaggcgaagucaacaaaaucaaaaacgcccugcucucaaccaacaaagcugucguaagccucuccggcugcggagucuccguccuuaccuucaaaguacucgaccuuaaaaacuacaucgacaaacaacuucuccccauacucaauaaacaauccugcuccauacccaacaucgaaacagucaucgaguuccaacagaaaaauaaccgccuccucgaaauaacccgcgaguucuccgucaacgcaggcgucaccaccccagucuccaccuacaugcugacaaacuccgaacuccuaucccucaucaacgacaugcccaucaccaacgaccaaaagaaacucaugagcaauaacguccaaaucguacgacaacaauccuacagcaucauguguaucaucaaagaagaaguacucgccuacgucguccaacucccacuauacggcgucaucgacacaccaugcuggaaacuucacaccuccccacucugcaccacaaacacaaaagaaggcuccaacaucugccuuacccgaaccgaccgcgggugguacugcgacaacgccggaucagucucguucuuuccccaagccgaaaccugcaaaguacaaucaaaucgcgucuucugcgacaccaugaacuccuuaacacuaccauccgaaguaaaccucugcaacauagacaucuucaacccaaaauacgacugcaaaaucaugaccuccaaaaccgacguauccuccuccguaaucaccagccucggcgcaauagucucaugcuacggcaaaaccaaaugcaccgccuccaacaaaugccgcggcaucauaaaaacuuucucuaacggaugcgacuacgucagcaacaaaggcgucgacaccguauccguagguaauacacuuuacuacgucaauaaacaagaaggccaaucccucuacgucaaaggagaacccaucauaaacuucuacgacccccucgucuuccccuccgacgaguucgacgccuccaucagccaggucaacgaaaagaucaaccaaucacucgccuucauccgcaaaagcgacgaacuccuccacaacguaaacgucggcaaauccacaaccaacauaaugaucaccacuaucaucaucgugauaaucgucauuuuacuucuccucaucgccguaggccucuuccuauacugcaaagcccgcuaaggacuagucccuguucccagagcccacuuuuuuuucuuuuuuugaaauaaaauagccugucuuucagaucuaaaaaaaaaaaaaaaaaaaaaaaaaaaaaaaaaaaaaaaaaaaaaaaaaaaaaaaaaaaaaaaaugcaucccccccccccccccccccccccccccccccaaaggcucuuuucagagccaccagaauu

SEQ ID NO: 19604 - RNA, 1846 nt, Artificial Sequence
  mRNA product Design d-1 comprising derived and/or modified sequence from HRSV(Memphis-37)__AIY60640.1__F-del_DSCav1_mut8 (opt1)
gggagacccgugacccggaaguuguacggcuacgcgacuuucccucccacaaacccucgcgcccuuccuuuccuacuugggcccggcagaaagcuuaccauggagcugcccauccucaagaccaacgccaucaccacgauccuggccgcggugacccugugcuucgccagcucccagaacaucaccgaggaguucuaccagagcacgugcuccgccgucagcaagggcuaccucggcgcccugcgcaccgggugguacaccagcgugaucaccaucgagcuguccaacaucaaggagaucaagugcaacggcaccgacgccaaggugaagcucaucaagcaggagcuggacaaguacaagaacgcggucacggaccugcagcuccugaugcagagcaccccggccgccggcuccgggagcgcgaucgccuccggcaucgccgucugcaaggugcugcaccucgagggcgaggugaacaagaucaagaacgcccugcuguccaccaacaaggccgucgugagccucuccggcugcggggugagcguccugaccuucaaggugcuggaccucaagaacuacaucgacaagcagcugcugcccauccugaacaagcagagcugcuccauccccaacaucgagaccgucaucgaguuccagcagaagaacaaccgccuccuggagaucacgcgggaguucagcgugaacgcgggcgugaccacccccgucuccaccuacaugcugacgaacagcgagcuccugucccugaucaacgacaugccgaucaccaacgaccagaagaagcucaugagcaacaacgugcagaucgugcgccagcaguccuacagcaucaugugcaucaucaaggaggagguccuggccuacguggugcagcugccccucuacggggucaucgacacccccugcuggaagcugcacaccagcccccugugcacgaccaacaccaaggagggcuccaacaucugccucacccggacggaccgcgggugguacugcgacaacgccggcagcguguccuucuucccgcaggccgagaccugcaagguccagagcaaccggguguucugcgacaccaugaacucccugacccugcccagcgaggugaaccucugcaacaucgacaucuucaaccccaaguacgacugcaagaucaugacguccaagaccgacgucagcuccagcgugaucaccucccugggcgccaucgugagcugcuacgggaagaccaagugcacggcgagcaacaagugccgcggcaucaucaagaccuucuccaacgggugcgacuacgucagcaacaagggcguggacaccguguccgucggcaacacccuguacuacgugaacaagcaggagggccagagccucuacgugaagggggagcccaucaucaacuucuacgacccgcuggucuuccccuccgacgaguucgacgccagcaucucccaggugaacgagaagaucaaccagagccuggccuucauccggaaguccgacgagcuccugcacaacgugaacgucggcaagagcaccacgaacaucaugaucaccaccaucaucaucgugaucaucgugauccugcugcuccugaucgccgucgggcuguuccucuacugcaaggcccgcugaggacuagucccuguucccagagcccacuuuuuuuucuuuuuuugaaauaaaauagccugucuuucagaucuaaaaaaaaaaaaaaaaaaaaaaaaaaaaaaaaaaaaaaaaaaaaaaaaaaaaaaaaaaaaaaaaugcaucccccccccccccccccccccccccccccccaaaggcucuuuucagagccaccagaauu

SEQ ID NO: 19605 - RNA, 1846 nt, Artificial Sequence
  mRNA product Design d-1 comprising derived and/or modified sequence from HRSV(Memphis-37)__AIY60640.1__F-del_DSCav1_mut8 (opt1)
gggagacccgugacccggaaguuguacggcuacgcgacuuucccucccacaaacccucgcgcccuuccuuuccuacuugggcccggcagaaagcuuaccauggagcugcccauccucaagaccaacgccaucaccacgauccuggccgcggugacccugugcuucgccagcucccagaacaucaccgaggaguucuaccagagcacgugcuccgccgucagcaagggcuaccucggggcccugcgcaccggcugguacaccuccgugaucaccaucgagcugagcaacaucaaggagaucaagugcaacgggaccgacgccaaggugaagcucaucaagcaggagcuggacaaguacaagaacgcggucacggaccugcagcuccugaugcaguccaccccggccgccggcagcggguccgccaucgcgagcggcaucgccgugugcaaggugcugcaccucgagggcgaggucaacaagaucaagaacgcccugcuguccaccaacaaggccguggugagccucuccgggugcggcgucagcgugcugaccuucaaggugcuggaccucaagaacuacaucgacaagcagcugcugcccauccucaacaagcaguccugcagcauccccaacaucgagacggucaucgaguuccagcagaagaacaaccggcugcuggagaucacccgcgaguucuccgugaacgccggggugaccacccccgucagcacguacaugcucaccaacuccgagcugcugagccucaucaacgacaugccgaucaccaacgaccagaagaagcugaugagcaacaacgugcagaucgugcggcagcaguccuacagcaucaugugcaucaucaaggaggagguccuggcguacguggugcagcucccccuguacggcgucaucgacacccccugcuggaagcugcacacgagcccccucugcaccaccaacaccaaggagggguccaacaucugccugacgcgcaccgaccggggcugguacugcgacaacgccggcuccgugagcuucuucccgcaggccgagaccugcaaggugcaguccaaccgcgucuucugcgacaccaugaacagccugacgcuccccuccgaggugaaccugugcaacaucgacaucuucaaccccaaguacgacugcaagaucaugaccagcaagaccgacgucuccagcuccgugaucaccagccugggggccaucguguccugcuacggcaagacgaagugcaccgccagcaacaagugccgggggaucaucaagaccuucuccaacggcugcgacuacgucagcaacaagggcguggacaccguguccgucgggaacacgcucuacuacgugaacaagcaggagggccagagccuguacgugaagggggagcccaucaucaacuucuacgacccgcuggucuuccccagcgacgaguucgacgcguccaucagccaggugaacgagaagaucaaccagucccucgccuucauccgcaagagcgacgagcugcugcacaacgugaacgucggcaaguccaccaccaacaucaugaucaccaccaucaucaucgugaucaucgugauccuccugcugcucaucgccgucgggcuguuccuguacugcaaggcccggugaggacuagucccuguucccagagcccacuuuuuuuucuuuuuuugaaauaaaauagccugucuuucagaucuaaaaaaaaaaaaaaaaaaaaaaaaaaaaaaaaaaaaaaaaaaaaaaaaaaaaaaaaaaaaaaaaugcaucccccccccccccccccccccccccccccccaaaggcucuuuucagagccaccagaauu

SEQ ID NO: 19606 - RNA, 1846 nt, Artificial Sequence
  mRNA product Design d-1 comprising derived and/or modified sequence from HRSV(Memphis-37)__AIY60640.1__F-del_DSCav1_mut8 (opt2)
gggagacccgugacccggaaguuguacggcuacgcgacuuucccucccacaaacccucgcgcccuuccuuuccuacuugggcccggcagaaagcuuaccauggagcuccccauccucaagaccaacgccaucaccaccauccucgccgccgucacccucugcuucgccuccucccagaacaucaccgaggaguucuaccaguccaccugcuccgccgucuccaagggcuaccucggcgcccuccgcaccggcugguacaccuccgucaucaccaucgagcucuccaacaucaaggagaucaagugcaacggcaccgacgccaaggucaagcucaucaagcaggagcucgacaaguacaagaacgccgucaccgaccuccagcuccucaugcaguccacccccgccgccggcuccggcuccgccaucgccuccggcaucgccgucugcaagguccuccaccucgagggcgaggucaacaagaucaagaacgcccuccucuccaccaacaaggccgucgucucccucuccggcugcggcgucuccguccucaccuucaagguccucgaccucaagaacuacaucgacaagcagcuccuccccauccucaacaagcaguccugcuccauccccaacaucgagaccgucaucgaguuccagcagaagaacaaccgccuccucgagaucacccgcgaguucuccgucaacgccggcgucaccacccccgucuccaccuacaugcucaccaacuccgagcuccucucccucaucaacgacaugcccaucaccaacgaccagaagaagcucauguccaacaacguccagaucguccgccagcaguccuacuccaucaugugcaucaucaaggaggagguccucgccuacgucguccagcucccccucuacggcgucaucgacacccccugcuggaagcuccacaccuccccccucugcaccaccaacaccaaggagggcuccaacaucugccucacccgcaccgaccgcggcugguacugcgacaacgccggcuccgucuccuucuucccccaggccgagaccugcaagguccaguccaaccgcgucuucugcgacaccaugaacucccucacccuccccuccgaggucaaccucugcaacaucgacaucuucaaccccaaguacgacugcaagaucaugaccuccaagaccgacgucuccuccuccgucaucaccucccucggcgccaucgucuccugcuacggcaagaccaagugcaccgccuccaacaagugccgcggcaucaucaagaccuucuccaacggcugcgacuacgucuccaacaagggcgucgacaccgucuccgucggcaacacccucuacuacgucaacaagcaggagggccagucccucuacgucaagggcgagcccaucaucaacuucuacgacccccucgucuuccccuccgacgaguucgacgccuccaucucccaggucaacgagaagaucaaccagucccucgccuucauccgcaaguccgacgagcuccuccacaacgucaacgucggcaaguccaccaccaacaucaugaucaccaccaucaucaucgucaucaucgucauccuccuccuccucaucgccgucggccucuuccucuacugcaaggcccgcugaggacuagucccuguucccagagcccacuuuuuuuucuuuuuuugaaauaaaauagccugucuuucagaucuaaaaaaaaaaaaaaaaaaaaaaaaaaaaaaaaaaaaaaaaaaaaaaaaaaaaaaaaaaaaaaaaugcaucccccccccccccccccccccccccccccccaaaggcucuuuucagagccaccagaauu

SEQ ID NO: 19607 - RNA, 1846 nt, Artificial Sequence
  mRNA product Design d-1 comprising derived and/or modified sequence from HRSV(Memphis-37)__AIY60640.1__F-del_DSCav1_mut8 (opt3)
gggagacccgugacccggaaguuguacggcuacgcgacuuucccucccacaaacccucgcgcccuuccuuuccuacuugggcccggcagaaagcuuaccauggagcugcccauccucaagaccaacgccauuacaacuauacuugcugcagugacgcugugcuucgccagcucccagaauaucaccgaagaguuuuaccaaucuacauguucagcggucaguaaaggcuauuugggggcuuuaagaacuggaugguacaccagcguuauuacaaucgaacuguccaacauuaaggagaucaaaugcaaugguaccgacgccaaggugaaacuaauaaagcaggaacucgauaaguauaaaaacgcaguaacugaccugcagcuucugaugcagucuacuccugccgcuggcucggggucagcaaucgccagcggaauugcuguguguaaggucuugcaccucgagggcgaggugaauaaaaucaagaacgcccugcugaguaccaauaaagcgguugugucccucucugguugcggggucagcguguuaacguucaagguacuggaucuuaagaacuacauugacaaacaauugcugccaauccuaaauaagcaguccuguucaauaccgaacauugaaacuguuaucgaguuucagcagaaaaauaacaggcuccuggaaauuacccgggaguucagugugaaugcaggagucacaacucccgugagcaccuauaugcuuacaaacucugagcuguugucccucaucaaugauaugccuaucaccaacgaccaaaagaaacugaugucaaacaaugugcagauuguccgccagcagagcuacaguauaaugugcaucauuaaggaagagguuuuagccuaugugguacaacugccacucuacggcgugaucgauacgcccuguuggaaacuucauacuucuccucugugcacaaccaacacuaaggaaggcuccaauauauguuugacacgaaccgaccgugggugguacugcgauaacgcuggaagcgucucguuuuucccacaggccgagacguguaaggugcagucuaauagaguuuucugcgacaccaugaacucccuaacacugcccucagaagugaaucucugcaacauugauaucuucaauccuaaauaugacuguaagaucaugacaaguaaaaccgaugucagcuccucugugauuacaagccugggugcaaucguaucaugcuacggcaagacuaaauguaccgcuaguaacaagugcagggggauuauaaagacauuuuccaauggaugugacuauguuagcaacaaaggcguggacaccgucucuguggguaauacucuuuacuaugucaacaagcaagaggggcagucacuguacgugaaaggagagccaaucauuaauuucuaugauccguugguuuuucccagugacgaauuugaugccagcaucucccaggugaacgagaagaucaaccagucucucgcguuuauucggaaaucggacgaacuguuacacaauguaaacgucggcaagagcacgacaaauauaaugaucaccacuauuaucauugugaucauaguuauccugcuacuccugauugccgugggccuuuucuuguacugcaaggcacgcugaggacuagucccuguucccagagcccacuuuuuuuucuuuuuuugaaauaaaauagccugucuuucagaucuaaaaaaaaaaaaaaaaaaaaaaaaaaaaaaaaaaaaaaaaaaaaaaaaaaaaaaaaaaaaaaaaugcaucccccccccccccccccccccccccccccccaaaggcucuuuucagagccaccagaauu

SEQ ID NO: 19608 - RNA, 1846 nt, Artificial Sequence
  mRNA product Design d-1 comprising derived and/or modified sequence from HRSV(Memphis-37)__AIY60640.1__F-del_DSCav1_mut8 (opt4)
gggagacccgugacccggaaguuguacggcuacgcgacuuucccucccacaaacccucgcgcccuuccuuuccuacuugggcccggcagaaagcuuaccauggagcugcccauccugaagaccaacgccaucaccaccauccuggccgccgugacccugugcuucgccagcagccagaacaucaccgaggaguucuaccagagcaccugcagcgccgugagcaagggcuaccugggcgcccugagaaccggcugguacaccagcgugaucaccaucgagcugagcaacaucaaggagaucaagugcaacggcaccgacgccaaggugaagcugaucaagcaggagcuggacaaguacaagaacgccgugaccgaccugcagcugcugaugcagagcacccccgccgccggcagcggcagcgccaucgccagcggcaucgccgugugcaaggugcugcaccuggagggcgaggugaacaagaucaagaacgcccugcugagcaccaacaaggccguggugagccugagcggcugcggcgugagcgugcugaccuucaaggugcuggaccugaagaacuacaucgacaagcagcugcugcccauccugaacaagcagagcugcagcauccccaacaucgagaccgugaucgaguuccagcagaagaacaacagacugcuggagaucaccagagaguucagcgugaacgccggcgugaccacccccgugagcaccuacaugcugaccaacagcgagcugcugagccugaucaacgacaugcccaucaccaacgaccagaagaagcugaugagcaacaacgugcagaucgugagacagcagagcuacagcaucaugugcaucaucaaggaggaggugcuggccuacguggugcagcugccccuguacggcgugaucgacacccccugcuggaagcugcacaccagcccccugugcaccaccaacaccaaggagggcagcaacaucugccugaccagaaccgacagaggcugguacugcgacaacgccggcagcgugagcuucuucccccaggccgagaccugcaaggugcagagcaacagaguguucugcgacaccaugaacagccugacccugcccagcgaggugaaccugugcaacaucgacaucuucaaccccaaguacgacugcaagaucaugaccagcaagaccgacgugagcagcagcgugaucaccagccugggcgccaucgugagcugcuacggcaagaccaagugcaccgccagcaacaagugcagaggcaucaucaagaccuucagcaacggcugcgacuacgugagcaacaagggcguggacaccgugagcgugggcaacacccuguacuacgugaacaagcaggagggccagagccuguacgugaagggcgagcccaucaucaacuucuacgacccccugguguuccccagcgacgaguucgacgccagcaucagccaggugaacgagaagaucaaccagagccuggccuucaucagaaagagcgacgagcugcugcacaacgugaacgugggcaagagcaccaccaacaucaugaucaccaccaucaucaucgugaucaucgugauccugcugcugcugaucgccgugggccuguuccuguacugcaaggccagaugaggacuagucccuguucccagagcccacuuuuuuuucuuuuuuugaaauaaaauagccugucuuucagaucuaaaaaaaaaaaaaaaaaaaaaaaaaaaaaaaaaaaaaaaaaaaaaaaaaaaaaaaaaaaaaaaaugcaucccccccccccccccccccccccccccccccaaaggcucuuuucagagccaccagaauu

SEQ ID NO: 19609 - RNA, 1846 nt, Artificial Sequence
  mRNA product Design d-1 comprising derived and/or modified sequence from HRSV(Memphis-37)__AIY60640.1__F-del_DSCav1_mut8 (opt5)
gggagacccgugacccggaaguuguacggcuacgcgacuuucccucccacaaacccucgcgcccuuccuuuccuacuugggcccggcagaaagcuuaccauggagcugcccauccucaagaccaacgccauuacaacgauccuggcugccgugacccuuugcuucgcgagcucccagaauauuacagaagaguuuuaccaaucuaccuguagcgcugucuccaaaggcuaucugggggcccucagaacaggaugguacaccucuguuaucacaauugaacugagcaacaucaaggagaucaaaugcaauggcaccgacgccaaggugaaacuuauuaagcaggaacuggauaaguauaaaaacgcugugacggaccuccagcugcugaugcaguccaccccugccgcugggucuggaagcgccaucgcguccggcauugccgucuguaaggugcuccaccuggagggggagguuaauaaaaucaagaacgcccuucugagcacaaauaaagcuguggucucucucuccggaugcggcgugagcguucugaccuucaaggugcuugaucugaagaacuacauugacaaacaacuccugccgauccugaauaagcagucuuguuccauucccaacaucgaaacagucaucgaguuucagcagaaaaauaaccggcuccuggaaauuacccgcgaguucagcgugaaugcuggcgugacgacaccugucucuaccuauaugcuuacaaacuccgagcugcucagccugaucaaugauaugcccauuaccaacgaccaaaagaaacuuauguccaacaauguucagaucgugagacagcagucuuacagcauuaugugcaucaucaaggaagaggugcuggccuaugucgugcaacucccucuguacgggguuauugauacccccuguuggaaacugcauacauccccucucugcacgaccaacacaaaggaaggaagcaauaucugucugacccggacagaccgcggcugguacugcgauaacgcggggucuguguccuuuuucccgcaggccgagaccuguaagguccagagcaauagaguguuuugcgacacgaugaacucucuuacacugcccagcgaaguuaaucucugcaacauugauaucuucaauccuaaauaugacuguaagauuaugaccuccaaaaccgaugugucuagcuccgucaucacaagccugggagcuaucgugucuugcuacggcaagaccaaauguacagccuccaacaagugccgggggauuaucaagacguuuagcaauggaugugacuaugucucuaacaaaggcguggacaccguuuccgugggcaauacacuuuacuaugucaacaagcaagaggggcagagccuguacgugaaaggagagcccauuaucaauuucuaugauccucucguuuuucccuccgacgaguucgaugcuucuauuagccaggugaacgaaaagaucaaccagucccuggccuuuauucgcaaaucugacgaacugcuccacaaugucaacgugggcaagagcaccacaaauaucaugaucaccacgauuaucauugugaucauuguuauccugcuucugcucaucgccgucgggcuguuccuguacugcaaggcuagaugaggacuagucccuguucccagagcccacuuuuuuuucuuuuuuugaaauaaaauagccugucuuucagaucuaaaaaaaaaaaaaaaaaaaaaaaaaaaaaaaaaaaaaaaaaaaaaaaaaaaaaaaaaaaaaaaaugcaucccccccccccccccccccccccccccccccaaaggcucuuuucagagccaccagaauu

SEQ ID NO: 19610 - RNA, 1846 nt, Artificial Sequence
  mRNA product Design d-1 comprising derived and/or modified sequence from HRSV(Memphis-37)__AIY60640.1__F-del_DSCav1_mut8 (opt6)
gggagacccgugacccggaaguuguacggcuacgcgacuuucccucccacaaacccucgcgcccuuccuuuccuacuugggcccggcagaaagcuuaccauggaacuacccauacuaaaaacaaacgcaauuacaacaauacuugccgcaguaaccuuaugcuuugccucaucccaaaacauaacagaagaauuuuaucaaucaacaugcuccgcaguaucaaaaggauaccuaggcgcucuaagaacaggaugguacacauccguaaucacaauagaacuauccaauauaaaagaaauaaaauguaauggaacagaugcaaaaguuaaauuaauaaaacaagaacuagacaaauacaaaaacgcaguuaccgaucuccaacuauuaaugcaaucaacaccagcugcaggaaguggaagcgccauagcaagcggaauagcagucugcaaaguauuacaucuugaaggcgaaguaaacaaaaucaaaaaugcccuccucucaacaaacaaagcuguaguaucccuaucaggaugcgguguaucuguucuuacauuuaaaguacucgaucuaaaaaacuacaucgauaaacaguuacuuccaauacucaacaaacaaucauguagcauaccaaacauagaaacaguaauagaauuucaacaaaaaaacaaucgacuacucgaaauaacuagagaauuuucuguaaacgcuggaguaaccacaccagugucuaccuauaugcuuacaaauagcgaacuccuaucacuaaucaaugacaugccaauaacaaaugaccagaaaaaacucaugucaaauaacguacaaauaguacgacaacaaagcuacuccauaaugugcauaaucaaagaagaaguauuagccuacguuguucaacuaccauuauauggaguuauagacacuccaugcuggaaauuacauacaagcccacucuguacaacaaacacaaaagaaggcucaaacauaugcuuaacaagaacagauagaggaugguacugcgauaacgcaggcucagucucauuuuuuccacaagccgaaaccugcaaaguacaaucaaauagaguuuuuugcgacacaaugaacucacucacucuaccaagugaaguaaaucucuguaauaucgacauauucaacccaaaauaugacugcaaaauaaugacaucuaaaaccgauguauccucaagcguaaucacaucauuaggagcuauaguuuccugcuacgguaaaacaaaaugcacagcauccaacaaaugucgcgguaucaucaaaacauucuccaacggaugugauuacguaucaaacaaaggugucgacaccguaagcguaggcaacacuuuauacuauguaaacaaacaagaaggacaaagucuauauguaaaaggagaaccaauaauaaacuucuaugacccccuaguauucccuuccgacgaauuugaugcaagcauuucacaaguuaacgaaaaaaucaaucaaucccuugcuuucauaagaaaaucagacgaauuacuacacaacguaaacguaggaaaaagcacaacaaauaucaugauuacaacaauaauaauuguaauaauaguaauacuccucuuacuuauagcagucggcuuauuccuuuacugcaaagcaagauaaggacuagucccuguucccagagcccacuuuuuuuucuuuuuuugaaauaaaauagccugucuuucagaucuaaaaaaaaaaaaaaaaaaaaaaaaaaaaaaaaaaaaaaaaaaaaaaaaaaaaaaaaaaaaaaaaugcaucccccccccccccccccccccccccccccccaaaggcucuuuucagagccaccagaauu

SEQ ID NO: 19611 - RNA, 1846 nt, Artificial Sequence
  mRNA product Design d-1 comprising derived and/or modified sequence from HRSV(Memphis-37)__AIY60640.1__F-del_DSCav1_mut8 (opt11)
gggagacccgugacccggaaguuguacggcuacgcgacuuucccucccacaaacccucgcgcccuuccuuuccuacuugggcccggcagaaagcuuaccauggaacuccccauccuaaaaaccaacgcaaucaccaccauccucgccgccguaacacucugcuuugcaagcucccaaaacaucaccgaagaauuuuaccaaucuaccugcagcgccguaucuaaaggauaccuaggagcccucagaaccgguugguacaccucugucaucacaauagaacucuccaacaucaaagaaaucaaaugcaacggcaccgacgccaaagucaaacucaucaaacaagaacucgacaaauauaaaaacgccguaaccgaccuccaacuccucaugcaauccacccccgccgccggcaguggcuccgcuaucgccuccggaaucgccguuugcaaaguccugcaccuagaaggcgaagucaacaaaaucaaaaacgcccugcucucaaccaacaaagcugucguaagccucuccggcugcggagucuccguccuuaccuucaaaguacucgaccuuaaaaacuacaucgacaaacaacuucuccccauacucaauaaacaauccugcuccauacccaacaucgaaacagucaucgaguuccaacagaaaaauaaccgccuccucgaaauaacccgcgaguucuccgucaacgcaggcgucaccaccccagucuccaccuacaugcugacaaacuccgaacuccuaucccucaucaacgacaugcccaucaccaacgaccaaaagaaacucaugagcaauaacguccaaaucguacgacaacaauccuacagcaucauguguaucaucaaagaagaaguacucgccuacgucguccaacucccacuauacggcgucaucgacacaccaugcuggaaacuucacaccuccccacucugcaccacaaacacaaaagaaggcuccaacaucugccuuacccgaaccgaccgcgggugguacugcgacaacgccggaucagucucguucuuuccccaagccgaaaccugcaaaguacaaucaaaucgcgucuucugcgacaccaugaacuccuuaacacuaccauccgaaguaaaccucugcaacauagacaucuucaacccaaaauacgacugcaaaaucaugaccuccaaaaccgacguauccuccuccguaaucaccagccucggcgcaauagucucaugcuacggcaaaaccaaaugcaccgccuccaacaaaugccgcggcaucauaaaaacuuucucuaacggaugcgacuacgucagcaacaaaggcgucgacaccguauccguagguaauacacuuuacuacgucaauaaacaagaaggccaaucccucuacgucaaaggagaacccaucauaaacuucuacgacccccucgucuuccccuccgacgaguucgacgccuccaucagccaggucaacgaaaagaucaaccaaucacucgccuucauccgcaaaagcgacgaacuccuccacaacguaaacgucggcaaauccacaaccaacauaaugaucaccacuaucaucaucgugauaaucgucauuuuacuucuccucaucgccguaggccucuuccuauacugcaaagcccgcuaaggacuagucccuguucccagagcccacuuuuuuuucuuuuuuugaaauaaaauagccugucuuucagaucuaaaaaaaaaaaaaaaaaaaaaaaaaaaaaaaaaaaaaaaaaaaaaaaaaaaaaaaaaaaaaaaaugcaucccccccccccccccccccccccccccccccaaaggcucuuuucagagccaccagaauu

SEQ ID NO: 19612 - RNA, 1901 nt, Artificial Sequence
  mRNA product Design d-2 comprising derived and/or modified sequence from HRSV(Memphis-37)__AIY60640.1__F-del_DSCav1_mut8 (opt1)
gggagagcggcucggccauuuugucccagucaguccggaggcugcggcugcagaaguaccgccugcggaguaacugcaaagaagcuuaccauggagcugcccauccucaagaccaacgccaucaccacgauccuggccgcggugacccugugcuucgccagcucccagaacaucaccgaggaguucuaccagagcacgugcuccgccgucagcaagggcuaccucggcgcccugcgcaccgggugguacaccagcgugaucaccaucgagcuguccaacaucaaggagaucaagugcaacggcaccgacgccaaggugaagcucaucaagcaggagcuggacaaguacaagaacgcggucacggaccugcagcuccugaugcagagcaccccggccgccggcuccgggagcgcgaucgccuccggcaucgccgucugcaaggugcugcaccucgagggcgaggugaacaagaucaagaacgcccugcuguccaccaacaaggccgucgugagccucuccggcugcggggugagcguccugaccuucaaggugcuggaccucaagaacuacaucgacaagcagcugcugcccauccugaacaagcagagcugcuccauccccaacaucgagaccgucaucgaguuccagcagaagaacaaccgccuccuggagaucacgcgggaguucagcgugaacgcgggcgugaccacccccgucuccaccuacaugcugacgaacagcgagcuccugucccugaucaacgacaugccgaucaccaacgaccagaagaagcucaugagcaacaacgugcagaucgugcgccagcaguccuacagcaucaugugcaucaucaaggaggagguccuggccuacguggugcagcugccccucuacggggucaucgacacccccugcuggaagcugcacaccagcccccugugcacgaccaacaccaaggagggcuccaacaucugccucacccggacggaccgcgggugguacugcgacaacgccggcagcguguccuucuucccgcaggccgagaccugcaagguccagagcaaccggguguucugcgacaccaugaacucccugacccugcccagcgaggugaaccucugcaacaucgacaucuucaaccccaaguacgacugcaagaucaugacguccaagaccgacgucagcuccagcgugaucaccucccugggcgccaucgugagcugcuacgggaagaccaagugcacggcgagcaacaagugccgcggcaucaucaagaccuucuccaacgggugcgacuacgucagcaacaagggcguggacaccguguccgucggcaacacccuguacuacgugaacaagcaggagggccagagccucuacgugaagggggagcccaucaucaacuucuacgacccgcuggucuuccccuccgacgaguucgacgccagcaucucccaggugaacgagaagaucaaccagagccuggccuucauccggaaguccgacgagcuccugcacaacgugaacgucggcaagagcaccacgaacaucaugaucaccaccaucaucaucgugaucaucgugauccugcugcuccugaucgccgucgggcuguuccucuacugcaaggcccgcugaggacuaguaauaaggaaacuguaugaaugucugugggcaggaagugaagagauccuucuguaaagguuuuuggaauuaugucugcugaauaauaaacuuuuuugaaauaauaaaucugguagaaaaaugagaucuaaaaaaaaaaaaaaaaaaaaaaaaaaaaaaaaaaaaaaaaaaaaaaaaaaaaaaaaaaaaaaaaugcaucccccccccccccccccccccccccccccccaaaggcucuuuucagagccaccagaauu

SEQ ID NO: 19613 - RNA, 1901 nt, Artificial Sequence
  mRNA product Design d-2 comprising derived and/or modified sequence from HRSV(Memphis-37)__AIY60640.1__F-del_DSCav1_mut8 (opt1)
gggagagcggcucggccauuuugucccagucaguccggaggcugcggcugcagaaguaccgccugcggaguaacugcaaagaagcuuaccauggagcugcccauccucaagaccaacgccaucaccacgauccuggccgcggugacccugugcuucgccagcucccagaacaucaccgaggaguucuaccagagcacgugcuccgccgucagcaagggcuaccucggggcccugcgcaccggcugguacaccuccgugaucaccaucgagcugagcaacaucaaggagaucaagugcaacgggaccgacgccaaggugaagcucaucaagcaggagcuggacaaguacaagaacgcggucacggaccugcagcuccugaugcaguccaccccggccgccggcagcggguccgccaucgcgagcggcaucgccgugugcaaggugcugcaccucgagggcgaggucaacaagaucaagaacgcccugcuguccaccaacaaggccguggugagccucuccgggugcggcgucagcgugcugaccuucaaggugcuggaccucaagaacuacaucgacaagcagcugcugcccauccucaacaagcaguccugcagcauccccaacaucgagacggucaucgaguuccagcagaagaacaaccggcugcuggagaucacccgcgaguucuccgugaacgccggggugaccacccccgucagcacguacaugcucaccaacuccgagcugcugagccucaucaacgacaugccgaucaccaacgaccagaagaagcugaugagcaacaacgugcagaucgugcggcagcaguccuacagcaucaugugcaucaucaaggaggagguccuggcguacguggugcagcucccccuguacggcgucaucgacacccccugcuggaagcugcacacgagcccccucugcaccaccaacaccaaggagggguccaacaucugccugacgcgcaccgaccggggcugguacugcgacaacgccggcuccgugagcuucuucccgcaggccgagaccugcaaggugcaguccaaccgcgucuucugcgacaccaugaacagccugacgcuccccuccgaggugaaccugugcaacaucgacaucuucaaccccaaguacgacugcaagaucaugaccagcaagaccgacgucuccagcuccgugaucaccagccugggggccaucguguccugcuacggcaagacgaagugcaccgccagcaacaagugccgggggaucaucaagaccuucuccaacggcugcgacuacgucagcaacaagggcguggacaccguguccgucgggaacacgcucuacuacgugaacaagcaggagggccagagccuguacgugaagggggagcccaucaucaacuucuacgacccgcuggucuuccccagcgacgaguucgacgcguccaucagccaggugaacgagaagaucaaccagucccucgccuucauccgcaagagcgacgagcugcugcacaacgugaacgucggcaaguccaccaccaacaucaugaucaccaccaucaucaucgugaucaucgugauccuccugcugcucaucgccgucgggcuguuccuguacugcaaggcccggugaggacuaguaauaaggaaacuguaugaaugucugugggcaggaagugaagagauccuucuguaaagguuuuuggaauuaugucugcugaauaauaaacuuuuuugaaauaauaaaucugguagaaaaaugagaucuaaaaaaaaaaaaaaaaaaaaaaaaaaaaaaaaaaaaaaaaaaaaaaaaaaaaaaaaaaaaaaaaugcaucccccccccccccccccccccccccccccccaaaggcucuuuucagagccaccagaauu

SEQ ID NO: 19614 - RNA, 1901 nt, Artificial Sequence
  mRNA product Design d-2 comprising derived and/or modified sequence from HRSV(Memphis-37)__AIY60640.1__F-del_DSCav1_mut8 (opt2)
gggagagcggcucggccauuuugucccagucaguccggaggcugcggcugcagaaguaccgccugcggaguaacugcaaagaagcuuaccauggagcuccccauccucaagaccaacgccaucaccaccauccucgccgccgucacccucugcuucgccuccucccagaacaucaccgaggaguucuaccaguccaccugcuccgccgucuccaagggcuaccucggcgcccuccgcaccggcugguacaccuccgucaucaccaucgagcucuccaacaucaaggagaucaagugcaacggcaccgacgccaaggucaagcucaucaagcaggagcucgacaaguacaagaacgccgucaccgaccuccagcuccucaugcaguccacccccgccgccggcuccggcuccgccaucgccuccggcaucgccgucugcaagguccuccaccucgagggcgaggucaacaagaucaagaacgcccuccucuccaccaacaaggccgucgucucccucuccggcugcggcgucuccguccucaccuucaagguccucgaccucaagaacuacaucgacaagcagcuccuccccauccucaacaagcaguccugcuccauccccaacaucgagaccgucaucgaguuccagcagaagaacaaccgccuccucgagaucacccgcgaguucuccgucaacgccggcgucaccacccccgucuccaccuacaugcucaccaacuccgagcuccucucccucaucaacgacaugcccaucaccaacgaccagaagaagcucauguccaacaacguccagaucguccgccagcaguccuacuccaucaugugcaucaucaaggaggagguccucgccuacgucguccagcucccccucuacggcgucaucgacacccccugcuggaagcuccacaccuccccccucugcaccaccaacaccaaggagggcuccaacaucugccucacccgcaccgaccgcggcugguacugcgacaacgccggcuccgucuccuucuucccccaggccgagaccugcaagguccaguccaaccgcgucuucugcgacaccaugaacucccucacccuccccuccgaggucaaccucugcaacaucgacaucuucaaccccaaguacgacugcaagaucaugaccuccaagaccgacgucuccuccuccgucaucaccucccucggcgccaucgucuccugcuacggcaagaccaagugcaccgccuccaacaagugccgcggcaucaucaagaccuucuccaacggcugcgacuacgucuccaacaagggcgucgacaccgucuccgucggcaacacccucuacuacgucaacaagcaggagggccagucccucuacgucaagggcgagcccaucaucaacuucuacgacccccucgucuuccccuccgacgaguucgacgccuccaucucccaggucaacgagaagaucaaccagucccucgccuucauccgcaaguccgacgagcuccuccacaacgucaacgucggcaaguccaccaccaacaucaugaucaccaccaucaucaucgucaucaucgucauccuccuccuccucaucgccgucggccucuuccucuacugcaaggcccgcugaggacuaguaauaaggaaacuguaugaaugucugugggcaggaagugaagagauccuucuguaaagguuuuuggaauuaugucugcugaauaauaaacuuuuuugaaauaauaaaucugguagaaaaaugagaucuaaaaaaaaaaaaaaaaaaaaaaaaaaaaaaaaaaaaaaaaaaaaaaaaaaaaaaaaaaaaaaaaugcaucccccccccccccccccccccccccccccccaaaggcucuuuucagagccaccagaauu

SEQ ID NO: 19615 - RNA, 1901 nt, Artificial Sequence
  mRNA product Design d-2 comprising derived and/or modified sequence from HRSV(Memphis-37)__AIY60640.1__F-del_DSCav1_mut8 (opt3)
gggagagcggcucggccauuuugucccagucaguccggaggcugcggcugcagaaguaccgccugcggaguaacugcaaagaagcuuaccauggagcugcccauccucaagaccaacgccauuacaacuauacuugcugcagugacgcugugcuucgccagcucccagaauaucaccgaagaguuuuaccaaucuacauguucagcggucaguaaaggcuauuugggggcuuuaagaacuggaugguacaccagcguuauuacaaucgaacuguccaacauuaaggagaucaaaugcaaugguaccgacgccaaggugaaacuaauaaagcaggaacucgauaaguauaaaaacgcaguaacugaccugcagcuucugaugcagucuacuccugccgcuggcucggggucagcaaucgccagcggaauugcuguguguaaggucuugcaccucgagggcgaggugaauaaaaucaagaacgcccugcugaguaccaauaaagcgguugugucccucucugguugcggggucagcguguuaacguucaagguacuggaucuuaagaacuacauugacaaacaauugcugccaauccuaaauaagcaguccuguucaauaccgaacauugaaacuguuaucgaguuucagcagaaaaauaacaggcuccuggaaauuacccgggaguucagugugaaugcaggagucacaacucccgugagcaccuauaugcuuacaaacucugagcuguugucccucaucaaugauaugccuaucaccaacgaccaaaagaaacugaugucaaacaaugugcagauuguccgccagcagagcuacaguauaaugugcaucauuaaggaagagguuuuagccuaugugguacaacugccacucuacggcgugaucgauacgcccuguuggaaacuucauacuucuccucugugcacaaccaacacuaaggaaggcuccaauauauguuugacacgaaccgaccgugggugguacugcgauaacgcuggaagcgucucguuuuucccacaggccgagacguguaaggugcagucuaauagaguuuucugcgacaccaugaacucccuaacacugcccucagaagugaaucucugcaacauugauaucuucaauccuaaauaugacuguaagaucaugacaaguaaaaccgaugucagcuccucugugauuacaagccugggugcaaucguaucaugcuacggcaagacuaaauguaccgcuaguaacaagugcagggggauuauaaagacauuuuccaauggaugugacuauguuagcaacaaaggcguggacaccgucucuguggguaauacucuuuacuaugucaacaagcaagaggggcagucacuguacgugaaaggagagccaaucauuaauuucuaugauccguugguuuuucccagugacgaauuugaugccagcaucucccaggugaacgagaagaucaaccagucucucgcguuuauucggaaaucggacgaacuguuacacaauguaaacgucggcaagagcacgacaaauauaaugaucaccacuauuaucauugugaucauaguuauccugcuacuccugauugccgugggccuuuucuuguacugcaaggcacgcugaggacuaguaauaaggaaacuguaugaaugucugugggcaggaagugaagagauccuucuguaaagguuuuuggaauuaugucugcugaauaauaaacuuuuuugaaauaauaaaucugguagaaaaaugagaucuaaaaaaaaaaaaaaaaaaaaaaaaaaaaaaaaaaaaaaaaaaaaaaaaaaaaaaaaaaaaaaaaugcaucccccccccccccccccccccccccccccccaaaggcucuuuucagagccaccagaauu

SEQ ID NO: 19616 - RNA, 1901 nt, Artificial Sequence
  mRNA product Design d-2 comprising derived and/or modified sequence from HRSV(Memphis-37)__AIY60640.1__F-del_DSCav1_mut8 (opt4)
gggagagcggcucggccauuuugucccagucaguccggaggcugcggcugcagaaguaccgccugcggaguaacugcaaagaagcuuaccauggagcugcccauccugaagaccaacgccaucaccaccauccuggccgccgugacccugugcuucgccagcagccagaacaucaccgaggaguucuaccagagcaccugcagcgccgugagcaagggcuaccugggcgcccugagaaccggcugguacaccagcgugaucaccaucgagcugagcaacaucaaggagaucaagugcaacggcaccgacgccaaggugaagcugaucaagcaggagcuggacaaguacaagaacgccgugaccgaccugcagcugcugaugcagagcacccccgccgccggcagcggcagcgccaucgccagcggcaucgccgugugcaaggugcugcaccuggagggcgaggugaacaagaucaagaacgcccugcugagcaccaacaaggccguggugagccugagcggcugcggcgugagcgugcugaccuucaaggugcuggaccugaagaacuacaucgacaagcagcugcugcccauccugaacaagcagagcugcagcauccccaacaucgagaccgugaucgaguuccagcagaagaacaacagacugcuggagaucaccagagaguucagcgugaacgccggcgugaccacccccgugagcaccuacaugcugaccaacagcgagcugcugagccugaucaacgacaugcccaucaccaacgaccagaagaagcugaugagcaacaacgugcagaucgugagacagcagagcuacagcaucaugugcaucaucaaggaggaggugcuggccuacguggugcagcugccccuguacggcgugaucgacacccccugcuggaagcugcacaccagcccccugugcaccaccaacaccaaggagggcagcaacaucugccugaccagaaccgacagaggcugguacugcgacaacgccggcagcgugagcuucuucccccaggccgagaccugcaaggugcagagcaacagaguguucugcgacaccaugaacagccugacccugcccagcgaggugaaccugugcaacaucgacaucuucaaccccaaguacgacugcaagaucaugaccagcaagaccgacgugagcagcagcgugaucaccagccugggcgccaucgugagcugcuacggcaagaccaagugcaccgccagcaacaagugcagaggcaucaucaagaccuucagcaacggcugcgacuacgugagcaacaagggcguggacaccgugagcgugggcaacacccuguacuacgugaacaagcaggagggccagagccuguacgugaagggcgagcccaucaucaacuucuacgacccccugguguuccccagcgacgaguucgacgccagcaucagccaggugaacgagaagaucaaccagagccuggccuucaucagaaagagcgacgagcugcugcacaacgugaacgugggcaagagcaccaccaacaucaugaucaccaccaucaucaucgugaucaucgugauccugcugcugcugaucgccgugggccuguuccuguacugcaaggccagaugaggacuaguaauaaggaaacuguaugaaugucugugggcaggaagugaagagauccuucuguaaagguuuuuggaauuaugucugcugaauaauaaacuuuuuugaaauaauaaaucugguagaaaaaugagaucuaaaaaaaaaaaaaaaaaaaaaaaaaaaaaaaaaaaaaaaaaaaaaaaaaaaaaaaaaaaaaaaaugcaucccccccccccccccccccccccccccccccaaaggcucuuuucagagccaccagaauu

SEQ ID NO: 19617 - RNA, 1901 nt, Artificial Sequence
  mRNA product Design d-2 comprising derived and/or modified sequence from HRSV(Memphis-37)__AIY60640.1__F-del_DSCav1_mut8 (opt5)
gggagagcggcucggccauuuugucccagucaguccggaggcugcggcugcagaaguaccgccugcggaguaacugcaaagaagcuuaccauggagcugcccauccucaagaccaacgccauuacaacgauccuggcugccgugacccuuugcuucgcgagcucccagaauauuacagaagaguuuuaccaaucuaccuguagcgcugucuccaaaggcuaucugggggcccucagaacaggaugguacaccucuguuaucacaauugaacugagcaacaucaaggagaucaaaugcaauggcaccgacgccaaggugaaacuuauuaagcaggaacuggauaaguauaaaaacgcugugacggaccuccagcugcugaugcaguccaccccugccgcugggucuggaagcgccaucgcguccggcauugccgucuguaaggugcuccaccuggagggggagguuaauaaaaucaagaacgcccuucugagcacaaauaaagcuguggucucucucuccggaugcggcgugagcguucugaccuucaaggugcuugaucugaagaacuacauugacaaacaacuccugccgauccugaauaagcagucuuguuccauucccaacaucgaaacagucaucgaguuucagcagaaaaauaaccggcuccuggaaauuacccgcgaguucagcgugaaugcuggcgugacgacaccugucucuaccuauaugcuuacaaacuccgagcugcucagccugaucaaugauaugcccauuaccaacgaccaaaagaaacuuauguccaacaauguucagaucgugagacagcagucuuacagcauuaugugcaucaucaaggaagaggugcuggccuaugucgugcaacucccucuguacgggguuauugauacccccuguuggaaacugcauacauccccucucugcacgaccaacacaaaggaaggaagcaauaucugucugacccggacagaccgcggcugguacugcgauaacgcggggucuguguccuuuuucccgcaggccgagaccuguaagguccagagcaauagaguguuuugcgacacgaugaacucucuuacacugcccagcgaaguuaaucucugcaacauugauaucuucaauccuaaauaugacuguaagauuaugaccuccaaaaccgaugugucuagcuccgucaucacaagccugggagcuaucgugucuugcuacggcaagaccaaauguacagccuccaacaagugccgggggauuaucaagacguuuagcaauggaugugacuaugucucuaacaaaggcguggacaccguuuccgugggcaauacacuuuacuaugucaacaagcaagaggggcagagccuguacgugaaaggagagcccauuaucaauuucuaugauccucucguuuuucccuccgacgaguucgaugcuucuauuagccaggugaacgaaaagaucaaccagucccuggccuuuauucgcaaaucugacgaacugcuccacaaugucaacgugggcaagagcaccacaaauaucaugaucaccacgauuaucauugugaucauuguuauccugcuucugcucaucgccgucgggcuguuccuguacugcaaggcuagaugaggacuaguaauaaggaaacuguaugaaugucugugggcaggaagugaagagauccuucuguaaagguuuuuggaauuaugucugcugaauaauaaacuuuuuugaaauaauaaaucugguagaaaaaugagaucuaaaaaaaaaaaaaaaaaaaaaaaaaaaaaaaaaaaaaaaaaaaaaaaaaaaaaaaaaaaaaaaaugcaucccccccccccccccccccccccccccccccaaaggcucuuuucagagccaccagaauu

SEQ ID NO: 19618 - RNA, 1901 nt, Artificial Sequence
  mRNA product Design d-2 comprising derived and/or modified sequence from HRSV(Memphis-37)__AIY60640.1__F-del_DSCav1_mut8 (opt6)
gggagagcggcucggccauuuugucccagucaguccggaggcugcggcugcagaaguaccgccugcggaguaacugcaaagaagcuuaccauggaacuacccauacuaaaaacaaacgcaauuacaacaauacuugccgcaguaaccuuaugcuuugccucaucccaaaacauaacagaagaauuuuaucaaucaacaugcuccgcaguaucaaaaggauaccuaggcgcucuaagaacaggaugguacacauccguaaucacaauagaacuauccaauauaaaagaaauaaaauguaauggaacagaugcaaaaguuaaauuaauaaaacaagaacuagacaaauacaaaaacgcaguuaccgaucuccaacuauuaaugcaaucaacaccagcugcaggaaguggaagcgccauagcaagcggaauagcagucugcaaaguauuacaucuugaaggcgaaguaaacaaaaucaaaaaugcccuccucucaacaaacaaagcuguaguaucccuaucaggaugcgguguaucuguucuuacauuuaaaguacucgaucuaaaaaacuacaucgauaaacaguuacuuccaauacucaacaaacaaucauguagcauaccaaacauagaaacaguaauagaauuucaacaaaaaaacaaucgacuacucgaaauaacuagagaauuuucuguaaacgcuggaguaaccacaccagugucuaccuauaugcuuacaaauagcgaacuccuaucacuaaucaaugacaugccaauaacaaaugaccagaaaaaacucaugucaaauaacguacaaauaguacgacaacaaagcuacuccauaaugugcauaaucaaagaagaaguauuagccuacguuguucaacuaccauuauauggaguuauagacacuccaugcuggaaauuacauacaagcccacucuguacaacaaacacaaaagaaggcucaaacauaugcuuaacaagaacagauagaggaugguacugcgauaacgcaggcucagucucauuuuuuccacaagccgaaaccugcaaaguacaaucaaauagaguuuuuugcgacacaaugaacucacucacucuaccaagugaaguaaaucucuguaauaucgacauauucaacccaaaauaugacugcaaaauaaugacaucuaaaaccgauguauccucaagcguaaucacaucauuaggagcuauaguuuccugcuacgguaaaacaaaaugcacagcauccaacaaaugucgcgguaucaucaaaacauucuccaacggaugugauuacguaucaaacaaaggugucgacaccguaagcguaggcaacacuuuauacuauguaaacaaacaagaaggacaaagucuauauguaaaaggagaaccaauaauaaacuucuaugacccccuaguauucccuuccgacgaauuugaugcaagcauuucacaaguuaacgaaaaaaucaaucaaucccuugcuuucauaagaaaaucagacgaauuacuacacaacguaaacguaggaaaaagcacaacaaauaucaugauuacaacaauaauaauuguaauaauaguaauacuccucuuacuuauagcagucggcuuauuccuuuacugcaaagcaagauaaggacuaguaauaaggaaacuguaugaaugucugugggcaggaagugaagagauccuucuguaaagguuuuuggaauuaugucugcugaauaauaaacuuuuuugaaauaauaaaucugguagaaaaaugagaucuaaaaaaaaaaaaaaaaaaaaaaaaaaaaaaaaaaaaaaaaaaaaaaaaaaaaaaaaaaaaaaaaugcaucccccccccccccccccccccccccccccccaaaggcucuuuucagagccaccagaauu

SEQ ID NO: 19619 - RNA, 1901 nt, Artificial Sequence
  mRNA product Design d-2 comprising derived and/or modified sequence from HRSV(Memphis-37)__AIY60640.1__F-del_DSCav1_mut8 (opt11)
gggagagcggcucggccauuuugucccagucaguccggaggcugcggcugcagaaguaccgccugcggaguaacugcaaagaagcuuaccauggaacuccccauccuaaaaaccaacgcaaucaccaccauccucgccgccguaacacucugcuuugcaagcucccaaaacaucaccgaagaauuuuaccaaucuaccugcagcgccguaucuaaaggauaccuaggagcccucagaaccgguugguacaccucugucaucacaauagaacucuccaacaucaaagaaaucaaaugcaacggcaccgacgccaaagucaaacucaucaaacaagaacucgacaaauauaaaaacgccguaaccgaccuccaacuccucaugcaauccacccccgccgccggcaguggcuccgcuaucgccuccggaaucgccguuugcaaaguccugcaccuagaaggcgaagucaacaaaaucaaaaacgcccugcucucaaccaacaaagcugucguaagccucuccggcugcggagucuccguccuuaccuucaaaguacucgaccuuaaaaacuacaucgacaaacaacuucuccccauacucaauaaacaauccugcuccauacccaacaucgaaacagucaucgaguuccaacagaaaaauaaccgccuccucgaaauaacccgcgaguucuccgucaacgcaggcgucaccaccccagucuccaccuacaugcugacaaacuccgaacuccuaucccucaucaacgacaugcccaucaccaacgaccaaaagaaacucaugagcaauaacguccaaaucguacgacaacaauccuacagcaucauguguaucaucaaagaagaaguacucgccuacgucguccaacucccacuauacggcgucaucgacacaccaugcuggaaacuucacaccuccccacucugcaccacaaacacaaaagaaggcuccaacaucugccuuacccgaaccgaccgcgggugguacugcgacaacgccggaucagucucguucuuuccccaagccgaaaccugcaaaguacaaucaaaucgcgucuucugcgacaccaugaacuccuuaacacuaccauccgaaguaaaccucugcaacauagacaucuucaacccaaaauacgacugcaaaaucaugaccuccaaaaccgacguauccuccuccguaaucaccagccucggcgcaauagucucaugcuacggcaaaaccaaaugcaccgccuccaacaaaugccgcggcaucauaaaaacuuucucuaacggaugcgacuacgucagcaacaaaggcgucgacaccguauccguagguaauacacuuuacuacgucaauaaacaagaaggccaaucccucuacgucaaaggagaacccaucauaaacuucuacgacccccucgucuuccccuccgacgaguucgacgccuccaucagccaggucaacgaaaagaucaaccaaucacucgccuucauccgcaaaagcgacgaacuccuccacaacguaaacgucggcaaauccacaaccaacauaaugaucaccacuaucaucaucgugauaaucgucauuuuacuucuccucaucgccguaggccucuuccuauacugcaaagcccgcuaaggacuaguaauaaggaaacuguaugaaugucugugggcaggaagugaagagauccuucuguaaagguuuuuggaauuaugucugcugaauaauaaacuuuuuugaaauaauaaaucugguagaaaaaugagaucuaaaaaaaaaaaaaaaaaaaaaaaaaaaaaaaaaaaaaaaaaaaaaaaaaaaaaaaaaaaaaaaaugcaucccccccccccccccccccccccccccccccaaaggcucuuuucagagccaccagaauu

SEQ ID NO: 19620 - RNA, 2217 nt, Artificial Sequence
  mRNA product Design d-3 comprising derived and/or modified sequence from HRSV(Memphis-37)__AIY60640.1__F-del_DSCav1_mut8 (opt1)
gggagagggcgcuuggcuugcaaggacccugagcugcggcauugaagcacacccaacccaacucgacugaagucagccucacugaaccggaucugagaaucuucucucucugggcuugccagggcucuccgaaccuagcuagcauccucuucaauuccaacuagaaagcuuaccauggagcugcccauccucaagaccaacgccaucaccacgauccuggccgcggugacccugugcuucgccagcucccagaacaucaccgaggaguucuaccagagcacgugcuccgccgucagcaagggcuaccucggcgcccugcgcaccgggugguacaccagcgugaucaccaucgagcuguccaacaucaaggagaucaagugcaacggcaccgacgccaaggugaagcucaucaagcaggagcuggacaaguacaagaacgcggucacggaccugcagcuccugaugcagagcaccccggccgccggcuccgggagcgcgaucgccuccggcaucgccgucugcaaggugcugcaccucgagggcgaggugaacaagaucaagaacgcccugcuguccaccaacaaggccgucgugagccucuccggcugcggggugagcguccugaccuucaaggugcuggaccucaagaacuacaucgacaagcagcugcugcccauccugaacaagcagagcugcuccauccccaacaucgagaccgucaucgaguuccagcagaagaacaaccgccuccuggagaucacgcgggaguucagcgugaacgcgggcgugaccacccccgucuccaccuacaugcugacgaacagcgagcuccugucccugaucaacgacaugccgaucaccaacgaccagaagaagcucaugagcaacaacgugcagaucgugcgccagcaguccuacagcaucaugugcaucaucaaggaggagguccuggccuacguggugcagcugccccucuacggggucaucgacacccccugcuggaagcugcacaccagcccccugugcacgaccaacaccaaggagggcuccaacaucugccucacccggacggaccgcgggugguacugcgacaacgccggcagcguguccuucuucccgcaggccgagaccugcaagguccagagcaaccggguguucugcgacaccaugaacucccugacccugcccagcgaggugaaccucugcaacaucgacaucuucaaccccaaguacgacugcaagaucaugacguccaagaccgacgucagcuccagcgugaucaccucccugggcgccaucgugagcugcuacgggaagaccaagugcacggcgagcaacaagugccgcggcaucaucaagaccuucuccaacgggugcgacuacgucagcaacaagggcguggacaccguguccgucggcaacacccuguacuacgugaacaagcaggagggccagagccucuacgugaagggggagcccaucaucaacuucuacgacccgcuggucuuccccuccgacgaguucgacgccagcaucucccaggugaacgagaagaucaaccagagccuggccuucauccggaaguccgacgagcuccugcacaacgugaacgucggcaagagcaccacgaacaucaugaucaccaccaucaucaucgugaucaucgugauccugcugcuccugaucgccgucgggcuguuccucuacugcaaggcccgcugaggacuagugaagggaacacccaaauuuaauucagccuuaagcacaauuaauuaagagugaaacguaauuguacaagcaguuggucacccaccauagggcaugaucaacaccgcaaccuuuccuuuuucccccagugauucugaaaaaccccucuucccuucagcuugcuuagauguuccaaauuuaguaagcuuaaggcggccuacagaagaaaaagaaaaaaaaggccacaaaaguucccucucacuuucaguaaauaaaauaaaagcagcaacagaaauaaagaaauaaaugaaauucaaaaugaaauaaauauuguguugugcagcauuaaaaaaucaauaaaaauuaaaaaugagcaagaucuaaaaaaaaaaaaaaaaaaaaaaaaaaaaaaaaaaaaaaaaaaaaaaaaaaaaaaaaaaaaaaaaugcaucccccccccccccccccccccccccccccccaaaggcucuuuucagagccaccagaauu

SEQ ID NO: 19621 - RNA, 2217 nt, Artificial Sequence
  mRNA product Design d-3 comprising derived and/or modified sequence from HRSV(Memphis-37)__AIY60640.1__F-del_DSCav1_mut8 (opt1)
gggagagggcgcuuggcuugcaaggacccugagcugcggcauugaagcacacccaacccaacucgacugaagucagccucacugaaccggaucugagaaucuucucucucugggcuugccagggcucuccgaaccuagcuagcauccucuucaauuccaacuagaaagcuuaccauggagcugcccauccucaagaccaacgccaucaccacgauccuggccgcggugacccugugcuucgccagcucccagaacaucaccgaggaguucuaccagagcacgugcuccgccgucagcaagggcuaccucggggcccugcgcaccggcugguacaccuccgugaucaccaucgagcugagcaacaucaaggagaucaagugcaacgggaccgacgccaaggugaagcucaucaagcaggagcuggacaaguacaagaacgcggucacggaccugcagcuccugaugcaguccaccccggccgccggcagcggguccgccaucgcgagcggcaucgccgugugcaaggugcugcaccucgagggcgaggucaacaagaucaagaacgcccugcuguccaccaacaaggccguggugagccucuccgggugcggcgucagcgugcugaccuucaaggugcuggaccucaagaacuacaucgacaagcagcugcugcccauccucaacaagcaguccugcagcauccccaacaucgagacggucaucgaguuccagcagaagaacaaccggcugcuggagaucacccgcgaguucuccgugaacgccggggugaccacccccgucagcacguacaugcucaccaacuccgagcugcugagccucaucaacgacaugccgaucaccaacgaccagaagaagcugaugagcaacaacgugcagaucgugcggcagcaguccuacagcaucaugugcaucaucaaggaggagguccuggcguacguggugcagcucccccuguacggcgucaucgacacccccugcuggaagcugcacacgagcccccucugcaccaccaacaccaaggagggguccaacaucugccugacgcgcaccgaccggggcugguacugcgacaacgccggcuccgugagcuucuucccgcaggccgagaccugcaaggugcaguccaaccgcgucuucugcgacaccaugaacagccugacgcuccccuccgaggugaaccugugcaacaucgacaucuucaaccccaaguacgacugcaagaucaugaccagcaagaccgacgucuccagcuccgugaucaccagccugggggccaucguguccugcuacggcaagacgaagugcaccgccagcaacaagugccgggggaucaucaagaccuucuccaacggcugcgacuacgucagcaacaagggcguggacaccguguccgucgggaacacgcucuacuacgugaacaagcaggagggccagagccuguacgugaagggggagcccaucaucaacuucuacgacccgcuggucuuccccagcgacgaguucgacgcguccaucagccaggugaacgagaagaucaaccagucccucgccuucauccgcaagagcgacgagcugcugcacaacgugaacgucggcaaguccaccaccaacaucaugaucaccaccaucaucaucgugaucaucgugauccuccugcugcucaucgccgucgggcuguuccuguacugcaaggcccggugaggacuagugaagggaacacccaaauuuaauucagccuuaagcacaauuaauuaagagugaaacguaauuguacaagcaguuggucacccaccauagggcaugaucaacaccgcaaccuuuccuuuuucccccagugauucugaaaaaccccucuucccuucagcuugcuuagauguuccaaauuuaguaagcuuaaggcggccuacagaagaaaaagaaaaaaaaggccacaaaaguucccucucacuuucaguaaauaaaauaaaagcagcaacagaaauaaagaaauaaaugaaauucaaaaugaaauaaauauuguguugugcagcauuaaaaaaucaauaaaaauuaaaaaugagcaagaucuaaaaaaaaaaaaaaaaaaaaaaaaaaaaaaaaaaaaaaaaaaaaaaaaaaaaaaaaaaaaaaaaugcaucccccccccccccccccccccccccccccccaaaggcucuuuucagagccaccagaauu

SEQ ID NO: 19622 - RNA, 2217 nt, Artificial Sequence
  mRNA product Design d-3 comprising derived and/or modified sequence from HRSV(Memphis-37)__AIY60640.1__F-del_DSCav1_mut8 (opt2)
gggagagggcgcuuggcuugcaaggacccugagcugcggcauugaagcacacccaacccaacucgacugaagucagccucacugaaccggaucugagaaucuucucucucugggcuugccagggcucuccgaaccuagcuagcauccucuucaauuccaacuagaaagcuuaccauggagcuccccauccucaagaccaacgccaucaccaccauccucgccgccgucacccucugcuucgccuccucccagaacaucaccgaggaguucuaccaguccaccugcuccgccgucuccaagggcuaccucggcgcccuccgcaccggcugguacaccuccgucaucaccaucgagcucuccaacaucaaggagaucaagugcaacggcaccgacgccaaggucaagcucaucaagcaggagcucgacaaguacaagaacgccgucaccgaccuccagcuccucaugcaguccacccccgccgccggcuccggcuccgccaucgccuccggcaucgccgucugcaagguccuccaccucgagggcgaggucaacaagaucaagaacgcccuccucuccaccaacaaggccgucgucucccucuccggcugcggcgucuccguccucaccuucaagguccucgaccucaagaacuacaucgacaagcagcuccuccccauccucaacaagcaguccugcuccauccccaacaucgagaccgucaucgaguuccagcagaagaacaaccgccuccucgagaucacccgcgaguucuccgucaacgccggcgucaccacccccgucuccaccuacaugcucaccaacuccgagcuccucucccucaucaacgacaugcccaucaccaacgaccagaagaagcucauguccaacaacguccagaucguccgccagcaguccuacuccaucaugugcaucaucaaggaggagguccucgccuacgucguccagcucccccucuacggcgucaucgacacccccugcuggaagcuccacaccuccccccucugcaccaccaacaccaaggagggcuccaacaucugccucacccgcaccgaccgcggcugguacugcgacaacgccggcuccgucuccuucuucccccaggccgagaccugcaagguccaguccaaccgcgucuucugcgacaccaugaacucccucacccuccccuccgaggucaaccucugcaacaucgacaucuucaaccccaaguacgacugcaagaucaugaccuccaagaccgacgucuccuccuccgucaucaccucccucggcgccaucgucuccugcuacggcaagaccaagugcaccgccuccaacaagugccgcggcaucaucaagaccuucuccaacggcugcgacuacgucuccaacaagggcgucgacaccgucuccgucggcaacacccucuacuacgucaacaagcaggagggccagucccucuacgucaagggcgagcccaucaucaacuucuacgacccccucgucuuccccuccgacgaguucgacgccuccaucucccaggucaacgagaagaucaaccagucccucgccuucauccgcaaguccgacgagcuccuccacaacgucaacgucggcaaguccaccaccaacaucaugaucaccaccaucaucaucgucaucaucgucauccuccuccuccucaucgccgucggccucuuccucuacugcaaggcccgcugaggacuagugaagggaacacccaaauuuaauucagccuuaagcacaauuaauuaagagugaaacguaauuguacaagcaguuggucacccaccauagggcaugaucaacaccgcaaccuuuccuuuuucccccagugauucugaaaaaccccucuucccuucagcuugcuuagauguuccaaauuuaguaagcuuaaggcggccuacagaagaaaaagaaaaaaaaggccacaaaaguucccucucacuuucaguaaauaaaauaaaagcagcaacagaaauaaagaaauaaaugaaauucaaaaugaaauaaauauuguguugugcagcauuaaaaaaucaauaaaaauuaaaaaugagcaagaucuaaaaaaaaaaaaaaaaaaaaaaaaaaaaaaaaaaaaaaaaaaaaaaaaaaaaaaaaaaaaaaaaugcaucccccccccccccccccccccccccccccccaaaggcucuuuucagagccaccagaauu

SEQ ID NO: 19623 - RNA, 2217 nt, Artificial Sequence
  mRNA product Design d-3 comprising derived and/or modified sequence from HRSV(Memphis-37)__AIY60640.1__F-del_DSCav1_mut8 (opt3)
gggagagggcgcuuggcuugcaaggacccugagcugcggcauugaagcacacccaacccaacucgacugaagucagccucacugaaccggaucugagaaucuucucucucugggcuugccagggcucuccgaaccuagcuagcauccucuucaauuccaacuagaaagcuuaccauggagcugcccauccucaagaccaacgccauuacaacuauacuugcugcagugacgcugugcuucgccagcucccagaauaucaccgaagaguuuuaccaaucuacauguucagcggucaguaaaggcuauuugggggcuuuaagaacuggaugguacaccagcguuauuacaaucgaacuguccaacauuaaggagaucaaaugcaaugguaccgacgccaaggugaaacuaauaaagcaggaacucgauaaguauaaaaacgcaguaacugaccugcagcuucugaugcagucuacuccugccgcuggcucggggucagcaaucgccagcggaauugcuguguguaaggucuugcaccucgagggcgaggugaauaaaaucaagaacgcccugcugaguaccaauaaagcgguugugucccucucugguugcggggucagcguguuaacguucaagguacuggaucuuaagaacuacauugacaaacaauugcugccaauccuaaauaagcaguccuguucaauaccgaacauugaaacuguuaucgaguuucagcagaaaaauaacaggcuccuggaaauuacccgggaguucagugugaaugcaggagucacaacucccgugagcaccuauaugcuuacaaacucugagcuguugucccucaucaaugauaugccuaucaccaacgaccaaaagaaacugaugucaaacaaugugcagauuguccgccagcagagcuacaguauaaugugcaucauuaaggaagagguuuuagccuaugugguacaacugccacucuacggcgugaucgauacgcccuguuggaaacuucauacuucuccucugugcacaaccaacacuaaggaaggcuccaauauauguuugacacgaaccgaccgugggugguacugcgauaacgcuggaagcgucucguuuuucccacaggccgagacguguaaggugcagucuaauagaguuuucugcgacaccaugaacucccuaacacugcccucagaagugaaucucugcaacauugauaucuucaauccuaaauaugacuguaagaucaugacaaguaaaaccgaugucagcuccucugugauuacaagccugggugcaaucguaucaugcuacggcaagacuaaauguaccgcuaguaacaagugcagggggauuauaaagacauuuuccaauggaugugacuauguuagcaacaaaggcguggacaccgucucuguggguaauacucuuuacuaugucaacaagcaagaggggcagucacuguacgugaaaggagagccaaucauuaauuucuaugauccguugguuuuucccagugacgaauuugaugccagcaucucccaggugaacgagaagaucaaccagucucucgcguuuauucggaaaucggacgaacuguuacacaauguaaacgucggcaagagcacgacaaauauaaugaucaccacuauuaucauugugaucauaguuauccugcuacuccugauugccgugggccuuuucuuguacugcaaggcacgcugaggacuagugaagggaacacccaaauuuaauucagccuuaagcacaauuaauuaagagugaaacguaauuguacaagcaguuggucacccaccauagggcaugaucaacaccgcaaccuuuccuuuuucccccagugauucugaaaaaccccucuucccuucagcuugcuuagauguuccaaauuuaguaagcuuaaggcggccuacagaagaaaaagaaaaaaaaggccacaaaaguucccucucacuuucaguaaauaaaauaaaagcagcaacagaaauaaagaaauaaaugaaauucaaaaugaaauaaauauuguguugugcagcauuaaaaaaucaauaaaaauuaaaaaugagcaagaucuaaaaaaaaaaaaaaaaaaaaaaaaaaaaaaaaaaaaaaaaaaaaaaaaaaaaaaaaaaaaaaaaugcaucccccccccccccccccccccccccccccccaaaggcucuuuucagagccaccagaauu

SEQ ID NO: 19624 - RNA, 2217 nt, Artificial Sequence
  mRNA product Design d-3 comprising derived and/or modified sequence from HRSV(Memphis-37)__AIY60640.1__F-del_DSCav1_mut8 (opt4)
gggagagggcgcuuggcuugcaaggacccugagcugcggcauugaagcacacccaacccaacucgacugaagucagccucacugaaccggaucugagaaucuucucucucugggcuugccagggcucuccgaaccuagcuagcauccucuucaauuccaacuagaaagcuuaccauggagcugcccauccugaagaccaacgccaucaccaccauccuggccgccgugacccugugcuucgccagcagccagaacaucaccgaggaguucuaccagagcaccugcagcgccgugagcaagggcuaccugggcgcccugagaaccggcugguacaccagcgugaucaccaucgagcugagcaacaucaaggagaucaagugcaacggcaccgacgccaaggugaagcugaucaagcaggagcuggacaaguacaagaacgccgugaccgaccugcagcugcugaugcagagcacccccgccgccggcagcggcagcgccaucgccagcggcaucgccgugugcaaggugcugcaccuggagggcgaggugaacaagaucaagaacgcccugcugagcaccaacaaggccguggugagccugagcggcugcggcgugagcgugcugaccuucaaggugcuggaccugaagaacuacaucgacaagcagcugcugcccauccugaacaagcagagcugcagcauccccaacaucgagaccgugaucgaguuccagcagaagaacaacagacugcuggagaucaccagagaguucagcgugaacgccggcgugaccacccccgugagcaccuacaugcugaccaacagcgagcugcugagccugaucaacgacaugcccaucaccaacgaccagaagaagcugaugagcaacaacgugcagaucgugagacagcagagcuacagcaucaugugcaucaucaaggaggaggugcuggccuacguggugcagcugccccuguacggcgugaucgacacccccugcuggaagcugcacaccagcccccugugcaccaccaacaccaaggagggcagcaacaucugccugaccagaaccgacagaggcugguacugcgacaacgccggcagcgugagcuucuucccccaggccgagaccugcaaggugcagagcaacagaguguucugcgacaccaugaacagccugacccugcccagcgaggugaaccugugcaacaucgacaucuucaaccccaaguacgacugcaagaucaugaccagcaagaccgacgugagcagcagcgugaucaccagccugggcgccaucgugagcugcuacggcaagaccaagugcaccgccagcaacaagugcagaggcaucaucaagaccuucagcaacggcugcgacuacgugagcaacaagggcguggacaccgugagcgugggcaacacccuguacuacgugaacaagcaggagggccagagccuguacgugaagggcgagcccaucaucaacuucuacgacccccugguguuccccagcgacgaguucgacgccagcaucagccaggugaacgagaagaucaaccagagccuggccuucaucagaaagagcgacgagcugcugcacaacgugaacgugggcaagagcaccaccaacaucaugaucaccaccaucaucaucgugaucaucgugauccugcugcugcugaucgccgugggccuguuccuguacugcaaggccagaugaggacuagugaagggaacacccaaauuuaauucagccuuaagcacaauuaauuaagagugaaacguaauuguacaagcaguuggucacccaccauagggcaugaucaacaccgcaaccuuuccuuuuucccccagugauucugaaaaaccccucuucccuucagcuugcuuagauguuccaaauuuaguaagcuuaaggcggccuacagaagaaaaagaaaaaaaaggccacaaaaguucccucucacuuucaguaaauaaaauaaaagcagcaacagaaauaaagaaauaaaugaaauucaaaaugaaauaaauauuguguugugcagcauuaaaaaaucaauaaaaauuaaaaaugagcaagaucuaaaaaaaaaaaaaaaaaaaaaaaaaaaaaaaaaaaaaaaaaaaaaaaaaaaaaaaaaaaaaaaaugcaucccccccccccccccccccccccccccccccaaaggcucuuuucagagccaccagaauu

SEQ ID NO: 19625 - RNA, 2217 nt, Artificial Sequence
  mRNA product Design d-3 comprising derived and/or modified sequence from HRSV(Memphis-37)__AIY60640.1__F-del_DSCav1_mut8 (opt5)
gggagagggcgcuuggcuugcaaggacccugagcugcggcauugaagcacacccaacccaacucgacugaagucagccucacugaaccggaucugagaaucuucucucucugggcuugccagggcucuccgaaccuagcuagcauccucuucaauuccaacuagaaagcuuaccauggagcugcccauccucaagaccaacgccauuacaacgauccuggcugccgugacccuuugcuucgcgagcucccagaauauuacagaagaguuuuaccaaucuaccuguagcgcugucuccaaaggcuaucugggggcccucagaacaggaugguacaccucuguuaucacaauugaacugagcaacaucaaggagaucaaaugcaauggcaccgacgccaaggugaaacuuauuaagcaggaacuggauaaguauaaaaacgcugugacggaccuccagcugcugaugcaguccaccccugccgcugggucuggaagcgccaucgcguccggcauugccgucuguaaggugcuccaccuggagggggagguuaauaaaaucaagaacgcccuucugagcacaaauaaagcuguggucucucucuccggaugcggcgugagcguucugaccuucaaggugcuugaucugaagaacuacauugacaaacaacuccugccgauccugaauaagcagucuuguuccauucccaacaucgaaacagucaucgaguuucagcagaaaaauaaccggcuccuggaaauuacccgcgaguucagcgugaaugcuggcgugacgacaccugucucuaccuauaugcuuacaaacuccgagcugcucagccugaucaaugauaugcccauuaccaacgaccaaaagaaacuuauguccaacaauguucagaucgugagacagcagucuuacagcauuaugugcaucaucaaggaagaggugcuggccuaugucgugcaacucccucuguacgggguuauugauacccccuguuggaaacugcauacauccccucucugcacgaccaacacaaaggaaggaagcaauaucugucugacccggacagaccgcggcugguacugcgauaacgcggggucuguguccuuuuucccgcaggccgagaccuguaagguccagagcaauagaguguuuugcgacacgaugaacucucuuacacugcccagcgaaguuaaucucugcaacauugauaucuucaauccuaaauaugacuguaagauuaugaccuccaaaaccgaugugucuagcuccgucaucacaagccugggagcuaucgugucuugcuacggcaagaccaaauguacagccuccaacaagugccgggggauuaucaagacguuuagcaauggaugugacuaugucucuaacaaaggcguggacaccguuuccgugggcaauacacuuuacuaugucaacaagcaagaggggcagagccuguacgugaaaggagagcccauuaucaauuucuaugauccucucguuuuucccuccgacgaguucgaugcuucuauuagccaggugaacgaaaagaucaaccagucccuggccuuuauucgcaaaucugacgaacugcuccacaaugucaacgugggcaagagcaccacaaauaucaugaucaccacgauuaucauugugaucauuguuauccugcuucugcucaucgccgucgggcuguuccuguacugcaaggcuagaugaggacuagugaagggaacacccaaauuuaauucagccuuaagcacaauuaauuaagagugaaacguaauuguacaagcaguuggucacccaccauagggcaugaucaacaccgcaaccuuuccuuuuucccccagugauucugaaaaaccccucuucccuucagcuugcuuagauguuccaaauuuaguaagcuuaaggcggccuacagaagaaaaagaaaaaaaaggccacaaaaguucccucucacuuucaguaaauaaaauaaaagcagcaacagaaauaaagaaauaaaugaaauucaaaaugaaauaaauauuguguugugcagcauuaaaaaaucaauaaaaauuaaaaaugagcaagaucuaaaaaaaaaaaaaaaaaaaaaaaaaaaaaaaaaaaaaaaaaaaaaaaaaaaaaaaaaaaaaaaaugcaucccccccccccccccccccccccccccccccaaaggcucuuuucagagccaccagaauu

SEQ ID NO: 19626 - RNA, 2217 nt, Artificial Sequence
  mRNA product Design d-3 comprising derived and/or modified sequence from HRSV(Memphis-37)__AIY60640.1__F-del_DSCav1_mut8 (opt6)
gggagagggcgcuuggcuugcaaggacccugagcugcggcauugaagcacacccaacccaacucgacugaagucagccucacugaaccggaucugagaaucuucucucucugggcuugccagggcucuccgaaccuagcuagcauccucuucaauuccaacuagaaagcuuaccauggaacuacccauacuaaaaacaaacgcaauuacaacaauacuugccgcaguaaccuuaugcuuugccucaucccaaaacauaacagaagaauuuuaucaaucaacaugcuccgcaguaucaaaaggauaccuaggcgcucuaagaacaggaugguacacauccguaaucacaauagaacuauccaauauaaaagaaauaaaauguaauggaacagaugcaaaaguuaaauuaauaaaacaagaacuagacaaauacaaaaacgcaguuaccgaucuccaacuauuaaugcaaucaacaccagcugcaggaaguggaagcgccauagcaagcggaauagcagucugcaaaguauuacaucuugaaggcgaaguaaacaaaaucaaaaaugcccuccucucaacaaacaaagcuguaguaucccuaucaggaugcgguguaucuguucuuacauuuaaaguacucgaucuaaaaaacuacaucgauaaacaguuacuuccaauacucaacaaacaaucauguagcauaccaaacauagaaacaguaauagaauuucaacaaaaaaacaaucgacuacucgaaauaacuagagaauuuucuguaaacgcuggaguaaccacaccagugucuaccuauaugcuuacaaauagcgaacuccuaucacuaaucaaugacaugccaauaacaaaugaccagaaaaaacucaugucaaauaacguacaaauaguacgacaacaaagcuacuccauaaugugcauaaucaaagaagaaguauuagccuacguuguucaacuaccauuauauggaguuauagacacuccaugcuggaaauuacauacaagcccacucuguacaacaaacacaaaagaaggcucaaacauaugcuuaacaagaacagauagaggaugguacugcgauaacgcaggcucagucucauuuuuuccacaagccgaaaccugcaaaguacaaucaaauagaguuuuuugcgacacaaugaacucacucacucuaccaagugaaguaaaucucuguaauaucgacauauucaacccaaaauaugacugcaaaauaaugacaucuaaaaccgauguauccucaagcguaaucacaucauuaggagcuauaguuuccugcuacgguaaaacaaaaugcacagcauccaacaaaugucgcgguaucaucaaaacauucuccaacggaugugauuacguaucaaacaaaggugucgacaccguaagcguaggcaacacuuuauacuauguaaacaaacaagaaggacaaagucuauauguaaaaggagaaccaauaauaaacuucuaugacccccuaguauucccuuccgacgaauuugaugcaagcauuucacaaguuaacgaaaaaaucaaucaaucccuugcuuucauaagaaaaucagacgaauuacuacacaacguaaacguaggaaaaagcacaacaaauaucaugauuacaacaauaauaauuguaauaauaguaauacuccucuuacuuauagcagucggcuuauuccuuuacugcaaagcaagauaaggacuagugaagggaacacccaaauuuaauucagccuuaagcacaauuaauuaagagugaaacguaauuguacaagcaguuggucacccaccauagggcaugaucaacaccgcaaccuuuccuuuuucccccagugauucugaaaaaccccucuucccuucagcuugcuuagauguuccaaauuuaguaagcuuaaggcggccuacagaagaaaaagaaaaaaaaggccacaaaaguucccucucacuuucaguaaauaaaauaaaagcagcaacagaaauaaagaaauaaaugaaauucaaaaugaaauaaauauuguguugugcagcauuaaaaaaucaauaaaaauuaaaaaugagcaagaucuaaaaaaaaaaaaaaaaaaaaaaaaaaaaaaaaaaaaaaaaaaaaaaaaaaaaaaaaaaaaaaaaugcaucccccccccccccccccccccccccccccccaaaggcucuuuucagagccaccagaauu

SEQ ID NO: 19627 - RNA, 2217 nt, Artificial Sequence
  mRNA product Design d-3 comprising derived and/or modified sequence from HRSV(Memphis-37)__AIY60640.1__F-del_DSCav1_mut8 (opt11)
gggagagggcgcuuggcuugcaaggacccugagcugcggcauugaagcacacccaacccaacucgacugaagucagccucacugaaccggaucugagaaucuucucucucugggcuugccagggcucuccgaaccuagcuagcauccucuucaauuccaacuagaaagcuuaccauggaacuccccauccuaaaaaccaacgcaaucaccaccauccucgccgccguaacacucugcuuugcaagcucccaaaacaucaccgaagaauuuuaccaaucuaccugcagcgccguaucuaaaggauaccuaggagcccucagaaccgguugguacaccucugucaucacaauagaacucuccaacaucaaagaaaucaaaugcaacggcaccgacgccaaagucaaacucaucaaacaagaacucgacaaauauaaaaacgccguaaccgaccuccaacuccucaugcaauccacccccgccgccggcaguggcuccgcuaucgccuccggaaucgccguuugcaaaguccugcaccuagaaggcgaagucaacaaaaucaaaaacgcccugcucucaaccaacaaagcugucguaagccucuccggcugcggagucuccguccuuaccuucaaaguacucgaccuuaaaaacuacaucgacaaacaacuucuccccauacucaauaaacaauccugcuccauacccaacaucgaaacagucaucgaguuccaacagaaaaauaaccgccuccucgaaauaacccgcgaguucuccgucaacgcaggcgucaccaccccagucuccaccuacaugcugacaaacuccgaacuccuaucccucaucaacgacaugcccaucaccaacgaccaaaagaaacucaugagcaauaacguccaaaucguacgacaacaauccuacagcaucauguguaucaucaaagaagaaguacucgccuacgucguccaacucccacuauacggcgucaucgacacaccaugcuggaaacuucacaccuccccacucugcaccacaaacacaaaagaaggcuccaacaucugccuuacccgaaccgaccgcgggugguacugcgacaacgccggaucagucucguucuuuccccaagccgaaaccugcaaaguacaaucaaaucgcgucuucugcgacaccaugaacuccuuaacacuaccauccgaaguaaaccucugcaacauagacaucuucaacccaaaauacgacugcaaaaucaugaccuccaaaaccgacguauccuccuccguaaucaccagccucggcgcaauagucucaugcuacggcaaaaccaaaugcaccgccuccaacaaaugccgcggcaucauaaaaacuuucucuaacggaugcgacuacgucagcaacaaaggcgucgacaccguauccguagguaauacacuuuacuacgucaauaaacaagaaggccaaucccucuacgucaaaggagaacccaucauaaacuucuacgacccccucgucuuccccuccgacgaguucgacgccuccaucagccaggucaacgaaaagaucaaccaaucacucgccuucauccgcaaaagcgacgaacuccuccacaacguaaacgucggcaaauccacaaccaacauaaugaucaccacuaucaucaucgugauaaucgucauuuuacuucuccucaucgccguaggccucuuccuauacugcaaagcccgcuaaggacuagugaagggaacacccaaauuuaauucagccuuaagcacaauuaauuaagagugaaacguaauuguacaagcaguuggucacccaccauagggcaugaucaacaccgcaaccuuuccuuuuucccccagugauucugaaaaaccccucuucccuucagcuugcuuagauguuccaaauuuaguaagcuuaaggcggccuacagaagaaaaagaaaaaaaaggccacaaaaguucccucucacuuucaguaaauaaaauaaaagcagcaacagaaauaaagaaauaaaugaaauucaaaaugaaauaaauauuguguugugcagcauuaaaaaaucaauaaaaauuaaaaaugagcaagaucuaaaaaaaaaaaaaaaaaaaaaaaaaaaaaaaaaaaaaaaaaaaaaaaaaaaaaaaaaaaaaaaaugcaucccccccccccccccccccccccccccccccaaaggcucuuuucagagccaccagaauu

SEQ ID NO: 19628 - RNA, 1900 nt, Artificial Sequence
  mRNA product Design d-4 comprising derived and/or modified sequence from HRSV(Memphis-37)__AIY60640.1__F-del_DSCav1_mut8 (opt1)
gggagagucccgcagucggcguccagcggcucugcuuguucgugugugugucguugcaggccuuauucaagcuuaccauggagcugcccauccucaagaccaacgccaucaccacgauccuggccgcggugacccugugcuucgccagcucccagaacaucaccgaggaguucuaccagagcacgugcuccgccgucagcaagggcuaccucggcgcccugcgcaccgggugguacaccagcgugaucaccaucgagcuguccaacaucaaggagaucaagugcaacggcaccgacgccaaggugaagcucaucaagcaggagcuggacaaguacaagaacgcggucacggaccugcagcuccugaugcagagcaccccggccgccggcuccgggagcgcgaucgccuccggcaucgccgucugcaaggugcugcaccucgagggcgaggugaacaagaucaagaacgcccugcuguccaccaacaaggccgucgugagccucuccggcugcggggugagcguccugaccuucaaggugcuggaccucaagaacuacaucgacaagcagcugcugcccauccugaacaagcagagcugcuccauccccaacaucgagaccgucaucgaguuccagcagaagaacaaccgccuccuggagaucacgcgggaguucagcgugaacgcgggcgugaccacccccgucuccaccuacaugcugacgaacagcgagcuccugucccugaucaacgacaugccgaucaccaacgaccagaagaagcucaugagcaacaacgugcagaucgugcgccagcaguccuacagcaucaugugcaucaucaaggaggagguccuggccuacguggugcagcugccccucuacggggucaucgacacccccugcuggaagcugcacaccagcccccugugcacgaccaacaccaaggagggcuccaacaucugccucacccggacggaccgcgggugguacugcgacaacgccggcagcguguccuucuucccgcaggccgagaccugcaagguccagagcaaccggguguucugcgacaccaugaacucccugacccugcccagcgaggugaaccucugcaacaucgacaucuucaaccccaaguacgacugcaagaucaugacguccaagaccgacgucagcuccagcgugaucaccucccugggcgccaucgugagcugcuacgggaagaccaagugcacggcgagcaacaagugccgcggcaucaucaagaccuucuccaacgggugcgacuacgucagcaacaagggcguggacaccguguccgucggcaacacccuguacuacgugaacaagcaggagggccagagccucuacgugaagggggagcccaucaucaacuucuacgacccgcuggucuuccccuccgacgaguucgacgccagcaucucccaggugaacgagaagaucaaccagagccuggccuucauccggaaguccgacgagcuccugcacaacgugaacgucggcaagagcaccacgaacaucaugaucaccaccaucaucaucgugaucaucgugauccugcugcuccugaucgccgucgggcuguuccucuacugcaaggcccgcugaggacuaguggaagcauuuuccuggcugauuaaaagaaauuacucagcuauggucaucuguuccuguuagaaggcuaugcagcauauuauauacuaugcgcauguuaugaaaugcauaauaaaaaauuuuaaaaaaucuaaaagaucuaaaaaaaaaaaaaaaaaaaaaaaaaaaaaaaaaaaaaaaaaaaaaaaaaaaaaaaaaaaaaaaaugcaucccccccccccccccccccccccccccccccaaaggcucuuuucagagccaccagaauu

SEQ ID NO: 19629 - RNA, 1900 nt, Artificial Sequence
  mRNA product Design d-4 comprising derived and/or modified sequence from HRSV(Memphis-37)__AIY60640.1__F-del_DSCav1_mut8 (opt1)
gggagagucccgcagucggcguccagcggcucugcuuguucgugugugugucguugcaggccuuauucaagcuuaccauggagcugcccauccucaagaccaacgccaucaccacgauccuggccgcggugacccugugcuucgccagcucccagaacaucaccgaggaguucuaccagagcacgugcuccgccgucagcaagggcuaccucggggcccugcgcaccggcugguacaccuccgugaucaccaucgagcugagcaacaucaaggagaucaagugcaacgggaccgacgccaaggugaagcucaucaagcaggagcuggacaaguacaagaacgcggucacggaccugcagcuccugaugcaguccaccccggccgccggcagcggguccgccaucgcgagcggcaucgccgugugcaaggugcugcaccucgagggcgaggucaacaagaucaagaacgcccugcuguccaccaacaaggccguggugagccucuccgggugcggcgucagcgugcugaccuucaaggugcuggaccucaagaacuacaucgacaagcagcugcugcccauccucaacaagcaguccugcagcauccccaacaucgagacggucaucgaguuccagcagaagaacaaccggcugcuggagaucacccgcgaguucuccgugaacgccggggugaccacccccgucagcacguacaugcucaccaacuccgagcugcugagccucaucaacgacaugccgaucaccaacgaccagaagaagcugaugagcaacaacgugcagaucgugcggcagcaguccuacagcaucaugugcaucaucaaggaggagguccuggcguacguggugcagcucccccuguacggcgucaucgacacccccugcuggaagcugcacacgagcccccucugcaccaccaacaccaaggagggguccaacaucugccugacgcgcaccgaccggggcugguacugcgacaacgccggcuccgugagcuucuucccgcaggccgagaccugcaaggugcaguccaaccgcgucuucugcgacaccaugaacagccugacgcuccccuccgaggugaaccugugcaacaucgacaucuucaaccccaaguacgacugcaagaucaugaccagcaagaccgacgucuccagcuccgugaucaccagccugggggccaucguguccugcuacggcaagacgaagugcaccgccagcaacaagugccgggggaucaucaagaccuucuccaacggcugcgacuacgucagcaacaagggcguggacaccguguccgucgggaacacgcucuacuacgugaacaagcaggagggccagagccuguacgugaagggggagcccaucaucaacuucuacgacccgcuggucuuccccagcgacgaguucgacgcguccaucagccaggugaacgagaagaucaaccagucccucgccuucauccgcaagagcgacgagcugcugcacaacgugaacgucggcaaguccaccaccaacaucaugaucaccaccaucaucaucgugaucaucgugauccuccugcugcucaucgccgucgggcuguuccuguacugcaaggcccggugaggacuaguggaagcauuuuccuggcugauuaaaagaaauuacucagcuauggucaucuguuccuguuagaaggcuaugcagcauauuauauacuaugcgcauguuaugaaaugcauaauaaaaaauuuuaaaaaaucuaaaagaucuaaaaaaaaaaaaaaaaaaaaaaaaaaaaaaaaaaaaaaaaaaaaaaaaaaaaaaaaaaaaaaaaugcaucccccccccccccccccccccccccccccccaaaggcucuuuucagagccaccagaauu

SEQ ID NO: 19630 - RNA, 1900 nt, Artificial Sequence
  mRNA product Design d-4 comprising derived and/or modified sequence from HRSV(Memphis-37)__AIY60640.1__F-del_DSCav1_mut8 (opt2)
gggagagucccgcagucggcguccagcggcucugcuuguucgugugugugucguugcaggccuuauucaagcuuaccauggagcuccccauccucaagaccaacgccaucaccaccauccucgccgccgucacccucugcuucgccuccucccagaacaucaccgaggaguucuaccaguccaccugcuccgccgucuccaagggcuaccucggcgcccuccgcaccggcugguacaccuccgucaucaccaucgagcucuccaacaucaaggagaucaagugcaacggcaccgacgccaaggucaagcucaucaagcaggagcucgacaaguacaagaacgccgucaccgaccuccagcuccucaugcaguccacccccgccgccggcuccggcuccgccaucgccuccggcaucgccgucugcaagguccuccaccucgagggcgaggucaacaagaucaagaacgcccuccucuccaccaacaaggccgucgucucccucuccggcugcggcgucuccguccucaccuucaagguccucgaccucaagaacuacaucgacaagcagcuccuccccauccucaacaagcaguccugcuccauccccaacaucgagaccgucaucgaguuccagcagaagaacaaccgccuccucgagaucacccgcgaguucuccgucaacgccggcgucaccacccccgucuccaccuacaugcucaccaacuccgagcuccucucccucaucaacgacaugcccaucaccaacgaccagaagaagcucauguccaacaacguccagaucguccgccagcaguccuacuccaucaugugcaucaucaaggaggagguccucgccuacgucguccagcucccccucuacggcgucaucgacacccccugcuggaagcuccacaccuccccccucugcaccaccaacaccaaggagggcuccaacaucugccucacccgcaccgaccgcggcugguacugcgacaacgccggcuccgucuccuucuucccccaggccgagaccugcaagguccaguccaaccgcgucuucugcgacaccaugaacucccucacccuccccuccgaggucaaccucugcaacaucgacaucuucaaccccaaguacgacugcaagaucaugaccuccaagaccgacgucuccuccuccgucaucaccucccucggcgccaucgucuccugcuacggcaagaccaagugcaccgccuccaacaagugccgcggcaucaucaagaccuucuccaacggcugcgacuacgucuccaacaagggcgucgacaccgucuccgucggcaacacccucuacuacgucaacaagcaggagggccagucccucuacgucaagggcgagcccaucaucaacuucuacgacccccucgucuuccccuccgacgaguucgacgccuccaucucccaggucaacgagaagaucaaccagucccucgccuucauccgcaaguccgacgagcuccuccacaacgucaacgucggcaaguccaccaccaacaucaugaucaccaccaucaucaucgucaucaucgucauccuccuccuccucaucgccgucggccucuuccucuacugcaaggcccgcugaggacuaguggaagcauuuuccuggcugauuaaaagaaauuacucagcuauggucaucuguuccuguuagaaggcuaugcagcauauuauauacuaugcgcauguuaugaaaugcauaauaaaaaauuuuaaaaaaucuaaaagaucuaaaaaaaaaaaaaaaaaaaaaaaaaaaaaaaaaaaaaaaaaaaaaaaaaaaaaaaaaaaaaaaaugcaucccccccccccccccccccccccccccccccaaaggcucuuuucagagccaccagaauu

SEQ ID NO: 19631 - RNA, 1900 nt, Artificial Sequence
  mRNA product Design d-4 comprising derived and/or modified sequence from HRSV(Memphis-37)__AIY60640.1__F-del_DSCav1_mut8 (opt3)
gggagagucccgcagucggcguccagcggcucugcuuguucgugugugugucguugcaggccuuauucaagcuuaccauggagcugcccauccucaagaccaacgccauuacaacuauacuugcugcagugacgcugugcuucgccagcucccagaauaucaccgaagaguuuuaccaaucuacauguucagcggucaguaaaggcuauuugggggcuuuaagaacuggaugguacaccagcguuauuacaaucgaacuguccaacauuaaggagaucaaaugcaaugguaccgacgccaaggugaaacuaauaaagcaggaacucgauaaguauaaaaacgcaguaacugaccugcagcuucugaugcagucuacuccugccgcuggcucggggucagcaaucgccagcggaauugcuguguguaaggucuugcaccucgagggcgaggugaauaaaaucaagaacgcccugcugaguaccaauaaagcgguugugucccucucugguugcggggucagcguguuaacguucaagguacuggaucuuaagaacuacauugacaaacaauugcugccaauccuaaauaagcaguccuguucaauaccgaacauugaaacuguuaucgaguuucagcagaaaaauaacaggcuccuggaaauuacccgggaguucagugugaaugcaggagucacaacucccgugagcaccuauaugcuuacaaacucugagcuguugucccucaucaaugauaugccuaucaccaacgaccaaaagaaacugaugucaaacaaugugcagauuguccgccagcagagcuacaguauaaugugcaucauuaaggaagagguuuuagccuaugugguacaacugccacucuacggcgugaucgauacgcccuguuggaaacuucauacuucuccucugugcacaaccaacacuaaggaaggcuccaauauauguuugacacgaaccgaccgugggugguacugcgauaacgcuggaagcgucucguuuuucccacaggccgagacguguaaggugcagucuaauagaguuuucugcgacaccaugaacucccuaacacugcccucagaagugaaucucugcaacauugauaucuucaauccuaaauaugacuguaagaucaugacaaguaaaaccgaugucagcuccucugugauuacaagccugggugcaaucguaucaugcuacggcaagacuaaauguaccgcuaguaacaagugcagggggauuauaaagacauuuuccaauggaugugacuauguuagcaacaaaggcguggacaccgucucuguggguaauacucuuuacuaugucaacaagcaagaggggcagucacuguacgugaaaggagagccaaucauuaauuucuaugauccguugguuuuucccagugacgaauuugaugccagcaucucccaggugaacgagaagaucaaccagucucucgcguuuauucggaaaucggacgaacuguuacacaauguaaacgucggcaagagcacgacaaauauaaugaucaccacuauuaucauugugaucauaguuauccugcuacuccugauugccgugggccuuuucuuguacugcaaggcacgcugaggacuaguggaagcauuuuccuggcugauuaaaagaaauuacucagcuauggucaucuguuccuguuagaaggcuaugcagcauauuauauacuaugcgcauguuaugaaaugcauaauaaaaaauuuuaaaaaaucuaaaagaucuaaaaaaaaaaaaaaaaaaaaaaaaaaaaaaaaaaaaaaaaaaaaaaaaaaaaaaaaaaaaaaaaugcaucccccccccccccccccccccccccccccccaaaggcucuuuucagagccaccagaauu

SEQ ID NO: 19632 - RNA, 1900 nt, Artificial Sequence
  mRNA product Design d-4 comprising derived and/or modified sequence from HRSV(Memphis-37)__AIY60640.1__F-del_DSCav1_mut8 (opt4)
gggagagucccgcagucggcguccagcggcucugcuuguucgugugugugucguugcaggccuuauucaagcuuaccauggagcugcccauccugaagaccaacgccaucaccaccauccuggccgccgugacccugugcuucgccagcagccagaacaucaccgaggaguucuaccagagcaccugcagcgccgugagcaagggcuaccugggcgcccugagaaccggcugguacaccagcgugaucaccaucgagcugagcaacaucaaggagaucaagugcaacggcaccgacgccaaggugaagcugaucaagcaggagcuggacaaguacaagaacgccgugaccgaccugcagcugcugaugcagagcacccccgccgccggcagcggcagcgccaucgccagcggcaucgccgugugcaaggugcugcaccuggagggcgaggugaacaagaucaagaacgcccugcugagcaccaacaaggccguggugagccugagcggcugcggcgugagcgugcugaccuucaaggugcuggaccugaagaacuacaucgacaagcagcugcugcccauccugaacaagcagagcugcagcauccccaacaucgagaccgugaucgaguuccagcagaagaacaacagacugcuggagaucaccagagaguucagcgugaacgccggcgugaccacccccgugagcaccuacaugcugaccaacagcgagcugcugagccugaucaacgacaugcccaucaccaacgaccagaagaagcugaugagcaacaacgugcagaucgugagacagcagagcuacagcaucaugugcaucaucaaggaggaggugcuggccuacguggugcagcugccccuguacggcgugaucgacacccccugcuggaagcugcacaccagcccccugugcaccaccaacaccaaggagggcagcaacaucugccugaccagaaccgacagaggcugguacugcgacaacgccggcagcgugagcuucuucccccaggccgagaccugcaaggugcagagcaacagaguguucugcgacaccaugaacagccugacccugcccagcgaggugaaccugugcaacaucgacaucuucaaccccaaguacgacugcaagaucaugaccagcaagaccgacgugagcagcagcgugaucaccagccugggcgccaucgugagcugcuacggcaagaccaagugcaccgccagcaacaagugcagaggcaucaucaagaccuucagcaacggcugcgacuacgugagcaacaagggcguggacaccgugagcgugggcaacacccuguacuacgugaacaagcaggagggccagagccuguacgugaagggcgagcccaucaucaacuucuacgacccccugguguuccccagcgacgaguucgacgccagcaucagccaggugaacgagaagaucaaccagagccuggccuucaucagaaagagcgacgagcugcugcacaacgugaacgugggcaagagcaccaccaacaucaugaucaccaccaucaucaucgugaucaucgugauccugcugcugcugaucgccgugggccuguuccuguacugcaaggccagaugaggacuaguggaagcauuuuccuggcugauuaaaagaaauuacucagcuauggucaucuguuccuguuagaaggcuaugcagcauauuauauacuaugcgcauguuaugaaaugcauaauaaaaaauuuuaaaaaaucuaaaagaucuaaaaaaaaaaaaaaaaaaaaaaaaaaaaaaaaaaaaaaaaaaaaaaaaaaaaaaaaaaaaaaaaugcaucccccccccccccccccccccccccccccccaaaggcucuuuucagagccaccagaauu

SEQ ID NO: 19633 - RNA, 1900 nt, Artificial Sequence
  mRNA product Design d-4 comprising derived and/or modified sequence from HRSV(Memphis-37)__AIY60640.1__F-del_DSCav1_mut8 (opt5)
gggagagucccgcagucggcguccagcggcucugcuuguucgugugugugucguugcaggccuuauucaagcuuaccauggagcugcccauccucaagaccaacgccauuacaacgauccuggcugccgugacccuuugcuucgcgagcucccagaauauuacagaagaguuuuaccaaucuaccuguagcgcugucuccaaaggcuaucugggggcccucagaacaggaugguacaccucuguuaucacaauugaacugagcaacaucaaggagaucaaaugcaauggcaccgacgccaaggugaaacuuauuaagcaggaacuggauaaguauaaaaacgcugugacggaccuccagcugcugaugcaguccaccccugccgcugggucuggaagcgccaucgcguccggcauugccgucuguaaggugcuccaccuggagggggagguuaauaaaaucaagaacgcccuucugagcacaaauaaagcuguggucucucucuccggaugcggcgugagcguucugaccuucaaggugcuugaucugaagaacuacauugacaaacaacuccugccgauccugaauaagcagucuuguuccauucccaacaucgaaacagucaucgaguuucagcagaaaaauaaccggcuccuggaaauuacccgcgaguucagcgugaaugcuggcgugacgacaccugucucuaccuauaugcuuacaaacuccgagcugcucagccugaucaaugauaugcccauuaccaacgaccaaaagaaacuuauguccaacaauguucagaucgugagacagcagucuuacagcauuaugugcaucaucaaggaagaggugcuggccuaugucgugcaacucccucuguacgggguuauugauacccccuguuggaaacugcauacauccccucucugcacgaccaacacaaaggaaggaagcaauaucugucugacccggacagaccgcggcugguacugcgauaacgcggggucuguguccuuuuucccgcaggccgagaccuguaagguccagagcaauagaguguuuugcgacacgaugaacucucuuacacugcccagcgaaguuaaucucugcaacauugauaucuucaauccuaaauaugacuguaagauuaugaccuccaaaaccgaugugucuagcuccgucaucacaagccugggagcuaucgugucuugcuacggcaagaccaaauguacagccuccaacaagugccgggggauuaucaagacguuuagcaauggaugugacuaugucucuaacaaaggcguggacaccguuuccgugggcaauacacuuuacuaugucaacaagcaagaggggcagagccuguacgugaaaggagagcccauuaucaauuucuaugauccucucguuuuucccuccgacgaguucgaugcuucuauuagccaggugaacgaaaagaucaaccagucccuggccuuuauucgcaaaucugacgaacugcuccacaaugucaacgugggcaagagcaccacaaauaucaugaucaccacgauuaucauugugaucauuguuauccugcuucugcucaucgccgucgggcuguuccuguacugcaaggcuagaugaggacuaguggaagcauuuuccuggcugauuaaaagaaauuacucagcuauggucaucuguuccuguuagaaggcuaugcagcauauuauauacuaugcgcauguuaugaaaugcauaauaaaaaauuuuaaaaaaucuaaaagaucuaaaaaaaaaaaaaaaaaaaaaaaaaaaaaaaaaaaaaaaaaaaaaaaaaaaaaaaaaaaaaaaaugcaucccccccccccccccccccccccccccccccaaaggcucuuuucagagccaccagaauu

SEQ ID NO: 19634 - RNA, 1900 nt, Artificial Sequence
  mRNA product Design d-4 comprising derived and/or modified sequence from HRSV(Memphis-37)__AIY60640.1__F-del_DSCav1_mut8 (opt6)
gggagagucccgcagucggcguccagcggcucugcuuguucgugugugugucguugcaggccuuauucaagcuuaccauggaacuacccauacuaaaaacaaacgcaauuacaacaauacuugccgcaguaaccuuaugcuuugccucaucccaaaacauaacagaagaauuuuaucaaucaacaugcuccgcaguaucaaaaggauaccuaggcgcucuaagaacaggaugguacacauccguaaucacaauagaacuauccaauauaaaagaaauaaaauguaauggaacagaugcaaaaguuaaauuaauaaaacaagaacuagacaaauacaaaaacgcaguuaccgaucuccaacuauuaaugcaaucaacaccagcugcaggaaguggaagcgccauagcaagcggaauagcagucugcaaaguauuacaucuugaaggcgaaguaaacaaaaucaaaaaugcccuccucucaacaaacaaagcuguaguaucccuaucaggaugcgguguaucuguucuuacauuuaaaguacucgaucuaaaaaacuacaucgauaaacaguuacuuccaauacucaacaaacaaucauguagcauaccaaacauagaaacaguaauagaauuucaacaaaaaaacaaucgacuacucgaaauaacuagagaauuuucuguaaacgcuggaguaaccacaccagugucuaccuauaugcuuacaaauagcgaacuccuaucacuaaucaaugacaugccaauaacaaaugaccagaaaaaacucaugucaaauaacguacaaauaguacgacaacaaagcuacuccauaaugugcauaaucaaagaagaaguauuagccuacguuguucaacuaccauuauauggaguuauagacacuccaugcuggaaauuacauacaagcccacucuguacaacaaacacaaaagaaggcucaaacauaugcuuaacaagaacagauagaggaugguacugcgauaacgcaggcucagucucauuuuuuccacaagccgaaaccugcaaaguacaaucaaauagaguuuuuugcgacacaaugaacucacucacucuaccaagugaaguaaaucucuguaauaucgacauauucaacccaaaauaugacugcaaaauaaugacaucuaaaaccgauguauccucaagcguaaucacaucauuaggagcuauaguuuccugcuacgguaaaacaaaaugcacagcauccaacaaaugucgcgguaucaucaaaacauucuccaacggaugugauuacguaucaaacaaaggugucgacaccguaagcguaggcaacacuuuauacuauguaaacaaacaagaaggacaaagucuauauguaaaaggagaaccaauaauaaacuucuaugacccccuaguauucccuuccgacgaauuugaugcaagcauuucacaaguuaacgaaaaaaucaaucaaucccuugcuuucauaagaaaaucagacgaauuacuacacaacguaaacguaggaaaaagcacaacaaauaucaugauuacaacaauaauaauuguaauaauaguaauacuccucuuacuuauagcagucggcuuauuccuuuacugcaaagcaagauaaggacuaguggaagcauuuuccuggcugauuaaaagaaauuacucagcuauggucaucuguuccuguuagaaggcuaugcagcauauuauauacuaugcgcauguuaugaaaugcauaauaaaaaauuuuaaaaaaucuaaaagaucuaaaaaaaaaaaaaaaaaaaaaaaaaaaaaaaaaaaaaaaaaaaaaaaaaaaaaaaaaaaaaaaaugcaucccccccccccccccccccccccccccccccaaaggcucuuuucagagccaccagaauu

SEQ ID NO: 19635 - RNA, 1900 nt, Artificial Sequence
  mRNA product Design d-4 comprising derived and/or modified sequence from HRSV(Memphis-37)__AIY60640.1__F-del_DSCav1_mut8 (opt11)
gggagagucccgcagucggcguccagcggcucugcuuguucgugugugugucguugcaggccuuauucaagcuuaccauggaacuccccauccuaaaaaccaacgcaaucaccaccauccucgccgccguaacacucugcuuugcaagcucccaaaacaucaccgaagaauuuuaccaaucuaccugcagcgccguaucuaaaggauaccuaggagcccucagaaccgguugguacaccucugucaucacaauagaacucuccaacaucaaagaaaucaaaugcaacggcaccgacgccaaagucaaacucaucaaacaagaacucgacaaauauaaaaacgccguaaccgaccuccaacuccucaugcaauccacccccgccgccggcaguggcuccgcuaucgccuccggaaucgccguuugcaaaguccugcaccuagaaggcgaagucaacaaaaucaaaaacgcccugcucucaaccaacaaagcugucguaagccucuccggcugcggagucuccguccuuaccuucaaaguacucgaccuuaaaaacuacaucgacaaacaacuucuccccauacucaauaaacaauccugcuccauacccaacaucgaaacagucaucgaguuccaacagaaaaauaaccgccuccucgaaauaacccgcgaguucuccgucaacgcaggcgucaccaccccagucuccaccuacaugcugacaaacuccgaacuccuaucccucaucaacgacaugcccaucaccaacgaccaaaagaaacucaugagcaauaacguccaaaucguacgacaacaauccuacagcaucauguguaucaucaaagaagaaguacucgccuacgucguccaacucccacuauacggcgucaucgacacaccaugcuggaaacuucacaccuccccacucugcaccacaaacacaaaagaaggcuccaacaucugccuuacccgaaccgaccgcgggugguacugcgacaacgccggaucagucucguucuuuccccaagccgaaaccugcaaaguacaaucaaaucgcgucuucugcgacaccaugaacuccuuaacacuaccauccgaaguaaaccucugcaacauagacaucuucaacccaaaauacgacugcaaaaucaugaccuccaaaaccgacguauccuccuccguaaucaccagccucggcgcaauagucucaugcuacggcaaaaccaaaugcaccgccuccaacaaaugccgcggcaucauaaaaacuuucucuaacggaugcgacuacgucagcaacaaaggcgucgacaccguauccguagguaauacacuuuacuacgucaauaaacaagaaggccaaucccucuacgucaaaggagaacccaucauaaacuucuacgacccccucgucuuccccuccgacgaguucgacgccuccaucagccaggucaacgaaaagaucaaccaaucacucgccuucauccgcaaaagcgacgaacuccuccacaacguaaacgucggcaaauccacaaccaacauaaugaucaccacuaucaucaucgugauaaucgucauuuuacuucuccucaucgccguaggccucuuccuauacugcaaagcccgcuaaggacuaguggaagcauuuuccuggcugauuaaaagaaauuacucagcuauggucaucuguuccuguuagaaggcuaugcagcauauuauauacuaugcgcauguuaugaaaugcauaauaaaaaauuuuaaaaaaucuaaaagaucuaaaaaaaaaaaaaaaaaaaaaaaaaaaaaaaaaaaaaaaaaaaaaaaaaaaaaaaaaaaaaaaaugcaucccccccccccccccccccccccccccccccaaaggcucuuuucagagccaccagaauu

SEQ ID NO: 19636 - RNA, 1997 nt, Artificial Sequence
  mRNA product Design d-5 comprising derived and/or modified sequence from HRSV(Memphis-37)__AIY60640.1__F-del_DSCav1_mut8 (opt1)
gggagagggcgcuuggcuugcaaggacccugagcugcggcauugaagcacacccaacccaacucgacugaagucagccucacugaaccggaucugagaaucuucucucucugggcuugccagggcucuccgaaccuagcuagcauccucuucaauuccaacuagaaagcuuaccauggagcugcccauccucaagaccaacgccaucaccacgauccuggccgcggugacccugugcuucgccagcucccagaacaucaccgaggaguucuaccagagcacgugcuccgccgucagcaagggcuaccucggcgcccugcgcaccgggugguacaccagcgugaucaccaucgagcuguccaacaucaaggagaucaagugcaacggcaccgacgccaaggugaagcucaucaagcaggagcuggacaaguacaagaacgcggucacggaccugcagcuccugaugcagagcaccccggccgccggcuccgggagcgcgaucgccuccggcaucgccgucugcaaggugcugcaccucgagggcgaggugaacaagaucaagaacgcccugcuguccaccaacaaggccgucgugagccucuccggcugcggggugagcguccugaccuucaaggugcuggaccucaagaacuacaucgacaagcagcugcugcccauccugaacaagcagagcugcuccauccccaacaucgagaccgucaucgaguuccagcagaagaacaaccgccuccuggagaucacgcgggaguucagcgugaacgcgggcgugaccacccccgucuccaccuacaugcugacgaacagcgagcuccugucccugaucaacgacaugccgaucaccaacgaccagaagaagcucaugagcaacaacgugcagaucgugcgccagcaguccuacagcaucaugugcaucaucaaggaggagguccuggccuacguggugcagcugccccucuacggggucaucgacacccccugcuggaagcugcacaccagcccccugugcacgaccaacaccaaggagggcuccaacaucugccucacccggacggaccgcgggugguacugcgacaacgccggcagcguguccuucuucccgcaggccgagaccugcaagguccagagcaaccggguguucugcgacaccaugaacucccugacccugcccagcgaggugaaccucugcaacaucgacaucuucaaccccaaguacgacugcaagaucaugacguccaagaccgacgucagcuccagcgugaucaccucccugggcgccaucgugagcugcuacgggaagaccaagugcacggcgagcaacaagugccgcggcaucaucaagaccuucuccaacgggugcgacuacgucagcaacaagggcguggacaccguguccgucggcaacacccuguacuacgugaacaagcaggagggccagagccucuacgugaagggggagcccaucaucaacuucuacgacccgcuggucuuccccuccgacgaguucgacgccagcaucucccaggugaacgagaagaucaaccagagccuggccuucauccggaaguccgacgagcuccugcacaacgugaacgucggcaagagcaccacgaacaucaugaucaccaccaucaucaucgugaucaucgugauccugcugcuccugaucgccgucgggcuguuccucuacugcaaggcccgcugaggacuaguggaagcauuuuccuggcugauuaaaagaaauuacucagcuauggucaucuguuccuguuagaaggcuaugcagcauauuauauacuaugcgcauguuaugaaaugcauaauaaaaaauuuuaaaaaaucuaaaagaucuaaaaaaaaaaaaaaaaaaaaaaaaaaaaaaaaaaaaaaaaaaaaaaaaaaaaaaaaaaaaaaaaugcaucccccccccccccccccccccccccccccccaaaggcucuuuucagagccaccagaauu

SEQ ID NO: 19637 - RNA, 1997 nt, Artificial Sequence
  mRNA product Design d-5 comprising derived and/or modified sequence from HRSV(Memphis-37)__AIY60640.1__F-del_DSCav1_mut8 (opt1)
gggagagggcgcuuggcuugcaaggacccugagcugcggcauugaagcacacccaacccaacucgacugaagucagccucacugaaccggaucugagaaucuucucucucugggcuugccagggcucuccgaaccuagcuagcauccucuucaauuccaacuagaaagcuuaccauggagcugcccauccucaagaccaacgccaucaccacgauccuggccgcggugacccugugcuucgccagcucccagaacaucaccgaggaguucuaccagagcacgugcuccgccgucagcaagggcuaccucggggcccugcgcaccggcugguacaccuccgugaucaccaucgagcugagcaacaucaaggagaucaagugcaacgggaccgacgccaaggugaagcucaucaagcaggagcuggacaaguacaagaacgcggucacggaccugcagcuccugaugcaguccaccccggccgccggcagcggguccgccaucgcgagcggcaucgccgugugcaaggugcugcaccucgagggcgaggucaacaagaucaagaacgcccugcuguccaccaacaaggccguggugagccucuccgggugcggcgucagcgugcugaccuucaaggugcuggaccucaagaacuacaucgacaagcagcugcugcccauccucaacaagcaguccugcagcauccccaacaucgagacggucaucgaguuccagcagaagaacaaccggcugcuggagaucacccgcgaguucuccgugaacgccggggugaccacccccgucagcacguacaugcucaccaacuccgagcugcugagccucaucaacgacaugccgaucaccaacgaccagaagaagcugaugagcaacaacgugcagaucgugcggcagcaguccuacagcaucaugugcaucaucaaggaggagguccuggcguacguggugcagcucccccuguacggcgucaucgacacccccugcuggaagcugcacacgagcccccucugcaccaccaacaccaaggagggguccaacaucugccugacgcgcaccgaccggggcugguacugcgacaacgccggcuccgugagcuucuucccgcaggccgagaccugcaaggugcaguccaaccgcgucuucugcgacaccaugaacagccugacgcuccccuccgaggugaaccugugcaacaucgacaucuucaaccccaaguacgacugcaagaucaugaccagcaagaccgacgucuccagcuccgugaucaccagccugggggccaucguguccugcuacggcaagacgaagugcaccgccagcaacaagugccgggggaucaucaagaccuucuccaacggcugcgacuacgucagcaacaagggcguggacaccguguccgucgggaacacgcucuacuacgugaacaagcaggagggccagagccuguacgugaagggggagcccaucaucaacuucuacgacccgcuggucuuccccagcgacgaguucgacgcguccaucagccaggugaacgagaagaucaaccagucccucgccuucauccgcaagagcgacgagcugcugcacaacgugaacgucggcaaguccaccaccaacaucaugaucaccaccaucaucaucgugaucaucgugauccuccugcugcucaucgccgucgggcuguuccuguacugcaaggcccggugaggacuaguggaagcauuuuccuggcugauuaaaagaaauuacucagcuauggucaucuguuccuguuagaaggcuaugcagcauauuauauacuaugcgcauguuaugaaaugcauaauaaaaaauuuuaaaaaaucuaaaagaucuaaaaaaaaaaaaaaaaaaaaaaaaaaaaaaaaaaaaaaaaaaaaaaaaaaaaaaaaaaaaaaaaugcaucccccccccccccccccccccccccccccccaaaggcucuuuucagagccaccagaauu

SEQ ID NO: 19638 - RNA, 1997 nt, Artificial Sequence
  mRNA product Design d-5 comprising derived and/or modified sequence from HRSV(Memphis-37)__AIY60640.1__F-del_DSCav1_mut8 (opt2)
gggagagggcgcuuggcuugcaaggacccugagcugcggcauugaagcacacccaacccaacucgacugaagucagccucacugaaccggaucugagaaucuucucucucugggcuugccagggcucuccgaaccuagcuagcauccucuucaauuccaacuagaaagcuuaccauggagcuccccauccucaagaccaacgccaucaccaccauccucgccgccgucacccucugcuucgccuccucccagaacaucaccgaggaguucuaccaguccaccugcuccgccgucuccaagggcuaccucggcgcccuccgcaccggcugguacaccuccgucaucaccaucgagcucuccaacaucaaggagaucaagugcaacggcaccgacgccaaggucaagcucaucaagcaggagcucgacaaguacaagaacgccgucaccgaccuccagcuccucaugcaguccacccccgccgccggcuccggcuccgccaucgccuccggcaucgccgucugcaagguccuccaccucgagggcgaggucaacaagaucaagaacgcccuccucuccaccaacaaggccgucgucucccucuccggcugcggcgucuccguccucaccuucaagguccucgaccucaagaacuacaucgacaagcagcuccuccccauccucaacaagcaguccugcuccauccccaacaucgagaccgucaucgaguuccagcagaagaacaaccgccuccucgagaucacccgcgaguucuccgucaacgccggcgucaccacccccgucuccaccuacaugcucaccaacuccgagcuccucucccucaucaacgacaugcccaucaccaacgaccagaagaagcucauguccaacaacguccagaucguccgccagcaguccuacuccaucaugugcaucaucaaggaggagguccucgccuacgucguccagcucccccucuacggcgucaucgacacccccugcuggaagcuccacaccuccccccucugcaccaccaacaccaaggagggcuccaacaucugccucacccgcaccgaccgcggcugguacugcgacaacgccggcuccgucuccuucuucccccaggccgagaccugcaagguccaguccaaccgcgucuucugcgacaccaugaacucccucacccuccccuccgaggucaaccucugcaacaucgacaucuucaaccccaaguacgacugcaagaucaugaccuccaagaccgacgucuccuccuccgucaucaccucccucggcgccaucgucuccugcuacggcaagaccaagugcaccgccuccaacaagugccgcggcaucaucaagaccuucuccaacggcugcgacuacgucuccaacaagggcgucgacaccgucuccgucggcaacacccucuacuacgucaacaagcaggagggccagucccucuacgucaagggcgagcccaucaucaacuucuacgacccccucgucuuccccuccgacgaguucgacgccuccaucucccaggucaacgagaagaucaaccagucccucgccuucauccgcaaguccgacgagcuccuccacaacgucaacgucggcaaguccaccaccaacaucaugaucaccaccaucaucaucgucaucaucgucauccuccuccuccucaucgccgucggccucuuccucuacugcaaggcccgcugaggacuaguggaagcauuuuccuggcugauuaaaagaaauuacucagcuauggucaucuguuccuguuagaaggcuaugcagcauauuauauacuaugcgcauguuaugaaaugcauaauaaaaaauuuuaaaaaaucuaaaagaucuaaaaaaaaaaaaaaaaaaaaaaaaaaaaaaaaaaaaaaaaaaaaaaaaaaaaaaaaaaaaaaaaugcaucccccccccccccccccccccccccccccccaaaggcucuuuucagagccaccagaauu

SEQ ID NO: 19639 - RNA, 1997 nt, Artificial Sequence
  mRNA product Design d-5 comprising derived and/or modified sequence from HRSV(Memphis-37)__AIY60640.1__F-del_DSCav1_mut8 (opt3)
gggagagggcgcuuggcuugcaaggacccugagcugcggcauugaagcacacccaacccaacucgacugaagucagccucacugaaccggaucugagaaucuucucucucugggcuugccagggcucuccgaaccuagcuagcauccucuucaauuccaacuagaaagcuuaccauggagcugcccauccucaagaccaacgccauuacaacuauacuugcugcagugacgcugugcuucgccagcucccagaauaucaccgaagaguuuuaccaaucuacauguucagcggucaguaaaggcuauuugggggcuuuaagaacuggaugguacaccagcguuauuacaaucgaacuguccaacauuaaggagaucaaaugcaaugguaccgacgccaaggugaaacuaauaaagcaggaacucgauaaguauaaaaacgcaguaacugaccugcagcuucugaugcagucuacuccugccgcuggcucggggucagcaaucgccagcggaauugcuguguguaaggucuugcaccucgagggcgaggugaauaaaaucaagaacgcccugcugaguaccaauaaagcgguugugucccucucugguugcggggucagcguguuaacguucaagguacuggaucuuaagaacuacauugacaaacaauugcugccaauccuaaauaagcaguccuguucaauaccgaacauugaaacuguuaucgaguuucagcagaaaaauaacaggcuccuggaaauuacccgggaguucagugugaaugcaggagucacaacucccgugagcaccuauaugcuuacaaacucugagcuguugucccucaucaaugauaugccuaucaccaacgaccaaaagaaacugaugucaaacaaugugcagauuguccgccagcagagcuacaguauaaugugcaucauuaaggaagagguuuuagccuaugugguacaacugccacucuacggcgugaucgauacgcccuguuggaaacuucauacuucuccucugugcacaaccaacacuaaggaaggcuccaauauauguuugacacgaaccgaccgugggugguacugcgauaacgcuggaagcgucucguuuuucccacaggccgagacguguaaggugcagucuaauagaguuuucugcgacaccaugaacucccuaacacugcccucagaagugaaucucugcaacauugauaucuucaauccuaaauaugacuguaagaucaugacaaguaaaaccgaugucagcuccucugugauuacaagccugggugcaaucguaucaugcuacggcaagacuaaauguaccgcuaguaacaagugcagggggauuauaaagacauuuuccaauggaugugacuauguuagcaacaaaggcguggacaccgucucuguggguaauacucuuuacuaugucaacaagcaagaggggcagucacuguacgugaaaggagagccaaucauuaauuucuaugauccguugguuuuucccagugacgaauuugaugccagcaucucccaggugaacgagaagaucaaccagucucucgcguuuauucggaaaucggacgaacuguuacacaauguaaacgucggcaagagcacgacaaauauaaugaucaccacuauuaucauugugaucauaguuauccugcuacuccugauugccgugggccuuuucuuguacugcaaggcacgcugaggacuaguggaagcauuuuccuggcugauuaaaagaaauuacucagcuauggucaucuguuccuguuagaaggcuaugcagcauauuauauacuaugcgcauguuaugaaaugcauaauaaaaaauuuuaaaaaaucuaaaagaucuaaaaaaaaaaaaaaaaaaaaaaaaaaaaaaaaaaaaaaaaaaaaaaaaaaaaaaaaaaaaaaaaugcaucccccccccccccccccccccccccccccccaaaggcucuuuucagagccaccagaauu

SEQ ID NO: 19640 - RNA, 1997 nt, Artificial Sequence
  mRNA product Design d-5 comprising derived and/or modified sequence from HRSV(Memphis-37)__AIY60640.1__F-del_DSCav1_mut8 (opt4)
gggagagggcgcuuggcuugcaaggacccugagcugcggcauugaagcacacccaacccaacucgacugaagucagccucacugaaccggaucugagaaucuucucucucugggcuugccagggcucuccgaaccuagcuagcauccucuucaauuccaacuagaaagcuuaccauggagcugcccauccugaagaccaacgccaucaccaccauccuggccgccgugacccugugcuucgccagcagccagaacaucaccgaggaguucuaccagagcaccugcagcgccgugagcaagggcuaccugggcgcccugagaaccggcugguacaccagcgugaucaccaucgagcugagcaacaucaaggagaucaagugcaacggcaccgacgccaaggugaagcugaucaagcaggagcuggacaaguacaagaacgccgugaccgaccugcagcugcugaugcagagcacccccgccgccggcagcggcagcgccaucgccagcggcaucgccgugugcaaggugcugcaccuggagggcgaggugaacaagaucaagaacgcccugcugagcaccaacaaggccguggugagccugagcggcugcggcgugagcgugcugaccuucaaggugcuggaccugaagaacuacaucgacaagcagcugcugcccauccugaacaagcagagcugcagcauccccaacaucgagaccgugaucgaguuccagcagaagaacaacagacugcuggagaucaccagagaguucagcgugaacgccggcgugaccacccccgugagcaccuacaugcugaccaacagcgagcugcugagccugaucaacgacaugcccaucaccaacgaccagaagaagcugaugagcaacaacgugcagaucgugagacagcagagcuacagcaucaugugcaucaucaaggaggaggugcuggccuacguggugcagcugccccuguacggcgugaucgacacccccugcuggaagcugcacaccagcccccugugcaccaccaacaccaaggagggcagcaacaucugccugaccagaaccgacagaggcugguacugcgacaacgccggcagcgugagcuucuucccccaggccgagaccugcaaggugcagagcaacagaguguucugcgacaccaugaacagccugacccugcccagcgaggugaaccugugcaacaucgacaucuucaaccccaaguacgacugcaagaucaugaccagcaagaccgacgugagcagcagcgugaucaccagccugggcgccaucgugagcugcuacggcaagaccaagugcaccgccagcaacaagugcagaggcaucaucaagaccuucagcaacggcugcgacuacgugagcaacaagggcguggacaccgugagcgugggcaacacccuguacuacgugaacaagcaggagggccagagccuguacgugaagggcgagcccaucaucaacuucuacgacccccugguguuccccagcgacgaguucgacgccagcaucagccaggugaacgagaagaucaaccagagccuggccuucaucagaaagagcgacgagcugcugcacaacgugaacgugggcaagagcaccaccaacaucaugaucaccaccaucaucaucgugaucaucgugauccugcugcugcugaucgccgugggccuguuccuguacugcaaggccagaugaggacuaguggaagcauuuuccuggcugauuaaaagaaauuacucagcuauggucaucuguuccuguuagaaggcuaugcagcauauuauauacuaugcgcauguuaugaaaugcauaauaaaaaauuuuaaaaaaucuaaaagaucuaaaaaaaaaaaaaaaaaaaaaaaaaaaaaaaaaaaaaaaaaaaaaaaaaaaaaaaaaaaaaaaaugcaucccccccccccccccccccccccccccccccaaaggcucuuuucagagccaccagaauu

SEQ ID NO: 19641 - RNA, 1997 nt, Artificial Sequence
  mRNA product Design d-5 comprising derived and/or modified sequence from HRSV(Memphis-37)__AIY60640.1__F-del_DSCav1_mut8 (opt5)
gggagagggcgcuuggcuugcaaggacccugagcugcggcauugaagcacacccaacccaacucgacugaagucagccucacugaaccggaucugagaaucuucucucucugggcuugccagggcucuccgaaccuagcuagcauccucuucaauuccaacuagaaagcuuaccauggagcugcccauccucaagaccaacgccauuacaacgauccuggcugccgugacccuuugcuucgcgagcucccagaauauuacagaagaguuuuaccaaucuaccuguagcgcugucuccaaaggcuaucugggggcccucagaacaggaugguacaccucuguuaucacaauugaacugagcaacaucaaggagaucaaaugcaauggcaccgacgccaaggugaaacuuauuaagcaggaacuggauaaguauaaaaacgcugugacggaccuccagcugcugaugcaguccaccccugccgcugggucuggaagcgccaucgcguccggcauugccgucuguaaggugcuccaccuggagggggagguuaauaaaaucaagaacgcccuucugagcacaaauaaagcuguggucucucucuccggaugcggcgugagcguucugaccuucaaggugcuugaucugaagaacuacauugacaaacaacuccugccgauccugaauaagcagucuuguuccauucccaacaucgaaacagucaucgaguuucagcagaaaaauaaccggcuccuggaaauuacccgcgaguucagcgugaaugcuggcgugacgacaccugucucuaccuauaugcuuacaaacuccgagcugcucagccugaucaaugauaugcccauuaccaacgaccaaaagaaacuuauguccaacaauguucagaucgugagacagcagucuuacagcauuaugugcaucaucaaggaagaggugcuggccuaugucgugcaacucccucuguacgggguuauugauacccccuguuggaaacugcauacauccccucucugcacgaccaacacaaaggaaggaagcaauaucugucugacccggacagaccgcggcugguacugcgauaacgcggggucuguguccuuuuucccgcaggccgagaccuguaagguccagagcaauagaguguuuugcgacacgaugaacucucuuacacugcccagcgaaguuaaucucugcaacauugauaucuucaauccuaaauaugacuguaagauuaugaccuccaaaaccgaugugucuagcuccgucaucacaagccugggagcuaucgugucuugcuacggcaagaccaaauguacagccuccaacaagugccgggggauuaucaagacguuuagcaauggaugugacuaugucucuaacaaaggcguggacaccguuuccgugggcaauacacuuuacuaugucaacaagcaagaggggcagagccuguacgugaaaggagagcccauuaucaauuucuaugauccucucguuuuucccuccgacgaguucgaugcuucuauuagccaggugaacgaaaagaucaaccagucccuggccuuuauucgcaaaucugacgaacugcuccacaaugucaacgugggcaagagcaccacaaauaucaugaucaccacgauuaucauugugaucauuguuauccugcuucugcucaucgccgucgggcuguuccuguacugcaaggcuagaugaggacuaguggaagcauuuuccuggcugauuaaaagaaauuacucagcuauggucaucuguuccuguuagaaggcuaugcagcauauuauauacuaugcgcauguuaugaaaugcauaauaaaaaauuuuaaaaaaucuaaaagaucuaaaaaaaaaaaaaaaaaaaaaaaaaaaaaaaaaaaaaaaaaaaaaaaaaaaaaaaaaaaaaaaaugcaucccccccccccccccccccccccccccccccaaaggcucuuuucagagccaccagaauu
